United States Patent Application Publication US 2014/0004565 A1 - sequence listing, part 7

SEQ ID NO: 36387 - RNA, 19 nt, Artificial Sequence
  Description of Artificial Sequence: Synthetic oligonucleotide
cucccaugccuccaugagc

SEQ ID NO: 36388 - RNA, 19 nt, Artificial Sequence
  Description of Artificial Sequence: Synthetic oligonucleotide
accagaggaguucaacuua

SEQ ID NO: 36389 - RNA, 19 nt, Artificial Sequence
  Description of Artificial Sequence: Synthetic oligonucleotide
ggaugcaauuaguccaaag

SEQ ID NO: 36390 - RNA, 19 nt, Artificial Sequence
  Description of Artificial Sequence: Synthetic oligonucleotide
ccaggcacaacuccuacag

SEQ ID NO: 36391 - RNA, 19 nt, Artificial Sequence
  Description of Artificial Sequence: Synthetic oligonucleotide
ccucauucaggcuuuauga

SEQ ID NO: 36392 - RNA, 19 nt, Artificial Sequence
  Description of Artificial Sequence: Synthetic oligonucleotide
cauguuugcccagccagug

SEQ ID NO: 36393 - RNA, 19 nt, Artificial Sequence
  Description of Artificial Sequence: Synthetic oligonucleotide
uccuacagguugaggcaug

SEQ ID NO: 36394 - RNA, 19 nt, Artificial Sequence
  Description of Artificial Sequence: Synthetic oligonucleotide
ggugaaguuuggaauguug

SEQ ID NO: 36395 - RNA, 19 nt, Artificial Sequence
  Description of Artificial Sequence: Synthetic oligonucleotide
cagauagggucucguacug

SEQ ID NO: 36396 - RNA, 19 nt, Artificial Sequence
  Description of Artificial Sequence: Synthetic oligonucleotide
gaaggauaacgacuuugcu

SEQ ID NO: 36397 - RNA, 19 nt, Artificial Sequence
  Description of Artificial Sequence: Synthetic oligonucleotide
cagaugaccucaacccuuc

SEQ ID NO: 36398 - RNA, 19 nt, Artificial Sequence
  Description of Artificial Sequence: Synthetic oligonucleotide
aaacuggcuccaggcgugg

SEQ ID NO: 36399 - RNA, 19 nt, Artificial Sequence
  Description of Artificial Sequence: Synthetic oligonucleotide
gaucacgucuaugaaguua

SEQ ID NO: 36400 - RNA, 19 nt, Artificial Sequence
  Description of Artificial Sequence: Synthetic oligonucleotide
gauuuagacuuccggcugu

SEQ ID NO: 36401 - RNA, 19 nt, Artificial Sequence
  Description of Artificial Sequence: Synthetic oligonucleotide
caagcuacuagaagagucu

SEQ ID NO: 36402 - RNA, 19 nt, Artificial Sequence
  Description of Artificial Sequence: Synthetic oligonucleotide
caccuugguaucugauggc

SEQ ID NO: 36403 - RNA, 19 nt, Artificial Sequence
  Description of Artificial Sequence: Synthetic oligonucleotide
agccacguucccucgcauc

SEQ ID NO: 36404 - RNA, 19 nt, Artificial Sequence
  Description of Artificial Sequence: Synthetic oligonucleotide
auggugaaguuuggaaugu

SEQ ID NO: 36405 - RNA, 19 nt, Artificial Sequence
  Description of Artificial Sequence: Synthetic oligonucleotide
auuuaaccaugggcgaugu

SEQ ID NO: 36406 - RNA, 19 nt, Artificial Sequence
  Description of Artificial Sequence: Synthetic oligonucleotide
ugccgcgugagguuguuua

SEQ ID NO: 36407 - RNA, 19 nt, Artificial Sequence
  Description of Artificial Sequence: Synthetic oligonucleotide
ucacgucuaugaaguuagc

SEQ ID NO: 36408 - RNA, 19 nt, Artificial Sequence
  Description of Artificial Sequence: Synthetic oligonucleotide
ugggacgccugacuaacuu

SEQ ID NO: 36409 - RNA, 19 nt, Artificial Sequence
  Description of Artificial Sequence: Synthetic oligonucleotide
ggugacuccugcugggacc

SEQ ID NO: 36410 - RNA, 19 nt, Artificial Sequence
  Description of Artificial Sequence: Synthetic oligonucleotide
caguuccuaaguagcuuug

SEQ ID NO: 36411 - RNA, 19 nt, Artificial Sequence
  Description of Artificial Sequence: Synthetic oligonucleotide
aucgagaaucaguccucug

SEQ ID NO: 36412 - RNA, 19 nt, Artificial Sequence
  Description of Artificial Sequence: Synthetic oligonucleotide
cuucccucggguccuuagc

SEQ ID NO: 36413 - RNA, 19 nt, Artificial Sequence
  Description of Artificial Sequence: Synthetic oligonucleotide
ccuuccccgggauuuaucc

SEQ ID NO: 36414 - RNA, 19 nt, Artificial Sequence
  Description of Artificial Sequence: Synthetic oligonucleotide
cucacuagggcuuuauaau

SEQ ID NO: 36415 - RNA, 19 nt, Artificial Sequence
  Description of Artificial Sequence: Synthetic oligonucleotide
gaccggauagucaaauuua

SEQ ID NO: 36416 - RNA, 19 nt, Artificial Sequence
  Description of Artificial Sequence: Synthetic oligonucleotide
uucucacuagggcuuuaua

SEQ ID NO: 36417 - RNA, 19 nt, Artificial Sequence
  Description of Artificial Sequence: Synthetic oligonucleotide
guguucgaauuucuggaaa

SEQ ID NO: 36418 - RNA, 19 nt, Artificial Sequence
  Description of Artificial Sequence: Synthetic oligonucleotide
ugccacuaaugagaaaaua

SEQ ID NO: 36419 - RNA, 19 nt, Artificial Sequence
  Description of Artificial Sequence: Synthetic oligonucleotide
ugguacaccuugguaucug

SEQ ID NO: 36420 - RNA, 19 nt, Artificial Sequence
  Description of Artificial Sequence: Synthetic oligonucleotide
agcgauagucagggacugc

SEQ ID NO: 36421 - RNA, 19 nt, Artificial Sequence
  Description of Artificial Sequence: Synthetic oligonucleotide
aauuaagggcaagguuaaa

SEQ ID NO: 36422 - RNA, 19 nt, Artificial Sequence
  Description of Artificial Sequence: Synthetic oligonucleotide
uacccgguccauacucugu

SEQ ID NO: 36423 - RNA, 19 nt, Artificial Sequence
  Description of Artificial Sequence: Synthetic oligonucleotide
auacacuacugaggcauga

SEQ ID NO: 36424 - RNA, 19 nt, Artificial Sequence
  Description of Artificial Sequence: Synthetic oligonucleotide
gagcgauagucagggacug

SEQ ID NO: 36425 - RNA, 19 nt, Artificial Sequence
  Description of Artificial Sequence: Synthetic oligonucleotide
cuacccgguccauacucug

SEQ ID NO: 36426 - RNA, 19 nt, Artificial Sequence
  Description of Artificial Sequence: Synthetic oligonucleotide
aaagcuugguugggcugca

SEQ ID NO: 36427 - RNA, 19 nt, Artificial Sequence
  Description of Artificial Sequence: Synthetic oligonucleotide
accaggcacaacuccuaca

SEQ ID NO: 36428 - RNA, 19 nt, Artificial Sequence
  Description of Artificial Sequence: Synthetic oligonucleotide
uccccgggauuuauccaca

SEQ ID NO: 36429 - RNA, 19 nt, Artificial Sequence
  Description of Artificial Sequence: Synthetic oligonucleotide
acggggaaucugcugcuga

SEQ ID NO: 36430 - RNA, 19 nt, Artificial Sequence
  Description of Artificial Sequence: Synthetic oligonucleotide
ccagaggaguucaacuuac

SEQ ID NO: 36431 - RNA, 19 nt, Artificial Sequence
  Description of Artificial Sequence: Synthetic oligonucleotide
cacuaggugcuucauaccu

SEQ ID NO: 36432 - RNA, 19 nt, Artificial Sequence
  Description of Artificial Sequence: Synthetic oligonucleotide
gcuugguugggcugcauca

SEQ ID NO: 36433 - RNA, 19 nt, Artificial Sequence
  Description of Artificial Sequence: Synthetic oligonucleotide
uggugguguacugcugagc

SEQ ID NO: 36434 - RNA, 19 nt, Artificial Sequence
  Description of Artificial Sequence: Synthetic oligonucleotide
cuuuaugacaggguaugua

SEQ ID NO: 36435 - RNA, 19 nt, Artificial Sequence
  Description of Artificial Sequence: Synthetic oligonucleotide
ccgggauuuauccacaaga

SEQ ID NO: 36436 - RNA, 19 nt, Artificial Sequence
  Description of Artificial Sequence: Synthetic oligonucleotide
cucguacugcgcugagagc

SEQ ID NO: 36437 - RNA, 19 nt, Artificial Sequence
  Description of Artificial Sequence: Synthetic oligonucleotide
ucugaccaacacguugaaa

SEQ ID NO: 36438 - RNA, 19 nt, Artificial Sequence
  Description of Artificial Sequence: Synthetic oligonucleotide
ggaggguaaccugaacuug

SEQ ID NO: 36439 - RNA, 19 nt, Artificial Sequence
  Description of Artificial Sequence: Synthetic oligonucleotide
gguagucuucccucggguc

SEQ ID NO: 36440 - RNA, 19 nt, Artificial Sequence
  Description of Artificial Sequence: Synthetic oligonucleotide
ggcgaugugcuuucgagcu

SEQ ID NO: 36441 - RNA, 19 nt, Artificial Sequence
  Description of Artificial Sequence: Synthetic oligonucleotide
caaguaggaugcaauuagu

SEQ ID NO: 36442 - RNA, 19 nt, Artificial Sequence
  Description of Artificial Sequence: Synthetic oligonucleotide
gguaaaaccgcagcacuaa

SEQ ID NO: 36443 - RNA, 19 nt, Artificial Sequence
  Description of Artificial Sequence: Synthetic oligonucleotide
ccuaaguagcuuugcccag

SEQ ID NO: 36444 - RNA, 19 nt, Artificial Sequence
  Description of Artificial Sequence: Synthetic oligonucleotide
aucagucgauggguccugg

SEQ ID NO: 36445 - RNA, 19 nt, Artificial Sequence
  Description of Artificial Sequence: Synthetic oligonucleotide
cacaugcgaucgguguugg

SEQ ID NO: 36446 - RNA, 19 nt, Artificial Sequence
  Description of Artificial Sequence: Synthetic oligonucleotide
auggaccggauagucaaau

SEQ ID NO: 36447 - RNA, 19 nt, Artificial Sequence
  Description of Artificial Sequence: Synthetic oligonucleotide
ccgauucucaucauaaaua

SEQ ID NO: 36448 - RNA, 19 nt, Artificial Sequence
  Description of Artificial Sequence: Synthetic oligonucleotide
gauaacgacuuugcucugu

SEQ ID NO: 36449 - RNA, 19 nt, Artificial Sequence
  Description of Artificial Sequence: Synthetic oligonucleotide
agcuacuagaagagucuga

SEQ ID NO: 36450 - RNA, 19 nt, Artificial Sequence
  Description of Artificial Sequence: Synthetic oligonucleotide
uagcuauggaccggauagu

SEQ ID NO: 36451 - RNA, 19 nt, Artificial Sequence
  Description of Artificial Sequence: Synthetic oligonucleotide
ggguccuuagcucuuccuc

SEQ ID NO: 36452 - RNA, 19 nt, Artificial Sequence
  Description of Artificial Sequence: Synthetic oligonucleotide
ugcgaucgguguugguggu

SEQ ID NO: 36453 - RNA, 19 nt, Artificial Sequence
  Description of Artificial Sequence: Synthetic oligonucleotide
gggcgaugugcuuucgagc

SEQ ID NO: 36454 - RNA, 19 nt, Artificial Sequence
  Description of Artificial Sequence: Synthetic oligonucleotide
uggaccggauagucaaauu

SEQ ID NO: 36455 - RNA, 19 nt, Artificial Sequence
  Description of Artificial Sequence: Synthetic oligonucleotide
acgccugacuaacuucaau

SEQ ID NO: 36456 - RNA, 19 nt, Artificial Sequence
  Description of Artificial Sequence: Synthetic oligonucleotide
ggcaaguagcuuauacuuc

SEQ ID NO: 36457 - RNA, 19 nt, Artificial Sequence
  Description of Artificial Sequence: Synthetic oligonucleotide
cacgcuggaaaugggcauc

SEQ ID NO: 36458 - RNA, 19 nt, Artificial Sequence
  Description of Artificial Sequence: Synthetic oligonucleotide
augguacaccuugguaucu

SEQ ID NO: 36459 - RNA, 19 nt, Artificial Sequence
  Description of Artificial Sequence: Synthetic oligonucleotide
gguaucugauggcugguua

SEQ ID NO: 36460 - RNA, 19 nt, Artificial Sequence
  Description of Artificial Sequence: Synthetic oligonucleotide
gguccccuucaucucuccg

SEQ ID NO: 36461 - RNA, 19 nt, Artificial Sequence
  Description of Artificial Sequence: Synthetic oligonucleotide
gaagagcgauagucaggga

SEQ ID NO: 36462 - RNA, 19 nt, Artificial Sequence
  Description of Artificial Sequence: Synthetic oligonucleotide
guucgaauuucuggaaacu

SEQ ID NO: 36463 - RNA, 19 nt, Artificial Sequence
  Description of Artificial Sequence: Synthetic oligonucleotide
accaacacguugaaaucuu

SEQ ID NO: 36464 - RNA, 19 nt, Artificial Sequence
  Description of Artificial Sequence: Synthetic oligonucleotide
agguaaaaccgcagcacua

SEQ ID NO: 36465 - RNA, 19 nt, Artificial Sequence
  Description of Artificial Sequence: Synthetic oligonucleotide
gguacaccuugguaucuga

SEQ ID NO: 36466 - RNA, 19 nt, Artificial Sequence
  Description of Artificial Sequence: Synthetic oligonucleotide
ugccgagugggcucauuuu

SEQ ID NO: 36467 - RNA, 19 nt, Artificial Sequence
  Description of Artificial Sequence: Synthetic oligonucleotide
cuaugaaguuagcugcagu

SEQ ID NO: 36468 - RNA, 19 nt, Artificial Sequence
  Description of Artificial Sequence: Synthetic oligonucleotide
cagugugcauaaacacuga

SEQ ID NO: 36469 - RNA, 19 nt, Artificial Sequence
  Description of Artificial Sequence: Synthetic oligonucleotide
cugcugcugcugcugcugc

SEQ ID NO: 36470 - RNA, 19 nt, Artificial Sequence
  Description of Artificial Sequence: Synthetic oligonucleotide
cuuccccgggauuuaucca

SEQ ID NO: 36471 - RNA, 19 nt, Artificial Sequence
  Description of Artificial Sequence: Synthetic oligonucleotide
gaucgagaaucaguccucu

SEQ ID NO: 36472 - RNA, 19 nt, Artificial Sequence
  Description of Artificial Sequence: Synthetic oligonucleotide
gccgagugggcucauuuuc

SEQ ID NO: 36473 - RNA, 19 nt, Artificial Sequence
  Description of Artificial Sequence: Synthetic oligonucleotide
aggggcacaugcgaucggu

SEQ ID NO: 36474 - RNA, 19 nt, Artificial Sequence
  Description of Artificial Sequence: Synthetic oligonucleotide
ggacgccugacuaacuuca

SEQ ID NO: 36475 - RNA, 19 nt, Artificial Sequence
  Description of Artificial Sequence: Synthetic oligonucleotide
uuuagacuuccggcuguuu

SEQ ID NO: 36476 - RNA, 19 nt, Artificial Sequence
  Description of Artificial Sequence: Synthetic oligonucleotide
ugcugcugcugcugcugcu

SEQ ID NO: 36477 - RNA, 19 nt, Artificial Sequence
  Description of Artificial Sequence: Synthetic oligonucleotide
agacuuccggcuguuugau

SEQ ID NO: 36478 - RNA, 19 nt, Artificial Sequence
  Description of Artificial Sequence: Synthetic oligonucleotide
auuuagacuuccggcuguu

SEQ ID NO: 36479 - RNA, 19 nt, Artificial Sequence
  Description of Artificial Sequence: Synthetic oligonucleotide
ggaccggauagucaaauuu

SEQ ID NO: 36480 - RNA, 19 nt, Artificial Sequence
  Description of Artificial Sequence: Synthetic oligonucleotide
gcgauagucagggacugca

SEQ ID NO: 36481 - RNA, 19 nt, Artificial Sequence
  Description of Artificial Sequence: Synthetic oligonucleotide
cgauagugaugcaaugguc

SEQ ID NO: 36482 - RNA, 19 nt, Artificial Sequence
  Description of Artificial Sequence: Synthetic oligonucleotide
augauccacuggugaggga

SEQ ID NO: 36483 - RNA, 19 nt, Artificial Sequence
  Description of Artificial Sequence: Synthetic oligonucleotide
cacuagggcuuuauaauuu

SEQ ID NO: 36484 - RNA, 19 nt, Artificial Sequence
  Description of Artificial Sequence: Synthetic oligonucleotide
gcacaugcgaucgguguug

SEQ ID NO: 36485 - RNA, 19 nt, Artificial Sequence
  Description of Artificial Sequence: Synthetic oligonucleotide
ggauaacgacuuugcucug

SEQ ID NO: 36486 - RNA, 19 nt, Artificial Sequence
  Description of Artificial Sequence: Synthetic oligonucleotide
agcugcugcugcugcugcu

SEQ ID NO: 36487 - RNA, 19 nt, Artificial Sequence
  Description of Artificial Sequence: Synthetic oligonucleotide
uuccuccggggauuauuuu

SEQ ID NO: 36488 - RNA, 19 nt, Artificial Sequence
  Description of Artificial Sequence: Synthetic oligonucleotide
gugagaagacaagcuacua

SEQ ID NO: 36489 - RNA, 19 nt, Artificial Sequence
  Description of Artificial Sequence: Synthetic oligonucleotide
gggacgccugacuaacuuc

SEQ ID NO: 36490 - RNA, 19 nt, Artificial Sequence
  Description of Artificial Sequence: Synthetic oligonucleotide
gaguucccuucugugcaca

SEQ ID NO: 36491 - RNA, 19 nt, Artificial Sequence
  Description of Artificial Sequence: Synthetic oligonucleotide
cacgucuaugaaguuagcu

SEQ ID NO: 36492 - RNA, 19 nt, Artificial Sequence
  Description of Artificial Sequence: Synthetic oligonucleotide
ggguaaccugaacuugaca

SEQ ID NO: 36493 - RNA, 19 nt, Artificial Sequence
  Description of Artificial Sequence: Synthetic oligonucleotide
acaugcgaucgguguuggu

SEQ ID NO: 36494 - RNA, 19 nt, Artificial Sequence
  Description of Artificial Sequence: Synthetic oligonucleotide
gcugggacgccugacuaac

SEQ ID NO: 36495 - RNA, 19 nt, Artificial Sequence
  Description of Artificial Sequence: Synthetic oligonucleotide
gccgcgugagguuguuuag

SEQ ID NO: 36496 - RNA, 19 nt, Artificial Sequence
  Description of Artificial Sequence: Synthetic oligonucleotide
gcuauggaccggauaguca

SEQ ID NO: 36497 - RNA, 19 nt, Artificial Sequence
  Description of Artificial Sequence: Synthetic oligonucleotide
cuucuagaccaagauuacu

SEQ ID NO: 36498 - RNA, 19 nt, Artificial Sequence
  Description of Artificial Sequence: Synthetic oligonucleotide
gggaccgauagugaugcaa

SEQ ID NO: 36499 - RNA, 19 nt, Artificial Sequence
  Description of Artificial Sequence: Synthetic oligonucleotide
cuaucagauagggucucgu

SEQ ID NO: 36500 - RNA, 19 nt, Artificial Sequence
  Description of Artificial Sequence: Synthetic oligonucleotide
cuggcagcgugugaacuaa

SEQ ID NO: 36501 - RNA, 19 nt, Artificial Sequence
  Description of Artificial Sequence: Synthetic oligonucleotide
ugggaccgauagugaugca

SEQ ID NO: 36502 - RNA, 19 nt, Artificial Sequence
  Description of Artificial Sequence: Synthetic oligonucleotide
ggucucguacugcgcugag

SEQ ID NO: 36503 - RNA, 19 nt, Artificial Sequence
  Description of Artificial Sequence: Synthetic oligonucleotide
gaacuuugagagccacguu

SEQ ID NO: 36504 - RNA, 19 nt, Artificial Sequence
  Description of Artificial Sequence: Synthetic oligonucleotide
gcugcugcugcugcugcug

SEQ ID NO: 36505 - RNA, 19 nt, Artificial Sequence
  Description of Artificial Sequence: Synthetic oligonucleotide
aggaugcaauuaguccaaa

SEQ ID NO: 36506 - RNA, 19 nt, Artificial Sequence
  Description of Artificial Sequence: Synthetic oligonucleotide
cauacccaugcaguaauuu

SEQ ID NO: 36507 - RNA, 19 nt, Artificial Sequence
  Description of Artificial Sequence: Synthetic oligonucleotide
aucucucgaucuacccggu

SEQ ID NO: 36508 - RNA, 19 nt, Artificial Sequence
  Description of Artificial Sequence: Synthetic oligonucleotide
cagucgucacuaucagaua

SEQ ID NO: 36509 - RNA, 19 nt, Artificial Sequence
  Description of Artificial Sequence: Synthetic oligonucleotide
acauacccaugcaguaauu

SEQ ID NO: 36510 - RNA, 19 nt, Artificial Sequence
  Description of Artificial Sequence: Synthetic oligonucleotide
ccgauagugaugcaauggu

SEQ ID NO: 36511 - RNA, 19 nt, Artificial Sequence
  Description of Artificial Sequence: Synthetic oligonucleotide
ugcugcugcugcugcuguu

SEQ ID NO: 36512 - RNA, 19 nt, Artificial Sequence
  Description of Artificial Sequence: Synthetic oligonucleotide
cguacugcgcugagagcag

SEQ ID NO: 36513 - RNA, 19 nt, Artificial Sequence
  Description of Artificial Sequence: Synthetic oligonucleotide
gucucguacugcgcugaga

SEQ ID NO: 36514 - RNA, 19 nt, Artificial Sequence
  Description of Artificial Sequence: Synthetic oligonucleotide
gacgccugacuaacuucaa

SEQ ID NO: 36515 - RNA, 19 nt, Artificial Sequence
  Description of Artificial Sequence: Synthetic oligonucleotide
gccguucaguuccuaagua

SEQ ID NO: 36516 - RNA, 19 nt, Artificial Sequence
  Description of Artificial Sequence: Synthetic oligonucleotide
ccaugggcgaugugcuuuc

SEQ ID NO: 36517 - RNA, 19 nt, Artificial Sequence
  Description of Artificial Sequence: Synthetic oligonucleotide
auacuacagcaaggggaua

SEQ ID NO: 36518 - RNA, 19 nt, Artificial Sequence
  Description of Artificial Sequence: Synthetic oligonucleotide
ggaccgauagugaugcaau

SEQ ID NO: 36519 - RNA, 19 nt, Artificial Sequence
  Description of Artificial Sequence: Synthetic oligonucleotide
ugugccgcgugagguuguu

SEQ ID NO: 36520 - RNA, 19 nt, Artificial Sequence
  Description of Artificial Sequence: Synthetic oligonucleotide
cucccaaaugcgguucugu

SEQ ID NO: 36521 - RNA, 19 nt, Artificial Sequence
  Description of Artificial Sequence: Synthetic oligonucleotide
cuguguaacugugccgcgu

SEQ ID NO: 36522 - RNA, 19 nt, Artificial Sequence
  Description of Artificial Sequence: Synthetic oligonucleotide
cagguucccucucccaaau

SEQ ID NO: 36523 - RNA, 19 nt, Artificial Sequence
  Description of Artificial Sequence: Synthetic oligonucleotide
ggcacaugcgaucgguguu

SEQ ID NO: 36524 - RNA, 19 nt, Artificial Sequence
  Description of Artificial Sequence: Synthetic oligonucleotide
ggaacugaguagagccugu

SEQ ID NO: 36525 - RNA, 19 nt, Artificial Sequence
  Description of Artificial Sequence: Synthetic oligonucleotide
cgguccauacucuguauua

SEQ ID NO: 36526 - RNA, 19 nt, Artificial Sequence
  Description of Artificial Sequence: Synthetic oligonucleotide
cugccgagugggcucauuu

SEQ ID NO: 36527 - RNA, 19 nt, Artificial Sequence
  Description of Artificial Sequence: Synthetic oligonucleotide
caaaugcgguucuguugau

SEQ ID NO: 36528 - RNA, 19 nt, Artificial Sequence
  Description of Artificial Sequence: Synthetic oligonucleotide
ccgcagcacuaacacgcug

SEQ ID NO: 36529 - RNA, 19 nt, Artificial Sequence
  Description of Artificial Sequence: Synthetic oligonucleotide
gggcucauagggcucugau

SEQ ID NO: 36530 - RNA, 19 nt, Artificial Sequence
  Description of Artificial Sequence: Synthetic oligonucleotide
gauggccgaaggggcacau

SEQ ID NO: 36531 - RNA, 19 nt, Artificial Sequence
  Description of Artificial Sequence: Synthetic oligonucleotide
cugcugcugcugcugcugu

SEQ ID NO: 36532 - RNA, 19 nt, Artificial Sequence
  Description of Artificial Sequence: Synthetic oligonucleotide
aggccuuccccgggauuua

SEQ ID NO: 36533 - RNA, 19 nt, Artificial Sequence
  Description of Artificial Sequence: Synthetic oligonucleotide
cuguagcgacuugauguuu

SEQ ID NO: 36534 - RNA, 19 nt, Artificial Sequence
  Description of Artificial Sequence: Synthetic oligonucleotide
ccgcgugagguuguuuaga

SEQ ID NO: 36535 - RNA, 19 nt, Artificial Sequence
  Description of Artificial Sequence: Synthetic oligonucleotide
gccuuccccgggauuuauc

SEQ ID NO: 36536 - RNA, 19 nt, Artificial Sequence
  Description of Artificial Sequence: Synthetic oligonucleotide
ccgaaggggcacaugcgau

SEQ ID NO: 36537 - RNA, 19 nt, Artificial Sequence
  Description of Artificial Sequence: Synthetic oligonucleotide
ccaggcguggccgcuugga

SEQ ID NO: 36538 - RNA, 19 nt, Artificial Sequence
  Description of Artificial Sequence: Synthetic oligonucleotide
cgucacuaucagauagggu

SEQ ID NO: 36539 - RNA, 19 nt, Artificial Sequence
  Description of Artificial Sequence: Synthetic oligonucleotide
cucgaucuacccgguccau

SEQ ID NO: 36540 - RNA, 19 nt, Artificial Sequence
  Description of Artificial Sequence: Synthetic oligonucleotide
cguucccucgcauccuugu

SEQ ID NO: 36541 - RNA, 19 nt, Artificial Sequence
  Description of Artificial Sequence: Synthetic oligonucleotide
gcgaugugcuuucgagcuu

SEQ ID NO: 36542 - RNA, 19 nt, Artificial Sequence
  Description of Artificial Sequence: Synthetic oligonucleotide
ggcugcgaggaaacuugau

SEQ ID NO: 36543 - RNA, 19 nt, Artificial Sequence
  Description of Artificial Sequence: Synthetic oligonucleotide
ccgguccauacucuguauu

SEQ ID NO: 36544 - RNA, 19 nt, Artificial Sequence
  Description of Artificial Sequence: Synthetic oligonucleotide
ggucgucuucgaagcugcu

SEQ ID NO: 36545 - RNA, 19 nt, Artificial Sequence
  Description of Artificial Sequence: Synthetic oligonucleotide
cccucgcauccuuguccga

SEQ ID NO: 36546 - RNA, 19 nt, Artificial Sequence
  Description of Artificial Sequence: Synthetic oligonucleotide
gugccgcgugagguuguuu

SEQ ID NO: 36547 - RNA, 19 nt, Artificial Sequence
  Description of Artificial Sequence: Synthetic oligonucleotide
ccgaggcaauuugccgggu

SEQ ID NO: 36548 - RNA, 19 nt, Artificial Sequence
  Description of Artificial Sequence: Synthetic oligonucleotide
uguauugugauuuauauag

SEQ ID NO: 36549 - RNA, 19 nt, Artificial Sequence
  Description of Artificial Sequence: Synthetic oligonucleotide
aauauuaccguucucagca

SEQ ID NO: 36550 - RNA, 19 nt, Artificial Sequence
  Description of Artificial Sequence: Synthetic oligonucleotide
aaagcgaaaacaaauuacc

SEQ ID NO: 36551 - RNA, 19 nt, Artificial Sequence
  Description of Artificial Sequence: Synthetic oligonucleotide
ucaucuaugauaaaucuca

SEQ ID NO: 36552 - RNA, 19 nt, Artificial Sequence
  Description of Artificial Sequence: Synthetic oligonucleotide
cuuaccauaaccucaaaag

SEQ ID NO: 36553 - RNA, 19 nt, Artificial Sequence
  Description of Artificial Sequence: Synthetic oligonucleotide
aaacgugaaauacaucccg

SEQ ID NO: 36554 - RNA, 19 nt, Artificial Sequence
  Description of Artificial Sequence: Synthetic oligonucleotide
aaagaucuaggcaauaagg

SEQ ID NO: 36555 - RNA, 19 nt, Artificial Sequence
  Description of Artificial Sequence: Synthetic oligonucleotide
augagauacagccaggcac

SEQ ID NO: 36556 - RNA, 19 nt, Artificial Sequence
  Description of Artificial Sequence: Synthetic oligonucleotide
uuauacgcaccccagaaag

SEQ ID NO: 36557 - RNA, 19 nt, Artificial Sequence
  Description of Artificial Sequence: Synthetic oligonucleotide
aaucuaaucgaccccauca

SEQ ID NO: 36558 - RNA, 19 nt, Artificial Sequence
  Description of Artificial Sequence: Synthetic oligonucleotide
aauaagguacacuaggcaa

SEQ ID NO: 36559 - RNA, 19 nt, Artificial Sequence
  Description of Artificial Sequence: Synthetic oligonucleotide
aacaaugucgaauagcuua

SEQ ID NO: 36560 - RNA, 19 nt, Artificial Sequence
  Description of Artificial Sequence: Synthetic oligonucleotide
uguacuacgugacugcaag

SEQ ID NO: 36561 - RNA, 19 nt, Artificial Sequence
  Description of Artificial Sequence: Synthetic oligonucleotide
uuacuuguaaucuaaucga

SEQ ID NO: 36562 - RNA, 19 nt, Artificial Sequence
  Description of Artificial Sequence: Synthetic oligonucleotide
ugucgaauagcuuaucacc

SEQ ID NO: 36563 - RNA, 19 nt, Artificial Sequence
  Description of Artificial Sequence: Synthetic oligonucleotide
uguuuaagacaccacagcu

SEQ ID NO: 36564 - RNA, 19 nt, Artificial Sequence
  Description of Artificial Sequence: Synthetic oligonucleotide
aagucggcuuucuugacac

SEQ ID NO: 36565 - RNA, 19 nt, Artificial Sequence
  Description of Artificial Sequence: Synthetic oligonucleotide
aauaacuuggguguuauaa

SEQ ID NO: 36566 - RNA, 19 nt, Artificial Sequence
  Description of Artificial Sequence: Synthetic oligonucleotide
aaggcuaacauacuuuccu

SEQ ID NO: 36567 - RNA, 19 nt, Artificial Sequence
  Description of Artificial Sequence: Synthetic oligonucleotide
ugcugauucaugcacgggg

SEQ ID NO: 36568 - RNA, 19 nt, Artificial Sequence
  Description of Artificial Sequence: Synthetic oligonucleotide
uuaccauaaccucaaaaga

SEQ ID NO: 36569 - RNA, 19 nt, Artificial Sequence
  Description of Artificial Sequence: Synthetic oligonucleotide
auucgcuugaucuguaaac

SEQ ID NO: 36570 - RNA, 19 nt, Artificial Sequence
  Description of Artificial Sequence: Synthetic oligonucleotide
uguaacguaauuuuguguu

SEQ ID NO: 36571 - RNA, 19 nt, Artificial Sequence
  Description of Artificial Sequence: Synthetic oligonucleotide
uguaauuauccguagcaga

SEQ ID NO: 36572 - RNA, 19 nt, Artificial Sequence
  Description of Artificial Sequence: Synthetic oligonucleotide
uccguaaacacguauguac

SEQ ID NO: 36573 - RNA, 19 nt, Artificial Sequence
  Description of Artificial Sequence: Synthetic oligonucleotide
aaugucgaauagcuuauca

SEQ ID NO: 36574 - RNA, 19 nt, Artificial Sequence
  Description of Artificial Sequence: Synthetic oligonucleotide
auauacucauuacagauau

SEQ ID NO: 36575 - RNA, 19 nt, Artificial Sequence
  Description of Artificial Sequence: Synthetic oligonucleotide
ugaauauuaccguucucag

SEQ ID NO: 36576 - RNA, 19 nt, Artificial Sequence
  Description of Artificial Sequence: Synthetic oligonucleotide
uacaaagcgacaaguagca

SEQ ID NO: 36577 - RNA, 19 nt, Artificial Sequence
  Description of Artificial Sequence: Synthetic oligonucleotide
agcuauucacaccugacag

SEQ ID NO: 36578 - RNA, 19 nt, Artificial Sequence
  Description of Artificial Sequence: Synthetic oligonucleotide
uaucuaacucuucugcaag

SEQ ID NO: 36579 - RNA, 19 nt, Artificial Sequence
  Description of Artificial Sequence: Synthetic oligonucleotide
uaaacacguauguacuacg

SEQ ID NO: 36580 - RNA, 19 nt, Artificial Sequence
  Description of Artificial Sequence: Synthetic oligonucleotide
aagugugucgcaguuacuc

SEQ ID NO: 36581 - RNA, 19 nt, Artificial Sequence
  Description of Artificial Sequence: Synthetic oligonucleotide
ugucgggucauuuucaaga

SEQ ID NO: 36582 - RNA, 19 nt, Artificial Sequence
  Description of Artificial Sequence: Synthetic oligonucleotide
augucgaauagcuuaucac

SEQ ID NO: 36583 - RNA, 19 nt, Artificial Sequence
  Description of Artificial Sequence: Synthetic oligonucleotide
ucgucaaacgauucguagg

SEQ ID NO: 36584 - RNA, 19 nt, Artificial Sequence
  Description of Artificial Sequence: Synthetic oligonucleotide
uaaugaacuccguaaacac

SEQ ID NO: 36585 - RNA, 19 nt, Artificial Sequence
  Description of Artificial Sequence: Synthetic oligonucleotide
caccauauacucauuacag

SEQ ID NO: 36586 - RNA, 19 nt, Artificial Sequence
  Description of Artificial Sequence: Synthetic oligonucleotide
cuaaucgaccccaucaaag

SEQ ID NO: 36587 - RNA, 19 nt, Artificial Sequence
  Description of Artificial Sequence: Synthetic oligonucleotide
uguuaagaugcaauuuugu

SEQ ID NO: 36588 - RNA, 19 nt, Artificial Sequence
  Description of Artificial Sequence: Synthetic oligonucleotide
augucgcugagacauuucc

SEQ ID NO: 36589 - RNA, 19 nt, Artificial Sequence
  Description of Artificial Sequence: Synthetic oligonucleotide
ugacaacgaucucugaucc

SEQ ID NO: 36590 - RNA, 19 nt, Artificial Sequence
  Description of Artificial Sequence: Synthetic oligonucleotide
gaacgaugugccuaguaag

SEQ ID NO: 36591 - RNA, 19 nt, Artificial Sequence
  Description of Artificial Sequence: Synthetic oligonucleotide
aauuauccguagcagaaua

SEQ ID NO: 36592 - RNA, 19 nt, Artificial Sequence
  Description of Artificial Sequence: Synthetic oligonucleotide
uggauauacauuuaccaua

SEQ ID NO: 36593 - RNA, 19 nt, Artificial Sequence
  Description of Artificial Sequence: Synthetic oligonucleotide
aaacgauucguaggguggc

SEQ ID NO: 36594 - RNA, 19 nt, Artificial Sequence
  Description of Artificial Sequence: Synthetic oligonucleotide
aaggcgaaccugcacaucu

SEQ ID NO: 36595 - RNA, 19 nt, Artificial Sequence
  Description of Artificial Sequence: Synthetic oligonucleotide
caaacgauucguagggugg

SEQ ID NO: 36596 - RNA, 19 nt, Artificial Sequence
  Description of Artificial Sequence: Synthetic oligonucleotide
ucaaacgauucguagggug

SEQ ID NO: 36597 - RNA, 19 nt, Artificial Sequence
  Description of Artificial Sequence: Synthetic oligonucleotide
acuuguaaucuaaucgacc

SEQ ID NO: 36598 - RNA, 19 nt, Artificial Sequence
  Description of Artificial Sequence: Synthetic oligonucleotide
gccgguaacaaauugaagc

SEQ ID NO: 36599 - RNA, 19 nt, Artificial Sequence
  Description of Artificial Sequence: Synthetic oligonucleotide
uucgucaaacgauucguag

SEQ ID NO: 36600 - RNA, 19 nt, Artificial Sequence
  Description of Artificial Sequence: Synthetic oligonucleotide
ggcaauaagguacacuagg

SEQ ID NO: 36601 - RNA, 19 nt, Artificial Sequence
  Description of Artificial Sequence: Synthetic oligonucleotide
agguacacuaggcaaguuc

SEQ ID NO: 36602 - RNA, 19 nt, Artificial Sequence
  Description of Artificial Sequence: Synthetic oligonucleotide
uauaguuuaugcgauaauu

SEQ ID NO: 36603 - RNA, 19 nt, Artificial Sequence
  Description of Artificial Sequence: Synthetic oligonucleotide
ucgugugaaaccccaauga

SEQ ID NO: 36604 - RNA, 19 nt, Artificial Sequence
  Description of Artificial Sequence: Synthetic oligonucleotide
gaauauuaccguucucagc

SEQ ID NO: 36605 - RNA, 19 nt, Artificial Sequence
  Description of Artificial Sequence: Synthetic oligonucleotide
ugucauuggaaucccuacc

SEQ ID NO: 36606 - RNA, 19 nt, Artificial Sequence
  Description of Artificial Sequence: Synthetic oligonucleotide
cuuccuauacuucaaugug

SEQ ID NO: 36607 - RNA, 19 nt, Artificial Sequence
  Description of Artificial Sequence: Synthetic oligonucleotide
ugugccgguaacaaauuga

SEQ ID NO: 36608 - RNA, 19 nt, Artificial Sequence
  Description of Artificial Sequence: Synthetic oligonucleotide
agaugagauacagccaggc

SEQ ID NO: 36609 - RNA, 19 nt, Artificial Sequence
  Description of Artificial Sequence: Synthetic oligonucleotide
uggucuacguaguaugacc

SEQ ID NO: 36610 - RNA, 19 nt, Artificial Sequence
  Description of Artificial Sequence: Synthetic oligonucleotide
caucuaugugacccgaugg

SEQ ID NO: 36611 - RNA, 19 nt, Artificial Sequence
  Description of Artificial Sequence: Synthetic oligonucleotide
gaguucgucaaacgauucg

SEQ ID NO: 36612 - RNA, 19 nt, Artificial Sequence
  Description of Artificial Sequence: Synthetic oligonucleotide
agcgaaaacaaauuaccau

SEQ ID NO: 36613 - RNA, 19 nt, Artificial Sequence
  Description of Artificial Sequence: Synthetic oligonucleotide
cacuaacacauaauaacug

SEQ ID NO: 36614 - RNA, 19 nt, Artificial Sequence
  Description of Artificial Sequence: Synthetic oligonucleotide
uuaaaugcccugucgugug

SEQ ID NO: 36615 - RNA, 19 nt, Artificial Sequence
  Description of Artificial Sequence: Synthetic oligonucleotide
ugaguguuuucaaucgcca

SEQ ID NO: 36616 - RNA, 19 nt, Artificial Sequence
  Description of Artificial Sequence: Synthetic oligonucleotide
uuguaaucuaaucgacccc

SEQ ID NO: 36617 - RNA, 19 nt, Artificial Sequence
  Description of Artificial Sequence: Synthetic oligonucleotide
uacuuguaaucuaaucgac

SEQ ID NO: 36618 - RNA, 19 nt, Artificial Sequence
  Description of Artificial Sequence: Synthetic oligonucleotide
uagcuauucacaccugaca

SEQ ID NO: 36619 - RNA, 19 nt, Artificial Sequence
  Description of Artificial Sequence: Synthetic oligonucleotide
acacccauaauucuccggu

SEQ ID NO: 36620 - RNA, 19 nt, Artificial Sequence
  Description of Artificial Sequence: Synthetic oligonucleotide
acuacagaaauucgcuuga

SEQ ID NO: 36621 - RNA, 19 nt, Artificial Sequence
  Description of Artificial Sequence: Synthetic oligonucleotide
ugcguagaaacacuguuuu

SEQ ID NO: 36622 - RNA, 19 nt, Artificial Sequence
  Description of Artificial Sequence: Synthetic oligonucleotide
agaacgaugugccuaguaa

SEQ ID NO: 36623 - RNA, 19 nt, Artificial Sequence
  Description of Artificial Sequence: Synthetic oligonucleotide
aacguaauuuuguguuuca

SEQ ID NO: 36624 - RNA, 19 nt, Artificial Sequence
  Description of Artificial Sequence: Synthetic oligonucleotide
aacgaucucugauccacca

SEQ ID NO: 36625 - RNA, 19 nt, Artificial Sequence
  Description of Artificial Sequence: Synthetic oligonucleotide
uuguaaucccuggaguagg

SEQ ID NO: 36626 - RNA, 19 nt, Artificial Sequence
  Description of Artificial Sequence: Synthetic oligonucleotide
ugaacuacucuuugguuau

SEQ ID NO: 36627 - RNA, 19 nt, Artificial Sequence
  Description of Artificial Sequence: Synthetic oligonucleotide
ucuaugugacccgauggag

SEQ ID NO: 36628 - RNA, 19 nt, Artificial Sequence
  Description of Artificial Sequence: Synthetic oligonucleotide
uuguaacguaauuuugugu

SEQ ID NO: 36629 - RNA, 19 nt, Artificial Sequence
  Description of Artificial Sequence: Synthetic oligonucleotide
guauguacuacgugacugc

SEQ ID NO: 36630 - RNA, 19 nt, Artificial Sequence
  Description of Artificial Sequence: Synthetic oligonucleotide
auaagguacacuaggcaag

SEQ ID NO: 36631 - RNA, 19 nt, Artificial Sequence
  Description of Artificial Sequence: Synthetic oligonucleotide
aggacuuaaaugcccuguc

SEQ ID NO: 36632 - RNA, 19 nt, Artificial Sequence
  Description of Artificial Sequence: Synthetic oligonucleotide
cacuaggcaaguucuacag

SEQ ID NO: 36633 - RNA, 19 nt, Artificial Sequence
  Description of Artificial Sequence: Synthetic oligonucleotide
auugaagcaagcguauucu

SEQ ID NO: 36634 - RNA, 19 nt, Artificial Sequence
  Description of Artificial Sequence: Synthetic oligonucleotide
acacuaacacauaauaacu

SEQ ID NO: 36635 - RNA, 19 nt, Artificial Sequence
  Description of Artificial Sequence: Synthetic oligonucleotide
gaauccaucgcagugaacu

SEQ ID NO: 36636 - RNA, 19 nt, Artificial Sequence
  Description of Artificial Sequence: Synthetic oligonucleotide
uuuauacgcaccccagaaa

SEQ ID NO: 36637 - RNA, 19 nt, Artificial Sequence
  Description of Artificial Sequence: Synthetic oligonucleotide
agaaauucgcuugaucugu

SEQ ID NO: 36638 - RNA, 19 nt, Artificial Sequence
  Description of Artificial Sequence: Synthetic oligonucleotide
ugugguuucggugggauuc

SEQ ID NO: 36639 - RNA, 19 nt, Artificial Sequence
  Description of Artificial Sequence: Synthetic oligonucleotide
aacuccguaaacacguaug

SEQ ID NO: 36640 - RNA, 19 nt, Artificial Sequence
  Description of Artificial Sequence: Synthetic oligonucleotide
acaucuaugugacccgaug

SEQ ID NO: 36641 - RNA, 19 nt, Artificial Sequence
  Description of Artificial Sequence: Synthetic oligonucleotide
gaaucaagacuguacaggu

SEQ ID NO: 36642 - RNA, 19 nt, Artificial Sequence
  Description of Artificial Sequence: Synthetic oligonucleotide
acgugaaauacaucccgag

SEQ ID NO: 36643 - RNA, 19 nt, Artificial Sequence
  Description of Artificial Sequence: Synthetic oligonucleotide
cuacguaguaugaccgucc

SEQ ID NO: 36644 - RNA, 19 nt, Artificial Sequence
  Description of Artificial Sequence: Synthetic oligonucleotide
uguggucuacguaguauga

SEQ ID NO: 36645 - RNA, 19 nt, Artificial Sequence
  Description of Artificial Sequence: Synthetic oligonucleotide
cuaccaugggcugacaggc

SEQ ID NO: 36646 - RNA, 19 nt, Artificial Sequence
  Description of Artificial Sequence: Synthetic oligonucleotide
acuccguaaacacguaugu

SEQ ID NO: 36647 - RNA, 19 nt, Artificial Sequence
  Description of Artificial Sequence: Synthetic oligonucleotide
uaaaggucccaggucauug

SEQ ID NO: 36648 - RNA, 19 nt, Artificial Sequence
  Description of Artificial Sequence: Synthetic oligonucleotide
augaacuccguaaacacgu

SEQ ID NO: 36649 - RNA, 19 nt, Artificial Sequence
  Description of Artificial Sequence: Synthetic oligonucleotide
cugacagcucccauggggc

SEQ ID NO: 36650 - RNA, 19 nt, Artificial Sequence
  Description of Artificial Sequence: Synthetic oligonucleotide
acggcaugcguagaaacac

SEQ ID NO: 36651 - RNA, 19 nt, Artificial Sequence
  Description of Artificial Sequence: Synthetic oligonucleotide
aucuaugugacccgaugga

SEQ ID NO: 36652 - RNA, 19 nt, Artificial Sequence
  Description of Artificial Sequence: Synthetic oligonucleotide
cuuguuacuuguaaucuaa

SEQ ID NO: 36653 - RNA, 19 nt, Artificial Sequence
  Description of Artificial Sequence: Synthetic oligonucleotide
ucuaaucgaccccaucaaa

SEQ ID NO: 36654 - RNA, 19 nt, Artificial Sequence
  Description of Artificial Sequence: Synthetic oligonucleotide
aggcauucuaaacacacua

SEQ ID NO: 36655 - RNA, 19 nt, Artificial Sequence
  Description of Artificial Sequence: Synthetic oligonucleotide
uuguauugugauuuauaua

SEQ ID NO: 36656 - RNA, 19 nt, Artificial Sequence
  Description of Artificial Sequence: Synthetic oligonucleotide
aucgcagugaacuguaaua

SEQ ID NO: 36657 - RNA, 19 nt, Artificial Sequence
  Description of Artificial Sequence: Synthetic oligonucleotide
uggauuuaucuggagggug

SEQ ID NO: 36658 - RNA, 19 nt, Artificial Sequence
  Description of Artificial Sequence: Synthetic oligonucleotide
guaaacacguauguacuac

SEQ ID NO: 36659 - RNA, 19 nt, Artificial Sequence
  Description of Artificial Sequence: Synthetic oligonucleotide
ugcccgaugugccuguagc

SEQ ID NO: 36660 - RNA, 19 nt, Artificial Sequence
  Description of Artificial Sequence: Synthetic oligonucleotide
cacguauguacuacgugac

SEQ ID NO: 36661 - RNA, 19 nt, Artificial Sequence
  Description of Artificial Sequence: Synthetic oligonucleotide
uccauucgagccauagagu

SEQ ID NO: 36662 - RNA, 19 nt, Artificial Sequence
  Description of Artificial Sequence: Synthetic oligonucleotide
guagcacuaagugugucgc

SEQ ID NO: 36663 - RNA, 19 nt, Artificial Sequence
  Description of Artificial Sequence: Synthetic oligonucleotide
agcacuaagugugucgcag

SEQ ID NO: 36664 - RNA, 19 nt, Artificial Sequence
  Description of Artificial Sequence: Synthetic oligonucleotide
gaaauuggcuccacaacuc

SEQ ID NO: 36665 - RNA, 19 nt, Artificial Sequence
  Description of Artificial Sequence: Synthetic oligonucleotide
ccauggggcauuuauacgc

SEQ ID NO: 36666 - RNA, 19 nt, Artificial Sequence
  Description of Artificial Sequence: Synthetic oligonucleotide
guaauuauccguagcagaa

SEQ ID NO: 36667 - RNA, 19 nt, Artificial Sequence
  Description of Artificial Sequence: Synthetic oligonucleotide
ugguuuacgcuguagccau

SEQ ID NO: 36668 - RNA, 19 nt, Artificial Sequence
  Description of Artificial Sequence: Synthetic oligonucleotide
aguucgucaaacgauucgu

SEQ ID NO: 36669 - RNA, 19 nt, Artificial Sequence
  Description of Artificial Sequence: Synthetic oligonucleotide
uuucggugggauuccaccu

SEQ ID NO: 36670 - RNA, 19 nt, Artificial Sequence
  Description of Artificial Sequence: Synthetic oligonucleotide
aaacacguauguacuacgu

SEQ ID NO: 36671 - RNA, 19 nt, Artificial Sequence
  Description of Artificial Sequence: Synthetic oligonucleotide
agaaccaauggaugaccug

SEQ ID NO: 36672 - RNA, 19 nt, Artificial Sequence
  Description of Artificial Sequence: Synthetic oligonucleotide
caauaagguacacuaggca

SEQ ID NO: 36673 - RNA, 19 nt, Artificial Sequence
  Description of Artificial Sequence: Synthetic oligonucleotide
uauacgcaccccagaaagu

SEQ ID NO: 36674 - RNA, 19 nt, Artificial Sequence
  Description of Artificial Sequence: Synthetic oligonucleotide
ggugguuuacgcuguagcc

SEQ ID NO: 36675 - RNA, 19 nt, Artificial Sequence
  Description of Artificial Sequence: Synthetic oligonucleotide
ggacuuaaaugcccugucg

SEQ ID NO: 36676 - RNA, 19 nt, Artificial Sequence
  Description of Artificial Sequence: Synthetic oligonucleotide
uacacuaggcaaguucuac

SEQ ID NO: 36677 - RNA, 19 nt, Artificial Sequence
  Description of Artificial Sequence: Synthetic oligonucleotide
uaaucuaaucgaccccauc

SEQ ID NO: 36678 - RNA, 19 nt, Artificial Sequence
  Description of Artificial Sequence: Synthetic oligonucleotide
uucggugggauuccaccug

SEQ ID NO: 36679 - RNA, 19 nt, Artificial Sequence
  Description of Artificial Sequence: Synthetic oligonucleotide
cagaauauuugcacggcga

SEQ ID NO: 36680 - RNA, 19 nt, Artificial Sequence
  Description of Artificial Sequence: Synthetic oligonucleotide
uacguaguaugaccguccu

SEQ ID NO: 36681 - RNA, 19 nt, Artificial Sequence
  Description of Artificial Sequence: Synthetic oligonucleotide
ugcccugucgugugaaacc

SEQ ID NO: 36682 - RNA, 19 nt, Artificial Sequence
  Description of Artificial Sequence: Synthetic oligonucleotide
uacgugacugcaagcguga

SEQ ID NO: 36683 - RNA, 19 nt, Artificial Sequence
  Description of Artificial Sequence: Synthetic oligonucleotide
ugccgguaacaaauugaag

SEQ ID NO: 36684 - RNA, 19 nt, Artificial Sequence
  Description of Artificial Sequence: Synthetic oligonucleotide
aacgugaaauacaucccga

SEQ ID NO: 36685 - RNA, 19 nt, Artificial Sequence
  Description of Artificial Sequence: Synthetic oligonucleotide
gacccgauggaggugacug

SEQ ID NO: 36686 - RNA, 19 nt, Artificial Sequence
  Description of Artificial Sequence: Synthetic oligonucleotide
uauguacuacgugacugca

SEQ ID NO: 36687 - RNA, 19 nt, Artificial Sequence
  Description of Artificial Sequence: Synthetic oligonucleotide
ugauucaugcacggggucu

SEQ ID NO: 36688 - RNA, 19 nt, Artificial Sequence
  Description of Artificial Sequence: Synthetic oligonucleotide
gacuuaaaugcccugucgu

SEQ ID NO: 36689 - RNA, 19 nt, Artificial Sequence
  Description of Artificial Sequence: Synthetic oligonucleotide
ggucuacguaguaugaccg

SEQ ID NO: 36690 - RNA, 19 nt, Artificial Sequence
  Description of Artificial Sequence: Synthetic oligonucleotide
aucuaaucgaccccaucaa

SEQ ID NO: 36691 - RNA, 19 nt, Artificial Sequence
  Description of Artificial Sequence: Synthetic oligonucleotide
aggguguaauuauccguag

SEQ ID NO: 36692 - RNA, 19 nt, Artificial Sequence
  Description of Artificial Sequence: Synthetic oligonucleotide
acggcgaagcuucauuuca

SEQ ID NO: 36693 - RNA, 19 nt, Artificial Sequence
  Description of Artificial Sequence: Synthetic oligonucleotide
ucuacguaguaugaccguc

SEQ ID NO: 36694 - RNA, 19 nt, Artificial Sequence
  Description of Artificial Sequence: Synthetic oligonucleotide
ggcuaacauacuuuccuag

SEQ ID NO: 36695 - RNA, 19 nt, Artificial Sequence
  Description of Artificial Sequence: Synthetic oligonucleotide
gucgaauagcuuaucacca

SEQ ID NO: 36696 - RNA, 19 nt, Artificial Sequence
  Description of Artificial Sequence: Synthetic oligonucleotide
ucgcagugaacuguaauau

SEQ ID NO: 36697 - RNA, 19 nt, Artificial Sequence
  Description of Artificial Sequence: Synthetic oligonucleotide
uuaagacaccacagcuugu

SEQ ID NO: 36698 - RNA, 19 nt, Artificial Sequence
  Description of Artificial Sequence: Synthetic oligonucleotide
ugaucuauccagguuccuc

SEQ ID NO: 36699 - RNA, 19 nt, Artificial Sequence
  Description of Artificial Sequence: Synthetic oligonucleotide
uuguuacuuguaaucuaau

SEQ ID NO: 36700 - RNA, 19 nt, Artificial Sequence
  Description of Artificial Sequence: Synthetic oligonucleotide
ugccuguagcugaauauua

SEQ ID NO: 36701 - RNA, 19 nt, Artificial Sequence
  Description of Artificial Sequence: Synthetic oligonucleotide
ucccgagugaagaguauau

SEQ ID NO: 36702 - RNA, 19 nt, Artificial Sequence
  Description of Artificial Sequence: Synthetic oligonucleotide
acuaggcaaguucuacaga

SEQ ID NO: 36703 - RNA, 19 nt, Artificial Sequence
  Description of Artificial Sequence: Synthetic oligonucleotide
gaagcaagcguauucuuuu

SEQ ID NO: 36704 - RNA, 19 nt, Artificial Sequence
  Description of Artificial Sequence: Synthetic oligonucleotide
agaguucgucaaacgauuc

SEQ ID NO: 36705 - RNA, 19 nt, Artificial Sequence
  Description of Artificial Sequence: Synthetic oligonucleotide
cgucaaacgauucguaggg

SEQ ID NO: 36706 - RNA, 19 nt, Artificial Sequence
  Description of Artificial Sequence: Synthetic oligonucleotide
uaauuauccguagcagaau

SEQ ID NO: 36707 - RNA, 19 nt, Artificial Sequence
  Description of Artificial Sequence: Synthetic oligonucleotide
gcaauaagguacacuaggc

SEQ ID NO: 36708 - RNA, 19 nt, Artificial Sequence
  Description of Artificial Sequence: Synthetic oligonucleotide
acgaucucugauccaccag

SEQ ID NO: 36709 - RNA, 19 nt, Artificial Sequence
  Description of Artificial Sequence: Synthetic oligonucleotide
ucgcuugaucuguaaacau

SEQ ID NO: 36710 - RNA, 19 nt, Artificial Sequence
  Description of Artificial Sequence: Synthetic oligonucleotide
uuaucaggggugccccacu

SEQ ID NO: 36711 - RNA, 19 nt, Artificial Sequence
  Description of Artificial Sequence: Synthetic oligonucleotide
acaaagcgacaaguagcac

SEQ ID NO: 36712 - RNA, 19 nt, Artificial Sequence
  Description of Artificial Sequence: Synthetic oligonucleotide
acguauguacuacgugacu

SEQ ID NO: 36713 - RNA, 19 nt, Artificial Sequence
  Description of Artificial Sequence: Synthetic oligonucleotide
gccggaaugauuugagcug

SEQ ID NO: 36714 - RNA, 19 nt, Artificial Sequence
  Description of Artificial Sequence: Synthetic oligonucleotide
accaucgaacucaauccag

SEQ ID NO: 36715 - RNA, 19 nt, Artificial Sequence
  Description of Artificial Sequence: Synthetic oligonucleotide
cauuuauacgcaccccaga

SEQ ID NO: 36716 - RNA, 19 nt, Artificial Sequence
  Description of Artificial Sequence: Synthetic oligonucleotide
acaaugucgaauagcuuau

SEQ ID NO: 36717 - RNA, 19 nt, Artificial Sequence
  Description of Artificial Sequence: Synthetic oligonucleotide
gcuaacauacuuuccuaga

SEQ ID NO: 36718 - RNA, 19 nt, Artificial Sequence
  Description of Artificial Sequence: Synthetic oligonucleotide
cacgaguacauuaauuuau

SEQ ID NO: 36719 - RNA, 19 nt, Artificial Sequence
  Description of Artificial Sequence: Synthetic oligonucleotide
aucuauccagguuccucca

SEQ ID NO: 36720 - RNA, 19 nt, Artificial Sequence
  Description of Artificial Sequence: Synthetic oligonucleotide
gugguuuacgcuguagcca

SEQ ID NO: 36721 - RNA, 19 nt, Artificial Sequence
  Description of Artificial Sequence: Synthetic oligonucleotide
accgcuauacucaguguug

SEQ ID NO: 36722 - RNA, 19 nt, Artificial Sequence
  Description of Artificial Sequence: Synthetic oligonucleotide
uugccacguucugagugcg

SEQ ID NO: 36723 - RNA, 19 nt, Artificial Sequence
  Description of Artificial Sequence: Synthetic oligonucleotide
cuguaauauucacuaucca

SEQ ID NO: 36724 - RNA, 19 nt, Artificial Sequence
  Description of Artificial Sequence: Synthetic oligonucleotide
guacuacgugacugcaagc

SEQ ID NO: 36725 - RNA, 19 nt, Artificial Sequence
  Description of Artificial Sequence: Synthetic oligonucleotide
cccguaauaaggguuaaac

SEQ ID NO: 36726 - RNA, 19 nt, Artificial Sequence
  Description of Artificial Sequence: Synthetic oligonucleotide
aggcuaacauacuuuccua

SEQ ID NO: 36727 - RNA, 19 nt, Artificial Sequence
  Description of Artificial Sequence: Synthetic oligonucleotide
gcuauacucaguguuguca

SEQ ID NO: 36728 - RNA, 19 nt, Artificial Sequence
  Description of Artificial Sequence: Synthetic oligonucleotide
gucgcaguuacucaguauu

SEQ ID NO: 36729 - RNA, 19 nt, Artificial Sequence
  Description of Artificial Sequence: Synthetic oligonucleotide
gguagggcaagucauacau

SEQ ID NO: 36730 - RNA, 19 nt, Artificial Sequence
  Description of Artificial Sequence: Synthetic oligonucleotide
auacgcaccccagaaaguu

SEQ ID NO: 36731 - RNA, 19 nt, Artificial Sequence
  Description of Artificial Sequence: Synthetic oligonucleotide
aggcaauaagguacacuag

SEQ ID NO: 36732 - RNA, 19 nt, Artificial Sequence
  Description of Artificial Sequence: Synthetic oligonucleotide
acggaaaguguuucugcua

SEQ ID NO: 36733 - RNA, 19 nt, Artificial Sequence
  Description of Artificial Sequence: Synthetic oligonucleotide
ugaccgcuauacucagugu

SEQ ID NO: 36734 - RNA, 19 nt, Artificial Sequence
  Description of Artificial Sequence: Synthetic oligonucleotide
agccugaccgcuauacuca

SEQ ID NO: 36735 - RNA, 19 nt, Artificial Sequence
  Description of Artificial Sequence: Synthetic oligonucleotide
ccgguaacaaauugaagca

SEQ ID NO: 36736 - RNA, 19 nt, Artificial Sequence
  Description of Artificial Sequence: Synthetic oligonucleotide
uacgcaccccagaaaguua

SEQ ID NO: 36737 - RNA, 19 nt, Artificial Sequence
  Description of Artificial Sequence: Synthetic oligonucleotide
ggugaucuauccagguucc

SEQ ID NO: 36738 - RNA, 19 nt, Artificial Sequence
  Description of Artificial Sequence: Synthetic oligonucleotide
gucugcauuuguaacguaa

SEQ ID NO: 36739 - RNA, 19 nt, Artificial Sequence
  Description of Artificial Sequence: Synthetic oligonucleotide
uagcacuaagugugucgca

SEQ ID NO: 36740 - RNA, 19 nt, Artificial Sequence
  Description of Artificial Sequence: Synthetic oligonucleotide
cacggcaugcguagaaaca

SEQ ID NO: 36741 - RNA, 19 nt, Artificial Sequence
  Description of Artificial Sequence: Synthetic oligonucleotide
guggugaaugcccgaugug

SEQ ID NO: 36742 - RNA, 19 nt, Artificial Sequence
  Description of Artificial Sequence: Synthetic oligonucleotide
cagcagucgaaugucgcug

SEQ ID NO: 36743 - RNA, 19 nt, Artificial Sequence
  Description of Artificial Sequence: Synthetic oligonucleotide
caaauugaagcaagcguau

SEQ ID NO: 36744 - RNA, 19 nt, Artificial Sequence
  Description of Artificial Sequence: Synthetic oligonucleotide
cuuaaaugcccugucgugu

SEQ ID NO: 36745 - RNA, 19 nt, Artificial Sequence
  Description of Artificial Sequence: Synthetic oligonucleotide
uucacggcaugcguagaaa

SEQ ID NO: 36746 - RNA, 19 nt, Artificial Sequence
  Description of Artificial Sequence: Synthetic oligonucleotide
cacggcgaagcuucauuuc

SEQ ID NO: 36747 - RNA, 19 nt, Artificial Sequence
  Description of Artificial Sequence: Synthetic oligonucleotide
gucgcugagacauuuccau

SEQ ID NO: 36748 - RNA, 19 nt, Artificial Sequence
  Description of Artificial Sequence: Synthetic oligonucleotide
ggagaacuuaccauaaccu

SEQ ID NO: 36749 - RNA, 19 nt, Artificial Sequence
  Description of Artificial Sequence: Synthetic oligonucleotide
ucgagccauagaguucagc

SEQ ID NO: 36750 - RNA, 19 nt, Artificial Sequence
  Description of Artificial Sequence: Synthetic oligonucleotide
gaucuucgaucuugggucu

SEQ ID NO: 36751 - RNA, 19 nt, Artificial Sequence
  Description of Artificial Sequence: Synthetic oligonucleotide
cguauguacuacgugacug

SEQ ID NO: 36752 - RNA, 19 nt, Artificial Sequence
  Description of Artificial Sequence: Synthetic oligonucleotide
gguacacuaggcaaguucu

SEQ ID NO: 36753 - RNA, 19 nt, Artificial Sequence
  Description of Artificial Sequence: Synthetic oligonucleotide
cacgggaugugccgguaac

SEQ ID NO: 36754 - RNA, 19 nt, Artificial Sequence
  Description of Artificial Sequence: Synthetic oligonucleotide
acgaugugccuaguaagau

SEQ ID NO: 36755 - RNA, 19 nt, Artificial Sequence
  Description of Artificial Sequence: Synthetic oligonucleotide
ccguaauaaggguuaaaca

SEQ ID NO: 36756 - RNA, 19 nt, Artificial Sequence
  Description of Artificial Sequence: Synthetic oligonucleotide
ggcaugcguagaaacacug

SEQ ID NO: 36757 - RNA, 19 nt, Artificial Sequence
  Description of Artificial Sequence: Synthetic oligonucleotide
acguaauuuuguguuucau

SEQ ID NO: 36758 - RNA, 19 nt, Artificial Sequence
  Description of Artificial Sequence: Synthetic oligonucleotide
gugccgguaacaaauugaa

SEQ ID NO: 36759 - RNA, 19 nt, Artificial Sequence
  Description of Artificial Sequence: Synthetic oligonucleotide
gaacuguaauauucacuau

SEQ ID NO: 36760 - RNA, 19 nt, Artificial Sequence
  Description of Artificial Sequence: Synthetic oligonucleotide
augcguagaaacacuguuu

SEQ ID NO: 36761 - RNA, 19 nt, Artificial Sequence
  Description of Artificial Sequence: Synthetic oligonucleotide
caugcguagaaacacuguu

SEQ ID NO: 36762 - RNA, 19 nt, Artificial Sequence
  Description of Artificial Sequence: Synthetic oligonucleotide
gauucguaggguggcaggu

SEQ ID NO: 36763 - RNA, 19 nt, Artificial Sequence
  Description of Artificial Sequence: Synthetic oligonucleotide
gagccuuguagugaaggcu

SEQ ID NO: 36764 - RNA, 19 nt, Artificial Sequence
  Description of Artificial Sequence: Synthetic oligonucleotide
cucgguugucagcacuauc

SEQ ID NO: 36765 - RNA, 19 nt, Artificial Sequence
  Description of Artificial Sequence: Synthetic oligonucleotide
gugcugauucaugcacggg

SEQ ID NO: 36766 - RNA, 19 nt, Artificial Sequence
  Description of Artificial Sequence: Synthetic oligonucleotide
gaguguuuucaaucgccau

SEQ ID NO: 36767 - RNA, 19 nt, Artificial Sequence
  Description of Artificial Sequence: Synthetic oligonucleotide
gaauuguggucuacguagu

SEQ ID NO: 36768 - RNA, 19 nt, Artificial Sequence
  Description of Artificial Sequence: Synthetic oligonucleotide
ggugacaacgaucucugau

SEQ ID NO: 36769 - RNA, 19 nt, Artificial Sequence
  Description of Artificial Sequence: Synthetic oligonucleotide
gaacuccguaaacacguau

SEQ ID NO: 36770 - RNA, 19 nt, Artificial Sequence
  Description of Artificial Sequence: Synthetic oligonucleotide
gagcccguaauaaggguua

SEQ ID NO: 36771 - RNA, 19 nt, Artificial Sequence
  Description of Artificial Sequence: Synthetic oligonucleotide
ucuucacggcaugcguaga

SEQ ID NO: 36772 - RNA, 19 nt, Artificial Sequence
  Description of Artificial Sequence: Synthetic oligonucleotide
agucgagccuugaggaagu

SEQ ID NO: 36773 - RNA, 19 nt, Artificial Sequence
  Description of Artificial Sequence: Synthetic oligonucleotide
gaaauucgcuugaucugua

SEQ ID NO: 36774 - RNA, 19 nt, Artificial Sequence
  Description of Artificial Sequence: Synthetic oligonucleotide
ucgccaucugaaguuuauc

SEQ ID NO: 36775 - RNA, 19 nt, Artificial Sequence
  Description of Artificial Sequence: Synthetic oligonucleotide
cuucacggcaugcguagaa

SEQ ID NO: 36776 - RNA, 19 nt, Artificial Sequence
  Description of Artificial Sequence: Synthetic oligonucleotide
gacucucgguugucagcac

SEQ ID NO: 36777 - RNA, 19 nt, Artificial Sequence
  Description of Artificial Sequence: Synthetic oligonucleotide
cagaguucgucaaacgauu

SEQ ID NO: 36778 - RNA, 19 nt, Artificial Sequence
  Description of Artificial Sequence: Synthetic oligonucleotide
ggaugugccgguaacaaau

SEQ ID NO: 36779 - RNA, 19 nt, Artificial Sequence
  Description of Artificial Sequence: Synthetic oligonucleotide
ugccacguucugagugcga

SEQ ID NO: 36780 - RNA, 19 nt, Artificial Sequence
  Description of Artificial Sequence: Synthetic oligonucleotide
acgcaccccagaaaguuaa

SEQ ID NO: 36781 - RNA, 19 nt, Artificial Sequence
  Description of Artificial Sequence: Synthetic oligonucleotide
caaguagcacuaagugugu

SEQ ID NO: 36782 - RNA, 19 nt, Artificial Sequence
  Description of Artificial Sequence: Synthetic oligonucleotide
acgggaugugccgguaaca

SEQ ID NO: 36783 - RNA, 19 nt, Artificial Sequence
  Description of Artificial Sequence: Synthetic oligonucleotide
ggaagucggcuuucuugac

SEQ ID NO: 36784 - RNA, 19 nt, Artificial Sequence
  Description of Artificial Sequence: Synthetic oligonucleotide
gucuacguaguaugaccgu

SEQ ID NO: 36785 - RNA, 19 nt, Artificial Sequence
  Description of Artificial Sequence: Synthetic oligonucleotide
ucagaacgaugugccuagu

SEQ ID NO: 36786 - RNA, 19 nt, Artificial Sequence
  Description of Artificial Sequence: Synthetic oligonucleotide
ggaaucccuaccaugggcu

SEQ ID NO: 36787 - RNA, 19 nt, Artificial Sequence
  Description of Artificial Sequence: Synthetic oligonucleotide
gaaugucgcugagacauuu

SEQ ID NO: 36788 - RNA, 19 nt, Artificial Sequence
  Description of Artificial Sequence: Synthetic oligonucleotide
guuaacacacgaguacauu

SEQ ID NO: 36789 - RNA, 19 nt, Artificial Sequence
  Description of Artificial Sequence: Synthetic oligonucleotide
guucgucaaacgauucgua

SEQ ID NO: 36790 - RNA, 19 nt, Artificial Sequence
  Description of Artificial Sequence: Synthetic oligonucleotide
cgagucugguaucuaacuc

SEQ ID NO: 36791 - RNA, 19 nt, Artificial Sequence
  Description of Artificial Sequence: Synthetic oligonucleotide
acguaguaugaccguccuu

SEQ ID NO: 36792 - RNA, 19 nt, Artificial Sequence
  Description of Artificial Sequence: Synthetic oligonucleotide
gcagucgaaugucgcugag

SEQ ID NO: 36793 - RNA, 19 nt, Artificial Sequence
  Description of Artificial Sequence: Synthetic oligonucleotide
gccugaccgcuauacucag

SEQ ID NO: 36794 - RNA, 19 nt, Artificial Sequence
  Description of Artificial Sequence: Synthetic oligonucleotide
ugacccgauggaggugacu

SEQ ID NO: 36795 - RNA, 19 nt, Artificial Sequence
  Description of Artificial Sequence: Synthetic oligonucleotide
ccaaagaucuaggcaauaa

SEQ ID NO: 36796 - RNA, 19 nt, Artificial Sequence
  Description of Artificial Sequence: Synthetic oligonucleotide
caucgcagugaacuguaau

SEQ ID NO: 36797 - RNA, 19 nt, Artificial Sequence
  Description of Artificial Sequence: Synthetic oligonucleotide
cacccauaauucuccggua

SEQ ID NO: 36798 - RNA, 19 nt, Artificial Sequence
  Description of Artificial Sequence: Synthetic oligonucleotide
ggaauaacuuggguguuau

SEQ ID NO: 36799 - RNA, 19 nt, Artificial Sequence
  Description of Artificial Sequence: Synthetic oligonucleotide
cgugacugcaagcgugaag

SEQ ID NO: 36800 - RNA, 19 nt, Artificial Sequence
  Description of Artificial Sequence: Synthetic oligonucleotide
cuccguaaacacguaugua

SEQ ID NO: 36801 - RNA, 19 nt, Artificial Sequence
  Description of Artificial Sequence: Synthetic oligonucleotide
gggaugugccgguaacaaa

SEQ ID NO: 36802 - RNA, 19 nt, Artificial Sequence
  Description of Artificial Sequence: Synthetic oligonucleotide
aaugcccgaugugccugua

SEQ ID NO: 36803 - RNA, 19 nt, Artificial Sequence
  Description of Artificial Sequence: Synthetic oligonucleotide
gcgaaccugcacaucuaug

SEQ ID NO: 36804 - RNA, 19 nt, Artificial Sequence
  Description of Artificial Sequence: Synthetic oligonucleotide
cccaaccugguggcaaucc

SEQ ID NO: 36805 - RNA, 19 nt, Artificial Sequence
  Description of Artificial Sequence: Synthetic oligonucleotide
ccgguaagaguccuccaga

SEQ ID NO: 36806 - RNA, 19 nt, Artificial Sequence
  Description of Artificial Sequence: Synthetic oligonucleotide
gucaaacgauucguagggu

SEQ ID NO: 36807 - RNA, 19 nt, Artificial Sequence
  Description of Artificial Sequence: Synthetic oligonucleotide
agcccguaauaaggguuaa

SEQ ID NO: 36808 - RNA, 19 nt, Artificial Sequence
  Description of Artificial Sequence: Synthetic oligonucleotide
cccaauucucaggggacuc

SEQ ID NO: 36809 - RNA, 19 nt, Artificial Sequence
  Description of Artificial Sequence: Synthetic oligonucleotide
ccguagcagaauauucaaa

SEQ ID NO: 36810 - RNA, 19 nt, Artificial Sequence
  Description of Artificial Sequence: Synthetic oligonucleotide
cguaguaugaccguccuuu

SEQ ID NO: 36811 - RNA, 19 nt, Artificial Sequence
  Description of Artificial Sequence: Synthetic oligonucleotide
cucguacaauuucccaauu

SEQ ID NO: 36812 - RNA, 19 nt, Artificial Sequence
  Description of Artificial Sequence: Synthetic oligonucleotide
ucccuaccaugggcugaca

SEQ ID NO: 36813 - RNA, 19 nt, Artificial Sequence
  Description of Artificial Sequence: Synthetic oligonucleotide
ggcgaaccugcacaucuau

SEQ ID NO: 36814 - RNA, 19 nt, Artificial Sequence
  Description of Artificial Sequence: Synthetic oligonucleotide
aggcgaaccugcacaucua

SEQ ID NO: 36815 - RNA, 19 nt, Artificial Sequence
  Description of Artificial Sequence: Synthetic oligonucleotide
caaucgccaucugaaguuu

SEQ ID NO: 36816 - RNA, 19 nt, Artificial Sequence
  Description of Artificial Sequence: Synthetic oligonucleotide
gcaugcguagaaacacugu

SEQ ID NO: 36817 - RNA, 19 nt, Artificial Sequence
  Description of Artificial Sequence: Synthetic oligonucleotide
ccugguggugaaugcccga

SEQ ID NO: 36818 - RNA, 19 nt, Artificial Sequence
  Description of Artificial Sequence: Synthetic oligonucleotide
aggcccgaguuuggauuua

SEQ ID NO: 36819 - RNA, 19 nt, Artificial Sequence
  Description of Artificial Sequence: Synthetic oligonucleotide
gcccguaauaaggguuaaa

SEQ ID NO: 36820 - RNA, 19 nt, Artificial Sequence
  Description of Artificial Sequence: Synthetic oligonucleotide
gcacacgggaugugccggu

SEQ ID NO: 36821 - RNA, 19 nt, Artificial Sequence
  Description of Artificial Sequence: Synthetic oligonucleotide
ccgcuauacucaguguugu

SEQ ID NO: 36822 - RNA, 19 nt, Artificial Sequence
  Description of Artificial Sequence: Synthetic oligonucleotide
ccugaccgcuauacucagu

SEQ ID NO: 36823 - RNA, 19 nt, Artificial Sequence
  Description of Artificial Sequence: Synthetic oligonucleotide
auauauuauauauauaaac

SEQ ID NO: 36824 - RNA, 19 nt, Artificial Sequence
  Description of Artificial Sequence: Synthetic oligonucleotide
aauauuuugcucuaaagga

SEQ ID NO: 36825 - RNA, 19 nt, Artificial Sequence
  Description of Artificial Sequence: Synthetic oligonucleotide
aguauauuagguuaugucg

SEQ ID NO: 36826 - RNA, 19 nt, Artificial Sequence
  Description of Artificial Sequence: Synthetic oligonucleotide
uauauuauauauauaaacu

SEQ ID NO: 36827 - RNA, 19 nt, Artificial Sequence
  Description of Artificial Sequence: Synthetic oligonucleotide
aaugcaguuaguuuauuac

SEQ ID NO: 36828 - RNA, 19 nt, Artificial Sequence
  Description of Artificial Sequence: Synthetic oligonucleotide
aauaggaagcuuaaaaugc

SEQ ID NO: 36829 - RNA, 19 nt, Artificial Sequence
  Description of Artificial Sequence: Synthetic oligonucleotide
auauauauuauauauauaa

SEQ ID NO: 36830 - RNA, 19 nt, Artificial Sequence
  Description of Artificial Sequence: Synthetic oligonucleotide
aauaauaauaauaauaaaa

SEQ ID NO: 36831 - RNA, 19 nt, Artificial Sequence
  Description of Artificial Sequence: Synthetic oligonucleotide
uuugauguaagguaucugg

SEQ ID NO: 36832 - RNA, 19 nt, Artificial Sequence
  Description of Artificial Sequence: Synthetic oligonucleotide
auauagagaugucacaucc

SEQ ID NO: 36833 - RNA, 19 nt, Artificial Sequence
  Description of Artificial Sequence: Synthetic oligonucleotide
auauauauauauuauauau

SEQ ID NO: 36834 - RNA, 19 nt, Artificial Sequence
  Description of Artificial Sequence: Synthetic oligonucleotide
uauucaaauauauauauau

SEQ ID NO: 36835 - RNA, 19 nt, Artificial Sequence
  Description of Artificial Sequence: Synthetic oligonucleotide
aauacugacaaaauuaaug

SEQ ID NO: 36836 - RNA, 19 nt, Artificial Sequence
  Description of Artificial Sequence: Synthetic oligonucleotide
uuuucuauauguauaaagu

SEQ ID NO: 36837 - RNA, 19 nt, Artificial Sequence
  Description of Artificial Sequence: Synthetic oligonucleotide
auauauauauuauauauau

SEQ ID NO: 36838 - RNA, 19 nt, Artificial Sequence
  Description of Artificial Sequence: Synthetic oligonucleotide
aggaaauauaaaaugagcc

SEQ ID NO: 36839 - RNA, 19 nt, Artificial Sequence
  Description of Artificial Sequence: Synthetic oligonucleotide
uuuauuacaaugugcgggg

SEQ ID NO: 36840 - RNA, 19 nt, Artificial Sequence
  Description of Artificial Sequence: Synthetic oligonucleotide
uuugguguaauacugacaa

SEQ ID NO: 36841 - RNA, 19 nt, Artificial Sequence
  Description of Artificial Sequence: Synthetic oligonucleotide
uauaauacuguacacuaca

SEQ ID NO: 36842 - RNA, 19 nt, Artificial Sequence
  Description of Artificial Sequence: Synthetic oligonucleotide
aaauauauauauauuauau

SEQ ID NO: 36843 - RNA, 19 nt, Artificial Sequence
  Description of Artificial Sequence: Synthetic oligonucleotide
uuuaacuauggauacagga

SEQ ID NO: 36844 - RNA, 19 nt, Artificial Sequence
  Description of Artificial Sequence: Synthetic oligonucleotide
uucaaauauauauauauua

SEQ ID NO: 36845 - RNA, 19 nt, Artificial Sequence
  Description of Artificial Sequence: Synthetic oligonucleotide
aagaucguaucaaaguucc

SEQ ID NO: 36846 - RNA, 19 nt, Artificial Sequence
  Description of Artificial Sequence: Synthetic oligonucleotide
aauauugaugcacuguagu

SEQ ID NO: 36847 - RNA, 19 nt, Artificial Sequence
  Description of Artificial Sequence: Synthetic oligonucleotide
acuaaauggguucaugccg

SEQ ID NO: 36848 - RNA, 19 nt, Artificial Sequence
  Description of Artificial Sequence: Synthetic oligonucleotide
aaacuuauugggcaauauc

SEQ ID NO: 36849 - RNA, 19 nt, Artificial Sequence
  Description of Artificial Sequence: Synthetic oligonucleotide
ucaaauauauauauauuau

SEQ ID NO: 36850 - RNA, 19 nt, Artificial Sequence
  Description of Artificial Sequence: Synthetic oligonucleotide
aaugaucaacgucauguuc

SEQ ID NO: 36851 - RNA, 19 nt, Artificial Sequence
  Description of Artificial Sequence: Synthetic oligonucleotide
aauauauauauauuauaua

SEQ ID NO: 36852 - RNA, 19 nt, Artificial Sequence
  Description of Artificial Sequence: Synthetic oligonucleotide
uaaauuaguacuauaguuu

SEQ ID NO: 36853 - RNA, 19 nt, Artificial Sequence
  Description of Artificial Sequence: Synthetic oligonucleotide
uguauguaagccauaauaa

SEQ ID NO: 36854 - RNA, 19 nt, Artificial Sequence
  Description of Artificial Sequence: Synthetic oligonucleotide
uaggaaauauaaaaugagc

SEQ ID NO: 36855 - RNA, 19 nt, Artificial Sequence
  Description of Artificial Sequence: Synthetic oligonucleotide
uuguuagugauacauacgu

SEQ ID NO: 36856 - RNA, 19 nt, Artificial Sequence
  Description of Artificial Sequence: Synthetic oligonucleotide
guuuauuacaaugugcggg

SEQ ID NO: 36857 - RNA, 19 nt, Artificial Sequence
  Description of Artificial Sequence: Synthetic oligonucleotide
auacugacaaaauuaauga

SEQ ID NO: 36858 - RNA, 19 nt, Artificial Sequence
  Description of Artificial Sequence: Synthetic oligonucleotide
aaaauuugcccaaaugauc

SEQ ID NO: 36859 - RNA, 19 nt, Artificial Sequence
  Description of Artificial Sequence: Synthetic oligonucleotide
ucuuugacgaugcauauuc

SEQ ID NO: 36860 - RNA, 19 nt, Artificial Sequence
  Description of Artificial Sequence: Synthetic oligonucleotide
acaauaauaauaauaauaa

SEQ ID NO: 36861 - RNA, 19 nt, Artificial Sequence
  Description of Artificial Sequence: Synthetic oligonucleotide
ggaaucgaaauauugaugc

SEQ ID NO: 36862 - RNA, 19 nt, Artificial Sequence
  Description of Artificial Sequence: Synthetic oligonucleotide
aaauuaguacuauaguuuu

SEQ ID NO: 36863 - RNA, 19 nt, Artificial Sequence
  Description of Artificial Sequence: Synthetic oligonucleotide
acugauguaugguagugcg

SEQ ID NO: 36864 - RNA, 19 nt, Artificial Sequence
  Description of Artificial Sequence: Synthetic oligonucleotide
uauauauuauauauauaaa

SEQ ID NO: 36865 - RNA, 19 nt, Artificial Sequence
  Description of Artificial Sequence: Synthetic oligonucleotide
uuaacuauggauacaggaa

SEQ ID NO: 36866 - RNA, 19 nt, Artificial Sequence
  Description of Artificial Sequence: Synthetic oligonucleotide
ugcaauguaagauucaaau

SEQ ID NO: 36867 - RNA, 19 nt, Artificial Sequence
  Description of Artificial Sequence: Synthetic oligonucleotide
uauauauauauuauauaua

SEQ ID NO: 36868 - RNA, 19 nt, Artificial Sequence
  Description of Artificial Sequence: Synthetic oligonucleotide
ugaccuaaaauuaaaugaa

SEQ ID NO: 36869 - RNA, 19 nt, Artificial Sequence
  Description of Artificial Sequence: Synthetic oligonucleotide
aauagcgaaaggaaaagug

SEQ ID NO: 36870 - RNA, 19 nt, Artificial Sequence
  Description of Artificial Sequence: Synthetic oligonucleotide
ucuauauguauaaaguuuu

SEQ ID NO: 36871 - RNA, 19 nt, Artificial Sequence
  Description of Artificial Sequence: Synthetic oligonucleotide
ccuaaaauuaaaugaaugg

SEQ ID NO: 36872 - RNA, 19 nt, Artificial Sequence
  Description of Artificial Sequence: Synthetic oligonucleotide
ugauguaugguagugcggg

SEQ ID NO: 36873 - RNA, 19 nt, Artificial Sequence
  Description of Artificial Sequence: Synthetic oligonucleotide
uaaaguuugcuauuauaug

SEQ ID NO: 36874 - RNA, 19 nt, Artificial Sequence
  Description of Artificial Sequence: Synthetic oligonucleotide
guauauuagguuaugucgg

SEQ ID NO: 36875 - RNA, 19 nt, Artificial Sequence
  Description of Artificial Sequence: Synthetic oligonucleotide
aguauuagugcugugagug

SEQ ID NO: 36876 - RNA, 19 nt, Artificial Sequence
  Description of Artificial Sequence: Synthetic oligonucleotide
agguauaggccauaugugg

SEQ ID NO: 36877 - RNA, 19 nt, Artificial Sequence
  Description of Artificial Sequence: Synthetic oligonucleotide
aagaacuauaauacuguac

SEQ ID NO: 36878 - RNA, 19 nt, Artificial Sequence
  Description of Artificial Sequence: Synthetic oligonucleotide
auaauuaaucaucauuaga

SEQ ID NO: 36879 - RNA, 19 nt, Artificial Sequence
  Description of Artificial Sequence: Synthetic oligonucleotide
uucuauauguauaaaguuu

SEQ ID NO: 36880 - RNA, 19 nt, Artificial Sequence
  Description of Artificial Sequence: Synthetic oligonucleotide
ugguguuuguguuugaaug

SEQ ID NO: 36881 - RNA, 19 nt, Artificial Sequence
  Description of Artificial Sequence: Synthetic oligonucleotide
uuauuaauaccuauucaau

SEQ ID NO: 36882 - RNA, 19 nt, Artificial Sequence
  Description of Artificial Sequence: Synthetic oligonucleotide
uguauaaaggcuuggcacu

SEQ ID NO: 36883 - RNA, 19 nt, Artificial Sequence
  Description of Artificial Sequence: Synthetic oligonucleotide
uguguauaaaggcuuggca

SEQ ID NO: 36884 - RNA, 19 nt, Artificial Sequence
  Description of Artificial Sequence: Synthetic oligonucleotide
uuugacgaugcauauucag

SEQ ID NO: 36885 - RNA, 19 nt, Artificial Sequence
  Description of Artificial Sequence: Synthetic oligonucleotide
aacuauaauacuguacacu

SEQ ID NO: 36886 - RNA, 19 nt, Artificial Sequence
  Description of Artificial Sequence: Synthetic oligonucleotide
ugacgaugcauauucagug

SEQ ID NO: 36887 - RNA, 19 nt, Artificial Sequence
  Description of Artificial Sequence: Synthetic oligonucleotide
uaacuauggauacaggaaa

SEQ ID NO: 36888 - RNA, 19 nt, Artificial Sequence
  Description of Artificial Sequence: Synthetic oligonucleotide
uuacuuaggcuguaaaaca

SEQ ID NO: 36889 - RNA, 19 nt, Artificial Sequence
  Description of Artificial Sequence: Synthetic oligonucleotide
uauuaauaccuauucaaua

SEQ ID NO: 36890 - RNA, 19 nt, Artificial Sequence
  Description of Artificial Sequence: Synthetic oligonucleotide
aauuuuaugaauagcgaaa

SEQ ID NO: 36891 - RNA, 19 nt, Artificial Sequence
  Description of Artificial Sequence: Synthetic oligonucleotide
guuaugucgguauacugag

SEQ ID NO: 36892 - RNA, 19 nt, Artificial Sequence
  Description of Artificial Sequence: Synthetic oligonucleotide
uaggccuuaacacuguaca

SEQ ID NO: 36893 - RNA, 19 nt, Artificial Sequence
  Description of Artificial Sequence: Synthetic oligonucleotide
aaagguaacccaaguuacc

SEQ ID NO: 36894 - RNA, 19 nt, Artificial Sequence
  Description of Artificial Sequence: Synthetic oligonucleotide
uauauugaagaacuauaau

SEQ ID NO: 36895 - RNA, 19 nt, Artificial Sequence
  Description of Artificial Sequence: Synthetic oligonucleotide
ucaauucaugcuaaauaca

SEQ ID NO: 36896 - RNA, 19 nt, Artificial Sequence
  Description of Artificial Sequence: Synthetic oligonucleotide
aaucccaucucacaauuaa

SEQ ID NO: 36897 - RNA, 19 nt, Artificial Sequence
  Description of Artificial Sequence: Synthetic oligonucleotide
auaauugccccauugcaca

SEQ ID NO: 36898 - RNA, 19 nt, Artificial Sequence
  Description of Artificial Sequence: Synthetic oligonucleotide
aaauaauuguauugagcau

SEQ ID NO: 36899 - RNA, 19 nt, Artificial Sequence
  Description of Artificial Sequence: Synthetic oligonucleotide
aaguuuguuagugauacau

SEQ ID NO: 36900 - RNA, 19 nt, Artificial Sequence
  Description of Artificial Sequence: Synthetic oligonucleotide
auauugaugcacuguagug

SEQ ID NO: 36901 - RNA, 19 nt, Artificial Sequence
  Description of Artificial Sequence: Synthetic oligonucleotide
gugauacauacguagagug

SEQ ID NO: 36902 - RNA, 19 nt, Artificial Sequence
  Description of Artificial Sequence: Synthetic oligonucleotide
gaauaauugccccauugca

SEQ ID NO: 36903 - RNA, 19 nt, Artificial Sequence
  Description of Artificial Sequence: Synthetic oligonucleotide
cuaguauuagugcugugag

SEQ ID NO: 36904 - RNA, 19 nt, Artificial Sequence
  Description of Artificial Sequence: Synthetic oligonucleotide
ugauacauacguagagugc

SEQ ID NO: 36905 - RNA, 19 nt, Artificial Sequence
  Description of Artificial Sequence: Synthetic oligonucleotide
uaaggcuuuuaaaaccacc

SEQ ID NO: 36906 - RNA, 19 nt, Artificial Sequence
  Description of Artificial Sequence: Synthetic oligonucleotide
guuacuuaggcuguaaaac

SEQ ID NO: 36907 - RNA, 19 nt, Artificial Sequence
  Description of Artificial Sequence: Synthetic oligonucleotide
augugcugcgaguaggagc

SEQ ID NO: 36908 - RNA, 19 nt, Artificial Sequence
  Description of Artificial Sequence: Synthetic oligonucleotide
guguauaaaggcuuggcac

SEQ ID NO: 36909 - RNA, 19 nt, Artificial Sequence
  Description of Artificial Sequence: Synthetic oligonucleotide
ugaacaugcaauguaagau

SEQ ID NO: 36910 - RNA, 19 nt, Artificial Sequence
  Description of Artificial Sequence: Synthetic oligonucleotide
uucgcagcuucccauaacc

SEQ ID NO: 36911 - RNA, 19 nt, Artificial Sequence
  Description of Artificial Sequence: Synthetic oligonucleotide
ugaauagcgaaaggaaaag

SEQ ID NO: 36912 - RNA, 19 nt, Artificial Sequence
  Description of Artificial Sequence: Synthetic oligonucleotide
uauuugaauaauugcccca

SEQ ID NO: 36913 - RNA, 19 nt, Artificial Sequence
  Description of Artificial Sequence: Synthetic oligonucleotide
auagagaugucacaucccu

SEQ ID NO: 36914 - RNA, 19 nt, Artificial Sequence
  Description of Artificial Sequence: Synthetic oligonucleotide
uauauauauuauauauaua

SEQ ID NO: 36915 - RNA, 19 nt, Artificial Sequence
  Description of Artificial Sequence: Synthetic oligonucleotide
uugcauauaaggcuuuuaa

SEQ ID NO: 36916 - RNA, 19 nt, Artificial Sequence
  Description of Artificial Sequence: Synthetic oligonucleotide
uguaaugaucaagucagug

SEQ ID NO: 36917 - RNA, 19 nt, Artificial Sequence
  Description of Artificial Sequence: Synthetic oligonucleotide
gauacauacguagagugca

SEQ ID NO: 36918 - RNA, 19 nt, Artificial Sequence
  Description of Artificial Sequence: Synthetic oligonucleotide
ucuuuacguaaaauuugcc

SEQ ID NO: 36919 - RNA, 19 nt, Artificial Sequence
  Description of Artificial Sequence: Synthetic oligonucleotide
guaaugaucaagucaguga

SEQ ID NO: 36920 - RNA, 19 nt, Artificial Sequence
  Description of Artificial Sequence: Synthetic oligonucleotide
ugguguaauacugacaaaa

SEQ ID NO: 36921 - RNA, 19 nt, Artificial Sequence
  Description of Artificial Sequence: Synthetic oligonucleotide
aaguaagcucgguucauca

SEQ ID NO: 36922 - RNA, 19 nt, Artificial Sequence
  Description of Artificial Sequence: Synthetic oligonucleotide
aauacugacacggaugcuu

SEQ ID NO: 36923 - RNA, 19 nt, Artificial Sequence
  Description of Artificial Sequence: Synthetic oligonucleotide
aaggaauggcacuugcaga

SEQ ID NO: 36924 - RNA, 19 nt, Artificial Sequence
  Description of Artificial Sequence: Synthetic oligonucleotide
uaguuauguauguaagcca

SEQ ID NO: 36925 - RNA, 19 nt, Artificial Sequence
  Description of Artificial Sequence: Synthetic oligonucleotide
guagguauaggccauaugu

SEQ ID NO: 36926 - RNA, 19 nt, Artificial Sequence
  Description of Artificial Sequence: Synthetic oligonucleotide
aaggcuuuuaaaaccaccu

SEQ ID NO: 36927 - RNA, 19 nt, Artificial Sequence
  Description of Artificial Sequence: Synthetic oligonucleotide
uauuacaugccaucuucca

SEQ ID NO: 36928 - RNA, 19 nt, Artificial Sequence
  Description of Artificial Sequence: Synthetic oligonucleotide
uugacgaugcauauucagu

SEQ ID NO: 36929 - RNA, 19 nt, Artificial Sequence
  Description of Artificial Sequence: Synthetic oligonucleotide
uguaaaguuugcuauuaua

SEQ ID NO: 36930 - RNA, 19 nt, Artificial Sequence
  Description of Artificial Sequence: Synthetic oligonucleotide
gugacuaaaagccccuucc

SEQ ID NO: 36931 - RNA, 19 nt, Artificial Sequence
  Description of Artificial Sequence: Synthetic oligonucleotide
cuggaauggccacacaucc

SEQ ID NO: 36932 - RNA, 19 nt, Artificial Sequence
  Description of Artificial Sequence: Synthetic oligonucleotide
uauuagguuaugucgguau

SEQ ID NO: 36933 - RNA, 19 nt, Artificial Sequence
  Description of Artificial Sequence: Synthetic oligonucleotide
acaagaucguaucaaaguu

SEQ ID NO: 36934 - RNA, 19 nt, Artificial Sequence
  Description of Artificial Sequence: Synthetic oligonucleotide
agcaaagguagcugcuccc

SEQ ID NO: 36935 - RNA, 19 nt, Artificial Sequence
  Description of Artificial Sequence: Synthetic oligonucleotide
ucaagcagguaacaauacu

SEQ ID NO: 36936 - RNA, 19 nt, Artificial Sequence
  Description of Artificial Sequence: Synthetic oligonucleotide
gauguaagguaucuggaaa

SEQ ID NO: 36937 - RNA, 19 nt, Artificial Sequence
  Description of Artificial Sequence: Synthetic oligonucleotide
ugacuaaaagccccuuccc

SEQ ID NO: 36938 - RNA, 19 nt, Artificial Sequence
  Description of Artificial Sequence: Synthetic oligonucleotide
augaacaugcaauguaaga

SEQ ID NO: 36939 - RNA, 19 nt, Artificial Sequence
  Description of Artificial Sequence: Synthetic oligonucleotide
cuauucgucuaauacugac

SEQ ID NO: 36940 - RNA, 19 nt, Artificial Sequence
  Description of Artificial Sequence: Synthetic oligonucleotide
aauguaagauucaaauaau

SEQ ID NO: 36941 - RNA, 19 nt, Artificial Sequence
  Description of Artificial Sequence: Synthetic oligonucleotide
uauauuagguuaugucggu

SEQ ID NO: 36942 - RNA, 19 nt, Artificial Sequence
  Description of Artificial Sequence: Synthetic oligonucleotide
uggguauggucguagcccg

SEQ ID NO: 36943 - RNA, 19 nt, Artificial Sequence
  Description of Artificial Sequence: Synthetic oligonucleotide
ugacuaaauuuugauguug

SEQ ID NO: 36944 - RNA, 19 nt, Artificial Sequence
  Description of Artificial Sequence: Synthetic oligonucleotide
ugccuauucgucuaauacu

SEQ ID NO: 36945 - RNA, 19 nt, Artificial Sequence
  Description of Artificial Sequence: Synthetic oligonucleotide
aaggcguauguccuuagaa

SEQ ID NO: 36946 - RNA, 19 nt, Artificial Sequence
  Description of Artificial Sequence: Synthetic oligonucleotide
uuacaugccaucuuccaua

SEQ ID NO: 36947 - RNA, 19 nt, Artificial Sequence
  Description of Artificial Sequence: Synthetic oligonucleotide
gaacuauaauacuguacac

SEQ ID NO: 36948 - RNA, 19 nt, Artificial Sequence
  Description of Artificial Sequence: Synthetic oligonucleotide
cccauuuuaguauauuagg

SEQ ID NO: 36949 - RNA, 19 nt, Artificial Sequence
  Description of Artificial Sequence: Synthetic oligonucleotide
uguaaaacaaugggaauuu

SEQ ID NO: 36950 - RNA, 19 nt, Artificial Sequence
  Description of Artificial Sequence: Synthetic oligonucleotide
aaaugaucaacgucauguu

SEQ ID NO: 36951 - RNA, 19 nt, Artificial Sequence
  Description of Artificial Sequence: Synthetic oligonucleotide
ugaugcacuguagugcggg

SEQ ID NO: 36952 - RNA, 19 nt, Artificial Sequence
  Description of Artificial Sequence: Synthetic oligonucleotide
uucugauguaaugaucaag

SEQ ID NO: 36953 - RNA, 19 nt, Artificial Sequence
  Description of Artificial Sequence: Synthetic oligonucleotide
caaauauauauauauuaua

SEQ ID NO: 36954 - RNA, 19 nt, Artificial Sequence
  Description of Artificial Sequence: Synthetic oligonucleotide
agcuuuagcuuccuuauaa

SEQ ID NO: 36955 - RNA, 19 nt, Artificial Sequence
  Description of Artificial Sequence: Synthetic oligonucleotide
uccguauccauacuuuuau

SEQ ID NO: 36956 - RNA, 19 nt, Artificial Sequence
  Description of Artificial Sequence: Synthetic oligonucleotide
uauucaauauagucccuuc

SEQ ID NO: 36957 - RNA, 19 nt, Artificial Sequence
  Description of Artificial Sequence: Synthetic oligonucleotide
ugacacggaugcuucaaag

SEQ ID NO: 36958 - RNA, 19 nt, Artificial Sequence
  Description of Artificial Sequence: Synthetic oligonucleotide
caagaucguaucaaaguuc

SEQ ID NO: 36959 - RNA, 19 nt, Artificial Sequence
  Description of Artificial Sequence: Synthetic oligonucleotide
aagauucaaauaauuguau

SEQ ID NO: 36960 - RNA, 19 nt, Artificial Sequence
  Description of Artificial Sequence: Synthetic oligonucleotide
gaaaagcgcuuuguggugg

SEQ ID NO: 36961 - RNA, 19 nt, Artificial Sequence
  Description of Artificial Sequence: Synthetic oligonucleotide
uuacauguacaugggagca

SEQ ID NO: 36962 - RNA, 19 nt, Artificial Sequence
  Description of Artificial Sequence: Synthetic oligonucleotide
ugaucacaagucaucugug

SEQ ID NO: 36963 - RNA, 19 nt, Artificial Sequence
  Description of Artificial Sequence: Synthetic oligonucleotide
cuuggcacuaaauggguuc

SEQ ID NO: 36964 - RNA, 19 nt, Artificial Sequence
  Description of Artificial Sequence: Synthetic oligonucleotide
uugugaaaaguaucuaaua

SEQ ID NO: 36965 - RNA, 19 nt, Artificial Sequence
  Description of Artificial Sequence: Synthetic oligonucleotide
auacguagagugcaauucu

SEQ ID NO: 36966 - RNA, 19 nt, Artificial Sequence
  Description of Artificial Sequence: Synthetic oligonucleotide
ugcucuaaaggaagcaauc

SEQ ID NO: 36967 - RNA, 19 nt, Artificial Sequence
  Description of Artificial Sequence: Synthetic oligonucleotide
uuaugucgguauacugagg

SEQ ID NO: 36968 - RNA, 19 nt, Artificial Sequence
  Description of Artificial Sequence: Synthetic oligonucleotide
cugccuauucgucuaauac

SEQ ID NO: 36969 - RNA, 19 nt, Artificial Sequence
  Description of Artificial Sequence: Synthetic oligonucleotide
ggcguauguccuuagaaag

SEQ ID NO: 36970 - RNA, 19 nt, Artificial Sequence
  Description of Artificial Sequence: Synthetic oligonucleotide
uaauuuaccagugucccuu

SEQ ID NO: 36971 - RNA, 19 nt, Artificial Sequence
  Description of Artificial Sequence: Synthetic oligonucleotide
agugcgggcacauuaaauu

SEQ ID NO: 36972 - RNA, 19 nt, Artificial Sequence
  Description of Artificial Sequence: Synthetic oligonucleotide
aucucacaauuaauguucc

SEQ ID NO: 36973 - RNA, 19 nt, Artificial Sequence
  Description of Artificial Sequence: Synthetic oligonucleotide
aguaagcucgguucaucag

SEQ ID NO: 36974 - RNA, 19 nt, Artificial Sequence
  Description of Artificial Sequence: Synthetic oligonucleotide
agugauacauacguagagu

SEQ ID NO: 36975 - RNA, 19 nt, Artificial Sequence
  Description of Artificial Sequence: Synthetic oligonucleotide
cauacguagagugcaauuc

SEQ ID NO: 36976 - RNA, 19 nt, Artificial Sequence
  Description of Artificial Sequence: Synthetic oligonucleotide
ucccuuugauguaagguau

SEQ ID NO: 36977 - RNA, 19 nt, Artificial Sequence
  Description of Artificial Sequence: Synthetic oligonucleotide
cagggugagcuuaacacug

SEQ ID NO: 36978 - RNA, 19 nt, Artificial Sequence
  Description of Artificial Sequence: Synthetic oligonucleotide
aguuauguauguaagccau

SEQ ID NO: 36979 - RNA, 19 nt, Artificial Sequence
  Description of Artificial Sequence: Synthetic oligonucleotide
uuaugucgcagaagggaac

SEQ ID NO: 36980 - RNA, 19 nt, Artificial Sequence
  Description of Artificial Sequence: Synthetic oligonucleotide
caauaauaauaauaauaaa

SEQ ID NO: 36981 - RNA, 19 nt, Artificial Sequence
  Description of Artificial Sequence: Synthetic oligonucleotide
uguagugcgggcacauuaa

SEQ ID NO: 36982 - RNA, 19 nt, Artificial Sequence
  Description of Artificial Sequence: Synthetic oligonucleotide
uuuuaggccuuaacacugu

SEQ ID NO: 36983 - RNA, 19 nt, Artificial Sequence
  Description of Artificial Sequence: Synthetic oligonucleotide
auaauuguauugagcaugu

SEQ ID NO: 36984 - RNA, 19 nt, Artificial Sequence
  Description of Artificial Sequence: Synthetic oligonucleotide
gaucacaagucaucuguga

SEQ ID NO: 36985 - RNA, 19 nt, Artificial Sequence
  Description of Artificial Sequence: Synthetic oligonucleotide
ucgggauccguauccauac

SEQ ID NO: 36986 - RNA, 19 nt, Artificial Sequence
  Description of Artificial Sequence: Synthetic oligonucleotide
aguaccugugauucaugug

SEQ ID NO: 36987 - RNA, 19 nt, Artificial Sequence
  Description of Artificial Sequence: Synthetic oligonucleotide
aacuaaggaacugcugccu

SEQ ID NO: 36988 - RNA, 19 nt, Artificial Sequence
  Description of Artificial Sequence: Synthetic oligonucleotide
ggccauaugugguaggaag

SEQ ID NO: 36989 - RNA, 19 nt, Artificial Sequence
  Description of Artificial Sequence: Synthetic oligonucleotide
ugaucaacgucauguuccu

SEQ ID NO: 36990 - RNA, 19 nt, Artificial Sequence
  Description of Artificial Sequence: Synthetic oligonucleotide
cuggguauggucguagccc

SEQ ID NO: 36991 - RNA, 19 nt, Artificial Sequence
  Description of Artificial Sequence: Synthetic oligonucleotide
aucguaucaaaguucccaa

SEQ ID NO: 36992 - RNA, 19 nt, Artificial Sequence
  Description of Artificial Sequence: Synthetic oligonucleotide
ucgguaucuuaaauucaca

SEQ ID NO: 36993 - RNA, 19 nt, Artificial Sequence
  Description of Artificial Sequence: Synthetic oligonucleotide
augaauagcgaaaggaaaa

SEQ ID NO: 36994 - RNA, 19 nt, Artificial Sequence
  Description of Artificial Sequence: Synthetic oligonucleotide
auauuuugcucuaaaggaa

SEQ ID NO: 36995 - RNA, 19 nt, Artificial Sequence
  Description of Artificial Sequence: Synthetic oligonucleotide
uguuagugauacauacgua

SEQ ID NO: 36996 - RNA, 19 nt, Artificial Sequence
  Description of Artificial Sequence: Synthetic oligonucleotide
gucauuuuaagacuucggu

SEQ ID NO: 36997 - RNA, 19 nt, Artificial Sequence
  Description of Artificial Sequence: Synthetic oligonucleotide
guuaggaagggagccacag

SEQ ID NO: 36998 - RNA, 19 nt, Artificial Sequence
  Description of Artificial Sequence: Synthetic oligonucleotide
ggaagcgucaggcacgugc

SEQ ID NO: 36999 - RNA, 19 nt, Artificial Sequence
  Description of Artificial Sequence: Synthetic oligonucleotide
auuugaauaauugccccau

SEQ ID NO: 37000 - RNA, 19 nt, Artificial Sequence
  Description of Artificial Sequence: Synthetic oligonucleotide
cucgauaaggugguguuug

SEQ ID NO: 37001 - RNA, 19 nt, Artificial Sequence
  Description of Artificial Sequence: Synthetic oligonucleotide
ucccguaucguuucgggau

SEQ ID NO: 37002 - RNA, 19 nt, Artificial Sequence
  Description of Artificial Sequence: Synthetic oligonucleotide
gaggaaucgaaauauugau

SEQ ID NO: 37003 - RNA, 19 nt, Artificial Sequence
  Description of Artificial Sequence: Synthetic oligonucleotide
aguuugcuauuauaugaau

SEQ ID NO: 37004 - RNA, 19 nt, Artificial Sequence
  Description of Artificial Sequence: Synthetic oligonucleotide
uaugucgcagaagggaacu

SEQ ID NO: 37005 - RNA, 19 nt, Artificial Sequence
  Description of Artificial Sequence: Synthetic oligonucleotide
uacccucucaacaacugua

SEQ ID NO: 37006 - RNA, 19 nt, Artificial Sequence
  Description of Artificial Sequence: Synthetic oligonucleotide
gauguaugguagugcgggc

SEQ ID NO: 37007 - RNA, 19 nt, Artificial Sequence
  Description of Artificial Sequence: Synthetic oligonucleotide
uacugauguaugguagugc

SEQ ID NO: 37008 - RNA, 19 nt, Artificial Sequence
  Description of Artificial Sequence: Synthetic oligonucleotide
caucccguaucguuucggg

SEQ ID NO: 37009 - RNA, 19 nt, Artificial Sequence
  Description of Artificial Sequence: Synthetic oligonucleotide
aaaagcgcuuuguggugga

SEQ ID NO: 37010 - RNA, 19 nt, Artificial Sequence
  Description of Artificial Sequence: Synthetic oligonucleotide
uauggucguagcccgggga

SEQ ID NO: 37011 - RNA, 19 nt, Artificial Sequence
  Description of Artificial Sequence: Synthetic oligonucleotide
gucgguauacugaggagag

SEQ ID NO: 37012 - RNA, 19 nt, Artificial Sequence
  Description of Artificial Sequence: Synthetic oligonucleotide
uauuagugcugugagugau

SEQ ID NO: 37013 - RNA, 19 nt, Artificial Sequence
  Description of Artificial Sequence: Synthetic oligonucleotide
uaguauuagugcugugagu

SEQ ID NO: 37014 - RNA, 19 nt, Artificial Sequence
  Description of Artificial Sequence: Synthetic oligonucleotide
uguuguuaaggcguauguc

SEQ ID NO: 37015 - RNA, 19 nt, Artificial Sequence
  Description of Artificial Sequence: Synthetic oligonucleotide
ugcgggcacauuaaauuaa

SEQ ID NO: 37016 - RNA, 19 nt, Artificial Sequence
  Description of Artificial Sequence: Synthetic oligonucleotide
uuuuaacaauacccagcuc

SEQ ID NO: 37017 - RNA, 19 nt, Artificial Sequence
  Description of Artificial Sequence: Synthetic oligonucleotide
guaaacuaaggaacugcug

SEQ ID NO: 37018 - RNA, 19 nt, Artificial Sequence
  Description of Artificial Sequence: Synthetic oligonucleotide
auaggccauaugugguagg

SEQ ID NO: 37019 - RNA, 19 nt, Artificial Sequence
  Description of Artificial Sequence: Synthetic oligonucleotide
auucaaauauauauauauu

SEQ ID NO: 37020 - RNA, 19 nt, Artificial Sequence
  Description of Artificial Sequence: Synthetic oligonucleotide
ugccccauugcacaucaaa

SEQ ID NO: 37021 - RNA, 19 nt, Artificial Sequence
  Description of Artificial Sequence: Synthetic oligonucleotide
cacggaugcuucaaagaac

SEQ ID NO: 37022 - RNA, 19 nt, Artificial Sequence
  Description of Artificial Sequence: Synthetic oligonucleotide
uagguuaugucgguauacu

SEQ ID NO: 37023 - RNA, 19 nt, Artificial Sequence
  Description of Artificial Sequence: Synthetic oligonucleotide
auacugauguaugguagug

SEQ ID NO: 37024 - RNA, 19 nt, Artificial Sequence
  Description of Artificial Sequence: Synthetic oligonucleotide
cuguguauaaaggcuuggc

SEQ ID NO: 37025 - RNA, 19 nt, Artificial Sequence
  Description of Artificial Sequence: Synthetic oligonucleotide
uaaggcguauguccuuaga

SEQ ID NO: 37026 - RNA, 19 nt, Artificial Sequence
  Description of Artificial Sequence: Synthetic oligonucleotide
aggcguauguccuuagaaa

SEQ ID NO: 37027 - RNA, 19 nt, Artificial Sequence
  Description of Artificial Sequence: Synthetic oligonucleotide
cuucaagccccucccauuc

SEQ ID NO: 37028 - RNA, 19 nt, Artificial Sequence
  Description of Artificial Sequence: Synthetic oligonucleotide
uucgggauccguauccaua

SEQ ID NO: 37029 - RNA, 19 nt, Artificial Sequence
  Description of Artificial Sequence: Synthetic oligonucleotide
agcucgguggguuccaagu

SEQ ID NO: 37030 - RNA, 19 nt, Artificial Sequence
  Description of Artificial Sequence: Synthetic oligonucleotide
ugcgggcaccuuuuaaaug

SEQ ID NO: 37031 - RNA, 19 nt, Artificial Sequence
  Description of Artificial Sequence: Synthetic oligonucleotide
uguauugagcauguuuauu

SEQ ID NO: 37032 - RNA, 19 nt, Artificial Sequence
  Description of Artificial Sequence: Synthetic oligonucleotide
uacguagagugcaauucuu

SEQ ID NO: 37033 - RNA, 19 nt, Artificial Sequence
  Description of Artificial Sequence: Synthetic oligonucleotide
uaugugguaggaagcucau

SEQ ID NO: 37034 - RNA, 19 nt, Artificial Sequence
  Description of Artificial Sequence: Synthetic oligonucleotide
ucguccauggagugauccc

SEQ ID NO: 37035 - RNA, 19 nt, Artificial Sequence
  Description of Artificial Sequence: Synthetic oligonucleotide
aucguuucgggauccguau

SEQ ID NO: 37036 - RNA, 19 nt, Artificial Sequence
  Description of Artificial Sequence: Synthetic oligonucleotide
uccucaucccguaucguuu

SEQ ID NO: 37037 - RNA, 19 nt, Artificial Sequence
  Description of Artificial Sequence: Synthetic oligonucleotide
gccuauucgucuaauacug

SEQ ID NO: 37038 - RNA, 19 nt, Artificial Sequence
  Description of Artificial Sequence: Synthetic oligonucleotide
acagcgaagguaacaaaga

SEQ ID NO: 37039 - RNA, 19 nt, Artificial Sequence
  Description of Artificial Sequence: Synthetic oligonucleotide
gaaacaaaugccacugagu

SEQ ID NO: 37040 - RNA, 19 nt, Artificial Sequence
  Description of Artificial Sequence: Synthetic oligonucleotide
acauacguagagugcaauu

SEQ ID NO: 37041 - RNA, 19 nt, Artificial Sequence
  Description of Artificial Sequence: Synthetic oligonucleotide
gguuaugucgguauacuga

SEQ ID NO: 37042 - RNA, 19 nt, Artificial Sequence
  Description of Artificial Sequence: Synthetic oligonucleotide
acccucucaacaacuguac

SEQ ID NO: 37043 - RNA, 19 nt, Artificial Sequence
  Description of Artificial Sequence: Synthetic oligonucleotide
ucguaucaaaguucccaaa

SEQ ID NO: 37044 - RNA, 19 nt, Artificial Sequence
  Description of Artificial Sequence: Synthetic oligonucleotide
ugcucgauaaggugguguu

SEQ ID NO: 37045 - RNA, 19 nt, Artificial Sequence
  Description of Artificial Sequence: Synthetic oligonucleotide
gaguaggagcccgagugug

SEQ ID NO: 37046 - RNA, 19 nt, Artificial Sequence
  Description of Artificial Sequence: Synthetic oligonucleotide
aagugcccuuucucucgcg

SEQ ID NO: 37047 - RNA, 19 nt, Artificial Sequence
  Description of Artificial Sequence: Synthetic oligonucleotide
agaucguaucaaaguuccc

SEQ ID NO: 37048 - RNA, 19 nt, Artificial Sequence
  Description of Artificial Sequence: Synthetic oligonucleotide
aggcuguaaaacaauggga

SEQ ID NO: 37049 - RNA, 19 nt, Artificial Sequence
  Description of Artificial Sequence: Synthetic oligonucleotide
ucucugaaccacacaguuu

SEQ ID NO: 37050 - RNA, 19 nt, Artificial Sequence
  Description of Artificial Sequence: Synthetic oligonucleotide
uuggguagguauaggccau

SEQ ID NO: 37051 - RNA, 19 nt, Artificial Sequence
  Description of Artificial Sequence: Synthetic oligonucleotide
ucccgcuugcaguaggagu

SEQ ID NO: 37052 - RNA, 19 nt, Artificial Sequence
  Description of Artificial Sequence: Synthetic oligonucleotide
cacugaagcuggugcaaag

SEQ ID NO: 37053 - RNA, 19 nt, Artificial Sequence
  Description of Artificial Sequence: Synthetic oligonucleotide
aggaagcuuaaaaugcagu

SEQ ID NO: 37054 - RNA, 19 nt, Artificial Sequence
  Description of Artificial Sequence: Synthetic oligonucleotide
aguuguugcuuaaaguaua

SEQ ID NO: 37055 - RNA, 19 nt, Artificial Sequence
  Description of Artificial Sequence: Synthetic oligonucleotide
gguuacuuaggcuguaaaa

SEQ ID NO: 37056 - RNA, 19 nt, Artificial Sequence
  Description of Artificial Sequence: Synthetic oligonucleotide
accggguuagugcuuuugu

SEQ ID NO: 37057 - RNA, 19 nt, Artificial Sequence
  Description of Artificial Sequence: Synthetic oligonucleotide
ggaaaagcgcuuuguggug

SEQ ID NO: 37058 - RNA, 19 nt, Artificial Sequence
  Description of Artificial Sequence: Synthetic oligonucleotide
uagagaugucacaucccua

SEQ ID NO: 37059 - RNA, 19 nt, Artificial Sequence
  Description of Artificial Sequence: Synthetic oligonucleotide
guauuagugcugugaguga

SEQ ID NO: 37060 - RNA, 19 nt, Artificial Sequence
  Description of Artificial Sequence: Synthetic oligonucleotide
acguaaaauuugcccaaau

SEQ ID NO: 37061 - RNA, 19 nt, Artificial Sequence
  Description of Artificial Sequence: Synthetic oligonucleotide
ucgauaaggugguguuugu

SEQ ID NO: 37062 - RNA, 19 nt, Artificial Sequence
  Description of Artificial Sequence: Synthetic oligonucleotide
guauggucguagcccgggg

SEQ ID NO: 37063 - RNA, 19 nt, Artificial Sequence
  Description of Artificial Sequence: Synthetic oligonucleotide
guaggagcccgagugugag

SEQ ID NO: 37064 - RNA, 19 nt, Artificial Sequence
  Description of Artificial Sequence: Synthetic oligonucleotide
uguuaaggcguauguccuu

SEQ ID NO: 37065 - RNA, 19 nt, Artificial Sequence
  Description of Artificial Sequence: Synthetic oligonucleotide
gacuucgguaucuuaaauu

SEQ ID NO: 37066 - RNA, 19 nt, Artificial Sequence
  Description of Artificial Sequence: Synthetic oligonucleotide
gucguccauggagugaucc

SEQ ID NO: 37067 - RNA, 19 nt, Artificial Sequence
  Description of Artificial Sequence: Synthetic oligonucleotide
ccaaguuacccucucaaca

SEQ ID NO: 37068 - RNA, 19 nt, Artificial Sequence
  Description of Artificial Sequence: Synthetic oligonucleotide
cguagagugcaauucuuag

SEQ ID NO: 37069 - RNA, 19 nt, Artificial Sequence
  Description of Artificial Sequence: Synthetic oligonucleotide
ccgaacaccggguuagugc

SEQ ID NO: 37070 - RNA, 19 nt, Artificial Sequence
  Description of Artificial Sequence: Synthetic oligonucleotide
uugguguaauacugacaaa

SEQ ID NO: 37071 - RNA, 19 nt, Artificial Sequence
  Description of Artificial Sequence: Synthetic oligonucleotide
caagugcccuuucucucgc

SEQ ID NO: 37072 - RNA, 19 nt, Artificial Sequence
  Description of Artificial Sequence: Synthetic oligonucleotide
uacauacguagagugcaau

SEQ ID NO: 37073 - RNA, 19 nt, Artificial Sequence
  Description of Artificial Sequence: Synthetic oligonucleotide
aggccuuaacacuguacaa

SEQ ID NO: 37074 - RNA, 19 nt, Artificial Sequence
  Description of Artificial Sequence: Synthetic oligonucleotide
aucccguaucguuucggga

SEQ ID NO: 37075 - RNA, 19 nt, Artificial Sequence
  Description of Artificial Sequence: Synthetic oligonucleotide
gaauagcgaaaggaaaagu

SEQ ID NO: 37076 - RNA, 19 nt, Artificial Sequence
  Description of Artificial Sequence: Synthetic oligonucleotide
ccugugauucaugugcugc

SEQ ID NO: 37077 - RNA, 19 nt, Artificial Sequence
  Description of Artificial Sequence: Synthetic oligonucleotide
aacaccggguuagugcuuu

SEQ ID NO: 37078 - RNA, 19 nt, Artificial Sequence
  Description of Artificial Sequence: Synthetic oligonucleotide
auaugaucugugauguguu

SEQ ID NO: 37079 - RNA, 19 nt, Artificial Sequence
  Description of Artificial Sequence: Synthetic oligonucleotide
cccauaacccuccucgccc

SEQ ID NO: 37080 - RNA, 19 nt, Artificial Sequence
  Description of Artificial Sequence: Synthetic oligonucleotide
cuuugacgaugcauauuca

SEQ ID NO: 37081 - RNA, 19 nt, Artificial Sequence
  Description of Artificial Sequence: Synthetic oligonucleotide
agcgaagguaacaaagauu

SEQ ID NO: 37082 - RNA, 19 nt, Artificial Sequence
  Description of Artificial Sequence: Synthetic oligonucleotide
agccucgagugcucgauaa

SEQ ID NO: 37083 - RNA, 19 nt, Artificial Sequence
  Description of Artificial Sequence: Synthetic oligonucleotide
uagugcgggcaccuuuuaa

SEQ ID NO: 37084 - RNA, 19 nt, Artificial Sequence
  Description of Artificial Sequence: Synthetic oligonucleotide
gguauggucguagcccggg

SEQ ID NO: 37085 - RNA, 19 nt, Artificial Sequence
  Description of Artificial Sequence: Synthetic oligonucleotide
aagccuuguuuccgcuggu

SEQ ID NO: 37086 - RNA, 19 nt, Artificial Sequence
  Description of Artificial Sequence: Synthetic oligonucleotide
ccguuggguagguauaggc

SEQ ID NO: 37087 - RNA, 19 nt, Artificial Sequence
  Description of Artificial Sequence: Synthetic oligonucleotide
uaauacugacacggaugcu

SEQ ID NO: 37088 - RNA, 19 nt, Artificial Sequence
  Description of Artificial Sequence: Synthetic oligonucleotide
ucguuucgggauccguauc

SEQ ID NO: 37089 - RNA, 19 nt, Artificial Sequence
  Description of Artificial Sequence: Synthetic oligonucleotide
gguagguauaggccauaug

SEQ ID NO: 37090 - RNA, 19 nt, Artificial Sequence
  Description of Artificial Sequence: Synthetic oligonucleotide
gcgaagguaacaaagauuu

SEQ ID NO: 37091 - RNA, 19 nt, Artificial Sequence
  Description of Artificial Sequence: Synthetic oligonucleotide
cugugauguguucauauau

SEQ ID NO: 37092 - RNA, 19 nt, Artificial Sequence
  Description of Artificial Sequence: Synthetic oligonucleotide
gcuguguauaaaggcuugg

SEQ ID NO: 37093 - RNA, 19 nt, Artificial Sequence
  Description of Artificial Sequence: Synthetic oligonucleotide
ucgcccgagugcagccucg

SEQ ID NO: 37094 - RNA, 19 nt, Artificial Sequence
  Description of Artificial Sequence: Synthetic oligonucleotide
gaacugucguccauggagu

SEQ ID NO: 37095 - RNA, 19 nt, Artificial Sequence
  Description of Artificial Sequence: Synthetic oligonucleotide
auauuagguuaugucggua

SEQ ID NO: 37096 - RNA, 19 nt, Artificial Sequence
  Description of Artificial Sequence: Synthetic oligonucleotide
ccauuuuaguauauuaggu

SEQ ID NO: 37097 - RNA, 19 nt, Artificial Sequence
  Description of Artificial Sequence: Synthetic oligonucleotide
gugcgggcacauuaaauua

SEQ ID NO: 37098 - RNA, 19 nt, Artificial Sequence
  Description of Artificial Sequence: Synthetic oligonucleotide
gauccguauccauacuuuu

SEQ ID NO: 37099 - RNA, 19 nt, Artificial Sequence
  Description of Artificial Sequence: Synthetic oligonucleotide
cguuucgggauccguaucc

SEQ ID NO: 37100 - RNA, 19 nt, Artificial Sequence
  Description of Artificial Sequence: Synthetic oligonucleotide
guuaaggcguauguccuua

SEQ ID NO: 37101 - RNA, 19 nt, Artificial Sequence
  Description of Artificial Sequence: Synthetic oligonucleotide
gaacugcugccuauucguc

SEQ ID NO: 37102 - RNA, 19 nt, Artificial Sequence
  Description of Artificial Sequence: Synthetic oligonucleotide
guaugguagugcgggcacc

SEQ ID NO: 37103 - RNA, 19 nt, Artificial Sequence
  Description of Artificial Sequence: Synthetic oligonucleotide
auacauacguagagugcaa

SEQ ID NO: 37104 - RNA, 19 nt, Artificial Sequence
  Description of Artificial Sequence: Synthetic oligonucleotide
guagugcgggcacauuaaa

SEQ ID NO: 37105 - RNA, 19 nt, Artificial Sequence
  Description of Artificial Sequence: Synthetic oligonucleotide
cacaggaauuagucucuga

SEQ ID NO: 37106 - RNA, 19 nt, Artificial Sequence
  Description of Artificial Sequence: Synthetic oligonucleotide
gcgggcaccuuuuaaaugu

SEQ ID NO: 37107 - RNA, 19 nt, Artificial Sequence
  Description of Artificial Sequence: Synthetic oligonucleotide
aucccaucucacaauuaau

SEQ ID NO: 37108 - RNA, 19 nt, Artificial Sequence
  Description of Artificial Sequence: Synthetic oligonucleotide
uaauuguauugagcauguu

SEQ ID NO: 37109 - RNA, 19 nt, Artificial Sequence
  Description of Artificial Sequence: Synthetic oligonucleotide
caugucgucuaggccugac

SEQ ID NO: 37110 - RNA, 19 nt, Artificial Sequence
  Description of Artificial Sequence: Synthetic oligonucleotide
cuaaggaacugcugccuau

SEQ ID NO: 37111 - RNA, 19 nt, Artificial Sequence
  Description of Artificial Sequence: Synthetic oligonucleotide
ccaaaugaucaacgucaug

SEQ ID NO: 37112 - RNA, 19 nt, Artificial Sequence
  Description of Artificial Sequence: Synthetic oligonucleotide
guacaugggagcacauacu

SEQ ID NO: 37113 - RNA, 19 nt, Artificial Sequence
  Description of Artificial Sequence: Synthetic oligonucleotide
gcguauguccuuagaaaga

SEQ ID NO: 37114 - RNA, 19 nt, Artificial Sequence
  Description of Artificial Sequence: Synthetic oligonucleotide
cagcgaagguaacaaagau

SEQ ID NO: 37115 - RNA, 19 nt, Artificial Sequence
  Description of Artificial Sequence: Synthetic oligonucleotide
gguguaauacugacaaaau

SEQ ID NO: 37116 - RNA, 19 nt, Artificial Sequence
  Description of Artificial Sequence: Synthetic oligonucleotide
caccggguuagugcuuuug

SEQ ID NO: 37117 - RNA, 19 nt, Artificial Sequence
  Description of Artificial Sequence: Synthetic oligonucleotide
caugccgaacaccggguua

SEQ ID NO: 37118 - RNA, 19 nt, Artificial Sequence
  Description of Artificial Sequence: Synthetic oligonucleotide
agaguaccccugaggggug

SEQ ID NO: 37119 - RNA, 19 nt, Artificial Sequence
  Description of Artificial Sequence: Synthetic oligonucleotide
ucucgccaucccucggcau

SEQ ID NO: 37120 - RNA, 19 nt, Artificial Sequence
  Description of Artificial Sequence: Synthetic oligonucleotide
cuaagccuucaguaugaau

SEQ ID NO: 37121 - RNA, 19 nt, Artificial Sequence
  Description of Artificial Sequence: Synthetic oligonucleotide
ggaguaccugugauucaug

SEQ ID NO: 37122 - RNA, 19 nt, Artificial Sequence
  Description of Artificial Sequence: Synthetic oligonucleotide
aggccauaugugguaggaa

SEQ ID NO: 37123 - RNA, 19 nt, Artificial Sequence
  Description of Artificial Sequence: Synthetic oligonucleotide
ugcugccuauucgucuaau

SEQ ID NO: 37124 - RNA, 19 nt, Artificial Sequence
  Description of Artificial Sequence: Synthetic oligonucleotide
gugcgggcaccuuuuaaau

SEQ ID NO: 37125 - RNA, 19 nt, Artificial Sequence
  Description of Artificial Sequence: Synthetic oligonucleotide
ccuauucgucuaauacuga

SEQ ID NO: 37126 - RNA, 19 nt, Artificial Sequence
  Description of Artificial Sequence: Synthetic oligonucleotide
gugguuacuuaggcuguaa

SEQ ID NO: 37127 - RNA, 19 nt, Artificial Sequence
  Description of Artificial Sequence: Synthetic oligonucleotide
guaucguuucgggauccgu

SEQ ID NO: 37128 - RNA, 19 nt, Artificial Sequence
  Description of Artificial Sequence: Synthetic oligonucleotide
gaguaccccugagggguga

SEQ ID NO: 37129 - RNA, 19 nt, Artificial Sequence
  Description of Artificial Sequence: Synthetic oligonucleotide
ugccgaacaccggguuagu

SEQ ID NO: 37130 - RNA, 19 nt, Artificial Sequence
  Description of Artificial Sequence: Synthetic oligonucleotide
cccguaucguuucgggauc

SEQ ID NO: 37131 - RNA, 19 nt, Artificial Sequence
  Description of Artificial Sequence: Synthetic oligonucleotide
ggguauggucguagcccgg

SEQ ID NO: 37132 - RNA, 19 nt, Artificial Sequence
  Description of Artificial Sequence: Synthetic oligonucleotide
agcuuccuuauaacaucua

SEQ ID NO: 37133 - RNA, 19 nt, Artificial Sequence
  Description of Artificial Sequence: Synthetic oligonucleotide
guagugcgggcaccuuuua

SEQ ID NO: 37134 - RNA, 19 nt, Artificial Sequence
  Description of Artificial Sequence: Synthetic oligonucleotide
ccacugcaaguucaauuca

SEQ ID NO: 37135 - RNA, 19 nt, Artificial Sequence
  Description of Artificial Sequence: Synthetic oligonucleotide
gggauccguauccauacuu

SEQ ID NO: 37136 - RNA, 19 nt, Artificial Sequence
  Description of Artificial Sequence: Synthetic oligonucleotide
agccuuguuuccgcuggua

SEQ ID NO: 37137 - RNA, 19 nt, Artificial Sequence
  Description of Artificial Sequence: Synthetic oligonucleotide
ggcacaagccauguauggu

SEQ ID NO: 37138 - RNA, 19 nt, Artificial Sequence
  Description of Artificial Sequence: Synthetic oligonucleotide
ccguaucguuucgggaucc

SEQ ID NO: 37139 - RNA, 19 nt, Artificial Sequence
  Description of Artificial Sequence: Synthetic oligonucleotide
ccuuugauguaagguaucu

SEQ ID NO: 37140 - RNA, 19 nt, Artificial Sequence
  Description of Artificial Sequence: Synthetic oligonucleotide
cccguuggguagguauagg

SEQ ID NO: 37141 - RNA, 19 nt, Artificial Sequence
  Description of Artificial Sequence: Synthetic oligonucleotide
cgaacaccggguuagugcu

SEQ ID NO: 37142 - RNA, 19 nt, Artificial Sequence
  Description of Artificial Sequence: Synthetic oligonucleotide
gccgaacaccggguuagug

SEQ ID NO: 37143 - RNA, 19 nt, Artificial Sequence
  Description of Artificial Sequence: Synthetic oligonucleotide
ccauaugugguaggaagcu

SEQ ID NO: 37144 - RNA, 19 nt, Artificial Sequence
  Description of Artificial Sequence: Synthetic oligonucleotide
ggauccguauccauacuuu

SEQ ID NO: 37145 - RNA, 19 nt, Artificial Sequence
  Description of Artificial Sequence: Synthetic oligonucleotide
gcagucauucugauguaau

SEQ ID NO: 37146 - RNA, 19 nt, Artificial Sequence
  Description of Artificial Sequence: Synthetic oligonucleotide
acaccggguuagugcuuuu

SEQ ID NO: 37147 - RNA, 19 nt, Artificial Sequence
  Description of Artificial Sequence: Synthetic oligonucleotide
cguaucguuucgggauccg

SEQ ID NO: 37148 - RNA, 19 nt, Artificial Sequence
  Description of Artificial Sequence: Synthetic oligonucleotide
cuggaagcgucaggcacgu

SEQ ID NO: 37149 - RNA, 19 nt, Artificial Sequence
  Description of Artificial Sequence: Synthetic oligonucleotide
gcuaagccuucaguaugaa

SEQ ID NO: 37150 - RNA, 19 nt, Artificial Sequence
  Description of Artificial Sequence: Synthetic oligonucleotide
gguagugcgggcaccuuuu

SEQ ID NO: 37151 - RNA, 19 nt, Artificial Sequence
  Description of Artificial Sequence: Synthetic oligonucleotide
guagcccggggaugcuggu

SEQ ID NO: 37152 - RNA, 19 nt, Artificial Sequence
  Description of Artificial Sequence: Synthetic oligonucleotide
cagccucgagugcucgaua

SEQ ID NO: 37153 - RNA, 19 nt, Artificial Sequence
  Description of Artificial Sequence: Synthetic oligonucleotide
ccauaacccuccucgcccu

SEQ ID NO: 37154 - RNA, 19 nt, Artificial Sequence
  Description of Artificial Sequence: Synthetic oligonucleotide
ggguagguauaggccauau

SEQ ID NO: 37155 - RNA, 19 nt, Artificial Sequence
  Description of Artificial Sequence: Synthetic oligonucleotide
ccggguuagugcuuuuguu

SEQ ID NO: 37156 - RNA, 19 nt, Artificial Sequence
  Description of Artificial Sequence: Synthetic oligonucleotide
gucguagcccggggaugcu

SEQ ID NO: 37157 - RNA, 19 nt, Artificial Sequence
  Description of Artificial Sequence: Synthetic oligonucleotide
ccguauccauacuuuuauu

SEQ ID NO: 37158 - RNA, 19 nt, Artificial Sequence
  Description of Artificial Sequence: Synthetic oligonucleotide
cgggauccguauccauacu

SEQ ID NO: 37159 - RNA, 19 nt, Artificial Sequence
  Description of Artificial Sequence: Synthetic oligonucleotide
aacaaguuguauuuucucc

SEQ ID NO: 37160 - RNA, 19 nt, Artificial Sequence
  Description of Artificial Sequence: Synthetic oligonucleotide
aaaggaucauccuugaaag

SEQ ID NO: 37161 - RNA, 19 nt, Artificial Sequence
  Description of Artificial Sequence: Synthetic oligonucleotide
aagauuagggcacacuuac

SEQ ID NO: 37162 - RNA, 19 nt, Artificial Sequence
  Description of Artificial Sequence: Synthetic oligonucleotide
aguauaagcaggcaagagc

SEQ ID NO: 37163 - RNA, 19 nt, Artificial Sequence
  Description of Artificial Sequence: Synthetic oligonucleotide
uacauauccguccauaucc

SEQ ID NO: 37164 - RNA, 19 nt, Artificial Sequence
  Description of Artificial Sequence: Synthetic oligonucleotide
auugauuaagugaaaagcc

SEQ ID NO: 37165 - RNA, 19 nt, Artificial Sequence
  Description of Artificial Sequence: Synthetic oligonucleotide
aaauuaguaacucauguua

SEQ ID NO: 37166 - RNA, 19 nt, Artificial Sequence
  Description of Artificial Sequence: Synthetic oligonucleotide
aaagcgagggaauauaugu

SEQ ID NO: 37167 - RNA, 19 nt, Artificial Sequence
  Description of Artificial Sequence: Synthetic oligonucleotide
aaacucuuuguuucaagcg

SEQ ID NO: 37168 - RNA, 19 nt, Artificial Sequence
  Description of Artificial Sequence: Synthetic oligonucleotide
ggaaguuugaugcacaugg

SEQ ID NO: 37169 - RNA, 19 nt, Artificial Sequence
  Description of Artificial Sequence: Synthetic oligonucleotide
uuaaacuacaaagacagac

SEQ ID NO: 37170 - RNA, 19 nt, Artificial Sequence
  Description of Artificial Sequence: Synthetic oligonucleotide
aacagcacgaaacuacauc

SEQ ID NO: 37171 - RNA, 19 nt, Artificial Sequence
  Description of Artificial Sequence: Synthetic oligonucleotide
uaaggaugagucuauauga

SEQ ID NO: 37172 - RNA, 19 nt, Artificial Sequence
  Description of Artificial Sequence: Synthetic oligonucleotide
agucaacuuaccuuucucc

SEQ ID NO: 37173 - RNA, 19 nt, Artificial Sequence
  Description of Artificial Sequence: Synthetic oligonucleotide
uauaugacuuuuaugcuga

SEQ ID NO: 37174 - RNA, 19 nt, Artificial Sequence
  Description of Artificial Sequence: Synthetic oligonucleotide
aaauacuuaggccacugga

SEQ ID NO: 37175 - RNA, 19 nt, Artificial Sequence
  Description of Artificial Sequence: Synthetic oligonucleotide
auuugcuuagugcaauggc

SEQ ID NO: 37176 - RNA, 19 nt, Artificial Sequence
  Description of Artificial Sequence: Synthetic oligonucleotide
uccaauucuagcuaaagau

SEQ ID NO: 37177 - RNA, 19 nt, Artificial Sequence
  Description of Artificial Sequence: Synthetic oligonucleotide
uugacuaguuauuucaucu

SEQ ID NO: 37178 - RNA, 19 nt, Artificial Sequence
  Description of Artificial Sequence: Synthetic oligonucleotide
uuugcuuagugcaauggca

SEQ ID NO: 37179 - RNA, 19 nt, Artificial Sequence
  Description of Artificial Sequence: Synthetic oligonucleotide
ucugauaucuccgauuugc

SEQ ID NO: 37180 - RNA, 19 nt, Artificial Sequence
  Description of Artificial Sequence: Synthetic oligonucleotide
ucucuagauaacaaguugu

SEQ ID NO: 37181 - RNA, 19 nt, Artificial Sequence
  Description of Artificial Sequence: Synthetic oligonucleotide
agaaguacauaugaugcac

SEQ ID NO: 37182 - RNA, 19 nt, Artificial Sequence
  Description of Artificial Sequence: Synthetic oligonucleotide
gugggguuuauuuauaggc

SEQ ID NO: 37183 - RNA, 19 nt, Artificial Sequence
  Description of Artificial Sequence: Synthetic oligonucleotide
aggaugagucuauaugacc

SEQ ID NO: 37184 - RNA, 19 nt, Artificial Sequence
  Description of Artificial Sequence: Synthetic oligonucleotide
ugcaacaaauacuuaggcc

SEQ ID NO: 37185 - RNA, 19 nt, Artificial Sequence
  Description of Artificial Sequence: Synthetic oligonucleotide
uuaccuuucuccugaagag

SEQ ID NO: 37186 - RNA, 19 nt, Artificial Sequence
  Description of Artificial Sequence: Synthetic oligonucleotide
aauuucuaucgauguauug

SEQ ID NO: 37187 - RNA, 19 nt, Artificial Sequence
  Description of Artificial Sequence: Synthetic oligonucleotide
cacuagaccugucugaugg

SEQ ID NO: 37188 - RNA, 19 nt, Artificial Sequence
  Description of Artificial Sequence: Synthetic oligonucleotide
uaugaauuacuugagccug

SEQ ID NO: 37189 - RNA, 19 nt, Artificial Sequence
  Description of Artificial Sequence: Synthetic oligonucleotide
gauaacaaguuguauuuuc

SEQ ID NO: 37190 - RNA, 19 nt, Artificial Sequence
  Description of Artificial Sequence: Synthetic oligonucleotide
agaagguaaaccuguuuuc

SEQ ID NO: 37191 - RNA, 19 nt, Artificial Sequence
  Description of Artificial Sequence: Synthetic oligonucleotide
uaugucguauauaugacuu

SEQ ID NO: 37192 - RNA, 19 nt, Artificial Sequence
  Description of Artificial Sequence: Synthetic oligonucleotide
uccaaauuucuaucgaugu

SEQ ID NO: 37193 - RNA, 19 nt, Artificial Sequence
  Description of Artificial Sequence: Synthetic oligonucleotide
aguucaauaccaccuuaac

SEQ ID NO: 37194 - RNA, 19 nt, Artificial Sequence
  Description of Artificial Sequence: Synthetic oligonucleotide
agaugguuaaaacucuuug

SEQ ID NO: 37195 - RNA, 19 nt, Artificial Sequence
  Description of Artificial Sequence: Synthetic oligonucleotide
uuucuaucgauguauugcu

SEQ ID NO: 37196 - RNA, 19 nt, Artificial Sequence
  Description of Artificial Sequence: Synthetic oligonucleotide
agggagaauaccugcacac

SEQ ID NO: 37197 - RNA, 19 nt, Artificial Sequence
  Description of Artificial Sequence: Synthetic oligonucleotide
cauaugaugcacuuuuaac

SEQ ID NO: 37198 - RNA, 19 nt, Artificial Sequence
  Description of Artificial Sequence: Synthetic oligonucleotide
ugaagugguaaaaggguca

SEQ ID NO: 37199 - RNA, 19 nt, Artificial Sequence
  Description of Artificial Sequence: Synthetic oligonucleotide
uuugcauugaacugauuuc

SEQ ID NO: 37200 - RNA, 19 nt, Artificial Sequence
  Description of Artificial Sequence: Synthetic oligonucleotide
uugcaacaaauacuuaggc

SEQ ID NO: 37201 - RNA, 19 nt, Artificial Sequence
  Description of Artificial Sequence: Synthetic oligonucleotide
uuaacuggcuauuguacug

SEQ ID NO: 37202 - RNA, 19 nt, Artificial Sequence
  Description of Artificial Sequence: Synthetic oligonucleotide
acagcacgaaacuacaucu

SEQ ID NO: 37203 - RNA, 19 nt, Artificial Sequence
  Description of Artificial Sequence: Synthetic oligonucleotide
cuuuacagaauauguugcc

SEQ ID NO: 37204 - RNA, 19 nt, Artificial Sequence
  Description of Artificial Sequence: Synthetic oligonucleotide
ugggguuuauuuauaggcc

SEQ ID NO: 37205 - RNA, 19 nt, Artificial Sequence
  Description of Artificial Sequence: Synthetic oligonucleotide
cauuaaauggaucuuccuc

SEQ ID NO: 37206 - RNA, 19 nt, Artificial Sequence
  Description of Artificial Sequence: Synthetic oligonucleotide
aaggaugagucuauaugac

SEQ ID NO: 37207 - RNA, 19 nt, Artificial Sequence
  Description of Artificial Sequence: Synthetic oligonucleotide
uccaauuuguugauggguc

SEQ ID NO: 37208 - RNA, 19 nt, Artificial Sequence
  Description of Artificial Sequence: Synthetic oligonucleotide
aauuacuaacuguaauuua

SEQ ID NO: 37209 - RNA, 19 nt, Artificial Sequence
  Description of Artificial Sequence: Synthetic oligonucleotide
uuagcaaaauugcuugggu

SEQ ID NO: 37210 - RNA, 19 nt, Artificial Sequence
  Description of Artificial Sequence: Synthetic oligonucleotide
aacuugauaugguaggauu

SEQ ID NO: 37211 - RNA, 19 nt, Artificial Sequence
  Description of Artificial Sequence: Synthetic oligonucleotide
ucaauaccaccuuaacuug

SEQ ID NO: 37212 - RNA, 19 nt, Artificial Sequence
  Description of Artificial Sequence: Synthetic oligonucleotide
uguuucacauacaaggcuu

SEQ ID NO: 37213 - RNA, 19 nt, Artificial Sequence
  Description of Artificial Sequence: Synthetic oligonucleotide
gauaucuccgauuugcuua

SEQ ID NO: 37214 - RNA, 19 nt, Artificial Sequence
  Description of Artificial Sequence: Synthetic oligonucleotide
acacuuacuacacaucaga

SEQ ID NO: 37215 - RNA, 19 nt, Artificial Sequence
  Description of Artificial Sequence: Synthetic oligonucleotide
uuuccugacuuccuugagc

SEQ ID NO: 37216 - RNA, 19 nt, Artificial Sequence
  Description of Artificial Sequence: Synthetic oligonucleotide
ugaauggaucacaaaacau

SEQ ID NO: 37217 - RNA, 19 nt, Artificial Sequence
  Description of Artificial Sequence: Synthetic oligonucleotide
uuaugucguauauaugacu

SEQ ID NO: 37218 - RNA, 19 nt, Artificial Sequence
  Description of Artificial Sequence: Synthetic oligonucleotide
ugugguuaugauucagccc

SEQ ID NO: 37219 - RNA, 19 nt, Artificial Sequence
  Description of Artificial Sequence: Synthetic oligonucleotide
gauuaguuaucacaauuaa

SEQ ID NO: 37220 - RNA, 19 nt, Artificial Sequence
  Description of Artificial Sequence: Synthetic oligonucleotide
cuuaugucguauauaugac

SEQ ID NO: 37221 - RNA, 19 nt, Artificial Sequence
  Description of Artificial Sequence: Synthetic oligonucleotide
agugcacugaagauuaggg

SEQ ID NO: 37222 - RNA, 19 nt, Artificial Sequence
  Description of Artificial Sequence: Synthetic oligonucleotide
gagagcucaaauaaagcug

SEQ ID NO: 37223 - RNA, 19 nt, Artificial Sequence
  Description of Artificial Sequence: Synthetic oligonucleotide
uucagagggauaagcacug

SEQ ID NO: 37224 - RNA, 19 nt, Artificial Sequence
  Description of Artificial Sequence: Synthetic oligonucleotide
gauuugcuuagugcaaugg

SEQ ID NO: 37225 - RNA, 19 nt, Artificial Sequence
  Description of Artificial Sequence: Synthetic oligonucleotide
uuagggcacacuuacuaca

SEQ ID NO: 37226 - RNA, 19 nt, Artificial Sequence
  Description of Artificial Sequence: Synthetic oligonucleotide
ucugauaauuugacaaguc

SEQ ID NO: 37227 - RNA, 19 nt, Artificial Sequence
  Description of Artificial Sequence: Synthetic oligonucleotide
gaauaguauaagcaggcaa

SEQ ID NO: 37228 - RNA, 19 nt, Artificial Sequence
  Description of Artificial Sequence: Synthetic oligonucleotide
ucuccgauuugcuuagugc

SEQ ID NO: 37229 - RNA, 19 nt, Artificial Sequence
  Description of Artificial Sequence: Synthetic oligonucleotide
ugcaacaacaacuguucca

SEQ ID NO: 37230 - RNA, 19 nt, Artificial Sequence
  Description of Artificial Sequence: Synthetic oligonucleotide
uuauuaguuuguaggugca

SEQ ID NO: 37231 - RNA, 19 nt, Artificial Sequence
  Description of Artificial Sequence: Synthetic oligonucleotide
auuacuaacuguaauuuau

SEQ ID NO: 37232 - RNA, 19 nt, Artificial Sequence
  Description of Artificial Sequence: Synthetic oligonucleotide
cucauaauuacuaacugua

SEQ ID NO: 37233 - RNA, 19 nt, Artificial Sequence
  Description of Artificial Sequence: Synthetic oligonucleotide
ugcacuuuuaacuggcuau

SEQ ID NO: 37234 - RNA, 19 nt, Artificial Sequence
  Description of Artificial Sequence: Synthetic oligonucleotide
augguuaaaacucuuuguu

SEQ ID NO: 37235 - RNA, 19 nt, Artificial Sequence
  Description of Artificial Sequence: Synthetic oligonucleotide
aauuaguaacucauguuaa

SEQ ID NO: 37236 - RNA, 19 nt, Artificial Sequence
  Description of Artificial Sequence: Synthetic oligonucleotide
aguuacucugguuaacaca

SEQ ID NO: 37237 - RNA, 19 nt, Artificial Sequence
  Description of Artificial Sequence: Synthetic oligonucleotide
ucuugguauugaaaacacc

SEQ ID NO: 37238 - RNA, 19 nt, Artificial Sequence
  Description of Artificial Sequence: Synthetic oligonucleotide
ucuauaugacccagcuaag

SEQ ID NO: 37239 - RNA, 19 nt, Artificial Sequence
  Description of Artificial Sequence: Synthetic oligonucleotide
aagugcacugaagauuagg

SEQ ID NO: 37240 - RNA, 19 nt, Artificial Sequence
  Description of Artificial Sequence: Synthetic oligonucleotide
uuguugaccuuugacaaug

SEQ ID NO: 37241 - RNA, 19 nt, Artificial Sequence
  Description of Artificial Sequence: Synthetic oligonucleotide
gaugggucuuuucccaggg

SEQ ID NO: 37242 - RNA, 19 nt, Artificial Sequence
  Description of Artificial Sequence: Synthetic oligonucleotide
gacugauuagguacugugg

SEQ ID NO: 37243 - RNA, 19 nt, Artificial Sequence
  Description of Artificial Sequence: Synthetic oligonucleotide
aucacaaaacauaucagga

SEQ ID NO: 37244 - RNA, 19 nt, Artificial Sequence
  Description of Artificial Sequence: Synthetic oligonucleotide
uuuacagaauauguugccu

SEQ ID NO: 37245 - RNA, 19 nt, Artificial Sequence
  Description of Artificial Sequence: Synthetic oligonucleotide
acuaucauugccugggaaa

SEQ ID NO: 37246 - RNA, 19 nt, Artificial Sequence
  Description of Artificial Sequence: Synthetic oligonucleotide
aauacuuaggccacuggau

SEQ ID NO: 37247 - RNA, 19 nt, Artificial Sequence
  Description of Artificial Sequence: Synthetic oligonucleotide
auacaaucaagcauggaga

SEQ ID NO: 37248 - RNA, 19 nt, Artificial Sequence
  Description of Artificial Sequence: Synthetic oligonucleotide
cuuguaggcgacuuaguuc

SEQ ID NO: 37249 - RNA, 19 nt, Artificial Sequence
  Description of Artificial Sequence: Synthetic oligonucleotide
ucagugaacuugauucuac

SEQ ID NO: 37250 - RNA, 19 nt, Artificial Sequence
  Description of Artificial Sequence: Synthetic oligonucleotide
cagucuagcaaaagauggg

SEQ ID NO: 37251 - RNA, 19 nt, Artificial Sequence
  Description of Artificial Sequence: Synthetic oligonucleotide
agcuaaagauguuucacau

SEQ ID NO: 37252 - RNA, 19 nt, Artificial Sequence
  Description of Artificial Sequence: Synthetic oligonucleotide
gauuagggcacacuuacua

SEQ ID NO: 37253 - RNA, 19 nt, Artificial Sequence
  Description of Artificial Sequence: Synthetic oligonucleotide
guuuaguacaacacuggcc

SEQ ID NO: 37254 - RNA, 19 nt, Artificial Sequence
  Description of Artificial Sequence: Synthetic oligonucleotide
agaggcguggugcucuagc

SEQ ID NO: 37255 - RNA, 19 nt, Artificial Sequence
  Description of Artificial Sequence: Synthetic oligonucleotide
gaguauacacaucuuaacu

SEQ ID NO: 37256 - RNA, 19 nt, Artificial Sequence
  Description of Artificial Sequence: Synthetic oligonucleotide
aacuacagaacaaggggca

SEQ ID NO: 37257 - RNA, 19 nt, Artificial Sequence
  Description of Artificial Sequence: Synthetic oligonucleotide
uacaaucaagcauggagau

SEQ ID NO: 37258 - RNA, 19 nt, Artificial Sequence
  Description of Artificial Sequence: Synthetic oligonucleotide
auuaguaacucauguuaaa

SEQ ID NO: 37259 - RNA, 19 nt, Artificial Sequence
  Description of Artificial Sequence: Synthetic oligonucleotide
acugaguauacacaucuua

SEQ ID NO: 37260 - RNA, 19 nt, Artificial Sequence
  Description of Artificial Sequence: Synthetic oligonucleotide
ucuuguaggcgacuuaguu

SEQ ID NO: 37261 - RNA, 19 nt, Artificial Sequence
  Description of Artificial Sequence: Synthetic oligonucleotide
uuacagaauauguugccuu

SEQ ID NO: 37262 - RNA, 19 nt, Artificial Sequence
  Description of Artificial Sequence: Synthetic oligonucleotide
aaaagcgagggaauauaug

SEQ ID NO: 37263 - RNA, 19 nt, Artificial Sequence
  Description of Artificial Sequence: Synthetic oligonucleotide
ugacaaaggauagguaucu

SEQ ID NO: 37264 - RNA, 19 nt, Artificial Sequence
  Description of Artificial Sequence: Synthetic oligonucleotide
cuaucauugccugggaaag

SEQ ID NO: 37265 - RNA, 19 nt, Artificial Sequence
  Description of Artificial Sequence: Synthetic oligonucleotide
acuacacaucagaaguugc

SEQ ID NO: 37266 - RNA, 19 nt, Artificial Sequence
  Description of Artificial Sequence: Synthetic oligonucleotide
agcgccauuuacaagaaug

SEQ ID NO: 37267 - RNA, 19 nt, Artificial Sequence
  Description of Artificial Sequence: Synthetic oligonucleotide
uuugauugauuaagugaaa

SEQ ID NO: 37268 - RNA, 19 nt, Artificial Sequence
  Description of Artificial Sequence: Synthetic oligonucleotide
ggcuacaauaaucuguagc

SEQ ID NO: 37269 - RNA, 19 nt, Artificial Sequence
  Description of Artificial Sequence: Synthetic oligonucleotide
ggaugagucuauaugaccc

SEQ ID NO: 37270 - RNA, 19 nt, Artificial Sequence
  Description of Artificial Sequence: Synthetic oligonucleotide
uggagaucugagauucuug

SEQ ID NO: 37271 - RNA, 19 nt, Artificial Sequence
  Description of Artificial Sequence: Synthetic oligonucleotide
ccuuaugucguauauauga

SEQ ID NO: 37272 - RNA, 19 nt, Artificial Sequence
  Description of Artificial Sequence: Synthetic oligonucleotide
uggaacgaccacauugcug

SEQ ID NO: 37273 - RNA, 19 nt, Artificial Sequence
  Description of Artificial Sequence: Synthetic oligonucleotide
uggcuuuuguacacuagac

SEQ ID NO: 37274 - RNA, 19 nt, Artificial Sequence
  Description of Artificial Sequence: Synthetic oligonucleotide
gaagugguaaaagggucag

SEQ ID NO: 37275 - RNA, 19 nt, Artificial Sequence
  Description of Artificial Sequence: Synthetic oligonucleotide
uuaguuuguaggugcauuu

SEQ ID NO: 37276 - RNA, 19 nt, Artificial Sequence
  Description of Artificial Sequence: Synthetic oligonucleotide
aaccaaguaccuuccaauu

SEQ ID NO: 37277 - RNA, 19 nt, Artificial Sequence
  Description of Artificial Sequence: Synthetic oligonucleotide
ugagucuauaugacccagc

SEQ ID NO: 37278 - RNA, 19 nt, Artificial Sequence
  Description of Artificial Sequence: Synthetic oligonucleotide
agagcucaaauaaagcuga

SEQ ID NO: 37279 - RNA, 19 nt, Artificial Sequence
  Description of Artificial Sequence: Synthetic oligonucleotide
cuugacuaguuauuucauc

SEQ ID NO: 37280 - RNA, 19 nt, Artificial Sequence
  Description of Artificial Sequence: Synthetic oligonucleotide
uaguauaagcaggcaagag

SEQ ID NO: 37281 - RNA, 19 nt, Artificial Sequence
  Description of Artificial Sequence: Synthetic oligonucleotide
ugagaauaugaggaggauc

SEQ ID NO: 37282 - RNA, 19 nt, Artificial Sequence
  Description of Artificial Sequence: Synthetic oligonucleotide
caacaugaccuucucaguc

SEQ ID NO: 37283 - RNA, 19 nt, Artificial Sequence
  Description of Artificial Sequence: Synthetic oligonucleotide
uccaauuuauaguccacuu

SEQ ID NO: 37284 - RNA, 19 nt, Artificial Sequence
  Description of Artificial Sequence: Synthetic oligonucleotide
agagggauaagcacugaag

SEQ ID NO: 37285 - RNA, 19 nt, Artificial Sequence
  Description of Artificial Sequence: Synthetic oligonucleotide
uucuaucgauguauugcug

SEQ ID NO: 37286 - RNA, 19 nt, Artificial Sequence
  Description of Artificial Sequence: Synthetic oligonucleotide
ucacggaccuccaucccag

SEQ ID NO: 37287 - RNA, 19 nt, Artificial Sequence
  Description of Artificial Sequence: Synthetic oligonucleotide
cuacaauaaucuguagcgc

SEQ ID NO: 37288 - RNA, 19 nt, Artificial Sequence
  Description of Artificial Sequence: Synthetic oligonucleotide
gagggauaagcacugaagu

SEQ ID NO: 37289 - RNA, 19 nt, Artificial Sequence
  Description of Artificial Sequence: Synthetic oligonucleotide
uuugugggcuacugcacca

SEQ ID NO: 37290 - RNA, 19 nt, Artificial Sequence
  Description of Artificial Sequence: Synthetic oligonucleotide
aucaagcauggagauauag

SEQ ID NO: 37291 - RNA, 19 nt, Artificial Sequence
  Description of Artificial Sequence: Synthetic oligonucleotide
uaaucuguagcgccauuua

SEQ ID NO: 37292 - RNA, 19 nt, Artificial Sequence
  Description of Artificial Sequence: Synthetic oligonucleotide
uuauugguaguggcaguag

SEQ ID NO: 37293 - RNA, 19 nt, Artificial Sequence
  Description of Artificial Sequence: Synthetic oligonucleotide
ggguguaacaaaagcaggg

SEQ ID NO: 37294 - RNA, 19 nt, Artificial Sequence
  Description of Artificial Sequence: Synthetic oligonucleotide
aucgauguauugcugcuau

SEQ ID NO: 37295 - RNA, 19 nt, Artificial Sequence
  Description of Artificial Sequence: Synthetic oligonucleotide
ucuucgcccauucaaucau

SEQ ID NO: 37296 - RNA, 19 nt, Artificial Sequence
  Description of Artificial Sequence: Synthetic oligonucleotide
caccuuaacuuggugaccc

SEQ ID NO: 37297 - RNA, 19 nt, Artificial Sequence
  Description of Artificial Sequence: Synthetic oligonucleotide
cugaguauacacaucuuaa

SEQ ID NO: 37298 - RNA, 19 nt, Artificial Sequence
  Description of Artificial Sequence: Synthetic oligonucleotide
auacuuaggccacuggauu

SEQ ID NO: 37299 - RNA, 19 nt, Artificial Sequence
  Description of Artificial Sequence: Synthetic oligonucleotide
ggacuugauccugugaugg

SEQ ID NO: 37300 - RNA, 19 nt, Artificial Sequence
  Description of Artificial Sequence: Synthetic oligonucleotide
cucauuugcauugaacuga

SEQ ID NO: 37301 - RNA, 19 nt, Artificial Sequence
  Description of Artificial Sequence: Synthetic oligonucleotide
guaaguggagaucugagau

SEQ ID NO: 37302 - RNA, 19 nt, Artificial Sequence
  Description of Artificial Sequence: Synthetic oligonucleotide
gucagaugcaaauggaucu

SEQ ID NO: 37303 - RNA, 19 nt, Artificial Sequence
  Description of Artificial Sequence: Synthetic oligonucleotide
agcugaucuuuacagaaua

SEQ ID NO: 37304 - RNA, 19 nt, Artificial Sequence
  Description of Artificial Sequence: Synthetic oligonucleotide
gugcacugaagauuagggc

SEQ ID NO: 37305 - RNA, 19 nt, Artificial Sequence
  Description of Artificial Sequence: Synthetic oligonucleotide
ugucguauauaugacuuuu

SEQ ID NO: 37306 - RNA, 19 nt, Artificial Sequence
  Description of Artificial Sequence: Synthetic oligonucleotide
cuagauaacaaguuguauu

SEQ ID NO: 37307 - RNA, 19 nt, Artificial Sequence
  Description of Artificial Sequence: Synthetic oligonucleotide
cuccgauuugcuuagugca

SEQ ID NO: 37308 - RNA, 19 nt, Artificial Sequence
  Description of Artificial Sequence: Synthetic oligonucleotide
agcgagggaauauauguua

SEQ ID NO: 37309 - RNA, 19 nt, Artificial Sequence
  Description of Artificial Sequence: Synthetic oligonucleotide
uauccguccauauccuuau

SEQ ID NO: 37310 - RNA, 19 nt, Artificial Sequence
  Description of Artificial Sequence: Synthetic oligonucleotide
aggaagguuucacggaccu

SEQ ID NO: 37311 - RNA, 19 nt, Artificial Sequence
  Description of Artificial Sequence: Synthetic oligonucleotide
ugucuaacuaggguacugu

SEQ ID NO: 37312 - RNA, 19 nt, Artificial Sequence
  Description of Artificial Sequence: Synthetic oligonucleotide
ggacugauuagguacugug

SEQ ID NO: 37313 - RNA, 19 nt, Artificial Sequence
  Description of Artificial Sequence: Synthetic oligonucleotide
aaauagcugggccgucacu

SEQ ID NO: 37314 - RNA, 19 nt, Artificial Sequence
  Description of Artificial Sequence: Synthetic oligonucleotide
gagauucuugacuaguuau

SEQ ID NO: 37315 - RNA, 19 nt, Artificial Sequence
  Description of Artificial Sequence: Synthetic oligonucleotide
uccgauuugcuuagugcaa

SEQ ID NO: 37316 - RNA, 19 nt, Artificial Sequence
  Description of Artificial Sequence: Synthetic oligonucleotide
cauugcuggaagaacuuga

SEQ ID NO: 37317 - RNA, 19 nt, Artificial Sequence
  Description of Artificial Sequence: Synthetic oligonucleotide
aauccauccccaaaugauu

SEQ ID NO: 37318 - RNA, 19 nt, Artificial Sequence
  Description of Artificial Sequence: Synthetic oligonucleotide
gggaauaguauaagcaggc

SEQ ID NO: 37319 - RNA, 19 nt, Artificial Sequence
  Description of Artificial Sequence: Synthetic oligonucleotide
uuaguacaacacuggccca

SEQ ID NO: 37320 - RNA, 19 nt, Artificial Sequence
  Description of Artificial Sequence: Synthetic oligonucleotide
ugggguagcuugcuaauuu

SEQ ID NO: 37321 - RNA, 19 nt, Artificial Sequence
  Description of Artificial Sequence: Synthetic oligonucleotide
ugacuaguuauuucaucuu

SEQ ID NO: 37322 - RNA, 19 nt, Artificial Sequence
  Description of Artificial Sequence: Synthetic oligonucleotide
ugagccuuuccugacucca

SEQ ID NO: 37323 - RNA, 19 nt, Artificial Sequence
  Description of Artificial Sequence: Synthetic oligonucleotide
agggauaagcacugaaguu

SEQ ID NO: 37324 - RNA, 19 nt, Artificial Sequence
  Description of Artificial Sequence: Synthetic oligonucleotide
agcuaagugcacugaagau

SEQ ID NO: 37325 - RNA, 19 nt, Artificial Sequence
  Description of Artificial Sequence: Synthetic oligonucleotide
ggagaucugagauucuuga

SEQ ID NO: 37326 - RNA, 19 nt, Artificial Sequence
  Description of Artificial Sequence: Synthetic oligonucleotide
aaagaugguuaaaacucuu

SEQ ID NO: 37327 - RNA, 19 nt, Artificial Sequence
  Description of Artificial Sequence: Synthetic oligonucleotide
aguucgcaucugcaacugg

SEQ ID NO: 37328 - RNA, 19 nt, Artificial Sequence
  Description of Artificial Sequence: Synthetic oligonucleotide
gagucuauaugacccagcu

SEQ ID NO: 37329 - RNA, 19 nt, Artificial Sequence
  Description of Artificial Sequence: Synthetic oligonucleotide
aaguucgcaucugcaacug

SEQ ID NO: 37330 - RNA, 19 nt, Artificial Sequence
  Description of Artificial Sequence: Synthetic oligonucleotide
agguaguaaguuacucugg

SEQ ID NO: 37331 - RNA, 19 nt, Artificial Sequence
  Description of Artificial Sequence: Synthetic oligonucleotide
auuaguuuguaggugcauu

SEQ ID NO: 37332 - RNA, 19 nt, Artificial Sequence
  Description of Artificial Sequence: Synthetic oligonucleotide
uaagugcacugaagauuag

SEQ ID NO: 37333 - RNA, 19 nt, Artificial Sequence
  Description of Artificial Sequence: Synthetic oligonucleotide
uuucucuuagaagguggca

SEQ ID NO: 37334 - RNA, 19 nt, Artificial Sequence
  Description of Artificial Sequence: Synthetic oligonucleotide
gauacauauccguccauau

SEQ ID NO: 37335 - RNA, 19 nt, Artificial Sequence
  Description of Artificial Sequence: Synthetic oligonucleotide
uuggaacgaccacauugcu

SEQ ID NO: 37336 - RNA, 19 nt, Artificial Sequence
  Description of Artificial Sequence: Synthetic oligonucleotide
gacccagcuaagugcacug

SEQ ID NO: 37337 - RNA, 19 nt, Artificial Sequence
  Description of Artificial Sequence: Synthetic oligonucleotide
cagcuaagugcacugaaga

SEQ ID NO: 37338 - RNA, 19 nt, Artificial Sequence
  Description of Artificial Sequence: Synthetic oligonucleotide
caaucaagcauggagauau

SEQ ID NO: 37339 - RNA, 19 nt, Artificial Sequence
  Description of Artificial Sequence: Synthetic oligonucleotide
uacagggguuacaacccac

SEQ ID NO: 37340 - RNA, 19 nt, Artificial Sequence
  Description of Artificial Sequence: Synthetic oligonucleotide
cagaauauguugccuuguc

SEQ ID NO: 37341 - RNA, 19 nt, Artificial Sequence
  Description of Artificial Sequence: Synthetic oligonucleotide
guauggguucagauucugg

SEQ ID NO: 37342 - RNA, 19 nt, Artificial Sequence
  Description of Artificial Sequence: Synthetic oligonucleotide
uucgcccauucaaucauau

SEQ ID NO: 37343 - RNA, 19 nt, Artificial Sequence
  Description of Artificial Sequence: Synthetic oligonucleotide
acagggguuacaacccacg

SEQ ID NO: 37344 - RNA, 19 nt, Artificial Sequence
  Description of Artificial Sequence: Synthetic oligonucleotide
ugugggcuaguaaggcaga

SEQ ID NO: 37345 - RNA, 19 nt, Artificial Sequence
  Description of Artificial Sequence: Synthetic oligonucleotide
aacuggcuauuguacugaa

SEQ ID NO: 37346 - RNA, 19 nt, Artificial Sequence
  Description of Artificial Sequence: Synthetic oligonucleotide
cugaaauggaucauucagu

SEQ ID NO: 37347 - RNA, 19 nt, Artificial Sequence
  Description of Artificial Sequence: Synthetic oligonucleotide
ugggcuaguaaggcagaag

SEQ ID NO: 37348 - RNA, 19 nt, Artificial Sequence
  Description of Artificial Sequence: Synthetic oligonucleotide
gucuagcaaaagaugggug

SEQ ID NO: 37349 - RNA, 19 nt, Artificial Sequence
  Description of Artificial Sequence: Synthetic oligonucleotide
uuccaaucuuggguggcag

SEQ ID NO: 37350 - RNA, 19 nt, Artificial Sequence
  Description of Artificial Sequence: Synthetic oligonucleotide
uaggggacgcugucuaacu

SEQ ID NO: 37351 - RNA, 19 nt, Artificial Sequence
  Description of Artificial Sequence: Synthetic oligonucleotide
acaguucaauaccaccuua

SEQ ID NO: 37352 - RNA, 19 nt, Artificial Sequence
  Description of Artificial Sequence: Synthetic oligonucleotide
aggauagguaucucuucau

SEQ ID NO: 37353 - RNA, 19 nt, Artificial Sequence
  Description of Artificial Sequence: Synthetic oligonucleotide
acuugauaugguaggauua

SEQ ID NO: 37354 - RNA, 19 nt, Artificial Sequence
  Description of Artificial Sequence: Synthetic oligonucleotide
aucaucaaaucugggacua

SEQ ID NO: 37355 - RNA, 19 nt, Artificial Sequence
  Description of Artificial Sequence: Synthetic oligonucleotide
cucuagauaacaaguugua

SEQ ID NO: 37356 - RNA, 19 nt, Artificial Sequence
  Description of Artificial Sequence: Synthetic oligonucleotide
uauuaguuuguaggugcau

SEQ ID NO: 37357 - RNA, 19 nt, Artificial Sequence
  Description of Artificial Sequence: Synthetic oligonucleotide
gaagguuauucaagucaac

SEQ ID NO: 37358 - RNA, 19 nt, Artificial Sequence
  Description of Artificial Sequence: Synthetic oligonucleotide
cuugauaugguaggauuaa

SEQ ID NO: 37359 - RNA, 19 nt, Artificial Sequence
  Description of Artificial Sequence: Synthetic oligonucleotide
guugcugucauaggaacua

SEQ ID NO: 37360 - RNA, 19 nt, Artificial Sequence
  Description of Artificial Sequence: Synthetic oligonucleotide
ggggacgcugucuaacuag

SEQ ID NO: 37361 - RNA, 19 nt, Artificial Sequence
  Description of Artificial Sequence: Synthetic oligonucleotide
ugacccagcuaagugcacu

SEQ ID NO: 37362 - RNA, 19 nt, Artificial Sequence
  Description of Artificial Sequence: Synthetic oligonucleotide
agcugcaacaacaacuguu

SEQ ID NO: 37363 - RNA, 19 nt, Artificial Sequence
  Description of Artificial Sequence: Synthetic oligonucleotide
ccaaguucgcaucugcaac

SEQ ID NO: 37364 - RNA, 19 nt, Artificial Sequence
  Description of Artificial Sequence: Synthetic oligonucleotide
augucguauauaugacuuu

SEQ ID NO: 37365 - RNA, 19 nt, Artificial Sequence
  Description of Artificial Sequence: Synthetic oligonucleotide
aggaaguuugaugcacaug

SEQ ID NO: 37366 - RNA, 19 nt, Artificial Sequence
  Description of Artificial Sequence: Synthetic oligonucleotide
ggauuaguuaucacaauua

SEQ ID NO: 37367 - RNA, 19 nt, Artificial Sequence
  Description of Artificial Sequence: Synthetic oligonucleotide
caguucaauaccaccuuaa

SEQ ID NO: 37368 - RNA, 19 nt, Artificial Sequence
  Description of Artificial Sequence: Synthetic oligonucleotide
gcaaaauugcuugggucag

SEQ ID NO: 37369 - RNA, 19 nt, Artificial Sequence
  Description of Artificial Sequence: Synthetic oligonucleotide
ggguuuauuuauaggccag

SEQ ID NO: 37370 - RNA, 19 nt, Artificial Sequence
  Description of Artificial Sequence: Synthetic oligonucleotide
cuaggggacgcugucuaac

SEQ ID NO: 37371 - RNA, 19 nt, Artificial Sequence
  Description of Artificial Sequence: Synthetic oligonucleotide
agucuauaugacccagcua

SEQ ID NO: 37372 - RNA, 19 nt, Artificial Sequence
  Description of Artificial Sequence: Synthetic oligonucleotide
aacuuaccuuucuccugaa

SEQ ID NO: 37373 - RNA, 19 nt, Artificial Sequence
  Description of Artificial Sequence: Synthetic oligonucleotide
uuuguaucccaugcucaua

SEQ ID NO: 37374 - RNA, 19 nt, Artificial Sequence
  Description of Artificial Sequence: Synthetic oligonucleotide
cuguagcgccauuuacaag

SEQ ID NO: 37375 - RNA, 19 nt, Artificial Sequence
  Description of Artificial Sequence: Synthetic oligonucleotide
agggguuacaacccacguu

SEQ ID NO: 37376 - RNA, 19 nt, Artificial Sequence
  Description of Artificial Sequence: Synthetic oligonucleotide
cugucuaacuaggguacug

SEQ ID NO: 37377 - RNA, 19 nt, Artificial Sequence
  Description of Artificial Sequence: Synthetic oligonucleotide
ucagcccuuaugucguaua

SEQ ID NO: 37378 - RNA, 19 nt, Artificial Sequence
  Description of Artificial Sequence: Synthetic oligonucleotide
aagugguaaaagggucagu

SEQ ID NO: 37379 - RNA, 19 nt, Artificial Sequence
  Description of Artificial Sequence: Synthetic oligonucleotide
ccagcuaagugcacugaag

SEQ ID NO: 37380 - RNA, 19 nt, Artificial Sequence
  Description of Artificial Sequence: Synthetic oligonucleotide
uggacugauuagguacugu

SEQ ID NO: 37381 - RNA, 19 nt, Artificial Sequence
  Description of Artificial Sequence: Synthetic oligonucleotide
auauccguccauauccuua

SEQ ID NO: 37382 - RNA, 19 nt, Artificial Sequence
  Description of Artificial Sequence: Synthetic oligonucleotide
acauauccguccauauccu

SEQ ID NO: 37383 - RNA, 19 nt, Artificial Sequence
  Description of Artificial Sequence: Synthetic oligonucleotide
ggcuacugcaccaauuuga

SEQ ID NO: 37384 - RNA, 19 nt, Artificial Sequence
  Description of Artificial Sequence: Synthetic oligonucleotide
ucuaggggacgcugucuaa

SEQ ID NO: 37385 - RNA, 19 nt, Artificial Sequence
  Description of Artificial Sequence: Synthetic oligonucleotide
agcugggccgucacuaaag

SEQ ID NO: 37386 - RNA, 19 nt, Artificial Sequence
  Description of Artificial Sequence: Synthetic oligonucleotide
gacaaaggauagguaucuc

SEQ ID NO: 37387 - RNA, 19 nt, Artificial Sequence
  Description of Artificial Sequence: Synthetic oligonucleotide
gcgccauuuacaagaaugc

SEQ ID NO: 37388 - RNA, 19 nt, Artificial Sequence
  Description of Artificial Sequence: Synthetic oligonucleotide
cuaucgauguauugcugcu

SEQ ID NO: 37389 - RNA, 19 nt, Artificial Sequence
  Description of Artificial Sequence: Synthetic oligonucleotide
cucguaaguggagaucuga

SEQ ID NO: 37390 - RNA, 19 nt, Artificial Sequence
  Description of Artificial Sequence: Synthetic oligonucleotide
caaguucgcaucugcaacu

SEQ ID NO: 37391 - RNA, 19 nt, Artificial Sequence
  Description of Artificial Sequence: Synthetic oligonucleotide
gggguuacaacccacguuu

SEQ ID NO: 37392 - RNA, 19 nt, Artificial Sequence
  Description of Artificial Sequence: Synthetic oligonucleotide
gggacgcugucuaacuagg

SEQ ID NO: 37393 - RNA, 19 nt, Artificial Sequence
  Description of Artificial Sequence: Synthetic oligonucleotide
agugcccaaaugugggcua

SEQ ID NO: 37394 - RNA, 19 nt, Artificial Sequence
  Description of Artificial Sequence: Synthetic oligonucleotide
ucagagggauaagcacuga

SEQ ID NO: 37395 - RNA, 19 nt, Artificial Sequence
  Description of Artificial Sequence: Synthetic oligonucleotide
ucgcccauucaaucauauc

SEQ ID NO: 37396 - RNA, 19 nt, Artificial Sequence
  Description of Artificial Sequence: Synthetic oligonucleotide
ggaauaguauaagcaggca

SEQ ID NO: 37397 - RNA, 19 nt, Artificial Sequence
  Description of Artificial Sequence: Synthetic oligonucleotide
ugguuaugauucagcccuu

SEQ ID NO: 37398 - RNA, 19 nt, Artificial Sequence
  Description of Artificial Sequence: Synthetic oligonucleotide
gacauuuguccuauacaau

SEQ ID NO: 37399 - RNA, 19 nt, Artificial Sequence
  Description of Artificial Sequence: Synthetic oligonucleotide
agauuagggcacacuuacu

SEQ ID NO: 37400 - RNA, 19 nt, Artificial Sequence
  Description of Artificial Sequence: Synthetic oligonucleotide
gcccuuaugucguauauau

SEQ ID NO: 37401 - RNA, 19 nt, Artificial Sequence
  Description of Artificial Sequence: Synthetic oligonucleotide
guaggcgacuuaguucuuc

SEQ ID NO: 37402 - RNA, 19 nt, Artificial Sequence
  Description of Artificial Sequence: Synthetic oligonucleotide
cagagggauaagcacugaa

SEQ ID NO: 37403 - RNA, 19 nt, Artificial Sequence
  Description of Artificial Sequence: Synthetic oligonucleotide
gccgucacuaaagaaacaa

SEQ ID NO: 37404 - RNA, 19 nt, Artificial Sequence
  Description of Artificial Sequence: Synthetic oligonucleotide
cugcugacaaaggauaggu

SEQ ID NO: 37405 - RNA, 19 nt, Artificial Sequence
  Description of Artificial Sequence: Synthetic oligonucleotide
ucgauguauugcugcuauu

SEQ ID NO: 37406 - RNA, 19 nt, Artificial Sequence
  Description of Artificial Sequence: Synthetic oligonucleotide
gaggcguggugcucuagcu

SEQ ID NO: 37407 - RNA, 19 nt, Artificial Sequence
  Description of Artificial Sequence: Synthetic oligonucleotide
gcgagggaauauauguuac

SEQ ID NO: 37408 - RNA, 19 nt, Artificial Sequence
  Description of Artificial Sequence: Synthetic oligonucleotide
uucagcccuuaugucguau

SEQ ID NO: 37409 - RNA, 19 nt, Artificial Sequence
  Description of Artificial Sequence: Synthetic oligonucleotide
cacugaugacuccuggugu

SEQ ID NO: 37410 - RNA, 19 nt, Artificial Sequence
  Description of Artificial Sequence: Synthetic oligonucleotide
guaguaaguuacucugguu

SEQ ID NO: 37411 - RNA, 19 nt, Artificial Sequence
  Description of Artificial Sequence: Synthetic oligonucleotide
aaucaagcauggagauaua

SEQ ID NO: 37412 - RNA, 19 nt, Artificial Sequence
  Description of Artificial Sequence: Synthetic oligonucleotide
ggagaauaccugcacacuu

SEQ ID NO: 37413 - RNA, 19 nt, Artificial Sequence
  Description of Artificial Sequence: Synthetic oligonucleotide
cgcugucuaacuaggguac

SEQ ID NO: 37414 - RNA, 19 nt, Artificial Sequence
  Description of Artificial Sequence: Synthetic oligonucleotide
gcaagaagaaggugguagu

SEQ ID NO: 37415 - RNA, 19 nt, Artificial Sequence
  Description of Artificial Sequence: Synthetic oligonucleotide
aggcguggugcucuagcuu

SEQ ID NO: 37416 - RNA, 19 nt, Artificial Sequence
  Description of Artificial Sequence: Synthetic oligonucleotide
uguaggcgacuuaguucuu

SEQ ID NO: 37417 - RNA, 19 nt, Artificial Sequence
  Description of Artificial Sequence: Synthetic oligonucleotide
gguugagucuggcaagccu

SEQ ID NO: 37418 - RNA, 19 nt, Artificial Sequence
  Description of Artificial Sequence: Synthetic oligonucleotide
gcgacuuaguucuucucua

SEQ ID NO: 37419 - RNA, 19 nt, Artificial Sequence
  Description of Artificial Sequence: Synthetic oligonucleotide
cccuuaugucguauauaug

SEQ ID NO: 37420 - RNA, 19 nt, Artificial Sequence
  Description of Artificial Sequence: Synthetic oligonucleotide
agcccuuaugucguauaua

SEQ ID NO: 37421 - RNA, 19 nt, Artificial Sequence
  Description of Artificial Sequence: Synthetic oligonucleotide
acuggcuauuguacugaaa

SEQ ID NO: 37422 - RNA, 19 nt, Artificial Sequence
  Description of Artificial Sequence: Synthetic oligonucleotide
cguaaguggagaucugaga

SEQ ID NO: 37423 - RNA, 19 nt, Artificial Sequence
  Description of Artificial Sequence: Synthetic oligonucleotide
guagcgccauuuacaagaa

SEQ ID NO: 37424 - RNA, 19 nt, Artificial Sequence
  Description of Artificial Sequence: Synthetic oligonucleotide
gucuaacuaggguacuguu

SEQ ID NO: 37425 - RNA, 19 nt, Artificial Sequence
  Description of Artificial Sequence: Synthetic oligonucleotide
agcugcuauuucaggacua

SEQ ID NO: 37426 - RNA, 19 nt, Artificial Sequence
  Description of Artificial Sequence: Synthetic oligonucleotide
cugggccgucacuaaagaa

SEQ ID NO: 37427 - RNA, 19 nt, Artificial Sequence
  Description of Artificial Sequence: Synthetic oligonucleotide
auucagcccuuaugucgua

SEQ ID NO: 37428 - RNA, 19 nt, Artificial Sequence
  Description of Artificial Sequence: Synthetic oligonucleotide
cgauuugcuuagugcaaug

SEQ ID NO: 37429 - RNA, 19 nt, Artificial Sequence
  Description of Artificial Sequence: Synthetic oligonucleotide
uaucuccgauuugcuuagu

SEQ ID NO: 37430 - RNA, 19 nt, Artificial Sequence
  Description of Artificial Sequence: Synthetic oligonucleotide
gcugggccgucacuaaaga

SEQ ID NO: 37431 - RNA, 19 nt, Artificial Sequence
  Description of Artificial Sequence: Synthetic oligonucleotide
cugaagauuagggcacacu

SEQ ID NO: 37432 - RNA, 19 nt, Artificial Sequence
  Description of Artificial Sequence: Synthetic oligonucleotide
gaccugucugaugguggga

SEQ ID NO: 37433 - RNA, 19 nt, Artificial Sequence
  Description of Artificial Sequence: Synthetic oligonucleotide
cuucgcccauucaaucaua

SEQ ID NO: 37434 - RNA, 19 nt, Artificial Sequence
  Description of Artificial Sequence: Synthetic oligonucleotide
cuugagccuggagcaauaa

SEQ ID NO: 37435 - RNA, 19 nt, Artificial Sequence
  Description of Artificial Sequence: Synthetic oligonucleotide
caagaagaaggugguaguu

SEQ ID NO: 37436 - RNA, 19 nt, Artificial Sequence
  Description of Artificial Sequence: Synthetic oligonucleotide
guggagaucugagauucuu

SEQ ID NO: 37437 - RNA, 19 nt, Artificial Sequence
  Description of Artificial Sequence: Synthetic oligonucleotide
cagggguuacaacccacgu

SEQ ID NO: 37438 - RNA, 19 nt, Artificial Sequence
  Description of Artificial Sequence: Synthetic oligonucleotide
ccgucacuaaagaaacaaa

SEQ ID NO: 37439 - RNA, 19 nt, Artificial Sequence
  Description of Artificial Sequence: Synthetic oligonucleotide
gugagaauaugaggaggau

SEQ ID NO: 37440 - RNA, 19 nt, Artificial Sequence
  Description of Artificial Sequence: Synthetic oligonucleotide
ggcguggugcucuagcuuu

SEQ ID NO: 37441 - RNA, 19 nt, Artificial Sequence
  Description of Artificial Sequence: Synthetic oligonucleotide
ggguagcuugcuaauuuua

SEQ ID NO: 37442 - RNA, 19 nt, Artificial Sequence
  Description of Artificial Sequence: Synthetic oligonucleotide
gcuacugcaccaauuugau

SEQ ID NO: 37443 - RNA, 19 nt, Artificial Sequence
  Description of Artificial Sequence: Synthetic oligonucleotide
gugggcuaguaaggcagaa

SEQ ID NO: 37444 - RNA, 19 nt, Artificial Sequence
  Description of Artificial Sequence: Synthetic oligonucleotide
gcacgaaacuacaucugcu

SEQ ID NO: 37445 - RNA, 19 nt, Artificial Sequence
  Description of Artificial Sequence: Synthetic oligonucleotide
gguuaugauucagcccuua

SEQ ID NO: 37446 - RNA, 19 nt, Artificial Sequence
  Description of Artificial Sequence: Synthetic oligonucleotide
ggugggguagcuugcuaau

SEQ ID NO: 37447 - RNA, 19 nt, Artificial Sequence
  Description of Artificial Sequence: Synthetic oligonucleotide
cagcccuuaugucguauau

SEQ ID NO: 37448 - RNA, 19 nt, Artificial Sequence
  Description of Artificial Sequence: Synthetic oligonucleotide
cuacugcaccaauuugauu

SEQ ID NO: 37449 - RNA, 19 nt, Artificial Sequence
  Description of Artificial Sequence: Synthetic oligonucleotide
gggguagcuugcuaauuuu

SEQ ID NO: 37450 - RNA, 19 nt, Artificial Sequence
  Description of Artificial Sequence: Synthetic oligonucleotide
gcugaucuuuacagaauau

SEQ ID NO: 37451 - RNA, 19 nt, Artificial Sequence
  Description of Artificial Sequence: Synthetic oligonucleotide
cugaugacuccugguguau

SEQ ID NO: 37452 - RNA, 19 nt, Artificial Sequence
  Description of Artificial Sequence: Synthetic oligonucleotide
gguucagauucuggauugu

SEQ ID NO: 37453 - RNA, 19 nt, Artificial Sequence
  Description of Artificial Sequence: Synthetic oligonucleotide
cacagcccuuugugucaca

SEQ ID NO: 37454 - RNA, 19 nt, Artificial Sequence
  Description of Artificial Sequence: Synthetic oligonucleotide
cgagggaauauauguuacu

SEQ ID NO: 37455 - RNA, 19 nt, Artificial Sequence
  Description of Artificial Sequence: Synthetic oligonucleotide
gcugucuaacuaggguacu

SEQ ID NO: 37456 - RNA, 19 nt, Artificial Sequence
  Description of Artificial Sequence: Synthetic oligonucleotide
ggguuacaacccacguuuu

SEQ ID NO: 37457 - RNA, 19 nt, Artificial Sequence
  Description of Artificial Sequence: Synthetic oligonucleotide
aaucauugcauucccauac

SEQ ID NO: 37458 - RNA, 19 nt, Artificial Sequence
  Description of Artificial Sequence: Synthetic oligonucleotide
uuuauaaugcccuuuaucu

SEQ ID NO: 37459 - RNA, 19 nt, Artificial Sequence
  Description of Artificial Sequence: Synthetic oligonucleotide
aauaguuugaaggugugac

SEQ ID NO: 37460 - RNA, 19 nt, Artificial Sequence
  Description of Artificial Sequence: Synthetic oligonucleotide
uucuacaacaccaacauga

SEQ ID NO: 37461 - RNA, 19 nt, Artificial Sequence
  Description of Artificial Sequence: Synthetic oligonucleotide
aauacgaggauuuuccgga

SEQ ID NO: 37462 - RNA, 19 nt, Artificial Sequence
  Description of Artificial Sequence: Synthetic oligonucleotide
aaguuaugcuuauuaauag

SEQ ID NO: 37463 - RNA, 19 nt, Artificial Sequence
  Description of Artificial Sequence: Synthetic oligonucleotide
gagguugggaaauagaagc

SEQ ID NO: 37464 - RNA, 19 nt, Artificial Sequence
  Description of Artificial Sequence: Synthetic oligonucleotide
uaugcuagcauucuuauuu

SEQ ID NO: 37465 - RNA, 19 nt, Artificial Sequence
  Description of Artificial Sequence: Synthetic oligonucleotide
ugacaaauguaauaaagac

SEQ ID NO: 37466 - RNA, 19 nt, Artificial Sequence
  Description of Artificial Sequence: Synthetic oligonucleotide
uacaguacuaaaaccaacc

SEQ ID NO: 37467 - RNA, 19 nt, Artificial Sequence
  Description of Artificial Sequence: Synthetic oligonucleotide
  modified_base (4)..(4): a, c, u, g, unknown or other
cugnguuugaggcauaggg

SEQ ID NO: 37468 - RNA, 19 nt, Artificial Sequence
  Description of Artificial Sequence: Synthetic oligonucleotide
uuaucagugaauuccaaga

SEQ ID NO: 37469 - RNA, 19 nt, Artificial Sequence
  Description of Artificial Sequence: Synthetic oligonucleotide
uaaaguagagccucuauac

SEQ ID NO: 37470 - RNA, 19 nt, Artificial Sequence
  Description of Artificial Sequence: Synthetic oligonucleotide
uuaucuugcgguuaucugc

SEQ ID NO: 37471 - RNA, 19 nt, Artificial Sequence
  Description of Artificial Sequence: Synthetic oligonucleotide
uccguguuugcucagaagc

SEQ ID NO: 37472 - RNA, 19 nt, Artificial Sequence
  Description of Artificial Sequence: Synthetic oligonucleotide
uuuucaaacaaugugcuaa

SEQ ID NO: 37473 - RNA, 19 nt, Artificial Sequence
  Description of Artificial Sequence: Synthetic oligonucleotide
aaaaugcuaacuaagguaa

SEQ ID NO: 37474 - RNA, 19 nt, Artificial Sequence
  Description of Artificial Sequence: Synthetic oligonucleotide
ucuuacuaguaauaguggc

SEQ ID NO: 37475 - RNA, 19 nt, Artificial Sequence
  Description of Artificial Sequence: Synthetic oligonucleotide
uaaaggaucugaauuuggc

SEQ ID NO: 37476 - RNA, 19 nt, Artificial Sequence
  Description of Artificial Sequence: Synthetic oligonucleotide
uaggguaugucacaggcgc

SEQ ID NO: 37477 - RNA, 19 nt, Artificial Sequence
  Description of Artificial Sequence: Synthetic oligonucleotide
uguuaaaguuagcagcugc

SEQ ID NO: 37478 - RNA, 19 nt, Artificial Sequence
  Description of Artificial Sequence: Synthetic oligonucleotide
aaagccuacacacuucagu

SEQ ID NO: 37479 - RNA, 19 nt, Artificial Sequence
  Description of Artificial Sequence: Synthetic oligonucleotide
ugaaugaaaggaaucugca

SEQ ID NO: 37480 - RNA, 19 nt, Artificial Sequence
  Description of Artificial Sequence: Synthetic oligonucleotide
cuuuggaaguaucagacug

SEQ ID NO: 37481 - RNA, 19 nt, Artificial Sequence
  Description of Artificial Sequence: Synthetic oligonucleotide
ugacugagaacuguggugg

SEQ ID NO: 37482 - RNA, 19 nt, Artificial Sequence
  Description of Artificial Sequence: Synthetic oligonucleotide
caaauuacucccaauaaca

SEQ ID NO: 37483 - RNA, 19 nt, Artificial Sequence
  Description of Artificial Sequence: Synthetic oligonucleotide
uuauccaaaagaacucggc

SEQ ID NO: 37484 - RNA, 19 nt, Artificial Sequence
  Description of Artificial Sequence: Synthetic oligonucleotide
aaguuagcguaccaccuuc

SEQ ID NO: 37485 - RNA, 19 nt, Artificial Sequence
  Description of Artificial Sequence: Synthetic oligonucleotide
ucuacauaaaguagagccu

SEQ ID NO: 37486 - RNA, 19 nt, Artificial Sequence
  Description of Artificial Sequence: Synthetic oligonucleotide
aaacggaugacaauggaga

SEQ ID NO: 37487 - RNA, 19 nt, Artificial Sequence
  Description of Artificial Sequence: Synthetic oligonucleotide
aaaacggaugacaauggag

SEQ ID NO: 37488 - RNA, 19 nt, Artificial Sequence
  Description of Artificial Sequence: Synthetic oligonucleotide
uagauagguagcauggcug

SEQ ID NO: 37489 - RNA, 19 nt, Artificial Sequence
  Description of Artificial Sequence: Synthetic oligonucleotide
aaauuacucccaauaacag

SEQ ID NO: 37490 - RNA, 19 nt, Artificial Sequence
  Description of Artificial Sequence: Synthetic oligonucleotide
cauaggguaugucacaggc

SEQ ID NO: 37491 - RNA, 19 nt, Artificial Sequence
  Description of Artificial Sequence: Synthetic oligonucleotide
uuauaaugcccuuuaucug

SEQ ID NO: 37492 - RNA, 19 nt, Artificial Sequence
  Description of Artificial Sequence: Synthetic oligonucleotide
uaugccuugcuacaaacaa

SEQ ID NO: 37493 - RNA, 19 nt, Artificial Sequence
  Description of Artificial Sequence: Synthetic oligonucleotide
uagguagcauggcugaagg

SEQ ID NO: 37494 - RNA, 19 nt, Artificial Sequence
  Description of Artificial Sequence: Synthetic oligonucleotide
uugacaauaccugagggac

SEQ ID NO: 37495 - RNA, 19 nt, Artificial Sequence
  Description of Artificial Sequence: Synthetic oligonucleotide
acaaaauuuauaaugcccu

SEQ ID NO: 37496 - RNA, 19 nt, Artificial Sequence
  Description of Artificial Sequence: Synthetic oligonucleotide
aaacugaagagagaugugu

SEQ ID NO: 37497 - RNA, 19 nt, Artificial Sequence
  Description of Artificial Sequence: Synthetic oligonucleotide
uugcugaauaugaagguac

SEQ ID NO: 37498 - RNA, 19 nt, Artificial Sequence
  Description of Artificial Sequence: Synthetic oligonucleotide
uaucucacauuaauuuaag

SEQ ID NO: 37499 - RNA, 19 nt, Artificial Sequence
  Description of Artificial Sequence: Synthetic oligonucleotide
uuucggacccuaaagguac

SEQ ID NO: 37500 - RNA, 19 nt, Artificial Sequence
  Description of Artificial Sequence: Synthetic oligonucleotide
uagacugagaugaaacaac

SEQ ID NO: 37501 - RNA, 19 nt, Artificial Sequence
  Description of Artificial Sequence: Synthetic oligonucleotide
ucgguguucaauacuagcu

SEQ ID NO: 37502 - RNA, 19 nt, Artificial Sequence
  Description of Artificial Sequence: Synthetic oligonucleotide
ucaacaaacuaagugggga

SEQ ID NO: 37503 - RNA, 19 nt, Artificial Sequence
  Description of Artificial Sequence: Synthetic oligonucleotide
augaccugauguuuguaac

SEQ ID NO: 37504 - RNA, 19 nt, Artificial Sequence
  Description of Artificial Sequence: Synthetic oligonucleotide
  modified_base (3)..(3): a, c, u, g, unknown or other
ugnguuugaggcauagggu

SEQ ID NO: 37505 - RNA, 19 nt, Artificial Sequence
  Description of Artificial Sequence: Synthetic oligonucleotide
aucgauaugagcuccccug

SEQ ID NO: 37506 - RNA, 19 nt, Artificial Sequence
  Description of Artificial Sequence: Synthetic oligonucleotide
agaggauaccgacugugcg

SEQ ID NO: 37507 - RNA, 19 nt, Artificial Sequence
  Description of Artificial Sequence: Synthetic oligonucleotide
acccuaaagguacugauga

SEQ ID NO: 37508 - RNA, 19 nt, Artificial Sequence
  Description of Artificial Sequence: Synthetic oligonucleotide
acgugcagaacguucaguc

SEQ ID NO: 37509 - RNA, 19 nt, Artificial Sequence
  Description of Artificial Sequence: Synthetic oligonucleotide
agugcaguaucaugauuac

SEQ ID NO: 37510 - RNA, 19 nt, Artificial Sequence
  Description of Artificial Sequence: Synthetic oligonucleotide
uucgaguaguguuuguacc

SEQ ID NO: 37511 - RNA, 19 nt, Artificial Sequence
  Description of Artificial Sequence: Synthetic oligonucleotide
gucauucucacauccgggg

SEQ ID NO: 37512 - RNA, 19 nt, Artificial Sequence
  Description of Artificial Sequence: Synthetic oligonucleotide
cauugcuacaacaagugca

SEQ ID NO: 37513 - RNA, 19 nt, Artificial Sequence
  Description of Artificial Sequence: Synthetic oligonucleotide
gaaggugugacaaauguaa

SEQ ID NO: 37514 - RNA, 19 nt, Artificial Sequence
  Description of Artificial Sequence: Synthetic oligonucleotide
agguacauaucucacauua

SEQ ID NO: 37515 - RNA, 19 nt, Artificial Sequence
  Description of Artificial Sequence: Synthetic oligonucleotide
uuucgaguaguguuuguac

SEQ ID NO: 37516 - RNA, 19 nt, Artificial Sequence
  Description of Artificial Sequence: Synthetic oligonucleotide
uucuauaugccuugcuaca

SEQ ID NO: 37517 - RNA, 19 nt, Artificial Sequence
  Description of Artificial Sequence: Synthetic oligonucleotide
aauauaaaauaugccgaau

SEQ ID NO: 37518 - RNA, 19 nt, Artificial Sequence
  Description of Artificial Sequence: Synthetic oligonucleotide
ugcuaaauuuccguguuug

SEQ ID NO: 37519 - RNA, 19 nt, Artificial Sequence
  Description of Artificial Sequence: Synthetic oligonucleotide
ugagagguguuaucuugcg

SEQ ID NO: 37520 - RNA, 19 nt, Artificial Sequence
  Description of Artificial Sequence: Synthetic oligonucleotide
uauaugccuugcuacaaac

SEQ ID NO: 37521 - RNA, 19 nt, Artificial Sequence
  Description of Artificial Sequence: Synthetic oligonucleotide
gacgcuaacaacaacucca

SEQ ID NO: 37522 - RNA, 19 nt, Artificial Sequence
  Description of Artificial Sequence: Synthetic oligonucleotide
uguaacugguuguaguuau

SEQ ID NO: 37523 - RNA, 19 nt, Artificial Sequence
  Description of Artificial Sequence: Synthetic oligonucleotide
uguagaagaagguguuaca

SEQ ID NO: 37524 - RNA, 19 nt, Artificial Sequence
  Description of Artificial Sequence: Synthetic oligonucleotide
aggcccauacauuugaccu

SEQ ID NO: 37525 - RNA, 19 nt, Artificial Sequence
  Description of Artificial Sequence: Synthetic oligonucleotide
ucaguagaaugauuuggga

SEQ ID NO: 37526 - RNA, 19 nt, Artificial Sequence
  Description of Artificial Sequence: Synthetic oligonucleotide
caggucuuuuguaauggcg

SEQ ID NO: 37527 - RNA, 19 nt, Artificial Sequence
  Description of Artificial Sequence: Synthetic oligonucleotide
agacauaagaugcuuggaa

SEQ ID NO: 37528 - RNA, 19 nt, Artificial Sequence
  Description of Artificial Sequence: Synthetic oligonucleotide
uagcugaaccacaucuagg

SEQ ID NO: 37529 - RNA, 19 nt, Artificial Sequence
  Description of Artificial Sequence: Synthetic oligonucleotide
uccaguuugccugauacgu

SEQ ID NO: 37530 - RNA, 19 nt, Artificial Sequence
  Description of Artificial Sequence: Synthetic oligonucleotide
uuaugcuuauuaauaguuu

SEQ ID NO: 37531 - RNA, 19 nt, Artificial Sequence
  Description of Artificial Sequence: Synthetic oligonucleotide
augguuaaagcuguaucuc

SEQ ID NO: 37532 - RNA, 19 nt, Artificial Sequence
  Description of Artificial Sequence: Synthetic oligonucleotide
uauaccgcaugcauucaga

SEQ ID NO: 37533 - RNA, 19 nt, Artificial Sequence
  Description of Artificial Sequence: Synthetic oligonucleotide
acaacaggcuuauuugcug

SEQ ID NO: 37534 - RNA, 19 nt, Artificial Sequence
  Description of Artificial Sequence: Synthetic oligonucleotide
uuuucggacccuaaaggua

SEQ ID NO: 37535 - RNA, 19 nt, Artificial Sequence
  Description of Artificial Sequence: Synthetic oligonucleotide
uggcuuguacuauugacuc

SEQ ID NO: 37536 - RNA, 19 nt, Artificial Sequence
  Description of Artificial Sequence: Synthetic oligonucleotide
auguccuacugauguagac

SEQ ID NO: 37537 - RNA, 19 nt, Artificial Sequence
  Description of Artificial Sequence: Synthetic oligonucleotide
acaucaguagaaugauuug

SEQ ID NO: 37538 - RNA, 19 nt, Artificial Sequence
  Description of Artificial Sequence: Synthetic oligonucleotide
  modified_base (2)..(2): a, c, u, g, unknown or other
gnguuugaggcauagggua

SEQ ID NO: 37539 - RNA, 19 nt, Artificial Sequence
  Description of Artificial Sequence: Synthetic oligonucleotide
ugauacgugcagaacguuc

SEQ ID NO: 37540 - RNA, 19 nt, Artificial Sequence
  Description of Artificial Sequence: Synthetic oligonucleotide
cuacauaaaguagagccuc

SEQ ID NO: 37541 - RNA, 19 nt, Artificial Sequence
  Description of Artificial Sequence: Synthetic oligonucleotide
ccuugcuacaaacaaaccc

SEQ ID NO: 37542 - RNA, 19 nt, Artificial Sequence
  Description of Artificial Sequence: Synthetic oligonucleotide
agauagguagcauggcuga

SEQ ID NO: 37543 - RNA, 19 nt, Artificial Sequence
  Description of Artificial Sequence: Synthetic oligonucleotide
guagccgccaagaugagug

SEQ ID NO: 37544 - RNA, 19 nt, Artificial Sequence
  Description of Artificial Sequence: Synthetic oligonucleotide
acuaucucgcuccauugcu

SEQ ID NO: 37545 - RNA, 19 nt, Artificial Sequence
  Description of Artificial Sequence: Synthetic oligonucleotide
gcuuuucggacccuaaagg

SEQ ID NO: 37546 - RNA, 19 nt, Artificial Sequence
  Description of Artificial Sequence: Synthetic oligonucleotide
ucgauaugagcuccccugc

SEQ ID NO: 37547 - RNA, 19 nt, Artificial Sequence
  Description of Artificial Sequence: Synthetic oligonucleotide
gaggaaucauugcauuccc

SEQ ID NO: 37548 - RNA, 19 nt, Artificial Sequence
  Description of Artificial Sequence: Synthetic oligonucleotide
ucuugcgguuaucugcugc

SEQ ID NO: 37549 - RNA, 19 nt, Artificial Sequence
  Description of Artificial Sequence: Synthetic oligonucleotide
ucagacugauguaaaggau

SEQ ID NO: 37550 - RNA, 19 nt, Artificial Sequence
  Description of Artificial Sequence: Synthetic oligonucleotide
uuccaguuugccugauacg

SEQ ID NO: 37551 - RNA, 19 nt, Artificial Sequence
  Description of Artificial Sequence: Synthetic oligonucleotide
auauaccgcaugcauucag

SEQ ID NO: 37552 - RNA, 19 nt, Artificial Sequence
  Description of Artificial Sequence: Synthetic oligonucleotide
aggucaguuaguaaguucu

SEQ ID NO: 37553 - RNA, 19 nt, Artificial Sequence
  Description of Artificial Sequence: Synthetic oligonucleotide
gccugauacgugcagaacg

SEQ ID NO: 37554 - RNA, 19 nt, Artificial Sequence
  Description of Artificial Sequence: Synthetic oligonucleotide
uaucucgcuccauugcuug

SEQ ID NO: 37555 - RNA, 19 nt, Artificial Sequence
  Description of Artificial Sequence: Synthetic oligonucleotide
gguguucaauacuagcucc

SEQ ID NO: 37556 - RNA, 19 nt, Artificial Sequence
  Description of Artificial Sequence: Synthetic oligonucleotide
auaccgcaugcauucagag

SEQ ID NO: 37557 - RNA, 19 nt, Artificial Sequence
  Description of Artificial Sequence: Synthetic oligonucleotide
augaagguacauaucucac

SEQ ID NO: 37558 - RNA, 19 nt, Artificial Sequence
  Description of Artificial Sequence: Synthetic oligonucleotide
uguccuacugauguagaca

SEQ ID NO: 37559 - RNA, 19 nt, Artificial Sequence
  Description of Artificial Sequence: Synthetic oligonucleotide
aguaugcuagcauucuuau

SEQ ID NO: 37560 - RNA, 19 nt, Artificial Sequence
  Description of Artificial Sequence: Synthetic oligonucleotide
ugaccugauguuuguaacu

SEQ ID NO: 37561 - RNA, 19 nt, Artificial Sequence
  Description of Artificial Sequence: Synthetic oligonucleotide
cucgguguucaauacuagc

SEQ ID NO: 37562 - RNA, 19 nt, Artificial Sequence
  Description of Artificial Sequence: Synthetic oligonucleotide
uaauggcggccuaaaaccu

SEQ ID NO: 37563 - RNA, 19 nt, Artificial Sequence
  Description of Artificial Sequence: Synthetic oligonucleotide
acuccauacaaagaugaca

SEQ ID NO: 37564 - RNA, 19 nt, Artificial Sequence
  Description of Artificial Sequence: Synthetic oligonucleotide
uacauaaaguagagccucu

SEQ ID NO: 37565 - RNA, 19 nt, Artificial Sequence
  Description of Artificial Sequence: Synthetic oligonucleotide
gauacgugcagaacguuca

SEQ ID NO: 37566 - RNA, 19 nt, Artificial Sequence
  Description of Artificial Sequence: Synthetic oligonucleotide
ugucaagacuucagguucu

SEQ ID NO: 37567 - RNA, 19 nt, Artificial Sequence
  Description of Artificial Sequence: Synthetic oligonucleotide
agaguucaaacugaagaga

SEQ ID NO: 37568 - RNA, 19 nt, Artificial Sequence
  Description of Artificial Sequence: Synthetic oligonucleotide
caggguauuuucacuacug

SEQ ID NO: 37569 - RNA, 19 nt, Artificial Sequence
  Description of Artificial Sequence: Synthetic oligonucleotide
agagauguguguaauaguu

SEQ ID NO: 37570 - RNA, 19 nt, Artificial Sequence
  Description of Artificial Sequence: Synthetic oligonucleotide
auacgaggauuuuccggac

SEQ ID NO: 37571 - RNA, 19 nt, Artificial Sequence
  Description of Artificial Sequence: Synthetic oligonucleotide
aggauaccgacugugcggg

SEQ ID NO: 37572 - RNA, 19 nt, Artificial Sequence
  Description of Artificial Sequence: Synthetic oligonucleotide
guugggaaauagaagcagc

SEQ ID NO: 37573 - RNA, 19 nt, Artificial Sequence
  Description of Artificial Sequence: Synthetic oligonucleotide
acguucagucccaauaggg

SEQ ID NO: 37574 - RNA, 19 nt, Artificial Sequence
  Description of Artificial Sequence: Synthetic oligonucleotide
cuuucaaccuaagacauaa

SEQ ID NO: 37575 - RNA, 19 nt, Artificial Sequence
  Description of Artificial Sequence: Synthetic oligonucleotide
auauuccuaugguaguggu

SEQ ID NO: 37576 - RNA, 19 nt, Artificial Sequence
  Description of Artificial Sequence: Synthetic oligonucleotide
ucucgguguucaauacuag

SEQ ID NO: 37577 - RNA, 19 nt, Artificial Sequence
  Description of Artificial Sequence: Synthetic oligonucleotide
aggcuaacagguuuauccu

SEQ ID NO: 37578 - RNA, 19 nt, Artificial Sequence
  Description of Artificial Sequence: Synthetic oligonucleotide
accauuauccagcaauauu

SEQ ID NO: 37579 - RNA, 19 nt, Artificial Sequence
  Description of Artificial Sequence: Synthetic oligonucleotide
uuacucccaauaacagaug

SEQ ID NO: 37580 - RNA, 19 nt, Artificial Sequence
  Description of Artificial Sequence: Synthetic oligonucleotide
gcaagauggauguuuuaag

SEQ ID NO: 37581 - RNA, 19 nt, Artificial Sequence
  Description of Artificial Sequence: Synthetic oligonucleotide
  modified_base (5)..(5): a, c, u, g, unknown or other
ucugnguuugaggcauagg

SEQ ID NO: 37582 - RNA, 19 nt, Artificial Sequence
  Description of Artificial Sequence: Synthetic oligonucleotide
aucucacauuaauuuaagu

SEQ ID NO: 37583 - RNA, 19 nt, Artificial Sequence
  Description of Artificial Sequence: Synthetic oligonucleotide
auagguagcauggcugaag

SEQ ID NO: 37584 - RNA, 19 nt, Artificial Sequence
  Description of Artificial Sequence: Synthetic oligonucleotide
guauaugcugacugagaac

SEQ ID NO: 37585 - RNA, 19 nt, Artificial Sequence
  Description of Artificial Sequence: Synthetic oligonucleotide
augcuagcauucuuauuug

SEQ ID NO: 37586 - RNA, 19 nt, Artificial Sequence
  Description of Artificial Sequence: Synthetic oligonucleotide
accgauaaugcccaucauu

SEQ ID NO: 37587 - RNA, 19 nt, Artificial Sequence
  Description of Artificial Sequence: Synthetic oligonucleotide
uuccgcacaucgauaugag

SEQ ID NO: 37588 - RNA, 19 nt, Artificial Sequence
  Description of Artificial Sequence: Synthetic oligonucleotide
gauugcugaauaugaaggu

SEQ ID NO: 37589 - RNA, 19 nt, Artificial Sequence
  Description of Artificial Sequence: Synthetic oligonucleotide
ucaauacuagcuccucuuu

SEQ ID NO: 37590 - RNA, 19 nt, Artificial Sequence
  Description of Artificial Sequence: Synthetic oligonucleotide
gauaccgacugugcgggag

SEQ ID NO: 37591 - RNA, 19 nt, Artificial Sequence
  Description of Artificial Sequence: Synthetic oligonucleotide
agcagauauuccuauggua

SEQ ID NO: 37592 - RNA, 19 nt, Artificial Sequence
  Description of Artificial Sequence: Synthetic oligonucleotide
ucuauaugccuugcuacaa

SEQ ID NO: 37593 - RNA, 19 nt, Artificial Sequence
  Description of Artificial Sequence: Synthetic oligonucleotide
gucaacaaacuaagugggg

SEQ ID NO: 37594 - RNA, 19 nt, Artificial Sequence
  Description of Artificial Sequence: Synthetic oligonucleotide
agacugauguaaaggaucu

SEQ ID NO: 37595 - RNA, 19 nt, Artificial Sequence
  Description of Artificial Sequence: Synthetic oligonucleotide
agucauucucacauccggg

SEQ ID NO: 37596 - RNA, 19 nt, Artificial Sequence
  Description of Artificial Sequence: Synthetic oligonucleotide
cauuugaccuccugaaaga

SEQ ID NO: 37597 - RNA, 19 nt, Artificial Sequence
  Description of Artificial Sequence: Synthetic oligonucleotide
ugacaauaccugagggacu

SEQ ID NO: 37598 - RNA, 19 nt, Artificial Sequence
  Description of Artificial Sequence: Synthetic oligonucleotide
cagaggauaccgacugugc

SEQ ID NO: 37599 - RNA, 19 nt, Artificial Sequence
  Description of Artificial Sequence: Synthetic oligonucleotide
ugugcgggagacucauuug

SEQ ID NO: 37600 - RNA, 19 nt, Artificial Sequence
  Description of Artificial Sequence: Synthetic oligonucleotide
uuugccugauacgugcaga

SEQ ID NO: 37601 - RNA, 19 nt, Artificial Sequence
  Description of Artificial Sequence: Synthetic oligonucleotide
guccuacugauguagacaa

SEQ ID NO: 37602 - RNA, 19 nt, Artificial Sequence
  Description of Artificial Sequence: Synthetic oligonucleotide
uacgaggauuuuccggaca

SEQ ID NO: 37603 - RNA, 19 nt, Artificial Sequence
  Description of Artificial Sequence: Synthetic oligonucleotide
gugcuaaagggcccaaaug

SEQ ID NO: 37604 - RNA, 19 nt, Artificial Sequence
  Description of Artificial Sequence: Synthetic oligonucleotide
ucuagguguccaccauuug

SEQ ID NO: 37605 - RNA, 19 nt, Artificial Sequence
  Description of Artificial Sequence: Synthetic oligonucleotide
aaauguuucucggccacuu

SEQ ID NO: 37606 - RNA, 19 nt, Artificial Sequence
  Description of Artificial Sequence: Synthetic oligonucleotide
gaaggcaugagcauucgua

SEQ ID NO: 37607 - RNA, 19 nt, Artificial Sequence
  Description of Artificial Sequence: Synthetic oligonucleotide
uuuguaauggcggccuaaa

SEQ ID NO: 37608 - RNA, 19 nt, Artificial Sequence
  Description of Artificial Sequence: Synthetic oligonucleotide
aauauaccgcaugcauuca

SEQ ID NO: 37609 - RNA, 19 nt, Artificial Sequence
  Description of Artificial Sequence: Synthetic oligonucleotide
uccacaccguuugaggacc

SEQ ID NO: 37610 - RNA, 19 nt, Artificial Sequence
  Description of Artificial Sequence: Synthetic oligonucleotide
gguguuacagaaccauaug

SEQ ID NO: 37611 - RNA, 19 nt, Artificial Sequence
  Description of Artificial Sequence: Synthetic oligonucleotide
auaggguaugucacaggcg

SEQ ID NO: 37612 - RNA, 19 nt, Artificial Sequence
  Description of Artificial Sequence: Synthetic oligonucleotide
gacccuaaagguacugaug

SEQ ID NO: 37613 - RNA, 19 nt, Artificial Sequence
  Description of Artificial Sequence: Synthetic oligonucleotide
acgcuaacaacaacuccac

SEQ ID NO: 37614 - RNA, 19 nt, Artificial Sequence
  Description of Artificial Sequence: Synthetic oligonucleotide
ugauuacucucagucugug

SEQ ID NO: 37615 - RNA, 19 nt, Artificial Sequence
  Description of Artificial Sequence: Synthetic oligonucleotide
gacucauuugaugcugaug

SEQ ID NO: 37616 - RNA, 19 nt, Artificial Sequence
  Description of Artificial Sequence: Synthetic oligonucleotide
agccucuauacugacauau

SEQ ID NO: 37617 - RNA, 19 nt, Artificial Sequence
  Description of Artificial Sequence: Synthetic oligonucleotide
uuccguguuugcucagaag

SEQ ID NO: 37618 - RNA, 19 nt, Artificial Sequence
  Description of Artificial Sequence: Synthetic oligonucleotide
guuuguaacugguuguagu

SEQ ID NO: 37619 - RNA, 19 nt, Artificial Sequence
  Description of Artificial Sequence: Synthetic oligonucleotide
caggcaagcguuagugcag

SEQ ID NO: 37620 - RNA, 19 nt, Artificial Sequence
  Description of Artificial Sequence: Synthetic oligonucleotide
uuucucggccacuugugau

SEQ ID NO: 37621 - RNA, 19 nt, Artificial Sequence
  Description of Artificial Sequence: Synthetic oligonucleotide
auacuagcuccucuuucga

SEQ ID NO: 37622 - RNA, 19 nt, Artificial Sequence
  Description of Artificial Sequence: Synthetic oligonucleotide
guuugccugauacgugcag

SEQ ID NO: 37623 - RNA, 19 nt, Artificial Sequence
  Description of Artificial Sequence: Synthetic oligonucleotide
acgaacgccagaggauacc

SEQ ID NO: 37624 - RNA, 19 nt, Artificial Sequence
  Description of Artificial Sequence: Synthetic oligonucleotide
gagggaaacauccaccgau

SEQ ID NO: 37625 - RNA, 19 nt, Artificial Sequence
  Description of Artificial Sequence: Synthetic oligonucleotide
ugcucagaagcaguuuaca

SEQ ID NO: 37626 - RNA, 19 nt, Artificial Sequence
  Description of Artificial Sequence: Synthetic oligonucleotide
uuaucuugauugccaccaa

SEQ ID NO: 37627 - RNA, 19 nt, Artificial Sequence
  Description of Artificial Sequence: Synthetic oligonucleotide
guagacaaauuacucccaa

SEQ ID NO: 37628 - RNA, 19 nt, Artificial Sequence
  Description of Artificial Sequence: Synthetic oligonucleotide
caggagacggugcacgaac

SEQ ID NO: 37629 - RNA, 19 nt, Artificial Sequence
  Description of Artificial Sequence: Synthetic oligonucleotide
uuuuguaauggcggccuaa

SEQ ID NO: 37630 - RNA, 19 nt, Artificial Sequence
  Description of Artificial Sequence: Synthetic oligonucleotide
guagauagguagcauggcu

SEQ ID NO: 37631 - RNA, 19 nt, Artificial Sequence
  Description of Artificial Sequence: Synthetic oligonucleotide
ucggccacuugugauuucc

SEQ ID NO: 37632 - RNA, 19 nt, Artificial Sequence
  Description of Artificial Sequence: Synthetic oligonucleotide
uccgcacaucgauaugagc

SEQ ID NO: 37633 - RNA, 19 nt, Artificial Sequence
  Description of Artificial Sequence: Synthetic oligonucleotide
aggaaaguccauguauccu

SEQ ID NO: 37634 - RNA, 19 nt, Artificial Sequence
  Description of Artificial Sequence: Synthetic oligonucleotide
uuguaauggcggccuaaaa

SEQ ID NO: 37635 - RNA, 19 nt, Artificial Sequence
  Description of Artificial Sequence: Synthetic oligonucleotide
uuuuaccuaugggaaccug

SEQ ID NO: 37636 - RNA, 19 nt, Artificial Sequence
  Description of Artificial Sequence: Synthetic oligonucleotide
agguguuacagaaccauau

SEQ ID NO: 37637 - RNA, 19 nt, Artificial Sequence
  Description of Artificial Sequence: Synthetic oligonucleotide
ucaugggauuucccauccc

SEQ ID NO: 37638 - RNA, 19 nt, Artificial Sequence
  Description of Artificial Sequence: Synthetic oligonucleotide
cacaucgauaugagcuccc

SEQ ID NO: 37639 - RNA, 19 nt, Artificial Sequence
  Description of Artificial Sequence: Synthetic oligonucleotide
cacaggcgcaguagaaggc

SEQ ID NO: 37640 - RNA, 19 nt, Artificial Sequence
  Description of Artificial Sequence: Synthetic oligonucleotide
cacauccggggaaggaacc

SEQ ID NO: 37641 - RNA, 19 nt, Artificial Sequence
  Description of Artificial Sequence: Synthetic oligonucleotide
uagccgccaagaugagugg

SEQ ID NO: 37642 - RNA, 19 nt, Artificial Sequence
  Description of Artificial Sequence: Synthetic oligonucleotide
uggagcggaaguuccaguu

SEQ ID NO: 37643 - RNA, 19 nt, Artificial Sequence
  Description of Artificial Sequence: Synthetic oligonucleotide
guuccgcacaucgauauga

SEQ ID NO: 37644 - RNA, 19 nt, Artificial Sequence
  Description of Artificial Sequence: Synthetic oligonucleotide
  modified_base (18)..(18): a, c, u, g, unknown or other
uggggacaucccaucugng

SEQ ID NO: 37645 - RNA, 19 nt, Artificial Sequence
  Description of Artificial Sequence: Synthetic oligonucleotide
ccuaaagguacugaugaug

SEQ ID NO: 37646 - RNA, 19 nt, Artificial Sequence
  Description of Artificial Sequence: Synthetic oligonucleotide
guuagcguaccaccuucac

SEQ ID NO: 37647 - RNA, 19 nt, Artificial Sequence
  Description of Artificial Sequence: Synthetic oligonucleotide
  modified_base (6)..(6): a, c, u, g, unknown or other
aucugnguuugaggcauag

SEQ ID NO: 37648 - RNA, 19 nt, Artificial Sequence
  Description of Artificial Sequence: Synthetic oligonucleotide
agaaugauuugggagcaua

SEQ ID NO: 37649 - RNA, 19 nt, Artificial Sequence
  Description of Artificial Sequence: Synthetic oligonucleotide
cgggagacucauuugaugc

SEQ ID NO: 37650 - RNA, 19 nt, Artificial Sequence
  Description of Artificial Sequence: Synthetic oligonucleotide
gugcacgaacgccagagga

SEQ ID NO: 37651 - RNA, 19 nt, Artificial Sequence
  Description of Artificial Sequence: Synthetic oligonucleotide
agcaguaugcuagcauucu

SEQ ID NO: 37652 - RNA, 19 nt, Artificial Sequence
  Description of Artificial Sequence: Synthetic oligonucleotide
cagcaguaugcuagcauuc

SEQ ID NO: 37653 - RNA, 19 nt, Artificial Sequence
  Description of Artificial Sequence: Synthetic oligonucleotide
agaugccacuauguccuac

SEQ ID NO: 37654 - RNA, 19 nt, Artificial Sequence
  Description of Artificial Sequence: Synthetic oligonucleotide
uaggaguguuugacauugc

SEQ ID NO: 37655 - RNA, 19 nt, Artificial Sequence
  Description of Artificial Sequence: Synthetic oligonucleotide
gaugccacuauguccuacu

SEQ ID NO: 37656 - RNA, 19 nt, Artificial Sequence
  Description of Artificial Sequence: Synthetic oligonucleotide
gugcgggagacucauuuga

SEQ ID NO: 37657 - RNA, 19 nt, Artificial Sequence
  Description of Artificial Sequence: Synthetic oligonucleotide
ugcgggagacucauuugau

SEQ ID NO: 37658 - RNA, 19 nt, Artificial Sequence
  Description of Artificial Sequence: Synthetic oligonucleotide
uuauggcauuauuucuuuu

SEQ ID NO: 37659 - RNA, 19 nt, Artificial Sequence
  Description of Artificial Sequence: Synthetic oligonucleotide
ugcguggaaugaccugaug

SEQ ID NO: 37660 - RNA, 19 nt, Artificial Sequence
  Description of Artificial Sequence: Synthetic oligonucleotide
gacuugaggcaaaguuucc

SEQ ID NO: 37661 - RNA, 19 nt, Artificial Sequence
  Description of Artificial Sequence: Synthetic oligonucleotide
caguaugcuagcauucuua

SEQ ID NO: 37662 - RNA, 19 nt, Artificial Sequence
  Description of Artificial Sequence: Synthetic oligonucleotide
auaugccuugcuacaaaca

SEQ ID NO: 37663 - RNA, 19 nt, Artificial Sequence
  Description of Artificial Sequence: Synthetic oligonucleotide
gggccauuaaacauggguc

SEQ ID NO: 37664 - RNA, 19 nt, Artificial Sequence
  Description of Artificial Sequence: Synthetic oligonucleotide
uucucacauccggggaagg

SEQ ID NO: 37665 - RNA, 19 nt, Artificial Sequence
  Description of Artificial Sequence: Synthetic oligonucleotide
ucuugucucgguguucaau

SEQ ID NO: 37666 - RNA, 19 nt, Artificial Sequence
  Description of Artificial Sequence: Synthetic oligonucleotide
augccacuauguccuacug

SEQ ID NO: 37667 - RNA, 19 nt, Artificial Sequence
  Description of Artificial Sequence: Synthetic oligonucleotide
cuguuauguaaacaauugu

SEQ ID NO: 37668 - RNA, 19 nt, Artificial Sequence
  Description of Artificial Sequence: Synthetic oligonucleotide
auaccgacugugcgggaga

SEQ ID NO: 37669 - RNA, 19 nt, Artificial Sequence
  Description of Artificial Sequence: Synthetic oligonucleotide
aaccauauggugaguccau

SEQ ID NO: 37670 - RNA, 19 nt, Artificial Sequence
  Description of Artificial Sequence: Synthetic oligonucleotide
ccuaugguaguggugguag

SEQ ID NO: 37671 - RNA, 19 nt, Artificial Sequence
  Description of Artificial Sequence: Synthetic oligonucleotide
aggguuacaccaguccacu

SEQ ID NO: 37672 - RNA, 19 nt, Artificial Sequence
  Description of Artificial Sequence: Synthetic oligonucleotide
auaguggcaaagacagagu

SEQ ID NO: 37673 - RNA, 19 nt, Artificial Sequence
  Description of Artificial Sequence: Synthetic oligonucleotide
aagguguuacagaaccaua

SEQ ID NO: 37674 - RNA, 19 nt, Artificial Sequence
  Description of Artificial Sequence: Synthetic oligonucleotide
gaagcaguuuacaguacua

SEQ ID NO: 37675 - RNA, 19 nt, Artificial Sequence
  Description of Artificial Sequence: Synthetic oligonucleotide
caacagauccuccccagaa

SEQ ID NO: 37676 - RNA, 19 nt, Artificial Sequence
  Description of Artificial Sequence: Synthetic oligonucleotide
cuguuaaaguuagcagcug

SEQ ID NO: 37677 - RNA, 19 nt, Artificial Sequence
  Description of Artificial Sequence: Synthetic oligonucleotide
gaguggaguaaaaccuuuc

SEQ ID NO: 37678 - RNA, 19 nt, Artificial Sequence
  Description of Artificial Sequence: Synthetic oligonucleotide
caugagggccauuaaacau

SEQ ID NO: 37679 - RNA, 19 nt, Artificial Sequence
  Description of Artificial Sequence: Synthetic oligonucleotide
gacaacaggcuuauuugcu

SEQ ID NO: 37680 - RNA, 19 nt, Artificial Sequence
  Description of Artificial Sequence: Synthetic oligonucleotide
cauucucacauccggggaa

SEQ ID NO: 37681 - RNA, 19 nt, Artificial Sequence
  Description of Artificial Sequence: Synthetic oligonucleotide
uucggacccuaaagguacu

SEQ ID NO: 37682 - RNA, 19 nt, Artificial Sequence
  Description of Artificial Sequence: Synthetic oligonucleotide
cuauaugccuugcuacaaa

SEQ ID NO: 37683 - RNA, 19 nt, Artificial Sequence
  Description of Artificial Sequence: Synthetic oligonucleotide
uuacaccaguccacuuuau

SEQ ID NO: 37684 - RNA, 19 nt, Artificial Sequence
  Description of Artificial Sequence: Synthetic oligonucleotide
accguuugaggaccauuau

SEQ ID NO: 37685 - RNA, 19 nt, Artificial Sequence
  Description of Artificial Sequence: Synthetic oligonucleotide
gguagauagguagcauggc

SEQ ID NO: 37686 - RNA, 19 nt, Artificial Sequence
  Description of Artificial Sequence: Synthetic oligonucleotide
cacgaacgccagaggauac

SEQ ID NO: 37687 - RNA, 19 nt, Artificial Sequence
  Description of Artificial Sequence: Synthetic oligonucleotide
caaucccuucaaaggacca

SEQ ID NO: 37688 - RNA, 19 nt, Artificial Sequence
  Description of Artificial Sequence: Synthetic oligonucleotide
ggcuuguacuauugacucc

SEQ ID NO: 37689 - RNA, 19 nt, Artificial Sequence
  Description of Artificial Sequence: Synthetic oligonucleotide
uuugcaccccgacgcuaac

SEQ ID NO: 37690 - RNA, 19 nt, Artificial Sequence
  Description of Artificial Sequence: Synthetic oligonucleotide
ggugcacgaacgccagagg

SEQ ID NO: 37691 - RNA, 19 nt, Artificial Sequence
  Description of Artificial Sequence: Synthetic oligonucleotide
uguagccgccaagaugagu

SEQ ID NO: 37692 - RNA, 19 nt, Artificial Sequence
  Description of Artificial Sequence: Synthetic oligonucleotide
caccguuugaggaccauua

SEQ ID NO: 37693 - RNA, 19 nt, Artificial Sequence
  Description of Artificial Sequence: Synthetic oligonucleotide
agcguuagugcaguaucau

SEQ ID NO: 37694 - RNA, 19 nt, Artificial Sequence
  Description of Artificial Sequence: Synthetic oligonucleotide
ucggcccacuucugcauac

SEQ ID NO: 37695 - RNA, 19 nt, Artificial Sequence
  Description of Artificial Sequence: Synthetic oligonucleotide
aucuagguguccaccauuu

SEQ ID NO: 37696 - RNA, 19 nt, Artificial Sequence
  Description of Artificial Sequence: Synthetic oligonucleotide
gcguuagugcaguaucaug

SEQ ID NO: 37697 - RNA, 19 nt, Artificial Sequence
  Description of Artificial Sequence: Synthetic oligonucleotide
ggagacggugcacgaacgc

SEQ ID NO: 37698 - RNA, 19 nt, Artificial Sequence
  Description of Artificial Sequence: Synthetic oligonucleotide
gacaauaccugagggacuu

SEQ ID NO: 37699 - RNA, 19 nt, Artificial Sequence
  Description of Artificial Sequence: Synthetic oligonucleotide
auaugccgaauuguuuaaa

SEQ ID NO: 37700 - RNA, 19 nt, Artificial Sequence
  Description of Artificial Sequence: Synthetic oligonucleotide
aucucgcuccauugcuuga

SEQ ID NO: 37701 - RNA, 19 nt, Artificial Sequence
  Description of Artificial Sequence: Synthetic oligonucleotide
gggcccaaaugguaaagga

SEQ ID NO: 37702 - RNA, 19 nt, Artificial Sequence
  Description of Artificial Sequence: Synthetic oligonucleotide
aguuagcguaccaccuuca

SEQ ID NO: 37703 - RNA, 19 nt, Artificial Sequence
  Description of Artificial Sequence: Synthetic oligonucleotide
gccacuauguccuacugau

SEQ ID NO: 37704 - RNA, 19 nt, Artificial Sequence
  Description of Artificial Sequence: Synthetic oligonucleotide
ggaucaaguuuacauaauu

SEQ ID NO: 37705 - RNA, 19 nt, Artificial Sequence
  Description of Artificial Sequence: Synthetic oligonucleotide
ggaguguuccccuucuugu

SEQ ID NO: 37706 - RNA, 19 nt, Artificial Sequence
  Description of Artificial Sequence: Synthetic oligonucleotide
gcgggagacucauuugaug

SEQ ID NO: 37707 - RNA, 19 nt, Artificial Sequence
  Description of Artificial Sequence: Synthetic oligonucleotide
cauccggggaaggaaccug

SEQ ID NO: 37708 - RNA, 19 nt, Artificial Sequence
  Description of Artificial Sequence: Synthetic oligonucleotide
aucuugcgguuaucugcug

SEQ ID NO: 37709 - RNA, 19 nt, Artificial Sequence
  Description of Artificial Sequence: Synthetic oligonucleotide
ccaccgauaaugcccauca

SEQ ID NO: 37710 - RNA, 19 nt, Artificial Sequence
  Description of Artificial Sequence: Synthetic oligonucleotide
gcguggaaugaccugaugu

SEQ ID NO: 37711 - RNA, 19 nt, Artificial Sequence
  Description of Artificial Sequence: Synthetic oligonucleotide
ugguugcaauauaccgcau

SEQ ID NO: 37712 - RNA, 19 nt, Artificial Sequence
  Description of Artificial Sequence: Synthetic oligonucleotide
gauagguagcauggcugaa

SEQ ID NO: 37713 - RNA, 19 nt, Artificial Sequence
  Description of Artificial Sequence: Synthetic oligonucleotide
auacuguggguaggagugu

SEQ ID NO: 37714 - RNA, 19 nt, Artificial Sequence
  Description of Artificial Sequence: Synthetic oligonucleotide
cucacauccggggaaggaa

SEQ ID NO: 37715 - RNA, 19 nt, Artificial Sequence
  Description of Artificial Sequence: Synthetic oligonucleotide
gcacaucgauaugagcucc

SEQ ID NO: 37716 - RNA, 19 nt, Artificial Sequence
  Description of Artificial Sequence: Synthetic oligonucleotide
ccgcacaucgauaugagcu

SEQ ID NO: 37717 - RNA, 19 nt, Artificial Sequence
  Description of Artificial Sequence: Synthetic oligonucleotide
cagcgauacuguggguagg

SEQ ID NO: 37718 - RNA, 19 nt, Artificial Sequence
  Description of Artificial Sequence: Synthetic oligonucleotide
aggcaagcguuagugcagu

SEQ ID NO: 37719 - RNA, 19 nt, Artificial Sequence
  Description of Artificial Sequence: Synthetic oligonucleotide
ccagaggauaccgacugug

SEQ ID NO: 37720 - RNA, 19 nt, Artificial Sequence
  Description of Artificial Sequence: Synthetic oligonucleotide
cuuuguguaguagcugcua

SEQ ID NO: 37721 - RNA, 19 nt, Artificial Sequence
  Description of Artificial Sequence: Synthetic oligonucleotide
agggaaacauccaccgaua

SEQ ID NO: 37722 - RNA, 19 nt, Artificial Sequence
  Description of Artificial Sequence: Synthetic oligonucleotide
uaccgacugugcgggagac

SEQ ID NO: 37723 - RNA, 19 nt, Artificial Sequence
  Description of Artificial Sequence: Synthetic oligonucleotide
cuguagccgccaagaugag

SEQ ID NO: 37724 - RNA, 19 nt, Artificial Sequence
  Description of Artificial Sequence: Synthetic oligonucleotide
gguguuaucuugcgguuau

SEQ ID NO: 37725 - RNA, 19 nt, Artificial Sequence
  Description of Artificial Sequence: Synthetic oligonucleotide
acaauaccugagggacuug

SEQ ID NO: 37726 - RNA, 19 nt, Artificial Sequence
  Description of Artificial Sequence: Synthetic oligonucleotide
agguguuaucuugcgguua

SEQ ID NO: 37727 - RNA, 19 nt, Artificial Sequence
  Description of Artificial Sequence: Synthetic oligonucleotide
auccggggaaggaaccuga

SEQ ID NO: 37728 - RNA, 19 nt, Artificial Sequence
  Description of Artificial Sequence: Synthetic oligonucleotide
guguucaauacuagcuccu

SEQ ID NO: 37729 - RNA, 19 nt, Artificial Sequence
  Description of Artificial Sequence: Synthetic oligonucleotide
uggcccaaguuagcuguuc

SEQ ID NO: 37730 - RNA, 19 nt, Artificial Sequence
  Description of Artificial Sequence: Synthetic oligonucleotide
cgacgcuaacaacaacucc

SEQ ID NO: 37731 - RNA, 19 nt, Artificial Sequence
  Description of Artificial Sequence: Synthetic oligonucleotide
agccgccaagaugagugga

SEQ ID NO: 37732 - RNA, 19 nt, Artificial Sequence
  Description of Artificial Sequence: Synthetic oligonucleotide
ggcccaaguuagcuguuca

SEQ ID NO: 37733 - RNA, 19 nt, Artificial Sequence
  Description of Artificial Sequence: Synthetic oligonucleotide
cugcaggcuaacagguuua

SEQ ID NO: 37734 - RNA, 19 nt, Artificial Sequence
  Description of Artificial Sequence: Synthetic oligonucleotide
cgaacgccagaggauaccg

SEQ ID NO: 37735 - RNA, 19 nt, Artificial Sequence
  Description of Artificial Sequence: Synthetic oligonucleotide
cgcacaucgauaugagcuc

SEQ ID NO: 37736 - RNA, 19 nt, Artificial Sequence
  Description of Artificial Sequence: Synthetic oligonucleotide
gccgccaagaugaguggag

SEQ ID NO: 37737 - RNA, 19 nt, Artificial Sequence
  Description of Artificial Sequence: Synthetic oligonucleotide
cccgacgcuaacaacaacu

SEQ ID NO: 37738 - RNA, 19 nt, Artificial Sequence
  Description of Artificial Sequence: Synthetic oligonucleotide
ggacccuaaagguacugau

SEQ ID NO: 37739 - RNA, 19 nt, Artificial Sequence
  Description of Artificial Sequence: Synthetic oligonucleotide
cgaguaguguuuguaccag

SEQ ID NO: 37740 - RNA, 19 nt, Artificial Sequence
  Description of Artificial Sequence: Synthetic oligonucleotide
cuuuuguaauggcggccua

SEQ ID NO: 37741 - RNA, 19 nt, Artificial Sequence
  Description of Artificial Sequence: Synthetic oligonucleotide
  modified_base (17)..(17): a, c, u, g, unknown or other
ggggacaucccaucugngu

SEQ ID NO: 37742 - RNA, 19 nt, Artificial Sequence
  Description of Artificial Sequence: Synthetic oligonucleotide
guggaaugaccugauguuu

SEQ ID NO: 37743 - RNA, 19 nt, Artificial Sequence
  Description of Artificial Sequence: Synthetic oligonucleotide
ccugauacgugcagaacgu

SEQ ID NO: 37744 - RNA, 19 nt, Artificial Sequence
  Description of Artificial Sequence: Synthetic oligonucleotide
guaugcuagcauucuuauu

SEQ ID NO: 37745 - RNA, 19 nt, Artificial Sequence
  Description of Artificial Sequence: Synthetic oligonucleotide
ggcgcaguagaaggcacca

SEQ ID NO: 37746 - RNA, 19 nt, Artificial Sequence
  Description of Artificial Sequence: Synthetic oligonucleotide
cuagccacagcggaguguu

SEQ ID NO: 37747 - RNA, 19 nt, Artificial Sequence
  Description of Artificial Sequence: Synthetic oligonucleotide
gagccucuauacugacaua

SEQ ID NO: 37748 - RNA, 19 nt, Artificial Sequence
  Description of Artificial Sequence: Synthetic oligonucleotide
cuaucucgcuccauugcuu

SEQ ID NO: 37749 - RNA, 19 nt, Artificial Sequence
  Description of Artificial Sequence: Synthetic oligonucleotide
  modified_base (9)..(9): a, c, u, g, unknown or other
cccaucugnguuugaggca

SEQ ID NO: 37750 - RNA, 19 nt, Artificial Sequence
  Description of Artificial Sequence: Synthetic oligonucleotide
caugugaggugcccagggu

SEQ ID NO: 37751 - RNA, 19 nt, Artificial Sequence
  Description of Artificial Sequence: Synthetic oligonucleotide
  modified_base (7)..(7): a, c, u, g, unknown or other
caucugnguuugaggcaua

SEQ ID NO: 37752 - RNA, 19 nt, Artificial Sequence
  Description of Artificial Sequence: Synthetic oligonucleotide
gcgauacuguggguaggag

SEQ ID NO: 37753 - RNA, 19 nt, Artificial Sequence
  Description of Artificial Sequence: Synthetic oligonucleotide
gcacgaacgccagaggaua

SEQ ID NO: 37754 - RNA, 19 nt, Artificial Sequence
  Description of Artificial Sequence: Synthetic oligonucleotide
cacagcggaguguuccccu

SEQ ID NO: 37755 - RNA, 19 nt, Artificial Sequence
  Description of Artificial Sequence: Synthetic oligonucleotide
gugcaguaucaugauuacu

SEQ ID NO: 37756 - RNA, 19 nt, Artificial Sequence
  Description of Artificial Sequence: Synthetic oligonucleotide
ccaaaagaacucggcccac

SEQ ID NO: 37757 - RNA, 19 nt, Artificial Sequence
  Description of Artificial Sequence: Synthetic oligonucleotide
gggagcaagauggauguuu

SEQ ID NO: 37758 - RNA, 19 nt, Artificial Sequence
  Description of Artificial Sequence: Synthetic oligonucleotide
accuggugcuuuggaagua

SEQ ID NO: 37759 - RNA, 19 nt, Artificial Sequence
  Description of Artificial Sequence: Synthetic oligonucleotide
cgcuaacaacaacuccacc

SEQ ID NO: 37760 - RNA, 19 nt, Artificial Sequence
  Description of Artificial Sequence: Synthetic oligonucleotide
  modified_base (15)..(15): a, c, u, g, unknown or other
ggacaucccaucugnguuu

SEQ ID NO: 37761 - RNA, 19 nt, Artificial Sequence
  Description of Artificial Sequence: Synthetic oligonucleotide
gcaccccgacgcuaacaac

SEQ ID NO: 37762 - RNA, 19 nt, Artificial Sequence
  Description of Artificial Sequence: Synthetic oligonucleotide
ccacagcggaguguucccc

SEQ ID NO: 37763 - RNA, 19 nt, Artificial Sequence
  Description of Artificial Sequence: Synthetic oligonucleotide
ggagcggaaguuccaguuu

SEQ ID NO: 37764 - RNA, 19 nt, Artificial Sequence
  Description of Artificial Sequence: Synthetic oligonucleotide
ccuuucaaccuaagacaua

SEQ ID NO: 37765 - RNA, 19 nt, Artificial Sequence
  Description of Artificial Sequence: Synthetic oligonucleotide
  modified_base (8)..(8): a, c, u, g, unknown or other
ccaucugnguuugaggcau

SEQ ID NO: 37766 - RNA, 19 nt, Artificial Sequence
  Description of Artificial Sequence: Synthetic oligonucleotide
gcaguaugcuagcauucuu

SEQ ID NO: 37767 - RNA, 19 nt, Artificial Sequence
  Description of Artificial Sequence: Synthetic oligonucleotide
ccucuuucgaguaguguuu

SEQ ID NO: 37768 - RNA, 19 nt, Artificial Sequence
  Description of Artificial Sequence: Synthetic oligonucleotide
cgaggauuuuccggacagc

SEQ ID NO: 37769 - RNA, 19 nt, Artificial Sequence
  Description of Artificial Sequence: Synthetic oligonucleotide
ccccaacuuuaggaaaguc

SEQ ID NO: 37770 - RNA, 19 nt, Artificial Sequence
  Description of Artificial Sequence: Synthetic oligonucleotide
cguggaaugaccugauguu

SEQ ID NO: 37771 - RNA, 19 nt, Artificial Sequence
  Description of Artificial Sequence: Synthetic oligonucleotide
ggauaccgacugugcggga

SEQ ID NO: 37772 - RNA, 19 nt, Artificial Sequence
  Description of Artificial Sequence: Synthetic oligonucleotide
cugcguggaaugaccugau

SEQ ID NO: 37773 - RNA, 19 nt, Artificial Sequence
  Description of Artificial Sequence: Synthetic oligonucleotide
cugauacgugcagaacguu

SEQ ID NO: 37774 - RNA, 19 nt, Artificial Sequence
  Description of Artificial Sequence: Synthetic oligonucleotide
gcgcaguagaaggcaccac

SEQ ID NO: 37775 - RNA, 19 nt, Artificial Sequence
  Description of Artificial Sequence: Synthetic oligonucleotide
ccccgacgcuaacaacaac

SEQ ID NO: 37776 - RNA, 19 nt, Artificial Sequence
  Description of Artificial Sequence: Synthetic oligonucleotide
caccgauaaugcccaucau

SEQ ID NO: 37777 - RNA, 19 nt, Artificial Sequence
  Description of Artificial Sequence: Synthetic oligonucleotide
gcagaacguucagucccaa

SEQ ID NO: 37778 - RNA, 19 nt, Artificial Sequence
  Description of Artificial Sequence: Synthetic oligonucleotide
cccuaaagguacugaugau

SEQ ID NO: 37779 - RNA, 19 nt, Artificial Sequence
  Description of Artificial Sequence: Synthetic oligonucleotide
ccacaccguuugaggacca

SEQ ID NO: 37780 - RNA, 19 nt, Artificial Sequence
  Description of Artificial Sequence: Synthetic oligonucleotide
cggacccuaaagguacuga

SEQ ID NO: 37781 - RNA, 19 nt, Artificial Sequence
  Description of Artificial Sequence: Synthetic oligonucleotide
ggguccgguccacaccguu

SEQ ID NO: 37782 - RNA, 19 nt, Artificial Sequence
  Description of Artificial Sequence: Synthetic oligonucleotide
ccgccaagaugaguggagu

SEQ ID NO: 37783 - RNA, 19 nt, Artificial Sequence
  Description of Artificial Sequence: Synthetic oligonucleotide
ccccugccaaugagaaguu

SEQ ID NO: 37784 - RNA, 19 nt, Artificial Sequence
  Description of Artificial Sequence: Synthetic oligonucleotide
aaaggcuuuaaauaacccc

SEQ ID NO: 37785 - RNA, 19 nt, Artificial Sequence
  Description of Artificial Sequence: Synthetic oligonucleotide
cacuauaucguauugaccg

SEQ ID NO: 37786 - RNA, 19 nt, Artificial Sequence
  Description of Artificial Sequence: Synthetic oligonucleotide
aggauuacccuauuuaugc

SEQ ID NO: 37787 - RNA, 19 nt, Artificial Sequence
  Description of Artificial Sequence: Synthetic oligonucleotide
accgauaccaccaagagcc

SEQ ID NO: 37788 - RNA, 19 nt, Artificial Sequence
  Description of Artificial Sequence: Synthetic oligonucleotide
aguuugauaggauuauugc

SEQ ID NO: 37789 - RNA, 19 nt, Artificial Sequence
  Description of Artificial Sequence: Synthetic oligonucleotide
aauuccaaaauguagcccu

SEQ ID NO: 37790 - RNA, 19 nt, Artificial Sequence
  Description of Artificial Sequence: Synthetic oligonucleotide
uaugaugaugcuaacaucu

SEQ ID NO: 37791 - RNA, 19 nt, Artificial Sequence
  Description of Artificial Sequence: Synthetic oligonucleotide
uauauggacagguaagugg

SEQ ID NO: 37792 - RNA, 19 nt, Artificial Sequence
  Description of Artificial Sequence: Synthetic oligonucleotide
aguaaauguguucaacacc

SEQ ID NO: 37793 - RNA, 19 nt, Artificial Sequence
  Description of Artificial Sequence: Synthetic oligonucleotide
aauccuaucacucacucaa

SEQ ID NO: 37794 - RNA, 19 nt, Artificial Sequence
  Description of Artificial Sequence: Synthetic oligonucleotide
aauaccugugacuuaaugu

SEQ ID NO: 37795 - RNA, 19 nt, Artificial Sequence
  Description of Artificial Sequence: Synthetic oligonucleotide
auugcaacaguacuuuggc

SEQ ID NO: 37796 - RNA, 19 nt, Artificial Sequence
  Description of Artificial Sequence: Synthetic oligonucleotide
ugaauaacaugacucaggc

SEQ ID NO: 37797 - RNA, 19 nt, Artificial Sequence
  Description of Artificial Sequence: Synthetic oligonucleotide
ucuauguugagcacuaccc

SEQ ID NO: 37798 - RNA, 19 nt, Artificial Sequence
  Description of Artificial Sequence: Synthetic oligonucleotide
uacuauaguaacaaauacc

SEQ ID NO: 37799 - RNA, 19 nt, Artificial Sequence
  Description of Artificial Sequence: Synthetic oligonucleotide
uuuaagaggccuuaggcca

SEQ ID NO: 37800 - RNA, 19 nt, Artificial Sequence
  Description of Artificial Sequence: Synthetic oligonucleotide
uuaagaacggaaaauucca

SEQ ID NO: 37801 - RNA, 19 nt, Artificial Sequence
  Description of Artificial Sequence: Synthetic oligonucleotide
uucacuuuaaggcagacua

SEQ ID NO: 37802 - RNA, 19 nt, Artificial Sequence
  Description of Artificial Sequence: Synthetic oligonucleotide
cuuauuaucugcauacccc

SEQ ID NO: 37803 - RNA, 19 nt, Artificial Sequence
  Description of Artificial Sequence: Synthetic oligonucleotide
uguguuaucuuugacuugg

SEQ ID NO: 37804 - RNA, 19 nt, Artificial Sequence
  Description of Artificial Sequence: Synthetic oligonucleotide
ucgaguuuuauaaacuaag

SEQ ID NO: 37805 - RNA, 19 nt, Artificial Sequence
  Description of Artificial Sequence: Synthetic oligonucleotide
aauacucucaccucaguga

SEQ ID NO: 37806 - RNA, 19 nt, Artificial Sequence
  Description of Artificial Sequence: Synthetic oligonucleotide
aagugcaacagacuaugac

SEQ ID NO: 37807 - RNA, 19 nt, Artificial Sequence
  Description of Artificial Sequence: Synthetic oligonucleotide
cuagugucaaguuuaagag

SEQ ID NO: 37808 - RNA, 19 nt, Artificial Sequence
  Description of Artificial Sequence: Synthetic oligonucleotide
aauuaagaacggaaaauuc

SEQ ID NO: 37809 - RNA, 19 nt, Artificial Sequence
  Description of Artificial Sequence: Synthetic oligonucleotide
ugaaggucuguaaauagcc

SEQ ID NO: 37810 - RNA, 19 nt, Artificial Sequence
  Description of Artificial Sequence: Synthetic oligonucleotide
aacaacuccguuugccugc

SEQ ID NO: 37811 - RNA, 19 nt, Artificial Sequence
  Description of Artificial Sequence: Synthetic oligonucleotide
uaucacucacucaagaggc

SEQ ID NO: 37812 - RNA, 19 nt, Artificial Sequence
  Description of Artificial Sequence: Synthetic oligonucleotide
aagguuguaaguuaguauu

SEQ ID NO: 37813 - RNA, 19 nt, Artificial Sequence
  Description of Artificial Sequence: Synthetic oligonucleotide
uccucagcagcgcagaugg

SEQ ID NO: 37814 - RNA, 19 nt, Artificial Sequence
  Description of Artificial Sequence: Synthetic oligonucleotide
aauacuucagccauugucu

SEQ ID NO: 37815 - RNA, 19 nt, Artificial Sequence
  Description of Artificial Sequence: Synthetic oligonucleotide
gaugaugcuaacaucuugg

SEQ ID NO: 37816 - RNA, 19 nt, Artificial Sequence
  Description of Artificial Sequence: Synthetic oligonucleotide
ucuaaggaugccaaaguug

SEQ ID NO: 37817 - RNA, 19 nt, Artificial Sequence
  Description of Artificial Sequence: Synthetic oligonucleotide
uuucauauccauauuucga

SEQ ID NO: 37818 - RNA, 19 nt, Artificial Sequence
  Description of Artificial Sequence: Synthetic oligonucleotide
ugauauaaacgcaccaccc

SEQ ID NO: 37819 - RNA, 19 nt, Artificial Sequence
  Description of Artificial Sequence: Synthetic oligonucleotide
uuauggccaagauagauga

SEQ ID NO: 37820 - RNA, 19 nt, Artificial Sequence
  Description of Artificial Sequence: Synthetic oligonucleotide
aacuaaguauguauaaauc

SEQ ID NO: 37821 - RNA, 19 nt, Artificial Sequence
  Description of Artificial Sequence: Synthetic oligonucleotide
ugcuguaucccacuguggg

SEQ ID NO: 37822 - RNA, 19 nt, Artificial Sequence
  Description of Artificial Sequence: Synthetic oligonucleotide
aguaugaugaugcuaacau

SEQ ID NO: 37823 - RNA, 19 nt, Artificial Sequence
  Description of Artificial Sequence: Synthetic oligonucleotide
uauuucgaguuuuauaaac

SEQ ID NO: 37824 - RNA, 19 nt, Artificial Sequence
  Description of Artificial Sequence: Synthetic oligonucleotide
cuaucacucacucaagagg

SEQ ID NO: 37825 - RNA, 19 nt, Artificial Sequence
  Description of Artificial Sequence: Synthetic oligonucleotide
ugauccaaacccauauagg

SEQ ID NO: 37826 - RNA, 19 nt, Artificial Sequence
  Description of Artificial Sequence: Synthetic oligonucleotide
auuacuaaacaacacucca

SEQ ID NO: 37827 - RNA, 19 nt, Artificial Sequence
  Description of Artificial Sequence: Synthetic oligonucleotide
ugauaauucugcacggaag

SEQ ID NO: 37828 - RNA, 19 nt, Artificial Sequence
  Description of Artificial Sequence: Synthetic oligonucleotide
cuuuaagaggccuuaggcc

SEQ ID NO: 37829 - RNA, 19 nt, Artificial Sequence
  Description of Artificial Sequence: Synthetic oligonucleotide
acguauuagaaucuggucu

SEQ ID NO: 37830 - RNA, 19 nt, Artificial Sequence
  Description of Artificial Sequence: Synthetic oligonucleotide
ucacuuuccgcccugagcu

SEQ ID NO: 37831 - RNA, 19 nt, Artificial Sequence
  Description of Artificial Sequence: Synthetic oligonucleotide
aggauuauugcaaucaguc

SEQ ID NO: 37832 - RNA, 19 nt, Artificial Sequence
  Description of Artificial Sequence: Synthetic oligonucleotide
uaaguuaguauugcaacag

SEQ ID NO: 37833 - RNA, 19 nt, Artificial Sequence
  Description of Artificial Sequence: Synthetic oligonucleotide
caaaguuggagcacgaaac

SEQ ID NO: 37834 - RNA, 19 nt, Artificial Sequence
  Description of Artificial Sequence: Synthetic oligonucleotide
gauuacccuauuuaugccc

SEQ ID NO: 37835 - RNA, 19 nt, Artificial Sequence
  Description of Artificial Sequence: Synthetic oligonucleotide
uagaauuguagacuugugu

SEQ ID NO: 37836 - RNA, 19 nt, Artificial Sequence
  Description of Artificial Sequence: Synthetic oligonucleotide
aguuguuaacaacaaagga

SEQ ID NO: 37837 - RNA, 19 nt, Artificial Sequence
  Description of Artificial Sequence: Synthetic oligonucleotide
auaccagugauaauucugc

SEQ ID NO: 37838 - RNA, 19 nt, Artificial Sequence
  Description of Artificial Sequence: Synthetic oligonucleotide
gauaauucugcacggaaga

SEQ ID NO: 37839 - RNA, 19 nt, Artificial Sequence
  Description of Artificial Sequence: Synthetic oligonucleotide
gauagaugaagguuugaac

SEQ ID NO: 37840 - RNA, 19 nt, Artificial Sequence
  Description of Artificial Sequence: Synthetic oligonucleotide
aaggucuguaaauagcccu

SEQ ID NO: 37841 - RNA, 19 nt, Artificial Sequence
  Description of Artificial Sequence: Synthetic oligonucleotide
uaugguucgaaacucuccu

SEQ ID NO: 37842 - RNA, 19 nt, Artificial Sequence
  Description of Artificial Sequence: Synthetic oligonucleotide
cugaauaacaugacucagg

SEQ ID NO: 37843 - RNA, 19 nt, Artificial Sequence
  Description of Artificial Sequence: Synthetic oligonucleotide
ugaacuaaucacugcacug

SEQ ID NO: 37844 - RNA, 19 nt, Artificial Sequence
  Description of Artificial Sequence: Synthetic oligonucleotide
aaaguuggagcacgaaacu

SEQ ID NO: 37845 - RNA, 19 nt, Artificial Sequence
  Description of Artificial Sequence: Synthetic oligonucleotide
aguuggagcacgaaacucc

SEQ ID NO: 37846 - RNA, 19 nt, Artificial Sequence
  Description of Artificial Sequence: Synthetic oligonucleotide
augauuauuagcuggcaga

SEQ ID NO: 37847 - RNA, 19 nt, Artificial Sequence
  Description of Artificial Sequence: Synthetic oligonucleotide
acaacuuuaccauuuguaa

SEQ ID NO: 37848 - RNA, 19 nt, Artificial Sequence
  Description of Artificial Sequence: Synthetic oligonucleotide
ugaacuuauguguggaacu

SEQ ID NO: 37849 - RNA, 19 nt, Artificial Sequence
  Description of Artificial Sequence: Synthetic oligonucleotide
cugauccaaacccauauag

SEQ ID NO: 37850 - RNA, 19 nt, Artificial Sequence
  Description of Artificial Sequence: Synthetic oligonucleotide
ugcaauauaaagccaccac

SEQ ID NO: 37851 - RNA, 19 nt, Artificial Sequence
  Description of Artificial Sequence: Synthetic oligonucleotide
aucguauugaccgauacca

SEQ ID NO: 37852 - RNA, 19 nt, Artificial Sequence
  Description of Artificial Sequence: Synthetic oligonucleotide
auuauauugaggaucaaau

SEQ ID NO: 37853 - RNA, 19 nt, Artificial Sequence
  Description of Artificial Sequence: Synthetic oligonucleotide
ugccucgucaauuuaacca

SEQ ID NO: 37854 - RNA, 19 nt, Artificial Sequence
  Description of Artificial Sequence: Synthetic oligonucleotide
uuaugguucgaaacucucc

SEQ ID NO: 37855 - RNA, 19 nt, Artificial Sequence
  Description of Artificial Sequence: Synthetic oligonucleotide
aacaaaggacgagucuugc

SEQ ID NO: 37856 - RNA, 19 nt, Artificial Sequence
  Description of Artificial Sequence: Synthetic oligonucleotide
aaaucugcguuguacguau

SEQ ID NO: 37857 - RNA, 19 nt, Artificial Sequence
  Description of Artificial Sequence: Synthetic oligonucleotide
cacugauaaaaugucaugc

SEQ ID NO: 37858 - RNA, 19 nt, Artificial Sequence
  Description of Artificial Sequence: Synthetic oligonucleotide
aaugcuaaguuauggccaa

SEQ ID NO: 37859 - RNA, 19 nt, Artificial Sequence
  Description of Artificial Sequence: Synthetic oligonucleotide
agcgcagauggacuguucc

SEQ ID NO: 37860 - RNA, 19 nt, Artificial Sequence
  Description of Artificial Sequence: Synthetic oligonucleotide
aaggggagacuuaaacugc

SEQ ID NO: 37861 - RNA, 19 nt, Artificial Sequence
  Description of Artificial Sequence: Synthetic oligonucleotide
auauaaacgcaccacccca

SEQ ID NO: 37862 - RNA, 19 nt, Artificial Sequence
  Description of Artificial Sequence: Synthetic oligonucleotide
uugaacuaaucacugcacu

SEQ ID NO: 37863 - RNA, 19 nt, Artificial Sequence
  Description of Artificial Sequence: Synthetic oligonucleotide
ugaugaugcuaacaucuug

SEQ ID NO: 37864 - RNA, 19 nt, Artificial Sequence
  Description of Artificial Sequence: Synthetic oligonucleotide
uaaacaagguuguaaguua

SEQ ID NO: 37865 - RNA, 19 nt, Artificial Sequence
  Description of Artificial Sequence: Synthetic oligonucleotide
cugccuagugaaaagagug

SEQ ID NO: 37866 - RNA, 19 nt, Artificial Sequence
  Description of Artificial Sequence: Synthetic oligonucleotide
agacguuucauauccauau

SEQ ID NO: 37867 - RNA, 19 nt, Artificial Sequence
  Description of Artificial Sequence: Synthetic oligonucleotide
aagaacggaaaauuccaaa

SEQ ID NO: 37868 - RNA, 19 nt, Artificial Sequence
  Description of Artificial Sequence: Synthetic oligonucleotide
ugcaaucagucuuauagaa

SEQ ID NO: 37869 - RNA, 19 nt, Artificial Sequence
  Description of Artificial Sequence: Synthetic oligonucleotide
aaacaagguuguaaguuag

SEQ ID NO: 37870 - RNA, 19 nt, Artificial Sequence
  Description of Artificial Sequence: Synthetic oligonucleotide
agaacggaaaauuccaaaa

SEQ ID NO: 37871 - RNA, 19 nt, Artificial Sequence
  Description of Artificial Sequence: Synthetic oligonucleotide
aauaggggaaucauagagu

SEQ ID NO: 37872 - RNA, 19 nt, Artificial Sequence
  Description of Artificial Sequence: Synthetic oligonucleotide
uagcuaguuccuaaaauaa

SEQ ID NO: 37873 - RNA, 19 nt, Artificial Sequence
  Description of Artificial Sequence: Synthetic oligonucleotide
aagacuauacacagggugu

SEQ ID NO: 37874 - RNA, 19 nt, Artificial Sequence
  Description of Artificial Sequence: Synthetic oligonucleotide
gaguuugauaggauuauug

SEQ ID NO: 37875 - RNA, 19 nt, Artificial Sequence
  Description of Artificial Sequence: Synthetic oligonucleotide
gacugaauaacaugacuca

SEQ ID NO: 37876 - RNA, 19 nt, Artificial Sequence
  Description of Artificial Sequence: Synthetic oligonucleotide
ugcguuguacguauuagaa

SEQ ID NO: 37877 - RNA, 19 nt, Artificial Sequence
  Description of Artificial Sequence: Synthetic oligonucleotide
uaucguauugaccgauacc

SEQ ID NO: 37878 - RNA, 19 nt, Artificial Sequence
  Description of Artificial Sequence: Synthetic oligonucleotide
ccagugauaauucugcacg

SEQ ID NO: 37879 - RNA, 19 nt, Artificial Sequence
  Description of Artificial Sequence: Synthetic oligonucleotide
gagacuuaaacugcuggag

SEQ ID NO: 37880 - RNA, 19 nt, Artificial Sequence
  Description of Artificial Sequence: Synthetic oligonucleotide
uuuaaccaagaccguaacu

SEQ ID NO: 37881 - RNA, 19 nt, Artificial Sequence
  Description of Artificial Sequence: Synthetic oligonucleotide
aaguuaguauugcaacagu

SEQ ID NO: 37882 - RNA, 19 nt, Artificial Sequence
  Description of Artificial Sequence: Synthetic oligonucleotide
uuauauugaggaucaaauu

SEQ ID NO: 37883 - RNA, 19 nt, Artificial Sequence
  Description of Artificial Sequence: Synthetic oligonucleotide
aggcagacuaaauagggga

SEQ ID NO: 37884 - RNA, 19 nt, Artificial Sequence
  Description of Artificial Sequence: Synthetic oligonucleotide
gcaauauaaagccaccacc

SEQ ID NO: 37885 - RNA, 19 nt, Artificial Sequence
  Description of Artificial Sequence: Synthetic oligonucleotide
uuuaugguucgaaacucuc

SEQ ID NO: 37886 - RNA, 19 nt, Artificial Sequence
  Description of Artificial Sequence: Synthetic oligonucleotide
uuaaauuuaugcugccaau

SEQ ID NO: 37887 - RNA, 19 nt, Artificial Sequence
  Description of Artificial Sequence: Synthetic oligonucleotide
ugguaauucuuacuaaauu

SEQ ID NO: 37888 - RNA, 19 nt, Artificial Sequence
  Description of Artificial Sequence: Synthetic oligonucleotide
auaaacaagguuguaaguu

SEQ ID NO: 37889 - RNA, 19 nt, Artificial Sequence
  Description of Artificial Sequence: Synthetic oligonucleotide
uugguaauucuuacuaaau

SEQ ID NO: 37890 - RNA, 19 nt, Artificial Sequence
  Description of Artificial Sequence: Synthetic oligonucleotide
cuggcagauuacauuaacc

SEQ ID NO: 37891 - RNA, 19 nt, Artificial Sequence
  Description of Artificial Sequence: Synthetic oligonucleotide
guuaguauugcaacaguac

SEQ ID NO: 37892 - RNA, 19 nt, Artificial Sequence
  Description of Artificial Sequence: Synthetic oligonucleotide
cucuaugugagggagcugc

SEQ ID NO: 37893 - RNA, 19 nt, Artificial Sequence
  Description of Artificial Sequence: Synthetic oligonucleotide
gaaugugugagaaugcuaa

SEQ ID NO: 37894 - RNA, 19 nt, Artificial Sequence
  Description of Artificial Sequence: Synthetic oligonucleotide
aaggauuacccuauuuaug

SEQ ID NO: 37895 - RNA, 19 nt, Artificial Sequence
  Description of Artificial Sequence: Synthetic oligonucleotide
aacaacacuccaguguaug

SEQ ID NO: 37896 - RNA, 19 nt, Artificial Sequence
  Description of Artificial Sequence: Synthetic oligonucleotide
aaggccaacuaacucaaua

SEQ ID NO: 37897 - RNA, 19 nt, Artificial Sequence
  Description of Artificial Sequence: Synthetic oligonucleotide
guaaguuaguauugcaaca

SEQ ID NO: 37898 - RNA, 19 nt, Artificial Sequence
  Description of Artificial Sequence: Synthetic oligonucleotide
gaaaacguacaagaucaug

SEQ ID NO: 37899 - RNA, 19 nt, Artificial Sequence
  Description of Artificial Sequence: Synthetic oligonucleotide
aauagcccuagugucaagu

SEQ ID NO: 37900 - RNA, 19 nt, Artificial Sequence
  Description of Artificial Sequence: Synthetic oligonucleotide
uugaacuuauguguggaac

SEQ ID NO: 37901 - RNA, 19 nt, Artificial Sequence
  Description of Artificial Sequence: Synthetic oligonucleotide
acguacaagaucauguuug

SEQ ID NO: 37902 - RNA, 19 nt, Artificial Sequence
  Description of Artificial Sequence: Synthetic oligonucleotide
ugccuagugaaaagagugc

SEQ ID NO: 37903 - RNA, 19 nt, Artificial Sequence
  Description of Artificial Sequence: Synthetic oligonucleotide
ucaauuuaaccaagaccgu

SEQ ID NO: 37904 - RNA, 19 nt, Artificial Sequence
  Description of Artificial Sequence: Synthetic oligonucleotide
auauuaucuguuggccugc

SEQ ID NO: 37905 - RNA, 19 nt, Artificial Sequence
  Description of Artificial Sequence: Synthetic oligonucleotide
ucuuuauuauauugaggau

SEQ ID NO: 37906 - RNA, 19 nt, Artificial Sequence
  Description of Artificial Sequence: Synthetic oligonucleotide
augaacgcuauuuggauuu

SEQ ID NO: 37907 - RNA, 19 nt, Artificial Sequence
  Description of Artificial Sequence: Synthetic oligonucleotide
aacguacaagaucauguuu

SEQ ID NO: 37908 - RNA, 19 nt, Artificial Sequence
  Description of Artificial Sequence: Synthetic oligonucleotide
uccuaucacucacucaaga

SEQ ID NO: 37909 - RNA, 19 nt, Artificial Sequence
  Description of Artificial Sequence: Synthetic oligonucleotide
uuaucauuugcagaugaua

SEQ ID NO: 37910 - RNA, 19 nt, Artificial Sequence
  Description of Artificial Sequence: Synthetic oligonucleotide
gaaugcuaaguuauggcca

SEQ ID NO: 37911 - RNA, 19 nt, Artificial Sequence
  Description of Artificial Sequence: Synthetic oligonucleotide
accaagaccguaacuaggg

SEQ ID NO: 37912 - RNA, 19 nt, Artificial Sequence
  Description of Artificial Sequence: Synthetic oligonucleotide
uaagaacggaaaauuccaa

SEQ ID NO: 37913 - RNA, 19 nt, Artificial Sequence
  Description of Artificial Sequence: Synthetic oligonucleotide
gagcuuaucagaagaauga

SEQ ID NO: 37914 - RNA, 19 nt, Artificial Sequence
  Description of Artificial Sequence: Synthetic oligonucleotide
aacuaaucacugcacugau

SEQ ID NO: 37915 - RNA, 19 nt, Artificial Sequence
  Description of Artificial Sequence: Synthetic oligonucleotide
uuuacucuauguugagcac

SEQ ID NO: 37916 - RNA, 19 nt, Artificial Sequence
  Description of Artificial Sequence: Synthetic oligonucleotide
caugauauggcauggauau

SEQ ID NO: 37917 - RNA, 19 nt, Artificial Sequence
  Description of Artificial Sequence: Synthetic oligonucleotide
ucuauugcuguaucccacu

SEQ ID NO: 37918 - RNA, 19 nt, Artificial Sequence
  Description of Artificial Sequence: Synthetic oligonucleotide
uacguauuagaaucugguc

SEQ ID NO: 37919 - RNA, 19 nt, Artificial Sequence
  Description of Artificial Sequence: Synthetic oligonucleotide
aacucaauagcuaguuccu

SEQ ID NO: 37920 - RNA, 19 nt, Artificial Sequence
  Description of Artificial Sequence: Synthetic oligonucleotide
aguuucacucccaacaacu

SEQ ID NO: 37921 - RNA, 19 nt, Artificial Sequence
  Description of Artificial Sequence: Synthetic oligonucleotide
auauggacagguaagugga

SEQ ID NO: 37922 - RNA, 19 nt, Artificial Sequence
  Description of Artificial Sequence: Synthetic oligonucleotide
aaaggacgagucuugcuuu

SEQ ID NO: 37923 - RNA, 19 nt, Artificial Sequence
  Description of Artificial Sequence: Synthetic oligonucleotide
agugagguacaauauuaaa

SEQ ID NO: 37924 - RNA, 19 nt, Artificial Sequence
  Description of Artificial Sequence: Synthetic oligonucleotide
uagugucaaguuuaagagu

SEQ ID NO: 37925 - RNA, 19 nt, Artificial Sequence
  Description of Artificial Sequence: Synthetic oligonucleotide
uaaauuuaugcugccaauu

SEQ ID NO: 37926 - RNA, 19 nt, Artificial Sequence
  Description of Artificial Sequence: Synthetic oligonucleotide
uccaauaccugugacuuaa

SEQ ID NO: 37927 - RNA, 19 nt, Artificial Sequence
  Description of Artificial Sequence: Synthetic oligonucleotide
uggacuuauuaucugcaua

SEQ ID NO: 37928 - RNA, 19 nt, Artificial Sequence
  Description of Artificial Sequence: Synthetic oligonucleotide
ucuccacuauaucguauug

SEQ ID NO: 37929 - RNA, 19 nt, Artificial Sequence
  Description of Artificial Sequence: Synthetic oligonucleotide
agaccguaacuagggaucc

SEQ ID NO: 37930 - RNA, 19 nt, Artificial Sequence
  Description of Artificial Sequence: Synthetic oligonucleotide
gaguagacuaaccuuuuaa

SEQ ID NO: 37931 - RNA, 19 nt, Artificial Sequence
  Description of Artificial Sequence: Synthetic oligonucleotide
ugauuauuagcuggcagau

SEQ ID NO: 37932 - RNA, 19 nt, Artificial Sequence
  Description of Artificial Sequence: Synthetic oligonucleotide
uugauaggauuauugcaau

SEQ ID NO: 37933 - RNA, 19 nt, Artificial Sequence
  Description of Artificial Sequence: Synthetic oligonucleotide
uuauuagcuggcagauuac

SEQ ID NO: 37934 - RNA, 19 nt, Artificial Sequence
  Description of Artificial Sequence: Synthetic oligonucleotide
uauguugagcacuacccuu

SEQ ID NO: 37935 - RNA, 19 nt, Artificial Sequence
  Description of Artificial Sequence: Synthetic oligonucleotide
ucauguaccuugacucuga

SEQ ID NO: 37936 - RNA, 19 nt, Artificial Sequence
  Description of Artificial Sequence: Synthetic oligonucleotide
caauuucucugauuagcug

SEQ ID NO: 37937 - RNA, 19 nt, Artificial Sequence
  Description of Artificial Sequence: Synthetic oligonucleotide
uuacucuauguugagcacu

SEQ ID NO: 37938 - RNA, 19 nt, Artificial Sequence
  Description of Artificial Sequence: Synthetic oligonucleotide
uguguggaaugugugagaa

SEQ ID NO: 37939 - RNA, 19 nt, Artificial Sequence
  Description of Artificial Sequence: Synthetic oligonucleotide
uauaaacgcaccaccccau

SEQ ID NO: 37940 - RNA, 19 nt, Artificial Sequence
  Description of Artificial Sequence: Synthetic oligonucleotide
aguauugcaacaguacuuu

SEQ ID NO: 37941 - RNA, 19 nt, Artificial Sequence
  Description of Artificial Sequence: Synthetic oligonucleotide
acuauaucguauugaccga

SEQ ID NO: 37942 - RNA, 19 nt, Artificial Sequence
  Description of Artificial Sequence: Synthetic oligonucleotide
gaccgauaccaccaagagc

SEQ ID NO: 37943 - RNA, 19 nt, Artificial Sequence
  Description of Artificial Sequence: Synthetic oligonucleotide
guaugcuuuguuguaauuc

SEQ ID NO: 37944 - RNA, 19 nt, Artificial Sequence
  Description of Artificial Sequence: Synthetic oligonucleotide
auaccccugggauguacac

SEQ ID NO: 37945 - RNA, 19 nt, Artificial Sequence
  Description of Artificial Sequence: Synthetic oligonucleotide
uaauccuaucacucacuca

SEQ ID NO: 37946 - RNA, 19 nt, Artificial Sequence
  Description of Artificial Sequence: Synthetic oligonucleotide
cucaguuacaggaaaacgu

SEQ ID NO: 37947 - RNA, 19 nt, Artificial Sequence
  Description of Artificial Sequence: Synthetic oligonucleotide
cguuguacguauuagaauc

SEQ ID NO: 37948 - RNA, 19 nt, Artificial Sequence
  Description of Artificial Sequence: Synthetic oligonucleotide
aacccauauaggaaucuga

SEQ ID NO: 37949 - RNA, 19 nt, Artificial Sequence
  Description of Artificial Sequence: Synthetic oligonucleotide
cuaaacaacacuccagugu

SEQ ID NO: 37950 - RNA, 19 nt, Artificial Sequence
  Description of Artificial Sequence: Synthetic oligonucleotide
cgaaacucuccuaagauug

SEQ ID NO: 37951 - RNA, 19 nt, Artificial Sequence
  Description of Artificial Sequence: Synthetic oligonucleotide
augcuaacaucuugggaca

SEQ ID NO: 37952 - RNA, 19 nt, Artificial Sequence
  Description of Artificial Sequence: Synthetic oligonucleotide
cacgaaacucccuuucuuc

SEQ ID NO: 37953 - RNA, 19 nt, Artificial Sequence
  Description of Artificial Sequence: Synthetic oligonucleotide
auugaccgauaccaccaag

SEQ ID NO: 37954 - RNA, 19 nt, Artificial Sequence
  Description of Artificial Sequence: Synthetic oligonucleotide
ggcgaugagacaccaacag

SEQ ID NO: 37955 - RNA, 19 nt, Artificial Sequence
  Description of Artificial Sequence: Synthetic oligonucleotide
guaugaugaugcuaacauc

SEQ ID NO: 37956 - RNA, 19 nt, Artificial Sequence
  Description of Artificial Sequence: Synthetic oligonucleotide
aggguguguuaucuuugac

SEQ ID NO: 37957 - RNA, 19 nt, Artificial Sequence
  Description of Artificial Sequence: Synthetic oligonucleotide
ggaaaacucccaaggaccg

SEQ ID NO: 37958 - RNA, 19 nt, Artificial Sequence
  Description of Artificial Sequence: Synthetic oligonucleotide
auauccauauuucgaguuu

SEQ ID NO: 37959 - RNA, 19 nt, Artificial Sequence
  Description of Artificial Sequence: Synthetic oligonucleotide
ccuuaggccauugaaagcc

SEQ ID NO: 37960 - RNA, 19 nt, Artificial Sequence
  Description of Artificial Sequence: Synthetic oligonucleotide
uauaucguauugaccgaua

SEQ ID NO: 37961 - RNA, 19 nt, Artificial Sequence
  Description of Artificial Sequence: Synthetic oligonucleotide
ucaggaaaguaaagacuau

SEQ ID NO: 37962 - RNA, 19 nt, Artificial Sequence
  Description of Artificial Sequence: Synthetic oligonucleotide
auaccugaaaggcuuuaaa

SEQ ID NO: 37963 - RNA, 19 nt, Artificial Sequence
  Description of Artificial Sequence: Synthetic oligonucleotide
auccuggauaguuuuaauu

SEQ ID NO: 37964 - RNA, 19 nt, Artificial Sequence
  Description of Artificial Sequence: Synthetic oligonucleotide
gaauaacaugacucaggca

SEQ ID NO: 37965 - RNA, 19 nt, Artificial Sequence
  Description of Artificial Sequence: Synthetic oligonucleotide
guauugaccgauaccacca

SEQ ID NO: 37966 - RNA, 19 nt, Artificial Sequence
  Description of Artificial Sequence: Synthetic oligonucleotide
auaauuccucugccuagug

SEQ ID NO: 37967 - RNA, 19 nt, Artificial Sequence
  Description of Artificial Sequence: Synthetic oligonucleotide
uggagcacgaaacucccuu

SEQ ID NO: 37968 - RNA, 19 nt, Artificial Sequence
  Description of Artificial Sequence: Synthetic oligonucleotide
acgagucuugcuuuaucca

SEQ ID NO: 37969 - RNA, 19 nt, Artificial Sequence
  Description of Artificial Sequence: Synthetic oligonucleotide
ggaagugcaacagacuaug

SEQ ID NO: 37970 - RNA, 19 nt, Artificial Sequence
  Description of Artificial Sequence: Synthetic oligonucleotide
caacaacuccguuugccug

SEQ ID NO: 37971 - RNA, 19 nt, Artificial Sequence
  Description of Artificial Sequence: Synthetic oligonucleotide
acggaagaguagacuaacc

SEQ ID NO: 37972 - RNA, 19 nt, Artificial Sequence
  Description of Artificial Sequence: Synthetic oligonucleotide
uuaagaggccuuaggccau

SEQ ID NO: 37973 - RNA, 19 nt, Artificial Sequence
  Description of Artificial Sequence: Synthetic oligonucleotide
acaaaggacgagucuugcu

SEQ ID NO: 37974 - RNA, 19 nt, Artificial Sequence
  Description of Artificial Sequence: Synthetic oligonucleotide
uggcgaugagacaccaaca

SEQ ID NO: 37975 - RNA, 19 nt, Artificial Sequence
  Description of Artificial Sequence: Synthetic oligonucleotide
auuacccuauuuaugcccu

SEQ ID NO: 37976 - RNA, 19 nt, Artificial Sequence
  Description of Artificial Sequence: Synthetic oligonucleotide
gguaauucuuacuaaauuu

SEQ ID NO: 37977 - RNA, 19 nt, Artificial Sequence
  Description of Artificial Sequence: Synthetic oligonucleotide
gcuguuucacuuuaaggca

SEQ ID NO: 37978 - RNA, 19 nt, Artificial Sequence
  Description of Artificial Sequence: Synthetic oligonucleotide
cuaaguuauggccaagaua

SEQ ID NO: 37979 - RNA, 19 nt, Artificial Sequence
  Description of Artificial Sequence: Synthetic oligonucleotide
aacagacuaugacgaucug

SEQ ID NO: 37980 - RNA, 19 nt, Artificial Sequence
  Description of Artificial Sequence: Synthetic oligonucleotide
uaccagugauaauucugca

SEQ ID NO: 37981 - RNA, 19 nt, Artificial Sequence
  Description of Artificial Sequence: Synthetic oligonucleotide
agguagauuaaaagcuaag

SEQ ID NO: 37982 - RNA, 19 nt, Artificial Sequence
  Description of Artificial Sequence: Synthetic oligonucleotide
agacuaaauaggggaauca

SEQ ID NO: 37983 - RNA, 19 nt, Artificial Sequence
  Description of Artificial Sequence: Synthetic oligonucleotide
uaaaucugcguuguacgua

SEQ ID NO: 37984 - RNA, 19 nt, Artificial Sequence
  Description of Artificial Sequence: Synthetic oligonucleotide
aguccuaaagcaugcccau

SEQ ID NO: 37985 - RNA, 19 nt, Artificial Sequence
  Description of Artificial Sequence: Synthetic oligonucleotide
gguuguaaguuaguauugc

SEQ ID NO: 37986 - RNA, 19 nt, Artificial Sequence
  Description of Artificial Sequence: Synthetic oligonucleotide
gguuguacuaaaugagaga

SEQ ID NO: 37987 - RNA, 19 nt, Artificial Sequence
  Description of Artificial Sequence: Synthetic oligonucleotide
agcacgaaacucccuuucu

SEQ ID NO: 37988 - RNA, 19 nt, Artificial Sequence
  Description of Artificial Sequence: Synthetic oligonucleotide
aguuaguauugcaacagua

SEQ ID NO: 37989 - RNA, 19 nt, Artificial Sequence
  Description of Artificial Sequence: Synthetic oligonucleotide
agguuguaaguuaguauug

SEQ ID NO: 37990 - RNA, 19 nt, Artificial Sequence
  Description of Artificial Sequence: Synthetic oligonucleotide
uuaugcccuuucucuagga

SEQ ID NO: 37991 - RNA, 19 nt, Artificial Sequence
  Description of Artificial Sequence: Synthetic oligonucleotide
gguaagggcacagcagugg

SEQ ID NO: 37992 - RNA, 19 nt, Artificial Sequence
  Description of Artificial Sequence: Synthetic oligonucleotide
gccaauuucucugauuagc

SEQ ID NO: 37993 - RNA, 19 nt, Artificial Sequence
  Description of Artificial Sequence: Synthetic oligonucleotide
guggacaaaggccaacuaa

SEQ ID NO: 37994 - RNA, 19 nt, Artificial Sequence
  Description of Artificial Sequence: Synthetic oligonucleotide
guuggagcacgaaacuccc

SEQ ID NO: 37995 - RNA, 19 nt, Artificial Sequence
  Description of Artificial Sequence: Synthetic oligonucleotide
cacauauggaaaacuccca

SEQ ID NO: 37996 - RNA, 19 nt, Artificial Sequence
  Description of Artificial Sequence: Synthetic oligonucleotide
gacugagaccauaaacuga

SEQ ID NO: 37997 - RNA, 19 nt, Artificial Sequence
  Description of Artificial Sequence: Synthetic oligonucleotide
agauagcuguuucacuuua

SEQ ID NO: 37998 - RNA, 19 nt, Artificial Sequence
  Description of Artificial Sequence: Synthetic oligonucleotide
uucacucugcgaaucucua

SEQ ID NO: 37999 - RNA, 19 nt, Artificial Sequence
  Description of Artificial Sequence: Synthetic oligonucleotide
ggauuacccuauuuaugcc

SEQ ID NO: 38000 - RNA, 19 nt, Artificial Sequence
  Description of Artificial Sequence: Synthetic oligonucleotide
aacaguacuuuggccuaug

SEQ ID NO: 38001 - RNA, 19 nt, Artificial Sequence
  Description of Artificial Sequence: Synthetic oligonucleotide
auagucagguagauuaaaa

SEQ ID NO: 38002 - RNA, 19 nt, Artificial Sequence
  Description of Artificial Sequence: Synthetic oligonucleotide
ggagacuuaaacugcugga

SEQ ID NO: 38003 - RNA, 19 nt, Artificial Sequence
  Description of Artificial Sequence: Synthetic oligonucleotide
gaaaacucccaaggaccgc

SEQ ID NO: 38004 - RNA, 19 nt, Artificial Sequence
  Description of Artificial Sequence: Synthetic oligonucleotide
ugccuauuuuauguaucca

SEQ ID NO: 38005 - RNA, 19 nt, Artificial Sequence
  Description of Artificial Sequence: Synthetic oligonucleotide
cguauugaccgauaccacc

SEQ ID NO: 38006 - RNA, 19 nt, Artificial Sequence
  Description of Artificial Sequence: Synthetic oligonucleotide
ugacgaucugauucuuuua

SEQ ID NO: 38007 - RNA, 19 nt, Artificial Sequence
  Description of Artificial Sequence: Synthetic oligonucleotide
guguguuaucuuugacuug

SEQ ID NO: 38008 - RNA, 19 nt, Artificial Sequence
  Description of Artificial Sequence: Synthetic oligonucleotide
gguaaugcacagcccacac

SEQ ID NO: 38009 - RNA, 19 nt, Artificial Sequence
  Description of Artificial Sequence: Synthetic oligonucleotide
cucgucaauuuaaccaaga

SEQ ID NO: 38010 - RNA, 19 nt, Artificial Sequence
  Description of Artificial Sequence: Synthetic oligonucleotide
ggucacauauggaaaacuc

SEQ ID NO: 38011 - RNA, 19 nt, Artificial Sequence
  Description of Artificial Sequence: Synthetic oligonucleotide
gaaugagaucuggcgauga

SEQ ID NO: 38012 - RNA, 19 nt, Artificial Sequence
  Description of Artificial Sequence: Synthetic oligonucleotide
cuacccuugagguuguacu

SEQ ID NO: 38013 - RNA, 19 nt, Artificial Sequence
  Description of Artificial Sequence: Synthetic oligonucleotide
guauccuucaguguacaua

SEQ ID NO: 38014 - RNA, 19 nt, Artificial Sequence
  Description of Artificial Sequence: Synthetic oligonucleotide
auagcccuagugucaaguu

SEQ ID NO: 38015 - RNA, 19 nt, Artificial Sequence
  Description of Artificial Sequence: Synthetic oligonucleotide
aaucugauccaaacccaua

SEQ ID NO: 38016 - RNA, 19 nt, Artificial Sequence
  Description of Artificial Sequence: Synthetic oligonucleotide
ggauccuacugugauguug

SEQ ID NO: 38017 - RNA, 19 nt, Artificial Sequence
  Description of Artificial Sequence: Synthetic oligonucleotide
ucacucugcgaaucucuau

SEQ ID NO: 38018 - RNA, 19 nt, Artificial Sequence
  Description of Artificial Sequence: Synthetic oligonucleotide
cugcguuguacguauuaga

SEQ ID NO: 38019 - RNA, 19 nt, Artificial Sequence
  Description of Artificial Sequence: Synthetic oligonucleotide
cagauguuugcagauaugu

SEQ ID NO: 38020 - RNA, 19 nt, Artificial Sequence
  Description of Artificial Sequence: Synthetic oligonucleotide
gcuaguuccuaaaauaaua

SEQ ID NO: 38021 - RNA, 19 nt, Artificial Sequence
  Description of Artificial Sequence: Synthetic oligonucleotide
aucugcguuguacguauua

SEQ ID NO: 38022 - RNA, 19 nt, Artificial Sequence
  Description of Artificial Sequence: Synthetic oligonucleotide
uucaggcuauauggacagg

SEQ ID NO: 38023 - RNA, 19 nt, Artificial Sequence
  Description of Artificial Sequence: Synthetic oligonucleotide
ccaguccuaaagcaugccc

SEQ ID NO: 38024 - RNA, 19 nt, Artificial Sequence
  Description of Artificial Sequence: Synthetic oligonucleotide
cuccuggccaugauuauua

SEQ ID NO: 38025 - RNA, 19 nt, Artificial Sequence
  Description of Artificial Sequence: Synthetic oligonucleotide
agacuuguguguccuccau

SEQ ID NO: 38026 - RNA, 19 nt, Artificial Sequence
  Description of Artificial Sequence: Synthetic oligonucleotide
agguaaugcacagcccaca

SEQ ID NO: 38027 - RNA, 19 nt, Artificial Sequence
  Description of Artificial Sequence: Synthetic oligonucleotide
gacuaaauaggggaaucau

SEQ ID NO: 38028 - RNA, 19 nt, Artificial Sequence
  Description of Artificial Sequence: Synthetic oligonucleotide
aaacaacacuccaguguau

SEQ ID NO: 38029 - RNA, 19 nt, Artificial Sequence
  Description of Artificial Sequence: Synthetic oligonucleotide
aaggaccgccaugaccucu

SEQ ID NO: 38030 - RNA, 19 nt, Artificial Sequence
  Description of Artificial Sequence: Synthetic oligonucleotide
cuauguugagcacuacccu

SEQ ID NO: 38031 - RNA, 19 nt, Artificial Sequence
  Description of Artificial Sequence: Synthetic oligonucleotide
gcuggcagauuacauuaac

SEQ ID NO: 38032 - RNA, 19 nt, Artificial Sequence
  Description of Artificial Sequence: Synthetic oligonucleotide
caaaggacgagucuugcuu

SEQ ID NO: 38033 - RNA, 19 nt, Artificial Sequence
  Description of Artificial Sequence: Synthetic oligonucleotide
ugcuaacaucuugggacac

SEQ ID NO: 38034 - RNA, 19 nt, Artificial Sequence
  Description of Artificial Sequence: Synthetic oligonucleotide
ggucuguaaauagcccuag

SEQ ID NO: 38035 - RNA, 19 nt, Artificial Sequence
  Description of Artificial Sequence: Synthetic oligonucleotide
cucccaaggaccgccauga

SEQ ID NO: 38036 - RNA, 19 nt, Artificial Sequence
  Description of Artificial Sequence: Synthetic oligonucleotide
agaguuugauaggauuauu

SEQ ID NO: 38037 - RNA, 19 nt, Artificial Sequence
  Description of Artificial Sequence: Synthetic oligonucleotide
ugaccaaauccuggauagu

SEQ ID NO: 38038 - RNA, 19 nt, Artificial Sequence
  Description of Artificial Sequence: Synthetic oligonucleotide
aggggagacuuaaacugcu

SEQ ID NO: 38039 - RNA, 19 nt, Artificial Sequence
  Description of Artificial Sequence: Synthetic oligonucleotide
acuagggauccuacuguga

SEQ ID NO: 38040 - RNA, 19 nt, Artificial Sequence
  Description of Artificial Sequence: Synthetic oligonucleotide
agcuucuauagugacccuu

SEQ ID NO: 38041 - RNA, 19 nt, Artificial Sequence
  Description of Artificial Sequence: Synthetic oligonucleotide
ggaagaguagacuaaccuu

SEQ ID NO: 38042 - RNA, 19 nt, Artificial Sequence
  Description of Artificial Sequence: Synthetic oligonucleotide
gagaguuugauaggauuau

SEQ ID NO: 38043 - RNA, 19 nt, Artificial Sequence
  Description of Artificial Sequence: Synthetic oligonucleotide
agacuaugacgaucugauu

SEQ ID NO: 38044 - RNA, 19 nt, Artificial Sequence
  Description of Artificial Sequence: Synthetic oligonucleotide
augguucgaaacucuccua

SEQ ID NO: 38045 - RNA, 19 nt, Artificial Sequence
  Description of Artificial Sequence: Synthetic oligonucleotide
cccaugaacgcuauuugga

SEQ ID NO: 38046 - RNA, 19 nt, Artificial Sequence
  Description of Artificial Sequence: Synthetic oligonucleotide
guuguacguauuagaaucu

SEQ ID NO: 38047 - RNA, 19 nt, Artificial Sequence
  Description of Artificial Sequence: Synthetic oligonucleotide
cuagggauccuacugugau

SEQ ID NO: 38048 - RNA, 19 nt, Artificial Sequence
  Description of Artificial Sequence: Synthetic oligonucleotide
gaccaaauccuggauaguu

SEQ ID NO: 38049 - RNA, 19 nt, Artificial Sequence
  Description of Artificial Sequence: Synthetic oligonucleotide
gccuuaggccauugaaagc

SEQ ID NO: 38050 - RNA, 19 nt, Artificial Sequence
  Description of Artificial Sequence: Synthetic oligonucleotide
accguaacuagggauccua

SEQ ID NO: 38051 - RNA, 19 nt, Artificial Sequence
  Description of Artificial Sequence: Synthetic oligonucleotide
cuagugaaaagagugcauu

SEQ ID NO: 38052 - RNA, 19 nt, Artificial Sequence
  Description of Artificial Sequence: Synthetic oligonucleotide
uacccuauuuaugcccuuu

SEQ ID NO: 38053 - RNA, 19 nt, Artificial Sequence
  Description of Artificial Sequence: Synthetic oligonucleotide
gccuagugaaaagagugca

SEQ ID NO: 38054 - RNA, 19 nt, Artificial Sequence
  Description of Artificial Sequence: Synthetic oligonucleotide
aggucuguaaauagcccua

SEQ ID NO: 38055 - RNA, 19 nt, Artificial Sequence
  Description of Artificial Sequence: Synthetic oligonucleotide
accccauaccugaaaggcu

SEQ ID NO: 38056 - RNA, 19 nt, Artificial Sequence
  Description of Artificial Sequence: Synthetic oligonucleotide
uuacccuauuuaugcccuu

SEQ ID NO: 38057 - RNA, 19 nt, Artificial Sequence
  Description of Artificial Sequence: Synthetic oligonucleotide
acucaauagcuaguuccua

SEQ ID NO: 38058 - RNA, 19 nt, Artificial Sequence
  Description of Artificial Sequence: Synthetic oligonucleotide
ccaaaguuggagcacgaaa

SEQ ID NO: 38059 - RNA, 19 nt, Artificial Sequence
  Description of Artificial Sequence: Synthetic oligonucleotide
guaaugcacagcccacacu

SEQ ID NO: 38060 - RNA, 19 nt, Artificial Sequence
  Description of Artificial Sequence: Synthetic oligonucleotide
cauaccugaaaggcuuuaa

SEQ ID NO: 38061 - RNA, 19 nt, Artificial Sequence
  Description of Artificial Sequence: Synthetic oligonucleotide
acuuuggccuauggagagu

SEQ ID NO: 38062 - RNA, 19 nt, Artificial Sequence
  Description of Artificial Sequence: Synthetic oligonucleotide
augcuaaguuauggccaag

SEQ ID NO: 38063 - RNA, 19 nt, Artificial Sequence
  Description of Artificial Sequence: Synthetic oligonucleotide
acaacuccguuugccugcu

SEQ ID NO: 38064 - RNA, 19 nt, Artificial Sequence
  Description of Artificial Sequence: Synthetic oligonucleotide
cacagauagcuguuucacu

SEQ ID NO: 38065 - RNA, 19 nt, Artificial Sequence
  Description of Artificial Sequence: Synthetic oligonucleotide
caugaacgcuauuuggauu

SEQ ID NO: 38066 - RNA, 19 nt, Artificial Sequence
  Description of Artificial Sequence: Synthetic oligonucleotide
ugaacgcuauuuggauuuu

SEQ ID NO: 38067 - RNA, 19 nt, Artificial Sequence
  Description of Artificial Sequence: Synthetic oligonucleotide
aggcuuuaaauaaccccuu

SEQ ID NO: 38068 - RNA, 19 nt, Artificial Sequence
  Description of Artificial Sequence: Synthetic oligonucleotide
acuuuccgcccugagcuua

SEQ ID NO: 38069 - RNA, 19 nt, Artificial Sequence
  Description of Artificial Sequence: Synthetic oligonucleotide
caacacuccaguguauggu

SEQ ID NO: 38070 - RNA, 19 nt, Artificial Sequence
  Description of Artificial Sequence: Synthetic oligonucleotide
cacucugcgaaucucuauu

SEQ ID NO: 38071 - RNA, 19 nt, Artificial Sequence
  Description of Artificial Sequence: Synthetic oligonucleotide
ggcagacuaaauaggggaa

SEQ ID NO: 38072 - RNA, 19 nt, Artificial Sequence
  Description of Artificial Sequence: Synthetic oligonucleotide
cugggcuacacuguugagu

SEQ ID NO: 38073 - RNA, 19 nt, Artificial Sequence
  Description of Artificial Sequence: Synthetic oligonucleotide
cuauaucguauugaccgau

SEQ ID NO: 38074 - RNA, 19 nt, Artificial Sequence
  Description of Artificial Sequence: Synthetic oligonucleotide
ccguaacuagggauccuac

SEQ ID NO: 38075 - RNA, 19 nt, Artificial Sequence
  Description of Artificial Sequence: Synthetic oligonucleotide
ccuauuuuauguauccauu

SEQ ID NO: 38076 - RNA, 19 nt, Artificial Sequence
  Description of Artificial Sequence: Synthetic oligonucleotide
augauauggcauggauauu

SEQ ID NO: 38077 - RNA, 19 nt, Artificial Sequence
  Description of Artificial Sequence: Synthetic oligonucleotide
uaagaggccuuaggccauu

SEQ ID NO: 38078 - RNA, 19 nt, Artificial Sequence
  Description of Artificial Sequence: Synthetic oligonucleotide
gcuaaguuauggccaagau

SEQ ID NO: 38079 - RNA, 19 nt, Artificial Sequence
  Description of Artificial Sequence: Synthetic oligonucleotide
cgcugugguccacacauac

SEQ ID NO: 38080 - RNA, 19 nt, Artificial Sequence
  Description of Artificial Sequence: Synthetic oligonucleotide
ggggaaucauagaguugag

SEQ ID NO: 38081 - RNA, 19 nt, Artificial Sequence
  Description of Artificial Sequence: Synthetic oligonucleotide
cagcgcagauggacuguuc

SEQ ID NO: 38082 - RNA, 19 nt, Artificial Sequence
  Description of Artificial Sequence: Synthetic oligonucleotide
agcuggcagauuacauuaa

SEQ ID NO: 38083 - RNA, 19 nt, Artificial Sequence
  Description of Artificial Sequence: Synthetic oligonucleotide
ggacaaaggccaacuaacu

SEQ ID NO: 38084 - RNA, 19 nt, Artificial Sequence
  Description of Artificial Sequence: Synthetic oligonucleotide
gcuaacaucuugggacaca

SEQ ID NO: 38085 - RNA, 19 nt, Artificial Sequence
  Description of Artificial Sequence: Synthetic oligonucleotide
gguggacaaaggccaacua

SEQ ID NO: 38086 - RNA, 19 nt, Artificial Sequence
  Description of Artificial Sequence: Synthetic oligonucleotide
ccgauaccaccaagagccc

SEQ ID NO: 38087 - RNA, 19 nt, Artificial Sequence
  Description of Artificial Sequence: Synthetic oligonucleotide
gcguuguacguauuagaau

SEQ ID NO: 38088 - RNA, 19 nt, Artificial Sequence
  Description of Artificial Sequence: Synthetic oligonucleotide
gagcacuacccuugagguu

SEQ ID NO: 38089 - RNA, 19 nt, Artificial Sequence
  Description of Artificial Sequence: Synthetic oligonucleotide
ccaugaacgcuauuuggau

SEQ ID NO: 38090 - RNA, 19 nt, Artificial Sequence
  Description of Artificial Sequence: Synthetic oligonucleotide
ccaagaccguaacuaggga

SEQ ID NO: 38091 - RNA, 19 nt, Artificial Sequence
  Description of Artificial Sequence: Synthetic oligonucleotide
acgcaccaccccauaccug

SEQ ID NO: 38092 - RNA, 19 nt, Artificial Sequence
  Description of Artificial Sequence: Synthetic oligonucleotide
ccaugauuauuagcuggca

SEQ ID NO: 38093 - RNA, 19 nt, Artificial Sequence
  Description of Artificial Sequence: Synthetic oligonucleotide
cuauauagugaggcucuuu

SEQ ID NO: 38094 - RNA, 19 nt, Artificial Sequence
  Description of Artificial Sequence: Synthetic oligonucleotide
gcauaccccugggauguac

SEQ ID NO: 38095 - RNA, 19 nt, Artificial Sequence
  Description of Artificial Sequence: Synthetic oligonucleotide
gcagacuaaauaggggaau

SEQ ID NO: 38096 - RNA, 19 nt, Artificial Sequence
  Description of Artificial Sequence: Synthetic oligonucleotide
ccgcccugagcuuaucaga

SEQ ID NO: 38097 - RNA, 19 nt, Artificial Sequence
  Description of Artificial Sequence: Synthetic oligonucleotide
gcuucuauagugacccuuu

SEQ ID NO: 38098 - RNA, 19 nt, Artificial Sequence
  Description of Artificial Sequence: Synthetic oligonucleotide
ccuagugaaaagagugcau

SEQ ID NO: 38099 - RNA, 19 nt, Artificial Sequence
  Description of Artificial Sequence: Synthetic oligonucleotide
gcacgaaacucccuuucuu

SEQ ID NO: 38100 - RNA, 19 nt, Artificial Sequence
  Description of Artificial Sequence: Synthetic oligonucleotide
ggagcacgaaacucccuuu

SEQ ID NO: 38101 - RNA, 19 nt, Artificial Sequence
  Description of Artificial Sequence: Synthetic oligonucleotide
ccccauaccugaaaggcuu

SEQ ID NO: 38102 - RNA, 19 nt, Artificial Sequence
  Description of Artificial Sequence: Synthetic oligonucleotide
cuuuccgcccugagcuuau

SEQ ID NO: 38103 - RNA, 19 nt, Artificial Sequence
  Description of Artificial Sequence: Synthetic oligonucleotide
gcgcagauggacuguuccu

SEQ ID NO: 38104 - RNA, 19 nt, Artificial Sequence
  Description of Artificial Sequence: Synthetic oligonucleotide
cgauaccaccaagagccca

SEQ ID NO: 38105 - RNA, 19 nt, Artificial Sequence
  Description of Artificial Sequence: Synthetic oligonucleotide
cacuuuccgcccugagcuu

SEQ ID NO: 38106 - RNA, 19 nt, Artificial Sequence
  Description of Artificial Sequence: Synthetic oligonucleotide
ccugugacuuaauguccau

SEQ ID NO: 38107 - RNA, 19 nt, Artificial Sequence
  Description of Artificial Sequence: Synthetic oligonucleotide
gggacacauuugaacuaau

SEQ ID NO: 38108 - RNA, 19 nt, Artificial Sequence
  Description of Artificial Sequence: Synthetic oligonucleotide
cagguaaguggaggcucau

SEQ ID NO: 38109 - RNA, 19 nt, Artificial Sequence
  Description of Artificial Sequence: Synthetic oligonucleotide
ccgccaugaccucuucaua

SEQ ID NO: 38110 - RNA, 19 nt, Artificial Sequence
  Description of Artificial Sequence: Synthetic oligonucleotide
ccaauaccugugacuuaau

SEQ ID NO: 38111 - RNA, 19 nt, Artificial Sequence
  Description of Artificial Sequence: Synthetic oligonucleotide
gcacuacccuugagguugu

SEQ ID NO: 38112 - RNA, 19 nt, Artificial Sequence
  Description of Artificial Sequence: Synthetic oligonucleotide
cacuacccuugagguugua

SEQ ID NO: 38113 - RNA, 19 nt, Artificial Sequence
  Description of Artificial Sequence: Synthetic oligonucleotide
aauuaugggauauauacuc

SEQ ID NO: 38114 - RNA, 19 nt, Artificial Sequence
  Description of Artificial Sequence: Synthetic oligonucleotide
uauagaacaagguaaaucc

SEQ ID NO: 38115 - RNA, 19 nt, Artificial Sequence
  Description of Artificial Sequence: Synthetic oligonucleotide
aaaguaacuagugauagag

SEQ ID NO: 38116 - RNA, 19 nt, Artificial Sequence
  Description of Artificial Sequence: Synthetic oligonucleotide
aaagaauauauuaagacga

SEQ ID NO: 38117 - RNA, 19 nt, Artificial Sequence
  Description of Artificial Sequence: Synthetic oligonucleotide
ugacauauuguacagacca

SEQ ID NO: 38118 - RNA, 19 nt, Artificial Sequence
  Description of Artificial Sequence: Synthetic oligonucleotide
aaaguaucuaacaccaugc

SEQ ID NO: 38119 - RNA, 19 nt, Artificial Sequence
  Description of Artificial Sequence: Synthetic oligonucleotide
aaaauuaagucucuccucu

SEQ ID NO: 38120 - RNA, 19 nt, Artificial Sequence
  Description of Artificial Sequence: Synthetic oligonucleotide
uuaagaaagauaguaaagc

SEQ ID NO: 38121 - RNA, 19 nt, Artificial Sequence
  Description of Artificial Sequence: Synthetic oligonucleotide
aaucaaucacacucgaauc

SEQ ID NO: 38122 - RNA, 19 nt, Artificial Sequence
  Description of Artificial Sequence: Synthetic oligonucleotide
gauaguaaagcccacacuc

SEQ ID NO: 38123 - RNA, 19 nt, Artificial Sequence
  Description of Artificial Sequence: Synthetic oligonucleotide
aacacuuagguuguaaagg

SEQ ID NO: 38124 - RNA, 19 nt, Artificial Sequence
  Description of Artificial Sequence: Synthetic oligonucleotide
ucugaaucaaucacacucg

SEQ ID NO: 38125 - RNA, 19 nt, Artificial Sequence
  Description of Artificial Sequence: Synthetic oligonucleotide
uuuaugacaacauccauaa

SEQ ID NO: 38126 - RNA, 19 nt, Artificial Sequence
  Description of Artificial Sequence: Synthetic oligonucleotide
ucuaaaaucuaccaaucgu

SEQ ID NO: 38127 - RNA, 19 nt, Artificial Sequence
  Description of Artificial Sequence: Synthetic oligonucleotide
ucuaauaggaaauguaggu

SEQ ID NO: 38128 - RNA, 19 nt, Artificial Sequence
  Description of Artificial Sequence: Synthetic oligonucleotide
auaaauaaguacuaaccca

SEQ ID NO: 38129 - RNA, 19 nt, Artificial Sequence
  Description of Artificial Sequence: Synthetic oligonucleotide
aucuacaugaucuguuugc

SEQ ID NO: 38130 - RNA, 19 nt, Artificial Sequence
  Description of Artificial Sequence: Synthetic oligonucleotide
cuucuaauaggaaauguag

SEQ ID NO: 38131 - RNA, 19 nt, Artificial Sequence
  Description of Artificial Sequence: Synthetic oligonucleotide
auuauguucaguccugcgg

SEQ ID NO: 38132 - RNA, 19 nt, Artificial Sequence
  Description of Artificial Sequence: Synthetic oligonucleotide
uuuuagucuaaaaucuacc

SEQ ID NO: 38133 - RNA, 19 nt, Artificial Sequence
  Description of Artificial Sequence: Synthetic oligonucleotide
ugucauaagcucaaguuca

SEQ ID NO: 38134 - RNA, 19 nt, Artificial Sequence
  Description of Artificial Sequence: Synthetic oligonucleotide
gacacaauugaugauagcc

SEQ ID NO: 38135 - RNA, 19 nt, Artificial Sequence
  Description of Artificial Sequence: Synthetic oligonucleotide
acauguuaaggcuaguauc

SEQ ID NO: 38136 - RNA, 19 nt, Artificial Sequence
  Description of Artificial Sequence: Synthetic oligonucleotide
uucgacguaaaggagaccg

SEQ ID NO: 38137 - RNA, 19 nt, Artificial Sequence
  Description of Artificial Sequence: Synthetic oligonucleotide
uugguuucgacguaaagga

SEQ ID NO: 38138 - RNA, 19 nt, Artificial Sequence
  Description of Artificial Sequence: Synthetic oligonucleotide
uaaugguagacguuugagg

SEQ ID NO: 38139 - RNA, 19 nt, Artificial Sequence
  Description of Artificial Sequence: Synthetic oligonucleotide
acgacaaugaagucuaguc

SEQ ID NO: 38140 - RNA, 19 nt, Artificial Sequence
  Description of Artificial Sequence: Synthetic oligonucleotide
caucugaccaucuagcuag

SEQ ID NO: 38141 - RNA, 19 nt, Artificial Sequence
  Description of Artificial Sequence: Synthetic oligonucleotide
uuuaauauccuauccuaga

SEQ ID NO: 38142 - RNA, 19 nt, Artificial Sequence
  Description of Artificial Sequence: Synthetic oligonucleotide
aaaucuaaaggguaucgaa

SEQ ID NO: 38143 - RNA, 19 nt, Artificial Sequence
  Description of Artificial Sequence: Synthetic oligonucleotide
cuaaagacgguucagcuug

SEQ ID NO: 38144 - RNA, 19 nt, Artificial Sequence
  Description of Artificial Sequence: Synthetic oligonucleotide
uuaggguuaaaugaaauaa

SEQ ID NO: 38145 - RNA, 19 nt, Artificial Sequence
  Description of Artificial Sequence: Synthetic oligonucleotide
aaaacucgguacuucucac

SEQ ID NO: 38146 - RNA, 19 nt, Artificial Sequence
  Description of Artificial Sequence: Synthetic oligonucleotide
gaacaagguaaauccaacg

SEQ ID NO: 38147 - RNA, 19 nt, Artificial Sequence
  Description of Artificial Sequence: Synthetic oligonucleotide
aaaucuaccaaucguuuaa

SEQ ID NO: 38148 - RNA, 19 nt, Artificial Sequence
  Description of Artificial Sequence: Synthetic oligonucleotide
auaggugagcuauaucuac

SEQ ID NO: 38149 - RNA, 19 nt, Artificial Sequence
  Description of Artificial Sequence: Synthetic oligonucleotide
uguauaugggccaggagga

SEQ ID NO: 38150 - RNA, 19 nt, Artificial Sequence
  Description of Artificial Sequence: Synthetic oligonucleotide
cuucgaauuuacaugcugg

SEQ ID NO: 38151 - RNA, 19 nt, Artificial Sequence
  Description of Artificial Sequence: Synthetic oligonucleotide
cauaagcucaaguucagag

SEQ ID NO: 38152 - RNA, 19 nt, Artificial Sequence
  Description of Artificial Sequence: Synthetic oligonucleotide
auagcaagcaacagcaccc

SEQ ID NO: 38153 - RNA, 19 nt, Artificial Sequence
  Description of Artificial Sequence: Synthetic oligonucleotide
uuuuaugacaacauccaua

SEQ ID NO: 38154 - RNA, 19 nt, Artificial Sequence
  Description of Artificial Sequence: Synthetic oligonucleotide
guaucuaacaccaugcaug

SEQ ID NO: 38155 - RNA, 19 nt, Artificial Sequence
  Description of Artificial Sequence: Synthetic oligonucleotide
uaucuacccauuguaaugg

SEQ ID NO: 38156 - RNA, 19 nt, Artificial Sequence
  Description of Artificial Sequence: Synthetic oligonucleotide
cacuaaaccuguuugacac

SEQ ID NO: 38157 - RNA, 19 nt, Artificial Sequence
  Description of Artificial Sequence: Synthetic oligonucleotide
uuaauauccuauccuagaa

SEQ ID NO: 38158 - RNA, 19 nt, Artificial Sequence
  Description of Artificial Sequence: Synthetic oligonucleotide
uuauguucaguccugcggu

SEQ ID NO: 38159 - RNA, 19 nt, Artificial Sequence
  Description of Artificial Sequence: Synthetic oligonucleotide
aguaacuagugauagaguu

SEQ ID NO: 38160 - RNA, 19 nt, Artificial Sequence
  Description of Artificial Sequence: Synthetic oligonucleotide
auaucuacccauuguaaug

SEQ ID NO: 38161 - RNA, 19 nt, Artificial Sequence
  Description of Artificial Sequence: Synthetic oligonucleotide
uauuacgugacacaucuuu

SEQ ID NO: 38162 - RNA, 19 nt, Artificial Sequence
  Description of Artificial Sequence: Synthetic oligonucleotide
uuuucuuguauaugggcca

SEQ ID NO: 38163 - RNA, 19 nt, Artificial Sequence
  Description of Artificial Sequence: Synthetic oligonucleotide
aggugagcuauaucuaccc

SEQ ID NO: 38164 - RNA, 19 nt, Artificial Sequence
  Description of Artificial Sequence: Synthetic oligonucleotide
ugacaaguacauguuaagg

SEQ ID NO: 38165 - RNA, 19 nt, Artificial Sequence
  Description of Artificial Sequence: Synthetic oligonucleotide
ucacacucgaaucaauaug

SEQ ID NO: 38166 - RNA, 19 nt, Artificial Sequence
  Description of Artificial Sequence: Synthetic oligonucleotide
ugcuagaugagguaguuuc

SEQ ID NO: 38167 - RNA, 19 nt, Artificial Sequence
  Description of Artificial Sequence: Synthetic oligonucleotide
acuuaaguggugccaaccg

SEQ ID NO: 38168 - RNA, 19 nt, Artificial Sequence
  Description of Artificial Sequence: Synthetic oligonucleotide
guaaccacuaaucacaaaa

SEQ ID NO: 38169 - RNA, 19 nt, Artificial Sequence
  Description of Artificial Sequence: Synthetic oligonucleotide
uucagcuagcaacauacug

SEQ ID NO: 38170 - RNA, 19 nt, Artificial Sequence
  Description of Artificial Sequence: Synthetic oligonucleotide
uacgcuuauucaaacauaa

SEQ ID NO: 38171 - RNA, 19 nt, Artificial Sequence
  Description of Artificial Sequence: Synthetic oligonucleotide
aucaauaugagguguguga

SEQ ID NO: 38172 - RNA, 19 nt, Artificial Sequence
  Description of Artificial Sequence: Synthetic oligonucleotide
agacgguucagcuugauaa

SEQ ID NO: 38173 - RNA, 19 nt, Artificial Sequence
  Description of Artificial Sequence: Synthetic oligonucleotide
agguauuggaugaaugugc

SEQ ID NO: 38174 - RNA, 19 nt, Artificial Sequence
  Description of Artificial Sequence: Synthetic oligonucleotide
guuugaaucauguuuaaua

SEQ ID NO: 38175 - RNA, 19 nt, Artificial Sequence
  Description of Artificial Sequence: Synthetic oligonucleotide
gacauucacaaugaucacg

SEQ ID NO: 38176 - RNA, 19 nt, Artificial Sequence
  Description of Artificial Sequence: Synthetic oligonucleotide
gcauauaaccauuucauug

SEQ ID NO: 38177 - RNA, 19 nt, Artificial Sequence
  Description of Artificial Sequence: Synthetic oligonucleotide
uuaugggauauauacucca

SEQ ID NO: 38178 - RNA, 19 nt, Artificial Sequence
  Description of Artificial Sequence: Synthetic oligonucleotide
gucuaaaaucuaccaaucg

SEQ ID NO: 38179 - RNA, 19 nt, Artificial Sequence
  Description of Artificial Sequence: Synthetic oligonucleotide
gaauucgcaacccaaacaa

SEQ ID NO: 38180 - RNA, 19 nt, Artificial Sequence
  Description of Artificial Sequence: Synthetic oligonucleotide
ucuucgaauuuacaugcug

SEQ ID NO: 38181 - RNA, 19 nt, Artificial Sequence
  Description of Artificial Sequence: Synthetic oligonucleotide
aggaggacgaccuacagau

SEQ ID NO: 38182 - RNA, 19 nt, Artificial Sequence
  Description of Artificial Sequence: Synthetic oligonucleotide
acaguuuuaccguucuguc

SEQ ID NO: 38183 - RNA, 19 nt, Artificial Sequence
  Description of Artificial Sequence: Synthetic oligonucleotide
ucggcuaaguuauucagga

SEQ ID NO: 38184 - RNA, 19 nt, Artificial Sequence
  Description of Artificial Sequence: Synthetic oligonucleotide
aaaggagaccgcuugugga

SEQ ID NO: 38185 - RNA, 19 nt, Artificial Sequence
  Description of Artificial Sequence: Synthetic oligonucleotide
ucuagcuaggacauccuga

SEQ ID NO: 38186 - RNA, 19 nt, Artificial Sequence
  Description of Artificial Sequence: Synthetic oligonucleotide
ucgcaacccaaacaaaugc

SEQ ID NO: 38187 - RNA, 19 nt, Artificial Sequence
  Description of Artificial Sequence: Synthetic oligonucleotide
cuuucuuaagcgcaccacc

SEQ ID NO: 38188 - RNA, 19 nt, Artificial Sequence
  Description of Artificial Sequence: Synthetic oligonucleotide
uugacaaguacauguuaag

SEQ ID NO: 38189 - RNA, 19 nt, Artificial Sequence
  Description of Artificial Sequence: Synthetic oligonucleotide
uucucccuauagaacaagg

SEQ ID NO: 38190 - RNA, 19 nt, Artificial Sequence
  Description of Artificial Sequence: Synthetic oligonucleotide
ucgcauauaaccauuucau

SEQ ID NO: 38191 - RNA, 19 nt, Artificial Sequence
  Description of Artificial Sequence: Synthetic oligonucleotide
uauaucuacccauuguaau

SEQ ID NO: 38192 - RNA, 19 nt, Artificial Sequence
  Description of Artificial Sequence: Synthetic oligonucleotide
ugaaugugcaauucccuca

SEQ ID NO: 38193 - RNA, 19 nt, Artificial Sequence
  Description of Artificial Sequence: Synthetic oligonucleotide
ucauacuacgcuuauucaa

SEQ ID NO: 38194 - RNA, 19 nt, Artificial Sequence
  Description of Artificial Sequence: Synthetic oligonucleotide
acuauaggguaaugucugc

SEQ ID NO: 38195 - RNA, 19 nt, Artificial Sequence
  Description of Artificial Sequence: Synthetic oligonucleotide
uucgaauuuacaugcuggc

SEQ ID NO: 38196 - RNA, 19 nt, Artificial Sequence
  Description of Artificial Sequence: Synthetic oligonucleotide
aauccauaaugccuggaaa

SEQ ID NO: 38197 - RNA, 19 nt, Artificial Sequence
  Description of Artificial Sequence: Synthetic oligonucleotide
gauaauccauaaugccugg

SEQ ID NO: 38198 - RNA, 19 nt, Artificial Sequence
  Description of Artificial Sequence: Synthetic oligonucleotide
acgaauucgcaacccaaac

SEQ ID NO: 38199 - RNA, 19 nt, Artificial Sequence
  Description of Artificial Sequence: Synthetic oligonucleotide
agauaauccauaaugccug

SEQ ID NO: 38200 - RNA, 19 nt, Artificial Sequence
  Description of Artificial Sequence: Synthetic oligonucleotide
uacauguuaaggcuaguau

SEQ ID NO: 38201 - RNA, 19 nt, Artificial Sequence
  Description of Artificial Sequence: Synthetic oligonucleotide
uugcauaggucacauaauc

SEQ ID NO: 38202 - RNA, 19 nt, Artificial Sequence
  Description of Artificial Sequence: Synthetic oligonucleotide
aaaaucuaccaaucguuua

SEQ ID NO: 38203 - RNA, 19 nt, Artificial Sequence
  Description of Artificial Sequence: Synthetic oligonucleotide
uccuauccuagaaacauuc

SEQ ID NO: 38204 - RNA, 19 nt, Artificial Sequence
  Description of Artificial Sequence: Synthetic oligonucleotide
agacguuugagguauucug

SEQ ID NO: 38205 - RNA, 19 nt, Artificial Sequence
  Description of Artificial Sequence: Synthetic oligonucleotide
uaaaagccugagaagaaau

SEQ ID NO: 38206 - RNA, 19 nt, Artificial Sequence
  Description of Artificial Sequence: Synthetic oligonucleotide
gccuugaccacacuuaucg

SEQ ID NO: 38207 - RNA, 19 nt, Artificial Sequence
  Description of Artificial Sequence: Synthetic oligonucleotide
uuacgugacacaucuuuug

SEQ ID NO: 38208 - RNA, 19 nt, Artificial Sequence
  Description of Artificial Sequence: Synthetic oligonucleotide
uucgcaacccaaacaaaug

SEQ ID NO: 38209 - RNA, 19 nt, Artificial Sequence
  Description of Artificial Sequence: Synthetic oligonucleotide
acuacgcuuauucaaacau

SEQ ID NO: 38210 - RNA, 19 nt, Artificial Sequence
  Description of Artificial Sequence: Synthetic oligonucleotide
gaucggcuaaguuauucag

SEQ ID NO: 38211 - RNA, 19 nt, Artificial Sequence
  Description of Artificial Sequence: Synthetic oligonucleotide
auacuacgcuuauucaaac

SEQ ID NO: 38212 - RNA, 19 nt, Artificial Sequence
  Description of Artificial Sequence: Synthetic oligonucleotide
uccauuacccuagauauaa

SEQ ID NO: 38213 - RNA, 19 nt, Artificial Sequence
  Description of Artificial Sequence: Synthetic oligonucleotide
aaguaucuaacaccaugca

SEQ ID NO: 38214 - RNA, 19 nt, Artificial Sequence
  Description of Artificial Sequence: Synthetic oligonucleotide
uaauauccuauccuagaaa

SEQ ID NO: 38215 - RNA, 19 nt, Artificial Sequence
  Description of Artificial Sequence: Synthetic oligonucleotide
uaauccauaaugccuggaa

SEQ ID NO: 38216 - RNA, 19 nt, Artificial Sequence
  Description of Artificial Sequence: Synthetic oligonucleotide
uguaaugguagacguuuga

SEQ ID NO: 38217 - RNA, 19 nt, Artificial Sequence
  Description of Artificial Sequence: Synthetic oligonucleotide
uaaaaucuaccaaucguuu

SEQ ID NO: 38218 - RNA, 19 nt, Artificial Sequence
  Description of Artificial Sequence: Synthetic oligonucleotide
gguaaugucugcuucauga

SEQ ID NO: 38219 - RNA, 19 nt, Artificial Sequence
  Description of Artificial Sequence: Synthetic oligonucleotide
cacacuauaggguaauguc

SEQ ID NO: 38220 - RNA, 19 nt, Artificial Sequence
  Description of Artificial Sequence: Synthetic oligonucleotide
ugccacgagaaauugaaaa

SEQ ID NO: 38221 - RNA, 19 nt, Artificial Sequence
  Description of Artificial Sequence: Synthetic oligonucleotide
cacuauaggguaaugucug

SEQ ID NO: 38222 - RNA, 19 nt, Artificial Sequence
  Description of Artificial Sequence: Synthetic oligonucleotide
ucucauucggucacuuaag

SEQ ID NO: 38223 - RNA, 19 nt, Artificial Sequence
  Description of Artificial Sequence: Synthetic oligonucleotide
ucacacgggaauuacauuu

SEQ ID NO: 38224 - RNA, 19 nt, Artificial Sequence
  Description of Artificial Sequence: Synthetic oligonucleotide
acacgggaauuacauuucc

SEQ ID NO: 38225 - RNA, 19 nt, Artificial Sequence
  Description of Artificial Sequence: Synthetic oligonucleotide
ucaagggucacccgacgag

SEQ ID NO: 38226 - RNA, 19 nt, Artificial Sequence
  Description of Artificial Sequence: Synthetic oligonucleotide
uauccuauccuagaaacau

SEQ ID NO: 38227 - RNA, 19 nt, Artificial Sequence
  Description of Artificial Sequence: Synthetic oligonucleotide
gaaucaaucacacucgaau

SEQ ID NO: 38228 - RNA, 19 nt, Artificial Sequence
  Description of Artificial Sequence: Synthetic oligonucleotide
uuucaguagacauuauaua

SEQ ID NO: 38229 - RNA, 19 nt, Artificial Sequence
  Description of Artificial Sequence: Synthetic oligonucleotide
acuaacccacaguuuuacc

SEQ ID NO: 38230 - RNA, 19 nt, Artificial Sequence
  Description of Artificial Sequence: Synthetic oligonucleotide
uccugaucggcuaaguuau

SEQ ID NO: 38231 - RNA, 19 nt, Artificial Sequence
  Description of Artificial Sequence: Synthetic oligonucleotide
gucuuguaaucauuuaaug

SEQ ID NO: 38232 - RNA, 19 nt, Artificial Sequence
  Description of Artificial Sequence: Synthetic oligonucleotide
cuagcuaggacauccugac

SEQ ID NO: 38233 - RNA, 19 nt, Artificial Sequence
  Description of Artificial Sequence: Synthetic oligonucleotide
aaggcgaccucuucuucuc

SEQ ID NO: 38234 - RNA, 19 nt, Artificial Sequence
  Description of Artificial Sequence: Synthetic oligonucleotide
aacacgaauucgcaaccca

SEQ ID NO: 38235 - RNA, 19 nt, Artificial Sequence
  Description of Artificial Sequence: Synthetic oligonucleotide
uuuguuaacccugugcaau

SEQ ID NO: 38236 - RNA, 19 nt, Artificial Sequence
  Description of Artificial Sequence: Synthetic oligonucleotide
uggacguugguuuuaugac

SEQ ID NO: 38237 - RNA, 19 nt, Artificial Sequence
  Description of Artificial Sequence: Synthetic oligonucleotide
accguucugucaucaauac

SEQ ID NO: 38238 - RNA, 19 nt, Artificial Sequence
  Description of Artificial Sequence: Synthetic oligonucleotide
uuguggaccagugaguuac

SEQ ID NO: 38239 - RNA, 19 nt, Artificial Sequence
  Description of Artificial Sequence: Synthetic oligonucleotide
uguaaucauuuaaugccuc

SEQ ID NO: 38240 - RNA, 19 nt, Artificial Sequence
  Description of Artificial Sequence: Synthetic oligonucleotide
uagucacagagcaauuuac

SEQ ID NO: 38241 - RNA, 19 nt, Artificial Sequence
  Description of Artificial Sequence: Synthetic oligonucleotide
ucauucggucacuuaagug

SEQ ID NO: 38242 - RNA, 19 nt, Artificial Sequence
  Description of Artificial Sequence: Synthetic oligonucleotide
aacauggucuuguaaucau

SEQ ID NO: 38243 - RNA, 19 nt, Artificial Sequence
  Description of Artificial Sequence: Synthetic oligonucleotide
uaggugagcuauaucuacc

SEQ ID NO: 38244 - RNA, 19 nt, Artificial Sequence
  Description of Artificial Sequence: Synthetic oligonucleotide
uacgugacacaucuuuuga

SEQ ID NO: 38245 - RNA, 19 nt, Artificial Sequence
  Description of Artificial Sequence: Synthetic oligonucleotide
uucauacuacgcuuauuca

SEQ ID NO: 38246 - RNA, 19 nt, Artificial Sequence
  Description of Artificial Sequence: Synthetic oligonucleotide
aaaagccugagaagaaaug

SEQ ID NO: 38247 - RNA, 19 nt, Artificial Sequence
  Description of Artificial Sequence: Synthetic oligonucleotide
acgagccaaaacucgguac

SEQ ID NO: 38248 - RNA, 19 nt, Artificial Sequence
  Description of Artificial Sequence: Synthetic oligonucleotide
cuauucuaccugcagcacc

SEQ ID NO: 38249 - RNA, 19 nt, Artificial Sequence
  Description of Artificial Sequence: Synthetic oligonucleotide
cacacucgaaucaauauga

SEQ ID NO: 38250 - RNA, 19 nt, Artificial Sequence
  Description of Artificial Sequence: Synthetic oligonucleotide
ucuuaagcgcaccaccccu

SEQ ID NO: 38251 - RNA, 19 nt, Artificial Sequence
  Description of Artificial Sequence: Synthetic oligonucleotide
aguaucuaacaccaugcau

SEQ ID NO: 38252 - RNA, 19 nt, Artificial Sequence
  Description of Artificial Sequence: Synthetic oligonucleotide
ucugacacugauuccuuac

SEQ ID NO: 38253 - RNA, 19 nt, Artificial Sequence
  Description of Artificial Sequence: Synthetic oligonucleotide
ugugcaauucccucaguuc

SEQ ID NO: 38254 - RNA, 19 nt, Artificial Sequence
  Description of Artificial Sequence: Synthetic oligonucleotide
uguacaugcaaagaauaua

SEQ ID NO: 38255 - RNA, 19 nt, Artificial Sequence
  Description of Artificial Sequence: Synthetic oligonucleotide
cuuaaguggugccaaccgc

SEQ ID NO: 38256 - RNA, 19 nt, Artificial Sequence
  Description of Artificial Sequence: Synthetic oligonucleotide
uaauagcuaggggaaauca

SEQ ID NO: 38257 - RNA, 19 nt, Artificial Sequence
  Description of Artificial Sequence: Synthetic oligonucleotide
auccauaaugccuggaaau

SEQ ID NO: 38258 - RNA, 19 nt, Artificial Sequence
  Description of Artificial Sequence: Synthetic oligonucleotide
aaugugccacgagaaauug

SEQ ID NO: 38259 - RNA, 19 nt, Artificial Sequence
  Description of Artificial Sequence: Synthetic oligonucleotide
cauuuauaccuggucaacc

SEQ ID NO: 38260 - RNA, 19 nt, Artificial Sequence
  Description of Artificial Sequence: Synthetic oligonucleotide
aagacgacaaugaagucua

SEQ ID NO: 38261 - RNA, 19 nt, Artificial Sequence
  Description of Artificial Sequence: Synthetic oligonucleotide
uguaaaggcauaggugagc

SEQ ID NO: 38262 - RNA, 19 nt, Artificial Sequence
  Description of Artificial Sequence: Synthetic oligonucleotide
acguaaaggagaccgcuug

SEQ ID NO: 38263 - RNA, 19 nt, Artificial Sequence
  Description of Artificial Sequence: Synthetic oligonucleotide
ggaccagugaguuaccugc

SEQ ID NO: 38264 - RNA, 19 nt, Artificial Sequence
  Description of Artificial Sequence: Synthetic oligonucleotide
cucgaaucaauaugaggug

SEQ ID NO: 38265 - RNA, 19 nt, Artificial Sequence
  Description of Artificial Sequence: Synthetic oligonucleotide
guaaugguagacguuugag

SEQ ID NO: 38266 - RNA, 19 nt, Artificial Sequence
  Description of Artificial Sequence: Synthetic oligonucleotide
agcuauaucuacccauugu

SEQ ID NO: 38267 - RNA, 19 nt, Artificial Sequence
  Description of Artificial Sequence: Synthetic oligonucleotide
uaugggauauauacuccaa

SEQ ID NO: 38268 - RNA, 19 nt, Artificial Sequence
  Description of Artificial Sequence: Synthetic oligonucleotide
acuuaucgcauauaaccau

SEQ ID NO: 38269 - RNA, 19 nt, Artificial Sequence
  Description of Artificial Sequence: Synthetic oligonucleotide
uaaugugccacgagaaauu

SEQ ID NO: 38270 - RNA, 19 nt, Artificial Sequence
  Description of Artificial Sequence: Synthetic oligonucleotide
agauuugggugugucugcc

SEQ ID NO: 38271 - RNA, 19 nt, Artificial Sequence
  Description of Artificial Sequence: Synthetic oligonucleotide
gaagaaaugcugcugugua

SEQ ID NO: 38272 - RNA, 19 nt, Artificial Sequence
  Description of Artificial Sequence: Synthetic oligonucleotide
aaugcaggacaaugaaguu

SEQ ID NO: 38273 - RNA, 19 nt, Artificial Sequence
  Description of Artificial Sequence: Synthetic oligonucleotide
ugagcuauaucuacccauu

SEQ ID NO: 38274 - RNA, 19 nt, Artificial Sequence
  Description of Artificial Sequence: Synthetic oligonucleotide
aagcaaucacguucccgag

SEQ ID NO: 38275 - RNA, 19 nt, Artificial Sequence
  Description of Artificial Sequence: Synthetic oligonucleotide
uagcuaggggaaaucaagu

SEQ ID NO: 38276 - RNA, 19 nt, Artificial Sequence
  Description of Artificial Sequence: Synthetic oligonucleotide
uugcuuacuucccuugagu

SEQ ID NO: 38277 - RNA, 19 nt, Artificial Sequence
  Description of Artificial Sequence: Synthetic oligonucleotide
cuuucaguagacauuauau

SEQ ID NO: 38278 - RNA, 19 nt, Artificial Sequence
  Description of Artificial Sequence: Synthetic oligonucleotide
uuacagucuuucaguagac

SEQ ID NO: 38279 - RNA, 19 nt, Artificial Sequence
  Description of Artificial Sequence: Synthetic oligonucleotide
uuaccguucugucaucaau

SEQ ID NO: 38280 - RNA, 19 nt, Artificial Sequence
  Description of Artificial Sequence: Synthetic oligonucleotide
cauacuacgcuuauucaaa

SEQ ID NO: 38281 - RNA, 19 nt, Artificial Sequence
  Description of Artificial Sequence: Synthetic oligonucleotide
ugguuucgacguaaaggag

SEQ ID NO: 38282 - RNA, 19 nt, Artificial Sequence
  Description of Artificial Sequence: Synthetic oligonucleotide
uaacccugugcaauaaaua

SEQ ID NO: 38283 - RNA, 19 nt, Artificial Sequence
  Description of Artificial Sequence: Synthetic oligonucleotide
uacuacgcuuauucaaaca

SEQ ID NO: 38284 - RNA, 19 nt, Artificial Sequence
  Description of Artificial Sequence: Synthetic oligonucleotide
agucuagucacagagcaau

SEQ ID NO: 38285 - RNA, 19 nt, Artificial Sequence
  Description of Artificial Sequence: Synthetic oligonucleotide
gaacccugcgcacacgcgc

SEQ ID NO: 38286 - RNA, 19 nt, Artificial Sequence
  Description of Artificial Sequence: Synthetic oligonucleotide
ugaaucaaucacacucgaa

SEQ ID NO: 38287 - RNA, 19 nt, Artificial Sequence
  Description of Artificial Sequence: Synthetic oligonucleotide
uauaggguaaugucugcuu

SEQ ID NO: 38288 - RNA, 19 nt, Artificial Sequence
  Description of Artificial Sequence: Synthetic oligonucleotide
cuggacguugguuuuauga

SEQ ID NO: 38289 - RNA, 19 nt, Artificial Sequence
  Description of Artificial Sequence: Synthetic oligonucleotide
acauaacuaacaauuacua

SEQ ID NO: 38290 - RNA, 19 nt, Artificial Sequence
  Description of Artificial Sequence: Synthetic oligonucleotide
uaccguucugucaucaaua

SEQ ID NO: 38291 - RNA, 19 nt, Artificial Sequence
  Description of Artificial Sequence: Synthetic oligonucleotide
ugcucugguaaccacuaau

SEQ ID NO: 38292 - RNA, 19 nt, Artificial Sequence
  Description of Artificial Sequence: Synthetic oligonucleotide
cacuuaucgcauauaacca

SEQ ID NO: 38293 - RNA, 19 nt, Artificial Sequence
  Description of Artificial Sequence: Synthetic oligonucleotide
uuaucgcauauaaccauuu

SEQ ID NO: 38294 - RNA, 19 nt, Artificial Sequence
  Description of Artificial Sequence: Synthetic oligonucleotide
acacuauaggguaaugucu

SEQ ID NO: 38295 - RNA, 19 nt, Artificial Sequence
  Description of Artificial Sequence: Synthetic oligonucleotide
cuaaaggguaucgaaauaa

SEQ ID NO: 38296 - RNA, 19 nt, Artificial Sequence
  Description of Artificial Sequence: Synthetic oligonucleotide
gaaaucuaaaggguaucga

SEQ ID NO: 38297 - RNA, 19 nt, Artificial Sequence
  Description of Artificial Sequence: Synthetic oligonucleotide
uaucgcauauaaccauuuc

SEQ ID NO: 38298 - RNA, 19 nt, Artificial Sequence
  Description of Artificial Sequence: Synthetic oligonucleotide
cagacuuacuguuaaaacu

SEQ ID NO: 38299 - RNA, 19 nt, Artificial Sequence
  Description of Artificial Sequence: Synthetic oligonucleotide
aacgcaggauucucugaca

SEQ ID NO: 38300 - RNA, 19 nt, Artificial Sequence
  Description of Artificial Sequence: Synthetic oligonucleotide
cagauaauccauaaugccu

SEQ ID NO: 38301 - RNA, 19 nt, Artificial Sequence
  Description of Artificial Sequence: Synthetic oligonucleotide
cauucgguccuuucuuaag

SEQ ID NO: 38302 - RNA, 19 nt, Artificial Sequence
  Description of Artificial Sequence: Synthetic oligonucleotide
ccaauaaaagccugagaag

SEQ ID NO: 38303 - RNA, 19 nt, Artificial Sequence
  Description of Artificial Sequence: Synthetic oligonucleotide
agcaccaaaguaacuagug

SEQ ID NO: 38304 - RNA, 19 nt, Artificial Sequence
  Description of Artificial Sequence: Synthetic oligonucleotide
cacacuaaaccuguuugac

SEQ ID NO: 38305 - RNA, 19 nt, Artificial Sequence
  Description of Artificial Sequence: Synthetic oligonucleotide
uuaauagcuaggggaaauc

SEQ ID NO: 38306 - RNA, 19 nt, Artificial Sequence
  Description of Artificial Sequence: Synthetic oligonucleotide
uagagucucucauucgguc

SEQ ID NO: 38307 - RNA, 19 nt, Artificial Sequence
  Description of Artificial Sequence: Synthetic oligonucleotide
cuguagagucucucauucg

SEQ ID NO: 38308 - RNA, 19 nt, Artificial Sequence
  Description of Artificial Sequence: Synthetic oligonucleotide
ucgaauuuacaugcuggcu

SEQ ID NO: 38309 - RNA, 19 nt, Artificial Sequence
  Description of Artificial Sequence: Synthetic oligonucleotide
cuaaaaucuaccaaucguu

SEQ ID NO: 38310 - RNA, 19 nt, Artificial Sequence
  Description of Artificial Sequence: Synthetic oligonucleotide
ugguagacguuugagguau

SEQ ID NO: 38311 - RNA, 19 nt, Artificial Sequence
  Description of Artificial Sequence: Synthetic oligonucleotide
guuucgacguaaaggagac

SEQ ID NO: 38312 - RNA, 19 nt, Artificial Sequence
  Description of Artificial Sequence: Synthetic oligonucleotide
gagcuauaucuacccauug

SEQ ID NO: 38313 - RNA, 19 nt, Artificial Sequence
  Description of Artificial Sequence: Synthetic oligonucleotide
auuuagaacuguccucaaa

SEQ ID NO: 38314 - RNA, 19 nt, Artificial Sequence
  Description of Artificial Sequence: Synthetic oligonucleotide
acuuagguuguaaaggcau

SEQ ID NO: 38315 - RNA, 19 nt, Artificial Sequence
  Description of Artificial Sequence: Synthetic oligonucleotide
aguuaccugcuccuguaga

SEQ ID NO: 38316 - RNA, 19 nt, Artificial Sequence
  Description of Artificial Sequence: Synthetic oligonucleotide
augggauauauacuccaaa

SEQ ID NO: 38317 - RNA, 19 nt, Artificial Sequence
  Description of Artificial Sequence: Synthetic oligonucleotide
gcuucagcuagcaacauac

SEQ ID NO: 38318 - RNA, 19 nt, Artificial Sequence
  Description of Artificial Sequence: Synthetic oligonucleotide
uacuaacccacaguuuuac

SEQ ID NO: 38319 - RNA, 19 nt, Artificial Sequence
  Description of Artificial Sequence: Synthetic oligonucleotide
gcuauuacgugacacaucu

SEQ ID NO: 38320 - RNA, 19 nt, Artificial Sequence
  Description of Artificial Sequence: Synthetic oligonucleotide
ccaaaguaacuagugauag

SEQ ID NO: 38321 - RNA, 19 nt, Artificial Sequence
  Description of Artificial Sequence: Synthetic oligonucleotide
agacauuuacaaucauaau

SEQ ID NO: 38322 - RNA, 19 nt, Artificial Sequence
  Description of Artificial Sequence: Synthetic oligonucleotide
uacccauuguaaugguaga

SEQ ID NO: 38323 - RNA, 19 nt, Artificial Sequence
  Description of Artificial Sequence: Synthetic oligonucleotide
uuaagcgcaccaccccucu

SEQ ID NO: 38324 - RNA, 19 nt, Artificial Sequence
  Description of Artificial Sequence: Synthetic oligonucleotide
cagaccauuuccccacucc

SEQ ID NO: 38325 - RNA, 19 nt, Artificial Sequence
  Description of Artificial Sequence: Synthetic oligonucleotide
ucgguccuuucuuaagcgc

SEQ ID NO: 38326 - RNA, 19 nt, Artificial Sequence
  Description of Artificial Sequence: Synthetic oligonucleotide
ucgacguaaaggagaccgc

SEQ ID NO: 38327 - RNA, 19 nt, Artificial Sequence
  Description of Artificial Sequence: Synthetic oligonucleotide
aaucuaccaaucguuuaaa

SEQ ID NO: 38328 - RNA, 19 nt, Artificial Sequence
  Description of Artificial Sequence: Synthetic oligonucleotide
ucuacccauuguaauggua

SEQ ID NO: 38329 - RNA, 19 nt, Artificial Sequence
  Description of Artificial Sequence: Synthetic oligonucleotide
ggaacacgaauucgcaacc

SEQ ID NO: 38330 - RNA, 19 nt, Artificial Sequence
  Description of Artificial Sequence: Synthetic oligonucleotide
uccgcaaaugugguauugc

SEQ ID NO: 38331 - RNA, 19 nt, Artificial Sequence
  Description of Artificial Sequence: Synthetic oligonucleotide
guaaaggagaccgcuugug

SEQ ID NO: 38332 - RNA, 19 nt, Artificial Sequence
  Description of Artificial Sequence: Synthetic oligonucleotide
uggacucaauggaauaauu

SEQ ID NO: 38333 - RNA, 19 nt, Artificial Sequence
  Description of Artificial Sequence: Synthetic oligonucleotide
ugugcgaguucuuuuccua

SEQ ID NO: 38334 - RNA, 19 nt, Artificial Sequence
  Description of Artificial Sequence: Synthetic oligonucleotide
uucccgagggcgcugcccc

SEQ ID NO: 38335 - RNA, 19 nt, Artificial Sequence
  Description of Artificial Sequence: Synthetic oligonucleotide
aguaaaagguuuaggguua

SEQ ID NO: 38336 - RNA, 19 nt, Artificial Sequence
  Description of Artificial Sequence: Synthetic oligonucleotide
aaugugcaauucccucagu

SEQ ID NO: 38337 - RNA, 19 nt, Artificial Sequence
  Description of Artificial Sequence: Synthetic oligonucleotide
uuggaugaaugugcaauuc

SEQ ID NO: 38338 - RNA, 19 nt, Artificial Sequence
  Description of Artificial Sequence: Synthetic oligonucleotide
uuguucauacuacgcuuau

SEQ ID NO: 38339 - RNA, 19 nt, Artificial Sequence
  Description of Artificial Sequence: Synthetic oligonucleotide
acaauugaugauagccuug

SEQ ID NO: 38340 - RNA, 19 nt, Artificial Sequence
  Description of Artificial Sequence: Synthetic oligonucleotide
ugaucuguuugcucuggua

SEQ ID NO: 38341 - RNA, 19 nt, Artificial Sequence
  Description of Artificial Sequence: Synthetic oligonucleotide
gaacacgaauucgcaaccc

SEQ ID NO: 38342 - RNA, 19 nt, Artificial Sequence
  Description of Artificial Sequence: Synthetic oligonucleotide
aucaagggucacccgacga

SEQ ID NO: 38343 - RNA, 19 nt, Artificial Sequence
  Description of Artificial Sequence: Synthetic oligonucleotide
ugcaaugcuuuggcauucg

SEQ ID NO: 38344 - RNA, 19 nt, Artificial Sequence
  Description of Artificial Sequence: Synthetic oligonucleotide
acuguuguucacacccuuc

SEQ ID NO: 38345 - RNA, 19 nt, Artificial Sequence
  Description of Artificial Sequence: Synthetic oligonucleotide
cucugguaaccacuaauca

SEQ ID NO: 38346 - RNA, 19 nt, Artificial Sequence
  Description of Artificial Sequence: Synthetic oligonucleotide
cacacgggaauuacauuuc

SEQ ID NO: 38347 - RNA, 19 nt, Artificial Sequence
  Description of Artificial Sequence: Synthetic oligonucleotide
acagaccauuuccccacuc

SEQ ID NO: 38348 - RNA, 19 nt, Artificial Sequence
  Description of Artificial Sequence: Synthetic oligonucleotide
ucauaagcucaaguucaga

SEQ ID NO: 38349 - RNA, 19 nt, Artificial Sequence
  Description of Artificial Sequence: Synthetic oligonucleotide
gcuagaguaagggagguca

SEQ ID NO: 38350 - RNA, 19 nt, Artificial Sequence
  Description of Artificial Sequence: Synthetic oligonucleotide
uaaagacgguucagcuuga

SEQ ID NO: 38351 - RNA, 19 nt, Artificial Sequence
  Description of Artificial Sequence: Synthetic oligonucleotide
uuuaccguucugucaucaa

SEQ ID NO: 38352 - RNA, 19 nt, Artificial Sequence
  Description of Artificial Sequence: Synthetic oligonucleotide
uucuuguauaugggccagg

SEQ ID NO: 38353 - RNA, 19 nt, Artificial Sequence
  Description of Artificial Sequence: Synthetic oligonucleotide
agcuaggggaaaucaaguu

SEQ ID NO: 38354 - RNA, 19 nt, Artificial Sequence
  Description of Artificial Sequence: Synthetic oligonucleotide
caaaguaacuagugauaga

SEQ ID NO: 38355 - RNA, 19 nt, Artificial Sequence
  Description of Artificial Sequence: Synthetic oligonucleotide
uccuacagacuuacuguua

SEQ ID NO: 38356 - RNA, 19 nt, Artificial Sequence
  Description of Artificial Sequence: Synthetic oligonucleotide
cuaauaggaaauguaggua

SEQ ID NO: 38357 - RNA, 19 nt, Artificial Sequence
  Description of Artificial Sequence: Synthetic oligonucleotide
aagcgcaccaccccucuuu

SEQ ID NO: 38358 - RNA, 19 nt, Artificial Sequence
  Description of Artificial Sequence: Synthetic oligonucleotide
ucacccgacgagccaaaac

SEQ ID NO: 38359 - RNA, 19 nt, Artificial Sequence
  Description of Artificial Sequence: Synthetic oligonucleotide
acccaauaaaagccugaga

SEQ ID NO: 38360 - RNA, 19 nt, Artificial Sequence
  Description of Artificial Sequence: Synthetic oligonucleotide
cacgagaaauugaaaaugu

SEQ ID NO: 38361 - RNA, 19 nt, Artificial Sequence
  Description of Artificial Sequence: Synthetic oligonucleotide
aucuaccaaucguuuaaaa

SEQ ID NO: 38362 - RNA, 19 nt, Artificial Sequence
  Description of Artificial Sequence: Synthetic oligonucleotide
gucauaagcucaaguucag

SEQ ID NO: 38363 - RNA, 19 nt, Artificial Sequence
  Description of Artificial Sequence: Synthetic oligonucleotide
gacuuacuguuaaaacuga

SEQ ID NO: 38364 - RNA, 19 nt, Artificial Sequence
  Description of Artificial Sequence: Synthetic oligonucleotide
cuuaagcgcaccaccccuc

SEQ ID NO: 38365 - RNA, 19 nt, Artificial Sequence
  Description of Artificial Sequence: Synthetic oligonucleotide
aauucgcaacccaaacaaa

SEQ ID NO: 38366 - RNA, 19 nt, Artificial Sequence
  Description of Artificial Sequence: Synthetic oligonucleotide
cuccugaucggcuaaguua

SEQ ID NO: 38367 - RNA, 19 nt, Artificial Sequence
  Description of Artificial Sequence: Synthetic oligonucleotide
gguuacuagaaacacugcu

SEQ ID NO: 38368 - RNA, 19 nt, Artificial Sequence
  Description of Artificial Sequence: Synthetic oligonucleotide
guguguuauuacaaaauua

SEQ ID NO: 38369 - RNA, 19 nt, Artificial Sequence
  Description of Artificial Sequence: Synthetic oligonucleotide
caaguacauguuaaggcua

SEQ ID NO: 38370 - RNA, 19 nt, Artificial Sequence
  Description of Artificial Sequence: Synthetic oligonucleotide
ugaaggcauugcacacaag

SEQ ID NO: 38371 - RNA, 19 nt, Artificial Sequence
  Description of Artificial Sequence: Synthetic oligonucleotide
ucuucaccgggcuccuaca

SEQ ID NO: 38372 - RNA, 19 nt, Artificial Sequence
  Description of Artificial Sequence: Synthetic oligonucleotide
ccuguagagucucucauuc

SEQ ID NO: 38373 - RNA, 19 nt, Artificial Sequence
  Description of Artificial Sequence: Synthetic oligonucleotide
uuccauuacccuagauaua

SEQ ID NO: 38374 - RNA, 19 nt, Artificial Sequence
  Description of Artificial Sequence: Synthetic oligonucleotide
guuuuaugaccugcauccc

SEQ ID NO: 38375 - RNA, 19 nt, Artificial Sequence
  Description of Artificial Sequence: Synthetic oligonucleotide
agcauucuaaaagcccaug

SEQ ID NO: 38376 - RNA, 19 nt, Artificial Sequence
  Description of Artificial Sequence: Synthetic oligonucleotide
acgcuuauucaaacauaac

SEQ ID NO: 38377 - RNA, 19 nt, Artificial Sequence
  Description of Artificial Sequence: Synthetic oligonucleotide
uaaguggugccaaccgcuu

SEQ ID NO: 38378 - RNA, 19 nt, Artificial Sequence
  Description of Artificial Sequence: Synthetic oligonucleotide
gacguugguuuuaugaccu

SEQ ID NO: 38379 - RNA, 19 nt, Artificial Sequence
  Description of Artificial Sequence: Synthetic oligonucleotide
gaggacgaccuacagauuu

SEQ ID NO: 38380 - RNA, 19 nt, Artificial Sequence
  Description of Artificial Sequence: Synthetic oligonucleotide
gguuucgacguaaaggaga

SEQ ID NO: 38381 - RNA, 19 nt, Artificial Sequence
  Description of Artificial Sequence: Synthetic oligonucleotide
cugaucggcuaaguuauuc

SEQ ID NO: 38382 - RNA, 19 nt, Artificial Sequence
  Description of Artificial Sequence: Synthetic oligonucleotide
cacuuagguuguaaaggca

SEQ ID NO: 38383 - RNA, 19 nt, Artificial Sequence
  Description of Artificial Sequence: Synthetic oligonucleotide
uccuguagagucucucauu

SEQ ID NO: 38384 - RNA, 19 nt, Artificial Sequence
  Description of Artificial Sequence: Synthetic oligonucleotide
cugaaucaaucacacucga

SEQ ID NO: 38385 - RNA, 19 nt, Artificial Sequence
  Description of Artificial Sequence: Synthetic oligonucleotide
aucuacccauuguaauggu

SEQ ID NO: 38386 - RNA, 19 nt, Artificial Sequence
  Description of Artificial Sequence: Synthetic oligonucleotide
cuaaguuauucaggauuuc

SEQ ID NO: 38387 - RNA, 19 nt, Artificial Sequence
  Description of Artificial Sequence: Synthetic oligonucleotide
gguauuggaugaaugugca

SEQ ID NO: 38388 - RNA, 19 nt, Artificial Sequence
  Description of Artificial Sequence: Synthetic oligonucleotide
augguagacguuugaggua

SEQ ID NO: 38389 - RNA, 19 nt, Artificial Sequence
  Description of Artificial Sequence: Synthetic oligonucleotide
auuacgugacacaucuuuu

SEQ ID NO: 38390 - RNA, 19 nt, Artificial Sequence
  Description of Artificial Sequence: Synthetic oligonucleotide
guaaaggcauaggugagcu

SEQ ID NO: 38391 - RNA, 19 nt, Artificial Sequence
  Description of Artificial Sequence: Synthetic oligonucleotide
auaauccauaaugccugga

SEQ ID NO: 38392 - RNA, 19 nt, Artificial Sequence
  Description of Artificial Sequence: Synthetic oligonucleotide
auaccagucuccagggccu

SEQ ID NO: 38393 - RNA, 19 nt, Artificial Sequence
  Description of Artificial Sequence: Synthetic oligonucleotide
acccgacgagccaaaacuc

SEQ ID NO: 38394 - RNA, 19 nt, Artificial Sequence
  Description of Artificial Sequence: Synthetic oligonucleotide
ggcgaccucuucuucuccg

SEQ ID NO: 38395 - RNA, 19 nt, Artificial Sequence
  Description of Artificial Sequence: Synthetic oligonucleotide
cacgaauucgcaacccaaa

SEQ ID NO: 38396 - RNA, 19 nt, Artificial Sequence
  Description of Artificial Sequence: Synthetic oligonucleotide
agcgcaccaccccucuuug

SEQ ID NO: 38397 - RNA, 19 nt, Artificial Sequence
  Description of Artificial Sequence: Synthetic oligonucleotide
gcaacagcacccaauaaaa

SEQ ID NO: 38398 - RNA, 19 nt, Artificial Sequence
  Description of Artificial Sequence: Synthetic oligonucleotide
cacccgacgagccaaaacu

SEQ ID NO: 38399 - RNA, 19 nt, Artificial Sequence
  Description of Artificial Sequence: Synthetic oligonucleotide
ccgacgagccaaaacucgg

SEQ ID NO: 38400 - RNA, 19 nt, Artificial Sequence
  Description of Artificial Sequence: Synthetic oligonucleotide
gacgagccaaaacucggua

SEQ ID NO: 38401 - RNA, 19 nt, Artificial Sequence
  Description of Artificial Sequence: Synthetic oligonucleotide
cccgacgagccaaaacucg

SEQ ID NO: 38402 - RNA, 19 nt, Artificial Sequence
  Description of Artificial Sequence: Synthetic oligonucleotide
cacgggaauuacauuucca

SEQ ID NO: 38403 - RNA, 19 nt, Artificial Sequence
  Description of Artificial Sequence: Synthetic oligonucleotide
cauuugcaacacugcagca

SEQ ID NO: 38404 - RNA, 19 nt, Artificial Sequence
  Description of Artificial Sequence: Synthetic oligonucleotide
uuucgacguaaaggagacc

SEQ ID NO: 38405 - RNA, 19 nt, Artificial Sequence
  Description of Artificial Sequence: Synthetic oligonucleotide
gguccgggaacggagcgcg

SEQ ID NO: 38406 - RNA, 19 nt, Artificial Sequence
  Description of Artificial Sequence: Synthetic oligonucleotide
accgggcuccuacagacuu

SEQ ID NO: 38407 - RNA, 19 nt, Artificial Sequence
  Description of Artificial Sequence: Synthetic oligonucleotide
uguucauacuacgcuuauu

SEQ ID NO: 38408 - RNA, 19 nt, Artificial Sequence
  Description of Artificial Sequence: Synthetic oligonucleotide
ccgcuuguggaccagugag

SEQ ID NO: 38409 - RNA, 19 nt, Artificial Sequence
  Description of Artificial Sequence: Synthetic oligonucleotide
ccauuuuacucuuuggcua

SEQ ID NO: 38410 - RNA, 19 nt, Artificial Sequence
  Description of Artificial Sequence: Synthetic oligonucleotide
ccuagauauaaacaaacau

SEQ ID NO: 38411 - RNA, 19 nt, Artificial Sequence
  Description of Artificial Sequence: Synthetic oligonucleotide
uacccaaagguggcucagc

SEQ ID NO: 38412 - RNA, 19 nt, Artificial Sequence
  Description of Artificial Sequence: Synthetic oligonucleotide
cacaauugaugauagccuu

SEQ ID NO: 38413 - RNA, 19 nt, Artificial Sequence
  Description of Artificial Sequence: Synthetic oligonucleotide
cuuaucgcauauaaccauu

SEQ ID NO: 38414 - RNA, 19 nt, Artificial Sequence
  Description of Artificial Sequence: Synthetic oligonucleotide
acacgaauucgcaacccaa

SEQ ID NO: 38415 - RNA, 19 nt, Artificial Sequence
  Description of Artificial Sequence: Synthetic oligonucleotide
acgagguacugcaccuuuc

SEQ ID NO: 38416 - RNA, 19 nt, Artificial Sequence
  Description of Artificial Sequence: Synthetic oligonucleotide
gggaacccugcgcacacgc

SEQ ID NO: 38417 - RNA, 19 nt, Artificial Sequence
  Description of Artificial Sequence: Synthetic oligonucleotide
aaagacgguucagcuugau

SEQ ID NO: 38418 - RNA, 19 nt, Artificial Sequence
  Description of Artificial Sequence: Synthetic oligonucleotide
cccuagauauaaacaaaca

SEQ ID NO: 38419 - RNA, 19 nt, Artificial Sequence
  Description of Artificial Sequence: Synthetic oligonucleotide
uccuuacccaaagguggcu

SEQ ID NO: 38420 - RNA, 19 nt, Artificial Sequence
  Description of Artificial Sequence: Synthetic oligonucleotide
cuccgcaaaugugguauug

SEQ ID NO: 38421 - RNA, 19 nt, Artificial Sequence
  Description of Artificial Sequence: Synthetic oligonucleotide
accaucuagcuaggacauc

SEQ ID NO: 38422 - RNA, 19 nt, Artificial Sequence
  Description of Artificial Sequence: Synthetic oligonucleotide
aguucucccuauagaacaa

SEQ ID NO: 38423 - RNA, 19 nt, Artificial Sequence
  Description of Artificial Sequence: Synthetic oligonucleotide
ggugagcuauaucuaccca

SEQ ID NO: 38424 - RNA, 19 nt, Artificial Sequence
  Description of Artificial Sequence: Synthetic oligonucleotide
gaggguuacuagaaacacu

SEQ ID NO: 38425 - RNA, 19 nt, Artificial Sequence
  Description of Artificial Sequence: Synthetic oligonucleotide
gacgguucagcuugauaau

SEQ ID NO: 38426 - RNA, 19 nt, Artificial Sequence
  Description of Artificial Sequence: Synthetic oligonucleotide
gauagagguuuggaugccu

SEQ ID NO: 38427 - RNA, 19 nt, Artificial Sequence
  Description of Artificial Sequence: Synthetic oligonucleotide
ccauugcuuacuucccuug

SEQ ID NO: 38428 - RNA, 19 nt, Artificial Sequence
  Description of Artificial Sequence: Synthetic oligonucleotide
ggugcaaucuaucccaguu

SEQ ID NO: 38429 - RNA, 19 nt, Artificial Sequence
  Description of Artificial Sequence: Synthetic oligonucleotide
guaaaagguuuaggguuaa

SEQ ID NO: 38430 - RNA, 19 nt, Artificial Sequence
  Description of Artificial Sequence: Synthetic oligonucleotide
guaacuagugauagaguuu

SEQ ID NO: 38431 - RNA, 19 nt, Artificial Sequence
  Description of Artificial Sequence: Synthetic oligonucleotide
acaugcuauucuaccugca

SEQ ID NO: 38432 - RNA, 19 nt, Artificial Sequence
  Description of Artificial Sequence: Synthetic oligonucleotide
cucauucggucacuuaagu

SEQ ID NO: 38433 - RNA, 19 nt, Artificial Sequence
  Description of Artificial Sequence: Synthetic oligonucleotide
ucuccgcaaaugugguauu

SEQ ID NO: 38434 - RNA, 19 nt, Artificial Sequence
  Description of Artificial Sequence: Synthetic oligonucleotide
gacgaggguccgggaacgg

SEQ ID NO: 38435 - RNA, 19 nt, Artificial Sequence
  Description of Artificial Sequence: Synthetic oligonucleotide
ggugauugaguugcagcuc

SEQ ID NO: 38436 - RNA, 19 nt, Artificial Sequence
  Description of Artificial Sequence: Synthetic oligonucleotide
ccugugcgaguucuuuucc

SEQ ID NO: 38437 - RNA, 19 nt, Artificial Sequence
  Description of Artificial Sequence: Synthetic oligonucleotide
ggacgaggguccgggaacg

SEQ ID NO: 38438 - RNA, 19 nt, Artificial Sequence
  Description of Artificial Sequence: Synthetic oligonucleotide
gaccaucuagcuaggacau

SEQ ID NO: 38439 - RNA, 19 nt, Artificial Sequence
  Description of Artificial Sequence: Synthetic oligonucleotide
ccacacuuaucgcauauaa

SEQ ID NO: 38440 - RNA, 19 nt, Artificial Sequence
  Description of Artificial Sequence: Synthetic oligonucleotide
acggagcgcgcguccucac

SEQ ID NO: 38441 - RNA, 19 nt, Artificial Sequence
  Description of Artificial Sequence: Synthetic oligonucleotide
cuauaggguaaugucugcu

SEQ ID NO: 38442 - RNA, 19 nt, Artificial Sequence
  Description of Artificial Sequence: Synthetic oligonucleotide
cgacaaugaagucuaguca

SEQ ID NO: 38443 - RNA, 19 nt, Artificial Sequence
  Description of Artificial Sequence: Synthetic oligonucleotide
augugccacgagaaauuga

SEQ ID NO: 38444 - RNA, 19 nt, Artificial Sequence
  Description of Artificial Sequence: Synthetic oligonucleotide
agcgggaacccugcgcaca

SEQ ID NO: 38445 - RNA, 19 nt, Artificial Sequence
  Description of Artificial Sequence: Synthetic oligonucleotide
gaacggagcgcgcguccuc

SEQ ID NO: 38446 - RNA, 19 nt, Artificial Sequence
  Description of Artificial Sequence: Synthetic oligonucleotide
guacuaacccacaguuuua

SEQ ID NO: 38447 - RNA, 19 nt, Artificial Sequence
  Description of Artificial Sequence: Synthetic oligonucleotide
guagagucucucauucggu

SEQ ID NO: 38448 - RNA, 19 nt, Artificial Sequence
  Description of Artificial Sequence: Synthetic oligonucleotide
guucccgagggcgcugccc

SEQ ID NO: 38449 - RNA, 19 nt, Artificial Sequence
  Description of Artificial Sequence: Synthetic oligonucleotide
ggaacccugcgcacacgcg

SEQ ID NO: 38450 - RNA, 19 nt, Artificial Sequence
  Description of Artificial Sequence: Synthetic oligonucleotide
cuuguggaccagugaguua

SEQ ID NO: 38451 - RNA, 19 nt, Artificial Sequence
  Description of Artificial Sequence: Synthetic oligonucleotide
agcuccugaucggcuaagu

SEQ ID NO: 38452 - RNA, 19 nt, Artificial Sequence
  Description of Artificial Sequence: Synthetic oligonucleotide
agacgacaaugaagucuag

SEQ ID NO: 38453 - RNA, 19 nt, Artificial Sequence
  Description of Artificial Sequence: Synthetic oligonucleotide
gggaacggagcgcgcgucc

SEQ ID NO: 38454 - RNA, 19 nt, Artificial Sequence
  Description of Artificial Sequence: Synthetic oligonucleotide
cagaagcgacaguuuguaa

SEQ ID NO: 38455 - RNA, 19 nt, Artificial Sequence
  Description of Artificial Sequence: Synthetic oligonucleotide
cgaauucgcaacccaaaca

SEQ ID NO: 38456 - RNA, 19 nt, Artificial Sequence
  Description of Artificial Sequence: Synthetic oligonucleotide
ccgcaaaugugguauugca

SEQ ID NO: 38457 - RNA, 19 nt, Artificial Sequence
  Description of Artificial Sequence: Synthetic oligonucleotide
aggacgaccuacagauuuu

SEQ ID NO: 38458 - RNA, 19 nt, Artificial Sequence
  Description of Artificial Sequence: Synthetic oligonucleotide
caagguccgccacacuaua

SEQ ID NO: 38459 - RNA, 19 nt, Artificial Sequence
  Description of Artificial Sequence: Synthetic oligonucleotide
cucuucgaauuuacaugcu

SEQ ID NO: 38460 - RNA, 19 nt, Artificial Sequence
  Description of Artificial Sequence: Synthetic oligonucleotide
ggcuauuacgugacacauc

SEQ ID NO: 38461 - RNA, 19 nt, Artificial Sequence
  Description of Artificial Sequence: Synthetic oligonucleotide
caucuagcuaggacauccu

SEQ ID NO: 38462 - RNA, 19 nt, Artificial Sequence
  Description of Artificial Sequence: Synthetic oligonucleotide
cugugcgaguucuuuuccu

SEQ ID NO: 38463 - RNA, 19 nt, Artificial Sequence
  Description of Artificial Sequence: Synthetic oligonucleotide
uaugggccaggaggacgac

SEQ ID NO: 38464 - RNA, 19 nt, Artificial Sequence
  Description of Artificial Sequence: Synthetic oligonucleotide
cgacaguuuguaauuugca

SEQ ID NO: 38465 - RNA, 19 nt, Artificial Sequence
  Description of Artificial Sequence: Synthetic oligonucleotide
ggcauucgguccuuucuua

SEQ ID NO: 38466 - RNA, 19 nt, Artificial Sequence
  Description of Artificial Sequence: Synthetic oligonucleotide
gacguaaaggagaccgcuu

SEQ ID NO: 38467 - RNA, 19 nt, Artificial Sequence
  Description of Artificial Sequence: Synthetic oligonucleotide
ccuuacccaaagguggcuc

SEQ ID NO: 38468 - RNA, 19 nt, Artificial Sequence
  Description of Artificial Sequence: Synthetic oligonucleotide
cccagcgggaacccugcgc

SEQ ID NO: 38469 - RNA, 19 nt, Artificial Sequence
  Description of Artificial Sequence: Synthetic oligonucleotide
guauugcagcaggccaaga

SEQ ID NO: 38470 - RNA, 19 nt, Artificial Sequence
  Description of Artificial Sequence: Synthetic oligonucleotide
cucggggacgaggguccgg

SEQ ID NO: 38471 - RNA, 19 nt, Artificial Sequence
  Description of Artificial Sequence: Synthetic oligonucleotide
gaucacgccuaaagacggu

SEQ ID NO: 38472 - RNA, 19 nt, Artificial Sequence
  Description of Artificial Sequence: Synthetic oligonucleotide
gcgggaacccugcgcacac

SEQ ID NO: 38473 - RNA, 19 nt, Artificial Sequence
  Description of Artificial Sequence: Synthetic oligonucleotide
ggguaucgaaauaaauuuu

SEQ ID NO: 38474 - RNA, 19 nt, Artificial Sequence
  Description of Artificial Sequence: Synthetic oligonucleotide
ccaacgcaggauucucuga

SEQ ID NO: 38475 - RNA, 19 nt, Artificial Sequence
  Description of Artificial Sequence: Synthetic oligonucleotide
cugccccgcgaguccgggc

SEQ ID NO: 38476 - RNA, 19 nt, Artificial Sequence
  Description of Artificial Sequence: Synthetic oligonucleotide
cagcucuguuucaguaugu

SEQ ID NO: 38477 - RNA, 19 nt, Artificial Sequence
  Description of Artificial Sequence: Synthetic oligonucleotide
ccuauccuagaaacauucu

SEQ ID NO: 38478 - RNA, 19 nt, Artificial Sequence
  Description of Artificial Sequence: Synthetic oligonucleotide
ccuaaagacgguucagcuu

SEQ ID NO: 38479 - RNA, 19 nt, Artificial Sequence
  Description of Artificial Sequence: Synthetic oligonucleotide
cacgagguacugcaccuuu

SEQ ID NO: 38480 - RNA, 19 nt, Artificial Sequence
  Description of Artificial Sequence: Synthetic oligonucleotide
gcuuguggaccagugaguu

SEQ ID NO: 38481 - RNA, 19 nt, Artificial Sequence
  Description of Artificial Sequence: Synthetic oligonucleotide
ggguccgggaacggagcgc

SEQ ID NO: 38482 - RNA, 19 nt, Artificial Sequence
  Description of Artificial Sequence: Synthetic oligonucleotide
cuauuacgugacacaucuu

SEQ ID NO: 38483 - RNA, 19 nt, Artificial Sequence
  Description of Artificial Sequence: Synthetic oligonucleotide
ccacacuauaggguaaugu

SEQ ID NO: 38484 - RNA, 19 nt, Artificial Sequence
  Description of Artificial Sequence: Synthetic oligonucleotide
ccauuacccuagauauaaa

SEQ ID NO: 38485 - RNA, 19 nt, Artificial Sequence
  Description of Artificial Sequence: Synthetic oligonucleotide
ccgcuucauacaggaaaac

SEQ ID NO: 38486 - RNA, 19 nt, Artificial Sequence
  Description of Artificial Sequence: Synthetic oligonucleotide
ccgugagguccacaucuga

SEQ ID NO: 38487 - RNA, 19 nt, Artificial Sequence
  Description of Artificial Sequence: Synthetic oligonucleotide
gggugcaaucuaucccagu

SEQ ID NO: 38488 - RNA, 19 nt, Artificial Sequence
  Description of Artificial Sequence: Synthetic oligonucleotide
cgaguccgggcacucccug

SEQ ID NO: 38489 - RNA, 19 nt, Artificial Sequence
  Description of Artificial Sequence: Synthetic oligonucleotide
cguaaaggagaccgcuugu

SEQ ID NO: 38490 - RNA, 19 nt, Artificial Sequence
  Description of Artificial Sequence: Synthetic oligonucleotide
ggaacggagcgcgcguccu

SEQ ID NO: 38491 - RNA, 19 nt, Artificial Sequence
  Description of Artificial Sequence: Synthetic oligonucleotide
cgggaauuacauuuccauu

SEQ ID NO: 38492 - RNA, 19 nt, Artificial Sequence
  Description of Artificial Sequence: Synthetic oligonucleotide
ggucacccgacgagccaaa

SEQ ID NO: 38493 - RNA, 19 nt, Artificial Sequence
  Description of Artificial Sequence: Synthetic oligonucleotide
ccgccacacuauaggguaa

SEQ ID NO: 38494 - RNA, 19 nt, Artificial Sequence
  Description of Artificial Sequence: Synthetic oligonucleotide
cgacgagccaaaacucggu

SEQ ID NO: 38495 - RNA, 19 nt, Artificial Sequence
  Description of Artificial Sequence: Synthetic oligonucleotide
cgggaacccugcgcacacg

SEQ ID NO: 38496 - RNA, 19 nt, Artificial Sequence
  Description of Artificial Sequence: Synthetic oligonucleotide
cccgcgaguccgggcacuc

SEQ ID NO: 38497 - RNA, 19 nt, Artificial Sequence
  Description of Artificial Sequence: Synthetic oligonucleotide
cgggaacggagcgcgcguc

SEQ ID NO: 38498 - RNA, 19 nt, Artificial Sequence
  Description of Artificial Sequence: Synthetic oligonucleotide
cggcuaaguuauucaggau

SEQ ID NO: 38499 - RNA, 19 nt, Artificial Sequence
  Description of Artificial Sequence: Synthetic oligonucleotide
ccgggaacggagcgcgcgu

SEQ ID NO: 38500 - RNA, 19 nt, Artificial Sequence
  Description of Artificial Sequence: Synthetic oligonucleotide
cggagcgcgcguccucaca

SEQ ID NO: 38501 - RNA, 19 nt, Artificial Sequence
  Description of Artificial Sequence: Synthetic oligonucleotide
ccugaucggcuaaguuauu

SEQ ID NO: 38502 - RNA, 19 nt, Artificial Sequence
  Description of Artificial Sequence: Synthetic oligonucleotide
ccccgcgaguccgggcacu

SEQ ID NO: 38503 - RNA, 19 nt, Artificial Sequence
  Description of Artificial Sequence: Synthetic oligonucleotide
aauauauauauauauauau

SEQ ID NO: 38504 - RNA, 19 nt, Artificial Sequence
  Description of Artificial Sequence: Synthetic oligonucleotide
uauuuaaguaccaagagca

SEQ ID NO: 38505 - RNA, 19 nt, Artificial Sequence
  Description of Artificial Sequence: Synthetic oligonucleotide
uauauauauauauauauac

SEQ ID NO: 38506 - RNA, 19 nt, Artificial Sequence
  Description of Artificial Sequence: Synthetic oligonucleotide
aacaacuugauacuauggc

SEQ ID NO: 38507 - RNA, 19 nt, Artificial Sequence
  Description of Artificial Sequence: Synthetic oligonucleotide
aaauauuaaguguauauga

SEQ ID NO: 38508 - RNA, 19 nt, Artificial Sequence
  Description of Artificial Sequence: Synthetic oligonucleotide
uuuaaauauauauauauau

SEQ ID NO: 38509 - RNA, 19 nt, Artificial Sequence
  Description of Artificial Sequence: Synthetic oligonucleotide
aguauauuccuuuaaagag

SEQ ID NO: 38510 - RNA, 19 nt, Artificial Sequence
  Description of Artificial Sequence: Synthetic oligonucleotide
ucuaaguucggcaucaggg

SEQ ID NO: 38511 - RNA, 19 nt, Artificial Sequence
  Description of Artificial Sequence: Synthetic oligonucleotide
auauuuaaguaccaagagc

SEQ ID NO: 38512 - RNA, 19 nt, Artificial Sequence
  Description of Artificial Sequence: Synthetic oligonucleotide
uauauauauauauauauau

SEQ ID NO: 38513 - RNA, 19 nt, Artificial Sequence
  Description of Artificial Sequence: Synthetic oligonucleotide
uauauauauauauacauau

SEQ ID NO: 38514 - RNA, 19 nt, Artificial Sequence
  Description of Artificial Sequence: Synthetic oligonucleotide
uaaauauauauauauauau

SEQ ID NO: 38515 - RNA, 19 nt, Artificial Sequence
  Description of Artificial Sequence: Synthetic oligonucleotide
uauauauauauauauacau

SEQ ID NO: 38516 - RNA, 19 nt, Artificial Sequence
  Description of Artificial Sequence: Synthetic oligonucleotide
uguuuaacaaacaacuuga

SEQ ID NO: 38517 - RNA, 19 nt, Artificial Sequence
  Description of Artificial Sequence: Synthetic oligonucleotide
uauauauauauacauauuu

SEQ ID NO: 38518 - RNA, 19 nt, Artificial Sequence
  Description of Artificial Sequence: Synthetic oligonucleotide
aacgauacaagacuuauaa

SEQ ID NO: 38519 - RNA, 19 nt, Artificial Sequence
  Description of Artificial Sequence: Synthetic oligonucleotide
acaucaaagauuauaaaac

SEQ ID NO: 38520 - RNA, 19 nt, Artificial Sequence
  Description of Artificial Sequence: Synthetic oligonucleotide
uuccaugcaaacaacacag

SEQ ID NO: 38521 - RNA, 19 nt, Artificial Sequence
  Description of Artificial Sequence: Synthetic oligonucleotide
uuugcuauggauuuagcgu

SEQ ID NO: 38522 - RNA, 19 nt, Artificial Sequence
  Description of Artificial Sequence: Synthetic oligonucleotide
uuaaauauauauauauaua

SEQ ID NO: 38523 - RNA, 19 nt, Artificial Sequence
  Description of Artificial Sequence: Synthetic oligonucleotide
uuuagcguuacccacuuug

SEQ ID NO: 38524 - RNA, 19 nt, Artificial Sequence
  Description of Artificial Sequence: Synthetic oligonucleotide
uacgccauguagaugaacg

SEQ ID NO: 38525 - RNA, 19 nt, Artificial Sequence
  Description of Artificial Sequence: Synthetic oligonucleotide
ugcuuaacgacaaucagga

SEQ ID NO: 38526 - RNA, 19 nt, Artificial Sequence
  Description of Artificial Sequence: Synthetic oligonucleotide
uuugaaguucauaaugggc

SEQ ID NO: 38527 - RNA, 19 nt, Artificial Sequence
  Description of Artificial Sequence: Synthetic oligonucleotide
uccggauuaacugagagag

SEQ ID NO: 38528 - RNA, 19 nt, Artificial Sequence
  Description of Artificial Sequence: Synthetic oligonucleotide
uccauuugacaugagaugg

SEQ ID NO: 38529 - RNA, 19 nt, Artificial Sequence
  Description of Artificial Sequence: Synthetic oligonucleotide
aaaaucucuacuaacucag

SEQ ID NO: 38530 - RNA, 19 nt, Artificial Sequence
  Description of Artificial Sequence: Synthetic oligonucleotide
ugaauuaaguguauuagua

SEQ ID NO: 38531 - RNA, 19 nt, Artificial Sequence
  Description of Artificial Sequence: Synthetic oligonucleotide
uauuaaguguauaugaauu

SEQ ID NO: 38532 - RNA, 19 nt, Artificial Sequence
  Description of Artificial Sequence: Synthetic oligonucleotide
uucguauaacaaaacuugg

SEQ ID NO: 38533 - RNA, 19 nt, Artificial Sequence
  Description of Artificial Sequence: Synthetic oligonucleotide
ugugacagcaccccagucg

SEQ ID NO: 38534 - RNA, 19 nt, Artificial Sequence
  Description of Artificial Sequence: Synthetic oligonucleotide
aaccgggacaacuuucugc

SEQ ID NO: 38535 - RNA, 19 nt, Artificial Sequence
  Description of Artificial Sequence: Synthetic oligonucleotide
uaguaacacacuuaacacg

SEQ ID NO: 38536 - RNA, 19 nt, Artificial Sequence
  Description of Artificial Sequence: Synthetic oligonucleotide
uuaacgacaaucaggauuu

SEQ ID NO: 38537 - RNA, 19 nt, Artificial Sequence
  Description of Artificial Sequence: Synthetic oligonucleotide
ugauuagaaauuucaaaga

SEQ ID NO: 38538 - RNA, 19 nt, Artificial Sequence
  Description of Artificial Sequence: Synthetic oligonucleotide
augaggauagacuacaccu

SEQ ID NO: 38539 - RNA, 19 nt, Artificial Sequence
  Description of Artificial Sequence: Synthetic oligonucleotide
uuuuaaauauauauauaua

SEQ ID NO: 38540 - RNA, 19 nt, Artificial Sequence
  Description of Artificial Sequence: Synthetic oligonucleotide
aaucaaaacaucacagcuc

SEQ ID NO: 38541 - RNA, 19 nt, Artificial Sequence
  Description of Artificial Sequence: Synthetic oligonucleotide
uaauuggcaagcaacucag

SEQ ID NO: 38542 - RNA, 19 nt, Artificial Sequence
  Description of Artificial Sequence: Synthetic oligonucleotide
ucuuugaccaguuuacuga

SEQ ID NO: 38543 - RNA, 19 nt, Artificial Sequence
  Description of Artificial Sequence: Synthetic oligonucleotide
aucaaaacaucacagcucu

SEQ ID NO: 38544 - RNA, 19 nt, Artificial Sequence
  Description of Artificial Sequence: Synthetic oligonucleotide
aaucuauugauaaaauacu

SEQ ID NO: 38545 - RNA, 19 nt, Artificial Sequence
  Description of Artificial Sequence: Synthetic oligonucleotide
gguaagaugagcuuuauga

SEQ ID NO: 38546 - RNA, 19 nt, Artificial Sequence
  Description of Artificial Sequence: Synthetic oligonucleotide
uccaauauaaggcgucggg

SEQ ID NO: 38547 - RNA, 19 nt, Artificial Sequence
  Description of Artificial Sequence: Synthetic oligonucleotide
acccauaaauuuaacaacc

SEQ ID NO: 38548 - RNA, 19 nt, Artificial Sequence
  Description of Artificial Sequence: Synthetic oligonucleotide
uaaauuuugacauggcaua

SEQ ID NO: 38549 - RNA, 19 nt, Artificial Sequence
  Description of Artificial Sequence: Synthetic oligonucleotide
ucagauacuuuuauguccu

SEQ ID NO: 38550 - RNA, 19 nt, Artificial Sequence
  Description of Artificial Sequence: Synthetic oligonucleotide
guuacuacucauguuacgg

SEQ ID NO: 38551 - RNA, 19 nt, Artificial Sequence
  Description of Artificial Sequence: Synthetic oligonucleotide
aagaagcuaagagugcuac

SEQ ID NO: 38552 - RNA, 19 nt, Artificial Sequence
  Description of Artificial Sequence: Synthetic oligonucleotide
aacuugauacuauggcauc

SEQ ID NO: 38553 - RNA, 19 nt, Artificial Sequence
  Description of Artificial Sequence: Synthetic oligonucleotide
acaguaauuggcaagcaac

SEQ ID NO: 38554 - RNA, 19 nt, Artificial Sequence
  Description of Artificial Sequence: Synthetic oligonucleotide
guucguauaacaaaacuug

SEQ ID NO: 38555 - RNA, 19 nt, Artificial Sequence
  Description of Artificial Sequence: Synthetic oligonucleotide
caaaacuuggcguuugagc

SEQ ID NO: 38556 - RNA, 19 nt, Artificial Sequence
  Description of Artificial Sequence: Synthetic oligonucleotide
ugagguucguauaacaaaa

SEQ ID NO: 38557 - RNA, 19 nt, Artificial Sequence
  Description of Artificial Sequence: Synthetic oligonucleotide
aacaacugcuuuauacgcc

SEQ ID NO: 38558 - RNA, 19 nt, Artificial Sequence
  Description of Artificial Sequence: Synthetic oligonucleotide
agcauaucacaguaauugg

SEQ ID NO: 38559 - RNA, 19 nt, Artificial Sequence
  Description of Artificial Sequence: Synthetic oligonucleotide
auaugguagcaucauuaac

SEQ ID NO: 38560 - RNA, 19 nt, Artificial Sequence
  Description of Artificial Sequence: Synthetic oligonucleotide
acuaaagaccauaaaguuc

SEQ ID NO: 38561 - RNA, 19 nt, Artificial Sequence
  Description of Artificial Sequence: Synthetic oligonucleotide
acaacuugauacuauggca

SEQ ID NO: 38562 - RNA, 19 nt, Artificial Sequence
  Description of Artificial Sequence: Synthetic oligonucleotide
uuucguuugaucaugccuu

SEQ ID NO: 38563 - RNA, 19 nt, Artificial Sequence
  Description of Artificial Sequence: Synthetic oligonucleotide
gucguuuacaugaaaacag

SEQ ID NO: 38564 - RNA, 19 nt, Artificial Sequence
  Description of Artificial Sequence: Synthetic oligonucleotide
auuucguuugaucaugccu

SEQ ID NO: 38565 - RNA, 19 nt, Artificial Sequence
  Description of Artificial Sequence: Synthetic oligonucleotide
aaauauauauauauauaua

SEQ ID NO: 38566 - RNA, 19 nt, Artificial Sequence
  Description of Artificial Sequence: Synthetic oligonucleotide
gauagcaaaucuuuuguaa

SEQ ID NO: 38567 - RNA, 19 nt, Artificial Sequence
  Description of Artificial Sequence: Synthetic oligonucleotide
uguauuaguaacacacuua

SEQ ID NO: 38568 - RNA, 19 nt, Artificial Sequence
  Description of Artificial Sequence: Synthetic oligonucleotide
agagcaagcuaaguguugc

SEQ ID NO: 38569 - RNA, 19 nt, Artificial Sequence
  Description of Artificial Sequence: Synthetic oligonucleotide
aaugccaacuuauuauuuu

SEQ ID NO: 38570 - RNA, 19 nt, Artificial Sequence
  Description of Artificial Sequence: Synthetic oligonucleotide
uaaguucggcaucagggag

SEQ ID NO: 38571 - RNA, 19 nt, Artificial Sequence
  Description of Artificial Sequence: Synthetic oligonucleotide
auauauauauauauauaca

SEQ ID NO: 38572 - RNA, 19 nt, Artificial Sequence
  Description of Artificial Sequence: Synthetic oligonucleotide
caucaugcuaacuaaugug

SEQ ID NO: 38573 - RNA, 19 nt, Artificial Sequence
  Description of Artificial Sequence: Synthetic oligonucleotide
auaaauuuugacauggcau

SEQ ID NO: 38574 - RNA, 19 nt, Artificial Sequence
  Description of Artificial Sequence: Synthetic oligonucleotide
uacuacucauguuacggcc

SEQ ID NO: 38575 - RNA, 19 nt, Artificial Sequence
  Description of Artificial Sequence: Synthetic oligonucleotide
aguaacacacuuaacacgu

SEQ ID NO: 38576 - RNA, 19 nt, Artificial Sequence
  Description of Artificial Sequence: Synthetic oligonucleotide
auauuaacugaaucagcug

SEQ ID NO: 38577 - RNA, 19 nt, Artificial Sequence
  Description of Artificial Sequence: Synthetic oligonucleotide
agcaacucagggcauuucg

SEQ ID NO: 38578 - RNA, 19 nt, Artificial Sequence
  Description of Artificial Sequence: Synthetic oligonucleotide
uacgccuuaucucuugcag

SEQ ID NO: 38579 - RNA, 19 nt, Artificial Sequence
  Description of Artificial Sequence: Synthetic oligonucleotide
acuugauacuauggcaucc

SEQ ID NO: 38580 - RNA, 19 nt, Artificial Sequence
  Description of Artificial Sequence: Synthetic oligonucleotide
uccugcuuaacgacaauca

SEQ ID NO: 38581 - RNA, 19 nt, Artificial Sequence
  Description of Artificial Sequence: Synthetic oligonucleotide
aaggcgucggguaagauga

SEQ ID NO: 38582 - RNA, 19 nt, Artificial Sequence
  Description of Artificial Sequence: Synthetic oligonucleotide
uucuaaguucggcaucagg

SEQ ID NO: 38583 - RNA, 19 nt, Artificial Sequence
  Description of Artificial Sequence: Synthetic oligonucleotide
ucguuuacaugaaaacaga

SEQ ID NO: 38584 - RNA, 19 nt, Artificial Sequence
  Description of Artificial Sequence: Synthetic oligonucleotide
aaugacuuaccuauaccca

SEQ ID NO: 38585 - RNA, 19 nt, Artificial Sequence
  Description of Artificial Sequence: Synthetic oligonucleotide
aaagcuacuaaagaccaua

SEQ ID NO: 38586 - RNA, 19 nt, Artificial Sequence
  Description of Artificial Sequence: Synthetic oligonucleotide
ucucuugcaguaaggaaac

SEQ ID NO: 38587 - RNA, 19 nt, Artificial Sequence
  Description of Artificial Sequence: Synthetic oligonucleotide
uuacuacucauguuacggc

SEQ ID NO: 38588 - RNA, 19 nt, Artificial Sequence
  Description of Artificial Sequence: Synthetic oligonucleotide
auaaucugcuggcauacca

SEQ ID NO: 38589 - RNA, 19 nt, Artificial Sequence
  Description of Artificial Sequence: Synthetic oligonucleotide
ugcaguugagcauugcuaa

SEQ ID NO: 38590 - RNA, 19 nt, Artificial Sequence
  Description of Artificial Sequence: Synthetic oligonucleotide
aaacgugguuacuuccaag

SEQ ID NO: 38591 - RNA, 19 nt, Artificial Sequence
  Description of Artificial Sequence: Synthetic oligonucleotide
accgaagcaacauucauua

SEQ ID NO: 38592 - RNA, 19 nt, Artificial Sequence
  Description of Artificial Sequence: Synthetic oligonucleotide
ugugcaaguauauuccuuu

SEQ ID NO: 38593 - RNA, 19 nt, Artificial Sequence
  Description of Artificial Sequence: Synthetic oligonucleotide
uugagguucguauaacaaa

SEQ ID NO: 38594 - RNA, 19 nt, Artificial Sequence
  Description of Artificial Sequence: Synthetic oligonucleotide
gucauacugaccuacuuca

SEQ ID NO: 38595 - RNA, 19 nt, Artificial Sequence
  Description of Artificial Sequence: Synthetic oligonucleotide
cauguuacggccaacaacu

SEQ ID NO: 38596 - RNA, 19 nt, Artificial Sequence
  Description of Artificial Sequence: Synthetic oligonucleotide
agcaauucucucauuguac

SEQ ID NO: 38597 - RNA, 19 nt, Artificial Sequence
  Description of Artificial Sequence: Synthetic oligonucleotide
ugcaaucaaugacuuaccu

SEQ ID NO: 38598 - RNA, 19 nt, Artificial Sequence
  Description of Artificial Sequence: Synthetic oligonucleotide
uaaggcgucggguaagaug

SEQ ID NO: 38599 - RNA, 19 nt, Artificial Sequence
  Description of Artificial Sequence: Synthetic oligonucleotide
aacgcucucaaacaauguu

SEQ ID NO: 38600 - RNA, 19 nt, Artificial Sequence
  Description of Artificial Sequence: Synthetic oligonucleotide
caauaaauuuugacauggc

SEQ ID NO: 38601 - RNA, 19 nt, Artificial Sequence
  Description of Artificial Sequence: Synthetic oligonucleotide
uacaccuuaggaacuccag

SEQ ID NO: 38602 - RNA, 19 nt, Artificial Sequence
  Description of Artificial Sequence: Synthetic oligonucleotide
cauaccaacuucucucagc

SEQ ID NO: 38603 - RNA, 19 nt, Artificial Sequence
  Description of Artificial Sequence: Synthetic oligonucleotide
cauacagaaacugcucccg

SEQ ID NO: 38604 - RNA, 19 nt, Artificial Sequence
  Description of Artificial Sequence: Synthetic oligonucleotide
agguucguauaacaaaacu

SEQ ID NO: 38605 - RNA, 19 nt, Artificial Sequence
  Description of Artificial Sequence: Synthetic oligonucleotide
uaccucuaccuuuaauugc

SEQ ID NO: 38606 - RNA, 19 nt, Artificial Sequence
  Description of Artificial Sequence: Synthetic oligonucleotide
ugcuaacuaaugugacugg

SEQ ID NO: 38607 - RNA, 19 nt, Artificial Sequence
  Description of Artificial Sequence: Synthetic oligonucleotide
uaaguguauuaguaacaca

SEQ ID NO: 38608 - RNA, 19 nt, Artificial Sequence
  Description of Artificial Sequence: Synthetic oligonucleotide
agucguuuacaugaaaaca

SEQ ID NO: 38609 - RNA, 19 nt, Artificial Sequence
  Description of Artificial Sequence: Synthetic oligonucleotide
caguucaguaggaagugag

SEQ ID NO: 38610 - RNA, 19 nt, Artificial Sequence
  Description of Artificial Sequence: Synthetic oligonucleotide
uccuggguucuuaauauuc

SEQ ID NO: 38611 - RNA, 19 nt, Artificial Sequence
  Description of Artificial Sequence: Synthetic oligonucleotide
uaacacguuugcuuuguga

SEQ ID NO: 38612 - RNA, 19 nt, Artificial Sequence
  Description of Artificial Sequence: Synthetic oligonucleotide
uucggcaucagggaguucu

SEQ ID NO: 38613 - RNA, 19 nt, Artificial Sequence
  Description of Artificial Sequence: Synthetic oligonucleotide
agaugagcuuuaugauacc

SEQ ID NO: 38614 - RNA, 19 nt, Artificial Sequence
  Description of Artificial Sequence: Synthetic oligonucleotide
uugcuauggauuuagcguu

SEQ ID NO: 38615 - RNA, 19 nt, Artificial Sequence
  Description of Artificial Sequence: Synthetic oligonucleotide
ugauaugcuccuccaaauc

SEQ ID NO: 38616 - RNA, 19 nt, Artificial Sequence
  Description of Artificial Sequence: Synthetic oligonucleotide
uagucguuuguaagguaag

SEQ ID NO: 38617 - RNA, 19 nt, Artificial Sequence
  Description of Artificial Sequence: Synthetic oligonucleotide
uauacgccuuaucucuugc

SEQ ID NO: 38618 - RNA, 19 nt, Artificial Sequence
  Description of Artificial Sequence: Synthetic oligonucleotide
uguuacggccaacaacucu

SEQ ID NO: 38619 - RNA, 19 nt, Artificial Sequence
  Description of Artificial Sequence: Synthetic oligonucleotide
auauauauauauauauaua

SEQ ID NO: 38620 - RNA, 19 nt, Artificial Sequence
  Description of Artificial Sequence: Synthetic oligonucleotide
cugaaacgugguuacuucc

SEQ ID NO: 38621 - RNA, 19 nt, Artificial Sequence
  Description of Artificial Sequence: Synthetic oligonucleotide
auauauauauauauacaua

SEQ ID NO: 38622 - RNA, 19 nt, Artificial Sequence
  Description of Artificial Sequence: Synthetic oligonucleotide
ccuuaauagcauaucacag

SEQ ID NO: 38623 - RNA, 19 nt, Artificial Sequence
  Description of Artificial Sequence: Synthetic oligonucleotide
cucgauuugcucuuuuauc

SEQ ID NO: 38624 - RNA, 19 nt, Artificial Sequence
  Description of Artificial Sequence: Synthetic oligonucleotide
uuauacgccuuaucucuug

SEQ ID NO: 38625 - RNA, 19 nt, Artificial Sequence
  Description of Artificial Sequence: Synthetic oligonucleotide
ugcuuaacgguguuuuccu

SEQ ID NO: 38626 - RNA, 19 nt, Artificial Sequence
  Description of Artificial Sequence: Synthetic oligonucleotide
auauucuuagcugaacuau

SEQ ID NO: 38627 - RNA, 19 nt, Artificial Sequence
  Description of Artificial Sequence: Synthetic oligonucleotide
augacuuaccuauacccau

SEQ ID NO: 38628 - RNA, 19 nt, Artificial Sequence
  Description of Artificial Sequence: Synthetic oligonucleotide
ggaaacgaggaucaucuug

SEQ ID NO: 38629 - RNA, 19 nt, Artificial Sequence
  Description of Artificial Sequence: Synthetic oligonucleotide
ggauagacuacaccuuagg

SEQ ID NO: 38630 - RNA, 19 nt, Artificial Sequence
  Description of Artificial Sequence: Synthetic oligonucleotide
ucaaaccgggacaacuuuc

SEQ ID NO: 38631 - RNA, 19 nt, Artificial Sequence
  Description of Artificial Sequence: Synthetic oligonucleotide
ccuugugcaaguauauucc

SEQ ID NO: 38632 - RNA, 19 nt, Artificial Sequence
  Description of Artificial Sequence: Synthetic oligonucleotide
cuuaccuauacccauaaau

SEQ ID NO: 38633 - RNA, 19 nt, Artificial Sequence
  Description of Artificial Sequence: Synthetic oligonucleotide
uuauguaaucaaaguccaa

SEQ ID NO: 38634 - RNA, 19 nt, Artificial Sequence
  Description of Artificial Sequence: Synthetic oligonucleotide
cuaacuaaugugacuggca

SEQ ID NO: 38635 - RNA, 19 nt, Artificial Sequence
  Description of Artificial Sequence: Synthetic oligonucleotide
augauaugcuccuccaaau

SEQ ID NO: 38636 - RNA, 19 nt, Artificial Sequence
  Description of Artificial Sequence: Synthetic oligonucleotide
acucgauuugcucuuuuau

SEQ ID NO: 38637 - RNA, 19 nt, Artificial Sequence
  Description of Artificial Sequence: Synthetic oligonucleotide
gucguuuguaagguaaggc

SEQ ID NO: 38638 - RNA, 19 nt, Artificial Sequence
  Description of Artificial Sequence: Synthetic oligonucleotide
aacaagaaccccacccuca

SEQ ID NO: 38639 - RNA, 19 nt, Artificial Sequence
  Description of Artificial Sequence: Synthetic oligonucleotide
cuaaguucggcaucaggga

SEQ ID NO: 38640 - RNA, 19 nt, Artificial Sequence
  Description of Artificial Sequence: Synthetic oligonucleotide
uucuuacugcauugugaag

SEQ ID NO: 38641 - RNA, 19 nt, Artificial Sequence
  Description of Artificial Sequence: Synthetic oligonucleotide
cugcaaucaaugacuuacc

SEQ ID NO: 38642 - RNA, 19 nt, Artificial Sequence
  Description of Artificial Sequence: Synthetic oligonucleotide
cauuucguuugaucaugcc

SEQ ID NO: 38643 - RNA, 19 nt, Artificial Sequence
  Description of Artificial Sequence: Synthetic oligonucleotide
cauuugacaugagauggug

SEQ ID NO: 38644 - RNA, 19 nt, Artificial Sequence
  Description of Artificial Sequence: Synthetic oligonucleotide
uggagacuuuaauauaauu

SEQ ID NO: 38645 - RNA, 19 nt, Artificial Sequence
  Description of Artificial Sequence: Synthetic oligonucleotide
cuuaacgacaaucaggauu

SEQ ID NO: 38646 - RNA, 19 nt, Artificial Sequence
  Description of Artificial Sequence: Synthetic oligonucleotide
aguugagcauugcuaauuu

SEQ ID NO: 38647 - RNA, 19 nt, Artificial Sequence
  Description of Artificial Sequence: Synthetic oligonucleotide
uuaacacguuugcuuugug

SEQ ID NO: 38648 - RNA, 19 nt, Artificial Sequence
  Description of Artificial Sequence: Synthetic oligonucleotide
aacgacaaucaggauuugu

SEQ ID NO: 38649 - RNA, 19 nt, Artificial Sequence
  Description of Artificial Sequence: Synthetic oligonucleotide
aaacuuggcguuugagcuu

SEQ ID NO: 38650 - RNA, 19 nt, Artificial Sequence
  Description of Artificial Sequence: Synthetic oligonucleotide
gguuacuacucauguuacg

SEQ ID NO: 38651 - RNA, 19 nt, Artificial Sequence
  Description of Artificial Sequence: Synthetic oligonucleotide
gcuguuaagagugugcaac

SEQ ID NO: 38652 - RNA, 19 nt, Artificial Sequence
  Description of Artificial Sequence: Synthetic oligonucleotide
auauauauauauacauauu

SEQ ID NO: 38653 - RNA, 19 nt, Artificial Sequence
  Description of Artificial Sequence: Synthetic oligonucleotide
auuaacugaaucagcuggu

SEQ ID NO: 38654 - RNA, 19 nt, Artificial Sequence
  Description of Artificial Sequence: Synthetic oligonucleotide
uuuauacgccuuaucucuu

SEQ ID NO: 38655 - RNA, 19 nt, Artificial Sequence
  Description of Artificial Sequence: Synthetic oligonucleotide
cuaugcuacagguuuuaga

SEQ ID NO: 38656 - RNA, 19 nt, Artificial Sequence
  Description of Artificial Sequence: Synthetic oligonucleotide
agggcuaaugauaucacau

SEQ ID NO: 38657 - RNA, 19 nt, Artificial Sequence
  Description of Artificial Sequence: Synthetic oligonucleotide
aucuauugauaaaauacuu

SEQ ID NO: 38658 - RNA, 19 nt, Artificial Sequence
  Description of Artificial Sequence: Synthetic oligonucleotide
aguguauuaguaacacacu

SEQ ID NO: 38659 - RNA, 19 nt, Artificial Sequence
  Description of Artificial Sequence: Synthetic oligonucleotide
ugguguugacaacuucacu

SEQ ID NO: 38660 - RNA, 19 nt, Artificial Sequence
  Description of Artificial Sequence: Synthetic oligonucleotide
caauauaaggcgucgggua

SEQ ID NO: 38661 - RNA, 19 nt, Artificial Sequence
  Description of Artificial Sequence: Synthetic oligonucleotide
uucgauucaggcugaguuu

SEQ ID NO: 38662 - RNA, 19 nt, Artificial Sequence
  Description of Artificial Sequence: Synthetic oligonucleotide
gcucuaucccauuaggaac

SEQ ID NO: 38663 - RNA, 19 nt, Artificial Sequence
  Description of Artificial Sequence: Synthetic oligonucleotide
uaccuuuaauugcaauuuu

SEQ ID NO: 38664 - RNA, 19 nt, Artificial Sequence
  Description of Artificial Sequence: Synthetic oligonucleotide
uccaacgauacaagacuua

SEQ ID NO: 38665 - RNA, 19 nt, Artificial Sequence
  Description of Artificial Sequence: Synthetic oligonucleotide
cguuuguaagguaaggcag

SEQ ID NO: 38666 - RNA, 19 nt, Artificial Sequence
  Description of Artificial Sequence: Synthetic oligonucleotide
uaacaaccgaagcaacauu

SEQ ID NO: 38667 - RNA, 19 nt, Artificial Sequence
  Description of Artificial Sequence: Synthetic oligonucleotide
uauagucguuuguaaggua

SEQ ID NO: 38668 - RNA, 19 nt, Artificial Sequence
  Description of Artificial Sequence: Synthetic oligonucleotide
uauaaggcgucggguaaga

SEQ ID NO: 38669 - RNA, 19 nt, Artificial Sequence
  Description of Artificial Sequence: Synthetic oligonucleotide
aaacgaggaucaucuugaa

SEQ ID NO: 38670 - RNA, 19 nt, Artificial Sequence
  Description of Artificial Sequence: Synthetic oligonucleotide
cuaccucagguaucaaguc

SEQ ID NO: 38671 - RNA, 19 nt, Artificial Sequence
  Description of Artificial Sequence: Synthetic oligonucleotide
ccaacugaaacgugguuac

SEQ ID NO: 38672 - RNA, 19 nt, Artificial Sequence
  Description of Artificial Sequence: Synthetic oligonucleotide
cuauggauuuagcguuacc

SEQ ID NO: 38673 - RNA, 19 nt, Artificial Sequence
  Description of Artificial Sequence: Synthetic oligonucleotide
uuaacugaaucagcuggua

SEQ ID NO: 38674 - RNA, 19 nt, Artificial Sequence
  Description of Artificial Sequence: Synthetic oligonucleotide
gaaacgugguuacuuccaa

SEQ ID NO: 38675 - RNA, 19 nt, Artificial Sequence
  Description of Artificial Sequence: Synthetic oligonucleotide
ggcuaaugauaucacauaa

SEQ ID NO: 38676 - RNA, 19 nt, Artificial Sequence
  Description of Artificial Sequence: Synthetic oligonucleotide
ggcaauaggcaccuuguca

SEQ ID NO: 38677 - RNA, 19 nt, Artificial Sequence
  Description of Artificial Sequence: Synthetic oligonucleotide
gacuuaccuauacccauaa

SEQ ID NO: 38678 - RNA, 19 nt, Artificial Sequence
  Description of Artificial Sequence: Synthetic oligonucleotide
ucguuugaucaugccuugg

SEQ ID NO: 38679 - RNA, 19 nt, Artificial Sequence
  Description of Artificial Sequence: Synthetic oligonucleotide
accuauacccauaaauuua

SEQ ID NO: 38680 - RNA, 19 nt, Artificial Sequence
  Description of Artificial Sequence: Synthetic oligonucleotide
acgccuuaucucuugcagu

SEQ ID NO: 38681 - RNA, 19 nt, Artificial Sequence
  Description of Artificial Sequence: Synthetic oligonucleotide
ucaguauguaguggugcac

SEQ ID NO: 38682 - RNA, 19 nt, Artificial Sequence
  Description of Artificial Sequence: Synthetic oligonucleotide
caacuugauacuauggcau

SEQ ID NO: 38683 - RNA, 19 nt, Artificial Sequence
  Description of Artificial Sequence: Synthetic oligonucleotide
acgacaaucaggauuugua

SEQ ID NO: 38684 - RNA, 19 nt, Artificial Sequence
  Description of Artificial Sequence: Synthetic oligonucleotide
uucccaauaugguguugac

SEQ ID NO: 38685 - RNA, 19 nt, Artificial Sequence
  Description of Artificial Sequence: Synthetic oligonucleotide
agggaaugccaucaugcua

SEQ ID NO: 38686 - RNA, 19 nt, Artificial Sequence
  Description of Artificial Sequence: Synthetic oligonucleotide
acguguugaugucggccuc

SEQ ID NO: 38687 - RNA, 19 nt, Artificial Sequence
  Description of Artificial Sequence: Synthetic oligonucleotide
gaaucaguagugaugguuu

SEQ ID NO: 38688 - RNA, 19 nt, Artificial Sequence
  Description of Artificial Sequence: Synthetic oligonucleotide
aggauagacuacaccuuag

SEQ ID NO: 38689 - RNA, 19 nt, Artificial Sequence
  Description of Artificial Sequence: Synthetic oligonucleotide
acuacucauguuacggcca

SEQ ID NO: 38690 - RNA, 19 nt, Artificial Sequence
  Description of Artificial Sequence: Synthetic oligonucleotide
acgccauguagaugaacgu

SEQ ID NO: 38691 - RNA, 19 nt, Artificial Sequence
  Description of Artificial Sequence: Synthetic oligonucleotide
auacgccuuaucucuugca

SEQ ID NO: 38692 - RNA, 19 nt, Artificial Sequence
  Description of Artificial Sequence: Synthetic oligonucleotide
gcuaacuaaugugacuggc

SEQ ID NO: 38693 - RNA, 19 nt, Artificial Sequence
  Description of Artificial Sequence: Synthetic oligonucleotide
ggcucuaucccauuaggaa

SEQ ID NO: 38694 - RNA, 19 nt, Artificial Sequence
  Description of Artificial Sequence: Synthetic oligonucleotide
aguucaguaggaagugaga

SEQ ID NO: 38695 - RNA, 19 nt, Artificial Sequence
  Description of Artificial Sequence: Synthetic oligonucleotide
aucaguagugaugguuuca

SEQ ID NO: 38696 - RNA, 19 nt, Artificial Sequence
  Description of Artificial Sequence: Synthetic oligonucleotide
cccguguaaaacuguacag

SEQ ID NO: 38697 - RNA, 19 nt, Artificial Sequence
  Description of Artificial Sequence: Synthetic oligonucleotide
guguauuaguaacacacuu

SEQ ID NO: 38698 - RNA, 19 nt, Artificial Sequence
  Description of Artificial Sequence: Synthetic oligonucleotide
acaaccgaagcaacauuca

SEQ ID NO: 38699 - RNA, 19 nt, Artificial Sequence
  Description of Artificial Sequence: Synthetic oligonucleotide
cucagguaucaaguccucc

SEQ ID NO: 38700 - RNA, 19 nt, Artificial Sequence
  Description of Artificial Sequence: Synthetic oligonucleotide
caguaauuggcaagcaacu

SEQ ID NO: 38701 - RNA, 19 nt, Artificial Sequence
  Description of Artificial Sequence: Synthetic oligonucleotide
ugcuaccucuaccuuuaau

SEQ ID NO: 38702 - RNA, 19 nt, Artificial Sequence
  Description of Artificial Sequence: Synthetic oligonucleotide
ugugcaccacaaugaguaa

SEQ ID NO: 38703 - RNA, 19 nt, Artificial Sequence
  Description of Artificial Sequence: Synthetic oligonucleotide
ucggcaucagggaguucug

SEQ ID NO: 38704 - RNA, 19 nt, Artificial Sequence
  Description of Artificial Sequence: Synthetic oligonucleotide
agcugguaaugccaacuua

SEQ ID NO: 38705 - RNA, 19 nt, Artificial Sequence
  Description of Artificial Sequence: Synthetic oligonucleotide
agugcuaccucuaccuuua

SEQ ID NO: 38706 - RNA, 19 nt, Artificial Sequence
  Description of Artificial Sequence: Synthetic oligonucleotide
cuccggauuaacugagaga

SEQ ID NO: 38707 - RNA, 19 nt, Artificial Sequence
  Description of Artificial Sequence: Synthetic oligonucleotide
aacguccaaucaaauugau

SEQ ID NO: 38708 - RNA, 19 nt, Artificial Sequence
  Description of Artificial Sequence: Synthetic oligonucleotide
gggugaguugacuugaggu

SEQ ID NO: 38709 - RNA, 19 nt, Artificial Sequence
  Description of Artificial Sequence: Synthetic oligonucleotide
cagggcuaaugauaucaca

SEQ ID NO: 38710 - RNA, 19 nt, Artificial Sequence
  Description of Artificial Sequence: Synthetic oligonucleotide
ggcauaccaacuucucuca

SEQ ID NO: 38711 - RNA, 19 nt, Artificial Sequence
  Description of Artificial Sequence: Synthetic oligonucleotide
acgcucucaaacaauguuu

SEQ ID NO: 38712 - RNA, 19 nt, Artificial Sequence
  Description of Artificial Sequence: Synthetic oligonucleotide
gcuaggccagcacuaauga

SEQ ID NO: 38713 - RNA, 19 nt, Artificial Sequence
  Description of Artificial Sequence: Synthetic oligonucleotide
gcaaucaaugacuuaccua

SEQ ID NO: 38714 - RNA, 19 nt, Artificial Sequence
  Description of Artificial Sequence: Synthetic oligonucleotide
guugcucaagcccucaauu

SEQ ID NO: 38715 - RNA, 19 nt, Artificial Sequence
  Description of Artificial Sequence: Synthetic oligonucleotide
acuuaccuauacccauaaa

SEQ ID NO: 38716 - RNA, 19 nt, Artificial Sequence
  Description of Artificial Sequence: Synthetic oligonucleotide
agccacucuaccauguuuu

SEQ ID NO: 38717 - RNA, 19 nt, Artificial Sequence
  Description of Artificial Sequence: Synthetic oligonucleotide
cgguguuuuccuuaauagc

SEQ ID NO: 38718 - RNA, 19 nt, Artificial Sequence
  Description of Artificial Sequence: Synthetic oligonucleotide
cuaccuuuaauugcaauuu

SEQ ID NO: 38719 - RNA, 19 nt, Artificial Sequence
  Description of Artificial Sequence: Synthetic oligonucleotide
caaaccgggacaacuuucu

SEQ ID NO: 38720 - RNA, 19 nt, Artificial Sequence
  Description of Artificial Sequence: Synthetic oligonucleotide
agagugcuaccucuaccuu

SEQ ID NO: 38721 - RNA, 19 nt, Artificial Sequence
  Description of Artificial Sequence: Synthetic oligonucleotide
guacaccugcccuuuccca

SEQ ID NO: 38722 - RNA, 19 nt, Artificial Sequence
  Description of Artificial Sequence: Synthetic oligonucleotide
auguuacggccaacaacuc

SEQ ID NO: 38723 - RNA, 19 nt, Artificial Sequence
  Description of Artificial Sequence: Synthetic oligonucleotide
ggguaagaugagcuuuaug

SEQ ID NO: 38724 - RNA, 19 nt, Artificial Sequence
  Description of Artificial Sequence: Synthetic oligonucleotide
caccccagucguuuacaug

SEQ ID NO: 38725 - RNA, 19 nt, Artificial Sequence
  Description of Artificial Sequence: Synthetic oligonucleotide
gguucguauaacaaaacuu

SEQ ID NO: 38726 - RNA, 19 nt, Artificial Sequence
  Description of Artificial Sequence: Synthetic oligonucleotide
ggugacagggaauuauuau

SEQ ID NO: 38727 - RNA, 19 nt, Artificial Sequence
  Description of Artificial Sequence: Synthetic oligonucleotide
gggaaucauucucucuuca

SEQ ID NO: 38728 - RNA, 19 nt, Artificial Sequence
  Description of Artificial Sequence: Synthetic oligonucleotide
ucucagaucucaggcugua

SEQ ID NO: 38729 - RNA, 19 nt, Artificial Sequence
  Description of Artificial Sequence: Synthetic oligonucleotide
aguucggcaucagggaguu

SEQ ID NO: 38730 - RNA, 19 nt, Artificial Sequence
  Description of Artificial Sequence: Synthetic oligonucleotide
caaucaggauuuguaaggu

SEQ ID NO: 38731 - RNA, 19 nt, Artificial Sequence
  Description of Artificial Sequence: Synthetic oligonucleotide
cggauuaacugagagagca

SEQ ID NO: 38732 - RNA, 19 nt, Artificial Sequence
  Description of Artificial Sequence: Synthetic oligonucleotide
gagugcuaccucuaccuuu

SEQ ID NO: 38733 - RNA, 19 nt, Artificial Sequence
  Description of Artificial Sequence: Synthetic oligonucleotide
uaacgacaaucaggauuug

SEQ ID NO: 38734 - RNA, 19 nt, Artificial Sequence
  Description of Artificial Sequence: Synthetic oligonucleotide
ggggaaucauucucucuuc

SEQ ID NO: 38735 - RNA, 19 nt, Artificial Sequence
  Description of Artificial Sequence: Synthetic oligonucleotide
augugacuggcaaaauaua

SEQ ID NO: 38736 - RNA, 19 nt, Artificial Sequence
  Description of Artificial Sequence: Synthetic oligonucleotide
cuugauacuauggcauccu

SEQ ID NO: 38737 - RNA, 19 nt, Artificial Sequence
  Description of Artificial Sequence: Synthetic oligonucleotide
gggcuaaugauaucacaua

SEQ ID NO: 38738 - RNA, 19 nt, Artificial Sequence
  Description of Artificial Sequence: Synthetic oligonucleotide
gcacuaaugauaugcuccu

SEQ ID NO: 38739 - RNA, 19 nt, Artificial Sequence
  Description of Artificial Sequence: Synthetic oligonucleotide
aggaacgcucucaaacaau

SEQ ID NO: 38740 - RNA, 19 nt, Artificial Sequence
  Description of Artificial Sequence: Synthetic oligonucleotide
gugcaccacaaugaguaaa

SEQ ID NO: 38741 - RNA, 19 nt, Artificial Sequence
  Description of Artificial Sequence: Synthetic oligonucleotide
agcaccccagucguuuaca

SEQ ID NO: 38742 - RNA, 19 nt, Artificial Sequence
  Description of Artificial Sequence: Synthetic oligonucleotide
cacucgauuugcucuuuua

SEQ ID NO: 38743 - RNA, 19 nt, Artificial Sequence
  Description of Artificial Sequence: Synthetic oligonucleotide
gaacgcucucaaacaaugu

SEQ ID NO: 38744 - RNA, 19 nt, Artificial Sequence
  Description of Artificial Sequence: Synthetic oligonucleotide
auuuagcguuacccacuuu

SEQ ID NO: 38745 - RNA, 19 nt, Artificial Sequence
  Description of Artificial Sequence: Synthetic oligonucleotide
gggguaaaagaagcaacaa

SEQ ID NO: 38746 - RNA, 19 nt, Artificial Sequence
  Description of Artificial Sequence: Synthetic oligonucleotide
acguccaaucaaauugauu

SEQ ID NO: 38747 - RNA, 19 nt, Artificial Sequence
  Description of Artificial Sequence: Synthetic oligonucleotide
gcugguaaugccaacuuau

SEQ ID NO: 38748 - RNA, 19 nt, Artificial Sequence
  Description of Artificial Sequence: Synthetic oligonucleotide
ccggauuaacugagagagc

SEQ ID NO: 38749 - RNA, 19 nt, Artificial Sequence
  Description of Artificial Sequence: Synthetic oligonucleotide
cagcaccccagucguuuac

SEQ ID NO: 38750 - RNA, 19 nt, Artificial Sequence
  Description of Artificial Sequence: Synthetic oligonucleotide
ggcagagaguuuaauauuu

SEQ ID NO: 38751 - RNA, 19 nt, Artificial Sequence
  Description of Artificial Sequence: Synthetic oligonucleotide
gcuauggauuuagcguuac

SEQ ID NO: 38752 - RNA, 19 nt, Artificial Sequence
  Description of Artificial Sequence: Synthetic oligonucleotide
cuccaacgauacaagacuu

SEQ ID NO: 38753 - RNA, 19 nt, Artificial Sequence
  Description of Artificial Sequence: Synthetic oligonucleotide
caagguuacuacucauguu

SEQ ID NO: 38754 - RNA, 19 nt, Artificial Sequence
  Description of Artificial Sequence: Synthetic oligonucleotide
auaaggcgucggguaagau

SEQ ID NO: 38755 - RNA, 19 nt, Artificial Sequence
  Description of Artificial Sequence: Synthetic oligonucleotide
gucggguaagaugagcuuu

SEQ ID NO: 38756 - RNA, 19 nt, Artificial Sequence
  Description of Artificial Sequence: Synthetic oligonucleotide
ggcgucggguaagaugagc

SEQ ID NO: 38757 - RNA, 19 nt, Artificial Sequence
  Description of Artificial Sequence: Synthetic oligonucleotide
cucaaaccgggacaacuuu

SEQ ID NO: 38758 - RNA, 19 nt, Artificial Sequence
  Description of Artificial Sequence: Synthetic oligonucleotide
cuggcaaaauauagucguu

SEQ ID NO: 38759 - RNA, 19 nt, Artificial Sequence
  Description of Artificial Sequence: Synthetic oligonucleotide
cuaggccagcacuaaugau

SEQ ID NO: 38760 - RNA, 19 nt, Artificial Sequence
  Description of Artificial Sequence: Synthetic oligonucleotide
ccaauauaaggcgucgggu

SEQ ID NO: 38761 - RNA, 19 nt, Artificial Sequence
  Description of Artificial Sequence: Synthetic oligonucleotide
ccguguaaaacuguacagu

SEQ ID NO: 38762 - RNA, 19 nt, Artificial Sequence
  Description of Artificial Sequence: Synthetic oligonucleotide
gcgucggguaagaugagcu

SEQ ID NO: 38763 - RNA, 19 nt, Artificial Sequence
  Description of Artificial Sequence: Synthetic oligonucleotide
ccaacgauacaagacuuau

SEQ ID NO: 38764 - RNA, 19 nt, Artificial Sequence
  Description of Artificial Sequence: Synthetic oligonucleotide
ccuugucaacuaaacaguu

SEQ ID NO: 38765 - RNA, 19 nt, Artificial Sequence
  Description of Artificial Sequence: Synthetic oligonucleotide
guaacacacuuaacacguu

SEQ ID NO: 38766 - RNA, 19 nt, Artificial Sequence
  Description of Artificial Sequence: Synthetic oligonucleotide
cugagucacugcuccggau

SEQ ID NO: 38767 - RNA, 19 nt, Artificial Sequence
  Description of Artificial Sequence: Synthetic oligonucleotide
gcaguugagcauugcuaau

SEQ ID NO: 38768 - RNA, 19 nt, Artificial Sequence
  Description of Artificial Sequence: Synthetic oligonucleotide
cccaaauccuuaccauuua

SEQ ID NO: 38769 - RNA, 19 nt, Artificial Sequence
  Description of Artificial Sequence: Synthetic oligonucleotide
gugcuaccucuaccuuuaa

SEQ ID NO: 38770 - RNA, 19 nt, Artificial Sequence
  Description of Artificial Sequence: Synthetic oligonucleotide
gggcuacgccauguagaug

SEQ ID NO: 38771 - RNA, 19 nt, Artificial Sequence
  Description of Artificial Sequence: Synthetic oligonucleotide
gcucaaaccgggacaacuu

SEQ ID NO: 38772 - RNA, 19 nt, Artificial Sequence
  Description of Artificial Sequence: Synthetic oligonucleotide
gcuuaacgacaaucaggau

SEQ ID NO: 38773 - RNA, 19 nt, Artificial Sequence
  Description of Artificial Sequence: Synthetic oligonucleotide
cagcuaggccagcacuaau

SEQ ID NO: 38774 - RNA, 19 nt, Artificial Sequence
  Description of Artificial Sequence: Synthetic oligonucleotide
caguuucauuucguuugau

SEQ ID NO: 38775 - RNA, 19 nt, Artificial Sequence
  Description of Artificial Sequence: Synthetic oligonucleotide
gcaccccagucguuuacau

SEQ ID NO: 38776 - RNA, 19 nt, Artificial Sequence
  Description of Artificial Sequence: Synthetic oligonucleotide
gcuacgccauguagaugaa

SEQ ID NO: 38777 - RNA, 19 nt, Artificial Sequence
  Description of Artificial Sequence: Synthetic oligonucleotide
ccgaagcaacauucauuau

SEQ ID NO: 38778 - RNA, 19 nt, Artificial Sequence
  Description of Artificial Sequence: Synthetic oligonucleotide
cgucggguaagaugagcuu

SEQ ID NO: 38779 - RNA, 19 nt, Artificial Sequence
  Description of Artificial Sequence: Synthetic oligonucleotide
ccacucgauuugcucuuuu

SEQ ID NO: 38780 - RNA, 19 nt, Artificial Sequence
  Description of Artificial Sequence: Synthetic oligonucleotide
cggguaagaugagcuuuau

SEQ ID NO: 38781 - RNA, 19 nt, Artificial Sequence
  Description of Artificial Sequence: Synthetic oligonucleotide
aauaaacuggucuaaagcc

SEQ ID NO: 38782 - RNA, 19 nt, Artificial Sequence
  Description of Artificial Sequence: Synthetic oligonucleotide
aauuagguggauuacacuc

SEQ ID NO: 38783 - RNA, 19 nt, Artificial Sequence
  Description of Artificial Sequence: Synthetic oligonucleotide
aauagggaaaucuuauuuc

SEQ ID NO: 38784 - RNA, 19 nt, Artificial Sequence
  Description of Artificial Sequence: Synthetic oligonucleotide
uuugaaagcauccgaaacg

SEQ ID NO: 38785 - RNA, 19 nt, Artificial Sequence
  Description of Artificial Sequence: Synthetic oligonucleotide
ugagcuaucagaaucacug

SEQ ID NO: 38786 - RNA, 19 nt, Artificial Sequence
  Description of Artificial Sequence: Synthetic oligonucleotide
ucuauucuacucuauaugg

SEQ ID NO: 38787 - RNA, 19 nt, Artificial Sequence
  Description of Artificial Sequence: Synthetic oligonucleotide
aagacgaugacuuaugccu

SEQ ID NO: 38788 - RNA, 19 nt, Artificial Sequence
  Description of Artificial Sequence: Synthetic oligonucleotide
uuuuaagacauguaacagg

SEQ ID NO: 38789 - RNA, 19 nt, Artificial Sequence
  Description of Artificial Sequence: Synthetic oligonucleotide
auagggaaaucuuauuucc

SEQ ID NO: 38790 - RNA, 19 nt, Artificial Sequence
  Description of Artificial Sequence: Synthetic oligonucleotide
uuuaagacauguaacaggu

SEQ ID NO: 38791 - RNA, 19 nt, Artificial Sequence
  Description of Artificial Sequence: Synthetic oligonucleotide
aaccaugcagaauuaacac

SEQ ID NO: 38792 - RNA, 19 nt, Artificial Sequence
  Description of Artificial Sequence: Synthetic oligonucleotide
uuaagaaguaccuacacaa

SEQ ID NO: 38793 - RNA, 19 nt, Artificial Sequence
  Description of Artificial Sequence: Synthetic oligonucleotide
uucgauaacgccuuggucc

SEQ ID NO: 38794 - RNA, 19 nt, Artificial Sequence
  Description of Artificial Sequence: Synthetic oligonucleotide
ugagcuauuaugaucacga

SEQ ID NO: 38795 - RNA, 19 nt, Artificial Sequence
  Description of Artificial Sequence: Synthetic oligonucleotide
aacagauaaaagcucuagg

SEQ ID NO: 38796 - RNA, 19 nt, Artificial Sequence
  Description of Artificial Sequence: Synthetic oligonucleotide
ucuaaagcccaucugaaca

SEQ ID NO: 38797 - RNA, 19 nt, Artificial Sequence
  Description of Artificial Sequence: Synthetic oligonucleotide
gaccuaguaacuaagaacc

SEQ ID NO: 38798 - RNA, 19 nt, Artificial Sequence
  Description of Artificial Sequence: Synthetic oligonucleotide
aaauagggaaaucuuauuu

SEQ ID NO: 38799 - RNA, 19 nt, Artificial Sequence
  Description of Artificial Sequence: Synthetic oligonucleotide
cuuugauccaucuuucacc

SEQ ID NO: 38800 - RNA, 19 nt, Artificial Sequence
  Description of Artificial Sequence: Synthetic oligonucleotide
aaauagauucuccuccucu

SEQ ID NO: 38801 - RNA, 19 nt, Artificial Sequence
  Description of Artificial Sequence: Synthetic oligonucleotide
cauauuacagccugugcgg

SEQ ID NO: 38802 - RNA, 19 nt, Artificial Sequence
  Description of Artificial Sequence: Synthetic oligonucleotide
ucucacaacuucuugacca

SEQ ID NO: 38803 - RNA, 19 nt, Artificial Sequence
  Description of Artificial Sequence: Synthetic oligonucleotide
auaucuuagcauaauaauc

SEQ ID NO: 38804 - RNA, 19 nt, Artificial Sequence
  Description of Artificial Sequence: Synthetic oligonucleotide
ucaacaguaagucucgaaa

SEQ ID NO: 38805 - RNA, 19 nt, Artificial Sequence
  Description of Artificial Sequence: Synthetic oligonucleotide
acuucgucuaaaacgaucc

SEQ ID NO: 38806 - RNA, 19 nt, Artificial Sequence
  Description of Artificial Sequence: Synthetic oligonucleotide
agauucaacaguaagucuc

SEQ ID NO: 38807 - RNA, 19 nt, Artificial Sequence
  Description of Artificial Sequence: Synthetic oligonucleotide
ugccaaguuaaaauaaugu

SEQ ID NO: 38808 - RNA, 19 nt, Artificial Sequence
  Description of Artificial Sequence: Synthetic oligonucleotide
uagccaauauaucuuagca

SEQ ID NO: 38809 - RNA, 19 nt, Artificial Sequence
  Description of Artificial Sequence: Synthetic oligonucleotide
aagaucaacucaaugaagu

SEQ ID NO: 38810 - RNA, 19 nt, Artificial Sequence
  Description of Artificial Sequence: Synthetic oligonucleotide
acaacugaguauccgcacc

SEQ ID NO: 38811 - RNA, 19 nt, Artificial Sequence
  Description of Artificial Sequence: Synthetic oligonucleotide
gaaguaccuacacaaguag

SEQ ID NO: 38812 - RNA, 19 nt, Artificial Sequence
  Description of Artificial Sequence: Synthetic oligonucleotide
acuagauggacucuucuug

SEQ ID NO: 38813 - RNA, 19 nt, Artificial Sequence
  Description of Artificial Sequence: Synthetic oligonucleotide
agguaucauauuuugcaac

SEQ ID NO: 38814 - RNA, 19 nt, Artificial Sequence
  Description of Artificial Sequence: Synthetic oligonucleotide
uucuugaucguccuggagu

SEQ ID NO: 38815 - RNA, 19 nt, Artificial Sequence
  Description of Artificial Sequence: Synthetic oligonucleotide
ucgaaaacuuaaaauuuga

SEQ ID NO: 38816 - RNA, 19 nt, Artificial Sequence
  Description of Artificial Sequence: Synthetic oligonucleotide
uguucuacuguuguaacug

SEQ ID NO: 38817 - RNA, 19 nt, Artificial Sequence
  Description of Artificial Sequence: Synthetic oligonucleotide
uuuugggacauacaucgga

SEQ ID NO: 38818 - RNA, 19 nt, Artificial Sequence
  Description of Artificial Sequence: Synthetic oligonucleotide
uuuuagaaucccuagcuua

SEQ ID NO: 38819 - RNA, 19 nt, Artificial Sequence
  Description of Artificial Sequence: Synthetic oligonucleotide
auagucugaucuuccaagg

SEQ ID NO: 38820 - RNA, 19 nt, Artificial Sequence
  Description of Artificial Sequence: Synthetic oligonucleotide
uuacuaauuuucuuccaug

SEQ ID NO: 38821 - RNA, 19 nt, Artificial Sequence
  Description of Artificial Sequence: Synthetic oligonucleotide
ucuuucaccacuugacacc

SEQ ID NO: 38822 - RNA, 19 nt, Artificial Sequence
  Description of Artificial Sequence: Synthetic oligonucleotide
aauccuuuugcuccgcgca

SEQ ID NO: 38823 - RNA, 19 nt, Artificial Sequence
  Description of Artificial Sequence: Synthetic oligonucleotide
uauaugcuaacagauaaaa

SEQ ID NO: 38824 - RNA, 19 nt, Artificial Sequence
  Description of Artificial Sequence: Synthetic oligonucleotide
uacacaaguaguauguuuu

SEQ ID NO: 38825 - RNA, 19 nt, Artificial Sequence
  Description of Artificial Sequence: Synthetic oligonucleotide
cugaaucuaagacauaauc

SEQ ID NO: 38826 - RNA, 19 nt, Artificial Sequence
  Description of Artificial Sequence: Synthetic oligonucleotide
gaucaacucaaugaagucc

SEQ ID NO: 38827 - RNA, 19 nt, Artificial Sequence
  Description of Artificial Sequence: Synthetic oligonucleotide
agaauuagguggauuacac

SEQ ID NO: 38828 - RNA, 19 nt, Artificial Sequence
  Description of Artificial Sequence: Synthetic oligonucleotide
guacacaacucacucaucc

SEQ ID NO: 38829 - RNA, 19 nt, Artificial Sequence
  Description of Artificial Sequence: Synthetic oligonucleotide
ucuuaacuuuagauuuugg

SEQ ID NO: 38830 - RNA, 19 nt, Artificial Sequence
  Description of Artificial Sequence: Synthetic oligonucleotide
gauucaacaguaagucucg

SEQ ID NO: 38831 - RNA, 19 nt, Artificial Sequence
  Description of Artificial Sequence: Synthetic oligonucleotide
uguaccagcuacauagcca

SEQ ID NO: 38832 - RNA, 19 nt, Artificial Sequence
  Description of Artificial Sequence: Synthetic oligonucleotide
ugugugaacucuuacuuuc

SEQ ID NO: 38833 - RNA, 19 nt, Artificial Sequence
  Description of Artificial Sequence: Synthetic oligonucleotide
aaacgaaccuagcucccgg

SEQ ID NO: 38834 - RNA, 19 nt, Artificial Sequence
  Description of Artificial Sequence: Synthetic oligonucleotide
aaucuauuuucagguauag

SEQ ID NO: 38835 - RNA, 19 nt, Artificial Sequence
  Description of Artificial Sequence: Synthetic oligonucleotide
uuuuacuuaguguggauuu

SEQ ID NO: 38836 - RNA, 19 nt, Artificial Sequence
  Description of Artificial Sequence: Synthetic oligonucleotide
cuauucuacucuauauggc

SEQ ID NO: 38837 - RNA, 19 nt, Artificial Sequence
  Description of Artificial Sequence: Synthetic oligonucleotide
gaagacgaugacuuaugcc

SEQ ID NO: 38838 - RNA, 19 nt, Artificial Sequence
  Description of Artificial Sequence: Synthetic oligonucleotide
aaacgaucccuugaucugg

SEQ ID NO: 38839 - RNA, 19 nt, Artificial Sequence
  Description of Artificial Sequence: Synthetic oligonucleotide
cuaguaacuaagaaccguc

SEQ ID NO: 38840 - RNA, 19 nt, Artificial Sequence
  Description of Artificial Sequence: Synthetic oligonucleotide
uccgaaacgaaccuagcuc

SEQ ID NO: 38841 - RNA, 19 nt, Artificial Sequence
  Description of Artificial Sequence: Synthetic oligonucleotide
uuuugcuaugaucaugcuc

SEQ ID NO: 38842 - RNA, 19 nt, Artificial Sequence
  Description of Artificial Sequence: Synthetic oligonucleotide
aagguaucauauuuugcaa

SEQ ID NO: 38843 - RNA, 19 nt, Artificial Sequence
  Description of Artificial Sequence: Synthetic oligonucleotide
agcagguugauuauuaaug

SEQ ID NO: 38844 - RNA, 19 nt, Artificial Sequence
  Description of Artificial Sequence: Synthetic oligonucleotide
uuuuacucuaacugggcuc

SEQ ID NO: 38845 - RNA, 19 nt, Artificial Sequence
  Description of Artificial Sequence: Synthetic oligonucleotide
auacaucggaaaauaauuc

SEQ ID NO: 38846 - RNA, 19 nt, Artificial Sequence
  Description of Artificial Sequence: Synthetic oligonucleotide
accgucguugguaugaagc

SEQ ID NO: 38847 - RNA, 19 nt, Artificial Sequence
  Description of Artificial Sequence: Synthetic oligonucleotide
uugaaagcauccgaaacga

SEQ ID NO: 38848 - RNA, 19 nt, Artificial Sequence
  Description of Artificial Sequence: Synthetic oligonucleotide
aguuagaucacguucucua

SEQ ID NO: 38849 - RNA, 19 nt, Artificial Sequence
  Description of Artificial Sequence: Synthetic oligonucleotide
uuugaucucuaucagccuu

SEQ ID NO: 38850 - RNA, 19 nt, Artificial Sequence
  Description of Artificial Sequence: Synthetic oligonucleotide
cucacuucgucuaaaacga

SEQ ID NO: 38851 - RNA, 19 nt, Artificial Sequence
  Description of Artificial Sequence: Synthetic oligonucleotide
gaaagcauccgaaacgaac

SEQ ID NO: 38852 - RNA, 19 nt, Artificial Sequence
  Description of Artificial Sequence: Synthetic oligonucleotide
ucuuacuccuacuuuugga

SEQ ID NO: 38853 - RNA, 19 nt, Artificial Sequence
  Description of Artificial Sequence: Synthetic oligonucleotide
ugcacgucuauccuuuucu

SEQ ID NO: 38854 - RNA, 19 nt, Artificial Sequence
  Description of Artificial Sequence: Synthetic oligonucleotide
uuugggacauacaucggaa

SEQ ID NO: 38855 - RNA, 19 nt, Artificial Sequence
  Description of Artificial Sequence: Synthetic oligonucleotide
uuuaacucuguaagguauc

SEQ ID NO: 38856 - RNA, 19 nt, Artificial Sequence
  Description of Artificial Sequence: Synthetic oligonucleotide
ucuaagacauaaucaacuu

SEQ ID NO: 38857 - RNA, 19 nt, Artificial Sequence
  Description of Artificial Sequence: Synthetic oligonucleotide
uguaauguaauggcuucug

SEQ ID NO: 38858 - RNA, 19 nt, Artificial Sequence
  Description of Artificial Sequence: Synthetic oligonucleotide
cuuguuuauauauaugcua

SEQ ID NO: 38859 - RNA, 19 nt, Artificial Sequence
  Description of Artificial Sequence: Synthetic oligonucleotide
uuauagucugaucuuccaa

SEQ ID NO: 38860 - RNA, 19 nt, Artificial Sequence
  Description of Artificial Sequence: Synthetic oligonucleotide
aacgaaccuagcucccggg

SEQ ID NO: 38861 - RNA, 19 nt, Artificial Sequence
  Description of Artificial Sequence: Synthetic oligonucleotide
aguaacuaagaaccgucgu

SEQ ID NO: 38862 - RNA, 19 nt, Artificial Sequence
  Description of Artificial Sequence: Synthetic oligonucleotide
cauauguuuaguguuuaac

SEQ ID NO: 38863 - RNA, 19 nt, Artificial Sequence
  Description of Artificial Sequence: Synthetic oligonucleotide
ugcaagccgacccaggcac

SEQ ID NO: 38864 - RNA, 19 nt, Artificial Sequence
  Description of Artificial Sequence: Synthetic oligonucleotide
uuugcuccgcgcagcagcg

SEQ ID NO: 38865 - RNA, 19 nt, Artificial Sequence
  Description of Artificial Sequence: Synthetic oligonucleotide
auauuacagccugugcggc

SEQ ID NO: 38866 - RNA, 19 nt, Artificial Sequence
  Description of Artificial Sequence: Synthetic oligonucleotide
gagcuaucagaaucacugg

SEQ ID NO: 38867 - RNA, 19 nt, Artificial Sequence
  Description of Artificial Sequence: Synthetic oligonucleotide
aagcucaacuggcacauaa

SEQ ID NO: 38868 - RNA, 19 nt, Artificial Sequence
  Description of Artificial Sequence: Synthetic oligonucleotide
uacuugagcuauuaugauc

SEQ ID NO: 38869 - RNA, 19 nt, Artificial Sequence
  Description of Artificial Sequence: Synthetic oligonucleotide
uugucuucguguuuguuau

SEQ ID NO: 38870 - RNA, 19 nt, Artificial Sequence
  Description of Artificial Sequence: Synthetic oligonucleotide
uugagcuauuaugaucacg

SEQ ID NO: 38871 - RNA, 19 nt, Artificial Sequence
  Description of Artificial Sequence: Synthetic oligonucleotide
cagguugauuauuaauggc

SEQ ID NO: 38872 - RNA, 19 nt, Artificial Sequence
  Description of Artificial Sequence: Synthetic oligonucleotide
agaaucccuagcuuaagaa

SEQ ID NO: 38873 - RNA, 19 nt, Artificial Sequence
  Description of Artificial Sequence: Synthetic oligonucleotide
uaccuacacaaguaguaug

SEQ ID NO: 38874 - RNA, 19 nt, Artificial Sequence
  Description of Artificial Sequence: Synthetic oligonucleotide
uucuugaccagagauuacu

SEQ ID NO: 38875 - RNA, 19 nt, Artificial Sequence
  Description of Artificial Sequence: Synthetic oligonucleotide
aguucgauaacgccuuggu

SEQ ID NO: 38876 - RNA, 19 nt, Artificial Sequence
  Description of Artificial Sequence: Synthetic oligonucleotide
uccuagacugugcacgucu

SEQ ID NO: 38877 - RNA, 19 nt, Artificial Sequence
  Description of Artificial Sequence: Synthetic oligonucleotide
cacaacuucuugaccagag

SEQ ID NO: 38878 - RNA, 19 nt, Artificial Sequence
  Description of Artificial Sequence: Synthetic oligonucleotide
gacugagaaucacuugagc

SEQ ID NO: 38879 - RNA, 19 nt, Artificial Sequence
  Description of Artificial Sequence: Synthetic oligonucleotide
acuggucuaaagcccaucu

SEQ ID NO: 38880 - RNA, 19 nt, Artificial Sequence
  Description of Artificial Sequence: Synthetic oligonucleotide
uuaacucuguaagguauca

SEQ ID NO: 38881 - RNA, 19 nt, Artificial Sequence
  Description of Artificial Sequence: Synthetic oligonucleotide
uucgucuaaaacgaucccu

SEQ ID NO: 38882 - RNA, 19 nt, Artificial Sequence
  Description of Artificial Sequence: Synthetic oligonucleotide
ucgucuaaaacgaucccuu

SEQ ID NO: 38883 - RNA, 19 nt, Artificial Sequence
  Description of Artificial Sequence: Synthetic oligonucleotide
ucccuuuagaauccaccug

SEQ ID NO: 38884 - RNA, 19 nt, Artificial Sequence
  Description of Artificial Sequence: Synthetic oligonucleotide
aagcauccgaaacgaaccu

SEQ ID NO: 38885 - RNA, 19 nt, Artificial Sequence
  Description of Artificial Sequence: Synthetic oligonucleotide
uuagguggauuacacucuc

SEQ ID NO: 38886 - RNA, 19 nt, Artificial Sequence
  Description of Artificial Sequence: Synthetic oligonucleotide
agcgcuuucagaaucagaa

SEQ ID NO: 38887 - RNA, 19 nt, Artificial Sequence
  Description of Artificial Sequence: Synthetic oligonucleotide
ucgauaacgccuugguccu

SEQ ID NO: 38888 - RNA, 19 nt, Artificial Sequence
  Description of Artificial Sequence: Synthetic oligonucleotide
cucgacugcaagccgaccc

SEQ ID NO: 38889 - RNA, 19 nt, Artificial Sequence
  Description of Artificial Sequence: Synthetic oligonucleotide
gaaccuagcucccgggagc

SEQ ID NO: 38890 - RNA, 19 nt, Artificial Sequence
  Description of Artificial Sequence: Synthetic oligonucleotide
uuaguuagaucacguucuc

SEQ ID NO: 38891 - RNA, 19 nt, Artificial Sequence
  Description of Artificial Sequence: Synthetic oligonucleotide
agcuauuaugaucacgauu

SEQ ID NO: 38892 - RNA, 19 nt, Artificial Sequence
  Description of Artificial Sequence: Synthetic oligonucleotide
uacacaacucacucaucca

SEQ ID NO: 38893 - RNA, 19 nt, Artificial Sequence
  Description of Artificial Sequence: Synthetic oligonucleotide
guuagaucacguucucuac

SEQ ID NO: 38894 - RNA, 19 nt, Artificial Sequence
  Description of Artificial Sequence: Synthetic oligonucleotide
auccgaaacgaaccuagcu

SEQ ID NO: 38895 - RNA, 19 nt, Artificial Sequence
  Description of Artificial Sequence: Synthetic oligonucleotide
cugaguauccgcaccucag

SEQ ID NO: 38896 - RNA, 19 nt, Artificial Sequence
  Description of Artificial Sequence: Synthetic oligonucleotide
auauggcaauguuauacau

SEQ ID NO: 38897 - RNA, 19 nt, Artificial Sequence
  Description of Artificial Sequence: Synthetic oligonucleotide
guaagguaucauauuuugc

SEQ ID NO: 38898 - RNA, 19 nt, Artificial Sequence
  Description of Artificial Sequence: Synthetic oligonucleotide
uucucuacuccuagacugu

SEQ ID NO: 38899 - RNA, 19 nt, Artificial Sequence
  Description of Artificial Sequence: Synthetic oligonucleotide
uagucugaucuuccaaggu

SEQ ID NO: 38900 - RNA, 19 nt, Artificial Sequence
  Description of Artificial Sequence: Synthetic oligonucleotide
ugagaauuagguggauuac

SEQ ID NO: 38901 - RNA, 19 nt, Artificial Sequence
  Description of Artificial Sequence: Synthetic oligonucleotide
agucugaucuuccaaggua

SEQ ID NO: 38902 - RNA, 19 nt, Artificial Sequence
  Description of Artificial Sequence: Synthetic oligonucleotide
ccauugauaagagaaauuc

SEQ ID NO: 38903 - RNA, 19 nt, Artificial Sequence
  Description of Artificial Sequence: Synthetic oligonucleotide
agccuaucauaguacauau

SEQ ID NO: 38904 - RNA, 19 nt, Artificial Sequence
  Description of Artificial Sequence: Synthetic oligonucleotide
gaccagagauuacuugccc

SEQ ID NO: 38905 - RNA, 19 nt, Artificial Sequence
  Description of Artificial Sequence: Synthetic oligonucleotide
uaacaauaaacuggucuaa

SEQ ID NO: 38906 - RNA, 19 nt, Artificial Sequence
  Description of Artificial Sequence: Synthetic oligonucleotide
uucaacaguaagucucgaa

SEQ ID NO: 38907 - RNA, 19 nt, Artificial Sequence
  Description of Artificial Sequence: Synthetic oligonucleotide
gucuucguguuuguuaugc

SEQ ID NO: 38908 - RNA, 19 nt, Artificial Sequence
  Description of Artificial Sequence: Synthetic oligonucleotide
acgguuugaaagcauccga

SEQ ID NO: 38909 - RNA, 19 nt, Artificial Sequence
  Description of Artificial Sequence: Synthetic oligonucleotide
auguuauacaugccaaguu

SEQ ID NO: 38910 - RNA, 19 nt, Artificial Sequence
  Description of Artificial Sequence: Synthetic oligonucleotide
gagaauuagguggauuaca

SEQ ID NO: 38911 - RNA, 19 nt, Artificial Sequence
  Description of Artificial Sequence: Synthetic oligonucleotide
aggaggugugcgccgagcg

SEQ ID NO: 38912 - RNA, 19 nt, Artificial Sequence
  Description of Artificial Sequence: Synthetic oligonucleotide
gaggugugcgccgagcggg

SEQ ID NO: 38913 - RNA, 19 nt, Artificial Sequence
  Description of Artificial Sequence: Synthetic oligonucleotide
cauacaucggaaaauaauu

SEQ ID NO: 38914 - RNA, 19 nt, Artificial Sequence
  Description of Artificial Sequence: Synthetic oligonucleotide
uggguauuuuaggauauuc

SEQ ID NO: 38915 - RNA, 19 nt, Artificial Sequence
  Description of Artificial Sequence: Synthetic oligonucleotide
cucacgguuugaaagcauc

SEQ ID NO: 38916 - RNA, 19 nt, Artificial Sequence
  Description of Artificial Sequence: Synthetic oligonucleotide
uccuauacuccuguucucu

SEQ ID NO: 38917 - RNA, 19 nt, Artificial Sequence
  Description of Artificial Sequence: Synthetic oligonucleotide
uaauagucucaugaucccu

SEQ ID NO: 38918 - RNA, 19 nt, Artificial Sequence
  Description of Artificial Sequence: Synthetic oligonucleotide
cugaucuuucccuuuagaa

SEQ ID NO: 38919 - RNA, 19 nt, Artificial Sequence
  Description of Artificial Sequence: Synthetic oligonucleotide
aaugaggaguugguuuugu

SEQ ID NO: 38920 - RNA, 19 nt, Artificial Sequence
  Description of Artificial Sequence: Synthetic oligonucleotide
accuacacaaguaguaugu

SEQ ID NO: 38921 - RNA, 19 nt, Artificial Sequence
  Description of Artificial Sequence: Synthetic oligonucleotide
uugaucguccuggaguucu

SEQ ID NO: 38922 - RNA, 19 nt, Artificial Sequence
  Description of Artificial Sequence: Synthetic oligonucleotide
agaaccgucguugguauga

SEQ ID NO: 38923 - RNA, 19 nt, Artificial Sequence
  Description of Artificial Sequence: Synthetic oligonucleotide
aggauauuacagacauuac

SEQ ID NO: 38924 - RNA, 19 nt, Artificial Sequence
  Description of Artificial Sequence: Synthetic oligonucleotide
cacuucgucuaaaacgauc

SEQ ID NO: 38925 - RNA, 19 nt, Artificial Sequence
  Description of Artificial Sequence: Synthetic oligonucleotide
ccgaaacgaaccuagcucc

SEQ ID NO: 38926 - RNA, 19 nt, Artificial Sequence
  Description of Artificial Sequence: Synthetic oligonucleotide
cacgguuugaaagcauccg

SEQ ID NO: 38927 - RNA, 19 nt, Artificial Sequence
  Description of Artificial Sequence: Synthetic oligonucleotide
caauccuuuugcuccgcgc

SEQ ID NO: 38928 - RNA, 19 nt, Artificial Sequence
  Description of Artificial Sequence: Synthetic oligonucleotide
uguuaacaauaaacugguc

SEQ ID NO: 38929 - RNA, 19 nt, Artificial Sequence
  Description of Artificial Sequence: Synthetic oligonucleotide
ucauauguuuaguguuuaa

SEQ ID NO: 38930 - RNA, 19 nt, Artificial Sequence
  Description of Artificial Sequence: Synthetic oligonucleotide
aacugaguauccgcaccuc

SEQ ID NO: 38931 - RNA, 19 nt, Artificial Sequence
  Description of Artificial Sequence: Synthetic oligonucleotide
ugcuucgcucccuuguucu

SEQ ID NO: 38932 - RNA, 19 nt, Artificial Sequence
  Description of Artificial Sequence: Synthetic oligonucleotide
cuaaaacgaucccuugauc

SEQ ID NO: 38933 - RNA, 19 nt, Artificial Sequence
  Description of Artificial Sequence: Synthetic oligonucleotide
augccaaguuaaaauaaug

SEQ ID NO: 38934 - RNA, 19 nt, Artificial Sequence
  Description of Artificial Sequence: Synthetic oligonucleotide
aguaccuacacaaguagua

SEQ ID NO: 38935 - RNA, 19 nt, Artificial Sequence
  Description of Artificial Sequence: Synthetic oligonucleotide
ggauauuacagacauuacu

SEQ ID NO: 38936 - RNA, 19 nt, Artificial Sequence
  Description of Artificial Sequence: Synthetic oligonucleotide
uuacuuuugcuaugaucau

SEQ ID NO: 38937 - RNA, 19 nt, Artificial Sequence
  Description of Artificial Sequence: Synthetic oligonucleotide
cuucgucuaaaacgauccc

SEQ ID NO: 38938 - RNA, 19 nt, Artificial Sequence
  Description of Artificial Sequence: Synthetic oligonucleotide
ggucucacgguuugaaagc

SEQ ID NO: 38939 - RNA, 19 nt, Artificial Sequence
  Description of Artificial Sequence: Synthetic oligonucleotide
cagaagcgcuuucagaauc

SEQ ID NO: 38940 - RNA, 19 nt, Artificial Sequence
  Description of Artificial Sequence: Synthetic oligonucleotide
ugugucugugaucgguuau

SEQ ID NO: 38941 - RNA, 19 nt, Artificial Sequence
  Description of Artificial Sequence: Synthetic oligonucleotide
cugccgccauauuacagcc

SEQ ID NO: 38942 - RNA, 19 nt, Artificial Sequence
  Description of Artificial Sequence: Synthetic oligonucleotide
uugaucucuaucagccuuu

SEQ ID NO: 38943 - RNA, 19 nt, Artificial Sequence
  Description of Artificial Sequence: Synthetic oligonucleotide
acguuuugggacauacauc

SEQ ID NO: 38944 - RNA, 19 nt, Artificial Sequence
  Description of Artificial Sequence: Synthetic oligonucleotide
agaaucacuggaugaugau

SEQ ID NO: 38945 - RNA, 19 nt, Artificial Sequence
  Description of Artificial Sequence: Synthetic oligonucleotide
uuacuccuacuuuuggauu

SEQ ID NO: 38946 - RNA, 19 nt, Artificial Sequence
  Description of Artificial Sequence: Synthetic oligonucleotide
cacaacugaguauccgcac

SEQ ID NO: 38947 - RNA, 19 nt, Artificial Sequence
  Description of Artificial Sequence: Synthetic oligonucleotide
accuaguaacuaagaaccg

SEQ ID NO: 38948 - RNA, 19 nt, Artificial Sequence
  Description of Artificial Sequence: Synthetic oligonucleotide
cacacguuuugggacauac

SEQ ID NO: 38949 - RNA, 19 nt, Artificial Sequence
  Description of Artificial Sequence: Synthetic oligonucleotide
ugaaagcauccgaaacgaa

SEQ ID NO: 38950 - RNA, 19 nt, Artificial Sequence
  Description of Artificial Sequence: Synthetic oligonucleotide
aaccgucguugguaugaag

SEQ ID NO: 38951 - RNA, 19 nt, Artificial Sequence
  Description of Artificial Sequence: Synthetic oligonucleotide
acaugugucugugaucggu

SEQ ID NO: 38952 - RNA, 19 nt, Artificial Sequence
  Description of Artificial Sequence: Synthetic oligonucleotide
cauccgaaacgaaccuagc

SEQ ID NO: 38953 - RNA, 19 nt, Artificial Sequence
  Description of Artificial Sequence: Synthetic oligonucleotide
gucucacuucgucuaaaac

SEQ ID NO: 38954 - RNA, 19 nt, Artificial Sequence
  Description of Artificial Sequence: Synthetic oligonucleotide
cuaucauaguacauauaua

SEQ ID NO: 38955 - RNA, 19 nt, Artificial Sequence
  Description of Artificial Sequence: Synthetic oligonucleotide
uuuacuuaguguggauuuu

SEQ ID NO: 38956 - RNA, 19 nt, Artificial Sequence
  Description of Artificial Sequence: Synthetic oligonucleotide
gacaugugucugugaucgg

SEQ ID NO: 38957 - RNA, 19 nt, Artificial Sequence
  Description of Artificial Sequence: Synthetic oligonucleotide
gaagcgcuuucagaaucag

SEQ ID NO: 38958 - RNA, 19 nt, Artificial Sequence
  Description of Artificial Sequence: Synthetic oligonucleotide
gaucacguucucuacuccu

SEQ ID NO: 38959 - RNA, 19 nt, Artificial Sequence
  Description of Artificial Sequence: Synthetic oligonucleotide
gcagcgcucggucucacgg

SEQ ID NO: 38960 - RNA, 19 nt, Artificial Sequence
  Description of Artificial Sequence: Synthetic oligonucleotide
cuugagcuauuaugaucac

SEQ ID NO: 38961 - RNA, 19 nt, Artificial Sequence
  Description of Artificial Sequence: Synthetic oligonucleotide
auaaaagcucuaggaccag

SEQ ID NO: 38962 - RNA, 19 nt, Artificial Sequence
  Description of Artificial Sequence: Synthetic oligonucleotide
aggaaucuauuuucaggua

SEQ ID NO: 38963 - RNA, 19 nt, Artificial Sequence
  Description of Artificial Sequence: Synthetic oligonucleotide
gcauccgaaacgaaccuag

SEQ ID NO: 38964 - RNA, 19 nt, Artificial Sequence
  Description of Artificial Sequence: Synthetic oligonucleotide
uagguggauuacacucucu

SEQ ID NO: 38965 - RNA, 19 nt, Artificial Sequence
  Description of Artificial Sequence: Synthetic oligonucleotide
cuaugagaauuagagaagu

SEQ ID NO: 38966 - RNA, 19 nt, Artificial Sequence
  Description of Artificial Sequence: Synthetic oligonucleotide
guaacuaagaaccgucguu

SEQ ID NO: 38967 - RNA, 19 nt, Artificial Sequence
  Description of Artificial Sequence: Synthetic oligonucleotide
cacguuuugggacauacau

SEQ ID NO: 38968 - RNA, 19 nt, Artificial Sequence
  Description of Artificial Sequence: Synthetic oligonucleotide
ccuaucauaguacauauau

SEQ ID NO: 38969 - RNA, 19 nt, Artificial Sequence
  Description of Artificial Sequence: Synthetic oligonucleotide
agguagcagauuaucaaaa

SEQ ID NO: 38970 - RNA, 19 nt, Artificial Sequence
  Description of Artificial Sequence: Synthetic oligonucleotide
guuuaacucuguaagguau

SEQ ID NO: 38971 - RNA, 19 nt, Artificial Sequence
  Description of Artificial Sequence: Synthetic oligonucleotide
cagacaugugucugugauc

SEQ ID NO: 38972 - RNA, 19 nt, Artificial Sequence
  Description of Artificial Sequence: Synthetic oligonucleotide
ucucacgguuugaaagcau

SEQ ID NO: 38973 - RNA, 19 nt, Artificial Sequence
  Description of Artificial Sequence: Synthetic oligonucleotide
uucgcucccuuguucuacu

SEQ ID NO: 38974 - RNA, 19 nt, Artificial Sequence
  Description of Artificial Sequence: Synthetic oligonucleotide
aauacaccauggguauuuu

SEQ ID NO: 38975 - RNA, 19 nt, Artificial Sequence
  Description of Artificial Sequence: Synthetic oligonucleotide
cauggcuucuagagcgcac

SEQ ID NO: 38976 - RNA, 19 nt, Artificial Sequence
  Description of Artificial Sequence: Synthetic oligonucleotide
aucauauguuuaguguuua

SEQ ID NO: 38977 - RNA, 19 nt, Artificial Sequence
  Description of Artificial Sequence: Synthetic oligonucleotide
ggaaucuauuuucagguau

SEQ ID NO: 38978 - RNA, 19 nt, Artificial Sequence
  Description of Artificial Sequence: Synthetic oligonucleotide
cccuagcuuaagaaguacc

SEQ ID NO: 38979 - RNA, 19 nt, Artificial Sequence
  Description of Artificial Sequence: Synthetic oligonucleotide
acgaaccuagcucccggga

SEQ ID NO: 38980 - RNA, 19 nt, Artificial Sequence
  Description of Artificial Sequence: Synthetic oligonucleotide
gcuguauaacagcaacuca

SEQ ID NO: 38981 - RNA, 19 nt, Artificial Sequence
  Description of Artificial Sequence: Synthetic oligonucleotide
acagcucuuguaauguaau

SEQ ID NO: 38982 - RNA, 19 nt, Artificial Sequence
  Description of Artificial Sequence: Synthetic oligonucleotide
ucacuucgucuaaaacgau

SEQ ID NO: 38983 - RNA, 19 nt, Artificial Sequence
  Description of Artificial Sequence: Synthetic oligonucleotide
uccaauguggaggggucuc

SEQ ID NO: 38984 - RNA, 19 nt, Artificial Sequence
  Description of Artificial Sequence: Synthetic oligonucleotide
gaauacaccauggguauuu

SEQ ID NO: 38985 - RNA, 19 nt, Artificial Sequence
  Description of Artificial Sequence: Synthetic oligonucleotide
guugauuauuaauggcaau

SEQ ID NO: 38986 - RNA, 19 nt, Artificial Sequence
  Description of Artificial Sequence: Synthetic oligonucleotide
acaacaugaugcccaucua

SEQ ID NO: 38987 - RNA, 19 nt, Artificial Sequence
  Description of Artificial Sequence: Synthetic oligonucleotide
uuauccccuuugauccauc

SEQ ID NO: 38988 - RNA, 19 nt, Artificial Sequence
  Description of Artificial Sequence: Synthetic oligonucleotide
uuucgacuuugacuuucuu

SEQ ID NO: 38989 - RNA, 19 nt, Artificial Sequence
  Description of Artificial Sequence: Synthetic oligonucleotide
accagcuacauagccaaua

SEQ ID NO: 38990 - RNA, 19 nt, Artificial Sequence
  Description of Artificial Sequence: Synthetic oligonucleotide
aaacaccgaggacgcugga

SEQ ID NO: 38991 - RNA, 19 nt, Artificial Sequence
  Description of Artificial Sequence: Synthetic oligonucleotide
cuccuauacuccuguucuc

SEQ ID NO: 38992 - RNA, 19 nt, Artificial Sequence
  Description of Artificial Sequence: Synthetic oligonucleotide
ggaggugugcgccgagcgg

SEQ ID NO: 38993 - RNA, 19 nt, Artificial Sequence
  Description of Artificial Sequence: Synthetic oligonucleotide
uucucguccuccugacuuu

SEQ ID NO: 38994 - RNA, 19 nt, Artificial Sequence
  Description of Artificial Sequence: Synthetic oligonucleotide
aaaaugcgucagggaggag

SEQ ID NO: 38995 - RNA, 19 nt, Artificial Sequence
  Description of Artificial Sequence: Synthetic oligonucleotide
acuggacuuugaucucuau

SEQ ID NO: 38996 - RNA, 19 nt, Artificial Sequence
  Description of Artificial Sequence: Synthetic oligonucleotide
cuacacaaguaguauguuu

SEQ ID NO: 38997 - RNA, 19 nt, Artificial Sequence
  Description of Artificial Sequence: Synthetic oligonucleotide
gucucacgguuugaaagca

SEQ ID NO: 38998 - RNA, 19 nt, Artificial Sequence
  Description of Artificial Sequence: Synthetic oligonucleotide
cacaaguaguauguuuuaa

SEQ ID NO: 38999 - RNA, 19 nt, Artificial Sequence
  Description of Artificial Sequence: Synthetic oligonucleotide
guccccuuuucaccuguac

SEQ ID NO: 39000 - RNA, 19 nt, Artificial Sequence
  Description of Artificial Sequence: Synthetic oligonucleotide
gaggggucucacuucgucu

SEQ ID NO: 39001 - RNA, 19 nt, Artificial Sequence
  Description of Artificial Sequence: Synthetic oligonucleotide
ggacauacaucggaaaaua

SEQ ID NO: 39002 - RNA, 19 nt, Artificial Sequence
  Description of Artificial Sequence: Synthetic oligonucleotide
cuguuauuacuugagcuau

SEQ ID NO: 39003 - RNA, 19 nt, Artificial Sequence
  Description of Artificial Sequence: Synthetic oligonucleotide
cuggaccuuuauucccaug

SEQ ID NO: 39004 - RNA, 19 nt, Artificial Sequence
  Description of Artificial Sequence: Synthetic oligonucleotide
ccuauacuccuguucucug

SEQ ID NO: 39005 - RNA, 19 nt, Artificial Sequence
  Description of Artificial Sequence: Synthetic oligonucleotide
gaggaggugugcgccgagc

SEQ ID NO: 39006 - RNA, 19 nt, Artificial Sequence
  Description of Artificial Sequence: Synthetic oligonucleotide
cuuuagcaguacaaauuau

SEQ ID NO: 39007 - RNA, 19 nt, Artificial Sequence
  Description of Artificial Sequence: Synthetic oligonucleotide
gaucccggcuccgugaccu

SEQ ID NO: 39008 - RNA, 19 nt, Artificial Sequence
  Description of Artificial Sequence: Synthetic oligonucleotide
gugcacgucuauccuuuuc

SEQ ID NO: 39009 - RNA, 19 nt, Artificial Sequence
  Description of Artificial Sequence: Synthetic oligonucleotide
ucgcucccuuguucuacug

SEQ ID NO: 39010 - RNA, 19 nt, Artificial Sequence
  Description of Artificial Sequence: Synthetic oligonucleotide
gugugcgccgagcggggag

SEQ ID NO: 39011 - RNA, 19 nt, Artificial Sequence
  Description of Artificial Sequence: Synthetic oligonucleotide
ccuagcuuaagaaguaccu

SEQ ID NO: 39012 - RNA, 19 nt, Artificial Sequence
  Description of Artificial Sequence: Synthetic oligonucleotide
ggaggggucucacuucguc

SEQ ID NO: 39013 - RNA, 19 nt, Artificial Sequence
  Description of Artificial Sequence: Synthetic oligonucleotide
uggaggggucucacuucgu

SEQ ID NO: 39014 - RNA, 19 nt, Artificial Sequence
  Description of Artificial Sequence: Synthetic oligonucleotide
acacguuuugggacauaca

SEQ ID NO: 39015 - RNA, 19 nt, Artificial Sequence
  Description of Artificial Sequence: Synthetic oligonucleotide
guaccuacacaaguaguau

SEQ ID NO: 39016 - RNA, 19 nt, Artificial Sequence
  Description of Artificial Sequence: Synthetic oligonucleotide
cuccgcgcagcagcgcucg

SEQ ID NO: 39017 - RNA, 19 nt, Artificial Sequence
  Description of Artificial Sequence: Synthetic oligonucleotide
ggucuaaagcccaucugaa

SEQ ID NO: 39018 - RNA, 19 nt, Artificial Sequence
  Description of Artificial Sequence: Synthetic oligonucleotide
agcauccgaaacgaaccua

SEQ ID NO: 39019 - RNA, 19 nt, Artificial Sequence
  Description of Artificial Sequence: Synthetic oligonucleotide
cacuuucacuagauggacu

SEQ ID NO: 39020 - RNA, 19 nt, Artificial Sequence
  Description of Artificial Sequence: Synthetic oligonucleotide
gagcuauuaugaucacgau

SEQ ID NO: 39021 - RNA, 19 nt, Artificial Sequence
  Description of Artificial Sequence: Synthetic oligonucleotide
agaauacaccauggguauu

SEQ ID NO: 39022 - RNA, 19 nt, Artificial Sequence
  Description of Artificial Sequence: Synthetic oligonucleotide
ggucucacuucgucuaaaa

SEQ ID NO: 39023 - RNA, 19 nt, Artificial Sequence
  Description of Artificial Sequence: Synthetic oligonucleotide
cgaaacgaaccuagcuccc

SEQ ID NO: 39024 - RNA, 19 nt, Artificial Sequence
  Description of Artificial Sequence: Synthetic oligonucleotide
cccuguuauuacuugagcu

SEQ ID NO: 39025 - RNA, 19 nt, Artificial Sequence
  Description of Artificial Sequence: Synthetic oligonucleotide
cugcaagccgacccaggca

SEQ ID NO: 39026 - RNA, 19 nt, Artificial Sequence
  Description of Artificial Sequence: Synthetic oligonucleotide
gacgaugacuuaugccuuu

SEQ ID NO: 39027 - RNA, 19 nt, Artificial Sequence
  Description of Artificial Sequence: Synthetic oligonucleotide
gggcuugacucaugaucgc

SEQ ID NO: 39028 - RNA, 19 nt, Artificial Sequence
  Description of Artificial Sequence: Synthetic oligonucleotide
ccagaccuaguaacuaaga

SEQ ID NO: 39029 - RNA, 19 nt, Artificial Sequence
  Description of Artificial Sequence: Synthetic oligonucleotide
cgaaccuagcucccgggag

SEQ ID NO: 39030 - RNA, 19 nt, Artificial Sequence
  Description of Artificial Sequence: Synthetic oligonucleotide
ggaguucgauaacgccuug

SEQ ID NO: 39031 - RNA, 19 nt, Artificial Sequence
  Description of Artificial Sequence: Synthetic oligonucleotide
aggugugcgccgagcgggg

SEQ ID NO: 39032 - RNA, 19 nt, Artificial Sequence
  Description of Artificial Sequence: Synthetic oligonucleotide
gaaccgucguugguaugaa

SEQ ID NO: 39033 - RNA, 19 nt, Artificial Sequence
  Description of Artificial Sequence: Synthetic oligonucleotide
ccgucguugguaugaagca

SEQ ID NO: 39034 - RNA, 19 nt, Artificial Sequence
  Description of Artificial Sequence: Synthetic oligonucleotide
ggcuugacucaugaucgca

SEQ ID NO: 39035 - RNA, 19 nt, Artificial Sequence
  Description of Artificial Sequence: Synthetic oligonucleotide
gcuaucagaaucacuggau

SEQ ID NO: 39036 - RNA, 19 nt, Artificial Sequence
  Description of Artificial Sequence: Synthetic oligonucleotide
acgaucccuugaucuggau

SEQ ID NO: 39037 - RNA, 19 nt, Artificial Sequence
  Description of Artificial Sequence: Synthetic oligonucleotide
cugugcacgucuauccuuu

SEQ ID NO: 39038 - RNA, 19 nt, Artificial Sequence
  Description of Artificial Sequence: Synthetic oligonucleotide
gcccaucuaaaugaggagu

SEQ ID NO: 39039 - RNA, 19 nt, Artificial Sequence
  Description of Artificial Sequence: Synthetic oligonucleotide
ccuaguaacuaagaaccgu

SEQ ID NO: 39040 - RNA, 19 nt, Artificial Sequence
  Description of Artificial Sequence: Synthetic oligonucleotide
ccggggcucgacugcaagc

SEQ ID NO: 39041 - RNA, 19 nt, Artificial Sequence
  Description of Artificial Sequence: Synthetic oligonucleotide
cuccuagacugugcacguc

SEQ ID NO: 39042 - RNA, 19 nt, Artificial Sequence
  Description of Artificial Sequence: Synthetic oligonucleotide
cgccauauuacagccugug

SEQ ID NO: 39043 - RNA, 19 nt, Artificial Sequence
  Description of Artificial Sequence: Synthetic oligonucleotide
cggggcucgacugcaagcc

SEQ ID NO: 39044 - RNA, 19 nt, Artificial Sequence
  Description of Artificial Sequence: Synthetic oligonucleotide
gugcgccgagcggggaggg

SEQ ID NO: 39045 - RNA, 19 nt, Artificial Sequence
  Description of Artificial Sequence: Synthetic oligonucleotide
ggcucgacugcaagccgac

SEQ ID NO: 39046 - RNA, 19 nt, Artificial Sequence
  Description of Artificial Sequence: Synthetic oligonucleotide
caccgaggacgcuggaccu

SEQ ID NO: 39047 - RNA, 19 nt, Artificial Sequence
  Description of Artificial Sequence: Synthetic oligonucleotide
gggcucgacugcaagccga

SEQ ID NO: 39048 - RNA, 19 nt, Artificial Sequence
  Description of Artificial Sequence: Synthetic oligonucleotide
ggggucucacuucgucuaa

SEQ ID NO: 39049 - RNA, 19 nt, Artificial Sequence
  Description of Artificial Sequence: Synthetic oligonucleotide
cccggggcucgacugcaag

SEQ ID NO: 39050 - RNA, 19 nt, Artificial Sequence
  Description of Artificial Sequence: Synthetic oligonucleotide
gcaagccgacccaggcacc

SEQ ID NO: 39051 - RNA, 19 nt, Artificial Sequence
  Description of Artificial Sequence: Synthetic oligonucleotide
gcucgacugcaagccgacc

SEQ ID NO: 39052 - RNA, 19 nt, Artificial Sequence
  Description of Artificial Sequence: Synthetic oligonucleotide
gccuaucauaguacauaua

SEQ ID NO: 39053 - RNA, 19 nt, Artificial Sequence
  Description of Artificial Sequence: Synthetic oligonucleotide
ccagagucacaaacaugcu

SEQ ID NO: 39054 - RNA, 19 nt, Artificial Sequence
  Description of Artificial Sequence: Synthetic oligonucleotide
aucccggcuccgugaccuu

SEQ ID NO: 39055 - RNA, 19 nt, Artificial Sequence
  Description of Artificial Sequence: Synthetic oligonucleotide
gggucucacuucgucuaaa

SEQ ID NO: 39056 - RNA, 19 nt, Artificial Sequence
  Description of Artificial Sequence: Synthetic oligonucleotide
cucacacguuuugggacau

SEQ ID NO: 39057 - RNA, 19 nt, Artificial Sequence
  Description of Artificial Sequence: Synthetic oligonucleotide
cgacugcaagccgacccag

SEQ ID NO: 39058 - RNA, 19 nt, Artificial Sequence
  Description of Artificial Sequence: Synthetic oligonucleotide
ccuagcucccgggagccaa

SEQ ID NO: 39059 - RNA, 19 nt, Artificial Sequence
  Description of Artificial Sequence: Synthetic oligonucleotide
ccgcaccucagcaaacggu

SEQ ID NO: 39060 - RNA, 19 nt, Artificial Sequence
  Description of Artificial Sequence: Synthetic oligonucleotide
caagcucaacuggcacaua

SEQ ID NO: 39061 - RNA, 19 nt, Artificial Sequence
  Description of Artificial Sequence: Synthetic oligonucleotide
gcgcacucuucugcuccug

SEQ ID NO: 39062 - RNA, 19 nt, Artificial Sequence
  Description of Artificial Sequence: Synthetic oligonucleotide
ggugugcgccgagcgggga

SEQ ID NO: 39063 - RNA, 19 nt, Artificial Sequence
  Description of Artificial Sequence: Synthetic oligonucleotide
ccuacacaaguaguauguu

SEQ ID NO: 39064 - RNA, 19 nt, Artificial Sequence
  Description of Artificial Sequence: Synthetic oligonucleotide
ccgccauauuacagccugu

SEQ ID NO: 39065 - RNA, 19 nt, Artificial Sequence
  Description of Artificial Sequence: Synthetic oligonucleotide
ccccuccgcgccggagcag

SEQ ID NO: 39066 - RNA, 19 nt, Artificial Sequence
  Description of Artificial Sequence: Synthetic oligonucleotide
ccggggcuugacucaugau

SEQ ID NO: 39067 - RNA, 19 nt, Artificial Sequence
  Description of Artificial Sequence: Synthetic oligonucleotide
ccugcgccccggggcucga

SEQ ID NO: 39068 - RNA, 19 nt, Artificial Sequence
  Description of Artificial Sequence: Synthetic oligonucleotide
aauacuuacaaucggauac

SEQ ID NO: 39069 - RNA, 19 nt, Artificial Sequence
  Description of Artificial Sequence: Synthetic oligonucleotide
aaauauaacauuccaaagg

SEQ ID NO: 39070 - RNA, 19 nt, Artificial Sequence
  Description of Artificial Sequence: Synthetic oligonucleotide
aacguuaauacucuuagac

SEQ ID NO: 39071 - RNA, 19 nt, Artificial Sequence
  Description of Artificial Sequence: Synthetic oligonucleotide
aaggcauguaaauagauac

SEQ ID NO: 39072 - RNA, 19 nt, Artificial Sequence
  Description of Artificial Sequence: Synthetic oligonucleotide
aaggcaauaauacauacag

SEQ ID NO: 39073 - RNA, 19 nt, Artificial Sequence
  Description of Artificial Sequence: Synthetic oligonucleotide
aauauaacauuccaaagga

SEQ ID NO: 39074 - RNA, 19 nt, Artificial Sequence
  Description of Artificial Sequence: Synthetic oligonucleotide
  modified_base (16)..(16): a, c, u, g, unknown or other
  modified_base (19)..(19): a, c, u, g, unknown or other
aaggcaauuaacuuunucn

SEQ ID NO: 39075 - RNA, 19 nt, Artificial Sequence
  Description of Artificial Sequence: Synthetic oligonucleotide
aaauugugcucuuacauag

SEQ ID NO: 39076 - RNA, 19 nt, Artificial Sequence
  Description of Artificial Sequence: Synthetic oligonucleotide
uacaacuuagucauaauag

SEQ ID NO: 39077 - RNA, 19 nt, Artificial Sequence
  Description of Artificial Sequence: Synthetic oligonucleotide
aaagaauccgaaccuuucc

SEQ ID NO: 39078 - RNA, 19 nt, Artificial Sequence
  Description of Artificial Sequence: Synthetic oligonucleotide
uuuauacucagauagccag

SEQ ID NO: 39079 - RNA, 19 nt, Artificial Sequence
  Description of Artificial Sequence: Synthetic oligonucleotide
ucuaauugaucaaacacug

SEQ ID NO: 39080 - RNA, 19 nt, Artificial Sequence
  Description of Artificial Sequence: Synthetic oligonucleotide
aggauugaauaauacauac

SEQ ID NO: 39081 - RNA, 19 nt, Artificial Sequence
  Description of Artificial Sequence: Synthetic oligonucleotide
auagauuauagaaagcagc

SEQ ID NO: 39082 - RNA, 19 nt, Artificial Sequence
  Description of Artificial Sequence: Synthetic oligonucleotide
uucauaugugacaagaucu

SEQ ID NO: 39083 - RNA, 19 nt, Artificial Sequence
  Description of Artificial Sequence: Synthetic oligonucleotide
ucacacuacaacuagguag

SEQ ID NO: 39084 - RNA, 19 nt, Artificial Sequence
  Description of Artificial Sequence: Synthetic oligonucleotide
auaauugugagaucgaagu

SEQ ID NO: 39085 - RNA, 19 nt, Artificial Sequence
  Description of Artificial Sequence: Synthetic oligonucleotide
uuacuaauaaucugaauga

SEQ ID NO: 39086 - RNA, 19 nt, Artificial Sequence
  Description of Artificial Sequence: Synthetic oligonucleotide
aaaauccgcauuucuuugc

SEQ ID NO: 39087 - RNA, 19 nt, Artificial Sequence
  Description of Artificial Sequence: Synthetic oligonucleotide
aaauaggucagacuguccu

SEQ ID NO: 39088 - RNA, 19 nt, Artificial Sequence
  Description of Artificial Sequence: Synthetic oligonucleotide
ugugcauagguuuacaacu

SEQ ID NO: 39089 - RNA, 19 nt, Artificial Sequence
  Description of Artificial Sequence: Synthetic oligonucleotide
aacuucaugugccacuacg

SEQ ID NO: 39090 - RNA, 19 nt, Artificial Sequence
  Description of Artificial Sequence: Synthetic oligonucleotide
ugcaacaauacaaugauuu

SEQ ID NO: 39091 - RNA, 19 nt, Artificial Sequence
  Description of Artificial Sequence: Synthetic oligonucleotide
ugugcaccuaauaagacca

SEQ ID NO: 39092 - RNA, 19 nt, Artificial Sequence
  Description of Artificial Sequence: Synthetic oligonucleotide
aggccgauaacaaagaggc

SEQ ID NO: 39093 - RNA, 19 nt, Artificial Sequence
  Description of Artificial Sequence: Synthetic oligonucleotide
uacggugaaauauacaaca

SEQ ID NO: 39094 - RNA, 19 nt, Artificial Sequence
  Description of Artificial Sequence: Synthetic oligonucleotide
ugcuaaggcauguaaauag

SEQ ID NO: 39095 - RNA, 19 nt, Artificial Sequence
  Description of Artificial Sequence: Synthetic oligonucleotide
gacauuuacaaagaauccg

SEQ ID NO: 39096 - RNA, 19 nt, Artificial Sequence
  Description of Artificial Sequence: Synthetic oligonucleotide
uaaaauagggagaggucgg

SEQ ID NO: 39097 - RNA, 19 nt, Artificial Sequence
  Description of Artificial Sequence: Synthetic oligonucleotide
ucuuacauagaucugucgu

SEQ ID NO: 39098 - RNA, 19 nt, Artificial Sequence
  Description of Artificial Sequence: Synthetic oligonucleotide
acaaugauuuagcucauuc

SEQ ID NO: 39099 - RNA, 19 nt, Artificial Sequence
  Description of Artificial Sequence: Synthetic oligonucleotide
uguuugauuagcgacacug

SEQ ID NO: 39100 - RNA, 19 nt, Artificial Sequence
  Description of Artificial Sequence: Synthetic oligonucleotide
aaaugccuaaacugguuuc

SEQ ID NO: 39101 - RNA, 19 nt, Artificial Sequence
  Description of Artificial Sequence: Synthetic oligonucleotide
accuacacugcacugaaac

SEQ ID NO: 39102 - RNA, 19 nt, Artificial Sequence
  Description of Artificial Sequence: Synthetic oligonucleotide
uuuaaaugggagcuuaaaa

SEQ ID NO: 39103 - RNA, 19 nt, Artificial Sequence
  Description of Artificial Sequence: Synthetic oligonucleotide
ugaaacacgaugcuguggu

SEQ ID NO: 39104 - RNA, 19 nt, Artificial Sequence
  Description of Artificial Sequence: Synthetic oligonucleotide
ucggacaugacaauaauua

SEQ ID NO: 39105 - RNA, 19 nt, Artificial Sequence
  Description of Artificial Sequence: Synthetic oligonucleotide
augugcaccuaauaagacc

SEQ ID NO: 39106 - RNA, 19 nt, Artificial Sequence
  Description of Artificial Sequence: Synthetic oligonucleotide
aaaggagcgaacucagcag

SEQ ID NO: 39107 - RNA, 19 nt, Artificial Sequence
  Description of Artificial Sequence: Synthetic oligonucleotide
cuggaaaucaaccccaacc

SEQ ID NO: 39108 - RNA, 19 nt, Artificial Sequence
  Description of Artificial Sequence: Synthetic oligonucleotide
uacgugauuauuauuaaua

SEQ ID NO: 39109 - RNA, 19 nt, Artificial Sequence
  Description of Artificial Sequence: Synthetic oligonucleotide
uacgucgugagucugaagu

SEQ ID NO: 39110 - RNA, 19 nt, Artificial Sequence
  Description of Artificial Sequence: Synthetic oligonucleotide
guacauugcauccucgugg

SEQ ID NO: 39111 - RNA, 19 nt, Artificial Sequence
  Description of Artificial Sequence: Synthetic oligonucleotide
cacaccgacagcauaaacg

SEQ ID NO: 39112 - RNA, 19 nt, Artificial Sequence
  Description of Artificial Sequence: Synthetic oligonucleotide
agguuuacaacuuagucau

SEQ ID NO: 39113 - RNA, 19 nt, Artificial Sequence
  Description of Artificial Sequence: Synthetic oligonucleotide
uguguagaaaaucuagguc

SEQ ID NO: 39114 - RNA, 19 nt, Artificial Sequence
  Description of Artificial Sequence: Synthetic oligonucleotide
uuuuauacucagauagcca

SEQ ID NO: 39115 - RNA, 19 nt, Artificial Sequence
  Description of Artificial Sequence: Synthetic oligonucleotide
uuguugauaauugugagau

SEQ ID NO: 39116 - RNA, 19 nt, Artificial Sequence
  Description of Artificial Sequence: Synthetic oligonucleotide
gacuaauuauuucaaauaa

SEQ ID NO: 39117 - RNA, 19 nt, Artificial Sequence
  Description of Artificial Sequence: Synthetic oligonucleotide
ugcgaauacuuacaaucgg

SEQ ID NO: 39118 - RNA, 19 nt, Artificial Sequence
  Description of Artificial Sequence: Synthetic oligonucleotide
aagaucuaauugaucaaac

SEQ ID NO: 39119 - RNA, 19 nt, Artificial Sequence
  Description of Artificial Sequence: Synthetic oligonucleotide
auuaagacuggaaaucaac

SEQ ID NO: 39120 - RNA, 19 nt, Artificial Sequence
  Description of Artificial Sequence: Synthetic oligonucleotide
uaaaguuuaggagaacuga

SEQ ID NO: 39121 - RNA, 19 nt, Artificial Sequence
  Description of Artificial Sequence: Synthetic oligonucleotide
uuuaaaauagggagagguc

SEQ ID NO: 39122 - RNA, 19 nt, Artificial Sequence
  Description of Artificial Sequence: Synthetic oligonucleotide
ucgacuuguacugugcugg

SEQ ID NO: 39123 - RNA, 19 nt, Artificial Sequence
  Description of Artificial Sequence: Synthetic oligonucleotide
uuguauguggaauagggua

SEQ ID NO: 39124 - RNA, 19 nt, Artificial Sequence
  Description of Artificial Sequence: Synthetic oligonucleotide
aaugcaccuacacugcacu

SEQ ID NO: 39125 - RNA, 19 nt, Artificial Sequence
  Description of Artificial Sequence: Synthetic oligonucleotide
ugugcacacgagcucaacg

SEQ ID NO: 39126 - RNA, 19 nt, Artificial Sequence
  Description of Artificial Sequence: Synthetic oligonucleotide
aauaggguacgcaaaccgg

SEQ ID NO: 39127 - RNA, 19 nt, Artificial Sequence
  Description of Artificial Sequence: Synthetic oligonucleotide
accaugugcaccuaauaag

SEQ ID NO: 39128 - RNA, 19 nt, Artificial Sequence
  Description of Artificial Sequence: Synthetic oligonucleotide
cacgagauaacugauuagg

SEQ ID NO: 39129 - RNA, 19 nt, Artificial Sequence
  Description of Artificial Sequence: Synthetic oligonucleotide
uacugcaucgcuuggagga

SEQ ID NO: 39130 - RNA, 19 nt, Artificial Sequence
  Description of Artificial Sequence: Synthetic oligonucleotide
gauaauugugagaucgaag

SEQ ID NO: 39131 - RNA, 19 nt, Artificial Sequence
  Description of Artificial Sequence: Synthetic oligonucleotide
auuaguguguaauuguuuu

SEQ ID NO: 39132 - RNA, 19 nt, Artificial Sequence
  Description of Artificial Sequence: Synthetic oligonucleotide
aacgaaaggagcgaacuca

SEQ ID NO: 39133 - RNA, 19 nt, Artificial Sequence
  Description of Artificial Sequence: Synthetic oligonucleotide
aauaggucagacuguccug

SEQ ID NO: 39134 - RNA, 19 nt, Artificial Sequence
  Description of Artificial Sequence: Synthetic oligonucleotide
uacgcuuuaguuccuuugc

SEQ ID NO: 39135 - RNA, 19 nt, Artificial Sequence
  Description of Artificial Sequence: Synthetic oligonucleotide
cugcgaauacuuacaaucg

SEQ ID NO: 39136 - RNA, 19 nt, Artificial Sequence
  Description of Artificial Sequence: Synthetic oligonucleotide
gugagaucgaaguagugug

SEQ ID NO: 39137 - RNA, 19 nt, Artificial Sequence
  Description of Artificial Sequence: Synthetic oligonucleotide
aguuuuauacucagauagc

SEQ ID NO: 39138 - RNA, 19 nt, Artificial Sequence
  Description of Artificial Sequence: Synthetic oligonucleotide
gaaugagaccugcaguucc

SEQ ID NO: 39139 - RNA, 19 nt, Artificial Sequence
  Description of Artificial Sequence: Synthetic oligonucleotide
auagauuauucuuuuggaa

SEQ ID NO: 39140 - RNA, 19 nt, Artificial Sequence
  Description of Artificial Sequence: Synthetic oligonucleotide
agacuaauuauuucaaaua

SEQ ID NO: 39141 - RNA, 19 nt, Artificial Sequence
  Description of Artificial Sequence: Synthetic oligonucleotide
aguuuaggagaacugauua

SEQ ID NO: 39142 - RNA, 19 nt, Artificial Sequence
  Description of Artificial Sequence: Synthetic oligonucleotide
auuaaaacguuaauacucu

SEQ ID NO: 39143 - RNA, 19 nt, Artificial Sequence
  Description of Artificial Sequence: Synthetic oligonucleotide
ugugccacuacgucgugag

SEQ ID NO: 39144 - RNA, 19 nt, Artificial Sequence
  Description of Artificial Sequence: Synthetic oligonucleotide
ucguggauuuuccgaaugg

SEQ ID NO: 39145 - RNA, 19 nt, Artificial Sequence
  Description of Artificial Sequence: Synthetic oligonucleotide
uggaauaggguacgcaaac

SEQ ID NO: 39146 - RNA, 19 nt, Artificial Sequence
  Description of Artificial Sequence: Synthetic oligonucleotide
cucgcgacuguccacaugc

SEQ ID NO: 39147 - RNA, 19 nt, Artificial Sequence
  Description of Artificial Sequence: Synthetic oligonucleotide
caaaugggaagguugggac

SEQ ID NO: 39148 - RNA, 19 nt, Artificial Sequence
  Description of Artificial Sequence: Synthetic oligonucleotide
acguuaauacucuuagaca

SEQ ID NO: 39149 - RNA, 19 nt, Artificial Sequence
  Description of Artificial Sequence: Synthetic oligonucleotide
gacagcauaaacgcucgcg

SEQ ID NO: 39150 - RNA, 19 nt, Artificial Sequence
  Description of Artificial Sequence: Synthetic oligonucleotide
uucacuacgugauuauuau

SEQ ID NO: 39151 - RNA, 19 nt, Artificial Sequence
  Description of Artificial Sequence: Synthetic oligonucleotide
aaauugagacaaaauuaca

SEQ ID NO: 39152 - RNA, 19 nt, Artificial Sequence
  Description of Artificial Sequence: Synthetic oligonucleotide
uacauugcauccucguggc

SEQ ID NO: 39153 - RNA, 19 nt, Artificial Sequence
  Description of Artificial Sequence: Synthetic oligonucleotide
acgaccugcugacacaagg

SEQ ID NO: 39154 - RNA, 19 nt, Artificial Sequence
  Description of Artificial Sequence: Synthetic oligonucleotide
uggguguuacauaaaggac

SEQ ID NO: 39155 - RNA, 19 nt, Artificial Sequence
  Description of Artificial Sequence: Synthetic oligonucleotide
auuagcgacacugaugcca

SEQ ID NO: 39156 - RNA, 19 nt, Artificial Sequence
  Description of Artificial Sequence: Synthetic oligonucleotide
ucgugagucugaaguaagg

SEQ ID NO: 39157 - RNA, 19 nt, Artificial Sequence
  Description of Artificial Sequence: Synthetic oligonucleotide
ugagaucgaaguagugugc

SEQ ID NO: 39158 - RNA, 19 nt, Artificial Sequence
  Description of Artificial Sequence: Synthetic oligonucleotide
aaacguuaauacucuuaga

SEQ ID NO: 39159 - RNA, 19 nt, Artificial Sequence
  Description of Artificial Sequence: Synthetic oligonucleotide
uggucauccuuacuaauaa

SEQ ID NO: 39160 - RNA, 19 nt, Artificial Sequence
  Description of Artificial Sequence: Synthetic oligonucleotide
gugcacacgagcucaacgg

SEQ ID NO: 39161 - RNA, 19 nt, Artificial Sequence
  Description of Artificial Sequence: Synthetic oligonucleotide
ucauaugugacaagaucua

SEQ ID NO: 39162 - RNA, 19 nt, Artificial Sequence
  Description of Artificial Sequence: Synthetic oligonucleotide
aaacacgaugcuguggucu

SEQ ID NO: 39163 - RNA, 19 nt, Artificial Sequence
  Description of Artificial Sequence: Synthetic oligonucleotide
aggguacgcaaaccggucc

SEQ ID NO: 39164 - RNA, 19 nt, Artificial Sequence
  Description of Artificial Sequence: Synthetic oligonucleotide
acagcauaaacgcucgcga

SEQ ID NO: 39165 - RNA, 19 nt, Artificial Sequence
  Description of Artificial Sequence: Synthetic oligonucleotide
uuaggguuucgacuuguac

SEQ ID NO: 39166 - RNA, 19 nt, Artificial Sequence
  Description of Artificial Sequence: Synthetic oligonucleotide
uguccuguuaguuaucauu

SEQ ID NO: 39167 - RNA, 19 nt, Artificial Sequence
  Description of Artificial Sequence: Synthetic oligonucleotide
aaaguuuaggagaacugau

SEQ ID NO: 39168 - RNA, 19 nt, Artificial Sequence
  Description of Artificial Sequence: Synthetic oligonucleotide
guacagaucuagcagugug

SEQ ID NO: 39169 - RNA, 19 nt, Artificial Sequence
  Description of Artificial Sequence: Synthetic oligonucleotide
aauuuaugacuguuuugua

SEQ ID NO: 39170 - RNA, 19 nt, Artificial Sequence
  Description of Artificial Sequence: Synthetic oligonucleotide
cugauccuggaaaacacug

SEQ ID NO: 39171 - RNA, 19 nt, Artificial Sequence
  Description of Artificial Sequence: Synthetic oligonucleotide
gggagcuuaaaacaauucc

SEQ ID NO: 39172 - RNA, 19 nt, Artificial Sequence
  Description of Artificial Sequence: Synthetic oligonucleotide
aguugcccgaaaugcaagg

SEQ ID NO: 39173 - RNA, 19 nt, Artificial Sequence
  Description of Artificial Sequence: Synthetic oligonucleotide
uugauaauugugagaucga

SEQ ID NO: 39174 - RNA, 19 nt, Artificial Sequence
  Description of Artificial Sequence: Synthetic oligonucleotide
ugaacggaauguacuuugc

SEQ ID NO: 39175 - RNA, 19 nt, Artificial Sequence
  Description of Artificial Sequence: Synthetic oligonucleotide
uugcuuaauuaaaacguua

SEQ ID NO: 39176 - RNA, 19 nt, Artificial Sequence
  Description of Artificial Sequence: Synthetic oligonucleotide
ggcaaugcaagcuacucgc

SEQ ID NO: 39177 - RNA, 19 nt, Artificial Sequence
  Description of Artificial Sequence: Synthetic oligonucleotide
caugcauuaagagucaaga

SEQ ID NO: 39178 - RNA, 19 nt, Artificial Sequence
  Description of Artificial Sequence: Synthetic oligonucleotide
cugaaauggcgaaaccagc

SEQ ID NO: 39179 - RNA, 19 nt, Artificial Sequence
  Description of Artificial Sequence: Synthetic oligonucleotide
agguuguguuaaaauacgc

SEQ ID NO: 39180 - RNA, 19 nt, Artificial Sequence
  Description of Artificial Sequence: Synthetic oligonucleotide
agacaauacuucaaaaccu

SEQ ID NO: 39181 - RNA, 19 nt, Artificial Sequence
  Description of Artificial Sequence: Synthetic oligonucleotide
aaaugcaagggaugugcau

SEQ ID NO: 39182 - RNA, 19 nt, Artificial Sequence
  Description of Artificial Sequence: Synthetic oligonucleotide
ccugcgaauacuuacaauc

SEQ ID NO: 39183 - RNA, 19 nt, Artificial Sequence
  Description of Artificial Sequence: Synthetic oligonucleotide
aucuauucggacaugacaa

SEQ ID NO: 39184 - RNA, 19 nt, Artificial Sequence
  Description of Artificial Sequence: Synthetic oligonucleotide
aaauuaguguguaauuguu

SEQ ID NO: 39185 - RNA, 19 nt, Artificial Sequence
  Description of Artificial Sequence: Synthetic oligonucleotide
aagacaacgaaaggagcga

SEQ ID NO: 39186 - RNA, 19 nt, Artificial Sequence
  Description of Artificial Sequence: Synthetic oligonucleotide
auacgcuuuaguuccuuug

SEQ ID NO: 39187 - RNA, 19 nt, Artificial Sequence
  Description of Artificial Sequence: Synthetic oligonucleotide
acauuaagacuggaaauca

SEQ ID NO: 39188 - RNA, 19 nt, Artificial Sequence
  Description of Artificial Sequence: Synthetic oligonucleotide
auacggugaaauauacaac

SEQ ID NO: 39189 - RNA, 19 nt, Artificial Sequence
  Description of Artificial Sequence: Synthetic oligonucleotide
agccuaauagacccaggag

SEQ ID NO: 39190 - RNA, 19 nt, Artificial Sequence
  Description of Artificial Sequence: Synthetic oligonucleotide
uacuuacaaucggauacgg

SEQ ID NO: 39191 - RNA, 19 nt, Artificial Sequence
  Description of Artificial Sequence: Synthetic oligonucleotide
cucuuacauagaucugucg

SEQ ID NO: 39192 - RNA, 19 nt, Artificial Sequence
  Description of Artificial Sequence: Synthetic oligonucleotide
aguuaauggagggucaggu

SEQ ID NO: 39193 - RNA, 19 nt, Artificial Sequence
  Description of Artificial Sequence: Synthetic oligonucleotide
caaagaauccgaaccuuuc

SEQ ID NO: 39194 - RNA, 19 nt, Artificial Sequence
  Description of Artificial Sequence: Synthetic oligonucleotide
acuggaaaucaaccccaac

SEQ ID NO: 39195 - RNA, 19 nt, Artificial Sequence
  Description of Artificial Sequence: Synthetic oligonucleotide
accgacagcauaaacgcuc

SEQ ID NO: 39196 - RNA, 19 nt, Artificial Sequence
  Description of Artificial Sequence: Synthetic oligonucleotide
ugccugugaaucauacccc

SEQ ID NO: 39197 - RNA, 19 nt, Artificial Sequence
  Description of Artificial Sequence: Synthetic oligonucleotide
accuaauaagaccaguguu

SEQ ID NO: 39198 - RNA, 19 nt, Artificial Sequence
  Description of Artificial Sequence: Synthetic oligonucleotide
guuuuauaaaguugcccga

SEQ ID NO: 39199 - RNA, 19 nt, Artificial Sequence
  Description of Artificial Sequence: Synthetic oligonucleotide
uaauugugagaucgaagua

SEQ ID NO: 39200 - RNA, 19 nt, Artificial Sequence
  Description of Artificial Sequence: Synthetic oligonucleotide
ugggugugccccgugaacg

SEQ ID NO: 39201 - RNA, 19 nt, Artificial Sequence
  Description of Artificial Sequence: Synthetic oligonucleotide
acgagauaacugauuaggg

SEQ ID NO: 39202 - RNA, 19 nt, Artificial Sequence
  Description of Artificial Sequence: Synthetic oligonucleotide
ucggauacggugaaauaua

SEQ ID NO: 39203 - RNA, 19 nt, Artificial Sequence
  Description of Artificial Sequence: Synthetic oligonucleotide
cucuguacugcaucgcuug

SEQ ID NO: 39204 - RNA, 19 nt, Artificial Sequence
  Description of Artificial Sequence: Synthetic oligonucleotide
ugauaauugugagaucgaa

SEQ ID NO: 39205 - RNA, 19 nt, Artificial Sequence
  Description of Artificial Sequence: Synthetic oligonucleotide
augcaagggaugugcauag

SEQ ID NO: 39206 - RNA, 19 nt, Artificial Sequence
  Description of Artificial Sequence: Synthetic oligonucleotide
aauuuacagagcuguuaua

SEQ ID NO: 39207 - RNA, 19 nt, Artificial Sequence
  Description of Artificial Sequence: Synthetic oligonucleotide
aauguacuuugcuguaauu

SEQ ID NO: 39208 - RNA, 19 nt, Artificial Sequence
  Description of Artificial Sequence: Synthetic oligonucleotide
uuaugacuguuuuguaauc

SEQ ID NO: 39209 - RNA, 19 nt, Artificial Sequence
  Description of Artificial Sequence: Synthetic oligonucleotide
aaacgcucgcgacugucca

SEQ ID NO: 39210 - RNA, 19 nt, Artificial Sequence
  Description of Artificial Sequence: Synthetic oligonucleotide
acacgagauaacugauuag

SEQ ID NO: 39211 - RNA, 19 nt, Artificial Sequence
  Description of Artificial Sequence: Synthetic oligonucleotide
gaauacuuacaaucggaua

SEQ ID NO: 39212 - RNA, 19 nt, Artificial Sequence
  Description of Artificial Sequence: Synthetic oligonucleotide
gauagcugaacuucacucu

SEQ ID NO: 39213 - RNA, 19 nt, Artificial Sequence
  Description of Artificial Sequence: Synthetic oligonucleotide
ccuaauagacccaggagac

SEQ ID NO: 39214 - RNA, 19 nt, Artificial Sequence
  Description of Artificial Sequence: Synthetic oligonucleotide
uugcccgaaaugcaaggga

SEQ ID NO: 39215 - RNA, 19 nt, Artificial Sequence
  Description of Artificial Sequence: Synthetic oligonucleotide
agugcgguagcuuggcaca

SEQ ID NO: 39216 - RNA, 19 nt, Artificial Sequence
  Description of Artificial Sequence: Synthetic oligonucleotide
agaagccuaauagacccag

SEQ ID NO: 39217 - RNA, 19 nt, Artificial Sequence
  Description of Artificial Sequence: Synthetic oligonucleotide
auggcaaugcaagcuacuc

SEQ ID NO: 39218 - RNA, 19 nt, Artificial Sequence
  Description of Artificial Sequence: Synthetic oligonucleotide
aacgcucgcgacuguccac

SEQ ID NO: 39219 - RNA, 19 nt, Artificial Sequence
  Description of Artificial Sequence: Synthetic oligonucleotide
uucgacuuguacugugcug

SEQ ID NO: 39220 - RNA, 19 nt, Artificial Sequence
  Description of Artificial Sequence: Synthetic oligonucleotide
gcuuuaagcaaaaccaccc

SEQ ID NO: 39221 - RNA, 19 nt, Artificial Sequence
  Description of Artificial Sequence: Synthetic oligonucleotide
uggagugaugguuggcgcc

SEQ ID NO: 39222 - RNA, 19 nt, Artificial Sequence
  Description of Artificial Sequence: Synthetic oligonucleotide
ggucagacuguccuguuag

SEQ ID NO: 39223 - RNA, 19 nt, Artificial Sequence
  Description of Artificial Sequence: Synthetic oligonucleotide
aucggauacggugaaauau

SEQ ID NO: 39224 - RNA, 19 nt, Artificial Sequence
  Description of Artificial Sequence: Synthetic oligonucleotide
aaucggauacggugaaaua

SEQ ID NO: 39225 - RNA, 19 nt, Artificial Sequence
  Description of Artificial Sequence: Synthetic oligonucleotide
cagaaccgagucugaaugg

SEQ ID NO: 39226 - RNA, 19 nt, Artificial Sequence
  Description of Artificial Sequence: Synthetic oligonucleotide
aucaccgacaugaagagua

SEQ ID NO: 39227 - RNA, 19 nt, Artificial Sequence
  Description of Artificial Sequence: Synthetic oligonucleotide
ugauuaggguuucgacuug

SEQ ID NO: 39228 - RNA, 19 nt, Artificial Sequence
  Description of Artificial Sequence: Synthetic oligonucleotide
ugcuguacccugcgaauac

SEQ ID NO: 39229 - RNA, 19 nt, Artificial Sequence
  Description of Artificial Sequence: Synthetic oligonucleotide
guacccugcgaauacuuac

SEQ ID NO: 39230 - RNA, 19 nt, Artificial Sequence
  Description of Artificial Sequence: Synthetic oligonucleotide
ugcccgaaaugcaagggau

SEQ ID NO: 39231 - RNA, 19 nt, Artificial Sequence
  Description of Artificial Sequence: Synthetic oligonucleotide
gagugcgguagcuuggcac

SEQ ID NO: 39232 - RNA, 19 nt, Artificial Sequence
  Description of Artificial Sequence: Synthetic oligonucleotide
acguuggcaaagcuuuaag

SEQ ID NO: 39233 - RNA, 19 nt, Artificial Sequence
  Description of Artificial Sequence: Synthetic oligonucleotide
accagccgaacucugguca

SEQ ID NO: 39234 - RNA, 19 nt, Artificial Sequence
  Description of Artificial Sequence: Synthetic oligonucleotide
auaaacgcucgcgacuguc

SEQ ID NO: 39235 - RNA, 19 nt, Artificial Sequence
  Description of Artificial Sequence: Synthetic oligonucleotide
ucauuauucucaggguaac

SEQ ID NO: 39236 - RNA, 19 nt, Artificial Sequence
  Description of Artificial Sequence: Synthetic oligonucleotide
gccuaauagacccaggaga

SEQ ID NO: 39237 - RNA, 19 nt, Artificial Sequence
  Description of Artificial Sequence: Synthetic oligonucleotide
ucaggguaacaugaaauuu

SEQ ID NO: 39238 - RNA, 19 nt, Artificial Sequence
  Description of Artificial Sequence: Synthetic oligonucleotide
aaguugcccgaaaugcaag

SEQ ID NO: 39239 - RNA, 19 nt, Artificial Sequence
  Description of Artificial Sequence: Synthetic oligonucleotide
aguauugcaaucagccccu

SEQ ID NO: 39240 - RNA, 19 nt, Artificial Sequence
  Description of Artificial Sequence: Synthetic oligonucleotide
auaacugauuaggguuucg

SEQ ID NO: 39241 - RNA, 19 nt, Artificial Sequence
  Description of Artificial Sequence: Synthetic oligonucleotide
ucuauucggacaugacaau

SEQ ID NO: 39242 - RNA, 19 nt, Artificial Sequence
  Description of Artificial Sequence: Synthetic oligonucleotide
acuagacuaauuauuucaa

SEQ ID NO: 39243 - RNA, 19 nt, Artificial Sequence
  Description of Artificial Sequence: Synthetic oligonucleotide
aaguuuaggagaacugauu

SEQ ID NO: 39244 - RNA, 19 nt, Artificial Sequence
  Description of Artificial Sequence: Synthetic oligonucleotide
ugcaccuacacugcacuga

SEQ ID NO: 39245 - RNA, 19 nt, Artificial Sequence
  Description of Artificial Sequence: Synthetic oligonucleotide
cugucacacgagauaacug

SEQ ID NO: 39246 - RNA, 19 nt, Artificial Sequence
  Description of Artificial Sequence: Synthetic oligonucleotide
ucccucuaacagcuaagac

SEQ ID NO: 39247 - RNA, 19 nt, Artificial Sequence
  Description of Artificial Sequence: Synthetic oligonucleotide
uuggcgccgcaauaaagac

SEQ ID NO: 39248 - RNA, 19 nt, Artificial Sequence
  Description of Artificial Sequence: Synthetic oligonucleotide
caaugcaccuacacugcac

SEQ ID NO: 39249 - RNA, 19 nt, Artificial Sequence
  Description of Artificial Sequence: Synthetic oligonucleotide
guugcccgaaaugcaaggg

SEQ ID NO: 39250 - RNA, 19 nt, Artificial Sequence
  Description of Artificial Sequence: Synthetic oligonucleotide
auaggucagacuguccugu

SEQ ID NO: 39251 - RNA, 19 nt, Artificial Sequence
  Description of Artificial Sequence: Synthetic oligonucleotide
acgcaaaccgguccgggug

SEQ ID NO: 39252 - RNA, 19 nt, Artificial Sequence
  Description of Artificial Sequence: Synthetic oligonucleotide
auucggacaugacaauaau

SEQ ID NO: 39253 - RNA, 19 nt, Artificial Sequence
  Description of Artificial Sequence: Synthetic oligonucleotide
ugccacuacgucgugaguc

SEQ ID NO: 39254 - RNA, 19 nt, Artificial Sequence
  Description of Artificial Sequence: Synthetic oligonucleotide
uccuccuaucuauucggac

SEQ ID NO: 39255 - RNA, 19 nt, Artificial Sequence
  Description of Artificial Sequence: Synthetic oligonucleotide
uguugauaauugugagauc

SEQ ID NO: 39256 - RNA, 19 nt, Artificial Sequence
  Description of Artificial Sequence: Synthetic oligonucleotide
cacacuacaacuagguagu

SEQ ID NO: 39257 - RNA, 19 nt, Artificial Sequence
  Description of Artificial Sequence: Synthetic oligonucleotide
caucccucuaacagcuaag

SEQ ID NO: 39258 - RNA, 19 nt, Artificial Sequence
  Description of Artificial Sequence: Synthetic oligonucleotide
gaagccuaauagacccagg

SEQ ID NO: 39259 - RNA, 19 nt, Artificial Sequence
  Description of Artificial Sequence: Synthetic oligonucleotide
auaggguacgcaaaccggu

SEQ ID NO: 39260 - RNA, 19 nt, Artificial Sequence
  Description of Artificial Sequence: Synthetic oligonucleotide
uguacccugcgaauacuua

SEQ ID NO: 39261 - RNA, 19 nt, Artificial Sequence
  Description of Artificial Sequence: Synthetic oligonucleotide
ucaccgacaugaagaguac

SEQ ID NO: 39262 - RNA, 19 nt, Artificial Sequence
  Description of Artificial Sequence: Synthetic oligonucleotide
gagaucgaaguagugugca

SEQ ID NO: 39263 - RNA, 19 nt, Artificial Sequence
  Description of Artificial Sequence: Synthetic oligonucleotide
aguuuacccugccaccagu

SEQ ID NO: 39264 - RNA, 19 nt, Artificial Sequence
  Description of Artificial Sequence: Synthetic oligonucleotide
cacugaaacacgaugcugu

SEQ ID NO: 39265 - RNA, 19 nt, Artificial Sequence
  Description of Artificial Sequence: Synthetic oligonucleotide
accgacaugaagaguaccu

SEQ ID NO: 39266 - RNA, 19 nt, Artificial Sequence
  Description of Artificial Sequence: Synthetic oligonucleotide
agcgacacugaugccauug

SEQ ID NO: 39267 - RNA, 19 nt, Artificial Sequence
  Description of Artificial Sequence: Synthetic oligonucleotide
uaggguacgcaaaccgguc

SEQ ID NO: 39268 - RNA, 19 nt, Artificial Sequence
  Description of Artificial Sequence: Synthetic oligonucleotide
guuggcgccgcaauaaaga

SEQ ID NO: 39269 - RNA, 19 nt, Artificial Sequence
  Description of Artificial Sequence: Synthetic oligonucleotide
cagaggacaucccaggcga

SEQ ID NO: 39270 - RNA, 19 nt, Artificial Sequence
  Description of Artificial Sequence: Synthetic oligonucleotide
uacaaagaauccgaaccuu

SEQ ID NO: 39271 - RNA, 19 nt, Artificial Sequence
  Description of Artificial Sequence: Synthetic oligonucleotide
ugcaccuaauaagaccagu

SEQ ID NO: 39272 - RNA, 19 nt, Artificial Sequence
  Description of Artificial Sequence: Synthetic oligonucleotide
acgaaaggagcgaacucag

SEQ ID NO: 39273 - RNA, 19 nt, Artificial Sequence
  Description of Artificial Sequence: Synthetic oligonucleotide
ccacuguuugauuagcgac

SEQ ID NO: 39274 - RNA, 19 nt, Artificial Sequence
  Description of Artificial Sequence: Synthetic oligonucleotide
acguccaguauugcaauca

SEQ ID NO: 39275 - RNA, 19 nt, Artificial Sequence
  Description of Artificial Sequence: Synthetic oligonucleotide
ugcaucgcuuggaggauuc

SEQ ID NO: 39276 - RNA, 19 nt, Artificial Sequence
  Description of Artificial Sequence: Synthetic oligonucleotide
gcgcuggagagauucaucc

SEQ ID NO: 39277 - RNA, 19 nt, Artificial Sequence
  Description of Artificial Sequence: Synthetic oligonucleotide
gccgcucccaguuuuauac

SEQ ID NO: 39278 - RNA, 19 nt, Artificial Sequence
  Description of Artificial Sequence: Synthetic oligonucleotide
ugaagacuuuguguuaauu

SEQ ID NO: 39279 - RNA, 19 nt, Artificial Sequence
  Description of Artificial Sequence: Synthetic oligonucleotide
aaaauacgcuuuaguuccu

SEQ ID NO: 39280 - RNA, 19 nt, Artificial Sequence
  Description of Artificial Sequence: Synthetic oligonucleotide
guuuugucccguacauugc

SEQ ID NO: 39281 - RNA, 19 nt, Artificial Sequence
  Description of Artificial Sequence: Synthetic oligonucleotide
guugacggcaaguccucac

SEQ ID NO: 39282 - RNA, 19 nt, Artificial Sequence
  Description of Artificial Sequence: Synthetic oligonucleotide
aaccgagucugaauggcaa

SEQ ID NO: 39283 - RNA, 19 nt, Artificial Sequence
  Description of Artificial Sequence: Synthetic oligonucleotide
uccgcauuucuuugcuuaa

SEQ ID NO: 39284 - RNA, 19 nt, Artificial Sequence
  Description of Artificial Sequence: Synthetic oligonucleotide
caacgaaaggagcgaacuc

SEQ ID NO: 39285 - RNA, 19 nt, Artificial Sequence
  Description of Artificial Sequence: Synthetic oligonucleotide
uacgcaaaccgguccgggu

SEQ ID NO: 39286 - RNA, 19 nt, Artificial Sequence
  Description of Artificial Sequence: Synthetic oligonucleotide
aguuaaaccuggagugaug

SEQ ID NO: 39287 - RNA, 19 nt, Artificial Sequence
  Description of Artificial Sequence: Synthetic oligonucleotide
gacaacgaaaggagcgaac

SEQ ID NO: 39288 - RNA, 19 nt, Artificial Sequence
  Description of Artificial Sequence: Synthetic oligonucleotide
ggguacgcaaaccgguccg

SEQ ID NO: 39289 - RNA, 19 nt, Artificial Sequence
  Description of Artificial Sequence: Synthetic oligonucleotide
acgaugcuguggucucagc

SEQ ID NO: 39290 - RNA, 19 nt, Artificial Sequence
  Description of Artificial Sequence: Synthetic oligonucleotide
ucagacuguccuguuaguu

SEQ ID NO: 39291 - RNA, 19 nt, Artificial Sequence
  Description of Artificial Sequence: Synthetic oligonucleotide
acaguaucuggguguuaca

SEQ ID NO: 39292 - RNA, 19 nt, Artificial Sequence
  Description of Artificial Sequence: Synthetic oligonucleotide
cauagguuuacaacuuagu

SEQ ID NO: 39293 - RNA, 19 nt, Artificial Sequence
  Description of Artificial Sequence: Synthetic oligonucleotide
gcuguuauagauuauucuu

SEQ ID NO: 39294 - RNA, 19 nt, Artificial Sequence
  Description of Artificial Sequence: Synthetic oligonucleotide
ugucccucuuuuccccuac

SEQ ID NO: 39295 - RNA, 19 nt, Artificial Sequence
  Description of Artificial Sequence: Synthetic oligonucleotide
gaaacacgaugcugugguc

SEQ ID NO: 39296 - RNA, 19 nt, Artificial Sequence
  Description of Artificial Sequence: Synthetic oligonucleotide
ugguugacggcaaguccuc

SEQ ID NO: 39297 - RNA, 19 nt, Artificial Sequence
  Description of Artificial Sequence: Synthetic oligonucleotide
gaucugucguccuuuuggu

SEQ ID NO: 39298 - RNA, 19 nt, Artificial Sequence
  Description of Artificial Sequence: Synthetic oligonucleotide
uccuguuaguuaucauuuu

SEQ ID NO: 39299 - RNA, 19 nt, Artificial Sequence
  Description of Artificial Sequence: Synthetic oligonucleotide
cuggcaguuugacuacuuc

SEQ ID NO: 39300 - RNA, 19 nt, Artificial Sequence
  Description of Artificial Sequence: Synthetic oligonucleotide
uuauuccccugggugugcc

SEQ ID NO: 39301 - RNA, 19 nt, Artificial Sequence
  Description of Artificial Sequence: Synthetic oligonucleotide
gcauaaacgcucgcgacug

SEQ ID NO: 39302 - RNA, 19 nt, Artificial Sequence
  Description of Artificial Sequence: Synthetic oligonucleotide
acaaggccgauaacaaaga

SEQ ID NO: 39303 - RNA, 19 nt, Artificial Sequence
  Description of Artificial Sequence: Synthetic oligonucleotide
ugccccgugaacggaaugu

SEQ ID NO: 39304 - RNA, 19 nt, Artificial Sequence
  Description of Artificial Sequence: Synthetic oligonucleotide
gcuaaggcuuugcuguacc

SEQ ID NO: 39305 - RNA, 19 nt, Artificial Sequence
  Description of Artificial Sequence: Synthetic oligonucleotide
aaccgguccgggugcuuug

SEQ ID NO: 39306 - RNA, 19 nt, Artificial Sequence
  Description of Artificial Sequence: Synthetic oligonucleotide
gacaauacuucaaaaccuu

SEQ ID NO: 39307 - RNA, 19 nt, Artificial Sequence
  Description of Artificial Sequence: Synthetic oligonucleotide
ccgaacucuggucacauuc

SEQ ID NO: 39308 - RNA, 19 nt, Artificial Sequence
  Description of Artificial Sequence: Synthetic oligonucleotide
aaagguuuacagggugcuu

SEQ ID NO: 39309 - RNA, 19 nt, Artificial Sequence
  Description of Artificial Sequence: Synthetic oligonucleotide
cagacuguccuguuaguua

SEQ ID NO: 39310 - RNA, 19 nt, Artificial Sequence
  Description of Artificial Sequence: Synthetic oligonucleotide
augcaccuacacugcacug

SEQ ID NO: 39311 - RNA, 19 nt, Artificial Sequence
  Description of Artificial Sequence: Synthetic oligonucleotide
guacgcaaaccgguccggg

SEQ ID NO: 39312 - RNA, 19 nt, Artificial Sequence
  Description of Artificial Sequence: Synthetic oligonucleotide
ccgacagcauaaacgcucg

SEQ ID NO: 39313 - RNA, 19 nt, Artificial Sequence
  Description of Artificial Sequence: Synthetic oligonucleotide
gaacuguaccagccgaacu

SEQ ID NO: 39314 - RNA, 19 nt, Artificial Sequence
  Description of Artificial Sequence: Synthetic oligonucleotide
guaggucacacuacaacua

SEQ ID NO: 39315 - RNA, 19 nt, Artificial Sequence
  Description of Artificial Sequence: Synthetic oligonucleotide
gucugaaguaaggccauga

SEQ ID NO: 39316 - RNA, 19 nt, Artificial Sequence
  Description of Artificial Sequence: Synthetic oligonucleotide
cuaaggcauguaaauagau

SEQ ID NO: 39317 - RNA, 19 nt, Artificial Sequence
  Description of Artificial Sequence: Synthetic oligonucleotide
uuuaggggccuuggaaaua

SEQ ID NO: 39318 - RNA, 19 nt, Artificial Sequence
  Description of Artificial Sequence: Synthetic oligonucleotide
ccuccuaucuauucggaca

SEQ ID NO: 39319 - RNA, 19 nt, Artificial Sequence
  Description of Artificial Sequence: Synthetic oligonucleotide
acccugcgaauacuuacaa

SEQ ID NO: 39320 - RNA, 19 nt, Artificial Sequence
  Description of Artificial Sequence: Synthetic oligonucleotide
accgagucugaauggcaau

SEQ ID NO: 39321 - RNA, 19 nt, Artificial Sequence
  Description of Artificial Sequence: Synthetic oligonucleotide
ggaauuuacagagcuguua

SEQ ID NO: 39322 - RNA, 19 nt, Artificial Sequence
  Description of Artificial Sequence: Synthetic oligonucleotide
acgucgugagucugaagua

SEQ ID NO: 39323 - RNA, 19 nt, Artificial Sequence
  Description of Artificial Sequence: Synthetic oligonucleotide
guuugacuacuucuucaua

SEQ ID NO: 39324 - RNA, 19 nt, Artificial Sequence
  Description of Artificial Sequence: Synthetic oligonucleotide
augggagcuuaaaacaauu

SEQ ID NO: 39325 - RNA, 19 nt, Artificial Sequence
  Description of Artificial Sequence: Synthetic oligonucleotide
agacaacgaaaggagcgaa

SEQ ID NO: 39326 - RNA, 19 nt, Artificial Sequence
  Description of Artificial Sequence: Synthetic oligonucleotide
gccgcaauaaagacaacga

SEQ ID NO: 39327 - RNA, 19 nt, Artificial Sequence
  Description of Artificial Sequence: Synthetic oligonucleotide
ccaugcaugauucuugcaa

SEQ ID NO: 39328 - RNA, 19 nt, Artificial Sequence
  Description of Artificial Sequence: Synthetic oligonucleotide
aaaccgguccgggugcuuu

SEQ ID NO: 39329 - RNA, 19 nt, Artificial Sequence
  Description of Artificial Sequence: Synthetic oligonucleotide
gcgaauacuuacaaucgga

SEQ ID NO: 39330 - RNA, 19 nt, Artificial Sequence
  Description of Artificial Sequence: Synthetic oligonucleotide
gguuguguuaaaauacgcu

SEQ ID NO: 39331 - RNA, 19 nt, Artificial Sequence
  Description of Artificial Sequence: Synthetic oligonucleotide
acuacgucgugagucugaa

SEQ ID NO: 39332 - RNA, 19 nt, Artificial Sequence
  Description of Artificial Sequence: Synthetic oligonucleotide
ugugccccgugaacggaau

SEQ ID NO: 39333 - RNA, 19 nt, Artificial Sequence
  Description of Artificial Sequence: Synthetic oligonucleotide
cuguaccagccgaacucug

SEQ ID NO: 39334 - RNA, 19 nt, Artificial Sequence
  Description of Artificial Sequence: Synthetic oligonucleotide
cuauucggacaugacaaua

SEQ ID NO: 39335 - RNA, 19 nt, Artificial Sequence
  Description of Artificial Sequence: Synthetic oligonucleotide
cuaauaagaccaguguuuu

SEQ ID NO: 39336 - RNA, 19 nt, Artificial Sequence
  Description of Artificial Sequence: Synthetic oligonucleotide
agggcgugugcuaaggcau

SEQ ID NO: 39337 - RNA, 19 nt, Artificial Sequence
  Description of Artificial Sequence: Synthetic oligonucleotide
uccuaucuauucggacaug

SEQ ID NO: 39338 - RNA, 19 nt, Artificial Sequence
  Description of Artificial Sequence: Synthetic oligonucleotide
cugacacaaggccgauaac

SEQ ID NO: 39339 - RNA, 19 nt, Artificial Sequence
  Description of Artificial Sequence: Synthetic oligonucleotide
cacguccaguauugcaauc

SEQ ID NO: 39340 - RNA, 19 nt, Artificial Sequence
  Description of Artificial Sequence: Synthetic oligonucleotide
cuacgucgugagucugaag

SEQ ID NO: 39341 - RNA, 19 nt, Artificial Sequence
  Description of Artificial Sequence: Synthetic oligonucleotide
gugugcuaaggcauguaaa

SEQ ID NO: 39342 - RNA, 19 nt, Artificial Sequence
  Description of Artificial Sequence: Synthetic oligonucleotide
aggucagacuguccuguua

SEQ ID NO: 39343 - RNA, 19 nt, Artificial Sequence
  Description of Artificial Sequence: Synthetic oligonucleotide
agguagucucuagggacca

SEQ ID NO: 39344 - RNA, 19 nt, Artificial Sequence
  Description of Artificial Sequence: Synthetic oligonucleotide
cagucuguaagugcgugaa

SEQ ID NO: 39345 - RNA, 19 nt, Artificial Sequence
  Description of Artificial Sequence: Synthetic oligonucleotide
gagaugucuugcaucauuu

SEQ ID NO: 39346 - RNA, 19 nt, Artificial Sequence
  Description of Artificial Sequence: Synthetic oligonucleotide
cuguaauuacagauuguuu

SEQ ID NO: 39347 - RNA, 19 nt, Artificial Sequence
  Description of Artificial Sequence: Synthetic oligonucleotide
gguuggcgccgcaauaaag

SEQ ID NO: 39348 - RNA, 19 nt, Artificial Sequence
  Description of Artificial Sequence: Synthetic oligonucleotide
gcaagcuacucgccauucc

SEQ ID NO: 39349 - RNA, 19 nt, Artificial Sequence
  Description of Artificial Sequence: Synthetic oligonucleotide
ccuaauaagaccaguguuu

SEQ ID NO: 39350 - RNA, 19 nt, Artificial Sequence
  Description of Artificial Sequence: Synthetic oligonucleotide
ucgcgacuguccacaugca

SEQ ID NO: 39351 - RNA, 19 nt, Artificial Sequence
  Description of Artificial Sequence: Synthetic oligonucleotide
guccuguuaguuaucauuu

SEQ ID NO: 39352 - RNA, 19 nt, Artificial Sequence
  Description of Artificial Sequence: Synthetic oligonucleotide
cacuacgucgugagucuga

SEQ ID NO: 39353 - RNA, 19 nt, Artificial Sequence
  Description of Artificial Sequence: Synthetic oligonucleotide
caaucggauacggugaaau

SEQ ID NO: 39354 - RNA, 19 nt, Artificial Sequence
  Description of Artificial Sequence: Synthetic oligonucleotide
gugcaccuaauaagaccag

SEQ ID NO: 39355 - RNA, 19 nt, Artificial Sequence
  Description of Artificial Sequence: Synthetic oligonucleotide
cuccuaucuauucggacau

SEQ ID NO: 39356 - RNA, 19 nt, Artificial Sequence
  Description of Artificial Sequence: Synthetic oligonucleotide
ggucacacuacaacuaggu

SEQ ID NO: 39357 - RNA, 19 nt, Artificial Sequence
  Description of Artificial Sequence: Synthetic oligonucleotide
cuccuccuaucuauucgga

SEQ ID NO: 39358 - RNA, 19 nt, Artificial Sequence
  Description of Artificial Sequence: Synthetic oligonucleotide
acgcucgcgacuguccaca

SEQ ID NO: 39359 - RNA, 19 nt, Artificial Sequence
  Description of Artificial Sequence: Synthetic oligonucleotide
ccuaucuauucggacauga

SEQ ID NO: 39360 - RNA, 19 nt, Artificial Sequence
  Description of Artificial Sequence: Synthetic oligonucleotide
gacuggaaaucaaccccaa

SEQ ID NO: 39361 - RNA, 19 nt, Artificial Sequence
  Description of Artificial Sequence: Synthetic oligonucleotide
acgagcucaacggcuuccu

SEQ ID NO: 39362 - RNA, 19 nt, Artificial Sequence
  Description of Artificial Sequence: Synthetic oligonucleotide
gugccugaggcuccacguc

SEQ ID NO: 39363 - RNA, 19 nt, Artificial Sequence
  Description of Artificial Sequence: Synthetic oligonucleotide
cauugugcuuugccaaaua

SEQ ID NO: 39364 - RNA, 19 nt, Artificial Sequence
  Description of Artificial Sequence: Synthetic oligonucleotide
cacgaccugcugacacaag

SEQ ID NO: 39365 - RNA, 19 nt, Artificial Sequence
  Description of Artificial Sequence: Synthetic oligonucleotide
auuuugucguacagaucua

SEQ ID NO: 39366 - RNA, 19 nt, Artificial Sequence
  Description of Artificial Sequence: Synthetic oligonucleotide
gcaaugcaccuacacugca

SEQ ID NO: 39367 - RNA, 19 nt, Artificial Sequence
  Description of Artificial Sequence: Synthetic oligonucleotide
cccguacauugcauccucg

SEQ ID NO: 39368 - RNA, 19 nt, Artificial Sequence
  Description of Artificial Sequence: Synthetic oligonucleotide
gguguuacauaaaggacuu

SEQ ID NO: 39369 - RNA, 19 nt, Artificial Sequence
  Description of Artificial Sequence: Synthetic oligonucleotide
cuguacugcaucgcuugga

SEQ ID NO: 39370 - RNA, 19 nt, Artificial Sequence
  Description of Artificial Sequence: Synthetic oligonucleotide
acaaucggauacggugaaa

SEQ ID NO: 39371 - RNA, 19 nt, Artificial Sequence
  Description of Artificial Sequence: Synthetic oligonucleotide
auuaggguuucgacuugua

SEQ ID NO: 39372 - RNA, 19 nt, Artificial Sequence
  Description of Artificial Sequence: Synthetic oligonucleotide
agccgaacucuggucacau

SEQ ID NO: 39373 - RNA, 19 nt, Artificial Sequence
  Description of Artificial Sequence: Synthetic oligonucleotide
cguccaguauugcaaucag

SEQ ID NO: 39374 - RNA, 19 nt, Artificial Sequence
  Description of Artificial Sequence: Synthetic oligonucleotide
augccuaaacugguuucuu

SEQ ID NO: 39375 - RNA, 19 nt, Artificial Sequence
  Description of Artificial Sequence: Synthetic oligonucleotide
cacguuggcaaagcuuuaa

SEQ ID NO: 39376 - RNA, 19 nt, Artificial Sequence
  Description of Artificial Sequence: Synthetic oligonucleotide
guauugcaaucagccccug

SEQ ID NO: 39377 - RNA, 19 nt, Artificial Sequence
  Description of Artificial Sequence: Synthetic oligonucleotide
gugccccgugaacggaaug

SEQ ID NO: 39378 - RNA, 19 nt, Artificial Sequence
  Description of Artificial Sequence: Synthetic oligonucleotide
ccgagucugaauggcaaug

SEQ ID NO: 39379 - RNA, 19 nt, Artificial Sequence
  Description of Artificial Sequence: Synthetic oligonucleotide
cacuacaacuagguagucu

SEQ ID NO: 39380 - RNA, 19 nt, Artificial Sequence
  Description of Artificial Sequence: Synthetic oligonucleotide
acacgaugcuguggucuca

SEQ ID NO: 39381 - RNA, 19 nt, Artificial Sequence
  Description of Artificial Sequence: Synthetic oligonucleotide
cgagauaacugauuagggu

SEQ ID NO: 39382 - RNA, 19 nt, Artificial Sequence
  Description of Artificial Sequence: Synthetic oligonucleotide
cauagaucugucguccuuu

SEQ ID NO: 39383 - RNA, 19 nt, Artificial Sequence
  Description of Artificial Sequence: Synthetic oligonucleotide
ccgcaauaaagacaacgaa

SEQ ID NO: 39384 - RNA, 19 nt, Artificial Sequence
  Description of Artificial Sequence: Synthetic oligonucleotide
caguuaaaccuggagugau

SEQ ID NO: 39385 - RNA, 19 nt, Artificial Sequence
  Description of Artificial Sequence: Synthetic oligonucleotide
gcccgaaaugcaagggaug

SEQ ID NO: 39386 - RNA, 19 nt, Artificial Sequence
  Description of Artificial Sequence: Synthetic oligonucleotide
aggagcgaacucagcaguu

SEQ ID NO: 39387 - RNA, 19 nt, Artificial Sequence
  Description of Artificial Sequence: Synthetic oligonucleotide
ccccgcauuucccuaagca

SEQ ID NO: 39388 - RNA, 19 nt, Artificial Sequence
  Description of Artificial Sequence: Synthetic oligonucleotide
cgcucccaguuuuauacuc

SEQ ID NO: 39389 - RNA, 19 nt, Artificial Sequence
  Description of Artificial Sequence: Synthetic oligonucleotide
ccguuggcgcuuucuggag

SEQ ID NO: 39390 - RNA, 19 nt, Artificial Sequence
  Description of Artificial Sequence: Synthetic oligonucleotide
caucgcuuggaggauuccu

SEQ ID NO: 39391 - RNA, 19 nt, Artificial Sequence
  Description of Artificial Sequence: Synthetic oligonucleotide
ccaucccucuaacagcuaa

SEQ ID NO: 39392 - RNA, 19 nt, Artificial Sequence
  Description of Artificial Sequence: Synthetic oligonucleotide
cgcaaaccgguccgggugc

SEQ ID NO: 39393 - RNA, 19 nt, Artificial Sequence
  Description of Artificial Sequence: Synthetic oligonucleotide
cuguacccugcgaauacuu

SEQ ID NO: 39394 - RNA, 19 nt, Artificial Sequence
  Description of Artificial Sequence: Synthetic oligonucleotide
cgaauacuuacaaucggau

SEQ ID NO: 39395 - RNA, 19 nt, Artificial Sequence
  Description of Artificial Sequence: Synthetic oligonucleotide
accgguccgggugcuuugu

SEQ ID NO: 39396 - RNA, 19 nt, Artificial Sequence
  Description of Artificial Sequence: Synthetic oligonucleotide
guuuacccugccaccaguu

SEQ ID NO: 39397 - RNA, 19 nt, Artificial Sequence
  Description of Artificial Sequence: Synthetic oligonucleotide
gcucgcgacuguccacaug

SEQ ID NO: 39398 - RNA, 19 nt, Artificial Sequence
  Description of Artificial Sequence: Synthetic oligonucleotide
cauaaacgcucgcgacugu

SEQ ID NO: 39399 - RNA, 19 nt, Artificial Sequence
  Description of Artificial Sequence: Synthetic oligonucleotide
ugucuccguuggcgcuuuc

SEQ ID NO: 39400 - RNA, 19 nt, Artificial Sequence
  Description of Artificial Sequence: Synthetic oligonucleotide
ccgauaacaaagaggcuuu

SEQ ID NO: 39401 - RNA, 19 nt, Artificial Sequence
  Description of Artificial Sequence: Synthetic oligonucleotide
gugugccccgugaacggaa

SEQ ID NO: 39402 - RNA, 19 nt, Artificial Sequence
  Description of Artificial Sequence: Synthetic oligonucleotide
gguugacggcaaguccuca

SEQ ID NO: 39403 - RNA, 19 nt, Artificial Sequence
  Description of Artificial Sequence: Synthetic oligonucleotide
ccgcauuucccuaagcauu

SEQ ID NO: 39404 - RNA, 19 nt, Artificial Sequence
  Description of Artificial Sequence: Synthetic oligonucleotide
aggccgcucccaguuuuau

SEQ ID NO: 39405 - RNA, 19 nt, Artificial Sequence
  Description of Artificial Sequence: Synthetic oligonucleotide
ccccugucacacgagauaa

SEQ ID NO: 39406 - RNA, 19 nt, Artificial Sequence
  Description of Artificial Sequence: Synthetic oligonucleotide
cccgaaaugcaagggaugu

SEQ ID NO: 39407 - RNA, 19 nt, Artificial Sequence
  Description of Artificial Sequence: Synthetic oligonucleotide
gcaucgcuuggaggauucc

SEQ ID NO: 39408 - RNA, 19 nt, Artificial Sequence
  Description of Artificial Sequence: Synthetic oligonucleotide
cagccgaacucuggucaca

SEQ ID NO: 39409 - RNA, 19 nt, Artificial Sequence
  Description of Artificial Sequence: Synthetic oligonucleotide
cccgcauuucccuaagcau

SEQ ID NO: 39410 - RNA, 19 nt, Artificial Sequence
  Description of Artificial Sequence: Synthetic oligonucleotide
gaggccgcucccaguuuua

SEQ ID NO: 39411 - RNA, 19 nt, Artificial Sequence
  Description of Artificial Sequence: Synthetic oligonucleotide
gcaaaugccuaaacugguu

SEQ ID NO: 39412 - RNA, 19 nt, Artificial Sequence
  Description of Artificial Sequence: Synthetic oligonucleotide
cccaugcaugauucuugca

SEQ ID NO: 39413 - RNA, 19 nt, Artificial Sequence
  Description of Artificial Sequence: Synthetic oligonucleotide
gguuuacaacuuagucaua

SEQ ID NO: 39414 - RNA, 19 nt, Artificial Sequence
  Description of Artificial Sequence: Synthetic oligonucleotide
ccguacauugcauccucgu

SEQ ID NO: 39415 - RNA, 19 nt, Artificial Sequence
  Description of Artificial Sequence: Synthetic oligonucleotide
ccacuacgucgugagucug

SEQ ID NO: 39416 - RNA, 19 nt, Artificial Sequence
  Description of Artificial Sequence: Synthetic oligonucleotide
cggacaugacaauaauuau

SEQ ID NO: 39417 - RNA, 19 nt, Artificial Sequence
  Description of Artificial Sequence: Synthetic oligonucleotide
gugccacuacgucgugagu

SEQ ID NO: 39418 - RNA, 19 nt, Artificial Sequence
  Description of Artificial Sequence: Synthetic oligonucleotide
gcuguacccugcgaauacu

SEQ ID NO: 39419 - RNA, 19 nt, Artificial Sequence
  Description of Artificial Sequence: Synthetic oligonucleotide
ggccgcucccaguuuuaua

SEQ ID NO: 39420 - RNA, 19 nt, Artificial Sequence
  Description of Artificial Sequence: Synthetic oligonucleotide
ccgugaacggaauguacuu

SEQ ID NO: 39421 - RNA, 19 nt, Artificial Sequence
  Description of Artificial Sequence: Synthetic oligonucleotide
cccagaaccgagucugaau

SEQ ID NO: 39422 - RNA, 19 nt, Artificial Sequence
  Description of Artificial Sequence: Synthetic oligonucleotide
ccacguccaguauugcaau

SEQ ID NO: 39423 - RNA, 19 nt, Artificial Sequence
  Description of Artificial Sequence: Synthetic oligonucleotide
ccgguccgggugcuuugug

SEQ ID NO: 39424 - RNA, 19 nt, Artificial Sequence
  Description of Artificial Sequence: Synthetic oligonucleotide
ggccgauaacaaagaggcu

SEQ ID NO: 39425 - RNA, 19 nt, Artificial Sequence
  Description of Artificial Sequence: Synthetic oligonucleotide
cccugcgaauacuuacaau

SEQ ID NO: 39426 - RNA, 19 nt, Artificial Sequence
  Description of Artificial Sequence: Synthetic oligonucleotide
ggacaucccaggcgacauu

SEQ ID NO: 39427 - RNA, 19 nt, Artificial Sequence
  Description of Artificial Sequence: Synthetic oligonucleotide
ccgacaugaagaguaccuu

SEQ ID NO: 39428 - RNA, 19 nt, Artificial Sequence
  Description of Artificial Sequence: Synthetic oligonucleotide
ccgcucccaguuuuauacu

SEQ ID NO: 39429 - RNA, 19 nt, Artificial Sequence
  Description of Artificial Sequence: Synthetic oligonucleotide
gcaaaccgguccgggugcu

SEQ ID NO: 39430 - RNA, 19 nt, Artificial Sequence
  Description of Artificial Sequence: Synthetic oligonucleotide
caaaccgguccgggugcuu

SEQ ID NO: 39431 - RNA, 19 nt, Artificial Sequence
  Description of Artificial Sequence: Synthetic oligonucleotide
cgcucgcgacuguccacau

SEQ ID NO: 39432 - RNA, 19 nt, Artificial Sequence
  Description of Artificial Sequence: Synthetic oligonucleotide
aaagcuuagauucucggcc

SEQ ID NO: 39433 - RNA, 19 nt, Artificial Sequence
  Description of Artificial Sequence: Synthetic oligonucleotide
aaaggacccaccuuuaugc

SEQ ID NO: 39434 - RNA, 19 nt, Artificial Sequence
  Description of Artificial Sequence: Synthetic oligonucleotide
aauguuaugaaaacuauuc

SEQ ID NO: 39435 - RNA, 19 nt, Artificial Sequence
  Description of Artificial Sequence: Synthetic oligonucleotide
uuaacagugauucucaaca

SEQ ID NO: 39436 - RNA, 19 nt, Artificial Sequence
  Description of Artificial Sequence: Synthetic oligonucleotide
uuauccacgacaaagagcu

SEQ ID NO: 39437 - RNA, 19 nt, Artificial Sequence
  Description of Artificial Sequence: Synthetic oligonucleotide
ugugacacaauauagagac

SEQ ID NO: 39438 - RNA, 19 nt, Artificial Sequence
  Description of Artificial Sequence: Synthetic oligonucleotide
aaaagcuuagauucucggc

SEQ ID NO: 39439 - RNA, 19 nt, Artificial Sequence
  Description of Artificial Sequence: Synthetic oligonucleotide
uuugauuaaagucaggguc

SEQ ID NO: 39440 - RNA, 19 nt, Artificial Sequence
  Description of Artificial Sequence: Synthetic oligonucleotide
uuucuaacaaauuugcgcc

SEQ ID NO: 39441 - RNA, 19 nt, Artificial Sequence
  Description of Artificial Sequence: Synthetic oligonucleotide
gagagacaaauucauaggg

SEQ ID NO: 39442 - RNA, 19 nt, Artificial Sequence
  Description of Artificial Sequence: Synthetic oligonucleotide
uuaaugccguuucugaagg

SEQ ID NO: 39443 - RNA, 19 nt, Artificial Sequence
  Description of Artificial Sequence: Synthetic oligonucleotide
uauaaaccaacauguaugc

SEQ ID NO: 39444 - RNA, 19 nt, Artificial Sequence
  Description of Artificial Sequence: Synthetic oligonucleotide
gcaacuauaaagcucaagg

SEQ ID NO: 39445 - RNA, 19 nt, Artificial Sequence
  Description of Artificial Sequence: Synthetic oligonucleotide
aacaaauuugcgccauucg

SEQ ID NO: 39446 - RNA, 19 nt, Artificial Sequence
  Description of Artificial Sequence: Synthetic oligonucleotide
ucucucuaaagguugacag

SEQ ID NO: 39447 - RNA, 19 nt, Artificial Sequence
  Description of Artificial Sequence: Synthetic oligonucleotide
aacuauaaagcucaaggua

SEQ ID NO: 39448 - RNA, 19 nt, Artificial Sequence
  Description of Artificial Sequence: Synthetic oligonucleotide
aauaucgauugucuccuuc

SEQ ID NO: 39449 - RNA, 19 nt, Artificial Sequence
  Description of Artificial Sequence: Synthetic oligonucleotide
ucacuaagcagaauguuug

SEQ ID NO: 39450 - RNA, 19 nt, Artificial Sequence
  Description of Artificial Sequence: Synthetic oligonucleotide
ucgggaaugacgccgaggg

SEQ ID NO: 39451 - RNA, 19 nt, Artificial Sequence
  Description of Artificial Sequence: Synthetic oligonucleotide
uuuccaauugacgacacag

SEQ ID NO: 39452 - RNA, 19 nt, Artificial Sequence
  Description of Artificial Sequence: Synthetic oligonucleotide
aaaagaaagcgcucgcucu

SEQ ID NO: 39453 - RNA, 19 nt, Artificial Sequence
  Description of Artificial Sequence: Synthetic oligonucleotide
uugauuaaagucagggucu

SEQ ID NO: 39454 - RNA, 19 nt, Artificial Sequence
  Description of Artificial Sequence: Synthetic oligonucleotide
acuuaaauagaaaaucauc

SEQ ID NO: 39455 - RNA, 19 nt, Artificial Sequence
  Description of Artificial Sequence: Synthetic oligonucleotide
gauuacuuuauccacgaca

SEQ ID NO: 39456 - RNA, 19 nt, Artificial Sequence
  Description of Artificial Sequence: Synthetic oligonucleotide
uuuaacuccaauucauaga

SEQ ID NO: 39457 - RNA, 19 nt, Artificial Sequence
  Description of Artificial Sequence: Synthetic oligonucleotide
agcgcuauaacccagcaga

SEQ ID NO: 39458 - RNA, 19 nt, Artificial Sequence
  Description of Artificial Sequence: Synthetic oligonucleotide
aaagaaagcgcucgcucuc

SEQ ID NO: 39459 - RNA, 19 nt, Artificial Sequence
  Description of Artificial Sequence: Synthetic oligonucleotide
ugggauuaaagagugauca

SEQ ID NO: 39460 - RNA, 19 nt, Artificial Sequence
  Description of Artificial Sequence: Synthetic oligonucleotide
aaacagagacacuaagugu

SEQ ID NO: 39461 - RNA, 19 nt, Artificial Sequence
  Description of Artificial Sequence: Synthetic oligonucleotide
uuuauccacgacaaagagc

SEQ ID NO: 39462 - RNA, 19 nt, Artificial Sequence
  Description of Artificial Sequence: Synthetic oligonucleotide
agagcuauauuauuaugug

SEQ ID NO: 39463 - RNA, 19 nt, Artificial Sequence
  Description of Artificial Sequence: Synthetic oligonucleotide
aguaucuugcacugggaac

SEQ ID NO: 39464 - RNA, 19 nt, Artificial Sequence
  Description of Artificial Sequence: Synthetic oligonucleotide
uaugagagcuauauuauua

SEQ ID NO: 39465 - RNA, 19 nt, Artificial Sequence
  Description of Artificial Sequence: Synthetic oligonucleotide
aaacaugaguccuccaugu

SEQ ID NO: 39466 - RNA, 19 nt, Artificial Sequence
  Description of Artificial Sequence: Synthetic oligonucleotide
auauuaaugagcaggaaca

SEQ ID NO: 39467 - RNA, 19 nt, Artificial Sequence
  Description of Artificial Sequence: Synthetic oligonucleotide
uagauucucggccacacug

SEQ ID NO: 39468 - RNA, 19 nt, Artificial Sequence
  Description of Artificial Sequence: Synthetic oligonucleotide
cacccaaaauccaucaucg

SEQ ID NO: 39469 - RNA, 19 nt, Artificial Sequence
  Description of Artificial Sequence: Synthetic oligonucleotide
aguaaagcaaacaaguacu

SEQ ID NO: 39470 - RNA, 19 nt, Artificial Sequence
  Description of Artificial Sequence: Synthetic oligonucleotide
uaucaauggguuucguggg

SEQ ID NO: 39471 - RNA, 19 nt, Artificial Sequence
  Description of Artificial Sequence: Synthetic oligonucleotide
cuuuaaaccccucuuccgg

SEQ ID NO: 39472 - RNA, 19 nt, Artificial Sequence
  Description of Artificial Sequence: Synthetic oligonucleotide
aaaaccgcaugcaugaucu

SEQ ID NO: 39473 - RNA, 19 nt, Artificial Sequence
  Description of Artificial Sequence: Synthetic oligonucleotide
ugcaugggauuaaagagug

SEQ ID NO: 39474 - RNA, 19 nt, Artificial Sequence
  Description of Artificial Sequence: Synthetic oligonucleotide
ugucgaagcucuaaguuga

SEQ ID NO: 39475 - RNA, 19 nt, Artificial Sequence
  Description of Artificial Sequence: Synthetic oligonucleotide
ucggcuguagaaaauguca

SEQ ID NO: 39476 - RNA, 19 nt, Artificial Sequence
  Description of Artificial Sequence: Synthetic oligonucleotide
acagacucgggaaugacgc

SEQ ID NO: 39477 - RNA, 19 nt, Artificial Sequence
  Description of Artificial Sequence: Synthetic oligonucleotide
gagccuaugcuuuaaggcc

SEQ ID NO: 39478 - RNA, 19 nt, Artificial Sequence
  Description of Artificial Sequence: Synthetic oligonucleotide
acuacucacauucaacucu

SEQ ID NO: 39479 - RNA, 19 nt, Artificial Sequence
  Description of Artificial Sequence: Synthetic oligonucleotide
augauuuacucuuacugcu

SEQ ID NO: 39480 - RNA, 19 nt, Artificial Sequence
  Description of Artificial Sequence: Synthetic oligonucleotide
ugucuagccugcauuaugc

SEQ ID NO: 39481 - RNA, 19 nt, Artificial Sequence
  Description of Artificial Sequence: Synthetic oligonucleotide
agggcuuucacaguuaguc

SEQ ID NO: 39482 - RNA, 19 nt, Artificial Sequence
  Description of Artificial Sequence: Synthetic oligonucleotide
aucuccgccauuucaacac

SEQ ID NO: 39483 - RNA, 19 nt, Artificial Sequence
  Description of Artificial Sequence: Synthetic oligonucleotide
agagaugcagucuguuagc

SEQ ID NO: 39484 - RNA, 19 nt, Artificial Sequence
  Description of Artificial Sequence: Synthetic oligonucleotide
ucauuugcgaucauuuuau

SEQ ID NO: 39485 - RNA, 19 nt, Artificial Sequence
  Description of Artificial Sequence: Synthetic oligonucleotide
aucuaguuguucaagcgcc

SEQ ID NO: 39486 - RNA, 19 nt, Artificial Sequence
  Description of Artificial Sequence: Synthetic oligonucleotide
uccgaaauucucuucauaa

SEQ ID NO: 39487 - RNA, 19 nt, Artificial Sequence
  Description of Artificial Sequence: Synthetic oligonucleotide
auauacuguacuucagaag

SEQ ID NO: 39488 - RNA, 19 nt, Artificial Sequence
  Description of Artificial Sequence: Synthetic oligonucleotide
uuugcagucuauaaaccaa

SEQ ID NO: 39489 - RNA, 19 nt, Artificial Sequence
  Description of Artificial Sequence: Synthetic oligonucleotide
uuccaauugacgacacagg

SEQ ID NO: 39490 - RNA, 19 nt, Artificial Sequence
  Description of Artificial Sequence: Synthetic oligonucleotide
uauagagacaguccguauc

SEQ ID NO: 39491 - RNA, 19 nt, Artificial Sequence
  Description of Artificial Sequence: Synthetic oligonucleotide
acaaauuugcgccauucgu

SEQ ID NO: 39492 - RNA, 19 nt, Artificial Sequence
  Description of Artificial Sequence: Synthetic oligonucleotide
agcacuuacuccucugugg

SEQ ID NO: 39493 - RNA, 19 nt, Artificial Sequence
  Description of Artificial Sequence: Synthetic oligonucleotide
auuaucaauggguuucgug

SEQ ID NO: 39494 - RNA, 19 nt, Artificial Sequence
  Description of Artificial Sequence: Synthetic oligonucleotide
gaaucuuuccaucaaucga

SEQ ID NO: 39495 - RNA, 19 nt, Artificial Sequence
  Description of Artificial Sequence: Synthetic oligonucleotide
auuucaacacaccacuccu

SEQ ID NO: 39496 - RNA, 19 nt, Artificial Sequence
  Description of Artificial Sequence: Synthetic oligonucleotide
aaagcucaagguaucaucu

SEQ ID NO: 39497 - RNA, 19 nt, Artificial Sequence
  Description of Artificial Sequence: Synthetic oligonucleotide
agaagugugacacaauaua

SEQ ID NO: 39498 - RNA, 19 nt, Artificial Sequence
  Description of Artificial Sequence: Synthetic oligonucleotide
ugcaugacaucauccauug

SEQ ID NO: 39499 - RNA, 19 nt, Artificial Sequence
  Description of Artificial Sequence: Synthetic oligonucleotide
gauguuccgaacaucuggg

SEQ ID NO: 39500 - RNA, 19 nt, Artificial Sequence
  Description of Artificial Sequence: Synthetic oligonucleotide
gacgguuuuguaaucuucg

SEQ ID NO: 39501 - RNA, 19 nt, Artificial Sequence
  Description of Artificial Sequence: Synthetic oligonucleotide
uccacggacaccaucgccc

SEQ ID NO: 39502 - RNA, 19 nt, Artificial Sequence
  Description of Artificial Sequence: Synthetic oligonucleotide
cuauauuauuaugugcugc

SEQ ID NO: 39503 - RNA, 19 nt, Artificial Sequence
  Description of Artificial Sequence: Synthetic oligonucleotide
aacauguucgccaauucca

SEQ ID NO: 39504 - RNA, 19 nt, Artificial Sequence
  Description of Artificial Sequence: Synthetic oligonucleotide
ucugguacgccacguagcc

SEQ ID NO: 39505 - RNA, 19 nt, Artificial Sequence
  Description of Artificial Sequence: Synthetic oligonucleotide
uaaagcucaagguaucauc

SEQ ID NO: 39506 - RNA, 19 nt, Artificial Sequence
  Description of Artificial Sequence: Synthetic oligonucleotide
gacuugaaccauugugugg

SEQ ID NO: 39507 - RNA, 19 nt, Artificial Sequence
  Description of Artificial Sequence: Synthetic oligonucleotide
uguacuucagaagggcccg

SEQ ID NO: 39508 - RNA, 19 nt, Artificial Sequence
  Description of Artificial Sequence: Synthetic oligonucleotide
auccugguuacacagugag

SEQ ID NO: 39509 - RNA, 19 nt, Artificial Sequence
  Description of Artificial Sequence: Synthetic oligonucleotide
aggcaauugggacagucuc

SEQ ID NO: 39510 - RNA, 19 nt, Artificial Sequence
  Description of Artificial Sequence: Synthetic oligonucleotide
ccuggaacaaauuuggaag

SEQ ID NO: 39511 - RNA, 19 nt, Artificial Sequence
  Description of Artificial Sequence: Synthetic oligonucleotide
uacaacgcaguccuuacaa

SEQ ID NO: 39512 - RNA, 19 nt, Artificial Sequence
  Description of Artificial Sequence: Synthetic oligonucleotide
agaacuacucacauucaac

SEQ ID NO: 39513 - RNA, 19 nt, Artificial Sequence
  Description of Artificial Sequence: Synthetic oligonucleotide
guuagucaggcccacaaac

SEQ ID NO: 39514 - RNA, 19 nt, Artificial Sequence
  Description of Artificial Sequence: Synthetic oligonucleotide
uuuaaaccccucuuccggc

SEQ ID NO: 39515 - RNA, 19 nt, Artificial Sequence
  Description of Artificial Sequence: Synthetic oligonucleotide
gacccguaccuuuaaaccc

SEQ ID NO: 39516 - RNA, 19 nt, Artificial Sequence
  Description of Artificial Sequence: Synthetic oligonucleotide
acuauaaagcucaagguau

SEQ ID NO: 39517 - RNA, 19 nt, Artificial Sequence
  Description of Artificial Sequence: Synthetic oligonucleotide
agaacagcgagccuaugcu

SEQ ID NO: 39518 - RNA, 19 nt, Artificial Sequence
  Description of Artificial Sequence: Synthetic oligonucleotide
uacucuuacugcuacucug

SEQ ID NO: 39519 - RNA, 19 nt, Artificial Sequence
  Description of Artificial Sequence: Synthetic oligonucleotide
uuaaugcccuaacauuuca

SEQ ID NO: 39520 - RNA, 19 nt, Artificial Sequence
  Description of Artificial Sequence: Synthetic oligonucleotide
ucuagccugcauuaugccc

SEQ ID NO: 39521 - RNA, 19 nt, Artificial Sequence
  Description of Artificial Sequence: Synthetic oligonucleotide
ucuuccggcauacaaacuu

SEQ ID NO: 39522 - RNA, 19 nt, Artificial Sequence
  Description of Artificial Sequence: Synthetic oligonucleotide
uuaacaaauccugaaggau

SEQ ID NO: 39523 - RNA, 19 nt, Artificial Sequence
  Description of Artificial Sequence: Synthetic oligonucleotide
cauaauugguauuuuaucu

SEQ ID NO: 39524 - RNA, 19 nt, Artificial Sequence
  Description of Artificial Sequence: Synthetic oligonucleotide
uuagaaucuuuccaucaau

SEQ ID NO: 39525 - RNA, 19 nt, Artificial Sequence
  Description of Artificial Sequence: Synthetic oligonucleotide
ugagagcuauauuauuaug

SEQ ID NO: 39526 - RNA, 19 nt, Artificial Sequence
  Description of Artificial Sequence: Synthetic oligonucleotide
ucagccgaaguacacgaca

SEQ ID NO: 39527 - RNA, 19 nt, Artificial Sequence
  Description of Artificial Sequence: Synthetic oligonucleotide
acuugaaccauuguguggu

SEQ ID NO: 39528 - RNA, 19 nt, Artificial Sequence
  Description of Artificial Sequence: Synthetic oligonucleotide
uccuggaacaaauuuggaa

SEQ ID NO: 39529 - RNA, 19 nt, Artificial Sequence
  Description of Artificial Sequence: Synthetic oligonucleotide
cuauaacccagcagaacag

SEQ ID NO: 39530 - RNA, 19 nt, Artificial Sequence
  Description of Artificial Sequence: Synthetic oligonucleotide
ugauagccuacaugugugg

SEQ ID NO: 39531 - RNA, 19 nt, Artificial Sequence
  Description of Artificial Sequence: Synthetic oligonucleotide
aagcuuagauucucggcca

SEQ ID NO: 39532 - RNA, 19 nt, Artificial Sequence
  Description of Artificial Sequence: Synthetic oligonucleotide
auggcaacuauaaagcuca

SEQ ID NO: 39533 - RNA, 19 nt, Artificial Sequence
  Description of Artificial Sequence: Synthetic oligonucleotide
uguuagcugcuuauggccu

SEQ ID NO: 39534 - RNA, 19 nt, Artificial Sequence
  Description of Artificial Sequence: Synthetic oligonucleotide
uuguugacgguuuuguaau

SEQ ID NO: 39535 - RNA, 19 nt, Artificial Sequence
  Description of Artificial Sequence: Synthetic oligonucleotide
gguauacucucguaggucc

SEQ ID NO: 39536 - RNA, 19 nt, Artificial Sequence
  Description of Artificial Sequence: Synthetic oligonucleotide
guuucguggguguugauuc

SEQ ID NO: 39537 - RNA, 19 nt, Artificial Sequence
  Description of Artificial Sequence: Synthetic oligonucleotide
uugcucaucuaguuguuca

SEQ ID NO: 39538 - RNA, 19 nt, Artificial Sequence
  Description of Artificial Sequence: Synthetic oligonucleotide
ugcgaucauuuuauguaag

SEQ ID NO: 39539 - RNA, 19 nt, Artificial Sequence
  Description of Artificial Sequence: Synthetic oligonucleotide
ugguaacuguuucagcaca

SEQ ID NO: 39540 - RNA, 19 nt, Artificial Sequence
  Description of Artificial Sequence: Synthetic oligonucleotide
auguucgccaauuccaacu

SEQ ID NO: 39541 - RNA, 19 nt, Artificial Sequence
  Description of Artificial Sequence: Synthetic oligonucleotide
uccacauaaggcuccauau

SEQ ID NO: 39542 - RNA, 19 nt, Artificial Sequence
  Description of Artificial Sequence: Synthetic oligonucleotide
gcuacugaaaaccgcaugc

SEQ ID NO: 39543 - RNA, 19 nt, Artificial Sequence
  Description of Artificial Sequence: Synthetic oligonucleotide
cugaaaaccgcaugcauga

SEQ ID NO: 39544 - RNA, 19 nt, Artificial Sequence
  Description of Artificial Sequence: Synthetic oligonucleotide
auguuugauuggccgacac

SEQ ID NO: 39545 - RNA, 19 nt, Artificial Sequence
  Description of Artificial Sequence: Synthetic oligonucleotide
ugcccuaacauuucaaauu

SEQ ID NO: 39546 - RNA, 19 nt, Artificial Sequence
  Description of Artificial Sequence: Synthetic oligonucleotide
uguccaagcagacccguac

SEQ ID NO: 39547 - RNA, 19 nt, Artificial Sequence
  Description of Artificial Sequence: Synthetic oligonucleotide
uggauguuuaacuccaauu

SEQ ID NO: 39548 - RNA, 19 nt, Artificial Sequence
  Description of Artificial Sequence: Synthetic oligonucleotide
agagacaguccguauccuc

SEQ ID NO: 39549 - RNA, 19 nt, Artificial Sequence
  Description of Artificial Sequence: Synthetic oligonucleotide
gaaaaugucagcugcguau

SEQ ID NO: 39550 - RNA, 19 nt, Artificial Sequence
  Description of Artificial Sequence: Synthetic oligonucleotide
acgacacaggaguagaccu

SEQ ID NO: 39551 - RNA, 19 nt, Artificial Sequence
  Description of Artificial Sequence: Synthetic oligonucleotide
aagguugacagaguuuaga

SEQ ID NO: 39552 - RNA, 19 nt, Artificial Sequence
  Description of Artificial Sequence: Synthetic oligonucleotide
gcuauaacccagcagaaca

SEQ ID NO: 39553 - RNA, 19 nt, Artificial Sequence
  Description of Artificial Sequence: Synthetic oligonucleotide
ugguacgccacguagcccu

SEQ ID NO: 39554 - RNA, 19 nt, Artificial Sequence
  Description of Artificial Sequence: Synthetic oligonucleotide
cacauauuaaugagcagga

SEQ ID NO: 39555 - RNA, 19 nt, Artificial Sequence
  Description of Artificial Sequence: Synthetic oligonucleotide
agcucuaaguugagaaacc

SEQ ID NO: 39556 - RNA, 19 nt, Artificial Sequence
  Description of Artificial Sequence: Synthetic oligonucleotide
uucugguacgccacguagc

SEQ ID NO: 39557 - RNA, 19 nt, Artificial Sequence
  Description of Artificial Sequence: Synthetic oligonucleotide
ucuacaacgcaguccuuac

SEQ ID NO: 39558 - RNA, 19 nt, Artificial Sequence
  Description of Artificial Sequence: Synthetic oligonucleotide
guauccucuggccaguuac

SEQ ID NO: 39559 - RNA, 19 nt, Artificial Sequence
  Description of Artificial Sequence: Synthetic oligonucleotide
ucaaucgacagguucugau

SEQ ID NO: 39560 - RNA, 19 nt, Artificial Sequence
  Description of Artificial Sequence: Synthetic oligonucleotide
uguaugcauugcgagaaca

SEQ ID NO: 39561 - RNA, 19 nt, Artificial Sequence
  Description of Artificial Sequence: Synthetic oligonucleotide
uucuaacaaauuugcgcca

SEQ ID NO: 39562 - RNA, 19 nt, Artificial Sequence
  Description of Artificial Sequence: Synthetic oligonucleotide
acccaaaauccaucaucgc

SEQ ID NO: 39563 - RNA, 19 nt, Artificial Sequence
  Description of Artificial Sequence: Synthetic oligonucleotide
uaauguuugauuggccgac

SEQ ID NO: 39564 - RNA, 19 nt, Artificial Sequence
  Description of Artificial Sequence: Synthetic oligonucleotide
cuacucacauucaacucug

SEQ ID NO: 39565 - RNA, 19 nt, Artificial Sequence
  Description of Artificial Sequence: Synthetic oligonucleotide
uuacucuuacugcuacucu

SEQ ID NO: 39566 - RNA, 19 nt, Artificial Sequence
  Description of Artificial Sequence: Synthetic oligonucleotide
ucguguuucgcuuugccuu

SEQ ID NO: 39567 - RNA, 19 nt, Artificial Sequence
  Description of Artificial Sequence: Synthetic oligonucleotide
gacagacucgggaaugacg

SEQ ID NO: 39568 - RNA, 19 nt, Artificial Sequence
  Description of Artificial Sequence: Synthetic oligonucleotide
uggcagaaagguuaacagu

SEQ ID NO: 39569 - RNA, 19 nt, Artificial Sequence
  Description of Artificial Sequence: Synthetic oligonucleotide
uaacccagcagaacagcga

SEQ ID NO: 39570 - RNA, 19 nt, Artificial Sequence
  Description of Artificial Sequence: Synthetic oligonucleotide
uucacgugggcgauguagu

SEQ ID NO: 39571 - RNA, 19 nt, Artificial Sequence
  Description of Artificial Sequence: Synthetic oligonucleotide
uuugaaucaucugccacuc

SEQ ID NO: 39572 - RNA, 19 nt, Artificial Sequence
  Description of Artificial Sequence: Synthetic oligonucleotide
auauuauuaugugcugcag

SEQ ID NO: 39573 - RNA, 19 nt, Artificial Sequence
  Description of Artificial Sequence: Synthetic oligonucleotide
auaucggcuguagaaaaug

SEQ ID NO: 39574 - RNA, 19 nt, Artificial Sequence
  Description of Artificial Sequence: Synthetic oligonucleotide
guaucuugcacugggaaca

SEQ ID NO: 39575 - RNA, 19 nt, Artificial Sequence
  Description of Artificial Sequence: Synthetic oligonucleotide
uguaggucacuaagcagaa

SEQ ID NO: 39576 - RNA, 19 nt, Artificial Sequence
  Description of Artificial Sequence: Synthetic oligonucleotide
uaugcauugcgagaacagu

SEQ ID NO: 39577 - RNA, 19 nt, Artificial Sequence
  Description of Artificial Sequence: Synthetic oligonucleotide
acccguaccuuuaaacccc

SEQ ID NO: 39578 - RNA, 19 nt, Artificial Sequence
  Description of Artificial Sequence: Synthetic oligonucleotide
cuucugguacgccacguag

SEQ ID NO: 39579 - RNA, 19 nt, Artificial Sequence
  Description of Artificial Sequence: Synthetic oligonucleotide
ucugacgcuugguaccucc

SEQ ID NO: 39580 - RNA, 19 nt, Artificial Sequence
  Description of Artificial Sequence: Synthetic oligonucleotide
gacauaacagguagcuccc

SEQ ID NO: 39581 - RNA, 19 nt, Artificial Sequence
  Description of Artificial Sequence: Synthetic oligonucleotide
ggcgacucuacauauuugc

SEQ ID NO: 39582 - RNA, 19 nt, Artificial Sequence
  Description of Artificial Sequence: Synthetic oligonucleotide
uaguuguucaagcgccagc

SEQ ID NO: 39583 - RNA, 19 nt, Artificial Sequence
  Description of Artificial Sequence: Synthetic oligonucleotide
ucguaggucccgcugcugc

SEQ ID NO: 39584 - RNA, 19 nt, Artificial Sequence
  Description of Artificial Sequence: Synthetic oligonucleotide
caaaggacccaccuuuaug

SEQ ID NO: 39585 - RNA, 19 nt, Artificial Sequence
  Description of Artificial Sequence: Synthetic oligonucleotide
acagcguucuacaacgcag

SEQ ID NO: 39586 - RNA, 19 nt, Artificial Sequence
  Description of Artificial Sequence: Synthetic oligonucleotide
uuggauguuuaacuccaau

SEQ ID NO: 39587 - RNA, 19 nt, Artificial Sequence
  Description of Artificial Sequence: Synthetic oligonucleotide
cagacccguaccuuuaaac

SEQ ID NO: 39588 - RNA, 19 nt, Artificial Sequence
  Description of Artificial Sequence: Synthetic oligonucleotide
acgcuugguaccuccauug

SEQ ID NO: 39589 - RNA, 19 nt, Artificial Sequence
  Description of Artificial Sequence: Synthetic oligonucleotide
gccuuuaguaagaugacag

SEQ ID NO: 39590 - RNA, 19 nt, Artificial Sequence
  Description of Artificial Sequence: Synthetic oligonucleotide
aaggacccaccuuuaugcu

SEQ ID NO: 39591 - RNA, 19 nt, Artificial Sequence
  Description of Artificial Sequence: Synthetic oligonucleotide
caaucgacagguucugauc

SEQ ID NO: 39592 - RNA, 19 nt, Artificial Sequence
  Description of Artificial Sequence: Synthetic oligonucleotide
gaagcucuaaguugagaaa

SEQ ID NO: 39593 - RNA, 19 nt, Artificial Sequence
  Description of Artificial Sequence: Synthetic oligonucleotide
ggggauguaggucacuaag

SEQ ID NO: 39594 - RNA, 19 nt, Artificial Sequence
  Description of Artificial Sequence: Synthetic oligonucleotide
auguaugcauugcgagaac

SEQ ID NO: 39595 - RNA, 19 nt, Artificial Sequence
  Description of Artificial Sequence: Synthetic oligonucleotide
cuuccggcauacaaacuug

SEQ ID NO: 39596 - RNA, 19 nt, Artificial Sequence
  Description of Artificial Sequence: Synthetic oligonucleotide
gaacaaauuuggaagugaa

SEQ ID NO: 39597 - RNA, 19 nt, Artificial Sequence
  Description of Artificial Sequence: Synthetic oligonucleotide
auacuguacuucagaaggg

SEQ ID NO: 39598 - RNA, 19 nt, Artificial Sequence
  Description of Artificial Sequence: Synthetic oligonucleotide
cuuuauugaaggggucccg

SEQ ID NO: 39599 - RNA, 19 nt, Artificial Sequence
  Description of Artificial Sequence: Synthetic oligonucleotide
guaugcauugcgagaacag

SEQ ID NO: 39600 - RNA, 19 nt, Artificial Sequence
  Description of Artificial Sequence: Synthetic oligonucleotide
ucgaucuaccagcucuuga

SEQ ID NO: 39601 - RNA, 19 nt, Artificial Sequence
  Description of Artificial Sequence: Synthetic oligonucleotide
uccauaucggcuguagaaa

SEQ ID NO: 39602 - RNA, 19 nt, Artificial Sequence
  Description of Artificial Sequence: Synthetic oligonucleotide
agcccggggaucuuaagcu

SEQ ID NO: 39603 - RNA, 19 nt, Artificial Sequence
  Description of Artificial Sequence: Synthetic oligonucleotide
uguucgccaauuccaacua

SEQ ID NO: 39604 - RNA, 19 nt, Artificial Sequence
  Description of Artificial Sequence: Synthetic oligonucleotide
uagcucccagguuagucag

SEQ ID NO: 39605 - RNA, 19 nt, Artificial Sequence
  Description of Artificial Sequence: Synthetic oligonucleotide
cuuagauucucggccacac

SEQ ID NO: 39606 - RNA, 19 nt, Artificial Sequence
  Description of Artificial Sequence: Synthetic oligonucleotide
cugggaggucuucugacgc

SEQ ID NO: 39607 - RNA, 19 nt, Artificial Sequence
  Description of Artificial Sequence: Synthetic oligonucleotide
aaccgcaugcaugaucuga

SEQ ID NO: 39608 - RNA, 19 nt, Artificial Sequence
  Description of Artificial Sequence: Synthetic oligonucleotide
gacaguccguauccucugg

SEQ ID NO: 39609 - RNA, 19 nt, Artificial Sequence
  Description of Artificial Sequence: Synthetic oligonucleotide
augcauugcgagaacagug

SEQ ID NO: 39610 - RNA, 19 nt, Artificial Sequence
  Description of Artificial Sequence: Synthetic oligonucleotide
uuggguuuacgggucuggg

SEQ ID NO: 39611 - RNA, 19 nt, Artificial Sequence
  Description of Artificial Sequence: Synthetic oligonucleotide
gguucaucagccuuuagua

SEQ ID NO: 39612 - RNA, 19 nt, Artificial Sequence
  Description of Artificial Sequence: Synthetic oligonucleotide
guagcucccagguuaguca

SEQ ID NO: 39613 - RNA, 19 nt, Artificial Sequence
  Description of Artificial Sequence: Synthetic oligonucleotide
gacauagaugguggcuugg

SEQ ID NO: 39614 - RNA, 19 nt, Artificial Sequence
  Description of Artificial Sequence: Synthetic oligonucleotide
agcguucuacaacgcaguc

SEQ ID NO: 39615 - RNA, 19 nt, Artificial Sequence
  Description of Artificial Sequence: Synthetic oligonucleotide
aauguccaagcagacccgu

SEQ ID NO: 39616 - RNA, 19 nt, Artificial Sequence
  Description of Artificial Sequence: Synthetic oligonucleotide
uaacuccaauucauagaac

SEQ ID NO: 39617 - RNA, 19 nt, Artificial Sequence
  Description of Artificial Sequence: Synthetic oligonucleotide
aaagguugacagaguuuag

SEQ ID NO: 39618 - RNA, 19 nt, Artificial Sequence
  Description of Artificial Sequence: Synthetic oligonucleotide
ggagaguuggggauguagg

SEQ ID NO: 39619 - RNA, 19 nt, Artificial Sequence
  Description of Artificial Sequence: Synthetic oligonucleotide
uaccauucuccagacugag

SEQ ID NO: 39620 - RNA, 19 nt, Artificial Sequence
  Description of Artificial Sequence: Synthetic oligonucleotide
uccggcauacaaacuugca

SEQ ID NO: 39621 - RNA, 19 nt, Artificial Sequence
  Description of Artificial Sequence: Synthetic oligonucleotide
guugacauaacagguagcu

SEQ ID NO: 39622 - RNA, 19 nt, Artificial Sequence
  Description of Artificial Sequence: Synthetic oligonucleotide
aauguuugauuggccgaca

SEQ ID NO: 39623 - RNA, 19 nt, Artificial Sequence
  Description of Artificial Sequence: Synthetic oligonucleotide
accaucgcccauuguguag

SEQ ID NO: 39624 - RNA, 19 nt, Artificial Sequence
  Description of Artificial Sequence: Synthetic oligonucleotide
ugauuacuuuauccacgac

SEQ ID NO: 39625 - RNA, 19 nt, Artificial Sequence
  Description of Artificial Sequence: Synthetic oligonucleotide
aucggcuguagaaaauguc

SEQ ID NO: 39626 - RNA, 19 nt, Artificial Sequence
  Description of Artificial Sequence: Synthetic oligonucleotide
cuucagccgaaguacacga

SEQ ID NO: 39627 - RNA, 19 nt, Artificial Sequence
  Description of Artificial Sequence: Synthetic oligonucleotide
auauagagacaguccguau

SEQ ID NO: 39628 - RNA, 19 nt, Artificial Sequence
  Description of Artificial Sequence: Synthetic oligonucleotide
cuccauaucggcuguagaa

SEQ ID NO: 39629 - RNA, 19 nt, Artificial Sequence
  Description of Artificial Sequence: Synthetic oligonucleotide
uggguuuacgggucuggga

SEQ ID NO: 39630 - RNA, 19 nt, Artificial Sequence
  Description of Artificial Sequence: Synthetic oligonucleotide
acgguuuuguaaucuucgu

SEQ ID NO: 39631 - RNA, 19 nt, Artificial Sequence
  Description of Artificial Sequence: Synthetic oligonucleotide
uuccgaaauucucuucaua

SEQ ID NO: 39632 - RNA, 19 nt, Artificial Sequence
  Description of Artificial Sequence: Synthetic oligonucleotide
uucaagcgccagcuggcgc

SEQ ID NO: 39633 - RNA, 19 nt, Artificial Sequence
  Description of Artificial Sequence: Synthetic oligonucleotide
gacagcguucuacaacgca

SEQ ID NO: 39634 - RNA, 19 nt, Artificial Sequence
  Description of Artificial Sequence: Synthetic oligonucleotide
cugucugcgcaucuccgcc

SEQ ID NO: 39635 - RNA, 19 nt, Artificial Sequence
  Description of Artificial Sequence: Synthetic oligonucleotide
uuucguggguguugauuca

SEQ ID NO: 39636 - RNA, 19 nt, Artificial Sequence
  Description of Artificial Sequence: Synthetic oligonucleotide
cauuaugcccugugcuuug

SEQ ID NO: 39637 - RNA, 19 nt, Artificial Sequence
  Description of Artificial Sequence: Synthetic oligonucleotide
uuacgggucugggauuuag

SEQ ID NO: 39638 - RNA, 19 nt, Artificial Sequence
  Description of Artificial Sequence: Synthetic oligonucleotide
gccaguuacugagacacgg

SEQ ID NO: 39639 - RNA, 19 nt, Artificial Sequence
  Description of Artificial Sequence: Synthetic oligonucleotide
cuuugauuaaagucagggu

SEQ ID NO: 39640 - RNA, 19 nt, Artificial Sequence
  Description of Artificial Sequence: Synthetic oligonucleotide
uuacuuuauccacgacaaa

SEQ ID NO: 39641 - RNA, 19 nt, Artificial Sequence
  Description of Artificial Sequence: Synthetic oligonucleotide
agagacacuaagugucuuu

SEQ ID NO: 39642 - RNA, 19 nt, Artificial Sequence
  Description of Artificial Sequence: Synthetic oligonucleotide
ccaauugacgacacaggag

SEQ ID NO: 39643 - RNA, 19 nt, Artificial Sequence
  Description of Artificial Sequence: Synthetic oligonucleotide
auagccuacauguguggua

SEQ ID NO: 39644 - RNA, 19 nt, Artificial Sequence
  Description of Artificial Sequence: Synthetic oligonucleotide
aggcccacaaacgaauucu

SEQ ID NO: 39645 - RNA, 19 nt, Artificial Sequence
  Description of Artificial Sequence: Synthetic oligonucleotide
agaaagcgcucgcucucuc

SEQ ID NO: 39646 - RNA, 19 nt, Artificial Sequence
  Description of Artificial Sequence: Synthetic oligonucleotide
auacucucguaggucccgc

SEQ ID NO: 39647 - RNA, 19 nt, Artificial Sequence
  Description of Artificial Sequence: Synthetic oligonucleotide
ucucgugauuuugauuacu

SEQ ID NO: 39648 - RNA, 19 nt, Artificial Sequence
  Description of Artificial Sequence: Synthetic oligonucleotide
aagcgcucgcucucucaag

SEQ ID NO: 39649 - RNA, 19 nt, Artificial Sequence
  Description of Artificial Sequence: Synthetic oligonucleotide
gcccuaacauuucaaauuc

SEQ ID NO: 39650 - RNA, 19 nt, Artificial Sequence
  Description of Artificial Sequence: Synthetic oligonucleotide
cauuugcgaucauuuuaug

SEQ ID NO: 39651 - RNA, 19 nt, Artificial Sequence
  Description of Artificial Sequence: Synthetic oligonucleotide
auuccgaaauucucuucau

SEQ ID NO: 39652 - RNA, 19 nt, Artificial Sequence
  Description of Artificial Sequence: Synthetic oligonucleotide
ucacgugggcgauguagug

SEQ ID NO: 39653 - RNA, 19 nt, Artificial Sequence
  Description of Artificial Sequence: Synthetic oligonucleotide
cuaguuguucaagcgccag

SEQ ID NO: 39654 - RNA, 19 nt, Artificial Sequence
  Description of Artificial Sequence: Synthetic oligonucleotide
uuauugaaggggucccguu

SEQ ID NO: 39655 - RNA, 19 nt, Artificial Sequence
  Description of Artificial Sequence: Synthetic oligonucleotide
uaaugccguuucugaaggc

SEQ ID NO: 39656 - RNA, 19 nt, Artificial Sequence
  Description of Artificial Sequence: Synthetic oligonucleotide
caucaucgcccuucauugc

SEQ ID NO: 39657 - RNA, 19 nt, Artificial Sequence
  Description of Artificial Sequence: Synthetic oligonucleotide
aauuugcgccauucgucua

SEQ ID NO: 39658 - RNA, 19 nt, Artificial Sequence
  Description of Artificial Sequence: Synthetic oligonucleotide
aaaccgcaugcaugaucug

SEQ ID NO: 39659 - RNA, 19 nt, Artificial Sequence
  Description of Artificial Sequence: Synthetic oligonucleotide
cagccuuuaguaagaugac

SEQ ID NO: 39660 - RNA, 19 nt, Artificial Sequence
  Description of Artificial Sequence: Synthetic oligonucleotide
uacgggucugggauuuaga

SEQ ID NO: 39661 - RNA, 19 nt, Artificial Sequence
  Description of Artificial Sequence: Synthetic oligonucleotide
uguugacgguuuuguaauc

SEQ ID NO: 39662 - RNA, 19 nt, Artificial Sequence
  Description of Artificial Sequence: Synthetic oligonucleotide
auuuggcagaaagguuaac

SEQ ID NO: 39663 - RNA, 19 nt, Artificial Sequence
  Description of Artificial Sequence: Synthetic oligonucleotide
cagcccggggaucuuaagc

SEQ ID NO: 39664 - RNA, 19 nt, Artificial Sequence
  Description of Artificial Sequence: Synthetic oligonucleotide
acgccgaggguaccaagag

SEQ ID NO: 39665 - RNA, 19 nt, Artificial Sequence
  Description of Artificial Sequence: Synthetic oligonucleotide
gucuagccugcauuaugcc

SEQ ID NO: 39666 - RNA, 19 nt, Artificial Sequence
  Description of Artificial Sequence: Synthetic oligonucleotide
guacacgacagcguucuac

SEQ ID NO: 39667 - RNA, 19 nt, Artificial Sequence
  Description of Artificial Sequence: Synthetic oligonucleotide
ucucguaggucccgcugcu

SEQ ID NO: 39668 - RNA, 19 nt, Artificial Sequence
  Description of Artificial Sequence: Synthetic oligonucleotide
uccugguuacacagugagu

SEQ ID NO: 39669 - RNA, 19 nt, Artificial Sequence
  Description of Artificial Sequence: Synthetic oligonucleotide
uucagccgaaguacacgac

SEQ ID NO: 39670 - RNA, 19 nt, Artificial Sequence
  Description of Artificial Sequence: Synthetic oligonucleotide
gcgagccuaugcuuuaagg

SEQ ID NO: 39671 - RNA, 19 nt, Artificial Sequence
  Description of Artificial Sequence: Synthetic oligonucleotide
cacgugggcgauguagugg

SEQ ID NO: 39672 - RNA, 19 nt, Artificial Sequence
  Description of Artificial Sequence: Synthetic oligonucleotide
caguuagucugggaccucc

SEQ ID NO: 39673 - RNA, 19 nt, Artificial Sequence
  Description of Artificial Sequence: Synthetic oligonucleotide
agcgagccuaugcuuuaag

SEQ ID NO: 39674 - RNA, 19 nt, Artificial Sequence
  Description of Artificial Sequence: Synthetic oligonucleotide
ggacccaccuuuaugcucc

SEQ ID NO: 39675 - RNA, 19 nt, Artificial Sequence
  Description of Artificial Sequence: Synthetic oligonucleotide
gugugguaacuguuucagc

SEQ ID NO: 39676 - RNA, 19 nt, Artificial Sequence
  Description of Artificial Sequence: Synthetic oligonucleotide
cacgacaaagagcuuuuga

SEQ ID NO: 39677 - RNA, 19 nt, Artificial Sequence
  Description of Artificial Sequence: Synthetic oligonucleotide
ugaccugcuucugguacgc

SEQ ID NO: 39678 - RNA, 19 nt, Artificial Sequence
  Description of Artificial Sequence: Synthetic oligonucleotide
cauucaacucuggagcuga

SEQ ID NO: 39679 - RNA, 19 nt, Artificial Sequence
  Description of Artificial Sequence: Synthetic oligonucleotide
caucaaucgacagguucug

SEQ ID NO: 39680 - RNA, 19 nt, Artificial Sequence
  Description of Artificial Sequence: Synthetic oligonucleotide
agaaagguuaacagugauu

SEQ ID NO: 39681 - RNA, 19 nt, Artificial Sequence
  Description of Artificial Sequence: Synthetic oligonucleotide
gaaagcgcucgcucucuca

SEQ ID NO: 39682 - RNA, 19 nt, Artificial Sequence
  Description of Artificial Sequence: Synthetic oligonucleotide
gagacacuaagugucuuua

SEQ ID NO: 39683 - RNA, 19 nt, Artificial Sequence
  Description of Artificial Sequence: Synthetic oligonucleotide
ucgaagcucuaaguugaga

SEQ ID NO: 39684 - RNA, 19 nt, Artificial Sequence
  Description of Artificial Sequence: Synthetic oligonucleotide
uucaacucuggagcugagu

SEQ ID NO: 39685 - RNA, 19 nt, Artificial Sequence
  Description of Artificial Sequence: Synthetic oligonucleotide
gggauguaggucacuaagc

SEQ ID NO: 39686 - RNA, 19 nt, Artificial Sequence
  Description of Artificial Sequence: Synthetic oligonucleotide
aguccuuacaaagggcuuu

SEQ ID NO: 39687 - RNA, 19 nt, Artificial Sequence
  Description of Artificial Sequence: Synthetic oligonucleotide
acaccaucgcccauugugu

SEQ ID NO: 39688 - RNA, 19 nt, Artificial Sequence
  Description of Artificial Sequence: Synthetic oligonucleotide
ggcuacugaaaaccgcaug

SEQ ID NO: 39689 - RNA, 19 nt, Artificial Sequence
  Description of Artificial Sequence: Synthetic oligonucleotide
uguuacuguuuugcaguaa

SEQ ID NO: 39690 - RNA, 19 nt, Artificial Sequence
  Description of Artificial Sequence: Synthetic oligonucleotide
ugggaggucuucugacgcu

SEQ ID NO: 39691 - RNA, 19 nt, Artificial Sequence
  Description of Artificial Sequence: Synthetic oligonucleotide
auguuugucuagccugcau

SEQ ID NO: 39692 - RNA, 19 nt, Artificial Sequence
  Description of Artificial Sequence: Synthetic oligonucleotide
agauucucggccacacuga

SEQ ID NO: 39693 - RNA, 19 nt, Artificial Sequence
  Description of Artificial Sequence: Synthetic oligonucleotide
ugccgcaguuuguuccaag

SEQ ID NO: 39694 - RNA, 19 nt, Artificial Sequence
  Description of Artificial Sequence: Synthetic oligonucleotide
agcugcgcaaggaagacuu

SEQ ID NO: 39695 - RNA, 19 nt, Artificial Sequence
  Description of Artificial Sequence: Synthetic oligonucleotide
gagacaguccguauccucu

SEQ ID NO: 39696 - RNA, 19 nt, Artificial Sequence
  Description of Artificial Sequence: Synthetic oligonucleotide
ccaacuaaacaauuggggu

SEQ ID NO: 39697 - RNA, 19 nt, Artificial Sequence
  Description of Artificial Sequence: Synthetic oligonucleotide
augacagacucgggaauga

SEQ ID NO: 39698 - RNA, 19 nt, Artificial Sequence
  Description of Artificial Sequence: Synthetic oligonucleotide
ucguggguguugauucauc

SEQ ID NO: 39699 - RNA, 19 nt, Artificial Sequence
  Description of Artificial Sequence: Synthetic oligonucleotide
caauauagagacaguccgu

SEQ ID NO: 39700 - RNA, 19 nt, Artificial Sequence
  Description of Artificial Sequence: Synthetic oligonucleotide
ucgacagguucugaucaaa

SEQ ID NO: 39701 - RNA, 19 nt, Artificial Sequence
  Description of Artificial Sequence: Synthetic oligonucleotide
cuccgccauuucaacacac

SEQ ID NO: 39702 - RNA, 19 nt, Artificial Sequence
  Description of Artificial Sequence: Synthetic oligonucleotide
gggaccuccuccauaucgg

SEQ ID NO: 39703 - RNA, 19 nt, Artificial Sequence
  Description of Artificial Sequence: Synthetic oligonucleotide
caucuccgccauuucaaca

SEQ ID NO: 39704 - RNA, 19 nt, Artificial Sequence
  Description of Artificial Sequence: Synthetic oligonucleotide
gcacuuacuccucugugga

SEQ ID NO: 39705 - RNA, 19 nt, Artificial Sequence
  Description of Artificial Sequence: Synthetic oligonucleotide
cucgggaaugacgccgagg

SEQ ID NO: 39706 - RNA, 19 nt, Artificial Sequence
  Description of Artificial Sequence: Synthetic oligonucleotide
aucgacagguucugaucaa

SEQ ID NO: 39707 - RNA, 19 nt, Artificial Sequence
  Description of Artificial Sequence: Synthetic oligonucleotide
gaggaccgcgcugaguuca

SEQ ID NO: 39708 - RNA, 19 nt, Artificial Sequence
  Description of Artificial Sequence: Synthetic oligonucleotide
ggcaacuauaaagcucaag

SEQ ID NO: 39709 - RNA, 19 nt, Artificial Sequence
  Description of Artificial Sequence: Synthetic oligonucleotide
gacgccgaggguaccaaga

SEQ ID NO: 39710 - RNA, 19 nt, Artificial Sequence
  Description of Artificial Sequence: Synthetic oligonucleotide
gccgcaguuuguuccaagc

SEQ ID NO: 39711 - RNA, 19 nt, Artificial Sequence
  Description of Artificial Sequence: Synthetic oligonucleotide
gguaccuccauugcuuuga

SEQ ID NO: 39712 - RNA, 19 nt, Artificial Sequence
  Description of Artificial Sequence: Synthetic oligonucleotide
gcugcguauuccgaaauuc

SEQ ID NO: 39713 - RNA, 19 nt, Artificial Sequence
  Description of Artificial Sequence: Synthetic oligonucleotide
uccuuacaaagggcuuuca

SEQ ID NO: 39714 - RNA, 19 nt, Artificial Sequence
  Description of Artificial Sequence: Synthetic oligonucleotide
uucguggguguugauucau

SEQ ID NO: 39715 - RNA, 19 nt, Artificial Sequence
  Description of Artificial Sequence: Synthetic oligonucleotide
cacauucaacucuggagcu

SEQ ID NO: 39716 - RNA, 19 nt, Artificial Sequence
  Description of Artificial Sequence: Synthetic oligonucleotide
acaguuagucugggaccuc

SEQ ID NO: 39717 - RNA, 19 nt, Artificial Sequence
  Description of Artificial Sequence: Synthetic oligonucleotide
gaagagccggguaauaguu

SEQ ID NO: 39718 - RNA, 19 nt, Artificial Sequence
  Description of Artificial Sequence: Synthetic oligonucleotide
gucccguuuaucuucccgu

SEQ ID NO: 39719 - RNA, 19 nt, Artificial Sequence
  Description of Artificial Sequence: Synthetic oligonucleotide
cgaagcucuaaguugagaa

SEQ ID NO: 39720 - RNA, 19 nt, Artificial Sequence
  Description of Artificial Sequence: Synthetic oligonucleotide
guaccuuuaaaccccucuu

SEQ ID NO: 39721 - RNA, 19 nt, Artificial Sequence
  Description of Artificial Sequence: Synthetic oligonucleotide
ugcgcaucuccgccauuuc

SEQ ID NO: 39722 - RNA, 19 nt, Artificial Sequence
  Description of Artificial Sequence: Synthetic oligonucleotide
uuugcgccauucgucuaaa

SEQ ID NO: 39723 - RNA, 19 nt, Artificial Sequence
  Description of Artificial Sequence: Synthetic oligonucleotide
ggaaugacgccgaggguac

SEQ ID NO: 39724 - RNA, 19 nt, Artificial Sequence
  Description of Artificial Sequence: Synthetic oligonucleotide
acgauguuccgaacaucug

SEQ ID NO: 39725 - RNA, 19 nt, Artificial Sequence
  Description of Artificial Sequence: Synthetic oligonucleotide
ggaccuccuccauaucggc

SEQ ID NO: 39726 - RNA, 19 nt, Artificial Sequence
  Description of Artificial Sequence: Synthetic oligonucleotide
ggggcuacugaaaaccgca

SEQ ID NO: 39727 - RNA, 19 nt, Artificial Sequence
  Description of Artificial Sequence: Synthetic oligonucleotide
auuaugcccugugcuuuga

SEQ ID NO: 39728 - RNA, 19 nt, Artificial Sequence
  Description of Artificial Sequence: Synthetic oligonucleotide
acuuggguuuacgggucug

SEQ ID NO: 39729 - RNA, 19 nt, Artificial Sequence
  Description of Artificial Sequence: Synthetic oligonucleotide
cuaaagguugacagaguuu

SEQ ID NO: 39730 - RNA, 19 nt, Artificial Sequence
  Description of Artificial Sequence: Synthetic oligonucleotide
agcagacccguaccuuuaa

SEQ ID NO: 39731 - RNA, 19 nt, Artificial Sequence
  Description of Artificial Sequence: Synthetic oligonucleotide
cucguuccaguaucuugca

SEQ ID NO: 39732 - RNA, 19 nt, Artificial Sequence
  Description of Artificial Sequence: Synthetic oligonucleotide
uugcgagaacagugaguuc

SEQ ID NO: 39733 - RNA, 19 nt, Artificial Sequence
  Description of Artificial Sequence: Synthetic oligonucleotide
cuacaacgcaguccuuaca

SEQ ID NO: 39734 - RNA, 19 nt, Artificial Sequence
  Description of Artificial Sequence: Synthetic oligonucleotide
ugaggaccgcgcugaguuc

SEQ ID NO: 39735 - RNA, 19 nt, Artificial Sequence
  Description of Artificial Sequence: Synthetic oligonucleotide
acucgggaaugacgccgag

SEQ ID NO: 39736 - RNA, 19 nt, Artificial Sequence
  Description of Artificial Sequence: Synthetic oligonucleotide
gucgaagcucuaaguugag

SEQ ID NO: 39737 - RNA, 19 nt, Artificial Sequence
  Description of Artificial Sequence: Synthetic oligonucleotide
guccuuacaaagggcuuuc

SEQ ID NO: 39738 - RNA, 19 nt, Artificial Sequence
  Description of Artificial Sequence: Synthetic oligonucleotide
ggguuuacgggucugggau

SEQ ID NO: 39739 - RNA, 19 nt, Artificial Sequence
  Description of Artificial Sequence: Synthetic oligonucleotide
cuccucguguuucgcuuug

SEQ ID NO: 39740 - RNA, 19 nt, Artificial Sequence
  Description of Artificial Sequence: Synthetic oligonucleotide
agccggguaauaguuuaau

SEQ ID NO: 39741 - RNA, 19 nt, Artificial Sequence
  Description of Artificial Sequence: Synthetic oligonucleotide
gcguucuacaacgcagucc

SEQ ID NO: 39742 - RNA, 19 nt, Artificial Sequence
  Description of Artificial Sequence: Synthetic oligonucleotide
cucgugauuuugauuacuu

SEQ ID NO: 39743 - RNA, 19 nt, Artificial Sequence
  Description of Artificial Sequence: Synthetic oligonucleotide
uccguauccucuggccagu

SEQ ID NO: 39744 - RNA, 19 nt, Artificial Sequence
  Description of Artificial Sequence: Synthetic oligonucleotide
uucccggguuugcagucua

SEQ ID NO: 39745 - RNA, 19 nt, Artificial Sequence
  Description of Artificial Sequence: Synthetic oligonucleotide
cucguguuucgcuuugccu

SEQ ID NO: 39746 - RNA, 19 nt, Artificial Sequence
  Description of Artificial Sequence: Synthetic oligonucleotide
uuccaucaaucgacagguu

SEQ ID NO: 39747 - RNA, 19 nt, Artificial Sequence
  Description of Artificial Sequence: Synthetic oligonucleotide
gguuaacagugauucucaa

SEQ ID NO: 39748 - RNA, 19 nt, Artificial Sequence
  Description of Artificial Sequence: Synthetic oligonucleotide
caauucucgugauuuugau

SEQ ID NO: 39749 - RNA, 19 nt, Artificial Sequence
  Description of Artificial Sequence: Synthetic oligonucleotide
ccauuucaacacaccacuc

SEQ ID NO: 39750 - RNA, 19 nt, Artificial Sequence
  Description of Artificial Sequence: Synthetic oligonucleotide
cauaucggcuguagaaaau

SEQ ID NO: 39751 - RNA, 19 nt, Artificial Sequence
  Description of Artificial Sequence: Synthetic oligonucleotide
gagcagcguuuccaauuga

SEQ ID NO: 39752 - RNA, 19 nt, Artificial Sequence
  Description of Artificial Sequence: Synthetic oligonucleotide
ggguauacucucguagguc

SEQ ID NO: 39753 - RNA, 19 nt, Artificial Sequence
  Description of Artificial Sequence: Synthetic oligonucleotide
cgccauuucaacacaccac

SEQ ID NO: 39754 - RNA, 19 nt, Artificial Sequence
  Description of Artificial Sequence: Synthetic oligonucleotide
gaacagcgagccuaugcuu

SEQ ID NO: 39755 - RNA, 19 nt, Artificial Sequence
  Description of Artificial Sequence: Synthetic oligonucleotide
uacugcuacucugcuucau

SEQ ID NO: 39756 - RNA, 19 nt, Artificial Sequence
  Description of Artificial Sequence: Synthetic oligonucleotide
ccauaucggcuguagaaaa

SEQ ID NO: 39757 - RNA, 19 nt, Artificial Sequence
  Description of Artificial Sequence: Synthetic oligonucleotide
ccggguaauaguuuaauuu

SEQ ID NO: 39758 - RNA, 19 nt, Artificial Sequence
  Description of Artificial Sequence: Synthetic oligonucleotide
agcucccagguuagucagg

SEQ ID NO: 39759 - RNA, 19 nt, Artificial Sequence
  Description of Artificial Sequence: Synthetic oligonucleotide
gcguuuccaauugacgaca

SEQ ID NO: 39760 - RNA, 19 nt, Artificial Sequence
  Description of Artificial Sequence: Synthetic oligonucleotide
guacuucagaagggcccgc

SEQ ID NO: 39761 - RNA, 19 nt, Artificial Sequence
  Description of Artificial Sequence: Synthetic oligonucleotide
ggccauaugagagcuauau

SEQ ID NO: 39762 - RNA, 19 nt, Artificial Sequence
  Description of Artificial Sequence: Synthetic oligonucleotide
gacgcuugguaccuccauu

SEQ ID NO: 39763 - RNA, 19 nt, Artificial Sequence
  Description of Artificial Sequence: Synthetic oligonucleotide
caggcgacucuacauauuu

SEQ ID NO: 39764 - RNA, 19 nt, Artificial Sequence
  Description of Artificial Sequence: Synthetic oligonucleotide
acggacaccaucgcccauu

SEQ ID NO: 39765 - RNA, 19 nt, Artificial Sequence
  Description of Artificial Sequence: Synthetic oligonucleotide
cugacgcuugguaccucca

SEQ ID NO: 39766 - RNA, 19 nt, Artificial Sequence
  Description of Artificial Sequence: Synthetic oligonucleotide
caagcagacccguaccuuu

SEQ ID NO: 39767 - RNA, 19 nt, Artificial Sequence
  Description of Artificial Sequence: Synthetic oligonucleotide
ccuuugguacagcuccuuc

SEQ ID NO: 39768 - RNA, 19 nt, Artificial Sequence
  Description of Artificial Sequence: Synthetic oligonucleotide
cacaggcgacucuacauau

SEQ ID NO: 39769 - RNA, 19 nt, Artificial Sequence
  Description of Artificial Sequence: Synthetic oligonucleotide
uuuacgggucugggauuua

SEQ ID NO: 39770 - RNA, 19 nt, Artificial Sequence
  Description of Artificial Sequence: Synthetic oligonucleotide
ucccggguuugcagucuau

SEQ ID NO: 39771 - RNA, 19 nt, Artificial Sequence
  Description of Artificial Sequence: Synthetic oligonucleotide
guuuacgggucugggauuu

SEQ ID NO: 39772 - RNA, 19 nt, Artificial Sequence
  Description of Artificial Sequence: Synthetic oligonucleotide
caccuuuaugcuccacaua

SEQ ID NO: 39773 - RNA, 19 nt, Artificial Sequence
  Description of Artificial Sequence: Synthetic oligonucleotide
cucuuacugcuacucugcu

SEQ ID NO: 39774 - RNA, 19 nt, Artificial Sequence
  Description of Artificial Sequence: Synthetic oligonucleotide
caccaucgcccauugugua

SEQ ID NO: 39775 - RNA, 19 nt, Artificial Sequence
  Description of Artificial Sequence: Synthetic oligonucleotide
cguuuccaauugacgacac

SEQ ID NO: 39776 - RNA, 19 nt, Artificial Sequence
  Description of Artificial Sequence: Synthetic oligonucleotide
gugccugucgaagcucuaa

SEQ ID NO: 39777 - RNA, 19 nt, Artificial Sequence
  Description of Artificial Sequence: Synthetic oligonucleotide
ccacuccucaaauuucaaa

SEQ ID NO: 39778 - RNA, 19 nt, Artificial Sequence
  Description of Artificial Sequence: Synthetic oligonucleotide
cccucuuccggcauacaaa

SEQ ID NO: 39779 - RNA, 19 nt, Artificial Sequence
  Description of Artificial Sequence: Synthetic oligonucleotide
cguugcuuugcuccgccuc

SEQ ID NO: 39780 - RNA, 19 nt, Artificial Sequence
  Description of Artificial Sequence: Synthetic oligonucleotide
uucugacgcuugguaccuc

SEQ ID NO: 39781 - RNA, 19 nt, Artificial Sequence
  Description of Artificial Sequence: Synthetic oligonucleotide
guacgccacguagcccugc

SEQ ID NO: 39782 - RNA, 19 nt, Artificial Sequence
  Description of Artificial Sequence: Synthetic oligonucleotide
ucugcgcaucuccgccauu

SEQ ID NO: 39783 - RNA, 19 nt, Artificial Sequence
  Description of Artificial Sequence: Synthetic oligonucleotide
cggguaauaguuuaauuuu

SEQ ID NO: 39784 - RNA, 19 nt, Artificial Sequence
  Description of Artificial Sequence: Synthetic oligonucleotide
cugagacacggucuauuuu

SEQ ID NO: 39785 - RNA, 19 nt, Artificial Sequence
  Description of Artificial Sequence: Synthetic oligonucleotide
gcuuggguauacucucgua

SEQ ID NO: 39786 - RNA, 19 nt, Artificial Sequence
  Description of Artificial Sequence: Synthetic oligonucleotide
agcuuggcaugggaacaua

SEQ ID NO: 39787 - RNA, 19 nt, Artificial Sequence
  Description of Artificial Sequence: Synthetic oligonucleotide
ggacagaguuuaggcucag

SEQ ID NO: 39788 - RNA, 19 nt, Artificial Sequence
  Description of Artificial Sequence: Synthetic oligonucleotide
ggcuuggguauacucucgu

SEQ ID NO: 39789 - RNA, 19 nt, Artificial Sequence
  Description of Artificial Sequence: Synthetic oligonucleotide
caguccuuacaaagggcuu

SEQ ID NO: 39790 - RNA, 19 nt, Artificial Sequence
  Description of Artificial Sequence: Synthetic oligonucleotide
gcaauugggacagucucuu

SEQ ID NO: 39791 - RNA, 19 nt, Artificial Sequence
  Description of Artificial Sequence: Synthetic oligonucleotide
gguuucguggguguugauu

SEQ ID NO: 39792 - RNA, 19 nt, Artificial Sequence
  Description of Artificial Sequence: Synthetic oligonucleotide
cggguuugcagucuauaaa

SEQ ID NO: 39793 - RNA, 19 nt, Artificial Sequence
  Description of Artificial Sequence: Synthetic oligonucleotide
gcagacccguaccuuuaaa

SEQ ID NO: 39794 - RNA, 19 nt, Artificial Sequence
  Description of Artificial Sequence: Synthetic oligonucleotide
ccggcauacaaacuugcau

SEQ ID NO: 39795 - RNA, 19 nt, Artificial Sequence
  Description of Artificial Sequence: Synthetic oligonucleotide
ccgaaguacacgacagcgu

SEQ ID NO: 39796 - RNA, 19 nt, Artificial Sequence
  Description of Artificial Sequence: Synthetic oligonucleotide
gccauaugagagcuauauu

SEQ ID NO: 39797 - RNA, 19 nt, Artificial Sequence
  Description of Artificial Sequence: Synthetic oligonucleotide
caagcgccagcuggcgcca

SEQ ID NO: 39798 - RNA, 19 nt, Artificial Sequence
  Description of Artificial Sequence: Synthetic oligonucleotide
ccaguuacugagacacggu

SEQ ID NO: 39799 - RNA, 19 nt, Artificial Sequence
  Description of Artificial Sequence: Synthetic oligonucleotide
gccggguaauaguuuaauu

SEQ ID NO: 39800 - RNA, 19 nt, Artificial Sequence
  Description of Artificial Sequence: Synthetic oligonucleotide
gguuuacgggucugggauu

SEQ ID NO: 39801 - RNA, 19 nt, Artificial Sequence
  Description of Artificial Sequence: Synthetic oligonucleotide
gcgcucgcucucucaagga

SEQ ID NO: 39802 - RNA, 19 nt, Artificial Sequence
  Description of Artificial Sequence: Synthetic oligonucleotide
ccacgacaaagagcuuuug

SEQ ID NO: 39803 - RNA, 19 nt, Artificial Sequence
  Description of Artificial Sequence: Synthetic oligonucleotide
cguauuccgaaauucucuu

SEQ ID NO: 39804 - RNA, 19 nt, Artificial Sequence
  Description of Artificial Sequence: Synthetic oligonucleotide
gcgcuauaacccagcagaa

SEQ ID NO: 39805 - RNA, 19 nt, Artificial Sequence
  Description of Artificial Sequence: Synthetic oligonucleotide
cugcgcaucuccgccauuu

SEQ ID NO: 39806 - RNA, 19 nt, Artificial Sequence
  Description of Artificial Sequence: Synthetic oligonucleotide
cuuucacgugggcgaugua

SEQ ID NO: 39807 - RNA, 19 nt, Artificial Sequence
  Description of Artificial Sequence: Synthetic oligonucleotide
aggaccgcgcugaguucau

SEQ ID NO: 39808 - RNA, 19 nt, Artificial Sequence
  Description of Artificial Sequence: Synthetic oligonucleotide
ccguaccuuuaaaccccuc

SEQ ID NO: 39809 - RNA, 19 nt, Artificial Sequence
  Description of Artificial Sequence: Synthetic oligonucleotide
ccaucgcccauuguguagu

SEQ ID NO: 39810 - RNA, 19 nt, Artificial Sequence
  Description of Artificial Sequence: Synthetic oligonucleotide
cgcucgcucucucaaggaa

SEQ ID NO: 39811 - RNA, 19 nt, Artificial Sequence
  Description of Artificial Sequence: Synthetic oligonucleotide
gggcuacugaaaaccgcau

SEQ ID NO: 39812 - RNA, 19 nt, Artificial Sequence
  Description of Artificial Sequence: Synthetic oligonucleotide
cccguaccuuuaaaccccu

SEQ ID NO: 39813 - RNA, 19 nt, Artificial Sequence
  Description of Artificial Sequence: Synthetic oligonucleotide
cuccgccggaugaccugcu

SEQ ID NO: 39814 - RNA, 19 nt, Artificial Sequence
  Description of Artificial Sequence: Synthetic oligonucleotide
ggacaccaucgcccauugu

SEQ ID NO: 39815 - RNA, 19 nt, Artificial Sequence
  Description of Artificial Sequence: Synthetic oligonucleotide
cccggguuugcagucuaua

SEQ ID NO: 39816 - RNA, 19 nt, Artificial Sequence
  Description of Artificial Sequence: Synthetic oligonucleotide
cguauccucuggccaguua

SEQ ID NO: 39817 - RNA, 19 nt, Artificial Sequence
  Description of Artificial Sequence: Synthetic oligonucleotide
ccuccucguguuucgcuuu

SEQ ID NO: 39818 - RNA, 19 nt, Artificial Sequence
  Description of Artificial Sequence: Synthetic oligonucleotide
ggaccgcgcugaguucaua

SEQ ID NO: 39819 - RNA, 19 nt, Artificial Sequence
  Description of Artificial Sequence: Synthetic oligonucleotide
cgccgaggguaccaagagu

SEQ ID NO: 39820 - RNA, 19 nt, Artificial Sequence
  Description of Artificial Sequence: Synthetic oligonucleotide
gccuugugcuccgccggau

SEQ ID NO: 39821 - RNA, 19 nt, Artificial Sequence
  Description of Artificial Sequence: Synthetic oligonucleotide
cgggaaugacgccgagggu

SEQ ID NO: 39822 - RNA, 19 nt, Artificial Sequence
  Description of Artificial Sequence: Synthetic oligonucleotide
ccguauccucuggccaguu

SEQ ID NO: 39823 - RNA, 19 nt, Artificial Sequence
  Description of Artificial Sequence: Synthetic oligonucleotide
uauauauauauauauauag

SEQ ID NO: 39824 - RNA, 19 nt, Artificial Sequence
  Description of Artificial Sequence: Synthetic oligonucleotide
uaugauacaaaugagagcc

SEQ ID NO: 39825 - RNA, 19 nt, Artificial Sequence
  Description of Artificial Sequence: Synthetic oligonucleotide
  modified_base (3)..(3): a, c, u, g, unknown or other
aancuuuucaaacacuagg

SEQ ID NO: 39826 - RNA, 19 nt, Artificial Sequence
  Description of Artificial Sequence: Synthetic oligonucleotide
aacgcuuauauacucaggc

SEQ ID NO: 39827 - RNA, 19 nt, Artificial Sequence
  Description of Artificial Sequence: Synthetic oligonucleotide
  modified_base (7)..(7): a, c, u, g, unknown or other
auaaaancuuuucaaacac

SEQ ID NO: 39828 - RNA, 19 nt, Artificial Sequence
  Description of Artificial Sequence: Synthetic oligonucleotide
aagguagucaauugcaacc

SEQ ID NO: 39829 - RNA, 19 nt, Artificial Sequence
  Description of Artificial Sequence: Synthetic oligonucleotide
aguaaauuaucucucuugc

SEQ ID NO: 39830 - RNA, 19 nt, Artificial Sequence
  Description of Artificial Sequence: Synthetic oligonucleotide
aaauauuauauaaacggac

SEQ ID NO: 39831 - RNA, 19 nt, Artificial Sequence
  Description of Artificial Sequence: Synthetic oligonucleotide
uuaacuacuacaaauggga

SEQ ID NO: 39832 - RNA, 19 nt, Artificial Sequence
  Description of Artificial Sequence: Synthetic oligonucleotide
uauauauauauauauauau

SEQ ID NO: 39833 - RNA, 19 nt, Artificial Sequence
  Description of Artificial Sequence: Synthetic oligonucleotide
uuauuuugcaccuugaggu

SEQ ID NO: 39834 - RNA, 19 nt, Artificial Sequence
  Description of Artificial Sequence: Synthetic oligonucleotide
agugcuugcucucauaucc

SEQ ID NO: 39835 - RNA, 19 nt, Artificial Sequence
  Description of Artificial Sequence: Synthetic oligonucleotide
cuauauauauauaacacac

SEQ ID NO: 39836 - RNA, 19 nt, Artificial Sequence
  Description of Artificial Sequence: Synthetic oligonucleotide
uuuaacuacuacaaauggg

SEQ ID NO: 39837 - RNA, 19 nt, Artificial Sequence
  Description of Artificial Sequence: Synthetic oligonucleotide
uauauauauauauauagua

SEQ ID NO: 39838 - RNA, 19 nt, Artificial Sequence
  Description of Artificial Sequence: Synthetic oligonucleotide
uauauauagaaucaccccu

SEQ ID NO: 39839 - RNA, 19 nt, Artificial Sequence
  Description of Artificial Sequence: Synthetic oligonucleotide
cuuucaaugaugaaacucc

SEQ ID NO: 39840 - RNA, 19 nt, Artificial Sequence
  Description of Artificial Sequence: Synthetic oligonucleotide
auauguuaacaacugaagg

SEQ ID NO: 39841 - RNA, 19 nt, Artificial Sequence
  Description of Artificial Sequence: Synthetic oligonucleotide
uaucuauauauauauaaca

SEQ ID NO: 39842 - RNA, 19 nt, Artificial Sequence
  Description of Artificial Sequence: Synthetic oligonucleotide
uauauauauauauaguaaa

SEQ ID NO: 39843 - RNA, 19 nt, Artificial Sequence
  Description of Artificial Sequence: Synthetic oligonucleotide
uuuagauugaaacagcaau

SEQ ID NO: 39844 - RNA, 19 nt, Artificial Sequence
  Description of Artificial Sequence: Synthetic oligonucleotide
aaagaagcaguuaauuccc

SEQ ID NO: 39845 - RNA, 19 nt, Artificial Sequence
  Description of Artificial Sequence: Synthetic oligonucleotide
aacuacuacaaaugggaac

SEQ ID NO: 39846 - RNA, 19 nt, Artificial Sequence
  Description of Artificial Sequence: Synthetic oligonucleotide
uggaauuccuacaagguag

SEQ ID NO: 39847 - RNA, 19 nt, Artificial Sequence
  Description of Artificial Sequence: Synthetic oligonucleotide
ucuauauauauauaacaca

SEQ ID NO: 39848 - RNA, 19 nt, Artificial Sequence
  Description of Artificial Sequence: Synthetic oligonucleotide
uguugaauggauauguaca

SEQ ID NO: 39849 - RNA, 19 nt, Artificial Sequence
  Description of Artificial Sequence: Synthetic oligonucleotide
uaagcuuacgcacaaagac

SEQ ID NO: 39850 - RNA, 19 nt, Artificial Sequence
  Description of Artificial Sequence: Synthetic oligonucleotide
ucuguugcaaccaauacaa

SEQ ID NO: 39851 - RNA, 19 nt, Artificial Sequence
  Description of Artificial Sequence: Synthetic oligonucleotide
uaacuccuaagacauaacg

SEQ ID NO: 39852 - RNA, 19 nt, Artificial Sequence
  Description of Artificial Sequence: Synthetic oligonucleotide
aguaucuauauauauauaa

SEQ ID NO: 39853 - RNA, 19 nt, Artificial Sequence
  Description of Artificial Sequence: Synthetic oligonucleotide
ucuauaguuucauugcuag

SEQ ID NO: 39854 - RNA, 19 nt, Artificial Sequence
  Description of Artificial Sequence: Synthetic oligonucleotide
cauugcuaggguuagacgg

SEQ ID NO: 39855 - RNA, 19 nt, Artificial Sequence
  Description of Artificial Sequence: Synthetic oligonucleotide
aucuauauauauauaacac

SEQ ID NO: 39856 - RNA, 19 nt, Artificial Sequence
  Description of Artificial Sequence: Synthetic oligonucleotide
uguuggacuaaacaaagac

SEQ ID NO: 39857 - RNA, 19 nt, Artificial Sequence
  Description of Artificial Sequence: Synthetic oligonucleotide
auuaguaauguccaccaag

SEQ ID NO: 39858 - RNA, 19 nt, Artificial Sequence
  Description of Artificial Sequence: Synthetic oligonucleotide
ucugauauguuaacaacug

SEQ ID NO: 39859 - RNA, 19 nt, Artificial Sequence
  Description of Artificial Sequence: Synthetic oligonucleotide
augaaacgaauguugaaac

SEQ ID NO: 39860 - RNA, 19 nt, Artificial Sequence
  Description of Artificial Sequence: Synthetic oligonucleotide
cuuggacuuauauauauag

SEQ ID NO: 39861 - RNA, 19 nt, Artificial Sequence
  Description of Artificial Sequence: Synthetic oligonucleotide
agauggaauuccuacaagg

SEQ ID NO: 39862 - RNA, 19 nt, Artificial Sequence
  Description of Artificial Sequence: Synthetic oligonucleotide
uaaauuuauugucacacuc

SEQ ID NO: 39863 - RNA, 19 nt, Artificial Sequence
  Description of Artificial Sequence: Synthetic oligonucleotide
ucagauagguaacaccagg

SEQ ID NO: 39864 - RNA, 19 nt, Artificial Sequence
  Description of Artificial Sequence: Synthetic oligonucleotide
uaauuguuggacuaaacaa

SEQ ID NO: 39865 - RNA, 19 nt, Artificial Sequence
  Description of Artificial Sequence: Synthetic oligonucleotide
aauaccauugcaauuauaa

SEQ ID NO: 39866 - RNA, 19 nt, Artificial Sequence
  Description of Artificial Sequence: Synthetic oligonucleotide
ugcacuacaaaugaaacga

SEQ ID NO: 39867 - RNA, 19 nt, Artificial Sequence
  Description of Artificial Sequence: Synthetic oligonucleotide
uaagacauaacguuccuac

SEQ ID NO: 39868 - RNA, 19 nt, Artificial Sequence
  Description of Artificial Sequence: Synthetic oligonucleotide
aaaccgaguaauguaacac

SEQ ID NO: 39869 - RNA, 19 nt, Artificial Sequence
  Description of Artificial Sequence: Synthetic oligonucleotide
auacaaugcaccaagaaag

SEQ ID NO: 39870 - RNA, 19 nt, Artificial Sequence
  Description of Artificial Sequence: Synthetic oligonucleotide
  modified_base (9)..(9): a, c, u, g, unknown or other
uauuguuanagguugccca

SEQ ID NO: 39871 - RNA, 19 nt, Artificial Sequence
  Description of Artificial Sequence: Synthetic oligonucleotide
cugaacauugguauguacg

SEQ ID NO: 39872 - RNA, 19 nt, Artificial Sequence
  Description of Artificial Sequence: Synthetic oligonucleotide
uacauguguaacuagucag

SEQ ID NO: 39873 - RNA, 19 nt, Artificial Sequence
  Description of Artificial Sequence: Synthetic oligonucleotide
uccuacuuuagauugaaac

SEQ ID NO: 39874 - RNA, 19 nt, Artificial Sequence
  Description of Artificial Sequence: Synthetic oligonucleotide
guaaccaucugaaagaagc

SEQ ID NO: 39875 - RNA, 19 nt, Artificial Sequence
  Description of Artificial Sequence: Synthetic oligonucleotide
aaaagagacucuauugcac

SEQ ID NO: 39876 - RNA, 19 nt, Artificial Sequence
  Description of Artificial Sequence: Synthetic oligonucleotide
ugaacauugguauguacgc

SEQ ID NO: 39877 - RNA, 19 nt, Artificial Sequence
  Description of Artificial Sequence: Synthetic oligonucleotide
uccaaauaguuugauacgg

SEQ ID NO: 39878 - RNA, 19 nt, Artificial Sequence
  Description of Artificial Sequence: Synthetic oligonucleotide
gagauagugauucucagca

SEQ ID NO: 39879 - RNA, 19 nt, Artificial Sequence
  Description of Artificial Sequence: Synthetic oligonucleotide
uauauauauauaacacaca

SEQ ID NO: 39880 - RNA, 19 nt, Artificial Sequence
  Description of Artificial Sequence: Synthetic oligonucleotide
uuacguaaauuuauuguca

SEQ ID NO: 39881 - RNA, 19 nt, Artificial Sequence
  Description of Artificial Sequence: Synthetic oligonucleotide
uaucaagucuacaauuuug

SEQ ID NO: 39882 - RNA, 19 nt, Artificial Sequence
  Description of Artificial Sequence: Synthetic oligonucleotide
  modified_base (4)..(4): a, c, u, g, unknown or other
uuanagguugcccagcaaa

SEQ ID NO: 39883 - RNA, 19 nt, Artificial Sequence
  Description of Artificial Sequence: Synthetic oligonucleotide
aaugaaacgaauguugaaa

SEQ ID NO: 39884 - RNA, 19 nt, Artificial Sequence
  Description of Artificial Sequence: Synthetic oligonucleotide
aaagagacucuauugcacu

SEQ ID NO: 39885 - RNA, 19 nt, Artificial Sequence
  Description of Artificial Sequence: Synthetic oligonucleotide
ucggacucuacuuuuaagc

SEQ ID NO: 39886 - RNA, 19 nt, Artificial Sequence
  Description of Artificial Sequence: Synthetic oligonucleotide
guugcaaccaauacaaugc

SEQ ID NO: 39887 - RNA, 19 nt, Artificial Sequence
  Description of Artificial Sequence: Synthetic oligonucleotide
gugauuugaaaauuugagc

SEQ ID NO: 39888 - RNA, 19 nt, Artificial Sequence
  Description of Artificial Sequence: Synthetic oligonucleotide
uaacgcuuggucuugaacu

SEQ ID NO: 39889 - RNA, 19 nt, Artificial Sequence
  Description of Artificial Sequence: Synthetic oligonucleotide
aagacuaacacagaagcaa

SEQ ID NO: 39890 - RNA, 19 nt, Artificial Sequence
  Description of Artificial Sequence: Synthetic oligonucleotide
aaacauuaugaauggugug

SEQ ID NO: 39891 - RNA, 19 nt, Artificial Sequence
  Description of Artificial Sequence: Synthetic oligonucleotide
aacaccaggauuuauuaua

SEQ ID NO: 39892 - RNA, 19 nt, Artificial Sequence
  Description of Artificial Sequence: Synthetic oligonucleotide
  modified_base (11)..(11): a, c, u, g, unknown or other
aguauuguuanagguugcc

SEQ ID NO: 39893 - RNA, 19 nt, Artificial Sequence
  Description of Artificial Sequence: Synthetic oligonucleotide
ugucuaacaccauaucugc

SEQ ID NO: 39894 - RNA, 19 nt, Artificial Sequence
  Description of Artificial Sequence: Synthetic oligonucleotide
agaggcuuugauuacccac

SEQ ID NO: 39895 - RNA, 19 nt, Artificial Sequence
  Description of Artificial Sequence: Synthetic oligonucleotide
ugacaugacuuauagacaa

SEQ ID NO: 39896 - RNA, 19 nt, Artificial Sequence
  Description of Artificial Sequence: Synthetic oligonucleotide
gaacguuaaguuuaggaga

SEQ ID NO: 39897 - RNA, 19 nt, Artificial Sequence
  Description of Artificial Sequence: Synthetic oligonucleotide
gacaacacaaccagaagag

SEQ ID NO: 39898 - RNA, 19 nt, Artificial Sequence
  Description of Artificial Sequence: Synthetic oligonucleotide
gauccauaagcuuacgcac

SEQ ID NO: 39899 - RNA, 19 nt, Artificial Sequence
  Description of Artificial Sequence: Synthetic oligonucleotide
uuagauugaaacagcaaua

SEQ ID NO: 39900 - RNA, 19 nt, Artificial Sequence
  Description of Artificial Sequence: Synthetic oligonucleotide
  modified_base (8)..(8): a, c, u, g, unknown or other
auuguuanagguugcccag

SEQ ID NO: 39901 - RNA, 19 nt, Artificial Sequence
  Description of Artificial Sequence: Synthetic oligonucleotide
acaaaugaaacgaauguug

SEQ ID NO: 39902 - RNA, 19 nt, Artificial Sequence
  Description of Artificial Sequence: Synthetic oligonucleotide
aacuguauugggaaaucac

SEQ ID NO: 39903 - RNA, 19 nt, Artificial Sequence
  Description of Artificial Sequence: Synthetic oligonucleotide
cauccuacaugucuuauag

SEQ ID NO: 39904 - RNA, 19 nt, Artificial Sequence
  Description of Artificial Sequence: Synthetic oligonucleotide
ggaacguuaaguuuaggag

SEQ ID NO: 39905 - RNA, 19 nt, Artificial Sequence
  Description of Artificial Sequence: Synthetic oligonucleotide
  modified_base (5)..(5): a, c, u, g, unknown or other
aaaancuuuucaaacacua

SEQ ID NO: 39906 - RNA, 19 nt, Artificial Sequence
  Description of Artificial Sequence: Synthetic oligonucleotide
uauauauauauaguaaauu

SEQ ID NO: 39907 - RNA, 19 nt, Artificial Sequence
  Description of Artificial Sequence: Synthetic oligonucleotide
acugauuguugaucguacc

SEQ ID NO: 39908 - RNA, 19 nt, Artificial Sequence
  Description of Artificial Sequence: Synthetic oligonucleotide
  modified_base (4)..(4): a, c, u, g, unknown or other
aaancuuuucaaacacuag

SEQ ID NO: 39909 - RNA, 19 nt, Artificial Sequence
  Description of Artificial Sequence: Synthetic oligonucleotide
guuaaaagagaccuuacaa

SEQ ID NO: 39910 - RNA, 19 nt, Artificial Sequence
  Description of Artificial Sequence: Synthetic oligonucleotide
auaguuuagucuuuaaauu

SEQ ID NO: 39911 - RNA, 19 nt, Artificial Sequence
  Description of Artificial Sequence: Synthetic oligonucleotide
aaacaaagacaguucacau

SEQ ID NO: 39912 - RNA, 19 nt, Artificial Sequence
  Description of Artificial Sequence: Synthetic oligonucleotide
uucuuacguaaauuuauug

SEQ ID NO: 39913 - RNA, 19 nt, Artificial Sequence
  Description of Artificial Sequence: Synthetic oligonucleotide
cuguugauccauaagauga

SEQ ID NO: 39914 - RNA, 19 nt, Artificial Sequence
  Description of Artificial Sequence: Synthetic oligonucleotide
uaaacggacaauaaaucuu

SEQ ID NO: 39915 - RNA, 19 nt, Artificial Sequence
  Description of Artificial Sequence: Synthetic oligonucleotide
auauaaacggacaauaaau

SEQ ID NO: 39916 - RNA, 19 nt, Artificial Sequence
  Description of Artificial Sequence: Synthetic oligonucleotide
aauuguuggacuaaacaaa

SEQ ID NO: 39917 - RNA, 19 nt, Artificial Sequence
  Description of Artificial Sequence: Synthetic oligonucleotide
auggagaaacaagagauag

SEQ ID NO: 39918 - RNA, 19 nt, Artificial Sequence
  Description of Artificial Sequence: Synthetic oligonucleotide
acgcuuauauacucaggcc

SEQ ID NO: 39919 - RNA, 19 nt, Artificial Sequence
  Description of Artificial Sequence: Synthetic oligonucleotide
ugaaacgaauguugaaacc

SEQ ID NO: 39920 - RNA, 19 nt, Artificial Sequence
  Description of Artificial Sequence: Synthetic oligonucleotide
ucuaauaauuaggaaacaa

SEQ ID NO: 39921 - RNA, 19 nt, Artificial Sequence
  Description of Artificial Sequence: Synthetic oligonucleotide
agaacgcuuauauacucag

SEQ ID NO: 39922 - RNA, 19 nt, Artificial Sequence
  Description of Artificial Sequence: Synthetic oligonucleotide
augacuuauagacaacacu

SEQ ID NO: 39923 - RNA, 19 nt, Artificial Sequence
  Description of Artificial Sequence: Synthetic oligonucleotide
uugagcauaguuuagucuu

SEQ ID NO: 39924 - RNA, 19 nt, Artificial Sequence
  Description of Artificial Sequence: Synthetic oligonucleotide
cauauauauauauauauau

SEQ ID NO: 39925 - RNA, 19 nt, Artificial Sequence
  Description of Artificial Sequence: Synthetic oligonucleotide
aggaacguuaaguuuagga

SEQ ID NO: 39926 - RNA, 19 nt, Artificial Sequence
  Description of Artificial Sequence: Synthetic oligonucleotide
auauauauauauauaguaa

SEQ ID NO: 39927 - RNA, 19 nt, Artificial Sequence
  Description of Artificial Sequence: Synthetic oligonucleotide
agaacauucggacucuacu

SEQ ID NO: 39928 - RNA, 19 nt, Artificial Sequence
  Description of Artificial Sequence: Synthetic oligonucleotide
agacauaacguuccuaccu

SEQ ID NO: 39929 - RNA, 19 nt, Artificial Sequence
  Description of Artificial Sequence: Synthetic oligonucleotide
gauuguugaucguaccuug

SEQ ID NO: 39930 - RNA, 19 nt, Artificial Sequence
  Description of Artificial Sequence: Synthetic oligonucleotide
auauauauauauauauagu

SEQ ID NO: 39931 - RNA, 19 nt, Artificial Sequence
  Description of Artificial Sequence: Synthetic oligonucleotide
auaacgcuuggucuugaac

SEQ ID NO: 39932 - RNA, 19 nt, Artificial Sequence
  Description of Artificial Sequence: Synthetic oligonucleotide
aaaugaaacgaauguugaa

SEQ ID NO: 39933 - RNA, 19 nt, Artificial Sequence
  Description of Artificial Sequence: Synthetic oligonucleotide
ccauuaauaaccaaaacca

SEQ ID NO: 39934 - RNA, 19 nt, Artificial Sequence
  Description of Artificial Sequence: Synthetic oligonucleotide
accuuaccccuacaaagcc

SEQ ID NO: 39935 - RNA, 19 nt, Artificial Sequence
  Description of Artificial Sequence: Synthetic oligonucleotide
uugacaugacuuauagaca

SEQ ID NO: 39936 - RNA, 19 nt, Artificial Sequence
  Description of Artificial Sequence: Synthetic oligonucleotide
aagcucuacuaugaaaauc

SEQ ID NO: 39937 - RNA, 19 nt, Artificial Sequence
  Description of Artificial Sequence: Synthetic oligonucleotide
  modified_base (3)..(3): a, c, u, g, unknown or other
uanagguugcccagcaaac

SEQ ID NO: 39938 - RNA, 19 nt, Artificial Sequence
  Description of Artificial Sequence: Synthetic oligonucleotide
uugaucguaccuugguagg

SEQ ID NO: 39939 - RNA, 19 nt, Artificial Sequence
  Description of Artificial Sequence: Synthetic oligonucleotide
uguugaaaccuacaugaau

SEQ ID NO: 39940 - RNA, 19 nt, Artificial Sequence
  Description of Artificial Sequence: Synthetic oligonucleotide
gguaaaucaguacacagca

SEQ ID NO: 39941 - RNA, 19 nt, Artificial Sequence
  Description of Artificial Sequence: Synthetic oligonucleotide
uaguaauguccaccaaggg

SEQ ID NO: 39942 - RNA, 19 nt, Artificial Sequence
  Description of Artificial Sequence: Synthetic oligonucleotide
  modified_base (6)..(6): a, c, u, g, unknown or other
uguuanagguugcccagca

SEQ ID NO: 39943 - RNA, 19 nt, Artificial Sequence
  Description of Artificial Sequence: Synthetic oligonucleotide
ucuaacaccauaucugcua

SEQ ID NO: 39944 - RNA, 19 nt, Artificial Sequence
  Description of Artificial Sequence: Synthetic oligonucleotide
auugcaaccauuauuacua

SEQ ID NO: 39945 - RNA, 19 nt, Artificial Sequence
  Description of Artificial Sequence: Synthetic oligonucleotide
cuuugauuacccacaguag

SEQ ID NO: 39946 - RNA, 19 nt, Artificial Sequence
  Description of Artificial Sequence: Synthetic oligonucleotide
uggguuucuagaaaaguau

SEQ ID NO: 39947 - RNA, 19 nt, Artificial Sequence
  Description of Artificial Sequence: Synthetic oligonucleotide
uuggacuuauauauauaga

SEQ ID NO: 39948 - RNA, 19 nt, Artificial Sequence
  Description of Artificial Sequence: Synthetic oligonucleotide
auuguuggacuaaacaaag

SEQ ID NO: 39949 - RNA, 19 nt, Artificial Sequence
  Description of Artificial Sequence: Synthetic oligonucleotide
acauagcggagguagauca

SEQ ID NO: 39950 - RNA, 19 nt, Artificial Sequence
  Description of Artificial Sequence: Synthetic oligonucleotide
acuccuaagacauaacguu

SEQ ID NO: 39951 - RNA, 19 nt, Artificial Sequence
  Description of Artificial Sequence: Synthetic oligonucleotide
ugauacaaaugagagccgc

SEQ ID NO: 39952 - RNA, 19 nt, Artificial Sequence
  Description of Artificial Sequence: Synthetic oligonucleotide
auccauaagaugagaaugg

SEQ ID NO: 39953 - RNA, 19 nt, Artificial Sequence
  Description of Artificial Sequence: Synthetic oligonucleotide
guaucuauauauauauaac

SEQ ID NO: 39954 - RNA, 19 nt, Artificial Sequence
  Description of Artificial Sequence: Synthetic oligonucleotide
agcucuacuaugaaaauca

SEQ ID NO: 39955 - RNA, 19 nt, Artificial Sequence
  Description of Artificial Sequence: Synthetic oligonucleotide
ucauugcuaggguuagacg

SEQ ID NO: 39956 - RNA, 19 nt, Artificial Sequence
  Description of Artificial Sequence: Synthetic oligonucleotide
uaaaccgaguaauguaaca

SEQ ID NO: 39957 - RNA, 19 nt, Artificial Sequence
  Description of Artificial Sequence: Synthetic oligonucleotide
auagcauguguaauguaac

SEQ ID NO: 39958 - RNA, 19 nt, Artificial Sequence
  Description of Artificial Sequence: Synthetic oligonucleotide
augucuuauagaaagcuug

SEQ ID NO: 39959 - RNA, 19 nt, Artificial Sequence
  Description of Artificial Sequence: Synthetic oligonucleotide
agaagcaguuaauucccuc

SEQ ID NO: 39960 - RNA, 19 nt, Artificial Sequence
  Description of Artificial Sequence: Synthetic oligonucleotide
auaagaugagaaugguaca

SEQ ID NO: 39961 - RNA, 19 nt, Artificial Sequence
  Description of Artificial Sequence: Synthetic oligonucleotide
gacaccaaccaugagcaag

SEQ ID NO: 39962 - RNA, 19 nt, Artificial Sequence
  Description of Artificial Sequence: Synthetic oligonucleotide
gauaucugaaccugauguc

SEQ ID NO: 39963 - RNA, 19 nt, Artificial Sequence
  Description of Artificial Sequence: Synthetic oligonucleotide
auugcuaggguuagacggc

SEQ ID NO: 39964 - RNA, 19 nt, Artificial Sequence
  Description of Artificial Sequence: Synthetic oligonucleotide
auauauauauauaguaaau

SEQ ID NO: 39965 - RNA, 19 nt, Artificial Sequence
  Description of Artificial Sequence: Synthetic oligonucleotide
  modified_base (10)..(10): a, c, u, g, unknown or other
guauuguuanagguugccc

SEQ ID NO: 39966 - RNA, 19 nt, Artificial Sequence
  Description of Artificial Sequence: Synthetic oligonucleotide
aaccugccuuuguaaaagg

SEQ ID NO: 39967 - RNA, 19 nt, Artificial Sequence
  Description of Artificial Sequence: Synthetic oligonucleotide
aacguuaaguuuaggagau

SEQ ID NO: 39968 - RNA, 19 nt, Artificial Sequence
  Description of Artificial Sequence: Synthetic oligonucleotide
caauuaguaauguccacca

SEQ ID NO: 39969 - RNA, 19 nt, Artificial Sequence
  Description of Artificial Sequence: Synthetic oligonucleotide
cuauaguuucauugcuagg

SEQ ID NO: 39970 - RNA, 19 nt, Artificial Sequence
  Description of Artificial Sequence: Synthetic oligonucleotide
gaaccugccuuuguaaaag

SEQ ID NO: 39971 - RNA, 19 nt, Artificial Sequence
  Description of Artificial Sequence: Synthetic oligonucleotide
ucaugauuguuauuuccaa

SEQ ID NO: 39972 - RNA, 19 nt, Artificial Sequence
  Description of Artificial Sequence: Synthetic oligonucleotide
aaccuacaugaauaaauuu

SEQ ID NO: 39973 - RNA, 19 nt, Artificial Sequence
  Description of Artificial Sequence: Synthetic oligonucleotide
auaguuucauugcuagggu

SEQ ID NO: 39974 - RNA, 19 nt, Artificial Sequence
  Description of Artificial Sequence: Synthetic oligonucleotide
gagcagaacauucggacuc

SEQ ID NO: 39975 - RNA, 19 nt, Artificial Sequence
  Description of Artificial Sequence: Synthetic oligonucleotide
uauauacucaggccacaac

SEQ ID NO: 39976 - RNA, 19 nt, Artificial Sequence
  Description of Artificial Sequence: Synthetic oligonucleotide
ugaugauuacagcuguaau

SEQ ID NO: 39977 - RNA, 19 nt, Artificial Sequence
  Description of Artificial Sequence: Synthetic oligonucleotide
ugcaaugaguguuauucau

SEQ ID NO: 39978 - RNA, 19 nt, Artificial Sequence
  Description of Artificial Sequence: Synthetic oligonucleotide
auaucugaaccugauguca

SEQ ID NO: 39979 - RNA, 19 nt, Artificial Sequence
  Description of Artificial Sequence: Synthetic oligonucleotide
cacauauauauauauauau

SEQ ID NO: 39980 - RNA, 19 nt, Artificial Sequence
  Description of Artificial Sequence: Synthetic oligonucleotide
auaacguuccuaccuagaa

SEQ ID NO: 39981 - RNA, 19 nt, Artificial Sequence
  Description of Artificial Sequence: Synthetic oligonucleotide
uugcaaccaauacaaugca

SEQ ID NO: 39982 - RNA, 19 nt, Artificial Sequence
  Description of Artificial Sequence: Synthetic oligonucleotide
agaaugguacaaaggagag

SEQ ID NO: 39983 - RNA, 19 nt, Artificial Sequence
  Description of Artificial Sequence: Synthetic oligonucleotide
guuuaggagauggaauucc

SEQ ID NO: 39984 - RNA, 19 nt, Artificial Sequence
  Description of Artificial Sequence: Synthetic oligonucleotide
auauauauauauauauaua

SEQ ID NO: 39985 - RNA, 19 nt, Artificial Sequence
  Description of Artificial Sequence: Synthetic oligonucleotide
aaacggacaauaaaucuua

SEQ ID NO: 39986 - RNA, 19 nt, Artificial Sequence
  Description of Artificial Sequence: Synthetic oligonucleotide
uaacuacuacaaaugggaa

SEQ ID NO: 39987 - RNA, 19 nt, Artificial Sequence
  Description of Artificial Sequence: Synthetic oligonucleotide
ucuggcaugagaucaucaa

SEQ ID NO: 39988 - RNA, 19 nt, Artificial Sequence
  Description of Artificial Sequence: Synthetic oligonucleotide
aauuaguaauguccaccaa

SEQ ID NO: 39989 - RNA, 19 nt, Artificial Sequence
  Description of Artificial Sequence: Synthetic oligonucleotide
guugaauggauauguacaa

SEQ ID NO: 39990 - RNA, 19 nt, Artificial Sequence
  Description of Artificial Sequence: Synthetic oligonucleotide
aggaagguucacauuauag

SEQ ID NO: 39991 - RNA, 19 nt, Artificial Sequence
  Description of Artificial Sequence: Synthetic oligonucleotide
acuaagcucuacuaugaaa

SEQ ID NO: 39992 - RNA, 19 nt, Artificial Sequence
  Description of Artificial Sequence: Synthetic oligonucleotide
acauaacguuccuaccuag

SEQ ID NO: 39993 - RNA, 19 nt, Artificial Sequence
  Description of Artificial Sequence: Synthetic oligonucleotide
cacacauauauauauauau

SEQ ID NO: 39994 - RNA, 19 nt, Artificial Sequence
  Description of Artificial Sequence: Synthetic oligonucleotide
aauuacuacugcucauaua

SEQ ID NO: 39995 - RNA, 19 nt, Artificial Sequence
  Description of Artificial Sequence: Synthetic oligonucleotide
uaacguuccuaccuagaaa

SEQ ID NO: 39996 - RNA, 19 nt, Artificial Sequence
  Description of Artificial Sequence: Synthetic oligonucleotide
gagcacaucaggaacauaa

SEQ ID NO: 39997 - RNA, 19 nt, Artificial Sequence
  Description of Artificial Sequence: Synthetic oligonucleotide
uuguuggacuaaacaaaga

SEQ ID NO: 39998 - RNA, 19 nt, Artificial Sequence
  Description of Artificial Sequence: Synthetic oligonucleotide
uucggacucuacuuuuaag

SEQ ID NO: 39999 - RNA, 19 nt, Artificial Sequence
  Description of Artificial Sequence: Synthetic oligonucleotide
acuguauugggaaaucaca

SEQ ID NO: 40000 - RNA, 19 nt, Artificial Sequence
  Description of Artificial Sequence: Synthetic oligonucleotide
acaugacuuauagacaaca

SEQ ID NO: 40001 - RNA, 19 nt, Artificial Sequence
  Description of Artificial Sequence: Synthetic oligonucleotide
uguugucuaacaccauauc

SEQ ID NO: 40002 - RNA, 19 nt, Artificial Sequence
  Description of Artificial Sequence: Synthetic oligonucleotide
uauguacgccacaaguuua

SEQ ID NO: 40003 - RNA, 19 nt, Artificial Sequence
  Description of Artificial Sequence: Synthetic oligonucleotide
uguugaucguaccuuggua

SEQ ID NO: 40004 - RNA, 19 nt, Artificial Sequence
  Description of Artificial Sequence: Synthetic oligonucleotide
ucuggguuucuagaaaagu

SEQ ID NO: 40005 - RNA, 19 nt, Artificial Sequence
  Description of Artificial Sequence: Synthetic oligonucleotide
gcaaccaauacaaugcacc

SEQ ID NO: 40006 - RNA, 19 nt, Artificial Sequence
  Description of Artificial Sequence: Synthetic oligonucleotide
uauauagaaucaccccuuu

SEQ ID NO: 40007 - RNA, 19 nt, Artificial Sequence
  Description of Artificial Sequence: Synthetic oligonucleotide
acuuuagauugaaacagca

SEQ ID NO: 40008 - RNA, 19 nt, Artificial Sequence
  Description of Artificial Sequence: Synthetic oligonucleotide
cacagauccauaagcuuac

SEQ ID NO: 40009 - RNA, 19 nt, Artificial Sequence
  Description of Artificial Sequence: Synthetic oligonucleotide
agaggaguagucauaucag

SEQ ID NO: 40010 - RNA, 19 nt, Artificial Sequence
  Description of Artificial Sequence: Synthetic oligonucleotide
uacaccuauuuaaggcagc

SEQ ID NO: 40011 - RNA, 19 nt, Artificial Sequence
  Description of Artificial Sequence: Synthetic oligonucleotide
uaguuugauacggucaaaa

SEQ ID NO: 40012 - RNA, 19 nt, Artificial Sequence
  Description of Artificial Sequence: Synthetic oligonucleotide
gguuagacggcucagcaca

SEQ ID NO: 40013 - RNA, 19 nt, Artificial Sequence
  Description of Artificial Sequence: Synthetic oligonucleotide
acauauauauauauauaua

SEQ ID NO: 40014 - RNA, 19 nt, Artificial Sequence
  Description of Artificial Sequence: Synthetic oligonucleotide
uuauagacucuggaugaga

SEQ ID NO: 40015 - RNA, 19 nt, Artificial Sequence
  Description of Artificial Sequence: Synthetic oligonucleotide
gaagcaguuaauucccucu

SEQ ID NO: 40016 - RNA, 19 nt, Artificial Sequence
  Description of Artificial Sequence: Synthetic oligonucleotide
acuagaccccuuuaguaaa

SEQ ID NO: 40017 - RNA, 19 nt, Artificial Sequence
  Description of Artificial Sequence: Synthetic oligonucleotide
acaccaggauuuauuauag

SEQ ID NO: 40018 - RNA, 19 nt, Artificial Sequence
  Description of Artificial Sequence: Synthetic oligonucleotide
aaauagcauguguaaugua

SEQ ID NO: 40019 - RNA, 19 nt, Artificial Sequence
  Description of Artificial Sequence: Synthetic oligonucleotide
cauagaugaauaugauaca

SEQ ID NO: 40020 - RNA, 19 nt, Artificial Sequence
  Description of Artificial Sequence: Synthetic oligonucleotide
  modified_base (7)..(7): a, c, u, g, unknown or other
uuguuanagguugcccagc

SEQ ID NO: 40021 - RNA, 19 nt, Artificial Sequence
  Description of Artificial Sequence: Synthetic oligonucleotide
auacaccuauuuaaggcag

SEQ ID NO: 40022 - RNA, 19 nt, Artificial Sequence
  Description of Artificial Sequence: Synthetic oligonucleotide
uaacuguauugggaaauca

SEQ ID NO: 40023 - RNA, 19 nt, Artificial Sequence
  Description of Artificial Sequence: Synthetic oligonucleotide
cacugauuguugaucguac

SEQ ID NO: 40024 - RNA, 19 nt, Artificial Sequence
  Description of Artificial Sequence: Synthetic oligonucleotide
gaaugguacaaaggagagc

SEQ ID NO: 40025 - RNA, 19 nt, Artificial Sequence
  Description of Artificial Sequence: Synthetic oligonucleotide
uauuuugcaccuugaggua

SEQ ID NO: 40026 - RNA, 19 nt, Artificial Sequence
  Description of Artificial Sequence: Synthetic oligonucleotide
aggcugaucccacaaacau

SEQ ID NO: 40027 - RNA, 19 nt, Artificial Sequence
  Description of Artificial Sequence: Synthetic oligonucleotide
uagcacuaagcucuacuau

SEQ ID NO: 40028 - RNA, 19 nt, Artificial Sequence
  Description of Artificial Sequence: Synthetic oligonucleotide
gaacgcuuauauacucagg

SEQ ID NO: 40029 - RNA, 19 nt, Artificial Sequence
  Description of Artificial Sequence: Synthetic oligonucleotide
aagagacucuauugcacuu

SEQ ID NO: 40030 - RNA, 19 nt, Artificial Sequence
  Description of Artificial Sequence: Synthetic oligonucleotide
uaagcucuacuaugaaaau

SEQ ID NO: 40031 - RNA, 19 nt, Artificial Sequence
  Description of Artificial Sequence: Synthetic oligonucleotide
ugagagccgcaaaagcuuc

SEQ ID NO: 40032 - RNA, 19 nt, Artificial Sequence
  Description of Artificial Sequence: Synthetic oligonucleotide
uguaacuagucaguucauc

SEQ ID NO: 40033 - RNA, 19 nt, Artificial Sequence
  Description of Artificial Sequence: Synthetic oligonucleotide
auuguugaucguaccuugg

SEQ ID NO: 40034 - RNA, 19 nt, Artificial Sequence
  Description of Artificial Sequence: Synthetic oligonucleotide
uccaaguuguugugcauau

SEQ ID NO: 40035 - RNA, 19 nt, Artificial Sequence
  Description of Artificial Sequence: Synthetic oligonucleotide
cacugucgcagccacaaac

SEQ ID NO: 40036 - RNA, 19 nt, Artificial Sequence
  Description of Artificial Sequence: Synthetic oligonucleotide
auugguauguacgccacaa

SEQ ID NO: 40037 - RNA, 19 nt, Artificial Sequence
  Description of Artificial Sequence: Synthetic oligonucleotide
aauaacgcuuggucuugaa

SEQ ID NO: 40038 - RNA, 19 nt, Artificial Sequence
  Description of Artificial Sequence: Synthetic oligonucleotide
agaccaauacuggggaaag

SEQ ID NO: 40039 - RNA, 19 nt, Artificial Sequence
  Description of Artificial Sequence: Synthetic oligonucleotide
uuauauacucaggccacaa

SEQ ID NO: 40040 - RNA, 19 nt, Artificial Sequence
  Description of Artificial Sequence: Synthetic oligonucleotide
uagacggcucagcacauau

SEQ ID NO: 40041 - RNA, 19 nt, Artificial Sequence
  Description of Artificial Sequence: Synthetic oligonucleotide
auaagcuuacgcacaaaga

SEQ ID NO: 40042 - RNA, 19 nt, Artificial Sequence
  Description of Artificial Sequence: Synthetic oligonucleotide
cccuacuuggaucaguagg

SEQ ID NO: 40043 - RNA, 19 nt, Artificial Sequence
  Description of Artificial Sequence: Synthetic oligonucleotide
cuuuagauugaaacagcaa

SEQ ID NO: 40044 - RNA, 19 nt, Artificial Sequence
  Description of Artificial Sequence: Synthetic oligonucleotide
aaauagugaaaggcaggaa

SEQ ID NO: 40045 - RNA, 19 nt, Artificial Sequence
  Description of Artificial Sequence: Synthetic oligonucleotide
acauugguauguacgccac

SEQ ID NO: 40046 - RNA, 19 nt, Artificial Sequence
  Description of Artificial Sequence: Synthetic oligonucleotide
gugauagccagcuccuuuc

SEQ ID NO: 40047 - RNA, 19 nt, Artificial Sequence
  Description of Artificial Sequence: Synthetic oligonucleotide
gacauaacguuccuaccua

SEQ ID NO: 40048 - RNA, 19 nt, Artificial Sequence
  Description of Artificial Sequence: Synthetic oligonucleotide
aaacgaauguugaaaccua

SEQ ID NO: 40049 - RNA, 19 nt, Artificial Sequence
  Description of Artificial Sequence: Synthetic oligonucleotide
agcggagguagaucagguc

SEQ ID NO: 40050 - RNA, 19 nt, Artificial Sequence
  Description of Artificial Sequence: Synthetic oligonucleotide
ucaagagugcuugcucuca

SEQ ID NO: 40051 - RNA, 19 nt, Artificial Sequence
  Description of Artificial Sequence: Synthetic oligonucleotide
gauggaauuccuacaaggu

SEQ ID NO: 40052 - RNA, 19 nt, Artificial Sequence
  Description of Artificial Sequence: Synthetic oligonucleotide
acacgaaaacucaacacaa

SEQ ID NO: 40053 - RNA, 19 nt, Artificial Sequence
  Description of Artificial Sequence: Synthetic oligonucleotide
auauauagaaucaccccuu

SEQ ID NO: 40054 - RNA, 19 nt, Artificial Sequence
  Description of Artificial Sequence: Synthetic oligonucleotide
agguagucaauugcaacca

SEQ ID NO: 40055 - RNA, 19 nt, Artificial Sequence
  Description of Artificial Sequence: Synthetic oligonucleotide
gauacaaaugagagccgca

SEQ ID NO: 40056 - RNA, 19 nt, Artificial Sequence
  Description of Artificial Sequence: Synthetic oligonucleotide
gacaccuuaccccuacaaa

SEQ ID NO: 40057 - RNA, 19 nt, Artificial Sequence
  Description of Artificial Sequence: Synthetic oligonucleotide
acacauauauauauauaua

SEQ ID NO: 40058 - RNA, 19 nt, Artificial Sequence
  Description of Artificial Sequence: Synthetic oligonucleotide
agcaauuacuacugcucau

SEQ ID NO: 40059 - RNA, 19 nt, Artificial Sequence
  Description of Artificial Sequence: Synthetic oligonucleotide
aacugugaaccugccuuug

SEQ ID NO: 40060 - RNA, 19 nt, Artificial Sequence
  Description of Artificial Sequence: Synthetic oligonucleotide
ggggcuuaaacucuaagua

SEQ ID NO: 40061 - RNA, 19 nt, Artificial Sequence
  Description of Artificial Sequence: Synthetic oligonucleotide
ucacugauuguugaucgua

SEQ ID NO: 40062 - RNA, 19 nt, Artificial Sequence
  Description of Artificial Sequence: Synthetic oligonucleotide
cuacugcucauauacaccu

SEQ ID NO: 40063 - RNA, 19 nt, Artificial Sequence
  Description of Artificial Sequence: Synthetic oligonucleotide
aguuucauugcuaggguua

SEQ ID NO: 40064 - RNA, 19 nt, Artificial Sequence
  Description of Artificial Sequence: Synthetic oligonucleotide
cguuaaguuuaggagaugg

SEQ ID NO: 40065 - RNA, 19 nt, Artificial Sequence
  Description of Artificial Sequence: Synthetic oligonucleotide
ugaucguaccuugguagga

SEQ ID NO: 40066 - RNA, 19 nt, Artificial Sequence
  Description of Artificial Sequence: Synthetic oligonucleotide
ucguaccuugguaggaaaa

SEQ ID NO: 40067 - RNA, 19 nt, Artificial Sequence
  Description of Artificial Sequence: Synthetic oligonucleotide
guaaaccgaguaauguaac

SEQ ID NO: 40068 - RNA, 19 nt, Artificial Sequence
  Description of Artificial Sequence: Synthetic oligonucleotide
uguuaggucuugguuuacu

SEQ ID NO: 40069 - RNA, 19 nt, Artificial Sequence
  Description of Artificial Sequence: Synthetic oligonucleotide
caucagaauggaagcccag

SEQ ID NO: 40070 - RNA, 19 nt, Artificial Sequence
  Description of Artificial Sequence: Synthetic oligonucleotide
cacuagaccccuuuaguaa

SEQ ID NO: 40071 - RNA, 19 nt, Artificial Sequence
  Description of Artificial Sequence: Synthetic oligonucleotide
gcaagucaaggugauagcc

SEQ ID NO: 40072 - RNA, 19 nt, Artificial Sequence
  Description of Artificial Sequence: Synthetic oligonucleotide
uagaccccuuuaguaaaag

SEQ ID NO: 40073 - RNA, 19 nt, Artificial Sequence
  Description of Artificial Sequence: Synthetic oligonucleotide
cuguaaaccgaguaaugua

SEQ ID NO: 40074 - RNA, 19 nt, Artificial Sequence
  Description of Artificial Sequence: Synthetic oligonucleotide
cauugggauaaacuuuaga

SEQ ID NO: 40075 - RNA, 19 nt, Artificial Sequence
  Description of Artificial Sequence: Synthetic oligonucleotide
cacacacauauauauauau

SEQ ID NO: 40076 - RNA, 19 nt, Artificial Sequence
  Description of Artificial Sequence: Synthetic oligonucleotide
aaguaucuauauauauaua

SEQ ID NO: 40077 - RNA, 19 nt, Artificial Sequence
  Description of Artificial Sequence: Synthetic oligonucleotide
cagcaauuacuacugcuca

SEQ ID NO: 40078 - RNA, 19 nt, Artificial Sequence
  Description of Artificial Sequence: Synthetic oligonucleotide
ucugaaccugaugucacua

SEQ ID NO: 40079 - RNA, 19 nt, Artificial Sequence
  Description of Artificial Sequence: Synthetic oligonucleotide
agcuuacgcacaaagacua

SEQ ID NO: 40080 - RNA, 19 nt, Artificial Sequence
  Description of Artificial Sequence: Synthetic oligonucleotide
acauucggacucuacuuuu

SEQ ID NO: 40081 - RNA, 19 nt, Artificial Sequence
  Description of Artificial Sequence: Synthetic oligonucleotide
uuacccacaguaggacgag

SEQ ID NO: 40082 - RNA, 19 nt, Artificial Sequence
  Description of Artificial Sequence: Synthetic oligonucleotide
auucggacucuacuuuuaa

SEQ ID NO: 40083 - RNA, 19 nt, Artificial Sequence
  Description of Artificial Sequence: Synthetic oligonucleotide
aucagaauggaagcccaga

SEQ ID NO: 40084 - RNA, 19 nt, Artificial Sequence
  Description of Artificial Sequence: Synthetic oligonucleotide
cagaacauucggacucuac

SEQ ID NO: 40085 - RNA, 19 nt, Artificial Sequence
  Description of Artificial Sequence: Synthetic oligonucleotide
agacaccuuaccccuacaa

SEQ ID NO: 40086 - RNA, 19 nt, Artificial Sequence
  Description of Artificial Sequence: Synthetic oligonucleotide
acaccuauuuaaggcagca

SEQ ID NO: 40087 - RNA, 19 nt, Artificial Sequence
  Description of Artificial Sequence: Synthetic oligonucleotide
cagaaagauaucugaaccu

SEQ ID NO: 40088 - RNA, 19 nt, Artificial Sequence
  Description of Artificial Sequence: Synthetic oligonucleotide
cauaacguuccuaccuaga

SEQ ID NO: 40089 - RNA, 19 nt, Artificial Sequence
  Description of Artificial Sequence: Synthetic oligonucleotide
cuguaacccgcuguucacg

SEQ ID NO: 40090 - RNA, 19 nt, Artificial Sequence
  Description of Artificial Sequence: Synthetic oligonucleotide
guaacuguauugggaaauc

SEQ ID NO: 40091 - RNA, 19 nt, Artificial Sequence
  Description of Artificial Sequence: Synthetic oligonucleotide
aagacaccuuaccccuaca

SEQ ID NO: 40092 - RNA, 19 nt, Artificial Sequence
  Description of Artificial Sequence: Synthetic oligonucleotide
acauccuacaugucuuaua

SEQ ID NO: 40093 - RNA, 19 nt, Artificial Sequence
  Description of Artificial Sequence: Synthetic oligonucleotide
gucaaguagucaaaagaaa

SEQ ID NO: 40094 - RNA, 19 nt, Artificial Sequence
  Description of Artificial Sequence: Synthetic oligonucleotide
uggaugagacuuguacuuc

SEQ ID NO: 40095 - RNA, 19 nt, Artificial Sequence
  Description of Artificial Sequence: Synthetic oligonucleotide
auucuuacguaaauuuauu

SEQ ID NO: 40096 - RNA, 19 nt, Artificial Sequence
  Description of Artificial Sequence: Synthetic oligonucleotide
cagaacgcuuauauacuca

SEQ ID NO: 40097 - RNA, 19 nt, Artificial Sequence
  Description of Artificial Sequence: Synthetic oligonucleotide
gaagcuaguugacuguuuu

SEQ ID NO: 40098 - RNA, 19 nt, Artificial Sequence
  Description of Artificial Sequence: Synthetic oligonucleotide
cuggggcuuaaacucuaag

SEQ ID NO: 40099 - RNA, 19 nt, Artificial Sequence
  Description of Artificial Sequence: Synthetic oligonucleotide
ggaaaucacaccaagguau

SEQ ID NO: 40100 - RNA, 19 nt, Artificial Sequence
  Description of Artificial Sequence: Synthetic oligonucleotide
aacaaacacuuuggggaau

SEQ ID NO: 40101 - RNA, 19 nt, Artificial Sequence
  Description of Artificial Sequence: Synthetic oligonucleotide
uugcacuuauucugccuuc

SEQ ID NO: 40102 - RNA, 19 nt, Artificial Sequence
  Description of Artificial Sequence: Synthetic oligonucleotide
aggcaggagucaucuaacu

SEQ ID NO: 40103 - RNA, 19 nt, Artificial Sequence
  Description of Artificial Sequence: Synthetic oligonucleotide
cagaacuggggcuuaaacu

SEQ ID NO: 40104 - RNA, 19 nt, Artificial Sequence
  Description of Artificial Sequence: Synthetic oligonucleotide
guacgccacaaguuuaaaa

SEQ ID NO: 40105 - RNA, 19 nt, Artificial Sequence
  Description of Artificial Sequence: Synthetic oligonucleotide
acacacauauauauauaua

SEQ ID NO: 40106 - RNA, 19 nt, Artificial Sequence
  Description of Artificial Sequence: Synthetic oligonucleotide
gagugcuugcucucauauc

SEQ ID NO: 40107 - RNA, 19 nt, Artificial Sequence
  Description of Artificial Sequence: Synthetic oligonucleotide
aagagaccuuacaauuaaa

SEQ ID NO: 40108 - RNA, 19 nt, Artificial Sequence
  Description of Artificial Sequence: Synthetic oligonucleotide
guuccuaccuagaaagucu

SEQ ID NO: 40109 - RNA, 19 nt, Artificial Sequence
  Description of Artificial Sequence: Synthetic oligonucleotide
ucagaggaguagucauauc

SEQ ID NO: 40110 - RNA, 19 nt, Artificial Sequence
  Description of Artificial Sequence: Synthetic oligonucleotide
aucguaccuugguaggaaa

SEQ ID NO: 40111 - RNA, 19 nt, Artificial Sequence
  Description of Artificial Sequence: Synthetic oligonucleotide
augagagccgcaaaagcuu

SEQ ID NO: 40112 - RNA, 19 nt, Artificial Sequence
  Description of Artificial Sequence: Synthetic oligonucleotide
caggucuuuucagggcucg

SEQ ID NO: 40113 - RNA, 19 nt, Artificial Sequence
  Description of Artificial Sequence: Synthetic oligonucleotide
uacccacaguaggacgagg

SEQ ID NO: 40114 - RNA, 19 nt, Artificial Sequence
  Description of Artificial Sequence: Synthetic oligonucleotide
  modified_base (5)..(5): a, c, u, g, unknown or other
guuanagguugcccagcaa

SEQ ID NO: 40115 - RNA, 19 nt, Artificial Sequence
  Description of Artificial Sequence: Synthetic oligonucleotide
aguugagaguuaagagugu

SEQ ID NO: 40116 - RNA, 19 nt, Artificial Sequence
  Description of Artificial Sequence: Synthetic oligonucleotide
uaugaaugguguggguguu

SEQ ID NO: 40117 - RNA, 19 nt, Artificial Sequence
  Description of Artificial Sequence: Synthetic oligonucleotide
ggcuuaaacucuaaguaua

SEQ ID NO: 40118 - RNA, 19 nt, Artificial Sequence
  Description of Artificial Sequence: Synthetic oligonucleotide
agagacucuauugcacuua

SEQ ID NO: 40119 - RNA, 19 nt, Artificial Sequence
  Description of Artificial Sequence: Synthetic oligonucleotide
augaagcuaguugacuguu

SEQ ID NO: 40120 - RNA, 19 nt, Artificial Sequence
  Description of Artificial Sequence: Synthetic oligonucleotide
gaaggccuuacacucggau

SEQ ID NO: 40121 - RNA, 19 nt, Artificial Sequence
  Description of Artificial Sequence: Synthetic oligonucleotide
gggaaaucacaccaaggua

SEQ ID NO: 40122 - RNA, 19 nt, Artificial Sequence
  Description of Artificial Sequence: Synthetic oligonucleotide
gaacagugggacucugggu

SEQ ID NO: 40123 - RNA, 19 nt, Artificial Sequence
  Description of Artificial Sequence: Synthetic oligonucleotide
agaguauccugagguggcu

SEQ ID NO: 40124 - RNA, 19 nt, Artificial Sequence
  Description of Artificial Sequence: Synthetic oligonucleotide
uguacgccacaaguuuaaa

SEQ ID NO: 40125 - RNA, 19 nt, Artificial Sequence
  Description of Artificial Sequence: Synthetic oligonucleotide
ggcauucucaguuauucau

SEQ ID NO: 40126 - RNA, 19 nt, Artificial Sequence
  Description of Artificial Sequence: Synthetic oligonucleotide
cucuggugugacaccgcac

SEQ ID NO: 40127 - RNA, 19 nt, Artificial Sequence
  Description of Artificial Sequence: Synthetic oligonucleotide
gagacucuauugcacuuau

SEQ ID NO: 40128 - RNA, 19 nt, Artificial Sequence
  Description of Artificial Sequence: Synthetic oligonucleotide
cagggcucguguuaggucu

SEQ ID NO: 40129 - RNA, 19 nt, Artificial Sequence
  Description of Artificial Sequence: Synthetic oligonucleotide
caugucuuauagaaagcuu

SEQ ID NO: 40130 - RNA, 19 nt, Artificial Sequence
  Description of Artificial Sequence: Synthetic oligonucleotide
auguacgccacaaguuuaa

SEQ ID NO: 40131 - RNA, 19 nt, Artificial Sequence
  Description of Artificial Sequence: Synthetic oligonucleotide
cuagaccccuuuaguaaaa

SEQ ID NO: 40132 - RNA, 19 nt, Artificial Sequence
  Description of Artificial Sequence: Synthetic oligonucleotide
augagcaagucaaggugau

SEQ ID NO: 40133 - RNA, 19 nt, Artificial Sequence
  Description of Artificial Sequence: Synthetic oligonucleotide
uuaccccuacaaagccaaa

SEQ ID NO: 40134 - RNA, 19 nt, Artificial Sequence
  Description of Artificial Sequence: Synthetic oligonucleotide
auguugaaaccuacaugaa

SEQ ID NO: 40135 - RNA, 19 nt, Artificial Sequence
  Description of Artificial Sequence: Synthetic oligonucleotide
cucggauacagugagguuu

SEQ ID NO: 40136 - RNA, 19 nt, Artificial Sequence
  Description of Artificial Sequence: Synthetic oligonucleotide
cuuacgcacaaagacuagu

SEQ ID NO: 40137 - RNA, 19 nt, Artificial Sequence
  Description of Artificial Sequence: Synthetic oligonucleotide
acguuaaguuuaggagaug

SEQ ID NO: 40138 - RNA, 19 nt, Artificial Sequence
  Description of Artificial Sequence: Synthetic oligonucleotide
cauugguauguacgccaca

SEQ ID NO: 40139 - RNA, 19 nt, Artificial Sequence
  Description of Artificial Sequence: Synthetic oligonucleotide
gggcuuaaacucuaaguau

SEQ ID NO: 40140 - RNA, 19 nt, Artificial Sequence
  Description of Artificial Sequence: Synthetic oligonucleotide
cuaagacauaacguuccua

SEQ ID NO: 40141 - RNA, 19 nt, Artificial Sequence
  Description of Artificial Sequence: Synthetic oligonucleotide
gcaauuacuacugcucaua

SEQ ID NO: 40142 - RNA, 19 nt, Artificial Sequence
  Description of Artificial Sequence: Synthetic oligonucleotide
uuagacggcucagcacaua

SEQ ID NO: 40143 - RNA, 19 nt, Artificial Sequence
  Description of Artificial Sequence: Synthetic oligonucleotide
uccccuggagcagaacauu

SEQ ID NO: 40144 - RNA, 19 nt, Artificial Sequence
  Description of Artificial Sequence: Synthetic oligonucleotide
acguuccuaccuagaaagu

SEQ ID NO: 40145 - RNA, 19 nt, Artificial Sequence
  Description of Artificial Sequence: Synthetic oligonucleotide
cacgaaaacucaacacaau

SEQ ID NO: 40146 - RNA, 19 nt, Artificial Sequence
  Description of Artificial Sequence: Synthetic oligonucleotide
gcuuacgcacaaagacuag

SEQ ID NO: 40147 - RNA, 19 nt, Artificial Sequence
  Description of Artificial Sequence: Synthetic oligonucleotide
cucguguuaggucuugguu

SEQ ID NO: 40148 - RNA, 19 nt, Artificial Sequence
  Description of Artificial Sequence: Synthetic oligonucleotide
guagucaauugcaaccauu

SEQ ID NO: 40149 - RNA, 19 nt, Artificial Sequence
  Description of Artificial Sequence: Synthetic oligonucleotide
gguauguacgccacaaguu

SEQ ID NO: 40150 - RNA, 19 nt, Artificial Sequence
  Description of Artificial Sequence: Synthetic oligonucleotide
ccuuaccccuacaaagcca

SEQ ID NO: 40151 - RNA, 19 nt, Artificial Sequence
  Description of Artificial Sequence: Synthetic oligonucleotide
agccccuacuuggaucagu

SEQ ID NO: 40152 - RNA, 19 nt, Artificial Sequence
  Description of Artificial Sequence: Synthetic oligonucleotide
caccaaggguuaucuccca

SEQ ID NO: 40153 - RNA, 19 nt, Artificial Sequence
  Description of Artificial Sequence: Synthetic oligonucleotide
acacugucgcagccacaaa

SEQ ID NO: 40154 - RNA, 19 nt, Artificial Sequence
  Description of Artificial Sequence: Synthetic oligonucleotide
ccccuggagcagaacauuc

SEQ ID NO: 40155 - RNA, 19 nt, Artificial Sequence
  Description of Artificial Sequence: Synthetic oligonucleotide
cuacuuggaucaguaggcu

SEQ ID NO: 40156 - RNA, 19 nt, Artificial Sequence
  Description of Artificial Sequence: Synthetic oligonucleotide
cugcuugcaucuguugcaa

SEQ ID NO: 40157 - RNA, 19 nt, Artificial Sequence
  Description of Artificial Sequence: Synthetic oligonucleotide
ggaauuccuacaagguagu

SEQ ID NO: 40158 - RNA, 19 nt, Artificial Sequence
  Description of Artificial Sequence: Synthetic oligonucleotide
aggucuuuucagggcucgu

SEQ ID NO: 40159 - RNA, 19 nt, Artificial Sequence
  Description of Artificial Sequence: Synthetic oligonucleotide
ccuuggacuuauauauaua

SEQ ID NO: 40160 - RNA, 19 nt, Artificial Sequence
  Description of Artificial Sequence: Synthetic oligonucleotide
caguagcacuaagcucuac

SEQ ID NO: 40161 - RNA, 19 nt, Artificial Sequence
  Description of Artificial Sequence: Synthetic oligonucleotide
caccaggauuuauuauagu

SEQ ID NO: 40162 - RNA, 19 nt, Artificial Sequence
  Description of Artificial Sequence: Synthetic oligonucleotide
agagcacaucaggaacaua

SEQ ID NO: 40163 - RNA, 19 nt, Artificial Sequence
  Description of Artificial Sequence: Synthetic oligonucleotide
ccacaacuuucaguguaug

SEQ ID NO: 40164 - RNA, 19 nt, Artificial Sequence
  Description of Artificial Sequence: Synthetic oligonucleotide
agacucuauugcacuuauu

SEQ ID NO: 40165 - RNA, 19 nt, Artificial Sequence
  Description of Artificial Sequence: Synthetic oligonucleotide
cggacucuacuuuuaagcu

SEQ ID NO: 40166 - RNA, 19 nt, Artificial Sequence
  Description of Artificial Sequence: Synthetic oligonucleotide
cugcucauauacaccuauu

SEQ ID NO: 40167 - RNA, 19 nt, Artificial Sequence
  Description of Artificial Sequence: Synthetic oligonucleotide
ggacauagcggagguagau

SEQ ID NO: 40168 - RNA, 19 nt, Artificial Sequence
  Description of Artificial Sequence: Synthetic oligonucleotide
ggccuuacacucggauaca

SEQ ID NO: 40169 - RNA, 19 nt, Artificial Sequence
  Description of Artificial Sequence: Synthetic oligonucleotide
gccccuacuuggaucagua

SEQ ID NO: 40170 - RNA, 19 nt, Artificial Sequence
  Description of Artificial Sequence: Synthetic oligonucleotide
cuacuacaaaugggaacuu

SEQ ID NO: 40171 - RNA, 19 nt, Artificial Sequence
  Description of Artificial Sequence: Synthetic oligonucleotide
ggaaggccuuacacucgga

SEQ ID NO: 40172 - RNA, 19 nt, Artificial Sequence
  Description of Artificial Sequence: Synthetic oligonucleotide
gcuuaugauccagccccua

SEQ ID NO: 40173 - RNA, 19 nt, Artificial Sequence
  Description of Artificial Sequence: Synthetic oligonucleotide
gcagaacauucggacucua

SEQ ID NO: 40174 - RNA, 19 nt, Artificial Sequence
  Description of Artificial Sequence: Synthetic oligonucleotide
gcccaugauagagcagacu

SEQ ID NO: 40175 - RNA, 19 nt, Artificial Sequence
  Description of Artificial Sequence: Synthetic oligonucleotide
aauaaagcuacgcacagag

SEQ ID NO: 40176 - RNA, 19 nt, Artificial Sequence
  Description of Artificial Sequence: Synthetic oligonucleotide
aucccuauaaccuugagac

SEQ ID NO: 40177 - RNA, 19 nt, Artificial Sequence
  Description of Artificial Sequence: Synthetic oligonucleotide
auacacuuaaaacuucucc

SEQ ID NO: 40178 - RNA, 19 nt, Artificial Sequence
  Description of Artificial Sequence: Synthetic oligonucleotide
auuguuuuaucacagaaga

SEQ ID NO: 40179 - RNA, 19 nt, Artificial Sequence
  Description of Artificial Sequence: Synthetic oligonucleotide
uguuccuacaggcuuaucg

SEQ ID NO: 40180 - RNA, 19 nt, Artificial Sequence
  Description of Artificial Sequence: Synthetic oligonucleotide
uuuguaaugcuaaagggac

SEQ ID NO: 40181 - RNA, 19 nt, Artificial Sequence
  Description of Artificial Sequence: Synthetic oligonucleotide
uuuaagccgacauagcccg

SEQ ID NO: 40182 - RNA, 19 nt, Artificial Sequence
  Description of Artificial Sequence: Synthetic oligonucleotide
agauaaaccacguaauguc

SEQ ID NO: 40183 - RNA, 19 nt, Artificial Sequence
  Description of Artificial Sequence: Synthetic oligonucleotide
caaauaaagggaaacgagg

SEQ ID NO: 40184 - RNA, 19 nt, Artificial Sequence
  Description of Artificial Sequence: Synthetic oligonucleotide
cuuacuaaccacuagcgag

SEQ ID NO: 40185 - RNA, 19 nt, Artificial Sequence
  Description of Artificial Sequence: Synthetic oligonucleotide
uacacuaacauauaggcau

SEQ ID NO: 40186 - RNA, 19 nt, Artificial Sequence
  Description of Artificial Sequence: Synthetic oligonucleotide
uguuuaaccauauacacuu

SEQ ID NO: 40187 - RNA, 19 nt, Artificial Sequence
  Description of Artificial Sequence: Synthetic oligonucleotide
ucuuuaagccgacauagcc

SEQ ID NO: 40188 - RNA, 19 nt, Artificial Sequence
  Description of Artificial Sequence: Synthetic oligonucleotide
uccacuagcagccaguuca

SEQ ID NO: 40189 - RNA, 19 nt, Artificial Sequence
  Description of Artificial Sequence: Synthetic oligonucleotide
aaaaguucgacuuguugca

SEQ ID NO: 40190 - RNA, 19 nt, Artificial Sequence
  Description of Artificial Sequence: Synthetic oligonucleotide
uaacauauaggcauuugug

SEQ ID NO: 40191 - RNA, 19 nt, Artificial Sequence
  Description of Artificial Sequence: Synthetic oligonucleotide
aaguggucgagcccuagcc

SEQ ID NO: 40192 - RNA, 19 nt, Artificial Sequence
  Description of Artificial Sequence: Synthetic oligonucleotide
uguaauucauagaacacuc

SEQ ID NO: 40193 - RNA, 19 nt, Artificial Sequence
  Description of Artificial Sequence: Synthetic oligonucleotide
agucaauagauacagagaa

SEQ ID NO: 40194 - RNA, 19 nt, Artificial Sequence
  Description of Artificial Sequence: Synthetic oligonucleotide
ugugguuaccauaaaauaa

SEQ ID NO: 40195 - RNA, 19 nt, Artificial Sequence
  Description of Artificial Sequence: Synthetic oligonucleotide
uaaauuggcuguuuaacca

SEQ ID NO: 40196 - RNA, 19 nt, Artificial Sequence
  Description of Artificial Sequence: Synthetic oligonucleotide
uguaccaaaguucuacggc

SEQ ID NO: 40197 - RNA, 19 nt, Artificial Sequence
  Description of Artificial Sequence: Synthetic oligonucleotide
ucgacaaagcucuugaaca

SEQ ID NO: 40198 - RNA, 19 nt, Artificial Sequence
  Description of Artificial Sequence: Synthetic oligonucleotide
uuaaguucggcuuaacuuc

SEQ ID NO: 40199 - RNA, 19 nt, Artificial Sequence
  Description of Artificial Sequence: Synthetic oligonucleotide
cuaaauuggcuguuuaacc

SEQ ID NO: 40200 - RNA, 19 nt, Artificial Sequence
  Description of Artificial Sequence: Synthetic oligonucleotide
aaaccuaucguugaucuug

SEQ ID NO: 40201 - RNA, 19 nt, Artificial Sequence
  Description of Artificial Sequence: Synthetic oligonucleotide
ucuguuggcaucauguaca

SEQ ID NO: 40202 - RNA, 19 nt, Artificial Sequence
  Description of Artificial Sequence: Synthetic oligonucleotide
uguuuuaggaucauacauc

SEQ ID NO: 40203 - RNA, 19 nt, Artificial Sequence
  Description of Artificial Sequence: Synthetic oligonucleotide
acauaaaccucauuaguug

SEQ ID NO: 40204 - RNA, 19 nt, Artificial Sequence
  Description of Artificial Sequence: Synthetic oligonucleotide
aguaauucaagcuccgugu

SEQ ID NO: 40205 - RNA, 19 nt, Artificial Sequence
  Description of Artificial Sequence: Synthetic oligonucleotide
auuaucuaacauugcuggc

SEQ ID NO: 40206 - RNA, 19 nt, Artificial Sequence
  Description of Artificial Sequence: Synthetic oligonucleotide
aagaggauuaccugggcca

SEQ ID NO: 40207 - RNA, 19 nt, Artificial Sequence
  Description of Artificial Sequence: Synthetic oligonucleotide
cucaucgagggcuuuaucg

SEQ ID NO: 40208 - RNA, 19 nt, Artificial Sequence
  Description of Artificial Sequence: Synthetic oligonucleotide
uuuuacaggauaugggugu

SEQ ID NO: 40209 - RNA, 19 nt, Artificial Sequence
  Description of Artificial Sequence: Synthetic oligonucleotide
aaucaucgcccucuguugg

SEQ ID NO: 40210 - RNA, 19 nt, Artificial Sequence
  Description of Artificial Sequence: Synthetic oligonucleotide
aaagggacgcuuuuagaug

SEQ ID NO: 40211 - RNA, 19 nt, Artificial Sequence
  Description of Artificial Sequence: Synthetic oligonucleotide
uuacuaaccacuagcgagc

SEQ ID NO: 40212 - RNA, 19 nt, Artificial Sequence
  Description of Artificial Sequence: Synthetic oligonucleotide
gaagaugacgucaacucgg

SEQ ID NO: 40213 - RNA, 19 nt, Artificial Sequence
  Description of Artificial Sequence: Synthetic oligonucleotide
uauucgaaaaguucgacuu

SEQ ID NO: 40214 - RNA, 19 nt, Artificial Sequence
  Description of Artificial Sequence: Synthetic oligonucleotide
ugaaagucuaacugaagga

SEQ ID NO: 40215 - RNA, 19 nt, Artificial Sequence
  Description of Artificial Sequence: Synthetic oligonucleotide
uuugcacucaaaacuagac

SEQ ID NO: 40216 - RNA, 19 nt, Artificial Sequence
  Description of Artificial Sequence: Synthetic oligonucleotide
uaaaccuuaauuguaucug

SEQ ID NO: 40217 - RNA, 19 nt, Artificial Sequence
  Description of Artificial Sequence: Synthetic oligonucleotide
cauguuaccaggcuguggc

SEQ ID NO: 40218 - RNA, 19 nt, Artificial Sequence
  Description of Artificial Sequence: Synthetic oligonucleotide
uauacaggagaguuggugu

SEQ ID NO: 40219 - RNA, 19 nt, Artificial Sequence
  Description of Artificial Sequence: Synthetic oligonucleotide
uguaaugcuaaagggacgc

SEQ ID NO: 40220 - RNA, 19 nt, Artificial Sequence
  Description of Artificial Sequence: Synthetic oligonucleotide
cuaucuaaaguuucccacc

SEQ ID NO: 40221 - RNA, 19 nt, Artificial Sequence
  Description of Artificial Sequence: Synthetic oligonucleotide
auaauugugcucaauagcu

SEQ ID NO: 40222 - RNA, 19 nt, Artificial Sequence
  Description of Artificial Sequence: Synthetic oligonucleotide
aaggcaauauacaggagag

SEQ ID NO: 40223 - RNA, 19 nt, Artificial Sequence
  Description of Artificial Sequence: Synthetic oligonucleotide
aagcuaucuaaaguuuccc

SEQ ID NO: 40224 - RNA, 19 nt, Artificial Sequence
  Description of Artificial Sequence: Synthetic oligonucleotide
ugauuaacaucucauucuc

SEQ ID NO: 40225 - RNA, 19 nt, Artificial Sequence
  Description of Artificial Sequence: Synthetic oligonucleotide
uuaucuaugucuaccuggu

SEQ ID NO: 40226 - RNA, 19 nt, Artificial Sequence
  Description of Artificial Sequence: Synthetic oligonucleotide
ugcgcucuugcuaaaaggc

SEQ ID NO: 40227 - RNA, 19 nt, Artificial Sequence
  Description of Artificial Sequence: Synthetic oligonucleotide
aguacaccuggauacgacg

SEQ ID NO: 40228 - RNA, 19 nt, Artificial Sequence
  Description of Artificial Sequence: Synthetic oligonucleotide
acucaaauaaagcuacgca

SEQ ID NO: 40229 - RNA, 19 nt, Artificial Sequence
  Description of Artificial Sequence: Synthetic oligonucleotide
aaggcuaguauccuggaua

SEQ ID NO: 40230 - RNA, 19 nt, Artificial Sequence
  Description of Artificial Sequence: Synthetic oligonucleotide
uaucaucgucuauaaaucc

SEQ ID NO: 40231 - RNA, 19 nt, Artificial Sequence
  Description of Artificial Sequence: Synthetic oligonucleotide
uuuguagcucacaauuucu

SEQ ID NO: 40232 - RNA, 19 nt, Artificial Sequence
  Description of Artificial Sequence: Synthetic oligonucleotide
uuugcaaaugggcugccga

SEQ ID NO: 40233 - RNA, 19 nt, Artificial Sequence
  Description of Artificial Sequence: Synthetic oligonucleotide
auuaucaagcaacacucga

SEQ ID NO: 40234 - RNA, 19 nt, Artificial Sequence
  Description of Artificial Sequence: Synthetic oligonucleotide
gaagaucucuuaaaguacc

SEQ ID NO: 40235 - RNA, 19 nt, Artificial Sequence
  Description of Artificial Sequence: Synthetic oligonucleotide
uggguauaguguuauuucc

SEQ ID NO: 40236 - RNA, 19 nt, Artificial Sequence
  Description of Artificial Sequence: Synthetic oligonucleotide
gugucgaacagauagguca

SEQ ID NO: 40237 - RNA, 19 nt, Artificial Sequence
  Description of Artificial Sequence: Synthetic oligonucleotide
uagagugauucuuucaccu

SEQ ID NO: 40238 - RNA, 19 nt, Artificial Sequence
  Description of Artificial Sequence: Synthetic oligonucleotide
gacgcuuuuagaugaauca

SEQ ID NO: 40239 - RNA, 19 nt, Artificial Sequence
  Description of Artificial Sequence: Synthetic oligonucleotide
uuugaucuuguggaaaccc

SEQ ID NO: 40240 - RNA, 19 nt, Artificial Sequence
  Description of Artificial Sequence: Synthetic oligonucleotide
ucguaguugauuugugaag

SEQ ID NO: 40241 - RNA, 19 nt, Artificial Sequence
  Description of Artificial Sequence: Synthetic oligonucleotide
aacacgguguacuuuacuu

SEQ ID NO: 40242 - RNA, 19 nt, Artificial Sequence
  Description of Artificial Sequence: Synthetic oligonucleotide
auaaugucgccauccauca

SEQ ID NO: 40243 - RNA, 19 nt, Artificial Sequence
  Description of Artificial Sequence: Synthetic oligonucleotide
ugauucuuuaagccgacau

SEQ ID NO: 40244 - RNA, 19 nt, Artificial Sequence
  Description of Artificial Sequence: Synthetic oligonucleotide
ugugcagugucgaacagau

SEQ ID NO: 40245 - RNA, 19 nt, Artificial Sequence
  Description of Artificial Sequence: Synthetic oligonucleotide
ugaaucaucgcccucuguu

SEQ ID NO: 40246 - RNA, 19 nt, Artificial Sequence
  Description of Artificial Sequence: Synthetic oligonucleotide
aagaccccuaacugucagc

SEQ ID NO: 40247 - RNA, 19 nt, Artificial Sequence
  Description of Artificial Sequence: Synthetic oligonucleotide
acaucguaguccugaauuc

SEQ ID NO: 40248 - RNA, 19 nt, Artificial Sequence
  Description of Artificial Sequence: Synthetic oligonucleotide
aucauuguuuuauugccgu

SEQ ID NO: 40249 - RNA, 19 nt, Artificial Sequence
  Description of Artificial Sequence: Synthetic oligonucleotide
uaaguucggcuuaacuucc

SEQ ID NO: 40250 - RNA, 19 nt, Artificial Sequence
  Description of Artificial Sequence: Synthetic oligonucleotide
aaccuuaauuguaucugac

SEQ ID NO: 40251 - RNA, 19 nt, Artificial Sequence
  Description of Artificial Sequence: Synthetic oligonucleotide
guagcucacaauuucuagc

SEQ ID NO: 40252 - RNA, 19 nt, Artificial Sequence
  Description of Artificial Sequence: Synthetic oligonucleotide
aaacccagggucauugggg

SEQ ID NO: 40253 - RNA, 19 nt, Artificial Sequence
  Description of Artificial Sequence: Synthetic oligonucleotide
uucguaguugauuugugaa

SEQ ID NO: 40254 - RNA, 19 nt, Artificial Sequence
  Description of Artificial Sequence: Synthetic oligonucleotide
ccucuauucgaaaaguucg

SEQ ID NO: 40255 - RNA, 19 nt, Artificial Sequence
  Description of Artificial Sequence: Synthetic oligonucleotide
ugcacguguaccaaaguuc

SEQ ID NO: 40256 - RNA, 19 nt, Artificial Sequence
  Description of Artificial Sequence: Synthetic oligonucleotide
uucacuuagcuuugauucc

SEQ ID NO: 40257 - RNA, 19 nt, Artificial Sequence
  Description of Artificial Sequence: Synthetic oligonucleotide
aaacacuauaaugucgcca

SEQ ID NO: 40258 - RNA, 19 nt, Artificial Sequence
  Description of Artificial Sequence: Synthetic oligonucleotide
acguguaccaaaguucuac

SEQ ID NO: 40259 - RNA, 19 nt, Artificial Sequence
  Description of Artificial Sequence: Synthetic oligonucleotide
auguacacuaacauauagg

SEQ ID NO: 40260 - RNA, 19 nt, Artificial Sequence
  Description of Artificial Sequence: Synthetic oligonucleotide
uuuucguaguugauuugug

SEQ ID NO: 40261 - RNA, 19 nt, Artificial Sequence
  Description of Artificial Sequence: Synthetic oligonucleotide
aacuugggcaauguugcuc

SEQ ID NO: 40262 - RNA, 19 nt, Artificial Sequence
  Description of Artificial Sequence: Synthetic oligonucleotide
gacucaaauaaagcuacgc

SEQ ID NO: 40263 - RNA, 19 nt, Artificial Sequence
  Description of Artificial Sequence: Synthetic oligonucleotide
agcaacacucgacaaagcu

SEQ ID NO: 40264 - RNA, 19 nt, Artificial Sequence
  Description of Artificial Sequence: Synthetic oligonucleotide
ugcaguggguaauucacug

SEQ ID NO: 40265 - RNA, 19 nt, Artificial Sequence
  Description of Artificial Sequence: Synthetic oligonucleotide
cuaaccacuagcgagcaug

SEQ ID NO: 40266 - RNA, 19 nt, Artificial Sequence
  Description of Artificial Sequence: Synthetic oligonucleotide
aaaacuagacacgcagcug

SEQ ID NO: 40267 - RNA, 19 nt, Artificial Sequence
  Description of Artificial Sequence: Synthetic oligonucleotide
gaaucaucgcccucuguug

SEQ ID NO: 40268 - RNA, 19 nt, Artificial Sequence
  Description of Artificial Sequence: Synthetic oligonucleotide
aggagauaaacauucuaau

SEQ ID NO: 40269 - RNA, 19 nt, Artificial Sequence
  Description of Artificial Sequence: Synthetic oligonucleotide
aguucuacggcuguuaaaa

SEQ ID NO: 40270 - RNA, 19 nt, Artificial Sequence
  Description of Artificial Sequence: Synthetic oligonucleotide
aggauuaccugggccaucc

SEQ ID NO: 40271 - RNA, 19 nt, Artificial Sequence
  Description of Artificial Sequence: Synthetic oligonucleotide
uaucgagagacacaucgua

SEQ ID NO: 40272 - RNA, 19 nt, Artificial Sequence
  Description of Artificial Sequence: Synthetic oligonucleotide
auauacaggagaguuggug

SEQ ID NO: 40273 - RNA, 19 nt, Artificial Sequence
  Description of Artificial Sequence: Synthetic oligonucleotide
agaaccuugaacacggugu

SEQ ID NO: 40274 - RNA, 19 nt, Artificial Sequence
  Description of Artificial Sequence: Synthetic oligonucleotide
uuggggauuguuuuaucac

SEQ ID NO: 40275 - RNA, 19 nt, Artificial Sequence
  Description of Artificial Sequence: Synthetic oligonucleotide
ucuuagguugucuuggcuu

SEQ ID NO: 40276 - RNA, 19 nt, Artificial Sequence
  Description of Artificial Sequence: Synthetic oligonucleotide
cuugcauguagagaugggc

SEQ ID NO: 40277 - RNA, 19 nt, Artificial Sequence
  Description of Artificial Sequence: Synthetic oligonucleotide
guguaccaaaguucuacgg

SEQ ID NO: 40278 - RNA, 19 nt, Artificial Sequence
  Description of Artificial Sequence: Synthetic oligonucleotide
ugacgcuuugucaccaagc

SEQ ID NO: 40279 - RNA, 19 nt, Artificial Sequence
  Description of Artificial Sequence: Synthetic oligonucleotide
cucgacaaagcucuugaac

SEQ ID NO: 40280 - RNA, 19 nt, Artificial Sequence
  Description of Artificial Sequence: Synthetic oligonucleotide
augcgcucuugcuaaaagg

SEQ ID NO: 40281 - RNA, 19 nt, Artificial Sequence
  Description of Artificial Sequence: Synthetic oligonucleotide
ggaucagucacuucacucc

SEQ ID NO: 40282 - RNA, 19 nt, Artificial Sequence
  Description of Artificial Sequence: Synthetic oligonucleotide
ucacacauaacugggagua

SEQ ID NO: 40283 - RNA, 19 nt, Artificial Sequence
  Description of Artificial Sequence: Synthetic oligonucleotide
agcuuacuaaccacuagcg

SEQ ID NO: 40284 - RNA, 19 nt, Artificial Sequence
  Description of Artificial Sequence: Synthetic oligonucleotide
uggaaaugcgccaccguga

SEQ ID NO: 40285 - RNA, 19 nt, Artificial Sequence
  Description of Artificial Sequence: Synthetic oligonucleotide
uugcauaggccauaaucga

SEQ ID NO: 40286 - RNA, 19 nt, Artificial Sequence
  Description of Artificial Sequence: Synthetic oligonucleotide
cacuauaaugucgccaucc

SEQ ID NO: 40287 - RNA, 19 nt, Artificial Sequence
  Description of Artificial Sequence: Synthetic oligonucleotide
uaauuguaucugacaaugu

SEQ ID NO: 40288 - RNA, 19 nt, Artificial Sequence
  Description of Artificial Sequence: Synthetic oligonucleotide
accaaccagacaccucugc

SEQ ID NO: 40289 - RNA, 19 nt, Artificial Sequence
  Description of Artificial Sequence: Synthetic oligonucleotide
cuggguauaguguuauuuc

SEQ ID NO: 40290 - RNA, 19 nt, Artificial Sequence
  Description of Artificial Sequence: Synthetic oligonucleotide
cauaacugggaguaaguca

SEQ ID NO: 40291 - RNA, 19 nt, Artificial Sequence
  Description of Artificial Sequence: Synthetic oligonucleotide
gaaacacuauaaugucgcc

SEQ ID NO: 40292 - RNA, 19 nt, Artificial Sequence
  Description of Artificial Sequence: Synthetic oligonucleotide
auucgaaaaguucgacuug

SEQ ID NO: 40293 - RNA, 19 nt, Artificial Sequence
  Description of Artificial Sequence: Synthetic oligonucleotide
ugacuuaucaucgucuaua

SEQ ID NO: 40294 - RNA, 19 nt, Artificial Sequence
  Description of Artificial Sequence: Synthetic oligonucleotide
uccgccugaacaaaacuuc

SEQ ID NO: 40295 - RNA, 19 nt, Artificial Sequence
  Description of Artificial Sequence: Synthetic oligonucleotide
uucgaaaaguucgacuugu

SEQ ID NO: 40296 - RNA, 19 nt, Artificial Sequence
  Description of Artificial Sequence: Synthetic oligonucleotide
aaaccccauugucugggag

SEQ ID NO: 40297 - RNA, 19 nt, Artificial Sequence
  Description of Artificial Sequence: Synthetic oligonucleotide
uggcauccaagcuuuauaa

SEQ ID NO: 40298 - RNA, 19 nt, Artificial Sequence
  Description of Artificial Sequence: Synthetic oligonucleotide
uaaguguagcgacuccucu

SEQ ID NO: 40299 - RNA, 19 nt, Artificial Sequence
  Description of Artificial Sequence: Synthetic oligonucleotide
uuaucgagagacacaucgu

SEQ ID NO: 40300 - RNA, 19 nt, Artificial Sequence
  Description of Artificial Sequence: Synthetic oligonucleotide
auuuuacaggauaugggug

SEQ ID NO: 40301 - RNA, 19 nt, Artificial Sequence
  Description of Artificial Sequence: Synthetic oligonucleotide
cugauguacacuaacauau

SEQ ID NO: 40302 - RNA, 19 nt, Artificial Sequence
  Description of Artificial Sequence: Synthetic oligonucleotide
uccuacaggcuuaucgcug

SEQ ID NO: 40303 - RNA, 19 nt, Artificial Sequence
  Description of Artificial Sequence: Synthetic oligonucleotide
ucaacucggugguagagau

SEQ ID NO: 40304 - RNA, 19 nt, Artificial Sequence
  Description of Artificial Sequence: Synthetic oligonucleotide
aagcuacgcacagaguguc

SEQ ID NO: 40305 - RNA, 19 nt, Artificial Sequence
  Description of Artificial Sequence: Synthetic oligonucleotide
uguggauuuuaauugccuu

SEQ ID NO: 40306 - RNA, 19 nt, Artificial Sequence
  Description of Artificial Sequence: Synthetic oligonucleotide
agcuaucuaaaguuuccca

SEQ ID NO: 40307 - RNA, 19 nt, Artificial Sequence
  Description of Artificial Sequence: Synthetic oligonucleotide
aacuagacacgcagcuggc

SEQ ID NO: 40308 - RNA, 19 nt, Artificial Sequence
  Description of Artificial Sequence: Synthetic oligonucleotide
uuaucaaacuugggcaaug

SEQ ID NO: 40309 - RNA, 19 nt, Artificial Sequence
  Description of Artificial Sequence: Synthetic oligonucleotide
aucgcugugcuguaauuca

SEQ ID NO: 40310 - RNA, 19 nt, Artificial Sequence
  Description of Artificial Sequence: Synthetic oligonucleotide
ugaauucgcuucaucacuu

SEQ ID NO: 40311 - RNA, 19 nt, Artificial Sequence
  Description of Artificial Sequence: Synthetic oligonucleotide
agaugaaucaucgcccucu

SEQ ID NO: 40312 - RNA, 19 nt, Artificial Sequence
  Description of Artificial Sequence: Synthetic oligonucleotide
ucuauucgaaaaguucgac

SEQ ID NO: 40313 - RNA, 19 nt, Artificial Sequence
  Description of Artificial Sequence: Synthetic oligonucleotide
ucgagggcuuuaucgagag

SEQ ID NO: 40314 - RNA, 19 nt, Artificial Sequence
  Description of Artificial Sequence: Synthetic oligonucleotide
acuucggcuagagugcacg

SEQ ID NO: 40315 - RNA, 19 nt, Artificial Sequence
  Description of Artificial Sequence: Synthetic oligonucleotide
ucccacgcaacuccauggg

SEQ ID NO: 40316 - RNA, 19 nt, Artificial Sequence
  Description of Artificial Sequence: Synthetic oligonucleotide
augacgucaacucgguggu

SEQ ID NO: 40317 - RNA, 19 nt, Artificial Sequence
  Description of Artificial Sequence: Synthetic oligonucleotide
guuaaguucggcuuaacuu

SEQ ID NO: 40318 - RNA, 19 nt, Artificial Sequence
  Description of Artificial Sequence: Synthetic oligonucleotide
gacgucaacucggugguag

SEQ ID NO: 40319 - RNA, 19 nt, Artificial Sequence
  Description of Artificial Sequence: Synthetic oligonucleotide
uucccugauguacacuaac

SEQ ID NO: 40320 - RNA, 19 nt, Artificial Sequence
  Description of Artificial Sequence: Synthetic oligonucleotide
ugaaccaggacugcaugga

SEQ ID NO: 40321 - RNA, 19 nt, Artificial Sequence
  Description of Artificial Sequence: Synthetic oligonucleotide
cugguccaaagguauuucc

SEQ ID NO: 40322 - RNA, 19 nt, Artificial Sequence
  Description of Artificial Sequence: Synthetic oligonucleotide
augagacauguuaccaggc

SEQ ID NO: 40323 - RNA, 19 nt, Artificial Sequence
  Description of Artificial Sequence: Synthetic oligonucleotide
ugucgaacagauaggucau

SEQ ID NO: 40324 - RNA, 19 nt, Artificial Sequence
  Description of Artificial Sequence: Synthetic oligonucleotide
uccccuuugggguuuagau

SEQ ID NO: 40325 - RNA, 19 nt, Artificial Sequence
  Description of Artificial Sequence: Synthetic oligonucleotide
uuguagcucacaauuucua

SEQ ID NO: 40326 - RNA, 19 nt, Artificial Sequence
  Description of Artificial Sequence: Synthetic oligonucleotide
ucuaacauugcuggccgcu

SEQ ID NO: 40327 - RNA, 19 nt, Artificial Sequence
  Description of Artificial Sequence: Synthetic oligonucleotide
ggaugagacauguuaccag

SEQ ID NO: 40328 - RNA, 19 nt, Artificial Sequence
  Description of Artificial Sequence: Synthetic oligonucleotide
ccauaaucgaauuugaucu

SEQ ID NO: 40329 - RNA, 19 nt, Artificial Sequence
  Description of Artificial Sequence: Synthetic oligonucleotide
gaaaugcucgcccuggugu

SEQ ID NO: 40330 - RNA, 19 nt, Artificial Sequence
  Description of Artificial Sequence: Synthetic oligonucleotide
aggcuuaucgcugugcugu

SEQ ID NO: 40331 - RNA, 19 nt, Artificial Sequence
  Description of Artificial Sequence: Synthetic oligonucleotide
aguucggcuuaacuuccuc

SEQ ID NO: 40332 - RNA, 19 nt, Artificial Sequence
  Description of Artificial Sequence: Synthetic oligonucleotide
agcaagcuauucauguaac

SEQ ID NO: 40333 - RNA, 19 nt, Artificial Sequence
  Description of Artificial Sequence: Synthetic oligonucleotide
gaugaaucaucgcccucug

SEQ ID NO: 40334 - RNA, 19 nt, Artificial Sequence
  Description of Artificial Sequence: Synthetic oligonucleotide
aaacuugggcaauguugcu

SEQ ID NO: 40335 - RNA, 19 nt, Artificial Sequence
  Description of Artificial Sequence: Synthetic oligonucleotide
gccuaagucucccugacgc

SEQ ID NO: 40336 - RNA, 19 nt, Artificial Sequence
  Description of Artificial Sequence: Synthetic oligonucleotide
aaccuugaacacgguguac

SEQ ID NO: 40337 - RNA, 19 nt, Artificial Sequence
  Description of Artificial Sequence: Synthetic oligonucleotide
uaguacaccuggauacgac

SEQ ID NO: 40338 - RNA, 19 nt, Artificial Sequence
  Description of Artificial Sequence: Synthetic oligonucleotide
ugauguacacuaacauaua

SEQ ID NO: 40339 - RNA, 19 nt, Artificial Sequence
  Description of Artificial Sequence: Synthetic oligonucleotide
ugucccucgccuuggacac

SEQ ID NO: 40340 - RNA, 19 nt, Artificial Sequence
  Description of Artificial Sequence: Synthetic oligonucleotide
cuggauaaauccugcucug

SEQ ID NO: 40341 - RNA, 19 nt, Artificial Sequence
  Description of Artificial Sequence: Synthetic oligonucleotide
uuccuacaggcuuaucgcu

SEQ ID NO: 40342 - RNA, 19 nt, Artificial Sequence
  Description of Artificial Sequence: Synthetic oligonucleotide
ugauucuauuugcacucaa

SEQ ID NO: 40343 - RNA, 19 nt, Artificial Sequence
  Description of Artificial Sequence: Synthetic oligonucleotide
cacagugaaggagagagca

SEQ ID NO: 40344 - RNA, 19 nt, Artificial Sequence
  Description of Artificial Sequence: Synthetic oligonucleotide
cuaagaggauuaccugggc

SEQ ID NO: 40345 - RNA, 19 nt, Artificial Sequence
  Description of Artificial Sequence: Synthetic oligonucleotide
uuuaucaaacuugggcaau

SEQ ID NO: 40346 - RNA, 19 nt, Artificial Sequence
  Description of Artificial Sequence: Synthetic oligonucleotide
gacuuaucaucgucuauaa

SEQ ID NO: 40347 - RNA, 19 nt, Artificial Sequence
  Description of Artificial Sequence: Synthetic oligonucleotide
caucgagggcuuuaucgag

SEQ ID NO: 40348 - RNA, 19 nt, Artificial Sequence
  Description of Artificial Sequence: Synthetic oligonucleotide
uugccuugcauugugguua

SEQ ID NO: 40349 - RNA, 19 nt, Artificial Sequence
  Description of Artificial Sequence: Synthetic oligonucleotide
gauacgacgucaucaucaa

SEQ ID NO: 40350 - RNA, 19 nt, Artificial Sequence
  Description of Artificial Sequence: Synthetic oligonucleotide
ucgacuuguugcaggagau

SEQ ID NO: 40351 - RNA, 19 nt, Artificial Sequence
  Description of Artificial Sequence: Synthetic oligonucleotide
cagucaauagauacagaga

SEQ ID NO: 40352 - RNA, 19 nt, Artificial Sequence
  Description of Artificial Sequence: Synthetic oligonucleotide
acuaacauauaggcauuug

SEQ ID NO: 40353 - RNA, 19 nt, Artificial Sequence
  Description of Artificial Sequence: Synthetic oligonucleotide
caacacucgacaaagcucu

SEQ ID NO: 40354 - RNA, 19 nt, Artificial Sequence
  Description of Artificial Sequence: Synthetic oligonucleotide
uaauucaagcuccguguuu

SEQ ID NO: 40355 - RNA, 19 nt, Artificial Sequence
  Description of Artificial Sequence: Synthetic oligonucleotide
ucguacaugucauuuccuu

SEQ ID NO: 40356 - RNA, 19 nt, Artificial Sequence
  Description of Artificial Sequence: Synthetic oligonucleotide
aagaucucuuaaaguaccu

SEQ ID NO: 40357 - RNA, 19 nt, Artificial Sequence
  Description of Artificial Sequence: Synthetic oligonucleotide
aggcuaguauccuggauaa

SEQ ID NO: 40358 - RNA, 19 nt, Artificial Sequence
  Description of Artificial Sequence: Synthetic oligonucleotide
aggaugagacauguuacca

SEQ ID NO: 40359 - RNA, 19 nt, Artificial Sequence
  Description of Artificial Sequence: Synthetic oligonucleotide
cuuggcuugaagaauugua

SEQ ID NO: 40360 - RNA, 19 nt, Artificial Sequence
  Description of Artificial Sequence: Synthetic oligonucleotide
aaaugcucgcccuggugua

SEQ ID NO: 40361 - RNA, 19 nt, Artificial Sequence
  Description of Artificial Sequence: Synthetic oligonucleotide
uuugucgcucgcccacucc

SEQ ID NO: 40362 - RNA, 19 nt, Artificial Sequence
  Description of Artificial Sequence: Synthetic oligonucleotide
cuaacauauaggcauuugu

SEQ ID NO: 40363 - RNA, 19 nt, Artificial Sequence
  Description of Artificial Sequence: Synthetic oligonucleotide
auuacuccuugcuugcaua

SEQ ID NO: 40364 - RNA, 19 nt, Artificial Sequence
  Description of Artificial Sequence: Synthetic oligonucleotide
uagcccguaugcuucuuug

SEQ ID NO: 40365 - RNA, 19 nt, Artificial Sequence
  Description of Artificial Sequence: Synthetic oligonucleotide
agggaaacgaggagaggac

SEQ ID NO: 40366 - RNA, 19 nt, Artificial Sequence
  Description of Artificial Sequence: Synthetic oligonucleotide
agcgagcaugcgcucuugc

SEQ ID NO: 40367 - RNA, 19 nt, Artificial Sequence
  Description of Artificial Sequence: Synthetic oligonucleotide
aucguaguccugaauucuc

SEQ ID NO: 40368 - RNA, 19 nt, Artificial Sequence
  Description of Artificial Sequence: Synthetic oligonucleotide
auauaggcauuugugcagu

SEQ ID NO: 40369 - RNA, 19 nt, Artificial Sequence
  Description of Artificial Sequence: Synthetic oligonucleotide
uaucaaacuugggcaaugu

SEQ ID NO: 40370 - RNA, 19 nt, Artificial Sequence
  Description of Artificial Sequence: Synthetic oligonucleotide
cauuaguugcagguguaac

SEQ ID NO: 40371 - RNA, 19 nt, Artificial Sequence
  Description of Artificial Sequence: Synthetic oligonucleotide
ggagauaaacauucuaaua

SEQ ID NO: 40372 - RNA, 19 nt, Artificial Sequence
  Description of Artificial Sequence: Synthetic oligonucleotide
ccguguuuuaggaucauac

SEQ ID NO: 40373 - RNA, 19 nt, Artificial Sequence
  Description of Artificial Sequence: Synthetic oligonucleotide
cucuauucgaaaaguucga

SEQ ID NO: 40374 - RNA, 19 nt, Artificial Sequence
  Description of Artificial Sequence: Synthetic oligonucleotide
caaaacuagacacgcagcu

SEQ ID NO: 40375 - RNA, 19 nt, Artificial Sequence
  Description of Artificial Sequence: Synthetic oligonucleotide
uauaggcauuugugcagug

SEQ ID NO: 40376 - RNA, 19 nt, Artificial Sequence
  Description of Artificial Sequence: Synthetic oligonucleotide
agucccacgcaacuccaug

SEQ ID NO: 40377 - RNA, 19 nt, Artificial Sequence
  Description of Artificial Sequence: Synthetic oligonucleotide
ucgcaucccaggaaccucu

SEQ ID NO: 40378 - RNA, 19 nt, Artificial Sequence
  Description of Artificial Sequence: Synthetic oligonucleotide
uacgcacagaguguccaag

SEQ ID NO: 40379 - RNA, 19 nt, Artificial Sequence
  Description of Artificial Sequence: Synthetic oligonucleotide
ugaacacgguguacuuuac

SEQ ID NO: 40380 - RNA, 19 nt, Artificial Sequence
  Description of Artificial Sequence: Synthetic oligonucleotide
uacaccuggauacgacguc

SEQ ID NO: 40381 - RNA, 19 nt, Artificial Sequence
  Description of Artificial Sequence: Synthetic oligonucleotide
cagauaggucaucaucaug

SEQ ID NO: 40382 - RNA, 19 nt, Artificial Sequence
  Description of Artificial Sequence: Synthetic oligonucleotide
ccuaaauuggcuguuuaac

SEQ ID NO: 40383 - RNA, 19 nt, Artificial Sequence
  Description of Artificial Sequence: Synthetic oligonucleotide
agccuaagucucccugacg

SEQ ID NO: 40384 - RNA, 19 nt, Artificial Sequence
  Description of Artificial Sequence: Synthetic oligonucleotide
agguguaacacugguggca

SEQ ID NO: 40385 - RNA, 19 nt, Artificial Sequence
  Description of Artificial Sequence: Synthetic oligonucleotide
agugucgaacagauagguc

SEQ ID NO: 40386 - RNA, 19 nt, Artificial Sequence
  Description of Artificial Sequence: Synthetic oligonucleotide
gacgcuuugucaccaagcu

SEQ ID NO: 40387 - RNA, 19 nt, Artificial Sequence
  Description of Artificial Sequence: Synthetic oligonucleotide
gccgacauagcccguaugc

SEQ ID NO: 40388 - RNA, 19 nt, Artificial Sequence
  Description of Artificial Sequence: Synthetic oligonucleotide
ggauacgacgucaucauca

SEQ ID NO: 40389 - RNA, 19 nt, Artificial Sequence
  Description of Artificial Sequence: Synthetic oligonucleotide
cuauucgaaaaguucgacu

SEQ ID NO: 40390 - RNA, 19 nt, Artificial Sequence
  Description of Artificial Sequence: Synthetic oligonucleotide
uugccuuuagaugcacaca

SEQ ID NO: 40391 - RNA, 19 nt, Artificial Sequence
  Description of Artificial Sequence: Synthetic oligonucleotide
uggauaaauccugcucugu

SEQ ID NO: 40392 - RNA, 19 nt, Artificial Sequence
  Description of Artificial Sequence: Synthetic oligonucleotide
ugggaguaagucacguauu

SEQ ID NO: 40393 - RNA, 19 nt, Artificial Sequence
  Description of Artificial Sequence: Synthetic oligonucleotide
uaucuaugucuaccugguc

SEQ ID NO: 40394 - RNA, 19 nt, Artificial Sequence
  Description of Artificial Sequence: Synthetic oligonucleotide
uggucgagcccuagccaag

SEQ ID NO: 40395 - RNA, 19 nt, Artificial Sequence
  Description of Artificial Sequence: Synthetic oligonucleotide
auaggccauaaucgaauuu

SEQ ID NO: 40396 - RNA, 19 nt, Artificial Sequence
  Description of Artificial Sequence: Synthetic oligonucleotide
ucgcucgcccacuccaucc

SEQ ID NO: 40397 - RNA, 19 nt, Artificial Sequence
  Description of Artificial Sequence: Synthetic oligonucleotide
uggccugacuagcucuagc

SEQ ID NO: 40398 - RNA, 19 nt, Artificial Sequence
  Description of Artificial Sequence: Synthetic oligonucleotide
cacucgacaaagcucuuga

SEQ ID NO: 40399 - RNA, 19 nt, Artificial Sequence
  Description of Artificial Sequence: Synthetic oligonucleotide
accgugauuaacaucucau

SEQ ID NO: 40400 - RNA, 19 nt, Artificial Sequence
  Description of Artificial Sequence: Synthetic oligonucleotide
ccguaugcuucuuugaguc

SEQ ID NO: 40401 - RNA, 19 nt, Artificial Sequence
  Description of Artificial Sequence: Synthetic oligonucleotide
uggauacgacgucaucauc

SEQ ID NO: 40402 - RNA, 19 nt, Artificial Sequence
  Description of Artificial Sequence: Synthetic oligonucleotide
gcgacgcacacagugaagg

SEQ ID NO: 40403 - RNA, 19 nt, Artificial Sequence
  Description of Artificial Sequence: Synthetic oligonucleotide
aaugggcugccgaacagua

SEQ ID NO: 40404 - RNA, 19 nt, Artificial Sequence
  Description of Artificial Sequence: Synthetic oligonucleotide
aucaaacuugggcaauguu

SEQ ID NO: 40405 - RNA, 19 nt, Artificial Sequence
  Description of Artificial Sequence: Synthetic oligonucleotide
ccaggccauaaaauuagag

SEQ ID NO: 40406 - RNA, 19 nt, Artificial Sequence
  Description of Artificial Sequence: Synthetic oligonucleotide
ucauggucgguaacagcuu

SEQ ID NO: 40407 - RNA, 19 nt, Artificial Sequence
  Description of Artificial Sequence: Synthetic oligonucleotide
aucgcccucuguuggcauc

SEQ ID NO: 40408 - RNA, 19 nt, Artificial Sequence
  Description of Artificial Sequence: Synthetic oligonucleotide
uuaucgcugugcuguaauu

SEQ ID NO: 40409 - RNA, 19 nt, Artificial Sequence
  Description of Artificial Sequence: Synthetic oligonucleotide
acgcuuuuagaugaaucau

SEQ ID NO: 40410 - RNA, 19 nt, Artificial Sequence
  Description of Artificial Sequence: Synthetic oligonucleotide
agucuaacugaaggaagaa

SEQ ID NO: 40411 - RNA, 19 nt, Artificial Sequence
  Description of Artificial Sequence: Synthetic oligonucleotide
acgcacagaguguccaagu

SEQ ID NO: 40412 - RNA, 19 nt, Artificial Sequence
  Description of Artificial Sequence: Synthetic oligonucleotide
ucccugacgcuuugucacc

SEQ ID NO: 40413 - RNA, 19 nt, Artificial Sequence
  Description of Artificial Sequence: Synthetic oligonucleotide
augaagcuaucuaaaguuu

SEQ ID NO: 40414 - RNA, 19 nt, Artificial Sequence
  Description of Artificial Sequence: Synthetic oligonucleotide
guaaguguagcgacuccuc

SEQ ID NO: 40415 - RNA, 19 nt, Artificial Sequence
  Description of Artificial Sequence: Synthetic oligonucleotide
ugaaguggucgagcccuag

SEQ ID NO: 40416 - RNA, 19 nt, Artificial Sequence
  Description of Artificial Sequence: Synthetic oligonucleotide
cauuggggauuguuuuauc

SEQ ID NO: 40417 - RNA, 19 nt, Artificial Sequence
  Description of Artificial Sequence: Synthetic oligonucleotide
gcaaucguuccaccaacug

SEQ ID NO: 40418 - RNA, 19 nt, Artificial Sequence
  Description of Artificial Sequence: Synthetic oligonucleotide
uuagguugucuuggcuuga

SEQ ID NO: 40419 - RNA, 19 nt, Artificial Sequence
  Description of Artificial Sequence: Synthetic oligonucleotide
ucgaaaaguucgacuuguu

SEQ ID NO: 40420 - RNA, 19 nt, Artificial Sequence
  Description of Artificial Sequence: Synthetic oligonucleotide
ugacgaagugagacauuua

SEQ ID NO: 40421 - RNA, 19 nt, Artificial Sequence
  Description of Artificial Sequence: Synthetic oligonucleotide
aagccgacauagcccguau

SEQ ID NO: 40422 - RNA, 19 nt, Artificial Sequence
  Description of Artificial Sequence: Synthetic oligonucleotide
uuacaggauaugggugugu

SEQ ID NO: 40423 - RNA, 19 nt, Artificial Sequence
  Description of Artificial Sequence: Synthetic oligonucleotide
auagaggauaaggcuagua

SEQ ID NO: 40424 - RNA, 19 nt, Artificial Sequence
  Description of Artificial Sequence: Synthetic oligonucleotide
ggacucgcaucccaggaac

SEQ ID NO: 40425 - RNA, 19 nt, Artificial Sequence
  Description of Artificial Sequence: Synthetic oligonucleotide
auauucuuuugcagugggu

SEQ ID NO: 40426 - RNA, 19 nt, Artificial Sequence
  Description of Artificial Sequence: Synthetic oligonucleotide
gacugcccgcaccaaccag

SEQ ID NO: 40427 - RNA, 19 nt, Artificial Sequence
  Description of Artificial Sequence: Synthetic oligonucleotide
cugggaguaagucacguau

SEQ ID NO: 40428 - RNA, 19 nt, Artificial Sequence
  Description of Artificial Sequence: Synthetic oligonucleotide
uagagugcacguguaccaa

SEQ ID NO: 40429 - RNA, 19 nt, Artificial Sequence
  Description of Artificial Sequence: Synthetic oligonucleotide
augaaucaucgcccucugu

SEQ ID NO: 40430 - RNA, 19 nt, Artificial Sequence
  Description of Artificial Sequence: Synthetic oligonucleotide
gcagugucgaacagauagg

SEQ ID NO: 40431 - RNA, 19 nt, Artificial Sequence
  Description of Artificial Sequence: Synthetic oligonucleotide
ugcuaaagggacgcuuuua

SEQ ID NO: 40432 - RNA, 19 nt, Artificial Sequence
  Description of Artificial Sequence: Synthetic oligonucleotide
cguguaccaaaguucuacg

SEQ ID NO: 40433 - RNA, 19 nt, Artificial Sequence
  Description of Artificial Sequence: Synthetic oligonucleotide
acuagcgagcaugcgcucu

SEQ ID NO: 40434 - RNA, 19 nt, Artificial Sequence
  Description of Artificial Sequence: Synthetic oligonucleotide
aggacucgcaucccaggaa

SEQ ID NO: 40435 - RNA, 19 nt, Artificial Sequence
  Description of Artificial Sequence: Synthetic oligonucleotide
ccuauaaccuugagacuug

SEQ ID NO: 40436 - RNA, 19 nt, Artificial Sequence
  Description of Artificial Sequence: Synthetic oligonucleotide
uuaagccgacauagcccgu

SEQ ID NO: 40437 - RNA, 19 nt, Artificial Sequence
  Description of Artificial Sequence: Synthetic oligonucleotide
acugggaguaagucacgua

SEQ ID NO: 40438 - RNA, 19 nt, Artificial Sequence
  Description of Artificial Sequence: Synthetic oligonucleotide
gcuuacuaaccacuagcga

SEQ ID NO: 40439 - RNA, 19 nt, Artificial Sequence
  Description of Artificial Sequence: Synthetic oligonucleotide
gacucgcaucccaggaacc

SEQ ID NO: 40440 - RNA, 19 nt, Artificial Sequence
  Description of Artificial Sequence: Synthetic oligonucleotide
guggauuuuaauugccuuu

SEQ ID NO: 40441 - RNA, 19 nt, Artificial Sequence
  Description of Artificial Sequence: Synthetic oligonucleotide
caggcuuaucgcugugcug

SEQ ID NO: 40442 - RNA, 19 nt, Artificial Sequence
  Description of Artificial Sequence: Synthetic oligonucleotide
ccgccucugaauaauuuug

SEQ ID NO: 40443 - RNA, 19 nt, Artificial Sequence
  Description of Artificial Sequence: Synthetic oligonucleotide
uaagccgacauagcccgua

SEQ ID NO: 40444 - RNA, 19 nt, Artificial Sequence
  Description of Artificial Sequence: Synthetic oligonucleotide
cucuccuuugucgcucgcc

SEQ ID NO: 40445 - RNA, 19 nt, Artificial Sequence
  Description of Artificial Sequence: Synthetic oligonucleotide
gcaacacucgacaaagcuc

SEQ ID NO: 40446 - RNA, 19 nt, Artificial Sequence
  Description of Artificial Sequence: Synthetic oligonucleotide
gcugccgaacaguacuggc

SEQ ID NO: 40447 - RNA, 19 nt, Artificial Sequence
  Description of Artificial Sequence: Synthetic oligonucleotide
aaugcucgcccugguguau

SEQ ID NO: 40448 - RNA, 19 nt, Artificial Sequence
  Description of Artificial Sequence: Synthetic oligonucleotide
acgucaacucggugguaga

SEQ ID NO: 40449 - RNA, 19 nt, Artificial Sequence
  Description of Artificial Sequence: Synthetic oligonucleotide
ggacaagccuacacacugg

SEQ ID NO: 40450 - RNA, 19 nt, Artificial Sequence
  Description of Artificial Sequence: Synthetic oligonucleotide
agaggauuaccugggccau

SEQ ID NO: 40451 - RNA, 19 nt, Artificial Sequence
  Description of Artificial Sequence: Synthetic oligonucleotide
aucgagggcuuuaucgaga

SEQ ID NO: 40452 - RNA, 19 nt, Artificial Sequence
  Description of Artificial Sequence: Synthetic oligonucleotide
ggaaacgaggagaggacuc

SEQ ID NO: 40453 - RNA, 19 nt, Artificial Sequence
  Description of Artificial Sequence: Synthetic oligonucleotide
gucaacucggugguagaga

SEQ ID NO: 40454 - RNA, 19 nt, Artificial Sequence
  Description of Artificial Sequence: Synthetic oligonucleotide
cuuugagucccacgcaacu

SEQ ID NO: 40455 - RNA, 19 nt, Artificial Sequence
  Description of Artificial Sequence: Synthetic oligonucleotide
caccaauaauuuuguagcu

SEQ ID NO: 40456 - RNA, 19 nt, Artificial Sequence
  Description of Artificial Sequence: Synthetic oligonucleotide
cacauaacugggaguaagu

SEQ ID NO: 40457 - RNA, 19 nt, Artificial Sequence
  Description of Artificial Sequence: Synthetic oligonucleotide
auagcccguaugcuucuuu

SEQ ID NO: 40458 - RNA, 19 nt, Artificial Sequence
  Description of Artificial Sequence: Synthetic oligonucleotide
cacgcagcuggcauuagcu

SEQ ID NO: 40459 - RNA, 19 nt, Artificial Sequence
  Description of Artificial Sequence: Synthetic oligonucleotide
cacucuuuguaaugcuaaa

SEQ ID NO: 40460 - RNA, 19 nt, Artificial Sequence
  Description of Artificial Sequence: Synthetic oligonucleotide
cugcccgcaccaaccagac

SEQ ID NO: 40461 - RNA, 19 nt, Artificial Sequence
  Description of Artificial Sequence: Synthetic oligonucleotide
aaguucggcuuaacuuccu

SEQ ID NO: 40462 - RNA, 19 nt, Artificial Sequence
  Description of Artificial Sequence: Synthetic oligonucleotide
gggcuuuaucgagagacac

SEQ ID NO: 40463 - RNA, 19 nt, Artificial Sequence
  Description of Artificial Sequence: Synthetic oligonucleotide
agccgacauagcccguaug

SEQ ID NO: 40464 - RNA, 19 nt, Artificial Sequence
  Description of Artificial Sequence: Synthetic oligonucleotide
uggucgguaacagcuugua

SEQ ID NO: 40465 - RNA, 19 nt, Artificial Sequence
  Description of Artificial Sequence: Synthetic oligonucleotide
ggacgcuuuuagaugaauc

SEQ ID NO: 40466 - RNA, 19 nt, Artificial Sequence
  Description of Artificial Sequence: Synthetic oligonucleotide
gccugacuagcucuagcug

SEQ ID NO: 40467 - RNA, 19 nt, Artificial Sequence
  Description of Artificial Sequence: Synthetic oligonucleotide
agggcuuuaucgagagaca

SEQ ID NO: 40468 - RNA, 19 nt, Artificial Sequence
  Description of Artificial Sequence: Synthetic oligonucleotide
ugucgcucgcccacuccau

SEQ ID NO: 40469 - RNA, 19 nt, Artificial Sequence
  Description of Artificial Sequence: Synthetic oligonucleotide
gguuuagauaaaccacgua

SEQ ID NO: 40470 - RNA, 19 nt, Artificial Sequence
  Description of Artificial Sequence: Synthetic oligonucleotide
ggcauuugugcagugucga

SEQ ID NO: 40471 - RNA, 19 nt, Artificial Sequence
  Description of Artificial Sequence: Synthetic oligonucleotide
cuggauacgacgucaucau

SEQ ID NO: 40472 - RNA, 19 nt, Artificial Sequence
  Description of Artificial Sequence: Synthetic oligonucleotide
guccuuaggggucuguuuu

SEQ ID NO: 40473 - RNA, 19 nt, Artificial Sequence
  Description of Artificial Sequence: Synthetic oligonucleotide
guguagauauguccacagu

SEQ ID NO: 40474 - RNA, 19 nt, Artificial Sequence
  Description of Artificial Sequence: Synthetic oligonucleotide
acgguguacuuuacuuucu

SEQ ID NO: 40475 - RNA, 19 nt, Artificial Sequence
  Description of Artificial Sequence: Synthetic oligonucleotide
cauuugccaagaggcaaca

SEQ ID NO: 40476 - RNA, 19 nt, Artificial Sequence
  Description of Artificial Sequence: Synthetic oligonucleotide
augcucgcccugguguauc

SEQ ID NO: 40477 - RNA, 19 nt, Artificial Sequence
  Description of Artificial Sequence: Synthetic oligonucleotide
cccauaauugugcucaaua

SEQ ID NO: 40478 - RNA, 19 nt, Artificial Sequence
  Description of Artificial Sequence: Synthetic oligonucleotide
acuaaccacuagcgagcau

SEQ ID NO: 40479 - RNA, 19 nt, Artificial Sequence
  Description of Artificial Sequence: Synthetic oligonucleotide
ggcuagagugcacguguac

SEQ ID NO: 40480 - RNA, 19 nt, Artificial Sequence
  Description of Artificial Sequence: Synthetic oligonucleotide
uugguccgucugaggguca

SEQ ID NO: 40481 - RNA, 19 nt, Artificial Sequence
  Description of Artificial Sequence: Synthetic oligonucleotide
cauaaucgaauuugaucuu

SEQ ID NO: 40482 - RNA, 19 nt, Artificial Sequence
  Description of Artificial Sequence: Synthetic oligonucleotide
cugauucuauuugcacuca

SEQ ID NO: 40483 - RNA, 19 nt, Artificial Sequence
  Description of Artificial Sequence: Synthetic oligonucleotide
agggucauuggggauuguu

SEQ ID NO: 40484 - RNA, 19 nt, Artificial Sequence
  Description of Artificial Sequence: Synthetic oligonucleotide
cggcccaucaugacaauug

SEQ ID NO: 40485 - RNA, 19 nt, Artificial Sequence
  Description of Artificial Sequence: Synthetic oligonucleotide
guacaccuggauacgacgu

SEQ ID NO: 40486 - RNA, 19 nt, Artificial Sequence
  Description of Artificial Sequence: Synthetic oligonucleotide
ggcuuuaucgagagacaca

SEQ ID NO: 40487 - RNA, 19 nt, Artificial Sequence
  Description of Artificial Sequence: Synthetic oligonucleotide
cuguuaaguucggcuuaac

SEQ ID NO: 40488 - RNA, 19 nt, Artificial Sequence
  Description of Artificial Sequence: Synthetic oligonucleotide
uggccgcuuuguuccauua

SEQ ID NO: 40489 - RNA, 19 nt, Artificial Sequence
  Description of Artificial Sequence: Synthetic oligonucleotide
caucguaguccugaauucu

SEQ ID NO: 40490 - RNA, 19 nt, Artificial Sequence
  Description of Artificial Sequence: Synthetic oligonucleotide
cagugucgaacagauaggu

SEQ ID NO: 40491 - RNA, 19 nt, Artificial Sequence
  Description of Artificial Sequence: Synthetic oligonucleotide
caguggguaauucacuguu

SEQ ID NO: 40492 - RNA, 19 nt, Artificial Sequence
  Description of Artificial Sequence: Synthetic oligonucleotide
cauguagcucccugauucu

SEQ ID NO: 40493 - RNA, 19 nt, Artificial Sequence
  Description of Artificial Sequence: Synthetic oligonucleotide
gcuacgcacagagugucca

SEQ ID NO: 40494 - RNA, 19 nt, Artificial Sequence
  Description of Artificial Sequence: Synthetic oligonucleotide
cauccgccugaacaaaacu

SEQ ID NO: 40495 - RNA, 19 nt, Artificial Sequence
  Description of Artificial Sequence: Synthetic oligonucleotide
ccuugcauugugguuacca

SEQ ID NO: 40496 - RNA, 19 nt, Artificial Sequence
  Description of Artificial Sequence: Synthetic oligonucleotide
cauuacuccuugcuugcau

SEQ ID NO: 40497 - RNA, 19 nt, Artificial Sequence
  Description of Artificial Sequence: Synthetic oligonucleotide
cucugcgacuaucugcacu

SEQ ID NO: 40498 - RNA, 19 nt, Artificial Sequence
  Description of Artificial Sequence: Synthetic oligonucleotide
cucuugcuaaaaggcucuc

SEQ ID NO: 40499 - RNA, 19 nt, Artificial Sequence
  Description of Artificial Sequence: Synthetic oligonucleotide
cacuagcgagcaugcgcuc

SEQ ID NO: 40500 - RNA, 19 nt, Artificial Sequence
  Description of Artificial Sequence: Synthetic oligonucleotide
ugcccgcaccaaccagaca

SEQ ID NO: 40501 - RNA, 19 nt, Artificial Sequence
  Description of Artificial Sequence: Synthetic oligonucleotide
gcacguguaccaaaguucu

SEQ ID NO: 40502 - RNA, 19 nt, Artificial Sequence
  Description of Artificial Sequence: Synthetic oligonucleotide
gugacuuaucaucgucuau

SEQ ID NO: 40503 - RNA, 19 nt, Artificial Sequence
  Description of Artificial Sequence: Synthetic oligonucleotide
ccucgauccuuuucucuuc

SEQ ID NO: 40504 - RNA, 19 nt, Artificial Sequence
  Description of Artificial Sequence: Synthetic oligonucleotide
agcccuagccaaggccgag

SEQ ID NO: 40505 - RNA, 19 nt, Artificial Sequence
  Description of Artificial Sequence: Synthetic oligonucleotide
cuacgcacagaguguccaa

SEQ ID NO: 40506 - RNA, 19 nt, Artificial Sequence
  Description of Artificial Sequence: Synthetic oligonucleotide
gucgaacagauaggucauc

SEQ ID NO: 40507 - RNA, 19 nt, Artificial Sequence
  Description of Artificial Sequence: Synthetic oligonucleotide
uuaccaggcuguggcucaa

SEQ ID NO: 40508 - RNA, 19 nt, Artificial Sequence
  Description of Artificial Sequence: Synthetic oligonucleotide
cugauucuuuaagccgaca

SEQ ID NO: 40509 - RNA, 19 nt, Artificial Sequence
  Description of Artificial Sequence: Synthetic oligonucleotide
ggaaaugcgccaccgugau

SEQ ID NO: 40510 - RNA, 19 nt, Artificial Sequence
  Description of Artificial Sequence: Synthetic oligonucleotide
ugggagcauccgccugaac

SEQ ID NO: 40511 - RNA, 19 nt, Artificial Sequence
  Description of Artificial Sequence: Synthetic oligonucleotide
ggccgcuuuguuccauuac

SEQ ID NO: 40512 - RNA, 19 nt, Artificial Sequence
  Description of Artificial Sequence: Synthetic oligonucleotide
gcauccgccugaacaaaac

SEQ ID NO: 40513 - RNA, 19 nt, Artificial Sequence
  Description of Artificial Sequence: Synthetic oligonucleotide
ugguccgucugagggucau

SEQ ID NO: 40514 - RNA, 19 nt, Artificial Sequence
  Description of Artificial Sequence: Synthetic oligonucleotide
gcuccguguuuuaggauca

SEQ ID NO: 40515 - RNA, 19 nt, Artificial Sequence
  Description of Artificial Sequence: Synthetic oligonucleotide
ggguuuagauaaaccacgu

SEQ ID NO: 40516 - RNA, 19 nt, Artificial Sequence
  Description of Artificial Sequence: Synthetic oligonucleotide
guaaugcuaaagggacgcu

SEQ ID NO: 40517 - RNA, 19 nt, Artificial Sequence
  Description of Artificial Sequence: Synthetic oligonucleotide
gcugauaguaaaguuucuu

SEQ ID NO: 40518 - RNA, 19 nt, Artificial Sequence
  Description of Artificial Sequence: Synthetic oligonucleotide
cuagcucuagcugcagggu

SEQ ID NO: 40519 - RNA, 19 nt, Artificial Sequence
  Description of Artificial Sequence: Synthetic oligonucleotide
ccgccugaacaaaacuuca

SEQ ID NO: 40520 - RNA, 19 nt, Artificial Sequence
  Description of Artificial Sequence: Synthetic oligonucleotide
ccuaacugucagcacugga

SEQ ID NO: 40521 - RNA, 19 nt, Artificial Sequence
  Description of Artificial Sequence: Synthetic oligonucleotide
cugcgacuaucugcacuug

SEQ ID NO: 40522 - RNA, 19 nt, Artificial Sequence
  Description of Artificial Sequence: Synthetic oligonucleotide
ccagcgacgcacacaguga

SEQ ID NO: 40523 - RNA, 19 nt, Artificial Sequence
  Description of Artificial Sequence: Synthetic oligonucleotide
cccuauaaccuugagacuu

SEQ ID NO: 40524 - RNA, 19 nt, Artificial Sequence
  Description of Artificial Sequence: Synthetic oligonucleotide
cacguguaccaaaguucua

SEQ ID NO: 40525 - RNA, 19 nt, Artificial Sequence
  Description of Artificial Sequence: Synthetic oligonucleotide
cccacgagcugucccucgc

SEQ ID NO: 40526 - RNA, 19 nt, Artificial Sequence
  Description of Artificial Sequence: Synthetic oligonucleotide
gcccuagccaaggccgagg

SEQ ID NO: 40527 - RNA, 19 nt, Artificial Sequence
  Description of Artificial Sequence: Synthetic oligonucleotide
gcucaucgagggcuuuauc

SEQ ID NO: 40528 - RNA, 19 nt, Artificial Sequence
  Description of Artificial Sequence: Synthetic oligonucleotide
ccacgagcugucccucgcc

SEQ ID NO: 40529 - RNA, 19 nt, Artificial Sequence
  Description of Artificial Sequence: Synthetic oligonucleotide
ugacgucaacucgguggua

SEQ ID NO: 40530 - RNA, 19 nt, Artificial Sequence
  Description of Artificial Sequence: Synthetic oligonucleotide
gggaaacgaggagaggacu

SEQ ID NO: 40531 - RNA, 19 nt, Artificial Sequence
  Description of Artificial Sequence: Synthetic oligonucleotide
gcccaucaugacaauugca

SEQ ID NO: 40532 - RNA, 19 nt, Artificial Sequence
  Description of Artificial Sequence: Synthetic oligonucleotide
ccuacaggcuuaucgcugu

SEQ ID NO: 40533 - RNA, 19 nt, Artificial Sequence
  Description of Artificial Sequence: Synthetic oligonucleotide
gggcugccgaacaguacug

SEQ ID NO: 40534 - RNA, 19 nt, Artificial Sequence
  Description of Artificial Sequence: Synthetic oligonucleotide
cgucaacucggugguagag

SEQ ID NO: 40535 - RNA, 19 nt, Artificial Sequence
  Description of Artificial Sequence: Synthetic oligonucleotide
gaaaugcgccaccgugauu

SEQ ID NO: 40536 - RNA, 19 nt, Artificial Sequence
  Description of Artificial Sequence: Synthetic oligonucleotide
cccugauguacacuaacau

SEQ ID NO: 40537 - RNA, 19 nt, Artificial Sequence
  Description of Artificial Sequence: Synthetic oligonucleotide
cuagcgagcaugcgcucuu

SEQ ID NO: 40538 - RNA, 19 nt, Artificial Sequence
  Description of Artificial Sequence: Synthetic oligonucleotide
cauagaggauaaggcuagu

SEQ ID NO: 40539 - RNA, 19 nt, Artificial Sequence
  Description of Artificial Sequence: Synthetic oligonucleotide
cccguaugcuucuuugagu

SEQ ID NO: 40540 - RNA, 19 nt, Artificial Sequence
  Description of Artificial Sequence: Synthetic oligonucleotide
caccuggauacgacgucau

SEQ ID NO: 40541 - RNA, 19 nt, Artificial Sequence
  Description of Artificial Sequence: Synthetic oligonucleotide
ggggccagacugcccgcac

SEQ ID NO: 40542 - RNA, 19 nt, Artificial Sequence
  Description of Artificial Sequence: Synthetic oligonucleotide
cccuagccaaggccgagga

SEQ ID NO: 40543 - RNA, 19 nt, Artificial Sequence
  Description of Artificial Sequence: Synthetic oligonucleotide
cccacgcaacuccauggga

SEQ ID NO: 40544 - RNA, 19 nt, Artificial Sequence
  Description of Artificial Sequence: Synthetic oligonucleotide
ccgugauuaacaucucauu

SEQ ID NO: 40545 - RNA, 19 nt, Artificial Sequence
  Description of Artificial Sequence: Synthetic oligonucleotide
cgucugagggucauacaua

SEQ ID NO: 40546 - RNA, 19 nt, Artificial Sequence
  Description of Artificial Sequence: Synthetic oligonucleotide
ccucugcgacuaucugcac

SEQ ID NO: 40547 - RNA, 19 nt, Artificial Sequence
  Description of Artificial Sequence: Synthetic oligonucleotide
cgccugaacaaaacuucaa

SEQ ID NO: 40548 - RNA, 19 nt, Artificial Sequence
  Description of Artificial Sequence: Synthetic oligonucleotide
caucgcccucuguuggcau

SEQ ID NO: 40549 - RNA, 19 nt, Artificial Sequence
  Description of Artificial Sequence: Synthetic oligonucleotide
cgccaccgugauuaacauc

SEQ ID NO: 40550 - RNA, 19 nt, Artificial Sequence
  Description of Artificial Sequence: Synthetic oligonucleotide
gugcagugucgaacagaua

SEQ ID NO: 40551 - RNA, 19 nt, Artificial Sequence
  Description of Artificial Sequence: Synthetic oligonucleotide
cgacauagcccguaugcuu

SEQ ID NO: 40552 - RNA, 19 nt, Artificial Sequence
  Description of Artificial Sequence: Synthetic oligonucleotide
cccgaacacagccaugcuu

SEQ ID NO: 40553 - RNA, 19 nt, Artificial Sequence
  Description of Artificial Sequence: Synthetic oligonucleotide
ccgacauagcccguaugcu

SEQ ID NO: 40554 - RNA, 19 nt, Artificial Sequence
  Description of Artificial Sequence: Synthetic oligonucleotide
gggacgcuuuuagaugaau

SEQ ID NO: 40555 - RNA, 19 nt, Artificial Sequence
  Description of Artificial Sequence: Synthetic oligonucleotide
gcgccaccgugauuaacau

SEQ ID NO: 40556 - RNA, 19 nt, Artificial Sequence
  Description of Artificial Sequence: Synthetic oligonucleotide
ggguccuuaggggucuguu

SEQ ID NO: 40557 - RNA, 19 nt, Artificial Sequence
  Description of Artificial Sequence: Synthetic oligonucleotide
cauagcccguaugcuucuu

SEQ ID NO: 40558 - RNA, 19 nt, Artificial Sequence
  Description of Artificial Sequence: Synthetic oligonucleotide
cuccguguuuuaggaucau

SEQ ID NO: 40559 - RNA, 19 nt, Artificial Sequence
  Description of Artificial Sequence: Synthetic oligonucleotide
cgacuuguugcaggagaua

SEQ ID NO: 40560 - RNA, 19 nt, Artificial Sequence
  Description of Artificial Sequence: Synthetic oligonucleotide
aauaccaucaccuggaggg

SEQ ID NO: 40561 - RNA, 19 nt, Artificial Sequence
  Description of Artificial Sequence: Synthetic oligonucleotide
acaucagugguuuagaacc

SEQ ID NO: 40562 - RNA, 19 nt, Artificial Sequence
  Description of Artificial Sequence: Synthetic oligonucleotide
aaacuaggcaucuaagucc

SEQ ID NO: 40563 - RNA, 19 nt, Artificial Sequence
  Description of Artificial Sequence: Synthetic oligonucleotide
aaaacgauucccaacaucc

SEQ ID NO: 40564 - RNA, 19 nt, Artificial Sequence
  Description of Artificial Sequence: Synthetic oligonucleotide
uguaauaaugcauaaaucu

SEQ ID NO: 40565 - RNA, 19 nt, Artificial Sequence
  Description of Artificial Sequence: Synthetic oligonucleotide
uuaauauauaguaauacac

SEQ ID NO: 40566 - RNA, 19 nt, Artificial Sequence
  Description of Artificial Sequence: Synthetic oligonucleotide
ucaauuaaauggcagaacc

SEQ ID NO: 40567 - RNA, 19 nt, Artificial Sequence
  Description of Artificial Sequence: Synthetic oligonucleotide
uggucuagaaacuuuaugg

SEQ ID NO: 40568 - RNA, 19 nt, Artificial Sequence
  Description of Artificial Sequence: Synthetic oligonucleotide
guuuacuuaagcuacaggc

SEQ ID NO: 40569 - RNA, 19 nt, Artificial Sequence
  Description of Artificial Sequence: Synthetic oligonucleotide
uguuauauuagcuuuaaua

SEQ ID NO: 40570 - RNA, 19 nt, Artificial Sequence
  Description of Artificial Sequence: Synthetic oligonucleotide
acuuaguugucauaguuac

SEQ ID NO: 40571 - RNA, 19 nt, Artificial Sequence
  Description of Artificial Sequence: Synthetic oligonucleotide
uggauaagaacacuugagg

SEQ ID NO: 40572 - RNA, 19 nt, Artificial Sequence
  Description of Artificial Sequence: Synthetic oligonucleotide
aaaucaauuaaauggcaga

SEQ ID NO: 40573 - RNA, 19 nt, Artificial Sequence
  Description of Artificial Sequence: Synthetic oligonucleotide
caauucauagcauaguuac

SEQ ID NO: 40574 - RNA, 19 nt, Artificial Sequence
  Description of Artificial Sequence: Synthetic oligonucleotide
  modified_base (11)..(11): a, c, u, g, unknown or other
aaaccguuuanguuucuuc

SEQ ID NO: 40575 - RNA, 19 nt, Artificial Sequence
  Description of Artificial Sequence: Synthetic oligonucleotide
uuuaagaaggcguuguucu

SEQ ID NO: 40576 - RNA, 19 nt, Artificial Sequence
  Description of Artificial Sequence: Synthetic oligonucleotide
uuuagguuaggcaaaggca

SEQ ID NO: 40577 - RNA, 19 nt, Artificial Sequence
  Description of Artificial Sequence: Synthetic oligonucleotide
uccuaguuaguuuaaaaug

SEQ ID NO: 40578 - RNA, 19 nt, Artificial Sequence
  Description of Artificial Sequence: Synthetic oligonucleotide
ucuauaauaucuacaggca

SEQ ID NO: 40579 - RNA, 19 nt, Artificial Sequence
  Description of Artificial Sequence: Synthetic oligonucleotide
uuagguuaggcaaaggcac

SEQ ID NO: 40580 - RNA, 19 nt, Artificial Sequence
  Description of Artificial Sequence: Synthetic oligonucleotide
agcucuacucaauuguucc

SEQ ID NO: 40581 - RNA, 19 nt, Artificial Sequence
  Description of Artificial Sequence: Synthetic oligonucleotide
ugaaugacuucauagcgag

SEQ ID NO: 40582 - RNA, 19 nt, Artificial Sequence
  Description of Artificial Sequence: Synthetic oligonucleotide
uuaaaaguaauugcacccg

SEQ ID NO: 40583 - RNA, 19 nt, Artificial Sequence
  Description of Artificial Sequence: Synthetic oligonucleotide
  modified_base (10)..(10): a, c, u, g, unknown or other
aaccguuuanguuucuucu

SEQ ID NO: 40584 - RNA, 19 nt, Artificial Sequence
  Description of Artificial Sequence: Synthetic oligonucleotide
uguaauagccgccagugga

SEQ ID NO: 40585 - RNA, 19 nt, Artificial Sequence
  Description of Artificial Sequence: Synthetic oligonucleotide
acauaugugcaguucacac

SEQ ID NO: 40586 - RNA, 19 nt, Artificial Sequence
  Description of Artificial Sequence: Synthetic oligonucleotide
auaacuaggagguugaguu

SEQ ID NO: 40587 - RNA, 19 nt, Artificial Sequence
  Description of Artificial Sequence: Synthetic oligonucleotide
uuuacuuaagcuacaggcu

SEQ ID NO: 40588 - RNA, 19 nt, Artificial Sequence
  Description of Artificial Sequence: Synthetic oligonucleotide
auuugaguuacugacuuac

SEQ ID NO: 40589 - RNA, 19 nt, Artificial Sequence
  Description of Artificial Sequence: Synthetic oligonucleotide
uucaguacuaaacagugau

SEQ ID NO: 40590 - RNA, 19 nt, Artificial Sequence
  Description of Artificial Sequence: Synthetic oligonucleotide
auugcuaccgaguggcacc

SEQ ID NO: 40591 - RNA, 19 nt, Artificial Sequence
  Description of Artificial Sequence: Synthetic oligonucleotide
cuacuguauauaaaguggg

SEQ ID NO: 40592 - RNA, 19 nt, Artificial Sequence
  Description of Artificial Sequence: Synthetic oligonucleotide
ucuguaaggguaaaauuga

SEQ ID NO: 40593 - RNA, 19 nt, Artificial Sequence
  Description of Artificial Sequence: Synthetic oligonucleotide
uuuagaaccgaguucaaau

SEQ ID NO: 40594 - RNA, 19 nt, Artificial Sequence
  Description of Artificial Sequence: Synthetic oligonucleotide
ucaauccuaacaucagugg

SEQ ID NO: 40595 - RNA, 19 nt, Artificial Sequence
  Description of Artificial Sequence: Synthetic oligonucleotide
ugugauacccggaagaaau

SEQ ID NO: 40596 - RNA, 19 nt, Artificial Sequence
  Description of Artificial Sequence: Synthetic oligonucleotide
ucucaugaggcuaucacca

SEQ ID NO: 40597 - RNA, 19 nt, Artificial Sequence
  Description of Artificial Sequence: Synthetic oligonucleotide
aacuaggcaucuaaguccc

SEQ ID NO: 40598 - RNA, 19 nt, Artificial Sequence
  Description of Artificial Sequence: Synthetic oligonucleotide
uacuccaccuaacauaacc

SEQ ID NO: 40599 - RNA, 19 nt, Artificial Sequence
  Description of Artificial Sequence: Synthetic oligonucleotide
auaguggcaaagcacuuac

SEQ ID NO: 40600 - RNA, 19 nt, Artificial Sequence
  Description of Artificial Sequence: Synthetic oligonucleotide
ugauaacuaugcucuaugg

SEQ ID NO: 40601 - RNA, 19 nt, Artificial Sequence
  Description of Artificial Sequence: Synthetic oligonucleotide
uaauaucaaacuguaguag

SEQ ID NO: 40602 - RNA, 19 nt, Artificial Sequence
  Description of Artificial Sequence: Synthetic oligonucleotide
gaguacaucuguaauagcc

SEQ ID NO: 40603 - RNA, 19 nt, Artificial Sequence
  Description of Artificial Sequence: Synthetic oligonucleotide
agaaccaauuaauaccauc

SEQ ID NO: 40604 - RNA, 19 nt, Artificial Sequence
  Description of Artificial Sequence: Synthetic oligonucleotide
auaacuaugcucuaugguu

SEQ ID NO: 40605 - RNA, 19 nt, Artificial Sequence
  Description of Artificial Sequence: Synthetic oligonucleotide
uguaaggguaaaauugaca

SEQ ID NO: 40606 - RNA, 19 nt, Artificial Sequence
  Description of Artificial Sequence: Synthetic oligonucleotide
aaagaacuaugauugcacu

SEQ ID NO: 40607 - RNA, 19 nt, Artificial Sequence
  Description of Artificial Sequence: Synthetic oligonucleotide
aauugcacccguuaguaau

SEQ ID NO: 40608 - RNA, 19 nt, Artificial Sequence
  Description of Artificial Sequence: Synthetic oligonucleotide
uuuacucccgacaacgcug

SEQ ID NO: 40609 - RNA, 19 nt, Artificial Sequence
  Description of Artificial Sequence: Synthetic oligonucleotide
ucuuaaauacagcaccgcu

SEQ ID NO: 40610 - RNA, 19 nt, Artificial Sequence
  Description of Artificial Sequence: Synthetic oligonucleotide
aacaagucaagguuaguau

SEQ ID NO: 40611 - RNA, 19 nt, Artificial Sequence
  Description of Artificial Sequence: Synthetic oligonucleotide
aacuauuagggacucuuga

SEQ ID NO: 40612 - RNA, 19 nt, Artificial Sequence
  Description of Artificial Sequence: Synthetic oligonucleotide
gacaucaacccauuuauuc

SEQ ID NO: 40613 - RNA, 19 nt, Artificial Sequence
  Description of Artificial Sequence: Synthetic oligonucleotide
uauuaaggaagucucuggu

SEQ ID NO: 40614 - RNA, 19 nt, Artificial Sequence
  Description of Artificial Sequence: Synthetic oligonucleotide
uuaaugagacaaaauggaa

SEQ ID NO: 40615 - RNA, 19 nt, Artificial Sequence
  Description of Artificial Sequence: Synthetic oligonucleotide
ugguuuagaaccgaguuca

SEQ ID NO: 40616 - RNA, 19 nt, Artificial Sequence
  Description of Artificial Sequence: Synthetic oligonucleotide
uaacauaaccccuguacug

SEQ ID NO: 40617 - RNA, 19 nt, Artificial Sequence
  Description of Artificial Sequence: Synthetic oligonucleotide
ugaagcuaucgucggaggg

SEQ ID NO: 40618 - RNA, 19 nt, Artificial Sequence
  Description of Artificial Sequence: Synthetic oligonucleotide
uucauaucaauguugugau

SEQ ID NO: 40619 - RNA, 19 nt, Artificial Sequence
  Description of Artificial Sequence: Synthetic oligonucleotide
cuguauuggagacuuacag

SEQ ID NO: 40620 - RNA, 19 nt, Artificial Sequence
  Description of Artificial Sequence: Synthetic oligonucleotide
ucuaagucucuauaaagau

SEQ ID NO: 40621 - RNA, 19 nt, Artificial Sequence
  Description of Artificial Sequence: Synthetic oligonucleotide
uggacaucaacccauuuau

SEQ ID NO: 40622 - RNA, 19 nt, Artificial Sequence
  Description of Artificial Sequence: Synthetic oligonucleotide
uguucuaacugauaacuau

SEQ ID NO: 40623 - RNA, 19 nt, Artificial Sequence
  Description of Artificial Sequence: Synthetic oligonucleotide
uucguuauuaaggaagucu

SEQ ID NO: 40624 - RNA, 19 nt, Artificial Sequence
  Description of Artificial Sequence: Synthetic oligonucleotide
aaucaauuaaauggcagaa

SEQ ID NO: 40625 - RNA, 19 nt, Artificial Sequence
  Description of Artificial Sequence: Synthetic oligonucleotide
acuuaacuggcaacuaucc

SEQ ID NO: 40626 - RNA, 19 nt, Artificial Sequence
  Description of Artificial Sequence: Synthetic oligonucleotide
ugcuccuagucucaugagg

SEQ ID NO: 40627 - RNA, 19 nt, Artificial Sequence
  Description of Artificial Sequence: Synthetic oligonucleotide
aguauugcacaagagaaca

SEQ ID NO: 40628 - RNA, 19 nt, Artificial Sequence
  Description of Artificial Sequence: Synthetic oligonucleotide
caaauuaaguggaucuaag

SEQ ID NO: 40629 - RNA, 19 nt, Artificial Sequence
  Description of Artificial Sequence: Synthetic oligonucleotide
ucuucgaugaaagugguau

SEQ ID NO: 40630 - RNA, 19 nt, Artificial Sequence
  Description of Artificial Sequence: Synthetic oligonucleotide
agaaacuacacuuucuaua

SEQ ID NO: 40631 - RNA, 19 nt, Artificial Sequence
  Description of Artificial Sequence: Synthetic oligonucleotide
aaggcguuguucuaacuga

SEQ ID NO: 40632 - RNA, 19 nt, Artificial Sequence
  Description of Artificial Sequence: Synthetic oligonucleotide
gaaggcguuguucuaacug

SEQ ID NO: 40633 - RNA, 19 nt, Artificial Sequence
  Description of Artificial Sequence: Synthetic oligonucleotide
aucacuucgugucucacug

SEQ ID NO: 40634 - RNA, 19 nt, Artificial Sequence
  Description of Artificial Sequence: Synthetic oligonucleotide
cuggcaacuauccauuuag

SEQ ID NO: 40635 - RNA, 19 nt, Artificial Sequence
  Description of Artificial Sequence: Synthetic oligonucleotide
agucucuauaaagauacuc

SEQ ID NO: 40636 - RNA, 19 nt, Artificial Sequence
  Description of Artificial Sequence: Synthetic oligonucleotide
ugcucuaugguuuuauauc

SEQ ID NO: 40637 - RNA, 19 nt, Artificial Sequence
  Description of Artificial Sequence: Synthetic oligonucleotide
aguacaucuguaauagccg

SEQ ID NO: 40638 - RNA, 19 nt, Artificial Sequence
  Description of Artificial Sequence: Synthetic oligonucleotide
uacugaauuggaaagucau

SEQ ID NO: 40639 - RNA, 19 nt, Artificial Sequence
  Description of Artificial Sequence: Synthetic oligonucleotide
auauaaagcaaaauuugcu

SEQ ID NO: 40640 - RNA, 19 nt, Artificial Sequence
  Description of Artificial Sequence: Synthetic oligonucleotide
ugcaaguguuuucuacugg

SEQ ID NO: 40641 - RNA, 19 nt, Artificial Sequence
  Description of Artificial Sequence: Synthetic oligonucleotide
ucauagcauaguuacuuca

SEQ ID NO: 40642 - RNA, 19 nt, Artificial Sequence
  Description of Artificial Sequence: Synthetic oligonucleotide
ugcuuauguuauauuagcu

SEQ ID NO: 40643 - RNA, 19 nt, Artificial Sequence
  Description of Artificial Sequence: Synthetic oligonucleotide
aaaugggucacugucugcu

SEQ ID NO: 40644 - RNA, 19 nt, Artificial Sequence
  Description of Artificial Sequence: Synthetic oligonucleotide
uauaaagauacuccaccua

SEQ ID NO: 40645 - RNA, 19 nt, Artificial Sequence
  Description of Artificial Sequence: Synthetic oligonucleotide
aucaauuaaauggcagaac

SEQ ID NO: 40646 - RNA, 19 nt, Artificial Sequence
  Description of Artificial Sequence: Synthetic oligonucleotide
aagauacuccaccuaacau

SEQ ID NO: 40647 - RNA, 19 nt, Artificial Sequence
  Description of Artificial Sequence: Synthetic oligonucleotide
agucaguugaggucugagg

SEQ ID NO: 40648 - RNA, 19 nt, Artificial Sequence
  Description of Artificial Sequence: Synthetic oligonucleotide
agauacuccaccuaacaua

SEQ ID NO: 40649 - RNA, 19 nt, Artificial Sequence
  Description of Artificial Sequence: Synthetic oligonucleotide
cccguuaguaauuagaaug

SEQ ID NO: 40650 - RNA, 19 nt, Artificial Sequence
  Description of Artificial Sequence: Synthetic oligonucleotide
uaaauggcagaaccaauua

SEQ ID NO: 40651 - RNA, 19 nt, Artificial Sequence
  Description of Artificial Sequence: Synthetic oligonucleotide
agugguuuagaaccgaguu

SEQ ID NO: 40652 - RNA, 19 nt, Artificial Sequence
  Description of Artificial Sequence: Synthetic oligonucleotide
gugcaaaauuccucuaggg

SEQ ID NO: 40653 - RNA, 19 nt, Artificial Sequence
  Description of Artificial Sequence: Synthetic oligonucleotide
auguaucaaguauagacua

SEQ ID NO: 40654 - RNA, 19 nt, Artificial Sequence
  Description of Artificial Sequence: Synthetic oligonucleotide
acggagauaaggccuauug

SEQ ID NO: 40655 - RNA, 19 nt, Artificial Sequence
  Description of Artificial Sequence: Synthetic oligonucleotide
uuaauaccaucaccuggag

SEQ ID NO: 40656 - RNA, 19 nt, Artificial Sequence
  Description of Artificial Sequence: Synthetic oligonucleotide
uggcagaaccaauuaauac

SEQ ID NO: 40657 - RNA, 19 nt, Artificial Sequence
  Description of Artificial Sequence: Synthetic oligonucleotide
ucuguauuggagacuuaca

SEQ ID NO: 40658 - RNA, 19 nt, Artificial Sequence
  Description of Artificial Sequence: Synthetic oligonucleotide
caacuauccauuuagguua

SEQ ID NO: 40659 - RNA, 19 nt, Artificial Sequence
  Description of Artificial Sequence: Synthetic oligonucleotide
  modified_base (9)..(9): a, c, u, g, unknown or other
accguuuanguuucuucuc

SEQ ID NO: 40660 - RNA, 19 nt, Artificial Sequence
  Description of Artificial Sequence: Synthetic oligonucleotide
  modified_base (6)..(6): a, c, u, g, unknown or other
guuuanguuucuucucagc

SEQ ID NO: 40661 - RNA, 19 nt, Artificial Sequence
  Description of Artificial Sequence: Synthetic oligonucleotide
uggaucuaagucucuauaa

SEQ ID NO: 40662 - RNA, 19 nt, Artificial Sequence
  Description of Artificial Sequence: Synthetic oligonucleotide
cauacuugcacuuggcaca

SEQ ID NO: 40663 - RNA, 19 nt, Artificial Sequence
  Description of Artificial Sequence: Synthetic oligonucleotide
uaggagaacgugcacugca

SEQ ID NO: 40664 - RNA, 19 nt, Artificial Sequence
  Description of Artificial Sequence: Synthetic oligonucleotide
ucagugguuuagaaccgag

SEQ ID NO: 40665 - RNA, 19 nt, Artificial Sequence
  Description of Artificial Sequence: Synthetic oligonucleotide
gaacuaugauugcacuucc

SEQ ID NO: 40666 - RNA, 19 nt, Artificial Sequence
  Description of Artificial Sequence: Synthetic oligonucleotide
gaguuacugacuuacuuaa

SEQ ID NO: 40667 - RNA, 19 nt, Artificial Sequence
  Description of Artificial Sequence: Synthetic oligonucleotide
acaacuaagaccaguauuu

SEQ ID NO: 40668 - RNA, 19 nt, Artificial Sequence
  Description of Artificial Sequence: Synthetic oligonucleotide
gauacuccaccuaacauaa

SEQ ID NO: 40669 - RNA, 19 nt, Artificial Sequence
  Description of Artificial Sequence: Synthetic oligonucleotide
uguaucaaguauagacuau

SEQ ID NO: 40670 - RNA, 19 nt, Artificial Sequence
  Description of Artificial Sequence: Synthetic oligonucleotide
aguuacuguaaaggcaagg

SEQ ID NO: 40671 - RNA, 19 nt, Artificial Sequence
  Description of Artificial Sequence: Synthetic oligonucleotide
gaugaguauugcacaagag

SEQ ID NO: 40672 - RNA, 19 nt, Artificial Sequence
  Description of Artificial Sequence: Synthetic oligonucleotide
aucuaagucucuauaaaga

SEQ ID NO: 40673 - RNA, 19 nt, Artificial Sequence
  Description of Artificial Sequence: Synthetic oligonucleotide
cuauccauuuagguuaggc

SEQ ID NO: 40674 - RNA, 19 nt, Artificial Sequence
  Description of Artificial Sequence: Synthetic oligonucleotide
acuauuagggacucuugau

SEQ ID NO: 40675 - RNA, 19 nt, Artificial Sequence
  Description of Artificial Sequence: Synthetic oligonucleotide
aagagcgaguaguccuugg

SEQ ID NO: 40676 - RNA, 19 nt, Artificial Sequence
  Description of Artificial Sequence: Synthetic oligonucleotide
  modified_base (17)..(17): a, c, u, g, unknown or other
uuccugaaaccguuuangu

SEQ ID NO: 40677 - RNA, 19 nt, Artificial Sequence
  Description of Artificial Sequence: Synthetic oligonucleotide
uccaccuaacauaaccccu

SEQ ID NO: 40678 - RNA, 19 nt, Artificial Sequence
  Description of Artificial Sequence: Synthetic oligonucleotide
uugccaagaagauugucau

SEQ ID NO: 40679 - RNA, 19 nt, Artificial Sequence
  Description of Artificial Sequence: Synthetic oligonucleotide
ucgaguuagugccuuaaua

SEQ ID NO: 40680 - RNA, 19 nt, Artificial Sequence
  Description of Artificial Sequence: Synthetic oligonucleotide
uggcaacuauccauuuagg

SEQ ID NO: 40681 - RNA, 19 nt, Artificial Sequence
  Description of Artificial Sequence: Synthetic oligonucleotide
cugaauuggaaagucauga

SEQ ID NO: 40682 - RNA, 19 nt, Artificial Sequence
  Description of Artificial Sequence: Synthetic oligonucleotide
  modified_base (14)..(14): a, c, u, g, unknown or other
cugaaaccguuuanguuuc

SEQ ID NO: 40683 - RNA, 19 nt, Artificial Sequence
  Description of Artificial Sequence: Synthetic oligonucleotide
cuuggaucuauuuugcuua

SEQ ID NO: 40684 - RNA, 19 nt, Artificial Sequence
  Description of Artificial Sequence: Synthetic oligonucleotide
uucccaacauccucgacaa

SEQ ID NO: 40685 - RNA, 19 nt, Artificial Sequence
  Description of Artificial Sequence: Synthetic oligonucleotide
uauguuauauuagcuuuaa

SEQ ID NO: 40686 - RNA, 19 nt, Artificial Sequence
  Description of Artificial Sequence: Synthetic oligonucleotide
aucaaguauagacuaugaa

SEQ ID NO: 40687 - RNA, 19 nt, Artificial Sequence
  Description of Artificial Sequence: Synthetic oligonucleotide
gauucauaucaauguugug

SEQ ID NO: 40688 - RNA, 19 nt, Artificial Sequence
  Description of Artificial Sequence: Synthetic oligonucleotide
cuccaccuaacauaacccc

SEQ ID NO: 40689 - RNA, 19 nt, Artificial Sequence
  Description of Artificial Sequence: Synthetic oligonucleotide
aggguucaugucaugaaac

SEQ ID NO: 40690 - RNA, 19 nt, Artificial Sequence
  Description of Artificial Sequence: Synthetic oligonucleotide
uuugaguuacugacuuacu

SEQ ID NO: 40691 - RNA, 19 nt, Artificial Sequence
  Description of Artificial Sequence: Synthetic oligonucleotide
auagcgaguacaucuguaa

SEQ ID NO: 40692 - RNA, 19 nt, Artificial Sequence
  Description of Artificial Sequence: Synthetic oligonucleotide
ugugcaguucacacuagau

SEQ ID NO: 40693 - RNA, 19 nt, Artificial Sequence
  Description of Artificial Sequence: Synthetic oligonucleotide
aaggcacgguaacauguug

SEQ ID NO: 40694 - RNA, 19 nt, Artificial Sequence
  Description of Artificial Sequence: Synthetic oligonucleotide
gauaacuaugcucuauggu

SEQ ID NO: 40695 - RNA, 19 nt, Artificial Sequence
  Description of Artificial Sequence: Synthetic oligonucleotide
guguaugauuuaaugagac

SEQ ID NO: 40696 - RNA, 19 nt, Artificial Sequence
  Description of Artificial Sequence: Synthetic oligonucleotide
caaacuguaguagcguuug

SEQ ID NO: 40697 - RNA, 19 nt, Artificial Sequence
  Description of Artificial Sequence: Synthetic oligonucleotide
cuuuuacucccgacaacgc

SEQ ID NO: 40698 - RNA, 19 nt, Artificial Sequence
  Description of Artificial Sequence: Synthetic oligonucleotide
acgauucccaacauccucg

SEQ ID NO: 40699 - RNA, 19 nt, Artificial Sequence
  Description of Artificial Sequence: Synthetic oligonucleotide
ucucuguaaggguaaaauu

SEQ ID NO: 40700 - RNA, 19 nt, Artificial Sequence
  Description of Artificial Sequence: Synthetic oligonucleotide
agcgaguaguccuuggagu

SEQ ID NO: 40701 - RNA, 19 nt, Artificial Sequence
  Description of Artificial Sequence: Synthetic oligonucleotide
uucauagcauaguuacuuc

SEQ ID NO: 40702 - RNA, 19 nt, Artificial Sequence
  Description of Artificial Sequence: Synthetic oligonucleotide
ccuaacauaaccccuguac

SEQ ID NO: 40703 - RNA, 19 nt, Artificial Sequence
  Description of Artificial Sequence: Synthetic oligonucleotide
guuguucuaacugauaacu

SEQ ID NO: 40704 - RNA, 19 nt, Artificial Sequence
  Description of Artificial Sequence: Synthetic oligonucleotide
gaugcaaguguuuucuacu

SEQ ID NO: 40705 - RNA, 19 nt, Artificial Sequence
  Description of Artificial Sequence: Synthetic oligonucleotide
aaacuauuagggacucuug

SEQ ID NO: 40706 - RNA, 19 nt, Artificial Sequence
  Description of Artificial Sequence: Synthetic oligonucleotide
cuggucuagaaacuuuaug

SEQ ID NO: 40707 - RNA, 19 nt, Artificial Sequence
  Description of Artificial Sequence: Synthetic oligonucleotide
aguauauuggggucgucuu

SEQ ID NO: 40708 - RNA, 19 nt, Artificial Sequence
  Description of Artificial Sequence: Synthetic oligonucleotide
cauuccaacaguuuacucu

SEQ ID NO: 40709 - RNA, 19 nt, Artificial Sequence
  Description of Artificial Sequence: Synthetic oligonucleotide
aauucauagcauaguuacu

SEQ ID NO: 40710 - RNA, 19 nt, Artificial Sequence
  Description of Artificial Sequence: Synthetic oligonucleotide
acgguaacauguugcguag

SEQ ID NO: 40711 - RNA, 19 nt, Artificial Sequence
  Description of Artificial Sequence: Synthetic oligonucleotide
gaacacuugaggaugcguc

SEQ ID NO: 40712 - RNA, 19 nt, Artificial Sequence
  Description of Artificial Sequence: Synthetic oligonucleotide
gacuuacuuaacuggcaac

SEQ ID NO: 40713 - RNA, 19 nt, Artificial Sequence
  Description of Artificial Sequence: Synthetic oligonucleotide
cuccuuggaucuauuuugc

SEQ ID NO: 40714 - RNA, 19 nt, Artificial Sequence
  Description of Artificial Sequence: Synthetic oligonucleotide
aggcacgguaacauguugc

SEQ ID NO: 40715 - RNA, 19 nt, Artificial Sequence
  Description of Artificial Sequence: Synthetic oligonucleotide
guucgcacaaggcuucgag

SEQ ID NO: 40716 - RNA, 19 nt, Artificial Sequence
  Description of Artificial Sequence: Synthetic oligonucleotide
accgaguggcaccuuuuac

SEQ ID NO: 40717 - RNA, 19 nt, Artificial Sequence
  Description of Artificial Sequence: Synthetic oligonucleotide
uuguucuaacugauaacua

SEQ ID NO: 40718 - RNA, 19 nt, Artificial Sequence
  Description of Artificial Sequence: Synthetic oligonucleotide
ccguuaguaauuagaaugc

SEQ ID NO: 40719 - RNA, 19 nt, Artificial Sequence
  Description of Artificial Sequence: Synthetic oligonucleotide
aacuauccauuuagguuag

SEQ ID NO: 40720 - RNA, 19 nt, Artificial Sequence
  Description of Artificial Sequence: Synthetic oligonucleotide
cucucggcuagacagagca

SEQ ID NO: 40721 - RNA, 19 nt, Artificial Sequence
  Description of Artificial Sequence: Synthetic oligonucleotide
uguugcuaaucaacuguau

SEQ ID NO: 40722 - RNA, 19 nt, Artificial Sequence
  Description of Artificial Sequence: Synthetic oligonucleotide
uucgugucucacugagagg

SEQ ID NO: 40723 - RNA, 19 nt, Artificial Sequence
  Description of Artificial Sequence: Synthetic oligonucleotide
cacuucgugucucacugag

SEQ ID NO: 40724 - RNA, 19 nt, Artificial Sequence
  Description of Artificial Sequence: Synthetic oligonucleotide
agacuaugaaagugcaaau

SEQ ID NO: 40725 - RNA, 19 nt, Artificial Sequence
  Description of Artificial Sequence: Synthetic oligonucleotide
guguaauaaugcauaaauc

SEQ ID NO: 40726 - RNA, 19 nt, Artificial Sequence
  Description of Artificial Sequence: Synthetic oligonucleotide
ugcacucaauccuaacauc

SEQ ID NO: 40727 - RNA, 19 nt, Artificial Sequence
  Description of Artificial Sequence: Synthetic oligonucleotide
ggcacgguaacauguugcg

SEQ ID NO: 40728 - RNA, 19 nt, Artificial Sequence
  Description of Artificial Sequence: Synthetic oligonucleotide
agcgaguacaucuguaaua

SEQ ID NO: 40729 - RNA, 19 nt, Artificial Sequence
  Description of Artificial Sequence: Synthetic oligonucleotide
auacuugcacuuggcacac

SEQ ID NO: 40730 - RNA, 19 nt, Artificial Sequence
  Description of Artificial Sequence: Synthetic oligonucleotide
uugcguaggauguuguauu

SEQ ID NO: 40731 - RNA, 19 nt, Artificial Sequence
  Description of Artificial Sequence: Synthetic oligonucleotide
agccauaauauugccaaga

SEQ ID NO: 40732 - RNA, 19 nt, Artificial Sequence
  Description of Artificial Sequence: Synthetic oligonucleotide
gcaaauaacaagucaaggu

SEQ ID NO: 40733 - RNA, 19 nt, Artificial Sequence
  Description of Artificial Sequence: Synthetic oligonucleotide
ccaauuaauaccaucaccu

SEQ ID NO: 40734 - RNA, 19 nt, Artificial Sequence
  Description of Artificial Sequence: Synthetic oligonucleotide
gaagcuaucgucggaggga

SEQ ID NO: 40735 - RNA, 19 nt, Artificial Sequence
  Description of Artificial Sequence: Synthetic oligonucleotide
gcgaguacaucuguaauag

SEQ ID NO: 40736 - RNA, 19 nt, Artificial Sequence
  Description of Artificial Sequence: Synthetic oligonucleotide
gugguuuagaaccgaguuc

SEQ ID NO: 40737 - RNA, 19 nt, Artificial Sequence
  Description of Artificial Sequence: Synthetic oligonucleotide
cuguaauagccgccagugg

SEQ ID NO: 40738 - RNA, 19 nt, Artificial Sequence
  Description of Artificial Sequence: Synthetic oligonucleotide
aacgugcacugcaucuucg

SEQ ID NO: 40739 - RNA, 19 nt, Artificial Sequence
  Description of Artificial Sequence: Synthetic oligonucleotide
ucggcuagacagagcacug

SEQ ID NO: 40740 - RNA, 19 nt, Artificial Sequence
  Description of Artificial Sequence: Synthetic oligonucleotide
  modified_base (19)..(19): a, c, u, g, unknown or other
aguuccugaaaccguuuan

SEQ ID NO: 40741 - RNA, 19 nt, Artificial Sequence
  Description of Artificial Sequence: Synthetic oligonucleotide
agucucaguugaaaauggg

SEQ ID NO: 40742 - RNA, 19 nt, Artificial Sequence
  Description of Artificial Sequence: Synthetic oligonucleotide
uuaagaaggcguuguucua

SEQ ID NO: 40743 - RNA, 19 nt, Artificial Sequence
  Description of Artificial Sequence: Synthetic oligonucleotide
gggcagaaauauuaugggc

SEQ ID NO: 40744 - RNA, 19 nt, Artificial Sequence
  Description of Artificial Sequence: Synthetic oligonucleotide
gaggucgugaacucaaagu

SEQ ID NO: 40745 - RNA, 19 nt, Artificial Sequence
  Description of Artificial Sequence: Synthetic oligonucleotide
uugcaauucauagcauagu

SEQ ID NO: 40746 - RNA, 19 nt, Artificial Sequence
  Description of Artificial Sequence: Synthetic oligonucleotide
agagcgaguaguccuugga

SEQ ID NO: 40747 - RNA, 19 nt, Artificial Sequence
  Description of Artificial Sequence: Synthetic oligonucleotide
ugauacccggaagaaauua

SEQ ID NO: 40748 - RNA, 19 nt, Artificial Sequence
  Description of Artificial Sequence: Synthetic oligonucleotide
uaauaguggcaaagcacuu

SEQ ID NO: 40749 - RNA, 19 nt, Artificial Sequence
  Description of Artificial Sequence: Synthetic oligonucleotide
caucuacaggucuguagac

SEQ ID NO: 40750 - RNA, 19 nt, Artificial Sequence
  Description of Artificial Sequence: Synthetic oligonucleotide
cuuccuaguuaguuuaaaa

SEQ ID NO: 40751 - RNA, 19 nt, Artificial Sequence
  Description of Artificial Sequence: Synthetic oligonucleotide
aaacgauucccaacauccu

SEQ ID NO: 40752 - RNA, 19 nt, Artificial Sequence
  Description of Artificial Sequence: Synthetic oligonucleotide
ucacaacagguaccgcaca

SEQ ID NO: 40753 - RNA, 19 nt, Artificial Sequence
  Description of Artificial Sequence: Synthetic oligonucleotide
aguuuacucuaguuuuaau

SEQ ID NO: 40754 - RNA, 19 nt, Artificial Sequence
  Description of Artificial Sequence: Synthetic oligonucleotide
uaauugcacccguuaguaa

SEQ ID NO: 40755 - RNA, 19 nt, Artificial Sequence
  Description of Artificial Sequence: Synthetic oligonucleotide
cacgguaacauguugcgua

SEQ ID NO: 40756 - RNA, 19 nt, Artificial Sequence
  Description of Artificial Sequence: Synthetic oligonucleotide
agccagucaguugaggucu

SEQ ID NO: 40757 - RNA, 19 nt, Artificial Sequence
  Description of Artificial Sequence: Synthetic oligonucleotide
guauauuggggucgucuuc

SEQ ID NO: 40758 - RNA, 19 nt, Artificial Sequence
  Description of Artificial Sequence: Synthetic oligonucleotide
uggagacuuacaguucgca

SEQ ID NO: 40759 - RNA, 19 nt, Artificial Sequence
  Description of Artificial Sequence: Synthetic oligonucleotide
cuguauggcaagaaguaua

SEQ ID NO: 40760 - RNA, 19 nt, Artificial Sequence
  Description of Artificial Sequence: Synthetic oligonucleotide
acaguucgcacaaggcuuc

SEQ ID NO: 40761 - RNA, 19 nt, Artificial Sequence
  Description of Artificial Sequence: Synthetic oligonucleotide
auacaaauagucacacaaa

SEQ ID NO: 40762 - RNA, 19 nt, Artificial Sequence
  Description of Artificial Sequence: Synthetic oligonucleotide
ugcauaugauugcaaccuu

SEQ ID NO: 40763 - RNA, 19 nt, Artificial Sequence
  Description of Artificial Sequence: Synthetic oligonucleotide
guaauugcacccguuagua

SEQ ID NO: 40764 - RNA, 19 nt, Artificial Sequence
  Description of Artificial Sequence: Synthetic oligonucleotide
auaaccccuguacugcgau

SEQ ID NO: 40765 - RNA, 19 nt, Artificial Sequence
  Description of Artificial Sequence: Synthetic oligonucleotide
gaacgugcacugcaucuuc

SEQ ID NO: 40766 - RNA, 19 nt, Artificial Sequence
  Description of Artificial Sequence: Synthetic oligonucleotide
gagaacgugcacugcaucu

SEQ ID NO: 40767 - RNA, 19 nt, Artificial Sequence
  Description of Artificial Sequence: Synthetic oligonucleotide
uucgaguuagugccuuaau

SEQ ID NO: 40768 - RNA, 19 nt, Artificial Sequence
  Description of Artificial Sequence: Synthetic oligonucleotide
uuaggagaacgugcacugc

SEQ ID NO: 40769 - RNA, 19 nt, Artificial Sequence
  Description of Artificial Sequence: Synthetic oligonucleotide
ggagguugaguuuucagua

SEQ ID NO: 40770 - RNA, 19 nt, Artificial Sequence
  Description of Artificial Sequence: Synthetic oligonucleotide
uugaggaugcgucgaguuu

SEQ ID NO: 40771 - RNA, 19 nt, Artificial Sequence
  Description of Artificial Sequence: Synthetic oligonucleotide
ugcacccguuaguaauuag

SEQ ID NO: 40772 - RNA, 19 nt, Artificial Sequence
  Description of Artificial Sequence: Synthetic oligonucleotide
cuuugagagcucuacucaa

SEQ ID NO: 40773 - RNA, 19 nt, Artificial Sequence
  Description of Artificial Sequence: Synthetic oligonucleotide
agaaccgaguucaaauuaa

SEQ ID NO: 40774 - RNA, 19 nt, Artificial Sequence
  Description of Artificial Sequence: Synthetic oligonucleotide
cacccguuaguaauuagaa

SEQ ID NO: 40775 - RNA, 19 nt, Artificial Sequence
  Description of Artificial Sequence: Synthetic oligonucleotide
ggaucuaagucucuauaaa

SEQ ID NO: 40776 - RNA, 19 nt, Artificial Sequence
  Description of Artificial Sequence: Synthetic oligonucleotide
aagcuaucgucggagggaa

SEQ ID NO: 40777 - RNA, 19 nt, Artificial Sequence
  Description of Artificial Sequence: Synthetic oligonucleotide
caggucuguagacuccuac

SEQ ID NO: 40778 - RNA, 19 nt, Artificial Sequence
  Description of Artificial Sequence: Synthetic oligonucleotide
ggacagaaaucacuucgug

SEQ ID NO: 40779 - RNA, 19 nt, Artificial Sequence
  Description of Artificial Sequence: Synthetic oligonucleotide
gauacccggaagaaauuaa

SEQ ID NO: 40780 - RNA, 19 nt, Artificial Sequence
  Description of Artificial Sequence: Synthetic oligonucleotide
aacuaugauugcacuucca

SEQ ID NO: 40781 - RNA, 19 nt, Artificial Sequence
  Description of Artificial Sequence: Synthetic oligonucleotide
uagggaugcuucguuauua

SEQ ID NO: 40782 - RNA, 19 nt, Artificial Sequence
  Description of Artificial Sequence: Synthetic oligonucleotide
auuuggccaaacaucuaca

SEQ ID NO: 40783 - RNA, 19 nt, Artificial Sequence
  Description of Artificial Sequence: Synthetic oligonucleotide
gauaacuaggagguugagu

SEQ ID NO: 40784 - RNA, 19 nt, Artificial Sequence
  Description of Artificial Sequence: Synthetic oligonucleotide
cauugcuaccgaguggcac

SEQ ID NO: 40785 - RNA, 19 nt, Artificial Sequence
  Description of Artificial Sequence: Synthetic oligonucleotide
acccguuaguaauuagaau

SEQ ID NO: 40786 - RNA, 19 nt, Artificial Sequence
  Description of Artificial Sequence: Synthetic oligonucleotide
gugggaauguaucaaguau

SEQ ID NO: 40787 - RNA, 19 nt, Artificial Sequence
  Description of Artificial Sequence: Synthetic oligonucleotide
uaucgucggagggaacacc

SEQ ID NO: 40788 - RNA, 19 nt, Artificial Sequence
  Description of Artificial Sequence: Synthetic oligonucleotide
cacuaaacuuuaaagggau

SEQ ID NO: 40789 - RNA, 19 nt, Artificial Sequence
  Description of Artificial Sequence: Synthetic oligonucleotide
uguugcguaggauguugua

SEQ ID NO: 40790 - RNA, 19 nt, Artificial Sequence
  Description of Artificial Sequence: Synthetic oligonucleotide
cagacugauuucaucugga

SEQ ID NO: 40791 - RNA, 19 nt, Artificial Sequence
  Description of Artificial Sequence: Synthetic oligonucleotide
cuauggcuccuagggaugc

SEQ ID NO: 40792 - RNA, 19 nt, Artificial Sequence
  Description of Artificial Sequence: Synthetic oligonucleotide
agggaugcuucguuauuaa

SEQ ID NO: 40793 - RNA, 19 nt, Artificial Sequence
  Description of Artificial Sequence: Synthetic oligonucleotide
acuuaagcuacaggcuaca

SEQ ID NO: 40794 - RNA, 19 nt, Artificial Sequence
  Description of Artificial Sequence: Synthetic oligonucleotide
agaaggcguuguucuaacu

SEQ ID NO: 40795 - RNA, 19 nt, Artificial Sequence
  Description of Artificial Sequence: Synthetic oligonucleotide
auauaggcacuaaaucaau

SEQ ID NO: 40796 - RNA, 19 nt, Artificial Sequence
  Description of Artificial Sequence: Synthetic oligonucleotide
gcucgagccagucaguuga

SEQ ID NO: 40797 - RNA, 19 nt, Artificial Sequence
  Description of Artificial Sequence: Synthetic oligonucleotide
guaccauuguaucuuaauu

SEQ ID NO: 40798 - RNA, 19 nt, Artificial Sequence
  Description of Artificial Sequence: Synthetic oligonucleotide
auccuaacaucagugguuu

SEQ ID NO: 40799 - RNA, 19 nt, Artificial Sequence
  Description of Artificial Sequence: Synthetic oligonucleotide
acuguaccauuguaucuua

SEQ ID NO: 40800 - RNA, 19 nt, Artificial Sequence
  Description of Artificial Sequence: Synthetic oligonucleotide
gagcucuacucaauuguuc

SEQ ID NO: 40801 - RNA, 19 nt, Artificial Sequence
  Description of Artificial Sequence: Synthetic oligonucleotide
cacuuacauggagugcucc

SEQ ID NO: 40802 - RNA, 19 nt, Artificial Sequence
  Description of Artificial Sequence: Synthetic oligonucleotide
ucgagccagucaguugagg

SEQ ID NO: 40803 - RNA, 19 nt, Artificial Sequence
  Description of Artificial Sequence: Synthetic oligonucleotide
guggaucuaagucucuaua

SEQ ID NO: 40804 - RNA, 19 nt, Artificial Sequence
  Description of Artificial Sequence: Synthetic oligonucleotide
guugcuaaucaacuguauu

SEQ ID NO: 40805 - RNA, 19 nt, Artificial Sequence
  Description of Artificial Sequence: Synthetic oligonucleotide
gauucccaacauccucgac

SEQ ID NO: 40806 - RNA, 19 nt, Artificial Sequence
  Description of Artificial Sequence: Synthetic oligonucleotide
uaccgaguggcaccuuuua

SEQ ID NO: 40807 - RNA, 19 nt, Artificial Sequence
  Description of Artificial Sequence: Synthetic oligonucleotide
gcacucaauccuaacauca

SEQ ID NO: 40808 - RNA, 19 nt, Artificial Sequence
  Description of Artificial Sequence: Synthetic oligonucleotide
uggaucuauuuugcuuaug

SEQ ID NO: 40809 - RNA, 19 nt, Artificial Sequence
  Description of Artificial Sequence: Synthetic oligonucleotide
  modified_base (7)..(7): a, c, u, g, unknown or other
cguuuanguuucuucucag

SEQ ID NO: 40810 - RNA, 19 nt, Artificial Sequence
  Description of Artificial Sequence: Synthetic oligonucleotide
agucaugacuguguuguuu

SEQ ID NO: 40811 - RNA, 19 nt, Artificial Sequence
  Description of Artificial Sequence: Synthetic oligonucleotide
auggcagaaccaauuaaua

SEQ ID NO: 40812 - RNA, 19 nt, Artificial Sequence
  Description of Artificial Sequence: Synthetic oligonucleotide
cuguugcuaaucaacugua

SEQ ID NO: 40813 - RNA, 19 nt, Artificial Sequence
  Description of Artificial Sequence: Synthetic oligonucleotide
auacccggaagaaauuaaa

SEQ ID NO: 40814 - RNA, 19 nt, Artificial Sequence
  Description of Artificial Sequence: Synthetic oligonucleotide
ggauucauaucaauguugu

SEQ ID NO: 40815 - RNA, 19 nt, Artificial Sequence
  Description of Artificial Sequence: Synthetic oligonucleotide
guagacuccuacuguauau

SEQ ID NO: 40816 - RNA, 19 nt, Artificial Sequence
  Description of Artificial Sequence: Synthetic oligonucleotide
gcaacuauccauuuagguu

SEQ ID NO: 40817 - RNA, 19 nt, Artificial Sequence
  Description of Artificial Sequence: Synthetic oligonucleotide
guuaggcaaaggcacggua

SEQ ID NO: 40818 - RNA, 19 nt, Artificial Sequence
  Description of Artificial Sequence: Synthetic oligonucleotide
aucgucggagggaacaccu

SEQ ID NO: 40819 - RNA, 19 nt, Artificial Sequence
  Description of Artificial Sequence: Synthetic oligonucleotide
gccccucacaccuucuggg

SEQ ID NO: 40820 - RNA, 19 nt, Artificial Sequence
  Description of Artificial Sequence: Synthetic oligonucleotide
cuucguuauuaaggaaguc

SEQ ID NO: 40821 - RNA, 19 nt, Artificial Sequence
  Description of Artificial Sequence: Synthetic oligonucleotide
  modified_base (2)..(2): a, c, u, g, unknown or other
anguuucuucucagccuca

SEQ ID NO: 40822 - RNA, 19 nt, Artificial Sequence
  Description of Artificial Sequence: Synthetic oligonucleotide
guaauagccgccaguggaa

SEQ ID NO: 40823 - RNA, 19 nt, Artificial Sequence
  Description of Artificial Sequence: Synthetic oligonucleotide
gcuuauguuauauuagcuu

SEQ ID NO: 40824 - RNA, 19 nt, Artificial Sequence
  Description of Artificial Sequence: Synthetic oligonucleotide
acacuugaggaugcgucga

SEQ ID NO: 40825 - RNA, 19 nt, Artificial Sequence
  Description of Artificial Sequence: Synthetic oligonucleotide
cauagcgaguacaucugua

SEQ ID NO: 40826 - RNA, 19 nt, Artificial Sequence
  Description of Artificial Sequence: Synthetic oligonucleotide
guaguagcguuuguccauc

SEQ ID NO: 40827 - RNA, 19 nt, Artificial Sequence
  Description of Artificial Sequence: Synthetic oligonucleotide
ccucauuacuacugucacc

SEQ ID NO: 40828 - RNA, 19 nt, Artificial Sequence
  Description of Artificial Sequence: Synthetic oligonucleotide
uucagcaaaugggcuacua

SEQ ID NO: 40829 - RNA, 19 nt, Artificial Sequence
  Description of Artificial Sequence: Synthetic oligonucleotide
ggcaacuauccauuuaggu

SEQ ID NO: 40830 - RNA, 19 nt, Artificial Sequence
  Description of Artificial Sequence: Synthetic oligonucleotide
gucggagggaacaccuuug

SEQ ID NO: 40831 - RNA, 19 nt, Artificial Sequence
  Description of Artificial Sequence: Synthetic oligonucleotide
agaacgugcacugcaucuu

SEQ ID NO: 40832 - RNA, 19 nt, Artificial Sequence
  Description of Artificial Sequence: Synthetic oligonucleotide
acuaggcaucuaagucccc

SEQ ID NO: 40833 - RNA, 19 nt, Artificial Sequence
  Description of Artificial Sequence: Synthetic oligonucleotide
acuauccauuuagguuagg

SEQ ID NO: 40834 - RNA, 19 nt, Artificial Sequence
  Description of Artificial Sequence: Synthetic oligonucleotide
cacauaugugcaguucaca

SEQ ID NO: 40835 - RNA, 19 nt, Artificial Sequence
  Description of Artificial Sequence: Synthetic oligonucleotide
cucgagccagucaguugag

SEQ ID NO: 40836 - RNA, 19 nt, Artificial Sequence
  Description of Artificial Sequence: Synthetic oligonucleotide
cauaaccccuguacugcga

SEQ ID NO: 40837 - RNA, 19 nt, Artificial Sequence
  Description of Artificial Sequence: Synthetic oligonucleotide
  modified_base (15)..(15): a, c, u, g, unknown or other
ccugaaaccguuuanguuu

SEQ ID NO: 40838 - RNA, 19 nt, Artificial Sequence
  Description of Artificial Sequence: Synthetic oligonucleotide
aggguaaaauugacacuga

SEQ ID NO: 40839 - RNA, 19 nt, Artificial Sequence
  Description of Artificial Sequence: Synthetic oligonucleotide
gcauaugauugcaaccuuc

SEQ ID NO: 40840 - RNA, 19 nt, Artificial Sequence
  Description of Artificial Sequence: Synthetic oligonucleotide
auugcacccguuaguaauu

SEQ ID NO: 40841 - RNA, 19 nt, Artificial Sequence
  Description of Artificial Sequence: Synthetic oligonucleotide
cacaacagguaccgcacaa

SEQ ID NO: 40842 - RNA, 19 nt, Artificial Sequence
  Description of Artificial Sequence: Synthetic oligonucleotide
agaagagcgaguaguccuu

SEQ ID NO: 40843 - RNA, 19 nt, Artificial Sequence
  Description of Artificial Sequence: Synthetic oligonucleotide
gcuaucgucggagggaaca

SEQ ID NO: 40844 - RNA, 19 nt, Artificial Sequence
  Description of Artificial Sequence: Synthetic oligonucleotide
  modified_base (8)..(8): a, c, u, g, unknown or other
ccguuuanguuucuucuca

SEQ ID NO: 40845 - RNA, 19 nt, Artificial Sequence
  Description of Artificial Sequence: Synthetic oligonucleotide
guugcguaggauguuguau

SEQ ID NO: 40846 - RNA, 19 nt, Artificial Sequence
  Description of Artificial Sequence: Synthetic oligonucleotide
cagcgcagcccgaggacug

SEQ ID NO: 40847 - RNA, 19 nt, Artificial Sequence
  Description of Artificial Sequence: Synthetic oligonucleotide
cuugaggaugcgucgaguu

SEQ ID NO: 40848 - RNA, 19 nt, Artificial Sequence
  Description of Artificial Sequence: Synthetic oligonucleotide
ccuauggcuccuagggaug

SEQ ID NO: 40849 - RNA, 19 nt, Artificial Sequence
  Description of Artificial Sequence: Synthetic oligonucleotide
cucaugaggcuaucaccaa

SEQ ID NO: 40850 - RNA, 19 nt, Artificial Sequence
  Description of Artificial Sequence: Synthetic oligonucleotide
gcacuuggcacacugcaua

SEQ ID NO: 40851 - RNA, 19 nt, Artificial Sequence
  Description of Artificial Sequence: Synthetic oligonucleotide
uugcacccguuaguaauua

SEQ ID NO: 40852 - RNA, 19 nt, Artificial Sequence
  Description of Artificial Sequence: Synthetic oligonucleotide
gcacccguuaguaauuaga

SEQ ID NO: 40853 - RNA, 19 nt, Artificial Sequence
  Description of Artificial Sequence: Synthetic oligonucleotide
caguucgcacaaggcuucg

SEQ ID NO: 40854 - RNA, 19 nt, Artificial Sequence
  Description of Artificial Sequence: Synthetic oligonucleotide
cagccucaccugucauucc

SEQ ID NO: 40855 - RNA, 19 nt, Artificial Sequence
  Description of Artificial Sequence: Synthetic oligonucleotide
cgugaacucaaagucucag

SEQ ID NO: 40856 - RNA, 19 nt, Artificial Sequence
  Description of Artificial Sequence: Synthetic oligonucleotide
ugguuuuauggaggucuuu

SEQ ID NO: 40857 - RNA, 19 nt, Artificial Sequence
  Description of Artificial Sequence: Synthetic oligonucleotide
ugcucaccuuacugccaac

SEQ ID NO: 40858 - RNA, 19 nt, Artificial Sequence
  Description of Artificial Sequence: Synthetic oligonucleotide
  modified_base (12)..(12): a, c, u, g, unknown or other
gaaaccguuuanguuucuu

SEQ ID NO: 40859 - RNA, 19 nt, Artificial Sequence
  Description of Artificial Sequence: Synthetic oligonucleotide
cuaggagguugaguuuuca

SEQ ID NO: 40860 - RNA, 19 nt, Artificial Sequence
  Description of Artificial Sequence: Synthetic oligonucleotide
cauugaaauuugaguuacu

SEQ ID NO: 40861 - RNA, 19 nt, Artificial Sequence
  Description of Artificial Sequence: Synthetic oligonucleotide
uaaccccuguacugcgauu

SEQ ID NO: 40862 - RNA, 19 nt, Artificial Sequence
  Description of Artificial Sequence: Synthetic oligonucleotide
ucgucggagggaacaccuu

SEQ ID NO: 40863 - RNA, 19 nt, Artificial Sequence
  Description of Artificial Sequence: Synthetic oligonucleotide
cagugguuuagaaccgagu

SEQ ID NO: 40864 - RNA, 19 nt, Artificial Sequence
  Description of Artificial Sequence: Synthetic oligonucleotide
aguucgcacaaggcuucga

SEQ ID NO: 40865 - RNA, 19 nt, Artificial Sequence
  Description of Artificial Sequence: Synthetic oligonucleotide
auucagcaaaugggcuacu

SEQ ID NO: 40866 - RNA, 19 nt, Artificial Sequence
  Description of Artificial Sequence: Synthetic oligonucleotide
cgaguuagugccuuaauau

SEQ ID NO: 40867 - RNA, 19 nt, Artificial Sequence
  Description of Artificial Sequence: Synthetic oligonucleotide
guaacauguugcguaggau

SEQ ID NO: 40868 - RNA, 19 nt, Artificial Sequence
  Description of Artificial Sequence: Synthetic oligonucleotide
gcgauucaccuggagagca

SEQ ID NO: 40869 - RNA, 19 nt, Artificial Sequence
  Description of Artificial Sequence: Synthetic oligonucleotide
cguaggauguuguauugaa

SEQ ID NO: 40870 - RNA, 19 nt, Artificial Sequence
  Description of Artificial Sequence: Synthetic oligonucleotide
ggucgugaacucaaagucu

SEQ ID NO: 40871 - RNA, 19 nt, Artificial Sequence
  Description of Artificial Sequence: Synthetic oligonucleotide
gcuucguuauuaaggaagu

SEQ ID NO: 40872 - RNA, 19 nt, Artificial Sequence
  Description of Artificial Sequence: Synthetic oligonucleotide
uacggagauaaggccuauu

SEQ ID NO: 40873 - RNA, 19 nt, Artificial Sequence
  Description of Artificial Sequence: Synthetic oligonucleotide
gccuauggcuccuagggau

SEQ ID NO: 40874 - RNA, 19 nt, Artificial Sequence
  Description of Artificial Sequence: Synthetic oligonucleotide
gggauuuacuguaacucau

SEQ ID NO: 40875 - RNA, 19 nt, Artificial Sequence
  Description of Artificial Sequence: Synthetic oligonucleotide
ggguacggagauaaggccu

SEQ ID NO: 40876 - RNA, 19 nt, Artificial Sequence
  Description of Artificial Sequence: Synthetic oligonucleotide
aucuucgaugaaaguggua

SEQ ID NO: 40877 - RNA, 19 nt, Artificial Sequence
  Description of Artificial Sequence: Synthetic oligonucleotide
ccgaguggcaccuuuuacu

SEQ ID NO: 40878 - RNA, 19 nt, Artificial Sequence
  Description of Artificial Sequence: Synthetic oligonucleotide
cuugcucgagccagucagu

SEQ ID NO: 40879 - RNA, 19 nt, Artificial Sequence
  Description of Artificial Sequence: Synthetic oligonucleotide
cguuaguaauuagaaugca

SEQ ID NO: 40880 - RNA, 19 nt, Artificial Sequence
  Description of Artificial Sequence: Synthetic oligonucleotide
caucugcacaccugaccgu

SEQ ID NO: 40881 - RNA, 19 nt, Artificial Sequence
  Description of Artificial Sequence: Synthetic oligonucleotide
cccuggucuagaaacuuua

SEQ ID NO: 40882 - RNA, 19 nt, Artificial Sequence
  Description of Artificial Sequence: Synthetic oligonucleotide
ggcauuguacccacuuggu

SEQ ID NO: 40883 - RNA, 19 nt, Artificial Sequence
  Description of Artificial Sequence: Synthetic oligonucleotide
cgauucaccuggagagcac

SEQ ID NO: 40884 - RNA, 19 nt, Artificial Sequence
  Description of Artificial Sequence: Synthetic oligonucleotide
cuuaagcuacaggcuacau

SEQ ID NO: 40885 - RNA, 19 nt, Artificial Sequence
  Description of Artificial Sequence: Synthetic oligonucleotide
gggaugcugcucaccuuac

SEQ ID NO: 40886 - RNA, 19 nt, Artificial Sequence
  Description of Artificial Sequence: Synthetic oligonucleotide
ccuagggaugcuucguuau

SEQ ID NO: 40887 - RNA, 19 nt, Artificial Sequence
  Description of Artificial Sequence: Synthetic oligonucleotide
gugauacccggaagaaauu

SEQ ID NO: 40888 - RNA, 19 nt, Artificial Sequence
  Description of Artificial Sequence: Synthetic oligonucleotide
gcucaccuuacugccaacu

SEQ ID NO: 40889 - RNA, 19 nt, Artificial Sequence
  Description of Artificial Sequence: Synthetic oligonucleotide
cugccaacucucggcuaga

SEQ ID NO: 40890 - RNA, 19 nt, Artificial Sequence
  Description of Artificial Sequence: Synthetic oligonucleotide
gcuaccgaguggcaccuuu

SEQ ID NO: 40891 - RNA, 19 nt, Artificial Sequence
  Description of Artificial Sequence: Synthetic oligonucleotide
ccuggucuagaaacuuuau

SEQ ID NO: 40892 - RNA, 19 nt, Artificial Sequence
  Description of Artificial Sequence: Synthetic oligonucleotide
ugcuaccgaguggcaccuu

SEQ ID NO: 40893 - RNA, 19 nt, Artificial Sequence
  Description of Artificial Sequence: Synthetic oligonucleotide
gcacgguaacauguugcgu

SEQ ID NO: 40894 - RNA, 19 nt, Artificial Sequence
  Description of Artificial Sequence: Synthetic oligonucleotide
cacgccccucacaccuucu

SEQ ID NO: 40895 - RNA, 19 nt, Artificial Sequence
  Description of Artificial Sequence: Synthetic oligonucleotide
cgucggagggaacaccuuu

SEQ ID NO: 40896 - RNA, 19 nt, Artificial Sequence
  Description of Artificial Sequence: Synthetic oligonucleotide
cagcaccgcuguugcuaau

SEQ ID NO: 40897 - RNA, 19 nt, Artificial Sequence
  Description of Artificial Sequence: Synthetic oligonucleotide
aaauuuguuaguuugaggc

SEQ ID NO: 40898 - RNA, 19 nt, Artificial Sequence
  Description of Artificial Sequence: Synthetic oligonucleotide
aauagaaguagauacaugc

SEQ ID NO: 40899 - RNA, 19 nt, Artificial Sequence
  Description of Artificial Sequence: Synthetic oligonucleotide
uaaaccauuauuaagaacu

SEQ ID NO: 40900 - RNA, 19 nt, Artificial Sequence
  Description of Artificial Sequence: Synthetic oligonucleotide
aaagguuauauuugcaugc

SEQ ID NO: 40901 - RNA, 19 nt, Artificial Sequence
  Description of Artificial Sequence: Synthetic oligonucleotide
uuucauaugaaccaccagg

SEQ ID NO: 40902 - RNA, 19 nt, Artificial Sequence
  Description of Artificial Sequence: Synthetic oligonucleotide
aauaugaauacuagaaggc

SEQ ID NO: 40903 - RNA, 19 nt, Artificial Sequence
  Description of Artificial Sequence: Synthetic oligonucleotide
aguuaguuggacuauaaac

SEQ ID NO: 40904 - RNA, 19 nt, Artificial Sequence
  Description of Artificial Sequence: Synthetic oligonucleotide
aaauuuaucaggcuauuug

SEQ ID NO: 40905 - RNA, 19 nt, Artificial Sequence
  Description of Artificial Sequence: Synthetic oligonucleotide
aaagcuuaggcugagcacc

SEQ ID NO: 40906 - RNA, 19 nt, Artificial Sequence
  Description of Artificial Sequence: Synthetic oligonucleotide
auauauuuggagcuguggc

SEQ ID NO: 40907 - RNA, 19 nt, Artificial Sequence
  Description of Artificial Sequence: Synthetic oligonucleotide
uccuuguucaaaauuaggg

SEQ ID NO: 40908 - RNA, 19 nt, Artificial Sequence
  Description of Artificial Sequence: Synthetic oligonucleotide
aauguuagaucaauauucc

SEQ ID NO: 40909 - RNA, 19 nt, Artificial Sequence
  Description of Artificial Sequence: Synthetic oligonucleotide
aauuauagaggcuuugagu

SEQ ID NO: 40910 - RNA, 19 nt, Artificial Sequence
  Description of Artificial Sequence: Synthetic oligonucleotide
uauuucaauauccaguugu

SEQ ID NO: 40911 - RNA, 19 nt, Artificial Sequence
  Description of Artificial Sequence: Synthetic oligonucleotide
acauaaaacagcuggcagc

SEQ ID NO: 40912 - RNA, 19 nt, Artificial Sequence
  Description of Artificial Sequence: Synthetic oligonucleotide
guuaguuggacuauaaacg

SEQ ID NO: 40913 - RNA, 19 nt, Artificial Sequence
  Description of Artificial Sequence: Synthetic oligonucleotide
ugaguuaagaugcuuuggg

SEQ ID NO: 40914 - RNA, 19 nt, Artificial Sequence
  Description of Artificial Sequence: Synthetic oligonucleotide
uuuaaucaaagauaugaug

SEQ ID NO: 40915 - RNA, 19 nt, Artificial Sequence
  Description of Artificial Sequence: Synthetic oligonucleotide
uuugauuacugguauaacc

SEQ ID NO: 40916 - RNA, 19 nt, Artificial Sequence
  Description of Artificial Sequence: Synthetic oligonucleotide
acucacaccuacuagaaac

SEQ ID NO: 40917 - RNA, 19 nt, Artificial Sequence
  Description of Artificial Sequence: Synthetic oligonucleotide
uuaguuggacuauaaacgg

SEQ ID NO: 40918 - RNA, 19 nt, Artificial Sequence
  Description of Artificial Sequence: Synthetic oligonucleotide
aauaggauauuucaaacuu

SEQ ID NO: 40919 - RNA, 19 nt, Artificial Sequence
  Description of Artificial Sequence: Synthetic oligonucleotide
aaauuauagaggcuuugag

SEQ ID NO: 40920 - RNA, 19 nt, Artificial Sequence
  Description of Artificial Sequence: Synthetic oligonucleotide
uuuagguuaaaccaguaau

SEQ ID NO: 40921 - RNA, 19 nt, Artificial Sequence
  Description of Artificial Sequence: Synthetic oligonucleotide
cugauuuacagccagagug

SEQ ID NO: 40922 - RNA, 19 nt, Artificial Sequence
  Description of Artificial Sequence: Synthetic oligonucleotide
uugauuacugguauaacca

SEQ ID NO: 40923 - RNA, 19 nt, Artificial Sequence
  Description of Artificial Sequence: Synthetic oligonucleotide
auaaaagguaucaaacugc

SEQ ID NO: 40924 - RNA, 19 nt, Artificial Sequence
  Description of Artificial Sequence: Synthetic oligonucleotide
caaaauuagggaaagcuac

SEQ ID NO: 40925 - RNA, 19 nt, Artificial Sequence
  Description of Artificial Sequence: Synthetic oligonucleotide
gugauuauggcauaugcag

SEQ ID NO: 40926 - RNA, 19 nt, Artificial Sequence
  Description of Artificial Sequence: Synthetic oligonucleotide
aauagagagagaccuagga

SEQ ID NO: 40927 - RNA, 19 nt, Artificial Sequence
  Description of Artificial Sequence: Synthetic oligonucleotide
acuauaaacggguaacauc

SEQ ID NO: 40928 - RNA, 19 nt, Artificial Sequence
  Description of Artificial Sequence: Synthetic oligonucleotide
aagccgacaucagagaugc

SEQ ID NO: 40929 - RNA, 19 nt, Artificial Sequence
  Description of Artificial Sequence: Synthetic oligonucleotide
uaaagaaacuaaccuauga

SEQ ID NO: 40930 - RNA, 19 nt, Artificial Sequence
  Description of Artificial Sequence: Synthetic oligonucleotide
acaguuaaguuucacacug

SEQ ID NO: 40931 - RNA, 19 nt, Artificial Sequence
  Description of Artificial Sequence: Synthetic oligonucleotide
ucuauuacuccucuaggug

SEQ ID NO: 40932 - RNA, 19 nt, Artificial Sequence
  Description of Artificial Sequence: Synthetic oligonucleotide
aauguacaguccuugauau

SEQ ID NO: 40933 - RNA, 19 nt, Artificial Sequence
  Description of Artificial Sequence: Synthetic oligonucleotide
aaauuagggaaagcuaccg

SEQ ID NO: 40934 - RNA, 19 nt, Artificial Sequence
  Description of Artificial Sequence: Synthetic oligonucleotide
uccaaagaaauuauuguuc

SEQ ID NO: 40935 - RNA, 19 nt, Artificial Sequence
  Description of Artificial Sequence: Synthetic oligonucleotide
uacgugagcugucagauug

SEQ ID NO: 40936 - RNA, 19 nt, Artificial Sequence
  Description of Artificial Sequence: Synthetic oligonucleotide
gggacuaacaugcagaaag

SEQ ID NO: 40937 - RNA, 19 nt, Artificial Sequence
  Description of Artificial Sequence: Synthetic oligonucleotide
uucauaugaaccaccaggu

SEQ ID NO: 40938 - RNA, 19 nt, Artificial Sequence
  Description of Artificial Sequence: Synthetic oligonucleotide
gacuuuagcaucccaaagc

SEQ ID NO: 40939 - RNA, 19 nt, Artificial Sequence
  Description of Artificial Sequence: Synthetic oligonucleotide
ugcauauucauaaacucau

SEQ ID NO: 40940 - RNA, 19 nt, Artificial Sequence
  Description of Artificial Sequence: Synthetic oligonucleotide
uagguuuagcuucaugaag

SEQ ID NO: 40941 - RNA, 19 nt, Artificial Sequence
  Description of Artificial Sequence: Synthetic oligonucleotide
acaauauguaagcauuaag

SEQ ID NO: 40942 - RNA, 19 nt, Artificial Sequence
  Description of Artificial Sequence: Synthetic oligonucleotide
ugugauuauggcauaugca

SEQ ID NO: 40943 - RNA, 19 nt, Artificial Sequence
  Description of Artificial Sequence: Synthetic oligonucleotide
gguaacaucuacaauagag

SEQ ID NO: 40944 - RNA, 19 nt, Artificial Sequence
  Description of Artificial Sequence: Synthetic oligonucleotide
uggguuacauccuucaugu

SEQ ID NO: 40945 - RNA, 19 nt, Artificial Sequence
  Description of Artificial Sequence: Synthetic oligonucleotide
ucaaaauuagggaaagcua

SEQ ID NO: 40946 - RNA, 19 nt, Artificial Sequence
  Description of Artificial Sequence: Synthetic oligonucleotide
auaacuaaucuaaggauag

SEQ ID NO: 40947 - RNA, 19 nt, Artificial Sequence
  Description of Artificial Sequence: Synthetic oligonucleotide
ucacuguucuguuuaaggc

SEQ ID NO: 40948 - RNA, 19 nt, Artificial Sequence
  Description of Artificial Sequence: Synthetic oligonucleotide
ucgguuuguucaaacacag

SEQ ID NO: 40949 - RNA, 19 nt, Artificial Sequence
  Description of Artificial Sequence: Synthetic oligonucleotide
uacuagaaggcuuucagau

SEQ ID NO: 40950 - RNA, 19 nt, Artificial Sequence
  Description of Artificial Sequence: Synthetic oligonucleotide
uuugagucaacugacgacu

SEQ ID NO: 40951 - RNA, 19 nt, Artificial Sequence
  Description of Artificial Sequence: Synthetic oligonucleotide
cauacgagguccuugggag

SEQ ID NO: 40952 - RNA, 19 nt, Artificial Sequence
  Description of Artificial Sequence: Synthetic oligonucleotide
ucugccucggcucaccuag

SEQ ID NO: 40953 - RNA, 19 nt, Artificial Sequence
  Description of Artificial Sequence: Synthetic oligonucleotide
auaaccauagcugaugacu

SEQ ID NO: 40954 - RNA, 19 nt, Artificial Sequence
  Description of Artificial Sequence: Synthetic oligonucleotide
caugaccuguacaauaacc

SEQ ID NO: 40955 - RNA, 19 nt, Artificial Sequence
  Description of Artificial Sequence: Synthetic oligonucleotide
ucagauaacggacagccuu

SEQ ID NO: 40956 - RNA, 19 nt, Artificial Sequence
  Description of Artificial Sequence: Synthetic oligonucleotide
aucguuugcaguuugacuu

SEQ ID NO: 40957 - RNA, 19 nt, Artificial Sequence
  Description of Artificial Sequence: Synthetic oligonucleotide
uguuaggugcuucugaaua

SEQ ID NO: 40958 - RNA, 19 nt, Artificial Sequence
  Description of Artificial Sequence: Synthetic oligonucleotide
uaaacauugauugaaccua

SEQ ID NO: 40959 - RNA, 19 nt, Artificial Sequence
  Description of Artificial Sequence: Synthetic oligonucleotide
guuagaagcuguugguacg

SEQ ID NO: 40960 - RNA, 19 nt, Artificial Sequence
  Description of Artificial Sequence: Synthetic oligonucleotide
cucgagucgauauccaucc

SEQ ID NO: 40961 - RNA, 19 nt, Artificial Sequence
  Description of Artificial Sequence: Synthetic oligonucleotide
uaccgagccauacuuuugg

SEQ ID NO: 40962 - RNA, 19 nt, Artificial Sequence
  Description of Artificial Sequence: Synthetic oligonucleotide
acggguaacaucuacaaua

SEQ ID NO: 40963 - RNA, 19 nt, Artificial Sequence
  Description of Artificial Sequence: Synthetic oligonucleotide
gaaucuuacuaaauguuac

SEQ ID NO: 40964 - RNA, 19 nt, Artificial Sequence
  Description of Artificial Sequence: Synthetic oligonucleotide
acaacucacaccuacuaga

SEQ ID NO: 40965 - RNA, 19 nt, Artificial Sequence
  Description of Artificial Sequence: Synthetic oligonucleotide
uacauaucaaucaccaauu

SEQ ID NO: 40966 - RNA, 19 nt, Artificial Sequence
  Description of Artificial Sequence: Synthetic oligonucleotide
agguuacucacagugacac

SEQ ID NO: 40967 - RNA, 19 nt, Artificial Sequence
  Description of Artificial Sequence: Synthetic oligonucleotide
caauuagagaaucaccuuc

SEQ ID NO: 40968 - RNA, 19 nt, Artificial Sequence
  Description of Artificial Sequence: Synthetic oligonucleotide
uauacacacugauggaagc

SEQ ID NO: 40969 - RNA, 19 nt, Artificial Sequence
  Description of Artificial Sequence: Synthetic oligonucleotide
acauugauugaaccuaaug

SEQ ID NO: 40970 - RNA, 19 nt, Artificial Sequence
  Description of Artificial Sequence: Synthetic oligonucleotide
acaauagagagagaccuag

SEQ ID NO: 40971 - RNA, 19 nt, Artificial Sequence
  Description of Artificial Sequence: Synthetic oligonucleotide
aaacuaaccuaugaguuaa

SEQ ID NO: 40972 - RNA, 19 nt, Artificial Sequence
  Description of Artificial Sequence: Synthetic oligonucleotide
ucgauauccauccucccac

SEQ ID NO: 40973 - RNA, 19 nt, Artificial Sequence
  Description of Artificial Sequence: Synthetic oligonucleotide
ugauuauggcauaugcagu

SEQ ID NO: 40974 - RNA, 19 nt, Artificial Sequence
  Description of Artificial Sequence: Synthetic oligonucleotide
acauguauacacuuccagu

SEQ ID NO: 40975 - RNA, 19 nt, Artificial Sequence
  Description of Artificial Sequence: Synthetic oligonucleotide
ucacuaauuccccuguagu

SEQ ID NO: 40976 - RNA, 19 nt, Artificial Sequence
  Description of Artificial Sequence: Synthetic oligonucleotide
ugauuaauagucucuuuua

SEQ ID NO: 40977 - RNA, 19 nt, Artificial Sequence
  Description of Artificial Sequence: Synthetic oligonucleotide
aaagcuaccgagccauacu

SEQ ID NO: 40978 - RNA, 19 nt, Artificial Sequence
  Description of Artificial Sequence: Synthetic oligonucleotide
accaauuagagaaucaccu

SEQ ID NO: 40979 - RNA, 19 nt, Artificial Sequence
  Description of Artificial Sequence: Synthetic oligonucleotide
ugccccaauauauuuggag

SEQ ID NO: 40980 - RNA, 19 nt, Artificial Sequence
  Description of Artificial Sequence: Synthetic oligonucleotide
gaaggcaugcuaguaacag

SEQ ID NO: 40981 - RNA, 19 nt, Artificial Sequence
  Description of Artificial Sequence: Synthetic oligonucleotide
cagugggucacuaauuccc

SEQ ID NO: 40982 - RNA, 19 nt, Artificial Sequence
  Description of Artificial Sequence: Synthetic oligonucleotide
uguuuaaggcuacuucaga

SEQ ID NO: 40983 - RNA, 19 nt, Artificial Sequence
  Description of Artificial Sequence: Synthetic oligonucleotide
acuaaucuaaggauagguc

SEQ ID NO: 40984 - RNA, 19 nt, Artificial Sequence
  Description of Artificial Sequence: Synthetic oligonucleotide
cuucaugucagcacuucag

SEQ ID NO: 40985 - RNA, 19 nt, Artificial Sequence
  Description of Artificial Sequence: Synthetic oligonucleotide
aaacaguacuagugaaugu

SEQ ID NO: 40986 - RNA, 19 nt, Artificial Sequence
  Description of Artificial Sequence: Synthetic oligonucleotide
aagaggcaagguuuaauaa

SEQ ID NO: 40987 - RNA, 19 nt, Artificial Sequence
  Description of Artificial Sequence: Synthetic oligonucleotide
aggcaugcuaguaacagac

SEQ ID NO: 40988 - RNA, 19 nt, Artificial Sequence
  Description of Artificial Sequence: Synthetic oligonucleotide
gaugcucgagucgauaucc

SEQ ID NO: 40989 - RNA, 19 nt, Artificial Sequence
  Description of Artificial Sequence: Synthetic oligonucleotide
uaacggacagccuugugcu

SEQ ID NO: 40990 - RNA, 19 nt, Artificial Sequence
  Description of Artificial Sequence: Synthetic oligonucleotide
agagaauccgguucauuug

SEQ ID NO: 40991 - RNA, 19 nt, Artificial Sequence
  Description of Artificial Sequence: Synthetic oligonucleotide
uucagaucccaugaugaag

SEQ ID NO: 40992 - RNA, 19 nt, Artificial Sequence
  Description of Artificial Sequence: Synthetic oligonucleotide
uggacuauaaacggguaac

SEQ ID NO: 40993 - RNA, 19 nt, Artificial Sequence
  Description of Artificial Sequence: Synthetic oligonucleotide
uuauuacaccaagaguucc

SEQ ID NO: 40994 - RNA, 19 nt, Artificial Sequence
  Description of Artificial Sequence: Synthetic oligonucleotide
caccaauuagagaaucacc

SEQ ID NO: 40995 - RNA, 19 nt, Artificial Sequence
  Description of Artificial Sequence: Synthetic oligonucleotide
agaucaauauuccuacaau

SEQ ID NO: 40996 - RNA, 19 nt, Artificial Sequence
  Description of Artificial Sequence: Synthetic oligonucleotide
aauaaagaggcagcuucca

SEQ ID NO: 40997 - RNA, 19 nt, Artificial Sequence
  Description of Artificial Sequence: Synthetic oligonucleotide
ucuugcauguguuuauauc

SEQ ID NO: 40998 - RNA, 19 nt, Artificial Sequence
  Description of Artificial Sequence: Synthetic oligonucleotide
gguacgaaagaauaugaca

SEQ ID NO: 40999 - RNA, 19 nt, Artificial Sequence
  Description of Artificial Sequence: Synthetic oligonucleotide
gauaucagggccuguugac

SEQ ID NO: 41000 - RNA, 19 nt, Artificial Sequence
  Description of Artificial Sequence: Synthetic oligonucleotide
cuuuagcaucccaaagccg

SEQ ID NO: 41001 - RNA, 19 nt, Artificial Sequence
  Description of Artificial Sequence: Synthetic oligonucleotide
ugguacgaaagaauaugac

SEQ ID NO: 41002 - RNA, 19 nt, Artificial Sequence
  Description of Artificial Sequence: Synthetic oligonucleotide
uagucucuuuuauuuaaga

SEQ ID NO: 41003 - RNA, 19 nt, Artificial Sequence
  Description of Artificial Sequence: Synthetic oligonucleotide
ugaucagcuauaguuagaa

SEQ ID NO: 41004 - RNA, 19 nt, Artificial Sequence
  Description of Artificial Sequence: Synthetic oligonucleotide
auuuagguuaaaccaguaa

SEQ ID NO: 41005 - RNA, 19 nt, Artificial Sequence
  Description of Artificial Sequence: Synthetic oligonucleotide
ugaccuguacaauaaccac

SEQ ID NO: 41006 - RNA, 19 nt, Artificial Sequence
  Description of Artificial Sequence: Synthetic oligonucleotide
auuugauuacugguauaac

SEQ ID NO: 41007 - RNA, 19 nt, Artificial Sequence
  Description of Artificial Sequence: Synthetic oligonucleotide
uuuggguaacaauauucuc

SEQ ID NO: 41008 - RNA, 19 nt, Artificial Sequence
  Description of Artificial Sequence: Synthetic oligonucleotide
auagagagagaccuaggaa

SEQ ID NO: 41009 - RNA, 19 nt, Artificial Sequence
  Description of Artificial Sequence: Synthetic oligonucleotide
gagucgauauccauccucc

SEQ ID NO: 41010 - RNA, 19 nt, Artificial Sequence
  Description of Artificial Sequence: Synthetic oligonucleotide
aacgccaucugucaaucua

SEQ ID NO: 41011 - RNA, 19 nt, Artificial Sequence
  Description of Artificial Sequence: Synthetic oligonucleotide
ggccuguugacauacgagg

SEQ ID NO: 41012 - RNA, 19 nt, Artificial Sequence
  Description of Artificial Sequence: Synthetic oligonucleotide
agaaacuaaccuaugaguu

SEQ ID NO: 41013 - RNA, 19 nt, Artificial Sequence
  Description of Artificial Sequence: Synthetic oligonucleotide
ucuagguguuaccauuuuc

SEQ ID NO: 41014 - RNA, 19 nt, Artificial Sequence
  Description of Artificial Sequence: Synthetic oligonucleotide
auacuagaaggcuuucaga

SEQ ID NO: 41015 - RNA, 19 nt, Artificial Sequence
  Description of Artificial Sequence: Synthetic oligonucleotide
auacgagguccuugggagc

SEQ ID NO: 41016 - RNA, 19 nt, Artificial Sequence
  Description of Artificial Sequence: Synthetic oligonucleotide
ugauuacugguauaaccau

SEQ ID NO: 41017 - RNA, 19 nt, Artificial Sequence
  Description of Artificial Sequence: Synthetic oligonucleotide
aaggaucguuugcaguuug

SEQ ID NO: 41018 - RNA, 19 nt, Artificial Sequence
  Description of Artificial Sequence: Synthetic oligonucleotide
uuagaucaauauuccuaca

SEQ ID NO: 41019 - RNA, 19 nt, Artificial Sequence
  Description of Artificial Sequence: Synthetic oligonucleotide
auauuccuacaauauguaa

SEQ ID NO: 41020 - RNA, 19 nt, Artificial Sequence
  Description of Artificial Sequence: Synthetic oligonucleotide
acagugauaccaaacccag

SEQ ID NO: 41021 - RNA, 19 nt, Artificial Sequence
  Description of Artificial Sequence: Synthetic oligonucleotide
aucaaucaccaauuagaga

SEQ ID NO: 41022 - RNA, 19 nt, Artificial Sequence
  Description of Artificial Sequence: Synthetic oligonucleotide
aguuggacuauaaacgggu

SEQ ID NO: 41023 - RNA, 19 nt, Artificial Sequence
  Description of Artificial Sequence: Synthetic oligonucleotide
uucguaacuugcccacucc

SEQ ID NO: 41024 - RNA, 19 nt, Artificial Sequence
  Description of Artificial Sequence: Synthetic oligonucleotide
guuagauauugcauuaaga

SEQ ID NO: 41025 - RNA, 19 nt, Artificial Sequence
  Description of Artificial Sequence: Synthetic oligonucleotide
cugacgacuguuucuuuag

SEQ ID NO: 41026 - RNA, 19 nt, Artificial Sequence
  Description of Artificial Sequence: Synthetic oligonucleotide
uuucguaacuugcccacuc

SEQ ID NO: 41027 - RNA, 19 nt, Artificial Sequence
  Description of Artificial Sequence: Synthetic oligonucleotide
aauaugcaaacuaguacuu

SEQ ID NO: 41028 - RNA, 19 nt, Artificial Sequence
  Description of Artificial Sequence: Synthetic oligonucleotide
auaugaaccaccagguccu

SEQ ID NO: 41029 - RNA, 19 nt, Artificial Sequence
  Description of Artificial Sequence: Synthetic oligonucleotide
aagcuaccgagccauacuu

SEQ ID NO: 41030 - RNA, 19 nt, Artificial Sequence
  Description of Artificial Sequence: Synthetic oligonucleotide
acaguacuagugaauguuc

SEQ ID NO: 41031 - RNA, 19 nt, Artificial Sequence
  Description of Artificial Sequence: Synthetic oligonucleotide
uacaauauguaagcauuaa

SEQ ID NO: 41032 - RNA, 19 nt, Artificial Sequence
  Description of Artificial Sequence: Synthetic oligonucleotide
guauaaccauagcugauga

SEQ ID NO: 41033 - RNA, 19 nt, Artificial Sequence
  Description of Artificial Sequence: Synthetic oligonucleotide
augaccuguacaauaacca

SEQ ID NO: 41034 - RNA, 19 nt, Artificial Sequence
  Description of Artificial Sequence: Synthetic oligonucleotide
caggcauugucacccacgg

SEQ ID NO: 41035 - RNA, 19 nt, Artificial Sequence
  Description of Artificial Sequence: Synthetic oligonucleotide
ucuccuagguuuagcuuca

SEQ ID NO: 41036 - RNA, 19 nt, Artificial Sequence
  Description of Artificial Sequence: Synthetic oligonucleotide
caaagcuuaggcugagcac

SEQ ID NO: 41037 - RNA, 19 nt, Artificial Sequence
  Description of Artificial Sequence: Synthetic oligonucleotide
ugcuagauaucugcuuuag

SEQ ID NO: 41038 - RNA, 19 nt, Artificial Sequence
  Description of Artificial Sequence: Synthetic oligonucleotide
ucguaacuugcccacucca

SEQ ID NO: 41039 - RNA, 19 nt, Artificial Sequence
  Description of Artificial Sequence: Synthetic oligonucleotide
ggcaagguuuaauaagugc

SEQ ID NO: 41040 - RNA, 19 nt, Artificial Sequence
  Description of Artificial Sequence: Synthetic oligonucleotide
auugccaaggcuguggaaa

SEQ ID NO: 41041 - RNA, 19 nt, Artificial Sequence
  Description of Artificial Sequence: Synthetic oligonucleotide
acagucuaccuggaggcac

SEQ ID NO: 41042 - RNA, 19 nt, Artificial Sequence
  Description of Artificial Sequence: Synthetic oligonucleotide
uuagaagcuguugguacga

SEQ ID NO: 41043 - RNA, 19 nt, Artificial Sequence
  Description of Artificial Sequence: Synthetic oligonucleotide
cagauaacggacagccuug

SEQ ID NO: 41044 - RNA, 19 nt, Artificial Sequence
  Description of Artificial Sequence: Synthetic oligonucleotide
uauuacuccucuagguguu

SEQ ID NO: 41045 - RNA, 19 nt, Artificial Sequence
  Description of Artificial Sequence: Synthetic oligonucleotide
caugcuacggaugguguag

SEQ ID NO: 41046 - RNA, 19 nt, Artificial Sequence
  Description of Artificial Sequence: Synthetic oligonucleotide
auagaaguagauacaugca

SEQ ID NO: 41047 - RNA, 19 nt, Artificial Sequence
  Description of Artificial Sequence: Synthetic oligonucleotide
cuauaguuagaagcuguug

SEQ ID NO: 41048 - RNA, 19 nt, Artificial Sequence
  Description of Artificial Sequence: Synthetic oligonucleotide
ucaugaccuguacaauaac

SEQ ID NO: 41049 - RNA, 19 nt, Artificial Sequence
  Description of Artificial Sequence: Synthetic oligonucleotide
ugacgacuguuucuuuagc

SEQ ID NO: 41050 - RNA, 19 nt, Artificial Sequence
  Description of Artificial Sequence: Synthetic oligonucleotide
auauccauccucccacagu

SEQ ID NO: 41051 - RNA, 19 nt, Artificial Sequence
  Description of Artificial Sequence: Synthetic oligonucleotide
ucaugaagccacgugcaga

SEQ ID NO: 41052 - RNA, 19 nt, Artificial Sequence
  Description of Artificial Sequence: Synthetic oligonucleotide
aacugccccaauauauuug

SEQ ID NO: 41053 - RNA, 19 nt, Artificial Sequence
  Description of Artificial Sequence: Synthetic oligonucleotide
gguauaaccauagcugaug

SEQ ID NO: 41054 - RNA, 19 nt, Artificial Sequence
  Description of Artificial Sequence: Synthetic oligonucleotide
auaugcaaacuaguacuug

SEQ ID NO: 41055 - RNA, 19 nt, Artificial Sequence
  Description of Artificial Sequence: Synthetic oligonucleotide
gaauccgguucauuuguga

SEQ ID NO: 41056 - RNA, 19 nt, Artificial Sequence
  Description of Artificial Sequence: Synthetic oligonucleotide
caucaacccagagaauccg

SEQ ID NO: 41057 - RNA, 19 nt, Artificial Sequence
  Description of Artificial Sequence: Synthetic oligonucleotide
ccuagguuuagcuucauga

SEQ ID NO: 41058 - RNA, 19 nt, Artificial Sequence
  Description of Artificial Sequence: Synthetic oligonucleotide
cuaguacuugguuacaaua

SEQ ID NO: 41059 - RNA, 19 nt, Artificial Sequence
  Description of Artificial Sequence: Synthetic oligonucleotide
gguuaaaccaguaauucaa

SEQ ID NO: 41060 - RNA, 19 nt, Artificial Sequence
  Description of Artificial Sequence: Synthetic oligonucleotide
ugagucaacugacgacugu

SEQ ID NO: 41061 - RNA, 19 nt, Artificial Sequence
  Description of Artificial Sequence: Synthetic oligonucleotide
aacuaguacuugguuacaa

SEQ ID NO: 41062 - RNA, 19 nt, Artificial Sequence
  Description of Artificial Sequence: Synthetic oligonucleotide
ugguauaaccauagcugau

SEQ ID NO: 41063 - RNA, 19 nt, Artificial Sequence
  Description of Artificial Sequence: Synthetic oligonucleotide
caucugucaaucuauagau

SEQ ID NO: 41064 - RNA, 19 nt, Artificial Sequence
  Description of Artificial Sequence: Synthetic oligonucleotide
auaaagaggcagcuuccaa

SEQ ID NO: 41065 - RNA, 19 nt, Artificial Sequence
  Description of Artificial Sequence: Synthetic oligonucleotide
cagauugccaaggcugugg

SEQ ID NO: 41066 - RNA, 19 nt, Artificial Sequence
  Description of Artificial Sequence: Synthetic oligonucleotide
cuagguuuagcuucaugaa

SEQ ID NO: 41067 - RNA, 19 nt, Artificial Sequence
  Description of Artificial Sequence: Synthetic oligonucleotide
gaaagcuaccgagccauac

SEQ ID NO: 41068 - RNA, 19 nt, Artificial Sequence
  Description of Artificial Sequence: Synthetic oligonucleotide
acuaaccuaugaguuaaga

SEQ ID NO: 41069 - RNA, 19 nt, Artificial Sequence
  Description of Artificial Sequence: Synthetic oligonucleotide
uucagauaacggacagccu

SEQ ID NO: 41070 - RNA, 19 nt, Artificial Sequence
  Description of Artificial Sequence: Synthetic oligonucleotide
cuauccauggaguuacaaa

SEQ ID NO: 41071 - RNA, 19 nt, Artificial Sequence
  Description of Artificial Sequence: Synthetic oligonucleotide
uccucuagguguuaccauu

SEQ ID NO: 41072 - RNA, 19 nt, Artificial Sequence
  Description of Artificial Sequence: Synthetic oligonucleotide
ugaugcucgagucgauauc

SEQ ID NO: 41073 - RNA, 19 nt, Artificial Sequence
  Description of Artificial Sequence: Synthetic oligonucleotide
caugcaccugagcaugacc

SEQ ID NO: 41074 - RNA, 19 nt, Artificial Sequence
  Description of Artificial Sequence: Synthetic oligonucleotide
auauuuggagcuguggcua

SEQ ID NO: 41075 - RNA, 19 nt, Artificial Sequence
  Description of Artificial Sequence: Synthetic oligonucleotide
uccuagguuuagcuucaug

SEQ ID NO: 41076 - RNA, 19 nt, Artificial Sequence
  Description of Artificial Sequence: Synthetic oligonucleotide
cuaggaacgccaucuguca

SEQ ID NO: 41077 - RNA, 19 nt, Artificial Sequence
  Description of Artificial Sequence: Synthetic oligonucleotide
ccuacuagaaacagacaug

SEQ ID NO: 41078 - RNA, 19 nt, Artificial Sequence
  Description of Artificial Sequence: Synthetic oligonucleotide
caugcuagauucacaaucu

SEQ ID NO: 41079 - RNA, 19 nt, Artificial Sequence
  Description of Artificial Sequence: Synthetic oligonucleotide
cuugugauuauggcauaug

SEQ ID NO: 41080 - RNA, 19 nt, Artificial Sequence
  Description of Artificial Sequence: Synthetic oligonucleotide
aaacuaguacuugguuaca

SEQ ID NO: 41081 - RNA, 19 nt, Artificial Sequence
  Description of Artificial Sequence: Synthetic oligonucleotide
uguccuuuuaaaggaucgu

SEQ ID NO: 41082 - RNA, 19 nt, Artificial Sequence
  Description of Artificial Sequence: Synthetic oligonucleotide
gugaaacaguacuagugaa

SEQ ID NO: 41083 - RNA, 19 nt, Artificial Sequence
  Description of Artificial Sequence: Synthetic oligonucleotide
gauaacggacagccuugug

SEQ ID NO: 41084 - RNA, 19 nt, Artificial Sequence
  Description of Artificial Sequence: Synthetic oligonucleotide
uuccuacaauauguaagca

SEQ ID NO: 41085 - RNA, 19 nt, Artificial Sequence
  Description of Artificial Sequence: Synthetic oligonucleotide
caccugagcaugaccaaac

SEQ ID NO: 41086 - RNA, 19 nt, Artificial Sequence
  Description of Artificial Sequence: Synthetic oligonucleotide
cacuucaagcaaagcuuag

SEQ ID NO: 41087 - RNA, 19 nt, Artificial Sequence
  Description of Artificial Sequence: Synthetic oligonucleotide
ggacaauagccuucaauuc

SEQ ID NO: 41088 - RNA, 19 nt, Artificial Sequence
  Description of Artificial Sequence: Synthetic oligonucleotide
caaccaguuaguuggacua

SEQ ID NO: 41089 - RNA, 19 nt, Artificial Sequence
  Description of Artificial Sequence: Synthetic oligonucleotide
uauaguucuaaaggcuauu

SEQ ID NO: 41090 - RNA, 19 nt, Artificial Sequence
  Description of Artificial Sequence: Synthetic oligonucleotide
auacagaugaaggcaugcu

SEQ ID NO: 41091 - RNA, 19 nt, Artificial Sequence
  Description of Artificial Sequence: Synthetic oligonucleotide
cuaaggauaggucaguguu

SEQ ID NO: 41092 - RNA, 19 nt, Artificial Sequence
  Description of Artificial Sequence: Synthetic oligonucleotide
uacgagguccuugggagcu

SEQ ID NO: 41093 - RNA, 19 nt, Artificial Sequence
  Description of Artificial Sequence: Synthetic oligonucleotide
ggacuaacaugcagaaagg

SEQ ID NO: 41094 - RNA, 19 nt, Artificial Sequence
  Description of Artificial Sequence: Synthetic oligonucleotide
cagucuaccuggaggcacc

SEQ ID NO: 41095 - RNA, 19 nt, Artificial Sequence
  Description of Artificial Sequence: Synthetic oligonucleotide
aucuaaggauaggucagug

SEQ ID NO: 41096 - RNA, 19 nt, Artificial Sequence
  Description of Artificial Sequence: Synthetic oligonucleotide
aacuugugauuauggcaua

SEQ ID NO: 41097 - RNA, 19 nt, Artificial Sequence
  Description of Artificial Sequence: Synthetic oligonucleotide
aacggacagccuugugcug

SEQ ID NO: 41098 - RNA, 19 nt, Artificial Sequence
  Description of Artificial Sequence: Synthetic oligonucleotide
gaggcggauagaugcagga

SEQ ID NO: 41099 - RNA, 19 nt, Artificial Sequence
  Description of Artificial Sequence: Synthetic oligonucleotide
ucucuuaaacaggcuacuc

SEQ ID NO: 41100 - RNA, 19 nt, Artificial Sequence
  Description of Artificial Sequence: Synthetic oligonucleotide
gauuacugguauaaccaua

SEQ ID NO: 41101 - RNA, 19 nt, Artificial Sequence
  Description of Artificial Sequence: Synthetic oligonucleotide
cugaaauagacaaccaguu

SEQ ID NO: 41102 - RNA, 19 nt, Artificial Sequence
  Description of Artificial Sequence: Synthetic oligonucleotide
cuaaccuaugaguuaagau

SEQ ID NO: 41103 - RNA, 19 nt, Artificial Sequence
  Description of Artificial Sequence: Synthetic oligonucleotide
aggaacgccaucugucaau

SEQ ID NO: 41104 - RNA, 19 nt, Artificial Sequence
  Description of Artificial Sequence: Synthetic oligonucleotide
cagggagucugguucauga

SEQ ID NO: 41105 - RNA, 19 nt, Artificial Sequence
  Description of Artificial Sequence: Synthetic oligonucleotide
cucuauuacuccucuaggu

SEQ ID NO: 41106 - RNA, 19 nt, Artificial Sequence
  Description of Artificial Sequence: Synthetic oligonucleotide
gcuuugagucaacugacga

SEQ ID NO: 41107 - RNA, 19 nt, Artificial Sequence
  Description of Artificial Sequence: Synthetic oligonucleotide
uaaggcuacuucagauaua

SEQ ID NO: 41108 - RNA, 19 nt, Artificial Sequence
  Description of Artificial Sequence: Synthetic oligonucleotide
agcaugacaugcggacugg

SEQ ID NO: 41109 - RNA, 19 nt, Artificial Sequence
  Description of Artificial Sequence: Synthetic oligonucleotide
ggacacaacaacagguuac

SEQ ID NO: 41110 - RNA, 19 nt, Artificial Sequence
  Description of Artificial Sequence: Synthetic oligonucleotide
ccuaggaacgccaucuguc

SEQ ID NO: 41111 - RNA, 19 nt, Artificial Sequence
  Description of Artificial Sequence: Synthetic oligonucleotide
ugcaugcuagauucacaau

SEQ ID NO: 41112 - RNA, 19 nt, Artificial Sequence
  Description of Artificial Sequence: Synthetic oligonucleotide
agggaggguucuugcaugu

SEQ ID NO: 41113 - RNA, 19 nt, Artificial Sequence
  Description of Artificial Sequence: Synthetic oligonucleotide
ugcucgagucgauauccau

SEQ ID NO: 41114 - RNA, 19 nt, Artificial Sequence
  Description of Artificial Sequence: Synthetic oligonucleotide
ucucugggacuaacaugca

SEQ ID NO: 41115 - RNA, 19 nt, Artificial Sequence
  Description of Artificial Sequence: Synthetic oligonucleotide
uuacuccucuagguguuac

SEQ ID NO: 41116 - RNA, 19 nt, Artificial Sequence
  Description of Artificial Sequence: Synthetic oligonucleotide
uagaggcuuugagucaacu

SEQ ID NO: 41117 - RNA, 19 nt, Artificial Sequence
  Description of Artificial Sequence: Synthetic oligonucleotide
cucggcucaccuagaggag

SEQ ID NO: 41118 - RNA, 19 nt, Artificial Sequence
  Description of Artificial Sequence: Synthetic oligonucleotide
guuaucccagccucuacgu

SEQ ID NO: 41119 - RNA, 19 nt, Artificial Sequence
  Description of Artificial Sequence: Synthetic oligonucleotide
cggguaacaucuacaauag

SEQ ID NO: 41120 - RNA, 19 nt, Artificial Sequence
  Description of Artificial Sequence: Synthetic oligonucleotide
aggcaagguuuaauaagug

SEQ ID NO: 41121 - RNA, 19 nt, Artificial Sequence
  Description of Artificial Sequence: Synthetic oligonucleotide
acuugugauuauggcauau

SEQ ID NO: 41122 - RNA, 19 nt, Artificial Sequence
  Description of Artificial Sequence: Synthetic oligonucleotide
cugggacuaacaugcagaa

SEQ ID NO: 41123 - RNA, 19 nt, Artificial Sequence
  Description of Artificial Sequence: Synthetic oligonucleotide
gagagaccuaggaacgcca

SEQ ID NO: 41124 - RNA, 19 nt, Artificial Sequence
  Description of Artificial Sequence: Synthetic oligonucleotide
aacugacgacuguuucuuu

SEQ ID NO: 41125 - RNA, 19 nt, Artificial Sequence
  Description of Artificial Sequence: Synthetic oligonucleotide
gacuauaaacggguaacau

SEQ ID NO: 41126 - RNA, 19 nt, Artificial Sequence
  Description of Artificial Sequence: Synthetic oligonucleotide
ccucggcucaccuagagga

SEQ ID NO: 41127 - RNA, 19 nt, Artificial Sequence
  Description of Artificial Sequence: Synthetic oligonucleotide
uaauuccccuguaguuaaa

SEQ ID NO: 41128 - RNA, 19 nt, Artificial Sequence
  Description of Artificial Sequence: Synthetic oligonucleotide
cuguugaaaguuacacuua

SEQ ID NO: 41129 - RNA, 19 nt, Artificial Sequence
  Description of Artificial Sequence: Synthetic oligonucleotide
agauaacggacagccuugu

SEQ ID NO: 41130 - RNA, 19 nt, Artificial Sequence
  Description of Artificial Sequence: Synthetic oligonucleotide
acagucagugggucacuaa

SEQ ID NO: 41131 - RNA, 19 nt, Artificial Sequence
  Description of Artificial Sequence: Synthetic oligonucleotide
ugcccaucgccugugcuaa

SEQ ID NO: 41132 - RNA, 19 nt, Artificial Sequence
  Description of Artificial Sequence: Synthetic oligonucleotide
augaucccuguugaaaguu

SEQ ID NO: 41133 - RNA, 19 nt, Artificial Sequence
  Description of Artificial Sequence: Synthetic oligonucleotide
auagaggcuuugagucaac

SEQ ID NO: 41134 - RNA, 19 nt, Artificial Sequence
  Description of Artificial Sequence: Synthetic oligonucleotide
agaauccgguucauuugug

SEQ ID NO: 41135 - RNA, 19 nt, Artificial Sequence
  Description of Artificial Sequence: Synthetic oligonucleotide
gccgacaucagagaugcuc

SEQ ID NO: 41136 - RNA, 19 nt, Artificial Sequence
  Description of Artificial Sequence: Synthetic oligonucleotide
ggaucguuugcaguuugac

SEQ ID NO: 41137 - RNA, 19 nt, Artificial Sequence
  Description of Artificial Sequence: Synthetic oligonucleotide
caguuaguuggacuauaaa

SEQ ID NO: 41138 - RNA, 19 nt, Artificial Sequence
  Description of Artificial Sequence: Synthetic oligonucleotide
auccaguugugaguguaaa

SEQ ID NO: 41139 - RNA, 19 nt, Artificial Sequence
  Description of Artificial Sequence: Synthetic oligonucleotide
cucaggcauugucacccac

SEQ ID NO: 41140 - RNA, 19 nt, Artificial Sequence
  Description of Artificial Sequence: Synthetic oligonucleotide
ugggacuaacaugcagaaa

SEQ ID NO: 41141 - RNA, 19 nt, Artificial Sequence
  Description of Artificial Sequence: Synthetic oligonucleotide
agaaggcuuucagauucau

SEQ ID NO: 41142 - RNA, 19 nt, Artificial Sequence
  Description of Artificial Sequence: Synthetic oligonucleotide
gcuagauaucugcuuuaga

SEQ ID NO: 41143 - RNA, 19 nt, Artificial Sequence
  Description of Artificial Sequence: Synthetic oligonucleotide
gggccuguugacauacgag

SEQ ID NO: 41144 - RNA, 19 nt, Artificial Sequence
  Description of Artificial Sequence: Synthetic oligonucleotide
uagcuucaugaagccacgu

SEQ ID NO: 41145 - RNA, 19 nt, Artificial Sequence
  Description of Artificial Sequence: Synthetic oligonucleotide
accuaugaguuaagaugcu

SEQ ID NO: 41146 - RNA, 19 nt, Artificial Sequence
  Description of Artificial Sequence: Synthetic oligonucleotide
aucaggcuauuuguggcua

SEQ ID NO: 41147 - RNA, 19 nt, Artificial Sequence
  Description of Artificial Sequence: Synthetic oligonucleotide
caaucacaugcaaggaaau

SEQ ID NO: 41148 - RNA, 19 nt, Artificial Sequence
  Description of Artificial Sequence: Synthetic oligonucleotide
gcuacggaugguguaggac

SEQ ID NO: 41149 - RNA, 19 nt, Artificial Sequence
  Description of Artificial Sequence: Synthetic oligonucleotide
gccucggcucaccuagagg

SEQ ID NO: 41150 - RNA, 19 nt, Artificial Sequence
  Description of Artificial Sequence: Synthetic oligonucleotide
ggaacgccaucugucaauc

SEQ ID NO: 41151 - RNA, 19 nt, Artificial Sequence
  Description of Artificial Sequence: Synthetic oligonucleotide
gagucaacugacgacuguu

SEQ ID NO: 41152 - RNA, 19 nt, Artificial Sequence
  Description of Artificial Sequence: Synthetic oligonucleotide
gcggauagaugcaggagca

SEQ ID NO: 41153 - RNA, 19 nt, Artificial Sequence
  Description of Artificial Sequence: Synthetic oligonucleotide
guuggacuauaaacgggua

SEQ ID NO: 41154 - RNA, 19 nt, Artificial Sequence
  Description of Artificial Sequence: Synthetic oligonucleotide
aggaucguuugcaguuuga

SEQ ID NO: 41155 - RNA, 19 nt, Artificial Sequence
  Description of Artificial Sequence: Synthetic oligonucleotide
gccucgguuuguucaaaca

SEQ ID NO: 41156 - RNA, 19 nt, Artificial Sequence
  Description of Artificial Sequence: Synthetic oligonucleotide
cauuuggagcagcacacuu

SEQ ID NO: 41157 - RNA, 19 nt, Artificial Sequence
  Description of Artificial Sequence: Synthetic oligonucleotide
auuacuccucuagguguua

SEQ ID NO: 41158 - RNA, 19 nt, Artificial Sequence
  Description of Artificial Sequence: Synthetic oligonucleotide
ccccaauauauuuggagcu

SEQ ID NO: 41159 - RNA, 19 nt, Artificial Sequence
  Description of Artificial Sequence: Synthetic oligonucleotide
auauuccuugacagacuuu

SEQ ID NO: 41160 - RNA, 19 nt, Artificial Sequence
  Description of Artificial Sequence: Synthetic oligonucleotide
ggacggacaauagccuuca

SEQ ID NO: 41161 - RNA, 19 nt, Artificial Sequence
  Description of Artificial Sequence: Synthetic oligonucleotide
ccaguuaguuggacuauaa

SEQ ID NO: 41162 - RNA, 19 nt, Artificial Sequence
  Description of Artificial Sequence: Synthetic oligonucleotide
gggaaagcuaccgagccau

SEQ ID NO: 41163 - RNA, 19 nt, Artificial Sequence
  Description of Artificial Sequence: Synthetic oligonucleotide
augcucgagucgauaucca

SEQ ID NO: 41164 - RNA, 19 nt, Artificial Sequence
  Description of Artificial Sequence: Synthetic oligonucleotide
guguuaggugcuucugaau

SEQ ID NO: 41165 - RNA, 19 nt, Artificial Sequence
  Description of Artificial Sequence: Synthetic oligonucleotide
cggacaauagccuucaauu

SEQ ID NO: 41166 - RNA, 19 nt, Artificial Sequence
  Description of Artificial Sequence: Synthetic oligonucleotide
cccaucgccugugcuaagg

SEQ ID NO: 41167 - RNA, 19 nt, Artificial Sequence
  Description of Artificial Sequence: Synthetic oligonucleotide
gaacgccaucugucaaucu

SEQ ID NO: 41168 - RNA, 19 nt, Artificial Sequence
  Description of Artificial Sequence: Synthetic oligonucleotide
cgagccauacuuuugguau

SEQ ID NO: 41169 - RNA, 19 nt, Artificial Sequence
  Description of Artificial Sequence: Synthetic oligonucleotide
gcuauccauggaguuacaa

SEQ ID NO: 41170 - RNA, 19 nt, Artificial Sequence
  Description of Artificial Sequence: Synthetic oligonucleotide
gcugccucgguuuguucaa

SEQ ID NO: 41171 - RNA, 19 nt, Artificial Sequence
  Description of Artificial Sequence: Synthetic oligonucleotide
gacggacaauagccuucaa

SEQ ID NO: 41172 - RNA, 19 nt, Artificial Sequence
  Description of Artificial Sequence: Synthetic oligonucleotide
cuuucguaacuugcccacu

SEQ ID NO: 41173 - RNA, 19 nt, Artificial Sequence
  Description of Artificial Sequence: Synthetic oligonucleotide
ggguuacauccuucauguc

SEQ ID NO: 41174 - RNA, 19 nt, Artificial Sequence
  Description of Artificial Sequence: Synthetic oligonucleotide
cuccucuagguguuaccau

SEQ ID NO: 41175 - RNA, 19 nt, Artificial Sequence
  Description of Artificial Sequence: Synthetic oligonucleotide
ccaauuagagaaucaccuu

SEQ ID NO: 41176 - RNA, 19 nt, Artificial Sequence
  Description of Artificial Sequence: Synthetic oligonucleotide
gguucaugaccuguacaau

SEQ ID NO: 41177 - RNA, 19 nt, Artificial Sequence
  Description of Artificial Sequence: Synthetic oligonucleotide
aggcuacuucagauauaaa

SEQ ID NO: 41178 - RNA, 19 nt, Artificial Sequence
  Description of Artificial Sequence: Synthetic oligonucleotide
ccgagccauacuuuuggua

SEQ ID NO: 41179 - RNA, 19 nt, Artificial Sequence
  Description of Artificial Sequence: Synthetic oligonucleotide
ggggacggacaauagccuu

SEQ ID NO: 41180 - RNA, 19 nt, Artificial Sequence
  Description of Artificial Sequence: Synthetic oligonucleotide
cuacgugagcugucagauu

SEQ ID NO: 41181 - RNA, 19 nt, Artificial Sequence
  Description of Artificial Sequence: Synthetic oligonucleotide
ggcaugcuaguaacagacu

SEQ ID NO: 41182 - RNA, 19 nt, Artificial Sequence
  Description of Artificial Sequence: Synthetic oligonucleotide
cacggugugaagggucccu

SEQ ID NO: 41183 - RNA, 19 nt, Artificial Sequence
  Description of Artificial Sequence: Synthetic oligonucleotide
caucugccucggcucaccu

SEQ ID NO: 41184 - RNA, 19 nt, Artificial Sequence
  Description of Artificial Sequence: Synthetic oligonucleotide
caggcuauuuguggcuaau

SEQ ID NO: 41185 - RNA, 19 nt, Artificial Sequence
  Description of Artificial Sequence: Synthetic oligonucleotide
acgagguccuugggagcuu

SEQ ID NO: 41186 - RNA, 19 nt, Artificial Sequence
  Description of Artificial Sequence: Synthetic oligonucleotide
ccucuagguguuaccauuu

SEQ ID NO: 41187 - RNA, 19 nt, Artificial Sequence
  Description of Artificial Sequence: Synthetic oligonucleotide
cggcucaccuagaggagca

SEQ ID NO: 41188 - RNA, 19 nt, Artificial Sequence
  Description of Artificial Sequence: Synthetic oligonucleotide
cguaacuugcccacuccau

SEQ ID NO: 41189 - RNA, 19 nt, Artificial Sequence
  Description of Artificial Sequence: Synthetic oligonucleotide
ccugaugcucgagucgaua

SEQ ID NO: 41190 - RNA, 19 nt, Artificial Sequence
  Description of Artificial Sequence: Synthetic oligonucleotide
ggaaagcuaccgagccaua

SEQ ID NO: 41191 - RNA, 19 nt, Artificial Sequence
  Description of Artificial Sequence: Synthetic oligonucleotide
cgguucauuugugaagugu

SEQ ID NO: 41192 - RNA, 19 nt, Artificial Sequence
  Description of Artificial Sequence: Synthetic oligonucleotide
agccgacaucagagaugcu

SEQ ID NO: 41193 - RNA, 19 nt, Artificial Sequence
  Description of Artificial Sequence: Synthetic oligonucleotide
aauaauaagcaacagaacc

SEQ ID NO: 41194 - RNA, 19 nt, Artificial Sequence
  Description of Artificial Sequence: Synthetic oligonucleotide
aaaauauucacgcauccac

SEQ ID NO: 41195 - RNA, 19 nt, Artificial Sequence
  Description of Artificial Sequence: Synthetic oligonucleotide
aguaagaguaacuuguucc

SEQ ID NO: 41196 - RNA, 19 nt, Artificial Sequence
  Description of Artificial Sequence: Synthetic oligonucleotide
auuauaaucuagcaucgcc

SEQ ID NO: 41197 - RNA, 19 nt, Artificial Sequence
  Description of Artificial Sequence: Synthetic oligonucleotide
uaaacaagagagaagggcc

SEQ ID NO: 41198 - RNA, 19 nt, Artificial Sequence
  Description of Artificial Sequence: Synthetic oligonucleotide
ugaaaguggucuaacaucc

SEQ ID NO: 41199 - RNA, 19 nt, Artificial Sequence
  Description of Artificial Sequence: Synthetic oligonucleotide
acguauauauuuuauuugg

SEQ ID NO: 41200 - RNA, 19 nt, Artificial Sequence
  Description of Artificial Sequence: Synthetic oligonucleotide
aauauucacgcauccacag

SEQ ID NO: 41201 - RNA, 19 nt, Artificial Sequence
  Description of Artificial Sequence: Synthetic oligonucleotide
augugauacauauguaugc

SEQ ID NO: 41202 - RNA, 19 nt, Artificial Sequence
  Description of Artificial Sequence: Synthetic oligonucleotide
aauaaccccacauugagua

SEQ ID NO: 41203 - RNA, 19 nt, Artificial Sequence
  Description of Artificial Sequence: Synthetic oligonucleotide
acuuaucucgcccagcccc

SEQ ID NO: 41204 - RNA, 19 nt, Artificial Sequence
  Description of Artificial Sequence: Synthetic oligonucleotide
uauugaauacaccuuggcc

SEQ ID NO: 41205 - RNA, 19 nt, Artificial Sequence
  Description of Artificial Sequence: Synthetic oligonucleotide
uaugugauacauauguaug

SEQ ID NO: 41206 - RNA, 19 nt, Artificial Sequence
  Description of Artificial Sequence: Synthetic oligonucleotide
uuauaaucuagcaucgcca

SEQ ID NO: 41207 - RNA, 19 nt, Artificial Sequence
  Description of Artificial Sequence: Synthetic oligonucleotide
aaaugguacguauauauuu

SEQ ID NO: 41208 - RNA, 19 nt, Artificial Sequence
  Description of Artificial Sequence: Synthetic oligonucleotide
agauucuuaauuugggguc

SEQ ID NO: 41209 - RNA, 19 nt, Artificial Sequence
  Description of Artificial Sequence: Synthetic oligonucleotide
aguggcugcacuuaucucg

SEQ ID NO: 41210 - RNA, 19 nt, Artificial Sequence
  Description of Artificial Sequence: Synthetic oligonucleotide
gacauaucgacaaugaaac

SEQ ID NO: 41211 - RNA, 19 nt, Artificial Sequence
  Description of Artificial Sequence: Synthetic oligonucleotide
acagauacuucauacucgg

SEQ ID NO: 41212 - RNA, 19 nt, Artificial Sequence
  Description of Artificial Sequence: Synthetic oligonucleotide
aaguauucugacagaaugc

SEQ ID NO: 41213 - RNA, 19 nt, Artificial Sequence
  Description of Artificial Sequence: Synthetic oligonucleotide
aacggaguguccuaguuug

SEQ ID NO: 41214 - RNA, 19 nt, Artificial Sequence
  Description of Artificial Sequence: Synthetic oligonucleotide
gagagagagagauuugggg

SEQ ID NO: 41215 - RNA, 19 nt, Artificial Sequence
  Description of Artificial Sequence: Synthetic oligonucleotide
aacuaucugcuauaccuuc

SEQ ID NO: 41216 - RNA, 19 nt, Artificial Sequence
  Description of Artificial Sequence: Synthetic oligonucleotide
cucaaaaggaaaugguacg

SEQ ID NO: 41217 - RNA, 19 nt, Artificial Sequence
  Description of Artificial Sequence: Synthetic oligonucleotide
gauuguggcacuuggguag

SEQ ID NO: 41218 - RNA, 19 nt, Artificial Sequence
  Description of Artificial Sequence: Synthetic oligonucleotide
aagagagagagagauuugg

SEQ ID NO: 41219 - RNA, 19 nt, Artificial Sequence
  Description of Artificial Sequence: Synthetic oligonucleotide
uucgccaugugcuaaaagc

SEQ ID NO: 41220 - RNA, 19 nt, Artificial Sequence
  Description of Artificial Sequence: Synthetic oligonucleotide
aaacaagagagaagggccc

SEQ ID NO: 41221 - RNA, 19 nt, Artificial Sequence
  Description of Artificial Sequence: Synthetic oligonucleotide
agugucagaacauuggggu

SEQ ID NO: 41222 - RNA, 19 nt, Artificial Sequence
  Description of Artificial Sequence: Synthetic oligonucleotide
aaaucauuccacaagggga

SEQ ID NO: 41223 - RNA, 19 nt, Artificial Sequence
  Description of Artificial Sequence: Synthetic oligonucleotide
gacacuagaggaaugagug

SEQ ID NO: 41224 - RNA, 19 nt, Artificial Sequence
  Description of Artificial Sequence: Synthetic oligonucleotide
uagauucuuaauuuggggu

SEQ ID NO: 41225 - RNA, 19 nt, Artificial Sequence
  Description of Artificial Sequence: Synthetic oligonucleotide
aauguugccuaagugaaca

SEQ ID NO: 41226 - RNA, 19 nt, Artificial Sequence
  Description of Artificial Sequence: Synthetic oligonucleotide
ucaguuaguacucaguauu

SEQ ID NO: 41227 - RNA, 19 nt, Artificial Sequence
  Description of Artificial Sequence: Synthetic oligonucleotide
uuugcuuguugcuagguac

SEQ ID NO: 41228 - RNA, 19 nt, Artificial Sequence
  Description of Artificial Sequence: Synthetic oligonucleotide
guguguaagagagagagag

SEQ ID NO: 41229 - RNA, 19 nt, Artificial Sequence
  Description of Artificial Sequence: Synthetic oligonucleotide
uuuuguuuguguggcaucg

SEQ ID NO: 41230 - RNA, 19 nt, Artificial Sequence
  Description of Artificial Sequence: Synthetic oligonucleotide
aagaguaacuuguuccucu

SEQ ID NO: 41231 - RNA, 19 nt, Artificial Sequence
  Description of Artificial Sequence: Synthetic oligonucleotide
uggaguaugguuccacccg

SEQ ID NO: 41232 - RNA, 19 nt, Artificial Sequence
  Description of Artificial Sequence: Synthetic oligonucleotide
aacuggucgaguccauccc

SEQ ID NO: 41233 - RNA, 19 nt, Artificial Sequence
  Description of Artificial Sequence: Synthetic oligonucleotide
aagggagccggauuucugg

SEQ ID NO: 41234 - RNA, 19 nt, Artificial Sequence
  Description of Artificial Sequence: Synthetic oligonucleotide
ugcuagguacccaucaugc

SEQ ID NO: 41235 - RNA, 19 nt, Artificial Sequence
  Description of Artificial Sequence: Synthetic oligonucleotide
agaacauuggggugugugg

SEQ ID NO: 41236 - RNA, 19 nt, Artificial Sequence
  Description of Artificial Sequence: Synthetic oligonucleotide
ucacuuuacuucaacagau

SEQ ID NO: 41237 - RNA, 19 nt, Artificial Sequence
  Description of Artificial Sequence: Synthetic oligonucleotide
uaaucuagcaucgccacug

SEQ ID NO: 41238 - RNA, 19 nt, Artificial Sequence
  Description of Artificial Sequence: Synthetic oligonucleotide
aagcuugcgguucuaaagu

SEQ ID NO: 41239 - RNA, 19 nt, Artificial Sequence
  Description of Artificial Sequence: Synthetic oligonucleotide
uguauaccuugucucaggc

SEQ ID NO: 41240 - RNA, 19 nt, Artificial Sequence
  Description of Artificial Sequence: Synthetic oligonucleotide
uacauaggugauuuugggc

SEQ ID NO: 41241 - RNA, 19 nt, Artificial Sequence
  Description of Artificial Sequence: Synthetic oligonucleotide
uaugguuccacccggucga

SEQ ID NO: 41242 - RNA, 19 nt, Artificial Sequence
  Description of Artificial Sequence: Synthetic oligonucleotide
agucguacuguauaccuug

SEQ ID NO: 41243 - RNA, 19 nt, Artificial Sequence
  Description of Artificial Sequence: Synthetic oligonucleotide
caaaauucucaguuaguac

SEQ ID NO: 41244 - RNA, 19 nt, Artificial Sequence
  Description of Artificial Sequence: Synthetic oligonucleotide
uacgacauaucgacaauga

SEQ ID NO: 41245 - RNA, 19 nt, Artificial Sequence
  Description of Artificial Sequence: Synthetic oligonucleotide
uguacacagccacugggcc

SEQ ID NO: 41246 - RNA, 19 nt, Artificial Sequence
  Description of Artificial Sequence: Synthetic oligonucleotide
augcagacgguacucgagc

SEQ ID NO: 41247 - RNA, 19 nt, Artificial Sequence
  Description of Artificial Sequence: Synthetic oligonucleotide
aucgccacugaucacacug

SEQ ID NO: 41248 - RNA, 19 nt, Artificial Sequence
  Description of Artificial Sequence: Synthetic oligonucleotide
uguaaccuucgccaugugc

SEQ ID NO: 41249 - RNA, 19 nt, Artificial Sequence
  Description of Artificial Sequence: Synthetic oligonucleotide
gacucaucuuucgagaaag

SEQ ID NO: 41250 - RNA, 19 nt, Artificial Sequence
  Description of Artificial Sequence: Synthetic oligonucleotide
uuucggugaguucuccagg

SEQ ID NO: 41251 - RNA, 19 nt, Artificial Sequence
  Description of Artificial Sequence: Synthetic oligonucleotide
aacagaaggccgaugucac

SEQ ID NO: 41252 - RNA, 19 nt, Artificial Sequence
  Description of Artificial Sequence: Synthetic oligonucleotide
caagcuugcgguucuaaag

SEQ ID NO: 41253 - RNA, 19 nt, Artificial Sequence
  Description of Artificial Sequence: Synthetic oligonucleotide
agggguuaccuccagguag

SEQ ID NO: 41254 - RNA, 19 nt, Artificial Sequence
  Description of Artificial Sequence: Synthetic oligonucleotide
cugaaaguggucuaacauc

SEQ ID NO: 41255 - RNA, 19 nt, Artificial Sequence
  Description of Artificial Sequence: Synthetic oligonucleotide
guguguguguguaagagag

SEQ ID NO: 41256 - RNA, 19 nt, Artificial Sequence
  Description of Artificial Sequence: Synthetic oligonucleotide
cuauugaauacaccuuggc

SEQ ID NO: 41257 - RNA, 19 nt, Artificial Sequence
  Description of Artificial Sequence: Synthetic oligonucleotide
uccacaaccaaacuauguu

SEQ ID NO: 41258 - RNA, 19 nt, Artificial Sequence
  Description of Artificial Sequence: Synthetic oligonucleotide
aguauucugacagaaugca

SEQ ID NO: 41259 - RNA, 19 nt, Artificial Sequence
  Description of Artificial Sequence: Synthetic oligonucleotide
ugggagguuccauagaaaa

SEQ ID NO: 41260 - RNA, 19 nt, Artificial Sequence
  Description of Artificial Sequence: Synthetic oligonucleotide
cacaaguaagaguaacuug

SEQ ID NO: 41261 - RNA, 19 nt, Artificial Sequence
  Description of Artificial Sequence: Synthetic oligonucleotide
uccgucaugguuuggaguc

SEQ ID NO: 41262 - RNA, 19 nt, Artificial Sequence
  Description of Artificial Sequence: Synthetic oligonucleotide
ucuggcucaucaaacugca

SEQ ID NO: 41263 - RNA, 19 nt, Artificial Sequence
  Description of Artificial Sequence: Synthetic oligonucleotide
aaguacggaaugcuagggu

SEQ ID NO: 41264 - RNA, 19 nt, Artificial Sequence
  Description of Artificial Sequence: Synthetic oligonucleotide
uuauuuggcuuucuacaaa

SEQ ID NO: 41265 - RNA, 19 nt, Artificial Sequence
  Description of Artificial Sequence: Synthetic oligonucleotide
gaaguacggaaugcuaggg

SEQ ID NO: 41266 - RNA, 19 nt, Artificial Sequence
  Description of Artificial Sequence: Synthetic oligonucleotide
uguucggaccuccacgaug

SEQ ID NO: 41267 - RNA, 19 nt, Artificial Sequence
  Description of Artificial Sequence: Synthetic oligonucleotide
ugugcaacaaaaggagccc

SEQ ID NO: 41268 - RNA, 19 nt, Artificial Sequence
  Description of Artificial Sequence: Synthetic oligonucleotide
aaauguugccuaagugaac

SEQ ID NO: 41269 - RNA, 19 nt, Artificial Sequence
  Description of Artificial Sequence: Synthetic oligonucleotide
gaucuugauauugcuguag

SEQ ID NO: 41270 - RNA, 19 nt, Artificial Sequence
  Description of Artificial Sequence: Synthetic oligonucleotide
aaugguacguauauauuuu

SEQ ID NO: 41271 - RNA, 19 nt, Artificial Sequence
  Description of Artificial Sequence: Synthetic oligonucleotide
uuggacucaucuuucgaga

SEQ ID NO: 41272 - RNA, 19 nt, Artificial Sequence
  Description of Artificial Sequence: Synthetic oligonucleotide
uaagagagagagagauuug

SEQ ID NO: 41273 - RNA, 19 nt, Artificial Sequence
  Description of Artificial Sequence: Synthetic oligonucleotide
ucuaguuccauggcuguug

SEQ ID NO: 41274 - RNA, 19 nt, Artificial Sequence
  Description of Artificial Sequence: Synthetic oligonucleotide
gacagcgaugcacaugagc

SEQ ID NO: 41275 - RNA, 19 nt, Artificial Sequence
  Description of Artificial Sequence: Synthetic oligonucleotide
uugcuuguugcuagguacc

SEQ ID NO: 41276 - RNA, 19 nt, Artificial Sequence
  Description of Artificial Sequence: Synthetic oligonucleotide
augacguggucacugccgg

SEQ ID NO: 41277 - RNA, 19 nt, Artificial Sequence
  Description of Artificial Sequence: Synthetic oligonucleotide
uugaacuaucugcuauacc

SEQ ID NO: 41278 - RNA, 19 nt, Artificial Sequence
  Description of Artificial Sequence: Synthetic oligonucleotide
uguguaagagagagagaga

SEQ ID NO: 41279 - RNA, 19 nt, Artificial Sequence
  Description of Artificial Sequence: Synthetic oligonucleotide
aaugagugugugugugugu

SEQ ID NO: 41280 - RNA, 19 nt, Artificial Sequence
  Description of Artificial Sequence: Synthetic oligonucleotide
uucgcucgguacuugacca

SEQ ID NO: 41281 - RNA, 19 nt, Artificial Sequence
  Description of Artificial Sequence: Synthetic oligonucleotide
acuaucugcuauaccuucc

SEQ ID NO: 41282 - RNA, 19 nt, Artificial Sequence
  Description of Artificial Sequence: Synthetic oligonucleotide
cacaaagugagcugccuug

SEQ ID NO: 41283 - RNA, 19 nt, Artificial Sequence
  Description of Artificial Sequence: Synthetic oligonucleotide
uguguguguguguaagaga

SEQ ID NO: 41284 - RNA, 19 nt, Artificial Sequence
  Description of Artificial Sequence: Synthetic oligonucleotide
gucacuuuacuucaacaga

SEQ ID NO: 41285 - RNA, 19 nt, Artificial Sequence
  Description of Artificial Sequence: Synthetic oligonucleotide
aguacggaaugcuagggua

SEQ ID NO: 41286 - RNA, 19 nt, Artificial Sequence
  Description of Artificial Sequence: Synthetic oligonucleotide
aggacuccuguccaaugcg

SEQ ID NO: 41287 - RNA, 19 nt, Artificial Sequence
  Description of Artificial Sequence: Synthetic oligonucleotide
agagauuuggggaugcucu

SEQ ID NO: 41288 - RNA, 19 nt, Artificial Sequence
  Description of Artificial Sequence: Synthetic oligonucleotide
aacuauguugaaguuuuau

SEQ ID NO: 41289 - RNA, 19 nt, Artificial Sequence
  Description of Artificial Sequence: Synthetic oligonucleotide
gguacuugcugcucaaaag

SEQ ID NO: 41290 - RNA, 19 nt, Artificial Sequence
  Description of Artificial Sequence: Synthetic oligonucleotide
gaaugagugugugugugug

SEQ ID NO: 41291 - RNA, 19 nt, Artificial Sequence
  Description of Artificial Sequence: Synthetic oligonucleotide
augugcuaaaagcaaccug

SEQ ID NO: 41292 - RNA, 19 nt, Artificial Sequence
  Description of Artificial Sequence: Synthetic oligonucleotide
aguaugguuccacccgguc

SEQ ID NO: 41293 - RNA, 19 nt, Artificial Sequence
  Description of Artificial Sequence: Synthetic oligonucleotide
guaguuggagcuuggcagc

SEQ ID NO: 41294 - RNA, 19 nt, Artificial Sequence
  Description of Artificial Sequence: Synthetic oligonucleotide
uggacacgagaccaucugc

SEQ ID NO: 41295 - RNA, 19 nt, Artificial Sequence
  Description of Artificial Sequence: Synthetic oligonucleotide
cuggaguaugguuccaccc

SEQ ID NO: 41296 - RNA, 19 nt, Artificial Sequence
  Description of Artificial Sequence: Synthetic oligonucleotide
uggucuuuaugugauacau

SEQ ID NO: 41297 - RNA, 19 nt, Artificial Sequence
  Description of Artificial Sequence: Synthetic oligonucleotide
gcgguucuaaaguagaaug

SEQ ID NO: 41298 - RNA, 19 nt, Artificial Sequence
  Description of Artificial Sequence: Synthetic oligonucleotide
cagcaacugaccaucucgg

SEQ ID NO: 41299 - RNA, 19 nt, Artificial Sequence
  Description of Artificial Sequence: Synthetic oligonucleotide
uuuccaauccaggaaaguu

SEQ ID NO: 41300 - RNA, 19 nt, Artificial Sequence
  Description of Artificial Sequence: Synthetic oligonucleotide
agagagagagagauuuggg

SEQ ID NO: 41301 - RNA, 19 nt, Artificial Sequence
  Description of Artificial Sequence: Synthetic oligonucleotide
ugguacguauauauuuuau

SEQ ID NO: 41302 - RNA, 19 nt, Artificial Sequence
  Description of Artificial Sequence: Synthetic oligonucleotide
gguaauggaggugugauca

SEQ ID NO: 41303 - RNA, 19 nt, Artificial Sequence
  Description of Artificial Sequence: Synthetic oligonucleotide
acacuaaaauauucacgca

SEQ ID NO: 41304 - RNA, 19 nt, Artificial Sequence
  Description of Artificial Sequence: Synthetic oligonucleotide
agcaaugcagacgguacuc

SEQ ID NO: 41305 - RNA, 19 nt, Artificial Sequence
  Description of Artificial Sequence: Synthetic oligonucleotide
aggaugaauuccaaggacu

SEQ ID NO: 41306 - RNA, 19 nt, Artificial Sequence
  Description of Artificial Sequence: Synthetic oligonucleotide
gauugggagaccccacuca

SEQ ID NO: 41307 - RNA, 19 nt, Artificial Sequence
  Description of Artificial Sequence: Synthetic oligonucleotide
cuugaacuaucugcuauac

SEQ ID NO: 41308 - RNA, 19 nt, Artificial Sequence
  Description of Artificial Sequence: Synthetic oligonucleotide
guguguguguguguaagag

SEQ ID NO: 41309 - RNA, 19 nt, Artificial Sequence
  Description of Artificial Sequence: Synthetic oligonucleotide
uguugccuaagugaacaga

SEQ ID NO: 41310 - RNA, 19 nt, Artificial Sequence
  Description of Artificial Sequence: Synthetic oligonucleotide
ugcagacgguacucgagcc

SEQ ID NO: 41311 - RNA, 19 nt, Artificial Sequence
  Description of Artificial Sequence: Synthetic oligonucleotide
aucuuucgagaaagcagcc

SEQ ID NO: 41312 - RNA, 19 nt, Artificial Sequence
  Description of Artificial Sequence: Synthetic oligonucleotide
ucuuccgcucaaaucuaga

SEQ ID NO: 41313 - RNA, 19 nt, Artificial Sequence
  Description of Artificial Sequence: Synthetic oligonucleotide
uguguguguguguguaaga

SEQ ID NO: 41314 - RNA, 19 nt, Artificial Sequence
  Description of Artificial Sequence: Synthetic oligonucleotide
augagugugugugugugug

SEQ ID NO: 41315 - RNA, 19 nt, Artificial Sequence
  Description of Artificial Sequence: Synthetic oligonucleotide
agccuuguauuugaggaug

SEQ ID NO: 41316 - RNA, 19 nt, Artificial Sequence
  Description of Artificial Sequence: Synthetic oligonucleotide
cuugcgguucuaaaguaga

SEQ ID NO: 41317 - RNA, 19 nt, Artificial Sequence
  Description of Artificial Sequence: Synthetic oligonucleotide
uguaagagagagagagauu

SEQ ID NO: 41318 - RNA, 19 nt, Artificial Sequence
  Description of Artificial Sequence: Synthetic oligonucleotide
ggaaaugguacguauauau

SEQ ID NO: 41319 - RNA, 19 nt, Artificial Sequence
  Description of Artificial Sequence: Synthetic oligonucleotide
gccgaugucacuuuacuuc

SEQ ID NO: 41320 - RNA, 19 nt, Artificial Sequence
  Description of Artificial Sequence: Synthetic oligonucleotide
agacacuacuucccugaag

SEQ ID NO: 41321 - RNA, 19 nt, Artificial Sequence
  Description of Artificial Sequence: Synthetic oligonucleotide
guaagagagagagagauuu

SEQ ID NO: 41322 - RNA, 19 nt, Artificial Sequence
  Description of Artificial Sequence: Synthetic oligonucleotide
gagugugugugugugugug

SEQ ID NO: 41323 - RNA, 19 nt, Artificial Sequence
  Description of Artificial Sequence: Synthetic oligonucleotide
acauaucgacaaugaaacu

SEQ ID NO: 41324 - RNA, 19 nt, Artificial Sequence
  Description of Artificial Sequence: Synthetic oligonucleotide
uacggaaugcuaggguaag

SEQ ID NO: 41325 - RNA, 19 nt, Artificial Sequence
  Description of Artificial Sequence: Synthetic oligonucleotide
ugcugauucucagcuacca

SEQ ID NO: 41326 - RNA, 19 nt, Artificial Sequence
  Description of Artificial Sequence: Synthetic oligonucleotide
aucgacaaugaaacugguc

SEQ ID NO: 41327 - RNA, 19 nt, Artificial Sequence
  Description of Artificial Sequence: Synthetic oligonucleotide
ucuuucgagaaagcagccu

SEQ ID NO: 41328 - RNA, 19 nt, Artificial Sequence
  Description of Artificial Sequence: Synthetic oligonucleotide
auagaaaagugagaacaua

SEQ ID NO: 41329 - RNA, 19 nt, Artificial Sequence
  Description of Artificial Sequence: Synthetic oligonucleotide
uuguuuguguggcaucguu

SEQ ID NO: 41330 - RNA, 19 nt, Artificial Sequence
  Description of Artificial Sequence: Synthetic oligonucleotide
uuuuaggagugugcaacaa

SEQ ID NO: 41331 - RNA, 19 nt, Artificial Sequence
  Description of Artificial Sequence: Synthetic oligonucleotide
agacacuagaggaaugagu

SEQ ID NO: 41332 - RNA, 19 nt, Artificial Sequence
  Description of Artificial Sequence: Synthetic oligonucleotide
gugucagaacauuggggug

SEQ ID NO: 41333 - RNA, 19 nt, Artificial Sequence
  Description of Artificial Sequence: Synthetic oligonucleotide
guguguguguguguguaag

SEQ ID NO: 41334 - RNA, 19 nt, Artificial Sequence
  Description of Artificial Sequence: Synthetic oligonucleotide
uuaccuccagguagcuagc

SEQ ID NO: 41335 - RNA, 19 nt, Artificial Sequence
  Description of Artificial Sequence: Synthetic oligonucleotide
cuugaacacaaagugagcu

SEQ ID NO: 41336 - RNA, 19 nt, Artificial Sequence
  Description of Artificial Sequence: Synthetic oligonucleotide
gguacauggacugggaguc

SEQ ID NO: 41337 - RNA, 19 nt, Artificial Sequence
  Description of Artificial Sequence: Synthetic oligonucleotide
caguguacaagcuugcggu

SEQ ID NO: 41338 - RNA, 19 nt, Artificial Sequence
  Description of Artificial Sequence: Synthetic oligonucleotide
uccuaguuuggcugugggu

SEQ ID NO: 41339 - RNA, 19 nt, Artificial Sequence
  Description of Artificial Sequence: Synthetic oligonucleotide
ccgacuuugcuucuacugg

SEQ ID NO: 41340 - RNA, 19 nt, Artificial Sequence
  Description of Artificial Sequence: Synthetic oligonucleotide
gaaaguggucuaacauccc

SEQ ID NO: 41341 - RNA, 19 nt, Artificial Sequence
  Description of Artificial Sequence: Synthetic oligonucleotide
gacacgagaccaucugcca

SEQ ID NO: 41342 - RNA, 19 nt, Artificial Sequence
  Description of Artificial Sequence: Synthetic oligonucleotide
uugcgguucuaaaguagaa

SEQ ID NO: 41343 - RNA, 19 nt, Artificial Sequence
  Description of Artificial Sequence: Synthetic oligonucleotide
augguacguauauauuuua

SEQ ID NO: 41344 - RNA, 19 nt, Artificial Sequence
  Description of Artificial Sequence: Synthetic oligonucleotide
acaaugaaacuggucgagu

SEQ ID NO: 41345 - RNA, 19 nt, Artificial Sequence
  Description of Artificial Sequence: Synthetic oligonucleotide
ccgaaguacggaaugcuag

SEQ ID NO: 41346 - RNA, 19 nt, Artificial Sequence
  Description of Artificial Sequence: Synthetic oligonucleotide
ugcgguucuaaaguagaau

SEQ ID NO: 41347 - RNA, 19 nt, Artificial Sequence
  Description of Artificial Sequence: Synthetic oligonucleotide
acgacauaucgacaaugaa

SEQ ID NO: 41348 - RNA, 19 nt, Artificial Sequence
  Description of Artificial Sequence: Synthetic oligonucleotide
cacuaaaauauucacgcau

SEQ ID NO: 41349 - RNA, 19 nt, Artificial Sequence
  Description of Artificial Sequence: Synthetic oligonucleotide
ugcuuguugcuagguaccc

SEQ ID NO: 41350 - RNA, 19 nt, Artificial Sequence
  Description of Artificial Sequence: Synthetic oligonucleotide
aguaaaugacaagaccauu

SEQ ID NO: 41351 - RNA, 19 nt, Artificial Sequence
  Description of Artificial Sequence: Synthetic oligonucleotide
cucuuccgcucaaaucuag

SEQ ID NO: 41352 - RNA, 19 nt, Artificial Sequence
  Description of Artificial Sequence: Synthetic oligonucleotide
acgagaccaucugccaccc

SEQ ID NO: 41353 - RNA, 19 nt, Artificial Sequence
  Description of Artificial Sequence: Synthetic oligonucleotide
ugugugugugugugugugu

SEQ ID NO: 41354 - RNA, 19 nt, Artificial Sequence
  Description of Artificial Sequence: Synthetic oligonucleotide
ucggugaguucuccaggug

SEQ ID NO: 41355 - RNA, 19 nt, Artificial Sequence
  Description of Artificial Sequence: Synthetic oligonucleotide
agcuugggcgcauauugaa

SEQ ID NO: 41356 - RNA, 19 nt, Artificial Sequence
  Description of Artificial Sequence: Synthetic oligonucleotide
agcuaaucugaaagugguc

SEQ ID NO: 41357 - RNA, 19 nt, Artificial Sequence
  Description of Artificial Sequence: Synthetic oligonucleotide
cacaguguacaagcuugcg

SEQ ID NO: 41358 - RNA, 19 nt, Artificial Sequence
  Description of Artificial Sequence: Synthetic oligonucleotide
cuugggcgcauauugaacu

SEQ ID NO: 41359 - RNA, 19 nt, Artificial Sequence
  Description of Artificial Sequence: Synthetic oligonucleotide
guguaagagagagagagau

SEQ ID NO: 41360 - RNA, 19 nt, Artificial Sequence
  Description of Artificial Sequence: Synthetic oligonucleotide
cgguacucgagccucaucg

SEQ ID NO: 41361 - RNA, 19 nt, Artificial Sequence
  Description of Artificial Sequence: Synthetic oligonucleotide
cacacaugcucuuccgcuc

SEQ ID NO: 41362 - RNA, 19 nt, Artificial Sequence
  Description of Artificial Sequence: Synthetic oligonucleotide
ugcgguucacugccguaca

SEQ ID NO: 41363 - RNA, 19 nt, Artificial Sequence
  Description of Artificial Sequence: Synthetic oligonucleotide
ugagugugugugugugugu

SEQ ID NO: 41364 - RNA, 19 nt, Artificial Sequence
  Description of Artificial Sequence: Synthetic oligonucleotide
guaauggaggugugaucac

SEQ ID NO: 41365 - RNA, 19 nt, Artificial Sequence
  Description of Artificial Sequence: Synthetic oligonucleotide
agaguaacuuguuccucua

SEQ ID NO: 41366 - RNA, 19 nt, Artificial Sequence
  Description of Artificial Sequence: Synthetic oligonucleotide
gugugugugugugugugug

SEQ ID NO: 41367 - RNA, 19 nt, Artificial Sequence
  Description of Artificial Sequence: Synthetic oligonucleotide
gucacugccggaagggagc

SEQ ID NO: 41368 - RNA, 19 nt, Artificial Sequence
  Description of Artificial Sequence: Synthetic oligonucleotide
auagaggggauggggucuc

SEQ ID NO: 41369 - RNA, 19 nt, Artificial Sequence
  Description of Artificial Sequence: Synthetic oligonucleotide
uggucgaguccaucccucc

SEQ ID NO: 41370 - RNA, 19 nt, Artificial Sequence
  Description of Artificial Sequence: Synthetic oligonucleotide
agugugugugugugugugu

SEQ ID NO: 41371 - RNA, 19 nt, Artificial Sequence
  Description of Artificial Sequence: Synthetic oligonucleotide
uguguguguguguguguaa

SEQ ID NO: 41372 - RNA, 19 nt, Artificial Sequence
  Description of Artificial Sequence: Synthetic oligonucleotide
agcaacugaccaucucgga

SEQ ID NO: 41373 - RNA, 19 nt, Artificial Sequence
  Description of Artificial Sequence: Synthetic oligonucleotide
gguguugauguuucacuca

SEQ ID NO: 41374 - RNA, 19 nt, Artificial Sequence
  Description of Artificial Sequence: Synthetic oligonucleotide
ggaagguagacccacugua

SEQ ID NO: 41375 - RNA, 19 nt, Artificial Sequence
  Description of Artificial Sequence: Synthetic oligonucleotide
gauguuucggugaguucuc

SEQ ID NO: 41376 - RNA, 19 nt, Artificial Sequence
  Description of Artificial Sequence: Synthetic oligonucleotide
uaaccuucgccaugugcua

SEQ ID NO: 41377 - RNA, 19 nt, Artificial Sequence
  Description of Artificial Sequence: Synthetic oligonucleotide
auaaccccacauugaguaa

SEQ ID NO: 41378 - RNA, 19 nt, Artificial Sequence
  Description of Artificial Sequence: Synthetic oligonucleotide
ugccguacaguuguaguuu

SEQ ID NO: 41379 - RNA, 19 nt, Artificial Sequence
  Description of Artificial Sequence: Synthetic oligonucleotide
cgaaguacggaaugcuagg

SEQ ID NO: 41380 - RNA, 19 nt, Artificial Sequence
  Description of Artificial Sequence: Synthetic oligonucleotide
uuuguuuguguggcaucgu

SEQ ID NO: 41381 - RNA, 19 nt, Artificial Sequence
  Description of Artificial Sequence: Synthetic oligonucleotide
ggucgauggauggagaaga

SEQ ID NO: 41382 - RNA, 19 nt, Artificial Sequence
  Description of Artificial Sequence: Synthetic oligonucleotide
cacuuaucucgcccagccc

SEQ ID NO: 41383 - RNA, 19 nt, Artificial Sequence
  Description of Artificial Sequence: Synthetic oligonucleotide
ucgaguccaucccuccuua

SEQ ID NO: 41384 - RNA, 19 nt, Artificial Sequence
  Description of Artificial Sequence: Synthetic oligonucleotide
ucgcucgguacuugaccag

SEQ ID NO: 41385 - RNA, 19 nt, Artificial Sequence
  Description of Artificial Sequence: Synthetic oligonucleotide
acggaaugcuaggguaagg

SEQ ID NO: 41386 - RNA, 19 nt, Artificial Sequence
  Description of Artificial Sequence: Synthetic oligonucleotide
auuccacaaggggagggcu

SEQ ID NO: 41387 - RNA, 19 nt, Artificial Sequence
  Description of Artificial Sequence: Synthetic oligonucleotide
ccagacggacagcugaggg

SEQ ID NO: 41388 - RNA, 19 nt, Artificial Sequence
  Description of Artificial Sequence: Synthetic oligonucleotide
uuguugcuagguacccauc

SEQ ID NO: 41389 - RNA, 19 nt, Artificial Sequence
  Description of Artificial Sequence: Synthetic oligonucleotide
aguccguuccuccucuguu

SEQ ID NO: 41390 - RNA, 19 nt, Artificial Sequence
  Description of Artificial Sequence: Synthetic oligonucleotide
gcuggucuuuaugugauac

SEQ ID NO: 41391 - RNA, 19 nt, Artificial Sequence
  Description of Artificial Sequence: Synthetic oligonucleotide
agggagccggauuucuggu

SEQ ID NO: 41392 - RNA, 19 nt, Artificial Sequence
  Description of Artificial Sequence: Synthetic oligonucleotide
agcuugcgguucuaaagua

SEQ ID NO: 41393 - RNA, 19 nt, Artificial Sequence
  Description of Artificial Sequence: Synthetic oligonucleotide
caaugcagacgguacucga

SEQ ID NO: 41394 - RNA, 19 nt, Artificial Sequence
  Description of Artificial Sequence: Synthetic oligonucleotide
ggcguuccaguccagggac

SEQ ID NO: 41395 - RNA, 19 nt, Artificial Sequence
  Description of Artificial Sequence: Synthetic oligonucleotide
ugcguaccaccaugugccc

SEQ ID NO: 41396 - RNA, 19 nt, Artificial Sequence
  Description of Artificial Sequence: Synthetic oligonucleotide
cagacgguacucgagccuc

SEQ ID NO: 41397 - RNA, 19 nt, Artificial Sequence
  Description of Artificial Sequence: Synthetic oligonucleotide
gcaaugcagacgguacucg

SEQ ID NO: 41398 - RNA, 19 nt, Artificial Sequence
  Description of Artificial Sequence: Synthetic oligonucleotide
ugacagcgaugcacaugag

SEQ ID NO: 41399 - RNA, 19 nt, Artificial Sequence
  Description of Artificial Sequence: Synthetic oligonucleotide
uugggcgcauauugaacuu

SEQ ID NO: 41400 - RNA, 19 nt, Artificial Sequence
  Description of Artificial Sequence: Synthetic oligonucleotide
gcugaauguucuggaaucc

SEQ ID NO: 41401 - RNA, 19 nt, Artificial Sequence
  Description of Artificial Sequence: Synthetic oligonucleotide
acccggucgauggauggag

SEQ ID NO: 41402 - RNA, 19 nt, Artificial Sequence
  Description of Artificial Sequence: Synthetic oligonucleotide
cgacauaucgacaaugaaa

SEQ ID NO: 41403 - RNA, 19 nt, Artificial Sequence
  Description of Artificial Sequence: Synthetic oligonucleotide
caucugccacccuaaccuc

SEQ ID NO: 41404 - RNA, 19 nt, Artificial Sequence
  Description of Artificial Sequence: Synthetic oligonucleotide
guccguuccuccucuguuc

SEQ ID NO: 41405 - RNA, 19 nt, Artificial Sequence
  Description of Artificial Sequence: Synthetic oligonucleotide
ggcgaucccauguuuaucu

SEQ ID NO: 41406 - RNA, 19 nt, Artificial Sequence
  Description of Artificial Sequence: Synthetic oligonucleotide
ugggcgcauauugaacuuc

SEQ ID NO: 41407 - RNA, 19 nt, Artificial Sequence
  Description of Artificial Sequence: Synthetic oligonucleotide
gcaacugaccaucucggaa

SEQ ID NO: 41408 - RNA, 19 nt, Artificial Sequence
  Description of Artificial Sequence: Synthetic oligonucleotide
gaaaugguacguauauauu

SEQ ID NO: 41409 - RNA, 19 nt, Artificial Sequence
  Description of Artificial Sequence: Synthetic oligonucleotide
ggacuccuguccaaugcgg

SEQ ID NO: 41410 - RNA, 19 nt, Artificial Sequence
  Description of Artificial Sequence: Synthetic oligonucleotide
gcuugcgguucuaaaguag

SEQ ID NO: 41411 - RNA, 19 nt, Artificial Sequence
  Description of Artificial Sequence: Synthetic oligonucleotide
gacguggucacugccggaa

SEQ ID NO: 41412 - RNA, 19 nt, Artificial Sequence
  Description of Artificial Sequence: Synthetic oligonucleotide
gaggaaugagugugugugu

SEQ ID NO: 41413 - RNA, 19 nt, Artificial Sequence
  Description of Artificial Sequence: Synthetic oligonucleotide
ggaugcauccugcucgcca

SEQ ID NO: 41414 - RNA, 19 nt, Artificial Sequence
  Description of Artificial Sequence: Synthetic oligonucleotide
guauucugacagaaugcaa

SEQ ID NO: 41415 - RNA, 19 nt, Artificial Sequence
  Description of Artificial Sequence: Synthetic oligonucleotide
agacggugugucugcuuga

SEQ ID NO: 41416 - RNA, 19 nt, Artificial Sequence
  Description of Artificial Sequence: Synthetic oligonucleotide
agaaggccgaugucacuuu

SEQ ID NO: 41417 - RNA, 19 nt, Artificial Sequence
  Description of Artificial Sequence: Synthetic oligonucleotide
ugagcaugacguggucacu

SEQ ID NO: 41418 - RNA, 19 nt, Artificial Sequence
  Description of Artificial Sequence: Synthetic oligonucleotide
cuauaccuuccacaaccaa

SEQ ID NO: 41419 - RNA, 19 nt, Artificial Sequence
  Description of Artificial Sequence: Synthetic oligonucleotide
gggguuaccuccagguagc

SEQ ID NO: 41420 - RNA, 19 nt, Artificial Sequence
  Description of Artificial Sequence: Synthetic oligonucleotide
aagcuucgcucgguacuug

SEQ ID NO: 41421 - RNA, 19 nt, Artificial Sequence
  Description of Artificial Sequence: Synthetic oligonucleotide
gcccuuucuagaaaccuac

SEQ ID NO: 41422 - RNA, 19 nt, Artificial Sequence
  Description of Artificial Sequence: Synthetic oligonucleotide
ugacguggucacugccgga

SEQ ID NO: 41423 - RNA, 19 nt, Artificial Sequence
  Description of Artificial Sequence: Synthetic oligonucleotide
cucaguuaguacucaguau

SEQ ID NO: 41424 - RNA, 19 nt, Artificial Sequence
  Description of Artificial Sequence: Synthetic oligonucleotide
guauaccuugucucaggcu

SEQ ID NO: 41425 - RNA, 19 nt, Artificial Sequence
  Description of Artificial Sequence: Synthetic oligonucleotide
acggaguguccuaguuugg

SEQ ID NO: 41426 - RNA, 19 nt, Artificial Sequence
  Description of Artificial Sequence: Synthetic oligonucleotide
gaacggaguguccuaguuu

SEQ ID NO: 41427 - RNA, 19 nt, Artificial Sequence
  Description of Artificial Sequence: Synthetic oligonucleotide
gaaggccgaugucacuuua

SEQ ID NO: 41428 - RNA, 19 nt, Artificial Sequence
  Description of Artificial Sequence: Synthetic oligonucleotide
gucgauggauggagaagac

SEQ ID NO: 41429 - RNA, 19 nt, Artificial Sequence
  Description of Artificial Sequence: Synthetic oligonucleotide
cuaccacagauacuucaua

SEQ ID NO: 41430 - RNA, 19 nt, Artificial Sequence
  Description of Artificial Sequence: Synthetic oligonucleotide
guacauggacugggagucc

SEQ ID NO: 41431 - RNA, 19 nt, Artificial Sequence
  Description of Artificial Sequence: Synthetic oligonucleotide
cacgagcauggcugcguac

SEQ ID NO: 41432 - RNA, 19 nt, Artificial Sequence
  Description of Artificial Sequence: Synthetic oligonucleotide
guacuugggaaaggaaccu

SEQ ID NO: 41433 - RNA, 19 nt, Artificial Sequence
  Description of Artificial Sequence: Synthetic oligonucleotide
ugagggccgccagucguac

SEQ ID NO: 41434 - RNA, 19 nt, Artificial Sequence
  Description of Artificial Sequence: Synthetic oligonucleotide
ucagcgguguggucucguu

SEQ ID NO: 41435 - RNA, 19 nt, Artificial Sequence
  Description of Artificial Sequence: Synthetic oligonucleotide
ucguugggaccgucuugac

SEQ ID NO: 41436 - RNA, 19 nt, Artificial Sequence
  Description of Artificial Sequence: Synthetic oligonucleotide
caugugcuaaaagcaaccu

SEQ ID NO: 41437 - RNA, 19 nt, Artificial Sequence
  Description of Artificial Sequence: Synthetic oligonucleotide
uguccacguuccugauggu

SEQ ID NO: 41438 - RNA, 19 nt, Artificial Sequence
  Description of Artificial Sequence: Synthetic oligonucleotide
gugugugugugugugugua

SEQ ID NO: 41439 - RNA, 19 nt, Artificial Sequence
  Description of Artificial Sequence: Synthetic oligonucleotide
uuccacccggucgauggau

SEQ ID NO: 41440 - RNA, 19 nt, Artificial Sequence
  Description of Artificial Sequence: Synthetic oligonucleotide
agcccuuucuagaaaccua

SEQ ID NO: 41441 - RNA, 19 nt, Artificial Sequence
  Description of Artificial Sequence: Synthetic oligonucleotide
cuuaucucgcccagccccu

SEQ ID NO: 41442 - RNA, 19 nt, Artificial Sequence
  Description of Artificial Sequence: Synthetic oligonucleotide
uucuuaauuugggguccuu

SEQ ID NO: 41443 - RNA, 19 nt, Artificial Sequence
  Description of Artificial Sequence: Synthetic oligonucleotide
cggaaccaggagauugugg

SEQ ID NO: 41444 - RNA, 19 nt, Artificial Sequence
  Description of Artificial Sequence: Synthetic oligonucleotide
uaguuccauggcuguugau

SEQ ID NO: 41445 - RNA, 19 nt, Artificial Sequence
  Description of Artificial Sequence: Synthetic oligonucleotide
gccguacaguuguaguuuc

SEQ ID NO: 41446 - RNA, 19 nt, Artificial Sequence
  Description of Artificial Sequence: Synthetic oligonucleotide
gccagucguacuguauacc

SEQ ID NO: 41447 - RNA, 19 nt, Artificial Sequence
  Description of Artificial Sequence: Synthetic oligonucleotide
ggaguguccuaguuuggcu

SEQ ID NO: 41448 - RNA, 19 nt, Artificial Sequence
  Description of Artificial Sequence: Synthetic oligonucleotide
gcgaucccauguuuaucug

SEQ ID NO: 41449 - RNA, 19 nt, Artificial Sequence
  Description of Artificial Sequence: Synthetic oligonucleotide
gcuugggcgcauauugaac

SEQ ID NO: 41450 - RNA, 19 nt, Artificial Sequence
  Description of Artificial Sequence: Synthetic oligonucleotide
gacuccuguccaaugcggu

SEQ ID NO: 41451 - RNA, 19 nt, Artificial Sequence
  Description of Artificial Sequence: Synthetic oligonucleotide
ggaaugagugugugugugu

SEQ ID NO: 41452 - RNA, 19 nt, Artificial Sequence
  Description of Artificial Sequence: Synthetic oligonucleotide
gguucacugccguacaguu

SEQ ID NO: 41453 - RNA, 19 nt, Artificial Sequence
  Description of Artificial Sequence: Synthetic oligonucleotide
ccagucguacuguauaccu

SEQ ID NO: 41454 - RNA, 19 nt, Artificial Sequence
  Description of Artificial Sequence: Synthetic oligonucleotide
guuccacccggucgaugga

SEQ ID NO: 41455 - RNA, 19 nt, Artificial Sequence
  Description of Artificial Sequence: Synthetic oligonucleotide
cuccgucaugguuuggagu

SEQ ID NO: 41456 - RNA, 19 nt, Artificial Sequence
  Description of Artificial Sequence: Synthetic oligonucleotide
gguuuggaguccguuccuc

SEQ ID NO: 41457 - RNA, 19 nt, Artificial Sequence
  Description of Artificial Sequence: Synthetic oligonucleotide
cacuuuacuucaacagauu

SEQ ID NO: 41458 - RNA, 19 nt, Artificial Sequence
  Description of Artificial Sequence: Synthetic oligonucleotide
ucacugccguacaguugua

SEQ ID NO: 41459 - RNA, 19 nt, Artificial Sequence
  Description of Artificial Sequence: Synthetic oligonucleotide
ggcugcguaccaccaugug

SEQ ID NO: 41460 - RNA, 19 nt, Artificial Sequence
  Description of Artificial Sequence: Synthetic oligonucleotide
cucgguacuugaccagaua

SEQ ID NO: 41461 - RNA, 19 nt, Artificial Sequence
  Description of Artificial Sequence: Synthetic oligonucleotide
gguuuccacucagaggcaa

SEQ ID NO: 41462 - RNA, 19 nt, Artificial Sequence
  Description of Artificial Sequence: Synthetic oligonucleotide
gaagacggugugucugcuu

SEQ ID NO: 41463 - RNA, 19 nt, Artificial Sequence
  Description of Artificial Sequence: Synthetic oligonucleotide
gguacucgagccucaucgu

SEQ ID NO: 41464 - RNA, 19 nt, Artificial Sequence
  Description of Artificial Sequence: Synthetic oligonucleotide
gacggacagcugaggguga

SEQ ID NO: 41465 - RNA, 19 nt, Artificial Sequence
  Description of Artificial Sequence: Synthetic oligonucleotide
cgucaugguuuggaguccg

SEQ ID NO: 41466 - RNA, 19 nt, Artificial Sequence
  Description of Artificial Sequence: Synthetic oligonucleotide
caaugcgguucacugccgu

SEQ ID NO: 41467 - RNA, 19 nt, Artificial Sequence
  Description of Artificial Sequence: Synthetic oligonucleotide
uuaucucgcccagccccuu

SEQ ID NO: 41468 - RNA, 19 nt, Artificial Sequence
  Description of Artificial Sequence: Synthetic oligonucleotide
gaguaugguuccacccggu

SEQ ID NO: 41469 - RNA, 19 nt, Artificial Sequence
  Description of Artificial Sequence: Synthetic oligonucleotide
gccccgaaguacggaaugc

SEQ ID NO: 41470 - RNA, 19 nt, Artificial Sequence
  Description of Artificial Sequence: Synthetic oligonucleotide
cggaguguccuaguuuggc

SEQ ID NO: 41471 - RNA, 19 nt, Artificial Sequence
  Description of Artificial Sequence: Synthetic oligonucleotide
cagaugggguguuguagau

SEQ ID NO: 41472 - RNA, 19 nt, Artificial Sequence
  Description of Artificial Sequence: Synthetic oligonucleotide
cguacaguuguaguuucca

SEQ ID NO: 41473 - RNA, 19 nt, Artificial Sequence
  Description of Artificial Sequence: Synthetic oligonucleotide
ggagccggauuucugguuu

SEQ ID NO: 41474 - RNA, 19 nt, Artificial Sequence
  Description of Artificial Sequence: Synthetic oligonucleotide
cgccagucguacuguauac

SEQ ID NO: 41475 - RNA, 19 nt, Artificial Sequence
  Description of Artificial Sequence: Synthetic oligonucleotide
ggaacggaguguccuaguu

SEQ ID NO: 41476 - RNA, 19 nt, Artificial Sequence
  Description of Artificial Sequence: Synthetic oligonucleotide
gcaucgccacugaucacac

SEQ ID NO: 41477 - RNA, 19 nt, Artificial Sequence
  Description of Artificial Sequence: Synthetic oligonucleotide
ggaguccguuccuccucug

SEQ ID NO: 41478 - RNA, 19 nt, Artificial Sequence
  Description of Artificial Sequence: Synthetic oligonucleotide
cggugaguucuccagguga

SEQ ID NO: 41479 - RNA, 19 nt, Artificial Sequence
  Description of Artificial Sequence: Synthetic oligonucleotide
ggcgccggugcucaggccu

SEQ ID NO: 41480 - RNA, 19 nt, Artificial Sequence
  Description of Artificial Sequence: Synthetic oligonucleotide
ggugaguucuccaggugau

SEQ ID NO: 41481 - RNA, 19 nt, Artificial Sequence
  Description of Artificial Sequence: Synthetic oligonucleotide
ccgucaugguuuggagucc

SEQ ID NO: 41482 - RNA, 19 nt, Artificial Sequence
  Description of Artificial Sequence: Synthetic oligonucleotide
cugauuggggagccuccgu

SEQ ID NO: 41483 - RNA, 19 nt, Artificial Sequence
  Description of Artificial Sequence: Synthetic oligonucleotide
agcuagcagaugggguguu

SEQ ID NO: 41484 - RNA, 19 nt, Artificial Sequence
  Description of Artificial Sequence: Synthetic oligonucleotide
gcagacgguacucgagccu

SEQ ID NO: 41485 - RNA, 19 nt, Artificial Sequence
  Description of Artificial Sequence: Synthetic oligonucleotide
cacacgagcauggcugcgu

SEQ ID NO: 41486 - RNA, 19 nt, Artificial Sequence
  Description of Artificial Sequence: Synthetic oligonucleotide
cccgaaguacggaaugcua

SEQ ID NO: 41487 - RNA, 19 nt, Artificial Sequence
  Description of Artificial Sequence: Synthetic oligonucleotide
cggucgauggauggagaag

SEQ ID NO: 41488 - RNA, 19 nt, Artificial Sequence
  Description of Artificial Sequence: Synthetic oligonucleotide
caagcuucgcucgguacuu

SEQ ID NO: 41489 - RNA, 19 nt, Artificial Sequence
  Description of Artificial Sequence: Synthetic oligonucleotide
uggcaucguugggaccguc

SEQ ID NO: 41490 - RNA, 19 nt, Artificial Sequence
  Description of Artificial Sequence: Synthetic oligonucleotide
agccgcugugucacuuuau

SEQ ID NO: 41491 - RNA, 19 nt, Artificial Sequence
  Description of Artificial Sequence: Synthetic oligonucleotide
ccggucgauggauggagaa

SEQ ID NO: 41492 - RNA, 19 nt, Artificial Sequence
  Description of Artificial Sequence: Synthetic oligonucleotide
ggccgaugucacuuuacuu

SEQ ID NO: 41493 - RNA, 19 nt, Artificial Sequence
  Description of Artificial Sequence: Synthetic oligonucleotide
gcaucguugggaccgucuu

SEQ ID NO: 41494 - RNA, 19 nt, Artificial Sequence
  Description of Artificial Sequence: Synthetic oligonucleotide
gacgguacucgagccucau

SEQ ID NO: 41495 - RNA, 19 nt, Artificial Sequence
  Description of Artificial Sequence: Synthetic oligonucleotide
cccuccgucaugguuugga

SEQ ID NO: 41496 - RNA, 19 nt, Artificial Sequence
  Description of Artificial Sequence: Synthetic oligonucleotide
guacaagcuugcgguucua

SEQ ID NO: 41497 - RNA, 19 nt, Artificial Sequence
  Description of Artificial Sequence: Synthetic oligonucleotide
acucggcguuccaguccag

SEQ ID NO: 41498 - RNA, 19 nt, Artificial Sequence
  Description of Artificial Sequence: Synthetic oligonucleotide
gucaugguuuggaguccgu

SEQ ID NO: 41499 - RNA, 19 nt, Artificial Sequence
  Description of Artificial Sequence: Synthetic oligonucleotide
gucagcgguguggucucgu

SEQ ID NO: 41500 - RNA, 19 nt, Artificial Sequence
  Description of Artificial Sequence: Synthetic oligonucleotide
cuguucggaccuccacgau

SEQ ID NO: 41501 - RNA, 19 nt, Artificial Sequence
  Description of Artificial Sequence: Synthetic oligonucleotide
gggagccggauuucugguu

SEQ ID NO: 41502 - RNA, 19 nt, Artificial Sequence
  Description of Artificial Sequence: Synthetic oligonucleotide
cguugggaccgucuugacu

SEQ ID NO: 41503 - RNA, 19 nt, Artificial Sequence
  Description of Artificial Sequence: Synthetic oligonucleotide
ccccgaaguacggaaugcu

SEQ ID NO: 41504 - RNA, 19 nt, Artificial Sequence
  Description of Artificial Sequence: Synthetic oligonucleotide
ggguuaccuccagguagcu

SEQ ID NO: 41505 - RNA, 19 nt, Artificial Sequence
  Description of Artificial Sequence: Synthetic oligonucleotide
gccgccagucguacuguau

SEQ ID NO: 41506 - RNA, 19 nt, Artificial Sequence
  Description of Artificial Sequence: Synthetic oligonucleotide
cgguucacugccguacagu

SEQ ID NO: 41507 - RNA, 19 nt, Artificial Sequence
  Description of Artificial Sequence: Synthetic oligonucleotide
ccuccacgauggguucuuu

SEQ ID NO: 41508 - RNA, 19 nt, Artificial Sequence
  Description of Artificial Sequence: Synthetic oligonucleotide
aagauuuagaucaaugcac

SEQ ID NO: 41509 - RNA, 19 nt, Artificial Sequence
  Description of Artificial Sequence: Synthetic oligonucleotide
agugagauugcuuaagggg

SEQ ID NO: 41510 - RNA, 19 nt, Artificial Sequence
  Description of Artificial Sequence: Synthetic oligonucleotide
gaaccguugaaguaguugg

SEQ ID NO: 41511 - RNA, 19 nt, Artificial Sequence
  Description of Artificial Sequence: Synthetic oligonucleotide
uaaucuaugcggaugucgg

SEQ ID NO: 41512 - RNA, 19 nt, Artificial Sequence
  Description of Artificial Sequence: Synthetic oligonucleotide
uguguuauuguaauugcug

SEQ ID NO: 41513 - RNA, 19 nt, Artificial Sequence
  Description of Artificial Sequence: Synthetic oligonucleotide
aacgccuggaccuucugcc

SEQ ID NO: 41514 - RNA, 19 nt, Artificial Sequence
  Description of Artificial Sequence: Synthetic oligonucleotide
uuaacauugcaucucuaag

SEQ ID NO: 41515 - RNA, 19 nt, Artificial Sequence
  Description of Artificial Sequence: Synthetic oligonucleotide
ugaaaguugauucuuccca

SEQ ID NO: 41516 - RNA, 19 nt, Artificial Sequence
  Description of Artificial Sequence: Synthetic oligonucleotide
ucuugugaccauuuggagg

SEQ ID NO: 41517 - RNA, 19 nt, Artificial Sequence
  Description of Artificial Sequence: Synthetic oligonucleotide
aauuggaaagcauccacca

SEQ ID NO: 41518 - RNA, 19 nt, Artificial Sequence
  Description of Artificial Sequence: Synthetic oligonucleotide
uguucuccgugucaaaugg

SEQ ID NO: 41519 - RNA, 19 nt, Artificial Sequence
  Description of Artificial Sequence: Synthetic oligonucleotide
agaucugaccuccaguggc

SEQ ID NO: 41520 - RNA, 19 nt, Artificial Sequence
  Description of Artificial Sequence: Synthetic oligonucleotide
aguagaaacugcucuugcc

SEQ ID NO: 41521 - RNA, 19 nt, Artificial Sequence
  Description of Artificial Sequence: Synthetic oligonucleotide
augcgaacaaucuguaccc

SEQ ID NO: 41522 - RNA, 19 nt, Artificial Sequence
  Description of Artificial Sequence: Synthetic oligonucleotide
aacacacccauaucaucgc

SEQ ID NO: 41523 - RNA, 19 nt, Artificial Sequence
  Description of Artificial Sequence: Synthetic oligonucleotide
gguaagaucucucuggccg

SEQ ID NO: 41524 - RNA, 19 nt, Artificial Sequence
  Description of Artificial Sequence: Synthetic oligonucleotide
cacacauacacacacacac

SEQ ID NO: 41525 - RNA, 19 nt, Artificial Sequence
  Description of Artificial Sequence: Synthetic oligonucleotide
uguuguacacugcaggggc

SEQ ID NO: 41526 - RNA, 19 nt, Artificial Sequence
  Description of Artificial Sequence: Synthetic oligonucleotide
gagaucaaguaucuggaag

SEQ ID NO: 41527 - RNA, 19 nt, Artificial Sequence
  Description of Artificial Sequence: Synthetic oligonucleotide
ucuguuaugccagugcuag

SEQ ID NO: 41528 - RNA, 19 nt, Artificial Sequence
  Description of Artificial Sequence: Synthetic oligonucleotide
gacacacacacacacauac

SEQ ID NO: 41529 - RNA, 19 nt, Artificial Sequence
  Description of Artificial Sequence: Synthetic oligonucleotide
ucucuaagugccaagcagc

SEQ ID NO: 41530 - RNA, 19 nt, Artificial Sequence
  Description of Artificial Sequence: Synthetic oligonucleotide
uuaggaagagaucaaguau

SEQ ID NO: 41531 - RNA, 19 nt, Artificial Sequence
  Description of Artificial Sequence: Synthetic oligonucleotide
uacacacacacacacacac

SEQ ID NO: 41532 - RNA, 19 nt, Artificial Sequence
  Description of Artificial Sequence: Synthetic oligonucleotide
acuauaaauugcaugguuc

SEQ ID NO: 41533 - RNA, 19 nt, Artificial Sequence
  Description of Artificial Sequence: Synthetic oligonucleotide
aacugaucaaacuuccuau

SEQ ID NO: 41534 - RNA, 19 nt, Artificial Sequence
  Description of Artificial Sequence: Synthetic oligonucleotide
cauacacacacacacacac

SEQ ID NO: 41535 - RNA, 19 nt, Artificial Sequence
  Description of Artificial Sequence: Synthetic oligonucleotide
agaucaaguaucuggaaga

SEQ ID NO: 41536 - RNA, 19 nt, Artificial Sequence
  Description of Artificial Sequence: Synthetic oligonucleotide
acuaagauucuuguuguac

SEQ ID NO: 41537 - RNA, 19 nt, Artificial Sequence
  Description of Artificial Sequence: Synthetic oligonucleotide
acacccauaucaucgcucc

SEQ ID NO: 41538 - RNA, 19 nt, Artificial Sequence
  Description of Artificial Sequence: Synthetic oligonucleotide
guuucuugagagcaggucc

SEQ ID NO: 41539 - RNA, 19 nt, Artificial Sequence
  Description of Artificial Sequence: Synthetic oligonucleotide
uuauguuagggacuguagu

SEQ ID NO: 41540 - RNA, 19 nt, Artificial Sequence
  Description of Artificial Sequence: Synthetic oligonucleotide
aaguugauucuucccacag

SEQ ID NO: 41541 - RNA, 19 nt, Artificial Sequence
  Description of Artificial Sequence: Synthetic oligonucleotide
ucauagaacccgauaagcu

SEQ ID NO: 41542 - RNA, 19 nt, Artificial Sequence
  Description of Artificial Sequence: Synthetic oligonucleotide
uaccuuaacacauauugaa

SEQ ID NO: 41543 - RNA, 19 nt, Artificial Sequence
  Description of Artificial Sequence: Synthetic oligonucleotide
aagaaacucacgcaacccu

SEQ ID NO: 41544 - RNA, 19 nt, Artificial Sequence
  Description of Artificial Sequence: Synthetic oligonucleotide
uggguagccugaauaaagg

SEQ ID NO: 41545 - RNA, 19 nt, Artificial Sequence
  Description of Artificial Sequence: Synthetic oligonucleotide
aaacauuaugcagggacag

SEQ ID NO: 41546 - RNA, 19 nt, Artificial Sequence
  Description of Artificial Sequence: Synthetic oligonucleotide
cagacagacacacacacac

SEQ ID NO: 41547 - RNA, 19 nt, Artificial Sequence
  Description of Artificial Sequence: Synthetic oligonucleotide
aauacuuauguuagggacu

SEQ ID NO: 41548 - RNA, 19 nt, Artificial Sequence
  Description of Artificial Sequence: Synthetic oligonucleotide
aaacucacgcaacccuagc

SEQ ID NO: 41549 - RNA, 19 nt, Artificial Sequence
  Description of Artificial Sequence: Synthetic oligonucleotide
uuuccuggacauccaaagg

SEQ ID NO: 41550 - RNA, 19 nt, Artificial Sequence
  Description of Artificial Sequence: Synthetic oligonucleotide
cuacucuuaggcuuggggc

SEQ ID NO: 41551 - RNA, 19 nt, Artificial Sequence
  Description of Artificial Sequence: Synthetic oligonucleotide
aacccgauaagcuguucuc

SEQ ID NO: 41552 - RNA, 19 nt, Artificial Sequence
  Description of Artificial Sequence: Synthetic oligonucleotide
cacacacacacauacacac

SEQ ID NO: 41553 - RNA, 19 nt, Artificial Sequence
  Description of Artificial Sequence: Synthetic oligonucleotide
cauagaacccgauaagcug

SEQ ID NO: 41554 - RNA, 19 nt, Artificial Sequence
  Description of Artificial Sequence: Synthetic oligonucleotide
agaucuggugucugguugc

SEQ ID NO: 41555 - RNA, 19 nt, Artificial Sequence
  Description of Artificial Sequence: Synthetic oligonucleotide
gacacaagaauacuuaugu

SEQ ID NO: 41556 - RNA, 19 nt, Artificial Sequence
  Description of Artificial Sequence: Synthetic oligonucleotide
guuucugucaaaccagcag

SEQ ID NO: 41557 - RNA, 19 nt, Artificial Sequence
  Description of Artificial Sequence: Synthetic oligonucleotide
auuuacauuuccuggacau

SEQ ID NO: 41558 - RNA, 19 nt, Artificial Sequence
  Description of Artificial Sequence: Synthetic oligonucleotide
gacagacacacacacacac

SEQ ID NO: 41559 - RNA, 19 nt, Artificial Sequence
  Description of Artificial Sequence: Synthetic oligonucleotide
uggaacacgccuuggagcc

SEQ ID NO: 41560 - RNA, 19 nt, Artificial Sequence
  Description of Artificial Sequence: Synthetic oligonucleotide
uccucgaacgcucugcacc

SEQ ID NO: 41561 - RNA, 19 nt, Artificial Sequence
  Description of Artificial Sequence: Synthetic oligonucleotide
gagagcgccauugaugucg

SEQ ID NO: 41562 - RNA, 19 nt, Artificial Sequence
  Description of Artificial Sequence: Synthetic oligonucleotide
uccguaaggaagacaauga

SEQ ID NO: 41563 - RNA, 19 nt, Artificial Sequence
  Description of Artificial Sequence: Synthetic oligonucleotide
cuucaugcaccugugaagg

SEQ ID NO: 41564 - RNA, 19 nt, Artificial Sequence
  Description of Artificial Sequence: Synthetic oligonucleotide
aauuaggaagagaucaagu

SEQ ID NO: 41565 - RNA, 19 nt, Artificial Sequence
  Description of Artificial Sequence: Synthetic oligonucleotide
uguuuauuuuagcuggauc

SEQ ID NO: 41566 - RNA, 19 nt, Artificial Sequence
  Description of Artificial Sequence: Synthetic oligonucleotide
cuagucucauauaauuuac

SEQ ID NO: 41567 - RNA, 19 nt, Artificial Sequence
  Description of Artificial Sequence: Synthetic oligonucleotide
ucuugagaugcgaacaauc

SEQ ID NO: 41568 - RNA, 19 nt, Artificial Sequence
  Description of Artificial Sequence: Synthetic oligonucleotide
ucgauucccuguuagacac

SEQ ID NO: 41569 - RNA, 19 nt, Artificial Sequence
  Description of Artificial Sequence: Synthetic oligonucleotide
agucgauucccuguuagac

SEQ ID NO: 41570 - RNA, 19 nt, Artificial Sequence
  Description of Artificial Sequence: Synthetic oligonucleotide
uggagagcgccauugaugu

SEQ ID NO: 41571 - RNA, 19 nt, Artificial Sequence
  Description of Artificial Sequence: Synthetic oligonucleotide
cuuauguuagggacuguag

SEQ ID NO: 41572 - RNA, 19 nt, Artificial Sequence
  Description of Artificial Sequence: Synthetic oligonucleotide
gguaguucaaggcuaacgc

SEQ ID NO: 41573 - RNA, 19 nt, Artificial Sequence
  Description of Artificial Sequence: Synthetic oligonucleotide
cacauacacacacacacac

SEQ ID NO: 41574 - RNA, 19 nt, Artificial Sequence
  Description of Artificial Sequence: Synthetic oligonucleotide
guaauaggaaggucccugg

SEQ ID NO: 41575 - RNA, 19 nt, Artificial Sequence
  Description of Artificial Sequence: Synthetic oligonucleotide
caaugacgaucucagaacc

SEQ ID NO: 41576 - RNA, 19 nt, Artificial Sequence
  Description of Artificial Sequence: Synthetic oligonucleotide
guauuggucuccccaaagg

SEQ ID NO: 41577 - RNA, 19 nt, Artificial Sequence
  Description of Artificial Sequence: Synthetic oligonucleotide
gacucauuaccuuaacaca

SEQ ID NO: 41578 - RNA, 19 nt, Artificial Sequence
  Description of Artificial Sequence: Synthetic oligonucleotide
guaaucuaugcggaugucg

SEQ ID NO: 41579 - RNA, 19 nt, Artificial Sequence
  Description of Artificial Sequence: Synthetic oligonucleotide
uggaugggaugccagguag

SEQ ID NO: 41580 - RNA, 19 nt, Artificial Sequence
  Description of Artificial Sequence: Synthetic oligonucleotide
cacacacacacacauacac

SEQ ID NO: 41581 - RNA, 19 nt, Artificial Sequence
  Description of Artificial Sequence: Synthetic oligonucleotide
aguugauucuucccacagg

SEQ ID NO: 41582 - RNA, 19 nt, Artificial Sequence
  Description of Artificial Sequence: Synthetic oligonucleotide
cacacacacacacaccugg

SEQ ID NO: 41583 - RNA, 19 nt, Artificial Sequence
  Description of Artificial Sequence: Synthetic oligonucleotide
agguaacaagaaaagcugc

SEQ ID NO: 41584 - RNA, 19 nt, Artificial Sequence
  Description of Artificial Sequence: Synthetic oligonucleotide
aaugacgaucucagaaccg

SEQ ID NO: 41585 - RNA, 19 nt, Artificial Sequence
  Description of Artificial Sequence: Synthetic oligonucleotide
agacccaaagucgauuccc

SEQ ID NO: 41586 - RNA, 19 nt, Artificial Sequence
  Description of Artificial Sequence: Synthetic oligonucleotide
uacuuauuuaaaacaggau

SEQ ID NO: 41587 - RNA, 19 nt, Artificial Sequence
  Description of Artificial Sequence: Synthetic oligonucleotide
cacacacacacacacacac

SEQ ID NO: 41588 - RNA, 19 nt, Artificial Sequence
  Description of Artificial Sequence: Synthetic oligonucleotide
cacacacacauacacacac

SEQ ID NO: 41589 - RNA, 19 nt, Artificial Sequence
  Description of Artificial Sequence: Synthetic oligonucleotide
ucaauuaggaagagaucaa

SEQ ID NO: 41590 - RNA, 19 nt, Artificial Sequence
  Description of Artificial Sequence: Synthetic oligonucleotide
ugggagacugagaagauuu

SEQ ID NO: 41591 - RNA, 19 nt, Artificial Sequence
  Description of Artificial Sequence: Synthetic oligonucleotide
ucuuucaacuagcuggcuc

SEQ ID NO: 41592 - RNA, 19 nt, Artificial Sequence
  Description of Artificial Sequence: Synthetic oligonucleotide
ucaccuuaaggacagccuc

SEQ ID NO: 41593 - RNA, 19 nt, Artificial Sequence
  Description of Artificial Sequence: Synthetic oligonucleotide
aagaaggcggguuucggau

SEQ ID NO: 41594 - RNA, 19 nt, Artificial Sequence
  Description of Artificial Sequence: Synthetic oligonucleotide
aucucagaaccguugaagu

SEQ ID NO: 41595 - RNA, 19 nt, Artificial Sequence
  Description of Artificial Sequence: Synthetic oligonucleotide
uacucuuaggcuuggggcu

SEQ ID NO: 41596 - RNA, 19 nt, Artificial Sequence
  Description of Artificial Sequence: Synthetic oligonucleotide
aauccaaggugguuucgcu

SEQ ID NO: 41597 - RNA, 19 nt, Artificial Sequence
  Description of Artificial Sequence: Synthetic oligonucleotide
guaguucaaggcuaacgcc

SEQ ID NO: 41598 - RNA, 19 nt, Artificial Sequence
  Description of Artificial Sequence: Synthetic oligonucleotide
cacacacauacacacacac

SEQ ID NO: 41599 - RNA, 19 nt, Artificial Sequence
  Description of Artificial Sequence: Synthetic oligonucleotide
uucaccuuaaggacagccu

SEQ ID NO: 41600 - RNA, 19 nt, Artificial Sequence
  Description of Artificial Sequence: Synthetic oligonucleotide
ucuuagugagucugggcug

SEQ ID NO: 41601 - RNA, 19 nt, Artificial Sequence
  Description of Artificial Sequence: Synthetic oligonucleotide
aacucacgcaacccuagcu

SEQ ID NO: 41602 - RNA, 19 nt, Artificial Sequence
  Description of Artificial Sequence: Synthetic oligonucleotide
uuaugcagggacagcgcag

SEQ ID NO: 41603 - RNA, 19 nt, Artificial Sequence
  Description of Artificial Sequence: Synthetic oligonucleotide
auuaugcagggacagcgca

SEQ ID NO: 41604 - RNA, 19 nt, Artificial Sequence
  Description of Artificial Sequence: Synthetic oligonucleotide
aauuguugagcaauuugau

SEQ ID NO: 41605 - RNA, 19 nt, Artificial Sequence
  Description of Artificial Sequence: Synthetic oligonucleotide
agaugcgaacaaucuguac

SEQ ID NO: 41606 - RNA, 19 nt, Artificial Sequence
  Description of Artificial Sequence: Synthetic oligonucleotide
ucauuaccuuaacacauau

SEQ ID NO: 41607 - RNA, 19 nt, Artificial Sequence
  Description of Artificial Sequence: Synthetic oligonucleotide
acgccuuggagccagcauc

SEQ ID NO: 41608 - RNA, 19 nt, Artificial Sequence
  Description of Artificial Sequence: Synthetic oligonucleotide
auacuuauguuagggacug

SEQ ID NO: 41609 - RNA, 19 nt, Artificial Sequence
  Description of Artificial Sequence: Synthetic oligonucleotide
uuucuauuccagacagaca

SEQ ID NO: 41610 - RNA, 19 nt, Artificial Sequence
  Description of Artificial Sequence: Synthetic oligonucleotide
cucacgcaacccuagcugg

SEQ ID NO: 41611 - RNA, 19 nt, Artificial Sequence
  Description of Artificial Sequence: Synthetic oligonucleotide
uguugaacuuacagcacaa

SEQ ID NO: 41612 - RNA, 19 nt, Artificial Sequence
  Description of Artificial Sequence: Synthetic oligonucleotide
agauuuagaucaaugcaca

SEQ ID NO: 41613 - RNA, 19 nt, Artificial Sequence
  Description of Artificial Sequence: Synthetic oligonucleotide
ugaugguccggaaguaugu

SEQ ID NO: 41614 - RNA, 19 nt, Artificial Sequence
  Description of Artificial Sequence: Synthetic oligonucleotide
uugcaugguucaaacaaaa

SEQ ID NO: 41615 - RNA, 19 nt, Artificial Sequence
  Description of Artificial Sequence: Synthetic oligonucleotide
uucuaugaguuuggcaucc

SEQ ID NO: 41616 - RNA, 19 nt, Artificial Sequence
  Description of Artificial Sequence: Synthetic oligonucleotide
gaaacauuaugcagggaca

SEQ ID NO: 41617 - RNA, 19 nt, Artificial Sequence
  Description of Artificial Sequence: Synthetic oligonucleotide
ugagauugcuuaaggggaa

SEQ ID NO: 41618 - RNA, 19 nt, Artificial Sequence
  Description of Artificial Sequence: Synthetic oligonucleotide
uauuugguuagcuguguua

SEQ ID NO: 41619 - RNA, 19 nt, Artificial Sequence
  Description of Artificial Sequence: Synthetic oligonucleotide
aacauacuaugcuguuugu

SEQ ID NO: 41620 - RNA, 19 nt, Artificial Sequence
  Description of Artificial Sequence: Synthetic oligonucleotide
aaucuaugcggaugucgga

SEQ ID NO: 41621 - RNA, 19 nt, Artificial Sequence
  Description of Artificial Sequence: Synthetic oligonucleotide
agcacuuagguuauuagaa

SEQ ID NO: 41622 - RNA, 19 nt, Artificial Sequence
  Description of Artificial Sequence: Synthetic oligonucleotide
ucaugaacgugccguguca

SEQ ID NO: 41623 - RNA, 19 nt, Artificial Sequence
  Description of Artificial Sequence: Synthetic oligonucleotide
agacgcucgaugugguugg

SEQ ID NO: 41624 - RNA, 19 nt, Artificial Sequence
  Description of Artificial Sequence: Synthetic oligonucleotide
uucuccgugucaaauggau

SEQ ID NO: 41625 - RNA, 19 nt, Artificial Sequence
  Description of Artificial Sequence: Synthetic oligonucleotide
uugccggcaaugacgaucu

SEQ ID NO: 41626 - RNA, 19 nt, Artificial Sequence
  Description of Artificial Sequence: Synthetic oligonucleotide
ugcuagucucauauaauuu

SEQ ID NO: 41627 - RNA, 19 nt, Artificial Sequence
  Description of Artificial Sequence: Synthetic oligonucleotide
cagaagauaaccuugguuu

SEQ ID NO: 41628 - RNA, 19 nt, Artificial Sequence
  Description of Artificial Sequence: Synthetic oligonucleotide
auagaacccgauaagcugu

SEQ ID NO: 41629 - RNA, 19 nt, Artificial Sequence
  Description of Artificial Sequence: Synthetic oligonucleotide
cuggagagcgccauugaug

SEQ ID NO: 41630 - RNA, 19 nt, Artificial Sequence
  Description of Artificial Sequence: Synthetic oligonucleotide
ucuccgugucaaauggaug

SEQ ID NO: 41631 - RNA, 19 nt, Artificial Sequence
  Description of Artificial Sequence: Synthetic oligonucleotide
gaaacucacgcaacccuag

SEQ ID NO: 41632 - RNA, 19 nt, Artificial Sequence
  Description of Artificial Sequence: Synthetic oligonucleotide
cucucuguuaugccagugc

SEQ ID NO: 41633 - RNA, 19 nt, Artificial Sequence
  Description of Artificial Sequence: Synthetic oligonucleotide
uauuacuugcagguuggga

SEQ ID NO: 41634 - RNA, 19 nt, Artificial Sequence
  Description of Artificial Sequence: Synthetic oligonucleotide
auugacacaagaauacuua

SEQ ID NO: 41635 - RNA, 19 nt, Artificial Sequence
  Description of Artificial Sequence: Synthetic oligonucleotide
aggaugacccuguuuggug

SEQ ID NO: 41636 - RNA, 19 nt, Artificial Sequence
  Description of Artificial Sequence: Synthetic oligonucleotide
acucauuaccuuaacacau

SEQ ID NO: 41637 - RNA, 19 nt, Artificial Sequence
  Description of Artificial Sequence: Synthetic oligonucleotide
uuucggauuucaucauaga

SEQ ID NO: 41638 - RNA, 19 nt, Artificial Sequence
  Description of Artificial Sequence: Synthetic oligonucleotide
agcagcuacucuuaggcuu

SEQ ID NO: 41639 - RNA, 19 nt, Artificial Sequence
  Description of Artificial Sequence: Synthetic oligonucleotide
gugagauugcuuaagggga

SEQ ID NO: 41640 - RNA, 19 nt, Artificial Sequence
  Description of Artificial Sequence: Synthetic oligonucleotide
ucaaauggaugggaugcca

SEQ ID NO: 41641 - RNA, 19 nt, Artificial Sequence
  Description of Artificial Sequence: Synthetic oligonucleotide
accguugaaguaguugggg

SEQ ID NO: 41642 - RNA, 19 nt, Artificial Sequence
  Description of Artificial Sequence: Synthetic oligonucleotide
agugaccuccacguggaac

SEQ ID NO: 41643 - RNA, 19 nt, Artificial Sequence
  Description of Artificial Sequence: Synthetic oligonucleotide
uauaaauugcaugguucaa

SEQ ID NO: 41644 - RNA, 19 nt, Artificial Sequence
  Description of Artificial Sequence: Synthetic oligonucleotide
gaauccaaggugguuucgc

SEQ ID NO: 41645 - RNA, 19 nt, Artificial Sequence
  Description of Artificial Sequence: Synthetic oligonucleotide
ucuacuacaucaggagggu

SEQ ID NO: 41646 - RNA, 19 nt, Artificial Sequence
  Description of Artificial Sequence: Synthetic oligonucleotide
aucgguuaggccuggcuga

SEQ ID NO: 41647 - RNA, 19 nt, Artificial Sequence
  Description of Artificial Sequence: Synthetic oligonucleotide
caauagcaguagaaacugc

SEQ ID NO: 41648 - RNA, 19 nt, Artificial Sequence
  Description of Artificial Sequence: Synthetic oligonucleotide
uaacgccuggaccuucugc

SEQ ID NO: 41649 - RNA, 19 nt, Artificial Sequence
  Description of Artificial Sequence: Synthetic oligonucleotide
caucgguuaggccuggcug

SEQ ID NO: 41650 - RNA, 19 nt, Artificial Sequence
  Description of Artificial Sequence: Synthetic oligonucleotide
ugagaacggacagaugagu

SEQ ID NO: 41651 - RNA, 19 nt, Artificial Sequence
  Description of Artificial Sequence: Synthetic oligonucleotide
uuauuacuugcagguuggg

SEQ ID NO: 41652 - RNA, 19 nt, Artificial Sequence
  Description of Artificial Sequence: Synthetic oligonucleotide
cuuaacacauauugaaccu

SEQ ID NO: 41653 - RNA, 19 nt, Artificial Sequence
  Description of Artificial Sequence: Synthetic oligonucleotide
cuuagugagucugggcugc

SEQ ID NO: 41654 - RNA, 19 nt, Artificial Sequence
  Description of Artificial Sequence: Synthetic oligonucleotide
aggucaagugaccuggaaa

SEQ ID NO: 41655 - RNA, 19 nt, Artificial Sequence
  Description of Artificial Sequence: Synthetic oligonucleotide
aguauguucuccgugucaa

SEQ ID NO: 41656 - RNA, 19 nt, Artificial Sequence
  Description of Artificial Sequence: Synthetic oligonucleotide
guaugugcgcuguuucuug

SEQ ID NO: 41657 - RNA, 19 nt, Artificial Sequence
  Description of Artificial Sequence: Synthetic oligonucleotide
gacgaucucagaaccguug

SEQ ID NO: 41658 - RNA, 19 nt, Artificial Sequence
  Description of Artificial Sequence: Synthetic oligonucleotide
uccagcgaaaguuucucua

SEQ ID NO: 41659 - RNA, 19 nt, Artificial Sequence
  Description of Artificial Sequence: Synthetic oligonucleotide
ugauucaggaacugaccua

SEQ ID NO: 41660 - RNA, 19 nt, Artificial Sequence
  Description of Artificial Sequence: Synthetic oligonucleotide
uccuaucuaccaucuugcc

SEQ ID NO: 41661 - RNA, 19 nt, Artificial Sequence
  Description of Artificial Sequence: Synthetic oligonucleotide
ugcggaugucggaaagaag

SEQ ID NO: 41662 - RNA, 19 nt, Artificial Sequence
  Description of Artificial Sequence: Synthetic oligonucleotide
acagcgcagagucuuuuca

SEQ ID NO: 41663 - RNA, 19 nt, Artificial Sequence
  Description of Artificial Sequence: Synthetic oligonucleotide
acacacacacaccuggcau

SEQ ID NO: 41664 - RNA, 19 nt, Artificial Sequence
  Description of Artificial Sequence: Synthetic oligonucleotide
ccugagaacggacagauga

SEQ ID NO: 41665 - RNA, 19 nt, Artificial Sequence
  Description of Artificial Sequence: Synthetic oligonucleotide
acgaucucagaaccguuga

SEQ ID NO: 41666 - RNA, 19 nt, Artificial Sequence
  Description of Artificial Sequence: Synthetic oligonucleotide
ccuaucuaccaucuugccg

SEQ ID NO: 41667 - RNA, 19 nt, Artificial Sequence
  Description of Artificial Sequence: Synthetic oligonucleotide
ugguuagcuguguuauugu

SEQ ID NO: 41668 - RNA, 19 nt, Artificial Sequence
  Description of Artificial Sequence: Synthetic oligonucleotide
uaucaucgcuccagaguug

SEQ ID NO: 41669 - RNA, 19 nt, Artificial Sequence
  Description of Artificial Sequence: Synthetic oligonucleotide
augacgaucucagaaccgu

SEQ ID NO: 41670 - RNA, 19 nt, Artificial Sequence
  Description of Artificial Sequence: Synthetic oligonucleotide
gcugggauuuauguaauag

SEQ ID NO: 41671 - RNA, 19 nt, Artificial Sequence
  Description of Artificial Sequence: Synthetic oligonucleotide
cuaugcggaugucggaaag

SEQ ID NO: 41672 - RNA, 19 nt, Artificial Sequence
  Description of Artificial Sequence: Synthetic oligonucleotide
aucugugcgaagaccuggc

SEQ ID NO: 41673 - RNA, 19 nt, Artificial Sequence
  Description of Artificial Sequence: Synthetic oligonucleotide
ucguucccaucacuucccg

SEQ ID NO: 41674 - RNA, 19 nt, Artificial Sequence
  Description of Artificial Sequence: Synthetic oligonucleotide
acacacacacacacacacc

SEQ ID NO: 41675 - RNA, 19 nt, Artificial Sequence
  Description of Artificial Sequence: Synthetic oligonucleotide
aagugccaagcagccuucc

SEQ ID NO: 41676 - RNA, 19 nt, Artificial Sequence
  Description of Artificial Sequence: Synthetic oligonucleotide
aucucaagguaagaucucu

SEQ ID NO: 41677 - RNA, 19 nt, Artificial Sequence
  Description of Artificial Sequence: Synthetic oligonucleotide
gagaacggacagaugaguc

SEQ ID NO: 41678 - RNA, 19 nt, Artificial Sequence
  Description of Artificial Sequence: Synthetic oligonucleotide
uaugugcgcuguuucuugu

SEQ ID NO: 41679 - RNA, 19 nt, Artificial Sequence
  Description of Artificial Sequence: Synthetic oligonucleotide
agagaucaaguaucuggaa

SEQ ID NO: 41680 - RNA, 19 nt, Artificial Sequence
  Description of Artificial Sequence: Synthetic oligonucleotide
uccccgacucccuaccacc

SEQ ID NO: 41681 - RNA, 19 nt, Artificial Sequence
  Description of Artificial Sequence: Synthetic oligonucleotide
ucacgcaacccuagcuggc

SEQ ID NO: 41682 - RNA, 19 nt, Artificial Sequence
  Description of Artificial Sequence: Synthetic oligonucleotide
cacugguaacaaguggucc

SEQ ID NO: 41683 - RNA, 19 nt, Artificial Sequence
  Description of Artificial Sequence: Synthetic oligonucleotide
acacacacacacaccuggc

SEQ ID NO: 41684 - RNA, 19 nt, Artificial Sequence
  Description of Artificial Sequence: Synthetic oligonucleotide
gucgauucccuguuagaca

SEQ ID NO: 41685 - RNA, 19 nt, Artificial Sequence
  Description of Artificial Sequence: Synthetic oligonucleotide
auacggguugcucaucuuu

SEQ ID NO: 41686 - RNA, 19 nt, Artificial Sequence
  Description of Artificial Sequence: Synthetic oligonucleotide
gcguccuuucaccuuaagg

SEQ ID NO: 41687 - RNA, 19 nt, Artificial Sequence
  Description of Artificial Sequence: Synthetic oligonucleotide
ccaaagacgcucgaugugg

SEQ ID NO: 41688 - RNA, 19 nt, Artificial Sequence
  Description of Artificial Sequence: Synthetic oligonucleotide
gaacucggcguccuuucac

SEQ ID NO: 41689 - RNA, 19 nt, Artificial Sequence
  Description of Artificial Sequence: Synthetic oligonucleotide
gcaauauagaauccaaggu

SEQ ID NO: 41690 - RNA, 19 nt, Artificial Sequence
  Description of Artificial Sequence: Synthetic oligonucleotide
uaugcggaugucggaaaga

SEQ ID NO: 41691 - RNA, 19 nt, Artificial Sequence
  Description of Artificial Sequence: Synthetic oligonucleotide
ugguuucuugagagcaggu

SEQ ID NO: 41692 - RNA, 19 nt, Artificial Sequence
  Description of Artificial Sequence: Synthetic oligonucleotide
uggccgguugaugaggaug

SEQ ID NO: 41693 - RNA, 19 nt, Artificial Sequence
  Description of Artificial Sequence: Synthetic oligonucleotide
ugccgugucagaccacagu

SEQ ID NO: 41694 - RNA, 19 nt, Artificial Sequence
  Description of Artificial Sequence: Synthetic oligonucleotide
cauaucaucgcuccagagu

SEQ ID NO: 41695 - RNA, 19 nt, Artificial Sequence
  Description of Artificial Sequence: Synthetic oligonucleotide
gaugguccggaaguaugug

SEQ ID NO: 41696 - RNA, 19 nt, Artificial Sequence
  Description of Artificial Sequence: Synthetic oligonucleotide
auugcaugguucaaacaaa

SEQ ID NO: 41697 - RNA, 19 nt, Artificial Sequence
  Description of Artificial Sequence: Synthetic oligonucleotide
cacacccauaucaucgcuc

SEQ ID NO: 41698 - RNA, 19 nt, Artificial Sequence
  Description of Artificial Sequence: Synthetic oligonucleotide
auauagaauccaagguggu

SEQ ID NO: 41699 - RNA, 19 nt, Artificial Sequence
  Description of Artificial Sequence: Synthetic oligonucleotide
guuagcuguguuauuguaa

SEQ ID NO: 41700 - RNA, 19 nt, Artificial Sequence
  Description of Artificial Sequence: Synthetic oligonucleotide
ggugugaucucaagguaag

SEQ ID NO: 41701 - RNA, 19 nt, Artificial Sequence
  Description of Artificial Sequence: Synthetic oligonucleotide
ucggcguccuuucaccuua

SEQ ID NO: 41702 - RNA, 19 nt, Artificial Sequence
  Description of Artificial Sequence: Synthetic oligonucleotide
aucaucgcuccagaguugu

SEQ ID NO: 41703 - RNA, 19 nt, Artificial Sequence
  Description of Artificial Sequence: Synthetic oligonucleotide
agguugggagacugagaag

SEQ ID NO: 41704 - RNA, 19 nt, Artificial Sequence
  Description of Artificial Sequence: Synthetic oligonucleotide
cacacacacacacacaccu

SEQ ID NO: 41705 - RNA, 19 nt, Artificial Sequence
  Description of Artificial Sequence: Synthetic oligonucleotide
gaacccgauaagcuguucu

SEQ ID NO: 41706 - RNA, 19 nt, Artificial Sequence
  Description of Artificial Sequence: Synthetic oligonucleotide
uugaggguauuggucuccc

SEQ ID NO: 41707 - RNA, 19 nt, Artificial Sequence
  Description of Artificial Sequence: Synthetic oligonucleotide
aucuaugcggaugucggaa

SEQ ID NO: 41708 - RNA, 19 nt, Artificial Sequence
  Description of Artificial Sequence: Synthetic oligonucleotide
agaccaaccguaggauguc

SEQ ID NO: 41709 - RNA, 19 nt, Artificial Sequence
  Description of Artificial Sequence: Synthetic oligonucleotide
agccccgauuccauuuucc

SEQ ID NO: 41710 - RNA, 19 nt, Artificial Sequence
  Description of Artificial Sequence: Synthetic oligonucleotide
uucaacuagcuggcucucc

SEQ ID NO: 41711 - RNA, 19 nt, Artificial Sequence
  Description of Artificial Sequence: Synthetic oligonucleotide
gguuagaauuaucaaauuu

SEQ ID NO: 41712 - RNA, 19 nt, Artificial Sequence
  Description of Artificial Sequence: Synthetic oligonucleotide
caugaacgugccgugucag

SEQ ID NO: 41713 - RNA, 19 nt, Artificial Sequence
  Description of Artificial Sequence: Synthetic oligonucleotide
uaguagacccaaagucgau

SEQ ID NO: 41714 - RNA, 19 nt, Artificial Sequence
  Description of Artificial Sequence: Synthetic oligonucleotide
cuggaaagucaauuaggaa

SEQ ID NO: 41715 - RNA, 19 nt, Artificial Sequence
  Description of Artificial Sequence: Synthetic oligonucleotide
gagaccaaccguaggaugu

SEQ ID NO: 41716 - RNA, 19 nt, Artificial Sequence
  Description of Artificial Sequence: Synthetic oligonucleotide
aaugagggacacacuccga

SEQ ID NO: 41717 - RNA, 19 nt, Artificial Sequence
  Description of Artificial Sequence: Synthetic oligonucleotide
ugaggguauuggucucccc

SEQ ID NO: 41718 - RNA, 19 nt, Artificial Sequence
  Description of Artificial Sequence: Synthetic oligonucleotide
acacacacacacauacaca

SEQ ID NO: 41719 - RNA, 19 nt, Artificial Sequence
  Description of Artificial Sequence: Synthetic oligonucleotide
acacuccgaucuucaaugu

SEQ ID NO: 41720 - RNA, 19 nt, Artificial Sequence
  Description of Artificial Sequence: Synthetic oligonucleotide
gaugugaaaguugauucuu

SEQ ID NO: 41721 - RNA, 19 nt, Artificial Sequence
  Description of Artificial Sequence: Synthetic oligonucleotide
aguagacccaaagucgauu

SEQ ID NO: 41722 - RNA, 19 nt, Artificial Sequence
  Description of Artificial Sequence: Synthetic oligonucleotide
agugccaagcagccuuccu

SEQ ID NO: 41723 - RNA, 19 nt, Artificial Sequence
  Description of Artificial Sequence: Synthetic oligonucleotide
agauaaccuugguuucuau

SEQ ID NO: 41724 - RNA, 19 nt, Artificial Sequence
  Description of Artificial Sequence: Synthetic oligonucleotide
gucucauauaauuuacauu

SEQ ID NO: 41725 - RNA, 19 nt, Artificial Sequence
  Description of Artificial Sequence: Synthetic oligonucleotide
agaggucgccuuggcaugg

SEQ ID NO: 41726 - RNA, 19 nt, Artificial Sequence
  Description of Artificial Sequence: Synthetic oligonucleotide
ucaaguccccgacucccua

SEQ ID NO: 41727 - RNA, 19 nt, Artificial Sequence
  Description of Artificial Sequence: Synthetic oligonucleotide
acacauacacacacacaca

SEQ ID NO: 41728 - RNA, 19 nt, Artificial Sequence
  Description of Artificial Sequence: Synthetic oligonucleotide
acauacacacacacacaca

SEQ ID NO: 41729 - RNA, 19 nt, Artificial Sequence
  Description of Artificial Sequence: Synthetic oligonucleotide
gguaguucuuauacacccc

SEQ ID NO: 41730 - RNA, 19 nt, Artificial Sequence
  Description of Artificial Sequence: Synthetic oligonucleotide
acgcaacccuagcuggcuc

SEQ ID NO: 41731 - RNA, 19 nt, Artificial Sequence
  Description of Artificial Sequence: Synthetic oligonucleotide
aucuggagagcgccauuga

SEQ ID NO: 41732 - RNA, 19 nt, Artificial Sequence
  Description of Artificial Sequence: Synthetic oligonucleotide
agccauacggguugcucau

SEQ ID NO: 41733 - RNA, 19 nt, Artificial Sequence
  Description of Artificial Sequence: Synthetic oligonucleotide
agaaacucacgcaacccua

SEQ ID NO: 41734 - RNA, 19 nt, Artificial Sequence
  Description of Artificial Sequence: Synthetic oligonucleotide
ggcgcagguaacaagaaaa

SEQ ID NO: 41735 - RNA, 19 nt, Artificial Sequence
  Description of Artificial Sequence: Synthetic oligonucleotide
ucgguuaggccuggcugag

SEQ ID NO: 41736 - RNA, 19 nt, Artificial Sequence
  Description of Artificial Sequence: Synthetic oligonucleotide
auucaggaacugaccuaac

SEQ ID NO: 41737 - RNA, 19 nt, Artificial Sequence
  Description of Artificial Sequence: Synthetic oligonucleotide
acacacauacacacacaca

SEQ ID NO: 41738 - RNA, 19 nt, Artificial Sequence
  Description of Artificial Sequence: Synthetic oligonucleotide
ggaaggucccuggaacacg

SEQ ID NO: 41739 - RNA, 19 nt, Artificial Sequence
  Description of Artificial Sequence: Synthetic oligonucleotide
acagacacacacacacaca

SEQ ID NO: 41740 - RNA, 19 nt, Artificial Sequence
  Description of Artificial Sequence: Synthetic oligonucleotide
ccacacucugguugcaagg

SEQ ID NO: 41741 - RNA, 19 nt, Artificial Sequence
  Description of Artificial Sequence: Synthetic oligonucleotide
cagacacacacacacacau

SEQ ID NO: 41742 - RNA, 19 nt, Artificial Sequence
  Description of Artificial Sequence: Synthetic oligonucleotide
gcacagaucuggugucugg

SEQ ID NO: 41743 - RNA, 19 nt, Artificial Sequence
  Description of Artificial Sequence: Synthetic oligonucleotide
ugcccugacucauuaccuu

SEQ ID NO: 41744 - RNA, 19 nt, Artificial Sequence
  Description of Artificial Sequence: Synthetic oligonucleotide
auacacacacacacacaca

SEQ ID NO: 41745 - RNA, 19 nt, Artificial Sequence
  Description of Artificial Sequence: Synthetic oligonucleotide
acugaccuaacaggccaug

SEQ ID NO: 41746 - RNA, 19 nt, Artificial Sequence
  Description of Artificial Sequence: Synthetic oligonucleotide
gaccaaccguaggaugucc

SEQ ID NO: 41747 - RNA, 19 nt, Artificial Sequence
  Description of Artificial Sequence: Synthetic oligonucleotide
cacacacacacaccuggca

SEQ ID NO: 41748 - RNA, 19 nt, Artificial Sequence
  Description of Artificial Sequence: Synthetic oligonucleotide
cuguguuauuguaauugcu

SEQ ID NO: 41749 - RNA, 19 nt, Artificial Sequence
  Description of Artificial Sequence: Synthetic oligonucleotide
ugguggguucguggaacag

SEQ ID NO: 41750 - RNA, 19 nt, Artificial Sequence
  Description of Artificial Sequence: Synthetic oligonucleotide
gcucauagcaagagacaag

SEQ ID NO: 41751 - RNA, 19 nt, Artificial Sequence
  Description of Artificial Sequence: Synthetic oligonucleotide
uugggagacugagaagauu

SEQ ID NO: 41752 - RNA, 19 nt, Artificial Sequence
  Description of Artificial Sequence: Synthetic oligonucleotide
uuagugagucugggcugcc

SEQ ID NO: 41753 - RNA, 19 nt, Artificial Sequence
  Description of Artificial Sequence: Synthetic oligonucleotide
ggggcuucuaugaguuugg

SEQ ID NO: 41754 - RNA, 19 nt, Artificial Sequence
  Description of Artificial Sequence: Synthetic oligonucleotide
aacugaccuaacaggccau

SEQ ID NO: 41755 - RNA, 19 nt, Artificial Sequence
  Description of Artificial Sequence: Synthetic oligonucleotide
acacacacacauacacaca

SEQ ID NO: 41756 - RNA, 19 nt, Artificial Sequence
  Description of Artificial Sequence: Synthetic oligonucleotide
acacacacauacacacaca

SEQ ID NO: 41757 - RNA, 19 nt, Artificial Sequence
  Description of Artificial Sequence: Synthetic oligonucleotide
agacagacacacacacaca

SEQ ID NO: 41758 - RNA, 19 nt, Artificial Sequence
  Description of Artificial Sequence: Synthetic oligonucleotide
acacacacacacacauaca

SEQ ID NO: 41759 - RNA, 19 nt, Artificial Sequence
  Description of Artificial Sequence: Synthetic oligonucleotide
acacacacacacacaccug

SEQ ID NO: 41760 - RNA, 19 nt, Artificial Sequence
  Description of Artificial Sequence: Synthetic oligonucleotide
caagaaaagcugcauccau

SEQ ID NO: 41761 - RNA, 19 nt, Artificial Sequence
  Description of Artificial Sequence: Synthetic oligonucleotide
ggcaggcgcagguaacaag

SEQ ID NO: 41762 - RNA, 19 nt, Artificial Sequence
  Description of Artificial Sequence: Synthetic oligonucleotide
acgucauugccgaugccaa

SEQ ID NO: 41763 - RNA, 19 nt, Artificial Sequence
  Description of Artificial Sequence: Synthetic oligonucleotide
acacacacacacacacaca

SEQ ID NO: 41764 - RNA, 19 nt, Artificial Sequence
  Description of Artificial Sequence: Synthetic oligonucleotide
cuaacgccuggaccuucug

SEQ ID NO: 41765 - RNA, 19 nt, Artificial Sequence
  Description of Artificial Sequence: Synthetic oligonucleotide
gcaggcgcagguaacaaga

SEQ ID NO: 41766 - RNA, 19 nt, Artificial Sequence
  Description of Artificial Sequence: Synthetic oligonucleotide
agcugggauuuauguaaua

SEQ ID NO: 41767 - RNA, 19 nt, Artificial Sequence
  Description of Artificial Sequence: Synthetic oligonucleotide
guuguucguucccaucacu

SEQ ID NO: 41768 - RNA, 19 nt, Artificial Sequence
  Description of Artificial Sequence: Synthetic oligonucleotide
gguuagcuguguuauugua

SEQ ID NO: 41769 - RNA, 19 nt, Artificial Sequence
  Description of Artificial Sequence: Synthetic oligonucleotide
agcaucgguuaggccuggc

SEQ ID NO: 41770 - RNA, 19 nt, Artificial Sequence
  Description of Artificial Sequence: Synthetic oligonucleotide
ucaucgcuccagaguuguc

SEQ ID NO: 41771 - RNA, 19 nt, Artificial Sequence
  Description of Artificial Sequence: Synthetic oligonucleotide
cggaugucggaaagaaggc

SEQ ID NO: 41772 - RNA, 19 nt, Artificial Sequence
  Description of Artificial Sequence: Synthetic oligonucleotide
aguccccgacucccuacca

SEQ ID NO: 41773 - RNA, 19 nt, Artificial Sequence
  Description of Artificial Sequence: Synthetic oligonucleotide
gaaggcggguuucggauuu

SEQ ID NO: 41774 - RNA, 19 nt, Artificial Sequence
  Description of Artificial Sequence: Synthetic oligonucleotide
cucuguuaugccagugcua

SEQ ID NO: 41775 - RNA, 19 nt, Artificial Sequence
  Description of Artificial Sequence: Synthetic oligonucleotide
cgaacgcucugcaccaccg

SEQ ID NO: 41776 - RNA, 19 nt, Artificial Sequence
  Description of Artificial Sequence: Synthetic oligonucleotide
guccccgacucccuaccac

SEQ ID NO: 41777 - RNA, 19 nt, Artificial Sequence
  Description of Artificial Sequence: Synthetic oligonucleotide
gacgcucgaugugguuggg

SEQ ID NO: 41778 - RNA, 19 nt, Artificial Sequence
  Description of Artificial Sequence: Synthetic oligonucleotide
ccgauaagcuguucuccug

SEQ ID NO: 41779 - RNA, 19 nt, Artificial Sequence
  Description of Artificial Sequence: Synthetic oligonucleotide
gguggguucguggaacaga

SEQ ID NO: 41780 - RNA, 19 nt, Artificial Sequence
  Description of Artificial Sequence: Synthetic oligonucleotide
caccaagacaggccaguaa

SEQ ID NO: 41781 - RNA, 19 nt, Artificial Sequence
  Description of Artificial Sequence: Synthetic oligonucleotide
caaagacgcucgauguggu

SEQ ID NO: 41782 - RNA, 19 nt, Artificial Sequence
  Description of Artificial Sequence: Synthetic oligonucleotide
gugugaucucaagguaaga

SEQ ID NO: 41783 - RNA, 19 nt, Artificial Sequence
  Description of Artificial Sequence: Synthetic oligonucleotide
cagcuacucuuaggcuugg

SEQ ID NO: 41784 - RNA, 19 nt, Artificial Sequence
  Description of Artificial Sequence: Synthetic oligonucleotide
ccacuaagauucuuguugu

SEQ ID NO: 41785 - RNA, 19 nt, Artificial Sequence
  Description of Artificial Sequence: Synthetic oligonucleotide
cugcacggccagcuuugug

SEQ ID NO: 41786 - RNA, 19 nt, Artificial Sequence
  Description of Artificial Sequence: Synthetic oligonucleotide
caaagucgauucccuguua

SEQ ID NO: 41787 - RNA, 19 nt, Artificial Sequence
  Description of Artificial Sequence: Synthetic oligonucleotide
agacacacacacacacaua

SEQ ID NO: 41788 - RNA, 19 nt, Artificial Sequence
  Description of Artificial Sequence: Synthetic oligonucleotide
gaacaggguuuugguggca

SEQ ID NO: 41789 - RNA, 19 nt, Artificial Sequence
  Description of Artificial Sequence: Synthetic oligonucleotide
cagacaugccgcggguguc

SEQ ID NO: 41790 - RNA, 19 nt, Artificial Sequence
  Description of Artificial Sequence: Synthetic oligonucleotide
gguaaucuaugcggauguc

SEQ ID NO: 41791 - RNA, 19 nt, Artificial Sequence
  Description of Artificial Sequence: Synthetic oligonucleotide
gcuguuuauuuuagcugga

SEQ ID NO: 41792 - RNA, 19 nt, Artificial Sequence
  Description of Artificial Sequence: Synthetic oligonucleotide
ccgugucagaccacaguuc

SEQ ID NO: 41793 - RNA, 19 nt, Artificial Sequence
  Description of Artificial Sequence: Synthetic oligonucleotide
gaacgcucugcaccaccgu

SEQ ID NO: 41794 - RNA, 19 nt, Artificial Sequence
  Description of Artificial Sequence: Synthetic oligonucleotide
ugccagugcuagucucaua

SEQ ID NO: 41795 - RNA, 19 nt, Artificial Sequence
  Description of Artificial Sequence: Synthetic oligonucleotide
gcgaacaaucuguacccua

SEQ ID NO: 41796 - RNA, 19 nt, Artificial Sequence
  Description of Artificial Sequence: Synthetic oligonucleotide
ccucgaacgcucugcacca

SEQ ID NO: 41797 - RNA, 19 nt, Artificial Sequence
  Description of Artificial Sequence: Synthetic oligonucleotide
caacccuagcuggcucuug

SEQ ID NO: 41798 - RNA, 19 nt, Artificial Sequence
  Description of Artificial Sequence: Synthetic oligonucleotide
ggcguccuuucaccuuaag

SEQ ID NO: 41799 - RNA, 19 nt, Artificial Sequence
  Description of Artificial Sequence: Synthetic oligonucleotide
gcagacaugccgcgggugu

SEQ ID NO: 41800 - RNA, 19 nt, Artificial Sequence
  Description of Artificial Sequence: Synthetic oligonucleotide
cuguuuauuuuagcuggau

SEQ ID NO: 41801 - RNA, 19 nt, Artificial Sequence
  Description of Artificial Sequence: Synthetic oligonucleotide
ccacauaauuguugagcaa

SEQ ID NO: 41802 - RNA, 19 nt, Artificial Sequence
  Description of Artificial Sequence: Synthetic oligonucleotide
gccgugucagaccacaguu

SEQ ID NO: 41803 - RNA, 19 nt, Artificial Sequence
  Description of Artificial Sequence: Synthetic oligonucleotide
gucggaaagaaggcggguu

SEQ ID NO: 41804 - RNA, 19 nt, Artificial Sequence
  Description of Artificial Sequence: Synthetic oligonucleotide
cagcaucgguuaggccugg

SEQ ID NO: 41805 - RNA, 19 nt, Artificial Sequence
  Description of Artificial Sequence: Synthetic oligonucleotide
gguggguuucccauccgua

SEQ ID NO: 41806 - RNA, 19 nt, Artificial Sequence
  Description of Artificial Sequence: Synthetic oligonucleotide
ugaccggcuguggccuggu

SEQ ID NO: 41807 - RNA, 19 nt, Artificial Sequence
  Description of Artificial Sequence: Synthetic oligonucleotide
cgugucagaccacaguucu

SEQ ID NO: 41808 - RNA, 19 nt, Artificial Sequence
  Description of Artificial Sequence: Synthetic oligonucleotide
ggagagcgccauugauguc

SEQ ID NO: 41809 - RNA, 19 nt, Artificial Sequence
  Description of Artificial Sequence: Synthetic oligonucleotide
ccacguggaacugaucaaa

SEQ ID NO: 41810 - RNA, 19 nt, Artificial Sequence
  Description of Artificial Sequence: Synthetic oligonucleotide
cuguuaugccagugcuagu

SEQ ID NO: 41811 - RNA, 19 nt, Artificial Sequence
  Description of Artificial Sequence: Synthetic oligonucleotide
acgugccgugucagaccac

SEQ ID NO: 41812 - RNA, 19 nt, Artificial Sequence
  Description of Artificial Sequence: Synthetic oligonucleotide
gcaucgguuaggccuggcu

SEQ ID NO: 41813 - RNA, 19 nt, Artificial Sequence
  Description of Artificial Sequence: Synthetic oligonucleotide
cccgauaagcuguucuccu

SEQ ID NO: 41814 - RNA, 19 nt, Artificial Sequence
  Description of Artificial Sequence: Synthetic oligonucleotide
ugccggcaaugacgaucuc

SEQ ID NO: 41815 - RNA, 19 nt, Artificial Sequence
  Description of Artificial Sequence: Synthetic oligonucleotide
cacgcaacccuagcuggcu

SEQ ID NO: 41816 - RNA, 19 nt, Artificial Sequence
  Description of Artificial Sequence: Synthetic oligonucleotide
acaccccgucaaucagcuu

SEQ ID NO: 41817 - RNA, 19 nt, Artificial Sequence
  Description of Artificial Sequence: Synthetic oligonucleotide
cggaaagaaggcggguuuc

SEQ ID NO: 41818 - RNA, 19 nt, Artificial Sequence
  Description of Artificial Sequence: Synthetic oligonucleotide
ggaacacgccuuggagcca

SEQ ID NO: 41819 - RNA, 19 nt, Artificial Sequence
  Description of Artificial Sequence: Synthetic oligonucleotide
cacggccagcuuuguguua

SEQ ID NO: 41820 - RNA, 19 nt, Artificial Sequence
  Description of Artificial Sequence: Synthetic oligonucleotide
cacgccuuggagccagcau

SEQ ID NO: 41821 - RNA, 19 nt, Artificial Sequence
  Description of Artificial Sequence: Synthetic oligonucleotide
ggaugggaugccagguagu

SEQ ID NO: 41822 - RNA, 19 nt, Artificial Sequence
  Description of Artificial Sequence: Synthetic oligonucleotide
cucggcguccuuucaccuu

SEQ ID NO: 41823 - RNA, 19 nt, Artificial Sequence
  Description of Artificial Sequence: Synthetic oligonucleotide
ccagcccaucugugcgaag

SEQ ID NO: 41824 - RNA, 19 nt, Artificial Sequence
  Description of Artificial Sequence: Synthetic oligonucleotide
cgugccgugucagaccaca

SEQ ID NO: 41825 - RNA, 19 nt, Artificial Sequence
  Description of Artificial Sequence: Synthetic oligonucleotide
ccccgacucccuaccacca

SEQ ID NO: 41826 - RNA, 19 nt, Artificial Sequence
  Description of Artificial Sequence: Synthetic oligonucleotide
cucuuaggcuuggggcucu

SEQ ID NO: 41827 - RNA, 19 nt, Artificial Sequence
  Description of Artificial Sequence: Synthetic oligonucleotide
cagaaccguugaaguaguu

SEQ ID NO: 41828 - RNA, 19 nt, Artificial Sequence
  Description of Artificial Sequence: Synthetic oligonucleotide
gcacggccagcuuuguguu

SEQ ID NO: 41829 - RNA, 19 nt, Artificial Sequence
  Description of Artificial Sequence: Synthetic oligonucleotide
ccguaggauguccccaggu

SEQ ID NO: 41830 - RNA, 19 nt, Artificial Sequence
  Description of Artificial Sequence: Synthetic oligonucleotide
cgcggguguccuccagccc

SEQ ID NO: 41831 - RNA, 19 nt, Artificial Sequence
  Description of Artificial Sequence: Synthetic oligonucleotide
gagcgccauugaugucggu

SEQ ID NO: 41832 - RNA, 19 nt, Artificial Sequence
  Description of Artificial Sequence: Synthetic oligonucleotide
gccuuggcauggugcccga

SEQ ID NO: 41833 - RNA, 19 nt, Artificial Sequence
  Description of Artificial Sequence: Synthetic oligonucleotide
caccaccgucucagguccu

SEQ ID NO: 41834 - RNA, 19 nt, Artificial Sequence
  Description of Artificial Sequence: Synthetic oligonucleotide
uaugagaucuuucugaccg

SEQ ID NO: 41835 - RNA, 19 nt, Artificial Sequence
  Description of Artificial Sequence: Synthetic oligonucleotide
gaagguauggauuuaacgg

SEQ ID NO: 41836 - RNA, 19 nt, Artificial Sequence
  Description of Artificial Sequence: Synthetic oligonucleotide
uuaauugcucagaagaugg

SEQ ID NO: 41837 - RNA, 19 nt, Artificial Sequence
  Description of Artificial Sequence: Synthetic oligonucleotide
uguaauaugaggcauuggc

SEQ ID NO: 41838 - RNA, 19 nt, Artificial Sequence
  Description of Artificial Sequence: Synthetic oligonucleotide
uucguuuucaaucacaaga

SEQ ID NO: 41839 - RNA, 19 nt, Artificial Sequence
  Description of Artificial Sequence: Synthetic oligonucleotide
acaaaauacuacuacugcc

SEQ ID NO: 41840 - RNA, 19 nt, Artificial Sequence
  Description of Artificial Sequence: Synthetic oligonucleotide
aaugcaauccacuauuucu

SEQ ID NO: 41841 - RNA, 19 nt, Artificial Sequence
  Description of Artificial Sequence: Synthetic oligonucleotide
aaaacaaugacaggucuac

SEQ ID NO: 41842 - RNA, 19 nt, Artificial Sequence
  Description of Artificial Sequence: Synthetic oligonucleotide
uguauuaugugucuaaguc

SEQ ID NO: 41843 - RNA, 19 nt, Artificial Sequence
  Description of Artificial Sequence: Synthetic oligonucleotide
uuucacgaagcuuagcucg

SEQ ID NO: 41844 - RNA, 19 nt, Artificial Sequence
  Description of Artificial Sequence: Synthetic oligonucleotide
auaaauuaguaguacucgg

SEQ ID NO: 41845 - RNA, 19 nt, Artificial Sequence
  Description of Artificial Sequence: Synthetic oligonucleotide
auuaguaguacucggaucu

SEQ ID NO: 41846 - RNA, 19 nt, Artificial Sequence
  Description of Artificial Sequence: Synthetic oligonucleotide
aaaaucuucuguccgccac

SEQ ID NO: 41847 - RNA, 19 nt, Artificial Sequence
  Description of Artificial Sequence: Synthetic oligonucleotide
ugaagguauggauuuaacg

SEQ ID NO: 41848 - RNA, 19 nt, Artificial Sequence
  Description of Artificial Sequence: Synthetic oligonucleotide
uuuuaacugggcauuacag

SEQ ID NO: 41849 - RNA, 19 nt, Artificial Sequence
  Description of Artificial Sequence: Synthetic oligonucleotide
ugcacuagguauaagaaac

SEQ ID NO: 41850 - RNA, 19 nt, Artificial Sequence
  Description of Artificial Sequence: Synthetic oligonucleotide
aacagugccaaauucauuu

SEQ ID NO: 41851 - RNA, 19 nt, Artificial Sequence
  Description of Artificial Sequence: Synthetic oligonucleotide
ugucuaagucacaauaucc

SEQ ID NO: 41852 - RNA, 19 nt, Artificial Sequence
  Description of Artificial Sequence: Synthetic oligonucleotide
uguacgguaaguagcauug

SEQ ID NO: 41853 - RNA, 19 nt, Artificial Sequence
  Description of Artificial Sequence: Synthetic oligonucleotide
uggagaaucacccugcaga

SEQ ID NO: 41854 - RNA, 19 nt, Artificial Sequence
  Description of Artificial Sequence: Synthetic oligonucleotide
ucugacauagcuuuguuuc

SEQ ID NO: 41855 - RNA, 19 nt, Artificial Sequence
  Description of Artificial Sequence: Synthetic oligonucleotide
aaaucuaauucaaauuguc

SEQ ID NO: 41856 - RNA, 19 nt, Artificial Sequence
  Description of Artificial Sequence: Synthetic oligonucleotide
uagcuaaugguccaaaucu

SEQ ID NO: 41857 - RNA, 19 nt, Artificial Sequence
  Description of Artificial Sequence: Synthetic oligonucleotide
uuugagcucaauuucacga

SEQ ID NO: 41858 - RNA, 19 nt, Artificial Sequence
  Description of Artificial Sequence: Synthetic oligonucleotide
uacgaaaaucuucuguccg

SEQ ID NO: 41859 - RNA, 19 nt, Artificial Sequence
  Description of Artificial Sequence: Synthetic oligonucleotide
ucuaggagaaucuuuguga

SEQ ID NO: 41860 - RNA, 19 nt, Artificial Sequence
  Description of Artificial Sequence: Synthetic oligonucleotide
auacgaaaaucuucugucc

SEQ ID NO: 41861 - RNA, 19 nt, Artificial Sequence
  Description of Artificial Sequence: Synthetic oligonucleotide
ucagaagauggauugagug

SEQ ID NO: 41862 - RNA, 19 nt, Artificial Sequence
  Description of Artificial Sequence: Synthetic oligonucleotide
uccgucaagaucaucaaug

SEQ ID NO: 41863 - RNA, 19 nt, Artificial Sequence
  Description of Artificial Sequence: Synthetic oligonucleotide
aagguauggauuuaacggu

SEQ ID NO: 41864 - RNA, 19 nt, Artificial Sequence
  Description of Artificial Sequence: Synthetic oligonucleotide
uuaaaguucgcuucgcugu

SEQ ID NO: 41865 - RNA, 19 nt, Artificial Sequence
  Description of Artificial Sequence: Synthetic oligonucleotide
uggacgacugauuuggagg

SEQ ID NO: 41866 - RNA, 19 nt, Artificial Sequence
  Description of Artificial Sequence: Synthetic oligonucleotide
uucacgaguacuuucauuc

SEQ ID NO: 41867 - RNA, 19 nt, Artificial Sequence
  Description of Artificial Sequence: Synthetic oligonucleotide
uaaauuaguaguacucgga

SEQ ID NO: 41868 - RNA, 19 nt, Artificial Sequence
  Description of Artificial Sequence: Synthetic oligonucleotide
uaaauaaacuuguuucaug

SEQ ID NO: 41869 - RNA, 19 nt, Artificial Sequence
  Description of Artificial Sequence: Synthetic oligonucleotide
uuuacacuagcuaaugguc

SEQ ID NO: 41870 - RNA, 19 nt, Artificial Sequence
  Description of Artificial Sequence: Synthetic oligonucleotide
aguaauuuauacaauauaa

SEQ ID NO: 41871 - RNA, 19 nt, Artificial Sequence
  Description of Artificial Sequence: Synthetic oligonucleotide
aaauuaguaguacucggau

SEQ ID NO: 41872 - RNA, 19 nt, Artificial Sequence
  Description of Artificial Sequence: Synthetic oligonucleotide
uuacacuagcuaauggucc

SEQ ID NO: 41873 - RNA, 19 nt, Artificial Sequence
  Description of Artificial Sequence: Synthetic oligonucleotide
accgagaccgccuagaccu

SEQ ID NO: 41874 - RNA, 19 nt, Artificial Sequence
  Description of Artificial Sequence: Synthetic oligonucleotide
aaaucgaacuuaaccugcc

SEQ ID NO: 41875 - RNA, 19 nt, Artificial Sequence
  Description of Artificial Sequence: Synthetic oligonucleotide
uaagacagaauaccauggc

SEQ ID NO: 41876 - RNA, 19 nt, Artificial Sequence
  Description of Artificial Sequence: Synthetic oligonucleotide
ugcauuaacaaccccgccu

SEQ ID NO: 41877 - RNA, 19 nt, Artificial Sequence
  Description of Artificial Sequence: Synthetic oligonucleotide
aacauaggauuguugauuu

SEQ ID NO: 41878 - RNA, 19 nt, Artificial Sequence
  Description of Artificial Sequence: Synthetic oligonucleotide
auagauugcccaaucuucc

SEQ ID NO: 41879 - RNA, 19 nt, Artificial Sequence
  Description of Artificial Sequence: Synthetic oligonucleotide
uguaguaaacaugggcugg

SEQ ID NO: 41880 - RNA, 19 nt, Artificial Sequence
  Description of Artificial Sequence: Synthetic oligonucleotide
uuuauagggacuccgucaa

SEQ ID NO: 41881 - RNA, 19 nt, Artificial Sequence
  Description of Artificial Sequence: Synthetic oligonucleotide
uguucgacuuggcauauca

SEQ ID NO: 41882 - RNA, 19 nt, Artificial Sequence
  Description of Artificial Sequence: Synthetic oligonucleotide
cauuggacgacugauuugg

SEQ ID NO: 41883 - RNA, 19 nt, Artificial Sequence
  Description of Artificial Sequence: Synthetic oligonucleotide
aaaucuugaagauggcuua

SEQ ID NO: 41884 - RNA, 19 nt, Artificial Sequence
  Description of Artificial Sequence: Synthetic oligonucleotide
aggcacaaaacaaacuugc

SEQ ID NO: 41885 - RNA, 19 nt, Artificial Sequence
  Description of Artificial Sequence: Synthetic oligonucleotide
aguaaugcaauccacuauu

SEQ ID NO: 41886 - RNA, 19 nt, Artificial Sequence
  Description of Artificial Sequence: Synthetic oligonucleotide
aaggcacuccaucaagauc

SEQ ID NO: 41887 - RNA, 19 nt, Artificial Sequence
  Description of Artificial Sequence: Synthetic oligonucleotide
auacccacucacuuacgcc

SEQ ID NO: 41888 - RNA, 19 nt, Artificial Sequence
  Description of Artificial Sequence: Synthetic oligonucleotide
ugaggucugaaaauaucug

SEQ ID NO: 41889 - RNA, 19 nt, Artificial Sequence
  Description of Artificial Sequence: Synthetic oligonucleotide
agauccauuguacacauuu

SEQ ID NO: 41890 - RNA, 19 nt, Artificial Sequence
  Description of Artificial Sequence: Synthetic oligonucleotide
gauuucuuaggcgaccuag

SEQ ID NO: 41891 - RNA, 19 nt, Artificial Sequence
  Description of Artificial Sequence: Synthetic oligonucleotide
uuuuaggucguguucgacu

SEQ ID NO: 41892 - RNA, 19 nt, Artificial Sequence
  Description of Artificial Sequence: Synthetic oligonucleotide
ucuuugugagaugaccugg

SEQ ID NO: 41893 - RNA, 19 nt, Artificial Sequence
  Description of Artificial Sequence: Synthetic oligonucleotide
auauaaucuggcaaucuuc

SEQ ID NO: 41894 - RNA, 19 nt, Artificial Sequence
  Description of Artificial Sequence: Synthetic oligonucleotide
uuagagaacuuagauucag

SEQ ID NO: 41895 - RNA, 19 nt, Artificial Sequence
  Description of Artificial Sequence: Synthetic oligonucleotide
uucgacuuggcauaucacu

SEQ ID NO: 41896 - RNA, 19 nt, Artificial Sequence
  Description of Artificial Sequence: Synthetic oligonucleotide
uaaccuacagacaauuaua

SEQ ID NO: 41897 - RNA, 19 nt, Artificial Sequence
  Description of Artificial Sequence: Synthetic oligonucleotide
gacggggcaacuuugaaga

SEQ ID NO: 41898 - RNA, 19 nt, Artificial Sequence
  Description of Artificial Sequence: Synthetic oligonucleotide
uguggauuaauguuuccaa

SEQ ID NO: 41899 - RNA, 19 nt, Artificial Sequence
  Description of Artificial Sequence: Synthetic oligonucleotide
ugagcucaauuucacgaag

SEQ ID NO: 41900 - RNA, 19 nt, Artificial Sequence
  Description of Artificial Sequence: Synthetic oligonucleotide
acauacgaaaaucuucugu

SEQ ID NO: 41901 - RNA, 19 nt, Artificial Sequence
  Description of Artificial Sequence: Synthetic oligonucleotide
cuuaaaguucgcuucgcug

SEQ ID NO: 41902 - RNA, 19 nt, Artificial Sequence
  Description of Artificial Sequence: Synthetic oligonucleotide
uacgguaaguagcauugag

SEQ ID NO: 41903 - RNA, 19 nt, Artificial Sequence
  Description of Artificial Sequence: Synthetic oligonucleotide
agguauaaauuaguaguac

SEQ ID NO: 41904 - RNA, 19 nt, Artificial Sequence
  Description of Artificial Sequence: Synthetic oligonucleotide
accguucugauuuugguga

SEQ ID NO: 41905 - RNA, 19 nt, Artificial Sequence
  Description of Artificial Sequence: Synthetic oligonucleotide
aacaaccccgccucgaaca

SEQ ID NO: 41906 - RNA, 19 nt, Artificial Sequence
  Description of Artificial Sequence: Synthetic oligonucleotide
cagccucccauuuugacgg

SEQ ID NO: 41907 - RNA, 19 nt, Artificial Sequence
  Description of Artificial Sequence: Synthetic oligonucleotide
uuuggaucgagauuccaau

SEQ ID NO: 41908 - RNA, 19 nt, Artificial Sequence
  Description of Artificial Sequence: Synthetic oligonucleotide
guauuaugugucuaaguca

SEQ ID NO: 41909 - RNA, 19 nt, Artificial Sequence
  Description of Artificial Sequence: Synthetic oligonucleotide
uucauuggacgacugauuu

SEQ ID NO: 41910 - RNA, 19 nt, Artificial Sequence
  Description of Artificial Sequence: Synthetic oligonucleotide
auuucacucgccuaccacu

SEQ ID NO: 41911 - RNA, 19 nt, Artificial Sequence
  Description of Artificial Sequence: Synthetic oligonucleotide
agaauugaauaaagcuucc

SEQ ID NO: 41912 - RNA, 19 nt, Artificial Sequence
  Description of Artificial Sequence: Synthetic oligonucleotide
uucccugauuucuuaggcg

SEQ ID NO: 41913 - RNA, 19 nt, Artificial Sequence
  Description of Artificial Sequence: Synthetic oligonucleotide
uaacaaauaccacuucaua

SEQ ID NO: 41914 - RNA, 19 nt, Artificial Sequence
  Description of Artificial Sequence: Synthetic oligonucleotide
uuacccguugcuuaaaauu

SEQ ID NO: 41915 - RNA, 19 nt, Artificial Sequence
  Description of Artificial Sequence: Synthetic oligonucleotide
ucccugauuucuuaggcga

SEQ ID NO: 41916 - RNA, 19 nt, Artificial Sequence
  Description of Artificial Sequence: Synthetic oligonucleotide
ucgaacaaauguuuucacu

SEQ ID NO: 41917 - RNA, 19 nt, Artificial Sequence
  Description of Artificial Sequence: Synthetic oligonucleotide
aguacugugucgccuuuuc

SEQ ID NO: 41918 - RNA, 19 nt, Artificial Sequence
  Description of Artificial Sequence: Synthetic oligonucleotide
uauaugucaguguuuguuu

SEQ ID NO: 41919 - RNA, 19 nt, Artificial Sequence
  Description of Artificial Sequence: Synthetic oligonucleotide
uaacaauauucaacucugc

SEQ ID NO: 41920 - RNA, 19 nt, Artificial Sequence
  Description of Artificial Sequence: Synthetic oligonucleotide
uuucacucgccuaccacug

SEQ ID NO: 41921 - RNA, 19 nt, Artificial Sequence
  Description of Artificial Sequence: Synthetic oligonucleotide
gacaacgacucaguaaugc

SEQ ID NO: 41922 - RNA, 19 nt, Artificial Sequence
  Description of Artificial Sequence: Synthetic oligonucleotide
guaaguagcauugaggucu

SEQ ID NO: 41923 - RNA, 19 nt, Artificial Sequence
  Description of Artificial Sequence: Synthetic oligonucleotide
cuuuaagggacuugguguc

SEQ ID NO: 41924 - RNA, 19 nt, Artificial Sequence
  Description of Artificial Sequence: Synthetic oligonucleotide
uuuugacggggcaacuuug

SEQ ID NO: 41925 - RNA, 19 nt, Artificial Sequence
  Description of Artificial Sequence: Synthetic oligonucleotide
guuacucaugaguuuacac

SEQ ID NO: 41926 - RNA, 19 nt, Artificial Sequence
  Description of Artificial Sequence: Synthetic oligonucleotide
aauaagugacggcaucuua

SEQ ID NO: 41927 - RNA, 19 nt, Artificial Sequence
  Description of Artificial Sequence: Synthetic oligonucleotide
cuagcuaaugguccaaauc

SEQ ID NO: 41928 - RNA, 19 nt, Artificial Sequence
  Description of Artificial Sequence: Synthetic oligonucleotide
uacacuagcuaauggucca

SEQ ID NO: 41929 - RNA, 19 nt, Artificial Sequence
  Description of Artificial Sequence: Synthetic oligonucleotide
ugacggggcaacuuugaag

SEQ ID NO: 41930 - RNA, 19 nt, Artificial Sequence
  Description of Artificial Sequence: Synthetic oligonucleotide
aucuccuacaucaugugag

SEQ ID NO: 41931 - RNA, 19 nt, Artificial Sequence
  Description of Artificial Sequence: Synthetic oligonucleotide
aaaguucgcuucgcugugc

SEQ ID NO: 41932 - RNA, 19 nt, Artificial Sequence
  Description of Artificial Sequence: Synthetic oligonucleotide
ucuucuaauuuaucccgcu

SEQ ID NO: 41933 - RNA, 19 nt, Artificial Sequence
  Description of Artificial Sequence: Synthetic oligonucleotide
cuguaguaaacaugggcug

SEQ ID NO: 41934 - RNA, 19 nt, Artificial Sequence
  Description of Artificial Sequence: Synthetic oligonucleotide
uuuaugucucucgucacgu

SEQ ID NO: 41935 - RNA, 19 nt, Artificial Sequence
  Description of Artificial Sequence: Synthetic oligonucleotide
uauggauuuaacgguggug

SEQ ID NO: 41936 - RNA, 19 nt, Artificial Sequence
  Description of Artificial Sequence: Synthetic oligonucleotide
uuuaggucguguucgacuu

SEQ ID NO: 41937 - RNA, 19 nt, Artificial Sequence
  Description of Artificial Sequence: Synthetic oligonucleotide
uuguaaagugcacuaggua

SEQ ID NO: 41938 - RNA, 19 nt, Artificial Sequence
  Description of Artificial Sequence: Synthetic oligonucleotide
aaucgaacuuaaccugccu

SEQ ID NO: 41939 - RNA, 19 nt, Artificial Sequence
  Description of Artificial Sequence: Synthetic oligonucleotide
ucgacuuggcauaucacua

SEQ ID NO: 41940 - RNA, 19 nt, Artificial Sequence
  Description of Artificial Sequence: Synthetic oligonucleotide
acaaaagaggggaagacau

SEQ ID NO: 41941 - RNA, 19 nt, Artificial Sequence
  Description of Artificial Sequence: Synthetic oligonucleotide
gaccguucugauuuuggug

SEQ ID NO: 41942 - RNA, 19 nt, Artificial Sequence
  Description of Artificial Sequence: Synthetic oligonucleotide
uggaucgagauuccaauuu

SEQ ID NO: 41943 - RNA, 19 nt, Artificial Sequence
  Description of Artificial Sequence: Synthetic oligonucleotide
aguaaacaugggcuggugu

SEQ ID NO: 41944 - RNA, 19 nt, Artificial Sequence
  Description of Artificial Sequence: Synthetic oligonucleotide
ucgugcuggucaaauagcu

SEQ ID NO: 41945 - RNA, 19 nt, Artificial Sequence
  Description of Artificial Sequence: Synthetic oligonucleotide
gacuccgucaagaucauca

SEQ ID NO: 41946 - RNA, 19 nt, Artificial Sequence
  Description of Artificial Sequence: Synthetic oligonucleotide
cuucauaacuuugagcuca

SEQ ID NO: 41947 - RNA, 19 nt, Artificial Sequence
  Description of Artificial Sequence: Synthetic oligonucleotide
uuugacggggcaacuuuga

SEQ ID NO: 41948 - RNA, 19 nt, Artificial Sequence
  Description of Artificial Sequence: Synthetic oligonucleotide
cucuaggagaaucuuugug

SEQ ID NO: 41949 - RNA, 19 nt, Artificial Sequence
  Description of Artificial Sequence: Synthetic oligonucleotide
agcucaauuucacgaagcu

SEQ ID NO: 41950 - RNA, 19 nt, Artificial Sequence
  Description of Artificial Sequence: Synthetic oligonucleotide
aaccuacagacaauuauaa

SEQ ID NO: 41951 - RNA, 19 nt, Artificial Sequence
  Description of Artificial Sequence: Synthetic oligonucleotide
ucauuggacgacugauuug

SEQ ID NO: 41952 - RNA, 19 nt, Artificial Sequence
  Description of Artificial Sequence: Synthetic oligonucleotide
uuauagauuuuaccucuuu

SEQ ID NO: 41953 - RNA, 19 nt, Artificial Sequence
  Description of Artificial Sequence: Synthetic oligonucleotide
cauccauagaccgucguug

SEQ ID NO: 41954 - RNA, 19 nt, Artificial Sequence
  Description of Artificial Sequence: Synthetic oligonucleotide
gauuucacucgccuaccac

SEQ ID NO: 41955 - RNA, 19 nt, Artificial Sequence
  Description of Artificial Sequence: Synthetic oligonucleotide
aguacuuagagaacuuaga

SEQ ID NO: 41956 - RNA, 19 nt, Artificial Sequence
  Description of Artificial Sequence: Synthetic oligonucleotide
uuaacaaccccgccucgaa

SEQ ID NO: 41957 - RNA, 19 nt, Artificial Sequence
  Description of Artificial Sequence: Synthetic oligonucleotide
caugguagaagauaaaauu

SEQ ID NO: 41958 - RNA, 19 nt, Artificial Sequence
  Description of Artificial Sequence: Synthetic oligonucleotide
uguuuaugucucucgucac

SEQ ID NO: 41959 - RNA, 19 nt, Artificial Sequence
  Description of Artificial Sequence: Synthetic oligonucleotide
uuucauuggacgacugauu

SEQ ID NO: 41960 - RNA, 19 nt, Artificial Sequence
  Description of Artificial Sequence: Synthetic oligonucleotide
ucgaacuuaaccugccuuu

SEQ ID NO: 41961 - RNA, 19 nt, Artificial Sequence
  Description of Artificial Sequence: Synthetic oligonucleotide
gauggauugagugcuuuga

SEQ ID NO: 41962 - RNA, 19 nt, Artificial Sequence
  Description of Artificial Sequence: Synthetic oligonucleotide
uggaccgugagcuuucuuu

SEQ ID NO: 41963 - RNA, 19 nt, Artificial Sequence
  Description of Artificial Sequence: Synthetic oligonucleotide
auuuugacggggcaacuuu

SEQ ID NO: 41964 - RNA, 19 nt, Artificial Sequence
  Description of Artificial Sequence: Synthetic oligonucleotide
acauaggauuguugauuuc

SEQ ID NO: 41965 - RNA, 19 nt, Artificial Sequence
  Description of Artificial Sequence: Synthetic oligonucleotide
ggcuuuuaggucguguucg

SEQ ID NO: 41966 - RNA, 19 nt, Artificial Sequence
  Description of Artificial Sequence: Synthetic oligonucleotide
cuuuuaacugggcauuaca

SEQ ID NO: 41967 - RNA, 19 nt, Artificial Sequence
  Description of Artificial Sequence: Synthetic oligonucleotide
acucgccuaccacugcuac

SEQ ID NO: 41968 - RNA, 19 nt, Artificial Sequence
  Description of Artificial Sequence: Synthetic oligonucleotide
ucacuuacgccuucugauc

SEQ ID NO: 41969 - RNA, 19 nt, Artificial Sequence
  Description of Artificial Sequence: Synthetic oligonucleotide
uaauccucgcaagauuucu

SEQ ID NO: 41970 - RNA, 19 nt, Artificial Sequence
  Description of Artificial Sequence: Synthetic oligonucleotide
ugaccguucugauuuuggu

SEQ ID NO: 41971 - RNA, 19 nt, Artificial Sequence
  Description of Artificial Sequence: Synthetic oligonucleotide
uuucaugguagaagauaaa

SEQ ID NO: 41972 - RNA, 19 nt, Artificial Sequence
  Description of Artificial Sequence: Synthetic oligonucleotide
agauggauugagugcuuug

SEQ ID NO: 41973 - RNA, 19 nt, Artificial Sequence
  Description of Artificial Sequence: Synthetic oligonucleotide
uuauagggacuccgucaag

SEQ ID NO: 41974 - RNA, 19 nt, Artificial Sequence
  Description of Artificial Sequence: Synthetic oligonucleotide
agaccgagaccgccuagac

SEQ ID NO: 41975 - RNA, 19 nt, Artificial Sequence
  Description of Artificial Sequence: Synthetic oligonucleotide
cuucaucaguucuaggcca

SEQ ID NO: 41976 - RNA, 19 nt, Artificial Sequence
  Description of Artificial Sequence: Synthetic oligonucleotide
uuuagagcucuuucagcau

SEQ ID NO: 41977 - RNA, 19 nt, Artificial Sequence
  Description of Artificial Sequence: Synthetic oligonucleotide
uggguauggaaaccuuuaa

SEQ ID NO: 41978 - RNA, 19 nt, Artificial Sequence
  Description of Artificial Sequence: Synthetic oligonucleotide
acucacuuacgccuucuga

SEQ ID NO: 41979 - RNA, 19 nt, Artificial Sequence
  Description of Artificial Sequence: Synthetic oligonucleotide
uuaggcguccuugaaccug

SEQ ID NO: 41980 - RNA, 19 nt, Artificial Sequence
  Description of Artificial Sequence: Synthetic oligonucleotide
acuuacgccuucugaucuc

SEQ ID NO: 41981 - RNA, 19 nt, Artificial Sequence
  Description of Artificial Sequence: Synthetic oligonucleotide
uaguaguacucggaucucc

SEQ ID NO: 41982 - RNA, 19 nt, Artificial Sequence
  Description of Artificial Sequence: Synthetic oligonucleotide
agaaucuuugugagaugac

SEQ ID NO: 41983 - RNA, 19 nt, Artificial Sequence
  Description of Artificial Sequence: Synthetic oligonucleotide
cauagaccgucguugacca

SEQ ID NO: 41984 - RNA, 19 nt, Artificial Sequence
  Description of Artificial Sequence: Synthetic oligonucleotide
ugcaauccacuauuucuuc

SEQ ID NO: 41985 - RNA, 19 nt, Artificial Sequence
  Description of Artificial Sequence: Synthetic oligonucleotide
auaagugacggcaucuuaa

SEQ ID NO: 41986 - RNA, 19 nt, Artificial Sequence
  Description of Artificial Sequence: Synthetic oligonucleotide
acuacuacugccagcagau

SEQ ID NO: 41987 - RNA, 19 nt, Artificial Sequence
  Description of Artificial Sequence: Synthetic oligonucleotide
ugaccguucugaccguucu

SEQ ID NO: 41988 - RNA, 19 nt, Artificial Sequence
  Description of Artificial Sequence: Synthetic oligonucleotide
uaggcguccuugaaccuga

SEQ ID NO: 41989 - RNA, 19 nt, Artificial Sequence
  Description of Artificial Sequence: Synthetic oligonucleotide
uuguacgguaaguagcauu

SEQ ID NO: 41990 - RNA, 19 nt, Artificial Sequence
  Description of Artificial Sequence: Synthetic oligonucleotide
ucguguucgacuuggcaua

SEQ ID NO: 41991 - RNA, 19 nt, Artificial Sequence
  Description of Artificial Sequence: Synthetic oligonucleotide
ggcauaucacuaucugagg

SEQ ID NO: 41992 - RNA, 19 nt, Artificial Sequence
  Description of Artificial Sequence: Synthetic oligonucleotide
auggggauuucacucgccu

SEQ ID NO: 41993 - RNA, 19 nt, Artificial Sequence
  Description of Artificial Sequence: Synthetic oligonucleotide
aucgaacuuaaccugccuu

SEQ ID NO: 41994 - RNA, 19 nt, Artificial Sequence
  Description of Artificial Sequence: Synthetic oligonucleotide
uuaggcgaccuagaccgag

SEQ ID NO: 41995 - RNA, 19 nt, Artificial Sequence
  Description of Artificial Sequence: Synthetic oligonucleotide
ucacucgccuaccacugcu

SEQ ID NO: 41996 - RNA, 19 nt, Artificial Sequence
  Description of Artificial Sequence: Synthetic oligonucleotide
aaauaccacuucauaccca

SEQ ID NO: 41997 - RNA, 19 nt, Artificial Sequence
  Description of Artificial Sequence: Synthetic oligonucleotide
gguggccuuucauuggacg

SEQ ID NO: 41998 - RNA, 19 nt, Artificial Sequence
  Description of Artificial Sequence: Synthetic oligonucleotide
aggcgaccuagaccgagac

SEQ ID NO: 41999 - RNA, 19 nt, Artificial Sequence
  Description of Artificial Sequence: Synthetic oligonucleotide
gacuuggcauaucacuauc

SEQ ID NO: 42000 - RNA, 19 nt, Artificial Sequence
  Description of Artificial Sequence: Synthetic oligonucleotide
cagcggugcgccaucaagc

SEQ ID NO: 42001 - RNA, 19 nt, Artificial Sequence
  Description of Artificial Sequence: Synthetic oligonucleotide
acuagcuaaugguccaaau

SEQ ID NO: 42002 - RNA, 19 nt, Artificial Sequence
  Description of Artificial Sequence: Synthetic oligonucleotide
gauuuaacggugguggccu

SEQ ID NO: 42003 - RNA, 19 nt, Artificial Sequence
  Description of Artificial Sequence: Synthetic oligonucleotide
ugacauagcuuuguuucaa

SEQ ID NO: 42004 - RNA, 19 nt, Artificial Sequence
  Description of Artificial Sequence: Synthetic oligonucleotide
cucugacuggguuagaaua

SEQ ID NO: 42005 - RNA, 19 nt, Artificial Sequence
  Description of Artificial Sequence: Synthetic oligonucleotide
cuuggaguuaauccucgca

SEQ ID NO: 42006 - RNA, 19 nt, Artificial Sequence
  Description of Artificial Sequence: Synthetic oligonucleotide
uccuguaauaugaggcauu

SEQ ID NO: 42007 - RNA, 19 nt, Artificial Sequence
  Description of Artificial Sequence: Synthetic oligonucleotide
ucgccuaccacugcuacuc

SEQ ID NO: 42008 - RNA, 19 nt, Artificial Sequence
  Description of Artificial Sequence: Synthetic oligonucleotide
cuaauuuaucccgcuguuc

SEQ ID NO: 42009 - RNA, 19 nt, Artificial Sequence
  Description of Artificial Sequence: Synthetic oligonucleotide
uggagcuuguaaagugcac

SEQ ID NO: 42010 - RNA, 19 nt, Artificial Sequence
  Description of Artificial Sequence: Synthetic oligonucleotide
uuaagggacuuggugucac

SEQ ID NO: 42011 - RNA, 19 nt, Artificial Sequence
  Description of Artificial Sequence: Synthetic oligonucleotide
uagaccgucguugaccauc

SEQ ID NO: 42012 - RNA, 19 nt, Artificial Sequence
  Description of Artificial Sequence: Synthetic oligonucleotide
uuucacgaguacuuucauu

SEQ ID NO: 42013 - RNA, 19 nt, Artificial Sequence
  Description of Artificial Sequence: Synthetic oligonucleotide
caggaaugcucuuucauua

SEQ ID NO: 42014 - RNA, 19 nt, Artificial Sequence
  Description of Artificial Sequence: Synthetic oligonucleotide
ucucugacuggguuagaau

SEQ ID NO: 42015 - RNA, 19 nt, Artificial Sequence
  Description of Artificial Sequence: Synthetic oligonucleotide
uuuaacggugguggccucc

SEQ ID NO: 42016 - RNA, 19 nt, Artificial Sequence
  Description of Artificial Sequence: Synthetic oligonucleotide
accgucguugaccaucaga

SEQ ID NO: 42017 - RNA, 19 nt, Artificial Sequence
  Description of Artificial Sequence: Synthetic oligonucleotide
uuuaggcguccuugaaccu

SEQ ID NO: 42018 - RNA, 19 nt, Artificial Sequence
  Description of Artificial Sequence: Synthetic oligonucleotide
uaacaaccccgccucgaac

SEQ ID NO: 42019 - RNA, 19 nt, Artificial Sequence
  Description of Artificial Sequence: Synthetic oligonucleotide
ccgucaagaucaucaaugg

SEQ ID NO: 42020 - RNA, 19 nt, Artificial Sequence
  Description of Artificial Sequence: Synthetic oligonucleotide
gaccgccuagaccuuuuag

SEQ ID NO: 42021 - RNA, 19 nt, Artificial Sequence
  Description of Artificial Sequence: Synthetic oligonucleotide
ugugucgccuuuuccuuuc

SEQ ID NO: 42022 - RNA, 19 nt, Artificial Sequence
  Description of Artificial Sequence: Synthetic oligonucleotide
aucugacauagcuuuguuu

SEQ ID NO: 42023 - RNA, 19 nt, Artificial Sequence
  Description of Artificial Sequence: Synthetic oligonucleotide
auagggacuccgucaagau

SEQ ID NO: 42024 - RNA, 19 nt, Artificial Sequence
  Description of Artificial Sequence: Synthetic oligonucleotide
auucacaaguuuuccuauu

SEQ ID NO: 42025 - RNA, 19 nt, Artificial Sequence
  Description of Artificial Sequence: Synthetic oligonucleotide
uccauagaccgucguugac

SEQ ID NO: 42026 - RNA, 19 nt, Artificial Sequence
  Description of Artificial Sequence: Synthetic oligonucleotide
uucacucgccuaccacugc

SEQ ID NO: 42027 - RNA, 19 nt, Artificial Sequence
  Description of Artificial Sequence: Synthetic oligonucleotide
agcggugcgccaucaagcu

SEQ ID NO: 42028 - RNA, 19 nt, Artificial Sequence
  Description of Artificial Sequence: Synthetic oligonucleotide
uuggaucgagauuccaauu

SEQ ID NO: 42029 - RNA, 19 nt, Artificial Sequence
  Description of Artificial Sequence: Synthetic oligonucleotide
acuuaaccugccuuuuguu

SEQ ID NO: 42030 - RNA, 19 nt, Artificial Sequence
  Description of Artificial Sequence: Synthetic oligonucleotide
gaccgagaccgccuagacc

SEQ ID NO: 42031 - RNA, 19 nt, Artificial Sequence
  Description of Artificial Sequence: Synthetic oligonucleotide
agcaggucauuacccguug

SEQ ID NO: 42032 - RNA, 19 nt, Artificial Sequence
  Description of Artificial Sequence: Synthetic oligonucleotide
uggggaggcucaaaucgaa

SEQ ID NO: 42033 - RNA, 19 nt, Artificial Sequence
  Description of Artificial Sequence: Synthetic oligonucleotide
acugugucgccuuuuccuu

SEQ ID NO: 42034 - RNA, 19 nt, Artificial Sequence
  Description of Artificial Sequence: Synthetic oligonucleotide
uugacggggcaacuuugaa

SEQ ID NO: 42035 - RNA, 19 nt, Artificial Sequence
  Description of Artificial Sequence: Synthetic oligonucleotide
acauccauagaccgucguu

SEQ ID NO: 42036 - RNA, 19 nt, Artificial Sequence
  Description of Artificial Sequence: Synthetic oligonucleotide
guacugugucgccuuuucc

SEQ ID NO: 42037 - RNA, 19 nt, Artificial Sequence
  Description of Artificial Sequence: Synthetic oligonucleotide
auuucuuaggcgaccuaga

SEQ ID NO: 42038 - RNA, 19 nt, Artificial Sequence
  Description of Artificial Sequence: Synthetic oligonucleotide
gucauuacccguugcuuaa

SEQ ID NO: 42039 - RNA, 19 nt, Artificial Sequence
  Description of Artificial Sequence: Synthetic oligonucleotide
ggauuuaacggugguggcc

SEQ ID NO: 42040 - RNA, 19 nt, Artificial Sequence
  Description of Artificial Sequence: Synthetic oligonucleotide
cugcauuaacaaccccgcc

SEQ ID NO: 42041 - RNA, 19 nt, Artificial Sequence
  Description of Artificial Sequence: Synthetic oligonucleotide
uaggcgaccuagaccgaga

SEQ ID NO: 42042 - RNA, 19 nt, Artificial Sequence
  Description of Artificial Sequence: Synthetic oligonucleotide
ccgccuagaccuuuuaggc

SEQ ID NO: 42043 - RNA, 19 nt, Artificial Sequence
  Description of Artificial Sequence: Synthetic oligonucleotide
aagauggauugagugcuuu

SEQ ID NO: 42044 - RNA, 19 nt, Artificial Sequence
  Description of Artificial Sequence: Synthetic oligonucleotide
acaucccaugaagguaugg

SEQ ID NO: 42045 - RNA, 19 nt, Artificial Sequence
  Description of Artificial Sequence: Synthetic oligonucleotide
auacuacuacugccagcag

SEQ ID NO: 42046 - RNA, 19 nt, Artificial Sequence
  Description of Artificial Sequence: Synthetic oligonucleotide
ucuucgugcuggucaaaua

SEQ ID NO: 42047 - RNA, 19 nt, Artificial Sequence
  Description of Artificial Sequence: Synthetic oligonucleotide
uagaccgagaccgccuaga

SEQ ID NO: 42048 - RNA, 19 nt, Artificial Sequence
  Description of Artificial Sequence: Synthetic oligonucleotide
ggacgacugauuuggagga

SEQ ID NO: 42049 - RNA, 19 nt, Artificial Sequence
  Description of Artificial Sequence: Synthetic oligonucleotide
acgaagcuuagcucguuuu

SEQ ID NO: 42050 - RNA, 19 nt, Artificial Sequence
  Description of Artificial Sequence: Synthetic oligonucleotide
ucccacuuagaaguuguua

SEQ ID NO: 42051 - RNA, 19 nt, Artificial Sequence
  Description of Artificial Sequence: Synthetic oligonucleotide
uaucccgcuguucuuccuu

SEQ ID NO: 42052 - RNA, 19 nt, Artificial Sequence
  Description of Artificial Sequence: Synthetic oligonucleotide
gcuacuccgagaugggcug

SEQ ID NO: 42053 - RNA, 19 nt, Artificial Sequence
  Description of Artificial Sequence: Synthetic oligonucleotide
ccuguaguaaacaugggcu

SEQ ID NO: 42054 - RNA, 19 nt, Artificial Sequence
  Description of Artificial Sequence: Synthetic oligonucleotide
gguaaguagcauugagguc

SEQ ID NO: 42055 - RNA, 19 nt, Artificial Sequence
  Description of Artificial Sequence: Synthetic oligonucleotide
gucguguucgacuuggcau

SEQ ID NO: 42056 - RNA, 19 nt, Artificial Sequence
  Description of Artificial Sequence: Synthetic oligonucleotide
ucacuaucugagguccaga

SEQ ID NO: 42057 - RNA, 19 nt, Artificial Sequence
  Description of Artificial Sequence: Synthetic oligonucleotide
cucacuuacgccuucugau

SEQ ID NO: 42058 - RNA, 19 nt, Artificial Sequence
  Description of Artificial Sequence: Synthetic oligonucleotide
ugauuucuuaggcgaccua

SEQ ID NO: 42059 - RNA, 19 nt, Artificial Sequence
  Description of Artificial Sequence: Synthetic oligonucleotide
cuuuuaggucguguucgac

SEQ ID NO: 42060 - RNA, 19 nt, Artificial Sequence
  Description of Artificial Sequence: Synthetic oligonucleotide
ggaaugcucuuucauuaga

SEQ ID NO: 42061 - RNA, 19 nt, Artificial Sequence
  Description of Artificial Sequence: Synthetic oligonucleotide
guuggagaaucacccugca

SEQ ID NO: 42062 - RNA, 19 nt, Artificial Sequence
  Description of Artificial Sequence: Synthetic oligonucleotide
ccaaauauaaucuggcaau

SEQ ID NO: 42063 - RNA, 19 nt, Artificial Sequence
  Description of Artificial Sequence: Synthetic oligonucleotide
gaccuagaccgagaccgcc

SEQ ID NO: 42064 - RNA, 19 nt, Artificial Sequence
  Description of Artificial Sequence: Synthetic oligonucleotide
aaccccgccucgaacaaau

SEQ ID NO: 42065 - RNA, 19 nt, Artificial Sequence
  Description of Artificial Sequence: Synthetic oligonucleotide
uggggauuucacucgccua

SEQ ID NO: 42066 - RNA, 19 nt, Artificial Sequence
  Description of Artificial Sequence: Synthetic oligonucleotide
caucuguggauuaauguuu

SEQ ID NO: 42067 - RNA, 19 nt, Artificial Sequence
  Description of Artificial Sequence: Synthetic oligonucleotide
aauccucgcaagauuucuu

SEQ ID NO: 42068 - RNA, 19 nt, Artificial Sequence
  Description of Artificial Sequence: Synthetic oligonucleotide
ccugaacauaggauuguug

SEQ ID NO: 42069 - RNA, 19 nt, Artificial Sequence
  Description of Artificial Sequence: Synthetic oligonucleotide
gcuagcaucucuaggagaa

SEQ ID NO: 42070 - RNA, 19 nt, Artificial Sequence
  Description of Artificial Sequence: Synthetic oligonucleotide
cauaaucaucaagaacaga

SEQ ID NO: 42071 - RNA, 19 nt, Artificial Sequence
  Description of Artificial Sequence: Synthetic oligonucleotide
gagaccgggacugggaucu

SEQ ID NO: 42072 - RNA, 19 nt, Artificial Sequence
  Description of Artificial Sequence: Synthetic oligonucleotide
uccggcacauccucuguuu

SEQ ID NO: 42073 - RNA, 19 nt, Artificial Sequence
  Description of Artificial Sequence: Synthetic oligonucleotide
gaggcucaaaucgaacuua

SEQ ID NO: 42074 - RNA, 19 nt, Artificial Sequence
  Description of Artificial Sequence: Synthetic oligonucleotide
aguguucgacuuguuccug

SEQ ID NO: 42075 - RNA, 19 nt, Artificial Sequence
  Description of Artificial Sequence: Synthetic oligonucleotide
ggucauuacccguugcuua

SEQ ID NO: 42076 - RNA, 19 nt, Artificial Sequence
  Description of Artificial Sequence: Synthetic oligonucleotide
uccucaaugggagcaccau

SEQ ID NO: 42077 - RNA, 19 nt, Artificial Sequence
  Description of Artificial Sequence: Synthetic oligonucleotide
auuaugugucuaagucaca

SEQ ID NO: 42078 - RNA, 19 nt, Artificial Sequence
  Description of Artificial Sequence: Synthetic oligonucleotide
ccgucguugaccaucagaa

SEQ ID NO: 42079 - RNA, 19 nt, Artificial Sequence
  Description of Artificial Sequence: Synthetic oligonucleotide
gccucgaacaaauguuuuc

SEQ ID NO: 42080 - RNA, 19 nt, Artificial Sequence
  Description of Artificial Sequence: Synthetic oligonucleotide
cugaccguucugaccguuc

SEQ ID NO: 42081 - RNA, 19 nt, Artificial Sequence
  Description of Artificial Sequence: Synthetic oligonucleotide
agcuaaugguccaaaucuu

SEQ ID NO: 42082 - RNA, 19 nt, Artificial Sequence
  Description of Artificial Sequence: Synthetic oligonucleotide
aaccugauggcgaccuuuu

SEQ ID NO: 42083 - RNA, 19 nt, Artificial Sequence
  Description of Artificial Sequence: Synthetic oligonucleotide
guauggauuuaacgguggu

SEQ ID NO: 42084 - RNA, 19 nt, Artificial Sequence
  Description of Artificial Sequence: Synthetic oligonucleotide
cgucaagaucaucaauggg

SEQ ID NO: 42085 - RNA, 19 nt, Artificial Sequence
  Description of Artificial Sequence: Synthetic oligonucleotide
ucauuacccguugcuuaaa

SEQ ID NO: 42086 - RNA, 19 nt, Artificial Sequence
  Description of Artificial Sequence: Synthetic oligonucleotide
cacucacuuacgccuucug

SEQ ID NO: 42087 - RNA, 19 nt, Artificial Sequence
  Description of Artificial Sequence: Synthetic oligonucleotide
uucgcuucgcugugcucau

SEQ ID NO: 42088 - RNA, 19 nt, Artificial Sequence
  Description of Artificial Sequence: Synthetic oligonucleotide
acgacugauuuggaggauu

SEQ ID NO: 42089 - RNA, 19 nt, Artificial Sequence
  Description of Artificial Sequence: Synthetic oligonucleotide
ggauagauugcccaaucuu

SEQ ID NO: 42090 - RNA, 19 nt, Artificial Sequence
  Description of Artificial Sequence: Synthetic oligonucleotide
cauuacccguugcuuaaaa

SEQ ID NO: 42091 - RNA, 19 nt, Artificial Sequence
  Description of Artificial Sequence: Synthetic oligonucleotide
acgaguacuuucauuccua

SEQ ID NO: 42092 - RNA, 19 nt, Artificial Sequence
  Description of Artificial Sequence: Synthetic oligonucleotide
uuccuugagcgcucccuuu

SEQ ID NO: 42093 - RNA, 19 nt, Artificial Sequence
  Description of Artificial Sequence: Synthetic oligonucleotide
cacuuacgccuucugaucu

SEQ ID NO: 42094 - RNA, 19 nt, Artificial Sequence
  Description of Artificial Sequence: Synthetic oligonucleotide
aaguacugugucgccuuuu

SEQ ID NO: 42095 - RNA, 19 nt, Artificial Sequence
  Description of Artificial Sequence: Synthetic oligonucleotide
auuguacgguaaguagcau

SEQ ID NO: 42096 - RNA, 19 nt, Artificial Sequence
  Description of Artificial Sequence: Synthetic oligonucleotide
agaccgucguugaccauca

SEQ ID NO: 42097 - RNA, 19 nt, Artificial Sequence
  Description of Artificial Sequence: Synthetic oligonucleotide
cguccuugaaccugauggc

SEQ ID NO: 42098 - RNA, 19 nt, Artificial Sequence
  Description of Artificial Sequence: Synthetic oligonucleotide
ccucccauuuugacggggc

SEQ ID NO: 42099 - RNA, 19 nt, Artificial Sequence
  Description of Artificial Sequence: Synthetic oligonucleotide
ggucguguucgacuuggca

SEQ ID NO: 42100 - RNA, 19 nt, Artificial Sequence
  Description of Artificial Sequence: Synthetic oligonucleotide
cacgaguacuuucauuccu

SEQ ID NO: 42101 - RNA, 19 nt, Artificial Sequence
  Description of Artificial Sequence: Synthetic oligonucleotide
uucugaccguucugaccgu

SEQ ID NO: 42102 - RNA, 19 nt, Artificial Sequence
  Description of Artificial Sequence: Synthetic oligonucleotide
gggcuuuuaggucguguuc

SEQ ID NO: 42103 - RNA, 19 nt, Artificial Sequence
  Description of Artificial Sequence: Synthetic oligonucleotide
ggauuucacucgccuacca

SEQ ID NO: 42104 - RNA, 19 nt, Artificial Sequence
  Description of Artificial Sequence: Synthetic oligonucleotide
cgccuagaccuuuuaggcg

SEQ ID NO: 42105 - RNA, 19 nt, Artificial Sequence
  Description of Artificial Sequence: Synthetic oligonucleotide
accuagaccgagaccgccu

SEQ ID NO: 42106 - RNA, 19 nt, Artificial Sequence
  Description of Artificial Sequence: Synthetic oligonucleotide
caagaacagaugaucgauu

SEQ ID NO: 42107 - RNA, 19 nt, Artificial Sequence
  Description of Artificial Sequence: Synthetic oligonucleotide
cacuaucugagguccagau

SEQ ID NO: 42108 - RNA, 19 nt, Artificial Sequence
  Description of Artificial Sequence: Synthetic oligonucleotide
gggauuucacucgccuacc

SEQ ID NO: 42109 - RNA, 19 nt, Artificial Sequence
  Description of Artificial Sequence: Synthetic oligonucleotide
cgguaaguagcauugaggu

SEQ ID NO: 42110 - RNA, 19 nt, Artificial Sequence
  Description of Artificial Sequence: Synthetic oligonucleotide
gcuuuuaggucguguucga

SEQ ID NO: 42111 - RNA, 19 nt, Artificial Sequence
  Description of Artificial Sequence: Synthetic oligonucleotide
auuggacgacugauuugga

SEQ ID NO: 42112 - RNA, 19 nt, Artificial Sequence
  Description of Artificial Sequence: Synthetic oligonucleotide
gcaggucauuacccguugc

SEQ ID NO: 42113 - RNA, 19 nt, Artificial Sequence
  Description of Artificial Sequence: Synthetic oligonucleotide
acacuagcuaaugguccaa

SEQ ID NO: 42114 - RNA, 19 nt, Artificial Sequence
  Description of Artificial Sequence: Synthetic oligonucleotide
ccaucaagaucauccggca

SEQ ID NO: 42115 - RNA, 19 nt, Artificial Sequence
  Description of Artificial Sequence: Synthetic oligonucleotide
guacgguaaguagcauuga

SEQ ID NO: 42116 - RNA, 19 nt, Artificial Sequence
  Description of Artificial Sequence: Synthetic oligonucleotide
ucugaccguucugaccguu

SEQ ID NO: 42117 - RNA, 19 nt, Artificial Sequence
  Description of Artificial Sequence: Synthetic oligonucleotide
auagaccgucguugaccau

SEQ ID NO: 42118 - RNA, 19 nt, Artificial Sequence
  Description of Artificial Sequence: Synthetic oligonucleotide
cuuaggcgaccuagaccga

SEQ ID NO: 42119 - RNA, 19 nt, Artificial Sequence
  Description of Artificial Sequence: Synthetic oligonucleotide
gaccgucguugaccaucag

SEQ ID NO: 42120 - RNA, 19 nt, Artificial Sequence
  Description of Artificial Sequence: Synthetic oligonucleotide
ugucaccaauugggcaaaa

SEQ ID NO: 42121 - RNA, 19 nt, Artificial Sequence
  Description of Artificial Sequence: Synthetic oligonucleotide
agaccgccuagaccuuuua

SEQ ID NO: 42122 - RNA, 19 nt, Artificial Sequence
  Description of Artificial Sequence: Synthetic oligonucleotide
ucgucacguucuuccugua

SEQ ID NO: 42123 - RNA, 19 nt, Artificial Sequence
  Description of Artificial Sequence: Synthetic oligonucleotide
guacucggaucuccuacau

SEQ ID NO: 42124 - RNA, 19 nt, Artificial Sequence
  Description of Artificial Sequence: Synthetic oligonucleotide
ggguuagaauacaaauggu

SEQ ID NO: 42125 - RNA, 19 nt, Artificial Sequence
  Description of Artificial Sequence: Synthetic oligonucleotide
cacuagcuaaugguccaaa

SEQ ID NO: 42126 - RNA, 19 nt, Artificial Sequence
  Description of Artificial Sequence: Synthetic oligonucleotide
cuuugaagucauguugcuu

SEQ ID NO: 42127 - RNA, 19 nt, Artificial Sequence
  Description of Artificial Sequence: Synthetic oligonucleotide
ggggaggcucaaaucgaac

SEQ ID NO: 42128 - RNA, 19 nt, Artificial Sequence
  Description of Artificial Sequence: Synthetic oligonucleotide
gagaaucacccugcagaau

SEQ ID NO: 42129 - RNA, 19 nt, Artificial Sequence
  Description of Artificial Sequence: Synthetic oligonucleotide
caacagugccaaauucauu

SEQ ID NO: 42130 - RNA, 19 nt, Artificial Sequence
  Description of Artificial Sequence: Synthetic oligonucleotide
ccucgcaagauuucuucua

SEQ ID NO: 42131 - RNA, 19 nt, Artificial Sequence
  Description of Artificial Sequence: Synthetic oligonucleotide
cacauccauagaccgucgu

SEQ ID NO: 42132 - RNA, 19 nt, Artificial Sequence
  Description of Artificial Sequence: Synthetic oligonucleotide
cuuccuugagcgcucccuu

SEQ ID NO: 42133 - RNA, 19 nt, Artificial Sequence
  Description of Artificial Sequence: Synthetic oligonucleotide
gccuuucauuggacgacug

SEQ ID NO: 42134 - RNA, 19 nt, Artificial Sequence
  Description of Artificial Sequence: Synthetic oligonucleotide
cauuuugacggggcaacuu

SEQ ID NO: 42135 - RNA, 19 nt, Artificial Sequence
  Description of Artificial Sequence: Synthetic oligonucleotide
ccaauaagugacggcaucu

SEQ ID NO: 42136 - RNA, 19 nt, Artificial Sequence
  Description of Artificial Sequence: Synthetic oligonucleotide
cacucgccuaccacugcua

SEQ ID NO: 42137 - RNA, 19 nt, Artificial Sequence
  Description of Artificial Sequence: Synthetic oligonucleotide
cuccgucaagaucaucaau

SEQ ID NO: 42138 - RNA, 19 nt, Artificial Sequence
  Description of Artificial Sequence: Synthetic oligonucleotide
guguucgacuuggcauauc

SEQ ID NO: 42139 - RNA, 19 nt, Artificial Sequence
  Description of Artificial Sequence: Synthetic oligonucleotide
cggugcgccaucaagcucu

SEQ ID NO: 42140 - RNA, 19 nt, Artificial Sequence
  Description of Artificial Sequence: Synthetic oligonucleotide
cugugucgccuuuuccuuu

SEQ ID NO: 42141 - RNA, 19 nt, Artificial Sequence
  Description of Artificial Sequence: Synthetic oligonucleotide
gcggugcgccaucaagcuc

SEQ ID NO: 42142 - RNA, 19 nt, Artificial Sequence
  Description of Artificial Sequence: Synthetic oligonucleotide
ggccuuucauuggacgacu

SEQ ID NO: 42143 - RNA, 19 nt, Artificial Sequence
  Description of Artificial Sequence: Synthetic oligonucleotide
ccuagaccgagaccgccua

SEQ ID NO: 42144 - RNA, 19 nt, Artificial Sequence
  Description of Artificial Sequence: Synthetic oligonucleotide
cccgccucgaacaaauguu

SEQ ID NO: 42145 - RNA, 19 nt, Artificial Sequence
  Description of Artificial Sequence: Synthetic oligonucleotide
uggcgaccuuuuggcuuuc

SEQ ID NO: 42146 - RNA, 19 nt, Artificial Sequence
  Description of Artificial Sequence: Synthetic oligonucleotide
cucccacuuagaaguuguu

SEQ ID NO: 42147 - RNA, 19 nt, Artificial Sequence
  Description of Artificial Sequence: Synthetic oligonucleotide
caaccccgccucgaacaaa

SEQ ID NO: 42148 - RNA, 19 nt, Artificial Sequence
  Description of Artificial Sequence: Synthetic oligonucleotide
ucgcuucgcugugcucauu

SEQ ID NO: 42149 - RNA, 19 nt, Artificial Sequence
  Description of Artificial Sequence: Synthetic oligonucleotide
ggacuccgucaagaucauc

SEQ ID NO: 42150 - RNA, 19 nt, Artificial Sequence
  Description of Artificial Sequence: Synthetic oligonucleotide
cuguaguguucgacuuguu

SEQ ID NO: 42151 - RNA, 19 nt, Artificial Sequence
  Description of Artificial Sequence: Synthetic oligonucleotide
ccgccacuuuguuggagaa

SEQ ID NO: 42152 - RNA, 19 nt, Artificial Sequence
  Description of Artificial Sequence: Synthetic oligonucleotide
ccaugaagguauggauuua

SEQ ID NO: 42153 - RNA, 19 nt, Artificial Sequence
  Description of Artificial Sequence: Synthetic oligonucleotide
ccgccucgaacaaauguuu

SEQ ID NO: 42154 - RNA, 19 nt, Artificial Sequence
  Description of Artificial Sequence: Synthetic oligonucleotide
gcuucgcugugcucauuuu

SEQ ID NO: 42155 - RNA, 19 nt, Artificial Sequence
  Description of Artificial Sequence: Synthetic oligonucleotide
cguucugaccguucugauu

SEQ ID NO: 42156 - RNA, 19 nt, Artificial Sequence
  Description of Artificial Sequence: Synthetic oligonucleotide
ccguucugauuuuggugau

SEQ ID NO: 42157 - RNA, 19 nt, Artificial Sequence
  Description of Artificial Sequence: Synthetic oligonucleotide
cuggaccgugagcuuucuu

SEQ ID NO: 42158 - RNA, 19 nt, Artificial Sequence
  Description of Artificial Sequence: Synthetic oligonucleotide
ccguucugaccguucugau

SEQ ID NO: 42159 - RNA, 19 nt, Artificial Sequence
  Description of Artificial Sequence: Synthetic oligonucleotide
cgucguugaccaucagaau

SEQ ID NO: 42160 - RNA, 19 nt, Artificial Sequence
  Description of Artificial Sequence: Synthetic oligonucleotide
gggacuccgucaagaucau

SEQ ID NO: 42161 - RNA, 19 nt, Artificial Sequence
  Description of Artificial Sequence: Synthetic oligonucleotide
ccacucacuuacgccuucu

SEQ ID NO: 42162 - RNA, 19 nt, Artificial Sequence
  Description of Artificial Sequence: Synthetic oligonucleotide
cgccucgaacaaauguuuu

SEQ ID NO: 42163 - RNA, 19 nt, Artificial Sequence
  Description of Artificial Sequence: Synthetic oligonucleotide
ggcgaccuuuuggcuuucu

SEQ ID NO: 42164 - RNA, 19 nt, Artificial Sequence
  Description of Artificial Sequence: Synthetic oligonucleotide
ggugcgccaucaagcucuu

SEQ ID NO: 42165 - RNA, 19 nt, Artificial Sequence
  Description of Artificial Sequence: Synthetic oligonucleotide
ccgagaccgccuagaccuu

SEQ ID NO: 42166 - RNA, 19 nt, Artificial Sequence
  Description of Artificial Sequence: Synthetic oligonucleotide
uauauuuagggauaaggcc

SEQ ID NO: 42167 - RNA, 19 nt, Artificial Sequence
  Description of Artificial Sequence: Synthetic oligonucleotide
uauacaagaaccuuugcug

SEQ ID NO: 42168 - RNA, 19 nt, Artificial Sequence
  Description of Artificial Sequence: Synthetic oligonucleotide
ucuaagaugguaauugcag

SEQ ID NO: 42169 - RNA, 19 nt, Artificial Sequence
  Description of Artificial Sequence: Synthetic oligonucleotide
acgucauagagucugaacg

SEQ ID NO: 42170 - RNA, 19 nt, Artificial Sequence
  Description of Artificial Sequence: Synthetic oligonucleotide
uagacgaggaauaaagacc

SEQ ID NO: 42171 - RNA, 19 nt, Artificial Sequence
  Description of Artificial Sequence: Synthetic oligonucleotide
agucuaguaauccaagauc

SEQ ID NO: 42172 - RNA, 19 nt, Artificial Sequence
  Description of Artificial Sequence: Synthetic oligonucleotide
uccgacuagaaccaugacg

SEQ ID NO: 42173 - RNA, 19 nt, Artificial Sequence
  Description of Artificial Sequence: Synthetic oligonucleotide
uuaagcuacacacucgaca

SEQ ID NO: 42174 - RNA, 19 nt, Artificial Sequence
  Description of Artificial Sequence: Synthetic oligonucleotide
cuauugaccagaaccaacg

SEQ ID NO: 42175 - RNA, 19 nt, Artificial Sequence
  Description of Artificial Sequence: Synthetic oligonucleotide
gaaacuucgagcuacgcca

SEQ ID NO: 42176 - RNA, 19 nt, Artificial Sequence
  Description of Artificial Sequence: Synthetic oligonucleotide
uaaauuauguuguucugcu

SEQ ID NO: 42177 - RNA, 19 nt, Artificial Sequence
  Description of Artificial Sequence: Synthetic oligonucleotide
aacgucauagagucugaac

SEQ ID NO: 42178 - RNA, 19 nt, Artificial Sequence
  Description of Artificial Sequence: Synthetic oligonucleotide
ucaguuaagaucgauccag

SEQ ID NO: 42179 - RNA, 19 nt, Artificial Sequence
  Description of Artificial Sequence: Synthetic oligonucleotide
aguuaagaucgauccaggc

SEQ ID NO: 42180 - RNA, 19 nt, Artificial Sequence
  Description of Artificial Sequence: Synthetic oligonucleotide
uguugaaugagaagauccc

SEQ ID NO: 42181 - RNA, 19 nt, Artificial Sequence
  Description of Artificial Sequence: Synthetic oligonucleotide
cuuacagcugacauaaaug

SEQ ID NO: 42182 - RNA, 19 nt, Artificial Sequence
  Description of Artificial Sequence: Synthetic oligonucleotide
aauacaaguguuugcagua

SEQ ID NO: 42183 - RNA, 19 nt, Artificial Sequence
  Description of Artificial Sequence: Synthetic oligonucleotide
aauuagcuaguaauauuac

SEQ ID NO: 42184 - RNA, 19 nt, Artificial Sequence
  Description of Artificial Sequence: Synthetic oligonucleotide
uaagaugguaauugcagca

SEQ ID NO: 42185 - RNA, 19 nt, Artificial Sequence
  Description of Artificial Sequence: Synthetic oligonucleotide
cuuaauggcgaguaguaac

SEQ ID NO: 42186 - RNA, 19 nt, Artificial Sequence
  Description of Artificial Sequence: Synthetic oligonucleotide
uuaauggcgaguaguaacu

SEQ ID NO: 42187 - RNA, 19 nt, Artificial Sequence
  Description of Artificial Sequence: Synthetic oligonucleotide
cucuacggaacuuugauuc

SEQ ID NO: 42188 - RNA, 19 nt, Artificial Sequence
  Description of Artificial Sequence: Synthetic oligonucleotide
gauucauugcuuuaaucca

SEQ ID NO: 42189 - RNA, 19 nt, Artificial Sequence
  Description of Artificial Sequence: Synthetic oligonucleotide
cugggaguacacuaggugg

SEQ ID NO: 42190 - RNA, 19 nt, Artificial Sequence
  Description of Artificial Sequence: Synthetic oligonucleotide
cuaaagaaaggcgccaucg

SEQ ID NO: 42191 - RNA, 19 nt, Artificial Sequence
  Description of Artificial Sequence: Synthetic oligonucleotide
cuaagaugguaauugcagc

SEQ ID NO: 42192 - RNA, 19 nt, Artificial Sequence
  Description of Artificial Sequence: Synthetic oligonucleotide
uacaaucuagauuuggcaa

SEQ ID NO: 42193 - RNA, 19 nt, Artificial Sequence
  Description of Artificial Sequence: Synthetic oligonucleotide
aaucuguuuagaggaauag

SEQ ID NO: 42194 - RNA, 19 nt, Artificial Sequence
  Description of Artificial Sequence: Synthetic oligonucleotide
uuuagauuggcagcguaag

SEQ ID NO: 42195 - RNA, 19 nt, Artificial Sequence
  Description of Artificial Sequence: Synthetic oligonucleotide
agcaucggagcucugagag

SEQ ID NO: 42196 - RNA, 19 nt, Artificial Sequence
  Description of Artificial Sequence: Synthetic oligonucleotide
agauaaaucacaguguaaa

SEQ ID NO: 42197 - RNA, 19 nt, Artificial Sequence
  Description of Artificial Sequence: Synthetic oligonucleotide
uucuaagaugguaauugca

SEQ ID NO: 42198 - RNA, 19 nt, Artificial Sequence
  Description of Artificial Sequence: Synthetic oligonucleotide
auuagcuaguaauauuaca

SEQ ID NO: 42199 - RNA, 19 nt, Artificial Sequence
  Description of Artificial Sequence: Synthetic oligonucleotide
uaaagucgagaaauacaag

SEQ ID NO: 42200 - RNA, 19 nt, Artificial Sequence
  Description of Artificial Sequence: Synthetic oligonucleotide
uuugauaagagcgcuugug

SEQ ID NO: 42201 - RNA, 19 nt, Artificial Sequence
  Description of Artificial Sequence: Synthetic oligonucleotide
ugauaagucucuugauugc

SEQ ID NO: 42202 - RNA, 19 nt, Artificial Sequence
  Description of Artificial Sequence: Synthetic oligonucleotide
uuacaugccuauucaaugu

SEQ ID NO: 42203 - RNA, 19 nt, Artificial Sequence
  Description of Artificial Sequence: Synthetic oligonucleotide
acagacauaguccaagaau

SEQ ID NO: 42204 - RNA, 19 nt, Artificial Sequence
  Description of Artificial Sequence: Synthetic oligonucleotide
aacgacgggcuugaugucc

SEQ ID NO: 42205 - RNA, 19 nt, Artificial Sequence
  Description of Artificial Sequence: Synthetic oligonucleotide
ccgacuagaaccaugacgc

SEQ ID NO: 42206 - RNA, 19 nt, Artificial Sequence
  Description of Artificial Sequence: Synthetic oligonucleotide
uaaccggacaguaaaaguu

SEQ ID NO: 42207 - RNA, 19 nt, Artificial Sequence
  Description of Artificial Sequence: Synthetic oligonucleotide
gaaguaaccggacaguaaa

SEQ ID NO: 42208 - RNA, 19 nt, Artificial Sequence
  Description of Artificial Sequence: Synthetic oligonucleotide
ucuacauagcucuguaagu

SEQ ID NO: 42209 - RNA, 19 nt, Artificial Sequence
  Description of Artificial Sequence: Synthetic oligonucleotide
ucuagugauaagucucuug

SEQ ID NO: 42210 - RNA, 19 nt, Artificial Sequence
  Description of Artificial Sequence: Synthetic oligonucleotide
cauagagucugaacgucgg

SEQ ID NO: 42211 - RNA, 19 nt, Artificial Sequence
  Description of Artificial Sequence: Synthetic oligonucleotide
uggaguauaaaauccccuc

SEQ ID NO: 42212 - RNA, 19 nt, Artificial Sequence
  Description of Artificial Sequence: Synthetic oligonucleotide
ucuaccaagcaacacuuua

SEQ ID NO: 42213 - RNA, 19 nt, Artificial Sequence
  Description of Artificial Sequence: Synthetic oligonucleotide
cuagugauaagucucuuga

SEQ ID NO: 42214 - RNA, 19 nt, Artificial Sequence
  Description of Artificial Sequence: Synthetic oligonucleotide
uuggaguauaaaauccccu

SEQ ID NO: 42215 - RNA, 19 nt, Artificial Sequence
  Description of Artificial Sequence: Synthetic oligonucleotide
uagauuggcagcguaagac

SEQ ID NO: 42216 - RNA, 19 nt, Artificial Sequence
  Description of Artificial Sequence: Synthetic oligonucleotide
agugauaagucucuugauu

SEQ ID NO: 42217 - RNA, 19 nt, Artificial Sequence
  Description of Artificial Sequence: Synthetic oligonucleotide
aagccgaaagucuucugcu

SEQ ID NO: 42218 - RNA, 19 nt, Artificial Sequence
  Description of Artificial Sequence: Synthetic oligonucleotide
cguaagacauuuuaguugg

SEQ ID NO: 42219 - RNA, 19 nt, Artificial Sequence
  Description of Artificial Sequence: Synthetic oligonucleotide
aaauguggcugaucggcca

SEQ ID NO: 42220 - RNA, 19 nt, Artificial Sequence
  Description of Artificial Sequence: Synthetic oligonucleotide
gacggcauaggcugaaagc

SEQ ID NO: 42221 - RNA, 19 nt, Artificial Sequence
  Description of Artificial Sequence: Synthetic oligonucleotide
uacaugccuauucaaugug

SEQ ID NO: 42222 - RNA, 19 nt, Artificial Sequence
  Description of Artificial Sequence: Synthetic oligonucleotide
cauugaaagagguaaaacu

SEQ ID NO: 42223 - RNA, 19 nt, Artificial Sequence
  Description of Artificial Sequence: Synthetic oligonucleotide
uagcggaccaucauagaca

SEQ ID NO: 42224 - RNA, 19 nt, Artificial Sequence
  Description of Artificial Sequence: Synthetic oligonucleotide
uucaguuaagaucgaucca

SEQ ID NO: 42225 - RNA, 19 nt, Artificial Sequence
  Description of Artificial Sequence: Synthetic oligonucleotide
uucucuacggaacuuugau

SEQ ID NO: 42226 - RNA, 19 nt, Artificial Sequence
  Description of Artificial Sequence: Synthetic oligonucleotide
agcauaagacauacaaagg

SEQ ID NO: 42227 - RNA, 19 nt, Artificial Sequence
  Description of Artificial Sequence: Synthetic oligonucleotide
acaaucuagauuuggcaau

SEQ ID NO: 42228 - RNA, 19 nt, Artificial Sequence
  Description of Artificial Sequence: Synthetic oligonucleotide
aguaaccggacaguaaaag

SEQ ID NO: 42229 - RNA, 19 nt, Artificial Sequence
  Description of Artificial Sequence: Synthetic oligonucleotide
cuagcggaccaucauagac

SEQ ID NO: 42230 - RNA, 19 nt, Artificial Sequence
  Description of Artificial Sequence: Synthetic oligonucleotide
uccacuacacuccgacuag

SEQ ID NO: 42231 - RNA, 19 nt, Artificial Sequence
  Description of Artificial Sequence: Synthetic oligonucleotide
aggaacgucauagagucug

SEQ ID NO: 42232 - RNA, 19 nt, Artificial Sequence
  Description of Artificial Sequence: Synthetic oligonucleotide
uuagauuggcagcguaaga

SEQ ID NO: 42233 - RNA, 19 nt, Artificial Sequence
  Description of Artificial Sequence: Synthetic oligonucleotide
gcuagaaguaaccggacag

SEQ ID NO: 42234 - RNA, 19 nt, Artificial Sequence
  Description of Artificial Sequence: Synthetic oligonucleotide
uuccauaaauacucugcca

SEQ ID NO: 42235 - RNA, 19 nt, Artificial Sequence
  Description of Artificial Sequence: Synthetic oligonucleotide
aaacaagguccugucguuc

SEQ ID NO: 42236 - RNA, 19 nt, Artificial Sequence
  Description of Artificial Sequence: Synthetic oligonucleotide
ccugaaaucucuaucccgg

SEQ ID NO: 42237 - RNA, 19 nt, Artificial Sequence
  Description of Artificial Sequence: Synthetic oligonucleotide
ucgaccucuagugauaagu

SEQ ID NO: 42238 - RNA, 19 nt, Artificial Sequence
  Description of Artificial Sequence: Synthetic oligonucleotide
uguuaaguagcugcuggca

SEQ ID NO: 42239 - RNA, 19 nt, Artificial Sequence
  Description of Artificial Sequence: Synthetic oligonucleotide
ucccgaucgaccucuagug

SEQ ID NO: 42240 - RNA, 19 nt, Artificial Sequence
  Description of Artificial Sequence: Synthetic oligonucleotide
uauguuguucugcugucau

SEQ ID NO: 42241 - RNA, 19 nt, Artificial Sequence
  Description of Artificial Sequence: Synthetic oligonucleotide
agauuggcagcguaagaca

SEQ ID NO: 42242 - RNA, 19 nt, Artificial Sequence
  Description of Artificial Sequence: Synthetic oligonucleotide
uacaaaggggagucgucag

SEQ ID NO: 42243 - RNA, 19 nt, Artificial Sequence
  Description of Artificial Sequence: Synthetic oligonucleotide
accguuuggaaugaguuca

SEQ ID NO: 42244 - RNA, 19 nt, Artificial Sequence
  Description of Artificial Sequence: Synthetic oligonucleotide
guaagcccuggcuaaacug

SEQ ID NO: 42245 - RNA, 19 nt, Artificial Sequence
  Description of Artificial Sequence: Synthetic oligonucleotide
cucgacaaggaauguuugc

SEQ ID NO: 42246 - RNA, 19 nt, Artificial Sequence
  Description of Artificial Sequence: Synthetic oligonucleotide
ucuaaagaaaggcgccauc

SEQ ID NO: 42247 - RNA, 19 nt, Artificial Sequence
  Description of Artificial Sequence: Synthetic oligonucleotide
acucgcuaggaggaggagc

SEQ ID NO: 42248 - RNA, 19 nt, Artificial Sequence
  Description of Artificial Sequence: Synthetic oligonucleotide
ugaaacaauucagccuugc

SEQ ID NO: 42249 - RNA, 19 nt, Artificial Sequence
  Description of Artificial Sequence: Synthetic oligonucleotide
augcuccgaaucuucauug

SEQ ID NO: 42250 - RNA, 19 nt, Artificial Sequence
  Description of Artificial Sequence: Synthetic oligonucleotide
gggaauacauccaaggaac

SEQ ID NO: 42251 - RNA, 19 nt, Artificial Sequence
  Description of Artificial Sequence: Synthetic oligonucleotide
ugcuuuaauccaauaucua

SEQ ID NO: 42252 - RNA, 19 nt, Artificial Sequence
  Description of Artificial Sequence: Synthetic oligonucleotide
aagcuacacacucgacaag

SEQ ID NO: 42253 - RNA, 19 nt, Artificial Sequence
  Description of Artificial Sequence: Synthetic oligonucleotide
ugcuagcgcaucuucggcc

SEQ ID NO: 42254 - RNA, 19 nt, Artificial Sequence
  Description of Artificial Sequence: Synthetic oligonucleotide
ggugcuagcgcaucuucgg

SEQ ID NO: 42255 - RNA, 19 nt, Artificial Sequence
  Description of Artificial Sequence: Synthetic oligonucleotide
ucuacggaacuuugauucu

SEQ ID NO: 42256 - RNA, 19 nt, Artificial Sequence
  Description of Artificial Sequence: Synthetic oligonucleotide
ucgagcuacgccacugccc

SEQ ID NO: 42257 - RNA, 19 nt, Artificial Sequence
  Description of Artificial Sequence: Synthetic oligonucleotide
guuaagaucgauccaggcu

SEQ ID NO: 42258 - RNA, 19 nt, Artificial Sequence
  Description of Artificial Sequence: Synthetic oligonucleotide
ucccucuauacaagaaccu

SEQ ID NO: 42259 - RNA, 19 nt, Artificial Sequence
  Description of Artificial Sequence: Synthetic oligonucleotide
auccacuacacuccgacua

SEQ ID NO: 42260 - RNA, 19 nt, Artificial Sequence
  Description of Artificial Sequence: Synthetic oligonucleotide
uaagaucgauccaggcucu

SEQ ID NO: 42261 - RNA, 19 nt, Artificial Sequence
  Description of Artificial Sequence: Synthetic oligonucleotide
uugccggaugacaaugcug

SEQ ID NO: 42262 - RNA, 19 nt, Artificial Sequence
  Description of Artificial Sequence: Synthetic oligonucleotide
uguaaggggcggcccuucg

SEQ ID NO: 42263 - RNA, 19 nt, Artificial Sequence
  Description of Artificial Sequence: Synthetic oligonucleotide
aguaccugacgggcaaacc

SEQ ID NO: 42264 - RNA, 19 nt, Artificial Sequence
  Description of Artificial Sequence: Synthetic oligonucleotide
ggucuuggaguauaaaauc

SEQ ID NO: 42265 - RNA, 19 nt, Artificial Sequence
  Description of Artificial Sequence: Synthetic oligonucleotide
ucggggauaaagccucucu

SEQ ID NO: 42266 - RNA, 19 nt, Artificial Sequence
  Description of Artificial Sequence: Synthetic oligonucleotide
uaaggggcggcccuucgcu

SEQ ID NO: 42267 - RNA, 19 nt, Artificial Sequence
  Description of Artificial Sequence: Synthetic oligonucleotide
auuugauaagagcgcuugu

SEQ ID NO: 42268 - RNA, 19 nt, Artificial Sequence
  Description of Artificial Sequence: Synthetic oligonucleotide
ggggauaaagccucucucc

SEQ ID NO: 42269 - RNA, 19 nt, Artificial Sequence
  Description of Artificial Sequence: Synthetic oligonucleotide
uagguacggcugcagaacu

SEQ ID NO: 42270 - RNA, 19 nt, Artificial Sequence
  Description of Artificial Sequence: Synthetic oligonucleotide
guaccugacgggcaaacca

SEQ ID NO: 42271 - RNA, 19 nt, Artificial Sequence
  Description of Artificial Sequence: Synthetic oligonucleotide
agcuagaaguaaccggaca

SEQ ID NO: 42272 - RNA, 19 nt, Artificial Sequence
  Description of Artificial Sequence: Synthetic oligonucleotide
ucuuauugugauggacggc

SEQ ID NO: 42273 - RNA, 19 nt, Artificial Sequence
  Description of Artificial Sequence: Synthetic oligonucleotide
cucgcuaggaggaggagca

SEQ ID NO: 42274 - RNA, 19 nt, Artificial Sequence
  Description of Artificial Sequence: Synthetic oligonucleotide
agcggaccaucauagacaa

SEQ ID NO: 42275 - RNA, 19 nt, Artificial Sequence
  Description of Artificial Sequence: Synthetic oligonucleotide
uggcgaguaguaacuuuug

SEQ ID NO: 42276 - RNA, 19 nt, Artificial Sequence
  Description of Artificial Sequence: Synthetic oligonucleotide
ucuuaauggcgaguaguaa

SEQ ID NO: 42277 - RNA, 19 nt, Artificial Sequence
  Description of Artificial Sequence: Synthetic oligonucleotide
uucaaugugauaggacaua

SEQ ID NO: 42278 - RNA, 19 nt, Artificial Sequence
  Description of Artificial Sequence: Synthetic oligonucleotide
caacgucgugagcugacgg

SEQ ID NO: 42279 - RNA, 19 nt, Artificial Sequence
  Description of Artificial Sequence: Synthetic oligonucleotide
uaccugacgggcaaaccau

SEQ ID NO: 42280 - RNA, 19 nt, Artificial Sequence
  Description of Artificial Sequence: Synthetic oligonucleotide
uuggcgguuuugcauguuc

SEQ ID NO: 42281 - RNA, 19 nt, Artificial Sequence
  Description of Artificial Sequence: Synthetic oligonucleotide
gagauuugccggaugacaa

SEQ ID NO: 42282 - RNA, 19 nt, Artificial Sequence
  Description of Artificial Sequence: Synthetic oligonucleotide
acuacugguagacgaggaa

SEQ ID NO: 42283 - RNA, 19 nt, Artificial Sequence
  Description of Artificial Sequence: Synthetic oligonucleotide
agauguuaaguagcugcug

SEQ ID NO: 42284 - RNA, 19 nt, Artificial Sequence
  Description of Artificial Sequence: Synthetic oligonucleotide
guuaguaccugacgggcaa

SEQ ID NO: 42285 - RNA, 19 nt, Artificial Sequence
  Description of Artificial Sequence: Synthetic oligonucleotide
uuccgugugcaaugaugag

SEQ ID NO: 42286 - RNA, 19 nt, Artificial Sequence
  Description of Artificial Sequence: Synthetic oligonucleotide
gucgcaaacucucauacau

SEQ ID NO: 42287 - RNA, 19 nt, Artificial Sequence
  Description of Artificial Sequence: Synthetic oligonucleotide
ucucuacggaacuuugauu

SEQ ID NO: 42288 - RNA, 19 nt, Artificial Sequence
  Description of Artificial Sequence: Synthetic oligonucleotide
gccuauucaaugugauagg

SEQ ID NO: 42289 - RNA, 19 nt, Artificial Sequence
  Description of Artificial Sequence: Synthetic oligonucleotide
ggaauacauccaaggaacg

SEQ ID NO: 42290 - RNA, 19 nt, Artificial Sequence
  Description of Artificial Sequence: Synthetic oligonucleotide
uucuaaagaaaggcgccau

SEQ ID NO: 42291 - RNA, 19 nt, Artificial Sequence
  Description of Artificial Sequence: Synthetic oligonucleotide
agaaucuguuuagaggaau

SEQ ID NO: 42292 - RNA, 19 nt, Artificial Sequence
  Description of Artificial Sequence: Synthetic oligonucleotide
ugguuauauuuagggauaa

SEQ ID NO: 42293 - RNA, 19 nt, Artificial Sequence
  Description of Artificial Sequence: Synthetic oligonucleotide
ggauguucacaccguuugg

SEQ ID NO: 42294 - RNA, 19 nt, Artificial Sequence
  Description of Artificial Sequence: Synthetic oligonucleotide
acuccgacuagaaccauga

SEQ ID NO: 42295 - RNA, 19 nt, Artificial Sequence
  Description of Artificial Sequence: Synthetic oligonucleotide
gagucugaacgucggaaaa

SEQ ID NO: 42296 - RNA, 19 nt, Artificial Sequence
  Description of Artificial Sequence: Synthetic oligonucleotide
aggagucuaguaauccaag

SEQ ID NO: 42297 - RNA, 19 nt, Artificial Sequence
  Description of Artificial Sequence: Synthetic oligonucleotide
ucuccgagauccagcucgc

SEQ ID NO: 42298 - RNA, 19 nt, Artificial Sequence
  Description of Artificial Sequence: Synthetic oligonucleotide
ugcagauguuaaguagcug

SEQ ID NO: 42299 - RNA, 19 nt, Artificial Sequence
  Description of Artificial Sequence: Synthetic oligonucleotide
gaggagucuaguaauccaa

SEQ ID NO: 42300 - RNA, 19 nt, Artificial Sequence
  Description of Artificial Sequence: Synthetic oligonucleotide
acuugugugggugccuuug

SEQ ID NO: 42301 - RNA, 19 nt, Artificial Sequence
  Description of Artificial Sequence: Synthetic oligonucleotide
ugcuccgaaucuucauugu

SEQ ID NO: 42302 - RNA, 19 nt, Artificial Sequence
  Description of Artificial Sequence: Synthetic oligonucleotide
caccguuuggaaugaguuc

SEQ ID NO: 42303 - RNA, 19 nt, Artificial Sequence
  Description of Artificial Sequence: Synthetic oligonucleotide
cuggcgacgaaccgccgcc

SEQ ID NO: 42304 - RNA, 19 nt, Artificial Sequence
  Description of Artificial Sequence: Synthetic oligonucleotide
gaaucuguuuagaggaaua

SEQ ID NO: 42305 - RNA, 19 nt, Artificial Sequence
  Description of Artificial Sequence: Synthetic oligonucleotide
auuggggugcuagcgcauc

SEQ ID NO: 42306 - RNA, 19 nt, Artificial Sequence
  Description of Artificial Sequence: Synthetic oligonucleotide
ccuauucccucuauacaag

SEQ ID NO: 42307 - RNA, 19 nt, Artificial Sequence
  Description of Artificial Sequence: Synthetic oligonucleotide
gucauagagucugaacguc

SEQ ID NO: 42308 - RNA, 19 nt, Artificial Sequence
  Description of Artificial Sequence: Synthetic oligonucleotide
acaccguuuggaaugaguu

SEQ ID NO: 42309 - RNA, 19 nt, Artificial Sequence
  Description of Artificial Sequence: Synthetic oligonucleotide
ucgcaaacucucauacauu

SEQ ID NO: 42310 - RNA, 19 nt, Artificial Sequence
  Description of Artificial Sequence: Synthetic oligonucleotide
aaguaaccggacaguaaaa

SEQ ID NO: 42311 - RNA, 19 nt, Artificial Sequence
  Description of Artificial Sequence: Synthetic oligonucleotide
acuagcggaccaucauaga

SEQ ID NO: 42312 - RNA, 19 nt, Artificial Sequence
  Description of Artificial Sequence: Synthetic oligonucleotide
agcaacgucgugagcugac

SEQ ID NO: 42313 - RNA, 19 nt, Artificial Sequence
  Description of Artificial Sequence: Synthetic oligonucleotide
acaugccuauucaauguga

SEQ ID NO: 42314 - RNA, 19 nt, Artificial Sequence
  Description of Artificial Sequence: Synthetic oligonucleotide
agguugcauugcuuggacu

SEQ ID NO: 42315 - RNA, 19 nt, Artificial Sequence
  Description of Artificial Sequence: Synthetic oligonucleotide
ggagucuaguaauccaaga

SEQ ID NO: 42316 - RNA, 19 nt, Artificial Sequence
  Description of Artificial Sequence: Synthetic oligonucleotide
agaaguaaccggacaguaa

SEQ ID NO: 42317 - RNA, 19 nt, Artificial Sequence
  Description of Artificial Sequence: Synthetic oligonucleotide
auggcgaguaguaacuuuu

SEQ ID NO: 42318 - RNA, 19 nt, Artificial Sequence
  Description of Artificial Sequence: Synthetic oligonucleotide
ugcgugcaauggcuguucu

SEQ ID NO: 42319 - RNA, 19 nt, Artificial Sequence
  Description of Artificial Sequence: Synthetic oligonucleotide
gugcuagcgcaucuucggc

SEQ ID NO: 42320 - RNA, 19 nt, Artificial Sequence
  Description of Artificial Sequence: Synthetic oligonucleotide
gguuauauuuagggauaag

SEQ ID NO: 42321 - RNA, 19 nt, Artificial Sequence
  Description of Artificial Sequence: Synthetic oligonucleotide
ggaguauaaaauccccucu

SEQ ID NO: 42322 - RNA, 19 nt, Artificial Sequence
  Description of Artificial Sequence: Synthetic oligonucleotide
ccauauccacuacacuccg

SEQ ID NO: 42323 - RNA, 19 nt, Artificial Sequence
  Description of Artificial Sequence: Synthetic oligonucleotide
guaaggggcggcccuucgc

SEQ ID NO: 42324 - RNA, 19 nt, Artificial Sequence
  Description of Artificial Sequence: Synthetic oligonucleotide
agacccuuccucauugcgu

SEQ ID NO: 42325 - RNA, 19 nt, Artificial Sequence
  Description of Artificial Sequence: Synthetic oligonucleotide
ggguuaguaccugacgggc

SEQ ID NO: 42326 - RNA, 19 nt, Artificial Sequence
  Description of Artificial Sequence: Synthetic oligonucleotide
aguccgaucucugcuagua

SEQ ID NO: 42327 - RNA, 19 nt, Artificial Sequence
  Description of Artificial Sequence: Synthetic oligonucleotide
guuggcgacuagcggacca

SEQ ID NO: 42328 - RNA, 19 nt, Artificial Sequence
  Description of Artificial Sequence: Synthetic oligonucleotide
gucuuaauggcgaguagua

SEQ ID NO: 42329 - RNA, 19 nt, Artificial Sequence
  Description of Artificial Sequence: Synthetic oligonucleotide
gaaccaugacgcuuucggu

SEQ ID NO: 42330 - RNA, 19 nt, Artificial Sequence
  Description of Artificial Sequence: Synthetic oligonucleotide
aucgaccucuagugauaag

SEQ ID NO: 42331 - RNA, 19 nt, Artificial Sequence
  Description of Artificial Sequence: Synthetic oligonucleotide
cacuacugguagacgagga

SEQ ID NO: 42332 - RNA, 19 nt, Artificial Sequence
  Description of Artificial Sequence: Synthetic oligonucleotide
gaucgaccucuagugauaa

SEQ ID NO: 42333 - RNA, 19 nt, Artificial Sequence
  Description of Artificial Sequence: Synthetic oligonucleotide
aagaucgauccaggcucug

SEQ ID NO: 42334 - RNA, 19 nt, Artificial Sequence
  Description of Artificial Sequence: Synthetic oligonucleotide
guguccuuuugcguuccag

SEQ ID NO: 42335 - RNA, 19 nt, Artificial Sequence
  Description of Artificial Sequence: Synthetic oligonucleotide
ggcaacgacgggcuugaug

SEQ ID NO: 42336 - RNA, 19 nt, Artificial Sequence
  Description of Artificial Sequence: Synthetic oligonucleotide
uaauggcgaguaguaacuu

SEQ ID NO: 42337 - RNA, 19 nt, Artificial Sequence
  Description of Artificial Sequence: Synthetic oligonucleotide
ucgucaggguuaguaccug

SEQ ID NO: 42338 - RNA, 19 nt, Artificial Sequence
  Description of Artificial Sequence: Synthetic oligonucleotide
ugcuccgguccauguaaaa

SEQ ID NO: 42339 - RNA, 19 nt, Artificial Sequence
  Description of Artificial Sequence: Synthetic oligonucleotide
cuuuugcguuccagcugag

SEQ ID NO: 42340 - RNA, 19 nt, Artificial Sequence
  Description of Artificial Sequence: Synthetic oligonucleotide
caugccuauucaaugugau

SEQ ID NO: 42341 - RNA, 19 nt, Artificial Sequence
  Description of Artificial Sequence: Synthetic oligonucleotide
aaggaacgucauagagucu

SEQ ID NO: 42342 - RNA, 19 nt, Artificial Sequence
  Description of Artificial Sequence: Synthetic oligonucleotide
gcuagcgcaucuucggcca

SEQ ID NO: 42343 - RNA, 19 nt, Artificial Sequence
  Description of Artificial Sequence: Synthetic oligonucleotide
cacuacacuccgacuagaa

SEQ ID NO: 42344 - RNA, 19 nt, Artificial Sequence
  Description of Artificial Sequence: Synthetic oligonucleotide
gggugcuagcgcaucuucg

SEQ ID NO: 42345 - RNA, 19 nt, Artificial Sequence
  Description of Artificial Sequence: Synthetic oligonucleotide
cuucacucgcuaggaggag

SEQ ID NO: 42346 - RNA, 19 nt, Artificial Sequence
  Description of Artificial Sequence: Synthetic oligonucleotide
auugcgugcaauggcuguu

SEQ ID NO: 42347 - RNA, 19 nt, Artificial Sequence
  Description of Artificial Sequence: Synthetic oligonucleotide
gagcugacggcccuggauu

SEQ ID NO: 42348 - RNA, 19 nt, Artificial Sequence
  Description of Artificial Sequence: Synthetic oligonucleotide
gucccgaucgaccucuagu

SEQ ID NO: 42349 - RNA, 19 nt, Artificial Sequence
  Description of Artificial Sequence: Synthetic oligonucleotide
accuagaaguuggcgacua

SEQ ID NO: 42350 - RNA, 19 nt, Artificial Sequence
  Description of Artificial Sequence: Synthetic oligonucleotide
uggcgacgaaccgccgccg

SEQ ID NO: 42351 - RNA, 19 nt, Artificial Sequence
  Description of Artificial Sequence: Synthetic oligonucleotide
gacuagaaccaugacgcuu

SEQ ID NO: 42352 - RNA, 19 nt, Artificial Sequence
  Description of Artificial Sequence: Synthetic oligonucleotide
ggucuuaauggcgaguagu

SEQ ID NO: 42353 - RNA, 19 nt, Artificial Sequence
  Description of Artificial Sequence: Synthetic oligonucleotide
uuggucgucugguggucuu

SEQ ID NO: 42354 - RNA, 19 nt, Artificial Sequence
  Description of Artificial Sequence: Synthetic oligonucleotide
guacacuaggugguuauau

SEQ ID NO: 42355 - RNA, 19 nt, Artificial Sequence
  Description of Artificial Sequence: Synthetic oligonucleotide
cuuggacggccaaacagau

SEQ ID NO: 42356 - RNA, 19 nt, Artificial Sequence
  Description of Artificial Sequence: Synthetic oligonucleotide
cuccgacuagaaccaugac

SEQ ID NO: 42357 - RNA, 19 nt, Artificial Sequence
  Description of Artificial Sequence: Synthetic oligonucleotide
gcaacgucgugagcugacg

SEQ ID NO: 42358 - RNA, 19 nt, Artificial Sequence
  Description of Artificial Sequence: Synthetic oligonucleotide
uuggcgacuagcggaccau

SEQ ID NO: 42359 - RNA, 19 nt, Artificial Sequence
  Description of Artificial Sequence: Synthetic oligonucleotide
aucuucggccaaaaugauu

SEQ ID NO: 42360 - RNA, 19 nt, Artificial Sequence
  Description of Artificial Sequence: Synthetic oligonucleotide
cuacugguagacgaggaau

SEQ ID NO: 42361 - RNA, 19 nt, Artificial Sequence
  Description of Artificial Sequence: Synthetic oligonucleotide
ccaucgucccagcagcaug

SEQ ID NO: 42362 - RNA, 19 nt, Artificial Sequence
  Description of Artificial Sequence: Synthetic oligonucleotide
cauugcgugcaauggcugu

SEQ ID NO: 42363 - RNA, 19 nt, Artificial Sequence
  Description of Artificial Sequence: Synthetic oligonucleotide
accgcgcgucacuggcgac

SEQ ID NO: 42364 - RNA, 19 nt, Artificial Sequence
  Description of Artificial Sequence: Synthetic oligonucleotide
cacaccguuuggaaugagu

SEQ ID NO: 42365 - RNA, 19 nt, Artificial Sequence
  Description of Artificial Sequence: Synthetic oligonucleotide
gguuaguaccugacgggca

SEQ ID NO: 42366 - RNA, 19 nt, Artificial Sequence
  Description of Artificial Sequence: Synthetic oligonucleotide
cugaaaucucuaucccggu

SEQ ID NO: 42367 - RNA, 19 nt, Artificial Sequence
  Description of Artificial Sequence: Synthetic oligonucleotide
caacgacgggcuugauguc

SEQ ID NO: 42368 - RNA, 19 nt, Artificial Sequence
  Description of Artificial Sequence: Synthetic oligonucleotide
caugacgcuuucgguuuuc

SEQ ID NO: 42369 - RNA, 19 nt, Artificial Sequence
  Description of Artificial Sequence: Synthetic oligonucleotide
gcgucacuggcgacgaacc

SEQ ID NO: 42370 - RNA, 19 nt, Artificial Sequence
  Description of Artificial Sequence: Synthetic oligonucleotide
aaccaacgcuugaacugua

SEQ ID NO: 42371 - RNA, 19 nt, Artificial Sequence
  Description of Artificial Sequence: Synthetic oligonucleotide
auuuagggauaaggcccau

SEQ ID NO: 42372 - RNA, 19 nt, Artificial Sequence
  Description of Artificial Sequence: Synthetic oligonucleotide
gccauucaccaaaagccga

SEQ ID NO: 42373 - RNA, 19 nt, Artificial Sequence
  Description of Artificial Sequence: Synthetic oligonucleotide
ccauucaccaaaagccgaa

SEQ ID NO: 42374 - RNA, 19 nt, Artificial Sequence
  Description of Artificial Sequence: Synthetic oligonucleotide
accacccaauucaguuaag

SEQ ID NO: 42375 - RNA, 19 nt, Artificial Sequence
  Description of Artificial Sequence: Synthetic oligonucleotide
gcauuaaacuugugugggu

SEQ ID NO: 42376 - RNA, 19 nt, Artificial Sequence
  Description of Artificial Sequence: Synthetic oligonucleotide
ggggugcuagcgcaucuuc

SEQ ID NO: 42377 - RNA, 19 nt, Artificial Sequence
  Description of Artificial Sequence: Synthetic oligonucleotide
acugccccaccgcgcguca

SEQ ID NO: 42378 - RNA, 19 nt, Artificial Sequence
  Description of Artificial Sequence: Synthetic oligonucleotide
ggcgaguaguaacuuuugu

SEQ ID NO: 42379 - RNA, 19 nt, Artificial Sequence
  Description of Artificial Sequence: Synthetic oligonucleotide
cucggggauaaagccucuc

SEQ ID NO: 42380 - RNA, 19 nt, Artificial Sequence
  Description of Artificial Sequence: Synthetic oligonucleotide
uuuggcgguuuugcauguu

SEQ ID NO: 42381 - RNA, 19 nt, Artificial Sequence
  Description of Artificial Sequence: Synthetic oligonucleotide
cacucgcuaggaggaggag

SEQ ID NO: 42382 - RNA, 19 nt, Artificial Sequence
  Description of Artificial Sequence: Synthetic oligonucleotide
gcgugcaauggcuguucug

SEQ ID NO: 42383 - RNA, 19 nt, Artificial Sequence
  Description of Artificial Sequence: Synthetic oligonucleotide
cugcguacuuccucacaua

SEQ ID NO: 42384 - RNA, 19 nt, Artificial Sequence
  Description of Artificial Sequence: Synthetic oligonucleotide
cggggauaaagccucucuc

SEQ ID NO: 42385 - RNA, 19 nt, Artificial Sequence
  Description of Artificial Sequence: Synthetic oligonucleotide
ggaacgucauagagucuga

SEQ ID NO: 42386 - RNA, 19 nt, Artificial Sequence
  Description of Artificial Sequence: Synthetic oligonucleotide
uggucgucugguggucuua

SEQ ID NO: 42387 - RNA, 19 nt, Artificial Sequence
  Description of Artificial Sequence: Synthetic oligonucleotide
cuucucgccccacuucccu

SEQ ID NO: 42388 - RNA, 19 nt, Artificial Sequence
  Description of Artificial Sequence: Synthetic oligonucleotide
ggcgacgaaccgccgccgc

SEQ ID NO: 42389 - RNA, 19 nt, Artificial Sequence
  Description of Artificial Sequence: Synthetic oligonucleotide
cuugugcgauggcuguaua

SEQ ID NO: 42390 - RNA, 19 nt, Artificial Sequence
  Description of Artificial Sequence: Synthetic oligonucleotide
cguagguacggcugcagaa

SEQ ID NO: 42391 - RNA, 19 nt, Artificial Sequence
  Description of Artificial Sequence: Synthetic oligonucleotide
guuccgucaugcucauuuu

SEQ ID NO: 42392 - RNA, 19 nt, Artificial Sequence
  Description of Artificial Sequence: Synthetic oligonucleotide
cacugccccaccgcgcguc

SEQ ID NO: 42393 - RNA, 19 nt, Artificial Sequence
  Description of Artificial Sequence: Synthetic oligonucleotide
accugacgggcaaaccauu

SEQ ID NO: 42394 - RNA, 19 nt, Artificial Sequence
  Description of Artificial Sequence: Synthetic oligonucleotide
gagcuacgccacugcccuc

SEQ ID NO: 42395 - RNA, 19 nt, Artificial Sequence
  Description of Artificial Sequence: Synthetic oligonucleotide
cagcaacgucgugagcuga

SEQ ID NO: 42396 - RNA, 19 nt, Artificial Sequence
  Description of Artificial Sequence: Synthetic oligonucleotide
cuagcgcaucuucggccaa

SEQ ID NO: 42397 - RNA, 19 nt, Artificial Sequence
  Description of Artificial Sequence: Synthetic oligonucleotide
cguuuggaaugaguucaac

SEQ ID NO: 42398 - RNA, 19 nt, Artificial Sequence
  Description of Artificial Sequence: Synthetic oligonucleotide
cauuggggugcuagcgcau

SEQ ID NO: 42399 - RNA, 19 nt, Artificial Sequence
  Description of Artificial Sequence: Synthetic oligonucleotide
cguuccgucaugcucauuu

SEQ ID NO: 42400 - RNA, 19 nt, Artificial Sequence
  Description of Artificial Sequence: Synthetic oligonucleotide
cccgaucgaccucuaguga

SEQ ID NO: 42401 - RNA, 19 nt, Artificial Sequence
  Description of Artificial Sequence: Synthetic oligonucleotide
cgcgucacuggcgacgaac

SEQ ID NO: 42402 - RNA, 19 nt, Artificial Sequence
  Description of Artificial Sequence: Synthetic oligonucleotide
ccgaucgaccucuagugau

SEQ ID NO: 42403 - RNA, 19 nt, Artificial Sequence
  Description of Artificial Sequence: Synthetic oligonucleotide
cgagcuacgccacugcccu

SEQ ID NO: 42404 - RNA, 19 nt, Artificial Sequence
  Description of Artificial Sequence: Synthetic oligonucleotide
gcgacuagcggaccaucau

SEQ ID NO: 42405 - RNA, 19 nt, Artificial Sequence
  Description of Artificial Sequence: Synthetic oligonucleotide
gucguuccgucaugcucau

SEQ ID NO: 42406 - RNA, 19 nt, Artificial Sequence
  Description of Artificial Sequence: Synthetic oligonucleotide
ccguguccuuuugcguucc

SEQ ID NO: 42407 - RNA, 19 nt, Artificial Sequence
  Description of Artificial Sequence: Synthetic oligonucleotide
ccguuuggaaugaguucaa

SEQ ID NO: 42408 - RNA, 19 nt, Artificial Sequence
  Description of Artificial Sequence: Synthetic oligonucleotide
cucuagugauaagucucuu

SEQ ID NO: 42409 - RNA, 19 nt, Artificial Sequence
  Description of Artificial Sequence: Synthetic oligonucleotide
cgaucgaccucuagugaua

SEQ ID NO: 42410 - RNA, 19 nt, Artificial Sequence
  Description of Artificial Sequence: Synthetic oligonucleotide
gcgcuugugcgauggcugu

SEQ ID NO: 42411 - RNA, 19 nt, Artificial Sequence
  Description of Artificial Sequence: Synthetic oligonucleotide
cgacuagcggaccaucaua

SEQ ID NO: 42412 - RNA, 19 nt, Artificial Sequence
  Description of Artificial Sequence: Synthetic oligonucleotide
ccccaccgcgcgucacugg

SEQ ID NO: 42413 - RNA, 19 nt, Artificial Sequence
  Description of Artificial Sequence: Synthetic oligonucleotide
cugccccaccgcgcgucac

SEQ ID NO: 42414 - RNA, 19 nt, Artificial Sequence
  Description of Artificial Sequence: Synthetic oligonucleotide
ggagcgcaaugcagcuaga

SEQ ID NO: 42415 - RNA, 19 nt, Artificial Sequence
  Description of Artificial Sequence: Synthetic oligonucleotide
ucguuccgucaugcucauu

SEQ ID NO: 42416 - RNA, 19 nt, Artificial Sequence
  Description of Artificial Sequence: Synthetic oligonucleotide
ggucgucugguggucuuau

SEQ ID NO: 42417 - RNA, 19 nt, Artificial Sequence
  Description of Artificial Sequence: Synthetic oligonucleotide
ccgaaucuucauugucgau

SEQ ID NO: 42418 - RNA, 19 nt, Artificial Sequence
  Description of Artificial Sequence: Synthetic oligonucleotide
cgacuagaaccaugacgcu

SEQ ID NO: 42419 - RNA, 19 nt, Artificial Sequence
  Description of Artificial Sequence: Synthetic oligonucleotide
gcggaccaucauagacaaa

SEQ ID NO: 42420 - RNA, 19 nt, Artificial Sequence
  Description of Artificial Sequence: Synthetic oligonucleotide
cccuuccgugugcaaugau

SEQ ID NO: 42421 - RNA, 19 nt, Artificial Sequence
  Description of Artificial Sequence: Synthetic oligonucleotide
gggagucgucaggguuagu

SEQ ID NO: 42422 - RNA, 19 nt, Artificial Sequence
  Description of Artificial Sequence: Synthetic oligonucleotide
aauguuaagauguaugugg

SEQ ID NO: 42423 - RNA, 19 nt, Artificial Sequence
  Description of Artificial Sequence: Synthetic oligonucleotide
aaugcuauuacguuugaag

SEQ ID NO: 42424 - RNA, 19 nt, Artificial Sequence
  Description of Artificial Sequence: Synthetic oligonucleotide
aaaguuagaguugaaauug

SEQ ID NO: 42425 - RNA, 19 nt, Artificial Sequence
  Description of Artificial Sequence: Synthetic oligonucleotide
aacaaauuuggaucuuggc

SEQ ID NO: 42426 - RNA, 19 nt, Artificial Sequence
  Description of Artificial Sequence: Synthetic oligonucleotide
aaaaggguccugcaaaccg

SEQ ID NO: 42427 - RNA, 19 nt, Artificial Sequence
  Description of Artificial Sequence: Synthetic oligonucleotide
aagaguuaguaguguaugc

SEQ ID NO: 42428 - RNA, 19 nt, Artificial Sequence
  Description of Artificial Sequence: Synthetic oligonucleotide
augcuauuacguuugaagc

SEQ ID NO: 42429 - RNA, 19 nt, Artificial Sequence
  Description of Artificial Sequence: Synthetic oligonucleotide
aacuugcaacccuaaaacc

SEQ ID NO: 42430 - RNA, 19 nt, Artificial Sequence
  Description of Artificial Sequence: Synthetic oligonucleotide
uguccuauagcuaggauca

SEQ ID NO: 42431 - RNA, 19 nt, Artificial Sequence
  Description of Artificial Sequence: Synthetic oligonucleotide
aauacgaacacgaaaauaa

SEQ ID NO: 42432 - RNA, 19 nt, Artificial Sequence
  Description of Artificial Sequence: Synthetic oligonucleotide
uuaacaagaguuaguagug

SEQ ID NO: 42433 - RNA, 19 nt, Artificial Sequence
  Description of Artificial Sequence: Synthetic oligonucleotide
uaagacaugccucaguaug

SEQ ID NO: 42434 - RNA, 19 nt, Artificial Sequence
  Description of Artificial Sequence: Synthetic oligonucleotide
accaaguaugaauaaggcc

SEQ ID NO: 42435 - RNA, 19 nt, Artificial Sequence
  Description of Artificial Sequence: Synthetic oligonucleotide
  modified_base (4)..(4): a, c, u, g, unknown or other
uacnuaaauagugugaagu

SEQ ID NO: 42436 - RNA, 19 nt, Artificial Sequence
  Description of Artificial Sequence: Synthetic oligonucleotide
auaaucuaguuucugccac

SEQ ID NO: 42437 - RNA, 19 nt, Artificial Sequence
  Description of Artificial Sequence: Synthetic oligonucleotide
aauuaccuaguuuggauga

SEQ ID NO: 42438 - RNA, 19 nt, Artificial Sequence
  Description of Artificial Sequence: Synthetic oligonucleotide
uuacguuugaagcugucag

SEQ ID NO: 42439 - RNA, 19 nt, Artificial Sequence
  Description of Artificial Sequence: Synthetic oligonucleotide
aaguguguaaauaagacaa

SEQ ID NO: 42440 - RNA, 19 nt, Artificial Sequence
  Description of Artificial Sequence: Synthetic oligonucleotide
uugaguccaacaaagacgu

SEQ ID NO: 42441 - RNA, 19 nt, Artificial Sequence
  Description of Artificial Sequence: Synthetic oligonucleotide
uauauuuuaccaguguagc

SEQ ID NO: 42442 - RNA, 19 nt, Artificial Sequence
  Description of Artificial Sequence: Synthetic oligonucleotide
auugaguccaacaaagacg

SEQ ID NO: 42443 - RNA, 19 nt, Artificial Sequence
  Description of Artificial Sequence: Synthetic oligonucleotide
uaauuauugcuaauacuca

SEQ ID NO: 42444 - RNA, 19 nt, Artificial Sequence
  Description of Artificial Sequence: Synthetic oligonucleotide
uuaagagguguccaacuag

SEQ ID NO: 42445 - RNA, 19 nt, Artificial Sequence
  Description of Artificial Sequence: Synthetic oligonucleotide
auuaguuccaccccaucuc

SEQ ID NO: 42446 - RNA, 19 nt, Artificial Sequence
  Description of Artificial Sequence: Synthetic oligonucleotide
ugguauuuagcugugguag

SEQ ID NO: 42447 - RNA, 19 nt, Artificial Sequence
  Description of Artificial Sequence: Synthetic oligonucleotide
uacgauaauauacagcaua

SEQ ID NO: 42448 - RNA, 19 nt, Artificial Sequence
  Description of Artificial Sequence: Synthetic oligonucleotide
uaugguguaaauucacuga

SEQ ID NO: 42449 - RNA, 19 nt, Artificial Sequence
  Description of Artificial Sequence: Synthetic oligonucleotide
uucaacguucuccuugugg

SEQ ID NO: 42450 - RNA, 19 nt, Artificial Sequence
  Description of Artificial Sequence: Synthetic oligonucleotide
uuugcagguaagauguuug

SEQ ID NO: 42451 - RNA, 19 nt, Artificial Sequence
  Description of Artificial Sequence: Synthetic oligonucleotide
auaggaacauuuuccauug

SEQ ID NO: 42452 - RNA, 19 nt, Artificial Sequence
  Description of Artificial Sequence: Synthetic oligonucleotide
aagucaauuguuuugcaua

SEQ ID NO: 42453 - RNA, 19 nt, Artificial Sequence
  Description of Artificial Sequence: Synthetic oligonucleotide
cuugcaacccuaaaaccgg

SEQ ID NO: 42454 - RNA, 19 nt, Artificial Sequence
  Description of Artificial Sequence: Synthetic oligonucleotide
uaaauuucaucuccugaca

SEQ ID NO: 42455 - RNA, 19 nt, Artificial Sequence
  Description of Artificial Sequence: Synthetic oligonucleotide
gaaaguguguaaauaagac

SEQ ID NO: 42456 - RNA, 19 nt, Artificial Sequence
  Description of Artificial Sequence: Synthetic oligonucleotide
aaaugauguaacgcagucg

SEQ ID NO: 42457 - RNA, 19 nt, Artificial Sequence
  Description of Artificial Sequence: Synthetic oligonucleotide
ugaucuuagaguccaacaa

SEQ ID NO: 42458 - RNA, 19 nt, Artificial Sequence
  Description of Artificial Sequence: Synthetic oligonucleotide
uauacuuaguauagccuug

SEQ ID NO: 42459 - RNA, 19 nt, Artificial Sequence
  Description of Artificial Sequence: Synthetic oligonucleotide
uuaaaugauguaacgcagu

SEQ ID NO: 42460 - RNA, 19 nt, Artificial Sequence
  Description of Artificial Sequence: Synthetic oligonucleotide
acuugcaacccuaaaaccg

SEQ ID NO: 42461 - RNA, 19 nt, Artificial Sequence
  Description of Artificial Sequence: Synthetic oligonucleotide
aagacaugccucaguaugc

SEQ ID NO: 42462 - RNA, 19 nt, Artificial Sequence
  Description of Artificial Sequence: Synthetic oligonucleotide
augguguaaauucacugag

SEQ ID NO: 42463 - RNA, 19 nt, Artificial Sequence
  Description of Artificial Sequence: Synthetic oligonucleotide
agaauaacugugauuuggc

SEQ ID NO: 42464 - RNA, 19 nt, Artificial Sequence
  Description of Artificial Sequence: Synthetic oligonucleotide
uuggguuuccauuucauaa

SEQ ID NO: 42465 - RNA, 19 nt, Artificial Sequence
  Description of Artificial Sequence: Synthetic oligonucleotide
cauuguaucuuaauauaug

SEQ ID NO: 42466 - RNA, 19 nt, Artificial Sequence
  Description of Artificial Sequence: Synthetic oligonucleotide
caaauugugcacaacagga

SEQ ID NO: 42467 - RNA, 19 nt, Artificial Sequence
  Description of Artificial Sequence: Synthetic oligonucleotide
uguuugguacuguggaggg

SEQ ID NO: 42468 - RNA, 19 nt, Artificial Sequence
  Description of Artificial Sequence: Synthetic oligonucleotide
uuauccauguacagcaacu

SEQ ID NO: 42469 - RNA, 19 nt, Artificial Sequence
  Description of Artificial Sequence: Synthetic oligonucleotide
ugagcuagcacuacagggu

SEQ ID NO: 42470 - RNA, 19 nt, Artificial Sequence
  Description of Artificial Sequence: Synthetic oligonucleotide
ucauggauuuccuggcucg

SEQ ID NO: 42471 - RNA, 19 nt, Artificial Sequence
  Description of Artificial Sequence: Synthetic oligonucleotide
aaaaccggaggauaggguu

SEQ ID NO: 42472 - RNA, 19 nt, Artificial Sequence
  Description of Artificial Sequence: Synthetic oligonucleotide
uaaaugauguaacgcaguc

SEQ ID NO: 42473 - RNA, 19 nt, Artificial Sequence
  Description of Artificial Sequence: Synthetic oligonucleotide
aauucuagaggucccguau

SEQ ID NO: 42474 - RNA, 19 nt, Artificial Sequence
  Description of Artificial Sequence: Synthetic oligonucleotide
gugagcuagcacuacaggg

SEQ ID NO: 42475 - RNA, 19 nt, Artificial Sequence
  Description of Artificial Sequence: Synthetic oligonucleotide
gauguaacgcagucgcagg

SEQ ID NO: 42476 - RNA, 19 nt, Artificial Sequence
  Description of Artificial Sequence: Synthetic oligonucleotide
ucaacuucacuacagucau

SEQ ID NO: 42477 - RNA, 19 nt, Artificial Sequence
  Description of Artificial Sequence: Synthetic oligonucleotide
ugcuauguccccacagugg

SEQ ID NO: 42478 - RNA, 19 nt, Artificial Sequence
  Description of Artificial Sequence: Synthetic oligonucleotide
uaagucacguaccauucca

SEQ ID NO: 42479 - RNA, 19 nt, Artificial Sequence
  Description of Artificial Sequence: Synthetic oligonucleotide
aaauuuggaucuuggcaca

SEQ ID NO: 42480 - RNA, 19 nt, Artificial Sequence
  Description of Artificial Sequence: Synthetic oligonucleotide
agcagggucgacuagugag

SEQ ID NO: 42481 - RNA, 19 nt, Artificial Sequence
  Description of Artificial Sequence: Synthetic oligonucleotide
aaaggguccugcaaaccgc

SEQ ID NO: 42482 - RNA, 19 nt, Artificial Sequence
  Description of Artificial Sequence: Synthetic oligonucleotide
guaugguguaaauucacug

SEQ ID NO: 42483 - RNA, 19 nt, Artificial Sequence
  Description of Artificial Sequence: Synthetic oligonucleotide
aaugcaauccuaucagaua

SEQ ID NO: 42484 - RNA, 19 nt, Artificial Sequence
  Description of Artificial Sequence: Synthetic oligonucleotide
uaucaucacauguauuuac

SEQ ID NO: 42485 - RNA, 19 nt, Artificial Sequence
  Description of Artificial Sequence: Synthetic oligonucleotide
guaguagagggauaauacc

SEQ ID NO: 42486 - RNA, 19 nt, Artificial Sequence
  Description of Artificial Sequence: Synthetic oligonucleotide
  modified_base (5)..(5): a, c, u, g, unknown or other
uuacnuaaauagugugaag

SEQ ID NO: 42487 - RNA, 19 nt, Artificial Sequence
  Description of Artificial Sequence: Synthetic oligonucleotide
ugcuauuacguuugaagcu

SEQ ID NO: 42488 - RNA, 19 nt, Artificial Sequence
  Description of Artificial Sequence: Synthetic oligonucleotide
guaacuggccagcagagug

SEQ ID NO: 42489 - RNA, 19 nt, Artificial Sequence
  Description of Artificial Sequence: Synthetic oligonucleotide
uguaugguguaaauucacu

SEQ ID NO: 42490 - RNA, 19 nt, Artificial Sequence
  Description of Artificial Sequence: Synthetic oligonucleotide
ggaucuuugggucaguaag

SEQ ID NO: 42491 - RNA, 19 nt, Artificial Sequence
  Description of Artificial Sequence: Synthetic oligonucleotide
agacuuuccgcaaaugugg

SEQ ID NO: 42492 - RNA, 19 nt, Artificial Sequence
  Description of Artificial Sequence: Synthetic oligonucleotide
ugauguaacgcagucgcag

SEQ ID NO: 42493 - RNA, 19 nt, Artificial Sequence
  Description of Artificial Sequence: Synthetic oligonucleotide
  modified_base (2)..(2): a, c, u, g, unknown or other
cnuaaauagugugaaguac

SEQ ID NO: 42494 - RNA, 19 nt, Artificial Sequence
  Description of Artificial Sequence: Synthetic oligonucleotide
aaaacaaguguaguuacua

SEQ ID NO: 42495 - RNA, 19 nt, Artificial Sequence
  Description of Artificial Sequence: Synthetic oligonucleotide
acgaacacgaaaauaauca

SEQ ID NO: 42496 - RNA, 19 nt, Artificial Sequence
  Description of Artificial Sequence: Synthetic oligonucleotide
agaguugaaauugagucca

SEQ ID NO: 42497 - RNA, 19 nt, Artificial Sequence
  Description of Artificial Sequence: Synthetic oligonucleotide
gcuacagcgacuucgaacc

SEQ ID NO: 42498 - RNA, 19 nt, Artificial Sequence
  Description of Artificial Sequence: Synthetic oligonucleotide
uccuaucagauaaaaucca

SEQ ID NO: 42499 - RNA, 19 nt, Artificial Sequence
  Description of Artificial Sequence: Synthetic oligonucleotide
ucuuaaugcuauuacguuu

SEQ ID NO: 42500 - RNA, 19 nt, Artificial Sequence
  Description of Artificial Sequence: Synthetic oligonucleotide
  modified_base (9)..(9): a, c, u, g, unknown or other
aagguuacnuaaauagugu

SEQ ID NO: 42501 - RNA, 19 nt, Artificial Sequence
  Description of Artificial Sequence: Synthetic oligonucleotide
cuguaguauauuuuaccag

SEQ ID NO: 42502 - RNA, 19 nt, Artificial Sequence
  Description of Artificial Sequence: Synthetic oligonucleotide
cuuuaauccagcaauguua

SEQ ID NO: 42503 - RNA, 19 nt, Artificial Sequence
  Description of Artificial Sequence: Synthetic oligonucleotide
acaaagacguuucuugcca

SEQ ID NO: 42504 - RNA, 19 nt, Artificial Sequence
  Description of Artificial Sequence: Synthetic oligonucleotide
ugugaguagagcugcuaag

SEQ ID NO: 42505 - RNA, 19 nt, Artificial Sequence
  Description of Artificial Sequence: Synthetic oligonucleotide
uguauaaguccauugcaua

SEQ ID NO: 42506 - RNA, 19 nt, Artificial Sequence
  Description of Artificial Sequence: Synthetic oligonucleotide
  modified_base (8)..(8): a, c, u, g, unknown or other
agguuacnuaaauagugug

SEQ ID NO: 42507 - RNA, 19 nt, Artificial Sequence
  Description of Artificial Sequence: Synthetic oligonucleotide
aaauauuauuucuccccaa

SEQ ID NO: 42508 - RNA, 19 nt, Artificial Sequence
  Description of Artificial Sequence: Synthetic oligonucleotide
ucgacuagugagaagcccu

SEQ ID NO: 42509 - RNA, 19 nt, Artificial Sequence
  Description of Artificial Sequence: Synthetic oligonucleotide
agacacggagacuuuccgc

SEQ ID NO: 42510 - RNA, 19 nt, Artificial Sequence
  Description of Artificial Sequence: Synthetic oligonucleotide
guacgugucaaucaaggca

SEQ ID NO: 42511 - RNA, 19 nt, Artificial Sequence
  Description of Artificial Sequence: Synthetic oligonucleotide
uaguuuacuugaaauccac

SEQ ID NO: 42512 - RNA, 19 nt, Artificial Sequence
  Description of Artificial Sequence: Synthetic oligonucleotide
uuguuaacaagaguuagua

SEQ ID NO: 42513 - RNA, 19 nt, Artificial Sequence
  Description of Artificial Sequence: Synthetic oligonucleotide
aaucguguggcugauacua

SEQ ID NO: 42514 - RNA, 19 nt, Artificial Sequence
  Description of Artificial Sequence: Synthetic oligonucleotide
ugggaaguugcaaguuugg

SEQ ID NO: 42515 - RNA, 19 nt, Artificial Sequence
  Description of Artificial Sequence: Synthetic oligonucleotide
aaaguaccacagcuagaag

SEQ ID NO: 42516 - RNA, 19 nt, Artificial Sequence
  Description of Artificial Sequence: Synthetic oligonucleotide
cuaaaaccggaggauaggg

SEQ ID NO: 42517 - RNA, 19 nt, Artificial Sequence
  Description of Artificial Sequence: Synthetic oligonucleotide
aaccgauagcuuuaaucca

SEQ ID NO: 42518 - RNA, 19 nt, Artificial Sequence
  Description of Artificial Sequence: Synthetic oligonucleotide
gauuucuauggguuucccc

SEQ ID NO: 42519 - RNA, 19 nt, Artificial Sequence
  Description of Artificial Sequence: Synthetic oligonucleotide
  modified_base (3)..(3): a, c, u, g, unknown or other
acnuaaauagugugaagua

SEQ ID NO: 42520 - RNA, 19 nt, Artificial Sequence
  Description of Artificial Sequence: Synthetic oligonucleotide
ucuucggacacugugagua

SEQ ID NO: 42521 - RNA, 19 nt, Artificial Sequence
  Description of Artificial Sequence: Synthetic oligonucleotide
guguguaaauaagacaacc

SEQ ID NO: 42522 - RNA, 19 nt, Artificial Sequence
  Description of Artificial Sequence: Synthetic oligonucleotide
cuacagauggguagguagc

SEQ ID NO: 42523 - RNA, 19 nt, Artificial Sequence
  Description of Artificial Sequence: Synthetic oligonucleotide
gagacuuuccgcaaaugug

SEQ ID NO: 42524 - RNA, 19 nt, Artificial Sequence
  Description of Artificial Sequence: Synthetic oligonucleotide
uuggcacaaugacaagagg

SEQ ID NO: 42525 - RNA, 19 nt, Artificial Sequence
  Description of Artificial Sequence: Synthetic oligonucleotide
aucagcuacccuaagucac

SEQ ID NO: 42526 - RNA, 19 nt, Artificial Sequence
  Description of Artificial Sequence: Synthetic oligonucleotide
uaccuaguuuggaugacca

SEQ ID NO: 42527 - RNA, 19 nt, Artificial Sequence
  Description of Artificial Sequence: Synthetic oligonucleotide
uuggagcuaauggaaacag

SEQ ID NO: 42528 - RNA, 19 nt, Artificial Sequence
  Description of Artificial Sequence: Synthetic oligonucleotide
  modified_base (6)..(6): a, c, u, g, unknown or other
guuacnuaaauagugugaa

SEQ ID NO: 42529 - RNA, 19 nt, Artificial Sequence
  Description of Artificial Sequence: Synthetic oligonucleotide
aaacuuggaaaguguguaa

SEQ ID NO: 42530 - RNA, 19 nt, Artificial Sequence
  Description of Artificial Sequence: Synthetic oligonucleotide
ugauuuuauuuggaggaga

SEQ ID NO: 42531 - RNA, 19 nt, Artificial Sequence
  Description of Artificial Sequence: Synthetic oligonucleotide
gaucuuagaguccaacaaa

SEQ ID NO: 42532 - RNA, 19 nt, Artificial Sequence
  Description of Artificial Sequence: Synthetic oligonucleotide
uuuggagcuaauggaaaca

SEQ ID NO: 42533 - RNA, 19 nt, Artificial Sequence
  Description of Artificial Sequence: Synthetic oligonucleotide
agcuagaagauuaaauaca

SEQ ID NO: 42534 - RNA, 19 nt, Artificial Sequence
  Description of Artificial Sequence: Synthetic oligonucleotide
gauagcuuuaauccagcaa

SEQ ID NO: 42535 - RNA, 19 nt, Artificial Sequence
  Description of Artificial Sequence: Synthetic oligonucleotide
gcuaauacucaaauguuag

SEQ ID NO: 42536 - RNA, 19 nt, Artificial Sequence
  Description of Artificial Sequence: Synthetic oligonucleotide
gcgacuucgaaccucuucg

SEQ ID NO: 42537 - RNA, 19 nt, Artificial Sequence
  Description of Artificial Sequence: Synthetic oligonucleotide
uaaaaccggaggauagggu

SEQ ID NO: 42538 - RNA, 19 nt, Artificial Sequence
  Description of Artificial Sequence: Synthetic oligonucleotide
guguccuauagcuaggauc

SEQ ID NO: 42539 - RNA, 19 nt, Artificial Sequence
  Description of Artificial Sequence: Synthetic oligonucleotide
cugcuaauuacccugcuca

SEQ ID NO: 42540 - RNA, 19 nt, Artificial Sequence
  Description of Artificial Sequence: Synthetic oligonucleotide
uacccuaagucacguacca

SEQ ID NO: 42541 - RNA, 19 nt, Artificial Sequence
  Description of Artificial Sequence: Synthetic oligonucleotide
ugguuugauguucccauaa

SEQ ID NO: 42542 - RNA, 19 nt, Artificial Sequence
  Description of Artificial Sequence: Synthetic oligonucleotide
aguguguaaauaagacaac

SEQ ID NO: 42543 - RNA, 19 nt, Artificial Sequence
  Description of Artificial Sequence: Synthetic oligonucleotide
acuacaggguucuccccac

SEQ ID NO: 42544 - RNA, 19 nt, Artificial Sequence
  Description of Artificial Sequence: Synthetic oligonucleotide
aguugaaauugaguccaac

SEQ ID NO: 42545 - RNA, 19 nt, Artificial Sequence
  Description of Artificial Sequence: Synthetic oligonucleotide
agaguuaguaguguaugca

SEQ ID NO: 42546 - RNA, 19 nt, Artificial Sequence
  Description of Artificial Sequence: Synthetic oligonucleotide
caugccucaguaugcuugg

SEQ ID NO: 42547 - RNA, 19 nt, Artificial Sequence
  Description of Artificial Sequence: Synthetic oligonucleotide
cuaauuacccugcucagaa

SEQ ID NO: 42548 - RNA, 19 nt, Artificial Sequence
  Description of Artificial Sequence: Synthetic oligonucleotide
caagaguuaguaguguaug

SEQ ID NO: 42549 - RNA, 19 nt, Artificial Sequence
  Description of Artificial Sequence: Synthetic oligonucleotide
augaccaaguaugaauaag

SEQ ID NO: 42550 - RNA, 19 nt, Artificial Sequence
  Description of Artificial Sequence: Synthetic oligonucleotide
cuggccuacagauggguag

SEQ ID NO: 42551 - RNA, 19 nt, Artificial Sequence
  Description of Artificial Sequence: Synthetic oligonucleotide
guauaaguccauugcauaa

SEQ ID NO: 42552 - RNA, 19 nt, Artificial Sequence
  Description of Artificial Sequence: Synthetic oligonucleotide
agucgcaggaagaaguuag

SEQ ID NO: 42553 - RNA, 19 nt, Artificial Sequence
  Description of Artificial Sequence: Synthetic oligonucleotide
guaguaaauagacuuuucu

SEQ ID NO: 42554 - RNA, 19 nt, Artificial Sequence
  Description of Artificial Sequence: Synthetic oligonucleotide
uuaagauguauguggucau

SEQ ID NO: 42555 - RNA, 19 nt, Artificial Sequence
  Description of Artificial Sequence: Synthetic oligonucleotide
cuacccuaagucacguacc

SEQ ID NO: 42556 - RNA, 19 nt, Artificial Sequence
  Description of Artificial Sequence: Synthetic oligonucleotide
agcgacuucgaaccucuuc

SEQ ID NO: 42557 - RNA, 19 nt, Artificial Sequence
  Description of Artificial Sequence: Synthetic oligonucleotide
auguauuuacaauguagua

SEQ ID NO: 42558 - RNA, 19 nt, Artificial Sequence
  Description of Artificial Sequence: Synthetic oligonucleotide
uguuugcuuugaaaagggu

SEQ ID NO: 42559 - RNA, 19 nt, Artificial Sequence
  Description of Artificial Sequence: Synthetic oligonucleotide
caauaagcucagcauaguc

SEQ ID NO: 42560 - RNA, 19 nt, Artificial Sequence
  Description of Artificial Sequence: Synthetic oligonucleotide
uauaaguccauugcauaau

SEQ ID NO: 42561 - RNA, 19 nt, Artificial Sequence
  Description of Artificial Sequence: Synthetic oligonucleotide
gaguuaguaguguaugcaa

SEQ ID NO: 42562 - RNA, 19 nt, Artificial Sequence
  Description of Artificial Sequence: Synthetic oligonucleotide
cuuuuaagagguguccaac

SEQ ID NO: 42563 - RNA, 19 nt, Artificial Sequence
  Description of Artificial Sequence: Synthetic oligonucleotide
gccuguacccuuuuaagag

SEQ ID NO: 42564 - RNA, 19 nt, Artificial Sequence
  Description of Artificial Sequence: Synthetic oligonucleotide
caauguuaagauguaugug

SEQ ID NO: 42565 - RNA, 19 nt, Artificial Sequence
  Description of Artificial Sequence: Synthetic oligonucleotide
ucccguaucagcacaccac

SEQ ID NO: 42566 - RNA, 19 nt, Artificial Sequence
  Description of Artificial Sequence: Synthetic oligonucleotide
uuaaugcuauuacguuuga

SEQ ID NO: 42567 - RNA, 19 nt, Artificial Sequence
  Description of Artificial Sequence: Synthetic oligonucleotide
ugcaaaccgccacaagcca

SEQ ID NO: 42568 - RNA, 19 nt, Artificial Sequence
  Description of Artificial Sequence: Synthetic oligonucleotide
cuaagucacguaccauucc

SEQ ID NO: 42569 - RNA, 19 nt, Artificial Sequence
  Description of Artificial Sequence: Synthetic oligonucleotide
uuaccuaguuuggaugacc

SEQ ID NO: 42570 - RNA, 19 nt, Artificial Sequence
  Description of Artificial Sequence: Synthetic oligonucleotide
auuaccuaguuuggaugac

SEQ ID NO: 42571 - RNA, 19 nt, Artificial Sequence
  Description of Artificial Sequence: Synthetic oligonucleotide
cauaaagaauucguugauc

SEQ ID NO: 42572 - RNA, 19 nt, Artificial Sequence
  Description of Artificial Sequence: Synthetic oligonucleotide
uuuaccaguguagccagaa

SEQ ID NO: 42573 - RNA, 19 nt, Artificial Sequence
  Description of Artificial Sequence: Synthetic oligonucleotide
guaacgcagucgcaggaag

SEQ ID NO: 42574 - RNA, 19 nt, Artificial Sequence
  Description of Artificial Sequence: Synthetic oligonucleotide
uaguuacuauacuuaguau

SEQ ID NO: 42575 - RNA, 19 nt, Artificial Sequence
  Description of Artificial Sequence: Synthetic oligonucleotide
accgauagcuuuaauccag

SEQ ID NO: 42576 - RNA, 19 nt, Artificial Sequence
  Description of Artificial Sequence: Synthetic oligonucleotide
gacuuuccgcaaauguggg

SEQ ID NO: 42577 - RNA, 19 nt, Artificial Sequence
  Description of Artificial Sequence: Synthetic oligonucleotide
auaaguccauugcauaaua

SEQ ID NO: 42578 - RNA, 19 nt, Artificial Sequence
  Description of Artificial Sequence: Synthetic oligonucleotide
aguaugaauaaggccucag

SEQ ID NO: 42579 - RNA, 19 nt, Artificial Sequence
  Description of Artificial Sequence: Synthetic oligonucleotide
caaguacgugucaaucaag

SEQ ID NO: 42580 - RNA, 19 nt, Artificial Sequence
  Description of Artificial Sequence: Synthetic oligonucleotide
aggugaauauacugcauua

SEQ ID NO: 42581 - RNA, 19 nt, Artificial Sequence
  Description of Artificial Sequence: Synthetic oligonucleotide
ugugugucgggcagaauuu

SEQ ID NO: 42582 - RNA, 19 nt, Artificial Sequence
  Description of Artificial Sequence: Synthetic oligonucleotide
guuggcagugauacuaagc

SEQ ID NO: 42583 - RNA, 19 nt, Artificial Sequence
  Description of Artificial Sequence: Synthetic oligonucleotide
  modified_base (7)..(7): a, c, u, g, unknown or other
gguuacnuaaauaguguga

SEQ ID NO: 42584 - RNA, 19 nt, Artificial Sequence
  Description of Artificial Sequence: Synthetic oligonucleotide
gggucgacuagugagaagc

SEQ ID NO: 42585 - RNA, 19 nt, Artificial Sequence
  Description of Artificial Sequence: Synthetic oligonucleotide
gcaacuaaccgcuuuacaa

SEQ ID NO: 42586 - RNA, 19 nt, Artificial Sequence
  Description of Artificial Sequence: Synthetic oligonucleotide
gcuauuacguuugaagcug

SEQ ID NO: 42587 - RNA, 19 nt, Artificial Sequence
  Description of Artificial Sequence: Synthetic oligonucleotide
acacuuuaggaaacacaac

SEQ ID NO: 42588 - RNA, 19 nt, Artificial Sequence
  Description of Artificial Sequence: Synthetic oligonucleotide
agguaagauguuugguacu

SEQ ID NO: 42589 - RNA, 19 nt, Artificial Sequence
  Description of Artificial Sequence: Synthetic oligonucleotide
uggccuacagauggguagg

SEQ ID NO: 42590 - RNA, 19 nt, Artificial Sequence
  Description of Artificial Sequence: Synthetic oligonucleotide
ggaggacauacacaggaug

SEQ ID NO: 42591 - RNA, 19 nt, Artificial Sequence
  Description of Artificial Sequence: Synthetic oligonucleotide
aacccuaaaaccggaggau

SEQ ID NO: 42592 - RNA, 19 nt, Artificial Sequence
  Description of Artificial Sequence: Synthetic oligonucleotide
cauggauuuagagagguua

SEQ ID NO: 42593 - RNA, 19 nt, Artificial Sequence
  Description of Artificial Sequence: Synthetic oligonucleotide
gcuacccuaagucacguac

SEQ ID NO: 42594 - RNA, 19 nt, Artificial Sequence
  Description of Artificial Sequence: Synthetic oligonucleotide
auguuaagauguauguggu

SEQ ID NO: 42595 - RNA, 19 nt, Artificial Sequence
  Description of Artificial Sequence: Synthetic oligonucleotide
uuccaggcaaguacguguc

SEQ ID NO: 42596 - RNA, 19 nt, Artificial Sequence
  Description of Artificial Sequence: Synthetic oligonucleotide
uucuugcaacaauggcagg

SEQ ID NO: 42597 - RNA, 19 nt, Artificial Sequence
  Description of Artificial Sequence: Synthetic oligonucleotide
agcaacuaaccgcuuuaca

SEQ ID NO: 42598 - RNA, 19 nt, Artificial Sequence
  Description of Artificial Sequence: Synthetic oligonucleotide
caacccuaaaaccggagga

SEQ ID NO: 42599 - RNA, 19 nt, Artificial Sequence
  Description of Artificial Sequence: Synthetic oligonucleotide
auaacccagucuguuaggu

SEQ ID NO: 42600 - RNA, 19 nt, Artificial Sequence
  Description of Artificial Sequence: Synthetic oligonucleotide
aacgcagucgcaggaagaa

SEQ ID NO: 42601 - RNA, 19 nt, Artificial Sequence
  Description of Artificial Sequence: Synthetic oligonucleotide
uuaccaguguagccagaac

SEQ ID NO: 42602 - RNA, 19 nt, Artificial Sequence
  Description of Artificial Sequence: Synthetic oligonucleotide
  modified_base (11)..(11): a, c, u, g, unknown or other
caaagguuacnuaaauagu

SEQ ID NO: 42603 - RNA, 19 nt, Artificial Sequence
  Description of Artificial Sequence: Synthetic oligonucleotide
cuauacuuaguauagccuu

SEQ ID NO: 42604 - RNA, 19 nt, Artificial Sequence
  Description of Artificial Sequence: Synthetic oligonucleotide
gaacugcccgaugggaagg

SEQ ID NO: 42605 - RNA, 19 nt, Artificial Sequence
  Description of Artificial Sequence: Synthetic oligonucleotide
uagagggauaauaccuuuu

SEQ ID NO: 42606 - RNA, 19 nt, Artificial Sequence
  Description of Artificial Sequence: Synthetic oligonucleotide
auguaacgcagucgcagga

SEQ ID NO: 42607 - RNA, 19 nt, Artificial Sequence
  Description of Artificial Sequence: Synthetic oligonucleotide
ccuaguuuggaugaccaag

SEQ ID NO: 42608 - RNA, 19 nt, Artificial Sequence
  Description of Artificial Sequence: Synthetic oligonucleotide
gagggauaauaccuuuuaa

SEQ ID NO: 42609 - RNA, 19 nt, Artificial Sequence
  Description of Artificial Sequence: Synthetic oligonucleotide
auguaguagagggauaaua

SEQ ID NO: 42610 - RNA, 19 nt, Artificial Sequence
  Description of Artificial Sequence: Synthetic oligonucleotide
uccauuaguuccaccccau

SEQ ID NO: 42611 - RNA, 19 nt, Artificial Sequence
  Description of Artificial Sequence: Synthetic oligonucleotide
ggaacugcccgaugggaag

SEQ ID NO: 42612 - RNA, 19 nt, Artificial Sequence
  Description of Artificial Sequence: Synthetic oligonucleotide
aguuaguaguguaugcaaa

SEQ ID NO: 42613 - RNA, 19 nt, Artificial Sequence
  Description of Artificial Sequence: Synthetic oligonucleotide
auggagucugugugucggg

SEQ ID NO: 42614 - RNA, 19 nt, Artificial Sequence
  Description of Artificial Sequence: Synthetic oligonucleotide
cacuggccaauuauuuaug

SEQ ID NO: 42615 - RNA, 19 nt, Artificial Sequence
  Description of Artificial Sequence: Synthetic oligonucleotide
uccauggauuggauuuaac

SEQ ID NO: 42616 - RNA, 19 nt, Artificial Sequence
  Description of Artificial Sequence: Synthetic oligonucleotide
uucccauaacccagucugu

SEQ ID NO: 42617 - RNA, 19 nt, Artificial Sequence
  Description of Artificial Sequence: Synthetic oligonucleotide
ggaagauuaaaggacuuaa

SEQ ID NO: 42618 - RNA, 19 nt, Artificial Sequence
  Description of Artificial Sequence: Synthetic oligonucleotide
uguaacgcagucgcaggaa

SEQ ID NO: 42619 - RNA, 19 nt, Artificial Sequence
  Description of Artificial Sequence: Synthetic oligonucleotide
cuucggacacugugaguag

SEQ ID NO: 42620 - RNA, 19 nt, Artificial Sequence
  Description of Artificial Sequence: Synthetic oligonucleotide
ccuaaguaauuucuuugug

SEQ ID NO: 42621 - RNA, 19 nt, Artificial Sequence
  Description of Artificial Sequence: Synthetic oligonucleotide
aguguagccagaacaguaa

SEQ ID NO: 42622 - RNA, 19 nt, Artificial Sequence
  Description of Artificial Sequence: Synthetic oligonucleotide
agucacguaccauuccauu

SEQ ID NO: 42623 - RNA, 19 nt, Artificial Sequence
  Description of Artificial Sequence: Synthetic oligonucleotide
uccuguaauuauugcuaau

SEQ ID NO: 42624 - RNA, 19 nt, Artificial Sequence
  Description of Artificial Sequence: Synthetic oligonucleotide
ggcuacagcgacuucgaac

SEQ ID NO: 42625 - RNA, 19 nt, Artificial Sequence
  Description of Artificial Sequence: Synthetic oligonucleotide
acuacugcgcucacucaag

SEQ ID NO: 42626 - RNA, 19 nt, Artificial Sequence
  Description of Artificial Sequence: Synthetic oligonucleotide
acuuuccgcaaaugugggu

SEQ ID NO: 42627 - RNA, 19 nt, Artificial Sequence
  Description of Artificial Sequence: Synthetic oligonucleotide
cuuggaaaguguguaaaua

SEQ ID NO: 42628 - RNA, 19 nt, Artificial Sequence
  Description of Artificial Sequence: Synthetic oligonucleotide
ccuaaaugagagcauccac

SEQ ID NO: 42629 - RNA, 19 nt, Artificial Sequence
  Description of Artificial Sequence: Synthetic oligonucleotide
ccauggauuggauuuaaca

SEQ ID NO: 42630 - RNA, 19 nt, Artificial Sequence
  Description of Artificial Sequence: Synthetic oligonucleotide
gucgacuagugagaagccc

SEQ ID NO: 42631 - RNA, 19 nt, Artificial Sequence
  Description of Artificial Sequence: Synthetic oligonucleotide
cauggauuuccuggcucgg

SEQ ID NO: 42632 - RNA, 19 nt, Artificial Sequence
  Description of Artificial Sequence: Synthetic oligonucleotide
guuugguacuguggagggg

SEQ ID NO: 42633 - RNA, 19 nt, Artificial Sequence
  Description of Artificial Sequence: Synthetic oligonucleotide
cauuaguuccaccccaucu

SEQ ID NO: 42634 - RNA, 19 nt, Artificial Sequence
  Description of Artificial Sequence: Synthetic oligonucleotide
gguuugauguucccauaac

SEQ ID NO: 42635 - RNA, 19 nt, Artificial Sequence
  Description of Artificial Sequence: Synthetic oligonucleotide
cccguaucagcacaccacg

SEQ ID NO: 42636 - RNA, 19 nt, Artificial Sequence
  Description of Artificial Sequence: Synthetic oligonucleotide
auggauuuagagagguuaa

SEQ ID NO: 42637 - RNA, 19 nt, Artificial Sequence
  Description of Artificial Sequence: Synthetic oligonucleotide
ccuaagucacguaccauuc

SEQ ID NO: 42638 - RNA, 19 nt, Artificial Sequence
  Description of Artificial Sequence: Synthetic oligonucleotide
aggcuugaccucuaugguu

SEQ ID NO: 42639 - RNA, 19 nt, Artificial Sequence
  Description of Artificial Sequence: Synthetic oligonucleotide
auacgaacacgaaaauaau

SEQ ID NO: 42640 - RNA, 19 nt, Artificial Sequence
  Description of Artificial Sequence: Synthetic oligonucleotide
gguacuguggaggggauuc

SEQ ID NO: 42641 - RNA, 19 nt, Artificial Sequence
  Description of Artificial Sequence: Synthetic oligonucleotide
ggucaguaaguacuucuuc

SEQ ID NO: 42642 - RNA, 19 nt, Artificial Sequence
  Description of Artificial Sequence: Synthetic oligonucleotide
auggcgaguugguccacug

SEQ ID NO: 42643 - RNA, 19 nt, Artificial Sequence
  Description of Artificial Sequence: Synthetic oligonucleotide
uaacccagucuguuaggua

SEQ ID NO: 42644 - RNA, 19 nt, Artificial Sequence
  Description of Artificial Sequence: Synthetic oligonucleotide
gcaaguacgugucaaucaa

SEQ ID NO: 42645 - RNA, 19 nt, Artificial Sequence
  Description of Artificial Sequence: Synthetic oligonucleotide
ggaggauaggguugcuggc

SEQ ID NO: 42646 - RNA, 19 nt, Artificial Sequence
  Description of Artificial Sequence: Synthetic oligonucleotide
acagcgacuucgaaccucu

SEQ ID NO: 42647 - RNA, 19 nt, Artificial Sequence
  Description of Artificial Sequence: Synthetic oligonucleotide
gaccucuaugguuccuuuc

SEQ ID NO: 42648 - RNA, 19 nt, Artificial Sequence
  Description of Artificial Sequence: Synthetic oligonucleotide
aagucacguaccauuccau

SEQ ID NO: 42649 - RNA, 19 nt, Artificial Sequence
  Description of Artificial Sequence: Synthetic oligonucleotide
cagcgaggagugaaacuac

SEQ ID NO: 42650 - RNA, 19 nt, Artificial Sequence
  Description of Artificial Sequence: Synthetic oligonucleotide
accuuugggagaggaccac

SEQ ID NO: 42651 - RNA, 19 nt, Artificial Sequence
  Description of Artificial Sequence: Synthetic oligonucleotide
uagcugugguaguuuaguu

SEQ ID NO: 42652 - RNA, 19 nt, Artificial Sequence
  Description of Artificial Sequence: Synthetic oligonucleotide
uugguccaaaucucuugua

SEQ ID NO: 42653 - RNA, 19 nt, Artificial Sequence
  Description of Artificial Sequence: Synthetic oligonucleotide
caauacgaacacgaaaaua

SEQ ID NO: 42654 - RNA, 19 nt, Artificial Sequence
  Description of Artificial Sequence: Synthetic oligonucleotide
ggcuugaccucuaugguuc

SEQ ID NO: 42655 - RNA, 19 nt, Artificial Sequence
  Description of Artificial Sequence: Synthetic oligonucleotide
ggagacuuuccgcaaaugu

SEQ ID NO: 42656 - RNA, 19 nt, Artificial Sequence
  Description of Artificial Sequence: Synthetic oligonucleotide
acaguaagaagcagugcuu

SEQ ID NO: 42657 - RNA, 19 nt, Artificial Sequence
  Description of Artificial Sequence: Synthetic oligonucleotide
gauuuggccuccauuaguu

SEQ ID NO: 42658 - RNA, 19 nt, Artificial Sequence
  Description of Artificial Sequence: Synthetic oligonucleotide
gguuggcagugauacuaag

SEQ ID NO: 42659 - RNA, 19 nt, Artificial Sequence
  Description of Artificial Sequence: Synthetic oligonucleotide
uggcgaguugguccacugu

SEQ ID NO: 42660 - RNA, 19 nt, Artificial Sequence
  Description of Artificial Sequence: Synthetic oligonucleotide
agggucgacuagugagaag

SEQ ID NO: 42661 - RNA, 19 nt, Artificial Sequence
  Description of Artificial Sequence: Synthetic oligonucleotide
uuguggauccauggcgagu

SEQ ID NO: 42662 - RNA, 19 nt, Artificial Sequence
  Description of Artificial Sequence: Synthetic oligonucleotide
ggaugaccaaguaugaaua

SEQ ID NO: 42663 - RNA, 19 nt, Artificial Sequence
  Description of Artificial Sequence: Synthetic oligonucleotide
aggccaaccuccgugcaca

SEQ ID NO: 42664 - RNA, 19 nt, Artificial Sequence
  Description of Artificial Sequence: Synthetic oligonucleotide
ccaaaucucuuguaagaca

SEQ ID NO: 42665 - RNA, 19 nt, Artificial Sequence
  Description of Artificial Sequence: Synthetic oligonucleotide
ugaccucuaugguuccuuu

SEQ ID NO: 42666 - RNA, 19 nt, Artificial Sequence
  Description of Artificial Sequence: Synthetic oligonucleotide
cuguacccuuuuaagaggu

SEQ ID NO: 42667 - RNA, 19 nt, Artificial Sequence
  Description of Artificial Sequence: Synthetic oligonucleotide
cuuguggauuccuggggaa

SEQ ID NO: 42668 - RNA, 19 nt, Artificial Sequence
  Description of Artificial Sequence: Synthetic oligonucleotide
cuacaggguucuccccacc

SEQ ID NO: 42669 - RNA, 19 nt, Artificial Sequence
  Description of Artificial Sequence: Synthetic oligonucleotide
ggugaauauacugcauuaa

SEQ ID NO: 42670 - RNA, 19 nt, Artificial Sequence
  Description of Artificial Sequence: Synthetic oligonucleotide
auuccauggauuggauuua

SEQ ID NO: 42671 - RNA, 19 nt, Artificial Sequence
  Description of Artificial Sequence: Synthetic oligonucleotide
uggcuguaugguguaaauu

SEQ ID NO: 42672 - RNA, 19 nt, Artificial Sequence
  Description of Artificial Sequence: Synthetic oligonucleotide
aggucccguaucagcacac

SEQ ID NO: 42673 - RNA, 19 nt, Artificial Sequence
  Description of Artificial Sequence: Synthetic oligonucleotide
agcgaggagugaaacuacu

SEQ ID NO: 42674 - RNA, 19 nt, Artificial Sequence
  Description of Artificial Sequence: Synthetic oligonucleotide
gcugauacuaagugaauuu

SEQ ID NO: 42675 - RNA, 19 nt, Artificial Sequence
  Description of Artificial Sequence: Synthetic oligonucleotide
ccgauagcuuuaauccagc

SEQ ID NO: 42676 - RNA, 19 nt, Artificial Sequence
  Description of Artificial Sequence: Synthetic oligonucleotide
guaaggagauguggguguc

SEQ ID NO: 42677 - RNA, 19 nt, Artificial Sequence
  Description of Artificial Sequence: Synthetic oligonucleotide
agcagugcgcaggcaagug

SEQ ID NO: 42678 - RNA, 19 nt, Artificial Sequence
  Description of Artificial Sequence: Synthetic oligonucleotide
caauucuagaggucccgua

SEQ ID NO: 42679 - RNA, 19 nt, Artificial Sequence
  Description of Artificial Sequence: Synthetic oligonucleotide
acccuaaaaccggaggaua

SEQ ID NO: 42680 - RNA, 19 nt, Artificial Sequence
  Description of Artificial Sequence: Synthetic oligonucleotide
gucacguaccauuccauuu

SEQ ID NO: 42681 - RNA, 19 nt, Artificial Sequence
  Description of Artificial Sequence: Synthetic oligonucleotide
guuaagguuggcagugaua

SEQ ID NO: 42682 - RNA, 19 nt, Artificial Sequence
  Description of Artificial Sequence: Synthetic oligonucleotide
guucaacguucuccuugug

SEQ ID NO: 42683 - RNA, 19 nt, Artificial Sequence
  Description of Artificial Sequence: Synthetic oligonucleotide
gauggguagguagcugcaa

SEQ ID NO: 42684 - RNA, 19 nt, Artificial Sequence
  Description of Artificial Sequence: Synthetic oligonucleotide
cugacuguucuugcaacaa

SEQ ID NO: 42685 - RNA, 19 nt, Artificial Sequence
  Description of Artificial Sequence: Synthetic oligonucleotide
gguauuuagcugugguagu

SEQ ID NO: 42686 - RNA, 19 nt, Artificial Sequence
  Description of Artificial Sequence: Synthetic oligonucleotide
augauguaacgcagucgca

SEQ ID NO: 42687 - RNA, 19 nt, Artificial Sequence
  Description of Artificial Sequence: Synthetic oligonucleotide
cugcgcucacucaagucaa

SEQ ID NO: 42688 - RNA, 19 nt, Artificial Sequence
  Description of Artificial Sequence: Synthetic oligonucleotide
ugcgcucacucaagucaau

SEQ ID NO: 42689 - RNA, 19 nt, Artificial Sequence
  Description of Artificial Sequence: Synthetic oligonucleotide
uccuaugcuugaggcuaca

SEQ ID NO: 42690 - RNA, 19 nt, Artificial Sequence
  Description of Artificial Sequence: Synthetic oligonucleotide
gcuaauuacccugcucaga

SEQ ID NO: 42691 - RNA, 19 nt, Artificial Sequence
  Description of Artificial Sequence: Synthetic oligonucleotide
gguagguagcugcaaggua

SEQ ID NO: 42692 - RNA, 19 nt, Artificial Sequence
  Description of Artificial Sequence: Synthetic oligonucleotide
gcuugaccucuaugguucc

SEQ ID NO: 42693 - RNA, 19 nt, Artificial Sequence
  Description of Artificial Sequence: Synthetic oligonucleotide
ccguaucagcacaccacgc

SEQ ID NO: 42694 - RNA, 19 nt, Artificial Sequence
  Description of Artificial Sequence: Synthetic oligonucleotide
gcgaggagugaaacuacug

SEQ ID NO: 42695 - RNA, 19 nt, Artificial Sequence
  Description of Artificial Sequence: Synthetic oligonucleotide
ccuuguggauuccugggga

SEQ ID NO: 42696 - RNA, 19 nt, Artificial Sequence
  Description of Artificial Sequence: Synthetic oligonucleotide
cacccuaccccggguuucc

SEQ ID NO: 42697 - RNA, 19 nt, Artificial Sequence
  Description of Artificial Sequence: Synthetic oligonucleotide
ggcccuauggcacacugau

SEQ ID NO: 42698 - RNA, 19 nt, Artificial Sequence
  Description of Artificial Sequence: Synthetic oligonucleotide
acaagccauugaaaccaaa

SEQ ID NO: 42699 - RNA, 19 nt, Artificial Sequence
  Description of Artificial Sequence: Synthetic oligonucleotide
gaguugaaauugaguccaa

SEQ ID NO: 42700 - RNA, 19 nt, Artificial Sequence
  Description of Artificial Sequence: Synthetic oligonucleotide
ccgcaaaugugggugcugc

SEQ ID NO: 42701 - RNA, 19 nt, Artificial Sequence
  Description of Artificial Sequence: Synthetic oligonucleotide
gugcgcaggcaaguguaac

SEQ ID NO: 42702 - RNA, 19 nt, Artificial Sequence
  Description of Artificial Sequence: Synthetic oligonucleotide
ggcucggggacuggucugg

SEQ ID NO: 42703 - RNA, 19 nt, Artificial Sequence
  Description of Artificial Sequence: Synthetic oligonucleotide
aucguguggcugauacuaa

SEQ ID NO: 42704 - RNA, 19 nt, Artificial Sequence
  Description of Artificial Sequence: Synthetic oligonucleotide
aggcuacagcgacuucgaa

SEQ ID NO: 42705 - RNA, 19 nt, Artificial Sequence
  Description of Artificial Sequence: Synthetic oligonucleotide
gcaauacgaacacgaaaau

SEQ ID NO: 42706 - RNA, 19 nt, Artificial Sequence
  Description of Artificial Sequence: Synthetic oligonucleotide
gugcaaaguuaaaguuaga

SEQ ID NO: 42707 - RNA, 19 nt, Artificial Sequence
  Description of Artificial Sequence: Synthetic oligonucleotide
gcagggucgacuagugaga

SEQ ID NO: 42708 - RNA, 19 nt, Artificial Sequence
  Description of Artificial Sequence: Synthetic oligonucleotide
acccuaagucacguaccau

SEQ ID NO: 42709 - RNA, 19 nt, Artificial Sequence
  Description of Artificial Sequence: Synthetic oligonucleotide
accacgcaggcugaccaua

SEQ ID NO: 42710 - RNA, 19 nt, Artificial Sequence
  Description of Artificial Sequence: Synthetic oligonucleotide
ccuaugcuugaggcuacag

SEQ ID NO: 42711 - RNA, 19 nt, Artificial Sequence
  Description of Artificial Sequence: Synthetic oligonucleotide
cuauagcuaggaucaccau

SEQ ID NO: 42712 - RNA, 19 nt, Artificial Sequence
  Description of Artificial Sequence: Synthetic oligonucleotide
ccauuaguuccaccccauc

SEQ ID NO: 42713 - RNA, 19 nt, Artificial Sequence
  Description of Artificial Sequence: Synthetic oligonucleotide
ccacgcaggcugaccauac

SEQ ID NO: 42714 - RNA, 19 nt, Artificial Sequence
  Description of Artificial Sequence: Synthetic oligonucleotide
ggucccguaucagcacacc

SEQ ID NO: 42715 - RNA, 19 nt, Artificial Sequence
  Description of Artificial Sequence: Synthetic oligonucleotide
guccuauagcuaggaucac

SEQ ID NO: 42716 - RNA, 19 nt, Artificial Sequence
  Description of Artificial Sequence: Synthetic oligonucleotide
cuccugcugguuacaauau

SEQ ID NO: 42717 - RNA, 19 nt, Artificial Sequence
  Description of Artificial Sequence: Synthetic oligonucleotide
ggcgaguugguccacuguu

SEQ ID NO: 42718 - RNA, 19 nt, Artificial Sequence
  Description of Artificial Sequence: Synthetic oligonucleotide
ggcugauacuaagugaauu

SEQ ID NO: 42719 - RNA, 19 nt, Artificial Sequence
  Description of Artificial Sequence: Synthetic oligonucleotide
aggcccuauggcacacuga

SEQ ID NO: 42720 - RNA, 19 nt, Artificial Sequence
  Description of Artificial Sequence: Synthetic oligonucleotide
cagguuccaugaagcagcu

SEQ ID NO: 42721 - RNA, 19 nt, Artificial Sequence
  Description of Artificial Sequence: Synthetic oligonucleotide
caggcaaguacgugucaau

SEQ ID NO: 42722 - RNA, 19 nt, Artificial Sequence
  Description of Artificial Sequence: Synthetic oligonucleotide
acguuucuugccaccuguu

SEQ ID NO: 42723 - RNA, 19 nt, Artificial Sequence
  Description of Artificial Sequence: Synthetic oligonucleotide
acuuugcagguaagauguu

SEQ ID NO: 42724 - RNA, 19 nt, Artificial Sequence
  Description of Artificial Sequence: Synthetic oligonucleotide
gccucugcuagguauucau

SEQ ID NO: 42725 - RNA, 19 nt, Artificial Sequence
  Description of Artificial Sequence: Synthetic oligonucleotide
guaagacacuuuacaucau

SEQ ID NO: 42726 - RNA, 19 nt, Artificial Sequence
  Description of Artificial Sequence: Synthetic oligonucleotide
cccuaagucacguaccauu

SEQ ID NO: 42727 - RNA, 19 nt, Artificial Sequence
  Description of Artificial Sequence: Synthetic oligonucleotide
ccgaugggaagggaaguca

SEQ ID NO: 42728 - RNA, 19 nt, Artificial Sequence
  Description of Artificial Sequence: Synthetic oligonucleotide
cucuucggacacugugagu

SEQ ID NO: 42729 - RNA, 19 nt, Artificial Sequence
  Description of Artificial Sequence: Synthetic oligonucleotide
gcagugcgcaggcaagugu

SEQ ID NO: 42730 - RNA, 19 nt, Artificial Sequence
  Description of Artificial Sequence: Synthetic oligonucleotide
ccaggcaaguacgugucaa

SEQ ID NO: 42731 - RNA, 19 nt, Artificial Sequence
  Description of Artificial Sequence: Synthetic oligonucleotide
accggaggauaggguugcu

SEQ ID NO: 42732 - RNA, 19 nt, Artificial Sequence
  Description of Artificial Sequence: Synthetic oligonucleotide
cuugaccucuaugguuccu

SEQ ID NO: 42733 - RNA, 19 nt, Artificial Sequence
  Description of Artificial Sequence: Synthetic oligonucleotide
cacgcaggcugaccauacu

SEQ ID NO: 42734 - RNA, 19 nt, Artificial Sequence
  Description of Artificial Sequence: Synthetic oligonucleotide
ccgccacaagccauugaaa

SEQ ID NO: 42735 - RNA, 19 nt, Artificial Sequence
  Description of Artificial Sequence: Synthetic oligonucleotide
cagaaccgauagcuuuaau

SEQ ID NO: 42736 - RNA, 19 nt, Artificial Sequence
  Description of Artificial Sequence: Synthetic oligonucleotide
gcccuauggcacacugauc

SEQ ID NO: 42737 - RNA, 19 nt, Artificial Sequence
  Description of Artificial Sequence: Synthetic oligonucleotide
cgacuagugagaagcccua

SEQ ID NO: 42738 - RNA, 19 nt, Artificial Sequence
  Description of Artificial Sequence: Synthetic oligonucleotide
cuaccccggguuuccuuuu

SEQ ID NO: 42739 - RNA, 19 nt, Artificial Sequence
  Description of Artificial Sequence: Synthetic oligonucleotide
ccuaccccggguuuccuuu

SEQ ID NO: 42740 - RNA, 19 nt, Artificial Sequence
  Description of Artificial Sequence: Synthetic oligonucleotide
ggccuacagauggguaggu

SEQ ID NO: 42741 - RNA, 19 nt, Artificial Sequence
  Description of Artificial Sequence: Synthetic oligonucleotide
cagcgacuucgaaccucuu

SEQ ID NO: 42742 - RNA, 19 nt, Artificial Sequence
  Description of Artificial Sequence: Synthetic oligonucleotide
cccuaccccggguuuccuu

SEQ ID NO: 42743 - RNA, 19 nt, Artificial Sequence
  Description of Artificial Sequence: Synthetic oligonucleotide
auagcugaaauauugacug

SEQ ID NO: 42744 - RNA, 19 nt, Artificial Sequence
  Description of Artificial Sequence: Synthetic oligonucleotide
acguauaacagcuaguuuc

SEQ ID NO: 42745 - RNA, 19 nt, Artificial Sequence
  Description of Artificial Sequence: Synthetic oligonucleotide
aaaucuguaucacuuaucu

SEQ ID NO: 42746 - RNA, 19 nt, Artificial Sequence
  Description of Artificial Sequence: Synthetic oligonucleotide
uugagauugauccggaggg

SEQ ID NO: 42747 - RNA, 19 nt, Artificial Sequence
  Description of Artificial Sequence: Synthetic oligonucleotide
aacuaugucaguuacagua

SEQ ID NO: 42748 - RNA, 19 nt, Artificial Sequence
  Description of Artificial Sequence: Synthetic oligonucleotide
agaacuuucguaguggucc

SEQ ID NO: 42749 - RNA, 19 nt, Artificial Sequence
  Description of Artificial Sequence: Synthetic oligonucleotide
aaaggacuaacaugaacac

SEQ ID NO: 42750 - RNA, 19 nt, Artificial Sequence
  Description of Artificial Sequence: Synthetic oligonucleotide
uaaaucuuaguaaugaaau

SEQ ID NO: 42751 - RNA, 19 nt, Artificial Sequence
  Description of Artificial Sequence: Synthetic oligonucleotide
aguaauaugguccuccuug

SEQ ID NO: 42752 - RNA, 19 nt, Artificial Sequence
  Description of Artificial Sequence: Synthetic oligonucleotide
acuaacuguacuuucaucu

SEQ ID NO: 42753 - RNA, 19 nt, Artificial Sequence
  Description of Artificial Sequence: Synthetic oligonucleotide
uuaaaucuuaguaaugaaa

SEQ ID NO: 42754 - RNA, 19 nt, Artificial Sequence
  Description of Artificial Sequence: Synthetic oligonucleotide
gauaaugacggagaagagg

SEQ ID NO: 42755 - RNA, 19 nt, Artificial Sequence
  Description of Artificial Sequence: Synthetic oligonucleotide
aacacucagaaccaugucu

SEQ ID NO: 42756 - RNA, 19 nt, Artificial Sequence
  Description of Artificial Sequence: Synthetic oligonucleotide
acuauuuuggucuccuggg

SEQ ID NO: 42757 - RNA, 19 nt, Artificial Sequence
  Description of Artificial Sequence: Synthetic oligonucleotide
aacauuguggaaccaaaca

SEQ ID NO: 42758 - RNA, 19 nt, Artificial Sequence
  Description of Artificial Sequence: Synthetic oligonucleotide
aguacauacggcugcaggg

SEQ ID NO: 42759 - RNA, 19 nt, Artificial Sequence
  Description of Artificial Sequence: Synthetic oligonucleotide
uuaguucuccucuacauga

SEQ ID NO: 42760 - RNA, 19 nt, Artificial Sequence
  Description of Artificial Sequence: Synthetic oligonucleotide
gagcgaaacaucuucaggc

SEQ ID NO: 42761 - RNA, 19 nt, Artificial Sequence
  Description of Artificial Sequence: Synthetic oligonucleotide
aaccuuguaucuuggauug

SEQ ID NO: 42762 - RNA, 19 nt, Artificial Sequence
  Description of Artificial Sequence: Synthetic oligonucleotide
cauaucaugagcuccuugc

SEQ ID NO: 42763 - RNA, 19 nt, Artificial Sequence
  Description of Artificial Sequence: Synthetic oligonucleotide
ugcaauugaauguuggcug

SEQ ID NO: 42764 - RNA, 19 nt, Artificial Sequence
  Description of Artificial Sequence: Synthetic oligonucleotide
uggcuuuccgauaaaacag

SEQ ID NO: 42765 - RNA, 19 nt, Artificial Sequence
  Description of Artificial Sequence: Synthetic oligonucleotide
uccagcuagauauuggaag

SEQ ID NO: 42766 - RNA, 19 nt, Artificial Sequence
  Description of Artificial Sequence: Synthetic oligonucleotide
cagcaaaugacauggaacc

SEQ ID NO: 42767 - RNA, 19 nt, Artificial Sequence
  Description of Artificial Sequence: Synthetic oligonucleotide
uguaagaacuuucguagug

SEQ ID NO: 42768 - RNA, 19 nt, Artificial Sequence
  Description of Artificial Sequence: Synthetic oligonucleotide
aagcaacuaugucaguuac

SEQ ID NO: 42769 - RNA, 19 nt, Artificial Sequence
  Description of Artificial Sequence: Synthetic oligonucleotide
agaaacgguagugaggacc

SEQ ID NO: 42770 - RNA, 19 nt, Artificial Sequence
  Description of Artificial Sequence: Synthetic oligonucleotide
agauucuuaaugccaauag

SEQ ID NO: 42771 - RNA, 19 nt, Artificial Sequence
  Description of Artificial Sequence: Synthetic oligonucleotide
auaacagcuaguuuccuug

SEQ ID NO: 42772 - RNA, 19 nt, Artificial Sequence
  Description of Artificial Sequence: Synthetic oligonucleotide
uuagcuaguuaccugugcc

SEQ ID NO: 42773 - RNA, 19 nt, Artificial Sequence
  Description of Artificial Sequence: Synthetic oligonucleotide
gauaguguauuaguuacag

SEQ ID NO: 42774 - RNA, 19 nt, Artificial Sequence
  Description of Artificial Sequence: Synthetic oligonucleotide
uuaaauuggugaauucucu

SEQ ID NO: 42775 - RNA, 19 nt, Artificial Sequence
  Description of Artificial Sequence: Synthetic oligonucleotide
cugaaauauugacugacgg

SEQ ID NO: 42776 - RNA, 19 nt, Artificial Sequence
  Description of Artificial Sequence: Synthetic oligonucleotide
aauauugacugacggagau

SEQ ID NO: 42777 - RNA, 19 nt, Artificial Sequence
  Description of Artificial Sequence: Synthetic oligonucleotide
uuggaaaucagaugaggcc

SEQ ID NO: 42778 - RNA, 19 nt, Artificial Sequence
  Description of Artificial Sequence: Synthetic oligonucleotide
uauuuugauaguguauuag

SEQ ID NO: 42779 - RNA, 19 nt, Artificial Sequence
  Description of Artificial Sequence: Synthetic oligonucleotide
aguguauuaguuacagugc

SEQ ID NO: 42780 - RNA, 19 nt, Artificial Sequence
  Description of Artificial Sequence: Synthetic oligonucleotide
ugaaauauugacugacgga

SEQ ID NO: 42781 - RNA, 19 nt, Artificial Sequence
  Description of Artificial Sequence: Synthetic oligonucleotide
auuuugauaguguauuagu

SEQ ID NO: 42782 - RNA, 19 nt, Artificial Sequence
  Description of Artificial Sequence: Synthetic oligonucleotide
uuagguaacagauacuauu

SEQ ID NO: 42783 - RNA, 19 nt, Artificial Sequence
  Description of Artificial Sequence: Synthetic oligonucleotide
uucuaaaccagacacguuu

SEQ ID NO: 42784 - RNA, 19 nt, Artificial Sequence
  Description of Artificial Sequence: Synthetic oligonucleotide
aucgccaggguguaggccc

SEQ ID NO: 42785 - RNA, 19 nt, Artificial Sequence
  Description of Artificial Sequence: Synthetic oligonucleotide
aaggacuaacaugaacacc

SEQ ID NO: 42786 - RNA, 19 nt, Artificial Sequence
  Description of Artificial Sequence: Synthetic oligonucleotide
uggugaauucucuaggggc

SEQ ID NO: 42787 - RNA, 19 nt, Artificial Sequence
  Description of Artificial Sequence: Synthetic oligonucleotide
agagcauaucaugagcucc

SEQ ID NO: 42788 - RNA, 19 nt, Artificial Sequence
  Description of Artificial Sequence: Synthetic oligonucleotide
aauccaacgucuuaugaua

SEQ ID NO: 42789 - RNA, 19 nt, Artificial Sequence
  Description of Artificial Sequence: Synthetic oligonucleotide
aaccuuuagucuuuaauuu

SEQ ID NO: 42790 - RNA, 19 nt, Artificial Sequence
  Description of Artificial Sequence: Synthetic oligonucleotide
ucuaaaggucacuagucca

SEQ ID NO: 42791 - RNA, 19 nt, Artificial Sequence
  Description of Artificial Sequence: Synthetic oligonucleotide
auaaugacggagaagaggu

SEQ ID NO: 42792 - RNA, 19 nt, Artificial Sequence
  Description of Artificial Sequence: Synthetic oligonucleotide
gcuguaagaacuuucguag

SEQ ID NO: 42793 - RNA, 19 nt, Artificial Sequence
  Description of Artificial Sequence: Synthetic oligonucleotide
aaauuaaaucuuaguaaug

SEQ ID NO: 42794 - RNA, 19 nt, Artificial Sequence
  Description of Artificial Sequence: Synthetic oligonucleotide
uacaugaaggcauguaaga

SEQ ID NO: 42795 - RNA, 19 nt, Artificial Sequence
  Description of Artificial Sequence: Synthetic oligonucleotide
cuacaugaaggcauguaag

SEQ ID NO: 42796 - RNA, 19 nt, Artificial Sequence
  Description of Artificial Sequence: Synthetic oligonucleotide
acuaauguggccucuucug

SEQ ID NO: 42797 - RNA, 19 nt, Artificial Sequence
  Description of Artificial Sequence: Synthetic oligonucleotide
agacuaagucaguucaggg

SEQ ID NO: 42798 - RNA, 19 nt, Artificial Sequence
  Description of Artificial Sequence: Synthetic oligonucleotide
auacauauauucuguguca

SEQ ID NO: 42799 - RNA, 19 nt, Artificial Sequence
  Description of Artificial Sequence: Synthetic oligonucleotide
uauguagaaucuguucccg

SEQ ID NO: 42800 - RNA, 19 nt, Artificial Sequence
  Description of Artificial Sequence: Synthetic oligonucleotide
aggacuaacaugaacaccu

SEQ ID NO: 42801 - RNA, 19 nt, Artificial Sequence
  Description of Artificial Sequence: Synthetic oligonucleotide
uagacuaagucaguucagg

SEQ ID NO: 42802 - RNA, 19 nt, Artificial Sequence
  Description of Artificial Sequence: Synthetic oligonucleotide
cuuagacuaagucaguuca

SEQ ID NO: 42803 - RNA, 19 nt, Artificial Sequence
  Description of Artificial Sequence: Synthetic oligonucleotide
aaaaucgaaauuaaaucuu

SEQ ID NO: 42804 - RNA, 19 nt, Artificial Sequence
  Description of Artificial Sequence: Synthetic oligonucleotide
uacagguugucacagucga

SEQ ID NO: 42805 - RNA, 19 nt, Artificial Sequence
  Description of Artificial Sequence: Synthetic oligonucleotide
uggucuaaaggucacuagu

SEQ ID NO: 42806 - RNA, 19 nt, Artificial Sequence
  Description of Artificial Sequence: Synthetic oligonucleotide
uuagacuaagucaguucag

SEQ ID NO: 42807 - RNA, 19 nt, Artificial Sequence
  Description of Artificial Sequence: Synthetic oligonucleotide
uguguagcuacaaggacau

SEQ ID NO: 42808 - RNA, 19 nt, Artificial Sequence
  Description of Artificial Sequence: Synthetic oligonucleotide
caaaaucgaaauuaaaucu

SEQ ID NO: 42809 - RNA, 19 nt, Artificial Sequence
  Description of Artificial Sequence: Synthetic oligonucleotide
ugcuaccuugagaagaggc

SEQ ID NO: 42810 - RNA, 19 nt, Artificial Sequence
  Description of Artificial Sequence: Synthetic oligonucleotide
gcugaugagaaacugagac

SEQ ID NO: 42811 - RNA, 19 nt, Artificial Sequence
  Description of Artificial Sequence: Synthetic oligonucleotide
aguacaucgcugcucugcg

SEQ ID NO: 42812 - RNA, 19 nt, Artificial Sequence
  Description of Artificial Sequence: Synthetic oligonucleotide
guaagaacuuucguagugg

SEQ ID NO: 42813 - RNA, 19 nt, Artificial Sequence
  Description of Artificial Sequence: Synthetic oligonucleotide
uccaagauaucccuguuuu

SEQ ID NO: 42814 - RNA, 19 nt, Artificial Sequence
  Description of Artificial Sequence: Synthetic oligonucleotide
acuccaccaacccucuacc

SEQ ID NO: 42815 - RNA, 19 nt, Artificial Sequence
  Description of Artificial Sequence: Synthetic oligonucleotide
uccacaucucccaaguaga

SEQ ID NO: 42816 - RNA, 19 nt, Artificial Sequence
  Description of Artificial Sequence: Synthetic oligonucleotide
uguagaaucuguucccggu

SEQ ID NO: 42817 - RNA, 19 nt, Artificial Sequence
  Description of Artificial Sequence: Synthetic oligonucleotide
aggguaccaaaccugcugg

SEQ ID NO: 42818 - RNA, 19 nt, Artificial Sequence
  Description of Artificial Sequence: Synthetic oligonucleotide
uagcuaguuaccugugccg

SEQ ID NO: 42819 - RNA, 19 nt, Artificial Sequence
  Description of Artificial Sequence: Synthetic oligonucleotide
guagcguucacauuucaca

SEQ ID NO: 42820 - RNA, 19 nt, Artificial Sequence
  Description of Artificial Sequence: Synthetic oligonucleotide
ugguauauucucugaauuc

SEQ ID NO: 42821 - RNA, 19 nt, Artificial Sequence
  Description of Artificial Sequence: Synthetic oligonucleotide
uguugugcuaggcuugugu

SEQ ID NO: 42822 - RNA, 19 nt, Artificial Sequence
  Description of Artificial Sequence: Synthetic oligonucleotide
gguaaaacgguuccucagg

SEQ ID NO: 42823 - RNA, 19 nt, Artificial Sequence
  Description of Artificial Sequence: Synthetic oligonucleotide
gaaacgguagugaggaccc

SEQ ID NO: 42824 - RNA, 19 nt, Artificial Sequence
  Description of Artificial Sequence: Synthetic oligonucleotide
ucuuagacuaagucaguuc

SEQ ID NO: 42825 - RNA, 19 nt, Artificial Sequence
  Description of Artificial Sequence: Synthetic oligonucleotide
agcuuacgcaguuuggcag

SEQ ID NO: 42826 - RNA, 19 nt, Artificial Sequence
  Description of Artificial Sequence: Synthetic oligonucleotide
ucaggagacuaacuguacu

SEQ ID NO: 42827 - RNA, 19 nt, Artificial Sequence
  Description of Artificial Sequence: Synthetic oligonucleotide
gguaaugaccuccauagca

SEQ ID NO: 42828 - RNA, 19 nt, Artificial Sequence
  Description of Artificial Sequence: Synthetic oligonucleotide
aggugguaggcacaguguc

SEQ ID NO: 42829 - RNA, 19 nt, Artificial Sequence
  Description of Artificial Sequence: Synthetic oligonucleotide
acggagaucuccuaaaguu

SEQ ID NO: 42830 - RNA, 19 nt, Artificial Sequence
  Description of Artificial Sequence: Synthetic oligonucleotide
ugauaguguauuaguuaca

SEQ ID NO: 42831 - RNA, 19 nt, Artificial Sequence
  Description of Artificial Sequence: Synthetic oligonucleotide
uugacugcuacugucagau

SEQ ID NO: 42832 - RNA, 19 nt, Artificial Sequence
  Description of Artificial Sequence: Synthetic oligonucleotide
uaaaacgguuccucaggag

SEQ ID NO: 42833 - RNA, 19 nt, Artificial Sequence
  Description of Artificial Sequence: Synthetic oligonucleotide
auuguuugcagagucacau

SEQ ID NO: 42834 - RNA, 19 nt, Artificial Sequence
  Description of Artificial Sequence: Synthetic oligonucleotide
guaauaugguccuccuugc

SEQ ID NO: 42835 - RNA, 19 nt, Artificial Sequence
  Description of Artificial Sequence: Synthetic oligonucleotide
uaagcaacuaugucaguua

SEQ ID NO: 42836 - RNA, 19 nt, Artificial Sequence
  Description of Artificial Sequence: Synthetic oligonucleotide
ucccaaacauuguggaacc

SEQ ID NO: 42837 - RNA, 19 nt, Artificial Sequence
  Description of Artificial Sequence: Synthetic oligonucleotide
acacucagaaccaugucuc

SEQ ID NO: 42838 - RNA, 19 nt, Artificial Sequence
  Description of Artificial Sequence: Synthetic oligonucleotide
auaucaaaccaguggggca

SEQ ID NO: 42839 - RNA, 19 nt, Artificial Sequence
  Description of Artificial Sequence: Synthetic oligonucleotide
uguagcguucacauuucac

SEQ ID NO: 42840 - RNA, 19 nt, Artificial Sequence
  Description of Artificial Sequence: Synthetic oligonucleotide
ugcugucuuagacuaaguc

SEQ ID NO: 42841 - RNA, 19 nt, Artificial Sequence
  Description of Artificial Sequence: Synthetic oligonucleotide
uuaaccagccggucacagg

SEQ ID NO: 42842 - RNA, 19 nt, Artificial Sequence
  Description of Artificial Sequence: Synthetic oligonucleotide
agcuguaagaacuuucgua

SEQ ID NO: 42843 - RNA, 19 nt, Artificial Sequence
  Description of Artificial Sequence: Synthetic oligonucleotide
cuuucguagugguccaugc

SEQ ID NO: 42844 - RNA, 19 nt, Artificial Sequence
  Description of Artificial Sequence: Synthetic oligonucleotide
ucucuuagcuaguuaccug

SEQ ID NO: 42845 - RNA, 19 nt, Artificial Sequence
  Description of Artificial Sequence: Synthetic oligonucleotide
uaguuaccugugccgaccg

SEQ ID NO: 42846 - RNA, 19 nt, Artificial Sequence
  Description of Artificial Sequence: Synthetic oligonucleotide
ugacucuggcaaaugggug

SEQ ID NO: 42847 - RNA, 19 nt, Artificial Sequence
  Description of Artificial Sequence: Synthetic oligonucleotide
uggccuuugacuucaguuc

SEQ ID NO: 42848 - RNA, 19 nt, Artificial Sequence
  Description of Artificial Sequence: Synthetic oligonucleotide
guguauuaguuacagugca

SEQ ID NO: 42849 - RNA, 19 nt, Artificial Sequence
  Description of Artificial Sequence: Synthetic oligonucleotide
aagaaacgguagugaggac

SEQ ID NO: 42850 - RNA, 19 nt, Artificial Sequence
  Description of Artificial Sequence: Synthetic oligonucleotide
guggucccgauucucauag

SEQ ID NO: 42851 - RNA, 19 nt, Artificial Sequence
  Description of Artificial Sequence: Synthetic oligonucleotide
cuuagcuaguuaccugugc

SEQ ID NO: 42852 - RNA, 19 nt, Artificial Sequence
  Description of Artificial Sequence: Synthetic oligonucleotide
aggguguaggcccucucac

SEQ ID NO: 42853 - RNA, 19 nt, Artificial Sequence
  Description of Artificial Sequence: Synthetic oligonucleotide
aacguauaacagcuaguuu

SEQ ID NO: 42854 - RNA, 19 nt, Artificial Sequence
  Description of Artificial Sequence: Synthetic oligonucleotide
auaucaugagcuccuugcu

SEQ ID NO: 42855 - RNA, 19 nt, Artificial Sequence
  Description of Artificial Sequence: Synthetic oligonucleotide
ucgaggguaugguagacau

SEQ ID NO: 42856 - RNA, 19 nt, Artificial Sequence
  Description of Artificial Sequence: Synthetic oligonucleotide
gggaacguauaacagcuag

SEQ ID NO: 42857 - RNA, 19 nt, Artificial Sequence
  Description of Artificial Sequence: Synthetic oligonucleotide
aagaacuuucguagugguc

SEQ ID NO: 42858 - RNA, 19 nt, Artificial Sequence
  Description of Artificial Sequence: Synthetic oligonucleotide
auacugacuauuugacaca

SEQ ID NO: 42859 - RNA, 19 nt, Artificial Sequence
  Description of Artificial Sequence: Synthetic oligonucleotide
aaauauugacugacggaga

SEQ ID NO: 42860 - RNA, 19 nt, Artificial Sequence
  Description of Artificial Sequence: Synthetic oligonucleotide
ucacagucgaaaacuuccu

SEQ ID NO: 42861 - RNA, 19 nt, Artificial Sequence
  Description of Artificial Sequence: Synthetic oligonucleotide
guacauacggcugcagggg

SEQ ID NO: 42862 - RNA, 19 nt, Artificial Sequence
  Description of Artificial Sequence: Synthetic oligonucleotide
uggguaaaacgguuccuca

SEQ ID NO: 42863 - RNA, 19 nt, Artificial Sequence
  Description of Artificial Sequence: Synthetic oligonucleotide
ucuaaaccagacacguuuu

SEQ ID NO: 42864 - RNA, 19 nt, Artificial Sequence
  Description of Artificial Sequence: Synthetic oligonucleotide
gauucuuaaugccaauagu

SEQ ID NO: 42865 - RNA, 19 nt, Artificial Sequence
  Description of Artificial Sequence: Synthetic oligonucleotide
ugagauugauccggagggg

SEQ ID NO: 42866 - RNA, 19 nt, Artificial Sequence
  Description of Artificial Sequence: Synthetic oligonucleotide
gcugucuuagacuaaguca

SEQ ID NO: 42867 - RNA, 19 nt, Artificial Sequence
  Description of Artificial Sequence: Synthetic oligonucleotide
aacccucuaccccauucca

SEQ ID NO: 42868 - RNA, 19 nt, Artificial Sequence
  Description of Artificial Sequence: Synthetic oligonucleotide
aaaggucacuaguccaaau

SEQ ID NO: 42869 - RNA, 19 nt, Artificial Sequence
  Description of Artificial Sequence: Synthetic oligonucleotide
uccugcaauaagauuguuu

SEQ ID NO: 42870 - RNA, 19 nt, Artificial Sequence
  Description of Artificial Sequence: Synthetic oligonucleotide
uucgugaagcaaguguaug

SEQ ID NO: 42871 - RNA, 19 nt, Artificial Sequence
  Description of Artificial Sequence: Synthetic oligonucleotide
cuggugcuaucacuuaacc

SEQ ID NO: 42872 - RNA, 19 nt, Artificial Sequence
  Description of Artificial Sequence: Synthetic oligonucleotide
guaaaacgguuccucagga

SEQ ID NO: 42873 - RNA, 19 nt, Artificial Sequence
  Description of Artificial Sequence: Synthetic oligonucleotide
ugguaaugaccuccauagc

SEQ ID NO: 42874 - RNA, 19 nt, Artificial Sequence
  Description of Artificial Sequence: Synthetic oligonucleotide
aucaauggaucaucauccu

SEQ ID NO: 42875 - RNA, 19 nt, Artificial Sequence
  Description of Artificial Sequence: Synthetic oligonucleotide
aucucuuagcuaguuaccu

SEQ ID NO: 42876 - RNA, 19 nt, Artificial Sequence
  Description of Artificial Sequence: Synthetic oligonucleotide
cuaaaggucacuaguccaa

SEQ ID NO: 42877 - RNA, 19 nt, Artificial Sequence
  Description of Artificial Sequence: Synthetic oligonucleotide
guacagguugucacagucg

SEQ ID NO: 42878 - RNA, 19 nt, Artificial Sequence
  Description of Artificial Sequence: Synthetic oligonucleotide
ugggauaaugacggagaag

SEQ ID NO: 42879 - RNA, 19 nt, Artificial Sequence
  Description of Artificial Sequence: Synthetic oligonucleotide
cuaucugccuauagcccag

SEQ ID NO: 42880 - RNA, 19 nt, Artificial Sequence
  Description of Artificial Sequence: Synthetic oligonucleotide
uucaagaagcccggaggag

SEQ ID NO: 42881 - RNA, 19 nt, Artificial Sequence
  Description of Artificial Sequence: Synthetic oligonucleotide
gucaguuacaguacaagaa

SEQ ID NO: 42882 - RNA, 19 nt, Artificial Sequence
  Description of Artificial Sequence: Synthetic oligonucleotide
auauugacugacggagauc

SEQ ID NO: 42883 - RNA, 19 nt, Artificial Sequence
  Description of Artificial Sequence: Synthetic oligonucleotide
aauugaauguuggcugcau

SEQ ID NO: 42884 - RNA, 19 nt, Artificial Sequence
  Description of Artificial Sequence: Synthetic oligonucleotide
agacuguuaucaucacugu

SEQ ID NO: 42885 - RNA, 19 nt, Artificial Sequence
  Description of Artificial Sequence: Synthetic oligonucleotide
caacccucuaccccauucc

SEQ ID NO: 42886 - RNA, 19 nt, Artificial Sequence
  Description of Artificial Sequence: Synthetic oligonucleotide
ugcuaggcuugugugaugu

SEQ ID NO: 42887 - RNA, 19 nt, Artificial Sequence
  Description of Artificial Sequence: Synthetic oligonucleotide
uccacuuaaauuggugaau

SEQ ID NO: 42888 - RNA, 19 nt, Artificial Sequence
  Description of Artificial Sequence: Synthetic oligonucleotide
gaaccuuguaucuuggauu

SEQ ID NO: 42889 - RNA, 19 nt, Artificial Sequence
  Description of Artificial Sequence: Synthetic oligonucleotide
uaacagcuaguuuccuugu

SEQ ID NO: 42890 - RNA, 19 nt, Artificial Sequence
  Description of Artificial Sequence: Synthetic oligonucleotide
gacggagaagaggucauac

SEQ ID NO: 42891 - RNA, 19 nt, Artificial Sequence
  Description of Artificial Sequence: Synthetic oligonucleotide
cauuguggaaccaaacacu

SEQ ID NO: 42892 - RNA, 19 nt, Artificial Sequence
  Description of Artificial Sequence: Synthetic oligonucleotide
acugacggagaucuccuaa

SEQ ID NO: 42893 - RNA, 19 nt, Artificial Sequence
  Description of Artificial Sequence: Synthetic oligonucleotide
gaagagcgaaacaucuuca

SEQ ID NO: 42894 - RNA, 19 nt, Artificial Sequence
  Description of Artificial Sequence: Synthetic oligonucleotide
uccgauaaaacagcaugua

SEQ ID NO: 42895 - RNA, 19 nt, Artificial Sequence
  Description of Artificial Sequence: Synthetic oligonucleotide
uggcacacgcuuugcaaca

SEQ ID NO: 42896 - RNA, 19 nt, Artificial Sequence
  Description of Artificial Sequence: Synthetic oligonucleotide
uacaagaaacaguggccau

SEQ ID NO: 42897 - RNA, 19 nt, Artificial Sequence
  Description of Artificial Sequence: Synthetic oligonucleotide
gcaacguggauggacagag

SEQ ID NO: 42898 - RNA, 19 nt, Artificial Sequence
  Description of Artificial Sequence: Synthetic oligonucleotide
cuaauguggccucuucuga

SEQ ID NO: 42899 - RNA, 19 nt, Artificial Sequence
  Description of Artificial Sequence: Synthetic oligonucleotide
aacagcuaguuuccuugua

SEQ ID NO: 42900 - RNA, 19 nt, Artificial Sequence
  Description of Artificial Sequence: Synthetic oligonucleotide
agcuagauauuggaagcca

SEQ ID NO: 42901 - RNA, 19 nt, Artificial Sequence
  Description of Artificial Sequence: Synthetic oligonucleotide
ugggcaacagacuguuauc

SEQ ID NO: 42902 - RNA, 19 nt, Artificial Sequence
  Description of Artificial Sequence: Synthetic oligonucleotide
gguuagguaacagauacua

SEQ ID NO: 42903 - RNA, 19 nt, Artificial Sequence
  Description of Artificial Sequence: Synthetic oligonucleotide
gaacuuucguaguggucca

SEQ ID NO: 42904 - RNA, 19 nt, Artificial Sequence
  Description of Artificial Sequence: Synthetic oligonucleotide
cguggauggacagagaagc

SEQ ID NO: 42905 - RNA, 19 nt, Artificial Sequence
  Description of Artificial Sequence: Synthetic oligonucleotide
uaaugacggagaagagguc

SEQ ID NO: 42906 - RNA, 19 nt, Artificial Sequence
  Description of Artificial Sequence: Synthetic oligonucleotide
uaguucuccucuacaugaa

SEQ ID NO: 42907 - RNA, 19 nt, Artificial Sequence
  Description of Artificial Sequence: Synthetic oligonucleotide
cagcuagauauuggaagcc

SEQ ID NO: 42908 - RNA, 19 nt, Artificial Sequence
  Description of Artificial Sequence: Synthetic oligonucleotide
gaacguauaacagcuaguu

SEQ ID NO: 42909 - RNA, 19 nt, Artificial Sequence
  Description of Artificial Sequence: Synthetic oligonucleotide
agcuaguuaccugugccga

SEQ ID NO: 42910 - RNA, 19 nt, Artificial Sequence
  Description of Artificial Sequence: Synthetic oligonucleotide
gcuaucacuuaacccuggg

SEQ ID NO: 42911 - RNA, 19 nt, Artificial Sequence
  Description of Artificial Sequence: Synthetic oligonucleotide
ucagugcgcaagagucugc

SEQ ID NO: 42912 - RNA, 19 nt, Artificial Sequence
  Description of Artificial Sequence: Synthetic oligonucleotide
cucuuagcuaguuaccugu

SEQ ID NO: 42913 - RNA, 19 nt, Artificial Sequence
  Description of Artificial Sequence: Synthetic oligonucleotide
agcaaaugacauggaaccu

SEQ ID NO: 42914 - RNA, 19 nt, Artificial Sequence
  Description of Artificial Sequence: Synthetic oligonucleotide
acuuucguagugguccaug

SEQ ID NO: 42915 - RNA, 19 nt, Artificial Sequence
  Description of Artificial Sequence: Synthetic oligonucleotide
uggcaacguggauggacag

SEQ ID NO: 42916 - RNA, 19 nt, Artificial Sequence
  Description of Artificial Sequence: Synthetic oligonucleotide
ugcguagcuguguccucag

SEQ ID NO: 42917 - RNA, 19 nt, Artificial Sequence
  Description of Artificial Sequence: Synthetic oligonucleotide
cccacauacucucuguuug

SEQ ID NO: 42918 - RNA, 19 nt, Artificial Sequence
  Description of Artificial Sequence: Synthetic oligonucleotide
cagaugcuaccuugagaag

SEQ ID NO: 42919 - RNA, 19 nt, Artificial Sequence
  Description of Artificial Sequence: Synthetic oligonucleotide
accaaacacuaucugccua

SEQ ID NO: 42920 - RNA, 19 nt, Artificial Sequence
  Description of Artificial Sequence: Synthetic oligonucleotide
aacgguuccucaggagacu

SEQ ID NO: 42921 - RNA, 19 nt, Artificial Sequence
  Description of Artificial Sequence: Synthetic oligonucleotide
ugguggggcgguucuaccu

SEQ ID NO: 42922 - RNA, 19 nt, Artificial Sequence
  Description of Artificial Sequence: Synthetic oligonucleotide
ucucucuaccuuaguucuc

SEQ ID NO: 42923 - RNA, 19 nt, Artificial Sequence
  Description of Artificial Sequence: Synthetic oligonucleotide
gugccgaccgggaagggag

SEQ ID NO: 42924 - RNA, 19 nt, Artificial Sequence
  Description of Artificial Sequence: Synthetic oligonucleotide
ggaggggaacguauaacag

SEQ ID NO: 42925 - RNA, 19 nt, Artificial Sequence
  Description of Artificial Sequence: Synthetic oligonucleotide
aucuuucaaguaauauggu

SEQ ID NO: 42926 - RNA, 19 nt, Artificial Sequence
  Description of Artificial Sequence: Synthetic oligonucleotide
acggagaacuucucggcuu

SEQ ID NO: 42927 - RNA, 19 nt, Artificial Sequence
  Description of Artificial Sequence: Synthetic oligonucleotide
agugggcauuccugcacug

SEQ ID NO: 42928 - RNA, 19 nt, Artificial Sequence
  Description of Artificial Sequence: Synthetic oligonucleotide
cauuuuccgcaagugccac

SEQ ID NO: 42929 - RNA, 19 nt, Artificial Sequence
  Description of Artificial Sequence: Synthetic oligonucleotide
gacggagaucuccuaaagu

SEQ ID NO: 42930 - RNA, 19 nt, Artificial Sequence
  Description of Artificial Sequence: Synthetic oligonucleotide
ggcuuuccgauaaaacagc

SEQ ID NO: 42931 - RNA, 19 nt, Artificial Sequence
  Description of Artificial Sequence: Synthetic oligonucleotide
uuguuugcagagucacauu

SEQ ID NO: 42932 - RNA, 19 nt, Artificial Sequence
  Description of Artificial Sequence: Synthetic oligonucleotide
uucaaguaauaugguccuc

SEQ ID NO: 42933 - RNA, 19 nt, Artificial Sequence
  Description of Artificial Sequence: Synthetic oligonucleotide
cauuacccagaggacucag

SEQ ID NO: 42934 - RNA, 19 nt, Artificial Sequence
  Description of Artificial Sequence: Synthetic oligonucleotide
ugugccgaccgggaaggga

SEQ ID NO: 42935 - RNA, 19 nt, Artificial Sequence
  Description of Artificial Sequence: Synthetic oligonucleotide
cugcugguuagguaacaga

SEQ ID NO: 42936 - RNA, 19 nt, Artificial Sequence
  Description of Artificial Sequence: Synthetic oligonucleotide
cuaguuuccuuguagcguu

SEQ ID NO: 42937 - RNA, 19 nt, Artificial Sequence
  Description of Artificial Sequence: Synthetic oligonucleotide
uugagguaacagguuccac

SEQ ID NO: 42938 - RNA, 19 nt, Artificial Sequence
  Description of Artificial Sequence: Synthetic oligonucleotide
gccuggguaaaacgguucc

SEQ ID NO: 42939 - RNA, 19 nt, Artificial Sequence
  Description of Artificial Sequence: Synthetic oligonucleotide
cuuacgcaguuuggcagac

SEQ ID NO: 42940 - RNA, 19 nt, Artificial Sequence
  Description of Artificial Sequence: Synthetic oligonucleotide
ugcaaacuaucugguucac

SEQ ID NO: 42941 - RNA, 19 nt, Artificial Sequence
  Description of Artificial Sequence: Synthetic oligonucleotide
cugacggagaucuccuaaa

SEQ ID NO: 42942 - RNA, 19 nt, Artificial Sequence
  Description of Artificial Sequence: Synthetic oligonucleotide
auauuggaagccacucaaa

SEQ ID NO: 42943 - RNA, 19 nt, Artificial Sequence
  Description of Artificial Sequence: Synthetic oligonucleotide
ggcgguucuaccuggagua

SEQ ID NO: 42944 - RNA, 19 nt, Artificial Sequence
  Description of Artificial Sequence: Synthetic oligonucleotide
agguuaaaucccacauacu

SEQ ID NO: 42945 - RNA, 19 nt, Artificial Sequence
  Description of Artificial Sequence: Synthetic oligonucleotide
gguucgugaagcaagugua

SEQ ID NO: 42946 - RNA, 19 nt, Artificial Sequence
  Description of Artificial Sequence: Synthetic oligonucleotide
agcaacuaugucaguuaca

SEQ ID NO: 42947 - RNA, 19 nt, Artificial Sequence
  Description of Artificial Sequence: Synthetic oligonucleotide
ugccaguuuccuagaugau

SEQ ID NO: 42948 - RNA, 19 nt, Artificial Sequence
  Description of Artificial Sequence: Synthetic oligonucleotide
cugggcaacagacuguuau

SEQ ID NO: 42949 - RNA, 19 nt, Artificial Sequence
  Description of Artificial Sequence: Synthetic oligonucleotide
cugguggggcgguucuacc

SEQ ID NO: 42950 - RNA, 19 nt, Artificial Sequence
  Description of Artificial Sequence: Synthetic oligonucleotide
gagcauaucaugagcuccu

SEQ ID NO: 42951 - RNA, 19 nt, Artificial Sequence
  Description of Artificial Sequence: Synthetic oligonucleotide
guagcuacaaggacauggu

SEQ ID NO: 42952 - RNA, 19 nt, Artificial Sequence
  Description of Artificial Sequence: Synthetic oligonucleotide
caaguaauaugguccuccu

SEQ ID NO: 42953 - RNA, 19 nt, Artificial Sequence
  Description of Artificial Sequence: Synthetic oligonucleotide
gcauaucaugagcuccuug

SEQ ID NO: 42954 - RNA, 19 nt, Artificial Sequence
  Description of Artificial Sequence: Synthetic oligonucleotide
cuaagcaacuaugucaguu

SEQ ID NO: 42955 - RNA, 19 nt, Artificial Sequence
  Description of Artificial Sequence: Synthetic oligonucleotide
gagcuguaagaacuuucgu

SEQ ID NO: 42956 - RNA, 19 nt, Artificial Sequence
  Description of Artificial Sequence: Synthetic oligonucleotide
ccauaccagguccaucgcc

SEQ ID NO: 42957 - RNA, 19 nt, Artificial Sequence
  Description of Artificial Sequence: Synthetic oligonucleotide
gggcaacagacuguuauca

SEQ ID NO: 42958 - RNA, 19 nt, Artificial Sequence
  Description of Artificial Sequence: Synthetic oligonucleotide
gacaaaggacuaacaugaa

SEQ ID NO: 42959 - RNA, 19 nt, Artificial Sequence
  Description of Artificial Sequence: Synthetic oligonucleotide
gcuuacgcaguuuggcaga

SEQ ID NO: 42960 - RNA, 19 nt, Artificial Sequence
  Description of Artificial Sequence: Synthetic oligonucleotide
cuguaagaacuuucguagu

SEQ ID NO: 42961 - RNA, 19 nt, Artificial Sequence
  Description of Artificial Sequence: Synthetic oligonucleotide
caucgaggguaugguagac

SEQ ID NO: 42962 - RNA, 19 nt, Artificial Sequence
  Description of Artificial Sequence: Synthetic oligonucleotide
caauugaauguuggcugca

SEQ ID NO: 42963 - RNA, 19 nt, Artificial Sequence
  Description of Artificial Sequence: Synthetic oligonucleotide
ucguagcuucagagggccu

SEQ ID NO: 42964 - RNA, 19 nt, Artificial Sequence
  Description of Artificial Sequence: Synthetic oligonucleotide
caucgccaggguguaggcc

SEQ ID NO: 42965 - RNA, 19 nt, Artificial Sequence
  Description of Artificial Sequence: Synthetic oligonucleotide
aacuuucguagugguccau

SEQ ID NO: 42966 - RNA, 19 nt, Artificial Sequence
  Description of Artificial Sequence: Synthetic oligonucleotide
ggacagcuagagcccaggc

SEQ ID NO: 42967 - RNA, 19 nt, Artificial Sequence
  Description of Artificial Sequence: Synthetic oligonucleotide
gcuaguuaccugugccgac

SEQ ID NO: 42968 - RNA, 19 nt, Artificial Sequence
  Description of Artificial Sequence: Synthetic oligonucleotide
ugccgaccgggaagggaga

SEQ ID NO: 42969 - RNA, 19 nt, Artificial Sequence
  Description of Artificial Sequence: Synthetic oligonucleotide
ugacugcuacugucagauc

SEQ ID NO: 42970 - RNA, 19 nt, Artificial Sequence
  Description of Artificial Sequence: Synthetic oligonucleotide
gccaugguauauucucuga

SEQ ID NO: 42971 - RNA, 19 nt, Artificial Sequence
  Description of Artificial Sequence: Synthetic oligonucleotide
ucgccaggguguaggcccu

SEQ ID NO: 42972 - RNA, 19 nt, Artificial Sequence
  Description of Artificial Sequence: Synthetic oligonucleotide
uggggcgguucuaccugga

SEQ ID NO: 42973 - RNA, 19 nt, Artificial Sequence
  Description of Artificial Sequence: Synthetic oligonucleotide
caggagacuaacuguacuu

SEQ ID NO: 42974 - RNA, 19 nt, Artificial Sequence
  Description of Artificial Sequence: Synthetic oligonucleotide
uuguugugcuaggcuugug

SEQ ID NO: 42975 - RNA, 19 nt, Artificial Sequence
  Description of Artificial Sequence: Synthetic oligonucleotide
gccauuacccagaggacuc

SEQ ID NO: 42976 - RNA, 19 nt, Artificial Sequence
  Description of Artificial Sequence: Synthetic oligonucleotide
cacuaauguggccucuucu

SEQ ID NO: 42977 - RNA, 19 nt, Artificial Sequence
  Description of Artificial Sequence: Synthetic oligonucleotide
ccauuuuccgcaagugcca

SEQ ID NO: 42978 - RNA, 19 nt, Artificial Sequence
  Description of Artificial Sequence: Synthetic oligonucleotide
gggaugcguagcugugucc

SEQ ID NO: 42979 - RNA, 19 nt, Artificial Sequence
  Description of Artificial Sequence: Synthetic oligonucleotide
gcuggugcuaucacuuaac

SEQ ID NO: 42980 - RNA, 19 nt, Artificial Sequence
  Description of Artificial Sequence: Synthetic oligonucleotide
ugcucugcgcacggagaac

SEQ ID NO: 42981 - RNA, 19 nt, Artificial Sequence
  Description of Artificial Sequence: Synthetic oligonucleotide
caucucccuugucugggca

SEQ ID NO: 42982 - RNA, 19 nt, Artificial Sequence
  Description of Artificial Sequence: Synthetic oligonucleotide
ccucuaccccauuccauac

SEQ ID NO: 42983 - RNA, 19 nt, Artificial Sequence
  Description of Artificial Sequence: Synthetic oligonucleotide
guuagguaacagauacuau

SEQ ID NO: 42984 - RNA, 19 nt, Artificial Sequence
  Description of Artificial Sequence: Synthetic oligonucleotide
uuacgcaguuuggcagacu

SEQ ID NO: 42985 - RNA, 19 nt, Artificial Sequence
  Description of Artificial Sequence: Synthetic oligonucleotide
cggaggggaacguauaaca

SEQ ID NO: 42986 - RNA, 19 nt, Artificial Sequence
  Description of Artificial Sequence: Synthetic oligonucleotide
gacugacggagaucuccua

SEQ ID NO: 42987 - RNA, 19 nt, Artificial Sequence
  Description of Artificial Sequence: Synthetic oligonucleotide
cugcgcacggagaacuucu

SEQ ID NO: 42988 - RNA, 19 nt, Artificial Sequence
  Description of Artificial Sequence: Synthetic oligonucleotide
uaucuuggauuggcucgua

SEQ ID NO: 42989 - RNA, 19 nt, Artificial Sequence
  Description of Artificial Sequence: Synthetic oligonucleotide
agcauaucaugagcuccuu

SEQ ID NO: 42990 - RNA, 19 nt, Artificial Sequence
  Description of Artificial Sequence: Synthetic oligonucleotide
gggacaaacuaagcaacua

SEQ ID NO: 42991 - RNA, 19 nt, Artificial Sequence
  Description of Artificial Sequence: Synthetic oligonucleotide
gcucguagcuucagagggc

SEQ ID NO: 42992 - RNA, 19 nt, Artificial Sequence
  Description of Artificial Sequence: Synthetic oligonucleotide
acgguuccucaggagacua

SEQ ID NO: 42993 - RNA, 19 nt, Artificial Sequence
  Description of Artificial Sequence: Synthetic oligonucleotide
caguuuccuagaugaucaa

SEQ ID NO: 42994 - RNA, 19 nt, Artificial Sequence
  Description of Artificial Sequence: Synthetic oligonucleotide
ccaacgucuuaugauacaa

SEQ ID NO: 42995 - RNA, 19 nt, Artificial Sequence
  Description of Artificial Sequence: Synthetic oligonucleotide
caacguggauggacagaga

SEQ ID NO: 42996 - RNA, 19 nt, Artificial Sequence
  Description of Artificial Sequence: Synthetic oligonucleotide
ggggcgguucuaccuggag

SEQ ID NO: 42997 - RNA, 19 nt, Artificial Sequence
  Description of Artificial Sequence: Synthetic oligonucleotide
ggaacguauaacagcuagu

SEQ ID NO: 42998 - RNA, 19 nt, Artificial Sequence
  Description of Artificial Sequence: Synthetic oligonucleotide
ggcaaccagcuuguccacc

SEQ ID NO: 42999 - RNA, 19 nt, Artificial Sequence
  Description of Artificial Sequence: Synthetic oligonucleotide
acccucuaccccauuccau

SEQ ID NO: 43000 - RNA, 19 nt, Artificial Sequence
  Description of Artificial Sequence: Synthetic oligonucleotide
cccauaccagguccaucgc

SEQ ID NO: 43001 - RNA, 19 nt, Artificial Sequence
  Description of Artificial Sequence: Synthetic oligonucleotide
gcugguuagguaacagaua

SEQ ID NO: 43002 - RNA, 19 nt, Artificial Sequence
  Description of Artificial Sequence: Synthetic oligonucleotide
cauacggcugcaggggcua

SEQ ID NO: 43003 - RNA, 19 nt, Artificial Sequence
  Description of Artificial Sequence: Synthetic oligonucleotide
cuacaaggacauggucuaa

SEQ ID NO: 43004 - RNA, 19 nt, Artificial Sequence
  Description of Artificial Sequence: Synthetic oligonucleotide
cuuuccggcccagucugua

SEQ ID NO: 43005 - RNA, 19 nt, Artificial Sequence
  Description of Artificial Sequence: Synthetic oligonucleotide
gggcgguucuaccuggagu

SEQ ID NO: 43006 - RNA, 19 nt, Artificial Sequence
  Description of Artificial Sequence: Synthetic oligonucleotide
ccggaggggaacguauaac

SEQ ID NO: 43007 - RNA, 19 nt, Artificial Sequence
  Description of Artificial Sequence: Synthetic oligonucleotide
cagcuggugcuaucacuua

SEQ ID NO: 43008 - RNA, 19 nt, Artificial Sequence
  Description of Artificial Sequence: Synthetic oligonucleotide
gccgaccgggaagggagag

SEQ ID NO: 43009 - RNA, 19 nt, Artificial Sequence
  Description of Artificial Sequence: Synthetic oligonucleotide
cucuugacauugccaguuu

SEQ ID NO: 43010 - RNA, 19 nt, Artificial Sequence
  Description of Artificial Sequence: Synthetic oligonucleotide
gguaccaaaccugcugguu

SEQ ID NO: 43011 - RNA, 19 nt, Artificial Sequence
  Description of Artificial Sequence: Synthetic oligonucleotide
cgugaagcaaguguaugua

SEQ ID NO: 43012 - RNA, 19 nt, Artificial Sequence
  Description of Artificial Sequence: Synthetic oligonucleotide
auacggcugcaggggcuau

SEQ ID NO: 43013 - RNA, 19 nt, Artificial Sequence
  Description of Artificial Sequence: Synthetic oligonucleotide
ccggcccagucuguacucc

SEQ ID NO: 43014 - RNA, 19 nt, Artificial Sequence
  Description of Artificial Sequence: Synthetic oligonucleotide
cucgggugguguccccaua

SEQ ID NO: 43015 - RNA, 19 nt, Artificial Sequence
  Description of Artificial Sequence: Synthetic oligonucleotide
ccucuugacauugccaguu

SEQ ID NO: 43016 - RNA, 19 nt, Artificial Sequence
  Description of Artificial Sequence: Synthetic oligonucleotide
gcccggaggaggaaguuuu

SEQ ID NO: 43017 - RNA, 19 nt, Artificial Sequence
  Description of Artificial Sequence: Synthetic oligonucleotide
gcuuuccggcccagucugu

SEQ ID NO: 43018 - RNA, 19 nt, Artificial Sequence
  Description of Artificial Sequence: Synthetic oligonucleotide
cagaacugguggggcgguu

SEQ ID NO: 43019 - RNA, 19 nt, Artificial Sequence
  Description of Artificial Sequence: Synthetic oligonucleotide
aaauaugucgcucagaaau

SEQ ID NO: 43020 - RNA, 19 nt, Artificial Sequence
  Description of Artificial Sequence: Synthetic oligonucleotide
uuuacgaucaucuggaaga

SEQ ID NO: 43021 - RNA, 19 nt, Artificial Sequence
  Description of Artificial Sequence: Synthetic oligonucleotide
aauaccgguagcaacaagc

SEQ ID NO: 43022 - RNA, 19 nt, Artificial Sequence
  Description of Artificial Sequence: Synthetic oligonucleotide
aaugcaaguggguagguag

SEQ ID NO: 43023 - RNA, 19 nt, Artificial Sequence
  Description of Artificial Sequence: Synthetic oligonucleotide
agaucguuuaaucuuuucc

SEQ ID NO: 43024 - RNA, 19 nt, Artificial Sequence
  Description of Artificial Sequence: Synthetic oligonucleotide
uaaauuagucuacaagcgg

SEQ ID NO: 43025 - RNA, 19 nt, Artificial Sequence
  Description of Artificial Sequence: Synthetic oligonucleotide
aguguaaagacugaaaauc

SEQ ID NO: 43026 - RNA, 19 nt, Artificial Sequence
  Description of Artificial Sequence: Synthetic oligonucleotide
uagucaaucuaaaaccugg

SEQ ID NO: 43027 - RNA, 19 nt, Artificial Sequence
  Description of Artificial Sequence: Synthetic oligonucleotide
aaauaugcacuaguggucg

SEQ ID NO: 43028 - RNA, 19 nt, Artificial Sequence
  Description of Artificial Sequence: Synthetic oligonucleotide
acuaguaacacuugggucu

SEQ ID NO: 43029 - RNA, 19 nt, Artificial Sequence
  Description of Artificial Sequence: Synthetic oligonucleotide
gaucguuuaaucuuuuccc

SEQ ID NO: 43030 - RNA, 19 nt, Artificial Sequence
  Description of Artificial Sequence: Synthetic oligonucleotide
ugccuuucaaaccugaccc

SEQ ID NO: 43031 - RNA, 19 nt, Artificial Sequence
  Description of Artificial Sequence: Synthetic oligonucleotide
agucaagaggacuaguaac

SEQ ID NO: 43032 - RNA, 19 nt, Artificial Sequence
  Description of Artificial Sequence: Synthetic oligonucleotide
aguccucuaucuuaggagc

SEQ ID NO: 43033 - RNA, 19 nt, Artificial Sequence
  Description of Artificial Sequence: Synthetic oligonucleotide
uccucuauaaauucuauuc

SEQ ID NO: 43034 - RNA, 19 nt, Artificial Sequence
  Description of Artificial Sequence: Synthetic oligonucleotide
acuaaggguaauuuagggg

SEQ ID NO: 43035 - RNA, 19 nt, Artificial Sequence
  Description of Artificial Sequence: Synthetic oligonucleotide
uugaucauaaucaaagaua

SEQ ID NO: 43036 - RNA, 19 nt, Artificial Sequence
  Description of Artificial Sequence: Synthetic oligonucleotide
cuugggacuccuaagaacc

SEQ ID NO: 43037 - RNA, 19 nt, Artificial Sequence
  Description of Artificial Sequence: Synthetic oligonucleotide
ugugguuacaaucuacucu

SEQ ID NO: 43038 - RNA, 19 nt, Artificial Sequence
  Description of Artificial Sequence: Synthetic oligonucleotide
ucggccuaaacccaagugg

SEQ ID NO: 43039 - RNA, 19 nt, Artificial Sequence
  Description of Artificial Sequence: Synthetic oligonucleotide
cuugcgaacacucacccgg

SEQ ID NO: 43040 - RNA, 19 nt, Artificial Sequence
  Description of Artificial Sequence: Synthetic oligonucleotide
ucauuugaucaucugauaa

SEQ ID NO: 43041 - RNA, 19 nt, Artificial Sequence
  Description of Artificial Sequence: Synthetic oligonucleotide
gguaauuuaggggaaaugg

SEQ ID NO: 43042 - RNA, 19 nt, Artificial Sequence
  Description of Artificial Sequence: Synthetic oligonucleotide
cuaaggguaauuuagggga

SEQ ID NO: 43043 - RNA, 19 nt, Artificial Sequence
  Description of Artificial Sequence: Synthetic oligonucleotide
aacuagccuacauuuugac

SEQ ID NO: 43044 - RNA, 19 nt, Artificial Sequence
  Description of Artificial Sequence: Synthetic oligonucleotide
auugaucauaaucaaagau

SEQ ID NO: 43045 - RNA, 19 nt, Artificial Sequence
  Description of Artificial Sequence: Synthetic oligonucleotide
auacccaucguucucacug

SEQ ID NO: 43046 - RNA, 19 nt, Artificial Sequence
  Description of Artificial Sequence: Synthetic oligonucleotide
gaaaccgugcucuauacca

SEQ ID NO: 43047 - RNA, 19 nt, Artificial Sequence
  Description of Artificial Sequence: Synthetic oligonucleotide
cuaacuuacaaagcugucg

SEQ ID NO: 43048 - RNA, 19 nt, Artificial Sequence
  Description of Artificial Sequence: Synthetic oligonucleotide
acuagauagaguccaaccu

SEQ ID NO: 43049 - RNA, 19 nt, Artificial Sequence
  Description of Artificial Sequence: Synthetic oligonucleotide
cuaauuuagcugaauggac

SEQ ID NO: 43050 - RNA, 19 nt, Artificial Sequence
  Description of Artificial Sequence: Synthetic oligonucleotide
cauugggacccacagaagg

SEQ ID NO: 43051 - RNA, 19 nt, Artificial Sequence
  Description of Artificial Sequence: Synthetic oligonucleotide
aucgaaugaaccaaggaag

SEQ ID NO: 43052 - RNA, 19 nt, Artificial Sequence
  Description of Artificial Sequence: Synthetic oligonucleotide
ugacggaagguguagaacu

SEQ ID NO: 43053 - RNA, 19 nt, Artificial Sequence
  Description of Artificial Sequence: Synthetic oligonucleotide
uagucauuguauuauugga

SEQ ID NO: 43054 - RNA, 19 nt, Artificial Sequence
  Description of Artificial Sequence: Synthetic oligonucleotide
ucuuaaggaauccauucau

SEQ ID NO: 43055 - RNA, 19 nt, Artificial Sequence
  Description of Artificial Sequence: Synthetic oligonucleotide
cuaagucucacuucagcag

SEQ ID NO: 43056 - RNA, 19 nt, Artificial Sequence
  Description of Artificial Sequence: Synthetic oligonucleotide
aaagauaacuagauagagu

SEQ ID NO: 43057 - RNA, 19 nt, Artificial Sequence
  Description of Artificial Sequence: Synthetic oligonucleotide
uccggcauagccaacuacc

SEQ ID NO: 43058 - RNA, 19 nt, Artificial Sequence
  Description of Artificial Sequence: Synthetic oligonucleotide
uuucaucgaaugaaccaag

SEQ ID NO: 43059 - RNA, 19 nt, Artificial Sequence
  Description of Artificial Sequence: Synthetic oligonucleotide
gaggacuaguaacacuugg

SEQ ID NO: 43060 - RNA, 19 nt, Artificial Sequence
  Description of Artificial Sequence: Synthetic oligonucleotide
uaguggucgacucugggga

SEQ ID NO: 43061 - RNA, 19 nt, Artificial Sequence
  Description of Artificial Sequence: Synthetic oligonucleotide
agcuuugugggcuauaaau

SEQ ID NO: 43062 - RNA, 19 nt, Artificial Sequence
  Description of Artificial Sequence: Synthetic oligonucleotide
gaagaaugcagaaugccac

SEQ ID NO: 43063 - RNA, 19 nt, Artificial Sequence
  Description of Artificial Sequence: Synthetic oligonucleotide
ucugcaauggaucucgcuu

SEQ ID NO: 43064 - RNA, 19 nt, Artificial Sequence
  Description of Artificial Sequence: Synthetic oligonucleotide
uauuccucuauaaauucua

SEQ ID NO: 43065 - RNA, 19 nt, Artificial Sequence
  Description of Artificial Sequence: Synthetic oligonucleotide
agcauugcucauuaaauau

SEQ ID NO: 43066 - RNA, 19 nt, Artificial Sequence
  Description of Artificial Sequence: Synthetic oligonucleotide
gagcuuaguguaaagacug

SEQ ID NO: 43067 - RNA, 19 nt, Artificial Sequence
  Description of Artificial Sequence: Synthetic oligonucleotide
ucaucgaaugaaccaagga

SEQ ID NO: 43068 - RNA, 19 nt, Artificial Sequence
  Description of Artificial Sequence: Synthetic oligonucleotide
gaggcuauacacucacuag

SEQ ID NO: 43069 - RNA, 19 nt, Artificial Sequence
  Description of Artificial Sequence: Synthetic oligonucleotide
aauccgaaauccuccccag

SEQ ID NO: 43070 - RNA, 19 nt, Artificial Sequence
  Description of Artificial Sequence: Synthetic oligonucleotide
aagucaagaggacuaguaa

SEQ ID NO: 43071 - RNA, 19 nt, Artificial Sequence
  Description of Artificial Sequence: Synthetic oligonucleotide
cuccgagucacucauuucc

SEQ ID NO: 43072 - RNA, 19 nt, Artificial Sequence
  Description of Artificial Sequence: Synthetic oligonucleotide
augauuuauaaaugacucu

SEQ ID NO: 43073 - RNA, 19 nt, Artificial Sequence
  Description of Artificial Sequence: Synthetic oligonucleotide
aaguacuucccauuuguuu

SEQ ID NO: 43074 - RNA, 19 nt, Artificial Sequence
  Description of Artificial Sequence: Synthetic oligonucleotide
acaaugaaaacgauugucu

SEQ ID NO: 43075 - RNA, 19 nt, Artificial Sequence
  Description of Artificial Sequence: Synthetic oligonucleotide
acucacuagauuaauuuag

SEQ ID NO: 43076 - RNA, 19 nt, Artificial Sequence
  Description of Artificial Sequence: Synthetic oligonucleotide
auauaagugagguuccgaa

SEQ ID NO: 43077 - RNA, 19 nt, Artificial Sequence
  Description of Artificial Sequence: Synthetic oligonucleotide
ugagaggcuauacacucac

SEQ ID NO: 43078 - RNA, 19 nt, Artificial Sequence
  Description of Artificial Sequence: Synthetic oligonucleotide
caaauaugcacuagugguc

SEQ ID NO: 43079 - RNA, 19 nt, Artificial Sequence
  Description of Artificial Sequence: Synthetic oligonucleotide
guuuacgaucaucuggaag

SEQ ID NO: 43080 - RNA, 19 nt, Artificial Sequence
  Description of Artificial Sequence: Synthetic oligonucleotide
gcuacucacacccacagcc

SEQ ID NO: 43081 - RNA, 19 nt, Artificial Sequence
  Description of Artificial Sequence: Synthetic oligonucleotide
agauaacuagauagagucc

SEQ ID NO: 43082 - RNA, 19 nt, Artificial Sequence
  Description of Artificial Sequence: Synthetic oligonucleotide
ucuaaucuuagugucuugu

SEQ ID NO: 43083 - RNA, 19 nt, Artificial Sequence
  Description of Artificial Sequence: Synthetic oligonucleotide
uacaagcggaaguacaacu

SEQ ID NO: 43084 - RNA, 19 nt, Artificial Sequence
  Description of Artificial Sequence: Synthetic oligonucleotide
aaagcuccauacuaauaaa

SEQ ID NO: 43085 - RNA, 19 nt, Artificial Sequence
  Description of Artificial Sequence: Synthetic oligonucleotide
ucauuuccgcaucagggac

SEQ ID NO: 43086 - RNA, 19 nt, Artificial Sequence
  Description of Artificial Sequence: Synthetic oligonucleotide
auggaucucgcuuauggga

SEQ ID NO: 43087 - RNA, 19 nt, Artificial Sequence
  Description of Artificial Sequence: Synthetic oligonucleotide
ucacuagauuaauuuaggu

SEQ ID NO: 43088 - RNA, 19 nt, Artificial Sequence
  Description of Artificial Sequence: Synthetic oligonucleotide
uuugugggcuauaaauagu

SEQ ID NO: 43089 - RNA, 19 nt, Artificial Sequence
  Description of Artificial Sequence: Synthetic oligonucleotide
acaacuugggacuccuaag

SEQ ID NO: 43090 - RNA, 19 nt, Artificial Sequence
  Description of Artificial Sequence: Synthetic oligonucleotide
ucguuacacugucagaaac

SEQ ID NO: 43091 - RNA, 19 nt, Artificial Sequence
  Description of Artificial Sequence: Synthetic oligonucleotide
ugcaauccaaagauaacua

SEQ ID NO: 43092 - RNA, 19 nt, Artificial Sequence
  Description of Artificial Sequence: Synthetic oligonucleotide
caaugaaaacgauugucuc

SEQ ID NO: 43093 - RNA, 19 nt, Artificial Sequence
  Description of Artificial Sequence: Synthetic oligonucleotide
accuucaaauaccgguagc

SEQ ID NO: 43094 - RNA, 19 nt, Artificial Sequence
  Description of Artificial Sequence: Synthetic oligonucleotide
uugugggcuauaaauagua

SEQ ID NO: 43095 - RNA, 19 nt, Artificial Sequence
  Description of Artificial Sequence: Synthetic oligonucleotide
uggaucucgcuuaugggac

SEQ ID NO: 43096 - RNA, 19 nt, Artificial Sequence
  Description of Artificial Sequence: Synthetic oligonucleotide
ugagaaguuaagacuuggu

SEQ ID NO: 43097 - RNA, 19 nt, Artificial Sequence
  Description of Artificial Sequence: Synthetic oligonucleotide
gauggaauucaauaagccu

SEQ ID NO: 43098 - RNA, 19 nt, Artificial Sequence
  Description of Artificial Sequence: Synthetic oligonucleotide
auccgaauuggguccaagg

SEQ ID NO: 43099 - RNA, 19 nt, Artificial Sequence
  Description of Artificial Sequence: Synthetic oligonucleotide
uugacuagggagccauugc

SEQ ID NO: 43100 - RNA, 19 nt, Artificial Sequence
  Description of Artificial Sequence: Synthetic oligonucleotide
uuugacuagggagccauug

SEQ ID NO: 43101 - RNA, 19 nt, Artificial Sequence
  Description of Artificial Sequence: Synthetic oligonucleotide
ggaaauccgaauugggucc

SEQ ID NO: 43102 - RNA, 19 nt, Artificial Sequence
  Description of Artificial Sequence: Synthetic oligonucleotide
ugcuugcgaacacucaccc

SEQ ID NO: 43103 - RNA, 19 nt, Artificial Sequence
  Description of Artificial Sequence: Synthetic oligonucleotide
cacucuauguccacagccc

SEQ ID NO: 43104 - RNA, 19 nt, Artificial Sequence
  Description of Artificial Sequence: Synthetic oligonucleotide
uuauuggaagccagguggu

SEQ ID NO: 43105 - RNA, 19 nt, Artificial Sequence
  Description of Artificial Sequence: Synthetic oligonucleotide
aauaguagugaaggcuucu

SEQ ID NO: 43106 - RNA, 19 nt, Artificial Sequence
  Description of Artificial Sequence: Synthetic oligonucleotide
ugaaagcuuuucaaccuaa

SEQ ID NO: 43107 - RNA, 19 nt, Artificial Sequence
  Description of Artificial Sequence: Synthetic oligonucleotide
aaguacaacuugggacucc

SEQ ID NO: 43108 - RNA, 19 nt, Artificial Sequence
  Description of Artificial Sequence: Synthetic oligonucleotide
gaauccgaaauccucccca

SEQ ID NO: 43109 - RNA, 19 nt, Artificial Sequence
  Description of Artificial Sequence: Synthetic oligonucleotide
aaauaccgguagcaacaag

SEQ ID NO: 43110 - RNA, 19 nt, Artificial Sequence
  Description of Artificial Sequence: Synthetic oligonucleotide
uuccgcaucagggacauac

SEQ ID NO: 43111 - RNA, 19 nt, Artificial Sequence
  Description of Artificial Sequence: Synthetic oligonucleotide
caucgaaugaaccaaggaa

SEQ ID NO: 43112 - RNA, 19 nt, Artificial Sequence
  Description of Artificial Sequence: Synthetic oligonucleotide
agcaugacaugaaacuaac

SEQ ID NO: 43113 - RNA, 19 nt, Artificial Sequence
  Description of Artificial Sequence: Synthetic oligonucleotide
ucagaaaccgugcucuaua

SEQ ID NO: 43114 - RNA, 19 nt, Artificial Sequence
  Description of Artificial Sequence: Synthetic oligonucleotide
ugcgggucaccauauaagu

SEQ ID NO: 43115 - RNA, 19 nt, Artificial Sequence
  Description of Artificial Sequence: Synthetic oligonucleotide
agaggcuauacacucacua

SEQ ID NO: 43116 - RNA, 19 nt, Artificial Sequence
  Description of Artificial Sequence: Synthetic oligonucleotide
aacuugggacuccuaagaa

SEQ ID NO: 43117 - RNA, 19 nt, Artificial Sequence
  Description of Artificial Sequence: Synthetic oligonucleotide
cuagccuacauuuugacau

SEQ ID NO: 43118 - RNA, 19 nt, Artificial Sequence
  Description of Artificial Sequence: Synthetic oligonucleotide
ucucuaauguuacuucauu

SEQ ID NO: 43119 - RNA, 19 nt, Artificial Sequence
  Description of Artificial Sequence: Synthetic oligonucleotide
aaacguggagggcaguaau

SEQ ID NO: 43120 - RNA, 19 nt, Artificial Sequence
  Description of Artificial Sequence: Synthetic oligonucleotide
uaaccuaacaaaugacauu

SEQ ID NO: 43121 - RNA, 19 nt, Artificial Sequence
  Description of Artificial Sequence: Synthetic oligonucleotide
aggacuaguaacacuuggg

SEQ ID NO: 43122 - RNA, 19 nt, Artificial Sequence
  Description of Artificial Sequence: Synthetic oligonucleotide
gguagcaacaagcugaucu

SEQ ID NO: 43123 - RNA, 19 nt, Artificial Sequence
  Description of Artificial Sequence: Synthetic oligonucleotide
gucaaguacuggcaguagc

SEQ ID NO: 43124 - RNA, 19 nt, Artificial Sequence
  Description of Artificial Sequence: Synthetic oligonucleotide
aaauggaucuggugccccu

SEQ ID NO: 43125 - RNA, 19 nt, Artificial Sequence
  Description of Artificial Sequence: Synthetic oligonucleotide
cagggaaauccgaauuggg

SEQ ID NO: 43126 - RNA, 19 nt, Artificial Sequence
  Description of Artificial Sequence: Synthetic oligonucleotide
ugccuguuguguaaacucu

SEQ ID NO: 43127 - RNA, 19 nt, Artificial Sequence
  Description of Artificial Sequence: Synthetic oligonucleotide
acuagccuacauuuugaca

SEQ ID NO: 43128 - RNA, 19 nt, Artificial Sequence
  Description of Artificial Sequence: Synthetic oligonucleotide
gaaguucaucacuugaacu

SEQ ID NO: 43129 - RNA, 19 nt, Artificial Sequence
  Description of Artificial Sequence: Synthetic oligonucleotide
uaaggguaauuuaggggaa

SEQ ID NO: 43130 - RNA, 19 nt, Artificial Sequence
  Description of Artificial Sequence: Synthetic oligonucleotide
agucaaucuaaaaccuggg

SEQ ID NO: 43131 - RNA, 19 nt, Artificial Sequence
  Description of Artificial Sequence: Synthetic oligonucleotide
uagcaacaagcugaucugg

SEQ ID NO: 43132 - RNA, 19 nt, Artificial Sequence
  Description of Artificial Sequence: Synthetic oligonucleotide
uguaggcacuuugacuagg

SEQ ID NO: 43133 - RNA, 19 nt, Artificial Sequence
  Description of Artificial Sequence: Synthetic oligonucleotide
agagcuuaguguaaagacu

SEQ ID NO: 43134 - RNA, 19 nt, Artificial Sequence
  Description of Artificial Sequence: Synthetic oligonucleotide
ugaggcgugcuucuguaaa

SEQ ID NO: 43135 - RNA, 19 nt, Artificial Sequence
  Description of Artificial Sequence: Synthetic oligonucleotide
aauuagucuacaagcggaa

SEQ ID NO: 43136 - RNA, 19 nt, Artificial Sequence
  Description of Artificial Sequence: Synthetic oligonucleotide
aauaugcacuaguggucga

SEQ ID NO: 43137 - RNA, 19 nt, Artificial Sequence
  Description of Artificial Sequence: Synthetic oligonucleotide
gaauuagcuacuacaaugu

SEQ ID NO: 43138 - RNA, 19 nt, Artificial Sequence
  Description of Artificial Sequence: Synthetic oligonucleotide
augucgcucagaaauaaug

SEQ ID NO: 43139 - RNA, 19 nt, Artificial Sequence
  Description of Artificial Sequence: Synthetic oligonucleotide
agcuacucacacccacagc

SEQ ID NO: 43140 - RNA, 19 nt, Artificial Sequence
  Description of Artificial Sequence: Synthetic oligonucleotide
auccgaaauccuccccagc

SEQ ID NO: 43141 - RNA, 19 nt, Artificial Sequence
  Description of Artificial Sequence: Synthetic oligonucleotide
auaugcacuaguggucgac

SEQ ID NO: 43142 - RNA, 19 nt, Artificial Sequence
  Description of Artificial Sequence: Synthetic oligonucleotide
ugacugcccuauuccaggg

SEQ ID NO: 43143 - RNA, 19 nt, Artificial Sequence
  Description of Artificial Sequence: Synthetic oligonucleotide
gucaagaggacuaguaaca

SEQ ID NO: 43144 - RNA, 19 nt, Artificial Sequence
  Description of Artificial Sequence: Synthetic oligonucleotide
cugcgggucaccauauaag

SEQ ID NO: 43145 - RNA, 19 nt, Artificial Sequence
  Description of Artificial Sequence: Synthetic oligonucleotide
gggaaauccgaauuggguc

SEQ ID NO: 43146 - RNA, 19 nt, Artificial Sequence
  Description of Artificial Sequence: Synthetic oligonucleotide
ugcacuaguggucgacucu

SEQ ID NO: 43147 - RNA, 19 nt, Artificial Sequence
  Description of Artificial Sequence: Synthetic oligonucleotide
uucagguucuaaucuuagu

SEQ ID NO: 43148 - RNA, 19 nt, Artificial Sequence
  Description of Artificial Sequence: Synthetic oligonucleotide
augcacuaguggucgacuc

SEQ ID NO: 43149 - RNA, 19 nt, Artificial Sequence
  Description of Artificial Sequence: Synthetic oligonucleotide
auagucaaucuaaaaccug

SEQ ID NO: 43150 - RNA, 19 nt, Artificial Sequence
  Description of Artificial Sequence: Synthetic oligonucleotide
cuagauuguccucuucauc

SEQ ID NO: 43151 - RNA, 19 nt, Artificial Sequence
  Description of Artificial Sequence: Synthetic oligonucleotide
caagccacgugcuuuccac

SEQ ID NO: 43152 - RNA, 19 nt, Artificial Sequence
  Description of Artificial Sequence: Synthetic oligonucleotide
gaauggacaccaagcuagg

SEQ ID NO: 43153 - RNA, 19 nt, Artificial Sequence
  Description of Artificial Sequence: Synthetic oligonucleotide
agucuacaagcggaaguac

SEQ ID NO: 43154 - RNA, 19 nt, Artificial Sequence
  Description of Artificial Sequence: Synthetic oligonucleotide
acucuauguccacagccca

SEQ ID NO: 43155 - RNA, 19 nt, Artificial Sequence
  Description of Artificial Sequence: Synthetic oligonucleotide
cccaaauaugcacuagugg

SEQ ID NO: 43156 - RNA, 19 nt, Artificial Sequence
  Description of Artificial Sequence: Synthetic oligonucleotide
aauaugucgcucagaaaua

SEQ ID NO: 43157 - RNA, 19 nt, Artificial Sequence
  Description of Artificial Sequence: Synthetic oligonucleotide
cugcaagccuccuaaaaca

SEQ ID NO: 43158 - RNA, 19 nt, Artificial Sequence
  Description of Artificial Sequence: Synthetic oligonucleotide
auaugaggcgugcuucugu

SEQ ID NO: 43159 - RNA, 19 nt, Artificial Sequence
  Description of Artificial Sequence: Synthetic oligonucleotide
cugcuugcgaacacucacc

SEQ ID NO: 43160 - RNA, 19 nt, Artificial Sequence
  Description of Artificial Sequence: Synthetic oligonucleotide
aagcuccauacuaauaaaa

SEQ ID NO: 43161 - RNA, 19 nt, Artificial Sequence
  Description of Artificial Sequence: Synthetic oligonucleotide
aguccaaccuuuuccugga

SEQ ID NO: 43162 - RNA, 19 nt, Artificial Sequence
  Description of Artificial Sequence: Synthetic oligonucleotide
cacaaaacuagcauuccua

SEQ ID NO: 43163 - RNA, 19 nt, Artificial Sequence
  Description of Artificial Sequence: Synthetic oligonucleotide
uaccgguagcaacaagcug

SEQ ID NO: 43164 - RNA, 19 nt, Artificial Sequence
  Description of Artificial Sequence: Synthetic oligonucleotide
ccaagcuaggcacauagug

SEQ ID NO: 43165 - RNA, 19 nt, Artificial Sequence
  Description of Artificial Sequence: Synthetic oligonucleotide
gagaaguuaagacuugguu

SEQ ID NO: 43166 - RNA, 19 nt, Artificial Sequence
  Description of Artificial Sequence: Synthetic oligonucleotide
aauccgaauuggguccaag

SEQ ID NO: 43167 - RNA, 19 nt, Artificial Sequence
  Description of Artificial Sequence: Synthetic oligonucleotide
cagaaauaauggguuuugc

SEQ ID NO: 43168 - RNA, 19 nt, Artificial Sequence
  Description of Artificial Sequence: Synthetic oligonucleotide
gacuauugaacaaaagcau

SEQ ID NO: 43169 - RNA, 19 nt, Artificial Sequence
  Description of Artificial Sequence: Synthetic oligonucleotide
cagaaaccgugcucuauac

SEQ ID NO: 43170 - RNA, 19 nt, Artificial Sequence
  Description of Artificial Sequence: Synthetic oligonucleotide
uuacacugucagaaaccgu

SEQ ID NO: 43171 - RNA, 19 nt, Artificial Sequence
  Description of Artificial Sequence: Synthetic oligonucleotide
uuccucuauaaauucuauu

SEQ ID NO: 43172 - RNA, 19 nt, Artificial Sequence
  Description of Artificial Sequence: Synthetic oligonucleotide
agguuuaacuagccuacau

SEQ ID NO: 43173 - RNA, 19 nt, Artificial Sequence
  Description of Artificial Sequence: Synthetic oligonucleotide
uaugucgcucagaaauaau

SEQ ID NO: 43174 - RNA, 19 nt, Artificial Sequence
  Description of Artificial Sequence: Synthetic oligonucleotide
uaugaggcgugcuucugua

SEQ ID NO: 43175 - RNA, 19 nt, Artificial Sequence
  Description of Artificial Sequence: Synthetic oligonucleotide
agaguccaaccuuuuccug

SEQ ID NO: 43176 - RNA, 19 nt, Artificial Sequence
  Description of Artificial Sequence: Synthetic oligonucleotide
uugacggaagguguagaac

SEQ ID NO: 43177 - RNA, 19 nt, Artificial Sequence
  Description of Artificial Sequence: Synthetic oligonucleotide
caacuugggacuccuaaga

SEQ ID NO: 43178 - RNA, 19 nt, Artificial Sequence
  Description of Artificial Sequence: Synthetic oligonucleotide
caggacuauucugcaaugg

SEQ ID NO: 43179 - RNA, 19 nt, Artificial Sequence
  Description of Artificial Sequence: Synthetic oligonucleotide
uuacgaucaucuggaagac

SEQ ID NO: 43180 - RNA, 19 nt, Artificial Sequence
  Description of Artificial Sequence: Synthetic oligonucleotide
agcggaaguacaacuuggg

SEQ ID NO: 43181 - RNA, 19 nt, Artificial Sequence
  Description of Artificial Sequence: Synthetic oligonucleotide
agggaaauccgaauugggu

SEQ ID NO: 43182 - RNA, 19 nt, Artificial Sequence
  Description of Artificial Sequence: Synthetic oligonucleotide
gcugcaagccuccuaaaac

SEQ ID NO: 43183 - RNA, 19 nt, Artificial Sequence
  Description of Artificial Sequence: Synthetic oligonucleotide
agcuccauacuaauaaaau

SEQ ID NO: 43184 - RNA, 19 nt, Artificial Sequence
  Description of Artificial Sequence: Synthetic oligonucleotide
aguacaacuugggacuccu

SEQ ID NO: 43185 - RNA, 19 nt, Artificial Sequence
  Description of Artificial Sequence: Synthetic oligonucleotide
uccgcaucagggacauacc

SEQ ID NO: 43186 - RNA, 19 nt, Artificial Sequence
  Description of Artificial Sequence: Synthetic oligonucleotide
gacugcccuauuccagggg

SEQ ID NO: 43187 - RNA, 19 nt, Artificial Sequence
  Description of Artificial Sequence: Synthetic oligonucleotide
aggcccuaagucucacuuc

SEQ ID NO: 43188 - RNA, 19 nt, Artificial Sequence
  Description of Artificial Sequence: Synthetic oligonucleotide
uaugcacuaguggucgacu

SEQ ID NO: 43189 - RNA, 19 nt, Artificial Sequence
  Description of Artificial Sequence: Synthetic oligonucleotide
gaaggacuauugaacaaaa

SEQ ID NO: 43190 - RNA, 19 nt, Artificial Sequence
  Description of Artificial Sequence: Synthetic oligonucleotide
aagguuuaacuagccuaca

SEQ ID NO: 43191 - RNA, 19 nt, Artificial Sequence
  Description of Artificial Sequence: Synthetic oligonucleotide
auaugucgcucagaaauaa

SEQ ID NO: 43192 - RNA, 19 nt, Artificial Sequence
  Description of Artificial Sequence: Synthetic oligonucleotide
gaugauaugaggcgugcuu

SEQ ID NO: 43193 - RNA, 19 nt, Artificial Sequence
  Description of Artificial Sequence: Synthetic oligonucleotide
gauaugaggcgugcuucug

SEQ ID NO: 43194 - RNA, 19 nt, Artificial Sequence
  Description of Artificial Sequence: Synthetic oligonucleotide
cauaagcguccucuccacc

SEQ ID NO: 43195 - RNA, 19 nt, Artificial Sequence
  Description of Artificial Sequence: Synthetic oligonucleotide
aguggucgacucuggggag

SEQ ID NO: 43196 - RNA, 19 nt, Artificial Sequence
  Description of Artificial Sequence: Synthetic oligonucleotide
auaccgguagcaacaagcu

SEQ ID NO: 43197 - RNA, 19 nt, Artificial Sequence
  Description of Artificial Sequence: Synthetic oligonucleotide
uagauuaauuuagguuuuc

SEQ ID NO: 43198 - RNA, 19 nt, Artificial Sequence
  Description of Artificial Sequence: Synthetic oligonucleotide
cucggccuaaacccaagug

SEQ ID NO: 43199 - RNA, 19 nt, Artificial Sequence
  Description of Artificial Sequence: Synthetic oligonucleotide
aaccgugcucuauaccauu

SEQ ID NO: 43200 - RNA, 19 nt, Artificial Sequence
  Description of Artificial Sequence: Synthetic oligonucleotide
guacaggaaauccacuacu

SEQ ID NO: 43201 - RNA, 19 nt, Artificial Sequence
  Description of Artificial Sequence: Synthetic oligonucleotide
uucccugcgggucaccaua

SEQ ID NO: 43202 - RNA, 19 nt, Artificial Sequence
  Description of Artificial Sequence: Synthetic oligonucleotide
aaaugcaaguggguaggua

SEQ ID NO: 43203 - RNA, 19 nt, Artificial Sequence
  Description of Artificial Sequence: Synthetic oligonucleotide
cagcaugacaugaaacuaa

SEQ ID NO: 43204 - RNA, 19 nt, Artificial Sequence
  Description of Artificial Sequence: Synthetic oligonucleotide
cacacagaucguuuaaucu

SEQ ID NO: 43205 - RNA, 19 nt, Artificial Sequence
  Description of Artificial Sequence: Synthetic oligonucleotide
gauuccccaaauaugcacu

SEQ ID NO: 43206 - RNA, 19 nt, Artificial Sequence
  Description of Artificial Sequence: Synthetic oligonucleotide
cacuagauuaauuuagguu

SEQ ID NO: 43207 - RNA, 19 nt, Artificial Sequence
  Description of Artificial Sequence: Synthetic oligonucleotide
guugacggaagguguagaa

SEQ ID NO: 43208 - RNA, 19 nt, Artificial Sequence
  Description of Artificial Sequence: Synthetic oligonucleotide
aaggguaauuuaggggaaa

SEQ ID NO: 43209 - RNA, 19 nt, Artificial Sequence
  Description of Artificial Sequence: Synthetic oligonucleotide
uguuuacgaucaucuggaa

SEQ ID NO: 43210 - RNA, 19 nt, Artificial Sequence
  Description of Artificial Sequence: Synthetic oligonucleotide
cuacaagcggaaguacaac

SEQ ID NO: 43211 - RNA, 19 nt, Artificial Sequence
  Description of Artificial Sequence: Synthetic oligonucleotide
uauggccgccucauacaga

SEQ ID NO: 43212 - RNA, 19 nt, Artificial Sequence
  Description of Artificial Sequence: Synthetic oligonucleotide
ggcuagauuguccucuuca

SEQ ID NO: 43213 - RNA, 19 nt, Artificial Sequence
  Description of Artificial Sequence: Synthetic oligonucleotide
ugucgcuguguauggccgc

SEQ ID NO: 43214 - RNA, 19 nt, Artificial Sequence
  Description of Artificial Sequence: Synthetic oligonucleotide
cuugaggauuccauagcaa

SEQ ID NO: 43215 - RNA, 19 nt, Artificial Sequence
  Description of Artificial Sequence: Synthetic oligonucleotide
agccacgugcuuuccacgu

SEQ ID NO: 43216 - RNA, 19 nt, Artificial Sequence
  Description of Artificial Sequence: Synthetic oligonucleotide
uacccaucguucucacugu

SEQ ID NO: 43217 - RNA, 19 nt, Artificial Sequence
  Description of Artificial Sequence: Synthetic oligonucleotide
cacuaguggucgacucugg

SEQ ID NO: 43218 - RNA, 19 nt, Artificial Sequence
  Description of Artificial Sequence: Synthetic oligonucleotide
ugcuggcauggauacauuu

SEQ ID NO: 43219 - RNA, 19 nt, Artificial Sequence
  Description of Artificial Sequence: Synthetic oligonucleotide
auucaauccccaagcccuc

SEQ ID NO: 43220 - RNA, 19 nt, Artificial Sequence
  Description of Artificial Sequence: Synthetic oligonucleotide
uugcgaacacucacccggu

SEQ ID NO: 43221 - RNA, 19 nt, Artificial Sequence
  Description of Artificial Sequence: Synthetic oligonucleotide
aaaccgugcucuauaccau

SEQ ID NO: 43222 - RNA, 19 nt, Artificial Sequence
  Description of Artificial Sequence: Synthetic oligonucleotide
aggcgugcuucuguaaaag

SEQ ID NO: 43223 - RNA, 19 nt, Artificial Sequence
  Description of Artificial Sequence: Synthetic oligonucleotide
cacucacuagauuaauuua

SEQ ID NO: 43224 - RNA, 19 nt, Artificial Sequence
  Description of Artificial Sequence: Synthetic oligonucleotide
cacgucuguuucaucaaga

SEQ ID NO: 43225 - RNA, 19 nt, Artificial Sequence
  Description of Artificial Sequence: Synthetic oligonucleotide
ucgacucuggggagugaga

SEQ ID NO: 43226 - RNA, 19 nt, Artificial Sequence
  Description of Artificial Sequence: Synthetic oligonucleotide
cugcaauccaaagauaacu

SEQ ID NO: 43227 - RNA, 19 nt, Artificial Sequence
  Description of Artificial Sequence: Synthetic oligonucleotide
agacuugguuugaaaauau

SEQ ID NO: 43228 - RNA, 19 nt, Artificial Sequence
  Description of Artificial Sequence: Synthetic oligonucleotide
gaaauccgaauugggucca

SEQ ID NO: 43229 - RNA, 19 nt, Artificial Sequence
  Description of Artificial Sequence: Synthetic oligonucleotide
cauauaagugagguuccga

SEQ ID NO: 43230 - RNA, 19 nt, Artificial Sequence
  Description of Artificial Sequence: Synthetic oligonucleotide
aacucggccuaaacccaag

SEQ ID NO: 43231 - RNA, 19 nt, Artificial Sequence
  Description of Artificial Sequence: Synthetic oligonucleotide
cuagauagaguccaaccuu

SEQ ID NO: 43232 - RNA, 19 nt, Artificial Sequence
  Description of Artificial Sequence: Synthetic oligonucleotide
gacggaagguguagaacuc

SEQ ID NO: 43233 - RNA, 19 nt, Artificial Sequence
  Description of Artificial Sequence: Synthetic oligonucleotide
ggacuaguaacacuugggu

SEQ ID NO: 43234 - RNA, 19 nt, Artificial Sequence
  Description of Artificial Sequence: Synthetic oligonucleotide
cggccuaaacccaaguggg

SEQ ID NO: 43235 - RNA, 19 nt, Artificial Sequence
  Description of Artificial Sequence: Synthetic oligonucleotide
uauuggaagccaggugguc

SEQ ID NO: 43236 - RNA, 19 nt, Artificial Sequence
  Description of Artificial Sequence: Synthetic oligonucleotide
uccucuaucuuaggagcau

SEQ ID NO: 43237 - RNA, 19 nt, Artificial Sequence
  Description of Artificial Sequence: Synthetic oligonucleotide
acaagcggaaguacaacuu

SEQ ID NO: 43238 - RNA, 19 nt, Artificial Sequence
  Description of Artificial Sequence: Synthetic oligonucleotide
ccuaaacccaaguggggac

SEQ ID NO: 43239 - RNA, 19 nt, Artificial Sequence
  Description of Artificial Sequence: Synthetic oligonucleotide
ggaauccgaaauccucccc

SEQ ID NO: 43240 - RNA, 19 nt, Artificial Sequence
  Description of Artificial Sequence: Synthetic oligonucleotide
cauaugcaaaacaucuaau

SEQ ID NO: 43241 - RNA, 19 nt, Artificial Sequence
  Description of Artificial Sequence: Synthetic oligonucleotide
gucgcaaggcccuggccac

SEQ ID NO: 43242 - RNA, 19 nt, Artificial Sequence
  Description of Artificial Sequence: Synthetic oligonucleotide
acucggccuaaacccaagu

SEQ ID NO: 43243 - RNA, 19 nt, Artificial Sequence
  Description of Artificial Sequence: Synthetic oligonucleotide
auaacuagauagaguccaa

SEQ ID NO: 43244 - RNA, 19 nt, Artificial Sequence
  Description of Artificial Sequence: Synthetic oligonucleotide
gaggcgugcuucuguaaaa

SEQ ID NO: 43245 - RNA, 19 nt, Artificial Sequence
  Description of Artificial Sequence: Synthetic oligonucleotide
caauguacuugagaaguua

SEQ ID NO: 43246 - RNA, 19 nt, Artificial Sequence
  Description of Artificial Sequence: Synthetic oligonucleotide
cacugucggaucuuaaccu

SEQ ID NO: 43247 - RNA, 19 nt, Artificial Sequence
  Description of Artificial Sequence: Synthetic oligonucleotide
uucuguuguuuacgaucau

SEQ ID NO: 43248 - RNA, 19 nt, Artificial Sequence
  Description of Artificial Sequence: Synthetic oligonucleotide
uggucgacucuggggagug

SEQ ID NO: 43249 - RNA, 19 nt, Artificial Sequence
  Description of Artificial Sequence: Synthetic oligonucleotide
gggucaccauauaagugag

SEQ ID NO: 43250 - RNA, 19 nt, Artificial Sequence
  Description of Artificial Sequence: Synthetic oligonucleotide
agaucacaaugaaaacgau

SEQ ID NO: 43251 - RNA, 19 nt, Artificial Sequence
  Description of Artificial Sequence: Synthetic oligonucleotide
accagcaguuagguaugag

SEQ ID NO: 43252 - RNA, 19 nt, Artificial Sequence
  Description of Artificial Sequence: Synthetic oligonucleotide
ccggcauagccaacuaccc

SEQ ID NO: 43253 - RNA, 19 nt, Artificial Sequence
  Description of Artificial Sequence: Synthetic oligonucleotide
uccuugccuggaacucggc

SEQ ID NO: 43254 - RNA, 19 nt, Artificial Sequence
  Description of Artificial Sequence: Synthetic oligonucleotide
ccauauaagugagguuccg

SEQ ID NO: 43255 - RNA, 19 nt, Artificial Sequence
  Description of Artificial Sequence: Synthetic oligonucleotide
guccggcauagccaacuac

SEQ ID NO: 43256 - RNA, 19 nt, Artificial Sequence
  Description of Artificial Sequence: Synthetic oligonucleotide
agccuacauuuugacauaa

SEQ ID NO: 43257 - RNA, 19 nt, Artificial Sequence
  Description of Artificial Sequence: Synthetic oligonucleotide
ucucgcuuaugggacuuuu

SEQ ID NO: 43258 - RNA, 19 nt, Artificial Sequence
  Description of Artificial Sequence: Synthetic oligonucleotide
ccgcaucagggacauaccc

SEQ ID NO: 43259 - RNA, 19 nt, Artificial Sequence
  Description of Artificial Sequence: Synthetic oligonucleotide
gcacuaguggucgacucug

SEQ ID NO: 43260 - RNA, 19 nt, Artificial Sequence
  Description of Artificial Sequence: Synthetic oligonucleotide
ggccuaaacccaagugggg

SEQ ID NO: 43261 - RNA, 19 nt, Artificial Sequence
  Description of Artificial Sequence: Synthetic oligonucleotide
caaaacuagcauuccuaau

SEQ ID NO: 43262 - RNA, 19 nt, Artificial Sequence
  Description of Artificial Sequence: Synthetic oligonucleotide
caucguucucacugucgga

SEQ ID NO: 43263 - RNA, 19 nt, Artificial Sequence
  Description of Artificial Sequence: Synthetic oligonucleotide
gaacucggccuaaacccaa

SEQ ID NO: 43264 - RNA, 19 nt, Artificial Sequence
  Description of Artificial Sequence: Synthetic oligonucleotide
cagucgcaaggcccuggcc

SEQ ID NO: 43265 - RNA, 19 nt, Artificial Sequence
  Description of Artificial Sequence: Synthetic oligonucleotide
uccccugaauuagcuacua

SEQ ID NO: 43266 - RNA, 19 nt, Artificial Sequence
  Description of Artificial Sequence: Synthetic oligonucleotide
ccuuucaaaccugacccuc

SEQ ID NO: 43267 - RNA, 19 nt, Artificial Sequence
  Description of Artificial Sequence: Synthetic oligonucleotide
guggucaaguacuggcagu

SEQ ID NO: 43268 - RNA, 19 nt, Artificial Sequence
  Description of Artificial Sequence: Synthetic oligonucleotide
gugcaagaucccaguguug

SEQ ID NO: 43269 - RNA, 19 nt, Artificial Sequence
  Description of Artificial Sequence: Synthetic oligonucleotide
gagcucuccucagcauggc

SEQ ID NO: 43270 - RNA, 19 nt, Artificial Sequence
  Description of Artificial Sequence: Synthetic oligonucleotide
cauuccuaauagugcaaau

SEQ ID NO: 43271 - RNA, 19 nt, Artificial Sequence
  Description of Artificial Sequence: Synthetic oligonucleotide
cuacucacacccacagccu

SEQ ID NO: 43272 - RNA, 19 nt, Artificial Sequence
  Description of Artificial Sequence: Synthetic oligonucleotide
auaagcuuugugggcuaua

SEQ ID NO: 43273 - RNA, 19 nt, Artificial Sequence
  Description of Artificial Sequence: Synthetic oligonucleotide
ccgccucauacagaguucc

SEQ ID NO: 43274 - RNA, 19 nt, Artificial Sequence
  Description of Artificial Sequence: Synthetic oligonucleotide
acagaucguuuaaucuuuu

SEQ ID NO: 43275 - RNA, 19 nt, Artificial Sequence
  Description of Artificial Sequence: Synthetic oligonucleotide
cgugcuucuguaaaagucu

SEQ ID NO: 43276 - RNA, 19 nt, Artificial Sequence
  Description of Artificial Sequence: Synthetic oligonucleotide
aggcaacuuuacaaagguu

SEQ ID NO: 43277 - RNA, 19 nt, Artificial Sequence
  Description of Artificial Sequence: Synthetic oligonucleotide
cucuccgagucacucauuu

SEQ ID NO: 43278 - RNA, 19 nt, Artificial Sequence
  Description of Artificial Sequence: Synthetic oligonucleotide
cuaaaaccugggucauccu

SEQ ID NO: 43279 - RNA, 19 nt, Artificial Sequence
  Description of Artificial Sequence: Synthetic oligonucleotide
cagaaugucccugccacau

SEQ ID NO: 43280 - RNA, 19 nt, Artificial Sequence
  Description of Artificial Sequence: Synthetic oligonucleotide
accgugcucuauaccauuu

SEQ ID NO: 43281 - RNA, 19 nt, Artificial Sequence
  Description of Artificial Sequence: Synthetic oligonucleotide
ggcuauacacucacuagau

SEQ ID NO: 43282 - RNA, 19 nt, Artificial Sequence
  Description of Artificial Sequence: Synthetic oligonucleotide
gaccagcaguuagguauga

SEQ ID NO: 43283 - RNA, 19 nt, Artificial Sequence
  Description of Artificial Sequence: Synthetic oligonucleotide
gcuguguauggccgccuca

SEQ ID NO: 43284 - RNA, 19 nt, Artificial Sequence
  Description of Artificial Sequence: Synthetic oligonucleotide
ucgcuguguauggccgccu

SEQ ID NO: 43285 - RNA, 19 nt, Artificial Sequence
  Description of Artificial Sequence: Synthetic oligonucleotide
ccgugcucuauaccauuug

SEQ ID NO: 43286 - RNA, 19 nt, Artificial Sequence
  Description of Artificial Sequence: Synthetic oligonucleotide
agcugucguuacacuguca

SEQ ID NO: 43287 - RNA, 19 nt, Artificial Sequence
  Description of Artificial Sequence: Synthetic oligonucleotide
ggccgccucauacagaguu

SEQ ID NO: 43288 - RNA, 19 nt, Artificial Sequence
  Description of Artificial Sequence: Synthetic oligonucleotide
gcaauggaucucgcuuaug

SEQ ID NO: 43289 - RNA, 19 nt, Artificial Sequence
  Description of Artificial Sequence: Synthetic oligonucleotide
gccccuuaaacuggugaga

SEQ ID NO: 43290 - RNA, 19 nt, Artificial Sequence
  Description of Artificial Sequence: Synthetic oligonucleotide
gaucucgcuuaugggacuu

SEQ ID NO: 43291 - RNA, 19 nt, Artificial Sequence
  Description of Artificial Sequence: Synthetic oligonucleotide
ggcgugcuucuguaaaagu

SEQ ID NO: 43292 - RNA, 19 nt, Artificial Sequence
  Description of Artificial Sequence: Synthetic oligonucleotide
ggaucucgcuuaugggacu

SEQ ID NO: 43293 - RNA, 19 nt, Artificial Sequence
  Description of Artificial Sequence: Synthetic oligonucleotide
cacccacucuauguccaca

SEQ ID NO: 43294 - RNA, 19 nt, Artificial Sequence
  Description of Artificial Sequence: Synthetic oligonucleotide
cuguguauggccgccucau

SEQ ID NO: 43295 - RNA, 19 nt, Artificial Sequence
  Description of Artificial Sequence: Synthetic oligonucleotide
aggggaaauggggcuuauu

SEQ ID NO: 43296 - RNA, 19 nt, Artificial Sequence
  Description of Artificial Sequence: Synthetic oligonucleotide
cacucacccggugggccuc

SEQ ID NO: 43297 - RNA, 19 nt, Artificial Sequence
  Description of Artificial Sequence: Synthetic oligonucleotide
cagggacauacccaucguu

SEQ ID NO: 43298 - RNA, 19 nt, Artificial Sequence
  Description of Artificial Sequence: Synthetic oligonucleotide
aucucgcuuaugggacuuu

SEQ ID NO: 43299 - RNA, 19 nt, Artificial Sequence
  Description of Artificial Sequence: Synthetic oligonucleotide
guacucaauccaagaguuu

SEQ ID NO: 43300 - RNA, 19 nt, Artificial Sequence
  Description of Artificial Sequence: Synthetic oligonucleotide
guggucgacucuggggagu

SEQ ID NO: 43301 - RNA, 19 nt, Artificial Sequence
  Description of Artificial Sequence: Synthetic oligonucleotide
guacaacuugggacuccua

SEQ ID NO: 43302 - RNA, 19 nt, Artificial Sequence
  Description of Artificial Sequence: Synthetic oligonucleotide
acucacccggugggccucu

SEQ ID NO: 43303 - RNA, 19 nt, Artificial Sequence
  Description of Artificial Sequence: Synthetic oligonucleotide
cuuugacuagggagccauu

SEQ ID NO: 43304 - RNA, 19 nt, Artificial Sequence
  Description of Artificial Sequence: Synthetic oligonucleotide
gccgccucauacagaguuc

SEQ ID NO: 43305 - RNA, 19 nt, Artificial Sequence
  Description of Artificial Sequence: Synthetic oligonucleotide
caacuacccucuggcaccu

SEQ ID NO: 43306 - RNA, 19 nt, Artificial Sequence
  Description of Artificial Sequence: Synthetic oligonucleotide
ccacgugcuuuccacgucu

SEQ ID NO: 43307 - RNA, 19 nt, Artificial Sequence
  Description of Artificial Sequence: Synthetic oligonucleotide
acucuccgagucacucauu

SEQ ID NO: 43308 - RNA, 19 nt, Artificial Sequence
  Description of Artificial Sequence: Synthetic oligonucleotide
cguucucacugucggaucu

SEQ ID NO: 43309 - RNA, 19 nt, Artificial Sequence
  Description of Artificial Sequence: Synthetic oligonucleotide
uuuccgcaucagggacaua

SEQ ID NO: 43310 - RNA, 19 nt, Artificial Sequence
  Description of Artificial Sequence: Synthetic oligonucleotide
ccucaacaaguugcaaaua

SEQ ID NO: 43311 - RNA, 19 nt, Artificial Sequence
  Description of Artificial Sequence: Synthetic oligonucleotide
gccuacauuuugacauaau

SEQ ID NO: 43312 - RNA, 19 nt, Artificial Sequence
  Description of Artificial Sequence: Synthetic oligonucleotide
ccucuaucuuaggagcauu

SEQ ID NO: 43313 - RNA, 19 nt, Artificial Sequence
  Description of Artificial Sequence: Synthetic oligonucleotide
cccugcgggucaccauaua

SEQ ID NO: 43314 - RNA, 19 nt, Artificial Sequence
  Description of Artificial Sequence: Synthetic oligonucleotide
agaauuaaaauguaggggc

SEQ ID NO: 43315 - RNA, 19 nt, Artificial Sequence
  Description of Artificial Sequence: Synthetic oligonucleotide
aguucaauagcacagaauc

SEQ ID NO: 43316 - RNA, 19 nt, Artificial Sequence
  Description of Artificial Sequence: Synthetic oligonucleotide
ucuaguagcucccagaagg

SEQ ID NO: 43317 - RNA, 19 nt, Artificial Sequence
  Description of Artificial Sequence: Synthetic oligonucleotide
aauacuaaccgcuggcucc

SEQ ID NO: 43318 - RNA, 19 nt, Artificial Sequence
  Description of Artificial Sequence: Synthetic oligonucleotide
ugacaaauaacgaaccaag

SEQ ID NO: 43319 - RNA, 19 nt, Artificial Sequence
  Description of Artificial Sequence: Synthetic oligonucleotide
aagucugcuauuuugauau

SEQ ID NO: 43320 - RNA, 19 nt, Artificial Sequence
  Description of Artificial Sequence: Synthetic oligonucleotide
uggauauugacccaugucu

SEQ ID NO: 43321 - RNA, 19 nt, Artificial Sequence
  Description of Artificial Sequence: Synthetic oligonucleotide
augucuguaauacacguag

SEQ ID NO: 43322 - RNA, 19 nt, Artificial Sequence
  Description of Artificial Sequence: Synthetic oligonucleotide
ucugguuaaacaauucucu

SEQ ID NO: 43323 - RNA, 19 nt, Artificial Sequence
  Description of Artificial Sequence: Synthetic oligonucleotide
uuauuucuacugaacgugg

SEQ ID NO: 43324 - RNA, 19 nt, Artificial Sequence
  Description of Artificial Sequence: Synthetic oligonucleotide
aaucugguuaaacaauucu

SEQ ID NO: 43325 - RNA, 19 nt, Artificial Sequence
  Description of Artificial Sequence: Synthetic oligonucleotide
auggaggccacacaaauag

SEQ ID NO: 43326 - RNA, 19 nt, Artificial Sequence
  Description of Artificial Sequence: Synthetic oligonucleotide
cuagcuauugcguaugcgc

SEQ ID NO: 43327 - RNA, 19 nt, Artificial Sequence
  Description of Artificial Sequence: Synthetic oligonucleotide
uuguaugguagcuggaggg

SEQ ID NO: 43328 - RNA, 19 nt, Artificial Sequence
  Description of Artificial Sequence: Synthetic oligonucleotide
aucgagaggaguuuaaaug

SEQ ID NO: 43329 - RNA, 19 nt, Artificial Sequence
  Description of Artificial Sequence: Synthetic oligonucleotide
cuuccaucaauccaguacc

SEQ ID NO: 43330 - RNA, 19 nt, Artificial Sequence
  Description of Artificial Sequence: Synthetic oligonucleotide
uaagggacuccauacaacc

SEQ ID NO: 43331 - RNA, 19 nt, Artificial Sequence
  Description of Artificial Sequence: Synthetic oligonucleotide
uuagaacuuaauaaguuuu

SEQ ID NO: 43332 - RNA, 19 nt, Artificial Sequence
  Description of Artificial Sequence: Synthetic oligonucleotide
agcaacuugaaucuggaga

SEQ ID NO: 43333 - RNA, 19 nt, Artificial Sequence
  Description of Artificial Sequence: Synthetic oligonucleotide
gauggcacgguuaauaggc

SEQ ID NO: 43334 - RNA, 19 nt, Artificial Sequence
  Description of Artificial Sequence: Synthetic oligonucleotide
gacugugucagauucccgg

SEQ ID NO: 43335 - RNA, 19 nt, Artificial Sequence
  Description of Artificial Sequence: Synthetic oligonucleotide
ucuccgaaugcauuagugg

SEQ ID NO: 43336 - RNA, 19 nt, Artificial Sequence
  Description of Artificial Sequence: Synthetic oligonucleotide
uccgucuggauauugaccc

SEQ ID NO: 43337 - RNA, 19 nt, Artificial Sequence
  Description of Artificial Sequence: Synthetic oligonucleotide
augguauuccugcuguugc

SEQ ID NO: 43338 - RNA, 19 nt, Artificial Sequence
  Description of Artificial Sequence: Synthetic oligonucleotide
uugguuucuaucagcagag

SEQ ID NO: 43339 - RNA, 19 nt, Artificial Sequence
  Description of Artificial Sequence: Synthetic oligonucleotide
aacagagacuacuccucgc

SEQ ID NO: 43340 - RNA, 19 nt, Artificial Sequence
  Description of Artificial Sequence: Synthetic oligonucleotide
aguucccuaugauagacuc

SEQ ID NO: 43341 - RNA, 19 nt, Artificial Sequence
  Description of Artificial Sequence: Synthetic oligonucleotide
ucgagaggaguuuaaauga

SEQ ID NO: 43342 - RNA, 19 nt, Artificial Sequence
  Description of Artificial Sequence: Synthetic oligonucleotide
ugaacuuagaagccaacaa

SEQ ID NO: 43343 - RNA, 19 nt, Artificial Sequence
  Description of Artificial Sequence: Synthetic oligonucleotide
uacugaacguggcagcugg

SEQ ID NO: 43344 - RNA, 19 nt, Artificial Sequence
  Description of Artificial Sequence: Synthetic oligonucleotide
uccuauucuagucugugac

SEQ ID NO: 43345 - RNA, 19 nt, Artificial Sequence
  Description of Artificial Sequence: Synthetic oligonucleotide
agaggaguuuaaaugaugg

SEQ ID NO: 43346 - RNA, 19 nt, Artificial Sequence
  Description of Artificial Sequence: Synthetic oligonucleotide
agaacauagauuuuccuuu

SEQ ID NO: 43347 - RNA, 19 nt, Artificial Sequence
  Description of Artificial Sequence: Synthetic oligonucleotide
uguuagaacuuaauaaguu

SEQ ID NO: 43348 - RNA, 19 nt, Artificial Sequence
  Description of Artificial Sequence: Synthetic oligonucleotide
ucguccauaacuuccgugc

SEQ ID NO: 43349 - RNA, 19 nt, Artificial Sequence
  Description of Artificial Sequence: Synthetic oligonucleotide
uaccauguaaacaggucag

SEQ ID NO: 43350 - RNA, 19 nt, Artificial Sequence
  Description of Artificial Sequence: Synthetic oligonucleotide
aacuagcuauugcguaugc

SEQ ID NO: 43351 - RNA, 19 nt, Artificial Sequence
  Description of Artificial Sequence: Synthetic oligonucleotide
  modified_base (4)..(4): a, c, u, g, unknown or other
uaangagcugugcaaacuc

SEQ ID NO: 43352 - RNA, 19 nt, Artificial Sequence
  Description of Artificial Sequence: Synthetic oligonucleotide
  modified_base (7)..(7): a, c, u, g, unknown or other
uuuuaangagcugugcaaa

SEQ ID NO: 43353 - RNA, 19 nt, Artificial Sequence
  Description of Artificial Sequence: Synthetic oligonucleotide
ugaguaacuaaugacccca

SEQ ID NO: 43354 - RNA, 19 nt, Artificial Sequence
  Description of Artificial Sequence: Synthetic oligonucleotide
uggucauacaagcaaacau

SEQ ID NO: 43355 - RNA, 19 nt, Artificial Sequence
  Description of Artificial Sequence: Synthetic oligonucleotide
guaggacugaacuuagaag

SEQ ID NO: 43356 - RNA, 19 nt, Artificial Sequence
  Description of Artificial Sequence: Synthetic oligonucleotide
aauaacgaaccaaggcuuc

SEQ ID NO: 43357 - RNA, 19 nt, Artificial Sequence
  Description of Artificial Sequence: Synthetic oligonucleotide
gaauuaaaauguaggggcc

SEQ ID NO: 43358 - RNA, 19 nt, Artificial Sequence
  Description of Artificial Sequence: Synthetic oligonucleotide
gcaaaagucccucacaacc

SEQ ID NO: 43359 - RNA, 19 nt, Artificial Sequence
  Description of Artificial Sequence: Synthetic oligonucleotide
ucuguaauacacguagaug

SEQ ID NO: 43360 - RNA, 19 nt, Artificial Sequence
  Description of Artificial Sequence: Synthetic oligonucleotide
auugcguaugcgcugcuuc

SEQ ID NO: 43361 - RNA, 19 nt, Artificial Sequence
  Description of Artificial Sequence: Synthetic oligonucleotide
  modified_base (6)..(6): a, c, u, g, unknown or other
uuuaangagcugugcaaac

SEQ ID NO: 43362 - RNA, 19 nt, Artificial Sequence
  Description of Artificial Sequence: Synthetic oligonucleotide
gaacagagacuacuccucg

SEQ ID NO: 43363 - RNA, 19 nt, Artificial Sequence
  Description of Artificial Sequence: Synthetic oligonucleotide
uuucuacugaacguggcag

SEQ ID NO: 43364 - RNA, 19 nt, Artificial Sequence
  Description of Artificial Sequence: Synthetic oligonucleotide
aggaguuuaaaugauggcu

SEQ ID NO: 43365 - RNA, 19 nt, Artificial Sequence
  Description of Artificial Sequence: Synthetic oligonucleotide
ucaucgcuauccaaguuca

SEQ ID NO: 43366 - RNA, 19 nt, Artificial Sequence
  Description of Artificial Sequence: Synthetic oligonucleotide
guauaugccacauuaccuc

SEQ ID NO: 43367 - RNA, 19 nt, Artificial Sequence
  Description of Artificial Sequence: Synthetic oligonucleotide
agccccugaauacuaaccg

SEQ ID NO: 43368 - RNA, 19 nt, Artificial Sequence
  Description of Artificial Sequence: Synthetic oligonucleotide
uauuucuacugaacguggc

SEQ ID NO: 43369 - RNA, 19 nt, Artificial Sequence
  Description of Artificial Sequence: Synthetic oligonucleotide
aguaggacugaacuuagaa

SEQ ID NO: 43370 - RNA, 19 nt, Artificial Sequence
  Description of Artificial Sequence: Synthetic oligonucleotide
uccaccgguacucaagagc

SEQ ID NO: 43371 - RNA, 19 nt, Artificial Sequence
  Description of Artificial Sequence: Synthetic oligonucleotide
cuauucuagucugugacag

SEQ ID NO: 43372 - RNA, 19 nt, Artificial Sequence
  Description of Artificial Sequence: Synthetic oligonucleotide
gagaguaugaauggaggcc

SEQ ID NO: 43373 - RNA, 19 nt, Artificial Sequence
  Description of Artificial Sequence: Synthetic oligonucleotide
cagaaggcggagaacauag

SEQ ID NO: 43374 - RNA, 19 nt, Artificial Sequence
  Description of Artificial Sequence: Synthetic oligonucleotide
cagaaauggauccccaaag

SEQ ID NO: 43375 - RNA, 19 nt, Artificial Sequence
  Description of Artificial Sequence: Synthetic oligonucleotide
ucgucacuguucuggaucg

SEQ ID NO: 43376 - RNA, 19 nt, Artificial Sequence
  Description of Artificial Sequence: Synthetic oligonucleotide
agggucccgacguucagcc

SEQ ID NO: 43377 - RNA, 19 nt, Artificial Sequence
  Description of Artificial Sequence: Synthetic oligonucleotide
ugagcgaagugccggggcg

SEQ ID NO: 43378 - RNA, 19 nt, Artificial Sequence
  Description of Artificial Sequence: Synthetic oligonucleotide
aaugcauuaguggcggcug

SEQ ID NO: 43379 - RNA, 19 nt, Artificial Sequence
  Description of Artificial Sequence: Synthetic oligonucleotide
uugacaaauaacgaaccaa

SEQ ID NO: 43380 - RNA, 19 nt, Artificial Sequence
  Description of Artificial Sequence: Synthetic oligonucleotide
guaccauguaaacagguca

SEQ ID NO: 43381 - RNA, 19 nt, Artificial Sequence
  Description of Artificial Sequence: Synthetic oligonucleotide
aaguacaccagaugccggu

SEQ ID NO: 43382 - RNA, 19 nt, Artificial Sequence
  Description of Artificial Sequence: Synthetic oligonucleotide
aaauaacgaaccaaggcuu

SEQ ID NO: 43383 - RNA, 19 nt, Artificial Sequence
  Description of Artificial Sequence: Synthetic oligonucleotide
cugaauacuaaccgcuggc

SEQ ID NO: 43384 - RNA, 19 nt, Artificial Sequence
  Description of Artificial Sequence: Synthetic oligonucleotide
ugauagacucucgacuggg

SEQ ID NO: 43385 - RNA, 19 nt, Artificial Sequence
  Description of Artificial Sequence: Synthetic oligonucleotide
caagaccucgcucaguccc

SEQ ID NO: 43386 - RNA, 19 nt, Artificial Sequence
  Description of Artificial Sequence: Synthetic oligonucleotide
aaccuccuacuguccaacc

SEQ ID NO: 43387 - RNA, 19 nt, Artificial Sequence
  Description of Artificial Sequence: Synthetic oligonucleotide
caaauaacgaaccaaggcu

SEQ ID NO: 43388 - RNA, 19 nt, Artificial Sequence
  Description of Artificial Sequence: Synthetic oligonucleotide
uccucgcugguuuugagga

SEQ ID NO: 43389 - RNA, 19 nt, Artificial Sequence
  Description of Artificial Sequence: Synthetic oligonucleotide
gaaggauaagcuggguagg

SEQ ID NO: 43390 - RNA, 19 nt, Artificial Sequence
  Description of Artificial Sequence: Synthetic oligonucleotide
uaaaauguaggggccgaag

SEQ ID NO: 43391 - RNA, 19 nt, Artificial Sequence
  Description of Artificial Sequence: Synthetic oligonucleotide
  modified_base (5)..(5): a, c, u, g, unknown or other
uuaangagcugugcaaacu

SEQ ID NO: 43392 - RNA, 19 nt, Artificial Sequence
  Description of Artificial Sequence: Synthetic oligonucleotide
agggccacucaaccuaugc

SEQ ID NO: 43393 - RNA, 19 nt, Artificial Sequence
  Description of Artificial Sequence: Synthetic oligonucleotide
gaggaguuuaaaugauggc

SEQ ID NO: 43394 - RNA, 19 nt, Artificial Sequence
  Description of Artificial Sequence: Synthetic oligonucleotide
aaccuccuauucuagucug

SEQ ID NO: 43395 - RNA, 19 nt, Artificial Sequence
  Description of Artificial Sequence: Synthetic oligonucleotide
auagcacagaaucugguua

SEQ ID NO: 43396 - RNA, 19 nt, Artificial Sequence
  Description of Artificial Sequence: Synthetic oligonucleotide
aaacaaggacaaaaugucu

SEQ ID NO: 43397 - RNA, 19 nt, Artificial Sequence
  Description of Artificial Sequence: Synthetic oligonucleotide
augauagacucucgacugg

SEQ ID NO: 43398 - RNA, 19 nt, Artificial Sequence
  Description of Artificial Sequence: Synthetic oligonucleotide
acguucagccccugaauac

SEQ ID NO: 43399 - RNA, 19 nt, Artificial Sequence
  Description of Artificial Sequence: Synthetic oligonucleotide
ugacaaguggggagggucc

SEQ ID NO: 43400 - RNA, 19 nt, Artificial Sequence
  Description of Artificial Sequence: Synthetic oligonucleotide
gauauugacccaugucuuc

SEQ ID NO: 43401 - RNA, 19 nt, Artificial Sequence
  Description of Artificial Sequence: Synthetic oligonucleotide
aaacuagcuauugcguaug

SEQ ID NO: 43402 - RNA, 19 nt, Artificial Sequence
  Description of Artificial Sequence: Synthetic oligonucleotide
uccguagggauguaucccc

SEQ ID NO: 43403 - RNA, 19 nt, Artificial Sequence
  Description of Artificial Sequence: Synthetic oligonucleotide
uucuagucugugacagagg

SEQ ID NO: 43404 - RNA, 19 nt, Artificial Sequence
  Description of Artificial Sequence: Synthetic oligonucleotide
aguuguaugguagcuggag

SEQ ID NO: 43405 - RNA, 19 nt, Artificial Sequence
  Description of Artificial Sequence: Synthetic oligonucleotide
uucccaugcucuccgaaug

SEQ ID NO: 43406 - RNA, 19 nt, Artificial Sequence
  Description of Artificial Sequence: Synthetic oligonucleotide
aguaccauguaaacagguc

SEQ ID NO: 43407 - RNA, 19 nt, Artificial Sequence
  Description of Artificial Sequence: Synthetic oligonucleotide
ugucguggcaaccuuuggu

SEQ ID NO: 43408 - RNA, 19 nt, Artificial Sequence
  Description of Artificial Sequence: Synthetic oligonucleotide
uaucgagaggaguuuaaau

SEQ ID NO: 43409 - RNA, 19 nt, Artificial Sequence
  Description of Artificial Sequence: Synthetic oligonucleotide
agaguaugaauggaggcca

SEQ ID NO: 43410 - RNA, 19 nt, Artificial Sequence
  Description of Artificial Sequence: Synthetic oligonucleotide
ucaggccgagcauucagag

SEQ ID NO: 43411 - RNA, 19 nt, Artificial Sequence
  Description of Artificial Sequence: Synthetic oligonucleotide
agauucccggcugagagag

SEQ ID NO: 43412 - RNA, 19 nt, Artificial Sequence
  Description of Artificial Sequence: Synthetic oligonucleotide
gaauacuaaccgcuggcuc

SEQ ID NO: 43413 - RNA, 19 nt, Artificial Sequence
  Description of Artificial Sequence: Synthetic oligonucleotide
cacaugacuggaccaacgg

SEQ ID NO: 43414 - RNA, 19 nt, Artificial Sequence
  Description of Artificial Sequence: Synthetic oligonucleotide
uucuacugaacguggcagc

SEQ ID NO: 43415 - RNA, 19 nt, Artificial Sequence
  Description of Artificial Sequence: Synthetic oligonucleotide
acaaacccacucaagggac

SEQ ID NO: 43416 - RNA, 19 nt, Artificial Sequence
  Description of Artificial Sequence: Synthetic oligonucleotide
auagacucucgacugggca

SEQ ID NO: 43417 - RNA, 19 nt, Artificial Sequence
  Description of Artificial Sequence: Synthetic oligonucleotide
auauugguuacuacaauau

SEQ ID NO: 43418 - RNA, 19 nt, Artificial Sequence
  Description of Artificial Sequence: Synthetic oligonucleotide
gggaagggcauauauacac

SEQ ID NO: 43419 - RNA, 19 nt, Artificial Sequence
  Description of Artificial Sequence: Synthetic oligonucleotide
uccauaacuuccgugcgug

SEQ ID NO: 43420 - RNA, 19 nt, Artificial Sequence
  Description of Artificial Sequence: Synthetic oligonucleotide
acaagaccucgcucagucc

SEQ ID NO: 43421 - RNA, 19 nt, Artificial Sequence
  Description of Artificial Sequence: Synthetic oligonucleotide
acagagacuacuccucgcu

SEQ ID NO: 43422 - RNA, 19 nt, Artificial Sequence
  Description of Artificial Sequence: Synthetic oligonucleotide
  modified_base (8)..(8): a, c, u, g, unknown or other
cuuuuaangagcugugcaa

SEQ ID NO: 43423 - RNA, 19 nt, Artificial Sequence
  Description of Artificial Sequence: Synthetic oligonucleotide
cauaacuuccgugcguggg

SEQ ID NO: 43424 - RNA, 19 nt, Artificial Sequence
  Description of Artificial Sequence: Synthetic oligonucleotide
auauugcgcauauugguua

SEQ ID NO: 43425 - RNA, 19 nt, Artificial Sequence
  Description of Artificial Sequence: Synthetic oligonucleotide
cacguagauggauaucgag

SEQ ID NO: 43426 - RNA, 19 nt, Artificial Sequence
  Description of Artificial Sequence: Synthetic oligonucleotide
  modified_base (3)..(3): a, c, u, g, unknown or other
aangagcugugcaaacucu

SEQ ID NO: 43427 - RNA, 19 nt, Artificial Sequence
  Description of Artificial Sequence: Synthetic oligonucleotide
aaacccacucaagggacag

SEQ ID NO: 43428 - RNA, 19 nt, Artificial Sequence
  Description of Artificial Sequence: Synthetic oligonucleotide
cauacaaccuccuauucua

SEQ ID NO: 43429 - RNA, 19 nt, Artificial Sequence
  Description of Artificial Sequence: Synthetic oligonucleotide
  modified_base (9)..(9): a, c, u, g, unknown or other
cuugaaggnugugggaacc

SEQ ID NO: 43430 - RNA, 19 nt, Artificial Sequence
  Description of Artificial Sequence: Synthetic oligonucleotide
uauugcgcauauugguuac

SEQ ID NO: 43431 - RNA, 19 nt, Artificial Sequence
  Description of Artificial Sequence: Synthetic oligonucleotide
agucagaacagagacuacu

SEQ ID NO: 43432 - RNA, 19 nt, Artificial Sequence
  Description of Artificial Sequence: Synthetic oligonucleotide
aaaguggugcaccguugcu

SEQ ID NO: 43433 - RNA, 19 nt, Artificial Sequence
  Description of Artificial Sequence: Synthetic oligonucleotide
auaacuuccgugcgugggu

SEQ ID NO: 43434 - RNA, 19 nt, Artificial Sequence
  Description of Artificial Sequence: Synthetic oligonucleotide
aguaacuaaugaccccaug

SEQ ID NO: 43435 - RNA, 19 nt, Artificial Sequence
  Description of Artificial Sequence: Synthetic oligonucleotide
agcggcggccuacuggugc

SEQ ID NO: 43436 - RNA, 19 nt, Artificial Sequence
  Description of Artificial Sequence: Synthetic oligonucleotide
aaguggugcaccguugcug

SEQ ID NO: 43437 - RNA, 19 nt, Artificial Sequence
  Description of Artificial Sequence: Synthetic oligonucleotide
gaagcaagcuguugguguc

SEQ ID NO: 43438 - RNA, 19 nt, Artificial Sequence
  Description of Artificial Sequence: Synthetic oligonucleotide
cucuccgaaugcauuagug

SEQ ID NO: 43439 - RNA, 19 nt, Artificial Sequence
  Description of Artificial Sequence: Synthetic oligonucleotide
  modified_base (2)..(2): a, c, u, g, unknown or other
angagcugugcaaacucug

SEQ ID NO: 43440 - RNA, 19 nt, Artificial Sequence
  Description of Artificial Sequence: Synthetic oligonucleotide
cuacacgccggccugcucc

SEQ ID NO: 43441 - RNA, 19 nt, Artificial Sequence
  Description of Artificial Sequence: Synthetic oligonucleotide
cagccgagaguaugaaugg

SEQ ID NO: 43442 - RNA, 19 nt, Artificial Sequence
  Description of Artificial Sequence: Synthetic oligonucleotide
  modified_base (6)..(6): a, c, u, g, unknown or other
gaaggnugugggaaccugc

SEQ ID NO: 43443 - RNA, 19 nt, Artificial Sequence
  Description of Artificial Sequence: Synthetic oligonucleotide
uagcacagaaucugguuaa

SEQ ID NO: 43444 - RNA, 19 nt, Artificial Sequence
  Description of Artificial Sequence: Synthetic oligonucleotide
guuuaaaugauggcugcca

SEQ ID NO: 43445 - RNA, 19 nt, Artificial Sequence
  Description of Artificial Sequence: Synthetic oligonucleotide
auuaaaauguaggggccga

SEQ ID NO: 43446 - RNA, 19 nt, Artificial Sequence
  Description of Artificial Sequence: Synthetic oligonucleotide
ucgacugggcaccuuauuu

SEQ ID NO: 43447 - RNA, 19 nt, Artificial Sequence
  Description of Artificial Sequence: Synthetic oligonucleotide
cguagauggauaucgagag

SEQ ID NO: 43448 - RNA, 19 nt, Artificial Sequence
  Description of Artificial Sequence: Synthetic oligonucleotide
acuagcuauugcguaugcg

SEQ ID NO: 43449 - RNA, 19 nt, Artificial Sequence
  Description of Artificial Sequence: Synthetic oligonucleotide
ucuacugaacguggcagcu

SEQ ID NO: 43450 - RNA, 19 nt, Artificial Sequence
  Description of Artificial Sequence: Synthetic oligonucleotide
aagcccguugugaucuggc

SEQ ID NO: 43451 - RNA, 19 nt, Artificial Sequence
  Description of Artificial Sequence: Synthetic oligonucleotide
caccuuauuucuacugaac

SEQ ID NO: 43452 - RNA, 19 nt, Artificial Sequence
  Description of Artificial Sequence: Synthetic oligonucleotide
uaacgaaccaaggcuucag

SEQ ID NO: 43453 - RNA, 19 nt, Artificial Sequence
  Description of Artificial Sequence: Synthetic oligonucleotide
uacaaccuccuauucuagu

SEQ ID NO: 43454 - RNA, 19 nt, Artificial Sequence
  Description of Artificial Sequence: Synthetic oligonucleotide
gucguggcaaccuuugguc

SEQ ID NO: 43455 - RNA, 19 nt, Artificial Sequence
  Description of Artificial Sequence: Synthetic oligonucleotide
uauucuagucugugacaga

SEQ ID NO: 43456 - RNA, 19 nt, Artificial Sequence
  Description of Artificial Sequence: Synthetic oligonucleotide
uuccaucaauccaguacca

SEQ ID NO: 43457 - RNA, 19 nt, Artificial Sequence
  Description of Artificial Sequence: Synthetic oligonucleotide
cuaugauagacucucgacu

SEQ ID NO: 43458 - RNA, 19 nt, Artificial Sequence
  Description of Artificial Sequence: Synthetic oligonucleotide
cuggauauugacccauguc

SEQ ID NO: 43459 - RNA, 19 nt, Artificial Sequence
  Description of Artificial Sequence: Synthetic oligonucleotide
ucaaccuaugcuggguucu

SEQ ID NO: 43460 - RNA, 19 nt, Artificial Sequence
  Description of Artificial Sequence: Synthetic oligonucleotide
cucacaacccaagcggcgg

SEQ ID NO: 43461 - RNA, 19 nt, Artificial Sequence
  Description of Artificial Sequence: Synthetic oligonucleotide
  modified_base (5)..(5): a, c, u, g, unknown or other
aaggnugugggaaccugcu

SEQ ID NO: 43462 - RNA, 19 nt, Artificial Sequence
  Description of Artificial Sequence: Synthetic oligonucleotide
ucccuaugauagacucucg

SEQ ID NO: 43463 - RNA, 19 nt, Artificial Sequence
  Description of Artificial Sequence: Synthetic oligonucleotide
caucaauccaguaccaugu

SEQ ID NO: 43464 - RNA, 19 nt, Artificial Sequence
  Description of Artificial Sequence: Synthetic oligonucleotide
gcagccgagaguaugaaug

SEQ ID NO: 43465 - RNA, 19 nt, Artificial Sequence
  Description of Artificial Sequence: Synthetic oligonucleotide
auauccuccuacacgccgg

SEQ ID NO: 43466 - RNA, 19 nt, Artificial Sequence
  Description of Artificial Sequence: Synthetic oligonucleotide
guaugaauggaggccacac

SEQ ID NO: 43467 - RNA, 19 nt, Artificial Sequence
  Description of Artificial Sequence: Synthetic oligonucleotide
aaccaguuguaugguagcu

SEQ ID NO: 43468 - RNA, 19 nt, Artificial Sequence
  Description of Artificial Sequence: Synthetic oligonucleotide
acauuaccucugcacagcu

SEQ ID NO: 43469 - RNA, 19 nt, Artificial Sequence
  Description of Artificial Sequence: Synthetic oligonucleotide
ggccacucaaccuaugcug

SEQ ID NO: 43470 - RNA, 19 nt, Artificial Sequence
  Description of Artificial Sequence: Synthetic oligonucleotide
gguacgagucagcaguuug

SEQ ID NO: 43471 - RNA, 19 nt, Artificial Sequence
  Description of Artificial Sequence: Synthetic oligonucleotide
ucguggcaaccuuugguca

SEQ ID NO: 43472 - RNA, 19 nt, Artificial Sequence
  Description of Artificial Sequence: Synthetic oligonucleotide
uugcguaugcgcugcuuca

SEQ ID NO: 43473 - RNA, 19 nt, Artificial Sequence
  Description of Artificial Sequence: Synthetic oligonucleotide
auugacugagggccgaguu

SEQ ID NO: 43474 - RNA, 19 nt, Artificial Sequence
  Description of Artificial Sequence: Synthetic oligonucleotide
cucgcugguuuugaggacc

SEQ ID NO: 43475 - RNA, 19 nt, Artificial Sequence
  Description of Artificial Sequence: Synthetic oligonucleotide
  modified_base (15)..(15): a, c, u, g, unknown or other
uugcugccuuuuaangagc

SEQ ID NO: 43476 - RNA, 19 nt, Artificial Sequence
  Description of Artificial Sequence: Synthetic oligonucleotide
auggaacaggucccuagca

SEQ ID NO: 43477 - RNA, 19 nt, Artificial Sequence
  Description of Artificial Sequence: Synthetic oligonucleotide
auggauaucgagaggaguu

SEQ ID NO: 43478 - RNA, 19 nt, Artificial Sequence
  Description of Artificial Sequence: Synthetic oligonucleotide
ugcgcauauugguuacuac

SEQ ID NO: 43479 - RNA, 19 nt, Artificial Sequence
  Description of Artificial Sequence: Synthetic oligonucleotide
ccgagaguaugaauggagg

SEQ ID NO: 43480 - RNA, 19 nt, Artificial Sequence
  Description of Artificial Sequence: Synthetic oligonucleotide
aguuugcaagauggcacgg

SEQ ID NO: 43481 - RNA, 19 nt, Artificial Sequence
  Description of Artificial Sequence: Synthetic oligonucleotide
ccuaugauagacucucgac

SEQ ID NO: 43482 - RNA, 19 nt, Artificial Sequence
  Description of Artificial Sequence: Synthetic oligonucleotide
ugcucgugaccucccagac

SEQ ID NO: 43483 - RNA, 19 nt, Artificial Sequence
  Description of Artificial Sequence: Synthetic oligonucleotide
gacauucgggcagagcuca

SEQ ID NO: 43484 - RNA, 19 nt, Artificial Sequence
  Description of Artificial Sequence: Synthetic oligonucleotide
ccugaauacuaaccgcugg

SEQ ID NO: 43485 - RNA, 19 nt, Artificial Sequence
  Description of Artificial Sequence: Synthetic oligonucleotide
auacacguagauggauauc

SEQ ID NO: 43486 - RNA, 19 nt, Artificial Sequence
  Description of Artificial Sequence: Synthetic oligonucleotide
guuggauguuggcuccucc

SEQ ID NO: 43487 - RNA, 19 nt, Artificial Sequence
  Description of Artificial Sequence: Synthetic oligonucleotide
  modified_base (4)..(4): a, c, u, g, unknown or other
aggnugugggaaccugcug

SEQ ID NO: 43488 - RNA, 19 nt, Artificial Sequence
  Description of Artificial Sequence: Synthetic oligonucleotide
agggccgaguuggauacac

SEQ ID NO: 43489 - RNA, 19 nt, Artificial Sequence
  Description of Artificial Sequence: Synthetic oligonucleotide
ccaucaauccaguaccaug

SEQ ID NO: 43490 - RNA, 19 nt, Artificial Sequence
  Description of Artificial Sequence: Synthetic oligonucleotide
gacguucagccccugaaua

SEQ ID NO: 43491 - RNA, 19 nt, Artificial Sequence
  Description of Artificial Sequence: Synthetic oligonucleotide
ugcucuccgaaugcauuag

SEQ ID NO: 43492 - RNA, 19 nt, Artificial Sequence
  Description of Artificial Sequence: Synthetic oligonucleotide
gauggugguacgagucagc

SEQ ID NO: 43493 - RNA, 19 nt, Artificial Sequence
  Description of Artificial Sequence: Synthetic oligonucleotide
accuccuacuguccaacca

SEQ ID NO: 43494 - RNA, 19 nt, Artificial Sequence
  Description of Artificial Sequence: Synthetic oligonucleotide
cucaaccuaugcuggguuc

SEQ ID NO: 43495 - RNA, 19 nt, Artificial Sequence
  Description of Artificial Sequence: Synthetic oligonucleotide
  modified_base (9)..(9): a, c, u, g, unknown or other
ccuuuuaangagcugugca

SEQ ID NO: 43496 - RNA, 19 nt, Artificial Sequence
  Description of Artificial Sequence: Synthetic oligonucleotide
aacuuccgugcguggguca

SEQ ID NO: 43497 - RNA, 19 nt, Artificial Sequence
  Description of Artificial Sequence: Synthetic oligonucleotide
gggccugacucacaguucc

SEQ ID NO: 43498 - RNA, 19 nt, Artificial Sequence
  Description of Artificial Sequence: Synthetic oligonucleotide
auacaaccuccuauucuag

SEQ ID NO: 43499 - RNA, 19 nt, Artificial Sequence
  Description of Artificial Sequence: Synthetic oligonucleotide
gccacauuaccucugcaca

SEQ ID NO: 43500 - RNA, 19 nt, Artificial Sequence
  Description of Artificial Sequence: Synthetic oligonucleotide
gauaucgagaggaguuuaa

SEQ ID NO: 43501 - RNA, 19 nt, Artificial Sequence
  Description of Artificial Sequence: Synthetic oligonucleotide
auaucgagaggaguuuaaa

SEQ ID NO: 43502 - RNA, 19 nt, Artificial Sequence
  Description of Artificial Sequence: Synthetic oligonucleotide
uuaccacgcagccgagagu

SEQ ID NO: 43503 - RNA, 19 nt, Artificial Sequence
  Description of Artificial Sequence: Synthetic oligonucleotide
uugcugcugcugcugcugc

SEQ ID NO: 43504 - RNA, 19 nt, Artificial Sequence
  Description of Artificial Sequence: Synthetic oligonucleotide
uacgagucagcaguuugau

SEQ ID NO: 43505 - RNA, 19 nt, Artificial Sequence
  Description of Artificial Sequence: Synthetic oligonucleotide
  modified_base (8)..(8): a, c, u, g, unknown or other
uugaaggnugugggaaccu

SEQ ID NO: 43506 - RNA, 19 nt, Artificial Sequence
  Description of Artificial Sequence: Synthetic oligonucleotide
guguuagaacuuaauaagu

SEQ ID NO: 43507 - RNA, 19 nt, Artificial Sequence
  Description of Artificial Sequence: Synthetic oligonucleotide
acucaaccuaugcuggguu

SEQ ID NO: 43508 - RNA, 19 nt, Artificial Sequence
  Description of Artificial Sequence: Synthetic oligonucleotide
uggcacgguuaauaggcuc

SEQ ID NO: 43509 - RNA, 19 nt, Artificial Sequence
  Description of Artificial Sequence: Synthetic oligonucleotide
gugauggugguacgaguca

SEQ ID NO: 43510 - RNA, 19 nt, Artificial Sequence
  Description of Artificial Sequence: Synthetic oligonucleotide
gauggauaucgagaggagu

SEQ ID NO: 43511 - RNA, 19 nt, Artificial Sequence
  Description of Artificial Sequence: Synthetic oligonucleotide
auacuaaccgcuggcuccu

SEQ ID NO: 43512 - RNA, 19 nt, Artificial Sequence
  Description of Artificial Sequence: Synthetic oligonucleotide
aggucccuagcaaagcucu

SEQ ID NO: 43513 - RNA, 19 nt, Artificial Sequence
  Description of Artificial Sequence: Synthetic oligonucleotide
cagagacuacuccucgcug

SEQ ID NO: 43514 - RNA, 19 nt, Artificial Sequence
  Description of Artificial Sequence: Synthetic oligonucleotide
aggggagauuggaggauac

SEQ ID NO: 43515 - RNA, 19 nt, Artificial Sequence
  Description of Artificial Sequence: Synthetic oligonucleotide
uguaggggccgaagaugcu

SEQ ID NO: 43516 - RNA, 19 nt, Artificial Sequence
  Description of Artificial Sequence: Synthetic oligonucleotide
aguaugaauggaggccaca

SEQ ID NO: 43517 - RNA, 19 nt, Artificial Sequence
  Description of Artificial Sequence: Synthetic oligonucleotide
ucauugacugagggccgag

SEQ ID NO: 43518 - RNA, 19 nt, Artificial Sequence
  Description of Artificial Sequence: Synthetic oligonucleotide
gccacucaaccuaugcugg

SEQ ID NO: 43519 - RNA, 19 nt, Artificial Sequence
  Description of Artificial Sequence: Synthetic oligonucleotide
uuccgugcgugggucagcc

SEQ ID NO: 43520 - RNA, 19 nt, Artificial Sequence
  Description of Artificial Sequence: Synthetic oligonucleotide
ugucugguauaugccacau

SEQ ID NO: 43521 - RNA, 19 nt, Artificial Sequence
  Description of Artificial Sequence: Synthetic oligonucleotide
cgguuaauaggcucacugg

SEQ ID NO: 43522 - RNA, 19 nt, Artificial Sequence
  Description of Artificial Sequence: Synthetic oligonucleotide
caggucccuagcaaagcuc

SEQ ID NO: 43523 - RNA, 19 nt, Artificial Sequence
  Description of Artificial Sequence: Synthetic oligonucleotide
guugcugcugcugcugcug

SEQ ID NO: 43524 - RNA, 19 nt, Artificial Sequence
  Description of Artificial Sequence: Synthetic oligonucleotide
uccaucaauccaguaccau

SEQ ID NO: 43525 - RNA, 19 nt, Artificial Sequence
  Description of Artificial Sequence: Synthetic oligonucleotide
cauauugcgcauauugguu

SEQ ID NO: 43526 - RNA, 19 nt, Artificial Sequence
  Description of Artificial Sequence: Synthetic oligonucleotide
ggauguauccccagcuccc

SEQ ID NO: 43527 - RNA, 19 nt, Artificial Sequence
  Description of Artificial Sequence: Synthetic oligonucleotide
uugcgcauauugguuacua

SEQ ID NO: 43528 - RNA, 19 nt, Artificial Sequence
  Description of Artificial Sequence: Synthetic oligonucleotide
augaccccaugauguggag

SEQ ID NO: 43529 - RNA, 19 nt, Artificial Sequence
  Description of Artificial Sequence: Synthetic oligonucleotide
aggaagcuaagggacucca

SEQ ID NO: 43530 - RNA, 19 nt, Artificial Sequence
  Description of Artificial Sequence: Synthetic oligonucleotide
gccgagaguaugaauggag

SEQ ID NO: 43531 - RNA, 19 nt, Artificial Sequence
  Description of Artificial Sequence: Synthetic oligonucleotide
aucaauccaguaccaugua

SEQ ID NO: 43532 - RNA, 19 nt, Artificial Sequence
  Description of Artificial Sequence: Synthetic oligonucleotide
guacgagucagcaguuuga

SEQ ID NO: 43533 - RNA, 19 nt, Artificial Sequence
  Description of Artificial Sequence: Synthetic oligonucleotide
uaacuuccgugcguggguc

SEQ ID NO: 43534 - RNA, 19 nt, Artificial Sequence
  Description of Artificial Sequence: Synthetic oligonucleotide
ccgaaugcauuaguggcgg

SEQ ID NO: 43535 - RNA, 19 nt, Artificial Sequence
  Description of Artificial Sequence: Synthetic oligonucleotide
gcagccgaauguccgagug

SEQ ID NO: 43536 - RNA, 19 nt, Artificial Sequence
  Description of Artificial Sequence: Synthetic oligonucleotide
cuccuauucuagucuguga

SEQ ID NO: 43537 - RNA, 19 nt, Artificial Sequence
  Description of Artificial Sequence: Synthetic oligonucleotide
uggugucaguggagaagga

SEQ ID NO: 43538 - RNA, 19 nt, Artificial Sequence
  Description of Artificial Sequence: Synthetic oligonucleotide
gaguaugaauggaggccac

SEQ ID NO: 43539 - RNA, 19 nt, Artificial Sequence
  Description of Artificial Sequence: Synthetic oligonucleotide
gcggagaacauagauuuuc

SEQ ID NO: 43540 - RNA, 19 nt, Artificial Sequence
  Description of Artificial Sequence: Synthetic oligonucleotide
agcccguugugaucuggca

SEQ ID NO: 43541 - RNA, 19 nt, Artificial Sequence
  Description of Artificial Sequence: Synthetic oligonucleotide
gcaugcaguuggauguugg

SEQ ID NO: 43542 - RNA, 19 nt, Artificial Sequence
  Description of Artificial Sequence: Synthetic oligonucleotide
ggaccauggaacagguccc

SEQ ID NO: 43543 - RNA, 19 nt, Artificial Sequence
  Description of Artificial Sequence: Synthetic oligonucleotide
gcaguucccuaugauagac

SEQ ID NO: 43544 - RNA, 19 nt, Artificial Sequence
  Description of Artificial Sequence: Synthetic oligonucleotide
ugcugcugcugcugcugcc

SEQ ID NO: 43545 - RNA, 19 nt, Artificial Sequence
  Description of Artificial Sequence: Synthetic oligonucleotide
gaagugccggggcgaggag

SEQ ID NO: 43546 - RNA, 19 nt, Artificial Sequence
  Description of Artificial Sequence: Synthetic oligonucleotide
caagcccguugugaucugg

SEQ ID NO: 43547 - RNA, 19 nt, Artificial Sequence
  Description of Artificial Sequence: Synthetic oligonucleotide
gggccagauaauguucuag

SEQ ID NO: 43548 - RNA, 19 nt, Artificial Sequence
  Description of Artificial Sequence: Synthetic oligonucleotide
guccaccgguacucaagag

SEQ ID NO: 43549 - RNA, 19 nt, Artificial Sequence
  Description of Artificial Sequence: Synthetic oligonucleotide
gagacuacuccucgcuggu

SEQ ID NO: 43550 - RNA, 19 nt, Artificial Sequence
  Description of Artificial Sequence: Synthetic oligonucleotide
agaugccgguucccagaag

SEQ ID NO: 43551 - RNA, 19 nt, Artificial Sequence
  Description of Artificial Sequence: Synthetic oligonucleotide
uuggauacacaagcccguu

SEQ ID NO: 43552 - RNA, 19 nt, Artificial Sequence
  Description of Artificial Sequence: Synthetic oligonucleotide
guguccguagggauguauc

SEQ ID NO: 43553 - RNA, 19 nt, Artificial Sequence
  Description of Artificial Sequence: Synthetic oligonucleotide
caucgcuauccaaguucac

SEQ ID NO: 43554 - RNA, 19 nt, Artificial Sequence
  Description of Artificial Sequence: Synthetic oligonucleotide
cauccgagcucuccucauc

SEQ ID NO: 43555 - RNA, 19 nt, Artificial Sequence
  Description of Artificial Sequence: Synthetic oligonucleotide
gacuacuccucgcugguuu

SEQ ID NO: 43556 - RNA, 19 nt, Artificial Sequence
  Description of Artificial Sequence: Synthetic oligonucleotide
agugccggggcgaggagca

SEQ ID NO: 43557 - RNA, 19 nt, Artificial Sequence
  Description of Artificial Sequence: Synthetic oligonucleotide
cucacauaagcaguccucu

SEQ ID NO: 43558 - RNA, 19 nt, Artificial Sequence
  Description of Artificial Sequence: Synthetic oligonucleotide
ggccgaguuggauacacaa

SEQ ID NO: 43559 - RNA, 19 nt, Artificial Sequence
  Description of Artificial Sequence: Synthetic oligonucleotide
caccgguacucaagagcag

SEQ ID NO: 43560 - RNA, 19 nt, Artificial Sequence
  Description of Artificial Sequence: Synthetic oligonucleotide
auugcgcauauugguuacu

SEQ ID NO: 43561 - RNA, 19 nt, Artificial Sequence
  Description of Artificial Sequence: Synthetic oligonucleotide
ggcacgguuaauaggcuca

SEQ ID NO: 43562 - RNA, 19 nt, Artificial Sequence
  Description of Artificial Sequence: Synthetic oligonucleotide
acacguagauggauaucga

SEQ ID NO: 43563 - RNA, 19 nt, Artificial Sequence
  Description of Artificial Sequence: Synthetic oligonucleotide
caagcggcggccuacuggu

SEQ ID NO: 43564 - RNA, 19 nt, Artificial Sequence
  Description of Artificial Sequence: Synthetic oligonucleotide
gguccaccgguacucaaga

SEQ ID NO: 43565 - RNA, 19 nt, Artificial Sequence
  Description of Artificial Sequence: Synthetic oligonucleotide
ugggguugauuagcugaac

SEQ ID NO: 43566 - RNA, 19 nt, Artificial Sequence
  Description of Artificial Sequence: Synthetic oligonucleotide
cugcugcugcugcugcugc

SEQ ID NO: 43567 - RNA, 19 nt, Artificial Sequence
  Description of Artificial Sequence: Synthetic oligonucleotide
cccucacaacccaagcggc

SEQ ID NO: 43568 - RNA, 19 nt, Artificial Sequence
  Description of Artificial Sequence: Synthetic oligonucleotide
gcaccuuauuucuacugaa

SEQ ID NO: 43569 - RNA, 19 nt, Artificial Sequence
  Description of Artificial Sequence: Synthetic oligonucleotide
gcugcugcugcugcugccg

SEQ ID NO: 43570 - RNA, 19 nt, Artificial Sequence
  Description of Artificial Sequence: Synthetic oligonucleotide
agccgagaguaugaaugga

SEQ ID NO: 43571 - RNA, 19 nt, Artificial Sequence
  Description of Artificial Sequence: Synthetic oligonucleotide
cccgggagugaagagauug

SEQ ID NO: 43572 - RNA, 19 nt, Artificial Sequence
  Description of Artificial Sequence: Synthetic oligonucleotide
ggccagauaauguucuagu

SEQ ID NO: 43573 - RNA, 19 nt, Artificial Sequence
  Description of Artificial Sequence: Synthetic oligonucleotide
acgagucagcaguuugaua

SEQ ID NO: 43574 - RNA, 19 nt, Artificial Sequence
  Description of Artificial Sequence: Synthetic oligonucleotide
cacaagcccguugugaucu

SEQ ID NO: 43575 - RNA, 19 nt, Artificial Sequence
  Description of Artificial Sequence: Synthetic oligonucleotide
uauugcguaugcgcugcuu

SEQ ID NO: 43576 - RNA, 19 nt, Artificial Sequence
  Description of Artificial Sequence: Synthetic oligonucleotide
ccuauucuagucugugaca

SEQ ID NO: 43577 - RNA, 19 nt, Artificial Sequence
  Description of Artificial Sequence: Synthetic oligonucleotide
ugggccagauaauguucua

SEQ ID NO: 43578 - RNA, 19 nt, Artificial Sequence
  Description of Artificial Sequence: Synthetic oligonucleotide
ccgguacucaagagcagag

SEQ ID NO: 43579 - RNA, 19 nt, Artificial Sequence
  Description of Artificial Sequence: Synthetic oligonucleotide
auggauccccaaaggaaaa

SEQ ID NO: 43580 - RNA, 19 nt, Artificial Sequence
  Description of Artificial Sequence: Synthetic oligonucleotide
auguuaggggucaccugca

SEQ ID NO: 43581 - RNA, 19 nt, Artificial Sequence
  Description of Artificial Sequence: Synthetic oligonucleotide
agcgaagugccggggcgag

SEQ ID NO: 43582 - RNA, 19 nt, Artificial Sequence
  Description of Artificial Sequence: Synthetic oligonucleotide
cuccauacaaccuccuauu

SEQ ID NO: 43583 - RNA, 19 nt, Artificial Sequence
  Description of Artificial Sequence: Synthetic oligonucleotide
ccacucaaccuaugcuggg

SEQ ID NO: 43584 - RNA, 19 nt, Artificial Sequence
  Description of Artificial Sequence: Synthetic oligonucleotide
cccugaauacuaaccgcug

SEQ ID NO: 43585 - RNA, 19 nt, Artificial Sequence
  Description of Artificial Sequence: Synthetic oligonucleotide
ugcugcugcugcugcugcu

SEQ ID NO: 43586 - RNA, 19 nt, Artificial Sequence
  Description of Artificial Sequence: Synthetic oligonucleotide
cguccauaacuuccgugcg

SEQ ID NO: 43587 - RNA, 19 nt, Artificial Sequence
  Description of Artificial Sequence: Synthetic oligonucleotide
gaguaggacugaacuuaga

SEQ ID NO: 43588 - RNA, 19 nt, Artificial Sequence
  Description of Artificial Sequence: Synthetic oligonucleotide
ccauaacuuccgugcgugg

SEQ ID NO: 43589 - RNA, 19 nt, Artificial Sequence
  Description of Artificial Sequence: Synthetic oligonucleotide
acaagcccguugugaucug

SEQ ID NO: 43590 - RNA, 19 nt, Artificial Sequence
  Description of Artificial Sequence: Synthetic oligonucleotide
ccgggagugaagagauugc

SEQ ID NO: 43591 - RNA, 19 nt, Artificial Sequence
  Description of Artificial Sequence: Synthetic oligonucleotide
agagauugcugaagccaaa

SEQ ID NO: 43592 - RNA, 19 nt, Artificial Sequence
  Description of Artificial Sequence: Synthetic oligonucleotide
auaggcucacuggcuuuca

SEQ ID NO: 43593 - RNA, 19 nt, Artificial Sequence
  Description of Artificial Sequence: Synthetic oligonucleotide
gggccgaagaugcuaggga

SEQ ID NO: 43594 - RNA, 19 nt, Artificial Sequence
  Description of Artificial Sequence: Synthetic oligonucleotide
ccuacaugaucaagaauua

SEQ ID NO: 43595 - RNA, 19 nt, Artificial Sequence
  Description of Artificial Sequence: Synthetic oligonucleotide
cgcauauugguuacuacaa

SEQ ID NO: 43596 - RNA, 19 nt, Artificial Sequence
  Description of Artificial Sequence: Synthetic oligonucleotide
auggcacgguuaauaggcu

SEQ ID NO: 43597 - RNA, 19 nt, Artificial Sequence
  Description of Artificial Sequence: Synthetic oligonucleotide
guccauaacuuccgugcgu

SEQ ID NO: 43598 - RNA, 19 nt, Artificial Sequence
  Description of Artificial Sequence: Synthetic oligonucleotide
cgaauguccgaguggccag

SEQ ID NO: 43599 - RNA, 19 nt, Artificial Sequence
  Description of Artificial Sequence: Synthetic oligonucleotide
ccuccuauucuagucugug

SEQ ID NO: 43600 - RNA, 19 nt, Artificial Sequence
  Description of Artificial Sequence: Synthetic oligonucleotide
cucucgacugggcaccuua

SEQ ID NO: 43601 - RNA, 19 nt, Artificial Sequence
  Description of Artificial Sequence: Synthetic oligonucleotide
ggaucguguggugucucug

SEQ ID NO: 43602 - RNA, 19 nt, Artificial Sequence
  Description of Artificial Sequence: Synthetic oligonucleotide
ggcauacccaugggugggg

SEQ ID NO: 43603 - RNA, 19 nt, Artificial Sequence
  Description of Artificial Sequence: Synthetic oligonucleotide
ggguugauuagcugaacuu

SEQ ID NO: 43604 - RNA, 19 nt, Artificial Sequence
  Description of Artificial Sequence: Synthetic oligonucleotide
ccgugcgugggucagccac

SEQ ID NO: 43605 - RNA, 19 nt, Artificial Sequence
  Description of Artificial Sequence: Synthetic oligonucleotide
cugaacaauucaugguauu

SEQ ID NO: 43606 - RNA, 19 nt, Artificial Sequence
  Description of Artificial Sequence: Synthetic oligonucleotide
guuugcaagauggcacggu

SEQ ID NO: 43607 - RNA, 19 nt, Artificial Sequence
  Description of Artificial Sequence: Synthetic oligonucleotide
cccuaugauagacucucga

SEQ ID NO: 43608 - RNA, 19 nt, Artificial Sequence
  Description of Artificial Sequence: Synthetic oligonucleotide
accuccuauucuagucugu

SEQ ID NO: 43609 - RNA, 19 nt, Artificial Sequence
  Description of Artificial Sequence: Synthetic oligonucleotide
ugguacgagucagcaguuu

SEQ ID NO: 43610 - RNA, 19 nt, Artificial Sequence
  Description of Artificial Sequence: Synthetic oligonucleotide
gagcgaagugccggggcga

SEQ ID NO: 43611 - RNA, 19 nt, Artificial Sequence
  Description of Artificial Sequence: Synthetic oligonucleotide
cugcccgggagugaagaga

SEQ ID NO: 43612 - RNA, 19 nt, Artificial Sequence
  Description of Artificial Sequence: Synthetic oligonucleotide
cuggaucguguggugucuc

SEQ ID NO: 43613 - RNA, 19 nt, Artificial Sequence
  Description of Artificial Sequence: Synthetic oligonucleotide
ccuccuacuguccaaccaa

SEQ ID NO: 43614 - RNA, 19 nt, Artificial Sequence
  Description of Artificial Sequence: Synthetic oligonucleotide
gugcaccguugcuggacac

SEQ ID NO: 43615 - RNA, 19 nt, Artificial Sequence
  Description of Artificial Sequence: Synthetic oligonucleotide
gcugcugcugcugcugcug

SEQ ID NO: 43616 - RNA, 19 nt, Artificial Sequence
  Description of Artificial Sequence: Synthetic oligonucleotide
ggauaucgagaggaguuua

SEQ ID NO: 43617 - RNA, 19 nt, Artificial Sequence
  Description of Artificial Sequence: Synthetic oligonucleotide
gugugccuucucauugaca

SEQ ID NO: 43618 - RNA, 19 nt, Artificial Sequence
  Description of Artificial Sequence: Synthetic oligonucleotide
gcauauugguuacuacaau

SEQ ID NO: 43619 - RNA, 19 nt, Artificial Sequence
  Description of Artificial Sequence: Synthetic oligonucleotide
cugugucagauucccggcu

SEQ ID NO: 43620 - RNA, 19 nt, Artificial Sequence
  Description of Artificial Sequence: Synthetic oligonucleotide
  modified_base (18)..(18): a, c, u, g, unknown or other
ggagcaguccuugaaggnu

SEQ ID NO: 43621 - RNA, 19 nt, Artificial Sequence
  Description of Artificial Sequence: Synthetic oligonucleotide
ccauacaaccuccuauucu

SEQ ID NO: 43622 - RNA, 19 nt, Artificial Sequence
  Description of Artificial Sequence: Synthetic oligonucleotide
gaguaacuaaugaccccau

SEQ ID NO: 43623 - RNA, 19 nt, Artificial Sequence
  Description of Artificial Sequence: Synthetic oligonucleotide
caguucccuaugauagacu

SEQ ID NO: 43624 - RNA, 19 nt, Artificial Sequence
  Description of Artificial Sequence: Synthetic oligonucleotide
ccgaauguccgaguggcca

SEQ ID NO: 43625 - RNA, 19 nt, Artificial Sequence
  Description of Artificial Sequence: Synthetic oligonucleotide
agaccucggggugcuugug

SEQ ID NO: 43626 - RNA, 19 nt, Artificial Sequence
  Description of Artificial Sequence: Synthetic oligonucleotide
uggagaccccuggcucuca

SEQ ID NO: 43627 - RNA, 19 nt, Artificial Sequence
  Description of Artificial Sequence: Synthetic oligonucleotide
cccgugggcgcuucagcag

SEQ ID NO: 43628 - RNA, 19 nt, Artificial Sequence
  Description of Artificial Sequence: Synthetic oligonucleotide
cugaacguggcagcuggcu

SEQ ID NO: 43629 - RNA, 19 nt, Artificial Sequence
  Description of Artificial Sequence: Synthetic oligonucleotide
ccaucaggcucuauaauuu

SEQ ID NO: 43630 - RNA, 19 nt, Artificial Sequence
  Description of Artificial Sequence: Synthetic oligonucleotide
aagcggcggccuacuggug

SEQ ID NO: 43631 - RNA, 19 nt, Artificial Sequence
  Description of Artificial Sequence: Synthetic oligonucleotide
gacuggaccaacggccuuu

SEQ ID NO: 43632 - RNA, 19 nt, Artificial Sequence
  Description of Artificial Sequence: Synthetic oligonucleotide
gggccacucaaccuaugcu

SEQ ID NO: 43633 - RNA, 19 nt, Artificial Sequence
  Description of Artificial Sequence: Synthetic oligonucleotide
cacucaaccuaugcugggu

SEQ ID NO: 43634 - RNA, 19 nt, Artificial Sequence
  Description of Artificial Sequence: Synthetic oligonucleotide
acgcagccgagaguaugaa

SEQ ID NO: 43635 - RNA, 19 nt, Artificial Sequence
  Description of Artificial Sequence: Synthetic oligonucleotide
cgaaugcauuaguggcggc

SEQ ID NO: 43636 - RNA, 19 nt, Artificial Sequence
  Description of Artificial Sequence: Synthetic oligonucleotide
ggauccccaaaggaaaauu

SEQ ID NO: 43637 - RNA, 19 nt, Artificial Sequence
  Description of Artificial Sequence: Synthetic oligonucleotide
ccgacguucagccccugaa

SEQ ID NO: 43638 - RNA, 19 nt, Artificial Sequence
  Description of Artificial Sequence: Synthetic oligonucleotide
cgaagaugcuagggagagg

SEQ ID NO: 43639 - RNA, 19 nt, Artificial Sequence
  Description of Artificial Sequence: Synthetic oligonucleotide
cauugacugagggccgagu

SEQ ID NO: 43640 - RNA, 19 nt, Artificial Sequence
  Description of Artificial Sequence: Synthetic oligonucleotide
cccauccgagcucuccuca

SEQ ID NO: 43641 - RNA, 19 nt, Artificial Sequence
  Description of Artificial Sequence: Synthetic oligonucleotide
caacccaagcggcggccua

SEQ ID NO: 43642 - RNA, 19 nt, Artificial Sequence
  Description of Artificial Sequence: Synthetic oligonucleotide
gcucuccgaaugcauuagu

SEQ ID NO: 43643 - RNA, 19 nt, Artificial Sequence
  Description of Artificial Sequence: Synthetic oligonucleotide
cuauugcguaugcgcugcu

SEQ ID NO: 43644 - RNA, 19 nt, Artificial Sequence
  Description of Artificial Sequence: Synthetic oligonucleotide
gcucgugaccucccagacu

SEQ ID NO: 43645 - RNA, 19 nt, Artificial Sequence
  Description of Artificial Sequence: Synthetic oligonucleotide
cucgacugggcaccuuauu

SEQ ID NO: 43646 - RNA, 19 nt, Artificial Sequence
  Description of Artificial Sequence: Synthetic oligonucleotide
ggcgcaagccacaguucaa

SEQ ID NO: 43647 - RNA, 19 nt, Artificial Sequence
  Description of Artificial Sequence: Synthetic oligonucleotide
gacucucgacugggcaccu

SEQ ID NO: 43648 - RNA, 19 nt, Artificial Sequence
  Description of Artificial Sequence: Synthetic oligonucleotide
ucccgacguucagccccug

SEQ ID NO: 43649 - RNA, 19 nt, Artificial Sequence
  Description of Artificial Sequence: Synthetic oligonucleotide
gugguacgagucagcaguu

SEQ ID NO: 43650 - RNA, 19 nt, Artificial Sequence
  Description of Artificial Sequence: Synthetic oligonucleotide
gggccgaguuggauacaca

SEQ ID NO: 43651 - RNA, 19 nt, Artificial Sequence
  Description of Artificial Sequence: Synthetic oligonucleotide
ccuacacgccggccugcuc

SEQ ID NO: 43652 - RNA, 19 nt, Artificial Sequence
  Description of Artificial Sequence: Synthetic oligonucleotide
ccaugcucuccgaaugcau

SEQ ID NO: 43653 - RNA, 19 nt, Artificial Sequence
  Description of Artificial Sequence: Synthetic oligonucleotide
caguuccugucugcuccgu

SEQ ID NO: 43654 - RNA, 19 nt, Artificial Sequence
  Description of Artificial Sequence: Synthetic oligonucleotide
cccgacguucagccccuga

SEQ ID NO: 43655 - RNA, 19 nt, Artificial Sequence
  Description of Artificial Sequence: Synthetic oligonucleotide
ccgggaccugagaggcuca

SEQ ID NO: 43656 - RNA, 19 nt, Artificial Sequence
  Description of Artificial Sequence: Synthetic oligonucleotide
cgucuggauauugacccau

SEQ ID NO: 43657 - RNA, 19 nt, Artificial Sequence
  Description of Artificial Sequence: Synthetic oligonucleotide
cgcagccgagaguaugaau

SEQ ID NO: 43658 - RNA, 19 nt, Artificial Sequence
  Description of Artificial Sequence: Synthetic oligonucleotide
gcccgggagugaagagauu

SEQ ID NO: 43659 - RNA, 19 nt, Artificial Sequence
  Description of Artificial Sequence: Synthetic oligonucleotide
uuuaccuauaugcugaugg

SEQ ID NO: 43660 - RNA, 19 nt, Artificial Sequence
  Description of Artificial Sequence: Synthetic oligonucleotide
uuuacaucgacacaaguca

SEQ ID NO: 43661 - RNA, 19 nt, Artificial Sequence
  Description of Artificial Sequence: Synthetic oligonucleotide
aauaaagggauccaauuga

SEQ ID NO: 43662 - RNA, 19 nt, Artificial Sequence
  Description of Artificial Sequence: Synthetic oligonucleotide
aauaauacaaccucuguuu

SEQ ID NO: 43663 - RNA, 19 nt, Artificial Sequence
  Description of Artificial Sequence: Synthetic oligonucleotide
ucuuauaacauauaauggu

SEQ ID NO: 43664 - RNA, 19 nt, Artificial Sequence
  Description of Artificial Sequence: Synthetic oligonucleotide
agauguuugaacuugagaa

SEQ ID NO: 43665 - RNA, 19 nt, Artificial Sequence
  Description of Artificial Sequence: Synthetic oligonucleotide
agcacguuaucacagagac

SEQ ID NO: 43666 - RNA, 19 nt, Artificial Sequence
  Description of Artificial Sequence: Synthetic oligonucleotide
uguuaacccgcuuauaucc

SEQ ID NO: 43667 - RNA, 19 nt, Artificial Sequence
  Description of Artificial Sequence: Synthetic oligonucleotide
aucgauacaacuguuaggg

SEQ ID NO: 43668 - RNA, 19 nt, Artificial Sequence
  Description of Artificial Sequence: Synthetic oligonucleotide
uaauaaagggauccaauug

SEQ ID NO: 43669 - RNA, 19 nt, Artificial Sequence
  Description of Artificial Sequence: Synthetic oligonucleotide
uuugacaggaucauaguac

SEQ ID NO: 43670 - RNA, 19 nt, Artificial Sequence
  Description of Artificial Sequence: Synthetic oligonucleotide
uguuguaagaggauucucc

SEQ ID NO: 43671 - RNA, 19 nt, Artificial Sequence
  Description of Artificial Sequence: Synthetic oligonucleotide
aaaccguauaacccauucc

SEQ ID NO: 43672 - RNA, 19 nt, Artificial Sequence
  Description of Artificial Sequence: Synthetic oligonucleotide
aaccguauaacccauucca

SEQ ID NO: 43673 - RNA, 19 nt, Artificial Sequence
  Description of Artificial Sequence: Synthetic oligonucleotide
uguaggagcaaucacuuga

SEQ ID NO: 43674 - RNA, 19 nt, Artificial Sequence
  Description of Artificial Sequence: Synthetic oligonucleotide
aaguugaguguucuuuggc

SEQ ID NO: 43675 - RNA, 19 nt, Artificial Sequence
  Description of Artificial Sequence: Synthetic oligonucleotide
ugucagacgguacauagcc

SEQ ID NO: 43676 - RNA, 19 nt, Artificial Sequence
  Description of Artificial Sequence: Synthetic oligonucleotide
aauugauaggagauauggc

SEQ ID NO: 43677 - RNA, 19 nt, Artificial Sequence
  Description of Artificial Sequence: Synthetic oligonucleotide
uugacaggaucauaguacg

SEQ ID NO: 43678 - RNA, 19 nt, Artificial Sequence
  Description of Artificial Sequence: Synthetic oligonucleotide
gaugauuuacacgagaauc

SEQ ID NO: 43679 - RNA, 19 nt, Artificial Sequence
  Description of Artificial Sequence: Synthetic oligonucleotide
gagacauccgauuauucag

SEQ ID NO: 43680 - RNA, 19 nt, Artificial Sequence
  Description of Artificial Sequence: Synthetic oligonucleotide
aauauagguuaagaaguuc

SEQ ID NO: 43681 - RNA, 19 nt, Artificial Sequence
  Description of Artificial Sequence: Synthetic oligonucleotide
agguauaucucacuggcag

SEQ ID NO: 43682 - RNA, 19 nt, Artificial Sequence
  Description of Artificial Sequence: Synthetic oligonucleotide
acuagcaucauugagauua

SEQ ID NO: 43683 - RNA, 19 nt, Artificial Sequence
  Description of Artificial Sequence: Synthetic oligonucleotide
gacacuacuguccucuagg

SEQ ID NO: 43684 - RNA, 19 nt, Artificial Sequence
  Description of Artificial Sequence: Synthetic oligonucleotide
uuucaggcuaauaaaggga

SEQ ID NO: 43685 - RNA, 19 nt, Artificial Sequence
  Description of Artificial Sequence: Synthetic oligonucleotide
guagcauucauacccaggc

SEQ ID NO: 43686 - RNA, 19 nt, Artificial Sequence
  Description of Artificial Sequence: Synthetic oligonucleotide
uugacauccuuuauuguca

SEQ ID NO: 43687 - RNA, 19 nt, Artificial Sequence
  Description of Artificial Sequence: Synthetic oligonucleotide
aagauguuugaacuugaga

SEQ ID NO: 43688 - RNA, 19 nt, Artificial Sequence
  Description of Artificial Sequence: Synthetic oligonucleotide
aaagcgguguuugacggcg

SEQ ID NO: 43689 - RNA, 19 nt, Artificial Sequence
  Description of Artificial Sequence: Synthetic oligonucleotide
aacuguuagggucuugaca

SEQ ID NO: 43690 - RNA, 19 nt, Artificial Sequence
  Description of Artificial Sequence: Synthetic oligonucleotide
uccgggacugacaaggcgg

SEQ ID NO: 43691 - RNA, 19 nt, Artificial Sequence
  Description of Artificial Sequence: Synthetic oligonucleotide
ugggccauacuguucaccg

SEQ ID NO: 43692 - RNA, 19 nt, Artificial Sequence
  Description of Artificial Sequence: Synthetic oligonucleotide
aauuugacaggaucauagu

SEQ ID NO: 43693 - RNA, 19 nt, Artificial Sequence
  Description of Artificial Sequence: Synthetic oligonucleotide
uugaugauuuacacgagaa

SEQ ID NO: 43694 - RNA, 19 nt, Artificial Sequence
  Description of Artificial Sequence: Synthetic oligonucleotide
cuaugaacgccagaaaccg

SEQ ID NO: 43695 - RNA, 19 nt, Artificial Sequence
  Description of Artificial Sequence: Synthetic oligonucleotide
uaggaucggguccaaaucc

SEQ ID NO: 43696 - RNA, 19 nt, Artificial Sequence
  Description of Artificial Sequence: Synthetic oligonucleotide
uggguugaugauuuacacg

SEQ ID NO: 43697 - RNA, 19 nt, Artificial Sequence
  Description of Artificial Sequence: Synthetic oligonucleotide
ucagacgguacauagccug

SEQ ID NO: 43698 - RNA, 19 nt, Artificial Sequence
  Description of Artificial Sequence: Synthetic oligonucleotide
uugauaucuucacaguggu

SEQ ID NO: 43699 - RNA, 19 nt, Artificial Sequence
  Description of Artificial Sequence: Synthetic oligonucleotide
ugguauucaaacacucacc

SEQ ID NO: 43700 - RNA, 19 nt, Artificial Sequence
  Description of Artificial Sequence: Synthetic oligonucleotide
caugggacuauacucuugg

SEQ ID NO: 43701 - RNA, 19 nt, Artificial Sequence
  Description of Artificial Sequence: Synthetic oligonucleotide
gaguauauccaugauagga

SEQ ID NO: 43702 - RNA, 19 nt, Artificial Sequence
  Description of Artificial Sequence: Synthetic oligonucleotide
acagacuauauauacugga

SEQ ID NO: 43703 - RNA, 19 nt, Artificial Sequence
  Description of Artificial Sequence: Synthetic oligonucleotide
uuagacacucuccaugagu

SEQ ID NO: 43704 - RNA, 19 nt, Artificial Sequence
  Description of Artificial Sequence: Synthetic oligonucleotide
gguauaaccuuccuggacc

SEQ ID NO: 43705 - RNA, 19 nt, Artificial Sequence
  Description of Artificial Sequence: Synthetic oligonucleotide
uagacguggaagcuucagg

SEQ ID NO: 43706 - RNA, 19 nt, Artificial Sequence
  Description of Artificial Sequence: Synthetic oligonucleotide
agagcggaugcucuguaac

SEQ ID NO: 43707 - RNA, 19 nt, Artificial Sequence
  Description of Artificial Sequence: Synthetic oligonucleotide
ucgacacaagucaucuugg

SEQ ID NO: 43708 - RNA, 19 nt, Artificial Sequence
  Description of Artificial Sequence: Synthetic oligonucleotide
uccgcacaaacacacagga

SEQ ID NO: 43709 - RNA, 19 nt, Artificial Sequence
  Description of Artificial Sequence: Synthetic oligonucleotide
agagacauccgauuauuca

SEQ ID NO: 43710 - RNA, 19 nt, Artificial Sequence
  Description of Artificial Sequence: Synthetic oligonucleotide
cauauaaugguaaauauuu

SEQ ID NO: 43711 - RNA, 19 nt, Artificial Sequence
  Description of Artificial Sequence: Synthetic oligonucleotide
auuaacacacuggccaucg

SEQ ID NO: 43712 - RNA, 19 nt, Artificial Sequence
  Description of Artificial Sequence: Synthetic oligonucleotide
agggcuauagcccuuguga

SEQ ID NO: 43713 - RNA, 19 nt, Artificial Sequence
  Description of Artificial Sequence: Synthetic oligonucleotide
uauggucugguguagggcu

SEQ ID NO: 43714 - RNA, 19 nt, Artificial Sequence
  Description of Artificial Sequence: Synthetic oligonucleotide
ugauaacagaggcagcgga

SEQ ID NO: 43715 - RNA, 19 nt, Artificial Sequence
  Description of Artificial Sequence: Synthetic oligonucleotide
gaccccgcaguauugaugc

SEQ ID NO: 43716 - RNA, 19 nt, Artificial Sequence
  Description of Artificial Sequence: Synthetic oligonucleotide
uuacacgagaaucuucagu

SEQ ID NO: 43717 - RNA, 19 nt, Artificial Sequence
  Description of Artificial Sequence: Synthetic oligonucleotide
gaaaagguaggaucggguc

SEQ ID NO: 43718 - RNA, 19 nt, Artificial Sequence
  Description of Artificial Sequence: Synthetic oligonucleotide
aacgccagaaaccguauaa

SEQ ID NO: 43719 - RNA, 19 nt, Artificial Sequence
  Description of Artificial Sequence: Synthetic oligonucleotide
gagauuauaguagcauucc

SEQ ID NO: 43720 - RNA, 19 nt, Artificial Sequence
  Description of Artificial Sequence: Synthetic oligonucleotide
auagguuaagaaguucuuc

SEQ ID NO: 43721 - RNA, 19 nt, Artificial Sequence
  Description of Artificial Sequence: Synthetic oligonucleotide
ugggacuauacucuuggcu

SEQ ID NO: 43722 - RNA, 19 nt, Artificial Sequence
  Description of Artificial Sequence: Synthetic oligonucleotide
cauccauaucaaaacacug

SEQ ID NO: 43723 - RNA, 19 nt, Artificial Sequence
  Description of Artificial Sequence: Synthetic oligonucleotide
uaccaauauagguuaagaa

SEQ ID NO: 43724 - RNA, 19 nt, Artificial Sequence
  Description of Artificial Sequence: Synthetic oligonucleotide
uacguugucugcuugccca

SEQ ID NO: 43725 - RNA, 19 nt, Artificial Sequence
  Description of Artificial Sequence: Synthetic oligonucleotide
aguugaguguucuuuggcu

SEQ ID NO: 43726 - RNA, 19 nt, Artificial Sequence
  Description of Artificial Sequence: Synthetic oligonucleotide
gauucaguuggcugcacac

SEQ ID NO: 43727 - RNA, 19 nt, Artificial Sequence
  Description of Artificial Sequence: Synthetic oligonucleotide
uagacacucuccaugagua

SEQ ID NO: 43728 - RNA, 19 nt, Artificial Sequence
  Description of Artificial Sequence: Synthetic oligonucleotide
uccacagguacaccggaag

SEQ ID NO: 43729 - RNA, 19 nt, Artificial Sequence
  Description of Artificial Sequence: Synthetic oligonucleotide
caggcuaauaaagggaucc

SEQ ID NO: 43730 - RNA, 19 nt, Artificial Sequence
  Description of Artificial Sequence: Synthetic oligonucleotide
ugucccgccccacagaugu

SEQ ID NO: 43731 - RNA, 19 nt, Artificial Sequence
  Description of Artificial Sequence: Synthetic oligonucleotide
ggguugaugauuuacacga

SEQ ID NO: 43732 - RNA, 19 nt, Artificial Sequence
  Description of Artificial Sequence: Synthetic oligonucleotide
gaaaccguauaacccauuc

SEQ ID NO: 43733 - RNA, 19 nt, Artificial Sequence
  Description of Artificial Sequence: Synthetic oligonucleotide
caucuuuauagcucucacc

SEQ ID NO: 43734 - RNA, 19 nt, Artificial Sequence
  Description of Artificial Sequence: Synthetic oligonucleotide
uacuguucaccgaagucca

SEQ ID NO: 43735 - RNA, 19 nt, Artificial Sequence
  Description of Artificial Sequence: Synthetic oligonucleotide
cucacagcgaccugggagc

SEQ ID NO: 43736 - RNA, 19 nt, Artificial Sequence
  Description of Artificial Sequence: Synthetic oligonucleotide
cauuagggcauacaccuug

SEQ ID NO: 43737 - RNA, 19 nt, Artificial Sequence
  Description of Artificial Sequence: Synthetic oligonucleotide
uuugacggcgugcaguagu

SEQ ID NO: 43738 - RNA, 19 nt, Artificial Sequence
  Description of Artificial Sequence: Synthetic oligonucleotide
agaacccuuguucgcagac

SEQ ID NO: 43739 - RNA, 19 nt, Artificial Sequence
  Description of Artificial Sequence: Synthetic oligonucleotide
uuuaggguucauucaacuc

SEQ ID NO: 43740 - RNA, 19 nt, Artificial Sequence
  Description of Artificial Sequence: Synthetic oligonucleotide
aguucccuugcugacauuc

SEQ ID NO: 43741 - RNA, 19 nt, Artificial Sequence
  Description of Artificial Sequence: Synthetic oligonucleotide
gaaccauucgugcagaccu

SEQ ID NO: 43742 - RNA, 19 nt, Artificial Sequence
  Description of Artificial Sequence: Synthetic oligonucleotide
acugacaaggcgguaacag

SEQ ID NO: 43743 - RNA, 19 nt, Artificial Sequence
  Description of Artificial Sequence: Synthetic oligonucleotide
guuuagacacucuccauga

SEQ ID NO: 43744 - RNA, 19 nt, Artificial Sequence
  Description of Artificial Sequence: Synthetic oligonucleotide
uuuacacgagaaucuucag

SEQ ID NO: 43745 - RNA, 19 nt, Artificial Sequence
  Description of Artificial Sequence: Synthetic oligonucleotide
ucuagggcacauuucugug

SEQ ID NO: 43746 - RNA, 19 nt, Artificial Sequence
  Description of Artificial Sequence: Synthetic oligonucleotide
ucuaggcauucauugauau

SEQ ID NO: 43747 - RNA, 19 nt, Artificial Sequence
  Description of Artificial Sequence: Synthetic oligonucleotide
uugagauuauaguagcauu

SEQ ID NO: 43748 - RNA, 19 nt, Artificial Sequence
  Description of Artificial Sequence: Synthetic oligonucleotide
agauaauaauacaaccucu

SEQ ID NO: 43749 - RNA, 19 nt, Artificial Sequence
  Description of Artificial Sequence: Synthetic oligonucleotide
cuggccaucgauacaacug

SEQ ID NO: 43750 - RNA, 19 nt, Artificial Sequence
  Description of Artificial Sequence: Synthetic oligonucleotide
uggccaucgauacaacugu

SEQ ID NO: 43751 - RNA, 19 nt, Artificial Sequence
  Description of Artificial Sequence: Synthetic oligonucleotide
augauuuacacgagaaucu

SEQ ID NO: 43752 - RNA, 19 nt, Artificial Sequence
  Description of Artificial Sequence: Synthetic oligonucleotide
agcggaugcucuguaaccc

SEQ ID NO: 43753 - RNA, 19 nt, Artificial Sequence
  Description of Artificial Sequence: Synthetic oligonucleotide
cacguuaucacagagacua

SEQ ID NO: 43754 - RNA, 19 nt, Artificial Sequence
  Description of Artificial Sequence: Synthetic oligonucleotide
cugacaaggcgguaacagg

SEQ ID NO: 43755 - RNA, 19 nt, Artificial Sequence
  Description of Artificial Sequence: Synthetic oligonucleotide
agauuauaguagcauuccu

SEQ ID NO: 43756 - RNA, 19 nt, Artificial Sequence
  Description of Artificial Sequence: Synthetic oligonucleotide
ucuuuaggguucauucaac

SEQ ID NO: 43757 - RNA, 19 nt, Artificial Sequence
  Description of Artificial Sequence: Synthetic oligonucleotide
uuauagcucucaccaccgg

SEQ ID NO: 43758 - RNA, 19 nt, Artificial Sequence
  Description of Artificial Sequence: Synthetic oligonucleotide
uuauucagcucacugcauu

SEQ ID NO: 43759 - RNA, 19 nt, Artificial Sequence
  Description of Artificial Sequence: Synthetic oligonucleotide
cauaaguucccuugcugac

SEQ ID NO: 43760 - RNA, 19 nt, Artificial Sequence
  Description of Artificial Sequence: Synthetic oligonucleotide
accacaggggauccggaac

SEQ ID NO: 43761 - RNA, 19 nt, Artificial Sequence
  Description of Artificial Sequence: Synthetic oligonucleotide
cucucguccgcacaaacac

SEQ ID NO: 43762 - RNA, 19 nt, Artificial Sequence
  Description of Artificial Sequence: Synthetic oligonucleotide
cacaaacauuuguaggagc

SEQ ID NO: 43763 - RNA, 19 nt, Artificial Sequence
  Description of Artificial Sequence: Synthetic oligonucleotide
aagagcccuccguauuaac

SEQ ID NO: 43764 - RNA, 19 nt, Artificial Sequence
  Description of Artificial Sequence: Synthetic oligonucleotide
ugcguguuuagacacucuc

SEQ ID NO: 43765 - RNA, 19 nt, Artificial Sequence
  Description of Artificial Sequence: Synthetic oligonucleotide
uuacaguagcauucauacc

SEQ ID NO: 43766 - RNA, 19 nt, Artificial Sequence
  Description of Artificial Sequence: Synthetic oligonucleotide
cauucgugcagaccuuugg

SEQ ID NO: 43767 - RNA, 19 nt, Artificial Sequence
  Description of Artificial Sequence: Synthetic oligonucleotide
caccauuagggcauacacc

SEQ ID NO: 43768 - RNA, 19 nt, Artificial Sequence
  Description of Artificial Sequence: Synthetic oligonucleotide
uuguuaacccgcuuauauc

SEQ ID NO: 43769 - RNA, 19 nt, Artificial Sequence
  Description of Artificial Sequence: Synthetic oligonucleotide
aguauauccaugauaggau

SEQ ID NO: 43770 - RNA, 19 nt, Artificial Sequence
  Description of Artificial Sequence: Synthetic oligonucleotide
acacaggaaggacccuucc

SEQ ID NO: 43771 - RNA, 19 nt, Artificial Sequence
  Description of Artificial Sequence: Synthetic oligonucleotide
auaccaauauagguuaaga

SEQ ID NO: 43772 - RNA, 19 nt, Artificial Sequence
  Description of Artificial Sequence: Synthetic oligonucleotide
auaugcagguauaucucac

SEQ ID NO: 43773 - RNA, 19 nt, Artificial Sequence
  Description of Artificial Sequence: Synthetic oligonucleotide
acgaucuugaaugaaguaa

SEQ ID NO: 43774 - RNA, 19 nt, Artificial Sequence
  Description of Artificial Sequence: Synthetic oligonucleotide
ccugguugcacacacauug

SEQ ID NO: 43775 - RNA, 19 nt, Artificial Sequence
  Description of Artificial Sequence: Synthetic oligonucleotide
uuccgggacugacaaggcg

SEQ ID NO: 43776 - RNA, 19 nt, Artificial Sequence
  Description of Artificial Sequence: Synthetic oligonucleotide
uauucagcucacugcauuc

SEQ ID NO: 43777 - RNA, 19 nt, Artificial Sequence
  Description of Artificial Sequence: Synthetic oligonucleotide
gacaggaucauaguacguc

SEQ ID NO: 43778 - RNA, 19 nt, Artificial Sequence
  Description of Artificial Sequence: Synthetic oligonucleotide
gacacaguggaaagacccg

SEQ ID NO: 43779 - RNA, 19 nt, Artificial Sequence
  Description of Artificial Sequence: Synthetic oligonucleotide
aggucaaggccuccgcugg

SEQ ID NO: 43780 - RNA, 19 nt, Artificial Sequence
  Description of Artificial Sequence: Synthetic oligonucleotide
aacgaucuugaaugaagua

SEQ ID NO: 43781 - RNA, 19 nt, Artificial Sequence
  Description of Artificial Sequence: Synthetic oligonucleotide
guagcugaggaacugcaca

SEQ ID NO: 43782 - RNA, 19 nt, Artificial Sequence
  Description of Artificial Sequence: Synthetic oligonucleotide
aacgcauccuguccauaug

SEQ ID NO: 43783 - RNA, 19 nt, Artificial Sequence
  Description of Artificial Sequence: Synthetic oligonucleotide
uagcccuugugacaggaac

SEQ ID NO: 43784 - RNA, 19 nt, Artificial Sequence
  Description of Artificial Sequence: Synthetic oligonucleotide
cacacgugcgaccaucugc

SEQ ID NO: 43785 - RNA, 19 nt, Artificial Sequence
  Description of Artificial Sequence: Synthetic oligonucleotide
gggacuauacucuuggcuc

SEQ ID NO: 43786 - RNA, 19 nt, Artificial Sequence
  Description of Artificial Sequence: Synthetic oligonucleotide
cucguccgcacaaacacac

SEQ ID NO: 43787 - RNA, 19 nt, Artificial Sequence
  Description of Artificial Sequence: Synthetic oligonucleotide
gguauaucucacuggcagg

SEQ ID NO: 43788 - RNA, 19 nt, Artificial Sequence
  Description of Artificial Sequence: Synthetic oligonucleotide
uugacuggcgcuagacgug

SEQ ID NO: 43789 - RNA, 19 nt, Artificial Sequence
  Description of Artificial Sequence: Synthetic oligonucleotide
augggacuauacucuuggc

SEQ ID NO: 43790 - RNA, 19 nt, Artificial Sequence
  Description of Artificial Sequence: Synthetic oligonucleotide
uguaagagcccuccguauu

SEQ ID NO: 43791 - RNA, 19 nt, Artificial Sequence
  Description of Artificial Sequence: Synthetic oligonucleotide
aguagcauucauacccagg

SEQ ID NO: 43792 - RNA, 19 nt, Artificial Sequence
  Description of Artificial Sequence: Synthetic oligonucleotide
uggguucacaguacauuca

SEQ ID NO: 43793 - RNA, 19 nt, Artificial Sequence
  Description of Artificial Sequence: Synthetic oligonucleotide
acgguacauagccuggcag

SEQ ID NO: 43794 - RNA, 19 nt, Artificial Sequence
  Description of Artificial Sequence: Synthetic oligonucleotide
uacaucgacacaagucauc

SEQ ID NO: 43795 - RNA, 19 nt, Artificial Sequence
  Description of Artificial Sequence: Synthetic oligonucleotide
uuacaucgacacaagucau

SEQ ID NO: 43796 - RNA, 19 nt, Artificial Sequence
  Description of Artificial Sequence: Synthetic oligonucleotide
ucaugggacuauacucuug

SEQ ID NO: 43797 - RNA, 19 nt, Artificial Sequence
  Description of Artificial Sequence: Synthetic oligonucleotide
gagcggaugcucuguaacc

SEQ ID NO: 43798 - RNA, 19 nt, Artificial Sequence
  Description of Artificial Sequence: Synthetic oligonucleotide
ccguucaugcauaaguucc

SEQ ID NO: 43799 - RNA, 19 nt, Artificial Sequence
  Description of Artificial Sequence: Synthetic oligonucleotide
uccggaacacaacuugaaa

SEQ ID NO: 43800 - RNA, 19 nt, Artificial Sequence
  Description of Artificial Sequence: Synthetic oligonucleotide
cauaugcagguauaucuca

SEQ ID NO: 43801 - RNA, 19 nt, Artificial Sequence
  Description of Artificial Sequence: Synthetic oligonucleotide
gaguauaugggcacagguc

SEQ ID NO: 43802 - RNA, 19 nt, Artificial Sequence
  Description of Artificial Sequence: Synthetic oligonucleotide
aauguguuguuaacccgcu

SEQ ID NO: 43803 - RNA, 19 nt, Artificial Sequence
  Description of Artificial Sequence: Synthetic oligonucleotide
uguuugacggcgugcagua

SEQ ID NO: 43804 - RNA, 19 nt, Artificial Sequence
  Description of Artificial Sequence: Synthetic oligonucleotide
uggcgcuagacguggaagc

SEQ ID NO: 43805 - RNA, 19 nt, Artificial Sequence
  Description of Artificial Sequence: Synthetic oligonucleotide
accuauaugcugauggacu

SEQ ID NO: 43806 - RNA, 19 nt, Artificial Sequence
  Description of Artificial Sequence: Synthetic oligonucleotide
aggaucggguccaaauccc

SEQ ID NO: 43807 - RNA, 19 nt, Artificial Sequence
  Description of Artificial Sequence: Synthetic oligonucleotide
gcuauagcccuugugacag

SEQ ID NO: 43808 - RNA, 19 nt, Artificial Sequence
  Description of Artificial Sequence: Synthetic oligonucleotide
ccugauaacagaggcagcg

SEQ ID NO: 43809 - RNA, 19 nt, Artificial Sequence
  Description of Artificial Sequence: Synthetic oligonucleotide
cuauaugcugauggacugg

SEQ ID NO: 43810 - RNA, 19 nt, Artificial Sequence
  Description of Artificial Sequence: Synthetic oligonucleotide
acucgguguacguugucug

SEQ ID NO: 43811 - RNA, 19 nt, Artificial Sequence
  Description of Artificial Sequence: Synthetic oligonucleotide
uaccuauaugcugauggac

SEQ ID NO: 43812 - RNA, 19 nt, Artificial Sequence
  Description of Artificial Sequence: Synthetic oligonucleotide
guuguuaacccgcuuauau

SEQ ID NO: 43813 - RNA, 19 nt, Artificial Sequence
  Description of Artificial Sequence: Synthetic oligonucleotide
guuaggugccguguguuag

SEQ ID NO: 43814 - RNA, 19 nt, Artificial Sequence
  Description of Artificial Sequence: Synthetic oligonucleotide
ccgcuuauauccuuguagg

SEQ ID NO: 43815 - RNA, 19 nt, Artificial Sequence
  Description of Artificial Sequence: Synthetic oligonucleotide
gucuuuaggguucauucaa

SEQ ID NO: 43816 - RNA, 19 nt, Artificial Sequence
  Description of Artificial Sequence: Synthetic oligonucleotide
ucuccaccacuauuuaaaa

SEQ ID NO: 43817 - RNA, 19 nt, Artificial Sequence
  Description of Artificial Sequence: Synthetic oligonucleotide
caugguauucaaacacuca

SEQ ID NO: 43818 - RNA, 19 nt, Artificial Sequence
  Description of Artificial Sequence: Synthetic oligonucleotide
uaugaacgccagaaaccgu

SEQ ID NO: 43819 - RNA, 19 nt, Artificial Sequence
  Description of Artificial Sequence: Synthetic oligonucleotide
ucaggcuaauaaagggauc

SEQ ID NO: 43820 - RNA, 19 nt, Artificial Sequence
  Description of Artificial Sequence: Synthetic oligonucleotide
augauaggauggcuucuug

SEQ ID NO: 43821 - RNA, 19 nt, Artificial Sequence
  Description of Artificial Sequence: Synthetic oligonucleotide
acgccagaaaccguauaac

SEQ ID NO: 43822 - RNA, 19 nt, Artificial Sequence
  Description of Artificial Sequence: Synthetic oligonucleotide
gacccgugcguguuuagac

SEQ ID NO: 43823 - RNA, 19 nt, Artificial Sequence
  Description of Artificial Sequence: Synthetic oligonucleotide
cgaucuugaaugaaguaag

SEQ ID NO: 43824 - RNA, 19 nt, Artificial Sequence
  Description of Artificial Sequence: Synthetic oligonucleotide
ugauuuacacgagaaucuu

SEQ ID NO: 43825 - RNA, 19 nt, Artificial Sequence
  Description of Artificial Sequence: Synthetic oligonucleotide
ccaucgauacaacuguuag

SEQ ID NO: 43826 - RNA, 19 nt, Artificial Sequence
  Description of Artificial Sequence: Synthetic oligonucleotide
cacgccuccccguacagac

SEQ ID NO: 43827 - RNA, 19 nt, Artificial Sequence
  Description of Artificial Sequence: Synthetic oligonucleotide
acuauauauacuggaguuu

SEQ ID NO: 43828 - RNA, 19 nt, Artificial Sequence
  Description of Artificial Sequence: Synthetic oligonucleotide
uucccucuagggcacauuu

SEQ ID NO: 43829 - RNA, 19 nt, Artificial Sequence
  Description of Artificial Sequence: Synthetic oligonucleotide
uucacacgugcgaccaucu

SEQ ID NO: 43830 - RNA, 19 nt, Artificial Sequence
  Description of Artificial Sequence: Synthetic oligonucleotide
ugacaggaucauaguacgu

SEQ ID NO: 43831 - RNA, 19 nt, Artificial Sequence
  Description of Artificial Sequence: Synthetic oligonucleotide
ugacugucacacacagugu

SEQ ID NO: 43832 - RNA, 19 nt, Artificial Sequence
  Description of Artificial Sequence: Synthetic oligonucleotide
uaguacgucccuugcuuac

SEQ ID NO: 43833 - RNA, 19 nt, Artificial Sequence
  Description of Artificial Sequence: Synthetic oligonucleotide
ucuugacauucauccauau

SEQ ID NO: 43834 - RNA, 19 nt, Artificial Sequence
  Description of Artificial Sequence: Synthetic oligonucleotide
cucgguguacguugucugc

SEQ ID NO: 43835 - RNA, 19 nt, Artificial Sequence
  Description of Artificial Sequence: Synthetic oligonucleotide
uuguaagagcccuccguau

SEQ ID NO: 43836 - RNA, 19 nt, Artificial Sequence
  Description of Artificial Sequence: Synthetic oligonucleotide
auaaguucccuugcugaca

SEQ ID NO: 43837 - RNA, 19 nt, Artificial Sequence
  Description of Artificial Sequence: Synthetic oligonucleotide
ugggcacauucaucgaugu

SEQ ID NO: 43838 - RNA, 19 nt, Artificial Sequence
  Description of Artificial Sequence: Synthetic oligonucleotide
aacaucgguagcugcccau

SEQ ID NO: 43839 - RNA, 19 nt, Artificial Sequence
  Description of Artificial Sequence: Synthetic oligonucleotide
uguagcugacauucauuua

SEQ ID NO: 43840 - RNA, 19 nt, Artificial Sequence
  Description of Artificial Sequence: Synthetic oligonucleotide
cuaggcauucauugauauc

SEQ ID NO: 43841 - RNA, 19 nt, Artificial Sequence
  Description of Artificial Sequence: Synthetic oligonucleotide
accaccgguguuguaagag

SEQ ID NO: 43842 - RNA, 19 nt, Artificial Sequence
  Description of Artificial Sequence: Synthetic oligonucleotide
gucacggggauguugcaca

SEQ ID NO: 43843 - RNA, 19 nt, Artificial Sequence
  Description of Artificial Sequence: Synthetic oligonucleotide
gcauaaguucccuugcuga

SEQ ID NO: 43844 - RNA, 19 nt, Artificial Sequence
  Description of Artificial Sequence: Synthetic oligonucleotide
gauuauaguagcauuccuu

SEQ ID NO: 43845 - RNA, 19 nt, Artificial Sequence
  Description of Artificial Sequence: Synthetic oligonucleotide
ucggguccaaaucccauuu

SEQ ID NO: 43846 - RNA, 19 nt, Artificial Sequence
  Description of Artificial Sequence: Synthetic oligonucleotide
caggaacaucgguagcugc

SEQ ID NO: 43847 - RNA, 19 nt, Artificial Sequence
  Description of Artificial Sequence: Synthetic oligonucleotide
ucgauacaacuguuagggu

SEQ ID NO: 43848 - RNA, 19 nt, Artificial Sequence
  Description of Artificial Sequence: Synthetic oligonucleotide
caaagcgguguuugacggc

SEQ ID NO: 43849 - RNA, 19 nt, Artificial Sequence
  Description of Artificial Sequence: Synthetic oligonucleotide
guguacguugucugcuugc

SEQ ID NO: 43850 - RNA, 19 nt, Artificial Sequence
  Description of Artificial Sequence: Synthetic oligonucleotide
ugaacgccagaaaccguau

SEQ ID NO: 43851 - RNA, 19 nt, Artificial Sequence
  Description of Artificial Sequence: Synthetic oligonucleotide
gcaccugacguacagcagc

SEQ ID NO: 43852 - RNA, 19 nt, Artificial Sequence
  Description of Artificial Sequence: Synthetic oligonucleotide
guagccaucguagcauaug

SEQ ID NO: 43853 - RNA, 19 nt, Artificial Sequence
  Description of Artificial Sequence: Synthetic oligonucleotide
guaggagcaaucacuugac

SEQ ID NO: 43854 - RNA, 19 nt, Artificial Sequence
  Description of Artificial Sequence: Synthetic oligonucleotide
cagucauaggaccccgcag

SEQ ID NO: 43855 - RNA, 19 nt, Artificial Sequence
  Description of Artificial Sequence: Synthetic oligonucleotide
gcuuauauccuuguaggca

SEQ ID NO: 43856 - RNA, 19 nt, Artificial Sequence
  Description of Artificial Sequence: Synthetic oligonucleotide
ugguacccaucaaagcaau

SEQ ID NO: 43857 - RNA, 19 nt, Artificial Sequence
  Description of Artificial Sequence: Synthetic oligonucleotide
guggaaagacccgugcgug

SEQ ID NO: 43858 - RNA, 19 nt, Artificial Sequence
  Description of Artificial Sequence: Synthetic oligonucleotide
aagacccgugcguguuuag

SEQ ID NO: 43859 - RNA, 19 nt, Artificial Sequence
  Description of Artificial Sequence: Synthetic oligonucleotide
cacaguggaaagacccgug

SEQ ID NO: 43860 - RNA, 19 nt, Artificial Sequence
  Description of Artificial Sequence: Synthetic oligonucleotide
auaguacgucccuugcuua

SEQ ID NO: 43861 - RNA, 19 nt, Artificial Sequence
  Description of Artificial Sequence: Synthetic oligonucleotide
aguugucuccccagccagc

SEQ ID NO: 43862 - RNA, 19 nt, Artificial Sequence
  Description of Artificial Sequence: Synthetic oligonucleotide
uguagccaucguagcauau

SEQ ID NO: 43863 - RNA, 19 nt, Artificial Sequence
  Description of Artificial Sequence: Synthetic oligonucleotide
uguucccgcgaggagguca

SEQ ID NO: 43864 - RNA, 19 nt, Artificial Sequence
  Description of Artificial Sequence: Synthetic oligonucleotide
acacgugcgaccaucugca

SEQ ID NO: 43865 - RNA, 19 nt, Artificial Sequence
  Description of Artificial Sequence: Synthetic oligonucleotide
cuagacguggaagcuucag

SEQ ID NO: 43866 - RNA, 19 nt, Artificial Sequence
  Description of Artificial Sequence: Synthetic oligonucleotide
ugcagucauaggaccccgc

SEQ ID NO: 43867 - RNA, 19 nt, Artificial Sequence
  Description of Artificial Sequence: Synthetic oligonucleotide
cuuuaggguucauucaacu

SEQ ID NO: 43868 - RNA, 19 nt, Artificial Sequence
  Description of Artificial Sequence: Synthetic oligonucleotide
agagagacauccgauuauu

SEQ ID NO: 43869 - RNA, 19 nt, Artificial Sequence
  Description of Artificial Sequence: Synthetic oligonucleotide
ucgguguacguugucugcu

SEQ ID NO: 43870 - RNA, 19 nt, Artificial Sequence
  Description of Artificial Sequence: Synthetic oligonucleotide
guacguugucugcuugccc

SEQ ID NO: 43871 - RNA, 19 nt, Artificial Sequence
  Description of Artificial Sequence: Synthetic oligonucleotide
gacgguacauagccuggca

SEQ ID NO: 43872 - RNA, 19 nt, Artificial Sequence
  Description of Artificial Sequence: Synthetic oligonucleotide
cuuccgggacugacaaggc

SEQ ID NO: 43873 - RNA, 19 nt, Artificial Sequence
  Description of Artificial Sequence: Synthetic oligonucleotide
agagcccuccguauuaaca

SEQ ID NO: 43874 - RNA, 19 nt, Artificial Sequence
  Description of Artificial Sequence: Synthetic oligonucleotide
acccgugcguguuuagaca

SEQ ID NO: 43875 - RNA, 19 nt, Artificial Sequence
  Description of Artificial Sequence: Synthetic oligonucleotide
augaacgccagaaaccgua

SEQ ID NO: 43876 - RNA, 19 nt, Artificial Sequence
  Description of Artificial Sequence: Synthetic oligonucleotide
guuuccccuuuacuccaag

SEQ ID NO: 43877 - RNA, 19 nt, Artificial Sequence
  Description of Artificial Sequence: Synthetic oligonucleotide
auauggccgccgucgcccg

SEQ ID NO: 43878 - RNA, 19 nt, Artificial Sequence
  Description of Artificial Sequence: Synthetic oligonucleotide
guaagagcccuccguauua

SEQ ID NO: 43879 - RNA, 19 nt, Artificial Sequence
  Description of Artificial Sequence: Synthetic oligonucleotide
cauucuggguuaggugccg

SEQ ID NO: 43880 - RNA, 19 nt, Artificial Sequence
  Description of Artificial Sequence: Synthetic oligonucleotide
gagagacauccgauuauuc

SEQ ID NO: 43881 - RNA, 19 nt, Artificial Sequence
  Description of Artificial Sequence: Synthetic oligonucleotide
acguuuucacagaaagccu

SEQ ID NO: 43882 - RNA, 19 nt, Artificial Sequence
  Description of Artificial Sequence: Synthetic oligonucleotide
ugcgucuaugaacgccaga

SEQ ID NO: 43883 - RNA, 19 nt, Artificial Sequence
  Description of Artificial Sequence: Synthetic oligonucleotide
guguaggagcaaucacuug

SEQ ID NO: 43884 - RNA, 19 nt, Artificial Sequence
  Description of Artificial Sequence: Synthetic oligonucleotide
uugacggcgugcaguaguu

SEQ ID NO: 43885 - RNA, 19 nt, Artificial Sequence
  Description of Artificial Sequence: Synthetic oligonucleotide
agcccuccguauuaacaca

SEQ ID NO: 43886 - RNA, 19 nt, Artificial Sequence
  Description of Artificial Sequence: Synthetic oligonucleotide
guauaucucacuggcaggu

SEQ ID NO: 43887 - RNA, 19 nt, Artificial Sequence
  Description of Artificial Sequence: Synthetic oligonucleotide
cauucccggccgcuguucc

SEQ ID NO: 43888 - RNA, 19 nt, Artificial Sequence
  Description of Artificial Sequence: Synthetic oligonucleotide
aaagacccgugcguguuua

SEQ ID NO: 43889 - RNA, 19 nt, Artificial Sequence
  Description of Artificial Sequence: Synthetic oligonucleotide
caccgguguuguaagagga

SEQ ID NO: 43890 - RNA, 19 nt, Artificial Sequence
  Description of Artificial Sequence: Synthetic oligonucleotide
cuucacacgugcgaccauc

SEQ ID NO: 43891 - RNA, 19 nt, Artificial Sequence
  Description of Artificial Sequence: Synthetic oligonucleotide
gcugauaucccuguccaca

SEQ ID NO: 43892 - RNA, 19 nt, Artificial Sequence
  Description of Artificial Sequence: Synthetic oligonucleotide
auuagggcauacaccuugu

SEQ ID NO: 43893 - RNA, 19 nt, Artificial Sequence
  Description of Artificial Sequence: Synthetic oligonucleotide
uugggcuugucagacggua

SEQ ID NO: 43894 - RNA, 19 nt, Artificial Sequence
  Description of Artificial Sequence: Synthetic oligonucleotide
cuggcgcuagacguggaag

SEQ ID NO: 43895 - RNA, 19 nt, Artificial Sequence
  Description of Artificial Sequence: Synthetic oligonucleotide
gaacaucgguagcugccca

SEQ ID NO: 43896 - RNA, 19 nt, Artificial Sequence
  Description of Artificial Sequence: Synthetic oligonucleotide
cuuuaccuauaugcugaug

SEQ ID NO: 43897 - RNA, 19 nt, Artificial Sequence
  Description of Artificial Sequence: Synthetic oligonucleotide
agcgguguuugacggcgug

SEQ ID NO: 43898 - RNA, 19 nt, Artificial Sequence
  Description of Artificial Sequence: Synthetic oligonucleotide
aucggguccaaaucccauu

SEQ ID NO: 43899 - RNA, 19 nt, Artificial Sequence
  Description of Artificial Sequence: Synthetic oligonucleotide
uaagagcccuccguauuaa

SEQ ID NO: 43900 - RNA, 19 nt, Artificial Sequence
  Description of Artificial Sequence: Synthetic oligonucleotide
ggaacaucgguagcugccc

SEQ ID NO: 43901 - RNA, 19 nt, Artificial Sequence
  Description of Artificial Sequence: Synthetic oligonucleotide
guauuaacacacuggccau

SEQ ID NO: 43902 - RNA, 19 nt, Artificial Sequence
  Description of Artificial Sequence: Synthetic oligonucleotide
ccguauuaacacacuggcc

SEQ ID NO: 43903 - RNA, 19 nt, Artificial Sequence
  Description of Artificial Sequence: Synthetic oligonucleotide
uccgauuauucagcucacu

SEQ ID NO: 43904 - RNA, 19 nt, Artificial Sequence
  Description of Artificial Sequence: Synthetic oligonucleotide
aggacccuuccacguuuuc

SEQ ID NO: 43905 - RNA, 19 nt, Artificial Sequence
  Description of Artificial Sequence: Synthetic oligonucleotide
ccaccgguguuguaagagg

SEQ ID NO: 43906 - RNA, 19 nt, Artificial Sequence
  Description of Artificial Sequence: Synthetic oligonucleotide
guaauuugacaggaucaua

SEQ ID NO: 43907 - RNA, 19 nt, Artificial Sequence
  Description of Artificial Sequence: Synthetic oligonucleotide
auaggaccccgcaguauug

SEQ ID NO: 43908 - RNA, 19 nt, Artificial Sequence
  Description of Artificial Sequence: Synthetic oligonucleotide
gagaacccuuguucgcaga

SEQ ID NO: 43909 - RNA, 19 nt, Artificial Sequence
  Description of Artificial Sequence: Synthetic oligonucleotide
uaggugccguguguuaggu

SEQ ID NO: 43910 - RNA, 19 nt, Artificial Sequence
  Description of Artificial Sequence: Synthetic oligonucleotide
ccggaacacaacuugaaaa

SEQ ID NO: 43911 - RNA, 19 nt, Artificial Sequence
  Description of Artificial Sequence: Synthetic oligonucleotide
ccuccguauuaacacacug

SEQ ID NO: 43912 - RNA, 19 nt, Artificial Sequence
  Description of Artificial Sequence: Synthetic oligonucleotide
ggucuugacauucauccau

SEQ ID NO: 43913 - RNA, 19 nt, Artificial Sequence
  Description of Artificial Sequence: Synthetic oligonucleotide
acuggcgcuagacguggaa

SEQ ID NO: 43914 - RNA, 19 nt, Artificial Sequence
  Description of Artificial Sequence: Synthetic oligonucleotide
agcacaacccugugucaua

SEQ ID NO: 43915 - RNA, 19 nt, Artificial Sequence
  Description of Artificial Sequence: Synthetic oligonucleotide
gcguguuuagacacucucc

SEQ ID NO: 43916 - RNA, 19 nt, Artificial Sequence
  Description of Artificial Sequence: Synthetic oligonucleotide
aaggaaccgucgguguuuu

SEQ ID NO: 43917 - RNA, 19 nt, Artificial Sequence
  Description of Artificial Sequence: Synthetic oligonucleotide
ggccauacuguucaccgaa

SEQ ID NO: 43918 - RNA, 19 nt, Artificial Sequence
  Description of Artificial Sequence: Synthetic oligonucleotide
agcaccugacguacagcag

SEQ ID NO: 43919 - RNA, 19 nt, Artificial Sequence
  Description of Artificial Sequence: Synthetic oligonucleotide
ucuucacacgugcgaccau

SEQ ID NO: 43920 - RNA, 19 nt, Artificial Sequence
  Description of Artificial Sequence: Synthetic oligonucleotide
gaaugaaguaaggguuugu

SEQ ID NO: 43921 - RNA, 19 nt, Artificial Sequence
  Description of Artificial Sequence: Synthetic oligonucleotide
agaggcauccaggaccauu

SEQ ID NO: 43922 - RNA, 19 nt, Artificial Sequence
  Description of Artificial Sequence: Synthetic oligonucleotide
gguaggaucggguccaaau

SEQ ID NO: 43923 - RNA, 19 nt, Artificial Sequence
  Description of Artificial Sequence: Synthetic oligonucleotide
cgcuuauauccuuguaggc

SEQ ID NO: 43924 - RNA, 19 nt, Artificial Sequence
  Description of Artificial Sequence: Synthetic oligonucleotide
gguguuugacggcgugcag

SEQ ID NO: 43925 - RNA, 19 nt, Artificial Sequence
  Description of Artificial Sequence: Synthetic oligonucleotide
aguggcccgggagcggcac

SEQ ID NO: 43926 - RNA, 19 nt, Artificial Sequence
  Description of Artificial Sequence: Synthetic oligonucleotide
cccgugcguguuuagacac

SEQ ID NO: 43927 - RNA, 19 nt, Artificial Sequence
  Description of Artificial Sequence: Synthetic oligonucleotide
gacccucacacagcggcca

SEQ ID NO: 43928 - RNA, 19 nt, Artificial Sequence
  Description of Artificial Sequence: Synthetic oligonucleotide
gaggcagcggaaagagcca

SEQ ID NO: 43929 - RNA, 19 nt, Artificial Sequence
  Description of Artificial Sequence: Synthetic oligonucleotide
agacccgugcguguuuaga

SEQ ID NO: 43930 - RNA, 19 nt, Artificial Sequence
  Description of Artificial Sequence: Synthetic oligonucleotide
gcagucauaggaccccgca

SEQ ID NO: 43931 - RNA, 19 nt, Artificial Sequence
  Description of Artificial Sequence: Synthetic oligonucleotide
gaacgccagaaaccguaua

SEQ ID NO: 43932 - RNA, 19 nt, Artificial Sequence
  Description of Artificial Sequence: Synthetic oligonucleotide
auguguuguuaacccgcuu

SEQ ID NO: 43933 - RNA, 19 nt, Artificial Sequence
  Description of Artificial Sequence: Synthetic oligonucleotide
guagcauaugcagguauau

SEQ ID NO: 43934 - RNA, 19 nt, Artificial Sequence
  Description of Artificial Sequence: Synthetic oligonucleotide
agccaucguagcauaugca

SEQ ID NO: 43935 - RNA, 19 nt, Artificial Sequence
  Description of Artificial Sequence: Synthetic oligonucleotide
guuugacggcgugcaguag

SEQ ID NO: 43936 - RNA, 19 nt, Artificial Sequence
  Description of Artificial Sequence: Synthetic oligonucleotide
caaucacuugacuggcgcu

SEQ ID NO: 43937 - RNA, 19 nt, Artificial Sequence
  Description of Artificial Sequence: Synthetic oligonucleotide
ggggauccggaacacaacu

SEQ ID NO: 43938 - RNA, 19 nt, Artificial Sequence
  Description of Artificial Sequence: Synthetic oligonucleotide
caggaccauugggugagug

SEQ ID NO: 43939 - RNA, 19 nt, Artificial Sequence
  Description of Artificial Sequence: Synthetic oligonucleotide
guguuugacggcgugcagu

SEQ ID NO: 43940 - RNA, 19 nt, Artificial Sequence
  Description of Artificial Sequence: Synthetic oligonucleotide
guucaugcauaaguucccu

SEQ ID NO: 43941 - RNA, 19 nt, Artificial Sequence
  Description of Artificial Sequence: Synthetic oligonucleotide
cacgugcgaccaucugcag

SEQ ID NO: 43942 - RNA, 19 nt, Artificial Sequence
  Description of Artificial Sequence: Synthetic oligonucleotide
guuaacccgcuuauauccu

SEQ ID NO: 43943 - RNA, 19 nt, Artificial Sequence
  Description of Artificial Sequence: Synthetic oligonucleotide
gagagaggaugcauacagu

SEQ ID NO: 43944 - RNA, 19 nt, Artificial Sequence
  Description of Artificial Sequence: Synthetic oligonucleotide
auucuggguuaggugccgu

SEQ ID NO: 43945 - RNA, 19 nt, Artificial Sequence
  Description of Artificial Sequence: Synthetic oligonucleotide
gggucuugacauucaucca

SEQ ID NO: 43946 - RNA, 19 nt, Artificial Sequence
  Description of Artificial Sequence: Synthetic oligonucleotide
gaaggaaccgucgguguuu

SEQ ID NO: 43947 - RNA, 19 nt, Artificial Sequence
  Description of Artificial Sequence: Synthetic oligonucleotide
gggacugacaaggcgguaa

SEQ ID NO: 43948 - RNA, 19 nt, Artificial Sequence
  Description of Artificial Sequence: Synthetic oligonucleotide
ggcucucguccgcacaaac

SEQ ID NO: 43949 - RNA, 19 nt, Artificial Sequence
  Description of Artificial Sequence: Synthetic oligonucleotide
ggaccccgcaguauugaug

SEQ ID NO: 43950 - RNA, 19 nt, Artificial Sequence
  Description of Artificial Sequence: Synthetic oligonucleotide
acccgcuuauauccuugua

SEQ ID NO: 43951 - RNA, 19 nt, Artificial Sequence
  Description of Artificial Sequence: Synthetic oligonucleotide
aaggacccuuccacguuuu

SEQ ID NO: 43952 - RNA, 19 nt, Artificial Sequence
  Description of Artificial Sequence: Synthetic oligonucleotide
cauugcccaugagagcaga

SEQ ID NO: 43953 - RNA, 19 nt, Artificial Sequence
  Description of Artificial Sequence: Synthetic oligonucleotide
ggucacggggauguugcac

SEQ ID NO: 43954 - RNA, 19 nt, Artificial Sequence
  Description of Artificial Sequence: Synthetic oligonucleotide
cagaggacggcugcacaca

SEQ ID NO: 43955 - RNA, 19 nt, Artificial Sequence
  Description of Artificial Sequence: Synthetic oligonucleotide
cgcuagacguggaagcuuc

SEQ ID NO: 43956 - RNA, 19 nt, Artificial Sequence
  Description of Artificial Sequence: Synthetic oligonucleotide
cacggggauguugcacagc

SEQ ID NO: 43957 - RNA, 19 nt, Artificial Sequence
  Description of Artificial Sequence: Synthetic oligonucleotide
ggguucacaguacauucau

SEQ ID NO: 43958 - RNA, 19 nt, Artificial Sequence
  Description of Artificial Sequence: Synthetic oligonucleotide
auaucccuguccacaggua

SEQ ID NO: 43959 - RNA, 19 nt, Artificial Sequence
  Description of Artificial Sequence: Synthetic oligonucleotide
cauucaacuccauguuguu

SEQ ID NO: 43960 - RNA, 19 nt, Artificial Sequence
  Description of Artificial Sequence: Synthetic oligonucleotide
ccccgcaguauugaugcag

SEQ ID NO: 43961 - RNA, 19 nt, Artificial Sequence
  Description of Artificial Sequence: Synthetic oligonucleotide
ccauauggccgccgucgcc

SEQ ID NO: 43962 - RNA, 19 nt, Artificial Sequence
  Description of Artificial Sequence: Synthetic oligonucleotide
gaucggguccaaaucccau

SEQ ID NO: 43963 - RNA, 19 nt, Artificial Sequence
  Description of Artificial Sequence: Synthetic oligonucleotide
ccguguguuagguauacau

SEQ ID NO: 43964 - RNA, 19 nt, Artificial Sequence
  Description of Artificial Sequence: Synthetic oligonucleotide
ggaucggguccaaauccca

SEQ ID NO: 43965 - RNA, 19 nt, Artificial Sequence
  Description of Artificial Sequence: Synthetic oligonucleotide
gucuccaagagcggaugcu

SEQ ID NO: 43966 - RNA, 19 nt, Artificial Sequence
  Description of Artificial Sequence: Synthetic oligonucleotide
accccgcaguauugaugca

SEQ ID NO: 43967 - RNA, 19 nt, Artificial Sequence
  Description of Artificial Sequence: Synthetic oligonucleotide
gcucucguccgcacaaaca

SEQ ID NO: 43968 - RNA, 19 nt, Artificial Sequence
  Description of Artificial Sequence: Synthetic oligonucleotide
caugauaggauggcuucuu

SEQ ID NO: 43969 - RNA, 19 nt, Artificial Sequence
  Description of Artificial Sequence: Synthetic oligonucleotide
cacucgguguacguugucu

SEQ ID NO: 43970 - RNA, 19 nt, Artificial Sequence
  Description of Artificial Sequence: Synthetic oligonucleotide
aggugccguguguuaggua

SEQ ID NO: 43971 - RNA, 19 nt, Artificial Sequence
  Description of Artificial Sequence: Synthetic oligonucleotide
guucccgcgaggaggucaa

SEQ ID NO: 43972 - RNA, 19 nt, Artificial Sequence
  Description of Artificial Sequence: Synthetic oligonucleotide
gggccauacuguucaccga

SEQ ID NO: 43973 - RNA, 19 nt, Artificial Sequence
  Description of Artificial Sequence: Synthetic oligonucleotide
ggacuggccugcgucuaug

SEQ ID NO: 43974 - RNA, 19 nt, Artificial Sequence
  Description of Artificial Sequence: Synthetic oligonucleotide
gcgguguuugacggcgugc

SEQ ID NO: 43975 - RNA, 19 nt, Artificial Sequence
  Description of Artificial Sequence: Synthetic oligonucleotide
gucagacgguacauagccu

SEQ ID NO: 43976 - RNA, 19 nt, Artificial Sequence
  Description of Artificial Sequence: Synthetic oligonucleotide
gccaucgauacaacuguua

SEQ ID NO: 43977 - RNA, 19 nt, Artificial Sequence
  Description of Artificial Sequence: Synthetic oligonucleotide
gcacaacccugugucauaa

SEQ ID NO: 43978 - RNA, 19 nt, Artificial Sequence
  Description of Artificial Sequence: Synthetic oligonucleotide
uucccgcgaggaggucaag

SEQ ID NO: 43979 - RNA, 19 nt, Artificial Sequence
  Description of Artificial Sequence: Synthetic oligonucleotide
agguaggaucggguccaaa

SEQ ID NO: 43980 - RNA, 19 nt, Artificial Sequence
  Description of Artificial Sequence: Synthetic oligonucleotide
ccuugcuuacaguagcauu

SEQ ID NO: 43981 - RNA, 19 nt, Artificial Sequence
  Description of Artificial Sequence: Synthetic oligonucleotide
gacuggcgcuagacgugga

SEQ ID NO: 43982 - RNA, 19 nt, Artificial Sequence
  Description of Artificial Sequence: Synthetic oligonucleotide
ccgggagcggcacugccca

SEQ ID NO: 43983 - RNA, 19 nt, Artificial Sequence
  Description of Artificial Sequence: Synthetic oligonucleotide
ggccugcgucuaugaacgc

SEQ ID NO: 43984 - RNA, 19 nt, Artificial Sequence
  Description of Artificial Sequence: Synthetic oligonucleotide
ggcgugcaguaguugggcu

SEQ ID NO: 43985 - RNA, 19 nt, Artificial Sequence
  Description of Artificial Sequence: Synthetic oligonucleotide
ggcgcuagacguggaagcu

SEQ ID NO: 43986 - RNA, 19 nt, Artificial Sequence
  Description of Artificial Sequence: Synthetic oligonucleotide
ccucccuggcagacacuac

SEQ ID NO: 43987 - RNA, 19 nt, Artificial Sequence
  Description of Artificial Sequence: Synthetic oligonucleotide
acgccuccccguacagaca

SEQ ID NO: 43988 - RNA, 19 nt, Artificial Sequence
  Description of Artificial Sequence: Synthetic oligonucleotide
ccauugggugagugcaaaa

SEQ ID NO: 43989 - RNA, 19 nt, Artificial Sequence
  Description of Artificial Sequence: Synthetic oligonucleotide
gcgguaacagggcccuucu

SEQ ID NO: 43990 - RNA, 19 nt, Artificial Sequence
  Description of Artificial Sequence: Synthetic oligonucleotide
gcuagacguggaagcuuca

SEQ ID NO: 43991 - RNA, 19 nt, Artificial Sequence
  Description of Artificial Sequence: Synthetic oligonucleotide
cccgccccacagaugucug

SEQ ID NO: 43992 - RNA, 19 nt, Artificial Sequence
  Description of Artificial Sequence: Synthetic oligonucleotide
gugcguguuuagacacucu

SEQ ID NO: 43993 - RNA, 19 nt, Artificial Sequence
  Description of Artificial Sequence: Synthetic oligonucleotide
ccugacguacagcagcauu

SEQ ID NO: 43994 - RNA, 19 nt, Artificial Sequence
  Description of Artificial Sequence: Synthetic oligonucleotide
ccgcuguucccgcgaggag

SEQ ID NO: 43995 - RNA, 19 nt, Artificial Sequence
  Description of Artificial Sequence: Synthetic oligonucleotide
gcgugcaguaguugggcuu

SEQ ID NO: 43996 - RNA, 19 nt, Artificial Sequence
  Description of Artificial Sequence: Synthetic oligonucleotide
cacaacccugugucauaau

SEQ ID NO: 43997 - RNA, 19 nt, Artificial Sequence
  Description of Artificial Sequence: Synthetic oligonucleotide
cuguucccgcgaggagguc

SEQ ID NO: 43998 - RNA, 19 nt, Artificial Sequence
  Description of Artificial Sequence: Synthetic oligonucleotide
ccauucccggccgcuguuc

SEQ ID NO: 43999 - RNA, 19 nt, Artificial Sequence
  Description of Artificial Sequence: Synthetic oligonucleotide
gcccguucaugcauaaguu

SEQ ID NO: 44000 - RNA, 19 nt, Artificial Sequence
  Description of Artificial Sequence: Synthetic oligonucleotide
ccuuguucgcagacacagu

SEQ ID NO: 44001 - RNA, 19 nt, Artificial Sequence
  Description of Artificial Sequence: Synthetic oligonucleotide
gccguguguuagguauaca

SEQ ID NO: 44002 - RNA, 19 nt, Artificial Sequence
  Description of Artificial Sequence: Synthetic oligonucleotide
gcacguuaucacagagacu

SEQ ID NO: 44003 - RNA, 19 nt, Artificial Sequence
  Description of Artificial Sequence: Synthetic oligonucleotide
cacucaccauuagggcaua

SEQ ID NO: 44004 - RNA, 19 nt, Artificial Sequence
  Description of Artificial Sequence: Synthetic oligonucleotide
ccgggacugacaaggcggu

SEQ ID NO: 44005 - RNA, 19 nt, Artificial Sequence
  Description of Artificial Sequence: Synthetic oligonucleotide
gucgcccggucacggggau

SEQ ID NO: 44006 - RNA, 19 nt, Artificial Sequence
  Description of Artificial Sequence: Synthetic oligonucleotide
guggcccgggagcggcacu

SEQ ID NO: 44007 - RNA, 19 nt, Artificial Sequence
  Description of Artificial Sequence: Synthetic oligonucleotide
ccggccgcuguucccgcga

SEQ ID NO: 44008 - RNA, 19 nt, Artificial Sequence
  Description of Artificial Sequence: Synthetic oligonucleotide
ggccaucgauacaacuguu

SEQ ID NO: 44009 - RNA, 19 nt, Artificial Sequence
  Description of Artificial Sequence: Synthetic oligonucleotide
ccgugcguguuuagacacu

SEQ ID NO: 44010 - RNA, 19 nt, Artificial Sequence
  Description of Artificial Sequence: Synthetic oligonucleotide
gcgcuagacguggaagcuu

SEQ ID NO: 44011 - RNA, 19 nt, Artificial Sequence
  Description of Artificial Sequence: Synthetic oligonucleotide
ccacgccuccccguacaga

SEQ ID NO: 44012 - RNA, 19 nt, Artificial Sequence
  Description of Artificial Sequence: Synthetic oligonucleotide
cggucacggggauguugca

SEQ ID NO: 44013 - RNA, 19 nt, Artificial Sequence
  Description of Artificial Sequence: Synthetic oligonucleotide
cggguccaaaucccauuuu

SEQ ID NO: 44014 - RNA, 19 nt, Artificial Sequence
  Description of Artificial Sequence: Synthetic oligonucleotide
cgggacugacaaggcggua

SEQ ID NO: 44015 - RNA, 19 nt, Artificial Sequence
  Description of Artificial Sequence: Synthetic oligonucleotide
aaugaugugucacagaucc

SEQ ID NO: 44016 - RNA, 19 nt, Artificial Sequence
  Description of Artificial Sequence: Synthetic oligonucleotide
uauauauauauuuauauga

SEQ ID NO: 44017 - RNA, 19 nt, Artificial Sequence
  Description of Artificial Sequence: Synthetic oligonucleotide
ucuguaaagacucaggucc

SEQ ID NO: 44018 - RNA, 19 nt, Artificial Sequence
  Description of Artificial Sequence: Synthetic oligonucleotide
aauacuaucaucuggacau

SEQ ID NO: 44019 - RNA, 19 nt, Artificial Sequence
  Description of Artificial Sequence: Synthetic oligonucleotide
uauauauauauauauaugu

SEQ ID NO: 44020 - RNA, 19 nt, Artificial Sequence
  Description of Artificial Sequence: Synthetic oligonucleotide
uauauauauauauauauau

SEQ ID NO: 44021 - RNA, 19 nt, Artificial Sequence
  Description of Artificial Sequence: Synthetic oligonucleotide
ucauaagugaucaaguuga

SEQ ID NO: 44022 - RNA, 19 nt, Artificial Sequence
  Description of Artificial Sequence: Synthetic oligonucleotide
uguauauauauauauauau

SEQ ID NO: 44023 - RNA, 19 nt, Artificial Sequence
  Description of Artificial Sequence: Synthetic oligonucleotide
uauauauauauauuuauau

SEQ ID NO: 44024 - RNA, 19 nt, Artificial Sequence
  Description of Artificial Sequence: Synthetic oligonucleotide
uauauauguauauauauau

SEQ ID NO: 44025 - RNA, 19 nt, Artificial Sequence
  Description of Artificial Sequence: Synthetic oligonucleotide
uauauauauauguauauau

SEQ ID NO: 44026 - RNA, 19 nt, Artificial Sequence
  Description of Artificial Sequence: Synthetic oligonucleotide
uauauguauauauauauau

SEQ ID NO: 44027 - RNA, 19 nt, Artificial Sequence
  Description of Artificial Sequence: Synthetic oligonucleotide
aaagcgaucaucauaagug

SEQ ID NO: 44028 - RNA, 19 nt, Artificial Sequence
  Description of Artificial Sequence: Synthetic oligonucleotide
uauauauauguauauauau

SEQ ID NO: 44029 - RNA, 19 nt, Artificial Sequence
  Description of Artificial Sequence: Synthetic oligonucleotide
aauacgaugaagauagguc

SEQ ID NO: 44030 - RNA, 19 nt, Artificial Sequence
  Description of Artificial Sequence: Synthetic oligonucleotide
ucauaguuccaaaacaaag

SEQ ID NO: 44031 - RNA, 19 nt, Artificial Sequence
  Description of Artificial Sequence: Synthetic oligonucleotide
uauauauauauauauguau

SEQ ID NO: 44032 - RNA, 19 nt, Artificial Sequence
  Description of Artificial Sequence: Synthetic oligonucleotide
auauauauauauuuauaug

SEQ ID NO: 44033 - RNA, 19 nt, Artificial Sequence
  Description of Artificial Sequence: Synthetic oligonucleotide
uguguauauauauauauau

SEQ ID NO: 44034 - RNA, 19 nt, Artificial Sequence
  Description of Artificial Sequence: Synthetic oligonucleotide
uauguauauauauauauuu

SEQ ID NO: 44035 - RNA, 19 nt, Artificial Sequence
  Description of Artificial Sequence: Synthetic oligonucleotide
uguaucuuuaacuaaccca

SEQ ID NO: 44036 - RNA, 19 nt, Artificial Sequence
  Description of Artificial Sequence: Synthetic oligonucleotide
acuuuuguacacuaagagg

SEQ ID NO: 44037 - RNA, 19 nt, Artificial Sequence
  Description of Artificial Sequence: Synthetic oligonucleotide
aaacggaugacuaaucagg

SEQ ID NO: 44038 - RNA, 19 nt, Artificial Sequence
  Description of Artificial Sequence: Synthetic oligonucleotide
ugaaacgaaaaugaagagg

SEQ ID NO: 44039 - RNA, 19 nt, Artificial Sequence
  Description of Artificial Sequence: Synthetic oligonucleotide
uauguguauauauauauau

SEQ ID NO: 44040 - RNA, 19 nt, Artificial Sequence
  Description of Artificial Sequence: Synthetic oligonucleotide
acauuuuagaauuuagugu

SEQ ID NO: 44041 - RNA, 19 nt, Artificial Sequence
  Description of Artificial Sequence: Synthetic oligonucleotide
uguauauauauauauuuau

SEQ ID NO: 44042 - RNA, 19 nt, Artificial Sequence
  Description of Artificial Sequence: Synthetic oligonucleotide
ucuaccuaaagcaucugcc

SEQ ID NO: 44043 - RNA, 19 nt, Artificial Sequence
  Description of Artificial Sequence: Synthetic oligonucleotide
uaccagauaaagcaauggg

SEQ ID NO: 44044 - RNA, 19 nt, Artificial Sequence
  Description of Artificial Sequence: Synthetic oligonucleotide
uauauauauauauguauau

SEQ ID NO: 44045 - RNA, 19 nt, Artificial Sequence
  Description of Artificial Sequence: Synthetic oligonucleotide
aguguauguaacaaggugg

SEQ ID NO: 44046 - RNA, 19 nt, Artificial Sequence
  Description of Artificial Sequence: Synthetic oligonucleotide
uccaauacuaucaucugga

SEQ ID NO: 44047 - RNA, 19 nt, Artificial Sequence
  Description of Artificial Sequence: Synthetic oligonucleotide
cuacuggagauuuaaauac

SEQ ID NO: 44048 - RNA, 19 nt, Artificial Sequence
  Description of Artificial Sequence: Synthetic oligonucleotide
uacacauccaauuuucuac

SEQ ID NO: 44049 - RNA, 19 nt, Artificial Sequence
  Description of Artificial Sequence: Synthetic oligonucleotide
uuaguguugcagaaaacug

SEQ ID NO: 44050 - RNA, 19 nt, Artificial Sequence
  Description of Artificial Sequence: Synthetic oligonucleotide
acggcaagcagcuuucugc

SEQ ID NO: 44051 - RNA, 19 nt, Artificial Sequence
  Description of Artificial Sequence: Synthetic oligonucleotide
aacccuuggacacuuaacu

SEQ ID NO: 44052 - RNA, 19 nt, Artificial Sequence
  Description of Artificial Sequence: Synthetic oligonucleotide
ugucauauggcuccugcag

SEQ ID NO: 44053 - RNA, 19 nt, Artificial Sequence
  Description of Artificial Sequence: Synthetic oligonucleotide
auacgaugaagauaggucu

SEQ ID NO: 44054 - RNA, 19 nt, Artificial Sequence
  Description of Artificial Sequence: Synthetic oligonucleotide
uuguuaagguuucucaucu

SEQ ID NO: 44055 - RNA, 19 nt, Artificial Sequence
  Description of Artificial Sequence: Synthetic oligonucleotide
uguuugcugaccuggaugc

SEQ ID NO: 44056 - RNA, 19 nt, Artificial Sequence
  Description of Artificial Sequence: Synthetic oligonucleotide
caucagguuaaucucauag

SEQ ID NO: 44057 - RNA, 19 nt, Artificial Sequence
  Description of Artificial Sequence: Synthetic oligonucleotide
ugccaauuaaacagaaagc

SEQ ID NO: 44058 - RNA, 19 nt, Artificial Sequence
  Description of Artificial Sequence: Synthetic oligonucleotide
aggggcacaauuuaaagca

SEQ ID NO: 44059 - RNA, 19 nt, Artificial Sequence
  Description of Artificial Sequence: Synthetic oligonucleotide
auaugcguaguacuggguc

SEQ ID NO: 44060 - RNA, 19 nt, Artificial Sequence
  Description of Artificial Sequence: Synthetic oligonucleotide
  modified_base (13)..(13): a, c, u, g, unknown or other
uuuuagagcaggngaacca

SEQ ID NO: 44061 - RNA, 19 nt, Artificial Sequence
  Description of Artificial Sequence: Synthetic oligonucleotide
gaaacggaugacuaaucag

SEQ ID NO: 44062 - RNA, 19 nt, Artificial Sequence
  Description of Artificial Sequence: Synthetic oligonucleotide
uaaucaagauuuuaccaac

SEQ ID NO: 44063 - RNA, 19 nt, Artificial Sequence
  Description of Artificial Sequence: Synthetic oligonucleotide
aguguuucuaaauccuuag

SEQ ID NO: 44064 - RNA, 19 nt, Artificial Sequence
  Description of Artificial Sequence: Synthetic oligonucleotide
uauaaagcagaacuacaaa

SEQ ID NO: 44065 - RNA, 19 nt, Artificial Sequence
  Description of Artificial Sequence: Synthetic oligonucleotide
aucaaguugauggcuaagc

SEQ ID NO: 44066 - RNA, 19 nt, Artificial Sequence
  Description of Artificial Sequence: Synthetic oligonucleotide
gauggcuaagccaagauga

SEQ ID NO: 44067 - RNA, 19 nt, Artificial Sequence
  Description of Artificial Sequence: Synthetic oligonucleotide
auauauauauauauauaug

SEQ ID NO: 44068 - RNA, 19 nt, Artificial Sequence
  Description of Artificial Sequence: Synthetic oligonucleotide
cauaaucacucuaaucccc

SEQ ID NO: 44069 - RNA, 19 nt, Artificial Sequence
  Description of Artificial Sequence: Synthetic oligonucleotide
uuaguguucugcuguagag

SEQ ID NO: 44070 - RNA, 19 nt, Artificial Sequence
  Description of Artificial Sequence: Synthetic oligonucleotide
uugauaagauccaggauuc

SEQ ID NO: 44071 - RNA, 19 nt, Artificial Sequence
  Description of Artificial Sequence: Synthetic oligonucleotide
agcauaaggcacuucgcac

SEQ ID NO: 44072 - RNA, 19 nt, Artificial Sequence
  Description of Artificial Sequence: Synthetic oligonucleotide
cuagcuaagauaucccuac

SEQ ID NO: 44073 - RNA, 19 nt, Artificial Sequence
  Description of Artificial Sequence: Synthetic oligonucleotide
auccaauacuaucaucugg

SEQ ID NO: 44074 - RNA, 19 nt, Artificial Sequence
  Description of Artificial Sequence: Synthetic oligonucleotide
acacauccaauuuucuacg

SEQ ID NO: 44075 - RNA, 19 nt, Artificial Sequence
  Description of Artificial Sequence: Synthetic oligonucleotide
cuaaaggucaggagugugg

SEQ ID NO: 44076 - RNA, 19 nt, Artificial Sequence
  Description of Artificial Sequence: Synthetic oligonucleotide
aaagcccacauaaauucac

SEQ ID NO: 44077 - RNA, 19 nt, Artificial Sequence
  Description of Artificial Sequence: Synthetic oligonucleotide
  modified_base (2)..(2): a, c, u, g, unknown or other
cngagcuucucaaagcccg

SEQ ID NO: 44078 - RNA, 19 nt, Artificial Sequence
  Description of Artificial Sequence: Synthetic oligonucleotide
uugaaacgaaaaugaagag

SEQ ID NO: 44079 - RNA, 19 nt, Artificial Sequence
  Description of Artificial Sequence: Synthetic oligonucleotide
acauaugcguaguacuggg

SEQ ID NO: 44080 - RNA, 19 nt, Artificial Sequence
  Description of Artificial Sequence: Synthetic oligonucleotide
  modified_base (3)..(3): a, c, u, g, unknown or other
  modified_base (16)..(16): a, c, u, g, unknown or other
ggngaaccaaaucacngag

SEQ ID NO: 44081 - RNA, 19 nt, Artificial Sequence
  Description of Artificial Sequence: Synthetic oligonucleotide
gaccugaucuuccaauacg

SEQ ID NO: 44082 - RNA, 19 nt, Artificial Sequence
  Description of Artificial Sequence: Synthetic oligonucleotide
ucaggcuuaagaaacggau

SEQ ID NO: 44083 - RNA, 19 nt, Artificial Sequence
  Description of Artificial Sequence: Synthetic oligonucleotide
uuaaagugggacugguccc

SEQ ID NO: 44084 - RNA, 19 nt, Artificial Sequence
  Description of Artificial Sequence: Synthetic oligonucleotide
uaccuaaagcaucugccag

SEQ ID NO: 44085 - RNA, 19 nt, Artificial Sequence
  Description of Artificial Sequence: Synthetic oligonucleotide
agcuaagcuccacaacugc

SEQ ID NO: 44086 - RNA, 19 nt, Artificial Sequence
  Description of Artificial Sequence: Synthetic oligonucleotide
uccuaugaggccaauaauu

SEQ ID NO: 44087 - RNA, 19 nt, Artificial Sequence
  Description of Artificial Sequence: Synthetic oligonucleotide
cauccaauuuucuacggac

SEQ ID NO: 44088 - RNA, 19 nt, Artificial Sequence
  Description of Artificial Sequence: Synthetic oligonucleotide
aagcgaucaucauaaguga

SEQ ID NO: 44089 - RNA, 19 nt, Artificial Sequence
  Description of Artificial Sequence: Synthetic oligonucleotide
agauaucccuaccagauaa

SEQ ID NO: 44090 - RNA, 19 nt, Artificial Sequence
  Description of Artificial Sequence: Synthetic oligonucleotide
aguagcggaauauaguaaa

SEQ ID NO: 44091 - RNA, 19 nt, Artificial Sequence
  Description of Artificial Sequence: Synthetic oligonucleotide
  modified_base (5)..(5): a, c, u, g, unknown or other
  modified_base (18)..(18): a, c, u, g, unknown or other
caggngaaccaaaucacng

SEQ ID NO: 44092 - RNA, 19 nt, Artificial Sequence
  Description of Artificial Sequence: Synthetic oligonucleotide
  modified_base (16)..(16): a, c, u, g, unknown or other
aacuuuuagagcaggngaa

SEQ ID NO: 44093 - RNA, 19 nt, Artificial Sequence
  Description of Artificial Sequence: Synthetic oligonucleotide
uaucccuaccagauaaagc

SEQ ID NO: 44094 - RNA, 19 nt, Artificial Sequence
  Description of Artificial Sequence: Synthetic oligonucleotide
  modified_base (8)..(8): a, c, u, g, unknown or other
gagcaggngaaccaaauca

SEQ ID NO: 44095 - RNA, 19 nt, Artificial Sequence
  Description of Artificial Sequence: Synthetic oligonucleotide
caucccguaaauugguucc

SEQ ID NO: 44096 - RNA, 19 nt, Artificial Sequence
  Description of Artificial Sequence: Synthetic oligonucleotide
  modified_base (4)..(4): a, c, u, g, unknown or other
cacngagcuucucaaagcc

SEQ ID NO: 44097 - RNA, 19 nt, Artificial Sequence
  Description of Artificial Sequence: Synthetic oligonucleotide
aacgaaaaugaagaggcaa

SEQ ID NO: 44098 - RNA, 19 nt, Artificial Sequence
  Description of Artificial Sequence: Synthetic oligonucleotide
  modified_base (7)..(7): a, c, u, g, unknown or other
agcaggngaaccaaaucac

SEQ ID NO: 44099 - RNA, 19 nt, Artificial Sequence
  Description of Artificial Sequence: Synthetic oligonucleotide
uagcauaaggcacuucgca

SEQ ID NO: 44100 - RNA, 19 nt, Artificial Sequence
  Description of Artificial Sequence: Synthetic oligonucleotide
  modified_base (3)..(3): a, c, u, g, unknown or other
agnguaacccagcugagaa

SEQ ID NO: 44101 - RNA, 19 nt, Artificial Sequence
  Description of Artificial Sequence: Synthetic oligonucleotide
gagguuaugagcuuccaaa

SEQ ID NO: 44102 - RNA, 19 nt, Artificial Sequence
  Description of Artificial Sequence: Synthetic oligonucleotide
ucugaccucauacugguua

SEQ ID NO: 44103 - RNA, 19 nt, Artificial Sequence
  Description of Artificial Sequence: Synthetic oligonucleotide
agguuaaucucauaggguu

SEQ ID NO: 44104 - RNA, 19 nt, Artificial Sequence
  Description of Artificial Sequence: Synthetic oligonucleotide
cuuagugcagacacccucc

SEQ ID NO: 44105 - RNA, 19 nt, Artificial Sequence
  Description of Artificial Sequence: Synthetic oligonucleotide
agguuaugagcuuccaaag

SEQ ID NO: 44106 - RNA, 19 nt, Artificial Sequence
  Description of Artificial Sequence: Synthetic oligonucleotide
acugaccuaguacacuggg

SEQ ID NO: 44107 - RNA, 19 nt, Artificial Sequence
  Description of Artificial Sequence: Synthetic oligonucleotide
gaggggcacaauuuaaagc

SEQ ID NO: 44108 - RNA, 19 nt, Artificial Sequence
  Description of Artificial Sequence: Synthetic oligonucleotide
uuaauggucucguagcaua

SEQ ID NO: 44109 - RNA, 19 nt, Artificial Sequence
  Description of Artificial Sequence: Synthetic oligonucleotide
ugagcuuccaaaguguuuc

SEQ ID NO: 44110 - RNA, 19 nt, Artificial Sequence
  Description of Artificial Sequence: Synthetic oligonucleotide
gauaagauccaggauucug

SEQ ID NO: 44111 - RNA, 19 nt, Artificial Sequence
  Description of Artificial Sequence: Synthetic oligonucleotide
  modified_base (9)..(9): a, c, u, g, unknown or other
agagcaggngaaccaaauc

SEQ ID NO: 44112 - RNA, 19 nt, Artificial Sequence
  Description of Artificial Sequence: Synthetic oligonucleotide
uuuagguagugugagaaua

SEQ ID NO: 44113 - RNA, 19 nt, Artificial Sequence
  Description of Artificial Sequence: Synthetic oligonucleotide
uuccguuacauaugcguag

SEQ ID NO: 44114 - RNA, 19 nt, Artificial Sequence
  Description of Artificial Sequence: Synthetic oligonucleotide
cuuccuacaguuagaggcc

SEQ ID NO: 44115 - RNA, 19 nt, Artificial Sequence
  Description of Artificial Sequence: Synthetic oligonucleotide
ucagcuauuggagaauugu

SEQ ID NO: 44116 - RNA, 19 nt, Artificial Sequence
  Description of Artificial Sequence: Synthetic oligonucleotide
guguauguaacaagguggg

SEQ ID NO: 44117 - RNA, 19 nt, Artificial Sequence
  Description of Artificial Sequence: Synthetic oligonucleotide
uuggcguuccguuacauau

SEQ ID NO: 44118 - RNA, 19 nt, Artificial Sequence
  Description of Artificial Sequence: Synthetic oligonucleotide
auauauauauauauguaua

SEQ ID NO: 44119 - RNA, 19 nt, Artificial Sequence
  Description of Artificial Sequence: Synthetic oligonucleotide
cuuguuaagguuucucauc

SEQ ID NO: 44120 - RNA, 19 nt, Artificial Sequence
  Description of Artificial Sequence: Synthetic oligonucleotide
ugaccuaguacacuggguu

SEQ ID NO: 44121 - RNA, 19 nt, Artificial Sequence
  Description of Artificial Sequence: Synthetic oligonucleotide
ugugaaucaacuccuccau

SEQ ID NO: 44122 - RNA, 19 nt, Artificial Sequence
  Description of Artificial Sequence: Synthetic oligonucleotide
ugcagcauggguguuaaca

SEQ ID NO: 44123 - RNA, 19 nt, Artificial Sequence
  Description of Artificial Sequence: Synthetic oligonucleotide
agaauuuaguguugcagaa

SEQ ID NO: 44124 - RNA, 19 nt, Artificial Sequence
  Description of Artificial Sequence: Synthetic oligonucleotide
cuccauacccuucucauac

SEQ ID NO: 44125 - RNA, 19 nt, Artificial Sequence
  Description of Artificial Sequence: Synthetic oligonucleotide
aagggcaacucgcucccac

SEQ ID NO: 44126 - RNA, 19 nt, Artificial Sequence
  Description of Artificial Sequence: Synthetic oligonucleotide
cuaagagggaaaguagcgg

SEQ ID NO: 44127 - RNA, 19 nt, Artificial Sequence
  Description of Artificial Sequence: Synthetic oligonucleotide
aagcccacauaaauucacc

SEQ ID NO: 44128 - RNA, 19 nt, Artificial Sequence
  Description of Artificial Sequence: Synthetic oligonucleotide
ugcuaaaguguauguaaca

SEQ ID NO: 44129 - RNA, 19 nt, Artificial Sequence
  Description of Artificial Sequence: Synthetic oligonucleotide
guuagugcaacgaauguuc

SEQ ID NO: 44130 - RNA, 19 nt, Artificial Sequence
  Description of Artificial Sequence: Synthetic oligonucleotide
  modified_base (7)..(7): a, c, u, g, unknown or other
aaucacngagcuucucaaa

SEQ ID NO: 44131 - RNA, 19 nt, Artificial Sequence
  Description of Artificial Sequence: Synthetic oligonucleotide
  modified_base (5)..(5): a, c, u, g, unknown or other
ucacngagcuucucaaagc

SEQ ID NO: 44132 - RNA, 19 nt, Artificial Sequence
  Description of Artificial Sequence: Synthetic oligonucleotide
uaagaaacggaugacuaau

SEQ ID NO: 44133 - RNA, 19 nt, Artificial Sequence
  Description of Artificial Sequence: Synthetic oligonucleotide
cagguuaaagcgaucauca

SEQ ID NO: 44134 - RNA, 19 nt, Artificial Sequence
  Description of Artificial Sequence: Synthetic oligonucleotide
auauaacucuucauaguuc

SEQ ID NO: 44135 - RNA, 19 nt, Artificial Sequence
  Description of Artificial Sequence: Synthetic oligonucleotide
  modified_base (4)..(4): a, c, u, g, unknown or other
  modified_base (17)..(17): a, c, u, g, unknown or other
aggngaaccaaaucacnga

SEQ ID NO: 44136 - RNA, 19 nt, Artificial Sequence
  Description of Artificial Sequence: Synthetic oligonucleotide
guguguaaagaugauauuc

SEQ ID NO: 44137 - RNA, 19 nt, Artificial Sequence
  Description of Artificial Sequence: Synthetic oligonucleotide
  modified_base (6)..(6): a, c, u, g, unknown or other
gcaagnguaacccagcuga

SEQ ID NO: 44138 - RNA, 19 nt, Artificial Sequence
  Description of Artificial Sequence: Synthetic oligonucleotide
aaagcgaccugaucuucca

SEQ ID NO: 44139 - RNA, 19 nt, Artificial Sequence
  Description of Artificial Sequence: Synthetic oligonucleotide
cuagugggaacaaucacca

SEQ ID NO: 44140 - RNA, 19 nt, Artificial Sequence
  Description of Artificial Sequence: Synthetic oligonucleotide
uaacaaggugggccaaggg

SEQ ID NO: 44141 - RNA, 19 nt, Artificial Sequence
  Description of Artificial Sequence: Synthetic oligonucleotide
gugagaauaauauccucca

SEQ ID NO: 44142 - RNA, 19 nt, Artificial Sequence
  Description of Artificial Sequence: Synthetic oligonucleotide
uuagugcaacgaauguuca

SEQ ID NO: 44143 - RNA, 19 nt, Artificial Sequence
  Description of Artificial Sequence: Synthetic oligonucleotide
auauauauauauauaugua

SEQ ID NO: 44144 - RNA, 19 nt, Artificial Sequence
  Description of Artificial Sequence: Synthetic oligonucleotide
agugcaacgaauguucagu

SEQ ID NO: 44145 - RNA, 19 nt, Artificial Sequence
  Description of Artificial Sequence: Synthetic oligonucleotide
  modified_base (8)..(8): a, c, u, g, unknown or other
aagcaagnguaacccagcu

SEQ ID NO: 44146 - RNA, 19 nt, Artificial Sequence
  Description of Artificial Sequence: Synthetic oligonucleotide
aacgaauguucagucagca

SEQ ID NO: 44147 - RNA, 19 nt, Artificial Sequence
  Description of Artificial Sequence: Synthetic oligonucleotide
cuugauaagauccaggauu

SEQ ID NO: 44148 - RNA, 19 nt, Artificial Sequence
  Description of Artificial Sequence: Synthetic oligonucleotide
uccccuuaaucccagcaac

SEQ ID NO: 44149 - RNA, 19 nt, Artificial Sequence
  Description of Artificial Sequence: Synthetic oligonucleotide
ugucaucccguaaauuggu

SEQ ID NO: 44150 - RNA, 19 nt, Artificial Sequence
  Description of Artificial Sequence: Synthetic oligonucleotide
gugggaacaaucaccauug

SEQ ID NO: 44151 - RNA, 19 nt, Artificial Sequence
  Description of Artificial Sequence: Synthetic oligonucleotide
  modified_base (7)..(7): a, c, u, g, unknown or other
agcaagnguaacccagcug

SEQ ID NO: 44152 - RNA, 19 nt, Artificial Sequence
  Description of Artificial Sequence: Synthetic oligonucleotide
auauauauauauguauaua

SEQ ID NO: 44153 - RNA, 19 nt, Artificial Sequence
  Description of Artificial Sequence: Synthetic oligonucleotide
acgucaagugccauacugc

SEQ ID NO: 44154 - RNA, 19 nt, Artificial Sequence
  Description of Artificial Sequence: Synthetic oligonucleotide
auauauauguauauauaua

SEQ ID NO: 44155 - RNA, 19 nt, Artificial Sequence
  Description of Artificial Sequence: Synthetic oligonucleotide
acgaauguucagucagcac

SEQ ID NO: 44156 - RNA, 19 nt, Artificial Sequence
  Description of Artificial Sequence: Synthetic oligonucleotide
uucaggcuuaagaaacgga

SEQ ID NO: 44157 - RNA, 19 nt, Artificial Sequence
  Description of Artificial Sequence: Synthetic oligonucleotide
uuaaucccagcaaccuuca

SEQ ID NO: 44158 - RNA, 19 nt, Artificial Sequence
  Description of Artificial Sequence: Synthetic oligonucleotide
acuaaucagggagaaguug

SEQ ID NO: 44159 - RNA, 19 nt, Artificial Sequence
  Description of Artificial Sequence: Synthetic oligonucleotide
cauacccuucucauacucc

SEQ ID NO: 44160 - RNA, 19 nt, Artificial Sequence
  Description of Artificial Sequence: Synthetic oligonucleotide
auaucccuaccagauaaag

SEQ ID NO: 44161 - RNA, 19 nt, Artificial Sequence
  Description of Artificial Sequence: Synthetic oligonucleotide
cacgucaagugccauacug

SEQ ID NO: 44162 - RNA, 19 nt, Artificial Sequence
  Description of Artificial Sequence: Synthetic oligonucleotide
auauauauauguauauaua

SEQ ID NO: 44163 - RNA, 19 nt, Artificial Sequence
  Description of Artificial Sequence: Synthetic oligonucleotide
  modified_base (11)..(11): a, c, u, g, unknown or other
agaaagcaagnguaaccca

SEQ ID NO: 44164 - RNA, 19 nt, Artificial Sequence
  Description of Artificial Sequence: Synthetic oligonucleotide
uacgaugaagauaggucuc

SEQ ID NO: 44165 - RNA, 19 nt, Artificial Sequence
  Description of Artificial Sequence: Synthetic oligonucleotide
aaaugaucgacugguuuau

SEQ ID NO: 44166 - RNA, 19 nt, Artificial Sequence
  Description of Artificial Sequence: Synthetic oligonucleotide
aaauaaguaauaagcucuu

SEQ ID NO: 44167 - RNA, 19 nt, Artificial Sequence
  Description of Artificial Sequence: Synthetic oligonucleotide
auuccugcuaaaguguaug

SEQ ID NO: 44168 - RNA, 19 nt, Artificial Sequence
  Description of Artificial Sequence: Synthetic oligonucleotide
uugccugacaaagauauuu

SEQ ID NO: 44169 - RNA, 19 nt, Artificial Sequence
  Description of Artificial Sequence: Synthetic oligonucleotide
gguuacaacccuuggacac

SEQ ID NO: 44170 - RNA, 19 nt, Artificial Sequence
  Description of Artificial Sequence: Synthetic oligonucleotide
ucccuuguggcuagggaca

SEQ ID NO: 44171 - RNA, 19 nt, Artificial Sequence
  Description of Artificial Sequence: Synthetic oligonucleotide
uaaaggcaguuccccauga

SEQ ID NO: 44172 - RNA, 19 nt, Artificial Sequence
  Description of Artificial Sequence: Synthetic oligonucleotide
uuaaagcgaucaucauaag

SEQ ID NO: 44173 - RNA, 19 nt, Artificial Sequence
  Description of Artificial Sequence: Synthetic oligonucleotide
caaagcgaccugaucuucc

SEQ ID NO: 44174 - RNA, 19 nt, Artificial Sequence
  Description of Artificial Sequence: Synthetic oligonucleotide
cacauccaauuuucuacgg

SEQ ID NO: 44175 - RNA, 19 nt, Artificial Sequence
  Description of Artificial Sequence: Synthetic oligonucleotide
gguagcgaucaccacaugc

SEQ ID NO: 44176 - RNA, 19 nt, Artificial Sequence
  Description of Artificial Sequence: Synthetic oligonucleotide
ugcaacgaauguucaguca

SEQ ID NO: 44177 - RNA, 19 nt, Artificial Sequence
  Description of Artificial Sequence: Synthetic oligonucleotide
gacucgcuuugccacagag

SEQ ID NO: 44178 - RNA, 19 nt, Artificial Sequence
  Description of Artificial Sequence: Synthetic oligonucleotide
aacggcaagcagcuuucug

SEQ ID NO: 44179 - RNA, 19 nt, Artificial Sequence
  Description of Artificial Sequence: Synthetic oligonucleotide
guauauauauauauuuaua

SEQ ID NO: 44180 - RNA, 19 nt, Artificial Sequence
  Description of Artificial Sequence: Synthetic oligonucleotide
cugagcucuuauauaacuc

SEQ ID NO: 44181 - RNA, 19 nt, Artificial Sequence
  Description of Artificial Sequence: Synthetic oligonucleotide
guauauauauauauauaua

SEQ ID NO: 44182 - RNA, 19 nt, Artificial Sequence
  Description of Artificial Sequence: Synthetic oligonucleotide
cuuuccuuugggagcgacg

SEQ ID NO: 44183 - RNA, 19 nt, Artificial Sequence
  Description of Artificial Sequence: Synthetic oligonucleotide
acauccaauuuucuacgga

SEQ ID NO: 44184 - RNA, 19 nt, Artificial Sequence
  Description of Artificial Sequence: Synthetic oligonucleotide
ugcaguugugaaucaacuc

SEQ ID NO: 44185 - RNA, 19 nt, Artificial Sequence
  Description of Artificial Sequence: Synthetic oligonucleotide
ugguuacaacccuuggaca

SEQ ID NO: 44186 - RNA, 19 nt, Artificial Sequence
  Description of Artificial Sequence: Synthetic oligonucleotide
  modified_base (4)..(4): a, c, u, g, unknown or other
aagnguaacccagcugaga

SEQ ID NO: 44187 - RNA, 19 nt, Artificial Sequence
  Description of Artificial Sequence: Synthetic oligonucleotide
  modified_base (9)..(9): a, c, u, g, unknown or other
caaaucacngagcuucuca

SEQ ID NO: 44188 - RNA, 19 nt, Artificial Sequence
  Description of Artificial Sequence: Synthetic oligonucleotide
gaugcaaauuugacugacc

SEQ ID NO: 44189 - RNA, 19 nt, Artificial Sequence
  Description of Artificial Sequence: Synthetic oligonucleotide
uaguguucugcuguagagc

SEQ ID NO: 44190 - RNA, 19 nt, Artificial Sequence
  Description of Artificial Sequence: Synthetic oligonucleotide
acaacuuaucugccucauc

SEQ ID NO: 44191 - RNA, 19 nt, Artificial Sequence
  Description of Artificial Sequence: Synthetic oligonucleotide
uguuuaaagugggacuggu

SEQ ID NO: 44192 - RNA, 19 nt, Artificial Sequence
  Description of Artificial Sequence: Synthetic oligonucleotide
auauguauauauauauauu

SEQ ID NO: 44193 - RNA, 19 nt, Artificial Sequence
  Description of Artificial Sequence: Synthetic oligonucleotide
aguuagaggccaaagcaca

SEQ ID NO: 44194 - RNA, 19 nt, Artificial Sequence
  Description of Artificial Sequence: Synthetic oligonucleotide
auggugcgucuacucagcc

SEQ ID NO: 44195 - RNA, 19 nt, Artificial Sequence
  Description of Artificial Sequence: Synthetic oligonucleotide
cguagcauaaggcacuucg

SEQ ID NO: 44196 - RNA, 19 nt, Artificial Sequence
  Description of Artificial Sequence: Synthetic oligonucleotide
uuuguacacuaagagggaa

SEQ ID NO: 44197 - RNA, 19 nt, Artificial Sequence
  Description of Artificial Sequence: Synthetic oligonucleotide
cuuugagaagaguugcaga

SEQ ID NO: 44198 - RNA, 19 nt, Artificial Sequence
  Description of Artificial Sequence: Synthetic oligonucleotide
auguauauauauauauuua

SEQ ID NO: 44199 - RNA, 19 nt, Artificial Sequence
  Description of Artificial Sequence: Synthetic oligonucleotide
auaagugaucaaguugaug

SEQ ID NO: 44200 - RNA, 19 nt, Artificial Sequence
  Description of Artificial Sequence: Synthetic oligonucleotide
caacgaauguucagucagc

SEQ ID NO: 44201 - RNA, 19 nt, Artificial Sequence
  Description of Artificial Sequence: Synthetic oligonucleotide
  modified_base (2)..(2): a, c, u, g, unknown or other
  modified_base (15)..(15): a, c, u, g, unknown or other
gngaaccaaaucacngagc

SEQ ID NO: 44202 - RNA, 19 nt, Artificial Sequence
  Description of Artificial Sequence: Synthetic oligonucleotide
auauuuauaugaacccaga

SEQ ID NO: 44203 - RNA, 19 nt, Artificial Sequence
  Description of Artificial Sequence: Synthetic oligonucleotide
cuaccuaaagcaucugcca

SEQ ID NO: 44204 - RNA, 19 nt, Artificial Sequence
  Description of Artificial Sequence: Synthetic oligonucleotide
gaugugucacagauccaag

SEQ ID NO: 44205 - RNA, 19 nt, Artificial Sequence
  Description of Artificial Sequence: Synthetic oligonucleotide
auauauguauauauauaua

SEQ ID NO: 44206 - RNA, 19 nt, Artificial Sequence
  Description of Artificial Sequence: Synthetic oligonucleotide
  modified_base (5)..(5): a, c, u, g, unknown or other
caagnguaacccagcugag

SEQ ID NO: 44207 - RNA, 19 nt, Artificial Sequence
  Description of Artificial Sequence: Synthetic oligonucleotide
uuggacacuuaacucuuua

SEQ ID NO: 44208 - RNA, 19 nt, Artificial Sequence
  Description of Artificial Sequence: Synthetic oligonucleotide
gccucauuaugucaucccg

SEQ ID NO: 44209 - RNA, 19 nt, Artificial Sequence
  Description of Artificial Sequence: Synthetic oligonucleotide
uguguguaaagaugauauu

SEQ ID NO: 44210 - RNA, 19 nt, Artificial Sequence
  Description of Artificial Sequence: Synthetic oligonucleotide
uggcuagggacauuagaau

SEQ ID NO: 44211 - RNA, 19 nt, Artificial Sequence
  Description of Artificial Sequence: Synthetic oligonucleotide
agcauggguguuaacagcu

SEQ ID NO: 44212 - RNA, 19 nt, Artificial Sequence
  Description of Artificial Sequence: Synthetic oligonucleotide
augcguaguacugggucac

SEQ ID NO: 44213 - RNA, 19 nt, Artificial Sequence
  Description of Artificial Sequence: Synthetic oligonucleotide
guaaauugguuccuccugu

SEQ ID NO: 44214 - RNA, 19 nt, Artificial Sequence
  Description of Artificial Sequence: Synthetic oligonucleotide
uggcuaagccaagaugacc

SEQ ID NO: 44215 - RNA, 19 nt, Artificial Sequence
  Description of Artificial Sequence: Synthetic oligonucleotide
gaugacuaaucagggagaa

SEQ ID NO: 44216 - RNA, 19 nt, Artificial Sequence
  Description of Artificial Sequence: Synthetic oligonucleotide
agccguucaaguaagggaa

SEQ ID NO: 44217 - RNA, 19 nt, Artificial Sequence
  Description of Artificial Sequence: Synthetic oligonucleotide
auggcuaagccaagaugac

SEQ ID NO: 44218 - RNA, 19 nt, Artificial Sequence
  Description of Artificial Sequence: Synthetic oligonucleotide
caacccuuggacacuuaac

SEQ ID NO: 44219 - RNA, 19 nt, Artificial Sequence
  Description of Artificial Sequence: Synthetic oligonucleotide
caaguucucuagugggaac

SEQ ID NO: 44220 - RNA, 19 nt, Artificial Sequence
  Description of Artificial Sequence: Synthetic oligonucleotide
gucucguagcauaaggcac

SEQ ID NO: 44221 - RNA, 19 nt, Artificial Sequence
  Description of Artificial Sequence: Synthetic oligonucleotide
gcaguuagugcaacgaaug

SEQ ID NO: 44222 - RNA, 19 nt, Artificial Sequence
  Description of Artificial Sequence: Synthetic oligonucleotide
uccguuacauaugcguagu

SEQ ID NO: 44223 - RNA, 19 nt, Artificial Sequence
  Description of Artificial Sequence: Synthetic oligonucleotide
guguauauauauauauaua

SEQ ID NO: 44224 - RNA, 19 nt, Artificial Sequence
  Description of Artificial Sequence: Synthetic oligonucleotide
acuucaacuugaaacgaaa

SEQ ID NO: 44225 - RNA, 19 nt, Artificial Sequence
  Description of Artificial Sequence: Synthetic oligonucleotide
ugacaucacuaguccaccu

SEQ ID NO: 44226 - RNA, 19 nt, Artificial Sequence
  Description of Artificial Sequence: Synthetic oligonucleotide
auauguguauauauauaua

SEQ ID NO: 44227 - RNA, 19 nt, Artificial Sequence
  Description of Artificial Sequence: Synthetic oligonucleotide
guggcuagggacauuagaa

SEQ ID NO: 44228 - RNA, 19 nt, Artificial Sequence
  Description of Artificial Sequence: Synthetic oligonucleotide
uuacuugguacuguuuguu

SEQ ID NO: 44229 - RNA, 19 nt, Artificial Sequence
  Description of Artificial Sequence: Synthetic oligonucleotide
uggugcgucuacucagccc

SEQ ID NO: 44230 - RNA, 19 nt, Artificial Sequence
  Description of Artificial Sequence: Synthetic oligonucleotide
ugugguauucugccacaua

SEQ ID NO: 44231 - RNA, 19 nt, Artificial Sequence
  Description of Artificial Sequence: Synthetic oligonucleotide
ugcaguagagucagcuauu

SEQ ID NO: 44232 - RNA, 19 nt, Artificial Sequence
  Description of Artificial Sequence: Synthetic oligonucleotide
ggcguuccguuacauaugc

SEQ ID NO: 44233 - RNA, 19 nt, Artificial Sequence
  Description of Artificial Sequence: Synthetic oligonucleotide
cagccguucaaguaaggga

SEQ ID NO: 44234 - RNA, 19 nt, Artificial Sequence
  Description of Artificial Sequence: Synthetic oligonucleotide
auguguauauauauauaua

SEQ ID NO: 44235 - RNA, 19 nt, Artificial Sequence
  Description of Artificial Sequence: Synthetic oligonucleotide
cagcgauuuacaaugcaaa

SEQ ID NO: 44236 - RNA, 19 nt, Artificial Sequence
  Description of Artificial Sequence: Synthetic oligonucleotide
ggcuaagccaagaugacca

SEQ ID NO: 44237 - RNA, 19 nt, Artificial Sequence
  Description of Artificial Sequence: Synthetic oligonucleotide
aggccaaagcacauuuuag

SEQ ID NO: 44238 - RNA, 19 nt, Artificial Sequence
  Description of Artificial Sequence: Synthetic oligonucleotide
ccuuugggagcgacgaugg

SEQ ID NO: 44239 - RNA, 19 nt, Artificial Sequence
  Description of Artificial Sequence: Synthetic oligonucleotide
auacugguuacaacccuug

SEQ ID NO: 44240 - RNA, 19 nt, Artificial Sequence
  Description of Artificial Sequence: Synthetic oligonucleotide
ggcacuucgcacaaauaag

SEQ ID NO: 44241 - RNA, 19 nt, Artificial Sequence
  Description of Artificial Sequence: Synthetic oligonucleotide
ccaaccaucuuuucugaac

SEQ ID NO: 44242 - RNA, 19 nt, Artificial Sequence
  Description of Artificial Sequence: Synthetic oligonucleotide
uacaggcucgcugugguau

SEQ ID NO: 44243 - RNA, 19 nt, Artificial Sequence
  Description of Artificial Sequence: Synthetic oligonucleotide
uguuucccuagcuccugac

SEQ ID NO: 44244 - RNA, 19 nt, Artificial Sequence
  Description of Artificial Sequence: Synthetic oligonucleotide
gacugaagacagcuaagcu

SEQ ID NO: 44245 - RNA, 19 nt, Artificial Sequence
  Description of Artificial Sequence: Synthetic oligonucleotide
gacugaccuguagagcaag

SEQ ID NO: 44246 - RNA, 19 nt, Artificial Sequence
  Description of Artificial Sequence: Synthetic oligonucleotide
cucauuaugucaucccgua

SEQ ID NO: 44247 - RNA, 19 nt, Artificial Sequence
  Description of Artificial Sequence: Synthetic oligonucleotide
uuuggcguuccguuacaua

SEQ ID NO: 44248 - RNA, 19 nt, Artificial Sequence
  Description of Artificial Sequence: Synthetic oligonucleotide
ccuaaagcaucugccagcg

SEQ ID NO: 44249 - RNA, 19 nt, Artificial Sequence
  Description of Artificial Sequence: Synthetic oligonucleotide
gugcaacgaauguucaguc

SEQ ID NO: 44250 - RNA, 19 nt, Artificial Sequence
  Description of Artificial Sequence: Synthetic oligonucleotide
agcaguuagugcaacgaau

SEQ ID NO: 44251 - RNA, 19 nt, Artificial Sequence
  Description of Artificial Sequence: Synthetic oligonucleotide
agggaaaguagcggaauau

SEQ ID NO: 44252 - RNA, 19 nt, Artificial Sequence
  Description of Artificial Sequence: Synthetic oligonucleotide
gcuaaaguguauguaacaa

SEQ ID NO: 44253 - RNA, 19 nt, Artificial Sequence
  Description of Artificial Sequence: Synthetic oligonucleotide
augacuaaucagggagaag

SEQ ID NO: 44254 - RNA, 19 nt, Artificial Sequence
  Description of Artificial Sequence: Synthetic oligonucleotide
ugauaagauccaggauucu

SEQ ID NO: 44255 - RNA, 19 nt, Artificial Sequence
  Description of Artificial Sequence: Synthetic oligonucleotide
ucacucuaauccccuuaau

SEQ ID NO: 44256 - RNA, 19 nt, Artificial Sequence
  Description of Artificial Sequence: Synthetic oligonucleotide
uccugcuaaaguguaugua

SEQ ID NO: 44257 - RNA, 19 nt, Artificial Sequence
  Description of Artificial Sequence: Synthetic oligonucleotide
gagaacggcaagcagcuuu

SEQ ID NO: 44258 - RNA, 19 nt, Artificial Sequence
  Description of Artificial Sequence: Synthetic oligonucleotide
  modified_base (2)..(2): a, c, u, g, unknown or other
gnguaacccagcugagaaa

SEQ ID NO: 44259 - RNA, 19 nt, Artificial Sequence
  Description of Artificial Sequence: Synthetic oligonucleotide
acauggcuuaauucccaaa

SEQ ID NO: 44260 - RNA, 19 nt, Artificial Sequence
  Description of Artificial Sequence: Synthetic oligonucleotide
gaccuaguacacuggguua

SEQ ID NO: 44261 - RNA, 19 nt, Artificial Sequence
  Description of Artificial Sequence: Synthetic oligonucleotide
gcggaauauaguaaaaucu

SEQ ID NO: 44262 - RNA, 19 nt, Artificial Sequence
  Description of Artificial Sequence: Synthetic oligonucleotide
gcuaagcuccacaacugcc

SEQ ID NO: 44263 - RNA, 19 nt, Artificial Sequence
  Description of Artificial Sequence: Synthetic oligonucleotide
caauacgaugaagauaggu

SEQ ID NO: 44264 - RNA, 19 nt, Artificial Sequence
  Description of Artificial Sequence: Synthetic oligonucleotide
cagguuaaucucauagggu

SEQ ID NO: 44265 - RNA, 19 nt, Artificial Sequence
  Description of Artificial Sequence: Synthetic oligonucleotide
cccucucaucuuuagcugc

SEQ ID NO: 44266 - RNA, 19 nt, Artificial Sequence
  Description of Artificial Sequence: Synthetic oligonucleotide
caucauaagugaucaaguu

SEQ ID NO: 44267 - RNA, 19 nt, Artificial Sequence
  Description of Artificial Sequence: Synthetic oligonucleotide
guuccguuacauaugcgua

SEQ ID NO: 44268 - RNA, 19 nt, Artificial Sequence
  Description of Artificial Sequence: Synthetic oligonucleotide
ccuuagugcagacacccuc

SEQ ID NO: 44269 - RNA, 19 nt, Artificial Sequence
  Description of Artificial Sequence: Synthetic oligonucleotide
cccguaaauugguuccucc

SEQ ID NO: 44270 - RNA, 19 nt, Artificial Sequence
  Description of Artificial Sequence: Synthetic oligonucleotide
gucagcuauuggagaauug

SEQ ID NO: 44271 - RNA, 19 nt, Artificial Sequence
  Description of Artificial Sequence: Synthetic oligonucleotide
ggcgcugacaucacuaguc

SEQ ID NO: 44272 - RNA, 19 nt, Artificial Sequence
  Description of Artificial Sequence: Synthetic oligonucleotide
agcuuaguguucugcugua

SEQ ID NO: 44273 - RNA, 19 nt, Artificial Sequence
  Description of Artificial Sequence: Synthetic oligonucleotide
agguagugugagaauaaua

SEQ ID NO: 44274 - RNA, 19 nt, Artificial Sequence
  Description of Artificial Sequence: Synthetic oligonucleotide
cacccaaaagcuggcuuac

SEQ ID NO: 44275 - RNA, 19 nt, Artificial Sequence
  Description of Artificial Sequence: Synthetic oligonucleotide
agcgaucaucauaagugau

SEQ ID NO: 44276 - RNA, 19 nt, Artificial Sequence
  Description of Artificial Sequence: Synthetic oligonucleotide
gcgcugacaucacuagucc

SEQ ID NO: 44277 - RNA, 19 nt, Artificial Sequence
  Description of Artificial Sequence: Synthetic oligonucleotide
uggcuuacuucaccuccua

SEQ ID NO: 44278 - RNA, 19 nt, Artificial Sequence
  Description of Artificial Sequence: Synthetic oligonucleotide
guagacgguguguguguuc

SEQ ID NO: 44279 - RNA, 19 nt, Artificial Sequence
  Description of Artificial Sequence: Synthetic oligonucleotide
  modified_base (11)..(11): a, c, u, g, unknown or other
accaaaucacngagcuucu

SEQ ID NO: 44280 - RNA, 19 nt, Artificial Sequence
  Description of Artificial Sequence: Synthetic oligonucleotide
ggagcgacgauggugcguc

SEQ ID NO: 44281 - RNA, 19 nt, Artificial Sequence
  Description of Artificial Sequence: Synthetic oligonucleotide
cagcuuaguguucugcugu

SEQ ID NO: 44282 - RNA, 19 nt, Artificial Sequence
  Description of Artificial Sequence: Synthetic oligonucleotide
uagugggaacaaucaccau

SEQ ID NO: 44283 - RNA, 19 nt, Artificial Sequence
  Description of Artificial Sequence: Synthetic oligonucleotide
ccuccuaugaggccaauaa

SEQ ID NO: 44284 - RNA, 19 nt, Artificial Sequence
  Description of Artificial Sequence: Synthetic oligonucleotide
ggcuccgacacaucuccac

SEQ ID NO: 44285 - RNA, 19 nt, Artificial Sequence
  Description of Artificial Sequence: Synthetic oligonucleotide
gcuuaagaaacggaugacu

SEQ ID NO: 44286 - RNA, 19 nt, Artificial Sequence
  Description of Artificial Sequence: Synthetic oligonucleotide
gucaagugccauacugcuc

SEQ ID NO: 44287 - RNA, 19 nt, Artificial Sequence
  Description of Artificial Sequence: Synthetic oligonucleotide
aaggcacuucgcacaaaua

SEQ ID NO: 44288 - RNA, 19 nt, Artificial Sequence
  Description of Artificial Sequence: Synthetic oligonucleotide
  modified_base (6)..(6): a, c, u, g, unknown or other
  modified_base (19)..(19): a, c, u, g, unknown or other
gcaggngaaccaaaucacn

SEQ ID NO: 44289 - RNA, 19 nt, Artificial Sequence
  Description of Artificial Sequence: Synthetic oligonucleotide
ggcuuaagaaacggaugac

SEQ ID NO: 44290 - RNA, 19 nt, Artificial Sequence
  Description of Artificial Sequence: Synthetic oligonucleotide
guuacaacccuuggacacu

SEQ ID NO: 44291 - RNA, 19 nt, Artificial Sequence
  Description of Artificial Sequence: Synthetic oligonucleotide
ugcgucuacucagcccaga

SEQ ID NO: 44292 - RNA, 19 nt, Artificial Sequence
  Description of Artificial Sequence: Synthetic oligonucleotide
caacucgcucccacaccac

SEQ ID NO: 44293 - RNA, 19 nt, Artificial Sequence
  Description of Artificial Sequence: Synthetic oligonucleotide
ccacaugcacuguaucauc

SEQ ID NO: 44294 - RNA, 19 nt, Artificial Sequence
  Description of Artificial Sequence: Synthetic oligonucleotide
ccaauacgaugaagauagg

SEQ ID NO: 44295 - RNA, 19 nt, Artificial Sequence
  Description of Artificial Sequence: Synthetic oligonucleotide
gggcaacucgcucccacac

SEQ ID NO: 44296 - RNA, 19 nt, Artificial Sequence
  Description of Artificial Sequence: Synthetic oligonucleotide
cauaugcguaguacugggu

SEQ ID NO: 44297 - RNA, 19 nt, Artificial Sequence
  Description of Artificial Sequence: Synthetic oligonucleotide
cauaagugaucaaguugau

SEQ ID NO: 44298 - RNA, 19 nt, Artificial Sequence
  Description of Artificial Sequence: Synthetic oligonucleotide
cugaccuaguacacugggu

SEQ ID NO: 44299 - RNA, 19 nt, Artificial Sequence
  Description of Artificial Sequence: Synthetic oligonucleotide
gacuaaucagggagaaguu

SEQ ID NO: 44300 - RNA, 19 nt, Artificial Sequence
  Description of Artificial Sequence: Synthetic oligonucleotide
gcgacgauggugcgucuac

SEQ ID NO: 44301 - RNA, 19 nt, Artificial Sequence
  Description of Artificial Sequence: Synthetic oligonucleotide
ccuaugaggccaauaauuu

SEQ ID NO: 44302 - RNA, 19 nt, Artificial Sequence
  Description of Artificial Sequence: Synthetic oligonucleotide
ggcucgcugugguauucug

SEQ ID NO: 44303 - RNA, 19 nt, Artificial Sequence
  Description of Artificial Sequence: Synthetic oligonucleotide
gcuguguguaaagaugaua

SEQ ID NO: 44304 - RNA, 19 nt, Artificial Sequence
  Description of Artificial Sequence: Synthetic oligonucleotide
gcucgcugugguauucugc

SEQ ID NO: 44305 - RNA, 19 nt, Artificial Sequence
  Description of Artificial Sequence: Synthetic oligonucleotide
cuccgacacaucuccacgu

SEQ ID NO: 44306 - RNA, 19 nt, Artificial Sequence
  Description of Artificial Sequence: Synthetic oligonucleotide
gggaaagcauggauauaga

SEQ ID NO: 44307 - RNA, 19 nt, Artificial Sequence
  Description of Artificial Sequence: Synthetic oligonucleotide
ccguucaaguaagggaaug

SEQ ID NO: 44308 - RNA, 19 nt, Artificial Sequence
  Description of Artificial Sequence: Synthetic oligonucleotide
cguuccguuacauaugcgu

SEQ ID NO: 44309 - RNA, 19 nt, Artificial Sequence
  Description of Artificial Sequence: Synthetic oligonucleotide
cgucuacucagcccagaag

SEQ ID NO: 44310 - RNA, 19 nt, Artificial Sequence
  Description of Artificial Sequence: Synthetic oligonucleotide
cuccuaugaggccaauaau

SEQ ID NO: 44311 - RNA, 19 nt, Artificial Sequence
  Description of Artificial Sequence: Synthetic oligonucleotide
gagucagcuauuggagaau

SEQ ID NO: 44312 - RNA, 19 nt, Artificial Sequence
  Description of Artificial Sequence: Synthetic oligonucleotide
gcgaccugaucuuccaaua

SEQ ID NO: 44313 - RNA, 19 nt, Artificial Sequence
  Description of Artificial Sequence: Synthetic oligonucleotide
gcacuguaucaucaagccu

SEQ ID NO: 44314 - RNA, 19 nt, Artificial Sequence
  Description of Artificial Sequence: Synthetic oligonucleotide
caggcucgcugugguauuc

SEQ ID NO: 44315 - RNA, 19 nt, Artificial Sequence
  Description of Artificial Sequence: Synthetic oligonucleotide
cuggaacauuugccaauua

SEQ ID NO: 44316 - RNA, 19 nt, Artificial Sequence
  Description of Artificial Sequence: Synthetic oligonucleotide
ccucauuaugucaucccgu

SEQ ID NO: 44317 - RNA, 19 nt, Artificial Sequence
  Description of Artificial Sequence: Synthetic oligonucleotide
gugcgucuacucagcccag

SEQ ID NO: 44318 - RNA, 19 nt, Artificial Sequence
  Description of Artificial Sequence: Synthetic oligonucleotide
agcgacgauggugcgucua

SEQ ID NO: 44319 - RNA, 19 nt, Artificial Sequence
  Description of Artificial Sequence: Synthetic oligonucleotide
gguuaaucucauaggguuu

SEQ ID NO: 44320 - RNA, 19 nt, Artificial Sequence
  Description of Artificial Sequence: Synthetic oligonucleotide
gcgucuacucagcccagaa

SEQ ID NO: 44321 - RNA, 19 nt, Artificial Sequence
  Description of Artificial Sequence: Synthetic oligonucleotide
cguucaaguaagggaauga

SEQ ID NO: 44322 - RNA, 19 nt, Artificial Sequence
  Description of Artificial Sequence: Synthetic oligonucleotide
gcguuccguuacauaugcg

SEQ ID NO: 44323 - RNA, 19 nt, Artificial Sequence
  Description of Artificial Sequence: Synthetic oligonucleotide
cuacaggcucgcuguggua

SEQ ID NO: 44324 - RNA, 19 nt, Artificial Sequence
  Description of Artificial Sequence: Synthetic oligonucleotide
gaacggcaagcagcuuucu

SEQ ID NO: 44325 - RNA, 19 nt, Artificial Sequence
  Description of Artificial Sequence: Synthetic oligonucleotide
gucaucccguaaauugguu

SEQ ID NO: 44326 - RNA, 19 nt, Artificial Sequence
  Description of Artificial Sequence: Synthetic oligonucleotide
cccaaaagcuggcuuacuu

SEQ ID NO: 44327 - RNA, 19 nt, Artificial Sequence
  Description of Artificial Sequence: Synthetic oligonucleotide
caagggcaacucgcuccca

SEQ ID NO: 44328 - RNA, 19 nt, Artificial Sequence
  Description of Artificial Sequence: Synthetic oligonucleotide
gagcgacgauggugcgucu

SEQ ID NO: 44329 - RNA, 19 nt, Artificial Sequence
  Description of Artificial Sequence: Synthetic oligonucleotide
gcaccgcuuuugccuguuc

SEQ ID NO: 44330 - RNA, 19 nt, Artificial Sequence
  Description of Artificial Sequence: Synthetic oligonucleotide
ggcuguguguaaagaugau

SEQ ID NO: 44331 - RNA, 19 nt, Artificial Sequence
  Description of Artificial Sequence: Synthetic oligonucleotide
gccguucaaguaagggaau

SEQ ID NO: 44332 - RNA, 19 nt, Artificial Sequence
  Description of Artificial Sequence: Synthetic oligonucleotide
cuguaucaucaagccucau

SEQ ID NO: 44333 - RNA, 19 nt, Artificial Sequence
  Description of Artificial Sequence: Synthetic oligonucleotide
aaaccuacaaguuuucugc

SEQ ID NO: 44334 - RNA, 19 nt, Artificial Sequence
  Description of Artificial Sequence: Synthetic oligonucleotide
aaaugaaugagcuaccagg

SEQ ID NO: 44335 - RNA, 19 nt, Artificial Sequence
  Description of Artificial Sequence: Synthetic oligonucleotide
aagaauaauuacuucuccc

SEQ ID NO: 44336 - RNA, 19 nt, Artificial Sequence
  Description of Artificial Sequence: Synthetic oligonucleotide
aauacaaggaacauucagg

SEQ ID NO: 44337 - RNA, 19 nt, Artificial Sequence
  Description of Artificial Sequence: Synthetic oligonucleotide
uuaaaguuaucccaguccc

SEQ ID NO: 44338 - RNA, 19 nt, Artificial Sequence
  Description of Artificial Sequence: Synthetic oligonucleotide
uuuaaaguuaucccagucc

SEQ ID NO: 44339 - RNA, 19 nt, Artificial Sequence
  Description of Artificial Sequence: Synthetic oligonucleotide
ugaagcuaaacuauaaaac

SEQ ID NO: 44340 - RNA, 19 nt, Artificial Sequence
  Description of Artificial Sequence: Synthetic oligonucleotide
ucuucgguagcaaaggccg

SEQ ID NO: 44341 - RNA, 19 nt, Artificial Sequence
  Description of Artificial Sequence: Synthetic oligonucleotide
aauugauucagucaugcaa

SEQ ID NO: 44342 - RNA, 19 nt, Artificial Sequence
  Description of Artificial Sequence: Synthetic oligonucleotide
aaugaaugagcuaccaggc

SEQ ID NO: 44343 - RNA, 19 nt, Artificial Sequence
  Description of Artificial Sequence: Synthetic oligonucleotide
uguacuacuauaacaagac

SEQ ID NO: 44344 - RNA, 19 nt, Artificial Sequence
  Description of Artificial Sequence: Synthetic oligonucleotide
aacgguaauugauucaguc

SEQ ID NO: 44345 - RNA, 19 nt, Artificial Sequence
  Description of Artificial Sequence: Synthetic oligonucleotide
cugauuaccauccaugucc

SEQ ID NO: 44346 - RNA, 19 nt, Artificial Sequence
  Description of Artificial Sequence: Synthetic oligonucleotide
aaaaccuacaaguuuucug

SEQ ID NO: 44347 - RNA, 19 nt, Artificial Sequence
  Description of Artificial Sequence: Synthetic oligonucleotide
uuagauaguucucuuuccg

SEQ ID NO: 44348 - RNA, 19 nt, Artificial Sequence
  Description of Artificial Sequence: Synthetic oligonucleotide
uguauuguaagauacuauc

SEQ ID NO: 44349 - RNA, 19 nt, Artificial Sequence
  Description of Artificial Sequence: Synthetic oligonucleotide
uuuucgagaagauaaacaa

SEQ ID NO: 44350 - RNA, 19 nt, Artificial Sequence
  Description of Artificial Sequence: Synthetic oligonucleotide
auaauguacuacuauaaca

SEQ ID NO: 44351 - RNA, 19 nt, Artificial Sequence
  Description of Artificial Sequence: Synthetic oligonucleotide
uuuuauguauuacuggggu

SEQ ID NO: 44352 - RNA, 19 nt, Artificial Sequence
  Description of Artificial Sequence: Synthetic oligonucleotide
aaagugugcaucugcccgc

SEQ ID NO: 44353 - RNA, 19 nt, Artificial Sequence
  Description of Artificial Sequence: Synthetic oligonucleotide
aagauacuauccaugauuc

SEQ ID NO: 44354 - RNA, 19 nt, Artificial Sequence
  Description of Artificial Sequence: Synthetic oligonucleotide
uguagaacgucaaaguccu

SEQ ID NO: 44355 - RNA, 19 nt, Artificial Sequence
  Description of Artificial Sequence: Synthetic oligonucleotide
uaagaauaauuacuucucc

SEQ ID NO: 44356 - RNA, 19 nt, Artificial Sequence
  Description of Artificial Sequence: Synthetic oligonucleotide
aacacggcugggaagaugc

SEQ ID NO: 44357 - RNA, 19 nt, Artificial Sequence
  Description of Artificial Sequence: Synthetic oligonucleotide
uaagauacuauccaugauu

SEQ ID NO: 44358 - RNA, 19 nt, Artificial Sequence
  Description of Artificial Sequence: Synthetic oligonucleotide
uauagcacccacauguuca

SEQ ID NO: 44359 - RNA, 19 nt, Artificial Sequence
  Description of Artificial Sequence: Synthetic oligonucleotide
uuacuugaugauuugguug

SEQ ID NO: 44360 - RNA, 19 nt, Artificial Sequence
  Description of Artificial Sequence: Synthetic oligonucleotide
ugagaauuuaguuuggaua

SEQ ID NO: 44361 - RNA, 19 nt, Artificial Sequence
  Description of Artificial Sequence: Synthetic oligonucleotide
agaauaauuacuucucccu

SEQ ID NO: 44362 - RNA, 19 nt, Artificial Sequence
  Description of Artificial Sequence: Synthetic oligonucleotide
uaaacgguaauugauucag

SEQ ID NO: 44363 - RNA, 19 nt, Artificial Sequence
  Description of Artificial Sequence: Synthetic oligonucleotide
aaggauaaguaagauacug

SEQ ID NO: 44364 - RNA, 19 nt, Artificial Sequence
  Description of Artificial Sequence: Synthetic oligonucleotide
agcuguuagaauuaauuug

SEQ ID NO: 44365 - RNA, 19 nt, Artificial Sequence
  Description of Artificial Sequence: Synthetic oligonucleotide
auguagaacgucaaagucc

SEQ ID NO: 44366 - RNA, 19 nt, Artificial Sequence
  Description of Artificial Sequence: Synthetic oligonucleotide
aucauuagccuccccacgc

SEQ ID NO: 44367 - RNA, 19 nt, Artificial Sequence
  Description of Artificial Sequence: Synthetic oligonucleotide
uggauaauggggaaaacaa

SEQ ID NO: 44368 - RNA, 19 nt, Artificial Sequence
  Description of Artificial Sequence: Synthetic oligonucleotide
uuuacuauuagauguugaa

SEQ ID NO: 44369 - RNA, 19 nt, Artificial Sequence
  Description of Artificial Sequence: Synthetic oligonucleotide
ucuaguuaccacacuaucu

SEQ ID NO: 44370 - RNA, 19 nt, Artificial Sequence
  Description of Artificial Sequence: Synthetic oligonucleotide
aggaggaccgauuuaagag

SEQ ID NO: 44371 - RNA, 19 nt, Artificial Sequence
  Description of Artificial Sequence: Synthetic oligonucleotide
ucaagugaguucuugugcc

SEQ ID NO: 44372 - RNA, 19 nt, Artificial Sequence
  Description of Artificial Sequence: Synthetic oligonucleotide
ugaaugagcuaccaggccu

SEQ ID NO: 44373 - RNA, 19 nt, Artificial Sequence
  Description of Artificial Sequence: Synthetic oligonucleotide
uccgauauauucaaaccga

SEQ ID NO: 44374 - RNA, 19 nt, Artificial Sequence
  Description of Artificial Sequence: Synthetic oligonucleotide
cuccgauauauucaaaccg

SEQ ID NO: 44375 - RNA, 19 nt, Artificial Sequence
  Description of Artificial Sequence: Synthetic oligonucleotide
cuauuagauguugaaaucc

SEQ ID NO: 44376 - RNA, 19 nt, Artificial Sequence
  Description of Artificial Sequence: Synthetic oligonucleotide
uuguaagauacuauccaug

SEQ ID NO: 44377 - RNA, 19 nt, Artificial Sequence
  Description of Artificial Sequence: Synthetic oligonucleotide
cuaguuaccacacuaucug

SEQ ID NO: 44378 - RNA, 19 nt, Artificial Sequence
  Description of Artificial Sequence: Synthetic oligonucleotide
agaagauaaacaauuucuc

SEQ ID NO: 44379 - RNA, 19 nt, Artificial Sequence
  Description of Artificial Sequence: Synthetic oligonucleotide
ugcuuaagauauuugcacc

SEQ ID NO: 44380 - RNA, 19 nt, Artificial Sequence
  Description of Artificial Sequence: Synthetic oligonucleotide
uauugugguagucauuacu

SEQ ID NO: 44381 - RNA, 19 nt, Artificial Sequence
  Description of Artificial Sequence: Synthetic oligonucleotide
ucuccgauauauucaaacc

SEQ ID NO: 44382 - RNA, 19 nt, Artificial Sequence
  Description of Artificial Sequence: Synthetic oligonucleotide
aguagauacacaacuauug

SEQ ID NO: 44383 - RNA, 19 nt, Artificial Sequence
  Description of Artificial Sequence: Synthetic oligonucleotide
uguaaacgguaauugauuc

SEQ ID NO: 44384 - RNA, 19 nt, Artificial Sequence
  Description of Artificial Sequence: Synthetic oligonucleotide
cauaaaguauacauggaca

SEQ ID NO: 44385 - RNA, 19 nt, Artificial Sequence
  Description of Artificial Sequence: Synthetic oligonucleotide
uucauaauguacuacuaua

SEQ ID NO: 44386 - RNA, 19 nt, Artificial Sequence
  Description of Artificial Sequence: Synthetic oligonucleotide
ucucccggugaccugaacg

SEQ ID NO: 44387 - RNA, 19 nt, Artificial Sequence
  Description of Artificial Sequence: Synthetic oligonucleotide
uccuuauacauucuucacu

SEQ ID NO: 44388 - RNA, 19 nt, Artificial Sequence
  Description of Artificial Sequence: Synthetic oligonucleotide
gguugcagaaaguuuaggg

SEQ ID NO: 44389 - RNA, 19 nt, Artificial Sequence
  Description of Artificial Sequence: Synthetic oligonucleotide
uguuuccgguccaagagcc

SEQ ID NO: 44390 - RNA, 19 nt, Artificial Sequence
  Description of Artificial Sequence: Synthetic oligonucleotide
uccucccgaaaucucaugg

SEQ ID NO: 44391 - RNA, 19 nt, Artificial Sequence
  Description of Artificial Sequence: Synthetic oligonucleotide
aagcuguuagaauuaauuu

SEQ ID NO: 44392 - RNA, 19 nt, Artificial Sequence
  Description of Artificial Sequence: Synthetic oligonucleotide
auaguuacagcauguagaa

SEQ ID NO: 44393 - RNA, 19 nt, Artificial Sequence
  Description of Artificial Sequence: Synthetic oligonucleotide
uacgaagagaguuuccgug

SEQ ID NO: 44394 - RNA, 19 nt, Artificial Sequence
  Description of Artificial Sequence: Synthetic oligonucleotide
guaaaguagauacacaacu

SEQ ID NO: 44395 - RNA, 19 nt, Artificial Sequence
  Description of Artificial Sequence: Synthetic oligonucleotide
accaguaauugucaaagga

SEQ ID NO: 44396 - RNA, 19 nt, Artificial Sequence
  Description of Artificial Sequence: Synthetic oligonucleotide
agugugcuuuauaauaacc

SEQ ID NO: 44397 - RNA, 19 nt, Artificial Sequence
  Description of Artificial Sequence: Synthetic oligonucleotide
uauuacugggguaaugcaa

SEQ ID NO: 44398 - RNA, 19 nt, Artificial Sequence
  Description of Artificial Sequence: Synthetic oligonucleotide
cauaauguacuacuauaac

SEQ ID NO: 44399 - RNA, 19 nt, Artificial Sequence
  Description of Artificial Sequence: Synthetic oligonucleotide
uucaucuuacccauuugcu

SEQ ID NO: 44400 - RNA, 19 nt, Artificial Sequence
  Description of Artificial Sequence: Synthetic oligonucleotide
aacccuguuaacauaaagu

SEQ ID NO: 44401 - RNA, 19 nt, Artificial Sequence
  Description of Artificial Sequence: Synthetic oligonucleotide
auaaggaauugaaaaguuc

SEQ ID NO: 44402 - RNA, 19 nt, Artificial Sequence
  Description of Artificial Sequence: Synthetic oligonucleotide
aaauguuaacccacugauc

SEQ ID NO: 44403 - RNA, 19 nt, Artificial Sequence
  Description of Artificial Sequence: Synthetic oligonucleotide
uacugagauacuuucggcu

SEQ ID NO: 44404 - RNA, 19 nt, Artificial Sequence
  Description of Artificial Sequence: Synthetic oligonucleotide
uucguguaaggccaggagu

SEQ ID NO: 44405 - RNA, 19 nt, Artificial Sequence
  Description of Artificial Sequence: Synthetic oligonucleotide
auaauuacuucucccucug

SEQ ID NO: 44406 - RNA, 19 nt, Artificial Sequence
  Description of Artificial Sequence: Synthetic oligonucleotide
acuacgaaugaagcuaaac

SEQ ID NO: 44407 - RNA, 19 nt, Artificial Sequence
  Description of Artificial Sequence: Synthetic oligonucleotide
guauuguaagauacuaucc

SEQ ID NO: 44408 - RNA, 19 nt, Artificial Sequence
  Description of Artificial Sequence: Synthetic oligonucleotide
cuuccacuacgaaugaagc

SEQ ID NO: 44409 - RNA, 19 nt, Artificial Sequence
  Description of Artificial Sequence: Synthetic oligonucleotide
gugcuuaagauauuugcac

SEQ ID NO: 44410 - RNA, 19 nt, Artificial Sequence
  Description of Artificial Sequence: Synthetic oligonucleotide
cuagccugagaauuugagc

SEQ ID NO: 44411 - RNA, 19 nt, Artificial Sequence
  Description of Artificial Sequence: Synthetic oligonucleotide
aguaagauacugucuacau

SEQ ID NO: 44412 - RNA, 19 nt, Artificial Sequence
  Description of Artificial Sequence: Synthetic oligonucleotide
cacccuuccacuacgaaug

SEQ ID NO: 44413 - RNA, 19 nt, Artificial Sequence
  Description of Artificial Sequence: Synthetic oligonucleotide
agauaaguguggcaugucu

SEQ ID NO: 44414 - RNA, 19 nt, Artificial Sequence
  Description of Artificial Sequence: Synthetic oligonucleotide
auaaguguggcaugucugu

SEQ ID NO: 44415 - RNA, 19 nt, Artificial Sequence
  Description of Artificial Sequence: Synthetic oligonucleotide
uauaaauguuccucuaguu

SEQ ID NO: 44416 - RNA, 19 nt, Artificial Sequence
  Description of Artificial Sequence: Synthetic oligonucleotide
auauauucaaaccgagcaa

SEQ ID NO: 44417 - RNA, 19 nt, Artificial Sequence
  Description of Artificial Sequence: Synthetic oligonucleotide
ucaucuuacccauuugcuc

SEQ ID NO: 44418 - RNA, 19 nt, Artificial Sequence
  Description of Artificial Sequence: Synthetic oligonucleotide
augauucauaauguacuac

SEQ ID NO: 44419 - RNA, 19 nt, Artificial Sequence
  Description of Artificial Sequence: Synthetic oligonucleotide
cagcuauuuggauaauggg

SEQ ID NO: 44420 - RNA, 19 nt, Artificial Sequence
  Description of Artificial Sequence: Synthetic oligonucleotide
acccuguuaacauaaagua

SEQ ID NO: 44421 - RNA, 19 nt, Artificial Sequence
  Description of Artificial Sequence: Synthetic oligonucleotide
ucuguauuguaagauacua

SEQ ID NO: 44422 - RNA, 19 nt, Artificial Sequence
  Description of Artificial Sequence: Synthetic oligonucleotide
uacuuucggcuucuugugg

SEQ ID NO: 44423 - RNA, 19 nt, Artificial Sequence
  Description of Artificial Sequence: Synthetic oligonucleotide
uaccuuauagcacccacau

SEQ ID NO: 44424 - RNA, 19 nt, Artificial Sequence
  Description of Artificial Sequence: Synthetic oligonucleotide
gagacgcugauuucuucgg

SEQ ID NO: 44425 - RNA, 19 nt, Artificial Sequence
  Description of Artificial Sequence: Synthetic oligonucleotide
uccacuacgaaugaagcua

SEQ ID NO: 44426 - RNA, 19 nt, Artificial Sequence
  Description of Artificial Sequence: Synthetic oligonucleotide
uuccaaaguggaaugacuu

SEQ ID NO: 44427 - RNA, 19 nt, Artificial Sequence
  Description of Artificial Sequence: Synthetic oligonucleotide
cuaucauuagccuccccac

SEQ ID NO: 44428 - RNA, 19 nt, Artificial Sequence
  Description of Artificial Sequence: Synthetic oligonucleotide
ggcuuuaguuuguaaacgg

SEQ ID NO: 44429 - RNA, 19 nt, Artificial Sequence
  Description of Artificial Sequence: Synthetic oligonucleotide
ucuccacucauccagucau

SEQ ID NO: 44430 - RNA, 19 nt, Artificial Sequence
  Description of Artificial Sequence: Synthetic oligonucleotide
acgguaauugauucaguca

SEQ ID NO: 44431 - RNA, 19 nt, Artificial Sequence
  Description of Artificial Sequence: Synthetic oligonucleotide
uacaaggauaaguaagaua

SEQ ID NO: 44432 - RNA, 19 nt, Artificial Sequence
  Description of Artificial Sequence: Synthetic oligonucleotide
gaugcuacugagaggcggg

SEQ ID NO: 44433 - RNA, 19 nt, Artificial Sequence
  Description of Artificial Sequence: Synthetic oligonucleotide
aggcgggaggaacugaaac

SEQ ID NO: 44434 - RNA, 19 nt, Artificial Sequence
  Description of Artificial Sequence: Synthetic oligonucleotide
uaaaguuaucccaguccca

SEQ ID NO: 44435 - RNA, 19 nt, Artificial Sequence
  Description of Artificial Sequence: Synthetic oligonucleotide
ggaggaccgauuuaagagg

SEQ ID NO: 44436 - RNA, 19 nt, Artificial Sequence
  Description of Artificial Sequence: Synthetic oligonucleotide
agaagcaggguuaauucag

SEQ ID NO: 44437 - RNA, 19 nt, Artificial Sequence
  Description of Artificial Sequence: Synthetic oligonucleotide
cacgguaccaguccgaguc

SEQ ID NO: 44438 - RNA, 19 nt, Artificial Sequence
  Description of Artificial Sequence: Synthetic oligonucleotide
auauugugguagucauuac

SEQ ID NO: 44439 - RNA, 19 nt, Artificial Sequence
  Description of Artificial Sequence: Synthetic oligonucleotide
ugauacccuagucggcagg

SEQ ID NO: 44440 - RNA, 19 nt, Artificial Sequence
  Description of Artificial Sequence: Synthetic oligonucleotide
cagugaaauguuaacccac

SEQ ID NO: 44441 - RNA, 19 nt, Artificial Sequence
  Description of Artificial Sequence: Synthetic oligonucleotide
uacccagcuauuuggauaa

SEQ ID NO: 44442 - RNA, 19 nt, Artificial Sequence
  Description of Artificial Sequence: Synthetic oligonucleotide
uagauaguucucuuuccgu

SEQ ID NO: 44443 - RNA, 19 nt, Artificial Sequence
  Description of Artificial Sequence: Synthetic oligonucleotide
aguaauugucaaaggaaug

SEQ ID NO: 44444 - RNA, 19 nt, Artificial Sequence
  Description of Artificial Sequence: Synthetic oligonucleotide
uuauagcacccacauguuc

SEQ ID NO: 44445 - RNA, 19 nt, Artificial Sequence
  Description of Artificial Sequence: Synthetic oligonucleotide
aagagaguuuccguggggu

SEQ ID NO: 44446 - RNA, 19 nt, Artificial Sequence
  Description of Artificial Sequence: Synthetic oligonucleotide
uuuauguauuacuggggua

SEQ ID NO: 44447 - RNA, 19 nt, Artificial Sequence
  Description of Artificial Sequence: Synthetic oligonucleotide
ucugauuaccauccauguc

SEQ ID NO: 44448 - RNA, 19 nt, Artificial Sequence
  Description of Artificial Sequence: Synthetic oligonucleotide
uucacucaaaacauaccuu

SEQ ID NO: 44449 - RNA, 19 nt, Artificial Sequence
  Description of Artificial Sequence: Synthetic oligonucleotide
ucguguaaggccaggaguu

SEQ ID NO: 44450 - RNA, 19 nt, Artificial Sequence
  Description of Artificial Sequence: Synthetic oligonucleotide
gauacccuagucggcaggg

SEQ ID NO: 44451 - RNA, 19 nt, Artificial Sequence
  Description of Artificial Sequence: Synthetic oligonucleotide
uuaccacacuaucugucca

SEQ ID NO: 44452 - RNA, 19 nt, Artificial Sequence
  Description of Artificial Sequence: Synthetic oligonucleotide
augagaauuuaguuuggau

SEQ ID NO: 44453 - RNA, 19 nt, Artificial Sequence
  Description of Artificial Sequence: Synthetic oligonucleotide
uuacuccaauaacuccagg

SEQ ID NO: 44454 - RNA, 19 nt, Artificial Sequence
  Description of Artificial Sequence: Synthetic oligonucleotide
gguuaauucaguguguuga

SEQ ID NO: 44455 - RNA, 19 nt, Artificial Sequence
  Description of Artificial Sequence: Synthetic oligonucleotide
ugucaacagucugggaugg

SEQ ID NO: 44456 - RNA, 19 nt, Artificial Sequence
  Description of Artificial Sequence: Synthetic oligonucleotide
uuacgaagagaguuuccgu

SEQ ID NO: 44457 - RNA, 19 nt, Artificial Sequence
  Description of Artificial Sequence: Synthetic oligonucleotide
gauccggucuccucguuug

SEQ ID NO: 44458 - RNA, 19 nt, Artificial Sequence
  Description of Artificial Sequence: Synthetic oligonucleotide
agauaguucucuuuccguu

SEQ ID NO: 44459 - RNA, 19 nt, Artificial Sequence
  Description of Artificial Sequence: Synthetic oligonucleotide
  modified_base (2)..(2): a, c, u, g, unknown or other
unucccgcuggcauuccag

SEQ ID NO: 44460 - RNA, 19 nt, Artificial Sequence
  Description of Artificial Sequence: Synthetic oligonucleotide
uccgauuuauguacacccu

SEQ ID NO: 44461 - RNA, 19 nt, Artificial Sequence
  Description of Artificial Sequence: Synthetic oligonucleotide
gcaaagacgcuucauggcc

SEQ ID NO: 44462 - RNA, 19 nt, Artificial Sequence
  Description of Artificial Sequence: Synthetic oligonucleotide
uuccacuacgaaugaagcu

SEQ ID NO: 44463 - RNA, 19 nt, Artificial Sequence
  Description of Artificial Sequence: Synthetic oligonucleotide
auauagggcuuugaccuuc

SEQ ID NO: 44464 - RNA, 19 nt, Artificial Sequence
  Description of Artificial Sequence: Synthetic oligonucleotide
ccucgcuuuacgaagagag

SEQ ID NO: 44465 - RNA, 19 nt, Artificial Sequence
  Description of Artificial Sequence: Synthetic oligonucleotide
agcaaggcaucucagggau

SEQ ID NO: 44466 - RNA, 19 nt, Artificial Sequence
  Description of Artificial Sequence: Synthetic oligonucleotide
uuccaguauauuucugccu

SEQ ID NO: 44467 - RNA, 19 nt, Artificial Sequence
  Description of Artificial Sequence: Synthetic oligonucleotide
auaacuccagggaugacca

SEQ ID NO: 44468 - RNA, 19 nt, Artificial Sequence
  Description of Artificial Sequence: Synthetic oligonucleotide
ugaccugaacgcuuuggcu

SEQ ID NO: 44469 - RNA, 19 nt, Artificial Sequence
  Description of Artificial Sequence: Synthetic oligonucleotide
  modified_base (7)..(7): a, c, u, g, unknown or other
ugccuunucccgcuggcau

SEQ ID NO: 44470 - RNA, 19 nt, Artificial Sequence
  Description of Artificial Sequence: Synthetic oligonucleotide
uucacacuucguguaaggc

SEQ ID NO: 44471 - RNA, 19 nt, Artificial Sequence
  Description of Artificial Sequence: Synthetic oligonucleotide
gaggaccgauuuaagaggc

SEQ ID NO: 44472 - RNA, 19 nt, Artificial Sequence
  Description of Artificial Sequence: Synthetic oligonucleotide
gcuguuagaauuaauuuga

SEQ ID NO: 44473 - RNA, 19 nt, Artificial Sequence
  Description of Artificial Sequence: Synthetic oligonucleotide
cucccggugaccugaacgc

SEQ ID NO: 44474 - RNA, 19 nt, Artificial Sequence
  Description of Artificial Sequence: Synthetic oligonucleotide
gaggaggaccgauuuaaga

SEQ ID NO: 44475 - RNA, 19 nt, Artificial Sequence
  Description of Artificial Sequence: Synthetic oligonucleotide
ugauuauauugagaagaaa

SEQ ID NO: 44476 - RNA, 19 nt, Artificial Sequence
  Description of Artificial Sequence: Synthetic oligonucleotide
cuacgaaugaagcuaaacu

SEQ ID NO: 44477 - RNA, 19 nt, Artificial Sequence
  Description of Artificial Sequence: Synthetic oligonucleotide
uguuaacccacugauccau

SEQ ID NO: 44478 - RNA, 19 nt, Artificial Sequence
  Description of Artificial Sequence: Synthetic oligonucleotide
gugaccugaacgcuuuggc

SEQ ID NO: 44479 - RNA, 19 nt, Artificial Sequence
  Description of Artificial Sequence: Synthetic oligonucleotide
cuucguguaaggccaggag

SEQ ID NO: 44480 - RNA, 19 nt, Artificial Sequence
  Description of Artificial Sequence: Synthetic oligonucleotide
gcuauuuggauaaugggga

SEQ ID NO: 44481 - RNA, 19 nt, Artificial Sequence
  Description of Artificial Sequence: Synthetic oligonucleotide
auacacaacuauugcacuu

SEQ ID NO: 44482 - RNA, 19 nt, Artificial Sequence
  Description of Artificial Sequence: Synthetic oligonucleotide
cucuaguuaccacacuauc

SEQ ID NO: 44483 - RNA, 19 nt, Artificial Sequence
  Description of Artificial Sequence: Synthetic oligonucleotide
uaguuuguaaacgguaauu

SEQ ID NO: 44484 - RNA, 19 nt, Artificial Sequence
  Description of Artificial Sequence: Synthetic oligonucleotide
cuuccgauuuauguacacc

SEQ ID NO: 44485 - RNA, 19 nt, Artificial Sequence
  Description of Artificial Sequence: Synthetic oligonucleotide
aggauaaguaagauacugu

SEQ ID NO: 44486 - RNA, 19 nt, Artificial Sequence
  Description of Artificial Sequence: Synthetic oligonucleotide
ugggaugauccuccacaag

SEQ ID NO: 44487 - RNA, 19 nt, Artificial Sequence
  Description of Artificial Sequence: Synthetic oligonucleotide
guuguauuagcaaggcauc

SEQ ID NO: 44488 - RNA, 19 nt, Artificial Sequence
  Description of Artificial Sequence: Synthetic oligonucleotide
ucauuagccuccccacgcu

SEQ ID NO: 44489 - RNA, 19 nt, Artificial Sequence
  Description of Artificial Sequence: Synthetic oligonucleotide
agauacuauccaugauuca

SEQ ID NO: 44490 - RNA, 19 nt, Artificial Sequence
  Description of Artificial Sequence: Synthetic oligonucleotide
ugaaccuguuuccggucca

SEQ ID NO: 44491 - RNA, 19 nt, Artificial Sequence
  Description of Artificial Sequence: Synthetic oligonucleotide
acacccuuccacuacgaau

SEQ ID NO: 44492 - RNA, 19 nt, Artificial Sequence
  Description of Artificial Sequence: Synthetic oligonucleotide
uuaccauccauguccugau

SEQ ID NO: 44493 - RNA, 19 nt, Artificial Sequence
  Description of Artificial Sequence: Synthetic oligonucleotide
caucuuacccauuugcucu

SEQ ID NO: 44494 - RNA, 19 nt, Artificial Sequence
  Description of Artificial Sequence: Synthetic oligonucleotide
ccuguuaacauaaaguaua

SEQ ID NO: 44495 - RNA, 19 nt, Artificial Sequence
  Description of Artificial Sequence: Synthetic oligonucleotide
guggcaugucuguggaagg

SEQ ID NO: 44496 - RNA, 19 nt, Artificial Sequence
  Description of Artificial Sequence: Synthetic oligonucleotide
ucaagcuguuagaauuaau

SEQ ID NO: 44497 - RNA, 19 nt, Artificial Sequence
  Description of Artificial Sequence: Synthetic oligonucleotide
uguacggcuggcugcaaau

SEQ ID NO: 44498 - RNA, 19 nt, Artificial Sequence
  Description of Artificial Sequence: Synthetic oligonucleotide
uucggcuucuuguggcgag

SEQ ID NO: 44499 - RNA, 19 nt, Artificial Sequence
  Description of Artificial Sequence: Synthetic oligonucleotide
aaccgaaggguaaguuggg

SEQ ID NO: 44500 - RNA, 19 nt, Artificial Sequence
  Description of Artificial Sequence: Synthetic oligonucleotide
gauucauaauguacuacua

SEQ ID NO: 44501 - RNA, 19 nt, Artificial Sequence
  Description of Artificial Sequence: Synthetic oligonucleotide
gguuacugagauacuuucg

SEQ ID NO: 44502 - RNA, 19 nt, Artificial Sequence
  Description of Artificial Sequence: Synthetic oligonucleotide
ucccauuagcucuccacuc

SEQ ID NO: 44503 - RNA, 19 nt, Artificial Sequence
  Description of Artificial Sequence: Synthetic oligonucleotide
ccuuauagcacccacaugu

SEQ ID NO: 44504 - RNA, 19 nt, Artificial Sequence
  Description of Artificial Sequence: Synthetic oligonucleotide
ccgagcaacacaucguggg

SEQ ID NO: 44505 - RNA, 19 nt, Artificial Sequence
  Description of Artificial Sequence: Synthetic oligonucleotide
caugauucauaauguacua

SEQ ID NO: 44506 - RNA, 19 nt, Artificial Sequence
  Description of Artificial Sequence: Synthetic oligonucleotide
ugagauacuuucggcuucu

SEQ ID NO: 44507 - RNA, 19 nt, Artificial Sequence
  Description of Artificial Sequence: Synthetic oligonucleotide
accgauuuaagaggcaaau

SEQ ID NO: 44508 - RNA, 19 nt, Artificial Sequence
  Description of Artificial Sequence: Synthetic oligonucleotide
uacccuagucggcagggaa

SEQ ID NO: 44509 - RNA, 19 nt, Artificial Sequence
  Description of Artificial Sequence: Synthetic oligonucleotide
cuucgguagcaaaggccgg

SEQ ID NO: 44510 - RNA, 19 nt, Artificial Sequence
  Description of Artificial Sequence: Synthetic oligonucleotide
cugagauacuuucggcuuc

SEQ ID NO: 44511 - RNA, 19 nt, Artificial Sequence
  Description of Artificial Sequence: Synthetic oligonucleotide
uacagaaggccaacauaua

SEQ ID NO: 44512 - RNA, 19 nt, Artificial Sequence
  Description of Artificial Sequence: Synthetic oligonucleotide
cucuguuauuauaucucca

SEQ ID NO: 44513 - RNA, 19 nt, Artificial Sequence
  Description of Artificial Sequence: Synthetic oligonucleotide
auacaaggauaaguaagau

SEQ ID NO: 44514 - RNA, 19 nt, Artificial Sequence
  Description of Artificial Sequence: Synthetic oligonucleotide
cacaaaccuuguugggaag

SEQ ID NO: 44515 - RNA, 19 nt, Artificial Sequence
  Description of Artificial Sequence: Synthetic oligonucleotide
aaacacggcugggaagaug

SEQ ID NO: 44516 - RNA, 19 nt, Artificial Sequence
  Description of Artificial Sequence: Synthetic oligonucleotide
ggcgggaggaacugaaacc

SEQ ID NO: 44517 - RNA, 19 nt, Artificial Sequence
  Description of Artificial Sequence: Synthetic oligonucleotide
  modified_base (3)..(3): a, c, u, g, unknown or other
uunucccgcuggcauucca

SEQ ID NO: 44518 - RNA, 19 nt, Artificial Sequence
  Description of Artificial Sequence: Synthetic oligonucleotide
ugguggaaccgaaggguaa

SEQ ID NO: 44519 - RNA, 19 nt, Artificial Sequence
  Description of Artificial Sequence: Synthetic oligonucleotide
gagaaacuuaacucauccu

SEQ ID NO: 44520 - RNA, 19 nt, Artificial Sequence
  Description of Artificial Sequence: Synthetic oligonucleotide
ugccaacaccagaugauuu

SEQ ID NO: 44521 - RNA, 19 nt, Artificial Sequence
  Description of Artificial Sequence: Synthetic oligonucleotide
gcucuguauuguaagauac

SEQ ID NO: 44522 - RNA, 19 nt, Artificial Sequence
  Description of Artificial Sequence: Synthetic oligonucleotide
aaacccuaguguaccacau

SEQ ID NO: 44523 - RNA, 19 nt, Artificial Sequence
  Description of Artificial Sequence: Synthetic oligonucleotide
accuuauagcacccacaug

SEQ ID NO: 44524 - RNA, 19 nt, Artificial Sequence
  Description of Artificial Sequence: Synthetic oligonucleotide
auaccuuauagcacccaca

SEQ ID NO: 44525 - RNA, 19 nt, Artificial Sequence
  Description of Artificial Sequence: Synthetic oligonucleotide
gacgaggugguagcaccgg

SEQ ID NO: 44526 - RNA, 19 nt, Artificial Sequence
  Description of Artificial Sequence: Synthetic oligonucleotide
ccgauauauucaaaccgag

SEQ ID NO: 44527 - RNA, 19 nt, Artificial Sequence
  Description of Artificial Sequence: Synthetic oligonucleotide
gcuaaacuauaaaaccuac

SEQ ID NO: 44528 - RNA, 19 nt, Artificial Sequence
  Description of Artificial Sequence: Synthetic oligonucleotide
ugucgugcagucggccacg

SEQ ID NO: 44529 - RNA, 19 nt, Artificial Sequence
  Description of Artificial Sequence: Synthetic oligonucleotide
ggaaggguuaguuguauua

SEQ ID NO: 44530 - RNA, 19 nt, Artificial Sequence
  Description of Artificial Sequence: Synthetic oligonucleotide
aacccuaguguaccacaua

SEQ ID NO: 44531 - RNA, 19 nt, Artificial Sequence
  Description of Artificial Sequence: Synthetic oligonucleotide
gugauacccuagucggcag

SEQ ID NO: 44532 - RNA, 19 nt, Artificial Sequence
  Description of Artificial Sequence: Synthetic oligonucleotide
agucaugcaagaaccacuu

SEQ ID NO: 44533 - RNA, 19 nt, Artificial Sequence
  Description of Artificial Sequence: Synthetic oligonucleotide
gacgcugauuucuucggua

SEQ ID NO: 44534 - RNA, 19 nt, Artificial Sequence
  Description of Artificial Sequence: Synthetic oligonucleotide
cuacccagcuauuuggaua

SEQ ID NO: 44535 - RNA, 19 nt, Artificial Sequence
  Description of Artificial Sequence: Synthetic oligonucleotide
aguccccucgcuuuacgaa

SEQ ID NO: 44536 - RNA, 19 nt, Artificial Sequence
  Description of Artificial Sequence: Synthetic oligonucleotide
cgauauauucaaaccgagc

SEQ ID NO: 44537 - RNA, 19 nt, Artificial Sequence
  Description of Artificial Sequence: Synthetic oligonucleotide
uacacccuuccacuacgaa

SEQ ID NO: 44538 - RNA, 19 nt, Artificial Sequence
  Description of Artificial Sequence: Synthetic oligonucleotide
gacgcuucauggcccacuc

SEQ ID NO: 44539 - RNA, 19 nt, Artificial Sequence
  Description of Artificial Sequence: Synthetic oligonucleotide
gacuggagauacaaggaua

SEQ ID NO: 44540 - RNA, 19 nt, Artificial Sequence
  Description of Artificial Sequence: Synthetic oligonucleotide
gaucacaagcaguccccuc

SEQ ID NO: 44541 - RNA, 19 nt, Artificial Sequence
  Description of Artificial Sequence: Synthetic oligonucleotide
auacuauccaugauucaua

SEQ ID NO: 44542 - RNA, 19 nt, Artificial Sequence
  Description of Artificial Sequence: Synthetic oligonucleotide
ccaaagguuucccugagga

SEQ ID NO: 44543 - RNA, 19 nt, Artificial Sequence
  Description of Artificial Sequence: Synthetic oligonucleotide
gaccugaacgcuuuggcuu

SEQ ID NO: 44544 - RNA, 19 nt, Artificial Sequence
  Description of Artificial Sequence: Synthetic oligonucleotide
ccuaucauuagccucccca

SEQ ID NO: 44545 - RNA, 19 nt, Artificial Sequence
  Description of Artificial Sequence: Synthetic oligonucleotide
uuccucccgaaaucucaug

SEQ ID NO: 44546 - RNA, 19 nt, Artificial Sequence
  Description of Artificial Sequence: Synthetic oligonucleotide
ccgaaggguaaguuggggc

SEQ ID NO: 44547 - RNA, 19 nt, Artificial Sequence
  Description of Artificial Sequence: Synthetic oligonucleotide
ggugaccugaacgcuuugg

SEQ ID NO: 44548 - RNA, 19 nt, Artificial Sequence
  Description of Artificial Sequence: Synthetic oligonucleotide
uuccucacuuccgauuuau

SEQ ID NO: 44549 - RNA, 19 nt, Artificial Sequence
  Description of Artificial Sequence: Synthetic oligonucleotide
gcuagccugagaauuugag

SEQ ID NO: 44550 - RNA, 19 nt, Artificial Sequence
  Description of Artificial Sequence: Synthetic oligonucleotide
aagacgcuucauggcccac

SEQ ID NO: 44551 - RNA, 19 nt, Artificial Sequence
  Description of Artificial Sequence: Synthetic oligonucleotide
acuucguguaaggccagga

SEQ ID NO: 44552 - RNA, 19 nt, Artificial Sequence
  Description of Artificial Sequence: Synthetic oligonucleotide
ucggcuucuuguggcgagg

SEQ ID NO: 44553 - RNA, 19 nt, Artificial Sequence
  Description of Artificial Sequence: Synthetic oligonucleotide
agaaucccgguuagcagcu

SEQ ID NO: 44554 - RNA, 19 nt, Artificial Sequence
  Description of Artificial Sequence: Synthetic oligonucleotide
accgagcaacacaucgugg

SEQ ID NO: 44555 - RNA, 19 nt, Artificial Sequence
  Description of Artificial Sequence: Synthetic oligonucleotide
ugaccccuucaugugcuug

SEQ ID NO: 44556 - RNA, 19 nt, Artificial Sequence
  Description of Artificial Sequence: Synthetic oligonucleotide
uuccgguccaagagcccca

SEQ ID NO: 44557 - RNA, 19 nt, Artificial Sequence
  Description of Artificial Sequence: Synthetic oligonucleotide
ccagaaucccgguuagcag

SEQ ID NO: 44558 - RNA, 19 nt, Artificial Sequence
  Description of Artificial Sequence: Synthetic oligonucleotide
cacccuugaccccuucaug

SEQ ID NO: 44559 - RNA, 19 nt, Artificial Sequence
  Description of Artificial Sequence: Synthetic oligonucleotide
cauggacaaagagauaagu

SEQ ID NO: 44560 - RNA, 19 nt, Artificial Sequence
  Description of Artificial Sequence: Synthetic oligonucleotide
cuguauuguaagauacuau

SEQ ID NO: 44561 - RNA, 19 nt, Artificial Sequence
  Description of Artificial Sequence: Synthetic oligonucleotide
gagauaaguguggcauguc

SEQ ID NO: 44562 - RNA, 19 nt, Artificial Sequence
  Description of Artificial Sequence: Synthetic oligonucleotide
cucuguauuguaagauacu

SEQ ID NO: 44563 - RNA, 19 nt, Artificial Sequence
  Description of Artificial Sequence: Synthetic oligonucleotide
cugcuagccugagaauuug

SEQ ID NO: 44564 - RNA, 19 nt, Artificial Sequence
  Description of Artificial Sequence: Synthetic oligonucleotide
cuacugagaggcgggagga

SEQ ID NO: 44565 - RNA, 19 nt, Artificial Sequence
  Description of Artificial Sequence: Synthetic oligonucleotide
ucuuacccauuugcucugu

SEQ ID NO: 44566 - RNA, 19 nt, Artificial Sequence
  Description of Artificial Sequence: Synthetic oligonucleotide
acgguaccaguccgagucu

SEQ ID NO: 44567 - RNA, 19 nt, Artificial Sequence
  Description of Artificial Sequence: Synthetic oligonucleotide
caaggauaaguaagauacu

SEQ ID NO: 44568 - RNA, 19 nt, Artificial Sequence
  Description of Artificial Sequence: Synthetic oligonucleotide
agaguuuccgugggguuuu

SEQ ID NO: 44569 - RNA, 19 nt, Artificial Sequence
  Description of Artificial Sequence: Synthetic oligonucleotide
acccuuccacuacgaauga

SEQ ID NO: 44570 - RNA, 19 nt, Artificial Sequence
  Description of Artificial Sequence: Synthetic oligonucleotide
ggacagguguaugaguaca

SEQ ID NO: 44571 - RNA, 19 nt, Artificial Sequence
  Description of Artificial Sequence: Synthetic oligonucleotide
gaagcaggguuaauucagu

SEQ ID NO: 44572 - RNA, 19 nt, Artificial Sequence
  Description of Artificial Sequence: Synthetic oligonucleotide
cuugaccccuucaugugcu

SEQ ID NO: 44573 - RNA, 19 nt, Artificial Sequence
  Description of Artificial Sequence: Synthetic oligonucleotide
gaccgauuuaagaggcaaa

SEQ ID NO: 44574 - RNA, 19 nt, Artificial Sequence
  Description of Artificial Sequence: Synthetic oligonucleotide
guacggcuggcugcaaaug

SEQ ID NO: 44575 - RNA, 19 nt, Artificial Sequence
  Description of Artificial Sequence: Synthetic oligonucleotide
cuccaauaacuccagggau

SEQ ID NO: 44576 - RNA, 19 nt, Artificial Sequence
  Description of Artificial Sequence: Synthetic oligonucleotide
  modified_base (4)..(4): a, c, u, g, unknown or other
cuunucccgcuggcauucc

SEQ ID NO: 44577 - RNA, 19 nt, Artificial Sequence
  Description of Artificial Sequence: Synthetic oligonucleotide
cccgcuguccccacuaaug

SEQ ID NO: 44578 - RNA, 19 nt, Artificial Sequence
  Description of Artificial Sequence: Synthetic oligonucleotide
gaccccuucaugugcuugu

SEQ ID NO: 44579 - RNA, 19 nt, Artificial Sequence
  Description of Artificial Sequence: Synthetic oligonucleotide
uaccauccauguccugaua

SEQ ID NO: 44580 - RNA, 19 nt, Artificial Sequence
  Description of Artificial Sequence: Synthetic oligonucleotide
agacgcuucauggcccacu

SEQ ID NO: 44581 - RNA, 19 nt, Artificial Sequence
  Description of Artificial Sequence: Synthetic oligonucleotide
cuccacucauccagucauc

SEQ ID NO: 44582 - RNA, 19 nt, Artificial Sequence
  Description of Artificial Sequence: Synthetic oligonucleotide
gagcugagugagauggcaa

SEQ ID NO: 44583 - RNA, 19 nt, Artificial Sequence
  Description of Artificial Sequence: Synthetic oligonucleotide
guuuccgguccaagagccc

SEQ ID NO: 44584 - RNA, 19 nt, Artificial Sequence
  Description of Artificial Sequence: Synthetic oligonucleotide
agguuugguuacugagaua

SEQ ID NO: 44585 - RNA, 19 nt, Artificial Sequence
  Description of Artificial Sequence: Synthetic oligonucleotide
aggguaaguuggggcaucu

SEQ ID NO: 44586 - RNA, 19 nt, Artificial Sequence
  Description of Artificial Sequence: Synthetic oligonucleotide
cuagccucucaaggaucag

SEQ ID NO: 44587 - RNA, 19 nt, Artificial Sequence
  Description of Artificial Sequence: Synthetic oligonucleotide
ggaccgauuuaagaggcaa

SEQ ID NO: 44588 - RNA, 19 nt, Artificial Sequence
  Description of Artificial Sequence: Synthetic oligonucleotide
ucccggugaccugaacgcu

SEQ ID NO: 44589 - RNA, 19 nt, Artificial Sequence
  Description of Artificial Sequence: Synthetic oligonucleotide
cuuauagcacccacauguu

SEQ ID NO: 44590 - RNA, 19 nt, Artificial Sequence
  Description of Artificial Sequence: Synthetic oligonucleotide
gguaccaguccgagucuag

SEQ ID NO: 44591 - RNA, 19 nt, Artificial Sequence
  Description of Artificial Sequence: Synthetic oligonucleotide
gugugcaucugcccgcugu

SEQ ID NO: 44592 - RNA, 19 nt, Artificial Sequence
  Description of Artificial Sequence: Synthetic oligonucleotide
caguccucuuaaauuauuu

SEQ ID NO: 44593 - RNA, 19 nt, Artificial Sequence
  Description of Artificial Sequence: Synthetic oligonucleotide
ggacuggagauacaaggau

SEQ ID NO: 44594 - RNA, 19 nt, Artificial Sequence
  Description of Artificial Sequence: Synthetic oligonucleotide
auccggucuccucguuuga

SEQ ID NO: 44595 - RNA, 19 nt, Artificial Sequence
  Description of Artificial Sequence: Synthetic oligonucleotide
ccucguuugaaggagaggu

SEQ ID NO: 44596 - RNA, 19 nt, Artificial Sequence
  Description of Artificial Sequence: Synthetic oligonucleotide
cucgcuuuacgaagagagu

SEQ ID NO: 44597 - RNA, 19 nt, Artificial Sequence
  Description of Artificial Sequence: Synthetic oligonucleotide
ccucacuuccgauuuaugu

SEQ ID NO: 44598 - RNA, 19 nt, Artificial Sequence
  Description of Artificial Sequence: Synthetic oligonucleotide
caccggaucugguuuuaaa

SEQ ID NO: 44599 - RNA, 19 nt, Artificial Sequence
  Description of Artificial Sequence: Synthetic oligonucleotide
caguccccucgcuuuacga

SEQ ID NO: 44600 - RNA, 19 nt, Artificial Sequence
  Description of Artificial Sequence: Synthetic oligonucleotide
gccaacauauaagagggau

SEQ ID NO: 44601 - RNA, 19 nt, Artificial Sequence
  Description of Artificial Sequence: Synthetic oligonucleotide
gagaguuuccgugggguuu

SEQ ID NO: 44602 - RNA, 19 nt, Artificial Sequence
  Description of Artificial Sequence: Synthetic oligonucleotide
gaaucccgguuagcagcug

SEQ ID NO: 44603 - RNA, 19 nt, Artificial Sequence
  Description of Artificial Sequence: Synthetic oligonucleotide
cagugagaaggaaacgauu

SEQ ID NO: 44604 - RNA, 19 nt, Artificial Sequence
  Description of Artificial Sequence: Synthetic oligonucleotide
auacccuagucggcaggga

SEQ ID NO: 44605 - RNA, 19 nt, Artificial Sequence
  Description of Artificial Sequence: Synthetic oligonucleotide
ccaccaaacccaccuagca

SEQ ID NO: 44606 - RNA, 19 nt, Artificial Sequence
  Description of Artificial Sequence: Synthetic oligonucleotide
aggaccgauuuaagaggca

SEQ ID NO: 44607 - RNA, 19 nt, Artificial Sequence
  Description of Artificial Sequence: Synthetic oligonucleotide
gguguccggguuggggacg

SEQ ID NO: 44608 - RNA, 19 nt, Artificial Sequence
  Description of Artificial Sequence: Synthetic oligonucleotide
augcuacugagaggcggga

SEQ ID NO: 44609 - RNA, 19 nt, Artificial Sequence
  Description of Artificial Sequence: Synthetic oligonucleotide
  modified_base (5)..(5): a, c, u, g, unknown or other
ccuunucccgcuggcauuc

SEQ ID NO: 44610 - RNA, 19 nt, Artificial Sequence
  Description of Artificial Sequence: Synthetic oligonucleotide
gucgugcagucggccacgg

SEQ ID NO: 44611 - RNA, 19 nt, Artificial Sequence
  Description of Artificial Sequence: Synthetic oligonucleotide
uugaccccuucaugugcuu

SEQ ID NO: 44612 - RNA, 19 nt, Artificial Sequence
  Description of Artificial Sequence: Synthetic oligonucleotide
guacacccuuccacuacga

SEQ ID NO: 44613 - RNA, 19 nt, Artificial Sequence
  Description of Artificial Sequence: Synthetic oligonucleotide
caguucggucucgaaucuc

SEQ ID NO: 44614 - RNA, 19 nt, Artificial Sequence
  Description of Artificial Sequence: Synthetic oligonucleotide
cuuccucccgaaaucucau

SEQ ID NO: 44615 - RNA, 19 nt, Artificial Sequence
  Description of Artificial Sequence: Synthetic oligonucleotide
ccacuacgaaugaagcuaa

SEQ ID NO: 44616 - RNA, 19 nt, Artificial Sequence
  Description of Artificial Sequence: Synthetic oligonucleotide
cgguaauugauucagucau

SEQ ID NO: 44617 - RNA, 19 nt, Artificial Sequence
  Description of Artificial Sequence: Synthetic oligonucleotide
cacuacgaaugaagcuaaa

SEQ ID NO: 44618 - RNA, 19 nt, Artificial Sequence
  Description of Artificial Sequence: Synthetic oligonucleotide
gguagcaccggaucugguu

SEQ ID NO: 44619 - RNA, 19 nt, Artificial Sequence
  Description of Artificial Sequence: Synthetic oligonucleotide
  modified_base (8)..(8): a, c, u, g, unknown or other
gugccuunucccgcuggca

SEQ ID NO: 44620 - RNA, 19 nt, Artificial Sequence
  Description of Artificial Sequence: Synthetic oligonucleotide
cccuguuaacauaaaguau

SEQ ID NO: 44621 - RNA, 19 nt, Artificial Sequence
  Description of Artificial Sequence: Synthetic oligonucleotide
cccuaguguaccacauaca

SEQ ID NO: 44622 - RNA, 19 nt, Artificial Sequence
  Description of Artificial Sequence: Synthetic oligonucleotide
gggaaguguuucacauuuc

SEQ ID NO: 44623 - RNA, 19 nt, Artificial Sequence
  Description of Artificial Sequence: Synthetic oligonucleotide
ggguaaguuggggcaucug

SEQ ID NO: 44624 - RNA, 19 nt, Artificial Sequence
  Description of Artificial Sequence: Synthetic oligonucleotide
cuggagacgcugauuucuu

SEQ ID NO: 44625 - RNA, 19 nt, Artificial Sequence
  Description of Artificial Sequence: Synthetic oligonucleotide
caauucagguuugguuacu

SEQ ID NO: 44626 - RNA, 19 nt, Artificial Sequence
  Description of Artificial Sequence: Synthetic oligonucleotide
acgggccuuccucccgaaa

SEQ ID NO: 44627 - RNA, 19 nt, Artificial Sequence
  Description of Artificial Sequence: Synthetic oligonucleotide
guggaaccgaaggguaagu

SEQ ID NO: 44628 - RNA, 19 nt, Artificial Sequence
  Description of Artificial Sequence: Synthetic oligonucleotide
gggcugcacaaacacggcu

SEQ ID NO: 44629 - RNA, 19 nt, Artificial Sequence
  Description of Artificial Sequence: Synthetic oligonucleotide
ccucuaguuaccacacuau

SEQ ID NO: 44630 - RNA, 19 nt, Artificial Sequence
  Description of Artificial Sequence: Synthetic oligonucleotide
caggauccggucuccucgu

SEQ ID NO: 44631 - RNA, 19 nt, Artificial Sequence
  Description of Artificial Sequence: Synthetic oligonucleotide
ccccucgcuuuacgaagag

SEQ ID NO: 44632 - RNA, 19 nt, Artificial Sequence
  Description of Artificial Sequence: Synthetic oligonucleotide
ccucccgaaaucucauggu

SEQ ID NO: 44633 - RNA, 19 nt, Artificial Sequence
  Description of Artificial Sequence: Synthetic oligonucleotide
acccagcuauuuggauaau

SEQ ID NO: 44634 - RNA, 19 nt, Artificial Sequence
  Description of Artificial Sequence: Synthetic oligonucleotide
cuuguacggcuggcugcaa

SEQ ID NO: 44635 - RNA, 19 nt, Artificial Sequence
  Description of Artificial Sequence: Synthetic oligonucleotide
ggccacgguaccaguccga

SEQ ID NO: 44636 - RNA, 19 nt, Artificial Sequence
  Description of Artificial Sequence: Synthetic oligonucleotide
  modified_base (6)..(6): a, c, u, g, unknown or other
gccuunucccgcuggcauu

SEQ ID NO: 44637 - RNA, 19 nt, Artificial Sequence
  Description of Artificial Sequence: Synthetic oligonucleotide
cgcuuuacgaagagaguuu

SEQ ID NO: 44638 - RNA, 19 nt, Artificial Sequence
  Description of Artificial Sequence: Synthetic oligonucleotide
caaacacggcugggaagau

SEQ ID NO: 44639 - RNA, 19 nt, Artificial Sequence
  Description of Artificial Sequence: Synthetic oligonucleotide
ccgcuggcauuccaguaua

SEQ ID NO: 44640 - RNA, 19 nt, Artificial Sequence
  Description of Artificial Sequence: Synthetic oligonucleotide
cccuagucggcagggaagu

SEQ ID NO: 44641 - RNA, 19 nt, Artificial Sequence
  Description of Artificial Sequence: Synthetic oligonucleotide
gcaccggaucugguuuuaa

SEQ ID NO: 44642 - RNA, 19 nt, Artificial Sequence
  Description of Artificial Sequence: Synthetic oligonucleotide
cccggugaccugaacgcuu

SEQ ID NO: 44643 - RNA, 19 nt, Artificial Sequence
  Description of Artificial Sequence: Synthetic oligonucleotide
ccacgguaccaguccgagu

SEQ ID NO: 44644 - RNA, 19 nt, Artificial Sequence
  Description of Artificial Sequence: Synthetic oligonucleotide
cgguagcaaaggccggggu

SEQ ID NO: 44645 - RNA, 19 nt, Artificial Sequence
  Description of Artificial Sequence: Synthetic oligonucleotide
ccgguccaagagccccacu

SEQ ID NO: 44646 - RNA, 19 nt, Artificial Sequence
  Description of Artificial Sequence: Synthetic oligonucleotide
aaaucuaagagguaccagg

SEQ ID NO: 44647 - RNA, 19 nt, Artificial Sequence
  Description of Artificial Sequence: Synthetic oligonucleotide
aaaaguacaccuuccaggg

SEQ ID NO: 44648 - RNA, 19 nt, Artificial Sequence
  Description of Artificial Sequence: Synthetic oligonucleotide
uuuaaauuaggauaauacc

SEQ ID NO: 44649 - RNA, 19 nt, Artificial Sequence
  Description of Artificial Sequence: Synthetic oligonucleotide
uguugcacgacucaaaucc

SEQ ID NO: 44650 - RNA, 19 nt, Artificial Sequence
  Description of Artificial Sequence: Synthetic oligonucleotide
ucagguauuugauugagcg

SEQ ID NO: 44651 - RNA, 19 nt, Artificial Sequence
  Description of Artificial Sequence: Synthetic oligonucleotide
aaaagauccauuuuacaug

SEQ ID NO: 44652 - RNA, 19 nt, Artificial Sequence
  Description of Artificial Sequence: Synthetic oligonucleotide
agggaguuaacacugaugg

SEQ ID NO: 44653 - RNA, 19 nt, Artificial Sequence
  Description of Artificial Sequence: Synthetic oligonucleotide
aaacaaaacaaaacaaaac

SEQ ID NO: 44654 - RNA, 19 nt, Artificial Sequence
  Description of Artificial Sequence: Synthetic oligonucleotide
  modified_base (4)..(4): a, c, u, g, unknown or other
uucncuuuaaaacucccag

SEQ ID NO: 44655 - RNA, 19 nt, Artificial Sequence
  Description of Artificial Sequence: Synthetic oligonucleotide
agcaagguaaaccaucugc

SEQ ID NO: 44656 - RNA, 19 nt, Artificial Sequence
  Description of Artificial Sequence: Synthetic oligonucleotide
aaaggaaacguaaaauuac

SEQ ID NO: 44657 - RNA, 19 nt, Artificial Sequence
  Description of Artificial Sequence: Synthetic oligonucleotide
uggauaacaaugaaggagc

SEQ ID NO: 44658 - RNA, 19 nt, Artificial Sequence
  Description of Artificial Sequence: Synthetic oligonucleotide
uggguugaaaaucuaagag

SEQ ID NO: 44659 - RNA, 19 nt, Artificial Sequence
  Description of Artificial Sequence: Synthetic oligonucleotide
aaaguaagcauguccuagg

SEQ ID NO: 44660 - RNA, 19 nt, Artificial Sequence
  Description of Artificial Sequence: Synthetic oligonucleotide
aauccuauugaaaucaucu

SEQ ID NO: 44661 - RNA, 19 nt, Artificial Sequence
  Description of Artificial Sequence: Synthetic oligonucleotide
aaaugcaggugguaacccc

SEQ ID NO: 44662 - RNA, 19 nt, Artificial Sequence
  Description of Artificial Sequence: Synthetic oligonucleotide
aaaacaaaacaaaacaaaa

SEQ ID NO: 44663 - RNA, 19 nt, Artificial Sequence
  Description of Artificial Sequence: Synthetic oligonucleotide
uuaaggugaaugcaugacc

SEQ ID NO: 44664 - RNA, 19 nt, Artificial Sequence
  Description of Artificial Sequence: Synthetic oligonucleotide
gaauucuugggaaugaccc

SEQ ID NO: 44665 - RNA, 19 nt, Artificial Sequence
  Description of Artificial Sequence: Synthetic oligonucleotide
uuuaaaacucccaguggag

SEQ ID NO: 44666 - RNA, 19 nt, Artificial Sequence
  Description of Artificial Sequence: Synthetic oligonucleotide
uguggauugccccuugagg

SEQ ID NO: 44667 - RNA, 19 nt, Artificial Sequence
  Description of Artificial Sequence: Synthetic oligonucleotide
gaacauuuuaugucagcgg

SEQ ID NO: 44668 - RNA, 19 nt, Artificial Sequence
  Description of Artificial Sequence: Synthetic oligonucleotide
uacgaaguaaccagggcag

SEQ ID NO: 44669 - RNA, 19 nt, Artificial Sequence
  Description of Artificial Sequence: Synthetic oligonucleotide
uuuuaugucagcgggcgcg

SEQ ID NO: 44670 - RNA, 19 nt, Artificial Sequence
  Description of Artificial Sequence: Synthetic oligonucleotide
auggauaacaaugaaggag

SEQ ID NO: 44671 - RNA, 19 nt, Artificial Sequence
  Description of Artificial Sequence: Synthetic oligonucleotide
cuaucaucaagaaagguca

SEQ ID NO: 44672 - RNA, 19 nt, Artificial Sequence
  Description of Artificial Sequence: Synthetic oligonucleotide
ucaacuaccuguauuugcu

SEQ ID NO: 44673 - RNA, 19 nt, Artificial Sequence
  Description of Artificial Sequence: Synthetic oligonucleotide
acucaaauccuauugaaau

SEQ ID NO: 44674 - RNA, 19 nt, Artificial Sequence
  Description of Artificial Sequence: Synthetic oligonucleotide
uguguggacagcugaauag

SEQ ID NO: 44675 - RNA, 19 nt, Artificial Sequence
  Description of Artificial Sequence: Synthetic oligonucleotide
aacggaauuuguaauuccg

SEQ ID NO: 44676 - RNA, 19 nt, Artificial Sequence
  Description of Artificial Sequence: Synthetic oligonucleotide
aacgagcuaaacauguaac

SEQ ID NO: 44677 - RNA, 19 nt, Artificial Sequence
  Description of Artificial Sequence: Synthetic oligonucleotide
uauucaacuaccuguauuu

SEQ ID NO: 44678 - RNA, 19 nt, Artificial Sequence
  Description of Artificial Sequence: Synthetic oligonucleotide
  modified_base (2)..(2): a, c, u, g, unknown or other
cncuuuaaaacucccagug

SEQ ID NO: 44679 - RNA, 19 nt, Artificial Sequence
  Description of Artificial Sequence: Synthetic oligonucleotide
uuuguaauuccgacagugc

SEQ ID NO: 44680 - RNA, 19 nt, Artificial Sequence
  Description of Artificial Sequence: Synthetic oligonucleotide
acaauuauucaacuaccug

SEQ ID NO: 44681 - RNA, 19 nt, Artificial Sequence
  Description of Artificial Sequence: Synthetic oligonucleotide
guucaagacacuaucuugg

SEQ ID NO: 44682 - RNA, 19 nt, Artificial Sequence
  Description of Artificial Sequence: Synthetic oligonucleotide
uaacauuugaugaggcucu

SEQ ID NO: 44683 - RNA, 19 nt, Artificial Sequence
  Description of Artificial Sequence: Synthetic oligonucleotide
cugaaauuuggcaauggac

SEQ ID NO: 44684 - RNA, 19 nt, Artificial Sequence
  Description of Artificial Sequence: Synthetic oligonucleotide
cauccuacgaaguaaccag

SEQ ID NO: 44685 - RNA, 19 nt, Artificial Sequence
  Description of Artificial Sequence: Synthetic oligonucleotide
auuuguaauuccgacagug

SEQ ID NO: 44686 - RNA, 19 nt, Artificial Sequence
  Description of Artificial Sequence: Synthetic oligonucleotide
auuaggauaauaccacggu

SEQ ID NO: 44687 - RNA, 19 nt, Artificial Sequence
  Description of Artificial Sequence: Synthetic oligonucleotide
ggguugaaaaucuaagagg

SEQ ID NO: 44688 - RNA, 19 nt, Artificial Sequence
  Description of Artificial Sequence: Synthetic oligonucleotide
ggaaacguaaaauuacacc

SEQ ID NO: 44689 - RNA, 19 nt, Artificial Sequence
  Description of Artificial Sequence: Synthetic oligonucleotide
uucaagacacuaucuuggg

SEQ ID NO: 44690 - RNA, 19 nt, Artificial Sequence
  Description of Artificial Sequence: Synthetic oligonucleotide
uugauugagcgucaguccu

SEQ ID NO: 44691 - RNA, 19 nt, Artificial Sequence
  Description of Artificial Sequence: Synthetic oligonucleotide
uccuacgaaguaaccaggg

SEQ ID NO: 44692 - RNA, 19 nt, Artificial Sequence
  Description of Artificial Sequence: Synthetic oligonucleotide
cauuuuaugucagcgggcg

SEQ ID NO: 44693 - RNA, 19 nt, Artificial Sequence
  Description of Artificial Sequence: Synthetic oligonucleotide
uucggcacaaaacuaucug

SEQ ID NO: 44694 - RNA, 19 nt, Artificial Sequence
  Description of Artificial Sequence: Synthetic oligonucleotide
uuaucuagaaaugaagcuu

SEQ ID NO: 44695 - RNA, 19 nt, Artificial Sequence
  Description of Artificial Sequence: Synthetic oligonucleotide
uugagcgucaguccuuuag

SEQ ID NO: 44696 - RNA, 19 nt, Artificial Sequence
  Description of Artificial Sequence: Synthetic oligonucleotide
uuaaaacucccaguggagc

SEQ ID NO: 44697 - RNA, 19 nt, Artificial Sequence
  Description of Artificial Sequence: Synthetic oligonucleotide
caagguugcugcauggugc

SEQ ID NO: 44698 - RNA, 19 nt, Artificial Sequence
  Description of Artificial Sequence: Synthetic oligonucleotide
caaucaggaacacaaccgc

SEQ ID NO: 44699 - RNA, 19 nt, Artificial Sequence
  Description of Artificial Sequence: Synthetic oligonucleotide
uguaccucagaacaagaua

SEQ ID NO: 44700 - RNA, 19 nt, Artificial Sequence
  Description of Artificial Sequence: Synthetic oligonucleotide
uaaaacucccaguggagcu

SEQ ID NO: 44701 - RNA, 19 nt, Artificial Sequence
  Description of Artificial Sequence: Synthetic oligonucleotide
auggacuuuagacacauuu

SEQ ID NO: 44702 - RNA, 19 nt, Artificial Sequence
  Description of Artificial Sequence: Synthetic oligonucleotide
ugauucggcacaaaacuau

SEQ ID NO: 44703 - RNA, 19 nt, Artificial Sequence
  Description of Artificial Sequence: Synthetic oligonucleotide
aauggaugggugaccuucc

SEQ ID NO: 44704 - RNA, 19 nt, Artificial Sequence
  Description of Artificial Sequence: Synthetic oligonucleotide
cugguuauuguacucuggc

SEQ ID NO: 44705 - RNA, 19 nt, Artificial Sequence
  Description of Artificial Sequence: Synthetic oligonucleotide
aaguaagcauguccuagga

SEQ ID NO: 44706 - RNA, 19 nt, Artificial Sequence
  Description of Artificial Sequence: Synthetic oligonucleotide
aauuauucaacuaccugua

SEQ ID NO: 44707 - RNA, 19 nt, Artificial Sequence
  Description of Artificial Sequence: Synthetic oligonucleotide
ucggcacaaaacuaucugc

SEQ ID NO: 44708 - RNA, 19 nt, Artificial Sequence
  Description of Artificial Sequence: Synthetic oligonucleotide
aaaugaagcuugucauugu

SEQ ID NO: 44709 - RNA, 19 nt, Artificial Sequence
  Description of Artificial Sequence: Synthetic oligonucleotide
  modified_base (3)..(3): a, c, u, g, unknown or other
ucncuuuaaaacucccagu

SEQ ID NO: 44710 - RNA, 19 nt, Artificial Sequence
  Description of Artificial Sequence: Synthetic oligonucleotide
auuuuaugucagcgggcgc

SEQ ID NO: 44711 - RNA, 19 nt, Artificial Sequence
  Description of Artificial Sequence: Synthetic oligonucleotide
aaggaaacguaaaauuaca

SEQ ID NO: 44712 - RNA, 19 nt, Artificial Sequence
  Description of Artificial Sequence: Synthetic oligonucleotide
aaugaagcuugucauuguu

SEQ ID NO: 44713 - RNA, 19 nt, Artificial Sequence
  Description of Artificial Sequence: Synthetic oligonucleotide
cuaaaugcaggugguaacc

SEQ ID NO: 44714 - RNA, 19 nt, Artificial Sequence
  Description of Artificial Sequence: Synthetic oligonucleotide
aaccaacccaacuugguuu

SEQ ID NO: 44715 - RNA, 19 nt, Artificial Sequence
  Description of Artificial Sequence: Synthetic oligonucleotide
cauucagucuuucguagag

SEQ ID NO: 44716 - RNA, 19 nt, Artificial Sequence
  Description of Artificial Sequence: Synthetic oligonucleotide
uuucagguauuugauugag

SEQ ID NO: 44717 - RNA, 19 nt, Artificial Sequence
  Description of Artificial Sequence: Synthetic oligonucleotide
aacuaccuguauuugcuaa

SEQ ID NO: 44718 - RNA, 19 nt, Artificial Sequence
  Description of Artificial Sequence: Synthetic oligonucleotide
ugcaaaugagagcugcuuc

SEQ ID NO: 44719 - RNA, 19 nt, Artificial Sequence
  Description of Artificial Sequence: Synthetic oligonucleotide
aggaaacguaaaauuacac

SEQ ID NO: 44720 - RNA, 19 nt, Artificial Sequence
  Description of Artificial Sequence: Synthetic oligonucleotide
cuaugucuuuaagaaaggg

SEQ ID NO: 44721 - RNA, 19 nt, Artificial Sequence
  Description of Artificial Sequence: Synthetic oligonucleotide
cacgacucaaauccuauug

SEQ ID NO: 44722 - RNA, 19 nt, Artificial Sequence
  Description of Artificial Sequence: Synthetic oligonucleotide
acgagcuaaacauguaaca

SEQ ID NO: 44723 - RNA, 19 nt, Artificial Sequence
  Description of Artificial Sequence: Synthetic oligonucleotide
aaaccaacccaacuugguu

SEQ ID NO: 44724 - RNA, 19 nt, Artificial Sequence
  Description of Artificial Sequence: Synthetic oligonucleotide
uguggucuaguucccaagu

SEQ ID NO: 44725 - RNA, 19 nt, Artificial Sequence
  Description of Artificial Sequence: Synthetic oligonucleotide
aauuuguaauuccgacagu

SEQ ID NO: 44726 - RNA, 19 nt, Artificial Sequence
  Description of Artificial Sequence: Synthetic oligonucleotide
uguaauuccgacagugcuu

SEQ ID NO: 44727 - RNA, 19 nt, Artificial Sequence
  Description of Artificial Sequence: Synthetic oligonucleotide
guaauuccgacagugcuug

SEQ ID NO: 44728 - RNA, 19 nt, Artificial Sequence
  Description of Artificial Sequence: Synthetic oligonucleotide
cuagggauguggauugccc

SEQ ID NO: 44729 - RNA, 19 nt, Artificial Sequence
  Description of Artificial Sequence: Synthetic oligonucleotide
accaacccaacuugguuuc

SEQ ID NO: 44730 - RNA, 19 nt, Artificial Sequence
  Description of Artificial Sequence: Synthetic oligonucleotide
cagacgagcauuugaucgg

SEQ ID NO: 44731 - RNA, 19 nt, Artificial Sequence
  Description of Artificial Sequence: Synthetic oligonucleotide
gaaaaucuaagagguacca

SEQ ID NO: 44732 - RNA, 19 nt, Artificial Sequence
  Description of Artificial Sequence: Synthetic oligonucleotide
gauaacaaugaaggagccc

SEQ ID NO: 44733 - RNA, 19 nt, Artificial Sequence
  Description of Artificial Sequence: Synthetic oligonucleotide
gcgucaguccuuuagaaag

SEQ ID NO: 44734 - RNA, 19 nt, Artificial Sequence
  Description of Artificial Sequence: Synthetic oligonucleotide
ucuaaccagaagcuuggaa

SEQ ID NO: 44735 - RNA, 19 nt, Artificial Sequence
  Description of Artificial Sequence: Synthetic oligonucleotide
uaguguaccucagaacaag

SEQ ID NO: 44736 - RNA, 19 nt, Artificial Sequence
  Description of Artificial Sequence: Synthetic oligonucleotide
ccuaucaucaagaaagguc

SEQ ID NO: 44737 - RNA, 19 nt, Artificial Sequence
  Description of Artificial Sequence: Synthetic oligonucleotide
auacccaauagggaguguc

SEQ ID NO: 44738 - RNA, 19 nt, Artificial Sequence
  Description of Artificial Sequence: Synthetic oligonucleotide
uucagguauuugauugagc

SEQ ID NO: 44739 - RNA, 19 nt, Artificial Sequence
  Description of Artificial Sequence: Synthetic oligonucleotide
cucacaggguaacacgucc

SEQ ID NO: 44740 - RNA, 19 nt, Artificial Sequence
  Description of Artificial Sequence: Synthetic oligonucleotide
cuacgaaguaaccagggca

SEQ ID NO: 44741 - RNA, 19 nt, Artificial Sequence
  Description of Artificial Sequence: Synthetic oligonucleotide
cuugguugaaagacagaac

SEQ ID NO: 44742 - RNA, 19 nt, Artificial Sequence
  Description of Artificial Sequence: Synthetic oligonucleotide
aaguaaccagggcaguagu

SEQ ID NO: 44743 - RNA, 19 nt, Artificial Sequence
  Description of Artificial Sequence: Synthetic oligonucleotide
gaacuaguguaccucagaa

SEQ ID NO: 44744 - RNA, 19 nt, Artificial Sequence
  Description of Artificial Sequence: Synthetic oligonucleotide
aagacacuaucuuggggaa

SEQ ID NO: 44745 - RNA, 19 nt, Artificial Sequence
  Description of Artificial Sequence: Synthetic oligonucleotide
uaaggagacugguaaaguu

SEQ ID NO: 44746 - RNA, 19 nt, Artificial Sequence
  Description of Artificial Sequence: Synthetic oligonucleotide
gaacgagcuaaacauguaa

SEQ ID NO: 44747 - RNA, 19 nt, Artificial Sequence
  Description of Artificial Sequence: Synthetic oligonucleotide
cuaccuguauuugcuaagg

SEQ ID NO: 44748 - RNA, 19 nt, Artificial Sequence
  Description of Artificial Sequence: Synthetic oligonucleotide
acgacucaaauccuauuga

SEQ ID NO: 44749 - RNA, 19 nt, Artificial Sequence
  Description of Artificial Sequence: Synthetic oligonucleotide
uaaaugcaggugguaaccc

SEQ ID NO: 44750 - RNA, 19 nt, Artificial Sequence
  Description of Artificial Sequence: Synthetic oligonucleotide
acccaauagggaguguccc

SEQ ID NO: 44751 - RNA, 19 nt, Artificial Sequence
  Description of Artificial Sequence: Synthetic oligonucleotide
caaagccgagguuugcagc

SEQ ID NO: 44752 - RNA, 19 nt, Artificial Sequence
  Description of Artificial Sequence: Synthetic oligonucleotide
acaaccgcaucauggagaa

SEQ ID NO: 44753 - RNA, 19 nt, Artificial Sequence
  Description of Artificial Sequence: Synthetic oligonucleotide
gacacuaucuuggggaaga

SEQ ID NO: 44754 - RNA, 19 nt, Artificial Sequence
  Description of Artificial Sequence: Synthetic oligonucleotide
uuaacagguucaagacacu

SEQ ID NO: 44755 - RNA, 19 nt, Artificial Sequence
  Description of Artificial Sequence: Synthetic oligonucleotide
acccagaaagaagaauggg

SEQ ID NO: 44756 - RNA, 19 nt, Artificial Sequence
  Description of Artificial Sequence: Synthetic oligonucleotide
auguggauugccccuugag

SEQ ID NO: 44757 - RNA, 19 nt, Artificial Sequence
  Description of Artificial Sequence: Synthetic oligonucleotide
ucguagagcuuucagcauu

SEQ ID NO: 44758 - RNA, 19 nt, Artificial Sequence
  Description of Artificial Sequence: Synthetic oligonucleotide
ugcuggacauggauaacaa

SEQ ID NO: 44759 - RNA, 19 nt, Artificial Sequence
  Description of Artificial Sequence: Synthetic oligonucleotide
acguaaaauuacacccagc

SEQ ID NO: 44760 - RNA, 19 nt, Artificial Sequence
  Description of Artificial Sequence: Synthetic oligonucleotide
auuauucaacuaccuguau

SEQ ID NO: 44761 - RNA, 19 nt, Artificial Sequence
  Description of Artificial Sequence: Synthetic oligonucleotide
gauuucucacuucuguggu

SEQ ID NO: 44762 - RNA, 19 nt, Artificial Sequence
  Description of Artificial Sequence: Synthetic oligonucleotide
uggauuggccgagaguuga

SEQ ID NO: 44763 - RNA, 19 nt, Artificial Sequence
  Description of Artificial Sequence: Synthetic oligonucleotide
uucagacgagcauuugauc

SEQ ID NO: 44764 - RNA, 19 nt, Artificial Sequence
  Description of Artificial Sequence: Synthetic oligonucleotide
acgagcauuugaucgggcu

SEQ ID NO: 44765 - RNA, 19 nt, Artificial Sequence
  Description of Artificial Sequence: Synthetic oligonucleotide
uguauuugcuaaggagacu

SEQ ID NO: 44766 - RNA, 19 nt, Artificial Sequence
  Description of Artificial Sequence: Synthetic oligonucleotide
guaacuaggucugucagcu

SEQ ID NO: 44767 - RNA, 19 nt, Artificial Sequence
  Description of Artificial Sequence: Synthetic oligonucleotide
uucuugguugaaagacaga

SEQ ID NO: 44768 - RNA, 19 nt, Artificial Sequence
  Description of Artificial Sequence: Synthetic oligonucleotide
aguaagcauguccuaggaa

SEQ ID NO: 44769 - RNA, 19 nt, Artificial Sequence
  Description of Artificial Sequence: Synthetic oligonucleotide
agacgagcauuugaucggg

SEQ ID NO: 44770 - RNA, 19 nt, Artificial Sequence
  Description of Artificial Sequence: Synthetic oligonucleotide
gagaaacgaggaguacagg

SEQ ID NO: 44771 - RNA, 19 nt, Artificial Sequence
  Description of Artificial Sequence: Synthetic oligonucleotide
cuauacccaauagggagug

SEQ ID NO: 44772 - RNA, 19 nt, Artificial Sequence
  Description of Artificial Sequence: Synthetic oligonucleotide
auucaacuaccuguauuug

SEQ ID NO: 44773 - RNA, 19 nt, Artificial Sequence
  Description of Artificial Sequence: Synthetic oligonucleotide
ugacccaucagugcauuaa

SEQ ID NO: 44774 - RNA, 19 nt, Artificial Sequence
  Description of Artificial Sequence: Synthetic oligonucleotide
uccccuaaaugcagguggu

SEQ ID NO: 44775 - RNA, 19 nt, Artificial Sequence
  Description of Artificial Sequence: Synthetic oligonucleotide
uagugucauuaaauuugcu

SEQ ID NO: 44776 - RNA, 19 nt, Artificial Sequence
  Description of Artificial Sequence: Synthetic oligonucleotide
gauucggcacaaaacuauc

SEQ ID NO: 44777 - RNA, 19 nt, Artificial Sequence
  Description of Artificial Sequence: Synthetic oligonucleotide
agcgccaugcagcuauucu

SEQ ID NO: 44778 - RNA, 19 nt, Artificial Sequence
  Description of Artificial Sequence: Synthetic oligonucleotide
gacucaaauccuauugaaa

SEQ ID NO: 44779 - RNA, 19 nt, Artificial Sequence
  Description of Artificial Sequence: Synthetic oligonucleotide
auccuacgaaguaaccagg

SEQ ID NO: 44780 - RNA, 19 nt, Artificial Sequence
  Description of Artificial Sequence: Synthetic oligonucleotide
agugccuaauggaugggug

SEQ ID NO: 44781 - RNA, 19 nt, Artificial Sequence
  Description of Artificial Sequence: Synthetic oligonucleotide
uuuaugucagcgggcgcga

SEQ ID NO: 44782 - RNA, 19 nt, Artificial Sequence
  Description of Artificial Sequence: Synthetic oligonucleotide
ugcucacuggauuggccga

SEQ ID NO: 44783 - RNA, 19 nt, Artificial Sequence
  Description of Artificial Sequence: Synthetic oligonucleotide
uaauuccgacagugcuugg

SEQ ID NO: 44784 - RNA, 19 nt, Artificial Sequence
  Description of Artificial Sequence: Synthetic oligonucleotide
ugccccuugaggaauucuu

SEQ ID NO: 44785 - RNA, 19 nt, Artificial Sequence
  Description of Artificial Sequence: Synthetic oligonucleotide
guauuugauugagcgucag

SEQ ID NO: 44786 - RNA, 19 nt, Artificial Sequence
  Description of Artificial Sequence: Synthetic oligonucleotide
uuuccgcacagaucugaaa

SEQ ID NO: 44787 - RNA, 19 nt, Artificial Sequence
  Description of Artificial Sequence: Synthetic oligonucleotide
cacaggguaacacguccac

SEQ ID NO: 44788 - RNA, 19 nt, Artificial Sequence
  Description of Artificial Sequence: Synthetic oligonucleotide
ccuaaaugcaggugguaac

SEQ ID NO: 44789 - RNA, 19 nt, Artificial Sequence
  Description of Artificial Sequence: Synthetic oligonucleotide
ugauugagcgucaguccuu

SEQ ID NO: 44790 - RNA, 19 nt, Artificial Sequence
  Description of Artificial Sequence: Synthetic oligonucleotide
acggaauuuguaauuccga

SEQ ID NO: 44791 - RNA, 19 nt, Artificial Sequence
  Description of Artificial Sequence: Synthetic oligonucleotide
ugcggcuuauccugguuau

SEQ ID NO: 44792 - RNA, 19 nt, Artificial Sequence
  Description of Artificial Sequence: Synthetic oligonucleotide
aggcucaauguuugguagu

SEQ ID NO: 44793 - RNA, 19 nt, Artificial Sequence
  Description of Artificial Sequence: Synthetic oligonucleotide
gugccuaauggauggguga

SEQ ID NO: 44794 - RNA, 19 nt, Artificial Sequence
  Description of Artificial Sequence: Synthetic oligonucleotide
auucggcacaaaacuaucu

SEQ ID NO: 44795 - RNA, 19 nt, Artificial Sequence
  Description of Artificial Sequence: Synthetic oligonucleotide
gguaguuaagaagccagga

SEQ ID NO: 44796 - RNA, 19 nt, Artificial Sequence
  Description of Artificial Sequence: Synthetic oligonucleotide
cuguugcacgacucaaauc

SEQ ID NO: 44797 - RNA, 19 nt, Artificial Sequence
  Description of Artificial Sequence: Synthetic oligonucleotide
cccagaaagaagaauggga

SEQ ID NO: 44798 - RNA, 19 nt, Artificial Sequence
  Description of Artificial Sequence: Synthetic oligonucleotide
cuaguguaccucagaacaa

SEQ ID NO: 44799 - RNA, 19 nt, Artificial Sequence
  Description of Artificial Sequence: Synthetic oligonucleotide
cacucugaucuuggggacg

SEQ ID NO: 44800 - RNA, 19 nt, Artificial Sequence
  Description of Artificial Sequence: Synthetic oligonucleotide
gauguggauugccccuuga

SEQ ID NO: 44801 - RNA, 19 nt, Artificial Sequence
  Description of Artificial Sequence: Synthetic oligonucleotide
gauuggccgagaguugaca

SEQ ID NO: 44802 - RNA, 19 nt, Artificial Sequence
  Description of Artificial Sequence: Synthetic oligonucleotide
guggucuaguucccaaguc

SEQ ID NO: 44803 - RNA, 19 nt, Artificial Sequence
  Description of Artificial Sequence: Synthetic oligonucleotide
uaauugugauuggucuaaa

SEQ ID NO: 44804 - RNA, 19 nt, Artificial Sequence
  Description of Artificial Sequence: Synthetic oligonucleotide
ggcgcgaacgagcuaaaca

SEQ ID NO: 44805 - RNA, 19 nt, Artificial Sequence
  Description of Artificial Sequence: Synthetic oligonucleotide
agacacuaucuuggggaag

SEQ ID NO: 44806 - RNA, 19 nt, Artificial Sequence
  Description of Artificial Sequence: Synthetic oligonucleotide
cggaauuuguaauuccgac

SEQ ID NO: 44807 - RNA, 19 nt, Artificial Sequence
  Description of Artificial Sequence: Synthetic oligonucleotide
ccuacgaaguaaccagggc

SEQ ID NO: 44808 - RNA, 19 nt, Artificial Sequence
  Description of Artificial Sequence: Synthetic oligonucleotide
cccuuaauugugauugguc

SEQ ID NO: 44809 - RNA, 19 nt, Artificial Sequence
  Description of Artificial Sequence: Synthetic oligonucleotide
augauucggcacaaaacua

SEQ ID NO: 44810 - RNA, 19 nt, Artificial Sequence
  Description of Artificial Sequence: Synthetic oligonucleotide
gaacagaguaaaauccaau

SEQ ID NO: 44811 - RNA, 19 nt, Artificial Sequence
  Description of Artificial Sequence: Synthetic oligonucleotide
aggugguaaccccaacauu

SEQ ID NO: 44812 - RNA, 19 nt, Artificial Sequence
  Description of Artificial Sequence: Synthetic oligonucleotide
acauuugaugaggcucuga

SEQ ID NO: 44813 - RNA, 19 nt, Artificial Sequence
  Description of Artificial Sequence: Synthetic oligonucleotide
aaauuacacccagcccuuu

SEQ ID NO: 44814 - RNA, 19 nt, Artificial Sequence
  Description of Artificial Sequence: Synthetic oligonucleotide
ugucagcgggcgcgaacga

SEQ ID NO: 44815 - RNA, 19 nt, Artificial Sequence
  Description of Artificial Sequence: Synthetic oligonucleotide
gguaacacguccacucaca

SEQ ID NO: 44816 - RNA, 19 nt, Artificial Sequence
  Description of Artificial Sequence: Synthetic oligonucleotide
uauacccaauagggagugu

SEQ ID NO: 44817 - RNA, 19 nt, Artificial Sequence
  Description of Artificial Sequence: Synthetic oligonucleotide
caucagggagagcugaagu

SEQ ID NO: 44818 - RNA, 19 nt, Artificial Sequence
  Description of Artificial Sequence: Synthetic oligonucleotide
gacgagcauuugaucgggc

SEQ ID NO: 44819 - RNA, 19 nt, Artificial Sequence
  Description of Artificial Sequence: Synthetic oligonucleotide
uggggaaacucuggcuuau

SEQ ID NO: 44820 - RNA, 19 nt, Artificial Sequence
  Description of Artificial Sequence: Synthetic oligonucleotide
acgaaguaaccagggcagu

SEQ ID NO: 44821 - RNA, 19 nt, Artificial Sequence
  Description of Artificial Sequence: Synthetic oligonucleotide
gguauuugauugagcguca

SEQ ID NO: 44822 - RNA, 19 nt, Artificial Sequence
  Description of Artificial Sequence: Synthetic oligonucleotide
caauggacucaaggcugag

SEQ ID NO: 44823 - RNA, 19 nt, Artificial Sequence
  Description of Artificial Sequence: Synthetic oligonucleotide
acgggcgucugucauccuu

SEQ ID NO: 44824 - RNA, 19 nt, Artificial Sequence
  Description of Artificial Sequence: Synthetic oligonucleotide
ggccuagcagggcaguaac

SEQ ID NO: 44825 - RNA, 19 nt, Artificial Sequence
  Description of Artificial Sequence: Synthetic oligonucleotide
gucagcgggcgcgaacgag

SEQ ID NO: 44826 - RNA, 19 nt, Artificial Sequence
  Description of Artificial Sequence: Synthetic oligonucleotide
ggugcucacuggauuggcc

SEQ ID NO: 44827 - RNA, 19 nt, Artificial Sequence
  Description of Artificial Sequence: Synthetic oligonucleotide
gcgcgaacgagcuaaacau

SEQ ID NO: 44828 - RNA, 19 nt, Artificial Sequence
  Description of Artificial Sequence: Synthetic oligonucleotide
gguuuguggaaacggaauu

SEQ ID NO: 44829 - RNA, 19 nt, Artificial Sequence
  Description of Artificial Sequence: Synthetic oligonucleotide
guccucacucaaccugcac

SEQ ID NO: 44830 - RNA, 19 nt, Artificial Sequence
  Description of Artificial Sequence: Synthetic oligonucleotide
guggggaaacucuggcuua

SEQ ID NO: 44831 - RNA, 19 nt, Artificial Sequence
  Description of Artificial Sequence: Synthetic oligonucleotide
caggugguaaccccaacau

SEQ ID NO: 44832 - RNA, 19 nt, Artificial Sequence
  Description of Artificial Sequence: Synthetic oligonucleotide
ucccucuuguggggaaacu

SEQ ID NO: 44833 - RNA, 19 nt, Artificial Sequence
  Description of Artificial Sequence: Synthetic oligonucleotide
cugcggcuuauccugguua

SEQ ID NO: 44834 - RNA, 19 nt, Artificial Sequence
  Description of Artificial Sequence: Synthetic oligonucleotide
gcuguugcacgacucaaau

SEQ ID NO: 44835 - RNA, 19 nt, Artificial Sequence
  Description of Artificial Sequence: Synthetic oligonucleotide
ucccaagucuggggccuug

SEQ ID NO: 44836 - RNA, 19 nt, Artificial Sequence
  Description of Artificial Sequence: Synthetic oligonucleotide
gccccuugaggaauucuug

SEQ ID NO: 44837 - RNA, 19 nt, Artificial Sequence
  Description of Artificial Sequence: Synthetic oligonucleotide
cucugaucuuggggacggg

SEQ ID NO: 44838 - RNA, 19 nt, Artificial Sequence
  Description of Artificial Sequence: Synthetic oligonucleotide
gccuaauggaugggugacc

SEQ ID NO: 44839 - RNA, 19 nt, Artificial Sequence
  Description of Artificial Sequence: Synthetic oligonucleotide
cccaguggagcuuuaugaa

SEQ ID NO: 44840 - RNA, 19 nt, Artificial Sequence
  Description of Artificial Sequence: Synthetic oligonucleotide
ggcgucugucauccuuuug

SEQ ID NO: 44841 - RNA, 19 nt, Artificial Sequence
  Description of Artificial Sequence: Synthetic oligonucleotide
ccuauacccaauagggagu

SEQ ID NO: 44842 - RNA, 19 nt, Artificial Sequence
  Description of Artificial Sequence: Synthetic oligonucleotide
gguaccaacuggcaacauu

SEQ ID NO: 44843 - RNA, 19 nt, Artificial Sequence
  Description of Artificial Sequence: Synthetic oligonucleotide
ggcagguaugcugaaauuu

SEQ ID NO: 44844 - RNA, 19 nt, Artificial Sequence
  Description of Artificial Sequence: Synthetic oligonucleotide
cgcgaacgagcuaaacaug

SEQ ID NO: 44845 - RNA, 19 nt, Artificial Sequence
  Description of Artificial Sequence: Synthetic oligonucleotide
cacaggcucaauguuuggu

SEQ ID NO: 44846 - RNA, 19 nt, Artificial Sequence
  Description of Artificial Sequence: Synthetic oligonucleotide
cgacucaaauccuauugaa

SEQ ID NO: 44847 - RNA, 19 nt, Artificial Sequence
  Description of Artificial Sequence: Synthetic oligonucleotide
cccucuuguggggaaacuc

SEQ ID NO: 44848 - RNA, 19 nt, Artificial Sequence
  Description of Artificial Sequence: Synthetic oligonucleotide
agacacuaguggagccccu

SEQ ID NO: 44849 - RNA, 19 nt, Artificial Sequence
  Description of Artificial Sequence: Synthetic oligonucleotide
ggauuggccgagaguugac

SEQ ID NO: 44850 - RNA, 19 nt, Artificial Sequence
  Description of Artificial Sequence: Synthetic oligonucleotide
cucacuggauuggccgaga

SEQ ID NO: 44851 - RNA, 19 nt, Artificial Sequence
  Description of Artificial Sequence: Synthetic oligonucleotide
ccuaauggaugggugaccu

SEQ ID NO: 44852 - RNA, 19 nt, Artificial Sequence
  Description of Artificial Sequence: Synthetic oligonucleotide
gggugaccuuccuucucca

SEQ ID NO: 44853 - RNA, 19 nt, Artificial Sequence
  Description of Artificial Sequence: Synthetic oligonucleotide
cgucaguccuuuagaaaga

SEQ ID NO: 44854 - RNA, 19 nt, Artificial Sequence
  Description of Artificial Sequence: Synthetic oligonucleotide
cagcacauguggucuaguu

SEQ ID NO: 44855 - RNA, 19 nt, Artificial Sequence
  Description of Artificial Sequence: Synthetic oligonucleotide
caacccaacuugguuucua

SEQ ID NO: 44856 - RNA, 19 nt, Artificial Sequence
  Description of Artificial Sequence: Synthetic oligonucleotide
cugcuucagacgagcauuu

SEQ ID NO: 44857 - RNA, 19 nt, Artificial Sequence
  Description of Artificial Sequence: Synthetic oligonucleotide
cacuccuagggauguggau

SEQ ID NO: 44858 - RNA, 19 nt, Artificial Sequence
  Description of Artificial Sequence: Synthetic oligonucleotide
ggcuguugcacgacucaaa

SEQ ID NO: 44859 - RNA, 19 nt, Artificial Sequence
  Description of Artificial Sequence: Synthetic oligonucleotide
gcuggacauggauaacaau

SEQ ID NO: 44860 - RNA, 19 nt, Artificial Sequence
  Description of Artificial Sequence: Synthetic oligonucleotide
uucccaagucuggggccuu

SEQ ID NO: 44861 - RNA, 19 nt, Artificial Sequence
  Description of Artificial Sequence: Synthetic oligonucleotide
cguagagcuuucagcauua

SEQ ID NO: 44862 - RNA, 19 nt, Artificial Sequence
  Description of Artificial Sequence: Synthetic oligonucleotide
ccgcaucauggagaauccc

SEQ ID NO: 44863 - RNA, 19 nt, Artificial Sequence
  Description of Artificial Sequence: Synthetic oligonucleotide
cagcgggcgcgaacgagcu

SEQ ID NO: 44864 - RNA, 19 nt, Artificial Sequence
  Description of Artificial Sequence: Synthetic oligonucleotide
ggauugccccuugaggaau

SEQ ID NO: 44865 - RNA, 19 nt, Artificial Sequence
  Description of Artificial Sequence: Synthetic oligonucleotide
guagagcuuucagcauuau

SEQ ID NO: 44866 - RNA, 19 nt, Artificial Sequence
  Description of Artificial Sequence: Synthetic oligonucleotide
ggagaaucccgagcauccu

SEQ ID NO: 44867 - RNA, 19 nt, Artificial Sequence
  Description of Artificial Sequence: Synthetic oligonucleotide
cgaacgagcuaaacaugua

SEQ ID NO: 44868 - RNA, 19 nt, Artificial Sequence
  Description of Artificial Sequence: Synthetic oligonucleotide
cccuuugcaaugacccgcu

SEQ ID NO: 44869 - RNA, 19 nt, Artificial Sequence
  Description of Artificial Sequence: Synthetic oligonucleotide
gcacgacucaaauccuauu

SEQ ID NO: 44870 - RNA, 19 nt, Artificial Sequence
  Description of Artificial Sequence: Synthetic oligonucleotide
gggcgcgaacgagcuaaac

SEQ ID NO: 44871 - RNA, 19 nt, Artificial Sequence
  Description of Artificial Sequence: Synthetic oligonucleotide
cgaaguaaccagggcagua

SEQ ID NO: 44872 - RNA, 19 nt, Artificial Sequence
  Description of Artificial Sequence: Synthetic oligonucleotide
ucgagggguugggguugua

SEQ ID NO: 44873 - RNA, 19 nt, Artificial Sequence
  Description of Artificial Sequence: Synthetic oligonucleotide
ccccuuaauugugauuggu

SEQ ID NO: 44874 - RNA, 19 nt, Artificial Sequence
  Description of Artificial Sequence: Synthetic oligonucleotide
gacgggcgucugucauccu

SEQ ID NO: 44875 - RNA, 19 nt, Artificial Sequence
  Description of Artificial Sequence: Synthetic oligonucleotide
ccacugcgucuuguucaug

SEQ ID NO: 44876 - RNA, 19 nt, Artificial Sequence
  Description of Artificial Sequence: Synthetic oligonucleotide
ggucagcgccaugcagcua

SEQ ID NO: 44877 - RNA, 19 nt, Artificial Sequence
  Description of Artificial Sequence: Synthetic oligonucleotide
ccaacccaacuugguuucu

SEQ ID NO: 44878 - RNA, 19 nt, Artificial Sequence
  Description of Artificial Sequence: Synthetic oligonucleotide
cgggcgucugucauccuuu

SEQ ID NO: 44879 - RNA, 19 nt, Artificial Sequence
  Description of Artificial Sequence: Synthetic oligonucleotide
caaccgcaucauggagaau

SEQ ID NO: 44880 - RNA, 19 nt, Artificial Sequence
  Description of Artificial Sequence: Synthetic oligonucleotide
gcggcuuauccugguuauu

SEQ ID NO: 44881 - RNA, 19 nt, Artificial Sequence
  Description of Artificial Sequence: Synthetic oligonucleotide
aaagcgaacucuuagaucc

SEQ ID NO: 44882 - RNA, 19 nt, Artificial Sequence
  Description of Artificial Sequence: Synthetic oligonucleotide
guuacaauuaguuugagcc

SEQ ID NO: 44883 - RNA, 19 nt, Artificial Sequence
  Description of Artificial Sequence: Synthetic oligonucleotide
agugauuugaguccuagcc

SEQ ID NO: 44884 - RNA, 19 nt, Artificial Sequence
  Description of Artificial Sequence: Synthetic oligonucleotide
gauauauuaggauagagaa

SEQ ID NO: 44885 - RNA, 19 nt, Artificial Sequence
  Description of Artificial Sequence: Synthetic oligonucleotide
agugcauuaaagcuuuucc

SEQ ID NO: 44886 - RNA, 19 nt, Artificial Sequence
  Description of Artificial Sequence: Synthetic oligonucleotide
acugaguauaacuaaacuc

SEQ ID NO: 44887 - RNA, 19 nt, Artificial Sequence
  Description of Artificial Sequence: Synthetic oligonucleotide
aagggagugauuugagucc

SEQ ID NO: 44888 - RNA, 19 nt, Artificial Sequence
  Description of Artificial Sequence: Synthetic oligonucleotide
aacuaagugcauuaaagcu

SEQ ID NO: 44889 - RNA, 19 nt, Artificial Sequence
  Description of Artificial Sequence: Synthetic oligonucleotide
ugguguuugauauauuagg

SEQ ID NO: 44890 - RNA, 19 nt, Artificial Sequence
  Description of Artificial Sequence: Synthetic oligonucleotide
ucgaguuucagcuaaacac

SEQ ID NO: 44891 - RNA, 19 nt, Artificial Sequence
  Description of Artificial Sequence: Synthetic oligonucleotide
ugauauauuaggauagaga

SEQ ID NO: 44892 - RNA, 19 nt, Artificial Sequence
  Description of Artificial Sequence: Synthetic oligonucleotide
cauggaauacccaaucucg

SEQ ID NO: 44893 - RNA, 19 nt, Artificial Sequence
  Description of Artificial Sequence: Synthetic oligonucleotide
uagauaagacccuugacug

SEQ ID NO: 44894 - RNA, 19 nt, Artificial Sequence
  Description of Artificial Sequence: Synthetic oligonucleotide
aaucaaaccacccaaccau

SEQ ID NO: 44895 - RNA, 19 nt, Artificial Sequence
  Description of Artificial Sequence: Synthetic oligonucleotide
gaauucucguguuacacag

SEQ ID NO: 44896 - RNA, 19 nt, Artificial Sequence
  Description of Artificial Sequence: Synthetic oligonucleotide
uauacacggggcuagaggc

SEQ ID NO: 44897 - RNA, 19 nt, Artificial Sequence
  Description of Artificial Sequence: Synthetic oligonucleotide
auaaucaaaaucauauuag

SEQ ID NO: 44898 - RNA, 19 nt, Artificial Sequence
  Description of Artificial Sequence: Synthetic oligonucleotide
uuaggauagagaacaaaca

SEQ ID NO: 44899 - RNA, 19 nt, Artificial Sequence
  Description of Artificial Sequence: Synthetic oligonucleotide
ucuguagugaugcugggca

SEQ ID NO: 44900 - RNA, 19 nt, Artificial Sequence
  Description of Artificial Sequence: Synthetic oligonucleotide
uuauacacggggcuagagg

SEQ ID NO: 44901 - RNA, 19 nt, Artificial Sequence
  Description of Artificial Sequence: Synthetic oligonucleotide
uggauaauauacuguacag

SEQ ID NO: 44902 - RNA, 19 nt, Artificial Sequence
  Description of Artificial Sequence: Synthetic oligonucleotide
uuaguguaggaucacaguc

SEQ ID NO: 44903 - RNA, 19 nt, Artificial Sequence
  Description of Artificial Sequence: Synthetic oligonucleotide
auuaguacaaaucacucuu

SEQ ID NO: 44904 - RNA, 19 nt, Artificial Sequence
  Description of Artificial Sequence: Synthetic oligonucleotide
uaaccucccaagcaggugg

SEQ ID NO: 44905 - RNA, 19 nt, Artificial Sequence
  Description of Artificial Sequence: Synthetic oligonucleotide
gacguggguaucuagagcc

SEQ ID NO: 44906 - RNA, 19 nt, Artificial Sequence
  Description of Artificial Sequence: Synthetic oligonucleotide
ugauacuaggagauggugc

SEQ ID NO: 44907 - RNA, 19 nt, Artificial Sequence
  Description of Artificial Sequence: Synthetic oligonucleotide
ugaauuuuccagaauuaac

SEQ ID NO: 44908 - RNA, 19 nt, Artificial Sequence
  Description of Artificial Sequence: Synthetic oligonucleotide
aggucuaucugauacuagg

SEQ ID NO: 44909 - RNA, 19 nt, Artificial Sequence
  Description of Artificial Sequence: Synthetic oligonucleotide
ucuaucugauacuaggaga

SEQ ID NO: 44910 - RNA, 19 nt, Artificial Sequence
  Description of Artificial Sequence: Synthetic oligonucleotide
uugccauuaagugagaugu

SEQ ID NO: 44911 - RNA, 19 nt, Artificial Sequence
  Description of Artificial Sequence: Synthetic oligonucleotide
aagaaaugagaugguaggg

SEQ ID NO: 44912 - RNA, 19 nt, Artificial Sequence
  Description of Artificial Sequence: Synthetic oligonucleotide
aguacggugaagcacacgu

SEQ ID NO: 44913 - RNA, 19 nt, Artificial Sequence
  Description of Artificial Sequence: Synthetic oligonucleotide
uagaguacggugaagcaca

SEQ ID NO: 44914 - RNA, 19 nt, Artificial Sequence
  Description of Artificial Sequence: Synthetic oligonucleotide
ucagcuuaguguaggauca

SEQ ID NO: 44915 - RNA, 19 nt, Artificial Sequence
  Description of Artificial Sequence: Synthetic oligonucleotide
ucacauuggcauuugaacu

SEQ ID NO: 44916 - RNA, 19 nt, Artificial Sequence
  Description of Artificial Sequence: Synthetic oligonucleotide
guucauuguacagaggacg

SEQ ID NO: 44917 - RNA, 19 nt, Artificial Sequence
  Description of Artificial Sequence: Synthetic oligonucleotide
ugcucuauuaacucgggac

SEQ ID NO: 44918 - RNA, 19 nt, Artificial Sequence
  Description of Artificial Sequence: Synthetic oligonucleotide
uauuaguacaaaucacucu

SEQ ID NO: 44919 - RNA, 19 nt, Artificial Sequence
  Description of Artificial Sequence: Synthetic oligonucleotide
auuuucgguguccaauuac

SEQ ID NO: 44920 - RNA, 19 nt, Artificial Sequence
  Description of Artificial Sequence: Synthetic oligonucleotide
uucauuguacagaggacgc

SEQ ID NO: 44921 - RNA, 19 nt, Artificial Sequence
  Description of Artificial Sequence: Synthetic oligonucleotide
ucgguguccaauuacacgu

SEQ ID NO: 44922 - RNA, 19 nt, Artificial Sequence
  Description of Artificial Sequence: Synthetic oligonucleotide
aauagcuaucuuuaaucaa

SEQ ID NO: 44923 - RNA, 19 nt, Artificial Sequence
  Description of Artificial Sequence: Synthetic oligonucleotide
uucuauuggguauaucucu

SEQ ID NO: 44924 - RNA, 19 nt, Artificial Sequence
  Description of Artificial Sequence: Synthetic oligonucleotide
uuuacaucugaguuauaga

SEQ ID NO: 44925 - RNA, 19 nt, Artificial Sequence
  Description of Artificial Sequence: Synthetic oligonucleotide
uauaacuuacaggauuucc

SEQ ID NO: 44926 - RNA, 19 nt, Artificial Sequence
  Description of Artificial Sequence: Synthetic oligonucleotide
aaugagaugguagggugag

SEQ ID NO: 44927 - RNA, 19 nt, Artificial Sequence
  Description of Artificial Sequence: Synthetic oligonucleotide
ugugguguuugauauauua

SEQ ID NO: 44928 - RNA, 19 nt, Artificial Sequence
  Description of Artificial Sequence: Synthetic oligonucleotide
uuacaauuaguuugagcca

SEQ ID NO: 44929 - RNA, 19 nt, Artificial Sequence
  Description of Artificial Sequence: Synthetic oligonucleotide
aggaguaugccucugcuca

SEQ ID NO: 44930 - RNA, 19 nt, Artificial Sequence
  Description of Artificial Sequence: Synthetic oligonucleotide
uaagaagggcgccugggag

SEQ ID NO: 44931 - RNA, 19 nt, Artificial Sequence
  Description of Artificial Sequence: Synthetic oligonucleotide
ugaacuuuucacaucuauc

SEQ ID NO: 44932 - RNA, 19 nt, Artificial Sequence
  Description of Artificial Sequence: Synthetic oligonucleotide
uguagacuguacaugucug

SEQ ID NO: 44933 - RNA, 19 nt, Artificial Sequence
  Description of Artificial Sequence: Synthetic oligonucleotide
cugcuacugaauuuggccg

SEQ ID NO: 44934 - RNA, 19 nt, Artificial Sequence
  Description of Artificial Sequence: Synthetic oligonucleotide
aaccuaaaggaaaacuaag

SEQ ID NO: 44935 - RNA, 19 nt, Artificial Sequence
  Description of Artificial Sequence: Synthetic oligonucleotide
acaauuuaggaccuguuua

SEQ ID NO: 44936 - RNA, 19 nt, Artificial Sequence
  Description of Artificial Sequence: Synthetic oligonucleotide
aaguccuuuacaucugagu

SEQ ID NO: 44937 - RNA, 19 nt, Artificial Sequence
  Description of Artificial Sequence: Synthetic oligonucleotide
aacaccuaagaagggcgcc

SEQ ID NO: 44938 - RNA, 19 nt, Artificial Sequence
  Description of Artificial Sequence: Synthetic oligonucleotide
uguaaccagguaaguaugc

SEQ ID NO: 44939 - RNA, 19 nt, Artificial Sequence
  Description of Artificial Sequence: Synthetic oligonucleotide
caucguguggccacaagcg

SEQ ID NO: 44940 - RNA, 19 nt, Artificial Sequence
  Description of Artificial Sequence: Synthetic oligonucleotide
aguaugccucugcucaucc

SEQ ID NO: 44941 - RNA, 19 nt, Artificial Sequence
  Description of Artificial Sequence: Synthetic oligonucleotide
aaggaguaugccucugcuc

SEQ ID NO: 44942 - RNA, 19 nt, Artificial Sequence
  Description of Artificial Sequence: Synthetic oligonucleotide
caugacgcgucuuugcagg

SEQ ID NO: 44943 - RNA, 19 nt, Artificial Sequence
  Description of Artificial Sequence: Synthetic oligonucleotide
cugaguauaacuaaacucu

SEQ ID NO: 44944 - RNA, 19 nt, Artificial Sequence
  Description of Artificial Sequence: Synthetic oligonucleotide
auacuuauggauauuaaau

SEQ ID NO: 44945 - RNA, 19 nt, Artificial Sequence
  Description of Artificial Sequence: Synthetic oligonucleotide
ugaguggucuguauuacaa

SEQ ID NO: 44946 - RNA, 19 nt, Artificial Sequence
  Description of Artificial Sequence: Synthetic oligonucleotide
aguccuuuacaucugaguu

SEQ ID NO: 44947 - RNA, 19 nt, Artificial Sequence
  Description of Artificial Sequence: Synthetic oligonucleotide
gucuaucugauacuaggag

SEQ ID NO: 44948 - RNA, 19 nt, Artificial Sequence
  Description of Artificial Sequence: Synthetic oligonucleotide
uguuacacuggcagcagcu

SEQ ID NO: 44949 - RNA, 19 nt, Artificial Sequence
  Description of Artificial Sequence: Synthetic oligonucleotide
ucuagagccagcaucgcua

SEQ ID NO: 44950 - RNA, 19 nt, Artificial Sequence
  Description of Artificial Sequence: Synthetic oligonucleotide
agcaucgcuaguucucccc

SEQ ID NO: 44951 - RNA, 19 nt, Artificial Sequence
  Description of Artificial Sequence: Synthetic oligonucleotide
uacaauauaagggcugaga

SEQ ID NO: 44952 - RNA, 19 nt, Artificial Sequence
  Description of Artificial Sequence: Synthetic oligonucleotide
uuucagcuaaacaccuaag

SEQ ID NO: 44953 - RNA, 19 nt, Artificial Sequence
  Description of Artificial Sequence: Synthetic oligonucleotide
cuuuaauuguagacuguac

SEQ ID NO: 44954 - RNA, 19 nt, Artificial Sequence
  Description of Artificial Sequence: Synthetic oligonucleotide
aaucacucuuuaauuguag

SEQ ID NO: 44955 - RNA, 19 nt, Artificial Sequence
  Description of Artificial Sequence: Synthetic oligonucleotide
aggaccuguuuaauaaucc

SEQ ID NO: 44956 - RNA, 19 nt, Artificial Sequence
  Description of Artificial Sequence: Synthetic oligonucleotide
uuugagccaagaaggaaaa

SEQ ID NO: 44957 - RNA, 19 nt, Artificial Sequence
  Description of Artificial Sequence: Synthetic oligonucleotide
auagugugggcuaucagag

SEQ ID NO: 44958 - RNA, 19 nt, Artificial Sequence
  Description of Artificial Sequence: Synthetic oligonucleotide
uacaauuuaggaccuguuu

SEQ ID NO: 44959 - RNA, 19 nt, Artificial Sequence
  Description of Artificial Sequence: Synthetic oligonucleotide
cugugugcgaacaccaccc

SEQ ID NO: 44960 - RNA, 19 nt, Artificial Sequence
  Description of Artificial Sequence: Synthetic oligonucleotide
uguauccccauaauccggu

SEQ ID NO: 44961 - RNA, 19 nt, Artificial Sequence
  Description of Artificial Sequence: Synthetic oligonucleotide
auuaacucgggacuucuaa

SEQ ID NO: 44962 - RNA, 19 nt, Artificial Sequence
  Description of Artificial Sequence: Synthetic oligonucleotide
gauacuaggagauggugcu

SEQ ID NO: 44963 - RNA, 19 nt, Artificial Sequence
  Description of Artificial Sequence: Synthetic oligonucleotide
uacaauuaguuugagccaa

SEQ ID NO: 44964 - RNA, 19 nt, Artificial Sequence
  Description of Artificial Sequence: Synthetic oligonucleotide
aaugacguggguaucuaga

SEQ ID NO: 44965 - RNA, 19 nt, Artificial Sequence
  Description of Artificial Sequence: Synthetic oligonucleotide
augacguggguaucuagag

SEQ ID NO: 44966 - RNA, 19 nt, Artificial Sequence
  Description of Artificial Sequence: Synthetic oligonucleotide
uuucaaagcucugacugca

SEQ ID NO: 44967 - RNA, 19 nt, Artificial Sequence
  Description of Artificial Sequence: Synthetic oligonucleotide
aucacuacuccuugguuca

SEQ ID NO: 44968 - RNA, 19 nt, Artificial Sequence
  Description of Artificial Sequence: Synthetic oligonucleotide
ugggaagcgagucuucgca

SEQ ID NO: 44969 - RNA, 19 nt, Artificial Sequence
  Description of Artificial Sequence: Synthetic oligonucleotide
ugaguauaacuaaacucua

SEQ ID NO: 44970 - RNA, 19 nt, Artificial Sequence
  Description of Artificial Sequence: Synthetic oligonucleotide
guauagauaagacccuuga

SEQ ID NO: 44971 - RNA, 19 nt, Artificial Sequence
  Description of Artificial Sequence: Synthetic oligonucleotide
uuaacucgggacuucuaac

SEQ ID NO: 44972 - RNA, 19 nt, Artificial Sequence
  Description of Artificial Sequence: Synthetic oligonucleotide
auaauccaggcuuaacuaa

SEQ ID NO: 44973 - RNA, 19 nt, Artificial Sequence
  Description of Artificial Sequence: Synthetic oligonucleotide
uccacugguuauagugugg

SEQ ID NO: 44974 - RNA, 19 nt, Artificial Sequence
  Description of Artificial Sequence: Synthetic oligonucleotide
agguaaguaugcugcagag

SEQ ID NO: 44975 - RNA, 19 nt, Artificial Sequence
  Description of Artificial Sequence: Synthetic oligonucleotide
acaacaaccugggauacug

SEQ ID NO: 44976 - RNA, 19 nt, Artificial Sequence
  Description of Artificial Sequence: Synthetic oligonucleotide
cauuggauaauauacugua

SEQ ID NO: 44977 - RNA, 19 nt, Artificial Sequence
  Description of Artificial Sequence: Synthetic oligonucleotide
aagugugaccauuuauaaa

SEQ ID NO: 44978 - RNA, 19 nt, Artificial Sequence
  Description of Artificial Sequence: Synthetic oligonucleotide
cuugccauuaagugagaug

SEQ ID NO: 44979 - RNA, 19 nt, Artificial Sequence
  Description of Artificial Sequence: Synthetic oligonucleotide
uuuugccgaaccccaaugu

SEQ ID NO: 44980 - RNA, 19 nt, Artificial Sequence
  Description of Artificial Sequence: Synthetic oligonucleotide
ugugugguguuugauauau

SEQ ID NO: 44981 - RNA, 19 nt, Artificial Sequence
  Description of Artificial Sequence: Synthetic oligonucleotide
cuagcgguagaguacggug

SEQ ID NO: 44982 - RNA, 19 nt, Artificial Sequence
  Description of Artificial Sequence: Synthetic oligonucleotide
agaaaugagaugguagggu

SEQ ID NO: 44983 - RNA, 19 nt, Artificial Sequence
  Description of Artificial Sequence: Synthetic oligonucleotide
uugucgucugcgcauuucc

SEQ ID NO: 44984 - RNA, 19 nt, Artificial Sequence
  Description of Artificial Sequence: Synthetic oligonucleotide
aaguuggaagcugagugga

SEQ ID NO: 44985 - RNA, 19 nt, Artificial Sequence
  Description of Artificial Sequence: Synthetic oligonucleotide
agauguuauucugaaucuc

SEQ ID NO: 44986 - RNA, 19 nt, Artificial Sequence
  Description of Artificial Sequence: Synthetic oligonucleotide
aagaagggcgccugggaga

SEQ ID NO: 44987 - RNA, 19 nt, Artificial Sequence
  Description of Artificial Sequence: Synthetic oligonucleotide
uaguauuauccaucuugcc

SEQ ID NO: 44988 - RNA, 19 nt, Artificial Sequence
  Description of Artificial Sequence: Synthetic oligonucleotide
aggaaaacuaagugcauua

SEQ ID NO: 44989 - RNA, 19 nt, Artificial Sequence
  Description of Artificial Sequence: Synthetic oligonucleotide
uaguuugagccaagaagga

SEQ ID NO: 44990 - RNA, 19 nt, Artificial Sequence
  Description of Artificial Sequence: Synthetic oligonucleotide
agucaugguagauggucag

SEQ ID NO: 44991 - RNA, 19 nt, Artificial Sequence
  Description of Artificial Sequence: Synthetic oligonucleotide
uccaugacgcgucuuugca

SEQ ID NO: 44992 - RNA, 19 nt, Artificial Sequence
  Description of Artificial Sequence: Synthetic oligonucleotide
acgcucuguauacaugggg

SEQ ID NO: 44993 - RNA, 19 nt, Artificial Sequence
  Description of Artificial Sequence: Synthetic oligonucleotide
uuucgguguccaauuacac

SEQ ID NO: 44994 - RNA, 19 nt, Artificial Sequence
  Description of Artificial Sequence: Synthetic oligonucleotide
ucggccaacgaacacugac

SEQ ID NO: 44995 - RNA, 19 nt, Artificial Sequence
  Description of Artificial Sequence: Synthetic oligonucleotide
ugguacugacuuucaaagc

SEQ ID NO: 44996 - RNA, 19 nt, Artificial Sequence
  Description of Artificial Sequence: Synthetic oligonucleotide
ugugcgaacaccacccaua

SEQ ID NO: 44997 - RNA, 19 nt, Artificial Sequence
  Description of Artificial Sequence: Synthetic oligonucleotide
ugagagaguaacacuugau

SEQ ID NO: 44998 - RNA, 19 nt, Artificial Sequence
  Description of Artificial Sequence: Synthetic oligonucleotide
uggaguaggucuaucugau

SEQ ID NO: 44999 - RNA, 19 nt, Artificial Sequence
  Description of Artificial Sequence: Synthetic oligonucleotide
aucgaguuucagcuaaaca

SEQ ID NO: 45000 - RNA, 19 nt, Artificial Sequence
  Description of Artificial Sequence: Synthetic oligonucleotide
ugacguggguaucuagagc

SEQ ID NO: 45001 - RNA, 19 nt, Artificial Sequence
  Description of Artificial Sequence: Synthetic oligonucleotide
ugccaaauguaguauuauc

SEQ ID NO: 45002 - RNA, 19 nt, Artificial Sequence
  Description of Artificial Sequence: Synthetic oligonucleotide
uagcgguagaguacgguga

SEQ ID NO: 45003 - RNA, 19 nt, Artificial Sequence
  Description of Artificial Sequence: Synthetic oligonucleotide
ugauuuucgguguccaauu

SEQ ID NO: 45004 - RNA, 19 nt, Artificial Sequence
  Description of Artificial Sequence: Synthetic oligonucleotide
uacccaaucucggccaacg

SEQ ID NO: 45005 - RNA, 19 nt, Artificial Sequence
  Description of Artificial Sequence: Synthetic oligonucleotide
gcgaacaccacccauacuc

SEQ ID NO: 45006 - RNA, 19 nt, Artificial Sequence
  Description of Artificial Sequence: Synthetic oligonucleotide
acgaguucacgacugugug

SEQ ID NO: 45007 - RNA, 19 nt, Artificial Sequence
  Description of Artificial Sequence: Synthetic oligonucleotide
gucgucugcgcauuuccgg

SEQ ID NO: 45008 - RNA, 19 nt, Artificial Sequence
  Description of Artificial Sequence: Synthetic oligonucleotide
gaaugacguggguaucuag

SEQ ID NO: 45009 - RNA, 19 nt, Artificial Sequence
  Description of Artificial Sequence: Synthetic oligonucleotide
aauucucguguuacacagg

SEQ ID NO: 45010 - RNA, 19 nt, Artificial Sequence
  Description of Artificial Sequence: Synthetic oligonucleotide
agauaagacccuugacuga

SEQ ID NO: 45011 - RNA, 19 nt, Artificial Sequence
  Description of Artificial Sequence: Synthetic oligonucleotide
caaagcgaacucuuagauc

SEQ ID NO: 45012 - RNA, 19 nt, Artificial Sequence
  Description of Artificial Sequence: Synthetic oligonucleotide
aguuuaugggccugccugu

SEQ ID NO: 45013 - RNA, 19 nt, Artificial Sequence
  Description of Artificial Sequence: Synthetic oligonucleotide
ugcgcauuuccggaguucc

SEQ ID NO: 45014 - RNA, 19 nt, Artificial Sequence
  Description of Artificial Sequence: Synthetic oligonucleotide
ugggcuaucagaggcaauc

SEQ ID NO: 45015 - RNA, 19 nt, Artificial Sequence
  Description of Artificial Sequence: Synthetic oligonucleotide
aaccugugaaugacguggg

SEQ ID NO: 45016 - RNA, 19 nt, Artificial Sequence
  Description of Artificial Sequence: Synthetic oligonucleotide
uugaguggucuguauuaca

SEQ ID NO: 45017 - RNA, 19 nt, Artificial Sequence
  Description of Artificial Sequence: Synthetic oligonucleotide
uuugccgaaccccaauguu

SEQ ID NO: 45018 - RNA, 19 nt, Artificial Sequence
  Description of Artificial Sequence: Synthetic oligonucleotide
aagcgucucaggguggcuc

SEQ ID NO: 45019 - RNA, 19 nt, Artificial Sequence
  Description of Artificial Sequence: Synthetic oligonucleotide
cuguauuacaaaggaguug

SEQ ID NO: 45020 - RNA, 19 nt, Artificial Sequence
  Description of Artificial Sequence: Synthetic oligonucleotide
cagaggacgcucuguauac

SEQ ID NO: 45021 - RNA, 19 nt, Artificial Sequence
  Description of Artificial Sequence: Synthetic oligonucleotide
guagaguacggugaagcac

SEQ ID NO: 45022 - RNA, 19 nt, Artificial Sequence
  Description of Artificial Sequence: Synthetic oligonucleotide
ggacuucuaacagugcacg

SEQ ID NO: 45023 - RNA, 19 nt, Artificial Sequence
  Description of Artificial Sequence: Synthetic oligonucleotide
ggaguuauaaaaguuggaa

SEQ ID NO: 45024 - RNA, 19 nt, Artificial Sequence
  Description of Artificial Sequence: Synthetic oligonucleotide
cauuuccggaguuccuggg

SEQ ID NO: 45025 - RNA, 19 nt, Artificial Sequence
  Description of Artificial Sequence: Synthetic oligonucleotide
ucauccguguaccguggca

SEQ ID NO: 45026 - RNA, 19 nt, Artificial Sequence
  Description of Artificial Sequence: Synthetic oligonucleotide
cgaguuucagcuaaacacc

SEQ ID NO: 45027 - RNA, 19 nt, Artificial Sequence
  Description of Artificial Sequence: Synthetic oligonucleotide
gacuguacaugucuguacu

SEQ ID NO: 45028 - RNA, 19 nt, Artificial Sequence
  Description of Artificial Sequence: Synthetic oligonucleotide
uggguaucuagagccagca

SEQ ID NO: 45029 - RNA, 19 nt, Artificial Sequence
  Description of Artificial Sequence: Synthetic oligonucleotide
uuaccccuaagcccuuugu

SEQ ID NO: 45030 - RNA, 19 nt, Artificial Sequence
  Description of Artificial Sequence: Synthetic oligonucleotide
uguacagaggacgcucugu

SEQ ID NO: 45031 - RNA, 19 nt, Artificial Sequence
  Description of Artificial Sequence: Synthetic oligonucleotide
cucuguauacauggggcag

SEQ ID NO: 45032 - RNA, 19 nt, Artificial Sequence
  Description of Artificial Sequence: Synthetic oligonucleotide
cacugcacgaguucacgac

SEQ ID NO: 45033 - RNA, 19 nt, Artificial Sequence
  Description of Artificial Sequence: Synthetic oligonucleotide
caccuagcgguagaguacg

SEQ ID NO: 45034 - RNA, 19 nt, Artificial Sequence
  Description of Artificial Sequence: Synthetic oligonucleotide
gagagaguaacacuugauu

SEQ ID NO: 45035 - RNA, 19 nt, Artificial Sequence
  Description of Artificial Sequence: Synthetic oligonucleotide
uguuaguuucagguauaga

SEQ ID NO: 45036 - RNA, 19 nt, Artificial Sequence
  Description of Artificial Sequence: Synthetic oligonucleotide
gucuugaacacaggaccgg

SEQ ID NO: 45037 - RNA, 19 nt, Artificial Sequence
  Description of Artificial Sequence: Synthetic oligonucleotide
cauuguuagucaugguaga

SEQ ID NO: 45038 - RNA, 19 nt, Artificial Sequence
  Description of Artificial Sequence: Synthetic oligonucleotide
cauccguguaccguggcag

SEQ ID NO: 45039 - RNA, 19 nt, Artificial Sequence
  Description of Artificial Sequence: Synthetic oligonucleotide
accgcuucuugagaacugg

SEQ ID NO: 45040 - RNA, 19 nt, Artificial Sequence
  Description of Artificial Sequence: Synthetic oligonucleotide
auacacggggcuagaggcc

SEQ ID NO: 45041 - RNA, 19 nt, Artificial Sequence
  Description of Artificial Sequence: Synthetic oligonucleotide
uccaaucauuuuacucaga

SEQ ID NO: 45042 - RNA, 19 nt, Artificial Sequence
  Description of Artificial Sequence: Synthetic oligonucleotide
cugaaaugaagguuaccaa

SEQ ID NO: 45043 - RNA, 19 nt, Artificial Sequence
  Description of Artificial Sequence: Synthetic oligonucleotide
acaauucuaauuaguggaa

SEQ ID NO: 45044 - RNA, 19 nt, Artificial Sequence
  Description of Artificial Sequence: Synthetic oligonucleotide
ccagcgaauggguacacag

SEQ ID NO: 45045 - RNA, 19 nt, Artificial Sequence
  Description of Artificial Sequence: Synthetic oligonucleotide
auuacacguucauuuggua

SEQ ID NO: 45046 - RNA, 19 nt, Artificial Sequence
  Description of Artificial Sequence: Synthetic oligonucleotide
cagcagaccgcuucuugag

SEQ ID NO: 45047 - RNA, 19 nt, Artificial Sequence
  Description of Artificial Sequence: Synthetic oligonucleotide
ugugugcgaacaccaccca

SEQ ID NO: 45048 - RNA, 19 nt, Artificial Sequence
  Description of Artificial Sequence: Synthetic oligonucleotide
ugccgaauucucguguuac

SEQ ID NO: 45049 - RNA, 19 nt, Artificial Sequence
  Description of Artificial Sequence: Synthetic oligonucleotide
gaacaucgaucucauggaa

SEQ ID NO: 45050 - RNA, 19 nt, Artificial Sequence
  Description of Artificial Sequence: Synthetic oligonucleotide
auacaauauaagggcugag

SEQ ID NO: 45051 - RNA, 19 nt, Artificial Sequence
  Description of Artificial Sequence: Synthetic oligonucleotide
aucguguggccacaagcgu

SEQ ID NO: 45052 - RNA, 19 nt, Artificial Sequence
  Description of Artificial Sequence: Synthetic oligonucleotide
ugucucauccguguaccgu

SEQ ID NO: 45053 - RNA, 19 nt, Artificial Sequence
  Description of Artificial Sequence: Synthetic oligonucleotide
auaauccgguuugugaaau

SEQ ID NO: 45054 - RNA, 19 nt, Artificial Sequence
  Description of Artificial Sequence: Synthetic oligonucleotide
uauuaacucgggacuucua

SEQ ID NO: 45055 - RNA, 19 nt, Artificial Sequence
  Description of Artificial Sequence: Synthetic oligonucleotide
gaguauaacuaaacucuaa

SEQ ID NO: 45056 - RNA, 19 nt, Artificial Sequence
  Description of Artificial Sequence: Synthetic oligonucleotide
ccaacgaacacugacucug

SEQ ID NO: 45057 - RNA, 19 nt, Artificial Sequence
  Description of Artificial Sequence: Synthetic oligonucleotide
guaaaggcggcagcagacc

SEQ ID NO: 45058 - RNA, 19 nt, Artificial Sequence
  Description of Artificial Sequence: Synthetic oligonucleotide
cugcacgaguucacgacug

SEQ ID NO: 45059 - RNA, 19 nt, Artificial Sequence
  Description of Artificial Sequence: Synthetic oligonucleotide
ucccgguaagcugucagcu

SEQ ID NO: 45060 - RNA, 19 nt, Artificial Sequence
  Description of Artificial Sequence: Synthetic oligonucleotide
cagguaaguaugcugcaga

SEQ ID NO: 45061 - RNA, 19 nt, Artificial Sequence
  Description of Artificial Sequence: Synthetic oligonucleotide
aguuugagccaagaaggaa

SEQ ID NO: 45062 - RNA, 19 nt, Artificial Sequence
  Description of Artificial Sequence: Synthetic oligonucleotide
cuguaaggugcaaagcgaa

SEQ ID NO: 45063 - RNA, 19 nt, Artificial Sequence
  Description of Artificial Sequence: Synthetic oligonucleotide
agaacaccuuucucugagu

SEQ ID NO: 45064 - RNA, 19 nt, Artificial Sequence
  Description of Artificial Sequence: Synthetic oligonucleotide
gauuuucgguguccaauua

SEQ ID NO: 45065 - RNA, 19 nt, Artificial Sequence
  Description of Artificial Sequence: Synthetic oligonucleotide
uggggauugaagggaguga

SEQ ID NO: 45066 - RNA, 19 nt, Artificial Sequence
  Description of Artificial Sequence: Synthetic oligonucleotide
cacugguuauagugugggc

SEQ ID NO: 45067 - RNA, 19 nt, Artificial Sequence
  Description of Artificial Sequence: Synthetic oligonucleotide
ucguguuacacagguuuuc

SEQ ID NO: 45068 - RNA, 19 nt, Artificial Sequence
  Description of Artificial Sequence: Synthetic oligonucleotide
ugcacgaguucacgacugu

SEQ ID NO: 45069 - RNA, 19 nt, Artificial Sequence
  Description of Artificial Sequence: Synthetic oligonucleotide
ggaccuguuuaauaaucca

SEQ ID NO: 45070 - RNA, 19 nt, Artificial Sequence
  Description of Artificial Sequence: Synthetic oligonucleotide
ucgggacuucuaacagugc

SEQ ID NO: 45071 - RNA, 19 nt, Artificial Sequence
  Description of Artificial Sequence: Synthetic oligonucleotide
gaauuuggccgaggcauga

SEQ ID NO: 45072 - RNA, 19 nt, Artificial Sequence
  Description of Artificial Sequence: Synthetic oligonucleotide
cuaagaagggcgccuggga

SEQ ID NO: 45073 - RNA, 19 nt, Artificial Sequence
  Description of Artificial Sequence: Synthetic oligonucleotide
agcgguagaguacggugaa

SEQ ID NO: 45074 - RNA, 19 nt, Artificial Sequence
  Description of Artificial Sequence: Synthetic oligonucleotide
ggagugauuugaguccuag

SEQ ID NO: 45075 - RNA, 19 nt, Artificial Sequence
  Description of Artificial Sequence: Synthetic oligonucleotide
cagcaaacuuggauaucug

SEQ ID NO: 45076 - RNA, 19 nt, Artificial Sequence
  Description of Artificial Sequence: Synthetic oligonucleotide
gguaaguaugcugcagagc

SEQ ID NO: 45077 - RNA, 19 nt, Artificial Sequence
  Description of Artificial Sequence: Synthetic oligonucleotide
agggagugauuugaguccu

SEQ ID NO: 45078 - RNA, 19 nt, Artificial Sequence
  Description of Artificial Sequence: Synthetic oligonucleotide
gaacucugaagcugaacau

SEQ ID NO: 45079 - RNA, 19 nt, Artificial Sequence
  Description of Artificial Sequence: Synthetic oligonucleotide
agcagaccgcuucuugaga

SEQ ID NO: 45080 - RNA, 19 nt, Artificial Sequence
  Description of Artificial Sequence: Synthetic oligonucleotide
cuuaccccuaagcccuuug

SEQ ID NO: 45081 - RNA, 19 nt, Artificial Sequence
  Description of Artificial Sequence: Synthetic oligonucleotide
gguagaguacggugaagca

SEQ ID NO: 45082 - RNA, 19 nt, Artificial Sequence
  Description of Artificial Sequence: Synthetic oligonucleotide
ccacugaguauaacuaaac

SEQ ID NO: 45083 - RNA, 19 nt, Artificial Sequence
  Description of Artificial Sequence: Synthetic oligonucleotide
caucgaguuucagcuaaac

SEQ ID NO: 45084 - RNA, 19 nt, Artificial Sequence
  Description of Artificial Sequence: Synthetic oligonucleotide
ggagauaucuggaggucug

SEQ ID NO: 45085 - RNA, 19 nt, Artificial Sequence
  Description of Artificial Sequence: Synthetic oligonucleotide
ugaaugacguggguaucua

SEQ ID NO: 45086 - RNA, 19 nt, Artificial Sequence
  Description of Artificial Sequence: Synthetic oligonucleotide
gagucuucgcauggccucc

SEQ ID NO: 45087 - RNA, 19 nt, Artificial Sequence
  Description of Artificial Sequence: Synthetic oligonucleotide
agaguacggugaagcacac

SEQ ID NO: 45088 - RNA, 19 nt, Artificial Sequence
  Description of Artificial Sequence: Synthetic oligonucleotide
cacugaguauaacuaaacu

SEQ ID NO: 45089 - RNA, 19 nt, Artificial Sequence
  Description of Artificial Sequence: Synthetic oligonucleotide
gcucugacugcagccaucg

SEQ ID NO: 45090 - RNA, 19 nt, Artificial Sequence
  Description of Artificial Sequence: Synthetic oligonucleotide
guccuaacaguuacaauua

SEQ ID NO: 45091 - RNA, 19 nt, Artificial Sequence
  Description of Artificial Sequence: Synthetic oligonucleotide
cuuccuuauacacggggcu

SEQ ID NO: 45092 - RNA, 19 nt, Artificial Sequence
  Description of Artificial Sequence: Synthetic oligonucleotide
cuaaccucccaagcaggug

SEQ ID NO: 45093 - RNA, 19 nt, Artificial Sequence
  Description of Artificial Sequence: Synthetic oligonucleotide
acaccuaagaagggcgccu

SEQ ID NO: 45094 - RNA, 19 nt, Artificial Sequence
  Description of Artificial Sequence: Synthetic oligonucleotide
gaguacggugaagcacacg

SEQ ID NO: 45095 - RNA, 19 nt, Artificial Sequence
  Description of Artificial Sequence: Synthetic oligonucleotide
ggccaacgaacacugacuc

SEQ ID NO: 45096 - RNA, 19 nt, Artificial Sequence
  Description of Artificial Sequence: Synthetic oligonucleotide
agugcacgucugcaaucug

SEQ ID NO: 45097 - RNA, 19 nt, Artificial Sequence
  Description of Artificial Sequence: Synthetic oligonucleotide
cuuccacugguuauagugu

SEQ ID NO: 45098 - RNA, 19 nt, Artificial Sequence
  Description of Artificial Sequence: Synthetic oligonucleotide
gaguuucagcuaaacaccu

SEQ ID NO: 45099 - RNA, 19 nt, Artificial Sequence
  Description of Artificial Sequence: Synthetic oligonucleotide
auacccaaucucggccaac

SEQ ID NO: 45100 - RNA, 19 nt, Artificial Sequence
  Description of Artificial Sequence: Synthetic oligonucleotide
ccacaagcgucucagggug

SEQ ID NO: 45101 - RNA, 19 nt, Artificial Sequence
  Description of Artificial Sequence: Synthetic oligonucleotide
agccccguugugcuugugu

SEQ ID NO: 45102 - RNA, 19 nt, Artificial Sequence
  Description of Artificial Sequence: Synthetic oligonucleotide
caauuaguuugagccaaga

SEQ ID NO: 45103 - RNA, 19 nt, Artificial Sequence
  Description of Artificial Sequence: Synthetic oligonucleotide
ugccauuaagugagauguu

SEQ ID NO: 45104 - RNA, 19 nt, Artificial Sequence
  Description of Artificial Sequence: Synthetic oligonucleotide
auccgguuugugaaauucu

SEQ ID NO: 45105 - RNA, 19 nt, Artificial Sequence
  Description of Artificial Sequence: Synthetic oligonucleotide
uaauccgguuugugaaauu

SEQ ID NO: 45106 - RNA, 19 nt, Artificial Sequence
  Description of Artificial Sequence: Synthetic oligonucleotide
uguccccacugcacgaguu

SEQ ID NO: 45107 - RNA, 19 nt, Artificial Sequence
  Description of Artificial Sequence: Synthetic oligonucleotide
gcucuauuaacucgggacu

SEQ ID NO: 45108 - RNA, 19 nt, Artificial Sequence
  Description of Artificial Sequence: Synthetic oligonucleotide
auauuaggauagagaacaa

SEQ ID NO: 45109 - RNA, 19 nt, Artificial Sequence
  Description of Artificial Sequence: Synthetic oligonucleotide
ggucuaucugauacuagga

SEQ ID NO: 45110 - RNA, 19 nt, Artificial Sequence
  Description of Artificial Sequence: Synthetic oligonucleotide
aagcgaacucuuagauccu

SEQ ID NO: 45111 - RNA, 19 nt, Artificial Sequence
  Description of Artificial Sequence: Synthetic oligonucleotide
cacgacugugugguguuug

SEQ ID NO: 45112 - RNA, 19 nt, Artificial Sequence
  Description of Artificial Sequence: Synthetic oligonucleotide
cacgaguucacgacugugu

SEQ ID NO: 45113 - RNA, 19 nt, Artificial Sequence
  Description of Artificial Sequence: Synthetic oligonucleotide
guacggugaagcacacgug

SEQ ID NO: 45114 - RNA, 19 nt, Artificial Sequence
  Description of Artificial Sequence: Synthetic oligonucleotide
cagcaucgcuaguucuccc

SEQ ID NO: 45115 - RNA, 19 nt, Artificial Sequence
  Description of Artificial Sequence: Synthetic oligonucleotide
augacgcgucuuugcaggu

SEQ ID NO: 45116 - RNA, 19 nt, Artificial Sequence
  Description of Artificial Sequence: Synthetic oligonucleotide
uccguguaccguggcagcu

SEQ ID NO: 45117 - RNA, 19 nt, Artificial Sequence
  Description of Artificial Sequence: Synthetic oligonucleotide
gaggacgcucuguauacau

SEQ ID NO: 45118 - RNA, 19 nt, Artificial Sequence
  Description of Artificial Sequence: Synthetic oligonucleotide
ggcauucgaagagaaguuc

SEQ ID NO: 45119 - RNA, 19 nt, Artificial Sequence
  Description of Artificial Sequence: Synthetic oligonucleotide
guuuccaugacgcgucuuu

SEQ ID NO: 45120 - RNA, 19 nt, Artificial Sequence
  Description of Artificial Sequence: Synthetic oligonucleotide
ggaacgaggggcugugcuc

SEQ ID NO: 45121 - RNA, 19 nt, Artificial Sequence
  Description of Artificial Sequence: Synthetic oligonucleotide
aggacgcucuguauacaug

SEQ ID NO: 45122 - RNA, 19 nt, Artificial Sequence
  Description of Artificial Sequence: Synthetic oligonucleotide
guaaccagguaaguaugcu

SEQ ID NO: 45123 - RNA, 19 nt, Artificial Sequence
  Description of Artificial Sequence: Synthetic oligonucleotide
ccgaauucucguguuacac

SEQ ID NO: 45124 - RNA, 19 nt, Artificial Sequence
  Description of Artificial Sequence: Synthetic oligonucleotide
gccaucgaguuucagcuaa

SEQ ID NO: 45125 - RNA, 19 nt, Artificial Sequence
  Description of Artificial Sequence: Synthetic oligonucleotide
acccaaucucggccaacga

SEQ ID NO: 45126 - RNA, 19 nt, Artificial Sequence
  Description of Artificial Sequence: Synthetic oligonucleotide
ccaugacgcgucuuugcag

SEQ ID NO: 45127 - RNA, 19 nt, Artificial Sequence
  Description of Artificial Sequence: Synthetic oligonucleotide
acugguccuaacaguuaca

SEQ ID NO: 45128 - RNA, 19 nt, Artificial Sequence
  Description of Artificial Sequence: Synthetic oligonucleotide
ggauugaagggagugauuu

SEQ ID NO: 45129 - RNA, 19 nt, Artificial Sequence
  Description of Artificial Sequence: Synthetic oligonucleotide
caccuaagaagggcgccug

SEQ ID NO: 45130 - RNA, 19 nt, Artificial Sequence
  Description of Artificial Sequence: Synthetic oligonucleotide
cgguagaguacggugaagc

SEQ ID NO: 45131 - RNA, 19 nt, Artificial Sequence
  Description of Artificial Sequence: Synthetic oligonucleotide
gugaaugacguggguaucu

SEQ ID NO: 45132 - RNA, 19 nt, Artificial Sequence
  Description of Artificial Sequence: Synthetic oligonucleotide
augccgaauucucguguua

SEQ ID NO: 45133 - RNA, 19 nt, Artificial Sequence
  Description of Artificial Sequence: Synthetic oligonucleotide
guacagcgaaggaaauguc

SEQ ID NO: 45134 - RNA, 19 nt, Artificial Sequence
  Description of Artificial Sequence: Synthetic oligonucleotide
guucacgacuguguggugu

SEQ ID NO: 45135 - RNA, 19 nt, Artificial Sequence
  Description of Artificial Sequence: Synthetic oligonucleotide
gccauuaagugagauguua

SEQ ID NO: 45136 - RNA, 19 nt, Artificial Sequence
  Description of Artificial Sequence: Synthetic oligonucleotide
gcaaucugucucauccgug

SEQ ID NO: 45137 - RNA, 19 nt, Artificial Sequence
  Description of Artificial Sequence: Synthetic oligonucleotide
aguuucagcuaaacaccua

SEQ ID NO: 45138 - RNA, 19 nt, Artificial Sequence
  Description of Artificial Sequence: Synthetic oligonucleotide
guacaugucuguacuaauu

SEQ ID NO: 45139 - RNA, 19 nt, Artificial Sequence
  Description of Artificial Sequence: Synthetic oligonucleotide
acgcgucuuugcagguagc

SEQ ID NO: 45140 - RNA, 19 nt, Artificial Sequence
  Description of Artificial Sequence: Synthetic oligonucleotide
ggacaacaaccugggauac

SEQ ID NO: 45141 - RNA, 19 nt, Artificial Sequence
  Description of Artificial Sequence: Synthetic oligonucleotide
gacuccccuccggaaggag

SEQ ID NO: 45142 - RNA, 19 nt, Artificial Sequence
  Description of Artificial Sequence: Synthetic oligonucleotide
gugugaccauuuauaaaua

SEQ ID NO: 45143 - RNA, 19 nt, Artificial Sequence
  Description of Artificial Sequence: Synthetic oligonucleotide
ccgcuucuugagaacuggg

SEQ ID NO: 45144 - RNA, 19 nt, Artificial Sequence
  Description of Artificial Sequence: Synthetic oligonucleotide
aacgaggggcugugcucua

SEQ ID NO: 45145 - RNA, 19 nt, Artificial Sequence
  Description of Artificial Sequence: Synthetic oligonucleotide
agccaucgaguuucagcua

SEQ ID NO: 45146 - RNA, 19 nt, Artificial Sequence
  Description of Artificial Sequence: Synthetic oligonucleotide
guguaggaucacagucagc

SEQ ID NO: 45147 - RNA, 19 nt, Artificial Sequence
  Description of Artificial Sequence: Synthetic oligonucleotide
acguggguaucuagagcca

SEQ ID NO: 45148 - RNA, 19 nt, Artificial Sequence
  Description of Artificial Sequence: Synthetic oligonucleotide
cgagucuucgcauggccuc

SEQ ID NO: 45149 - RNA, 19 nt, Artificial Sequence
  Description of Artificial Sequence: Synthetic oligonucleotide
ccccguugugcuugugucc

SEQ ID NO: 45150 - RNA, 19 nt, Artificial Sequence
  Description of Artificial Sequence: Synthetic oligonucleotide
accuagcgguagaguacgg

SEQ ID NO: 45151 - RNA, 19 nt, Artificial Sequence
  Description of Artificial Sequence: Synthetic oligonucleotide
gccccguugugcuuguguc

SEQ ID NO: 45152 - RNA, 19 nt, Artificial Sequence
  Description of Artificial Sequence: Synthetic oligonucleotide
gccgaauucucguguuaca

SEQ ID NO: 45153 - RNA, 19 nt, Artificial Sequence
  Description of Artificial Sequence: Synthetic oligonucleotide
cacggggcuagaggccucc

SEQ ID NO: 45154 - RNA, 19 nt, Artificial Sequence
  Description of Artificial Sequence: Synthetic oligonucleotide
ccgaaccccaauguucccc

SEQ ID NO: 45155 - RNA, 19 nt, Artificial Sequence
  Description of Artificial Sequence: Synthetic oligonucleotide
cagcgaauggguacacagu

SEQ ID NO: 45156 - RNA, 19 nt, Artificial Sequence
  Description of Artificial Sequence: Synthetic oligonucleotide
aguaugcugcagagccaca

SEQ ID NO: 45157 - RNA, 19 nt, Artificial Sequence
  Description of Artificial Sequence: Synthetic oligonucleotide
agucuucgcauggccuccu

SEQ ID NO: 45158 - RNA, 19 nt, Artificial Sequence
  Description of Artificial Sequence: Synthetic oligonucleotide
gcccaacucagcaggaauc

SEQ ID NO: 45159 - RNA, 19 nt, Artificial Sequence
  Description of Artificial Sequence: Synthetic oligonucleotide
caguuuugccgaaccccaa

SEQ ID NO: 45160 - RNA, 19 nt, Artificial Sequence
  Description of Artificial Sequence: Synthetic oligonucleotide
gcacgaguucacgacugug

SEQ ID NO: 45161 - RNA, 19 nt, Artificial Sequence
  Description of Artificial Sequence: Synthetic oligonucleotide
gacaacaaccugggauacu

SEQ ID NO: 45162 - RNA, 19 nt, Artificial Sequence
  Description of Artificial Sequence: Synthetic oligonucleotide
uccccuccggaaggaggcc

SEQ ID NO: 45163 - RNA, 19 nt, Artificial Sequence
  Description of Artificial Sequence: Synthetic oligonucleotide
cugcgcauuuccggaguuc

SEQ ID NO: 45164 - RNA, 19 nt, Artificial Sequence
  Description of Artificial Sequence: Synthetic oligonucleotide
gucugcgcauuuccggagu

SEQ ID NO: 45165 - RNA, 19 nt, Artificial Sequence
  Description of Artificial Sequence: Synthetic oligonucleotide
cgggacuucuaacagugca

SEQ ID NO: 45166 - RNA, 19 nt, Artificial Sequence
  Description of Artificial Sequence: Synthetic oligonucleotide
cuccaagugugaccauuua

SEQ ID NO: 45167 - RNA, 19 nt, Artificial Sequence
  Description of Artificial Sequence: Synthetic oligonucleotide
cccgguaagcugucagcug

SEQ ID NO: 45168 - RNA, 19 nt, Artificial Sequence
  Description of Artificial Sequence: Synthetic oligonucleotide
caugccgaauucucguguu

SEQ ID NO: 45169 - RNA, 19 nt, Artificial Sequence
  Description of Artificial Sequence: Synthetic oligonucleotide
ggugcaaagcgaacucuua

SEQ ID NO: 45170 - RNA, 19 nt, Artificial Sequence
  Description of Artificial Sequence: Synthetic oligonucleotide
ggggcuagaggccuccgcu

SEQ ID NO: 45171 - RNA, 19 nt, Artificial Sequence
  Description of Artificial Sequence: Synthetic oligonucleotide
caacaaccugggauacugu

SEQ ID NO: 45172 - RNA, 19 nt, Artificial Sequence
  Description of Artificial Sequence: Synthetic oligonucleotide
ggggaaucauaaaguacua

SEQ ID NO: 45173 - RNA, 19 nt, Artificial Sequence
  Description of Artificial Sequence: Synthetic oligonucleotide
ggaguaggucuaucugaua

SEQ ID NO: 45174 - RNA, 19 nt, Artificial Sequence
  Description of Artificial Sequence: Synthetic oligonucleotide
ggggauugaagggagugau

SEQ ID NO: 45175 - RNA, 19 nt, Artificial Sequence
  Description of Artificial Sequence: Synthetic oligonucleotide
acggggcuagaggccuccg

SEQ ID NO: 45176 - RNA, 19 nt, Artificial Sequence
  Description of Artificial Sequence: Synthetic oligonucleotide
gggcucaaccuaaccuccc

SEQ ID NO: 45177 - RNA, 19 nt, Artificial Sequence
  Description of Artificial Sequence: Synthetic oligonucleotide
gugugcgaacaccacccau

SEQ ID NO: 45178 - RNA, 19 nt, Artificial Sequence
  Description of Artificial Sequence: Synthetic oligonucleotide
gccgaaccccaauguuccc

SEQ ID NO: 45179 - RNA, 19 nt, Artificial Sequence
  Description of Artificial Sequence: Synthetic oligonucleotide
guguaccguggcagcugag

SEQ ID NO: 45180 - RNA, 19 nt, Artificial Sequence
  Description of Artificial Sequence: Synthetic oligonucleotide
gggaaucauaaaguacuau

SEQ ID NO: 45181 - RNA, 19 nt, Artificial Sequence
  Description of Artificial Sequence: Synthetic oligonucleotide
cugagaggcauuggacacu

SEQ ID NO: 45182 - RNA, 19 nt, Artificial Sequence
  Description of Artificial Sequence: Synthetic oligonucleotide
cccguugugcuugugucca

SEQ ID NO: 45183 - RNA, 19 nt, Artificial Sequence
  Description of Artificial Sequence: Synthetic oligonucleotide
gcgguagaguacggugaag

SEQ ID NO: 45184 - RNA, 19 nt, Artificial Sequence
  Description of Artificial Sequence: Synthetic oligonucleotide
gcgaauggguacacaguaa

SEQ ID NO: 45185 - RNA, 19 nt, Artificial Sequence
  Description of Artificial Sequence: Synthetic oligonucleotide
cucggccaacgaacacuga

SEQ ID NO: 45186 - RNA, 19 nt, Artificial Sequence
  Description of Artificial Sequence: Synthetic oligonucleotide
ggagccuguuccauugagu

SEQ ID NO: 45187 - RNA, 19 nt, Artificial Sequence
  Description of Artificial Sequence: Synthetic oligonucleotide
gccaacgaacacugacucu

SEQ ID NO: 45188 - RNA, 19 nt, Artificial Sequence
  Description of Artificial Sequence: Synthetic oligonucleotide
guauccccauaauccgguu

SEQ ID NO: 45189 - RNA, 19 nt, Artificial Sequence
  Description of Artificial Sequence: Synthetic oligonucleotide
acccuugacugagggucuu

SEQ ID NO: 45190 - RNA, 19 nt, Artificial Sequence
  Description of Artificial Sequence: Synthetic oligonucleotide
ggaguaugccucugcucau

SEQ ID NO: 45191 - RNA, 19 nt, Artificial Sequence
  Description of Artificial Sequence: Synthetic oligonucleotide
guguccccacugcacgagu

SEQ ID NO: 45192 - RNA, 19 nt, Artificial Sequence
  Description of Artificial Sequence: Synthetic oligonucleotide
agccaucguguggccacaa

SEQ ID NO: 45193 - RNA, 19 nt, Artificial Sequence
  Description of Artificial Sequence: Synthetic oligonucleotide
ccguguaccguggcagcug

SEQ ID NO: 45194 - RNA, 19 nt, Artificial Sequence
  Description of Artificial Sequence: Synthetic oligonucleotide
ccaugccgaauucucgugu

SEQ ID NO: 45195 - RNA, 19 nt, Artificial Sequence
  Description of Artificial Sequence: Synthetic oligonucleotide
ccuuauacacggggcuaga

SEQ ID NO: 45196 - RNA, 19 nt, Artificial Sequence
  Description of Artificial Sequence: Synthetic oligonucleotide
ccaucgaguuucagcuaaa

SEQ ID NO: 45197 - RNA, 19 nt, Artificial Sequence
  Description of Artificial Sequence: Synthetic oligonucleotide
gcgagucuucgcauggccu

SEQ ID NO: 45198 - RNA, 19 nt, Artificial Sequence
  Description of Artificial Sequence: Synthetic oligonucleotide
ggguaucuagagccagcau

SEQ ID NO: 45199 - RNA, 19 nt, Artificial Sequence
  Description of Artificial Sequence: Synthetic oligonucleotide
ccucuugucgucugcgcau

SEQ ID NO: 45200 - RNA, 19 nt, Artificial Sequence
  Description of Artificial Sequence: Synthetic oligonucleotide
cggccaacgaacacugacu

SEQ ID NO: 45201 - RNA, 19 nt, Artificial Sequence
  Description of Artificial Sequence: Synthetic oligonucleotide
ccuagcgguagaguacggu

SEQ ID NO: 45202 - RNA, 19 nt, Artificial Sequence
  Description of Artificial Sequence: Synthetic oligonucleotide
gggauugaagggagugauu

SEQ ID NO: 45203 - RNA, 19 nt, Artificial Sequence
  Description of Artificial Sequence: Synthetic oligonucleotide
cagaggcaaucugucucau

SEQ ID NO: 45204 - RNA, 19 nt, Artificial Sequence
  Description of Artificial Sequence: Synthetic oligonucleotide
ccuggggauugaagggagu

SEQ ID NO: 45205 - RNA, 19 nt, Artificial Sequence
  Description of Artificial Sequence: Synthetic oligonucleotide
gggagugauuugaguccua

SEQ ID NO: 45206 - RNA, 19 nt, Artificial Sequence
  Description of Artificial Sequence: Synthetic oligonucleotide
ccgaggcaugagauacaaa

SEQ ID NO: 45207 - RNA, 19 nt, Artificial Sequence
  Description of Artificial Sequence: Synthetic oligonucleotide
gcccuugaguggucuguau

SEQ ID NO: 45208 - RNA, 19 nt, Artificial Sequence
  Description of Artificial Sequence: Synthetic oligonucleotide
cagccccguugugcuugug

SEQ ID NO: 45209 - RNA, 19 nt, Artificial Sequence
  Description of Artificial Sequence: Synthetic oligonucleotide
cccagcgaauggguacaca

SEQ ID NO: 45210 - RNA, 19 nt, Artificial Sequence
  Description of Artificial Sequence: Synthetic oligonucleotide
ggccccuagccagccaccu

SEQ ID NO: 45211 - RNA, 19 nt, Artificial Sequence
  Description of Artificial Sequence: Synthetic oligonucleotide
cagcaacauuguggacaaa

SEQ ID NO: 45212 - RNA, 19 nt, Artificial Sequence
  Description of Artificial Sequence: Synthetic oligonucleotide
ccucaaagagaaggggcuu

SEQ ID NO: 45213 - RNA, 19 nt, Artificial Sequence
  Description of Artificial Sequence: Synthetic oligonucleotide
ccccuccggaaggaggcca

SEQ ID NO: 45214 - RNA, 19 nt, Artificial Sequence
  Description of Artificial Sequence: Synthetic oligonucleotide
gcgcauuuccggaguuccu

SEQ ID NO: 45215 - RNA, 19 nt, Artificial Sequence
  Description of Artificial Sequence: Synthetic oligonucleotide
gccccuagccagccaccuu

SEQ ID NO: 45216 - RNA, 19 nt, Artificial Sequence
  Description of Artificial Sequence: Synthetic oligonucleotide
ccagccccguugugcuugu

SEQ ID NO: 45217 - RNA, 19 nt, Artificial Sequence
  Description of Artificial Sequence: Synthetic oligonucleotide
ccgcugggugugggguguc

SEQ ID NO: 45218 - RNA, 19 nt, Artificial Sequence
  Description of Artificial Sequence: Synthetic oligonucleotide
aaagauuccauaucgaagc

SEQ ID NO: 45219 - RNA, 19 nt, Artificial Sequence
  Description of Artificial Sequence: Synthetic oligonucleotide
aacuacacaacuuagucgg

SEQ ID NO: 45220 - RNA, 19 nt, Artificial Sequence
  Description of Artificial Sequence: Synthetic oligonucleotide
aaagguuagaucuccuugc

SEQ ID NO: 45221 - RNA, 19 nt, Artificial Sequence
  Description of Artificial Sequence: Synthetic oligonucleotide
aaauguuacaggcagcuuc

SEQ ID NO: 45222 - RNA, 19 nt, Artificial Sequence
  Description of Artificial Sequence: Synthetic oligonucleotide
aucguuaccaccuuggugg

SEQ ID NO: 45223 - RNA, 19 nt, Artificial Sequence
  Description of Artificial Sequence: Synthetic oligonucleotide
uuucauauuaaucuguaga

SEQ ID NO: 45224 - RNA, 19 nt, Artificial Sequence
  Description of Artificial Sequence: Synthetic oligonucleotide
aaauuaauugcagggagac

SEQ ID NO: 45225 - RNA, 19 nt, Artificial Sequence
  Description of Artificial Sequence: Synthetic oligonucleotide
agacauugcggucacaugc

SEQ ID NO: 45226 - RNA, 19 nt, Artificial Sequence
  Description of Artificial Sequence: Synthetic oligonucleotide
uuuaauuggucauugagua

SEQ ID NO: 45227 - RNA, 19 nt, Artificial Sequence
  Description of Artificial Sequence: Synthetic oligonucleotide
uaaucguacaucccgauca

SEQ ID NO: 45228 - RNA, 19 nt, Artificial Sequence
  Description of Artificial Sequence: Synthetic oligonucleotide
uacgguaugaaaauacgcc

SEQ ID NO: 45229 - RNA, 19 nt, Artificial Sequence
  Description of Artificial Sequence: Synthetic oligonucleotide
aaucagauccccuugcuga

SEQ ID NO: 45230 - RNA, 19 nt, Artificial Sequence
  Description of Artificial Sequence: Synthetic oligonucleotide
uguauuuucauucgugacu

SEQ ID NO: 45231 - RNA, 19 nt, Artificial Sequence
  Description of Artificial Sequence: Synthetic oligonucleotide
ucuaauaucuugaaguuuu

SEQ ID NO: 45232 - RNA, 19 nt, Artificial Sequence
  Description of Artificial Sequence: Synthetic oligonucleotide
uucgaaagggguuacaaug

SEQ ID NO: 45233 - RNA, 19 nt, Artificial Sequence
  Description of Artificial Sequence: Synthetic oligonucleotide
aaagggguuacaaugcucg

SEQ ID NO: 45234 - RNA, 19 nt, Artificial Sequence
  Description of Artificial Sequence: Synthetic oligonucleotide
acgugugacagucauaaac

SEQ ID NO: 45235 - RNA, 19 nt, Artificial Sequence
  Description of Artificial Sequence: Synthetic oligonucleotide
aagauuccauaucgaagcc

SEQ ID NO: 45236 - RNA, 19 nt, Artificial Sequence
  Description of Artificial Sequence: Synthetic oligonucleotide
uucauauuaaucuguagaa

SEQ ID NO: 45237 - RNA, 19 nt, Artificial Sequence
  Description of Artificial Sequence: Synthetic oligonucleotide
agacgaagagcuuaugacg

SEQ ID NO: 45238 - RNA, 19 nt, Artificial Sequence
  Description of Artificial Sequence: Synthetic oligonucleotide
ucugagaccaaacggaaac

SEQ ID NO: 45239 - RNA, 19 nt, Artificial Sequence
  Description of Artificial Sequence: Synthetic oligonucleotide
aaagcauuguacacggugg

SEQ ID NO: 45240 - RNA, 19 nt, Artificial Sequence
  Description of Artificial Sequence: Synthetic oligonucleotide
uucgguagggccaguaucg

SEQ ID NO: 45241 - RNA, 19 nt, Artificial Sequence
  Description of Artificial Sequence: Synthetic oligonucleotide
uuuaauucuccgccaagcc

SEQ ID NO: 45242 - RNA, 19 nt, Artificial Sequence
  Description of Artificial Sequence: Synthetic oligonucleotide
gucaauuaggugcauagcc

SEQ ID NO: 45243 - RNA, 19 nt, Artificial Sequence
  Description of Artificial Sequence: Synthetic oligonucleotide
uucccuuuaauucuccgcc

SEQ ID NO: 45244 - RNA, 19 nt, Artificial Sequence
  Description of Artificial Sequence: Synthetic oligonucleotide
uuugagaguaagaagugaa

SEQ ID NO: 45245 - RNA, 19 nt, Artificial Sequence
  Description of Artificial Sequence: Synthetic oligonucleotide
acuacuguugaucguuacc

SEQ ID NO: 45246 - RNA, 19 nt, Artificial Sequence
  Description of Artificial Sequence: Synthetic oligonucleotide
aacuuagucgguaacacug

SEQ ID NO: 45247 - RNA, 19 nt, Artificial Sequence
  Description of Artificial Sequence: Synthetic oligonucleotide
agggcagucagucugagug

SEQ ID NO: 45248 - RNA, 19 nt, Artificial Sequence
  Description of Artificial Sequence: Synthetic oligonucleotide
acccuugugaccuugaacu

SEQ ID NO: 45249 - RNA, 19 nt, Artificial Sequence
  Description of Artificial Sequence: Synthetic oligonucleotide
ugcagacuuagguagcucg

SEQ ID NO: 45250 - RNA, 19 nt, Artificial Sequence
  Description of Artificial Sequence: Synthetic oligonucleotide
cauggcaacgucaauuagg

SEQ ID NO: 45251 - RNA, 19 nt, Artificial Sequence
  Description of Artificial Sequence: Synthetic oligonucleotide
ugcgccuaagguaaaauga

SEQ ID NO: 45252 - RNA, 19 nt, Artificial Sequence
  Description of Artificial Sequence: Synthetic oligonucleotide
uucacguaagacuugggga

SEQ ID NO: 45253 - RNA, 19 nt, Artificial Sequence
  Description of Artificial Sequence: Synthetic oligonucleotide
ugagagauuccaacuaaug

SEQ ID NO: 45254 - RNA, 19 nt, Artificial Sequence
  Description of Artificial Sequence: Synthetic oligonucleotide
gaagcaauaaccugggcaa

SEQ ID NO: 45255 - RNA, 19 nt, Artificial Sequence
  Description of Artificial Sequence: Synthetic oligonucleotide
uguaaaggcagaccucugc

SEQ ID NO: 45256 - RNA, 19 nt, Artificial Sequence
  Description of Artificial Sequence: Synthetic oligonucleotide
acuuagguagcucgguugg

SEQ ID NO: 45257 - RNA, 19 nt, Artificial Sequence
  Description of Artificial Sequence: Synthetic oligonucleotide
aagcggguacaccugacuc

SEQ ID NO: 45258 - RNA, 19 nt, Artificial Sequence
  Description of Artificial Sequence: Synthetic oligonucleotide
ucgaaagggguuacaaugc

SEQ ID NO: 45259 - RNA, 19 nt, Artificial Sequence
  Description of Artificial Sequence: Synthetic oligonucleotide
gauagugggucucuuugag

SEQ ID NO: 45260 - RNA, 19 nt, Artificial Sequence
  Description of Artificial Sequence: Synthetic oligonucleotide
ugucagaucggucacuggu

SEQ ID NO: 45261 - RNA, 19 nt, Artificial Sequence
  Description of Artificial Sequence: Synthetic oligonucleotide
gagagauuccaacuaauga

SEQ ID NO: 45262 - RNA, 19 nt, Artificial Sequence
  Description of Artificial Sequence: Synthetic oligonucleotide
acaacuuagucgguaacac

SEQ ID NO: 45263 - RNA, 19 nt, Artificial Sequence
  Description of Artificial Sequence: Synthetic oligonucleotide
cagagacuacuguugaucg

SEQ ID NO: 45264 - RNA, 19 nt, Artificial Sequence
  Description of Artificial Sequence: Synthetic oligonucleotide
cuuaugacggacaucccac

SEQ ID NO: 45265 - RNA, 19 nt, Artificial Sequence
  Description of Artificial Sequence: Synthetic oligonucleotide
ucucuuuaggcuagcagga

SEQ ID NO: 45266 - RNA, 19 nt, Artificial Sequence
  Description of Artificial Sequence: Synthetic oligonucleotide
acgucaauuaggugcauag

SEQ ID NO: 45267 - RNA, 19 nt, Artificial Sequence
  Description of Artificial Sequence: Synthetic oligonucleotide
ugauuuacgguaugaaaau

SEQ ID NO: 45268 - RNA, 19 nt, Artificial Sequence
  Description of Artificial Sequence: Synthetic oligonucleotide
ucacaugcgccuaagguaa

SEQ ID NO: 45269 - RNA, 19 nt, Artificial Sequence
  Description of Artificial Sequence: Synthetic oligonucleotide
aaagcaccuguguagggca

SEQ ID NO: 45270 - RNA, 19 nt, Artificial Sequence
  Description of Artificial Sequence: Synthetic oligonucleotide
caaaacaccaaccgacuag

SEQ ID NO: 45271 - RNA, 19 nt, Artificial Sequence
  Description of Artificial Sequence: Synthetic oligonucleotide
aaaacaccaaccgacuaga

SEQ ID NO: 45272 - RNA, 19 nt, Artificial Sequence
  Description of Artificial Sequence: Synthetic oligonucleotide
ucagucgacaucuaauauc

SEQ ID NO: 45273 - RNA, 19 nt, Artificial Sequence
  Description of Artificial Sequence: Synthetic oligonucleotide
ugcucgguaauacaccuac

SEQ ID NO: 45274 - RNA, 19 nt, Artificial Sequence
  Description of Artificial Sequence: Synthetic oligonucleotide
uggggauaggggcagaugu

SEQ ID NO: 45275 - RNA, 19 nt, Artificial Sequence
  Description of Artificial Sequence: Synthetic oligonucleotide
ucacguaagacuuggggaa

SEQ ID NO: 45276 - RNA, 19 nt, Artificial Sequence
  Description of Artificial Sequence: Synthetic oligonucleotide
uaucguuugccacgggaag

SEQ ID NO: 45277 - RNA, 19 nt, Artificial Sequence
  Description of Artificial Sequence: Synthetic oligonucleotide
augacuaaagacaaacaug

SEQ ID NO: 45278 - RNA, 19 nt, Artificial Sequence
  Description of Artificial Sequence: Synthetic oligonucleotide
cuuuaauucuccgccaagc

SEQ ID NO: 45279 - RNA, 19 nt, Artificial Sequence
  Description of Artificial Sequence: Synthetic oligonucleotide
acgguaugaaaauacgcca

SEQ ID NO: 45280 - RNA, 19 nt, Artificial Sequence
  Description of Artificial Sequence: Synthetic oligonucleotide
cagacgaagagcuuaugac

SEQ ID NO: 45281 - RNA, 19 nt, Artificial Sequence
  Description of Artificial Sequence: Synthetic oligonucleotide
agcggguacaccugacucc

SEQ ID NO: 45282 - RNA, 19 nt, Artificial Sequence
  Description of Artificial Sequence: Synthetic oligonucleotide
agaagugaaucucuaugca

SEQ ID NO: 45283 - RNA, 19 nt, Artificial Sequence
  Description of Artificial Sequence: Synthetic oligonucleotide
ucuuuaggcuagcaggacu

SEQ ID NO: 45284 - RNA, 19 nt, Artificial Sequence
  Description of Artificial Sequence: Synthetic oligonucleotide
uuguucgggaccaguagcc

SEQ ID NO: 45285 - RNA, 19 nt, Artificial Sequence
  Description of Artificial Sequence: Synthetic oligonucleotide
cucggguagccucugaucc

SEQ ID NO: 45286 - RNA, 19 nt, Artificial Sequence
  Description of Artificial Sequence: Synthetic oligonucleotide
uuagguagcucgguugggg

SEQ ID NO: 45287 - RNA, 19 nt, Artificial Sequence
  Description of Artificial Sequence: Synthetic oligonucleotide
aggacguugaugaucuggc

SEQ ID NO: 45288 - RNA, 19 nt, Artificial Sequence
  Description of Artificial Sequence: Synthetic oligonucleotide
ugagguaaacugcucugca

SEQ ID NO: 45289 - RNA, 19 nt, Artificial Sequence
  Description of Artificial Sequence: Synthetic oligonucleotide
agguaaacugcucugcagu

SEQ ID NO: 45290 - RNA, 19 nt, Artificial Sequence
  Description of Artificial Sequence: Synthetic oligonucleotide
ucguaaguguacauggcaa

SEQ ID NO: 45291 - RNA, 19 nt, Artificial Sequence
  Description of Artificial Sequence: Synthetic oligonucleotide
gacuuagguagcucgguug

SEQ ID NO: 45292 - RNA, 19 nt, Artificial Sequence
  Description of Artificial Sequence: Synthetic oligonucleotide
auagugggucucuuugagg

SEQ ID NO: 45293 - RNA, 19 nt, Artificial Sequence
  Description of Artificial Sequence: Synthetic oligonucleotide
auugagagauuccaacuaa

SEQ ID NO: 45294 - RNA, 19 nt, Artificial Sequence
  Description of Artificial Sequence: Synthetic oligonucleotide
cagaacggugaugacaucg

SEQ ID NO: 45295 - RNA, 19 nt, Artificial Sequence
  Description of Artificial Sequence: Synthetic oligonucleotide
uccauaucgaagccagcug

SEQ ID NO: 45296 - RNA, 19 nt, Artificial Sequence
  Description of Artificial Sequence: Synthetic oligonucleotide
aagggguuacaaugcucgg

SEQ ID NO: 45297 - RNA, 19 nt, Artificial Sequence
  Description of Artificial Sequence: Synthetic oligonucleotide
ucauauuaaucuguagaaa

SEQ ID NO: 45298 - RNA, 19 nt, Artificial Sequence
  Description of Artificial Sequence: Synthetic oligonucleotide
aaagcggguacaccugacu

SEQ ID NO: 45299 - RNA, 19 nt, Artificial Sequence
  Description of Artificial Sequence: Synthetic oligonucleotide
uuucgguagggccaguauc

SEQ ID NO: 45300 - RNA, 19 nt, Artificial Sequence
  Description of Artificial Sequence: Synthetic oligonucleotide
acacaacuuagucgguaac

SEQ ID NO: 45301 - RNA, 19 nt, Artificial Sequence
  Description of Artificial Sequence: Synthetic oligonucleotide
auugcggucacaugcgccu

SEQ ID NO: 45302 - RNA, 19 nt, Artificial Sequence
  Description of Artificial Sequence: Synthetic oligonucleotide
uuaggcuacagcacaguua

SEQ ID NO: 45303 - RNA, 19 nt, Artificial Sequence
  Description of Artificial Sequence: Synthetic oligonucleotide
gacauugcggucacaugcg

SEQ ID NO: 45304 - RNA, 19 nt, Artificial Sequence
  Description of Artificial Sequence: Synthetic oligonucleotide
guuguucgggaccaguagc

SEQ ID NO: 45305 - RNA, 19 nt, Artificial Sequence
  Description of Artificial Sequence: Synthetic oligonucleotide
uuagucgguaacacuggac

SEQ ID NO: 45306 - RNA, 19 nt, Artificial Sequence
  Description of Artificial Sequence: Synthetic oligonucleotide
acauugcggucacaugcgc

SEQ ID NO: 45307 - RNA, 19 nt, Artificial Sequence
  Description of Artificial Sequence: Synthetic oligonucleotide
uuaacuggccgagcgcugg

SEQ ID NO: 45308 - RNA, 19 nt, Artificial Sequence
  Description of Artificial Sequence: Synthetic oligonucleotide
ucaaagcggguacaccuga

SEQ ID NO: 45309 - RNA, 19 nt, Artificial Sequence
  Description of Artificial Sequence: Synthetic oligonucleotide
uucucgcuugugcuggcgg

SEQ ID NO: 45310 - RNA, 19 nt, Artificial Sequence
  Description of Artificial Sequence: Synthetic oligonucleotide
uacugaaagcaccugugua

SEQ ID NO: 45311 - RNA, 19 nt, Artificial Sequence
  Description of Artificial Sequence: Synthetic oligonucleotide
uuacaaugcucgguaauac

SEQ ID NO: 45312 - RNA, 19 nt, Artificial Sequence
  Description of Artificial Sequence: Synthetic oligonucleotide
uacacaacuuagucgguaa

SEQ ID NO: 45313 - RNA, 19 nt, Artificial Sequence
  Description of Artificial Sequence: Synthetic oligonucleotide
cugggguaaacuugauugc

SEQ ID NO: 45314 - RNA, 19 nt, Artificial Sequence
  Description of Artificial Sequence: Synthetic oligonucleotide
acggguacgugugacaguc

SEQ ID NO: 45315 - RNA, 19 nt, Artificial Sequence
  Description of Artificial Sequence: Synthetic oligonucleotide
cauaucgaagccagcugag

SEQ ID NO: 45316 - RNA, 19 nt, Artificial Sequence
  Description of Artificial Sequence: Synthetic oligonucleotide
gaugucagaucggucacug

SEQ ID NO: 45317 - RNA, 19 nt, Artificial Sequence
  Description of Artificial Sequence: Synthetic oligonucleotide
ugugcgguguaaucguaca

SEQ ID NO: 45318 - RNA, 19 nt, Artificial Sequence
  Description of Artificial Sequence: Synthetic oligonucleotide
caugcgucccaguuauccg

SEQ ID NO: 45319 - RNA, 19 nt, Artificial Sequence
  Description of Artificial Sequence: Synthetic oligonucleotide
ugcucagaacucucguaag

SEQ ID NO: 45320 - RNA, 19 nt, Artificial Sequence
  Description of Artificial Sequence: Synthetic oligonucleotide
ccucacauaguuagaaggg

SEQ ID NO: 45321 - RNA, 19 nt, Artificial Sequence
  Description of Artificial Sequence: Synthetic oligonucleotide
ucgguuggggugauuuugc

SEQ ID NO: 45322 - RNA, 19 nt, Artificial Sequence
  Description of Artificial Sequence: Synthetic oligonucleotide
aaccaaccuauuuggcgcu

SEQ ID NO: 45323 - RNA, 19 nt, Artificial Sequence
  Description of Artificial Sequence: Synthetic oligonucleotide
augcgccuaagguaaaaug

SEQ ID NO: 45324 - RNA, 19 nt, Artificial Sequence
  Description of Artificial Sequence: Synthetic oligonucleotide
caaccgacuagauaaaucu

SEQ ID NO: 45325 - RNA, 19 nt, Artificial Sequence
  Description of Artificial Sequence: Synthetic oligonucleotide
uuacaugggcaacggguac

SEQ ID NO: 45326 - RNA, 19 nt, Artificial Sequence
  Description of Artificial Sequence: Synthetic oligonucleotide
ucgucagucgacaucuaau

SEQ ID NO: 45327 - RNA, 19 nt, Artificial Sequence
  Description of Artificial Sequence: Synthetic oligonucleotide
gguagcuuuccucacgggc

SEQ ID NO: 45328 - RNA, 19 nt, Artificial Sequence
  Description of Artificial Sequence: Synthetic oligonucleotide
guaauacaccuacuuuuac

SEQ ID NO: 45329 - RNA, 19 nt, Artificial Sequence
  Description of Artificial Sequence: Synthetic oligonucleotide
ugaaagguuagaucuccuu

SEQ ID NO: 45330 - RNA, 19 nt, Artificial Sequence
  Description of Artificial Sequence: Synthetic oligonucleotide
ugcguuacaugggcaacgg

SEQ ID NO: 45331 - RNA, 19 nt, Artificial Sequence
  Description of Artificial Sequence: Synthetic oligonucleotide
uaccgugagagaaggcuga

SEQ ID NO: 45332 - RNA, 19 nt, Artificial Sequence
  Description of Artificial Sequence: Synthetic oligonucleotide
aaucugagaccaaacggaa

SEQ ID NO: 45333 - RNA, 19 nt, Artificial Sequence
  Description of Artificial Sequence: Synthetic oligonucleotide
acguaagacuuggggaacc

SEQ ID NO: 45334 - RNA, 19 nt, Artificial Sequence
  Description of Artificial Sequence: Synthetic oligonucleotide
agaagccccaaacuacaca

SEQ ID NO: 45335 - RNA, 19 nt, Artificial Sequence
  Description of Artificial Sequence: Synthetic oligonucleotide
ugaucguuaccaccuuggu

SEQ ID NO: 45336 - RNA, 19 nt, Artificial Sequence
  Description of Artificial Sequence: Synthetic oligonucleotide
acuuagucgguaacacugg

SEQ ID NO: 45337 - RNA, 19 nt, Artificial Sequence
  Description of Artificial Sequence: Synthetic oligonucleotide
agaugcguuacaugggcaa

SEQ ID NO: 45338 - RNA, 19 nt, Artificial Sequence
  Description of Artificial Sequence: Synthetic oligonucleotide
uguaaucguacaucccgau

SEQ ID NO: 45339 - RNA, 19 nt, Artificial Sequence
  Description of Artificial Sequence: Synthetic oligonucleotide
acucagacauugcggucac

SEQ ID NO: 45340 - RNA, 19 nt, Artificial Sequence
  Description of Artificial Sequence: Synthetic oligonucleotide
auucgaaagggguuacaau

SEQ ID NO: 45341 - RNA, 19 nt, Artificial Sequence
  Description of Artificial Sequence: Synthetic oligonucleotide
guacgugugacagucauaa

SEQ ID NO: 45342 - RNA, 19 nt, Artificial Sequence
  Description of Artificial Sequence: Synthetic oligonucleotide
agcgccauuucauauuaau

SEQ ID NO: 45343 - RNA, 19 nt, Artificial Sequence
  Description of Artificial Sequence: Synthetic oligonucleotide
gacacucucuuuaggcuag

SEQ ID NO: 45344 - RNA, 19 nt, Artificial Sequence
  Description of Artificial Sequence: Synthetic oligonucleotide
agccagggugaguuguucg

SEQ ID NO: 45345 - RNA, 19 nt, Artificial Sequence
  Description of Artificial Sequence: Synthetic oligonucleotide
uguucgggaccaguagccg

SEQ ID NO: 45346 - RNA, 19 nt, Artificial Sequence
  Description of Artificial Sequence: Synthetic oligonucleotide
uuaagugguugucuuucuu

SEQ ID NO: 45347 - RNA, 19 nt, Artificial Sequence
  Description of Artificial Sequence: Synthetic oligonucleotide
cauugcggucacaugcgcc

SEQ ID NO: 45348 - RNA, 19 nt, Artificial Sequence
  Description of Artificial Sequence: Synthetic oligonucleotide
accgacuagauaaaucuga

SEQ ID NO: 45349 - RNA, 19 nt, Artificial Sequence
  Description of Artificial Sequence: Synthetic oligonucleotide
uccccuugcugaaagguua

SEQ ID NO: 45350 - RNA, 19 nt, Artificial Sequence
  Description of Artificial Sequence: Synthetic oligonucleotide
guugaucguuaccaccuug

SEQ ID NO: 45351 - RNA, 19 nt, Artificial Sequence
  Description of Artificial Sequence: Synthetic oligonucleotide
aaccgacuagauaaaucug

SEQ ID NO: 45352 - RNA, 19 nt, Artificial Sequence
  Description of Artificial Sequence: Synthetic oligonucleotide
uuaugacggacaucccacu

SEQ ID NO: 45353 - RNA, 19 nt, Artificial Sequence
  Description of Artificial Sequence: Synthetic oligonucleotide
ugaucucggcgauucucag

SEQ ID NO: 45354 - RNA, 19 nt, Artificial Sequence
  Description of Artificial Sequence: Synthetic oligonucleotide
aacucucguaaguguacau

SEQ ID NO: 45355 - RNA, 19 nt, Artificial Sequence
  Description of Artificial Sequence: Synthetic oligonucleotide
cagucgacaucuaauaucu

SEQ ID NO: 45356 - RNA, 19 nt, Artificial Sequence
  Description of Artificial Sequence: Synthetic oligonucleotide
uuugggucgucagucgaca

SEQ ID NO: 45357 - RNA, 19 nt, Artificial Sequence
  Description of Artificial Sequence: Synthetic oligonucleotide
uuugccacgggaagagcua

SEQ ID NO: 45358 - RNA, 19 nt, Artificial Sequence
  Description of Artificial Sequence: Synthetic oligonucleotide
acucucguaaguguacaug

SEQ ID NO: 45359 - RNA, 19 nt, Artificial Sequence
  Description of Artificial Sequence: Synthetic oligonucleotide
gucacaugcgccuaaggua

SEQ ID NO: 45360 - RNA, 19 nt, Artificial Sequence
  Description of Artificial Sequence: Synthetic oligonucleotide
ugcgguguaaucguacauc

SEQ ID NO: 45361 - RNA, 19 nt, Artificial Sequence
  Description of Artificial Sequence: Synthetic oligonucleotide
acacggugguaucguuugc

SEQ ID NO: 45362 - RNA, 19 nt, Artificial Sequence
  Description of Artificial Sequence: Synthetic oligonucleotide
guaaucguacaucccgauc

SEQ ID NO: 45363 - RNA, 19 nt, Artificial Sequence
  Description of Artificial Sequence: Synthetic oligonucleotide
cuuugggucgucagucgac

SEQ ID NO: 45364 - RNA, 19 nt, Artificial Sequence
  Description of Artificial Sequence: Synthetic oligonucleotide
gacuacuguugaucguuac

SEQ ID NO: 45365 - RNA, 19 nt, Artificial Sequence
  Description of Artificial Sequence: Synthetic oligonucleotide
ggaauaagucuuccaagca

SEQ ID NO: 45366 - RNA, 19 nt, Artificial Sequence
  Description of Artificial Sequence: Synthetic oligonucleotide
gcgguguaaucguacaucc

SEQ ID NO: 45367 - RNA, 19 nt, Artificial Sequence
  Description of Artificial Sequence: Synthetic oligonucleotide
aacuugcccgcugacuucu

SEQ ID NO: 45368 - RNA, 19 nt, Artificial Sequence
  Description of Artificial Sequence: Synthetic oligonucleotide
gcguucaaaauucucccgc

SEQ ID NO: 45369 - RNA, 19 nt, Artificial Sequence
  Description of Artificial Sequence: Synthetic oligonucleotide
aggacuuucgguagggcca

SEQ ID NO: 45370 - RNA, 19 nt, Artificial Sequence
  Description of Artificial Sequence: Synthetic oligonucleotide
agagacuacuguugaucgu

SEQ ID NO: 45371 - RNA, 19 nt, Artificial Sequence
  Description of Artificial Sequence: Synthetic oligonucleotide
ggaccaguagccguguagg

SEQ ID NO: 45372 - RNA, 19 nt, Artificial Sequence
  Description of Artificial Sequence: Synthetic oligonucleotide
uagguagcucgguuggggu

SEQ ID NO: 45373 - RNA, 19 nt, Artificial Sequence
  Description of Artificial Sequence: Synthetic oligonucleotide
augcgucccaguuauccgu

SEQ ID NO: 45374 - RNA, 19 nt, Artificial Sequence
  Description of Artificial Sequence: Synthetic oligonucleotide
ccguuuugcagccucacgc

SEQ ID NO: 45375 - RNA, 19 nt, Artificial Sequence
  Description of Artificial Sequence: Synthetic oligonucleotide
agucgguaacacuggacaa

SEQ ID NO: 45376 - RNA, 19 nt, Artificial Sequence
  Description of Artificial Sequence: Synthetic oligonucleotide
augucagaucggucacugg

SEQ ID NO: 45377 - RNA, 19 nt, Artificial Sequence
  Description of Artificial Sequence: Synthetic oligonucleotide
gguaaacuugauugcauaa

SEQ ID NO: 45378 - RNA, 19 nt, Artificial Sequence
  Description of Artificial Sequence: Synthetic oligonucleotide
agauuccauaucgaagcca

SEQ ID NO: 45379 - RNA, 19 nt, Artificial Sequence
  Description of Artificial Sequence: Synthetic oligonucleotide
aacggguacgugugacagu

SEQ ID NO: 45380 - RNA, 19 nt, Artificial Sequence
  Description of Artificial Sequence: Synthetic oligonucleotide
gaugcguuacaugggcaac

SEQ ID NO: 45381 - RNA, 19 nt, Artificial Sequence
  Description of Artificial Sequence: Synthetic oligonucleotide
guuacaaugcucgguaaua

SEQ ID NO: 45382 - RNA, 19 nt, Artificial Sequence
  Description of Artificial Sequence: Synthetic oligonucleotide
guaccgugagagaaggcug

SEQ ID NO: 45383 - RNA, 19 nt, Artificial Sequence
  Description of Artificial Sequence: Synthetic oligonucleotide
aucuaauaucuugaaguuu

SEQ ID NO: 45384 - RNA, 19 nt, Artificial Sequence
  Description of Artificial Sequence: Synthetic oligonucleotide
acggugguaucguuugcca

SEQ ID NO: 45385 - RNA, 19 nt, Artificial Sequence
  Description of Artificial Sequence: Synthetic oligonucleotide
cuuaacuggccgagcgcug

SEQ ID NO: 45386 - RNA, 19 nt, Artificial Sequence
  Description of Artificial Sequence: Synthetic oligonucleotide
gcuuaugacggacauccca

SEQ ID NO: 45387 - RNA, 19 nt, Artificial Sequence
  Description of Artificial Sequence: Synthetic oligonucleotide
ugggucgucagucgacauc

SEQ ID NO: 45388 - RNA, 19 nt, Artificial Sequence
  Description of Artificial Sequence: Synthetic oligonucleotide
ugaguuguucgggaccagu

SEQ ID NO: 45389 - RNA, 19 nt, Artificial Sequence
  Description of Artificial Sequence: Synthetic oligonucleotide
cugugcgguguaaucguac

SEQ ID NO: 45390 - RNA, 19 nt, Artificial Sequence
  Description of Artificial Sequence: Synthetic oligonucleotide
cacggugguaucguuugcc

SEQ ID NO: 45391 - RNA, 19 nt, Artificial Sequence
  Description of Artificial Sequence: Synthetic oligonucleotide
uuauccguuucugguuucu

SEQ ID NO: 45392 - RNA, 19 nt, Artificial Sequence
  Description of Artificial Sequence: Synthetic oligonucleotide
cuuagguagcucgguuggg

SEQ ID NO: 45393 - RNA, 19 nt, Artificial Sequence
  Description of Artificial Sequence: Synthetic oligonucleotide
ccgacuagauaaaucugag

SEQ ID NO: 45394 - RNA, 19 nt, Artificial Sequence
  Description of Artificial Sequence: Synthetic oligonucleotide
gguaucguuugccacggga

SEQ ID NO: 45395 - RNA, 19 nt, Artificial Sequence
  Description of Artificial Sequence: Synthetic oligonucleotide
caucccgaucaccuggcac

SEQ ID NO: 45396 - RNA, 19 nt, Artificial Sequence
  Description of Artificial Sequence: Synthetic oligonucleotide
auacaucaagucucagauu

SEQ ID NO: 45397 - RNA, 19 nt, Artificial Sequence
  Description of Artificial Sequence: Synthetic oligonucleotide
agacuuagguagcucgguu

SEQ ID NO: 45398 - RNA, 19 nt, Artificial Sequence
  Description of Artificial Sequence: Synthetic oligonucleotide
cacaacuuagucgguaaca

SEQ ID NO: 45399 - RNA, 19 nt, Artificial Sequence
  Description of Artificial Sequence: Synthetic oligonucleotide
ugacucagacauugcgguc

SEQ ID NO: 45400 - RNA, 19 nt, Artificial Sequence
  Description of Artificial Sequence: Synthetic oligonucleotide
agaacggugaugacaucgu

SEQ ID NO: 45401 - RNA, 19 nt, Artificial Sequence
  Description of Artificial Sequence: Synthetic oligonucleotide
aucguuugccacgggaaga

SEQ ID NO: 45402 - RNA, 19 nt, Artificial Sequence
  Description of Artificial Sequence: Synthetic oligonucleotide
cugaagucugcccaguugu

SEQ ID NO: 45403 - RNA, 19 nt, Artificial Sequence
  Description of Artificial Sequence: Synthetic oligonucleotide
cuccgccaagccauccugg

SEQ ID NO: 45404 - RNA, 19 nt, Artificial Sequence
  Description of Artificial Sequence: Synthetic oligonucleotide
uuccuaguugauugucuuu

SEQ ID NO: 45405 - RNA, 19 nt, Artificial Sequence
  Description of Artificial Sequence: Synthetic oligonucleotide
aacgucaauuaggugcaua

SEQ ID NO: 45406 - RNA, 19 nt, Artificial Sequence
  Description of Artificial Sequence: Synthetic oligonucleotide
cuuagucgguaacacugga

SEQ ID NO: 45407 - RNA, 19 nt, Artificial Sequence
  Description of Artificial Sequence: Synthetic oligonucleotide
auaucgaagccagcugagu

SEQ ID NO: 45408 - RNA, 19 nt, Artificial Sequence
  Description of Artificial Sequence: Synthetic oligonucleotide
cuugcccgcugacuucucc

SEQ ID NO: 45409 - RNA, 19 nt, Artificial Sequence
  Description of Artificial Sequence: Synthetic oligonucleotide
cuacggggagggagaagcc

SEQ ID NO: 45410 - RNA, 19 nt, Artificial Sequence
  Description of Artificial Sequence: Synthetic oligonucleotide
caaagcggguacaccugac

SEQ ID NO: 45411 - RNA, 19 nt, Artificial Sequence
  Description of Artificial Sequence: Synthetic oligonucleotide
ccgcguucaaaauucuccc

SEQ ID NO: 45412 - RNA, 19 nt, Artificial Sequence
  Description of Artificial Sequence: Synthetic oligonucleotide
aggagcgccauuucauauu

SEQ ID NO: 45413 - RNA, 19 nt, Artificial Sequence
  Description of Artificial Sequence: Synthetic oligonucleotide
guaucguuugccacgggaa

SEQ ID NO: 45414 - RNA, 19 nt, Artificial Sequence
  Description of Artificial Sequence: Synthetic oligonucleotide
uccagauugccgcguucaa

SEQ ID NO: 45415 - RNA, 19 nt, Artificial Sequence
  Description of Artificial Sequence: Synthetic oligonucleotide
ggauggacaacauaugauu

SEQ ID NO: 45416 - RNA, 19 nt, Artificial Sequence
  Description of Artificial Sequence: Synthetic oligonucleotide
aagcaauaaccugggcaau

SEQ ID NO: 45417 - RNA, 19 nt, Artificial Sequence
  Description of Artificial Sequence: Synthetic oligonucleotide
guucccguuuugcagccuc

SEQ ID NO: 45418 - RNA, 19 nt, Artificial Sequence
  Description of Artificial Sequence: Synthetic oligonucleotide
uccuuccuaguugauuguc

SEQ ID NO: 45419 - RNA, 19 nt, Artificial Sequence
  Description of Artificial Sequence: Synthetic oligonucleotide
ccaaccgacuagauaaauc

SEQ ID NO: 45420 - RNA, 19 nt, Artificial Sequence
  Description of Artificial Sequence: Synthetic oligonucleotide
gcgccuaagguaaaaugag

SEQ ID NO: 45421 - RNA, 19 nt, Artificial Sequence
  Description of Artificial Sequence: Synthetic oligonucleotide
ugguaucguuugccacggg

SEQ ID NO: 45422 - RNA, 19 nt, Artificial Sequence
  Description of Artificial Sequence: Synthetic oligonucleotide
gaccaguagccguguagga

SEQ ID NO: 45423 - RNA, 19 nt, Artificial Sequence
  Description of Artificial Sequence: Synthetic oligonucleotide
ucguuaccaccuugguggu

SEQ ID NO: 45424 - RNA, 19 nt, Artificial Sequence
  Description of Artificial Sequence: Synthetic oligonucleotide
guguaaucguacaucccga

SEQ ID NO: 45425 - RNA, 19 nt, Artificial Sequence
  Description of Artificial Sequence: Synthetic oligonucleotide
gagaagccccaaacuacac

SEQ ID NO: 45426 - RNA, 19 nt, Artificial Sequence
  Description of Artificial Sequence: Synthetic oligonucleotide
ucacgccucucgauuuccu

SEQ ID NO: 45427 - RNA, 19 nt, Artificial Sequence
  Description of Artificial Sequence: Synthetic oligonucleotide
gacuccggacuugucgccc

SEQ ID NO: 45428 - RNA, 19 nt, Artificial Sequence
  Description of Artificial Sequence: Synthetic oligonucleotide
gggugaguuguucgggacc

SEQ ID NO: 45429 - RNA, 19 nt, Artificial Sequence
  Description of Artificial Sequence: Synthetic oligonucleotide
ccaugcgucccaguuaucc

SEQ ID NO: 45430 - RNA, 19 nt, Artificial Sequence
  Description of Artificial Sequence: Synthetic oligonucleotide
cacguaagacuuggggaac

SEQ ID NO: 45431 - RNA, 19 nt, Artificial Sequence
  Description of Artificial Sequence: Synthetic oligonucleotide
uugccgcguucaaaauucu

SEQ ID NO: 45432 - RNA, 19 nt, Artificial Sequence
  Description of Artificial Sequence: Synthetic oligonucleotide
cucuuuaggcuagcaggac

SEQ ID NO: 45433 - RNA, 19 nt, Artificial Sequence
  Description of Artificial Sequence: Synthetic oligonucleotide
accaguagccguguaggaa

SEQ ID NO: 45434 - RNA, 19 nt, Artificial Sequence
  Description of Artificial Sequence: Synthetic oligonucleotide
acacucucuuuaggcuagc

SEQ ID NO: 45435 - RNA, 19 nt, Artificial Sequence
  Description of Artificial Sequence: Synthetic oligonucleotide
agcaauaaccugggcaauu

SEQ ID NO: 45436 - RNA, 19 nt, Artificial Sequence
  Description of Artificial Sequence: Synthetic oligonucleotide
ggggaaccaacccuuguga

SEQ ID NO: 45437 - RNA, 19 nt, Artificial Sequence
  Description of Artificial Sequence: Synthetic oligonucleotide
uggccagacauggcaacgu

SEQ ID NO: 45438 - RNA, 19 nt, Artificial Sequence
  Description of Artificial Sequence: Synthetic oligonucleotide
ucggcgauucucagcucuc

SEQ ID NO: 45439 - RNA, 19 nt, Artificial Sequence
  Description of Artificial Sequence: Synthetic oligonucleotide
ggauagugggucucuuuga

SEQ ID NO: 45440 - RNA, 19 nt, Artificial Sequence
  Description of Artificial Sequence: Synthetic oligonucleotide
cuuuaggcuagcaggacuu

SEQ ID NO: 45441 - RNA, 19 nt, Artificial Sequence
  Description of Artificial Sequence: Synthetic oligonucleotide
augccggcuccucggguag

SEQ ID NO: 45442 - RNA, 19 nt, Artificial Sequence
  Description of Artificial Sequence: Synthetic oligonucleotide
acaugggcaacggguacgu

SEQ ID NO: 45443 - RNA, 19 nt, Artificial Sequence
  Description of Artificial Sequence: Synthetic oligonucleotide
ccauaucgaagccagcuga

SEQ ID NO: 45444 - RNA, 19 nt, Artificial Sequence
  Description of Artificial Sequence: Synthetic oligonucleotide
cuaugucuucaguacagau

SEQ ID NO: 45445 - RNA, 19 nt, Artificial Sequence
  Description of Artificial Sequence: Synthetic oligonucleotide
gguaccgugagagaaggcu

SEQ ID NO: 45446 - RNA, 19 nt, Artificial Sequence
  Description of Artificial Sequence: Synthetic oligonucleotide
agcucgguuggggugauuu

SEQ ID NO: 45447 - RNA, 19 nt, Artificial Sequence
  Description of Artificial Sequence: Synthetic oligonucleotide
ugcgucccaguuauccguu

SEQ ID NO: 45448 - RNA, 19 nt, Artificial Sequence
  Description of Artificial Sequence: Synthetic oligonucleotide
agccucacgccucucgauu

SEQ ID NO: 45449 - RNA, 19 nt, Artificial Sequence
  Description of Artificial Sequence: Synthetic oligonucleotide
acuccggacuugucgccca

SEQ ID NO: 45450 - RNA, 19 nt, Artificial Sequence
  Description of Artificial Sequence: Synthetic oligonucleotide
gucgucagucgacaucuaa

SEQ ID NO: 45451 - RNA, 19 nt, Artificial Sequence
  Description of Artificial Sequence: Synthetic oligonucleotide
ugcggucacaugcgccuaa

SEQ ID NO: 45452 - RNA, 19 nt, Artificial Sequence
  Description of Artificial Sequence: Synthetic oligonucleotide
uacgugugacagucauaaa

SEQ ID NO: 45453 - RNA, 19 nt, Artificial Sequence
  Description of Artificial Sequence: Synthetic oligonucleotide
guuugccacgggaagagcu

SEQ ID NO: 45454 - RNA, 19 nt, Artificial Sequence
  Description of Artificial Sequence: Synthetic oligonucleotide
uuuaggcuagcaggacuuu

SEQ ID NO: 45455 - RNA, 19 nt, Artificial Sequence
  Description of Artificial Sequence: Synthetic oligonucleotide
cagggugaguuguucggga

SEQ ID NO: 45456 - RNA, 19 nt, Artificial Sequence
  Description of Artificial Sequence: Synthetic oligonucleotide
gaguuguucgggaccagua

SEQ ID NO: 45457 - RNA, 19 nt, Artificial Sequence
  Description of Artificial Sequence: Synthetic oligonucleotide
cagaugcguuacaugggca

SEQ ID NO: 45458 - RNA, 19 nt, Artificial Sequence
  Description of Artificial Sequence: Synthetic oligonucleotide
cauccugucuucccuuuaa

SEQ ID NO: 45459 - RNA, 19 nt, Artificial Sequence
  Description of Artificial Sequence: Synthetic oligonucleotide
accaaccgacuagauaaau

SEQ ID NO: 45460 - RNA, 19 nt, Artificial Sequence
  Description of Artificial Sequence: Synthetic oligonucleotide
gucagucgacaucuaauau

SEQ ID NO: 45461 - RNA, 19 nt, Artificial Sequence
  Description of Artificial Sequence: Synthetic oligonucleotide
ggugaucucggcgauucuc

SEQ ID NO: 45462 - RNA, 19 nt, Artificial Sequence
  Description of Artificial Sequence: Synthetic oligonucleotide
uugggucgucagucgacau

SEQ ID NO: 45463 - RNA, 19 nt, Artificial Sequence
  Description of Artificial Sequence: Synthetic oligonucleotide
gcacucuacggggagggag

SEQ ID NO: 45464 - RNA, 19 nt, Artificial Sequence
  Description of Artificial Sequence: Synthetic oligonucleotide
ggagcgccauuucauauua

SEQ ID NO: 45465 - RNA, 19 nt, Artificial Sequence
  Description of Artificial Sequence: Synthetic oligonucleotide
acuacacaacuuagucggu

SEQ ID NO: 45466 - RNA, 19 nt, Artificial Sequence
  Description of Artificial Sequence: Synthetic oligonucleotide
aacuggccgagcgcugggu

SEQ ID NO: 45467 - RNA, 19 nt, Artificial Sequence
  Description of Artificial Sequence: Synthetic oligonucleotide
agggaagacuccggacuug

SEQ ID NO: 45468 - RNA, 19 nt, Artificial Sequence
  Description of Artificial Sequence: Synthetic oligonucleotide
acaucccgaucaccuggca

SEQ ID NO: 45469 - RNA, 19 nt, Artificial Sequence
  Description of Artificial Sequence: Synthetic oligonucleotide
ggacuuucgguagggccag

SEQ ID NO: 45470 - RNA, 19 nt, Artificial Sequence
  Description of Artificial Sequence: Synthetic oligonucleotide
cuacacaacuuagucggua

SEQ ID NO: 45471 - RNA, 19 nt, Artificial Sequence
  Description of Artificial Sequence: Synthetic oligonucleotide
gguagcucgguugggguga

SEQ ID NO: 45472 - RNA, 19 nt, Artificial Sequence
  Description of Artificial Sequence: Synthetic oligonucleotide
ccaguuauccguuucuggu

SEQ ID NO: 45473 - RNA, 19 nt, Artificial Sequence
  Description of Artificial Sequence: Synthetic oligonucleotide
gccuuaacuggccgagcgc

SEQ ID NO: 45474 - RNA, 19 nt, Artificial Sequence
  Description of Artificial Sequence: Synthetic oligonucleotide
ccggacuugucgcccaccg

SEQ ID NO: 45475 - RNA, 19 nt, Artificial Sequence
  Description of Artificial Sequence: Synthetic oligonucleotide
gcgccauuucauauuaauc

SEQ ID NO: 45476 - RNA, 19 nt, Artificial Sequence
  Description of Artificial Sequence: Synthetic oligonucleotide
gucccaguuauccguuucu

SEQ ID NO: 45477 - RNA, 19 nt, Artificial Sequence
  Description of Artificial Sequence: Synthetic oligonucleotide
guucgggaccaguagccgu

SEQ ID NO: 45478 - RNA, 19 nt, Artificial Sequence
  Description of Artificial Sequence: Synthetic oligonucleotide
acaugcgccuaagguaaaa

SEQ ID NO: 45479 - RNA, 19 nt, Artificial Sequence
  Description of Artificial Sequence: Synthetic oligonucleotide
cauucgugacuucuggauu

SEQ ID NO: 45480 - RNA, 19 nt, Artificial Sequence
  Description of Artificial Sequence: Synthetic oligonucleotide
uccggacuugucgcccacc

SEQ ID NO: 45481 - RNA, 19 nt, Artificial Sequence
  Description of Artificial Sequence: Synthetic oligonucleotide
cuuaggcuacagcacaguu

SEQ ID NO: 45482 - RNA, 19 nt, Artificial Sequence
  Description of Artificial Sequence: Synthetic oligonucleotide
acuuucgguagggccagua

SEQ ID NO: 45483 - RNA, 19 nt, Artificial Sequence
  Description of Artificial Sequence: Synthetic oligonucleotide
cugaaagguuagaucuccu

SEQ ID NO: 45484 - RNA, 19 nt, Artificial Sequence
  Description of Artificial Sequence: Synthetic oligonucleotide
cguuacaugggcaacgggu

SEQ ID NO: 45485 - RNA, 19 nt, Artificial Sequence
  Description of Artificial Sequence: Synthetic oligonucleotide
agacuacuguugaucguua

SEQ ID NO: 45486 - RNA, 19 nt, Artificial Sequence
  Description of Artificial Sequence: Synthetic oligonucleotide
gcaacggguacgugugaca

SEQ ID NO: 45487 - RNA, 19 nt, Artificial Sequence
  Description of Artificial Sequence: Synthetic oligonucleotide
ugcacucuacggggaggga

SEQ ID NO: 45488 - RNA, 19 nt, Artificial Sequence
  Description of Artificial Sequence: Synthetic oligonucleotide
ggcaacggguacgugugac

SEQ ID NO: 45489 - RNA, 19 nt, Artificial Sequence
  Description of Artificial Sequence: Synthetic oligonucleotide
cugagucuuucagccucac

SEQ ID NO: 45490 - RNA, 19 nt, Artificial Sequence
  Description of Artificial Sequence: Synthetic oligonucleotide
auccccuugcugaaagguu

SEQ ID NO: 45491 - RNA, 19 nt, Artificial Sequence
  Description of Artificial Sequence: Synthetic oligonucleotide
gggucgucagucgacaucu

SEQ ID NO: 45492 - RNA, 19 nt, Artificial Sequence
  Description of Artificial Sequence: Synthetic oligonucleotide
caccgugcccguccaccag

SEQ ID NO: 45493 - RNA, 19 nt, Artificial Sequence
  Description of Artificial Sequence: Synthetic oligonucleotide
uccugccuuugggucguca

SEQ ID NO: 45494 - RNA, 19 nt, Artificial Sequence
  Description of Artificial Sequence: Synthetic oligonucleotide
gaacggugaugacaucguu

SEQ ID NO: 45495 - RNA, 19 nt, Artificial Sequence
  Description of Artificial Sequence: Synthetic oligonucleotide
gacgggagacggggaggag

SEQ ID NO: 45496 - RNA, 19 nt, Artificial Sequence
  Description of Artificial Sequence: Synthetic oligonucleotide
cgucaauuaggugcauagc

SEQ ID NO: 45497 - RNA, 19 nt, Artificial Sequence
  Description of Artificial Sequence: Synthetic oligonucleotide
gggcuugcgcuuguagccc

SEQ ID NO: 45498 - RNA, 19 nt, Artificial Sequence
  Description of Artificial Sequence: Synthetic oligonucleotide
ccucggguagccucugauc

SEQ ID NO: 45499 - RNA, 19 nt, Artificial Sequence
  Description of Artificial Sequence: Synthetic oligonucleotide
acgggcccugaaaugaguu

SEQ ID NO: 45500 - RNA, 19 nt, Artificial Sequence
  Description of Artificial Sequence: Synthetic oligonucleotide
cgguguaaucguacauccc

SEQ ID NO: 45501 - RNA, 19 nt, Artificial Sequence
  Description of Artificial Sequence: Synthetic oligonucleotide
cuuucgguagggccaguau

SEQ ID NO: 45502 - RNA, 19 nt, Artificial Sequence
  Description of Artificial Sequence: Synthetic oligonucleotide
gccaguaucgaugcuggua

SEQ ID NO: 45503 - RNA, 19 nt, Artificial Sequence
  Description of Artificial Sequence: Synthetic oligonucleotide
cgguaugaaaauacgccaa

SEQ ID NO: 45504 - RNA, 19 nt, Artificial Sequence
  Description of Artificial Sequence: Synthetic oligonucleotide
caggagcgccauuucauau

SEQ ID NO: 45505 - RNA, 19 nt, Artificial Sequence
  Description of Artificial Sequence: Synthetic oligonucleotide
cuccggacuugucgcccac

SEQ ID NO: 45506 - RNA, 19 nt, Artificial Sequence
  Description of Artificial Sequence: Synthetic oligonucleotide
caucguucugugcggugua

SEQ ID NO: 45507 - RNA, 19 nt, Artificial Sequence
  Description of Artificial Sequence: Synthetic oligonucleotide
cgacuagauaaaucugaga

SEQ ID NO: 45508 - RNA, 19 nt, Artificial Sequence
  Description of Artificial Sequence: Synthetic oligonucleotide
ggagugggaaccucauuuu

SEQ ID NO: 45509 - RNA, 19 nt, Artificial Sequence
  Description of Artificial Sequence: Synthetic oligonucleotide
uugcggucacaugcgccua

SEQ ID NO: 45510 - RNA, 19 nt, Artificial Sequence
  Description of Artificial Sequence: Synthetic oligonucleotide
caugggcaacggguacgug

SEQ ID NO: 45511 - RNA, 19 nt, Artificial Sequence
  Description of Artificial Sequence: Synthetic oligonucleotide
cgguaauacaccuacuuuu

SEQ ID NO: 45512 - RNA, 19 nt, Artificial Sequence
  Description of Artificial Sequence: Synthetic oligonucleotide
gugcgguguaaucguacau

SEQ ID NO: 45513 - RNA, 19 nt, Artificial Sequence
  Description of Artificial Sequence: Synthetic oligonucleotide
cccaccgugcccguccacc

SEQ ID NO: 45514 - RNA, 19 nt, Artificial Sequence
  Description of Artificial Sequence: Synthetic oligonucleotide
cccuuuaauucuccgccaa

SEQ ID NO: 45515 - RNA, 19 nt, Artificial Sequence
  Description of Artificial Sequence: Synthetic oligonucleotide
aguugccgcugccguucaa

SEQ ID NO: 45516 - RNA, 19 nt, Artificial Sequence
  Description of Artificial Sequence: Synthetic oligonucleotide
caugcgccuaagguaaaau

SEQ ID NO: 45517 - RNA, 19 nt, Artificial Sequence
  Description of Artificial Sequence: Synthetic oligonucleotide
cacaugcgccuaagguaaa

SEQ ID NO: 45518 - RNA, 19 nt, Artificial Sequence
  Description of Artificial Sequence: Synthetic oligonucleotide
guacacggugguaucguuu

SEQ ID NO: 45519 - RNA, 19 nt, Artificial Sequence
  Description of Artificial Sequence: Synthetic oligonucleotide
accaaccuauuuggcgcuu

SEQ ID NO: 45520 - RNA, 19 nt, Artificial Sequence
  Description of Artificial Sequence: Synthetic oligonucleotide
gagcgccauuucauauuaa

SEQ ID NO: 45521 - RNA, 19 nt, Artificial Sequence
  Description of Artificial Sequence: Synthetic oligonucleotide
ccuuaacuggccgagcgcu

SEQ ID NO: 45522 - RNA, 19 nt, Artificial Sequence
  Description of Artificial Sequence: Synthetic oligonucleotide
cccauucaaguugccgcug

SEQ ID NO: 45523 - RNA, 19 nt, Artificial Sequence
  Description of Artificial Sequence: Synthetic oligonucleotide
gcggucacaugcgccuaag

SEQ ID NO: 45524 - RNA, 19 nt, Artificial Sequence
  Description of Artificial Sequence: Synthetic oligonucleotide
cggucacaugcgccuaagg

SEQ ID NO: 45525 - RNA, 19 nt, Artificial Sequence
  Description of Artificial Sequence: Synthetic oligonucleotide
gggcagaugucagaucggu

SEQ ID NO: 45526 - RNA, 19 nt, Artificial Sequence
  Description of Artificial Sequence: Synthetic oligonucleotide
ccucugauccacagacgaa

SEQ ID NO: 45527 - RNA, 19 nt, Artificial Sequence
  Description of Artificial Sequence: Synthetic oligonucleotide
cgucccaguuauccguuuc

SEQ ID NO: 45528 - RNA, 19 nt, Artificial Sequence
  Description of Artificial Sequence: Synthetic oligonucleotide
gcccaacuugcccgcugac

SEQ ID NO: 45529 - RNA, 19 nt, Artificial Sequence
  Description of Artificial Sequence: Synthetic oligonucleotide
ccagauugccgcguucaaa

SEQ ID NO: 45530 - RNA, 19 nt, Artificial Sequence
  Description of Artificial Sequence: Synthetic oligonucleotide
cacgccucucgauuuccuu

SEQ ID NO: 45531 - RNA, 19 nt, Artificial Sequence
  Description of Artificial Sequence: Synthetic oligonucleotide
ccaccgugcccguccacca

SEQ ID NO: 45532 - RNA, 19 nt, Artificial Sequence
  Description of Artificial Sequence: Synthetic oligonucleotide
gccucacgccucucgauuu

SEQ ID NO: 45533 - RNA, 19 nt, Artificial Sequence
  Description of Artificial Sequence: Synthetic oligonucleotide
ggcgggccacguggaacug

SEQ ID NO: 45534 - RNA, 19 nt, Artificial Sequence
  Description of Artificial Sequence: Synthetic oligonucleotide
gcucgguaauacaccuacu

SEQ ID NO: 45535 - RNA, 19 nt, Artificial Sequence
  Description of Artificial Sequence: Synthetic oligonucleotide
gacuuucgguagggccagu

SEQ ID NO: 45536 - RNA, 19 nt, Artificial Sequence
  Description of Artificial Sequence: Synthetic oligonucleotide
cguuaccaccuugguggug

SEQ ID NO: 45537 - RNA, 19 nt, Artificial Sequence
  Description of Artificial Sequence: Synthetic oligonucleotide
cgggccacguggaacugaa

SEQ ID NO: 45538 - RNA, 19 nt, Artificial Sequence
  Description of Artificial Sequence: Synthetic oligonucleotide
cccaugcgucccaguuauc

SEQ ID NO: 45539 - RNA, 19 nt, Artificial Sequence
  Description of Artificial Sequence: Synthetic oligonucleotide
uagcucgguuggggugauu

SEQ ID NO: 45540 - RNA, 19 nt, Artificial Sequence
  Description of Artificial Sequence: Synthetic oligonucleotide
guagcucgguuggggugau

SEQ ID NO: 45541 - RNA, 19 nt, Artificial Sequence
  Description of Artificial Sequence: Synthetic oligonucleotide
ggucgucagucgacaucua

SEQ ID NO: 45542 - RNA, 19 nt, Artificial Sequence
  Description of Artificial Sequence: Synthetic oligonucleotide
gcccgcugacuucuccuuu

SEQ ID NO: 45543 - RNA, 19 nt, Artificial Sequence
  Description of Artificial Sequence: Synthetic oligonucleotide
gcgucccaguuauccguuu

SEQ ID NO: 45544 - RNA, 19 nt, Artificial Sequence
  Description of Artificial Sequence: Synthetic oligonucleotide
cgucaucguucugugcggu

SEQ ID NO: 45545 - RNA, 19 nt, Artificial Sequence
  Description of Artificial Sequence: Synthetic oligonucleotide
cggacuugucgcccaccgu

SEQ ID NO: 45546 - RNA, 19 nt, Artificial Sequence
  Description of Artificial Sequence: Synthetic oligonucleotide
cccgaucaccuggcacacu

SEQ ID NO: 45547 - RNA, 19 nt, Artificial Sequence
  Description of Artificial Sequence: Synthetic oligonucleotide
aauguuaccauguuacugc

SEQ ID NO: 45548 - RNA, 19 nt, Artificial Sequence
  Description of Artificial Sequence: Synthetic oligonucleotide
aaagauuucuauuuuaaga

SEQ ID NO: 45549 - RNA, 19 nt, Artificial Sequence
  Description of Artificial Sequence: Synthetic oligonucleotide
aaauagacaauuaagucug

SEQ ID NO: 45550 - RNA, 19 nt, Artificial Sequence
  Description of Artificial Sequence: Synthetic oligonucleotide
ucuacucugacuuugugag

SEQ ID NO: 45551 - RNA, 19 nt, Artificial Sequence
  Description of Artificial Sequence: Synthetic oligonucleotide
gauauaugcacgcugauuc

SEQ ID NO: 45552 - RNA, 19 nt, Artificial Sequence
  Description of Artificial Sequence: Synthetic oligonucleotide
cugucuauugcuauuaugc

SEQ ID NO: 45553 - RNA, 19 nt, Artificial Sequence
  Description of Artificial Sequence: Synthetic oligonucleotide
agugcaagugcuaaaaugc

SEQ ID NO: 45554 - RNA, 19 nt, Artificial Sequence
  Description of Artificial Sequence: Synthetic oligonucleotide
aaguauuucacuuaacauu

SEQ ID NO: 45555 - RNA, 19 nt, Artificial Sequence
  Description of Artificial Sequence: Synthetic oligonucleotide
gaaaacaacuguuuugccc

SEQ ID NO: 45556 - RNA, 19 nt, Artificial Sequence
  Description of Artificial Sequence: Synthetic oligonucleotide
gauaguugaccacauauac

SEQ ID NO: 45557 - RNA, 19 nt, Artificial Sequence
  Description of Artificial Sequence: Synthetic oligonucleotide
cuuaugguugcuaacagac

SEQ ID NO: 45558 - RNA, 19 nt, Artificial Sequence
  Description of Artificial Sequence: Synthetic oligonucleotide
acggcuuaccauuuuaggc

SEQ ID NO: 45559 - RNA, 19 nt, Artificial Sequence
  Description of Artificial Sequence: Synthetic oligonucleotide
auaacaagucucuaaagga

SEQ ID NO: 45560 - RNA, 19 nt, Artificial Sequence
  Description of Artificial Sequence: Synthetic oligonucleotide
aauggacgcauuuauaaaa

SEQ ID NO: 45561 - RNA, 19 nt, Artificial Sequence
  Description of Artificial Sequence: Synthetic oligonucleotide
uuaugaaaguuccaucuca

SEQ ID NO: 45562 - RNA, 19 nt, Artificial Sequence
  Description of Artificial Sequence: Synthetic oligonucleotide
auagcguugauacgacucc

SEQ ID NO: 45563 - RNA, 19 nt, Artificial Sequence
  Description of Artificial Sequence: Synthetic oligonucleotide
aguaacuuaccccaggacu

SEQ ID NO: 45564 - RNA, 19 nt, Artificial Sequence
  Description of Artificial Sequence: Synthetic oligonucleotide
cacucaaaugcacagaggc

SEQ ID NO: 45565 - RNA, 19 nt, Artificial Sequence
  Description of Artificial Sequence: Synthetic oligonucleotide
aaacauucguacauuauug

SEQ ID NO: 45566 - RNA, 19 nt, Artificial Sequence
  Description of Artificial Sequence: Synthetic oligonucleotide
ugcuauuaugcuuagguuc

SEQ ID NO: 45567 - RNA, 19 nt, Artificial Sequence
  Description of Artificial Sequence: Synthetic oligonucleotide
uuuagggcaaauaacuauc

SEQ ID NO: 45568 - RNA, 19 nt, Artificial Sequence
  Description of Artificial Sequence: Synthetic oligonucleotide
aacggcuuaccauuuuagg

SEQ ID NO: 45569 - RNA, 19 nt, Artificial Sequence
  Description of Artificial Sequence: Synthetic oligonucleotide
uuacaaugcacuaagucua

SEQ ID NO: 45570 - RNA, 19 nt, Artificial Sequence
  Description of Artificial Sequence: Synthetic oligonucleotide
aauaaagaguagcggauaa

SEQ ID NO: 45571 - RNA, 19 nt, Artificial Sequence
  Description of Artificial Sequence: Synthetic oligonucleotide
uugaccugaaccauaagaa

SEQ ID NO: 45572 - RNA, 19 nt, Artificial Sequence
  Description of Artificial Sequence: Synthetic oligonucleotide
uaucauaugucgcugugac

SEQ ID NO: 45573 - RNA, 19 nt, Artificial Sequence
  Description of Artificial Sequence: Synthetic oligonucleotide
uuggagaucccgaaaacca

SEQ ID NO: 45574 - RNA, 19 nt, Artificial Sequence
  Description of Artificial Sequence: Synthetic oligonucleotide
uuucacuuggguuucauau

SEQ ID NO: 45575 - RNA, 19 nt, Artificial Sequence
  Description of Artificial Sequence: Synthetic oligonucleotide
uugaaagccuuccaugacc

SEQ ID NO: 45576 - RNA, 19 nt, Artificial Sequence
  Description of Artificial Sequence: Synthetic oligonucleotide
auauaugcacgcugauucc

SEQ ID NO: 45577 - RNA, 19 nt, Artificial Sequence
  Description of Artificial Sequence: Synthetic oligonucleotide
ucauauuccguaaaucgaa

SEQ ID NO: 45578 - RNA, 19 nt, Artificial Sequence
  Description of Artificial Sequence: Synthetic oligonucleotide
acaagugcaaaccaaggga

SEQ ID NO: 45579 - RNA, 19 nt, Artificial Sequence
  Description of Artificial Sequence: Synthetic oligonucleotide
aacauugaaagccuuccau

SEQ ID NO: 45580 - RNA, 19 nt, Artificial Sequence
  Description of Artificial Sequence: Synthetic oligonucleotide
uggauuaccaccaaaucuu

SEQ ID NO: 45581 - RNA, 19 nt, Artificial Sequence
  Description of Artificial Sequence: Synthetic oligonucleotide
uauuagaucagauguuuuc

SEQ ID NO: 45582 - RNA, 19 nt, Artificial Sequence
  Description of Artificial Sequence: Synthetic oligonucleotide
uuuucaagggguuauucaa

SEQ ID NO: 45583 - RNA, 19 nt, Artificial Sequence
  Description of Artificial Sequence: Synthetic oligonucleotide
uucuguacaacgcccaaca

SEQ ID NO: 45584 - RNA, 19 nt, Artificial Sequence
  Description of Artificial Sequence: Synthetic oligonucleotide
uuacaggaagaguacaaca

SEQ ID NO: 45585 - RNA, 19 nt, Artificial Sequence
  Description of Artificial Sequence: Synthetic oligonucleotide
uauuccguaaaucgaacaa

SEQ ID NO: 45586 - RNA, 19 nt, Artificial Sequence
  Description of Artificial Sequence: Synthetic oligonucleotide
ggcuacucaacauugaaag

SEQ ID NO: 45587 - RNA, 19 nt, Artificial Sequence
  Description of Artificial Sequence: Synthetic oligonucleotide
uggauuuuggacgagcgcc

SEQ ID NO: 45588 - RNA, 19 nt, Artificial Sequence
  Description of Artificial Sequence: Synthetic oligonucleotide
gaugacgaguucuuggaug

SEQ ID NO: 45589 - RNA, 19 nt, Artificial Sequence
  Description of Artificial Sequence: Synthetic oligonucleotide
ugauacgacuccaugaaau

SEQ ID NO: 45590 - RNA, 19 nt, Artificial Sequence
  Description of Artificial Sequence: Synthetic oligonucleotide
auuggauauaugcacgcug

SEQ ID NO: 45591 - RNA, 19 nt, Artificial Sequence
  Description of Artificial Sequence: Synthetic oligonucleotide
auuaugcuuagguucagca

SEQ ID NO: 45592 - RNA, 19 nt, Artificial Sequence
  Description of Artificial Sequence: Synthetic oligonucleotide
ucauaacaagucucuaaag

SEQ ID NO: 45593 - RNA, 19 nt, Artificial Sequence
  Description of Artificial Sequence: Synthetic oligonucleotide
uggauuccgguaucgaagg

SEQ ID NO: 45594 - RNA, 19 nt, Artificial Sequence
  Description of Artificial Sequence: Synthetic oligonucleotide
ucuccauacuggcagaaga

SEQ ID NO: 45595 - RNA, 19 nt, Artificial Sequence
  Description of Artificial Sequence: Synthetic oligonucleotide
agacaucuaccacuucucc

SEQ ID NO: 45596 - RNA, 19 nt, Artificial Sequence
  Description of Artificial Sequence: Synthetic oligonucleotide
uaauguuaccauguuacug

SEQ ID NO: 45597 - RNA, 19 nt, Artificial Sequence
  Description of Artificial Sequence: Synthetic oligonucleotide
uucuuaugguugcuaacag

SEQ ID NO: 45598 - RNA, 19 nt, Artificial Sequence
  Description of Artificial Sequence: Synthetic oligonucleotide
uuuaugaaaguuccaucuc

SEQ ID NO: 45599 - RNA, 19 nt, Artificial Sequence
  Description of Artificial Sequence: Synthetic oligonucleotide
acgcauuuauaaaagacuc

SEQ ID NO: 45600 - RNA, 19 nt, Artificial Sequence
  Description of Artificial Sequence: Synthetic oligonucleotide
auaacuaucuacagcuacg

SEQ ID NO: 45601 - RNA, 19 nt, Artificial Sequence
  Description of Artificial Sequence: Synthetic oligonucleotide
aguucuuggaugagaaagc

SEQ ID NO: 45602 - RNA, 19 nt, Artificial Sequence
  Description of Artificial Sequence: Synthetic oligonucleotide
ucgcccaucuaucauaugu

SEQ ID NO: 45603 - RNA, 19 nt, Artificial Sequence
  Description of Artificial Sequence: Synthetic oligonucleotide
cauacuagccuuucaugcc

SEQ ID NO: 45604 - RNA, 19 nt, Artificial Sequence
  Description of Artificial Sequence: Synthetic oligonucleotide
uuuuggacgagcgccaaag

SEQ ID NO: 45605 - RNA, 19 nt, Artificial Sequence
  Description of Artificial Sequence: Synthetic oligonucleotide
ugacaaagaguagauggag

SEQ ID NO: 45606 - RNA, 19 nt, Artificial Sequence
  Description of Artificial Sequence: Synthetic oligonucleotide
uuuggagaucccgaaaacc

SEQ ID NO: 45607 - RNA, 19 nt, Artificial Sequence
  Description of Artificial Sequence: Synthetic oligonucleotide
ucuaucauaugucgcugug

SEQ ID NO: 45608 - RNA, 19 nt, Artificial Sequence
  Description of Artificial Sequence: Synthetic oligonucleotide
guaauggacgcauuuauaa

SEQ ID NO: 45609 - RNA, 19 nt, Artificial Sequence
  Description of Artificial Sequence: Synthetic oligonucleotide
aauuaagucuggguaucag

SEQ ID NO: 45610 - RNA, 19 nt, Artificial Sequence
  Description of Artificial Sequence: Synthetic oligonucleotide
cagaggauacugaauaaug

SEQ ID NO: 45611 - RNA, 19 nt, Artificial Sequence
  Description of Artificial Sequence: Synthetic oligonucleotide
acaccuauuuaugaaauca

SEQ ID NO: 45612 - RNA, 19 nt, Artificial Sequence
  Description of Artificial Sequence: Synthetic oligonucleotide
aauaagcuggagggcaacg

SEQ ID NO: 45613 - RNA, 19 nt, Artificial Sequence
  Description of Artificial Sequence: Synthetic oligonucleotide
acuuucacggccgaggaag

SEQ ID NO: 45614 - RNA, 19 nt, Artificial Sequence
  Description of Artificial Sequence: Synthetic oligonucleotide
ucuacagcuacgucauacc

SEQ ID NO: 45615 - RNA, 19 nt, Artificial Sequence
  Description of Artificial Sequence: Synthetic oligonucleotide
gcacuugagaucuugauac

SEQ ID NO: 45616 - RNA, 19 nt, Artificial Sequence
  Description of Artificial Sequence: Synthetic oligonucleotide
cuggauuccgguaucgaag

SEQ ID NO: 45617 - RNA, 19 nt, Artificial Sequence
  Description of Artificial Sequence: Synthetic oligonucleotide
cucggcaccaccaucaauc

SEQ ID NO: 45618 - RNA, 19 nt, Artificial Sequence
  Description of Artificial Sequence: Synthetic oligonucleotide
cuuugcuuagaauugggga

SEQ ID NO: 45619 - RNA, 19 nt, Artificial Sequence
  Description of Artificial Sequence: Synthetic oligonucleotide
uuggguuucauauuccgua

SEQ ID NO: 45620 - RNA, 19 nt, Artificial Sequence
  Description of Artificial Sequence: Synthetic oligonucleotide
cauagcguugauacgacuc

SEQ ID NO: 45621 - RNA, 19 nt, Artificial Sequence
  Description of Artificial Sequence: Synthetic oligonucleotide
ugucuauugcuauuaugcu

SEQ ID NO: 45622 - RNA, 19 nt, Artificial Sequence
  Description of Artificial Sequence: Synthetic oligonucleotide
uuccauaucacagccuugc

SEQ ID NO: 45623 - RNA, 19 nt, Artificial Sequence
  Description of Artificial Sequence: Synthetic oligonucleotide
uauugcaauuaauuccacu

SEQ ID NO: 45624 - RNA, 19 nt, Artificial Sequence
  Description of Artificial Sequence: Synthetic oligonucleotide
ucuguuacccgaauguauu

SEQ ID NO: 45625 - RNA, 19 nt, Artificial Sequence
  Description of Artificial Sequence: Synthetic oligonucleotide
ccguaaaucgaacaaagcc

SEQ ID NO: 45626 - RNA, 19 nt, Artificial Sequence
  Description of Artificial Sequence: Synthetic oligonucleotide
uccguaaaucgaacaaagc

SEQ ID NO: 45627 - RNA, 19 nt, Artificial Sequence
  Description of Artificial Sequence: Synthetic oligonucleotide
ucccuauugcaauuaauuc

SEQ ID NO: 45628 - RNA, 19 nt, Artificial Sequence
  Description of Artificial Sequence: Synthetic oligonucleotide
aggauugggugacacaucu

SEQ ID NO: 45629 - RNA, 19 nt, Artificial Sequence
  Description of Artificial Sequence: Synthetic oligonucleotide
cuugaccugaaccauaaga

SEQ ID NO: 45630 - RNA, 19 nt, Artificial Sequence
  Description of Artificial Sequence: Synthetic oligonucleotide
cuuuaugaaaguuccaucu

SEQ ID NO: 45631 - RNA, 19 nt, Artificial Sequence
  Description of Artificial Sequence: Synthetic oligonucleotide
aaggcuacucaacauugaa

SEQ ID NO: 45632 - RNA, 19 nt, Artificial Sequence
  Description of Artificial Sequence: Synthetic oligonucleotide
aaagguuaagagcccacuu

SEQ ID NO: 45633 - RNA, 19 nt, Artificial Sequence
  Description of Artificial Sequence: Synthetic oligonucleotide
uaagucuacucugacuuug

SEQ ID NO: 45634 - RNA, 19 nt, Artificial Sequence
  Description of Artificial Sequence: Synthetic oligonucleotide
gcaaauaacuaucuacagc

SEQ ID NO: 45635 - RNA, 19 nt, Artificial Sequence
  Description of Artificial Sequence: Synthetic oligonucleotide
ugaccugaaccauaagaac

SEQ ID NO: 45636 - RNA, 19 nt, Artificial Sequence
  Description of Artificial Sequence: Synthetic oligonucleotide
uacccgaauguauucagac

SEQ ID NO: 45637 - RNA, 19 nt, Artificial Sequence
  Description of Artificial Sequence: Synthetic oligonucleotide
ucaaagacgcagccugugc

SEQ ID NO: 45638 - RNA, 19 nt, Artificial Sequence
  Description of Artificial Sequence: Synthetic oligonucleotide
accuauuuagcauaaucua

SEQ ID NO: 45639 - RNA, 19 nt, Artificial Sequence
  Description of Artificial Sequence: Synthetic oligonucleotide
uuggacgagcgccaaagga

SEQ ID NO: 45640 - RNA, 19 nt, Artificial Sequence
  Description of Artificial Sequence: Synthetic oligonucleotide
agccggacaccccucauac

SEQ ID NO: 45641 - RNA, 19 nt, Artificial Sequence
  Description of Artificial Sequence: Synthetic oligonucleotide
uuuggacgagcgccaaagg

SEQ ID NO: 45642 - RNA, 19 nt, Artificial Sequence
  Description of Artificial Sequence: Synthetic oligonucleotide
cccuauugcaauuaauucc

SEQ ID NO: 45643 - RNA, 19 nt, Artificial Sequence
  Description of Artificial Sequence: Synthetic oligonucleotide
augacgaguucuuggauga

SEQ ID NO: 45644 - RNA, 19 nt, Artificial Sequence
  Description of Artificial Sequence: Synthetic oligonucleotide
ugguaauggacgcauuuau

SEQ ID NO: 45645 - RNA, 19 nt, Artificial Sequence
  Description of Artificial Sequence: Synthetic oligonucleotide
uuaagcacuugagaucuug

SEQ ID NO: 45646 - RNA, 19 nt, Artificial Sequence
  Description of Artificial Sequence: Synthetic oligonucleotide
agcaauacuguuccgucgu

SEQ ID NO: 45647 - RNA, 19 nt, Artificial Sequence
  Description of Artificial Sequence: Synthetic oligonucleotide
acgcugauuccuuuaauga

SEQ ID NO: 45648 - RNA, 19 nt, Artificial Sequence
  Description of Artificial Sequence: Synthetic oligonucleotide
gauuccgguaucgaaggcc

SEQ ID NO: 45649 - RNA, 19 nt, Artificial Sequence
  Description of Artificial Sequence: Synthetic oligonucleotide
uucuguuacccgaauguau

SEQ ID NO: 45650 - RNA, 19 nt, Artificial Sequence
  Description of Artificial Sequence: Synthetic oligonucleotide
aaaauggaacacccaccgu

SEQ ID NO: 45651 - RNA, 19 nt, Artificial Sequence
  Description of Artificial Sequence: Synthetic oligonucleotide
cauuuuaggcucugucacc

SEQ ID NO: 45652 - RNA, 19 nt, Artificial Sequence
  Description of Artificial Sequence: Synthetic oligonucleotide
uccauaucacagccuugcg

SEQ ID NO: 45653 - RNA, 19 nt, Artificial Sequence
  Description of Artificial Sequence: Synthetic oligonucleotide
aaggggaauuaacugcuau

SEQ ID NO: 45654 - RNA, 19 nt, Artificial Sequence
  Description of Artificial Sequence: Synthetic oligonucleotide
auacuagccuuucaugccu

SEQ ID NO: 45655 - RNA, 19 nt, Artificial Sequence
  Description of Artificial Sequence: Synthetic oligonucleotide
gaaguauuccuauggcaga

SEQ ID NO: 45656 - RNA, 19 nt, Artificial Sequence
  Description of Artificial Sequence: Synthetic oligonucleotide
cauauuccguaaaucgaac

SEQ ID NO: 45657 - RNA, 19 nt, Artificial Sequence
  Description of Artificial Sequence: Synthetic oligonucleotide
guugauacgacuccaugaa

SEQ ID NO: 45658 - RNA, 19 nt, Artificial Sequence
  Description of Artificial Sequence: Synthetic oligonucleotide
cacgcugauuccuuuaaug

SEQ ID NO: 45659 - RNA, 19 nt, Artificial Sequence
  Description of Artificial Sequence: Synthetic oligonucleotide
agacccaacacuauuagau

SEQ ID NO: 45660 - RNA, 19 nt, Artificial Sequence
  Description of Artificial Sequence: Synthetic oligonucleotide
aggggaauuaacugcuaug

SEQ ID NO: 45661 - RNA, 19 nt, Artificial Sequence
  Description of Artificial Sequence: Synthetic oligonucleotide
ggacaaguaacuuacccca

SEQ ID NO: 45662 - RNA, 19 nt, Artificial Sequence
  Description of Artificial Sequence: Synthetic oligonucleotide
cuuugagacaccugagcuc

SEQ ID NO: 45663 - RNA, 19 nt, Artificial Sequence
  Description of Artificial Sequence: Synthetic oligonucleotide
aagcacuugagaucuugau

SEQ ID NO: 45664 - RNA, 19 nt, Artificial Sequence
  Description of Artificial Sequence: Synthetic oligonucleotide
uuaugcuuagguucagcau

SEQ ID NO: 45665 - RNA, 19 nt, Artificial Sequence
  Description of Artificial Sequence: Synthetic oligonucleotide
uucauagcguugauacgac

SEQ ID NO: 45666 - RNA, 19 nt, Artificial Sequence
  Description of Artificial Sequence: Synthetic oligonucleotide
gacgucuuuggagaucccg

SEQ ID NO: 45667 - RNA, 19 nt, Artificial Sequence
  Description of Artificial Sequence: Synthetic oligonucleotide
ucaagggguuauucaagca

SEQ ID NO: 45668 - RNA, 19 nt, Artificial Sequence
  Description of Artificial Sequence: Synthetic oligonucleotide
gguaaauaugugugcgagg

SEQ ID NO: 45669 - RNA, 19 nt, Artificial Sequence
  Description of Artificial Sequence: Synthetic oligonucleotide
auuuugcaccaccaagucu

SEQ ID NO: 45670 - RNA, 19 nt, Artificial Sequence
  Description of Artificial Sequence: Synthetic oligonucleotide
gcguucauagcguugauac

SEQ ID NO: 45671 - RNA, 19 nt, Artificial Sequence
  Description of Artificial Sequence: Synthetic oligonucleotide
uacaaugcacuaagucuac

SEQ ID NO: 45672 - RNA, 19 nt, Artificial Sequence
  Description of Artificial Sequence: Synthetic oligonucleotide
acagcuacgucauaccaua

SEQ ID NO: 45673 - RNA, 19 nt, Artificial Sequence
  Description of Artificial Sequence: Synthetic oligonucleotide
aacguccacccucuuugag

SEQ ID NO: 45674 - RNA, 19 nt, Artificial Sequence
  Description of Artificial Sequence: Synthetic oligonucleotide
auacccgccgagcuaccgc

SEQ ID NO: 45675 - RNA, 19 nt, Artificial Sequence
  Description of Artificial Sequence: Synthetic oligonucleotide
uguuacccgaauguauuca

SEQ ID NO: 45676 - RNA, 19 nt, Artificial Sequence
  Description of Artificial Sequence: Synthetic oligonucleotide
guaacuuaccccaggacuc

SEQ ID NO: 45677 - RNA, 19 nt, Artificial Sequence
  Description of Artificial Sequence: Synthetic oligonucleotide
uuacccgaauguauucaga

SEQ ID NO: 45678 - RNA, 19 nt, Artificial Sequence
  Description of Artificial Sequence: Synthetic oligonucleotide
uacagcuacgucauaccau

SEQ ID NO: 45679 - RNA, 19 nt, Artificial Sequence
  Description of Artificial Sequence: Synthetic oligonucleotide
ugauuucaggcacacgguu

SEQ ID NO: 45680 - RNA, 19 nt, Artificial Sequence
  Description of Artificial Sequence: Synthetic oligonucleotide
uuuuccgcuaggccgccgc

SEQ ID NO: 45681 - RNA, 19 nt, Artificial Sequence
  Description of Artificial Sequence: Synthetic oligonucleotide
ugauggauuuuggacgagc

SEQ ID NO: 45682 - RNA, 19 nt, Artificial Sequence
  Description of Artificial Sequence: Synthetic oligonucleotide
guaaaucgaacaaagccaa

SEQ ID NO: 45683 - RNA, 19 nt, Artificial Sequence
  Description of Artificial Sequence: Synthetic oligonucleotide
gaucccgaaaaccauuuua

SEQ ID NO: 45684 - RNA, 19 nt, Artificial Sequence
  Description of Artificial Sequence: Synthetic oligonucleotide
agcauguagacagaaguau

SEQ ID NO: 45685 - RNA, 19 nt, Artificial Sequence
  Description of Artificial Sequence: Synthetic oligonucleotide
auggacgcauuuauaaaag

SEQ ID NO: 45686 - RNA, 19 nt, Artificial Sequence
  Description of Artificial Sequence: Synthetic oligonucleotide
accuauuuaugaaaucaug

SEQ ID NO: 45687 - RNA, 19 nt, Artificial Sequence
  Description of Artificial Sequence: Synthetic oligonucleotide
ugguucaaagauuucuauu

SEQ ID NO: 45688 - RNA, 19 nt, Artificial Sequence
  Description of Artificial Sequence: Synthetic oligonucleotide
gcuacgucauaccauagac

SEQ ID NO: 45689 - RNA, 19 nt, Artificial Sequence
  Description of Artificial Sequence: Synthetic oligonucleotide
aaguucaaacagccuucug

SEQ ID NO: 45690 - RNA, 19 nt, Artificial Sequence
  Description of Artificial Sequence: Synthetic oligonucleotide
uauuaugcuuagguucagc

SEQ ID NO: 45691 - RNA, 19 nt, Artificial Sequence
  Description of Artificial Sequence: Synthetic oligonucleotide
gcagguaaauaugugugcg

SEQ ID NO: 45692 - RNA, 19 nt, Artificial Sequence
  Description of Artificial Sequence: Synthetic oligonucleotide
gauuaccaccaaaucuucc

SEQ ID NO: 45693 - RNA, 19 nt, Artificial Sequence
  Description of Artificial Sequence: Synthetic oligonucleotide
gacgcauuuauaaaagacu

SEQ ID NO: 45694 - RNA, 19 nt, Artificial Sequence
  Description of Artificial Sequence: Synthetic oligonucleotide
uauuccuaaauugguuuaa

SEQ ID NO: 45695 - RNA, 19 nt, Artificial Sequence
  Description of Artificial Sequence: Synthetic oligonucleotide
gacccaacacuauuagauc

SEQ ID NO: 45696 - RNA, 19 nt, Artificial Sequence
  Description of Artificial Sequence: Synthetic oligonucleotide
ccuauugcaauuaauucca

SEQ ID NO: 45697 - RNA, 19 nt, Artificial Sequence
  Description of Artificial Sequence: Synthetic oligonucleotide
gauacgacuccaugaaaua

SEQ ID NO: 45698 - RNA, 19 nt, Artificial Sequence
  Description of Artificial Sequence: Synthetic oligonucleotide
agcacuugagaucuugaua

SEQ ID NO: 45699 - RNA, 19 nt, Artificial Sequence
  Description of Artificial Sequence: Synthetic oligonucleotide
cacacucucucaccaaagc

SEQ ID NO: 45700 - RNA, 19 nt, Artificial Sequence
  Description of Artificial Sequence: Synthetic oligonucleotide
uccacccucuuugagacac

SEQ ID NO: 45701 - RNA, 19 nt, Artificial Sequence
  Description of Artificial Sequence: Synthetic oligonucleotide
guuagaaaaggagcucccc

SEQ ID NO: 45702 - RNA, 19 nt, Artificial Sequence
  Description of Artificial Sequence: Synthetic oligonucleotide
cuuuggagaucccgaaaac

SEQ ID NO: 45703 - RNA, 19 nt, Artificial Sequence
  Description of Artificial Sequence: Synthetic oligonucleotide
cacccaccgucaaagacgc

SEQ ID NO: 45704 - RNA, 19 nt, Artificial Sequence
  Description of Artificial Sequence: Synthetic oligonucleotide
gacaccuauuuaugaaauc

SEQ ID NO: 45705 - RNA, 19 nt, Artificial Sequence
  Description of Artificial Sequence: Synthetic oligonucleotide
agacacuggauuccgguau

SEQ ID NO: 45706 - RNA, 19 nt, Artificial Sequence
  Description of Artificial Sequence: Synthetic oligonucleotide
cccgaaaaccauuuuaaug

SEQ ID NO: 45707 - RNA, 19 nt, Artificial Sequence
  Description of Artificial Sequence: Synthetic oligonucleotide
aauaugugugcgaggcuga

SEQ ID NO: 45708 - RNA, 19 nt, Artificial Sequence
  Description of Artificial Sequence: Synthetic oligonucleotide
gucuacucugacuuuguga

SEQ ID NO: 45709 - RNA, 19 nt, Artificial Sequence
  Description of Artificial Sequence: Synthetic oligonucleotide
agggcaacggcuuaccauu

SEQ ID NO: 45710 - RNA, 19 nt, Artificial Sequence
  Description of Artificial Sequence: Synthetic oligonucleotide
cuauuuagcauaaucuaau

SEQ ID NO: 45711 - RNA, 19 nt, Artificial Sequence
  Description of Artificial Sequence: Synthetic oligonucleotide
uugauacgacuccaugaaa

SEQ ID NO: 45712 - RNA, 19 nt, Artificial Sequence
  Description of Artificial Sequence: Synthetic oligonucleotide
gugaugacgaguucuugga

SEQ ID NO: 45713 - RNA, 19 nt, Artificial Sequence
  Description of Artificial Sequence: Synthetic oligonucleotide
acuggauuccgguaucgaa

SEQ ID NO: 45714 - RNA, 19 nt, Artificial Sequence
  Description of Artificial Sequence: Synthetic oligonucleotide
uccauacuggcagaagaac

SEQ ID NO: 45715 - RNA, 19 nt, Artificial Sequence
  Description of Artificial Sequence: Synthetic oligonucleotide
ucaguucacgugcccacac

SEQ ID NO: 45716 - RNA, 19 nt, Artificial Sequence
  Description of Artificial Sequence: Synthetic oligonucleotide
uugcuauuaugcuuagguu

SEQ ID NO: 45717 - RNA, 19 nt, Artificial Sequence
  Description of Artificial Sequence: Synthetic oligonucleotide
cugcaaagcacaccacaag

SEQ ID NO: 45718 - RNA, 19 nt, Artificial Sequence
  Description of Artificial Sequence: Synthetic oligonucleotide
gacaauaggcagagucuag

SEQ ID NO: 45719 - RNA, 19 nt, Artificial Sequence
  Description of Artificial Sequence: Synthetic oligonucleotide
agcuacgucauaccauaga

SEQ ID NO: 45720 - RNA, 19 nt, Artificial Sequence
  Description of Artificial Sequence: Synthetic oligonucleotide
ugggcaaccuuaucaucug

SEQ ID NO: 45721 - RNA, 19 nt, Artificial Sequence
  Description of Artificial Sequence: Synthetic oligonucleotide
agcuaguaacuucaguauu

SEQ ID NO: 45722 - RNA, 19 nt, Artificial Sequence
  Description of Artificial Sequence: Synthetic oligonucleotide
guaucgaaggccacaugcc

SEQ ID NO: 45723 - RNA, 19 nt, Artificial Sequence
  Description of Artificial Sequence: Synthetic oligonucleotide
cauuaagcacuugagaucu

SEQ ID NO: 45724 - RNA, 19 nt, Artificial Sequence
  Description of Artificial Sequence: Synthetic oligonucleotide
uaacuuaccccaggacucc

SEQ ID NO: 45725 - RNA, 19 nt, Artificial Sequence
  Description of Artificial Sequence: Synthetic oligonucleotide
uucaacuaaaguggguuuu

SEQ ID NO: 45726 - RNA, 19 nt, Artificial Sequence
  Description of Artificial Sequence: Synthetic oligonucleotide
aauucagguaagggcauua

SEQ ID NO: 45727 - RNA, 19 nt, Artificial Sequence
  Description of Artificial Sequence: Synthetic oligonucleotide
aucccuauugcaauuaauu

SEQ ID NO: 45728 - RNA, 19 nt, Artificial Sequence
  Description of Artificial Sequence: Synthetic oligonucleotide
gcccaucuaucauaugucg

SEQ ID NO: 45729 - RNA, 19 nt, Artificial Sequence
  Description of Artificial Sequence: Synthetic oligonucleotide
accccuuugaaugaccagu

SEQ ID NO: 45730 - RNA, 19 nt, Artificial Sequence
  Description of Artificial Sequence: Synthetic oligonucleotide
guaauagugcaagugcuaa

SEQ ID NO: 45731 - RNA, 19 nt, Artificial Sequence
  Description of Artificial Sequence: Synthetic oligonucleotide
cguaaaucgaacaaagcca

SEQ ID NO: 45732 - RNA, 19 nt, Artificial Sequence
  Description of Artificial Sequence: Synthetic oligonucleotide
cuauugcaauuaauuccac

SEQ ID NO: 45733 - RNA, 19 nt, Artificial Sequence
  Description of Artificial Sequence: Synthetic oligonucleotide
uugauauggucugcuacaa

SEQ ID NO: 45734 - RNA, 19 nt, Artificial Sequence
  Description of Artificial Sequence: Synthetic oligonucleotide
ccgaaaaccauuuuaaugu

SEQ ID NO: 45735 - RNA, 19 nt, Artificial Sequence
  Description of Artificial Sequence: Synthetic oligonucleotide
cuuagaauuggggaguuua

SEQ ID NO: 45736 - RNA, 19 nt, Artificial Sequence
  Description of Artificial Sequence: Synthetic oligonucleotide
ugauauggucugcuacaaa

SEQ ID NO: 45737 - RNA, 19 nt, Artificial Sequence
  Description of Artificial Sequence: Synthetic oligonucleotide
ucuguacaacgcccaacaa

SEQ ID NO: 45738 - RNA, 19 nt, Artificial Sequence
  Description of Artificial Sequence: Synthetic oligonucleotide
cuuucacggccgaggaagc

SEQ ID NO: 45739 - RNA, 19 nt, Artificial Sequence
  Description of Artificial Sequence: Synthetic oligonucleotide
cagaauaagcuggagggca

SEQ ID NO: 45740 - RNA, 19 nt, Artificial Sequence
  Description of Artificial Sequence: Synthetic oligonucleotide
ggacgcauuuauaaaagac

SEQ ID NO: 45741 - RNA, 19 nt, Artificial Sequence
  Description of Artificial Sequence: Synthetic oligonucleotide
ggaauuaacugcuaugaau

SEQ ID NO: 45742 - RNA, 19 nt, Artificial Sequence
  Description of Artificial Sequence: Synthetic oligonucleotide
cauucagggcugcaaaaca

SEQ ID NO: 45743 - RNA, 19 nt, Artificial Sequence
  Description of Artificial Sequence: Synthetic oligonucleotide
ucauagcguugauacgacu

SEQ ID NO: 45744 - RNA, 19 nt, Artificial Sequence
  Description of Artificial Sequence: Synthetic oligonucleotide
cuacucugacuuugugagc

SEQ ID NO: 45745 - RNA, 19 nt, Artificial Sequence
  Description of Artificial Sequence: Synthetic oligonucleotide
ggggaauuaacugcuauga

SEQ ID NO: 45746 - RNA, 19 nt, Artificial Sequence
  Description of Artificial Sequence: Synthetic oligonucleotide
aucccgaaaaccauuuuaa

SEQ ID NO: 45747 - RNA, 19 nt, Artificial Sequence
  Description of Artificial Sequence: Synthetic oligonucleotide
cuguuacccgaauguauuc

SEQ ID NO: 45748 - RNA, 19 nt, Artificial Sequence
  Description of Artificial Sequence: Synthetic oligonucleotide
ucgucuucuguuacccgaa

SEQ ID NO: 45749 - RNA, 19 nt, Artificial Sequence
  Description of Artificial Sequence: Synthetic oligonucleotide
gcuauuaugcuuagguuca

SEQ ID NO: 45750 - RNA, 19 nt, Artificial Sequence
  Description of Artificial Sequence: Synthetic oligonucleotide
uggcuaucauugcucucug

SEQ ID NO: 45751 - RNA, 19 nt, Artificial Sequence
  Description of Artificial Sequence: Synthetic oligonucleotide
cucgucuucuguuacccga

SEQ ID NO: 45752 - RNA, 19 nt, Artificial Sequence
  Description of Artificial Sequence: Synthetic oligonucleotide
auacgacuccaugaaauaa

SEQ ID NO: 45753 - RNA, 19 nt, Artificial Sequence
  Description of Artificial Sequence: Synthetic oligonucleotide
ggcacccaaagcuaguaac

SEQ ID NO: 45754 - RNA, 19 nt, Artificial Sequence
  Description of Artificial Sequence: Synthetic oligonucleotide
uguucauaacaagucucua

SEQ ID NO: 45755 - RNA, 19 nt, Artificial Sequence
  Description of Artificial Sequence: Synthetic oligonucleotide
cuguacaacgcccaacaaa

SEQ ID NO: 45756 - RNA, 19 nt, Artificial Sequence
  Description of Artificial Sequence: Synthetic oligonucleotide
cgugaugacgaguucuugg

SEQ ID NO: 45757 - RNA, 19 nt, Artificial Sequence
  Description of Artificial Sequence: Synthetic oligonucleotide
cuacagcuacgucauacca

SEQ ID NO: 45758 - RNA, 19 nt, Artificial Sequence
  Description of Artificial Sequence: Synthetic oligonucleotide
gauacccgccgagcuaccg

SEQ ID NO: 45759 - RNA, 19 nt, Artificial Sequence
  Description of Artificial Sequence: Synthetic oligonucleotide
aggagcccgauacccgccg

SEQ ID NO: 45760 - RNA, 19 nt, Artificial Sequence
  Description of Artificial Sequence: Synthetic oligonucleotide
gacacuggauuccgguauc

SEQ ID NO: 45761 - RNA, 19 nt, Artificial Sequence
  Description of Artificial Sequence: Synthetic oligonucleotide
ggugaugaauccauuugac

SEQ ID NO: 45762 - RNA, 19 nt, Artificial Sequence
  Description of Artificial Sequence: Synthetic oligonucleotide
ucguacauuauuggcuauc

SEQ ID NO: 45763 - RNA, 19 nt, Artificial Sequence
  Description of Artificial Sequence: Synthetic oligonucleotide
cagcaguugacagagggga

SEQ ID NO: 45764 - RNA, 19 nt, Artificial Sequence
  Description of Artificial Sequence: Synthetic oligonucleotide
gaagccggaacggcgagga

SEQ ID NO: 45765 - RNA, 19 nt, Artificial Sequence
  Description of Artificial Sequence: Synthetic oligonucleotide
aagucuacucugacuuugu

SEQ ID NO: 45766 - RNA, 19 nt, Artificial Sequence
  Description of Artificial Sequence: Synthetic oligonucleotide
ccuauuuagcauaaucuaa

SEQ ID NO: 45767 - RNA, 19 nt, Artificial Sequence
  Description of Artificial Sequence: Synthetic oligonucleotide
auaaagaguagcggauaaa

SEQ ID NO: 45768 - RNA, 19 nt, Artificial Sequence
  Description of Artificial Sequence: Synthetic oligonucleotide
gaauaagcuggagggcaac

SEQ ID NO: 45769 - RNA, 19 nt, Artificial Sequence
  Description of Artificial Sequence: Synthetic oligonucleotide
augcuuagguucagcauug

SEQ ID NO: 45770 - RNA, 19 nt, Artificial Sequence
  Description of Artificial Sequence: Synthetic oligonucleotide
uucaucccuauugcaauua

SEQ ID NO: 45771 - RNA, 19 nt, Artificial Sequence
  Description of Artificial Sequence: Synthetic oligonucleotide
gguaagggcauuaggaaaa

SEQ ID NO: 45772 - RNA, 19 nt, Artificial Sequence
  Description of Artificial Sequence: Synthetic oligonucleotide
uacuagccuuucaugccuc

SEQ ID NO: 45773 - RNA, 19 nt, Artificial Sequence
  Description of Artificial Sequence: Synthetic oligonucleotide
augauuucaggcacacggu

SEQ ID NO: 45774 - RNA, 19 nt, Artificial Sequence
  Description of Artificial Sequence: Synthetic oligonucleotide
cagguaaauaugugugcga

SEQ ID NO: 45775 - RNA, 19 nt, Artificial Sequence
  Description of Artificial Sequence: Synthetic oligonucleotide
ugcuuagguucagcauugg

SEQ ID NO: 45776 - RNA, 19 nt, Artificial Sequence
  Description of Artificial Sequence: Synthetic oligonucleotide
uaugugugcgaggcugaug

SEQ ID NO: 45777 - RNA, 19 nt, Artificial Sequence
  Description of Artificial Sequence: Synthetic oligonucleotide
gggcauuaggaaaacuacc

SEQ ID NO: 45778 - RNA, 19 nt, Artificial Sequence
  Description of Artificial Sequence: Synthetic oligonucleotide
uucaguucacgugcccaca

SEQ ID NO: 45779 - RNA, 19 nt, Artificial Sequence
  Description of Artificial Sequence: Synthetic oligonucleotide
caacccuccccacuaguuc

SEQ ID NO: 45780 - RNA, 19 nt, Artificial Sequence
  Description of Artificial Sequence: Synthetic oligonucleotide
ggaggaagccggaacggcg

SEQ ID NO: 45781 - RNA, 19 nt, Artificial Sequence
  Description of Artificial Sequence: Synthetic oligonucleotide
auggucaaguuuccaguua

SEQ ID NO: 45782 - RNA, 19 nt, Artificial Sequence
  Description of Artificial Sequence: Synthetic oligonucleotide
cccaucuaucauaugucgc

SEQ ID NO: 45783 - RNA, 19 nt, Artificial Sequence
  Description of Artificial Sequence: Synthetic oligonucleotide
caagugcaaaccaagggau

SEQ ID NO: 45784 - RNA, 19 nt, Artificial Sequence
  Description of Artificial Sequence: Synthetic oligonucleotide
cauauaccagauugcccca

SEQ ID NO: 45785 - RNA, 19 nt, Artificial Sequence
  Description of Artificial Sequence: Synthetic oligonucleotide
agcccgauacccgccgagc

SEQ ID NO: 45786 - RNA, 19 nt, Artificial Sequence
  Description of Artificial Sequence: Synthetic oligonucleotide
cacuaguucuuaaagcuau

SEQ ID NO: 45787 - RNA, 19 nt, Artificial Sequence
  Description of Artificial Sequence: Synthetic oligonucleotide
uacccgccgagcuaccgcu

SEQ ID NO: 45788 - RNA, 19 nt, Artificial Sequence
  Description of Artificial Sequence: Synthetic oligonucleotide
cccaacacuauuagaucag

SEQ ID NO: 45789 - RNA, 19 nt, Artificial Sequence
  Description of Artificial Sequence: Synthetic oligonucleotide
cuauuaugcuuagguucag

SEQ ID NO: 45790 - RNA, 19 nt, Artificial Sequence
  Description of Artificial Sequence: Synthetic oligonucleotide
uagcguugauacgacucca

SEQ ID NO: 45791 - RNA, 19 nt, Artificial Sequence
  Description of Artificial Sequence: Synthetic oligonucleotide
ccccacuaguucuuaaagc

SEQ ID NO: 45792 - RNA, 19 nt, Artificial Sequence
  Description of Artificial Sequence: Synthetic oligonucleotide
ugcacgcgcucucuccugu

SEQ ID NO: 45793 - RNA, 19 nt, Artificial Sequence
  Description of Artificial Sequence: Synthetic oligonucleotide
accaucgcccaucuaucau

SEQ ID NO: 45794 - RNA, 19 nt, Artificial Sequence
  Description of Artificial Sequence: Synthetic oligonucleotide
cacaucuaaaagguuucca

SEQ ID NO: 45795 - RNA, 19 nt, Artificial Sequence
  Description of Artificial Sequence: Synthetic oligonucleotide
augcaugacaggugaugaa

SEQ ID NO: 45796 - RNA, 19 nt, Artificial Sequence
  Description of Artificial Sequence: Synthetic oligonucleotide
cccaguucucaguaguuac

SEQ ID NO: 45797 - RNA, 19 nt, Artificial Sequence
  Description of Artificial Sequence: Synthetic oligonucleotide
gucuauugcuauuaugcuu

SEQ ID NO: 45798 - RNA, 19 nt, Artificial Sequence
  Description of Artificial Sequence: Synthetic oligonucleotide
cuaucauaugucgcuguga

SEQ ID NO: 45799 - RNA, 19 nt, Artificial Sequence
  Description of Artificial Sequence: Synthetic oligonucleotide
acagaugcucaagaaucaa

SEQ ID NO: 45800 - RNA, 19 nt, Artificial Sequence
  Description of Artificial Sequence: Synthetic oligonucleotide
uucacggccgaggaagcau

SEQ ID NO: 45801 - RNA, 19 nt, Artificial Sequence
  Description of Artificial Sequence: Synthetic oligonucleotide
aacuuaccccaggacuccu

SEQ ID NO: 45802 - RNA, 19 nt, Artificial Sequence
  Description of Artificial Sequence: Synthetic oligonucleotide
gagcccgauacccgccgag

SEQ ID NO: 45803 - RNA, 19 nt, Artificial Sequence
  Description of Artificial Sequence: Synthetic oligonucleotide
agaauaagcuggagggcaa

SEQ ID NO: 45804 - RNA, 19 nt, Artificial Sequence
  Description of Artificial Sequence: Synthetic oligonucleotide
ugacgaguucuuggaugag

SEQ ID NO: 45805 - RNA, 19 nt, Artificial Sequence
  Description of Artificial Sequence: Synthetic oligonucleotide
auuuuggacgagcgccaaa

SEQ ID NO: 45806 - RNA, 19 nt, Artificial Sequence
  Description of Artificial Sequence: Synthetic oligonucleotide
guguucauaacaagucucu

SEQ ID NO: 45807 - RNA, 19 nt, Artificial Sequence
  Description of Artificial Sequence: Synthetic oligonucleotide
caauaggcagagucuagcu

SEQ ID NO: 45808 - RNA, 19 nt, Artificial Sequence
  Description of Artificial Sequence: Synthetic oligonucleotide
cagcuacgucauaccauag

SEQ ID NO: 45809 - RNA, 19 nt, Artificial Sequence
  Description of Artificial Sequence: Synthetic oligonucleotide
ugcguucauagcguugaua

SEQ ID NO: 45810 - RNA, 19 nt, Artificial Sequence
  Description of Artificial Sequence: Synthetic oligonucleotide
aagccggaacggcgaggag

SEQ ID NO: 45811 - RNA, 19 nt, Artificial Sequence
  Description of Artificial Sequence: Synthetic oligonucleotide
gacucauggcugacaaaga

SEQ ID NO: 45812 - RNA, 19 nt, Artificial Sequence
  Description of Artificial Sequence: Synthetic oligonucleotide
cugugguucaaagauuucu

SEQ ID NO: 45813 - RNA, 19 nt, Artificial Sequence
  Description of Artificial Sequence: Synthetic oligonucleotide
acaugccccuggaaacugg

SEQ ID NO: 45814 - RNA, 19 nt, Artificial Sequence
  Description of Artificial Sequence: Synthetic oligonucleotide
aggcuacucaacauugaaa

SEQ ID NO: 45815 - RNA, 19 nt, Artificial Sequence
  Description of Artificial Sequence: Synthetic oligonucleotide
agaucccgaaaaccauuuu

SEQ ID NO: 45816 - RNA, 19 nt, Artificial Sequence
  Description of Artificial Sequence: Synthetic oligonucleotide
aggcacacgguuucuuguu

SEQ ID NO: 45817 - RNA, 19 nt, Artificial Sequence
  Description of Artificial Sequence: Synthetic oligonucleotide
gcguugauacgacuccaug

SEQ ID NO: 45818 - RNA, 19 nt, Artificial Sequence
  Description of Artificial Sequence: Synthetic oligonucleotide
cagacaacccuccccacua

SEQ ID NO: 45819 - RNA, 19 nt, Artificial Sequence
  Description of Artificial Sequence: Synthetic oligonucleotide
gguuccauaucacagccuu

SEQ ID NO: 45820 - RNA, 19 nt, Artificial Sequence
  Description of Artificial Sequence: Synthetic oligonucleotide
ccaaagguuaagagcccac

SEQ ID NO: 45821 - RNA, 19 nt, Artificial Sequence
  Description of Artificial Sequence: Synthetic oligonucleotide
cguugauacgacuccauga

SEQ ID NO: 45822 - RNA, 19 nt, Artificial Sequence
  Description of Artificial Sequence: Synthetic oligonucleotide
cacaggauugggugacaca

SEQ ID NO: 45823 - RNA, 19 nt, Artificial Sequence
  Description of Artificial Sequence: Synthetic oligonucleotide
cuaauucagguaagggcau

SEQ ID NO: 45824 - RNA, 19 nt, Artificial Sequence
  Description of Artificial Sequence: Synthetic oligonucleotide
cccuaagcaauuguuugac

SEQ ID NO: 45825 - RNA, 19 nt, Artificial Sequence
  Description of Artificial Sequence: Synthetic oligonucleotide
ccaucuaucauaugucgcu

SEQ ID NO: 45826 - RNA, 19 nt, Artificial Sequence
  Description of Artificial Sequence: Synthetic oligonucleotide
acgucauaccauagacaug

SEQ ID NO: 45827 - RNA, 19 nt, Artificial Sequence
  Description of Artificial Sequence: Synthetic oligonucleotide
ggcaaccuuaucaucugca

SEQ ID NO: 45828 - RNA, 19 nt, Artificial Sequence
  Description of Artificial Sequence: Synthetic oligonucleotide
caccaucgcccaucuauca

SEQ ID NO: 45829 - RNA, 19 nt, Artificial Sequence
  Description of Artificial Sequence: Synthetic oligonucleotide
gcuuagguucagcauugga

SEQ ID NO: 45830 - RNA, 19 nt, Artificial Sequence
  Description of Artificial Sequence: Synthetic oligonucleotide
gguuaagagcccacuucac

SEQ ID NO: 45831 - RNA, 19 nt, Artificial Sequence
  Description of Artificial Sequence: Synthetic oligonucleotide
cuucuguuacccgaaugua

SEQ ID NO: 45832 - RNA, 19 nt, Artificial Sequence
  Description of Artificial Sequence: Synthetic oligonucleotide
ggauuccgguaucgaaggc

SEQ ID NO: 45833 - RNA, 19 nt, Artificial Sequence
  Description of Artificial Sequence: Synthetic oligonucleotide
augcacgcugauuccuuua

SEQ ID NO: 45834 - RNA, 19 nt, Artificial Sequence
  Description of Artificial Sequence: Synthetic oligonucleotide
aucgcccaucuaucauaug

SEQ ID NO: 45835 - RNA, 19 nt, Artificial Sequence
  Description of Artificial Sequence: Synthetic oligonucleotide
cugauggauuuuggacgag

SEQ ID NO: 45836 - RNA, 19 nt, Artificial Sequence
  Description of Artificial Sequence: Synthetic oligonucleotide
ggauuuuggacgagcgcca

SEQ ID NO: 45837 - RNA, 19 nt, Artificial Sequence
  Description of Artificial Sequence: Synthetic oligonucleotide
auaugcacgcugauuccuu

SEQ ID NO: 45838 - RNA, 19 nt, Artificial Sequence
  Description of Artificial Sequence: Synthetic oligonucleotide
gccggaacggcgaggagcc

SEQ ID NO: 45839 - RNA, 19 nt, Artificial Sequence
  Description of Artificial Sequence: Synthetic oligonucleotide
guacaacgcccaacaaaca

SEQ ID NO: 45840 - RNA, 19 nt, Artificial Sequence
  Description of Artificial Sequence: Synthetic oligonucleotide
auaugugugcgaggcugau

SEQ ID NO: 45841 - RNA, 19 nt, Artificial Sequence
  Description of Artificial Sequence: Synthetic oligonucleotide
cccaauggacauuucuaca

SEQ ID NO: 45842 - RNA, 19 nt, Artificial Sequence
  Description of Artificial Sequence: Synthetic oligonucleotide
agagcccacuucacuuaag

SEQ ID NO: 45843 - RNA, 19 nt, Artificial Sequence
  Description of Artificial Sequence: Synthetic oligonucleotide
ccgaauguauucagacauc

SEQ ID NO: 45844 - RNA, 19 nt, Artificial Sequence
  Description of Artificial Sequence: Synthetic oligonucleotide
gguaauggacgcauuuaua

SEQ ID NO: 45845 - RNA, 19 nt, Artificial Sequence
  Description of Artificial Sequence: Synthetic oligonucleotide
caaagguuaagagcccacu

SEQ ID NO: 45846 - RNA, 19 nt, Artificial Sequence
  Description of Artificial Sequence: Synthetic oligonucleotide
ccgaggaagcaucugucuc

SEQ ID NO: 45847 - RNA, 19 nt, Artificial Sequence
  Description of Artificial Sequence: Synthetic oligonucleotide
ggacgagcgccaaaggaga

SEQ ID NO: 45848 - RNA, 19 nt, Artificial Sequence
  Description of Artificial Sequence: Synthetic oligonucleotide
cccgaauguauucagacau

SEQ ID NO: 45849 - RNA, 19 nt, Artificial Sequence
  Description of Artificial Sequence: Synthetic oligonucleotide
agcgugaugacgaguucuu

SEQ ID NO: 45850 - RNA, 19 nt, Artificial Sequence
  Description of Artificial Sequence: Synthetic oligonucleotide
agcguugauacgacuccau

SEQ ID NO: 45851 - RNA, 19 nt, Artificial Sequence
  Description of Artificial Sequence: Synthetic oligonucleotide
gagaucccgaaaaccauuu

SEQ ID NO: 45852 - RNA, 19 nt, Artificial Sequence
  Description of Artificial Sequence: Synthetic oligonucleotide
caucguucucgucuucugu

SEQ ID NO: 45853 - RNA, 19 nt, Artificial Sequence
  Description of Artificial Sequence: Synthetic oligonucleotide
cugcacgcgcucucuccug

SEQ ID NO: 45854 - RNA, 19 nt, Artificial Sequence
  Description of Artificial Sequence: Synthetic oligonucleotide
cgaggagcccgauacccgc

SEQ ID NO: 45855 - RNA, 19 nt, Artificial Sequence
  Description of Artificial Sequence: Synthetic oligonucleotide
caucccuauugcaauuaau

SEQ ID NO: 45856 - RNA, 19 nt, Artificial Sequence
  Description of Artificial Sequence: Synthetic oligonucleotide
ccuaagcaauuguuugaca

SEQ ID NO: 45857 - RNA, 19 nt, Artificial Sequence
  Description of Artificial Sequence: Synthetic oligonucleotide
acgagcgccaaaggagaaa

SEQ ID NO: 45858 - RNA, 19 nt, Artificial Sequence
  Description of Artificial Sequence: Synthetic oligonucleotide
caccccucauacacugaga

SEQ ID NO: 45859 - RNA, 19 nt, Artificial Sequence
  Description of Artificial Sequence: Synthetic oligonucleotide
caucgcccaucuaucauau

SEQ ID NO: 45860 - RNA, 19 nt, Artificial Sequence
  Description of Artificial Sequence: Synthetic oligonucleotide
gguucagcauuggauauau

SEQ ID NO: 45861 - RNA, 19 nt, Artificial Sequence
  Description of Artificial Sequence: Synthetic oligonucleotide
agccuuccaugaccaguaa

SEQ ID NO: 45862 - RNA, 19 nt, Artificial Sequence
  Description of Artificial Sequence: Synthetic oligonucleotide
ccgauacccgccgagcuac

SEQ ID NO: 45863 - RNA, 19 nt, Artificial Sequence
  Description of Artificial Sequence: Synthetic oligonucleotide
gggagggaaguacaaguau

SEQ ID NO: 45864 - RNA, 19 nt, Artificial Sequence
  Description of Artificial Sequence: Synthetic oligonucleotide
gacgagcgccaaaggagaa

SEQ ID NO: 45865 - RNA, 19 nt, Artificial Sequence
  Description of Artificial Sequence: Synthetic oligonucleotide
gcaauacuguuccgucguc

SEQ ID NO: 45866 - RNA, 19 nt, Artificial Sequence
  Description of Artificial Sequence: Synthetic oligonucleotide
gacaccccucauacacuga

SEQ ID NO: 45867 - RNA, 19 nt, Artificial Sequence
  Description of Artificial Sequence: Synthetic oligonucleotide
ggaaaacuaccaacacgaa

SEQ ID NO: 45868 - RNA, 19 nt, Artificial Sequence
  Description of Artificial Sequence: Synthetic oligonucleotide
cuaagucuacucugacuuu

SEQ ID NO: 45869 - RNA, 19 nt, Artificial Sequence
  Description of Artificial Sequence: Synthetic oligonucleotide
gggagacccaacacuauua

SEQ ID NO: 45870 - RNA, 19 nt, Artificial Sequence
  Description of Artificial Sequence: Synthetic oligonucleotide
ccacuaguucuuaaagcua

SEQ ID NO: 45871 - RNA, 19 nt, Artificial Sequence
  Description of Artificial Sequence: Synthetic oligonucleotide
acggccgaggaagcaucug

SEQ ID NO: 45872 - RNA, 19 nt, Artificial Sequence
  Description of Artificial Sequence: Synthetic oligonucleotide
cacuggauuccgguaucga

SEQ ID NO: 45873 - RNA, 19 nt, Artificial Sequence
  Description of Artificial Sequence: Synthetic oligonucleotide
ggagggcaacggcuuacca

SEQ ID NO: 45874 - RNA, 19 nt, Artificial Sequence
  Description of Artificial Sequence: Synthetic oligonucleotide
gcacccaaagcuaguaacu

SEQ ID NO: 45875 - RNA, 19 nt, Artificial Sequence
  Description of Artificial Sequence: Synthetic oligonucleotide
auuaagcacuugagaucuu

SEQ ID NO: 45876 - RNA, 19 nt, Artificial Sequence
  Description of Artificial Sequence: Synthetic oligonucleotide
ccaacacuauuagaucaga

SEQ ID NO: 45877 - RNA, 19 nt, Artificial Sequence
  Description of Artificial Sequence: Synthetic oligonucleotide
ccauaucacagccuugcgu

SEQ ID NO: 45878 - RNA, 19 nt, Artificial Sequence
  Description of Artificial Sequence: Synthetic oligonucleotide
caugaccaguaagucuuua

SEQ ID NO: 45879 - RNA, 19 nt, Artificial Sequence
  Description of Artificial Sequence: Synthetic oligonucleotide
ggauauaugcacgcugauu

SEQ ID NO: 45880 - RNA, 19 nt, Artificial Sequence
  Description of Artificial Sequence: Synthetic oligonucleotide
ccaucgcccaucuaucaua

SEQ ID NO: 45881 - RNA, 19 nt, Artificial Sequence
  Description of Artificial Sequence: Synthetic oligonucleotide
gcgugaugacgaguucuug

SEQ ID NO: 45882 - RNA, 19 nt, Artificial Sequence
  Description of Artificial Sequence: Synthetic oligonucleotide
aacgcccaacaaacaccuu

SEQ ID NO: 45883 - RNA, 19 nt, Artificial Sequence
  Description of Artificial Sequence: Synthetic oligonucleotide
ucacagccuugcguucaua

SEQ ID NO: 45884 - RNA, 19 nt, Artificial Sequence
  Description of Artificial Sequence: Synthetic oligonucleotide
cggaacggcgaggagcccg

SEQ ID NO: 45885 - RNA, 19 nt, Artificial Sequence
  Description of Artificial Sequence: Synthetic oligonucleotide
guccacccucuuugagaca

SEQ ID NO: 45886 - RNA, 19 nt, Artificial Sequence
  Description of Artificial Sequence: Synthetic oligonucleotide
cacccaaagcuaguaacuu

SEQ ID NO: 45887 - RNA, 19 nt, Artificial Sequence
  Description of Artificial Sequence: Synthetic oligonucleotide
cccugaaugguuugggaau

SEQ ID NO: 45888 - RNA, 19 nt, Artificial Sequence
  Description of Artificial Sequence: Synthetic oligonucleotide
ggaacggcgaggagcccga

SEQ ID NO: 45889 - RNA, 19 nt, Artificial Sequence
  Description of Artificial Sequence: Synthetic oligonucleotide
cugacuuugugagcaucau

SEQ ID NO: 45890 - RNA, 19 nt, Artificial Sequence
  Description of Artificial Sequence: Synthetic oligonucleotide
cagccggacaccccucaua

SEQ ID NO: 45891 - RNA, 19 nt, Artificial Sequence
  Description of Artificial Sequence: Synthetic oligonucleotide
ggagaucccgaaaaccauu

SEQ ID NO: 45892 - RNA, 19 nt, Artificial Sequence
  Description of Artificial Sequence: Synthetic oligonucleotide
ggagcccgauacccgccga

SEQ ID NO: 45893 - RNA, 19 nt, Artificial Sequence
  Description of Artificial Sequence: Synthetic oligonucleotide
cacggccgaggaagcaucu

SEQ ID NO: 45894 - RNA, 19 nt, Artificial Sequence
  Description of Artificial Sequence: Synthetic oligonucleotide
ggacgucuuuggagauccc

SEQ ID NO: 45895 - RNA, 19 nt, Artificial Sequence
  Description of Artificial Sequence: Synthetic oligonucleotide
gcccgauacccgccgagcu

SEQ ID NO: 45896 - RNA, 19 nt, Artificial Sequence
  Description of Artificial Sequence: Synthetic oligonucleotide
cgauacccgccgagcuacc

SEQ ID NO: 45897 - RNA, 19 nt, Artificial Sequence
  Description of Artificial Sequence: Synthetic oligonucleotide
cgguaucgaaggccacaug

SEQ ID NO: 45898 - RNA, 19 nt, Artificial Sequence
  Description of Artificial Sequence: Synthetic oligonucleotide
cccgauacccgccgagcua

SEQ ID NO: 45899 - RNA, 19 nt, Artificial Sequence
  Description of Artificial Sequence: Synthetic oligonucleotide
gcuuagaauuggggaguuu

SEQ ID NO: 45900 - RNA, 19 nt, Artificial Sequence
  Description of Artificial Sequence: Synthetic oligonucleotide
ccgguaucgaaggccacau

SEQ ID NO: 45901 - RNA, 19 nt, Artificial Sequence
  Description of Artificial Sequence: Synthetic oligonucleotide
gaacggcgaggagcccgau

SEQ ID NO: 45902 - RNA, 19 nt, Artificial Sequence
  Description of Artificial Sequence: Synthetic oligonucleotide
ccggaacggcgaggagccc

SEQ ID NO: 45903 - RNA, 19 nt, Artificial Sequence
  Description of Artificial Sequence: Synthetic oligonucleotide
ccccuggaaacugggcagu

SEQ ID NO: 45904 - RNA, 19 nt, Artificial Sequence
  Description of Artificial Sequence: Synthetic oligonucleotide
ccagccggacaccccucau

SEQ ID NO: 45905 - RNA, 19 nt, Artificial Sequence
  Description of Artificial Sequence: Synthetic oligonucleotide
aauaucuuggcuuaaugcc

SEQ ID NO: 45906 - RNA, 19 nt, Artificial Sequence
  Description of Artificial Sequence: Synthetic oligonucleotide
cuuguaugaaauuauaggg

SEQ ID NO: 45907 - RNA, 19 nt, Artificial Sequence
  Description of Artificial Sequence: Synthetic oligonucleotide
agaacauacgccuaaacac

SEQ ID NO: 45908 - RNA, 19 nt, Artificial Sequence
  Description of Artificial Sequence: Synthetic oligonucleotide
uuuacaauaaguuuccuga

SEQ ID NO: 45909 - RNA, 19 nt, Artificial Sequence
  Description of Artificial Sequence: Synthetic oligonucleotide
aaauaguucacauugaaua

SEQ ID NO: 45910 - RNA, 19 nt, Artificial Sequence
  Description of Artificial Sequence: Synthetic oligonucleotide
auauguuuuacuccuaagc

SEQ ID NO: 45911 - RNA, 19 nt, Artificial Sequence
  Description of Artificial Sequence: Synthetic oligonucleotide
aacuugauuagguugggcg

SEQ ID NO: 45912 - RNA, 19 nt, Artificial Sequence
  Description of Artificial Sequence: Synthetic oligonucleotide
uaaccuuaaacucaugucc

SEQ ID NO: 45913 - RNA, 19 nt, Artificial Sequence
  Description of Artificial Sequence: Synthetic oligonucleotide
uguaugaaauuauagggcc

SEQ ID NO: 45914 - RNA, 19 nt, Artificial Sequence
  Description of Artificial Sequence: Synthetic oligonucleotide
ugucuaaugaauaucugag

SEQ ID NO: 45915 - RNA, 19 nt, Artificial Sequence
  Description of Artificial Sequence: Synthetic oligonucleotide
guugagacgaaguauaucc

SEQ ID NO: 45916 - RNA, 19 nt, Artificial Sequence
  Description of Artificial Sequence: Synthetic oligonucleotide
aacauauuaugguacacug

SEQ ID NO: 45917 - RNA, 19 nt, Artificial Sequence
  Description of Artificial Sequence: Synthetic oligonucleotide
aauggaaugggacaaacaa

SEQ ID NO: 45918 - RNA, 19 nt, Artificial Sequence
  Description of Artificial Sequence: Synthetic oligonucleotide
guuguaauaaggcugacug

SEQ ID NO: 45919 - RNA, 19 nt, Artificial Sequence
  Description of Artificial Sequence: Synthetic oligonucleotide
uaaguuuccugaaagggag

SEQ ID NO: 45920 - RNA, 19 nt, Artificial Sequence
  Description of Artificial Sequence: Synthetic oligonucleotide
cauugaauaauucuagggc

SEQ ID NO: 45921 - RNA, 19 nt, Artificial Sequence
  Description of Artificial Sequence: Synthetic oligonucleotide
uuauccauccauuagagau

SEQ ID NO: 45922 - RNA, 19 nt, Artificial Sequence
  Description of Artificial Sequence: Synthetic oligonucleotide
aaacugcuagcacaaauuc

SEQ ID NO: 45923 - RNA, 19 nt, Artificial Sequence
  Description of Artificial Sequence: Synthetic oligonucleotide
uauagguuguuccacauac

SEQ ID NO: 45924 - RNA, 19 nt, Artificial Sequence
  Description of Artificial Sequence: Synthetic oligonucleotide
aaagguaucuaaauaguuc

SEQ ID NO: 45925 - RNA, 19 nt, Artificial Sequence
  Description of Artificial Sequence: Synthetic oligonucleotide
uuguaugaaauuauagggc

SEQ ID NO: 45926 - RNA, 19 nt, Artificial Sequence
  Description of Artificial Sequence: Synthetic oligonucleotide
uguuaaguguucaaaaggu

SEQ ID NO: 45927 - RNA, 19 nt, Artificial Sequence
  Description of Artificial Sequence: Synthetic oligonucleotide
uggcgauuaaacauaaucc

SEQ ID NO: 45928 - RNA, 19 nt, Artificial Sequence
  Description of Artificial Sequence: Synthetic oligonucleotide
aauagauaauaacucuucu

SEQ ID NO: 45929 - RNA, 19 nt, Artificial Sequence
  Description of Artificial Sequence: Synthetic oligonucleotide
aacacgcucaacaauuucc

SEQ ID NO: 45930 - RNA, 19 nt, Artificial Sequence
  Description of Artificial Sequence: Synthetic oligonucleotide
ucacaaguggaucugacug

SEQ ID NO: 45931 - RNA, 19 nt, Artificial Sequence
  Description of Artificial Sequence: Synthetic oligonucleotide
aaacauuaacuuaguagcc

SEQ ID NO: 45932 - RNA, 19 nt, Artificial Sequence
  Description of Artificial Sequence: Synthetic oligonucleotide
auugaauacagaagcaacc

SEQ ID NO: 45933 - RNA, 19 nt, Artificial Sequence
  Description of Artificial Sequence: Synthetic oligonucleotide
auugugaggagugacaaac

SEQ ID NO: 45934 - RNA, 19 nt, Artificial Sequence
  Description of Artificial Sequence: Synthetic oligonucleotide
ugauuauccauccauuaga

SEQ ID NO: 45935 - RNA, 19 nt, Artificial Sequence
  Description of Artificial Sequence: Synthetic oligonucleotide
ugccuauugacauacuccg

SEQ ID NO: 45936 - RNA, 19 nt, Artificial Sequence
  Description of Artificial Sequence: Synthetic oligonucleotide
ugugauuaaggacccaugc

SEQ ID NO: 45937 - RNA, 19 nt, Artificial Sequence
  Description of Artificial Sequence: Synthetic oligonucleotide
aauguucaacagccuaacc

SEQ ID NO: 45938 - RNA, 19 nt, Artificial Sequence
  Description of Artificial Sequence: Synthetic oligonucleotide
uggugaaucacuuuagcug

SEQ ID NO: 45939 - RNA, 19 nt, Artificial Sequence
  Description of Artificial Sequence: Synthetic oligonucleotide
aguguuaugauuauccauc

SEQ ID NO: 45940 - RNA, 19 nt, Artificial Sequence
  Description of Artificial Sequence: Synthetic oligonucleotide
cuuagauacagcauccagc

SEQ ID NO: 45941 - RNA, 19 nt, Artificial Sequence
  Description of Artificial Sequence: Synthetic oligonucleotide
agauauuguugccugaauc

SEQ ID NO: 45942 - RNA, 19 nt, Artificial Sequence
  Description of Artificial Sequence: Synthetic oligonucleotide
ucaacuaacuuguagaauu

SEQ ID NO: 45943 - RNA, 19 nt, Artificial Sequence
  Description of Artificial Sequence: Synthetic oligonucleotide
aacaguaccaauccucaug

SEQ ID NO: 45944 - RNA, 19 nt, Artificial Sequence
  Description of Artificial Sequence: Synthetic oligonucleotide
uuggcgauuaaacauaauc

SEQ ID NO: 45945 - RNA, 19 nt, Artificial Sequence
  Description of Artificial Sequence: Synthetic oligonucleotide
uguguuucagccaugaauu

SEQ ID NO: 45946 - RNA, 19 nt, Artificial Sequence
  Description of Artificial Sequence: Synthetic oligonucleotide
ugugaaucacauuaauuca

SEQ ID NO: 45947 - RNA, 19 nt, Artificial Sequence
  Description of Artificial Sequence: Synthetic oligonucleotide
uuuuagacgcuucuguucu

SEQ ID NO: 45948 - RNA, 19 nt, Artificial Sequence
  Description of Artificial Sequence: Synthetic oligonucleotide
ugaguauauguuuuacucc

SEQ ID NO: 45949 - RNA, 19 nt, Artificial Sequence
  Description of Artificial Sequence: Synthetic oligonucleotide
ucuuauaccauauccacua

SEQ ID NO: 45950 - RNA, 19 nt, Artificial Sequence
  Description of Artificial Sequence: Synthetic oligonucleotide
cauuaauucacuugcugag

SEQ ID NO: 45951 - RNA, 19 nt, Artificial Sequence
  Description of Artificial Sequence: Synthetic oligonucleotide
ugauuaaggacccaugcau

SEQ ID NO: 45952 - RNA, 19 nt, Artificial Sequence
  Description of Artificial Sequence: Synthetic oligonucleotide
aaacucaugucccucucag

SEQ ID NO: 45953 - RNA, 19 nt, Artificial Sequence
  Description of Artificial Sequence: Synthetic oligonucleotide
ugauuguagauuuuaucca

SEQ ID NO: 45954 - RNA, 19 nt, Artificial Sequence
  Description of Artificial Sequence: Synthetic oligonucleotide
cucucuaugcaucuaaggc

SEQ ID NO: 45955 - RNA, 19 nt, Artificial Sequence
  Description of Artificial Sequence: Synthetic oligonucleotide
guuauaacuggccugguac

SEQ ID NO: 45956 - RNA, 19 nt, Artificial Sequence
  Description of Artificial Sequence: Synthetic oligonucleotide
ucucuaugcaucuaaggca

SEQ ID NO: 45957 - RNA, 19 nt, Artificial Sequence
  Description of Artificial Sequence: Synthetic oligonucleotide
ugccauaagaucuuguacu

SEQ ID NO: 45958 - RNA, 19 nt, Artificial Sequence
  Description of Artificial Sequence: Synthetic oligonucleotide
uggcuuaaugccaugaaac

SEQ ID NO: 45959 - RNA, 19 nt, Artificial Sequence
  Description of Artificial Sequence: Synthetic oligonucleotide
auuugguaugcuucuaauc

SEQ ID NO: 45960 - RNA, 19 nt, Artificial Sequence
  Description of Artificial Sequence: Synthetic oligonucleotide
uuacuccuaagcaagggug

SEQ ID NO: 45961 - RNA, 19 nt, Artificial Sequence
  Description of Artificial Sequence: Synthetic oligonucleotide
gaaauuauagggccccugc

SEQ ID NO: 45962 - RNA, 19 nt, Artificial Sequence
  Description of Artificial Sequence: Synthetic oligonucleotide
ugaauaucuuggcuuaaug

SEQ ID NO: 45963 - RNA, 19 nt, Artificial Sequence
  Description of Artificial Sequence: Synthetic oligonucleotide
cagcuuauccaauacauac

SEQ ID NO: 45964 - RNA, 19 nt, Artificial Sequence
  Description of Artificial Sequence: Synthetic oligonucleotide
caacauugaaucuuguaug

SEQ ID NO: 45965 - RNA, 19 nt, Artificial Sequence
  Description of Artificial Sequence: Synthetic oligonucleotide
acgacuguuguaauaaggc

SEQ ID NO: 45966 - RNA, 19 nt, Artificial Sequence
  Description of Artificial Sequence: Synthetic oligonucleotide
uuuacuugucccagcuugg

SEQ ID NO: 45967 - RNA, 19 nt, Artificial Sequence
  Description of Artificial Sequence: Synthetic oligonucleotide
ugaguagcugauuaccugc

SEQ ID NO: 45968 - RNA, 19 nt, Artificial Sequence
  Description of Artificial Sequence: Synthetic oligonucleotide
agcugcuagacauaaccac

SEQ ID NO: 45969 - RNA, 19 nt, Artificial Sequence
  Description of Artificial Sequence: Synthetic oligonucleotide
augauuauccauccauuag

SEQ ID NO: 45970 - RNA, 19 nt, Artificial Sequence
  Description of Artificial Sequence: Synthetic oligonucleotide
uuaaccuuaaacucauguc

SEQ ID NO: 45971 - RNA, 19 nt, Artificial Sequence
  Description of Artificial Sequence: Synthetic oligonucleotide
gauuaaacauaauccugug

SEQ ID NO: 45972 - RNA, 19 nt, Artificial Sequence
  Description of Artificial Sequence: Synthetic oligonucleotide
uccaauuuaacgggaaaag

SEQ ID NO: 45973 - RNA, 19 nt, Artificial Sequence
  Description of Artificial Sequence: Synthetic oligonucleotide
aauuauagggccccugcau

SEQ ID NO: 45974 - RNA, 19 nt, Artificial Sequence
  Description of Artificial Sequence: Synthetic oligonucleotide
uuugaguagcugauuaccu

SEQ ID NO: 45975 - RNA, 19 nt, Artificial Sequence
  Description of Artificial Sequence: Synthetic oligonucleotide
cugauauccaucccgcugg

SEQ ID NO: 45976 - RNA, 19 nt, Artificial Sequence
  Description of Artificial Sequence: Synthetic oligonucleotide
cucuaaauccauuggcagg

SEQ ID NO: 45977 - RNA, 19 nt, Artificial Sequence
  Description of Artificial Sequence: Synthetic oligonucleotide
aaagguuuacuugucccag

SEQ ID NO: 45978 - RNA, 19 nt, Artificial Sequence
  Description of Artificial Sequence: Synthetic oligonucleotide
auaaagcugacaauuguag

SEQ ID NO: 45979 - RNA, 19 nt, Artificial Sequence
  Description of Artificial Sequence: Synthetic oligonucleotide
aaguguuaugauuauccau

SEQ ID NO: 45980 - RNA, 19 nt, Artificial Sequence
  Description of Artificial Sequence: Synthetic oligonucleotide
uuucugaauaucuuggcuu

SEQ ID NO: 45981 - RNA, 19 nt, Artificial Sequence
  Description of Artificial Sequence: Synthetic oligonucleotide
ugcugaguguucauuugcg

SEQ ID NO: 45982 - RNA, 19 nt, Artificial Sequence
  Description of Artificial Sequence: Synthetic oligonucleotide
ucgcuugaaauucugcuga

SEQ ID NO: 45983 - RNA, 19 nt, Artificial Sequence
  Description of Artificial Sequence: Synthetic oligonucleotide
uuuuacuccuaagcaaggg

SEQ ID NO: 45984 - RNA, 19 nt, Artificial Sequence
  Description of Artificial Sequence: Synthetic oligonucleotide
ugaagugaguuuaccaccu

SEQ ID NO: 45985 - RNA, 19 nt, Artificial Sequence
  Description of Artificial Sequence: Synthetic oligonucleotide
aaauuauagggccccugca

SEQ ID NO: 45986 - RNA, 19 nt, Artificial Sequence
  Description of Artificial Sequence: Synthetic oligonucleotide
cugaagugaguuuaccacc

SEQ ID NO: 45987 - RNA, 19 nt, Artificial Sequence
  Description of Artificial Sequence: Synthetic oligonucleotide
gaucaauuggcuccuuuug

SEQ ID NO: 45988 - RNA, 19 nt, Artificial Sequence
  Description of Artificial Sequence: Synthetic oligonucleotide
accuauaccaauuuaggua

SEQ ID NO: 45989 - RNA, 19 nt, Artificial Sequence
  Description of Artificial Sequence: Synthetic oligonucleotide
uuuaacgggaaaagcugug

SEQ ID NO: 45990 - RNA, 19 nt, Artificial Sequence
  Description of Artificial Sequence: Synthetic oligonucleotide
uccauuagagauuuucauc

SEQ ID NO: 45991 - RNA, 19 nt, Artificial Sequence
  Description of Artificial Sequence: Synthetic oligonucleotide
gauauuguugccugaaucu

SEQ ID NO: 45992 - RNA, 19 nt, Artificial Sequence
  Description of Artificial Sequence: Synthetic oligonucleotide
aauagugugcuaaaggcua

SEQ ID NO: 45993 - RNA, 19 nt, Artificial Sequence
  Description of Artificial Sequence: Synthetic oligonucleotide
uacgccuaaacacugcuaa

SEQ ID NO: 45994 - RNA, 19 nt, Artificial Sequence
  Description of Artificial Sequence: Synthetic oligonucleotide
cucaagaugacgcuuagga

SEQ ID NO: 45995 - RNA, 19 nt, Artificial Sequence
  Description of Artificial Sequence: Synthetic oligonucleotide
uaugauuauccauccauua

SEQ ID NO: 45996 - RNA, 19 nt, Artificial Sequence
  Description of Artificial Sequence: Synthetic oligonucleotide
aggagaauucaauuaagau

SEQ ID NO: 45997 - RNA, 19 nt, Artificial Sequence
  Description of Artificial Sequence: Synthetic oligonucleotide
guaccuauaccaauuuagg

SEQ ID NO: 45998 - RNA, 19 nt, Artificial Sequence
  Description of Artificial Sequence: Synthetic oligonucleotide
aguaucgugugcaaggcuc

SEQ ID NO: 45999 - RNA, 19 nt, Artificial Sequence
  Description of Artificial Sequence: Synthetic oligonucleotide
uaaacacugcuaaacuuuc

SEQ ID NO: 46000 - RNA, 19 nt, Artificial Sequence
  Description of Artificial Sequence: Synthetic oligonucleotide
guuugcuccacuuggugag

SEQ ID NO: 46001 - RNA, 19 nt, Artificial Sequence
  Description of Artificial Sequence: Synthetic oligonucleotide
cacgacuguuguaauaagg

SEQ ID NO: 46002 - RNA, 19 nt, Artificial Sequence
  Description of Artificial Sequence: Synthetic oligonucleotide
acagaacauacgccuaaac

SEQ ID NO: 46003 - RNA, 19 nt, Artificial Sequence
  Description of Artificial Sequence: Synthetic oligonucleotide
ugaagggcgguaaccauca

SEQ ID NO: 46004 - RNA, 19 nt, Artificial Sequence
  Description of Artificial Sequence: Synthetic oligonucleotide
ugguacaaggguugagacg

SEQ ID NO: 46005 - RNA, 19 nt, Artificial Sequence
  Description of Artificial Sequence: Synthetic oligonucleotide
ucaaacugcuagcacaaau

SEQ ID NO: 46006 - RNA, 19 nt, Artificial Sequence
  Description of Artificial Sequence: Synthetic oligonucleotide
acuccguagauucuaccuc

SEQ ID NO: 46007 - RNA, 19 nt, Artificial Sequence
  Description of Artificial Sequence: Synthetic oligonucleotide
uaaagcugacaauuguagu

SEQ ID NO: 46008 - RNA, 19 nt, Artificial Sequence
  Description of Artificial Sequence: Synthetic oligonucleotide
agauauuaucaccccauga

SEQ ID NO: 46009 - RNA, 19 nt, Artificial Sequence
  Description of Artificial Sequence: Synthetic oligonucleotide
cuugugugauuaaggaccc

SEQ ID NO: 46010 - RNA, 19 nt, Artificial Sequence
  Description of Artificial Sequence: Synthetic oligonucleotide
cugauuaccugcuugaaaa

SEQ ID NO: 46011 - RNA, 19 nt, Artificial Sequence
  Description of Artificial Sequence: Synthetic oligonucleotide
uugaguagcugauuaccug

SEQ ID NO: 46012 - RNA, 19 nt, Artificial Sequence
  Description of Artificial Sequence: Synthetic oligonucleotide
uaccuauaccaauuuaggu

SEQ ID NO: 46013 - RNA, 19 nt, Artificial Sequence
  Description of Artificial Sequence: Synthetic oligonucleotide
ucuccgucaaacugcauac

SEQ ID NO: 46014 - RNA, 19 nt, Artificial Sequence
  Description of Artificial Sequence: Synthetic oligonucleotide
ccauugaauaauucuaggg

SEQ ID NO: 46015 - RNA, 19 nt, Artificial Sequence
  Description of Artificial Sequence: Synthetic oligonucleotide
uuaugauuauccauccauu

SEQ ID NO: 46016 - RNA, 19 nt, Artificial Sequence
  Description of Artificial Sequence: Synthetic oligonucleotide
aacagaggcccguucauau

SEQ ID NO: 46017 - RNA, 19 nt, Artificial Sequence
  Description of Artificial Sequence: Synthetic oligonucleotide
caugaauugccuauugaca

SEQ ID NO: 46018 - RNA, 19 nt, Artificial Sequence
  Description of Artificial Sequence: Synthetic oligonucleotide
uaacuggagauauuaucac

SEQ ID NO: 46019 - RNA, 19 nt, Artificial Sequence
  Description of Artificial Sequence: Synthetic oligonucleotide
acugcuagcacaaauucca

SEQ ID NO: 46020 - RNA, 19 nt, Artificial Sequence
  Description of Artificial Sequence: Synthetic oligonucleotide
ggcgguaaccaucauaucc

SEQ ID NO: 46021 - RNA, 19 nt, Artificial Sequence
  Description of Artificial Sequence: Synthetic oligonucleotide
uauugacauacuccguaga

SEQ ID NO: 46022 - RNA, 19 nt, Artificial Sequence
  Description of Artificial Sequence: Synthetic oligonucleotide
gaguauauguuuuacuccu

SEQ ID NO: 46023 - RNA, 19 nt, Artificial Sequence
  Description of Artificial Sequence: Synthetic oligonucleotide
uugcuuagcauaaggaauu

SEQ ID NO: 46024 - RNA, 19 nt, Artificial Sequence
  Description of Artificial Sequence: Synthetic oligonucleotide
aaagauauuguugccugaa

SEQ ID NO: 46025 - RNA, 19 nt, Artificial Sequence
  Description of Artificial Sequence: Synthetic oligonucleotide
uuauaacuggccugguacu

SEQ ID NO: 46026 - RNA, 19 nt, Artificial Sequence
  Description of Artificial Sequence: Synthetic oligonucleotide
ugcccacucaucuacuugc

SEQ ID NO: 46027 - RNA, 19 nt, Artificial Sequence
  Description of Artificial Sequence: Synthetic oligonucleotide
uacuccguagauucuaccu

SEQ ID NO: 46028 - RNA, 19 nt, Artificial Sequence
  Description of Artificial Sequence: Synthetic oligonucleotide
uuggcuuaaugccaugaaa

SEQ ID NO: 46029 - RNA, 19 nt, Artificial Sequence
  Description of Artificial Sequence: Synthetic oligonucleotide
uccaguugucuaaugaaua

SEQ ID NO: 46030 - RNA, 19 nt, Artificial Sequence
  Description of Artificial Sequence: Synthetic oligonucleotide
gcuuauccaauacauacug

SEQ ID NO: 46031 - RNA, 19 nt, Artificial Sequence
  Description of Artificial Sequence: Synthetic oligonucleotide
aauuuucaggcugcagaag

SEQ ID NO: 46032 - RNA, 19 nt, Artificial Sequence
  Description of Artificial Sequence: Synthetic oligonucleotide
uuuuggcgauuaaacauaa

SEQ ID NO: 46033 - RNA, 19 nt, Artificial Sequence
  Description of Artificial Sequence: Synthetic oligonucleotide
uggaauguucaacagccua

SEQ ID NO: 46034 - RNA, 19 nt, Artificial Sequence
  Description of Artificial Sequence: Synthetic oligonucleotide
gccgcauuuacauugauuc

SEQ ID NO: 46035 - RNA, 19 nt, Artificial Sequence
  Description of Artificial Sequence: Synthetic oligonucleotide
guguuaugauuauccaucc

SEQ ID NO: 46036 - RNA, 19 nt, Artificial Sequence
  Description of Artificial Sequence: Synthetic oligonucleotide
uuuggccagaugacuagug

SEQ ID NO: 46037 - RNA, 19 nt, Artificial Sequence
  Description of Artificial Sequence: Synthetic oligonucleotide
gauuagugaccacaaugca

SEQ ID NO: 46038 - RNA, 19 nt, Artificial Sequence
  Description of Artificial Sequence: Synthetic oligonucleotide
uaaggacccaugcauaauu

SEQ ID NO: 46039 - RNA, 19 nt, Artificial Sequence
  Description of Artificial Sequence: Synthetic oligonucleotide
uuagguugggcgagucuag

SEQ ID NO: 46040 - RNA, 19 nt, Artificial Sequence
  Description of Artificial Sequence: Synthetic oligonucleotide
cauauugaacaccguuugc

SEQ ID NO: 46041 - RNA, 19 nt, Artificial Sequence
  Description of Artificial Sequence: Synthetic oligonucleotide
ugguaugcuucuaaucagu

SEQ ID NO: 46042 - RNA, 19 nt, Artificial Sequence
  Description of Artificial Sequence: Synthetic oligonucleotide
acauauuaugguacacugg

SEQ ID NO: 46043 - RNA, 19 nt, Artificial Sequence
  Description of Artificial Sequence: Synthetic oligonucleotide
cauuagagauuuucaucag

SEQ ID NO: 46044 - RNA, 19 nt, Artificial Sequence
  Description of Artificial Sequence: Synthetic oligonucleotide
aacauacgccuaaacacug

SEQ ID NO: 46045 - RNA, 19 nt, Artificial Sequence
  Description of Artificial Sequence: Synthetic oligonucleotide
ucgggacacaccacgacug

SEQ ID NO: 46046 - RNA, 19 nt, Artificial Sequence
  Description of Artificial Sequence: Synthetic oligonucleotide
uccgucaaacugcauacuc

SEQ ID NO: 46047 - RNA, 19 nt, Artificial Sequence
  Description of Artificial Sequence: Synthetic oligonucleotide
gugugcaaggcucaagaug

SEQ ID NO: 46048 - RNA, 19 nt, Artificial Sequence
  Description of Artificial Sequence: Synthetic oligonucleotide
ucauuugcggcaucccucu

SEQ ID NO: 46049 - RNA, 19 nt, Artificial Sequence
  Description of Artificial Sequence: Synthetic oligonucleotide
ucuaaucagucggugcucc

SEQ ID NO: 46050 - RNA, 19 nt, Artificial Sequence
  Description of Artificial Sequence: Synthetic oligonucleotide
ccuuguuucagaucagucc

SEQ ID NO: 46051 - RNA, 19 nt, Artificial Sequence
  Description of Artificial Sequence: Synthetic oligonucleotide
cagaacauacgccuaaaca

SEQ ID NO: 46052 - RNA, 19 nt, Artificial Sequence
  Description of Artificial Sequence: Synthetic oligonucleotide
gguacaaggguugagacga

SEQ ID NO: 46053 - RNA, 19 nt, Artificial Sequence
  Description of Artificial Sequence: Synthetic oligonucleotide
ugcguggaaacccaguguu

SEQ ID NO: 46054 - RNA, 19 nt, Artificial Sequence
  Description of Artificial Sequence: Synthetic oligonucleotide
gugaaucacauuaauucac

SEQ ID NO: 46055 - RNA, 19 nt, Artificial Sequence
  Description of Artificial Sequence: Synthetic oligonucleotide
guuuugaguagcugauuac

SEQ ID NO: 46056 - RNA, 19 nt, Artificial Sequence
  Description of Artificial Sequence: Synthetic oligonucleotide
cuugauuagguugggcgag

SEQ ID NO: 46057 - RNA, 19 nt, Artificial Sequence
  Description of Artificial Sequence: Synthetic oligonucleotide
uuaacgggaaaagcuguga

SEQ ID NO: 46058 - RNA, 19 nt, Artificial Sequence
  Description of Artificial Sequence: Synthetic oligonucleotide
uccagaucauaccccauau

SEQ ID NO: 46059 - RNA, 19 nt, Artificial Sequence
  Description of Artificial Sequence: Synthetic oligonucleotide
auagguugugcugauacaa

SEQ ID NO: 46060 - RNA, 19 nt, Artificial Sequence
  Description of Artificial Sequence: Synthetic oligonucleotide
gcugaagugaguuuaccac

SEQ ID NO: 46061 - RNA, 19 nt, Artificial Sequence
  Description of Artificial Sequence: Synthetic oligonucleotide
ugaaauuauagggccccug

SEQ ID NO: 46062 - RNA, 19 nt, Artificial Sequence
  Description of Artificial Sequence: Synthetic oligonucleotide
auuaauucacuugcugagu

SEQ ID NO: 46063 - RNA, 19 nt, Artificial Sequence
  Description of Artificial Sequence: Synthetic oligonucleotide
gaauguucaacagccuaac

SEQ ID NO: 46064 - RNA, 19 nt, Artificial Sequence
  Description of Artificial Sequence: Synthetic oligonucleotide
caacuaacuuguagaauuc

SEQ ID NO: 46065 - RNA, 19 nt, Artificial Sequence
  Description of Artificial Sequence: Synthetic oligonucleotide
agaucauaccccauauuug

SEQ ID NO: 46066 - RNA, 19 nt, Artificial Sequence
  Description of Artificial Sequence: Synthetic oligonucleotide
cuuguuucagaucaguccu

SEQ ID NO: 46067 - RNA, 19 nt, Artificial Sequence
  Description of Artificial Sequence: Synthetic oligonucleotide
uagugcucaaacugcuagc

SEQ ID NO: 46068 - RNA, 19 nt, Artificial Sequence
  Description of Artificial Sequence: Synthetic oligonucleotide
uucuagggcugauuguaga

SEQ ID NO: 46069 - RNA, 19 nt, Artificial Sequence
  Description of Artificial Sequence: Synthetic oligonucleotide
auuauagggccccugcauu

SEQ ID NO: 46070 - RNA, 19 nt, Artificial Sequence
  Description of Artificial Sequence: Synthetic oligonucleotide
aucuccgucaaacugcaua

SEQ ID NO: 46071 - RNA, 19 nt, Artificial Sequence
  Description of Artificial Sequence: Synthetic oligonucleotide
ccaugaauugccuauugac

SEQ ID NO: 46072 - RNA, 19 nt, Artificial Sequence
  Description of Artificial Sequence: Synthetic oligonucleotide
uaccaauccucauguaagu

SEQ ID NO: 46073 - RNA, 19 nt, Artificial Sequence
  Description of Artificial Sequence: Synthetic oligonucleotide
agccuaauuugcauuuugg

SEQ ID NO: 46074 - RNA, 19 nt, Artificial Sequence
  Description of Artificial Sequence: Synthetic oligonucleotide
uugugaggagugacaaaca

SEQ ID NO: 46075 - RNA, 19 nt, Artificial Sequence
  Description of Artificial Sequence: Synthetic oligonucleotide
cauccauuagagauuuuca

SEQ ID NO: 46076 - RNA, 19 nt, Artificial Sequence
  Description of Artificial Sequence: Synthetic oligonucleotide
cucuaugcaucuaaggcaa

SEQ ID NO: 46077 - RNA, 19 nt, Artificial Sequence
  Description of Artificial Sequence: Synthetic oligonucleotide
auuuaacgggaaaagcugu

SEQ ID NO: 46078 - RNA, 19 nt, Artificial Sequence
  Description of Artificial Sequence: Synthetic oligonucleotide
acuguguauagccacuguu

SEQ ID NO: 46079 - RNA, 19 nt, Artificial Sequence
  Description of Artificial Sequence: Synthetic oligonucleotide
gucuaaugaauaucugaga

SEQ ID NO: 46080 - RNA, 19 nt, Artificial Sequence
  Description of Artificial Sequence: Synthetic oligonucleotide
gguaacauauuaugguaca

SEQ ID NO: 46081 - RNA, 19 nt, Artificial Sequence
  Description of Artificial Sequence: Synthetic oligonucleotide
uccaacauugaaucuugua

SEQ ID NO: 46082 - RNA, 19 nt, Artificial Sequence
  Description of Artificial Sequence: Synthetic oligonucleotide
cugcauuugugccauaaga

SEQ ID NO: 46083 - RNA, 19 nt, Artificial Sequence
  Description of Artificial Sequence: Synthetic oligonucleotide
cauugauuccacugcuaug

SEQ ID NO: 46084 - RNA, 19 nt, Artificial Sequence
  Description of Artificial Sequence: Synthetic oligonucleotide
ggacccaugcauaauuugg

SEQ ID NO: 46085 - RNA, 19 nt, Artificial Sequence
  Description of Artificial Sequence: Synthetic oligonucleotide
cuuagcauaaggaauuaau

SEQ ID NO: 46086 - RNA, 19 nt, Artificial Sequence
  Description of Artificial Sequence: Synthetic oligonucleotide
ucaaaccuuguuucagauc

SEQ ID NO: 46087 - RNA, 19 nt, Artificial Sequence
  Description of Artificial Sequence: Synthetic oligonucleotide
gugauuaaggacccaugca

SEQ ID NO: 46088 - RNA, 19 nt, Artificial Sequence
  Description of Artificial Sequence: Synthetic oligonucleotide
cauacuccguagauucuac

SEQ ID NO: 46089 - RNA, 19 nt, Artificial Sequence
  Description of Artificial Sequence: Synthetic oligonucleotide
aaacaguaccaauccucau

SEQ ID NO: 46090 - RNA, 19 nt, Artificial Sequence
  Description of Artificial Sequence: Synthetic oligonucleotide
aggacccaugcauaauuug

SEQ ID NO: 46091 - RNA, 19 nt, Artificial Sequence
  Description of Artificial Sequence: Synthetic oligonucleotide
uuugagaaugaagggcggu

SEQ ID NO: 46092 - RNA, 19 nt, Artificial Sequence
  Description of Artificial Sequence: Synthetic oligonucleotide
guuugagaaugaagggcgg

SEQ ID NO: 46093 - RNA, 19 nt, Artificial Sequence
  Description of Artificial Sequence: Synthetic oligonucleotide
ugaauugccuauugacaua

SEQ ID NO: 46094 - RNA, 19 nt, Artificial Sequence
  Description of Artificial Sequence: Synthetic oligonucleotide
agcauuaaguugauaggca

SEQ ID NO: 46095 - RNA, 19 nt, Artificial Sequence
  Description of Artificial Sequence: Synthetic oligonucleotide
accaauccucauguaaguc

SEQ ID NO: 46096 - RNA, 19 nt, Artificial Sequence
  Description of Artificial Sequence: Synthetic oligonucleotide
uuuagcugcuaggugugga

SEQ ID NO: 46097 - RNA, 19 nt, Artificial Sequence
  Description of Artificial Sequence: Synthetic oligonucleotide
auuagguugggcgagucua

SEQ ID NO: 46098 - RNA, 19 nt, Artificial Sequence
  Description of Artificial Sequence: Synthetic oligonucleotide
acauacgccuaaacacugc

SEQ ID NO: 46099 - RNA, 19 nt, Artificial Sequence
  Description of Artificial Sequence: Synthetic oligonucleotide
aaccuuguuucagaucagu

SEQ ID NO: 46100 - RNA, 19 nt, Artificial Sequence
  Description of Artificial Sequence: Synthetic oligonucleotide
auuugcggcaucccucugu

SEQ ID NO: 46101 - RNA, 19 nt, Artificial Sequence
  Description of Artificial Sequence: Synthetic oligonucleotide
ugugaccaaaaguguuaug

SEQ ID NO: 46102 - RNA, 19 nt, Artificial Sequence
  Description of Artificial Sequence: Synthetic oligonucleotide
cuuauaccauauccacuac

SEQ ID NO: 46103 - RNA, 19 nt, Artificial Sequence
  Description of Artificial Sequence: Synthetic oligonucleotide
cugguaacauauuauggua

SEQ ID NO: 46104 - RNA, 19 nt, Artificial Sequence
  Description of Artificial Sequence: Synthetic oligonucleotide
uuaguagccuuugcuuagc

SEQ ID NO: 46105 - RNA, 19 nt, Artificial Sequence
  Description of Artificial Sequence: Synthetic oligonucleotide
gaacauacgccuaaacacu

SEQ ID NO: 46106 - RNA, 19 nt, Artificial Sequence
  Description of Artificial Sequence: Synthetic oligonucleotide
acgcuuaggacagaacaug

SEQ ID NO: 46107 - RNA, 19 nt, Artificial Sequence
  Description of Artificial Sequence: Synthetic oligonucleotide
accuuguuucagaucaguc

SEQ ID NO: 46108 - RNA, 19 nt, Artificial Sequence
  Description of Artificial Sequence: Synthetic oligonucleotide
gugcuaaaggcuaaaagua

SEQ ID NO: 46109 - RNA, 19 nt, Artificial Sequence
  Description of Artificial Sequence: Synthetic oligonucleotide
ucagucggugcuccaauuu

SEQ ID NO: 46110 - RNA, 19 nt, Artificial Sequence
  Description of Artificial Sequence: Synthetic oligonucleotide
cuuguaucaucagaacuga

SEQ ID NO: 46111 - RNA, 19 nt, Artificial Sequence
  Description of Artificial Sequence: Synthetic oligonucleotide
cuuaaagauauuguugccu

SEQ ID NO: 46112 - RNA, 19 nt, Artificial Sequence
  Description of Artificial Sequence: Synthetic oligonucleotide
uccucauguaagucacugu

SEQ ID NO: 46113 - RNA, 19 nt, Artificial Sequence
  Description of Artificial Sequence: Synthetic oligonucleotide
ugcuucuaaucagucggug

SEQ ID NO: 46114 - RNA, 19 nt, Artificial Sequence
  Description of Artificial Sequence: Synthetic oligonucleotide
ggcgauuaaacauaauccu

SEQ ID NO: 46115 - RNA, 19 nt, Artificial Sequence
  Description of Artificial Sequence: Synthetic oligonucleotide
gauucuaccucacuuuguu

SEQ ID NO: 46116 - RNA, 19 nt, Artificial Sequence
  Description of Artificial Sequence: Synthetic oligonucleotide
cacuuuguucuguguauuc

SEQ ID NO: 46117 - RNA, 19 nt, Artificial Sequence
  Description of Artificial Sequence: Synthetic oligonucleotide
uuugcggcaucccucuguu

SEQ ID NO: 46118 - RNA, 19 nt, Artificial Sequence
  Description of Artificial Sequence: Synthetic oligonucleotide
ugacaauuguaguccuguc

SEQ ID NO: 46119 - RNA, 19 nt, Artificial Sequence
  Description of Artificial Sequence: Synthetic oligonucleotide
uucaucuaauaaugacaau

SEQ ID NO: 46120 - RNA, 19 nt, Artificial Sequence
  Description of Artificial Sequence: Synthetic oligonucleotide
uuguuucagaucaguccuc

SEQ ID NO: 46121 - RNA, 19 nt, Artificial Sequence
  Description of Artificial Sequence: Synthetic oligonucleotide
gaacuugauuagguugggc

SEQ ID NO: 46122 - RNA, 19 nt, Artificial Sequence
  Description of Artificial Sequence: Synthetic oligonucleotide
agcuuauccaauacauacu

SEQ ID NO: 46123 - RNA, 19 nt, Artificial Sequence
  Description of Artificial Sequence: Synthetic oligonucleotide
acuggaauggagccgcauu

SEQ ID NO: 46124 - RNA, 19 nt, Artificial Sequence
  Description of Artificial Sequence: Synthetic oligonucleotide
uugacauacuccguagauu

SEQ ID NO: 46125 - RNA, 19 nt, Artificial Sequence
  Description of Artificial Sequence: Synthetic oligonucleotide
gauuaaggacccaugcaua

SEQ ID NO: 46126 - RNA, 19 nt, Artificial Sequence
  Description of Artificial Sequence: Synthetic oligonucleotide
cuccguagauucuaccuca

SEQ ID NO: 46127 - RNA, 19 nt, Artificial Sequence
  Description of Artificial Sequence: Synthetic oligonucleotide
gcuaaacuuuccaucuccg

SEQ ID NO: 46128 - RNA, 19 nt, Artificial Sequence
  Description of Artificial Sequence: Synthetic oligonucleotide
cugauacaauggcaggauc

SEQ ID NO: 46129 - RNA, 19 nt, Artificial Sequence
  Description of Artificial Sequence: Synthetic oligonucleotide
auccagaucauaccccaua

SEQ ID NO: 46130 - RNA, 19 nt, Artificial Sequence
  Description of Artificial Sequence: Synthetic oligonucleotide
uuaucaccccaugaguaua

SEQ ID NO: 46131 - RNA, 19 nt, Artificial Sequence
  Description of Artificial Sequence: Synthetic oligonucleotide
aguguucauuugcggcauc

SEQ ID NO: 46132 - RNA, 19 nt, Artificial Sequence
  Description of Artificial Sequence: Synthetic oligonucleotide
uaaucagucggugcuccaa

SEQ ID NO: 46133 - RNA, 19 nt, Artificial Sequence
  Description of Artificial Sequence: Synthetic oligonucleotide
guggugaaucacuuuagcu

SEQ ID NO: 46134 - RNA, 19 nt, Artificial Sequence
  Description of Artificial Sequence: Synthetic oligonucleotide
auguggugaaucacuuuag

SEQ ID NO: 46135 - RNA, 19 nt, Artificial Sequence
  Description of Artificial Sequence: Synthetic oligonucleotide
acuccuaagcaagggugag

SEQ ID NO: 46136 - RNA, 19 nt, Artificial Sequence
  Description of Artificial Sequence: Synthetic oligonucleotide
cagaucauaccccauauuu

SEQ ID NO: 46137 - RNA, 19 nt, Artificial Sequence
  Description of Artificial Sequence: Synthetic oligonucleotide
cacaaguggaucugacuga

SEQ ID NO: 46138 - RNA, 19 nt, Artificial Sequence
  Description of Artificial Sequence: Synthetic oligonucleotide
aaagccuaauuugcauuuu

SEQ ID NO: 46139 - RNA, 19 nt, Artificial Sequence
  Description of Artificial Sequence: Synthetic oligonucleotide
ugucugucauuucccuaaa

SEQ ID NO: 46140 - RNA, 19 nt, Artificial Sequence
  Description of Artificial Sequence: Synthetic oligonucleotide
uuuggcgauuaaacauaau

SEQ ID NO: 46141 - RNA, 19 nt, Artificial Sequence
  Description of Artificial Sequence: Synthetic oligonucleotide
auaacuggccugguacuga

SEQ ID NO: 46142 - RNA, 19 nt, Artificial Sequence
  Description of Artificial Sequence: Synthetic oligonucleotide
acacgcucaacaauuuccu

SEQ ID NO: 46143 - RNA, 19 nt, Artificial Sequence
  Description of Artificial Sequence: Synthetic oligonucleotide
aaggcucaagaugacgcuu

SEQ ID NO: 46144 - RNA, 19 nt, Artificial Sequence
  Description of Artificial Sequence: Synthetic oligonucleotide
aggguugagacgaaguaua

SEQ ID NO: 46145 - RNA, 19 nt, Artificial Sequence
  Description of Artificial Sequence: Synthetic oligonucleotide
accguuugcauggacugga

SEQ ID NO: 46146 - RNA, 19 nt, Artificial Sequence
  Description of Artificial Sequence: Synthetic oligonucleotide
gaugacgcuuaggacagaa

SEQ ID NO: 46147 - RNA, 19 nt, Artificial Sequence
  Description of Artificial Sequence: Synthetic oligonucleotide
ucauucguuccugguaauc

SEQ ID NO: 46148 - RNA, 19 nt, Artificial Sequence
  Description of Artificial Sequence: Synthetic oligonucleotide
gaagugaguuuaccaccuc

SEQ ID NO: 46149 - RNA, 19 nt, Artificial Sequence
  Description of Artificial Sequence: Synthetic oligonucleotide
ucuaugcaucuaaggcaaa

SEQ ID NO: 46150 - RNA, 19 nt, Artificial Sequence
  Description of Artificial Sequence: Synthetic oligonucleotide
uaacuggccugguacugau

SEQ ID NO: 46151 - RNA, 19 nt, Artificial Sequence
  Description of Artificial Sequence: Synthetic oligonucleotide
acccaugcauaauuuggua

SEQ ID NO: 46152 - RNA, 19 nt, Artificial Sequence
  Description of Artificial Sequence: Synthetic oligonucleotide
gccauaagaucuuguacuc

SEQ ID NO: 46153 - RNA, 19 nt, Artificial Sequence
  Description of Artificial Sequence: Synthetic oligonucleotide
gugugauuaaggacccaug

SEQ ID NO: 46154 - RNA, 19 nt, Artificial Sequence
  Description of Artificial Sequence: Synthetic oligonucleotide
cuccuaagcaagggugagg

SEQ ID NO: 46155 - RNA, 19 nt, Artificial Sequence
  Description of Artificial Sequence: Synthetic oligonucleotide
augacgcuuaggacagaac

SEQ ID NO: 46156 - RNA, 19 nt, Artificial Sequence
  Description of Artificial Sequence: Synthetic oligonucleotide
cuccccgugguccacucug

SEQ ID NO: 46157 - RNA, 19 nt, Artificial Sequence
  Description of Artificial Sequence: Synthetic oligonucleotide
uagacgcuucuguucugcu

SEQ ID NO: 46158 - RNA, 19 nt, Artificial Sequence
  Description of Artificial Sequence: Synthetic oligonucleotide
ggaacuugauuagguuggg

SEQ ID NO: 46159 - RNA, 19 nt, Artificial Sequence
  Description of Artificial Sequence: Synthetic oligonucleotide
uugauuagguugggcgagu

SEQ ID NO: 46160 - RNA, 19 nt, Artificial Sequence
  Description of Artificial Sequence: Synthetic oligonucleotide
agauucuaccucacuuugu

SEQ ID NO: 46161 - RNA, 19 nt, Artificial Sequence
  Description of Artificial Sequence: Synthetic oligonucleotide
guucauuugcggcaucccu

SEQ ID NO: 46162 - RNA, 19 nt, Artificial Sequence
  Description of Artificial Sequence: Synthetic oligonucleotide
cuuggcuuaaugccaugaa

SEQ ID NO: 46163 - RNA, 19 nt, Artificial Sequence
  Description of Artificial Sequence: Synthetic oligonucleotide
ugauuagguugggcgaguc

SEQ ID NO: 46164 - RNA, 19 nt, Artificial Sequence
  Description of Artificial Sequence: Synthetic oligonucleotide
aauugccuauugacauacu

SEQ ID NO: 46165 - RNA, 19 nt, Artificial Sequence
  Description of Artificial Sequence: Synthetic oligonucleotide
ccuuugcuuagcauaagga

SEQ ID NO: 46166 - RNA, 19 nt, Artificial Sequence
  Description of Artificial Sequence: Synthetic oligonucleotide
ggaauguucaacagccuaa

SEQ ID NO: 46167 - RNA, 19 nt, Artificial Sequence
  Description of Artificial Sequence: Synthetic oligonucleotide
ugaacaccguuugcaugga

SEQ ID NO: 46168 - RNA, 19 nt, Artificial Sequence
  Description of Artificial Sequence: Synthetic oligonucleotide
ccaacauugaaucuuguau

SEQ ID NO: 46169 - RNA, 19 nt, Artificial Sequence
  Description of Artificial Sequence: Synthetic oligonucleotide
gauuagguugggcgagucu

SEQ ID NO: 46170 - RNA, 19 nt, Artificial Sequence
  Description of Artificial Sequence: Synthetic oligonucleotide
cacgagacccuccucggga

SEQ ID NO: 46171 - RNA, 19 nt, Artificial Sequence
  Description of Artificial Sequence: Synthetic oligonucleotide
ccgcauuuacauugauucc

SEQ ID NO: 46172 - RNA, 19 nt, Artificial Sequence
  Description of Artificial Sequence: Synthetic oligonucleotide
gacccaugcauaauuuggu

SEQ ID NO: 46173 - RNA, 19 nt, Artificial Sequence
  Description of Artificial Sequence: Synthetic oligonucleotide
cugacaauuguaguccugu

SEQ ID NO: 46174 - RNA, 19 nt, Artificial Sequence
  Description of Artificial Sequence: Synthetic oligonucleotide
guaucgugugcaaggcuca

SEQ ID NO: 46175 - RNA, 19 nt, Artificial Sequence
  Description of Artificial Sequence: Synthetic oligonucleotide
cauacgccuaaacacugcu

SEQ ID NO: 46176 - RNA, 19 nt, Artificial Sequence
  Description of Artificial Sequence: Synthetic oligonucleotide
acgccuaaacacugcuaaa

SEQ ID NO: 46177 - RNA, 19 nt, Artificial Sequence
  Description of Artificial Sequence: Synthetic oligonucleotide
ccacccuacaaaacuuuug

SEQ ID NO: 46178 - RNA, 19 nt, Artificial Sequence
  Description of Artificial Sequence: Synthetic oligonucleotide
uucccgacgugcugucuuc

SEQ ID NO: 46179 - RNA, 19 nt, Artificial Sequence
  Description of Artificial Sequence: Synthetic oligonucleotide
aguauauguuuuacuccua

SEQ ID NO: 46180 - RNA, 19 nt, Artificial Sequence
  Description of Artificial Sequence: Synthetic oligonucleotide
ccaugaguauauguuuuac

SEQ ID NO: 46181 - RNA, 19 nt, Artificial Sequence
  Description of Artificial Sequence: Synthetic oligonucleotide
gccaugaauugccuauuga

SEQ ID NO: 46182 - RNA, 19 nt, Artificial Sequence
  Description of Artificial Sequence: Synthetic oligonucleotide
cuagugcuaugucaaggcu

SEQ ID NO: 46183 - RNA, 19 nt, Artificial Sequence
  Description of Artificial Sequence: Synthetic oligonucleotide
cuaaucagucggugcucca

SEQ ID NO: 46184 - RNA, 19 nt, Artificial Sequence
  Description of Artificial Sequence: Synthetic oligonucleotide
uugugugauuaaggaccca

SEQ ID NO: 46185 - RNA, 19 nt, Artificial Sequence
  Description of Artificial Sequence: Synthetic oligonucleotide
gaguaucgugugcaaggcu

SEQ ID NO: 46186 - RNA, 19 nt, Artificial Sequence
  Description of Artificial Sequence: Synthetic oligonucleotide
acaccacgacuguuguaau

SEQ ID NO: 46187 - RNA, 19 nt, Artificial Sequence
  Description of Artificial Sequence: Synthetic oligonucleotide
gcuagacauaaccacaauu

SEQ ID NO: 46188 - RNA, 19 nt, Artificial Sequence
  Description of Artificial Sequence: Synthetic oligonucleotide
auggagccgcauuuacauu

SEQ ID NO: 46189 - RNA, 19 nt, Artificial Sequence
  Description of Artificial Sequence: Synthetic oligonucleotide
ugguuauaacuggccuggu

SEQ ID NO: 46190 - RNA, 19 nt, Artificial Sequence
  Description of Artificial Sequence: Synthetic oligonucleotide
auggcaggaucaagagucu

SEQ ID NO: 46191 - RNA, 19 nt, Artificial Sequence
  Description of Artificial Sequence: Synthetic oligonucleotide
gcucaagaugacgcuuagg

SEQ ID NO: 46192 - RNA, 19 nt, Artificial Sequence
  Description of Artificial Sequence: Synthetic oligonucleotide
cagucggugcuccaauuua

SEQ ID NO: 46193 - RNA, 19 nt, Artificial Sequence
  Description of Artificial Sequence: Synthetic oligonucleotide
gucaacuaacuuguagaau

SEQ ID NO: 46194 - RNA, 19 nt, Artificial Sequence
  Description of Artificial Sequence: Synthetic oligonucleotide
aggcucaagaugacgcuua

SEQ ID NO: 46195 - RNA, 19 nt, Artificial Sequence
  Description of Artificial Sequence: Synthetic oligonucleotide
accacccuacaaaacuuuu

SEQ ID NO: 46196 - RNA, 19 nt, Artificial Sequence
  Description of Artificial Sequence: Synthetic oligonucleotide
cccucuguugggucucggg

SEQ ID NO: 46197 - RNA, 19 nt, Artificial Sequence
  Description of Artificial Sequence: Synthetic oligonucleotide
cuguucccgacgugcuguc

SEQ ID NO: 46198 - RNA, 19 nt, Artificial Sequence
  Description of Artificial Sequence: Synthetic oligonucleotide
ccagaugacuagugcuaug

SEQ ID NO: 46199 - RNA, 19 nt, Artificial Sequence
  Description of Artificial Sequence: Synthetic oligonucleotide
gcugacaauuguaguccug

SEQ ID NO: 46200 - RNA, 19 nt, Artificial Sequence
  Description of Artificial Sequence: Synthetic oligonucleotide
auacgccuaaacacugcua

SEQ ID NO: 46201 - RNA, 19 nt, Artificial Sequence
  Description of Artificial Sequence: Synthetic oligonucleotide
cacgaccucguggggcucc

SEQ ID NO: 46202 - RNA, 19 nt, Artificial Sequence
  Description of Artificial Sequence: Synthetic oligonucleotide
ccccuuuguucauucguuc

SEQ ID NO: 46203 - RNA, 19 nt, Artificial Sequence
  Description of Artificial Sequence: Synthetic oligonucleotide
cacagaacauacgccuaaa

SEQ ID NO: 46204 - RNA, 19 nt, Artificial Sequence
  Description of Artificial Sequence: Synthetic oligonucleotide
gacgugcugucuucuuuau

SEQ ID NO: 46205 - RNA, 19 nt, Artificial Sequence
  Description of Artificial Sequence: Synthetic oligonucleotide
caccacgacuguuguaaua

SEQ ID NO: 46206 - RNA, 19 nt, Artificial Sequence
  Description of Artificial Sequence: Synthetic oligonucleotide
uccauccauuagagauuuu

SEQ ID NO: 46207 - RNA, 19 nt, Artificial Sequence
  Description of Artificial Sequence: Synthetic oligonucleotide
ccuaaacacugcuaaacuu

SEQ ID NO: 46208 - RNA, 19 nt, Artificial Sequence
  Description of Artificial Sequence: Synthetic oligonucleotide
gauauccaucccgcuggua

SEQ ID NO: 46209 - RNA, 19 nt, Artificial Sequence
  Description of Artificial Sequence: Synthetic oligonucleotide
gguugggcgagucuagauu

SEQ ID NO: 46210 - RNA, 19 nt, Artificial Sequence
  Description of Artificial Sequence: Synthetic oligonucleotide
ccacgagacccuccucggg

SEQ ID NO: 46211 - RNA, 19 nt, Artificial Sequence
  Description of Artificial Sequence: Synthetic oligonucleotide
gggagaacaaauagauaau

SEQ ID NO: 46212 - RNA, 19 nt, Artificial Sequence
  Description of Artificial Sequence: Synthetic oligonucleotide
ccugugaaucacauuaauu

SEQ ID NO: 46213 - RNA, 19 nt, Artificial Sequence
  Description of Artificial Sequence: Synthetic oligonucleotide
gcuuagcauaaggaauuaa

SEQ ID NO: 46214 - RNA, 19 nt, Artificial Sequence
  Description of Artificial Sequence: Synthetic oligonucleotide
guucccgacgugcugucuu

SEQ ID NO: 46215 - RNA, 19 nt, Artificial Sequence
  Description of Artificial Sequence: Synthetic oligonucleotide
gcugauacaauggcaggau

SEQ ID NO: 46216 - RNA, 19 nt, Artificial Sequence
  Description of Artificial Sequence: Synthetic oligonucleotide
cccaugcauaauuugguau

SEQ ID NO: 46217 - RNA, 19 nt, Artificial Sequence
  Description of Artificial Sequence: Synthetic oligonucleotide
agaugacgcuuaggacaga

SEQ ID NO: 46218 - RNA, 19 nt, Artificial Sequence
  Description of Artificial Sequence: Synthetic oligonucleotide
ccuuccauauccagguaau

SEQ ID NO: 46219 - RNA, 19 nt, Artificial Sequence
  Description of Artificial Sequence: Synthetic oligonucleotide
ccgucucacaaguggaucu

SEQ ID NO: 46220 - RNA, 19 nt, Artificial Sequence
  Description of Artificial Sequence: Synthetic oligonucleotide
cgacuguuguaauaaggcu

SEQ ID NO: 46221 - RNA, 19 nt, Artificial Sequence
  Description of Artificial Sequence: Synthetic oligonucleotide
guacaaggguugagacgaa

SEQ ID NO: 46222 - RNA, 19 nt, Artificial Sequence
  Description of Artificial Sequence: Synthetic oligonucleotide
gacuggaauggagccgcau

SEQ ID NO: 46223 - RNA, 19 nt, Artificial Sequence
  Description of Artificial Sequence: Synthetic oligonucleotide
gcgagucuagauucagaau

SEQ ID NO: 46224 - RNA, 19 nt, Artificial Sequence
  Description of Artificial Sequence: Synthetic oligonucleotide
gcguggaaacccaguguuc

SEQ ID NO: 46225 - RNA, 19 nt, Artificial Sequence
  Description of Artificial Sequence: Synthetic oligonucleotide
ggccccuguauccauucau

SEQ ID NO: 46226 - RNA, 19 nt, Artificial Sequence
  Description of Artificial Sequence: Synthetic oligonucleotide
ggcaaagaaucaacacuuu

SEQ ID NO: 46227 - RNA, 19 nt, Artificial Sequence
  Description of Artificial Sequence: Synthetic oligonucleotide
cguggaaacccaguguucu

SEQ ID NO: 46228 - RNA, 19 nt, Artificial Sequence
  Description of Artificial Sequence: Synthetic oligonucleotide
gccagaugacuagugcuau

SEQ ID NO: 46229 - RNA, 19 nt, Artificial Sequence
  Description of Artificial Sequence: Synthetic oligonucleotide
gggccccuguauccauuca

SEQ ID NO: 46230 - RNA, 19 nt, Artificial Sequence
  Description of Artificial Sequence: Synthetic oligonucleotide
ccguuugcauggacuggaa

SEQ ID NO: 46231 - RNA, 19 nt, Artificial Sequence
  Description of Artificial Sequence: Synthetic oligonucleotide
ccguagauucuaccucacu

SEQ ID NO: 46232 - RNA, 19 nt, Artificial Sequence
  Description of Artificial Sequence: Synthetic oligonucleotide
cguuugcauggacuggaau

SEQ ID NO: 46233 - RNA, 19 nt, Artificial Sequence
  Description of Artificial Sequence: Synthetic oligonucleotide
ccgacgugcugucuucuuu

SEQ ID NO: 46234 - RNA, 19 nt, Artificial Sequence
  Description of Artificial Sequence: Synthetic oligonucleotide
cgcuugaaauucugcugau

SEQ ID NO: 46235 - RNA, 19 nt, Artificial Sequence
  Description of Artificial Sequence: Synthetic oligonucleotide
cgggacacaccacgacugu

SEQ ID NO: 46236 - RNA, 19 nt, Artificial Sequence
  Description of Artificial Sequence: Synthetic oligonucleotide
  modified_base (5)..(5): a, c, u, g, unknown or other
uuuunuuuguuuaugaacc

SEQ ID NO: 46237 - RNA, 19 nt, Artificial Sequence
  Description of Artificial Sequence: Synthetic oligonucleotide
aagaaagacugcuauaacc

SEQ ID NO: 46238 - RNA, 19 nt, Artificial Sequence
  Description of Artificial Sequence: Synthetic oligonucleotide
  modified_base (7)..(7): a, c, u, g, unknown or other
aaaaucncccaacagguac

SEQ ID NO: 46239 - RNA, 19 nt, Artificial Sequence
  Description of Artificial Sequence: Synthetic oligonucleotide
auaaccuuugcuuuggacc

SEQ ID NO: 46240 - RNA, 19 nt, Artificial Sequence
  Description of Artificial Sequence: Synthetic oligonucleotide
auuuuaaacacgccaagcc

SEQ ID NO: 46241 - RNA, 19 nt, Artificial Sequence
  Description of Artificial Sequence: Synthetic oligonucleotide
uagggaauguuuaaaaugg

SEQ ID NO: 46242 - RNA, 19 nt, Artificial Sequence
  Description of Artificial Sequence: Synthetic oligonucleotide
uguucuaugcauuuaaaag

SEQ ID NO: 46243 - RNA, 19 nt, Artificial Sequence
  Description of Artificial Sequence: Synthetic oligonucleotide
ucuaauuucauuccuacac

SEQ ID NO: 46244 - RNA, 19 nt, Artificial Sequence
  Description of Artificial Sequence: Synthetic oligonucleotide
  modified_base (10)..(10): a, c, u, g, unknown or other
cuggaugaanaucagaucc

SEQ ID NO: 46245 - RNA, 19 nt, Artificial Sequence
  Description of Artificial Sequence: Synthetic oligonucleotide
acuuuaugaauguaggugg

SEQ ID NO: 46246 - RNA, 19 nt, Artificial Sequence
  Description of Artificial Sequence: Synthetic oligonucleotide
aaaccuuauguuauuaacc

SEQ ID NO: 46247 - RNA, 19 nt, Artificial Sequence
  Description of Artificial Sequence: Synthetic oligonucleotide
aauaauucgaguaacugug

SEQ ID NO: 46248 - RNA, 19 nt, Artificial Sequence
  Description of Artificial Sequence: Synthetic oligonucleotide
uuugacacgagauucaacu

SEQ ID NO: 46249 - RNA, 19 nt, Artificial Sequence
  Description of Artificial Sequence: Synthetic oligonucleotide
acugguaaauucuagagcu

SEQ ID NO: 46250 - RNA, 19 nt, Artificial Sequence
  Description of Artificial Sequence: Synthetic oligonucleotide
aauauauagcaccauaaua

SEQ ID NO: 46251 - RNA, 19 nt, Artificial Sequence
  Description of Artificial Sequence: Synthetic oligonucleotide
aaucuuacuaaaaugucuc

SEQ ID NO: 46252 - RNA, 19 nt, Artificial Sequence
  Description of Artificial Sequence: Synthetic oligonucleotide
auaggugcaugcuuaaagc

SEQ ID NO: 46253 - RNA, 19 nt, Artificial Sequence
  Description of Artificial Sequence: Synthetic oligonucleotide
aagauacccaguuuaauca

SEQ ID NO: 46254 - RNA, 19 nt, Artificial Sequence
  Description of Artificial Sequence: Synthetic oligonucleotide
auauccaguuaauugacac

SEQ ID NO: 46255 - RNA, 19 nt, Artificial Sequence
  Description of Artificial Sequence: Synthetic oligonucleotide
uuaaaaggaaguuuugugu

SEQ ID NO: 46256 - RNA, 19 nt, Artificial Sequence
  Description of Artificial Sequence: Synthetic oligonucleotide
gucuuaacaaagaagaggg

SEQ ID NO: 46257 - RNA, 19 nt, Artificial Sequence
  Description of Artificial Sequence: Synthetic oligonucleotide
gauauugaucuauauauca

SEQ ID NO: 46258 - RNA, 19 nt, Artificial Sequence
  Description of Artificial Sequence: Synthetic oligonucleotide
auauaucaaacgcacacag

SEQ ID NO: 46259 - RNA, 19 nt, Artificial Sequence
  Description of Artificial Sequence: Synthetic oligonucleotide
  modified_base (2)..(2): a, c, u, g, unknown or other
unuuuguuuaugaaccuca

SEQ ID NO: 46260 - RNA, 19 nt, Artificial Sequence
  Description of Artificial Sequence: Synthetic oligonucleotide
uuuaaacacgccaagccug

SEQ ID NO: 46261 - RNA, 19 nt, Artificial Sequence
  Description of Artificial Sequence: Synthetic oligonucleotide
auagggaauguuuaaaaug

SEQ ID NO: 46262 - RNA, 19 nt, Artificial Sequence
  Description of Artificial Sequence: Synthetic oligonucleotide
aaacccgugauuuggaaca

SEQ ID NO: 46263 - RNA, 19 nt, Artificial Sequence
  Description of Artificial Sequence: Synthetic oligonucleotide
uccaguuuaacacauuagu

SEQ ID NO: 46264 - RNA, 19 nt, Artificial Sequence
  Description of Artificial Sequence: Synthetic oligonucleotide
agaacuaauuaccaggacu

SEQ ID NO: 46265 - RNA, 19 nt, Artificial Sequence
  Description of Artificial Sequence: Synthetic oligonucleotide
  modified_base (2)..(2): a, c, u, g, unknown or other
anaucagauccacauauau

SEQ ID NO: 46266 - RNA, 19 nt, Artificial Sequence
  Description of Artificial Sequence: Synthetic oligonucleotide
uguuauuaaccccucuugc

SEQ ID NO: 46267 - RNA, 19 nt, Artificial Sequence
  Description of Artificial Sequence: Synthetic oligonucleotide
aaauagggaauguuuaaaa

SEQ ID NO: 46268 - RNA, 19 nt, Artificial Sequence
  Description of Artificial Sequence: Synthetic oligonucleotide
  modified_base (6)..(6): a, c, u, g, unknown or other
augaanaucagauccacau

SEQ ID NO: 46269 - RNA, 19 nt, Artificial Sequence
  Description of Artificial Sequence: Synthetic oligonucleotide
agagcauauaaaaguaucc

SEQ ID NO: 46270 - RNA, 19 nt, Artificial Sequence
  Description of Artificial Sequence: Synthetic oligonucleotide
agagacgaugaauaauucg

SEQ ID NO: 46271 - RNA, 19 nt, Artificial Sequence
  Description of Artificial Sequence: Synthetic oligonucleotide
aucuauauaucaaacgcac

SEQ ID NO: 46272 - RNA, 19 nt, Artificial Sequence
  Description of Artificial Sequence: Synthetic oligonucleotide
uaaccugcuaauuuuauaa

SEQ ID NO: 46273 - RNA, 19 nt, Artificial Sequence
  Description of Artificial Sequence: Synthetic oligonucleotide
gaugacuacaaauggagga

SEQ ID NO: 46274 - RNA, 19 nt, Artificial Sequence
  Description of Artificial Sequence: Synthetic oligonucleotide
uggggaauuuuaaacacgc

SEQ ID NO: 46275 - RNA, 19 nt, Artificial Sequence
  Description of Artificial Sequence: Synthetic oligonucleotide
uaauuguugcaacacauau

SEQ ID NO: 46276 - RNA, 19 nt, Artificial Sequence
  Description of Artificial Sequence: Synthetic oligonucleotide
cuaauuucauuccuacacg

SEQ ID NO: 46277 - RNA, 19 nt, Artificial Sequence
  Description of Artificial Sequence: Synthetic oligonucleotide
guaacgacaguucauuugc

SEQ ID NO: 46278 - RNA, 19 nt, Artificial Sequence
  Description of Artificial Sequence: Synthetic oligonucleotide
auauaguauaacuuuggga

SEQ ID NO: 46279 - RNA, 19 nt, Artificial Sequence
  Description of Artificial Sequence: Synthetic oligonucleotide
aauaguuuuacuggugcug

SEQ ID NO: 46280 - RNA, 19 nt, Artificial Sequence
  Description of Artificial Sequence: Synthetic oligonucleotide
auuaccaaauauauagcac

SEQ ID NO: 46281 - RNA, 19 nt, Artificial Sequence
  Description of Artificial Sequence: Synthetic oligonucleotide
gaagauacccaguuuaauc

SEQ ID NO: 46282 - RNA, 19 nt, Artificial Sequence
  Description of Artificial Sequence: Synthetic oligonucleotide
uuucuuauguccuuuguau

SEQ ID NO: 46283 - RNA, 19 nt, Artificial Sequence
  Description of Artificial Sequence: Synthetic oligonucleotide
uuaaacguggcuccaugag

SEQ ID NO: 46284 - RNA, 19 nt, Artificial Sequence
  Description of Artificial Sequence: Synthetic oligonucleotide
uguaaaagagaacggggcu

SEQ ID NO: 46285 - RNA, 19 nt, Artificial Sequence
  Description of Artificial Sequence: Synthetic oligonucleotide
ugcaugauaacagaaccag

SEQ ID NO: 46286 - RNA, 19 nt, Artificial Sequence
  Description of Artificial Sequence: Synthetic oligonucleotide
uagcuaggaaggaauauag

SEQ ID NO: 46287 - RNA, 19 nt, Artificial Sequence
  Description of Artificial Sequence: Synthetic oligonucleotide
auggaggaagcuauaaucc

SEQ ID NO: 46288 - RNA, 19 nt, Artificial Sequence
  Description of Artificial Sequence: Synthetic oligonucleotide
aaccuuauguacuuuacuu

SEQ ID NO: 46289 - RNA, 19 nt, Artificial Sequence
  Description of Artificial Sequence: Synthetic oligonucleotide
  modified_base (6)..(6): a, c, u, g, unknown or other
aaaucncccaacagguacc

SEQ ID NO: 46290 - RNA, 19 nt, Artificial Sequence
  Description of Artificial Sequence: Synthetic oligonucleotide
uguaacgacaguucauuug

SEQ ID NO: 46291 - RNA, 19 nt, Artificial Sequence
  Description of Artificial Sequence: Synthetic oligonucleotide
uauugaucuauauaucaaa

SEQ ID NO: 46292 - RNA, 19 nt, Artificial Sequence
  Description of Artificial Sequence: Synthetic oligonucleotide
acagucuacccauugauca

SEQ ID NO: 46293 - RNA, 19 nt, Artificial Sequence
  Description of Artificial Sequence: Synthetic oligonucleotide
uggcuacacauauuaaacg

SEQ ID NO: 46294 - RNA, 19 nt, Artificial Sequence
  Description of Artificial Sequence: Synthetic oligonucleotide
aauucgaguaacuguggcu

SEQ ID NO: 46295 - RNA, 19 nt, Artificial Sequence
  Description of Artificial Sequence: Synthetic oligonucleotide
ugacacgagauucaacuug

SEQ ID NO: 46296 - RNA, 19 nt, Artificial Sequence
  Description of Artificial Sequence: Synthetic oligonucleotide
uuucacgccauuauauaca

SEQ ID NO: 46297 - RNA, 19 nt, Artificial Sequence
  Description of Artificial Sequence: Synthetic oligonucleotide
aacuuauucugguuaacaa

SEQ ID NO: 46298 - RNA, 19 nt, Artificial Sequence
  Description of Artificial Sequence: Synthetic oligonucleotide
aaauaguuuuacuggugcu

SEQ ID NO: 46299 - RNA, 19 nt, Artificial Sequence
  Description of Artificial Sequence: Synthetic oligonucleotide
uucuaacaaauccaguuaa

SEQ ID NO: 46300 - RNA, 19 nt, Artificial Sequence
  Description of Artificial Sequence: Synthetic oligonucleotide
agaagucuagagaagaauc

SEQ ID NO: 46301 - RNA, 19 nt, Artificial Sequence
  Description of Artificial Sequence: Synthetic oligonucleotide
uaauuucauuccuacacga

SEQ ID NO: 46302 - RNA, 19 nt, Artificial Sequence
  Description of Artificial Sequence: Synthetic oligonucleotide
uacaauuggaagcuuguaa

SEQ ID NO: 46303 - RNA, 19 nt, Artificial Sequence
  Description of Artificial Sequence: Synthetic oligonucleotide
  modified_base (4)..(4): a, c, u, g, unknown or other
uuunuuuguuuaugaaccu

SEQ ID NO: 46304 - RNA, 19 nt, Artificial Sequence
  Description of Artificial Sequence: Synthetic oligonucleotide
accuuauguuauuaacccc

SEQ ID NO: 46305 - RNA, 19 nt, Artificial Sequence
  Description of Artificial Sequence: Synthetic oligonucleotide
aucgaucccaaucaucagg

SEQ ID NO: 46306 - RNA, 19 nt, Artificial Sequence
  Description of Artificial Sequence: Synthetic oligonucleotide
uuuucacgccauuauauac

SEQ ID NO: 46307 - RNA, 19 nt, Artificial Sequence
  Description of Artificial Sequence: Synthetic oligonucleotide
uccgugaucuacaugguga

SEQ ID NO: 46308 - RNA, 19 nt, Artificial Sequence
  Description of Artificial Sequence: Synthetic oligonucleotide
  modified_base (12)..(12): a, c, u, g, unknown or other
aacuggaugaanaucagau

SEQ ID NO: 46309 - RNA, 19 nt, Artificial Sequence
  Description of Artificial Sequence: Synthetic oligonucleotide
acuaauuaccaggacuggc

SEQ ID NO: 46310 - RNA, 19 nt, Artificial Sequence
  Description of Artificial Sequence: Synthetic oligonucleotide
uguauaaaugacuguggcu

SEQ ID NO: 46311 - RNA, 19 nt, Artificial Sequence
  Description of Artificial Sequence: Synthetic oligonucleotide
ugaugugaucuacauuuag

SEQ ID NO: 46312 - RNA, 19 nt, Artificial Sequence
  Description of Artificial Sequence: Synthetic oligonucleotide
uacccauugaucauacucu

SEQ ID NO: 46313 - RNA, 19 nt, Artificial Sequence
  Description of Artificial Sequence: Synthetic oligonucleotide
aucaaacgcacacagaaau

SEQ ID NO: 46314 - RNA, 19 nt, Artificial Sequence
  Description of Artificial Sequence: Synthetic oligonucleotide
ugggaaauauucuucauuu

SEQ ID NO: 46315 - RNA, 19 nt, Artificial Sequence
  Description of Artificial Sequence: Synthetic oligonucleotide
cuacuaaaaguucccaggc

SEQ ID NO: 46316 - RNA, 19 nt, Artificial Sequence
  Description of Artificial Sequence: Synthetic oligonucleotide
cauaggugcaugcuuaaag

SEQ ID NO: 46317 - RNA, 19 nt, Artificial Sequence
  Description of Artificial Sequence: Synthetic oligonucleotide
aaugucccaguagaauagc

SEQ ID NO: 46318 - RNA, 19 nt, Artificial Sequence
  Description of Artificial Sequence: Synthetic oligonucleotide
acuguaaaagagaacgggg

SEQ ID NO: 46319 - RNA, 19 nt, Artificial Sequence
  Description of Artificial Sequence: Synthetic oligonucleotide
caguuaauugacaccaccc

SEQ ID NO: 46320 - RNA, 19 nt, Artificial Sequence
  Description of Artificial Sequence: Synthetic oligonucleotide
  modified_base (4)..(4): a, c, u, g, unknown or other
gaanaucagauccacauau

SEQ ID NO: 46321 - RNA, 19 nt, Artificial Sequence
  Description of Artificial Sequence: Synthetic oligonucleotide
  modified_base (3)..(3): a, c, u, g, unknown or other
ucncccaacagguaccaag

SEQ ID NO: 46322 - RNA, 19 nt, Artificial Sequence
  Description of Artificial Sequence: Synthetic oligonucleotide
aaugaguuguacgacgaca

SEQ ID NO: 46323 - RNA, 19 nt, Artificial Sequence
  Description of Artificial Sequence: Synthetic oligonucleotide
ugauauccaguuaauugac

SEQ ID NO: 46324 - RNA, 19 nt, Artificial Sequence
  Description of Artificial Sequence: Synthetic oligonucleotide
aguuaauugacaccacccu

SEQ ID NO: 46325 - RNA, 19 nt, Artificial Sequence
  Description of Artificial Sequence: Synthetic oligonucleotide
gauguaguuaccccagcug

SEQ ID NO: 46326 - RNA, 19 nt, Artificial Sequence
  Description of Artificial Sequence: Synthetic oligonucleotide
aaaugucccaguagaauag

SEQ ID NO: 46327 - RNA, 19 nt, Artificial Sequence
  Description of Artificial Sequence: Synthetic oligonucleotide
ucuauauaucaaacgcaca

SEQ ID NO: 46328 - RNA, 19 nt, Artificial Sequence
  Description of Artificial Sequence: Synthetic oligonucleotide
aaacuuauucugguuaaca

SEQ ID NO: 46329 - RNA, 19 nt, Artificial Sequence
  Description of Artificial Sequence: Synthetic oligonucleotide
uauguacuuuacuuuggcc

SEQ ID NO: 46330 - RNA, 19 nt, Artificial Sequence
  Description of Artificial Sequence: Synthetic oligonucleotide
ugcgauguggucauuuucu

SEQ ID NO: 46331 - RNA, 19 nt, Artificial Sequence
  Description of Artificial Sequence: Synthetic oligonucleotide
auguuauuaaccccucuug

SEQ ID NO: 46332 - RNA, 19 nt, Artificial Sequence
  Description of Artificial Sequence: Synthetic oligonucleotide
acagcuauauccuucuuaa

SEQ ID NO: 46333 - RNA, 19 nt, Artificial Sequence
  Description of Artificial Sequence: Synthetic oligonucleotide
uuuaaaugggcugcaauaa

SEQ ID NO: 46334 - RNA, 19 nt, Artificial Sequence
  Description of Artificial Sequence: Synthetic oligonucleotide
uagguggggaauuuuaaac

SEQ ID NO: 46335 - RNA, 19 nt, Artificial Sequence
  Description of Artificial Sequence: Synthetic oligonucleotide
uuuaugaauguaggugggg

SEQ ID NO: 46336 - RNA, 19 nt, Artificial Sequence
  Description of Artificial Sequence: Synthetic oligonucleotide
aauugacaccacccuacag

SEQ ID NO: 46337 - RNA, 19 nt, Artificial Sequence
  Description of Artificial Sequence: Synthetic oligonucleotide
guauccgcagaauaagaag

SEQ ID NO: 46338 - RNA, 19 nt, Artificial Sequence
  Description of Artificial Sequence: Synthetic oligonucleotide
gagacgaugaauaauucga

SEQ ID NO: 46339 - RNA, 19 nt, Artificial Sequence
  Description of Artificial Sequence: Synthetic oligonucleotide
aagguucauuuguaacgac

SEQ ID NO: 46340 - RNA, 19 nt, Artificial Sequence
  Description of Artificial Sequence: Synthetic oligonucleotide
uauauaucaaacgcacaca

SEQ ID NO: 46341 - RNA, 19 nt, Artificial Sequence
  Description of Artificial Sequence: Synthetic oligonucleotide
cacuuuaugaauguaggug

SEQ ID NO: 46342 - RNA, 19 nt, Artificial Sequence
  Description of Artificial Sequence: Synthetic oligonucleotide
cuacccauugaucauacuc

SEQ ID NO: 46343 - RNA, 19 nt, Artificial Sequence
  Description of Artificial Sequence: Synthetic oligonucleotide
aguucuccuaguuucauau

SEQ ID NO: 46344 - RNA, 19 nt, Artificial Sequence
  Description of Artificial Sequence: Synthetic oligonucleotide
uguuaguauccgcagaaua

SEQ ID NO: 46345 - RNA, 19 nt, Artificial Sequence
  Description of Artificial Sequence: Synthetic oligonucleotide
  modified_base (9)..(9): a, c, u, g, unknown or other
uggaugaanaucagaucca

SEQ ID NO: 46346 - RNA, 19 nt, Artificial Sequence
  Description of Artificial Sequence: Synthetic oligonucleotide
uacuacaaaaccuuauguu

SEQ ID NO: 46347 - RNA, 19 nt, Artificial Sequence
  Description of Artificial Sequence: Synthetic oligonucleotide
acgacgacaggaauuaugg

SEQ ID NO: 46348 - RNA, 19 nt, Artificial Sequence
  Description of Artificial Sequence: Synthetic oligonucleotide
gaauaauucgaguaacugu

SEQ ID NO: 46349 - RNA, 19 nt, Artificial Sequence
  Description of Artificial Sequence: Synthetic oligonucleotide
uacacauauuaaacguggc

SEQ ID NO: 46350 - RNA, 19 nt, Artificial Sequence
  Description of Artificial Sequence: Synthetic oligonucleotide
auccugcuaaccuaaaacu

SEQ ID NO: 46351 - RNA, 19 nt, Artificial Sequence
  Description of Artificial Sequence: Synthetic oligonucleotide
uuacguggagagcauauaa

SEQ ID NO: 46352 - RNA, 19 nt, Artificial Sequence
  Description of Artificial Sequence: Synthetic oligonucleotide
uacgauggaagccuccucu

SEQ ID NO: 46353 - RNA, 19 nt, Artificial Sequence
  Description of Artificial Sequence: Synthetic oligonucleotide
auguaguuaccccagcuga

SEQ ID NO: 46354 - RNA, 19 nt, Artificial Sequence
  Description of Artificial Sequence: Synthetic oligonucleotide
cacauauuaaacguggcuc

SEQ ID NO: 46355 - RNA, 19 nt, Artificial Sequence
  Description of Artificial Sequence: Synthetic oligonucleotide
augauaacagaaccaguca

SEQ ID NO: 46356 - RNA, 19 nt, Artificial Sequence
  Description of Artificial Sequence: Synthetic oligonucleotide
acgagauucaacuugcauu

SEQ ID NO: 46357 - RNA, 19 nt, Artificial Sequence
  Description of Artificial Sequence: Synthetic oligonucleotide
uuuauagacugagauccug

SEQ ID NO: 46358 - RNA, 19 nt, Artificial Sequence
  Description of Artificial Sequence: Synthetic oligonucleotide
agagguugcaugauaacag

SEQ ID NO: 46359 - RNA, 19 nt, Artificial Sequence
  Description of Artificial Sequence: Synthetic oligonucleotide
ucgguagaaggguagaaaa

SEQ ID NO: 46360 - RNA, 19 nt, Artificial Sequence
  Description of Artificial Sequence: Synthetic oligonucleotide
gcuaaugaguuguacgacg

SEQ ID NO: 46361 - RNA, 19 nt, Artificial Sequence
  Description of Artificial Sequence: Synthetic oligonucleotide
agcacaauuaaugaccccu

SEQ ID NO: 46362 - RNA, 19 nt, Artificial Sequence
  Description of Artificial Sequence: Synthetic oligonucleotide
ugcguauuaccaaugcuau

SEQ ID NO: 46363 - RNA, 19 nt, Artificial Sequence
  Description of Artificial Sequence: Synthetic oligonucleotide
gaucuauauaucaaacgca

SEQ ID NO: 46364 - RNA, 19 nt, Artificial Sequence
  Description of Artificial Sequence: Synthetic oligonucleotide
gauucaacuugcauugaug

SEQ ID NO: 46365 - RNA, 19 nt, Artificial Sequence
  Description of Artificial Sequence: Synthetic oligonucleotide
guacauuuaaaugggcugc

SEQ ID NO: 46366 - RNA, 19 nt, Artificial Sequence
  Description of Artificial Sequence: Synthetic oligonucleotide
ugucacauuuacaguaggu

SEQ ID NO: 46367 - RNA, 19 nt, Artificial Sequence
  Description of Artificial Sequence: Synthetic oligonucleotide
uuuuacguggagagcauau

SEQ ID NO: 46368 - RNA, 19 nt, Artificial Sequence
  Description of Artificial Sequence: Synthetic oligonucleotide
ugauguaguuaccccagcu

SEQ ID NO: 46369 - RNA, 19 nt, Artificial Sequence
  Description of Artificial Sequence: Synthetic oligonucleotide
  modified_base (5)..(5): a, c, u, g, unknown or other
ugaanaucagauccacaua

SEQ ID NO: 46370 - RNA, 19 nt, Artificial Sequence
  Description of Artificial Sequence: Synthetic oligonucleotide
ugacaugcgauuccauaca

SEQ ID NO: 46371 - RNA, 19 nt, Artificial Sequence
  Description of Artificial Sequence: Synthetic oligonucleotide
cucauucagucacaacucg

SEQ ID NO: 46372 - RNA, 19 nt, Artificial Sequence
  Description of Artificial Sequence: Synthetic oligonucleotide
cacugguaaauucuagagc

SEQ ID NO: 46373 - RNA, 19 nt, Artificial Sequence
  Description of Artificial Sequence: Synthetic oligonucleotide
acauuuacaguaggucccc

SEQ ID NO: 46374 - RNA, 19 nt, Artificial Sequence
  Description of Artificial Sequence: Synthetic oligonucleotide
aauuauggcuacgauggaa

SEQ ID NO: 46375 - RNA, 19 nt, Artificial Sequence
  Description of Artificial Sequence: Synthetic oligonucleotide
uaggugcaugcuuaaagca

SEQ ID NO: 46376 - RNA, 19 nt, Artificial Sequence
  Description of Artificial Sequence: Synthetic oligonucleotide
uacuaaaaguucccaggcu

SEQ ID NO: 46377 - RNA, 19 nt, Artificial Sequence
  Description of Artificial Sequence: Synthetic oligonucleotide
aagagacgaugaauaauuc

SEQ ID NO: 46378 - RNA, 19 nt, Artificial Sequence
  Description of Artificial Sequence: Synthetic oligonucleotide
ucucuagcuaggaaggaau

SEQ ID NO: 46379 - RNA, 19 nt, Artificial Sequence
  Description of Artificial Sequence: Synthetic oligonucleotide
uuggaaaguuugaggaugu

SEQ ID NO: 46380 - RNA, 19 nt, Artificial Sequence
  Description of Artificial Sequence: Synthetic oligonucleotide
ugugcguauuaccaaugcu

SEQ ID NO: 46381 - RNA, 19 nt, Artificial Sequence
  Description of Artificial Sequence: Synthetic oligonucleotide
gugacaugcgauuccauac

SEQ ID NO: 46382 - RNA, 19 nt, Artificial Sequence
  Description of Artificial Sequence: Synthetic oligonucleotide
auuaaacguggcuccauga

SEQ ID NO: 46383 - RNA, 19 nt, Artificial Sequence
  Description of Artificial Sequence: Synthetic oligonucleotide
uugggaaauauucuucauu

SEQ ID NO: 46384 - RNA, 19 nt, Artificial Sequence
  Description of Artificial Sequence: Synthetic oligonucleotide
gacacgagauucaacuugc

SEQ ID NO: 46385 - RNA, 19 nt, Artificial Sequence
  Description of Artificial Sequence: Synthetic oligonucleotide
gcaagcacaauuaaugacc

SEQ ID NO: 46386 - RNA, 19 nt, Artificial Sequence
  Description of Artificial Sequence: Synthetic oligonucleotide
uaguauccgcagaauaaga

SEQ ID NO: 46387 - RNA, 19 nt, Artificial Sequence
  Description of Artificial Sequence: Synthetic oligonucleotide
uuauguuauuaaccccucu

SEQ ID NO: 46388 - RNA, 19 nt, Artificial Sequence
  Description of Artificial Sequence: Synthetic oligonucleotide
aacgacaguucauuugcau

SEQ ID NO: 46389 - RNA, 19 nt, Artificial Sequence
  Description of Artificial Sequence: Synthetic oligonucleotide
uaaugggucuauagccucc

SEQ ID NO: 46390 - RNA, 19 nt, Artificial Sequence
  Description of Artificial Sequence: Synthetic oligonucleotide
  modified_base (3)..(3): a, c, u, g, unknown or other
uunuuuguuuaugaaccuc

SEQ ID NO: 46391 - RNA, 19 nt, Artificial Sequence
  Description of Artificial Sequence: Synthetic oligonucleotide
auagaaugagguaaaccug

SEQ ID NO: 46392 - RNA, 19 nt, Artificial Sequence
  Description of Artificial Sequence: Synthetic oligonucleotide
augucacauuuacaguagg

SEQ ID NO: 46393 - RNA, 19 nt, Artificial Sequence
  Description of Artificial Sequence: Synthetic oligonucleotide
uguacgacgacaggaauua

SEQ ID NO: 46394 - RNA, 19 nt, Artificial Sequence
  Description of Artificial Sequence: Synthetic oligonucleotide
agagaacggggcuaaugag

SEQ ID NO: 46395 - RNA, 19 nt, Artificial Sequence
  Description of Artificial Sequence: Synthetic oligonucleotide
aacggggcuaaugaguugu

SEQ ID NO: 46396 - RNA, 19 nt, Artificial Sequence
  Description of Artificial Sequence: Synthetic oligonucleotide
guaccauggaagcacaguc

SEQ ID NO: 46397 - RNA, 19 nt, Artificial Sequence
  Description of Artificial Sequence: Synthetic oligonucleotide
gaagguucauuuguaacga

SEQ ID NO: 46398 - RNA, 19 nt, Artificial Sequence
  Description of Artificial Sequence: Synthetic oligonucleotide
aaccugcuaauuuuauaau

SEQ ID NO: 46399 - RNA, 19 nt, Artificial Sequence
  Description of Artificial Sequence: Synthetic oligonucleotide
uaucaaacgcacacagaaa

SEQ ID NO: 46400 - RNA, 19 nt, Artificial Sequence
  Description of Artificial Sequence: Synthetic oligonucleotide
cuggccuaacucuaaaauc

SEQ ID NO: 46401 - RNA, 19 nt, Artificial Sequence
  Description of Artificial Sequence: Synthetic oligonucleotide
guauacaauuggaagcuug

SEQ ID NO: 46402 - RNA, 19 nt, Artificial Sequence
  Description of Artificial Sequence: Synthetic oligonucleotide
ggggcuaaugaguuguacg

SEQ ID NO: 46403 - RNA, 19 nt, Artificial Sequence
  Description of Artificial Sequence: Synthetic oligonucleotide
ugaaaacccguguuaguau

SEQ ID NO: 46404 - RNA, 19 nt, Artificial Sequence
  Description of Artificial Sequence: Synthetic oligonucleotide
aaacguggcuccaugagau

SEQ ID NO: 46405 - RNA, 19 nt, Artificial Sequence
  Description of Artificial Sequence: Synthetic oligonucleotide
cacgaaacccgugauuugg

SEQ ID NO: 46406 - RNA, 19 nt, Artificial Sequence
  Description of Artificial Sequence: Synthetic oligonucleotide
guggcuacacauauuaaac

SEQ ID NO: 46407 - RNA, 19 nt, Artificial Sequence
  Description of Artificial Sequence: Synthetic oligonucleotide
gcuacuacaaaaccuuaug

SEQ ID NO: 46408 - RNA, 19 nt, Artificial Sequence
  Description of Artificial Sequence: Synthetic oligonucleotide
caaaugagcauuucacaga

SEQ ID NO: 46409 - RNA, 19 nt, Artificial Sequence
  Description of Artificial Sequence: Synthetic oligonucleotide
uacguggagagcauauaaa

SEQ ID NO: 46410 - RNA, 19 nt, Artificial Sequence
  Description of Artificial Sequence: Synthetic oligonucleotide
cuaaugaguuguacgacga

SEQ ID NO: 46411 - RNA, 19 nt, Artificial Sequence
  Description of Artificial Sequence: Synthetic oligonucleotide
guauccucaagagacgaug

SEQ ID NO: 46412 - RNA, 19 nt, Artificial Sequence
  Description of Artificial Sequence: Synthetic oligonucleotide
gagagguugcaugauaaca

SEQ ID NO: 46413 - RNA, 19 nt, Artificial Sequence
  Description of Artificial Sequence: Synthetic oligonucleotide
uccugcuaaccuaaaacuu

SEQ ID NO: 46414 - RNA, 19 nt, Artificial Sequence
  Description of Artificial Sequence: Synthetic oligonucleotide
uguaguuaccccagcugaa

SEQ ID NO: 46415 - RNA, 19 nt, Artificial Sequence
  Description of Artificial Sequence: Synthetic oligonucleotide
ucuguauugggaacuucua

SEQ ID NO: 46416 - RNA, 19 nt, Artificial Sequence
  Description of Artificial Sequence: Synthetic oligonucleotide
gagcauuguaaccugcuaa

SEQ ID NO: 46417 - RNA, 19 nt, Artificial Sequence
  Description of Artificial Sequence: Synthetic oligonucleotide
uucacgccauuauauacau

SEQ ID NO: 46418 - RNA, 19 nt, Artificial Sequence
  Description of Artificial Sequence: Synthetic oligonucleotide
  modified_base (7)..(7): a, c, u, g, unknown or other
gaugaanaucagauccaca

SEQ ID NO: 46419 - RNA, 19 nt, Artificial Sequence
  Description of Artificial Sequence: Synthetic oligonucleotide
guuaguauccgcagaauaa

SEQ ID NO: 46420 - RNA, 19 nt, Artificial Sequence
  Description of Artificial Sequence: Synthetic oligonucleotide
accuuauguacuuuacuuu

SEQ ID NO: 46421 - RNA, 19 nt, Artificial Sequence
  Description of Artificial Sequence: Synthetic oligonucleotide
uuguauugcugggacuuag

SEQ ID NO: 46422 - RNA, 19 nt, Artificial Sequence
  Description of Artificial Sequence: Synthetic oligonucleotide
aaagacugcuauaaccuuu

SEQ ID NO: 46423 - RNA, 19 nt, Artificial Sequence
  Description of Artificial Sequence: Synthetic oligonucleotide
uuguacgacgacaggaauu

SEQ ID NO: 46424 - RNA, 19 nt, Artificial Sequence
  Description of Artificial Sequence: Synthetic oligonucleotide
aacguggcuccaugagauc

SEQ ID NO: 46425 - RNA, 19 nt, Artificial Sequence
  Description of Artificial Sequence: Synthetic oligonucleotide
ggugcaugcuuaaagcagg

SEQ ID NO: 46426 - RNA, 19 nt, Artificial Sequence
  Description of Artificial Sequence: Synthetic oligonucleotide
gaguuguacgacgacagga

SEQ ID NO: 46427 - RNA, 19 nt, Artificial Sequence
  Description of Artificial Sequence: Synthetic oligonucleotide
auauugaucuauauaucaa

SEQ ID NO: 46428 - RNA, 19 nt, Artificial Sequence
  Description of Artificial Sequence: Synthetic oligonucleotide
aauaucccuuuuaugggau

SEQ ID NO: 46429 - RNA, 19 nt, Artificial Sequence
  Description of Artificial Sequence: Synthetic oligonucleotide
gagguugcaugauaacaga

SEQ ID NO: 46430 - RNA, 19 nt, Artificial Sequence
  Description of Artificial Sequence: Synthetic oligonucleotide
uaucaccccagcagguccc

SEQ ID NO: 46431 - RNA, 19 nt, Artificial Sequence
  Description of Artificial Sequence: Synthetic oligonucleotide
gagucaguauuaagaaaug

SEQ ID NO: 46432 - RNA, 19 nt, Artificial Sequence
  Description of Artificial Sequence: Synthetic oligonucleotide
uguuuucaggcgugguuac

SEQ ID NO: 46433 - RNA, 19 nt, Artificial Sequence
  Description of Artificial Sequence: Synthetic oligonucleotide
ugcuucugagccaucgauc

SEQ ID NO: 46434 - RNA, 19 nt, Artificial Sequence
  Description of Artificial Sequence: Synthetic oligonucleotide
guuaauugacaccacccua

SEQ ID NO: 46435 - RNA, 19 nt, Artificial Sequence
  Description of Artificial Sequence: Synthetic oligonucleotide
  modified_base (5)..(5): a, c, u, g, unknown or other
aaucncccaacagguacca

SEQ ID NO: 46436 - RNA, 19 nt, Artificial Sequence
  Description of Artificial Sequence: Synthetic oligonucleotide
cugugcguauuaccaaugc

SEQ ID NO: 46437 - RNA, 19 nt, Artificial Sequence
  Description of Artificial Sequence: Synthetic oligonucleotide
ucaggcgugguuacauuaa

SEQ ID NO: 46438 - RNA, 19 nt, Artificial Sequence
  Description of Artificial Sequence: Synthetic oligonucleotide
aagagcauuguaaccugcu

SEQ ID NO: 46439 - RNA, 19 nt, Artificial Sequence
  Description of Artificial Sequence: Synthetic oligonucleotide
uuuaauccgcugagccuga

SEQ ID NO: 46440 - RNA, 19 nt, Artificial Sequence
  Description of Artificial Sequence: Synthetic oligonucleotide
cuaauuaccaggacuggcu

SEQ ID NO: 46441 - RNA, 19 nt, Artificial Sequence
  Description of Artificial Sequence: Synthetic oligonucleotide
aaccugugcguauuaccaa

SEQ ID NO: 46442 - RNA, 19 nt, Artificial Sequence
  Description of Artificial Sequence: Synthetic oligonucleotide
uggaggcuguaguugauau

SEQ ID NO: 46443 - RNA, 19 nt, Artificial Sequence
  Description of Artificial Sequence: Synthetic oligonucleotide
cgaacaagucuuuacaaac

SEQ ID NO: 46444 - RNA, 19 nt, Artificial Sequence
  Description of Artificial Sequence: Synthetic oligonucleotide
ucuagcuaggaaggaauau

SEQ ID NO: 46445 - RNA, 19 nt, Artificial Sequence
  Description of Artificial Sequence: Synthetic oligonucleotide
cacccuacaggauagaggu

SEQ ID NO: 46446 - RNA, 19 nt, Artificial Sequence
  Description of Artificial Sequence: Synthetic oligonucleotide
ucccuugguaauacagaac

SEQ ID NO: 46447 - RNA, 19 nt, Artificial Sequence
  Description of Artificial Sequence: Synthetic oligonucleotide
cuggaugacuacaaaugga

SEQ ID NO: 46448 - RNA, 19 nt, Artificial Sequence
  Description of Artificial Sequence: Synthetic oligonucleotide
caacucgguagaaggguag

SEQ ID NO: 46449 - RNA, 19 nt, Artificial Sequence
  Description of Artificial Sequence: Synthetic oligonucleotide
acgacaguucauuugcauu

SEQ ID NO: 46450 - RNA, 19 nt, Artificial Sequence
  Description of Artificial Sequence: Synthetic oligonucleotide
uguauccucaagagacgau

SEQ ID NO: 46451 - RNA, 19 nt, Artificial Sequence
  Description of Artificial Sequence: Synthetic oligonucleotide
cuugacgacugugaugcug

SEQ ID NO: 46452 - RNA, 19 nt, Artificial Sequence
  Description of Artificial Sequence: Synthetic oligonucleotide
uccuacaccuaagguauga

SEQ ID NO: 46453 - RNA, 19 nt, Artificial Sequence
  Description of Artificial Sequence: Synthetic oligonucleotide
aguauccgcagaauaagaa

SEQ ID NO: 46454 - RNA, 19 nt, Artificial Sequence
  Description of Artificial Sequence: Synthetic oligonucleotide
aggaagcuauaauccucuc

SEQ ID NO: 46455 - RNA, 19 nt, Artificial Sequence
  Description of Artificial Sequence: Synthetic oligonucleotide
aaguuuuguguaaccucug

SEQ ID NO: 46456 - RNA, 19 nt, Artificial Sequence
  Description of Artificial Sequence: Synthetic oligonucleotide
gugcugguaccauggaagc

SEQ ID NO: 46457 - RNA, 19 nt, Artificial Sequence
  Description of Artificial Sequence: Synthetic oligonucleotide
agguucauuuguaacgaca

SEQ ID NO: 46458 - RNA, 19 nt, Artificial Sequence
  Description of Artificial Sequence: Synthetic oligonucleotide
uucgaguaacuguggcuac

SEQ ID NO: 46459 - RNA, 19 nt, Artificial Sequence
  Description of Artificial Sequence: Synthetic oligonucleotide
caugcgauuccauacauuu

SEQ ID NO: 46460 - RNA, 19 nt, Artificial Sequence
  Description of Artificial Sequence: Synthetic oligonucleotide
cccgugauuuggaacaucc

SEQ ID NO: 46461 - RNA, 19 nt, Artificial Sequence
  Description of Artificial Sequence: Synthetic oligonucleotide
ccaguuaauugacaccacc

SEQ ID NO: 46462 - RNA, 19 nt, Artificial Sequence
  Description of Artificial Sequence: Synthetic oligonucleotide
auucccuugguaauacaga

SEQ ID NO: 46463 - RNA, 19 nt, Artificial Sequence
  Description of Artificial Sequence: Synthetic oligonucleotide
cuguacauuuaaaugggcu

SEQ ID NO: 46464 - RNA, 19 nt, Artificial Sequence
  Description of Artificial Sequence: Synthetic oligonucleotide
cuaauuguugcaacacaua

SEQ ID NO: 46465 - RNA, 19 nt, Artificial Sequence
  Description of Artificial Sequence: Synthetic oligonucleotide
caucgaucccaaucaucag

SEQ ID NO: 46466 - RNA, 19 nt, Artificial Sequence
  Description of Artificial Sequence: Synthetic oligonucleotide
uugacacgagauucaacuu

SEQ ID NO: 46467 - RNA, 19 nt, Artificial Sequence
  Description of Artificial Sequence: Synthetic oligonucleotide
aguuguacgacgacaggaa

SEQ ID NO: 46468 - RNA, 19 nt, Artificial Sequence
  Description of Artificial Sequence: Synthetic oligonucleotide
uggguuuaauccgcugagc

SEQ ID NO: 46469 - RNA, 19 nt, Artificial Sequence
  Description of Artificial Sequence: Synthetic oligonucleotide
aacucgguagaaggguaga

SEQ ID NO: 46470 - RNA, 19 nt, Artificial Sequence
  Description of Artificial Sequence: Synthetic oligonucleotide
auucagucacaacucggua

SEQ ID NO: 46471 - RNA, 19 nt, Artificial Sequence
  Description of Artificial Sequence: Synthetic oligonucleotide
gugauuuggaacauccuua

SEQ ID NO: 46472 - RNA, 19 nt, Artificial Sequence
  Description of Artificial Sequence: Synthetic oligonucleotide
gcgugguuacauuaaguug

SEQ ID NO: 46473 - RNA, 19 nt, Artificial Sequence
  Description of Artificial Sequence: Synthetic oligonucleotide
acacgaaacccgugauuug

SEQ ID NO: 46474 - RNA, 19 nt, Artificial Sequence
  Description of Artificial Sequence: Synthetic oligonucleotide
uuguaacgacaguucauuu

SEQ ID NO: 46475 - RNA, 19 nt, Artificial Sequence
  Description of Artificial Sequence: Synthetic oligonucleotide
agagcauuguaaccugcua

SEQ ID NO: 46476 - RNA, 19 nt, Artificial Sequence
  Description of Artificial Sequence: Synthetic oligonucleotide
gagggguucaguugcauau

SEQ ID NO: 46477 - RNA, 19 nt, Artificial Sequence
  Description of Artificial Sequence: Synthetic oligonucleotide
gaauuauggcuacgaugga

SEQ ID NO: 46478 - RNA, 19 nt, Artificial Sequence
  Description of Artificial Sequence: Synthetic oligonucleotide
ugauucccuugguaauaca

SEQ ID NO: 46479 - RNA, 19 nt, Artificial Sequence
  Description of Artificial Sequence: Synthetic oligonucleotide
uuuacguggagagcauaua

SEQ ID NO: 46480 - RNA, 19 nt, Artificial Sequence
  Description of Artificial Sequence: Synthetic oligonucleotide
gugcguauuaccaaugcua

SEQ ID NO: 46481 - RNA, 19 nt, Artificial Sequence
  Description of Artificial Sequence: Synthetic oligonucleotide
guaaccugcuaauuuuaua

SEQ ID NO: 46482 - RNA, 19 nt, Artificial Sequence
  Description of Artificial Sequence: Synthetic oligonucleotide
ucaauccugcuaaccuaaa

SEQ ID NO: 46483 - RNA, 19 nt, Artificial Sequence
  Description of Artificial Sequence: Synthetic oligonucleotide
  modified_base (8)..(8): a, c, u, g, unknown or other
ggaugaanaucagauccac

SEQ ID NO: 46484 - RNA, 19 nt, Artificial Sequence
  Description of Artificial Sequence: Synthetic oligonucleotide
guaaaagagaacggggcua

SEQ ID NO: 46485 - RNA, 19 nt, Artificial Sequence
  Description of Artificial Sequence: Synthetic oligonucleotide
ucccuuuuaugggauguuc

SEQ ID NO: 46486 - RNA, 19 nt, Artificial Sequence
  Description of Artificial Sequence: Synthetic oligonucleotide
caggcgugguuacauuaag

SEQ ID NO: 46487 - RNA, 19 nt, Artificial Sequence
  Description of Artificial Sequence: Synthetic oligonucleotide
cugaaaacccguguuagua

SEQ ID NO: 46488 - RNA, 19 nt, Artificial Sequence
  Description of Artificial Sequence: Synthetic oligonucleotide
guaaaccugugcguauuac

SEQ ID NO: 46489 - RNA, 19 nt, Artificial Sequence
  Description of Artificial Sequence: Synthetic oligonucleotide
acgccauuauauacauuuc

SEQ ID NO: 46490 - RNA, 19 nt, Artificial Sequence
  Description of Artificial Sequence: Synthetic oligonucleotide
guagcuacuacaaaaccuu

SEQ ID NO: 46491 - RNA, 19 nt, Artificial Sequence
  Description of Artificial Sequence: Synthetic oligonucleotide
ccacccuacaggauagagg

SEQ ID NO: 46492 - RNA, 19 nt, Artificial Sequence
  Description of Artificial Sequence: Synthetic oligonucleotide
gaacggggcuaaugaguug

SEQ ID NO: 46493 - RNA, 19 nt, Artificial Sequence
  Description of Artificial Sequence: Synthetic oligonucleotide
cugcaauggagccgguuuc

SEQ ID NO: 46494 - RNA, 19 nt, Artificial Sequence
  Description of Artificial Sequence: Synthetic oligonucleotide
agcugcuaugaagcuauug

SEQ ID NO: 46495 - RNA, 19 nt, Artificial Sequence
  Description of Artificial Sequence: Synthetic oligonucleotide
ucuacccauugaucauacu

SEQ ID NO: 46496 - RNA, 19 nt, Artificial Sequence
  Description of Artificial Sequence: Synthetic oligonucleotide
guagacugcagucuguauu

SEQ ID NO: 46497 - RNA, 19 nt, Artificial Sequence
  Description of Artificial Sequence: Synthetic oligonucleotide
agucuagagaagaaucauu

SEQ ID NO: 46498 - RNA, 19 nt, Artificial Sequence
  Description of Artificial Sequence: Synthetic oligonucleotide
auauuaaacguggcuccau

SEQ ID NO: 46499 - RNA, 19 nt, Artificial Sequence
  Description of Artificial Sequence: Synthetic oligonucleotide
cauauuaaacguggcucca

SEQ ID NO: 46500 - RNA, 19 nt, Artificial Sequence
  Description of Artificial Sequence: Synthetic oligonucleotide
cugcgauguggucauuuuc

SEQ ID NO: 46501 - RNA, 19 nt, Artificial Sequence
  Description of Artificial Sequence: Synthetic oligonucleotide
gagaacggggcuaaugagu

SEQ ID NO: 46502 - RNA, 19 nt, Artificial Sequence
  Description of Artificial Sequence: Synthetic oligonucleotide
gacuggccuaacucuaaaa

SEQ ID NO: 46503 - RNA, 19 nt, Artificial Sequence
  Description of Artificial Sequence: Synthetic oligonucleotide
acaccacccuacaggauag

SEQ ID NO: 46504 - RNA, 19 nt, Artificial Sequence
  Description of Artificial Sequence: Synthetic oligonucleotide
  modified_base (18)..(18): a, c, u, g, unknown or other
ccaaccaacuggaugaana

SEQ ID NO: 46505 - RNA, 19 nt, Artificial Sequence
  Description of Artificial Sequence: Synthetic oligonucleotide
uuuguauugcugggacuua

SEQ ID NO: 46506 - RNA, 19 nt, Artificial Sequence
  Description of Artificial Sequence: Synthetic oligonucleotide
acccguguuaguauccgca

SEQ ID NO: 46507 - RNA, 19 nt, Artificial Sequence
  Description of Artificial Sequence: Synthetic oligonucleotide
gagccgguuucccugaggu

SEQ ID NO: 46508 - RNA, 19 nt, Artificial Sequence
  Description of Artificial Sequence: Synthetic oligonucleotide
uuacuuccaguagcuacua

SEQ ID NO: 46509 - RNA, 19 nt, Artificial Sequence
  Description of Artificial Sequence: Synthetic oligonucleotide
cauuuaaaugggcugcaau

SEQ ID NO: 46510 - RNA, 19 nt, Artificial Sequence
  Description of Artificial Sequence: Synthetic oligonucleotide
ggugacaugcgauuccaua

SEQ ID NO: 46511 - RNA, 19 nt, Artificial Sequence
  Description of Artificial Sequence: Synthetic oligonucleotide
agucuacccauugaucaua

SEQ ID NO: 46512 - RNA, 19 nt, Artificial Sequence
  Description of Artificial Sequence: Synthetic oligonucleotide
uuaauccgcugagccugag

SEQ ID NO: 46513 - RNA, 19 nt, Artificial Sequence
  Description of Artificial Sequence: Synthetic oligonucleotide
auagccugcuguacagcug

SEQ ID NO: 46514 - RNA, 19 nt, Artificial Sequence
  Description of Artificial Sequence: Synthetic oligonucleotide
gacaugcgauuccauacau

SEQ ID NO: 46515 - RNA, 19 nt, Artificial Sequence
  Description of Artificial Sequence: Synthetic oligonucleotide
ccagauauugaucuauaua

SEQ ID NO: 46516 - RNA, 19 nt, Artificial Sequence
  Description of Artificial Sequence: Synthetic oligonucleotide
agaguucuccuaguuucau

SEQ ID NO: 46517 - RNA, 19 nt, Artificial Sequence
  Description of Artificial Sequence: Synthetic oligonucleotide
cucuagcuaggaaggaaua

SEQ ID NO: 46518 - RNA, 19 nt, Artificial Sequence
  Description of Artificial Sequence: Synthetic oligonucleotide
ggcuaaugaguuguacgac

SEQ ID NO: 46519 - RNA, 19 nt, Artificial Sequence
  Description of Artificial Sequence: Synthetic oligonucleotide
uggaaaguuugaggauguc

SEQ ID NO: 46520 - RNA, 19 nt, Artificial Sequence
  Description of Artificial Sequence: Synthetic oligonucleotide
aacccgugauuuggaacau

SEQ ID NO: 46521 - RNA, 19 nt, Artificial Sequence
  Description of Artificial Sequence: Synthetic oligonucleotide
ccgcagaauaagaaguuga

SEQ ID NO: 46522 - RNA, 19 nt, Artificial Sequence
  Description of Artificial Sequence: Synthetic oligonucleotide
cguauuaccaaugcuauua

SEQ ID NO: 46523 - RNA, 19 nt, Artificial Sequence
  Description of Artificial Sequence: Synthetic oligonucleotide
aggcgugguuacauuaagu

SEQ ID NO: 46524 - RNA, 19 nt, Artificial Sequence
  Description of Artificial Sequence: Synthetic oligonucleotide
cucgguagaaggguagaaa

SEQ ID NO: 46525 - RNA, 19 nt, Artificial Sequence
  Description of Artificial Sequence: Synthetic oligonucleotide
cccguguuaguauccgcag

SEQ ID NO: 46526 - RNA, 19 nt, Artificial Sequence
  Description of Artificial Sequence: Synthetic oligonucleotide
cccuacaggauagagguca

SEQ ID NO: 46527 - RNA, 19 nt, Artificial Sequence
  Description of Artificial Sequence: Synthetic oligonucleotide
  modified_base (17)..(17): a, c, u, g, unknown or other
caaccaacuggaugaanau

SEQ ID NO: 46528 - RNA, 19 nt, Artificial Sequence
  Description of Artificial Sequence: Synthetic oligonucleotide
ggcgugguuacauuaaguu

SEQ ID NO: 46529 - RNA, 19 nt, Artificial Sequence
  Description of Artificial Sequence: Synthetic oligonucleotide
auccgcagaauaagaaguu

SEQ ID NO: 46530 - RNA, 19 nt, Artificial Sequence
  Description of Artificial Sequence: Synthetic oligonucleotide
acgaaacccgugauuugga

SEQ ID NO: 46531 - RNA, 19 nt, Artificial Sequence
  Description of Artificial Sequence: Synthetic oligonucleotide
ccugugcguauuaccaaug

SEQ ID NO: 46532 - RNA, 19 nt, Artificial Sequence
  Description of Artificial Sequence: Synthetic oligonucleotide
aggcgacuggagcugcuau

SEQ ID NO: 46533 - RNA, 19 nt, Artificial Sequence
  Description of Artificial Sequence: Synthetic oligonucleotide
guuaccccagcugaagccu

SEQ ID NO: 46534 - RNA, 19 nt, Artificial Sequence
  Description of Artificial Sequence: Synthetic oligonucleotide
guuguacgacgacaggaau

SEQ ID NO: 46535 - RNA, 19 nt, Artificial Sequence
  Description of Artificial Sequence: Synthetic oligonucleotide
ugguuacauuaaguugcuc

SEQ ID NO: 46536 - RNA, 19 nt, Artificial Sequence
  Description of Artificial Sequence: Synthetic oligonucleotide
ggaggcuguaguugauauc

SEQ ID NO: 46537 - RNA, 19 nt, Artificial Sequence
  Description of Artificial Sequence: Synthetic oligonucleotide
cacaacucgguagaagggu

SEQ ID NO: 46538 - RNA, 19 nt, Artificial Sequence
  Description of Artificial Sequence: Synthetic oligonucleotide
gguagguagacugcagucu

SEQ ID NO: 46539 - RNA, 19 nt, Artificial Sequence
  Description of Artificial Sequence: Synthetic oligonucleotide
ccgaacaagucuuuacaaa

SEQ ID NO: 46540 - RNA, 19 nt, Artificial Sequence
  Description of Artificial Sequence: Synthetic oligonucleotide
cuguggcuacacauauuaa

SEQ ID NO: 46541 - RNA, 19 nt, Artificial Sequence
  Description of Artificial Sequence: Synthetic oligonucleotide
cgccauuauauacauuuca

SEQ ID NO: 46542 - RNA, 19 nt, Artificial Sequence
  Description of Artificial Sequence: Synthetic oligonucleotide
ggcuuacaguucauucccc

SEQ ID NO: 46543 - RNA, 19 nt, Artificial Sequence
  Description of Artificial Sequence: Synthetic oligonucleotide
gguaaaccugugcguauua

SEQ ID NO: 46544 - RNA, 19 nt, Artificial Sequence
  Description of Artificial Sequence: Synthetic oligonucleotide
cacgagauucaacuugcau

SEQ ID NO: 46545 - RNA, 19 nt, Artificial Sequence
  Description of Artificial Sequence: Synthetic oligonucleotide
acacgagauucaacuugca

SEQ ID NO: 46546 - RNA, 19 nt, Artificial Sequence
  Description of Artificial Sequence: Synthetic oligonucleotide
acaugcgauuccauacauu

SEQ ID NO: 46547 - RNA, 19 nt, Artificial Sequence
  Description of Artificial Sequence: Synthetic oligonucleotide
augcgauuccauacauuuu

SEQ ID NO: 46548 - RNA, 19 nt, Artificial Sequence
  Description of Artificial Sequence: Synthetic oligonucleotide
ccccaccaaaauaguuucc

SEQ ID NO: 46549 - RNA, 19 nt, Artificial Sequence
  Description of Artificial Sequence: Synthetic oligonucleotide
agggguucaguugcauauu

SEQ ID NO: 46550 - RNA, 19 nt, Artificial Sequence
  Description of Artificial Sequence: Synthetic oligonucleotide
agcacaguccuggguuuaa

SEQ ID NO: 46551 - RNA, 19 nt, Artificial Sequence
  Description of Artificial Sequence: Synthetic oligonucleotide
ugcugcaauggagccgguu

SEQ ID NO: 46552 - RNA, 19 nt, Artificial Sequence
  Description of Artificial Sequence: Synthetic oligonucleotide
gcugcaauggagccgguuu

SEQ ID NO: 46553 - RNA, 19 nt, Artificial Sequence
  Description of Artificial Sequence: Synthetic oligonucleotide
cagucuacccauugaucau

SEQ ID NO: 46554 - RNA, 19 nt, Artificial Sequence
  Description of Artificial Sequence: Synthetic oligonucleotide
ggcuacgauggaagccucc

SEQ ID NO: 46555 - RNA, 19 nt, Artificial Sequence
  Description of Artificial Sequence: Synthetic oligonucleotide
gccaucgaucccaaucauc

SEQ ID NO: 46556 - RNA, 19 nt, Artificial Sequence
  Description of Artificial Sequence: Synthetic oligonucleotide
cuacacgaaacccgugauu

SEQ ID NO: 46557 - RNA, 19 nt, Artificial Sequence
  Description of Artificial Sequence: Synthetic oligonucleotide
gggaggguauucacaucac

SEQ ID NO: 46558 - RNA, 19 nt, Artificial Sequence
  Description of Artificial Sequence: Synthetic oligonucleotide
  modified_base (4)..(4): a, c, u, g, unknown or other
aucncccaacagguaccaa

SEQ ID NO: 46559 - RNA, 19 nt, Artificial Sequence
  Description of Artificial Sequence: Synthetic oligonucleotide
ggaagauacccaguuuaau

SEQ ID NO: 46560 - RNA, 19 nt, Artificial Sequence
  Description of Artificial Sequence: Synthetic oligonucleotide
gcaugauaacagaaccagu

SEQ ID NO: 46561 - RNA, 19 nt, Artificial Sequence
  Description of Artificial Sequence: Synthetic oligonucleotide
ugaccccuuccgugaucua

SEQ ID NO: 46562 - RNA, 19 nt, Artificial Sequence
  Description of Artificial Sequence: Synthetic oligonucleotide
ccguguuaguauccgcaga

SEQ ID NO: 46563 - RNA, 19 nt, Artificial Sequence
  Description of Artificial Sequence: Synthetic oligonucleotide
ccuuuguauugcugggacu

SEQ ID NO: 46564 - RNA, 19 nt, Artificial Sequence
  Description of Artificial Sequence: Synthetic oligonucleotide
gguauacaauuggaagcuu

SEQ ID NO: 46565 - RNA, 19 nt, Artificial Sequence
  Description of Artificial Sequence: Synthetic oligonucleotide
gcauuguaaccugcuaauu

SEQ ID NO: 46566 - RNA, 19 nt, Artificial Sequence
  Description of Artificial Sequence: Synthetic oligonucleotide
gcacaauuaaugaccccuu

SEQ ID NO: 46567 - RNA, 19 nt, Artificial Sequence
  Description of Artificial Sequence: Synthetic oligonucleotide
ccuacacgaaacccgugau

SEQ ID NO: 46568 - RNA, 19 nt, Artificial Sequence
  Description of Artificial Sequence: Synthetic oligonucleotide
cggggcuaaugaguuguac

SEQ ID NO: 46569 - RNA, 19 nt, Artificial Sequence
  Description of Artificial Sequence: Synthetic oligonucleotide
gcguauuaccaaugcuauu

SEQ ID NO: 46570 - RNA, 19 nt, Artificial Sequence
  Description of Artificial Sequence: Synthetic oligonucleotide
ccgugaucuacauggugau

SEQ ID NO: 46571 - RNA, 19 nt, Artificial Sequence
  Description of Artificial Sequence: Synthetic oligonucleotide
caccacccuacaggauaga

SEQ ID NO: 46572 - RNA, 19 nt, Artificial Sequence
  Description of Artificial Sequence: Synthetic oligonucleotide
ccgugauuuggaacauccu

SEQ ID NO: 46573 - RNA, 19 nt, Artificial Sequence
  Description of Artificial Sequence: Synthetic oligonucleotide
guacgacgacaggaauuau

SEQ ID NO: 46574 - RNA, 19 nt, Artificial Sequence
  Description of Artificial Sequence: Synthetic oligonucleotide
gagcccucugugagggguu

SEQ ID NO: 46575 - RNA, 19 nt, Artificial Sequence
  Description of Artificial Sequence: Synthetic oligonucleotide
aaagauaggauucagcucc

SEQ ID NO: 46576 - RNA, 19 nt, Artificial Sequence
  Description of Artificial Sequence: Synthetic oligonucleotide
aaucagaucauauucauug

SEQ ID NO: 46577 - RNA, 19 nt, Artificial Sequence
  Description of Artificial Sequence: Synthetic oligonucleotide
gaaguaagaaguuaaauag

SEQ ID NO: 46578 - RNA, 19 nt, Artificial Sequence
  Description of Artificial Sequence: Synthetic oligonucleotide
uugaauaauucuuugaagg

SEQ ID NO: 46579 - RNA, 19 nt, Artificial Sequence
  Description of Artificial Sequence: Synthetic oligonucleotide
aaaucuaucacuggcaagc

SEQ ID NO: 46580 - RNA, 19 nt, Artificial Sequence
  Description of Artificial Sequence: Synthetic oligonucleotide
aagauuagccauuaaauca

SEQ ID NO: 46581 - RNA, 19 nt, Artificial Sequence
  Description of Artificial Sequence: Synthetic oligonucleotide
aaggcuauaaguguguugg

SEQ ID NO: 46582 - RNA, 19 nt, Artificial Sequence
  Description of Artificial Sequence: Synthetic oligonucleotide
acgucuuuaauccuggggc

SEQ ID NO: 46583 - RNA, 19 nt, Artificial Sequence
  Description of Artificial Sequence: Synthetic oligonucleotide
uauaccaauuccaaguacc

SEQ ID NO: 46584 - RNA, 19 nt, Artificial Sequence
  Description of Artificial Sequence: Synthetic oligonucleotide
aaagcggucauauuaaaau

SEQ ID NO: 46585 - RNA, 19 nt, Artificial Sequence
  Description of Artificial Sequence: Synthetic oligonucleotide
uauaugucaaugcaguaca

SEQ ID NO: 46586 - RNA, 19 nt, Artificial Sequence
  Description of Artificial Sequence: Synthetic oligonucleotide
uauuauacuaacagguucu

SEQ ID NO: 46587 - RNA, 19 nt, Artificial Sequence
  Description of Artificial Sequence: Synthetic oligonucleotide
uuagguuaaaggaagaaua

SEQ ID NO: 46588 - RNA, 19 nt, Artificial Sequence
  Description of Artificial Sequence: Synthetic oligonucleotide
ggaacuauuauacuaacag

SEQ ID NO: 46589 - RNA, 19 nt, Artificial Sequence
  Description of Artificial Sequence: Synthetic oligonucleotide
aaugauuggaacuauuaua

SEQ ID NO: 46590 - RNA, 19 nt, Artificial Sequence
  Description of Artificial Sequence: Synthetic oligonucleotide
aauauugcuucuuugggau

SEQ ID NO: 46591 - RNA, 19 nt, Artificial Sequence
  Description of Artificial Sequence: Synthetic oligonucleotide
uguaagauuagccauuaaa

SEQ ID NO: 46592 - RNA, 19 nt, Artificial Sequence
  Description of Artificial Sequence: Synthetic oligonucleotide
aaguaagaggguaagcgcc

SEQ ID NO: 46593 - RNA, 19 nt, Artificial Sequence
  Description of Artificial Sequence: Synthetic oligonucleotide
guguguguaucauagaggg

SEQ ID NO: 46594 - RNA, 19 nt, Artificial Sequence
  Description of Artificial Sequence: Synthetic oligonucleotide
cugaguaucaaacaacacc

SEQ ID NO: 46595 - RNA, 19 nt, Artificial Sequence
  Description of Artificial Sequence: Synthetic oligonucleotide
ugguuuacuuuuaauaagc

SEQ ID NO: 46596 - RNA, 19 nt, Artificial Sequence
  Description of Artificial Sequence: Synthetic oligonucleotide
ugugcauucaccuugucgu

SEQ ID NO: 46597 - RNA, 19 nt, Artificial Sequence
  Description of Artificial Sequence: Synthetic oligonucleotide
aguuuagucaccuacucug

SEQ ID NO: 46598 - RNA, 19 nt, Artificial Sequence
  Description of Artificial Sequence: Synthetic oligonucleotide
uucuuguauauacauguag

SEQ ID NO: 46599 - RNA, 19 nt, Artificial Sequence
  Description of Artificial Sequence: Synthetic oligonucleotide
cuaugagugaggauggugg

SEQ ID NO: 46600 - RNA, 19 nt, Artificial Sequence
  Description of Artificial Sequence: Synthetic oligonucleotide
uguauggagaacuaggguc

SEQ ID NO: 46601 - RNA, 19 nt, Artificial Sequence
  Description of Artificial Sequence: Synthetic oligonucleotide
aguuuaguauauuuagcuc

SEQ ID NO: 46602 - RNA, 19 nt, Artificial Sequence
  Description of Artificial Sequence: Synthetic oligonucleotide
aacgucuuuaauccugggg

SEQ ID NO: 46603 - RNA, 19 nt, Artificial Sequence
  Description of Artificial Sequence: Synthetic oligonucleotide
uguggacuagcaaaacugg

SEQ ID NO: 46604 - RNA, 19 nt, Artificial Sequence
  Description of Artificial Sequence: Synthetic oligonucleotide
uaagauuagccauuaaauc

SEQ ID NO: 46605 - RNA, 19 nt, Artificial Sequence
  Description of Artificial Sequence: Synthetic oligonucleotide
agaacaaccccaauugugc

SEQ ID NO: 46606 - RNA, 19 nt, Artificial Sequence
  Description of Artificial Sequence: Synthetic oligonucleotide
agaacuagggucaaggguc

SEQ ID NO: 46607 - RNA, 19 nt, Artificial Sequence
  Description of Artificial Sequence: Synthetic oligonucleotide
ugugguagaauggagaaac

SEQ ID NO: 46608 - RNA, 19 nt, Artificial Sequence
  Description of Artificial Sequence: Synthetic oligonucleotide
uaucuuaauugauuuacac

SEQ ID NO: 46609 - RNA, 19 nt, Artificial Sequence
  Description of Artificial Sequence: Synthetic oligonucleotide
guugaauaauucuuugaag

SEQ ID NO: 46610 - RNA, 19 nt, Artificial Sequence
  Description of Artificial Sequence: Synthetic oligonucleotide
uugaaucagaucauauuca

SEQ ID NO: 46611 - RNA, 19 nt, Artificial Sequence
  Description of Artificial Sequence: Synthetic oligonucleotide
acaauagugucuauggacg

SEQ ID NO: 46612 - RNA, 19 nt, Artificial Sequence
  Description of Artificial Sequence: Synthetic oligonucleotide
agcaaagauaacugccugc

SEQ ID NO: 46613 - RNA, 19 nt, Artificial Sequence
  Description of Artificial Sequence: Synthetic oligonucleotide
agagcuuauacacacacaa

SEQ ID NO: 46614 - RNA, 19 nt, Artificial Sequence
  Description of Artificial Sequence: Synthetic oligonucleotide
uauugagauuccaugcgag

SEQ ID NO: 46615 - RNA, 19 nt, Artificial Sequence
  Description of Artificial Sequence: Synthetic oligonucleotide
aagugaaaguuaacgauuc

SEQ ID NO: 46616 - RNA, 19 nt, Artificial Sequence
  Description of Artificial Sequence: Synthetic oligonucleotide
uugugcauucaccuugucg

SEQ ID NO: 46617 - RNA, 19 nt, Artificial Sequence
  Description of Artificial Sequence: Synthetic oligonucleotide
cucuagagagcuuauacac

SEQ ID NO: 46618 - RNA, 19 nt, Artificial Sequence
  Description of Artificial Sequence: Synthetic oligonucleotide
uuauauccuaguuuuauua

SEQ ID NO: 46619 - RNA, 19 nt, Artificial Sequence
  Description of Artificial Sequence: Synthetic oligonucleotide
ucuugaacaugauuacucc

SEQ ID NO: 46620 - RNA, 19 nt, Artificial Sequence
  Description of Artificial Sequence: Synthetic oligonucleotide
uaaaucacgaacagcugca

SEQ ID NO: 46621 - RNA, 19 nt, Artificial Sequence
  Description of Artificial Sequence: Synthetic oligonucleotide
agauuagccauuaaaucac

SEQ ID NO: 46622 - RNA, 19 nt, Artificial Sequence
  Description of Artificial Sequence: Synthetic oligonucleotide
gcaaaagugaaaguuaacg

SEQ ID NO: 46623 - RNA, 19 nt, Artificial Sequence
  Description of Artificial Sequence: Synthetic oligonucleotide
ucaacuaacuugcuguuau

SEQ ID NO: 46624 - RNA, 19 nt, Artificial Sequence
  Description of Artificial Sequence: Synthetic oligonucleotide
agauaaaucucuuuucaaa

SEQ ID NO: 46625 - RNA, 19 nt, Artificial Sequence
  Description of Artificial Sequence: Synthetic oligonucleotide
ucuacaugaaagauaggau

SEQ ID NO: 46626 - RNA, 19 nt, Artificial Sequence
  Description of Artificial Sequence: Synthetic oligonucleotide
uuucaggugucacuuuuag

SEQ ID NO: 46627 - RNA, 19 nt, Artificial Sequence
  Description of Artificial Sequence: Synthetic oligonucleotide
gauucagccuguuugugug

SEQ ID NO: 46628 - RNA, 19 nt, Artificial Sequence
  Description of Artificial Sequence: Synthetic oligonucleotide
uacuaacagguucuugggg

SEQ ID NO: 46629 - RNA, 19 nt, Artificial Sequence
  Description of Artificial Sequence: Synthetic oligonucleotide
uuuaaauggagguccugca

SEQ ID NO: 46630 - RNA, 19 nt, Artificial Sequence
  Description of Artificial Sequence: Synthetic oligonucleotide
uaugagugaggaugguggg

SEQ ID NO: 46631 - RNA, 19 nt, Artificial Sequence
  Description of Artificial Sequence: Synthetic oligonucleotide
uauuaccuaguuugaaaug

SEQ ID NO: 46632 - RNA, 19 nt, Artificial Sequence
  Description of Artificial Sequence: Synthetic oligonucleotide
caaaccaccuacuagagaa

SEQ ID NO: 46633 - RNA, 19 nt, Artificial Sequence
  Description of Artificial Sequence: Synthetic oligonucleotide
ugugauuaccacugugaag

SEQ ID NO: 46634 - RNA, 19 nt, Artificial Sequence
  Description of Artificial Sequence: Synthetic oligonucleotide
aaguuuagucaccuacucu

SEQ ID NO: 46635 - RNA, 19 nt, Artificial Sequence
  Description of Artificial Sequence: Synthetic oligonucleotide
cuggaauaggagaauguag

SEQ ID NO: 46636 - RNA, 19 nt, Artificial Sequence
  Description of Artificial Sequence: Synthetic oligonucleotide
uucaaagcggucauauuaa

SEQ ID NO: 46637 - RNA, 19 nt, Artificial Sequence
  Description of Artificial Sequence: Synthetic oligonucleotide
ugcuccaaauaacaucaag

SEQ ID NO: 46638 - RNA, 19 nt, Artificial Sequence
  Description of Artificial Sequence: Synthetic oligonucleotide
aggaaggaaauccuauuug

SEQ ID NO: 46639 - RNA, 19 nt, Artificial Sequence
  Description of Artificial Sequence: Synthetic oligonucleotide
agcggucauauuaaaauac

SEQ ID NO: 46640 - RNA, 19 nt, Artificial Sequence
  Description of Artificial Sequence: Synthetic oligonucleotide
gauauguuuaacagcuccc

SEQ ID NO: 46641 - RNA, 19 nt, Artificial Sequence
  Description of Artificial Sequence: Synthetic oligonucleotide
auuuaauggugccugagua

SEQ ID NO: 46642 - RNA, 19 nt, Artificial Sequence
  Description of Artificial Sequence: Synthetic oligonucleotide
uucauaauaugcacacagu

SEQ ID NO: 46643 - RNA, 19 nt, Artificial Sequence
  Description of Artificial Sequence: Synthetic oligonucleotide
ugguuaacaaaagaggcaa

SEQ ID NO: 46644 - RNA, 19 nt, Artificial Sequence
  Description of Artificial Sequence: Synthetic oligonucleotide
uuagccauuaaaucacgaa

SEQ ID NO: 46645 - RNA, 19 nt, Artificial Sequence
  Description of Artificial Sequence: Synthetic oligonucleotide
gauagugaggcaaaacuga

SEQ ID NO: 46646 - RNA, 19 nt, Artificial Sequence
  Description of Artificial Sequence: Synthetic oligonucleotide
ggauauguuuaacagcucc

SEQ ID NO: 46647 - RNA, 19 nt, Artificial Sequence
  Description of Artificial Sequence: Synthetic oligonucleotide
guugcugaccaucaugggc

SEQ ID NO: 46648 - RNA, 19 nt, Artificial Sequence
  Description of Artificial Sequence: Synthetic oligonucleotide
ugaaucagaucauauucau

SEQ ID NO: 46649 - RNA, 19 nt, Artificial Sequence
  Description of Artificial Sequence: Synthetic oligonucleotide
uggaacuauuauacuaaca

SEQ ID NO: 46650 - RNA, 19 nt, Artificial Sequence
  Description of Artificial Sequence: Synthetic oligonucleotide
ccugguuaacaaaagaggc

SEQ ID NO: 46651 - RNA, 19 nt, Artificial Sequence
  Description of Artificial Sequence: Synthetic oligonucleotide
uuccaugcgaggaugggga

SEQ ID NO: 46652 - RNA, 19 nt, Artificial Sequence
  Description of Artificial Sequence: Synthetic oligonucleotide
uuaaauggagguccugcaa

SEQ ID NO: 46653 - RNA, 19 nt, Artificial Sequence
  Description of Artificial Sequence: Synthetic oligonucleotide
ucucaaguggggagcaaag

SEQ ID NO: 46654 - RNA, 19 nt, Artificial Sequence
  Description of Artificial Sequence: Synthetic oligonucleotide
ggagauucaagcaaaguug

SEQ ID NO: 46655 - RNA, 19 nt, Artificial Sequence
  Description of Artificial Sequence: Synthetic oligonucleotide
cuauggacgcccaccaggg

SEQ ID NO: 46656 - RNA, 19 nt, Artificial Sequence
  Description of Artificial Sequence: Synthetic oligonucleotide
gauugaaccugguuaacaa

SEQ ID NO: 46657 - RNA, 19 nt, Artificial Sequence
  Description of Artificial Sequence: Synthetic oligonucleotide
uagugaaggcuauaagugu

SEQ ID NO: 46658 - RNA, 19 nt, Artificial Sequence
  Description of Artificial Sequence: Synthetic oligonucleotide
gugagugucacuuuuauau

SEQ ID NO: 46659 - RNA, 19 nt, Artificial Sequence
  Description of Artificial Sequence: Synthetic oligonucleotide
uuuaauggugccugaguau

SEQ ID NO: 46660 - RNA, 19 nt, Artificial Sequence
  Description of Artificial Sequence: Synthetic oligonucleotide
cacaacaccucgacuacgg

SEQ ID NO: 46661 - RNA, 19 nt, Artificial Sequence
  Description of Artificial Sequence: Synthetic oligonucleotide
guauaugucaaugcaguac

SEQ ID NO: 46662 - RNA, 19 nt, Artificial Sequence
  Description of Artificial Sequence: Synthetic oligonucleotide
ugucuauggacgcccacca

SEQ ID NO: 46663 - RNA, 19 nt, Artificial Sequence
  Description of Artificial Sequence: Synthetic oligonucleotide
uuuaacugauugcuggauu

SEQ ID NO: 46664 - RNA, 19 nt, Artificial Sequence
  Description of Artificial Sequence: Synthetic oligonucleotide
uuuagucaccuacucugga

SEQ ID NO: 46665 - RNA, 19 nt, Artificial Sequence
  Description of Artificial Sequence: Synthetic oligonucleotide
uccuauuugagagguacca

SEQ ID NO: 46666 - RNA, 19 nt, Artificial Sequence
  Description of Artificial Sequence: Synthetic oligonucleotide
gauuagccauuaaaucacg

SEQ ID NO: 46667 - RNA, 19 nt, Artificial Sequence
  Description of Artificial Sequence: Synthetic oligonucleotide
caugugauuaccacuguga

SEQ ID NO: 46668 - RNA, 19 nt, Artificial Sequence
  Description of Artificial Sequence: Synthetic oligonucleotide
ggaaguaagaaguuaaaua

SEQ ID NO: 46669 - RNA, 19 nt, Artificial Sequence
  Description of Artificial Sequence: Synthetic oligonucleotide
ugccacaacaccucgacua

SEQ ID NO: 46670 - RNA, 19 nt, Artificial Sequence
  Description of Artificial Sequence: Synthetic oligonucleotide
guaguuugcgagguggagg

SEQ ID NO: 46671 - RNA, 19 nt, Artificial Sequence
  Description of Artificial Sequence: Synthetic oligonucleotide
ucacuuuuauauccuaguu

SEQ ID NO: 46672 - RNA, 19 nt, Artificial Sequence
  Description of Artificial Sequence: Synthetic oligonucleotide
aagcggucauauuaaaaua

SEQ ID NO: 46673 - RNA, 19 nt, Artificial Sequence
  Description of Artificial Sequence: Synthetic oligonucleotide
guacaguacucuaggaagg

SEQ ID NO: 46674 - RNA, 19 nt, Artificial Sequence
  Description of Artificial Sequence: Synthetic oligonucleotide
ucccguauugccacaacac

SEQ ID NO: 46675 - RNA, 19 nt, Artificial Sequence
  Description of Artificial Sequence: Synthetic oligonucleotide
uggugccugaguaucaaac

SEQ ID NO: 46676 - RNA, 19 nt, Artificial Sequence
  Description of Artificial Sequence: Synthetic oligonucleotide
auguggacuagcaaaacug

SEQ ID NO: 46677 - RNA, 19 nt, Artificial Sequence
  Description of Artificial Sequence: Synthetic oligonucleotide
caauagugucuauggacgc

SEQ ID NO: 46678 - RNA, 19 nt, Artificial Sequence
  Description of Artificial Sequence: Synthetic oligonucleotide
uaccuaguuugaaaugugu

SEQ ID NO: 46679 - RNA, 19 nt, Artificial Sequence
  Description of Artificial Sequence: Synthetic oligonucleotide
gucgcauuuaaacacacua

SEQ ID NO: 46680 - RNA, 19 nt, Artificial Sequence
  Description of Artificial Sequence: Synthetic oligonucleotide
aggguuagguuaaaggaag

SEQ ID NO: 46681 - RNA, 19 nt, Artificial Sequence
  Description of Artificial Sequence: Synthetic oligonucleotide
ugccugaguaucaaacaac

SEQ ID NO: 46682 - RNA, 19 nt, Artificial Sequence
  Description of Artificial Sequence: Synthetic oligonucleotide
ugauuggaacuauuauacu

SEQ ID NO: 46683 - RNA, 19 nt, Artificial Sequence
  Description of Artificial Sequence: Synthetic oligonucleotide
ucgacuacggcaguauaug

SEQ ID NO: 46684 - RNA, 19 nt, Artificial Sequence
  Description of Artificial Sequence: Synthetic oligonucleotide
acaacaccucgacuacggc

SEQ ID NO: 46685 - RNA, 19 nt, Artificial Sequence
  Description of Artificial Sequence: Synthetic oligonucleotide
cugaguuaguugaagaaaa

SEQ ID NO: 46686 - RNA, 19 nt, Artificial Sequence
  Description of Artificial Sequence: Synthetic oligonucleotide
auaguguauggagaacuag

SEQ ID NO: 46687 - RNA, 19 nt, Artificial Sequence
  Description of Artificial Sequence: Synthetic oligonucleotide
agccauugaaugcaucaug

SEQ ID NO: 46688 - RNA, 19 nt, Artificial Sequence
  Description of Artificial Sequence: Synthetic oligonucleotide
uuagucaccuacucuggaa

SEQ ID NO: 46689 - RNA, 19 nt, Artificial Sequence
  Description of Artificial Sequence: Synthetic oligonucleotide
aaguugagcaaaacaacaa

SEQ ID NO: 46690 - RNA, 19 nt, Artificial Sequence
  Description of Artificial Sequence: Synthetic oligonucleotide
auauguuuaacagcuccca

SEQ ID NO: 46691 - RNA, 19 nt, Artificial Sequence
  Description of Artificial Sequence: Synthetic oligonucleotide
ggacuagcaaaacuggccc

SEQ ID NO: 46692 - RNA, 19 nt, Artificial Sequence
  Description of Artificial Sequence: Synthetic oligonucleotide
ucuggaauaggagaaugua

SEQ ID NO: 46693 - RNA, 19 nt, Artificial Sequence
  Description of Artificial Sequence: Synthetic oligonucleotide
accuaguuugaaauguguc

SEQ ID NO: 46694 - RNA, 19 nt, Artificial Sequence
  Description of Artificial Sequence: Synthetic oligonucleotide
aguaagaggguaagcgccg

SEQ ID NO: 46695 - RNA, 19 nt, Artificial Sequence
  Description of Artificial Sequence: Synthetic oligonucleotide
ugagugucacuuuuauauc

SEQ ID NO: 46696 - RNA, 19 nt, Artificial Sequence
  Description of Artificial Sequence: Synthetic oligonucleotide
guauugccacaacaccucg

SEQ ID NO: 46697 - RNA, 19 nt, Artificial Sequence
  Description of Artificial Sequence: Synthetic oligonucleotide
guuuagucaccuacucugg

SEQ ID NO: 46698 - RNA, 19 nt, Artificial Sequence
  Description of Artificial Sequence: Synthetic oligonucleotide
uuauacuaacagguucuug

SEQ ID NO: 46699 - RNA, 19 nt, Artificial Sequence
  Description of Artificial Sequence: Synthetic oligonucleotide
auuccaugcgaggaugggg

SEQ ID NO: 46700 - RNA, 19 nt, Artificial Sequence
  Description of Artificial Sequence: Synthetic oligonucleotide
augugauuaccacugugaa

SEQ ID NO: 46701 - RNA, 19 nt, Artificial Sequence
  Description of Artificial Sequence: Synthetic oligonucleotide
aggcuauaaguguguuggc

SEQ ID NO: 46702 - RNA, 19 nt, Artificial Sequence
  Description of Artificial Sequence: Synthetic oligonucleotide
aguuuagugaaggcuauaa

SEQ ID NO: 46703 - RNA, 19 nt, Artificial Sequence
  Description of Artificial Sequence: Synthetic oligonucleotide
aacaaaggacgcuggugau

SEQ ID NO: 46704 - RNA, 19 nt, Artificial Sequence
  Description of Artificial Sequence: Synthetic oligonucleotide
auugaaccugguuaacaaa

SEQ ID NO: 46705 - RNA, 19 nt, Artificial Sequence
  Description of Artificial Sequence: Synthetic oligonucleotide
guaagauuagccauuaaau

SEQ ID NO: 46706 - RNA, 19 nt, Artificial Sequence
  Description of Artificial Sequence: Synthetic oligonucleotide
caucauaucaccuccuaua

SEQ ID NO: 46707 - RNA, 19 nt, Artificial Sequence
  Description of Artificial Sequence: Synthetic oligonucleotide
ggugacaccauaguguaug

SEQ ID NO: 46708 - RNA, 19 nt, Artificial Sequence
  Description of Artificial Sequence: Synthetic oligonucleotide
agugaaaguuaacgauuca

SEQ ID NO: 46709 - RNA, 19 nt, Artificial Sequence
  Description of Artificial Sequence: Synthetic oligonucleotide
agaggguaagcgccggaag

SEQ ID NO: 46710 - RNA, 19 nt, Artificial Sequence
  Description of Artificial Sequence: Synthetic oligonucleotide
auaggcaccaucccguauu

SEQ ID NO: 46711 - RNA, 19 nt, Artificial Sequence
  Description of Artificial Sequence: Synthetic oligonucleotide
gauuccaugcgaggauggg

SEQ ID NO: 46712 - RNA, 19 nt, Artificial Sequence
  Description of Artificial Sequence: Synthetic oligonucleotide
ggugaaaagcaggagauga

SEQ ID NO: 46713 - RNA, 19 nt, Artificial Sequence
  Description of Artificial Sequence: Synthetic oligonucleotide
acuaugagugaggauggug

SEQ ID NO: 46714 - RNA, 19 nt, Artificial Sequence
  Description of Artificial Sequence: Synthetic oligonucleotide
guauggagaacuaggguca

SEQ ID NO: 46715 - RNA, 19 nt, Artificial Sequence
  Description of Artificial Sequence: Synthetic oligonucleotide
gaacgucuuuaauccuggg

SEQ ID NO: 46716 - RNA, 19 nt, Artificial Sequence
  Description of Artificial Sequence: Synthetic oligonucleotide
guguuggugcucccaauag

SEQ ID NO: 46717 - RNA, 19 nt, Artificial Sequence
  Description of Artificial Sequence: Synthetic oligonucleotide
gccauuaaaucacgaacag

SEQ ID NO: 46718 - RNA, 19 nt, Artificial Sequence
  Description of Artificial Sequence: Synthetic oligonucleotide
uguuuguguguguguguug

SEQ ID NO: 46719 - RNA, 19 nt, Artificial Sequence
  Description of Artificial Sequence: Synthetic oligonucleotide
ggcaguauaugucaaugca

SEQ ID NO: 46720 - RNA, 19 nt, Artificial Sequence
  Description of Artificial Sequence: Synthetic oligonucleotide
ucaaagcggucauauuaaa

SEQ ID NO: 46721 - RNA, 19 nt, Artificial Sequence
  Description of Artificial Sequence: Synthetic oligonucleotide
gagaacuagggucaagggu

SEQ ID NO: 46722 - RNA, 19 nt, Artificial Sequence
  Description of Artificial Sequence: Synthetic oligonucleotide
ugggacuaagggcuacucu

SEQ ID NO: 46723 - RNA, 19 nt, Artificial Sequence
  Description of Artificial Sequence: Synthetic oligonucleotide
cuccuaucauuuugcagac

SEQ ID NO: 46724 - RNA, 19 nt, Artificial Sequence
  Description of Artificial Sequence: Synthetic oligonucleotide
auaauucuuugaagguguc

SEQ ID NO: 46725 - RNA, 19 nt, Artificial Sequence
  Description of Artificial Sequence: Synthetic oligonucleotide
aucccguauugccacaaca

SEQ ID NO: 46726 - RNA, 19 nt, Artificial Sequence
  Description of Artificial Sequence: Synthetic oligonucleotide
uguguguguguguuguuuu

SEQ ID NO: 46727 - RNA, 19 nt, Artificial Sequence
  Description of Artificial Sequence: Synthetic oligonucleotide
agcgcugagguaguuugcg

SEQ ID NO: 46728 - RNA, 19 nt, Artificial Sequence
  Description of Artificial Sequence: Synthetic oligonucleotide
uaacugauugcuggauuca

SEQ ID NO: 46729 - RNA, 19 nt, Artificial Sequence
  Description of Artificial Sequence: Synthetic oligonucleotide
ugucgcauuuaaacacacu

SEQ ID NO: 46730 - RNA, 19 nt, Artificial Sequence
  Description of Artificial Sequence: Synthetic oligonucleotide
gacugugguagaauggaga

SEQ ID NO: 46731 - RNA, 19 nt, Artificial Sequence
  Description of Artificial Sequence: Synthetic oligonucleotide
auuuacagaucuucuccuu

SEQ ID NO: 46732 - RNA, 19 nt, Artificial Sequence
  Description of Artificial Sequence: Synthetic oligonucleotide
accauaguguauggagaac

SEQ ID NO: 46733 - RNA, 19 nt, Artificial Sequence
  Description of Artificial Sequence: Synthetic oligonucleotide
acuauuauacuaacagguu

SEQ ID NO: 46734 - RNA, 19 nt, Artificial Sequence
  Description of Artificial Sequence: Synthetic oligonucleotide
gcaguauaugucaaugcag

SEQ ID NO: 46735 - RNA, 19 nt, Artificial Sequence
  Description of Artificial Sequence: Synthetic oligonucleotide
uuuagcuguagggucuggu

SEQ ID NO: 46736 - RNA, 19 nt, Artificial Sequence
  Description of Artificial Sequence: Synthetic oligonucleotide
uccuaucuuaauugauuua

SEQ ID NO: 46737 - RNA, 19 nt, Artificial Sequence
  Description of Artificial Sequence: Synthetic oligonucleotide
uugguguuuuguugaacau

SEQ ID NO: 46738 - RNA, 19 nt, Artificial Sequence
  Description of Artificial Sequence: Synthetic oligonucleotide
aggguaagcgccggaaguc

SEQ ID NO: 46739 - RNA, 19 nt, Artificial Sequence
  Description of Artificial Sequence: Synthetic oligonucleotide
gaacuagggucaagggucc

SEQ ID NO: 46740 - RNA, 19 nt, Artificial Sequence
  Description of Artificial Sequence: Synthetic oligonucleotide
ggugaaguaagaggguaag

SEQ ID NO: 46741 - RNA, 19 nt, Artificial Sequence
  Description of Artificial Sequence: Synthetic oligonucleotide
cacuugaggagacccgggc

SEQ ID NO: 46742 - RNA, 19 nt, Artificial Sequence
  Description of Artificial Sequence: Synthetic oligonucleotide
aagugcacccugaaaaguu

SEQ ID NO: 46743 - RNA, 19 nt, Artificial Sequence
  Description of Artificial Sequence: Synthetic oligonucleotide
agguuaaaggaagaauaaa

SEQ ID NO: 46744 - RNA, 19 nt, Artificial Sequence
  Description of Artificial Sequence: Synthetic oligonucleotide
caccuacucuggaauagug

SEQ ID NO: 46745 - RNA, 19 nt, Artificial Sequence
  Description of Artificial Sequence: Synthetic oligonucleotide
aggugcaauugguggugcg

SEQ ID NO: 46746 - RNA, 19 nt, Artificial Sequence
  Description of Artificial Sequence: Synthetic oligonucleotide
gguuaucauccucauuuac

SEQ ID NO: 46747 - RNA, 19 nt, Artificial Sequence
  Description of Artificial Sequence: Synthetic oligonucleotide
uaagaggguaagcgccgga

SEQ ID NO: 46748 - RNA, 19 nt, Artificial Sequence
  Description of Artificial Sequence: Synthetic oligonucleotide
aggagaauguagagauggg

SEQ ID NO: 46749 - RNA, 19 nt, Artificial Sequence
  Description of Artificial Sequence: Synthetic oligonucleotide
caauugguggugcgcuggg

SEQ ID NO: 46750 - RNA, 19 nt, Artificial Sequence
  Description of Artificial Sequence: Synthetic oligonucleotide
aguuggaacaaaggacgcu

SEQ ID NO: 46751 - RNA, 19 nt, Artificial Sequence
  Description of Artificial Sequence: Synthetic oligonucleotide
aagaggguaagcgccggaa

SEQ ID NO: 46752 - RNA, 19 nt, Artificial Sequence
  Description of Artificial Sequence: Synthetic oligonucleotide
auuagccauuaaaucacga

SEQ ID NO: 46753 - RNA, 19 nt, Artificial Sequence
  Description of Artificial Sequence: Synthetic oligonucleotide
aaaucacgaacagcugcaa

SEQ ID NO: 46754 - RNA, 19 nt, Artificial Sequence
  Description of Artificial Sequence: Synthetic oligonucleotide
uuuuagcuguagggucugg

SEQ ID NO: 46755 - RNA, 19 nt, Artificial Sequence
  Description of Artificial Sequence: Synthetic oligonucleotide
caaagcggucauauuaaaa

SEQ ID NO: 46756 - RNA, 19 nt, Artificial Sequence
  Description of Artificial Sequence: Synthetic oligonucleotide
guaagaggguaagcgccgg

SEQ ID NO: 46757 - RNA, 19 nt, Artificial Sequence
  Description of Artificial Sequence: Synthetic oligonucleotide
acaaaggacgcuggugaug

SEQ ID NO: 46758 - RNA, 19 nt, Artificial Sequence
  Description of Artificial Sequence: Synthetic oligonucleotide
uccaugcgaggauggggag

SEQ ID NO: 46759 - RNA, 19 nt, Artificial Sequence
  Description of Artificial Sequence: Synthetic oligonucleotide
uauaggcaccaucccguau

SEQ ID NO: 46760 - RNA, 19 nt, Artificial Sequence
  Description of Artificial Sequence: Synthetic oligonucleotide
agugagugucacuuuuaua

SEQ ID NO: 46761 - RNA, 19 nt, Artificial Sequence
  Description of Artificial Sequence: Synthetic oligonucleotide
uuuagcuguguugcuuggu

SEQ ID NO: 46762 - RNA, 19 nt, Artificial Sequence
  Description of Artificial Sequence: Synthetic oligonucleotide
ugguguuuuguugaacauu

SEQ ID NO: 46763 - RNA, 19 nt, Artificial Sequence
  Description of Artificial Sequence: Synthetic oligonucleotide
aguuaacgauucaaaugcu

SEQ ID NO: 46764 - RNA, 19 nt, Artificial Sequence
  Description of Artificial Sequence: Synthetic oligonucleotide
cacggaggauguguguugg

SEQ ID NO: 46765 - RNA, 19 nt, Artificial Sequence
  Description of Artificial Sequence: Synthetic oligonucleotide
uucaacuaacuugcuguua

SEQ ID NO: 46766 - RNA, 19 nt, Artificial Sequence
  Description of Artificial Sequence: Synthetic oligonucleotide
gcugcaacguuuccuguug

SEQ ID NO: 46767 - RNA, 19 nt, Artificial Sequence
  Description of Artificial Sequence: Synthetic oligonucleotide
guuagguuaaaggaagaau

SEQ ID NO: 46768 - RNA, 19 nt, Artificial Sequence
  Description of Artificial Sequence: Synthetic oligonucleotide
uuugggacuaagggcuacu

SEQ ID NO: 46769 - RNA, 19 nt, Artificial Sequence
  Description of Artificial Sequence: Synthetic oligonucleotide
uuguguguguguguuguuu

SEQ ID NO: 46770 - RNA, 19 nt, Artificial Sequence
  Description of Artificial Sequence: Synthetic oligonucleotide
acauuugaaucagaucaua

SEQ ID NO: 46771 - RNA, 19 nt, Artificial Sequence
  Description of Artificial Sequence: Synthetic oligonucleotide
cacuauacaaguucacuau

SEQ ID NO: 46772 - RNA, 19 nt, Artificial Sequence
  Description of Artificial Sequence: Synthetic oligonucleotide
gauggguuggcuggugaca

SEQ ID NO: 46773 - RNA, 19 nt, Artificial Sequence
  Description of Artificial Sequence: Synthetic oligonucleotide
gaggugcuaaauguuuauc

SEQ ID NO: 46774 - RNA, 19 nt, Artificial Sequence
  Description of Artificial Sequence: Synthetic oligonucleotide
uauaaguguguuggcuuua

SEQ ID NO: 46775 - RNA, 19 nt, Artificial Sequence
  Description of Artificial Sequence: Synthetic oligonucleotide
auuauacuaacagguucuu

SEQ ID NO: 46776 - RNA, 19 nt, Artificial Sequence
  Description of Artificial Sequence: Synthetic oligonucleotide
agucacggaggaugugugu

SEQ ID NO: 46777 - RNA, 19 nt, Artificial Sequence
  Description of Artificial Sequence: Synthetic oligonucleotide
ggugccugaguaucaaaca

SEQ ID NO: 46778 - RNA, 19 nt, Artificial Sequence
  Description of Artificial Sequence: Synthetic oligonucleotide
caacuaacuugcuguuauc

SEQ ID NO: 46779 - RNA, 19 nt, Artificial Sequence
  Description of Artificial Sequence: Synthetic oligonucleotide
auguucaggaacgucuuua

SEQ ID NO: 46780 - RNA, 19 nt, Artificial Sequence
  Description of Artificial Sequence: Synthetic oligonucleotide
gcggacacugauuuauuac

SEQ ID NO: 46781 - RNA, 19 nt, Artificial Sequence
  Description of Artificial Sequence: Synthetic oligonucleotide
cauaguguauggagaacua

SEQ ID NO: 46782 - RNA, 19 nt, Artificial Sequence
  Description of Artificial Sequence: Synthetic oligonucleotide
caaucgggcugcuggcgag

SEQ ID NO: 46783 - RNA, 19 nt, Artificial Sequence
  Description of Artificial Sequence: Synthetic oligonucleotide
guuuguguguguguguugu

SEQ ID NO: 46784 - RNA, 19 nt, Artificial Sequence
  Description of Artificial Sequence: Synthetic oligonucleotide
ccauuaaaucacgaacagc

SEQ ID NO: 46785 - RNA, 19 nt, Artificial Sequence
  Description of Artificial Sequence: Synthetic oligonucleotide
cccguauugccacaacacc

SEQ ID NO: 46786 - RNA, 19 nt, Artificial Sequence
  Description of Artificial Sequence: Synthetic oligonucleotide
ugguccuauugagauucca

SEQ ID NO: 46787 - RNA, 19 nt, Artificial Sequence
  Description of Artificial Sequence: Synthetic oligonucleotide
ggugcucccaauaguuuag

SEQ ID NO: 46788 - RNA, 19 nt, Artificial Sequence
  Description of Artificial Sequence: Synthetic oligonucleotide
cauuuaauggugccugagu

SEQ ID NO: 46789 - RNA, 19 nt, Artificial Sequence
  Description of Artificial Sequence: Synthetic oligonucleotide
uauggagaacuagggucaa

SEQ ID NO: 46790 - RNA, 19 nt, Artificial Sequence
  Description of Artificial Sequence: Synthetic oligonucleotide
gguaguuugcgagguggag

SEQ ID NO: 46791 - RNA, 19 nt, Artificial Sequence
  Description of Artificial Sequence: Synthetic oligonucleotide
guguauggagaacuagggu

SEQ ID NO: 46792 - RNA, 19 nt, Artificial Sequence
  Description of Artificial Sequence: Synthetic oligonucleotide
cugaggugcuaaauguuua

SEQ ID NO: 46793 - RNA, 19 nt, Artificial Sequence
  Description of Artificial Sequence: Synthetic oligonucleotide
ggacuaagggcuacucugc

SEQ ID NO: 46794 - RNA, 19 nt, Artificial Sequence
  Description of Artificial Sequence: Synthetic oligonucleotide
gcauuuaauggugccugag

SEQ ID NO: 46795 - RNA, 19 nt, Artificial Sequence
  Description of Artificial Sequence: Synthetic oligonucleotide
cauuugguguuuuguugaa

SEQ ID NO: 46796 - RNA, 19 nt, Artificial Sequence
  Description of Artificial Sequence: Synthetic oligonucleotide
uuuguguguguguguuguu

SEQ ID NO: 46797 - RNA, 19 nt, Artificial Sequence
  Description of Artificial Sequence: Synthetic oligonucleotide
gaauccuaucuuaauugau

SEQ ID NO: 46798 - RNA, 19 nt, Artificial Sequence
  Description of Artificial Sequence: Synthetic oligonucleotide
ucguccacuuggugacacc

SEQ ID NO: 46799 - RNA, 19 nt, Artificial Sequence
  Description of Artificial Sequence: Synthetic oligonucleotide
uggcaagcggacacugauu

SEQ ID NO: 46800 - RNA, 19 nt, Artificial Sequence
  Description of Artificial Sequence: Synthetic oligonucleotide
gugucgcauuuaaacacac

SEQ ID NO: 46801 - RNA, 19 nt, Artificial Sequence
  Description of Artificial Sequence: Synthetic oligonucleotide
ggugucgucucaugaugac

SEQ ID NO: 46802 - RNA, 19 nt, Artificial Sequence
  Description of Artificial Sequence: Synthetic oligonucleotide
cugguccuauugagauucc

SEQ ID NO: 46803 - RNA, 19 nt, Artificial Sequence
  Description of Artificial Sequence: Synthetic oligonucleotide
cguauugccacaacaccuc

SEQ ID NO: 46804 - RNA, 19 nt, Artificial Sequence
  Description of Artificial Sequence: Synthetic oligonucleotide
ccuauuugagagguaccag

SEQ ID NO: 46805 - RNA, 19 nt, Artificial Sequence
  Description of Artificial Sequence: Synthetic oligonucleotide
acgaacagcugcaaauauu

SEQ ID NO: 46806 - RNA, 19 nt, Artificial Sequence
  Description of Artificial Sequence: Synthetic oligonucleotide
ggagacccgggccaguuuc

SEQ ID NO: 46807 - RNA, 19 nt, Artificial Sequence
  Description of Artificial Sequence: Synthetic oligonucleotide
accuccuauaggagacggg

SEQ ID NO: 46808 - RNA, 19 nt, Artificial Sequence
  Description of Artificial Sequence: Synthetic oligonucleotide
ccccaccaaauuuaagaug

SEQ ID NO: 46809 - RNA, 19 nt, Artificial Sequence
  Description of Artificial Sequence: Synthetic oligonucleotide
ggggcaguguaagauuagc

SEQ ID NO: 46810 - RNA, 19 nt, Artificial Sequence
  Description of Artificial Sequence: Synthetic oligonucleotide
gccuguuugugugugugug

SEQ ID NO: 46811 - RNA, 19 nt, Artificial Sequence
  Description of Artificial Sequence: Synthetic oligonucleotide
auggugccugaguaucaaa

SEQ ID NO: 46812 - RNA, 19 nt, Artificial Sequence
  Description of Artificial Sequence: Synthetic oligonucleotide
gcggucauauuaaaauaca

SEQ ID NO: 46813 - RNA, 19 nt, Artificial Sequence
  Description of Artificial Sequence: Synthetic oligonucleotide
caucccguauugccacaac

SEQ ID NO: 46814 - RNA, 19 nt, Artificial Sequence
  Description of Artificial Sequence: Synthetic oligonucleotide
gacccuagacaggcccucc

SEQ ID NO: 46815 - RNA, 19 nt, Artificial Sequence
  Description of Artificial Sequence: Synthetic oligonucleotide
agguaguuugcgaggugga

SEQ ID NO: 46816 - RNA, 19 nt, Artificial Sequence
  Description of Artificial Sequence: Synthetic oligonucleotide
gcuauaaguguguuggcuu

SEQ ID NO: 46817 - RNA, 19 nt, Artificial Sequence
  Description of Artificial Sequence: Synthetic oligonucleotide
ggguaagcgccggaagucc

SEQ ID NO: 46818 - RNA, 19 nt, Artificial Sequence
  Description of Artificial Sequence: Synthetic oligonucleotide
agaugaagggaggcccuaa

SEQ ID NO: 46819 - RNA, 19 nt, Artificial Sequence
  Description of Artificial Sequence: Synthetic oligonucleotide
caaccccaauugugcuggg

SEQ ID NO: 46820 - RNA, 19 nt, Artificial Sequence
  Description of Artificial Sequence: Synthetic oligonucleotide
gguaagcgccggaaguccc

SEQ ID NO: 46821 - RNA, 19 nt, Artificial Sequence
  Description of Artificial Sequence: Synthetic oligonucleotide
ggcaaucgggcugcuggcg

SEQ ID NO: 46822 - RNA, 19 nt, Artificial Sequence
  Description of Artificial Sequence: Synthetic oligonucleotide
cuacggcaguauaugucaa

SEQ ID NO: 46823 - RNA, 19 nt, Artificial Sequence
  Description of Artificial Sequence: Synthetic oligonucleotide
accucgacuacggcaguau

SEQ ID NO: 46824 - RNA, 19 nt, Artificial Sequence
  Description of Artificial Sequence: Synthetic oligonucleotide
cuauaggcaccaucccgua

SEQ ID NO: 46825 - RNA, 19 nt, Artificial Sequence
  Description of Artificial Sequence: Synthetic oligonucleotide
guguaagauuagccauuaa

SEQ ID NO: 46826 - RNA, 19 nt, Artificial Sequence
  Description of Artificial Sequence: Synthetic oligonucleotide
ggucccauguggacuagca

SEQ ID NO: 46827 - RNA, 19 nt, Artificial Sequence
  Description of Artificial Sequence: Synthetic oligonucleotide
ggaacuugugccagcucga

SEQ ID NO: 46828 - RNA, 19 nt, Artificial Sequence
  Description of Artificial Sequence: Synthetic oligonucleotide
cauuuuagcuguguugcuu

SEQ ID NO: 46829 - RNA, 19 nt, Artificial Sequence
  Description of Artificial Sequence: Synthetic oligonucleotide
gcaaucgggcugcuggcga

SEQ ID NO: 46830 - RNA, 19 nt, Artificial Sequence
  Description of Artificial Sequence: Synthetic oligonucleotide
ccguauugccacaacaccu

SEQ ID NO: 46831 - RNA, 19 nt, Artificial Sequence
  Description of Artificial Sequence: Synthetic oligonucleotide
uggugcgcugggagggaua

SEQ ID NO: 46832 - RNA, 19 nt, Artificial Sequence
  Description of Artificial Sequence: Synthetic oligonucleotide
acauuccauuuuagcugug

SEQ ID NO: 46833 - RNA, 19 nt, Artificial Sequence
  Description of Artificial Sequence: Synthetic oligonucleotide
aguuugcgagguggaggca

SEQ ID NO: 46834 - RNA, 19 nt, Artificial Sequence
  Description of Artificial Sequence: Synthetic oligonucleotide
ccaugcgaggauggggagg

SEQ ID NO: 46835 - RNA, 19 nt, Artificial Sequence
  Description of Artificial Sequence: Synthetic oligonucleotide
gggacugauuaauuguguu

SEQ ID NO: 46836 - RNA, 19 nt, Artificial Sequence
  Description of Artificial Sequence: Synthetic oligonucleotide
ccauaguguauggagaacu

SEQ ID NO: 46837 - RNA, 19 nt, Artificial Sequence
  Description of Artificial Sequence: Synthetic oligonucleotide
gggugaaguaagaggguaa

SEQ ID NO: 46838 - RNA, 19 nt, Artificial Sequence
  Description of Artificial Sequence: Synthetic oligonucleotide
aggagcgcugagguaguuu

SEQ ID NO: 46839 - RNA, 19 nt, Artificial Sequence
  Description of Artificial Sequence: Synthetic oligonucleotide
gucacggaggauguguguu

SEQ ID NO: 46840 - RNA, 19 nt, Artificial Sequence
  Description of Artificial Sequence: Synthetic oligonucleotide
gguccuauugagauuccau

SEQ ID NO: 46841 - RNA, 19 nt, Artificial Sequence
  Description of Artificial Sequence: Synthetic oligonucleotide
cuguuuguguguguguguu

SEQ ID NO: 46842 - RNA, 19 nt, Artificial Sequence
  Description of Artificial Sequence: Synthetic oligonucleotide
ccaaaccaccuacuagaga

SEQ ID NO: 46843 - RNA, 19 nt, Artificial Sequence
  Description of Artificial Sequence: Synthetic oligonucleotide
gcaaaaccuccuaucauuu

SEQ ID NO: 46844 - RNA, 19 nt, Artificial Sequence
  Description of Artificial Sequence: Synthetic oligonucleotide
cacaagcccugguguugga

SEQ ID NO: 46845 - RNA, 19 nt, Artificial Sequence
  Description of Artificial Sequence: Synthetic oligonucleotide
uuggcacaguagggaguuu

SEQ ID NO: 46846 - RNA, 19 nt, Artificial Sequence
  Description of Artificial Sequence: Synthetic oligonucleotide
gggucccauguggacuagc

SEQ ID NO: 46847 - RNA, 19 nt, Artificial Sequence
  Description of Artificial Sequence: Synthetic oligonucleotide
ccccugguccuauugagau

SEQ ID NO: 46848 - RNA, 19 nt, Artificial Sequence
  Description of Artificial Sequence: Synthetic oligonucleotide
ccuguuugugugugugugu

SEQ ID NO: 46849 - RNA, 19 nt, Artificial Sequence
  Description of Artificial Sequence: Synthetic oligonucleotide
ccaucauaucaccuccuau

SEQ ID NO: 46850 - RNA, 19 nt, Artificial Sequence
  Description of Artificial Sequence: Synthetic oligonucleotide
ccuagacaggcccuccacu

SEQ ID NO: 46851 - RNA, 19 nt, Artificial Sequence
  Description of Artificial Sequence: Synthetic oligonucleotide
gcgcugggagggauaguga

SEQ ID NO: 46852 - RNA, 19 nt, Artificial Sequence
  Description of Artificial Sequence: Synthetic oligonucleotide
cgacuacggcaguauaugu

SEQ ID NO: 46853 - RNA, 19 nt, Artificial Sequence
  Description of Artificial Sequence: Synthetic oligonucleotide
ggcgaggguccagacacuu

SEQ ID NO: 46854 - RNA, 19 nt, Artificial Sequence
  Description of Artificial Sequence: Synthetic oligonucleotide
cccuccacuguggacuuuu

SEQ ID NO: 46855 - RNA, 19 nt, Artificial Sequence
  Description of Artificial Sequence: Synthetic oligonucleotide
caggagcgcugagguaguu

SEQ ID NO: 46856 - RNA, 19 nt, Artificial Sequence
  Description of Artificial Sequence: Synthetic oligonucleotide
cuuaauaucauaauggucc

SEQ ID NO: 46857 - RNA, 19 nt, Artificial Sequence
  Description of Artificial Sequence: Synthetic oligonucleotide
uuuaauuagaauaucuagg

SEQ ID NO: 46858 - RNA, 19 nt, Artificial Sequence
  Description of Artificial Sequence: Synthetic oligonucleotide
aaauccuaacuuuaguucc

SEQ ID NO: 46859 - RNA, 19 nt, Artificial Sequence
  Description of Artificial Sequence: Synthetic oligonucleotide
uuaauuagaauaucuaggg

SEQ ID NO: 46860 - RNA, 19 nt, Artificial Sequence
  Description of Artificial Sequence: Synthetic oligonucleotide
aauccuacacauuacaggg

SEQ ID NO: 46861 - RNA, 19 nt, Artificial Sequence
  Description of Artificial Sequence: Synthetic oligonucleotide
aauuguuuguuccagugac

SEQ ID NO: 46862 - RNA, 19 nt, Artificial Sequence
  Description of Artificial Sequence: Synthetic oligonucleotide
uuuacuguaguuaaccggg

SEQ ID NO: 46863 - RNA, 19 nt, Artificial Sequence
  Description of Artificial Sequence: Synthetic oligonucleotide
uuaauaguggaucaauagg

SEQ ID NO: 46864 - RNA, 19 nt, Artificial Sequence
  Description of Artificial Sequence: Synthetic oligonucleotide
ucuagaauaaggaaccagg

SEQ ID NO: 46865 - RNA, 19 nt, Artificial Sequence
  Description of Artificial Sequence: Synthetic oligonucleotide
uaauaguggaucaauaggc

SEQ ID NO: 46866 - RNA, 19 nt, Artificial Sequence
  Description of Artificial Sequence: Synthetic oligonucleotide
ugagagaauuuauaaaacg

SEQ ID NO: 46867 - RNA, 19 nt, Artificial Sequence
  Description of Artificial Sequence: Synthetic oligonucleotide
ucuagcauggcacuaagag

SEQ ID NO: 46868 - RNA, 19 nt, Artificial Sequence
  Description of Artificial Sequence: Synthetic oligonucleotide
uuccacaagacacuuaacg

SEQ ID NO: 46869 - RNA, 19 nt, Artificial Sequence
  Description of Artificial Sequence: Synthetic oligonucleotide
uuuagaaaaucaccuaugc

SEQ ID NO: 46870 - RNA, 19 nt, Artificial Sequence
  Description of Artificial Sequence: Synthetic oligonucleotide
aacuacggcauccaggcac

SEQ ID NO: 46871 - RNA, 19 nt, Artificial Sequence
  Description of Artificial Sequence: Synthetic oligonucleotide
uauaaaacgagaaauccau

SEQ ID NO: 46872 - RNA, 19 nt, Artificial Sequence
  Description of Artificial Sequence: Synthetic oligonucleotide
agugcuaagagacgaaugg

SEQ ID NO: 46873 - RNA, 19 nt, Artificial Sequence
  Description of Artificial Sequence: Synthetic oligonucleotide
acuaguauccauugacucc

SEQ ID NO: 46874 - RNA, 19 nt, Artificial Sequence
  Description of Artificial Sequence: Synthetic oligonucleotide
uguacaggugaacagaucu

SEQ ID NO: 46875 - RNA, 19 nt, Artificial Sequence
  Description of Artificial Sequence: Synthetic oligonucleotide
aagagggauagacuuuugc

SEQ ID NO: 46876 - RNA, 19 nt, Artificial Sequence
  Description of Artificial Sequence: Synthetic oligonucleotide
aaucuguagaccuugaguu

SEQ ID NO: 46877 - RNA, 19 nt, Artificial Sequence
  Description of Artificial Sequence: Synthetic oligonucleotide
ucuuguaguacaaauggca

SEQ ID NO: 46878 - RNA, 19 nt, Artificial Sequence
  Description of Artificial Sequence: Synthetic oligonucleotide
gaauaucuagggcagaaag

SEQ ID NO: 46879 - RNA, 19 nt, Artificial Sequence
  Description of Artificial Sequence: Synthetic oligonucleotide
aaauacacgucuuacacua

SEQ ID NO: 46880 - RNA, 19 nt, Artificial Sequence
  Description of Artificial Sequence: Synthetic oligonucleotide
uugcuuaguuuacauaugg

SEQ ID NO: 46881 - RNA, 19 nt, Artificial Sequence
  Description of Artificial Sequence: Synthetic oligonucleotide
acacuuaacgaccaccagc

SEQ ID NO: 46882 - RNA, 19 nt, Artificial Sequence
  Description of Artificial Sequence: Synthetic oligonucleotide
aucuauaagagugagcuuc

SEQ ID NO: 46883 - RNA, 19 nt, Artificial Sequence
  Description of Artificial Sequence: Synthetic oligonucleotide
aucgcuuuaacucaucuug

SEQ ID NO: 46884 - RNA, 19 nt, Artificial Sequence
  Description of Artificial Sequence: Synthetic oligonucleotide
cuaacuacggcauccaggc

SEQ ID NO: 46885 - RNA, 19 nt, Artificial Sequence
  Description of Artificial Sequence: Synthetic oligonucleotide
augcauaucacuuucgcug

SEQ ID NO: 46886 - RNA, 19 nt, Artificial Sequence
  Description of Artificial Sequence: Synthetic oligonucleotide
uuaauccuacacauuacag

SEQ ID NO: 46887 - RNA, 19 nt, Artificial Sequence
  Description of Artificial Sequence: Synthetic oligonucleotide
ucggaaaucguaaacuuca

SEQ ID NO: 46888 - RNA, 19 nt, Artificial Sequence
  Description of Artificial Sequence: Synthetic oligonucleotide
caaccguauguuuaaaugg

SEQ ID NO: 46889 - RNA, 19 nt, Artificial Sequence
  Description of Artificial Sequence: Synthetic oligonucleotide
ucuuauaaguuccuuucug

SEQ ID NO: 46890 - RNA, 19 nt, Artificial Sequence
  Description of Artificial Sequence: Synthetic oligonucleotide
ucaaccguauguuuaaaug

SEQ ID NO: 46891 - RNA, 19 nt, Artificial Sequence
  Description of Artificial Sequence: Synthetic oligonucleotide
cuuuacuguaguuaaccgg

SEQ ID NO: 46892 - RNA, 19 nt, Artificial Sequence
  Description of Artificial Sequence: Synthetic oligonucleotide
uuuuacguucucuucacgc

SEQ ID NO: 46893 - RNA, 19 nt, Artificial Sequence
  Description of Artificial Sequence: Synthetic oligonucleotide
cugauacuagaauuaaagg

SEQ ID NO: 46894 - RNA, 19 nt, Artificial Sequence
  Description of Artificial Sequence: Synthetic oligonucleotide
agccuaaauuguuuguucc

SEQ ID NO: 46895 - RNA, 19 nt, Artificial Sequence
  Description of Artificial Sequence: Synthetic oligonucleotide
acgaauggaaucuguagac

SEQ ID NO: 46896 - RNA, 19 nt, Artificial Sequence
  Description of Artificial Sequence: Synthetic oligonucleotide
uggaucaauaggcugagga

SEQ ID NO: 46897 - RNA, 19 nt, Artificial Sequence
  Description of Artificial Sequence: Synthetic oligonucleotide
gaaaggagugcuaagagac

SEQ ID NO: 46898 - RNA, 19 nt, Artificial Sequence
  Description of Artificial Sequence: Synthetic oligonucleotide
uucgcugauaagaggaggg

SEQ ID NO: 46899 - RNA, 19 nt, Artificial Sequence
  Description of Artificial Sequence: Synthetic oligonucleotide
gaauuaaaggucucagggc

SEQ ID NO: 46900 - RNA, 19 nt, Artificial Sequence
  Description of Artificial Sequence: Synthetic oligonucleotide
gauacucucaaagauggcc

SEQ ID NO: 46901 - RNA, 19 nt, Artificial Sequence
  Description of Artificial Sequence: Synthetic oligonucleotide
auaauaagacugcuuauga

SEQ ID NO: 46902 - RNA, 19 nt, Artificial Sequence
  Description of Artificial Sequence: Synthetic oligonucleotide
uuagaaaaucaccuaugca

SEQ ID NO: 46903 - RNA, 19 nt, Artificial Sequence
  Description of Artificial Sequence: Synthetic oligonucleotide
acauuuuaauccuacacau

SEQ ID NO: 46904 - RNA, 19 nt, Artificial Sequence
  Description of Artificial Sequence: Synthetic oligonucleotide
auaagagugagcuucccca

SEQ ID NO: 46905 - RNA, 19 nt, Artificial Sequence
  Description of Artificial Sequence: Synthetic oligonucleotide
uguuccacaagacacuuaa

SEQ ID NO: 46906 - RNA, 19 nt, Artificial Sequence
  Description of Artificial Sequence: Synthetic oligonucleotide
uacagguacauacacauuu

SEQ ID NO: 46907 - RNA, 19 nt, Artificial Sequence
  Description of Artificial Sequence: Synthetic oligonucleotide
ucuaggacugcaucaauca

SEQ ID NO: 46908 - RNA, 19 nt, Artificial Sequence
  Description of Artificial Sequence: Synthetic oligonucleotide
ucugugagaacgaauguuc

SEQ ID NO: 46909 - RNA, 19 nt, Artificial Sequence
  Description of Artificial Sequence: Synthetic oligonucleotide
aaaaucaccuaugcaguuc

SEQ ID NO: 46910 - RNA, 19 nt, Artificial Sequence
  Description of Artificial Sequence: Synthetic oligonucleotide
aaauuguuuguuccaguga

SEQ ID NO: 46911 - RNA, 19 nt, Artificial Sequence
  Description of Artificial Sequence: Synthetic oligonucleotide
uguguugcaggauugauuu

SEQ ID NO: 46912 - RNA, 19 nt, Artificial Sequence
  Description of Artificial Sequence: Synthetic oligonucleotide
aauccuaacuuuaguuccc

SEQ ID NO: 46913 - RNA, 19 nt, Artificial Sequence
  Description of Artificial Sequence: Synthetic oligonucleotide
ugugcggucaaauguaaug

SEQ ID NO: 46914 - RNA, 19 nt, Artificial Sequence
  Description of Artificial Sequence: Synthetic oligonucleotide
gaauaaacugaccuacgac

SEQ ID NO: 46915 - RNA, 19 nt, Artificial Sequence
  Description of Artificial Sequence: Synthetic oligonucleotide
uauaagagugagcuucccc

SEQ ID NO: 46916 - RNA, 19 nt, Artificial Sequence
  Description of Artificial Sequence: Synthetic oligonucleotide
uaaggagccgcaucaaaag

SEQ ID NO: 46917 - RNA, 19 nt, Artificial Sequence
  Description of Artificial Sequence: Synthetic oligonucleotide
cacaagacacuuaacgacc

SEQ ID NO: 46918 - RNA, 19 nt, Artificial Sequence
  Description of Artificial Sequence: Synthetic oligonucleotide
aagguugcaaauaauuugu

SEQ ID NO: 46919 - RNA, 19 nt, Artificial Sequence
  Description of Artificial Sequence: Synthetic oligonucleotide
uguaguacugcgcuuggac

SEQ ID NO: 46920 - RNA, 19 nt, Artificial Sequence
  Description of Artificial Sequence: Synthetic oligonucleotide
agggaccaaagccugaacg

SEQ ID NO: 46921 - RNA, 19 nt, Artificial Sequence
  Description of Artificial Sequence: Synthetic oligonucleotide
ugaggaugaucggaaaucg

SEQ ID NO: 46922 - RNA, 19 nt, Artificial Sequence
  Description of Artificial Sequence: Synthetic oligonucleotide
uuuaccuuaguuguacaug

SEQ ID NO: 46923 - RNA, 19 nt, Artificial Sequence
  Description of Artificial Sequence: Synthetic oligonucleotide
acgaguuugcuucaaaaga

SEQ ID NO: 46924 - RNA, 19 nt, Artificial Sequence
  Description of Artificial Sequence: Synthetic oligonucleotide
ucuauaagagugagcuucc

SEQ ID NO: 46925 - RNA, 19 nt, Artificial Sequence
  Description of Artificial Sequence: Synthetic oligonucleotide
auuagaauaucuagggcag

SEQ ID NO: 46926 - RNA, 19 nt, Artificial Sequence
  Description of Artificial Sequence: Synthetic oligonucleotide
acccugauaucaaauaccc

SEQ ID NO: 46927 - RNA, 19 nt, Artificial Sequence
  Description of Artificial Sequence: Synthetic oligonucleotide
uuaucuuugcuaagaugcc

SEQ ID NO: 46928 - RNA, 19 nt, Artificial Sequence
  Description of Artificial Sequence: Synthetic oligonucleotide
ugugucuauggucaccuug

SEQ ID NO: 46929 - RNA, 19 nt, Artificial Sequence
  Description of Artificial Sequence: Synthetic oligonucleotide
cuucuagacacuucucucc

SEQ ID NO: 46930 - RNA, 19 nt, Artificial Sequence
  Description of Artificial Sequence: Synthetic oligonucleotide
uaaggccugccacugaugc

SEQ ID NO: 46931 - RNA, 19 nt, Artificial Sequence
  Description of Artificial Sequence: Synthetic oligonucleotide
cauaugaugacccugauau

SEQ ID NO: 46932 - RNA, 19 nt, Artificial Sequence
  Description of Artificial Sequence: Synthetic oligonucleotide
uguacauguagcacguagu

SEQ ID NO: 46933 - RNA, 19 nt, Artificial Sequence
  Description of Artificial Sequence: Synthetic oligonucleotide
accuuaguuguacauguag

SEQ ID NO: 46934 - RNA, 19 nt, Artificial Sequence
  Description of Artificial Sequence: Synthetic oligonucleotide
gauuggaauucacucauga

SEQ ID NO: 46935 - RNA, 19 nt, Artificial Sequence
  Description of Artificial Sequence: Synthetic oligonucleotide
auacacgucuuacacuagg

SEQ ID NO: 46936 - RNA, 19 nt, Artificial Sequence
  Description of Artificial Sequence: Synthetic oligonucleotide
agcuuuaacguauguuggg

SEQ ID NO: 46937 - RNA, 19 nt, Artificial Sequence
  Description of Artificial Sequence: Synthetic oligonucleotide
aaacugaccuacgacagca

SEQ ID NO: 46938 - RNA, 19 nt, Artificial Sequence
  Description of Artificial Sequence: Synthetic oligonucleotide
ugacccugauaucaaauac

SEQ ID NO: 46939 - RNA, 19 nt, Artificial Sequence
  Description of Artificial Sequence: Synthetic oligonucleotide
agaauuuauaaaacgagaa

SEQ ID NO: 46940 - RNA, 19 nt, Artificial Sequence
  Description of Artificial Sequence: Synthetic oligonucleotide
uuuacguucucuucacgcu

SEQ ID NO: 46941 - RNA, 19 nt, Artificial Sequence
  Description of Artificial Sequence: Synthetic oligonucleotide
uuuguaguacugcgcuugg

SEQ ID NO: 46942 - RNA, 19 nt, Artificial Sequence
  Description of Artificial Sequence: Synthetic oligonucleotide
ugcagaauugaaugugacc

SEQ ID NO: 46943 - RNA, 19 nt, Artificial Sequence
  Description of Artificial Sequence: Synthetic oligonucleotide
uggcuaaauuugcuaaucc

SEQ ID NO: 46944 - RNA, 19 nt, Artificial Sequence
  Description of Artificial Sequence: Synthetic oligonucleotide
uuuaacguauguuggggaa

SEQ ID NO: 46945 - RNA, 19 nt, Artificial Sequence
  Description of Artificial Sequence: Synthetic oligonucleotide
auaguggaucaauaggcug

SEQ ID NO: 46946 - RNA, 19 nt, Artificial Sequence
  Description of Artificial Sequence: Synthetic oligonucleotide
ugguuaguaaugcugccac

SEQ ID NO: 46947 - RNA, 19 nt, Artificial Sequence
  Description of Artificial Sequence: Synthetic oligonucleotide
aaaguggaacaucccgaag

SEQ ID NO: 46948 - RNA, 19 nt, Artificial Sequence
  Description of Artificial Sequence: Synthetic oligonucleotide
uaaccggguaauuucauuc

SEQ ID NO: 46949 - RNA, 19 nt, Artificial Sequence
  Description of Artificial Sequence: Synthetic oligonucleotide
ugaucggaaaucguaaacu

SEQ ID NO: 46950 - RNA, 19 nt, Artificial Sequence
  Description of Artificial Sequence: Synthetic oligonucleotide
ugugcuaacuacggcaucc

SEQ ID NO: 46951 - RNA, 19 nt, Artificial Sequence
  Description of Artificial Sequence: Synthetic oligonucleotide
accagcuauuaccaagugg

SEQ ID NO: 46952 - RNA, 19 nt, Artificial Sequence
  Description of Artificial Sequence: Synthetic oligonucleotide
cuagaauuaaaggucucag

SEQ ID NO: 46953 - RNA, 19 nt, Artificial Sequence
  Description of Artificial Sequence: Synthetic oligonucleotide
acggcuuaaggccugccac

SEQ ID NO: 46954 - RNA, 19 nt, Artificial Sequence
  Description of Artificial Sequence: Synthetic oligonucleotide
accuugucgacucagugca

SEQ ID NO: 46955 - RNA, 19 nt, Artificial Sequence
  Description of Artificial Sequence: Synthetic oligonucleotide
guagaggugaucucacaag

SEQ ID NO: 46956 - RNA, 19 nt, Artificial Sequence
  Description of Artificial Sequence: Synthetic oligonucleotide
ucccgaagcuucuagacac

SEQ ID NO: 46957 - RNA, 19 nt, Artificial Sequence
  Description of Artificial Sequence: Synthetic oligonucleotide
agguacauacacauuuggc

SEQ ID NO: 46958 - RNA, 19 nt, Artificial Sequence
  Description of Artificial Sequence: Synthetic oligonucleotide
ugcuuaguuuacauauggc

SEQ ID NO: 46959 - RNA, 19 nt, Artificial Sequence
  Description of Artificial Sequence: Synthetic oligonucleotide
uagauagucgcaccaacau

SEQ ID NO: 46960 - RNA, 19 nt, Artificial Sequence
  Description of Artificial Sequence: Synthetic oligonucleotide
uaguggcucaacaagucga

SEQ ID NO: 46961 - RNA, 19 nt, Artificial Sequence
  Description of Artificial Sequence: Synthetic oligonucleotide
ugggauuggaauucacuca

SEQ ID NO: 46962 - RNA, 19 nt, Artificial Sequence
  Description of Artificial Sequence: Synthetic oligonucleotide
cuuauaaguuccuuucuga

SEQ ID NO: 46963 - RNA, 19 nt, Artificial Sequence
  Description of Artificial Sequence: Synthetic oligonucleotide
agaacgaauguuccacaag

SEQ ID NO: 46964 - RNA, 19 nt, Artificial Sequence
  Description of Artificial Sequence: Synthetic oligonucleotide
uaaauuugcuaaucccaac

SEQ ID NO: 46965 - RNA, 19 nt, Artificial Sequence
  Description of Artificial Sequence: Synthetic oligonucleotide
ugugaaggguguuucuccc

SEQ ID NO: 46966 - RNA, 19 nt, Artificial Sequence
  Description of Artificial Sequence: Synthetic oligonucleotide
uaguuaaccggguaauuuc

SEQ ID NO: 46967 - RNA, 19 nt, Artificial Sequence
  Description of Artificial Sequence: Synthetic oligonucleotide
gucaauaugauguccaacu

SEQ ID NO: 46968 - RNA, 19 nt, Artificial Sequence
  Description of Artificial Sequence: Synthetic oligonucleotide
aauguccagaccaucguca

SEQ ID NO: 46969 - RNA, 19 nt, Artificial Sequence
  Description of Artificial Sequence: Synthetic oligonucleotide
auguggaacacacaucuaa

SEQ ID NO: 46970 - RNA, 19 nt, Artificial Sequence
  Description of Artificial Sequence: Synthetic oligonucleotide
guuugauaggucaggaccc

SEQ ID NO: 46971 - RNA, 19 nt, Artificial Sequence
  Description of Artificial Sequence: Synthetic oligonucleotide
uuucgcugauaagaggagg

SEQ ID NO: 46972 - RNA, 19 nt, Artificial Sequence
  Description of Artificial Sequence: Synthetic oligonucleotide
uuaguuguacauguagcac

SEQ ID NO: 46973 - RNA, 19 nt, Artificial Sequence
  Description of Artificial Sequence: Synthetic oligonucleotide
agaauugaaugugaccaag

SEQ ID NO: 46974 - RNA, 19 nt, Artificial Sequence
  Description of Artificial Sequence: Synthetic oligonucleotide
guacauguagcacguagug

SEQ ID NO: 46975 - RNA, 19 nt, Artificial Sequence
  Description of Artificial Sequence: Synthetic oligonucleotide
uaaacugaccuacgacagc

SEQ ID NO: 46976 - RNA, 19 nt, Artificial Sequence
  Description of Artificial Sequence: Synthetic oligonucleotide
uguuaggaaagccuugcuu

SEQ ID NO: 46977 - RNA, 19 nt, Artificial Sequence
  Description of Artificial Sequence: Synthetic oligonucleotide
gauagucgcaccaacauua

SEQ ID NO: 46978 - RNA, 19 nt, Artificial Sequence
  Description of Artificial Sequence: Synthetic oligonucleotide
aaccguauguuuaaaugga

SEQ ID NO: 46979 - RNA, 19 nt, Artificial Sequence
  Description of Artificial Sequence: Synthetic oligonucleotide
aguagaggugaucucacaa

SEQ ID NO: 46980 - RNA, 19 nt, Artificial Sequence
  Description of Artificial Sequence: Synthetic oligonucleotide
cagucuaucaagacagcug

SEQ ID NO: 46981 - RNA, 19 nt, Artificial Sequence
  Description of Artificial Sequence: Synthetic oligonucleotide
acuuucgcugauaagagga

SEQ ID NO: 46982 - RNA, 19 nt, Artificial Sequence
  Description of Artificial Sequence: Synthetic oligonucleotide
aaggagccgcaucaaaaga

SEQ ID NO: 46983 - RNA, 19 nt, Artificial Sequence
  Description of Artificial Sequence: Synthetic oligonucleotide
cagguacauacacauuugg

SEQ ID NO: 46984 - RNA, 19 nt, Artificial Sequence
  Description of Artificial Sequence: Synthetic oligonucleotide
aggaagguugccuacacua

SEQ ID NO: 46985 - RNA, 19 nt, Artificial Sequence
  Description of Artificial Sequence: Synthetic oligonucleotide
ugccuagugcguaggaugc

SEQ ID NO: 46986 - RNA, 19 nt, Artificial Sequence
  Description of Artificial Sequence: Synthetic oligonucleotide
cagacauucagcgacaaca

SEQ ID NO: 46987 - RNA, 19 nt, Artificial Sequence
  Description of Artificial Sequence: Synthetic oligonucleotide
uggcggaucgcuuuaacuc

SEQ ID NO: 46988 - RNA, 19 nt, Artificial Sequence
  Description of Artificial Sequence: Synthetic oligonucleotide
auagacuuuugccagggua

SEQ ID NO: 46989 - RNA, 19 nt, Artificial Sequence
  Description of Artificial Sequence: Synthetic oligonucleotide
cugugagaacgaauguucc

SEQ ID NO: 46990 - RNA, 19 nt, Artificial Sequence
  Description of Artificial Sequence: Synthetic oligonucleotide
gucuauggucaccuugucg

SEQ ID NO: 46991 - RNA, 19 nt, Artificial Sequence
  Description of Artificial Sequence: Synthetic oligonucleotide
uaacguauguuggggaacc

SEQ ID NO: 46992 - RNA, 19 nt, Artificial Sequence
  Description of Artificial Sequence: Synthetic oligonucleotide
aagggcggaucacucugac

SEQ ID NO: 46993 - RNA, 19 nt, Artificial Sequence
  Description of Artificial Sequence: Synthetic oligonucleotide
auaucacuuucgcugauaa

SEQ ID NO: 46994 - RNA, 19 nt, Artificial Sequence
  Description of Artificial Sequence: Synthetic oligonucleotide
cacuuaagucaauaugaug

SEQ ID NO: 46995 - RNA, 19 nt, Artificial Sequence
  Description of Artificial Sequence: Synthetic oligonucleotide
uacacgucuuacacuagga

SEQ ID NO: 46996 - RNA, 19 nt, Artificial Sequence
  Description of Artificial Sequence: Synthetic oligonucleotide
ugaacgugagacucuuucu

SEQ ID NO: 46997 - RNA, 19 nt, Artificial Sequence
  Description of Artificial Sequence: Synthetic oligonucleotide
gugcggucaaauguaaugg

SEQ ID NO: 46998 - RNA, 19 nt, Artificial Sequence
  Description of Artificial Sequence: Synthetic oligonucleotide
cuugcuuaguuuacauaug

SEQ ID NO: 46999 - RNA, 19 nt, Artificial Sequence
  Description of Artificial Sequence: Synthetic oligonucleotide
agaaagguacgcaugaaaa

SEQ ID NO: 47000 - RNA, 19 nt, Artificial Sequence
  Description of Artificial Sequence: Synthetic oligonucleotide
auaugaugacccugauauc

SEQ ID NO: 47001 - RNA, 19 nt, Artificial Sequence
  Description of Artificial Sequence: Synthetic oligonucleotide
cauucagcgacaacauuuc

SEQ ID NO: 47002 - RNA, 19 nt, Artificial Sequence
  Description of Artificial Sequence: Synthetic oligonucleotide
cguauguuuaaauggaccc

SEQ ID NO: 47003 - RNA, 19 nt, Artificial Sequence
  Description of Artificial Sequence: Synthetic oligonucleotide
ggcuaaauuugcuaauccc

SEQ ID NO: 47004 - RNA, 19 nt, Artificial Sequence
  Description of Artificial Sequence: Synthetic oligonucleotide
ucaggacccaaauugucuc

SEQ ID NO: 47005 - RNA, 19 nt, Artificial Sequence
  Description of Artificial Sequence: Synthetic oligonucleotide
uuguuuguuccagugacaa

SEQ ID NO: 47006 - RNA, 19 nt, Artificial Sequence
  Description of Artificial Sequence: Synthetic oligonucleotide
aaacaucugcuuuuacguu

SEQ ID NO: 47007 - RNA, 19 nt, Artificial Sequence
  Description of Artificial Sequence: Synthetic oligonucleotide
uuacguucucuucacgcuc

SEQ ID NO: 47008 - RNA, 19 nt, Artificial Sequence
  Description of Artificial Sequence: Synthetic oligonucleotide
uguagcacguaguggcuca

SEQ ID NO: 47009 - RNA, 19 nt, Artificial Sequence
  Description of Artificial Sequence: Synthetic oligonucleotide
ucuccauggaggaaacaaa

SEQ ID NO: 47010 - RNA, 19 nt, Artificial Sequence
  Description of Artificial Sequence: Synthetic oligonucleotide
uguaaggagccgcaucaaa

SEQ ID NO: 47011 - RNA, 19 nt, Artificial Sequence
  Description of Artificial Sequence: Synthetic oligonucleotide
ucugguuagggcagcuaca

SEQ ID NO: 47012 - RNA, 19 nt, Artificial Sequence
  Description of Artificial Sequence: Synthetic oligonucleotide
uagccuaaauuguuuguuc

SEQ ID NO: 47013 - RNA, 19 nt, Artificial Sequence
  Description of Artificial Sequence: Synthetic oligonucleotide
aauacccuuugagccgugg

SEQ ID NO: 47014 - RNA, 19 nt, Artificial Sequence
  Description of Artificial Sequence: Synthetic oligonucleotide
cuuucgcugauaagaggag

SEQ ID NO: 47015 - RNA, 19 nt, Artificial Sequence
  Description of Artificial Sequence: Synthetic oligonucleotide
uuucuaccucucuuauaag

SEQ ID NO: 47016 - RNA, 19 nt, Artificial Sequence
  Description of Artificial Sequence: Synthetic oligonucleotide
ugcgcaacaaauccaugua

SEQ ID NO: 47017 - RNA, 19 nt, Artificial Sequence
  Description of Artificial Sequence: Synthetic oligonucleotide
cugccuagugcguaggaug

SEQ ID NO: 47018 - RNA, 19 nt, Artificial Sequence
  Description of Artificial Sequence: Synthetic oligonucleotide
cuuuuacguucucuucacg

SEQ ID NO: 47019 - RNA, 19 nt, Artificial Sequence
  Description of Artificial Sequence: Synthetic oligonucleotide
cuucacuaggagaugagaa

SEQ ID NO: 47020 - RNA, 19 nt, Artificial Sequence
  Description of Artificial Sequence: Synthetic oligonucleotide
uuaacguauguuggggaac

SEQ ID NO: 47021 - RNA, 19 nt, Artificial Sequence
  Description of Artificial Sequence: Synthetic oligonucleotide
ugcuuaugaguaagagcug

SEQ ID NO: 47022 - RNA, 19 nt, Artificial Sequence
  Description of Artificial Sequence: Synthetic oligonucleotide
cugaaguguguuugauagg

SEQ ID NO: 47023 - RNA, 19 nt, Artificial Sequence
  Description of Artificial Sequence: Synthetic oligonucleotide
uccagaccaucgucaaccg

SEQ ID NO: 47024 - RNA, 19 nt, Artificial Sequence
  Description of Artificial Sequence: Synthetic oligonucleotide
ccuuaguuguacauguagc

SEQ ID NO: 47025 - RNA, 19 nt, Artificial Sequence
  Description of Artificial Sequence: Synthetic oligonucleotide
agucgcaccaacauuaaaa

SEQ ID NO: 47026 - RNA, 19 nt, Artificial Sequence
  Description of Artificial Sequence: Synthetic oligonucleotide
cacuuucgcugauaagagg

SEQ ID NO: 47027 - RNA, 19 nt, Artificial Sequence
  Description of Artificial Sequence: Synthetic oligonucleotide
ugacgagaagugcuucuga

SEQ ID NO: 47028 - RNA, 19 nt, Artificial Sequence
  Description of Artificial Sequence: Synthetic oligonucleotide
ggucaaauguaaugguccc

SEQ ID NO: 47029 - RNA, 19 nt, Artificial Sequence
  Description of Artificial Sequence: Synthetic oligonucleotide
acacgugguacuuuauuau

SEQ ID NO: 47030 - RNA, 19 nt, Artificial Sequence
  Description of Artificial Sequence: Synthetic oligonucleotide
auauaaugucuuaaaugga

SEQ ID NO: 47031 - RNA, 19 nt, Artificial Sequence
  Description of Artificial Sequence: Synthetic oligonucleotide
aggaucuauaagagugagc

SEQ ID NO: 47032 - RNA, 19 nt, Artificial Sequence
  Description of Artificial Sequence: Synthetic oligonucleotide
cucugguuagggcagcuac

SEQ ID NO: 47033 - RNA, 19 nt, Artificial Sequence
  Description of Artificial Sequence: Synthetic oligonucleotide
uuguguugcaggauugauu

SEQ ID NO: 47034 - RNA, 19 nt, Artificial Sequence
  Description of Artificial Sequence: Synthetic oligonucleotide
cuuuaacguauguugggga

SEQ ID NO: 47035 - RNA, 19 nt, Artificial Sequence
  Description of Artificial Sequence: Synthetic oligonucleotide
acuggaccagucagcaugc

SEQ ID NO: 47036 - RNA, 19 nt, Artificial Sequence
  Description of Artificial Sequence: Synthetic oligonucleotide
cugagcuucgggcauauga

SEQ ID NO: 47037 - RNA, 19 nt, Artificial Sequence
  Description of Artificial Sequence: Synthetic oligonucleotide
ugcggucaaauguaauggu

SEQ ID NO: 47038 - RNA, 19 nt, Artificial Sequence
  Description of Artificial Sequence: Synthetic oligonucleotide
ugcuaacuacggcauccag

SEQ ID NO: 47039 - RNA, 19 nt, Artificial Sequence
  Description of Artificial Sequence: Synthetic oligonucleotide
augccuugugcuaacuacg

SEQ ID NO: 47040 - RNA, 19 nt, Artificial Sequence
  Description of Artificial Sequence: Synthetic oligonucleotide
accguauguuuaaauggac

SEQ ID NO: 47041 - RNA, 19 nt, Artificial Sequence
  Description of Artificial Sequence: Synthetic oligonucleotide
aguggcuaaauuugcuaau

SEQ ID NO: 47042 - RNA, 19 nt, Artificial Sequence
  Description of Artificial Sequence: Synthetic oligonucleotide
uugucgacucagugcauug

SEQ ID NO: 47043 - RNA, 19 nt, Artificial Sequence
  Description of Artificial Sequence: Synthetic oligonucleotide
accuacgacagcagguccc

SEQ ID NO: 47044 - RNA, 19 nt, Artificial Sequence
  Description of Artificial Sequence: Synthetic oligonucleotide
ugagugacgagaagugcuu

SEQ ID NO: 47045 - RNA, 19 nt, Artificial Sequence
  Description of Artificial Sequence: Synthetic oligonucleotide
gcuuuaacguauguugggg

SEQ ID NO: 47046 - RNA, 19 nt, Artificial Sequence
  Description of Artificial Sequence: Synthetic oligonucleotide
uagugcguaggaugcagcu

SEQ ID NO: 47047 - RNA, 19 nt, Artificial Sequence
  Description of Artificial Sequence: Synthetic oligonucleotide
uuacuguaguuaaccgggu

SEQ ID NO: 47048 - RNA, 19 nt, Artificial Sequence
  Description of Artificial Sequence: Synthetic oligonucleotide
uuaaggccugccacugaug

SEQ ID NO: 47049 - RNA, 19 nt, Artificial Sequence
  Description of Artificial Sequence: Synthetic oligonucleotide
auaaaacgagaaauccaug

SEQ ID NO: 47050 - RNA, 19 nt, Artificial Sequence
  Description of Artificial Sequence: Synthetic oligonucleotide
uacgacagcaggucccucu

SEQ ID NO: 47051 - RNA, 19 nt, Artificial Sequence
  Description of Artificial Sequence: Synthetic oligonucleotide
aggagccgcaucaaaagag

SEQ ID NO: 47052 - RNA, 19 nt, Artificial Sequence
  Description of Artificial Sequence: Synthetic oligonucleotide
cugaggaugaucggaaauc

SEQ ID NO: 47053 - RNA, 19 nt, Artificial Sequence
  Description of Artificial Sequence: Synthetic oligonucleotide
ggagagacggucuuguaga

SEQ ID NO: 47054 - RNA, 19 nt, Artificial Sequence
  Description of Artificial Sequence: Synthetic oligonucleotide
uuugauaggucaggaccca

SEQ ID NO: 47055 - RNA, 19 nt, Artificial Sequence
  Description of Artificial Sequence: Synthetic oligonucleotide
uacugcgcuuggacaaagg

SEQ ID NO: 47056 - RNA, 19 nt, Artificial Sequence
  Description of Artificial Sequence: Synthetic oligonucleotide
auccuacacauuacagggc

SEQ ID NO: 47057 - RNA, 19 nt, Artificial Sequence
  Description of Artificial Sequence: Synthetic oligonucleotide
ccauaaauccuaacuuuag

SEQ ID NO: 47058 - RNA, 19 nt, Artificial Sequence
  Description of Artificial Sequence: Synthetic oligonucleotide
auggcggaucgcuuuaacu

SEQ ID NO: 47059 - RNA, 19 nt, Artificial Sequence
  Description of Artificial Sequence: Synthetic oligonucleotide
aguuaaccggguaauuuca

SEQ ID NO: 47060 - RNA, 19 nt, Artificial Sequence
  Description of Artificial Sequence: Synthetic oligonucleotide
ucgucaaccguauguuuaa

SEQ ID NO: 47061 - RNA, 19 nt, Artificial Sequence
  Description of Artificial Sequence: Synthetic oligonucleotide
ucuagacacuucucuccug

SEQ ID NO: 47062 - RNA, 19 nt, Artificial Sequence
  Description of Artificial Sequence: Synthetic oligonucleotide
acacauuacagggcaaaca

SEQ ID NO: 47063 - RNA, 19 nt, Artificial Sequence
  Description of Artificial Sequence: Synthetic oligonucleotide
cuagugcguaggaugcagc

SEQ ID NO: 47064 - RNA, 19 nt, Artificial Sequence
  Description of Artificial Sequence: Synthetic oligonucleotide
agggcggaucacucugacc

SEQ ID NO: 47065 - RNA, 19 nt, Artificial Sequence
  Description of Artificial Sequence: Synthetic oligonucleotide
auagauccacuuaucuuug

SEQ ID NO: 47066 - RNA, 19 nt, Artificial Sequence
  Description of Artificial Sequence: Synthetic oligonucleotide
aauuugucccauacaggaa

SEQ ID NO: 47067 - RNA, 19 nt, Artificial Sequence
  Description of Artificial Sequence: Synthetic oligonucleotide
ccguauguuuaaauggacc

SEQ ID NO: 47068 - RNA, 19 nt, Artificial Sequence
  Description of Artificial Sequence: Synthetic oligonucleotide
guauguuggggaaccuggg

SEQ ID NO: 47069 - RNA, 19 nt, Artificial Sequence
  Description of Artificial Sequence: Synthetic oligonucleotide
ugaccuacgacagcagguc

SEQ ID NO: 47070 - RNA, 19 nt, Artificial Sequence
  Description of Artificial Sequence: Synthetic oligonucleotide
uucgucugugagaacgaau

SEQ ID NO: 47071 - RNA, 19 nt, Artificial Sequence
  Description of Artificial Sequence: Synthetic oligonucleotide
gccgcaucaaaagaggaag

SEQ ID NO: 47072 - RNA, 19 nt, Artificial Sequence
  Description of Artificial Sequence: Synthetic oligonucleotide
auguaaugguccccaugug

SEQ ID NO: 47073 - RNA, 19 nt, Artificial Sequence
  Description of Artificial Sequence: Synthetic oligonucleotide
acagguacauacacauuug

SEQ ID NO: 47074 - RNA, 19 nt, Artificial Sequence
  Description of Artificial Sequence: Synthetic oligonucleotide
acgugguacuuuauuaucu

SEQ ID NO: 47075 - RNA, 19 nt, Artificial Sequence
  Description of Artificial Sequence: Synthetic oligonucleotide
cugguuauuucuuguagua

SEQ ID NO: 47076 - RNA, 19 nt, Artificial Sequence
  Description of Artificial Sequence: Synthetic oligonucleotide
caggacccaaauugucucc

SEQ ID NO: 47077 - RNA, 19 nt, Artificial Sequence
  Description of Artificial Sequence: Synthetic oligonucleotide
cagaccaucgucaaccgua

SEQ ID NO: 47078 - RNA, 19 nt, Artificial Sequence
  Description of Artificial Sequence: Synthetic oligonucleotide
aucccuuaucagcgauggc

SEQ ID NO: 47079 - RNA, 19 nt, Artificial Sequence
  Description of Artificial Sequence: Synthetic oligonucleotide
guagauagucgcaccaaca

SEQ ID NO: 47080 - RNA, 19 nt, Artificial Sequence
  Description of Artificial Sequence: Synthetic oligonucleotide
cggucaaauguaauggucc

SEQ ID NO: 47081 - RNA, 19 nt, Artificial Sequence
  Description of Artificial Sequence: Synthetic oligonucleotide
gaccuacgacagcaggucc

SEQ ID NO: 47082 - RNA, 19 nt, Artificial Sequence
  Description of Artificial Sequence: Synthetic oligonucleotide
agguugcaaauaauuuguc

SEQ ID NO: 47083 - RNA, 19 nt, Artificial Sequence
  Description of Artificial Sequence: Synthetic oligonucleotide
cuucgggcauaugaugacc

SEQ ID NO: 47084 - RNA, 19 nt, Artificial Sequence
  Description of Artificial Sequence: Synthetic oligonucleotide
auucagcgacaacauuucu

SEQ ID NO: 47085 - RNA, 19 nt, Artificial Sequence
  Description of Artificial Sequence: Synthetic oligonucleotide
ccuaaauuguuuguuccag

SEQ ID NO: 47086 - RNA, 19 nt, Artificial Sequence
  Description of Artificial Sequence: Synthetic oligonucleotide
ggagccgcaucaaaagagg

SEQ ID NO: 47087 - RNA, 19 nt, Artificial Sequence
  Description of Artificial Sequence: Synthetic oligonucleotide
caaggccacucuucuuacg

SEQ ID NO: 47088 - RNA, 19 nt, Artificial Sequence
  Description of Artificial Sequence: Synthetic oligonucleotide
guaaggagccgcaucaaaa

SEQ ID NO: 47089 - RNA, 19 nt, Artificial Sequence
  Description of Artificial Sequence: Synthetic oligonucleotide
auacccuuugagccgugga

SEQ ID NO: 47090 - RNA, 19 nt, Artificial Sequence
  Description of Artificial Sequence: Synthetic oligonucleotide
aggaugaucggaaaucgua

SEQ ID NO: 47091 - RNA, 19 nt, Artificial Sequence
  Description of Artificial Sequence: Synthetic oligonucleotide
agcuacacauuuggcaaug

SEQ ID NO: 47092 - RNA, 19 nt, Artificial Sequence
  Description of Artificial Sequence: Synthetic oligonucleotide
cuauaagagugagcuuccc

SEQ ID NO: 47093 - RNA, 19 nt, Artificial Sequence
  Description of Artificial Sequence: Synthetic oligonucleotide
guggcuaaauuugcuaauc

SEQ ID NO: 47094 - RNA, 19 nt, Artificial Sequence
  Description of Artificial Sequence: Synthetic oligonucleotide
uguccagaccaucgucaac

SEQ ID NO: 47095 - RNA, 19 nt, Artificial Sequence
  Description of Artificial Sequence: Synthetic oligonucleotide
ugcccacuuaagucaauau

SEQ ID NO: 47096 - RNA, 19 nt, Artificial Sequence
  Description of Artificial Sequence: Synthetic oligonucleotide
gcuuuuacguucucuucac

SEQ ID NO: 47097 - RNA, 19 nt, Artificial Sequence
  Description of Artificial Sequence: Synthetic oligonucleotide
agccuugcuuaguuuacau

SEQ ID NO: 47098 - RNA, 19 nt, Artificial Sequence
  Description of Artificial Sequence: Synthetic oligonucleotide
cuuaacgaccaccagcuau

SEQ ID NO: 47099 - RNA, 19 nt, Artificial Sequence
  Description of Artificial Sequence: Synthetic oligonucleotide
auccaaccuuuguaguacu

SEQ ID NO: 47100 - RNA, 19 nt, Artificial Sequence
  Description of Artificial Sequence: Synthetic oligonucleotide
caugcgcaacaaauccaug

SEQ ID NO: 47101 - RNA, 19 nt, Artificial Sequence
  Description of Artificial Sequence: Synthetic oligonucleotide
gcucuuuaaaucuggauau

SEQ ID NO: 47102 - RNA, 19 nt, Artificial Sequence
  Description of Artificial Sequence: Synthetic oligonucleotide
agugcguaggaugcagcug

SEQ ID NO: 47103 - RNA, 19 nt, Artificial Sequence
  Description of Artificial Sequence: Synthetic oligonucleotide
uaacuacggcauccaggca

SEQ ID NO: 47104 - RNA, 19 nt, Artificial Sequence
  Description of Artificial Sequence: Synthetic oligonucleotide
uugugcuaacuacggcauc

SEQ ID NO: 47105 - RNA, 19 nt, Artificial Sequence
  Description of Artificial Sequence: Synthetic oligonucleotide
agacauucagcgacaacau

SEQ ID NO: 47106 - RNA, 19 nt, Artificial Sequence
  Description of Artificial Sequence: Synthetic oligonucleotide
ucgggcauaugaugacccu

SEQ ID NO: 47107 - RNA, 19 nt, Artificial Sequence
  Description of Artificial Sequence: Synthetic oligonucleotide
uagucgcaccaacauuaaa

SEQ ID NO: 47108 - RNA, 19 nt, Artificial Sequence
  Description of Artificial Sequence: Synthetic oligonucleotide
aucgucaaccguauguuua

SEQ ID NO: 47109 - RNA, 19 nt, Artificial Sequence
  Description of Artificial Sequence: Synthetic oligonucleotide
uuuacggaguuugccuuua

SEQ ID NO: 47110 - RNA, 19 nt, Artificial Sequence
  Description of Artificial Sequence: Synthetic oligonucleotide
uuacggaguuugccuuuac

SEQ ID NO: 47111 - RNA, 19 nt, Artificial Sequence
  Description of Artificial Sequence: Synthetic oligonucleotide
cugaucuaaagggcggauc

SEQ ID NO: 47112 - RNA, 19 nt, Artificial Sequence
  Description of Artificial Sequence: Synthetic oligonucleotide
acguauguuggggaaccug

SEQ ID NO: 47113 - RNA, 19 nt, Artificial Sequence
  Description of Artificial Sequence: Synthetic oligonucleotide
uucucaacauacggcuuaa

SEQ ID NO: 47114 - RNA, 19 nt, Artificial Sequence
  Description of Artificial Sequence: Synthetic oligonucleotide
gaagguugccuacacuaau

SEQ ID NO: 47115 - RNA, 19 nt, Artificial Sequence
  Description of Artificial Sequence: Synthetic oligonucleotide
caacaagucgauccaaccu

SEQ ID NO: 47116 - RNA, 19 nt, Artificial Sequence
  Description of Artificial Sequence: Synthetic oligonucleotide
ugucgacucagugcauugu

SEQ ID NO: 47117 - RNA, 19 nt, Artificial Sequence
  Description of Artificial Sequence: Synthetic oligonucleotide
cagaauugaaugugaccaa

SEQ ID NO: 47118 - RNA, 19 nt, Artificial Sequence
  Description of Artificial Sequence: Synthetic oligonucleotide
aacguauguuggggaaccu

SEQ ID NO: 47119 - RNA, 19 nt, Artificial Sequence
  Description of Artificial Sequence: Synthetic oligonucleotide
ggcggaucgcuuuaacuca

SEQ ID NO: 47120 - RNA, 19 nt, Artificial Sequence
  Description of Artificial Sequence: Synthetic oligonucleotide
aggacccaaauugucucca

SEQ ID NO: 47121 - RNA, 19 nt, Artificial Sequence
  Description of Artificial Sequence: Synthetic oligonucleotide
auccuaacuuuaguuccca

SEQ ID NO: 47122 - RNA, 19 nt, Artificial Sequence
  Description of Artificial Sequence: Synthetic oligonucleotide
aucaccuaugcaguucuuu

SEQ ID NO: 47123 - RNA, 19 nt, Artificial Sequence
  Description of Artificial Sequence: Synthetic oligonucleotide
ccuugcuuaguuuacauau

SEQ ID NO: 47124 - RNA, 19 nt, Artificial Sequence
  Description of Artificial Sequence: Synthetic oligonucleotide
agaucccuuaucagcgaug

SEQ ID NO: 47125 - RNA, 19 nt, Artificial Sequence
  Description of Artificial Sequence: Synthetic oligonucleotide
cuugugcuaacuacggcau

SEQ ID NO: 47126 - RNA, 19 nt, Artificial Sequence
  Description of Artificial Sequence: Synthetic oligonucleotide
cuuuaccuuaguuguacau

SEQ ID NO: 47127 - RNA, 19 nt, Artificial Sequence
  Description of Artificial Sequence: Synthetic oligonucleotide
gcugcccucaccuaagcaa

SEQ ID NO: 47128 - RNA, 19 nt, Artificial Sequence
  Description of Artificial Sequence: Synthetic oligonucleotide
uggcugcccucaccuaagc

SEQ ID NO: 47129 - RNA, 19 nt, Artificial Sequence
  Description of Artificial Sequence: Synthetic oligonucleotide
cuaauguccagaccaucgu

SEQ ID NO: 47130 - RNA, 19 nt, Artificial Sequence
  Description of Artificial Sequence: Synthetic oligonucleotide
ugcacacgugguacuuuau

SEQ ID NO: 47131 - RNA, 19 nt, Artificial Sequence
  Description of Artificial Sequence: Synthetic oligonucleotide
agcaagcaguggcaguuuu

SEQ ID NO: 47132 - RNA, 19 nt, Artificial Sequence
  Description of Artificial Sequence: Synthetic oligonucleotide
acuacggcauccaggcacu

SEQ ID NO: 47133 - RNA, 19 nt, Artificial Sequence
  Description of Artificial Sequence: Synthetic oligonucleotide
auugugcggucaaauguaa

SEQ ID NO: 47134 - RNA, 19 nt, Artificial Sequence
  Description of Artificial Sequence: Synthetic oligonucleotide
ucagugcauugugcgguca

SEQ ID NO: 47135 - RNA, 19 nt, Artificial Sequence
  Description of Artificial Sequence: Synthetic oligonucleotide
guaguuaaccggguaauuu

SEQ ID NO: 47136 - RNA, 19 nt, Artificial Sequence
  Description of Artificial Sequence: Synthetic oligonucleotide
gagccgcaucaaaagagga

SEQ ID NO: 47137 - RNA, 19 nt, Artificial Sequence
  Description of Artificial Sequence: Synthetic oligonucleotide
cauacggcuuaaggccugc

SEQ ID NO: 47138 - RNA, 19 nt, Artificial Sequence
  Description of Artificial Sequence: Synthetic oligonucleotide
gguaucauacagaguacaa

SEQ ID NO: 47139 - RNA, 19 nt, Artificial Sequence
  Description of Artificial Sequence: Synthetic oligonucleotide
aguggcucaacaagucgau

SEQ ID NO: 47140 - RNA, 19 nt, Artificial Sequence
  Description of Artificial Sequence: Synthetic oligonucleotide
aacgggucuccaacacaug

SEQ ID NO: 47141 - RNA, 19 nt, Artificial Sequence
  Description of Artificial Sequence: Synthetic oligonucleotide
uugauaggucaggacccaa

SEQ ID NO: 47142 - RNA, 19 nt, Artificial Sequence
  Description of Artificial Sequence: Synthetic oligonucleotide
gagugacgagaagugcuuc

SEQ ID NO: 47143 - RNA, 19 nt, Artificial Sequence
  Description of Artificial Sequence: Synthetic oligonucleotide
cacgcucuuuaaaucugga

SEQ ID NO: 47144 - RNA, 19 nt, Artificial Sequence
  Description of Artificial Sequence: Synthetic oligonucleotide
gacaacauuucuggugccu

SEQ ID NO: 47145 - RNA, 19 nt, Artificial Sequence
  Description of Artificial Sequence: Synthetic oligonucleotide
gucaaccguauguuuaaau

SEQ ID NO: 47146 - RNA, 19 nt, Artificial Sequence
  Description of Artificial Sequence: Synthetic oligonucleotide
ggcaaugauugcaagcaaa

SEQ ID NO: 47147 - RNA, 19 nt, Artificial Sequence
  Description of Artificial Sequence: Synthetic oligonucleotide
agcguccauagcauucuca

SEQ ID NO: 47148 - RNA, 19 nt, Artificial Sequence
  Description of Artificial Sequence: Synthetic oligonucleotide
gaccaucgucaaccguaug

SEQ ID NO: 47149 - RNA, 19 nt, Artificial Sequence
  Description of Artificial Sequence: Synthetic oligonucleotide
gggauuggaauucacucau

SEQ ID NO: 47150 - RNA, 19 nt, Artificial Sequence
  Description of Artificial Sequence: Synthetic oligonucleotide
aguuugccuuuaccuuagu

SEQ ID NO: 47151 - RNA, 19 nt, Artificial Sequence
  Description of Artificial Sequence: Synthetic oligonucleotide
cuuaaggccugccacugau

SEQ ID NO: 47152 - RNA, 19 nt, Artificial Sequence
  Description of Artificial Sequence: Synthetic oligonucleotide
agccgcaucaaaagaggaa

SEQ ID NO: 47153 - RNA, 19 nt, Artificial Sequence
  Description of Artificial Sequence: Synthetic oligonucleotide
cugcgcuuggacaaagggu

SEQ ID NO: 47154 - RNA, 19 nt, Artificial Sequence
  Description of Artificial Sequence: Synthetic oligonucleotide
caguagaggugaucucaca

SEQ ID NO: 47155 - RNA, 19 nt, Artificial Sequence
  Description of Artificial Sequence: Synthetic oligonucleotide
auagucgcaccaacauuaa

SEQ ID NO: 47156 - RNA, 19 nt, Artificial Sequence
  Description of Artificial Sequence: Synthetic oligonucleotide
aaauacccuuugagccgug

SEQ ID NO: 47157 - RNA, 19 nt, Artificial Sequence
  Description of Artificial Sequence: Synthetic oligonucleotide
gcaaucagcgucaaugccu

SEQ ID NO: 47158 - RNA, 19 nt, Artificial Sequence
  Description of Artificial Sequence: Synthetic oligonucleotide
cuaagcaagcaguggcagu

SEQ ID NO: 47159 - RNA, 19 nt, Artificial Sequence
  Description of Artificial Sequence: Synthetic oligonucleotide
ccuagugcguaggaugcag

SEQ ID NO: 47160 - RNA, 19 nt, Artificial Sequence
  Description of Artificial Sequence: Synthetic oligonucleotide
acuuaacgaccaccagcua

SEQ ID NO: 47161 - RNA, 19 nt, Artificial Sequence
  Description of Artificial Sequence: Synthetic oligonucleotide
gagaucccuuaucagcgau

SEQ ID NO: 47162 - RNA, 19 nt, Artificial Sequence
  Description of Artificial Sequence: Synthetic oligonucleotide
cgaauggaaucuguagacc

SEQ ID NO: 47163 - RNA, 19 nt, Artificial Sequence
  Description of Artificial Sequence: Synthetic oligonucleotide
cuccaaauuaguggaugaa

SEQ ID NO: 47164 - RNA, 19 nt, Artificial Sequence
  Description of Artificial Sequence: Synthetic oligonucleotide
cauugugaaggguguuucu

SEQ ID NO: 47165 - RNA, 19 nt, Artificial Sequence
  Description of Artificial Sequence: Synthetic oligonucleotide
uaacgaccaccagcuauua

SEQ ID NO: 47166 - RNA, 19 nt, Artificial Sequence
  Description of Artificial Sequence: Synthetic oligonucleotide
ucccucuuuagggcaugcu

SEQ ID NO: 47167 - RNA, 19 nt, Artificial Sequence
  Description of Artificial Sequence: Synthetic oligonucleotide
gcggucaaauguaaugguc

SEQ ID NO: 47168 - RNA, 19 nt, Artificial Sequence
  Description of Artificial Sequence: Synthetic oligonucleotide
ggcggaucacucugaccag

SEQ ID NO: 47169 - RNA, 19 nt, Artificial Sequence
  Description of Artificial Sequence: Synthetic oligonucleotide
ggaucgcuuuaacucaucu

SEQ ID NO: 47170 - RNA, 19 nt, Artificial Sequence
  Description of Artificial Sequence: Synthetic oligonucleotide
ggauuggaauucacucaug

SEQ ID NO: 47171 - RNA, 19 nt, Artificial Sequence
  Description of Artificial Sequence: Synthetic oligonucleotide
ccuuaucagcgauggcuug

SEQ ID NO: 47172 - RNA, 19 nt, Artificial Sequence
  Description of Artificial Sequence: Synthetic oligonucleotide
cuuaucagcgauggcuugu

SEQ ID NO: 47173 - RNA, 19 nt, Artificial Sequence
  Description of Artificial Sequence: Synthetic oligonucleotide
cauaucacuuucgcugaua

SEQ ID NO: 47174 - RNA, 19 nt, Artificial Sequence
  Description of Artificial Sequence: Synthetic oligonucleotide
gucugugagaacgaauguu

SEQ ID NO: 47175 - RNA, 19 nt, Artificial Sequence
  Description of Artificial Sequence: Synthetic oligonucleotide
aaucaccuaugcaguucuu

SEQ ID NO: 47176 - RNA, 19 nt, Artificial Sequence
  Description of Artificial Sequence: Synthetic oligonucleotide
gugcuaacuacggcaucca

SEQ ID NO: 47177 - RNA, 19 nt, Artificial Sequence
  Description of Artificial Sequence: Synthetic oligonucleotide
gcauaugaugacccugaua

SEQ ID NO: 47178 - RNA, 19 nt, Artificial Sequence
  Description of Artificial Sequence: Synthetic oligonucleotide
ccuacacuaaugcugccua

SEQ ID NO: 47179 - RNA, 19 nt, Artificial Sequence
  Description of Artificial Sequence: Synthetic oligonucleotide
agccugaacgugagacucu

SEQ ID NO: 47180 - RNA, 19 nt, Artificial Sequence
  Description of Artificial Sequence: Synthetic oligonucleotide
cgcugauaagaggagggag

SEQ ID NO: 47181 - RNA, 19 nt, Artificial Sequence
  Description of Artificial Sequence: Synthetic oligonucleotide
cucauggcggaucgcuuua

SEQ ID NO: 47182 - RNA, 19 nt, Artificial Sequence
  Description of Artificial Sequence: Synthetic oligonucleotide
cuuuacggaguuugccuuu

SEQ ID NO: 47183 - RNA, 19 nt, Artificial Sequence
  Description of Artificial Sequence: Synthetic oligonucleotide
gaagugcuucugaugugau

SEQ ID NO: 47184 - RNA, 19 nt, Artificial Sequence
  Description of Artificial Sequence: Synthetic oligonucleotide
ccuuuaccuuaguuguaca

SEQ ID NO: 47185 - RNA, 19 nt, Artificial Sequence
  Description of Artificial Sequence: Synthetic oligonucleotide
ccauugacuccaaauuagu

SEQ ID NO: 47186 - RNA, 19 nt, Artificial Sequence
  Description of Artificial Sequence: Synthetic oligonucleotide
ggcugaucuaaagggcgga

SEQ ID NO: 47187 - RNA, 19 nt, Artificial Sequence
  Description of Artificial Sequence: Synthetic oligonucleotide
gccuugcuuaguuuacaua

SEQ ID NO: 47188 - RNA, 19 nt, Artificial Sequence
  Description of Artificial Sequence: Synthetic oligonucleotide
gcuuaaggccugccacuga

SEQ ID NO: 47189 - RNA, 19 nt, Artificial Sequence
  Description of Artificial Sequence: Synthetic oligonucleotide
gcgcuuggacaaaggguag

SEQ ID NO: 47190 - RNA, 19 nt, Artificial Sequence
  Description of Artificial Sequence: Synthetic oligonucleotide
acugagcuucgggcauaug

SEQ ID NO: 47191 - RNA, 19 nt, Artificial Sequence
  Description of Artificial Sequence: Synthetic oligonucleotide
ggacccaaauugucuccaa

SEQ ID NO: 47192 - RNA, 19 nt, Artificial Sequence
  Description of Artificial Sequence: Synthetic oligonucleotide
ggagugcuaagagacgaau

SEQ ID NO: 47193 - RNA, 19 nt, Artificial Sequence
  Description of Artificial Sequence: Synthetic oligonucleotide
guuguacauguagcacgua

SEQ ID NO: 47194 - RNA, 19 nt, Artificial Sequence
  Description of Artificial Sequence: Synthetic oligonucleotide
ccgcuugauuguacaggug

SEQ ID NO: 47195 - RNA, 19 nt, Artificial Sequence
  Description of Artificial Sequence: Synthetic oligonucleotide
gcagcugcgcgucucacuu

SEQ ID NO: 47196 - RNA, 19 nt, Artificial Sequence
  Description of Artificial Sequence: Synthetic oligonucleotide
ccaaauugucuccaagguu

SEQ ID NO: 47197 - RNA, 19 nt, Artificial Sequence
  Description of Artificial Sequence: Synthetic oligonucleotide
cuacgacagcaggucccuc

SEQ ID NO: 47198 - RNA, 19 nt, Artificial Sequence
  Description of Artificial Sequence: Synthetic oligonucleotide
gccgccaguucaggguuag

SEQ ID NO: 47199 - RNA, 19 nt, Artificial Sequence
  Description of Artificial Sequence: Synthetic oligonucleotide
ccuacacauuacagggcaa

SEQ ID NO: 47200 - RNA, 19 nt, Artificial Sequence
  Description of Artificial Sequence: Synthetic oligonucleotide
caucagcguccauagcauu

SEQ ID NO: 47201 - RNA, 19 nt, Artificial Sequence
  Description of Artificial Sequence: Synthetic oligonucleotide
gcacacgugguacuuuauu

SEQ ID NO: 47202 - RNA, 19 nt, Artificial Sequence
  Description of Artificial Sequence: Synthetic oligonucleotide
ccguggaaggagaguuuca

SEQ ID NO: 47203 - RNA, 19 nt, Artificial Sequence
  Description of Artificial Sequence: Synthetic oligonucleotide
cagcgucaaugccuuuacu

SEQ ID NO: 47204 - RNA, 19 nt, Artificial Sequence
  Description of Artificial Sequence: Synthetic oligonucleotide
gcauaucacuuucgcugau

SEQ ID NO: 47205 - RNA, 19 nt, Artificial Sequence
  Description of Artificial Sequence: Synthetic oligonucleotide
cggaucgcuuuaacucauc

SEQ ID NO: 47206 - RNA, 19 nt, Artificial Sequence
  Description of Artificial Sequence: Synthetic oligonucleotide
gccuagugcguaggaugca

SEQ ID NO: 47207 - RNA, 19 nt, Artificial Sequence
  Description of Artificial Sequence: Synthetic oligonucleotide
gcugaucuaaagggcggau

SEQ ID NO: 47208 - RNA, 19 nt, Artificial Sequence
  Description of Artificial Sequence: Synthetic oligonucleotide
gcugccuagugcguaggau

SEQ ID NO: 47209 - RNA, 19 nt, Artificial Sequence
  Description of Artificial Sequence: Synthetic oligonucleotide
ccucauggcggaucgcuuu

SEQ ID NO: 47210 - RNA, 19 nt, Artificial Sequence
  Description of Artificial Sequence: Synthetic oligonucleotide
cgucugugagaacgaaugu

SEQ ID NO: 47211 - RNA, 19 nt, Artificial Sequence
  Description of Artificial Sequence: Synthetic oligonucleotide
gccugaacgugagacucuu

SEQ ID NO: 47212 - RNA, 19 nt, Artificial Sequence
  Description of Artificial Sequence: Synthetic oligonucleotide
gcggaucgcuuuaacucau

SEQ ID NO: 47213 - RNA, 19 nt, Artificial Sequence
  Description of Artificial Sequence: Synthetic oligonucleotide
ccagaccaucgucaaccgu

SEQ ID NO: 47214 - RNA, 19 nt, Artificial Sequence
  Description of Artificial Sequence: Synthetic oligonucleotide
cgucaaccguauguuuaaa

SEQ ID NO: 47215 - RNA, 19 nt, Artificial Sequence
  Description of Artificial Sequence: Synthetic oligonucleotide
ccuugucgacucagugcau

SEQ ID NO: 47216 - RNA, 19 nt, Artificial Sequence
  Description of Artificial Sequence: Synthetic oligonucleotide
cuacggcauccaggcacuu

SEQ ID NO: 47217 - RNA, 19 nt, Artificial Sequence
  Description of Artificial Sequence: Synthetic oligonucleotide
auauuauauauauauauag

SEQ ID NO: 47218 - RNA, 19 nt, Artificial Sequence
  Description of Artificial Sequence: Synthetic oligonucleotide
uauauauauauauagaauc

SEQ ID NO: 47219 - RNA, 19 nt, Artificial Sequence
  Description of Artificial Sequence: Synthetic oligonucleotide
aaaauaagcuaccuucccc

SEQ ID NO: 47220 - RNA, 19 nt, Artificial Sequence
  Description of Artificial Sequence: Synthetic oligonucleotide
aaacgaacgagacagagug

SEQ ID NO: 47221 - RNA, 19 nt, Artificial Sequence
  Description of Artificial Sequence: Synthetic oligonucleotide
aaauaagcuaccuuccccg

SEQ ID NO: 47222 - RNA, 19 nt, Artificial Sequence
  Description of Artificial Sequence: Synthetic oligonucleotide
aguaucuuccccuaagacc

SEQ ID NO: 47223 - RNA, 19 nt, Artificial Sequence
  Description of Artificial Sequence: Synthetic oligonucleotide
auuauauauauauauagaa

SEQ ID NO: 47224 - RNA, 19 nt, Artificial Sequence
  Description of Artificial Sequence: Synthetic oligonucleotide
aucgauacaauauugaaga

SEQ ID NO: 47225 - RNA, 19 nt, Artificial Sequence
  Description of Artificial Sequence: Synthetic oligonucleotide
auauauauauauagaaucc

SEQ ID NO: 47226 - RNA, 19 nt, Artificial Sequence
  Description of Artificial Sequence: Synthetic oligonucleotide
uauuauauauauauauaga

SEQ ID NO: 47227 - RNA, 19 nt, Artificial Sequence
  Description of Artificial Sequence: Synthetic oligonucleotide
uccacgacaaaccacacag

SEQ ID NO: 47228 - RNA, 19 nt, Artificial Sequence
  Description of Artificial Sequence: Synthetic oligonucleotide
aauaagagaggcuggagcu

SEQ ID NO: 47229 - RNA, 19 nt, Artificial Sequence
  Description of Artificial Sequence: Synthetic oligonucleotide
aacuaaaacccuuaaauuu

SEQ ID NO: 47230 - RNA, 19 nt, Artificial Sequence
  Description of Artificial Sequence: Synthetic oligonucleotide
ucuaaggaaccguaaaggg

SEQ ID NO: 47231 - RNA, 19 nt, Artificial Sequence
  Description of Artificial Sequence: Synthetic oligonucleotide
acguauauuauauauauau

SEQ ID NO: 47232 - RNA, 19 nt, Artificial Sequence
  Description of Artificial Sequence: Synthetic oligonucleotide
uuauauauauauauagaau

SEQ ID NO: 47233 - RNA, 19 nt, Artificial Sequence
  Description of Artificial Sequence: Synthetic oligonucleotide
aacgcgagagaaaagagac

SEQ ID NO: 47234 - RNA, 19 nt, Artificial Sequence
  Description of Artificial Sequence: Synthetic oligonucleotide
uauauuauauauauauaua

SEQ ID NO: 47235 - RNA, 19 nt, Artificial Sequence
  Description of Artificial Sequence: Synthetic oligonucleotide
auauauagaauccauucgu

SEQ ID NO: 47236 - RNA, 19 nt, Artificial Sequence
  Description of Artificial Sequence: Synthetic oligonucleotide
acaccgagccauuugaggc

SEQ ID NO: 47237 - RNA, 19 nt, Artificial Sequence
  Description of Artificial Sequence: Synthetic oligonucleotide
uauagaauccauucgugca

SEQ ID NO: 47238 - RNA, 19 nt, Artificial Sequence
  Description of Artificial Sequence: Synthetic oligonucleotide
agaaacaucccacucaaca

SEQ ID NO: 47239 - RNA, 19 nt, Artificial Sequence
  Description of Artificial Sequence: Synthetic oligonucleotide
uauauagaauccauucgug

SEQ ID NO: 47240 - RNA, 19 nt, Artificial Sequence
  Description of Artificial Sequence: Synthetic oligonucleotide
uucuaaggaaccguaaagg

SEQ ID NO: 47241 - RNA, 19 nt, Artificial Sequence
  Description of Artificial Sequence: Synthetic oligonucleotide
acuuucaagcguaacaccc

SEQ ID NO: 47242 - RNA, 19 nt, Artificial Sequence
  Description of Artificial Sequence: Synthetic oligonucleotide
uauauauauauagaaucca

SEQ ID NO: 47243 - RNA, 19 nt, Artificial Sequence
  Description of Artificial Sequence: Synthetic oligonucleotide
gacaauuuauuugagggug

SEQ ID NO: 47244 - RNA, 19 nt, Artificial Sequence
  Description of Artificial Sequence: Synthetic oligonucleotide
ucuauggugccuucgaccc

SEQ ID NO: 47245 - RNA, 19 nt, Artificial Sequence
  Description of Artificial Sequence: Synthetic oligonucleotide
uaaaacgcgagagaaaaga

SEQ ID NO: 47246 - RNA, 19 nt, Artificial Sequence
  Description of Artificial Sequence: Synthetic oligonucleotide
gacggagggaccuauaggc

SEQ ID NO: 47247 - RNA, 19 nt, Artificial Sequence
  Description of Artificial Sequence: Synthetic oligonucleotide
uuaaauagcuuucucccuc

SEQ ID NO: 47248 - RNA, 19 nt, Artificial Sequence
  Description of Artificial Sequence: Synthetic oligonucleotide
aagugauuccuugaaccgc

SEQ ID NO: 47249 - RNA, 19 nt, Artificial Sequence
  Description of Artificial Sequence: Synthetic oligonucleotide
caaguaugauucuaggaag

SEQ ID NO: 47250 - RNA, 19 nt, Artificial Sequence
  Description of Artificial Sequence: Synthetic oligonucleotide
caucgauacaauauugaag

SEQ ID NO: 47251 - RNA, 19 nt, Artificial Sequence
  Description of Artificial Sequence: Synthetic oligonucleotide
cuuacucuaacacugccac

SEQ ID NO: 47252 - RNA, 19 nt, Artificial Sequence
  Description of Artificial Sequence: Synthetic oligonucleotide
gugacgacuacauuggagc

SEQ ID NO: 47253 - RNA, 19 nt, Artificial Sequence
  Description of Artificial Sequence: Synthetic oligonucleotide
guauauuauauauauauau

SEQ ID NO: 47254 - RNA, 19 nt, Artificial Sequence
  Description of Artificial Sequence: Synthetic oligonucleotide
gauucuaggaaggacggcc

SEQ ID NO: 47255 - RNA, 19 nt, Artificial Sequence
  Description of Artificial Sequence: Synthetic oligonucleotide
uauagagcuauguacguau

SEQ ID NO: 47256 - RNA, 19 nt, Artificial Sequence
  Description of Artificial Sequence: Synthetic oligonucleotide
caagauagcaccgagacca

SEQ ID NO: 47257 - RNA, 19 nt, Artificial Sequence
  Description of Artificial Sequence: Synthetic oligonucleotide
ugugacgacuacauuggag

SEQ ID NO: 47258 - RNA, 19 nt, Artificial Sequence
  Description of Artificial Sequence: Synthetic oligonucleotide
caauaagagaggcuggagc

SEQ ID NO: 47259 - RNA, 19 nt, Artificial Sequence
  Description of Artificial Sequence: Synthetic oligonucleotide
uccgugaugggacuuuggg

SEQ ID NO: 47260 - RNA, 19 nt, Artificial Sequence
  Description of Artificial Sequence: Synthetic oligonucleotide
uguacguauauuauauaua

SEQ ID NO: 47261 - RNA, 19 nt, Artificial Sequence
  Description of Artificial Sequence: Synthetic oligonucleotide
acgguaucaggguuaacac

SEQ ID NO: 47262 - RNA, 19 nt, Artificial Sequence
  Description of Artificial Sequence: Synthetic oligonucleotide
ucucgaaauccucagggcu

SEQ ID NO: 47263 - RNA, 19 nt, Artificial Sequence
  Description of Artificial Sequence: Synthetic oligonucleotide
ucaagcguaacaccccaag

SEQ ID NO: 47264 - RNA, 19 nt, Artificial Sequence
  Description of Artificial Sequence: Synthetic oligonucleotide
aagcguaacaccccaagaa

SEQ ID NO: 47265 - RNA, 19 nt, Artificial Sequence
  Description of Artificial Sequence: Synthetic oligonucleotide
uccuugacaagucaaggaa

SEQ ID NO: 47266 - RNA, 19 nt, Artificial Sequence
  Description of Artificial Sequence: Synthetic oligonucleotide
aacccaagacccuggggac

SEQ ID NO: 47267 - RNA, 19 nt, Artificial Sequence
  Description of Artificial Sequence: Synthetic oligonucleotide
uguucuaaggaaccguaaa

SEQ ID NO: 47268 - RNA, 19 nt, Artificial Sequence
  Description of Artificial Sequence: Synthetic oligonucleotide
auaagcuaccuuccccgcc

SEQ ID NO: 47269 - RNA, 19 nt, Artificial Sequence
  Description of Artificial Sequence: Synthetic oligonucleotide
gguugaaccacagacaaag

SEQ ID NO: 47270 - RNA, 19 nt, Artificial Sequence
  Description of Artificial Sequence: Synthetic oligonucleotide
uuaaaacgcgagagaaaag

SEQ ID NO: 47271 - RNA, 19 nt, Artificial Sequence
  Description of Artificial Sequence: Synthetic oligonucleotide
aagcuuagccagcugggag

SEQ ID NO: 47272 - RNA, 19 nt, Artificial Sequence
  Description of Artificial Sequence: Synthetic oligonucleotide
auauggcggaucugggugc

SEQ ID NO: 47273 - RNA, 19 nt, Artificial Sequence
  Description of Artificial Sequence: Synthetic oligonucleotide
agcguaacaccccaagaag

SEQ ID NO: 47274 - RNA, 19 nt, Artificial Sequence
  Description of Artificial Sequence: Synthetic oligonucleotide
aaaacgcgagagaaaagag

SEQ ID NO: 47275 - RNA, 19 nt, Artificial Sequence
  Description of Artificial Sequence: Synthetic oligonucleotide
ggugaaagaggucucaccc

SEQ ID NO: 47276 - RNA, 19 nt, Artificial Sequence
  Description of Artificial Sequence: Synthetic oligonucleotide
ugcccguccccaaauauag

SEQ ID NO: 47277 - RNA, 19 nt, Artificial Sequence
  Description of Artificial Sequence: Synthetic oligonucleotide
aggagcccuaaccacauuc

SEQ ID NO: 47278 - RNA, 19 nt, Artificial Sequence
  Description of Artificial Sequence: Synthetic oligonucleotide
cuggcuaaggcaagggagg

SEQ ID NO: 47279 - RNA, 19 nt, Artificial Sequence
  Description of Artificial Sequence: Synthetic oligonucleotide
aaucgcugcguuccuaugu

SEQ ID NO: 47280 - RNA, 19 nt, Artificial Sequence
  Description of Artificial Sequence: Synthetic oligonucleotide
aaggcaagcgaagcugccc

SEQ ID NO: 47281 - RNA, 19 nt, Artificial Sequence
  Description of Artificial Sequence: Synthetic oligonucleotide
ggaugguugaaccacagac

SEQ ID NO: 47282 - RNA, 19 nt, Artificial Sequence
  Description of Artificial Sequence: Synthetic oligonucleotide
augguugaaccacagacaa

SEQ ID NO: 47283 - RNA, 19 nt, Artificial Sequence
  Description of Artificial Sequence: Synthetic oligonucleotide
cauauggcggaucugggug

SEQ ID NO: 47284 - RNA, 19 nt, Artificial Sequence
  Description of Artificial Sequence: Synthetic oligonucleotide
gacuccaccuuuuaccaug

SEQ ID NO: 47285 - RNA, 19 nt, Artificial Sequence
  Description of Artificial Sequence: Synthetic oligonucleotide
cuuucaagcguaacacccc

SEQ ID NO: 47286 - RNA, 19 nt, Artificial Sequence
  Description of Artificial Sequence: Synthetic oligonucleotide
gguaccaagagccagcuca

SEQ ID NO: 47287 - RNA, 19 nt, Artificial Sequence
  Description of Artificial Sequence: Synthetic oligonucleotide
uccugucauaaaaucaccu

SEQ ID NO: 47288 - RNA, 19 nt, Artificial Sequence
  Description of Artificial Sequence: Synthetic oligonucleotide
ucuaacacugccaccucac

SEQ ID NO: 47289 - RNA, 19 nt, Artificial Sequence
  Description of Artificial Sequence: Synthetic oligonucleotide
ggugggaucuccuaggggc

SEQ ID NO: 47290 - RNA, 19 nt, Artificial Sequence
  Description of Artificial Sequence: Synthetic oligonucleotide
ucauuaaccacuggaggca

SEQ ID NO: 47291 - RNA, 19 nt, Artificial Sequence
  Description of Artificial Sequence: Synthetic oligonucleotide
cugugugcgucauaagggg

SEQ ID NO: 47292 - RNA, 19 nt, Artificial Sequence
  Description of Artificial Sequence: Synthetic oligonucleotide
aacgagacagagugaucag

SEQ ID NO: 47293 - RNA, 19 nt, Artificial Sequence
  Description of Artificial Sequence: Synthetic oligonucleotide
acauucaggacuacccagc

SEQ ID NO: 47294 - RNA, 19 nt, Artificial Sequence
  Description of Artificial Sequence: Synthetic oligonucleotide
auccauugaagugcaaaac

SEQ ID NO: 47295 - RNA, 19 nt, Artificial Sequence
  Description of Artificial Sequence: Synthetic oligonucleotide
uuuaccaugcucugagcaa

SEQ ID NO: 47296 - RNA, 19 nt, Artificial Sequence
  Description of Artificial Sequence: Synthetic oligonucleotide
gacgguaucaggguuaaca

SEQ ID NO: 47297 - RNA, 19 nt, Artificial Sequence
  Description of Artificial Sequence: Synthetic oligonucleotide
cuaaaacccuuaaauuuuc

SEQ ID NO: 47298 - RNA, 19 nt, Artificial Sequence
  Description of Artificial Sequence: Synthetic oligonucleotide
caaaacgaacgagacagag

SEQ ID NO: 47299 - RNA, 19 nt, Artificial Sequence
  Description of Artificial Sequence: Synthetic oligonucleotide
aucucgggacgccaguccc

SEQ ID NO: 47300 - RNA, 19 nt, Artificial Sequence
  Description of Artificial Sequence: Synthetic oligonucleotide
uggcaucgauacaauauug

SEQ ID NO: 47301 - RNA, 19 nt, Artificial Sequence
  Description of Artificial Sequence: Synthetic oligonucleotide
acgacuacauuggagcacg

SEQ ID NO: 47302 - RNA, 19 nt, Artificial Sequence
  Description of Artificial Sequence: Synthetic oligonucleotide
ucgauacaauauugaagag

SEQ ID NO: 47303 - RNA, 19 nt, Artificial Sequence
  Description of Artificial Sequence: Synthetic oligonucleotide
ggagaaaccccucacuugc

SEQ ID NO: 47304 - RNA, 19 nt, Artificial Sequence
  Description of Artificial Sequence: Synthetic oligonucleotide
agacuggacuguaucaggc

SEQ ID NO: 47305 - RNA, 19 nt, Artificial Sequence
  Description of Artificial Sequence: Synthetic oligonucleotide
uugccugcgguagagggcg

SEQ ID NO: 47306 - RNA, 19 nt, Artificial Sequence
  Description of Artificial Sequence: Synthetic oligonucleotide
uucucgaaauccucagggc

SEQ ID NO: 47307 - RNA, 19 nt, Artificial Sequence
  Description of Artificial Sequence: Synthetic oligonucleotide
augauucuaggaaggacgg

SEQ ID NO: 47308 - RNA, 19 nt, Artificial Sequence
  Description of Artificial Sequence: Synthetic oligonucleotide
aggagccuauguuagcauc

SEQ ID NO: 47309 - RNA, 19 nt, Artificial Sequence
  Description of Artificial Sequence: Synthetic oligonucleotide
acuuaggaaucccacaauu

SEQ ID NO: 47310 - RNA, 19 nt, Artificial Sequence
  Description of Artificial Sequence: Synthetic oligonucleotide
aaaacgaacgagacagagu

SEQ ID NO: 47311 - RNA, 19 nt, Artificial Sequence
  Description of Artificial Sequence: Synthetic oligonucleotide
uggagaaaccccucacuug

SEQ ID NO: 47312 - RNA, 19 nt, Artificial Sequence
  Description of Artificial Sequence: Synthetic oligonucleotide
agugcaccggaacccaagg

SEQ ID NO: 47313 - RNA, 19 nt, Artificial Sequence
  Description of Artificial Sequence: Synthetic oligonucleotide
ugugugcgucauaaggggc

SEQ ID NO: 47314 - RNA, 19 nt, Artificial Sequence
  Description of Artificial Sequence: Synthetic oligonucleotide
ucacccuuaaaacgcgaga

SEQ ID NO: 47315 - RNA, 19 nt, Artificial Sequence
  Description of Artificial Sequence: Synthetic oligonucleotide
cucgaaauccucagggcug

SEQ ID NO: 47316 - RNA, 19 nt, Artificial Sequence
  Description of Artificial Sequence: Synthetic oligonucleotide
cacaggacaaggugggacc

SEQ ID NO: 47317 - RNA, 19 nt, Artificial Sequence
  Description of Artificial Sequence: Synthetic oligonucleotide
ucggaaugugacaauuuau

SEQ ID NO: 47318 - RNA, 19 nt, Artificial Sequence
  Description of Artificial Sequence: Synthetic oligonucleotide
ggggaaaucgccucugggg

SEQ ID NO: 47319 - RNA, 19 nt, Artificial Sequence
  Description of Artificial Sequence: Synthetic oligonucleotide
agaguaucuuccccuaaga

SEQ ID NO: 47320 - RNA, 19 nt, Artificial Sequence
  Description of Artificial Sequence: Synthetic oligonucleotide
gaaccguaaaggguguugc

SEQ ID NO: 47321 - RNA, 19 nt, Artificial Sequence
  Description of Artificial Sequence: Synthetic oligonucleotide
acuuuggggcggcaagcgc

SEQ ID NO: 47322 - RNA, 19 nt, Artificial Sequence
  Description of Artificial Sequence: Synthetic oligonucleotide
acgagacagagugaucagc

SEQ ID NO: 47323 - RNA, 19 nt, Artificial Sequence
  Description of Artificial Sequence: Synthetic oligonucleotide
gcuacacauagaaacaucc

SEQ ID NO: 47324 - RNA, 19 nt, Artificial Sequence
  Description of Artificial Sequence: Synthetic oligonucleotide
gaggagccguuucauaccc

SEQ ID NO: 47325 - RNA, 19 nt, Artificial Sequence
  Description of Artificial Sequence: Synthetic oligonucleotide
ugacccgguuccgugaugg

SEQ ID NO: 47326 - RNA, 19 nt, Artificial Sequence
  Description of Artificial Sequence: Synthetic oligonucleotide
cacggugacaucucgggac

SEQ ID NO: 47327 - RNA, 19 nt, Artificial Sequence
  Description of Artificial Sequence: Synthetic oligonucleotide
gaugguugaaccacagaca

SEQ ID NO: 47328 - RNA, 19 nt, Artificial Sequence
  Description of Artificial Sequence: Synthetic oligonucleotide
cacccuuaaaacgcgagag

SEQ ID NO: 47329 - RNA, 19 nt, Artificial Sequence
  Description of Artificial Sequence: Synthetic oligonucleotide
ucauauggcggaucugggu

SEQ ID NO: 47330 - RNA, 19 nt, Artificial Sequence
  Description of Artificial Sequence: Synthetic oligonucleotide
ugacgacuacauuggagca

SEQ ID NO: 47331 - RNA, 19 nt, Artificial Sequence
  Description of Artificial Sequence: Synthetic oligonucleotide
uacguauauuauauauaua

SEQ ID NO: 47332 - RNA, 19 nt, Artificial Sequence
  Description of Artificial Sequence: Synthetic oligonucleotide
accuagcugacgcucugcg

SEQ ID NO: 47333 - RNA, 19 nt, Artificial Sequence
  Description of Artificial Sequence: Synthetic oligonucleotide
gguuuguacagcgcaaagg

SEQ ID NO: 47334 - RNA, 19 nt, Artificial Sequence
  Description of Artificial Sequence: Synthetic oligonucleotide
uccccaaauauagagcuau

SEQ ID NO: 47335 - RNA, 19 nt, Artificial Sequence
  Description of Artificial Sequence: Synthetic oligonucleotide
uguauggacggagggaccu

SEQ ID NO: 47336 - RNA, 19 nt, Artificial Sequence
  Description of Artificial Sequence: Synthetic oligonucleotide
accuguaacuggcacccag

SEQ ID NO: 47337 - RNA, 19 nt, Artificial Sequence
  Description of Artificial Sequence: Synthetic oligonucleotide
aaccguaaaggguguugca

SEQ ID NO: 47338 - RNA, 19 nt, Artificial Sequence
  Description of Artificial Sequence: Synthetic oligonucleotide
uugagggaggagccuaugu

SEQ ID NO: 47339 - RNA, 19 nt, Artificial Sequence
  Description of Artificial Sequence: Synthetic oligonucleotide
ucggcuuugccugcgguag

SEQ ID NO: 47340 - RNA, 19 nt, Artificial Sequence
  Description of Artificial Sequence: Synthetic oligonucleotide
accguaaaggguguugcag

SEQ ID NO: 47341 - RNA, 19 nt, Artificial Sequence
  Description of Artificial Sequence: Synthetic oligonucleotide
acuuggacgguaucagggu

SEQ ID NO: 47342 - RNA, 19 nt, Artificial Sequence
  Description of Artificial Sequence: Synthetic oligonucleotide
uggggagcacaaaaucugu

SEQ ID NO: 47343 - RNA, 19 nt, Artificial Sequence
  Description of Artificial Sequence: Synthetic oligonucleotide
uagugcaccggaacccaag

SEQ ID NO: 47344 - RNA, 19 nt, Artificial Sequence
  Description of Artificial Sequence: Synthetic oligonucleotide
aguaugauucuaggaagga

SEQ ID NO: 47345 - RNA, 19 nt, Artificial Sequence
  Description of Artificial Sequence: Synthetic oligonucleotide
aaugacccgguuccgugau

SEQ ID NO: 47346 - RNA, 19 nt, Artificial Sequence
  Description of Artificial Sequence: Synthetic oligonucleotide
caucgucugggucagagga

SEQ ID NO: 47347 - RNA, 19 nt, Artificial Sequence
  Description of Artificial Sequence: Synthetic oligonucleotide
auggauccacacaagaaca

SEQ ID NO: 47348 - RNA, 19 nt, Artificial Sequence
  Description of Artificial Sequence: Synthetic oligonucleotide
gguuucauguccccucagg

SEQ ID NO: 47349 - RNA, 19 nt, Artificial Sequence
  Description of Artificial Sequence: Synthetic oligonucleotide
uuacucuaacacugccacc

SEQ ID NO: 47350 - RNA, 19 nt, Artificial Sequence
  Description of Artificial Sequence: Synthetic oligonucleotide
ugacaucucgggacgccag

SEQ ID NO: 47351 - RNA, 19 nt, Artificial Sequence
  Description of Artificial Sequence: Synthetic oligonucleotide
uuuggggcggcaagcgccc

SEQ ID NO: 47352 - RNA, 19 nt, Artificial Sequence
  Description of Artificial Sequence: Synthetic oligonucleotide
uuccacgacaaaccacaca

SEQ ID NO: 47353 - RNA, 19 nt, Artificial Sequence
  Description of Artificial Sequence: Synthetic oligonucleotide
cuuuuaccaugcucugagc

SEQ ID NO: 47354 - RNA, 19 nt, Artificial Sequence
  Description of Artificial Sequence: Synthetic oligonucleotide
gaguccugacuccuguaug

SEQ ID NO: 47355 - RNA, 19 nt, Artificial Sequence
  Description of Artificial Sequence: Synthetic oligonucleotide
guaugauucuaggaaggac

SEQ ID NO: 47356 - RNA, 19 nt, Artificial Sequence
  Description of Artificial Sequence: Synthetic oligonucleotide
ucgaaauccucagggcugc

SEQ ID NO: 47357 - RNA, 19 nt, Artificial Sequence
  Description of Artificial Sequence: Synthetic oligonucleotide
agcccuaaccacauucagg

SEQ ID NO: 47358 - RNA, 19 nt, Artificial Sequence
  Description of Artificial Sequence: Synthetic oligonucleotide
cuccuguauggacggaggg

SEQ ID NO: 47359 - RNA, 19 nt, Artificial Sequence
  Description of Artificial Sequence: Synthetic oligonucleotide
gacuccuguauggacggag

SEQ ID NO: 47360 - RNA, 19 nt, Artificial Sequence
  Description of Artificial Sequence: Synthetic oligonucleotide
acgaacgagacagagugau

SEQ ID NO: 47361 - RNA, 19 nt, Artificial Sequence
  Description of Artificial Sequence: Synthetic oligonucleotide
caaggggcaaacacacaug

SEQ ID NO: 47362 - RNA, 19 nt, Artificial Sequence
  Description of Artificial Sequence: Synthetic oligonucleotide
accggcuagcuuuaccaug

SEQ ID NO: 47363 - RNA, 19 nt, Artificial Sequence
  Description of Artificial Sequence: Synthetic oligonucleotide
accuaacccucucugggcu

SEQ ID NO: 47364 - RNA, 19 nt, Artificial Sequence
  Description of Artificial Sequence: Synthetic oligonucleotide
guugaaccacagacaaagg

SEQ ID NO: 47365 - RNA, 19 nt, Artificial Sequence
  Description of Artificial Sequence: Synthetic oligonucleotide
ugcgucauaaggggcagcu

SEQ ID NO: 47366 - RNA, 19 nt, Artificial Sequence
  Description of Artificial Sequence: Synthetic oligonucleotide
gguguugcaggaaagccug

SEQ ID NO: 47367 - RNA, 19 nt, Artificial Sequence
  Description of Artificial Sequence: Synthetic oligonucleotide
cuaaggaaccguaaagggu

SEQ ID NO: 47368 - RNA, 19 nt, Artificial Sequence
  Description of Artificial Sequence: Synthetic oligonucleotide
acccuuaaaacgcgagaga

SEQ ID NO: 47369 - RNA, 19 nt, Artificial Sequence
  Description of Artificial Sequence: Synthetic oligonucleotide
ucccuagugcugucugggg

SEQ ID NO: 47370 - RNA, 19 nt, Artificial Sequence
  Description of Artificial Sequence: Synthetic oligonucleotide
ucuuccccuaagaccagaa

SEQ ID NO: 47371 - RNA, 19 nt, Artificial Sequence
  Description of Artificial Sequence: Synthetic oligonucleotide
uauggcggaucugggugcg

SEQ ID NO: 47372 - RNA, 19 nt, Artificial Sequence
  Description of Artificial Sequence: Synthetic oligonucleotide
ugugcgucauaaggggcag

SEQ ID NO: 47373 - RNA, 19 nt, Artificial Sequence
  Description of Artificial Sequence: Synthetic oligonucleotide
agagcuauguacguauauu

SEQ ID NO: 47374 - RNA, 19 nt, Artificial Sequence
  Description of Artificial Sequence: Synthetic oligonucleotide
uccuguauggacggaggga

SEQ ID NO: 47375 - RNA, 19 nt, Artificial Sequence
  Description of Artificial Sequence: Synthetic oligonucleotide
uccaccuucaaagggguuu

SEQ ID NO: 47376 - RNA, 19 nt, Artificial Sequence
  Description of Artificial Sequence: Synthetic oligonucleotide
cguaacaccccaagaaggg

SEQ ID NO: 47377 - RNA, 19 nt, Artificial Sequence
  Description of Artificial Sequence: Synthetic oligonucleotide
ucgguucccuagcagcaga

SEQ ID NO: 47378 - RNA, 19 nt, Artificial Sequence
  Description of Artificial Sequence: Synthetic oligonucleotide
gcguaacaccccaagaagg

SEQ ID NO: 47379 - RNA, 19 nt, Artificial Sequence
  Description of Artificial Sequence: Synthetic oligonucleotide
aggccacgccuucagugac

SEQ ID NO: 47380 - RNA, 19 nt, Artificial Sequence
  Description of Artificial Sequence: Synthetic oligonucleotide
cuagcugacgcucugcgua

SEQ ID NO: 47381 - RNA, 19 nt, Artificial Sequence
  Description of Artificial Sequence: Synthetic oligonucleotide
agaccggguuccaccaucc

SEQ ID NO: 47382 - RNA, 19 nt, Artificial Sequence
  Description of Artificial Sequence: Synthetic oligonucleotide
ugauucuaggaaggacggc

SEQ ID NO: 47383 - RNA, 19 nt, Artificial Sequence
  Description of Artificial Sequence: Synthetic oligonucleotide
gacgacuacauuggagcac

SEQ ID NO: 47384 - RNA, 19 nt, Artificial Sequence
  Description of Artificial Sequence: Synthetic oligonucleotide
caucuauggugccuucgac

SEQ ID NO: 47385 - RNA, 19 nt, Artificial Sequence
  Description of Artificial Sequence: Synthetic oligonucleotide
gggaguggaguccugacuc

SEQ ID NO: 47386 - RNA, 19 nt, Artificial Sequence
  Description of Artificial Sequence: Synthetic oligonucleotide
uggcacuuggacgguauca

SEQ ID NO: 47387 - RNA, 19 nt, Artificial Sequence
  Description of Artificial Sequence: Synthetic oligonucleotide
ugaaccgcagaagccccag

SEQ ID NO: 47388 - RNA, 19 nt, Artificial Sequence
  Description of Artificial Sequence: Synthetic oligonucleotide
ggcagaucggcucaugguc

SEQ ID NO: 47389 - RNA, 19 nt, Artificial Sequence
  Description of Artificial Sequence: Synthetic oligonucleotide
gggaaaucgccucugggga

SEQ ID NO: 47390 - RNA, 19 nt, Artificial Sequence
  Description of Artificial Sequence: Synthetic oligonucleotide
cuguauggacggagggacc

SEQ ID NO: 47391 - RNA, 19 nt, Artificial Sequence
  Description of Artificial Sequence: Synthetic oligonucleotide
caccccacacuuaggaauc

SEQ ID NO: 47392 - RNA, 19 nt, Artificial Sequence
  Description of Artificial Sequence: Synthetic oligonucleotide
gucacccuuaaaacgcgag

SEQ ID NO: 47393 - RNA, 19 nt, Artificial Sequence
  Description of Artificial Sequence: Synthetic oligonucleotide
ccauugucggcuuugccug

SEQ ID NO: 47394 - RNA, 19 nt, Artificial Sequence
  Description of Artificial Sequence: Synthetic oligonucleotide
agcuauguacguauauuau

SEQ ID NO: 47395 - RNA, 19 nt, Artificial Sequence
  Description of Artificial Sequence: Synthetic oligonucleotide
agugcccguccccaaauau

SEQ ID NO: 47396 - RNA, 19 nt, Artificial Sequence
  Description of Artificial Sequence: Synthetic oligonucleotide
ggacggagggaccuauagg

SEQ ID NO: 47397 - RNA, 19 nt, Artificial Sequence
  Description of Artificial Sequence: Synthetic oligonucleotide
guaucaggccuggcuaagg

SEQ ID NO: 47398 - RNA, 19 nt, Artificial Sequence
  Description of Artificial Sequence: Synthetic oligonucleotide
gaaaucgccucuggggaca

SEQ ID NO: 47399 - RNA, 19 nt, Artificial Sequence
  Description of Artificial Sequence: Synthetic oligonucleotide
ucucgggacgccagucccc

SEQ ID NO: 47400 - RNA, 19 nt, Artificial Sequence
  Description of Artificial Sequence: Synthetic oligonucleotide
accagaccggguuccacca

SEQ ID NO: 47401 - RNA, 19 nt, Artificial Sequence
  Description of Artificial Sequence: Synthetic oligonucleotide
agcaaaccagaaggguggg

SEQ ID NO: 47402 - RNA, 19 nt, Artificial Sequence
  Description of Artificial Sequence: Synthetic oligonucleotide
gguaggagagaagaguauc

SEQ ID NO: 47403 - RNA, 19 nt, Artificial Sequence
  Description of Artificial Sequence: Synthetic oligonucleotide
gaagaguaucuuccccuaa

SEQ ID NO: 47404 - RNA, 19 nt, Artificial Sequence
  Description of Artificial Sequence: Synthetic oligonucleotide
ugguugaaccacagacaaa

SEQ ID NO: 47405 - RNA, 19 nt, Artificial Sequence
  Description of Artificial Sequence: Synthetic oligonucleotide
gcuauguacguauauuaua

SEQ ID NO: 47406 - RNA, 19 nt, Artificial Sequence
  Description of Artificial Sequence: Synthetic oligonucleotide
gccaaacuucauauggcgg

SEQ ID NO: 47407 - RNA, 19 nt, Artificial Sequence
  Description of Artificial Sequence: Synthetic oligonucleotide
gcaucgauacaauauugaa

SEQ ID NO: 47408 - RNA, 19 nt, Artificial Sequence
  Description of Artificial Sequence: Synthetic oligonucleotide
auauagagcuauguacgua

SEQ ID NO: 47409 - RNA, 19 nt, Artificial Sequence
  Description of Artificial Sequence: Synthetic oligonucleotide
acccuguucuaaggaaccg

SEQ ID NO: 47410 - RNA, 19 nt, Artificial Sequence
  Description of Artificial Sequence: Synthetic oligonucleotide
cagccaagauagcaccgag

SEQ ID NO: 47411 - RNA, 19 nt, Artificial Sequence
  Description of Artificial Sequence: Synthetic oligonucleotide
ucgccucuggggacagagg

SEQ ID NO: 47412 - RNA, 19 nt, Artificial Sequence
  Description of Artificial Sequence: Synthetic oligonucleotide
cuaccuuccccgccagaag

SEQ ID NO: 47413 - RNA, 19 nt, Artificial Sequence
  Description of Artificial Sequence: Synthetic oligonucleotide
uggcucucgccaguugggg

SEQ ID NO: 47414 - RNA, 19 nt, Artificial Sequence
  Description of Artificial Sequence: Synthetic oligonucleotide
ccggaggaggccauugucg

SEQ ID NO: 47415 - RNA, 19 nt, Artificial Sequence
  Description of Artificial Sequence: Synthetic oligonucleotide
uagcugacgcucugcguac

SEQ ID NO: 47416 - RNA, 19 nt, Artificial Sequence
  Description of Artificial Sequence: Synthetic oligonucleotide
uugggcggugcaucgucug

SEQ ID NO: 47417 - RNA, 19 nt, Artificial Sequence
  Description of Artificial Sequence: Synthetic oligonucleotide
caagcguaacaccccaaga

SEQ ID NO: 47418 - RNA, 19 nt, Artificial Sequence
  Description of Artificial Sequence: Synthetic oligonucleotide
cuuccacgacaaaccacac

SEQ ID NO: 47419 - RNA, 19 nt, Artificial Sequence
  Description of Artificial Sequence: Synthetic oligonucleotide
acgucugugacgacuacau

SEQ ID NO: 47420 - RNA, 19 nt, Artificial Sequence
  Description of Artificial Sequence: Synthetic oligonucleotide
aacgaacgagacagaguga

SEQ ID NO: 47421 - RNA, 19 nt, Artificial Sequence
  Description of Artificial Sequence: Synthetic oligonucleotide
ccgugaugggacuuugggg

SEQ ID NO: 47422 - RNA, 19 nt, Artificial Sequence
  Description of Artificial Sequence: Synthetic oligonucleotide
caggguuaacacaggacaa

SEQ ID NO: 47423 - RNA, 19 nt, Artificial Sequence
  Description of Artificial Sequence: Synthetic oligonucleotide
caggcucggagcaggcacc

SEQ ID NO: 47424 - RNA, 19 nt, Artificial Sequence
  Description of Artificial Sequence: Synthetic oligonucleotide
aucgcugcguuccuauguu

SEQ ID NO: 47425 - RNA, 19 nt, Artificial Sequence
  Description of Artificial Sequence: Synthetic oligonucleotide
ugucggcuuugccugcggu

SEQ ID NO: 47426 - RNA, 19 nt, Artificial Sequence
  Description of Artificial Sequence: Synthetic oligonucleotide
gcggcaagcgcccugcacc

SEQ ID NO: 47427 - RNA, 19 nt, Artificial Sequence
  Description of Artificial Sequence: Synthetic oligonucleotide
gcacccaaagucuuccaac

SEQ ID NO: 47428 - RNA, 19 nt, Artificial Sequence
  Description of Artificial Sequence: Synthetic oligonucleotide
ggguuuguacagcgcaaag

SEQ ID NO: 47429 - RNA, 19 nt, Artificial Sequence
  Description of Artificial Sequence: Synthetic oligonucleotide
ccuguauggacggagggac

SEQ ID NO: 47430 - RNA, 19 nt, Artificial Sequence
  Description of Artificial Sequence: Synthetic oligonucleotide
caucaccuagcugacgcuc

SEQ ID NO: 47431 - RNA, 19 nt, Artificial Sequence
  Description of Artificial Sequence: Synthetic oligonucleotide
gugaucagcacgagcccgc

SEQ ID NO: 47432 - RNA, 19 nt, Artificial Sequence
  Description of Artificial Sequence: Synthetic oligonucleotide
uauggacggagggaccuau

SEQ ID NO: 47433 - RNA, 19 nt, Artificial Sequence
  Description of Artificial Sequence: Synthetic oligonucleotide
gccugaggguuucaugucc

SEQ ID NO: 47434 - RNA, 19 nt, Artificial Sequence
  Description of Artificial Sequence: Synthetic oligonucleotide
ugcguuccuauguucucuu

SEQ ID NO: 47435 - RNA, 19 nt, Artificial Sequence
  Description of Artificial Sequence: Synthetic oligonucleotide
ggaaccguaaaggguguug

SEQ ID NO: 47436 - RNA, 19 nt, Artificial Sequence
  Description of Artificial Sequence: Synthetic oligonucleotide
gugugcgucauaaggggca

SEQ ID NO: 47437 - RNA, 19 nt, Artificial Sequence
  Description of Artificial Sequence: Synthetic oligonucleotide
ggcaucgauacaauauuga

SEQ ID NO: 47438 - RNA, 19 nt, Artificial Sequence
  Description of Artificial Sequence: Synthetic oligonucleotide
gacgcccugcacccaacac

SEQ ID NO: 47439 - RNA, 19 nt, Artificial Sequence
  Description of Artificial Sequence: Synthetic oligonucleotide
ugacuccaccuuuuaccau

SEQ ID NO: 47440 - RNA, 19 nt, Artificial Sequence
  Description of Artificial Sequence: Synthetic oligonucleotide
gacccgguuccgugauggg

SEQ ID NO: 47441 - RNA, 19 nt, Artificial Sequence
  Description of Artificial Sequence: Synthetic oligonucleotide
ggaguggaguccugacucc

SEQ ID NO: 47442 - RNA, 19 nt, Artificial Sequence
  Description of Artificial Sequence: Synthetic oligonucleotide
uggacgguaucaggguuaa

SEQ ID NO: 47443 - RNA, 19 nt, Artificial Sequence
  Description of Artificial Sequence: Synthetic oligonucleotide
aucccacucaacacccaag

SEQ ID NO: 47444 - RNA, 19 nt, Artificial Sequence
  Description of Artificial Sequence: Synthetic oligonucleotide
cuguucuaaggaaccguaa

SEQ ID NO: 47445 - RNA, 19 nt, Artificial Sequence
  Description of Artificial Sequence: Synthetic oligonucleotide
caaugacccgguuccguga

SEQ ID NO: 47446 - RNA, 19 nt, Artificial Sequence
  Description of Artificial Sequence: Synthetic oligonucleotide
ccauucgugcaguucauca

SEQ ID NO: 47447 - RNA, 19 nt, Artificial Sequence
  Description of Artificial Sequence: Synthetic oligonucleotide
cagaucggcucauggucuc

SEQ ID NO: 47448 - RNA, 19 nt, Artificial Sequence
  Description of Artificial Sequence: Synthetic oligonucleotide
aauuggcacuuggacggua

SEQ ID NO: 47449 - RNA, 19 nt, Artificial Sequence
  Description of Artificial Sequence: Synthetic oligonucleotide
cauuggagcacggugacau

SEQ ID NO: 47450 - RNA, 19 nt, Artificial Sequence
  Description of Artificial Sequence: Synthetic oligonucleotide
caccgagccauuugaggca

SEQ ID NO: 47451 - RNA, 19 nt, Artificial Sequence
  Description of Artificial Sequence: Synthetic oligonucleotide
ggagccuauguuagcauca

SEQ ID NO: 47452 - RNA, 19 nt, Artificial Sequence
  Description of Artificial Sequence: Synthetic oligonucleotide
ccguccccaaauauagagc

SEQ ID NO: 47453 - RNA, 19 nt, Artificial Sequence
  Description of Artificial Sequence: Synthetic oligonucleotide
cagcgcaaaggugccaaac

SEQ ID NO: 47454 - RNA, 19 nt, Artificial Sequence
  Description of Artificial Sequence: Synthetic oligonucleotide
gguuuuggauagagacagg

SEQ ID NO: 47455 - RNA, 19 nt, Artificial Sequence
  Description of Artificial Sequence: Synthetic oligonucleotide
ggugcaucgucugggucag

SEQ ID NO: 47456 - RNA, 19 nt, Artificial Sequence
  Description of Artificial Sequence: Synthetic oligonucleotide
auuggcacuuggacgguau

SEQ ID NO: 47457 - RNA, 19 nt, Artificial Sequence
  Description of Artificial Sequence: Synthetic oligonucleotide
guuccgugaugggacuuug

SEQ ID NO: 47458 - RNA, 19 nt, Artificial Sequence
  Description of Artificial Sequence: Synthetic oligonucleotide
cuauguuagcaucauccuu

SEQ ID NO: 47459 - RNA, 19 nt, Artificial Sequence
  Description of Artificial Sequence: Synthetic oligonucleotide
ccuuacucuaacacugcca

SEQ ID NO: 47460 - RNA, 19 nt, Artificial Sequence
  Description of Artificial Sequence: Synthetic oligonucleotide
cguauauuauauauauaua

SEQ ID NO: 47461 - RNA, 19 nt, Artificial Sequence
  Description of Artificial Sequence: Synthetic oligonucleotide
cccgccagaaguucucccc

SEQ ID NO: 47462 - RNA, 19 nt, Artificial Sequence
  Description of Artificial Sequence: Synthetic oligonucleotide
cuggcaucgauacaauauu

SEQ ID NO: 47463 - RNA, 19 nt, Artificial Sequence
  Description of Artificial Sequence: Synthetic oligonucleotide
caguggagucccuagugcu

SEQ ID NO: 47464 - RNA, 19 nt, Artificial Sequence
  Description of Artificial Sequence: Synthetic oligonucleotide
gggaccuauaggcuaggaa

SEQ ID NO: 47465 - RNA, 19 nt, Artificial Sequence
  Description of Artificial Sequence: Synthetic oligonucleotide
ccaccggcuagcuuuacca

SEQ ID NO: 47466 - RNA, 19 nt, Artificial Sequence
  Description of Artificial Sequence: Synthetic oligonucleotide
ggacuuuggggcggcaagc

SEQ ID NO: 47467 - RNA, 19 nt, Artificial Sequence
  Description of Artificial Sequence: Synthetic oligonucleotide
augacccgguuccgugaug

SEQ ID NO: 47468 - RNA, 19 nt, Artificial Sequence
  Description of Artificial Sequence: Synthetic oligonucleotide
aggugaaauaccagcccuu

SEQ ID NO: 47469 - RNA, 19 nt, Artificial Sequence
  Description of Artificial Sequence: Synthetic oligonucleotide
gugacaucucgggacgcca

SEQ ID NO: 47470 - RNA, 19 nt, Artificial Sequence
  Description of Artificial Sequence: Synthetic oligonucleotide
acauuggagcacggugaca

SEQ ID NO: 47471 - RNA, 19 nt, Artificial Sequence
  Description of Artificial Sequence: Synthetic oligonucleotide
gaaccgcagaagccccaga

SEQ ID NO: 47472 - RNA, 19 nt, Artificial Sequence
  Description of Artificial Sequence: Synthetic oligonucleotide
acgcgagagaaaagagaca

SEQ ID NO: 47473 - RNA, 19 nt, Artificial Sequence
  Description of Artificial Sequence: Synthetic oligonucleotide
cccuuaaaacgcgagagaa

SEQ ID NO: 47474 - RNA, 19 nt, Artificial Sequence
  Description of Artificial Sequence: Synthetic oligonucleotide
ggagcccuaaccacauuca

SEQ ID NO: 47475 - RNA, 19 nt, Artificial Sequence
  Description of Artificial Sequence: Synthetic oligonucleotide
gugacgucugugacgacua

SEQ ID NO: 47476 - RNA, 19 nt, Artificial Sequence
  Description of Artificial Sequence: Synthetic oligonucleotide
gcugacgcucugcguacag

SEQ ID NO: 47477 - RNA, 19 nt, Artificial Sequence
  Description of Artificial Sequence: Synthetic oligonucleotide
ggugaaauaccagcccuua

SEQ ID NO: 47478 - RNA, 19 nt, Artificial Sequence
  Description of Artificial Sequence: Synthetic oligonucleotide
ccccuuacucuaacacugc

SEQ ID NO: 47479 - RNA, 19 nt, Artificial Sequence
  Description of Artificial Sequence: Synthetic oligonucleotide
ccccucaaacccugugagg

SEQ ID NO: 47480 - RNA, 19 nt, Artificial Sequence
  Description of Artificial Sequence: Synthetic oligonucleotide
agaucggcucauggucuca

SEQ ID NO: 47481 - RNA, 19 nt, Artificial Sequence
  Description of Artificial Sequence: Synthetic oligonucleotide
ggacccuugucaaucaccu

SEQ ID NO: 47482 - RNA, 19 nt, Artificial Sequence
  Description of Artificial Sequence: Synthetic oligonucleotide
ccuauguuagcaucauccu

SEQ ID NO: 47483 - RNA, 19 nt, Artificial Sequence
  Description of Artificial Sequence: Synthetic oligonucleotide
gcaccggaacccaagggca

SEQ ID NO: 47484 - RNA, 19 nt, Artificial Sequence
  Description of Artificial Sequence: Synthetic oligonucleotide
ggugacgucugugacgacu

SEQ ID NO: 47485 - RNA, 19 nt, Artificial Sequence
  Description of Artificial Sequence: Synthetic oligonucleotide
agggaccuauaggcuagga

SEQ ID NO: 47486 - RNA, 19 nt, Artificial Sequence
  Description of Artificial Sequence: Synthetic oligonucleotide
gaccggguuccaccaucca

SEQ ID NO: 47487 - RNA, 19 nt, Artificial Sequence
  Description of Artificial Sequence: Synthetic oligonucleotide
gcccuuauuuggggaaaag

SEQ ID NO: 47488 - RNA, 19 nt, Artificial Sequence
  Description of Artificial Sequence: Synthetic oligonucleotide
agcuaccuuccccgccaga

SEQ ID NO: 47489 - RNA, 19 nt, Artificial Sequence
  Description of Artificial Sequence: Synthetic oligonucleotide
gaguggaguccugacuccu

SEQ ID NO: 47490 - RNA, 19 nt, Artificial Sequence
  Description of Artificial Sequence: Synthetic oligonucleotide
cuuggacgguaucaggguu

SEQ ID NO: 47491 - RNA, 19 nt, Artificial Sequence
  Description of Artificial Sequence: Synthetic oligonucleotide
ucgggacgccaguccccag

SEQ ID NO: 47492 - RNA, 19 nt, Artificial Sequence
  Description of Artificial Sequence: Synthetic oligonucleotide
ugccugcgguagagggcgc

SEQ ID NO: 47493 - RNA, 19 nt, Artificial Sequence
  Description of Artificial Sequence: Synthetic oligonucleotide
guguagguaggagcccuaa

SEQ ID NO: 47494 - RNA, 19 nt, Artificial Sequence
  Description of Artificial Sequence: Synthetic oligonucleotide
ggaguccugacuccuguau

SEQ ID NO: 47495 - RNA, 19 nt, Artificial Sequence
  Description of Artificial Sequence: Synthetic oligonucleotide
guaggagcccuaaccacau

SEQ ID NO: 47496 - RNA, 19 nt, Artificial Sequence
  Description of Artificial Sequence: Synthetic oligonucleotide
cucgggacgccagucccca

SEQ ID NO: 47497 - RNA, 19 nt, Artificial Sequence
  Description of Artificial Sequence: Synthetic oligonucleotide
agcugacgcucugcguaca

SEQ ID NO: 47498 - RNA, 19 nt, Artificial Sequence
  Description of Artificial Sequence: Synthetic oligonucleotide
cuugggcggugcaucgucu

SEQ ID NO: 47499 - RNA, 19 nt, Artificial Sequence
  Description of Artificial Sequence: Synthetic oligonucleotide
gcacggugacaucucggga

SEQ ID NO: 47500 - RNA, 19 nt, Artificial Sequence
  Description of Artificial Sequence: Synthetic oligonucleotide
cggugcaucgucuggguca

SEQ ID NO: 47501 - RNA, 19 nt, Artificial Sequence
  Description of Artificial Sequence: Synthetic oligonucleotide
gggguuuguacagcgcaaa

SEQ ID NO: 47502 - RNA, 19 nt, Artificial Sequence
  Description of Artificial Sequence: Synthetic oligonucleotide
gugcgucauaaggggcagc

SEQ ID NO: 47503 - RNA, 19 nt, Artificial Sequence
  Description of Artificial Sequence: Synthetic oligonucleotide
ugcccaccguaggugggau

SEQ ID NO: 47504 - RNA, 19 nt, Artificial Sequence
  Description of Artificial Sequence: Synthetic oligonucleotide
ggcggcaagcgcccugcac

SEQ ID NO: 47505 - RNA, 19 nt, Artificial Sequence
  Description of Artificial Sequence: Synthetic oligonucleotide
cugcguuccuauguucucu

SEQ ID NO: 47506 - RNA, 19 nt, Artificial Sequence
  Description of Artificial Sequence: Synthetic oligonucleotide
gucugacuuucaagcguaa

SEQ ID NO: 47507 - RNA, 19 nt, Artificial Sequence
  Description of Artificial Sequence: Synthetic oligonucleotide
gcagaucggcucauggucu

SEQ ID NO: 47508 - RNA, 19 nt, Artificial Sequence
  Description of Artificial Sequence: Synthetic oligonucleotide
gcucugagcaagguaccaa

SEQ ID NO: 47509 - RNA, 19 nt, Artificial Sequence
  Description of Artificial Sequence: Synthetic oligonucleotide
ccccgccagaaguucuccc

SEQ ID NO: 47510 - RNA, 19 nt, Artificial Sequence
  Description of Artificial Sequence: Synthetic oligonucleotide
cagcccuuauuuggggaaa

SEQ ID NO: 47511 - RNA, 19 nt, Artificial Sequence
  Description of Artificial Sequence: Synthetic oligonucleotide
cggcaagcgcccugcaccc

SEQ ID NO: 47512 - RNA, 19 nt, Artificial Sequence
  Description of Artificial Sequence: Synthetic oligonucleotide
guauggacggagggaccua

SEQ ID NO: 47513 - RNA, 19 nt, Artificial Sequence
  Description of Artificial Sequence: Synthetic oligonucleotide
gcuaggaaguggguccuua

SEQ ID NO: 47514 - RNA, 19 nt, Artificial Sequence
  Description of Artificial Sequence: Synthetic oligonucleotide
gcgucauaaggggcagcug

SEQ ID NO: 47515 - RNA, 19 nt, Artificial Sequence
  Description of Artificial Sequence: Synthetic oligonucleotide
ggccacgccuucagugacc

SEQ ID NO: 47516 - RNA, 19 nt, Artificial Sequence
  Description of Artificial Sequence: Synthetic oligonucleotide
cguuccuauguucucuuua

SEQ ID NO: 47517 - RNA, 19 nt, Artificial Sequence
  Description of Artificial Sequence: Synthetic oligonucleotide
cgacuacauuggagcacgg

SEQ ID NO: 47518 - RNA, 19 nt, Artificial Sequence
  Description of Artificial Sequence: Synthetic oligonucleotide
cccgcuggccgguggcugc

SEQ ID NO: 47519 - RNA, 19 nt, Artificial Sequence
  Description of Artificial Sequence: Synthetic oligonucleotide
gcggugcaucgucuggguc

SEQ ID NO: 47520 - RNA, 19 nt, Artificial Sequence
  Description of Artificial Sequence: Synthetic oligonucleotide
accauccauugaagugcaa

SEQ ID NO: 47521 - RNA, 19 nt, Artificial Sequence
  Description of Artificial Sequence: Synthetic oligonucleotide
auggacggagggaccuaua

SEQ ID NO: 47522 - RNA, 19 nt, Artificial Sequence
  Description of Artificial Sequence: Synthetic oligonucleotide
cacgagcccgcccuccccu

SEQ ID NO: 47523 - RNA, 19 nt, Artificial Sequence
  Description of Artificial Sequence: Synthetic oligonucleotide
gugcaaucgcugcguuccu

SEQ ID NO: 47524 - RNA, 19 nt, Artificial Sequence
  Description of Artificial Sequence: Synthetic oligonucleotide
caauuggcacuuggacggu

SEQ ID NO: 47525 - RNA, 19 nt, Artificial Sequence
  Description of Artificial Sequence: Synthetic oligonucleotide
gccugcgguagagggcgcc

SEQ ID NO: 47526 - RNA, 19 nt, Artificial Sequence
  Description of Artificial Sequence: Synthetic oligonucleotide
ccgagccauuugaggcaag

SEQ ID NO: 47527 - RNA, 19 nt, Artificial Sequence
  Description of Artificial Sequence: Synthetic oligonucleotide
ccuagcugacgcucugcgu

SEQ ID NO: 47528 - RNA, 19 nt, Artificial Sequence
  Description of Artificial Sequence: Synthetic oligonucleotide
gguuccgugaugggacuuu

SEQ ID NO: 47529 - RNA, 19 nt, Artificial Sequence
  Description of Artificial Sequence: Synthetic oligonucleotide
cccuguucuaaggaaccgu

SEQ ID NO: 47530 - RNA, 19 nt, Artificial Sequence
  Description of Artificial Sequence: Synthetic oligonucleotide
gaggugcccgcuggccggu

SEQ ID NO: 47531 - RNA, 19 nt, Artificial Sequence
  Description of Artificial Sequence: Synthetic oligonucleotide
gcccgcuggccgguggcug

SEQ ID NO: 47532 - RNA, 19 nt, Artificial Sequence
  Description of Artificial Sequence: Synthetic oligonucleotide
ccccuaagaccagaauacu

SEQ ID NO: 47533 - RNA, 19 nt, Artificial Sequence
  Description of Artificial Sequence: Synthetic oligonucleotide
gcguuccuauguucucuuu

SEQ ID NO: 47534 - RNA, 19 nt, Artificial Sequence
  Description of Artificial Sequence: Synthetic oligonucleotide
gugcaucgucugggucaga

SEQ ID NO: 47535 - RNA, 19 nt, Artificial Sequence
  Description of Artificial Sequence: Synthetic oligonucleotide
ccugugcaaucgcugcguu

SEQ ID NO: 47536 - RNA, 19 nt, Artificial Sequence
  Description of Artificial Sequence: Synthetic oligonucleotide
cgaaauccucagggcugca

SEQ ID NO: 47537 - RNA, 19 nt, Artificial Sequence
  Description of Artificial Sequence: Synthetic oligonucleotide
cgguuccgugaugggacuu

SEQ ID NO: 47538 - RNA, 19 nt, Artificial Sequence
  Description of Artificial Sequence: Synthetic oligonucleotide
gcccagcauuugacuccuu

SEQ ID NO: 47539 - RNA, 19 nt, Artificial Sequence
  Description of Artificial Sequence: Synthetic oligonucleotide
acagcuauagucuauauac

SEQ ID NO: 47540 - RNA, 19 nt, Artificial Sequence
  Description of Artificial Sequence: Synthetic oligonucleotide
uuuacuuacccuuacauga

SEQ ID NO: 47541 - RNA, 19 nt, Artificial Sequence
  Description of Artificial Sequence: Synthetic oligonucleotide
ugaagaaugacuacgacac

SEQ ID NO: 47542 - RNA, 19 nt, Artificial Sequence
  Description of Artificial Sequence: Synthetic oligonucleotide
aaggaaaucuaccauccac

SEQ ID NO: 47543 - RNA, 19 nt, Artificial Sequence
  Description of Artificial Sequence: Synthetic oligonucleotide
aauaagguccggcugacuc

SEQ ID NO: 47544 - RNA, 19 nt, Artificial Sequence
  Description of Artificial Sequence: Synthetic oligonucleotide
ucuguauugacacaguacu

SEQ ID NO: 47545 - RNA, 19 nt, Artificial Sequence
  Description of Artificial Sequence: Synthetic oligonucleotide
ucugauaguauaaacuuug

SEQ ID NO: 47546 - RNA, 19 nt, Artificial Sequence
  Description of Artificial Sequence: Synthetic oligonucleotide
uuuguuuccaauucaacug

SEQ ID NO: 47547 - RNA, 19 nt, Artificial Sequence
  Description of Artificial Sequence: Synthetic oligonucleotide
aacgucacaggcuucgacc

SEQ ID NO: 47548 - RNA, 19 nt, Artificial Sequence
  Description of Artificial Sequence: Synthetic oligonucleotide
aauugccccaaauuggaac

SEQ ID NO: 47549 - RNA, 19 nt, Artificial Sequence
  Description of Artificial Sequence: Synthetic oligonucleotide
caucaauuggcaauaagcg

SEQ ID NO: 47550 - RNA, 19 nt, Artificial Sequence
  Description of Artificial Sequence: Synthetic oligonucleotide
ucaauuggcaauaagcgcu

SEQ ID NO: 47551 - RNA, 19 nt, Artificial Sequence
  Description of Artificial Sequence: Synthetic oligonucleotide
agacugauucaauuaaacc

SEQ ID NO: 47552 - RNA, 19 nt, Artificial Sequence
  Description of Artificial Sequence: Synthetic oligonucleotide
ugcguaucugcaaugaagg

SEQ ID NO: 47553 - RNA, 19 nt, Artificial Sequence
  Description of Artificial Sequence: Synthetic oligonucleotide
gaagagacgagucaguccc

SEQ ID NO: 47554 - RNA, 19 nt, Artificial Sequence
  Description of Artificial Sequence: Synthetic oligonucleotide
uuccauaagaaacugacuc

SEQ ID NO: 47555 - RNA, 19 nt, Artificial Sequence
  Description of Artificial Sequence: Synthetic oligonucleotide
aaauucaccaaaucuaaau

SEQ ID NO: 47556 - RNA, 19 nt, Artificial Sequence
  Description of Artificial Sequence: Synthetic oligonucleotide
aguucuauaaaaguaaaug

SEQ ID NO: 47557 - RNA, 19 nt, Artificial Sequence
  Description of Artificial Sequence: Synthetic oligonucleotide
uguaaguuggcacagcacu

SEQ ID NO: 47558 - RNA, 19 nt, Artificial Sequence
  Description of Artificial Sequence: Synthetic oligonucleotide
cacaguuuggauuaguuag

SEQ ID NO: 47559 - RNA, 19 nt, Artificial Sequence
  Description of Artificial Sequence: Synthetic oligonucleotide
aaugaagggcgucacaucu

SEQ ID NO: 47560 - RNA, 19 nt, Artificial Sequence
  Description of Artificial Sequence: Synthetic oligonucleotide
aacguaaaggaaaucuacc

SEQ ID NO: 47561 - RNA, 19 nt, Artificial Sequence
  Description of Artificial Sequence: Synthetic oligonucleotide
aaagagaucauuugcccca

SEQ ID NO: 47562 - RNA, 19 nt, Artificial Sequence
  Description of Artificial Sequence: Synthetic oligonucleotide
uuaugguuaacauauacuu

SEQ ID NO: 47563 - RNA, 19 nt, Artificial Sequence
  Description of Artificial Sequence: Synthetic oligonucleotide
aguauaaccacauccuuug

SEQ ID NO: 47564 - RNA, 19 nt, Artificial Sequence
  Description of Artificial Sequence: Synthetic oligonucleotide
uucccaauagauuugaguc

SEQ ID NO: 47565 - RNA, 19 nt, Artificial Sequence
  Description of Artificial Sequence: Synthetic oligonucleotide
agucgaggcauuuaaagag

SEQ ID NO: 47566 - RNA, 19 nt, Artificial Sequence
  Description of Artificial Sequence: Synthetic oligonucleotide
auagauuugaguccuauaa

SEQ ID NO: 47567 - RNA, 19 nt, Artificial Sequence
  Description of Artificial Sequence: Synthetic oligonucleotide
auacuguugaaaucuagag

SEQ ID NO: 47568 - RNA, 19 nt, Artificial Sequence
  Description of Artificial Sequence: Synthetic oligonucleotide
ugcuagaccaccucuaaag

SEQ ID NO: 47569 - RNA, 19 nt, Artificial Sequence
  Description of Artificial Sequence: Synthetic oligonucleotide
auuuggaccuggcacaaac

SEQ ID NO: 47570 - RNA, 19 nt, Artificial Sequence
  Description of Artificial Sequence: Synthetic oligonucleotide
agguucaccacucaaagcu

SEQ ID NO: 47571 - RNA, 19 nt, Artificial Sequence
  Description of Artificial Sequence: Synthetic oligonucleotide
agaagagacgagucagucc

SEQ ID NO: 47572 - RNA, 19 nt, Artificial Sequence
  Description of Artificial Sequence: Synthetic oligonucleotide
auaaaaggugguaauuccc

SEQ ID NO: 47573 - RNA, 19 nt, Artificial Sequence
  Description of Artificial Sequence: Synthetic oligonucleotide
uggccuauuccuauguggg

SEQ ID NO: 47574 - RNA, 19 nt, Artificial Sequence
  Description of Artificial Sequence: Synthetic oligonucleotide
ucuaagggcagaagagacg

SEQ ID NO: 47575 - RNA, 19 nt, Artificial Sequence
  Description of Artificial Sequence: Synthetic oligonucleotide
uguaacuacagucgaggca

SEQ ID NO: 47576 - RNA, 19 nt, Artificial Sequence
  Description of Artificial Sequence: Synthetic oligonucleotide
gacaccuaacacaagaccc

SEQ ID NO: 47577 - RNA, 19 nt, Artificial Sequence
  Description of Artificial Sequence: Synthetic oligonucleotide
guuguaacuacagucgagg

SEQ ID NO: 47578 - RNA, 19 nt, Artificial Sequence
  Description of Artificial Sequence: Synthetic oligonucleotide
agcaauaucauuaaugcaa

SEQ ID NO: 47579 - RNA, 19 nt, Artificial Sequence
  Description of Artificial Sequence: Synthetic oligonucleotide
gagauaguuagccagagcu

SEQ ID NO: 47580 - RNA, 19 nt, Artificial Sequence
  Description of Artificial Sequence: Synthetic oligonucleotide
auguucagaucauucaaag

SEQ ID NO: 47581 - RNA, 19 nt, Artificial Sequence
  Description of Artificial Sequence: Synthetic oligonucleotide
uaguuaacaggucuugaga

SEQ ID NO: 47582 - RNA, 19 nt, Artificial Sequence
  Description of Artificial Sequence: Synthetic oligonucleotide
agcgaugaugguauaaacc

SEQ ID NO: 47583 - RNA, 19 nt, Artificial Sequence
  Description of Artificial Sequence: Synthetic oligonucleotide
cuuuguaggaccgagaaca

SEQ ID NO: 47584 - RNA, 19 nt, Artificial Sequence
  Description of Artificial Sequence: Synthetic oligonucleotide
uuuagcaacacuggggucu

SEQ ID NO: 47585 - RNA, 19 nt, Artificial Sequence
  Description of Artificial Sequence: Synthetic oligonucleotide
uauaaagcugacacucccc

SEQ ID NO: 47586 - RNA, 19 nt, Artificial Sequence
  Description of Artificial Sequence: Synthetic oligonucleotide
agagugaucuucauuacuc

SEQ ID NO: 47587 - RNA, 19 nt, Artificial Sequence
  Description of Artificial Sequence: Synthetic oligonucleotide
uucauuacucguaggugag

SEQ ID NO: 47588 - RNA, 19 nt, Artificial Sequence
  Description of Artificial Sequence: Synthetic oligonucleotide
uccaauaagguccggcuga

SEQ ID NO: 47589 - RNA, 19 nt, Artificial Sequence
  Description of Artificial Sequence: Synthetic oligonucleotide
uguuguaacuacagucgag

SEQ ID NO: 47590 - RNA, 19 nt, Artificial Sequence
  Description of Artificial Sequence: Synthetic oligonucleotide
ugugcaacuugccuacugc

SEQ ID NO: 47591 - RNA, 19 nt, Artificial Sequence
  Description of Artificial Sequence: Synthetic oligonucleotide
aagagugaucuucauuacu

SEQ ID NO: 47592 - RNA, 19 nt, Artificial Sequence
  Description of Artificial Sequence: Synthetic oligonucleotide
uggauuaguuagcacuucc

SEQ ID NO: 47593 - RNA, 19 nt, Artificial Sequence
  Description of Artificial Sequence: Synthetic oligonucleotide
gcuucgaccaaguauaacc

SEQ ID NO: 47594 - RNA, 19 nt, Artificial Sequence
  Description of Artificial Sequence: Synthetic oligonucleotide
cuuuacuuacccuuacaug

SEQ ID NO: 47595 - RNA, 19 nt, Artificial Sequence
  Description of Artificial Sequence: Synthetic oligonucleotide
aguuuaguuauuugauugu

SEQ ID NO: 47596 - RNA, 19 nt, Artificial Sequence
  Description of Artificial Sequence: Synthetic oligonucleotide
auagucguggccuauuccu

SEQ ID NO: 47597 - RNA, 19 nt, Artificial Sequence
  Description of Artificial Sequence: Synthetic oligonucleotide
gacuacgacacccuaacca

SEQ ID NO: 47598 - RNA, 19 nt, Artificial Sequence
  Description of Artificial Sequence: Synthetic oligonucleotide
uggaugcagaaaauagugc

SEQ ID NO: 47599 - RNA, 19 nt, Artificial Sequence
  Description of Artificial Sequence: Synthetic oligonucleotide
acuaacuugucuccaauaa

SEQ ID NO: 47600 - RNA, 19 nt, Artificial Sequence
  Description of Artificial Sequence: Synthetic oligonucleotide
uuuggauuaguuagcacuu

SEQ ID NO: 47601 - RNA, 19 nt, Artificial Sequence
  Description of Artificial Sequence: Synthetic oligonucleotide
uuggaccuggcacaaacug

SEQ ID NO: 47602 - RNA, 19 nt, Artificial Sequence
  Description of Artificial Sequence: Synthetic oligonucleotide
cuuuaucagagaagggaag

SEQ ID NO: 47603 - RNA, 19 nt, Artificial Sequence
  Description of Artificial Sequence: Synthetic oligonucleotide
guauaaacuuuggagguag

SEQ ID NO: 47604 - RNA, 19 nt, Artificial Sequence
  Description of Artificial Sequence: Synthetic oligonucleotide
cacaaggugggguuaagag

SEQ ID NO: 47605 - RNA, 19 nt, Artificial Sequence
  Description of Artificial Sequence: Synthetic oligonucleotide
ucccaauagauuugagucc

SEQ ID NO: 47606 - RNA, 19 nt, Artificial Sequence
  Description of Artificial Sequence: Synthetic oligonucleotide
ugaagguucaccacucaaa

SEQ ID NO: 47607 - RNA, 19 nt, Artificial Sequence
  Description of Artificial Sequence: Synthetic oligonucleotide
uuaaugaagggcgucacau

SEQ ID NO: 47608 - RNA, 19 nt, Artificial Sequence
  Description of Artificial Sequence: Synthetic oligonucleotide
aggugagaaaugcaaccac

SEQ ID NO: 47609 - RNA, 19 nt, Artificial Sequence
  Description of Artificial Sequence: Synthetic oligonucleotide
auauguagcaguaguaucu

SEQ ID NO: 47610 - RNA, 19 nt, Artificial Sequence
  Description of Artificial Sequence: Synthetic oligonucleotide
uuccguuaaagcuagcuuu

SEQ ID NO: 47611 - RNA, 19 nt, Artificial Sequence
  Description of Artificial Sequence: Synthetic oligonucleotide
guuuggauuaguuagcacu

SEQ ID NO: 47612 - RNA, 19 nt, Artificial Sequence
  Description of Artificial Sequence: Synthetic oligonucleotide
acuggcuuaucugucacgg

SEQ ID NO: 47613 - RNA, 19 nt, Artificial Sequence
  Description of Artificial Sequence: Synthetic oligonucleotide
agcuauagucuauauacaa

SEQ ID NO: 47614 - RNA, 19 nt, Artificial Sequence
  Description of Artificial Sequence: Synthetic oligonucleotide
gucaucacuacauccuucc

SEQ ID NO: 47615 - RNA, 19 nt, Artificial Sequence
  Description of Artificial Sequence: Synthetic oligonucleotide
cuaucucaaaagcucacac

SEQ ID NO: 47616 - RNA, 19 nt, Artificial Sequence
  Description of Artificial Sequence: Synthetic oligonucleotide
auuugccccaucaauuggc

SEQ ID NO: 47617 - RNA, 19 nt, Artificial Sequence
  Description of Artificial Sequence: Synthetic oligonucleotide
ugcucccuggcucauaaug

SEQ ID NO: 47618 - RNA, 19 nt, Artificial Sequence
  Description of Artificial Sequence: Synthetic oligonucleotide
ucguaggugagaaaugcaa

SEQ ID NO: 47619 - RNA, 19 nt, Artificial Sequence
  Description of Artificial Sequence: Synthetic oligonucleotide
gacucugaaaggguaagcc

SEQ ID NO: 47620 - RNA, 19 nt, Artificial Sequence
  Description of Artificial Sequence: Synthetic oligonucleotide
ugaucauaaucauuagcau

SEQ ID NO: 47621 - RNA, 19 nt, Artificial Sequence
  Description of Artificial Sequence: Synthetic oligonucleotide
ugguuuuaguaucuaguaa

SEQ ID NO: 47622 - RNA, 19 nt, Artificial Sequence
  Description of Artificial Sequence: Synthetic oligonucleotide
aguaaauguucaaguuucc

SEQ ID NO: 47623 - RNA, 19 nt, Artificial Sequence
  Description of Artificial Sequence: Synthetic oligonucleotide
cagauaguuuuacaguuug

SEQ ID NO: 47624 - RNA, 19 nt, Artificial Sequence
  Description of Artificial Sequence: Synthetic oligonucleotide
agauaaaaugacaacugcu

SEQ ID NO: 47625 - RNA, 19 nt, Artificial Sequence
  Description of Artificial Sequence: Synthetic oligonucleotide
aucuguauugacacaguac

SEQ ID NO: 47626 - RNA, 19 nt, Artificial Sequence
  Description of Artificial Sequence: Synthetic oligonucleotide
ucaaagugccacccuaaac

SEQ ID NO: 47627 - RNA, 19 nt, Artificial Sequence
  Description of Artificial Sequence: Synthetic oligonucleotide
aaugauauuccaaccuuaa

SEQ ID NO: 47628 - RNA, 19 nt, Artificial Sequence
  Description of Artificial Sequence: Synthetic oligonucleotide
uuugcucgaagccacugaa

SEQ ID NO: 47629 - RNA, 19 nt, Artificial Sequence
  Description of Artificial Sequence: Synthetic oligonucleotide
uacgacacccuaaccacug

SEQ ID NO: 47630 - RNA, 19 nt, Artificial Sequence
  Description of Artificial Sequence: Synthetic oligonucleotide
aggagucccggucaacuac

SEQ ID NO: 47631 - RNA, 19 nt, Artificial Sequence
  Description of Artificial Sequence: Synthetic oligonucleotide
gaggcuucuaagcaagcac

SEQ ID NO: 47632 - RNA, 19 nt, Artificial Sequence
  Description of Artificial Sequence: Synthetic oligonucleotide
uuguaacuacagucgaggc

SEQ ID NO: 47633 - RNA, 19 nt, Artificial Sequence
  Description of Artificial Sequence: Synthetic oligonucleotide
uccauuggccuucagugaa

SEQ ID NO: 47634 - RNA, 19 nt, Artificial Sequence
  Description of Artificial Sequence: Synthetic oligonucleotide
ugaagggcgucacaucuac

SEQ ID NO: 47635 - RNA, 19 nt, Artificial Sequence
  Description of Artificial Sequence: Synthetic oligonucleotide
cucguaacaucugugcucc

SEQ ID NO: 47636 - RNA, 19 nt, Artificial Sequence
  Description of Artificial Sequence: Synthetic oligonucleotide
cauaagagguccugacacc

SEQ ID NO: 47637 - RNA, 19 nt, Artificial Sequence
  Description of Artificial Sequence: Synthetic oligonucleotide
uuaucugucacggcuccag

SEQ ID NO: 47638 - RNA, 19 nt, Artificial Sequence
  Description of Artificial Sequence: Synthetic oligonucleotide
aagagggcgcugcaacuag

SEQ ID NO: 47639 - RNA, 19 nt, Artificial Sequence
  Description of Artificial Sequence: Synthetic oligonucleotide
aggcacgccgaauuccugc

SEQ ID NO: 47640 - RNA, 19 nt, Artificial Sequence
  Description of Artificial Sequence: Synthetic oligonucleotide
ucccggucaacuacacugg

SEQ ID NO: 47641 - RNA, 19 nt, Artificial Sequence
  Description of Artificial Sequence: Synthetic oligonucleotide
guccauuuaggccuuugcc

SEQ ID NO: 47642 - RNA, 19 nt, Artificial Sequence
  Description of Artificial Sequence: Synthetic oligonucleotide
uuauucaaagugccacccu

SEQ ID NO: 47643 - RNA, 19 nt, Artificial Sequence
  Description of Artificial Sequence: Synthetic oligonucleotide
gacuauagaguauaucagu

SEQ ID NO: 47644 - RNA, 19 nt, Artificial Sequence
  Description of Artificial Sequence: Synthetic oligonucleotide
uggcaauaagcgcuggaac

SEQ ID NO: 47645 - RNA, 19 nt, Artificial Sequence
  Description of Artificial Sequence: Synthetic oligonucleotide
ccaacauagccuaucacag

SEQ ID NO: 47646 - RNA, 19 nt, Artificial Sequence
  Description of Artificial Sequence: Synthetic oligonucleotide
agagccccauaagaggucc

SEQ ID NO: 47647 - RNA, 19 nt, Artificial Sequence
  Description of Artificial Sequence: Synthetic oligonucleotide
agugccacccuaaaccaac

SEQ ID NO: 47648 - RNA, 19 nt, Artificial Sequence
  Description of Artificial Sequence: Synthetic oligonucleotide
aaaauagugcugacuacau

SEQ ID NO: 47649 - RNA, 19 nt, Artificial Sequence
  Description of Artificial Sequence: Synthetic oligonucleotide
aggacaaacguaaaggaaa

SEQ ID NO: 47650 - RNA, 19 nt, Artificial Sequence
  Description of Artificial Sequence: Synthetic oligonucleotide
ucugaaaggguaagcccac

SEQ ID NO: 47651 - RNA, 19 nt, Artificial Sequence
  Description of Artificial Sequence: Synthetic oligonucleotide
aguaaugcacuucccaaua

SEQ ID NO: 47652 - RNA, 19 nt, Artificial Sequence
  Description of Artificial Sequence: Synthetic oligonucleotide
uacagcuauagucuauaua

SEQ ID NO: 47653 - RNA, 19 nt, Artificial Sequence
  Description of Artificial Sequence: Synthetic oligonucleotide
acgccgaauuccugcaacc

SEQ ID NO: 47654 - RNA, 19 nt, Artificial Sequence
  Description of Artificial Sequence: Synthetic oligonucleotide
gauuaguuagcacuucccu

SEQ ID NO: 47655 - RNA, 19 nt, Artificial Sequence
  Description of Artificial Sequence: Synthetic oligonucleotide
ccaacauuauaggagauag

SEQ ID NO: 47656 - RNA, 19 nt, Artificial Sequence
  Description of Artificial Sequence: Synthetic oligonucleotide
aagagguccugacaccuaa

SEQ ID NO: 47657 - RNA, 19 nt, Artificial Sequence
  Description of Artificial Sequence: Synthetic oligonucleotide
uccuccuacuaacuugucu

SEQ ID NO: 47658 - RNA, 19 nt, Artificial Sequence
  Description of Artificial Sequence: Synthetic oligonucleotide
cacagugccaaccaacguc

SEQ ID NO: 47659 - RNA, 19 nt, Artificial Sequence
  Description of Artificial Sequence: Synthetic oligonucleotide
ucaugcuuuuagcaacacu

SEQ ID NO: 47660 - RNA, 19 nt, Artificial Sequence
  Description of Artificial Sequence: Synthetic oligonucleotide
ucacaugcguaucugcaau

SEQ ID NO: 47661 - RNA, 19 nt, Artificial Sequence
  Description of Artificial Sequence: Synthetic oligonucleotide
aaguauaaccacauccuuu

SEQ ID NO: 47662 - RNA, 19 nt, Artificial Sequence
  Description of Artificial Sequence: Synthetic oligonucleotide
aaggacaaacguaaaggaa

SEQ ID NO: 47663 - RNA, 19 nt, Artificial Sequence
  Description of Artificial Sequence: Synthetic oligonucleotide
uauuugagacccucucccu

SEQ ID NO: 47664 - RNA, 19 nt, Artificial Sequence
  Description of Artificial Sequence: Synthetic oligonucleotide
uccguuaaagcuagcuuua

SEQ ID NO: 47665 - RNA, 19 nt, Artificial Sequence
  Description of Artificial Sequence: Synthetic oligonucleotide
augcguaucugcaaugaag

SEQ ID NO: 47666 - RNA, 19 nt, Artificial Sequence
  Description of Artificial Sequence: Synthetic oligonucleotide
caaggguguggauagcaac

SEQ ID NO: 47667 - RNA, 19 nt, Artificial Sequence
  Description of Artificial Sequence: Synthetic oligonucleotide
ugaggcacgccgaauuccu

SEQ ID NO: 47668 - RNA, 19 nt, Artificial Sequence
  Description of Artificial Sequence: Synthetic oligonucleotide
ucagguauguucagaucau

SEQ ID NO: 47669 - RNA, 19 nt, Artificial Sequence
  Description of Artificial Sequence: Synthetic oligonucleotide
aguccucuagagucacugg

SEQ ID NO: 47670 - RNA, 19 nt, Artificial Sequence
  Description of Artificial Sequence: Synthetic oligonucleotide
aauaagcgcuggaacucuc

SEQ ID NO: 47671 - RNA, 19 nt, Artificial Sequence
  Description of Artificial Sequence: Synthetic oligonucleotide
uucacaugcguaucugcaa

SEQ ID NO: 47672 - RNA, 19 nt, Artificial Sequence
  Description of Artificial Sequence: Synthetic oligonucleotide
uucaaagugccacccuaaa

SEQ ID NO: 47673 - RNA, 19 nt, Artificial Sequence
  Description of Artificial Sequence: Synthetic oligonucleotide
aaccauuccguuaaagcua

SEQ ID NO: 47674 - RNA, 19 nt, Artificial Sequence
  Description of Artificial Sequence: Synthetic oligonucleotide
gaagccucgucuuuaggaa

SEQ ID NO: 47675 - RNA, 19 nt, Artificial Sequence
  Description of Artificial Sequence: Synthetic oligonucleotide
acuauagaguauaucaguu

SEQ ID NO: 47676 - RNA, 19 nt, Artificial Sequence
  Description of Artificial Sequence: Synthetic oligonucleotide
augcuuuuagcaacacugg

SEQ ID NO: 47677 - RNA, 19 nt, Artificial Sequence
  Description of Artificial Sequence: Synthetic oligonucleotide
cuucgaccaaguauaacca

SEQ ID NO: 47678 - RNA, 19 nt, Artificial Sequence
  Description of Artificial Sequence: Synthetic oligonucleotide
auaagcgcuggaacucucc

SEQ ID NO: 47679 - RNA, 19 nt, Artificial Sequence
  Description of Artificial Sequence: Synthetic oligonucleotide
auaagguccggcugacucu

SEQ ID NO: 47680 - RNA, 19 nt, Artificial Sequence
  Description of Artificial Sequence: Synthetic oligonucleotide
uggccuuagcuccacuaug

SEQ ID NO: 47681 - RNA, 19 nt, Artificial Sequence
  Description of Artificial Sequence: Synthetic oligonucleotide
auuccguuaaagcuagcuu

SEQ ID NO: 47682 - RNA, 19 nt, Artificial Sequence
  Description of Artificial Sequence: Synthetic oligonucleotide
cugacuccguucauguuug

SEQ ID NO: 47683 - RNA, 19 nt, Artificial Sequence
  Description of Artificial Sequence: Synthetic oligonucleotide
cuuacccuuacaugacaac

SEQ ID NO: 47684 - RNA, 19 nt, Artificial Sequence
  Description of Artificial Sequence: Synthetic oligonucleotide
aacaggucuugagauaaaa

SEQ ID NO: 47685 - RNA, 19 nt, Artificial Sequence
  Description of Artificial Sequence: Synthetic oligonucleotide
gcuagaccaccucuaaagg

SEQ ID NO: 47686 - RNA, 19 nt, Artificial Sequence
  Description of Artificial Sequence: Synthetic oligonucleotide
cuaagggcagaagagacga

SEQ ID NO: 47687 - RNA, 19 nt, Artificial Sequence
  Description of Artificial Sequence: Synthetic oligonucleotide
uuuguaggaccgagaacaa

SEQ ID NO: 47688 - RNA, 19 nt, Artificial Sequence
  Description of Artificial Sequence: Synthetic oligonucleotide
uucgaccaaguauaaccac

SEQ ID NO: 47689 - RNA, 19 nt, Artificial Sequence
  Description of Artificial Sequence: Synthetic oligonucleotide
uaagcgcuggaacucuccu

SEQ ID NO: 47690 - RNA, 19 nt, Artificial Sequence
  Description of Artificial Sequence: Synthetic oligonucleotide
uaaggucugauaguauaaa

SEQ ID NO: 47691 - RNA, 19 nt, Artificial Sequence
  Description of Artificial Sequence: Synthetic oligonucleotide
acggagaacaaagagugau

SEQ ID NO: 47692 - RNA, 19 nt, Artificial Sequence
  Description of Artificial Sequence: Synthetic oligonucleotide
ugcaauugacacugacaac

SEQ ID NO: 47693 - RNA, 19 nt, Artificial Sequence
  Description of Artificial Sequence: Synthetic oligonucleotide
uuauacucuugauguccca

SEQ ID NO: 47694 - RNA, 19 nt, Artificial Sequence
  Description of Artificial Sequence: Synthetic oligonucleotide
gguaaacuguuguaacuac

SEQ ID NO: 47695 - RNA, 19 nt, Artificial Sequence
  Description of Artificial Sequence: Synthetic oligonucleotide
ggacuauagaguauaucag

SEQ ID NO: 47696 - RNA, 19 nt, Artificial Sequence
  Description of Artificial Sequence: Synthetic oligonucleotide
acuagcuagccaugaauuu

SEQ ID NO: 47697 - RNA, 19 nt, Artificial Sequence
  Description of Artificial Sequence: Synthetic oligonucleotide
caggcuucgaccaaguaua

SEQ ID NO: 47698 - RNA, 19 nt, Artificial Sequence
  Description of Artificial Sequence: Synthetic oligonucleotide
ugcaaccauuccguuaaag

SEQ ID NO: 47699 - RNA, 19 nt, Artificial Sequence
  Description of Artificial Sequence: Synthetic oligonucleotide
uuccaacauagccuaucac

SEQ ID NO: 47700 - RNA, 19 nt, Artificial Sequence
  Description of Artificial Sequence: Synthetic oligonucleotide
gucaccauuuggcuuggug

SEQ ID NO: 47701 - RNA, 19 nt, Artificial Sequence
  Description of Artificial Sequence: Synthetic oligonucleotide
accauuccguuaaagcuag

SEQ ID NO: 47702 - RNA, 19 nt, Artificial Sequence
  Description of Artificial Sequence: Synthetic oligonucleotide
aaauaaggucugauaguau

SEQ ID NO: 47703 - RNA, 19 nt, Artificial Sequence
  Description of Artificial Sequence: Synthetic oligonucleotide
acuaucucaaaagcucaca

SEQ ID NO: 47704 - RNA, 19 nt, Artificial Sequence
  Description of Artificial Sequence: Synthetic oligonucleotide
caaguaacugcaaguccuc

SEQ ID NO: 47705 - RNA, 19 nt, Artificial Sequence
  Description of Artificial Sequence: Synthetic oligonucleotide
cuaagaggcuucuaagcaa

SEQ ID NO: 47706 - RNA, 19 nt, Artificial Sequence
  Description of Artificial Sequence: Synthetic oligonucleotide
guggauagcaacauaguua

SEQ ID NO: 47707 - RNA, 19 nt, Artificial Sequence
  Description of Artificial Sequence: Synthetic oligonucleotide
uaauucccacuagaguaug

SEQ ID NO: 47708 - RNA, 19 nt, Artificial Sequence
  Description of Artificial Sequence: Synthetic oligonucleotide
cuuccuuuguaggaccgag

SEQ ID NO: 47709 - RNA, 19 nt, Artificial Sequence
  Description of Artificial Sequence: Synthetic oligonucleotide
ucuguggacuauagaguau

SEQ ID NO: 47710 - RNA, 19 nt, Artificial Sequence
  Description of Artificial Sequence: Synthetic oligonucleotide
agaguauaucaguuucaau

SEQ ID NO: 47711 - RNA, 19 nt, Artificial Sequence
  Description of Artificial Sequence: Synthetic oligonucleotide
accauguaaguuggcacag

SEQ ID NO: 47712 - RNA, 19 nt, Artificial Sequence
  Description of Artificial Sequence: Synthetic oligonucleotide
gacacccuaaccacuguac

SEQ ID NO: 47713 - RNA, 19 nt, Artificial Sequence
  Description of Artificial Sequence: Synthetic oligonucleotide
uuuuagcaacacugggguc

SEQ ID NO: 47714 - RNA, 19 nt, Artificial Sequence
  Description of Artificial Sequence: Synthetic oligonucleotide
cauaagaaacugacucuga

SEQ ID NO: 47715 - RNA, 19 nt, Artificial Sequence
  Description of Artificial Sequence: Synthetic oligonucleotide
aucuagagagaagacacua

SEQ ID NO: 47716 - RNA, 19 nt, Artificial Sequence
  Description of Artificial Sequence: Synthetic oligonucleotide
auuccugauuccauaagaa

SEQ ID NO: 47717 - RNA, 19 nt, Artificial Sequence
  Description of Artificial Sequence: Synthetic oligonucleotide
auaaggucugauaguauaa

SEQ ID NO: 47718 - RNA, 19 nt, Artificial Sequence
  Description of Artificial Sequence: Synthetic oligonucleotide
accauuuggcuugguguac

SEQ ID NO: 47719 - RNA, 19 nt, Artificial Sequence
  Description of Artificial Sequence: Synthetic oligonucleotide
ggcagaagagacgagucag

SEQ ID NO: 47720 - RNA, 19 nt, Artificial Sequence
  Description of Artificial Sequence: Synthetic oligonucleotide
agagcgaugaugguauaaa

SEQ ID NO: 47721 - RNA, 19 nt, Artificial Sequence
  Description of Artificial Sequence: Synthetic oligonucleotide
cagcaaguaacugcaaguc

SEQ ID NO: 47722 - RNA, 19 nt, Artificial Sequence
  Description of Artificial Sequence: Synthetic oligonucleotide
cuauuccuaugugggaggc

SEQ ID NO: 47723 - RNA, 19 nt, Artificial Sequence
  Description of Artificial Sequence: Synthetic oligonucleotide
gggcgucacaucuacagug

SEQ ID NO: 47724 - RNA, 19 nt, Artificial Sequence
  Description of Artificial Sequence: Synthetic oligonucleotide
aaagagggcgcugcaacua

SEQ ID NO: 47725 - RNA, 19 nt, Artificial Sequence
  Description of Artificial Sequence: Synthetic oligonucleotide
gcgaugaugguauaaaccu

SEQ ID NO: 47726 - RNA, 19 nt, Artificial Sequence
  Description of Artificial Sequence: Synthetic oligonucleotide
caagcacucucuccugggc

SEQ ID NO: 47727 - RNA, 19 nt, Artificial Sequence
  Description of Artificial Sequence: Synthetic oligonucleotide
ucguggccuauuccuaugu

SEQ ID NO: 47728 - RNA, 19 nt, Artificial Sequence
  Description of Artificial Sequence: Synthetic oligonucleotide
agaggagucccggucaacu

SEQ ID NO: 47729 - RNA, 19 nt, Artificial Sequence
  Description of Artificial Sequence: Synthetic oligonucleotide
caauagucguggccuauuc

SEQ ID NO: 47730 - RNA, 19 nt, Artificial Sequence
  Description of Artificial Sequence: Synthetic oligonucleotide
aggugggguuaagagacuc

SEQ ID NO: 47731 - RNA, 19 nt, Artificial Sequence
  Description of Artificial Sequence: Synthetic oligonucleotide
gaguauggggcuguacuca

SEQ ID NO: 47732 - RNA, 19 nt, Artificial Sequence
  Description of Artificial Sequence: Synthetic oligonucleotide
aguauggggcuguacucaa

SEQ ID NO: 47733 - RNA, 19 nt, Artificial Sequence
  Description of Artificial Sequence: Synthetic oligonucleotide
acaugcguaucugcaauga

SEQ ID NO: 47734 - RNA, 19 nt, Artificial Sequence
  Description of Artificial Sequence: Synthetic oligonucleotide
uccuacuaacuugucucca

SEQ ID NO: 47735 - RNA, 19 nt, Artificial Sequence
  Description of Artificial Sequence: Synthetic oligonucleotide
cacaugcguaucugcaaug

SEQ ID NO: 47736 - RNA, 19 nt, Artificial Sequence
  Description of Artificial Sequence: Synthetic oligonucleotide
aguauaaacuuuggaggua

SEQ ID NO: 47737 - RNA, 19 nt, Artificial Sequence
  Description of Artificial Sequence: Synthetic oligonucleotide
ggauuaguuagcacuuccc

SEQ ID NO: 47738 - RNA, 19 nt, Artificial Sequence
  Description of Artificial Sequence: Synthetic oligonucleotide
aggugguaauucccacuag

SEQ ID NO: 47739 - RNA, 19 nt, Artificial Sequence
  Description of Artificial Sequence: Synthetic oligonucleotide
cuguuguaacuacagucga

SEQ ID NO: 47740 - RNA, 19 nt, Artificial Sequence
  Description of Artificial Sequence: Synthetic oligonucleotide
caacuggcuuaucugucac

SEQ ID NO: 47741 - RNA, 19 nt, Artificial Sequence
  Description of Artificial Sequence: Synthetic oligonucleotide
cagaagagacgagucaguc

SEQ ID NO: 47742 - RNA, 19 nt, Artificial Sequence
  Description of Artificial Sequence: Synthetic oligonucleotide
ccauaagaaacugacucug

SEQ ID NO: 47743 - RNA, 19 nt, Artificial Sequence
  Description of Artificial Sequence: Synthetic oligonucleotide
acccuaaaccaacaccuuu

SEQ ID NO: 47744 - RNA, 19 nt, Artificial Sequence
  Description of Artificial Sequence: Synthetic oligonucleotide
agguacacuagugcuaaau

SEQ ID NO: 47745 - RNA, 19 nt, Artificial Sequence
  Description of Artificial Sequence: Synthetic oligonucleotide
uacuuaugguuaacauaua

SEQ ID NO: 47746 - RNA, 19 nt, Artificial Sequence
  Description of Artificial Sequence: Synthetic oligonucleotide
gccacccuaaaccaacacc

SEQ ID NO: 47747 - RNA, 19 nt, Artificial Sequence
  Description of Artificial Sequence: Synthetic oligonucleotide
cuacagucgaggcauuuaa

SEQ ID NO: 47748 - RNA, 19 nt, Artificial Sequence
  Description of Artificial Sequence: Synthetic oligonucleotide
gagggcgcugcaacuagag

SEQ ID NO: 47749 - RNA, 19 nt, Artificial Sequence
  Description of Artificial Sequence: Synthetic oligonucleotide
agucguggccuauuccuau

SEQ ID NO: 47750 - RNA, 19 nt, Artificial Sequence
  Description of Artificial Sequence: Synthetic oligonucleotide
ucauuacucguaggugaga

SEQ ID NO: 47751 - RNA, 19 nt, Artificial Sequence
  Description of Artificial Sequence: Synthetic oligonucleotide
cagcuauagucuauauaca

SEQ ID NO: 47752 - RNA, 19 nt, Artificial Sequence
  Description of Artificial Sequence: Synthetic oligonucleotide
cacgccgaauuccugcaac

SEQ ID NO: 47753 - RNA, 19 nt, Artificial Sequence
  Description of Artificial Sequence: Synthetic oligonucleotide
ugacuuguaccagguggca

SEQ ID NO: 47754 - RNA, 19 nt, Artificial Sequence
  Description of Artificial Sequence: Synthetic oligonucleotide
cuggcuuaucugucacggc

SEQ ID NO: 47755 - RNA, 19 nt, Artificial Sequence
  Description of Artificial Sequence: Synthetic oligonucleotide
uuuagccggggaugaguuc

SEQ ID NO: 47756 - RNA, 19 nt, Artificial Sequence
  Description of Artificial Sequence: Synthetic oligonucleotide
uagucguggccuauuccua

SEQ ID NO: 47757 - RNA, 19 nt, Artificial Sequence
  Description of Artificial Sequence: Synthetic oligonucleotide
cuaugugggaggcauuuua

SEQ ID NO: 47758 - RNA, 19 nt, Artificial Sequence
  Description of Artificial Sequence: Synthetic oligonucleotide
agggcgucacaucuacagu

SEQ ID NO: 47759 - RNA, 19 nt, Artificial Sequence
  Description of Artificial Sequence: Synthetic oligonucleotide
cauuacucguaggugagaa

SEQ ID NO: 47760 - RNA, 19 nt, Artificial Sequence
  Description of Artificial Sequence: Synthetic oligonucleotide
ucuuccuuuguaggaccga

SEQ ID NO: 47761 - RNA, 19 nt, Artificial Sequence
  Description of Artificial Sequence: Synthetic oligonucleotide
caaugaagguuaaccucca

SEQ ID NO: 47762 - RNA, 19 nt, Artificial Sequence
  Description of Artificial Sequence: Synthetic oligonucleotide
agguuacagcuauagucua

SEQ ID NO: 47763 - RNA, 19 nt, Artificial Sequence
  Description of Artificial Sequence: Synthetic oligonucleotide
ccuacagagccccauaaga

SEQ ID NO: 47764 - RNA, 19 nt, Artificial Sequence
  Description of Artificial Sequence: Synthetic oligonucleotide
uuuaucccagagcgaugau

SEQ ID NO: 47765 - RNA, 19 nt, Artificial Sequence
  Description of Artificial Sequence: Synthetic oligonucleotide
ggagauaguuagccagagc

SEQ ID NO: 47766 - RNA, 19 nt, Artificial Sequence
  Description of Artificial Sequence: Synthetic oligonucleotide
acuuacccuuacaugacaa

SEQ ID NO: 47767 - RNA, 19 nt, Artificial Sequence
  Description of Artificial Sequence: Synthetic oligonucleotide
aaggguaagcccacuccau

SEQ ID NO: 47768 - RNA, 19 nt, Artificial Sequence
  Description of Artificial Sequence: Synthetic oligonucleotide
cuagcuagccaugaauuua

SEQ ID NO: 47769 - RNA, 19 nt, Artificial Sequence
  Description of Artificial Sequence: Synthetic oligonucleotide
accaacauuauaggagaua

SEQ ID NO: 47770 - RNA, 19 nt, Artificial Sequence
  Description of Artificial Sequence: Synthetic oligonucleotide
ugccccaaauuggaacccc

SEQ ID NO: 47771 - RNA, 19 nt, Artificial Sequence
  Description of Artificial Sequence: Synthetic oligonucleotide
gcugaagaaugacuacgac

SEQ ID NO: 47772 - RNA, 19 nt, Artificial Sequence
  Description of Artificial Sequence: Synthetic oligonucleotide
ugucacggcuccagacacu

SEQ ID NO: 47773 - RNA, 19 nt, Artificial Sequence
  Description of Artificial Sequence: Synthetic oligonucleotide
aggauauguagcaguagua

SEQ ID NO: 47774 - RNA, 19 nt, Artificial Sequence
  Description of Artificial Sequence: Synthetic oligonucleotide
ccggcugacucugaaaggg

SEQ ID NO: 47775 - RNA, 19 nt, Artificial Sequence
  Description of Artificial Sequence: Synthetic oligonucleotide
caguuuggauuaguuagca

SEQ ID NO: 47776 - RNA, 19 nt, Artificial Sequence
  Description of Artificial Sequence: Synthetic oligonucleotide
cuauagaguauaucaguuu

SEQ ID NO: 47777 - RNA, 19 nt, Artificial Sequence
  Description of Artificial Sequence: Synthetic oligonucleotide
acccuccaaauaaaaggug

SEQ ID NO: 47778 - RNA, 19 nt, Artificial Sequence
  Description of Artificial Sequence: Synthetic oligonucleotide
agagguccugacaccuaac

SEQ ID NO: 47779 - RNA, 19 nt, Artificial Sequence
  Description of Artificial Sequence: Synthetic oligonucleotide
gcugcaacuagaggagucc

SEQ ID NO: 47780 - RNA, 19 nt, Artificial Sequence
  Description of Artificial Sequence: Synthetic oligonucleotide
gcuguacugaugaggcacg

SEQ ID NO: 47781 - RNA, 19 nt, Artificial Sequence
  Description of Artificial Sequence: Synthetic oligonucleotide
caccauuuggcuuggugua

SEQ ID NO: 47782 - RNA, 19 nt, Artificial Sequence
  Description of Artificial Sequence: Synthetic oligonucleotide
acuuuaucccagagcgaug

SEQ ID NO: 47783 - RNA, 19 nt, Artificial Sequence
  Description of Artificial Sequence: Synthetic oligonucleotide
gcaaguaacugcaaguccu

SEQ ID NO: 47784 - RNA, 19 nt, Artificial Sequence
  Description of Artificial Sequence: Synthetic oligonucleotide
acuacagucgaggcauuua

SEQ ID NO: 47785 - RNA, 19 nt, Artificial Sequence
  Description of Artificial Sequence: Synthetic oligonucleotide
cacuagugcuaaauuuaaa

SEQ ID NO: 47786 - RNA, 19 nt, Artificial Sequence
  Description of Artificial Sequence: Synthetic oligonucleotide
cuguggacuauagaguaua

SEQ ID NO: 47787 - RNA, 19 nt, Artificial Sequence
  Description of Artificial Sequence: Synthetic oligonucleotide
uugccccaucaauuggcaa

SEQ ID NO: 47788 - RNA, 19 nt, Artificial Sequence
  Description of Artificial Sequence: Synthetic oligonucleotide
cacggcuccagacacugaa

SEQ ID NO: 47789 - RNA, 19 nt, Artificial Sequence
  Description of Artificial Sequence: Synthetic oligonucleotide
cauuccguuaaagcuagcu

SEQ ID NO: 47790 - RNA, 19 nt, Artificial Sequence
  Description of Artificial Sequence: Synthetic oligonucleotide
guaauucccacuagaguau

SEQ ID NO: 47791 - RNA, 19 nt, Artificial Sequence
  Description of Artificial Sequence: Synthetic oligonucleotide
cauggaaacucaacauuau

SEQ ID NO: 47792 - RNA, 19 nt, Artificial Sequence
  Description of Artificial Sequence: Synthetic oligonucleotide
cacuuuaucccagagcgau

SEQ ID NO: 47793 - RNA, 19 nt, Artificial Sequence
  Description of Artificial Sequence: Synthetic oligonucleotide
gacuuguaccagguggcaa

SEQ ID NO: 47794 - RNA, 19 nt, Artificial Sequence
  Description of Artificial Sequence: Synthetic oligonucleotide
ccacccuaaaccaacaccu

SEQ ID NO: 47795 - RNA, 19 nt, Artificial Sequence
  Description of Artificial Sequence: Synthetic oligonucleotide
guauggggcuguacucaag

SEQ ID NO: 47796 - RNA, 19 nt, Artificial Sequence
  Description of Artificial Sequence: Synthetic oligonucleotide
acgacacccuaaccacugu

SEQ ID NO: 47797 - RNA, 19 nt, Artificial Sequence
  Description of Artificial Sequence: Synthetic oligonucleotide
ggauauguagcaguaguau

SEQ ID NO: 47798 - RNA, 19 nt, Artificial Sequence
  Description of Artificial Sequence: Synthetic oligonucleotide
caugcguaucugcaaugaa

SEQ ID NO: 47799 - RNA, 19 nt, Artificial Sequence
  Description of Artificial Sequence: Synthetic oligonucleotide
gaacaggggauggugaguu

SEQ ID NO: 47800 - RNA, 19 nt, Artificial Sequence
  Description of Artificial Sequence: Synthetic oligonucleotide
caguaguaucuaucuucca

SEQ ID NO: 47801 - RNA, 19 nt, Artificial Sequence
  Description of Artificial Sequence: Synthetic oligonucleotide
ggauccauuggccuucagu

SEQ ID NO: 47802 - RNA, 19 nt, Artificial Sequence
  Description of Artificial Sequence: Synthetic oligonucleotide
accagguacacuagugcua

SEQ ID NO: 47803 - RNA, 19 nt, Artificial Sequence
  Description of Artificial Sequence: Synthetic oligonucleotide
ccggucaacuacacuggcc

SEQ ID NO: 47804 - RNA, 19 nt, Artificial Sequence
  Description of Artificial Sequence: Synthetic oligonucleotide
uuccuaugugggaggcauu

SEQ ID NO: 47805 - RNA, 19 nt, Artificial Sequence
  Description of Artificial Sequence: Synthetic oligonucleotide
auagccuaucacagguuuu

SEQ ID NO: 47806 - RNA, 19 nt, Artificial Sequence
  Description of Artificial Sequence: Synthetic oligonucleotide
gguacacuagugcuaaauu

SEQ ID NO: 47807 - RNA, 19 nt, Artificial Sequence
  Description of Artificial Sequence: Synthetic oligonucleotide
ccccauaagagguccugac

SEQ ID NO: 47808 - RNA, 19 nt, Artificial Sequence
  Description of Artificial Sequence: Synthetic oligonucleotide
gcgucacaucuacagugcc

SEQ ID NO: 47809 - RNA, 19 nt, Artificial Sequence
  Description of Artificial Sequence: Synthetic oligonucleotide
ugacuccguucauguuuga

SEQ ID NO: 47810 - RNA, 19 nt, Artificial Sequence
  Description of Artificial Sequence: Synthetic oligonucleotide
uaccauccacugguuuaca

SEQ ID NO: 47811 - RNA, 19 nt, Artificial Sequence
  Description of Artificial Sequence: Synthetic oligonucleotide
cuuuagccggggaugaguu

SEQ ID NO: 47812 - RNA, 19 nt, Artificial Sequence
  Description of Artificial Sequence: Synthetic oligonucleotide
agagacgagucagucccuu

SEQ ID NO: 47813 - RNA, 19 nt, Artificial Sequence
  Description of Artificial Sequence: Synthetic oligonucleotide
gaggcacgccgaauuccug

SEQ ID NO: 47814 - RNA, 19 nt, Artificial Sequence
  Description of Artificial Sequence: Synthetic oligonucleotide
uagaggagucccggucaac

SEQ ID NO: 47815 - RNA, 19 nt, Artificial Sequence
  Description of Artificial Sequence: Synthetic oligonucleotide
gagucccggucaacuacac

SEQ ID NO: 47816 - RNA, 19 nt, Artificial Sequence
  Description of Artificial Sequence: Synthetic oligonucleotide
ucguaacaucugugcuccu

SEQ ID NO: 47817 - RNA, 19 nt, Artificial Sequence
  Description of Artificial Sequence: Synthetic oligonucleotide
cuacgacacccuaaccacu

SEQ ID NO: 47818 - RNA, 19 nt, Artificial Sequence
  Description of Artificial Sequence: Synthetic oligonucleotide
ggccuauuccuauguggga

SEQ ID NO: 47819 - RNA, 19 nt, Artificial Sequence
  Description of Artificial Sequence: Synthetic oligonucleotide
gcugugaugaaaugauauu

SEQ ID NO: 47820 - RNA, 19 nt, Artificial Sequence
  Description of Artificial Sequence: Synthetic oligonucleotide
guguggauagcaacauagu

SEQ ID NO: 47821 - RNA, 19 nt, Artificial Sequence
  Description of Artificial Sequence: Synthetic oligonucleotide
gaagggcgucacaucuaca

SEQ ID NO: 47822 - RNA, 19 nt, Artificial Sequence
  Description of Artificial Sequence: Synthetic oligonucleotide
cugcuagaccaccucuaaa

SEQ ID NO: 47823 - RNA, 19 nt, Artificial Sequence
  Description of Artificial Sequence: Synthetic oligonucleotide
ccccaaauuggaaccccac

SEQ ID NO: 47824 - RNA, 19 nt, Artificial Sequence
  Description of Artificial Sequence: Synthetic oligonucleotide
cggagaacaaagagugauc

SEQ ID NO: 47825 - RNA, 19 nt, Artificial Sequence
  Description of Artificial Sequence: Synthetic oligonucleotide
ggcauuuaaagagggcgcu

SEQ ID NO: 47826 - RNA, 19 nt, Artificial Sequence
  Description of Artificial Sequence: Synthetic oligonucleotide
ccccacuaauucuuuguca

SEQ ID NO: 47827 - RNA, 19 nt, Artificial Sequence
  Description of Artificial Sequence: Synthetic oligonucleotide
cagagcgaugaugguauaa

SEQ ID NO: 47828 - RNA, 19 nt, Artificial Sequence
  Description of Artificial Sequence: Synthetic oligonucleotide
agagggcgcugcaacuaga

SEQ ID NO: 47829 - RNA, 19 nt, Artificial Sequence
  Description of Artificial Sequence: Synthetic oligonucleotide
ccaauaagguccggcugac

SEQ ID NO: 47830 - RNA, 19 nt, Artificial Sequence
  Description of Artificial Sequence: Synthetic oligonucleotide
ccaaccaacgucacaggcu

SEQ ID NO: 47831 - RNA, 19 nt, Artificial Sequence
  Description of Artificial Sequence: Synthetic oligonucleotide
cccggucaacuacacuggc

SEQ ID NO: 47832 - RNA, 19 nt, Artificial Sequence
  Description of Artificial Sequence: Synthetic oligonucleotide
cacuucccuuuagccgggg

SEQ ID NO: 47833 - RNA, 19 nt, Artificial Sequence
  Description of Artificial Sequence: Synthetic oligonucleotide
ggcuucgaccaaguauaac

SEQ ID NO: 47834 - RNA, 19 nt, Artificial Sequence
  Description of Artificial Sequence: Synthetic oligonucleotide
caacuagaggagucccggu

SEQ ID NO: 47835 - RNA, 19 nt, Artificial Sequence
  Description of Artificial Sequence: Synthetic oligonucleotide
gguaagcccacuccaucau

SEQ ID NO: 47836 - RNA, 19 nt, Artificial Sequence
  Description of Artificial Sequence: Synthetic oligonucleotide
gacaagccaucaugcuuuu

SEQ ID NO: 47837 - RNA, 19 nt, Artificial Sequence
  Description of Artificial Sequence: Synthetic oligonucleotide
cucccuacagagccccaua

SEQ ID NO: 47838 - RNA, 19 nt, Artificial Sequence
  Description of Artificial Sequence: Synthetic oligonucleotide
ggccucaguuggaagucac

SEQ ID NO: 47839 - RNA, 19 nt, Artificial Sequence
  Description of Artificial Sequence: Synthetic oligonucleotide
gagacgagucagucccuuu

SEQ ID NO: 47840 - RNA, 19 nt, Artificial Sequence
  Description of Artificial Sequence: Synthetic oligonucleotide
aggcuucgaccaaguauaa

SEQ ID NO: 47841 - RNA, 19 nt, Artificial Sequence
  Description of Artificial Sequence: Synthetic oligonucleotide
cguuaaagcuagcuuuaaa

SEQ ID NO: 47842 - RNA, 19 nt, Artificial Sequence
  Description of Artificial Sequence: Synthetic oligonucleotide
gcacuuuaucccagagcga

SEQ ID NO: 47843 - RNA, 19 nt, Artificial Sequence
  Description of Artificial Sequence: Synthetic oligonucleotide
cguggccuauuccuaugug

SEQ ID NO: 47844 - RNA, 19 nt, Artificial Sequence
  Description of Artificial Sequence: Synthetic oligonucleotide
gccgaauuccugcaaccau

SEQ ID NO: 47845 - RNA, 19 nt, Artificial Sequence
  Description of Artificial Sequence: Synthetic oligonucleotide
cagucugcauaggagcaau

SEQ ID NO: 47846 - RNA, 19 nt, Artificial Sequence
  Description of Artificial Sequence: Synthetic oligonucleotide
ccaaccacaaggugggguu

SEQ ID NO: 47847 - RNA, 19 nt, Artificial Sequence
  Description of Artificial Sequence: Synthetic oligonucleotide
gccuaacuugcuguaaaau

SEQ ID NO: 47848 - RNA, 19 nt, Artificial Sequence
  Description of Artificial Sequence: Synthetic oligonucleotide
ccauuccguuaaagcuagc

SEQ ID NO: 47849 - RNA, 19 nt, Artificial Sequence
  Description of Artificial Sequence: Synthetic oligonucleotide
gggauccauuggccuucag

SEQ ID NO: 47850 - RNA, 19 nt, Artificial Sequence
  Description of Artificial Sequence: Synthetic oligonucleotide
cauuuggaccuggcacaaa

SEQ ID NO: 47851 - RNA, 19 nt, Artificial Sequence
  Description of Artificial Sequence: Synthetic oligonucleotide
ccgaauuccugcaaccauu

SEQ ID NO: 47852 - RNA, 19 nt, Artificial Sequence
  Description of Artificial Sequence: Synthetic oligonucleotide
ccgggauccauuggccuuc

SEQ ID NO: 47853 - RNA, 19 nt, Artificial Sequence
  Description of Artificial Sequence: Synthetic oligonucleotide
cgaccaaguauaaccacau

SEQ ID NO: 47854 - RNA, 19 nt, Artificial Sequence
  Description of Artificial Sequence: Synthetic oligonucleotide
ccuaaggcauagccacaaa

SEQ ID NO: 47855 - RNA, 19 nt, Artificial Sequence
  Description of Artificial Sequence: Synthetic oligonucleotide
ccuuuagccggggaugagu

SEQ ID NO: 47856 - RNA, 19 nt, Artificial Sequence
  Description of Artificial Sequence: Synthetic oligonucleotide
gcacgccgaauuccugcaa

SEQ ID NO: 47857 - RNA, 19 nt, Artificial Sequence
  Description of Artificial Sequence: Synthetic oligonucleotide
ccguuaaagcuagcuuuaa

SEQ ID NO: 47858 - RNA, 19 nt, Artificial Sequence
  Description of Artificial Sequence: Synthetic oligonucleotide
cccaaacauaggaguacau

SEQ ID NO: 47859 - RNA, 19 nt, Artificial Sequence
  Description of Artificial Sequence: Synthetic oligonucleotide
cgacacccuaaccacugua

SEQ ID NO: 47860 - RNA, 19 nt, Artificial Sequence
  Description of Artificial Sequence: Synthetic oligonucleotide
ccccaauagucguggccua

SEQ ID NO: 47861 - RNA, 19 nt, Artificial Sequence
  Description of Artificial Sequence: Synthetic oligonucleotide
ccaauagucguggccuauu

SEQ ID NO: 47862 - RNA, 19 nt, Artificial Sequence
  Description of Artificial Sequence: Synthetic oligonucleotide
cgucacaggcuucgaccaa

SEQ ID NO: 47863 - RNA, 19 nt, Artificial Sequence
  Description of Artificial Sequence: Synthetic oligonucleotide
cccaauagucguggccuau

SEQ ID NO: 47864 - RNA, 19 nt, Artificial Sequence
  Description of Artificial Sequence: Synthetic oligonucleotide
cgggauccauuggccuuca

SEQ ID NO: 47865 - RNA, 19 nt, Artificial Sequence
  Description of Artificial Sequence: Synthetic oligonucleotide
aauaaaucgaaauacuggc

SEQ ID NO: 47866 - RNA, 19 nt, Artificial Sequence
  Description of Artificial Sequence: Synthetic oligonucleotide
aaagcuaagagccuaaucu

SEQ ID NO: 47867 - RNA, 19 nt, Artificial Sequence
  Description of Artificial Sequence: Synthetic oligonucleotide
auuaauuauauauaugcug

SEQ ID NO: 47868 - RNA, 19 nt, Artificial Sequence
  Description of Artificial Sequence: Synthetic oligonucleotide
aagcaggauaaauaaaucg

SEQ ID NO: 47869 - RNA, 19 nt, Artificial Sequence
  Description of Artificial Sequence: Synthetic oligonucleotide
uauauauauauauauauua

SEQ ID NO: 47870 - RNA, 19 nt, Artificial Sequence
  Description of Artificial Sequence: Synthetic oligonucleotide
uguauauauauauauauau

SEQ ID NO: 47871 - RNA, 19 nt, Artificial Sequence
  Description of Artificial Sequence: Synthetic oligonucleotide
aauucaagagccuuguuga

SEQ ID NO: 47872 - RNA, 19 nt, Artificial Sequence
  Description of Artificial Sequence: Synthetic oligonucleotide
uauauauguauauauauau

SEQ ID NO: 47873 - RNA, 19 nt, Artificial Sequence
  Description of Artificial Sequence: Synthetic oligonucleotide
aucucugacgcacagauac

SEQ ID NO: 47874 - RNA, 19 nt, Artificial Sequence
  Description of Artificial Sequence: Synthetic oligonucleotide
uauauguauauauauauau

SEQ ID NO: 47875 - RNA, 19 nt, Artificial Sequence
  Description of Artificial Sequence: Synthetic oligonucleotide
uauauauauauauuaauua

SEQ ID NO: 47876 - RNA, 19 nt, Artificial Sequence
  Description of Artificial Sequence: Synthetic oligonucleotide
uuuauauauguauauauau

SEQ ID NO: 47877 - RNA, 19 nt, Artificial Sequence
  Description of Artificial Sequence: Synthetic oligonucleotide
uauguauauauauauauau

SEQ ID NO: 47878 - RNA, 19 nt, Artificial Sequence
  Description of Artificial Sequence: Synthetic oligonucleotide
ugcuauuccaucuaaaaca

SEQ ID NO: 47879 - RNA, 19 nt, Artificial Sequence
  Description of Artificial Sequence: Synthetic oligonucleotide
auaaugguaaaguggauag

SEQ ID NO: 47880 - RNA, 19 nt, Artificial Sequence
  Description of Artificial Sequence: Synthetic oligonucleotide
uaaaucgaaauacuggcca

SEQ ID NO: 47881 - RNA, 19 nt, Artificial Sequence
  Description of Artificial Sequence: Synthetic oligonucleotide
uguaacguucuacagaugu

SEQ ID NO: 47882 - RNA, 19 nt, Artificial Sequence
  Description of Artificial Sequence: Synthetic oligonucleotide
uaugaaauauggcuuucgg

SEQ ID NO: 47883 - RNA, 19 nt, Artificial Sequence
  Description of Artificial Sequence: Synthetic oligonucleotide
cauacaaucacccggacac

SEQ ID NO: 47884 - RNA, 19 nt, Artificial Sequence
  Description of Artificial Sequence: Synthetic oligonucleotide
auauauauauauuaauuau

SEQ ID NO: 47885 - RNA, 19 nt, Artificial Sequence
  Description of Artificial Sequence: Synthetic oligonucleotide
aaauacgaagucuacauuu

SEQ ID NO: 47886 - RNA, 19 nt, Artificial Sequence
  Description of Artificial Sequence: Synthetic oligonucleotide
ugaaauauggcuuucggua

SEQ ID NO: 47887 - RNA, 19 nt, Artificial Sequence
  Description of Artificial Sequence: Synthetic oligonucleotide
aaaucgaaauacuggccac

SEQ ID NO: 47888 - RNA, 19 nt, Artificial Sequence
  Description of Artificial Sequence: Synthetic oligonucleotide
uauauauauauauauuaau

SEQ ID NO: 47889 - RNA, 19 nt, Artificial Sequence
  Description of Artificial Sequence: Synthetic oligonucleotide
aaagaaacgagucacuguu

SEQ ID NO: 47890 - RNA, 19 nt, Artificial Sequence
  Description of Artificial Sequence: Synthetic oligonucleotide
agcaucguugccuacagac

SEQ ID NO: 47891 - RNA, 19 nt, Artificial Sequence
  Description of Artificial Sequence: Synthetic oligonucleotide
uuuauacaguaaaagcacc

SEQ ID NO: 47892 - RNA, 19 nt, Artificial Sequence
  Description of Artificial Sequence: Synthetic oligonucleotide
ucgaauguggagaagggcc

SEQ ID NO: 47893 - RNA, 19 nt, Artificial Sequence
  Description of Artificial Sequence: Synthetic oligonucleotide
ugguaaaguggauagauac

SEQ ID NO: 47894 - RNA, 19 nt, Artificial Sequence
  Description of Artificial Sequence: Synthetic oligonucleotide
acaauguucaaaggaagcc

SEQ ID NO: 47895 - RNA, 19 nt, Artificial Sequence
  Description of Artificial Sequence: Synthetic oligonucleotide
uuuaguccauauaauacac

SEQ ID NO: 47896 - RNA, 19 nt, Artificial Sequence
  Description of Artificial Sequence: Synthetic oligonucleotide
agauacuuguaacugugac

SEQ ID NO: 47897 - RNA, 19 nt, Artificial Sequence
  Description of Artificial Sequence: Synthetic oligonucleotide
uucgguagacauuaagggg

SEQ ID NO: 47898 - RNA, 19 nt, Artificial Sequence
  Description of Artificial Sequence: Synthetic oligonucleotide
uagauaaaagagcauauua

SEQ ID NO: 47899 - RNA, 19 nt, Artificial Sequence
  Description of Artificial Sequence: Synthetic oligonucleotide
uuauauauguauauauaua

SEQ ID NO: 47900 - RNA, 19 nt, Artificial Sequence
  Description of Artificial Sequence: Synthetic oligonucleotide
uccggaagagaacugacag

SEQ ID NO: 47901 - RNA, 19 nt, Artificial Sequence
  Description of Artificial Sequence: Synthetic oligonucleotide
auaacugugccacuuaccu

SEQ ID NO: 47902 - RNA, 19 nt, Artificial Sequence
  Description of Artificial Sequence: Synthetic oligonucleotide
uuaaggggaagcaugacau

SEQ ID NO: 47903 - RNA, 19 nt, Artificial Sequence
  Description of Artificial Sequence: Synthetic oligonucleotide
aacugugccacuuaccuau

SEQ ID NO: 47904 - RNA, 19 nt, Artificial Sequence
  Description of Artificial Sequence: Synthetic oligonucleotide
cuaaucucgagccagggug

SEQ ID NO: 47905 - RNA, 19 nt, Artificial Sequence
  Description of Artificial Sequence: Synthetic oligonucleotide
ugaaggauaauguguaagu

SEQ ID NO: 47906 - RNA, 19 nt, Artificial Sequence
  Description of Artificial Sequence: Synthetic oligonucleotide
aaucgaaauacuggccacc

SEQ ID NO: 47907 - RNA, 19 nt, Artificial Sequence
  Description of Artificial Sequence: Synthetic oligonucleotide
acccguuuauuuucaaugc

SEQ ID NO: 47908 - RNA, 19 nt, Artificial Sequence
  Description of Artificial Sequence: Synthetic oligonucleotide
ucuucaauagagagcagga

SEQ ID NO: 47909 - RNA, 19 nt, Artificial Sequence
  Description of Artificial Sequence: Synthetic oligonucleotide
aaugguaaaguggauagau

SEQ ID NO: 47910 - RNA, 19 nt, Artificial Sequence
  Description of Artificial Sequence: Synthetic oligonucleotide
agcacgcagaccuaggaac

SEQ ID NO: 47911 - RNA, 19 nt, Artificial Sequence
  Description of Artificial Sequence: Synthetic oligonucleotide
aaagauacuuguaacugug

SEQ ID NO: 47912 - RNA, 19 nt, Artificial Sequence
  Description of Artificial Sequence: Synthetic oligonucleotide
agccacacuagaaagauac

SEQ ID NO: 47913 - RNA, 19 nt, Artificial Sequence
  Description of Artificial Sequence: Synthetic oligonucleotide
uauugggcuggaaaucugg

SEQ ID NO: 47914 - RNA, 19 nt, Artificial Sequence
  Description of Artificial Sequence: Synthetic oligonucleotide
aguggauagauacuuguca

SEQ ID NO: 47915 - RNA, 19 nt, Artificial Sequence
  Description of Artificial Sequence: Synthetic oligonucleotide
aacccaaguacuaacuagg

SEQ ID NO: 47916 - RNA, 19 nt, Artificial Sequence
  Description of Artificial Sequence: Synthetic oligonucleotide
cacagacuaugaaauaugg

SEQ ID NO: 47917 - RNA, 19 nt, Artificial Sequence
  Description of Artificial Sequence: Synthetic oligonucleotide
uuuaguguagcugauuggu

SEQ ID NO: 47918 - RNA, 19 nt, Artificial Sequence
  Description of Artificial Sequence: Synthetic oligonucleotide
ucuuagauccuacaguuuu

SEQ ID NO: 47919 - RNA, 19 nt, Artificial Sequence
  Description of Artificial Sequence: Synthetic oligonucleotide
aacaucucgaauguggaga

SEQ ID NO: 47920 - RNA, 19 nt, Artificial Sequence
  Description of Artificial Sequence: Synthetic oligonucleotide
ugguauggcacaaacagua

SEQ ID NO: 47921 - RNA, 19 nt, Artificial Sequence
  Description of Artificial Sequence: Synthetic oligonucleotide
uuugacuuuaguguagcug

SEQ ID NO: 47922 - RNA, 19 nt, Artificial Sequence
  Description of Artificial Sequence: Synthetic oligonucleotide
acgaccucuggguaaaugg

SEQ ID NO: 47923 - RNA, 19 nt, Artificial Sequence
  Description of Artificial Sequence: Synthetic oligonucleotide
caaguagcuuucaagcagg

SEQ ID NO: 47924 - RNA, 19 nt, Artificial Sequence
  Description of Artificial Sequence: Synthetic oligonucleotide
auauauauauauauuaauu

SEQ ID NO: 47925 - RNA, 19 nt, Artificial Sequence
  Description of Artificial Sequence: Synthetic oligonucleotide
cuacagacgggucaguggg

SEQ ID NO: 47926 - RNA, 19 nt, Artificial Sequence
  Description of Artificial Sequence: Synthetic oligonucleotide
caucguugccuacagacgg

SEQ ID NO: 47927 - RNA, 19 nt, Artificial Sequence
  Description of Artificial Sequence: Synthetic oligonucleotide
auacuuguaacugugacau

SEQ ID NO: 47928 - RNA, 19 nt, Artificial Sequence
  Description of Artificial Sequence: Synthetic oligonucleotide
auauauaugcuggagacaa

SEQ ID NO: 47929 - RNA, 19 nt, Artificial Sequence
  Description of Artificial Sequence: Synthetic oligonucleotide
aauccaugcaagaagucug

SEQ ID NO: 47930 - RNA, 19 nt, Artificial Sequence
  Description of Artificial Sequence: Synthetic oligonucleotide
gacauuaaggggaagcaug

SEQ ID NO: 47931 - RNA, 19 nt, Artificial Sequence
  Description of Artificial Sequence: Synthetic oligonucleotide
uaauuauauauaugcugga

SEQ ID NO: 47932 - RNA, 19 nt, Artificial Sequence
  Description of Artificial Sequence: Synthetic oligonucleotide
cauuuuacucuuaugcauc

SEQ ID NO: 47933 - RNA, 19 nt, Artificial Sequence
  Description of Artificial Sequence: Synthetic oligonucleotide
ugggguaucaaaacacaca

SEQ ID NO: 47934 - RNA, 19 nt, Artificial Sequence
  Description of Artificial Sequence: Synthetic oligonucleotide
uauguugguacuuaacauu

SEQ ID NO: 47935 - RNA, 19 nt, Artificial Sequence
  Description of Artificial Sequence: Synthetic oligonucleotide
ucacuaaagcauaaaguua

SEQ ID NO: 47936 - RNA, 19 nt, Artificial Sequence
  Description of Artificial Sequence: Synthetic oligonucleotide
ugauugguauggcacaaac

SEQ ID NO: 47937 - RNA, 19 nt, Artificial Sequence
  Description of Artificial Sequence: Synthetic oligonucleotide
acacugacgaagcuucugg

SEQ ID NO: 47938 - RNA, 19 nt, Artificial Sequence
  Description of Artificial Sequence: Synthetic oligonucleotide
uugaguugcgguacaagga

SEQ ID NO: 47939 - RNA, 19 nt, Artificial Sequence
  Description of Artificial Sequence: Synthetic oligonucleotide
gcuucauacaaucacccgg

SEQ ID NO: 47940 - RNA, 19 nt, Artificial Sequence
  Description of Artificial Sequence: Synthetic oligonucleotide
caaugggguaucaaaacac

SEQ ID NO: 47941 - RNA, 19 nt, Artificial Sequence
  Description of Artificial Sequence: Synthetic oligonucleotide
auauauauauauauauuaa

SEQ ID NO: 47942 - RNA, 19 nt, Artificial Sequence
  Description of Artificial Sequence: Synthetic oligonucleotide
guaacugugacaucucuga

SEQ ID NO: 47943 - RNA, 19 nt, Artificial Sequence
  Description of Artificial Sequence: Synthetic oligonucleotide
aaauauggcuuucgguaga

SEQ ID NO: 47944 - RNA, 19 nt, Artificial Sequence
  Description of Artificial Sequence: Synthetic oligonucleotide
uaucaagccauguauuguc

SEQ ID NO: 47945 - RNA, 19 nt, Artificial Sequence
  Description of Artificial Sequence: Synthetic oligonucleotide
ugcgguacaaggauggaaa

SEQ ID NO: 47946 - RNA, 19 nt, Artificial Sequence
  Description of Artificial Sequence: Synthetic oligonucleotide
ggcuuaauguauuguaacg

SEQ ID NO: 47947 - RNA, 19 nt, Artificial Sequence
  Description of Artificial Sequence: Synthetic oligonucleotide
gauagcuugcuuuccacga

SEQ ID NO: 47948 - RNA, 19 nt, Artificial Sequence
  Description of Artificial Sequence: Synthetic oligonucleotide
caguacacaucucaaguag

SEQ ID NO: 47949 - RNA, 19 nt, Artificial Sequence
  Description of Artificial Sequence: Synthetic oligonucleotide
cagacuaugaaauauggcu

SEQ ID NO: 47950 - RNA, 19 nt, Artificial Sequence
  Description of Artificial Sequence: Synthetic oligonucleotide
aucgaaauacuggccaccc

SEQ ID NO: 47951 - RNA, 19 nt, Artificial Sequence
  Description of Artificial Sequence: Synthetic oligonucleotide
acagacuaugaaauauggc

SEQ ID NO: 47952 - RNA, 19 nt, Artificial Sequence
  Description of Artificial Sequence: Synthetic oligonucleotide
aagcuuaauccaugcaaga

SEQ ID NO: 47953 - RNA, 19 nt, Artificial Sequence
  Description of Artificial Sequence: Synthetic oligonucleotide
ugaguugcgguacaaggau

SEQ ID NO: 47954 - RNA, 19 nt, Artificial Sequence
  Description of Artificial Sequence: Synthetic oligonucleotide
uuuuaacccaugcuucuuc

SEQ ID NO: 47955 - RNA, 19 nt, Artificial Sequence
  Description of Artificial Sequence: Synthetic oligonucleotide
uaaagacgagaguucaaac

SEQ ID NO: 47956 - RNA, 19 nt, Artificial Sequence
  Description of Artificial Sequence: Synthetic oligonucleotide
agacucauaauguacucau

SEQ ID NO: 47957 - RNA, 19 nt, Artificial Sequence
  Description of Artificial Sequence: Synthetic oligonucleotide
ucgaaacauguuaacugca

SEQ ID NO: 47958 - RNA, 19 nt, Artificial Sequence
  Description of Artificial Sequence: Synthetic oligonucleotide
ugcagugcgcccaaaggca

SEQ ID NO: 47959 - RNA, 19 nt, Artificial Sequence
  Description of Artificial Sequence: Synthetic oligonucleotide
gacgcacagauacauuuug

SEQ ID NO: 47960 - RNA, 19 nt, Artificial Sequence
  Description of Artificial Sequence: Synthetic oligonucleotide
agcuucauacaaucacccg

SEQ ID NO: 47961 - RNA, 19 nt, Artificial Sequence
  Description of Artificial Sequence: Synthetic oligonucleotide
auuaguucauggauacccg

SEQ ID NO: 47962 - RNA, 19 nt, Artificial Sequence
  Description of Artificial Sequence: Synthetic oligonucleotide
aaaccagccuccauuuuag

SEQ ID NO: 47963 - RNA, 19 nt, Artificial Sequence
  Description of Artificial Sequence: Synthetic oligonucleotide
uuaucagcuugguaaugug

SEQ ID NO: 47964 - RNA, 19 nt, Artificial Sequence
  Description of Artificial Sequence: Synthetic oligonucleotide
aaugggguaucaaaacaca

SEQ ID NO: 47965 - RNA, 19 nt, Artificial Sequence
  Description of Artificial Sequence: Synthetic oligonucleotide
agguucgaaacauguuaac

SEQ ID NO: 47966 - RNA, 19 nt, Artificial Sequence
  Description of Artificial Sequence: Synthetic oligonucleotide
uuagacucauaauguacuc

SEQ ID NO: 47967 - RNA, 19 nt, Artificial Sequence
  Description of Artificial Sequence: Synthetic oligonucleotide
aguggcuuaauguauugua

SEQ ID NO: 47968 - RNA, 19 nt, Artificial Sequence
  Description of Artificial Sequence: Synthetic oligonucleotide
uauuugagaagugccauua

SEQ ID NO: 47969 - RNA, 19 nt, Artificial Sequence
  Description of Artificial Sequence: Synthetic oligonucleotide
uggggauucgcuuuggcua

SEQ ID NO: 47970 - RNA, 19 nt, Artificial Sequence
  Description of Artificial Sequence: Synthetic oligonucleotide
aguugcgguacaaggaugg

SEQ ID NO: 47971 - RNA, 19 nt, Artificial Sequence
  Description of Artificial Sequence: Synthetic oligonucleotide
aaaccuagaccagcaaugu

SEQ ID NO: 47972 - RNA, 19 nt, Artificial Sequence
  Description of Artificial Sequence: Synthetic oligonucleotide
agcuaagagccuaaucucg

SEQ ID NO: 47973 - RNA, 19 nt, Artificial Sequence
  Description of Artificial Sequence: Synthetic oligonucleotide
auuagauaaaagagcauau

SEQ ID NO: 47974 - RNA, 19 nt, Artificial Sequence
  Description of Artificial Sequence: Synthetic oligonucleotide
gaaagcuaagagccuaauc

SEQ ID NO: 47975 - RNA, 19 nt, Artificial Sequence
  Description of Artificial Sequence: Synthetic oligonucleotide
agagcugcucgcuucaccu

SEQ ID NO: 47976 - RNA, 19 nt, Artificial Sequence
  Description of Artificial Sequence: Synthetic oligonucleotide
gaaacaccuuggaaggucc

SEQ ID NO: 47977 - RNA, 19 nt, Artificial Sequence
  Description of Artificial Sequence: Synthetic oligonucleotide
uugguauggcacaaacagu

SEQ ID NO: 47978 - RNA, 19 nt, Artificial Sequence
  Description of Artificial Sequence: Synthetic oligonucleotide
gaaagauacuuguaacugu

SEQ ID NO: 47979 - RNA, 19 nt, Artificial Sequence
  Description of Artificial Sequence: Synthetic oligonucleotide
uuagauaaaagagcauauu

SEQ ID NO: 47980 - RNA, 19 nt, Artificial Sequence
  Description of Artificial Sequence: Synthetic oligonucleotide
cugcagugcgcccaaaggc

SEQ ID NO: 47981 - RNA, 19 nt, Artificial Sequence
  Description of Artificial Sequence: Synthetic oligonucleotide
cuaagagccuaaucucgag

SEQ ID NO: 47982 - RNA, 19 nt, Artificial Sequence
  Description of Artificial Sequence: Synthetic oligonucleotide
aagaaacgagucacuguuc

SEQ ID NO: 47983 - RNA, 19 nt, Artificial Sequence
  Description of Artificial Sequence: Synthetic oligonucleotide
ccaguauuugagaagugcc

SEQ ID NO: 47984 - RNA, 19 nt, Artificial Sequence
  Description of Artificial Sequence: Synthetic oligonucleotide
auauugaguaauacucuug

SEQ ID NO: 47985 - RNA, 19 nt, Artificial Sequence
  Description of Artificial Sequence: Synthetic oligonucleotide
ggauaucugagacucuacc

SEQ ID NO: 47986 - RNA, 19 nt, Artificial Sequence
  Description of Artificial Sequence: Synthetic oligonucleotide
ccguuuauuuucaaugcgg

SEQ ID NO: 47987 - RNA, 19 nt, Artificial Sequence
  Description of Artificial Sequence: Synthetic oligonucleotide
augggguaucaaaacacac

SEQ ID NO: 47988 - RNA, 19 nt, Artificial Sequence
  Description of Artificial Sequence: Synthetic oligonucleotide
ugugaaagcuaagagccua

SEQ ID NO: 47989 - RNA, 19 nt, Artificial Sequence
  Description of Artificial Sequence: Synthetic oligonucleotide
aguuucagggcauuauaua

SEQ ID NO: 47990 - RNA, 19 nt, Artificial Sequence
  Description of Artificial Sequence: Synthetic oligonucleotide
acucuaccagcuaaagacg

SEQ ID NO: 47991 - RNA, 19 nt, Artificial Sequence
  Description of Artificial Sequence: Synthetic oligonucleotide
aguacuaacuagggaaacu

SEQ ID NO: 47992 - RNA, 19 nt, Artificial Sequence
  Description of Artificial Sequence: Synthetic oligonucleotide
auauguauauauauauaua

SEQ ID NO: 47993 - RNA, 19 nt, Artificial Sequence
  Description of Artificial Sequence: Synthetic oligonucleotide
auaucaagccauguauugu

SEQ ID NO: 47994 - RNA, 19 nt, Artificial Sequence
  Description of Artificial Sequence: Synthetic oligonucleotide
ccaaguacuaacuagggaa

SEQ ID NO: 47995 - RNA, 19 nt, Artificial Sequence
  Description of Artificial Sequence: Synthetic oligonucleotide
uuaguguagcugauuggua

SEQ ID NO: 47996 - RNA, 19 nt, Artificial Sequence
  Description of Artificial Sequence: Synthetic oligonucleotide
auacccgagaccacaauug

SEQ ID NO: 47997 - RNA, 19 nt, Artificial Sequence
  Description of Artificial Sequence: Synthetic oligonucleotide
cacauugcgguugugggug

SEQ ID NO: 47998 - RNA, 19 nt, Artificial Sequence
  Description of Artificial Sequence: Synthetic oligonucleotide
uuagauccuacaguuuuau

SEQ ID NO: 47999 - RNA, 19 nt, Artificial Sequence
  Description of Artificial Sequence: Synthetic oligonucleotide
cucaaguagcuuucaagca

SEQ ID NO: 48000 - RNA, 19 nt, Artificial Sequence
  Description of Artificial Sequence: Synthetic oligonucleotide
gagccuaaucucgagccag

SEQ ID NO: 48001 - RNA, 19 nt, Artificial Sequence
  Description of Artificial Sequence: Synthetic oligonucleotide
auguguaaguagaugagaa

SEQ ID NO: 48002 - RNA, 19 nt, Artificial Sequence
  Description of Artificial Sequence: Synthetic oligonucleotide
auauauguauauauauaua

SEQ ID NO: 48003 - RNA, 19 nt, Artificial Sequence
  Description of Artificial Sequence: Synthetic oligonucleotide
ucacauugcgguugugggu

SEQ ID NO: 48004 - RNA, 19 nt, Artificial Sequence
  Description of Artificial Sequence: Synthetic oligonucleotide
uccaauagaaaggcucacu

SEQ ID NO: 48005 - RNA, 19 nt, Artificial Sequence
  Description of Artificial Sequence: Synthetic oligonucleotide
cacaucucaaguagcuuuc

SEQ ID NO: 48006 - RNA, 19 nt, Artificial Sequence
  Description of Artificial Sequence: Synthetic oligonucleotide
uggguacagucaucgaaga

SEQ ID NO: 48007 - RNA, 19 nt, Artificial Sequence
  Description of Artificial Sequence: Synthetic oligonucleotide
auguauauauauauauaua

SEQ ID NO: 48008 - RNA, 19 nt, Artificial Sequence
  Description of Artificial Sequence: Synthetic oligonucleotide
uucuaacguugguucaucu

SEQ ID NO: 48009 - RNA, 19 nt, Artificial Sequence
  Description of Artificial Sequence: Synthetic oligonucleotide
guacaaaauacgaagucua

SEQ ID NO: 48010 - RNA, 19 nt, Artificial Sequence
  Description of Artificial Sequence: Synthetic oligonucleotide
gagacucuaccagcuaaag

SEQ ID NO: 48011 - RNA, 19 nt, Artificial Sequence
  Description of Artificial Sequence: Synthetic oligonucleotide
uauauaugcuggagacaaa

SEQ ID NO: 48012 - RNA, 19 nt, Artificial Sequence
  Description of Artificial Sequence: Synthetic oligonucleotide
uuuccacgaagggcaaagg

SEQ ID NO: 48013 - RNA, 19 nt, Artificial Sequence
  Description of Artificial Sequence: Synthetic oligonucleotide
acauuaaggggaagcauga

SEQ ID NO: 48014 - RNA, 19 nt, Artificial Sequence
  Description of Artificial Sequence: Synthetic oligonucleotide
guagcugauugguauggca

SEQ ID NO: 48015 - RNA, 19 nt, Artificial Sequence
  Description of Artificial Sequence: Synthetic oligonucleotide
agacuaugaaauauggcuu

SEQ ID NO: 48016 - RNA, 19 nt, Artificial Sequence
  Description of Artificial Sequence: Synthetic oligonucleotide
gaagugccauuaccacugg

SEQ ID NO: 48017 - RNA, 19 nt, Artificial Sequence
  Description of Artificial Sequence: Synthetic oligonucleotide
uaaugguaaaguggauaga

SEQ ID NO: 48018 - RNA, 19 nt, Artificial Sequence
  Description of Artificial Sequence: Synthetic oligonucleotide
agccauacaaagccacacu

SEQ ID NO: 48019 - RNA, 19 nt, Artificial Sequence
  Description of Artificial Sequence: Synthetic oligonucleotide
uggcuuucgguagacauua

SEQ ID NO: 48020 - RNA, 19 nt, Artificial Sequence
  Description of Artificial Sequence: Synthetic oligonucleotide
cucgaauguggagaagggc

SEQ ID NO: 48021 - RNA, 19 nt, Artificial Sequence
  Description of Artificial Sequence: Synthetic oligonucleotide
cauccggaagagaacugac

SEQ ID NO: 48022 - RNA, 19 nt, Artificial Sequence
  Description of Artificial Sequence: Synthetic oligonucleotide
acccaaguacuaacuaggg

SEQ ID NO: 48023 - RNA, 19 nt, Artificial Sequence
  Description of Artificial Sequence: Synthetic oligonucleotide
acaccagggauaucugaga

SEQ ID NO: 48024 - RNA, 19 nt, Artificial Sequence
  Description of Artificial Sequence: Synthetic oligonucleotide
cuaaagacgagaguucaaa

SEQ ID NO: 48025 - RNA, 19 nt, Artificial Sequence
  Description of Artificial Sequence: Synthetic oligonucleotide
uugccuacagacgggucag

SEQ ID NO: 48026 - RNA, 19 nt, Artificial Sequence
  Description of Artificial Sequence: Synthetic oligonucleotide
auguugguacuuaacauuu

SEQ ID NO: 48027 - RNA, 19 nt, Artificial Sequence
  Description of Artificial Sequence: Synthetic oligonucleotide
acgaagggcaaaggagucg

SEQ ID NO: 48028 - RNA, 19 nt, Artificial Sequence
  Description of Artificial Sequence: Synthetic oligonucleotide
ugcaaacauguggacgacc

SEQ ID NO: 48029 - RNA, 19 nt, Artificial Sequence
  Description of Artificial Sequence: Synthetic oligonucleotide
auauaucaagccauguauu

SEQ ID NO: 48030 - RNA, 19 nt, Artificial Sequence
  Description of Artificial Sequence: Synthetic oligonucleotide
auacgaagucuacauuuua

SEQ ID NO: 48031 - RNA, 19 nt, Artificial Sequence
  Description of Artificial Sequence: Synthetic oligonucleotide
agagcauauuaaauggcaa

SEQ ID NO: 48032 - RNA, 19 nt, Artificial Sequence
  Description of Artificial Sequence: Synthetic oligonucleotide
accagcuaaagacgagagu

SEQ ID NO: 48033 - RNA, 19 nt, Artificial Sequence
  Description of Artificial Sequence: Synthetic oligonucleotide
accagggauaucugagacu

SEQ ID NO: 48034 - RNA, 19 nt, Artificial Sequence
  Description of Artificial Sequence: Synthetic oligonucleotide
uuguaacguucuacagaug

SEQ ID NO: 48035 - RNA, 19 nt, Artificial Sequence
  Description of Artificial Sequence: Synthetic oligonucleotide
ugacgcacagauacauuuu

SEQ ID NO: 48036 - RNA, 19 nt, Artificial Sequence
  Description of Artificial Sequence: Synthetic oligonucleotide
uucccaguaggcagcuaga

SEQ ID NO: 48037 - RNA, 19 nt, Artificial Sequence
  Description of Artificial Sequence: Synthetic oligonucleotide
gauagauacuugucaaguu

SEQ ID NO: 48038 - RNA, 19 nt, Artificial Sequence
  Description of Artificial Sequence: Synthetic oligonucleotide
ucacccguuuauuuucaau

SEQ ID NO: 48039 - RNA, 19 nt, Artificial Sequence
  Description of Artificial Sequence: Synthetic oligonucleotide
aaccuagaccagcaauguu

SEQ ID NO: 48040 - RNA, 19 nt, Artificial Sequence
  Description of Artificial Sequence: Synthetic oligonucleotide
aacgcagacacugcacuuu

SEQ ID NO: 48041 - RNA, 19 nt, Artificial Sequence
  Description of Artificial Sequence: Synthetic oligonucleotide
guauauauauauauauauu

SEQ ID NO: 48042 - RNA, 19 nt, Artificial Sequence
  Description of Artificial Sequence: Synthetic oligonucleotide
cacgaagggcaaaggaguc

SEQ ID NO: 48043 - RNA, 19 nt, Artificial Sequence
  Description of Artificial Sequence: Synthetic oligonucleotide
cccguuuauuuucaaugcg

SEQ ID NO: 48044 - RNA, 19 nt, Artificial Sequence
  Description of Artificial Sequence: Synthetic oligonucleotide
cuugcggcgcacaagggaa

SEQ ID NO: 48045 - RNA, 19 nt, Artificial Sequence
  Description of Artificial Sequence: Synthetic oligonucleotide
gagugcuaaguuuaaguuu

SEQ ID NO: 48046 - RNA, 19 nt, Artificial Sequence
  Description of Artificial Sequence: Synthetic oligonucleotide
ucgugcuauuccaucuaaa

SEQ ID NO: 48047 - RNA, 19 nt, Artificial Sequence
  Description of Artificial Sequence: Synthetic oligonucleotide
agugccauuaccacugguu

SEQ ID NO: 48048 - RNA, 19 nt, Artificial Sequence
  Description of Artificial Sequence: Synthetic oligonucleotide
acguucuacagauguggaa

SEQ ID NO: 48049 - RNA, 19 nt, Artificial Sequence
  Description of Artificial Sequence: Synthetic oligonucleotide
ugcggcgcacaagggaacg

SEQ ID NO: 48050 - RNA, 19 nt, Artificial Sequence
  Description of Artificial Sequence: Synthetic oligonucleotide
agccuguaacagcauguga

SEQ ID NO: 48051 - RNA, 19 nt, Artificial Sequence
  Description of Artificial Sequence: Synthetic oligonucleotide
ggaauucuuagauccuaca

SEQ ID NO: 48052 - RNA, 19 nt, Artificial Sequence
  Description of Artificial Sequence: Synthetic oligonucleotide
gaguucaaacaauggggua

SEQ ID NO: 48053 - RNA, 19 nt, Artificial Sequence
  Description of Artificial Sequence: Synthetic oligonucleotide
gcugcguugucacugauua

SEQ ID NO: 48054 - RNA, 19 nt, Artificial Sequence
  Description of Artificial Sequence: Synthetic oligonucleotide
gaguugcgguacaaggaug

SEQ ID NO: 48055 - RNA, 19 nt, Artificial Sequence
  Description of Artificial Sequence: Synthetic oligonucleotide
uacagacgggucaguggga

SEQ ID NO: 48056 - RNA, 19 nt, Artificial Sequence
  Description of Artificial Sequence: Synthetic oligonucleotide
ccacagacuaugaaauaug

SEQ ID NO: 48057 - RNA, 19 nt, Artificial Sequence
  Description of Artificial Sequence: Synthetic oligonucleotide
aucucacuuagagcugcuc

SEQ ID NO: 48058 - RNA, 19 nt, Artificial Sequence
  Description of Artificial Sequence: Synthetic oligonucleotide
ggcaaaggagucgccaggg

SEQ ID NO: 48059 - RNA, 19 nt, Artificial Sequence
  Description of Artificial Sequence: Synthetic oligonucleotide
ugaaagcuaagagccuaau

SEQ ID NO: 48060 - RNA, 19 nt, Artificial Sequence
  Description of Artificial Sequence: Synthetic oligonucleotide
agggaacgguccuucuuca

SEQ ID NO: 48061 - RNA, 19 nt, Artificial Sequence
  Description of Artificial Sequence: Synthetic oligonucleotide
agggauaucugagacucua

SEQ ID NO: 48062 - RNA, 19 nt, Artificial Sequence
  Description of Artificial Sequence: Synthetic oligonucleotide
uugcgguacaaggauggaa

SEQ ID NO: 48063 - RNA, 19 nt, Artificial Sequence
  Description of Artificial Sequence: Synthetic oligonucleotide
gcuauauugggcuggaaau

SEQ ID NO: 48064 - RNA, 19 nt, Artificial Sequence
  Description of Artificial Sequence: Synthetic oligonucleotide
gguaaaugggcucugugau

SEQ ID NO: 48065 - RNA, 19 nt, Artificial Sequence
  Description of Artificial Sequence: Synthetic oligonucleotide
cuaccagcuaaagacgaga

SEQ ID NO: 48066 - RNA, 19 nt, Artificial Sequence
  Description of Artificial Sequence: Synthetic oligonucleotide
aucguugccuacagacggg

SEQ ID NO: 48067 - RNA, 19 nt, Artificial Sequence
  Description of Artificial Sequence: Synthetic oligonucleotide
ggaaacuuuaauaggccaa

SEQ ID NO: 48068 - RNA, 19 nt, Artificial Sequence
  Description of Artificial Sequence: Synthetic oligonucleotide
ucgcccgccuuauuacaug

SEQ ID NO: 48069 - RNA, 19 nt, Artificial Sequence
  Description of Artificial Sequence: Synthetic oligonucleotide
ucccaguaggcagcuagac

SEQ ID NO: 48070 - RNA, 19 nt, Artificial Sequence
  Description of Artificial Sequence: Synthetic oligonucleotide
caagaaaccagccuccauu

SEQ ID NO: 48071 - RNA, 19 nt, Artificial Sequence
  Description of Artificial Sequence: Synthetic oligonucleotide
gcaucguugccuacagacg

SEQ ID NO: 48072 - RNA, 19 nt, Artificial Sequence
  Description of Artificial Sequence: Synthetic oligonucleotide
cucuaacagcgcagucugc

SEQ ID NO: 48073 - RNA, 19 nt, Artificial Sequence
  Description of Artificial Sequence: Synthetic oligonucleotide
ccaaacuuagagccuuaag

SEQ ID NO: 48074 - RNA, 19 nt, Artificial Sequence
  Description of Artificial Sequence: Synthetic oligonucleotide
caguuugguacagaaugga

SEQ ID NO: 48075 - RNA, 19 nt, Artificial Sequence
  Description of Artificial Sequence: Synthetic oligonucleotide
ucguugccuacagacgggu

SEQ ID NO: 48076 - RNA, 19 nt, Artificial Sequence
  Description of Artificial Sequence: Synthetic oligonucleotide
gacuugcggcgcacaaggg

SEQ ID NO: 48077 - RNA, 19 nt, Artificial Sequence
  Description of Artificial Sequence: Synthetic oligonucleotide
acaucucaaguagcuuuca

SEQ ID NO: 48078 - RNA, 19 nt, Artificial Sequence
  Description of Artificial Sequence: Synthetic oligonucleotide
uugcggcgcacaagggaac

SEQ ID NO: 48079 - RNA, 19 nt, Artificial Sequence
  Description of Artificial Sequence: Synthetic oligonucleotide
cacugagggcacucuaaca

SEQ ID NO: 48080 - RNA, 19 nt, Artificial Sequence
  Description of Artificial Sequence: Synthetic oligonucleotide
caucuagacuccagcggga

SEQ ID NO: 48081 - RNA, 19 nt, Artificial Sequence
  Description of Artificial Sequence: Synthetic oligonucleotide
gguucgaaacauguuaacu

SEQ ID NO: 48082 - RNA, 19 nt, Artificial Sequence
  Description of Artificial Sequence: Synthetic oligonucleotide
ugugugccuggggauucgc

SEQ ID NO: 48083 - RNA, 19 nt, Artificial Sequence
  Description of Artificial Sequence: Synthetic oligonucleotide
augguaaaguggauagaua

SEQ ID NO: 48084 - RNA, 19 nt, Artificial Sequence
  Description of Artificial Sequence: Synthetic oligonucleotide
agauucugugaaggguagu

SEQ ID NO: 48085 - RNA, 19 nt, Artificial Sequence
  Description of Artificial Sequence: Synthetic oligonucleotide
agacgagaguucaaacaau

SEQ ID NO: 48086 - RNA, 19 nt, Artificial Sequence
  Description of Artificial Sequence: Synthetic oligonucleotide
cagugcgcccaaaggcagc

SEQ ID NO: 48087 - RNA, 19 nt, Artificial Sequence
  Description of Artificial Sequence: Synthetic oligonucleotide
ggaacccaaguacuaacua

SEQ ID NO: 48088 - RNA, 19 nt, Artificial Sequence
  Description of Artificial Sequence: Synthetic oligonucleotide
agcuagacugugaaagcua

SEQ ID NO: 48089 - RNA, 19 nt, Artificial Sequence
  Description of Artificial Sequence: Synthetic oligonucleotide
cagggaccucucaccacgc

SEQ ID NO: 48090 - RNA, 19 nt, Artificial Sequence
  Description of Artificial Sequence: Synthetic oligonucleotide
agugggucuuugaguugcg

SEQ ID NO: 48091 - RNA, 19 nt, Artificial Sequence
  Description of Artificial Sequence: Synthetic oligonucleotide
ugccaaacuuagagccuua

SEQ ID NO: 48092 - RNA, 19 nt, Artificial Sequence
  Description of Artificial Sequence: Synthetic oligonucleotide
acauugcgguuguggguga

SEQ ID NO: 48093 - RNA, 19 nt, Artificial Sequence
  Description of Artificial Sequence: Synthetic oligonucleotide
gcuaagagccuaaucucga

SEQ ID NO: 48094 - RNA, 19 nt, Artificial Sequence
  Description of Artificial Sequence: Synthetic oligonucleotide
cccgagaccacaauugaaa

SEQ ID NO: 48095 - RNA, 19 nt, Artificial Sequence
  Description of Artificial Sequence: Synthetic oligonucleotide
caucucgaauguggagaag

SEQ ID NO: 48096 - RNA, 19 nt, Artificial Sequence
  Description of Artificial Sequence: Synthetic oligonucleotide
gguaaaguggauagauacu

SEQ ID NO: 48097 - RNA, 19 nt, Artificial Sequence
  Description of Artificial Sequence: Synthetic oligonucleotide
gcagaaacgcagacacugc

SEQ ID NO: 48098 - RNA, 19 nt, Artificial Sequence
  Description of Artificial Sequence: Synthetic oligonucleotide
auggcuuucgguagacauu

SEQ ID NO: 48099 - RNA, 19 nt, Artificial Sequence
  Description of Artificial Sequence: Synthetic oligonucleotide
gugaaagcuaagagccuaa

SEQ ID NO: 48100 - RNA, 19 nt, Artificial Sequence
  Description of Artificial Sequence: Synthetic oligonucleotide
cacccggacacugauagcu

SEQ ID NO: 48101 - RNA, 19 nt, Artificial Sequence
  Description of Artificial Sequence: Synthetic oligonucleotide
agggaccucucaccacgca

SEQ ID NO: 48102 - RNA, 19 nt, Artificial Sequence
  Description of Artificial Sequence: Synthetic oligonucleotide
cgccuuauuacaugucaac

SEQ ID NO: 48103 - RNA, 19 nt, Artificial Sequence
  Description of Artificial Sequence: Synthetic oligonucleotide
gguagacauuaaggggaag

SEQ ID NO: 48104 - RNA, 19 nt, Artificial Sequence
  Description of Artificial Sequence: Synthetic oligonucleotide
caccuuuagcaaugucuaa

SEQ ID NO: 48105 - RNA, 19 nt, Artificial Sequence
  Description of Artificial Sequence: Synthetic oligonucleotide
gcgcacaagggaacggucc

SEQ ID NO: 48106 - RNA, 19 nt, Artificial Sequence
  Description of Artificial Sequence: Synthetic oligonucleotide
cauuaggcccaguggcuua

SEQ ID NO: 48107 - RNA, 19 nt, Artificial Sequence
  Description of Artificial Sequence: Synthetic oligonucleotide
cccgccuuauuacauguca

SEQ ID NO: 48108 - RNA, 19 nt, Artificial Sequence
  Description of Artificial Sequence: Synthetic oligonucleotide
gcagugcgcccaaaggcag

SEQ ID NO: 48109 - RNA, 19 nt, Artificial Sequence
  Description of Artificial Sequence: Synthetic oligonucleotide
cccggacacugauagcuug

SEQ ID NO: 48110 - RNA, 19 nt, Artificial Sequence
  Description of Artificial Sequence: Synthetic oligonucleotide
gggauaucugagacucuac

SEQ ID NO: 48111 - RNA, 19 nt, Artificial Sequence
  Description of Artificial Sequence: Synthetic oligonucleotide
guugcgguacaaggaugga

SEQ ID NO: 48112 - RNA, 19 nt, Artificial Sequence
  Description of Artificial Sequence: Synthetic oligonucleotide
gcccguuggagcuggccgc

SEQ ID NO: 48113 - RNA, 19 nt, Artificial Sequence
  Description of Artificial Sequence: Synthetic oligonucleotide
acccgagaccacaauugaa

SEQ ID NO: 48114 - RNA, 19 nt, Artificial Sequence
  Description of Artificial Sequence: Synthetic oligonucleotide
cagcuagacugugaaagcu

SEQ ID NO: 48115 - RNA, 19 nt, Artificial Sequence
  Description of Artificial Sequence: Synthetic oligonucleotide
ccacgaagggcaaaggagu

SEQ ID NO: 48116 - RNA, 19 nt, Artificial Sequence
  Description of Artificial Sequence: Synthetic oligonucleotide
gucacccguuuauuuucaa

SEQ ID NO: 48117 - RNA, 19 nt, Artificial Sequence
  Description of Artificial Sequence: Synthetic oligonucleotide
gggcacucuaacagcgcag

SEQ ID NO: 48118 - RNA, 19 nt, Artificial Sequence
  Description of Artificial Sequence: Synthetic oligonucleotide
agggcgcugcacuccuuaa

SEQ ID NO: 48119 - RNA, 19 nt, Artificial Sequence
  Description of Artificial Sequence: Synthetic oligonucleotide
ccgagaccacaauugaaaa

SEQ ID NO: 48120 - RNA, 19 nt, Artificial Sequence
  Description of Artificial Sequence: Synthetic oligonucleotide
ucgcugcguugucacugau

SEQ ID NO: 48121 - RNA, 19 nt, Artificial Sequence
  Description of Artificial Sequence: Synthetic oligonucleotide
gauucgcuuuggcuagguu

SEQ ID NO: 48122 - RNA, 19 nt, Artificial Sequence
  Description of Artificial Sequence: Synthetic oligonucleotide
cugauugguauggcacaaa

SEQ ID NO: 48123 - RNA, 19 nt, Artificial Sequence
  Description of Artificial Sequence: Synthetic oligonucleotide
gcuaaagacgagaguucaa

SEQ ID NO: 48124 - RNA, 19 nt, Artificial Sequence
  Description of Artificial Sequence: Synthetic oligonucleotide
gggauucgcuuuggcuagg

SEQ ID NO: 48125 - RNA, 19 nt, Artificial Sequence
  Description of Artificial Sequence: Synthetic oligonucleotide
ugccuacagacgggucagu

SEQ ID NO: 48126 - RNA, 19 nt, Artificial Sequence
  Description of Artificial Sequence: Synthetic oligonucleotide
gcacucuaacagcgcaguc

SEQ ID NO: 48127 - RNA, 19 nt, Artificial Sequence
  Description of Artificial Sequence: Synthetic oligonucleotide
gcucgcccgccuuauuaca

SEQ ID NO: 48128 - RNA, 19 nt, Artificial Sequence
  Description of Artificial Sequence: Synthetic oligonucleotide
auguaagcacgcagaccua

SEQ ID NO: 48129 - RNA, 19 nt, Artificial Sequence
  Description of Artificial Sequence: Synthetic oligonucleotide
ggcacucuaacagcgcagu

SEQ ID NO: 48130 - RNA, 19 nt, Artificial Sequence
  Description of Artificial Sequence: Synthetic oligonucleotide
caucucacuuagagcugcu

SEQ ID NO: 48131 - RNA, 19 nt, Artificial Sequence
  Description of Artificial Sequence: Synthetic oligonucleotide
ggaagggcgcugcacuccu

SEQ ID NO: 48132 - RNA, 19 nt, Artificial Sequence
  Description of Artificial Sequence: Synthetic oligonucleotide
cucgcccgccuuauuacau

SEQ ID NO: 48133 - RNA, 19 nt, Artificial Sequence
  Description of Artificial Sequence: Synthetic oligonucleotide
ccgccuuauuacaugucaa

SEQ ID NO: 48134 - RNA, 19 nt, Artificial Sequence
  Description of Artificial Sequence: Synthetic oligonucleotide
ggcgcacaagggaacgguc

SEQ ID NO: 48135 - RNA, 19 nt, Artificial Sequence
  Description of Artificial Sequence: Synthetic oligonucleotide
gcggcgcacaagggaacgg

SEQ ID NO: 48136 - RNA, 19 nt, Artificial Sequence
  Description of Artificial Sequence: Synthetic oligonucleotide
cgcucgcccgccuuauuac

SEQ ID NO: 48137 - RNA, 19 nt, Artificial Sequence
  Description of Artificial Sequence: Synthetic oligonucleotide
gccaaacuuagagccuuaa

SEQ ID NO: 48138 - RNA, 19 nt, Artificial Sequence
  Description of Artificial Sequence: Synthetic oligonucleotide
cucggacuugcggcgcaca

SEQ ID NO: 48139 - RNA, 19 nt, Artificial Sequence
  Description of Artificial Sequence: Synthetic oligonucleotide
cagagcuagcgcccauccu

SEQ ID NO: 48140 - RNA, 19 nt, Artificial Sequence
  Description of Artificial Sequence: Synthetic oligonucleotide
ccuaaucucgagccagggu

SEQ ID NO: 48141 - RNA, 19 nt, Artificial Sequence
  Description of Artificial Sequence: Synthetic oligonucleotide
cacgcagaccuaggaacuu

SEQ ID NO: 48142 - RNA, 19 nt, Artificial Sequence
  Description of Artificial Sequence: Synthetic oligonucleotide
gcccgccuuauuacauguc

SEQ ID NO: 48143 - RNA, 19 nt, Artificial Sequence
  Description of Artificial Sequence: Synthetic oligonucleotide
ccgcucgcccgccuuauua

SEQ ID NO: 48144 - RNA, 19 nt, Artificial Sequence
  Description of Artificial Sequence: Synthetic oligonucleotide
cgcccgccuuauuacaugu

SEQ ID NO: 48145 - RNA, 19 nt, Artificial Sequence
  Description of Artificial Sequence: Synthetic oligonucleotide
gggaagccuguaacagcau

SEQ ID NO: 48146 - RNA, 19 nt, Artificial Sequence
  Description of Artificial Sequence: Synthetic oligonucleotide
cggacacugauagcuugcu

SEQ ID NO: 48147 - RNA, 19 nt, Artificial Sequence
  Description of Artificial Sequence: Synthetic oligonucleotide
cggcgcacaagggaacggu

SEQ ID NO: 48148 - RNA, 19 nt, Artificial Sequence
  Description of Artificial Sequence: Synthetic oligonucleotide
ggacgaccucuggguaaau

SEQ ID NO: 48149 - RNA, 19 nt, Artificial Sequence
  Description of Artificial Sequence: Synthetic oligonucleotide
ccguuggagcuggccgcau

SEQ ID NO: 48150 - RNA, 19 nt, Artificial Sequence
  Description of Artificial Sequence: Synthetic oligonucleotide
auaaaugugggauugcggc

SEQ ID NO: 48151 - RNA, 19 nt, Artificial Sequence
  Description of Artificial Sequence: Synthetic oligonucleotide
aauaggaaccucuuuacuc

SEQ ID NO: 48152 - RNA, 19 nt, Artificial Sequence
  Description of Artificial Sequence: Synthetic oligonucleotide
uggaugauaaggcugaugg

SEQ ID NO: 48153 - RNA, 19 nt, Artificial Sequence
  Description of Artificial Sequence: Synthetic oligonucleotide
ucuaauauuugccaguucc

SEQ ID NO: 48154 - RNA, 19 nt, Artificial Sequence
  Description of Artificial Sequence: Synthetic oligonucleotide
uucgaguucaccaauacag

SEQ ID NO: 48155 - RNA, 19 nt, Artificial Sequence
  Description of Artificial Sequence: Synthetic oligonucleotide
uuguuaaucaaucggauca

SEQ ID NO: 48156 - RNA, 19 nt, Artificial Sequence
  Description of Artificial Sequence: Synthetic oligonucleotide
auggauuguacauaauagc

SEQ ID NO: 48157 - RNA, 19 nt, Artificial Sequence
  Description of Artificial Sequence: Synthetic oligonucleotide
uuuaccucuggaaagaggu

SEQ ID NO: 48158 - RNA, 19 nt, Artificial Sequence
  Description of Artificial Sequence: Synthetic oligonucleotide
uaacccuauacgcacaagg

SEQ ID NO: 48159 - RNA, 19 nt, Artificial Sequence
  Description of Artificial Sequence: Synthetic oligonucleotide
ugaauuaguacuuucccac

SEQ ID NO: 48160 - RNA, 19 nt, Artificial Sequence
  Description of Artificial Sequence: Synthetic oligonucleotide
guugccauaaaauaugaac

SEQ ID NO: 48161 - RNA, 19 nt, Artificial Sequence
  Description of Artificial Sequence: Synthetic oligonucleotide
aaacgguagagacaagaag

SEQ ID NO: 48162 - RNA, 19 nt, Artificial Sequence
  Description of Artificial Sequence: Synthetic oligonucleotide
aaauaugaacauucggccu

SEQ ID NO: 48163 - RNA, 19 nt, Artificial Sequence
  Description of Artificial Sequence: Synthetic oligonucleotide
ugguauacuagguacagga

SEQ ID NO: 48164 - RNA, 19 nt, Artificial Sequence
  Description of Artificial Sequence: Synthetic oligonucleotide
aacaacuaagacccucugg

SEQ ID NO: 48165 - RNA, 19 nt, Artificial Sequence
  Description of Artificial Sequence: Synthetic oligonucleotide
auuguuaaucaaucggauc

SEQ ID NO: 48166 - RNA, 19 nt, Artificial Sequence
  Description of Artificial Sequence: Synthetic oligonucleotide
uugguauguauuaugccag

SEQ ID NO: 48167 - RNA, 19 nt, Artificial Sequence
  Description of Artificial Sequence: Synthetic oligonucleotide
uguguuaacccuauacgca

SEQ ID NO: 48168 - RNA, 19 nt, Artificial Sequence
  Description of Artificial Sequence: Synthetic oligonucleotide
uuugcuuuagugaucucug

SEQ ID NO: 48169 - RNA, 19 nt, Artificial Sequence
  Description of Artificial Sequence: Synthetic oligonucleotide
uguccuagcauuuauuggu

SEQ ID NO: 48170 - RNA, 19 nt, Artificial Sequence
  Description of Artificial Sequence: Synthetic oligonucleotide
cagauuagccugaaggucg

SEQ ID NO: 48171 - RNA, 19 nt, Artificial Sequence
  Description of Artificial Sequence: Synthetic oligonucleotide
aauuaguacuuucccacca

SEQ ID NO: 48172 - RNA, 19 nt, Artificial Sequence
  Description of Artificial Sequence: Synthetic oligonucleotide
aacgguagagacaagaaga

SEQ ID NO: 48173 - RNA, 19 nt, Artificial Sequence
  Description of Artificial Sequence: Synthetic oligonucleotide
aauaugaacauucggccua

SEQ ID NO: 48174 - RNA, 19 nt, Artificial Sequence
  Description of Artificial Sequence: Synthetic oligonucleotide
aguagugcuauagcaaacc

SEQ ID NO: 48175 - RNA, 19 nt, Artificial Sequence
  Description of Artificial Sequence: Synthetic oligonucleotide
uccacuuucguucaaacuu

SEQ ID NO: 48176 - RNA, 19 nt, Artificial Sequence
  Description of Artificial Sequence: Synthetic oligonucleotide
ugcuauagcaaaccccacg

SEQ ID NO: 48177 - RNA, 19 nt, Artificial Sequence
  Description of Artificial Sequence: Synthetic oligonucleotide
aaucggaucaguucacugu

SEQ ID NO: 48178 - RNA, 19 nt, Artificial Sequence
  Description of Artificial Sequence: Synthetic oligonucleotide
aaccucuuuacucaccaug

SEQ ID NO: 48179 - RNA, 19 nt, Artificial Sequence
  Description of Artificial Sequence: Synthetic oligonucleotide
acucacgucucuuucaguc

SEQ ID NO: 48180 - RNA, 19 nt, Artificial Sequence
  Description of Artificial Sequence: Synthetic oligonucleotide
cuguguuaacccuauacgc

SEQ ID NO: 48181 - RNA, 19 nt, Artificial Sequence
  Description of Artificial Sequence: Synthetic oligonucleotide
uuaaccuucaaguccccag

SEQ ID NO: 48182 - RNA, 19 nt, Artificial Sequence
  Description of Artificial Sequence: Synthetic oligonucleotide
aacuaagacccucuggaga

SEQ ID NO: 48183 - RNA, 19 nt, Artificial Sequence
  Description of Artificial Sequence: Synthetic oligonucleotide
aaaccuaaggucucaaaua

SEQ ID NO: 48184 - RNA, 19 nt, Artificial Sequence
  Description of Artificial Sequence: Synthetic oligonucleotide
aacuguguccugcauuauc

SEQ ID NO: 48185 - RNA, 19 nt, Artificial Sequence
  Description of Artificial Sequence: Synthetic oligonucleotide
cagacaacaagcauucuug

SEQ ID NO: 48186 - RNA, 19 nt, Artificial Sequence
  Description of Artificial Sequence: Synthetic oligonucleotide
uucagauuagccugaaggu

SEQ ID NO: 48187 - RNA, 19 nt, Artificial Sequence
  Description of Artificial Sequence: Synthetic oligonucleotide
auaggaaccucuuuacuca

SEQ ID NO: 48188 - RNA, 19 nt, Artificial Sequence
  Description of Artificial Sequence: Synthetic oligonucleotide
agaagacgcacaaacaagg

SEQ ID NO: 48189 - RNA, 19 nt, Artificial Sequence
  Description of Artificial Sequence: Synthetic oligonucleotide
cauaaaugugggauugcgg

SEQ ID NO: 48190 - RNA, 19 nt, Artificial Sequence
  Description of Artificial Sequence: Synthetic oligonucleotide
ggcauuguuaaucaaucgg

SEQ ID NO: 48191 - RNA, 19 nt, Artificial Sequence
  Description of Artificial Sequence: Synthetic oligonucleotide
uggcucgcugucaugaugg

SEQ ID NO: 48192 - RNA, 19 nt, Artificial Sequence
  Description of Artificial Sequence: Synthetic oligonucleotide
  modified_base (5)..(5): a, c, u, g, unknown or other
uggancauggaguuugcca

SEQ ID NO: 48193 - RNA, 19 nt, Artificial Sequence
  Description of Artificial Sequence: Synthetic oligonucleotide
ucaauaggaaccucuuuac

SEQ ID NO: 48194 - RNA, 19 nt, Artificial Sequence
  Description of Artificial Sequence: Synthetic oligonucleotide
cugaaugguagcuuuuacc

SEQ ID NO: 48195 - RNA, 19 nt, Artificial Sequence
  Description of Artificial Sequence: Synthetic oligonucleotide
aaagucaauaggaaccucu

SEQ ID NO: 48196 - RNA, 19 nt, Artificial Sequence
  Description of Artificial Sequence: Synthetic oligonucleotide
aucaaguuuccaaauuccc

SEQ ID NO: 48197 - RNA, 19 nt, Artificial Sequence
  Description of Artificial Sequence: Synthetic oligonucleotide
uuuccucucggauagagua

SEQ ID NO: 48198 - RNA, 19 nt, Artificial Sequence
  Description of Artificial Sequence: Synthetic oligonucleotide
ugaucuaauauuugccagu

SEQ ID NO: 48199 - RNA, 19 nt, Artificial Sequence
  Description of Artificial Sequence: Synthetic oligonucleotide
uuuagugaucucugugucc

SEQ ID NO: 48200 - RNA, 19 nt, Artificial Sequence
  Description of Artificial Sequence: Synthetic oligonucleotide
aaguccacugcccgcugcc

SEQ ID NO: 48201 - RNA, 19 nt, Artificial Sequence
  Description of Artificial Sequence: Synthetic oligonucleotide
gaauuaguacuuucccacc

SEQ ID NO: 48202 - RNA, 19 nt, Artificial Sequence
  Description of Artificial Sequence: Synthetic oligonucleotide
augaauuaguacuuuccca

SEQ ID NO: 48203 - RNA, 19 nt, Artificial Sequence
  Description of Artificial Sequence: Synthetic oligonucleotide
uagugcuauagcaaacccc

SEQ ID NO: 48204 - RNA, 19 nt, Artificial Sequence
  Description of Artificial Sequence: Synthetic oligonucleotide
auguauuaugccagcaccc

SEQ ID NO: 48205 - RNA, 19 nt, Artificial Sequence
  Description of Artificial Sequence: Synthetic oligonucleotide
cucacggcuacccacauug

SEQ ID NO: 48206 - RNA, 19 nt, Artificial Sequence
  Description of Artificial Sequence: Synthetic oligonucleotide
gucuuuacagccucgugag

SEQ ID NO: 48207 - RNA, 19 nt, Artificial Sequence
  Description of Artificial Sequence: Synthetic oligonucleotide
uguagacgcagcacuagug

SEQ ID NO: 48208 - RNA, 19 nt, Artificial Sequence
  Description of Artificial Sequence: Synthetic oligonucleotide
uacuggggcaacaacuaag

SEQ ID NO: 48209 - RNA, 19 nt, Artificial Sequence
  Description of Artificial Sequence: Synthetic oligonucleotide
gacagcaauucacauaguc

SEQ ID NO: 48210 - RNA, 19 nt, Artificial Sequence
  Description of Artificial Sequence: Synthetic oligonucleotide
cuuuacagccucgugagag

SEQ ID NO: 48211 - RNA, 19 nt, Artificial Sequence
  Description of Artificial Sequence: Synthetic oligonucleotide
guauacuagguacaggauc

SEQ ID NO: 48212 - RNA, 19 nt, Artificial Sequence
  Description of Artificial Sequence: Synthetic oligonucleotide
uggucaaauguuugaacug

SEQ ID NO: 48213 - RNA, 19 nt, Artificial Sequence
  Description of Artificial Sequence: Synthetic oligonucleotide
agugcuauagcaaacccca

SEQ ID NO: 48214 - RNA, 19 nt, Artificial Sequence
  Description of Artificial Sequence: Synthetic oligonucleotide
gugaaguuuaggaacugcg

SEQ ID NO: 48215 - RNA, 19 nt, Artificial Sequence
  Description of Artificial Sequence: Synthetic oligonucleotide
auucggccuaaauucugcc

SEQ ID NO: 48216 - RNA, 19 nt, Artificial Sequence
  Description of Artificial Sequence: Synthetic oligonucleotide
ucggccuaaauucugccga

SEQ ID NO: 48217 - RNA, 19 nt, Artificial Sequence
  Description of Artificial Sequence: Synthetic oligonucleotide
aaaugugggauugcggcug

SEQ ID NO: 48218 - RNA, 19 nt, Artificial Sequence
  Description of Artificial Sequence: Synthetic oligonucleotide
gcuauagcaaaccccacgg

SEQ ID NO: 48219 - RNA, 19 nt, Artificial Sequence
  Description of Artificial Sequence: Synthetic oligonucleotide
gacaacaagcauucuuggc

SEQ ID NO: 48220 - RNA, 19 nt, Artificial Sequence
  Description of Artificial Sequence: Synthetic oligonucleotide
aauguuugaacugucccuu

SEQ ID NO: 48221 - RNA, 19 nt, Artificial Sequence
  Description of Artificial Sequence: Synthetic oligonucleotide
ucuagguagcucagcaucu

SEQ ID NO: 48222 - RNA, 19 nt, Artificial Sequence
  Description of Artificial Sequence: Synthetic oligonucleotide
uuucccaccagacccauua

SEQ ID NO: 48223 - RNA, 19 nt, Artificial Sequence
  Description of Artificial Sequence: Synthetic oligonucleotide
gaugacacgguaccacacc

SEQ ID NO: 48224 - RNA, 19 nt, Artificial Sequence
  Description of Artificial Sequence: Synthetic oligonucleotide
uucggccuaaauucugccg

SEQ ID NO: 48225 - RNA, 19 nt, Artificial Sequence
  Description of Artificial Sequence: Synthetic oligonucleotide
  modified_base (8)..(8): a, c, u, g, unknown or other
gaguggancauggaguuug

SEQ ID NO: 48226 - RNA, 19 nt, Artificial Sequence
  Description of Artificial Sequence: Synthetic oligonucleotide
uguucgaguucaccaauac

SEQ ID NO: 48227 - RNA, 19 nt, Artificial Sequence
  Description of Artificial Sequence: Synthetic oligonucleotide
aaccccacggacucugcuc

SEQ ID NO: 48228 - RNA, 19 nt, Artificial Sequence
  Description of Artificial Sequence: Synthetic oligonucleotide
cuguccuagcauuuauugg

SEQ ID NO: 48229 - RNA, 19 nt, Artificial Sequence
  Description of Artificial Sequence: Synthetic oligonucleotide
ucaaguccccagaaugacc

SEQ ID NO: 48230 - RNA, 19 nt, Artificial Sequence
  Description of Artificial Sequence: Synthetic oligonucleotide
agggacaguacauucauua

SEQ ID NO: 48231 - RNA, 19 nt, Artificial Sequence
  Description of Artificial Sequence: Synthetic oligonucleotide
guagacgcagcacuagugc

SEQ ID NO: 48232 - RNA, 19 nt, Artificial Sequence
  Description of Artificial Sequence: Synthetic oligonucleotide
acccuauacgcacaaggag

SEQ ID NO: 48233 - RNA, 19 nt, Artificial Sequence
  Description of Artificial Sequence: Synthetic oligonucleotide
uucacgucgaugcuucgcu

SEQ ID NO: 48234 - RNA, 19 nt, Artificial Sequence
  Description of Artificial Sequence: Synthetic oligonucleotide
ugaguguuggaccuucuua

SEQ ID NO: 48235 - RNA, 19 nt, Artificial Sequence
  Description of Artificial Sequence: Synthetic oligonucleotide
  modified_base (10)..(10): a, c, u, g, unknown or other
augaguggancauggaguu

SEQ ID NO: 48236 - RNA, 19 nt, Artificial Sequence
  Description of Artificial Sequence: Synthetic oligonucleotide
gaguuugccaacaguagug

SEQ ID NO: 48237 - RNA, 19 nt, Artificial Sequence
  Description of Artificial Sequence: Synthetic oligonucleotide
uguauuaugccagcaccca

SEQ ID NO: 48238 - RNA, 19 nt, Artificial Sequence
  Description of Artificial Sequence: Synthetic oligonucleotide
accaaggagaaagaugaag

SEQ ID NO: 48239 - RNA, 19 nt, Artificial Sequence
  Description of Artificial Sequence: Synthetic oligonucleotide
uccccagcuaucaaguuuc

SEQ ID NO: 48240 - RNA, 19 nt, Artificial Sequence
  Description of Artificial Sequence: Synthetic oligonucleotide
ggcaacaguacucagccgc

SEQ ID NO: 48241 - RNA, 19 nt, Artificial Sequence
  Description of Artificial Sequence: Synthetic oligonucleotide
ccauuaaccuucaaguccc

SEQ ID NO: 48242 - RNA, 19 nt, Artificial Sequence
  Description of Artificial Sequence: Synthetic oligonucleotide
guguuaacccuauacgcac

SEQ ID NO: 48243 - RNA, 19 nt, Artificial Sequence
  Description of Artificial Sequence: Synthetic oligonucleotide
ucagauuagccugaagguc

SEQ ID NO: 48244 - RNA, 19 nt, Artificial Sequence
  Description of Artificial Sequence: Synthetic oligonucleotide
acagacaacaagcauucuu

SEQ ID NO: 48245 - RNA, 19 nt, Artificial Sequence
  Description of Artificial Sequence: Synthetic oligonucleotide
ccgacagcaauucacauag

SEQ ID NO: 48246 - RNA, 19 nt, Artificial Sequence
  Description of Artificial Sequence: Synthetic oligonucleotide
uauacgcacaaggagcugu

SEQ ID NO: 48247 - RNA, 19 nt, Artificial Sequence
  Description of Artificial Sequence: Synthetic oligonucleotide
guagugcuauagcaaaccc

SEQ ID NO: 48248 - RNA, 19 nt, Artificial Sequence
  Description of Artificial Sequence: Synthetic oligonucleotide
acaaacgguagagacaaga

SEQ ID NO: 48249 - RNA, 19 nt, Artificial Sequence
  Description of Artificial Sequence: Synthetic oligonucleotide
gcacuacugaucuagacac

SEQ ID NO: 48250 - RNA, 19 nt, Artificial Sequence
  Description of Artificial Sequence: Synthetic oligonucleotide
aacgugcuggucauugagg

SEQ ID NO: 48251 - RNA, 19 nt, Artificial Sequence
  Description of Artificial Sequence: Synthetic oligonucleotide
ccuguguuaacccuauacg

SEQ ID NO: 48252 - RNA, 19 nt, Artificial Sequence
  Description of Artificial Sequence: Synthetic oligonucleotide
ugagucgguacaucugagc

SEQ ID NO: 48253 - RNA, 19 nt, Artificial Sequence
  Description of Artificial Sequence: Synthetic oligonucleotide
uguuaacccuauacgcaca

SEQ ID NO: 48254 - RNA, 19 nt, Artificial Sequence
  Description of Artificial Sequence: Synthetic oligonucleotide
aaguucucguggcacgcug

SEQ ID NO: 48255 - RNA, 19 nt, Artificial Sequence
  Description of Artificial Sequence: Synthetic oligonucleotide
uuuacagccucgugagaga

SEQ ID NO: 48256 - RNA, 19 nt, Artificial Sequence
  Description of Artificial Sequence: Synthetic oligonucleotide
agacuuaaguccaauuuga

SEQ ID NO: 48257 - RNA, 19 nt, Artificial Sequence
  Description of Artificial Sequence: Synthetic oligonucleotide
cccauuaaccuucaagucc

SEQ ID NO: 48258 - RNA, 19 nt, Artificial Sequence
  Description of Artificial Sequence: Synthetic oligonucleotide
aacccuauacgcacaagga

SEQ ID NO: 48259 - RNA, 19 nt, Artificial Sequence
  Description of Artificial Sequence: Synthetic oligonucleotide
auucacgucgaugcuucgc

SEQ ID NO: 48260 - RNA, 19 nt, Artificial Sequence
  Description of Artificial Sequence: Synthetic oligonucleotide
cuaaggucucaaauaugug

SEQ ID NO: 48261 - RNA, 19 nt, Artificial Sequence
  Description of Artificial Sequence: Synthetic oligonucleotide
uugagcuauccacaugguc

SEQ ID NO: 48262 - RNA, 19 nt, Artificial Sequence
  Description of Artificial Sequence: Synthetic oligonucleotide
acggugucuuugcugguac

SEQ ID NO: 48263 - RNA, 19 nt, Artificial Sequence
  Description of Artificial Sequence: Synthetic oligonucleotide
ugguauguauuaugccagc

SEQ ID NO: 48264 - RNA, 19 nt, Artificial Sequence
  Description of Artificial Sequence: Synthetic oligonucleotide
  modified_base (2)..(2): a, c, u, g, unknown or other
ancauggaguuugccaaca

SEQ ID NO: 48265 - RNA, 19 nt, Artificial Sequence
  Description of Artificial Sequence: Synthetic oligonucleotide
aggacucacgcucagggaa

SEQ ID NO: 48266 - RNA, 19 nt, Artificial Sequence
  Description of Artificial Sequence: Synthetic oligonucleotide
uagcaaaccccacggacuc

SEQ ID NO: 48267 - RNA, 19 nt, Artificial Sequence
  Description of Artificial Sequence: Synthetic oligonucleotide
ucuccagcgaaggaccucc

SEQ ID NO: 48268 - RNA, 19 nt, Artificial Sequence
  Description of Artificial Sequence: Synthetic oligonucleotide
gacgcagcacuagugcugg

SEQ ID NO: 48269 - RNA, 19 nt, Artificial Sequence
  Description of Artificial Sequence: Synthetic oligonucleotide
uguugccauaaaauaugaa

SEQ ID NO: 48270 - RNA, 19 nt, Artificial Sequence
  Description of Artificial Sequence: Synthetic oligonucleotide
ugacgaucuggaugacacg

SEQ ID NO: 48271 - RNA, 19 nt, Artificial Sequence
  Description of Artificial Sequence: Synthetic oligonucleotide
accagacccauuaaccuuc

SEQ ID NO: 48272 - RNA, 19 nt, Artificial Sequence
  Description of Artificial Sequence: Synthetic oligonucleotide
cugagucugagaauacguc

SEQ ID NO: 48273 - RNA, 19 nt, Artificial Sequence
  Description of Artificial Sequence: Synthetic oligonucleotide
cccuauacgcacaaggagc

SEQ ID NO: 48274 - RNA, 19 nt, Artificial Sequence
  Description of Artificial Sequence: Synthetic oligonucleotide
agaauacguccacuagcag

SEQ ID NO: 48275 - RNA, 19 nt, Artificial Sequence
  Description of Artificial Sequence: Synthetic oligonucleotide
guagccgcccacuuugacc

SEQ ID NO: 48276 - RNA, 19 nt, Artificial Sequence
  Description of Artificial Sequence: Synthetic oligonucleotide
guuugagcucagaagauuc

SEQ ID NO: 48277 - RNA, 19 nt, Artificial Sequence
  Description of Artificial Sequence: Synthetic oligonucleotide
ugguacgcagcgugagucg

SEQ ID NO: 48278 - RNA, 19 nt, Artificial Sequence
  Description of Artificial Sequence: Synthetic oligonucleotide
guggucaaauguuugaacu

SEQ ID NO: 48279 - RNA, 19 nt, Artificial Sequence
  Description of Artificial Sequence: Synthetic oligonucleotide
  modified_base (7)..(7): a, c, u, g, unknown or other
aguggancauggaguuugc

SEQ ID NO: 48280 - RNA, 19 nt, Artificial Sequence
  Description of Artificial Sequence: Synthetic oligonucleotide
gguacaucugagcuugcag

SEQ ID NO: 48281 - RNA, 19 nt, Artificial Sequence
  Description of Artificial Sequence: Synthetic oligonucleotide
  modified_base (3)..(3): a, c, u, g, unknown or other
gancauggaguuugccaac

SEQ ID NO: 48282 - RNA, 19 nt, Artificial Sequence
  Description of Artificial Sequence: Synthetic oligonucleotide
agcgugagucgguacaucu

SEQ ID NO: 48283 - RNA, 19 nt, Artificial Sequence
  Description of Artificial Sequence: Synthetic oligonucleotide
augacacgguaccacaccu

SEQ ID NO: 48284 - RNA, 19 nt, Artificial Sequence
  Description of Artificial Sequence: Synthetic oligonucleotide
gguacaaagacaaacggua

SEQ ID NO: 48285 - RNA, 19 nt, Artificial Sequence
  Description of Artificial Sequence: Synthetic oligonucleotide
cauaccaaguguaguccac

SEQ ID NO: 48286 - RNA, 19 nt, Artificial Sequence
  Description of Artificial Sequence: Synthetic oligonucleotide
cauuaccacacuuaggccu

SEQ ID NO: 48287 - RNA, 19 nt, Artificial Sequence
  Description of Artificial Sequence: Synthetic oligonucleotide
auagcaaaccccacggacu

SEQ ID NO: 48288 - RNA, 19 nt, Artificial Sequence
  Description of Artificial Sequence: Synthetic oligonucleotide
aaaauuuguugagcgugau

SEQ ID NO: 48289 - RNA, 19 nt, Artificial Sequence
  Description of Artificial Sequence: Synthetic oligonucleotide
uuggcucgcugucaugaug

SEQ ID NO: 48290 - RNA, 19 nt, Artificial Sequence
  Description of Artificial Sequence: Synthetic oligonucleotide
aggauccuaccaugagugg

SEQ ID NO: 48291 - RNA, 19 nt, Artificial Sequence
  Description of Artificial Sequence: Synthetic oligonucleotide
caaacuguguccugcauua

SEQ ID NO: 48292 - RNA, 19 nt, Artificial Sequence
  Description of Artificial Sequence: Synthetic oligonucleotide
uuccaacguugaaagaaau

SEQ ID NO: 48293 - RNA, 19 nt, Artificial Sequence
  Description of Artificial Sequence: Synthetic oligonucleotide
auuaugccagcacccacaa

SEQ ID NO: 48294 - RNA, 19 nt, Artificial Sequence
  Description of Artificial Sequence: Synthetic oligonucleotide
uccguguaucuguuugagc

SEQ ID NO: 48295 - RNA, 19 nt, Artificial Sequence
  Description of Artificial Sequence: Synthetic oligonucleotide
uccgacagcaauucacaua

SEQ ID NO: 48296 - RNA, 19 nt, Artificial Sequence
  Description of Artificial Sequence: Synthetic oligonucleotide
augaacauucggccuaaau

SEQ ID NO: 48297 - RNA, 19 nt, Artificial Sequence
  Description of Artificial Sequence: Synthetic oligonucleotide
ugugcucgggcccuucuuc

SEQ ID NO: 48298 - RNA, 19 nt, Artificial Sequence
  Description of Artificial Sequence: Synthetic oligonucleotide
guacugaugaaggcccagg

SEQ ID NO: 48299 - RNA, 19 nt, Artificial Sequence
  Description of Artificial Sequence: Synthetic oligonucleotide
uggggaucucuccagcgaa

SEQ ID NO: 48300 - RNA, 19 nt, Artificial Sequence
  Description of Artificial Sequence: Synthetic oligonucleotide
aucaaucggaucaguucac

SEQ ID NO: 48301 - RNA, 19 nt, Artificial Sequence
  Description of Artificial Sequence: Synthetic oligonucleotide
uugugccccaacaguuucc

SEQ ID NO: 48302 - RNA, 19 nt, Artificial Sequence
  Description of Artificial Sequence: Synthetic oligonucleotide
aggcccauaaaugugggau

SEQ ID NO: 48303 - RNA, 19 nt, Artificial Sequence
  Description of Artificial Sequence: Synthetic oligonucleotide
uguccaucggaugcuuugc

SEQ ID NO: 48304 - RNA, 19 nt, Artificial Sequence
  Description of Artificial Sequence: Synthetic oligonucleotide
acuguucgaguucaccaau

SEQ ID NO: 48305 - RNA, 19 nt, Artificial Sequence
  Description of Artificial Sequence: Synthetic oligonucleotide
agagggcgggcuugugccc

SEQ ID NO: 48306 - RNA, 19 nt, Artificial Sequence
  Description of Artificial Sequence: Synthetic oligonucleotide
cagucagacggccacgcac

SEQ ID NO: 48307 - RNA, 19 nt, Artificial Sequence
  Description of Artificial Sequence: Synthetic oligonucleotide
caguagugcuauagcaaac

SEQ ID NO: 48308 - RNA, 19 nt, Artificial Sequence
  Description of Artificial Sequence: Synthetic oligonucleotide
ccacgcaccgccuaguugc

SEQ ID NO: 48309 - RNA, 19 nt, Artificial Sequence
  Description of Artificial Sequence: Synthetic oligonucleotide
cacgcuggagccugcaaug

SEQ ID NO: 48310 - RNA, 19 nt, Artificial Sequence
  Description of Artificial Sequence: Synthetic oligonucleotide
accucuuuacucaccaugu

SEQ ID NO: 48311 - RNA, 19 nt, Artificial Sequence
  Description of Artificial Sequence: Synthetic oligonucleotide
gguugaaccacagggcugc

SEQ ID NO: 48312 - RNA, 19 nt, Artificial Sequence
  Description of Artificial Sequence: Synthetic oligonucleotide
cuugugccccaacaguuuc

SEQ ID NO: 48313 - RNA, 19 nt, Artificial Sequence
  Description of Artificial Sequence: Synthetic oligonucleotide
cacggcuacccacauuggc

SEQ ID NO: 48314 - RNA, 19 nt, Artificial Sequence
  Description of Artificial Sequence: Synthetic oligonucleotide
  modified_base (17)..(17): a, c, u, g, unknown or other
uccuaccaugagugganca

SEQ ID NO: 48315 - RNA, 19 nt, Artificial Sequence
  Description of Artificial Sequence: Synthetic oligonucleotide
guucgaguucaccaauaca

SEQ ID NO: 48316 - RNA, 19 nt, Artificial Sequence
  Description of Artificial Sequence: Synthetic oligonucleotide
ucaaucggaucaguucacu

SEQ ID NO: 48317 - RNA, 19 nt, Artificial Sequence
  Description of Artificial Sequence: Synthetic oligonucleotide
ugugggauugcggcuggcc

SEQ ID NO: 48318 - RNA, 19 nt, Artificial Sequence
  Description of Artificial Sequence: Synthetic oligonucleotide
  modified_base (19)..(19): a, c, u, g, unknown or other
gauccuaccaugaguggan

SEQ ID NO: 48319 - RNA, 19 nt, Artificial Sequence
  Description of Artificial Sequence: Synthetic oligonucleotide
cacuacugaucuagacacc

SEQ ID NO: 48320 - RNA, 19 nt, Artificial Sequence
  Description of Artificial Sequence: Synthetic oligonucleotide
cauuaaccuucaagucccc

SEQ ID NO: 48321 - RNA, 19 nt, Artificial Sequence
  Description of Artificial Sequence: Synthetic oligonucleotide
acggacgagcaaguuuggc

SEQ ID NO: 48322 - RNA, 19 nt, Artificial Sequence
  Description of Artificial Sequence: Synthetic oligonucleotide
accauaugaauuaguacuu

SEQ ID NO: 48323 - RNA, 19 nt, Artificial Sequence
  Description of Artificial Sequence: Synthetic oligonucleotide
ucgggauguccagucaccc

SEQ ID NO: 48324 - RNA, 19 nt, Artificial Sequence
  Description of Artificial Sequence: Synthetic oligonucleotide
guuggcugucacugcguag

SEQ ID NO: 48325 - RNA, 19 nt, Artificial Sequence
  Description of Artificial Sequence: Synthetic oligonucleotide
auaccaaguguaguccacu

SEQ ID NO: 48326 - RNA, 19 nt, Artificial Sequence
  Description of Artificial Sequence: Synthetic oligonucleotide
gcauggauuguacauaaua

SEQ ID NO: 48327 - RNA, 19 nt, Artificial Sequence
  Description of Artificial Sequence: Synthetic oligonucleotide
  modified_base (18)..(18): a, c, u, g, unknown or other
auccuaccaugagugganc

SEQ ID NO: 48328 - RNA, 19 nt, Artificial Sequence
  Description of Artificial Sequence: Synthetic oligonucleotide
gcacggacgagcaaguuug

SEQ ID NO: 48329 - RNA, 19 nt, Artificial Sequence
  Description of Artificial Sequence: Synthetic oligonucleotide
gagaagcacaccauaugaa

SEQ ID NO: 48330 - RNA, 19 nt, Artificial Sequence
  Description of Artificial Sequence: Synthetic oligonucleotide
aaggugccuugaauggcag

SEQ ID NO: 48331 - RNA, 19 nt, Artificial Sequence
  Description of Artificial Sequence: Synthetic oligonucleotide
caggagucacagagggcgg

SEQ ID NO: 48332 - RNA, 19 nt, Artificial Sequence
  Description of Artificial Sequence: Synthetic oligonucleotide
cugguacgcagcgugaguc

SEQ ID NO: 48333 - RNA, 19 nt, Artificial Sequence
  Description of Artificial Sequence: Synthetic oligonucleotide
auacuggggcaacaacuaa

SEQ ID NO: 48334 - RNA, 19 nt, Artificial Sequence
  Description of Artificial Sequence: Synthetic oligonucleotide
acggcuacccacauuggca

SEQ ID NO: 48335 - RNA, 19 nt, Artificial Sequence
  Description of Artificial Sequence: Synthetic oligonucleotide
  modified_base (15)..(15): a, c, u, g, unknown or other
cuaccaugaguggancaug

SEQ ID NO: 48336 - RNA, 19 nt, Artificial Sequence
  Description of Artificial Sequence: Synthetic oligonucleotide
gagugaaguuuaggaacug

SEQ ID NO: 48337 - RNA, 19 nt, Artificial Sequence
  Description of Artificial Sequence: Synthetic oligonucleotide
agccucgugagagaacuca

SEQ ID NO: 48338 - RNA, 19 nt, Artificial Sequence
  Description of Artificial Sequence: Synthetic oligonucleotide
accauaccugaacuggaua

SEQ ID NO: 48339 - RNA, 19 nt, Artificial Sequence
  Description of Artificial Sequence: Synthetic oligonucleotide
uccuagcauuuauugguuu

SEQ ID NO: 48340 - RNA, 19 nt, Artificial Sequence
  Description of Artificial Sequence: Synthetic oligonucleotide
ggugcaagaggugcaacug

SEQ ID NO: 48341 - RNA, 19 nt, Artificial Sequence
  Description of Artificial Sequence: Synthetic oligonucleotide
gauggaggacucacgcuca

SEQ ID NO: 48342 - RNA, 19 nt, Artificial Sequence
  Description of Artificial Sequence: Synthetic oligonucleotide
auacgcacaaggagcuguc

SEQ ID NO: 48343 - RNA, 19 nt, Artificial Sequence
  Description of Artificial Sequence: Synthetic oligonucleotide
ugccgaaauucagacuuaa

SEQ ID NO: 48344 - RNA, 19 nt, Artificial Sequence
  Description of Artificial Sequence: Synthetic oligonucleotide
acugucccuucuagaacac

SEQ ID NO: 48345 - RNA, 19 nt, Artificial Sequence
  Description of Artificial Sequence: Synthetic oligonucleotide
caacguugaaagaaauccu

SEQ ID NO: 48346 - RNA, 19 nt, Artificial Sequence
  Description of Artificial Sequence: Synthetic oligonucleotide
aggugccucugugaaauca

SEQ ID NO: 48347 - RNA, 19 nt, Artificial Sequence
  Description of Artificial Sequence: Synthetic oligonucleotide
auacguccacuagcagccc

SEQ ID NO: 48348 - RNA, 19 nt, Artificial Sequence
  Description of Artificial Sequence: Synthetic oligonucleotide
uacagccucgugagagaac

SEQ ID NO: 48349 - RNA, 19 nt, Artificial Sequence
  Description of Artificial Sequence: Synthetic oligonucleotide
ugcggucacacauggcgua

SEQ ID NO: 48350 - RNA, 19 nt, Artificial Sequence
  Description of Artificial Sequence: Synthetic oligonucleotide
gaucuaauauuugccaguu

SEQ ID NO: 48351 - RNA, 19 nt, Artificial Sequence
  Description of Artificial Sequence: Synthetic oligonucleotide
cuauagcaaaccccacgga

SEQ ID NO: 48352 - RNA, 19 nt, Artificial Sequence
  Description of Artificial Sequence: Synthetic oligonucleotide
cacggacgagcaaguuugg

SEQ ID NO: 48353 - RNA, 19 nt, Artificial Sequence
  Description of Artificial Sequence: Synthetic oligonucleotide
acugcguagcacguccuga

SEQ ID NO: 48354 - RNA, 19 nt, Artificial Sequence
  Description of Artificial Sequence: Synthetic oligonucleotide
auaugaacauucggccuaa

SEQ ID NO: 48355 - RNA, 19 nt, Artificial Sequence
  Description of Artificial Sequence: Synthetic oligonucleotide
agugcccggguggggacgc

SEQ ID NO: 48356 - RNA, 19 nt, Artificial Sequence
  Description of Artificial Sequence: Synthetic oligonucleotide
ugcguagcacguccugaau

SEQ ID NO: 48357 - RNA, 19 nt, Artificial Sequence
  Description of Artificial Sequence: Synthetic oligonucleotide
ccgaaauucagacuuaagu

SEQ ID NO: 48358 - RNA, 19 nt, Artificial Sequence
  Description of Artificial Sequence: Synthetic oligonucleotide
cacuguucgaguucaccaa

SEQ ID NO: 48359 - RNA, 19 nt, Artificial Sequence
  Description of Artificial Sequence: Synthetic oligonucleotide
gguacgcagcgugagucgg

SEQ ID NO: 48360 - RNA, 19 nt, Artificial Sequence
  Description of Artificial Sequence: Synthetic oligonucleotide
cacgucgaugcuucgcuca

SEQ ID NO: 48361 - RNA, 19 nt, Artificial Sequence
  Description of Artificial Sequence: Synthetic oligonucleotide
ccuuuaauuuguagguuga

SEQ ID NO: 48362 - RNA, 19 nt, Artificial Sequence
  Description of Artificial Sequence: Synthetic oligonucleotide
gcagcacuagugcuggcug

SEQ ID NO: 48363 - RNA, 19 nt, Artificial Sequence
  Description of Artificial Sequence: Synthetic oligonucleotide
ucagcccaugaggucacac

SEQ ID NO: 48364 - RNA, 19 nt, Artificial Sequence
  Description of Artificial Sequence: Synthetic oligonucleotide
gguauguauuaugccagca

SEQ ID NO: 48365 - RNA, 19 nt, Artificial Sequence
  Description of Artificial Sequence: Synthetic oligonucleotide
ucacgucgaugcuucgcuc

SEQ ID NO: 48366 - RNA, 19 nt, Artificial Sequence
  Description of Artificial Sequence: Synthetic oligonucleotide
caaaccccacggacucugc

SEQ ID NO: 48367 - RNA, 19 nt, Artificial Sequence
  Description of Artificial Sequence: Synthetic oligonucleotide
agauuagccugaaggucgu

SEQ ID NO: 48368 - RNA, 19 nt, Artificial Sequence
  Description of Artificial Sequence: Synthetic oligonucleotide
cuagguagcucagcaucuc

SEQ ID NO: 48369 - RNA, 19 nt, Artificial Sequence
  Description of Artificial Sequence: Synthetic oligonucleotide
ggaacuaggucaggugaug

SEQ ID NO: 48370 - RNA, 19 nt, Artificial Sequence
  Description of Artificial Sequence: Synthetic oligonucleotide
uucccaccagacccauuaa

SEQ ID NO: 48371 - RNA, 19 nt, Artificial Sequence
  Description of Artificial Sequence: Synthetic oligonucleotide
acugcguggaggucuuguu

SEQ ID NO: 48372 - RNA, 19 nt, Artificial Sequence
  Description of Artificial Sequence: Synthetic oligonucleotide
  modified_base (6)..(6): a, c, u, g, unknown or other
guggancauggaguuugcc

SEQ ID NO: 48373 - RNA, 19 nt, Artificial Sequence
  Description of Artificial Sequence: Synthetic oligonucleotide
ggauccuaccaugagugga

SEQ ID NO: 48374 - RNA, 19 nt, Artificial Sequence
  Description of Artificial Sequence: Synthetic oligonucleotide
cauaggaacuaggucaggu

SEQ ID NO: 48375 - RNA, 19 nt, Artificial Sequence
  Description of Artificial Sequence: Synthetic oligonucleotide
acgcagcgugagucgguac

SEQ ID NO: 48376 - RNA, 19 nt, Artificial Sequence
  Description of Artificial Sequence: Synthetic oligonucleotide
caauaggaaccucuuuacu

SEQ ID NO: 48377 - RNA, 19 nt, Artificial Sequence
  Description of Artificial Sequence: Synthetic oligonucleotide
aggaacuaggucaggugau

SEQ ID NO: 48378 - RNA, 19 nt, Artificial Sequence
  Description of Artificial Sequence: Synthetic oligonucleotide
guucucguggcacgcugga

SEQ ID NO: 48379 - RNA, 19 nt, Artificial Sequence
  Description of Artificial Sequence: Synthetic oligonucleotide
ggcaacaacuaagacccuc

SEQ ID NO: 48380 - RNA, 19 nt, Artificial Sequence
  Description of Artificial Sequence: Synthetic oligonucleotide
cuauacgcacaaggagcug

SEQ ID NO: 48381 - RNA, 19 nt, Artificial Sequence
  Description of Artificial Sequence: Synthetic oligonucleotide
guuugccaacaguagugcu

SEQ ID NO: 48382 - RNA, 19 nt, Artificial Sequence
  Description of Artificial Sequence: Synthetic oligonucleotide
cacugcguagcacguccug

SEQ ID NO: 48383 - RNA, 19 nt, Artificial Sequence
  Description of Artificial Sequence: Synthetic oligonucleotide
cauggaguuugccaacagu

SEQ ID NO: 48384 - RNA, 19 nt, Artificial Sequence
  Description of Artificial Sequence: Synthetic oligonucleotide
guuaaucaaucggaucagu

SEQ ID NO: 48385 - RNA, 19 nt, Artificial Sequence
  Description of Artificial Sequence: Synthetic oligonucleotide
ucgguacaucugagcuugc

SEQ ID NO: 48386 - RNA, 19 nt, Artificial Sequence
  Description of Artificial Sequence: Synthetic oligonucleotide
  modified_base (9)..(9): a, c, u, g, unknown or other
ugaguggancauggaguuu

SEQ ID NO: 48387 - RNA, 19 nt, Artificial Sequence
  Description of Artificial Sequence: Synthetic oligonucleotide
gaaagagguucacgaacuu

SEQ ID NO: 48388 - RNA, 19 nt, Artificial Sequence
  Description of Artificial Sequence: Synthetic oligonucleotide
  modified_base (13)..(13): a, c, u, g, unknown or other
accaugaguggancaugga

SEQ ID NO: 48389 - RNA, 19 nt, Artificial Sequence
  Description of Artificial Sequence: Synthetic oligonucleotide
aggugccuugaauggcagu

SEQ ID NO: 48390 - RNA, 19 nt, Artificial Sequence
  Description of Artificial Sequence: Synthetic oligonucleotide
ggagugaaguuuaggaacu

SEQ ID NO: 48391 - RNA, 19 nt, Artificial Sequence
  Description of Artificial Sequence: Synthetic oligonucleotide
gagguguaccacucgggau

SEQ ID NO: 48392 - RNA, 19 nt, Artificial Sequence
  Description of Artificial Sequence: Synthetic oligonucleotide
uacgcagcgugagucggua

SEQ ID NO: 48393 - RNA, 19 nt, Artificial Sequence
  Description of Artificial Sequence: Synthetic oligonucleotide
gauugcggcuggccagguc

SEQ ID NO: 48394 - RNA, 19 nt, Artificial Sequence
  Description of Artificial Sequence: Synthetic oligonucleotide
cuguucgaguucaccaaua

SEQ ID NO: 48395 - RNA, 19 nt, Artificial Sequence
  Description of Artificial Sequence: Synthetic oligonucleotide
auagucucugagagacggu

SEQ ID NO: 48396 - RNA, 19 nt, Artificial Sequence
  Description of Artificial Sequence: Synthetic oligonucleotide
caggucguucuugauggca

SEQ ID NO: 48397 - RNA, 19 nt, Artificial Sequence
  Description of Artificial Sequence: Synthetic oligonucleotide
ggaccuucuuagacuuggg

SEQ ID NO: 48398 - RNA, 19 nt, Artificial Sequence
  Description of Artificial Sequence: Synthetic oligonucleotide
cucacgucucuuucagucu

SEQ ID NO: 48399 - RNA, 19 nt, Artificial Sequence
  Description of Artificial Sequence: Synthetic oligonucleotide
gccgaaauucagacuuaag

SEQ ID NO: 48400 - RNA, 19 nt, Artificial Sequence
  Description of Artificial Sequence: Synthetic oligonucleotide
ccuauacgcacaaggagcu

SEQ ID NO: 48401 - RNA, 19 nt, Artificial Sequence
  Description of Artificial Sequence: Synthetic oligonucleotide
cuguuugagcucagaagau

SEQ ID NO: 48402 - RNA, 19 nt, Artificial Sequence
  Description of Artificial Sequence: Synthetic oligonucleotide
cccaacgugcuggucauug

SEQ ID NO: 48403 - RNA, 19 nt, Artificial Sequence
  Description of Artificial Sequence: Synthetic oligonucleotide
gccucgugagagaacucag

SEQ ID NO: 48404 - RNA, 19 nt, Artificial Sequence
  Description of Artificial Sequence: Synthetic oligonucleotide
agcaaaccccacggacucu

SEQ ID NO: 48405 - RNA, 19 nt, Artificial Sequence
  Description of Artificial Sequence: Synthetic oligonucleotide
cuaagacccucuggagaga

SEQ ID NO: 48406 - RNA, 19 nt, Artificial Sequence
  Description of Artificial Sequence: Synthetic oligonucleotide
ugcuucgcucacgcuugcu

SEQ ID NO: 48407 - RNA, 19 nt, Artificial Sequence
  Description of Artificial Sequence: Synthetic oligonucleotide
gagccgggugcaagaggug

SEQ ID NO: 48408 - RNA, 19 nt, Artificial Sequence
  Description of Artificial Sequence: Synthetic oligonucleotide
cugcggucacacauggcgu

SEQ ID NO: 48409 - RNA, 19 nt, Artificial Sequence
  Description of Artificial Sequence: Synthetic oligonucleotide
caccauaccugaacuggau

SEQ ID NO: 48410 - RNA, 19 nt, Artificial Sequence
  Description of Artificial Sequence: Synthetic oligonucleotide
cugccgaaauucagacuua

SEQ ID NO: 48411 - RNA, 19 nt, Artificial Sequence
  Description of Artificial Sequence: Synthetic oligonucleotide
cagccucgugagagaacuc

SEQ ID NO: 48412 - RNA, 19 nt, Artificial Sequence
  Description of Artificial Sequence: Synthetic oligonucleotide
caggugccucugugaaauc

SEQ ID NO: 48413 - RNA, 19 nt, Artificial Sequence
  Description of Artificial Sequence: Synthetic oligonucleotide
gucugagaauacguccacu

SEQ ID NO: 48414 - RNA, 19 nt, Artificial Sequence
  Description of Artificial Sequence: Synthetic oligonucleotide
gcgugagucgguacaucug

SEQ ID NO: 48415 - RNA, 19 nt, Artificial Sequence
  Description of Artificial Sequence: Synthetic oligonucleotide
ggugccuugaauggcaguu

SEQ ID NO: 48416 - RNA, 19 nt, Artificial Sequence
  Description of Artificial Sequence: Synthetic oligonucleotide
guugagcuauccacauggu

SEQ ID NO: 48417 - RNA, 19 nt, Artificial Sequence
  Description of Artificial Sequence: Synthetic oligonucleotide
auguagccgcccacuuuga

SEQ ID NO: 48418 - RNA, 19 nt, Artificial Sequence
  Description of Artificial Sequence: Synthetic oligonucleotide
ucguggcacgcuggagccu

SEQ ID NO: 48419 - RNA, 19 nt, Artificial Sequence
  Description of Artificial Sequence: Synthetic oligonucleotide
gugcucgggcccuucuucu

SEQ ID NO: 48420 - RNA, 19 nt, Artificial Sequence
  Description of Artificial Sequence: Synthetic oligonucleotide
cagcgugagucgguacauc

SEQ ID NO: 48421 - RNA, 19 nt, Artificial Sequence
  Description of Artificial Sequence: Synthetic oligonucleotide
cacgcaccgccuaguugca

SEQ ID NO: 48422 - RNA, 19 nt, Artificial Sequence
  Description of Artificial Sequence: Synthetic oligonucleotide
agggcgggcuugugcccca

SEQ ID NO: 48423 - RNA, 19 nt, Artificial Sequence
  Description of Artificial Sequence: Synthetic oligonucleotide
ugagcgugaugggcagcuu

SEQ ID NO: 48424 - RNA, 19 nt, Artificial Sequence
  Description of Artificial Sequence: Synthetic oligonucleotide
cccuucuagaacacuggua

SEQ ID NO: 48425 - RNA, 19 nt, Artificial Sequence
  Description of Artificial Sequence: Synthetic oligonucleotide
guagcacguccugaauggu

SEQ ID NO: 48426 - RNA, 19 nt, Artificial Sequence
  Description of Artificial Sequence: Synthetic oligonucleotide
cagucacccauaggaacua

SEQ ID NO: 48427 - RNA, 19 nt, Artificial Sequence
  Description of Artificial Sequence: Synthetic oligonucleotide
ccuagcauuuauugguuuu

SEQ ID NO: 48428 - RNA, 19 nt, Artificial Sequence
  Description of Artificial Sequence: Synthetic oligonucleotide
cggugucuuugcugguacg

SEQ ID NO: 48429 - RNA, 19 nt, Artificial Sequence
  Description of Artificial Sequence: Synthetic oligonucleotide
ggguguuuaucugcagugu

SEQ ID NO: 48430 - RNA, 19 nt, Artificial Sequence
  Description of Artificial Sequence: Synthetic oligonucleotide
guccuagcauuuauugguu

SEQ ID NO: 48431 - RNA, 19 nt, Artificial Sequence
  Description of Artificial Sequence: Synthetic oligonucleotide
cucugagagacggugucuu

SEQ ID NO: 48432 - RNA, 19 nt, Artificial Sequence
  Description of Artificial Sequence: Synthetic oligonucleotide
ccgccuaguugcagcaguc

SEQ ID NO: 48433 - RNA, 19 nt, Artificial Sequence
  Description of Artificial Sequence: Synthetic oligonucleotide
cgcagcgugagucgguaca

SEQ ID NO: 48434 - RNA, 19 nt, Artificial Sequence
  Description of Artificial Sequence: Synthetic oligonucleotide
ggccuaaauucugccgaaa

SEQ ID NO: 48435 - RNA, 19 nt, Artificial Sequence
  Description of Artificial Sequence: Synthetic oligonucleotide
gcugguacgcagcgugagu

SEQ ID NO: 48436 - RNA, 19 nt, Artificial Sequence
  Description of Artificial Sequence: Synthetic oligonucleotide
ccagacccauuaaccuuca

SEQ ID NO: 48437 - RNA, 19 nt, Artificial Sequence
  Description of Artificial Sequence: Synthetic oligonucleotide
gagcuagguaucgcagguu

SEQ ID NO: 48438 - RNA, 19 nt, Artificial Sequence
  Description of Artificial Sequence: Synthetic oligonucleotide
agccgcccacuuugaccaa

SEQ ID NO: 48439 - RNA, 19 nt, Artificial Sequence
  Description of Artificial Sequence: Synthetic oligonucleotide
gcacucagucagacggcca

SEQ ID NO: 48440 - RNA, 19 nt, Artificial Sequence
  Description of Artificial Sequence: Synthetic oligonucleotide
gccgggugcaagaggugca

SEQ ID NO: 48441 - RNA, 19 nt, Artificial Sequence
  Description of Artificial Sequence: Synthetic oligonucleotide
gugccuugaauggcaguuu

SEQ ID NO: 48442 - RNA, 19 nt, Artificial Sequence
  Description of Artificial Sequence: Synthetic oligonucleotide
guacgcagcgugagucggu

SEQ ID NO: 48443 - RNA, 19 nt, Artificial Sequence
  Description of Artificial Sequence: Synthetic oligonucleotide
cccagcuaucaaguuucca

SEQ ID NO: 48444 - RNA, 19 nt, Artificial Sequence
  Description of Artificial Sequence: Synthetic oligonucleotide
cucagcccaugaggucaca

SEQ ID NO: 48445 - RNA, 19 nt, Artificial Sequence
  Description of Artificial Sequence: Synthetic oligonucleotide
ccgcugccgcacacucacg

SEQ ID NO: 48446 - RNA, 19 nt, Artificial Sequence
  Description of Artificial Sequence: Synthetic oligonucleotide
gcuugugccccaacaguuu

SEQ ID NO: 48447 - RNA, 19 nt, Artificial Sequence
  Description of Artificial Sequence: Synthetic oligonucleotide
ggcgggcuugugccccaac

SEQ ID NO: 48448 - RNA, 19 nt, Artificial Sequence
  Description of Artificial Sequence: Synthetic oligonucleotide
gcacuagugcuggcuggaa

SEQ ID NO: 48449 - RNA, 19 nt, Artificial Sequence
  Description of Artificial Sequence: Synthetic oligonucleotide
gcagcgugagucgguacau

SEQ ID NO: 48450 - RNA, 19 nt, Artificial Sequence
  Description of Artificial Sequence: Synthetic oligonucleotide
cugugcucgggcccuucuu

SEQ ID NO: 48451 - RNA, 19 nt, Artificial Sequence
  Description of Artificial Sequence: Synthetic oligonucleotide
acccaacgugcuggucauu

SEQ ID NO: 48452 - RNA, 19 nt, Artificial Sequence
  Description of Artificial Sequence: Synthetic oligonucleotide
cggccuaaauucugccgaa

SEQ ID NO: 48453 - RNA, 19 nt, Artificial Sequence
  Description of Artificial Sequence: Synthetic oligonucleotide
gccgcacacucacgucucu

SEQ ID NO: 48454 - RNA, 19 nt, Artificial Sequence
  Description of Artificial Sequence: Synthetic oligonucleotide
ccgggugcaagaggugcaa

SEQ ID NO: 48455 - RNA, 19 nt, Artificial Sequence
  Description of Artificial Sequence: Synthetic oligonucleotide
ggccacgcaccgccuaguu

SEQ ID NO: 48456 - RNA, 19 nt, Artificial Sequence
  Description of Artificial Sequence: Synthetic oligonucleotide
cgcacacucacgucucuuu

SEQ ID NO: 48457 - RNA, 19 nt, Artificial Sequence
  Description of Artificial Sequence: Synthetic oligonucleotide
ggauugcggcuggccaggu

SEQ ID NO: 48458 - RNA, 19 nt, Artificial Sequence
  Description of Artificial Sequence: Synthetic oligonucleotide
gggcaacaacuaagacccu

SEQ ID NO: 48459 - RNA, 19 nt, Artificial Sequence
  Description of Artificial Sequence: Synthetic oligonucleotide
gggcgggcuugugccccaa

SEQ ID NO: 48460 - RNA, 19 nt, Artificial Sequence
  Description of Artificial Sequence: Synthetic oligonucleotide
ccgcacacucacgucucuu

SEQ ID NO: 48461 - RNA, 19 nt, Artificial Sequence
  Description of Artificial Sequence: Synthetic oligonucleotide
auaacagccuguuagaucc

SEQ ID NO: 48462 - RNA, 19 nt, Artificial Sequence
  Description of Artificial Sequence: Synthetic oligonucleotide
aguaccucuaucuauaacc

SEQ ID NO: 48463 - RNA, 19 nt, Artificial Sequence
  Description of Artificial Sequence: Synthetic oligonucleotide
aauccaauguaccaagggc

SEQ ID NO: 48464 - RNA, 19 nt, Artificial Sequence
  Description of Artificial Sequence: Synthetic oligonucleotide
ucuaauuuaaccaacugcu

SEQ ID NO: 48465 - RNA, 19 nt, Artificial Sequence
  Description of Artificial Sequence: Synthetic oligonucleotide
uaugaaaucuaauuuaacc

SEQ ID NO: 48466 - RNA, 19 nt, Artificial Sequence
  Description of Artificial Sequence: Synthetic oligonucleotide
cuaucuauaacccuuuugg

SEQ ID NO: 48467 - RNA, 19 nt, Artificial Sequence
  Description of Artificial Sequence: Synthetic oligonucleotide
aagggcuuaauccucacac

SEQ ID NO: 48468 - RNA, 19 nt, Artificial Sequence
  Description of Artificial Sequence: Synthetic oligonucleotide
aaagcgucccaucugaggg

SEQ ID NO: 48469 - RNA, 19 nt, Artificial Sequence
  Description of Artificial Sequence: Synthetic oligonucleotide
aguuuuaaaucucuacccc

SEQ ID NO: 48470 - RNA, 19 nt, Artificial Sequence
  Description of Artificial Sequence: Synthetic oligonucleotide
aaugguaauccaauguacc

SEQ ID NO: 48471 - RNA, 19 nt, Artificial Sequence
  Description of Artificial Sequence: Synthetic oligonucleotide
aguaagaucacaaaggaug

SEQ ID NO: 48472 - RNA, 19 nt, Artificial Sequence
  Description of Artificial Sequence: Synthetic oligonucleotide
uguacuuaucgacaauugg

SEQ ID NO: 48473 - RNA, 19 nt, Artificial Sequence
  Description of Artificial Sequence: Synthetic oligonucleotide
aaaccauacaaugugaugu

SEQ ID NO: 48474 - RNA, 19 nt, Artificial Sequence
  Description of Artificial Sequence: Synthetic oligonucleotide
uuggacagaauaaucauug

SEQ ID NO: 48475 - RNA, 19 nt, Artificial Sequence
  Description of Artificial Sequence: Synthetic oligonucleotide
aauaaugacuguucuugag

SEQ ID NO: 48476 - RNA, 19 nt, Artificial Sequence
  Description of Artificial Sequence: Synthetic oligonucleotide
cagacuaagggcuuaaucc

SEQ ID NO: 48477 - RNA, 19 nt, Artificial Sequence
  Description of Artificial Sequence: Synthetic oligonucleotide
ggugauuauaaacagacag

SEQ ID NO: 48478 - RNA, 19 nt, Artificial Sequence
  Description of Artificial Sequence: Synthetic oligonucleotide
uuaucaaguaccucuaucu

SEQ ID NO: 48479 - RNA, 19 nt, Artificial Sequence
  Description of Artificial Sequence: Synthetic oligonucleotide
guaagguugucauauaacc

SEQ ID NO: 48480 - RNA, 19 nt, Artificial Sequence
  Description of Artificial Sequence: Synthetic oligonucleotide
ugagaaagcugacauaaug

SEQ ID NO: 48481 - RNA, 19 nt, Artificial Sequence
  Description of Artificial Sequence: Synthetic oligonucleotide
agaacuaaaaccaucaagu

SEQ ID NO: 48482 - RNA, 19 nt, Artificial Sequence
  Description of Artificial Sequence: Synthetic oligonucleotide
aaagcuauugccaaaucug

SEQ ID NO: 48483 - RNA, 19 nt, Artificial Sequence
  Description of Artificial Sequence: Synthetic oligonucleotide
ugaagcacuaagcuaaugu

SEQ ID NO: 48484 - RNA, 19 nt, Artificial Sequence
  Description of Artificial Sequence: Synthetic oligonucleotide
auauagagaaaguagcaca

SEQ ID NO: 48485 - RNA, 19 nt, Artificial Sequence
  Description of Artificial Sequence: Synthetic oligonucleotide
uauaaucacuaucugggca

SEQ ID NO: 48486 - RNA, 19 nt, Artificial Sequence
  Description of Artificial Sequence: Synthetic oligonucleotide
aagcacuaagcuaaugugc

SEQ ID NO: 48487 - RNA, 19 nt, Artificial Sequence
  Description of Artificial Sequence: Synthetic oligonucleotide
agcucuuauggccaggagc

SEQ ID NO: 48488 - RNA, 19 nt, Artificial Sequence
  Description of Artificial Sequence: Synthetic oligonucleotide
acauucuucauaucucucg

SEQ ID NO: 48489 - RNA, 19 nt, Artificial Sequence
  Description of Artificial Sequence: Synthetic oligonucleotide
auaaaugguaauccaaugu

SEQ ID NO: 48490 - RNA, 19 nt, Artificial Sequence
  Description of Artificial Sequence: Synthetic oligonucleotide
auaagcacgacccacuucu

SEQ ID NO: 48491 - RNA, 19 nt, Artificial Sequence
  Description of Artificial Sequence: Synthetic oligonucleotide
gaauucuggcaauaaauug

SEQ ID NO: 48492 - RNA, 19 nt, Artificial Sequence
  Description of Artificial Sequence: Synthetic oligonucleotide
ucuaggauuccaaauauua

SEQ ID NO: 48493 - RNA, 19 nt, Artificial Sequence
  Description of Artificial Sequence: Synthetic oligonucleotide
aagguugucauauaaccau

SEQ ID NO: 48494 - RNA, 19 nt, Artificial Sequence
  Description of Artificial Sequence: Synthetic oligonucleotide
caucauuacaagcugcugg

SEQ ID NO: 48495 - RNA, 19 nt, Artificial Sequence
  Description of Artificial Sequence: Synthetic oligonucleotide
uacuuaucgacaauuggca

SEQ ID NO: 48496 - RNA, 19 nt, Artificial Sequence
  Description of Artificial Sequence: Synthetic oligonucleotide
aaccuaguaagucaugagu

SEQ ID NO: 48497 - RNA, 19 nt, Artificial Sequence
  Description of Artificial Sequence: Synthetic oligonucleotide
aaucgacugaauuacuacu

SEQ ID NO: 48498 - RNA, 19 nt, Artificial Sequence
  Description of Artificial Sequence: Synthetic oligonucleotide
auauaaccauacaaaagcc

SEQ ID NO: 48499 - RNA, 19 nt, Artificial Sequence
  Description of Artificial Sequence: Synthetic oligonucleotide
uggucuuacccucaucucg

SEQ ID NO: 48500 - RNA, 19 nt, Artificial Sequence
  Description of Artificial Sequence: Synthetic oligonucleotide
ucauauuucucaagugucc

SEQ ID NO: 48501 - RNA, 19 nt, Artificial Sequence
  Description of Artificial Sequence: Synthetic oligonucleotide
acauaauguggacuuuugc

SEQ ID NO: 48502 - RNA, 19 nt, Artificial Sequence
  Description of Artificial Sequence: Synthetic oligonucleotide
ggccuuuacaaauagaucc

SEQ ID NO: 48503 - RNA, 19 nt, Artificial Sequence
  Description of Artificial Sequence: Synthetic oligonucleotide
ugugcguccagaaugacaa

SEQ ID NO: 48504 - RNA, 19 nt, Artificial Sequence
  Description of Artificial Sequence: Synthetic oligonucleotide
uuuuaggcuaaacccauca

SEQ ID NO: 48505 - RNA, 19 nt, Artificial Sequence
  Description of Artificial Sequence: Synthetic oligonucleotide
uuucgguuucaaaauaagc

SEQ ID NO: 48506 - RNA, 19 nt, Artificial Sequence
  Description of Artificial Sequence: Synthetic oligonucleotide
agacuaacuaugucuaagg

SEQ ID NO: 48507 - RNA, 19 nt, Artificial Sequence
  Description of Artificial Sequence: Synthetic oligonucleotide
uauaaccauacaaaagccu

SEQ ID NO: 48508 - RNA, 19 nt, Artificial Sequence
  Description of Artificial Sequence: Synthetic oligonucleotide
uacccuaucugaauucugg

SEQ ID NO: 48509 - RNA, 19 nt, Artificial Sequence
  Description of Artificial Sequence: Synthetic oligonucleotide
aauuagauggcaucuguua

SEQ ID NO: 48510 - RNA, 19 nt, Artificial Sequence
  Description of Artificial Sequence: Synthetic oligonucleotide
ucuaauaagucuguuagau

SEQ ID NO: 48511 - RNA, 19 nt, Artificial Sequence
  Description of Artificial Sequence: Synthetic oligonucleotide
auaaccauacaaaagccuc

SEQ ID NO: 48512 - RNA, 19 nt, Artificial Sequence
  Description of Artificial Sequence: Synthetic oligonucleotide
gaagcacuaagcuaaugug

SEQ ID NO: 48513 - RNA, 19 nt, Artificial Sequence
  Description of Artificial Sequence: Synthetic oligonucleotide
caucucgcaagguaaagcg

SEQ ID NO: 48514 - RNA, 19 nt, Artificial Sequence
  Description of Artificial Sequence: Synthetic oligonucleotide
ugauguuauuaucaaguac

SEQ ID NO: 48515 - RNA, 19 nt, Artificial Sequence
  Description of Artificial Sequence: Synthetic oligonucleotide
aaggcuguuauuucgacuu

SEQ ID NO: 48516 - RNA, 19 nt, Artificial Sequence
  Description of Artificial Sequence: Synthetic oligonucleotide
ugucuaaggcccaagacaa

SEQ ID NO: 48517 - RNA, 19 nt, Artificial Sequence
  Description of Artificial Sequence: Synthetic oligonucleotide
uaagguugucauauaacca

SEQ ID NO: 48518 - RNA, 19 nt, Artificial Sequence
  Description of Artificial Sequence: Synthetic oligonucleotide
aaaccuaguaagucaugag

SEQ ID NO: 48519 - RNA, 19 nt, Artificial Sequence
  Description of Artificial Sequence: Synthetic oligonucleotide
gagaaaguagcacagagua

SEQ ID NO: 48520 - RNA, 19 nt, Artificial Sequence
  Description of Artificial Sequence: Synthetic oligonucleotide
cuaccuagaacacucauuc

SEQ ID NO: 48521 - RNA, 19 nt, Artificial Sequence
  Description of Artificial Sequence: Synthetic oligonucleotide
aaggaugaauccuggaaga

SEQ ID NO: 48522 - RNA, 19 nt, Artificial Sequence
  Description of Artificial Sequence: Synthetic oligonucleotide
aauucugcggcguggacgu

SEQ ID NO: 48523 - RNA, 19 nt, Artificial Sequence
  Description of Artificial Sequence: Synthetic oligonucleotide
cuuucccgcaucaacaugc

SEQ ID NO: 48524 - RNA, 19 nt, Artificial Sequence
  Description of Artificial Sequence: Synthetic oligonucleotide
uuggcuagcauauuauugu

SEQ ID NO: 48525 - RNA, 19 nt, Artificial Sequence
  Description of Artificial Sequence: Synthetic oligonucleotide
aagacuaacuaugucuaag

SEQ ID NO: 48526 - RNA, 19 nt, Artificial Sequence
  Description of Artificial Sequence: Synthetic oligonucleotide
ucuccaaacaaaugguccc

SEQ ID NO: 48527 - RNA, 19 nt, Artificial Sequence
  Description of Artificial Sequence: Synthetic oligonucleotide
cuagaacacucauucaugc

SEQ ID NO: 48528 - RNA, 19 nt, Artificial Sequence
  Description of Artificial Sequence: Synthetic oligonucleotide
uuuccuaccuagaacacuc

SEQ ID NO: 48529 - RNA, 19 nt, Artificial Sequence
  Description of Artificial Sequence: Synthetic oligonucleotide
aauaagcacgacccacuuc

SEQ ID NO: 48530 - RNA, 19 nt, Artificial Sequence
  Description of Artificial Sequence: Synthetic oligonucleotide
auuugaguaauugcaagag

SEQ ID NO: 48531 - RNA, 19 nt, Artificial Sequence
  Description of Artificial Sequence: Synthetic oligonucleotide
uguaagguugucauauaac

SEQ ID NO: 48532 - RNA, 19 nt, Artificial Sequence
  Description of Artificial Sequence: Synthetic oligonucleotide
guacuuuucccuugcaccg

SEQ ID NO: 48533 - RNA, 19 nt, Artificial Sequence
  Description of Artificial Sequence: Synthetic oligonucleotide
uuaggcuaaacccaucaaa

SEQ ID NO: 48534 - RNA, 19 nt, Artificial Sequence
  Description of Artificial Sequence: Synthetic oligonucleotide
aagguaaagcgucccaucu

SEQ ID NO: 48535 - RNA, 19 nt, Artificial Sequence
  Description of Artificial Sequence: Synthetic oligonucleotide
aaguaccucuaucuauaac

SEQ ID NO: 48536 - RNA, 19 nt, Artificial Sequence
  Description of Artificial Sequence: Synthetic oligonucleotide
uaagcuaaugugccgagaa

SEQ ID NO: 48537 - RNA, 19 nt, Artificial Sequence
  Description of Artificial Sequence: Synthetic oligonucleotide
caaugaauacuacauuuac

SEQ ID NO: 48538 - RNA, 19 nt, Artificial Sequence
  Description of Artificial Sequence: Synthetic oligonucleotide
auaauuagauggcaucugu

SEQ ID NO: 48539 - RNA, 19 nt, Artificial Sequence
  Description of Artificial Sequence: Synthetic oligonucleotide
cuucuuaacaugugcacac

SEQ ID NO: 48540 - RNA, 19 nt, Artificial Sequence
  Description of Artificial Sequence: Synthetic oligonucleotide
ugccuaaccaggcuuagug

SEQ ID NO: 48541 - RNA, 19 nt, Artificial Sequence
  Description of Artificial Sequence: Synthetic oligonucleotide
ugacaucugaagcacuaag

SEQ ID NO: 48542 - RNA, 19 nt, Artificial Sequence
  Description of Artificial Sequence: Synthetic oligonucleotide
uguuagauauguccaguac

SEQ ID NO: 48543 - RNA, 19 nt, Artificial Sequence
  Description of Artificial Sequence: Synthetic oligonucleotide
auauuaagaauaucccaga

SEQ ID NO: 48544 - RNA, 19 nt, Artificial Sequence
  Description of Artificial Sequence: Synthetic oligonucleotide
ugggcucuagguauuaacc

SEQ ID NO: 48545 - RNA, 19 nt, Artificial Sequence
  Description of Artificial Sequence: Synthetic oligonucleotide
uaaagcgucccaucugagg

SEQ ID NO: 48546 - RNA, 19 nt, Artificial Sequence
  Description of Artificial Sequence: Synthetic oligonucleotide
uuuaacaaguugcugccau

SEQ ID NO: 48547 - RNA, 19 nt, Artificial Sequence
  Description of Artificial Sequence: Synthetic oligonucleotide
uuauacccugggcagauga

SEQ ID NO: 48548 - RNA, 19 nt, Artificial Sequence
  Description of Artificial Sequence: Synthetic oligonucleotide
augcaaucgacugaauuac

SEQ ID NO: 48549 - RNA, 19 nt, Artificial Sequence
  Description of Artificial Sequence: Synthetic oligonucleotide
uaaaccuaguaagucauga

SEQ ID NO: 48550 - RNA, 19 nt, Artificial Sequence
  Description of Artificial Sequence: Synthetic oligonucleotide
guugacguugaguugccgg

SEQ ID NO: 48551 - RNA, 19 nt, Artificial Sequence
  Description of Artificial Sequence: Synthetic oligonucleotide
uuguacuuaucgacaauug

SEQ ID NO: 48552 - RNA, 19 nt, Artificial Sequence
  Description of Artificial Sequence: Synthetic oligonucleotide
gacggcacgaauucugcgg

SEQ ID NO: 48553 - RNA, 19 nt, Artificial Sequence
  Description of Artificial Sequence: Synthetic oligonucleotide
auaaucacuaucugggcau

SEQ ID NO: 48554 - RNA, 19 nt, Artificial Sequence
  Description of Artificial Sequence: Synthetic oligonucleotide
ucgauacaaaauauauaga

SEQ ID NO: 48555 - RNA, 19 nt, Artificial Sequence
  Description of Artificial Sequence: Synthetic oligonucleotide
uugucgaccauuccaguca

SEQ ID NO: 48556 - RNA, 19 nt, Artificial Sequence
  Description of Artificial Sequence: Synthetic oligonucleotide
uuucuauuccacauacuau

SEQ ID NO: 48557 - RNA, 19 nt, Artificial Sequence
  Description of Artificial Sequence: Synthetic oligonucleotide
guuauuucgacuuccucga

SEQ ID NO: 48558 - RNA, 19 nt, Artificial Sequence
  Description of Artificial Sequence: Synthetic oligonucleotide
ugcagcaccgcauuauacc

SEQ ID NO: 48559 - RNA, 19 nt, Artificial Sequence
  Description of Artificial Sequence: Synthetic oligonucleotide
ggcagaaaauaagagaagg

SEQ ID NO: 48560 - RNA, 19 nt, Artificial Sequence
  Description of Artificial Sequence: Synthetic oligonucleotide
aauauggggagaguuuugu

SEQ ID NO: 48561 - RNA, 19 nt, Artificial Sequence
  Description of Artificial Sequence: Synthetic oligonucleotide
aagcacgacccacuucuac

SEQ ID NO: 48562 - RNA, 19 nt, Artificial Sequence
  Description of Artificial Sequence: Synthetic oligonucleotide
aauuauccagauauggaau

SEQ ID NO: 48563 - RNA, 19 nt, Artificial Sequence
  Description of Artificial Sequence: Synthetic oligonucleotide
cuuacccucaucucgcaag

SEQ ID NO: 48564 - RNA, 19 nt, Artificial Sequence
  Description of Artificial Sequence: Synthetic oligonucleotide
caucuagaauuguaaaaug

SEQ ID NO: 48565 - RNA, 19 nt, Artificial Sequence
  Description of Artificial Sequence: Synthetic oligonucleotide
acccuaucugaauucuggc

SEQ ID NO: 48566 - RNA, 19 nt, Artificial Sequence
  Description of Artificial Sequence: Synthetic oligonucleotide
aaucuacccuaucugaauu

SEQ ID NO: 48567 - RNA, 19 nt, Artificial Sequence
  Description of Artificial Sequence: Synthetic oligonucleotide
agcagauuaaggcuguuau

SEQ ID NO: 48568 - RNA, 19 nt, Artificial Sequence
  Description of Artificial Sequence: Synthetic oligonucleotide
agggcauaaaaugaauguc

SEQ ID NO: 48569 - RNA, 19 nt, Artificial Sequence
  Description of Artificial Sequence: Synthetic oligonucleotide
uucagaugcaaucgacuga

SEQ ID NO: 48570 - RNA, 19 nt, Artificial Sequence
  Description of Artificial Sequence: Synthetic oligonucleotide
uccguuucuacaucaucag

SEQ ID NO: 48571 - RNA, 19 nt, Artificial Sequence
  Description of Artificial Sequence: Synthetic oligonucleotide
agauuaugaauaauuagau

SEQ ID NO: 48572 - RNA, 19 nt, Artificial Sequence
  Description of Artificial Sequence: Synthetic oligonucleotide
accgcauuauacccugggc

SEQ ID NO: 48573 - RNA, 19 nt, Artificial Sequence
  Description of Artificial Sequence: Synthetic oligonucleotide
ucauucaugcuuuggaauu

SEQ ID NO: 48574 - RNA, 19 nt, Artificial Sequence
  Description of Artificial Sequence: Synthetic oligonucleotide
augggcucuagguauuaac

SEQ ID NO: 48575 - RNA, 19 nt, Artificial Sequence
  Description of Artificial Sequence: Synthetic oligonucleotide
accuagaacacucauucau

SEQ ID NO: 48576 - RNA, 19 nt, Artificial Sequence
  Description of Artificial Sequence: Synthetic oligonucleotide
agagcucucaauaugagaa

SEQ ID NO: 48577 - RNA, 19 nt, Artificial Sequence
  Description of Artificial Sequence: Synthetic oligonucleotide
acggcacgaauucugcggc

SEQ ID NO: 48578 - RNA, 19 nt, Artificial Sequence
  Description of Artificial Sequence: Synthetic oligonucleotide
uugagaggcaccaccaauc

SEQ ID NO: 48579 - RNA, 19 nt, Artificial Sequence
  Description of Artificial Sequence: Synthetic oligonucleotide
aagcuaaugugccgagaag

SEQ ID NO: 48580 - RNA, 19 nt, Artificial Sequence
  Description of Artificial Sequence: Synthetic oligonucleotide
uccaguuuaccguuggauc

SEQ ID NO: 48581 - RNA, 19 nt, Artificial Sequence
  Description of Artificial Sequence: Synthetic oligonucleotide
uuugaaccuucacacaaua

SEQ ID NO: 48582 - RNA, 19 nt, Artificial Sequence
  Description of Artificial Sequence: Synthetic oligonucleotide
caaagauuaguaagaucac

SEQ ID NO: 48583 - RNA, 19 nt, Artificial Sequence
  Description of Artificial Sequence: Synthetic oligonucleotide
uucucuugaucuuuauuaa

SEQ ID NO: 48584 - RNA, 19 nt, Artificial Sequence
  Description of Artificial Sequence: Synthetic oligonucleotide
aucuacccuaucugaauuc

SEQ ID NO: 48585 - RNA, 19 nt, Artificial Sequence
  Description of Artificial Sequence: Synthetic oligonucleotide
cuguuuuacccuugucucg

SEQ ID NO: 48586 - RNA, 19 nt, Artificial Sequence
  Description of Artificial Sequence: Synthetic oligonucleotide
ucagaugcaaucgacugaa

SEQ ID NO: 48587 - RNA, 19 nt, Artificial Sequence
  Description of Artificial Sequence: Synthetic oligonucleotide
uuaccguuggaucauccau

SEQ ID NO: 48588 - RNA, 19 nt, Artificial Sequence
  Description of Artificial Sequence: Synthetic oligonucleotide
acauaaaaccauacaaugu

SEQ ID NO: 48589 - RNA, 19 nt, Artificial Sequence
  Description of Artificial Sequence: Synthetic oligonucleotide
aucaaguaccucuaucuau

SEQ ID NO: 48590 - RNA, 19 nt, Artificial Sequence
  Description of Artificial Sequence: Synthetic oligonucleotide
uccugaauuguagagguuc

SEQ ID NO: 48591 - RNA, 19 nt, Artificial Sequence
  Description of Artificial Sequence: Synthetic oligonucleotide
auggauaugcagcaccgca

SEQ ID NO: 48592 - RNA, 19 nt, Artificial Sequence
  Description of Artificial Sequence: Synthetic oligonucleotide
gacaaagauuaguaagauc

SEQ ID NO: 48593 - RNA, 19 nt, Artificial Sequence
  Description of Artificial Sequence: Synthetic oligonucleotide
guauggauaugcagcaccg

SEQ ID NO: 48594 - RNA, 19 nt, Artificial Sequence
  Description of Artificial Sequence: Synthetic oligonucleotide
auauggaauaaaugguaau

SEQ ID NO: 48595 - RNA, 19 nt, Artificial Sequence
  Description of Artificial Sequence: Synthetic oligonucleotide
cuacuacggguucugaaag

SEQ ID NO: 48596 - RNA, 19 nt, Artificial Sequence
  Description of Artificial Sequence: Synthetic oligonucleotide
gugucuaaggcccaagaca

SEQ ID NO: 48597 - RNA, 19 nt, Artificial Sequence
  Description of Artificial Sequence: Synthetic oligonucleotide
aaggcggugugaaguaggc

SEQ ID NO: 48598 - RNA, 19 nt, Artificial Sequence
  Description of Artificial Sequence: Synthetic oligonucleotide
cauuugaguaauugcaaga

SEQ ID NO: 48599 - RNA, 19 nt, Artificial Sequence
  Description of Artificial Sequence: Synthetic oligonucleotide
uuugucgaccauuccaguc

SEQ ID NO: 48600 - RNA, 19 nt, Artificial Sequence
  Description of Artificial Sequence: Synthetic oligonucleotide
auauggggagaguuuuguc

SEQ ID NO: 48601 - RNA, 19 nt, Artificial Sequence
  Description of Artificial Sequence: Synthetic oligonucleotide
ugcuaaauuuaaaccuagu

SEQ ID NO: 48602 - RNA, 19 nt, Artificial Sequence
  Description of Artificial Sequence: Synthetic oligonucleotide
ccaauaguugacuuucccg

SEQ ID NO: 48603 - RNA, 19 nt, Artificial Sequence
  Description of Artificial Sequence: Synthetic oligonucleotide
uguuuuacccuugucucgu

SEQ ID NO: 48604 - RNA, 19 nt, Artificial Sequence
  Description of Artificial Sequence: Synthetic oligonucleotide
agcucucaauaugagaaag

SEQ ID NO: 48605 - RNA, 19 nt, Artificial Sequence
  Description of Artificial Sequence: Synthetic oligonucleotide
ugcaccggaaaacaaguuu

SEQ ID NO: 48606 - RNA, 19 nt, Artificial Sequence
  Description of Artificial Sequence: Synthetic oligonucleotide
ucaucucgcaagguaaagc

SEQ ID NO: 48607 - RNA, 19 nt, Artificial Sequence
  Description of Artificial Sequence: Synthetic oligonucleotide
uuuaggcuaaacccaucaa

SEQ ID NO: 48608 - RNA, 19 nt, Artificial Sequence
  Description of Artificial Sequence: Synthetic oligonucleotide
uaauuagauggcaucuguu

SEQ ID NO: 48609 - RNA, 19 nt, Artificial Sequence
  Description of Artificial Sequence: Synthetic oligonucleotide
acuaagcuaaugugccgag

SEQ ID NO: 48610 - RNA, 19 nt, Artificial Sequence
  Description of Artificial Sequence: Synthetic oligonucleotide
cuaaugugccgagaagagg

SEQ ID NO: 48611 - RNA, 19 nt, Artificial Sequence
  Description of Artificial Sequence: Synthetic oligonucleotide
guaccucuaucuauaaccc

SEQ ID NO: 48612 - RNA, 19 nt, Artificial Sequence
  Description of Artificial Sequence: Synthetic oligonucleotide
uaaauccuggccugagaga

SEQ ID NO: 48613 - RNA, 19 nt, Artificial Sequence
  Description of Artificial Sequence: Synthetic oligonucleotide
uauuucgacuuccucgaua

SEQ ID NO: 48614 - RNA, 19 nt, Artificial Sequence
  Description of Artificial Sequence: Synthetic oligonucleotide
gcuagcauauuauuguuuc

SEQ ID NO: 48615 - RNA, 19 nt, Artificial Sequence
  Description of Artificial Sequence: Synthetic oligonucleotide
aaagcucuuauggccagga

SEQ ID NO: 48616 - RNA, 19 nt, Artificial Sequence
  Description of Artificial Sequence: Synthetic oligonucleotide
acgugcaaugcauacuuga

SEQ ID NO: 48617 - RNA, 19 nt, Artificial Sequence
  Description of Artificial Sequence: Synthetic oligonucleotide
uuccucgauacagguaugg

SEQ ID NO: 48618 - RNA, 19 nt, Artificial Sequence
  Description of Artificial Sequence: Synthetic oligonucleotide
agaugcaaucgacugaauu

SEQ ID NO: 48619 - RNA, 19 nt, Artificial Sequence
  Description of Artificial Sequence: Synthetic oligonucleotide
gaaggcggugugaaguagg

SEQ ID NO: 48620 - RNA, 19 nt, Artificial Sequence
  Description of Artificial Sequence: Synthetic oligonucleotide
acugaucuauugaaguuug

SEQ ID NO: 48621 - RNA, 19 nt, Artificial Sequence
  Description of Artificial Sequence: Synthetic oligonucleotide
guaagaucacaaaggauga

SEQ ID NO: 48622 - RNA, 19 nt, Artificial Sequence
  Description of Artificial Sequence: Synthetic oligonucleotide
ucuacccuaucugaauucu

SEQ ID NO: 48623 - RNA, 19 nt, Artificial Sequence
  Description of Artificial Sequence: Synthetic oligonucleotide
aaucuuggggaaaauucaa

SEQ ID NO: 48624 - RNA, 19 nt, Artificial Sequence
  Description of Artificial Sequence: Synthetic oligonucleotide
ucgauacagguauggauau

SEQ ID NO: 48625 - RNA, 19 nt, Artificial Sequence
  Description of Artificial Sequence: Synthetic oligonucleotide
gaguaauugcaagagcaga

SEQ ID NO: 48626 - RNA, 19 nt, Artificial Sequence
  Description of Artificial Sequence: Synthetic oligonucleotide
uaccguuggaucauccauc

SEQ ID NO: 48627 - RNA, 19 nt, Artificial Sequence
  Description of Artificial Sequence: Synthetic oligonucleotide
ucuagguauuaaccaguuc

SEQ ID NO: 48628 - RNA, 19 nt, Artificial Sequence
  Description of Artificial Sequence: Synthetic oligonucleotide
uggauaugcagcaccgcau

SEQ ID NO: 48629 - RNA, 19 nt, Artificial Sequence
  Description of Artificial Sequence: Synthetic oligonucleotide
uugaaccuucacacaauaa

SEQ ID NO: 48630 - RNA, 19 nt, Artificial Sequence
  Description of Artificial Sequence: Synthetic oligonucleotide
ugggcaucaaaugugcguc

SEQ ID NO: 48631 - RNA, 19 nt, Artificial Sequence
  Description of Artificial Sequence: Synthetic oligonucleotide
aguacucgauacaaaauau

SEQ ID NO: 48632 - RNA, 19 nt, Artificial Sequence
  Description of Artificial Sequence: Synthetic oligonucleotide
acaucacuuacaaagcuau

SEQ ID NO: 48633 - RNA, 19 nt, Artificial Sequence
  Description of Artificial Sequence: Synthetic oligonucleotide
uuauccagauauggaauaa

SEQ ID NO: 48634 - RNA, 19 nt, Artificial Sequence
  Description of Artificial Sequence: Synthetic oligonucleotide
auggggagaguuuugucaa

SEQ ID NO: 48635 - RNA, 19 nt, Artificial Sequence
  Description of Artificial Sequence: Synthetic oligonucleotide
gguaguugucuucuuaaca

SEQ ID NO: 48636 - RNA, 19 nt, Artificial Sequence
  Description of Artificial Sequence: Synthetic oligonucleotide
aguacagccaagucagcuu

SEQ ID NO: 48637 - RNA, 19 nt, Artificial Sequence
  Description of Artificial Sequence: Synthetic oligonucleotide
ugagguucccaugucaaua

SEQ ID NO: 48638 - RNA, 19 nt, Artificial Sequence
  Description of Artificial Sequence: Synthetic oligonucleotide
cucgcaagguaaagcgucc

SEQ ID NO: 48639 - RNA, 19 nt, Artificial Sequence
  Description of Artificial Sequence: Synthetic oligonucleotide
gcuaaauuuaaaccuagua

SEQ ID NO: 48640 - RNA, 19 nt, Artificial Sequence
  Description of Artificial Sequence: Synthetic oligonucleotide
aagcucuuauggccaggag

SEQ ID NO: 48641 - RNA, 19 nt, Artificial Sequence
  Description of Artificial Sequence: Synthetic oligonucleotide
accgacuuagguuuuggua

SEQ ID NO: 48642 - RNA, 19 nt, Artificial Sequence
  Description of Artificial Sequence: Synthetic oligonucleotide
uacuuuucccuugcaccgg

SEQ ID NO: 48643 - RNA, 19 nt, Artificial Sequence
  Description of Artificial Sequence: Synthetic oligonucleotide
caagguaaagcgucccauc

SEQ ID NO: 48644 - RNA, 19 nt, Artificial Sequence
  Description of Artificial Sequence: Synthetic oligonucleotide
aacuaugucuaaggggaaa

SEQ ID NO: 48645 - RNA, 19 nt, Artificial Sequence
  Description of Artificial Sequence: Synthetic oligonucleotide
ugcaaucgacugaauuacu

SEQ ID NO: 48646 - RNA, 19 nt, Artificial Sequence
  Description of Artificial Sequence: Synthetic oligonucleotide
agguaaagcgucccaucug

SEQ ID NO: 48647 - RNA, 19 nt, Artificial Sequence
  Description of Artificial Sequence: Synthetic oligonucleotide
gguaaagcgucccaucuga

SEQ ID NO: 48648 - RNA, 19 nt, Artificial Sequence
  Description of Artificial Sequence: Synthetic oligonucleotide
ucgaccauuccagucaaau

SEQ ID NO: 48649 - RNA, 19 nt, Artificial Sequence
  Description of Artificial Sequence: Synthetic oligonucleotide
aacggggucgagucuuacu

SEQ ID NO: 48650 - RNA, 19 nt, Artificial Sequence
  Description of Artificial Sequence: Synthetic oligonucleotide
uugccaaaucuguccaaga

SEQ ID NO: 48651 - RNA, 19 nt, Artificial Sequence
  Description of Artificial Sequence: Synthetic oligonucleotide
aagucaugaguugugcaua

SEQ ID NO: 48652 - RNA, 19 nt, Artificial Sequence
  Description of Artificial Sequence: Synthetic oligonucleotide
agucaauauuccucacagu

SEQ ID NO: 48653 - RNA, 19 nt, Artificial Sequence
  Description of Artificial Sequence: Synthetic oligonucleotide
auaguugacuuucccgcau

SEQ ID NO: 48654 - RNA, 19 nt, Artificial Sequence
  Description of Artificial Sequence: Synthetic oligonucleotide
ucacaaaacggggucgagu

SEQ ID NO: 48655 - RNA, 19 nt, Artificial Sequence
  Description of Artificial Sequence: Synthetic oligonucleotide
uauggauaugcagcaccgc

SEQ ID NO: 48656 - RNA, 19 nt, Artificial Sequence
  Description of Artificial Sequence: Synthetic oligonucleotide
uugggacaaagcucuuaug

SEQ ID NO: 48657 - RNA, 19 nt, Artificial Sequence
  Description of Artificial Sequence: Synthetic oligonucleotide
gaaggccgcacugagguuc

SEQ ID NO: 48658 - RNA, 19 nt, Artificial Sequence
  Description of Artificial Sequence: Synthetic oligonucleotide
agucaugaguugugcauau

SEQ ID NO: 48659 - RNA, 19 nt, Artificial Sequence
  Description of Artificial Sequence: Synthetic oligonucleotide
uaccucuaucuauaacccu

SEQ ID NO: 48660 - RNA, 19 nt, Artificial Sequence
  Description of Artificial Sequence: Synthetic oligonucleotide
aggacggcacgaauucugc

SEQ ID NO: 48661 - RNA, 19 nt, Artificial Sequence
  Description of Artificial Sequence: Synthetic oligonucleotide
accuaguaagucaugaguu

SEQ ID NO: 48662 - RNA, 19 nt, Artificial Sequence
  Description of Artificial Sequence: Synthetic oligonucleotide
caccgcauuauacccuggg

SEQ ID NO: 48663 - RNA, 19 nt, Artificial Sequence
  Description of Artificial Sequence: Synthetic oligonucleotide
uaccuagaacacucauuca

SEQ ID NO: 48664 - RNA, 19 nt, Artificial Sequence
  Description of Artificial Sequence: Synthetic oligonucleotide
uuugugcucccaugauucu

SEQ ID NO: 48665 - RNA, 19 nt, Artificial Sequence
  Description of Artificial Sequence: Synthetic oligonucleotide
auaaauugguucagaugca

SEQ ID NO: 48666 - RNA, 19 nt, Artificial Sequence
  Description of Artificial Sequence: Synthetic oligonucleotide
ugugcucuauaaucacuau

SEQ ID NO: 48667 - RNA, 19 nt, Artificial Sequence
  Description of Artificial Sequence: Synthetic oligonucleotide
uacagcacaggugauuaua

SEQ ID NO: 48668 - RNA, 19 nt, Artificial Sequence
  Description of Artificial Sequence: Synthetic oligonucleotide
guaaacaacuuggcuagca

SEQ ID NO: 48669 - RNA, 19 nt, Artificial Sequence
  Description of Artificial Sequence: Synthetic oligonucleotide
acuaugucuaaggggaaaa

SEQ ID NO: 48670 - RNA, 19 nt, Artificial Sequence
  Description of Artificial Sequence: Synthetic oligonucleotide
uacuacggguucugaaagu

SEQ ID NO: 48671 - RNA, 19 nt, Artificial Sequence
  Description of Artificial Sequence: Synthetic oligonucleotide
cuaauuuaaccaacugcua

SEQ ID NO: 48672 - RNA, 19 nt, Artificial Sequence
  Description of Artificial Sequence: Synthetic oligonucleotide
acuuucccgcaucaacaug

SEQ ID NO: 48673 - RNA, 19 nt, Artificial Sequence
  Description of Artificial Sequence: Synthetic oligonucleotide
ugucgaccauuccagucaa

SEQ ID NO: 48674 - RNA, 19 nt, Artificial Sequence
  Description of Artificial Sequence: Synthetic oligonucleotide
agggcuuaauccucacaca

SEQ ID NO: 48675 - RNA, 19 nt, Artificial Sequence
  Description of Artificial Sequence: Synthetic oligonucleotide
cauagaauuagagguaugu

SEQ ID NO: 48676 - RNA, 19 nt, Artificial Sequence
  Description of Artificial Sequence: Synthetic oligonucleotide
gcagcaccgcauuauaccc

SEQ ID NO: 48677 - RNA, 19 nt, Artificial Sequence
  Description of Artificial Sequence: Synthetic oligonucleotide
gugauguuauuaucaagua

SEQ ID NO: 48678 - RNA, 19 nt, Artificial Sequence
  Description of Artificial Sequence: Synthetic oligonucleotide
uucugccuaaccaggcuua

SEQ ID NO: 48679 - RNA, 19 nt, Artificial Sequence
  Description of Artificial Sequence: Synthetic oligonucleotide
aaacggggucgagucuuac

SEQ ID NO: 48680 - RNA, 19 nt, Artificial Sequence
  Description of Artificial Sequence: Synthetic oligonucleotide
acggggucgagucuuacuu

SEQ ID NO: 48681 - RNA, 19 nt, Artificial Sequence
  Description of Artificial Sequence: Synthetic oligonucleotide
caaguguccuuuugucgac

SEQ ID NO: 48682 - RNA, 19 nt, Artificial Sequence
  Description of Artificial Sequence: Synthetic oligonucleotide
ggcguugacguugaguugc

SEQ ID NO: 48683 - RNA, 19 nt, Artificial Sequence
  Description of Artificial Sequence: Synthetic oligonucleotide
guucauagcuuggacagaa

SEQ ID NO: 48684 - RNA, 19 nt, Artificial Sequence
  Description of Artificial Sequence: Synthetic oligonucleotide
ccuugcaccggaaaacaag

SEQ ID NO: 48685 - RNA, 19 nt, Artificial Sequence
  Description of Artificial Sequence: Synthetic oligonucleotide
uuccuaccuagaacacuca

SEQ ID NO: 48686 - RNA, 19 nt, Artificial Sequence
  Description of Artificial Sequence: Synthetic oligonucleotide
cuacccuaucugaauucug

SEQ ID NO: 48687 - RNA, 19 nt, Artificial Sequence
  Description of Artificial Sequence: Synthetic oligonucleotide
acuuuucccuugcaccgga

SEQ ID NO: 48688 - RNA, 19 nt, Artificial Sequence
  Description of Artificial Sequence: Synthetic oligonucleotide
ucuuacccucaucucgcaa

SEQ ID NO: 48689 - RNA, 19 nt, Artificial Sequence
  Description of Artificial Sequence: Synthetic oligonucleotide
auaacccuuuuggagggcu

SEQ ID NO: 48690 - RNA, 19 nt, Artificial Sequence
  Description of Artificial Sequence: Synthetic oligonucleotide
cuacggguucugaaaguuc

SEQ ID NO: 48691 - RNA, 19 nt, Artificial Sequence
  Description of Artificial Sequence: Synthetic oligonucleotide
cuugcaccggaaaacaagu

SEQ ID NO: 48692 - RNA, 19 nt, Artificial Sequence
  Description of Artificial Sequence: Synthetic oligonucleotide
accucuaucuauaacccuu

SEQ ID NO: 48693 - RNA, 19 nt, Artificial Sequence
  Description of Artificial Sequence: Synthetic oligonucleotide
ucugccuaaccaggcuuag

SEQ ID NO: 48694 - RNA, 19 nt, Artificial Sequence
  Description of Artificial Sequence: Synthetic oligonucleotide
aguaggcuuuugcagucaa

SEQ ID NO: 48695 - RNA, 19 nt, Artificial Sequence
  Description of Artificial Sequence: Synthetic oligonucleotide
cuuaggagcaccuggcggu

SEQ ID NO: 48696 - RNA, 19 nt, Artificial Sequence
  Description of Artificial Sequence: Synthetic oligonucleotide
uggcuagcauauuauuguu

SEQ ID NO: 48697 - RNA, 19 nt, Artificial Sequence
  Description of Artificial Sequence: Synthetic oligonucleotide
gcacaaaaugccaucuacc

SEQ ID NO: 48698 - RNA, 19 nt, Artificial Sequence
  Description of Artificial Sequence: Synthetic oligonucleotide
aaaaugggcucuagguauu

SEQ ID NO: 48699 - RNA, 19 nt, Artificial Sequence
  Description of Artificial Sequence: Synthetic oligonucleotide
auaugcagcaccgcauuau

SEQ ID NO: 48700 - RNA, 19 nt, Artificial Sequence
  Description of Artificial Sequence: Synthetic oligonucleotide
ugcagucaauauuccucac

SEQ ID NO: 48701 - RNA, 19 nt, Artificial Sequence
  Description of Artificial Sequence: Synthetic oligonucleotide
aguuuaccguuggaucauc

SEQ ID NO: 48702 - RNA, 19 nt, Artificial Sequence
  Description of Artificial Sequence: Synthetic oligonucleotide
acgcccucauaauaauccu

SEQ ID NO: 48703 - RNA, 19 nt, Artificial Sequence
  Description of Artificial Sequence: Synthetic oligonucleotide
uuauuucgacuuccucgau

SEQ ID NO: 48704 - RNA, 19 nt, Artificial Sequence
  Description of Artificial Sequence: Synthetic oligonucleotide
aacgugcaaugcauacuug

SEQ ID NO: 48705 - RNA, 19 nt, Artificial Sequence
  Description of Artificial Sequence: Synthetic oligonucleotide
acucgauacaaaauauaua

SEQ ID NO: 48706 - RNA, 19 nt, Artificial Sequence
  Description of Artificial Sequence: Synthetic oligonucleotide
aagcagauuaaggcuguua

SEQ ID NO: 48707 - RNA, 19 nt, Artificial Sequence
  Description of Artificial Sequence: Synthetic oligonucleotide
ggcuuaauccucacacagg

SEQ ID NO: 48708 - RNA, 19 nt, Artificial Sequence
  Description of Artificial Sequence: Synthetic oligonucleotide
ggacguuggggacgaaggg

SEQ ID NO: 48709 - RNA, 19 nt, Artificial Sequence
  Description of Artificial Sequence: Synthetic oligonucleotide
gcacuaagcuaaugugccg

SEQ ID NO: 48710 - RNA, 19 nt, Artificial Sequence
  Description of Artificial Sequence: Synthetic oligonucleotide
uuucgacuuccucgauaca

SEQ ID NO: 48711 - RNA, 19 nt, Artificial Sequence
  Description of Artificial Sequence: Synthetic oligonucleotide
uccucgauacagguaugga

SEQ ID NO: 48712 - RNA, 19 nt, Artificial Sequence
  Description of Artificial Sequence: Synthetic oligonucleotide
acuacggguucugaaaguu

SEQ ID NO: 48713 - RNA, 19 nt, Artificial Sequence
  Description of Artificial Sequence: Synthetic oligonucleotide
aaguaggcuuuugcaguca

SEQ ID NO: 48714 - RNA, 19 nt, Artificial Sequence
  Description of Artificial Sequence: Synthetic oligonucleotide
cacuaagcuaaugugccga

SEQ ID NO: 48715 - RNA, 19 nt, Artificial Sequence
  Description of Artificial Sequence: Synthetic oligonucleotide
cagaauccguuucuacauc

SEQ ID NO: 48716 - RNA, 19 nt, Artificial Sequence
  Description of Artificial Sequence: Synthetic oligonucleotide
ggucuuacccucaucucgc

SEQ ID NO: 48717 - RNA, 19 nt, Artificial Sequence
  Description of Artificial Sequence: Synthetic oligonucleotide
cgcauuauacccugggcag

SEQ ID NO: 48718 - RNA, 19 nt, Artificial Sequence
  Description of Artificial Sequence: Synthetic oligonucleotide
cuauuccacauacuaugaa

SEQ ID NO: 48719 - RNA, 19 nt, Artificial Sequence
  Description of Artificial Sequence: Synthetic oligonucleotide
ccaguuuaccguuggauca

SEQ ID NO: 48720 - RNA, 19 nt, Artificial Sequence
  Description of Artificial Sequence: Synthetic oligonucleotide
uccacgcccucauaauaau

SEQ ID NO: 48721 - RNA, 19 nt, Artificial Sequence
  Description of Artificial Sequence: Synthetic oligonucleotide
gagcucucaauaugagaaa

SEQ ID NO: 48722 - RNA, 19 nt, Artificial Sequence
  Description of Artificial Sequence: Synthetic oligonucleotide
gauaugcagcaccgcauua

SEQ ID NO: 48723 - RNA, 19 nt, Artificial Sequence
  Description of Artificial Sequence: Synthetic oligonucleotide
auuaagugcuugacaccug

SEQ ID NO: 48724 - RNA, 19 nt, Artificial Sequence
  Description of Artificial Sequence: Synthetic oligonucleotide
guaaagcgucccaucugag

SEQ ID NO: 48725 - RNA, 19 nt, Artificial Sequence
  Description of Artificial Sequence: Synthetic oligonucleotide
gccuguuagauccaucuaa

SEQ ID NO: 48726 - RNA, 19 nt, Artificial Sequence
  Description of Artificial Sequence: Synthetic oligonucleotide
ucgcaagguaaagcguccc

SEQ ID NO: 48727 - RNA, 19 nt, Artificial Sequence
  Description of Artificial Sequence: Synthetic oligonucleotide
gagaaggcggugugaagua

SEQ ID NO: 48728 - RNA, 19 nt, Artificial Sequence
  Description of Artificial Sequence: Synthetic oligonucleotide
aaugggcucuagguauuaa

SEQ ID NO: 48729 - RNA, 19 nt, Artificial Sequence
  Description of Artificial Sequence: Synthetic oligonucleotide
cggauuuugagguucucac

SEQ ID NO: 48730 - RNA, 19 nt, Artificial Sequence
  Description of Artificial Sequence: Synthetic oligonucleotide
cuacuguuuuacccuuguc

SEQ ID NO: 48731 - RNA, 19 nt, Artificial Sequence
  Description of Artificial Sequence: Synthetic oligonucleotide
ggggacgaagggcuuggcg

SEQ ID NO: 48732 - RNA, 19 nt, Artificial Sequence
  Description of Artificial Sequence: Synthetic oligonucleotide
cuuccucgauacagguaug

SEQ ID NO: 48733 - RNA, 19 nt, Artificial Sequence
  Description of Artificial Sequence: Synthetic oligonucleotide
gcagucaauauuccucaca

SEQ ID NO: 48734 - RNA, 19 nt, Artificial Sequence
  Description of Artificial Sequence: Synthetic oligonucleotide
cauaucucucguugcucca

SEQ ID NO: 48735 - RNA, 19 nt, Artificial Sequence
  Description of Artificial Sequence: Synthetic oligonucleotide
ggacggcacgaauucugcg

SEQ ID NO: 48736 - RNA, 19 nt, Artificial Sequence
  Description of Artificial Sequence: Synthetic oligonucleotide
accggaaaacaaguuuuaa

SEQ ID NO: 48737 - RNA, 19 nt, Artificial Sequence
  Description of Artificial Sequence: Synthetic oligonucleotide
gcacgacccacuucuacug

SEQ ID NO: 48738 - RNA, 19 nt, Artificial Sequence
  Description of Artificial Sequence: Synthetic oligonucleotide
uuugucuaccaagcagauu

SEQ ID NO: 48739 - RNA, 19 nt, Artificial Sequence
  Description of Artificial Sequence: Synthetic oligonucleotide
auuugggacaaagcucuua

SEQ ID NO: 48740 - RNA, 19 nt, Artificial Sequence
  Description of Artificial Sequence: Synthetic oligonucleotide
augugcguccagaaugaca

SEQ ID NO: 48741 - RNA, 19 nt, Artificial Sequence
  Description of Artificial Sequence: Synthetic oligonucleotide
acgaauucugcggcgugga

SEQ ID NO: 48742 - RNA, 19 nt, Artificial Sequence
  Description of Artificial Sequence: Synthetic oligonucleotide
aucucgcaagguaaagcgu

SEQ ID NO: 48743 - RNA, 19 nt, Artificial Sequence
  Description of Artificial Sequence: Synthetic oligonucleotide
gacuuucccgcaucaacau

SEQ ID NO: 48744 - RNA, 19 nt, Artificial Sequence
  Description of Artificial Sequence: Synthetic oligonucleotide
agcagggcauaaaaugaau

SEQ ID NO: 48745 - RNA, 19 nt, Artificial Sequence
  Description of Artificial Sequence: Synthetic oligonucleotide
gcaucaaaugugcguccag

SEQ ID NO: 48746 - RNA, 19 nt, Artificial Sequence
  Description of Artificial Sequence: Synthetic oligonucleotide
uaagcacgacccacuucua

SEQ ID NO: 48747 - RNA, 19 nt, Artificial Sequence
  Description of Artificial Sequence: Synthetic oligonucleotide
accuccacgcccucauaau

SEQ ID NO: 48748 - RNA, 19 nt, Artificial Sequence
  Description of Artificial Sequence: Synthetic oligonucleotide
auuauacccugggcagaug

SEQ ID NO: 48749 - RNA, 19 nt, Artificial Sequence
  Description of Artificial Sequence: Synthetic oligonucleotide
auuugugucuaaggcccaa

SEQ ID NO: 48750 - RNA, 19 nt, Artificial Sequence
  Description of Artificial Sequence: Synthetic oligonucleotide
accauacaaugugauguua

SEQ ID NO: 48751 - RNA, 19 nt, Artificial Sequence
  Description of Artificial Sequence: Synthetic oligonucleotide
ggcaauaaauugguucaga

SEQ ID NO: 48752 - RNA, 19 nt, Artificial Sequence
  Description of Artificial Sequence: Synthetic oligonucleotide
ccaucuaccugugcagucc

SEQ ID NO: 48753 - RNA, 19 nt, Artificial Sequence
  Description of Artificial Sequence: Synthetic oligonucleotide
acgacccacuucuacuguu

SEQ ID NO: 48754 - RNA, 19 nt, Artificial Sequence
  Description of Artificial Sequence: Synthetic oligonucleotide
caucuaccugugcagucca

SEQ ID NO: 48755 - RNA, 19 nt, Artificial Sequence
  Description of Artificial Sequence: Synthetic oligonucleotide
uggggagaguuuugucaau

SEQ ID NO: 48756 - RNA, 19 nt, Artificial Sequence
  Description of Artificial Sequence: Synthetic oligonucleotide
gggacgaagggcuuggcgu

SEQ ID NO: 48757 - RNA, 19 nt, Artificial Sequence
  Description of Artificial Sequence: Synthetic oligonucleotide
acacucgcacacucagaau

SEQ ID NO: 48758 - RNA, 19 nt, Artificial Sequence
  Description of Artificial Sequence: Synthetic oligonucleotide
ccgcauuauacccugggca

SEQ ID NO: 48759 - RNA, 19 nt, Artificial Sequence
  Description of Artificial Sequence: Synthetic oligonucleotide
guuggaucauccaucuuau

SEQ ID NO: 48760 - RNA, 19 nt, Artificial Sequence
  Description of Artificial Sequence: Synthetic oligonucleotide
auguggacuuuugcuguga

SEQ ID NO: 48761 - RNA, 19 nt, Artificial Sequence
  Description of Artificial Sequence: Synthetic oligonucleotide
gggcaucaaaugugcgucc

SEQ ID NO: 48762 - RNA, 19 nt, Artificial Sequence
  Description of Artificial Sequence: Synthetic oligonucleotide
gucaugaguugugcauaug

SEQ ID NO: 48763 - RNA, 19 nt, Artificial Sequence
  Description of Artificial Sequence: Synthetic oligonucleotide
cuaagcuaaugugccgaga

SEQ ID NO: 48764 - RNA, 19 nt, Artificial Sequence
  Description of Artificial Sequence: Synthetic oligonucleotide
ccugaauuguagagguuca

SEQ ID NO: 48765 - RNA, 19 nt, Artificial Sequence
  Description of Artificial Sequence: Synthetic oligonucleotide
aucuaccugugcaguccac

SEQ ID NO: 48766 - RNA, 19 nt, Artificial Sequence
  Description of Artificial Sequence: Synthetic oligonucleotide
caccggaaaacaaguuuua

SEQ ID NO: 48767 - RNA, 19 nt, Artificial Sequence
  Description of Artificial Sequence: Synthetic oligonucleotide
gguucucaccuggagcuac

SEQ ID NO: 48768 - RNA, 19 nt, Artificial Sequence
  Description of Artificial Sequence: Synthetic oligonucleotide
gucuuacccucaucucgca

SEQ ID NO: 48769 - RNA, 19 nt, Artificial Sequence
  Description of Artificial Sequence: Synthetic oligonucleotide
ggcguggacguuggggacg

SEQ ID NO: 48770 - RNA, 19 nt, Artificial Sequence
  Description of Artificial Sequence: Synthetic oligonucleotide
gccugagagauccacauuu

SEQ ID NO: 48771 - RNA, 19 nt, Artificial Sequence
  Description of Artificial Sequence: Synthetic oligonucleotide
cagccugauugguccauca

SEQ ID NO: 48772 - RNA, 19 nt, Artificial Sequence
  Description of Artificial Sequence: Synthetic oligonucleotide
ccgacuuagguuuugguau

SEQ ID NO: 48773 - RNA, 19 nt, Artificial Sequence
  Description of Artificial Sequence: Synthetic oligonucleotide
accaccgacuuagguuuug

SEQ ID NO: 48774 - RNA, 19 nt, Artificial Sequence
  Description of Artificial Sequence: Synthetic oligonucleotide
agcgucccaucugagggaa

SEQ ID NO: 48775 - RNA, 19 nt, Artificial Sequence
  Description of Artificial Sequence: Synthetic oligonucleotide
gcggcguggacguugggga

SEQ ID NO: 48776 - RNA, 19 nt, Artificial Sequence
  Description of Artificial Sequence: Synthetic oligonucleotide
cccgucagcccugagcagg

SEQ ID NO: 48777 - RNA, 19 nt, Artificial Sequence
  Description of Artificial Sequence: Synthetic oligonucleotide
guuugaaccuucacacaau

SEQ ID NO: 48778 - RNA, 19 nt, Artificial Sequence
  Description of Artificial Sequence: Synthetic oligonucleotide
ggcaucaaaugugcgucca

SEQ ID NO: 48779 - RNA, 19 nt, Artificial Sequence
  Description of Artificial Sequence: Synthetic oligonucleotide
cugacaucugaagcacuaa

SEQ ID NO: 48780 - RNA, 19 nt, Artificial Sequence
  Description of Artificial Sequence: Synthetic oligonucleotide
cugcucgcuccguggucgc

SEQ ID NO: 48781 - RNA, 19 nt, Artificial Sequence
  Description of Artificial Sequence: Synthetic oligonucleotide
cuguccucaaacgugcaau

SEQ ID NO: 48782 - RNA, 19 nt, Artificial Sequence
  Description of Artificial Sequence: Synthetic oligonucleotide
cauuauacccugggcagau

SEQ ID NO: 48783 - RNA, 19 nt, Artificial Sequence
  Description of Artificial Sequence: Synthetic oligonucleotide
ccgcacugagguucucacg

SEQ ID NO: 48784 - RNA, 19 nt, Artificial Sequence
  Description of Artificial Sequence: Synthetic oligonucleotide
gcucgcuccguggucgccg

SEQ ID NO: 48785 - RNA, 19 nt, Artificial Sequence
  Description of Artificial Sequence: Synthetic oligonucleotide
aggcggugugaaguaggcu

SEQ ID NO: 48786 - RNA, 19 nt, Artificial Sequence
  Description of Artificial Sequence: Synthetic oligonucleotide
ccaccgacuuagguuuugg

SEQ ID NO: 48787 - RNA, 19 nt, Artificial Sequence
  Description of Artificial Sequence: Synthetic oligonucleotide
cuaugucuaaggggaaaau

SEQ ID NO: 48788 - RNA, 19 nt, Artificial Sequence
  Description of Artificial Sequence: Synthetic oligonucleotide
ccguuucuacaucaucaga

SEQ ID NO: 48789 - RNA, 19 nt, Artificial Sequence
  Description of Artificial Sequence: Synthetic oligonucleotide
gcaccggaaaacaaguuuu

SEQ ID NO: 48790 - RNA, 19 nt, Artificial Sequence
  Description of Artificial Sequence: Synthetic oligonucleotide
ccucaaacgugcaaugcau

SEQ ID NO: 48791 - RNA, 19 nt, Artificial Sequence
  Description of Artificial Sequence: Synthetic oligonucleotide
cagcaccgcauuauacccu

SEQ ID NO: 48792 - RNA, 19 nt, Artificial Sequence
  Description of Artificial Sequence: Synthetic oligonucleotide
ucgcuccguggucgccgcc

SEQ ID NO: 48793 - RNA, 19 nt, Artificial Sequence
  Description of Artificial Sequence: Synthetic oligonucleotide
ccucaucucgcaagguaaa

SEQ ID NO: 48794 - RNA, 19 nt, Artificial Sequence
  Description of Artificial Sequence: Synthetic oligonucleotide
ggggucgagucuuacuuuu

SEQ ID NO: 48795 - RNA, 19 nt, Artificial Sequence
  Description of Artificial Sequence: Synthetic oligonucleotide
cugaauuguagagguucau

SEQ ID NO: 48796 - RNA, 19 nt, Artificial Sequence
  Description of Artificial Sequence: Synthetic oligonucleotide
uugcucccgucagcccuga

SEQ ID NO: 48797 - RNA, 19 nt, Artificial Sequence
  Description of Artificial Sequence: Synthetic oligonucleotide
cguugcuccaguuuaccgu

SEQ ID NO: 48798 - RNA, 19 nt, Artificial Sequence
  Description of Artificial Sequence: Synthetic oligonucleotide
cucuaucuauaacccuuuu

SEQ ID NO: 48799 - RNA, 19 nt, Artificial Sequence
  Description of Artificial Sequence: Synthetic oligonucleotide
cggcacgaauucugcggcg

SEQ ID NO: 48800 - RNA, 19 nt, Artificial Sequence
  Description of Artificial Sequence: Synthetic oligonucleotide
cugcggcguggacguuggg

SEQ ID NO: 48801 - RNA, 19 nt, Artificial Sequence
  Description of Artificial Sequence: Synthetic oligonucleotide
ggcacgaauucugcggcgu

SEQ ID NO: 48802 - RNA, 19 nt, Artificial Sequence
  Description of Artificial Sequence: Synthetic oligonucleotide
guaggcuuuugcagucaau

SEQ ID NO: 48803 - RNA, 19 nt, Artificial Sequence
  Description of Artificial Sequence: Synthetic oligonucleotide
caauuccuuucagucggau

SEQ ID NO: 48804 - RNA, 19 nt, Artificial Sequence
  Description of Artificial Sequence: Synthetic oligonucleotide
gcagccugauugguccauc

SEQ ID NO: 48805 - RNA, 19 nt, Artificial Sequence
  Description of Artificial Sequence: Synthetic oligonucleotide
cccuugcaccggaaaacaa

SEQ ID NO: 48806 - RNA, 19 nt, Artificial Sequence
  Description of Artificial Sequence: Synthetic oligonucleotide
cagaugcaaucgacugaau

SEQ ID NO: 48807 - RNA, 19 nt, Artificial Sequence
  Description of Artificial Sequence: Synthetic oligonucleotide
gucgaccauuccagucaaa

SEQ ID NO: 48808 - RNA, 19 nt, Artificial Sequence
  Description of Artificial Sequence: Synthetic oligonucleotide
cugccuaaccaggcuuagu

SEQ ID NO: 48809 - RNA, 19 nt, Artificial Sequence
  Description of Artificial Sequence: Synthetic oligonucleotide
cgacuuagguuuugguauu

SEQ ID NO: 48810 - RNA, 19 nt, Artificial Sequence
  Description of Artificial Sequence: Synthetic oligonucleotide
caccaccgacuuagguuuu

SEQ ID NO: 48811 - RNA, 19 nt, Artificial Sequence
  Description of Artificial Sequence: Synthetic oligonucleotide
cgacaauuggcagccugau

SEQ ID NO: 48812 - RNA, 19 nt, Artificial Sequence
  Description of Artificial Sequence: Synthetic oligonucleotide
cggggucgagucuuacuuu

SEQ ID NO: 48813 - RNA, 19 nt, Artificial Sequence
  Description of Artificial Sequence: Synthetic oligonucleotide
ccguuggaucauccaucuu

SEQ ID NO: 48814 - RNA, 19 nt, Artificial Sequence
  Description of Artificial Sequence: Synthetic oligonucleotide
uaugcuaacguugacaccg

SEQ ID NO: 48815 - RNA, 19 nt, Artificial Sequence
  Description of Artificial Sequence: Synthetic oligonucleotide
aaaagaguaccagugaagg

SEQ ID NO: 48816 - RNA, 19 nt, Artificial Sequence
  Description of Artificial Sequence: Synthetic oligonucleotide
aaaacguugcugaugcagc

SEQ ID NO: 48817 - RNA, 19 nt, Artificial Sequence
  Description of Artificial Sequence: Synthetic oligonucleotide
aguucgugucuguacaucc

SEQ ID NO: 48818 - RNA, 19 nt, Artificial Sequence
  Description of Artificial Sequence: Synthetic oligonucleotide
ugaaccaucccucuaccag

SEQ ID NO: 48819 - RNA, 19 nt, Artificial Sequence
  Description of Artificial Sequence: Synthetic oligonucleotide
aaugacguggccccggcag

SEQ ID NO: 48820 - RNA, 19 nt, Artificial Sequence
  Description of Artificial Sequence: Synthetic oligonucleotide
aucuacuacaagcuggauc

SEQ ID NO: 48821 - RNA, 19 nt, Artificial Sequence
  Description of Artificial Sequence: Synthetic oligonucleotide
uggauaggcgucauguggg

SEQ ID NO: 48822 - RNA, 19 nt, Artificial Sequence
  Description of Artificial Sequence: Synthetic oligonucleotide
uugacauaucggaagacca

SEQ ID NO: 48823 - RNA, 19 nt, Artificial Sequence
  Description of Artificial Sequence: Synthetic oligonucleotide
ucggcaaagacccucugag

SEQ ID NO: 48824 - RNA, 19 nt, Artificial Sequence
  Description of Artificial Sequence: Synthetic oligonucleotide
aaagcugauacccguggug

SEQ ID NO: 48825 - RNA, 19 nt, Artificial Sequence
  Description of Artificial Sequence: Synthetic oligonucleotide
ugccacgaaagccaaagcc

SEQ ID NO: 48826 - RNA, 19 nt, Artificial Sequence
  Description of Artificial Sequence: Synthetic oligonucleotide
aguugacacagcuggaaag

SEQ ID NO: 48827 - RNA, 19 nt, Artificial Sequence
  Description of Artificial Sequence: Synthetic oligonucleotide
cuuaucgagcugcagauuc

SEQ ID NO: 48828 - RNA, 19 nt, Artificial Sequence
  Description of Artificial Sequence: Synthetic oligonucleotide
aaagaguaccagugaagga

SEQ ID NO: 48829 - RNA, 19 nt, Artificial Sequence
  Description of Artificial Sequence: Synthetic oligonucleotide
agagacgagcugcuggggc

SEQ ID NO: 48830 - RNA, 19 nt, Artificial Sequence
  Description of Artificial Sequence: Synthetic oligonucleotide
uccaaacugguaugcaucc

SEQ ID NO: 48831 - RNA, 19 nt, Artificial Sequence
  Description of Artificial Sequence: Synthetic oligonucleotide
aacguggccggguggaggg

SEQ ID NO: 48832 - RNA, 19 nt, Artificial Sequence
  Description of Artificial Sequence: Synthetic oligonucleotide
auuucugcgggauggggag

SEQ ID NO: 48833 - RNA, 19 nt, Artificial Sequence
  Description of Artificial Sequence: Synthetic oligonucleotide
ucagggacgaugaguaugu

SEQ ID NO: 48834 - RNA, 19 nt, Artificial Sequence
  Description of Artificial Sequence: Synthetic oligonucleotide
ugugggcggacaagcaucg

SEQ ID NO: 48835 - RNA, 19 nt, Artificial Sequence
  Description of Artificial Sequence: Synthetic oligonucleotide
uucgugucuguacauccag

SEQ ID NO: 48836 - RNA, 19 nt, Artificial Sequence
  Description of Artificial Sequence: Synthetic oligonucleotide
auaucggaagaccagccga

SEQ ID NO: 48837 - RNA, 19 nt, Artificial Sequence
  Description of Artificial Sequence: Synthetic oligonucleotide
ucaugcacccucgauaggc

SEQ ID NO: 48838 - RNA, 19 nt, Artificial Sequence
  Description of Artificial Sequence: Synthetic oligonucleotide
gguuacucgaugcuguagg

SEQ ID NO: 48839 - RNA, 19 nt, Artificial Sequence
  Description of Artificial Sequence: Synthetic oligonucleotide
aagcggguaccgcagucac

SEQ ID NO: 48840 - RNA, 19 nt, Artificial Sequence
  Description of Artificial Sequence: Synthetic oligonucleotide
cauaggauuuguccagggg

SEQ ID NO: 48841 - RNA, 19 nt, Artificial Sequence
  Description of Artificial Sequence: Synthetic oligonucleotide
gucacggccaaugacgugg

SEQ ID NO: 48842 - RNA, 19 nt, Artificial Sequence
  Description of Artificial Sequence: Synthetic oligonucleotide
gguucgauaguagagcagg

SEQ ID NO: 48843 - RNA, 19 nt, Artificial Sequence
  Description of Artificial Sequence: Synthetic oligonucleotide
uggagccuauuucugcggg

SEQ ID NO: 48844 - RNA, 19 nt, Artificial Sequence
  Description of Artificial Sequence: Synthetic oligonucleotide
cauaucggaagaccagccg

SEQ ID NO: 48845 - RNA, 19 nt, Artificial Sequence
  Description of Artificial Sequence: Synthetic oligonucleotide
ucugcaauggcguggcccu

SEQ ID NO: 48846 - RNA, 19 nt, Artificial Sequence
  Description of Artificial Sequence: Synthetic oligonucleotide
uccuacaaagaggguaugg

SEQ ID NO: 48847 - RNA, 19 nt, Artificial Sequence
  Description of Artificial Sequence: Synthetic oligonucleotide
uguaagcguccucagggac

SEQ ID NO: 48848 - RNA, 19 nt, Artificial Sequence
  Description of Artificial Sequence: Synthetic oligonucleotide
ucggaagaccagccgaaag

SEQ ID NO: 48849 - RNA, 19 nt, Artificial Sequence
  Description of Artificial Sequence: Synthetic oligonucleotide
ugggcggacaagcaucgag

SEQ ID NO: 48850 - RNA, 19 nt, Artificial Sequence
  Description of Artificial Sequence: Synthetic oligonucleotide
aagcugauacccguggugu

SEQ ID NO: 48851 - RNA, 19 nt, Artificial Sequence
  Description of Artificial Sequence: Synthetic oligonucleotide
cauggcacgucccacuagc

SEQ ID NO: 48852 - RNA, 19 nt, Artificial Sequence
  Description of Artificial Sequence: Synthetic oligonucleotide
uguccaucucaaugcagcc

SEQ ID NO: 48853 - RNA, 19 nt, Artificial Sequence
  Description of Artificial Sequence: Synthetic oligonucleotide
gcuuacauagggcagcuug

SEQ ID NO: 48854 - RNA, 19 nt, Artificial Sequence
  Description of Artificial Sequence: Synthetic oligonucleotide
ugcuuaucgagcugcagau

SEQ ID NO: 48855 - RNA, 19 nt, Artificial Sequence
  Description of Artificial Sequence: Synthetic oligonucleotide
acggccaaugacguggccc

SEQ ID NO: 48856 - RNA, 19 nt, Artificial Sequence
  Description of Artificial Sequence: Synthetic oligonucleotide
aagacaucaccucgcugga

SEQ ID NO: 48857 - RNA, 19 nt, Artificial Sequence
  Description of Artificial Sequence: Synthetic oligonucleotide
cuuggagcgagcacacggc

SEQ ID NO: 48858 - RNA, 19 nt, Artificial Sequence
  Description of Artificial Sequence: Synthetic oligonucleotide
cuaacguugacaccgccca

SEQ ID NO: 48859 - RNA, 19 nt, Artificial Sequence
  Description of Artificial Sequence: Synthetic oligonucleotide
ccuaugcuaacguugacac

SEQ ID NO: 48860 - RNA, 19 nt, Artificial Sequence
  Description of Artificial Sequence: Synthetic oligonucleotide
agccgaaagaggucagggg

SEQ ID NO: 48861 - RNA, 19 nt, Artificial Sequence
  Description of Artificial Sequence: Synthetic oligonucleotide
agcucauacugaagggucc

SEQ ID NO: 48862 - RNA, 19 nt, Artificial Sequence
  Description of Artificial Sequence: Synthetic oligonucleotide
guaugcauccugaauaguc

SEQ ID NO: 48863 - RNA, 19 nt, Artificial Sequence
  Description of Artificial Sequence: Synthetic oligonucleotide
aagucauggcacgucccac

SEQ ID NO: 48864 - RNA, 19 nt, Artificial Sequence
  Description of Artificial Sequence: Synthetic oligonucleotide
ggagauacccacaaacugc

SEQ ID NO: 48865 - RNA, 19 nt, Artificial Sequence
  Description of Artificial Sequence: Synthetic oligonucleotide
gagguucgauaguagagca

SEQ ID NO: 48866 - RNA, 19 nt, Artificial Sequence
  Description of Artificial Sequence: Synthetic oligonucleotide
ccugguauggcccauccgg

SEQ ID NO: 48867 - RNA, 19 nt, Artificial Sequence
  Description of Artificial Sequence: Synthetic oligonucleotide
aacguugacaccgcccaug

SEQ ID NO: 48868 - RNA, 19 nt, Artificial Sequence
  Description of Artificial Sequence: Synthetic oligonucleotide
auaggcgucaugugggcgu

SEQ ID NO: 48869 - RNA, 19 nt, Artificial Sequence
  Description of Artificial Sequence: Synthetic oligonucleotide
agguacaaccugccgauca

SEQ ID NO: 48870 - RNA, 19 nt, Artificial Sequence
  Description of Artificial Sequence: Synthetic oligonucleotide
uccucacgcacagagacac

SEQ ID NO: 48871 - RNA, 19 nt, Artificial Sequence
  Description of Artificial Sequence: Synthetic oligonucleotide
guguuccuacccuugauca

SEQ ID NO: 48872 - RNA, 19 nt, Artificial Sequence
  Description of Artificial Sequence: Synthetic oligonucleotide
cuggagugucaaauggccc

SEQ ID NO: 48873 - RNA, 19 nt, Artificial Sequence
  Description of Artificial Sequence: Synthetic oligonucleotide
uucugcuguaggucaaaca

SEQ ID NO: 48874 - RNA, 19 nt, Artificial Sequence
  Description of Artificial Sequence: Synthetic oligonucleotide
gugagguacaaccugccga

SEQ ID NO: 48875 - RNA, 19 nt, Artificial Sequence
  Description of Artificial Sequence: Synthetic oligonucleotide
cugaacccuacagacacag

SEQ ID NO: 48876 - RNA, 19 nt, Artificial Sequence
  Description of Artificial Sequence: Synthetic oligonucleotide
uacuacaagcuggaucugc

SEQ ID NO: 48877 - RNA, 19 nt, Artificial Sequence
  Description of Artificial Sequence: Synthetic oligonucleotide
agggccguaccucuagcuc

SEQ ID NO: 48878 - RNA, 19 nt, Artificial Sequence
  Description of Artificial Sequence: Synthetic oligonucleotide
uggaucgccuugcuggcug

SEQ ID NO: 48879 - RNA, 19 nt, Artificial Sequence
  Description of Artificial Sequence: Synthetic oligonucleotide
gcagucacggccaaugacg

SEQ ID NO: 48880 - RNA, 19 nt, Artificial Sequence
  Description of Artificial Sequence: Synthetic oligonucleotide
caccacgucgggaagugcc

SEQ ID NO: 48881 - RNA, 19 nt, Artificial Sequence
  Description of Artificial Sequence: Synthetic oligonucleotide
ggagaccuccuacaaagag

SEQ ID NO: 48882 - RNA, 19 nt, Artificial Sequence
  Description of Artificial Sequence: Synthetic oligonucleotide
uggcacgucccacuagcag

SEQ ID NO: 48883 - RNA, 19 nt, Artificial Sequence
  Description of Artificial Sequence: Synthetic oligonucleotide
uucgauaguagagcaggcu

SEQ ID NO: 48884 - RNA, 19 nt, Artificial Sequence
  Description of Artificial Sequence: Synthetic oligonucleotide
acccucgauaggcaggaag

SEQ ID NO: 48885 - RNA, 19 nt, Artificial Sequence
  Description of Artificial Sequence: Synthetic oligonucleotide
cuuaggcaggccuccuagg

SEQ ID NO: 48886 - RNA, 19 nt, Artificial Sequence
  Description of Artificial Sequence: Synthetic oligonucleotide
gauaggcgucaugugggcg

SEQ ID NO: 48887 - RNA, 19 nt, Artificial Sequence
  Description of Artificial Sequence: Synthetic oligonucleotide
acaagcggguaccgcaguc

SEQ ID NO: 48888 - RNA, 19 nt, Artificial Sequence
  Description of Artificial Sequence: Synthetic oligonucleotide
ucgugucuguacauccagc

SEQ ID NO: 48889 - RNA, 19 nt, Artificial Sequence
  Description of Artificial Sequence: Synthetic oligonucleotide
uucgcguuggaguccucag

SEQ ID NO: 48890 - RNA, 19 nt, Artificial Sequence
  Description of Artificial Sequence: Synthetic oligonucleotide
uggugagguacaaccugcc

SEQ ID NO: 48891 - RNA, 19 nt, Artificial Sequence
  Description of Artificial Sequence: Synthetic oligonucleotide
cuaugcuaacguugacacc

SEQ ID NO: 48892 - RNA, 19 nt, Artificial Sequence
  Description of Artificial Sequence: Synthetic oligonucleotide
acggacagagccuccggag

SEQ ID NO: 48893 - RNA, 19 nt, Artificial Sequence
  Description of Artificial Sequence: Synthetic oligonucleotide
ucaugugggcggacaagca

SEQ ID NO: 48894 - RNA, 19 nt, Artificial Sequence
  Description of Artificial Sequence: Synthetic oligonucleotide
uguuccuacccuugaucac

SEQ ID NO: 48895 - RNA, 19 nt, Artificial Sequence
  Description of Artificial Sequence: Synthetic oligonucleotide
aaccugccgaucacugccc

SEQ ID NO: 48896 - RNA, 19 nt, Artificial Sequence
  Description of Artificial Sequence: Synthetic oligonucleotide
ugggguaggucacccacgu

SEQ ID NO: 48897 - RNA, 19 nt, Artificial Sequence
  Description of Artificial Sequence: Synthetic oligonucleotide
caaggugcagagguacugg

SEQ ID NO: 48898 - RNA, 19 nt, Artificial Sequence
  Description of Artificial Sequence: Synthetic oligonucleotide
cacacuugugggcccacgg

SEQ ID NO: 48899 - RNA, 19 nt, Artificial Sequence
  Description of Artificial Sequence: Synthetic oligonucleotide
guaggugcucggcaguagc

SEQ ID NO: 48900 - RNA, 19 nt, Artificial Sequence
  Description of Artificial Sequence: Synthetic oligonucleotide
uggcguggcccucuucagg

SEQ ID NO: 48901 - RNA, 19 nt, Artificial Sequence
  Description of Artificial Sequence: Synthetic oligonucleotide
gaauaccugguauggccca

SEQ ID NO: 48902 - RNA, 19 nt, Artificial Sequence
  Description of Artificial Sequence: Synthetic oligonucleotide
uucccauaaacuggagugu

SEQ ID NO: 48903 - RNA, 19 nt, Artificial Sequence
  Description of Artificial Sequence: Synthetic oligonucleotide
uguacccgugugccauugg

SEQ ID NO: 48904 - RNA, 19 nt, Artificial Sequence
  Description of Artificial Sequence: Synthetic oligonucleotide
ggagguucgauaguagagc

SEQ ID NO: 48905 - RNA, 19 nt, Artificial Sequence
  Description of Artificial Sequence: Synthetic oligonucleotide
augugggcggacaagcauc

SEQ ID NO: 48906 - RNA, 19 nt, Artificial Sequence
  Description of Artificial Sequence: Synthetic oligonucleotide
aagccaugggucaccagug

SEQ ID NO: 48907 - RNA, 19 nt, Artificial Sequence
  Description of Artificial Sequence: Synthetic oligonucleotide
ggugccacgaaagccaaag

SEQ ID NO: 48908 - RNA, 19 nt, Artificial Sequence
  Description of Artificial Sequence: Synthetic oligonucleotide
uuggagcgagcacacggcu

SEQ ID NO: 48909 - RNA, 19 nt, Artificial Sequence
  Description of Artificial Sequence: Synthetic oligonucleotide
uccggaggggaagagcugc

SEQ ID NO: 48910 - RNA, 19 nt, Artificial Sequence
  Description of Artificial Sequence: Synthetic oligonucleotide
caccauucgcguuggaguc

SEQ ID NO: 48911 - RNA, 19 nt, Artificial Sequence
  Description of Artificial Sequence: Synthetic oligonucleotide
ccucaugcacccucgauag

SEQ ID NO: 48912 - RNA, 19 nt, Artificial Sequence
  Description of Artificial Sequence: Synthetic oligonucleotide
augacguggccccggcagg

SEQ ID NO: 48913 - RNA, 19 nt, Artificial Sequence
  Description of Artificial Sequence: Synthetic oligonucleotide
ucauacugaagggucccac

SEQ ID NO: 48914 - RNA, 19 nt, Artificial Sequence
  Description of Artificial Sequence: Synthetic oligonucleotide
cugcuuaucgagcugcaga

SEQ ID NO: 48915 - RNA, 19 nt, Artificial Sequence
  Description of Artificial Sequence: Synthetic oligonucleotide
  modified_base (13)..(13): a, c, u, g, unknown or other
uagguacaggccncgguua

SEQ ID NO: 48916 - RNA, 19 nt, Artificial Sequence
  Description of Artificial Sequence: Synthetic oligonucleotide
gccuauuucugcgggaugg

SEQ ID NO: 48917 - RNA, 19 nt, Artificial Sequence
  Description of Artificial Sequence: Synthetic oligonucleotide
caagcaucgagagguggag

SEQ ID NO: 48918 - RNA, 19 nt, Artificial Sequence
  Description of Artificial Sequence: Synthetic oligonucleotide
cagccgaaagaggucaggg

SEQ ID NO: 48919 - RNA, 19 nt, Artificial Sequence
  Description of Artificial Sequence: Synthetic oligonucleotide
ugcuaacguugacaccgcc

SEQ ID NO: 48920 - RNA, 19 nt, Artificial Sequence
  Description of Artificial Sequence: Synthetic oligonucleotide
ucgucacacaagcggguac

SEQ ID NO: 48921 - RNA, 19 nt, Artificial Sequence
  Description of Artificial Sequence: Synthetic oligonucleotide
ucccauaaacuggaguguc

SEQ ID NO: 48922 - RNA, 19 nt, Artificial Sequence
  Description of Artificial Sequence: Synthetic oligonucleotide
acacggcuuauccacugca

SEQ ID NO: 48923 - RNA, 19 nt, Artificial Sequence
  Description of Artificial Sequence: Synthetic oligonucleotide
  modified_base (8)..(8): a, c, u, g, unknown or other
acaggccncgguuacucga

SEQ ID NO: 48924 - RNA, 19 nt, Artificial Sequence
  Description of Artificial Sequence: Synthetic oligonucleotide
ucccaccguaggaugacac

SEQ ID NO: 48925 - RNA, 19 nt, Artificial Sequence
  Description of Artificial Sequence: Synthetic oligonucleotide
ggugccgggauucagcaca

SEQ ID NO: 48926 - RNA, 19 nt, Artificial Sequence
  Description of Artificial Sequence: Synthetic oligonucleotide
augugggcguagccucucc

SEQ ID NO: 48927 - RNA, 19 nt, Artificial Sequence
  Description of Artificial Sequence: Synthetic oligonucleotide
gcaccgucggcaaagaccc

SEQ ID NO: 48928 - RNA, 19 nt, Artificial Sequence
  Description of Artificial Sequence: Synthetic oligonucleotide
cacguggagaacucuccug

SEQ ID NO: 48929 - RNA, 19 nt, Artificial Sequence
  Description of Artificial Sequence: Synthetic oligonucleotide
ggaauaccugguauggccc

SEQ ID NO: 48930 - RNA, 19 nt, Artificial Sequence
  Description of Artificial Sequence: Synthetic oligonucleotide
aagggucccaccguaggau

SEQ ID NO: 48931 - RNA, 19 nt, Artificial Sequence
  Description of Artificial Sequence: Synthetic oligonucleotide
uggcaagcacaagguaggg

SEQ ID NO: 48932 - RNA, 19 nt, Artificial Sequence
  Description of Artificial Sequence: Synthetic oligonucleotide
gaacguggccggguggagg

SEQ ID NO: 48933 - RNA, 19 nt, Artificial Sequence
  Description of Artificial Sequence: Synthetic oligonucleotide
agccuaugcuaacguugac

SEQ ID NO: 48934 - RNA, 19 nt, Artificial Sequence
  Description of Artificial Sequence: Synthetic oligonucleotide
gccacugaaguugugggag

SEQ ID NO: 48935 - RNA, 19 nt, Artificial Sequence
  Description of Artificial Sequence: Synthetic oligonucleotide
  modified_base (10)..(10): a, c, u, g, unknown or other
guacaggccncgguuacuc

SEQ ID NO: 48936 - RNA, 19 nt, Artificial Sequence
  Description of Artificial Sequence: Synthetic oligonucleotide
aguuccagccgcauguggu

SEQ ID NO: 48937 - RNA, 19 nt, Artificial Sequence
  Description of Artificial Sequence: Synthetic oligonucleotide
cacagagacacgcccguuc

SEQ ID NO: 48938 - RNA, 19 nt, Artificial Sequence
  Description of Artificial Sequence: Synthetic oligonucleotide
cagacuuaggcaggccucc

SEQ ID NO: 48939 - RNA, 19 nt, Artificial Sequence
  Description of Artificial Sequence: Synthetic oligonucleotide
acguugacaccgcccaugu

SEQ ID NO: 48940 - RNA, 19 nt, Artificial Sequence
  Description of Artificial Sequence: Synthetic oligonucleotide
accguaggaugacacccug

SEQ ID NO: 48941 - RNA, 19 nt, Artificial Sequence
  Description of Artificial Sequence: Synthetic oligonucleotide
cauccugaauagucccuug

SEQ ID NO: 48942 - RNA, 19 nt, Artificial Sequence
  Description of Artificial Sequence: Synthetic oligonucleotide
acacuugugggcccacggu

SEQ ID NO: 48943 - RNA, 19 nt, Artificial Sequence
  Description of Artificial Sequence: Synthetic oligonucleotide
gguauccucccacauagaa

SEQ ID NO: 48944 - RNA, 19 nt, Artificial Sequence
  Description of Artificial Sequence: Synthetic oligonucleotide
aacugucagcuaggaggcg

SEQ ID NO: 48945 - RNA, 19 nt, Artificial Sequence
  Description of Artificial Sequence: Synthetic oligonucleotide
ccgaaagaggucaggggcg

SEQ ID NO: 48946 - RNA, 19 nt, Artificial Sequence
  Description of Artificial Sequence: Synthetic oligonucleotide
guugugggagguaccagac

SEQ ID NO: 48947 - RNA, 19 nt, Artificial Sequence
  Description of Artificial Sequence: Synthetic oligonucleotide
uucaggccggagccauccg

SEQ ID NO: 48948 - RNA, 19 nt, Artificial Sequence
  Description of Artificial Sequence: Synthetic oligonucleotide
ucacggccaaugacguggc

SEQ ID NO: 48949 - RNA, 19 nt, Artificial Sequence
  Description of Artificial Sequence: Synthetic oligonucleotide
agcacacguuugcggcugc

SEQ ID NO: 48950 - RNA, 19 nt, Artificial Sequence
  Description of Artificial Sequence: Synthetic oligonucleotide
  modified_base (14)..(14): a, c, u, g, unknown or other
guagguacaggccncgguu

SEQ ID NO: 48951 - RNA, 19 nt, Artificial Sequence
  Description of Artificial Sequence: Synthetic oligonucleotide
ggcggacaagcaucgagag

SEQ ID NO: 48952 - RNA, 19 nt, Artificial Sequence
  Description of Artificial Sequence: Synthetic oligonucleotide
cagccuaugcuaacguuga

SEQ ID NO: 48953 - RNA, 19 nt, Artificial Sequence
  Description of Artificial Sequence: Synthetic oligonucleotide
ggcaccgucggcaaagacc

SEQ ID NO: 48954 - RNA, 19 nt, Artificial Sequence
  Description of Artificial Sequence: Synthetic oligonucleotide
ugacguggccccggcaggg

SEQ ID NO: 48955 - RNA, 19 nt, Artificial Sequence
  Description of Artificial Sequence: Synthetic oligonucleotide
guccggccggcucucauag

SEQ ID NO: 48956 - RNA, 19 nt, Artificial Sequence
  Description of Artificial Sequence: Synthetic oligonucleotide
uuccucaugcacccucgau

SEQ ID NO: 48957 - RNA, 19 nt, Artificial Sequence
  Description of Artificial Sequence: Synthetic oligonucleotide
agcguguuccuacccuuga

SEQ ID NO: 48958 - RNA, 19 nt, Artificial Sequence
  Description of Artificial Sequence: Synthetic oligonucleotide
gucacacaagcggguaccg

SEQ ID NO: 48959 - RNA, 19 nt, Artificial Sequence
  Description of Artificial Sequence: Synthetic oligonucleotide
cccacgguugacauaucgg

SEQ ID NO: 48960 - RNA, 19 nt, Artificial Sequence
  Description of Artificial Sequence: Synthetic oligonucleotide
ccuacccuugaucacugcc

SEQ ID NO: 48961 - RNA, 19 nt, Artificial Sequence
  Description of Artificial Sequence: Synthetic oligonucleotide
ucacacaagcggguaccgc

SEQ ID NO: 48962 - RNA, 19 nt, Artificial Sequence
  Description of Artificial Sequence: Synthetic oligonucleotide
gggacucuaucuguuguag

SEQ ID NO: 48963 - RNA, 19 nt, Artificial Sequence
  Description of Artificial Sequence: Synthetic oligonucleotide
caucaugugggcggacaag

SEQ ID NO: 48964 - RNA, 19 nt, Artificial Sequence
  Description of Artificial Sequence: Synthetic oligonucleotide
cucgauaggcaggaagcuc

SEQ ID NO: 48965 - RNA, 19 nt, Artificial Sequence
  Description of Artificial Sequence: Synthetic oligonucleotide
agcauuccggcagaacaga

SEQ ID NO: 48966 - RNA, 19 nt, Artificial Sequence
  Description of Artificial Sequence: Synthetic oligonucleotide
guucggguggcaccccacc

SEQ ID NO: 48967 - RNA, 19 nt, Artificial Sequence
  Description of Artificial Sequence: Synthetic oligonucleotide
uguucggguggcaccccac

SEQ ID NO: 48968 - RNA, 19 nt, Artificial Sequence
  Description of Artificial Sequence: Synthetic oligonucleotide
gcggguaccgcagucacag

SEQ ID NO: 48969 - RNA, 19 nt, Artificial Sequence
  Description of Artificial Sequence: Synthetic oligonucleotide
cuagcaggucagcagugca

SEQ ID NO: 48970 - RNA, 19 nt, Artificial Sequence
  Description of Artificial Sequence: Synthetic oligonucleotide
uagugguccuucgucggcu

SEQ ID NO: 48971 - RNA, 19 nt, Artificial Sequence
  Description of Artificial Sequence: Synthetic oligonucleotide
guagcugucuccggugaac

SEQ ID NO: 48972 - RNA, 19 nt, Artificial Sequence
  Description of Artificial Sequence: Synthetic oligonucleotide
ucgauggcgaggugccuuc

SEQ ID NO: 48973 - RNA, 19 nt, Artificial Sequence
  Description of Artificial Sequence: Synthetic oligonucleotide
agguucgauaguagagcag

SEQ ID NO: 48974 - RNA, 19 nt, Artificial Sequence
  Description of Artificial Sequence: Synthetic oligonucleotide
cucaugcacccucgauagg

SEQ ID NO: 48975 - RNA, 19 nt, Artificial Sequence
  Description of Artificial Sequence: Synthetic oligonucleotide
cugccgaucacugcccaac

SEQ ID NO: 48976 - RNA, 19 nt, Artificial Sequence
  Description of Artificial Sequence: Synthetic oligonucleotide
auucgcguuggaguccuca

SEQ ID NO: 48977 - RNA, 19 nt, Artificial Sequence
  Description of Artificial Sequence: Synthetic oligonucleotide
acguggccccggcagggac

SEQ ID NO: 48978 - RNA, 19 nt, Artificial Sequence
  Description of Artificial Sequence: Synthetic oligonucleotide
cugugcaacgaagugucca

SEQ ID NO: 48979 - RNA, 19 nt, Artificial Sequence
  Description of Artificial Sequence: Synthetic oligonucleotide
ccaccguaggaugacaccc

SEQ ID NO: 48980 - RNA, 19 nt, Artificial Sequence
  Description of Artificial Sequence: Synthetic oligonucleotide
ggauaggcgucaugugggc

SEQ ID NO: 48981 - RNA, 19 nt, Artificial Sequence
  Description of Artificial Sequence: Synthetic oligonucleotide
ugauacccgugguguucag

SEQ ID NO: 48982 - RNA, 19 nt, Artificial Sequence
  Description of Artificial Sequence: Synthetic oligonucleotide
uaacguugacaccgcccau

SEQ ID NO: 48983 - RNA, 19 nt, Artificial Sequence
  Description of Artificial Sequence: Synthetic oligonucleotide
ucggguggcaccccaccua

SEQ ID NO: 48984 - RNA, 19 nt, Artificial Sequence
  Description of Artificial Sequence: Synthetic oligonucleotide
  modified_base (5)..(5): a, c, u, g, unknown or other
ggccncgguuacucgaugc

SEQ ID NO: 48985 - RNA, 19 nt, Artificial Sequence
  Description of Artificial Sequence: Synthetic oligonucleotide
uccccagcgcacagacacc

SEQ ID NO: 48986 - RNA, 19 nt, Artificial Sequence
  Description of Artificial Sequence: Synthetic oligonucleotide
cugaaccaucccucuacca

SEQ ID NO: 48987 - RNA, 19 nt, Artificial Sequence
  Description of Artificial Sequence: Synthetic oligonucleotide
  modified_base (2)..(2): a, c, u, g, unknown or other
cncgguuacucgaugcugu

SEQ ID NO: 48988 - RNA, 19 nt, Artificial Sequence
  Description of Artificial Sequence: Synthetic oligonucleotide
gcuggauaggcgucaugug

SEQ ID NO: 48989 - RNA, 19 nt, Artificial Sequence
  Description of Artificial Sequence: Synthetic oligonucleotide
gcggacaagcaucgagagg

SEQ ID NO: 48990 - RNA, 19 nt, Artificial Sequence
  Description of Artificial Sequence: Synthetic oligonucleotide
uccggugaacguggccggg

SEQ ID NO: 48991 - RNA, 19 nt, Artificial Sequence
  Description of Artificial Sequence: Synthetic oligonucleotide
gggaagcaucaugugggcg

SEQ ID NO: 48992 - RNA, 19 nt, Artificial Sequence
  Description of Artificial Sequence: Synthetic oligonucleotide
caccccaccuagguaguag

SEQ ID NO: 48993 - RNA, 19 nt, Artificial Sequence
  Description of Artificial Sequence: Synthetic oligonucleotide
ccaucuacuacaagcugga

SEQ ID NO: 48994 - RNA, 19 nt, Artificial Sequence
  Description of Artificial Sequence: Synthetic oligonucleotide
ccccauuauuguagaagag

SEQ ID NO: 48995 - RNA, 19 nt, Artificial Sequence
  Description of Artificial Sequence: Synthetic oligonucleotide
guggugugcagccuaugcu

SEQ ID NO: 48996 - RNA, 19 nt, Artificial Sequence
  Description of Artificial Sequence: Synthetic oligonucleotide
guaguaggcaucggccauc

SEQ ID NO: 48997 - RNA, 19 nt, Artificial Sequence
  Description of Artificial Sequence: Synthetic oligonucleotide
cccguucacacuugugggc

SEQ ID NO: 48998 - RNA, 19 nt, Artificial Sequence
  Description of Artificial Sequence: Synthetic oligonucleotide
cagagacgagcugcugggg

SEQ ID NO: 48999 - RNA, 19 nt, Artificial Sequence
  Description of Artificial Sequence: Synthetic oligonucleotide
  modified_base (19)..(19): a, c, u, g, unknown or other
ggccgguagguacaggccn

SEQ ID NO: 49000 - RNA, 19 nt, Artificial Sequence
  Description of Artificial Sequence: Synthetic oligonucleotide
ggcgugaaguucuuggggu

SEQ ID NO: 49001 - RNA, 19 nt, Artificial Sequence
  Description of Artificial Sequence: Synthetic oligonucleotide
agcugauacccgugguguu

SEQ ID NO: 49002 - RNA, 19 nt, Artificial Sequence
  Description of Artificial Sequence: Synthetic oligonucleotide
  modified_base (6)..(6): a, c, u, g, unknown or other
aggccncgguuacucgaug

SEQ ID NO: 49003 - RNA, 19 nt, Artificial Sequence
  Description of Artificial Sequence: Synthetic oligonucleotide
cugauacccgugguguuca

SEQ ID NO: 49004 - RNA, 19 nt, Artificial Sequence
  Description of Artificial Sequence: Synthetic oligonucleotide
gccuaugcuaacguugaca

SEQ ID NO: 49005 - RNA, 19 nt, Artificial Sequence
  Description of Artificial Sequence: Synthetic oligonucleotide
uccggccggcucucauagg

SEQ ID NO: 49006 - RNA, 19 nt, Artificial Sequence
  Description of Artificial Sequence: Synthetic oligonucleotide
ggagcgagcacacggcuua

SEQ ID NO: 49007 - RNA, 19 nt, Artificial Sequence
  Description of Artificial Sequence: Synthetic oligonucleotide
guagggccccauuauugua

SEQ ID NO: 49008 - RNA, 19 nt, Artificial Sequence
  Description of Artificial Sequence: Synthetic oligonucleotide
cuuccgucugugcaacgaa

SEQ ID NO: 49009 - RNA, 19 nt, Artificial Sequence
  Description of Artificial Sequence: Synthetic oligonucleotide
guacccgugugccauuggu

SEQ ID NO: 49010 - RNA, 19 nt, Artificial Sequence
  Description of Artificial Sequence: Synthetic oligonucleotide
agcgagcacacggcuuauc

SEQ ID NO: 49011 - RNA, 19 nt, Artificial Sequence
  Description of Artificial Sequence: Synthetic oligonucleotide
gguagggccccauuauugu

SEQ ID NO: 49012 - RNA, 19 nt, Artificial Sequence
  Description of Artificial Sequence: Synthetic oligonucleotide
gacuuaggcaggccuccua

SEQ ID NO: 49013 - RNA, 19 nt, Artificial Sequence
  Description of Artificial Sequence: Synthetic oligonucleotide
cggcaguagcaccacauag

SEQ ID NO: 49014 - RNA, 19 nt, Artificial Sequence
  Description of Artificial Sequence: Synthetic oligonucleotide
caucccucuaccaguugua

SEQ ID NO: 49015 - RNA, 19 nt, Artificial Sequence
  Description of Artificial Sequence: Synthetic oligonucleotide
cuccuacaaagaggguaug

SEQ ID NO: 49016 - RNA, 19 nt, Artificial Sequence
  Description of Artificial Sequence: Synthetic oligonucleotide
caccucguggcaagcacaa

SEQ ID NO: 49017 - RNA, 19 nt, Artificial Sequence
  Description of Artificial Sequence: Synthetic oligonucleotide
gcccucgaagucuggauga

SEQ ID NO: 49018 - RNA, 19 nt, Artificial Sequence
  Description of Artificial Sequence: Synthetic oligonucleotide
ggaaucggagaggcucggg

SEQ ID NO: 49019 - RNA, 19 nt, Artificial Sequence
  Description of Artificial Sequence: Synthetic oligonucleotide
cugucaagggguguggggu

SEQ ID NO: 49020 - RNA, 19 nt, Artificial Sequence
  Description of Artificial Sequence: Synthetic oligonucleotide
caagcggguaccgcaguca

SEQ ID NO: 49021 - RNA, 19 nt, Artificial Sequence
  Description of Artificial Sequence: Synthetic oligonucleotide
gaaguucuugggguauccu

SEQ ID NO: 49022 - RNA, 19 nt, Artificial Sequence
  Description of Artificial Sequence: Synthetic oligonucleotide
cauccggggagguucgaua

SEQ ID NO: 49023 - RNA, 19 nt, Artificial Sequence
  Description of Artificial Sequence: Synthetic oligonucleotide
acugaacccuacagacaca

SEQ ID NO: 49024 - RNA, 19 nt, Artificial Sequence
  Description of Artificial Sequence: Synthetic oligonucleotide
cuguacccgugugccauug

SEQ ID NO: 49025 - RNA, 19 nt, Artificial Sequence
  Description of Artificial Sequence: Synthetic oligonucleotide
accacgucgggaagugcca

SEQ ID NO: 49026 - RNA, 19 nt, Artificial Sequence
  Description of Artificial Sequence: Synthetic oligonucleotide
ccgaagucgcuucacaaaa

SEQ ID NO: 49027 - RNA, 19 nt, Artificial Sequence
  Description of Artificial Sequence: Synthetic oligonucleotide
caagguagggccccauuau

SEQ ID NO: 49028 - RNA, 19 nt, Artificial Sequence
  Description of Artificial Sequence: Synthetic oligonucleotide
ggcuggauaggcgucaugu

SEQ ID NO: 49029 - RNA, 19 nt, Artificial Sequence
  Description of Artificial Sequence: Synthetic oligonucleotide
cagucacggccaaugacgu

SEQ ID NO: 49030 - RNA, 19 nt, Artificial Sequence
  Description of Artificial Sequence: Synthetic oligonucleotide
gcugauacccgugguguuc

SEQ ID NO: 49031 - RNA, 19 nt, Artificial Sequence
  Description of Artificial Sequence: Synthetic oligonucleotide
caaagcugauacccguggu

SEQ ID NO: 49032 - RNA, 19 nt, Artificial Sequence
  Description of Artificial Sequence: Synthetic oligonucleotide
gagccuauuucugcgggau

SEQ ID NO: 49033 - RNA, 19 nt, Artificial Sequence
  Description of Artificial Sequence: Synthetic oligonucleotide
ggagccuauuucugcggga

SEQ ID NO: 49034 - RNA, 19 nt, Artificial Sequence
  Description of Artificial Sequence: Synthetic oligonucleotide
gcugcuuaucgagcugcag

SEQ ID NO: 49035 - RNA, 19 nt, Artificial Sequence
  Description of Artificial Sequence: Synthetic oligonucleotide
gcggucacggucagccugg

SEQ ID NO: 49036 - RNA, 19 nt, Artificial Sequence
  Description of Artificial Sequence: Synthetic oligonucleotide
acacgcaccagcacacguu

SEQ ID NO: 49037 - RNA, 19 nt, Artificial Sequence
  Description of Artificial Sequence: Synthetic oligonucleotide
cguggagaacucuccugcc

SEQ ID NO: 49038 - RNA, 19 nt, Artificial Sequence
  Description of Artificial Sequence: Synthetic oligonucleotide
cacaaacagcuguacccgu

SEQ ID NO: 49039 - RNA, 19 nt, Artificial Sequence
  Description of Artificial Sequence: Synthetic oligonucleotide
gggcggacaagcaucgaga

SEQ ID NO: 49040 - RNA, 19 nt, Artificial Sequence
  Description of Artificial Sequence: Synthetic oligonucleotide
ccaaugacguggccccggc

SEQ ID NO: 49041 - RNA, 19 nt, Artificial Sequence
  Description of Artificial Sequence: Synthetic oligonucleotide
gccugagcguguuccuacc

SEQ ID NO: 49042 - RNA, 19 nt, Artificial Sequence
  Description of Artificial Sequence: Synthetic oligonucleotide
auggcacgucccacuagca

SEQ ID NO: 49043 - RNA, 19 nt, Artificial Sequence
  Description of Artificial Sequence: Synthetic oligonucleotide
ccccaccuagguaguaggc

SEQ ID NO: 49044 - RNA, 19 nt, Artificial Sequence
  Description of Artificial Sequence: Synthetic oligonucleotide
uaggcgucaugugggcgua

SEQ ID NO: 49045 - RNA, 19 nt, Artificial Sequence
  Description of Artificial Sequence: Synthetic oligonucleotide
gauacccgugguguucagu

SEQ ID NO: 49046 - RNA, 19 nt, Artificial Sequence
  Description of Artificial Sequence: Synthetic oligonucleotide
ccaccauucgcguuggagu

SEQ ID NO: 49047 - RNA, 19 nt, Artificial Sequence
  Description of Artificial Sequence: Synthetic oligonucleotide
cacggccaaugacguggcc

SEQ ID NO: 49048 - RNA, 19 nt, Artificial Sequence
  Description of Artificial Sequence: Synthetic oligonucleotide
cgugguguucagucgcuug

SEQ ID NO: 49049 - RNA, 19 nt, Artificial Sequence
  Description of Artificial Sequence: Synthetic oligonucleotide
  modified_base (3)..(3): a, c, u, g, unknown or other
ccncgguuacucgaugcug

SEQ ID NO: 49050 - RNA, 19 nt, Artificial Sequence
  Description of Artificial Sequence: Synthetic oligonucleotide
ggucagccuggccacgauc

SEQ ID NO: 49051 - RNA, 19 nt, Artificial Sequence
  Description of Artificial Sequence: Synthetic oligonucleotide
caucgagagguggagccua

SEQ ID NO: 49052 - RNA, 19 nt, Artificial Sequence
  Description of Artificial Sequence: Synthetic oligonucleotide
ccagccgaaagaggucagg

SEQ ID NO: 49053 - RNA, 19 nt, Artificial Sequence
  Description of Artificial Sequence: Synthetic oligonucleotide
ggcccauccggggagguuc

SEQ ID NO: 49054 - RNA, 19 nt, Artificial Sequence
  Description of Artificial Sequence: Synthetic oligonucleotide
ggacaagcaucgagaggug

SEQ ID NO: 49055 - RNA, 19 nt, Artificial Sequence
  Description of Artificial Sequence: Synthetic oligonucleotide
ggcgucaugugggcguagc

SEQ ID NO: 49056 - RNA, 19 nt, Artificial Sequence
  Description of Artificial Sequence: Synthetic oligonucleotide
guacaaccugccgaucacu

SEQ ID NO: 49057 - RNA, 19 nt, Artificial Sequence
  Description of Artificial Sequence: Synthetic oligonucleotide
cuguucggguggcacccca

SEQ ID NO: 49058 - RNA, 19 nt, Artificial Sequence
  Description of Artificial Sequence: Synthetic oligonucleotide
gcccuccaaacugguaugc

SEQ ID NO: 49059 - RNA, 19 nt, Artificial Sequence
  Description of Artificial Sequence: Synthetic oligonucleotide
caaugacguggccccggca

SEQ ID NO: 49060 - RNA, 19 nt, Artificial Sequence
  Description of Artificial Sequence: Synthetic oligonucleotide
ggccggcucucauaggaaa

SEQ ID NO: 49061 - RNA, 19 nt, Artificial Sequence
  Description of Artificial Sequence: Synthetic oligonucleotide
guggcaccccaccuaggua

SEQ ID NO: 49062 - RNA, 19 nt, Artificial Sequence
  Description of Artificial Sequence: Synthetic oligonucleotide
cguucacacuugugggccc

SEQ ID NO: 49063 - RNA, 19 nt, Artificial Sequence
  Description of Artificial Sequence: Synthetic oligonucleotide
ccuccuacaaagaggguau

SEQ ID NO: 49064 - RNA, 19 nt, Artificial Sequence
  Description of Artificial Sequence: Synthetic oligonucleotide
gggccgguagguacaggcc

SEQ ID NO: 49065 - RNA, 19 nt, Artificial Sequence
  Description of Artificial Sequence: Synthetic oligonucleotide
gagcucuaaugugaugauu

SEQ ID NO: 49066 - RNA, 19 nt, Artificial Sequence
  Description of Artificial Sequence: Synthetic oligonucleotide
  modified_base (7)..(7): a, c, u, g, unknown or other
caggccncgguuacucgau

SEQ ID NO: 49067 - RNA, 19 nt, Artificial Sequence
  Description of Artificial Sequence: Synthetic oligonucleotide
cucgucacacaagcgggua

SEQ ID NO: 49068 - RNA, 19 nt, Artificial Sequence
  Description of Artificial Sequence: Synthetic oligonucleotide
cccgaagucgcuucacaaa

SEQ ID NO: 49069 - RNA, 19 nt, Artificial Sequence
  Description of Artificial Sequence: Synthetic oligonucleotide
  modified_base (4)..(4): a, c, u, g, unknown or other
gccncgguuacucgaugcu

SEQ ID NO: 49070 - RNA, 19 nt, Artificial Sequence
  Description of Artificial Sequence: Synthetic oligonucleotide
aucgagagguggagccuau

SEQ ID NO: 49071 - RNA, 19 nt, Artificial Sequence
  Description of Artificial Sequence: Synthetic oligonucleotide
ucgagagguggagccuauu

SEQ ID NO: 49072 - RNA, 19 nt, Artificial Sequence
  Description of Artificial Sequence: Synthetic oligonucleotide
ggauggggagauacccaca

SEQ ID NO: 49073 - RNA, 19 nt, Artificial Sequence
  Description of Artificial Sequence: Synthetic oligonucleotide
  modified_base (18)..(18): a, c, u, g, unknown or other
gccgguagguacaggccnc

SEQ ID NO: 49074 - RNA, 19 nt, Artificial Sequence
  Description of Artificial Sequence: Synthetic oligonucleotide
ccggaggggaagagcugcc

SEQ ID NO: 49075 - RNA, 19 nt, Artificial Sequence
  Description of Artificial Sequence: Synthetic oligonucleotide
acguccggccggcucucau

SEQ ID NO: 49076 - RNA, 19 nt, Artificial Sequence
  Description of Artificial Sequence: Synthetic oligonucleotide
ccggccggcucucauagga

SEQ ID NO: 49077 - RNA, 19 nt, Artificial Sequence
  Description of Artificial Sequence: Synthetic oligonucleotide
agcggguaccgcagucaca

SEQ ID NO: 49078 - RNA, 19 nt, Artificial Sequence
  Description of Artificial Sequence: Synthetic oligonucleotide
ggcgaggugccuucuggcu

SEQ ID NO: 49079 - RNA, 19 nt, Artificial Sequence
  Description of Artificial Sequence: Synthetic oligonucleotide
cacgcaccagcacacguuu

SEQ ID NO: 49080 - RNA, 19 nt, Artificial Sequence
  Description of Artificial Sequence: Synthetic oligonucleotide
acgcccguucacacuugug

SEQ ID NO: 49081 - RNA, 19 nt, Artificial Sequence
  Description of Artificial Sequence: Synthetic oligonucleotide
gggagaccuccuacaaaga

SEQ ID NO: 49082 - RNA, 19 nt, Artificial Sequence
  Description of Artificial Sequence: Synthetic oligonucleotide
gucccaccguaggaugaca

SEQ ID NO: 49083 - RNA, 19 nt, Artificial Sequence
  Description of Artificial Sequence: Synthetic oligonucleotide
acacgcccguucacacuug

SEQ ID NO: 49084 - RNA, 19 nt, Artificial Sequence
  Description of Artificial Sequence: Synthetic oligonucleotide
ucugcgggauggggagaua

SEQ ID NO: 49085 - RNA, 19 nt, Artificial Sequence
  Description of Artificial Sequence: Synthetic oligonucleotide
cauucgcguuggaguccuc

SEQ ID NO: 49086 - RNA, 19 nt, Artificial Sequence
  Description of Artificial Sequence: Synthetic oligonucleotide
cugcaguccccagcgcaca

SEQ ID NO: 49087 - RNA, 19 nt, Artificial Sequence
  Description of Artificial Sequence: Synthetic oligonucleotide
gcguggcccucuucaggcc

SEQ ID NO: 49088 - RNA, 19 nt, Artificial Sequence
  Description of Artificial Sequence: Synthetic oligonucleotide
cgagcacacggcuuaucca

SEQ ID NO: 49089 - RNA, 19 nt, Artificial Sequence
  Description of Artificial Sequence: Synthetic oligonucleotide
ccacgucgggaagugccag

SEQ ID NO: 49090 - RNA, 19 nt, Artificial Sequence
  Description of Artificial Sequence: Synthetic oligonucleotide
ccucacugaccugugagcu

SEQ ID NO: 49091 - RNA, 19 nt, Artificial Sequence
  Description of Artificial Sequence: Synthetic oligonucleotide
gggcaccgucggcaaagac

SEQ ID NO: 49092 - RNA, 19 nt, Artificial Sequence
  Description of Artificial Sequence: Synthetic oligonucleotide
cgguuacucgaugcuguag

SEQ ID NO: 49093 - RNA, 19 nt, Artificial Sequence
  Description of Artificial Sequence: Synthetic oligonucleotide
ugccgggauucagcacaaa

SEQ ID NO: 49094 - RNA, 19 nt, Artificial Sequence
  Description of Artificial Sequence: Synthetic oligonucleotide
cacaaagcuugggguaggu

SEQ ID NO: 49095 - RNA, 19 nt, Artificial Sequence
  Description of Artificial Sequence: Synthetic oligonucleotide
cacaagcggguaccgcagu

SEQ ID NO: 49096 - RNA, 19 nt, Artificial Sequence
  Description of Artificial Sequence: Synthetic oligonucleotide
ggucagcccgugacugcug

SEQ ID NO: 49097 - RNA, 19 nt, Artificial Sequence
  Description of Artificial Sequence: Synthetic oligonucleotide
gcacacguuugcggcugcc

SEQ ID NO: 49098 - RNA, 19 nt, Artificial Sequence
  Description of Artificial Sequence: Synthetic oligonucleotide
gugcggaaggcaggcgucu

SEQ ID NO: 49099 - RNA, 19 nt, Artificial Sequence
  Description of Artificial Sequence: Synthetic oligonucleotide
  modified_base (11)..(11): a, c, u, g, unknown or other
gguacaggccncgguuacu

SEQ ID NO: 49100 - RNA, 19 nt, Artificial Sequence
  Description of Artificial Sequence: Synthetic oligonucleotide
cucgauggcgaggugccuu

SEQ ID NO: 49101 - RNA, 19 nt, Artificial Sequence
  Description of Artificial Sequence: Synthetic oligonucleotide
cggugaacguggccgggug

SEQ ID NO: 49102 - RNA, 19 nt, Artificial Sequence
  Description of Artificial Sequence: Synthetic oligonucleotide
gcuguucggguggcacccc

SEQ ID NO: 49103 - RNA, 19 nt, Artificial Sequence
  Description of Artificial Sequence: Synthetic oligonucleotide
cacaagguagggccccauu

SEQ ID NO: 49104 - RNA, 19 nt, Artificial Sequence
  Description of Artificial Sequence: Synthetic oligonucleotide
cacgcccguucacacuugu

SEQ ID NO: 49105 - RNA, 19 nt, Artificial Sequence
  Description of Artificial Sequence: Synthetic oligonucleotide
gcauccugaauagucccuu

SEQ ID NO: 49106 - RNA, 19 nt, Artificial Sequence
  Description of Artificial Sequence: Synthetic oligonucleotide
ggguauccucccacauaga

SEQ ID NO: 49107 - RNA, 19 nt, Artificial Sequence
  Description of Artificial Sequence: Synthetic oligonucleotide
cgcacggucacagugaguu

SEQ ID NO: 49108 - RNA, 19 nt, Artificial Sequence
  Description of Artificial Sequence: Synthetic oligonucleotide
gugggcggacaagcaucga

SEQ ID NO: 49109 - RNA, 19 nt, Artificial Sequence
  Description of Artificial Sequence: Synthetic oligonucleotide
caucuacuacaagcuggau

SEQ ID NO: 49110 - RNA, 19 nt, Artificial Sequence
  Description of Artificial Sequence: Synthetic oligonucleotide
cuggcaaguagugguccuu

SEQ ID NO: 49111 - RNA, 19 nt, Artificial Sequence
  Description of Artificial Sequence: Synthetic oligonucleotide
gcaucgagagguggagccu

SEQ ID NO: 49112 - RNA, 19 nt, Artificial Sequence
  Description of Artificial Sequence: Synthetic oligonucleotide
ccggggagguucgauagua

SEQ ID NO: 49113 - RNA, 19 nt, Artificial Sequence
  Description of Artificial Sequence: Synthetic oligonucleotide
gcucgucacacaagcgggu

SEQ ID NO: 49114 - RNA, 19 nt, Artificial Sequence
  Description of Artificial Sequence: Synthetic oligonucleotide
cggguaccgcagucacagg

SEQ ID NO: 49115 - RNA, 19 nt, Artificial Sequence
  Description of Artificial Sequence: Synthetic oligonucleotide
gccccaucauuugcccgca

SEQ ID NO: 49116 - RNA, 19 nt, Artificial Sequence
  Description of Artificial Sequence: Synthetic oligonucleotide
gagcgagcacacggcuuau

SEQ ID NO: 49117 - RNA, 19 nt, Artificial Sequence
  Description of Artificial Sequence: Synthetic oligonucleotide
ggggcaccgucggcaaaga

SEQ ID NO: 49118 - RNA, 19 nt, Artificial Sequence
  Description of Artificial Sequence: Synthetic oligonucleotide
cagggacgaugaguaugua

SEQ ID NO: 49119 - RNA, 19 nt, Artificial Sequence
  Description of Artificial Sequence: Synthetic oligonucleotide
gccguaccucuagcuccag

SEQ ID NO: 49120 - RNA, 19 nt, Artificial Sequence
  Description of Artificial Sequence: Synthetic oligonucleotide
ccauucgcguuggaguccu

SEQ ID NO: 49121 - RNA, 19 nt, Artificial Sequence
  Description of Artificial Sequence: Synthetic oligonucleotide
ccgucggcaaagacccucu

SEQ ID NO: 49122 - RNA, 19 nt, Artificial Sequence
  Description of Artificial Sequence: Synthetic oligonucleotide
gcuuaucgagcugcagauu

SEQ ID NO: 49123 - RNA, 19 nt, Artificial Sequence
  Description of Artificial Sequence: Synthetic oligonucleotide
cggccuucgggcacacgca

SEQ ID NO: 49124 - RNA, 19 nt, Artificial Sequence
  Description of Artificial Sequence: Synthetic oligonucleotide
cgagagguggagccuauuu

SEQ ID NO: 49125 - RNA, 19 nt, Artificial Sequence
  Description of Artificial Sequence: Synthetic oligonucleotide
ccgcccauguucugcugua

SEQ ID NO: 49126 - RNA, 19 nt, Artificial Sequence
  Description of Artificial Sequence: Synthetic oligonucleotide
ggcaccccaccuagguagu

SEQ ID NO: 49127 - RNA, 19 nt, Artificial Sequence
  Description of Artificial Sequence: Synthetic oligonucleotide
caccgucggcaaagacccu

SEQ ID NO: 49128 - RNA, 19 nt, Artificial Sequence
  Description of Artificial Sequence: Synthetic oligonucleotide
cacguccggccggcucuca

SEQ ID NO: 49129 - RNA, 19 nt, Artificial Sequence
  Description of Artificial Sequence: Synthetic oligonucleotide
cacccucgauaggcaggaa

SEQ ID NO: 49130 - RNA, 19 nt, Artificial Sequence
  Description of Artificial Sequence: Synthetic oligonucleotide
cugcggcgggagaccuucu

SEQ ID NO: 49131 - RNA, 19 nt, Artificial Sequence
  Description of Artificial Sequence: Synthetic oligonucleotide
ccucagggacgaugaguau

SEQ ID NO: 49132 - RNA, 19 nt, Artificial Sequence
  Description of Artificial Sequence: Synthetic oligonucleotide
ggcuuacauagggcagcuu

SEQ ID NO: 49133 - RNA, 19 nt, Artificial Sequence
  Description of Artificial Sequence: Synthetic oligonucleotide
gcacagagacacgcccguu

SEQ ID NO: 49134 - RNA, 19 nt, Artificial Sequence
  Description of Artificial Sequence: Synthetic oligonucleotide
ccggugaacguggccgggu

SEQ ID NO: 49135 - RNA, 19 nt, Artificial Sequence
  Description of Artificial Sequence: Synthetic oligonucleotide
ccauccggggagguucgau

SEQ ID NO: 49136 - RNA, 19 nt, Artificial Sequence
  Description of Artificial Sequence: Synthetic oligonucleotide
cgucuggugcuggguggga

SEQ ID NO: 49137 - RNA, 19 nt, Artificial Sequence
  Description of Artificial Sequence: Synthetic oligonucleotide
cguugaccaccagcuuccu

SEQ ID NO: 49138 - RNA, 19 nt, Artificial Sequence
  Description of Artificial Sequence: Synthetic oligonucleotide
cguugacaccgcccauguu

SEQ ID NO: 49139 - RNA, 19 nt, Artificial Sequence
  Description of Artificial Sequence: Synthetic oligonucleotide
  modified_base (1)..(1): a, c, u, g, unknown or other
ncgguuacucgaugcugua

SEQ ID NO: 49140 - RNA, 19 nt, Artificial Sequence
  Description of Artificial Sequence: Synthetic oligonucleotide
ucuaaugcaaccuucaugg

SEQ ID NO: 49141 - RNA, 19 nt, Artificial Sequence
  Description of Artificial Sequence: Synthetic oligonucleotide
aaagaaucuaacucacugc

SEQ ID NO: 49142 - RNA, 19 nt, Artificial Sequence
  Description of Artificial Sequence: Synthetic oligonucleotide
uuugcuugcaauuucaugc

SEQ ID NO: 49143 - RNA, 19 nt, Artificial Sequence
  Description of Artificial Sequence: Synthetic oligonucleotide
ucuuaauaaguucugaagc

SEQ ID NO: 49144 - RNA, 19 nt, Artificial Sequence
  Description of Artificial Sequence: Synthetic oligonucleotide
uuauuagcaacuuugagaa

SEQ ID NO: 49145 - RNA, 19 nt, Artificial Sequence
  Description of Artificial Sequence: Synthetic oligonucleotide
aagucaaauuaguaggaac

SEQ ID NO: 49146 - RNA, 19 nt, Artificial Sequence
  Description of Artificial Sequence: Synthetic oligonucleotide
agaaacaacgaucuguagg

SEQ ID NO: 49147 - RNA, 19 nt, Artificial Sequence
  Description of Artificial Sequence: Synthetic oligonucleotide
auaaguugaccguucaacc

SEQ ID NO: 49148 - RNA, 19 nt, Artificial Sequence
  Description of Artificial Sequence: Synthetic oligonucleotide
aaaauguuauauuucacau

SEQ ID NO: 49149 - RNA, 19 nt, Artificial Sequence
  Description of Artificial Sequence: Synthetic oligonucleotide
uuugaguggauaaaguuca

SEQ ID NO: 49150 - RNA, 19 nt, Artificial Sequence
  Description of Artificial Sequence: Synthetic oligonucleotide
ucuaacaagguuagaaaag

SEQ ID NO: 49151 - RNA, 19 nt, Artificial Sequence
  Description of Artificial Sequence: Synthetic oligonucleotide
aauugcaucagucucugcu

SEQ ID NO: 49152 - RNA, 19 nt, Artificial Sequence
  Description of Artificial Sequence: Synthetic oligonucleotide
uuuaaggucuauuaauuca

SEQ ID NO: 49153 - RNA, 19 nt, Artificial Sequence
  Description of Artificial Sequence: Synthetic oligonucleotide
ugcuuaauaguucuucggg

SEQ ID NO: 49154 - RNA, 19 nt, Artificial Sequence
  Description of Artificial Sequence: Synthetic oligonucleotide
caaauuaguaggaacagac

SEQ ID NO: 49155 - RNA, 19 nt, Artificial Sequence
  Description of Artificial Sequence: Synthetic oligonucleotide
ucuucuacggucuuuaacu

SEQ ID NO: 49156 - RNA, 19 nt, Artificial Sequence
  Description of Artificial Sequence: Synthetic oligonucleotide
uuagcauuauccaucggag

SEQ ID NO: 49157 - RNA, 19 nt, Artificial Sequence
  Description of Artificial Sequence: Synthetic oligonucleotide
ucuaccaagacauuuucug

SEQ ID NO: 49158 - RNA, 19 nt, Artificial Sequence
  Description of Artificial Sequence: Synthetic oligonucleotide
aauacaacgccuucgagua

SEQ ID NO: 49159 - RNA, 19 nt, Artificial Sequence
  Description of Artificial Sequence: Synthetic oligonucleotide
ugacuguugagccuuaugc

SEQ ID NO: 49160 - RNA, 19 nt, Artificial Sequence
  Description of Artificial Sequence: Synthetic oligonucleotide
aagauuacauuuaaggucu

SEQ ID NO: 49161 - RNA, 19 nt, Artificial Sequence
  Description of Artificial Sequence: Synthetic oligonucleotide
uuuauuaggcuguugagaa

SEQ ID NO: 49162 - RNA, 19 nt, Artificial Sequence
  Description of Artificial Sequence: Synthetic oligonucleotide
aauaagguaaaagauuaca

SEQ ID NO: 49163 - RNA, 19 nt, Artificial Sequence
  Description of Artificial Sequence: Synthetic oligonucleotide
gaaauaaucuuuugagcag

SEQ ID NO: 49164 - RNA, 19 nt, Artificial Sequence
  Description of Artificial Sequence: Synthetic oligonucleotide
ucuuuucaaagccacguag

SEQ ID NO: 49165 - RNA, 19 nt, Artificial Sequence
  Description of Artificial Sequence: Synthetic oligonucleotide
uuacuaugcagacucuugg

SEQ ID NO: 49166 - RNA, 19 nt, Artificial Sequence
  Description of Artificial Sequence: Synthetic oligonucleotide
aacaacgaucuguagguuc

SEQ ID NO: 49167 - RNA, 19 nt, Artificial Sequence
  Description of Artificial Sequence: Synthetic oligonucleotide
caguauaccauuuuccugc

SEQ ID NO: 49168 - RNA, 19 nt, Artificial Sequence
  Description of Artificial Sequence: Synthetic oligonucleotide
uaauaaguucugaagcucc

SEQ ID NO: 49169 - RNA, 19 nt, Artificial Sequence
  Description of Artificial Sequence: Synthetic oligonucleotide
uuuugaguggauaaaguuc

SEQ ID NO: 49170 - RNA, 19 nt, Artificial Sequence
  Description of Artificial Sequence: Synthetic oligonucleotide
ugggauuuaaauaauuuau

SEQ ID NO: 49171 - RNA, 19 nt, Artificial Sequence
  Description of Artificial Sequence: Synthetic oligonucleotide
aaguugaccguucaaccuc

SEQ ID NO: 49172 - RNA, 19 nt, Artificial Sequence
  Description of Artificial Sequence: Synthetic oligonucleotide
ugagaagugacagauaacu

SEQ ID NO: 49173 - RNA, 19 nt, Artificial Sequence
  Description of Artificial Sequence: Synthetic oligonucleotide
agaagaugcaugaauaagg

SEQ ID NO: 49174 - RNA, 19 nt, Artificial Sequence
  Description of Artificial Sequence: Synthetic oligonucleotide
uguaagaagaugcaugaau

SEQ ID NO: 49175 - RNA, 19 nt, Artificial Sequence
  Description of Artificial Sequence: Synthetic oligonucleotide
aacucuugaacuucuuuug

SEQ ID NO: 49176 - RNA, 19 nt, Artificial Sequence
  Description of Artificial Sequence: Synthetic oligonucleotide
uuugaguuagcauuaucca

SEQ ID NO: 49177 - RNA, 19 nt, Artificial Sequence
  Description of Artificial Sequence: Synthetic oligonucleotide
uuugauaccagggugucag

SEQ ID NO: 49178 - RNA, 19 nt, Artificial Sequence
  Description of Artificial Sequence: Synthetic oligonucleotide
uuauauuucacaucgucua

SEQ ID NO: 49179 - RNA, 19 nt, Artificial Sequence
  Description of Artificial Sequence: Synthetic oligonucleotide
ugcuguuuugauaccaggg

SEQ ID NO: 49180 - RNA, 19 nt, Artificial Sequence
  Description of Artificial Sequence: Synthetic oligonucleotide
aaaucgugguguugaacac

SEQ ID NO: 49181 - RNA, 19 nt, Artificial Sequence
  Description of Artificial Sequence: Synthetic oligonucleotide
aauggaauuguugaaucug

SEQ ID NO: 49182 - RNA, 19 nt, Artificial Sequence
  Description of Artificial Sequence: Synthetic oligonucleotide
aauaagggguucaucuacc

SEQ ID NO: 49183 - RNA, 19 nt, Artificial Sequence
  Description of Artificial Sequence: Synthetic oligonucleotide
uaaguggucguguucauug

SEQ ID NO: 49184 - RNA, 19 nt, Artificial Sequence
  Description of Artificial Sequence: Synthetic oligonucleotide
uaauacaacgccuucgagu

SEQ ID NO: 49185 - RNA, 19 nt, Artificial Sequence
  Description of Artificial Sequence: Synthetic oligonucleotide
uaagucaguagucuaacaa

SEQ ID NO: 49186 - RNA, 19 nt, Artificial Sequence
  Description of Artificial Sequence: Synthetic oligonucleotide
uuaaggucuauuaauucaa

SEQ ID NO: 49187 - RNA, 19 nt, Artificial Sequence
  Description of Artificial Sequence: Synthetic oligonucleotide
auuaguaggaacagacacc

SEQ ID NO: 49188 - RNA, 19 nt, Artificial Sequence
  Description of Artificial Sequence: Synthetic oligonucleotide
uuaguaggaacagacacca

SEQ ID NO: 49189 - RNA, 19 nt, Artificial Sequence
  Description of Artificial Sequence: Synthetic oligonucleotide
auggaucccuucuacaugg

SEQ ID NO: 49190 - RNA, 19 nt, Artificial Sequence
  Description of Artificial Sequence: Synthetic oligonucleotide
cuuaauaguucuucgggac

SEQ ID NO: 49191 - RNA, 19 nt, Artificial Sequence
  Description of Artificial Sequence: Synthetic oligonucleotide
cugauugacuuccugaagc

SEQ ID NO: 49192 - RNA, 19 nt, Artificial Sequence
  Description of Artificial Sequence: Synthetic oligonucleotide
uacauggauacucuucugc

SEQ ID NO: 49193 - RNA, 19 nt, Artificial Sequence
  Description of Artificial Sequence: Synthetic oligonucleotide
ugcaauuucugcacuuccg

SEQ ID NO: 49194 - RNA, 19 nt, Artificial Sequence
  Description of Artificial Sequence: Synthetic oligonucleotide
uuaagcuguucaauuuggg

SEQ ID NO: 49195 - RNA, 19 nt, Artificial Sequence
  Description of Artificial Sequence: Synthetic oligonucleotide
uaauauagcuucuauucuc

SEQ ID NO: 49196 - RNA, 19 nt, Artificial Sequence
  Description of Artificial Sequence: Synthetic oligonucleotide
ugaagcggaggucugagca

SEQ ID NO: 49197 - RNA, 19 nt, Artificial Sequence
  Description of Artificial Sequence: Synthetic oligonucleotide
auauaauacaacgccuucg

SEQ ID NO: 49198 - RNA, 19 nt, Artificial Sequence
  Description of Artificial Sequence: Synthetic oligonucleotide
aaucuuauuuuaucauccu

SEQ ID NO: 49199 - RNA, 19 nt, Artificial Sequence
  Description of Artificial Sequence: Synthetic oligonucleotide
uucgcguuucauuuaauug

SEQ ID NO: 49200 - RNA, 19 nt, Artificial Sequence
  Description of Artificial Sequence: Synthetic oligonucleotide
aaauaagguaaaagauuac

SEQ ID NO: 49201 - RNA, 19 nt, Artificial Sequence
  Description of Artificial Sequence: Synthetic oligonucleotide
uccucauucugucuuacug

SEQ ID NO: 49202 - RNA, 19 nt, Artificial Sequence
  Description of Artificial Sequence: Synthetic oligonucleotide
uauuugcugauuacauuag

SEQ ID NO: 49203 - RNA, 19 nt, Artificial Sequence
  Description of Artificial Sequence: Synthetic oligonucleotide
gaauaaguccaguuucaag

SEQ ID NO: 49204 - RNA, 19 nt, Artificial Sequence
  Description of Artificial Sequence: Synthetic oligonucleotide
uuuaguggccaccugaaua

SEQ ID NO: 49205 - RNA, 19 nt, Artificial Sequence
  Description of Artificial Sequence: Synthetic oligonucleotide
agaugcaugaauaaggggu

SEQ ID NO: 49206 - RNA, 19 nt, Artificial Sequence
  Description of Artificial Sequence: Synthetic oligonucleotide
uguuagguaaagcagugua

SEQ ID NO: 49207 - RNA, 19 nt, Artificial Sequence
  Description of Artificial Sequence: Synthetic oligonucleotide
uacuauucccaauaacagc

SEQ ID NO: 49208 - RNA, 19 nt, Artificial Sequence
  Description of Artificial Sequence: Synthetic oligonucleotide
ucgcguuucauuuaauugu

SEQ ID NO: 49209 - RNA, 19 nt, Artificial Sequence
  Description of Artificial Sequence: Synthetic oligonucleotide
gacuccauuaauugcauca

SEQ ID NO: 49210 - RNA, 19 nt, Artificial Sequence
  Description of Artificial Sequence: Synthetic oligonucleotide
uacauggucagguuuaauc

SEQ ID NO: 49211 - RNA, 19 nt, Artificial Sequence
  Description of Artificial Sequence: Synthetic oligonucleotide
uggccuuuaacucuugaac

SEQ ID NO: 49212 - RNA, 19 nt, Artificial Sequence
  Description of Artificial Sequence: Synthetic oligonucleotide
gagcuuacuaugcagacuc

SEQ ID NO: 49213 - RNA, 19 nt, Artificial Sequence
  Description of Artificial Sequence: Synthetic oligonucleotide
ugagaaacaacgaucugua

SEQ ID NO: 49214 - RNA, 19 nt, Artificial Sequence
  Description of Artificial Sequence: Synthetic oligonucleotide
acuauucccaauaacagca

SEQ ID NO: 49215 - RNA, 19 nt, Artificial Sequence
  Description of Artificial Sequence: Synthetic oligonucleotide
ucggaggaauguaagaaga

SEQ ID NO: 49216 - RNA, 19 nt, Artificial Sequence
  Description of Artificial Sequence: Synthetic oligonucleotide
agaucuuucagcucucuga

SEQ ID NO: 49217 - RNA, 19 nt, Artificial Sequence
  Description of Artificial Sequence: Synthetic oligonucleotide
aaucuaacucacugcgaag

SEQ ID NO: 49218 - RNA, 19 nt, Artificial Sequence
  Description of Artificial Sequence: Synthetic oligonucleotide
uuuuguucgcguuucauuu

SEQ ID NO: 49219 - RNA, 19 nt, Artificial Sequence
  Description of Artificial Sequence: Synthetic oligonucleotide
ugcugauuacauuagcaac

SEQ ID NO: 49220 - RNA, 19 nt, Artificial Sequence
  Description of Artificial Sequence: Synthetic oligonucleotide
ucaguauaccauuuuccug

SEQ ID NO: 49221 - RNA, 19 nt, Artificial Sequence
  Description of Artificial Sequence: Synthetic oligonucleotide
ucuguaagaucccuucugu

SEQ ID NO: 49222 - RNA, 19 nt, Artificial Sequence
  Description of Artificial Sequence: Synthetic oligonucleotide
aguggauaaaguucaguga

SEQ ID NO: 49223 - RNA, 19 nt, Artificial Sequence
  Description of Artificial Sequence: Synthetic oligonucleotide
gaggugucuacagaguugg

SEQ ID NO: 49224 - RNA, 19 nt, Artificial Sequence
  Description of Artificial Sequence: Synthetic oligonucleotide
aaauauaauacaacgccuu

SEQ ID NO: 49225 - RNA, 19 nt, Artificial Sequence
  Description of Artificial Sequence: Synthetic oligonucleotide
cugcucauuagccagggcc

SEQ ID NO: 49226 - RNA, 19 nt, Artificial Sequence
  Description of Artificial Sequence: Synthetic oligonucleotide
aagaaaccugaucacucug

SEQ ID NO: 49227 - RNA, 19 nt, Artificial Sequence
  Description of Artificial Sequence: Synthetic oligonucleotide
uuaguggccaccugaauaa

SEQ ID NO: 49228 - RNA, 19 nt, Artificial Sequence
  Description of Artificial Sequence: Synthetic oligonucleotide
aucaguauuaaaauguuau

SEQ ID NO: 49229 - RNA, 19 nt, Artificial Sequence
  Description of Artificial Sequence: Synthetic oligonucleotide
agucaaauuaguaggaaca

SEQ ID NO: 49230 - RNA, 19 nt, Artificial Sequence
  Description of Artificial Sequence: Synthetic oligonucleotide
uauggaucccuucuacaug

SEQ ID NO: 49231 - RNA, 19 nt, Artificial Sequence
  Description of Artificial Sequence: Synthetic oligonucleotide
ucuuccuugccucuuaaua

SEQ ID NO: 49232 - RNA, 19 nt, Artificial Sequence
  Description of Artificial Sequence: Synthetic oligonucleotide
cuucaugaguugcugauug

SEQ ID NO: 49233 - RNA, 19 nt, Artificial Sequence
  Description of Artificial Sequence: Synthetic oligonucleotide
aaguuaagcuccucauucu

SEQ ID NO: 49234 - RNA, 19 nt, Artificial Sequence
  Description of Artificial Sequence: Synthetic oligonucleotide
ucgaguaauuuccaaugac

SEQ ID NO: 49235 - RNA, 19 nt, Artificial Sequence
  Description of Artificial Sequence: Synthetic oligonucleotide
aguagaaagggugaaacau

SEQ ID NO: 49236 - RNA, 19 nt, Artificial Sequence
  Description of Artificial Sequence: Synthetic oligonucleotide
cauaaguugaccguucaac

SEQ ID NO: 49237 - RNA, 19 nt, Artificial Sequence
  Description of Artificial Sequence: Synthetic oligonucleotide
uaaguugaccguucaaccu

SEQ ID NO: 49238 - RNA, 19 nt, Artificial Sequence
  Description of Artificial Sequence: Synthetic oligonucleotide
aguggucguguucauuggc

SEQ ID NO: 49239 - RNA, 19 nt, Artificial Sequence
  Description of Artificial Sequence: Synthetic oligonucleotide
cuuacuaugcagacucuug

SEQ ID NO: 49240 - RNA, 19 nt, Artificial Sequence
  Description of Artificial Sequence: Synthetic oligonucleotide
uugaauuugcaaagacucu

SEQ ID NO: 49241 - RNA, 19 nt, Artificial Sequence
  Description of Artificial Sequence: Synthetic oligonucleotide
uguaagaucccuucuguuu

SEQ ID NO: 49242 - RNA, 19 nt, Artificial Sequence
  Description of Artificial Sequence: Synthetic oligonucleotide
cuugagaagugacagauaa

SEQ ID NO: 49243 - RNA, 19 nt, Artificial Sequence
  Description of Artificial Sequence: Synthetic oligonucleotide
cuucugcuagaacugaagc

SEQ ID NO: 49244 - RNA, 19 nt, Artificial Sequence
  Description of Artificial Sequence: Synthetic oligonucleotide
uguucccuugaguugaugu

SEQ ID NO: 49245 - RNA, 19 nt, Artificial Sequence
  Description of Artificial Sequence: Synthetic oligonucleotide
uaacucuugaacuucuuuu

SEQ ID NO: 49246 - RNA, 19 nt, Artificial Sequence
  Description of Artificial Sequence: Synthetic oligonucleotide
uuaaguguuuucucuguaa

SEQ ID NO: 49247 - RNA, 19 nt, Artificial Sequence
  Description of Artificial Sequence: Synthetic oligonucleotide
uucagaguaugagucauca

SEQ ID NO: 49248 - RNA, 19 nt, Artificial Sequence
  Description of Artificial Sequence: Synthetic oligonucleotide
agguaaagcaguguacaac

SEQ ID NO: 49249 - RNA, 19 nt, Artificial Sequence
  Description of Artificial Sequence: Synthetic oligonucleotide
uuucuggggaaacacuacu

SEQ ID NO: 49250 - RNA, 19 nt, Artificial Sequence
  Description of Artificial Sequence: Synthetic oligonucleotide
ugauugacuuccugaagca

SEQ ID NO: 49251 - RNA, 19 nt, Artificial Sequence
  Description of Artificial Sequence: Synthetic oligonucleotide
ugcucggaagauguaaagg

SEQ ID NO: 49252 - RNA, 19 nt, Artificial Sequence
  Description of Artificial Sequence: Synthetic oligonucleotide
aacuaaacucuggaggugu

SEQ ID NO: 49253 - RNA, 19 nt, Artificial Sequence
  Description of Artificial Sequence: Synthetic oligonucleotide
accacaagauuugaguuag

SEQ ID NO: 49254 - RNA, 19 nt, Artificial Sequence
  Description of Artificial Sequence: Synthetic oligonucleotide
aguaagugucccuuuauuu

SEQ ID NO: 49255 - RNA, 19 nt, Artificial Sequence
  Description of Artificial Sequence: Synthetic oligonucleotide
auagucuucaaggacagaa

SEQ ID NO: 49256 - RNA, 19 nt, Artificial Sequence
  Description of Artificial Sequence: Synthetic oligonucleotide
ucaguauuaaaauguuaua

SEQ ID NO: 49257 - RNA, 19 nt, Artificial Sequence
  Description of Artificial Sequence: Synthetic oligonucleotide
agaacugaagcggaggucu

SEQ ID NO: 49258 - RNA, 19 nt, Artificial Sequence
  Description of Artificial Sequence: Synthetic oligonucleotide
aaauuaguaggaacagaca

SEQ ID NO: 49259 - RNA, 19 nt, Artificial Sequence
  Description of Artificial Sequence: Synthetic oligonucleotide
aagcggaggucugagcagc

SEQ ID NO: 49260 - RNA, 19 nt, Artificial Sequence
  Description of Artificial Sequence: Synthetic oligonucleotide
aacuagagacacaaaagaa

SEQ ID NO: 49261 - RNA, 19 nt, Artificial Sequence
  Description of Artificial Sequence: Synthetic oligonucleotide
aagcuuauuuagcucugca

SEQ ID NO: 49262 - RNA, 19 nt, Artificial Sequence
  Description of Artificial Sequence: Synthetic oligonucleotide
agacucuuggacuucauuu

SEQ ID NO: 49263 - RNA, 19 nt, Artificial Sequence
  Description of Artificial Sequence: Synthetic oligonucleotide
uuggaaagaugacucucug

SEQ ID NO: 49264 - RNA, 19 nt, Artificial Sequence
  Description of Artificial Sequence: Synthetic oligonucleotide
uguaaugcuuuguucuggu

SEQ ID NO: 49265 - RNA, 19 nt, Artificial Sequence
  Description of Artificial Sequence: Synthetic oligonucleotide
ucaguugaugccaaagcuu

SEQ ID NO: 49266 - RNA, 19 nt, Artificial Sequence
  Description of Artificial Sequence: Synthetic oligonucleotide
ucaaauuaguaggaacaga

SEQ ID NO: 49267 - RNA, 19 nt, Artificial Sequence
  Description of Artificial Sequence: Synthetic oligonucleotide
ucaguagucuaacaagguu

SEQ ID NO: 49268 - RNA, 19 nt, Artificial Sequence
  Description of Artificial Sequence: Synthetic oligonucleotide
ggacucaucagcuuuaauc

SEQ ID NO: 49269 - RNA, 19 nt, Artificial Sequence
  Description of Artificial Sequence: Synthetic oligonucleotide
aguagucuaacaagguuag

SEQ ID NO: 49270 - RNA, 19 nt, Artificial Sequence
  Description of Artificial Sequence: Synthetic oligonucleotide
caguugaugccaaagcuuc

SEQ ID NO: 49271 - RNA, 19 nt, Artificial Sequence
  Description of Artificial Sequence: Synthetic oligonucleotide
uguuuagucucuugaugga

SEQ ID NO: 49272 - RNA, 19 nt, Artificial Sequence
  Description of Artificial Sequence: Synthetic oligonucleotide
ucuucgggacucaucagcu

SEQ ID NO: 49273 - RNA, 19 nt, Artificial Sequence
  Description of Artificial Sequence: Synthetic oligonucleotide
aucgugguguugaacacgc

SEQ ID NO: 49274 - RNA, 19 nt, Artificial Sequence
  Description of Artificial Sequence: Synthetic oligonucleotide
uucccgaacuugcugaaac

SEQ ID NO: 49275 - RNA, 19 nt, Artificial Sequence
  Description of Artificial Sequence: Synthetic oligonucleotide
uucuucuacggucuuuaac

SEQ ID NO: 49276 - RNA, 19 nt, Artificial Sequence
  Description of Artificial Sequence: Synthetic oligonucleotide
auaauacaacgccuucgag

SEQ ID NO: 49277 - RNA, 19 nt, Artificial Sequence
  Description of Artificial Sequence: Synthetic oligonucleotide
uugaauaguaagugucccu

SEQ ID NO: 49278 - RNA, 19 nt, Artificial Sequence
  Description of Artificial Sequence: Synthetic oligonucleotide
ugcucauuagccagggccu

SEQ ID NO: 49279 - RNA, 19 nt, Artificial Sequence
  Description of Artificial Sequence: Synthetic oligonucleotide
gucaaauuaguaggaacag

SEQ ID NO: 49280 - RNA, 19 nt, Artificial Sequence
  Description of Artificial Sequence: Synthetic oligonucleotide
ucugucacauaaguugacc

SEQ ID NO: 49281 - RNA, 19 nt, Artificial Sequence
  Description of Artificial Sequence: Synthetic oligonucleotide
gaucuguagguucugaacu

SEQ ID NO: 49282 - RNA, 19 nt, Artificial Sequence
  Description of Artificial Sequence: Synthetic oligonucleotide
ugcuaaguggucguguuca

SEQ ID NO: 49283 - RNA, 19 nt, Artificial Sequence
  Description of Artificial Sequence: Synthetic oligonucleotide
acuagagacacaaaagaaa

SEQ ID NO: 49284 - RNA, 19 nt, Artificial Sequence
  Description of Artificial Sequence: Synthetic oligonucleotide
guaguuggaccuucaacug

SEQ ID NO: 49285 - RNA, 19 nt, Artificial Sequence
  Description of Artificial Sequence: Synthetic oligonucleotide
uuagacuucuucugcccug

SEQ ID NO: 49286 - RNA, 19 nt, Artificial Sequence
  Description of Artificial Sequence: Synthetic oligonucleotide
aacagacaccauuggaaau

SEQ ID NO: 49287 - RNA, 19 nt, Artificial Sequence
  Description of Artificial Sequence: Synthetic oligonucleotide
cauccgaaguuccagcuac

SEQ ID NO: 49288 - RNA, 19 nt, Artificial Sequence
  Description of Artificial Sequence: Synthetic oligonucleotide
uguaagucaguagucuaac

SEQ ID NO: 49289 - RNA, 19 nt, Artificial Sequence
  Description of Artificial Sequence: Synthetic oligonucleotide
gucuaacaagguuagaaaa

SEQ ID NO: 49290 - RNA, 19 nt, Artificial Sequence
  Description of Artificial Sequence: Synthetic oligonucleotide
agaguaugagucaucaagu

SEQ ID NO: 49291 - RNA, 19 nt, Artificial Sequence
  Description of Artificial Sequence: Synthetic oligonucleotide
aaacuaaacucuggaggug

SEQ ID NO: 49292 - RNA, 19 nt, Artificial Sequence
  Description of Artificial Sequence: Synthetic oligonucleotide
ucucucuuauccaccacaa

SEQ ID NO: 49293 - RNA, 19 nt, Artificial Sequence
  Description of Artificial Sequence: Synthetic oligonucleotide
uaaugaaucuucggucugc

SEQ ID NO: 49294 - RNA, 19 nt, Artificial Sequence
  Description of Artificial Sequence: Synthetic oligonucleotide
uacuaugcagacucuugga

SEQ ID NO: 49295 - RNA, 19 nt, Artificial Sequence
  Description of Artificial Sequence: Synthetic oligonucleotide
ucucguucucuucucagau

SEQ ID NO: 49296 - RNA, 19 nt, Artificial Sequence
  Description of Artificial Sequence: Synthetic oligonucleotide
agcaguguacaacaucagu

SEQ ID NO: 49297 - RNA, 19 nt, Artificial Sequence
  Description of Artificial Sequence: Synthetic oligonucleotide
uggcgaagcuuauuuagcu

SEQ ID NO: 49298 - RNA, 19 nt, Artificial Sequence
  Description of Artificial Sequence: Synthetic oligonucleotide
auaacagcauugucuccag

SEQ ID NO: 49299 - RNA, 19 nt, Artificial Sequence
  Description of Artificial Sequence: Synthetic oligonucleotide
ucgcucagaaucuuaaauu

SEQ ID NO: 49300 - RNA, 19 nt, Artificial Sequence
  Description of Artificial Sequence: Synthetic oligonucleotide
uucaacaaguuaagcuccu

SEQ ID NO: 49301 - RNA, 19 nt, Artificial Sequence
  Description of Artificial Sequence: Synthetic oligonucleotide
ugcaaggacggauuuguau

SEQ ID NO: 49302 - RNA, 19 nt, Artificial Sequence
  Description of Artificial Sequence: Synthetic oligonucleotide
aagauuugaguuagcauua

SEQ ID NO: 49303 - RNA, 19 nt, Artificial Sequence
  Description of Artificial Sequence: Synthetic oligonucleotide
uggaagagcgguaugucuu

SEQ ID NO: 49304 - RNA, 19 nt, Artificial Sequence
  Description of Artificial Sequence: Synthetic oligonucleotide
uaaggucuauuaauucaaa

SEQ ID NO: 49305 - RNA, 19 nt, Artificial Sequence
  Description of Artificial Sequence: Synthetic oligonucleotide
ugaacaauuugagcaaaau

SEQ ID NO: 49306 - RNA, 19 nt, Artificial Sequence
  Description of Artificial Sequence: Synthetic oligonucleotide
aacuggugagccuuuucaa

SEQ ID NO: 49307 - RNA, 19 nt, Artificial Sequence
  Description of Artificial Sequence: Synthetic oligonucleotide
aucuaacucacugcgaaga

SEQ ID NO: 49308 - RNA, 19 nt, Artificial Sequence
  Description of Artificial Sequence: Synthetic oligonucleotide
uugcucggaagauguaaag

SEQ ID NO: 49309 - RNA, 19 nt, Artificial Sequence
  Description of Artificial Sequence: Synthetic oligonucleotide
uaugucucgguuuucucuu

SEQ ID NO: 49310 - RNA, 19 nt, Artificial Sequence
  Description of Artificial Sequence: Synthetic oligonucleotide
ugcgaagaucaguuaauuc

SEQ ID NO: 49311 - RNA, 19 nt, Artificial Sequence
  Description of Artificial Sequence: Synthetic oligonucleotide
gagaaacaacgaucuguag

SEQ ID NO: 49312 - RNA, 19 nt, Artificial Sequence
  Description of Artificial Sequence: Synthetic oligonucleotide
aaacacuacuauucccaau

SEQ ID NO: 49313 - RNA, 19 nt, Artificial Sequence
  Description of Artificial Sequence: Synthetic oligonucleotide
uauuagcaacuuugagaag

SEQ ID NO: 49314 - RNA, 19 nt, Artificial Sequence
  Description of Artificial Sequence: Synthetic oligonucleotide
aggaacagacaccauugga

SEQ ID NO: 49315 - RNA, 19 nt, Artificial Sequence
  Description of Artificial Sequence: Synthetic oligonucleotide
cauuggcuaaugaaucuuc

SEQ ID NO: 49316 - RNA, 19 nt, Artificial Sequence
  Description of Artificial Sequence: Synthetic oligonucleotide
uggaucacucuccuaaguu

SEQ ID NO: 49317 - RNA, 19 nt, Artificial Sequence
  Description of Artificial Sequence: Synthetic oligonucleotide
cuuuauuaggcuguugaga

SEQ ID NO: 49318 - RNA, 19 nt, Artificial Sequence
  Description of Artificial Sequence: Synthetic oligonucleotide
ucccuugaguugaugucag

SEQ ID NO: 49319 - RNA, 19 nt, Artificial Sequence
  Description of Artificial Sequence: Synthetic oligonucleotide
uguucacuuuguccugaag

SEQ ID NO: 49320 - RNA, 19 nt, Artificial Sequence
  Description of Artificial Sequence: Synthetic oligonucleotide
uauagcuucuauucuccua

SEQ ID NO: 49321 - RNA, 19 nt, Artificial Sequence
  Description of Artificial Sequence: Synthetic oligonucleotide
aacugcuguuuugauacca

SEQ ID NO: 49322 - RNA, 19 nt, Artificial Sequence
  Description of Artificial Sequence: Synthetic oligonucleotide
agcuuuaaucuuccauuug

SEQ ID NO: 49323 - RNA, 19 nt, Artificial Sequence
  Description of Artificial Sequence: Synthetic oligonucleotide
gaagcggaggucugagcag

SEQ ID NO: 49324 - RNA, 19 nt, Artificial Sequence
  Description of Artificial Sequence: Synthetic oligonucleotide
uggccucuagcucaacagc

SEQ ID NO: 49325 - RNA, 19 nt, Artificial Sequence
  Description of Artificial Sequence: Synthetic oligonucleotide
uuacauggauacucuucug

SEQ ID NO: 49326 - RNA, 19 nt, Artificial Sequence
  Description of Artificial Sequence: Synthetic oligonucleotide
ucacauaaguugaccguuc

SEQ ID NO: 49327 - RNA, 19 nt, Artificial Sequence
  Description of Artificial Sequence: Synthetic oligonucleotide
gauugacuuccugaagcag

SEQ ID NO: 49328 - RNA, 19 nt, Artificial Sequence
  Description of Artificial Sequence: Synthetic oligonucleotide
uugagaagugacagauaac

SEQ ID NO: 49329 - RNA, 19 nt, Artificial Sequence
  Description of Artificial Sequence: Synthetic oligonucleotide
cuaaugaaucuucggucug

SEQ ID NO: 49330 - RNA, 19 nt, Artificial Sequence
  Description of Artificial Sequence: Synthetic oligonucleotide
uuguucgcguuucauuuaa

SEQ ID NO: 49331 - RNA, 19 nt, Artificial Sequence
  Description of Artificial Sequence: Synthetic oligonucleotide
gaaguuuuguucgcguuuc

SEQ ID NO: 49332 - RNA, 19 nt, Artificial Sequence
  Description of Artificial Sequence: Synthetic oligonucleotide
accugaauaaguccaguuu

SEQ ID NO: 49333 - RNA, 19 nt, Artificial Sequence
  Description of Artificial Sequence: Synthetic oligonucleotide
ucuaacucacugcgaagau

SEQ ID NO: 49334 - RNA, 19 nt, Artificial Sequence
  Description of Artificial Sequence: Synthetic oligonucleotide
acgccuucaggucuuuguc

SEQ ID NO: 49335 - RNA, 19 nt, Artificial Sequence
  Description of Artificial Sequence: Synthetic oligonucleotide
auaagggguucaucuacca

SEQ ID NO: 49336 - RNA, 19 nt, Artificial Sequence
  Description of Artificial Sequence: Synthetic oligonucleotide
ucgucuacaccacuuugau

SEQ ID NO: 49337 - RNA, 19 nt, Artificial Sequence
  Description of Artificial Sequence: Synthetic oligonucleotide
guuagguaaagcaguguac

SEQ ID NO: 49338 - RNA, 19 nt, Artificial Sequence
  Description of Artificial Sequence: Synthetic oligonucleotide
ggaauggaauuguugaauc

SEQ ID NO: 49339 - RNA, 19 nt, Artificial Sequence
  Description of Artificial Sequence: Synthetic oligonucleotide
uucucguucucuucucaga

SEQ ID NO: 49340 - RNA, 19 nt, Artificial Sequence
  Description of Artificial Sequence: Synthetic oligonucleotide
aaaauauccugaacuugaa

SEQ ID NO: 49341 - RNA, 19 nt, Artificial Sequence
  Description of Artificial Sequence: Synthetic oligonucleotide
acagauaacuggugagccu

SEQ ID NO: 49342 - RNA, 19 nt, Artificial Sequence
  Description of Artificial Sequence: Synthetic oligonucleotide
aacuuccaacuguaaugcu

SEQ ID NO: 49343 - RNA, 19 nt, Artificial Sequence
  Description of Artificial Sequence: Synthetic oligonucleotide
cugaauaaguccaguuuca

SEQ ID NO: 49344 - RNA, 19 nt, Artificial Sequence
  Description of Artificial Sequence: Synthetic oligonucleotide
uugauggaagagcgguaug

SEQ ID NO: 49345 - RNA, 19 nt, Artificial Sequence
  Description of Artificial Sequence: Synthetic oligonucleotide
guaagucaaauuaguagga

SEQ ID NO: 49346 - RNA, 19 nt, Artificial Sequence
  Description of Artificial Sequence: Synthetic oligonucleotide
caguagucuaacaagguua

SEQ ID NO: 49347 - RNA, 19 nt, Artificial Sequence
  Description of Artificial Sequence: Synthetic oligonucleotide
ucuugcucggaagauguaa

SEQ ID NO: 49348 - RNA, 19 nt, Artificial Sequence
  Description of Artificial Sequence: Synthetic oligonucleotide
cauggaucacucuccuaag

SEQ ID NO: 49349 - RNA, 19 nt, Artificial Sequence
  Description of Artificial Sequence: Synthetic oligonucleotide
aguugaugccaaagcuucc

SEQ ID NO: 49350 - RNA, 19 nt, Artificial Sequence
  Description of Artificial Sequence: Synthetic oligonucleotide
agggugaaacauaaauaag

SEQ ID NO: 49351 - RNA, 19 nt, Artificial Sequence
  Description of Artificial Sequence: Synthetic oligonucleotide
ugaauaaguccaguuucaa

SEQ ID NO: 49352 - RNA, 19 nt, Artificial Sequence
  Description of Artificial Sequence: Synthetic oligonucleotide
uucuggggaaacacuacua

SEQ ID NO: 49353 - RNA, 19 nt, Artificial Sequence
  Description of Artificial Sequence: Synthetic oligonucleotide
guguugaacacgccuucag

SEQ ID NO: 49354 - RNA, 19 nt, Artificial Sequence
  Description of Artificial Sequence: Synthetic oligonucleotide
uuccgcuuuuaauaagaaa

SEQ ID NO: 49355 - RNA, 19 nt, Artificial Sequence
  Description of Artificial Sequence: Synthetic oligonucleotide
uaagggguucaucuaccaa

SEQ ID NO: 49356 - RNA, 19 nt, Artificial Sequence
  Description of Artificial Sequence: Synthetic oligonucleotide
ucuuucccggcacaccuuc

SEQ ID NO: 49357 - RNA, 19 nt, Artificial Sequence
  Description of Artificial Sequence: Synthetic oligonucleotide
acaacgaucuguagguucu

SEQ ID NO: 49358 - RNA, 19 nt, Artificial Sequence
  Description of Artificial Sequence: Synthetic oligonucleotide
uccauuuugcuugcaauuu

SEQ ID NO: 49359 - RNA, 19 nt, Artificial Sequence
  Description of Artificial Sequence: Synthetic oligonucleotide
uucugucacauaaguugac

SEQ ID NO: 49360 - RNA, 19 nt, Artificial Sequence
  Description of Artificial Sequence: Synthetic oligonucleotide
guuauauuucacaucgucu

SEQ ID NO: 49361 - RNA, 19 nt, Artificial Sequence
  Description of Artificial Sequence: Synthetic oligonucleotide
aucuucggucugcuuuagc

SEQ ID NO: 49362 - RNA, 19 nt, Artificial Sequence
  Description of Artificial Sequence: Synthetic oligonucleotide
acuuccgcuuuuaauaaga

SEQ ID NO: 49363 - RNA, 19 nt, Artificial Sequence
  Description of Artificial Sequence: Synthetic oligonucleotide
cuugcaauuucaugcugca

SEQ ID NO: 49364 - RNA, 19 nt, Artificial Sequence
  Description of Artificial Sequence: Synthetic oligonucleotide
ucuuacugcuucagaguau

SEQ ID NO: 49365 - RNA, 19 nt, Artificial Sequence
  Description of Artificial Sequence: Synthetic oligonucleotide
uggucgcucagaaucuuaa

SEQ ID NO: 49366 - RNA, 19 nt, Artificial Sequence
  Description of Artificial Sequence: Synthetic oligonucleotide
accauuggaaauaaucuuu

SEQ ID NO: 49367 - RNA, 19 nt, Artificial Sequence
  Description of Artificial Sequence: Synthetic oligonucleotide
uugaaguuuuguucgcguu

SEQ ID NO: 49368 - RNA, 19 nt, Artificial Sequence
  Description of Artificial Sequence: Synthetic oligonucleotide
ucccaguuuucucccgaag

SEQ ID NO: 49369 - RNA, 19 nt, Artificial Sequence
  Description of Artificial Sequence: Synthetic oligonucleotide
aaguuuuguucgcguuuca

SEQ ID NO: 49370 - RNA, 19 nt, Artificial Sequence
  Description of Artificial Sequence: Synthetic oligonucleotide
gcgaagaucaguuaauucu

SEQ ID NO: 49371 - RNA, 19 nt, Artificial Sequence
  Description of Artificial Sequence: Synthetic oligonucleotide
aggaauguaagaagaugca

SEQ ID NO: 49372 - RNA, 19 nt, Artificial Sequence
  Description of Artificial Sequence: Synthetic oligonucleotide
ugcuucaaaugagcuaucu

SEQ ID NO: 49373 - RNA, 19 nt, Artificial Sequence
  Description of Artificial Sequence: Synthetic oligonucleotide
cagugcgugcauuucauca

SEQ ID NO: 49374 - RNA, 19 nt, Artificial Sequence
  Description of Artificial Sequence: Synthetic oligonucleotide
cuugcaucugcuuaauagu

SEQ ID NO: 49375 - RNA, 19 nt, Artificial Sequence
  Description of Artificial Sequence: Synthetic oligonucleotide
uuuguucgcguuucauuua

SEQ ID NO: 49376 - RNA, 19 nt, Artificial Sequence
  Description of Artificial Sequence: Synthetic oligonucleotide
cucaguauaccauuuuccu

SEQ ID NO: 49377 - RNA, 19 nt, Artificial Sequence
  Description of Artificial Sequence: Synthetic oligonucleotide
ucuugauggaagagcggua

SEQ ID NO: 49378 - RNA, 19 nt, Artificial Sequence
  Description of Artificial Sequence: Synthetic oligonucleotide
caacagaucuuucagcucu

SEQ ID NO: 49379 - RNA, 19 nt, Artificial Sequence
  Description of Artificial Sequence: Synthetic oligonucleotide
ugcgugcauuucaucagcu

SEQ ID NO: 49380 - RNA, 19 nt, Artificial Sequence
  Description of Artificial Sequence: Synthetic oligonucleotide
uucagucaacagaucuuuc

SEQ ID NO: 49381 - RNA, 19 nt, Artificial Sequence
  Description of Artificial Sequence: Synthetic oligonucleotide
guaugagucaucaaguuuu

SEQ ID NO: 49382 - RNA, 19 nt, Artificial Sequence
  Description of Artificial Sequence: Synthetic oligonucleotide
ggucuuuaacuuuucaucu

SEQ ID NO: 49383 - RNA, 19 nt, Artificial Sequence
  Description of Artificial Sequence: Synthetic oligonucleotide
uuaggcuguugagaaacaa

SEQ ID NO: 49384 - RNA, 19 nt, Artificial Sequence
  Description of Artificial Sequence: Synthetic oligonucleotide
caucgucuacaccacuuug

SEQ ID NO: 49385 - RNA, 19 nt, Artificial Sequence
  Description of Artificial Sequence: Synthetic oligonucleotide
gucuuacugcuucagagua

SEQ ID NO: 49386 - RNA, 19 nt, Artificial Sequence
  Description of Artificial Sequence: Synthetic oligonucleotide
aagugacagauaacuggug

SEQ ID NO: 49387 - RNA, 19 nt, Artificial Sequence
  Description of Artificial Sequence: Synthetic oligonucleotide
ugauuacauuagcaacaaa

SEQ ID NO: 49388 - RNA, 19 nt, Artificial Sequence
  Description of Artificial Sequence: Synthetic oligonucleotide
uacaacgccuucgaguaau

SEQ ID NO: 49389 - RNA, 19 nt, Artificial Sequence
  Description of Artificial Sequence: Synthetic oligonucleotide
cuucacucccacagccagg

SEQ ID NO: 49390 - RNA, 19 nt, Artificial Sequence
  Description of Artificial Sequence: Synthetic oligonucleotide
guaagucaguagucuaaca

SEQ ID NO: 49391 - RNA, 19 nt, Artificial Sequence
  Description of Artificial Sequence: Synthetic oligonucleotide
ucauuggcuaaugaaucuu

SEQ ID NO: 49392 - RNA, 19 nt, Artificial Sequence
  Description of Artificial Sequence: Synthetic oligonucleotide
ggcaguuacuucccaaaug

SEQ ID NO: 49393 - RNA, 19 nt, Artificial Sequence
  Description of Artificial Sequence: Synthetic oligonucleotide
acugaagcggaggucugag

SEQ ID NO: 49394 - RNA, 19 nt, Artificial Sequence
  Description of Artificial Sequence: Synthetic oligonucleotide
uucaaaucgugguguugaa

SEQ ID NO: 49395 - RNA, 19 nt, Artificial Sequence
  Description of Artificial Sequence: Synthetic oligonucleotide
uucuacggucuuuaacuuu

SEQ ID NO: 49396 - RNA, 19 nt, Artificial Sequence
  Description of Artificial Sequence: Synthetic oligonucleotide
gugcgugcauuucaucagc

SEQ ID NO: 49397 - RNA, 19 nt, Artificial Sequence
  Description of Artificial Sequence: Synthetic oligonucleotide
cacuuccgcuuuuaauaag

SEQ ID NO: 49398 - RNA, 19 nt, Artificial Sequence
  Description of Artificial Sequence: Synthetic oligonucleotide
aucgucuacaccacuuuga

SEQ ID NO: 49399 - RNA, 19 nt, Artificial Sequence
  Description of Artificial Sequence: Synthetic oligonucleotide
agagcgguaugucuugcuu

SEQ ID NO: 49400 - RNA, 19 nt, Artificial Sequence
  Description of Artificial Sequence: Synthetic oligonucleotide
ggguucaucuaccaagaca

SEQ ID NO: 49401 - RNA, 19 nt, Artificial Sequence
  Description of Artificial Sequence: Synthetic oligonucleotide
uucucaggagcucccguuu

SEQ ID NO: 49402 - RNA, 19 nt, Artificial Sequence
  Description of Artificial Sequence: Synthetic oligonucleotide
gccacguagccauucacug

SEQ ID NO: 49403 - RNA, 19 nt, Artificial Sequence
  Description of Artificial Sequence: Synthetic oligonucleotide
cucucuuauccaccacaag

SEQ ID NO: 49404 - RNA, 19 nt, Artificial Sequence
  Description of Artificial Sequence: Synthetic oligonucleotide
acuuccaacuguaaugcuu

SEQ ID NO: 49405 - RNA, 19 nt, Artificial Sequence
  Description of Artificial Sequence: Synthetic oligonucleotide
acaucaguauuaaaauguu

SEQ ID NO: 49406 - RNA, 19 nt, Artificial Sequence
  Description of Artificial Sequence: Synthetic oligonucleotide
cuugcucggaagauguaaa

SEQ ID NO: 49407 - RNA, 19 nt, Artificial Sequence
  Description of Artificial Sequence: Synthetic oligonucleotide
acgaucuguagguucugaa

SEQ ID NO: 49408 - RNA, 19 nt, Artificial Sequence
  Description of Artificial Sequence: Synthetic oligonucleotide
cuaugcagacucuuggacu

SEQ ID NO: 49409 - RNA, 19 nt, Artificial Sequence
  Description of Artificial Sequence: Synthetic oligonucleotide
accuucaacuggguggcag

SEQ ID NO: 49410 - RNA, 19 nt, Artificial Sequence
  Description of Artificial Sequence: Synthetic oligonucleotide
ccuugaguugaugucagag

SEQ ID NO: 49411 - RNA, 19 nt, Artificial Sequence
  Description of Artificial Sequence: Synthetic oligonucleotide
guuucuggggaaacacuac

SEQ ID NO: 49412 - RNA, 19 nt, Artificial Sequence
  Description of Artificial Sequence: Synthetic oligonucleotide
ggaagagcgguaugucuug

SEQ ID NO: 49413 - RNA, 19 nt, Artificial Sequence
  Description of Artificial Sequence: Synthetic oligonucleotide
agaaucuaacucacugcga

SEQ ID NO: 49414 - RNA, 19 nt, Artificial Sequence
  Description of Artificial Sequence: Synthetic oligonucleotide
uauccaucggaggaaugua

SEQ ID NO: 49415 - RNA, 19 nt, Artificial Sequence
  Description of Artificial Sequence: Synthetic oligonucleotide
caaguaauucuucuacggu

SEQ ID NO: 49416 - RNA, 19 nt, Artificial Sequence
  Description of Artificial Sequence: Synthetic oligonucleotide
uucuucuuucccggcacac

SEQ ID NO: 49417 - RNA, 19 nt, Artificial Sequence
  Description of Artificial Sequence: Synthetic oligonucleotide
ucguguucauuggcuaaug

SEQ ID NO: 49418 - RNA, 19 nt, Artificial Sequence
  Description of Artificial Sequence: Synthetic oligonucleotide
cuaugucucgguuuucucu

SEQ ID NO: 49419 - RNA, 19 nt, Artificial Sequence
  Description of Artificial Sequence: Synthetic oligonucleotide
aggcaguuacuucccaaau

SEQ ID NO: 49420 - RNA, 19 nt, Artificial Sequence
  Description of Artificial Sequence: Synthetic oligonucleotide
cacauaaguugaccguuca

SEQ ID NO: 49421 - RNA, 19 nt, Artificial Sequence
  Description of Artificial Sequence: Synthetic oligonucleotide
cugauuaagcuguucaauu

SEQ ID NO: 49422 - RNA, 19 nt, Artificial Sequence
  Description of Artificial Sequence: Synthetic oligonucleotide
cugaagcggaggucugagc

SEQ ID NO: 49423 - RNA, 19 nt, Artificial Sequence
  Description of Artificial Sequence: Synthetic oligonucleotide
ucaacaaguuaagcuccuc

SEQ ID NO: 49424 - RNA, 19 nt, Artificial Sequence
  Description of Artificial Sequence: Synthetic oligonucleotide
cacguagccauucacugua

SEQ ID NO: 49425 - RNA, 19 nt, Artificial Sequence
  Description of Artificial Sequence: Synthetic oligonucleotide
agcagcuaucugggaaugg

SEQ ID NO: 49426 - RNA, 19 nt, Artificial Sequence
  Description of Artificial Sequence: Synthetic oligonucleotide
gucgcucagaaucuuaaau

SEQ ID NO: 49427 - RNA, 19 nt, Artificial Sequence
  Description of Artificial Sequence: Synthetic oligonucleotide
acugcgaagaucaguuaau

SEQ ID NO: 49428 - RNA, 19 nt, Artificial Sequence
  Description of Artificial Sequence: Synthetic oligonucleotide
auguuagguaaagcagugu

SEQ ID NO: 49429 - RNA, 19 nt, Artificial Sequence
  Description of Artificial Sequence: Synthetic oligonucleotide
gaguaugagucaucaaguu

SEQ ID NO: 49430 - RNA, 19 nt, Artificial Sequence
  Description of Artificial Sequence: Synthetic oligonucleotide
guugguaguguugcugaca

SEQ ID NO: 49431 - RNA, 19 nt, Artificial Sequence
  Description of Artificial Sequence: Synthetic oligonucleotide
aguugaccguucaaccucu

SEQ ID NO: 49432 - RNA, 19 nt, Artificial Sequence
  Description of Artificial Sequence: Synthetic oligonucleotide
caugaguugcugauugacu

SEQ ID NO: 49433 - RNA, 19 nt, Artificial Sequence
  Description of Artificial Sequence: Synthetic oligonucleotide
cugaacaauuugagcaaaa

SEQ ID NO: 49434 - RNA, 19 nt, Artificial Sequence
  Description of Artificial Sequence: Synthetic oligonucleotide
uggucaucgcuuccauuuu

SEQ ID NO: 49435 - RNA, 19 nt, Artificial Sequence
  Description of Artificial Sequence: Synthetic oligonucleotide
aaggacggauuuguauuuu

SEQ ID NO: 49436 - RNA, 19 nt, Artificial Sequence
  Description of Artificial Sequence: Synthetic oligonucleotide
uguucgcguuucauuuaau

SEQ ID NO: 49437 - RNA, 19 nt, Artificial Sequence
  Description of Artificial Sequence: Synthetic oligonucleotide
gugucuacagaguuggcuu

SEQ ID NO: 49438 - RNA, 19 nt, Artificial Sequence
  Description of Artificial Sequence: Synthetic oligonucleotide
caccacaagauuugaguua

SEQ ID NO: 49439 - RNA, 19 nt, Artificial Sequence
  Description of Artificial Sequence: Synthetic oligonucleotide
gcaguguacaacaucagua

SEQ ID NO: 49440 - RNA, 19 nt, Artificial Sequence
  Description of Artificial Sequence: Synthetic oligonucleotide
cuuccgcuuuuaauaagaa

SEQ ID NO: 49441 - RNA, 19 nt, Artificial Sequence
  Description of Artificial Sequence: Synthetic oligonucleotide
cagucugauucagacucac

SEQ ID NO: 49442 - RNA, 19 nt, Artificial Sequence
  Description of Artificial Sequence: Synthetic oligonucleotide
uucccaguuuucucccgaa

SEQ ID NO: 49443 - RNA, 19 nt, Artificial Sequence
  Description of Artificial Sequence: Synthetic oligonucleotide
gaacugaagcggaggucug

SEQ ID NO: 49444 - RNA, 19 nt, Artificial Sequence
  Description of Artificial Sequence: Synthetic oligonucleotide
gagcagcuaucugggaaug

SEQ ID NO: 49445 - RNA, 19 nt, Artificial Sequence
  Description of Artificial Sequence: Synthetic oligonucleotide
gcuguuuugauaccagggu

SEQ ID NO: 49446 - RNA, 19 nt, Artificial Sequence
  Description of Artificial Sequence: Synthetic oligonucleotide
ucgugguguugaacacgcc

SEQ ID NO: 49447 - RNA, 19 nt, Artificial Sequence
  Description of Artificial Sequence: Synthetic oligonucleotide
cucuugauggaagagcggu

SEQ ID NO: 49448 - RNA, 19 nt, Artificial Sequence
  Description of Artificial Sequence: Synthetic oligonucleotide
uggaucccuucuacauggu

SEQ ID NO: 49449 - RNA, 19 nt, Artificial Sequence
  Description of Artificial Sequence: Synthetic oligonucleotide
caaaaguguucccuugagu

SEQ ID NO: 49450 - RNA, 19 nt, Artificial Sequence
  Description of Artificial Sequence: Synthetic oligonucleotide
cugaacuuccaacuguaau

SEQ ID NO: 49451 - RNA, 19 nt, Artificial Sequence
  Description of Artificial Sequence: Synthetic oligonucleotide
cgaucuguagguucugaac

SEQ ID NO: 49452 - RNA, 19 nt, Artificial Sequence
  Description of Artificial Sequence: Synthetic oligonucleotide
ccauuuugcuugcaauuuc

SEQ ID NO: 49453 - RNA, 19 nt, Artificial Sequence
  Description of Artificial Sequence: Synthetic oligonucleotide
ucccguuucuggggaaaca

SEQ ID NO: 49454 - RNA, 19 nt, Artificial Sequence
  Description of Artificial Sequence: Synthetic oligonucleotide
cgcguuucauuuaauugug

SEQ ID NO: 49455 - RNA, 19 nt, Artificial Sequence
  Description of Artificial Sequence: Synthetic oligonucleotide
cuacaccacuuugaucuuc

SEQ ID NO: 49456 - RNA, 19 nt, Artificial Sequence
  Description of Artificial Sequence: Synthetic oligonucleotide
ggugucagugagcuuacua

SEQ ID NO: 49457 - RNA, 19 nt, Artificial Sequence
  Description of Artificial Sequence: Synthetic oligonucleotide
ccucuuaauaaguucugaa

SEQ ID NO: 49458 - RNA, 19 nt, Artificial Sequence
  Description of Artificial Sequence: Synthetic oligonucleotide
guucgcguuucauuuaauu

SEQ ID NO: 49459 - RNA, 19 nt, Artificial Sequence
  Description of Artificial Sequence: Synthetic oligonucleotide
caccauuggaaauaaucuu

SEQ ID NO: 49460 - RNA, 19 nt, Artificial Sequence
  Description of Artificial Sequence: Synthetic oligonucleotide
ggaaaagaugcuuguuggu

SEQ ID NO: 49461 - RNA, 19 nt, Artificial Sequence
  Description of Artificial Sequence: Synthetic oligonucleotide
aggugucuacagaguuggc

SEQ ID NO: 49462 - RNA, 19 nt, Artificial Sequence
  Description of Artificial Sequence: Synthetic oligonucleotide
auacaacgccuucgaguaa

SEQ ID NO: 49463 - RNA, 19 nt, Artificial Sequence
  Description of Artificial Sequence: Synthetic oligonucleotide
cccaaauguuagguaaagc

SEQ ID NO: 49464 - RNA, 19 nt, Artificial Sequence
  Description of Artificial Sequence: Synthetic oligonucleotide
acagucugauucagacuca

SEQ ID NO: 49465 - RNA, 19 nt, Artificial Sequence
  Description of Artificial Sequence: Synthetic oligonucleotide
cuugauggaagagcgguau

SEQ ID NO: 49466 - RNA, 19 nt, Artificial Sequence
  Description of Artificial Sequence: Synthetic oligonucleotide
aucucucaguauaccauuu

SEQ ID NO: 49467 - RNA, 19 nt, Artificial Sequence
  Description of Artificial Sequence: Synthetic oligonucleotide
gcaaggacggauuuguauu

SEQ ID NO: 49468 - RNA, 19 nt, Artificial Sequence
  Description of Artificial Sequence: Synthetic oligonucleotide
gcagcuaucugggaaugga

SEQ ID NO: 49469 - RNA, 19 nt, Artificial Sequence
  Description of Artificial Sequence: Synthetic oligonucleotide
ugaccgccucugcauccga

SEQ ID NO: 49470 - RNA, 19 nt, Artificial Sequence
  Description of Artificial Sequence: Synthetic oligonucleotide
cagcggccugcucauuagc

SEQ ID NO: 49471 - RNA, 19 nt, Artificial Sequence
  Description of Artificial Sequence: Synthetic oligonucleotide
gucacauaaguugaccguu

SEQ ID NO: 49472 - RNA, 19 nt, Artificial Sequence
  Description of Artificial Sequence: Synthetic oligonucleotide
caucucucaguauaccauu

SEQ ID NO: 49473 - RNA, 19 nt, Artificial Sequence
  Description of Artificial Sequence: Synthetic oligonucleotide
ggugucuacagaguuggcu

SEQ ID NO: 49474 - RNA, 19 nt, Artificial Sequence
  Description of Artificial Sequence: Synthetic oligonucleotide
ggcuguugagaaacaacga

SEQ ID NO: 49475 - RNA, 19 nt, Artificial Sequence
  Description of Artificial Sequence: Synthetic oligonucleotide
cuuucucauggaucacucu

SEQ ID NO: 49476 - RNA, 19 nt, Artificial Sequence
  Description of Artificial Sequence: Synthetic oligonucleotide
ucggucugcuuuagcuguu

SEQ ID NO: 49477 - RNA, 19 nt, Artificial Sequence
  Description of Artificial Sequence: Synthetic oligonucleotide
guagucuaacaagguuaga

SEQ ID NO: 49478 - RNA, 19 nt, Artificial Sequence
  Description of Artificial Sequence: Synthetic oligonucleotide
caaggacggauuuguauuu

SEQ ID NO: 49479 - RNA, 19 nt, Artificial Sequence
  Description of Artificial Sequence: Synthetic oligonucleotide
caacgaucuguagguucug

SEQ ID NO: 49480 - RNA, 19 nt, Artificial Sequence
  Description of Artificial Sequence: Synthetic oligonucleotide
guccuggcgaagcuuauuu

SEQ ID NO: 49481 - RNA, 19 nt, Artificial Sequence
  Description of Artificial Sequence: Synthetic oligonucleotide
cuucuacggucuuuaacuu

SEQ ID NO: 49482 - RNA, 19 nt, Artificial Sequence
  Description of Artificial Sequence: Synthetic oligonucleotide
cccguuucuggggaaacac

SEQ ID NO: 49483 - RNA, 19 nt, Artificial Sequence
  Description of Artificial Sequence: Synthetic oligonucleotide
agcuuacuaugcagacucu

SEQ ID NO: 49484 - RNA, 19 nt, Artificial Sequence
  Description of Artificial Sequence: Synthetic oligonucleotide
cucccgaaggucauuguuu

SEQ ID NO: 49485 - RNA, 19 nt, Artificial Sequence
  Description of Artificial Sequence: Synthetic oligonucleotide
guggucguguucauuggcu

SEQ ID NO: 49486 - RNA, 19 nt, Artificial Sequence
  Description of Artificial Sequence: Synthetic oligonucleotide
gggguucaucuaccaagac

SEQ ID NO: 49487 - RNA, 19 nt, Artificial Sequence
  Description of Artificial Sequence: Synthetic oligonucleotide
cuuaguugcuccagcucuu

SEQ ID NO: 49488 - RNA, 19 nt, Artificial Sequence
  Description of Artificial Sequence: Synthetic oligonucleotide
guugaccguucaaccucug

SEQ ID NO: 49489 - RNA, 19 nt, Artificial Sequence
  Description of Artificial Sequence: Synthetic oligonucleotide
cuguaagaucccuucuguu

SEQ ID NO: 49490 - RNA, 19 nt, Artificial Sequence
  Description of Artificial Sequence: Synthetic oligonucleotide
cuggucgcucagaaucuua

SEQ ID NO: 49491 - RNA, 19 nt, Artificial Sequence
  Description of Artificial Sequence: Synthetic oligonucleotide
ggucgcucagaaucuuaaa

SEQ ID NO: 49492 - RNA, 19 nt, Artificial Sequence
  Description of Artificial Sequence: Synthetic oligonucleotide
agauuacauuuaaggucua

SEQ ID NO: 49493 - RNA, 19 nt, Artificial Sequence
  Description of Artificial Sequence: Synthetic oligonucleotide
ccacaagauuugaguuagc

SEQ ID NO: 49494 - RNA, 19 nt, Artificial Sequence
  Description of Artificial Sequence: Synthetic oligonucleotide
aguccuggcgaagcuuauu

SEQ ID NO: 49495 - RNA, 19 nt, Artificial Sequence
  Description of Artificial Sequence: Synthetic oligonucleotide
cauccuuuacauggauacu

SEQ ID NO: 49496 - RNA, 19 nt, Artificial Sequence
  Description of Artificial Sequence: Synthetic oligonucleotide
gucguguucauuggcuaau

SEQ ID NO: 49497 - RNA, 19 nt, Artificial Sequence
  Description of Artificial Sequence: Synthetic oligonucleotide
acacgccuucaggucuuug

SEQ ID NO: 49498 - RNA, 19 nt, Artificial Sequence
  Description of Artificial Sequence: Synthetic oligonucleotide
caguuacuucccaaauguu

SEQ ID NO: 49499 - RNA, 19 nt, Artificial Sequence
  Description of Artificial Sequence: Synthetic oligonucleotide
aguguucccuugaguugau

SEQ ID NO: 49500 - RNA, 19 nt, Artificial Sequence
  Description of Artificial Sequence: Synthetic oligonucleotide
gcauccgaaguuccagcua

SEQ ID NO: 49501 - RNA, 19 nt, Artificial Sequence
  Description of Artificial Sequence: Synthetic oligonucleotide
cugcaaggacggauuugua

SEQ ID NO: 49502 - RNA, 19 nt, Artificial Sequence
  Description of Artificial Sequence: Synthetic oligonucleotide
ccggucuucucguucagcu

SEQ ID NO: 49503 - RNA, 19 nt, Artificial Sequence
  Description of Artificial Sequence: Synthetic oligonucleotide
ccucuuuaguggccaccug

SEQ ID NO: 49504 - RNA, 19 nt, Artificial Sequence
  Description of Artificial Sequence: Synthetic oligonucleotide
acguagccauucacuguaa

SEQ ID NO: 49505 - RNA, 19 nt, Artificial Sequence
  Description of Artificial Sequence: Synthetic oligonucleotide
cucguucucuucucagauu

SEQ ID NO: 49506 - RNA, 19 nt, Artificial Sequence
  Description of Artificial Sequence: Synthetic oligonucleotide
cugcgaagaucaguuaauu

SEQ ID NO: 49507 - RNA, 19 nt, Artificial Sequence
  Description of Artificial Sequence: Synthetic oligonucleotide
ccgcuuuuaauaagaaauu

SEQ ID NO: 49508 - RNA, 19 nt, Artificial Sequence
  Description of Artificial Sequence: Synthetic oligonucleotide
cucccacaguccuggcgaa

SEQ ID NO: 49509 - RNA, 19 nt, Artificial Sequence
  Description of Artificial Sequence: Synthetic oligonucleotide
cgugguguugaacacgccu

SEQ ID NO: 49510 - RNA, 19 nt, Artificial Sequence
  Description of Artificial Sequence: Synthetic oligonucleotide
gccucaugcucugcuguuc

SEQ ID NO: 49511 - RNA, 19 nt, Artificial Sequence
  Description of Artificial Sequence: Synthetic oligonucleotide
cuaaguggucguguucauu

SEQ ID NO: 49512 - RNA, 19 nt, Artificial Sequence
  Description of Artificial Sequence: Synthetic oligonucleotide
ccagauuuauggaucccuu

SEQ ID NO: 49513 - RNA, 19 nt, Artificial Sequence
  Description of Artificial Sequence: Synthetic oligonucleotide
cuucgggacucaucagcuu

SEQ ID NO: 49514 - RNA, 19 nt, Artificial Sequence
  Description of Artificial Sequence: Synthetic oligonucleotide
cccggucuucucguucagc

SEQ ID NO: 49515 - RNA, 19 nt, Artificial Sequence
  Description of Artificial Sequence: Synthetic oligonucleotide
guucaucuaccaagacauu

SEQ ID NO: 49516 - RNA, 19 nt, Artificial Sequence
  Description of Artificial Sequence: Synthetic oligonucleotide
ccucaugcucugcuguucu

SEQ ID NO: 49517 - RNA, 19 nt, Artificial Sequence
  Description of Artificial Sequence: Synthetic oligonucleotide
ccgaacuugcugaaacuuu

SEQ ID NO: 49518 - RNA, 19 nt, Artificial Sequence
  Description of Artificial Sequence: Synthetic oligonucleotide
ccacguagccauucacugu

SEQ ID NO: 49519 - RNA, 19 nt, Artificial Sequence
  Description of Artificial Sequence: Synthetic oligonucleotide
gcuaaguggucguguucau

SEQ ID NO: 49520 - RNA, 19 nt, Artificial Sequence
  Description of Artificial Sequence: Synthetic oligonucleotide
gcguuucauuuaauugugu

SEQ ID NO: 49521 - RNA, 19 nt, Artificial Sequence
  Description of Artificial Sequence: Synthetic oligonucleotide
ccuuuacauggauacucuu

SEQ ID NO: 49522 - RNA, 19 nt, Artificial Sequence
  Description of Artificial Sequence: Synthetic oligonucleotide
cccuugaguugaugucaga

SEQ ID NO: 49523 - RNA, 19 nt, Artificial Sequence
  Description of Artificial Sequence: Synthetic oligonucleotide
gcucccguuucuggggaaa

SEQ ID NO: 49524 - RNA, 19 nt, Artificial Sequence
  Description of Artificial Sequence: Synthetic oligonucleotide
caguccuggcgaagcuuau

SEQ ID NO: 49525 - RNA, 19 nt, Artificial Sequence
  Description of Artificial Sequence: Synthetic oligonucleotide
caacgccuucgaguaauuu

SEQ ID NO: 49526 - RNA, 19 nt, Artificial Sequence
  Description of Artificial Sequence: Synthetic oligonucleotide
gcggaggucugagcagcua

SEQ ID NO: 49527 - RNA, 19 nt, Artificial Sequence
  Description of Artificial Sequence: Synthetic oligonucleotide
ccacacuucgcugcagcuu

SEQ ID NO: 49528 - RNA, 19 nt, Artificial Sequence
  Description of Artificial Sequence: Synthetic oligonucleotide
gggugucagugagcuuacu

SEQ ID NO: 49529 - RNA, 19 nt, Artificial Sequence
  Description of Artificial Sequence: Synthetic oligonucleotide
uuuguuaauagauaacugg

SEQ ID NO: 49530 - RNA, 19 nt, Artificial Sequence
  Description of Artificial Sequence: Synthetic oligonucleotide
aaaacucugaaaauggugc

SEQ ID NO: 49531 - RNA, 19 nt, Artificial Sequence
  Description of Artificial Sequence: Synthetic oligonucleotide
ugaaauagguguuagacag

SEQ ID NO: 49532 - RNA, 19 nt, Artificial Sequence
  Description of Artificial Sequence: Synthetic oligonucleotide
ugaugauucgcccaaaccg

SEQ ID NO: 49533 - RNA, 19 nt, Artificial Sequence
  Description of Artificial Sequence: Synthetic oligonucleotide
aaaccuguaaaauuuuguc

SEQ ID NO: 49534 - RNA, 19 nt, Artificial Sequence
  Description of Artificial Sequence: Synthetic oligonucleotide
aaaccgagagaacaugucc

SEQ ID NO: 49535 - RNA, 19 nt, Artificial Sequence
  Description of Artificial Sequence: Synthetic oligonucleotide
ugaguguucauacaaaagc

SEQ ID NO: 49536 - RNA, 19 nt, Artificial Sequence
  Description of Artificial Sequence: Synthetic oligonucleotide
uuuaugaccauugaaacug

SEQ ID NO: 49537 - RNA, 19 nt, Artificial Sequence
  Description of Artificial Sequence: Synthetic oligonucleotide
aaaaucugaacacgggcgg

SEQ ID NO: 49538 - RNA, 19 nt, Artificial Sequence
  Description of Artificial Sequence: Synthetic oligonucleotide
cucuuaauuaucuauuccg

SEQ ID NO: 49539 - RNA, 19 nt, Artificial Sequence
  Description of Artificial Sequence: Synthetic oligonucleotide
ugaguauucggacaaacug

SEQ ID NO: 49540 - RNA, 19 nt, Artificial Sequence
  Description of Artificial Sequence: Synthetic oligonucleotide
ugacuuacaaguaauaaau

SEQ ID NO: 49541 - RNA, 19 nt, Artificial Sequence
  Description of Artificial Sequence: Synthetic oligonucleotide
gugaucuacacccauaggg

SEQ ID NO: 49542 - RNA, 19 nt, Artificial Sequence
  Description of Artificial Sequence: Synthetic oligonucleotide
ugaucuacacccauagggg

SEQ ID NO: 49543 - RNA, 19 nt, Artificial Sequence
  Description of Artificial Sequence: Synthetic oligonucleotide
ugucaaaccggauaaacgc

SEQ ID NO: 49544 - RNA, 19 nt, Artificial Sequence
  Description of Artificial Sequence: Synthetic oligonucleotide
gcauaugacaccuuaaugg

SEQ ID NO: 49545 - RNA, 19 nt, Artificial Sequence
  Description of Artificial Sequence: Synthetic oligonucleotide
aaaccggauaaacgcaacc

SEQ ID NO: 49546 - RNA, 19 nt, Artificial Sequence
  Description of Artificial Sequence: Synthetic oligonucleotide
ucauaguuugucaugguca

SEQ ID NO: 49547 - RNA, 19 nt, Artificial Sequence
  Description of Artificial Sequence: Synthetic oligonucleotide
uuaauagauaacuggcaag

SEQ ID NO: 49548 - RNA, 19 nt, Artificial Sequence
  Description of Artificial Sequence: Synthetic oligonucleotide
uauucggacaaacugacuc

SEQ ID NO: 49549 - RNA, 19 nt, Artificial Sequence
  Description of Artificial Sequence: Synthetic oligonucleotide
uuaucuauuccguacaaaa

SEQ ID NO: 49550 - RNA, 19 nt, Artificial Sequence
  Description of Artificial Sequence: Synthetic oligonucleotide
aacaguaagggaucuuguc

SEQ ID NO: 49551 - RNA, 19 nt, Artificial Sequence
  Description of Artificial Sequence: Synthetic oligonucleotide
uucgagagaaaacagcaug

SEQ ID NO: 49552 - RNA, 19 nt, Artificial Sequence
  Description of Artificial Sequence: Synthetic oligonucleotide
uuaugaagagaacuuugag

SEQ ID NO: 49553 - RNA, 19 nt, Artificial Sequence
  Description of Artificial Sequence: Synthetic oligonucleotide
ugacaauuaaauucguucu

SEQ ID NO: 49554 - RNA, 19 nt, Artificial Sequence
  Description of Artificial Sequence: Synthetic oligonucleotide
uguuaauagauaacuggca

SEQ ID NO: 49555 - RNA, 19 nt, Artificial Sequence
  Description of Artificial Sequence: Synthetic oligonucleotide
caucuaguguacaacacgg

SEQ ID NO: 49556 - RNA, 19 nt, Artificial Sequence
  Description of Artificial Sequence: Synthetic oligonucleotide
aaccggauaaacgcaaccc

SEQ ID NO: 49557 - RNA, 19 nt, Artificial Sequence
  Description of Artificial Sequence: Synthetic oligonucleotide
aaauuggucuaacauuugu

SEQ ID NO: 49558 - RNA, 19 nt, Artificial Sequence
  Description of Artificial Sequence: Synthetic oligonucleotide
ugugucaaaucaucaaugc

SEQ ID NO: 49559 - RNA, 19 nt, Artificial Sequence
  Description of Artificial Sequence: Synthetic oligonucleotide
uacaacacgggaaucagcu

SEQ ID NO: 49560 - RNA, 19 nt, Artificial Sequence
  Description of Artificial Sequence: Synthetic oligonucleotide
ucuuaauuaucuauuccgu

SEQ ID NO: 49561 - RNA, 19 nt, Artificial Sequence
  Description of Artificial Sequence: Synthetic oligonucleotide
uaauuaucuauuccguaca

SEQ ID NO: 49562 - RNA, 19 nt, Artificial Sequence
  Description of Artificial Sequence: Synthetic oligonucleotide
auaaacgcaaccccucugg

SEQ ID NO: 49563 - RNA, 19 nt, Artificial Sequence
  Description of Artificial Sequence: Synthetic oligonucleotide
ucuaguguacaacacggga

SEQ ID NO: 49564 - RNA, 19 nt, Artificial Sequence
  Description of Artificial Sequence: Synthetic oligonucleotide
gauucaaccucgccgaugc

SEQ ID NO: 49565 - RNA, 19 nt, Artificial Sequence
  Description of Artificial Sequence: Synthetic oligonucleotide
gaugcgagaaauacaaugc

SEQ ID NO: 49566 - RNA, 19 nt, Artificial Sequence
  Description of Artificial Sequence: Synthetic oligonucleotide
ugagcgaguuauuuguggg

SEQ ID NO: 49567 - RNA, 19 nt, Artificial Sequence
  Description of Artificial Sequence: Synthetic oligonucleotide
aacgcaaccccucuggaca

SEQ ID NO: 49568 - RNA, 19 nt, Artificial Sequence
  Description of Artificial Sequence: Synthetic oligonucleotide
acacccauaggggagaacc

SEQ ID NO: 49569 - RNA, 19 nt, Artificial Sequence
  Description of Artificial Sequence: Synthetic oligonucleotide
augggauucacuuuauugu

SEQ ID NO: 49570 - RNA, 19 nt, Artificial Sequence
  Description of Artificial Sequence: Synthetic oligonucleotide
accggauaaacgcaacccc

SEQ ID NO: 49571 - RNA, 19 nt, Artificial Sequence
  Description of Artificial Sequence: Synthetic oligonucleotide
aaacucgagagguugcaug

SEQ ID NO: 49572 - RNA, 19 nt, Artificial Sequence
  Description of Artificial Sequence: Synthetic oligonucleotide
uacaaucauuauuaaaggu

SEQ ID NO: 49573 - RNA, 19 nt, Artificial Sequence
  Description of Artificial Sequence: Synthetic oligonucleotide
uguggagacaucaaaugaa

SEQ ID NO: 49574 - RNA, 19 nt, Artificial Sequence
  Description of Artificial Sequence: Synthetic oligonucleotide
uaucacugugcauucaagc

SEQ ID NO: 49575 - RNA, 19 nt, Artificial Sequence
  Description of Artificial Sequence: Synthetic oligonucleotide
aaacgcaaccccucuggac

SEQ ID NO: 49576 - RNA, 19 nt, Artificial Sequence
  Description of Artificial Sequence: Synthetic oligonucleotide
auaaccauuagacauugua

SEQ ID NO: 49577 - RNA, 19 nt, Artificial Sequence
  Description of Artificial Sequence: Synthetic oligonucleotide
acuagaacuaagaagaaaa

SEQ ID NO: 49578 - RNA, 19 nt, Artificial Sequence
  Description of Artificial Sequence: Synthetic oligonucleotide
augaacaauuguuuaauaa

SEQ ID NO: 49579 - RNA, 19 nt, Artificial Sequence
  Description of Artificial Sequence: Synthetic oligonucleotide
cacuugugaaaauuggcgc

SEQ ID NO: 49580 - RNA, 19 nt, Artificial Sequence
  Description of Artificial Sequence: Synthetic oligonucleotide
aacgucaaggcaguuauga

SEQ ID NO: 49581 - RNA, 19 nt, Artificial Sequence
  Description of Artificial Sequence: Synthetic oligonucleotide
uuaugaccauugaaacugg

SEQ ID NO: 49582 - RNA, 19 nt, Artificial Sequence
  Description of Artificial Sequence: Synthetic oligonucleotide
uucagacuugcuauggcca

SEQ ID NO: 49583 - RNA, 19 nt, Artificial Sequence
  Description of Artificial Sequence: Synthetic oligonucleotide
aguauucggacaaacugac

SEQ ID NO: 49584 - RNA, 19 nt, Artificial Sequence
  Description of Artificial Sequence: Synthetic oligonucleotide
aucagccuaaugcggauac

SEQ ID NO: 49585 - RNA, 19 nt, Artificial Sequence
  Description of Artificial Sequence: Synthetic oligonucleotide
ucgagagaaaacagcaugu

SEQ ID NO: 49586 - RNA, 19 nt, Artificial Sequence
  Description of Artificial Sequence: Synthetic oligonucleotide
aaugaguuguacacuaaca

SEQ ID NO: 49587 - RNA, 19 nt, Artificial Sequence
  Description of Artificial Sequence: Synthetic oligonucleotide
gaaccugaaucucugcgcc

SEQ ID NO: 49588 - RNA, 19 nt, Artificial Sequence
  Description of Artificial Sequence: Synthetic oligonucleotide
uggaauugaugauucgccc

SEQ ID NO: 49589 - RNA, 19 nt, Artificial Sequence
  Description of Artificial Sequence: Synthetic oligonucleotide
ugauaaaccccaggggugg

SEQ ID NO: 49590 - RNA, 19 nt, Artificial Sequence
  Description of Artificial Sequence: Synthetic oligonucleotide
augaaauagguguuagaca

SEQ ID NO: 49591 - RNA, 19 nt, Artificial Sequence
  Description of Artificial Sequence: Synthetic oligonucleotide
aauuaucuauuccguacaa

SEQ ID NO: 49592 - RNA, 19 nt, Artificial Sequence
  Description of Artificial Sequence: Synthetic oligonucleotide
uucauaguuugucaugguc

SEQ ID NO: 49593 - RNA, 19 nt, Artificial Sequence
  Description of Artificial Sequence: Synthetic oligonucleotide
augagcgaguuauuugugg

SEQ ID NO: 49594 - RNA, 19 nt, Artificial Sequence
  Description of Artificial Sequence: Synthetic oligonucleotide
aauacgcuuuugaagagcu

SEQ ID NO: 49595 - RNA, 19 nt, Artificial Sequence
  Description of Artificial Sequence: Synthetic oligonucleotide
ugcuacuuuaucccgaaua

SEQ ID NO: 49596 - RNA, 19 nt, Artificial Sequence
  Description of Artificial Sequence: Synthetic oligonucleotide
aaaucugacuaagauugga

SEQ ID NO: 49597 - RNA, 19 nt, Artificial Sequence
  Description of Artificial Sequence: Synthetic oligonucleotide
ggaugcgagaaauacaaug

SEQ ID NO: 49598 - RNA, 19 nt, Artificial Sequence
  Description of Artificial Sequence: Synthetic oligonucleotide
gguuaaauggucuuggaaa

SEQ ID NO: 49599 - RNA, 19 nt, Artificial Sequence
  Description of Artificial Sequence: Synthetic oligonucleotide
gguuuaugaccauugaaac

SEQ ID NO: 49600 - RNA, 19 nt, Artificial Sequence
  Description of Artificial Sequence: Synthetic oligonucleotide
aaaucugaacacgggcggg

SEQ ID NO: 49601 - RNA, 19 nt, Artificial Sequence
  Description of Artificial Sequence: Synthetic oligonucleotide
aaguuaaagcaugcuuccg

SEQ ID NO: 49602 - RNA, 19 nt, Artificial Sequence
  Description of Artificial Sequence: Synthetic oligonucleotide
caacauguggaacccaccc

SEQ ID NO: 49603 - RNA, 19 nt, Artificial Sequence
  Description of Artificial Sequence: Synthetic oligonucleotide
uaguguacaacacgggaau

SEQ ID NO: 49604 - RNA, 19 nt, Artificial Sequence
  Description of Artificial Sequence: Synthetic oligonucleotide
guucagacuugcuauggcc

SEQ ID NO: 49605 - RNA, 19 nt, Artificial Sequence
  Description of Artificial Sequence: Synthetic oligonucleotide
cugaguguucauacaaaag

SEQ ID NO: 49606 - RNA, 19 nt, Artificial Sequence
  Description of Artificial Sequence: Synthetic oligonucleotide
ugcgagaaauacaaugcuc

SEQ ID NO: 49607 - RNA, 19 nt, Artificial Sequence
  Description of Artificial Sequence: Synthetic oligonucleotide
uguacaacacgggaaucag

SEQ ID NO: 49608 - RNA, 19 nt, Artificial Sequence
  Description of Artificial Sequence: Synthetic oligonucleotide
acugaguauucggacaaac

SEQ ID NO: 49609 - RNA, 19 nt, Artificial Sequence
  Description of Artificial Sequence: Synthetic oligonucleotide
uuggaaacucgagagguug

SEQ ID NO: 49610 - RNA, 19 nt, Artificial Sequence
  Description of Artificial Sequence: Synthetic oligonucleotide
aacauguggaacccacccu

SEQ ID NO: 49611 - RNA, 19 nt, Artificial Sequence
  Description of Artificial Sequence: Synthetic oligonucleotide
cacuucgagagaaaacagc

SEQ ID NO: 49612 - RNA, 19 nt, Artificial Sequence
  Description of Artificial Sequence: Synthetic oligonucleotide
agcgaguuauuugugggac

SEQ ID NO: 49613 - RNA, 19 nt, Artificial Sequence
  Description of Artificial Sequence: Synthetic oligonucleotide
uugggcgagcauaugacac

SEQ ID NO: 49614 - RNA, 19 nt, Artificial Sequence
  Description of Artificial Sequence: Synthetic oligonucleotide
agagguugcaugaacaaca

SEQ ID NO: 49615 - RNA, 19 nt, Artificial Sequence
  Description of Artificial Sequence: Synthetic oligonucleotide
auuggcgcaaaaugaguug

SEQ ID NO: 49616 - RNA, 19 nt, Artificial Sequence
  Description of Artificial Sequence: Synthetic oligonucleotide
acagcuaucacugugcauu

SEQ ID NO: 49617 - RNA, 19 nt, Artificial Sequence
  Description of Artificial Sequence: Synthetic oligonucleotide
aagguuaugggaaaaugua

SEQ ID NO: 49618 - RNA, 19 nt, Artificial Sequence
  Description of Artificial Sequence: Synthetic oligonucleotide
acaacaguauccgaugugu

SEQ ID NO: 49619 - RNA, 19 nt, Artificial Sequence
  Description of Artificial Sequence: Synthetic oligonucleotide
auuuagacuaagacaaaca

SEQ ID NO: 49620 - RNA, 19 nt, Artificial Sequence
  Description of Artificial Sequence: Synthetic oligonucleotide
augcaugcaauguguggac

SEQ ID NO: 49621 - RNA, 19 nt, Artificial Sequence
  Description of Artificial Sequence: Synthetic oligonucleotide
acaucaaaugaaauaggug

SEQ ID NO: 49622 - RNA, 19 nt, Artificial Sequence
  Description of Artificial Sequence: Synthetic oligonucleotide
gcagucuucggccaugugg

SEQ ID NO: 49623 - RNA, 19 nt, Artificial Sequence
  Description of Artificial Sequence: Synthetic oligonucleotide
uaacauuugugggauuuca

SEQ ID NO: 49624 - RNA, 19 nt, Artificial Sequence
  Description of Artificial Sequence: Synthetic oligonucleotide
auucggacaaacugacuca

SEQ ID NO: 49625 - RNA, 19 nt, Artificial Sequence
  Description of Artificial Sequence: Synthetic oligonucleotide
aucgagcaaaacaaaauca

SEQ ID NO: 49626 - RNA, 19 nt, Artificial Sequence
  Description of Artificial Sequence: Synthetic oligonucleotide
ucuaacauuugugggauuu

SEQ ID NO: 49627 - RNA, 19 nt, Artificial Sequence
  Description of Artificial Sequence: Synthetic oligonucleotide
aucacgaaucacuuucaca

SEQ ID NO: 49628 - RNA, 19 nt, Artificial Sequence
  Description of Artificial Sequence: Synthetic oligonucleotide
uuuaaaggcuaguuacaua

SEQ ID NO: 49629 - RNA, 19 nt, Artificial Sequence
  Description of Artificial Sequence: Synthetic oligonucleotide
agguguuagacagucuuag

SEQ ID NO: 49630 - RNA, 19 nt, Artificial Sequence
  Description of Artificial Sequence: Synthetic oligonucleotide
gaugauucgcccaaaccga

SEQ ID NO: 49631 - RNA, 19 nt, Artificial Sequence
  Description of Artificial Sequence: Synthetic oligonucleotide
agccaucuaguguacaaca

SEQ ID NO: 49632 - RNA, 19 nt, Artificial Sequence
  Description of Artificial Sequence: Synthetic oligonucleotide
acgggaaucagcugguaga

SEQ ID NO: 49633 - RNA, 19 nt, Artificial Sequence
  Description of Artificial Sequence: Synthetic oligonucleotide
augcgagaaauacaaugcu

SEQ ID NO: 49634 - RNA, 19 nt, Artificial Sequence
  Description of Artificial Sequence: Synthetic oligonucleotide
acagacuucguaguuccuc

SEQ ID NO: 49635 - RNA, 19 nt, Artificial Sequence
  Description of Artificial Sequence: Synthetic oligonucleotide
uguacaaguuggcaucuuu

SEQ ID NO: 49636 - RNA, 19 nt, Artificial Sequence
  Description of Artificial Sequence: Synthetic oligonucleotide
auauacuggagcugcccug

SEQ ID NO: 49637 - RNA, 19 nt, Artificial Sequence
  Description of Artificial Sequence: Synthetic oligonucleotide
caacaguaagcguucauga

SEQ ID NO: 49638 - RNA, 19 nt, Artificial Sequence
  Description of Artificial Sequence: Synthetic oligonucleotide
ucgguuuaauauauacuuu

SEQ ID NO: 49639 - RNA, 19 nt, Artificial Sequence
  Description of Artificial Sequence: Synthetic oligonucleotide
augugucaaaucaucaaug

SEQ ID NO: 49640 - RNA, 19 nt, Artificial Sequence
  Description of Artificial Sequence: Synthetic oligonucleotide
aguuauuugugggacuugu

SEQ ID NO: 49641 - RNA, 19 nt, Artificial Sequence
  Description of Artificial Sequence: Synthetic oligonucleotide
agcauugccggggacauug

SEQ ID NO: 49642 - RNA, 19 nt, Artificial Sequence
  Description of Artificial Sequence: Synthetic oligonucleotide
ucaauuuggcaaucucuau

SEQ ID NO: 49643 - RNA, 19 nt, Artificial Sequence
  Description of Artificial Sequence: Synthetic oligonucleotide
ugguuagucaaugcagucu

SEQ ID NO: 49644 - RNA, 19 nt, Artificial Sequence
  Description of Artificial Sequence: Synthetic oligonucleotide
auaccuccaaaauacgcuu

SEQ ID NO: 49645 - RNA, 19 nt, Artificial Sequence
  Description of Artificial Sequence: Synthetic oligonucleotide
gccuaaugcggauacuugg

SEQ ID NO: 49646 - RNA, 19 nt, Artificial Sequence
  Description of Artificial Sequence: Synthetic oligonucleotide
gguguugaaaucacgaauc

SEQ ID NO: 49647 - RNA, 19 nt, Artificial Sequence
  Description of Artificial Sequence: Synthetic oligonucleotide
uaugaccauugaaacuggu

SEQ ID NO: 49648 - RNA, 19 nt, Artificial Sequence
  Description of Artificial Sequence: Synthetic oligonucleotide
agggaugcgagaaauacaa

SEQ ID NO: 49649 - RNA, 19 nt, Artificial Sequence
  Description of Artificial Sequence: Synthetic oligonucleotide
cuuaaugguuuuggauugg

SEQ ID NO: 49650 - RNA, 19 nt, Artificial Sequence
  Description of Artificial Sequence: Synthetic oligonucleotide
cacucaugugaucuacacc

SEQ ID NO: 49651 - RNA, 19 nt, Artificial Sequence
  Description of Artificial Sequence: Synthetic oligonucleotide
caaaccgagagaacauguc

SEQ ID NO: 49652 - RNA, 19 nt, Artificial Sequence
  Description of Artificial Sequence: Synthetic oligonucleotide
ugggucauauucugaggga

SEQ ID NO: 49653 - RNA, 19 nt, Artificial Sequence
  Description of Artificial Sequence: Synthetic oligonucleotide
cauaugacaccuuaauggu

SEQ ID NO: 49654 - RNA, 19 nt, Artificial Sequence
  Description of Artificial Sequence: Synthetic oligonucleotide
ugggcgagcauaugacacc

SEQ ID NO: 49655 - RNA, 19 nt, Artificial Sequence
  Description of Artificial Sequence: Synthetic oligonucleotide
gagguugcaugaacaacag

SEQ ID NO: 49656 - RNA, 19 nt, Artificial Sequence
  Description of Artificial Sequence: Synthetic oligonucleotide
cuacuuuaucccgaauaag

SEQ ID NO: 49657 - RNA, 19 nt, Artificial Sequence
  Description of Artificial Sequence: Synthetic oligonucleotide
ccaucuaguguacaacacg

SEQ ID NO: 49658 - RNA, 19 nt, Artificial Sequence
  Description of Artificial Sequence: Synthetic oligonucleotide
agccguucagacuugcuau

SEQ ID NO: 49659 - RNA, 19 nt, Artificial Sequence
  Description of Artificial Sequence: Synthetic oligonucleotide
aguauccgauguguggcac

SEQ ID NO: 49660 - RNA, 19 nt, Artificial Sequence
  Description of Artificial Sequence: Synthetic oligonucleotide
ccccauaccuccaaaauac

SEQ ID NO: 49661 - RNA, 19 nt, Artificial Sequence
  Description of Artificial Sequence: Synthetic oligonucleotide
ucuacacagcuaugaacaa

SEQ ID NO: 49662 - RNA, 19 nt, Artificial Sequence
  Description of Artificial Sequence: Synthetic oligonucleotide
uagccguucagacuugcua

SEQ ID NO: 49663 - RNA, 19 nt, Artificial Sequence
  Description of Artificial Sequence: Synthetic oligonucleotide
aaucugaacacgggcggga

SEQ ID NO: 49664 - RNA, 19 nt, Artificial Sequence
  Description of Artificial Sequence: Synthetic oligonucleotide
caugcaugcaaugugugga

SEQ ID NO: 49665 - RNA, 19 nt, Artificial Sequence
  Description of Artificial Sequence: Synthetic oligonucleotide
gcgauaacggcuccgcacg

SEQ ID NO: 49666 - RNA, 19 nt, Artificial Sequence
  Description of Artificial Sequence: Synthetic oligonucleotide
uggaaucaucagucaacgc

SEQ ID NO: 49667 - RNA, 19 nt, Artificial Sequence
  Description of Artificial Sequence: Synthetic oligonucleotide
cagaggauccccucaucag

SEQ ID NO: 49668 - RNA, 19 nt, Artificial Sequence
  Description of Artificial Sequence: Synthetic oligonucleotide
cacagggccuccaaaccgc

SEQ ID NO: 49669 - RNA, 19 nt, Artificial Sequence
  Description of Artificial Sequence: Synthetic oligonucleotide
agucuacuuagguuucggu

SEQ ID NO: 49670 - RNA, 19 nt, Artificial Sequence
  Description of Artificial Sequence: Synthetic oligonucleotide
caugagcgaguuauuugug

SEQ ID NO: 49671 - RNA, 19 nt, Artificial Sequence
  Description of Artificial Sequence: Synthetic oligonucleotide
uauccgauguguggcacca

SEQ ID NO: 49672 - RNA, 19 nt, Artificial Sequence
  Description of Artificial Sequence: Synthetic oligonucleotide
ugauucgcccaaaccgaga

SEQ ID NO: 49673 - RNA, 19 nt, Artificial Sequence
  Description of Artificial Sequence: Synthetic oligonucleotide
guccugcuacuuuaucccg

SEQ ID NO: 49674 - RNA, 19 nt, Artificial Sequence
  Description of Artificial Sequence: Synthetic oligonucleotide
caaaccggauaaacgcaac

SEQ ID NO: 49675 - RNA, 19 nt, Artificial Sequence
  Description of Artificial Sequence: Synthetic oligonucleotide
aucuaguguacaacacggg

SEQ ID NO: 49676 - RNA, 19 nt, Artificial Sequence
  Description of Artificial Sequence: Synthetic oligonucleotide
ugcagucuacuuagguuuc

SEQ ID NO: 49677 - RNA, 19 nt, Artificial Sequence
  Description of Artificial Sequence: Synthetic oligonucleotide
ggaauugaugauucgccca

SEQ ID NO: 49678 - RNA, 19 nt, Artificial Sequence
  Description of Artificial Sequence: Synthetic oligonucleotide
cugguuagucaaugcaguc

SEQ ID NO: 49679 - RNA, 19 nt, Artificial Sequence
  Description of Artificial Sequence: Synthetic oligonucleotide
agacauuguauuauuuaaa

SEQ ID NO: 49680 - RNA, 19 nt, Artificial Sequence
  Description of Artificial Sequence: Synthetic oligonucleotide
ccuaaugcggauacuuggc

SEQ ID NO: 49681 - RNA, 19 nt, Artificial Sequence
  Description of Artificial Sequence: Synthetic oligonucleotide
uggugacuuacaaguaaua

SEQ ID NO: 49682 - RNA, 19 nt, Artificial Sequence
  Description of Artificial Sequence: Synthetic oligonucleotide
ggacaaacugacucauuug

SEQ ID NO: 49683 - RNA, 19 nt, Artificial Sequence
  Description of Artificial Sequence: Synthetic oligonucleotide
ggguuuaugaccauugaaa

SEQ ID NO: 49684 - RNA, 19 nt, Artificial Sequence
  Description of Artificial Sequence: Synthetic oligonucleotide
cuaaugcggauacuuggca

SEQ ID NO: 49685 - RNA, 19 nt, Artificial Sequence
  Description of Artificial Sequence: Synthetic oligonucleotide
ucccgucaacuaaagcaga

SEQ ID NO: 49686 - RNA, 19 nt, Artificial Sequence
  Description of Artificial Sequence: Synthetic oligonucleotide
gagcgaguuauuuguggga

SEQ ID NO: 49687 - RNA, 19 nt, Artificial Sequence
  Description of Artificial Sequence: Synthetic oligonucleotide
auuaucuauuccguacaaa

SEQ ID NO: 49688 - RNA, 19 nt, Artificial Sequence
  Description of Artificial Sequence: Synthetic oligonucleotide
guauccgauguguggcacc

SEQ ID NO: 49689 - RNA, 19 nt, Artificial Sequence
  Description of Artificial Sequence: Synthetic oligonucleotide
aaacacugaagaacauuua

SEQ ID NO: 49690 - RNA, 19 nt, Artificial Sequence
  Description of Artificial Sequence: Synthetic oligonucleotide
gccacuucgagagaaaaca

SEQ ID NO: 49691 - RNA, 19 nt, Artificial Sequence
  Description of Artificial Sequence: Synthetic oligonucleotide
caaaccgccuagcaggaga

SEQ ID NO: 49692 - RNA, 19 nt, Artificial Sequence
  Description of Artificial Sequence: Synthetic oligonucleotide
guguacaacacgggaauca

SEQ ID NO: 49693 - RNA, 19 nt, Artificial Sequence
  Description of Artificial Sequence: Synthetic oligonucleotide
agguuaugggaaaauguaa

SEQ ID NO: 49694 - RNA, 19 nt, Artificial Sequence
  Description of Artificial Sequence: Synthetic oligonucleotide
uagccaucuaguguacaac

SEQ ID NO: 49695 - RNA, 19 nt, Artificial Sequence
  Description of Artificial Sequence: Synthetic oligonucleotide
ccgaccguuugucaaaccg

SEQ ID NO: 49696 - RNA, 19 nt, Artificial Sequence
  Description of Artificial Sequence: Synthetic oligonucleotide
cuagccaucuaguguacaa

SEQ ID NO: 49697 - RNA, 19 nt, Artificial Sequence
  Description of Artificial Sequence: Synthetic oligonucleotide
ugugggacuuguugguuuu

SEQ ID NO: 49698 - RNA, 19 nt, Artificial Sequence
  Description of Artificial Sequence: Synthetic oligonucleotide
cagucuacuuagguuucgg

SEQ ID NO: 49699 - RNA, 19 nt, Artificial Sequence
  Description of Artificial Sequence: Synthetic oligonucleotide
agucuagugcucacaagga

SEQ ID NO: 49700 - RNA, 19 nt, Artificial Sequence
  Description of Artificial Sequence: Synthetic oligonucleotide
uucggacaaacugacucau

SEQ ID NO: 49701 - RNA, 19 nt, Artificial Sequence
  Description of Artificial Sequence: Synthetic oligonucleotide
gauaacggcuccgcacggc

SEQ ID NO: 49702 - RNA, 19 nt, Artificial Sequence
  Description of Artificial Sequence: Synthetic oligonucleotide
ggggccaaacaucugccag

SEQ ID NO: 49703 - RNA, 19 nt, Artificial Sequence
  Description of Artificial Sequence: Synthetic oligonucleotide
accgccuagcaggagagug

SEQ ID NO: 49704 - RNA, 19 nt, Artificial Sequence
  Description of Artificial Sequence: Synthetic oligonucleotide
gucaaaccggauaaacgca

SEQ ID NO: 49705 - RNA, 19 nt, Artificial Sequence
  Description of Artificial Sequence: Synthetic oligonucleotide
cuaacauuugugggauuuc

SEQ ID NO: 49706 - RNA, 19 nt, Artificial Sequence
  Description of Artificial Sequence: Synthetic oligonucleotide
augauucgcccaaaccgag

SEQ ID NO: 49707 - RNA, 19 nt, Artificial Sequence
  Description of Artificial Sequence: Synthetic oligonucleotide
ccuagcaggagagugguac

SEQ ID NO: 49708 - RNA, 19 nt, Artificial Sequence
  Description of Artificial Sequence: Synthetic oligonucleotide
aagagaacuuugaggguua

SEQ ID NO: 49709 - RNA, 19 nt, Artificial Sequence
  Description of Artificial Sequence: Synthetic oligonucleotide
agucuucggccaugugguc

SEQ ID NO: 49710 - RNA, 19 nt, Artificial Sequence
  Description of Artificial Sequence: Synthetic oligonucleotide
ggugacuuacaaguaauaa

SEQ ID NO: 49711 - RNA, 19 nt, Artificial Sequence
  Description of Artificial Sequence: Synthetic oligonucleotide
ggcgauaacggcuccgcac

SEQ ID NO: 49712 - RNA, 19 nt, Artificial Sequence
  Description of Artificial Sequence: Synthetic oligonucleotide
gagggaugcgagaaauaca

SEQ ID NO: 49713 - RNA, 19 nt, Artificial Sequence
  Description of Artificial Sequence: Synthetic oligonucleotide
aguugacaauuaaauucgu

SEQ ID NO: 49714 - RNA, 19 nt, Artificial Sequence
  Description of Artificial Sequence: Synthetic oligonucleotide
ugcauucaagcuggguuaa

SEQ ID NO: 49715 - RNA, 19 nt, Artificial Sequence
  Description of Artificial Sequence: Synthetic oligonucleotide
cagucaacgccccauaccu

SEQ ID NO: 49716 - RNA, 19 nt, Artificial Sequence
  Description of Artificial Sequence: Synthetic oligonucleotide
acccauaggggagaaccug

SEQ ID NO: 49717 - RNA, 19 nt, Artificial Sequence
  Description of Artificial Sequence: Synthetic oligonucleotide
gauaaaccccagggguggc

SEQ ID NO: 49718 - RNA, 19 nt, Artificial Sequence
  Description of Artificial Sequence: Synthetic oligonucleotide
guacaacacgggaaucagc

SEQ ID NO: 49719 - RNA, 19 nt, Artificial Sequence
  Description of Artificial Sequence: Synthetic oligonucleotide
ggguuaucaaaaucuaggu

SEQ ID NO: 49720 - RNA, 19 nt, Artificial Sequence
  Description of Artificial Sequence: Synthetic oligonucleotide
gggacauugacaccagaaa

SEQ ID NO: 49721 - RNA, 19 nt, Artificial Sequence
  Description of Artificial Sequence: Synthetic oligonucleotide
aaacgucaaggcaguuaug

SEQ ID NO: 49722 - RNA, 19 nt, Artificial Sequence
  Description of Artificial Sequence: Synthetic oligonucleotide
agccuaaugcggauacuug

SEQ ID NO: 49723 - RNA, 19 nt, Artificial Sequence
  Description of Artificial Sequence: Synthetic oligonucleotide
guacuuuucugcugagugu

SEQ ID NO: 49724 - RNA, 19 nt, Artificial Sequence
  Description of Artificial Sequence: Synthetic oligonucleotide
gauguguggcaccaugcau

SEQ ID NO: 49725 - RNA, 19 nt, Artificial Sequence
  Description of Artificial Sequence: Synthetic oligonucleotide
aacgccccauaccuccaaa

SEQ ID NO: 49726 - RNA, 19 nt, Artificial Sequence
  Description of Artificial Sequence: Synthetic oligonucleotide
cagucuucggccauguggu

SEQ ID NO: 49727 - RNA, 19 nt, Artificial Sequence
  Description of Artificial Sequence: Synthetic oligonucleotide
ugcuuccgaccguuuguca

SEQ ID NO: 49728 - RNA, 19 nt, Artificial Sequence
  Description of Artificial Sequence: Synthetic oligonucleotide
cuagcaggagagugguaca

SEQ ID NO: 49729 - RNA, 19 nt, Artificial Sequence
  Description of Artificial Sequence: Synthetic oligonucleotide
gcaugagcgaguuauuugu

SEQ ID NO: 49730 - RNA, 19 nt, Artificial Sequence
  Description of Artificial Sequence: Synthetic oligonucleotide
cauugccggggacauugac

SEQ ID NO: 49731 - RNA, 19 nt, Artificial Sequence
  Description of Artificial Sequence: Synthetic oligonucleotide
uaacggcuccgcacggccu

SEQ ID NO: 49732 - RNA, 19 nt, Artificial Sequence
  Description of Artificial Sequence: Synthetic oligonucleotide
gucuacuuagguuucgguu

SEQ ID NO: 49733 - RNA, 19 nt, Artificial Sequence
  Description of Artificial Sequence: Synthetic oligonucleotide
aaagcaugagcgaguuauu

SEQ ID NO: 49734 - RNA, 19 nt, Artificial Sequence
  Description of Artificial Sequence: Synthetic oligonucleotide
ccacuucgagagaaaacag

SEQ ID NO: 49735 - RNA, 19 nt, Artificial Sequence
  Description of Artificial Sequence: Synthetic oligonucleotide
aaccucgccgaugcugcug

SEQ ID NO: 49736 - RNA, 19 nt, Artificial Sequence
  Description of Artificial Sequence: Synthetic oligonucleotide
uccgaccguuugucaaacc

SEQ ID NO: 49737 - RNA, 19 nt, Artificial Sequence
  Description of Artificial Sequence: Synthetic oligonucleotide
cucgguagcggugguggag

SEQ ID NO: 49738 - RNA, 19 nt, Artificial Sequence
  Description of Artificial Sequence: Synthetic oligonucleotide
agucaacgccccauaccuc

SEQ ID NO: 49739 - RNA, 19 nt, Artificial Sequence
  Description of Artificial Sequence: Synthetic oligonucleotide
cgaccguuugucaaaccgg

SEQ ID NO: 49740 - RNA, 19 nt, Artificial Sequence
  Description of Artificial Sequence: Synthetic oligonucleotide
gugcucuagggaaguuugg

SEQ ID NO: 49741 - RNA, 19 nt, Artificial Sequence
  Description of Artificial Sequence: Synthetic oligonucleotide
gggcuuauaaaacaccuuu

SEQ ID NO: 49742 - RNA, 19 nt, Artificial Sequence
  Description of Artificial Sequence: Synthetic oligonucleotide
ggcgcaaaaugaguuguac

SEQ ID NO: 49743 - RNA, 19 nt, Artificial Sequence
  Description of Artificial Sequence: Synthetic oligonucleotide
cuccccuaagaauguguca

SEQ ID NO: 49744 - RNA, 19 nt, Artificial Sequence
  Description of Artificial Sequence: Synthetic oligonucleotide
augcggauacuuggcagcu

SEQ ID NO: 49745 - RNA, 19 nt, Artificial Sequence
  Description of Artificial Sequence: Synthetic oligonucleotide
ccgauguguggcaccaugc

SEQ ID NO: 49746 - RNA, 19 nt, Artificial Sequence
  Description of Artificial Sequence: Synthetic oligonucleotide
ucguucucccaaugucauc

SEQ ID NO: 49747 - RNA, 19 nt, Artificial Sequence
  Description of Artificial Sequence: Synthetic oligonucleotide
cacagcuaugaacaauugu

SEQ ID NO: 49748 - RNA, 19 nt, Artificial Sequence
  Description of Artificial Sequence: Synthetic oligonucleotide
ucgcccaaaccgagagaac

SEQ ID NO: 49749 - RNA, 19 nt, Artificial Sequence
  Description of Artificial Sequence: Synthetic oligonucleotide
gaaauagguguuagacagu

SEQ ID NO: 49750 - RNA, 19 nt, Artificial Sequence
  Description of Artificial Sequence: Synthetic oligonucleotide
ucagccuaaugcggauacu

SEQ ID NO: 49751 - RNA, 19 nt, Artificial Sequence
  Description of Artificial Sequence: Synthetic oligonucleotide
ucggccauguggucuucau

SEQ ID NO: 49752 - RNA, 19 nt, Artificial Sequence
  Description of Artificial Sequence: Synthetic oligonucleotide
uacugaguauucggacaaa

SEQ ID NO: 49753 - RNA, 19 nt, Artificial Sequence
  Description of Artificial Sequence: Synthetic oligonucleotide
ggcggcgcggcgauaacgg

SEQ ID NO: 49754 - RNA, 19 nt, Artificial Sequence
  Description of Artificial Sequence: Synthetic oligonucleotide
ugcggauacuuggcagcug

SEQ ID NO: 49755 - RNA, 19 nt, Artificial Sequence
  Description of Artificial Sequence: Synthetic oligonucleotide
cagcuaugaacaauuguuu

SEQ ID NO: 49756 - RNA, 19 nt, Artificial Sequence
  Description of Artificial Sequence: Synthetic oligonucleotide
acgccccauaccuccaaaa

SEQ ID NO: 49757 - RNA, 19 nt, Artificial Sequence
  Description of Artificial Sequence: Synthetic oligonucleotide
cugagcuugggcgagcaua

SEQ ID NO: 49758 - RNA, 19 nt, Artificial Sequence
  Description of Artificial Sequence: Synthetic oligonucleotide
gccguucagacuugcuaug

SEQ ID NO: 49759 - RNA, 19 nt, Artificial Sequence
  Description of Artificial Sequence: Synthetic oligonucleotide
ccgccuagcaggagagugg

SEQ ID NO: 49760 - RNA, 19 nt, Artificial Sequence
  Description of Artificial Sequence: Synthetic oligonucleotide
cuucgagagaaaacagcau

SEQ ID NO: 49761 - RNA, 19 nt, Artificial Sequence
  Description of Artificial Sequence: Synthetic oligonucleotide
gccggggacauugacacca

SEQ ID NO: 49762 - RNA, 19 nt, Artificial Sequence
  Description of Artificial Sequence: Synthetic oligonucleotide
ccagaggauccccucauca

SEQ ID NO: 49763 - RNA, 19 nt, Artificial Sequence
  Description of Artificial Sequence: Synthetic oligonucleotide
agcuaucacugugcauuca

SEQ ID NO: 49764 - RNA, 19 nt, Artificial Sequence
  Description of Artificial Sequence: Synthetic oligonucleotide
acacgggcgggaaggcccg

SEQ ID NO: 49765 - RNA, 19 nt, Artificial Sequence
  Description of Artificial Sequence: Synthetic oligonucleotide
uucggccauguggucuuca

SEQ ID NO: 49766 - RNA, 19 nt, Artificial Sequence
  Description of Artificial Sequence: Synthetic oligonucleotide
ugguugcaucccagaguau

SEQ ID NO: 49767 - RNA, 19 nt, Artificial Sequence
  Description of Artificial Sequence: Synthetic oligonucleotide
cauucaagcuggguuaaau

SEQ ID NO: 49768 - RNA, 19 nt, Artificial Sequence
  Description of Artificial Sequence: Synthetic oligonucleotide
ucgggagcccacugaugua

SEQ ID NO: 49769 - RNA, 19 nt, Artificial Sequence
  Description of Artificial Sequence: Synthetic oligonucleotide
uacacccauaggggagaac

SEQ ID NO: 49770 - RNA, 19 nt, Artificial Sequence
  Description of Artificial Sequence: Synthetic oligonucleotide
ccgagagaacauguccucc

SEQ ID NO: 49771 - RNA, 19 nt, Artificial Sequence
  Description of Artificial Sequence: Synthetic oligonucleotide
ggcagagcggcgcgaccgg

SEQ ID NO: 49772 - RNA, 19 nt, Artificial Sequence
  Description of Artificial Sequence: Synthetic oligonucleotide
gcucacaaggagggaugcg

SEQ ID NO: 49773 - RNA, 19 nt, Artificial Sequence
  Description of Artificial Sequence: Synthetic oligonucleotide
aaccgccuagcaggagagu

SEQ ID NO: 49774 - RNA, 19 nt, Artificial Sequence
  Description of Artificial Sequence: Synthetic oligonucleotide
gaaacucgagagguugcau

SEQ ID NO: 49775 - RNA, 19 nt, Artificial Sequence
  Description of Artificial Sequence: Synthetic oligonucleotide
caucagucaacgccccaua

SEQ ID NO: 49776 - RNA, 19 nt, Artificial Sequence
  Description of Artificial Sequence: Synthetic oligonucleotide
gccccauaccuccaaaaua

SEQ ID NO: 49777 - RNA, 19 nt, Artificial Sequence
  Description of Artificial Sequence: Synthetic oligonucleotide
gcgguagccguucagacuu

SEQ ID NO: 49778 - RNA, 19 nt, Artificial Sequence
  Description of Artificial Sequence: Synthetic oligonucleotide
cacugguaacauacagugu

SEQ ID NO: 49779 - RNA, 19 nt, Artificial Sequence
  Description of Artificial Sequence: Synthetic oligonucleotide
gccuccaaaccgccuagca

SEQ ID NO: 49780 - RNA, 19 nt, Artificial Sequence
  Description of Artificial Sequence: Synthetic oligonucleotide
auguacaaguuggcaucuu

SEQ ID NO: 49781 - RNA, 19 nt, Artificial Sequence
  Description of Artificial Sequence: Synthetic oligonucleotide
gcggcgauaacggcuccgc

SEQ ID NO: 49782 - RNA, 19 nt, Artificial Sequence
  Description of Artificial Sequence: Synthetic oligonucleotide
guauucggacaaacugacu

SEQ ID NO: 49783 - RNA, 19 nt, Artificial Sequence
  Description of Artificial Sequence: Synthetic oligonucleotide
cacccauaggggagaaccu

SEQ ID NO: 49784 - RNA, 19 nt, Artificial Sequence
  Description of Artificial Sequence: Synthetic oligonucleotide
aggagggaugcgagaaaua

SEQ ID NO: 49785 - RNA, 19 nt, Artificial Sequence
  Description of Artificial Sequence: Synthetic oligonucleotide
ggcgcggcgauaacggcuc

SEQ ID NO: 49786 - RNA, 19 nt, Artificial Sequence
  Description of Artificial Sequence: Synthetic oligonucleotide
ccggauaaacgcaaccccu

SEQ ID NO: 49787 - RNA, 19 nt, Artificial Sequence
  Description of Artificial Sequence: Synthetic oligonucleotide
gggcggcgcggcgauaacg

SEQ ID NO: 49788 - RNA, 19 nt, Artificial Sequence
  Description of Artificial Sequence: Synthetic oligonucleotide
cgauaacggcuccgcacgg

SEQ ID NO: 49789 - RNA, 19 nt, Artificial Sequence
  Description of Artificial Sequence: Synthetic oligonucleotide
cagccuaaugcggauacuu

SEQ ID NO: 49790 - RNA, 19 nt, Artificial Sequence
  Description of Artificial Sequence: Synthetic oligonucleotide
gggaacagaaaagcacagu

SEQ ID NO: 49791 - RNA, 19 nt, Artificial Sequence
  Description of Artificial Sequence: Synthetic oligonucleotide
gguuucgguuuaauauaua

SEQ ID NO: 49792 - RNA, 19 nt, Artificial Sequence
  Description of Artificial Sequence: Synthetic oligonucleotide
cgcccaaaccgagagaaca

SEQ ID NO: 49793 - RNA, 19 nt, Artificial Sequence
  Description of Artificial Sequence: Synthetic oligonucleotide
gcgaguuauuugugggacu

SEQ ID NO: 49794 - RNA, 19 nt, Artificial Sequence
  Description of Artificial Sequence: Synthetic oligonucleotide
cgaccggcgacggcgacgg

SEQ ID NO: 49795 - RNA, 19 nt, Artificial Sequence
  Description of Artificial Sequence: Synthetic oligonucleotide
cgauguguggcaccaugca

SEQ ID NO: 49796 - RNA, 19 nt, Artificial Sequence
  Description of Artificial Sequence: Synthetic oligonucleotide
ccauaggggagaaccugaa

SEQ ID NO: 49797 - RNA, 19 nt, Artificial Sequence
  Description of Artificial Sequence: Synthetic oligonucleotide
ccaaacgucaaggcaguua

SEQ ID NO: 49798 - RNA, 19 nt, Artificial Sequence
  Description of Artificial Sequence: Synthetic oligonucleotide
gcgaccggcgacggcgacg

SEQ ID NO: 49799 - RNA, 19 nt, Artificial Sequence
  Description of Artificial Sequence: Synthetic oligonucleotide
guagccguucagacuugcu

SEQ ID NO: 49800 - RNA, 19 nt, Artificial Sequence
  Description of Artificial Sequence: Synthetic oligonucleotide
ccagagcaagccacuucga

SEQ ID NO: 49801 - RNA, 19 nt, Artificial Sequence
  Description of Artificial Sequence: Synthetic oligonucleotide
cugugcauucaagcugggu

SEQ ID NO: 49802 - RNA, 19 nt, Artificial Sequence
  Description of Artificial Sequence: Synthetic oligonucleotide
gcaugcccggagcucaggu

SEQ ID NO: 49803 - RNA, 19 nt, Artificial Sequence
  Description of Artificial Sequence: Synthetic oligonucleotide
ccgucaacuaaagcagaaa

SEQ ID NO: 49804 - RNA, 19 nt, Artificial Sequence
  Description of Artificial Sequence: Synthetic oligonucleotide
auccgauguguggcaccau

SEQ ID NO: 49805 - RNA, 19 nt, Artificial Sequence
  Description of Artificial Sequence: Synthetic oligonucleotide
cucuucugcuuccgaccgu

SEQ ID NO: 49806 - RNA, 19 nt, Artificial Sequence
  Description of Artificial Sequence: Synthetic oligonucleotide
gcagagcggcgcgaccggc

SEQ ID NO: 49807 - RNA, 19 nt, Artificial Sequence
  Description of Artificial Sequence: Synthetic oligonucleotide
gcggcagagcggcgcgacc

SEQ ID NO: 49808 - RNA, 19 nt, Artificial Sequence
  Description of Artificial Sequence: Synthetic oligonucleotide
gcgccugguggugcacagg

SEQ ID NO: 49809 - RNA, 19 nt, Artificial Sequence
  Description of Artificial Sequence: Synthetic oligonucleotide
gcgucuugcccaagguugu

SEQ ID NO: 49810 - RNA, 19 nt, Artificial Sequence
  Description of Artificial Sequence: Synthetic oligonucleotide
cgcggcgauaacggcuccg

SEQ ID NO: 49811 - RNA, 19 nt, Artificial Sequence
  Description of Artificial Sequence: Synthetic oligonucleotide
cagacuugcuauggccauu

SEQ ID NO: 49812 - RNA, 19 nt, Artificial Sequence
  Description of Artificial Sequence: Synthetic oligonucleotide
gggaugcgagaaauacaau

SEQ ID NO: 49813 - RNA, 19 nt, Artificial Sequence
  Description of Artificial Sequence: Synthetic oligonucleotide
gcgcggcgauaacggcucc

SEQ ID NO: 49814 - RNA, 19 nt, Artificial Sequence
  Description of Artificial Sequence: Synthetic oligonucleotide
cgccccauaccuccaaaau

SEQ ID NO: 49815 - RNA, 19 nt, Artificial Sequence
  Description of Artificial Sequence: Synthetic oligonucleotide
cggcgauaacggcuccgca

SEQ ID NO: 49816 - RNA, 19 nt, Artificial Sequence
  Description of Artificial Sequence: Synthetic oligonucleotide
cggcgcggcgauaacggcu

SEQ ID NO: 49817 - RNA, 19 nt, Artificial Sequence
  Description of Artificial Sequence: Synthetic oligonucleotide
cgccuagcaggagaguggu

SEQ ID NO: 49818 - RNA, 19 nt, Artificial Sequence
  Description of Artificial Sequence: Synthetic oligonucleotide
gcgcgaccggcgacggcga

SEQ ID NO: 49819 - RNA, 19 nt, Artificial Sequence
  Description of Artificial Sequence: Synthetic oligonucleotide
cgcgaccggcgacggcgac

SEQ ID NO: 49820 - RNA, 19 nt, Artificial Sequence
  Description of Artificial Sequence: Synthetic oligonucleotide
cgggcggcgcggcgauaac

SEQ ID NO: 49821 - RNA, 19 nt, Artificial Sequence
  Description of Artificial Sequence: Synthetic oligonucleotide
cccaaacgucaaggcaguu

SEQ ID NO: 49822 - RNA, 19 nt, Artificial Sequence
  Description of Artificial Sequence: Synthetic oligonucleotide
aacacgacgagguaaaucc

SEQ ID NO: 49823 - RNA, 19 nt, Artificial Sequence
  Description of Artificial Sequence: Synthetic oligonucleotide
aguaugaucaauacgaacc

SEQ ID NO: 49824 - RNA, 19 nt, Artificial Sequence
  Description of Artificial Sequence: Synthetic oligonucleotide
uauaccaagauauaggugu

SEQ ID NO: 49825 - RNA, 19 nt, Artificial Sequence
  Description of Artificial Sequence: Synthetic oligonucleotide
auaugauuaauacaaguuc

SEQ ID NO: 49826 - RNA, 19 nt, Artificial Sequence
  Description of Artificial Sequence: Synthetic oligonucleotide
auucuuauguucgagagcc

SEQ ID NO: 49827 - RNA, 19 nt, Artificial Sequence
  Description of Artificial Sequence: Synthetic oligonucleotide
ugacauacgauucuuaugu

SEQ ID NO: 49828 - RNA, 19 nt, Artificial Sequence
  Description of Artificial Sequence: Synthetic oligonucleotide
uaguuaauaguaaauaccu

SEQ ID NO: 49829 - RNA, 19 nt, Artificial Sequence
  Description of Artificial Sequence: Synthetic oligonucleotide
cuuaguacgacgaagggac

SEQ ID NO: 49830 - RNA, 19 nt, Artificial Sequence
  Description of Artificial Sequence: Synthetic oligonucleotide
ugaucaaucuauuauauau

SEQ ID NO: 49831 - RNA, 19 nt, Artificial Sequence
  Description of Artificial Sequence: Synthetic oligonucleotide
ugauugaugaaauaaugca

SEQ ID NO: 49832 - RNA, 19 nt, Artificial Sequence
  Description of Artificial Sequence: Synthetic oligonucleotide
gacccauuggcuuaaaggg

SEQ ID NO: 49833 - RNA, 19 nt, Artificial Sequence
  Description of Artificial Sequence: Synthetic oligonucleotide
aauuuagacugggugaagc

SEQ ID NO: 49834 - RNA, 19 nt, Artificial Sequence
  Description of Artificial Sequence: Synthetic oligonucleotide
aauacgaaccugcagguca

SEQ ID NO: 49835 - RNA, 19 nt, Artificial Sequence
  Description of Artificial Sequence: Synthetic oligonucleotide
aacgagaaaauucaaugcu

SEQ ID NO: 49836 - RNA, 19 nt, Artificial Sequence
  Description of Artificial Sequence: Synthetic oligonucleotide
cauacgauucuuauguucg

SEQ ID NO: 49837 - RNA, 19 nt, Artificial Sequence
  Description of Artificial Sequence: Synthetic oligonucleotide
aaguaugaucaauacgaac

SEQ ID NO: 49838 - RNA, 19 nt, Artificial Sequence
  Description of Artificial Sequence: Synthetic oligonucleotide
uuuaacacagcuacuacac

SEQ ID NO: 49839 - RNA, 19 nt, Artificial Sequence
  Description of Artificial Sequence: Synthetic oligonucleotide
agaaguaugaucaauacga

SEQ ID NO: 49840 - RNA, 19 nt, Artificial Sequence
  Description of Artificial Sequence: Synthetic oligonucleotide
uacuacacuggucagaagc

SEQ ID NO: 49841 - RNA, 19 nt, Artificial Sequence
  Description of Artificial Sequence: Synthetic oligonucleotide
uuuuacguucuucuuuucg

SEQ ID NO: 49842 - RNA, 19 nt, Artificial Sequence
  Description of Artificial Sequence: Synthetic oligonucleotide
uauaugauuaauacaaguu

SEQ ID NO: 49843 - RNA, 19 nt, Artificial Sequence
  Description of Artificial Sequence: Synthetic oligonucleotide
uauguucccacuaaugaug

SEQ ID NO: 49844 - RNA, 19 nt, Artificial Sequence
  Description of Artificial Sequence: Synthetic oligonucleotide
agaucaauuguauaccaag

SEQ ID NO: 49845 - RNA, 19 nt, Artificial Sequence
  Description of Artificial Sequence: Synthetic oligonucleotide
ucucagaucacgucgauca

SEQ ID NO: 49846 - RNA, 19 nt, Artificial Sequence
  Description of Artificial Sequence: Synthetic oligonucleotide
cauuacgccaggaugaccg

SEQ ID NO: 49847 - RNA, 19 nt, Artificial Sequence
  Description of Artificial Sequence: Synthetic oligonucleotide
uggugagacaacauuaaag

SEQ ID NO: 49848 - RNA, 19 nt, Artificial Sequence
  Description of Artificial Sequence: Synthetic oligonucleotide
auucaauuuagacugggug

SEQ ID NO: 49849 - RNA, 19 nt, Artificial Sequence
  Description of Artificial Sequence: Synthetic oligonucleotide
augauugaugaaauaaugc

SEQ ID NO: 49850 - RNA, 19 nt, Artificial Sequence
  Description of Artificial Sequence: Synthetic oligonucleotide
uucaauuuagacuggguga

SEQ ID NO: 49851 - RNA, 19 nt, Artificial Sequence
  Description of Artificial Sequence: Synthetic oligonucleotide
ugagucgcaucacaaauag

SEQ ID NO: 49852 - RNA, 19 nt, Artificial Sequence
  Description of Artificial Sequence: Synthetic oligonucleotide
auauaugauuaauacaagu

SEQ ID NO: 49853 - RNA, 19 nt, Artificial Sequence
  Description of Artificial Sequence: Synthetic oligonucleotide
uuuccguacuuucugaagc

SEQ ID NO: 49854 - RNA, 19 nt, Artificial Sequence
  Description of Artificial Sequence: Synthetic oligonucleotide
aauagucaaucuucuuuuc

SEQ ID NO: 49855 - RNA, 19 nt, Artificial Sequence
  Description of Artificial Sequence: Synthetic oligonucleotide
agacccauuggcuuaaagg

SEQ ID NO: 49856 - RNA, 19 nt, Artificial Sequence
  Description of Artificial Sequence: Synthetic oligonucleotide
agucacguucuucugaugg

SEQ ID NO: 49857 - RNA, 19 nt, Artificial Sequence
  Description of Artificial Sequence: Synthetic oligonucleotide
uuaaagaauucaauuuaga

SEQ ID NO: 49858 - RNA, 19 nt, Artificial Sequence
  Description of Artificial Sequence: Synthetic oligonucleotide
guaguuaauaguaaauacc

SEQ ID NO: 49859 - RNA, 19 nt, Artificial Sequence
  Description of Artificial Sequence: Synthetic oligonucleotide
aaaucuaucuucaucggga

SEQ ID NO: 49860 - RNA, 19 nt, Artificial Sequence
  Description of Artificial Sequence: Synthetic oligonucleotide
ucgcaucacaaauagaucu

SEQ ID NO: 49861 - RNA, 19 nt, Artificial Sequence
  Description of Artificial Sequence: Synthetic oligonucleotide
agaaaaccccauugcaacc

SEQ ID NO: 49862 - RNA, 19 nt, Artificial Sequence
  Description of Artificial Sequence: Synthetic oligonucleotide
aaccuauguagacacaagu

SEQ ID NO: 49863 - RNA, 19 nt, Artificial Sequence
  Description of Artificial Sequence: Synthetic oligonucleotide
ucgaguugcauaauucaag

SEQ ID NO: 49864 - RNA, 19 nt, Artificial Sequence
  Description of Artificial Sequence: Synthetic oligonucleotide
cuaucuuccaacauucgug

SEQ ID NO: 49865 - RNA, 19 nt, Artificial Sequence
  Description of Artificial Sequence: Synthetic oligonucleotide
acauacgauucuuauguuc

SEQ ID NO: 49866 - RNA, 19 nt, Artificial Sequence
  Description of Artificial Sequence: Synthetic oligonucleotide
cauuacgccaggauggacg

SEQ ID NO: 49867 - RNA, 19 nt, Artificial Sequence
  Description of Artificial Sequence: Synthetic oligonucleotide
uggaucgaguucuucaagg

SEQ ID NO: 49868 - RNA, 19 nt, Artificial Sequence
  Description of Artificial Sequence: Synthetic oligonucleotide
uuuaauccuuuguuccucg

SEQ ID NO: 49869 - RNA, 19 nt, Artificial Sequence
  Description of Artificial Sequence: Synthetic oligonucleotide
aaagcaucaacaaaaggaa

SEQ ID NO: 49870 - RNA, 19 nt, Artificial Sequence
  Description of Artificial Sequence: Synthetic oligonucleotide
uuaacagaaccuuaccuuc

SEQ ID NO: 49871 - RNA, 19 nt, Artificial Sequence
  Description of Artificial Sequence: Synthetic oligonucleotide
ucaauuguauaccaagaua

SEQ ID NO: 49872 - RNA, 19 nt, Artificial Sequence
  Description of Artificial Sequence: Synthetic oligonucleotide
ugugguaauucuuucuucu

SEQ ID NO: 49873 - RNA, 19 nt, Artificial Sequence
  Description of Artificial Sequence: Synthetic oligonucleotide
ucucucucucucuugaaag

SEQ ID NO: 49874 - RNA, 19 nt, Artificial Sequence
  Description of Artificial Sequence: Synthetic oligonucleotide
cuuguugaaauaaucuauc

SEQ ID NO: 49875 - RNA, 19 nt, Artificial Sequence
  Description of Artificial Sequence: Synthetic oligonucleotide
cugcauuacgccaggaugg

SEQ ID NO: 49876 - RNA, 19 nt, Artificial Sequence
  Description of Artificial Sequence: Synthetic oligonucleotide
aauuggggcaucuucucga

SEQ ID NO: 49877 - RNA, 19 nt, Artificial Sequence
  Description of Artificial Sequence: Synthetic oligonucleotide
auucuuaguacgacgaagg

SEQ ID NO: 49878 - RNA, 19 nt, Artificial Sequence
  Description of Artificial Sequence: Synthetic oligonucleotide
uucuuaguacgacgaaggg

SEQ ID NO: 49879 - RNA, 19 nt, Artificial Sequence
  Description of Artificial Sequence: Synthetic oligonucleotide
uuguugggacucaacgucg

SEQ ID NO: 49880 - RNA, 19 nt, Artificial Sequence
  Description of Artificial Sequence: Synthetic oligonucleotide
aaaacugccuaaauguagu

SEQ ID NO: 49881 - RNA, 19 nt, Artificial Sequence
  Description of Artificial Sequence: Synthetic oligonucleotide
aagcacucuuuaucaaagg

SEQ ID NO: 49882 - RNA, 19 nt, Artificial Sequence
  Description of Artificial Sequence: Synthetic oligonucleotide
ugaucaaaccuauguagac

SEQ ID NO: 49883 - RNA, 19 nt, Artificial Sequence
  Description of Artificial Sequence: Synthetic oligonucleotide
acugccuaaauguaguuaa

SEQ ID NO: 49884 - RNA, 19 nt, Artificial Sequence
  Description of Artificial Sequence: Synthetic oligonucleotide
gaauucaauuuagacuggg

SEQ ID NO: 49885 - RNA, 19 nt, Artificial Sequence
  Description of Artificial Sequence: Synthetic oligonucleotide
auuacgccaggauggacgg

SEQ ID NO: 49886 - RNA, 19 nt, Artificial Sequence
  Description of Artificial Sequence: Synthetic oligonucleotide
cugucgacgagccagaauc

SEQ ID NO: 49887 - RNA, 19 nt, Artificial Sequence
  Description of Artificial Sequence: Synthetic oligonucleotide
gaauucuaucaucaucggc

SEQ ID NO: 49888 - RNA, 19 nt, Artificial Sequence
  Description of Artificial Sequence: Synthetic oligonucleotide
caagauauagguguuaaca

SEQ ID NO: 49889 - RNA, 19 nt, Artificial Sequence
  Description of Artificial Sequence: Synthetic oligonucleotide
acgagguaaaucccgaucu

SEQ ID NO: 49890 - RNA, 19 nt, Artificial Sequence
  Description of Artificial Sequence: Synthetic oligonucleotide
ucgaucaucucuuucccga

SEQ ID NO: 49891 - RNA, 19 nt, Artificial Sequence
  Description of Artificial Sequence: Synthetic oligonucleotide
uccucuacgagaaaaucua

SEQ ID NO: 49892 - RNA, 19 nt, Artificial Sequence
  Description of Artificial Sequence: Synthetic oligonucleotide
accaauucgccugggaggc

SEQ ID NO: 49893 - RNA, 19 nt, Artificial Sequence
  Description of Artificial Sequence: Synthetic oligonucleotide
aucacggcgacuugaaucu

SEQ ID NO: 49894 - RNA, 19 nt, Artificial Sequence
  Description of Artificial Sequence: Synthetic oligonucleotide
cagaaugugagcaggcuug

SEQ ID NO: 49895 - RNA, 19 nt, Artificial Sequence
  Description of Artificial Sequence: Synthetic oligonucleotide
ugaucaauacgaaccugca

SEQ ID NO: 49896 - RNA, 19 nt, Artificial Sequence
  Description of Artificial Sequence: Synthetic oligonucleotide
agucaaacgagaaaauuca

SEQ ID NO: 49897 - RNA, 19 nt, Artificial Sequence
  Description of Artificial Sequence: Synthetic oligonucleotide
ucacgcuggauauucagac

SEQ ID NO: 49898 - RNA, 19 nt, Artificial Sequence
  Description of Artificial Sequence: Synthetic oligonucleotide
cuacuacacuccaaaauug

SEQ ID NO: 49899 - RNA, 19 nt, Artificial Sequence
  Description of Artificial Sequence: Synthetic oligonucleotide
acauucgugacauacgauu

SEQ ID NO: 49900 - RNA, 19 nt, Artificial Sequence
  Description of Artificial Sequence: Synthetic oligonucleotide
ucaauacgaaccugcaggu

SEQ ID NO: 49901 - RNA, 19 nt, Artificial Sequence
  Description of Artificial Sequence: Synthetic oligonucleotide
augguuacucuuuaacaca

SEQ ID NO: 49902 - RNA, 19 nt, Artificial Sequence
  Description of Artificial Sequence: Synthetic oligonucleotide
agucgcaucacaaauagau

SEQ ID NO: 49903 - RNA, 19 nt, Artificial Sequence
  Description of Artificial Sequence: Synthetic oligonucleotide
ucaauuuagacugggugaa

SEQ ID NO: 49904 - RNA, 19 nt, Artificial Sequence
  Description of Artificial Sequence: Synthetic oligonucleotide
ucuaucaucacggcgacuu

SEQ ID NO: 49905 - RNA, 19 nt, Artificial Sequence
  Description of Artificial Sequence: Synthetic oligonucleotide
aguacgacgaagggacucc

SEQ ID NO: 49906 - RNA, 19 nt, Artificial Sequence
  Description of Artificial Sequence: Synthetic oligonucleotide
gccuaaauguaguuaauag

SEQ ID NO: 49907 - RNA, 19 nt, Artificial Sequence
  Description of Artificial Sequence: Synthetic oligonucleotide
ucuuaguacgacgaaggga

SEQ ID NO: 49908 - RNA, 19 nt, Artificial Sequence
  Description of Artificial Sequence: Synthetic oligonucleotide
gaucaucucuuucccgacg

SEQ ID NO: 49909 - RNA, 19 nt, Artificial Sequence
  Description of Artificial Sequence: Synthetic oligonucleotide
ucuacuacacuggucagaa

SEQ ID NO: 49910 - RNA, 19 nt, Artificial Sequence
  Description of Artificial Sequence: Synthetic oligonucleotide
aggauggacggucaucauc

SEQ ID NO: 49911 - RNA, 19 nt, Artificial Sequence
  Description of Artificial Sequence: Synthetic oligonucleotide
cuuuaacacagcuacuaca

SEQ ID NO: 49912 - RNA, 19 nt, Artificial Sequence
  Description of Artificial Sequence: Synthetic oligonucleotide
ugugaguugauuucuuauu

SEQ ID NO: 49913 - RNA, 19 nt, Artificial Sequence
  Description of Artificial Sequence: Synthetic oligonucleotide
cauucuuaguacgacgaag

SEQ ID NO: 49914 - RNA, 19 nt, Artificial Sequence
  Description of Artificial Sequence: Synthetic oligonucleotide
cacgacgagguaaaucccg

SEQ ID NO: 49915 - RNA, 19 nt, Artificial Sequence
  Description of Artificial Sequence: Synthetic oligonucleotide
agaaccuuaccuucaaauu

SEQ ID NO: 49916 - RNA, 19 nt, Artificial Sequence
  Description of Artificial Sequence: Synthetic oligonucleotide
augacuacaaaaugcuuua

SEQ ID NO: 49917 - RNA, 19 nt, Artificial Sequence
  Description of Artificial Sequence: Synthetic oligonucleotide
cauucgugacauacgauuc

SEQ ID NO: 49918 - RNA, 19 nt, Artificial Sequence
  Description of Artificial Sequence: Synthetic oligonucleotide
gauauagguguuaacaccu

SEQ ID NO: 49919 - RNA, 19 nt, Artificial Sequence
  Description of Artificial Sequence: Synthetic oligonucleotide
aucagcucgucuccaagag

SEQ ID NO: 49920 - RNA, 19 nt, Artificial Sequence
  Description of Artificial Sequence: Synthetic oligonucleotide
ucuucaucgggaccacgcc

SEQ ID NO: 49921 - RNA, 19 nt, Artificial Sequence
  Description of Artificial Sequence: Synthetic oligonucleotide
ucuuucucacgcuggauau

SEQ ID NO: 49922 - RNA, 19 nt, Artificial Sequence
  Description of Artificial Sequence: Synthetic oligonucleotide
gaucaauuguauaccaaga

SEQ ID NO: 49923 - RNA, 19 nt, Artificial Sequence
  Description of Artificial Sequence: Synthetic oligonucleotide
cacaaauagaucucuaucu

SEQ ID NO: 49924 - RNA, 19 nt, Artificial Sequence
  Description of Artificial Sequence: Synthetic oligonucleotide
gugacauacgauucuuaug

SEQ ID NO: 49925 - RNA, 19 nt, Artificial Sequence
  Description of Artificial Sequence: Synthetic oligonucleotide
augcucuaggaauccagag

SEQ ID NO: 49926 - RNA, 19 nt, Artificial Sequence
  Description of Artificial Sequence: Synthetic oligonucleotide
auacucaccucucucuaca

SEQ ID NO: 49927 - RNA, 19 nt, Artificial Sequence
  Description of Artificial Sequence: Synthetic oligonucleotide
gaguccgagaaguaugauc

SEQ ID NO: 49928 - RNA, 19 nt, Artificial Sequence
  Description of Artificial Sequence: Synthetic oligonucleotide
uacgauucuuauguucgag

SEQ ID NO: 49929 - RNA, 19 nt, Artificial Sequence
  Description of Artificial Sequence: Synthetic oligonucleotide
uaugaucaauacgaaccug

SEQ ID NO: 49930 - RNA, 19 nt, Artificial Sequence
  Description of Artificial Sequence: Synthetic oligonucleotide
ucuaaccgcucccgaacag

SEQ ID NO: 49931 - RNA, 19 nt, Artificial Sequence
  Description of Artificial Sequence: Synthetic oligonucleotide
uucccacuaaugaugggaa

SEQ ID NO: 49932 - RNA, 19 nt, Artificial Sequence
  Description of Artificial Sequence: Synthetic oligonucleotide
cuuccuagaaaguggguca

SEQ ID NO: 49933 - RNA, 19 nt, Artificial Sequence
  Description of Artificial Sequence: Synthetic oligonucleotide
auucgugacauacgauucu

SEQ ID NO: 49934 - RNA, 19 nt, Artificial Sequence
  Description of Artificial Sequence: Synthetic oligonucleotide
gucucuaucaucacggcga

SEQ ID NO: 49935 - RNA, 19 nt, Artificial Sequence
  Description of Artificial Sequence: Synthetic oligonucleotide
ucgauaucuuuaaaugcuu

SEQ ID NO: 49936 - RNA, 19 nt, Artificial Sequence
  Description of Artificial Sequence: Synthetic oligonucleotide
uucucguucucucucucuc

SEQ ID NO: 49937 - RNA, 19 nt, Artificial Sequence
  Description of Artificial Sequence: Synthetic oligonucleotide
ugagcaggcuugaugacuu

SEQ ID NO: 49938 - RNA, 19 nt, Artificial Sequence
  Description of Artificial Sequence: Synthetic oligonucleotide
aggucucucagaucacguc

SEQ ID NO: 49939 - RNA, 19 nt, Artificial Sequence
  Description of Artificial Sequence: Synthetic oligonucleotide
gacgagguaaaucccgauc

SEQ ID NO: 49940 - RNA, 19 nt, Artificial Sequence
  Description of Artificial Sequence: Synthetic oligonucleotide
ucgacgagccagaauccgc

SEQ ID NO: 49941 - RNA, 19 nt, Artificial Sequence
  Description of Artificial Sequence: Synthetic oligonucleotide
caacauucgugacauacga

SEQ ID NO: 49942 - RNA, 19 nt, Artificial Sequence
  Description of Artificial Sequence: Synthetic oligonucleotide
uccucaauugucugucgac

SEQ ID NO: 49943 - RNA, 19 nt, Artificial Sequence
  Description of Artificial Sequence: Synthetic oligonucleotide
ucauucuuaguacgacgaa

SEQ ID NO: 49944 - RNA, 19 nt, Artificial Sequence
  Description of Artificial Sequence: Synthetic oligonucleotide
ugucgacgagccagaaucc

SEQ ID NO: 49945 - RNA, 19 nt, Artificial Sequence
  Description of Artificial Sequence: Synthetic oligonucleotide
ggauucgaucaucaucugg

SEQ ID NO: 49946 - RNA, 19 nt, Artificial Sequence
  Description of Artificial Sequence: Synthetic oligonucleotide
caauugucugucgacgagc

SEQ ID NO: 49947 - RNA, 19 nt, Artificial Sequence
  Description of Artificial Sequence: Synthetic oligonucleotide
gaccaauuggggcaucuuc

SEQ ID NO: 49948 - RNA, 19 nt, Artificial Sequence
  Description of Artificial Sequence: Synthetic oligonucleotide
aucggcauuccuccaaggu

SEQ ID NO: 49949 - RNA, 19 nt, Artificial Sequence
  Description of Artificial Sequence: Synthetic oligonucleotide
agaauucaauuuagacugg

SEQ ID NO: 49950 - RNA, 19 nt, Artificial Sequence
  Description of Artificial Sequence: Synthetic oligonucleotide
cagcauuacgccaggauga

SEQ ID NO: 49951 - RNA, 19 nt, Artificial Sequence
  Description of Artificial Sequence: Synthetic oligonucleotide
aaacugccuaaauguaguu

SEQ ID NO: 49952 - RNA, 19 nt, Artificial Sequence
  Description of Artificial Sequence: Synthetic oligonucleotide
acgccuggggauucgauca

SEQ ID NO: 49953 - RNA, 19 nt, Artificial Sequence
  Description of Artificial Sequence: Synthetic oligonucleotide
aguuuaccaaaugcucuag

SEQ ID NO: 49954 - RNA, 19 nt, Artificial Sequence
  Description of Artificial Sequence: Synthetic oligonucleotide
aagaucaauuguauaccaa

SEQ ID NO: 49955 - RNA, 19 nt, Artificial Sequence
  Description of Artificial Sequence: Synthetic oligonucleotide
gguaaaucccgaucuucag

SEQ ID NO: 49956 - RNA, 19 nt, Artificial Sequence
  Description of Artificial Sequence: Synthetic oligonucleotide
aucagcauuacgccaggau

SEQ ID NO: 49957 - RNA, 19 nt, Artificial Sequence
  Description of Artificial Sequence: Synthetic oligonucleotide
uucaucgggaccacgccua

SEQ ID NO: 49958 - RNA, 19 nt, Artificial Sequence
  Description of Artificial Sequence: Synthetic oligonucleotide
aacgucguacuguggucca

SEQ ID NO: 49959 - RNA, 19 nt, Artificial Sequence
  Description of Artificial Sequence: Synthetic oligonucleotide
uccucguaagcacucuuua

SEQ ID NO: 49960 - RNA, 19 nt, Artificial Sequence
  Description of Artificial Sequence: Synthetic oligonucleotide
augaucaaucuauuauaua

SEQ ID NO: 49961 - RNA, 19 nt, Artificial Sequence
  Description of Artificial Sequence: Synthetic oligonucleotide
ggcaugaauuaguggaaag

SEQ ID NO: 49962 - RNA, 19 nt, Artificial Sequence
  Description of Artificial Sequence: Synthetic oligonucleotide
guaugaucaauacgaaccu

SEQ ID NO: 49963 - RNA, 19 nt, Artificial Sequence
  Description of Artificial Sequence: Synthetic oligonucleotide
uacucaccucucucuacag

SEQ ID NO: 49964 - RNA, 19 nt, Artificial Sequence
  Description of Artificial Sequence: Synthetic oligonucleotide
ucaggcggucuucaucucu

SEQ ID NO: 49965 - RNA, 19 nt, Artificial Sequence
  Description of Artificial Sequence: Synthetic oligonucleotide
ucuuauguucgagagccuu

SEQ ID NO: 49966 - RNA, 19 nt, Artificial Sequence
  Description of Artificial Sequence: Synthetic oligonucleotide
ugcauaauucaagucugau

SEQ ID NO: 49967 - RNA, 19 nt, Artificial Sequence
  Description of Artificial Sequence: Synthetic oligonucleotide
auacgauucuuauguucga

SEQ ID NO: 49968 - RNA, 19 nt, Artificial Sequence
  Description of Artificial Sequence: Synthetic oligonucleotide
caacgucguacuguggucc

SEQ ID NO: 49969 - RNA, 19 nt, Artificial Sequence
  Description of Artificial Sequence: Synthetic oligonucleotide
acgucggucaucccugucu

SEQ ID NO: 49970 - RNA, 19 nt, Artificial Sequence
  Description of Artificial Sequence: Synthetic oligonucleotide
uacgccaggaugaccguuc

SEQ ID NO: 49971 - RNA, 19 nt, Artificial Sequence
  Description of Artificial Sequence: Synthetic oligonucleotide
ucaacgucguacugugguc

SEQ ID NO: 49972 - RNA, 19 nt, Artificial Sequence
  Description of Artificial Sequence: Synthetic oligonucleotide
uucccgacgucggucaucc

SEQ ID NO: 49973 - RNA, 19 nt, Artificial Sequence
  Description of Artificial Sequence: Synthetic oligonucleotide
gcauaauucaagucugauc

SEQ ID NO: 49974 - RNA, 19 nt, Artificial Sequence
  Description of Artificial Sequence: Synthetic oligonucleotide
auacgaaccugcaggucac

SEQ ID NO: 49975 - RNA, 19 nt, Artificial Sequence
  Description of Artificial Sequence: Synthetic oligonucleotide
ugauguucuuuucgugaau

SEQ ID NO: 49976 - RNA, 19 nt, Artificial Sequence
  Description of Artificial Sequence: Synthetic oligonucleotide
uuaauccuuuguuccucgu

SEQ ID NO: 49977 - RNA, 19 nt, Artificial Sequence
  Description of Artificial Sequence: Synthetic oligonucleotide
aacugccuaaauguaguua

SEQ ID NO: 49978 - RNA, 19 nt, Artificial Sequence
  Description of Artificial Sequence: Synthetic oligonucleotide
ugccuaaauguaguuaaua

SEQ ID NO: 49979 - RNA, 19 nt, Artificial Sequence
  Description of Artificial Sequence: Synthetic oligonucleotide
agcuuccccuaucaucauc

SEQ ID NO: 49980 - RNA, 19 nt, Artificial Sequence
  Description of Artificial Sequence: Synthetic oligonucleotide
uuaguacgacgaagggacu

SEQ ID NO: 49981 - RNA, 19 nt, Artificial Sequence
  Description of Artificial Sequence: Synthetic oligonucleotide
ucagaucacgucgaucauc

SEQ ID NO: 49982 - RNA, 19 nt, Artificial Sequence
  Description of Artificial Sequence: Synthetic oligonucleotide
ggauccguuccuucucucg

SEQ ID NO: 49983 - RNA, 19 nt, Artificial Sequence
  Description of Artificial Sequence: Synthetic oligonucleotide
caguguuugcaaugucuac

SEQ ID NO: 49984 - RNA, 19 nt, Artificial Sequence
  Description of Artificial Sequence: Synthetic oligonucleotide
ucucguucucucucucucu

SEQ ID NO: 49985 - RNA, 19 nt, Artificial Sequence
  Description of Artificial Sequence: Synthetic oligonucleotide
cuggaucgaguucuucaag

SEQ ID NO: 49986 - RNA, 19 nt, Artificial Sequence
  Description of Artificial Sequence: Synthetic oligonucleotide
gaacacgacgagguaaauc

SEQ ID NO: 49987 - RNA, 19 nt, Artificial Sequence
  Description of Artificial Sequence: Synthetic oligonucleotide
ucucucucucucucucuug

SEQ ID NO: 49988 - RNA, 19 nt, Artificial Sequence
  Description of Artificial Sequence: Synthetic oligonucleotide
ccaucccacgucuaggucc

SEQ ID NO: 49989 - RNA, 19 nt, Artificial Sequence
  Description of Artificial Sequence: Synthetic oligonucleotide
uucagacucucaagacgcu

SEQ ID NO: 49990 - RNA, 19 nt, Artificial Sequence
  Description of Artificial Sequence: Synthetic oligonucleotide
ggcgauuaugccuuucuuc

SEQ ID NO: 49991 - RNA, 19 nt, Artificial Sequence
  Description of Artificial Sequence: Synthetic oligonucleotide
cugucucuaucaucacggc

SEQ ID NO: 49992 - RNA, 19 nt, Artificial Sequence
  Description of Artificial Sequence: Synthetic oligonucleotide
caucaucccgagucucucc

SEQ ID NO: 49993 - RNA, 19 nt, Artificial Sequence
  Description of Artificial Sequence: Synthetic oligonucleotide
uucucucucucucucucuu

SEQ ID NO: 49994 - RNA, 19 nt, Artificial Sequence
  Description of Artificial Sequence: Synthetic oligonucleotide
cugcaucuacuauggcccg

SEQ ID NO: 49995 - RNA, 19 nt, Artificial Sequence
  Description of Artificial Sequence: Synthetic oligonucleotide
ucaucgggaccacgccuag

SEQ ID NO: 49996 - RNA, 19 nt, Artificial Sequence
  Description of Artificial Sequence: Synthetic oligonucleotide
cuaucaucaucggcauucc

SEQ ID NO: 49997 - RNA, 19 nt, Artificial Sequence
  Description of Artificial Sequence: Synthetic oligonucleotide
cucgaguugcauaauucaa

SEQ ID NO: 49998 - RNA, 19 nt, Artificial Sequence
  Description of Artificial Sequence: Synthetic oligonucleotide
caaacgcuuagcucuuuca

SEQ ID NO: 49999 - RNA, 19 nt, Artificial Sequence
  Description of Artificial Sequence: Synthetic oligonucleotide
gaaagugggucaucaccaa

SEQ ID NO: 50000 - RNA, 19 nt, Artificial Sequence
  Description of Artificial Sequence: Synthetic oligonucleotide
ugugugacgccagcuuccc

SEQ ID NO: 50001 - RNA, 19 nt, Artificial Sequence
  Description of Artificial Sequence: Synthetic oligonucleotide
gucgacgagccagaauccg

SEQ ID NO: 50002 - RNA, 19 nt, Artificial Sequence
  Description of Artificial Sequence: Synthetic oligonucleotide
guaaaucccgaucuucagu

SEQ ID NO: 50003 - RNA, 19 nt, Artificial Sequence
  Description of Artificial Sequence: Synthetic oligonucleotide
aacauucgugacauacgau

SEQ ID NO: 50004 - RNA, 19 nt, Artificial Sequence
  Description of Artificial Sequence: Synthetic oligonucleotide
uaguacgacgaagggacuc

SEQ ID NO: 50005 - RNA, 19 nt, Artificial Sequence
  Description of Artificial Sequence: Synthetic oligonucleotide
uugauucuucaggcguucc

SEQ ID NO: 50006 - RNA, 19 nt, Artificial Sequence
  Description of Artificial Sequence: Synthetic oligonucleotide
cucgccugggaauucuauc

SEQ ID NO: 50007 - RNA, 19 nt, Artificial Sequence
  Description of Artificial Sequence: Synthetic oligonucleotide
auauagguguuaacaccug

SEQ ID NO: 50008 - RNA, 19 nt, Artificial Sequence
  Description of Artificial Sequence: Synthetic oligonucleotide
cagaguccgagaaguauga

SEQ ID NO: 50009 - RNA, 19 nt, Artificial Sequence
  Description of Artificial Sequence: Synthetic oligonucleotide
cagaucacgucgaucaucu

SEQ ID NO: 50010 - RNA, 19 nt, Artificial Sequence
  Description of Artificial Sequence: Synthetic oligonucleotide
ucugucgacgagccagaau

SEQ ID NO: 50011 - RNA, 19 nt, Artificial Sequence
  Description of Artificial Sequence: Synthetic oligonucleotide
aucauccauauuucuccaa

SEQ ID NO: 50012 - RNA, 19 nt, Artificial Sequence
  Description of Artificial Sequence: Synthetic oligonucleotide
cucucucucucuugaaaga

SEQ ID NO: 50013 - RNA, 19 nt, Artificial Sequence
  Description of Artificial Sequence: Synthetic oligonucleotide
ccucaauugucugucgacg

SEQ ID NO: 50014 - RNA, 19 nt, Artificial Sequence
  Description of Artificial Sequence: Synthetic oligonucleotide
cucguucucucucucucuc

SEQ ID NO: 50015 - RNA, 19 nt, Artificial Sequence
  Description of Artificial Sequence: Synthetic oligonucleotide
caauuuagacugggugaag

SEQ ID NO: 50016 - RNA, 19 nt, Artificial Sequence
  Description of Artificial Sequence: Synthetic oligonucleotide
ggggauucgaucaucaucu

SEQ ID NO: 50017 - RNA, 19 nt, Artificial Sequence
  Description of Artificial Sequence: Synthetic oligonucleotide
caagacgcucuuuccuuuc

SEQ ID NO: 50018 - RNA, 19 nt, Artificial Sequence
  Description of Artificial Sequence: Synthetic oligonucleotide
ccguacuuucugaagcucc

SEQ ID NO: 50019 - RNA, 19 nt, Artificial Sequence
  Description of Artificial Sequence: Synthetic oligonucleotide
cccacuaaugaugggaaag

SEQ ID NO: 50020 - RNA, 19 nt, Artificial Sequence
  Description of Artificial Sequence: Synthetic oligonucleotide
auuacgccaggaugaccgu

SEQ ID NO: 50021 - RNA, 19 nt, Artificial Sequence
  Description of Artificial Sequence: Synthetic oligonucleotide
gcgauuaugccuuucuucu

SEQ ID NO: 50022 - RNA, 19 nt, Artificial Sequence
  Description of Artificial Sequence: Synthetic oligonucleotide
cuuccaggcgauuaugccu

SEQ ID NO: 50023 - RNA, 19 nt, Artificial Sequence
  Description of Artificial Sequence: Synthetic oligonucleotide
uacgacgaagggacucccu

SEQ ID NO: 50024 - RNA, 19 nt, Artificial Sequence
  Description of Artificial Sequence: Synthetic oligonucleotide
ucguucucucucucucucu

SEQ ID NO: 50025 - RNA, 19 nt, Artificial Sequence
  Description of Artificial Sequence: Synthetic oligonucleotide
acgccuaggcccucuguca

SEQ ID NO: 50026 - RNA, 19 nt, Artificial Sequence
  Description of Artificial Sequence: Synthetic oligonucleotide
cuacuauggcccguuccag

SEQ ID NO: 50027 - RNA, 19 nt, Artificial Sequence
  Description of Artificial Sequence: Synthetic oligonucleotide
cauccaacccucgccuggg

SEQ ID NO: 50028 - RNA, 19 nt, Artificial Sequence
  Description of Artificial Sequence: Synthetic oligonucleotide
ucaucacggcgacuugaau

SEQ ID NO: 50029 - RNA, 19 nt, Artificial Sequence
  Description of Artificial Sequence: Synthetic oligonucleotide
cuaucaucacggcgacuug

SEQ ID NO: 50030 - RNA, 19 nt, Artificial Sequence
  Description of Artificial Sequence: Synthetic oligonucleotide
ucccacuaaugaugggaaa

SEQ ID NO: 50031 - RNA, 19 nt, Artificial Sequence
  Description of Artificial Sequence: Synthetic oligonucleotide
uccugucaucagcucgucu

SEQ ID NO: 50032 - RNA, 19 nt, Artificial Sequence
  Description of Artificial Sequence: Synthetic oligonucleotide
cucucucucucucucuuga

SEQ ID NO: 50033 - RNA, 19 nt, Artificial Sequence
  Description of Artificial Sequence: Synthetic oligonucleotide
caggcggucuucaucucuc

SEQ ID NO: 50034 - RNA, 19 nt, Artificial Sequence
  Description of Artificial Sequence: Synthetic oligonucleotide
cugcuaaccgcucuucaaa

SEQ ID NO: 50035 - RNA, 19 nt, Artificial Sequence
  Description of Artificial Sequence: Synthetic oligonucleotide
ucucucucucucucuugaa

SEQ ID NO: 50036 - RNA, 19 nt, Artificial Sequence
  Description of Artificial Sequence: Synthetic oligonucleotide
cuucaggcguuccugaagu

SEQ ID NO: 50037 - RNA, 19 nt, Artificial Sequence
  Description of Artificial Sequence: Synthetic oligonucleotide
ggaauuuccuccaaacgcu

SEQ ID NO: 50038 - RNA, 19 nt, Artificial Sequence
  Description of Artificial Sequence: Synthetic oligonucleotide
ucccuaucuuucucugcuc

SEQ ID NO: 50039 - RNA, 19 nt, Artificial Sequence
  Description of Artificial Sequence: Synthetic oligonucleotide
gauucucgagguggacccc

SEQ ID NO: 50040 - RNA, 19 nt, Artificial Sequence
  Description of Artificial Sequence: Synthetic oligonucleotide
auucucgagguggacccca

SEQ ID NO: 50041 - RNA, 19 nt, Artificial Sequence
  Description of Artificial Sequence: Synthetic oligonucleotide
ggauggacggucaucaucu

SEQ ID NO: 50042 - RNA, 19 nt, Artificial Sequence
  Description of Artificial Sequence: Synthetic oligonucleotide
ccaagauauagguguuaac

SEQ ID NO: 50043 - RNA, 19 nt, Artificial Sequence
  Description of Artificial Sequence: Synthetic oligonucleotide
uaccaagauauagguguua

SEQ ID NO: 50044 - RNA, 19 nt, Artificial Sequence
  Description of Artificial Sequence: Synthetic oligonucleotide
acggcgacuugaaucucuc

SEQ ID NO: 50045 - RNA, 19 nt, Artificial Sequence
  Description of Artificial Sequence: Synthetic oligonucleotide
cucucucucucucuugaaa

SEQ ID NO: 50046 - RNA, 19 nt, Artificial Sequence
  Description of Artificial Sequence: Synthetic oligonucleotide
ucucgagguggaccccaac

SEQ ID NO: 50047 - RNA, 19 nt, Artificial Sequence
  Description of Artificial Sequence: Synthetic oligonucleotide
ucccgagucucuccucguc

SEQ ID NO: 50048 - RNA, 19 nt, Artificial Sequence
  Description of Artificial Sequence: Synthetic oligonucleotide
ugcaccucgccugggaauu

SEQ ID NO: 50049 - RNA, 19 nt, Artificial Sequence
  Description of Artificial Sequence: Synthetic oligonucleotide
ccaacccucgccuggggcc

SEQ ID NO: 50050 - RNA, 19 nt, Artificial Sequence
  Description of Artificial Sequence: Synthetic oligonucleotide
caauacgaaccugcagguc

SEQ ID NO: 50051 - RNA, 19 nt, Artificial Sequence
  Description of Artificial Sequence: Synthetic oligonucleotide
gaucucuaucuuccaacau

SEQ ID NO: 50052 - RNA, 19 nt, Artificial Sequence
  Description of Artificial Sequence: Synthetic oligonucleotide
aggcgauuaugccuuucuu

SEQ ID NO: 50053 - RNA, 19 nt, Artificial Sequence
  Description of Artificial Sequence: Synthetic oligonucleotide
auaccaagauauagguguu

SEQ ID NO: 50054 - RNA, 19 nt, Artificial Sequence
  Description of Artificial Sequence: Synthetic oligonucleotide
acgacgagguaaaucccga

SEQ ID NO: 50055 - RNA, 19 nt, Artificial Sequence
  Description of Artificial Sequence: Synthetic oligonucleotide
agcgucucaggcggucuuc

SEQ ID NO: 50056 - RNA, 19 nt, Artificial Sequence
  Description of Artificial Sequence: Synthetic oligonucleotide
uucucgagguggaccccaa

SEQ ID NO: 50057 - RNA, 19 nt, Artificial Sequence
  Description of Artificial Sequence: Synthetic oligonucleotide
cucucagaucacgucgauc

SEQ ID NO: 50058 - RNA, 19 nt, Artificial Sequence
  Description of Artificial Sequence: Synthetic oligonucleotide
aauucgccugggaggccug

SEQ ID NO: 50059 - RNA, 19 nt, Artificial Sequence
  Description of Artificial Sequence: Synthetic oligonucleotide
guacgacgaagggacuccc

SEQ ID NO: 50060 - RNA, 19 nt, Artificial Sequence
  Description of Artificial Sequence: Synthetic oligonucleotide
uuccuccaagguccucggu

SEQ ID NO: 50061 - RNA, 19 nt, Artificial Sequence
  Description of Artificial Sequence: Synthetic oligonucleotide
guacugugguccauccauc

SEQ ID NO: 50062 - RNA, 19 nt, Artificial Sequence
  Description of Artificial Sequence: Synthetic oligonucleotide
ggaucgaguucuucaaggu

SEQ ID NO: 50063 - RNA, 19 nt, Artificial Sequence
  Description of Artificial Sequence: Synthetic oligonucleotide
gucacguucuucugauggu

SEQ ID NO: 50064 - RNA, 19 nt, Artificial Sequence
  Description of Artificial Sequence: Synthetic oligonucleotide
gacauacgauucuuauguu

SEQ ID NO: 50065 - RNA, 19 nt, Artificial Sequence
  Description of Artificial Sequence: Synthetic oligonucleotide
uuucccgacgucggucauc

SEQ ID NO: 50066 - RNA, 19 nt, Artificial Sequence
  Description of Artificial Sequence: Synthetic oligonucleotide
gagucgcaucacaaauaga

SEQ ID NO: 50067 - RNA, 19 nt, Artificial Sequence
  Description of Artificial Sequence: Synthetic oligonucleotide
cgucgaucaucucuuuccc

SEQ ID NO: 50068 - RNA, 19 nt, Artificial Sequence
  Description of Artificial Sequence: Synthetic oligonucleotide
ucccgaucuucaguccggu

SEQ ID NO: 50069 - RNA, 19 nt, Artificial Sequence
  Description of Artificial Sequence: Synthetic oligonucleotide
cuucaucgggaccacgccu

SEQ ID NO: 50070 - RNA, 19 nt, Artificial Sequence
  Description of Artificial Sequence: Synthetic oligonucleotide
uacgaaccugcaggucaca

SEQ ID NO: 50071 - RNA, 19 nt, Artificial Sequence
  Description of Artificial Sequence: Synthetic oligonucleotide
gggauucgaucaucaucug

SEQ ID NO: 50072 - RNA, 19 nt, Artificial Sequence
  Description of Artificial Sequence: Synthetic oligonucleotide
gcgccguucucuuucuuca

SEQ ID NO: 50073 - RNA, 19 nt, Artificial Sequence
  Description of Artificial Sequence: Synthetic oligonucleotide
ccgacgucggucaucccug

SEQ ID NO: 50074 - RNA, 19 nt, Artificial Sequence
  Description of Artificial Sequence: Synthetic oligonucleotide
agguggaccccaacucucu

SEQ ID NO: 50075 - RNA, 19 nt, Artificial Sequence
  Description of Artificial Sequence: Synthetic oligonucleotide
caucccacgucuagguccu

SEQ ID NO: 50076 - RNA, 19 nt, Artificial Sequence
  Description of Artificial Sequence: Synthetic oligonucleotide
gacgucggucaucccuguc

SEQ ID NO: 50077 - RNA, 19 nt, Artificial Sequence
  Description of Artificial Sequence: Synthetic oligonucleotide
agaguccgagaaguaugau

SEQ ID NO: 50078 - RNA, 19 nt, Artificial Sequence
  Description of Artificial Sequence: Synthetic oligonucleotide
guucucucucucucucucu

SEQ ID NO: 50079 - RNA, 19 nt, Artificial Sequence
  Description of Artificial Sequence: Synthetic oligonucleotide
caggcgauuaugccuuucu

SEQ ID NO: 50080 - RNA, 19 nt, Artificial Sequence
  Description of Artificial Sequence: Synthetic oligonucleotide
accuuaccuucaaauuaau

SEQ ID NO: 50081 - RNA, 19 nt, Artificial Sequence
  Description of Artificial Sequence: Synthetic oligonucleotide
ccaaacgcuuagcucuuuc

SEQ ID NO: 50082 - RNA, 19 nt, Artificial Sequence
  Description of Artificial Sequence: Synthetic oligonucleotide
cacgcuggauauucagacu

SEQ ID NO: 50083 - RNA, 19 nt, Artificial Sequence
  Description of Artificial Sequence: Synthetic oligonucleotide
cuagcugcauugugguaau

SEQ ID NO: 50084 - RNA, 19 nt, Artificial Sequence
  Description of Artificial Sequence: Synthetic oligonucleotide
ggcccguuccaguuggaaa

SEQ ID NO: 50085 - RNA, 19 nt, Artificial Sequence
  Description of Artificial Sequence: Synthetic oligonucleotide
uuacgccaggauggacggu

SEQ ID NO: 50086 - RNA, 19 nt, Artificial Sequence
  Description of Artificial Sequence: Synthetic oligonucleotide
cacggcgacuugaaucucu

SEQ ID NO: 50087 - RNA, 19 nt, Artificial Sequence
  Description of Artificial Sequence: Synthetic oligonucleotide
cguucucucucucucucuc

SEQ ID NO: 50088 - RNA, 19 nt, Artificial Sequence
  Description of Artificial Sequence: Synthetic oligonucleotide
ucacggcgacuugaaucuc

SEQ ID NO: 50089 - RNA, 19 nt, Artificial Sequence
  Description of Artificial Sequence: Synthetic oligonucleotide
guccucggucaucauccaa

SEQ ID NO: 50090 - RNA, 19 nt, Artificial Sequence
  Description of Artificial Sequence: Synthetic oligonucleotide
caauucgccugggaggccu

SEQ ID NO: 50091 - RNA, 19 nt, Artificial Sequence
  Description of Artificial Sequence: Synthetic oligonucleotide
ucagacccauuggcuuaaa

SEQ ID NO: 50092 - RNA, 19 nt, Artificial Sequence
  Description of Artificial Sequence: Synthetic oligonucleotide
agacugccgggcagcuuug

SEQ ID NO: 50093 - RNA, 19 nt, Artificial Sequence
  Description of Artificial Sequence: Synthetic oligonucleotide
cguacugugguccauccau

SEQ ID NO: 50094 - RNA, 19 nt, Artificial Sequence
  Description of Artificial Sequence: Synthetic oligonucleotide
gcauuacgccaggauggac

SEQ ID NO: 50095 - RNA, 19 nt, Artificial Sequence
  Description of Artificial Sequence: Synthetic oligonucleotide
cgugacauacgauucuuau

SEQ ID NO: 50096 - RNA, 19 nt, Artificial Sequence
  Description of Artificial Sequence: Synthetic oligonucleotide
ucccgacgucggucauccc

SEQ ID NO: 50097 - RNA, 19 nt, Artificial Sequence
  Description of Artificial Sequence: Synthetic oligonucleotide
cucagaucacgucgaucau

SEQ ID NO: 50098 - RNA, 19 nt, Artificial Sequence
  Description of Artificial Sequence: Synthetic oligonucleotide
cuggggauucgaucaucau

SEQ ID NO: 50099 - RNA, 19 nt, Artificial Sequence
  Description of Artificial Sequence: Synthetic oligonucleotide
cccauugcaaccaguguuu

SEQ ID NO: 50100 - RNA, 19 nt, Artificial Sequence
  Description of Artificial Sequence: Synthetic oligonucleotide
ccucucgaucuugacuguc

SEQ ID NO: 50101 - RNA, 19 nt, Artificial Sequence
  Description of Artificial Sequence: Synthetic oligonucleotide
gucugucgacgagccagaa

SEQ ID NO: 50102 - RNA, 19 nt, Artificial Sequence
  Description of Artificial Sequence: Synthetic oligonucleotide
caagcgucucaggcggucu

SEQ ID NO: 50103 - RNA, 19 nt, Artificial Sequence
  Description of Artificial Sequence: Synthetic oligonucleotide
cggcgacuugaaucucucc

SEQ ID NO: 50104 - RNA, 19 nt, Artificial Sequence
  Description of Artificial Sequence: Synthetic oligonucleotide
cccgaucuucaguccgguc

SEQ ID NO: 50105 - RNA, 19 nt, Artificial Sequence
  Description of Artificial Sequence: Synthetic oligonucleotide
ccaauucgccugggaggcc

SEQ ID NO: 50106 - RNA, 19 nt, Artificial Sequence
  Description of Artificial Sequence: Synthetic oligonucleotide
cccgacgucggucaucccu

SEQ ID NO: 50107 - RNA, 19 nt, Artificial Sequence
  Description of Artificial Sequence: Synthetic oligonucleotide
ccucuacgagaaaaucuau

SEQ ID NO: 50108 - RNA, 19 nt, Artificial Sequence
  Description of Artificial Sequence: Synthetic oligonucleotide
caggauggacggucaucau

SEQ ID NO: 50109 - RNA, 19 nt, Artificial Sequence
  Description of Artificial Sequence: Synthetic oligonucleotide
ccaggcgauuaugccuuuc

SEQ ID NO: 50110 - RNA, 19 nt, Artificial Sequence
  Description of Artificial Sequence: Synthetic oligonucleotide
cuuucccgacgucggucau

SEQ ID NO: 50111 - RNA, 19 nt, Artificial Sequence
  Description of Artificial Sequence: Synthetic oligonucleotide
cucuaucaucacggcgacu

SEQ ID NO: 50112 - RNA, 19 nt, Artificial Sequence
  Description of Artificial Sequence: Synthetic oligonucleotide
ccgucucaguggucuguca

SEQ ID NO: 50113 - RNA, 19 nt, Artificial Sequence
  Description of Artificial Sequence: Synthetic oligonucleotide
cccgagucucuccucgucu

SEQ ID NO: 50114 - RNA, 19 nt, Artificial Sequence
  Description of Artificial Sequence: Synthetic oligonucleotide
caccucgccugggaauucu

SEQ ID NO: 50115 - RNA, 19 nt, Artificial Sequence
  Description of Artificial Sequence: Synthetic oligonucleotide
ggaacacgacgagguaaau

SEQ ID NO: 50116 - RNA, 19 nt, Artificial Sequence
  Description of Artificial Sequence: Synthetic oligonucleotide
gcaccucgccugggaauuc

SEQ ID NO: 50117 - RNA, 19 nt, Artificial Sequence
  Description of Artificial Sequence: Synthetic oligonucleotide
ccucgccugggaauucuau

SEQ ID NO: 50118 - RNA, 19 nt, Artificial Sequence
  Description of Artificial Sequence: Synthetic oligonucleotide
cccaagcgucucaggcggu

SEQ ID NO: 50119 - RNA, 19 nt, Artificial Sequence
  Description of Artificial Sequence: Synthetic oligonucleotide
cggucaucccugucucuau

SEQ ID NO: 50120 - RNA, 19 nt, Artificial Sequence
  Description of Artificial Sequence: Synthetic oligonucleotide
cgacgucggucaucccugu

SEQ ID NO: 50121 - RNA, 19 nt, Artificial Sequence
  Description of Artificial Sequence: Synthetic oligonucleotide
aaauaaaacugcuauguac

SEQ ID NO: 50122 - RNA, 19 nt, Artificial Sequence
  Description of Artificial Sequence: Synthetic oligonucleotide
aacuauaacaguuuggucu

SEQ ID NO: 50123 - RNA, 19 nt, Artificial Sequence
  Description of Artificial Sequence: Synthetic oligonucleotide
aauauugguuuauaaggac

SEQ ID NO: 50124 - RNA, 19 nt, Artificial Sequence
  Description of Artificial Sequence: Synthetic oligonucleotide
aacacugcgauacacguuc

SEQ ID NO: 50125 - RNA, 19 nt, Artificial Sequence
  Description of Artificial Sequence: Synthetic oligonucleotide
auaagcuaaccuuugauuc

SEQ ID NO: 50126 - RNA, 19 nt, Artificial Sequence
  Description of Artificial Sequence: Synthetic oligonucleotide
aauacgguauuacaauacg

SEQ ID NO: 50127 - RNA, 19 nt, Artificial Sequence
  Description of Artificial Sequence: Synthetic oligonucleotide
uuaacuagcauacaacaca

SEQ ID NO: 50128 - RNA, 19 nt, Artificial Sequence
  Description of Artificial Sequence: Synthetic oligonucleotide
uuagucauuagacuuuggg

SEQ ID NO: 50129 - RNA, 19 nt, Artificial Sequence
  Description of Artificial Sequence: Synthetic oligonucleotide
ugcaauucuauuuacagac

SEQ ID NO: 50130 - RNA, 19 nt, Artificial Sequence
  Description of Artificial Sequence: Synthetic oligonucleotide
aaacauacaccacgcauac

SEQ ID NO: 50131 - RNA, 19 nt, Artificial Sequence
  Description of Artificial Sequence: Synthetic oligonucleotide
acauacgccaguuaagccc

SEQ ID NO: 50132 - RNA, 19 nt, Artificial Sequence
  Description of Artificial Sequence: Synthetic oligonucleotide
ucgacuuaaauaaaacugc

SEQ ID NO: 50133 - RNA, 19 nt, Artificial Sequence
  Description of Artificial Sequence: Synthetic oligonucleotide
auguguaugaguugagugc

SEQ ID NO: 50134 - RNA, 19 nt, Artificial Sequence
  Description of Artificial Sequence: Synthetic oligonucleotide
guuggaaggaauuuggucc

SEQ ID NO: 50135 - RNA, 19 nt, Artificial Sequence
  Description of Artificial Sequence: Synthetic oligonucleotide
uggaccuuaggucacacgg

SEQ ID NO: 50136 - RNA, 19 nt, Artificial Sequence
  Description of Artificial Sequence: Synthetic oligonucleotide
uuaguuuucacgacuaacu

SEQ ID NO: 50137 - RNA, 19 nt, Artificial Sequence
  Description of Artificial Sequence: Synthetic oligonucleotide
aaugugagcggacuguauc

SEQ ID NO: 50138 - RNA, 19 nt, Artificial Sequence
  Description of Artificial Sequence: Synthetic oligonucleotide
ugaauuugagguacuaugc

SEQ ID NO: 50139 - RNA, 19 nt, Artificial Sequence
  Description of Artificial Sequence: Synthetic oligonucleotide
guaacguucagccauuccg

SEQ ID NO: 50140 - RNA, 19 nt, Artificial Sequence
  Description of Artificial Sequence: Synthetic oligonucleotide
uggaaaucuaucuagagua

SEQ ID NO: 50141 - RNA, 19 nt, Artificial Sequence
  Description of Artificial Sequence: Synthetic oligonucleotide
uucagcucggaccacacgg

SEQ ID NO: 50142 - RNA, 19 nt, Artificial Sequence
  Description of Artificial Sequence: Synthetic oligonucleotide
ugaagugguaagaucacag

SEQ ID NO: 50143 - RNA, 19 nt, Artificial Sequence
  Description of Artificial Sequence: Synthetic oligonucleotide
aaaagcauguaccccguag

SEQ ID NO: 50144 - RNA, 19 nt, Artificial Sequence
  Description of Artificial Sequence: Synthetic oligonucleotide
aauuugagguacuaugcca

SEQ ID NO: 50145 - RNA, 19 nt, Artificial Sequence
  Description of Artificial Sequence: Synthetic oligonucleotide
uuaaauguguaugaguuga

SEQ ID NO: 50146 - RNA, 19 nt, Artificial Sequence
  Description of Artificial Sequence: Synthetic oligonucleotide
acaaccaagagccagguga

SEQ ID NO: 50147 - RNA, 19 nt, Artificial Sequence
  Description of Artificial Sequence: Synthetic oligonucleotide
aucaacuacacaugaaguc

SEQ ID NO: 50148 - RNA, 19 nt, Artificial Sequence
  Description of Artificial Sequence: Synthetic oligonucleotide
aaauacgguauuacaauac

SEQ ID NO: 50149 - RNA, 19 nt, Artificial Sequence
  Description of Artificial Sequence: Synthetic oligonucleotide
aguuaagcccauuaacugg

SEQ ID NO: 50150 - RNA, 19 nt, Artificial Sequence
  Description of Artificial Sequence: Synthetic oligonucleotide
cuagcauacaacacaaagc

SEQ ID NO: 50151 - RNA, 19 nt, Artificial Sequence
  Description of Artificial Sequence: Synthetic oligonucleotide
agaugagauaaauauagga

SEQ ID NO: 50152 - RNA, 19 nt, Artificial Sequence
  Description of Artificial Sequence: Synthetic oligonucleotide
acgacuaacucauuuccgc

SEQ ID NO: 50153 - RNA, 19 nt, Artificial Sequence
  Description of Artificial Sequence: Synthetic oligonucleotide
ucuagaguaaacuggccag

SEQ ID NO: 50154 - RNA, 19 nt, Artificial Sequence
  Description of Artificial Sequence: Synthetic oligonucleotide
aagcuaaacugauuaguag

SEQ ID NO: 50155 - RNA, 19 nt, Artificial Sequence
  Description of Artificial Sequence: Synthetic oligonucleotide
ucaacuacacaugaagucc

SEQ ID NO: 50156 - RNA, 19 nt, Artificial Sequence
  Description of Artificial Sequence: Synthetic oligonucleotide
uguaucgacuuaaauaaaa

SEQ ID NO: 50157 - RNA, 19 nt, Artificial Sequence
  Description of Artificial Sequence: Synthetic oligonucleotide
uaucgacuuaaauaaaacu

SEQ ID NO: 50158 - RNA, 19 nt, Artificial Sequence
  Description of Artificial Sequence: Synthetic oligonucleotide
aucgacuuaaauaaaacug

SEQ ID NO: 50159 - RNA, 19 nt, Artificial Sequence
  Description of Artificial Sequence: Synthetic oligonucleotide
uuaagguaaacaauucaau

SEQ ID NO: 50160 - RNA, 19 nt, Artificial Sequence
  Description of Artificial Sequence: Synthetic oligonucleotide
uacgaauaguuucaacaag

SEQ ID NO: 50161 - RNA, 19 nt, Artificial Sequence
  Description of Artificial Sequence: Synthetic oligonucleotide
auaguuucaacaagaauag

SEQ ID NO: 50162 - RNA, 19 nt, Artificial Sequence
  Description of Artificial Sequence: Synthetic oligonucleotide
aucgcuuuaagguaaacaa

SEQ ID NO: 50163 - RNA, 19 nt, Artificial Sequence
  Description of Artificial Sequence: Synthetic oligonucleotide
gaauuugagguacuaugcc

SEQ ID NO: 50164 - RNA, 19 nt, Artificial Sequence
  Description of Artificial Sequence: Synthetic oligonucleotide
uccaacuuaaggaaguguc

SEQ ID NO: 50165 - RNA, 19 nt, Artificial Sequence
  Description of Artificial Sequence: Synthetic oligonucleotide
ugugccagauauuaugagc

SEQ ID NO: 50166 - RNA, 19 nt, Artificial Sequence
  Description of Artificial Sequence: Synthetic oligonucleotide
agcuguaucaucugacccg

SEQ ID NO: 50167 - RNA, 19 nt, Artificial Sequence
  Description of Artificial Sequence: Synthetic oligonucleotide
ucuacauacgccaguuaag

SEQ ID NO: 50168 - RNA, 19 nt, Artificial Sequence
  Description of Artificial Sequence: Synthetic oligonucleotide
uggagguuaguuuucacga

SEQ ID NO: 50169 - RNA, 19 nt, Artificial Sequence
  Description of Artificial Sequence: Synthetic oligonucleotide
uuaguaguuugccuacucc

SEQ ID NO: 50170 - RNA, 19 nt, Artificial Sequence
  Description of Artificial Sequence: Synthetic oligonucleotide
agcuaaacugauuaguagu

SEQ ID NO: 50171 - RNA, 19 nt, Artificial Sequence
  Description of Artificial Sequence: Synthetic oligonucleotide
uacgguauuacaauacgaa

SEQ ID NO: 50172 - RNA, 19 nt, Artificial Sequence
  Description of Artificial Sequence: Synthetic oligonucleotide
acaacuauaacaguuuggu

SEQ ID NO: 50173 - RNA, 19 nt, Artificial Sequence
  Description of Artificial Sequence: Synthetic oligonucleotide
gucacacggguuuagaugc

SEQ ID NO: 50174 - RNA, 19 nt, Artificial Sequence
  Description of Artificial Sequence: Synthetic oligonucleotide
gucuuauuaugcaugaaag

SEQ ID NO: 50175 - RNA, 19 nt, Artificial Sequence
  Description of Artificial Sequence: Synthetic oligonucleotide
acuuguaacguucagccau

SEQ ID NO: 50176 - RNA, 19 nt, Artificial Sequence
  Description of Artificial Sequence: Synthetic oligonucleotide
aaacccagcucuacgaagg

SEQ ID NO: 50177 - RNA, 19 nt, Artificial Sequence
  Description of Artificial Sequence: Synthetic oligonucleotide
aaaucauuuuauugacccu

SEQ ID NO: 50178 - RNA, 19 nt, Artificial Sequence
  Description of Artificial Sequence: Synthetic oligonucleotide
ugugugccagauauuauga

SEQ ID NO: 50179 - RNA, 19 nt, Artificial Sequence
  Description of Artificial Sequence: Synthetic oligonucleotide
uuuauugacccuuuaccau

SEQ ID NO: 50180 - RNA, 19 nt, Artificial Sequence
  Description of Artificial Sequence: Synthetic oligonucleotide
caguagauaguccucuugg

SEQ ID NO: 50181 - RNA, 19 nt, Artificial Sequence
  Description of Artificial Sequence: Synthetic oligonucleotide
acagaguuuaaagugccgg

SEQ ID NO: 50182 - RNA, 19 nt, Artificial Sequence
  Description of Artificial Sequence: Synthetic oligonucleotide
cuggagguuaguuuucacg

SEQ ID NO: 50183 - RNA, 19 nt, Artificial Sequence
  Description of Artificial Sequence: Synthetic oligonucleotide
uaacguucagccauuccgc

SEQ ID NO: 50184 - RNA, 19 nt, Artificial Sequence
  Description of Artificial Sequence: Synthetic oligonucleotide
gaugucauaaauccuccuc

SEQ ID NO: 50185 - RNA, 19 nt, Artificial Sequence
  Description of Artificial Sequence: Synthetic oligonucleotide
aucuagaguaaacuggcca

SEQ ID NO: 50186 - RNA, 19 nt, Artificial Sequence
  Description of Artificial Sequence: Synthetic oligonucleotide
auacgaauaguuucaacaa

SEQ ID NO: 50187 - RNA, 19 nt, Artificial Sequence
  Description of Artificial Sequence: Synthetic oligonucleotide
gguuuagaugcuuugauca

SEQ ID NO: 50188 - RNA, 19 nt, Artificial Sequence
  Description of Artificial Sequence: Synthetic oligonucleotide
aacauaagcuaaccuuuga

SEQ ID NO: 50189 - RNA, 19 nt, Artificial Sequence
  Description of Artificial Sequence: Synthetic oligonucleotide
augugagcggacuguaucg

SEQ ID NO: 50190 - RNA, 19 nt, Artificial Sequence
  Description of Artificial Sequence: Synthetic oligonucleotide
aaucgcuuuaagguaaaca

SEQ ID NO: 50191 - RNA, 19 nt, Artificial Sequence
  Description of Artificial Sequence: Synthetic oligonucleotide
cacaacuauaacaguuugg

SEQ ID NO: 50192 - RNA, 19 nt, Artificial Sequence
  Description of Artificial Sequence: Synthetic oligonucleotide
uuucgaauaucuugauaug

SEQ ID NO: 50193 - RNA, 19 nt, Artificial Sequence
  Description of Artificial Sequence: Synthetic oligonucleotide
ucucagacacacaacuugu

SEQ ID NO: 50194 - RNA, 19 nt, Artificial Sequence
  Description of Artificial Sequence: Synthetic oligonucleotide
uuugaagugguaagaucac

SEQ ID NO: 50195 - RNA, 19 nt, Artificial Sequence
  Description of Artificial Sequence: Synthetic oligonucleotide
ucaacucgauuaaaugugu

SEQ ID NO: 50196 - RNA, 19 nt, Artificial Sequence
  Description of Artificial Sequence: Synthetic oligonucleotide
uuacucauuaguauuccuu

SEQ ID NO: 50197 - RNA, 19 nt, Artificial Sequence
  Description of Artificial Sequence: Synthetic oligonucleotide
uacucaccuacuuugugug

SEQ ID NO: 50198 - RNA, 19 nt, Artificial Sequence
  Description of Artificial Sequence: Synthetic oligonucleotide
ucgauuaaauguguaugag

SEQ ID NO: 50199 - RNA, 19 nt, Artificial Sequence
  Description of Artificial Sequence: Synthetic oligonucleotide
aagcuaaccuuugauucuc

SEQ ID NO: 50200 - RNA, 19 nt, Artificial Sequence
  Description of Artificial Sequence: Synthetic oligonucleotide
cuacauacgccaguuaagc

SEQ ID NO: 50201 - RNA, 19 nt, Artificial Sequence
  Description of Artificial Sequence: Synthetic oligonucleotide
aacuuaaggaagugucccu

SEQ ID NO: 50202 - RNA, 19 nt, Artificial Sequence
  Description of Artificial Sequence: Synthetic oligonucleotide
ugauuaguaguuugccuac

SEQ ID NO: 50203 - RNA, 19 nt, Artificial Sequence
  Description of Artificial Sequence: Synthetic oligonucleotide
acugauuaguaguuugccu

SEQ ID NO: 50204 - RNA, 19 nt, Artificial Sequence
  Description of Artificial Sequence: Synthetic oligonucleotide
caggguacagcuuuggauc

SEQ ID NO: 50205 - RNA, 19 nt, Artificial Sequence
  Description of Artificial Sequence: Synthetic oligonucleotide
agccauuccgcaugugagc

SEQ ID NO: 50206 - RNA, 19 nt, Artificial Sequence
  Description of Artificial Sequence: Synthetic oligonucleotide
uauucaaauuacauccauu

SEQ ID NO: 50207 - RNA, 19 nt, Artificial Sequence
  Description of Artificial Sequence: Synthetic oligonucleotide
gauuaaauguguaugaguu

SEQ ID NO: 50208 - RNA, 19 nt, Artificial Sequence
  Description of Artificial Sequence: Synthetic oligonucleotide
guggcaaagagaauuacac

SEQ ID NO: 50209 - RNA, 19 nt, Artificial Sequence
  Description of Artificial Sequence: Synthetic oligonucleotide
uugcccuuuauacaguuua

SEQ ID NO: 50210 - RNA, 19 nt, Artificial Sequence
  Description of Artificial Sequence: Synthetic oligonucleotide
gaguugagugccuacuaug

SEQ ID NO: 50211 - RNA, 19 nt, Artificial Sequence
  Description of Artificial Sequence: Synthetic oligonucleotide
gaagauuuuggagccuggg

SEQ ID NO: 50212 - RNA, 19 nt, Artificial Sequence
  Description of Artificial Sequence: Synthetic oligonucleotide
uaccccguaggaaagacau

SEQ ID NO: 50213 - RNA, 19 nt, Artificial Sequence
  Description of Artificial Sequence: Synthetic oligonucleotide
ucggucacuucuuuggaca

SEQ ID NO: 50214 - RNA, 19 nt, Artificial Sequence
  Description of Artificial Sequence: Synthetic oligonucleotide
uaucuagaguaaacuggcc

SEQ ID NO: 50215 - RNA, 19 nt, Artificial Sequence
  Description of Artificial Sequence: Synthetic oligonucleotide
uucacgacuaacucauuuc

SEQ ID NO: 50216 - RNA, 19 nt, Artificial Sequence
  Description of Artificial Sequence: Synthetic oligonucleotide
acgccuaacacuguuugac

SEQ ID NO: 50217 - RNA, 19 nt, Artificial Sequence
  Description of Artificial Sequence: Synthetic oligonucleotide
  modified_base (8)..(8): a, c, u, g, unknown or other
ucuuggunagcagaccgag

SEQ ID NO: 50218 - RNA, 19 nt, Artificial Sequence
  Description of Artificial Sequence: Synthetic oligonucleotide
uggacguuguucuuagacu

SEQ ID NO: 50219 - RNA, 19 nt, Artificial Sequence
  Description of Artificial Sequence: Synthetic oligonucleotide
gaugucucaucuacauacg

SEQ ID NO: 50220 - RNA, 19 nt, Artificial Sequence
  Description of Artificial Sequence: Synthetic oligonucleotide
acugcgauacacguucugg

SEQ ID NO: 50221 - RNA, 19 nt, Artificial Sequence
  Description of Artificial Sequence: Synthetic oligonucleotide
uuucacgacuaacucauuu

SEQ ID NO: 50222 - RNA, 19 nt, Artificial Sequence
  Description of Artificial Sequence: Synthetic oligonucleotide
cucaccuacucgcaguggg

SEQ ID NO: 50223 - RNA, 19 nt, Artificial Sequence
  Description of Artificial Sequence: Synthetic oligonucleotide
uagucuaucuccugacaca

SEQ ID NO: 50224 - RNA, 19 nt, Artificial Sequence
  Description of Artificial Sequence: Synthetic oligonucleotide
uuggaaggaauuugguccu

SEQ ID NO: 50225 - RNA, 19 nt, Artificial Sequence
  Description of Artificial Sequence: Synthetic oligonucleotide
uuuuaguagcagcaacuua

SEQ ID NO: 50226 - RNA, 19 nt, Artificial Sequence
  Description of Artificial Sequence: Synthetic oligonucleotide
uacauacgccaguuaagcc

SEQ ID NO: 50227 - RNA, 19 nt, Artificial Sequence
  Description of Artificial Sequence: Synthetic oligonucleotide
cucgauuaaauguguauga

SEQ ID NO: 50228 - RNA, 19 nt, Artificial Sequence
  Description of Artificial Sequence: Synthetic oligonucleotide
uguaccaaguccagaguau

SEQ ID NO: 50229 - RNA, 19 nt, Artificial Sequence
  Description of Artificial Sequence: Synthetic oligonucleotide
guaggugacacaaagccuc

SEQ ID NO: 50230 - RNA, 19 nt, Artificial Sequence
  Description of Artificial Sequence: Synthetic oligonucleotide
cacgacuaacucauuuccg

SEQ ID NO: 50231 - RNA, 19 nt, Artificial Sequence
  Description of Artificial Sequence: Synthetic oligonucleotide
guaaguucacaaagggucc

SEQ ID NO: 50232 - RNA, 19 nt, Artificial Sequence
  Description of Artificial Sequence: Synthetic oligonucleotide
ccagauauuaugagcaaag

SEQ ID NO: 50233 - RNA, 19 nt, Artificial Sequence
  Description of Artificial Sequence: Synthetic oligonucleotide
uuugccuacucccaauguu

SEQ ID NO: 50234 - RNA, 19 nt, Artificial Sequence
  Description of Artificial Sequence: Synthetic oligonucleotide
aaaucgcuuuaagguaaac

SEQ ID NO: 50235 - RNA, 19 nt, Artificial Sequence
  Description of Artificial Sequence: Synthetic oligonucleotide
gaacuagucuaucuccuga

SEQ ID NO: 50236 - RNA, 19 nt, Artificial Sequence
  Description of Artificial Sequence: Synthetic oligonucleotide
uuggcauaaaugguuuccc

SEQ ID NO: 50237 - RNA, 19 nt, Artificial Sequence
  Description of Artificial Sequence: Synthetic oligonucleotide
agaacuagucuaucuccug

SEQ ID NO: 50238 - RNA, 19 nt, Artificial Sequence
  Description of Artificial Sequence: Synthetic oligonucleotide
gugagcuuuuaguagcagc

SEQ ID NO: 50239 - RNA, 19 nt, Artificial Sequence
  Description of Artificial Sequence: Synthetic oligonucleotide
  modified_base (9)..(9): a, c, u, g, unknown or other
uucuuggunagcagaccga

SEQ ID NO: 50240 - RNA, 19 nt, Artificial Sequence
  Description of Artificial Sequence: Synthetic oligonucleotide
ugcuaucucuguacaaaac

SEQ ID NO: 50241 - RNA, 19 nt, Artificial Sequence
  Description of Artificial Sequence: Synthetic oligonucleotide
uaugaguugagugccuacu

SEQ ID NO: 50242 - RNA, 19 nt, Artificial Sequence
  Description of Artificial Sequence: Synthetic oligonucleotide
uggcaguguuuacaaauga

SEQ ID NO: 50243 - RNA, 19 nt, Artificial Sequence
  Description of Artificial Sequence: Synthetic oligonucleotide
gaauugcuaucucuguaca

SEQ ID NO: 50244 - RNA, 19 nt, Artificial Sequence
  Description of Artificial Sequence: Synthetic oligonucleotide
gucgcuauguccugaguug

SEQ ID NO: 50245 - RNA, 19 nt, Artificial Sequence
  Description of Artificial Sequence: Synthetic oligonucleotide
guaggcucucuauugaauc

SEQ ID NO: 50246 - RNA, 19 nt, Artificial Sequence
  Description of Artificial Sequence: Synthetic oligonucleotide
uaguagcagcaacuuaaug

SEQ ID NO: 50247 - RNA, 19 nt, Artificial Sequence
  Description of Artificial Sequence: Synthetic oligonucleotide
aaccucaaugggcccuugg

SEQ ID NO: 50248 - RNA, 19 nt, Artificial Sequence
  Description of Artificial Sequence: Synthetic oligonucleotide
agaguuuaaagugccggug

SEQ ID NO: 50249 - RNA, 19 nt, Artificial Sequence
  Description of Artificial Sequence: Synthetic oligonucleotide
acacgccuaacacuguuug

SEQ ID NO: 50250 - RNA, 19 nt, Artificial Sequence
  Description of Artificial Sequence: Synthetic oligonucleotide
aacguucagccauuccgca

SEQ ID NO: 50251 - RNA, 19 nt, Artificial Sequence
  Description of Artificial Sequence: Synthetic oligonucleotide
ucacuaugggccacucgag

SEQ ID NO: 50252 - RNA, 19 nt, Artificial Sequence
  Description of Artificial Sequence: Synthetic oligonucleotide
ugcauauuguggaaaucua

SEQ ID NO: 50253 - RNA, 19 nt, Artificial Sequence
  Description of Artificial Sequence: Synthetic oligonucleotide
acgguauuacaauacgaau

SEQ ID NO: 50254 - RNA, 19 nt, Artificial Sequence
  Description of Artificial Sequence: Synthetic oligonucleotide
aggcacuuaacacgaagcu

SEQ ID NO: 50255 - RNA, 19 nt, Artificial Sequence
  Description of Artificial Sequence: Synthetic oligonucleotide
ucuacgaagguggcaaaga

SEQ ID NO: 50256 - RNA, 19 nt, Artificial Sequence
  Description of Artificial Sequence: Synthetic oligonucleotide
gaagacuuacucauuagua

SEQ ID NO: 50257 - RNA, 19 nt, Artificial Sequence
  Description of Artificial Sequence: Synthetic oligonucleotide
gaaggaucguaggugacac

SEQ ID NO: 50258 - RNA, 19 nt, Artificial Sequence
  Description of Artificial Sequence: Synthetic oligonucleotide
gguaaauaauggcaaugug

SEQ ID NO: 50259 - RNA, 19 nt, Artificial Sequence
  Description of Artificial Sequence: Synthetic oligonucleotide
guuaguuuucacgacuaac

SEQ ID NO: 50260 - RNA, 19 nt, Artificial Sequence
  Description of Artificial Sequence: Synthetic oligonucleotide
ugagcggacuguaucgacu

SEQ ID NO: 50261 - RNA, 19 nt, Artificial Sequence
  Description of Artificial Sequence: Synthetic oligonucleotide
cugauuaguaguuugccua

SEQ ID NO: 50262 - RNA, 19 nt, Artificial Sequence
  Description of Artificial Sequence: Synthetic oligonucleotide
uguaggcucucuauugaau

SEQ ID NO: 50263 - RNA, 19 nt, Artificial Sequence
  Description of Artificial Sequence: Synthetic oligonucleotide
gagauaaauauaggacaug

SEQ ID NO: 50264 - RNA, 19 nt, Artificial Sequence
  Description of Artificial Sequence: Synthetic oligonucleotide
ucccacuugccuuaaccca

SEQ ID NO: 50265 - RNA, 19 nt, Artificial Sequence
  Description of Artificial Sequence: Synthetic oligonucleotide
aagauagucugcaccuuug

SEQ ID NO: 50266 - RNA, 19 nt, Artificial Sequence
  Description of Artificial Sequence: Synthetic oligonucleotide
uuugaucaguagagguucu

SEQ ID NO: 50267 - RNA, 19 nt, Artificial Sequence
  Description of Artificial Sequence: Synthetic oligonucleotide
ccuacuaugugccuccccg

SEQ ID NO: 50268 - RNA, 19 nt, Artificial Sequence
  Description of Artificial Sequence: Synthetic oligonucleotide
agguggaugccuuccagca

SEQ ID NO: 50269 - RNA, 19 nt, Artificial Sequence
  Description of Artificial Sequence: Synthetic oligonucleotide
uuaaggaagugucccugau

SEQ ID NO: 50270 - RNA, 19 nt, Artificial Sequence
  Description of Artificial Sequence: Synthetic oligonucleotide
aggcgcaacaacaacaaca

SEQ ID NO: 50271 - RNA, 19 nt, Artificial Sequence
  Description of Artificial Sequence: Synthetic oligonucleotide
cuaggcucaguagauaguc

SEQ ID NO: 50272 - RNA, 19 nt, Artificial Sequence
  Description of Artificial Sequence: Synthetic oligonucleotide
cugauagaaugccacucac

SEQ ID NO: 50273 - RNA, 19 nt, Artificial Sequence
  Description of Artificial Sequence: Synthetic oligonucleotide
caauacgaauaguuucaac

SEQ ID NO: 50274 - RNA, 19 nt, Artificial Sequence
  Description of Artificial Sequence: Synthetic oligonucleotide
uggcauaaaugguuuccca

SEQ ID NO: 50275 - RNA, 19 nt, Artificial Sequence
  Description of Artificial Sequence: Synthetic oligonucleotide
cucaccuacuuugugugcc

SEQ ID NO: 50276 - RNA, 19 nt, Artificial Sequence
  Description of Artificial Sequence: Synthetic oligonucleotide
uccucgguuaacaguuuga

SEQ ID NO: 50277 - RNA, 19 nt, Artificial Sequence
  Description of Artificial Sequence: Synthetic oligonucleotide
caguuugggacaccauucc

SEQ ID NO: 50278 - RNA, 19 nt, Artificial Sequence
  Description of Artificial Sequence: Synthetic oligonucleotide
cagccauuccgcaugugag

SEQ ID NO: 50279 - RNA, 19 nt, Artificial Sequence
  Description of Artificial Sequence: Synthetic oligonucleotide
gucacuucuuuggacaggc

SEQ ID NO: 50280 - RNA, 19 nt, Artificial Sequence
  Description of Artificial Sequence: Synthetic oligonucleotide
acuagucuaucuccugaca

SEQ ID NO: 50281 - RNA, 19 nt, Artificial Sequence
  Description of Artificial Sequence: Synthetic oligonucleotide
guuaagcccauuaacugga

SEQ ID NO: 50282 - RNA, 19 nt, Artificial Sequence
  Description of Artificial Sequence: Synthetic oligonucleotide
ucaggcgacuggcucagga

SEQ ID NO: 50283 - RNA, 19 nt, Artificial Sequence
  Description of Artificial Sequence: Synthetic oligonucleotide
uucuauuuacagacagcua

SEQ ID NO: 50284 - RNA, 19 nt, Artificial Sequence
  Description of Artificial Sequence: Synthetic oligonucleotide
cuacuaugugccuccccgg

SEQ ID NO: 50285 - RNA, 19 nt, Artificial Sequence
  Description of Artificial Sequence: Synthetic oligonucleotide
agcuaaccagaugagauaa

SEQ ID NO: 50286 - RNA, 19 nt, Artificial Sequence
  Description of Artificial Sequence: Synthetic oligonucleotide
cauacgccaguuaagccca

SEQ ID NO: 50287 - RNA, 19 nt, Artificial Sequence
  Description of Artificial Sequence: Synthetic oligonucleotide
aguuugggacaccauuccu

SEQ ID NO: 50288 - RNA, 19 nt, Artificial Sequence
  Description of Artificial Sequence: Synthetic oligonucleotide
agggauauuuucaacucga

SEQ ID NO: 50289 - RNA, 19 nt, Artificial Sequence
  Description of Artificial Sequence: Synthetic oligonucleotide
ggucacacggguuuagaug

SEQ ID NO: 50290 - RNA, 19 nt, Artificial Sequence
  Description of Artificial Sequence: Synthetic oligonucleotide
aaaccccacagugcauuuc

SEQ ID NO: 50291 - RNA, 19 nt, Artificial Sequence
  Description of Artificial Sequence: Synthetic oligonucleotide
agcccuuagcauccgagga

SEQ ID NO: 50292 - RNA, 19 nt, Artificial Sequence
  Description of Artificial Sequence: Synthetic oligonucleotide
aacgcuauucuuggaagua

SEQ ID NO: 50293 - RNA, 19 nt, Artificial Sequence
  Description of Artificial Sequence: Synthetic oligonucleotide
uaagcccauuaacuggaaa

SEQ ID NO: 50294 - RNA, 19 nt, Artificial Sequence
  Description of Artificial Sequence: Synthetic oligonucleotide
aggaucguaggugacacaa

SEQ ID NO: 50295 - RNA, 19 nt, Artificial Sequence
  Description of Artificial Sequence: Synthetic oligonucleotide
gguuaacaguuugaggucc

SEQ ID NO: 50296 - RNA, 19 nt, Artificial Sequence
  Description of Artificial Sequence: Synthetic oligonucleotide
aggacaugauggccaccgc

SEQ ID NO: 50297 - RNA, 19 nt, Artificial Sequence
  Description of Artificial Sequence: Synthetic oligonucleotide
cacuggacguuguucuuag

SEQ ID NO: 50298 - RNA, 19 nt, Artificial Sequence
  Description of Artificial Sequence: Synthetic oligonucleotide
cagcccuuagcauccgagg

SEQ ID NO: 50299 - RNA, 19 nt, Artificial Sequence
  Description of Artificial Sequence: Synthetic oligonucleotide
gaguuuaaagugccggugu

SEQ ID NO: 50300 - RNA, 19 nt, Artificial Sequence
  Description of Artificial Sequence: Synthetic oligonucleotide
cacgccgucaucauuugca

SEQ ID NO: 50301 - RNA, 19 nt, Artificial Sequence
  Description of Artificial Sequence: Synthetic oligonucleotide
gagguuaguuuucacgacu

SEQ ID NO: 50302 - RNA, 19 nt, Artificial Sequence
  Description of Artificial Sequence: Synthetic oligonucleotide
ucuauugaaucaggcacuu

SEQ ID NO: 50303 - RNA, 19 nt, Artificial Sequence
  Description of Artificial Sequence: Synthetic oligonucleotide
uuaggucacacggguuuag

SEQ ID NO: 50304 - RNA, 19 nt, Artificial Sequence
  Description of Artificial Sequence: Synthetic oligonucleotide
cuuggguacuugccaaaug

SEQ ID NO: 50305 - RNA, 19 nt, Artificial Sequence
  Description of Artificial Sequence: Synthetic oligonucleotide
ugcgauacacguucugguu

SEQ ID NO: 50306 - RNA, 19 nt, Artificial Sequence
  Description of Artificial Sequence: Synthetic oligonucleotide
guuuucacgacuaacucau

SEQ ID NO: 50307 - RNA, 19 nt, Artificial Sequence
  Description of Artificial Sequence: Synthetic oligonucleotide
gugccuacuaugugccucc

SEQ ID NO: 50308 - RNA, 19 nt, Artificial Sequence
  Description of Artificial Sequence: Synthetic oligonucleotide
uguaccccguaggaaagac

SEQ ID NO: 50309 - RNA, 19 nt, Artificial Sequence
  Description of Artificial Sequence: Synthetic oligonucleotide
uguugcccuuuauacaguu

SEQ ID NO: 50310 - RNA, 19 nt, Artificial Sequence
  Description of Artificial Sequence: Synthetic oligonucleotide
cacacggauuauucuguac

SEQ ID NO: 50311 - RNA, 19 nt, Artificial Sequence
  Description of Artificial Sequence: Synthetic oligonucleotide
cacggauuauucuguacca

SEQ ID NO: 50312 - RNA, 19 nt, Artificial Sequence
  Description of Artificial Sequence: Synthetic oligonucleotide
acaaugggauguccuuucu

SEQ ID NO: 50313 - RNA, 19 nt, Artificial Sequence
  Description of Artificial Sequence: Synthetic oligonucleotide
ugugagcggacuguaucga

SEQ ID NO: 50314 - RNA, 19 nt, Artificial Sequence
  Description of Artificial Sequence: Synthetic oligonucleotide
guaugaguugagugccuac

SEQ ID NO: 50315 - RNA, 19 nt, Artificial Sequence
  Description of Artificial Sequence: Synthetic oligonucleotide
uggaaggaucguaggugac

SEQ ID NO: 50316 - RNA, 19 nt, Artificial Sequence
  Description of Artificial Sequence: Synthetic oligonucleotide
gguucuugugguuuaguaa

SEQ ID NO: 50317 - RNA, 19 nt, Artificial Sequence
  Description of Artificial Sequence: Synthetic oligonucleotide
aaggaucguaggugacaca

SEQ ID NO: 50318 - RNA, 19 nt, Artificial Sequence
  Description of Artificial Sequence: Synthetic oligonucleotide
uggguucuggccagaacua

SEQ ID NO: 50319 - RNA, 19 nt, Artificial Sequence
  Description of Artificial Sequence: Synthetic oligonucleotide
ucgcccuggcauucuauca

SEQ ID NO: 50320 - RNA, 19 nt, Artificial Sequence
  Description of Artificial Sequence: Synthetic oligonucleotide
ugccagauauuaugagcaa

SEQ ID NO: 50321 - RNA, 19 nt, Artificial Sequence
  Description of Artificial Sequence: Synthetic oligonucleotide
augaguugagugccuacua

SEQ ID NO: 50322 - RNA, 19 nt, Artificial Sequence
  Description of Artificial Sequence: Synthetic oligonucleotide
augcaugaaagaacucuug

SEQ ID NO: 50323 - RNA, 19 nt, Artificial Sequence
  Description of Artificial Sequence: Synthetic oligonucleotide
uagaacaggucacccugua

SEQ ID NO: 50324 - RNA, 19 nt, Artificial Sequence
  Description of Artificial Sequence: Synthetic oligonucleotide
agaaguggucucccugagu

SEQ ID NO: 50325 - RNA, 19 nt, Artificial Sequence
  Description of Artificial Sequence: Synthetic oligonucleotide
ugguaagaucacagcuaga

SEQ ID NO: 50326 - RNA, 19 nt, Artificial Sequence
  Description of Artificial Sequence: Synthetic oligonucleotide
gauacacguucugguuccg

SEQ ID NO: 50327 - RNA, 19 nt, Artificial Sequence
  Description of Artificial Sequence: Synthetic oligonucleotide
aggucacacggguuuagau

SEQ ID NO: 50328 - RNA, 19 nt, Artificial Sequence
  Description of Artificial Sequence: Synthetic oligonucleotide
gaacgcuauucuuggaagu

SEQ ID NO: 50329 - RNA, 19 nt, Artificial Sequence
  Description of Artificial Sequence: Synthetic oligonucleotide
ccgacuuccuccacaaggc

SEQ ID NO: 50330 - RNA, 19 nt, Artificial Sequence
  Description of Artificial Sequence: Synthetic oligonucleotide
auugaaucaggcacuucaa

SEQ ID NO: 50331 - RNA, 19 nt, Artificial Sequence
  Description of Artificial Sequence: Synthetic oligonucleotide
cucuacgaagguggcaaag

SEQ ID NO: 50332 - RNA, 19 nt, Artificial Sequence
  Description of Artificial Sequence: Synthetic oligonucleotide
cccuaggcucaguagauag

SEQ ID NO: 50333 - RNA, 19 nt, Artificial Sequence
  Description of Artificial Sequence: Synthetic oligonucleotide
ccaguuugggacaccauuc

SEQ ID NO: 50334 - RNA, 19 nt, Artificial Sequence
  Description of Artificial Sequence: Synthetic oligonucleotide
ggcgaauggguucuggcca

SEQ ID NO: 50335 - RNA, 19 nt, Artificial Sequence
  Description of Artificial Sequence: Synthetic oligonucleotide
cagauauuaugagcaaaga

SEQ ID NO: 50336 - RNA, 19 nt, Artificial Sequence
  Description of Artificial Sequence: Synthetic oligonucleotide
cauacaccacgcauaccca

SEQ ID NO: 50337 - RNA, 19 nt, Artificial Sequence
  Description of Artificial Sequence: Synthetic oligonucleotide
ggagguuaguuuucacgac

SEQ ID NO: 50338 - RNA, 19 nt, Artificial Sequence
  Description of Artificial Sequence: Synthetic oligonucleotide
ugagcucggucacuucuuu

SEQ ID NO: 50339 - RNA, 19 nt, Artificial Sequence
  Description of Artificial Sequence: Synthetic oligonucleotide
gucgcaggggcccgggaag

SEQ ID NO: 50340 - RNA, 19 nt, Artificial Sequence
  Description of Artificial Sequence: Synthetic oligonucleotide
caccuacucgcagugggag

SEQ ID NO: 50341 - RNA, 19 nt, Artificial Sequence
  Description of Artificial Sequence: Synthetic oligonucleotide
cccacuugccuuaacccag

SEQ ID NO: 50342 - RNA, 19 nt, Artificial Sequence
  Description of Artificial Sequence: Synthetic oligonucleotide
cccgagguccucacuaugg

SEQ ID NO: 50343 - RNA, 19 nt, Artificial Sequence
  Description of Artificial Sequence: Synthetic oligonucleotide
gagggagucgcccuggcau

SEQ ID NO: 50344 - RNA, 19 nt, Artificial Sequence
  Description of Artificial Sequence: Synthetic oligonucleotide
uugaucaguagagguucuc

SEQ ID NO: 50345 - RNA, 19 nt, Artificial Sequence
  Description of Artificial Sequence: Synthetic oligonucleotide
gcauaaaugguuucccaua

SEQ ID NO: 50346 - RNA, 19 nt, Artificial Sequence
  Description of Artificial Sequence: Synthetic oligonucleotide
cagcuagaacaggucaccc

SEQ ID NO: 50347 - RNA, 19 nt, Artificial Sequence
  Description of Artificial Sequence: Synthetic oligonucleotide
acgccaguuaagcccauua

SEQ ID NO: 50348 - RNA, 19 nt, Artificial Sequence
  Description of Artificial Sequence: Synthetic oligonucleotide
caacuacacaugaaguccu

SEQ ID NO: 50349 - RNA, 19 nt, Artificial Sequence
  Description of Artificial Sequence: Synthetic oligonucleotide
uccacgaggggcagcuuuu

SEQ ID NO: 50350 - RNA, 19 nt, Artificial Sequence
  Description of Artificial Sequence: Synthetic oligonucleotide
guuaacaguuugaggucca

SEQ ID NO: 50351 - RNA, 19 nt, Artificial Sequence
  Description of Artificial Sequence: Synthetic oligonucleotide
ccaccugccagugggaacg

SEQ ID NO: 50352 - RNA, 19 nt, Artificial Sequence
  Description of Artificial Sequence: Synthetic oligonucleotide
acacacgccuaacacuguu

SEQ ID NO: 50353 - RNA, 19 nt, Artificial Sequence
  Description of Artificial Sequence: Synthetic oligonucleotide
cgauacacguucugguucc

SEQ ID NO: 50354 - RNA, 19 nt, Artificial Sequence
  Description of Artificial Sequence: Synthetic oligonucleotide
gcgauacacguucugguuc

SEQ ID NO: 50355 - RNA, 19 nt, Artificial Sequence
  Description of Artificial Sequence: Synthetic oligonucleotide
gugagcggacuguaucgac

SEQ ID NO: 50356 - RNA, 19 nt, Artificial Sequence
  Description of Artificial Sequence: Synthetic oligonucleotide
cuuacucauuaguauuccu

SEQ ID NO: 50357 - RNA, 19 nt, Artificial Sequence
  Description of Artificial Sequence: Synthetic oligonucleotide
ugccacccgacuuccucca

SEQ ID NO: 50358 - RNA, 19 nt, Artificial Sequence
  Description of Artificial Sequence: Synthetic oligonucleotide
agagccaggugaguuuagu

SEQ ID NO: 50359 - RNA, 19 nt, Artificial Sequence
  Description of Artificial Sequence: Synthetic oligonucleotide
uuuucacgacuaacucauu

SEQ ID NO: 50360 - RNA, 19 nt, Artificial Sequence
  Description of Artificial Sequence: Synthetic oligonucleotide
cucugaauccucgguuaac

SEQ ID NO: 50361 - RNA, 19 nt, Artificial Sequence
  Description of Artificial Sequence: Synthetic oligonucleotide
acggagcagucgcuauguc

SEQ ID NO: 50362 - RNA, 19 nt, Artificial Sequence
  Description of Artificial Sequence: Synthetic oligonucleotide
agguuaguuuucacgacua

SEQ ID NO: 50363 - RNA, 19 nt, Artificial Sequence
  Description of Artificial Sequence: Synthetic oligonucleotide
uaaaccucaaugggcccuu

SEQ ID NO: 50364 - RNA, 19 nt, Artificial Sequence
  Description of Artificial Sequence: Synthetic oligonucleotide
acccgagguccucacuaug

SEQ ID NO: 50365 - RNA, 19 nt, Artificial Sequence
  Description of Artificial Sequence: Synthetic oligonucleotide
acguucagccauuccgcau

SEQ ID NO: 50366 - RNA, 19 nt, Artificial Sequence
  Description of Artificial Sequence: Synthetic oligonucleotide
cuguaucgacuuaaauaaa

SEQ ID NO: 50367 - RNA, 19 nt, Artificial Sequence
  Description of Artificial Sequence: Synthetic oligonucleotide
ccaagggauauuuucaacu

SEQ ID NO: 50368 - RNA, 19 nt, Artificial Sequence
  Description of Artificial Sequence: Synthetic oligonucleotide
acggauuauucuguaccaa

SEQ ID NO: 50369 - RNA, 19 nt, Artificial Sequence
  Description of Artificial Sequence: Synthetic oligonucleotide
acgcuauucuuggaaguaa

SEQ ID NO: 50370 - RNA, 19 nt, Artificial Sequence
  Description of Artificial Sequence: Synthetic oligonucleotide
cacugcgauacacguucug

SEQ ID NO: 50371 - RNA, 19 nt, Artificial Sequence
  Description of Artificial Sequence: Synthetic oligonucleotide
ccccguaggaaagacauuc

SEQ ID NO: 50372 - RNA, 19 nt, Artificial Sequence
  Description of Artificial Sequence: Synthetic oligonucleotide
ggggcgaauggguucuggc

SEQ ID NO: 50373 - RNA, 19 nt, Artificial Sequence
  Description of Artificial Sequence: Synthetic oligonucleotide
gauuaguaguuugccuacu

SEQ ID NO: 50374 - RNA, 19 nt, Artificial Sequence
  Description of Artificial Sequence: Synthetic oligonucleotide
gcucggaccacacggauua

SEQ ID NO: 50375 - RNA, 19 nt, Artificial Sequence
  Description of Artificial Sequence: Synthetic oligonucleotide
cagcuaaccagaugagaua

SEQ ID NO: 50376 - RNA, 19 nt, Artificial Sequence
  Description of Artificial Sequence: Synthetic oligonucleotide
caacucgauuaaaugugua

SEQ ID NO: 50377 - RNA, 19 nt, Artificial Sequence
  Description of Artificial Sequence: Synthetic oligonucleotide
acucgcagugggaggggcg

SEQ ID NO: 50378 - RNA, 19 nt, Artificial Sequence
  Description of Artificial Sequence: Synthetic oligonucleotide
cgguauuacaauacgaaua

SEQ ID NO: 50379 - RNA, 19 nt, Artificial Sequence
  Description of Artificial Sequence: Synthetic oligonucleotide
gggaagcccaaggauggag

SEQ ID NO: 50380 - RNA, 19 nt, Artificial Sequence
  Description of Artificial Sequence: Synthetic oligonucleotide
ggaaggaucguaggugaca

SEQ ID NO: 50381 - RNA, 19 nt, Artificial Sequence
  Description of Artificial Sequence: Synthetic oligonucleotide
cccguaggaaagacauucc

SEQ ID NO: 50382 - RNA, 19 nt, Artificial Sequence
  Description of Artificial Sequence: Synthetic oligonucleotide
ggcauaaaugguuucccau

SEQ ID NO: 50383 - RNA, 19 nt, Artificial Sequence
  Description of Artificial Sequence: Synthetic oligonucleotide
caggcgcaacaacaacaac

SEQ ID NO: 50384 - RNA, 19 nt, Artificial Sequence
  Description of Artificial Sequence: Synthetic oligonucleotide
guuugccuacucccaaugu

SEQ ID NO: 50385 - RNA, 19 nt, Artificial Sequence
  Description of Artificial Sequence: Synthetic oligonucleotide
gguggaugccuuccagcac

SEQ ID NO: 50386 - RNA, 19 nt, Artificial Sequence
  Description of Artificial Sequence: Synthetic oligonucleotide
gagacaccugauugcacau

SEQ ID NO: 50387 - RNA, 19 nt, Artificial Sequence
  Description of Artificial Sequence: Synthetic oligonucleotide
cugcgauacacguucuggu

SEQ ID NO: 50388 - RNA, 19 nt, Artificial Sequence
  Description of Artificial Sequence: Synthetic oligonucleotide
gcuguaucaucugacccga

SEQ ID NO: 50389 - RNA, 19 nt, Artificial Sequence
  Description of Artificial Sequence: Synthetic oligonucleotide
ggguucuugugguuuagua

SEQ ID NO: 50390 - RNA, 19 nt, Artificial Sequence
  Description of Artificial Sequence: Synthetic oligonucleotide
cuacucgcagugggagggg

SEQ ID NO: 50391 - RNA, 19 nt, Artificial Sequence
  Description of Artificial Sequence: Synthetic oligonucleotide
ggauauuuucaacucgauu

SEQ ID NO: 50392 - RNA, 19 nt, Artificial Sequence
  Description of Artificial Sequence: Synthetic oligonucleotide
caccuacuuugugugccag

SEQ ID NO: 50393 - RNA, 19 nt, Artificial Sequence
  Description of Artificial Sequence: Synthetic oligonucleotide
auacacguucugguuccgu

SEQ ID NO: 50394 - RNA, 19 nt, Artificial Sequence
  Description of Artificial Sequence: Synthetic oligonucleotide
cacgccuaacacuguuuga

SEQ ID NO: 50395 - RNA, 19 nt, Artificial Sequence
  Description of Artificial Sequence: Synthetic oligonucleotide
gguuaguuuucacgacuaa

SEQ ID NO: 50396 - RNA, 19 nt, Artificial Sequence
  Description of Artificial Sequence: Synthetic oligonucleotide
agggagucgcccuggcauu

SEQ ID NO: 50397 - RNA, 19 nt, Artificial Sequence
  Description of Artificial Sequence: Synthetic oligonucleotide
gagcggacuguaucgacuu

SEQ ID NO: 50398 - RNA, 19 nt, Artificial Sequence
  Description of Artificial Sequence: Synthetic oligonucleotide
gcagcuaaccagaugagau

SEQ ID NO: 50399 - RNA, 19 nt, Artificial Sequence
  Description of Artificial Sequence: Synthetic oligonucleotide
guacacaaacacacgccua

SEQ ID NO: 50400 - RNA, 19 nt, Artificial Sequence
  Description of Artificial Sequence: Synthetic oligonucleotide
ucggaccacacggauuauu

SEQ ID NO: 50401 - RNA, 19 nt, Artificial Sequence
  Description of Artificial Sequence: Synthetic oligonucleotide
gaguaacgagggagucgcc

SEQ ID NO: 50402 - RNA, 19 nt, Artificial Sequence
  Description of Artificial Sequence: Synthetic oligonucleotide
ugccuacuaugugccuccc

SEQ ID NO: 50403 - RNA, 19 nt, Artificial Sequence
  Description of Artificial Sequence: Synthetic oligonucleotide
cacccgacuuccuccacaa

SEQ ID NO: 50404 - RNA, 19 nt, Artificial Sequence
  Description of Artificial Sequence: Synthetic oligonucleotide
cuaaacugauuaguaguuu

SEQ ID NO: 50405 - RNA, 19 nt, Artificial Sequence
  Description of Artificial Sequence: Synthetic oligonucleotide
cuuguaacguucagccauu

SEQ ID NO: 50406 - RNA, 19 nt, Artificial Sequence
  Description of Artificial Sequence: Synthetic oligonucleotide
guaccccguaggaaagaca

SEQ ID NO: 50407 - RNA, 19 nt, Artificial Sequence
  Description of Artificial Sequence: Synthetic oligonucleotide
cgguuaacaguuugagguc

SEQ ID NO: 50408 - RNA, 19 nt, Artificial Sequence
  Description of Artificial Sequence: Synthetic oligonucleotide
gcuaaacugauuaguaguu

SEQ ID NO: 50409 - RNA, 19 nt, Artificial Sequence
  Description of Artificial Sequence: Synthetic oligonucleotide
gccagauauuaugagcaaa

SEQ ID NO: 50410 - RNA, 19 nt, Artificial Sequence
  Description of Artificial Sequence: Synthetic oligonucleotide
gguacuugccaaauguauu

SEQ ID NO: 50411 - RNA, 19 nt, Artificial Sequence
  Description of Artificial Sequence: Synthetic oligonucleotide
cacuaugggccacucgagu

SEQ ID NO: 50412 - RNA, 19 nt, Artificial Sequence
  Description of Artificial Sequence: Synthetic oligonucleotide
aggcucacgccgucaucau

SEQ ID NO: 50413 - RNA, 19 nt, Artificial Sequence
  Description of Artificial Sequence: Synthetic oligonucleotide
cuacuuugugugccagaua

SEQ ID NO: 50414 - RNA, 19 nt, Artificial Sequence
  Description of Artificial Sequence: Synthetic oligonucleotide
cuccccgggugggucaggc

SEQ ID NO: 50415 - RNA, 19 nt, Artificial Sequence
  Description of Artificial Sequence: Synthetic oligonucleotide
agcccauccacuggacguu

SEQ ID NO: 50416 - RNA, 19 nt, Artificial Sequence
  Description of Artificial Sequence: Synthetic oligonucleotide
gccuacuaugugccucccc

SEQ ID NO: 50417 - RNA, 19 nt, Artificial Sequence
  Description of Artificial Sequence: Synthetic oligonucleotide
cgacuuaaauaaaacugcu

SEQ ID NO: 50418 - RNA, 19 nt, Artificial Sequence
  Description of Artificial Sequence: Synthetic oligonucleotide
cgacuaacucauuuccgca

SEQ ID NO: 50419 - RNA, 19 nt, Artificial Sequence
  Description of Artificial Sequence: Synthetic oligonucleotide
aggucgcugaugcccucuu

SEQ ID NO: 50420 - RNA, 19 nt, Artificial Sequence
  Description of Artificial Sequence: Synthetic oligonucleotide
gacccgagguccucacuau

SEQ ID NO: 50421 - RNA, 19 nt, Artificial Sequence
  Description of Artificial Sequence: Synthetic oligonucleotide
gguggaccuuaggucacac

SEQ ID NO: 50422 - RNA, 19 nt, Artificial Sequence
  Description of Artificial Sequence: Synthetic oligonucleotide
agcucggaccacacggauu

SEQ ID NO: 50423 - RNA, 19 nt, Artificial Sequence
  Description of Artificial Sequence: Synthetic oligonucleotide
ggaaugaauuugagguacu

SEQ ID NO: 50424 - RNA, 19 nt, Artificial Sequence
  Description of Artificial Sequence: Synthetic oligonucleotide
ccugaaagcuaaagcuuua

SEQ ID NO: 50425 - RNA, 19 nt, Artificial Sequence
  Description of Artificial Sequence: Synthetic oligonucleotide
uacgccaguuaagcccauu

SEQ ID NO: 50426 - RNA, 19 nt, Artificial Sequence
  Description of Artificial Sequence: Synthetic oligonucleotide
gcccuuggguacuugccaa

SEQ ID NO: 50427 - RNA, 19 nt, Artificial Sequence
  Description of Artificial Sequence: Synthetic oligonucleotide
caccacgcauacccacaca

SEQ ID NO: 50428 - RNA, 19 nt, Artificial Sequence
  Description of Artificial Sequence: Synthetic oligonucleotide
agucgcccuggcauucuau

SEQ ID NO: 50429 - RNA, 19 nt, Artificial Sequence
  Description of Artificial Sequence: Synthetic oligonucleotide
gguucuggccagaacuagu

SEQ ID NO: 50430 - RNA, 19 nt, Artificial Sequence
  Description of Artificial Sequence: Synthetic oligonucleotide
ccacucgagucacugagcu

SEQ ID NO: 50431 - RNA, 19 nt, Artificial Sequence
  Description of Artificial Sequence: Synthetic oligonucleotide
caacacugcgauacacguu

SEQ ID NO: 50432 - RNA, 19 nt, Artificial Sequence
  Description of Artificial Sequence: Synthetic oligonucleotide
ccucaccuacucgcagugg

SEQ ID NO: 50433 - RNA, 19 nt, Artificial Sequence
  Description of Artificial Sequence: Synthetic oligonucleotide
ggaucguaggugacacaaa

SEQ ID NO: 50434 - RNA, 19 nt, Artificial Sequence
  Description of Artificial Sequence: Synthetic oligonucleotide
cacacgccuaacacuguuu

SEQ ID NO: 50435 - RNA, 19 nt, Artificial Sequence
  Description of Artificial Sequence: Synthetic oligonucleotide
gcucacgccgucaucauuu

SEQ ID NO: 50436 - RNA, 19 nt, Artificial Sequence
  Description of Artificial Sequence: Synthetic oligonucleotide
cagugggaacgcuauucuu

SEQ ID NO: 50437 - RNA, 19 nt, Artificial Sequence
  Description of Artificial Sequence: Synthetic oligonucleotide
gcuaaccagaugagauaaa

SEQ ID NO: 50438 - RNA, 19 nt, Artificial Sequence
  Description of Artificial Sequence: Synthetic oligonucleotide
ccauuugaagugguaagau

SEQ ID NO: 50439 - RNA, 19 nt, Artificial Sequence
  Description of Artificial Sequence: Synthetic oligonucleotide
guguugcccuuuauacagu

SEQ ID NO: 50440 - RNA, 19 nt, Artificial Sequence
  Description of Artificial Sequence: Synthetic oligonucleotide
gcucuacgaagguggcaaa

SEQ ID NO: 50441 - RNA, 19 nt, Artificial Sequence
  Description of Artificial Sequence: Synthetic oligonucleotide
gggccacucgagucacuga

SEQ ID NO: 50442 - RNA, 19 nt, Artificial Sequence
  Description of Artificial Sequence: Synthetic oligonucleotide
gggagucgcccuggcauuc

SEQ ID NO: 50443 - RNA, 19 nt, Artificial Sequence
  Description of Artificial Sequence: Synthetic oligonucleotide
accccguaggaaagacauu

SEQ ID NO: 50444 - RNA, 19 nt, Artificial Sequence
  Description of Artificial Sequence: Synthetic oligonucleotide
ccacccgacuuccuccaca

SEQ ID NO: 50445 - RNA, 19 nt, Artificial Sequence
  Description of Artificial Sequence: Synthetic oligonucleotide
ccacacggauuauucugua

SEQ ID NO: 50446 - RNA, 19 nt, Artificial Sequence
  Description of Artificial Sequence: Synthetic oligonucleotide
auacgccaguuaagcccau

SEQ ID NO: 50447 - RNA, 19 nt, Artificial Sequence
  Description of Artificial Sequence: Synthetic oligonucleotide
cuauaacaguuuggucuuu

SEQ ID NO: 50448 - RNA, 19 nt, Artificial Sequence
  Description of Artificial Sequence: Synthetic oligonucleotide
cccuuggguacuugccaaa

SEQ ID NO: 50449 - RNA, 19 nt, Artificial Sequence
  Description of Artificial Sequence: Synthetic oligonucleotide
gccacccgacuuccuccac

SEQ ID NO: 50450 - RNA, 19 nt, Artificial Sequence
  Description of Artificial Sequence: Synthetic oligonucleotide
cacacggguuuagaugcuu

SEQ ID NO: 50451 - RNA, 19 nt, Artificial Sequence
  Description of Artificial Sequence: Synthetic oligonucleotide
ccaccaccacuuugcauau

SEQ ID NO: 50452 - RNA, 19 nt, Artificial Sequence
  Description of Artificial Sequence: Synthetic oligonucleotide
ggagucgcccuggcauucu

SEQ ID NO: 50453 - RNA, 19 nt, Artificial Sequence
  Description of Artificial Sequence: Synthetic oligonucleotide
ccgcagcccuuagcauccg

SEQ ID NO: 50454 - RNA, 19 nt, Artificial Sequence
  Description of Artificial Sequence: Synthetic oligonucleotide
ccccuaggcucaguagaua

SEQ ID NO: 50455 - RNA, 19 nt, Artificial Sequence
  Description of Artificial Sequence: Synthetic oligonucleotide
cucggaccacacggauuau

SEQ ID NO: 50456 - RNA, 19 nt, Artificial Sequence
  Description of Artificial Sequence: Synthetic oligonucleotide
uauaauuucacgcauacgg

SEQ ID NO: 50457 - RNA, 19 nt, Artificial Sequence
  Description of Artificial Sequence: Synthetic oligonucleotide
auauaacuugcucaaaugc

SEQ ID NO: 50458 - RNA, 19 nt, Artificial Sequence
  Description of Artificial Sequence: Synthetic oligonucleotide
aaaauuagcccagaauucc

SEQ ID NO: 50459 - RNA, 19 nt, Artificial Sequence
  Description of Artificial Sequence: Synthetic oligonucleotide
aaggacgaacucuagaucg

SEQ ID NO: 50460 - RNA, 19 nt, Artificial Sequence
  Description of Artificial Sequence: Synthetic oligonucleotide
aaagacuauuaucagguuc

SEQ ID NO: 50461 - RNA, 19 nt, Artificial Sequence
  Description of Artificial Sequence: Synthetic oligonucleotide
aauaucacuaggcagguca

SEQ ID NO: 50462 - RNA, 19 nt, Artificial Sequence
  Description of Artificial Sequence: Synthetic oligonucleotide
uuaacgaucugccuaaaca

SEQ ID NO: 50463 - RNA, 19 nt, Artificial Sequence
  Description of Artificial Sequence: Synthetic oligonucleotide
uuagaaucuagucccaucc

SEQ ID NO: 50464 - RNA, 19 nt, Artificial Sequence
  Description of Artificial Sequence: Synthetic oligonucleotide
uuauauuuauggaugaauc

SEQ ID NO: 50465 - RNA, 19 nt, Artificial Sequence
  Description of Artificial Sequence: Synthetic oligonucleotide
ucuauaguaagccaguuua

SEQ ID NO: 50466 - RNA, 19 nt, Artificial Sequence
  Description of Artificial Sequence: Synthetic oligonucleotide
ugaccuacugcaaaguagg

SEQ ID NO: 50467 - RNA, 19 nt, Artificial Sequence
  Description of Artificial Sequence: Synthetic oligonucleotide
uauagucuggcuaaguuac

SEQ ID NO: 50468 - RNA, 19 nt, Artificial Sequence
  Description of Artificial Sequence: Synthetic oligonucleotide
acaaaugauccucagucac

SEQ ID NO: 50469 - RNA, 19 nt, Artificial Sequence
  Description of Artificial Sequence: Synthetic oligonucleotide
agauugagcguuuugauca

SEQ ID NO: 50470 - RNA, 19 nt, Artificial Sequence
  Description of Artificial Sequence: Synthetic oligonucleotide
aaaguaggcucaguuaccc

SEQ ID NO: 50471 - RNA, 19 nt, Artificial Sequence
  Description of Artificial Sequence: Synthetic oligonucleotide
agguucuaaauaccuaucc

SEQ ID NO: 50472 - RNA, 19 nt, Artificial Sequence
  Description of Artificial Sequence: Synthetic oligonucleotide
ugauuuaguuucaagucgc

SEQ ID NO: 50473 - RNA, 19 nt, Artificial Sequence
  Description of Artificial Sequence: Synthetic oligonucleotide
aaauacuagggucagggaa

SEQ ID NO: 50474 - RNA, 19 nt, Artificial Sequence
  Description of Artificial Sequence: Synthetic oligonucleotide
ucauaguuaacgaucugcc

SEQ ID NO: 50475 - RNA, 19 nt, Artificial Sequence
  Description of Artificial Sequence: Synthetic oligonucleotide
auaacaugcccacauuugg

SEQ ID NO: 50476 - RNA, 19 nt, Artificial Sequence
  Description of Artificial Sequence: Synthetic oligonucleotide
uauaacuugcucaaaugcu

SEQ ID NO: 50477 - RNA, 19 nt, Artificial Sequence
  Description of Artificial Sequence: Synthetic oligonucleotide
ugggauaagggguaggcgg

SEQ ID NO: 50478 - RNA, 19 nt, Artificial Sequence
  Description of Artificial Sequence: Synthetic oligonucleotide
ucuaauccaaucuuucccc

SEQ ID NO: 50479 - RNA, 19 nt, Artificial Sequence
  Description of Artificial Sequence: Synthetic oligonucleotide
agcaaguuuaaacccauuc

SEQ ID NO: 50480 - RNA, 19 nt, Artificial Sequence
  Description of Artificial Sequence: Synthetic oligonucleotide
caguuuaacaucucaacgc

SEQ ID NO: 50481 - RNA, 19 nt, Artificial Sequence
  Description of Artificial Sequence: Synthetic oligonucleotide
ucuuagaacguccacgacu

SEQ ID NO: 50482 - RNA, 19 nt, Artificial Sequence
  Description of Artificial Sequence: Synthetic oligonucleotide
ugaaucggcauuuaaaaua

SEQ ID NO: 50483 - RNA, 19 nt, Artificial Sequence
  Description of Artificial Sequence: Synthetic oligonucleotide
uacugauauaacuugcuca

SEQ ID NO: 50484 - RNA, 19 nt, Artificial Sequence
  Description of Artificial Sequence: Synthetic oligonucleotide
cuuagaacguccacgacug

SEQ ID NO: 50485 - RNA, 19 nt, Artificial Sequence
  Description of Artificial Sequence: Synthetic oligonucleotide
aaucgacugcucuuagaac

SEQ ID NO: 50486 - RNA, 19 nt, Artificial Sequence
  Description of Artificial Sequence: Synthetic oligonucleotide
aagacuauuaucagguucu

SEQ ID NO: 50487 - RNA, 19 nt, Artificial Sequence
  Description of Artificial Sequence: Synthetic oligonucleotide
guagcaacuaacaaguggc

SEQ ID NO: 50488 - RNA, 19 nt, Artificial Sequence
  Description of Artificial Sequence: Synthetic oligonucleotide
ucaacuauccugcgaaucu

SEQ ID NO: 50489 - RNA, 19 nt, Artificial Sequence
  Description of Artificial Sequence: Synthetic oligonucleotide
cuagcaugcguuauuagac

SEQ ID NO: 50490 - RNA, 19 nt, Artificial Sequence
  Description of Artificial Sequence: Synthetic oligonucleotide
uaauuucacgcauacggug

SEQ ID NO: 50491 - RNA, 19 nt, Artificial Sequence
  Description of Artificial Sequence: Synthetic oligonucleotide
uuugucgauagucucuggc

SEQ ID NO: 50492 - RNA, 19 nt, Artificial Sequence
  Description of Artificial Sequence: Synthetic oligonucleotide
uuggguauuguuugcgacg

SEQ ID NO: 50493 - RNA, 19 nt, Artificial Sequence
  Description of Artificial Sequence: Synthetic oligonucleotide
auuggguauuguuugcgac

SEQ ID NO: 50494 - RNA, 19 nt, Artificial Sequence
  Description of Artificial Sequence: Synthetic oligonucleotide
auaguaagccaguuuaaca

SEQ ID NO: 50495 - RNA, 19 nt, Artificial Sequence
  Description of Artificial Sequence: Synthetic oligonucleotide
gaaaucacgggccagcauc

SEQ ID NO: 50496 - RNA, 19 nt, Artificial Sequence
  Description of Artificial Sequence: Synthetic oligonucleotide
uaaagcuacagugacuuga

SEQ ID NO: 50497 - RNA, 19 nt, Artificial Sequence
  Description of Artificial Sequence: Synthetic oligonucleotide
accacuacuuugucgauag

SEQ ID NO: 50498 - RNA, 19 nt, Artificial Sequence
  Description of Artificial Sequence: Synthetic oligonucleotide
ugcugguauuaucaaagcc

SEQ ID NO: 50499 - RNA, 19 nt, Artificial Sequence
  Description of Artificial Sequence: Synthetic oligonucleotide
uguaucacaccugugugcc

SEQ ID NO: 50500 - RNA, 19 nt, Artificial Sequence
  Description of Artificial Sequence: Synthetic oligonucleotide
uuuagugguggacaaugcu

SEQ ID NO: 50501 - RNA, 19 nt, Artificial Sequence
  Description of Artificial Sequence: Synthetic oligonucleotide
accgccauaaaccacacaa

SEQ ID NO: 50502 - RNA, 19 nt, Artificial Sequence
  Description of Artificial Sequence: Synthetic oligonucleotide
aaguaggcucaguuacccc

SEQ ID NO: 50503 - RNA, 19 nt, Artificial Sequence
  Description of Artificial Sequence: Synthetic oligonucleotide
auaagauuggaaguuuaag

SEQ ID NO: 50504 - RNA, 19 nt, Artificial Sequence
  Description of Artificial Sequence: Synthetic oligonucleotide
cauauuagcuuguguuugg

SEQ ID NO: 50505 - RNA, 19 nt, Artificial Sequence
  Description of Artificial Sequence: Synthetic oligonucleotide
cuuuccuagacaagcugcg

SEQ ID NO: 50506 - RNA, 19 nt, Artificial Sequence
  Description of Artificial Sequence: Synthetic oligonucleotide
ucuaucucucugagaacgg

SEQ ID NO: 50507 - RNA, 19 nt, Artificial Sequence
  Description of Artificial Sequence: Synthetic oligonucleotide
aguaucuuguucaacuauc

SEQ ID NO: 50508 - RNA, 19 nt, Artificial Sequence
  Description of Artificial Sequence: Synthetic oligonucleotide
agggccuaaaccuagacua

SEQ ID NO: 50509 - RNA, 19 nt, Artificial Sequence
  Description of Artificial Sequence: Synthetic oligonucleotide
ucuugaagcuacacaaggu

SEQ ID NO: 50510 - RNA, 19 nt, Artificial Sequence
  Description of Artificial Sequence: Synthetic oligonucleotide
gaugaaucgaugauuccug

SEQ ID NO: 50511 - RNA, 19 nt, Artificial Sequence
  Description of Artificial Sequence: Synthetic oligonucleotide
uuaacaucucaacgcagcu

SEQ ID NO: 50512 - RNA, 19 nt, Artificial Sequence
  Description of Artificial Sequence: Synthetic oligonucleotide
gaguuaauccaaacuacag

SEQ ID NO: 50513 - RNA, 19 nt, Artificial Sequence
  Description of Artificial Sequence: Synthetic oligonucleotide
acugcuacccuuguagugg

SEQ ID NO: 50514 - RNA, 19 nt, Artificial Sequence
  Description of Artificial Sequence: Synthetic oligonucleotide
cuauccaggauagagugag

SEQ ID NO: 50515 - RNA, 19 nt, Artificial Sequence
  Description of Artificial Sequence: Synthetic oligonucleotide
ugccaauacaacaaagaua

SEQ ID NO: 50516 - RNA, 19 nt, Artificial Sequence
  Description of Artificial Sequence: Synthetic oligonucleotide
aaguaucuagaaaucuguc

SEQ ID NO: 50517 - RNA, 19 nt, Artificial Sequence
  Description of Artificial Sequence: Synthetic oligonucleotide
cucuagaucgguaugagaa

SEQ ID NO: 50518 - RNA, 19 nt, Artificial Sequence
  Description of Artificial Sequence: Synthetic oligonucleotide
guuaaguuguaucacaccu

SEQ ID NO: 50519 - RNA, 19 nt, Artificial Sequence
  Description of Artificial Sequence: Synthetic oligonucleotide
aucucaacgcagcuugaac

SEQ ID NO: 50520 - RNA, 19 nt, Artificial Sequence
  Description of Artificial Sequence: Synthetic oligonucleotide
caagcugcguucaacaauc

SEQ ID NO: 50521 - RNA, 19 nt, Artificial Sequence
  Description of Artificial Sequence: Synthetic oligonucleotide
aauuucacgcauacgguga

SEQ ID NO: 50522 - RNA, 19 nt, Artificial Sequence
  Description of Artificial Sequence: Synthetic oligonucleotide
aauacuagggucagggaau

SEQ ID NO: 50523 - RNA, 19 nt, Artificial Sequence
  Description of Artificial Sequence: Synthetic oligonucleotide
aaagcuacagugacuugag

SEQ ID NO: 50524 - RNA, 19 nt, Artificial Sequence
  Description of Artificial Sequence: Synthetic oligonucleotide
uuugggauaagggguaggc

SEQ ID NO: 50525 - RNA, 19 nt, Artificial Sequence
  Description of Artificial Sequence: Synthetic oligonucleotide
auuucacgcauacggugac

SEQ ID NO: 50526 - RNA, 19 nt, Artificial Sequence
  Description of Artificial Sequence: Synthetic oligonucleotide
cagaauugacaccuugugc

SEQ ID NO: 50527 - RNA, 19 nt, Artificial Sequence
  Description of Artificial Sequence: Synthetic oligonucleotide
ucuagaaaucugucgugug

SEQ ID NO: 50528 - RNA, 19 nt, Artificial Sequence
  Description of Artificial Sequence: Synthetic oligonucleotide
uuagcauaaacagacuaua

SEQ ID NO: 50529 - RNA, 19 nt, Artificial Sequence
  Description of Artificial Sequence: Synthetic oligonucleotide
cuucccaacuaucauuccc

SEQ ID NO: 50530 - RNA, 19 nt, Artificial Sequence
  Description of Artificial Sequence: Synthetic oligonucleotide
uuaauccaaacuacagcaa

SEQ ID NO: 50531 - RNA, 19 nt, Artificial Sequence
  Description of Artificial Sequence: Synthetic oligonucleotide
acuaaagcuacagugacuu

SEQ ID NO: 50532 - RNA, 19 nt, Artificial Sequence
  Description of Artificial Sequence: Synthetic oligonucleotide
uuuagaaucuagucccauc

SEQ ID NO: 50533 - RNA, 19 nt, Artificial Sequence
  Description of Artificial Sequence: Synthetic oligonucleotide
ccaagguuugauuuuagcc

SEQ ID NO: 50534 - RNA, 19 nt, Artificial Sequence
  Description of Artificial Sequence: Synthetic oligonucleotide
aaaccagaauaugcacagc

SEQ ID NO: 50535 - RNA, 19 nt, Artificial Sequence
  Description of Artificial Sequence: Synthetic oligonucleotide
aaguuuaaggacacgcaca

SEQ ID NO: 50536 - RNA, 19 nt, Artificial Sequence
  Description of Artificial Sequence: Synthetic oligonucleotide
aucgguaugagaauuuucu

SEQ ID NO: 50537 - RNA, 19 nt, Artificial Sequence
  Description of Artificial Sequence: Synthetic oligonucleotide
cuaugcgauguacauauuc

SEQ ID NO: 50538 - RNA, 19 nt, Artificial Sequence
  Description of Artificial Sequence: Synthetic oligonucleotide
aagggccuaaaccuagacu

SEQ ID NO: 50539 - RNA, 19 nt, Artificial Sequence
  Description of Artificial Sequence: Synthetic oligonucleotide
gaaucgaugauuccuguua

SEQ ID NO: 50540 - RNA, 19 nt, Artificial Sequence
  Description of Artificial Sequence: Synthetic oligonucleotide
uguggcggacaccuuuugg

SEQ ID NO: 50541 - RNA, 19 nt, Artificial Sequence
  Description of Artificial Sequence: Synthetic oligonucleotide
uaucuuguucaacuauccu

SEQ ID NO: 50542 - RNA, 19 nt, Artificial Sequence
  Description of Artificial Sequence: Synthetic oligonucleotide
cucaacgcagcuugaacag

SEQ ID NO: 50543 - RNA, 19 nt, Artificial Sequence
  Description of Artificial Sequence: Synthetic oligonucleotide
aauaagauuggaaguuuaa

SEQ ID NO: 50544 - RNA, 19 nt, Artificial Sequence
  Description of Artificial Sequence: Synthetic oligonucleotide
cuaaaccuagacuaauuga

SEQ ID NO: 50545 - RNA, 19 nt, Artificial Sequence
  Description of Artificial Sequence: Synthetic oligonucleotide
uuagcccaaguucaguaaa

SEQ ID NO: 50546 - RNA, 19 nt, Artificial Sequence
  Description of Artificial Sequence: Synthetic oligonucleotide
uaguuaacgaucugccuaa

SEQ ID NO: 50547 - RNA, 19 nt, Artificial Sequence
  Description of Artificial Sequence: Synthetic oligonucleotide
ccaguuuaacaucucaacg

SEQ ID NO: 50548 - RNA, 19 nt, Artificial Sequence
  Description of Artificial Sequence: Synthetic oligonucleotide
uaauugaaauagcaccaua

SEQ ID NO: 50549 - RNA, 19 nt, Artificial Sequence
  Description of Artificial Sequence: Synthetic oligonucleotide
uaccccgaaauauauaauu

SEQ ID NO: 50550 - RNA, 19 nt, Artificial Sequence
  Description of Artificial Sequence: Synthetic oligonucleotide
ucgaugauuccuguuaagu

SEQ ID NO: 50551 - RNA, 19 nt, Artificial Sequence
  Description of Artificial Sequence: Synthetic oligonucleotide
uagcaugcguuauuagacc

SEQ ID NO: 50552 - RNA, 19 nt, Artificial Sequence
  Description of Artificial Sequence: Synthetic oligonucleotide
aguuuuagaacaaggcaca

SEQ ID NO: 50553 - RNA, 19 nt, Artificial Sequence
  Description of Artificial Sequence: Synthetic oligonucleotide
uaguaucuuguucaacuau

SEQ ID NO: 50554 - RNA, 19 nt, Artificial Sequence
  Description of Artificial Sequence: Synthetic oligonucleotide
aaccacacaaggacgaacu

SEQ ID NO: 50555 - RNA, 19 nt, Artificial Sequence
  Description of Artificial Sequence: Synthetic oligonucleotide
uccauauuagcuuguguuu

SEQ ID NO: 50556 - RNA, 19 nt, Artificial Sequence
  Description of Artificial Sequence: Synthetic oligonucleotide
aacucuagaucgguaugag

SEQ ID NO: 50557 - RNA, 19 nt, Artificial Sequence
  Description of Artificial Sequence: Synthetic oligonucleotide
auauccacuaggcgucccg

SEQ ID NO: 50558 - RNA, 19 nt, Artificial Sequence
  Description of Artificial Sequence: Synthetic oligonucleotide
ugacuugagggucaaucuc

SEQ ID NO: 50559 - RNA, 19 nt, Artificial Sequence
  Description of Artificial Sequence: Synthetic oligonucleotide
agugcaccuacuuaauaaa

SEQ ID NO: 50560 - RNA, 19 nt, Artificial Sequence
  Description of Artificial Sequence: Synthetic oligonucleotide
aacacuagcaugcguuauu

SEQ ID NO: 50561 - RNA, 19 nt, Artificial Sequence
  Description of Artificial Sequence: Synthetic oligonucleotide
uccacgacugcuacccuug

SEQ ID NO: 50562 - RNA, 19 nt, Artificial Sequence
  Description of Artificial Sequence: Synthetic oligonucleotide
agcaugcguuauuagacca

SEQ ID NO: 50563 - RNA, 19 nt, Artificial Sequence
  Description of Artificial Sequence: Synthetic oligonucleotide
uccacuaggcgucccggag

SEQ ID NO: 50564 - RNA, 19 nt, Artificial Sequence
  Description of Artificial Sequence: Synthetic oligonucleotide
aagccuuaaugcaggcuac

SEQ ID NO: 50565 - RNA, 19 nt, Artificial Sequence
  Description of Artificial Sequence: Synthetic oligonucleotide
aagucuauaguaagccagu

SEQ ID NO: 50566 - RNA, 19 nt, Artificial Sequence
  Description of Artificial Sequence: Synthetic oligonucleotide
uugggauaagggguaggcg

SEQ ID NO: 50567 - RNA, 19 nt, Artificial Sequence
  Description of Artificial Sequence: Synthetic oligonucleotide
ucuagaucgguaugagaau

SEQ ID NO: 50568 - RNA, 19 nt, Artificial Sequence
  Description of Artificial Sequence: Synthetic oligonucleotide
auaauuucacgcauacggu

SEQ ID NO: 50569 - RNA, 19 nt, Artificial Sequence
  Description of Artificial Sequence: Synthetic oligonucleotide
gacugcuacccuuguagug

SEQ ID NO: 50570 - RNA, 19 nt, Artificial Sequence
  Description of Artificial Sequence: Synthetic oligonucleotide
gugaccuacugcaaaguag

SEQ ID NO: 50571 - RNA, 19 nt, Artificial Sequence
  Description of Artificial Sequence: Synthetic oligonucleotide
ugagcguuuugaucacugc

SEQ ID NO: 50572 - RNA, 19 nt, Artificial Sequence
  Description of Artificial Sequence: Synthetic oligonucleotide
caagguauagucuggcuaa

SEQ ID NO: 50573 - RNA, 19 nt, Artificial Sequence
  Description of Artificial Sequence: Synthetic oligonucleotide
gauuggguauuguuugcga

SEQ ID NO: 50574 - RNA, 19 nt, Artificial Sequence
  Description of Artificial Sequence: Synthetic oligonucleotide
uagcaacuaacaaguggca

SEQ ID NO: 50575 - RNA, 19 nt, Artificial Sequence
  Description of Artificial Sequence: Synthetic oligonucleotide
gagcguuuugaucacugca

SEQ ID NO: 50576 - RNA, 19 nt, Artificial Sequence
  Description of Artificial Sequence: Synthetic oligonucleotide
uccacuaaaucgacugcuc

SEQ ID NO: 50577 - RNA, 19 nt, Artificial Sequence
  Description of Artificial Sequence: Synthetic oligonucleotide
uucuaaccaagauggcacu

SEQ ID NO: 50578 - RNA, 19 nt, Artificial Sequence
  Description of Artificial Sequence: Synthetic oligonucleotide
cacgcauacggugacauuc

SEQ ID NO: 50579 - RNA, 19 nt, Artificial Sequence
  Description of Artificial Sequence: Synthetic oligonucleotide
caucagaaaguuauggcua

SEQ ID NO: 50580 - RNA, 19 nt, Artificial Sequence
  Description of Artificial Sequence: Synthetic oligonucleotide
ucaagugcaccuacuuaau

SEQ ID NO: 50581 - RNA, 19 nt, Artificial Sequence
  Description of Artificial Sequence: Synthetic oligonucleotide
cuaaaucgacugcucuuag

SEQ ID NO: 50582 - RNA, 19 nt, Artificial Sequence
  Description of Artificial Sequence: Synthetic oligonucleotide
guauagucuggcuaaguua

SEQ ID NO: 50583 - RNA, 19 nt, Artificial Sequence
  Description of Artificial Sequence: Synthetic oligonucleotide
uugcauuaacuuugagaac

SEQ ID NO: 50584 - RNA, 19 nt, Artificial Sequence
  Description of Artificial Sequence: Synthetic oligonucleotide
acaucaacacuagcaugcg

SEQ ID NO: 50585 - RNA, 19 nt, Artificial Sequence
  Description of Artificial Sequence: Synthetic oligonucleotide
uacugucaagugcaccuac

SEQ ID NO: 50586 - RNA, 19 nt, Artificial Sequence
  Description of Artificial Sequence: Synthetic oligonucleotide
aguacggccuaugcgaugu

SEQ ID NO: 50587 - RNA, 19 nt, Artificial Sequence
  Description of Artificial Sequence: Synthetic oligonucleotide
gcagaauugacaccuugug

SEQ ID NO: 50588 - RNA, 19 nt, Artificial Sequence
  Description of Artificial Sequence: Synthetic oligonucleotide
ccuaaaccuagacuaauug

SEQ ID NO: 50589 - RNA, 19 nt, Artificial Sequence
  Description of Artificial Sequence: Synthetic oligonucleotide
ucccggaguagcaacuaac

SEQ ID NO: 50590 - RNA, 19 nt, Artificial Sequence
  Description of Artificial Sequence: Synthetic oligonucleotide
gcguucaacaaucuccaag

SEQ ID NO: 50591 - RNA, 19 nt, Artificial Sequence
  Description of Artificial Sequence: Synthetic oligonucleotide
caaggacgaacucuagauc

SEQ ID NO: 50592 - RNA, 19 nt, Artificial Sequence
  Description of Artificial Sequence: Synthetic oligonucleotide
ccgaaauauauaauuucac

SEQ ID NO: 50593 - RNA, 19 nt, Artificial Sequence
  Description of Artificial Sequence: Synthetic oligonucleotide
aacuauccugcgaaucuga

SEQ ID NO: 50594 - RNA, 19 nt, Artificial Sequence
  Description of Artificial Sequence: Synthetic oligonucleotide
gcauuuaggaggucaagca

SEQ ID NO: 50595 - RNA, 19 nt, Artificial Sequence
  Description of Artificial Sequence: Synthetic oligonucleotide
ucaaguuaucagaccuuua

SEQ ID NO: 50596 - RNA, 19 nt, Artificial Sequence
  Description of Artificial Sequence: Synthetic oligonucleotide
uagaucgguaugagaauuu

SEQ ID NO: 50597 - RNA, 19 nt, Artificial Sequence
  Description of Artificial Sequence: Synthetic oligonucleotide
agccuuaaugcaggcuacc

SEQ ID NO: 50598 - RNA, 19 nt, Artificial Sequence
  Description of Artificial Sequence: Synthetic oligonucleotide
gaggggaguuaauccaaac

SEQ ID NO: 50599 - RNA, 19 nt, Artificial Sequence
  Description of Artificial Sequence: Synthetic oligonucleotide
acucuagaucgguaugaga

SEQ ID NO: 50600 - RNA, 19 nt, Artificial Sequence
  Description of Artificial Sequence: Synthetic oligonucleotide
gcagaaaugaccguuuguc

SEQ ID NO: 50601 - RNA, 19 nt, Artificial Sequence
  Description of Artificial Sequence: Synthetic oligonucleotide
ugaaucgaugauuccuguu

SEQ ID NO: 50602 - RNA, 19 nt, Artificial Sequence
  Description of Artificial Sequence: Synthetic oligonucleotide
gauaagggguaggcgggag

SEQ ID NO: 50603 - RNA, 19 nt, Artificial Sequence
  Description of Artificial Sequence: Synthetic oligonucleotide
gccuaaacauugaaagagg

SEQ ID NO: 50604 - RNA, 19 nt, Artificial Sequence
  Description of Artificial Sequence: Synthetic oligonucleotide
ucgguaugagaauuuucuu

SEQ ID NO: 50605 - RNA, 19 nt, Artificial Sequence
  Description of Artificial Sequence: Synthetic oligonucleotide
agcaccgccauaaaccaca

SEQ ID NO: 50606 - RNA, 19 nt, Artificial Sequence
  Description of Artificial Sequence: Synthetic oligonucleotide
agcccuauaugagggcugg

SEQ ID NO: 50607 - RNA, 19 nt, Artificial Sequence
  Description of Artificial Sequence: Synthetic oligonucleotide
uucacgcauacggugacau

SEQ ID NO: 50608 - RNA, 19 nt, Artificial Sequence
  Description of Artificial Sequence: Synthetic oligonucleotide
augugaaucggcauuuaaa

SEQ ID NO: 50609 - RNA, 19 nt, Artificial Sequence
  Description of Artificial Sequence: Synthetic oligonucleotide
guuauggcuacaccgccaa

SEQ ID NO: 50610 - RNA, 19 nt, Artificial Sequence
  Description of Artificial Sequence: Synthetic oligonucleotide
gaacguccacgacugcuac

SEQ ID NO: 50611 - RNA, 19 nt, Artificial Sequence
  Description of Artificial Sequence: Synthetic oligonucleotide
cuauaguaagccaguuuaa

SEQ ID NO: 50612 - RNA, 19 nt, Artificial Sequence
  Description of Artificial Sequence: Synthetic oligonucleotide
cuaggcgucccggaguagc

SEQ ID NO: 50613 - RNA, 19 nt, Artificial Sequence
  Description of Artificial Sequence: Synthetic oligonucleotide
gaucgguaugagaauuuuc

SEQ ID NO: 50614 - RNA, 19 nt, Artificial Sequence
  Description of Artificial Sequence: Synthetic oligonucleotide
cuaaagcuacagugacuug

SEQ ID NO: 50615 - RNA, 19 nt, Artificial Sequence
  Description of Artificial Sequence: Synthetic oligonucleotide
ucgaaucuguugaccaauu

SEQ ID NO: 50616 - RNA, 19 nt, Artificial Sequence
  Description of Artificial Sequence: Synthetic oligonucleotide
cacuagcaugcguuauuag

SEQ ID NO: 50617 - RNA, 19 nt, Artificial Sequence
  Description of Artificial Sequence: Synthetic oligonucleotide
ggaguuaauccaaacuaca

SEQ ID NO: 50618 - RNA, 19 nt, Artificial Sequence
  Description of Artificial Sequence: Synthetic oligonucleotide
aguuugggauaagggguag

SEQ ID NO: 50619 - RNA, 19 nt, Artificial Sequence
  Description of Artificial Sequence: Synthetic oligonucleotide
ggcggacaccuuuuggagg

SEQ ID NO: 50620 - RNA, 19 nt, Artificial Sequence
  Description of Artificial Sequence: Synthetic oligonucleotide
agcaacuaacaaguggcau

SEQ ID NO: 50621 - RNA, 19 nt, Artificial Sequence
  Description of Artificial Sequence: Synthetic oligonucleotide
ugguauuaucaaagccuua

SEQ ID NO: 50622 - RNA, 19 nt, Artificial Sequence
  Description of Artificial Sequence: Synthetic oligonucleotide
cauaguguggcggacaccu

SEQ ID NO: 50623 - RNA, 19 nt, Artificial Sequence
  Description of Artificial Sequence: Synthetic oligonucleotide
caacuauccugcgaaucug

SEQ ID NO: 50624 - RNA, 19 nt, Artificial Sequence
  Description of Artificial Sequence: Synthetic oligonucleotide
caaauacuagggucaggga

SEQ ID NO: 50625 - RNA, 19 nt, Artificial Sequence
  Description of Artificial Sequence: Synthetic oligonucleotide
gggauaagggguaggcggg

SEQ ID NO: 50626 - RNA, 19 nt, Artificial Sequence
  Description of Artificial Sequence: Synthetic oligonucleotide
uauaugagggcuggucauu

SEQ ID NO: 50627 - RNA, 19 nt, Artificial Sequence
  Description of Artificial Sequence: Synthetic oligonucleotide
cacaaggacgaacucuaga

SEQ ID NO: 50628 - RNA, 19 nt, Artificial Sequence
  Description of Artificial Sequence: Synthetic oligonucleotide
acaccgccaaugccggguc

SEQ ID NO: 50629 - RNA, 19 nt, Artificial Sequence
  Description of Artificial Sequence: Synthetic oligonucleotide
agccauucuaccauuucaa

SEQ ID NO: 50630 - RNA, 19 nt, Artificial Sequence
  Description of Artificial Sequence: Synthetic oligonucleotide
agaaaucacgggccagcau

SEQ ID NO: 50631 - RNA, 19 nt, Artificial Sequence
  Description of Artificial Sequence: Synthetic oligonucleotide
cuaauuccauuaauaugcu

SEQ ID NO: 50632 - RNA, 19 nt, Artificial Sequence
  Description of Artificial Sequence: Synthetic oligonucleotide
caagucgccaauuuuguuu

SEQ ID NO: 50633 - RNA, 19 nt, Artificial Sequence
  Description of Artificial Sequence: Synthetic oligonucleotide
uggcauccacguucuaagu

SEQ ID NO: 50634 - RNA, 19 nt, Artificial Sequence
  Description of Artificial Sequence: Synthetic oligonucleotide
ccuguuaaguuguaucaca

SEQ ID NO: 50635 - RNA, 19 nt, Artificial Sequence
  Description of Artificial Sequence: Synthetic oligonucleotide
gcaccuacuuaauaaaagu

SEQ ID NO: 50636 - RNA, 19 nt, Artificial Sequence
  Description of Artificial Sequence: Synthetic oligonucleotide
ucuaaccaagauggcacuu

SEQ ID NO: 50637 - RNA, 19 nt, Artificial Sequence
  Description of Artificial Sequence: Synthetic oligonucleotide
cucuuagaacguccacgac

SEQ ID NO: 50638 - RNA, 19 nt, Artificial Sequence
  Description of Artificial Sequence: Synthetic oligonucleotide
gccguagccacuagaauug

SEQ ID NO: 50639 - RNA, 19 nt, Artificial Sequence
  Description of Artificial Sequence: Synthetic oligonucleotide
gcgggaggggaguuaaucc

SEQ ID NO: 50640 - RNA, 19 nt, Artificial Sequence
  Description of Artificial Sequence: Synthetic oligonucleotide
accccgaaauauauaauuu

SEQ ID NO: 50641 - RNA, 19 nt, Artificial Sequence
  Description of Artificial Sequence: Synthetic oligonucleotide
ccuuaaugcaggcuaccac

SEQ ID NO: 50642 - RNA, 19 nt, Artificial Sequence
  Description of Artificial Sequence: Synthetic oligonucleotide
agaucgguaugagaauuuu

SEQ ID NO: 50643 - RNA, 19 nt, Artificial Sequence
  Description of Artificial Sequence: Synthetic oligonucleotide
cccaguacggccuaugcga

SEQ ID NO: 50644 - RNA, 19 nt, Artificial Sequence
  Description of Artificial Sequence: Synthetic oligonucleotide
acacuagcaugcguuauua

SEQ ID NO: 50645 - RNA, 19 nt, Artificial Sequence
  Description of Artificial Sequence: Synthetic oligonucleotide
gaguaaugugaaucggcau

SEQ ID NO: 50646 - RNA, 19 nt, Artificial Sequence
  Description of Artificial Sequence: Synthetic oligonucleotide
ccuauaugagggcugguca

SEQ ID NO: 50647 - RNA, 19 nt, Artificial Sequence
  Description of Artificial Sequence: Synthetic oligonucleotide
ccaccuucgaacagggcug

SEQ ID NO: 50648 - RNA, 19 nt, Artificial Sequence
  Description of Artificial Sequence: Synthetic oligonucleotide
aaaugaccguuuguccauu

SEQ ID NO: 50649 - RNA, 19 nt, Artificial Sequence
  Description of Artificial Sequence: Synthetic oligonucleotide
uacggccuaugcgauguac

SEQ ID NO: 50650 - RNA, 19 nt, Artificial Sequence
  Description of Artificial Sequence: Synthetic oligonucleotide
gcuacaccgccaaugccgg

SEQ ID NO: 50651 - RNA, 19 nt, Artificial Sequence
  Description of Artificial Sequence: Synthetic oligonucleotide
ggaugaaucgaugauuccu

SEQ ID NO: 50652 - RNA, 19 nt, Artificial Sequence
  Description of Artificial Sequence: Synthetic oligonucleotide
ugcgaaucugagguucaaa

SEQ ID NO: 50653 - RNA, 19 nt, Artificial Sequence
  Description of Artificial Sequence: Synthetic oligonucleotide
accugugugccaagguuug

SEQ ID NO: 50654 - RNA, 19 nt, Artificial Sequence
  Description of Artificial Sequence: Synthetic oligonucleotide
gcccaguacggccuaugcg

SEQ ID NO: 50655 - RNA, 19 nt, Artificial Sequence
  Description of Artificial Sequence: Synthetic oligonucleotide
agucuauaguaagccaguu

SEQ ID NO: 50656 - RNA, 19 nt, Artificial Sequence
  Description of Artificial Sequence: Synthetic oligonucleotide
ucucucguuggugccagua

SEQ ID NO: 50657 - RNA, 19 nt, Artificial Sequence
  Description of Artificial Sequence: Synthetic oligonucleotide
auugagcguuuugaucacu

SEQ ID NO: 50658 - RNA, 19 nt, Artificial Sequence
  Description of Artificial Sequence: Synthetic oligonucleotide
aaugccgggucugcuuaau

SEQ ID NO: 50659 - RNA, 19 nt, Artificial Sequence
  Description of Artificial Sequence: Synthetic oligonucleotide
auccacuaggcgucccgga

SEQ ID NO: 50660 - RNA, 19 nt, Artificial Sequence
  Description of Artificial Sequence: Synthetic oligonucleotide
caugcguuauuagaccaaa

SEQ ID NO: 50661 - RNA, 19 nt, Artificial Sequence
  Description of Artificial Sequence: Synthetic oligonucleotide
aaucggcauuuaaaauaaa

SEQ ID NO: 50662 - RNA, 19 nt, Artificial Sequence
  Description of Artificial Sequence: Synthetic oligonucleotide
aggauagagugagcaaaau

SEQ ID NO: 50663 - RNA, 19 nt, Artificial Sequence
  Description of Artificial Sequence: Synthetic oligonucleotide
agaacguccacgacugcua

SEQ ID NO: 50664 - RNA, 19 nt, Artificial Sequence
  Description of Artificial Sequence: Synthetic oligonucleotide
ugcuacccuuguaguggug

SEQ ID NO: 50665 - RNA, 19 nt, Artificial Sequence
  Description of Artificial Sequence: Synthetic oligonucleotide
uuauggcuacaccgccaau

SEQ ID NO: 50666 - RNA, 19 nt, Artificial Sequence
  Description of Artificial Sequence: Synthetic oligonucleotide
cuauaugagggcuggucau

SEQ ID NO: 50667 - RNA, 19 nt, Artificial Sequence
  Description of Artificial Sequence: Synthetic oligonucleotide
cugguaauguacugcgagu

SEQ ID NO: 50668 - RNA, 19 nt, Artificial Sequence
  Description of Artificial Sequence: Synthetic oligonucleotide
caucauaguguggcggaca

SEQ ID NO: 50669 - RNA, 19 nt, Artificial Sequence
  Description of Artificial Sequence: Synthetic oligonucleotide
uggcaugauuuaguuucaa

SEQ ID NO: 50670 - RNA, 19 nt, Artificial Sequence
  Description of Artificial Sequence: Synthetic oligonucleotide
gcggaacuggugaagggcc

SEQ ID NO: 50671 - RNA, 19 nt, Artificial Sequence
  Description of Artificial Sequence: Synthetic oligonucleotide
acgcauacggugacauuca

SEQ ID NO: 50672 - RNA, 19 nt, Artificial Sequence
  Description of Artificial Sequence: Synthetic oligonucleotide
ccgccauaaaccacacaag

SEQ ID NO: 50673 - RNA, 19 nt, Artificial Sequence
  Description of Artificial Sequence: Synthetic oligonucleotide
caguacggccuaugcgaug

SEQ ID NO: 50674 - RNA, 19 nt, Artificial Sequence
  Description of Artificial Sequence: Synthetic oligonucleotide
caccuucgaacagggcugc

SEQ ID NO: 50675 - RNA, 19 nt, Artificial Sequence
  Description of Artificial Sequence: Synthetic oligonucleotide
aagcugcguucaacaaucu

SEQ ID NO: 50676 - RNA, 19 nt, Artificial Sequence
  Description of Artificial Sequence: Synthetic oligonucleotide
accgccaaugccgggucug

SEQ ID NO: 50677 - RNA, 19 nt, Artificial Sequence
  Description of Artificial Sequence: Synthetic oligonucleotide
guaucacaccugugugcca

SEQ ID NO: 50678 - RNA, 19 nt, Artificial Sequence
  Description of Artificial Sequence: Synthetic oligonucleotide
cagcaccgccauaaaccac

SEQ ID NO: 50679 - RNA, 19 nt, Artificial Sequence
  Description of Artificial Sequence: Synthetic oligonucleotide
cuagaucgguaugagaauu

SEQ ID NO: 50680 - RNA, 19 nt, Artificial Sequence
  Description of Artificial Sequence: Synthetic oligonucleotide
cuccacuaaaucgacugcu

SEQ ID NO: 50681 - RNA, 19 nt, Artificial Sequence
  Description of Artificial Sequence: Synthetic oligonucleotide
cguagccacuagaauuggg

SEQ ID NO: 50682 - RNA, 19 nt, Artificial Sequence
  Description of Artificial Sequence: Synthetic oligonucleotide
ccuaugcaacuaaaacuga

SEQ ID NO: 50683 - RNA, 19 nt, Artificial Sequence
  Description of Artificial Sequence: Synthetic oligonucleotide
caauaucacuaggcagguc

SEQ ID NO: 50684 - RNA, 19 nt, Artificial Sequence
  Description of Artificial Sequence: Synthetic oligonucleotide
cgaacucuagaucgguaug

SEQ ID NO: 50685 - RNA, 19 nt, Artificial Sequence
  Description of Artificial Sequence: Synthetic oligonucleotide
cuccgaaguagacccaacu

SEQ ID NO: 50686 - RNA, 19 nt, Artificial Sequence
  Description of Artificial Sequence: Synthetic oligonucleotide
gcuaaguuacaugugguuu

SEQ ID NO: 50687 - RNA, 19 nt, Artificial Sequence
  Description of Artificial Sequence: Synthetic oligonucleotide
gcauacggugacauucaac

SEQ ID NO: 50688 - RNA, 19 nt, Artificial Sequence
  Description of Artificial Sequence: Synthetic oligonucleotide
acaucucaacgcagcuuga

SEQ ID NO: 50689 - RNA, 19 nt, Artificial Sequence
  Description of Artificial Sequence: Synthetic oligonucleotide
augcguuauuagaccaaaa

SEQ ID NO: 50690 - RNA, 19 nt, Artificial Sequence
  Description of Artificial Sequence: Synthetic oligonucleotide
cacuaggcgucccggagua

SEQ ID NO: 50691 - RNA, 19 nt, Artificial Sequence
  Description of Artificial Sequence: Synthetic oligonucleotide
auccugcgaaucugagguu

SEQ ID NO: 50692 - RNA, 19 nt, Artificial Sequence
  Description of Artificial Sequence: Synthetic oligonucleotide
cuaucucucugagaacggu

SEQ ID NO: 50693 - RNA, 19 nt, Artificial Sequence
  Description of Artificial Sequence: Synthetic oligonucleotide
guucaacuauccugcgaau

SEQ ID NO: 50694 - RNA, 19 nt, Artificial Sequence
  Description of Artificial Sequence: Synthetic oligonucleotide
ggcgggaggggaguuaauc

SEQ ID NO: 50695 - RNA, 19 nt, Artificial Sequence
  Description of Artificial Sequence: Synthetic oligonucleotide
cuaccccgaaauauauaau

SEQ ID NO: 50696 - RNA, 19 nt, Artificial Sequence
  Description of Artificial Sequence: Synthetic oligonucleotide
ccuucgaacagggcugcug

SEQ ID NO: 50697 - RNA, 19 nt, Artificial Sequence
  Description of Artificial Sequence: Synthetic oligonucleotide
cugucaagugcaccuacuu

SEQ ID NO: 50698 - RNA, 19 nt, Artificial Sequence
  Description of Artificial Sequence: Synthetic oligonucleotide
ccaaggagauuggguauug

SEQ ID NO: 50699 - RNA, 19 nt, Artificial Sequence
  Description of Artificial Sequence: Synthetic oligonucleotide
gcaucuaaacuaauacaau

SEQ ID NO: 50700 - RNA, 19 nt, Artificial Sequence
  Description of Artificial Sequence: Synthetic oligonucleotide
gcuacugccguagccacua

SEQ ID NO: 50701 - RNA, 19 nt, Artificial Sequence
  Description of Artificial Sequence: Synthetic oligonucleotide
ggaggcauaguaucuuguu

SEQ ID NO: 50702 - RNA, 19 nt, Artificial Sequence
  Description of Artificial Sequence: Synthetic oligonucleotide
ggauaagggguaggcggga

SEQ ID NO: 50703 - RNA, 19 nt, Artificial Sequence
  Description of Artificial Sequence: Synthetic oligonucleotide
caaugccgggucugcuuaa

SEQ ID NO: 50704 - RNA, 19 nt, Artificial Sequence
  Description of Artificial Sequence: Synthetic oligonucleotide
caccacuacuuugucgaua

SEQ ID NO: 50705 - RNA, 19 nt, Artificial Sequence
  Description of Artificial Sequence: Synthetic oligonucleotide
ccguagccacuagaauugg

SEQ ID NO: 50706 - RNA, 19 nt, Artificial Sequence
  Description of Artificial Sequence: Synthetic oligonucleotide
gccauucuaccauuucaau

SEQ ID NO: 50707 - RNA, 19 nt, Artificial Sequence
  Description of Artificial Sequence: Synthetic oligonucleotide
gcaugcguuauuagaccaa

SEQ ID NO: 50708 - RNA, 19 nt, Artificial Sequence
  Description of Artificial Sequence: Synthetic oligonucleotide
guccacgacugcuacccuu

SEQ ID NO: 50709 - RNA, 19 nt, Artificial Sequence
  Description of Artificial Sequence: Synthetic oligonucleotide
gggccuaaaccuagacuaa

SEQ ID NO: 50710 - RNA, 19 nt, Artificial Sequence
  Description of Artificial Sequence: Synthetic oligonucleotide
auaguguggcggacaccuu

SEQ ID NO: 50711 - RNA, 19 nt, Artificial Sequence
  Description of Artificial Sequence: Synthetic oligonucleotide
guaggcgggaggggaguua

SEQ ID NO: 50712 - RNA, 19 nt, Artificial Sequence
  Description of Artificial Sequence: Synthetic oligonucleotide
cgaaguagacccaacucuu

SEQ ID NO: 50713 - RNA, 19 nt, Artificial Sequence
  Description of Artificial Sequence: Synthetic oligonucleotide
ggccuaaaccuagacuaau

SEQ ID NO: 50714 - RNA, 19 nt, Artificial Sequence
  Description of Artificial Sequence: Synthetic oligonucleotide
gccuaaaccuagacuaauu

SEQ ID NO: 50715 - RNA, 19 nt, Artificial Sequence
  Description of Artificial Sequence: Synthetic oligonucleotide
guacggccuaugcgaugua

SEQ ID NO: 50716 - RNA, 19 nt, Artificial Sequence
  Description of Artificial Sequence: Synthetic oligonucleotide
ggcuaccacuuuucuuuau

SEQ ID NO: 50717 - RNA, 19 nt, Artificial Sequence
  Description of Artificial Sequence: Synthetic oligonucleotide
ccgccaaugccgggucugc

SEQ ID NO: 50718 - RNA, 19 nt, Artificial Sequence
  Description of Artificial Sequence: Synthetic oligonucleotide
ccacuaggcgucccggagu

SEQ ID NO: 50719 - RNA, 19 nt, Artificial Sequence
  Description of Artificial Sequence: Synthetic oligonucleotide
caccgccaaugccgggucu

SEQ ID NO: 50720 - RNA, 19 nt, Artificial Sequence
  Description of Artificial Sequence: Synthetic oligonucleotide
cgcauacggugacauucaa

SEQ ID NO: 50721 - RNA, 19 nt, Artificial Sequence
  Description of Artificial Sequence: Synthetic oligonucleotide
cggccuaugcgauguacau

SEQ ID NO: 50722 - RNA, 19 nt, Artificial Sequence
  Description of Artificial Sequence: Synthetic oligonucleotide
ccuaugcgauguacauauu

SEQ ID NO: 50723 - RNA, 19 nt, Artificial Sequence
  Description of Artificial Sequence: Synthetic oligonucleotide
ccacgacugcuacccuugu

SEQ ID NO: 50724 - RNA, 19 nt, Artificial Sequence
  Description of Artificial Sequence: Synthetic oligonucleotide
ccccaucugcugguauuau

SEQ ID NO: 50725 - RNA, 19 nt, Artificial Sequence
  Description of Artificial Sequence: Synthetic oligonucleotide
cgccaaugccgggucugcu

SEQ ID NO: 50726 - RNA, 19 nt, Artificial Sequence
  Description of Artificial Sequence: Synthetic oligonucleotide
uuuauuauagcucugagau

SEQ ID NO: 50727 - RNA, 19 nt, Artificial Sequence
  Description of Artificial Sequence: Synthetic oligonucleotide
uaaaagaugacuauuauaa

SEQ ID NO: 50728 - RNA, 19 nt, Artificial Sequence
  Description of Artificial Sequence: Synthetic oligonucleotide
aaauaguacagcuaagcgg

SEQ ID NO: 50729 - RNA, 19 nt, Artificial Sequence
  Description of Artificial Sequence: Synthetic oligonucleotide
cuaaauagaaugaucaugg

SEQ ID NO: 50730 - RNA, 19 nt, Artificial Sequence
  Description of Artificial Sequence: Synthetic oligonucleotide
aauagaaugaucauggaag

SEQ ID NO: 50731 - RNA, 19 nt, Artificial Sequence
  Description of Artificial Sequence: Synthetic oligonucleotide
auaaauaaccucuugcuac

SEQ ID NO: 50732 - RNA, 19 nt, Artificial Sequence
  Description of Artificial Sequence: Synthetic oligonucleotide
ugcgauacuauucugaagg

SEQ ID NO: 50733 - RNA, 19 nt, Artificial Sequence
  Description of Artificial Sequence: Synthetic oligonucleotide
uaugcgacugauuaaauag

SEQ ID NO: 50734 - RNA, 19 nt, Artificial Sequence
  Description of Artificial Sequence: Synthetic oligonucleotide
aaaacucagauacacuuag

SEQ ID NO: 50735 - RNA, 19 nt, Artificial Sequence
  Description of Artificial Sequence: Synthetic oligonucleotide
aaaccuauaauuuuauuau

SEQ ID NO: 50736 - RNA, 19 nt, Artificial Sequence
  Description of Artificial Sequence: Synthetic oligonucleotide
ugaacaauguuaaaauaag

SEQ ID NO: 50737 - RNA, 19 nt, Artificial Sequence
  Description of Artificial Sequence: Synthetic oligonucleotide
aauacacuaauacuuucag

SEQ ID NO: 50738 - RNA, 19 nt, Artificial Sequence
  Description of Artificial Sequence: Synthetic oligonucleotide
auuaaugacauuauuggac

SEQ ID NO: 50739 - RNA, 19 nt, Artificial Sequence
  Description of Artificial Sequence: Synthetic oligonucleotide
aggugaauaugccacaugc

SEQ ID NO: 50740 - RNA, 19 nt, Artificial Sequence
  Description of Artificial Sequence: Synthetic oligonucleotide
cagacaaacauaaauuugg

SEQ ID NO: 50741 - RNA, 19 nt, Artificial Sequence
  Description of Artificial Sequence: Synthetic oligonucleotide
uguugaaucagacaaacau

SEQ ID NO: 50742 - RNA, 19 nt, Artificial Sequence
  Description of Artificial Sequence: Synthetic oligonucleotide
cucagauacacuuagcggg

SEQ ID NO: 50743 - RNA, 19 nt, Artificial Sequence
  Description of Artificial Sequence: Synthetic oligonucleotide
aaaugcuagaguuugggca

SEQ ID NO: 50744 - RNA, 19 nt, Artificial Sequence
  Description of Artificial Sequence: Synthetic oligonucleotide
aaugcuagaguuugggcag

SEQ ID NO: 50745 - RNA, 19 nt, Artificial Sequence
  Description of Artificial Sequence: Synthetic oligonucleotide
aacaaugcgauacuauucu

SEQ ID NO: 50746 - RNA, 19 nt, Artificial Sequence
  Description of Artificial Sequence: Synthetic oligonucleotide
auagggaauagguaauagc

SEQ ID NO: 50747 - RNA, 19 nt, Artificial Sequence
  Description of Artificial Sequence: Synthetic oligonucleotide
ucugaugccauuuaacuac

SEQ ID NO: 50748 - RNA, 19 nt, Artificial Sequence
  Description of Artificial Sequence: Synthetic oligonucleotide
auaggauaucuucagauug

SEQ ID NO: 50749 - RNA, 19 nt, Artificial Sequence
  Description of Artificial Sequence: Synthetic oligonucleotide
cuaggugacaugaauagag

SEQ ID NO: 50750 - RNA, 19 nt, Artificial Sequence
  Description of Artificial Sequence: Synthetic oligonucleotide
ugcacuaggagucuguuca

SEQ ID NO: 50751 - RNA, 19 nt, Artificial Sequence
  Description of Artificial Sequence: Synthetic oligonucleotide
aaauagaaugaucauggaa

SEQ ID NO: 50752 - RNA, 19 nt, Artificial Sequence
  Description of Artificial Sequence: Synthetic oligonucleotide
acgaguaauaaauaaccuc

SEQ ID NO: 50753 - RNA, 19 nt, Artificial Sequence
  Description of Artificial Sequence: Synthetic oligonucleotide
agcuuuauagaucugcgag

SEQ ID NO: 50754 - RNA, 19 nt, Artificial Sequence
  Description of Artificial Sequence: Synthetic oligonucleotide
ugagauacuacaugaaaac

SEQ ID NO: 50755 - RNA, 19 nt, Artificial Sequence
  Description of Artificial Sequence: Synthetic oligonucleotide
uaagguaugcgacugauua

SEQ ID NO: 50756 - RNA, 19 nt, Artificial Sequence
  Description of Artificial Sequence: Synthetic oligonucleotide
uguacugccuuuuaguugu

SEQ ID NO: 50757 - RNA, 19 nt, Artificial Sequence
  Description of Artificial Sequence: Synthetic oligonucleotide
uucagcguuguauacauug

SEQ ID NO: 50758 - RNA, 19 nt, Artificial Sequence
  Description of Artificial Sequence: Synthetic oligonucleotide
uaucauccuuaauauaagg

SEQ ID NO: 50759 - RNA, 19 nt, Artificial Sequence
  Description of Artificial Sequence: Synthetic oligonucleotide
ucaguuaugaguacccaca

SEQ ID NO: 50760 - RNA, 19 nt, Artificial Sequence
  Description of Artificial Sequence: Synthetic oligonucleotide
ugaauaugccacaugccag

SEQ ID NO: 50761 - RNA, 19 nt, Artificial Sequence
  Description of Artificial Sequence: Synthetic oligonucleotide
aagaaaucauaccauacuu

SEQ ID NO: 50762 - RNA, 19 nt, Artificial Sequence
  Description of Artificial Sequence: Synthetic oligonucleotide
agaaacaugaugccaaccu

SEQ ID NO: 50763 - RNA, 19 nt, Artificial Sequence
  Description of Artificial Sequence: Synthetic oligonucleotide
aaccgaaucauggguaacc

SEQ ID NO: 50764 - RNA, 19 nt, Artificial Sequence
  Description of Artificial Sequence: Synthetic oligonucleotide
aucuaggugacaugaauag

SEQ ID NO: 50765 - RNA, 19 nt, Artificial Sequence
  Description of Artificial Sequence: Synthetic oligonucleotide
gguauuaugaaauagccaa

SEQ ID NO: 50766 - RNA, 19 nt, Artificial Sequence
  Description of Artificial Sequence: Synthetic oligonucleotide
ucuaagagaccauauugca

SEQ ID NO: 50767 - RNA, 19 nt, Artificial Sequence
  Description of Artificial Sequence: Synthetic oligonucleotide
aaagcauuaaacacgagua

SEQ ID NO: 50768 - RNA, 19 nt, Artificial Sequence
  Description of Artificial Sequence: Synthetic oligonucleotide
uuauagaucugcgaguuca

SEQ ID NO: 50769 - RNA, 19 nt, Artificial Sequence
  Description of Artificial Sequence: Synthetic oligonucleotide
acucagauacacuuagcgg

SEQ ID NO: 50770 - RNA, 19 nt, Artificial Sequence
  Description of Artificial Sequence: Synthetic oligonucleotide
cacuaauacuuucagaaac

SEQ ID NO: 50771 - RNA, 19 nt, Artificial Sequence
  Description of Artificial Sequence: Synthetic oligonucleotide
gguggaauacaaaauaugg

SEQ ID NO: 50772 - RNA, 19 nt, Artificial Sequence
  Description of Artificial Sequence: Synthetic oligonucleotide
uccacgauauaguuaaaug

SEQ ID NO: 50773 - RNA, 19 nt, Artificial Sequence
  Description of Artificial Sequence: Synthetic oligonucleotide
ugcgaguucaagaaucuug

SEQ ID NO: 50774 - RNA, 19 nt, Artificial Sequence
  Description of Artificial Sequence: Synthetic oligonucleotide
auuuuagaacuggagggcc

SEQ ID NO: 50775 - RNA, 19 nt, Artificial Sequence
  Description of Artificial Sequence: Synthetic oligonucleotide
aaugcgauacuauucugaa

SEQ ID NO: 50776 - RNA, 19 nt, Artificial Sequence
  Description of Artificial Sequence: Synthetic oligonucleotide
aaggucagaaauacaugcc

SEQ ID NO: 50777 - RNA, 19 nt, Artificial Sequence
  Description of Artificial Sequence: Synthetic oligonucleotide
uuaaucauagcuccugaau

SEQ ID NO: 50778 - RNA, 19 nt, Artificial Sequence
  Description of Artificial Sequence: Synthetic oligonucleotide
uacuuauauuuucuguccc

SEQ ID NO: 50779 - RNA, 19 nt, Artificial Sequence
  Description of Artificial Sequence: Synthetic oligonucleotide
uacauugcucaguggaugg

SEQ ID NO: 50780 - RNA, 19 nt, Artificial Sequence
  Description of Artificial Sequence: Synthetic oligonucleotide
uaaagcuagagggacaaca

SEQ ID NO: 50781 - RNA, 19 nt, Artificial Sequence
  Description of Artificial Sequence: Synthetic oligonucleotide
aaaagaugacuauuauaaa

SEQ ID NO: 50782 - RNA, 19 nt, Artificial Sequence
  Description of Artificial Sequence: Synthetic oligonucleotide
auugguggaauacaaaaua

SEQ ID NO: 50783 - RNA, 19 nt, Artificial Sequence
  Description of Artificial Sequence: Synthetic oligonucleotide
uagaacaaguguugaauca

SEQ ID NO: 50784 - RNA, 19 nt, Artificial Sequence
  Description of Artificial Sequence: Synthetic oligonucleotide
  modified_base (3)..(3): a, c, u, g, unknown or other
ucncauuucagcugcuuca

SEQ ID NO: 50785 - RNA, 19 nt, Artificial Sequence
  Description of Artificial Sequence: Synthetic oligonucleotide
aauguauugguggaauaca

SEQ ID NO: 50786 - RNA, 19 nt, Artificial Sequence
  Description of Artificial Sequence: Synthetic oligonucleotide
ucauggguaaccucaauaa

SEQ ID NO: 50787 - RNA, 19 nt, Artificial Sequence
  Description of Artificial Sequence: Synthetic oligonucleotide
cucggaaaagguuucuucc

SEQ ID NO: 50788 - RNA, 19 nt, Artificial Sequence
  Description of Artificial Sequence: Synthetic oligonucleotide
uguaaagaguuacuguaau

SEQ ID NO: 50789 - RNA, 19 nt, Artificial Sequence
  Description of Artificial Sequence: Synthetic oligonucleotide
aagaugacuauuauaaaua

SEQ ID NO: 50790 - RNA, 19 nt, Artificial Sequence
  Description of Artificial Sequence: Synthetic oligonucleotide
gucauaaguccacagacac

SEQ ID NO: 50791 - RNA, 19 nt, Artificial Sequence
  Description of Artificial Sequence: Synthetic oligonucleotide
uugcaaguagaacaagugu

SEQ ID NO: 50792 - RNA, 19 nt, Artificial Sequence
  Description of Artificial Sequence: Synthetic oligonucleotide
auuaaaagaugacuauuau

SEQ ID NO: 50793 - RNA, 19 nt, Artificial Sequence
  Description of Artificial Sequence: Synthetic oligonucleotide
ucuuuaagucuucgcaggc

SEQ ID NO: 50794 - RNA, 19 nt, Artificial Sequence
  Description of Artificial Sequence: Synthetic oligonucleotide
uacuacaugaaaacaguua

SEQ ID NO: 50795 - RNA, 19 nt, Artificial Sequence
  Description of Artificial Sequence: Synthetic oligonucleotide
ugaacaaugcgauacuauu

SEQ ID NO: 50796 - RNA, 19 nt, Artificial Sequence
  Description of Artificial Sequence: Synthetic oligonucleotide
aucuucguacaugugaggg

SEQ ID NO: 50797 - RNA, 19 nt, Artificial Sequence
  Description of Artificial Sequence: Synthetic oligonucleotide
ugauuaaauaguacagcua

SEQ ID NO: 50798 - RNA, 19 nt, Artificial Sequence
  Description of Artificial Sequence: Synthetic oligonucleotide
uuacauuauugucaugcuc

SEQ ID NO: 50799 - RNA, 19 nt, Artificial Sequence
  Description of Artificial Sequence: Synthetic oligonucleotide
guuaugaguacccacagcu

SEQ ID NO: 50800 - RNA, 19 nt, Artificial Sequence
  Description of Artificial Sequence: Synthetic oligonucleotide
cucaguggaugguauauag

SEQ ID NO: 50801 - RNA, 19 nt, Artificial Sequence
  Description of Artificial Sequence: Synthetic oligonucleotide
uaucuaggugacaugaaua

SEQ ID NO: 50802 - RNA, 19 nt, Artificial Sequence
  Description of Artificial Sequence: Synthetic oligonucleotide
agguuaaagcuagagggac

SEQ ID NO: 50803 - RNA, 19 nt, Artificial Sequence
  Description of Artificial Sequence: Synthetic oligonucleotide
aaagcagguguacuuugca

SEQ ID NO: 50804 - RNA, 19 nt, Artificial Sequence
  Description of Artificial Sequence: Synthetic oligonucleotide
uuuaagucuucgcaggcua

SEQ ID NO: 50805 - RNA, 19 nt, Artificial Sequence
  Description of Artificial Sequence: Synthetic oligonucleotide
cuaagagaccauauugcac

SEQ ID NO: 50806 - RNA, 19 nt, Artificial Sequence
  Description of Artificial Sequence: Synthetic oligonucleotide
uuuguuuauuauagcucug

SEQ ID NO: 50807 - RNA, 19 nt, Artificial Sequence
  Description of Artificial Sequence: Synthetic oligonucleotide
uugguggaauacaaaauau

SEQ ID NO: 50808 - RNA, 19 nt, Artificial Sequence
  Description of Artificial Sequence: Synthetic oligonucleotide
agggaauagguaauagccc

SEQ ID NO: 50809 - RNA, 19 nt, Artificial Sequence
  Description of Artificial Sequence: Synthetic oligonucleotide
uuaagcuuuucacuggauu

SEQ ID NO: 50810 - RNA, 19 nt, Artificial Sequence
  Description of Artificial Sequence: Synthetic oligonucleotide
aggaacucaauuucugaug

SEQ ID NO: 50811 - RNA, 19 nt, Artificial Sequence
  Description of Artificial Sequence: Synthetic oligonucleotide
ucagauacacuuagcggga

SEQ ID NO: 50812 - RNA, 19 nt, Artificial Sequence
  Description of Artificial Sequence: Synthetic oligonucleotide
agaacaaguguugaaucag

SEQ ID NO: 50813 - RNA, 19 nt, Artificial Sequence
  Description of Artificial Sequence: Synthetic oligonucleotide
ugguaggauagucagcgac

SEQ ID NO: 50814 - RNA, 19 nt, Artificial Sequence
  Description of Artificial Sequence: Synthetic oligonucleotide
uggauuaucuauucaguua

SEQ ID NO: 50815 - RNA, 19 nt, Artificial Sequence
  Description of Artificial Sequence: Synthetic oligonucleotide
uagauuacuuaacauuaua

SEQ ID NO: 50816 - RNA, 19 nt, Artificial Sequence
  Description of Artificial Sequence: Synthetic oligonucleotide
ucaacgagauaggauaucu

SEQ ID NO: 50817 - RNA, 19 nt, Artificial Sequence
  Description of Artificial Sequence: Synthetic oligonucleotide
gaccauauugcacaaaagu

SEQ ID NO: 50818 - RNA, 19 nt, Artificial Sequence
  Description of Artificial Sequence: Synthetic oligonucleotide
uuaagucuucgcaggcuag

SEQ ID NO: 50819 - RNA, 19 nt, Artificial Sequence
  Description of Artificial Sequence: Synthetic oligonucleotide
aaaauaguccuggggauau

SEQ ID NO: 50820 - RNA, 19 nt, Artificial Sequence
  Description of Artificial Sequence: Synthetic oligonucleotide
uaguauguagcaugguuaa

SEQ ID NO: 50821 - RNA, 19 nt, Artificial Sequence
  Description of Artificial Sequence: Synthetic oligonucleotide
auaucuaggugacaugaau

SEQ ID NO: 50822 - RNA, 19 nt, Artificial Sequence
  Description of Artificial Sequence: Synthetic oligonucleotide
ucaacucuauuacauggua

SEQ ID NO: 50823 - RNA, 19 nt, Artificial Sequence
  Description of Artificial Sequence: Synthetic oligonucleotide
cuaggagucuguucagagg

SEQ ID NO: 50824 - RNA, 19 nt, Artificial Sequence
  Description of Artificial Sequence: Synthetic oligonucleotide
aguuugggcagugaacaac

SEQ ID NO: 50825 - RNA, 19 nt, Artificial Sequence
  Description of Artificial Sequence: Synthetic oligonucleotide
guagaacaaguguugaauc

SEQ ID NO: 50826 - RNA, 19 nt, Artificial Sequence
  Description of Artificial Sequence: Synthetic oligonucleotide
ugaacaaccagaggagucu

SEQ ID NO: 50827 - RNA, 19 nt, Artificial Sequence
  Description of Artificial Sequence: Synthetic oligonucleotide
ucuucguacaugugagggc

SEQ ID NO: 50828 - RNA, 19 nt, Artificial Sequence
  Description of Artificial Sequence: Synthetic oligonucleotide
ucacuggauuauauguuca

SEQ ID NO: 50829 - RNA, 19 nt, Artificial Sequence
  Description of Artificial Sequence: Synthetic oligonucleotide
aggugacaugaauagagca

SEQ ID NO: 50830 - RNA, 19 nt, Artificial Sequence
  Description of Artificial Sequence: Synthetic oligonucleotide
gauacacuuagcgggagac

SEQ ID NO: 50831 - RNA, 19 nt, Artificial Sequence
  Description of Artificial Sequence: Synthetic oligonucleotide
aaaauaugagagguaguua

SEQ ID NO: 50832 - RNA, 19 nt, Artificial Sequence
  Description of Artificial Sequence: Synthetic oligonucleotide
cauuauuggacauuugaua

SEQ ID NO: 50833 - RNA, 19 nt, Artificial Sequence
  Description of Artificial Sequence: Synthetic oligonucleotide
uacacuuagcgggagacgu

SEQ ID NO: 50834 - RNA, 19 nt, Artificial Sequence
  Description of Artificial Sequence: Synthetic oligonucleotide
auguaggcauuccuuauga

SEQ ID NO: 50835 - RNA, 19 nt, Artificial Sequence
  Description of Artificial Sequence: Synthetic oligonucleotide
auauaaguuagaaaaucau

SEQ ID NO: 50836 - RNA, 19 nt, Artificial Sequence
  Description of Artificial Sequence: Synthetic oligonucleotide
guacuuugcacaugcggcc

SEQ ID NO: 50837 - RNA, 19 nt, Artificial Sequence
  Description of Artificial Sequence: Synthetic oligonucleotide
uuucaacgagauaggauau

SEQ ID NO: 50838 - RNA, 19 nt, Artificial Sequence
  Description of Artificial Sequence: Synthetic oligonucleotide
agggacaacaucaaguccu

SEQ ID NO: 50839 - RNA, 19 nt, Artificial Sequence
  Description of Artificial Sequence: Synthetic oligonucleotide
gagucucagacuaagaucu

SEQ ID NO: 50840 - RNA, 19 nt, Artificial Sequence
  Description of Artificial Sequence: Synthetic oligonucleotide
ugccauuuaacuacuuaua

SEQ ID NO: 50841 - RNA, 19 nt, Artificial Sequence
  Description of Artificial Sequence: Synthetic oligonucleotide
acuucagcguuguauacau

SEQ ID NO: 50842 - RNA, 19 nt, Artificial Sequence
  Description of Artificial Sequence: Synthetic oligonucleotide
ugcgacugauuaaauagua

SEQ ID NO: 50843 - RNA, 19 nt, Artificial Sequence
  Description of Artificial Sequence: Synthetic oligonucleotide
ucggaaaagguuucuuccu

SEQ ID NO: 50844 - RNA, 19 nt, Artificial Sequence
  Description of Artificial Sequence: Synthetic oligonucleotide
aaaccgaaucauggguaac

SEQ ID NO: 50845 - RNA, 19 nt, Artificial Sequence
  Description of Artificial Sequence: Synthetic oligonucleotide
uuguaaaguguugcuuagg

SEQ ID NO: 50846 - RNA, 19 nt, Artificial Sequence
  Description of Artificial Sequence: Synthetic oligonucleotide
guauuaugaaauagccaag

SEQ ID NO: 50847 - RNA, 19 nt, Artificial Sequence
  Description of Artificial Sequence: Synthetic oligonucleotide
gaacaaugcgauacuauuc

SEQ ID NO: 50848 - RNA, 19 nt, Artificial Sequence
  Description of Artificial Sequence: Synthetic oligonucleotide
acaguaucacucuuggauu

SEQ ID NO: 50849 - RNA, 19 nt, Artificial Sequence
  Description of Artificial Sequence: Synthetic oligonucleotide
ggacuaggaacacaguuug

SEQ ID NO: 50850 - RNA, 19 nt, Artificial Sequence
  Description of Artificial Sequence: Synthetic oligonucleotide
gucuucgcaggcuagccag

SEQ ID NO: 50851 - RNA, 19 nt, Artificial Sequence
  Description of Artificial Sequence: Synthetic oligonucleotide
ucuauucaguuaugaguac

SEQ ID NO: 50852 - RNA, 19 nt, Artificial Sequence
  Description of Artificial Sequence: Synthetic oligonucleotide
uccucauuccugacgguga

SEQ ID NO: 50853 - RNA, 19 nt, Artificial Sequence
  Description of Artificial Sequence: Synthetic oligonucleotide
cauagggaauagguaauag

SEQ ID NO: 50854 - RNA, 19 nt, Artificial Sequence
  Description of Artificial Sequence: Synthetic oligonucleotide
aucauggguaaccucaaua

SEQ ID NO: 50855 - RNA, 19 nt, Artificial Sequence
  Description of Artificial Sequence: Synthetic oligonucleotide
agcauuaaacacgaguaau

SEQ ID NO: 50856 - RNA, 19 nt, Artificial Sequence
  Description of Artificial Sequence: Synthetic oligonucleotide
aagguaugcgacugauuaa

SEQ ID NO: 50857 - RNA, 19 nt, Artificial Sequence
  Description of Artificial Sequence: Synthetic oligonucleotide
aaacuuugugguccacuaa

SEQ ID NO: 50858 - RNA, 19 nt, Artificial Sequence
  Description of Artificial Sequence: Synthetic oligonucleotide
aggugaguauuucauguaa

SEQ ID NO: 50859 - RNA, 19 nt, Artificial Sequence
  Description of Artificial Sequence: Synthetic oligonucleotide
auagauuacuaaauagaau

SEQ ID NO: 50860 - RNA, 19 nt, Artificial Sequence
  Description of Artificial Sequence: Synthetic oligonucleotide
uuccugacggugaggcagg

SEQ ID NO: 50861 - RNA, 19 nt, Artificial Sequence
  Description of Artificial Sequence: Synthetic oligonucleotide
cuauuauuguacauaggua

SEQ ID NO: 50862 - RNA, 19 nt, Artificial Sequence
  Description of Artificial Sequence: Synthetic oligonucleotide
uuuauagaucugcgaguuc

SEQ ID NO: 50863 - RNA, 19 nt, Artificial Sequence
  Description of Artificial Sequence: Synthetic oligonucleotide
caaugcgauacuauucuga

SEQ ID NO: 50864 - RNA, 19 nt, Artificial Sequence
  Description of Artificial Sequence: Synthetic oligonucleotide
aguacagcuaagcggcaga

SEQ ID NO: 50865 - RNA, 19 nt, Artificial Sequence
  Description of Artificial Sequence: Synthetic oligonucleotide
uggagggccauucuauaau

SEQ ID NO: 50866 - RNA, 19 nt, Artificial Sequence
  Description of Artificial Sequence: Synthetic oligonucleotide
cuuaauauaaggccaguau

SEQ ID NO: 50867 - RNA, 19 nt, Artificial Sequence
  Description of Artificial Sequence: Synthetic oligonucleotide
caguuaugaguacccacag

SEQ ID NO: 50868 - RNA, 19 nt, Artificial Sequence
  Description of Artificial Sequence: Synthetic oligonucleotide
aauagguaauagcccuuuu

SEQ ID NO: 50869 - RNA, 19 nt, Artificial Sequence
  Description of Artificial Sequence: Synthetic oligonucleotide
uauagaucugcgaguucaa

SEQ ID NO: 50870 - RNA, 19 nt, Artificial Sequence
  Description of Artificial Sequence: Synthetic oligonucleotide
ucuguucggaggaacucuc

SEQ ID NO: 50871 - RNA, 19 nt, Artificial Sequence
  Description of Artificial Sequence: Synthetic oligonucleotide
gucaggugaguauuucaug

SEQ ID NO: 50872 - RNA, 19 nt, Artificial Sequence
  Description of Artificial Sequence: Synthetic oligonucleotide
augaggguugauuguuuug

SEQ ID NO: 50873 - RNA, 19 nt, Artificial Sequence
  Description of Artificial Sequence: Synthetic oligonucleotide
cuugcuacaauuugagggu

SEQ ID NO: 50874 - RNA, 19 nt, Artificial Sequence
  Description of Artificial Sequence: Synthetic oligonucleotide
augcgauacuauucugaag

SEQ ID NO: 50875 - RNA, 19 nt, Artificial Sequence
  Description of Artificial Sequence: Synthetic oligonucleotide
aucuauucaauggaauaaa

SEQ ID NO: 50876 - RNA, 19 nt, Artificial Sequence
  Description of Artificial Sequence: Synthetic oligonucleotide
acaugggagaauucuuuau

SEQ ID NO: 50877 - RNA, 19 nt, Artificial Sequence
  Description of Artificial Sequence: Synthetic oligonucleotide
gcgaguucaagaaucuugg

SEQ ID NO: 50878 - RNA, 19 nt, Artificial Sequence
  Description of Artificial Sequence: Synthetic oligonucleotide
uuagcgggagacgucugag

SEQ ID NO: 50879 - RNA, 19 nt, Artificial Sequence
  Description of Artificial Sequence: Synthetic oligonucleotide
aauaucuaggugacaugaa

SEQ ID NO: 50880 - RNA, 19 nt, Artificial Sequence
  Description of Artificial Sequence: Synthetic oligonucleotide
aaucauggguaaccucaau

SEQ ID NO: 50881 - RNA, 19 nt, Artificial Sequence
  Description of Artificial Sequence: Synthetic oligonucleotide
agcgacgccaguguaaaca

SEQ ID NO: 50882 - RNA, 19 nt, Artificial Sequence
  Description of Artificial Sequence: Synthetic oligonucleotide
gauuacuaaauagaaugau

SEQ ID NO: 50883 - RNA, 19 nt, Artificial Sequence
  Description of Artificial Sequence: Synthetic oligonucleotide
ggagucucagacuaagauc

SEQ ID NO: 50884 - RNA, 19 nt, Artificial Sequence
  Description of Artificial Sequence: Synthetic oligonucleotide
acgagauaggauaucuuca

SEQ ID NO: 50885 - RNA, 19 nt, Artificial Sequence
  Description of Artificial Sequence: Synthetic oligonucleotide
ggauauugauauugaaaga

SEQ ID NO: 50886 - RNA, 19 nt, Artificial Sequence
  Description of Artificial Sequence: Synthetic oligonucleotide
agguaugcgacugauuaaa

SEQ ID NO: 50887 - RNA, 19 nt, Artificial Sequence
  Description of Artificial Sequence: Synthetic oligonucleotide
ugugaacaaugcgauacua

SEQ ID NO: 50888 - RNA, 19 nt, Artificial Sequence
  Description of Artificial Sequence: Synthetic oligonucleotide
auacacuuagcgggagacg

SEQ ID NO: 50889 - RNA, 19 nt, Artificial Sequence
  Description of Artificial Sequence: Synthetic oligonucleotide
uguugccuauuuaggugac

SEQ ID NO: 50890 - RNA, 19 nt, Artificial Sequence
  Description of Artificial Sequence: Synthetic oligonucleotide
ucauugaguuuaagauuaa

SEQ ID NO: 50891 - RNA, 19 nt, Artificial Sequence
  Description of Artificial Sequence: Synthetic oligonucleotide
ucguacaugugagggcuag

SEQ ID NO: 50892 - RNA, 19 nt, Artificial Sequence
  Description of Artificial Sequence: Synthetic oligonucleotide
ccacgauauaguuaaauga

SEQ ID NO: 50893 - RNA, 19 nt, Artificial Sequence
  Description of Artificial Sequence: Synthetic oligonucleotide
gaacaaguguugaaucaga

SEQ ID NO: 50894 - RNA, 19 nt, Artificial Sequence
  Description of Artificial Sequence: Synthetic oligonucleotide
cagguuaaagcuagaggga

SEQ ID NO: 50895 - RNA, 19 nt, Artificial Sequence
  Description of Artificial Sequence: Synthetic oligonucleotide
  modified_base (6)..(6): a, c, u, g, unknown or other
uuuucncauuucagcugcu

SEQ ID NO: 50896 - RNA, 19 nt, Artificial Sequence
  Description of Artificial Sequence: Synthetic oligonucleotide
agauacacuuagcgggaga

SEQ ID NO: 50897 - RNA, 19 nt, Artificial Sequence
  Description of Artificial Sequence: Synthetic oligonucleotide
ggcaauuguuucuaagaga

SEQ ID NO: 50898 - RNA, 19 nt, Artificial Sequence
  Description of Artificial Sequence: Synthetic oligonucleotide
cuagaguuugggcagugaa

SEQ ID NO: 50899 - RNA, 19 nt, Artificial Sequence
  Description of Artificial Sequence: Synthetic oligonucleotide
acgauauaguuaaaugaaa

SEQ ID NO: 50900 - RNA, 19 nt, Artificial Sequence
  Description of Artificial Sequence: Synthetic oligonucleotide
aguaaauaucuaggugaca

SEQ ID NO: 50901 - RNA, 19 nt, Artificial Sequence
  Description of Artificial Sequence: Synthetic oligonucleotide
guaugcgacugauuaaaua

SEQ ID NO: 50902 - RNA, 19 nt, Artificial Sequence
  Description of Artificial Sequence: Synthetic oligonucleotide
caacucuauuacaugguaa

SEQ ID NO: 50903 - RNA, 19 nt, Artificial Sequence
  Description of Artificial Sequence: Synthetic oligonucleotide
caguuugcuugcaaguaga

SEQ ID NO: 50904 - RNA, 19 nt, Artificial Sequence
  Description of Artificial Sequence: Synthetic oligonucleotide
agcgggagacgucugaguu

SEQ ID NO: 50905 - RNA, 19 nt, Artificial Sequence
  Description of Artificial Sequence: Synthetic oligonucleotide
uagcccuuuuaaucauagc

SEQ ID NO: 50906 - RNA, 19 nt, Artificial Sequence
  Description of Artificial Sequence: Synthetic oligonucleotide
ugggugagcgcaccgcggu

SEQ ID NO: 50907 - RNA, 19 nt, Artificial Sequence
  Description of Artificial Sequence: Synthetic oligonucleotide
caaaagcuuuauagaucug

SEQ ID NO: 50908 - RNA, 19 nt, Artificial Sequence
  Description of Artificial Sequence: Synthetic oligonucleotide
gaggacuaggaacacaguu

SEQ ID NO: 50909 - RNA, 19 nt, Artificial Sequence
  Description of Artificial Sequence: Synthetic oligonucleotide
uacuuugcacaugcggccu

SEQ ID NO: 50910 - RNA, 19 nt, Artificial Sequence
  Description of Artificial Sequence: Synthetic oligonucleotide
caaaccgaaucauggguaa

SEQ ID NO: 50911 - RNA, 19 nt, Artificial Sequence
  Description of Artificial Sequence: Synthetic oligonucleotide
aggacuaggaacacaguuu

SEQ ID NO: 50912 - RNA, 19 nt, Artificial Sequence
  Description of Artificial Sequence: Synthetic oligonucleotide
uucaacgagauaggauauc

SEQ ID NO: 50913 - RNA, 19 nt, Artificial Sequence
  Description of Artificial Sequence: Synthetic oligonucleotide
ugcuugagacacagccugu

SEQ ID NO: 50914 - RNA, 19 nt, Artificial Sequence
  Description of Artificial Sequence: Synthetic oligonucleotide
gggaauagguaauagcccu

SEQ ID NO: 50915 - RNA, 19 nt, Artificial Sequence
  Description of Artificial Sequence: Synthetic oligonucleotide
ggugaauaugccacaugcc

SEQ ID NO: 50916 - RNA, 19 nt, Artificial Sequence
  Description of Artificial Sequence: Synthetic oligonucleotide
ugguuacucuuguauucau

SEQ ID NO: 50917 - RNA, 19 nt, Artificial Sequence
  Description of Artificial Sequence: Synthetic oligonucleotide
uccuuaauauaaggccagu

SEQ ID NO: 50918 - RNA, 19 nt, Artificial Sequence
  Description of Artificial Sequence: Synthetic oligonucleotide
gaaacaugaugccaaccuu

SEQ ID NO: 50919 - RNA, 19 nt, Artificial Sequence
  Description of Artificial Sequence: Synthetic oligonucleotide
guauaagguaugcgacuga

SEQ ID NO: 50920 - RNA, 19 nt, Artificial Sequence
  Description of Artificial Sequence: Synthetic oligonucleotide
aguggaugguauauaggaa

SEQ ID NO: 50921 - RNA, 19 nt, Artificial Sequence
  Description of Artificial Sequence: Synthetic oligonucleotide
accgaaucauggguaaccu

SEQ ID NO: 50922 - RNA, 19 nt, Artificial Sequence
  Description of Artificial Sequence: Synthetic oligonucleotide
augcgacugauuaaauagu

SEQ ID NO: 50923 - RNA, 19 nt, Artificial Sequence
  Description of Artificial Sequence: Synthetic oligonucleotide
acaugcggccucuggagau

SEQ ID NO: 50924 - RNA, 19 nt, Artificial Sequence
  Description of Artificial Sequence: Synthetic oligonucleotide
aacaaccagaggagucuca

SEQ ID NO: 50925 - RNA, 19 nt, Artificial Sequence
  Description of Artificial Sequence: Synthetic oligonucleotide
ggggauauugauauugaaa

SEQ ID NO: 50926 - RNA, 19 nt, Artificial Sequence
  Description of Artificial Sequence: Synthetic oligonucleotide
acccacagcuauuuuggua

SEQ ID NO: 50927 - RNA, 19 nt, Artificial Sequence
  Description of Artificial Sequence: Synthetic oligonucleotide
caagugcuaaacauaguau

SEQ ID NO: 50928 - RNA, 19 nt, Artificial Sequence
  Description of Artificial Sequence: Synthetic oligonucleotide
ccaagugcuaaacauagua

SEQ ID NO: 50929 - RNA, 19 nt, Artificial Sequence
  Description of Artificial Sequence: Synthetic oligonucleotide
aguauucucaguggauaua

SEQ ID NO: 50930 - RNA, 19 nt, Artificial Sequence
  Description of Artificial Sequence: Synthetic oligonucleotide
caguguaaugcauaugcau

SEQ ID NO: 50931 - RNA, 19 nt, Artificial Sequence
  Description of Artificial Sequence: Synthetic oligonucleotide
aggauacaugggagaauuc

SEQ ID NO: 50932 - RNA, 19 nt, Artificial Sequence
  Description of Artificial Sequence: Synthetic oligonucleotide
agccgaagggugccaaccu

SEQ ID NO: 50933 - RNA, 19 nt, Artificial Sequence
  Description of Artificial Sequence: Synthetic oligonucleotide
cuucauggcugucucucga

SEQ ID NO: 50934 - RNA, 19 nt, Artificial Sequence
  Description of Artificial Sequence: Synthetic oligonucleotide
auagccaagcaugguuacu

SEQ ID NO: 50935 - RNA, 19 nt, Artificial Sequence
  Description of Artificial Sequence: Synthetic oligonucleotide
guaaagaguuacuguaauu

SEQ ID NO: 50936 - RNA, 19 nt, Artificial Sequence
  Description of Artificial Sequence: Synthetic oligonucleotide
cagccgaagggugccaacc

SEQ ID NO: 50937 - RNA, 19 nt, Artificial Sequence
  Description of Artificial Sequence: Synthetic oligonucleotide
cuucguacaugugagggcu

SEQ ID NO: 50938 - RNA, 19 nt, Artificial Sequence
  Description of Artificial Sequence: Synthetic oligonucleotide
gaugaggguugauuguuuu

SEQ ID NO: 50939 - RNA, 19 nt, Artificial Sequence
  Description of Artificial Sequence: Synthetic oligonucleotide
cuuagcgggagacgucuga

SEQ ID NO: 50940 - RNA, 19 nt, Artificial Sequence
  Description of Artificial Sequence: Synthetic oligonucleotide
cuggauuaucuauucaguu

SEQ ID NO: 50941 - RNA, 19 nt, Artificial Sequence
  Description of Artificial Sequence: Synthetic oligonucleotide
acacuuagcgggagacguc

SEQ ID NO: 50942 - RNA, 19 nt, Artificial Sequence
  Description of Artificial Sequence: Synthetic oligonucleotide
gugcuaaacauaguaugua

SEQ ID NO: 50943 - RNA, 19 nt, Artificial Sequence
  Description of Artificial Sequence: Synthetic oligonucleotide
cagauacacuuagcgggag

SEQ ID NO: 50944 - RNA, 19 nt, Artificial Sequence
  Description of Artificial Sequence: Synthetic oligonucleotide
cagugcuacauguaggcau

SEQ ID NO: 50945 - RNA, 19 nt, Artificial Sequence
  Description of Artificial Sequence: Synthetic oligonucleotide
gcuaaaagguuugagcacu

SEQ ID NO: 50946 - RNA, 19 nt, Artificial Sequence
  Description of Artificial Sequence: Synthetic oligonucleotide
aaccuccacgauauaguua

SEQ ID NO: 50947 - RNA, 19 nt, Artificial Sequence
  Description of Artificial Sequence: Synthetic oligonucleotide
uugcuacaauuugaggguu

SEQ ID NO: 50948 - RNA, 19 nt, Artificial Sequence
  Description of Artificial Sequence: Synthetic oligonucleotide
caaacagguuaaagcuaga

SEQ ID NO: 50949 - RNA, 19 nt, Artificial Sequence
  Description of Artificial Sequence: Synthetic oligonucleotide
gccauuuaacuacuuauau

SEQ ID NO: 50950 - RNA, 19 nt, Artificial Sequence
  Description of Artificial Sequence: Synthetic oligonucleotide
gugagcgcaccgcgguccg

SEQ ID NO: 50951 - RNA, 19 nt, Artificial Sequence
  Description of Artificial Sequence: Synthetic oligonucleotide
uugcucaguggaugguaua

SEQ ID NO: 50952 - RNA, 19 nt, Artificial Sequence
  Description of Artificial Sequence: Synthetic oligonucleotide
aguuugcuugcaaguagaa

SEQ ID NO: 50953 - RNA, 19 nt, Artificial Sequence
  Description of Artificial Sequence: Synthetic oligonucleotide
gcuuuauagaucugcgagu

SEQ ID NO: 50954 - RNA, 19 nt, Artificial Sequence
  Description of Artificial Sequence: Synthetic oligonucleotide
uucguacaugugagggcua

SEQ ID NO: 50955 - RNA, 19 nt, Artificial Sequence
  Description of Artificial Sequence: Synthetic oligonucleotide
cuggagggccauucuauaa

SEQ ID NO: 50956 - RNA, 19 nt, Artificial Sequence
  Description of Artificial Sequence: Synthetic oligonucleotide
cacuucagcguuguauaca

SEQ ID NO: 50957 - RNA, 19 nt, Artificial Sequence
  Description of Artificial Sequence: Synthetic oligonucleotide
ucgcuguauucuguucgga

SEQ ID NO: 50958 - RNA, 19 nt, Artificial Sequence
  Description of Artificial Sequence: Synthetic oligonucleotide
gaauagguaauagcccuuu

SEQ ID NO: 50959 - RNA, 19 nt, Artificial Sequence
  Description of Artificial Sequence: Synthetic oligonucleotide
caggugaguauuucaugua

SEQ ID NO: 50960 - RNA, 19 nt, Artificial Sequence
  Description of Artificial Sequence: Synthetic oligonucleotide
aaauaguccuggggauauu

SEQ ID NO: 50961 - RNA, 19 nt, Artificial Sequence
  Description of Artificial Sequence: Synthetic oligonucleotide
guugauuguuuugaacaau

SEQ ID NO: 50962 - RNA, 19 nt, Artificial Sequence
  Description of Artificial Sequence: Synthetic oligonucleotide
agucagcgacgccagugua

SEQ ID NO: 50963 - RNA, 19 nt, Artificial Sequence
  Description of Artificial Sequence: Synthetic oligonucleotide
gucucucgacagcagccga

SEQ ID NO: 50964 - RNA, 19 nt, Artificial Sequence
  Description of Artificial Sequence: Synthetic oligonucleotide
ccaaaccgaaucaugggua

SEQ ID NO: 50965 - RNA, 19 nt, Artificial Sequence
  Description of Artificial Sequence: Synthetic oligonucleotide
guugccuauuuaggugaca

SEQ ID NO: 50966 - RNA, 19 nt, Artificial Sequence
  Description of Artificial Sequence: Synthetic oligonucleotide
caguaucacucuuggauuu

SEQ ID NO: 50967 - RNA, 19 nt, Artificial Sequence
  Description of Artificial Sequence: Synthetic oligonucleotide
ggauuaucaggcauauuau

SEQ ID NO: 50968 - RNA, 19 nt, Artificial Sequence
  Description of Artificial Sequence: Synthetic oligonucleotide
gacuuggauguucuccauu

SEQ ID NO: 50969 - RNA, 19 nt, Artificial Sequence
  Description of Artificial Sequence: Synthetic oligonucleotide
aguuaaggucugacaucga

SEQ ID NO: 50970 - RNA, 19 nt, Artificial Sequence
  Description of Artificial Sequence: Synthetic oligonucleotide
cacuaggagucuguucaga

SEQ ID NO: 50971 - RNA, 19 nt, Artificial Sequence
  Description of Artificial Sequence: Synthetic oligonucleotide
gucagcgacgccaguguaa

SEQ ID NO: 50972 - RNA, 19 nt, Artificial Sequence
  Description of Artificial Sequence: Synthetic oligonucleotide
ggccauucuauaauaaauu

SEQ ID NO: 50973 - RNA, 19 nt, Artificial Sequence
  Description of Artificial Sequence: Synthetic oligonucleotide
cacuuagcgggagacgucu

SEQ ID NO: 50974 - RNA, 19 nt, Artificial Sequence
  Description of Artificial Sequence: Synthetic oligonucleotide
gaugcacuaggagucuguu

SEQ ID NO: 50975 - RNA, 19 nt, Artificial Sequence
  Description of Artificial Sequence: Synthetic oligonucleotide
gggacaacaucaaguccuc

SEQ ID NO: 50976 - RNA, 19 nt, Artificial Sequence
  Description of Artificial Sequence: Synthetic oligonucleotide
caccacuucagcguuguau

SEQ ID NO: 50977 - RNA, 19 nt, Artificial Sequence
  Description of Artificial Sequence: Synthetic oligonucleotide
ccauuuaacuacuuauauu

SEQ ID NO: 50978 - RNA, 19 nt, Artificial Sequence
  Description of Artificial Sequence: Synthetic oligonucleotide
cgauacuauucugaagguc

SEQ ID NO: 50979 - RNA, 19 nt, Artificial Sequence
  Description of Artificial Sequence: Synthetic oligonucleotide
cacagcuauuuugguauua

SEQ ID NO: 50980 - RNA, 19 nt, Artificial Sequence
  Description of Artificial Sequence: Synthetic oligonucleotide
cagcgacgccaguguaaac

SEQ ID NO: 50981 - RNA, 19 nt, Artificial Sequence
  Description of Artificial Sequence: Synthetic oligonucleotide
gcgauacuauucugaaggu

SEQ ID NO: 50982 - RNA, 19 nt, Artificial Sequence
  Description of Artificial Sequence: Synthetic oligonucleotide
cuucgcaggcuagccagaa

SEQ ID NO: 50983 - RNA, 19 nt, Artificial Sequence
  Description of Artificial Sequence: Synthetic oligonucleotide
gugcuacauguaggcauuc

SEQ ID NO: 50984 - RNA, 19 nt, Artificial Sequence
  Description of Artificial Sequence: Synthetic oligonucleotide
ccuuuuaaucauagcuccu

SEQ ID NO: 50985 - RNA, 19 nt, Artificial Sequence
  Description of Artificial Sequence: Synthetic oligonucleotide
gcuagaguuugggcaguga

SEQ ID NO: 50986 - RNA, 19 nt, Artificial Sequence
  Description of Artificial Sequence: Synthetic oligonucleotide
gcagccgaagggugccaac

SEQ ID NO: 50987 - RNA, 19 nt, Artificial Sequence
  Description of Artificial Sequence: Synthetic oligonucleotide
ugagcgcaccgcgguccga

SEQ ID NO: 50988 - RNA, 19 nt, Artificial Sequence
  Description of Artificial Sequence: Synthetic oligonucleotide
ggaauagguaauagcccuu

SEQ ID NO: 50989 - RNA, 19 nt, Artificial Sequence
  Description of Artificial Sequence: Synthetic oligonucleotide
gguaugcgacugauuaaau

SEQ ID NO: 50990 - RNA, 19 nt, Artificial Sequence
  Description of Artificial Sequence: Synthetic oligonucleotide
gggugagcgcaccgcgguc

SEQ ID NO: 50991 - RNA, 19 nt, Artificial Sequence
  Description of Artificial Sequence: Synthetic oligonucleotide
cgcgguccgagggugcgcg

SEQ ID NO: 50992 - RNA, 19 nt, Artificial Sequence
  Description of Artificial Sequence: Synthetic oligonucleotide
cuucagcguuguauacauu

SEQ ID NO: 50993 - RNA, 19 nt, Artificial Sequence
  Description of Artificial Sequence: Synthetic oligonucleotide
ggaugaggguugauuguuu

SEQ ID NO: 50994 - RNA, 19 nt, Artificial Sequence
  Description of Artificial Sequence: Synthetic oligonucleotide
cgucugaguuuucuuacau

SEQ ID NO: 50995 - RNA, 19 nt, Artificial Sequence
  Description of Artificial Sequence: Synthetic oligonucleotide
gcgggagacgucugaguuu

SEQ ID NO: 50996 - RNA, 19 nt, Artificial Sequence
  Description of Artificial Sequence: Synthetic oligonucleotide
cgguccgagggugcgcgag

SEQ ID NO: 50997 - RNA, 19 nt, Artificial Sequence
  Description of Artificial Sequence: Synthetic oligonucleotide
cgggagacgucugaguuuu

SEQ ID NO: 50998 - RNA, 19 nt, Artificial Sequence
  Description of Artificial Sequence: Synthetic oligonucleotide
gcgguccgagggugcgcga

SEQ ID NO: 50999 - RNA, 19 nt, Artificial Sequence
  Description of Artificial Sequence: Synthetic oligonucleotide
ccgcgguccgagggugcgc

SEQ ID NO: 51000 - RNA, 19 nt, Artificial Sequence
  Description of Artificial Sequence: Synthetic oligonucleotide
aacguaacggaucagcugc

SEQ ID NO: 51001 - RNA, 19 nt, Artificial Sequence
  Description of Artificial Sequence: Synthetic oligonucleotide
uguaccgugacauucacag

SEQ ID NO: 51002 - RNA, 19 nt, Artificial Sequence
  Description of Artificial Sequence: Synthetic oligonucleotide
guauacuacacucagcugg

SEQ ID NO: 51003 - RNA, 19 nt, Artificial Sequence
  Description of Artificial Sequence: Synthetic oligonucleotide
agaguugugaccuauuuag

SEQ ID NO: 51004 - RNA, 19 nt, Artificial Sequence
  Description of Artificial Sequence: Synthetic oligonucleotide
aguugugaccuauuuaggc

SEQ ID NO: 51005 - RNA, 19 nt, Artificial Sequence
  Description of Artificial Sequence: Synthetic oligonucleotide
uguaggaugguauuggugu

SEQ ID NO: 51006 - RNA, 19 nt, Artificial Sequence
  Description of Artificial Sequence: Synthetic oligonucleotide
uuaucuaagaucacagacu

SEQ ID NO: 51007 - RNA, 19 nt, Artificial Sequence
  Description of Artificial Sequence: Synthetic oligonucleotide
acuaacauuccucccauuc

SEQ ID NO: 51008 - RNA, 19 nt, Artificial Sequence
  Description of Artificial Sequence: Synthetic oligonucleotide
guuaucuaagaucacagac

SEQ ID NO: 51009 - RNA, 19 nt, Artificial Sequence
  Description of Artificial Sequence: Synthetic oligonucleotide
gaaauguuccacaagccgg

SEQ ID NO: 51010 - RNA, 19 nt, Artificial Sequence
  Description of Artificial Sequence: Synthetic oligonucleotide
gauaguggaccucaguucc

SEQ ID NO: 51011 - RNA, 19 nt, Artificial Sequence
  Description of Artificial Sequence: Synthetic oligonucleotide
caugguaagguucaguggc

SEQ ID NO: 51012 - RNA, 19 nt, Artificial Sequence
  Description of Artificial Sequence: Synthetic oligonucleotide
agugcuauccguccauugc

SEQ ID NO: 51013 - RNA, 19 nt, Artificial Sequence
  Description of Artificial Sequence: Synthetic oligonucleotide
ugugugaccuggaagagca

SEQ ID NO: 51014 - RNA, 19 nt, Artificial Sequence
  Description of Artificial Sequence: Synthetic oligonucleotide
accuauuuaggcugguacc

SEQ ID NO: 51015 - RNA, 19 nt, Artificial Sequence
  Description of Artificial Sequence: Synthetic oligonucleotide
uaccgugacauucacagug

SEQ ID NO: 51016 - RNA, 19 nt, Artificial Sequence
  Description of Artificial Sequence: Synthetic oligonucleotide
augaagcuaggccacaugg

SEQ ID NO: 51017 - RNA, 19 nt, Artificial Sequence
  Description of Artificial Sequence: Synthetic oligonucleotide
cagguugguaucuaggugg

SEQ ID NO: 51018 - RNA, 19 nt, Artificial Sequence
  Description of Artificial Sequence: Synthetic oligonucleotide
agaguggccuucuacauuc

SEQ ID NO: 51019 - RNA, 19 nt, Artificial Sequence
  Description of Artificial Sequence: Synthetic oligonucleotide
agacagucaacuuccggcc

SEQ ID NO: 51020 - RNA, 19 nt, Artificial Sequence
  Description of Artificial Sequence: Synthetic oligonucleotide
auacaagcuguccugcagc

SEQ ID NO: 51021 - RNA, 19 nt, Artificial Sequence
  Description of Artificial Sequence: Synthetic oligonucleotide
uaaucuauugacuaacauu

SEQ ID NO: 51022 - RNA, 19 nt, Artificial Sequence
  Description of Artificial Sequence: Synthetic oligonucleotide
ugaaggaguugacugacug

SEQ ID NO: 51023 - RNA, 19 nt, Artificial Sequence
  Description of Artificial Sequence: Synthetic oligonucleotide
uuucggagguagaagagca

SEQ ID NO: 51024 - RNA, 19 nt, Artificial Sequence
  Description of Artificial Sequence: Synthetic oligonucleotide
ugaagugggucacuggccc

SEQ ID NO: 51025 - RNA, 19 nt, Artificial Sequence
  Description of Artificial Sequence: Synthetic oligonucleotide
ugucuuguugcguuuucgg

SEQ ID NO: 51026 - RNA, 19 nt, Artificial Sequence
  Description of Artificial Sequence: Synthetic oligonucleotide
uuaaucuauugacuaacau

SEQ ID NO: 51027 - RNA, 19 nt, Artificial Sequence
  Description of Artificial Sequence: Synthetic oligonucleotide
aucucgagguccuuuuggc

SEQ ID NO: 51028 - RNA, 19 nt, Artificial Sequence
  Description of Artificial Sequence: Synthetic oligonucleotide
cucaacuggaagaugccgg

SEQ ID NO: 51029 - RNA, 19 nt, Artificial Sequence
  Description of Artificial Sequence: Synthetic oligonucleotide
agaggguuaucuaagauca

SEQ ID NO: 51030 - RNA, 19 nt, Artificial Sequence
  Description of Artificial Sequence: Synthetic oligonucleotide
agucaagugccccaguuug

SEQ ID NO: 51031 - RNA, 19 nt, Artificial Sequence
  Description of Artificial Sequence: Synthetic oligonucleotide
ugacugaccaucccggagc

SEQ ID NO: 51032 - RNA, 19 nt, Artificial Sequence
  Description of Artificial Sequence: Synthetic oligonucleotide
ccuuaaauuagccagcccc

SEQ ID NO: 51033 - RNA, 19 nt, Artificial Sequence
  Description of Artificial Sequence: Synthetic oligonucleotide
caaugagagaagcacuugc

SEQ ID NO: 51034 - RNA, 19 nt, Artificial Sequence
  Description of Artificial Sequence: Synthetic oligonucleotide
aguggaccuacccucuggc

SEQ ID NO: 51035 - RNA, 19 nt, Artificial Sequence
  Description of Artificial Sequence: Synthetic oligonucleotide
uccaacaaugccacugcag

SEQ ID NO: 51036 - RNA, 19 nt, Artificial Sequence
  Description of Artificial Sequence: Synthetic oligonucleotide
gagaggguuaucuaagauc

SEQ ID NO: 51037 - RNA, 19 nt, Artificial Sequence
  Description of Artificial Sequence: Synthetic oligonucleotide
ugugaccuauuuaggcugg

SEQ ID NO: 51038 - RNA, 19 nt, Artificial Sequence
  Description of Artificial Sequence: Synthetic oligonucleotide
gaagugacggaccucugug

SEQ ID NO: 51039 - RNA, 19 nt, Artificial Sequence
  Description of Artificial Sequence: Synthetic oligonucleotide
ucuaagugagcugaggaaa

SEQ ID NO: 51040 - RNA, 19 nt, Artificial Sequence
  Description of Artificial Sequence: Synthetic oligonucleotide
cauacucuaucucucccgg

SEQ ID NO: 51041 - RNA, 19 nt, Artificial Sequence
  Description of Artificial Sequence: Synthetic oligonucleotide
uugguaucuagguggagca

SEQ ID NO: 51042 - RNA, 19 nt, Artificial Sequence
  Description of Artificial Sequence: Synthetic oligonucleotide
uuuggcggucaacaccugg

SEQ ID NO: 51043 - RNA, 19 nt, Artificial Sequence
  Description of Artificial Sequence: Synthetic oligonucleotide
ucgugaacguaacggauca

SEQ ID NO: 51044 - RNA, 19 nt, Artificial Sequence
  Description of Artificial Sequence: Synthetic oligonucleotide
ucguccuaaggcuuggggc

SEQ ID NO: 51045 - RNA, 19 nt, Artificial Sequence
  Description of Artificial Sequence: Synthetic oligonucleotide
agugacggaccucuguguc

SEQ ID NO: 51046 - RNA, 19 nt, Artificial Sequence
  Description of Artificial Sequence: Synthetic oligonucleotide
agugagccgacuuuagcug

SEQ ID NO: 51047 - RNA, 19 nt, Artificial Sequence
  Description of Artificial Sequence: Synthetic oligonucleotide
uuguaggaugguauuggug

SEQ ID NO: 51048 - RNA, 19 nt, Artificial Sequence
  Description of Artificial Sequence: Synthetic oligonucleotide
auaucggggccccugagug

SEQ ID NO: 51049 - RNA, 19 nt, Artificial Sequence
  Description of Artificial Sequence: Synthetic oligonucleotide
agcucuugacuccacucac

SEQ ID NO: 51050 - RNA, 19 nt, Artificial Sequence
  Description of Artificial Sequence: Synthetic oligonucleotide
uggaugguguagauuaggu

SEQ ID NO: 51051 - RNA, 19 nt, Artificial Sequence
  Description of Artificial Sequence: Synthetic oligonucleotide
gaacguaacggaucagcug

SEQ ID NO: 51052 - RNA, 19 nt, Artificial Sequence
  Description of Artificial Sequence: Synthetic oligonucleotide
ugauaguggaccucaguuc

SEQ ID NO: 51053 - RNA, 19 nt, Artificial Sequence
  Description of Artificial Sequence: Synthetic oligonucleotide
gacucagugaggaucgucc

SEQ ID NO: 51054 - RNA, 19 nt, Artificial Sequence
  Description of Artificial Sequence: Synthetic oligonucleotide
uuaaauuagccagccccag

SEQ ID NO: 51055 - RNA, 19 nt, Artificial Sequence
  Description of Artificial Sequence: Synthetic oligonucleotide
guugguaucuagguggagc

SEQ ID NO: 51056 - RNA, 19 nt, Artificial Sequence
  Description of Artificial Sequence: Synthetic oligonucleotide
auagaggacuuugggaagg

SEQ ID NO: 51057 - RNA, 19 nt, Artificial Sequence
  Description of Artificial Sequence: Synthetic oligonucleotide
cuuaaauuagccagcccca

SEQ ID NO: 51058 - RNA, 19 nt, Artificial Sequence
  Description of Artificial Sequence: Synthetic oligonucleotide
uggaccuacccucuggccu

SEQ ID NO: 51059 - RNA, 19 nt, Artificial Sequence
  Description of Artificial Sequence: Synthetic oligonucleotide
aggucucacacccaguacu

SEQ ID NO: 51060 - RNA, 19 nt, Artificial Sequence
  Description of Artificial Sequence: Synthetic oligonucleotide
aagagcacaucgugccguc

SEQ ID NO: 51061 - RNA, 19 nt, Artificial Sequence
  Description of Artificial Sequence: Synthetic oligonucleotide
uagauuaggucuucugguc

SEQ ID NO: 51062 - RNA, 19 nt, Artificial Sequence
  Description of Artificial Sequence: Synthetic oligonucleotide
caccauuuaucaaggcucc

SEQ ID NO: 51063 - RNA, 19 nt, Artificial Sequence
  Description of Artificial Sequence: Synthetic oligonucleotide
ugaagugacggaccucugu

SEQ ID NO: 51064 - RNA, 19 nt, Artificial Sequence
  Description of Artificial Sequence: Synthetic oligonucleotide
cacaucacgaacagugaug

SEQ ID NO: 51065 - RNA, 19 nt, Artificial Sequence
  Description of Artificial Sequence: Synthetic oligonucleotide
gagugaaauguuccacaag

SEQ ID NO: 51066 - RNA, 19 nt, Artificial Sequence
  Description of Artificial Sequence: Synthetic oligonucleotide
cauaucggggcccugccag

SEQ ID NO: 51067 - RNA, 19 nt, Artificial Sequence
  Description of Artificial Sequence: Synthetic oligonucleotide
accauguuaaauagcuuuc

SEQ ID NO: 51068 - RNA, 19 nt, Artificial Sequence
  Description of Artificial Sequence: Synthetic oligonucleotide
aucguccuaaggcuugggg

SEQ ID NO: 51069 - RNA, 19 nt, Artificial Sequence
  Description of Artificial Sequence: Synthetic oligonucleotide
ucaggucucacacccagua

SEQ ID NO: 51070 - RNA, 19 nt, Artificial Sequence
  Description of Artificial Sequence: Synthetic oligonucleotide
accgcuccuagccauagug

SEQ ID NO: 51071 - RNA, 19 nt, Artificial Sequence
  Description of Artificial Sequence: Synthetic oligonucleotide
ugcaccucaaugguggaug

SEQ ID NO: 51072 - RNA, 19 nt, Artificial Sequence
  Description of Artificial Sequence: Synthetic oligonucleotide
gugagaauagaggacuuug

SEQ ID NO: 51073 - RNA, 19 nt, Artificial Sequence
  Description of Artificial Sequence: Synthetic oligonucleotide
guugcguuuucggagguag

SEQ ID NO: 51074 - RNA, 19 nt, Artificial Sequence
  Description of Artificial Sequence: Synthetic oligonucleotide
ugagugaggcgauaggcua

SEQ ID NO: 51075 - RNA, 19 nt, Artificial Sequence
  Description of Artificial Sequence: Synthetic oligonucleotide
uuccaucgugaacguaacg

SEQ ID NO: 51076 - RNA, 19 nt, Artificial Sequence
  Description of Artificial Sequence: Synthetic oligonucleotide
uagggguguuucuuccugg

SEQ ID NO: 51077 - RNA, 19 nt, Artificial Sequence
  Description of Artificial Sequence: Synthetic oligonucleotide
cuauccguccauugcuggg

SEQ ID NO: 51078 - RNA, 19 nt, Artificial Sequence
  Description of Artificial Sequence: Synthetic oligonucleotide
ggcaauggucacuuguagg

SEQ ID NO: 51079 - RNA, 19 nt, Artificial Sequence
  Description of Artificial Sequence: Synthetic oligonucleotide
ugcccucuguacuucauac

SEQ ID NO: 51080 - RNA, 19 nt, Artificial Sequence
  Description of Artificial Sequence: Synthetic oligonucleotide
ucuagacgcaggguggugc

SEQ ID NO: 51081 - RNA, 19 nt, Artificial Sequence
  Description of Artificial Sequence: Synthetic oligonucleotide
agugccccaguuugccugc

SEQ ID NO: 51082 - RNA, 19 nt, Artificial Sequence
  Description of Artificial Sequence: Synthetic oligonucleotide
guaggacuuggccgcaugg

SEQ ID NO: 51083 - RNA, 19 nt, Artificial Sequence
  Description of Artificial Sequence: Synthetic oligonucleotide
ucgggguauacuacacuca

SEQ ID NO: 51084 - RNA, 19 nt, Artificial Sequence
  Description of Artificial Sequence: Synthetic oligonucleotide
ucuugacuccacucacucc

SEQ ID NO: 51085 - RNA, 19 nt, Artificial Sequence
  Description of Artificial Sequence: Synthetic oligonucleotide
ucuaggcccagccuucccu

SEQ ID NO: 51086 - RNA, 19 nt, Artificial Sequence
  Description of Artificial Sequence: Synthetic oligonucleotide
aggguuaucuaagaucaca

SEQ ID NO: 51087 - RNA, 19 nt, Artificial Sequence
  Description of Artificial Sequence: Synthetic oligonucleotide
guagauuaggucuucuggu

SEQ ID NO: 51088 - RNA, 19 nt, Artificial Sequence
  Description of Artificial Sequence: Synthetic oligonucleotide
ggugacacggaguggaaug

SEQ ID NO: 51089 - RNA, 19 nt, Artificial Sequence
  Description of Artificial Sequence: Synthetic oligonucleotide
ugugucaauggugcccuag

SEQ ID NO: 51090 - RNA, 19 nt, Artificial Sequence
  Description of Artificial Sequence: Synthetic oligonucleotide
uggguaaaacggcuucaga

SEQ ID NO: 51091 - RNA, 19 nt, Artificial Sequence
  Description of Artificial Sequence: Synthetic oligonucleotide
gcaauggucacuuguagga

SEQ ID NO: 51092 - RNA, 19 nt, Artificial Sequence
  Description of Artificial Sequence: Synthetic oligonucleotide
gucgggguauacuacacuc

SEQ ID NO: 51093 - RNA, 19 nt, Artificial Sequence
  Description of Artificial Sequence: Synthetic oligonucleotide
aggaaugaugacgcugaac

SEQ ID NO: 51094 - RNA, 19 nt, Artificial Sequence
  Description of Artificial Sequence: Synthetic oligonucleotide
agagaggguuaucuaagau

SEQ ID NO: 51095 - RNA, 19 nt, Artificial Sequence
  Description of Artificial Sequence: Synthetic oligonucleotide
caucgugccgucuggcugc

SEQ ID NO: 51096 - RNA, 19 nt, Artificial Sequence
  Description of Artificial Sequence: Synthetic oligonucleotide
guguagauuaggucuucug

SEQ ID NO: 51097 - RNA, 19 nt, Artificial Sequence
  Description of Artificial Sequence: Synthetic oligonucleotide
uuuucccgcagugagccga

SEQ ID NO: 51098 - RNA, 19 nt, Artificial Sequence
  Description of Artificial Sequence: Synthetic oligonucleotide
gaugguauuggugugcacu

SEQ ID NO: 51099 - RNA, 19 nt, Artificial Sequence
  Description of Artificial Sequence: Synthetic oligonucleotide
agcacaucgugccgucugg

SEQ ID NO: 51100 - RNA, 19 nt, Artificial Sequence
  Description of Artificial Sequence: Synthetic oligonucleotide
acuuccaucgugaacguaa

SEQ ID NO: 51101 - RNA, 19 nt, Artificial Sequence
  Description of Artificial Sequence: Synthetic oligonucleotide
cauucccaguccaagcgug

SEQ ID NO: 51102 - RNA, 19 nt, Artificial Sequence
  Description of Artificial Sequence: Synthetic oligonucleotide
cuaacauuccucccauuca

SEQ ID NO: 51103 - RNA, 19 nt, Artificial Sequence
  Description of Artificial Sequence: Synthetic oligonucleotide
acagucaacuuccggccug

SEQ ID NO: 51104 - RNA, 19 nt, Artificial Sequence
  Description of Artificial Sequence: Synthetic oligonucleotide
guugugaccuauuuaggcu

SEQ ID NO: 51105 - RNA, 19 nt, Artificial Sequence
  Description of Artificial Sequence: Synthetic oligonucleotide
guuuucggagguagaagag

SEQ ID NO: 51106 - RNA, 19 nt, Artificial Sequence
  Description of Artificial Sequence: Synthetic oligonucleotide
aauagcuuucuugccuuaa

SEQ ID NO: 51107 - RNA, 19 nt, Artificial Sequence
  Description of Artificial Sequence: Synthetic oligonucleotide
acaccagagaggguuaucu

SEQ ID NO: 51108 - RNA, 19 nt, Artificial Sequence
  Description of Artificial Sequence: Synthetic oligonucleotide
aaguggggccuccuggcgu

SEQ ID NO: 51109 - RNA, 19 nt, Artificial Sequence
  Description of Artificial Sequence: Synthetic oligonucleotide
uguggguaaaacggcuuca

SEQ ID NO: 51110 - RNA, 19 nt, Artificial Sequence
  Description of Artificial Sequence: Synthetic oligonucleotide
cuggaugguguagauuagg

SEQ ID NO: 51111 - RNA, 19 nt, Artificial Sequence
  Description of Artificial Sequence: Synthetic oligonucleotide
cuagacgcaggguggugcc

SEQ ID NO: 51112 - RNA, 19 nt, Artificial Sequence
  Description of Artificial Sequence: Synthetic oligonucleotide
ucuguggguaaaacggcuu

SEQ ID NO: 51113 - RNA, 19 nt, Artificial Sequence
  Description of Artificial Sequence: Synthetic oligonucleotide
uucuacauucccaguccaa

SEQ ID NO: 51114 - RNA, 19 nt, Artificial Sequence
  Description of Artificial Sequence: Synthetic oligonucleotide
gacacggaguggaauggag

SEQ ID NO: 51115 - RNA, 19 nt, Artificial Sequence
  Description of Artificial Sequence: Synthetic oligonucleotide
cuuccaucgugaacguaac

SEQ ID NO: 51116 - RNA, 19 nt, Artificial Sequence
  Description of Artificial Sequence: Synthetic oligonucleotide
ugggcauauacaagcuguc

SEQ ID NO: 51117 - RNA, 19 nt, Artificial Sequence
  Description of Artificial Sequence: Synthetic oligonucleotide
gcaugguaagguucagugg

SEQ ID NO: 51118 - RNA, 19 nt, Artificial Sequence
  Description of Artificial Sequence: Synthetic oligonucleotide
ggguauacuacacucagcu

SEQ ID NO: 51119 - RNA, 19 nt, Artificial Sequence
  Description of Artificial Sequence: Synthetic oligonucleotide
uguccugucggugucucac

SEQ ID NO: 51120 - RNA, 19 nt, Artificial Sequence
  Description of Artificial Sequence: Synthetic oligonucleotide
gagcacaucgugccgucug

SEQ ID NO: 51121 - RNA, 19 nt, Artificial Sequence
  Description of Artificial Sequence: Synthetic oligonucleotide
guaucuagguggagcacag

SEQ ID NO: 51122 - RNA, 19 nt, Artificial Sequence
  Description of Artificial Sequence: Synthetic oligonucleotide
gugagccgacuuuagcugc

SEQ ID NO: 51123 - RNA, 19 nt, Artificial Sequence
  Description of Artificial Sequence: Synthetic oligonucleotide
caacagagccuguaccgug

SEQ ID NO: 51124 - RNA, 19 nt, Artificial Sequence
  Description of Artificial Sequence: Synthetic oligonucleotide
ugcguuuucggagguagaa

SEQ ID NO: 51125 - RNA, 19 nt, Artificial Sequence
  Description of Artificial Sequence: Synthetic oligonucleotide
auaucggggcccugccagg

SEQ ID NO: 51126 - RNA, 19 nt, Artificial Sequence
  Description of Artificial Sequence: Synthetic oligonucleotide
ccuauuuaggcugguaccc

SEQ ID NO: 51127 - RNA, 19 nt, Artificial Sequence
  Description of Artificial Sequence: Synthetic oligonucleotide
uggauuggguguccggcaa

SEQ ID NO: 51128 - RNA, 19 nt, Artificial Sequence
  Description of Artificial Sequence: Synthetic oligonucleotide
cugagucgggguauacuac

SEQ ID NO: 51129 - RNA, 19 nt, Artificial Sequence
  Description of Artificial Sequence: Synthetic oligonucleotide
aggucuaagugagcugagg

SEQ ID NO: 51130 - RNA, 19 nt, Artificial Sequence
  Description of Artificial Sequence: Synthetic oligonucleotide
accacucggaagaaauguc

SEQ ID NO: 51131 - RNA, 19 nt, Artificial Sequence
  Description of Artificial Sequence: Synthetic oligonucleotide
cugucuuguugcguuuucg

SEQ ID NO: 51132 - RNA, 19 nt, Artificial Sequence
  Description of Artificial Sequence: Synthetic oligonucleotide
uggggcauacugcccgugc

SEQ ID NO: 51133 - RNA, 19 nt, Artificial Sequence
  Description of Artificial Sequence: Synthetic oligonucleotide
cuaccuugcgaaaggucuc

SEQ ID NO: 51134 - RNA, 19 nt, Artificial Sequence
  Description of Artificial Sequence: Synthetic oligonucleotide
ggcucuaccuugcgaaagg

SEQ ID NO: 51135 - RNA, 19 nt, Artificial Sequence
  Description of Artificial Sequence: Synthetic oligonucleotide
uggcucuaccuugcgaaag

SEQ ID NO: 51136 - RNA, 19 nt, Artificial Sequence
  Description of Artificial Sequence: Synthetic oligonucleotide
ccacucggaagaaaugucc

SEQ ID NO: 51137 - RNA, 19 nt, Artificial Sequence
  Description of Artificial Sequence: Synthetic oligonucleotide
ggaagagcacaucgugccg

SEQ ID NO: 51138 - RNA, 19 nt, Artificial Sequence
  Description of Artificial Sequence: Synthetic oligonucleotide
acccaguacuggccauucc

SEQ ID NO: 51139 - RNA, 19 nt, Artificial Sequence
  Description of Artificial Sequence: Synthetic oligonucleotide
ccuucuacauucccagucc

SEQ ID NO: 51140 - RNA, 19 nt, Artificial Sequence
  Description of Artificial Sequence: Synthetic oligonucleotide
cuguggguaaaacggcuuc

SEQ ID NO: 51141 - RNA, 19 nt, Artificial Sequence
  Description of Artificial Sequence: Synthetic oligonucleotide
agaacccugccugaauuca

SEQ ID NO: 51142 - RNA, 19 nt, Artificial Sequence
  Description of Artificial Sequence: Synthetic oligonucleotide
agucgggguauacuacacu

SEQ ID NO: 51143 - RNA, 19 nt, Artificial Sequence
  Description of Artificial Sequence: Synthetic oligonucleotide
ugguacccuguuuucccgc

SEQ ID NO: 51144 - RNA, 19 nt, Artificial Sequence
  Description of Artificial Sequence: Synthetic oligonucleotide
gguauacuacacucagcug

SEQ ID NO: 51145 - RNA, 19 nt, Artificial Sequence
  Description of Artificial Sequence: Synthetic oligonucleotide
accucaguuccacuucgga

SEQ ID NO: 51146 - RNA, 19 nt, Artificial Sequence
  Description of Artificial Sequence: Synthetic oligonucleotide
ggucaggucucacacccag

SEQ ID NO: 51147 - RNA, 19 nt, Artificial Sequence
  Description of Artificial Sequence: Synthetic oligonucleotide
gguuaucuaagaucacaga

SEQ ID NO: 51148 - RNA, 19 nt, Artificial Sequence
  Description of Artificial Sequence: Synthetic oligonucleotide
guggguaaaacggcuucag

SEQ ID NO: 51149 - RNA, 19 nt, Artificial Sequence
  Description of Artificial Sequence: Synthetic oligonucleotide
caguggaccuacccucugg

SEQ ID NO: 51150 - RNA, 19 nt, Artificial Sequence
  Description of Artificial Sequence: Synthetic oligonucleotide
gcuauccguccauugcugg

SEQ ID NO: 51151 - RNA, 19 nt, Artificial Sequence
  Description of Artificial Sequence: Synthetic oligonucleotide
ucaaggcucccucccugga

SEQ ID NO: 51152 - RNA, 19 nt, Artificial Sequence
  Description of Artificial Sequence: Synthetic oligonucleotide
ugcccuccaaugagagaag

SEQ ID NO: 51153 - RNA, 19 nt, Artificial Sequence
  Description of Artificial Sequence: Synthetic oligonucleotide
uccaagcguggaagguugc

SEQ ID NO: 51154 - RNA, 19 nt, Artificial Sequence
  Description of Artificial Sequence: Synthetic oligonucleotide
ugccgacucagugaggauc

SEQ ID NO: 51155 - RNA, 19 nt, Artificial Sequence
  Description of Artificial Sequence: Synthetic oligonucleotide
ggguuuggcggucaacacc

SEQ ID NO: 51156 - RNA, 19 nt, Artificial Sequence
  Description of Artificial Sequence: Synthetic oligonucleotide
caccauguuaaauagcuuu

SEQ ID NO: 51157 - RNA, 19 nt, Artificial Sequence
  Description of Artificial Sequence: Synthetic oligonucleotide
ggcgauaggcuaccucugg

SEQ ID NO: 51158 - RNA, 19 nt, Artificial Sequence
  Description of Artificial Sequence: Synthetic oligonucleotide
gggcucgagagacaggggc

SEQ ID NO: 51159 - RNA, 19 nt, Artificial Sequence
  Description of Artificial Sequence: Synthetic oligonucleotide
uuguugcguuuucggaggu

SEQ ID NO: 51160 - RNA, 19 nt, Artificial Sequence
  Description of Artificial Sequence: Synthetic oligonucleotide
uugcguuuucggagguaga

SEQ ID NO: 51161 - RNA, 19 nt, Artificial Sequence
  Description of Artificial Sequence: Synthetic oligonucleotide
ggccccaucagacaugcuc

SEQ ID NO: 51162 - RNA, 19 nt, Artificial Sequence
  Description of Artificial Sequence: Synthetic oligonucleotide
cagugagccgacuuuagcu

SEQ ID NO: 51163 - RNA, 19 nt, Artificial Sequence
  Description of Artificial Sequence: Synthetic oligonucleotide
uaccuugcgaaaggucucu

SEQ ID NO: 51164 - RNA, 19 nt, Artificial Sequence
  Description of Artificial Sequence: Synthetic oligonucleotide
accaaagcagugggccugg

SEQ ID NO: 51165 - RNA, 19 nt, Artificial Sequence
  Description of Artificial Sequence: Synthetic oligonucleotide
gaaagcgccaccgugucau

SEQ ID NO: 51166 - RNA, 19 nt, Artificial Sequence
  Description of Artificial Sequence: Synthetic oligonucleotide
gguaucuagguggagcaca

SEQ ID NO: 51167 - RNA, 19 nt, Artificial Sequence
  Description of Artificial Sequence: Synthetic oligonucleotide
gcuugggacacacggacca

SEQ ID NO: 51168 - RNA, 19 nt, Artificial Sequence
  Description of Artificial Sequence: Synthetic oligonucleotide
gaucguccuaaggcuuggg

SEQ ID NO: 51169 - RNA, 19 nt, Artificial Sequence
  Description of Artificial Sequence: Synthetic oligonucleotide
ugacacggaguggaaugga

SEQ ID NO: 51170 - RNA, 19 nt, Artificial Sequence
  Description of Artificial Sequence: Synthetic oligonucleotide
ggggcauacugcccgugcg

SEQ ID NO: 51171 - RNA, 19 nt, Artificial Sequence
  Description of Artificial Sequence: Synthetic oligonucleotide
caccgugucauggggacug

SEQ ID NO: 51172 - RNA, 19 nt, Artificial Sequence
  Description of Artificial Sequence: Synthetic oligonucleotide
gccgacucagugaggaucg

SEQ ID NO: 51173 - RNA, 19 nt, Artificial Sequence
  Description of Artificial Sequence: Synthetic oligonucleotide
caccaccaugggcauauac

SEQ ID NO: 51174 - RNA, 19 nt, Artificial Sequence
  Description of Artificial Sequence: Synthetic oligonucleotide
gggcauacugcccgugcgg

SEQ ID NO: 51175 - RNA, 19 nt, Artificial Sequence
  Description of Artificial Sequence: Synthetic oligonucleotide
ccaggggacccucuaaggc

SEQ ID NO: 51176 - RNA, 19 nt, Artificial Sequence
  Description of Artificial Sequence: Synthetic oligonucleotide
aggaucguccuaaggcuug

SEQ ID NO: 51177 - RNA, 19 nt, Artificial Sequence
  Description of Artificial Sequence: Synthetic oligonucleotide
gagucgggguauacuacac

SEQ ID NO: 51178 - RNA, 19 nt, Artificial Sequence
  Description of Artificial Sequence: Synthetic oligonucleotide
agccgacuuuagcugccuc

SEQ ID NO: 51179 - RNA, 19 nt, Artificial Sequence
  Description of Artificial Sequence: Synthetic oligonucleotide
ugucggugucucacuucca

SEQ ID NO: 51180 - RNA, 19 nt, Artificial Sequence
  Description of Artificial Sequence: Synthetic oligonucleotide
uccugucggugucucacuu

SEQ ID NO: 51181 - RNA, 19 nt, Artificial Sequence
  Description of Artificial Sequence: Synthetic oligonucleotide
caggucucacacccaguac

SEQ ID NO: 51182 - RNA, 19 nt, Artificial Sequence
  Description of Artificial Sequence: Synthetic oligonucleotide
cgcuccuagccauaguggg

SEQ ID NO: 51183 - RNA, 19 nt, Artificial Sequence
  Description of Artificial Sequence: Synthetic oligonucleotide
uggagucaagugccccagu

SEQ ID NO: 51184 - RNA, 19 nt, Artificial Sequence
  Description of Artificial Sequence: Synthetic oligonucleotide
cacggaagcggaagcuauc

SEQ ID NO: 51185 - RNA, 19 nt, Artificial Sequence
  Description of Artificial Sequence: Synthetic oligonucleotide
ugguaucuagguggagcac

SEQ ID NO: 51186 - RNA, 19 nt, Artificial Sequence
  Description of Artificial Sequence: Synthetic oligonucleotide
cagaguugugaccuauuua

SEQ ID NO: 51187 - RNA, 19 nt, Artificial Sequence
  Description of Artificial Sequence: Synthetic oligonucleotide
cuuguaggaugguauuggu

SEQ ID NO: 51188 - RNA, 19 nt, Artificial Sequence
  Description of Artificial Sequence: Synthetic oligonucleotide
ugaccuauuuaggcuggua

SEQ ID NO: 51189 - RNA, 19 nt, Artificial Sequence
  Description of Artificial Sequence: Synthetic oligonucleotide
cguuuucggagguagaaga

SEQ ID NO: 51190 - RNA, 19 nt, Artificial Sequence
  Description of Artificial Sequence: Synthetic oligonucleotide
agccgguugcuccuggguu

SEQ ID NO: 51191 - RNA, 19 nt, Artificial Sequence
  Description of Artificial Sequence: Synthetic oligonucleotide
gccgcucauucacaucacg

SEQ ID NO: 51192 - RNA, 19 nt, Artificial Sequence
  Description of Artificial Sequence: Synthetic oligonucleotide
uaucggggcccugccagga

SEQ ID NO: 51193 - RNA, 19 nt, Artificial Sequence
  Description of Artificial Sequence: Synthetic oligonucleotide
ggccaguggaccuacccuc

SEQ ID NO: 51194 - RNA, 19 nt, Artificial Sequence
  Description of Artificial Sequence: Synthetic oligonucleotide
cagucaacuuccggccugc

SEQ ID NO: 51195 - RNA, 19 nt, Artificial Sequence
  Description of Artificial Sequence: Synthetic oligonucleotide
guggggaacugugugaccu

SEQ ID NO: 51196 - RNA, 19 nt, Artificial Sequence
  Description of Artificial Sequence: Synthetic oligonucleotide
uccuaaggcuuggggcacc

SEQ ID NO: 51197 - RNA, 19 nt, Artificial Sequence
  Description of Artificial Sequence: Synthetic oligonucleotide
agacgcaggguggugcccu

SEQ ID NO: 51198 - RNA, 19 nt, Artificial Sequence
  Description of Artificial Sequence: Synthetic oligonucleotide
auaguggaccucaguucca

SEQ ID NO: 51199 - RNA, 19 nt, Artificial Sequence
  Description of Artificial Sequence: Synthetic oligonucleotide
ggaccuacccucuggccuc

SEQ ID NO: 51200 - RNA, 19 nt, Artificial Sequence
  Description of Artificial Sequence: Synthetic oligonucleotide
ucccgcagugagccgacuu

SEQ ID NO: 51201 - RNA, 19 nt, Artificial Sequence
  Description of Artificial Sequence: Synthetic oligonucleotide
guggauggcaagacaucca

SEQ ID NO: 51202 - RNA, 19 nt, Artificial Sequence
  Description of Artificial Sequence: Synthetic oligonucleotide
caucgugaacguaacggau

SEQ ID NO: 51203 - RNA, 19 nt, Artificial Sequence
  Description of Artificial Sequence: Synthetic oligonucleotide
ccuggcguggaguggcucc

SEQ ID NO: 51204 - RNA, 19 nt, Artificial Sequence
  Description of Artificial Sequence: Synthetic oligonucleotide
gcguuuucggagguagaag

SEQ ID NO: 51205 - RNA, 19 nt, Artificial Sequence
  Description of Artificial Sequence: Synthetic oligonucleotide
guagagaacccugccugaa

SEQ ID NO: 51206 - RNA, 19 nt, Artificial Sequence
  Description of Artificial Sequence: Synthetic oligonucleotide
ggaucguccuaaggcuugg

SEQ ID NO: 51207 - RNA, 19 nt, Artificial Sequence
  Description of Artificial Sequence: Synthetic oligonucleotide
uagacgcaggguggugccc

SEQ ID NO: 51208 - RNA, 19 nt, Artificial Sequence
  Description of Artificial Sequence: Synthetic oligonucleotide
caccccuugcccacagcuc

SEQ ID NO: 51209 - RNA, 19 nt, Artificial Sequence
  Description of Artificial Sequence: Synthetic oligonucleotide
gguugcuggaugguguaga

SEQ ID NO: 51210 - RNA, 19 nt, Artificial Sequence
  Description of Artificial Sequence: Synthetic oligonucleotide
ucagugcuauccguccauu

SEQ ID NO: 51211 - RNA, 19 nt, Artificial Sequence
  Description of Artificial Sequence: Synthetic oligonucleotide
cagaucuguccguccccac

SEQ ID NO: 51212 - RNA, 19 nt, Artificial Sequence
  Description of Artificial Sequence: Synthetic oligonucleotide
cuguaccgugacauucaca

SEQ ID NO: 51213 - RNA, 19 nt, Artificial Sequence
  Description of Artificial Sequence: Synthetic oligonucleotide
ccccuggugacacggagug

SEQ ID NO: 51214 - RNA, 19 nt, Artificial Sequence
  Description of Artificial Sequence: Synthetic oligonucleotide
gcggucaacaccuggacau

SEQ ID NO: 51215 - RNA, 19 nt, Artificial Sequence
  Description of Artificial Sequence: Synthetic oligonucleotide
gguaagguucaguggcaaa

SEQ ID NO: 51216 - RNA, 19 nt, Artificial Sequence
  Description of Artificial Sequence: Synthetic oligonucleotide
gggguauacuacacucagc

SEQ ID NO: 51217 - RNA, 19 nt, Artificial Sequence
  Description of Artificial Sequence: Synthetic oligonucleotide
uguugcguuuucggaggua

SEQ ID NO: 51218 - RNA, 19 nt, Artificial Sequence
  Description of Artificial Sequence: Synthetic oligonucleotide
ccuggugacacggagugga

SEQ ID NO: 51219 - RNA, 19 nt, Artificial Sequence
  Description of Artificial Sequence: Synthetic oligonucleotide
gccauaucggggcccugcc

SEQ ID NO: 51220 - RNA, 19 nt, Artificial Sequence
  Description of Artificial Sequence: Synthetic oligonucleotide
gcuggguugcuggauggug

SEQ ID NO: 51221 - RNA, 19 nt, Artificial Sequence
  Description of Artificial Sequence: Synthetic oligonucleotide
gugacggaccucugugucu

SEQ ID NO: 51222 - RNA, 19 nt, Artificial Sequence
  Description of Artificial Sequence: Synthetic oligonucleotide
cauaucggggccccugagu

SEQ ID NO: 51223 - RNA, 19 nt, Artificial Sequence
  Description of Artificial Sequence: Synthetic oligonucleotide
gucuagacgcaggguggug

SEQ ID NO: 51224 - RNA, 19 nt, Artificial Sequence
  Description of Artificial Sequence: Synthetic oligonucleotide
accuugcgaaaggucucug

SEQ ID NO: 51225 - RNA, 19 nt, Artificial Sequence
  Description of Artificial Sequence: Synthetic oligonucleotide
cacggccauaucggggccc

SEQ ID NO: 51226 - RNA, 19 nt, Artificial Sequence
  Description of Artificial Sequence: Synthetic oligonucleotide
agagcacaucgugccgucu

SEQ ID NO: 51227 - RNA, 19 nt, Artificial Sequence
  Description of Artificial Sequence: Synthetic oligonucleotide
cuggcucuaccuugcgaaa

SEQ ID NO: 51228 - RNA, 19 nt, Artificial Sequence
  Description of Artificial Sequence: Synthetic oligonucleotide
gccugugugaagugacgga

SEQ ID NO: 51229 - RNA, 19 nt, Artificial Sequence
  Description of Artificial Sequence: Synthetic oligonucleotide
ggugcucgcagcugcaccu

SEQ ID NO: 51230 - RNA, 19 nt, Artificial Sequence
  Description of Artificial Sequence: Synthetic oligonucleotide
gcgccaccgugucaugggg

SEQ ID NO: 51231 - RNA, 19 nt, Artificial Sequence
  Description of Artificial Sequence: Synthetic oligonucleotide
gccgguugcuccuggguuc

SEQ ID NO: 51232 - RNA, 19 nt, Artificial Sequence
  Description of Artificial Sequence: Synthetic oligonucleotide
caccagagaggguuaucua

SEQ ID NO: 51233 - RNA, 19 nt, Artificial Sequence
  Description of Artificial Sequence: Synthetic oligonucleotide
guccggcaaaacugcagua

SEQ ID NO: 51234 - RNA, 19 nt, Artificial Sequence
  Description of Artificial Sequence: Synthetic oligonucleotide
cauuguggcuauagagaau

SEQ ID NO: 51235 - RNA, 19 nt, Artificial Sequence
  Description of Artificial Sequence: Synthetic oligonucleotide
ggaugguauuggugugcac

SEQ ID NO: 51236 - RNA, 19 nt, Artificial Sequence
  Description of Artificial Sequence: Synthetic oligonucleotide
gcgaaaggucucuguguca

SEQ ID NO: 51237 - RNA, 19 nt, Artificial Sequence
  Description of Artificial Sequence: Synthetic oligonucleotide
cacaagccgguugcuccug

SEQ ID NO: 51238 - RNA, 19 nt, Artificial Sequence
  Description of Artificial Sequence: Synthetic oligonucleotide
cugccgaagcaccguggga

SEQ ID NO: 51239 - RNA, 19 nt, Artificial Sequence
  Description of Artificial Sequence: Synthetic oligonucleotide
ugcucccauuagccacaaa

SEQ ID NO: 51240 - RNA, 19 nt, Artificial Sequence
  Description of Artificial Sequence: Synthetic oligonucleotide
cucagugcuauccguccau

SEQ ID NO: 51241 - RNA, 19 nt, Artificial Sequence
  Description of Artificial Sequence: Synthetic oligonucleotide
uccuggcguggaguggcuc

SEQ ID NO: 51242 - RNA, 19 nt, Artificial Sequence
  Description of Artificial Sequence: Synthetic oligonucleotide
gccgacuuuagcugccucu

SEQ ID NO: 51243 - RNA, 19 nt, Artificial Sequence
  Description of Artificial Sequence: Synthetic oligonucleotide
gggacccucuaaggcaaug

SEQ ID NO: 51244 - RNA, 19 nt, Artificial Sequence
  Description of Artificial Sequence: Synthetic oligonucleotide
ccucgggaacacugagcag

SEQ ID NO: 51245 - RNA, 19 nt, Artificial Sequence
  Description of Artificial Sequence: Synthetic oligonucleotide
ggauuggguguccggcaaa

SEQ ID NO: 51246 - RNA, 19 nt, Artificial Sequence
  Description of Artificial Sequence: Synthetic oligonucleotide
gggccccugagugaggcga

SEQ ID NO: 51247 - RNA, 19 nt, Artificial Sequence
  Description of Artificial Sequence: Synthetic oligonucleotide
gcacaucgugccgucuggc

SEQ ID NO: 51248 - RNA, 19 nt, Artificial Sequence
  Description of Artificial Sequence: Synthetic oligonucleotide
ccaguggaccuacccucug

SEQ ID NO: 51249 - RNA, 19 nt, Artificial Sequence
  Description of Artificial Sequence: Synthetic oligonucleotide
guccugucggugucucacu

SEQ ID NO: 51250 - RNA, 19 nt, Artificial Sequence
  Description of Artificial Sequence: Synthetic oligonucleotide
ggcacggaagcggaagcua

SEQ ID NO: 51251 - RNA, 19 nt, Artificial Sequence
  Description of Artificial Sequence: Synthetic oligonucleotide
aucgugccgucuggcugcu

SEQ ID NO: 51252 - RNA, 19 nt, Artificial Sequence
  Description of Artificial Sequence: Synthetic oligonucleotide
gagccuguaccgugacauu

SEQ ID NO: 51253 - RNA, 19 nt, Artificial Sequence
  Description of Artificial Sequence: Synthetic oligonucleotide
cuuccggccugcccuccaa

SEQ ID NO: 51254 - RNA, 19 nt, Artificial Sequence
  Description of Artificial Sequence: Synthetic oligonucleotide
uucccgcagugagccgacu

SEQ ID NO: 51255 - RNA, 19 nt, Artificial Sequence
  Description of Artificial Sequence: Synthetic oligonucleotide
ccucagugcuauccgucca

SEQ ID NO: 51256 - RNA, 19 nt, Artificial Sequence
  Description of Artificial Sequence: Synthetic oligonucleotide
ggcauacugcccgugcggu

SEQ ID NO: 51257 - RNA, 19 nt, Artificial Sequence
  Description of Artificial Sequence: Synthetic oligonucleotide
ccagaguugugaccuauuu

SEQ ID NO: 51258 - RNA, 19 nt, Artificial Sequence
  Description of Artificial Sequence: Synthetic oligonucleotide
gugaccuauuuaggcuggu

SEQ ID NO: 51259 - RNA, 19 nt, Artificial Sequence
  Description of Artificial Sequence: Synthetic oligonucleotide
ccauaucggggcccugcca

SEQ ID NO: 51260 - RNA, 19 nt, Artificial Sequence
  Description of Artificial Sequence: Synthetic oligonucleotide
ccuugcgaaaggucucugu

SEQ ID NO: 51261 - RNA, 19 nt, Artificial Sequence
  Description of Artificial Sequence: Synthetic oligonucleotide
cgugaacguaacggaucag

SEQ ID NO: 51262 - RNA, 19 nt, Artificial Sequence
  Description of Artificial Sequence: Synthetic oligonucleotide
cccgagugagggccagcug

SEQ ID NO: 51263 - RNA, 19 nt, Artificial Sequence
  Description of Artificial Sequence: Synthetic oligonucleotide
gcucuaccuugcgaaaggu

SEQ ID NO: 51264 - RNA, 19 nt, Artificial Sequence
  Description of Artificial Sequence: Synthetic oligonucleotide
gcacggaagcggaagcuau

SEQ ID NO: 51265 - RNA, 19 nt, Artificial Sequence
  Description of Artificial Sequence: Synthetic oligonucleotide
cgacucagugaggaucguc

SEQ ID NO: 51266 - RNA, 19 nt, Artificial Sequence
  Description of Artificial Sequence: Synthetic oligonucleotide
cuggcuagcccagcaccau

SEQ ID NO: 51267 - RNA, 19 nt, Artificial Sequence
  Description of Artificial Sequence: Synthetic oligonucleotide
cccguuggccccuggagau

SEQ ID NO: 51268 - RNA, 19 nt, Artificial Sequence
  Description of Artificial Sequence: Synthetic oligonucleotide
gccaguggaccuacccucu

SEQ ID NO: 51269 - RNA, 19 nt, Artificial Sequence
  Description of Artificial Sequence: Synthetic oligonucleotide
cccggagcagcugucccga

SEQ ID NO: 51270 - RNA, 19 nt, Artificial Sequence
  Description of Artificial Sequence: Synthetic oligonucleotide
caccagugcuucagugcuu

SEQ ID NO: 51271 - RNA, 19 nt, Artificial Sequence
  Description of Artificial Sequence: Synthetic oligonucleotide
cugccgacucagugaggau

SEQ ID NO: 51272 - RNA, 19 nt, Artificial Sequence
  Description of Artificial Sequence: Synthetic oligonucleotide
cuccuggcguggaguggcu

SEQ ID NO: 51273 - RNA, 19 nt, Artificial Sequence
  Description of Artificial Sequence: Synthetic oligonucleotide
gcauacugcccgugcgguu

SEQ ID NO: 51274 - RNA, 19 nt, Artificial Sequence
  Description of Artificial Sequence: Synthetic oligonucleotide
ccgcagugagccgacuuua

SEQ ID NO: 51275 - RNA, 19 nt, Artificial Sequence
  Description of Artificial Sequence: Synthetic oligonucleotide
gccccuggugacacggagu

SEQ ID NO: 51276 - RNA, 19 nt, Artificial Sequence
  Description of Artificial Sequence: Synthetic oligonucleotide
cccgcagugagccgacuuu

SEQ ID NO: 51277 - RNA, 19 nt, Artificial Sequence
  Description of Artificial Sequence: Synthetic oligonucleotide
ccgaggcucccaucuugua

SEQ ID NO: 51278 - RNA, 19 nt, Artificial Sequence
  Description of Artificial Sequence: Synthetic oligonucleotide
cuaggccauugcgggguuu

SEQ ID NO: 51279 - RNA, 19 nt, Artificial Sequence
  Description of Artificial Sequence: Synthetic oligonucleotide
ccgcaugguaagguucagu

SEQ ID NO: 51280 - RNA, 19 nt, Artificial Sequence
  Description of Artificial Sequence: Synthetic oligonucleotide
ccgguugcuccuggguucu

SEQ ID NO: 51281 - RNA, 19 nt, Artificial Sequence
  Description of Artificial Sequence: Synthetic oligonucleotide
ccaccgugucauggggacu

SEQ ID NO: 51282 - RNA, 19 nt, Artificial Sequence
  Description of Artificial Sequence: Synthetic oligonucleotide
ggggacccucuaaggcaau

SEQ ID NO: 51283 - RNA, 19 nt, Artificial Sequence
  Description of Artificial Sequence: Synthetic oligonucleotide
ccgacucagugaggaucgu

SEQ ID NO: 51284 - RNA, 19 nt, Artificial Sequence
  Description of Artificial Sequence: Synthetic oligonucleotide
ccaccaccaugggcauaua

SEQ ID NO: 51285 - RNA, 19 nt, Artificial Sequence
  Description of Artificial Sequence: Synthetic oligonucleotide
aaugccaucaaguagcgga

SEQ ID NO: 51286 - RNA, 19 nt, Artificial Sequence
  Description of Artificial Sequence: Synthetic oligonucleotide
ugcaauaucauccaauaga

SEQ ID NO: 51287 - RNA, 19 nt, Artificial Sequence
  Description of Artificial Sequence: Synthetic oligonucleotide
auuauguugacugggaagc

SEQ ID NO: 51288 - RNA, 19 nt, Artificial Sequence
  Description of Artificial Sequence: Synthetic oligonucleotide
uuugcugacguauacauca

SEQ ID NO: 51289 - RNA, 19 nt, Artificial Sequence
  Description of Artificial Sequence: Synthetic oligonucleotide
aauuauguugacugggaag

SEQ ID NO: 51290 - RNA, 19 nt, Artificial Sequence
  Description of Artificial Sequence: Synthetic oligonucleotide
cauaucagguuuuagaaag

SEQ ID NO: 51291 - RNA, 19 nt, Artificial Sequence
  Description of Artificial Sequence: Synthetic oligonucleotide
aaugccucacaaucuaggc

SEQ ID NO: 51292 - RNA, 19 nt, Artificial Sequence
  Description of Artificial Sequence: Synthetic oligonucleotide
aagggcacuacaugcaugc

SEQ ID NO: 51293 - RNA, 19 nt, Artificial Sequence
  Description of Artificial Sequence: Synthetic oligonucleotide
acauguaacaaucgcaugg

SEQ ID NO: 51294 - RNA, 19 nt, Artificial Sequence
  Description of Artificial Sequence: Synthetic oligonucleotide
ugugaugcaaacauuauuc

SEQ ID NO: 51295 - RNA, 19 nt, Artificial Sequence
  Description of Artificial Sequence: Synthetic oligonucleotide
acuaaacacgaucacagac

SEQ ID NO: 51296 - RNA, 19 nt, Artificial Sequence
  Description of Artificial Sequence: Synthetic oligonucleotide
uuagugauuacuuucuagc

SEQ ID NO: 51297 - RNA, 19 nt, Artificial Sequence
  Description of Artificial Sequence: Synthetic oligonucleotide
aaauaugguaacuuuggcu

SEQ ID NO: 51298 - RNA, 19 nt, Artificial Sequence
  Description of Artificial Sequence: Synthetic oligonucleotide
gauuugaauaauuucugcc

SEQ ID NO: 51299 - RNA, 19 nt, Artificial Sequence
  Description of Artificial Sequence: Synthetic oligonucleotide
uuacuuucuagccuaacag

SEQ ID NO: 51300 - RNA, 19 nt, Artificial Sequence
  Description of Artificial Sequence: Synthetic oligonucleotide
aauaagacuuuucaccuca

SEQ ID NO: 51301 - RNA, 19 nt, Artificial Sequence
  Description of Artificial Sequence: Synthetic oligonucleotide
aagauaggagaaaugauuc

SEQ ID NO: 51302 - RNA, 19 nt, Artificial Sequence
  Description of Artificial Sequence: Synthetic oligonucleotide
aauuggauggcacgcuggc

SEQ ID NO: 51303 - RNA, 19 nt, Artificial Sequence
  Description of Artificial Sequence: Synthetic oligonucleotide
guuucgaugaaagaaaacc

SEQ ID NO: 51304 - RNA, 19 nt, Artificial Sequence
  Description of Artificial Sequence: Synthetic oligonucleotide
aaagaugacacaaaauaca

SEQ ID NO: 51305 - RNA, 19 nt, Artificial Sequence
  Description of Artificial Sequence: Synthetic oligonucleotide
acuaaccaacuguugaccc

SEQ ID NO: 51306 - RNA, 19 nt, Artificial Sequence
  Description of Artificial Sequence: Synthetic oligonucleotide
agagugguuacuuccaggg

SEQ ID NO: 51307 - RNA, 19 nt, Artificial Sequence
  Description of Artificial Sequence: Synthetic oligonucleotide
uuugaauaauuucugcccu

SEQ ID NO: 51308 - RNA, 19 nt, Artificial Sequence
  Description of Artificial Sequence: Synthetic oligonucleotide
agcccuacuaaccauaguc

SEQ ID NO: 51309 - RNA, 19 nt, Artificial Sequence
  Description of Artificial Sequence: Synthetic oligonucleotide
gaacuaaacacgaucacag

SEQ ID NO: 51310 - RNA, 19 nt, Artificial Sequence
  Description of Artificial Sequence: Synthetic oligonucleotide
cuuagaugcuacaagaguc

SEQ ID NO: 51311 - RNA, 19 nt, Artificial Sequence
  Description of Artificial Sequence: Synthetic oligonucleotide
ggugucauuaaguuuaggg

SEQ ID NO: 51312 - RNA, 19 nt, Artificial Sequence
  Description of Artificial Sequence: Synthetic oligonucleotide
aagaugacacaaaauacag

SEQ ID NO: 51313 - RNA, 19 nt, Artificial Sequence
  Description of Artificial Sequence: Synthetic oligonucleotide
aaggaauuggauggcacgc

SEQ ID NO: 51314 - RNA, 19 nt, Artificial Sequence
  Description of Artificial Sequence: Synthetic oligonucleotide
cucaaccccauauacaucc

SEQ ID NO: 51315 - RNA, 19 nt, Artificial Sequence
  Description of Artificial Sequence: Synthetic oligonucleotide
aagggaauacggcuccacc

SEQ ID NO: 51316 - RNA, 19 nt, Artificial Sequence
  Description of Artificial Sequence: Synthetic oligonucleotide
ugauauucaguugugggag

SEQ ID NO: 51317 - RNA, 19 nt, Artificial Sequence
  Description of Artificial Sequence: Synthetic oligonucleotide
uuguaagugggaauaaacu

SEQ ID NO: 51318 - RNA, 19 nt, Artificial Sequence
  Description of Artificial Sequence: Synthetic oligonucleotide
auuaagagaauuauguuga

SEQ ID NO: 51319 - RNA, 19 nt, Artificial Sequence
  Description of Artificial Sequence: Synthetic oligonucleotide
gagaguagcgaucauguug

SEQ ID NO: 51320 - RNA, 19 nt, Artificial Sequence
  Description of Artificial Sequence: Synthetic oligonucleotide
uguuuuguauccccuaucu

SEQ ID NO: 51321 - RNA, 19 nt, Artificial Sequence
  Description of Artificial Sequence: Synthetic oligonucleotide
gucgacuacacccacagag

SEQ ID NO: 51322 - RNA, 19 nt, Artificial Sequence
  Description of Artificial Sequence: Synthetic oligonucleotide
aagaaugacacaacuuggg

SEQ ID NO: 51323 - RNA, 19 nt, Artificial Sequence
  Description of Artificial Sequence: Synthetic oligonucleotide
ugccucacaaucuaggccc

SEQ ID NO: 51324 - RNA, 19 nt, Artificial Sequence
  Description of Artificial Sequence: Synthetic oligonucleotide
ucuagaguccauacaacug

SEQ ID NO: 51325 - RNA, 19 nt, Artificial Sequence
  Description of Artificial Sequence: Synthetic oligonucleotide
uccacuaaccaacuguuga

SEQ ID NO: 51326 - RNA, 19 nt, Artificial Sequence
  Description of Artificial Sequence: Synthetic oligonucleotide
ugacguauacaucaagaga

SEQ ID NO: 51327 - RNA, 19 nt, Artificial Sequence
  Description of Artificial Sequence: Synthetic oligonucleotide
uaagugggaauaaacuuga

SEQ ID NO: 51328 - RNA, 19 nt, Artificial Sequence
  Description of Artificial Sequence: Synthetic oligonucleotide
acuuagucuuccucguucc

SEQ ID NO: 51329 - RNA, 19 nt, Artificial Sequence
  Description of Artificial Sequence: Synthetic oligonucleotide
accauuugauaguagaugu

SEQ ID NO: 51330 - RNA, 19 nt, Artificial Sequence
  Description of Artificial Sequence: Synthetic oligonucleotide
uuagaugcuacaagaguca

SEQ ID NO: 51331 - RNA, 19 nt, Artificial Sequence
  Description of Artificial Sequence: Synthetic oligonucleotide
ucugcccuaagacacuagg

SEQ ID NO: 51332 - RNA, 19 nt, Artificial Sequence
  Description of Artificial Sequence: Synthetic oligonucleotide
gagaauuauguugacuggg

SEQ ID NO: 51333 - RNA, 19 nt, Artificial Sequence
  Description of Artificial Sequence: Synthetic oligonucleotide
acacuaaaagacguaaggg

SEQ ID NO: 51334 - RNA, 19 nt, Artificial Sequence
  Description of Artificial Sequence: Synthetic oligonucleotide
uuuguauccccuaucugga

SEQ ID NO: 51335 - RNA, 19 nt, Artificial Sequence
  Description of Artificial Sequence: Synthetic oligonucleotide
aaccauuugauaguagaug

SEQ ID NO: 51336 - RNA, 19 nt, Artificial Sequence
  Description of Artificial Sequence: Synthetic oligonucleotide
auuacuuucuagccuaaca

SEQ ID NO: 51337 - RNA, 19 nt, Artificial Sequence
  Description of Artificial Sequence: Synthetic oligonucleotide
ucgauauaguguuuaggag

SEQ ID NO: 51338 - RNA, 19 nt, Artificial Sequence
  Description of Artificial Sequence: Synthetic oligonucleotide
auguuaacaggcaagaaug

SEQ ID NO: 51339 - RNA, 19 nt, Artificial Sequence
  Description of Artificial Sequence: Synthetic oligonucleotide
uguaagugggaauaaacuu

SEQ ID NO: 51340 - RNA, 19 nt, Artificial Sequence
  Description of Artificial Sequence: Synthetic oligonucleotide
guaaaggaguaguaaauac

SEQ ID NO: 51341 - RNA, 19 nt, Artificial Sequence
  Description of Artificial Sequence: Synthetic oligonucleotide
gaaauaugguaacuuuggc

SEQ ID NO: 51342 - RNA, 19 nt, Artificial Sequence
  Description of Artificial Sequence: Synthetic oligonucleotide
acauccuaggccuagguga

SEQ ID NO: 51343 - RNA, 19 nt, Artificial Sequence
  Description of Artificial Sequence: Synthetic oligonucleotide
aaaugauucugaggguuac

SEQ ID NO: 51344 - RNA, 19 nt, Artificial Sequence
  Description of Artificial Sequence: Synthetic oligonucleotide
uaugaaacaguaccuugga

SEQ ID NO: 51345 - RNA, 19 nt, Artificial Sequence
  Description of Artificial Sequence: Synthetic oligonucleotide
ucccaauuggguaagggcu

SEQ ID NO: 51346 - RNA, 19 nt, Artificial Sequence
  Description of Artificial Sequence: Synthetic oligonucleotide
uucccuaacacccaggguu

SEQ ID NO: 51347 - RNA, 19 nt, Artificial Sequence
  Description of Artificial Sequence: Synthetic oligonucleotide
uaaacacgaucacagacaa

SEQ ID NO: 51348 - RNA, 19 nt, Artificial Sequence
  Description of Artificial Sequence: Synthetic oligonucleotide
ugcccuaagacacuaggug

SEQ ID NO: 51349 - RNA, 19 nt, Artificial Sequence
  Description of Artificial Sequence: Synthetic oligonucleotide
agguaacuuccacugaugg

SEQ ID NO: 51350 - RNA, 19 nt, Artificial Sequence
  Description of Artificial Sequence: Synthetic oligonucleotide
ugaugcaaacauuauucug

SEQ ID NO: 51351 - RNA, 19 nt, Artificial Sequence
  Description of Artificial Sequence: Synthetic oligonucleotide
ucuagccuaacagacauga

SEQ ID NO: 51352 - RNA, 19 nt, Artificial Sequence
  Description of Artificial Sequence: Synthetic oligonucleotide
aaccccgaaauaugguaac

SEQ ID NO: 51353 - RNA, 19 nt, Artificial Sequence
  Description of Artificial Sequence: Synthetic oligonucleotide
gcggaaaacauuucuaugg

SEQ ID NO: 51354 - RNA, 19 nt, Artificial Sequence
  Description of Artificial Sequence: Synthetic oligonucleotide
aucgcauggagacagugag

SEQ ID NO: 51355 - RNA, 19 nt, Artificial Sequence
  Description of Artificial Sequence: Synthetic oligonucleotide
aguauugggugucauuaag

SEQ ID NO: 51356 - RNA, 19 nt, Artificial Sequence
  Description of Artificial Sequence: Synthetic oligonucleotide
aacucaauuuggaggagac

SEQ ID NO: 51357 - RNA, 19 nt, Artificial Sequence
  Description of Artificial Sequence: Synthetic oligonucleotide
uuggcuuggcaauauaugu

SEQ ID NO: 51358 - RNA, 19 nt, Artificial Sequence
  Description of Artificial Sequence: Synthetic oligonucleotide
aaaaccccgaaauauggua

SEQ ID NO: 51359 - RNA, 19 nt, Artificial Sequence
  Description of Artificial Sequence: Synthetic oligonucleotide
guagauguuucccuggccc

SEQ ID NO: 51360 - RNA, 19 nt, Artificial Sequence
  Description of Artificial Sequence: Synthetic oligonucleotide
augccucacaaucuaggcc

SEQ ID NO: 51361 - RNA, 19 nt, Artificial Sequence
  Description of Artificial Sequence: Synthetic oligonucleotide
aaugauucugaggguuacc

SEQ ID NO: 51362 - RNA, 19 nt, Artificial Sequence
  Description of Artificial Sequence: Synthetic oligonucleotide
agugauuacuuucuagccu

SEQ ID NO: 51363 - RNA, 19 nt, Artificial Sequence
  Description of Artificial Sequence: Synthetic oligonucleotide
ugucuaaaaggauuuugcu

SEQ ID NO: 51364 - RNA, 19 nt, Artificial Sequence
  Description of Artificial Sequence: Synthetic oligonucleotide
acuauuaacagaacuuaag

SEQ ID NO: 51365 - RNA, 19 nt, Artificial Sequence
  Description of Artificial Sequence: Synthetic oligonucleotide
acuaguuuugaguuccaug

SEQ ID NO: 51366 - RNA, 19 nt, Artificial Sequence
  Description of Artificial Sequence: Synthetic oligonucleotide
uccuuagaugcuacaagag

SEQ ID NO: 51367 - RNA, 19 nt, Artificial Sequence
  Description of Artificial Sequence: Synthetic oligonucleotide
ugggagguaacuuccacug

SEQ ID NO: 51368 - RNA, 19 nt, Artificial Sequence
  Description of Artificial Sequence: Synthetic oligonucleotide
ugauagagcucauaacaga

SEQ ID NO: 51369 - RNA, 19 nt, Artificial Sequence
  Description of Artificial Sequence: Synthetic oligonucleotide
gggauuaagaaacucuucc

SEQ ID NO: 51370 - RNA, 19 nt, Artificial Sequence
  Description of Artificial Sequence: Synthetic oligonucleotide
  modified_base (7)..(7): a, c, u, g, unknown or other
ggugacnggaacuucucgg

SEQ ID NO: 51371 - RNA, 19 nt, Artificial Sequence
  Description of Artificial Sequence: Synthetic oligonucleotide
  modified_base (3)..(3): a, c, u, g, unknown or other
acnggaacuucucggauug

SEQ ID NO: 51372 - RNA, 19 nt, Artificial Sequence
  Description of Artificial Sequence: Synthetic oligonucleotide
aaugcguacgauaucuuca

SEQ ID NO: 51373 - RNA, 19 nt, Artificial Sequence
  Description of Artificial Sequence: Synthetic oligonucleotide
ucucgcaucagugggaugc

SEQ ID NO: 51374 - RNA, 19 nt, Artificial Sequence
  Description of Artificial Sequence: Synthetic oligonucleotide
uguuaacaggcaagaauga

SEQ ID NO: 51375 - RNA, 19 nt, Artificial Sequence
  Description of Artificial Sequence: Synthetic oligonucleotide
ucaugauauucaguugugg

SEQ ID NO: 51376 - RNA, 19 nt, Artificial Sequence
  Description of Artificial Sequence: Synthetic oligonucleotide
aagcucguuacacccaaug

SEQ ID NO: 51377 - RNA, 19 nt, Artificial Sequence
  Description of Artificial Sequence: Synthetic oligonucleotide
uacuuucuagccuaacaga

SEQ ID NO: 51378 - RNA, 19 nt, Artificial Sequence
  Description of Artificial Sequence: Synthetic oligonucleotide
ucuuacacagcacucgaua

SEQ ID NO: 51379 - RNA, 19 nt, Artificial Sequence
  Description of Artificial Sequence: Synthetic oligonucleotide
ucucggauuggucuuuuca

SEQ ID NO: 51380 - RNA, 19 nt, Artificial Sequence
  Description of Artificial Sequence: Synthetic oligonucleotide
gaaugccucacaaucuagg

SEQ ID NO: 51381 - RNA, 19 nt, Artificial Sequence
  Description of Artificial Sequence: Synthetic oligonucleotide
uggcccucuccuuagaugc

SEQ ID NO: 51382 - RNA, 19 nt, Artificial Sequence
  Description of Artificial Sequence: Synthetic oligonucleotide
uuacccucaauacuugguc

SEQ ID NO: 51383 - RNA, 19 nt, Artificial Sequence
  Description of Artificial Sequence: Synthetic oligonucleotide
agucauuucaggugggaga

SEQ ID NO: 51384 - RNA, 19 nt, Artificial Sequence
  Description of Artificial Sequence: Synthetic oligonucleotide
agcagaaucaagacaccgc

SEQ ID NO: 51385 - RNA, 19 nt, Artificial Sequence
  Description of Artificial Sequence: Synthetic oligonucleotide
ugcuguaacuccaagucua

SEQ ID NO: 51386 - RNA, 19 nt, Artificial Sequence
  Description of Artificial Sequence: Synthetic oligonucleotide
aacuaaacacgaucacaga

SEQ ID NO: 51387 - RNA, 19 nt, Artificial Sequence
  Description of Artificial Sequence: Synthetic oligonucleotide
uuaccugucugcagauccg

SEQ ID NO: 51388 - RNA, 19 nt, Artificial Sequence
  Description of Artificial Sequence: Synthetic oligonucleotide
uucaccccaauauggaaca

SEQ ID NO: 51389 - RNA, 19 nt, Artificial Sequence
  Description of Artificial Sequence: Synthetic oligonucleotide
aaggcuagugaagagagua

SEQ ID NO: 51390 - RNA, 19 nt, Artificial Sequence
  Description of Artificial Sequence: Synthetic oligonucleotide
uguauccccuaucuggaga

SEQ ID NO: 51391 - RNA, 19 nt, Artificial Sequence
  Description of Artificial Sequence: Synthetic oligonucleotide
ugugcguugaauguuuaac

SEQ ID NO: 51392 - RNA, 19 nt, Artificial Sequence
  Description of Artificial Sequence: Synthetic oligonucleotide
aggguuacuccucauguca

SEQ ID NO: 51393 - RNA, 19 nt, Artificial Sequence
  Description of Artificial Sequence: Synthetic oligonucleotide
agccuuaauucagaggaac

SEQ ID NO: 51394 - RNA, 19 nt, Artificial Sequence
  Description of Artificial Sequence: Synthetic oligonucleotide
aaaaggauuuugcucugua

SEQ ID NO: 51395 - RNA, 19 nt, Artificial Sequence
  Description of Artificial Sequence: Synthetic oligonucleotide
  modified_base (8)..(8): a, c, u, g, unknown or other
uggugacnggaacuucucg

SEQ ID NO: 51396 - RNA, 19 nt, Artificial Sequence
  Description of Artificial Sequence: Synthetic oligonucleotide
uaccccuagguaaaggagu

SEQ ID NO: 51397 - RNA, 19 nt, Artificial Sequence
  Description of Artificial Sequence: Synthetic oligonucleotide
aacacccaggguuacuccu

SEQ ID NO: 51398 - RNA, 19 nt, Artificial Sequence
  Description of Artificial Sequence: Synthetic oligonucleotide
cucccaauuggguaagggc

SEQ ID NO: 51399 - RNA, 19 nt, Artificial Sequence
  Description of Artificial Sequence: Synthetic oligonucleotide
agauaggagaaaugauucu

SEQ ID NO: 51400 - RNA, 19 nt, Artificial Sequence
  Description of Artificial Sequence: Synthetic oligonucleotide
aaccccauauacauccuag

SEQ ID NO: 51401 - RNA, 19 nt, Artificial Sequence
  Description of Artificial Sequence: Synthetic oligonucleotide
guccauacaacuguggaac

SEQ ID NO: 51402 - RNA, 19 nt, Artificial Sequence
  Description of Artificial Sequence: Synthetic oligonucleotide
auuaaguuuagggaugaaa

SEQ ID NO: 51403 - RNA, 19 nt, Artificial Sequence
  Description of Artificial Sequence: Synthetic oligonucleotide
uucacuccugaaauccuca

SEQ ID NO: 51404 - RNA, 19 nt, Artificial Sequence
  Description of Artificial Sequence: Synthetic oligonucleotide
uuuucucgcaucaguggga

SEQ ID NO: 51405 - RNA, 19 nt, Artificial Sequence
  Description of Artificial Sequence: Synthetic oligonucleotide
uaagagaauuauguugacu

SEQ ID NO: 51406 - RNA, 19 nt, Artificial Sequence
  Description of Artificial Sequence: Synthetic oligonucleotide
augaaacaguaccuuggag

SEQ ID NO: 51407 - RNA, 19 nt, Artificial Sequence
  Description of Artificial Sequence: Synthetic oligonucleotide
uuaagagaauuauguugac

SEQ ID NO: 51408 - RNA, 19 nt, Artificial Sequence
  Description of Artificial Sequence: Synthetic oligonucleotide
aacuuggugcuuuggccug

SEQ ID NO: 51409 - RNA, 19 nt, Artificial Sequence
  Description of Artificial Sequence: Synthetic oligonucleotide
cagaagauaggagaaauga

SEQ ID NO: 51410 - RNA, 19 nt, Artificial Sequence
  Description of Artificial Sequence: Synthetic oligonucleotide
uggaacuaaacacgaucac

SEQ ID NO: 51411 - RNA, 19 nt, Artificial Sequence
  Description of Artificial Sequence: Synthetic oligonucleotide
acuaaccauaguccugcuc

SEQ ID NO: 51412 - RNA, 19 nt, Artificial Sequence
  Description of Artificial Sequence: Synthetic oligonucleotide
ugauugauguuuacuccuc

SEQ ID NO: 51413 - RNA, 19 nt, Artificial Sequence
  Description of Artificial Sequence: Synthetic oligonucleotide
agguuggcaagauauuaca

SEQ ID NO: 51414 - RNA, 19 nt, Artificial Sequence
  Description of Artificial Sequence: Synthetic oligonucleotide
gacuuagucuuccucguuc

SEQ ID NO: 51415 - RNA, 19 nt, Artificial Sequence
  Description of Artificial Sequence: Synthetic oligonucleotide
gacaugacaaaacuuugcu

SEQ ID NO: 51416 - RNA, 19 nt, Artificial Sequence
  Description of Artificial Sequence: Synthetic oligonucleotide
acucgauauaguguuuagg

SEQ ID NO: 51417 - RNA, 19 nt, Artificial Sequence
  Description of Artificial Sequence: Synthetic oligonucleotide
gcaaaguagugacaugggg

SEQ ID NO: 51418 - RNA, 19 nt, Artificial Sequence
  Description of Artificial Sequence: Synthetic oligonucleotide
ucgacuacacccacagagu

SEQ ID NO: 51419 - RNA, 19 nt, Artificial Sequence
  Description of Artificial Sequence: Synthetic oligonucleotide
aauuggguaagggcuuaag

SEQ ID NO: 51420 - RNA, 19 nt, Artificial Sequence
  Description of Artificial Sequence: Synthetic oligonucleotide
aaaccauuugauaguagau

SEQ ID NO: 51421 - RNA, 19 nt, Artificial Sequence
  Description of Artificial Sequence: Synthetic oligonucleotide
ccgguaaugaagcugauug

SEQ ID NO: 51422 - RNA, 19 nt, Artificial Sequence
  Description of Artificial Sequence: Synthetic oligonucleotide
accccaauauggaacaggg

SEQ ID NO: 51423 - RNA, 19 nt, Artificial Sequence
  Description of Artificial Sequence: Synthetic oligonucleotide
uaauaagacuuuucaccuc

SEQ ID NO: 51424 - RNA, 19 nt, Artificial Sequence
  Description of Artificial Sequence: Synthetic oligonucleotide
uauacauccuaggccuagg

SEQ ID NO: 51425 - RNA, 19 nt, Artificial Sequence
  Description of Artificial Sequence: Synthetic oligonucleotide
ucagauagggaaagacuua

SEQ ID NO: 51426 - RNA, 19 nt, Artificial Sequence
  Description of Artificial Sequence: Synthetic oligonucleotide
gcguugaauguuuaacugg

SEQ ID NO: 51427 - RNA, 19 nt, Artificial Sequence
  Description of Artificial Sequence: Synthetic oligonucleotide
uucgacacaaagccucuaa

SEQ ID NO: 51428 - RNA, 19 nt, Artificial Sequence
  Description of Artificial Sequence: Synthetic oligonucleotide
uguggucacuaguuuugag

SEQ ID NO: 51429 - RNA, 19 nt, Artificial Sequence
  Description of Artificial Sequence: Synthetic oligonucleotide
agucuguaguucaagucuc

SEQ ID NO: 51430 - RNA, 19 nt, Artificial Sequence
  Description of Artificial Sequence: Synthetic oligonucleotide
cagguuggcaagauauuac

SEQ ID NO: 51431 - RNA, 19 nt, Artificial Sequence
  Description of Artificial Sequence: Synthetic oligonucleotide
uggaaucaguacccaagac

SEQ ID NO: 51432 - RNA, 19 nt, Artificial Sequence
  Description of Artificial Sequence: Synthetic oligonucleotide
uugggagguaacuuccacu

SEQ ID NO: 51433 - RNA, 19 nt, Artificial Sequence
  Description of Artificial Sequence: Synthetic oligonucleotide
aguagcgaucauguuggcg

SEQ ID NO: 51434 - RNA, 19 nt, Artificial Sequence
  Description of Artificial Sequence: Synthetic oligonucleotide
auauucaguugugggagag

SEQ ID NO: 51435 - RNA, 19 nt, Artificial Sequence
  Description of Artificial Sequence: Synthetic oligonucleotide
uuucccuaccaguuggauc

SEQ ID NO: 51436 - RNA, 19 nt, Artificial Sequence
  Description of Artificial Sequence: Synthetic oligonucleotide
aguccauacaacuguggaa

SEQ ID NO: 51437 - RNA, 19 nt, Artificial Sequence
  Description of Artificial Sequence: Synthetic oligonucleotide
gugauuacuuucuagccua

SEQ ID NO: 51438 - RNA, 19 nt, Artificial Sequence
  Description of Artificial Sequence: Synthetic oligonucleotide
acagagugguuacuuccag

SEQ ID NO: 51439 - RNA, 19 nt, Artificial Sequence
  Description of Artificial Sequence: Synthetic oligonucleotide
gcguacgauaucuucaaag

SEQ ID NO: 51440 - RNA, 19 nt, Artificial Sequence
  Description of Artificial Sequence: Synthetic oligonucleotide
gagauggguucccuaacac

SEQ ID NO: 51441 - RNA, 19 nt, Artificial Sequence
  Description of Artificial Sequence: Synthetic oligonucleotide
aaacccucaaccccauaua

SEQ ID NO: 51442 - RNA, 19 nt, Artificial Sequence
  Description of Artificial Sequence: Synthetic oligonucleotide
agacaccgcugauagagcu

SEQ ID NO: 51443 - RNA, 19 nt, Artificial Sequence
  Description of Artificial Sequence: Synthetic oligonucleotide
acgaauggaggaagagugc

SEQ ID NO: 51444 - RNA, 19 nt, Artificial Sequence
  Description of Artificial Sequence: Synthetic oligonucleotide
agaauuauguugacuggga

SEQ ID NO: 51445 - RNA, 19 nt, Artificial Sequence
  Description of Artificial Sequence: Synthetic oligonucleotide
auacuuguaagugggaaua

SEQ ID NO: 51446 - RNA, 19 nt, Artificial Sequence
  Description of Artificial Sequence: Synthetic oligonucleotide
ggaaauuaccugucugcag

SEQ ID NO: 51447 - RNA, 19 nt, Artificial Sequence
  Description of Artificial Sequence: Synthetic oligonucleotide
agaaagucugucuguccca

SEQ ID NO: 51448 - RNA, 19 nt, Artificial Sequence
  Description of Artificial Sequence: Synthetic oligonucleotide
auauacauccuaggccuag

SEQ ID NO: 51449 - RNA, 19 nt, Artificial Sequence
  Description of Artificial Sequence: Synthetic oligonucleotide
agcucguuacacccaaugu

SEQ ID NO: 51450 - RNA, 19 nt, Artificial Sequence
  Description of Artificial Sequence: Synthetic oligonucleotide
uacaagagucauggaauca

SEQ ID NO: 51451 - RNA, 19 nt, Artificial Sequence
  Description of Artificial Sequence: Synthetic oligonucleotide
ccaauauggaacagggcgc

SEQ ID NO: 51452 - RNA, 19 nt, Artificial Sequence
  Description of Artificial Sequence: Synthetic oligonucleotide
aaaccccgaaauaugguaa

SEQ ID NO: 51453 - RNA, 19 nt, Artificial Sequence
  Description of Artificial Sequence: Synthetic oligonucleotide
guaguaaauacagaccucu

SEQ ID NO: 51454 - RNA, 19 nt, Artificial Sequence
  Description of Artificial Sequence: Synthetic oligonucleotide
uccccuucauugaaaucca

SEQ ID NO: 51455 - RNA, 19 nt, Artificial Sequence
  Description of Artificial Sequence: Synthetic oligonucleotide
agccuaacagacaugacaa

SEQ ID NO: 51456 - RNA, 19 nt, Artificial Sequence
  Description of Artificial Sequence: Synthetic oligonucleotide
cuuugcuuagugaccaaga

SEQ ID NO: 51457 - RNA, 19 nt, Artificial Sequence
  Description of Artificial Sequence: Synthetic oligonucleotide
aggagggauuaagaaacuc

SEQ ID NO: 51458 - RNA, 19 nt, Artificial Sequence
  Description of Artificial Sequence: Synthetic oligonucleotide
aacauaccccuagguaaag

SEQ ID NO: 51459 - RNA, 19 nt, Artificial Sequence
  Description of Artificial Sequence: Synthetic oligonucleotide
acuccgguaaugaagcuga

SEQ ID NO: 51460 - RNA, 19 nt, Artificial Sequence
  Description of Artificial Sequence: Synthetic oligonucleotide
cucguuacacccaauguua

SEQ ID NO: 51461 - RNA, 19 nt, Artificial Sequence
  Description of Artificial Sequence: Synthetic oligonucleotide
cauaaugcguacgauaucu

SEQ ID NO: 51462 - RNA, 19 nt, Artificial Sequence
  Description of Artificial Sequence: Synthetic oligonucleotide
ucauggaaucaguacccaa

SEQ ID NO: 51463 - RNA, 19 nt, Artificial Sequence
  Description of Artificial Sequence: Synthetic oligonucleotide
ucguuacacccaauguuaa

SEQ ID NO: 51464 - RNA, 19 nt, Artificial Sequence
  Description of Artificial Sequence: Synthetic oligonucleotide
acucaauuuggaggagacg

SEQ ID NO: 51465 - RNA, 19 nt, Artificial Sequence
  Description of Artificial Sequence: Synthetic oligonucleotide
  modified_base (5)..(5): a, c, u, g, unknown or other
ugacnggaacuucucggau

SEQ ID NO: 51466 - RNA, 19 nt, Artificial Sequence
  Description of Artificial Sequence: Synthetic oligonucleotide
aaagaccuuccgauaccuc

SEQ ID NO: 51467 - RNA, 19 nt, Artificial Sequence
  Description of Artificial Sequence: Synthetic oligonucleotide
acucccaauuggguaaggg

SEQ ID NO: 51468 - RNA, 19 nt, Artificial Sequence
  Description of Artificial Sequence: Synthetic oligonucleotide
uccauacaacuguggaacu

SEQ ID NO: 51469 - RNA, 19 nt, Artificial Sequence
  Description of Artificial Sequence: Synthetic oligonucleotide
cauucuguccauaaugcgu

SEQ ID NO: 51470 - RNA, 19 nt, Artificial Sequence
  Description of Artificial Sequence: Synthetic oligonucleotide
gacuccgguaaugaagcug

SEQ ID NO: 51471 - RNA, 19 nt, Artificial Sequence
  Description of Artificial Sequence: Synthetic oligonucleotide
  modified_base (6)..(6): a, c, u, g, unknown or other
gugacnggaacuucucgga

SEQ ID NO: 51472 - RNA, 19 nt, Artificial Sequence
  Description of Artificial Sequence: Synthetic oligonucleotide
cuagaguccauacaacugu

SEQ ID NO: 51473 - RNA, 19 nt, Artificial Sequence
  Description of Artificial Sequence: Synthetic oligonucleotide
gggaauacggcuccaccag

SEQ ID NO: 51474 - RNA, 19 nt, Artificial Sequence
  Description of Artificial Sequence: Synthetic oligonucleotide
uggcaagauauuacagaau

SEQ ID NO: 51475 - RNA, 19 nt, Artificial Sequence
  Description of Artificial Sequence: Synthetic oligonucleotide
gguuacccucaauacuugg

SEQ ID NO: 51476 - RNA, 19 nt, Artificial Sequence
  Description of Artificial Sequence: Synthetic oligonucleotide
uauucaguugugggagagc

SEQ ID NO: 51477 - RNA, 19 nt, Artificial Sequence
  Description of Artificial Sequence: Synthetic oligonucleotide
auaccccuagguaaaggag

SEQ ID NO: 51478 - RNA, 19 nt, Artificial Sequence
  Description of Artificial Sequence: Synthetic oligonucleotide
gcuagugaagagaguagcg

SEQ ID NO: 51479 - RNA, 19 nt, Artificial Sequence
  Description of Artificial Sequence: Synthetic oligonucleotide
gauuggggacuguaaaacu

SEQ ID NO: 51480 - RNA, 19 nt, Artificial Sequence
  Description of Artificial Sequence: Synthetic oligonucleotide
ccgaaauaugguaacuuug

SEQ ID NO: 51481 - RNA, 19 nt, Artificial Sequence
  Description of Artificial Sequence: Synthetic oligonucleotide
augcguacgauaucuucaa

SEQ ID NO: 51482 - RNA, 19 nt, Artificial Sequence
  Description of Artificial Sequence: Synthetic oligonucleotide
ggcuuaaguggucuauugc

SEQ ID NO: 51483 - RNA, 19 nt, Artificial Sequence
  Description of Artificial Sequence: Synthetic oligonucleotide
gucccacaaaucuugaaua

SEQ ID NO: 51484 - RNA, 19 nt, Artificial Sequence
  Description of Artificial Sequence: Synthetic oligonucleotide
aguggucuauugcagggua

SEQ ID NO: 51485 - RNA, 19 nt, Artificial Sequence
  Description of Artificial Sequence: Synthetic oligonucleotide
ucggauuggucuuuucauu

SEQ ID NO: 51486 - RNA, 19 nt, Artificial Sequence
  Description of Artificial Sequence: Synthetic oligonucleotide
cagaaucaagacaccgcug

SEQ ID NO: 51487 - RNA, 19 nt, Artificial Sequence
  Description of Artificial Sequence: Synthetic oligonucleotide
ugauuacuuucuagccuaa

SEQ ID NO: 51488 - RNA, 19 nt, Artificial Sequence
  Description of Artificial Sequence: Synthetic oligonucleotide
acauaccccuagguaaagg

SEQ ID NO: 51489 - RNA, 19 nt, Artificial Sequence
  Description of Artificial Sequence: Synthetic oligonucleotide
gagguaacuuccacugaug

SEQ ID NO: 51490 - RNA, 19 nt, Artificial Sequence
  Description of Artificial Sequence: Synthetic oligonucleotide
aggguuacccucaauacuu

SEQ ID NO: 51491 - RNA, 19 nt, Artificial Sequence
  Description of Artificial Sequence: Synthetic oligonucleotide
uucuagccuaacagacaug

SEQ ID NO: 51492 - RNA, 19 nt, Artificial Sequence
  Description of Artificial Sequence: Synthetic oligonucleotide
gagcucauaacagaugacu

SEQ ID NO: 51493 - RNA, 19 nt, Artificial Sequence
  Description of Artificial Sequence: Synthetic oligonucleotide
aagagucauggaaucagua

SEQ ID NO: 51494 - RNA, 19 nt, Artificial Sequence
  Description of Artificial Sequence: Synthetic oligonucleotide
uccgauaccuccguucauc

SEQ ID NO: 51495 - RNA, 19 nt, Artificial Sequence
  Description of Artificial Sequence: Synthetic oligonucleotide
caggguauuaagagaauua

SEQ ID NO: 51496 - RNA, 19 nt, Artificial Sequence
  Description of Artificial Sequence: Synthetic oligonucleotide
ugguaacuuuggcuuggca

SEQ ID NO: 51497 - RNA, 19 nt, Artificial Sequence
  Description of Artificial Sequence: Synthetic oligonucleotide
aucuuaucuucacccgagu

SEQ ID NO: 51498 - RNA, 19 nt, Artificial Sequence
  Description of Artificial Sequence: Synthetic oligonucleotide
aaguguguuucuagaggga

SEQ ID NO: 51499 - RNA, 19 nt, Artificial Sequence
  Description of Artificial Sequence: Synthetic oligonucleotide
ggaauacggcuccaccagg

SEQ ID NO: 51500 - RNA, 19 nt, Artificial Sequence
  Description of Artificial Sequence: Synthetic oligonucleotide
uuuaggagccaagggcagu

SEQ ID NO: 51501 - RNA, 19 nt, Artificial Sequence
  Description of Artificial Sequence: Synthetic oligonucleotide
gaggguuacccucaauacu

SEQ ID NO: 51502 - RNA, 19 nt, Artificial Sequence
  Description of Artificial Sequence: Synthetic oligonucleotide
acaccgcugauagagcuca

SEQ ID NO: 51503 - RNA, 19 nt, Artificial Sequence
  Description of Artificial Sequence: Synthetic oligonucleotide
gaagggcacuacaugcaug

SEQ ID NO: 51504 - RNA, 19 nt, Artificial Sequence
  Description of Artificial Sequence: Synthetic oligonucleotide
ggguauuaagagaauuaug

SEQ ID NO: 51505 - RNA, 19 nt, Artificial Sequence
  Description of Artificial Sequence: Synthetic oligonucleotide
uuucucgcaucagugggau

SEQ ID NO: 51506 - RNA, 19 nt, Artificial Sequence
  Description of Artificial Sequence: Synthetic oligonucleotide
uacacccacagagucacua

SEQ ID NO: 51507 - RNA, 19 nt, Artificial Sequence
  Description of Artificial Sequence: Synthetic oligonucleotide
augacacaacuuggguugg

SEQ ID NO: 51508 - RNA, 19 nt, Artificial Sequence
  Description of Artificial Sequence: Synthetic oligonucleotide
agaacucaauuuggaggag

SEQ ID NO: 51509 - RNA, 19 nt, Artificial Sequence
  Description of Artificial Sequence: Synthetic oligonucleotide
gugcguugaauguuuaacu

SEQ ID NO: 51510 - RNA, 19 nt, Artificial Sequence
  Description of Artificial Sequence: Synthetic oligonucleotide
cucaauacuuggucuggga

SEQ ID NO: 51511 - RNA, 19 nt, Artificial Sequence
  Description of Artificial Sequence: Synthetic oligonucleotide
ggcuagugaagagaguagc

SEQ ID NO: 51512 - RNA, 19 nt, Artificial Sequence
  Description of Artificial Sequence: Synthetic oligonucleotide
gugaugcaaacauuauucu

SEQ ID NO: 51513 - RNA, 19 nt, Artificial Sequence
  Description of Artificial Sequence: Synthetic oligonucleotide
cacagagugguuacuucca

SEQ ID NO: 51514 - RNA, 19 nt, Artificial Sequence
  Description of Artificial Sequence: Synthetic oligonucleotide
aacucccaauuggguaagg

SEQ ID NO: 51515 - RNA, 19 nt, Artificial Sequence
  Description of Artificial Sequence: Synthetic oligonucleotide
acuuguaagugggaauaaa

SEQ ID NO: 51516 - RNA, 19 nt, Artificial Sequence
  Description of Artificial Sequence: Synthetic oligonucleotide
auaucagguuuuagaaagu

SEQ ID NO: 51517 - RNA, 19 nt, Artificial Sequence
  Description of Artificial Sequence: Synthetic oligonucleotide
uacuuguaagugggaauaa

SEQ ID NO: 51518 - RNA, 19 nt, Artificial Sequence
  Description of Artificial Sequence: Synthetic oligonucleotide
ugcaguauugggugucauu

SEQ ID NO: 51519 - RNA, 19 nt, Artificial Sequence
  Description of Artificial Sequence: Synthetic oligonucleotide
cuggcccucuccuuagaug

SEQ ID NO: 51520 - RNA, 19 nt, Artificial Sequence
  Description of Artificial Sequence: Synthetic oligonucleotide
ccauauacauccuaggccu

SEQ ID NO: 51521 - RNA, 19 nt, Artificial Sequence
  Description of Artificial Sequence: Synthetic oligonucleotide
ccuacuaaccauaguccug

SEQ ID NO: 51522 - RNA, 19 nt, Artificial Sequence
  Description of Artificial Sequence: Synthetic oligonucleotide
ccguucaucgacaaccuuc

SEQ ID NO: 51523 - RNA, 19 nt, Artificial Sequence
  Description of Artificial Sequence: Synthetic oligonucleotide
ugugugcguugaauguuua

SEQ ID NO: 51524 - RNA, 19 nt, Artificial Sequence
  Description of Artificial Sequence: Synthetic oligonucleotide
ucuuuacuugaaggagcca

SEQ ID NO: 51525 - RNA, 19 nt, Artificial Sequence
  Description of Artificial Sequence: Synthetic oligonucleotide
uuccagcgacacauagaca

SEQ ID NO: 51526 - RNA, 19 nt, Artificial Sequence
  Description of Artificial Sequence: Synthetic oligonucleotide
ggguugguuucgaugaaag

SEQ ID NO: 51527 - RNA, 19 nt, Artificial Sequence
  Description of Artificial Sequence: Synthetic oligonucleotide
gagaaaugauucugagggu

SEQ ID NO: 51528 - RNA, 19 nt, Artificial Sequence
  Description of Artificial Sequence: Synthetic oligonucleotide
cuugccccagcuguuauca

SEQ ID NO: 51529 - RNA, 19 nt, Artificial Sequence
  Description of Artificial Sequence: Synthetic oligonucleotide
acgagggaacugggaaacc

SEQ ID NO: 51530 - RNA, 19 nt, Artificial Sequence
  Description of Artificial Sequence: Synthetic oligonucleotide
guuaaccaacauaucaggu

SEQ ID NO: 51531 - RNA, 19 nt, Artificial Sequence
  Description of Artificial Sequence: Synthetic oligonucleotide
gggcuuaaguggucuauug

SEQ ID NO: 51532 - RNA, 19 nt, Artificial Sequence
  Description of Artificial Sequence: Synthetic oligonucleotide
caggguuacuccucauguc

SEQ ID NO: 51533 - RNA, 19 nt, Artificial Sequence
  Description of Artificial Sequence: Synthetic oligonucleotide
uuggguugguuucgaugaa

SEQ ID NO: 51534 - RNA, 19 nt, Artificial Sequence
  Description of Artificial Sequence: Synthetic oligonucleotide
uguccauaaugcguacgau

SEQ ID NO: 51535 - RNA, 19 nt, Artificial Sequence
  Description of Artificial Sequence: Synthetic oligonucleotide
guagcccucaaaagguuca

SEQ ID NO: 51536 - RNA, 19 nt, Artificial Sequence
  Description of Artificial Sequence: Synthetic oligonucleotide
ugcguacgauaucuucaaa

SEQ ID NO: 51537 - RNA, 19 nt, Artificial Sequence
  Description of Artificial Sequence: Synthetic oligonucleotide
ugucgacuacacccacaga

SEQ ID NO: 51538 - RNA, 19 nt, Artificial Sequence
  Description of Artificial Sequence: Synthetic oligonucleotide
gcugacguauacaucaaga

SEQ ID NO: 51539 - RNA, 19 nt, Artificial Sequence
  Description of Artificial Sequence: Synthetic oligonucleotide
cauuauucuggaagugugu

SEQ ID NO: 51540 - RNA, 19 nt, Artificial Sequence
  Description of Artificial Sequence: Synthetic oligonucleotide
gacagcacgaauggaggaa

SEQ ID NO: 51541 - RNA, 19 nt, Artificial Sequence
  Description of Artificial Sequence: Synthetic oligonucleotide
ccaaccaaaugacaacauc

SEQ ID NO: 51542 - RNA, 19 nt, Artificial Sequence
  Description of Artificial Sequence: Synthetic oligonucleotide
gcagaaucaagacaccgcu

SEQ ID NO: 51543 - RNA, 19 nt, Artificial Sequence
  Description of Artificial Sequence: Synthetic oligonucleotide
cauaguccugcucacccaa

SEQ ID NO: 51544 - RNA, 19 nt, Artificial Sequence
  Description of Artificial Sequence: Synthetic oligonucleotide
  modified_base (4)..(4): a, c, u, g, unknown or other
gacnggaacuucucggauu

SEQ ID NO: 51545 - RNA, 19 nt, Artificial Sequence
  Description of Artificial Sequence: Synthetic oligonucleotide
uacuaaccauaguccugcu

SEQ ID NO: 51546 - RNA, 19 nt, Artificial Sequence
  Description of Artificial Sequence: Synthetic oligonucleotide
ccgauaccuccguucaucg

SEQ ID NO: 51547 - RNA, 19 nt, Artificial Sequence
  Description of Artificial Sequence: Synthetic oligonucleotide
aagccuuaauucagaggaa

SEQ ID NO: 51548 - RNA, 19 nt, Artificial Sequence
  Description of Artificial Sequence: Synthetic oligonucleotide
ggccuuaggagaaggcuag

SEQ ID NO: 51549 - RNA, 19 nt, Artificial Sequence
  Description of Artificial Sequence: Synthetic oligonucleotide
cagaccaauguuccagcga

SEQ ID NO: 51550 - RNA, 19 nt, Artificial Sequence
  Description of Artificial Sequence: Synthetic oligonucleotide
gggaaauuaccugucugca

SEQ ID NO: 51551 - RNA, 19 nt, Artificial Sequence
  Description of Artificial Sequence: Synthetic oligonucleotide
gcccuacuaaccauagucc

SEQ ID NO: 51552 - RNA, 19 nt, Artificial Sequence
  Description of Artificial Sequence: Synthetic oligonucleotide
ggaaugccucacaaucuag

SEQ ID NO: 51553 - RNA, 19 nt, Artificial Sequence
  Description of Artificial Sequence: Synthetic oligonucleotide
caagggaauacggcuccac

SEQ ID NO: 51554 - RNA, 19 nt, Artificial Sequence
  Description of Artificial Sequence: Synthetic oligonucleotide
acguauacaucaagagaaa

SEQ ID NO: 51555 - RNA, 19 nt, Artificial Sequence
  Description of Artificial Sequence: Synthetic oligonucleotide
ccgaguucaggaugguuac

SEQ ID NO: 51556 - RNA, 19 nt, Artificial Sequence
  Description of Artificial Sequence: Synthetic oligonucleotide
caacucccaauuggguaag

SEQ ID NO: 51557 - RNA, 19 nt, Artificial Sequence
  Description of Artificial Sequence: Synthetic oligonucleotide
gggcacuacaugcaugcuc

SEQ ID NO: 51558 - RNA, 19 nt, Artificial Sequence
  Description of Artificial Sequence: Synthetic oligonucleotide
ccuuccgauaccuccguuc

SEQ ID NO: 51559 - RNA, 19 nt, Artificial Sequence
  Description of Artificial Sequence: Synthetic oligonucleotide
guauccccuaucuggagau

SEQ ID NO: 51560 - RNA, 19 nt, Artificial Sequence
  Description of Artificial Sequence: Synthetic oligonucleotide
cucggauuggucuuuucau

SEQ ID NO: 51561 - RNA, 19 nt, Artificial Sequence
  Description of Artificial Sequence: Synthetic oligonucleotide
guuacccucaauacuuggu

SEQ ID NO: 51562 - RNA, 19 nt, Artificial Sequence
  Description of Artificial Sequence: Synthetic oligonucleotide
uuccgauaccuccguucau

SEQ ID NO: 51563 - RNA, 19 nt, Artificial Sequence
  Description of Artificial Sequence: Synthetic oligonucleotide
uccgguaaugaagcugauu

SEQ ID NO: 51564 - RNA, 19 nt, Artificial Sequence
  Description of Artificial Sequence: Synthetic oligonucleotide
acagggcgcugacagguuu

SEQ ID NO: 51565 - RNA, 19 nt, Artificial Sequence
  Description of Artificial Sequence: Synthetic oligonucleotide
accccgaaauaugguaacu

SEQ ID NO: 51566 - RNA, 19 nt, Artificial Sequence
  Description of Artificial Sequence: Synthetic oligonucleotide
gacaccgcugauagagcuc

SEQ ID NO: 51567 - RNA, 19 nt, Artificial Sequence
  Description of Artificial Sequence: Synthetic oligonucleotide
uaccuccguucaucgacaa

SEQ ID NO: 51568 - RNA, 19 nt, Artificial Sequence
  Description of Artificial Sequence: Synthetic oligonucleotide
aagugggaauaaacuugau

SEQ ID NO: 51569 - RNA, 19 nt, Artificial Sequence
  Description of Artificial Sequence: Synthetic oligonucleotide
ccagcccuacuaaccauag

SEQ ID NO: 51570 - RNA, 19 nt, Artificial Sequence
  Description of Artificial Sequence: Synthetic oligonucleotide
cucgcaucagugggaugcc

SEQ ID NO: 51571 - RNA, 19 nt, Artificial Sequence
  Description of Artificial Sequence: Synthetic oligonucleotide
ggaagcugggaaauuaccu

SEQ ID NO: 51572 - RNA, 19 nt, Artificial Sequence
  Description of Artificial Sequence: Synthetic oligonucleotide
gggaaugccucacaaucua

SEQ ID NO: 51573 - RNA, 19 nt, Artificial Sequence
  Description of Artificial Sequence: Synthetic oligonucleotide
ccggaacucggcauuuccc

SEQ ID NO: 51574 - RNA, 19 nt, Artificial Sequence
  Description of Artificial Sequence: Synthetic oligonucleotide
ccaacucccaauuggguaa

SEQ ID NO: 51575 - RNA, 19 nt, Artificial Sequence
  Description of Artificial Sequence: Synthetic oligonucleotide
augcuucaugauauucagu

SEQ ID NO: 51576 - RNA, 19 nt, Artificial Sequence
  Description of Artificial Sequence: Synthetic oligonucleotide
caauguuaacaggcaagaa

SEQ ID NO: 51577 - RNA, 19 nt, Artificial Sequence
  Description of Artificial Sequence: Synthetic oligonucleotide
guagugcuuguaggccuag

SEQ ID NO: 51578 - RNA, 19 nt, Artificial Sequence
  Description of Artificial Sequence: Synthetic oligonucleotide
auaaugcguacgauaucuu

SEQ ID NO: 51579 - RNA, 19 nt, Artificial Sequence
  Description of Artificial Sequence: Synthetic oligonucleotide
augccaucaaguagcggaa

SEQ ID NO: 51580 - RNA, 19 nt, Artificial Sequence
  Description of Artificial Sequence: Synthetic oligonucleotide
  modified_base (2)..(2): a, c, u, g, unknown or other
cnggaacuucucggauugg

SEQ ID NO: 51581 - RNA, 19 nt, Artificial Sequence
  Description of Artificial Sequence: Synthetic oligonucleotide
cauucgacacaaagccucu

SEQ ID NO: 51582 - RNA, 19 nt, Artificial Sequence
  Description of Artificial Sequence: Synthetic oligonucleotide
agggcuuaaguggucuauu

SEQ ID NO: 51583 - RNA, 19 nt, Artificial Sequence
  Description of Artificial Sequence: Synthetic oligonucleotide
cccucaauacuuggucugg

SEQ ID NO: 51584 - RNA, 19 nt, Artificial Sequence
  Description of Artificial Sequence: Synthetic oligonucleotide
ucgcaucagugggaugcca

SEQ ID NO: 51585 - RNA, 19 nt, Artificial Sequence
  Description of Artificial Sequence: Synthetic oligonucleotide
accccuagguaaaggagua

SEQ ID NO: 51586 - RNA, 19 nt, Artificial Sequence
  Description of Artificial Sequence: Synthetic oligonucleotide
ccuuagaugcuacaagagu

SEQ ID NO: 51587 - RNA, 19 nt, Artificial Sequence
  Description of Artificial Sequence: Synthetic oligonucleotide
ccucuaaggauguuccaaa

SEQ ID NO: 51588 - RNA, 19 nt, Artificial Sequence
  Description of Artificial Sequence: Synthetic oligonucleotide
ccgaaacuucaccauucug

SEQ ID NO: 51589 - RNA, 19 nt, Artificial Sequence
  Description of Artificial Sequence: Synthetic oligonucleotide
cguuacacccaauguuaac

SEQ ID NO: 51590 - RNA, 19 nt, Artificial Sequence
  Description of Artificial Sequence: Synthetic oligonucleotide
ccuuaauucagaggaacua

SEQ ID NO: 51591 - RNA, 19 nt, Artificial Sequence
  Description of Artificial Sequence: Synthetic oligonucleotide
ccauaaugcguacgauauc

SEQ ID NO: 51592 - RNA, 19 nt, Artificial Sequence
  Description of Artificial Sequence: Synthetic oligonucleotide
cuaggccuaggugaacaaa

SEQ ID NO: 51593 - RNA, 19 nt, Artificial Sequence
  Description of Artificial Sequence: Synthetic oligonucleotide
cguugaauguuuaacuggu

SEQ ID NO: 51594 - RNA, 19 nt, Artificial Sequence
  Description of Artificial Sequence: Synthetic oligonucleotide
cgacuacacccacagaguc

SEQ ID NO: 51595 - RNA, 19 nt, Artificial Sequence
  Description of Artificial Sequence: Synthetic oligonucleotide
ggguuacccucaauacuug

SEQ ID NO: 51596 - RNA, 19 nt, Artificial Sequence
  Description of Artificial Sequence: Synthetic oligonucleotide
gggagguaacuuccacuga

SEQ ID NO: 51597 - RNA, 19 nt, Artificial Sequence
  Description of Artificial Sequence: Synthetic oligonucleotide
acccaagacuguacacaca

SEQ ID NO: 51598 - RNA, 19 nt, Artificial Sequence
  Description of Artificial Sequence: Synthetic oligonucleotide
gccucuaaggauguuccaa

SEQ ID NO: 51599 - RNA, 19 nt, Artificial Sequence
  Description of Artificial Sequence: Synthetic oligonucleotide
gguggauccaaagugcauu

SEQ ID NO: 51600 - RNA, 19 nt, Artificial Sequence
  Description of Artificial Sequence: Synthetic oligonucleotide
cagugggaugccaucucua

SEQ ID NO: 51601 - RNA, 19 nt, Artificial Sequence
  Description of Artificial Sequence: Synthetic oligonucleotide
aacagggcgcugacagguu

SEQ ID NO: 51602 - RNA, 19 nt, Artificial Sequence
  Description of Artificial Sequence: Synthetic oligonucleotide
gaccucacuugaggugcac

SEQ ID NO: 51603 - RNA, 19 nt, Artificial Sequence
  Description of Artificial Sequence: Synthetic oligonucleotide
gaccuuccgauaccuccgu

SEQ ID NO: 51604 - RNA, 19 nt, Artificial Sequence
  Description of Artificial Sequence: Synthetic oligonucleotide
gacacaacuuggguugguu

SEQ ID NO: 51605 - RNA, 19 nt, Artificial Sequence
  Description of Artificial Sequence: Synthetic oligonucleotide
ccugcaaugccagaagaua

SEQ ID NO: 51606 - RNA, 19 nt, Artificial Sequence
  Description of Artificial Sequence: Synthetic oligonucleotide
uauccccuaucuggagauu

SEQ ID NO: 51607 - RNA, 19 nt, Artificial Sequence
  Description of Artificial Sequence: Synthetic oligonucleotide
cacugaccaguuucucuua

SEQ ID NO: 51608 - RNA, 19 nt, Artificial Sequence
  Description of Artificial Sequence: Synthetic oligonucleotide
ggaggcaugagggguuaga

SEQ ID NO: 51609 - RNA, 19 nt, Artificial Sequence
  Description of Artificial Sequence: Synthetic oligonucleotide
cccuacuaaccauaguccu

SEQ ID NO: 51610 - RNA, 19 nt, Artificial Sequence
  Description of Artificial Sequence: Synthetic oligonucleotide
ccuucaccccaauauggaa

SEQ ID NO: 51611 - RNA, 19 nt, Artificial Sequence
  Description of Artificial Sequence: Synthetic oligonucleotide
accuuccgauaccuccguu

SEQ ID NO: 51612 - RNA, 19 nt, Artificial Sequence
  Description of Artificial Sequence: Synthetic oligonucleotide
cggaacucggcauuuccca

SEQ ID NO: 51613 - RNA, 19 nt, Artificial Sequence
  Description of Artificial Sequence: Synthetic oligonucleotide
cucuuacacagcacucgau

SEQ ID NO: 51614 - RNA, 19 nt, Artificial Sequence
  Description of Artificial Sequence: Synthetic oligonucleotide
ggcaagaaugacacaacuu

SEQ ID NO: 51615 - RNA, 19 nt, Artificial Sequence
  Description of Artificial Sequence: Synthetic oligonucleotide
gccgaaacuucaccauucu

SEQ ID NO: 51616 - RNA, 19 nt, Artificial Sequence
  Description of Artificial Sequence: Synthetic oligonucleotide
gcuggcggucacuuggagu

SEQ ID NO: 51617 - RNA, 19 nt, Artificial Sequence
  Description of Artificial Sequence: Synthetic oligonucleotide
gccuagaaugggaaugccu

SEQ ID NO: 51618 - RNA, 19 nt, Artificial Sequence
  Description of Artificial Sequence: Synthetic oligonucleotide
cuuucccuaccaguuggau

SEQ ID NO: 51619 - RNA, 19 nt, Artificial Sequence
  Description of Artificial Sequence: Synthetic oligonucleotide
ccauacaacuguggaacua

SEQ ID NO: 51620 - RNA, 19 nt, Artificial Sequence
  Description of Artificial Sequence: Synthetic oligonucleotide
ccuaggccuaggugaacaa

SEQ ID NO: 51621 - RNA, 19 nt, Artificial Sequence
  Description of Artificial Sequence: Synthetic oligonucleotide
caagcucguuacacccaau

SEQ ID NO: 51622 - RNA, 19 nt, Artificial Sequence
  Description of Artificial Sequence: Synthetic oligonucleotide
cagcccuacuaaccauagu

SEQ ID NO: 51623 - RNA, 19 nt, Artificial Sequence
  Description of Artificial Sequence: Synthetic oligonucleotide
cccuaacacccaggguuac

SEQ ID NO: 51624 - RNA, 19 nt, Artificial Sequence
  Description of Artificial Sequence: Synthetic oligonucleotide
ccaauuggguaagggcuua

SEQ ID NO: 51625 - RNA, 19 nt, Artificial Sequence
  Description of Artificial Sequence: Synthetic oligonucleotide
cuccgguaaugaagcugau

SEQ ID NO: 51626 - RNA, 19 nt, Artificial Sequence
  Description of Artificial Sequence: Synthetic oligonucleotide
ccaagucuaugaguuuggu

SEQ ID NO: 51627 - RNA, 19 nt, Artificial Sequence
  Description of Artificial Sequence: Synthetic oligonucleotide
ggguggauccaaagugcau

SEQ ID NO: 51628 - RNA, 19 nt, Artificial Sequence
  Description of Artificial Sequence: Synthetic oligonucleotide
cuucucggauuggucuuuu

SEQ ID NO: 51629 - RNA, 19 nt, Artificial Sequence
  Description of Artificial Sequence: Synthetic oligonucleotide
cugcagauccguggaucau

SEQ ID NO: 51630 - RNA, 19 nt, Artificial Sequence
  Description of Artificial Sequence: Synthetic oligonucleotide
ccccgaaauaugguaacuu

SEQ ID NO: 51631 - RNA, 19 nt, Artificial Sequence
  Description of Artificial Sequence: Synthetic oligonucleotide
gugaagcaacuuggugcuu

SEQ ID NO: 51632 - RNA, 19 nt, Artificial Sequence
  Description of Artificial Sequence: Synthetic oligonucleotide
cgaguucaggaugguuaca

SEQ ID NO: 51633 - RNA, 19 nt, Artificial Sequence
  Description of Artificial Sequence: Synthetic oligonucleotide
gccuuaggagaaggcuagu

SEQ ID NO: 51634 - RNA, 19 nt, Artificial Sequence
  Description of Artificial Sequence: Synthetic oligonucleotide
cacccgaguucaggauggu

SEQ ID NO: 51635 - RNA, 19 nt, Artificial Sequence
  Description of Artificial Sequence: Synthetic oligonucleotide
aauuauaccagcugaaugc

SEQ ID NO: 51636 - RNA, 19 nt, Artificial Sequence
  Description of Artificial Sequence: Synthetic oligonucleotide
uguucuaaagauuagagca

SEQ ID NO: 51637 - RNA, 19 nt, Artificial Sequence
  Description of Artificial Sequence: Synthetic oligonucleotide
agaaucauguaucaaaugg

SEQ ID NO: 51638 - RNA, 19 nt, Artificial Sequence
  Description of Artificial Sequence: Synthetic oligonucleotide
aaucauaccauaaaagugg

SEQ ID NO: 51639 - RNA, 19 nt, Artificial Sequence
  Description of Artificial Sequence: Synthetic oligonucleotide
uaugauaauaugacggugg

SEQ ID NO: 51640 - RNA, 19 nt, Artificial Sequence
  Description of Artificial Sequence: Synthetic oligonucleotide
aauccuauugaacugagca

SEQ ID NO: 51641 - RNA, 19 nt, Artificial Sequence
  Description of Artificial Sequence: Synthetic oligonucleotide
aguaauauaugggugacgc

SEQ ID NO: 51642 - RNA, 19 nt, Artificial Sequence
  Description of Artificial Sequence: Synthetic oligonucleotide
uguauuuacuaccagcaug

SEQ ID NO: 51643 - RNA, 19 nt, Artificial Sequence
  Description of Artificial Sequence: Synthetic oligonucleotide
uguguucuaaagauuagag

SEQ ID NO: 51644 - RNA, 19 nt, Artificial Sequence
  Description of Artificial Sequence: Synthetic oligonucleotide
uucgauaacagaucucugg

SEQ ID NO: 51645 - RNA, 19 nt, Artificial Sequence
  Description of Artificial Sequence: Synthetic oligonucleotide
uucgaaaccauuugcauug

SEQ ID NO: 51646 - RNA, 19 nt, Artificial Sequence
  Description of Artificial Sequence: Synthetic oligonucleotide
aaucgguuucaauugcugg

SEQ ID NO: 51647 - RNA, 19 nt, Artificial Sequence
  Description of Artificial Sequence: Synthetic oligonucleotide
caaaucuaggcucaggagg

SEQ ID NO: 51648 - RNA, 19 nt, Artificial Sequence
  Description of Artificial Sequence: Synthetic oligonucleotide
gauuaagagauuauucuag

SEQ ID NO: 51649 - RNA, 19 nt, Artificial Sequence
  Description of Artificial Sequence: Synthetic oligonucleotide
acuuuaagaggacaaguuc

SEQ ID NO: 51650 - RNA, 19 nt, Artificial Sequence
  Description of Artificial Sequence: Synthetic oligonucleotide
ugaaucgcuacucucuagg

SEQ ID NO: 51651 - RNA, 19 nt, Artificial Sequence
  Description of Artificial Sequence: Synthetic oligonucleotide
  modified_base (7)..(7): a, c, u, g, unknown or other
cuuuucnccaugaaugaag

SEQ ID NO: 51652 - RNA, 19 nt, Artificial Sequence
  Description of Artificial Sequence: Synthetic oligonucleotide
ugaauaaccuggcauaagu

SEQ ID NO: 51653 - RNA, 19 nt, Artificial Sequence
  Description of Artificial Sequence: Synthetic oligonucleotide
acaaguucacgauaggcuc

SEQ ID NO: 51654 - RNA, 19 nt, Artificial Sequence
  Description of Artificial Sequence: Synthetic oligonucleotide
  modified_base (3)..(3): a, c, u, g, unknown or other
ucnccaugaaugaagggag

SEQ ID NO: 51655 - RNA, 19 nt, Artificial Sequence
  Description of Artificial Sequence: Synthetic oligonucleotide
gaaacccagaccuggaagg

SEQ ID NO: 51656 - RNA, 19 nt, Artificial Sequence
  Description of Artificial Sequence: Synthetic oligonucleotide
aagguaugaccauaccaac

SEQ ID NO: 51657 - RNA, 19 nt, Artificial Sequence
  Description of Artificial Sequence: Synthetic oligonucleotide
caacguaucaucgacagcc

SEQ ID NO: 51658 - RNA, 19 nt, Artificial Sequence
  Description of Artificial Sequence: Synthetic oligonucleotide
ucauguaucaaaugguacu

SEQ ID NO: 51659 - RNA, 19 nt, Artificial Sequence
  Description of Artificial Sequence: Synthetic oligonucleotide
ucuaacaccaggccucugg

SEQ ID NO: 51660 - RNA, 19 nt, Artificial Sequence
  Description of Artificial Sequence: Synthetic oligonucleotide
gaucaauauggucagugcc

SEQ ID NO: 51661 - RNA, 19 nt, Artificial Sequence
  Description of Artificial Sequence: Synthetic oligonucleotide
aguugaguccgccacuugc

SEQ ID NO: 51662 - RNA, 19 nt, Artificial Sequence
  Description of Artificial Sequence: Synthetic oligonucleotide
caugguaaguucaagcaag

SEQ ID NO: 51663 - RNA, 19 nt, Artificial Sequence
  Description of Artificial Sequence: Synthetic oligonucleotide
  modified_base (4)..(4): a, c, u, g, unknown or other
uucnccaugaaugaaggga

SEQ ID NO: 51664 - RNA, 19 nt, Artificial Sequence
  Description of Artificial Sequence: Synthetic oligonucleotide
ugauagagaagguaugaca

SEQ ID NO: 51665 - RNA, 19 nt, Artificial Sequence
  Description of Artificial Sequence: Synthetic oligonucleotide
uggucuauuuuccacauaa

SEQ ID NO: 51666 - RNA, 19 nt, Artificial Sequence
  Description of Artificial Sequence: Synthetic oligonucleotide
ucgauaacagaucucuggc

SEQ ID NO: 51667 - RNA, 19 nt, Artificial Sequence
  Description of Artificial Sequence: Synthetic oligonucleotide
ugaaaguugaguccgccac

SEQ ID NO: 51668 - RNA, 19 nt, Artificial Sequence
  Description of Artificial Sequence: Synthetic oligonucleotide
uuuaagaggacaaguucac

SEQ ID NO: 51669 - RNA, 19 nt, Artificial Sequence
  Description of Artificial Sequence: Synthetic oligonucleotide
uccaacguaucaucgacag

SEQ ID NO: 51670 - RNA, 19 nt, Artificial Sequence
  Description of Artificial Sequence: Synthetic oligonucleotide
uauucuagaagcagaacua

SEQ ID NO: 51671 - RNA, 19 nt, Artificial Sequence
  Description of Artificial Sequence: Synthetic oligonucleotide
acucacgcaucacucagcc

SEQ ID NO: 51672 - RNA, 19 nt, Artificial Sequence
  Description of Artificial Sequence: Synthetic oligonucleotide
gaaaccauuugcauugucc

SEQ ID NO: 51673 - RNA, 19 nt, Artificial Sequence
  Description of Artificial Sequence: Synthetic oligonucleotide
auagggagucaucauaaag

SEQ ID NO: 51674 - RNA, 19 nt, Artificial Sequence
  Description of Artificial Sequence: Synthetic oligonucleotide
aguucaagcaagcauuugu

SEQ ID NO: 51675 - RNA, 19 nt, Artificial Sequence
  Description of Artificial Sequence: Synthetic oligonucleotide
cauaauuccucacgguugg

SEQ ID NO: 51676 - RNA, 19 nt, Artificial Sequence
  Description of Artificial Sequence: Synthetic oligonucleotide
auuugcauugucccaggac

SEQ ID NO: 51677 - RNA, 19 nt, Artificial Sequence
  Description of Artificial Sequence: Synthetic oligonucleotide
aauaagcucaagggagagc

SEQ ID NO: 51678 - RNA, 19 nt, Artificial Sequence
  Description of Artificial Sequence: Synthetic oligonucleotide
ucguguuucuuacaugcag

SEQ ID NO: 51679 - RNA, 19 nt, Artificial Sequence
  Description of Artificial Sequence: Synthetic oligonucleotide
aaggcuguaagagccaauc

SEQ ID NO: 51680 - RNA, 19 nt, Artificial Sequence
  Description of Artificial Sequence: Synthetic oligonucleotide
guaagauaugauaauauga

SEQ ID NO: 51681 - RNA, 19 nt, Artificial Sequence
  Description of Artificial Sequence: Synthetic oligonucleotide
ucaucaauuaccugguuua

SEQ ID NO: 51682 - RNA, 19 nt, Artificial Sequence
  Description of Artificial Sequence: Synthetic oligonucleotide
uccuuuacaccauucuugc

SEQ ID NO: 51683 - RNA, 19 nt, Artificial Sequence
  Description of Artificial Sequence: Synthetic oligonucleotide
gaauugcuaacaaaauaag

SEQ ID NO: 51684 - RNA, 19 nt, Artificial Sequence
  Description of Artificial Sequence: Synthetic oligonucleotide
acuacaauguugcuaggcu

SEQ ID NO: 51685 - RNA, 19 nt, Artificial Sequence
  Description of Artificial Sequence: Synthetic oligonucleotide
aagaccugugcuugaaaug

SEQ ID NO: 51686 - RNA, 19 nt, Artificial Sequence
  Description of Artificial Sequence: Synthetic oligonucleotide
acggacaccacacaauuug

SEQ ID NO: 51687 - RNA, 19 nt, Artificial Sequence
  Description of Artificial Sequence: Synthetic oligonucleotide
gacaaaucuaggcucagga

SEQ ID NO: 51688 - RNA, 19 nt, Artificial Sequence
  Description of Artificial Sequence: Synthetic oligonucleotide
gacccugacaaaucuaggc

SEQ ID NO: 51689 - RNA, 19 nt, Artificial Sequence
  Description of Artificial Sequence: Synthetic oligonucleotide
gguaagauaugauaauaug

SEQ ID NO: 51690 - RNA, 19 nt, Artificial Sequence
  Description of Artificial Sequence: Synthetic oligonucleotide
agaauggguguuuaaagaa

SEQ ID NO: 51691 - RNA, 19 nt, Artificial Sequence
  Description of Artificial Sequence: Synthetic oligonucleotide
cauaccaacuccauuucug

SEQ ID NO: 51692 - RNA, 19 nt, Artificial Sequence
  Description of Artificial Sequence: Synthetic oligonucleotide
auauaugggugacgcaagg

SEQ ID NO: 51693 - RNA, 19 nt, Artificial Sequence
  Description of Artificial Sequence: Synthetic oligonucleotide
acaaaucuaggcucaggag

SEQ ID NO: 51694 - RNA, 19 nt, Artificial Sequence
  Description of Artificial Sequence: Synthetic oligonucleotide
guguucuaaagauuagagc

SEQ ID NO: 51695 - RNA, 19 nt, Artificial Sequence
  Description of Artificial Sequence: Synthetic oligonucleotide
ucacgauaggcucucuuug

SEQ ID NO: 51696 - RNA, 19 nt, Artificial Sequence
  Description of Artificial Sequence: Synthetic oligonucleotide
cugguuuauaaaauacaug

SEQ ID NO: 51697 - RNA, 19 nt, Artificial Sequence
  Description of Artificial Sequence: Synthetic oligonucleotide
uuuacaccauucuugcuuc

SEQ ID NO: 51698 - RNA, 19 nt, Artificial Sequence
  Description of Artificial Sequence: Synthetic oligonucleotide
gaggacaaguucacgauag

SEQ ID NO: 51699 - RNA, 19 nt, Artificial Sequence
  Description of Artificial Sequence: Synthetic oligonucleotide
augcauacgaguccccacg

SEQ ID NO: 51700 - RNA, 19 nt, Artificial Sequence
  Description of Artificial Sequence: Synthetic oligonucleotide
ucuccaacguaucaucgac

SEQ ID NO: 51701 - RNA, 19 nt, Artificial Sequence
  Description of Artificial Sequence: Synthetic oligonucleotide
augaauugcuaacaaaaua

SEQ ID NO: 51702 - RNA, 19 nt, Artificial Sequence
  Description of Artificial Sequence: Synthetic oligonucleotide
uauucuaauugcucaccug

SEQ ID NO: 51703 - RNA, 19 nt, Artificial Sequence
  Description of Artificial Sequence: Synthetic oligonucleotide
uaacguuuuaggacaguga

SEQ ID NO: 51704 - RNA, 19 nt, Artificial Sequence
  Description of Artificial Sequence: Synthetic oligonucleotide
ucuauucuaauugcucacc

SEQ ID NO: 51705 - RNA, 19 nt, Artificial Sequence
  Description of Artificial Sequence: Synthetic oligonucleotide
gucgggaucaaucacuaac

SEQ ID NO: 51706 - RNA, 19 nt, Artificial Sequence
  Description of Artificial Sequence: Synthetic oligonucleotide
guauuuacuaccagcauga

SEQ ID NO: 51707 - RNA, 19 nt, Artificial Sequence
  Description of Artificial Sequence: Synthetic oligonucleotide
agaugcaagcccuagcuau

SEQ ID NO: 51708 - RNA, 19 nt, Artificial Sequence
  Description of Artificial Sequence: Synthetic oligonucleotide
uauagacaccaaauuacua

SEQ ID NO: 51709 - RNA, 19 nt, Artificial Sequence
  Description of Artificial Sequence: Synthetic oligonucleotide
guaccuaaaguguccauac

SEQ ID NO: 51710 - RNA, 19 nt, Artificial Sequence
  Description of Artificial Sequence: Synthetic oligonucleotide
caagguaugaccauaccaa

SEQ ID NO: 51711 - RNA, 19 nt, Artificial Sequence
  Description of Artificial Sequence: Synthetic oligonucleotide
agaacuaccuggaagauua

SEQ ID NO: 51712 - RNA, 19 nt, Artificial Sequence
  Description of Artificial Sequence: Synthetic oligonucleotide
cuaaagauuagagcacagc

SEQ ID NO: 51713 - RNA, 19 nt, Artificial Sequence
  Description of Artificial Sequence: Synthetic oligonucleotide
uacugcugcaucugaaggc

SEQ ID NO: 51714 - RNA, 19 nt, Artificial Sequence
  Description of Artificial Sequence: Synthetic oligonucleotide
ucuaauugcucaccugaaa

SEQ ID NO: 51715 - RNA, 19 nt, Artificial Sequence
  Description of Artificial Sequence: Synthetic oligonucleotide
agccaaucgguuucaauug

SEQ ID NO: 51716 - RNA, 19 nt, Artificial Sequence
  Description of Artificial Sequence: Synthetic oligonucleotide
aaauuacuaaagaggauua

SEQ ID NO: 51717 - RNA, 19 nt, Artificial Sequence
  Description of Artificial Sequence: Synthetic oligonucleotide
uuuauagucuaagcaggca

SEQ ID NO: 51718 - RNA, 19 nt, Artificial Sequence
  Description of Artificial Sequence: Synthetic oligonucleotide
gagaccaaccauuaggaua

SEQ ID NO: 51719 - RNA, 19 nt, Artificial Sequence
  Description of Artificial Sequence: Synthetic oligonucleotide
cauaaguuagcauccauua

SEQ ID NO: 51720 - RNA, 19 nt, Artificial Sequence
  Description of Artificial Sequence: Synthetic oligonucleotide
aaucgcuacucucuaggau

SEQ ID NO: 51721 - RNA, 19 nt, Artificial Sequence
  Description of Artificial Sequence: Synthetic oligonucleotide
ggcaauguuacuuuugaga

SEQ ID NO: 51722 - RNA, 19 nt, Artificial Sequence
  Description of Artificial Sequence: Synthetic oligonucleotide
gacggcuuaacuucuugac

SEQ ID NO: 51723 - RNA, 19 nt, Artificial Sequence
  Description of Artificial Sequence: Synthetic oligonucleotide
aaccauuugcauuguccca

SEQ ID NO: 51724 - RNA, 19 nt, Artificial Sequence
  Description of Artificial Sequence: Synthetic oligonucleotide
uacuacaauguugcuaggc

SEQ ID NO: 51725 - RNA, 19 nt, Artificial Sequence
  Description of Artificial Sequence: Synthetic oligonucleotide
aguucgaaaccauuugcau

SEQ ID NO: 51726 - RNA, 19 nt, Artificial Sequence
  Description of Artificial Sequence: Synthetic oligonucleotide
gucacaugcauacgagucc

SEQ ID NO: 51727 - RNA, 19 nt, Artificial Sequence
  Description of Artificial Sequence: Synthetic oligonucleotide
accaguuaggagggaaugc

SEQ ID NO: 51728 - RNA, 19 nt, Artificial Sequence
  Description of Artificial Sequence: Synthetic oligonucleotide
aucauaccauaaaaguggg

SEQ ID NO: 51729 - RNA, 19 nt, Artificial Sequence
  Description of Artificial Sequence: Synthetic oligonucleotide
uaugacgguggccaauuaa

SEQ ID NO: 51730 - RNA, 19 nt, Artificial Sequence
  Description of Artificial Sequence: Synthetic oligonucleotide
acauaauuccucacgguug

SEQ ID NO: 51731 - RNA, 19 nt, Artificial Sequence
  Description of Artificial Sequence: Synthetic oligonucleotide
acccugacaaaucuaggcu

SEQ ID NO: 51732 - RNA, 19 nt, Artificial Sequence
  Description of Artificial Sequence: Synthetic oligonucleotide
aaguucacgauaggcucuc

SEQ ID NO: 51733 - RNA, 19 nt, Artificial Sequence
  Description of Artificial Sequence: Synthetic oligonucleotide
gauagagaagguaugacau

SEQ ID NO: 51734 - RNA, 19 nt, Artificial Sequence
  Description of Artificial Sequence: Synthetic oligonucleotide
cauaccauaaaagugggua

SEQ ID NO: 51735 - RNA, 19 nt, Artificial Sequence
  Description of Artificial Sequence: Synthetic oligonucleotide
ucuaagcaggcaauccuau

SEQ ID NO: 51736 - RNA, 19 nt, Artificial Sequence
  Description of Artificial Sequence: Synthetic oligonucleotide
augcuuaaugccacagagc

SEQ ID NO: 51737 - RNA, 19 nt, Artificial Sequence
  Description of Artificial Sequence: Synthetic oligonucleotide
gcugguaacguuuuaggac

SEQ ID NO: 51738 - RNA, 19 nt, Artificial Sequence
  Description of Artificial Sequence: Synthetic oligonucleotide
uuacuaaauccugagucau

SEQ ID NO: 51739 - RNA, 19 nt, Artificial Sequence
  Description of Artificial Sequence: Synthetic oligonucleotide
uucgggaccauggaaguga

SEQ ID NO: 51740 - RNA, 19 nt, Artificial Sequence
  Description of Artificial Sequence: Synthetic oligonucleotide
cagucauaggugcacuugc

SEQ ID NO: 51741 - RNA, 19 nt, Artificial Sequence
  Description of Artificial Sequence: Synthetic oligonucleotide
ugauaauaugacgguggcc

SEQ ID NO: 51742 - RNA, 19 nt, Artificial Sequence
  Description of Artificial Sequence: Synthetic oligonucleotide
uucuaauugcucaccugaa

SEQ ID NO: 51743 - RNA, 19 nt, Artificial Sequence
  Description of Artificial Sequence: Synthetic oligonucleotide
uuccggggccuaaacaacc

SEQ ID NO: 51744 - RNA, 19 nt, Artificial Sequence
  Description of Artificial Sequence: Synthetic oligonucleotide
aauaugacgguggccaauu

SEQ ID NO: 51745 - RNA, 19 nt, Artificial Sequence
  Description of Artificial Sequence: Synthetic oligonucleotide
acacuuuaagaggacaagu

SEQ ID NO: 51746 - RNA, 19 nt, Artificial Sequence
  Description of Artificial Sequence: Synthetic oligonucleotide
ugacaaaucuaggcucagg

SEQ ID NO: 51747 - RNA, 19 nt, Artificial Sequence
  Description of Artificial Sequence: Synthetic oligonucleotide
caaccauuaggauacaacu

SEQ ID NO: 51748 - RNA, 19 nt, Artificial Sequence
  Description of Artificial Sequence: Synthetic oligonucleotide
cacgauaggcucucuuugc

SEQ ID NO: 51749 - RNA, 19 nt, Artificial Sequence
  Description of Artificial Sequence: Synthetic oligonucleotide
aggucacaccuguauuuac

SEQ ID NO: 51750 - RNA, 19 nt, Artificial Sequence
  Description of Artificial Sequence: Synthetic oligonucleotide
guuuccggggccuaaacaa

SEQ ID NO: 51751 - RNA, 19 nt, Artificial Sequence
  Description of Artificial Sequence: Synthetic oligonucleotide
ugguaacguuuuaggacag

SEQ ID NO: 51752 - RNA, 19 nt, Artificial Sequence
  Description of Artificial Sequence: Synthetic oligonucleotide
ucuugagaguacagucuga

SEQ ID NO: 51753 - RNA, 19 nt, Artificial Sequence
  Description of Artificial Sequence: Synthetic oligonucleotide
agagauuauucuagaagca

SEQ ID NO: 51754 - RNA, 19 nt, Artificial Sequence
  Description of Artificial Sequence: Synthetic oligonucleotide
acggcuuaacuucuugaca

SEQ ID NO: 51755 - RNA, 19 nt, Artificial Sequence
  Description of Artificial Sequence: Synthetic oligonucleotide
uucaauugcugguaacguu

SEQ ID NO: 51756 - RNA, 19 nt, Artificial Sequence
  Description of Artificial Sequence: Synthetic oligonucleotide
agaggagucgacucacgca

SEQ ID NO: 51757 - RNA, 19 nt, Artificial Sequence
  Description of Artificial Sequence: Synthetic oligonucleotide
caggguguguacaauauaa

SEQ ID NO: 51758 - RNA, 19 nt, Artificial Sequence
  Description of Artificial Sequence: Synthetic oligonucleotide
ucuuuggagcucuguggcc

SEQ ID NO: 51759 - RNA, 19 nt, Artificial Sequence
  Description of Artificial Sequence: Synthetic oligonucleotide
uuuccggggccuaaacaac

SEQ ID NO: 51760 - RNA, 19 nt, Artificial Sequence
  Description of Artificial Sequence: Synthetic oligonucleotide
  modified_base (2)..(2): a, c, u, g, unknown or other
cnccaugaaugaagggagg

SEQ ID NO: 51761 - RNA, 19 nt, Artificial Sequence
  Description of Artificial Sequence: Synthetic oligonucleotide
ugcuacaugguaaguucaa

SEQ ID NO: 51762 - RNA, 19 nt, Artificial Sequence
  Description of Artificial Sequence: Synthetic oligonucleotide
auuuucgauaacagaucuc

SEQ ID NO: 51763 - RNA, 19 nt, Artificial Sequence
  Description of Artificial Sequence: Synthetic oligonucleotide
uggccaauuaauacacaua

SEQ ID NO: 51764 - RNA, 19 nt, Artificial Sequence
  Description of Artificial Sequence: Synthetic oligonucleotide
gaccauaccaacuccauuu

SEQ ID NO: 51765 - RNA, 19 nt, Artificial Sequence
  Description of Artificial Sequence: Synthetic oligonucleotide
acccuguccauaccagcac

SEQ ID NO: 51766 - RNA, 19 nt, Artificial Sequence
  Description of Artificial Sequence: Synthetic oligonucleotide
agucgacucacgcaucacu

SEQ ID NO: 51767 - RNA, 19 nt, Artificial Sequence
  Description of Artificial Sequence: Synthetic oligonucleotide
agucauuuacagaucagaa

SEQ ID NO: 51768 - RNA, 19 nt, Artificial Sequence
  Description of Artificial Sequence: Synthetic oligonucleotide
aacacgcuccauagcuccc

SEQ ID NO: 51769 - RNA, 19 nt, Artificial Sequence
  Description of Artificial Sequence: Synthetic oligonucleotide
cuacucucuaggauauuuc

SEQ ID NO: 51770 - RNA, 19 nt, Artificial Sequence
  Description of Artificial Sequence: Synthetic oligonucleotide
uggaagugagaguuccuuc

SEQ ID NO: 51771 - RNA, 19 nt, Artificial Sequence
  Description of Artificial Sequence: Synthetic oligonucleotide
uauggucagugccuuggaa

SEQ ID NO: 51772 - RNA, 19 nt, Artificial Sequence
  Description of Artificial Sequence: Synthetic oligonucleotide
uaccaacuccauuucugca

SEQ ID NO: 51773 - RNA, 19 nt, Artificial Sequence
  Description of Artificial Sequence: Synthetic oligonucleotide
cuauugaacugagcagggg

SEQ ID NO: 51774 - RNA, 19 nt, Artificial Sequence
  Description of Artificial Sequence: Synthetic oligonucleotide
gauagaaaacuaguccuua

SEQ ID NO: 51775 - RNA, 19 nt, Artificial Sequence
  Description of Artificial Sequence: Synthetic oligonucleotide
gaaucgcuacucucuagga

SEQ ID NO: 51776 - RNA, 19 nt, Artificial Sequence
  Description of Artificial Sequence: Synthetic oligonucleotide
  modified_base (9)..(9): a, c, u, g, unknown or other
cacuuuucnccaugaauga

SEQ ID NO: 51777 - RNA, 19 nt, Artificial Sequence
  Description of Artificial Sequence: Synthetic oligonucleotide
acgauaggcucucuuugca

SEQ ID NO: 51778 - RNA, 19 nt, Artificial Sequence
  Description of Artificial Sequence: Synthetic oligonucleotide
uggucacaugcauacgagu

SEQ ID NO: 51779 - RNA, 19 nt, Artificial Sequence
  Description of Artificial Sequence: Synthetic oligonucleotide
cagaggagucgacucacgc

SEQ ID NO: 51780 - RNA, 19 nt, Artificial Sequence
  Description of Artificial Sequence: Synthetic oligonucleotide
uugucgggaucaaucacua

SEQ ID NO: 51781 - RNA, 19 nt, Artificial Sequence
  Description of Artificial Sequence: Synthetic oligonucleotide
auagagaagguaugacauu

SEQ ID NO: 51782 - RNA, 19 nt, Artificial Sequence
  Description of Artificial Sequence: Synthetic oligonucleotide
uaauagcgagucaccacau

SEQ ID NO: 51783 - RNA, 19 nt, Artificial Sequence
  Description of Artificial Sequence: Synthetic oligonucleotide
caguucgaaaccauuugca

SEQ ID NO: 51784 - RNA, 19 nt, Artificial Sequence
  Description of Artificial Sequence: Synthetic oligonucleotide
auaugcaggguaaggggag

SEQ ID NO: 51785 - RNA, 19 nt, Artificial Sequence
  Description of Artificial Sequence: Synthetic oligonucleotide
guaucaauuucaggugagc

SEQ ID NO: 51786 - RNA, 19 nt, Artificial Sequence
  Description of Artificial Sequence: Synthetic oligonucleotide
ucgacucacgcaucacuca

SEQ ID NO: 51787 - RNA, 19 nt, Artificial Sequence
  Description of Artificial Sequence: Synthetic oligonucleotide
caugcauacgaguccccac

SEQ ID NO: 51788 - RNA, 19 nt, Artificial Sequence
  Description of Artificial Sequence: Synthetic oligonucleotide
cauaggugcacuugccuga

SEQ ID NO: 51789 - RNA, 19 nt, Artificial Sequence
  Description of Artificial Sequence: Synthetic oligonucleotide
uuacuaccagcaugagaca

SEQ ID NO: 51790 - RNA, 19 nt, Artificial Sequence
  Description of Artificial Sequence: Synthetic oligonucleotide
caaauuacuaaagaggauu

SEQ ID NO: 51791 - RNA, 19 nt, Artificial Sequence
  Description of Artificial Sequence: Synthetic oligonucleotide
acauagggagucaucauaa

SEQ ID NO: 51792 - RNA, 19 nt, Artificial Sequence
  Description of Artificial Sequence: Synthetic oligonucleotide
cauuuucgauaacagaucu

SEQ ID NO: 51793 - RNA, 19 nt, Artificial Sequence
  Description of Artificial Sequence: Synthetic oligonucleotide
uacgaguccccacgguuac

SEQ ID NO: 51794 - RNA, 19 nt, Artificial Sequence
  Description of Artificial Sequence: Synthetic oligonucleotide
agguuuccggggccuaaac

SEQ ID NO: 51795 - RNA, 19 nt, Artificial Sequence
  Description of Artificial Sequence: Synthetic oligonucleotide
uugccugauagaagagggu

SEQ ID NO: 51796 - RNA, 19 nt, Artificial Sequence
  Description of Artificial Sequence: Synthetic oligonucleotide
ugacgguggccaauuaaua

SEQ ID NO: 51797 - RNA, 19 nt, Artificial Sequence
  Description of Artificial Sequence: Synthetic oligonucleotide
acacaagauaugaauugcu

SEQ ID NO: 51798 - RNA, 19 nt, Artificial Sequence
  Description of Artificial Sequence: Synthetic oligonucleotide
agugaaucgcuacucucua

SEQ ID NO: 51799 - RNA, 19 nt, Artificial Sequence
  Description of Artificial Sequence: Synthetic oligonucleotide
ugguaaguucaagcaagca

SEQ ID NO: 51800 - RNA, 19 nt, Artificial Sequence
  Description of Artificial Sequence: Synthetic oligonucleotide
ucgggaccauggaagugag

SEQ ID NO: 51801 - RNA, 19 nt, Artificial Sequence
  Description of Artificial Sequence: Synthetic oligonucleotide
auaauaugacgguggccaa

SEQ ID NO: 51802 - RNA, 19 nt, Artificial Sequence
  Description of Artificial Sequence: Synthetic oligonucleotide
agauuagagcacagccugg

SEQ ID NO: 51803 - RNA, 19 nt, Artificial Sequence
  Description of Artificial Sequence: Synthetic oligonucleotide
ucgcuacucucuaggauau

SEQ ID NO: 51804 - RNA, 19 nt, Artificial Sequence
  Description of Artificial Sequence: Synthetic oligonucleotide
cauuggauaugcaggguaa

SEQ ID NO: 51805 - RNA, 19 nt, Artificial Sequence
  Description of Artificial Sequence: Synthetic oligonucleotide
agaccacgugcucuuguug

SEQ ID NO: 51806 - RNA, 19 nt, Artificial Sequence
  Description of Artificial Sequence: Synthetic oligonucleotide
gugaaucgcuacucucuag

SEQ ID NO: 51807 - RNA, 19 nt, Artificial Sequence
  Description of Artificial Sequence: Synthetic oligonucleotide
cauucauggacuucccuua

SEQ ID NO: 51808 - RNA, 19 nt, Artificial Sequence
  Description of Artificial Sequence: Synthetic oligonucleotide
guaucaucgacagccuuca

SEQ ID NO: 51809 - RNA, 19 nt, Artificial Sequence
  Description of Artificial Sequence: Synthetic oligonucleotide
gaggagucgacucacgcau

SEQ ID NO: 51810 - RNA, 19 nt, Artificial Sequence
  Description of Artificial Sequence: Synthetic oligonucleotide
cuaaacaaccugaagccau

SEQ ID NO: 51811 - RNA, 19 nt, Artificial Sequence
  Description of Artificial Sequence: Synthetic oligonucleotide
augcagaacauggaguuuu

SEQ ID NO: 51812 - RNA, 19 nt, Artificial Sequence
  Description of Artificial Sequence: Synthetic oligonucleotide
agguaugaccauaccaacu

SEQ ID NO: 51813 - RNA, 19 nt, Artificial Sequence
  Description of Artificial Sequence: Synthetic oligonucleotide
aggcuguaagagccaauca

SEQ ID NO: 51814 - RNA, 19 nt, Artificial Sequence
  Description of Artificial Sequence: Synthetic oligonucleotide
aacguaucaucgacagccu

SEQ ID NO: 51815 - RNA, 19 nt, Artificial Sequence
  Description of Artificial Sequence: Synthetic oligonucleotide
auauggucagugccuugga

SEQ ID NO: 51816 - RNA, 19 nt, Artificial Sequence
  Description of Artificial Sequence: Synthetic oligonucleotide
uccggggccuaaacaaccu

SEQ ID NO: 51817 - RNA, 19 nt, Artificial Sequence
  Description of Artificial Sequence: Synthetic oligonucleotide
gaugcaagcccuagcuauc

SEQ ID NO: 51818 - RNA, 19 nt, Artificial Sequence
  Description of Artificial Sequence: Synthetic oligonucleotide
aacuaccuggaagauuauu

SEQ ID NO: 51819 - RNA, 19 nt, Artificial Sequence
  Description of Artificial Sequence: Synthetic oligonucleotide
gaaaguugaguccgccacu

SEQ ID NO: 51820 - RNA, 19 nt, Artificial Sequence
  Description of Artificial Sequence: Synthetic oligonucleotide
cacauagggagucaucaua

SEQ ID NO: 51821 - RNA, 19 nt, Artificial Sequence
  Description of Artificial Sequence: Synthetic oligonucleotide
gagugaaucgcuacucucu

SEQ ID NO: 51822 - RNA, 19 nt, Artificial Sequence
  Description of Artificial Sequence: Synthetic oligonucleotide
acaugcauacgagucccca

SEQ ID NO: 51823 - RNA, 19 nt, Artificial Sequence
  Description of Artificial Sequence: Synthetic oligonucleotide
  modified_base (8)..(8): a, c, u, g, unknown or other
acuuuucnccaugaaugaa

SEQ ID NO: 51824 - RNA, 19 nt, Artificial Sequence
  Description of Artificial Sequence: Synthetic oligonucleotide
uuacaccauucuugcuucu

SEQ ID NO: 51825 - RNA, 19 nt, Artificial Sequence
  Description of Artificial Sequence: Synthetic oligonucleotide
ccaagguaugaccauacca

SEQ ID NO: 51826 - RNA, 19 nt, Artificial Sequence
  Description of Artificial Sequence: Synthetic oligonucleotide
guucgaaaccauuugcauu

SEQ ID NO: 51827 - RNA, 19 nt, Artificial Sequence
  Description of Artificial Sequence: Synthetic oligonucleotide
gucgacucacgcaucacuc

SEQ ID NO: 51828 - RNA, 19 nt, Artificial Sequence
  Description of Artificial Sequence: Synthetic oligonucleotide
gacucacgcaucacucagc

SEQ ID NO: 51829 - RNA, 19 nt, Artificial Sequence
  Description of Artificial Sequence: Synthetic oligonucleotide
uggcauaaguuagcaucca

SEQ ID NO: 51830 - RNA, 19 nt, Artificial Sequence
  Description of Artificial Sequence: Synthetic oligonucleotide
cacaugcauacgagucccc

SEQ ID NO: 51831 - RNA, 19 nt, Artificial Sequence
  Description of Artificial Sequence: Synthetic oligonucleotide
ugacuuccaggguguguac

SEQ ID NO: 51832 - RNA, 19 nt, Artificial Sequence
  Description of Artificial Sequence: Synthetic oligonucleotide
ugcauugucccaggacccu

SEQ ID NO: 51833 - RNA, 19 nt, Artificial Sequence
  Description of Artificial Sequence: Synthetic oligonucleotide
uuggucuauuuuccacaua

SEQ ID NO: 51834 - RNA, 19 nt, Artificial Sequence
  Description of Artificial Sequence: Synthetic oligonucleotide
caauuaccugguuuauaaa

SEQ ID NO: 51835 - RNA, 19 nt, Artificial Sequence
  Description of Artificial Sequence: Synthetic oligonucleotide
acgagaugucauugaugga

SEQ ID NO: 51836 - RNA, 19 nt, Artificial Sequence
  Description of Artificial Sequence: Synthetic oligonucleotide
gugcacuugccugauagaa

SEQ ID NO: 51837 - RNA, 19 nt, Artificial Sequence
  Description of Artificial Sequence: Synthetic oligonucleotide
cugacaaaucuaggcucag

SEQ ID NO: 51838 - RNA, 19 nt, Artificial Sequence
  Description of Artificial Sequence: Synthetic oligonucleotide
cacuuuaagaggacaaguu

SEQ ID NO: 51839 - RNA, 19 nt, Artificial Sequence
  Description of Artificial Sequence: Synthetic oligonucleotide
cuccaacguaucaucgaca

SEQ ID NO: 51840 - RNA, 19 nt, Artificial Sequence
  Description of Artificial Sequence: Synthetic oligonucleotide
ggugacgcaaggcuucauc

SEQ ID NO: 51841 - RNA, 19 nt, Artificial Sequence
  Description of Artificial Sequence: Synthetic oligonucleotide
augcaagcccuagcuauca

SEQ ID NO: 51842 - RNA, 19 nt, Artificial Sequence
  Description of Artificial Sequence: Synthetic oligonucleotide
caagcgcacugucuccaac

SEQ ID NO: 51843 - RNA, 19 nt, Artificial Sequence
  Description of Artificial Sequence: Synthetic oligonucleotide
uccgugucugaggccagug

SEQ ID NO: 51844 - RNA, 19 nt, Artificial Sequence
  Description of Artificial Sequence: Synthetic oligonucleotide
cagugccuuggaauaucac

SEQ ID NO: 51845 - RNA, 19 nt, Artificial Sequence
  Description of Artificial Sequence: Synthetic oligonucleotide
ggguguguacaauauaaau

SEQ ID NO: 51846 - RNA, 19 nt, Artificial Sequence
  Description of Artificial Sequence: Synthetic oligonucleotide
guugaggcaucgagacugc

SEQ ID NO: 51847 - RNA, 19 nt, Artificial Sequence
  Description of Artificial Sequence: Synthetic oligonucleotide
cauagggagucaucauaaa

SEQ ID NO: 51848 - RNA, 19 nt, Artificial Sequence
  Description of Artificial Sequence: Synthetic oligonucleotide
ugccuacagaggucaguuc

SEQ ID NO: 51849 - RNA, 19 nt, Artificial Sequence
  Description of Artificial Sequence: Synthetic oligonucleotide
cguaucaucgacagccuuc

SEQ ID NO: 51850 - RNA, 19 nt, Artificial Sequence
  Description of Artificial Sequence: Synthetic oligonucleotide
cuaagagaccacgugcucu

SEQ ID NO: 51851 - RNA, 19 nt, Artificial Sequence
  Description of Artificial Sequence: Synthetic oligonucleotide
ucgaaaccauuugcauugu

SEQ ID NO: 51852 - RNA, 19 nt, Artificial Sequence
  Description of Artificial Sequence: Synthetic oligonucleotide
aggguguguacaauauaaa

SEQ ID NO: 51853 - RNA, 19 nt, Artificial Sequence
  Description of Artificial Sequence: Synthetic oligonucleotide
ggagucgacucacgcauca

SEQ ID NO: 51854 - RNA, 19 nt, Artificial Sequence
  Description of Artificial Sequence: Synthetic oligonucleotide
ccauuugcauugucccagg

SEQ ID NO: 51855 - RNA, 19 nt, Artificial Sequence
  Description of Artificial Sequence: Synthetic oligonucleotide
ccugguuuauaaaauacau

SEQ ID NO: 51856 - RNA, 19 nt, Artificial Sequence
  Description of Artificial Sequence: Synthetic oligonucleotide
acguaucaucgacagccuu

SEQ ID NO: 51857 - RNA, 19 nt, Artificial Sequence
  Description of Artificial Sequence: Synthetic oligonucleotide
aucguguuucuuacaugca

SEQ ID NO: 51858 - RNA, 19 nt, Artificial Sequence
  Description of Artificial Sequence: Synthetic oligonucleotide
auacgaguccccacgguua

SEQ ID NO: 51859 - RNA, 19 nt, Artificial Sequence
  Description of Artificial Sequence: Synthetic oligonucleotide
gguuuccggggccuaaaca

SEQ ID NO: 51860 - RNA, 19 nt, Artificial Sequence
  Description of Artificial Sequence: Synthetic oligonucleotide
ggacccugacaaaucuagg

SEQ ID NO: 51861 - RNA, 19 nt, Artificial Sequence
  Description of Artificial Sequence: Synthetic oligonucleotide
gcuugucgggaucaaucac

SEQ ID NO: 51862 - RNA, 19 nt, Artificial Sequence
  Description of Artificial Sequence: Synthetic oligonucleotide
acguuuuaggacagugaaa

SEQ ID NO: 51863 - RNA, 19 nt, Artificial Sequence
  Description of Artificial Sequence: Synthetic oligonucleotide
ggacaugcuguacauuucu

SEQ ID NO: 51864 - RNA, 19 nt, Artificial Sequence
  Description of Artificial Sequence: Synthetic oligonucleotide
agucaagagugaaucgcua

SEQ ID NO: 51865 - RNA, 19 nt, Artificial Sequence
  Description of Artificial Sequence: Synthetic oligonucleotide
gccaagguaugaccauacc

SEQ ID NO: 51866 - RNA, 19 nt, Artificial Sequence
  Description of Artificial Sequence: Synthetic oligonucleotide
ugggugacgcaaggcuuca

SEQ ID NO: 51867 - RNA, 19 nt, Artificial Sequence
  Description of Artificial Sequence: Synthetic oligonucleotide
aggagucgacucacgcauc

SEQ ID NO: 51868 - RNA, 19 nt, Artificial Sequence
  Description of Artificial Sequence: Synthetic oligonucleotide
auaggugcacuugccugau

SEQ ID NO: 51869 - RNA, 19 nt, Artificial Sequence
  Description of Artificial Sequence: Synthetic oligonucleotide
gguuacacaugagcuguca

SEQ ID NO: 51870 - RNA, 19 nt, Artificial Sequence
  Description of Artificial Sequence: Synthetic oligonucleotide
ggcaucguguuucuuacau

SEQ ID NO: 51871 - RNA, 19 nt, Artificial Sequence
  Description of Artificial Sequence: Synthetic oligonucleotide
ccgcuugucgggaucaauc

SEQ ID NO: 51872 - RNA, 19 nt, Artificial Sequence
  Description of Artificial Sequence: Synthetic oligonucleotide
gagucgacucacgcaucac

SEQ ID NO: 51873 - RNA, 19 nt, Artificial Sequence
  Description of Artificial Sequence: Synthetic oligonucleotide
cauacgaguccccacgguu

SEQ ID NO: 51874 - RNA, 19 nt, Artificial Sequence
  Description of Artificial Sequence: Synthetic oligonucleotide
ccaacguaucaucgacagc

SEQ ID NO: 51875 - RNA, 19 nt, Artificial Sequence
  Description of Artificial Sequence: Synthetic oligonucleotide
ggugcacuugccugauaga

SEQ ID NO: 51876 - RNA, 19 nt, Artificial Sequence
  Description of Artificial Sequence: Synthetic oligonucleotide
caugagcugucaccacgga

SEQ ID NO: 51877 - RNA, 19 nt, Artificial Sequence
  Description of Artificial Sequence: Synthetic oligonucleotide
ccuaagagaccacgugcuc

SEQ ID NO: 51878 - RNA, 19 nt, Artificial Sequence
  Description of Artificial Sequence: Synthetic oligonucleotide
cgacucacgcaucacucag

SEQ ID NO: 51879 - RNA, 19 nt, Artificial Sequence
  Description of Artificial Sequence: Synthetic oligonucleotide
cuacagaggucaguucgaa

SEQ ID NO: 51880 - RNA, 19 nt, Artificial Sequence
  Description of Artificial Sequence: Synthetic oligonucleotide
gagaccacgugcucuuguu

SEQ ID NO: 51881 - RNA, 19 nt, Artificial Sequence
  Description of Artificial Sequence: Synthetic oligonucleotide
ccuacagaggucaguucga

SEQ ID NO: 51882 - RNA, 19 nt, Artificial Sequence
  Description of Artificial Sequence: Synthetic oligonucleotide
ccuaaacaaccugaagcca

SEQ ID NO: 51883 - RNA, 19 nt, Artificial Sequence
  Description of Artificial Sequence: Synthetic oligonucleotide
cucacgguuggcugaaguu

SEQ ID NO: 51884 - RNA, 19 nt, Artificial Sequence
  Description of Artificial Sequence: Synthetic oligonucleotide
acgguuggcugaaguuucu

SEQ ID NO: 51885 - RNA, 19 nt, Artificial Sequence
  Description of Artificial Sequence: Synthetic oligonucleotide
guucacgauaggcucucuu

SEQ ID NO: 51886 - RNA, 19 nt, Artificial Sequence
  Description of Artificial Sequence: Synthetic oligonucleotide
gcuacucucuaggauauuu

SEQ ID NO: 51887 - RNA, 19 nt, Artificial Sequence
  Description of Artificial Sequence: Synthetic oligonucleotide
caucaauuaccugguuuau

SEQ ID NO: 51888 - RNA, 19 nt, Artificial Sequence
  Description of Artificial Sequence: Synthetic oligonucleotide
ccaacuccggcauuugccu

SEQ ID NO: 51889 - RNA, 19 nt, Artificial Sequence
  Description of Artificial Sequence: Synthetic oligonucleotide
gggucauaccaaacaguaa

SEQ ID NO: 51890 - RNA, 19 nt, Artificial Sequence
  Description of Artificial Sequence: Synthetic oligonucleotide
cgcuugucgggaucaauca

SEQ ID NO: 51891 - RNA, 19 nt, Artificial Sequence
  Description of Artificial Sequence: Synthetic oligonucleotide
acgaguccccacgguuaca

SEQ ID NO: 51892 - RNA, 19 nt, Artificial Sequence
  Description of Artificial Sequence: Synthetic oligonucleotide
caucgagacugcuguccgu

SEQ ID NO: 51893 - RNA, 19 nt, Artificial Sequence
  Description of Artificial Sequence: Synthetic oligonucleotide
cgaaaccauuugcauuguc

SEQ ID NO: 51894 - RNA, 19 nt, Artificial Sequence
  Description of Artificial Sequence: Synthetic oligonucleotide
ccggggccuaaacaaccug

SEQ ID NO: 51895 - RNA, 19 nt, Artificial Sequence
  Description of Artificial Sequence: Synthetic oligonucleotide
acgcaucacucagcccaga

SEQ ID NO: 51896 - RNA, 19 nt, Artificial Sequence
  Description of Artificial Sequence: Synthetic oligonucleotide
caucaacucccaugugcuu

SEQ ID NO: 51897 - RNA, 19 nt, Artificial Sequence
  Description of Artificial Sequence: Synthetic oligonucleotide
gacgguguuccuagcuguu

SEQ ID NO: 51898 - RNA, 19 nt, Artificial Sequence
  Description of Artificial Sequence: Synthetic oligonucleotide
gaacuaccuggaagauuau

SEQ ID NO: 51899 - RNA, 19 nt, Artificial Sequence
  Description of Artificial Sequence: Synthetic oligonucleotide
cgaggaucuugagaguaca

SEQ ID NO: 51900 - RNA, 19 nt, Artificial Sequence
  Description of Artificial Sequence: Synthetic oligonucleotide
ccaggguguguacaauaua

SEQ ID NO: 51901 - RNA, 19 nt, Artificial Sequence
  Description of Artificial Sequence: Synthetic oligonucleotide
gcauacgaguccccacggu

SEQ ID NO: 51902 - RNA, 19 nt, Artificial Sequence
  Description of Artificial Sequence: Synthetic oligonucleotide
caggguacuuuggucuauu

SEQ ID NO: 51903 - RNA, 19 nt, Artificial Sequence
  Description of Artificial Sequence: Synthetic oligonucleotide
guccgugucugaggccagu

SEQ ID NO: 51904 - RNA, 19 nt, Artificial Sequence
  Description of Artificial Sequence: Synthetic oligonucleotide
cgggaccauggaagugaga

SEQ ID NO: 51905 - RNA, 19 nt, Artificial Sequence
  Description of Artificial Sequence: Synthetic oligonucleotide
ccaggguacuuuggucuau

SEQ ID NO: 51906 - RNA, 19 nt, Artificial Sequence
  Description of Artificial Sequence: Synthetic oligonucleotide
gggugacgcaaggcuucau

SEQ ID NO: 51907 - RNA, 19 nt, Artificial Sequence
  Description of Artificial Sequence: Synthetic oligonucleotide
cgcuacucucuaggauauu

SEQ ID NO: 51908 - RNA, 19 nt, Artificial Sequence
  Description of Artificial Sequence: Synthetic oligonucleotide
acaaauagcauacagugcg

SEQ ID NO: 51909 - RNA, 19 nt, Artificial Sequence
  Description of Artificial Sequence: Synthetic oligonucleotide
uauaaagacauucaagccc

SEQ ID NO: 51910 - RNA, 19 nt, Artificial Sequence
  Description of Artificial Sequence: Synthetic oligonucleotide
aaacaugacggucaguccc

SEQ ID NO: 51911 - RNA, 19 nt, Artificial Sequence
  Description of Artificial Sequence: Synthetic oligonucleotide
ucgucauuuauuuugaggg

SEQ ID NO: 51912 - RNA, 19 nt, Artificial Sequence
  Description of Artificial Sequence: Synthetic oligonucleotide
aauacgauguugucaaugg

SEQ ID NO: 51913 - RNA, 19 nt, Artificial Sequence
  Description of Artificial Sequence: Synthetic oligonucleotide
aacacgaaucuauacagcg

SEQ ID NO: 51914 - RNA, 19 nt, Artificial Sequence
  Description of Artificial Sequence: Synthetic oligonucleotide
aaagaauagacuuguucac

SEQ ID NO: 51915 - RNA, 19 nt, Artificial Sequence
  Description of Artificial Sequence: Synthetic oligonucleotide
auaggcauacauuacuucc

SEQ ID NO: 51916 - RNA, 19 nt, Artificial Sequence
  Description of Artificial Sequence: Synthetic oligonucleotide
uaaacacgaaucuauacag

SEQ ID NO: 51917 - RNA, 19 nt, Artificial Sequence
  Description of Artificial Sequence: Synthetic oligonucleotide
aaugaaauaggcaagugcu

SEQ ID NO: 51918 - RNA, 19 nt, Artificial Sequence
  Description of Artificial Sequence: Synthetic oligonucleotide
agaauuuauaccgaauggc

SEQ ID NO: 51919 - RNA, 19 nt, Artificial Sequence
  Description of Artificial Sequence: Synthetic oligonucleotide
auaucuuauacaccaggcc

SEQ ID NO: 51920 - RNA, 19 nt, Artificial Sequence
  Description of Artificial Sequence: Synthetic oligonucleotide
ucgacauacauucuaaaca

SEQ ID NO: 51921 - RNA, 19 nt, Artificial Sequence
  Description of Artificial Sequence: Synthetic oligonucleotide
aaaauucgaaacacgauuc

SEQ ID NO: 51922 - RNA, 19 nt, Artificial Sequence
  Description of Artificial Sequence: Synthetic oligonucleotide
aaucuauacagcgaaguuc

SEQ ID NO: 51923 - RNA, 19 nt, Artificial Sequence
  Description of Artificial Sequence: Synthetic oligonucleotide
aaagucacuaguaacuaac

SEQ ID NO: 51924 - RNA, 19 nt, Artificial Sequence
  Description of Artificial Sequence: Synthetic oligonucleotide
gugaauacgucacaaauag

SEQ ID NO: 51925 - RNA, 19 nt, Artificial Sequence
  Description of Artificial Sequence: Synthetic oligonucleotide
aaauucaccaaccugggua

SEQ ID NO: 51926 - RNA, 19 nt, Artificial Sequence
  Description of Artificial Sequence: Synthetic oligonucleotide
auuaguaccugaucucgcc

SEQ ID NO: 51927 - RNA, 19 nt, Artificial Sequence
  Description of Artificial Sequence: Synthetic oligonucleotide
uaccuuaccacaagggugg

SEQ ID NO: 51928 - RNA, 19 nt, Artificial Sequence
  Description of Artificial Sequence: Synthetic oligonucleotide
acuaguaacuaacuuguag

SEQ ID NO: 51929 - RNA, 19 nt, Artificial Sequence
  Description of Artificial Sequence: Synthetic oligonucleotide
aguacuuccaaggagagug

SEQ ID NO: 51930 - RNA, 19 nt, Artificial Sequence
  Description of Artificial Sequence: Synthetic oligonucleotide
agaacuuccgaagaacugc

SEQ ID NO: 51931 - RNA, 19 nt, Artificial Sequence
  Description of Artificial Sequence: Synthetic oligonucleotide
agggguaguacaccgaagc

SEQ ID NO: 51932 - RNA, 19 nt, Artificial Sequence
  Description of Artificial Sequence: Synthetic oligonucleotide
agcaaggauuuucagacgg

SEQ ID NO: 51933 - RNA, 19 nt, Artificial Sequence
  Description of Artificial Sequence: Synthetic oligonucleotide
uuucgucccaaacagcagg

SEQ ID NO: 51934 - RNA, 19 nt, Artificial Sequence
  Description of Artificial Sequence: Synthetic oligonucleotide
uuauugauuuuccaccuga

SEQ ID NO: 51935 - RNA, 19 nt, Artificial Sequence
  Description of Artificial Sequence: Synthetic oligonucleotide
uuuucagacggauucauuc

SEQ ID NO: 51936 - RNA, 19 nt, Artificial Sequence
  Description of Artificial Sequence: Synthetic oligonucleotide
uagaauacgauguugucaa

SEQ ID NO: 51937 - RNA, 19 nt, Artificial Sequence
  Description of Artificial Sequence: Synthetic oligonucleotide
aaguagggguaguacaccg

SEQ ID NO: 51938 - RNA, 19 nt, Artificial Sequence
  Description of Artificial Sequence: Synthetic oligonucleotide
cugucuaugcuacuuaagg

SEQ ID NO: 51939 - RNA, 19 nt, Artificial Sequence
  Description of Artificial Sequence: Synthetic oligonucleotide
gaaauaggcaagugcuucg

SEQ ID NO: 51940 - RNA, 19 nt, Artificial Sequence
  Description of Artificial Sequence: Synthetic oligonucleotide
uacgucacaaauagcauac

SEQ ID NO: 51941 - RNA, 19 nt, Artificial Sequence
  Description of Artificial Sequence: Synthetic oligonucleotide
ucuaccuuaccacaagggu

SEQ ID NO: 51942 - RNA, 19 nt, Artificial Sequence
  Description of Artificial Sequence: Synthetic oligonucleotide
auaccgaauggcuuguuuc

SEQ ID NO: 51943 - RNA, 19 nt, Artificial Sequence
  Description of Artificial Sequence: Synthetic oligonucleotide
aauuaguaccugaucucgc

SEQ ID NO: 51944 - RNA, 19 nt, Artificial Sequence
  Description of Artificial Sequence: Synthetic oligonucleotide
agaaugucacaugacaggg

SEQ ID NO: 51945 - RNA, 19 nt, Artificial Sequence
  Description of Artificial Sequence: Synthetic oligonucleotide
aaacauguggaaugguggu

SEQ ID NO: 51946 - RNA, 19 nt, Artificial Sequence
  Description of Artificial Sequence: Synthetic oligonucleotide
aaacacgaaucuauacagc

SEQ ID NO: 51947 - RNA, 19 nt, Artificial Sequence
  Description of Artificial Sequence: Synthetic oligonucleotide
aaauucgaaacacgauucu

SEQ ID NO: 51948 - RNA, 19 nt, Artificial Sequence
  Description of Artificial Sequence: Synthetic oligonucleotide
aucuagugugucuugcugg

SEQ ID NO: 51949 - RNA, 19 nt, Artificial Sequence
  Description of Artificial Sequence: Synthetic oligonucleotide
aucgcuuguguacucuugc

SEQ ID NO: 51950 - RNA, 19 nt, Artificial Sequence
  Description of Artificial Sequence: Synthetic oligonucleotide
ugagacguauuucccacag

SEQ ID NO: 51951 - RNA, 19 nt, Artificial Sequence
  Description of Artificial Sequence: Synthetic oligonucleotide
auuauacugguaugcaaug

SEQ ID NO: 51952 - RNA, 19 nt, Artificial Sequence
  Description of Artificial Sequence: Synthetic oligonucleotide
agaauagacuuguucacca

SEQ ID NO: 51953 - RNA, 19 nt, Artificial Sequence
  Description of Artificial Sequence: Synthetic oligonucleotide
aguuaaaagucgcugcugu

SEQ ID NO: 51954 - RNA, 19 nt, Artificial Sequence
  Description of Artificial Sequence: Synthetic oligonucleotide
gucuaugcuacuuaaggac

SEQ ID NO: 51955 - RNA, 19 nt, Artificial Sequence
  Description of Artificial Sequence: Synthetic oligonucleotide
ugucuaugcuacuuaagga

SEQ ID NO: 51956 - RNA, 19 nt, Artificial Sequence
  Description of Artificial Sequence: Synthetic oligonucleotide
uacacucuauguaucgugc

SEQ ID NO: 51957 - RNA, 19 nt, Artificial Sequence
  Description of Artificial Sequence: Synthetic oligonucleotide
uuauacugguaugcaaugg

SEQ ID NO: 51958 - RNA, 19 nt, Artificial Sequence
  Description of Artificial Sequence: Synthetic oligonucleotide
acggauucauucuuuauga

SEQ ID NO: 51959 - RNA, 19 nt, Artificial Sequence
  Description of Artificial Sequence: Synthetic oligonucleotide
gcaguuagccguuacaagg

SEQ ID NO: 51960 - RNA, 19 nt, Artificial Sequence
  Description of Artificial Sequence: Synthetic oligonucleotide
uuaggcaggaugcacgacu

SEQ ID NO: 51961 - RNA, 19 nt, Artificial Sequence
  Description of Artificial Sequence: Synthetic oligonucleotide
aauucgaaacacgauucug

SEQ ID NO: 51962 - RNA, 19 nt, Artificial Sequence
  Description of Artificial Sequence: Synthetic oligonucleotide
caauuaguaccugaucucg

SEQ ID NO: 51963 - RNA, 19 nt, Artificial Sequence
  Description of Artificial Sequence: Synthetic oligonucleotide
cuaccuuaccacaagggug

SEQ ID NO: 51964 - RNA, 19 nt, Artificial Sequence
  Description of Artificial Sequence: Synthetic oligonucleotide
uuuaugacgcucagcuuug

SEQ ID NO: 51965 - RNA, 19 nt, Artificial Sequence
  Description of Artificial Sequence: Synthetic oligonucleotide
gcuacuuaaggacuggcgg

SEQ ID NO: 51966 - RNA, 19 nt, Artificial Sequence
  Description of Artificial Sequence: Synthetic oligonucleotide
caugucaucgcuuguguac

SEQ ID NO: 51967 - RNA, 19 nt, Artificial Sequence
  Description of Artificial Sequence: Synthetic oligonucleotide
acucuauguaucgugcagc

SEQ ID NO: 51968 - RNA, 19 nt, Artificial Sequence
  Description of Artificial Sequence: Synthetic oligonucleotide
ucaagcccgaauaucucag

SEQ ID NO: 51969 - RNA, 19 nt, Artificial Sequence
  Description of Artificial Sequence: Synthetic oligonucleotide
agggaaagcuaccagucag

SEQ ID NO: 51970 - RNA, 19 nt, Artificial Sequence
  Description of Artificial Sequence: Synthetic oligonucleotide
aguacaccgaagcgugugc

SEQ ID NO: 51971 - RNA, 19 nt, Artificial Sequence
  Description of Artificial Sequence: Synthetic oligonucleotide
uaacauacucucuaauaaa

SEQ ID NO: 51972 - RNA, 19 nt, Artificial Sequence
  Description of Artificial Sequence: Synthetic oligonucleotide
uuagccguuacaaggaauu

SEQ ID NO: 51973 - RNA, 19 nt, Artificial Sequence
  Description of Artificial Sequence: Synthetic oligonucleotide
caaauguuuaucugaugac

SEQ ID NO: 51974 - RNA, 19 nt, Artificial Sequence
  Description of Artificial Sequence: Synthetic oligonucleotide
uauguaucgugcagcaaac

SEQ ID NO: 51975 - RNA, 19 nt, Artificial Sequence
  Description of Artificial Sequence: Synthetic oligonucleotide
agcaugggguauuuaacag

SEQ ID NO: 51976 - RNA, 19 nt, Artificial Sequence
  Description of Artificial Sequence: Synthetic oligonucleotide
aguaaugaaauaggcaagu

SEQ ID NO: 51977 - RNA, 19 nt, Artificial Sequence
  Description of Artificial Sequence: Synthetic oligonucleotide
ugaaccucgugcuuucacc

SEQ ID NO: 51978 - RNA, 19 nt, Artificial Sequence
  Description of Artificial Sequence: Synthetic oligonucleotide
augacggucaguccccugg

SEQ ID NO: 51979 - RNA, 19 nt, Artificial Sequence
  Description of Artificial Sequence: Synthetic oligonucleotide
aucuauacagcgaaguuca

SEQ ID NO: 51980 - RNA, 19 nt, Artificial Sequence
  Description of Artificial Sequence: Synthetic oligonucleotide
ucugagacguauuucccac

SEQ ID NO: 51981 - RNA, 19 nt, Artificial Sequence
  Description of Artificial Sequence: Synthetic oligonucleotide
gaauacgauguugucaaug

SEQ ID NO: 51982 - RNA, 19 nt, Artificial Sequence
  Description of Artificial Sequence: Synthetic oligonucleotide
guaguacaacuccaggucc

SEQ ID NO: 51983 - RNA, 19 nt, Artificial Sequence
  Description of Artificial Sequence: Synthetic oligonucleotide
ugaaauaggcaagugcuuc

SEQ ID NO: 51984 - RNA, 19 nt, Artificial Sequence
  Description of Artificial Sequence: Synthetic oligonucleotide
ucaucgacauacauucuaa

SEQ ID NO: 51985 - RNA, 19 nt, Artificial Sequence
  Description of Artificial Sequence: Synthetic oligonucleotide
ugcacuuaaucauugugua

SEQ ID NO: 51986 - RNA, 19 nt, Artificial Sequence
  Description of Artificial Sequence: Synthetic oligonucleotide
guugagacgauguggccag

SEQ ID NO: 51987 - RNA, 19 nt, Artificial Sequence
  Description of Artificial Sequence: Synthetic oligonucleotide
uaucuuguuucacgcacca

SEQ ID NO: 51988 - RNA, 19 nt, Artificial Sequence
  Description of Artificial Sequence: Synthetic oligonucleotide
uguaucgugcagcaaacuu

SEQ ID NO: 51989 - RNA, 19 nt, Artificial Sequence
  Description of Artificial Sequence: Synthetic oligonucleotide
uaaaagaucuauugcugua

SEQ ID NO: 51990 - RNA, 19 nt, Artificial Sequence
  Description of Artificial Sequence: Synthetic oligonucleotide
gaaccucgugcuuucaccc

SEQ ID NO: 51991 - RNA, 19 nt, Artificial Sequence
  Description of Artificial Sequence: Synthetic oligonucleotide
cuuguuucacgcaccacug

SEQ ID NO: 51992 - RNA, 19 nt, Artificial Sequence
  Description of Artificial Sequence: Synthetic oligonucleotide
cuuagguggcaguuagccg

SEQ ID NO: 51993 - RNA, 19 nt, Artificial Sequence
  Description of Artificial Sequence: Synthetic oligonucleotide
uauacaccaggccuauccu

SEQ ID NO: 51994 - RNA, 19 nt, Artificial Sequence
  Description of Artificial Sequence: Synthetic oligonucleotide
uuaguaccugaucucgcca

SEQ ID NO: 51995 - RNA, 19 nt, Artificial Sequence
  Description of Artificial Sequence: Synthetic oligonucleotide
uguucccugauuacaugug

SEQ ID NO: 51996 - RNA, 19 nt, Artificial Sequence
  Description of Artificial Sequence: Synthetic oligonucleotide
gaagcgugugcuuugaacu

SEQ ID NO: 51997 - RNA, 19 nt, Artificial Sequence
  Description of Artificial Sequence: Synthetic oligonucleotide
ucgaacugcaugauuucac

SEQ ID NO: 51998 - RNA, 19 nt, Artificial Sequence
  Description of Artificial Sequence: Synthetic oligonucleotide
gagacgauguggccagugg

SEQ ID NO: 51999 - RNA, 19 nt, Artificial Sequence
  Description of Artificial Sequence: Synthetic oligonucleotide
ugugucuaccuuaccacaa

SEQ ID NO: 52000 - RNA, 19 nt, Artificial Sequence
  Description of Artificial Sequence: Synthetic oligonucleotide
auacaccaggccuauccuc

SEQ ID NO: 52001 - RNA, 19 nt, Artificial Sequence
  Description of Artificial Sequence: Synthetic oligonucleotide
aggccuauccucaagaaga

SEQ ID NO: 52002 - RNA, 19 nt, Artificial Sequence
  Description of Artificial Sequence: Synthetic oligonucleotide
aauacgucacaaauagcau

SEQ ID NO: 52003 - RNA, 19 nt, Artificial Sequence
  Description of Artificial Sequence: Synthetic oligonucleotide
auucuaaacaggauccuca

SEQ ID NO: 52004 - RNA, 19 nt, Artificial Sequence
  Description of Artificial Sequence: Synthetic oligonucleotide
cuauguaucgugcagcaaa

SEQ ID NO: 52005 - RNA, 19 nt, Artificial Sequence
  Description of Artificial Sequence: Synthetic oligonucleotide
ugcacgacugaacaugcau

SEQ ID NO: 52006 - RNA, 19 nt, Artificial Sequence
  Description of Artificial Sequence: Synthetic oligonucleotide
guagaauacgauguuguca

SEQ ID NO: 52007 - RNA, 19 nt, Artificial Sequence
  Description of Artificial Sequence: Synthetic oligonucleotide
acauccauagggcaaggaa

SEQ ID NO: 52008 - RNA, 19 nt, Artificial Sequence
  Description of Artificial Sequence: Synthetic oligonucleotide
ugacgcucagcuuugguua

SEQ ID NO: 52009 - RNA, 19 nt, Artificial Sequence
  Description of Artificial Sequence: Synthetic oligonucleotide
guaacuaacuuguaggcau

SEQ ID NO: 52010 - RNA, 19 nt, Artificial Sequence
  Description of Artificial Sequence: Synthetic oligonucleotide
auacgucacaaauagcaua

SEQ ID NO: 52011 - RNA, 19 nt, Artificial Sequence
  Description of Artificial Sequence: Synthetic oligonucleotide
auucgaaacacgauucuga

SEQ ID NO: 52012 - RNA, 19 nt, Artificial Sequence
  Description of Artificial Sequence: Synthetic oligonucleotide
guggucgucauccacucug

SEQ ID NO: 52013 - RNA, 19 nt, Artificial Sequence
  Description of Artificial Sequence: Synthetic oligonucleotide
caacggauacucugcagag

SEQ ID NO: 52014 - RNA, 19 nt, Artificial Sequence
  Description of Artificial Sequence: Synthetic oligonucleotide
aauugcagguuucguccca

SEQ ID NO: 52015 - RNA, 19 nt, Artificial Sequence
  Description of Artificial Sequence: Synthetic oligonucleotide
gagcaaggauuuucagacg

SEQ ID NO: 52016 - RNA, 19 nt, Artificial Sequence
  Description of Artificial Sequence: Synthetic oligonucleotide
aggagauucguccaugcuu

SEQ ID NO: 52017 - RNA, 19 nt, Artificial Sequence
  Description of Artificial Sequence: Synthetic oligonucleotide
uguagauggguagaauguc

SEQ ID NO: 52018 - RNA, 19 nt, Artificial Sequence
  Description of Artificial Sequence: Synthetic oligonucleotide
uaccugaucucgccaacug

SEQ ID NO: 52019 - RNA, 19 nt, Artificial Sequence
  Description of Artificial Sequence: Synthetic oligonucleotide
ugcauauggagcucccuuc

SEQ ID NO: 52020 - RNA, 19 nt, Artificial Sequence
  Description of Artificial Sequence: Synthetic oligonucleotide
gguagaauccagccguucc

SEQ ID NO: 52021 - RNA, 19 nt, Artificial Sequence
  Description of Artificial Sequence: Synthetic oligonucleotide
uccgucucgauguggauau

SEQ ID NO: 52022 - RNA, 19 nt, Artificial Sequence
  Description of Artificial Sequence: Synthetic oligonucleotide
ucuaaacaggauccucaaa

SEQ ID NO: 52023 - RNA, 19 nt, Artificial Sequence
  Description of Artificial Sequence: Synthetic oligonucleotide
cuaagcaauuaguaccuga

SEQ ID NO: 52024 - RNA, 19 nt, Artificial Sequence
  Description of Artificial Sequence: Synthetic oligonucleotide
cacucuauguaucgugcag

SEQ ID NO: 52025 - RNA, 19 nt, Artificial Sequence
  Description of Artificial Sequence: Synthetic oligonucleotide
cugauagcugaggucaugc

SEQ ID NO: 52026 - RNA, 19 nt, Artificial Sequence
  Description of Artificial Sequence: Synthetic oligonucleotide
cgacauacauucuaaacag

SEQ ID NO: 52027 - RNA, 19 nt, Artificial Sequence
  Description of Artificial Sequence: Synthetic oligonucleotide
uguccggugggcucaagcu

SEQ ID NO: 52028 - RNA, 19 nt, Artificial Sequence
  Description of Artificial Sequence: Synthetic oligonucleotide
uauaccgaauggcuuguuu

SEQ ID NO: 52029 - RNA, 19 nt, Artificial Sequence
  Description of Artificial Sequence: Synthetic oligonucleotide
uuguuucacgcaccacugc

SEQ ID NO: 52030 - RNA, 19 nt, Artificial Sequence
  Description of Artificial Sequence: Synthetic oligonucleotide
uggcccaacggauacucug

SEQ ID NO: 52031 - RNA, 19 nt, Artificial Sequence
  Description of Artificial Sequence: Synthetic oligonucleotide
agcuuaggcaggaugcacg

SEQ ID NO: 52032 - RNA, 19 nt, Artificial Sequence
  Description of Artificial Sequence: Synthetic oligonucleotide
caucuagugugucuugcug

SEQ ID NO: 52033 - RNA, 19 nt, Artificial Sequence
  Description of Artificial Sequence: Synthetic oligonucleotide
uuuauaccgaauggcuugu

SEQ ID NO: 52034 - RNA, 19 nt, Artificial Sequence
  Description of Artificial Sequence: Synthetic oligonucleotide
ugcagguuucgucccaaac

SEQ ID NO: 52035 - RNA, 19 nt, Artificial Sequence
  Description of Artificial Sequence: Synthetic oligonucleotide
caauugcagguuucguccc

SEQ ID NO: 52036 - RNA, 19 nt, Artificial Sequence
  Description of Artificial Sequence: Synthetic oligonucleotide
ucgaaacacgauucugaac

SEQ ID NO: 52037 - RNA, 19 nt, Artificial Sequence
  Description of Artificial Sequence: Synthetic oligonucleotide
agaacugggugaauacguc

SEQ ID NO: 52038 - RNA, 19 nt, Artificial Sequence
  Description of Artificial Sequence: Synthetic oligonucleotide
cacgaaucuauacagcgaa

SEQ ID NO: 52039 - RNA, 19 nt, Artificial Sequence
  Description of Artificial Sequence: Synthetic oligonucleotide
aaauuacccugaaugguuu

SEQ ID NO: 52040 - RNA, 19 nt, Artificial Sequence
  Description of Artificial Sequence: Synthetic oligonucleotide
auacauuugaugagugcca

SEQ ID NO: 52041 - RNA, 19 nt, Artificial Sequence
  Description of Artificial Sequence: Synthetic oligonucleotide
uaguacaccgaagcgugug

SEQ ID NO: 52042 - RNA, 19 nt, Artificial Sequence
  Description of Artificial Sequence: Synthetic oligonucleotide
gugucuaccuuaccacaag

SEQ ID NO: 52043 - RNA, 19 nt, Artificial Sequence
  Description of Artificial Sequence: Synthetic oligonucleotide
ugaugcaaauaugcaagau

SEQ ID NO: 52044 - RNA, 19 nt, Artificial Sequence
  Description of Artificial Sequence: Synthetic oligonucleotide
ugauagcugaggucaugcu

SEQ ID NO: 52045 - RNA, 19 nt, Artificial Sequence
  Description of Artificial Sequence: Synthetic oligonucleotide
augacgcucagcuuugguu

SEQ ID NO: 52046 - RNA, 19 nt, Artificial Sequence
  Description of Artificial Sequence: Synthetic oligonucleotide
caggaugcacgacugaaca

SEQ ID NO: 52047 - RNA, 19 nt, Artificial Sequence
  Description of Artificial Sequence: Synthetic oligonucleotide
acacucuauguaucgugca

SEQ ID NO: 52048 - RNA, 19 nt, Artificial Sequence
  Description of Artificial Sequence: Synthetic oligonucleotide
caggccuauccucaagaag

SEQ ID NO: 52049 - RNA, 19 nt, Artificial Sequence
  Description of Artificial Sequence: Synthetic oligonucleotide
gccaugagaaagaauagac

SEQ ID NO: 52050 - RNA, 19 nt, Artificial Sequence
  Description of Artificial Sequence: Synthetic oligonucleotide
gcccgaauaucucagcaag

SEQ ID NO: 52051 - RNA, 19 nt, Artificial Sequence
  Description of Artificial Sequence: Synthetic oligonucleotide
caaguagggguaguacacc

SEQ ID NO: 52052 - RNA, 19 nt, Artificial Sequence
  Description of Artificial Sequence: Synthetic oligonucleotide
uacauuugaugagugccau

SEQ ID NO: 52053 - RNA, 19 nt, Artificial Sequence
  Description of Artificial Sequence: Synthetic oligonucleotide
aaccucgugcuuucaccca

SEQ ID NO: 52054 - RNA, 19 nt, Artificial Sequence
  Description of Artificial Sequence: Synthetic oligonucleotide
cucuauguaucgugcagca

SEQ ID NO: 52055 - RNA, 19 nt, Artificial Sequence
  Description of Artificial Sequence: Synthetic oligonucleotide
uaacuaacuuguaggcauu

SEQ ID NO: 52056 - RNA, 19 nt, Artificial Sequence
  Description of Artificial Sequence: Synthetic oligonucleotide
uugaacuuuucgucauuua

SEQ ID NO: 52057 - RNA, 19 nt, Artificial Sequence
  Description of Artificial Sequence: Synthetic oligonucleotide
gguaugcaaugguuuaaug

SEQ ID NO: 52058 - RNA, 19 nt, Artificial Sequence
  Description of Artificial Sequence: Synthetic oligonucleotide
gggguaguacaccgaagcg

SEQ ID NO: 52059 - RNA, 19 nt, Artificial Sequence
  Description of Artificial Sequence: Synthetic oligonucleotide
gauucuccgucucgaugug

SEQ ID NO: 52060 - RNA, 19 nt, Artificial Sequence
  Description of Artificial Sequence: Synthetic oligonucleotide
caguuagccguuacaagga

SEQ ID NO: 52061 - RNA, 19 nt, Artificial Sequence
  Description of Artificial Sequence: Synthetic oligonucleotide
gcaauuaguaccugaucuc

SEQ ID NO: 52062 - RNA, 19 nt, Artificial Sequence
  Description of Artificial Sequence: Synthetic oligonucleotide
uuucuccgacuguugcuca

SEQ ID NO: 52063 - RNA, 19 nt, Artificial Sequence
  Description of Artificial Sequence: Synthetic oligonucleotide
gguuucgucccaaacagca

SEQ ID NO: 52064 - RNA, 19 nt, Artificial Sequence
  Description of Artificial Sequence: Synthetic oligonucleotide
guuucacgcaccacugcag

SEQ ID NO: 52065 - RNA, 19 nt, Artificial Sequence
  Description of Artificial Sequence: Synthetic oligonucleotide
ucgcuuguguacucuugca

SEQ ID NO: 52066 - RNA, 19 nt, Artificial Sequence
  Description of Artificial Sequence: Synthetic oligonucleotide
ucguagaacugggugaaua

SEQ ID NO: 52067 - RNA, 19 nt, Artificial Sequence
  Description of Artificial Sequence: Synthetic oligonucleotide
uggucgucauccacucuga

SEQ ID NO: 52068 - RNA, 19 nt, Artificial Sequence
  Description of Artificial Sequence: Synthetic oligonucleotide
aguuagccguuacaaggaa

SEQ ID NO: 52069 - RNA, 19 nt, Artificial Sequence
  Description of Artificial Sequence: Synthetic oligonucleotide
gucaccuacuggaggaaag

SEQ ID NO: 52070 - RNA, 19 nt, Artificial Sequence
  Description of Artificial Sequence: Synthetic oligonucleotide
aggucgaacugcaugauuu

SEQ ID NO: 52071 - RNA, 19 nt, Artificial Sequence
  Description of Artificial Sequence: Synthetic oligonucleotide
cugcuauccaggucugaac

SEQ ID NO: 52072 - RNA, 19 nt, Artificial Sequence
  Description of Artificial Sequence: Synthetic oligonucleotide
acuuguacaugcccugauu

SEQ ID NO: 52073 - RNA, 19 nt, Artificial Sequence
  Description of Artificial Sequence: Synthetic oligonucleotide
ggcaguuagccguuacaag

SEQ ID NO: 52074 - RNA, 19 nt, Artificial Sequence
  Description of Artificial Sequence: Synthetic oligonucleotide
uuaugacgcucagcuuugg

SEQ ID NO: 52075 - RNA, 19 nt, Artificial Sequence
  Description of Artificial Sequence: Synthetic oligonucleotide
gguuauuuugcuucccaaa

SEQ ID NO: 52076 - RNA, 19 nt, Artificial Sequence
  Description of Artificial Sequence: Synthetic oligonucleotide
guagggguaguacaccgaa

SEQ ID NO: 52077 - RNA, 19 nt, Artificial Sequence
  Description of Artificial Sequence: Synthetic oligonucleotide
cuuaccacaaggguggugu

SEQ ID NO: 52078 - RNA, 19 nt, Artificial Sequence
  Description of Artificial Sequence: Synthetic oligonucleotide
gucagggaaagcggcauug

SEQ ID NO: 52079 - RNA, 19 nt, Artificial Sequence
  Description of Artificial Sequence: Synthetic oligonucleotide
ugagugccauuuucugaga

SEQ ID NO: 52080 - RNA, 19 nt, Artificial Sequence
  Description of Artificial Sequence: Synthetic oligonucleotide
gagauucguccaugcuucc

SEQ ID NO: 52081 - RNA, 19 nt, Artificial Sequence
  Description of Artificial Sequence: Synthetic oligonucleotide
ugaccgugggagccagugc

SEQ ID NO: 52082 - RNA, 19 nt, Artificial Sequence
  Description of Artificial Sequence: Synthetic oligonucleotide
cuguaucaacuccagcuga

SEQ ID NO: 52083 - RNA, 19 nt, Artificial Sequence
  Description of Artificial Sequence: Synthetic oligonucleotide
guacucuugcaguacccga

SEQ ID NO: 52084 - RNA, 19 nt, Artificial Sequence
  Description of Artificial Sequence: Synthetic oligonucleotide
cacauuauacugguaugca

SEQ ID NO: 52085 - RNA, 19 nt, Artificial Sequence
  Description of Artificial Sequence: Synthetic oligonucleotide
gcauauggagcucccuucc

SEQ ID NO: 52086 - RNA, 19 nt, Artificial Sequence
  Description of Artificial Sequence: Synthetic oligonucleotide
cacauaggcauacauuacu

SEQ ID NO: 52087 - RNA, 19 nt, Artificial Sequence
  Description of Artificial Sequence: Synthetic oligonucleotide
cucuuagguggcaguuagc

SEQ ID NO: 52088 - RNA, 19 nt, Artificial Sequence
  Description of Artificial Sequence: Synthetic oligonucleotide
cauccauagggcaaggaau

SEQ ID NO: 52089 - RNA, 19 nt, Artificial Sequence
  Description of Artificial Sequence: Synthetic oligonucleotide
acacgaaucuauacagcga

SEQ ID NO: 52090 - RNA, 19 nt, Artificial Sequence
  Description of Artificial Sequence: Synthetic oligonucleotide
ugacggucaguccccuggu

SEQ ID NO: 52091 - RNA, 19 nt, Artificial Sequence
  Description of Artificial Sequence: Synthetic oligonucleotide
cuacuuaaggacuggcggu

SEQ ID NO: 52092 - RNA, 19 nt, Artificial Sequence
  Description of Artificial Sequence: Synthetic oligonucleotide
agcuaccagucagggacac

SEQ ID NO: 52093 - RNA, 19 nt, Artificial Sequence
  Description of Artificial Sequence: Synthetic oligonucleotide
cuaacuugcaucugcuaau

SEQ ID NO: 52094 - RNA, 19 nt, Artificial Sequence
  Description of Artificial Sequence: Synthetic oligonucleotide
uacauccauagggcaagga

SEQ ID NO: 52095 - RNA, 19 nt, Artificial Sequence
  Description of Artificial Sequence: Synthetic oligonucleotide
ucuauguaucgugcagcaa

SEQ ID NO: 52096 - RNA, 19 nt, Artificial Sequence
  Description of Artificial Sequence: Synthetic oligonucleotide
acgaaucuauacagcgaag

SEQ ID NO: 52097 - RNA, 19 nt, Artificial Sequence
  Description of Artificial Sequence: Synthetic oligonucleotide
gggcucaagcuacauuugc

SEQ ID NO: 52098 - RNA, 19 nt, Artificial Sequence
  Description of Artificial Sequence: Synthetic oligonucleotide
guuugagaagauuggguuu

SEQ ID NO: 52099 - RNA, 19 nt, Artificial Sequence
  Description of Artificial Sequence: Synthetic oligonucleotide
guguccggugggcucaagc

SEQ ID NO: 52100 - RNA, 19 nt, Artificial Sequence
  Description of Artificial Sequence: Synthetic oligonucleotide
gguugagacgauguggcca

SEQ ID NO: 52101 - RNA, 19 nt, Artificial Sequence
  Description of Artificial Sequence: Synthetic oligonucleotide
ggcucaagcuacauuugcc

SEQ ID NO: 52102 - RNA, 19 nt, Artificial Sequence
  Description of Artificial Sequence: Synthetic oligonucleotide
uccgacuguugcucaggga

SEQ ID NO: 52103 - RNA, 19 nt, Artificial Sequence
  Description of Artificial Sequence: Synthetic oligonucleotide
gagacguauuucccacaga

SEQ ID NO: 52104 - RNA, 19 nt, Artificial Sequence
  Description of Artificial Sequence: Synthetic oligonucleotide
caaccaacacuuaaagcau

SEQ ID NO: 52105 - RNA, 19 nt, Artificial Sequence
  Description of Artificial Sequence: Synthetic oligonucleotide
gaccacugauagcugaggu

SEQ ID NO: 52106 - RNA, 19 nt, Artificial Sequence
  Description of Artificial Sequence: Synthetic oligonucleotide
ucgugcuuucacccagaaa

SEQ ID NO: 52107 - RNA, 19 nt, Artificial Sequence
  Description of Artificial Sequence: Synthetic oligonucleotide
agaauacgauguugucaau

SEQ ID NO: 52108 - RNA, 19 nt, Artificial Sequence
  Description of Artificial Sequence: Synthetic oligonucleotide
augaaauaggcaagugcuu

SEQ ID NO: 52109 - RNA, 19 nt, Artificial Sequence
  Description of Artificial Sequence: Synthetic oligonucleotide
acauuugaugagugccauu

SEQ ID NO: 52110 - RNA, 19 nt, Artificial Sequence
  Description of Artificial Sequence: Synthetic oligonucleotide
agccguuacaaggaauuua

SEQ ID NO: 52111 - RNA, 19 nt, Artificial Sequence
  Description of Artificial Sequence: Synthetic oligonucleotide
cagugcgugauugcaggug

SEQ ID NO: 52112 - RNA, 19 nt, Artificial Sequence
  Description of Artificial Sequence: Synthetic oligonucleotide
gaacuuccgaagaacugcu

SEQ ID NO: 52113 - RNA, 19 nt, Artificial Sequence
  Description of Artificial Sequence: Synthetic oligonucleotide
uacaccgaagcgugugcuu

SEQ ID NO: 52114 - RNA, 19 nt, Artificial Sequence
  Description of Artificial Sequence: Synthetic oligonucleotide
ugcgugauugcaggugguc

SEQ ID NO: 52115 - RNA, 19 nt, Artificial Sequence
  Description of Artificial Sequence: Synthetic oligonucleotide
ggcguuucugucuaugcua

SEQ ID NO: 52116 - RNA, 19 nt, Artificial Sequence
  Description of Artificial Sequence: Synthetic oligonucleotide
aguagggguaguacaccga

SEQ ID NO: 52117 - RNA, 19 nt, Artificial Sequence
  Description of Artificial Sequence: Synthetic oligonucleotide
cuuaaggacuggcggucca

SEQ ID NO: 52118 - RNA, 19 nt, Artificial Sequence
  Description of Artificial Sequence: Synthetic oligonucleotide
auguaucgugcagcaaacu

SEQ ID NO: 52119 - RNA, 19 nt, Artificial Sequence
  Description of Artificial Sequence: Synthetic oligonucleotide
gcacgacugaacaugcaug

SEQ ID NO: 52120 - RNA, 19 nt, Artificial Sequence
  Description of Artificial Sequence: Synthetic oligonucleotide
augcaauugcagguuucgu

SEQ ID NO: 52121 - RNA, 19 nt, Artificial Sequence
  Description of Artificial Sequence: Synthetic oligonucleotide
caaauagcauacagugcgu

SEQ ID NO: 52122 - RNA, 19 nt, Artificial Sequence
  Description of Artificial Sequence: Synthetic oligonucleotide
gcaaacuccgacaagcacu

SEQ ID NO: 52123 - RNA, 19 nt, Artificial Sequence
  Description of Artificial Sequence: Synthetic oligonucleotide
caccgaagcgugugcuuug

SEQ ID NO: 52124 - RNA, 19 nt, Artificial Sequence
  Description of Artificial Sequence: Synthetic oligonucleotide
acgacugaacaugcaugca

SEQ ID NO: 52125 - RNA, 19 nt, Artificial Sequence
  Description of Artificial Sequence: Synthetic oligonucleotide
cugagacguauuucccaca

SEQ ID NO: 52126 - RNA, 19 nt, Artificial Sequence
  Description of Artificial Sequence: Synthetic oligonucleotide
acaccgaagcgugugcuuu

SEQ ID NO: 52127 - RNA, 19 nt, Artificial Sequence
  Description of Artificial Sequence: Synthetic oligonucleotide
cuuaggcaggaugcacgac

SEQ ID NO: 52128 - RNA, 19 nt, Artificial Sequence
  Description of Artificial Sequence: Synthetic oligonucleotide
cgaagcgugugcuuugaac

SEQ ID NO: 52129 - RNA, 19 nt, Artificial Sequence
  Description of Artificial Sequence: Synthetic oligonucleotide
ugauggcccaacggauacu

SEQ ID NO: 52130 - RNA, 19 nt, Artificial Sequence
  Description of Artificial Sequence: Synthetic oligonucleotide
caugacggucaguccccug

SEQ ID NO: 52131 - RNA, 19 nt, Artificial Sequence
  Description of Artificial Sequence: Synthetic oligonucleotide
gcguuucugucuaugcuac

SEQ ID NO: 52132 - RNA, 19 nt, Artificial Sequence
  Description of Artificial Sequence: Synthetic oligonucleotide
uagccguuacaaggaauuu

SEQ ID NO: 52133 - RNA, 19 nt, Artificial Sequence
  Description of Artificial Sequence: Synthetic oligonucleotide
cucaagcuacauuugccau

SEQ ID NO: 52134 - RNA, 19 nt, Artificial Sequence
  Description of Artificial Sequence: Synthetic oligonucleotide
acgucacaaauagcauaca

SEQ ID NO: 52135 - RNA, 19 nt, Artificial Sequence
  Description of Artificial Sequence: Synthetic oligonucleotide
ggcccaacggauacucugc

SEQ ID NO: 52136 - RNA, 19 nt, Artificial Sequence
  Description of Artificial Sequence: Synthetic oligonucleotide
agcgugugcuuugaacuuu

SEQ ID NO: 52137 - RNA, 19 nt, Artificial Sequence
  Description of Artificial Sequence: Synthetic oligonucleotide
acaccaggccuauccucaa

SEQ ID NO: 52138 - RNA, 19 nt, Artificial Sequence
  Description of Artificial Sequence: Synthetic oligonucleotide
uuauaccgaauggcuuguu

SEQ ID NO: 52139 - RNA, 19 nt, Artificial Sequence
  Description of Artificial Sequence: Synthetic oligonucleotide
cuuauacaccaggccuauc

SEQ ID NO: 52140 - RNA, 19 nt, Artificial Sequence
  Description of Artificial Sequence: Synthetic oligonucleotide
accgaagcgugugcuuuga

SEQ ID NO: 52141 - RNA, 19 nt, Artificial Sequence
  Description of Artificial Sequence: Synthetic oligonucleotide
cacuaguaacuaacuugua

SEQ ID NO: 52142 - RNA, 19 nt, Artificial Sequence
  Description of Artificial Sequence: Synthetic oligonucleotide
cagcugugucuaccuuacc

SEQ ID NO: 52143 - RNA, 19 nt, Artificial Sequence
  Description of Artificial Sequence: Synthetic oligonucleotide
cuggugcgcacaucuaacu

SEQ ID NO: 52144 - RNA, 19 nt, Artificial Sequence
  Description of Artificial Sequence: Synthetic oligonucleotide
cgacaagcacuucacagca

SEQ ID NO: 52145 - RNA, 19 nt, Artificial Sequence
  Description of Artificial Sequence: Synthetic oligonucleotide
gagaacgaaugggacuccu

SEQ ID NO: 52146 - RNA, 19 nt, Artificial Sequence
  Description of Artificial Sequence: Synthetic oligonucleotide
acaacacauuauacuggua

SEQ ID NO: 52147 - RNA, 19 nt, Artificial Sequence
  Description of Artificial Sequence: Synthetic oligonucleotide
ggguaguacaccgaagcgu

SEQ ID NO: 52148 - RNA, 19 nt, Artificial Sequence
  Description of Artificial Sequence: Synthetic oligonucleotide
guccggugggcucaagcua

SEQ ID NO: 52149 - RNA, 19 nt, Artificial Sequence
  Description of Artificial Sequence: Synthetic oligonucleotide
gucgucauccacucugauu

SEQ ID NO: 52150 - RNA, 19 nt, Artificial Sequence
  Description of Artificial Sequence: Synthetic oligonucleotide
ggagaacgaaugggacucc

SEQ ID NO: 52151 - RNA, 19 nt, Artificial Sequence
  Description of Artificial Sequence: Synthetic oligonucleotide
gccguuacaaggaauuuau

SEQ ID NO: 52152 - RNA, 19 nt, Artificial Sequence
  Description of Artificial Sequence: Synthetic oligonucleotide
guuagccguuacaaggaau

SEQ ID NO: 52153 - RNA, 19 nt, Artificial Sequence
  Description of Artificial Sequence: Synthetic oligonucleotide
ccgaauaucucagcaagua

SEQ ID NO: 52154 - RNA, 19 nt, Artificial Sequence
  Description of Artificial Sequence: Synthetic oligonucleotide
augcacgacugaacaugca

SEQ ID NO: 52155 - RNA, 19 nt, Artificial Sequence
  Description of Artificial Sequence: Synthetic oligonucleotide
guacaccgaagcgugugcu

SEQ ID NO: 52156 - RNA, 19 nt, Artificial Sequence
  Description of Artificial Sequence: Synthetic oligonucleotide
uugagacgauguggccagu

SEQ ID NO: 52157 - RNA, 19 nt, Artificial Sequence
  Description of Artificial Sequence: Synthetic oligonucleotide
gcacuuaaucauuguguau

SEQ ID NO: 52158 - RNA, 19 nt, Artificial Sequence
  Description of Artificial Sequence: Synthetic oligonucleotide
gacacacucccugcccugu

SEQ ID NO: 52159 - RNA, 19 nt, Artificial Sequence
  Description of Artificial Sequence: Synthetic oligonucleotide
auggcccaacggauacucu

SEQ ID NO: 52160 - RNA, 19 nt, Artificial Sequence
  Description of Artificial Sequence: Synthetic oligonucleotide
accuuaccacaaggguggu

SEQ ID NO: 52161 - RNA, 19 nt, Artificial Sequence
  Description of Artificial Sequence: Synthetic oligonucleotide
gcccaacggauacucugca

SEQ ID NO: 52162 - RNA, 19 nt, Artificial Sequence
  Description of Artificial Sequence: Synthetic oligonucleotide
gugcuaccaugccgaugac

SEQ ID NO: 52163 - RNA, 19 nt, Artificial Sequence
  Description of Artificial Sequence: Synthetic oligonucleotide
ggccuauccucaagaagaa

SEQ ID NO: 52164 - RNA, 19 nt, Artificial Sequence
  Description of Artificial Sequence: Synthetic oligonucleotide
cugaugacucuuccuccau

SEQ ID NO: 52165 - RNA, 19 nt, Artificial Sequence
  Description of Artificial Sequence: Synthetic oligonucleotide
guaguacaccgaagcgugu

SEQ ID NO: 52166 - RNA, 19 nt, Artificial Sequence
  Description of Artificial Sequence: Synthetic oligonucleotide
gcgcacaucuaacuugcau

SEQ ID NO: 52167 - RNA, 19 nt, Artificial Sequence
  Description of Artificial Sequence: Synthetic oligonucleotide
gggacuccuguaggcaguc

SEQ ID NO: 52168 - RNA, 19 nt, Artificial Sequence
  Description of Artificial Sequence: Synthetic oligonucleotide
cccugcggucuucaucgac

SEQ ID NO: 52169 - RNA, 19 nt, Artificial Sequence
  Description of Artificial Sequence: Synthetic oligonucleotide
cuaccaugccgaugacaau

SEQ ID NO: 52170 - RNA, 19 nt, Artificial Sequence
  Description of Artificial Sequence: Synthetic oligonucleotide
ccuuaccacaaggguggug

SEQ ID NO: 52171 - RNA, 19 nt, Artificial Sequence
  Description of Artificial Sequence: Synthetic oligonucleotide
cugcccuguaaagggcaaa

SEQ ID NO: 52172 - RNA, 19 nt, Artificial Sequence
  Description of Artificial Sequence: Synthetic oligonucleotide
caggucgaacugcaugauu

SEQ ID NO: 52173 - RNA, 19 nt, Artificial Sequence
  Description of Artificial Sequence: Synthetic oligonucleotide
cgugauugcagguggucgu

SEQ ID NO: 52174 - RNA, 19 nt, Artificial Sequence
  Description of Artificial Sequence: Synthetic oligonucleotide
cgacugaacaugcaugcau

SEQ ID NO: 52175 - RNA, 19 nt, Artificial Sequence
  Description of Artificial Sequence: Synthetic oligonucleotide
gugcgugauugcagguggu

SEQ ID NO: 52176 - RNA, 19 nt, Artificial Sequence
  Description of Artificial Sequence: Synthetic oligonucleotide
gcggcauugcaggcaaacu

SEQ ID NO: 52177 - RNA, 19 nt, Artificial Sequence
  Description of Artificial Sequence: Synthetic oligonucleotide
gguguccggugggcucaag

SEQ ID NO: 52178 - RNA, 19 nt, Artificial Sequence
  Description of Artificial Sequence: Synthetic oligonucleotide
ccguuacaaggaauuuauu

SEQ ID NO: 52179 - RNA, 19 nt, Artificial Sequence
  Description of Artificial Sequence: Synthetic oligonucleotide
ccgaagcgugugcuuugaa

SEQ ID NO: 52180 - RNA, 19 nt, Artificial Sequence
  Description of Artificial Sequence: Synthetic oligonucleotide
ccgucucgauguggauauc

SEQ ID NO: 52181 - RNA, 19 nt, Artificial Sequence
  Description of Artificial Sequence: Synthetic oligonucleotide
ccccuugguuacacucuau

SEQ ID NO: 52182 - RNA, 19 nt, Artificial Sequence
  Description of Artificial Sequence: Synthetic oligonucleotide
uuagcuaugguauaaauaa

SEQ ID NO: 52183 - RNA, 19 nt, Artificial Sequence
  Description of Artificial Sequence: Synthetic oligonucleotide
acuaucauaaucaucaggg

SEQ ID NO: 52184 - RNA, 19 nt, Artificial Sequence
  Description of Artificial Sequence: Synthetic oligonucleotide
uuaacauuagcuaugguau

SEQ ID NO: 52185 - RNA, 19 nt, Artificial Sequence
  Description of Artificial Sequence: Synthetic oligonucleotide
aaauaaugcuauugcuucc

SEQ ID NO: 52186 - RNA, 19 nt, Artificial Sequence
  Description of Artificial Sequence: Synthetic oligonucleotide
ucaauagaagaccucacag

SEQ ID NO: 52187 - RNA, 19 nt, Artificial Sequence
  Description of Artificial Sequence: Synthetic oligonucleotide
aguaccgugggucagaguc

SEQ ID NO: 52188 - RNA, 19 nt, Artificial Sequence
  Description of Artificial Sequence: Synthetic oligonucleotide
gauucaagugucuagaaca

SEQ ID NO: 52189 - RNA, 19 nt, Artificial Sequence
  Description of Artificial Sequence: Synthetic oligonucleotide
aaguaugacagcauguuac

SEQ ID NO: 52190 - RNA, 19 nt, Artificial Sequence
  Description of Artificial Sequence: Synthetic oligonucleotide
uaaaauucugagauguacc

SEQ ID NO: 52191 - RNA, 19 nt, Artificial Sequence
  Description of Artificial Sequence: Synthetic oligonucleotide
auaguugagguacaguuuc

SEQ ID NO: 52192 - RNA, 19 nt, Artificial Sequence
  Description of Artificial Sequence: Synthetic oligonucleotide
uuuaaagagcgucuuaaga

SEQ ID NO: 52193 - RNA, 19 nt, Artificial Sequence
  Description of Artificial Sequence: Synthetic oligonucleotide
uuaacugcuucguacaugc

SEQ ID NO: 52194 - RNA, 19 nt, Artificial Sequence
  Description of Artificial Sequence: Synthetic oligonucleotide
uguagcaggacuuuauaag

SEQ ID NO: 52195 - RNA, 19 nt, Artificial Sequence
  Description of Artificial Sequence: Synthetic oligonucleotide
uuaaagagcgucuuaagaa

SEQ ID NO: 52196 - RNA, 19 nt, Artificial Sequence
  Description of Artificial Sequence: Synthetic oligonucleotide
ugaacgauuuugcugaaug

SEQ ID NO: 52197 - RNA, 19 nt, Artificial Sequence
  Description of Artificial Sequence: Synthetic oligonucleotide
aguaugacagcauguuacc

SEQ ID NO: 52198 - RNA, 19 nt, Artificial Sequence
  Description of Artificial Sequence: Synthetic oligonucleotide
aaugugacacaucccacag

SEQ ID NO: 52199 - RNA, 19 nt, Artificial Sequence
  Description of Artificial Sequence: Synthetic oligonucleotide
ucauaggugucgaagaaug

SEQ ID NO: 52200 - RNA, 19 nt, Artificial Sequence
  Description of Artificial Sequence: Synthetic oligonucleotide
uuaucugagggucagagua

SEQ ID NO: 52201 - RNA, 19 nt, Artificial Sequence
  Description of Artificial Sequence: Synthetic oligonucleotide
gagcguaugguacugaugc

SEQ ID NO: 52202 - RNA, 19 nt, Artificial Sequence
  Description of Artificial Sequence: Synthetic oligonucleotide
ucuuaaggcauccucacac

SEQ ID NO: 52203 - RNA, 19 nt, Artificial Sequence
  Description of Artificial Sequence: Synthetic oligonucleotide
ugacacaucccacaggaag

SEQ ID NO: 52204 - RNA, 19 nt, Artificial Sequence
  Description of Artificial Sequence: Synthetic oligonucleotide
uaugcaauccaaacagucc

SEQ ID NO: 52205 - RNA, 19 nt, Artificial Sequence
  Description of Artificial Sequence: Synthetic oligonucleotide
uuuaacggugucagaaagg

SEQ ID NO: 52206 - RNA, 19 nt, Artificial Sequence
  Description of Artificial Sequence: Synthetic oligonucleotide
guuaggaucuaauuuacac

SEQ ID NO: 52207 - RNA, 19 nt, Artificial Sequence
  Description of Artificial Sequence: Synthetic oligonucleotide
ugagacguugucagaaugg

SEQ ID NO: 52208 - RNA, 19 nt, Artificial Sequence
  Description of Artificial Sequence: Synthetic oligonucleotide
ucaggggcuauacaaauug

SEQ ID NO: 52209 - RNA, 19 nt, Artificial Sequence
  Description of Artificial Sequence: Synthetic oligonucleotide
acgccagugagucaugucc

SEQ ID NO: 52210 - RNA, 19 nt, Artificial Sequence
  Description of Artificial Sequence: Synthetic oligonucleotide
uaacauagugcucauggcu

SEQ ID NO: 52211 - RNA, 19 nt, Artificial Sequence
  Description of Artificial Sequence: Synthetic oligonucleotide
ucggagauuauaauucuug

SEQ ID NO: 52212 - RNA, 19 nt, Artificial Sequence
  Description of Artificial Sequence: Synthetic oligonucleotide
aauaccaaucagaggaagg

SEQ ID NO: 52213 - RNA, 19 nt, Artificial Sequence
  Description of Artificial Sequence: Synthetic oligonucleotide
ugauaauaccaaucagagg

SEQ ID NO: 52214 - RNA, 19 nt, Artificial Sequence
  Description of Artificial Sequence: Synthetic oligonucleotide
uuaggaucuaauuuacacu

SEQ ID NO: 52215 - RNA, 19 nt, Artificial Sequence
  Description of Artificial Sequence: Synthetic oligonucleotide
gauguacccaccaaagagg

SEQ ID NO: 52216 - RNA, 19 nt, Artificial Sequence
  Description of Artificial Sequence: Synthetic oligonucleotide
aaguuuaccauggauggug

SEQ ID NO: 52217 - RNA, 19 nt, Artificial Sequence
  Description of Artificial Sequence: Synthetic oligonucleotide
cucgauucugcugagaagg

SEQ ID NO: 52218 - RNA, 19 nt, Artificial Sequence
  Description of Artificial Sequence: Synthetic oligonucleotide
uaauguaaggaaaggcgug

SEQ ID NO: 52219 - RNA, 19 nt, Artificial Sequence
  Description of Artificial Sequence: Synthetic oligonucleotide
aguaaaguacuuuccggag

SEQ ID NO: 52220 - RNA, 19 nt, Artificial Sequence
  Description of Artificial Sequence: Synthetic oligonucleotide
uucaauagaagaccucaca

SEQ ID NO: 52221 - RNA, 19 nt, Artificial Sequence
  Description of Artificial Sequence: Synthetic oligonucleotide
agugucuagaacaaguguc

SEQ ID NO: 52222 - RNA, 19 nt, Artificial Sequence
  Description of Artificial Sequence: Synthetic oligonucleotide
aagugucuauuuuagaguu

SEQ ID NO: 52223 - RNA, 19 nt, Artificial Sequence
  Description of Artificial Sequence: Synthetic oligonucleotide
uuaagauuaucucuucuuu

SEQ ID NO: 52224 - RNA, 19 nt, Artificial Sequence
  Description of Artificial Sequence: Synthetic oligonucleotide
auggcuacagaugauucgc

SEQ ID NO: 52225 - RNA, 19 nt, Artificial Sequence
  Description of Artificial Sequence: Synthetic oligonucleotide
agaucuaacagacgguuca

SEQ ID NO: 52226 - RNA, 19 nt, Artificial Sequence
  Description of Artificial Sequence: Synthetic oligonucleotide
uucacauauuuaauaguac

SEQ ID NO: 52227 - RNA, 19 nt, Artificial Sequence
  Description of Artificial Sequence: Synthetic oligonucleotide
uuaacggugucagaaagga

SEQ ID NO: 52228 - RNA, 19 nt, Artificial Sequence
  Description of Artificial Sequence: Synthetic oligonucleotide
uuugaaucauuaaaacuuu

SEQ ID NO: 52229 - RNA, 19 nt, Artificial Sequence
  Description of Artificial Sequence: Synthetic oligonucleotide
aacgauuuugcugaaugcu

SEQ ID NO: 52230 - RNA, 19 nt, Artificial Sequence
  Description of Artificial Sequence: Synthetic oligonucleotide
gacaacucaaacauauuug

SEQ ID NO: 52231 - RNA, 19 nt, Artificial Sequence
  Description of Artificial Sequence: Synthetic oligonucleotide
aaaggcgugagacguuguc

SEQ ID NO: 52232 - RNA, 19 nt, Artificial Sequence
  Description of Artificial Sequence: Synthetic oligonucleotide
augcugaauacaugaauag

SEQ ID NO: 52233 - RNA, 19 nt, Artificial Sequence
  Description of Artificial Sequence: Synthetic oligonucleotide
cugaugaacgauuuugcug

SEQ ID NO: 52234 - RNA, 19 nt, Artificial Sequence
  Description of Artificial Sequence: Synthetic oligonucleotide
aaaucauauaguugaggua

SEQ ID NO: 52235 - RNA, 19 nt, Artificial Sequence
  Description of Artificial Sequence: Synthetic oligonucleotide
aguccuauguuucaauaga

SEQ ID NO: 52236 - RNA, 19 nt, Artificial Sequence
  Description of Artificial Sequence: Synthetic oligonucleotide
acagaugauucgcaggaag

SEQ ID NO: 52237 - RNA, 19 nt, Artificial Sequence
  Description of Artificial Sequence: Synthetic oligonucleotide
aacauagccacccgagccu

SEQ ID NO: 52238 - RNA, 19 nt, Artificial Sequence
  Description of Artificial Sequence: Synthetic oligonucleotide
cuguaaaaucauauaguug

SEQ ID NO: 52239 - RNA, 19 nt, Artificial Sequence
  Description of Artificial Sequence: Synthetic oligonucleotide
uguaaaccacuucugcaga

SEQ ID NO: 52240 - RNA, 19 nt, Artificial Sequence
  Description of Artificial Sequence: Synthetic oligonucleotide
gaaggcaaggcuuguauuc

SEQ ID NO: 52241 - RNA, 19 nt, Artificial Sequence
  Description of Artificial Sequence: Synthetic oligonucleotide
uugacccuuguuuuaaugu

SEQ ID NO: 52242 - RNA, 19 nt, Artificial Sequence
  Description of Artificial Sequence: Synthetic oligonucleotide
accaaucagaggaagguac

SEQ ID NO: 52243 - RNA, 19 nt, Artificial Sequence
  Description of Artificial Sequence: Synthetic oligonucleotide
uaggugucgaagaauggcu

SEQ ID NO: 52244 - RNA, 19 nt, Artificial Sequence
  Description of Artificial Sequence: Synthetic oligonucleotide
aguccuugauuacuucaac

SEQ ID NO: 52245 - RNA, 19 nt, Artificial Sequence
  Description of Artificial Sequence: Synthetic oligonucleotide
acagacaacaaaucauuaa

SEQ ID NO: 52246 - RNA, 19 nt, Artificial Sequence
  Description of Artificial Sequence: Synthetic oligonucleotide
aaggcggugauaguuucuc

SEQ ID NO: 52247 - RNA, 19 nt, Artificial Sequence
  Description of Artificial Sequence: Synthetic oligonucleotide
aguuguguaccauauugau

SEQ ID NO: 52248 - RNA, 19 nt, Artificial Sequence
  Description of Artificial Sequence: Synthetic oligonucleotide
gugucuauuuuagaguucc

SEQ ID NO: 52249 - RNA, 19 nt, Artificial Sequence
  Description of Artificial Sequence: Synthetic oligonucleotide
guaccuuugaaucauuaaa

SEQ ID NO: 52250 - RNA, 19 nt, Artificial Sequence
  Description of Artificial Sequence: Synthetic oligonucleotide
ugaauagauucaagugucu

SEQ ID NO: 52251 - RNA, 19 nt, Artificial Sequence
  Description of Artificial Sequence: Synthetic oligonucleotide
gaaggcuccggcucgauuc

SEQ ID NO: 52252 - RNA, 19 nt, Artificial Sequence
  Description of Artificial Sequence: Synthetic oligonucleotide
auuacuucaaccacauccu

SEQ ID NO: 52253 - RNA, 19 nt, Artificial Sequence
  Description of Artificial Sequence: Synthetic oligonucleotide
agucugaacaacaaucucu

SEQ ID NO: 52254 - RNA, 19 nt, Artificial Sequence
  Description of Artificial Sequence: Synthetic oligonucleotide
agaugauucgcaggaaguc

SEQ ID NO: 52255 - RNA, 19 nt, Artificial Sequence
  Description of Artificial Sequence: Synthetic oligonucleotide
aaguaaguuguguaccaua

SEQ ID NO: 52256 - RNA, 19 nt, Artificial Sequence
  Description of Artificial Sequence: Synthetic oligonucleotide
gacagcauguuaccagaag

SEQ ID NO: 52257 - RNA, 19 nt, Artificial Sequence
  Description of Artificial Sequence: Synthetic oligonucleotide
uuucgguccuccagcaugc

SEQ ID NO: 52258 - RNA, 19 nt, Artificial Sequence
  Description of Artificial Sequence: Synthetic oligonucleotide
uuagaguccuugauuacuu

SEQ ID NO: 52259 - RNA, 19 nt, Artificial Sequence
  Description of Artificial Sequence: Synthetic oligonucleotide
uccaaucugugagaaaucu

SEQ ID NO: 52260 - RNA, 19 nt, Artificial Sequence
  Description of Artificial Sequence: Synthetic oligonucleotide
uguucugacgccagugagu

SEQ ID NO: 52261 - RNA, 19 nt, Artificial Sequence
  Description of Artificial Sequence: Synthetic oligonucleotide
cauaggugucgaagaaugg

SEQ ID NO: 52262 - RNA, 19 nt, Artificial Sequence
  Description of Artificial Sequence: Synthetic oligonucleotide
ugcguggcaaagcagugcu

SEQ ID NO: 52263 - RNA, 19 nt, Artificial Sequence
  Description of Artificial Sequence: Synthetic oligonucleotide
aacgccaauuccugugucu

SEQ ID NO: 52264 - RNA, 19 nt, Artificial Sequence
  Description of Artificial Sequence: Synthetic oligonucleotide
uuaucgagcuucucugugu

SEQ ID NO: 52265 - RNA, 19 nt, Artificial Sequence
  Description of Artificial Sequence: Synthetic oligonucleotide
cucacauguaacagccugc

SEQ ID NO: 52266 - RNA, 19 nt, Artificial Sequence
  Description of Artificial Sequence: Synthetic oligonucleotide
auuuuaacggugucagaaa

SEQ ID NO: 52267 - RNA, 19 nt, Artificial Sequence
  Description of Artificial Sequence: Synthetic oligonucleotide
gauuagaguccuugauuac

SEQ ID NO: 52268 - RNA, 19 nt, Artificial Sequence
  Description of Artificial Sequence: Synthetic oligonucleotide
aaguuguguaccauauuga

SEQ ID NO: 52269 - RNA, 19 nt, Artificial Sequence
  Description of Artificial Sequence: Synthetic oligonucleotide
ugcugaauacaugaauaga

SEQ ID NO: 52270 - RNA, 19 nt, Artificial Sequence
  Description of Artificial Sequence: Synthetic oligonucleotide
ccaacacggaaauaggugc

SEQ ID NO: 52271 - RNA, 19 nt, Artificial Sequence
  Description of Artificial Sequence: Synthetic oligonucleotide
gaaacgucggagauuauaa

SEQ ID NO: 52272 - RNA, 19 nt, Artificial Sequence
  Description of Artificial Sequence: Synthetic oligonucleotide
agcaggacuuuauaagagu

SEQ ID NO: 52273 - RNA, 19 nt, Artificial Sequence
  Description of Artificial Sequence: Synthetic oligonucleotide
gaauagagcuuugaugaca

SEQ ID NO: 52274 - RNA, 19 nt, Artificial Sequence
  Description of Artificial Sequence: Synthetic oligonucleotide
aggcgugagacguugucag

SEQ ID NO: 52275 - RNA, 19 nt, Artificial Sequence
  Description of Artificial Sequence: Synthetic oligonucleotide
uuuaucugagggucagagu

SEQ ID NO: 52276 - RNA, 19 nt, Artificial Sequence
  Description of Artificial Sequence: Synthetic oligonucleotide
ugagcguaugguacugaug

SEQ ID NO: 52277 - RNA, 19 nt, Artificial Sequence
  Description of Artificial Sequence: Synthetic oligonucleotide
acauauuuaauaguaccuu

SEQ ID NO: 52278 - RNA, 19 nt, Artificial Sequence
  Description of Artificial Sequence: Synthetic oligonucleotide
uggcaauucuguacaugag

SEQ ID NO: 52279 - RNA, 19 nt, Artificial Sequence
  Description of Artificial Sequence: Synthetic oligonucleotide
aacauagugcucauggcua

SEQ ID NO: 52280 - RNA, 19 nt, Artificial Sequence
  Description of Artificial Sequence: Synthetic oligonucleotide
aggauuagaguccuugauu

SEQ ID NO: 52281 - RNA, 19 nt, Artificial Sequence
  Description of Artificial Sequence: Synthetic oligonucleotide
agggucuaaaaugagugca

SEQ ID NO: 52282 - RNA, 19 nt, Artificial Sequence
  Description of Artificial Sequence: Synthetic oligonucleotide
cuuaucgagcuucucugug

SEQ ID NO: 52283 - RNA, 19 nt, Artificial Sequence
  Description of Artificial Sequence: Synthetic oligonucleotide
acucguugaagugaggaga

SEQ ID NO: 52284 - RNA, 19 nt, Artificial Sequence
  Description of Artificial Sequence: Synthetic oligonucleotide
agacaacaaaucauuaaga

SEQ ID NO: 52285 - RNA, 19 nt, Artificial Sequence
  Description of Artificial Sequence: Synthetic oligonucleotide
gguaaagggaggcacuagc

SEQ ID NO: 52286 - RNA, 19 nt, Artificial Sequence
  Description of Artificial Sequence: Synthetic oligonucleotide
uuugcaucccgauuagcuu

SEQ ID NO: 52287 - RNA, 19 nt, Artificial Sequence
  Description of Artificial Sequence: Synthetic oligonucleotide
ucgaagaauggcuccacau

SEQ ID NO: 52288 - RNA, 19 nt, Artificial Sequence
  Description of Artificial Sequence: Synthetic oligonucleotide
auugcuucguuccgagugu

SEQ ID NO: 52289 - RNA, 19 nt, Artificial Sequence
  Description of Artificial Sequence: Synthetic oligonucleotide
aggccugccagauaaugcu

SEQ ID NO: 52290 - RNA, 19 nt, Artificial Sequence
  Description of Artificial Sequence: Synthetic oligonucleotide
auauggagauugaaaacca

SEQ ID NO: 52291 - RNA, 19 nt, Artificial Sequence
  Description of Artificial Sequence: Synthetic oligonucleotide
aguaaguuguguaccauau

SEQ ID NO: 52292 - RNA, 19 nt, Artificial Sequence
  Description of Artificial Sequence: Synthetic oligonucleotide
cagggucuaaaaugagugc

SEQ ID NO: 52293 - RNA, 19 nt, Artificial Sequence
  Description of Artificial Sequence: Synthetic oligonucleotide
auacucagcgacaagugcu

SEQ ID NO: 52294 - RNA, 19 nt, Artificial Sequence
  Description of Artificial Sequence: Synthetic oligonucleotide
accugaucaggaaauguag

SEQ ID NO: 52295 - RNA, 19 nt, Artificial Sequence
  Description of Artificial Sequence: Synthetic oligonucleotide
cacucuggcaaaguuauuc

SEQ ID NO: 52296 - RNA, 19 nt, Artificial Sequence
  Description of Artificial Sequence: Synthetic oligonucleotide
auuaacugcuucguacaug

SEQ ID NO: 52297 - RNA, 19 nt, Artificial Sequence
  Description of Artificial Sequence: Synthetic oligonucleotide
cacauauuuaauaguaccu

SEQ ID NO: 52298 - RNA, 19 nt, Artificial Sequence
  Description of Artificial Sequence: Synthetic oligonucleotide
ugaaacgucggagauuaua

SEQ ID NO: 52299 - RNA, 19 nt, Artificial Sequence
  Description of Artificial Sequence: Synthetic oligonucleotide
aguuuaccauggauggugg

SEQ ID NO: 52300 - RNA, 19 nt, Artificial Sequence
  Description of Artificial Sequence: Synthetic oligonucleotide
ggauuagaguccuugauua

SEQ ID NO: 52301 - RNA, 19 nt, Artificial Sequence
  Description of Artificial Sequence: Synthetic oligonucleotide
gaucuaacagacgguucag

SEQ ID NO: 52302 - RNA, 19 nt, Artificial Sequence
  Description of Artificial Sequence: Synthetic oligonucleotide
gugagacguugucagaaug

SEQ ID NO: 52303 - RNA, 19 nt, Artificial Sequence
  Description of Artificial Sequence: Synthetic oligonucleotide
uucguuccgaguguuugcc

SEQ ID NO: 52304 - RNA, 19 nt, Artificial Sequence
  Description of Artificial Sequence: Synthetic oligonucleotide
aggucaaucgcaggucugg

SEQ ID NO: 52305 - RNA, 19 nt, Artificial Sequence
  Description of Artificial Sequence: Synthetic oligonucleotide
cuucguuccgaguguuugc

SEQ ID NO: 52306 - RNA, 19 nt, Artificial Sequence
  Description of Artificial Sequence: Synthetic oligonucleotide
ucauucggcugaaggaauc

SEQ ID NO: 52307 - RNA, 19 nt, Artificial Sequence
  Description of Artificial Sequence: Synthetic oligonucleotide
caugaaacgucggagauua

SEQ ID NO: 52308 - RNA, 19 nt, Artificial Sequence
  Description of Artificial Sequence: Synthetic oligonucleotide
acgagccucacauguaaca

SEQ ID NO: 52309 - RNA, 19 nt, Artificial Sequence
  Description of Artificial Sequence: Synthetic oligonucleotide
uaacauuagcuaugguaua

SEQ ID NO: 52310 - RNA, 19 nt, Artificial Sequence
  Description of Artificial Sequence: Synthetic oligonucleotide
agcuaugguauaaauaauu

SEQ ID NO: 52311 - RNA, 19 nt, Artificial Sequence
  Description of Artificial Sequence: Synthetic oligonucleotide
uagcuaugguauaaauaau

SEQ ID NO: 52312 - RNA, 19 nt, Artificial Sequence
  Description of Artificial Sequence: Synthetic oligonucleotide
agugagucauguccuuucu

SEQ ID NO: 52313 - RNA, 19 nt, Artificial Sequence
  Description of Artificial Sequence: Synthetic oligonucleotide
gaaggguguacaguacaug

SEQ ID NO: 52314 - RNA, 19 nt, Artificial Sequence
  Description of Artificial Sequence: Synthetic oligonucleotide
ugucuauuuuagaguucca

SEQ ID NO: 52315 - RNA, 19 nt, Artificial Sequence
  Description of Artificial Sequence: Synthetic oligonucleotide
cuggaaugugacacauccc

SEQ ID NO: 52316 - RNA, 19 nt, Artificial Sequence
  Description of Artificial Sequence: Synthetic oligonucleotide
guacuguaccuuugaauca

SEQ ID NO: 52317 - RNA, 19 nt, Artificial Sequence
  Description of Artificial Sequence: Synthetic oligonucleotide
guucgcuucaguagccagg

SEQ ID NO: 52318 - RNA, 19 nt, Artificial Sequence
  Description of Artificial Sequence: Synthetic oligonucleotide
uccgccguaccauuuccug

SEQ ID NO: 52319 - RNA, 19 nt, Artificial Sequence
  Description of Artificial Sequence: Synthetic oligonucleotide
cagagucgugacuggaaag

SEQ ID NO: 52320 - RNA, 19 nt, Artificial Sequence
  Description of Artificial Sequence: Synthetic oligonucleotide
uaucgagcuucucuguguu

SEQ ID NO: 52321 - RNA, 19 nt, Artificial Sequence
  Description of Artificial Sequence: Synthetic oligonucleotide
gucaaucgcaggucuggag

SEQ ID NO: 52322 - RNA, 19 nt, Artificial Sequence
  Description of Artificial Sequence: Synthetic oligonucleotide
uucaucucauaggugucga

SEQ ID NO: 52323 - RNA, 19 nt, Artificial Sequence
  Description of Artificial Sequence: Synthetic oligonucleotide
uccggagcagauaccuucu

SEQ ID NO: 52324 - RNA, 19 nt, Artificial Sequence
  Description of Artificial Sequence: Synthetic oligonucleotide
agugucuauuuuagaguuc

SEQ ID NO: 52325 - RNA, 19 nt, Artificial Sequence
  Description of Artificial Sequence: Synthetic oligonucleotide
acuagcaugugagcguaug

SEQ ID NO: 52326 - RNA, 19 nt, Artificial Sequence
  Description of Artificial Sequence: Synthetic oligonucleotide
gaggaagguacaacauagc

SEQ ID NO: 52327 - RNA, 19 nt, Artificial Sequence
  Description of Artificial Sequence: Synthetic oligonucleotide
ucgauucugcugagaaggu

SEQ ID NO: 52328 - RNA, 19 nt, Artificial Sequence
  Description of Artificial Sequence: Synthetic oligonucleotide
aaggcuccggcucgauucu

SEQ ID NO: 52329 - RNA, 19 nt, Artificial Sequence
  Description of Artificial Sequence: Synthetic oligonucleotide
agcgacaagugcugcugag

SEQ ID NO: 52330 - RNA, 19 nt, Artificial Sequence
  Description of Artificial Sequence: Synthetic oligonucleotide
uccucacaccuuuuaguaa

SEQ ID NO: 52331 - RNA, 19 nt, Artificial Sequence
  Description of Artificial Sequence: Synthetic oligonucleotide
cagugagucauguccuuuc

SEQ ID NO: 52332 - RNA, 19 nt, Artificial Sequence
  Description of Artificial Sequence: Synthetic oligonucleotide
uguguaccauauugaugac

SEQ ID NO: 52333 - RNA, 19 nt, Artificial Sequence
  Description of Artificial Sequence: Synthetic oligonucleotide
guaaagggaggcacuagca

SEQ ID NO: 52334 - RNA, 19 nt, Artificial Sequence
  Description of Artificial Sequence: Synthetic oligonucleotide
acccuuguuuuaauguaag

SEQ ID NO: 52335 - RNA, 19 nt, Artificial Sequence
  Description of Artificial Sequence: Synthetic oligonucleotide
augcuauugcuuccagagu

SEQ ID NO: 52336 - RNA, 19 nt, Artificial Sequence
  Description of Artificial Sequence: Synthetic oligonucleotide
auggcaacugucuggcuua

SEQ ID NO: 52337 - RNA, 19 nt, Artificial Sequence
  Description of Artificial Sequence: Synthetic oligonucleotide
gacauugacccuuguuuua

SEQ ID NO: 52338 - RNA, 19 nt, Artificial Sequence
  Description of Artificial Sequence: Synthetic oligonucleotide
aguggaccaggcacugagc

SEQ ID NO: 52339 - RNA, 19 nt, Artificial Sequence
  Description of Artificial Sequence: Synthetic oligonucleotide
ggaaaauccagaacucuga

SEQ ID NO: 52340 - RNA, 19 nt, Artificial Sequence
  Description of Artificial Sequence: Synthetic oligonucleotide
acaguacaugaaacgucgg

SEQ ID NO: 52341 - RNA, 19 nt, Artificial Sequence
  Description of Artificial Sequence: Synthetic oligonucleotide
guacaacauagccacccga

SEQ ID NO: 52342 - RNA, 19 nt, Artificial Sequence
  Description of Artificial Sequence: Synthetic oligonucleotide
ugggcacggccaucuaaag

SEQ ID NO: 52343 - RNA, 19 nt, Artificial Sequence
  Description of Artificial Sequence: Synthetic oligonucleotide
gaggucuguaaaccacuuc

SEQ ID NO: 52344 - RNA, 19 nt, Artificial Sequence
  Description of Artificial Sequence: Synthetic oligonucleotide
auaauaccaaucagaggaa

SEQ ID NO: 52345 - RNA, 19 nt, Artificial Sequence
  Description of Artificial Sequence: Synthetic oligonucleotide
acagaucagaaggcuccgg

SEQ ID NO: 52346 - RNA, 19 nt, Artificial Sequence
  Description of Artificial Sequence: Synthetic oligonucleotide
caguacaugaaacgucgga

SEQ ID NO: 52347 - RNA, 19 nt, Artificial Sequence
  Description of Artificial Sequence: Synthetic oligonucleotide
ugacucaguaaaguacuuu

SEQ ID NO: 52348 - RNA, 19 nt, Artificial Sequence
  Description of Artificial Sequence: Synthetic oligonucleotide
gggcuauacaaauuggucu

SEQ ID NO: 52349 - RNA, 19 nt, Artificial Sequence
  Description of Artificial Sequence: Synthetic oligonucleotide
gcaugauugcuucguuccg

SEQ ID NO: 52350 - RNA, 19 nt, Artificial Sequence
  Description of Artificial Sequence: Synthetic oligonucleotide
ugccaaacauccgcuuacc

SEQ ID NO: 52351 - RNA, 19 nt, Artificial Sequence
  Description of Artificial Sequence: Synthetic oligonucleotide
agaggucugauagcccuug

SEQ ID NO: 52352 - RNA, 19 nt, Artificial Sequence
  Description of Artificial Sequence: Synthetic oligonucleotide
guaccgugggucagagucg

SEQ ID NO: 52353 - RNA, 19 nt, Artificial Sequence
  Description of Artificial Sequence: Synthetic oligonucleotide
gcgucuuaagaauucuuca

SEQ ID NO: 52354 - RNA, 19 nt, Artificial Sequence
  Description of Artificial Sequence: Synthetic oligonucleotide
gaccugaucaggaaaugua

SEQ ID NO: 52355 - RNA, 19 nt, Artificial Sequence
  Description of Artificial Sequence: Synthetic oligonucleotide
ugucuagaacaagugucua

SEQ ID NO: 52356 - RNA, 19 nt, Artificial Sequence
  Description of Artificial Sequence: Synthetic oligonucleotide
agaguaccgugggucagag

SEQ ID NO: 52357 - RNA, 19 nt, Artificial Sequence
  Description of Artificial Sequence: Synthetic oligonucleotide
agcguaugguacugaugcu

SEQ ID NO: 52358 - RNA, 19 nt, Artificial Sequence
  Description of Artificial Sequence: Synthetic oligonucleotide
ggugguauguugucugcca

SEQ ID NO: 52359 - RNA, 19 nt, Artificial Sequence
  Description of Artificial Sequence: Synthetic oligonucleotide
ugucgaagaauggcuccac

SEQ ID NO: 52360 - RNA, 19 nt, Artificial Sequence
  Description of Artificial Sequence: Synthetic oligonucleotide
augcucagauacucagcga

SEQ ID NO: 52361 - RNA, 19 nt, Artificial Sequence
  Description of Artificial Sequence: Synthetic oligonucleotide
cugcaaugucggagaagcc

SEQ ID NO: 52362 - RNA, 19 nt, Artificial Sequence
  Description of Artificial Sequence: Synthetic oligonucleotide
acgauuuugcugaaugcuu

SEQ ID NO: 52363 - RNA, 19 nt, Artificial Sequence
  Description of Artificial Sequence: Synthetic oligonucleotide
cuuaugcaauccaaacagu

SEQ ID NO: 52364 - RNA, 19 nt, Artificial Sequence
  Description of Artificial Sequence: Synthetic oligonucleotide
gugauaguuucucuccagu

SEQ ID NO: 52365 - RNA, 19 nt, Artificial Sequence
  Description of Artificial Sequence: Synthetic oligonucleotide
ugcuccgccguaccauuuc

SEQ ID NO: 52366 - RNA, 19 nt, Artificial Sequence
  Description of Artificial Sequence: Synthetic oligonucleotide
ucguuccgaguguuugcca

SEQ ID NO: 52367 - RNA, 19 nt, Artificial Sequence
  Description of Artificial Sequence: Synthetic oligonucleotide
cagaugauucgcaggaagu

SEQ ID NO: 52368 - RNA, 19 nt, Artificial Sequence
  Description of Artificial Sequence: Synthetic oligonucleotide
gaugaacgauuuugcugaa

SEQ ID NO: 52369 - RNA, 19 nt, Artificial Sequence
  Description of Artificial Sequence: Synthetic oligonucleotide
caggucaaucgcaggucug

SEQ ID NO: 52370 - RNA, 19 nt, Artificial Sequence
  Description of Artificial Sequence: Synthetic oligonucleotide
caucuaaagugaagggugu

SEQ ID NO: 52371 - RNA, 19 nt, Artificial Sequence
  Description of Artificial Sequence: Synthetic oligonucleotide
uacagaugauucgcaggaa

SEQ ID NO: 52372 - RNA, 19 nt, Artificial Sequence
  Description of Artificial Sequence: Synthetic oligonucleotide
cauccucacaccuuuuagu

SEQ ID NO: 52373 - RNA, 19 nt, Artificial Sequence
  Description of Artificial Sequence: Synthetic oligonucleotide
cacgagccucacauguaac

SEQ ID NO: 52374 - RNA, 19 nt, Artificial Sequence
  Description of Artificial Sequence: Synthetic oligonucleotide
cugccuggcaccgaugcuc

SEQ ID NO: 52375 - RNA, 19 nt, Artificial Sequence
  Description of Artificial Sequence: Synthetic oligonucleotide
uucuccaccgcagguuuuc

SEQ ID NO: 52376 - RNA, 19 nt, Artificial Sequence
  Description of Artificial Sequence: Synthetic oligonucleotide
guuuaccauggauggugga

SEQ ID NO: 52377 - RNA, 19 nt, Artificial Sequence
  Description of Artificial Sequence: Synthetic oligonucleotide
uaccgugggucagagucgu

SEQ ID NO: 52378 - RNA, 19 nt, Artificial Sequence
  Description of Artificial Sequence: Synthetic oligonucleotide
gugucuagaacaagugucu

SEQ ID NO: 52379 - RNA, 19 nt, Artificial Sequence
  Description of Artificial Sequence: Synthetic oligonucleotide
gcuucguuccgaguguuug

SEQ ID NO: 52380 - RNA, 19 nt, Artificial Sequence
  Description of Artificial Sequence: Synthetic oligonucleotide
ucccuccaaucugugagaa

SEQ ID NO: 52381 - RNA, 19 nt, Artificial Sequence
  Description of Artificial Sequence: Synthetic oligonucleotide
ggcucgauucugcugagaa

SEQ ID NO: 52382 - RNA, 19 nt, Artificial Sequence
  Description of Artificial Sequence: Synthetic oligonucleotide
gguguuaagauuaucucuu

SEQ ID NO: 52383 - RNA, 19 nt, Artificial Sequence
  Description of Artificial Sequence: Synthetic oligonucleotide
cuuaaggcggugauaguuu

SEQ ID NO: 52384 - RNA, 19 nt, Artificial Sequence
  Description of Artificial Sequence: Synthetic oligonucleotide
cuucguacaugccagccau

SEQ ID NO: 52385 - RNA, 19 nt, Artificial Sequence
  Description of Artificial Sequence: Synthetic oligonucleotide
aggaucauauggagauuga

SEQ ID NO: 52386 - RNA, 19 nt, Artificial Sequence
  Description of Artificial Sequence: Synthetic oligonucleotide
gaagccggaggcacagauc

SEQ ID NO: 52387 - RNA, 19 nt, Artificial Sequence
  Description of Artificial Sequence: Synthetic oligonucleotide
augggcacggccaucuaaa

SEQ ID NO: 52388 - RNA, 19 nt, Artificial Sequence
  Description of Artificial Sequence: Synthetic oligonucleotide
ucagaaggcuccggcucga

SEQ ID NO: 52389 - RNA, 19 nt, Artificial Sequence
  Description of Artificial Sequence: Synthetic oligonucleotide
ggcuauacaaauuggucuu

SEQ ID NO: 52390 - RNA, 19 nt, Artificial Sequence
  Description of Artificial Sequence: Synthetic oligonucleotide
uaacagccugcaucuggua

SEQ ID NO: 52391 - RNA, 19 nt, Artificial Sequence
  Description of Artificial Sequence: Synthetic oligonucleotide
aucuaaagugaagggugua

SEQ ID NO: 52392 - RNA, 19 nt, Artificial Sequence
  Description of Artificial Sequence: Synthetic oligonucleotide
aggcgcagcuuguugugau

SEQ ID NO: 52393 - RNA, 19 nt, Artificial Sequence
  Description of Artificial Sequence: Synthetic oligonucleotide
uucugacgccagugaguca

SEQ ID NO: 52394 - RNA, 19 nt, Artificial Sequence
  Description of Artificial Sequence: Synthetic oligonucleotide
cgacaagugcugcugagug

SEQ ID NO: 52395 - RNA, 19 nt, Artificial Sequence
  Description of Artificial Sequence: Synthetic oligonucleotide
ccaccgcagguuuucuugg

SEQ ID NO: 52396 - RNA, 19 nt, Artificial Sequence
  Description of Artificial Sequence: Synthetic oligonucleotide
cgaacuugguuccauaaaa

SEQ ID NO: 52397 - RNA, 19 nt, Artificial Sequence
  Description of Artificial Sequence: Synthetic oligonucleotide
ugcuucguuccgaguguuu

SEQ ID NO: 52398 - RNA, 19 nt, Artificial Sequence
  Description of Artificial Sequence: Synthetic oligonucleotide
ggaucauauggagauugaa

SEQ ID NO: 52399 - RNA, 19 nt, Artificial Sequence
  Description of Artificial Sequence: Synthetic oligonucleotide
gcaauccaaacaguccuuc

SEQ ID NO: 52400 - RNA, 19 nt, Artificial Sequence
  Description of Artificial Sequence: Synthetic oligonucleotide
cacggaaauaggugccaaa

SEQ ID NO: 52401 - RNA, 19 nt, Artificial Sequence
  Description of Artificial Sequence: Synthetic oligonucleotide
gugagugacauugacccuu

SEQ ID NO: 52402 - RNA, 19 nt, Artificial Sequence
  Description of Artificial Sequence: Synthetic oligonucleotide
cagugaauagagcuuugau

SEQ ID NO: 52403 - RNA, 19 nt, Artificial Sequence
  Description of Artificial Sequence: Synthetic oligonucleotide
aggugccaaacauccgcuu

SEQ ID NO: 52404 - RNA, 19 nt, Artificial Sequence
  Description of Artificial Sequence: Synthetic oligonucleotide
agccuuuaucugaggguca

SEQ ID NO: 52405 - RNA, 19 nt, Artificial Sequence
  Description of Artificial Sequence: Synthetic oligonucleotide
guguaccauauugaugacu

SEQ ID NO: 52406 - RNA, 19 nt, Artificial Sequence
  Description of Artificial Sequence: Synthetic oligonucleotide
cugacgccagugagucaug

SEQ ID NO: 52407 - RNA, 19 nt, Artificial Sequence
  Description of Artificial Sequence: Synthetic oligonucleotide
gcuccgccguaccauuucc

SEQ ID NO: 52408 - RNA, 19 nt, Artificial Sequence
  Description of Artificial Sequence: Synthetic oligonucleotide
cucauucggcugaaggaau

SEQ ID NO: 52409 - RNA, 19 nt, Artificial Sequence
  Description of Artificial Sequence: Synthetic oligonucleotide
uagccacccgagccuuuau

SEQ ID NO: 52410 - RNA, 19 nt, Artificial Sequence
  Description of Artificial Sequence: Synthetic oligonucleotide
ggccucgucagcugaggga

SEQ ID NO: 52411 - RNA, 19 nt, Artificial Sequence
  Description of Artificial Sequence: Synthetic oligonucleotide
gaaggcucauucggcugaa

SEQ ID NO: 52412 - RNA, 19 nt, Artificial Sequence
  Description of Artificial Sequence: Synthetic oligonucleotide
cagcgacaagugcugcuga

SEQ ID NO: 52413 - RNA, 19 nt, Artificial Sequence
  Description of Artificial Sequence: Synthetic oligonucleotide
cagaguaccgugggucaga

SEQ ID NO: 52414 - RNA, 19 nt, Artificial Sequence
  Description of Artificial Sequence: Synthetic oligonucleotide
gcgugagacguugucagaa

SEQ ID NO: 52415 - RNA, 19 nt, Artificial Sequence
  Description of Artificial Sequence: Synthetic oligonucleotide
augcucccacucucacuau

SEQ ID NO: 52416 - RNA, 19 nt, Artificial Sequence
  Description of Artificial Sequence: Synthetic oligonucleotide
gcagaucuaacagacgguu

SEQ ID NO: 52417 - RNA, 19 nt, Artificial Sequence
  Description of Artificial Sequence: Synthetic oligonucleotide
gcucucugcguggcaaagc

SEQ ID NO: 52418 - RNA, 19 nt, Artificial Sequence
  Description of Artificial Sequence: Synthetic oligonucleotide
gguuuuccguuugaacugu

SEQ ID NO: 52419 - RNA, 19 nt, Artificial Sequence
  Description of Artificial Sequence: Synthetic oligonucleotide
ggaccugaucaggaaaugu

SEQ ID NO: 52420 - RNA, 19 nt, Artificial Sequence
  Description of Artificial Sequence: Synthetic oligonucleotide
ggucaaucgcaggucugga

SEQ ID NO: 52421 - RNA, 19 nt, Artificial Sequence
  Description of Artificial Sequence: Synthetic oligonucleotide
gaaaggcgugagacguugu

SEQ ID NO: 52422 - RNA, 19 nt, Artificial Sequence
  Description of Artificial Sequence: Synthetic oligonucleotide
guaggacugagaggucugu

SEQ ID NO: 52423 - RNA, 19 nt, Artificial Sequence
  Description of Artificial Sequence: Synthetic oligonucleotide
cugacucaguaaaguacuu

SEQ ID NO: 52424 - RNA, 19 nt, Artificial Sequence
  Description of Artificial Sequence: Synthetic oligonucleotide
ggcuuaucaugcucccacu

SEQ ID NO: 52425 - RNA, 19 nt, Artificial Sequence
  Description of Artificial Sequence: Synthetic oligonucleotide
ccacgagccucacauguaa

SEQ ID NO: 52426 - RNA, 19 nt, Artificial Sequence
  Description of Artificial Sequence: Synthetic oligonucleotide
cggagauuauaauucuugu

SEQ ID NO: 52427 - RNA, 19 nt, Artificial Sequence
  Description of Artificial Sequence: Synthetic oligonucleotide
cgaaggcucauucggcuga

SEQ ID NO: 52428 - RNA, 19 nt, Artificial Sequence
  Description of Artificial Sequence: Synthetic oligonucleotide
cccucugcuccgccguacc

SEQ ID NO: 52429 - RNA, 19 nt, Artificial Sequence
  Description of Artificial Sequence: Synthetic oligonucleotide
gccacucguugaagugagg

SEQ ID NO: 52430 - RNA, 19 nt, Artificial Sequence
  Description of Artificial Sequence: Synthetic oligonucleotide
gaguaccgugggucagagu

SEQ ID NO: 52431 - RNA, 19 nt, Artificial Sequence
  Description of Artificial Sequence: Synthetic oligonucleotide
ccuuaaggcggugauaguu

SEQ ID NO: 52432 - RNA, 19 nt, Artificial Sequence
  Description of Artificial Sequence: Synthetic oligonucleotide
ccaggucaaucgcaggucu

SEQ ID NO: 52433 - RNA, 19 nt, Artificial Sequence
  Description of Artificial Sequence: Synthetic oligonucleotide
cuccgccguaccauuuccu

SEQ ID NO: 52434 - RNA, 19 nt, Artificial Sequence
  Description of Artificial Sequence: Synthetic oligonucleotide
cugauagcccuuggcaauu

SEQ ID NO: 52435 - RNA, 19 nt, Artificial Sequence
  Description of Artificial Sequence: Synthetic oligonucleotide
augaaacgucggagauuau

SEQ ID NO: 52436 - RNA, 19 nt, Artificial Sequence
  Description of Artificial Sequence: Synthetic oligonucleotide
ccggcucgauucugcugag

SEQ ID NO: 52437 - RNA, 19 nt, Artificial Sequence
  Description of Artificial Sequence: Synthetic oligonucleotide
gcguggcaaagcagugcug

SEQ ID NO: 52438 - RNA, 19 nt, Artificial Sequence
  Description of Artificial Sequence: Synthetic oligonucleotide
gcgacaagugcugcugagu

SEQ ID NO: 52439 - RNA, 19 nt, Artificial Sequence
  Description of Artificial Sequence: Synthetic oligonucleotide
ccgaguguuugccagccau

SEQ ID NO: 52440 - RNA, 19 nt, Artificial Sequence
  Description of Artificial Sequence: Synthetic oligonucleotide
caccgaugcuccccagaau

SEQ ID NO: 52441 - RNA, 19 nt, Artificial Sequence
  Description of Artificial Sequence: Synthetic oligonucleotide
ccccgaacuugguuccaua

SEQ ID NO: 52442 - RNA, 19 nt, Artificial Sequence
  Description of Artificial Sequence: Synthetic oligonucleotide
cgugagacguugucagaau

SEQ ID NO: 52443 - RNA, 19 nt, Artificial Sequence
  Description of Artificial Sequence: Synthetic oligonucleotide
cagaaggcuccggcucgau

SEQ ID NO: 52444 - RNA, 19 nt, Artificial Sequence
  Description of Artificial Sequence: Synthetic oligonucleotide
ccucgucagcugagggacu

SEQ ID NO: 52445 - RNA, 19 nt, Artificial Sequence
  Description of Artificial Sequence: Synthetic oligonucleotide
ccggagcagauaccuucuu

SEQ ID NO: 52446 - RNA, 19 nt, Artificial Sequence
  Description of Artificial Sequence: Synthetic oligonucleotide
cggcucgauucugcugaga

SEQ ID NO: 52447 - RNA, 19 nt, Artificial Sequence
  Description of Artificial Sequence: Synthetic oligonucleotide
uuuuagaucaucaaugucg

SEQ ID NO: 52448 - RNA, 19 nt, Artificial Sequence
  Description of Artificial Sequence: Synthetic oligonucleotide
aaaauauauauauauauaa

SEQ ID NO: 52449 - RNA, 19 nt, Artificial Sequence
  Description of Artificial Sequence: Synthetic oligonucleotide
aauauauauauauauaauu

SEQ ID NO: 52450 - RNA, 19 nt, Artificial Sequence
  Description of Artificial Sequence: Synthetic oligonucleotide
uauauauauauaauuuucc

SEQ ID NO: 52451 - RNA, 19 nt, Artificial Sequence
  Description of Artificial Sequence: Synthetic oligonucleotide
uguaguacccucaagaaga

SEQ ID NO: 52452 - RNA, 19 nt, Artificial Sequence
  Description of Artificial Sequence: Synthetic oligonucleotide
auauaauuuuccccuaucc

SEQ ID NO: 52453 - RNA, 19 nt, Artificial Sequence
  Description of Artificial Sequence: Synthetic oligonucleotide
aguguuagauuuuagauca

SEQ ID NO: 52454 - RNA, 19 nt, Artificial Sequence
  Description of Artificial Sequence: Synthetic oligonucleotide
agauuugcgaugcagcucc

SEQ ID NO: 52455 - RNA, 19 nt, Artificial Sequence
  Description of Artificial Sequence: Synthetic oligonucleotide
auauaaucuacuaagacag

SEQ ID NO: 52456 - RNA, 19 nt, Artificial Sequence
  Description of Artificial Sequence: Synthetic oligonucleotide
ugagaugccacaauuacca

SEQ ID NO: 52457 - RNA, 19 nt, Artificial Sequence
  Description of Artificial Sequence: Synthetic oligonucleotide
cucgaaguaacacugaacc

SEQ ID NO: 52458 - RNA, 19 nt, Artificial Sequence
  Description of Artificial Sequence: Synthetic oligonucleotide
auauauauauauaauuuuc

SEQ ID NO: 52459 - RNA, 19 nt, Artificial Sequence
  Description of Artificial Sequence: Synthetic oligonucleotide
ucuacuaagacagcaaaag

SEQ ID NO: 52460 - RNA, 19 nt, Artificial Sequence
  Description of Artificial Sequence: Synthetic oligonucleotide
aacaucaugauguaugcau

SEQ ID NO: 52461 - RNA, 19 nt, Artificial Sequence
  Description of Artificial Sequence: Synthetic oligonucleotide
gauuaaaacaagugugugc

SEQ ID NO: 52462 - RNA, 19 nt, Artificial Sequence
  Description of Artificial Sequence: Synthetic oligonucleotide
aucuguuuaauccuggcag

SEQ ID NO: 52463 - RNA, 19 nt, Artificial Sequence
  Description of Artificial Sequence: Synthetic oligonucleotide
auauaagcaguucuaguuc

SEQ ID NO: 52464 - RNA, 19 nt, Artificial Sequence
  Description of Artificial Sequence: Synthetic oligonucleotide
aaggauugaauccaacuga

SEQ ID NO: 52465 - RNA, 19 nt, Artificial Sequence
  Description of Artificial Sequence: Synthetic oligonucleotide
uauauauauauauaauuuu

SEQ ID NO: 52466 - RNA, 19 nt, Artificial Sequence
  Description of Artificial Sequence: Synthetic oligonucleotide
uaguaugugugcaagaggu

SEQ ID NO: 52467 - RNA, 19 nt, Artificial Sequence
  Description of Artificial Sequence: Synthetic oligonucleotide
uguggagacaucauuuucc

SEQ ID NO: 52468 - RNA, 19 nt, Artificial Sequence
  Description of Artificial Sequence: Synthetic oligonucleotide
agcucaucuagacucacgc

SEQ ID NO: 52469 - RNA, 19 nt, Artificial Sequence
  Description of Artificial Sequence: Synthetic oligonucleotide
uugauuaaaacaagugugu

SEQ ID NO: 52470 - RNA, 19 nt, Artificial Sequence
  Description of Artificial Sequence: Synthetic oligonucleotide
uguugcucagaauagauuc

SEQ ID NO: 52471 - RNA, 19 nt, Artificial Sequence
  Description of Artificial Sequence: Synthetic oligonucleotide
uuuagaucaucaaugucga

SEQ ID NO: 52472 - RNA, 19 nt, Artificial Sequence
  Description of Artificial Sequence: Synthetic oligonucleotide
aucaacacauuccaagcac

SEQ ID NO: 52473 - RNA, 19 nt, Artificial Sequence
  Description of Artificial Sequence: Synthetic oligonucleotide
acgaaauuguaccagaagu

SEQ ID NO: 52474 - RNA, 19 nt, Artificial Sequence
  Description of Artificial Sequence: Synthetic oligonucleotide
uggauuugcagacaccugc

SEQ ID NO: 52475 - RNA, 19 nt, Artificial Sequence
  Description of Artificial Sequence: Synthetic oligonucleotide
uuaaacacuuccccuagca

SEQ ID NO: 52476 - RNA, 19 nt, Artificial Sequence
  Description of Artificial Sequence: Synthetic oligonucleotide
aaugaggcgcuuuggaaug

SEQ ID NO: 52477 - RNA, 19 nt, Artificial Sequence
  Description of Artificial Sequence: Synthetic oligonucleotide
aagugcucgaccuaaucug

SEQ ID NO: 52478 - RNA, 19 nt, Artificial Sequence
  Description of Artificial Sequence: Synthetic oligonucleotide
ucaguguuagauuuuagau

SEQ ID NO: 52479 - RNA, 19 nt, Artificial Sequence
  Description of Artificial Sequence: Synthetic oligonucleotide
aaauauauauauauauaau

SEQ ID NO: 52480 - RNA, 19 nt, Artificial Sequence
  Description of Artificial Sequence: Synthetic oligonucleotide
ucugagaugccacaauuac

SEQ ID NO: 52481 - RNA, 19 nt, Artificial Sequence
  Description of Artificial Sequence: Synthetic oligonucleotide
uuuaacacagugcggugag

SEQ ID NO: 52482 - RNA, 19 nt, Artificial Sequence
  Description of Artificial Sequence: Synthetic oligonucleotide
aaaugaggcgcuuuggaau

SEQ ID NO: 52483 - RNA, 19 nt, Artificial Sequence
  Description of Artificial Sequence: Synthetic oligonucleotide
cucgcauugaaucauuagc

SEQ ID NO: 52484 - RNA, 19 nt, Artificial Sequence
  Description of Artificial Sequence: Synthetic oligonucleotide
ucuaguaugugugcaagag

SEQ ID NO: 52485 - RNA, 19 nt, Artificial Sequence
  Description of Artificial Sequence: Synthetic oligonucleotide
ucgcauugaaucauuagcu

SEQ ID NO: 52486 - RNA, 19 nt, Artificial Sequence
  Description of Artificial Sequence: Synthetic oligonucleotide
auauauauauauauaauuu

SEQ ID NO: 52487 - RNA, 19 nt, Artificial Sequence
  Description of Artificial Sequence: Synthetic oligonucleotide
aguucaugugucuaguaug

SEQ ID NO: 52488 - RNA, 19 nt, Artificial Sequence
  Description of Artificial Sequence: Synthetic oligonucleotide
aagguaagaguccuuucug

SEQ ID NO: 52489 - RNA, 19 nt, Artificial Sequence
  Description of Artificial Sequence: Synthetic oligonucleotide
ucacguaccauuuguauaa

SEQ ID NO: 52490 - RNA, 19 nt, Artificial Sequence
  Description of Artificial Sequence: Synthetic oligonucleotide
cauugaaucauuagcugug

SEQ ID NO: 52491 - RNA, 19 nt, Artificial Sequence
  Description of Artificial Sequence: Synthetic oligonucleotide
uguaccaagcucaucuaga

SEQ ID NO: 52492 - RNA, 19 nt, Artificial Sequence
  Description of Artificial Sequence: Synthetic oligonucleotide
agugauuuaugaagagugc

SEQ ID NO: 52493 - RNA, 19 nt, Artificial Sequence
  Description of Artificial Sequence: Synthetic oligonucleotide
aagucaauaggcagauugg

SEQ ID NO: 52494 - RNA, 19 nt, Artificial Sequence
  Description of Artificial Sequence: Synthetic oligonucleotide
uauauaauuuuccccuauc

SEQ ID NO: 52495 - RNA, 19 nt, Artificial Sequence
  Description of Artificial Sequence: Synthetic oligonucleotide
cuagcauguaccaagcuca

SEQ ID NO: 52496 - RNA, 19 nt, Artificial Sequence
  Description of Artificial Sequence: Synthetic oligonucleotide
aaggcuacugcgccuuaac

SEQ ID NO: 52497 - RNA, 19 nt, Artificial Sequence
  Description of Artificial Sequence: Synthetic oligonucleotide
auaaucuacuaagacagca

SEQ ID NO: 52498 - RNA, 19 nt, Artificial Sequence
  Description of Artificial Sequence: Synthetic oligonucleotide
agcaaacccuugcaggggc

SEQ ID NO: 52499 - RNA, 19 nt, Artificial Sequence
  Description of Artificial Sequence: Synthetic oligonucleotide
agguccaguugauuaaaac

SEQ ID NO: 52500 - RNA, 19 nt, Artificial Sequence
  Description of Artificial Sequence: Synthetic oligonucleotide
guaggcagggccuaacuag

SEQ ID NO: 52501 - RNA, 19 nt, Artificial Sequence
  Description of Artificial Sequence: Synthetic oligonucleotide
uauaaucuacuaagacagc

SEQ ID NO: 52502 - RNA, 19 nt, Artificial Sequence
  Description of Artificial Sequence: Synthetic oligonucleotide
ugguuuaacacagugcggu

SEQ ID NO: 52503 - RNA, 19 nt, Artificial Sequence
  Description of Artificial Sequence: Synthetic oligonucleotide
cugaggaacgaaauuguac

SEQ ID NO: 52504 - RNA, 19 nt, Artificial Sequence
  Description of Artificial Sequence: Synthetic oligonucleotide
aagucgaggacacgaauau

SEQ ID NO: 52505 - RNA, 19 nt, Artificial Sequence
  Description of Artificial Sequence: Synthetic oligonucleotide
cuaguaugugugcaagagg

SEQ ID NO: 52506 - RNA, 19 nt, Artificial Sequence
  Description of Artificial Sequence: Synthetic oligonucleotide
uccccuagcauguaccaag

SEQ ID NO: 52507 - RNA, 19 nt, Artificial Sequence
  Description of Artificial Sequence: Synthetic oligonucleotide
agggucaauauggauuugc

SEQ ID NO: 52508 - RNA, 19 nt, Artificial Sequence
  Description of Artificial Sequence: Synthetic oligonucleotide
cuuguuguugucuccgcgc

SEQ ID NO: 52509 - RNA, 19 nt, Artificial Sequence
  Description of Artificial Sequence: Synthetic oligonucleotide
agucaauaggcagauuggg

SEQ ID NO: 52510 - RNA, 19 nt, Artificial Sequence
  Description of Artificial Sequence: Synthetic oligonucleotide
aggggauucaaugggacgg

SEQ ID NO: 52511 - RNA, 19 nt, Artificial Sequence
  Description of Artificial Sequence: Synthetic oligonucleotide
agggucgcuucugagaugc

SEQ ID NO: 52512 - RNA, 19 nt, Artificial Sequence
  Description of Artificial Sequence: Synthetic oligonucleotide
ugguuaggguuacaauggg

SEQ ID NO: 52513 - RNA, 19 nt, Artificial Sequence
  Description of Artificial Sequence: Synthetic oligonucleotide
ugcgcuugacaucaaaguc

SEQ ID NO: 52514 - RNA, 19 nt, Artificial Sequence
  Description of Artificial Sequence: Synthetic oligonucleotide
ucucgaugaaucugaaacu

SEQ ID NO: 52515 - RNA, 19 nt, Artificial Sequence
  Description of Artificial Sequence: Synthetic oligonucleotide
ucaaaggaacgcaaugcuc

SEQ ID NO: 52516 - RNA, 19 nt, Artificial Sequence
  Description of Artificial Sequence: Synthetic oligonucleotide
uucguaacuuaauuuccca

SEQ ID NO: 52517 - RNA, 19 nt, Artificial Sequence
  Description of Artificial Sequence: Synthetic oligonucleotide
aggagauuugcgaugcagc

SEQ ID NO: 52518 - RNA, 19 nt, Artificial Sequence
  Description of Artificial Sequence: Synthetic oligonucleotide
caaacguuccagcucuugg

SEQ ID NO: 52519 - RNA, 19 nt, Artificial Sequence
  Description of Artificial Sequence: Synthetic oligonucleotide
uugucauauacagcuuugg

SEQ ID NO: 52520 - RNA, 19 nt, Artificial Sequence
  Description of Artificial Sequence: Synthetic oligonucleotide
acaaguaugcacuggggaa

SEQ ID NO: 52521 - RNA, 19 nt, Artificial Sequence
  Description of Artificial Sequence: Synthetic oligonucleotide
aaucauuagcugugcacau

SEQ ID NO: 52522 - RNA, 19 nt, Artificial Sequence
  Description of Artificial Sequence: Synthetic oligonucleotide
aaguacccgugacaaacug

SEQ ID NO: 52523 - RNA, 19 nt, Artificial Sequence
  Description of Artificial Sequence: Synthetic oligonucleotide
uugaucguguaggugaccc

SEQ ID NO: 52524 - RNA, 19 nt, Artificial Sequence
  Description of Artificial Sequence: Synthetic oligonucleotide
uggguagaagcauccauac

SEQ ID NO: 52525 - RNA, 19 nt, Artificial Sequence
  Description of Artificial Sequence: Synthetic oligonucleotide
agugcggugagucucugca

SEQ ID NO: 52526 - RNA, 19 nt, Artificial Sequence
  Description of Artificial Sequence: Synthetic oligonucleotide
ggauugaucguguagguga

SEQ ID NO: 52527 - RNA, 19 nt, Artificial Sequence
  Description of Artificial Sequence: Synthetic oligonucleotide
gaggacacgaauauaaucu

SEQ ID NO: 52528 - RNA, 19 nt, Artificial Sequence
  Description of Artificial Sequence: Synthetic oligonucleotide
ugucaacauggacauagaa

SEQ ID NO: 52529 - RNA, 19 nt, Artificial Sequence
  Description of Artificial Sequence: Synthetic oligonucleotide
cuuguuagcucgucgggug

SEQ ID NO: 52530 - RNA, 19 nt, Artificial Sequence
  Description of Artificial Sequence: Synthetic oligonucleotide
uguagcacuagcacugcau

SEQ ID NO: 52531 - RNA, 19 nt, Artificial Sequence
  Description of Artificial Sequence: Synthetic oligonucleotide
gcauacauaggguugaaca

SEQ ID NO: 52532 - RNA, 19 nt, Artificial Sequence
  Description of Artificial Sequence: Synthetic oligonucleotide
guauaauggcaucagccuc

SEQ ID NO: 52533 - RNA, 19 nt, Artificial Sequence
  Description of Artificial Sequence: Synthetic oligonucleotide
caacaagagguguagccug

SEQ ID NO: 52534 - RNA, 19 nt, Artificial Sequence
  Description of Artificial Sequence: Synthetic oligonucleotide
acugcgccuuaacacaggg

SEQ ID NO: 52535 - RNA, 19 nt, Artificial Sequence
  Description of Artificial Sequence: Synthetic oligonucleotide
cuguaguacccucaagaag

SEQ ID NO: 52536 - RNA, 19 nt, Artificial Sequence
  Description of Artificial Sequence: Synthetic oligonucleotide
guauaccugacagauuugc

SEQ ID NO: 52537 - RNA, 19 nt, Artificial Sequence
  Description of Artificial Sequence: Synthetic oligonucleotide
gaacaaguaugcacugggg

SEQ ID NO: 52538 - RNA, 19 nt, Artificial Sequence
  Description of Artificial Sequence: Synthetic oligonucleotide
ugauuuuagauuugcccuu

SEQ ID NO: 52539 - RNA, 19 nt, Artificial Sequence
  Description of Artificial Sequence: Synthetic oligonucleotide
uauuguugcucagaauaga

SEQ ID NO: 52540 - RNA, 19 nt, Artificial Sequence
  Description of Artificial Sequence: Synthetic oligonucleotide
aaccuagccugccugucug

SEQ ID NO: 52541 - RNA, 19 nt, Artificial Sequence
  Description of Artificial Sequence: Synthetic oligonucleotide
uugaaucauuagcugugca

SEQ ID NO: 52542 - RNA, 19 nt, Artificial Sequence
  Description of Artificial Sequence: Synthetic oligonucleotide
guagcacuagcacugcaug

SEQ ID NO: 52543 - RNA, 19 nt, Artificial Sequence
  Description of Artificial Sequence: Synthetic oligonucleotide
aaggcauacauaggguuga

SEQ ID NO: 52544 - RNA, 19 nt, Artificial Sequence
  Description of Artificial Sequence: Synthetic oligonucleotide
uuugcccuuagaaucugaa

SEQ ID NO: 52545 - RNA, 19 nt, Artificial Sequence
  Description of Artificial Sequence: Synthetic oligonucleotide
gguccaguugauuaaaaca

SEQ ID NO: 52546 - RNA, 19 nt, Artificial Sequence
  Description of Artificial Sequence: Synthetic oligonucleotide
ugauguaugcaugggcagc

SEQ ID NO: 52547 - RNA, 19 nt, Artificial Sequence
  Description of Artificial Sequence: Synthetic oligonucleotide
agauaaacgaggcccuggu

SEQ ID NO: 52548 - RNA, 19 nt, Artificial Sequence
  Description of Artificial Sequence: Synthetic oligonucleotide
caugcaacaagagguguag

SEQ ID NO: 52549 - RNA, 19 nt, Artificial Sequence
  Description of Artificial Sequence: Synthetic oligonucleotide
aggaacgaaauuguaccag

SEQ ID NO: 52550 - RNA, 19 nt, Artificial Sequence
  Description of Artificial Sequence: Synthetic oligonucleotide
ucguaacuuaauuucccaa

SEQ ID NO: 52551 - RNA, 19 nt, Artificial Sequence
  Description of Artificial Sequence: Synthetic oligonucleotide
guaccaagcucaucuagac

SEQ ID NO: 52552 - RNA, 19 nt, Artificial Sequence
  Description of Artificial Sequence: Synthetic oligonucleotide
agguaagaguccuuucuga

SEQ ID NO: 52553 - RNA, 19 nt, Artificial Sequence
  Description of Artificial Sequence: Synthetic oligonucleotide
uuaagggugcaggggagag

SEQ ID NO: 52554 - RNA, 19 nt, Artificial Sequence
  Description of Artificial Sequence: Synthetic oligonucleotide
uucugagaugccacaauua

SEQ ID NO: 52555 - RNA, 19 nt, Artificial Sequence
  Description of Artificial Sequence: Synthetic oligonucleotide
ugcccagcaaucaccaccu

SEQ ID NO: 52556 - RNA, 19 nt, Artificial Sequence
  Description of Artificial Sequence: Synthetic oligonucleotide
cugguuuaacacagugcgg

SEQ ID NO: 52557 - RNA, 19 nt, Artificial Sequence
  Description of Artificial Sequence: Synthetic oligonucleotide
ugggacgguguaaagguuc

SEQ ID NO: 52558 - RNA, 19 nt, Artificial Sequence
  Description of Artificial Sequence: Synthetic oligonucleotide
aaggugagugguggacugc

SEQ ID NO: 52559 - RNA, 19 nt, Artificial Sequence
  Description of Artificial Sequence: Synthetic oligonucleotide
ggucaauauggauuugcag

SEQ ID NO: 52560 - RNA, 19 nt, Artificial Sequence
  Description of Artificial Sequence: Synthetic oligonucleotide
cauagccuaguguggagac

SEQ ID NO: 52561 - RNA, 19 nt, Artificial Sequence
  Description of Artificial Sequence: Synthetic oligonucleotide
ugacagauuugcccaagau

SEQ ID NO: 52562 - RNA, 19 nt, Artificial Sequence
  Description of Artificial Sequence: Synthetic oligonucleotide
aaagucgaggacacgaaua

SEQ ID NO: 52563 - RNA, 19 nt, Artificial Sequence
  Description of Artificial Sequence: Synthetic oligonucleotide
ugaucguguaggugacccg

SEQ ID NO: 52564 - RNA, 19 nt, Artificial Sequence
  Description of Artificial Sequence: Synthetic oligonucleotide
uagcacuagcacugcaugc

SEQ ID NO: 52565 - RNA, 19 nt, Artificial Sequence
  Description of Artificial Sequence: Synthetic oligonucleotide
aauaagcccuggguagaag

SEQ ID NO: 52566 - RNA, 19 nt, Artificial Sequence
  Description of Artificial Sequence: Synthetic oligonucleotide
agacucacgcugcucacug

SEQ ID NO: 52567 - RNA, 19 nt, Artificial Sequence
  Description of Artificial Sequence: Synthetic oligonucleotide
gaggaacgaaauuguacca

SEQ ID NO: 52568 - RNA, 19 nt, Artificial Sequence
  Description of Artificial Sequence: Synthetic oligonucleotide
agcucaauuccuuccaaua

SEQ ID NO: 52569 - RNA, 19 nt, Artificial Sequence
  Description of Artificial Sequence: Synthetic oligonucleotide
uaacacagugcggugaguc

SEQ ID NO: 52570 - RNA, 19 nt, Artificial Sequence
  Description of Artificial Sequence: Synthetic oligonucleotide
agauuugcccaagaugugu

SEQ ID NO: 52571 - RNA, 19 nt, Artificial Sequence
  Description of Artificial Sequence: Synthetic oligonucleotide
gaccguguaaaguagcacu

SEQ ID NO: 52572 - RNA, 19 nt, Artificial Sequence
  Description of Artificial Sequence: Synthetic oligonucleotide
ugcggugagucucugcaaa

SEQ ID NO: 52573 - RNA, 19 nt, Artificial Sequence
  Description of Artificial Sequence: Synthetic oligonucleotide
ugaguaucuugagguauug

SEQ ID NO: 52574 - RNA, 19 nt, Artificial Sequence
  Description of Artificial Sequence: Synthetic oligonucleotide
ugacccggucaccagguga

SEQ ID NO: 52575 - RNA, 19 nt, Artificial Sequence
  Description of Artificial Sequence: Synthetic oligonucleotide
cuacugcgccuuaacacag

SEQ ID NO: 52576 - RNA, 19 nt, Artificial Sequence
  Description of Artificial Sequence: Synthetic oligonucleotide
auggauugaucguguaggu

SEQ ID NO: 52577 - RNA, 19 nt, Artificial Sequence
  Description of Artificial Sequence: Synthetic oligonucleotide
guaucuugagguauuggga

SEQ ID NO: 52578 - RNA, 19 nt, Artificial Sequence
  Description of Artificial Sequence: Synthetic oligonucleotide
uaccaagcucaucuagacu

SEQ ID NO: 52579 - RNA, 19 nt, Artificial Sequence
  Description of Artificial Sequence: Synthetic oligonucleotide
guggcggagcuucucaaag

SEQ ID NO: 52580 - RNA, 19 nt, Artificial Sequence
  Description of Artificial Sequence: Synthetic oligonucleotide
uggcggaaguauuugcgcu

SEQ ID NO: 52581 - RNA, 19 nt, Artificial Sequence
  Description of Artificial Sequence: Synthetic oligonucleotide
guuacaaugggaagaugga

SEQ ID NO: 52582 - RNA, 19 nt, Artificial Sequence
  Description of Artificial Sequence: Synthetic oligonucleotide
aguacccgugacaaacugg

SEQ ID NO: 52583 - RNA, 19 nt, Artificial Sequence
  Description of Artificial Sequence: Synthetic oligonucleotide
acacagugcggugagucuc

SEQ ID NO: 52584 - RNA, 19 nt, Artificial Sequence
  Description of Artificial Sequence: Synthetic oligonucleotide
gcgcuugacaucaaagucg

SEQ ID NO: 52585 - RNA, 19 nt, Artificial Sequence
  Description of Artificial Sequence: Synthetic oligonucleotide
uacugcgccuuaacacagg

SEQ ID NO: 52586 - RNA, 19 nt, Artificial Sequence
  Description of Artificial Sequence: Synthetic oligonucleotide
ccagguccaacaaugguag

SEQ ID NO: 52587 - RNA, 19 nt, Artificial Sequence
  Description of Artificial Sequence: Synthetic oligonucleotide
aucauuagcugugcacauc

SEQ ID NO: 52588 - RNA, 19 nt, Artificial Sequence
  Description of Artificial Sequence: Synthetic oligonucleotide
auugaucguguaggugacc

SEQ ID NO: 52589 - RNA, 19 nt, Artificial Sequence
  Description of Artificial Sequence: Synthetic oligonucleotide
cucgaccuaaucuggaaga

SEQ ID NO: 52590 - RNA, 19 nt, Artificial Sequence
  Description of Artificial Sequence: Synthetic oligonucleotide
gucgaggacacgaauauaa

SEQ ID NO: 52591 - RNA, 19 nt, Artificial Sequence
  Description of Artificial Sequence: Synthetic oligonucleotide
uggauugaucguguaggug

SEQ ID NO: 52592 - RNA, 19 nt, Artificial Sequence
  Description of Artificial Sequence: Synthetic oligonucleotide
gauugaucguguaggugac

SEQ ID NO: 52593 - RNA, 19 nt, Artificial Sequence
  Description of Artificial Sequence: Synthetic oligonucleotide
caucaacacauuccaagca

SEQ ID NO: 52594 - RNA, 19 nt, Artificial Sequence
  Description of Artificial Sequence: Synthetic oligonucleotide
ucgaggacacgaauauaau

SEQ ID NO: 52595 - RNA, 19 nt, Artificial Sequence
  Description of Artificial Sequence: Synthetic oligonucleotide
cuuuggcuacaaugcgucc

SEQ ID NO: 52596 - RNA, 19 nt, Artificial Sequence
  Description of Artificial Sequence: Synthetic oligonucleotide
acguaccauuuguauaaug

SEQ ID NO: 52597 - RNA, 19 nt, Artificial Sequence
  Description of Artificial Sequence: Synthetic oligonucleotide
uuguuagcucgucgggugu

SEQ ID NO: 52598 - RNA, 19 nt, Artificial Sequence
  Description of Artificial Sequence: Synthetic oligonucleotide
gagccuaaacuggaggaac

SEQ ID NO: 52599 - RNA, 19 nt, Artificial Sequence
  Description of Artificial Sequence: Synthetic oligonucleotide
ggcuacugcgccuuaacac

SEQ ID NO: 52600 - RNA, 19 nt, Artificial Sequence
  Description of Artificial Sequence: Synthetic oligonucleotide
gguugaacaucucucgaga

SEQ ID NO: 52601 - RNA, 19 nt, Artificial Sequence
  Description of Artificial Sequence: Synthetic oligonucleotide
cgaaauuguaccagaagug

SEQ ID NO: 52602 - RNA, 19 nt, Artificial Sequence
  Description of Artificial Sequence: Synthetic oligonucleotide
agguauugggagauggcug

SEQ ID NO: 52603 - RNA, 19 nt, Artificial Sequence
  Description of Artificial Sequence: Synthetic oligonucleotide
caggagauuugcgaugcag

SEQ ID NO: 52604 - RNA, 19 nt, Artificial Sequence
  Description of Artificial Sequence: Synthetic oligonucleotide
acccucacguaccauuugu

SEQ ID NO: 52605 - RNA, 19 nt, Artificial Sequence
  Description of Artificial Sequence: Synthetic oligonucleotide
ugccguaguaucugguuua

SEQ ID NO: 52606 - RNA, 19 nt, Artificial Sequence
  Description of Artificial Sequence: Synthetic oligonucleotide
gacccggucaccaggugag

SEQ ID NO: 52607 - RNA, 19 nt, Artificial Sequence
  Description of Artificial Sequence: Synthetic oligonucleotide
aguaggcagggccuaacua

SEQ ID NO: 52608 - RNA, 19 nt, Artificial Sequence
  Description of Artificial Sequence: Synthetic oligonucleotide
uuguauuguugcucagaau

SEQ ID NO: 52609 - RNA, 19 nt, Artificial Sequence
  Description of Artificial Sequence: Synthetic oligonucleotide
caagagguguagccugagc

SEQ ID NO: 52610 - RNA, 19 nt, Artificial Sequence
  Description of Artificial Sequence: Synthetic oligonucleotide
acuccguugugaaaaguga

SEQ ID NO: 52611 - RNA, 19 nt, Artificial Sequence
  Description of Artificial Sequence: Synthetic oligonucleotide
uucaugugucuaguaugug

SEQ ID NO: 52612 - RNA, 19 nt, Artificial Sequence
  Description of Artificial Sequence: Synthetic oligonucleotide
ugacccucacguaccauuu

SEQ ID NO: 52613 - RNA, 19 nt, Artificial Sequence
  Description of Artificial Sequence: Synthetic oligonucleotide
guugucuccgcgcccuuug

SEQ ID NO: 52614 - RNA, 19 nt, Artificial Sequence
  Description of Artificial Sequence: Synthetic oligonucleotide
ugcucgaccuaaucuggaa

SEQ ID NO: 52615 - RNA, 19 nt, Artificial Sequence
  Description of Artificial Sequence: Synthetic oligonucleotide
ucgucgggugucaucccgc

SEQ ID NO: 52616 - RNA, 19 nt, Artificial Sequence
  Description of Artificial Sequence: Synthetic oligonucleotide
accgaacacaaagcuuaac

SEQ ID NO: 52617 - RNA, 19 nt, Artificial Sequence
  Description of Artificial Sequence: Synthetic oligonucleotide
uggccaauaguagcaugug

SEQ ID NO: 52618 - RNA, 19 nt, Artificial Sequence
  Description of Artificial Sequence: Synthetic oligonucleotide
gagauuugcgaugcagcuc

SEQ ID NO: 52619 - RNA, 19 nt, Artificial Sequence
  Description of Artificial Sequence: Synthetic oligonucleotide
cucacguaccauuuguaua

SEQ ID NO: 52620 - RNA, 19 nt, Artificial Sequence
  Description of Artificial Sequence: Synthetic oligonucleotide
auaguagcauguggcggag

SEQ ID NO: 52621 - RNA, 19 nt, Artificial Sequence
  Description of Artificial Sequence: Synthetic oligonucleotide
ggugaguuggugaauuuca

SEQ ID NO: 52622 - RNA, 19 nt, Artificial Sequence
  Description of Artificial Sequence: Synthetic oligonucleotide
aggcuacugcgccuuaaca

SEQ ID NO: 52623 - RNA, 19 nt, Artificial Sequence
  Description of Artificial Sequence: Synthetic oligonucleotide
gcucgaccuaaucuggaag

SEQ ID NO: 52624 - RNA, 19 nt, Artificial Sequence
  Description of Artificial Sequence: Synthetic oligonucleotide
gauuuuagauuugcccuua

SEQ ID NO: 52625 - RNA, 19 nt, Artificial Sequence
  Description of Artificial Sequence: Synthetic oligonucleotide
aggaaccuagccugccugu

SEQ ID NO: 52626 - RNA, 19 nt, Artificial Sequence
  Description of Artificial Sequence: Synthetic oligonucleotide
ucgaccuaaucuggaagaa

SEQ ID NO: 52627 - RNA, 19 nt, Artificial Sequence
  Description of Artificial Sequence: Synthetic oligonucleotide
uugcgaugcagcucccuau

SEQ ID NO: 52628 - RNA, 19 nt, Artificial Sequence
  Description of Artificial Sequence: Synthetic oligonucleotide
accuuggaaguacccguga

SEQ ID NO: 52629 - RNA, 19 nt, Artificial Sequence
  Description of Artificial Sequence: Synthetic oligonucleotide
ggaggcgguugucauauac

SEQ ID NO: 52630 - RNA, 19 nt, Artificial Sequence
  Description of Artificial Sequence: Synthetic oligonucleotide
ugucuccgcgcccuuugac

SEQ ID NO: 52631 - RNA, 19 nt, Artificial Sequence
  Description of Artificial Sequence: Synthetic oligonucleotide
guccaacaaugguagaaaa

SEQ ID NO: 52632 - RNA, 19 nt, Artificial Sequence
  Description of Artificial Sequence: Synthetic oligonucleotide
cugcgccuuaacacagggg

SEQ ID NO: 52633 - RNA, 19 nt, Artificial Sequence
  Description of Artificial Sequence: Synthetic oligonucleotide
cuggugugauuuuagauuu

SEQ ID NO: 52634 - RNA, 19 nt, Artificial Sequence
  Description of Artificial Sequence: Synthetic oligonucleotide
uagcauguaccaagcucau

SEQ ID NO: 52635 - RNA, 19 nt, Artificial Sequence
  Description of Artificial Sequence: Synthetic oligonucleotide
ggguuaagggugcagggga

SEQ ID NO: 52636 - RNA, 19 nt, Artificial Sequence
  Description of Artificial Sequence: Synthetic oligonucleotide
uguuggcuccauuggguuu

SEQ ID NO: 52637 - RNA, 19 nt, Artificial Sequence
  Description of Artificial Sequence: Synthetic oligonucleotide
gaggcgguugucauauaca

SEQ ID NO: 52638 - RNA, 19 nt, Artificial Sequence
  Description of Artificial Sequence: Synthetic oligonucleotide
gagucaacagucagcaagu

SEQ ID NO: 52639 - RNA, 19 nt, Artificial Sequence
  Description of Artificial Sequence: Synthetic oligonucleotide
gacgguguaaagguuccaa

SEQ ID NO: 52640 - RNA, 19 nt, Artificial Sequence
  Description of Artificial Sequence: Synthetic oligonucleotide
ugugugcaagagguuuucu

SEQ ID NO: 52641 - RNA, 19 nt, Artificial Sequence
  Description of Artificial Sequence: Synthetic oligonucleotide
uauugggagauggcugguc

SEQ ID NO: 52642 - RNA, 19 nt, Artificial Sequence
  Description of Artificial Sequence: Synthetic oligonucleotide
ugguggacugccguaguau

SEQ ID NO: 52643 - RNA, 19 nt, Artificial Sequence
  Description of Artificial Sequence: Synthetic oligonucleotide
gaaguaggcagggccuaac

SEQ ID NO: 52644 - RNA, 19 nt, Artificial Sequence
  Description of Artificial Sequence: Synthetic oligonucleotide
uccggacagaugccucuga

SEQ ID NO: 52645 - RNA, 19 nt, Artificial Sequence
  Description of Artificial Sequence: Synthetic oligonucleotide
augaccuguaguacccuca

SEQ ID NO: 52646 - RNA, 19 nt, Artificial Sequence
  Description of Artificial Sequence: Synthetic oligonucleotide
aggaccguguaaaguagca

SEQ ID NO: 52647 - RNA, 19 nt, Artificial Sequence
  Description of Artificial Sequence: Synthetic oligonucleotide
agucaacagucagcaagug

SEQ ID NO: 52648 - RNA, 19 nt, Artificial Sequence
  Description of Artificial Sequence: Synthetic oligonucleotide
gagucucugcaaagcggag

SEQ ID NO: 52649 - RNA, 19 nt, Artificial Sequence
  Description of Artificial Sequence: Synthetic oligonucleotide
uugucuccgcgcccuuuga

SEQ ID NO: 52650 - RNA, 19 nt, Artificial Sequence
  Description of Artificial Sequence: Synthetic oligonucleotide
ucccuauaggagucuucaa

SEQ ID NO: 52651 - RNA, 19 nt, Artificial Sequence
  Description of Artificial Sequence: Synthetic oligonucleotide
ggagauuugcgaugcagcu

SEQ ID NO: 52652 - RNA, 19 nt, Artificial Sequence
  Description of Artificial Sequence: Synthetic oligonucleotide
gcccaagauguguuuguag

SEQ ID NO: 52653 - RNA, 19 nt, Artificial Sequence
  Description of Artificial Sequence: Synthetic oligonucleotide
ggucacggcgaacaugcac

SEQ ID NO: 52654 - RNA, 19 nt, Artificial Sequence
  Description of Artificial Sequence: Synthetic oligonucleotide
guuugaggucacgaacuuc

SEQ ID NO: 52655 - RNA, 19 nt, Artificial Sequence
  Description of Artificial Sequence: Synthetic oligonucleotide
uguuagcucgucggguguc

SEQ ID NO: 52656 - RNA, 19 nt, Artificial Sequence
  Description of Artificial Sequence: Synthetic oligonucleotide
gucacggcgaacaugcacu

SEQ ID NO: 52657 - RNA, 19 nt, Artificial Sequence
  Description of Artificial Sequence: Synthetic oligonucleotide
gcuuuggcuacaaugcguc

SEQ ID NO: 52658 - RNA, 19 nt, Artificial Sequence
  Description of Artificial Sequence: Synthetic oligonucleotide
ggggaaccgaacacaaagc

SEQ ID NO: 52659 - RNA, 19 nt, Artificial Sequence
  Description of Artificial Sequence: Synthetic oligonucleotide
gcuggugugauuuuagauu

SEQ ID NO: 52660 - RNA, 19 nt, Artificial Sequence
  Description of Artificial Sequence: Synthetic oligonucleotide
aaccgaacacaaagcuuaa

SEQ ID NO: 52661 - RNA, 19 nt, Artificial Sequence
  Description of Artificial Sequence: Synthetic oligonucleotide
auagccuaguguggagaca

SEQ ID NO: 52662 - RNA, 19 nt, Artificial Sequence
  Description of Artificial Sequence: Synthetic oligonucleotide
guaagaguccuuucugauu

SEQ ID NO: 52663 - RNA, 19 nt, Artificial Sequence
  Description of Artificial Sequence: Synthetic oligonucleotide
auggugaguuggugaauuu

SEQ ID NO: 52664 - RNA, 19 nt, Artificial Sequence
  Description of Artificial Sequence: Synthetic oligonucleotide
gcagggccuaacuaggcca

SEQ ID NO: 52665 - RNA, 19 nt, Artificial Sequence
  Description of Artificial Sequence: Synthetic oligonucleotide
cgaggacacgaauauaauc

SEQ ID NO: 52666 - RNA, 19 nt, Artificial Sequence
  Description of Artificial Sequence: Synthetic oligonucleotide
acugaggaacgaaauugua

SEQ ID NO: 52667 - RNA, 19 nt, Artificial Sequence
  Description of Artificial Sequence: Synthetic oligonucleotide
agggccuaacuaggccagc

SEQ ID NO: 52668 - RNA, 19 nt, Artificial Sequence
  Description of Artificial Sequence: Synthetic oligonucleotide
caagggucgcuucugagau

SEQ ID NO: 52669 - RNA, 19 nt, Artificial Sequence
  Description of Artificial Sequence: Synthetic oligonucleotide
uauuugcgcuugacaucaa

SEQ ID NO: 52670 - RNA, 19 nt, Artificial Sequence
  Description of Artificial Sequence: Synthetic oligonucleotide
auuugcgaugcagcucccu

SEQ ID NO: 52671 - RNA, 19 nt, Artificial Sequence
  Description of Artificial Sequence: Synthetic oligonucleotide
aggucccuccaaaggcuac

SEQ ID NO: 52672 - RNA, 19 nt, Artificial Sequence
  Description of Artificial Sequence: Synthetic oligonucleotide
gguaagaguccuuucugau

SEQ ID NO: 52673 - RNA, 19 nt, Artificial Sequence
  Description of Artificial Sequence: Synthetic oligonucleotide
gguccaacaaugguagaaa

SEQ ID NO: 52674 - RNA, 19 nt, Artificial Sequence
  Description of Artificial Sequence: Synthetic oligonucleotide
gaaguacccgugacaaacu

SEQ ID NO: 52675 - RNA, 19 nt, Artificial Sequence
  Description of Artificial Sequence: Synthetic oligonucleotide
ggaacgcaaugcucuccag

SEQ ID NO: 52676 - RNA, 19 nt, Artificial Sequence
  Description of Artificial Sequence: Synthetic oligonucleotide
gauuugcgaugcagcuccc

SEQ ID NO: 52677 - RNA, 19 nt, Artificial Sequence
  Description of Artificial Sequence: Synthetic oligonucleotide
gguuaggguuacaauggga

SEQ ID NO: 52678 - RNA, 19 nt, Artificial Sequence
  Description of Artificial Sequence: Synthetic oligonucleotide
gggacgguguaaagguucc

SEQ ID NO: 52679 - RNA, 19 nt, Artificial Sequence
  Description of Artificial Sequence: Synthetic oligonucleotide
guacggaacaaggcauaca

SEQ ID NO: 52680 - RNA, 19 nt, Artificial Sequence
  Description of Artificial Sequence: Synthetic oligonucleotide
caguugggacaaacagguc

SEQ ID NO: 52681 - RNA, 19 nt, Artificial Sequence
  Description of Artificial Sequence: Synthetic oligonucleotide
gggucaauauggauuugca

SEQ ID NO: 52682 - RNA, 19 nt, Artificial Sequence
  Description of Artificial Sequence: Synthetic oligonucleotide
guuguugucuccgcgcccu

SEQ ID NO: 52683 - RNA, 19 nt, Artificial Sequence
  Description of Artificial Sequence: Synthetic oligonucleotide
uuugacccucacguaccau

SEQ ID NO: 52684 - RNA, 19 nt, Artificial Sequence
  Description of Artificial Sequence: Synthetic oligonucleotide
gauuugcccaagauguguu

SEQ ID NO: 52685 - RNA, 19 nt, Artificial Sequence
  Description of Artificial Sequence: Synthetic oligonucleotide
gacucacgcugcucacuga

SEQ ID NO: 52686 - RNA, 19 nt, Artificial Sequence
  Description of Artificial Sequence: Synthetic oligonucleotide
cuaacuaggccagcccaaa

SEQ ID NO: 52687 - RNA, 19 nt, Artificial Sequence
  Description of Artificial Sequence: Synthetic oligonucleotide
guaguacccucaagaagaa

SEQ ID NO: 52688 - RNA, 19 nt, Artificial Sequence
  Description of Artificial Sequence: Synthetic oligonucleotide
gcccuuagaaucugaaggu

SEQ ID NO: 52689 - RNA, 19 nt, Artificial Sequence
  Description of Artificial Sequence: Synthetic oligonucleotide
aggagucaacagucagcaa

SEQ ID NO: 52690 - RNA, 19 nt, Artificial Sequence
  Description of Artificial Sequence: Synthetic oligonucleotide
gucgauggugggcagcccu

SEQ ID NO: 52691 - RNA, 19 nt, Artificial Sequence
  Description of Artificial Sequence: Synthetic oligonucleotide
ugaggcgcuuuggaaugau

SEQ ID NO: 52692 - RNA, 19 nt, Artificial Sequence
  Description of Artificial Sequence: Synthetic oligonucleotide
guuagcucgucggguguca

SEQ ID NO: 52693 - RNA, 19 nt, Artificial Sequence
  Description of Artificial Sequence: Synthetic oligonucleotide
ggaccguguaaaguagcac

SEQ ID NO: 52694 - RNA, 19 nt, Artificial Sequence
  Description of Artificial Sequence: Synthetic oligonucleotide
ccccuagcauguaccaagc

SEQ ID NO: 52695 - RNA, 19 nt, Artificial Sequence
  Description of Artificial Sequence: Synthetic oligonucleotide
ccguguaaaguagcacucc

SEQ ID NO: 52696 - RNA, 19 nt, Artificial Sequence
  Description of Artificial Sequence: Synthetic oligonucleotide
gauggaaaugaggcgcuuu

SEQ ID NO: 52697 - RNA, 19 nt, Artificial Sequence
  Description of Artificial Sequence: Synthetic oligonucleotide
caggcgaucuguggaucug

SEQ ID NO: 52698 - RNA, 19 nt, Artificial Sequence
  Description of Artificial Sequence: Synthetic oligonucleotide
ccgacguugcugcuuguug

SEQ ID NO: 52699 - RNA, 19 nt, Artificial Sequence
  Description of Artificial Sequence: Synthetic oligonucleotide
uuagcucgucgggugucau

SEQ ID NO: 52700 - RNA, 19 nt, Artificial Sequence
  Description of Artificial Sequence: Synthetic oligonucleotide
cacggcgaacaugcacugc

SEQ ID NO: 52701 - RNA, 19 nt, Artificial Sequence
  Description of Artificial Sequence: Synthetic oligonucleotide
uggcacggucugcuugguc

SEQ ID NO: 52702 - RNA, 19 nt, Artificial Sequence
  Description of Artificial Sequence: Synthetic oligonucleotide
cuguagcacuagcacugca

SEQ ID NO: 52703 - RNA, 19 nt, Artificial Sequence
  Description of Artificial Sequence: Synthetic oligonucleotide
cugacugaggaacgaaauu

SEQ ID NO: 52704 - RNA, 19 nt, Artificial Sequence
  Description of Artificial Sequence: Synthetic oligonucleotide
cucgagagaugaucaugua

SEQ ID NO: 52705 - RNA, 19 nt, Artificial Sequence
  Description of Artificial Sequence: Synthetic oligonucleotide
aucguguaggugacccggu

SEQ ID NO: 52706 - RNA, 19 nt, Artificial Sequence
  Description of Artificial Sequence: Synthetic oligonucleotide
ggcagcccugauauaagca

SEQ ID NO: 52707 - RNA, 19 nt, Artificial Sequence
  Description of Artificial Sequence: Synthetic oligonucleotide
gcgcccuuugacccucacg

SEQ ID NO: 52708 - RNA, 19 nt, Artificial Sequence
  Description of Artificial Sequence: Synthetic oligonucleotide
gugacccggucaccaggug

SEQ ID NO: 52709 - RNA, 19 nt, Artificial Sequence
  Description of Artificial Sequence: Synthetic oligonucleotide
aguaugcacuggggaagau

SEQ ID NO: 52710 - RNA, 19 nt, Artificial Sequence
  Description of Artificial Sequence: Synthetic oligonucleotide
uguugucuccgcgcccuuu

SEQ ID NO: 52711 - RNA, 19 nt, Artificial Sequence
  Description of Artificial Sequence: Synthetic oligonucleotide
ggucaccaggugagguacg

SEQ ID NO: 52712 - RNA, 19 nt, Artificial Sequence
  Description of Artificial Sequence: Synthetic oligonucleotide
acccggucaccaggugagg

SEQ ID NO: 52713 - RNA, 19 nt, Artificial Sequence
  Description of Artificial Sequence: Synthetic oligonucleotide
uuguugucuccgcgcccuu

SEQ ID NO: 52714 - RNA, 19 nt, Artificial Sequence
  Description of Artificial Sequence: Synthetic oligonucleotide
gugcucgaccuaaucugga

SEQ ID NO: 52715 - RNA, 19 nt, Artificial Sequence
  Description of Artificial Sequence: Synthetic oligonucleotide
ggaaccuagccugccuguc

SEQ ID NO: 52716 - RNA, 19 nt, Artificial Sequence
  Description of Artificial Sequence: Synthetic oligonucleotide
cacagugcggugagucucu

SEQ ID NO: 52717 - RNA, 19 nt, Artificial Sequence
  Description of Artificial Sequence: Synthetic oligonucleotide
gugcggugagucucugcaa

SEQ ID NO: 52718 - RNA, 19 nt, Artificial Sequence
  Description of Artificial Sequence: Synthetic oligonucleotide
uccgcgcccuuugacccuc

SEQ ID NO: 52719 - RNA, 19 nt, Artificial Sequence
  Description of Artificial Sequence: Synthetic oligonucleotide
aggcauacauaggguugaa

SEQ ID NO: 52720 - RNA, 19 nt, Artificial Sequence
  Description of Artificial Sequence: Synthetic oligonucleotide
augggacgguguaaagguu

SEQ ID NO: 52721 - RNA, 19 nt, Artificial Sequence
  Description of Artificial Sequence: Synthetic oligonucleotide
ggugaggucauagccuagu

SEQ ID NO: 52722 - RNA, 19 nt, Artificial Sequence
  Description of Artificial Sequence: Synthetic oligonucleotide
cugccguaguaucugguuu

SEQ ID NO: 52723 - RNA, 19 nt, Artificial Sequence
  Description of Artificial Sequence: Synthetic oligonucleotide
ggguagaagcauccauacu

SEQ ID NO: 52724 - RNA, 19 nt, Artificial Sequence
  Description of Artificial Sequence: Synthetic oligonucleotide
caggugagguacggaacaa

SEQ ID NO: 52725 - RNA, 19 nt, Artificial Sequence
  Description of Artificial Sequence: Synthetic oligonucleotide
cucacgcugcucacugagu

SEQ ID NO: 52726 - RNA, 19 nt, Artificial Sequence
  Description of Artificial Sequence: Synthetic oligonucleotide
cccggccacccaagggucg

SEQ ID NO: 52727 - RNA, 19 nt, Artificial Sequence
  Description of Artificial Sequence: Synthetic oligonucleotide
ggcgaucuguggaucuguc

SEQ ID NO: 52728 - RNA, 19 nt, Artificial Sequence
  Description of Artificial Sequence: Synthetic oligonucleotide
gcaggcgaucuguggaucu

SEQ ID NO: 52729 - RNA, 19 nt, Artificial Sequence
  Description of Artificial Sequence: Synthetic oligonucleotide
gcucgucgggugucauccc

SEQ ID NO: 52730 - RNA, 19 nt, Artificial Sequence
  Description of Artificial Sequence: Synthetic oligonucleotide
ggggaccauggacggcaug

SEQ ID NO: 52731 - RNA, 19 nt, Artificial Sequence
  Description of Artificial Sequence: Synthetic oligonucleotide
gccacccaagggucgcuuc

SEQ ID NO: 52732 - RNA, 19 nt, Artificial Sequence
  Description of Artificial Sequence: Synthetic oligonucleotide
ggagccaaugugucaccau

SEQ ID NO: 52733 - RNA, 19 nt, Artificial Sequence
  Description of Artificial Sequence: Synthetic oligonucleotide
gccuaaacuggaggaaccu

SEQ ID NO: 52734 - RNA, 19 nt, Artificial Sequence
  Description of Artificial Sequence: Synthetic oligonucleotide
ggcgaacaugcacugccau

SEQ ID NO: 52735 - RNA, 19 nt, Artificial Sequence
  Description of Artificial Sequence: Synthetic oligonucleotide
gcucccuauaggagucuuc

SEQ ID NO: 52736 - RNA, 19 nt, Artificial Sequence
  Description of Artificial Sequence: Synthetic oligonucleotide
ccuaaacuggaggaaccua

SEQ ID NO: 52737 - RNA, 19 nt, Artificial Sequence
  Description of Artificial Sequence: Synthetic oligonucleotide
guguuagauuuuagaucau

SEQ ID NO: 52738 - RNA, 19 nt, Artificial Sequence
  Description of Artificial Sequence: Synthetic oligonucleotide
ggacgguguaaagguucca

SEQ ID NO: 52739 - RNA, 19 nt, Artificial Sequence
  Description of Artificial Sequence: Synthetic oligonucleotide
gccguaguaucugguuuaa

SEQ ID NO: 52740 - RNA, 19 nt, Artificial Sequence
  Description of Artificial Sequence: Synthetic oligonucleotide
ccguaguaucugguuuaac

SEQ ID NO: 52741 - RNA, 19 nt, Artificial Sequence
  Description of Artificial Sequence: Synthetic oligonucleotide
cccucacguaccauuugua

SEQ ID NO: 52742 - RNA, 19 nt, Artificial Sequence
  Description of Artificial Sequence: Synthetic oligonucleotide
gcuagacuccgacguugcu

SEQ ID NO: 52743 - RNA, 19 nt, Artificial Sequence
  Description of Artificial Sequence: Synthetic oligonucleotide
cgacguugcugcuuguugu

SEQ ID NO: 52744 - RNA, 19 nt, Artificial Sequence
  Description of Artificial Sequence: Synthetic oligonucleotide
cuggcuagacuccgacguu

SEQ ID NO: 52745 - RNA, 19 nt, Artificial Sequence
  Description of Artificial Sequence: Synthetic oligonucleotide
cuccgcgcccuuugacccu

SEQ ID NO: 52746 - RNA, 19 nt, Artificial Sequence
  Description of Artificial Sequence: Synthetic oligonucleotide
gggucgcuucugagaugcc

SEQ ID NO: 52747 - RNA, 19 nt, Artificial Sequence
  Description of Artificial Sequence: Synthetic oligonucleotide
ccacccaagggucgcuucu

SEQ ID NO: 52748 - RNA, 19 nt, Artificial Sequence
  Description of Artificial Sequence: Synthetic oligonucleotide
cccuuagaaucugaagguu

SEQ ID NO: 52749 - RNA, 19 nt, Artificial Sequence
  Description of Artificial Sequence: Synthetic oligonucleotide
cccuagcauguaccaagcu

SEQ ID NO: 52750 - RNA, 19 nt, Artificial Sequence
  Description of Artificial Sequence: Synthetic oligonucleotide
cuccgacguugcugcuugu

SEQ ID NO: 52751 - RNA, 19 nt, Artificial Sequence
  Description of Artificial Sequence: Synthetic oligonucleotide
cgcgcccuuugacccucac

SEQ ID NO: 52752 - RNA, 19 nt, Artificial Sequence
  Description of Artificial Sequence: Synthetic oligonucleotide
ggccacccaagggucgcuu

SEQ ID NO: 52753 - RNA, 19 nt, Artificial Sequence
  Description of Artificial Sequence: Synthetic oligonucleotide
ccgcgcccuuugacccuca

SEQ ID NO: 52754 - RNA, 19 nt, Artificial Sequence
  Description of Artificial Sequence: Synthetic oligonucleotide
acagcuuagacuaagaagc

SEQ ID NO: 52755 - RNA, 19 nt, Artificial Sequence
  Description of Artificial Sequence: Synthetic oligonucleotide
uauacuagggauuaugugc

SEQ ID NO: 52756 - RNA, 19 nt, Artificial Sequence
  Description of Artificial Sequence: Synthetic oligonucleotide
agaguauagacgcacauac

SEQ ID NO: 52757 - RNA, 19 nt, Artificial Sequence
  Description of Artificial Sequence: Synthetic oligonucleotide
aauagauccagacaacugu

SEQ ID NO: 52758 - RNA, 19 nt, Artificial Sequence
  Description of Artificial Sequence: Synthetic oligonucleotide
uguugaauaggaaaauucc

SEQ ID NO: 52759 - RNA, 19 nt, Artificial Sequence
  Description of Artificial Sequence: Synthetic oligonucleotide
caaacaucgaggaauaagg

SEQ ID NO: 52760 - RNA, 19 nt, Artificial Sequence
  Description of Artificial Sequence: Synthetic oligonucleotide
ugccugaccaccaaaaggg

SEQ ID NO: 52761 - RNA, 19 nt, Artificial Sequence
  Description of Artificial Sequence: Synthetic oligonucleotide
aacuaauacaacaugaaga

SEQ ID NO: 52762 - RNA, 19 nt, Artificial Sequence
  Description of Artificial Sequence: Synthetic oligonucleotide
uugaggacuaaacaggugc

SEQ ID NO: 52763 - RNA, 19 nt, Artificial Sequence
  Description of Artificial Sequence: Synthetic oligonucleotide
aauaggaaaauuccacucu

SEQ ID NO: 52764 - RNA, 19 nt, Artificial Sequence
  Description of Artificial Sequence: Synthetic oligonucleotide
uauagacgcacauaccugg

SEQ ID NO: 52765 - RNA, 19 nt, Artificial Sequence
  Description of Artificial Sequence: Synthetic oligonucleotide
uauauugguaguuaacaca

SEQ ID NO: 52766 - RNA, 19 nt, Artificial Sequence
  Description of Artificial Sequence: Synthetic oligonucleotide
ugguaguuaacacaaauaa

SEQ ID NO: 52767 - RNA, 19 nt, Artificial Sequence
  Description of Artificial Sequence: Synthetic oligonucleotide
aaguucacagcuuagacua

SEQ ID NO: 52768 - RNA, 19 nt, Artificial Sequence
  Description of Artificial Sequence: Synthetic oligonucleotide
aauaacacagcugaguuaa

SEQ ID NO: 52769 - RNA, 19 nt, Artificial Sequence
  Description of Artificial Sequence: Synthetic oligonucleotide
aguauagacgcacauaccu

SEQ ID NO: 52770 - RNA, 19 nt, Artificial Sequence
  Description of Artificial Sequence: Synthetic oligonucleotide
aucuucgcaaucuaaauug

SEQ ID NO: 52771 - RNA, 19 nt, Artificial Sequence
  Description of Artificial Sequence: Synthetic oligonucleotide
uguugaauagcccaugaaa

SEQ ID NO: 52772 - RNA, 19 nt, Artificial Sequence
  Description of Artificial Sequence: Synthetic oligonucleotide
uuuagguaaagaaaaggau

SEQ ID NO: 52773 - RNA, 19 nt, Artificial Sequence
  Description of Artificial Sequence: Synthetic oligonucleotide
aucgagauuucacuguggc

SEQ ID NO: 52774 - RNA, 19 nt, Artificial Sequence
  Description of Artificial Sequence: Synthetic oligonucleotide
cuagauaaugcacucagac

SEQ ID NO: 52775 - RNA, 19 nt, Artificial Sequence
  Description of Artificial Sequence: Synthetic oligonucleotide
ugcuagauaaugcacucag

SEQ ID NO: 52776 - RNA, 19 nt, Artificial Sequence
  Description of Artificial Sequence: Synthetic oligonucleotide
caaacaucguguauaaaag

SEQ ID NO: 52777 - RNA, 19 nt, Artificial Sequence
  Description of Artificial Sequence: Synthetic oligonucleotide
cugacugaaagcuguaugg

SEQ ID NO: 52778 - RNA, 19 nt, Artificial Sequence
  Description of Artificial Sequence: Synthetic oligonucleotide
uccacgagaaccuaagagc

SEQ ID NO: 52779 - RNA, 19 nt, Artificial Sequence
  Description of Artificial Sequence: Synthetic oligonucleotide
uuuggugacuggaagagcu

SEQ ID NO: 52780 - RNA, 19 nt, Artificial Sequence
  Description of Artificial Sequence: Synthetic oligonucleotide
aaagacuagaaggagggug

SEQ ID NO: 52781 - RNA, 19 nt, Artificial Sequence
  Description of Artificial Sequence: Synthetic oligonucleotide
uguuguauguucgaguaag

SEQ ID NO: 52782 - RNA, 19 nt, Artificial Sequence
  Description of Artificial Sequence: Synthetic oligonucleotide
gaaaucgcccaucagauga

SEQ ID NO: 52783 - RNA, 19 nt, Artificial Sequence
  Description of Artificial Sequence: Synthetic oligonucleotide
aguucguacagaacaaucc

SEQ ID NO: 52784 - RNA, 19 nt, Artificial Sequence
  Description of Artificial Sequence: Synthetic oligonucleotide
uuguugaauaggaaaauuc

SEQ ID NO: 52785 - RNA, 19 nt, Artificial Sequence
  Description of Artificial Sequence: Synthetic oligonucleotide
aaccgugguggauagacag

SEQ ID NO: 52786 - RNA, 19 nt, Artificial Sequence
  Description of Artificial Sequence: Synthetic oligonucleotide
aacaucgaggaauaaggga

SEQ ID NO: 52787 - RNA, 19 nt, Artificial Sequence
  Description of Artificial Sequence: Synthetic oligonucleotide
gauauuuguguugaagaag

SEQ ID NO: 52788 - RNA, 19 nt, Artificial Sequence
  Description of Artificial Sequence: Synthetic oligonucleotide
aguaagaucauuuggcaaa

SEQ ID NO: 52789 - RNA, 19 nt, Artificial Sequence
  Description of Artificial Sequence: Synthetic oligonucleotide
uuauauugguaguuaacac

SEQ ID NO: 52790 - RNA, 19 nt, Artificial Sequence
  Description of Artificial Sequence: Synthetic oligonucleotide
acacgaagcauuucccucc

SEQ ID NO: 52791 - RNA, 19 nt, Artificial Sequence
  Description of Artificial Sequence: Synthetic oligonucleotide
guaguuaacacaaauaaaa

SEQ ID NO: 52792 - RNA, 19 nt, Artificial Sequence
  Description of Artificial Sequence: Synthetic oligonucleotide
aauuaaccgugguggauag

SEQ ID NO: 52793 - RNA, 19 nt, Artificial Sequence
  Description of Artificial Sequence: Synthetic oligonucleotide
uuucugacuauacuaggga

SEQ ID NO: 52794 - RNA, 19 nt, Artificial Sequence
  Description of Artificial Sequence: Synthetic oligonucleotide
uguaguguaggcaguaagu

SEQ ID NO: 52795 - RNA, 19 nt, Artificial Sequence
  Description of Artificial Sequence: Synthetic oligonucleotide
guaccuuacauuuaaauua

SEQ ID NO: 52796 - RNA, 19 nt, Artificial Sequence
  Description of Artificial Sequence: Synthetic oligonucleotide
ugcuuugaagagccuaugg

SEQ ID NO: 52797 - RNA, 19 nt, Artificial Sequence
  Description of Artificial Sequence: Synthetic oligonucleotide
uaugaguugccauagguuu

SEQ ID NO: 52798 - RNA, 19 nt, Artificial Sequence
  Description of Artificial Sequence: Synthetic oligonucleotide
uucgcaaucuaaauugcac

SEQ ID NO: 52799 - RNA, 19 nt, Artificial Sequence
  Description of Artificial Sequence: Synthetic oligonucleotide
cugaguuaaaccagacugg

SEQ ID NO: 52800 - RNA, 19 nt, Artificial Sequence
  Description of Artificial Sequence: Synthetic oligonucleotide
ugacuggaagagcugagag

SEQ ID NO: 52801 - RNA, 19 nt, Artificial Sequence
  Description of Artificial Sequence: Synthetic oligonucleotide
uugaaaucgcccaucagau

SEQ ID NO: 52802 - RNA, 19 nt, Artificial Sequence
  Description of Artificial Sequence: Synthetic oligonucleotide
ugcucuaugugguaaauau

SEQ ID NO: 52803 - RNA, 19 nt, Artificial Sequence
  Description of Artificial Sequence: Synthetic oligonucleotide
aaacaucgaggaauaaggg

SEQ ID NO: 52804 - RNA, 19 nt, Artificial Sequence
  Description of Artificial Sequence: Synthetic oligonucleotide
cucaccgaaguucagacac

SEQ ID NO: 52805 - RNA, 19 nt, Artificial Sequence
  Description of Artificial Sequence: Synthetic oligonucleotide
uguugcuggacccacgaga

SEQ ID NO: 52806 - RNA, 19 nt, Artificial Sequence
  Description of Artificial Sequence: Synthetic oligonucleotide
uguauguucgaguaaggua

SEQ ID NO: 52807 - RNA, 19 nt, Artificial Sequence
  Description of Artificial Sequence: Synthetic oligonucleotide
augccugaccaccaaaagg

SEQ ID NO: 52808 - RNA, 19 nt, Artificial Sequence
  Description of Artificial Sequence: Synthetic oligonucleotide
auaguuauuccauuauaau

SEQ ID NO: 52809 - RNA, 19 nt, Artificial Sequence
  Description of Artificial Sequence: Synthetic oligonucleotide
cuuucuauccaaacugaac

SEQ ID NO: 52810 - RNA, 19 nt, Artificial Sequence
  Description of Artificial Sequence: Synthetic oligonucleotide
auugguaguuaacacaaau

SEQ ID NO: 52811 - RNA, 19 nt, Artificial Sequence
  Description of Artificial Sequence: Synthetic oligonucleotide
auuucugacuauacuaggg

SEQ ID NO: 52812 - RNA, 19 nt, Artificial Sequence
  Description of Artificial Sequence: Synthetic oligonucleotide
uuuacuccgucccucagaa

SEQ ID NO: 52813 - RNA, 19 nt, Artificial Sequence
  Description of Artificial Sequence: Synthetic oligonucleotide
ugaauagcccaugaaaagu

SEQ ID NO: 52814 - RNA, 19 nt, Artificial Sequence
  Description of Artificial Sequence: Synthetic oligonucleotide
guucguacagaacaauccc

SEQ ID NO: 52815 - RNA, 19 nt, Artificial Sequence
  Description of Artificial Sequence: Synthetic oligonucleotide
ugaguuaaaccagacuggc

SEQ ID NO: 52816 - RNA, 19 nt, Artificial Sequence
  Description of Artificial Sequence: Synthetic oligonucleotide
accuaacugcucuaugugg

SEQ ID NO: 52817 - RNA, 19 nt, Artificial Sequence
  Description of Artificial Sequence: Synthetic oligonucleotide
uacuccgucccucagaaau

SEQ ID NO: 52818 - RNA, 19 nt, Artificial Sequence
  Description of Artificial Sequence: Synthetic oligonucleotide
uguguaugaguugccauag

SEQ ID NO: 52819 - RNA, 19 nt, Artificial Sequence
  Description of Artificial Sequence: Synthetic oligonucleotide
uguuguuguauguucgagu

SEQ ID NO: 52820 - RNA, 19 nt, Artificial Sequence
  Description of Artificial Sequence: Synthetic oligonucleotide
ucuucgcaaucuaaauugc

SEQ ID NO: 52821 - RNA, 19 nt, Artificial Sequence
  Description of Artificial Sequence: Synthetic oligonucleotide
uggugauugaaaucgccca

SEQ ID NO: 52822 - RNA, 19 nt, Artificial Sequence
  Description of Artificial Sequence: Synthetic oligonucleotide
cuauacuagggauuaugug

SEQ ID NO: 52823 - RNA, 19 nt, Artificial Sequence
  Description of Artificial Sequence: Synthetic oligonucleotide
auuaugcuaagacucccca

SEQ ID NO: 52824 - RNA, 19 nt, Artificial Sequence
  Description of Artificial Sequence: Synthetic oligonucleotide
uuaucuucgcaaucuaaau

SEQ ID NO: 52825 - RNA, 19 nt, Artificial Sequence
  Description of Artificial Sequence: Synthetic oligonucleotide
ugcauuagaaaggaaugac

SEQ ID NO: 52826 - RNA, 19 nt, Artificial Sequence
  Description of Artificial Sequence: Synthetic oligonucleotide
aaugcuugagcggaacuga

SEQ ID NO: 52827 - RNA, 19 nt, Artificial Sequence
  Description of Artificial Sequence: Synthetic oligonucleotide
acucuuacacuguauuuca

SEQ ID NO: 52828 - RNA, 19 nt, Artificial Sequence
  Description of Artificial Sequence: Synthetic oligonucleotide
uucacaugccgcguuaucc

SEQ ID NO: 52829 - RNA, 19 nt, Artificial Sequence
  Description of Artificial Sequence: Synthetic oligonucleotide
aaauuaaccgugguggaua

SEQ ID NO: 52830 - RNA, 19 nt, Artificial Sequence
  Description of Artificial Sequence: Synthetic oligonucleotide
ugcuuucuauccaaacuga

SEQ ID NO: 52831 - RNA, 19 nt, Artificial Sequence
  Description of Artificial Sequence: Synthetic oligonucleotide
uccccauaauuuuagguaa

SEQ ID NO: 52832 - RNA, 19 nt, Artificial Sequence
  Description of Artificial Sequence: Synthetic oligonucleotide
uaucuucgcaaucuaaauu

SEQ ID NO: 52833 - RNA, 19 nt, Artificial Sequence
  Description of Artificial Sequence: Synthetic oligonucleotide
agaaaaggauaauaaucau

SEQ ID NO: 52834 - RNA, 19 nt, Artificial Sequence
  Description of Artificial Sequence: Synthetic oligonucleotide
uucgguugcauguuauaga

SEQ ID NO: 52835 - RNA, 19 nt, Artificial Sequence
  Description of Artificial Sequence: Synthetic oligonucleotide
ucgguugcauguuauagau

SEQ ID NO: 52836 - RNA, 19 nt, Artificial Sequence
  Description of Artificial Sequence: Synthetic oligonucleotide
agaaauuaaccguggugga

SEQ ID NO: 52837 - RNA, 19 nt, Artificial Sequence
  Description of Artificial Sequence: Synthetic oligonucleotide
acuccaucgagauuucacu

SEQ ID NO: 52838 - RNA, 19 nt, Artificial Sequence
  Description of Artificial Sequence: Synthetic oligonucleotide
uuaaaaugucaaacaucgu

SEQ ID NO: 52839 - RNA, 19 nt, Artificial Sequence
  Description of Artificial Sequence: Synthetic oligonucleotide
ucugacuauacuagggauu

SEQ ID NO: 52840 - RNA, 19 nt, Artificial Sequence
  Description of Artificial Sequence: Synthetic oligonucleotide
ucguacagaacaaucccaa

SEQ ID NO: 52841 - RNA, 19 nt, Artificial Sequence
  Description of Artificial Sequence: Synthetic oligonucleotide
aaccuaagagcuucacggu

SEQ ID NO: 52842 - RNA, 19 nt, Artificial Sequence
  Description of Artificial Sequence: Synthetic oligonucleotide
uaguucguacagaacaauc

SEQ ID NO: 52843 - RNA, 19 nt, Artificial Sequence
  Description of Artificial Sequence: Synthetic oligonucleotide
ucaaccuaacugcucuaug

SEQ ID NO: 52844 - RNA, 19 nt, Artificial Sequence
  Description of Artificial Sequence: Synthetic oligonucleotide
ugaggacuaaacaggugcu

SEQ ID NO: 52845 - RNA, 19 nt, Artificial Sequence
  Description of Artificial Sequence: Synthetic oligonucleotide
aaucgcccaucagaugacc

SEQ ID NO: 52846 - RNA, 19 nt, Artificial Sequence
  Description of Artificial Sequence: Synthetic oligonucleotide
cagucauuaguucguacag

SEQ ID NO: 52847 - RNA, 19 nt, Artificial Sequence
  Description of Artificial Sequence: Synthetic oligonucleotide
ugcaaagcagguacagaga

SEQ ID NO: 52848 - RNA, 19 nt, Artificial Sequence
  Description of Artificial Sequence: Synthetic oligonucleotide
uauguucgaguaagguagc

SEQ ID NO: 52849 - RNA, 19 nt, Artificial Sequence
  Description of Artificial Sequence: Synthetic oligonucleotide
ucacagcuuagacuaagaa

SEQ ID NO: 52850 - RNA, 19 nt, Artificial Sequence
  Description of Artificial Sequence: Synthetic oligonucleotide
uuguaugcaggugauauuu

SEQ ID NO: 52851 - RNA, 19 nt, Artificial Sequence
  Description of Artificial Sequence: Synthetic oligonucleotide
guuguuguauguucgagua

SEQ ID NO: 52852 - RNA, 19 nt, Artificial Sequence
  Description of Artificial Sequence: Synthetic oligonucleotide
agcgcuccacaacacaauc

SEQ ID NO: 52853 - RNA, 19 nt, Artificial Sequence
  Description of Artificial Sequence: Synthetic oligonucleotide
ucccuuauuggauggagau

SEQ ID NO: 52854 - RNA, 19 nt, Artificial Sequence
  Description of Artificial Sequence: Synthetic oligonucleotide
gucauuaguucguacagaa

SEQ ID NO: 52855 - RNA, 19 nt, Artificial Sequence
  Description of Artificial Sequence: Synthetic oligonucleotide
uggcguguaaguaauccau

SEQ ID NO: 52856 - RNA, 19 nt, Artificial Sequence
  Description of Artificial Sequence: Synthetic oligonucleotide
acuaaacaggugcugcaca

SEQ ID NO: 52857 - RNA, 19 nt, Artificial Sequence
  Description of Artificial Sequence: Synthetic oligonucleotide
gauucccuguuguuguaug

SEQ ID NO: 52858 - RNA, 19 nt, Artificial Sequence
  Description of Artificial Sequence: Synthetic oligonucleotide
uuggcguguaaguaaucca

SEQ ID NO: 52859 - RNA, 19 nt, Artificial Sequence
  Description of Artificial Sequence: Synthetic oligonucleotide
uuagucagcaauggaacau

SEQ ID NO: 52860 - RNA, 19 nt, Artificial Sequence
  Description of Artificial Sequence: Synthetic oligonucleotide
acuauacuagggauuaugu

SEQ ID NO: 52861 - RNA, 19 nt, Artificial Sequence
  Description of Artificial Sequence: Synthetic oligonucleotide
agcuuagacuaagaagcac

SEQ ID NO: 52862 - RNA, 19 nt, Artificial Sequence
  Description of Artificial Sequence: Synthetic oligonucleotide
caaucuacagaauucuuua

SEQ ID NO: 52863 - RNA, 19 nt, Artificial Sequence
  Description of Artificial Sequence: Synthetic oligonucleotide
auacuagggauuaugugcu

SEQ ID NO: 52864 - RNA, 19 nt, Artificial Sequence
  Description of Artificial Sequence: Synthetic oligonucleotide
agcggaacugaagugacug

SEQ ID NO: 52865 - RNA, 19 nt, Artificial Sequence
  Description of Artificial Sequence: Synthetic oligonucleotide
uguucgaguaagguagcug

SEQ ID NO: 52866 - RNA, 19 nt, Artificial Sequence
  Description of Artificial Sequence: Synthetic oligonucleotide
auuuucaaccuaacugcuc

SEQ ID NO: 52867 - RNA, 19 nt, Artificial Sequence
  Description of Artificial Sequence: Synthetic oligonucleotide
gauugacuuggcguguaag

SEQ ID NO: 52868 - RNA, 19 nt, Artificial Sequence
  Description of Artificial Sequence: Synthetic oligonucleotide
gcaagaacgaugcuuggug

SEQ ID NO: 52869 - RNA, 19 nt, Artificial Sequence
  Description of Artificial Sequence: Synthetic oligonucleotide
ccguuugaaaaccagcccg

SEQ ID NO: 52870 - RNA, 19 nt, Artificial Sequence
  Description of Artificial Sequence: Synthetic oligonucleotide
ccgaguguuaggcagagcc

SEQ ID NO: 52871 - RNA, 19 nt, Artificial Sequence
  Description of Artificial Sequence: Synthetic oligonucleotide
ugaaaucgcccaucagaug

SEQ ID NO: 52872 - RNA, 19 nt, Artificial Sequence
  Description of Artificial Sequence: Synthetic oligonucleotide
uuguugaauagcccaugaa

SEQ ID NO: 52873 - RNA, 19 nt, Artificial Sequence
  Description of Artificial Sequence: Synthetic oligonucleotide
uuauuggauggagauuugu

SEQ ID NO: 52874 - RNA, 19 nt, Artificial Sequence
  Description of Artificial Sequence: Synthetic oligonucleotide
cacuccaucgagauuucac

SEQ ID NO: 52875 - RNA, 19 nt, Artificial Sequence
  Description of Artificial Sequence: Synthetic oligonucleotide
agacacgaagcauuucccu

SEQ ID NO: 52876 - RNA, 19 nt, Artificial Sequence
  Description of Artificial Sequence: Synthetic oligonucleotide
uuugagacaccaccauuuu

SEQ ID NO: 52877 - RNA, 19 nt, Artificial Sequence
  Description of Artificial Sequence: Synthetic oligonucleotide
auucacaugccgcguuauc

SEQ ID NO: 52878 - RNA, 19 nt, Artificial Sequence
  Description of Artificial Sequence: Synthetic oligonucleotide
aaccuuuggcaguuacaga

SEQ ID NO: 52879 - RNA, 19 nt, Artificial Sequence
  Description of Artificial Sequence: Synthetic oligonucleotide
auguguaugaguugccaua

SEQ ID NO: 52880 - RNA, 19 nt, Artificial Sequence
  Description of Artificial Sequence: Synthetic oligonucleotide
augucaaacaucguguaua

SEQ ID NO: 52881 - RNA, 19 nt, Artificial Sequence
  Description of Artificial Sequence: Synthetic oligonucleotide
aaucugauucccuguuguu

SEQ ID NO: 52882 - RNA, 19 nt, Artificial Sequence
  Description of Artificial Sequence: Synthetic oligonucleotide
ucacaaucgccagcugugg

SEQ ID NO: 52883 - RNA, 19 nt, Artificial Sequence
  Description of Artificial Sequence: Synthetic oligonucleotide
agacgcacauaccugguau

SEQ ID NO: 52884 - RNA, 19 nt, Artificial Sequence
  Description of Artificial Sequence: Synthetic oligonucleotide
augcauuagaaaggaauga

SEQ ID NO: 52885 - RNA, 19 nt, Artificial Sequence
  Description of Artificial Sequence: Synthetic oligonucleotide
guuguauguucgaguaagg

SEQ ID NO: 52886 - RNA, 19 nt, Artificial Sequence
  Description of Artificial Sequence: Synthetic oligonucleotide
uauuuucgguugcauguua

SEQ ID NO: 52887 - RNA, 19 nt, Artificial Sequence
  Description of Artificial Sequence: Synthetic oligonucleotide
guauagacgcacauaccug

SEQ ID NO: 52888 - RNA, 19 nt, Artificial Sequence
  Description of Artificial Sequence: Synthetic oligonucleotide
uagagccuccccauguuuc

SEQ ID NO: 52889 - RNA, 19 nt, Artificial Sequence
  Description of Artificial Sequence: Synthetic oligonucleotide
gacgcacauaccugguaug

SEQ ID NO: 52890 - RNA, 19 nt, Artificial Sequence
  Description of Artificial Sequence: Synthetic oligonucleotide
uguuagcaaagauguuagu

SEQ ID NO: 52891 - RNA, 19 nt, Artificial Sequence
  Description of Artificial Sequence: Synthetic oligonucleotide
acagggaaagcgcuccaca

SEQ ID NO: 52892 - RNA, 19 nt, Artificial Sequence
  Description of Artificial Sequence: Synthetic oligonucleotide
uuguuguauguucgaguaa

SEQ ID NO: 52893 - RNA, 19 nt, Artificial Sequence
  Description of Artificial Sequence: Synthetic oligonucleotide
gaguauagacgcacauacc

SEQ ID NO: 52894 - RNA, 19 nt, Artificial Sequence
  Description of Artificial Sequence: Synthetic oligonucleotide
uccagcccgaguguuaggc

SEQ ID NO: 52895 - RNA, 19 nt, Artificial Sequence
  Description of Artificial Sequence: Synthetic oligonucleotide
auuaguucguacagaacaa

SEQ ID NO: 52896 - RNA, 19 nt, Artificial Sequence
  Description of Artificial Sequence: Synthetic oligonucleotide
gaauagcccaugaaaagua

SEQ ID NO: 52897 - RNA, 19 nt, Artificial Sequence
  Description of Artificial Sequence: Synthetic oligonucleotide
uggccagucauuaguucgu

SEQ ID NO: 52898 - RNA, 19 nt, Artificial Sequence
  Description of Artificial Sequence: Synthetic oligonucleotide
cucuuacacuguauuucag

SEQ ID NO: 52899 - RNA, 19 nt, Artificial Sequence
  Description of Artificial Sequence: Synthetic oligonucleotide
ucacggugacaccacuugu

SEQ ID NO: 52900 - RNA, 19 nt, Artificial Sequence
  Description of Artificial Sequence: Synthetic oligonucleotide
ugccgggcaauaucuauaa

SEQ ID NO: 52901 - RNA, 19 nt, Artificial Sequence
  Description of Artificial Sequence: Synthetic oligonucleotide
uuaguucguacagaacaau

SEQ ID NO: 52902 - RNA, 19 nt, Artificial Sequence
  Description of Artificial Sequence: Synthetic oligonucleotide
uaaccgugguggauagaca

SEQ ID NO: 52903 - RNA, 19 nt, Artificial Sequence
  Description of Artificial Sequence: Synthetic oligonucleotide
gcguguaaguaauccaugc

SEQ ID NO: 52904 - RNA, 19 nt, Artificial Sequence
  Description of Artificial Sequence: Synthetic oligonucleotide
aggucuguggauaaugaaa

SEQ ID NO: 52905 - RNA, 19 nt, Artificial Sequence
  Description of Artificial Sequence: Synthetic oligonucleotide
cagcccgaguguuaggcag

SEQ ID NO: 52906 - RNA, 19 nt, Artificial Sequence
  Description of Artificial Sequence: Synthetic oligonucleotide
guguaugaguugccauagg

SEQ ID NO: 52907 - RNA, 19 nt, Artificial Sequence
  Description of Artificial Sequence: Synthetic oligonucleotide
ucgaggaauaagggauuag

SEQ ID NO: 52908 - RNA, 19 nt, Artificial Sequence
  Description of Artificial Sequence: Synthetic oligonucleotide
cuguuguuguauguucgag

SEQ ID NO: 52909 - RNA, 19 nt, Artificial Sequence
  Description of Artificial Sequence: Synthetic oligonucleotide
agucauuaguucguacaga

SEQ ID NO: 52910 - RNA, 19 nt, Artificial Sequence
  Description of Artificial Sequence: Synthetic oligonucleotide
uuauuuucgguugcauguu

SEQ ID NO: 52911 - RNA, 19 nt, Artificial Sequence
  Description of Artificial Sequence: Synthetic oligonucleotide
agcgcgggaggugaggagg

SEQ ID NO: 52912 - RNA, 19 nt, Artificial Sequence
  Description of Artificial Sequence: Synthetic oligonucleotide
agggauuaugugcuuuaaa

SEQ ID NO: 52913 - RNA, 19 nt, Artificial Sequence
  Description of Artificial Sequence: Synthetic oligonucleotide
augcuaagacuccccauaa

SEQ ID NO: 52914 - RNA, 19 nt, Artificial Sequence
  Description of Artificial Sequence: Synthetic oligonucleotide
auggagauuuguccucaga

SEQ ID NO: 52915 - RNA, 19 nt, Artificial Sequence
  Description of Artificial Sequence: Synthetic oligonucleotide
ggugcuagauaaugcacuc

SEQ ID NO: 52916 - RNA, 19 nt, Artificial Sequence
  Description of Artificial Sequence: Synthetic oligonucleotide
gggaaagcgcuccacaaca

SEQ ID NO: 52917 - RNA, 19 nt, Artificial Sequence
  Description of Artificial Sequence: Synthetic oligonucleotide
cccucagaaauuaaccgug

SEQ ID NO: 52918 - RNA, 19 nt, Artificial Sequence
  Description of Artificial Sequence: Synthetic oligonucleotide
uucaaccuaacugcucuau

SEQ ID NO: 52919 - RNA, 19 nt, Artificial Sequence
  Description of Artificial Sequence: Synthetic oligonucleotide
agcggcaaauccuuuccau

SEQ ID NO: 52920 - RNA, 19 nt, Artificial Sequence
  Description of Artificial Sequence: Synthetic oligonucleotide
agagccuccccauguuuca

SEQ ID NO: 52921 - RNA, 19 nt, Artificial Sequence
  Description of Artificial Sequence: Synthetic oligonucleotide
ucaaacugaugggacccac

SEQ ID NO: 52922 - RNA, 19 nt, Artificial Sequence
  Description of Artificial Sequence: Synthetic oligonucleotide
cagcccgauucaaggaggg

SEQ ID NO: 52923 - RNA, 19 nt, Artificial Sequence
  Description of Artificial Sequence: Synthetic oligonucleotide
gaagaguauagacgcacau

SEQ ID NO: 52924 - RNA, 19 nt, Artificial Sequence
  Description of Artificial Sequence: Synthetic oligonucleotide
ucuagagccuccccauguu

SEQ ID NO: 52925 - RNA, 19 nt, Artificial Sequence
  Description of Artificial Sequence: Synthetic oligonucleotide
cacaaucgccagcuguggc

SEQ ID NO: 52926 - RNA, 19 nt, Artificial Sequence
  Description of Artificial Sequence: Synthetic oligonucleotide
auauaguauuaaaugcauu

SEQ ID NO: 52927 - RNA, 19 nt, Artificial Sequence
  Description of Artificial Sequence: Synthetic oligonucleotide
ugauugacuuggcguguaa

SEQ ID NO: 52928 - RNA, 19 nt, Artificial Sequence
  Description of Artificial Sequence: Synthetic oligonucleotide
augaguugccauagguuug

SEQ ID NO: 52929 - RNA, 19 nt, Artificial Sequence
  Description of Artificial Sequence: Synthetic oligonucleotide
uccuguaagcuaccugcua

SEQ ID NO: 52930 - RNA, 19 nt, Artificial Sequence
  Description of Artificial Sequence: Synthetic oligonucleotide
cugacuauacuagggauua

SEQ ID NO: 52931 - RNA, 19 nt, Artificial Sequence
  Description of Artificial Sequence: Synthetic oligonucleotide
caaccuaacugcucuaugu

SEQ ID NO: 52932 - RNA, 19 nt, Artificial Sequence
  Description of Artificial Sequence: Synthetic oligonucleotide
cauuuacuccgucccucag

SEQ ID NO: 52933 - RNA, 19 nt, Artificial Sequence
  Description of Artificial Sequence: Synthetic oligonucleotide
guugaggacuaaacaggug

SEQ ID NO: 52934 - RNA, 19 nt, Artificial Sequence
  Description of Artificial Sequence: Synthetic oligonucleotide
uagacgcacauaccuggua

SEQ ID NO: 52935 - RNA, 19 nt, Artificial Sequence
  Description of Artificial Sequence: Synthetic oligonucleotide
gcuacuugaaggcugcaaa

SEQ ID NO: 52936 - RNA, 19 nt, Artificial Sequence
  Description of Artificial Sequence: Synthetic oligonucleotide
gguuagccacuuauauugg

SEQ ID NO: 52937 - RNA, 19 nt, Artificial Sequence
  Description of Artificial Sequence: Synthetic oligonucleotide
cuaagacuccccauaauuu

SEQ ID NO: 52938 - RNA, 19 nt, Artificial Sequence
  Description of Artificial Sequence: Synthetic oligonucleotide
uggacccacgagacaagaa

SEQ ID NO: 52939 - RNA, 19 nt, Artificial Sequence
  Description of Artificial Sequence: Synthetic oligonucleotide
gugauugaaaucgcccauc

SEQ ID NO: 52940 - RNA, 19 nt, Artificial Sequence
  Description of Artificial Sequence: Synthetic oligonucleotide
cuaccugcuaauuaacuuu

SEQ ID NO: 52941 - RNA, 19 nt, Artificial Sequence
  Description of Artificial Sequence: Synthetic oligonucleotide
agcuaccugcuaauuaacu

SEQ ID NO: 52942 - RNA, 19 nt, Artificial Sequence
  Description of Artificial Sequence: Synthetic oligonucleotide
uauucacaugccgcguuau

SEQ ID NO: 52943 - RNA, 19 nt, Artificial Sequence
  Description of Artificial Sequence: Synthetic oligonucleotide
auuuucgguugcauguuau

SEQ ID NO: 52944 - RNA, 19 nt, Artificial Sequence
  Description of Artificial Sequence: Synthetic oligonucleotide
gcacauaccugguauguaa

SEQ ID NO: 52945 - RNA, 19 nt, Artificial Sequence
  Description of Artificial Sequence: Synthetic oligonucleotide
acuagggauuaugugcuuu

SEQ ID NO: 52946 - RNA, 19 nt, Artificial Sequence
  Description of Artificial Sequence: Synthetic oligonucleotide
ugauucccuguuguuguau

SEQ ID NO: 52947 - RNA, 19 nt, Artificial Sequence
  Description of Artificial Sequence: Synthetic oligonucleotide
cucccuuauuggauggaga

SEQ ID NO: 52948 - RNA, 19 nt, Artificial Sequence
  Description of Artificial Sequence: Synthetic oligonucleotide
cgagcuuaugcauugaaaa

SEQ ID NO: 52949 - RNA, 19 nt, Artificial Sequence
  Description of Artificial Sequence: Synthetic oligonucleotide
cauuuaucuucgcaaucua

SEQ ID NO: 52950 - RNA, 19 nt, Artificial Sequence
  Description of Artificial Sequence: Synthetic oligonucleotide
gcuugagcggaacugaagu

SEQ ID NO: 52951 - RNA, 19 nt, Artificial Sequence
  Description of Artificial Sequence: Synthetic oligonucleotide
gcaauaucuauaaguuuga

SEQ ID NO: 52952 - RNA, 19 nt, Artificial Sequence
  Description of Artificial Sequence: Synthetic oligonucleotide
acgagcuuaugcauugaaa

SEQ ID NO: 52953 - RNA, 19 nt, Artificial Sequence
  Description of Artificial Sequence: Synthetic oligonucleotide
auagacgcacauaccuggu

SEQ ID NO: 52954 - RNA, 19 nt, Artificial Sequence
  Description of Artificial Sequence: Synthetic oligonucleotide
aucgaggaauaagggauua

SEQ ID NO: 52955 - RNA, 19 nt, Artificial Sequence
  Description of Artificial Sequence: Synthetic oligonucleotide
cuaacugcucuauguggua

SEQ ID NO: 52956 - RNA, 19 nt, Artificial Sequence
  Description of Artificial Sequence: Synthetic oligonucleotide
auguucgaguaagguagcu

SEQ ID NO: 52957 - RNA, 19 nt, Artificial Sequence
  Description of Artificial Sequence: Synthetic oligonucleotide
gagccgagacucaccgaag

SEQ ID NO: 52958 - RNA, 19 nt, Artificial Sequence
  Description of Artificial Sequence: Synthetic oligonucleotide
cccgauucaaggaggguuc

SEQ ID NO: 52959 - RNA, 19 nt, Artificial Sequence
  Description of Artificial Sequence: Synthetic oligonucleotide
ggcguguaaguaauccaug

SEQ ID NO: 52960 - RNA, 19 nt, Artificial Sequence
  Description of Artificial Sequence: Synthetic oligonucleotide
uacuagggauuaugugcuu

SEQ ID NO: 52961 - RNA, 19 nt, Artificial Sequence
  Description of Artificial Sequence: Synthetic oligonucleotide
caggguuagccacuuauau

SEQ ID NO: 52962 - RNA, 19 nt, Artificial Sequence
  Description of Artificial Sequence: Synthetic oligonucleotide
agcugguuuuagucagcaa

SEQ ID NO: 52963 - RNA, 19 nt, Artificial Sequence
  Description of Artificial Sequence: Synthetic oligonucleotide
ggguguuuuaggagaagca

SEQ ID NO: 52964 - RNA, 19 nt, Artificial Sequence
  Description of Artificial Sequence: Synthetic oligonucleotide
gcggcaaauccuuuccauc

SEQ ID NO: 52965 - RNA, 19 nt, Artificial Sequence
  Description of Artificial Sequence: Synthetic oligonucleotide
gcauuuacuccgucccuca

SEQ ID NO: 52966 - RNA, 19 nt, Artificial Sequence
  Description of Artificial Sequence: Synthetic oligonucleotide
cccuccacgagaaccuaag

SEQ ID NO: 52967 - RNA, 19 nt, Artificial Sequence
  Description of Artificial Sequence: Synthetic oligonucleotide
caccgaaguucagacacga

SEQ ID NO: 52968 - RNA, 19 nt, Artificial Sequence
  Description of Artificial Sequence: Synthetic oligonucleotide
agcaggcaagaacgaugcu

SEQ ID NO: 52969 - RNA, 19 nt, Artificial Sequence
  Description of Artificial Sequence: Synthetic oligonucleotide
gcauuagaaaggaaugacu

SEQ ID NO: 52970 - RNA, 19 nt, Artificial Sequence
  Description of Artificial Sequence: Synthetic oligonucleotide
ggucacaaucgccagcugu

SEQ ID NO: 52971 - RNA, 19 nt, Artificial Sequence
  Description of Artificial Sequence: Synthetic oligonucleotide
gaguuaaaccagacuggcu

SEQ ID NO: 52972 - RNA, 19 nt, Artificial Sequence
  Description of Artificial Sequence: Synthetic oligonucleotide
aucgcccaucagaugacca

SEQ ID NO: 52973 - RNA, 19 nt, Artificial Sequence
  Description of Artificial Sequence: Synthetic oligonucleotide
gcuuuuaauuagaugcugu

SEQ ID NO: 52974 - RNA, 19 nt, Artificial Sequence
  Description of Artificial Sequence: Synthetic oligonucleotide
ugacuauacuagggauuau

SEQ ID NO: 52975 - RNA, 19 nt, Artificial Sequence
  Description of Artificial Sequence: Synthetic oligonucleotide
gugcuagauaaugcacuca

SEQ ID NO: 52976 - RNA, 19 nt, Artificial Sequence
  Description of Artificial Sequence: Synthetic oligonucleotide
ccgggcaauaucuauaagu

SEQ ID NO: 52977 - RNA, 19 nt, Artificial Sequence
  Description of Artificial Sequence: Synthetic oligonucleotide
cacgagcuuaugcauugaa

SEQ ID NO: 52978 - RNA, 19 nt, Artificial Sequence
  Description of Artificial Sequence: Synthetic oligonucleotide
gacuuggcguguaaguaau

SEQ ID NO: 52979 - RNA, 19 nt, Artificial Sequence
  Description of Artificial Sequence: Synthetic oligonucleotide
auguagccacauaaguauu

SEQ ID NO: 52980 - RNA, 19 nt, Artificial Sequence
  Description of Artificial Sequence: Synthetic oligonucleotide
uuacuccgucccucagaaa

SEQ ID NO: 52981 - RNA, 19 nt, Artificial Sequence
  Description of Artificial Sequence: Synthetic oligonucleotide
augauugacuuggcgugua

SEQ ID NO: 52982 - RNA, 19 nt, Artificial Sequence
  Description of Artificial Sequence: Synthetic oligonucleotide
ccacgagaaccuaagagcu

SEQ ID NO: 52983 - RNA, 19 nt, Artificial Sequence
  Description of Artificial Sequence: Synthetic oligonucleotide
ccgagacucaccgaaguuc

SEQ ID NO: 52984 - RNA, 19 nt, Artificial Sequence
  Description of Artificial Sequence: Synthetic oligonucleotide
auuaaccgugguggauaga

SEQ ID NO: 52985 - RNA, 19 nt, Artificial Sequence
  Description of Artificial Sequence: Synthetic oligonucleotide
caaacugaugggacccacu

SEQ ID NO: 52986 - RNA, 19 nt, Artificial Sequence
  Description of Artificial Sequence: Synthetic oligonucleotide
ggugauugaaaucgcccau

SEQ ID NO: 52987 - RNA, 19 nt, Artificial Sequence
  Description of Artificial Sequence: Synthetic oligonucleotide
agcaaacaucgaggaauaa

SEQ ID NO: 52988 - RNA, 19 nt, Artificial Sequence
  Description of Artificial Sequence: Synthetic oligonucleotide
ggaaagcgcuccacaacac

SEQ ID NO: 52989 - RNA, 19 nt, Artificial Sequence
  Description of Artificial Sequence: Synthetic oligonucleotide
cggcaaauccuuuccauca

SEQ ID NO: 52990 - RNA, 19 nt, Artificial Sequence
  Description of Artificial Sequence: Synthetic oligonucleotide
gcaaucuaaauugcacucu

SEQ ID NO: 52991 - RNA, 19 nt, Artificial Sequence
  Description of Artificial Sequence: Synthetic oligonucleotide
gcuagauaaugcacucaga

SEQ ID NO: 52992 - RNA, 19 nt, Artificial Sequence
  Description of Artificial Sequence: Synthetic oligonucleotide
cuuguaugcaggugauauu

SEQ ID NO: 52993 - RNA, 19 nt, Artificial Sequence
  Description of Artificial Sequence: Synthetic oligonucleotide
cguuugaaaaccagcccga

SEQ ID NO: 52994 - RNA, 19 nt, Artificial Sequence
  Description of Artificial Sequence: Synthetic oligonucleotide
aguucacagcuuagacuaa

SEQ ID NO: 52995 - RNA, 19 nt, Artificial Sequence
  Description of Artificial Sequence: Synthetic oligonucleotide
ggacuguauuuuccugaga

SEQ ID NO: 52996 - RNA, 19 nt, Artificial Sequence
  Description of Artificial Sequence: Synthetic oligonucleotide
gggugcuagauaaugcacu

SEQ ID NO: 52997 - RNA, 19 nt, Artificial Sequence
  Description of Artificial Sequence: Synthetic oligonucleotide
caaagggcaugcugcauuu

SEQ ID NO: 52998 - RNA, 19 nt, Artificial Sequence
  Description of Artificial Sequence: Synthetic oligonucleotide
cgaggaauaagggauuaga

SEQ ID NO: 52999 - RNA, 19 nt, Artificial Sequence
  Description of Artificial Sequence: Synthetic oligonucleotide
cagcggcaaauccuuucca

SEQ ID NO: 53000 - RNA, 19 nt, Artificial Sequence
  Description of Artificial Sequence: Synthetic oligonucleotide
gcaacccgagcaaggggag

SEQ ID NO: 53001 - RNA, 19 nt, Artificial Sequence
  Description of Artificial Sequence: Synthetic oligonucleotide
acuccgucccucagaaauu

SEQ ID NO: 53002 - RNA, 19 nt, Artificial Sequence
  Description of Artificial Sequence: Synthetic oligonucleotide
cuccuguaagcuaccugcu

SEQ ID NO: 53003 - RNA, 19 nt, Artificial Sequence
  Description of Artificial Sequence: Synthetic oligonucleotide
gccgggcaauaucuauaag

SEQ ID NO: 53004 - RNA, 19 nt, Artificial Sequence
  Description of Artificial Sequence: Synthetic oligonucleotide
agcccgaguguuaggcaga

SEQ ID NO: 53005 - RNA, 19 nt, Artificial Sequence
  Description of Artificial Sequence: Synthetic oligonucleotide
guuugaaaaccagcccgau

SEQ ID NO: 53006 - RNA, 19 nt, Artificial Sequence
  Description of Artificial Sequence: Synthetic oligonucleotide
ggaggguguaggcuguagu

SEQ ID NO: 53007 - RNA, 19 nt, Artificial Sequence
  Description of Artificial Sequence: Synthetic oligonucleotide
cacggugacaccacuuguu

SEQ ID NO: 53008 - RNA, 19 nt, Artificial Sequence
  Description of Artificial Sequence: Synthetic oligonucleotide
gcggaacugaagugacuga

SEQ ID NO: 53009 - RNA, 19 nt, Artificial Sequence
  Description of Artificial Sequence: Synthetic oligonucleotide
agcccgauucaaggagggu

SEQ ID NO: 53010 - RNA, 19 nt, Artificial Sequence
  Description of Artificial Sequence: Synthetic oligonucleotide
cgaguaagguagcuggcca

SEQ ID NO: 53011 - RNA, 19 nt, Artificial Sequence
  Description of Artificial Sequence: Synthetic oligonucleotide
cuccgucccucagaaauua

SEQ ID NO: 53012 - RNA, 19 nt, Artificial Sequence
  Description of Artificial Sequence: Synthetic oligonucleotide
ggcuacuugaaggcugcaa

SEQ ID NO: 53013 - RNA, 19 nt, Artificial Sequence
  Description of Artificial Sequence: Synthetic oligonucleotide
ugcggucugccgggcaaua

SEQ ID NO: 53014 - RNA, 19 nt, Artificial Sequence
  Description of Artificial Sequence: Synthetic oligonucleotide
gcccgaguguuaggcagag

SEQ ID NO: 53015 - RNA, 19 nt, Artificial Sequence
  Description of Artificial Sequence: Synthetic oligonucleotide
ccacuuauauugguaguua

SEQ ID NO: 53016 - RNA, 19 nt, Artificial Sequence
  Description of Artificial Sequence: Synthetic oligonucleotide
cccgagcaaggggagcgcg

SEQ ID NO: 53017 - RNA, 19 nt, Artificial Sequence
  Description of Artificial Sequence: Synthetic oligonucleotide
cacgagaaccuaagagcuu

SEQ ID NO: 53018 - RNA, 19 nt, Artificial Sequence
  Description of Artificial Sequence: Synthetic oligonucleotide
ccaugcuuugaagagccua

SEQ ID NO: 53019 - RNA, 19 nt, Artificial Sequence
  Description of Artificial Sequence: Synthetic oligonucleotide
cacuguccagcccgagugu

SEQ ID NO: 53020 - RNA, 19 nt, Artificial Sequence
  Description of Artificial Sequence: Synthetic oligonucleotide
ccuccacgagaaccuaaga

SEQ ID NO: 53021 - RNA, 19 nt, Artificial Sequence
  Description of Artificial Sequence: Synthetic oligonucleotide
gcccgauucaaggaggguu

SEQ ID NO: 53022 - RNA, 19 nt, Artificial Sequence
  Description of Artificial Sequence: Synthetic oligonucleotide
gccgagacucaccgaaguu

SEQ ID NO: 53023 - RNA, 19 nt, Artificial Sequence
  Description of Artificial Sequence: Synthetic oligonucleotide
cgguugcauguuauagaua

SEQ ID NO: 53024 - RNA, 19 nt, Artificial Sequence
  Description of Artificial Sequence: Synthetic oligonucleotide
ccgauucaaggaggguucu

SEQ ID NO: 53025 - RNA, 19 nt, Artificial Sequence
  Description of Artificial Sequence: Synthetic oligonucleotide
cgcacauaccugguaugua

SEQ ID NO: 53026 - RNA, 19 nt, Artificial Sequence
  Description of Artificial Sequence: Synthetic oligonucleotide
cccuuauuggauggagauu

SEQ ID NO: 53027 - RNA, 19 nt, Artificial Sequence
  Description of Artificial Sequence: Synthetic oligonucleotide
aaaucuagcacauaaagcc

SEQ ID NO: 53028 - RNA, 19 nt, Artificial Sequence
  Description of Artificial Sequence: Synthetic oligonucleotide
uuuuacugcaucuugacgg

SEQ ID NO: 53029 - RNA, 19 nt, Artificial Sequence
  Description of Artificial Sequence: Synthetic oligonucleotide
uuauauauaguuugagggg

SEQ ID NO: 53030 - RNA, 19 nt, Artificial Sequence
  Description of Artificial Sequence: Synthetic oligonucleotide
ucaauuacaguuaagaauu

SEQ ID NO: 53031 - RNA, 19 nt, Artificial Sequence
  Description of Artificial Sequence: Synthetic oligonucleotide
ugaauaauucuccauaacu

SEQ ID NO: 53032 - RNA, 19 nt, Artificial Sequence
  Description of Artificial Sequence: Synthetic oligonucleotide
aguucaguuaaccauucgc

SEQ ID NO: 53033 - RNA, 19 nt, Artificial Sequence
  Description of Artificial Sequence: Synthetic oligonucleotide
uacuauuacggcaacaacc

SEQ ID NO: 53034 - RNA, 19 nt, Artificial Sequence
  Description of Artificial Sequence: Synthetic oligonucleotide
ucuguaacaaccaaaugga

SEQ ID NO: 53035 - RNA, 19 nt, Artificial Sequence
  Description of Artificial Sequence: Synthetic oligonucleotide
aaaguacugauccauuaag

SEQ ID NO: 53036 - RNA, 19 nt, Artificial Sequence
  Description of Artificial Sequence: Synthetic oligonucleotide
uuaaggaugaguuuagacu

SEQ ID NO: 53037 - RNA, 19 nt, Artificial Sequence
  Description of Artificial Sequence: Synthetic oligonucleotide
uuaggaacgacugagcagg

SEQ ID NO: 53038 - RNA, 19 nt, Artificial Sequence
  Description of Artificial Sequence: Synthetic oligonucleotide
uuaaacugagauaagucca

SEQ ID NO: 53039 - RNA, 19 nt, Artificial Sequence
  Description of Artificial Sequence: Synthetic oligonucleotide
gaguaaacugaucaaagag

SEQ ID NO: 53040 - RNA, 19 nt, Artificial Sequence
  Description of Artificial Sequence: Synthetic oligonucleotide
accaauucaaauucucacc

SEQ ID NO: 53041 - RNA, 19 nt, Artificial Sequence
  Description of Artificial Sequence: Synthetic oligonucleotide
ugaguuuagacucuacacc

SEQ ID NO: 53042 - RNA, 19 nt, Artificial Sequence
  Description of Artificial Sequence: Synthetic oligonucleotide
auuagaaauguacuguaag

SEQ ID NO: 53043 - RNA, 19 nt, Artificial Sequence
  Description of Artificial Sequence: Synthetic oligonucleotide
augaguuuagacucuacac

SEQ ID NO: 53044 - RNA, 19 nt, Artificial Sequence
  Description of Artificial Sequence: Synthetic oligonucleotide
aauuauugcaugcugcuaa

SEQ ID NO: 53045 - RNA, 19 nt, Artificial Sequence
  Description of Artificial Sequence: Synthetic oligonucleotide
uguuucaucgcuagguggg

SEQ ID NO: 53046 - RNA, 19 nt, Artificial Sequence
  Description of Artificial Sequence: Synthetic oligonucleotide
ucaauacuauaauaagagg

SEQ ID NO: 53047 - RNA, 19 nt, Artificial Sequence
  Description of Artificial Sequence: Synthetic oligonucleotide
gauugaucgucuuuggucc

SEQ ID NO: 53048 - RNA, 19 nt, Artificial Sequence
  Description of Artificial Sequence: Synthetic oligonucleotide
uuaaggauacuccuaaagu

SEQ ID NO: 53049 - RNA, 19 nt, Artificial Sequence
  Description of Artificial Sequence: Synthetic oligonucleotide
uccuuacuuaacauuaagg

SEQ ID NO: 53050 - RNA, 19 nt, Artificial Sequence
  Description of Artificial Sequence: Synthetic oligonucleotide
aacccaaugguguucucgc

SEQ ID NO: 53051 - RNA, 19 nt, Artificial Sequence
  Description of Artificial Sequence: Synthetic oligonucleotide
uuuaguaugccucuuacuu

SEQ ID NO: 53052 - RNA, 19 nt, Artificial Sequence
  Description of Artificial Sequence: Synthetic oligonucleotide
ugcuuaacaucucaggaag

SEQ ID NO: 53053 - RNA, 19 nt, Artificial Sequence
  Description of Artificial Sequence: Synthetic oligonucleotide
uaauuuagcuaauuguuga

SEQ ID NO: 53054 - RNA, 19 nt, Artificial Sequence
  Description of Artificial Sequence: Synthetic oligonucleotide
uuauucauuaggaacgacu

SEQ ID NO: 53055 - RNA, 19 nt, Artificial Sequence
  Description of Artificial Sequence: Synthetic oligonucleotide
acuguucagauauucaguc

SEQ ID NO: 53056 - RNA, 19 nt, Artificial Sequence
  Description of Artificial Sequence: Synthetic oligonucleotide
ugcuugagaacuuaggaug

SEQ ID NO: 53057 - RNA, 19 nt, Artificial Sequence
  Description of Artificial Sequence: Synthetic oligonucleotide
uccaauacguucaggaaag

SEQ ID NO: 53058 - RNA, 19 nt, Artificial Sequence
  Description of Artificial Sequence: Synthetic oligonucleotide
uguguuagcccuaauucag

SEQ ID NO: 53059 - RNA, 19 nt, Artificial Sequence
  Description of Artificial Sequence: Synthetic oligonucleotide
gaguuuagacucuacaccc

SEQ ID NO: 53060 - RNA, 19 nt, Artificial Sequence
  Description of Artificial Sequence: Synthetic oligonucleotide
aucaauuacaguuaagaau

SEQ ID NO: 53061 - RNA, 19 nt, Artificial Sequence
  Description of Artificial Sequence: Synthetic oligonucleotide
aguaagcuuauuuaguaug

SEQ ID NO: 53062 - RNA, 19 nt, Artificial Sequence
  Description of Artificial Sequence: Synthetic oligonucleotide
guagacuuaauuucaauac

SEQ ID NO: 53063 - RNA, 19 nt, Artificial Sequence
  Description of Artificial Sequence: Synthetic oligonucleotide
ucacaauguuuauugauag

SEQ ID NO: 53064 - RNA, 19 nt, Artificial Sequence
  Description of Artificial Sequence: Synthetic oligonucleotide
gaucucucaaaacugauca

SEQ ID NO: 53065 - RNA, 19 nt, Artificial Sequence
  Description of Artificial Sequence: Synthetic oligonucleotide
gaaauuauagcacgagcug

SEQ ID NO: 53066 - RNA, 19 nt, Artificial Sequence
  Description of Artificial Sequence: Synthetic oligonucleotide
ucuaacuguucuuuggaag

SEQ ID NO: 53067 - RNA, 19 nt, Artificial Sequence
  Description of Artificial Sequence: Synthetic oligonucleotide
agacucuacacccacauug

SEQ ID NO: 53068 - RNA, 19 nt, Artificial Sequence
  Description of Artificial Sequence: Synthetic oligonucleotide
aguaugaccccuuuaagga

SEQ ID NO: 53069 - RNA, 19 nt, Artificial Sequence
  Description of Artificial Sequence: Synthetic oligonucleotide
aaaacguuacagcggaaug

SEQ ID NO: 53070 - RNA, 19 nt, Artificial Sequence
  Description of Artificial Sequence: Synthetic oligonucleotide
ucgauccuuauucugauca

SEQ ID NO: 53071 - RNA, 19 nt, Artificial Sequence
  Description of Artificial Sequence: Synthetic oligonucleotide
uauauauaguuugagggga

SEQ ID NO: 53072 - RNA, 19 nt, Artificial Sequence
  Description of Artificial Sequence: Synthetic oligonucleotide
agucauuccucccuugagc

SEQ ID NO: 53073 - RNA, 19 nt, Artificial Sequence
  Description of Artificial Sequence: Synthetic oligonucleotide
uacuauaauaagagggacc

SEQ ID NO: 53074 - RNA, 19 nt, Artificial Sequence
  Description of Artificial Sequence: Synthetic oligonucleotide
ucuuaaacugagauaaguc

SEQ ID NO: 53075 - RNA, 19 nt, Artificial Sequence
  Description of Artificial Sequence: Synthetic oligonucleotide
aacucaaguauuacugagc

SEQ ID NO: 53076 - RNA, 19 nt, Artificial Sequence
  Description of Artificial Sequence: Synthetic oligonucleotide
auucuaucuaaacauuaag

SEQ ID NO: 53077 - RNA, 19 nt, Artificial Sequence
  Description of Artificial Sequence: Synthetic oligonucleotide
uguacaacuacaucaagua

SEQ ID NO: 53078 - RNA, 19 nt, Artificial Sequence
  Description of Artificial Sequence: Synthetic oligonucleotide
aauacguucaggaaagccu

SEQ ID NO: 53079 - RNA, 19 nt, Artificial Sequence
  Description of Artificial Sequence: Synthetic oligonucleotide
uuaaggagugggaauaaga

SEQ ID NO: 53080 - RNA, 19 nt, Artificial Sequence
  Description of Artificial Sequence: Synthetic oligonucleotide
gauuugaacgaugacgucc

SEQ ID NO: 53081 - RNA, 19 nt, Artificial Sequence
  Description of Artificial Sequence: Synthetic oligonucleotide
ugauccauuaaggacuugg

SEQ ID NO: 53082 - RNA, 19 nt, Artificial Sequence
  Description of Artificial Sequence: Synthetic oligonucleotide
uauagcacgagcugcaaac

SEQ ID NO: 53083 - RNA, 19 nt, Artificial Sequence
  Description of Artificial Sequence: Synthetic oligonucleotide
acuauaauaagagggacca

SEQ ID NO: 53084 - RNA, 19 nt, Artificial Sequence
  Description of Artificial Sequence: Synthetic oligonucleotide
uaauucaguuaccaugcag

SEQ ID NO: 53085 - RNA, 19 nt, Artificial Sequence
  Description of Artificial Sequence: Synthetic oligonucleotide
uguucucgcaacucuacgg

SEQ ID NO: 53086 - RNA, 19 nt, Artificial Sequence
  Description of Artificial Sequence: Synthetic oligonucleotide
acgagcugcaaacugugcc

SEQ ID NO: 53087 - RNA, 19 nt, Artificial Sequence
  Description of Artificial Sequence: Synthetic oligonucleotide
uuuuauccaggacauuuug

SEQ ID NO: 53088 - RNA, 19 nt, Artificial Sequence
  Description of Artificial Sequence: Synthetic oligonucleotide
aaagcccauuacuagaggu

SEQ ID NO: 53089 - RNA, 19 nt, Artificial Sequence
  Description of Artificial Sequence: Synthetic oligonucleotide
cuugcgaggaacccaaugg

SEQ ID NO: 53090 - RNA, 19 nt, Artificial Sequence
  Description of Artificial Sequence: Synthetic oligonucleotide
ugagcuaguucugaaaugc

SEQ ID NO: 53091 - RNA, 19 nt, Artificial Sequence
  Description of Artificial Sequence: Synthetic oligonucleotide
augaaggauagauucauga

SEQ ID NO: 53092 - RNA, 19 nt, Artificial Sequence
  Description of Artificial Sequence: Synthetic oligonucleotide
cagauauucagucacaaca

SEQ ID NO: 53093 - RNA, 19 nt, Artificial Sequence
  Description of Artificial Sequence: Synthetic oligonucleotide
aucuauccuggauaacucc

SEQ ID NO: 53094 - RNA, 19 nt, Artificial Sequence
  Description of Artificial Sequence: Synthetic oligonucleotide
aguacugauccauuaagga

SEQ ID NO: 53095 - RNA, 19 nt, Artificial Sequence
  Description of Artificial Sequence: Synthetic oligonucleotide
  modified_base (4)..(4): a, c, u, g, unknown or other
ucgnucuucuugccaaucg

SEQ ID NO: 53096 - RNA, 19 nt, Artificial Sequence
  Description of Artificial Sequence: Synthetic oligonucleotide
ugauugaucgucuuugguc

SEQ ID NO: 53097 - RNA, 19 nt, Artificial Sequence
  Description of Artificial Sequence: Synthetic oligonucleotide
uauugcaacaacucaagua

SEQ ID NO: 53098 - RNA, 19 nt, Artificial Sequence
  Description of Artificial Sequence: Synthetic oligonucleotide
auuugaacgaugacguccc

SEQ ID NO: 53099 - RNA, 19 nt, Artificial Sequence
  Description of Artificial Sequence: Synthetic oligonucleotide
acucaaguauuacugagca

SEQ ID NO: 53100 - RNA, 19 nt, Artificial Sequence
  Description of Artificial Sequence: Synthetic oligonucleotide
acuccuaaaguauuugaug

SEQ ID NO: 53101 - RNA, 19 nt, Artificial Sequence
  Description of Artificial Sequence: Synthetic oligonucleotide
uucaagggcauuaaagauc

SEQ ID NO: 53102 - RNA, 19 nt, Artificial Sequence
  Description of Artificial Sequence: Synthetic oligonucleotide
guucaguuaaccauucgcg

SEQ ID NO: 53103 - RNA, 19 nt, Artificial Sequence
  Description of Artificial Sequence: Synthetic oligonucleotide
aguuuugagaccaaguuga

SEQ ID NO: 53104 - RNA, 19 nt, Artificial Sequence
  Description of Artificial Sequence: Synthetic oligonucleotide
ucauuugcggaguuguuug

SEQ ID NO: 53105 - RNA, 19 nt, Artificial Sequence
  Description of Artificial Sequence: Synthetic oligonucleotide
uuucgcagugguuagguca

SEQ ID NO: 53106 - RNA, 19 nt, Artificial Sequence
  Description of Artificial Sequence: Synthetic oligonucleotide
auacuauaauaagagggac

SEQ ID NO: 53107 - RNA, 19 nt, Artificial Sequence
  Description of Artificial Sequence: Synthetic oligonucleotide
  modified_base (10)..(10): a, c, u, g, unknown or other
guuuggucgnucuucuugc

SEQ ID NO: 53108 - RNA, 19 nt, Artificial Sequence
  Description of Artificial Sequence: Synthetic oligonucleotide
gaaaucaagaggcgguuug

SEQ ID NO: 53109 - RNA, 19 nt, Artificial Sequence
  Description of Artificial Sequence: Synthetic oligonucleotide
uauaauaagagggaccaau

SEQ ID NO: 53110 - RNA, 19 nt, Artificial Sequence
  Description of Artificial Sequence: Synthetic oligonucleotide
uaacagugcaccugcagag

SEQ ID NO: 53111 - RNA, 19 nt, Artificial Sequence
  Description of Artificial Sequence: Synthetic oligonucleotide
ugagcuauacuuuggcucu

SEQ ID NO: 53112 - RNA, 19 nt, Artificial Sequence
  Description of Artificial Sequence: Synthetic oligonucleotide
gaugacgucccaucguggg

SEQ ID NO: 53113 - RNA, 19 nt, Artificial Sequence
  Description of Artificial Sequence: Synthetic oligonucleotide
gaccaauucaaauucucac

SEQ ID NO: 53114 - RNA, 19 nt, Artificial Sequence
  Description of Artificial Sequence: Synthetic oligonucleotide
auuaggaacgacugagcag

SEQ ID NO: 53115 - RNA, 19 nt, Artificial Sequence
  Description of Artificial Sequence: Synthetic oligonucleotide
cuuccgucaguuuaaguag

SEQ ID NO: 53116 - RNA, 19 nt, Artificial Sequence
  Description of Artificial Sequence: Synthetic oligonucleotide
gauauucagucacaacagc

SEQ ID NO: 53117 - RNA, 19 nt, Artificial Sequence
  Description of Artificial Sequence: Synthetic oligonucleotide
ucugaaauuauagcacgag

SEQ ID NO: 53118 - RNA, 19 nt, Artificial Sequence
  Description of Artificial Sequence: Synthetic oligonucleotide
ucaguuaguguguuagccc

SEQ ID NO: 53119 - RNA, 19 nt, Artificial Sequence
  Description of Artificial Sequence: Synthetic oligonucleotide
aaagccuugcgaggaaccc

SEQ ID NO: 53120 - RNA, 19 nt, Artificial Sequence
  Description of Artificial Sequence: Synthetic oligonucleotide
uuucacgcuuaucauagac

SEQ ID NO: 53121 - RNA, 19 nt, Artificial Sequence
  Description of Artificial Sequence: Synthetic oligonucleotide
aaucuauccuggauaacuc

SEQ ID NO: 53122 - RNA, 19 nt, Artificial Sequence
  Description of Artificial Sequence: Synthetic oligonucleotide
uuacaucauagcaacagua

SEQ ID NO: 53123 - RNA, 19 nt, Artificial Sequence
  Description of Artificial Sequence: Synthetic oligonucleotide
aacagccuaugguaacugg

SEQ ID NO: 53124 - RNA, 19 nt, Artificial Sequence
  Description of Artificial Sequence: Synthetic oligonucleotide
cuguagauccacaugauca

SEQ ID NO: 53125 - RNA, 19 nt, Artificial Sequence
  Description of Artificial Sequence: Synthetic oligonucleotide
aggcaauauacuauuacgg

SEQ ID NO: 53126 - RNA, 19 nt, Artificial Sequence
  Description of Artificial Sequence: Synthetic oligonucleotide
gagcucaaggcauagcuug

SEQ ID NO: 53127 - RNA, 19 nt, Artificial Sequence
  Description of Artificial Sequence: Synthetic oligonucleotide
aucaacuauuucugguucg

SEQ ID NO: 53128 - RNA, 19 nt, Artificial Sequence
  Description of Artificial Sequence: Synthetic oligonucleotide
cugaaauuauagcacgagc

SEQ ID NO: 53129 - RNA, 19 nt, Artificial Sequence
  Description of Artificial Sequence: Synthetic oligonucleotide
accaauuccacuaccuggc

SEQ ID NO: 53130 - RNA, 19 nt, Artificial Sequence
  Description of Artificial Sequence: Synthetic oligonucleotide
caggaguaagcuuauuuag

SEQ ID NO: 53131 - RNA, 19 nt, Artificial Sequence
  Description of Artificial Sequence: Synthetic oligonucleotide
uuacuagagguagaaauac

SEQ ID NO: 53132 - RNA, 19 nt, Artificial Sequence
  Description of Artificial Sequence: Synthetic oligonucleotide
ucuguuucaucgcuaggug

SEQ ID NO: 53133 - RNA, 19 nt, Artificial Sequence
  Description of Artificial Sequence: Synthetic oligonucleotide
uucauggucuaaucgaggu

SEQ ID NO: 53134 - RNA, 19 nt, Artificial Sequence
  Description of Artificial Sequence: Synthetic oligonucleotide
aacucuacgguauccugca

SEQ ID NO: 53135 - RNA, 19 nt, Artificial Sequence
  Description of Artificial Sequence: Synthetic oligonucleotide
aaaucaagaggcgguuugg

SEQ ID NO: 53136 - RNA, 19 nt, Artificial Sequence
  Description of Artificial Sequence: Synthetic oligonucleotide
caaggggauaucaaccucc

SEQ ID NO: 53137 - RNA, 19 nt, Artificial Sequence
  Description of Artificial Sequence: Synthetic oligonucleotide
aacauucgauccuuauucu

SEQ ID NO: 53138 - RNA, 19 nt, Artificial Sequence
  Description of Artificial Sequence: Synthetic oligonucleotide
uucuuaaacugagauaagu

SEQ ID NO: 53139 - RNA, 19 nt, Artificial Sequence
  Description of Artificial Sequence: Synthetic oligonucleotide
agcuuauuuaguaugccuc

SEQ ID NO: 53140 - RNA, 19 nt, Artificial Sequence
  Description of Artificial Sequence: Synthetic oligonucleotide
cauuaucugacagaggcac

SEQ ID NO: 53141 - RNA, 19 nt, Artificial Sequence
  Description of Artificial Sequence: Synthetic oligonucleotide
uucuccaauuuaaggagug

SEQ ID NO: 53142 - RNA, 19 nt, Artificial Sequence
  Description of Artificial Sequence: Synthetic oligonucleotide
gaauuuucgcagugguuag

SEQ ID NO: 53143 - RNA, 19 nt, Artificial Sequence
  Description of Artificial Sequence: Synthetic oligonucleotide
ucaggaguaagcuuauuua

SEQ ID NO: 53144 - RNA, 19 nt, Artificial Sequence
  Description of Artificial Sequence: Synthetic oligonucleotide
uuagacucuacacccacau

SEQ ID NO: 53145 - RNA, 19 nt, Artificial Sequence
  Description of Artificial Sequence: Synthetic oligonucleotide
uucacgcuuaucauagaca

SEQ ID NO: 53146 - RNA, 19 nt, Artificial Sequence
  Description of Artificial Sequence: Synthetic oligonucleotide
auucacuaagauugaagcu

SEQ ID NO: 53147 - RNA, 19 nt, Artificial Sequence
  Description of Artificial Sequence: Synthetic oligonucleotide
aaggauagauucaugaaua

SEQ ID NO: 53148 - RNA, 19 nt, Artificial Sequence
  Description of Artificial Sequence: Synthetic oligonucleotide
ucuaaucgaggucccacug

SEQ ID NO: 53149 - RNA, 19 nt, Artificial Sequence
  Description of Artificial Sequence: Synthetic oligonucleotide
ucuccaaacugcgauugcg

SEQ ID NO: 53150 - RNA, 19 nt, Artificial Sequence
  Description of Artificial Sequence: Synthetic oligonucleotide
aauuauagcacgagcugca

SEQ ID NO: 53151 - RNA, 19 nt, Artificial Sequence
  Description of Artificial Sequence: Synthetic oligonucleotide
ugggcuuacuucauuagaa

SEQ ID NO: 53152 - RNA, 19 nt, Artificial Sequence
  Description of Artificial Sequence: Synthetic oligonucleotide
uuugugcaaguaaaccaug

SEQ ID NO: 53153 - RNA, 19 nt, Artificial Sequence
  Description of Artificial Sequence: Synthetic oligonucleotide
auuuagcuaauuguugaag

SEQ ID NO: 53154 - RNA, 19 nt, Artificial Sequence
  Description of Artificial Sequence: Synthetic oligonucleotide
acugcgauugcgugggagg

SEQ ID NO: 53155 - RNA, 19 nt, Artificial Sequence
  Description of Artificial Sequence: Synthetic oligonucleotide
acuaugauuaagacaucac

SEQ ID NO: 53156 - RNA, 19 nt, Artificial Sequence
  Description of Artificial Sequence: Synthetic oligonucleotide
gaacgaugacgucccaucg

SEQ ID NO: 53157 - RNA, 19 nt, Artificial Sequence
  Description of Artificial Sequence: Synthetic oligonucleotide
aaaaccuuaugcagaagga

SEQ ID NO: 53158 - RNA, 19 nt, Artificial Sequence
  Description of Artificial Sequence: Synthetic oligonucleotide
acuauuacggcaacaacca

SEQ ID NO: 53159 - RNA, 19 nt, Artificial Sequence
  Description of Artificial Sequence: Synthetic oligonucleotide
guaggaaacgaauccuugc

SEQ ID NO: 53160 - RNA, 19 nt, Artificial Sequence
  Description of Artificial Sequence: Synthetic oligonucleotide
aaaaucuauccuggauaac

SEQ ID NO: 53161 - RNA, 19 nt, Artificial Sequence
  Description of Artificial Sequence: Synthetic oligonucleotide
gagggaccaauucaaauuc

SEQ ID NO: 53162 - RNA, 19 nt, Artificial Sequence
  Description of Artificial Sequence: Synthetic oligonucleotide
ggcaauauacuauuacggc

SEQ ID NO: 53163 - RNA, 19 nt, Artificial Sequence
  Description of Artificial Sequence: Synthetic oligonucleotide
caaacugcgauugcguggg

SEQ ID NO: 53164 - RNA, 19 nt, Artificial Sequence
  Description of Artificial Sequence: Synthetic oligonucleotide
aaaacagccuaugguaacu

SEQ ID NO: 53165 - RNA, 19 nt, Artificial Sequence
  Description of Artificial Sequence: Synthetic oligonucleotide
agcaguaugaccccuuuaa

SEQ ID NO: 53166 - RNA, 19 nt, Artificial Sequence
  Description of Artificial Sequence: Synthetic oligonucleotide
uuuuauucauuaggaacga

SEQ ID NO: 53167 - RNA, 19 nt, Artificial Sequence
  Description of Artificial Sequence: Synthetic oligonucleotide
auaacuccuggaccaguac

SEQ ID NO: 53168 - RNA, 19 nt, Artificial Sequence
  Description of Artificial Sequence: Synthetic oligonucleotide
uuggauucuaaaccuaauu

SEQ ID NO: 53169 - RNA, 19 nt, Artificial Sequence
  Description of Artificial Sequence: Synthetic oligonucleotide
ugaacgaugacgucccauc

SEQ ID NO: 53170 - RNA, 19 nt, Artificial Sequence
  Description of Artificial Sequence: Synthetic oligonucleotide
gauacuccuaaaguauuug

SEQ ID NO: 53171 - RNA, 19 nt, Artificial Sequence
  Description of Artificial Sequence: Synthetic oligonucleotide
ucaguuaaccauucgcgau

SEQ ID NO: 53172 - RNA, 19 nt, Artificial Sequence
  Description of Artificial Sequence: Synthetic oligonucleotide
ugcgugggaggcaugaugu

SEQ ID NO: 53173 - RNA, 19 nt, Artificial Sequence
  Description of Artificial Sequence: Synthetic oligonucleotide
uaagaucaagcuugccaag

SEQ ID NO: 53174 - RNA, 19 nt, Artificial Sequence
  Description of Artificial Sequence: Synthetic oligonucleotide
ucacuaucaaucauuuauu

SEQ ID NO: 53175 - RNA, 19 nt, Artificial Sequence
  Description of Artificial Sequence: Synthetic oligonucleotide
uugauaguuccccaacauc

SEQ ID NO: 53176 - RNA, 19 nt, Artificial Sequence
  Description of Artificial Sequence: Synthetic oligonucleotide
gugagcuauacuuuggcuc

SEQ ID NO: 53177 - RNA, 19 nt, Artificial Sequence
  Description of Artificial Sequence: Synthetic oligonucleotide
uccaguuuggggcacugcu

SEQ ID NO: 53178 - RNA, 19 nt, Artificial Sequence
  Description of Artificial Sequence: Synthetic oligonucleotide
aauuuucgcagugguuagg

SEQ ID NO: 53179 - RNA, 19 nt, Artificial Sequence
  Description of Artificial Sequence: Synthetic oligonucleotide
aacgaauccuugcuggcaa

SEQ ID NO: 53180 - RNA, 19 nt, Artificial Sequence
  Description of Artificial Sequence: Synthetic oligonucleotide
agagggaccaauucaaauu

SEQ ID NO: 53181 - RNA, 19 nt, Artificial Sequence
  Description of Artificial Sequence: Synthetic oligonucleotide
ugcaacaacucaaguauua

SEQ ID NO: 53182 - RNA, 19 nt, Artificial Sequence
  Description of Artificial Sequence: Synthetic oligonucleotide
uuuccaugucauagaaaug

SEQ ID NO: 53183 - RNA, 19 nt, Artificial Sequence
  Description of Artificial Sequence: Synthetic oligonucleotide
caacucuacgguauccugc

SEQ ID NO: 53184 - RNA, 19 nt, Artificial Sequence
  Description of Artificial Sequence: Synthetic oligonucleotide
auuuaguaugccucuuacu

SEQ ID NO: 53185 - RNA, 19 nt, Artificial Sequence
  Description of Artificial Sequence: Synthetic oligonucleotide
uuuaaggagugggaauaag

SEQ ID NO: 53186 - RNA, 19 nt, Artificial Sequence
  Description of Artificial Sequence: Synthetic oligonucleotide
uugagcuaguucugaaaug

SEQ ID NO: 53187 - RNA, 19 nt, Artificial Sequence
  Description of Artificial Sequence: Synthetic oligonucleotide
uugauugaucgucuuuggu

SEQ ID NO: 53188 - RNA, 19 nt, Artificial Sequence
  Description of Artificial Sequence: Synthetic oligonucleotide
aaaccuuaugcagaaggaa

SEQ ID NO: 53189 - RNA, 19 nt, Artificial Sequence
  Description of Artificial Sequence: Synthetic oligonucleotide
ugcgaggaacccaauggug

SEQ ID NO: 53190 - RNA, 19 nt, Artificial Sequence
  Description of Artificial Sequence: Synthetic oligonucleotide
gaaggauagauucaugaau

SEQ ID NO: 53191 - RNA, 19 nt, Artificial Sequence
  Description of Artificial Sequence: Synthetic oligonucleotide
agcaaagugcaucucuaca

SEQ ID NO: 53192 - RNA, 19 nt, Artificial Sequence
  Description of Artificial Sequence: Synthetic oligonucleotide
  modified_base (7)..(7): a, c, u, g, unknown or other
uggucgnucuucuugccaa

SEQ ID NO: 53193 - RNA, 19 nt, Artificial Sequence
  Description of Artificial Sequence: Synthetic oligonucleotide
ugcuaauauucuaucuaaa

SEQ ID NO: 53194 - RNA, 19 nt, Artificial Sequence
  Description of Artificial Sequence: Synthetic oligonucleotide
cacuaccuggcauuugucc

SEQ ID NO: 53195 - RNA, 19 nt, Artificial Sequence
  Description of Artificial Sequence: Synthetic oligonucleotide
ugcugcuaauauucuaucu

SEQ ID NO: 53196 - RNA, 19 nt, Artificial Sequence
  Description of Artificial Sequence: Synthetic oligonucleotide
cuggauaacuccuggacca

SEQ ID NO: 53197 - RNA, 19 nt, Artificial Sequence
  Description of Artificial Sequence: Synthetic oligonucleotide
uuuggauucuaaaccuaau

SEQ ID NO: 53198 - RNA, 19 nt, Artificial Sequence
  Description of Artificial Sequence: Synthetic oligonucleotide
aagaucaagcuugccaagu

SEQ ID NO: 53199 - RNA, 19 nt, Artificial Sequence
  Description of Artificial Sequence: Synthetic oligonucleotide
aaucgaaguaacaugccuu

SEQ ID NO: 53200 - RNA, 19 nt, Artificial Sequence
  Description of Artificial Sequence: Synthetic oligonucleotide
cugauuugaacgaugacgu

SEQ ID NO: 53201 - RNA, 19 nt, Artificial Sequence
  Description of Artificial Sequence: Synthetic oligonucleotide
gaagauugcaucaugucgu

SEQ ID NO: 53202 - RNA, 19 nt, Artificial Sequence
  Description of Artificial Sequence: Synthetic oligonucleotide
auaagugguggauuaguuu

SEQ ID NO: 53203 - RNA, 19 nt, Artificial Sequence
  Description of Artificial Sequence: Synthetic oligonucleotide
caauacguucaggaaagcc

SEQ ID NO: 53204 - RNA, 19 nt, Artificial Sequence
  Description of Artificial Sequence: Synthetic oligonucleotide
agugagcuauacuuuggcu

SEQ ID NO: 53205 - RNA, 19 nt, Artificial Sequence
  Description of Artificial Sequence: Synthetic oligonucleotide
aacguuacagcggaaugaa

SEQ ID NO: 53206 - RNA, 19 nt, Artificial Sequence
  Description of Artificial Sequence: Synthetic oligonucleotide
ucuacgguauccugcagua

SEQ ID NO: 53207 - RNA, 19 nt, Artificial Sequence
  Description of Artificial Sequence: Synthetic oligonucleotide
gcaauauacuauuacggca

SEQ ID NO: 53208 - RNA, 19 nt, Artificial Sequence
  Description of Artificial Sequence: Synthetic oligonucleotide
gugguuaggucaaaugcag

SEQ ID NO: 53209 - RNA, 19 nt, Artificial Sequence
  Description of Artificial Sequence: Synthetic oligonucleotide
aaguuugggagagauguua

SEQ ID NO: 53210 - RNA, 19 nt, Artificial Sequence
  Description of Artificial Sequence: Synthetic oligonucleotide
caaucgcagacauagcuga

SEQ ID NO: 53211 - RNA, 19 nt, Artificial Sequence
  Description of Artificial Sequence: Synthetic oligonucleotide
aaacgaauccuugcuggca

SEQ ID NO: 53212 - RNA, 19 nt, Artificial Sequence
  Description of Artificial Sequence: Synthetic oligonucleotide
auacguucaggaaagccug

SEQ ID NO: 53213 - RNA, 19 nt, Artificial Sequence
  Description of Artificial Sequence: Synthetic oligonucleotide
  modified_base (11)..(11): a, c, u, g, unknown or other
gguuuggucgnucuucuug

SEQ ID NO: 53214 - RNA, 19 nt, Artificial Sequence
  Description of Artificial Sequence: Synthetic oligonucleotide
ucucgcaacucuacgguau

SEQ ID NO: 53215 - RNA, 19 nt, Artificial Sequence
  Description of Artificial Sequence: Synthetic oligonucleotide
  modified_base (9)..(9): a, c, u, g, unknown or other
uuuggucgnucuucuugcc

SEQ ID NO: 53216 - RNA, 19 nt, Artificial Sequence
  Description of Artificial Sequence: Synthetic oligonucleotide
gaagaagucauuccucccu

SEQ ID NO: 53217 - RNA, 19 nt, Artificial Sequence
  Description of Artificial Sequence: Synthetic oligonucleotide
cccuaauucaguuaccaug

SEQ ID NO: 53218 - RNA, 19 nt, Artificial Sequence
  Description of Artificial Sequence: Synthetic oligonucleotide
uugcgugggaggcaugaug

SEQ ID NO: 53219 - RNA, 19 nt, Artificial Sequence
  Description of Artificial Sequence: Synthetic oligonucleotide
uuauagcacgagcugcaaa

SEQ ID NO: 53220 - RNA, 19 nt, Artificial Sequence
  Description of Artificial Sequence: Synthetic oligonucleotide
ugguucgguuuccaaauuc

SEQ ID NO: 53221 - RNA, 19 nt, Artificial Sequence
  Description of Artificial Sequence: Synthetic oligonucleotide
gcggaaugaauuuucgcag

SEQ ID NO: 53222 - RNA, 19 nt, Artificial Sequence
  Description of Artificial Sequence: Synthetic oligonucleotide
augguguucucgcaacucu

SEQ ID NO: 53223 - RNA, 19 nt, Artificial Sequence
  Description of Artificial Sequence: Synthetic oligonucleotide
  modified_base (8)..(8): a, c, u, g, unknown or other
uuggucgnucuucuugcca

SEQ ID NO: 53224 - RNA, 19 nt, Artificial Sequence
  Description of Artificial Sequence: Synthetic oligonucleotide
uucaguuaccaugcaguca

SEQ ID NO: 53225 - RNA, 19 nt, Artificial Sequence
  Description of Artificial Sequence: Synthetic oligonucleotide
aguuccuaauucccaaaau

SEQ ID NO: 53226 - RNA, 19 nt, Artificial Sequence
  Description of Artificial Sequence: Synthetic oligonucleotide
ugcggaguugucaucucgu

SEQ ID NO: 53227 - RNA, 19 nt, Artificial Sequence
  Description of Artificial Sequence: Synthetic oligonucleotide
uaagacuaugaagcuaaaa

SEQ ID NO: 53228 - RNA, 19 nt, Artificial Sequence
  Description of Artificial Sequence: Synthetic oligonucleotide
uuccgucaguuuaaguagu

SEQ ID NO: 53229 - RNA, 19 nt, Artificial Sequence
  Description of Artificial Sequence: Synthetic oligonucleotide
cuuggcggcaugaacgguc

SEQ ID NO: 53230 - RNA, 19 nt, Artificial Sequence
  Description of Artificial Sequence: Synthetic oligonucleotide
acugacgugcuucugcuuu

SEQ ID NO: 53231 - RNA, 19 nt, Artificial Sequence
  Description of Artificial Sequence: Synthetic oligonucleotide
acucuacacccacauugag

SEQ ID NO: 53232 - RNA, 19 nt, Artificial Sequence
  Description of Artificial Sequence: Synthetic oligonucleotide
guuugaguaaacugaucaa

SEQ ID NO: 53233 - RNA, 19 nt, Artificial Sequence
  Description of Artificial Sequence: Synthetic oligonucleotide
ggaaugaauuuucgcagug

SEQ ID NO: 53234 - RNA, 19 nt, Artificial Sequence
  Description of Artificial Sequence: Synthetic oligonucleotide
auuuucgcagugguuaggu

SEQ ID NO: 53235 - RNA, 19 nt, Artificial Sequence
  Description of Artificial Sequence: Synthetic oligonucleotide
guucauggucuaaucgagg

SEQ ID NO: 53236 - RNA, 19 nt, Artificial Sequence
  Description of Artificial Sequence: Synthetic oligonucleotide
caguuaaccauucgcgauc

SEQ ID NO: 53237 - RNA, 19 nt, Artificial Sequence
  Description of Artificial Sequence: Synthetic oligonucleotide
uaguggguggggcaauaca

SEQ ID NO: 53238 - RNA, 19 nt, Artificial Sequence
  Description of Artificial Sequence: Synthetic oligonucleotide
cugcuaauauucuaucuaa

SEQ ID NO: 53239 - RNA, 19 nt, Artificial Sequence
  Description of Artificial Sequence: Synthetic oligonucleotide
cugcaguaggaaacgaauc

SEQ ID NO: 53240 - RNA, 19 nt, Artificial Sequence
  Description of Artificial Sequence: Synthetic oligonucleotide
acuaagauugaagcucaca

SEQ ID NO: 53241 - RNA, 19 nt, Artificial Sequence
  Description of Artificial Sequence: Synthetic oligonucleotide
uugagaacuuaggauguaa

SEQ ID NO: 53242 - RNA, 19 nt, Artificial Sequence
  Description of Artificial Sequence: Synthetic oligonucleotide
aacugcgauugcgugggag

SEQ ID NO: 53243 - RNA, 19 nt, Artificial Sequence
  Description of Artificial Sequence: Synthetic oligonucleotide
ugguuaggucaaaugcagu

SEQ ID NO: 53244 - RNA, 19 nt, Artificial Sequence
  Description of Artificial Sequence: Synthetic oligonucleotide
ugacgucccaucgugggug

SEQ ID NO: 53245 - RNA, 19 nt, Artificial Sequence
  Description of Artificial Sequence: Synthetic oligonucleotide
uugaugcacuuaugaagga

SEQ ID NO: 53246 - RNA, 19 nt, Artificial Sequence
  Description of Artificial Sequence: Synthetic oligonucleotide
cauuugcggaguuguuugc

SEQ ID NO: 53247 - RNA, 19 nt, Artificial Sequence
  Description of Artificial Sequence: Synthetic oligonucleotide
ucgugcaggaauccauuuc

SEQ ID NO: 53248 - RNA, 19 nt, Artificial Sequence
  Description of Artificial Sequence: Synthetic oligonucleotide
uacguucaggaaagccugc

SEQ ID NO: 53249 - RNA, 19 nt, Artificial Sequence
  Description of Artificial Sequence: Synthetic oligonucleotide
caugaacggucccuccagg

SEQ ID NO: 53250 - RNA, 19 nt, Artificial Sequence
  Description of Artificial Sequence: Synthetic oligonucleotide
cagcggaaugaauuuucgc

SEQ ID NO: 53251 - RNA, 19 nt, Artificial Sequence
  Description of Artificial Sequence: Synthetic oligonucleotide
aggaguaagcuuauuuagu

SEQ ID NO: 53252 - RNA, 19 nt, Artificial Sequence
  Description of Artificial Sequence: Synthetic oligonucleotide
aggucaaaugcaguuacau

SEQ ID NO: 53253 - RNA, 19 nt, Artificial Sequence
  Description of Artificial Sequence: Synthetic oligonucleotide
aucuagcacauaaagccca

SEQ ID NO: 53254 - RNA, 19 nt, Artificial Sequence
  Description of Artificial Sequence: Synthetic oligonucleotide
caaguucuuaaacugagau

SEQ ID NO: 53255 - RNA, 19 nt, Artificial Sequence
  Description of Artificial Sequence: Synthetic oligonucleotide
agcauacagugagcuauac

SEQ ID NO: 53256 - RNA, 19 nt, Artificial Sequence
  Description of Artificial Sequence: Synthetic oligonucleotide
ugaugcacuuaugaaggau

SEQ ID NO: 53257 - RNA, 19 nt, Artificial Sequence
  Description of Artificial Sequence: Synthetic oligonucleotide
aaggaugaguuuagacucu

SEQ ID NO: 53258 - RNA, 19 nt, Artificial Sequence
  Description of Artificial Sequence: Synthetic oligonucleotide
guugagcuaguucugaaau

SEQ ID NO: 53259 - RNA, 19 nt, Artificial Sequence
  Description of Artificial Sequence: Synthetic oligonucleotide
ugauuugaacgaugacguc

SEQ ID NO: 53260 - RNA, 19 nt, Artificial Sequence
  Description of Artificial Sequence: Synthetic oligonucleotide
gcuuccgucaguuuaagua

SEQ ID NO: 53261 - RNA, 19 nt, Artificial Sequence
  Description of Artificial Sequence: Synthetic oligonucleotide
aucgucuuugguccauugu

SEQ ID NO: 53262 - RNA, 19 nt, Artificial Sequence
  Description of Artificial Sequence: Synthetic oligonucleotide
auaauaagagggaccaauu

SEQ ID NO: 53263 - RNA, 19 nt, Artificial Sequence
  Description of Artificial Sequence: Synthetic oligonucleotide
uaauuauugcaugcugcua

SEQ ID NO: 53264 - RNA, 19 nt, Artificial Sequence
  Description of Artificial Sequence: Synthetic oligonucleotide
uuuucacgcuuaucauaga

SEQ ID NO: 53265 - RNA, 19 nt, Artificial Sequence
  Description of Artificial Sequence: Synthetic oligonucleotide
aucauagcaacaguauguu

SEQ ID NO: 53266 - RNA, 19 nt, Artificial Sequence
  Description of Artificial Sequence: Synthetic oligonucleotide
ugggucccuauccauuuuc

SEQ ID NO: 53267 - RNA, 19 nt, Artificial Sequence
  Description of Artificial Sequence: Synthetic oligonucleotide
ccaaacugcgauugcgugg

SEQ ID NO: 53268 - RNA, 19 nt, Artificial Sequence
  Description of Artificial Sequence: Synthetic oligonucleotide
agcccuaauucaguuacca

SEQ ID NO: 53269 - RNA, 19 nt, Artificial Sequence
  Description of Artificial Sequence: Synthetic oligonucleotide
agaucaagcuugccaaguu

SEQ ID NO: 53270 - RNA, 19 nt, Artificial Sequence
  Description of Artificial Sequence: Synthetic oligonucleotide
ccuggauaacuccuggacc

SEQ ID NO: 53271 - RNA, 19 nt, Artificial Sequence
  Description of Artificial Sequence: Synthetic oligonucleotide
ucacuuugcuuaacaucuc

SEQ ID NO: 53272 - RNA, 19 nt, Artificial Sequence
  Description of Artificial Sequence: Synthetic oligonucleotide
cacauucuggcaaaguacu

SEQ ID NO: 53273 - RNA, 19 nt, Artificial Sequence
  Description of Artificial Sequence: Synthetic oligonucleotide
aacuuaggauguaauuauu

SEQ ID NO: 53274 - RNA, 19 nt, Artificial Sequence
  Description of Artificial Sequence: Synthetic oligonucleotide
aaggggauaucaaccucca

SEQ ID NO: 53275 - RNA, 19 nt, Artificial Sequence
  Description of Artificial Sequence: Synthetic oligonucleotide
uggauaacuccuggaccag

SEQ ID NO: 53276 - RNA, 19 nt, Artificial Sequence
  Description of Artificial Sequence: Synthetic oligonucleotide
uuucauuugcggaguuguu

SEQ ID NO: 53277 - RNA, 19 nt, Artificial Sequence
  Description of Artificial Sequence: Synthetic oligonucleotide
aaccauucgcgaucuugua

SEQ ID NO: 53278 - RNA, 19 nt, Artificial Sequence
  Description of Artificial Sequence: Synthetic oligonucleotide
gagaacuuaggauguaauu

SEQ ID NO: 53279 - RNA, 19 nt, Artificial Sequence
  Description of Artificial Sequence: Synthetic oligonucleotide
aaguguuuuggggcucuca

SEQ ID NO: 53280 - RNA, 19 nt, Artificial Sequence
  Description of Artificial Sequence: Synthetic oligonucleotide
uuugaacgaugacguccca

SEQ ID NO: 53281 - RNA, 19 nt, Artificial Sequence
  Description of Artificial Sequence: Synthetic oligonucleotide
gugggcuuacuucauuaga

SEQ ID NO: 53282 - RNA, 19 nt, Artificial Sequence
  Description of Artificial Sequence: Synthetic oligonucleotide
uuuucgcagugguuagguc

SEQ ID NO: 53283 - RNA, 19 nt, Artificial Sequence
  Description of Artificial Sequence: Synthetic oligonucleotide
gcugcuaauauucuaucua

SEQ ID NO: 53284 - RNA, 19 nt, Artificial Sequence
  Description of Artificial Sequence: Synthetic oligonucleotide
gaguaagcuuauuuaguau

SEQ ID NO: 53285 - RNA, 19 nt, Artificial Sequence
  Description of Artificial Sequence: Synthetic oligonucleotide
guuacagcggaaugaauuu

SEQ ID NO: 53286 - RNA, 19 nt, Artificial Sequence
  Description of Artificial Sequence: Synthetic oligonucleotide
agugguggauuaguuuuga

SEQ ID NO: 53287 - RNA, 19 nt, Artificial Sequence
  Description of Artificial Sequence: Synthetic oligonucleotide
aguuuagacucuacaccca

SEQ ID NO: 53288 - RNA, 19 nt, Artificial Sequence
  Description of Artificial Sequence: Synthetic oligonucleotide
  modified_base (19)..(19): a, c, u, g, unknown or other
caagaggcgguuuggucgn

SEQ ID NO: 53289 - RNA, 19 nt, Artificial Sequence
  Description of Artificial Sequence: Synthetic oligonucleotide
auagcacgagcugcaaacu

SEQ ID NO: 53290 - RNA, 19 nt, Artificial Sequence
  Description of Artificial Sequence: Synthetic oligonucleotide
cuucguuugcauuuccacu

SEQ ID NO: 53291 - RNA, 19 nt, Artificial Sequence
  Description of Artificial Sequence: Synthetic oligonucleotide
augacgucccaucgugggu

SEQ ID NO: 53292 - RNA, 19 nt, Artificial Sequence
  Description of Artificial Sequence: Synthetic oligonucleotide
caguuaguguguuagcccu

SEQ ID NO: 53293 - RNA, 19 nt, Artificial Sequence
  Description of Artificial Sequence: Synthetic oligonucleotide
uucucgcaacucuacggua

SEQ ID NO: 53294 - RNA, 19 nt, Artificial Sequence
  Description of Artificial Sequence: Synthetic oligonucleotide
aacgacugagcaggccuca

SEQ ID NO: 53295 - RNA, 19 nt, Artificial Sequence
  Description of Artificial Sequence: Synthetic oligonucleotide
cucaaggcauagcuuguca

SEQ ID NO: 53296 - RNA, 19 nt, Artificial Sequence
  Description of Artificial Sequence: Synthetic oligonucleotide
cacgagcugcaaacugugc

SEQ ID NO: 53297 - RNA, 19 nt, Artificial Sequence
  Description of Artificial Sequence: Synthetic oligonucleotide
ugaguuggacucucuucuu

SEQ ID NO: 53298 - RNA, 19 nt, Artificial Sequence
  Description of Artificial Sequence: Synthetic oligonucleotide
aggggauaucaaccuccag

SEQ ID NO: 53299 - RNA, 19 nt, Artificial Sequence
  Description of Artificial Sequence: Synthetic oligonucleotide
guucucgcaacucuacggu

SEQ ID NO: 53300 - RNA, 19 nt, Artificial Sequence
  Description of Artificial Sequence: Synthetic oligonucleotide
guuucaucgcuaggugggc

SEQ ID NO: 53301 - RNA, 19 nt, Artificial Sequence
  Description of Artificial Sequence: Synthetic oligonucleotide
guuagcccuaauucaguua

SEQ ID NO: 53302 - RNA, 19 nt, Artificial Sequence
  Description of Artificial Sequence: Synthetic oligonucleotide
ucgcaacucuacgguaucc

SEQ ID NO: 53303 - RNA, 19 nt, Artificial Sequence
  Description of Artificial Sequence: Synthetic oligonucleotide
cugcgauugcgugggaggc

SEQ ID NO: 53304 - RNA, 19 nt, Artificial Sequence
  Description of Artificial Sequence: Synthetic oligonucleotide
uuauugcaugcugcuaaua

SEQ ID NO: 53305 - RNA, 19 nt, Artificial Sequence
  Description of Artificial Sequence: Synthetic oligonucleotide
gcaugaacggucccuccag

SEQ ID NO: 53306 - RNA, 19 nt, Artificial Sequence
  Description of Artificial Sequence: Synthetic oligonucleotide
gccuaugguaacuggcagc

SEQ ID NO: 53307 - RNA, 19 nt, Artificial Sequence
  Description of Artificial Sequence: Synthetic oligonucleotide
ugcuucgugcaggaaucca

SEQ ID NO: 53308 - RNA, 19 nt, Artificial Sequence
  Description of Artificial Sequence: Synthetic oligonucleotide
gguagaaauacaggcaaua

SEQ ID NO: 53309 - RNA, 19 nt, Artificial Sequence
  Description of Artificial Sequence: Synthetic oligonucleotide
ucuaaacauuaaggauacu

SEQ ID NO: 53310 - RNA, 19 nt, Artificial Sequence
  Description of Artificial Sequence: Synthetic oligonucleotide
acucuacgguauccugcag

SEQ ID NO: 53311 - RNA, 19 nt, Artificial Sequence
  Description of Artificial Sequence: Synthetic oligonucleotide
auuauagcacgagcugcaa

SEQ ID NO: 53312 - RNA, 19 nt, Artificial Sequence
  Description of Artificial Sequence: Synthetic oligonucleotide
gauaagugguggauuaguu

SEQ ID NO: 53313 - RNA, 19 nt, Artificial Sequence
  Description of Artificial Sequence: Synthetic oligonucleotide
gcgaucuuguaauuuagcu

SEQ ID NO: 53314 - RNA, 19 nt, Artificial Sequence
  Description of Artificial Sequence: Synthetic oligonucleotide
cucgcaacucuacgguauc

SEQ ID NO: 53315 - RNA, 19 nt, Artificial Sequence
  Description of Artificial Sequence: Synthetic oligonucleotide
gcuuauuuaguaugccucu

SEQ ID NO: 53316 - RNA, 19 nt, Artificial Sequence
  Description of Artificial Sequence: Synthetic oligonucleotide
  modified_base (16)..(16): a, c, u, g, unknown or other
gaggcgguuuggucgnucu

SEQ ID NO: 53317 - RNA, 19 nt, Artificial Sequence
  Description of Artificial Sequence: Synthetic oligonucleotide
gcagacauagcugagcaua

SEQ ID NO: 53318 - RNA, 19 nt, Artificial Sequence
  Description of Artificial Sequence: Synthetic oligonucleotide
cugagcguuuugcccuggg

SEQ ID NO: 53319 - RNA, 19 nt, Artificial Sequence
  Description of Artificial Sequence: Synthetic oligonucleotide
gguugagcuaguucugaaa

SEQ ID NO: 53320 - RNA, 19 nt, Artificial Sequence
  Description of Artificial Sequence: Synthetic oligonucleotide
agcuuccgucaguuuaagu

SEQ ID NO: 53321 - RNA, 19 nt, Artificial Sequence
  Description of Artificial Sequence: Synthetic oligonucleotide
gaacgacugagcaggccuc

SEQ ID NO: 53322 - RNA, 19 nt, Artificial Sequence
  Description of Artificial Sequence: Synthetic oligonucleotide
  modified_base (14)..(14): a, c, u, g, unknown or other
ggcgguuuggucgnucuuc

SEQ ID NO: 53323 - RNA, 19 nt, Artificial Sequence
  Description of Artificial Sequence: Synthetic oligonucleotide
ggucuaaucgaggucccac

SEQ ID NO: 53324 - RNA, 19 nt, Artificial Sequence
  Description of Artificial Sequence: Synthetic oligonucleotide
cugcaucacuggcuugaag

SEQ ID NO: 53325 - RNA, 19 nt, Artificial Sequence
  Description of Artificial Sequence: Synthetic oligonucleotide
ugcgauugcgugggaggca

SEQ ID NO: 53326 - RNA, 19 nt, Artificial Sequence
  Description of Artificial Sequence: Synthetic oligonucleotide
acguucaggaaagccugca

SEQ ID NO: 53327 - RNA, 19 nt, Artificial Sequence
  Description of Artificial Sequence: Synthetic oligonucleotide
cuacgguauccugcaguag

SEQ ID NO: 53328 - RNA, 19 nt, Artificial Sequence
  Description of Artificial Sequence: Synthetic oligonucleotide
ggaacacauucuggcaaag

SEQ ID NO: 53329 - RNA, 19 nt, Artificial Sequence
  Description of Artificial Sequence: Synthetic oligonucleotide
  modified_base (17)..(17): a, c, u, g, unknown or other
agaggcgguuuggucgnuc

SEQ ID NO: 53330 - RNA, 19 nt, Artificial Sequence
  Description of Artificial Sequence: Synthetic oligonucleotide
cccaucgugggugaaaauc

SEQ ID NO: 53331 - RNA, 19 nt, Artificial Sequence
  Description of Artificial Sequence: Synthetic oligonucleotide
aaacugcgauugcguggga

SEQ ID NO: 53332 - RNA, 19 nt, Artificial Sequence
  Description of Artificial Sequence: Synthetic oligonucleotide
uugaucgucuuugguccau

SEQ ID NO: 53333 - RNA, 19 nt, Artificial Sequence
  Description of Artificial Sequence: Synthetic oligonucleotide
caucuugacggauuugauu

SEQ ID NO: 53334 - RNA, 19 nt, Artificial Sequence
  Description of Artificial Sequence: Synthetic oligonucleotide
gaguuguuugcugcggagu

SEQ ID NO: 53335 - RNA, 19 nt, Artificial Sequence
  Description of Artificial Sequence: Synthetic oligonucleotide
gaccccuuuaaggaugagu

SEQ ID NO: 53336 - RNA, 19 nt, Artificial Sequence
  Description of Artificial Sequence: Synthetic oligonucleotide
cuaaucgaggucccacugu

SEQ ID NO: 53337 - RNA, 19 nt, Artificial Sequence
  Description of Artificial Sequence: Synthetic oligonucleotide
cucuacgguauccugcagu

SEQ ID NO: 53338 - RNA, 19 nt, Artificial Sequence
  Description of Artificial Sequence: Synthetic oligonucleotide
cauaguuaucuggggcuga

SEQ ID NO: 53339 - RNA, 19 nt, Artificial Sequence
  Description of Artificial Sequence: Synthetic oligonucleotide
agcaggccucaaacuaauc

SEQ ID NO: 53340 - RNA, 19 nt, Artificial Sequence
  Description of Artificial Sequence: Synthetic oligonucleotide
  modified_base (5)..(5): a, c, u, g, unknown or other
gucgnucuucuugccaauc

SEQ ID NO: 53341 - RNA, 19 nt, Artificial Sequence
  Description of Artificial Sequence: Synthetic oligonucleotide
aggaugaguuuagacucua

SEQ ID NO: 53342 - RNA, 19 nt, Artificial Sequence
  Description of Artificial Sequence: Synthetic oligonucleotide
ucaucgcuaggugggcuua

SEQ ID NO: 53343 - RNA, 19 nt, Artificial Sequence
  Description of Artificial Sequence: Synthetic oligonucleotide
caucgugggugaaaaucua

SEQ ID NO: 53344 - RNA, 19 nt, Artificial Sequence
  Description of Artificial Sequence: Synthetic oligonucleotide
uuacggcaacaaccaucaa

SEQ ID NO: 53345 - RNA, 19 nt, Artificial Sequence
  Description of Artificial Sequence: Synthetic oligonucleotide
agccuugcgaggaacccaa

SEQ ID NO: 53346 - RNA, 19 nt, Artificial Sequence
  Description of Artificial Sequence: Synthetic oligonucleotide
cgcgaucuuguaauuuagc

SEQ ID NO: 53347 - RNA, 19 nt, Artificial Sequence
  Description of Artificial Sequence: Synthetic oligonucleotide
caaguaucacaauguuuau

SEQ ID NO: 53348 - RNA, 19 nt, Artificial Sequence
  Description of Artificial Sequence: Synthetic oligonucleotide
ugaucgucuuugguccauu

SEQ ID NO: 53349 - RNA, 19 nt, Artificial Sequence
  Description of Artificial Sequence: Synthetic oligonucleotide
cgaucuuguaauuuagcua

SEQ ID NO: 53350 - RNA, 19 nt, Artificial Sequence
  Description of Artificial Sequence: Synthetic oligonucleotide
ggauaagugguggauuagu

SEQ ID NO: 53351 - RNA, 19 nt, Artificial Sequence
  Description of Artificial Sequence: Synthetic oligonucleotide
aucgcuaggugggcuuacu

SEQ ID NO: 53352 - RNA, 19 nt, Artificial Sequence
  Description of Artificial Sequence: Synthetic oligonucleotide
cagcuuccgucaguuuaag

SEQ ID NO: 53353 - RNA, 19 nt, Artificial Sequence
  Description of Artificial Sequence: Synthetic oligonucleotide
aguuaguguguuagcccua

SEQ ID NO: 53354 - RNA, 19 nt, Artificial Sequence
  Description of Artificial Sequence: Synthetic oligonucleotide
gcuuaacaucucaggaaga

SEQ ID NO: 53355 - RNA, 19 nt, Artificial Sequence
  Description of Artificial Sequence: Synthetic oligonucleotide
caaugguguucucgcaacu

SEQ ID NO: 53356 - RNA, 19 nt, Artificial Sequence
  Description of Artificial Sequence: Synthetic oligonucleotide
caucgcuaggugggcuuac

SEQ ID NO: 53357 - RNA, 19 nt, Artificial Sequence
  Description of Artificial Sequence: Synthetic oligonucleotide
cauuccucccuugagccau

SEQ ID NO: 53358 - RNA, 19 nt, Artificial Sequence
  Description of Artificial Sequence: Synthetic oligonucleotide
caauuccacuaccuggcau

SEQ ID NO: 53359 - RNA, 19 nt, Artificial Sequence
  Description of Artificial Sequence: Synthetic oligonucleotide
gcggaguugucaucucguc

SEQ ID NO: 53360 - RNA, 19 nt, Artificial Sequence
  Description of Artificial Sequence: Synthetic oligonucleotide
ccauucgcgaucuuguaau

SEQ ID NO: 53361 - RNA, 19 nt, Artificial Sequence
  Description of Artificial Sequence: Synthetic oligonucleotide
acguuacagcggaaugaau

SEQ ID NO: 53362 - RNA, 19 nt, Artificial Sequence
  Description of Artificial Sequence: Synthetic oligonucleotide
ccaauacguucaggaaagc

SEQ ID NO: 53363 - RNA, 19 nt, Artificial Sequence
  Description of Artificial Sequence: Synthetic oligonucleotide
  modified_base (15)..(15): a, c, u, g, unknown or other
aggcgguuuggucgnucuu

SEQ ID NO: 53364 - RNA, 19 nt, Artificial Sequence
  Description of Artificial Sequence: Synthetic oligonucleotide
cugauccauuaaggacuug

SEQ ID NO: 53365 - RNA, 19 nt, Artificial Sequence
  Description of Artificial Sequence: Synthetic oligonucleotide
cuauuacggcaacaaccau

SEQ ID NO: 53366 - RNA, 19 nt, Artificial Sequence
  Description of Artificial Sequence: Synthetic oligonucleotide
cacaacagcuuccgucagu

SEQ ID NO: 53367 - RNA, 19 nt, Artificial Sequence
  Description of Artificial Sequence: Synthetic oligonucleotide
  modified_base (18)..(18): a, c, u, g, unknown or other
aagaggcgguuuggucgnu

SEQ ID NO: 53368 - RNA, 19 nt, Artificial Sequence
  Description of Artificial Sequence: Synthetic oligonucleotide
ccgucaguuuaaguaguuc

SEQ ID NO: 53369 - RNA, 19 nt, Artificial Sequence
  Description of Artificial Sequence: Synthetic oligonucleotide
gcucaaggcauagcuuguc

SEQ ID NO: 53370 - RNA, 19 nt, Artificial Sequence
  Description of Artificial Sequence: Synthetic oligonucleotide
cuccaacauucgauccuua

SEQ ID NO: 53371 - RNA, 19 nt, Artificial Sequence
  Description of Artificial Sequence: Synthetic oligonucleotide
acgacugagcaggccucaa

SEQ ID NO: 53372 - RNA, 19 nt, Artificial Sequence
  Description of Artificial Sequence: Synthetic oligonucleotide
ccaauuccacuaccuggca

SEQ ID NO: 53373 - RNA, 19 nt, Artificial Sequence
  Description of Artificial Sequence: Synthetic oligonucleotide
cauucgcgaucuuguaauu

SEQ ID NO: 53374 - RNA, 19 nt, Artificial Sequence
  Description of Artificial Sequence: Synthetic oligonucleotide
ucgcagugguuaggucaaa

SEQ ID NO: 53375 - RNA, 19 nt, Artificial Sequence
  Description of Artificial Sequence: Synthetic oligonucleotide
guggggcaauacacagauc

SEQ ID NO: 53376 - RNA, 19 nt, Artificial Sequence
  Description of Artificial Sequence: Synthetic oligonucleotide
cauuaaggacuuggcucgu

SEQ ID NO: 53377 - RNA, 19 nt, Artificial Sequence
  Description of Artificial Sequence: Synthetic oligonucleotide
ggaggggauuuucacgcuu

SEQ ID NO: 53378 - RNA, 19 nt, Artificial Sequence
  Description of Artificial Sequence: Synthetic oligonucleotide
ggauaacuccuggaccagu

SEQ ID NO: 53379 - RNA, 19 nt, Artificial Sequence
  Description of Artificial Sequence: Synthetic oligonucleotide
cuagugcuucgugcaggaa

SEQ ID NO: 53380 - RNA, 19 nt, Artificial Sequence
  Description of Artificial Sequence: Synthetic oligonucleotide
cggaaugaauuuucgcagu

SEQ ID NO: 53381 - RNA, 19 nt, Artificial Sequence
  Description of Artificial Sequence: Synthetic oligonucleotide
gcccuaauucaguuaccau

SEQ ID NO: 53382 - RNA, 19 nt, Artificial Sequence
  Description of Artificial Sequence: Synthetic oligonucleotide
  modified_base (6)..(6): a, c, u, g, unknown or other
ggucgnucuucuugccaau

SEQ ID NO: 53383 - RNA, 19 nt, Artificial Sequence
  Description of Artificial Sequence: Synthetic oligonucleotide
ggagcucaaggcauagcuu

SEQ ID NO: 53384 - RNA, 19 nt, Artificial Sequence
  Description of Artificial Sequence: Synthetic oligonucleotide
  modified_base (13)..(13): a, c, u, g, unknown or other
gcgguuuggucgnucuucu

SEQ ID NO: 53385 - RNA, 19 nt, Artificial Sequence
  Description of Artificial Sequence: Synthetic oligonucleotide
ggcggcaugaacggucccu

SEQ ID NO: 53386 - RNA, 19 nt, Artificial Sequence
  Description of Artificial Sequence: Synthetic oligonucleotide
gcgauugcgugggaggcau

SEQ ID NO: 53387 - RNA, 19 nt, Artificial Sequence
  Description of Artificial Sequence: Synthetic oligonucleotide
cggaguugucaucucgucu

SEQ ID NO: 53388 - RNA, 19 nt, Artificial Sequence
  Description of Artificial Sequence: Synthetic oligonucleotide
ccccuuuaaggaugaguuu

SEQ ID NO: 53389 - RNA, 19 nt, Artificial Sequence
  Description of Artificial Sequence: Synthetic oligonucleotide
cggcaacaaccaucaauua

SEQ ID NO: 53390 - RNA, 19 nt, Artificial Sequence
  Description of Artificial Sequence: Synthetic oligonucleotide
  modified_base (12)..(12): a, c, u, g, unknown or other
cgguuuggucgnucuucuu

SEQ ID NO: 53391 - RNA, 19 nt, Artificial Sequence
  Description of Artificial Sequence: Synthetic oligonucleotide
aacuaauucagccaucagc

SEQ ID NO: 53392 - RNA, 19 nt, Artificial Sequence
  Description of Artificial Sequence: Synthetic oligonucleotide
agagucaccacacagucgc

SEQ ID NO: 53393 - RNA, 19 nt, Artificial Sequence
  Description of Artificial Sequence: Synthetic oligonucleotide
caaagcauagaccugaucc

SEQ ID NO: 53394 - RNA, 19 nt, Artificial Sequence
  Description of Artificial Sequence: Synthetic oligonucleotide
ucucggaaaaguaagauac

SEQ ID NO: 53395 - RNA, 19 nt, Artificial Sequence
  Description of Artificial Sequence: Synthetic oligonucleotide
aaauugcucaacaagagag

SEQ ID NO: 53396 - RNA, 19 nt, Artificial Sequence
  Description of Artificial Sequence: Synthetic oligonucleotide
aaccuaauugauuaacguc

SEQ ID NO: 53397 - RNA, 19 nt, Artificial Sequence
  Description of Artificial Sequence: Synthetic oligonucleotide
agaagauuccgcucaaugc

SEQ ID NO: 53398 - RNA, 19 nt, Artificial Sequence
  Description of Artificial Sequence: Synthetic oligonucleotide
guuuauacaaggcagguug

SEQ ID NO: 53399 - RNA, 19 nt, Artificial Sequence
  Description of Artificial Sequence: Synthetic oligonucleotide
aguaauaucaagccaagga

SEQ ID NO: 53400 - RNA, 19 nt, Artificial Sequence
  Description of Artificial Sequence: Synthetic oligonucleotide
aauauaucucugcacuuuc

SEQ ID NO: 53401 - RNA, 19 nt, Artificial Sequence
  Description of Artificial Sequence: Synthetic oligonucleotide
aaagaugaugauauucagc

SEQ ID NO: 53402 - RNA, 19 nt, Artificial Sequence
  Description of Artificial Sequence: Synthetic oligonucleotide
guaauaucaagccaaggag

SEQ ID NO: 53403 - RNA, 19 nt, Artificial Sequence
  Description of Artificial Sequence: Synthetic oligonucleotide
aauaucaagccaaggaggg

SEQ ID NO: 53404 - RNA, 19 nt, Artificial Sequence
  Description of Artificial Sequence: Synthetic oligonucleotide
ugcaaauugcucaacaaga

SEQ ID NO: 53405 - RNA, 19 nt, Artificial Sequence
  Description of Artificial Sequence: Synthetic oligonucleotide
auugauuaacgucccaugg

SEQ ID NO: 53406 - RNA, 19 nt, Artificial Sequence
  Description of Artificial Sequence: Synthetic oligonucleotide
uccaaaauugacauaacuc

SEQ ID NO: 53407 - RNA, 19 nt, Artificial Sequence
  Description of Artificial Sequence: Synthetic oligonucleotide
uguuugaagagguauguca

SEQ ID NO: 53408 - RNA, 19 nt, Artificial Sequence
  Description of Artificial Sequence: Synthetic oligonucleotide
aaaccuaauugauuaacgu

SEQ ID NO: 53409 - RNA, 19 nt, Artificial Sequence
  Description of Artificial Sequence: Synthetic oligonucleotide
aauugauuaacgucccaug

SEQ ID NO: 53410 - RNA, 19 nt, Artificial Sequence
  Description of Artificial Sequence: Synthetic oligonucleotide
aauucgagcuucucauuac

SEQ ID NO: 53411 - RNA, 19 nt, Artificial Sequence
  Description of Artificial Sequence: Synthetic oligonucleotide
aauccauucgaagagcauc

SEQ ID NO: 53412 - RNA, 19 nt, Artificial Sequence
  Description of Artificial Sequence: Synthetic oligonucleotide
ucuauccgcaaccugauca

SEQ ID NO: 53413 - RNA, 19 nt, Artificial Sequence
  Description of Artificial Sequence: Synthetic oligonucleotide
uugauuaacgucccauggg

SEQ ID NO: 53414 - RNA, 19 nt, Artificial Sequence
  Description of Artificial Sequence: Synthetic oligonucleotide
aguucauacauucaugagu

SEQ ID NO: 53415 - RNA, 19 nt, Artificial Sequence
  Description of Artificial Sequence: Synthetic oligonucleotide
uuuuaagggagaauguuaa

SEQ ID NO: 53416 - RNA, 19 nt, Artificial Sequence
  Description of Artificial Sequence: Synthetic oligonucleotide
uuuagcuggaguuauuugu

SEQ ID NO: 53417 - RNA, 19 nt, Artificial Sequence
  Description of Artificial Sequence: Synthetic oligonucleotide
ugaggguaaguaaaauggg

SEQ ID NO: 53418 - RNA, 19 nt, Artificial Sequence
  Description of Artificial Sequence: Synthetic oligonucleotide
aacuguaccgcgcuaagcu

SEQ ID NO: 53419 - RNA, 19 nt, Artificial Sequence
  Description of Artificial Sequence: Synthetic oligonucleotide
ccaaaauugacauaacucc

SEQ ID NO: 53420 - RNA, 19 nt, Artificial Sequence
  Description of Artificial Sequence: Synthetic oligonucleotide
ugaucacgcaagaaaagag

SEQ ID NO: 53421 - RNA, 19 nt, Artificial Sequence
  Description of Artificial Sequence: Synthetic oligonucleotide
aauugcucaacaagagagc

SEQ ID NO: 53422 - RNA, 19 nt, Artificial Sequence
  Description of Artificial Sequence: Synthetic oligonucleotide
aaagcuguuagugcugaac

SEQ ID NO: 53423 - RNA, 19 nt, Artificial Sequence
  Description of Artificial Sequence: Synthetic oligonucleotide
ugucagguuggacugauug

SEQ ID NO: 53424 - RNA, 19 nt, Artificial Sequence
  Description of Artificial Sequence: Synthetic oligonucleotide
uguuauuaagaaccccucc

SEQ ID NO: 53425 - RNA, 19 nt, Artificial Sequence
  Description of Artificial Sequence: Synthetic oligonucleotide
aacaaggguuaauacagca

SEQ ID NO: 53426 - RNA, 19 nt, Artificial Sequence
  Description of Artificial Sequence: Synthetic oligonucleotide
aucaggaacgcaucggugg

SEQ ID NO: 53427 - RNA, 19 nt, Artificial Sequence
  Description of Artificial Sequence: Synthetic oligonucleotide
auaacucccacugagagca

SEQ ID NO: 53428 - RNA, 19 nt, Artificial Sequence
  Description of Artificial Sequence: Synthetic oligonucleotide
ugauuaacgucccaugggu

SEQ ID NO: 53429 - RNA, 19 nt, Artificial Sequence
  Description of Artificial Sequence: Synthetic oligonucleotide
ugcuauucacuccauaagu

SEQ ID NO: 53430 - RNA, 19 nt, Artificial Sequence
  Description of Artificial Sequence: Synthetic oligonucleotide
ugaaacagcuaguuaaccu

SEQ ID NO: 53431 - RNA, 19 nt, Artificial Sequence
  Description of Artificial Sequence: Synthetic oligonucleotide
ugaacuagagauguguaca

SEQ ID NO: 53432 - RNA, 19 nt, Artificial Sequence
  Description of Artificial Sequence: Synthetic oligonucleotide
aagcuguuagugcugaaca

SEQ ID NO: 53433 - RNA, 19 nt, Artificial Sequence
  Description of Artificial Sequence: Synthetic oligonucleotide
acccuuacaagucuauccg

SEQ ID NO: 53434 - RNA, 19 nt, Artificial Sequence
  Description of Artificial Sequence: Synthetic oligonucleotide
aucgucucaucauucaauc

SEQ ID NO: 53435 - RNA, 19 nt, Artificial Sequence
  Description of Artificial Sequence: Synthetic oligonucleotide
aaauucgagcuucucauua

SEQ ID NO: 53436 - RNA, 19 nt, Artificial Sequence
  Description of Artificial Sequence: Synthetic oligonucleotide
acauguuuauacaaggcag

SEQ ID NO: 53437 - RNA, 19 nt, Artificial Sequence
  Description of Artificial Sequence: Synthetic oligonucleotide
acuacuguauccaauggag

SEQ ID NO: 53438 - RNA, 19 nt, Artificial Sequence
  Description of Artificial Sequence: Synthetic oligonucleotide
uuccuaugaagacacucag

SEQ ID NO: 53439 - RNA, 19 nt, Artificial Sequence
  Description of Artificial Sequence: Synthetic oligonucleotide
ucuccuagugucaggauac

SEQ ID NO: 53440 - RNA, 19 nt, Artificial Sequence
  Description of Artificial Sequence: Synthetic oligonucleotide
aacuucugagagucggcgg

SEQ ID NO: 53441 - RNA, 19 nt, Artificial Sequence
  Description of Artificial Sequence: Synthetic oligonucleotide
aagaguugucagcucauca

SEQ ID NO: 53442 - RNA, 19 nt, Artificial Sequence
  Description of Artificial Sequence: Synthetic oligonucleotide
agaagguaguccgacaccg

SEQ ID NO: 53443 - RNA, 19 nt, Artificial Sequence
  Description of Artificial Sequence: Synthetic oligonucleotide
ucgagcuucucauuacccg

SEQ ID NO: 53444 - RNA, 19 nt, Artificial Sequence
  Description of Artificial Sequence: Synthetic oligonucleotide
uaccauugggagaugagac

SEQ ID NO: 53445 - RNA, 19 nt, Artificial Sequence
  Description of Artificial Sequence: Synthetic oligonucleotide
uuaacaggauuguuuguga

SEQ ID NO: 53446 - RNA, 19 nt, Artificial Sequence
  Description of Artificial Sequence: Synthetic oligonucleotide
caaggguuaauacagcauc

SEQ ID NO: 53447 - RNA, 19 nt, Artificial Sequence
  Description of Artificial Sequence: Synthetic oligonucleotide
uagugucaggauacgauug

SEQ ID NO: 53448 - RNA, 19 nt, Artificial Sequence
  Description of Artificial Sequence: Synthetic oligonucleotide
gucacaauauggucuaggc

SEQ ID NO: 53449 - RNA, 19 nt, Artificial Sequence
  Description of Artificial Sequence: Synthetic oligonucleotide
auauucagcaccguggaca

SEQ ID NO: 53450 - RNA, 19 nt, Artificial Sequence
  Description of Artificial Sequence: Synthetic oligonucleotide
ucucccuugcaauuguuca

SEQ ID NO: 53451 - RNA, 19 nt, Artificial Sequence
  Description of Artificial Sequence: Synthetic oligonucleotide
aagucuauccgcaaccuga

SEQ ID NO: 53452 - RNA, 19 nt, Artificial Sequence
  Description of Artificial Sequence: Synthetic oligonucleotide
ggagggauaaauccauucg

SEQ ID NO: 53453 - RNA, 19 nt, Artificial Sequence
  Description of Artificial Sequence: Synthetic oligonucleotide
gaggggucgagacauagac

SEQ ID NO: 53454 - RNA, 19 nt, Artificial Sequence
  Description of Artificial Sequence: Synthetic oligonucleotide
uaugucacaauauggucua

SEQ ID NO: 53455 - RNA, 19 nt, Artificial Sequence
  Description of Artificial Sequence: Synthetic oligonucleotide
aucacgcaagaaaagaguc

SEQ ID NO: 53456 - RNA, 19 nt, Artificial Sequence
  Description of Artificial Sequence: Synthetic oligonucleotide
ugucacaauauggucuagg

SEQ ID NO: 53457 - RNA, 19 nt, Artificial Sequence
  Description of Artificial Sequence: Synthetic oligonucleotide
aauggcugaaagauacuug

SEQ ID NO: 53458 - RNA, 19 nt, Artificial Sequence
  Description of Artificial Sequence: Synthetic oligonucleotide
uuggcauugaaggcaaaag

SEQ ID NO: 53459 - RNA, 19 nt, Artificial Sequence
  Description of Artificial Sequence: Synthetic oligonucleotide
auagaccacugauuccuac

SEQ ID NO: 53460 - RNA, 19 nt, Artificial Sequence
  Description of Artificial Sequence: Synthetic oligonucleotide
uuugaagagguaugucaca

SEQ ID NO: 53461 - RNA, 19 nt, Artificial Sequence
  Description of Artificial Sequence: Synthetic oligonucleotide
auaaguggaauucuucauu

SEQ ID NO: 53462 - RNA, 19 nt, Artificial Sequence
  Description of Artificial Sequence: Synthetic oligonucleotide
uuagugagugcacgaacac

SEQ ID NO: 53463 - RNA, 19 nt, Artificial Sequence
  Description of Artificial Sequence: Synthetic oligonucleotide
auuaacgucccauggguaa

SEQ ID NO: 53464 - RNA, 19 nt, Artificial Sequence
  Description of Artificial Sequence: Synthetic oligonucleotide
uuguuauuaagaaccccuc

SEQ ID NO: 53465 - RNA, 19 nt, Artificial Sequence
  Description of Artificial Sequence: Synthetic oligonucleotide
gagggauaaauccauucga

SEQ ID NO: 53466 - RNA, 19 nt, Artificial Sequence
  Description of Artificial Sequence: Synthetic oligonucleotide
uggcuauugacgaugcuau

SEQ ID NO: 53467 - RNA, 19 nt, Artificial Sequence
  Description of Artificial Sequence: Synthetic oligonucleotide
cuauugacgaugcuauuuc

SEQ ID NO: 53468 - RNA, 19 nt, Artificial Sequence
  Description of Artificial Sequence: Synthetic oligonucleotide
uaacaaggguuaauacagc

SEQ ID NO: 53469 - RNA, 19 nt, Artificial Sequence
  Description of Artificial Sequence: Synthetic oligonucleotide
ugguaccagagcucgauug

SEQ ID NO: 53470 - RNA, 19 nt, Artificial Sequence
  Description of Artificial Sequence: Synthetic oligonucleotide
cucgacggaaugcugacag

SEQ ID NO: 53471 - RNA, 19 nt, Artificial Sequence
  Description of Artificial Sequence: Synthetic oligonucleotide
gauuccuacagucuucaaa

SEQ ID NO: 53472 - RNA, 19 nt, Artificial Sequence
  Description of Artificial Sequence: Synthetic oligonucleotide
uguacagguagaguccaag

SEQ ID NO: 53473 - RNA, 19 nt, Artificial Sequence
  Description of Artificial Sequence: Synthetic oligonucleotide
uaauugauuaacgucccau

SEQ ID NO: 53474 - RNA, 19 nt, Artificial Sequence
  Description of Artificial Sequence: Synthetic oligonucleotide
caucauucaaucccagaac

SEQ ID NO: 53475 - RNA, 19 nt, Artificial Sequence
  Description of Artificial Sequence: Synthetic oligonucleotide
ugagucguugacuucucga

SEQ ID NO: 53476 - RNA, 19 nt, Artificial Sequence
  Description of Artificial Sequence: Synthetic oligonucleotide
uccuaugaagacacucagc

SEQ ID NO: 53477 - RNA, 19 nt, Artificial Sequence
  Description of Artificial Sequence: Synthetic oligonucleotide
cuuagugagugcacgaaca

SEQ ID NO: 53478 - RNA, 19 nt, Artificial Sequence
  Description of Artificial Sequence: Synthetic oligonucleotide
gaguuauuugucacuguag

SEQ ID NO: 53479 - RNA, 19 nt, Artificial Sequence
  Description of Artificial Sequence: Synthetic oligonucleotide
auguagaucuuacgaaacu

SEQ ID NO: 53480 - RNA, 19 nt, Artificial Sequence
  Description of Artificial Sequence: Synthetic oligonucleotide
ugaacuguaccgcgcuaag

SEQ ID NO: 53481 - RNA, 19 nt, Artificial Sequence
  Description of Artificial Sequence: Synthetic oligonucleotide
cuuguuauuaagaaccccu

SEQ ID NO: 53482 - RNA, 19 nt, Artificial Sequence
  Description of Artificial Sequence: Synthetic oligonucleotide
ggacugauuguuaauaccc

SEQ ID NO: 53483 - RNA, 19 nt, Artificial Sequence
  Description of Artificial Sequence: Synthetic oligonucleotide
uagaagguaguccgacacc

SEQ ID NO: 53484 - RNA, 19 nt, Artificial Sequence
  Description of Artificial Sequence: Synthetic oligonucleotide
gguuaauacagcaucagga

SEQ ID NO: 53485 - RNA, 19 nt, Artificial Sequence
  Description of Artificial Sequence: Synthetic oligonucleotide
auugcucaacaagagagca

SEQ ID NO: 53486 - RNA, 19 nt, Artificial Sequence
  Description of Artificial Sequence: Synthetic oligonucleotide
cucuccuaaauccaccaug

SEQ ID NO: 53487 - RNA, 19 nt, Artificial Sequence
  Description of Artificial Sequence: Synthetic oligonucleotide
guuugaagagguaugucac

SEQ ID NO: 53488 - RNA, 19 nt, Artificial Sequence
  Description of Artificial Sequence: Synthetic oligonucleotide
agcuaucccucucaggucu

SEQ ID NO: 53489 - RNA, 19 nt, Artificial Sequence
  Description of Artificial Sequence: Synthetic oligonucleotide
ugcacuagacucuguaaaa

SEQ ID NO: 53490 - RNA, 19 nt, Artificial Sequence
  Description of Artificial Sequence: Synthetic oligonucleotide
uguagaagguaguccgaca

SEQ ID NO: 53491 - RNA, 19 nt, Artificial Sequence
  Description of Artificial Sequence: Synthetic oligonucleotide
ggcgguacagcuuugagga

SEQ ID NO: 53492 - RNA, 19 nt, Artificial Sequence
  Description of Artificial Sequence: Synthetic oligonucleotide
uugagucguugacuucucg

SEQ ID NO: 53493 - RNA, 19 nt, Artificial Sequence
  Description of Artificial Sequence: Synthetic oligonucleotide
accagagcucgauugcccg

SEQ ID NO: 53494 - RNA, 19 nt, Artificial Sequence
  Description of Artificial Sequence: Synthetic oligonucleotide
cuuuuaacagcaagaggca

SEQ ID NO: 53495 - RNA, 19 nt, Artificial Sequence
  Description of Artificial Sequence: Synthetic oligonucleotide
uuugccucucuacuguguc

SEQ ID NO: 53496 - RNA, 19 nt, Artificial Sequence
  Description of Artificial Sequence: Synthetic oligonucleotide
uucucggaaaaguaagaua

SEQ ID NO: 53497 - RNA, 19 nt, Artificial Sequence
  Description of Artificial Sequence: Synthetic oligonucleotide
cagcuaguuaaccuuugcc

SEQ ID NO: 53498 - RNA, 19 nt, Artificial Sequence
  Description of Artificial Sequence: Synthetic oligonucleotide
acgauugccauacauuguu

SEQ ID NO: 53499 - RNA, 19 nt, Artificial Sequence
  Description of Artificial Sequence: Synthetic oligonucleotide
aaggguuaauacagcauca

SEQ ID NO: 53500 - RNA, 19 nt, Artificial Sequence
  Description of Artificial Sequence: Synthetic oligonucleotide
acugauuguuaauacccaa

SEQ ID NO: 53501 - RNA, 19 nt, Artificial Sequence
  Description of Artificial Sequence: Synthetic oligonucleotide
guaagauaccauugggaga

SEQ ID NO: 53502 - RNA, 19 nt, Artificial Sequence
  Description of Artificial Sequence: Synthetic oligonucleotide
gauaccauugggagaugag

SEQ ID NO: 53503 - RNA, 19 nt, Artificial Sequence
  Description of Artificial Sequence: Synthetic oligonucleotide
uccuuacacuacuguaucc

SEQ ID NO: 53504 - RNA, 19 nt, Artificial Sequence
  Description of Artificial Sequence: Synthetic oligonucleotide
uuuaagggagaauguuaaa

SEQ ID NO: 53505 - RNA, 19 nt, Artificial Sequence
  Description of Artificial Sequence: Synthetic oligonucleotide
caguucauacauucaugag

SEQ ID NO: 53506 - RNA, 19 nt, Artificial Sequence
  Description of Artificial Sequence: Synthetic oligonucleotide
cuaauaacaaggguuaaua

SEQ ID NO: 53507 - RNA, 19 nt, Artificial Sequence
  Description of Artificial Sequence: Synthetic oligonucleotide
uccccaauguagaucuuac

SEQ ID NO: 53508 - RNA, 19 nt, Artificial Sequence
  Description of Artificial Sequence: Synthetic oligonucleotide
agcauuggugcacuagacu

SEQ ID NO: 53509 - RNA, 19 nt, Artificial Sequence
  Description of Artificial Sequence: Synthetic oligonucleotide
uuaacgucccauggguaag

SEQ ID NO: 53510 - RNA, 19 nt, Artificial Sequence
  Description of Artificial Sequence: Synthetic oligonucleotide
ggggucgagacauagacca

SEQ ID NO: 53511 - RNA, 19 nt, Artificial Sequence
  Description of Artificial Sequence: Synthetic oligonucleotide
gaaucauagcuggaugcug

SEQ ID NO: 53512 - RNA, 19 nt, Artificial Sequence
  Description of Artificial Sequence: Synthetic oligonucleotide
aguucauaugguccugggu

SEQ ID NO: 53513 - RNA, 19 nt, Artificial Sequence
  Description of Artificial Sequence: Synthetic oligonucleotide
gugauugguucacaacgcc

SEQ ID NO: 53514 - RNA, 19 nt, Artificial Sequence
  Description of Artificial Sequence: Synthetic oligonucleotide
ucgucucaucauucaaucc

SEQ ID NO: 53515 - RNA, 19 nt, Artificial Sequence
  Description of Artificial Sequence: Synthetic oligonucleotide
agcugaacuagagaugugu

SEQ ID NO: 53516 - RNA, 19 nt, Artificial Sequence
  Description of Artificial Sequence: Synthetic oligonucleotide
aguuugaugaaagucugua

SEQ ID NO: 53517 - RNA, 19 nt, Artificial Sequence
  Description of Artificial Sequence: Synthetic oligonucleotide
auaccauugggagaugaga

SEQ ID NO: 53518 - RNA, 19 nt, Artificial Sequence
  Description of Artificial Sequence: Synthetic oligonucleotide
gaaacagcuaguuaaccuu

SEQ ID NO: 53519 - RNA, 19 nt, Artificial Sequence
  Description of Artificial Sequence: Synthetic oligonucleotide
ucgauugcccgcuggagaa

SEQ ID NO: 53520 - RNA, 19 nt, Artificial Sequence
  Description of Artificial Sequence: Synthetic oligonucleotide
ugagccaagcgggaaucgg

SEQ ID NO: 53521 - RNA, 19 nt, Artificial Sequence
  Description of Artificial Sequence: Synthetic oligonucleotide
cuauccgcaaccugaucac

SEQ ID NO: 53522 - RNA, 19 nt, Artificial Sequence
  Description of Artificial Sequence: Synthetic oligonucleotide
cauagaccugauccuuugg

SEQ ID NO: 53523 - RNA, 19 nt, Artificial Sequence
  Description of Artificial Sequence: Synthetic oligonucleotide
caaauugcucaacaagaga

SEQ ID NO: 53524 - RNA, 19 nt, Artificial Sequence
  Description of Artificial Sequence: Synthetic oligonucleotide
ucauucaaucccagaacuu

SEQ ID NO: 53525 - RNA, 19 nt, Artificial Sequence
  Description of Artificial Sequence: Synthetic oligonucleotide
ucagguuggacugauuguu

SEQ ID NO: 53526 - RNA, 19 nt, Artificial Sequence
  Description of Artificial Sequence: Synthetic oligonucleotide
gguaugucacaauaugguc

SEQ ID NO: 53527 - RNA, 19 nt, Artificial Sequence
  Description of Artificial Sequence: Synthetic oligonucleotide
cucaggucucucacuaggc

SEQ ID NO: 53528 - RNA, 19 nt, Artificial Sequence
  Description of Artificial Sequence: Synthetic oligonucleotide
gguacaggcuggaucaugg

SEQ ID NO: 53529 - RNA, 19 nt, Artificial Sequence
  Description of Artificial Sequence: Synthetic oligonucleotide
auccgcaaccugaucacgc

SEQ ID NO: 53530 - RNA, 19 nt, Artificial Sequence
  Description of Artificial Sequence: Synthetic oligonucleotide
gcauuggugcacuagacuc

SEQ ID NO: 53531 - RNA, 19 nt, Artificial Sequence
  Description of Artificial Sequence: Synthetic oligonucleotide
auaucaagccaaggagggg

SEQ ID NO: 53532 - RNA, 19 nt, Artificial Sequence
  Description of Artificial Sequence: Synthetic oligonucleotide
uguaccgcgcuaagcuuca

SEQ ID NO: 53533 - RNA, 19 nt, Artificial Sequence
  Description of Artificial Sequence: Synthetic oligonucleotide
gucgcugagaucuguuaug

SEQ ID NO: 53534 - RNA, 19 nt, Artificial Sequence
  Description of Artificial Sequence: Synthetic oligonucleotide
ugacuucucgacggaaugc

SEQ ID NO: 53535 - RNA, 19 nt, Artificial Sequence
  Description of Artificial Sequence: Synthetic oligonucleotide
acgucccauggguaagagc

SEQ ID NO: 53536 - RNA, 19 nt, Artificial Sequence
  Description of Artificial Sequence: Synthetic oligonucleotide
uucucauuacccgccugag

SEQ ID NO: 53537 - RNA, 19 nt, Artificial Sequence
  Description of Artificial Sequence: Synthetic oligonucleotide
ugugcauaccaugguguca

SEQ ID NO: 53538 - RNA, 19 nt, Artificial Sequence
  Description of Artificial Sequence: Synthetic oligonucleotide
uauccgcaaccugaucacg

SEQ ID NO: 53539 - RNA, 19 nt, Artificial Sequence
  Description of Artificial Sequence: Synthetic oligonucleotide
uacuucaugcuagguagac

SEQ ID NO: 53540 - RNA, 19 nt, Artificial Sequence
  Description of Artificial Sequence: Synthetic oligonucleotide
guagaccuuguuauuaaga

SEQ ID NO: 53541 - RNA, 19 nt, Artificial Sequence
  Description of Artificial Sequence: Synthetic oligonucleotide
uucucgacggaaugcugac

SEQ ID NO: 53542 - RNA, 19 nt, Artificial Sequence
  Description of Artificial Sequence: Synthetic oligonucleotide
ucgacggaaugcugacagg

SEQ ID NO: 53543 - RNA, 19 nt, Artificial Sequence
  Description of Artificial Sequence: Synthetic oligonucleotide
ucauuacccgccugagcca

SEQ ID NO: 53544 - RNA, 19 nt, Artificial Sequence
  Description of Artificial Sequence: Synthetic oligonucleotide
aaacagcuaguuaaccuuu

SEQ ID NO: 53545 - RNA, 19 nt, Artificial Sequence
  Description of Artificial Sequence: Synthetic oligonucleotide
uugcugguuucucggaaaa

SEQ ID NO: 53546 - RNA, 19 nt, Artificial Sequence
  Description of Artificial Sequence: Synthetic oligonucleotide
ucggcgguacagcuuugag

SEQ ID NO: 53547 - RNA, 19 nt, Artificial Sequence
  Description of Artificial Sequence: Synthetic oligonucleotide
uggugcacuagacucugua

SEQ ID NO: 53548 - RNA, 19 nt, Artificial Sequence
  Description of Artificial Sequence: Synthetic oligonucleotide
ucccuugcaauuguucaac

SEQ ID NO: 53549 - RNA, 19 nt, Artificial Sequence
  Description of Artificial Sequence: Synthetic oligonucleotide
gguaccagagcucgauugc

SEQ ID NO: 53550 - RNA, 19 nt, Artificial Sequence
  Description of Artificial Sequence: Synthetic oligonucleotide
guacaugaugacaugaggu

SEQ ID NO: 53551 - RNA, 19 nt, Artificial Sequence
  Description of Artificial Sequence: Synthetic oligonucleotide
cauguuuccuggugaaaca

SEQ ID NO: 53552 - RNA, 19 nt, Artificial Sequence
  Description of Artificial Sequence: Synthetic oligonucleotide
gacugauuguuaauaccca

SEQ ID NO: 53553 - RNA, 19 nt, Artificial Sequence
  Description of Artificial Sequence: Synthetic oligonucleotide
ggaauugaacaccaguucu

SEQ ID NO: 53554 - RNA, 19 nt, Artificial Sequence
  Description of Artificial Sequence: Synthetic oligonucleotide
cuguaccgcgcuaagcuuc

SEQ ID NO: 53555 - RNA, 19 nt, Artificial Sequence
  Description of Artificial Sequence: Synthetic oligonucleotide
uccgcaaccugaucacgca

SEQ ID NO: 53556 - RNA, 19 nt, Artificial Sequence
  Description of Artificial Sequence: Synthetic oligonucleotide
guacaaggcaaauagcuuu

SEQ ID NO: 53557 - RNA, 19 nt, Artificial Sequence
  Description of Artificial Sequence: Synthetic oligonucleotide
gccucuuguucauuaaagc

SEQ ID NO: 53558 - RNA, 19 nt, Artificial Sequence
  Description of Artificial Sequence: Synthetic oligonucleotide
uggugcucccucauggcuc

SEQ ID NO: 53559 - RNA, 19 nt, Artificial Sequence
  Description of Artificial Sequence: Synthetic oligonucleotide
gcuauucacuccauaagug

SEQ ID NO: 53560 - RNA, 19 nt, Artificial Sequence
  Description of Artificial Sequence: Synthetic oligonucleotide
caaacgcugcugugagugg

SEQ ID NO: 53561 - RNA, 19 nt, Artificial Sequence
  Description of Artificial Sequence: Synthetic oligonucleotide
gcgggaaucggucagguuc

SEQ ID NO: 53562 - RNA, 19 nt, Artificial Sequence
  Description of Artificial Sequence: Synthetic oligonucleotide
gggaauugaacaccaguuc

SEQ ID NO: 53563 - RNA, 19 nt, Artificial Sequence
  Description of Artificial Sequence: Synthetic oligonucleotide
uuauggccacacacaucag

SEQ ID NO: 53564 - RNA, 19 nt, Artificial Sequence
  Description of Artificial Sequence: Synthetic oligonucleotide
gaacagcuagugcuuuaac

SEQ ID NO: 53565 - RNA, 19 nt, Artificial Sequence
  Description of Artificial Sequence: Synthetic oligonucleotide
gaucacgcaagaaaagagu

SEQ ID NO: 53566 - RNA, 19 nt, Artificial Sequence
  Description of Artificial Sequence: Synthetic oligonucleotide
aagagagcaaauggcucaa

SEQ ID NO: 53567 - RNA, 19 nt, Artificial Sequence
  Description of Artificial Sequence: Synthetic oligonucleotide
gugucaagugcaguaaguc

SEQ ID NO: 53568 - RNA, 19 nt, Artificial Sequence
  Description of Artificial Sequence: Synthetic oligonucleotide
cuggggaagacaaaguuau

SEQ ID NO: 53569 - RNA, 19 nt, Artificial Sequence
  Description of Artificial Sequence: Synthetic oligonucleotide
gaacuguaccgcgcuaagc

SEQ ID NO: 53570 - RNA, 19 nt, Artificial Sequence
  Description of Artificial Sequence: Synthetic oligonucleotide
accgcgcuaagcuucacua

SEQ ID NO: 53571 - RNA, 19 nt, Artificial Sequence
  Description of Artificial Sequence: Synthetic oligonucleotide
ucgccauacauaaccccuc

SEQ ID NO: 53572 - RNA, 19 nt, Artificial Sequence
  Description of Artificial Sequence: Synthetic oligonucleotide
cagcauuggugcacuagac

SEQ ID NO: 53573 - RNA, 19 nt, Artificial Sequence
  Description of Artificial Sequence: Synthetic oligonucleotide
aggauuguuugugaggguu

SEQ ID NO: 53574 - RNA, 19 nt, Artificial Sequence
  Description of Artificial Sequence: Synthetic oligonucleotide
caagucuauccgcaaccug

SEQ ID NO: 53575 - RNA, 19 nt, Artificial Sequence
  Description of Artificial Sequence: Synthetic oligonucleotide
aacgucccauggguaagag

SEQ ID NO: 53576 - RNA, 19 nt, Artificial Sequence
  Description of Artificial Sequence: Synthetic oligonucleotide
acgcaagaaaagagucacc

SEQ ID NO: 53577 - RNA, 19 nt, Artificial Sequence
  Description of Artificial Sequence: Synthetic oligonucleotide
uucacucgccauacauaac

SEQ ID NO: 53578 - RNA, 19 nt, Artificial Sequence
  Description of Artificial Sequence: Synthetic oligonucleotide
gguaguccgacaccgcaug

SEQ ID NO: 53579 - RNA, 19 nt, Artificial Sequence
  Description of Artificial Sequence: Synthetic oligonucleotide
cuuacaagucuauccgcaa

SEQ ID NO: 53580 - RNA, 19 nt, Artificial Sequence
  Description of Artificial Sequence: Synthetic oligonucleotide
uuggcaccucuccuagugu

SEQ ID NO: 53581 - RNA, 19 nt, Artificial Sequence
  Description of Artificial Sequence: Synthetic oligonucleotide
ggaguuauuugucacugua

SEQ ID NO: 53582 - RNA, 19 nt, Artificial Sequence
  Description of Artificial Sequence: Synthetic oligonucleotide
ccaguagugaauaguaaga

SEQ ID NO: 53583 - RNA, 19 nt, Artificial Sequence
  Description of Artificial Sequence: Synthetic oligonucleotide
auauaucucugcacuuuca

SEQ ID NO: 53584 - RNA, 19 nt, Artificial Sequence
  Description of Artificial Sequence: Synthetic oligonucleotide
uugccucucuacuguguca

SEQ ID NO: 53585 - RNA, 19 nt, Artificial Sequence
  Description of Artificial Sequence: Synthetic oligonucleotide
guaccagagcucgauugcc

SEQ ID NO: 53586 - RNA, 19 nt, Artificial Sequence
  Description of Artificial Sequence: Synthetic oligonucleotide
ucguugacuucucgacgga

SEQ ID NO: 53587 - RNA, 19 nt, Artificial Sequence
  Description of Artificial Sequence: Synthetic oligonucleotide
uccuagugucaggauacga

SEQ ID NO: 53588 - RNA, 19 nt, Artificial Sequence
  Description of Artificial Sequence: Synthetic oligonucleotide
gaaccccuccucuuuagua

SEQ ID NO: 53589 - RNA, 19 nt, Artificial Sequence
  Description of Artificial Sequence: Synthetic oligonucleotide
ggugaaacagcuaguuaac

SEQ ID NO: 53590 - RNA, 19 nt, Artificial Sequence
  Description of Artificial Sequence: Synthetic oligonucleotide
ccugaucacgcaagaaaag

SEQ ID NO: 53591 - RNA, 19 nt, Artificial Sequence
  Description of Artificial Sequence: Synthetic oligonucleotide
gcuagguagaccuuguuau

SEQ ID NO: 53592 - RNA, 19 nt, Artificial Sequence
  Description of Artificial Sequence: Synthetic oligonucleotide
uccuaauaacaaggguuaa

SEQ ID NO: 53593 - RNA, 19 nt, Artificial Sequence
  Description of Artificial Sequence: Synthetic oligonucleotide
uaccgcgcuaagcuucacu

SEQ ID NO: 53594 - RNA, 19 nt, Artificial Sequence
  Description of Artificial Sequence: Synthetic oligonucleotide
agccaagcgggaaucgguc

SEQ ID NO: 53595 - RNA, 19 nt, Artificial Sequence
  Description of Artificial Sequence: Synthetic oligonucleotide
augaacuguaccgcgcuaa

SEQ ID NO: 53596 - RNA, 19 nt, Artificial Sequence
  Description of Artificial Sequence: Synthetic oligonucleotide
cauaagcuggagcacccga

SEQ ID NO: 53597 - RNA, 19 nt, Artificial Sequence
  Description of Artificial Sequence: Synthetic oligonucleotide
uacccgccugagccaagcg

SEQ ID NO: 53598 - RNA, 19 nt, Artificial Sequence
  Description of Artificial Sequence: Synthetic oligonucleotide
cuagcuuccuuacacuacu

SEQ ID NO: 53599 - RNA, 19 nt, Artificial Sequence
  Description of Artificial Sequence: Synthetic oligonucleotide
acagucgccagaggagaag

SEQ ID NO: 53600 - RNA, 19 nt, Artificial Sequence
  Description of Artificial Sequence: Synthetic oligonucleotide
acuguaccgcgcuaagcuu

SEQ ID NO: 53601 - RNA, 19 nt, Artificial Sequence
  Description of Artificial Sequence: Synthetic oligonucleotide
ugugauuguucagcaugaa

SEQ ID NO: 53602 - RNA, 19 nt, Artificial Sequence
  Description of Artificial Sequence: Synthetic oligonucleotide
ugguacaggcuggaucaug

SEQ ID NO: 53603 - RNA, 19 nt, Artificial Sequence
  Description of Artificial Sequence: Synthetic oligonucleotide
ucacuccauaaguggaauu

SEQ ID NO: 53604 - RNA, 19 nt, Artificial Sequence
  Description of Artificial Sequence: Synthetic oligonucleotide
uuacccgccugagccaagc

SEQ ID NO: 53605 - RNA, 19 nt, Artificial Sequence
  Description of Artificial Sequence: Synthetic oligonucleotide
caagcgggaaucggucagg

SEQ ID NO: 53606 - RNA, 19 nt, Artificial Sequence
  Description of Artificial Sequence: Synthetic oligonucleotide
cucgccauacauaaccccu

SEQ ID NO: 53607 - RNA, 19 nt, Artificial Sequence
  Description of Artificial Sequence: Synthetic oligonucleotide
ugcauaccauggugucaag

SEQ ID NO: 53608 - RNA, 19 nt, Artificial Sequence
  Description of Artificial Sequence: Synthetic oligonucleotide
gugcauaccauggugucaa

SEQ ID NO: 53609 - RNA, 19 nt, Artificial Sequence
  Description of Artificial Sequence: Synthetic oligonucleotide
aagcgggaaucggucaggu

SEQ ID NO: 53610 - RNA, 19 nt, Artificial Sequence
  Description of Artificial Sequence: Synthetic oligonucleotide
cccgccugagccaagcggg

SEQ ID NO: 53611 - RNA, 19 nt, Artificial Sequence
  Description of Artificial Sequence: Synthetic oligonucleotide
ugccccuuagugagugcac

SEQ ID NO: 53612 - RNA, 19 nt, Artificial Sequence
  Description of Artificial Sequence: Synthetic oligonucleotide
gccaccacaauacacauuu

SEQ ID NO: 53613 - RNA, 19 nt, Artificial Sequence
  Description of Artificial Sequence: Synthetic oligonucleotide
gauuaacgucccaugggua

SEQ ID NO: 53614 - RNA, 19 nt, Artificial Sequence
  Description of Artificial Sequence: Synthetic oligonucleotide
gguucaaggguguuguccu

SEQ ID NO: 53615 - RNA, 19 nt, Artificial Sequence
  Description of Artificial Sequence: Synthetic oligonucleotide
ccuuacaagucuauccgca

SEQ ID NO: 53616 - RNA, 19 nt, Artificial Sequence
  Description of Artificial Sequence: Synthetic oligonucleotide
gcaggguacauacauaaau

SEQ ID NO: 53617 - RNA, 19 nt, Artificial Sequence
  Description of Artificial Sequence: Synthetic oligonucleotide
cucuccuagugucaggaua

SEQ ID NO: 53618 - RNA, 19 nt, Artificial Sequence
  Description of Artificial Sequence: Synthetic oligonucleotide
ucgugugauuguucagcau

SEQ ID NO: 53619 - RNA, 19 nt, Artificial Sequence
  Description of Artificial Sequence: Synthetic oligonucleotide
ggugcuucgugacagcugu

SEQ ID NO: 53620 - RNA, 19 nt, Artificial Sequence
  Description of Artificial Sequence: Synthetic oligonucleotide
gcuaguuaaccuuugccau

SEQ ID NO: 53621 - RNA, 19 nt, Artificial Sequence
  Description of Artificial Sequence: Synthetic oligonucleotide
aagauaccauugggagaug

SEQ ID NO: 53622 - RNA, 19 nt, Artificial Sequence
  Description of Artificial Sequence: Synthetic oligonucleotide
gagucgcugagaucuguua

SEQ ID NO: 53623 - RNA, 19 nt, Artificial Sequence
  Description of Artificial Sequence: Synthetic oligonucleotide
cucgcucgugugauuguuc

SEQ ID NO: 53624 - RNA, 19 nt, Artificial Sequence
  Description of Artificial Sequence: Synthetic oligonucleotide
cccuuacaagucuauccgc

SEQ ID NO: 53625 - RNA, 19 nt, Artificial Sequence
  Description of Artificial Sequence: Synthetic oligonucleotide
ccuuagugagugcacgaac

SEQ ID NO: 53626 - RNA, 19 nt, Artificial Sequence
  Description of Artificial Sequence: Synthetic oligonucleotide
ucucgacggaaugcugaca

SEQ ID NO: 53627 - RNA, 19 nt, Artificial Sequence
  Description of Artificial Sequence: Synthetic oligonucleotide
uaguccgacaccgcauguc

SEQ ID NO: 53628 - RNA, 19 nt, Artificial Sequence
  Description of Artificial Sequence: Synthetic oligonucleotide
ucccgguucaaggguguug

SEQ ID NO: 53629 - RNA, 19 nt, Artificial Sequence
  Description of Artificial Sequence: Synthetic oligonucleotide
acuucucgacggaaugcug

SEQ ID NO: 53630 - RNA, 19 nt, Artificial Sequence
  Description of Artificial Sequence: Synthetic oligonucleotide
ggaggugauugguucacaa

SEQ ID NO: 53631 - RNA, 19 nt, Artificial Sequence
  Description of Artificial Sequence: Synthetic oligonucleotide
ggacucaugcaaauugcuc

SEQ ID NO: 53632 - RNA, 19 nt, Artificial Sequence
  Description of Artificial Sequence: Synthetic oligonucleotide
ggugcacuagacucuguaa

SEQ ID NO: 53633 - RNA, 19 nt, Artificial Sequence
  Description of Artificial Sequence: Synthetic oligonucleotide
agucuauccgcaaccugau

SEQ ID NO: 53634 - RNA, 19 nt, Artificial Sequence
  Description of Artificial Sequence: Synthetic oligonucleotide
cgcgcuaagcuucacuagc

SEQ ID NO: 53635 - RNA, 19 nt, Artificial Sequence
  Description of Artificial Sequence: Synthetic oligonucleotide
ccaaauucgagcuucucau

SEQ ID NO: 53636 - RNA, 19 nt, Artificial Sequence
  Description of Artificial Sequence: Synthetic oligonucleotide
gagcugaacuagagaugug

SEQ ID NO: 53637 - RNA, 19 nt, Artificial Sequence
  Description of Artificial Sequence: Synthetic oligonucleotide
cgucccauggguaagagcu

SEQ ID NO: 53638 - RNA, 19 nt, Artificial Sequence
  Description of Artificial Sequence: Synthetic oligonucleotide
gcaaccugaucacgcaaga

SEQ ID NO: 53639 - RNA, 19 nt, Artificial Sequence
  Description of Artificial Sequence: Synthetic oligonucleotide
gccccuuagugagugcacg

SEQ ID NO: 53640 - RNA, 19 nt, Artificial Sequence
  Description of Artificial Sequence: Synthetic oligonucleotide
gucuauccgcaaccugauc

SEQ ID NO: 53641 - RNA, 19 nt, Artificial Sequence
  Description of Artificial Sequence: Synthetic oligonucleotide
auuggcggucacaaugcuu

SEQ ID NO: 53642 - RNA, 19 nt, Artificial Sequence
  Description of Artificial Sequence: Synthetic oligonucleotide
ggugcucccucauggcuca

SEQ ID NO: 53643 - RNA, 19 nt, Artificial Sequence
  Description of Artificial Sequence: Synthetic oligonucleotide
gucccauggguaagagcug

SEQ ID NO: 53644 - RNA, 19 nt, Artificial Sequence
  Description of Artificial Sequence: Synthetic oligonucleotide
auugcccgcuggagaauug

SEQ ID NO: 53645 - RNA, 19 nt, Artificial Sequence
  Description of Artificial Sequence: Synthetic oligonucleotide
cauagaccacugauuccua

SEQ ID NO: 53646 - RNA, 19 nt, Artificial Sequence
  Description of Artificial Sequence: Synthetic oligonucleotide
cugccccuuagugagugca

SEQ ID NO: 53647 - RNA, 19 nt, Artificial Sequence
  Description of Artificial Sequence: Synthetic oligonucleotide
cgguucaaggguguugucc

SEQ ID NO: 53648 - RNA, 19 nt, Artificial Sequence
  Description of Artificial Sequence: Synthetic oligonucleotide
gccauacauaaccccucac

SEQ ID NO: 53649 - RNA, 19 nt, Artificial Sequence
  Description of Artificial Sequence: Synthetic oligonucleotide
agugcucgcucgugugauu

SEQ ID NO: 53650 - RNA, 19 nt, Artificial Sequence
  Description of Artificial Sequence: Synthetic oligonucleotide
gcuauugacgaugcuauuu

SEQ ID NO: 53651 - RNA, 19 nt, Artificial Sequence
  Description of Artificial Sequence: Synthetic oligonucleotide
ccuagugucaggauacgau

SEQ ID NO: 53652 - RNA, 19 nt, Artificial Sequence
  Description of Artificial Sequence: Synthetic oligonucleotide
agauuccgcucaaugccuu

SEQ ID NO: 53653 - RNA, 19 nt, Artificial Sequence
  Description of Artificial Sequence: Synthetic oligonucleotide
caaauucgagcuucucauu

SEQ ID NO: 53654 - RNA, 19 nt, Artificial Sequence
  Description of Artificial Sequence: Synthetic oligonucleotide
caugaacuguaccgcgcua

SEQ ID NO: 53655 - RNA, 19 nt, Artificial Sequence
  Description of Artificial Sequence: Synthetic oligonucleotide
ccauggguaagagcugaac

SEQ ID NO: 53656 - RNA, 19 nt, Artificial Sequence
  Description of Artificial Sequence: Synthetic oligonucleotide
ggucgagacauagaccacu

SEQ ID NO: 53657 - RNA, 19 nt, Artificial Sequence
  Description of Artificial Sequence: Synthetic oligonucleotide
auuacccgccugagccaag

SEQ ID NO: 53658 - RNA, 19 nt, Artificial Sequence
  Description of Artificial Sequence: Synthetic oligonucleotide
ccgcuggagaauuggcaug

SEQ ID NO: 53659 - RNA, 19 nt, Artificial Sequence
  Description of Artificial Sequence: Synthetic oligonucleotide
agcgggaaucggucagguu

SEQ ID NO: 53660 - RNA, 19 nt, Artificial Sequence
  Description of Artificial Sequence: Synthetic oligonucleotide
ggagcacccgacagacaag

SEQ ID NO: 53661 - RNA, 19 nt, Artificial Sequence
  Description of Artificial Sequence: Synthetic oligonucleotide
gcugaacuagagaugugua

SEQ ID NO: 53662 - RNA, 19 nt, Artificial Sequence
  Description of Artificial Sequence: Synthetic oligonucleotide
ccgcgcuaagcuucacuag

SEQ ID NO: 53663 - RNA, 19 nt, Artificial Sequence
  Description of Artificial Sequence: Synthetic oligonucleotide
gauugcccgcuggagaauu

SEQ ID NO: 53664 - RNA, 19 nt, Artificial Sequence
  Description of Artificial Sequence: Synthetic oligonucleotide
guuggcuauugacgaugcu

SEQ ID NO: 53665 - RNA, 19 nt, Artificial Sequence
  Description of Artificial Sequence: Synthetic oligonucleotide
cuaggccaacaagaguucu

SEQ ID NO: 53666 - RNA, 19 nt, Artificial Sequence
  Description of Artificial Sequence: Synthetic oligonucleotide
guaguccgacaccgcaugu

SEQ ID NO: 53667 - RNA, 19 nt, Artificial Sequence
  Description of Artificial Sequence: Synthetic oligonucleotide
gucggcgguacagcuuuga

SEQ ID NO: 53668 - RNA, 19 nt, Artificial Sequence
  Description of Artificial Sequence: Synthetic oligonucleotide
cucaaacgcugcugugagu

SEQ ID NO: 53669 - RNA, 19 nt, Artificial Sequence
  Description of Artificial Sequence: Synthetic oligonucleotide
ggaggggucgagacauaga

SEQ ID NO: 53670 - RNA, 19 nt, Artificial Sequence
  Description of Artificial Sequence: Synthetic oligonucleotide
cgggaaucggucagguuca

SEQ ID NO: 53671 - RNA, 19 nt, Artificial Sequence
  Description of Artificial Sequence: Synthetic oligonucleotide
cagagcucgauugcccgcu

SEQ ID NO: 53672 - RNA, 19 nt, Artificial Sequence
  Description of Artificial Sequence: Synthetic oligonucleotide
cuuuggcaccucuccuagu

SEQ ID NO: 53673 - RNA, 19 nt, Artificial Sequence
  Description of Artificial Sequence: Synthetic oligonucleotide
ccuaauaacaaggguuaau

SEQ ID NO: 53674 - RNA, 19 nt, Artificial Sequence
  Description of Artificial Sequence: Synthetic oligonucleotide
gggucgagacauagaccac

SEQ ID NO: 53675 - RNA, 19 nt, Artificial Sequence
  Description of Artificial Sequence: Synthetic oligonucleotide
caucagcauuggugcacua

SEQ ID NO: 53676 - RNA, 19 nt, Artificial Sequence
  Description of Artificial Sequence: Synthetic oligonucleotide
cccugccccuuagugagug

SEQ ID NO: 53677 - RNA, 19 nt, Artificial Sequence
  Description of Artificial Sequence: Synthetic oligonucleotide
cccgcuggagaauuggcau

SEQ ID NO: 53678 - RNA, 19 nt, Artificial Sequence
  Description of Artificial Sequence: Synthetic oligonucleotide
guaccgcgcuaagcuucac

SEQ ID NO: 53679 - RNA, 19 nt, Artificial Sequence
  Description of Artificial Sequence: Synthetic oligonucleotide
cgccauacauaaccccuca

SEQ ID NO: 53680 - RNA, 19 nt, Artificial Sequence
  Description of Artificial Sequence: Synthetic oligonucleotide
cccuuagugagugcacgaa

SEQ ID NO: 53681 - RNA, 19 nt, Artificial Sequence
  Description of Artificial Sequence: Synthetic oligonucleotide
ccgguucaaggguguuguc

SEQ ID NO: 53682 - RNA, 19 nt, Artificial Sequence
  Description of Artificial Sequence: Synthetic oligonucleotide
ggcuauugacgaugcuauu

SEQ ID NO: 53683 - RNA, 19 nt, Artificial Sequence
  Description of Artificial Sequence: Synthetic oligonucleotide
ccgacaccgcaugucuguc

SEQ ID NO: 53684 - RNA, 19 nt, Artificial Sequence
  Description of Artificial Sequence: Synthetic oligonucleotide
ccgcaaccugaucacgcaa

SEQ ID NO: 53685 - RNA, 19 nt, Artificial Sequence
  Description of Artificial Sequence: Synthetic oligonucleotide
cgacaccgcaugucuguca

SEQ ID NO: 53686 - RNA, 19 nt, Artificial Sequence
  Description of Artificial Sequence: Synthetic oligonucleotide
ggagucgcugagaucuguu

SEQ ID NO: 53687 - RNA, 19 nt, Artificial Sequence
  Description of Artificial Sequence: Synthetic oligonucleotide
gcuggagaauuggcaugua

SEQ ID NO: 53688 - RNA, 19 nt, Artificial Sequence
  Description of Artificial Sequence: Synthetic oligonucleotide
cguugacuucucgacggaa

SEQ ID NO: 53689 - RNA, 19 nt, Artificial Sequence
  Description of Artificial Sequence: Synthetic oligonucleotide
gggaucagccaggcccucu

SEQ ID NO: 53690 - RNA, 19 nt, Artificial Sequence
  Description of Artificial Sequence: Synthetic oligonucleotide
ccucuccuaaauccaccau

SEQ ID NO: 53691 - RNA, 19 nt, Artificial Sequence
  Description of Artificial Sequence: Synthetic oligonucleotide
gcgguacagcuuugaggau

SEQ ID NO: 53692 - RNA, 19 nt, Artificial Sequence
  Description of Artificial Sequence: Synthetic oligonucleotide
cgauugcccgcuggagaau

SEQ ID NO: 53693 - RNA, 19 nt, Artificial Sequence
  Description of Artificial Sequence: Synthetic oligonucleotide
aaggcacuaaucuaaagcc

SEQ ID NO: 53694 - RNA, 19 nt, Artificial Sequence
  Description of Artificial Sequence: Synthetic oligonucleotide
agaucuauuaguuaagcuc

SEQ ID NO: 53695 - RNA, 19 nt, Artificial Sequence
  Description of Artificial Sequence: Synthetic oligonucleotide
aaacuauuugaauaucacg

SEQ ID NO: 53696 - RNA, 19 nt, Artificial Sequence
  Description of Artificial Sequence: Synthetic oligonucleotide
aacgaaacaguguugauca

SEQ ID NO: 53697 - RNA, 19 nt, Artificial Sequence
  Description of Artificial Sequence: Synthetic oligonucleotide
uugaucacuaacuugacug

SEQ ID NO: 53698 - RNA, 19 nt, Artificial Sequence
  Description of Artificial Sequence: Synthetic oligonucleotide
ugguuaugaaacaugagag

SEQ ID NO: 53699 - RNA, 19 nt, Artificial Sequence
  Description of Artificial Sequence: Synthetic oligonucleotide
uauaaaagaacauuugguc

SEQ ID NO: 53700 - RNA, 19 nt, Artificial Sequence
  Description of Artificial Sequence: Synthetic oligonucleotide
aguuauagcgcucagggag

SEQ ID NO: 53701 - RNA, 19 nt, Artificial Sequence
  Description of Artificial Sequence: Synthetic oligonucleotide
gaucuauuaguuaagcucg

SEQ ID NO: 53702 - RNA, 19 nt, Artificial Sequence
  Description of Artificial Sequence: Synthetic oligonucleotide
uugguuaugaaacaugaga

SEQ ID NO: 53703 - RNA, 19 nt, Artificial Sequence
  Description of Artificial Sequence: Synthetic oligonucleotide
aagaucacuacuccuagag

SEQ ID NO: 53704 - RNA, 19 nt, Artificial Sequence
  Description of Artificial Sequence: Synthetic oligonucleotide
ucgagaaggagauuuauag

SEQ ID NO: 53705 - RNA, 19 nt, Artificial Sequence
  Description of Artificial Sequence: Synthetic oligonucleotide
uuaaacaugaaguaucauc

SEQ ID NO: 53706 - RNA, 19 nt, Artificial Sequence
  Description of Artificial Sequence: Synthetic oligonucleotide
cauuaucuuacuaagcccc

SEQ ID NO: 53707 - RNA, 19 nt, Artificial Sequence
  Description of Artificial Sequence: Synthetic oligonucleotide
gaaguaucaucuauggucg

SEQ ID NO: 53708 - RNA, 19 nt, Artificial Sequence
  Description of Artificial Sequence: Synthetic oligonucleotide
ggaguugccaguuauagcg

SEQ ID NO: 53709 - RNA, 19 nt, Artificial Sequence
  Description of Artificial Sequence: Synthetic oligonucleotide
uuuacaagagguuauucgu

SEQ ID NO: 53710 - RNA, 19 nt, Artificial Sequence
  Description of Artificial Sequence: Synthetic oligonucleotide
ugauaugcggcauuaaaca

SEQ ID NO: 53711 - RNA, 19 nt, Artificial Sequence
  Description of Artificial Sequence: Synthetic oligonucleotide
aagacguuuguccacacga

SEQ ID NO: 53712 - RNA, 19 nt, Artificial Sequence
  Description of Artificial Sequence: Synthetic oligonucleotide
aaacgaaacaguguugauc

SEQ ID NO: 53713 - RNA, 19 nt, Artificial Sequence
  Description of Artificial Sequence: Synthetic oligonucleotide
uauuaguuaagcucguaga

SEQ ID NO: 53714 - RNA, 19 nt, Artificial Sequence
  Description of Artificial Sequence: Synthetic oligonucleotide
auuccacuaguagagaacc

SEQ ID NO: 53715 - RNA, 19 nt, Artificial Sequence
  Description of Artificial Sequence: Synthetic oligonucleotide
aucuggcgcauguagaugc

SEQ ID NO: 53716 - RNA, 19 nt, Artificial Sequence
  Description of Artificial Sequence: Synthetic oligonucleotide
auuuacacgucucacugag

SEQ ID NO: 53717 - RNA, 19 nt, Artificial Sequence
  Description of Artificial Sequence: Synthetic oligonucleotide
aauccgaccaguaaaauau

SEQ ID NO: 53718 - RNA, 19 nt, Artificial Sequence
  Description of Artificial Sequence: Synthetic oligonucleotide
cacgauaugaauguggccc

SEQ ID NO: 53719 - RNA, 19 nt, Artificial Sequence
  Description of Artificial Sequence: Synthetic oligonucleotide
uacacauaagccaagcauc

SEQ ID NO: 53720 - RNA, 19 nt, Artificial Sequence
  Description of Artificial Sequence: Synthetic oligonucleotide
aauaucacgugcagaggcc

SEQ ID NO: 53721 - RNA, 19 nt, Artificial Sequence
  Description of Artificial Sequence: Synthetic oligonucleotide
uaugcggcauuaaacaucu

SEQ ID NO: 53722 - RNA, 19 nt, Artificial Sequence
  Description of Artificial Sequence: Synthetic oligonucleotide
ucuagauuugugaacugga

SEQ ID NO: 53723 - RNA, 19 nt, Artificial Sequence
  Description of Artificial Sequence: Synthetic oligonucleotide
guauuuacacgucucacug

SEQ ID NO: 53724 - RNA, 19 nt, Artificial Sequence
  Description of Artificial Sequence: Synthetic oligonucleotide
uacaagagguuauucguag

SEQ ID NO: 53725 - RNA, 19 nt, Artificial Sequence
  Description of Artificial Sequence: Synthetic oligonucleotide
aauuccacuaguagagaac

SEQ ID NO: 53726 - RNA, 19 nt, Artificial Sequence
  Description of Artificial Sequence: Synthetic oligonucleotide
uaccaaauuccacuaguag

SEQ ID NO: 53727 - RNA, 19 nt, Artificial Sequence
  Description of Artificial Sequence: Synthetic oligonucleotide
aggauauaaauaaaccagg

SEQ ID NO: 53728 - RNA, 19 nt, Artificial Sequence
  Description of Artificial Sequence: Synthetic oligonucleotide
uguccacacgauaugaaug

SEQ ID NO: 53729 - RNA, 19 nt, Artificial Sequence
  Description of Artificial Sequence: Synthetic oligonucleotide
guuaaugauucugaguucc

SEQ ID NO: 53730 - RNA, 19 nt, Artificial Sequence
  Description of Artificial Sequence: Synthetic oligonucleotide
cuauuaguuaagcucguag

SEQ ID NO: 53731 - RNA, 19 nt, Artificial Sequence
  Description of Artificial Sequence: Synthetic oligonucleotide
guaucacauaaagaaaugg

SEQ ID NO: 53732 - RNA, 19 nt, Artificial Sequence
  Description of Artificial Sequence: Synthetic oligonucleotide
ucuauggucgccaagcaua

SEQ ID NO: 53733 - RNA, 19 nt, Artificial Sequence
  Description of Artificial Sequence: Synthetic oligonucleotide
uccgaccaguaaaauaugg

SEQ ID NO: 53734 - RNA, 19 nt, Artificial Sequence
  Description of Artificial Sequence: Synthetic oligonucleotide
cuaaucuaaagccuguauc

SEQ ID NO: 53735 - RNA, 19 nt, Artificial Sequence
  Description of Artificial Sequence: Synthetic oligonucleotide
aaauuccacuaguagagaa

SEQ ID NO: 53736 - RNA, 19 nt, Artificial Sequence
  Description of Artificial Sequence: Synthetic oligonucleotide
auuacagcucaaaagaucu

SEQ ID NO: 53737 - RNA, 19 nt, Artificial Sequence
  Description of Artificial Sequence: Synthetic oligonucleotide
agaucacuacuccuagagc

SEQ ID NO: 53738 - RNA, 19 nt, Artificial Sequence
  Description of Artificial Sequence: Synthetic oligonucleotide
acccauaaggcacuaaucu

SEQ ID NO: 53739 - RNA, 19 nt, Artificial Sequence
  Description of Artificial Sequence: Synthetic oligonucleotide
ucccgauccucuaacaaag

SEQ ID NO: 53740 - RNA, 19 nt, Artificial Sequence
  Description of Artificial Sequence: Synthetic oligonucleotide
aaacaaccgaagcccacuc

SEQ ID NO: 53741 - RNA, 19 nt, Artificial Sequence
  Description of Artificial Sequence: Synthetic oligonucleotide
ucuacaagauccagaguga

SEQ ID NO: 53742 - RNA, 19 nt, Artificial Sequence
  Description of Artificial Sequence: Synthetic oligonucleotide
ucugauaugcggcauuaaa

SEQ ID NO: 53743 - RNA, 19 nt, Artificial Sequence
  Description of Artificial Sequence: Synthetic oligonucleotide
aguuaaugauucugaguuc

SEQ ID NO: 53744 - RNA, 19 nt, Artificial Sequence
  Description of Artificial Sequence: Synthetic oligonucleotide
acacgucucacugagaaag

SEQ ID NO: 53745 - RNA, 19 nt, Artificial Sequence
  Description of Artificial Sequence: Synthetic oligonucleotide
agagugauaggugaaaagu

SEQ ID NO: 53746 - RNA, 19 nt, Artificial Sequence
  Description of Artificial Sequence: Synthetic oligonucleotide
uuuguuccagacaaagauc

SEQ ID NO: 53747 - RNA, 19 nt, Artificial Sequence
  Description of Artificial Sequence: Synthetic oligonucleotide
ucuaggagaauggacuucc

SEQ ID NO: 53748 - RNA, 19 nt, Artificial Sequence
  Description of Artificial Sequence: Synthetic oligonucleotide
auggucgccaagcauauug

SEQ ID NO: 53749 - RNA, 19 nt, Artificial Sequence
  Description of Artificial Sequence: Synthetic oligonucleotide
uguucaccggcucagaaua

SEQ ID NO: 53750 - RNA, 19 nt, Artificial Sequence
  Description of Artificial Sequence: Synthetic oligonucleotide
ugagacuuagaccugugua

SEQ ID NO: 53751 - RNA, 19 nt, Artificial Sequence
  Description of Artificial Sequence: Synthetic oligonucleotide
aguaucaucuauggucgcc

SEQ ID NO: 53752 - RNA, 19 nt, Artificial Sequence
  Description of Artificial Sequence: Synthetic oligonucleotide
aacagcacgaugaacccag

SEQ ID NO: 53753 - RNA, 19 nt, Artificial Sequence
  Description of Artificial Sequence: Synthetic oligonucleotide
acuagaguaagugcuggac

SEQ ID NO: 53754 - RNA, 19 nt, Artificial Sequence
  Description of Artificial Sequence: Synthetic oligonucleotide
ugaucacuaacuugacugc

SEQ ID NO: 53755 - RNA, 19 nt, Artificial Sequence
  Description of Artificial Sequence: Synthetic oligonucleotide
auuauugcaaguguaucca

SEQ ID NO: 53756 - RNA, 19 nt, Artificial Sequence
  Description of Artificial Sequence: Synthetic oligonucleotide
auagcagcuaaggcaagcc

SEQ ID NO: 53757 - RNA, 19 nt, Artificial Sequence
  Description of Artificial Sequence: Synthetic oligonucleotide
aucacauaaagaaauggcu

SEQ ID NO: 53758 - RNA, 19 nt, Artificial Sequence
  Description of Artificial Sequence: Synthetic oligonucleotide
uugcaguaaguagugaugc

SEQ ID NO: 53759 - RNA, 19 nt, Artificial Sequence
  Description of Artificial Sequence: Synthetic oligonucleotide
aagccaaccaucuggucga

SEQ ID NO: 53760 - RNA, 19 nt, Artificial Sequence
  Description of Artificial Sequence: Synthetic oligonucleotide
uaucuuacuaagccccagc

SEQ ID NO: 53761 - RNA, 19 nt, Artificial Sequence
  Description of Artificial Sequence: Synthetic oligonucleotide
aaagggauaucugauggaa

SEQ ID NO: 53762 - RNA, 19 nt, Artificial Sequence
  Description of Artificial Sequence: Synthetic oligonucleotide
acuucuaggagaauggacu

SEQ ID NO: 53763 - RNA, 19 nt, Artificial Sequence
  Description of Artificial Sequence: Synthetic oligonucleotide
ucgccaagcauauugcaca

SEQ ID NO: 53764 - RNA, 19 nt, Artificial Sequence
  Description of Artificial Sequence: Synthetic oligonucleotide
gguacuuuguuccagacaa

SEQ ID NO: 53765 - RNA, 19 nt, Artificial Sequence
  Description of Artificial Sequence: Synthetic oligonucleotide
gaauaccaaauuccacuag

SEQ ID NO: 53766 - RNA, 19 nt, Artificial Sequence
  Description of Artificial Sequence: Synthetic oligonucleotide
aaaccgacaggaguucuuc

SEQ ID NO: 53767 - RNA, 19 nt, Artificial Sequence
  Description of Artificial Sequence: Synthetic oligonucleotide
aguggacacucauucacag

SEQ ID NO: 53768 - RNA, 19 nt, Artificial Sequence
  Description of Artificial Sequence: Synthetic oligonucleotide
aauggcucaaggauaucag

SEQ ID NO: 53769 - RNA, 19 nt, Artificial Sequence
  Description of Artificial Sequence: Synthetic oligonucleotide
cugauagcacucaaggcac

SEQ ID NO: 53770 - RNA, 19 nt, Artificial Sequence
  Description of Artificial Sequence: Synthetic oligonucleotide
ucacacaauccuaagguuu

SEQ ID NO: 53771 - RNA, 19 nt, Artificial Sequence
  Description of Artificial Sequence: Synthetic oligonucleotide
auauggacucccugacacc

SEQ ID NO: 53772 - RNA, 19 nt, Artificial Sequence
  Description of Artificial Sequence: Synthetic oligonucleotide
acacgauaugaauguggcc

SEQ ID NO: 53773 - RNA, 19 nt, Artificial Sequence
  Description of Artificial Sequence: Synthetic oligonucleotide
cauauggcaauacaaacaa

SEQ ID NO: 53774 - RNA, 19 nt, Artificial Sequence
  Description of Artificial Sequence: Synthetic oligonucleotide
uuuucguguauguaauaaa

SEQ ID NO: 53775 - RNA, 19 nt, Artificial Sequence
  Description of Artificial Sequence: Synthetic oligonucleotide
gacgguggaaucuuuguca

SEQ ID NO: 53776 - RNA, 19 nt, Artificial Sequence
  Description of Artificial Sequence: Synthetic oligonucleotide
aacgcgauugcaauuagaa

SEQ ID NO: 53777 - RNA, 19 nt, Artificial Sequence
  Description of Artificial Sequence: Synthetic oligonucleotide
aaagucuacaagauccaga

SEQ ID NO: 53778 - RNA, 19 nt, Artificial Sequence
  Description of Artificial Sequence: Synthetic oligonucleotide
caaagaucacuacuccuag

SEQ ID NO: 53779 - RNA, 19 nt, Artificial Sequence
  Description of Artificial Sequence: Synthetic oligonucleotide
guugacguagagugguggg

SEQ ID NO: 53780 - RNA, 19 nt, Artificial Sequence
  Description of Artificial Sequence: Synthetic oligonucleotide
uacuuuucguguauguaau

SEQ ID NO: 53781 - RNA, 19 nt, Artificial Sequence
  Description of Artificial Sequence: Synthetic oligonucleotide
caucuggucgaucuggcgc

SEQ ID NO: 53782 - RNA, 19 nt, Artificial Sequence
  Description of Artificial Sequence: Synthetic oligonucleotide
uucguguauguaauaaaua

SEQ ID NO: 53783 - RNA, 19 nt, Artificial Sequence
  Description of Artificial Sequence: Synthetic oligonucleotide
aguagugaagauggguuuc

SEQ ID NO: 53784 - RNA, 19 nt, Artificial Sequence
  Description of Artificial Sequence: Synthetic oligonucleotide
auaugcggcauuaaacauc

SEQ ID NO: 53785 - RNA, 19 nt, Artificial Sequence
  Description of Artificial Sequence: Synthetic oligonucleotide
aaguagugaagauggguuu

SEQ ID NO: 53786 - RNA, 19 nt, Artificial Sequence
  Description of Artificial Sequence: Synthetic oligonucleotide
cuugguuaugaaacaugag

SEQ ID NO: 53787 - RNA, 19 nt, Artificial Sequence
  Description of Artificial Sequence: Synthetic oligonucleotide
uuacaagagguuauucgua

SEQ ID NO: 53788 - RNA, 19 nt, Artificial Sequence
  Description of Artificial Sequence: Synthetic oligonucleotide
ugcagguuucauuauugcu

SEQ ID NO: 53789 - RNA, 19 nt, Artificial Sequence
  Description of Artificial Sequence: Synthetic oligonucleotide
aaagaucacuacuccuaga

SEQ ID NO: 53790 - RNA, 19 nt, Artificial Sequence
  Description of Artificial Sequence: Synthetic oligonucleotide
gaaucuuugucaaacgaaa

SEQ ID NO: 53791 - RNA, 19 nt, Artificial Sequence
  Description of Artificial Sequence: Synthetic oligonucleotide
gaucaggaagaaacuaaag

SEQ ID NO: 53792 - RNA, 19 nt, Artificial Sequence
  Description of Artificial Sequence: Synthetic oligonucleotide
aguuuccaacucuagauuu

SEQ ID NO: 53793 - RNA, 19 nt, Artificial Sequence
  Description of Artificial Sequence: Synthetic oligonucleotide
aacauuguaucuuguucua

SEQ ID NO: 53794 - RNA, 19 nt, Artificial Sequence
  Description of Artificial Sequence: Synthetic oligonucleotide
cagauugacccgaggauag

SEQ ID NO: 53795 - RNA, 19 nt, Artificial Sequence
  Description of Artificial Sequence: Synthetic oligonucleotide
acgcgauugcaauuagaac

SEQ ID NO: 53796 - RNA, 19 nt, Artificial Sequence
  Description of Artificial Sequence: Synthetic oligonucleotide
ucguagauuccaaucuaac

SEQ ID NO: 53797 - RNA, 19 nt, Artificial Sequence
  Description of Artificial Sequence: Synthetic oligonucleotide
uaauccgaccaguaaaaua

SEQ ID NO: 53798 - RNA, 19 nt, Artificial Sequence
  Description of Artificial Sequence: Synthetic oligonucleotide
gacacccgucuucagauug

SEQ ID NO: 53799 - RNA, 19 nt, Artificial Sequence
  Description of Artificial Sequence: Synthetic oligonucleotide
uuaaugauucugaguuccu

SEQ ID NO: 53800 - RNA, 19 nt, Artificial Sequence
  Description of Artificial Sequence: Synthetic oligonucleotide
acuacccucauguguuuuc

SEQ ID NO: 53801 - RNA, 19 nt, Artificial Sequence
  Description of Artificial Sequence: Synthetic oligonucleotide
aagcugauauugaaaauaa

SEQ ID NO: 53802 - RNA, 19 nt, Artificial Sequence
  Description of Artificial Sequence: Synthetic oligonucleotide
agaggagauuuugguaugc

SEQ ID NO: 53803 - RNA, 19 nt, Artificial Sequence
  Description of Artificial Sequence: Synthetic oligonucleotide
acuaaucuaaagccuguau

SEQ ID NO: 53804 - RNA, 19 nt, Artificial Sequence
  Description of Artificial Sequence: Synthetic oligonucleotide
agaugaauuucccauuauu

SEQ ID NO: 53805 - RNA, 19 nt, Artificial Sequence
  Description of Artificial Sequence: Synthetic oligonucleotide
acaccuaccgaaccagaag

SEQ ID NO: 53806 - RNA, 19 nt, Artificial Sequence
  Description of Artificial Sequence: Synthetic oligonucleotide
ugucaccccacuucuagga

SEQ ID NO: 53807 - RNA, 19 nt, Artificial Sequence
  Description of Artificial Sequence: Synthetic oligonucleotide
uaccugucagauuucuggc

SEQ ID NO: 53808 - RNA, 19 nt, Artificial Sequence
  Description of Artificial Sequence: Synthetic oligonucleotide
gaacggaagagcaaagauc

SEQ ID NO: 53809 - RNA, 19 nt, Artificial Sequence
  Description of Artificial Sequence: Synthetic oligonucleotide
uacuccuagagcacaggga

SEQ ID NO: 53810 - RNA, 19 nt, Artificial Sequence
  Description of Artificial Sequence: Synthetic oligonucleotide
guuauagcgcucagggagg

SEQ ID NO: 53811 - RNA, 19 nt, Artificial Sequence
  Description of Artificial Sequence: Synthetic oligonucleotide
gaugcucugauaugcggca

SEQ ID NO: 53812 - RNA, 19 nt, Artificial Sequence
  Description of Artificial Sequence: Synthetic oligonucleotide
cacugauagcacucaaggc

SEQ ID NO: 53813 - RNA, 19 nt, Artificial Sequence
  Description of Artificial Sequence: Synthetic oligonucleotide
gguucguggaaaccgacag

SEQ ID NO: 53814 - RNA, 19 nt, Artificial Sequence
  Description of Artificial Sequence: Synthetic oligonucleotide
ugcauuuaauccgaccagu

SEQ ID NO: 53815 - RNA, 19 nt, Artificial Sequence
  Description of Artificial Sequence: Synthetic oligonucleotide
accccuaagacccacugau

SEQ ID NO: 53816 - RNA, 19 nt, Artificial Sequence
  Description of Artificial Sequence: Synthetic oligonucleotide
uuaagcucguagauuccaa

SEQ ID NO: 53817 - RNA, 19 nt, Artificial Sequence
  Description of Artificial Sequence: Synthetic oligonucleotide
uuaucuuacuaagccccag

SEQ ID NO: 53818 - RNA, 19 nt, Artificial Sequence
  Description of Artificial Sequence: Synthetic oligonucleotide
uuggcuaucuugggaacag

SEQ ID NO: 53819 - RNA, 19 nt, Artificial Sequence
  Description of Artificial Sequence: Synthetic oligonucleotide
cuacaggcaccacaguggc

SEQ ID NO: 53820 - RNA, 19 nt, Artificial Sequence
  Description of Artificial Sequence: Synthetic oligonucleotide
uuauaggcauuaucuuacu

SEQ ID NO: 53821 - RNA, 19 nt, Artificial Sequence
  Description of Artificial Sequence: Synthetic oligonucleotide
aacaaccgaagcccacuca

SEQ ID NO: 53822 - RNA, 19 nt, Artificial Sequence
  Description of Artificial Sequence: Synthetic oligonucleotide
uuaguuaagcucguagauu

SEQ ID NO: 53823 - RNA, 19 nt, Artificial Sequence
  Description of Artificial Sequence: Synthetic oligonucleotide
gaaagggauaucugaugga

SEQ ID NO: 53824 - RNA, 19 nt, Artificial Sequence
  Description of Artificial Sequence: Synthetic oligonucleotide
caugagagauggaagcuca

SEQ ID NO: 53825 - RNA, 19 nt, Artificial Sequence
  Description of Artificial Sequence: Synthetic oligonucleotide
uggucgccaagcauauugc

SEQ ID NO: 53826 - RNA, 19 nt, Artificial Sequence
  Description of Artificial Sequence: Synthetic oligonucleotide
acaaccgaagcccacucaa

SEQ ID NO: 53827 - RNA, 19 nt, Artificial Sequence
  Description of Artificial Sequence: Synthetic oligonucleotide
caacggucaaagcaaucag

SEQ ID NO: 53828 - RNA, 19 nt, Artificial Sequence
  Description of Artificial Sequence: Synthetic oligonucleotide
uuauagcgcucagggaggg

SEQ ID NO: 53829 - RNA, 19 nt, Artificial Sequence
  Description of Artificial Sequence: Synthetic oligonucleotide
ucaccggcucagaauacca

SEQ ID NO: 53830 - RNA, 19 nt, Artificial Sequence
  Description of Artificial Sequence: Synthetic oligonucleotide
ccuacaggcaccacagugg

SEQ ID NO: 53831 - RNA, 19 nt, Artificial Sequence
  Description of Artificial Sequence: Synthetic oligonucleotide
acgauaugaauguggcccu

SEQ ID NO: 53832 - RNA, 19 nt, Artificial Sequence
  Description of Artificial Sequence: Synthetic oligonucleotide
aguugccaguuauagcgcu

SEQ ID NO: 53833 - RNA, 19 nt, Artificial Sequence
  Description of Artificial Sequence: Synthetic oligonucleotide
uuauugcaaguguauccaa

SEQ ID NO: 53834 - RNA, 19 nt, Artificial Sequence
  Description of Artificial Sequence: Synthetic oligonucleotide
cacuaguagagaaccagca

SEQ ID NO: 53835 - RNA, 19 nt, Artificial Sequence
  Description of Artificial Sequence: Synthetic oligonucleotide
ugauagcacucaaggcacc

SEQ ID NO: 53836 - RNA, 19 nt, Artificial Sequence
  Description of Artificial Sequence: Synthetic oligonucleotide
guuugguuuaaggucuggc

SEQ ID NO: 53837 - RNA, 19 nt, Artificial Sequence
  Description of Artificial Sequence: Synthetic oligonucleotide
gacguagaguggugggucc

SEQ ID NO: 53838 - RNA, 19 nt, Artificial Sequence
  Description of Artificial Sequence: Synthetic oligonucleotide
agaaacaaccgaagcccac

SEQ ID NO: 53839 - RNA, 19 nt, Artificial Sequence
  Description of Artificial Sequence: Synthetic oligonucleotide
acaagagguuauucguaga

SEQ ID NO: 53840 - RNA, 19 nt, Artificial Sequence
  Description of Artificial Sequence: Synthetic oligonucleotide
uguucacguugacguagag

SEQ ID NO: 53841 - RNA, 19 nt, Artificial Sequence
  Description of Artificial Sequence: Synthetic oligonucleotide
gagucaauccagguguuca

SEQ ID NO: 53842 - RNA, 19 nt, Artificial Sequence
  Description of Artificial Sequence: Synthetic oligonucleotide
caucuuuaggagauucaca

SEQ ID NO: 53843 - RNA, 19 nt, Artificial Sequence
  Description of Artificial Sequence: Synthetic oligonucleotide
uggaacggaagagcaaaga

SEQ ID NO: 53844 - RNA, 19 nt, Artificial Sequence
  Description of Artificial Sequence: Synthetic oligonucleotide
ucucaacggucaaagcaau

SEQ ID NO: 53845 - RNA, 19 nt, Artificial Sequence
  Description of Artificial Sequence: Synthetic oligonucleotide
acgaaacaguguugaucac

SEQ ID NO: 53846 - RNA, 19 nt, Artificial Sequence
  Description of Artificial Sequence: Synthetic oligonucleotide
uucaccggcucagaauacc

SEQ ID NO: 53847 - RNA, 19 nt, Artificial Sequence
  Description of Artificial Sequence: Synthetic oligonucleotide
ccacacgauaugaaugugg

SEQ ID NO: 53848 - RNA, 19 nt, Artificial Sequence
  Description of Artificial Sequence: Synthetic oligonucleotide
cucaaaagaucuauuaguu

SEQ ID NO: 53849 - RNA, 19 nt, Artificial Sequence
  Description of Artificial Sequence: Synthetic oligonucleotide
cuuuucguguauguaauaa

SEQ ID NO: 53850 - RNA, 19 nt, Artificial Sequence
  Description of Artificial Sequence: Synthetic oligonucleotide
cccuaagacccacugauag

SEQ ID NO: 53851 - RNA, 19 nt, Artificial Sequence
  Description of Artificial Sequence: Synthetic oligonucleotide
ggcacuaaucuaaagccug

SEQ ID NO: 53852 - RNA, 19 nt, Artificial Sequence
  Description of Artificial Sequence: Synthetic oligonucleotide
caaagcaaucagagccacc

SEQ ID NO: 53853 - RNA, 19 nt, Artificial Sequence
  Description of Artificial Sequence: Synthetic oligonucleotide
uggccaaacuggacacuag

SEQ ID NO: 53854 - RNA, 19 nt, Artificial Sequence
  Description of Artificial Sequence: Synthetic oligonucleotide
gaaguagugaagauggguu

SEQ ID NO: 53855 - RNA, 19 nt, Artificial Sequence
  Description of Artificial Sequence: Synthetic oligonucleotide
gauaugcggcauuaaacau

SEQ ID NO: 53856 - RNA, 19 nt, Artificial Sequence
  Description of Artificial Sequence: Synthetic oligonucleotide
agguagcaauacucagcac

SEQ ID NO: 53857 - RNA, 19 nt, Artificial Sequence
  Description of Artificial Sequence: Synthetic oligonucleotide
cuacacauaagccaagcau

SEQ ID NO: 53858 - RNA, 19 nt, Artificial Sequence
  Description of Artificial Sequence: Synthetic oligonucleotide
ugcauucccgauccucuaa

SEQ ID NO: 53859 - RNA, 19 nt, Artificial Sequence
  Description of Artificial Sequence: Synthetic oligonucleotide
guaugcuuggguuugguuu

SEQ ID NO: 53860 - RNA, 19 nt, Artificial Sequence
  Description of Artificial Sequence: Synthetic oligonucleotide
guuaagcucguagauucca

SEQ ID NO: 53861 - RNA, 19 nt, Artificial Sequence
  Description of Artificial Sequence: Synthetic oligonucleotide
uugacguagaguggugggu

SEQ ID NO: 53862 - RNA, 19 nt, Artificial Sequence
  Description of Artificial Sequence: Synthetic oligonucleotide
uaccccuaagacccacuga

SEQ ID NO: 53863 - RNA, 19 nt, Artificial Sequence
  Description of Artificial Sequence: Synthetic oligonucleotide
gggaagaggcacuagagua

SEQ ID NO: 53864 - RNA, 19 nt, Artificial Sequence
  Description of Artificial Sequence: Synthetic oligonucleotide
auguucaccggcucagaau

SEQ ID NO: 53865 - RNA, 19 nt, Artificial Sequence
  Description of Artificial Sequence: Synthetic oligonucleotide
uuacagcucaaaagaucua

SEQ ID NO: 53866 - RNA, 19 nt, Artificial Sequence
  Description of Artificial Sequence: Synthetic oligonucleotide
uguaccccuaagacccacu

SEQ ID NO: 53867 - RNA, 19 nt, Artificial Sequence
  Description of Artificial Sequence: Synthetic oligonucleotide
aggagauuuauaggcauua

SEQ ID NO: 53868 - RNA, 19 nt, Artificial Sequence
  Description of Artificial Sequence: Synthetic oligonucleotide
ccucuaacaaagagguagc

SEQ ID NO: 53869 - RNA, 19 nt, Artificial Sequence
  Description of Artificial Sequence: Synthetic oligonucleotide
cuucccggccucuucgcag

SEQ ID NO: 53870 - RNA, 19 nt, Artificial Sequence
  Description of Artificial Sequence: Synthetic oligonucleotide
auuaaacaugaaguaucau

SEQ ID NO: 53871 - RNA, 19 nt, Artificial Sequence
  Description of Artificial Sequence: Synthetic oligonucleotide
acguuuguccacacgauau

SEQ ID NO: 53872 - RNA, 19 nt, Artificial Sequence
  Description of Artificial Sequence: Synthetic oligonucleotide
ugacccgaggauagggaau

SEQ ID NO: 53873 - RNA, 19 nt, Artificial Sequence
  Description of Artificial Sequence: Synthetic oligonucleotide
caaucagagccaccaagca

SEQ ID NO: 53874 - RNA, 19 nt, Artificial Sequence
  Description of Artificial Sequence: Synthetic oligonucleotide
aagggauaucugauggaaa

SEQ ID NO: 53875 - RNA, 19 nt, Artificial Sequence
  Description of Artificial Sequence: Synthetic oligonucleotide
gcacgaugaacccaggaga

SEQ ID NO: 53876 - RNA, 19 nt, Artificial Sequence
  Description of Artificial Sequence: Synthetic oligonucleotide
gcauauugcacaucacaga

SEQ ID NO: 53877 - RNA, 19 nt, Artificial Sequence
  Description of Artificial Sequence: Synthetic oligonucleotide
gauaggugaaaaguccagu

SEQ ID NO: 53878 - RNA, 19 nt, Artificial Sequence
  Description of Artificial Sequence: Synthetic oligonucleotide
ucuauuaguuaagcucgua

SEQ ID NO: 53879 - RNA, 19 nt, Artificial Sequence
  Description of Artificial Sequence: Synthetic oligonucleotide
gcgauugcaauuagaacug

SEQ ID NO: 53880 - RNA, 19 nt, Artificial Sequence
  Description of Artificial Sequence: Synthetic oligonucleotide
agauugacccgaggauagg

SEQ ID NO: 53881 - RNA, 19 nt, Artificial Sequence
  Description of Artificial Sequence: Synthetic oligonucleotide
uguaugcagcuugugguuu

SEQ ID NO: 53882 - RNA, 19 nt, Artificial Sequence
  Description of Artificial Sequence: Synthetic oligonucleotide
uucuaggagaauggacuuc

SEQ ID NO: 53883 - RNA, 19 nt, Artificial Sequence
  Description of Artificial Sequence: Synthetic oligonucleotide
aaggagucccugcccugca

SEQ ID NO: 53884 - RNA, 19 nt, Artificial Sequence
  Description of Artificial Sequence: Synthetic oligonucleotide
cucguagauuccaaucuaa

SEQ ID NO: 53885 - RNA, 19 nt, Artificial Sequence
  Description of Artificial Sequence: Synthetic oligonucleotide
gacguuuguccacacgaua

SEQ ID NO: 53886 - RNA, 19 nt, Artificial Sequence
  Description of Artificial Sequence: Synthetic oligonucleotide
acuuagaccuguguacaaa

SEQ ID NO: 53887 - RNA, 19 nt, Artificial Sequence
  Description of Artificial Sequence: Synthetic oligonucleotide
uugucccugauuagcuaau

SEQ ID NO: 53888 - RNA, 19 nt, Artificial Sequence
  Description of Artificial Sequence: Synthetic oligonucleotide
ucuggcgcauguagaugcu

SEQ ID NO: 53889 - RNA, 19 nt, Artificial Sequence
  Description of Artificial Sequence: Synthetic oligonucleotide
ggaugcucugauaugcggc

SEQ ID NO: 53890 - RNA, 19 nt, Artificial Sequence
  Description of Artificial Sequence: Synthetic oligonucleotide
acuuuucguguauguaaua

SEQ ID NO: 53891 - RNA, 19 nt, Artificial Sequence
  Description of Artificial Sequence: Synthetic oligonucleotide
ccuaagacccacugauagc

SEQ ID NO: 53892 - RNA, 19 nt, Artificial Sequence
  Description of Artificial Sequence: Synthetic oligonucleotide
gacuuagaccuguguacaa

SEQ ID NO: 53893 - RNA, 19 nt, Artificial Sequence
  Description of Artificial Sequence: Synthetic oligonucleotide
aggcacuaaucuaaagccu

SEQ ID NO: 53894 - RNA, 19 nt, Artificial Sequence
  Description of Artificial Sequence: Synthetic oligonucleotide
cucaacggucaaagcaauc

SEQ ID NO: 53895 - RNA, 19 nt, Artificial Sequence
  Description of Artificial Sequence: Synthetic oligonucleotide
aaaacccauaaggcacuaa

SEQ ID NO: 53896 - RNA, 19 nt, Artificial Sequence
  Description of Artificial Sequence: Synthetic oligonucleotide
ggaaucuuugucaaacgaa

SEQ ID NO: 53897 - RNA, 19 nt, Artificial Sequence
  Description of Artificial Sequence: Synthetic oligonucleotide
caaggagucccugcccugc

SEQ ID NO: 53898 - RNA, 19 nt, Artificial Sequence
  Description of Artificial Sequence: Synthetic oligonucleotide
ugcucugauaugcggcauu

SEQ ID NO: 53899 - RNA, 19 nt, Artificial Sequence
  Description of Artificial Sequence: Synthetic oligonucleotide
ucucagaaagagggaagua

SEQ ID NO: 53900 - RNA, 19 nt, Artificial Sequence
  Description of Artificial Sequence: Synthetic oligonucleotide
ucccuagaaggcaccuggu

SEQ ID NO: 53901 - RNA, 19 nt, Artificial Sequence
  Description of Artificial Sequence: Synthetic oligonucleotide
gcaguaaguagugaugcca

SEQ ID NO: 53902 - RNA, 19 nt, Artificial Sequence
  Description of Artificial Sequence: Synthetic oligonucleotide
agucgagaaggagauuuau

SEQ ID NO: 53903 - RNA, 19 nt, Artificial Sequence
  Description of Artificial Sequence: Synthetic oligonucleotide
ccccacaaaucacugacug

SEQ ID NO: 53904 - RNA, 19 nt, Artificial Sequence
  Description of Artificial Sequence: Synthetic oligonucleotide
aggccggaaucuaagacaa

SEQ ID NO: 53905 - RNA, 19 nt, Artificial Sequence
  Description of Artificial Sequence: Synthetic oligonucleotide
uggaaaccgacaggaguuc

SEQ ID NO: 53906 - RNA, 19 nt, Artificial Sequence
  Description of Artificial Sequence: Synthetic oligonucleotide
cgcgauugcaauuagaacu

SEQ ID NO: 53907 - RNA, 19 nt, Artificial Sequence
  Description of Artificial Sequence: Synthetic oligonucleotide
gugaaaaguccaguaccca

SEQ ID NO: 53908 - RNA, 19 nt, Artificial Sequence
  Description of Artificial Sequence: Synthetic oligonucleotide
caccaagcauuccuuuguc

SEQ ID NO: 53909 - RNA, 19 nt, Artificial Sequence
  Description of Artificial Sequence: Synthetic oligonucleotide
cagauuaaacaugaaguau

SEQ ID NO: 53910 - RNA, 19 nt, Artificial Sequence
  Description of Artificial Sequence: Synthetic oligonucleotide
cuagauuugugaacuggau

SEQ ID NO: 53911 - RNA, 19 nt, Artificial Sequence
  Description of Artificial Sequence: Synthetic oligonucleotide
aucuauuaguuaagcucgu

SEQ ID NO: 53912 - RNA, 19 nt, Artificial Sequence
  Description of Artificial Sequence: Synthetic oligonucleotide
cucagggagggccccguac

SEQ ID NO: 53913 - RNA, 19 nt, Artificial Sequence
  Description of Artificial Sequence: Synthetic oligonucleotide
caauacucagcaccagcaa

SEQ ID NO: 53914 - RNA, 19 nt, Artificial Sequence
  Description of Artificial Sequence: Synthetic oligonucleotide
gcaauacaaacaagcugcc

SEQ ID NO: 53915 - RNA, 19 nt, Artificial Sequence
  Description of Artificial Sequence: Synthetic oligonucleotide
caucuauggucgccaagca

SEQ ID NO: 53916 - RNA, 19 nt, Artificial Sequence
  Description of Artificial Sequence: Synthetic oligonucleotide
acccgaggauagggaaucc

SEQ ID NO: 53917 - RNA, 19 nt, Artificial Sequence
  Description of Artificial Sequence: Synthetic oligonucleotide
cucuaacaaagagguagca

SEQ ID NO: 53918 - RNA, 19 nt, Artificial Sequence
  Description of Artificial Sequence: Synthetic oligonucleotide
gcagagaguaucuccucuc

SEQ ID NO: 53919 - RNA, 19 nt, Artificial Sequence
  Description of Artificial Sequence: Synthetic oligonucleotide
gagcccugcugaaucgggc

SEQ ID NO: 53920 - RNA, 19 nt, Artificial Sequence
  Description of Artificial Sequence: Synthetic oligonucleotide
cacuagaguaagugcugga

SEQ ID NO: 53921 - RNA, 19 nt, Artificial Sequence
  Description of Artificial Sequence: Synthetic oligonucleotide
aucacuaacuugacugcuu

SEQ ID NO: 53922 - RNA, 19 nt, Artificial Sequence
  Description of Artificial Sequence: Synthetic oligonucleotide
gguuugguuuaaggucugg

SEQ ID NO: 53923 - RNA, 19 nt, Artificial Sequence
  Description of Artificial Sequence: Synthetic oligonucleotide
auccgaccaguaaaauaug

SEQ ID NO: 53924 - RNA, 19 nt, Artificial Sequence
  Description of Artificial Sequence: Synthetic oligonucleotide
ugguaugcuuggguuuggu

SEQ ID NO: 53925 - RNA, 19 nt, Artificial Sequence
  Description of Artificial Sequence: Synthetic oligonucleotide
ggagaacuggacuccucca

SEQ ID NO: 53926 - RNA, 19 nt, Artificial Sequence
  Description of Artificial Sequence: Synthetic oligonucleotide
gcauucccgauccucuaac

SEQ ID NO: 53927 - RNA, 19 nt, Artificial Sequence
  Description of Artificial Sequence: Synthetic oligonucleotide
agaggcuaccugucagauu

SEQ ID NO: 53928 - RNA, 19 nt, Artificial Sequence
  Description of Artificial Sequence: Synthetic oligonucleotide
gcuggaacggaagagcaaa

SEQ ID NO: 53929 - RNA, 19 nt, Artificial Sequence
  Description of Artificial Sequence: Synthetic oligonucleotide
ugccuacaggcaccacagu

SEQ ID NO: 53930 - RNA, 19 nt, Artificial Sequence
  Description of Artificial Sequence: Synthetic oligonucleotide
ccguaccguuuccauaugg

SEQ ID NO: 53931 - RNA, 19 nt, Artificial Sequence
  Description of Artificial Sequence: Synthetic oligonucleotide
caagcauggucaguggucu

SEQ ID NO: 53932 - RNA, 19 nt, Artificial Sequence
  Description of Artificial Sequence: Synthetic oligonucleotide
agacguuuguccacacgau

SEQ ID NO: 53933 - RNA, 19 nt, Artificial Sequence
  Description of Artificial Sequence: Synthetic oligonucleotide
gauggguuucacagguacu

SEQ ID NO: 53934 - RNA, 19 nt, Artificial Sequence
  Description of Artificial Sequence: Synthetic oligonucleotide
guugccaguuauagcgcuc

SEQ ID NO: 53935 - RNA, 19 nt, Artificial Sequence
  Description of Artificial Sequence: Synthetic oligonucleotide
cacgucucacugagaaaga

SEQ ID NO: 53936 - RNA, 19 nt, Artificial Sequence
  Description of Artificial Sequence: Synthetic oligonucleotide
gucgagaaggagauuuaua

SEQ ID NO: 53937 - RNA, 19 nt, Artificial Sequence
  Description of Artificial Sequence: Synthetic oligonucleotide
ugucccugauuagcuaauu

SEQ ID NO: 53938 - RNA, 19 nt, Artificial Sequence
  Description of Artificial Sequence: Synthetic oligonucleotide
ggcuagaccauuacacuaa

SEQ ID NO: 53939 - RNA, 19 nt, Artificial Sequence
  Description of Artificial Sequence: Synthetic oligonucleotide
ggucgccaagcauauugca

SEQ ID NO: 53940 - RNA, 19 nt, Artificial Sequence
  Description of Artificial Sequence: Synthetic oligonucleotide
caccugguucguggaaacc

SEQ ID NO: 53941 - RNA, 19 nt, Artificial Sequence
  Description of Artificial Sequence: Synthetic oligonucleotide
gagggccccguaccguuuc

SEQ ID NO: 53942 - RNA, 19 nt, Artificial Sequence
  Description of Artificial Sequence: Synthetic oligonucleotide
cuauggucgccaagcauau

SEQ ID NO: 53943 - RNA, 19 nt, Artificial Sequence
  Description of Artificial Sequence: Synthetic oligonucleotide
cacaagcauggucaguggu

SEQ ID NO: 53944 - RNA, 19 nt, Artificial Sequence
  Description of Artificial Sequence: Synthetic oligonucleotide
guucaccggcucagaauac

SEQ ID NO: 53945 - RNA, 19 nt, Artificial Sequence
  Description of Artificial Sequence: Synthetic oligonucleotide
cguugacguagaguggugg

SEQ ID NO: 53946 - RNA, 19 nt, Artificial Sequence
  Description of Artificial Sequence: Synthetic oligonucleotide
gcuagaccauuacacuaaa

SEQ ID NO: 53947 - RNA, 19 nt, Artificial Sequence
  Description of Artificial Sequence: Synthetic oligonucleotide
gcaccugguucguggaaac

SEQ ID NO: 53948 - RNA, 19 nt, Artificial Sequence
  Description of Artificial Sequence: Synthetic oligonucleotide
acguugacguagaguggug

SEQ ID NO: 53949 - RNA, 19 nt, Artificial Sequence
  Description of Artificial Sequence: Synthetic oligonucleotide
gcucguagauuccaaucua

SEQ ID NO: 53950 - RNA, 19 nt, Artificial Sequence
  Description of Artificial Sequence: Synthetic oligonucleotide
cccgaagacguuuguccac

SEQ ID NO: 53951 - RNA, 19 nt, Artificial Sequence
  Description of Artificial Sequence: Synthetic oligonucleotide
gcaagccuguugguuguag

SEQ ID NO: 53952 - RNA, 19 nt, Artificial Sequence
  Description of Artificial Sequence: Synthetic oligonucleotide
cuuugucaccccacuucua

SEQ ID NO: 53953 - RNA, 19 nt, Artificial Sequence
  Description of Artificial Sequence: Synthetic oligonucleotide
cagucgagaaggagauuua

SEQ ID NO: 53954 - RNA, 19 nt, Artificial Sequence
  Description of Artificial Sequence: Synthetic oligonucleotide
aggcuaccugucagauuuc

SEQ ID NO: 53955 - RNA, 19 nt, Artificial Sequence
  Description of Artificial Sequence: Synthetic oligonucleotide
caccggcucagaauaccaa

SEQ ID NO: 53956 - RNA, 19 nt, Artificial Sequence
  Description of Artificial Sequence: Synthetic oligonucleotide
ccccuaucagaaccugcag

SEQ ID NO: 53957 - RNA, 19 nt, Artificial Sequence
  Description of Artificial Sequence: Synthetic oligonucleotide
gaaaccgacaggaguucuu

SEQ ID NO: 53958 - RNA, 19 nt, Artificial Sequence
  Description of Artificial Sequence: Synthetic oligonucleotide
cgauugcaauuagaacugg

SEQ ID NO: 53959 - RNA, 19 nt, Artificial Sequence
  Description of Artificial Sequence: Synthetic oligonucleotide
ccuaccgaaccagaaggca

SEQ ID NO: 53960 - RNA, 19 nt, Artificial Sequence
  Description of Artificial Sequence: Synthetic oligonucleotide
cccgaggauagggaauccc

SEQ ID NO: 53961 - RNA, 19 nt, Artificial Sequence
  Description of Artificial Sequence: Synthetic oligonucleotide
ggcacuacccucauguguu

SEQ ID NO: 53962 - RNA, 19 nt, Artificial Sequence
  Description of Artificial Sequence: Synthetic oligonucleotide
uauggucgccaagcauauu

SEQ ID NO: 53963 - RNA, 19 nt, Artificial Sequence
  Description of Artificial Sequence: Synthetic oligonucleotide
guaaguugucccagaguuu

SEQ ID NO: 53964 - RNA, 19 nt, Artificial Sequence
  Description of Artificial Sequence: Synthetic oligonucleotide
ggcaccugguucguggaaa

SEQ ID NO: 53965 - RNA, 19 nt, Artificial Sequence
  Description of Artificial Sequence: Synthetic oligonucleotide
agagaacgucaggggccug

SEQ ID NO: 53966 - RNA, 19 nt, Artificial Sequence
  Description of Artificial Sequence: Synthetic oligonucleotide
caccugccgugcagguuuc

SEQ ID NO: 53967 - RNA, 19 nt, Artificial Sequence
  Description of Artificial Sequence: Synthetic oligonucleotide
cucugauaugcggcauuaa

SEQ ID NO: 53968 - RNA, 19 nt, Artificial Sequence
  Description of Artificial Sequence: Synthetic oligonucleotide
cguggaaaccgacaggagu

SEQ ID NO: 53969 - RNA, 19 nt, Artificial Sequence
  Description of Artificial Sequence: Synthetic oligonucleotide
cuggucgaucuggcgcaug

SEQ ID NO: 53970 - RNA, 19 nt, Artificial Sequence
  Description of Artificial Sequence: Synthetic oligonucleotide
gcucugauaugcggcauua

SEQ ID NO: 53971 - RNA, 19 nt, Artificial Sequence
  Description of Artificial Sequence: Synthetic oligonucleotide
ccgaagacguuuguccaca

SEQ ID NO: 53972 - RNA, 19 nt, Artificial Sequence
  Description of Artificial Sequence: Synthetic oligonucleotide
augcggcauuaaacaucuc

SEQ ID NO: 53973 - RNA, 19 nt, Artificial Sequence
  Description of Artificial Sequence: Synthetic oligonucleotide
gcacuaaucuaaagccugu

SEQ ID NO: 53974 - RNA, 19 nt, Artificial Sequence
  Description of Artificial Sequence: Synthetic oligonucleotide
caggaacgcgauugcaauu

SEQ ID NO: 53975 - RNA, 19 nt, Artificial Sequence
  Description of Artificial Sequence: Synthetic oligonucleotide
ggaaaccgacaggaguucu

SEQ ID NO: 53976 - RNA, 19 nt, Artificial Sequence
  Description of Artificial Sequence: Synthetic oligonucleotide
ccgaagcccacucaagagu

SEQ ID NO: 53977 - RNA, 19 nt, Artificial Sequence
  Description of Artificial Sequence: Synthetic oligonucleotide
cgaagacguuuguccacac

SEQ ID NO: 53978 - RNA, 19 nt, Artificial Sequence
  Description of Artificial Sequence: Synthetic oligonucleotide
ccacuucuaggagaaugga

SEQ ID NO: 53979 - RNA, 19 nt, Artificial Sequence
  Description of Artificial Sequence: Synthetic oligonucleotide
cccgauccucuaacaaaga

SEQ ID NO: 53980 - RNA, 19 nt, Artificial Sequence
  Description of Artificial Sequence: Synthetic oligonucleotide
ggcuaccugucagauuucu

SEQ ID NO: 53981 - RNA, 19 nt, Artificial Sequence
  Description of Artificial Sequence: Synthetic oligonucleotide
cgaaacaguguugaucacu

SEQ ID NO: 53982 - RNA, 19 nt, Artificial Sequence
  Description of Artificial Sequence: Synthetic oligonucleotide
gccccguaccguuuccaua

SEQ ID NO: 53983 - RNA, 19 nt, Artificial Sequence
  Description of Artificial Sequence: Synthetic oligonucleotide
ggcgcauguagaugcucuu

SEQ ID NO: 53984 - RNA, 19 nt, Artificial Sequence
  Description of Artificial Sequence: Synthetic oligonucleotide
ggccccguaccguuuccau

SEQ ID NO: 53985 - RNA, 19 nt, Artificial Sequence
  Description of Artificial Sequence: Synthetic oligonucleotide
ggccuggaguugccaguua

SEQ ID NO: 53986 - RNA, 19 nt, Artificial Sequence
  Description of Artificial Sequence: Synthetic oligonucleotide
gggccccguaccguuucca

SEQ ID NO: 53987 - RNA, 19 nt, Artificial Sequence
  Description of Artificial Sequence: Synthetic oligonucleotide
gccgugcagguuucauuau

SEQ ID NO: 53988 - RNA, 19 nt, Artificial Sequence
  Description of Artificial Sequence: Synthetic oligonucleotide
ggacacccgucuucagauu

SEQ ID NO: 53989 - RNA, 19 nt, Artificial Sequence
  Description of Artificial Sequence: Synthetic oligonucleotide
cccuagaaggcaccugguu

SEQ ID NO: 53990 - RNA, 19 nt, Artificial Sequence
  Description of Artificial Sequence: Synthetic oligonucleotide
gcgcauguagaugcucuuu

SEQ ID NO: 53991 - RNA, 19 nt, Artificial Sequence
  Description of Artificial Sequence: Synthetic oligonucleotide
gggccuggaguugccaguu

SEQ ID NO: 53992 - RNA, 19 nt, Artificial Sequence
  Description of Artificial Sequence: Synthetic oligonucleotide
ggagggccccguaccguuu

SEQ ID NO: 53993 - RNA, 19 nt, Artificial Sequence
  Description of Artificial Sequence: Synthetic oligonucleotide
auauauauggauuccaggc

SEQ ID NO: 53994 - RNA, 19 nt, Artificial Sequence
  Description of Artificial Sequence: Synthetic oligonucleotide
aaaguguuaucucacacuc

SEQ ID NO: 53995 - RNA, 19 nt, Artificial Sequence
  Description of Artificial Sequence: Synthetic oligonucleotide
uuagacuaggcccacaagg

SEQ ID NO: 53996 - RNA, 19 nt, Artificial Sequence
  Description of Artificial Sequence: Synthetic oligonucleotide
uauuuugacauauacgacc

SEQ ID NO: 53997 - RNA, 19 nt, Artificial Sequence
  Description of Artificial Sequence: Synthetic oligonucleotide
aaagcuaugccucccggcc

SEQ ID NO: 53998 - RNA, 19 nt, Artificial Sequence
  Description of Artificial Sequence: Synthetic oligonucleotide
agaaguguuagacuaggcc

SEQ ID NO: 53999 - RNA, 19 nt, Artificial Sequence
  Description of Artificial Sequence: Synthetic oligonucleotide
uuaaaguucucccuccacg

SEQ ID NO: 54000 - RNA, 19 nt, Artificial Sequence
  Description of Artificial Sequence: Synthetic oligonucleotide
aauuacaccauuaguuacc

SEQ ID NO: 54001 - RNA, 19 nt, Artificial Sequence
  Description of Artificial Sequence: Synthetic oligonucleotide
uauacgaccugacacaagc

SEQ ID NO: 54002 - RNA, 19 nt, Artificial Sequence
  Description of Artificial Sequence: Synthetic oligonucleotide
uguuaucucacacucacca

SEQ ID NO: 54003 - RNA, 19 nt, Artificial Sequence
  Description of Artificial Sequence: Synthetic oligonucleotide
aggaauaucuuuaaacgcc

SEQ ID NO: 54004 - RNA, 19 nt, Artificial Sequence
  Description of Artificial Sequence: Synthetic oligonucleotide
uacaauaaugaacaccuac

SEQ ID NO: 54005 - RNA, 19 nt, Artificial Sequence
  Description of Artificial Sequence: Synthetic oligonucleotide
uagguguacagaaaggggc

SEQ ID NO: 54006 - RNA, 19 nt, Artificial Sequence
  Description of Artificial Sequence: Synthetic oligonucleotide
aggacuaacacacaaaguu

SEQ ID NO: 54007 - RNA, 19 nt, Artificial Sequence
  Description of Artificial Sequence: Synthetic oligonucleotide
acuaucaacaaggcuauac

SEQ ID NO: 54008 - RNA, 19 nt, Artificial Sequence
  Description of Artificial Sequence: Synthetic oligonucleotide
caaguuaguuacuacacug

SEQ ID NO: 54009 - RNA, 19 nt, Artificial Sequence
  Description of Artificial Sequence: Synthetic oligonucleotide
auagaugacgagcagagaa

SEQ ID NO: 54010 - RNA, 19 nt, Artificial Sequence
  Description of Artificial Sequence: Synthetic oligonucleotide
aagcuaaggagccuggcug

SEQ ID NO: 54011 - RNA, 19 nt, Artificial Sequence
  Description of Artificial Sequence: Synthetic oligonucleotide
acgaccauaguacuuguuc

SEQ ID NO: 54012 - RNA, 19 nt, Artificial Sequence
  Description of Artificial Sequence: Synthetic oligonucleotide
uacgaccugacacaagcgg

SEQ ID NO: 54013 - RNA, 19 nt, Artificial Sequence
  Description of Artificial Sequence: Synthetic oligonucleotide
agcugguauaccugcaugc

SEQ ID NO: 54014 - RNA, 19 nt, Artificial Sequence
  Description of Artificial Sequence: Synthetic oligonucleotide
ugguuugacaaacacacau

SEQ ID NO: 54015 - RNA, 19 nt, Artificial Sequence
  Description of Artificial Sequence: Synthetic oligonucleotide
aaguuaguuacuacacugg

SEQ ID NO: 54016 - RNA, 19 nt, Artificial Sequence
  Description of Artificial Sequence: Synthetic oligonucleotide
aaauacuauggaaaggggu

SEQ ID NO: 54017 - RNA, 19 nt, Artificial Sequence
  Description of Artificial Sequence: Synthetic oligonucleotide
aagacgagacccugagugg

SEQ ID NO: 54018 - RNA, 19 nt, Artificial Sequence
  Description of Artificial Sequence: Synthetic oligonucleotide
gaucccaggacuaacacac

SEQ ID NO: 54019 - RNA, 19 nt, Artificial Sequence
  Description of Artificial Sequence: Synthetic oligonucleotide
aagaccaugacuggggucu

SEQ ID NO: 54020 - RNA, 19 nt, Artificial Sequence
  Description of Artificial Sequence: Synthetic oligonucleotide
aaaccuuaggcaagggaac

SEQ ID NO: 54021 - RNA, 19 nt, Artificial Sequence
  Description of Artificial Sequence: Synthetic oligonucleotide
uagacuaggcccacaaggc

SEQ ID NO: 54022 - RNA, 19 nt, Artificial Sequence
  Description of Artificial Sequence: Synthetic oligonucleotide
agugugaucgucguaccgc

SEQ ID NO: 54023 - RNA, 19 nt, Artificial Sequence
  Description of Artificial Sequence: Synthetic oligonucleotide
aauacuauggaaaggggua

SEQ ID NO: 54024 - RNA, 19 nt, Artificial Sequence
  Description of Artificial Sequence: Synthetic oligonucleotide
auacugaacuagcccaggc

SEQ ID NO: 54025 - RNA, 19 nt, Artificial Sequence
  Description of Artificial Sequence: Synthetic oligonucleotide
aacaaggcuauacuccaga

SEQ ID NO: 54026 - RNA, 19 nt, Artificial Sequence
  Description of Artificial Sequence: Synthetic oligonucleotide
aguaggcauggagagagcc

SEQ ID NO: 54027 - RNA, 19 nt, Artificial Sequence
  Description of Artificial Sequence: Synthetic oligonucleotide
uugagaagcagcgaauccc

SEQ ID NO: 54028 - RNA, 19 nt, Artificial Sequence
  Description of Artificial Sequence: Synthetic oligonucleotide
  modified_base (6)..(6): a, c, u, g, unknown or other
agaagnggagcagagaaca

SEQ ID NO: 54029 - RNA, 19 nt, Artificial Sequence
  Description of Artificial Sequence: Synthetic oligonucleotide
aacucagaccgcuauugcu

SEQ ID NO: 54030 - RNA, 19 nt, Artificial Sequence
  Description of Artificial Sequence: Synthetic oligonucleotide
ugacaaacacacauugcgu

SEQ ID NO: 54031 - RNA, 19 nt, Artificial Sequence
  Description of Artificial Sequence: Synthetic oligonucleotide
uaucaacaaggcuauacuc

SEQ ID NO: 54032 - RNA, 19 nt, Artificial Sequence
  Description of Artificial Sequence: Synthetic oligonucleotide
  modified_base (17)..(17): a, c, u, g, unknown or other
uguguagcuucagaagngg

SEQ ID NO: 54033 - RNA, 19 nt, Artificial Sequence
  Description of Artificial Sequence: Synthetic oligonucleotide
  modified_base (10)..(10): a, c, u, g, unknown or other
cuucagaagnggagcagag

SEQ ID NO: 54034 - RNA, 19 nt, Artificial Sequence
  Description of Artificial Sequence: Synthetic oligonucleotide
uuuacuguucuguccggcc

SEQ ID NO: 54035 - RNA, 19 nt, Artificial Sequence
  Description of Artificial Sequence: Synthetic oligonucleotide
cagauaaacgggcuggccc

SEQ ID NO: 54036 - RNA, 19 nt, Artificial Sequence
  Description of Artificial Sequence: Synthetic oligonucleotide
accgcuauugcugucuagc

SEQ ID NO: 54037 - RNA, 19 nt, Artificial Sequence
  Description of Artificial Sequence: Synthetic oligonucleotide
caccuaucagauaaacggg

SEQ ID NO: 54038 - RNA, 19 nt, Artificial Sequence
  Description of Artificial Sequence: Synthetic oligonucleotide
agggaaccaaaguucaaag

SEQ ID NO: 54039 - RNA, 19 nt, Artificial Sequence
  Description of Artificial Sequence: Synthetic oligonucleotide
aguuaguuacuacacuggu

SEQ ID NO: 54040 - RNA, 19 nt, Artificial Sequence
  Description of Artificial Sequence: Synthetic oligonucleotide
ugacauauacgaccugaca

SEQ ID NO: 54041 - RNA, 19 nt, Artificial Sequence
  Description of Artificial Sequence: Synthetic oligonucleotide
uuuaaaguucucccuccac

SEQ ID NO: 54042 - RNA, 19 nt, Artificial Sequence
  Description of Artificial Sequence: Synthetic oligonucleotide
gaggucacgucgcaggucc

SEQ ID NO: 54043 - RNA, 19 nt, Artificial Sequence
  Description of Artificial Sequence: Synthetic oligonucleotide
ucggagaucagaccggcac

SEQ ID NO: 54044 - RNA, 19 nt, Artificial Sequence
  Description of Artificial Sequence: Synthetic oligonucleotide
agaauccucaugcccauug

SEQ ID NO: 54045 - RNA, 19 nt, Artificial Sequence
  Description of Artificial Sequence: Synthetic oligonucleotide
ggucagaagaccaugacug

SEQ ID NO: 54046 - RNA, 19 nt, Artificial Sequence
  Description of Artificial Sequence: Synthetic oligonucleotide
acuaaagacccuugggccu

SEQ ID NO: 54047 - RNA, 19 nt, Artificial Sequence
  Description of Artificial Sequence: Synthetic oligonucleotide
agggauuuaguaggcaugg

SEQ ID NO: 54048 - RNA, 19 nt, Artificial Sequence
  Description of Artificial Sequence: Synthetic oligonucleotide
agaggacguauguucugcc

SEQ ID NO: 54049 - RNA, 19 nt, Artificial Sequence
  Description of Artificial Sequence: Synthetic oligonucleotide
aaugggaaccugcccacca

SEQ ID NO: 54050 - RNA, 19 nt, Artificial Sequence
  Description of Artificial Sequence: Synthetic oligonucleotide
uguuagacuaggcccacaa

SEQ ID NO: 54051 - RNA, 19 nt, Artificial Sequence
  Description of Artificial Sequence: Synthetic oligonucleotide
acucagagcgcauacggcu

SEQ ID NO: 54052 - RNA, 19 nt, Artificial Sequence
  Description of Artificial Sequence: Synthetic oligonucleotide
cacgugugcauccaggcgc

SEQ ID NO: 54053 - RNA, 19 nt, Artificial Sequence
  Description of Artificial Sequence: Synthetic oligonucleotide
agaggacggggucuuaggg

SEQ ID NO: 54054 - RNA, 19 nt, Artificial Sequence
  Description of Artificial Sequence: Synthetic oligonucleotide
gaguccacgaccauaguac

SEQ ID NO: 54055 - RNA, 19 nt, Artificial Sequence
  Description of Artificial Sequence: Synthetic oligonucleotide
auacugucuaggccagagc

SEQ ID NO: 54056 - RNA, 19 nt, Artificial Sequence
  Description of Artificial Sequence: Synthetic oligonucleotide
agguguguagcuucagaag

SEQ ID NO: 54057 - RNA, 19 nt, Artificial Sequence
  Description of Artificial Sequence: Synthetic oligonucleotide
aggucuuaggguauguagg

SEQ ID NO: 54058 - RNA, 19 nt, Artificial Sequence
  Description of Artificial Sequence: Synthetic oligonucleotide
ugagggauuuaguaggcau

SEQ ID NO: 54059 - RNA, 19 nt, Artificial Sequence
  Description of Artificial Sequence: Synthetic oligonucleotide
ccgaguugcacuuuggucc

SEQ ID NO: 54060 - RNA, 19 nt, Artificial Sequence
  Description of Artificial Sequence: Synthetic oligonucleotide
auauaacccuuuaaaagca

SEQ ID NO: 54061 - RNA, 19 nt, Artificial Sequence
  Description of Artificial Sequence: Synthetic oligonucleotide
ugaucgucguaccgcauca

SEQ ID NO: 54062 - RNA, 19 nt, Artificial Sequence
  Description of Artificial Sequence: Synthetic oligonucleotide
uauaacccuuuaaaagcaa

SEQ ID NO: 54063 - RNA, 19 nt, Artificial Sequence
  Description of Artificial Sequence: Synthetic oligonucleotide
agaacucagaccgcuauug

SEQ ID NO: 54064 - RNA, 19 nt, Artificial Sequence
  Description of Artificial Sequence: Synthetic oligonucleotide
aguuuucgguccuuggacu

SEQ ID NO: 54065 - RNA, 19 nt, Artificial Sequence
  Description of Artificial Sequence: Synthetic oligonucleotide
uccuacgucccuagaagca

SEQ ID NO: 54066 - RNA, 19 nt, Artificial Sequence
  Description of Artificial Sequence: Synthetic oligonucleotide
cugcaacacacacaauggg

SEQ ID NO: 54067 - RNA, 19 nt, Artificial Sequence
  Description of Artificial Sequence: Synthetic oligonucleotide
gcuagguguacagaaaggg

SEQ ID NO: 54068 - RNA, 19 nt, Artificial Sequence
  Description of Artificial Sequence: Synthetic oligonucleotide
acagggguacuugaagugg

SEQ ID NO: 54069 - RNA, 19 nt, Artificial Sequence
  Description of Artificial Sequence: Synthetic oligonucleotide
uuuacaucuugggaacgug

SEQ ID NO: 54070 - RNA, 19 nt, Artificial Sequence
  Description of Artificial Sequence: Synthetic oligonucleotide
ugagcagcggauacugaac

SEQ ID NO: 54071 - RNA, 19 nt, Artificial Sequence
  Description of Artificial Sequence: Synthetic oligonucleotide
ugagugcuuagccccagga

SEQ ID NO: 54072 - RNA, 19 nt, Artificial Sequence
  Description of Artificial Sequence: Synthetic oligonucleotide
augggcaaagcuaugccuc

SEQ ID NO: 54073 - RNA, 19 nt, Artificial Sequence
  Description of Artificial Sequence: Synthetic oligonucleotide
uuacaccaaagagaaauau

SEQ ID NO: 54074 - RNA, 19 nt, Artificial Sequence
  Description of Artificial Sequence: Synthetic oligonucleotide
acgcaagcgcgccuaaacg

SEQ ID NO: 54075 - RNA, 19 nt, Artificial Sequence
  Description of Artificial Sequence: Synthetic oligonucleotide
accgaugcaggcuccggcg

SEQ ID NO: 54076 - RNA, 19 nt, Artificial Sequence
  Description of Artificial Sequence: Synthetic oligonucleotide
agcggauacugaacuagcc

SEQ ID NO: 54077 - RNA, 19 nt, Artificial Sequence
  Description of Artificial Sequence: Synthetic oligonucleotide
uuuugacauauacgaccug

SEQ ID NO: 54078 - RNA, 19 nt, Artificial Sequence
  Description of Artificial Sequence: Synthetic oligonucleotide
  modified_base (7)..(7): a, c, u, g, unknown or other
cagaagnggagcagagaac

SEQ ID NO: 54079 - RNA, 19 nt, Artificial Sequence
  Description of Artificial Sequence: Synthetic oligonucleotide
aggacguauguucugcccu

SEQ ID NO: 54080 - RNA, 19 nt, Artificial Sequence
  Description of Artificial Sequence: Synthetic oligonucleotide
gaacucagaccgcuauugc

SEQ ID NO: 54081 - RNA, 19 nt, Artificial Sequence
  Description of Artificial Sequence: Synthetic oligonucleotide
gagaggacggggucuuagg

SEQ ID NO: 54082 - RNA, 19 nt, Artificial Sequence
  Description of Artificial Sequence: Synthetic oligonucleotide
ggaaaugagggauuuagua

SEQ ID NO: 54083 - RNA, 19 nt, Artificial Sequence
  Description of Artificial Sequence: Synthetic oligonucleotide
gugaacaccacuacggguc

SEQ ID NO: 54084 - RNA, 19 nt, Artificial Sequence
  Description of Artificial Sequence: Synthetic oligonucleotide
gaggacguauguucugccc

SEQ ID NO: 54085 - RNA, 19 nt, Artificial Sequence
  Description of Artificial Sequence: Synthetic oligonucleotide
ggucuuaggguauguaggc

SEQ ID NO: 54086 - RNA, 19 nt, Artificial Sequence
  Description of Artificial Sequence: Synthetic oligonucleotide
agucggagaucagaccggc

SEQ ID NO: 54087 - RNA, 19 nt, Artificial Sequence
  Description of Artificial Sequence: Synthetic oligonucleotide
agggaaacgcaagcgcgcc

SEQ ID NO: 54088 - RNA, 19 nt, Artificial Sequence
  Description of Artificial Sequence: Synthetic oligonucleotide
guucuguccggccggaccc

SEQ ID NO: 54089 - RNA, 19 nt, Artificial Sequence
  Description of Artificial Sequence: Synthetic oligonucleotide
agaccucgaagucuuacau

SEQ ID NO: 54090 - RNA, 19 nt, Artificial Sequence
  Description of Artificial Sequence: Synthetic oligonucleotide
gacucaccucagcaaacag

SEQ ID NO: 54091 - RNA, 19 nt, Artificial Sequence
  Description of Artificial Sequence: Synthetic oligonucleotide
aagcaacauaacacuacug

SEQ ID NO: 54092 - RNA, 19 nt, Artificial Sequence
  Description of Artificial Sequence: Synthetic oligonucleotide
guuagacuaggcccacaag

SEQ ID NO: 54093 - RNA, 19 nt, Artificial Sequence
  Description of Artificial Sequence: Synthetic oligonucleotide
gguccuacgucccuagaag

SEQ ID NO: 54094 - RNA, 19 nt, Artificial Sequence
  Description of Artificial Sequence: Synthetic oligonucleotide
gacuaacacacaaaguucu

SEQ ID NO: 54095 - RNA, 19 nt, Artificial Sequence
  Description of Artificial Sequence: Synthetic oligonucleotide
ucucagaacucagaccgcu

SEQ ID NO: 54096 - RNA, 19 nt, Artificial Sequence
  Description of Artificial Sequence: Synthetic oligonucleotide
guuaucucacacucaccac

SEQ ID NO: 54097 - RNA, 19 nt, Artificial Sequence
  Description of Artificial Sequence: Synthetic oligonucleotide
acuaacacacaaaguucuc

SEQ ID NO: 54098 - RNA, 19 nt, Artificial Sequence
  Description of Artificial Sequence: Synthetic oligonucleotide
augggaaccugcccaccac

SEQ ID NO: 54099 - RNA, 19 nt, Artificial Sequence
  Description of Artificial Sequence: Synthetic oligonucleotide
gaucccgaguugcacuuug

SEQ ID NO: 54100 - RNA, 19 nt, Artificial Sequence
  Description of Artificial Sequence: Synthetic oligonucleotide
acgaccugacacaagcggg

SEQ ID NO: 54101 - RNA, 19 nt, Artificial Sequence
  Description of Artificial Sequence: Synthetic oligonucleotide
uucucagaacucagaccgc

SEQ ID NO: 54102 - RNA, 19 nt, Artificial Sequence
  Description of Artificial Sequence: Synthetic oligonucleotide
cagaaguguuagacuaggc

SEQ ID NO: 54103 - RNA, 19 nt, Artificial Sequence
  Description of Artificial Sequence: Synthetic oligonucleotide
aucagaccggcacuccuug

SEQ ID NO: 54104 - RNA, 19 nt, Artificial Sequence
  Description of Artificial Sequence: Synthetic oligonucleotide
ugcuuaguuuacuguucug

SEQ ID NO: 54105 - RNA, 19 nt, Artificial Sequence
  Description of Artificial Sequence: Synthetic oligonucleotide
agcuaaggagccuggcuga

SEQ ID NO: 54106 - RNA, 19 nt, Artificial Sequence
  Description of Artificial Sequence: Synthetic oligonucleotide
agcgcauacggcucagcug

SEQ ID NO: 54107 - RNA, 19 nt, Artificial Sequence
  Description of Artificial Sequence: Synthetic oligonucleotide
aguccacgaccauaguacu

SEQ ID NO: 54108 - RNA, 19 nt, Artificial Sequence
  Description of Artificial Sequence: Synthetic oligonucleotide
guuaguuacuacacugguc

SEQ ID NO: 54109 - RNA, 19 nt, Artificial Sequence
  Description of Artificial Sequence: Synthetic oligonucleotide
aguguuagacuaggcccac

SEQ ID NO: 54110 - RNA, 19 nt, Artificial Sequence
  Description of Artificial Sequence: Synthetic oligonucleotide
aucuugggaacgugcacgu

SEQ ID NO: 54111 - RNA, 19 nt, Artificial Sequence
  Description of Artificial Sequence: Synthetic oligonucleotide
aaccugugaucccgaguug

SEQ ID NO: 54112 - RNA, 19 nt, Artificial Sequence
  Description of Artificial Sequence: Synthetic oligonucleotide
ugacucaccucagcaaaca

SEQ ID NO: 54113 - RNA, 19 nt, Artificial Sequence
  Description of Artificial Sequence: Synthetic oligonucleotide
gcaacauaacacuacugga

SEQ ID NO: 54114 - RNA, 19 nt, Artificial Sequence
  Description of Artificial Sequence: Synthetic oligonucleotide
auggagagagccugugcca

SEQ ID NO: 54115 - RNA, 19 nt, Artificial Sequence
  Description of Artificial Sequence: Synthetic oligonucleotide
agaucagaccggcacuccu

SEQ ID NO: 54116 - RNA, 19 nt, Artificial Sequence
  Description of Artificial Sequence: Synthetic oligonucleotide
acuacgggucauucuguca

SEQ ID NO: 54117 - RNA, 19 nt, Artificial Sequence
  Description of Artificial Sequence: Synthetic oligonucleotide
aacgccaauggagccacgu

SEQ ID NO: 54118 - RNA, 19 nt, Artificial Sequence
  Description of Artificial Sequence: Synthetic oligonucleotide
cagcggauacugaacuagc

SEQ ID NO: 54119 - RNA, 19 nt, Artificial Sequence
  Description of Artificial Sequence: Synthetic oligonucleotide
uccggcgggaguguuuacg

SEQ ID NO: 54120 - RNA, 19 nt, Artificial Sequence
  Description of Artificial Sequence: Synthetic oligonucleotide
gagucggagaucagaccgg

SEQ ID NO: 54121 - RNA, 19 nt, Artificial Sequence
  Description of Artificial Sequence: Synthetic oligonucleotide
guaaccugagcuccccaac

SEQ ID NO: 54122 - RNA, 19 nt, Artificial Sequence
  Description of Artificial Sequence: Synthetic oligonucleotide
cacccaaagcucaagaacu

SEQ ID NO: 54123 - RNA, 19 nt, Artificial Sequence
  Description of Artificial Sequence: Synthetic oligonucleotide
ucccgaguugcacuuuggu

SEQ ID NO: 54124 - RNA, 19 nt, Artificial Sequence
  Description of Artificial Sequence: Synthetic oligonucleotide
auaaacgggcuggcccucc

SEQ ID NO: 54125 - RNA, 19 nt, Artificial Sequence
  Description of Artificial Sequence: Synthetic oligonucleotide
gaugacgagcagagaacug

SEQ ID NO: 54126 - RNA, 19 nt, Artificial Sequence
  Description of Artificial Sequence: Synthetic oligonucleotide
cuaucaacaaggcuauacu

SEQ ID NO: 54127 - RNA, 19 nt, Artificial Sequence
  Description of Artificial Sequence: Synthetic oligonucleotide
uuaggguauguaggcaggu

SEQ ID NO: 54128 - RNA, 19 nt, Artificial Sequence
  Description of Artificial Sequence: Synthetic oligonucleotide
gcggauacugaacuagccc

SEQ ID NO: 54129 - RNA, 19 nt, Artificial Sequence
  Description of Artificial Sequence: Synthetic oligonucleotide
caacaaggcuauacuccag

SEQ ID NO: 54130 - RNA, 19 nt, Artificial Sequence
  Description of Artificial Sequence: Synthetic oligonucleotide
uacgucccuagaagcagac

SEQ ID NO: 54131 - RNA, 19 nt, Artificial Sequence
  Description of Artificial Sequence: Synthetic oligonucleotide
ugcacguggccagauguga

SEQ ID NO: 54132 - RNA, 19 nt, Artificial Sequence
  Description of Artificial Sequence: Synthetic oligonucleotide
gaaaggggccggcucgggc

SEQ ID NO: 54133 - RNA, 19 nt, Artificial Sequence
  Description of Artificial Sequence: Synthetic oligonucleotide
cugacucaccucagcaaac

SEQ ID NO: 54134 - RNA, 19 nt, Artificial Sequence
  Description of Artificial Sequence: Synthetic oligonucleotide
cuacgggucauucugucaa

SEQ ID NO: 54135 - RNA, 19 nt, Artificial Sequence
  Description of Artificial Sequence: Synthetic oligonucleotide
gacucagagcgcauacggc

SEQ ID NO: 54136 - RNA, 19 nt, Artificial Sequence
  Description of Artificial Sequence: Synthetic oligonucleotide
auacgaccugacacaagcg

SEQ ID NO: 54137 - RNA, 19 nt, Artificial Sequence
  Description of Artificial Sequence: Synthetic oligonucleotide
  modified_base (3)..(3): a, c, u, g, unknown or other
agnggagcagagaacaauu

SEQ ID NO: 54138 - RNA, 19 nt, Artificial Sequence
  Description of Artificial Sequence: Synthetic oligonucleotide
uacgucgagguugcucccg

SEQ ID NO: 54139 - RNA, 19 nt, Artificial Sequence
  Description of Artificial Sequence: Synthetic oligonucleotide
guguuuacgucgagguugc

SEQ ID NO: 54140 - RNA, 19 nt, Artificial Sequence
  Description of Artificial Sequence: Synthetic oligonucleotide
aguuaccaauaucucucaa

SEQ ID NO: 54141 - RNA, 19 nt, Artificial Sequence
  Description of Artificial Sequence: Synthetic oligonucleotide
agguaaugaccugugucca

SEQ ID NO: 54142 - RNA, 19 nt, Artificial Sequence
  Description of Artificial Sequence: Synthetic oligonucleotide
gaccauaguacuuguuccu

SEQ ID NO: 54143 - RNA, 19 nt, Artificial Sequence
  Description of Artificial Sequence: Synthetic oligonucleotide
ccuaaacgccaauggagcc

SEQ ID NO: 54144 - RNA, 19 nt, Artificial Sequence
  Description of Artificial Sequence: Synthetic oligonucleotide
ggacuaacacacaaaguuc

SEQ ID NO: 54145 - RNA, 19 nt, Artificial Sequence
  Description of Artificial Sequence: Synthetic oligonucleotide
ccuacugguucucuucccg

SEQ ID NO: 54146 - RNA, 19 nt, Artificial Sequence
  Description of Artificial Sequence: Synthetic oligonucleotide
gugcuugagucggagauca

SEQ ID NO: 54147 - RNA, 19 nt, Artificial Sequence
  Description of Artificial Sequence: Synthetic oligonucleotide
gccuaaacgccaauggagc

SEQ ID NO: 54148 - RNA, 19 nt, Artificial Sequence
  Description of Artificial Sequence: Synthetic oligonucleotide
cccaucgugaacagugggg

SEQ ID NO: 54149 - RNA, 19 nt, Artificial Sequence
  Description of Artificial Sequence: Synthetic oligonucleotide
ucggucuccggcccgacuu

SEQ ID NO: 54150 - RNA, 19 nt, Artificial Sequence
  Description of Artificial Sequence: Synthetic oligonucleotide
agacgagacccugagugga

SEQ ID NO: 54151 - RNA, 19 nt, Artificial Sequence
  Description of Artificial Sequence: Synthetic oligonucleotide
uuacgucgagguugcuccc

SEQ ID NO: 54152 - RNA, 19 nt, Artificial Sequence
  Description of Artificial Sequence: Synthetic oligonucleotide
cgaccauaguacuuguucc

SEQ ID NO: 54153 - RNA, 19 nt, Artificial Sequence
  Description of Artificial Sequence: Synthetic oligonucleotide
cuaaacgccaauggagcca

SEQ ID NO: 54154 - RNA, 19 nt, Artificial Sequence
  Description of Artificial Sequence: Synthetic oligonucleotide
uccggcccgacuugcauuc

SEQ ID NO: 54155 - RNA, 19 nt, Artificial Sequence
  Description of Artificial Sequence: Synthetic oligonucleotide
gugugaucgucguaccgca

SEQ ID NO: 54156 - RNA, 19 nt, Artificial Sequence
  Description of Artificial Sequence: Synthetic oligonucleotide
guacccaggguccuacguc

SEQ ID NO: 54157 - RNA, 19 nt, Artificial Sequence
  Description of Artificial Sequence: Synthetic oligonucleotide
gugagugaaugagcagcgg

SEQ ID NO: 54158 - RNA, 19 nt, Artificial Sequence
  Description of Artificial Sequence: Synthetic oligonucleotide
aaacgccaaaacagacaug

SEQ ID NO: 54159 - RNA, 19 nt, Artificial Sequence
  Description of Artificial Sequence: Synthetic oligonucleotide
agaccggcacuccuugcca

SEQ ID NO: 54160 - RNA, 19 nt, Artificial Sequence
  Description of Artificial Sequence: Synthetic oligonucleotide
ugaccgaugcaggcuccgg

SEQ ID NO: 54161 - RNA, 19 nt, Artificial Sequence
  Description of Artificial Sequence: Synthetic oligonucleotide
gacguauguucugcccucc

SEQ ID NO: 54162 - RNA, 19 nt, Artificial Sequence
  Description of Artificial Sequence: Synthetic oligonucleotide
acgccaauggagccacgug

SEQ ID NO: 54163 - RNA, 19 nt, Artificial Sequence
  Description of Artificial Sequence: Synthetic oligonucleotide
accggcacuccuugccauc

SEQ ID NO: 54164 - RNA, 19 nt, Artificial Sequence
  Description of Artificial Sequence: Synthetic oligonucleotide
gaaugggaaccugcccacc

SEQ ID NO: 54165 - RNA, 19 nt, Artificial Sequence
  Description of Artificial Sequence: Synthetic oligonucleotide
uacgggucauucugucaac

SEQ ID NO: 54166 - RNA, 19 nt, Artificial Sequence
  Description of Artificial Sequence: Synthetic oligonucleotide
caucgugaacagugggguc

SEQ ID NO: 54167 - RNA, 19 nt, Artificial Sequence
  Description of Artificial Sequence: Synthetic oligonucleotide
gucgagguugcucccguuc

SEQ ID NO: 54168 - RNA, 19 nt, Artificial Sequence
  Description of Artificial Sequence: Synthetic oligonucleotide
gaccgcuauugcugucuag

SEQ ID NO: 54169 - RNA, 19 nt, Artificial Sequence
  Description of Artificial Sequence: Synthetic oligonucleotide
uguguccgcccaccugaug

SEQ ID NO: 54170 - RNA, 19 nt, Artificial Sequence
  Description of Artificial Sequence: Synthetic oligonucleotide
auauacgaccugacacaag

SEQ ID NO: 54171 - RNA, 19 nt, Artificial Sequence
  Description of Artificial Sequence: Synthetic oligonucleotide
agagcgcauacggcucagc

SEQ ID NO: 54172 - RNA, 19 nt, Artificial Sequence
  Description of Artificial Sequence: Synthetic oligonucleotide
uguccggcccaucgugaac

SEQ ID NO: 54173 - RNA, 19 nt, Artificial Sequence
  Description of Artificial Sequence: Synthetic oligonucleotide
aacaccacuacgggucauu

SEQ ID NO: 54174 - RNA, 19 nt, Artificial Sequence
  Description of Artificial Sequence: Synthetic oligonucleotide
cugccggguacccaucuuc

SEQ ID NO: 54175 - RNA, 19 nt, Artificial Sequence
  Description of Artificial Sequence: Synthetic oligonucleotide
uuccgaugagagguuugca

SEQ ID NO: 54176 - RNA, 19 nt, Artificial Sequence
  Description of Artificial Sequence: Synthetic oligonucleotide
cucccggcccuaaggaaug

SEQ ID NO: 54177 - RNA, 19 nt, Artificial Sequence
  Description of Artificial Sequence: Synthetic oligonucleotide
gcccaaacuagaggaaggg

SEQ ID NO: 54178 - RNA, 19 nt, Artificial Sequence
  Description of Artificial Sequence: Synthetic oligonucleotide
ugugaucgucguaccgcau

SEQ ID NO: 54179 - RNA, 19 nt, Artificial Sequence
  Description of Artificial Sequence: Synthetic oligonucleotide
gucacgucgcagguccagg

SEQ ID NO: 54180 - RNA, 19 nt, Artificial Sequence
  Description of Artificial Sequence: Synthetic oligonucleotide
guguuaucucacacucacc

SEQ ID NO: 54181 - RNA, 19 nt, Artificial Sequence
  Description of Artificial Sequence: Synthetic oligonucleotide
caggguccuacgucccuag

SEQ ID NO: 54182 - RNA, 19 nt, Artificial Sequence
  Description of Artificial Sequence: Synthetic oligonucleotide
ccugacacaagcgggcggg

SEQ ID NO: 54183 - RNA, 19 nt, Artificial Sequence
  Description of Artificial Sequence: Synthetic oligonucleotide
gggagcgcuagguguacag

SEQ ID NO: 54184 - RNA, 19 nt, Artificial Sequence
  Description of Artificial Sequence: Synthetic oligonucleotide
cuacgucccuagaagcaga

SEQ ID NO: 54185 - RNA, 19 nt, Artificial Sequence
  Description of Artificial Sequence: Synthetic oligonucleotide
cagaaaggggccggcucgg

SEQ ID NO: 54186 - RNA, 19 nt, Artificial Sequence
  Description of Artificial Sequence: Synthetic oligonucleotide
  modified_base (5)..(5): a, c, u, g, unknown or other
gaagnggagcagagaacaa

SEQ ID NO: 54187 - RNA, 19 nt, Artificial Sequence
  Description of Artificial Sequence: Synthetic oligonucleotide
aacuggaguagaagcggua

SEQ ID NO: 54188 - RNA, 19 nt, Artificial Sequence
  Description of Artificial Sequence: Synthetic oligonucleotide
acguauguucugcccuccu

SEQ ID NO: 54189 - RNA, 19 nt, Artificial Sequence
  Description of Artificial Sequence: Synthetic oligonucleotide
guauguucugcccuccuuu

SEQ ID NO: 54190 - RNA, 19 nt, Artificial Sequence
  Description of Artificial Sequence: Synthetic oligonucleotide
ucuugggaacgugcacgug

SEQ ID NO: 54191 - RNA, 19 nt, Artificial Sequence
  Description of Artificial Sequence: Synthetic oligonucleotide
guacugauacagggcguug

SEQ ID NO: 54192 - RNA, 19 nt, Artificial Sequence
  Description of Artificial Sequence: Synthetic oligonucleotide
agcagcggauacugaacua

SEQ ID NO: 54193 - RNA, 19 nt, Artificial Sequence
  Description of Artificial Sequence: Synthetic oligonucleotide
gucuuaggguauguaggca

SEQ ID NO: 54194 - RNA, 19 nt, Artificial Sequence
  Description of Artificial Sequence: Synthetic oligonucleotide
gcaagcgcgccuaaacgcc

SEQ ID NO: 54195 - RNA, 19 nt, Artificial Sequence
  Description of Artificial Sequence: Synthetic oligonucleotide
acgggucauucugucaaca

SEQ ID NO: 54196 - RNA, 19 nt, Artificial Sequence
  Description of Artificial Sequence: Synthetic oligonucleotide
ccuacgucccuagaagcag

SEQ ID NO: 54197 - RNA, 19 nt, Artificial Sequence
  Description of Artificial Sequence: Synthetic oligonucleotide
gggucucugucaaggagcc

SEQ ID NO: 54198 - RNA, 19 nt, Artificial Sequence
  Description of Artificial Sequence: Synthetic oligonucleotide
cugaccgaugcaggcuccg

SEQ ID NO: 54199 - RNA, 19 nt, Artificial Sequence
  Description of Artificial Sequence: Synthetic oligonucleotide
cgcgccuaaacgccaaugg

SEQ ID NO: 54200 - RNA, 19 nt, Artificial Sequence
  Description of Artificial Sequence: Synthetic oligonucleotide
acgucgagguugcucccgu

SEQ ID NO: 54201 - RNA, 19 nt, Artificial Sequence
  Description of Artificial Sequence: Synthetic oligonucleotide
ccacagauccccaaaaccu

SEQ ID NO: 54202 - RNA, 19 nt, Artificial Sequence
  Description of Artificial Sequence: Synthetic oligonucleotide
gguaaccugagcuccccaa

SEQ ID NO: 54203 - RNA, 19 nt, Artificial Sequence
  Description of Artificial Sequence: Synthetic oligonucleotide
ggacguauguucugcccuc

SEQ ID NO: 54204 - RNA, 19 nt, Artificial Sequence
  Description of Artificial Sequence: Synthetic oligonucleotide
ucagaccgcuauugcuguc

SEQ ID NO: 54205 - RNA, 19 nt, Artificial Sequence
  Description of Artificial Sequence: Synthetic oligonucleotide
guauguaggcaggugugua

SEQ ID NO: 54206 - RNA, 19 nt, Artificial Sequence
  Description of Artificial Sequence: Synthetic oligonucleotide
agacccugaguggaccaca

SEQ ID NO: 54207 - RNA, 19 nt, Artificial Sequence
  Description of Artificial Sequence: Synthetic oligonucleotide
acgccaaaacagacauguc

SEQ ID NO: 54208 - RNA, 19 nt, Artificial Sequence
  Description of Artificial Sequence: Synthetic oligonucleotide
gaaacgcaagcgcgccuaa

SEQ ID NO: 54209 - RNA, 19 nt, Artificial Sequence
  Description of Artificial Sequence: Synthetic oligonucleotide
cgaguugcacuuugguccc

SEQ ID NO: 54210 - RNA, 19 nt, Artificial Sequence
  Description of Artificial Sequence: Synthetic oligonucleotide
cccgaguugcacuuugguc

SEQ ID NO: 54211 - RNA, 19 nt, Artificial Sequence
  Description of Artificial Sequence: Synthetic oligonucleotide
caagcgcgccuaaacgcca

SEQ ID NO: 54212 - RNA, 19 nt, Artificial Sequence
  Description of Artificial Sequence: Synthetic oligonucleotide
cacucaccaccaccuauca

SEQ ID NO: 54213 - RNA, 19 nt, Artificial Sequence
  Description of Artificial Sequence: Synthetic oligonucleotide
cagcccgucuagaggcagc

SEQ ID NO: 54214 - RNA, 19 nt, Artificial Sequence
  Description of Artificial Sequence: Synthetic oligonucleotide
ccacgugugcauccaggcg

SEQ ID NO: 54215 - RNA, 19 nt, Artificial Sequence
  Description of Artificial Sequence: Synthetic oligonucleotide
acuuuccgaugagagguuu

SEQ ID NO: 54216 - RNA, 19 nt, Artificial Sequence
  Description of Artificial Sequence: Synthetic oligonucleotide
aaacgccaauggagccacg

SEQ ID NO: 54217 - RNA, 19 nt, Artificial Sequence
  Description of Artificial Sequence: Synthetic oligonucleotide
ggagaucagaccggcacuc

SEQ ID NO: 54218 - RNA, 19 nt, Artificial Sequence
  Description of Artificial Sequence: Synthetic oligonucleotide
ggucccaaauuggggcugg

SEQ ID NO: 54219 - RNA, 19 nt, Artificial Sequence
  Description of Artificial Sequence: Synthetic oligonucleotide
aacgugcacguggccagau

SEQ ID NO: 54220 - RNA, 19 nt, Artificial Sequence
  Description of Artificial Sequence: Synthetic oligonucleotide
cuccgagguuuccggcccg

SEQ ID NO: 54221 - RNA, 19 nt, Artificial Sequence
  Description of Artificial Sequence: Synthetic oligonucleotide
ggggccggcuucaagguug

SEQ ID NO: 54222 - RNA, 19 nt, Artificial Sequence
  Description of Artificial Sequence: Synthetic oligonucleotide
cauagaugacgagcagaga

SEQ ID NO: 54223 - RNA, 19 nt, Artificial Sequence
  Description of Artificial Sequence: Synthetic oligonucleotide
gaugcaggcuccggcggga

SEQ ID NO: 54224 - RNA, 19 nt, Artificial Sequence
  Description of Artificial Sequence: Synthetic oligonucleotide
agaccgcuauugcugucua

SEQ ID NO: 54225 - RNA, 19 nt, Artificial Sequence
  Description of Artificial Sequence: Synthetic oligonucleotide
gugcacguggccagaugug

SEQ ID NO: 54226 - RNA, 19 nt, Artificial Sequence
  Description of Artificial Sequence: Synthetic oligonucleotide
gcgccuaaacgccaaugga

SEQ ID NO: 54227 - RNA, 19 nt, Artificial Sequence
  Description of Artificial Sequence: Synthetic oligonucleotide
uccgagguuuccggcccgc

SEQ ID NO: 54228 - RNA, 19 nt, Artificial Sequence
  Description of Artificial Sequence: Synthetic oligonucleotide
ggguccuacgucccuagaa

SEQ ID NO: 54229 - RNA, 19 nt, Artificial Sequence
  Description of Artificial Sequence: Synthetic oligonucleotide
cacagauccccaaaaccuu

SEQ ID NO: 54230 - RNA, 19 nt, Artificial Sequence
  Description of Artificial Sequence: Synthetic oligonucleotide
ggccuacugggacacugac

SEQ ID NO: 54231 - RNA, 19 nt, Artificial Sequence
  Description of Artificial Sequence: Synthetic oligonucleotide
gcuuagccccaggaaauac

SEQ ID NO: 54232 - RNA, 19 nt, Artificial Sequence
  Description of Artificial Sequence: Synthetic oligonucleotide
cacacacaaugggcuuccg

SEQ ID NO: 54233 - RNA, 19 nt, Artificial Sequence
  Description of Artificial Sequence: Synthetic oligonucleotide
cagggguacuugaaguggu

SEQ ID NO: 54234 - RNA, 19 nt, Artificial Sequence
  Description of Artificial Sequence: Synthetic oligonucleotide
cucagaacucagaccgcua

SEQ ID NO: 54235 - RNA, 19 nt, Artificial Sequence
  Description of Artificial Sequence: Synthetic oligonucleotide
aggguccuacgucccuaga

SEQ ID NO: 54236 - RNA, 19 nt, Artificial Sequence
  Description of Artificial Sequence: Synthetic oligonucleotide
cucccguucugguguguca

SEQ ID NO: 54237 - RNA, 19 nt, Artificial Sequence
  Description of Artificial Sequence: Synthetic oligonucleotide
gcuaaggagccuggcugag

SEQ ID NO: 54238 - RNA, 19 nt, Artificial Sequence
  Description of Artificial Sequence: Synthetic oligonucleotide
  modified_base (2)..(2): a, c, u, g, unknown or other
gnggagcagagaacaauuu

SEQ ID NO: 54239 - RNA, 19 nt, Artificial Sequence
  Description of Artificial Sequence: Synthetic oligonucleotide
guucugcccuccuuuacuu

SEQ ID NO: 54240 - RNA, 19 nt, Artificial Sequence
  Description of Artificial Sequence: Synthetic oligonucleotide
gccggacccgggcagcggg

SEQ ID NO: 54241 - RNA, 19 nt, Artificial Sequence
  Description of Artificial Sequence: Synthetic oligonucleotide
ggucacgucgcagguccag

SEQ ID NO: 54242 - RNA, 19 nt, Artificial Sequence
  Description of Artificial Sequence: Synthetic oligonucleotide
gccggcucgggccaagcac

SEQ ID NO: 54243 - RNA, 19 nt, Artificial Sequence
  Description of Artificial Sequence: Synthetic oligonucleotide
gcgcccacggcuccccacg

SEQ ID NO: 54244 - RNA, 19 nt, Artificial Sequence
  Description of Artificial Sequence: Synthetic oligonucleotide
gggcucuagccugggacag

SEQ ID NO: 54245 - RNA, 19 nt, Artificial Sequence
  Description of Artificial Sequence: Synthetic oligonucleotide
gacggggucuuagggccca

SEQ ID NO: 54246 - RNA, 19 nt, Artificial Sequence
  Description of Artificial Sequence: Synthetic oligonucleotide
uguuuacgucgagguugcu

SEQ ID NO: 54247 - RNA, 19 nt, Artificial Sequence
  Description of Artificial Sequence: Synthetic oligonucleotide
aagcgcgccuaaacgccaa

SEQ ID NO: 54248 - RNA, 19 nt, Artificial Sequence
  Description of Artificial Sequence: Synthetic oligonucleotide
ggccaagcacuccucucca

SEQ ID NO: 54249 - RNA, 19 nt, Artificial Sequence
  Description of Artificial Sequence: Synthetic oligonucleotide
ggaaacgcaagcgcgccua

SEQ ID NO: 54250 - RNA, 19 nt, Artificial Sequence
  Description of Artificial Sequence: Synthetic oligonucleotide
gaacgugcacguggccaga

SEQ ID NO: 54251 - RNA, 19 nt, Artificial Sequence
  Description of Artificial Sequence: Synthetic oligonucleotide
cacguggccagaugugagu

SEQ ID NO: 54252 - RNA, 19 nt, Artificial Sequence
  Description of Artificial Sequence: Synthetic oligonucleotide
ggcccgacuugcauucuug

SEQ ID NO: 54253 - RNA, 19 nt, Artificial Sequence
  Description of Artificial Sequence: Synthetic oligonucleotide
gguauguaggcaggugugu

SEQ ID NO: 54254 - RNA, 19 nt, Artificial Sequence
  Description of Artificial Sequence: Synthetic oligonucleotide
agcgcgccuaaacgccaau

SEQ ID NO: 54255 - RNA, 19 nt, Artificial Sequence
  Description of Artificial Sequence: Synthetic oligonucleotide
cagaccgcuauugcugucu

SEQ ID NO: 54256 - RNA, 19 nt, Artificial Sequence
  Description of Artificial Sequence: Synthetic oligonucleotide
ggagcgcuagguguacaga

SEQ ID NO: 54257 - RNA, 19 nt, Artificial Sequence
  Description of Artificial Sequence: Synthetic oligonucleotide
guguuagacuaggcccaca

SEQ ID NO: 54258 - RNA, 19 nt, Artificial Sequence
  Description of Artificial Sequence: Synthetic oligonucleotide
gggauuuaguaggcaugga

SEQ ID NO: 54259 - RNA, 19 nt, Artificial Sequence
  Description of Artificial Sequence: Synthetic oligonucleotide
ccgcuauugcugucuagca

SEQ ID NO: 54260 - RNA, 19 nt, Artificial Sequence
  Description of Artificial Sequence: Synthetic oligonucleotide
gguacugauacagggcguu

SEQ ID NO: 54261 - RNA, 19 nt, Artificial Sequence
  Description of Artificial Sequence: Synthetic oligonucleotide
ggcguugcggaagccuuca

SEQ ID NO: 54262 - RNA, 19 nt, Artificial Sequence
  Description of Artificial Sequence: Synthetic oligonucleotide
cccaaacuagaggaaggga

SEQ ID NO: 54263 - RNA, 19 nt, Artificial Sequence
  Description of Artificial Sequence: Synthetic oligonucleotide
gccaauggucagagucugc

SEQ ID NO: 54264 - RNA, 19 nt, Artificial Sequence
  Description of Artificial Sequence: Synthetic oligonucleotide
ccaucgugaacaguggggu

SEQ ID NO: 54265 - RNA, 19 nt, Artificial Sequence
  Description of Artificial Sequence: Synthetic oligonucleotide
ugcucccguucuggugugu

SEQ ID NO: 54266 - RNA, 19 nt, Artificial Sequence
  Description of Artificial Sequence: Synthetic oligonucleotide
cuccggcgggaguguuuac

SEQ ID NO: 54267 - RNA, 19 nt, Artificial Sequence
  Description of Artificial Sequence: Synthetic oligonucleotide
gcgggaguguuuacgucga

SEQ ID NO: 54268 - RNA, 19 nt, Artificial Sequence
  Description of Artificial Sequence: Synthetic oligonucleotide
gcgcgccuaaacgccaaug

SEQ ID NO: 54269 - RNA, 19 nt, Artificial Sequence
  Description of Artificial Sequence: Synthetic oligonucleotide
gcacacagggguacuugaa

SEQ ID NO: 54270 - RNA, 19 nt, Artificial Sequence
  Description of Artificial Sequence: Synthetic oligonucleotide
cgagguugcucccguucug

SEQ ID NO: 54271 - RNA, 19 nt, Artificial Sequence
  Description of Artificial Sequence: Synthetic oligonucleotide
gaucgucguaccgcaucau

SEQ ID NO: 54272 - RNA, 19 nt, Artificial Sequence
  Description of Artificial Sequence: Synthetic oligonucleotide
cuaccacugccugaccgau

SEQ ID NO: 54273 - RNA, 19 nt, Artificial Sequence
  Description of Artificial Sequence: Synthetic oligonucleotide
cccggcccuaaggaauggg

SEQ ID NO: 54274 - RNA, 19 nt, Artificial Sequence
  Description of Artificial Sequence: Synthetic oligonucleotide
cgugcacguggccagaugu

SEQ ID NO: 54275 - RNA, 19 nt, Artificial Sequence
  Description of Artificial Sequence: Synthetic oligonucleotide
gggccuacugggacacuga

SEQ ID NO: 54276 - RNA, 19 nt, Artificial Sequence
  Description of Artificial Sequence: Synthetic oligonucleotide
cacgaccauaguacuuguu

SEQ ID NO: 54277 - RNA, 19 nt, Artificial Sequence
  Description of Artificial Sequence: Synthetic oligonucleotide
gggccgguugcacaaugau

SEQ ID NO: 54278 - RNA, 19 nt, Artificial Sequence
  Description of Artificial Sequence: Synthetic oligonucleotide
gggaaacgcaagcgcgccu

SEQ ID NO: 54279 - RNA, 19 nt, Artificial Sequence
  Description of Artificial Sequence: Synthetic oligonucleotide
gaacaccacuacgggucau

SEQ ID NO: 54280 - RNA, 19 nt, Artificial Sequence
  Description of Artificial Sequence: Synthetic oligonucleotide
guccacgaccauaguacuu

SEQ ID NO: 54281 - RNA, 19 nt, Artificial Sequence
  Description of Artificial Sequence: Synthetic oligonucleotide
gcuccggcgggaguguuua

SEQ ID NO: 54282 - RNA, 19 nt, Artificial Sequence
  Description of Artificial Sequence: Synthetic oligonucleotide
cgucguaccgcaucaugcu

SEQ ID NO: 54283 - RNA, 19 nt, Artificial Sequence
  Description of Artificial Sequence: Synthetic oligonucleotide
cuaugccucccggcccuaa

SEQ ID NO: 54284 - RNA, 19 nt, Artificial Sequence
  Description of Artificial Sequence: Synthetic oligonucleotide
ggcuuccgccuugggcuug

SEQ ID NO: 54285 - RNA, 19 nt, Artificial Sequence
  Description of Artificial Sequence: Synthetic oligonucleotide
ccggcgggaguguuuacgu

SEQ ID NO: 54286 - RNA, 19 nt, Artificial Sequence
  Description of Artificial Sequence: Synthetic oligonucleotide
cuguguccgcccaccugau

SEQ ID NO: 54287 - RNA, 19 nt, Artificial Sequence
  Description of Artificial Sequence: Synthetic oligonucleotide
ccacggcuccccacgggga

SEQ ID NO: 54288 - RNA, 19 nt, Artificial Sequence
  Description of Artificial Sequence: Synthetic oligonucleotide
gcccgucuagaggcagcgc

SEQ ID NO: 54289 - RNA, 19 nt, Artificial Sequence
  Description of Artificial Sequence: Synthetic oligonucleotide
gcaccacccaucccauuuu

SEQ ID NO: 54290 - RNA, 19 nt, Artificial Sequence
  Description of Artificial Sequence: Synthetic oligonucleotide
cggagaucagaccggcacu

SEQ ID NO: 54291 - RNA, 19 nt, Artificial Sequence
  Description of Artificial Sequence: Synthetic oligonucleotide
ccgguugcacaaugauggu

SEQ ID NO: 54292 - RNA, 19 nt, Artificial Sequence
  Description of Artificial Sequence: Synthetic oligonucleotide
guccgcccaccugauggau

SEQ ID NO: 54293 - RNA, 19 nt, Artificial Sequence
  Description of Artificial Sequence: Synthetic oligonucleotide
ccaggguccuacgucccua

SEQ ID NO: 54294 - RNA, 19 nt, Artificial Sequence
  Description of Artificial Sequence: Synthetic oligonucleotide
cggggagcgcuagguguac

SEQ ID NO: 54295 - RNA, 19 nt, Artificial Sequence
  Description of Artificial Sequence: Synthetic oligonucleotide
cgucgagguugcucccguu

SEQ ID NO: 54296 - RNA, 19 nt, Artificial Sequence
  Description of Artificial Sequence: Synthetic oligonucleotide
ccggcccgacuugcauucu

SEQ ID NO: 54297 - RNA, 19 nt, Artificial Sequence
  Description of Artificial Sequence: Synthetic oligonucleotide
uaaacugucacuucgcggg

SEQ ID NO: 54298 - RNA, 19 nt, Artificial Sequence
  Description of Artificial Sequence: Synthetic oligonucleotide
uggaauauaacuuugugcu

SEQ ID NO: 54299 - RNA, 19 nt, Artificial Sequence
  Description of Artificial Sequence: Synthetic oligonucleotide
aaacuagacacguaaguca

SEQ ID NO: 54300 - RNA, 19 nt, Artificial Sequence
  Description of Artificial Sequence: Synthetic oligonucleotide
ugcccuaucuuuaauaggc

SEQ ID NO: 54301 - RNA, 19 nt, Artificial Sequence
  Description of Artificial Sequence: Synthetic oligonucleotide
ugucucauaauccuucugc

SEQ ID NO: 54302 - RNA, 19 nt, Artificial Sequence
  Description of Artificial Sequence: Synthetic oligonucleotide
aauauucucauggacaagu

SEQ ID NO: 54303 - RNA, 19 nt, Artificial Sequence
  Description of Artificial Sequence: Synthetic oligonucleotide
gacacguaagucauaaugg

SEQ ID NO: 54304 - RNA, 19 nt, Artificial Sequence
  Description of Artificial Sequence: Synthetic oligonucleotide
uuugcccuaucuuuaauag

SEQ ID NO: 54305 - RNA, 19 nt, Artificial Sequence
  Description of Artificial Sequence: Synthetic oligonucleotide
agacacguaagucauaaug

SEQ ID NO: 54306 - RNA, 19 nt, Artificial Sequence
  Description of Artificial Sequence: Synthetic oligonucleotide
guaauucuuaucuccagcc

SEQ ID NO: 54307 - RNA, 19 nt, Artificial Sequence
  Description of Artificial Sequence: Synthetic oligonucleotide
uuugacaagagcacccacc

SEQ ID NO: 54308 - RNA, 19 nt, Artificial Sequence
  Description of Artificial Sequence: Synthetic oligonucleotide
agaucuuuuggcaacgagc

SEQ ID NO: 54309 - RNA, 19 nt, Artificial Sequence
  Description of Artificial Sequence: Synthetic oligonucleotide
ucauggacaagugagcuag

SEQ ID NO: 54310 - RNA, 19 nt, Artificial Sequence
  Description of Artificial Sequence: Synthetic oligonucleotide
agucguaauaguccaacuc

SEQ ID NO: 54311 - RNA, 19 nt, Artificial Sequence
  Description of Artificial Sequence: Synthetic oligonucleotide
uguagucuagagcaccggg

SEQ ID NO: 54312 - RNA, 19 nt, Artificial Sequence
  Description of Artificial Sequence: Synthetic oligonucleotide
uugguugacggccaaaacu

SEQ ID NO: 54313 - RNA, 19 nt, Artificial Sequence
  Description of Artificial Sequence: Synthetic oligonucleotide
guuguauagggguuggugc

SEQ ID NO: 54314 - RNA, 19 nt, Artificial Sequence
  Description of Artificial Sequence: Synthetic oligonucleotide
auucauaaaacaggccagc

SEQ ID NO: 54315 - RNA, 19 nt, Artificial Sequence
  Description of Artificial Sequence: Synthetic oligonucleotide
gucgauagucuccagaagc

SEQ ID NO: 54316 - RNA, 19 nt, Artificial Sequence
  Description of Artificial Sequence: Synthetic oligonucleotide
cauucauaaaacaggccag

SEQ ID NO: 54317 - RNA, 19 nt, Artificial Sequence
  Description of Artificial Sequence: Synthetic oligonucleotide
acucucuccguacagcgcg

SEQ ID NO: 54318 - RNA, 19 nt, Artificial Sequence
  Description of Artificial Sequence: Synthetic oligonucleotide
aaaccaaacccgggcagcc

SEQ ID NO: 54319 - RNA, 19 nt, Artificial Sequence
  Description of Artificial Sequence: Synthetic oligonucleotide
ucucgagacaugaagucga

SEQ ID NO: 54320 - RNA, 19 nt, Artificial Sequence
  Description of Artificial Sequence: Synthetic oligonucleotide
guaaacugucacuucgcgg

SEQ ID NO: 54321 - RNA, 19 nt, Artificial Sequence
  Description of Artificial Sequence: Synthetic oligonucleotide
acggccaaaacuuugcaga

SEQ ID NO: 54322 - RNA, 19 nt, Artificial Sequence
  Description of Artificial Sequence: Synthetic oligonucleotide
guugacaugauaggucugg

SEQ ID NO: 54323 - RNA, 19 nt, Artificial Sequence
  Description of Artificial Sequence: Synthetic oligonucleotide
gucguaauaguccaacuca

SEQ ID NO: 54324 - RNA, 19 nt, Artificial Sequence
  Description of Artificial Sequence: Synthetic oligonucleotide
cuugcguagccucucauug

SEQ ID NO: 54325 - RNA, 19 nt, Artificial Sequence
  Description of Artificial Sequence: Synthetic oligonucleotide
auaucauaacccaagcuga

SEQ ID NO: 54326 - RNA, 19 nt, Artificial Sequence
  Description of Artificial Sequence: Synthetic oligonucleotide
ugcauguagucguuggucu

SEQ ID NO: 54327 - RNA, 19 nt, Artificial Sequence
  Description of Artificial Sequence: Synthetic oligonucleotide
ucgcgauacaguauucagc

SEQ ID NO: 54328 - RNA, 19 nt, Artificial Sequence
  Description of Artificial Sequence: Synthetic oligonucleotide
auaacccaagcugaugagg

SEQ ID NO: 54329 - RNA, 19 nt, Artificial Sequence
  Description of Artificial Sequence: Synthetic oligonucleotide
uugcccuaucuuuaauagg

SEQ ID NO: 54330 - RNA, 19 nt, Artificial Sequence
  Description of Artificial Sequence: Synthetic oligonucleotide
aagcguucaccugagauaa

SEQ ID NO: 54331 - RNA, 19 nt, Artificial Sequence
  Description of Artificial Sequence: Synthetic oligonucleotide
uucauaaaacaggccagcc

SEQ ID NO: 54332 - RNA, 19 nt, Artificial Sequence
  Description of Artificial Sequence: Synthetic oligonucleotide
uuggcaacgagcguugaca

SEQ ID NO: 54333 - RNA, 19 nt, Artificial Sequence
  Description of Artificial Sequence: Synthetic oligonucleotide
gaugcgauuggcuugcugu

SEQ ID NO: 54334 - RNA, 19 nt, Artificial Sequence
  Description of Artificial Sequence: Synthetic oligonucleotide
cagcagacgguacagguag

SEQ ID NO: 54335 - RNA, 19 nt, Artificial Sequence
  Description of Artificial Sequence: Synthetic oligonucleotide
uggucgauagucuccagaa

SEQ ID NO: 54336 - RNA, 19 nt, Artificial Sequence
  Description of Artificial Sequence: Synthetic oligonucleotide
auggacaagugagcuagcc

SEQ ID NO: 54337 - RNA, 19 nt, Artificial Sequence
  Description of Artificial Sequence: Synthetic oligonucleotide
aguuccgacgaugucuucg

SEQ ID NO: 54338 - RNA, 19 nt, Artificial Sequence
  Description of Artificial Sequence: Synthetic oligonucleotide
ugcagaugcgauuggcuug

SEQ ID NO: 54339 - RNA, 19 nt, Artificial Sequence
  Description of Artificial Sequence: Synthetic oligonucleotide
gagauaaccuccaggagca

SEQ ID NO: 54340 - RNA, 19 nt, Artificial Sequence
  Description of Artificial Sequence: Synthetic oligonucleotide
uagucguuggucugcuggg

SEQ ID NO: 54341 - RNA, 19 nt, Artificial Sequence
  Description of Artificial Sequence: Synthetic oligonucleotide
uggacaagugagcuagcca

SEQ ID NO: 54342 - RNA, 19 nt, Artificial Sequence
  Description of Artificial Sequence: Synthetic oligonucleotide
guuugugaguggaucaucc

SEQ ID NO: 54343 - RNA, 19 nt, Artificial Sequence
  Description of Artificial Sequence: Synthetic oligonucleotide
auaagcgccuccuggauaa

SEQ ID NO: 54344 - RNA, 19 nt, Artificial Sequence
  Description of Artificial Sequence: Synthetic oligonucleotide
auaggcaaagcggaggaug

SEQ ID NO: 54345 - RNA, 19 nt, Artificial Sequence
  Description of Artificial Sequence: Synthetic oligonucleotide
gaugguuguauagggguug

SEQ ID NO: 54346 - RNA, 19 nt, Artificial Sequence
  Description of Artificial Sequence: Synthetic oligonucleotide
cucgcgauacaguauucag

SEQ ID NO: 54347 - RNA, 19 nt, Artificial Sequence
  Description of Artificial Sequence: Synthetic oligonucleotide
uggccaagcguucaccuga

SEQ ID NO: 54348 - RNA, 19 nt, Artificial Sequence
  Description of Artificial Sequence: Synthetic oligonucleotide
aacuagacacguaagucau

SEQ ID NO: 54349 - RNA, 19 nt, Artificial Sequence
  Description of Artificial Sequence: Synthetic oligonucleotide
ucuuuuggcaacgagcguu

SEQ ID NO: 54350 - RNA, 19 nt, Artificial Sequence
  Description of Artificial Sequence: Synthetic oligonucleotide
ugagucguaauaguccaac

SEQ ID NO: 54351 - RNA, 19 nt, Artificial Sequence
  Description of Artificial Sequence: Synthetic oligonucleotide
guuccgacgaugucuucgg

SEQ ID NO: 54352 - RNA, 19 nt, Artificial Sequence
  Description of Artificial Sequence: Synthetic oligonucleotide
ugaguggaucauccuuccg

SEQ ID NO: 54353 - RNA, 19 nt, Artificial Sequence
  Description of Artificial Sequence: Synthetic oligonucleotide
ucauaauccuucugccgca

SEQ ID NO: 54354 - RNA, 19 nt, Artificial Sequence
  Description of Artificial Sequence: Synthetic oligonucleotide
auucucgcgauacaguauu

SEQ ID NO: 54355 - RNA, 19 nt, Artificial Sequence
  Description of Artificial Sequence: Synthetic oligonucleotide
uaucauaacccaagcugau

SEQ ID NO: 54356 - RNA, 19 nt, Artificial Sequence
  Description of Artificial Sequence: Synthetic oligonucleotide
uggcuauggaauccagggc

SEQ ID NO: 54357 - RNA, 19 nt, Artificial Sequence
  Description of Artificial Sequence: Synthetic oligonucleotide
cauaacccaagcugaugag

SEQ ID NO: 54358 - RNA, 19 nt, Artificial Sequence
  Description of Artificial Sequence: Synthetic oligonucleotide
uuugugaguggaucauccu

SEQ ID NO: 54359 - RNA, 19 nt, Artificial Sequence
  Description of Artificial Sequence: Synthetic oligonucleotide
aacccgggcagccggacug

SEQ ID NO: 54360 - RNA, 19 nt, Artificial Sequence
  Description of Artificial Sequence: Synthetic oligonucleotide
cuuuuggcaacgagcguug

SEQ ID NO: 54361 - RNA, 19 nt, Artificial Sequence
  Description of Artificial Sequence: Synthetic oligonucleotide
aacgagcguugacacuggg

SEQ ID NO: 54362 - RNA, 19 nt, Artificial Sequence
  Description of Artificial Sequence: Synthetic oligonucleotide
uucaggacccagcgugccg

SEQ ID NO: 54363 - RNA, 19 nt, Artificial Sequence
  Description of Artificial Sequence: Synthetic oligonucleotide
ugacaugauaggucuggac

SEQ ID NO: 54364 - RNA, 19 nt, Artificial Sequence
  Description of Artificial Sequence: Synthetic oligonucleotide
gauggugcgcgcgugcuag

SEQ ID NO: 54365 - RNA, 19 nt, Artificial Sequence
  Description of Artificial Sequence: Synthetic oligonucleotide
uccgacgaugucuucggca

SEQ ID NO: 54366 - RNA, 19 nt, Artificial Sequence
  Description of Artificial Sequence: Synthetic oligonucleotide
agaucuugugcacucgcau

SEQ ID NO: 54367 - RNA, 19 nt, Artificial Sequence
  Description of Artificial Sequence: Synthetic oligonucleotide
cgcgauacaguauucagcc

SEQ ID NO: 54368 - RNA, 19 nt, Artificial Sequence
  Description of Artificial Sequence: Synthetic oligonucleotide
acaugagauuagagaaacc

SEQ ID NO: 54369 - RNA, 19 nt, Artificial Sequence
  Description of Artificial Sequence: Synthetic oligonucleotide
uuuggcaacgagcguugac

SEQ ID NO: 54370 - RNA, 19 nt, Artificial Sequence
  Description of Artificial Sequence: Synthetic oligonucleotide
ucgggcugcauguagucgu

SEQ ID NO: 54371 - RNA, 19 nt, Artificial Sequence
  Description of Artificial Sequence: Synthetic oligonucleotide
cugagauaaccuccaggag

SEQ ID NO: 54372 - RNA, 19 nt, Artificial Sequence
  Description of Artificial Sequence: Synthetic oligonucleotide
caugcuccucaguuagugc

SEQ ID NO: 54373 - RNA, 19 nt, Artificial Sequence
  Description of Artificial Sequence: Synthetic oligonucleotide
guagucuagagcaccgggc

SEQ ID NO: 54374 - RNA, 19 nt, Artificial Sequence
  Description of Artificial Sequence: Synthetic oligonucleotide
ugugucggcugucucucga

SEQ ID NO: 54375 - RNA, 19 nt, Artificial Sequence
  Description of Artificial Sequence: Synthetic oligonucleotide
ucggcugucucucgagaca

SEQ ID NO: 54376 - RNA, 19 nt, Artificial Sequence
  Description of Artificial Sequence: Synthetic oligonucleotide
ccguauucagguuugugag

SEQ ID NO: 54377 - RNA, 19 nt, Artificial Sequence
  Description of Artificial Sequence: Synthetic oligonucleotide
cauccggccgggcaguucc

SEQ ID NO: 54378 - RNA, 19 nt, Artificial Sequence
  Description of Artificial Sequence: Synthetic oligonucleotide
uggcaacgagcguugacac

SEQ ID NO: 54379 - RNA, 19 nt, Artificial Sequence
  Description of Artificial Sequence: Synthetic oligonucleotide
cagcgugccggagugaucc

SEQ ID NO: 54380 - RNA, 19 nt, Artificial Sequence
  Description of Artificial Sequence: Synthetic oligonucleotide
gcaacgagcguugacacug

SEQ ID NO: 54381 - RNA, 19 nt, Artificial Sequence
  Description of Artificial Sequence: Synthetic oligonucleotide
aucauaacccaagcugaug

SEQ ID NO: 54382 - RNA, 19 nt, Artificial Sequence
  Description of Artificial Sequence: Synthetic oligonucleotide
cccucggaaggcaugaagg

SEQ ID NO: 54383 - RNA, 19 nt, Artificial Sequence
  Description of Artificial Sequence: Synthetic oligonucleotide
augguuguauagggguugg

SEQ ID NO: 54384 - RNA, 19 nt, Artificial Sequence
  Description of Artificial Sequence: Synthetic oligonucleotide
cuuugacaagagcacccac

SEQ ID NO: 54385 - RNA, 19 nt, Artificial Sequence
  Description of Artificial Sequence: Synthetic oligonucleotide
caagugagcuagccaacac

SEQ ID NO: 54386 - RNA, 19 nt, Artificial Sequence
  Description of Artificial Sequence: Synthetic oligonucleotide
gaggucacucucuccguac

SEQ ID NO: 54387 - RNA, 19 nt, Artificial Sequence
  Description of Artificial Sequence: Synthetic oligonucleotide
guuugcccuaucuuuaaua

SEQ ID NO: 54388 - RNA, 19 nt, Artificial Sequence
  Description of Artificial Sequence: Synthetic oligonucleotide
ugucggcugucucucgaga

SEQ ID NO: 54389 - RNA, 19 nt, Artificial Sequence
  Description of Artificial Sequence: Synthetic oligonucleotide
uuccgcaggugagaguugc

SEQ ID NO: 54390 - RNA, 19 nt, Artificial Sequence
  Description of Artificial Sequence: Synthetic oligonucleotide
agauaagcgccuccuggau

SEQ ID NO: 54391 - RNA, 19 nt, Artificial Sequence
  Description of Artificial Sequence: Synthetic oligonucleotide
cucgcggcgcagcucaucc

SEQ ID NO: 54392 - RNA, 19 nt, Artificial Sequence
  Description of Artificial Sequence: Synthetic oligonucleotide
uauauggggcugucuuccu

SEQ ID NO: 54393 - RNA, 19 nt, Artificial Sequence
  Description of Artificial Sequence: Synthetic oligonucleotide
aaggcgggucgguugcuga

SEQ ID NO: 54394 - RNA, 19 nt, Artificial Sequence
  Description of Artificial Sequence: Synthetic oligonucleotide
ucugugucggcugucucuc

SEQ ID NO: 54395 - RNA, 19 nt, Artificial Sequence
  Description of Artificial Sequence: Synthetic oligonucleotide
ccucucauugugcugcugg

SEQ ID NO: 54396 - RNA, 19 nt, Artificial Sequence
  Description of Artificial Sequence: Synthetic oligonucleotide
gccguauucagguuuguga

SEQ ID NO: 54397 - RNA, 19 nt, Artificial Sequence
  Description of Artificial Sequence: Synthetic oligonucleotide
uugcguagccucucauugu

SEQ ID NO: 54398 - RNA, 19 nt, Artificial Sequence
  Description of Artificial Sequence: Synthetic oligonucleotide
agccacacguuugaggaga

SEQ ID NO: 54399 - RNA, 19 nt, Artificial Sequence
  Description of Artificial Sequence: Synthetic oligonucleotide
gauaagcgccuccuggaua

SEQ ID NO: 54400 - RNA, 19 nt, Artificial Sequence
  Description of Artificial Sequence: Synthetic oligonucleotide
cauuuaagacugguggaga

SEQ ID NO: 54401 - RNA, 19 nt, Artificial Sequence
  Description of Artificial Sequence: Synthetic oligonucleotide
augggaguguuguuuuaau

SEQ ID NO: 54402 - RNA, 19 nt, Artificial Sequence
  Description of Artificial Sequence: Synthetic oligonucleotide
uguggauacccaggauggc

SEQ ID NO: 54403 - RNA, 19 nt, Artificial Sequence
  Description of Artificial Sequence: Synthetic oligonucleotide
gagcuagccaacacacaug

SEQ ID NO: 54404 - RNA, 19 nt, Artificial Sequence
  Description of Artificial Sequence: Synthetic oligonucleotide
ggagaucuugugcacucgc

SEQ ID NO: 54405 - RNA, 19 nt, Artificial Sequence
  Description of Artificial Sequence: Synthetic oligonucleotide
agaugcgauuggcuugcug

SEQ ID NO: 54406 - RNA, 19 nt, Artificial Sequence
  Description of Artificial Sequence: Synthetic oligonucleotide
caacgagcguugacacugg

SEQ ID NO: 54407 - RNA, 19 nt, Artificial Sequence
  Description of Artificial Sequence: Synthetic oligonucleotide
aucuuuuggcaacgagcgu

SEQ ID NO: 54408 - RNA, 19 nt, Artificial Sequence
  Description of Artificial Sequence: Synthetic oligonucleotide
aguuagugccuggucccuc

SEQ ID NO: 54409 - RNA, 19 nt, Artificial Sequence
  Description of Artificial Sequence: Synthetic oligonucleotide
agcgguuggggucuacaau

SEQ ID NO: 54410 - RNA, 19 nt, Artificial Sequence
  Description of Artificial Sequence: Synthetic oligonucleotide
ucgagacaugaagucgaug

SEQ ID NO: 54411 - RNA, 19 nt, Artificial Sequence
  Description of Artificial Sequence: Synthetic oligonucleotide
ggggucguugccaauauca

SEQ ID NO: 54412 - RNA, 19 nt, Artificial Sequence
  Description of Artificial Sequence: Synthetic oligonucleotide
uucucgcgauacaguauuc

SEQ ID NO: 54413 - RNA, 19 nt, Artificial Sequence
  Description of Artificial Sequence: Synthetic oligonucleotide
agguuugcccuaucuuuaa

SEQ ID NO: 54414 - RNA, 19 nt, Artificial Sequence
  Description of Artificial Sequence: Synthetic oligonucleotide
ggagauccuuccaaucucc

SEQ ID NO: 54415 - RNA, 19 nt, Artificial Sequence
  Description of Artificial Sequence: Synthetic oligonucleotide
ggucgauagucuccagaag

SEQ ID NO: 54416 - RNA, 19 nt, Artificial Sequence
  Description of Artificial Sequence: Synthetic oligonucleotide
cauggacaagugagcuagc

SEQ ID NO: 54417 - RNA, 19 nt, Artificial Sequence
  Description of Artificial Sequence: Synthetic oligonucleotide
ucguuggucugcugggaau

SEQ ID NO: 54418 - RNA, 19 nt, Artificial Sequence
  Description of Artificial Sequence: Synthetic oligonucleotide
uuccgacgaugucuucggc

SEQ ID NO: 54419 - RNA, 19 nt, Artificial Sequence
  Description of Artificial Sequence: Synthetic oligonucleotide
cucucuccguacagcgcgg

SEQ ID NO: 54420 - RNA, 19 nt, Artificial Sequence
  Description of Artificial Sequence: Synthetic oligonucleotide
gguuagaggucacucucuc

SEQ ID NO: 54421 - RNA, 19 nt, Artificial Sequence
  Description of Artificial Sequence: Synthetic oligonucleotide
cacguaagucauaauggcu

SEQ ID NO: 54422 - RNA, 19 nt, Artificial Sequence
  Description of Artificial Sequence: Synthetic oligonucleotide
gcguucaccugagauaacc

SEQ ID NO: 54423 - RNA, 19 nt, Artificial Sequence
  Description of Artificial Sequence: Synthetic oligonucleotide
agucggggccugcguaggg

SEQ ID NO: 54424 - RNA, 19 nt, Artificial Sequence
  Description of Artificial Sequence: Synthetic oligonucleotide
agcgugccggagugauccc

SEQ ID NO: 54425 - RNA, 19 nt, Artificial Sequence
  Description of Artificial Sequence: Synthetic oligonucleotide
agcuaguccugguggcuga

SEQ ID NO: 54426 - RNA, 19 nt, Artificial Sequence
  Description of Artificial Sequence: Synthetic oligonucleotide
gugucggcugucucucgag

SEQ ID NO: 54427 - RNA, 19 nt, Artificial Sequence
  Description of Artificial Sequence: Synthetic oligonucleotide
gagucguaauaguccaacu

SEQ ID NO: 54428 - RNA, 19 nt, Artificial Sequence
  Description of Artificial Sequence: Synthetic oligonucleotide
cuggucgauagucuccaga

SEQ ID NO: 54429 - RNA, 19 nt, Artificial Sequence
  Description of Artificial Sequence: Synthetic oligonucleotide
ggacacuucauuguggaua

SEQ ID NO: 54430 - RNA, 19 nt, Artificial Sequence
  Description of Artificial Sequence: Synthetic oligonucleotide
uagacacguaagucauaau

SEQ ID NO: 54431 - RNA, 19 nt, Artificial Sequence
  Description of Artificial Sequence: Synthetic oligonucleotide
cucucuagccuccggaucu

SEQ ID NO: 54432 - RNA, 19 nt, Artificial Sequence
  Description of Artificial Sequence: Synthetic oligonucleotide
acacuucauuguggauacc

SEQ ID NO: 54433 - RNA, 19 nt, Artificial Sequence
  Description of Artificial Sequence: Synthetic oligonucleotide
agguggacaugagauuaga

SEQ ID NO: 54434 - RNA, 19 nt, Artificial Sequence
  Description of Artificial Sequence: Synthetic oligonucleotide
uuuuggcaacgagcguuga

SEQ ID NO: 54435 - RNA, 19 nt, Artificial Sequence
  Description of Artificial Sequence: Synthetic oligonucleotide
gcuggcuauggaauccagg

SEQ ID NO: 54436 - RNA, 19 nt, Artificial Sequence
  Description of Artificial Sequence: Synthetic oligonucleotide
gacacugggugagucguaa

SEQ ID NO: 54437 - RNA, 19 nt, Artificial Sequence
  Description of Artificial Sequence: Synthetic oligonucleotide
cagguuugcccuaucuuua

SEQ ID NO: 54438 - RNA, 19 nt, Artificial Sequence
  Description of Artificial Sequence: Synthetic oligonucleotide
ccaacagaucacuggccag

SEQ ID NO: 54439 - RNA, 19 nt, Artificial Sequence
  Description of Artificial Sequence: Synthetic oligonucleotide
gccggagugaucccgguca

SEQ ID NO: 54440 - RNA, 19 nt, Artificial Sequence
  Description of Artificial Sequence: Synthetic oligonucleotide
caaucaacucaggccggug

SEQ ID NO: 54441 - RNA, 19 nt, Artificial Sequence
  Description of Artificial Sequence: Synthetic oligonucleotide
uucgcgggcagggaggcuu

SEQ ID NO: 54442 - RNA, 19 nt, Artificial Sequence
  Description of Artificial Sequence: Synthetic oligonucleotide
gccuggaacgucacuaccc

SEQ ID NO: 54443 - RNA, 19 nt, Artificial Sequence
  Description of Artificial Sequence: Synthetic oligonucleotide
cugugucggcugucucucg

SEQ ID NO: 54444 - RNA, 19 nt, Artificial Sequence
  Description of Artificial Sequence: Synthetic oligonucleotide
ccaggccggauccaggagc

SEQ ID NO: 54445 - RNA, 19 nt, Artificial Sequence
  Description of Artificial Sequence: Synthetic oligonucleotide
auggugcgcgcgugcuagg

SEQ ID NO: 54446 - RNA, 19 nt, Artificial Sequence
  Description of Artificial Sequence: Synthetic oligonucleotide
ugccggagugaucccgguc

SEQ ID NO: 54447 - RNA, 19 nt, Artificial Sequence
  Description of Artificial Sequence: Synthetic oligonucleotide
cagcuaguccugguggcug

SEQ ID NO: 54448 - RNA, 19 nt, Artificial Sequence
  Description of Artificial Sequence: Synthetic oligonucleotide
ugacacugggugagucgua

SEQ ID NO: 54449 - RNA, 19 nt, Artificial Sequence
  Description of Artificial Sequence: Synthetic oligonucleotide
ggugcgcgcgugcuagggg

SEQ ID NO: 54450 - RNA, 19 nt, Artificial Sequence
  Description of Artificial Sequence: Synthetic oligonucleotide
ccgcagcuaguccuggugg

SEQ ID NO: 54451 - RNA, 19 nt, Artificial Sequence
  Description of Artificial Sequence: Synthetic oligonucleotide
guccuggcgauggugguga

SEQ ID NO: 54452 - RNA, 19 nt, Artificial Sequence
  Description of Artificial Sequence: Synthetic oligonucleotide
ugccauccguccaggccuc

SEQ ID NO: 54453 - RNA, 19 nt, Artificial Sequence
  Description of Artificial Sequence: Synthetic oligonucleotide
acacugggugagucguaau

SEQ ID NO: 54454 - RNA, 19 nt, Artificial Sequence
  Description of Artificial Sequence: Synthetic oligonucleotide
gcacccaccuacucccacc

SEQ ID NO: 54455 - RNA, 19 nt, Artificial Sequence
  Description of Artificial Sequence: Synthetic oligonucleotide
ggcaguuccgacgaugucu

SEQ ID NO: 54456 - RNA, 19 nt, Artificial Sequence
  Description of Artificial Sequence: Synthetic oligonucleotide
cucuccguacagcgcggug

SEQ ID NO: 54457 - RNA, 19 nt, Artificial Sequence
  Description of Artificial Sequence: Synthetic oligonucleotide
ccauucucgcgauacagua

SEQ ID NO: 54458 - RNA, 19 nt, Artificial Sequence
  Description of Artificial Sequence: Synthetic oligonucleotide
ucucuagccuccggaucuc

SEQ ID NO: 54459 - RNA, 19 nt, Artificial Sequence
  Description of Artificial Sequence: Synthetic oligonucleotide
agcguucaccugagauaac

SEQ ID NO: 54460 - RNA, 19 nt, Artificial Sequence
  Description of Artificial Sequence: Synthetic oligonucleotide
ugcugcccgggugugggaa

SEQ ID NO: 54461 - RNA, 19 nt, Artificial Sequence
  Description of Artificial Sequence: Synthetic oligonucleotide
ugucaaucuuuggcuuaua

SEQ ID NO: 54462 - RNA, 19 nt, Artificial Sequence
  Description of Artificial Sequence: Synthetic oligonucleotide
ggaauauaacuuugugcuu

SEQ ID NO: 54463 - RNA, 19 nt, Artificial Sequence
  Description of Artificial Sequence: Synthetic oligonucleotide
gugagcuagccaacacaca

SEQ ID NO: 54464 - RNA, 19 nt, Artificial Sequence
  Description of Artificial Sequence: Synthetic oligonucleotide
uccuggcgaugguggugag

SEQ ID NO: 54465 - RNA, 19 nt, Artificial Sequence
  Description of Artificial Sequence: Synthetic oligonucleotide
ugccacgucaaaggccgua

SEQ ID NO: 54466 - RNA, 19 nt, Artificial Sequence
  Description of Artificial Sequence: Synthetic oligonucleotide
cccuaucuuuaauaggcaa

SEQ ID NO: 54467 - RNA, 19 nt, Artificial Sequence
  Description of Artificial Sequence: Synthetic oligonucleotide
cauucucgcgauacaguau

SEQ ID NO: 54468 - RNA, 19 nt, Artificial Sequence
  Description of Artificial Sequence: Synthetic oligonucleotide
caaacccgggcagccggac

SEQ ID NO: 54469 - RNA, 19 nt, Artificial Sequence
  Description of Artificial Sequence: Synthetic oligonucleotide
acuagacacguaagucaua

SEQ ID NO: 54470 - RNA, 19 nt, Artificial Sequence
  Description of Artificial Sequence: Synthetic oligonucleotide
cgugccggagugaucccgg

SEQ ID NO: 54471 - RNA, 19 nt, Artificial Sequence
  Description of Artificial Sequence: Synthetic oligonucleotide
caaagcggaggaugauggu

SEQ ID NO: 54472 - RNA, 19 nt, Artificial Sequence
  Description of Artificial Sequence: Synthetic oligonucleotide
cagagucggggccugcgua

SEQ ID NO: 54473 - RNA, 19 nt, Artificial Sequence
  Description of Artificial Sequence: Synthetic oligonucleotide
gugagucguaauaguccaa

SEQ ID NO: 54474 - RNA, 19 nt, Artificial Sequence
  Description of Artificial Sequence: Synthetic oligonucleotide
gcgugccggagugaucccg

SEQ ID NO: 54475 - RNA, 19 nt, Artificial Sequence
  Description of Artificial Sequence: Synthetic oligonucleotide
ggccaagcguucaccugag

SEQ ID NO: 54476 - RNA, 19 nt, Artificial Sequence
  Description of Artificial Sequence: Synthetic oligonucleotide
ccaagcguucaccugagau

SEQ ID NO: 54477 - RNA, 19 nt, Artificial Sequence
  Description of Artificial Sequence: Synthetic oligonucleotide
uccggccgggcaguuccga

SEQ ID NO: 54478 - RNA, 19 nt, Artificial Sequence
  Description of Artificial Sequence: Synthetic oligonucleotide
caguuccgacgaugucuuc

SEQ ID NO: 54479 - RNA, 19 nt, Artificial Sequence
  Description of Artificial Sequence: Synthetic oligonucleotide
caugauaggucuggacaau

SEQ ID NO: 54480 - RNA, 19 nt, Artificial Sequence
  Description of Artificial Sequence: Synthetic oligonucleotide
gcccuaucuuuaauaggca

SEQ ID NO: 54481 - RNA, 19 nt, Artificial Sequence
  Description of Artificial Sequence: Synthetic oligonucleotide
cccgguucuccagccacgg

SEQ ID NO: 54482 - RNA, 19 nt, Artificial Sequence
  Description of Artificial Sequence: Synthetic oligonucleotide
auccgggaggguggccuug

SEQ ID NO: 54483 - RNA, 19 nt, Artificial Sequence
  Description of Artificial Sequence: Synthetic oligonucleotide
ggcgggucgguugcugagc

SEQ ID NO: 54484 - RNA, 19 nt, Artificial Sequence
  Description of Artificial Sequence: Synthetic oligonucleotide
cucgagacaugaagucgau

SEQ ID NO: 54485 - RNA, 19 nt, Artificial Sequence
  Description of Artificial Sequence: Synthetic oligonucleotide
gcguagccucucauugugc

SEQ ID NO: 54486 - RNA, 19 nt, Artificial Sequence
  Description of Artificial Sequence: Synthetic oligonucleotide
ccggugucgguggaucaag

SEQ ID NO: 54487 - RNA, 19 nt, Artificial Sequence
  Description of Artificial Sequence: Synthetic oligonucleotide
auccggccgggcaguuccg

SEQ ID NO: 54488 - RNA, 19 nt, Artificial Sequence
  Description of Artificial Sequence: Synthetic oligonucleotide
cucuagccuccggaucuca

SEQ ID NO: 54489 - RNA, 19 nt, Artificial Sequence
  Description of Artificial Sequence: Synthetic oligonucleotide
ccgacgaugucuucggcau

SEQ ID NO: 54490 - RNA, 19 nt, Artificial Sequence
  Description of Artificial Sequence: Synthetic oligonucleotide
ggcaacgagcguugacacu

SEQ ID NO: 54491 - RNA, 19 nt, Artificial Sequence
  Description of Artificial Sequence: Synthetic oligonucleotide
gggcaguuccgacgauguc

SEQ ID NO: 54492 - RNA, 19 nt, Artificial Sequence
  Description of Artificial Sequence: Synthetic oligonucleotide
gcuugcguagccucucauu

SEQ ID NO: 54493 - RNA, 19 nt, Artificial Sequence
  Description of Artificial Sequence: Synthetic oligonucleotide
gccacacguuugaggagac

SEQ ID NO: 54494 - RNA, 19 nt, Artificial Sequence
  Description of Artificial Sequence: Synthetic oligonucleotide
ccgggcaguuccgacgaug

SEQ ID NO: 54495 - RNA, 19 nt, Artificial Sequence
  Description of Artificial Sequence: Synthetic oligonucleotide
cggcggauccacuccaaca

SEQ ID NO: 54496 - RNA, 19 nt, Artificial Sequence
  Description of Artificial Sequence: Synthetic oligonucleotide
gcaguuccgacgaugucuu

SEQ ID NO: 54497 - RNA, 19 nt, Artificial Sequence
  Description of Artificial Sequence: Synthetic oligonucleotide
gggucguugccaauaucau

SEQ ID NO: 54498 - RNA, 19 nt, Artificial Sequence
  Description of Artificial Sequence: Synthetic oligonucleotide
gugccggagugaucccggu

SEQ ID NO: 54499 - RNA, 19 nt, Artificial Sequence
  Description of Artificial Sequence: Synthetic oligonucleotide
cguaagucauaauggcuuu

SEQ ID NO: 54500 - RNA, 19 nt, Artificial Sequence
  Description of Artificial Sequence: Synthetic oligonucleotide
gccaagcguucaccugaga

SEQ ID NO: 54501 - RNA, 19 nt, Artificial Sequence
  Description of Artificial Sequence: Synthetic oligonucleotide
ccggccgggcaguuccgac

SEQ ID NO: 54502 - RNA, 19 nt, Artificial Sequence
  Description of Artificial Sequence: Synthetic oligonucleotide
gguugacggccaaaacuuu

SEQ ID NO: 54503 - RNA, 19 nt, Artificial Sequence
  Description of Artificial Sequence: Synthetic oligonucleotide
cugaggggugaugguugua

SEQ ID NO: 54504 - RNA, 19 nt, Artificial Sequence
  Description of Artificial Sequence: Synthetic oligonucleotide
cgacgaugucuucggcauc

SEQ ID NO: 54505 - RNA, 19 nt, Artificial Sequence
  Description of Artificial Sequence: Synthetic oligonucleotide
cauccgggaggguggccuu

SEQ ID NO: 54506 - RNA, 19 nt, Artificial Sequence
  Description of Artificial Sequence: Synthetic oligonucleotide
ccggagugaucccggucaa

SEQ ID NO: 54507 - RNA, 19 nt, Artificial Sequence
  Description of Artificial Sequence: Synthetic oligonucleotide
gcgcgcgugcuaggggcug

SEQ ID NO: 54508 - RNA, 19 nt, Artificial Sequence
  Description of Artificial Sequence: Synthetic oligonucleotide
gcgcccgguucuccagcca

SEQ ID NO: 54509 - RNA, 19 nt, Artificial Sequence
  Description of Artificial Sequence: Synthetic oligonucleotide
ccaagcgguuggggucuac

SEQ ID NO: 54510 - RNA, 19 nt, Artificial Sequence
  Description of Artificial Sequence: Synthetic oligonucleotide
cagaugcgauuggcuugcu

SEQ ID NO: 54511 - RNA, 19 nt, Artificial Sequence
  Description of Artificial Sequence: Synthetic oligonucleotide
gcgcgugcuaggggcugga

SEQ ID NO: 54512 - RNA, 19 nt, Artificial Sequence
  Description of Artificial Sequence: Synthetic oligonucleotide
cggcugucucucgagacau

SEQ ID NO: 54513 - RNA, 19 nt, Artificial Sequence
  Description of Artificial Sequence: Synthetic oligonucleotide
ccacacguuugaggagacu

SEQ ID NO: 54514 - RNA, 19 nt, Artificial Sequence
  Description of Artificial Sequence: Synthetic oligonucleotide
gccgggcaguuccgacgau

SEQ ID NO: 54515 - RNA, 19 nt, Artificial Sequence
  Description of Artificial Sequence: Synthetic oligonucleotide
cgcacgcgcagagggccaa

SEQ ID NO: 54516 - RNA, 19 nt, Artificial Sequence
  Description of Artificial Sequence: Synthetic oligonucleotide
cccaagcgguuggggucua

SEQ ID NO: 54517 - RNA, 19 nt, Artificial Sequence
  Description of Artificial Sequence: Synthetic oligonucleotide
aauuaugauuacuaaaugc

SEQ ID NO: 54518 - RNA, 19 nt, Artificial Sequence
  Description of Artificial Sequence: Synthetic oligonucleotide
acuaucacauaauagaccg

SEQ ID NO: 54519 - RNA, 19 nt, Artificial Sequence
  Description of Artificial Sequence: Synthetic oligonucleotide
aaugcaaugauaccaguuc

SEQ ID NO: 54520 - RNA, 19 nt, Artificial Sequence
  Description of Artificial Sequence: Synthetic oligonucleotide
auccaauugaacuauaagg

SEQ ID NO: 54521 - RNA, 19 nt, Artificial Sequence
  Description of Artificial Sequence: Synthetic oligonucleotide
auaguuuuagcccagguug

SEQ ID NO: 54522 - RNA, 19 nt, Artificial Sequence
  Description of Artificial Sequence: Synthetic oligonucleotide
aaauuauuagauugcagca

SEQ ID NO: 54523 - RNA, 19 nt, Artificial Sequence
  Description of Artificial Sequence: Synthetic oligonucleotide
caaacgacuaaucauaggc

SEQ ID NO: 54524 - RNA, 19 nt, Artificial Sequence
  Description of Artificial Sequence: Synthetic oligonucleotide
aaacauuauggucaggcug

SEQ ID NO: 54525 - RNA, 19 nt, Artificial Sequence
  Description of Artificial Sequence: Synthetic oligonucleotide
aaauguaauagaugguuca

SEQ ID NO: 54526 - RNA, 19 nt, Artificial Sequence
  Description of Artificial Sequence: Synthetic oligonucleotide
ugaucuaaaaggaccaugc

SEQ ID NO: 54527 - RNA, 19 nt, Artificial Sequence
  Description of Artificial Sequence: Synthetic oligonucleotide
auucauaaccccuuacuac

SEQ ID NO: 54528 - RNA, 19 nt, Artificial Sequence
  Description of Artificial Sequence: Synthetic oligonucleotide
acuaacagggcacauguuc

SEQ ID NO: 54529 - RNA, 19 nt, Artificial Sequence
  Description of Artificial Sequence: Synthetic oligonucleotide
ugacaauuaugaauggucc

SEQ ID NO: 54530 - RNA, 19 nt, Artificial Sequence
  Description of Artificial Sequence: Synthetic oligonucleotide
uucaaaugcaaugauacca

SEQ ID NO: 54531 - RNA, 19 nt, Artificial Sequence
  Description of Artificial Sequence: Synthetic oligonucleotide
ucggcuauagaaauguuug

SEQ ID NO: 54532 - RNA, 19 nt, Artificial Sequence
  Description of Artificial Sequence: Synthetic oligonucleotide
aaacuaacggacuaacaga

SEQ ID NO: 54533 - RNA, 19 nt, Artificial Sequence
  Description of Artificial Sequence: Synthetic oligonucleotide
aacgacuaaucauaggcug

SEQ ID NO: 54534 - RNA, 19 nt, Artificial Sequence
  Description of Artificial Sequence: Synthetic oligonucleotide
auuggagucacuucuacug

SEQ ID NO: 54535 - RNA, 19 nt, Artificial Sequence
  Description of Artificial Sequence: Synthetic oligonucleotide
aauaccuggggccacauau

SEQ ID NO: 54536 - RNA, 19 nt, Artificial Sequence
  Description of Artificial Sequence: Synthetic oligonucleotide
auaagagacuucuuagcac

SEQ ID NO: 54537 - RNA, 19 nt, Artificial Sequence
  Description of Artificial Sequence: Synthetic oligonucleotide
uauaagugacaauucuggg

SEQ ID NO: 54538 - RNA, 19 nt, Artificial Sequence
  Description of Artificial Sequence: Synthetic oligonucleotide
ugcgcuauaguuuuagccc

SEQ ID NO: 54539 - RNA, 19 nt, Artificial Sequence
  Description of Artificial Sequence: Synthetic oligonucleotide
aacuauaaggacuuguaua

SEQ ID NO: 54540 - RNA, 19 nt, Artificial Sequence
  Description of Artificial Sequence: Synthetic oligonucleotide
guuaguuugcuaauaaucc

SEQ ID NO: 54541 - RNA, 19 nt, Artificial Sequence
  Description of Artificial Sequence: Synthetic oligonucleotide
auaaaaccgaaacaguuga

SEQ ID NO: 54542 - RNA, 19 nt, Artificial Sequence
  Description of Artificial Sequence: Synthetic oligonucleotide
acuauaaggacuuguauaa

SEQ ID NO: 54543 - RNA, 19 nt, Artificial Sequence
  Description of Artificial Sequence: Synthetic oligonucleotide
uuagcgaacaaguuauuca

SEQ ID NO: 54544 - RNA, 19 nt, Artificial Sequence
  Description of Artificial Sequence: Synthetic oligonucleotide
uucgggauagguuuggaag

SEQ ID NO: 54545 - RNA, 19 nt, Artificial Sequence
  Description of Artificial Sequence: Synthetic oligonucleotide
auaauagaccguuauguca

SEQ ID NO: 54546 - RNA, 19 nt, Artificial Sequence
  Description of Artificial Sequence: Synthetic oligonucleotide
uuuaugugacccaacugcc

SEQ ID NO: 54547 - RNA, 19 nt, Artificial Sequence
  Description of Artificial Sequence: Synthetic oligonucleotide
uaaaguagguugaacguga

SEQ ID NO: 54548 - RNA, 19 nt, Artificial Sequence
  Description of Artificial Sequence: Synthetic oligonucleotide
agauuauuguaguuaaaug

SEQ ID NO: 54549 - RNA, 19 nt, Artificial Sequence
  Description of Artificial Sequence: Synthetic oligonucleotide
acaguaaauccuuagauuu

SEQ ID NO: 54550 - RNA, 19 nt, Artificial Sequence
  Description of Artificial Sequence: Synthetic oligonucleotide
agcaaauuagaguuggaug

SEQ ID NO: 54551 - RNA, 19 nt, Artificial Sequence
  Description of Artificial Sequence: Synthetic oligonucleotide
gauaagagacuucuuagca

SEQ ID NO: 54552 - RNA, 19 nt, Artificial Sequence
  Description of Artificial Sequence: Synthetic oligonucleotide
aaccgaaacaguugauuuc

SEQ ID NO: 54553 - RNA, 19 nt, Artificial Sequence
  Description of Artificial Sequence: Synthetic oligonucleotide
caugguauuaaagugcugc

SEQ ID NO: 54554 - RNA, 19 nt, Artificial Sequence
  Description of Artificial Sequence: Synthetic oligonucleotide
cacucauaugccauuagcg

SEQ ID NO: 54555 - RNA, 19 nt, Artificial Sequence
  Description of Artificial Sequence: Synthetic oligonucleotide
acacucauaugccauuagc

SEQ ID NO: 54556 - RNA, 19 nt, Artificial Sequence
  Description of Artificial Sequence: Synthetic oligonucleotide
ugaacgugaguuuuggaca

SEQ ID NO: 54557 - RNA, 19 nt, Artificial Sequence
  Description of Artificial Sequence: Synthetic oligonucleotide
uugaacgugaguuuuggac

SEQ ID NO: 54558 - RNA, 19 nt, Artificial Sequence
  Description of Artificial Sequence: Synthetic oligonucleotide
aguuauacaaauaccuggg

SEQ ID NO: 54559 - RNA, 19 nt, Artificial Sequence
  Description of Artificial Sequence: Synthetic oligonucleotide
uucauaaccccuuacuacu

SEQ ID NO: 54560 - RNA, 19 nt, Artificial Sequence
  Description of Artificial Sequence: Synthetic oligonucleotide
uuacagaacauccucuacu

SEQ ID NO: 54561 - RNA, 19 nt, Artificial Sequence
  Description of Artificial Sequence: Synthetic oligonucleotide
aguaaaguagguugaacgu

SEQ ID NO: 54562 - RNA, 19 nt, Artificial Sequence
  Description of Artificial Sequence: Synthetic oligonucleotide
acauaauagaccguuaugu

SEQ ID NO: 54563 - RNA, 19 nt, Artificial Sequence
  Description of Artificial Sequence: Synthetic oligonucleotide
gaaucugcacaucaguuac

SEQ ID NO: 54564 - RNA, 19 nt, Artificial Sequence
  Description of Artificial Sequence: Synthetic oligonucleotide
aggaccaugcaucauacug

SEQ ID NO: 54565 - RNA, 19 nt, Artificial Sequence
  Description of Artificial Sequence: Synthetic oligonucleotide
aaggacuuguauaacucac

SEQ ID NO: 54566 - RNA, 19 nt, Artificial Sequence
  Description of Artificial Sequence: Synthetic oligonucleotide
ugggguuuuacaaacccca

SEQ ID NO: 54567 - RNA, 19 nt, Artificial Sequence
  Description of Artificial Sequence: Synthetic oligonucleotide
uguuugauguucgggauag

SEQ ID NO: 54568 - RNA, 19 nt, Artificial Sequence
  Description of Artificial Sequence: Synthetic oligonucleotide
aaaagagacaguauuuuaa

SEQ ID NO: 54569 - RNA, 19 nt, Artificial Sequence
  Description of Artificial Sequence: Synthetic oligonucleotide
ucaacuugcguguuugaug

SEQ ID NO: 54570 - RNA, 19 nt, Artificial Sequence
  Description of Artificial Sequence: Synthetic oligonucleotide
ugaaccguguuucuaguga

SEQ ID NO: 54571 - RNA, 19 nt, Artificial Sequence
  Description of Artificial Sequence: Synthetic oligonucleotide
gugaauugcguggugaugg

SEQ ID NO: 54572 - RNA, 19 nt, Artificial Sequence
  Description of Artificial Sequence: Synthetic oligonucleotide
guuauacaaauaccugggg

SEQ ID NO: 54573 - RNA, 19 nt, Artificial Sequence
  Description of Artificial Sequence: Synthetic oligonucleotide
uugcgcuauaguuuuagcc

SEQ ID NO: 54574 - RNA, 19 nt, Artificial Sequence
  Description of Artificial Sequence: Synthetic oligonucleotide
aaaggaccaugcaucauac

SEQ ID NO: 54575 - RNA, 19 nt, Artificial Sequence
  Description of Artificial Sequence: Synthetic oligonucleotide
ugaauuucgaggugacugc

SEQ ID NO: 54576 - RNA, 19 nt, Artificial Sequence
  Description of Artificial Sequence: Synthetic oligonucleotide
accguuaugucacuuaaga

SEQ ID NO: 54577 - RNA, 19 nt, Artificial Sequence
  Description of Artificial Sequence: Synthetic oligonucleotide
acuguauucuauuccccgg

SEQ ID NO: 54578 - RNA, 19 nt, Artificial Sequence
  Description of Artificial Sequence: Synthetic oligonucleotide
ugaacuauaaggacuugua

SEQ ID NO: 54579 - RNA, 19 nt, Artificial Sequence
  Description of Artificial Sequence: Synthetic oligonucleotide
uuacuuagauuuacaugag

SEQ ID NO: 54580 - RNA, 19 nt, Artificial Sequence
  Description of Artificial Sequence: Synthetic oligonucleotide
ugcaaacgacuaaucauag

SEQ ID NO: 54581 - RNA, 19 nt, Artificial Sequence
  Description of Artificial Sequence: Synthetic oligonucleotide
aauuauuagauugcagcau

SEQ ID NO: 54582 - RNA, 19 nt, Artificial Sequence
  Description of Artificial Sequence: Synthetic oligonucleotide
uuaugaaugguccccaguu

SEQ ID NO: 54583 - RNA, 19 nt, Artificial Sequence
  Description of Artificial Sequence: Synthetic oligonucleotide
guuaugucacuuaagagca

SEQ ID NO: 54584 - RNA, 19 nt, Artificial Sequence
  Description of Artificial Sequence: Synthetic oligonucleotide
gguauuugcccagauaucg

SEQ ID NO: 54585 - RNA, 19 nt, Artificial Sequence
  Description of Artificial Sequence: Synthetic oligonucleotide
uuaugauuacuaaaugcuu

SEQ ID NO: 54586 - RNA, 19 nt, Artificial Sequence
  Description of Artificial Sequence: Synthetic oligonucleotide
cagaaucuaacucaaaaga

SEQ ID NO: 54587 - RNA, 19 nt, Artificial Sequence
  Description of Artificial Sequence: Synthetic oligonucleotide
uauaguuuuagcccagguu

SEQ ID NO: 54588 - RNA, 19 nt, Artificial Sequence
  Description of Artificial Sequence: Synthetic oligonucleotide
acaugagacacuccccaac

SEQ ID NO: 54589 - RNA, 19 nt, Artificial Sequence
  Description of Artificial Sequence: Synthetic oligonucleotide
ucgagcgaggugaauuucg

SEQ ID NO: 54590 - RNA, 19 nt, Artificial Sequence
  Description of Artificial Sequence: Synthetic oligonucleotide
gugaauuucgaggugacug

SEQ ID NO: 54591 - RNA, 19 nt, Artificial Sequence
  Description of Artificial Sequence: Synthetic oligonucleotide
caaggaucuucgaacaggc

SEQ ID NO: 54592 - RNA, 19 nt, Artificial Sequence
  Description of Artificial Sequence: Synthetic oligonucleotide
cuaccauaggucuuaggag

SEQ ID NO: 54593 - RNA, 19 nt, Artificial Sequence
  Description of Artificial Sequence: Synthetic oligonucleotide
auuauuagauugcagcauu

SEQ ID NO: 54594 - RNA, 19 nt, Artificial Sequence
  Description of Artificial Sequence: Synthetic oligonucleotide
ucacauaauagaccguuau

SEQ ID NO: 54595 - RNA, 19 nt, Artificial Sequence
  Description of Artificial Sequence: Synthetic oligonucleotide
agggcacauguucaagucc

SEQ ID NO: 54596 - RNA, 19 nt, Artificial Sequence
  Description of Artificial Sequence: Synthetic oligonucleotide
ucuaccucguccagcaagc

SEQ ID NO: 54597 - RNA, 19 nt, Artificial Sequence
  Description of Artificial Sequence: Synthetic oligonucleotide
cguuaugucacuuaagagc

SEQ ID NO: 54598 - RNA, 19 nt, Artificial Sequence
  Description of Artificial Sequence: Synthetic oligonucleotide
ugacauaguuugaucaagu

SEQ ID NO: 54599 - RNA, 19 nt, Artificial Sequence
  Description of Artificial Sequence: Synthetic oligonucleotide
cauaauagaccguuauguc

SEQ ID NO: 54600 - RNA, 19 nt, Artificial Sequence
  Description of Artificial Sequence: Synthetic oligonucleotide
agugauugcaugauuacca

SEQ ID NO: 54601 - RNA, 19 nt, Artificial Sequence
  Description of Artificial Sequence: Synthetic oligonucleotide
aguagguugaacgugaguu

SEQ ID NO: 54602 - RNA, 19 nt, Artificial Sequence
  Description of Artificial Sequence: Synthetic oligonucleotide
cauauuacaaguucggcua

SEQ ID NO: 54603 - RNA, 19 nt, Artificial Sequence
  Description of Artificial Sequence: Synthetic oligonucleotide
cuuagauuuacaugagaca

SEQ ID NO: 54604 - RNA, 19 nt, Artificial Sequence
  Description of Artificial Sequence: Synthetic oligonucleotide
uguauucuauuccccgggc

SEQ ID NO: 54605 - RNA, 19 nt, Artificial Sequence
  Description of Artificial Sequence: Synthetic oligonucleotide
gacuaucacauaauagacc

SEQ ID NO: 54606 - RNA, 19 nt, Artificial Sequence
  Description of Artificial Sequence: Synthetic oligonucleotide
gugaguuuuggacagccug

SEQ ID NO: 54607 - RNA, 19 nt, Artificial Sequence
  Description of Artificial Sequence: Synthetic oligonucleotide
cacauccgauguuacaugg

SEQ ID NO: 54608 - RNA, 19 nt, Artificial Sequence
  Description of Artificial Sequence: Synthetic oligonucleotide
uuguggauaagagacuucu

SEQ ID NO: 54609 - RNA, 19 nt, Artificial Sequence
  Description of Artificial Sequence: Synthetic oligonucleotide
aguggcgcuauugauauug

SEQ ID NO: 54610 - RNA, 19 nt, Artificial Sequence
  Description of Artificial Sequence: Synthetic oligonucleotide
uugccgaagagccaaugga

SEQ ID NO: 54611 - RNA, 19 nt, Artificial Sequence
  Description of Artificial Sequence: Synthetic oligonucleotide
acauaguuugaucaaguuu

SEQ ID NO: 54612 - RNA, 19 nt, Artificial Sequence
  Description of Artificial Sequence: Synthetic oligonucleotide
aaacacauccgauguuaca

SEQ ID NO: 54613 - RNA, 19 nt, Artificial Sequence
  Description of Artificial Sequence: Synthetic oligonucleotide
aacuaacggacuaacagau

SEQ ID NO: 54614 - RNA, 19 nt, Artificial Sequence
  Description of Artificial Sequence: Synthetic oligonucleotide
cuuaagagcaacaguacaa

SEQ ID NO: 54615 - RNA, 19 nt, Artificial Sequence
  Description of Artificial Sequence: Synthetic oligonucleotide
uuggagucacuucuacugc

SEQ ID NO: 54616 - RNA, 19 nt, Artificial Sequence
  Description of Artificial Sequence: Synthetic oligonucleotide
aacaccuguacagugaguu

SEQ ID NO: 54617 - RNA, 19 nt, Artificial Sequence
  Description of Artificial Sequence: Synthetic oligonucleotide
ugcaucauacugucaaaac

SEQ ID NO: 54618 - RNA, 19 nt, Artificial Sequence
  Description of Artificial Sequence: Synthetic oligonucleotide
aguugaucgacuaucacau

SEQ ID NO: 54619 - RNA, 19 nt, Artificial Sequence
  Description of Artificial Sequence: Synthetic oligonucleotide
acugaacaccuguacagug

SEQ ID NO: 54620 - RNA, 19 nt, Artificial Sequence
  Description of Artificial Sequence: Synthetic oligonucleotide
uucaccgagucaacuugcg

SEQ ID NO: 54621 - RNA, 19 nt, Artificial Sequence
  Description of Artificial Sequence: Synthetic oligonucleotide
ucgggauagguuuggaaga

SEQ ID NO: 54622 - RNA, 19 nt, Artificial Sequence
  Description of Artificial Sequence: Synthetic oligonucleotide
ugauauugcuggaaggguu

SEQ ID NO: 54623 - RNA, 19 nt, Artificial Sequence
  Description of Artificial Sequence: Synthetic oligonucleotide
uuuagcccagguuguaagc

SEQ ID NO: 54624 - RNA, 19 nt, Artificial Sequence
  Description of Artificial Sequence: Synthetic oligonucleotide
agaguggcgcuauugauau

SEQ ID NO: 54625 - RNA, 19 nt, Artificial Sequence
  Description of Artificial Sequence: Synthetic oligonucleotide
aacggacuaacagauuucu

SEQ ID NO: 54626 - RNA, 19 nt, Artificial Sequence
  Description of Artificial Sequence: Synthetic oligonucleotide
cuguauucuauuccccggg

SEQ ID NO: 54627 - RNA, 19 nt, Artificial Sequence
  Description of Artificial Sequence: Synthetic oligonucleotide
guugccgaagagccaaugg

SEQ ID NO: 54628 - RNA, 19 nt, Artificial Sequence
  Description of Artificial Sequence: Synthetic oligonucleotide
aguucggcuauagaaaugu

SEQ ID NO: 54629 - RNA, 19 nt, Artificial Sequence
  Description of Artificial Sequence: Synthetic oligonucleotide
aaacgacuaaucauaggcu

SEQ ID NO: 54630 - RNA, 19 nt, Artificial Sequence
  Description of Artificial Sequence: Synthetic oligonucleotide
uuucaccgagucaacuugc

SEQ ID NO: 54631 - RNA, 19 nt, Artificial Sequence
  Description of Artificial Sequence: Synthetic oligonucleotide
guaaaguagguugaacgug

SEQ ID NO: 54632 - RNA, 19 nt, Artificial Sequence
  Description of Artificial Sequence: Synthetic oligonucleotide
uuaugugacccaacugcca

SEQ ID NO: 54633 - RNA, 19 nt, Artificial Sequence
  Description of Artificial Sequence: Synthetic oligonucleotide
ugcauauucuugccggaga

SEQ ID NO: 54634 - RNA, 19 nt, Artificial Sequence
  Description of Artificial Sequence: Synthetic oligonucleotide
aauugcguggugauggaga

SEQ ID NO: 54635 - RNA, 19 nt, Artificial Sequence
  Description of Artificial Sequence: Synthetic oligonucleotide
cugccaauauuuuagaucu

SEQ ID NO: 54636 - RNA, 19 nt, Artificial Sequence
  Description of Artificial Sequence: Synthetic oligonucleotide
guauaacucacagaguuga

SEQ ID NO: 54637 - RNA, 19 nt, Artificial Sequence
  Description of Artificial Sequence: Synthetic oligonucleotide
accccuuacuacuauauau

SEQ ID NO: 54638 - RNA, 19 nt, Artificial Sequence
  Description of Artificial Sequence: Synthetic oligonucleotide
accaaacuaacggacuaac

SEQ ID NO: 54639 - RNA, 19 nt, Artificial Sequence
  Description of Artificial Sequence: Synthetic oligonucleotide
uaugucacuuaagagcaac

SEQ ID NO: 54640 - RNA, 19 nt, Artificial Sequence
  Description of Artificial Sequence: Synthetic oligonucleotide
gagaucucgagcgagguga

SEQ ID NO: 54641 - RNA, 19 nt, Artificial Sequence
  Description of Artificial Sequence: Synthetic oligonucleotide
auuaugaaugguccccagu

SEQ ID NO: 54642 - RNA, 19 nt, Artificial Sequence
  Description of Artificial Sequence: Synthetic oligonucleotide
uucggcuauagaaauguuu

SEQ ID NO: 54643 - RNA, 19 nt, Artificial Sequence
  Description of Artificial Sequence: Synthetic oligonucleotide
gauacuauuuguacaguaa

SEQ ID NO: 54644 - RNA, 19 nt, Artificial Sequence
  Description of Artificial Sequence: Synthetic oligonucleotide
uuuguacaguaaaguaggu

SEQ ID NO: 54645 - RNA, 19 nt, Artificial Sequence
  Description of Artificial Sequence: Synthetic oligonucleotide
caccgagucaacuugcgug

SEQ ID NO: 54646 - RNA, 19 nt, Artificial Sequence
  Description of Artificial Sequence: Synthetic oligonucleotide
cacuaguuuaucaaaucca

SEQ ID NO: 54647 - RNA, 19 nt, Artificial Sequence
  Description of Artificial Sequence: Synthetic oligonucleotide
ggacuuguauaacucacag

SEQ ID NO: 54648 - RNA, 19 nt, Artificial Sequence
  Description of Artificial Sequence: Synthetic oligonucleotide
gcuaccauaggucuuagga

SEQ ID NO: 54649 - RNA, 19 nt, Artificial Sequence
  Description of Artificial Sequence: Synthetic oligonucleotide
acgccgcucaccuugguuc

SEQ ID NO: 54650 - RNA, 19 nt, Artificial Sequence
  Description of Artificial Sequence: Synthetic oligonucleotide
uacacucauaugccauuag

SEQ ID NO: 54651 - RNA, 19 nt, Artificial Sequence
  Description of Artificial Sequence: Synthetic oligonucleotide
gcacuaguuuaucaaaucc

SEQ ID NO: 54652 - RNA, 19 nt, Artificial Sequence
  Description of Artificial Sequence: Synthetic oligonucleotide
aucgacuaucacauaauag

SEQ ID NO: 54653 - RNA, 19 nt, Artificial Sequence
  Description of Artificial Sequence: Synthetic oligonucleotide
gccugcaccaaacuaacgg

SEQ ID NO: 54654 - RNA, 19 nt, Artificial Sequence
  Description of Artificial Sequence: Synthetic oligonucleotide
cacauaauagaccguuaug

SEQ ID NO: 54655 - RNA, 19 nt, Artificial Sequence
  Description of Artificial Sequence: Synthetic oligonucleotide
acgugaguuuuggacagcc

SEQ ID NO: 54656 - RNA, 19 nt, Artificial Sequence
  Description of Artificial Sequence: Synthetic oligonucleotide
aaugguccccaguuuuaca

SEQ ID NO: 54657 - RNA, 19 nt, Artificial Sequence
  Description of Artificial Sequence: Synthetic oligonucleotide
uaaccccuuacuacuauau

SEQ ID NO: 54658 - RNA, 19 nt, Artificial Sequence
  Description of Artificial Sequence: Synthetic oligonucleotide
cacuuaagagcaacaguac

SEQ ID NO: 54659 - RNA, 19 nt, Artificial Sequence
  Description of Artificial Sequence: Synthetic oligonucleotide
gagugauugcaugauuacc

SEQ ID NO: 54660 - RNA, 19 nt, Artificial Sequence
  Description of Artificial Sequence: Synthetic oligonucleotide
uuagguauuugcccagaua

SEQ ID NO: 54661 - RNA, 19 nt, Artificial Sequence
  Description of Artificial Sequence: Synthetic oligonucleotide
accgaaacaguugauuuca

SEQ ID NO: 54662 - RNA, 19 nt, Artificial Sequence
  Description of Artificial Sequence: Synthetic oligonucleotide
uuauuagauugcagcauuu

SEQ ID NO: 54663 - RNA, 19 nt, Artificial Sequence
  Description of Artificial Sequence: Synthetic oligonucleotide
aauagaccguuaugucacu

SEQ ID NO: 54664 - RNA, 19 nt, Artificial Sequence
  Description of Artificial Sequence: Synthetic oligonucleotide
ugcagaccauccuagaguu

SEQ ID NO: 54665 - RNA, 19 nt, Artificial Sequence
  Description of Artificial Sequence: Synthetic oligonucleotide
gacuuggguaauccaaaac

SEQ ID NO: 54666 - RNA, 19 nt, Artificial Sequence
  Description of Artificial Sequence: Synthetic oligonucleotide
agugaugaaauaguuuaau

SEQ ID NO: 54667 - RNA, 19 nt, Artificial Sequence
  Description of Artificial Sequence: Synthetic oligonucleotide
gaucuaaaaggaccaugca

SEQ ID NO: 54668 - RNA, 19 nt, Artificial Sequence
  Description of Artificial Sequence: Synthetic oligonucleotide
aucaacauucauaaccccu

SEQ ID NO: 54669 - RNA, 19 nt, Artificial Sequence
  Description of Artificial Sequence: Synthetic oligonucleotide
cauaggucuuaggagcugg

SEQ ID NO: 54670 - RNA, 19 nt, Artificial Sequence
  Description of Artificial Sequence: Synthetic oligonucleotide
uugauguucgggauagguu

SEQ ID NO: 54671 - RNA, 19 nt, Artificial Sequence
  Description of Artificial Sequence: Synthetic oligonucleotide
aguacucucuuuacaaaug

SEQ ID NO: 54672 - RNA, 19 nt, Artificial Sequence
  Description of Artificial Sequence: Synthetic oligonucleotide
aaguagguugaacgugagu

SEQ ID NO: 54673 - RNA, 19 nt, Artificial Sequence
  Description of Artificial Sequence: Synthetic oligonucleotide
cacaugugauuccacggag

SEQ ID NO: 54674 - RNA, 19 nt, Artificial Sequence
  Description of Artificial Sequence: Synthetic oligonucleotide
agcgaacaaguuauucagc

SEQ ID NO: 54675 - RNA, 19 nt, Artificial Sequence
  Description of Artificial Sequence: Synthetic oligonucleotide
acucagauccaaaauacau

SEQ ID NO: 54676 - RNA, 19 nt, Artificial Sequence
  Description of Artificial Sequence: Synthetic oligonucleotide
agccaauagucugugguag

SEQ ID NO: 54677 - RNA, 19 nt, Artificial Sequence
  Description of Artificial Sequence: Synthetic oligonucleotide
aauguuacacugacacaga

SEQ ID NO: 54678 - RNA, 19 nt, Artificial Sequence
  Description of Artificial Sequence: Synthetic oligonucleotide
uugccggagacuuuucuuc

SEQ ID NO: 54679 - RNA, 19 nt, Artificial Sequence
  Description of Artificial Sequence: Synthetic oligonucleotide
accgagucaacuugcgugu

SEQ ID NO: 54680 - RNA, 19 nt, Artificial Sequence
  Description of Artificial Sequence: Synthetic oligonucleotide
aacgugaguuuuggacagc

SEQ ID NO: 54681 - RNA, 19 nt, Artificial Sequence
  Description of Artificial Sequence: Synthetic oligonucleotide
uccgauguuacaugguauu

SEQ ID NO: 54682 - RNA, 19 nt, Artificial Sequence
  Description of Artificial Sequence: Synthetic oligonucleotide
guauuaaagugcugcuuca

SEQ ID NO: 54683 - RNA, 19 nt, Artificial Sequence
  Description of Artificial Sequence: Synthetic oligonucleotide
ccacauauuacaaguucgg

SEQ ID NO: 54684 - RNA, 19 nt, Artificial Sequence
  Description of Artificial Sequence: Synthetic oligonucleotide
agauggucggggugaauug

SEQ ID NO: 54685 - RNA, 19 nt, Artificial Sequence
  Description of Artificial Sequence: Synthetic oligonucleotide
acacauccgauguuacaug

SEQ ID NO: 54686 - RNA, 19 nt, Artificial Sequence
  Description of Artificial Sequence: Synthetic oligonucleotide
cucauaugccauuagcgaa

SEQ ID NO: 54687 - RNA, 19 nt, Artificial Sequence
  Description of Artificial Sequence: Synthetic oligonucleotide
auuucgaggugacugcuua

SEQ ID NO: 54688 - RNA, 19 nt, Artificial Sequence
  Description of Artificial Sequence: Synthetic oligonucleotide
cugcaccaaacuaacggac

SEQ ID NO: 54689 - RNA, 19 nt, Artificial Sequence
  Description of Artificial Sequence: Synthetic oligonucleotide
ucgaggugacugcuuagga

SEQ ID NO: 54690 - RNA, 19 nt, Artificial Sequence
  Description of Artificial Sequence: Synthetic oligonucleotide
guaaaucugugggauggcc

SEQ ID NO: 54691 - RNA, 19 nt, Artificial Sequence
  Description of Artificial Sequence: Synthetic oligonucleotide
augguccccaguuuuacaa

SEQ ID NO: 54692 - RNA, 19 nt, Artificial Sequence
  Description of Artificial Sequence: Synthetic oligonucleotide
gaagacuccgucuaaguuu

SEQ ID NO: 54693 - RNA, 19 nt, Artificial Sequence
  Description of Artificial Sequence: Synthetic oligonucleotide
aaccguguuucuagugaac

SEQ ID NO: 54694 - RNA, 19 nt, Artificial Sequence
  Description of Artificial Sequence: Synthetic oligonucleotide
ucuugccggagacuuuucu

SEQ ID NO: 54695 - RNA, 19 nt, Artificial Sequence
  Description of Artificial Sequence: Synthetic oligonucleotide
agaccguuaugucacuuaa

SEQ ID NO: 54696 - RNA, 19 nt, Artificial Sequence
  Description of Artificial Sequence: Synthetic oligonucleotide
uugccuggagaagguaugg

SEQ ID NO: 54697 - RNA, 19 nt, Artificial Sequence
  Description of Artificial Sequence: Synthetic oligonucleotide
aacuggcaauacacaaagg

SEQ ID NO: 54698 - RNA, 19 nt, Artificial Sequence
  Description of Artificial Sequence: Synthetic oligonucleotide
gaaccagaauuaugauuac

SEQ ID NO: 54699 - RNA, 19 nt, Artificial Sequence
  Description of Artificial Sequence: Synthetic oligonucleotide
auugcguggugauggagaa

SEQ ID NO: 54700 - RNA, 19 nt, Artificial Sequence
  Description of Artificial Sequence: Synthetic oligonucleotide
gaucgacuaucacauaaua

SEQ ID NO: 54701 - RNA, 19 nt, Artificial Sequence
  Description of Artificial Sequence: Synthetic oligonucleotide
guuuuggacagccugaauu

SEQ ID NO: 54702 - RNA, 19 nt, Artificial Sequence
  Description of Artificial Sequence: Synthetic oligonucleotide
cagcuuaaaguugaucgac

SEQ ID NO: 54703 - RNA, 19 nt, Artificial Sequence
  Description of Artificial Sequence: Synthetic oligonucleotide
ugaauugcguggugaugga

SEQ ID NO: 54704 - RNA, 19 nt, Artificial Sequence
  Description of Artificial Sequence: Synthetic oligonucleotide
gcaaggaucuucgaacagg

SEQ ID NO: 54705 - RNA, 19 nt, Artificial Sequence
  Description of Artificial Sequence: Synthetic oligonucleotide
caggagaucucgagcgagg

SEQ ID NO: 54706 - RNA, 19 nt, Artificial Sequence
  Description of Artificial Sequence: Synthetic oligonucleotide
gauggucggggugaauugc

SEQ ID NO: 54707 - RNA, 19 nt, Artificial Sequence
  Description of Artificial Sequence: Synthetic oligonucleotide
cagaaggggcacucggccg

SEQ ID NO: 54708 - RNA, 19 nt, Artificial Sequence
  Description of Artificial Sequence: Synthetic oligonucleotide
gaccauccuagaguuauac

SEQ ID NO: 54709 - RNA, 19 nt, Artificial Sequence
  Description of Artificial Sequence: Synthetic oligonucleotide
ggcaaccacauauuacaag

SEQ ID NO: 54710 - RNA, 19 nt, Artificial Sequence
  Description of Artificial Sequence: Synthetic oligonucleotide
cuuucaugcuaccauaggu

SEQ ID NO: 54711 - RNA, 19 nt, Artificial Sequence
  Description of Artificial Sequence: Synthetic oligonucleotide
cauaggcacuaguuuauca

SEQ ID NO: 54712 - RNA, 19 nt, Artificial Sequence
  Description of Artificial Sequence: Synthetic oligonucleotide
guuguaagcucugaggugu

SEQ ID NO: 54713 - RNA, 19 nt, Artificial Sequence
  Description of Artificial Sequence: Synthetic oligonucleotide
caacuugcguguuugaugu

SEQ ID NO: 54714 - RNA, 19 nt, Artificial Sequence
  Description of Artificial Sequence: Synthetic oligonucleotide
gguugaacgugaguuuugg

SEQ ID NO: 54715 - RNA, 19 nt, Artificial Sequence
  Description of Artificial Sequence: Synthetic oligonucleotide
ugacccaacugccaauauu

SEQ ID NO: 54716 - RNA, 19 nt, Artificial Sequence
  Description of Artificial Sequence: Synthetic oligonucleotide
gcgaacaaguuauucagca

SEQ ID NO: 54717 - RNA, 19 nt, Artificial Sequence
  Description of Artificial Sequence: Synthetic oligonucleotide
uauuccccgggcaggagau

SEQ ID NO: 54718 - RNA, 19 nt, Artificial Sequence
  Description of Artificial Sequence: Synthetic oligonucleotide
cuauaaggacuuguauaac

SEQ ID NO: 54719 - RNA, 19 nt, Artificial Sequence
  Description of Artificial Sequence: Synthetic oligonucleotide
auaggucuuaggagcuggc

SEQ ID NO: 54720 - RNA, 19 nt, Artificial Sequence
  Description of Artificial Sequence: Synthetic oligonucleotide
aaccccuuacuacuauaua

SEQ ID NO: 54721 - RNA, 19 nt, Artificial Sequence
  Description of Artificial Sequence: Synthetic oligonucleotide
gaaccguguuucuagugaa

SEQ ID NO: 54722 - RNA, 19 nt, Artificial Sequence
  Description of Artificial Sequence: Synthetic oligonucleotide
gaacuauaaggacuuguau

SEQ ID NO: 54723 - RNA, 19 nt, Artificial Sequence
  Description of Artificial Sequence: Synthetic oligonucleotide
ugcgccgagaagugguagc

SEQ ID NO: 54724 - RNA, 19 nt, Artificial Sequence
  Description of Artificial Sequence: Synthetic oligonucleotide
gcaaacgacuaaucauagg

SEQ ID NO: 54725 - RNA, 19 nt, Artificial Sequence
  Description of Artificial Sequence: Synthetic oligonucleotide
aacugcgccgagaaguggu

SEQ ID NO: 54726 - RNA, 19 nt, Artificial Sequence
  Description of Artificial Sequence: Synthetic oligonucleotide
cuacuaacagggcacaugu

SEQ ID NO: 54727 - RNA, 19 nt, Artificial Sequence
  Description of Artificial Sequence: Synthetic oligonucleotide
aaguucggcuauagaaaug

SEQ ID NO: 54728 - RNA, 19 nt, Artificial Sequence
  Description of Artificial Sequence: Synthetic oligonucleotide
ucaccgagucaacuugcgu

SEQ ID NO: 54729 - RNA, 19 nt, Artificial Sequence
  Description of Artificial Sequence: Synthetic oligonucleotide
uucgagguauuccuccauu

SEQ ID NO: 54730 - RNA, 19 nt, Artificial Sequence
  Description of Artificial Sequence: Synthetic oligonucleotide
aaggaccaugcaucauacu

SEQ ID NO: 54731 - RNA, 19 nt, Artificial Sequence
  Description of Artificial Sequence: Synthetic oligonucleotide
auaguuggauccaauugaa

SEQ ID NO: 54732 - RNA, 19 nt, Artificial Sequence
  Description of Artificial Sequence: Synthetic oligonucleotide
uagaccguuaugucacuua

SEQ ID NO: 54733 - RNA, 19 nt, Artificial Sequence
  Description of Artificial Sequence: Synthetic oligonucleotide
accauccuagaguuauaca

SEQ ID NO: 54734 - RNA, 19 nt, Artificial Sequence
  Description of Artificial Sequence: Synthetic oligonucleotide
gaauugcguggugauggag

SEQ ID NO: 54735 - RNA, 19 nt, Artificial Sequence
  Description of Artificial Sequence: Synthetic oligonucleotide
guauucuauuccccgggca

SEQ ID NO: 54736 - RNA, 19 nt, Artificial Sequence
  Description of Artificial Sequence: Synthetic oligonucleotide
uuaugucacuuaagagcaa

SEQ ID NO: 54737 - RNA, 19 nt, Artificial Sequence
  Description of Artificial Sequence: Synthetic oligonucleotide
cuaacggacuaacagauuu

SEQ ID NO: 54738 - RNA, 19 nt, Artificial Sequence
  Description of Artificial Sequence: Synthetic oligonucleotide
ucucgagcgaggugaauuu

SEQ ID NO: 54739 - RNA, 19 nt, Artificial Sequence
  Description of Artificial Sequence: Synthetic oligonucleotide
ccauccuagaguuauacaa

SEQ ID NO: 54740 - RNA, 19 nt, Artificial Sequence
  Description of Artificial Sequence: Synthetic oligonucleotide
uuccaacuuacagaacauc

SEQ ID NO: 54741 - RNA, 19 nt, Artificial Sequence
  Description of Artificial Sequence: Synthetic oligonucleotide
cagggcacauguucaaguc

SEQ ID NO: 54742 - RNA, 19 nt, Artificial Sequence
  Description of Artificial Sequence: Synthetic oligonucleotide
guuugcuaauaauccaaua

SEQ ID NO: 54743 - RNA, 19 nt, Artificial Sequence
  Description of Artificial Sequence: Synthetic oligonucleotide
uucuauuccccgggcagga

SEQ ID NO: 54744 - RNA, 19 nt, Artificial Sequence
  Description of Artificial Sequence: Synthetic oligonucleotide
agcuuaaaguugaucgacu

SEQ ID NO: 54745 - RNA, 19 nt, Artificial Sequence
  Description of Artificial Sequence: Synthetic oligonucleotide
cgacuaucacauaauagac

SEQ ID NO: 54746 - RNA, 19 nt, Artificial Sequence
  Description of Artificial Sequence: Synthetic oligonucleotide
auaaccccuuacuacuaua

SEQ ID NO: 54747 - RNA, 19 nt, Artificial Sequence
  Description of Artificial Sequence: Synthetic oligonucleotide
agaacugcgccgagaagug

SEQ ID NO: 54748 - RNA, 19 nt, Artificial Sequence
  Description of Artificial Sequence: Synthetic oligonucleotide
ugugaucuaaaaggaccau

SEQ ID NO: 54749 - RNA, 19 nt, Artificial Sequence
  Description of Artificial Sequence: Synthetic oligonucleotide
gaccguuaugucacuuaag

SEQ ID NO: 54750 - RNA, 19 nt, Artificial Sequence
  Description of Artificial Sequence: Synthetic oligonucleotide
caggacuuggguaauccaa

SEQ ID NO: 54751 - RNA, 19 nt, Artificial Sequence
  Description of Artificial Sequence: Synthetic oligonucleotide
aggaggcaaccacauauua

SEQ ID NO: 54752 - RNA, 19 nt, Artificial Sequence
  Description of Artificial Sequence: Synthetic oligonucleotide
ucugguuagaguggcgcua

SEQ ID NO: 54753 - RNA, 19 nt, Artificial Sequence
  Description of Artificial Sequence: Synthetic oligonucleotide
auggucggggugaauugcg

SEQ ID NO: 54754 - RNA, 19 nt, Artificial Sequence
  Description of Artificial Sequence: Synthetic oligonucleotide
accagagauuauuguaguu

SEQ ID NO: 54755 - RNA, 19 nt, Artificial Sequence
  Description of Artificial Sequence: Synthetic oligonucleotide
acgacuaaucauaggcugu

SEQ ID NO: 54756 - RNA, 19 nt, Artificial Sequence
  Description of Artificial Sequence: Synthetic oligonucleotide
auccuuagauuuucccaaa

SEQ ID NO: 54757 - RNA, 19 nt, Artificial Sequence
  Description of Artificial Sequence: Synthetic oligonucleotide
uaucggccugucaaauaau

SEQ ID NO: 54758 - RNA, 19 nt, Artificial Sequence
  Description of Artificial Sequence: Synthetic oligonucleotide
ccguuaugucacuuaagag

SEQ ID NO: 54759 - RNA, 19 nt, Artificial Sequence
  Description of Artificial Sequence: Synthetic oligonucleotide
cugcauauucuugccggag

SEQ ID NO: 54760 - RNA, 19 nt, Artificial Sequence
  Description of Artificial Sequence: Synthetic oligonucleotide
gaacugcgccgagaagugg

SEQ ID NO: 54761 - RNA, 19 nt, Artificial Sequence
  Description of Artificial Sequence: Synthetic oligonucleotide
ugccccgccucguagaauu

SEQ ID NO: 54762 - RNA, 19 nt, Artificial Sequence
  Description of Artificial Sequence: Synthetic oligonucleotide
aggcgagguugcugcaaac

SEQ ID NO: 54763 - RNA, 19 nt, Artificial Sequence
  Description of Artificial Sequence: Synthetic oligonucleotide
uucuacacugcagguccug

SEQ ID NO: 54764 - RNA, 19 nt, Artificial Sequence
  Description of Artificial Sequence: Synthetic oligonucleotide
gacgccgcgcccgagcaag

SEQ ID NO: 54765 - RNA, 19 nt, Artificial Sequence
  Description of Artificial Sequence: Synthetic oligonucleotide
cauccgauguuacauggua

SEQ ID NO: 54766 - RNA, 19 nt, Artificial Sequence
  Description of Artificial Sequence: Synthetic oligonucleotide
aucucgagcgaggugaauu

SEQ ID NO: 54767 - RNA, 19 nt, Artificial Sequence
  Description of Artificial Sequence: Synthetic oligonucleotide
ggucugguuagaguggcgc

SEQ ID NO: 54768 - RNA, 19 nt, Artificial Sequence
  Description of Artificial Sequence: Synthetic oligonucleotide
guugaacgugaguuuugga

SEQ ID NO: 54769 - RNA, 19 nt, Artificial Sequence
  Description of Artificial Sequence: Synthetic oligonucleotide
ccccuuacuacuauauauc

SEQ ID NO: 54770 - RNA, 19 nt, Artificial Sequence
  Description of Artificial Sequence: Synthetic oligonucleotide
ggcacugcauuucuacuuc

SEQ ID NO: 54771 - RNA, 19 nt, Artificial Sequence
  Description of Artificial Sequence: Synthetic oligonucleotide
aguuuuggacagccugaau

SEQ ID NO: 54772 - RNA, 19 nt, Artificial Sequence
  Description of Artificial Sequence: Synthetic oligonucleotide
aauuucgaggugacugcuu

SEQ ID NO: 54773 - RNA, 19 nt, Artificial Sequence
  Description of Artificial Sequence: Synthetic oligonucleotide
gugcagaccauccuagagu

SEQ ID NO: 54774 - RNA, 19 nt, Artificial Sequence
  Description of Artificial Sequence: Synthetic oligonucleotide
ccagauaucggccugucaa

SEQ ID NO: 54775 - RNA, 19 nt, Artificial Sequence
  Description of Artificial Sequence: Synthetic oligonucleotide
ggcaaggaucuucgaacag

SEQ ID NO: 54776 - RNA, 19 nt, Artificial Sequence
  Description of Artificial Sequence: Synthetic oligonucleotide
aaccagaacugcgccgaga

SEQ ID NO: 54777 - RNA, 19 nt, Artificial Sequence
  Description of Artificial Sequence: Synthetic oligonucleotide
uggauccaauugaacuaua

SEQ ID NO: 54778 - RNA, 19 nt, Artificial Sequence
  Description of Artificial Sequence: Synthetic oligonucleotide
gcaaugauaccaguucuuc

SEQ ID NO: 54779 - RNA, 19 nt, Artificial Sequence
  Description of Artificial Sequence: Synthetic oligonucleotide
aggacuuggguaauccaaa

SEQ ID NO: 54780 - RNA, 19 nt, Artificial Sequence
  Description of Artificial Sequence: Synthetic oligonucleotide
cagaacugcgccgagaagu

SEQ ID NO: 54781 - RNA, 19 nt, Artificial Sequence
  Description of Artificial Sequence: Synthetic oligonucleotide
gcuuaaaguugaucgacua

SEQ ID NO: 54782 - RNA, 19 nt, Artificial Sequence
  Description of Artificial Sequence: Synthetic oligonucleotide
augucacuuaagagcaaca

SEQ ID NO: 54783 - RNA, 19 nt, Artificial Sequence
  Description of Artificial Sequence: Synthetic oligonucleotide
gcuauaguuuuagcccagg

SEQ ID NO: 54784 - RNA, 19 nt, Artificial Sequence
  Description of Artificial Sequence: Synthetic oligonucleotide
gccucguagaauugcaaga

SEQ ID NO: 54785 - RNA, 19 nt, Artificial Sequence
  Description of Artificial Sequence: Synthetic oligonucleotide
caccuguacagugaguuaa

SEQ ID NO: 54786 - RNA, 19 nt, Artificial Sequence
  Description of Artificial Sequence: Synthetic oligonucleotide
uacuaacagggcacauguu

SEQ ID NO: 54787 - RNA, 19 nt, Artificial Sequence
  Description of Artificial Sequence: Synthetic oligonucleotide
agccugagguugcauucga

SEQ ID NO: 54788 - RNA, 19 nt, Artificial Sequence
  Description of Artificial Sequence: Synthetic oligonucleotide
gagguugcauucgagguau

SEQ ID NO: 54789 - RNA, 19 nt, Artificial Sequence
  Description of Artificial Sequence: Synthetic oligonucleotide
uccgggcuagaaucugcac

SEQ ID NO: 54790 - RNA, 19 nt, Artificial Sequence
  Description of Artificial Sequence: Synthetic oligonucleotide
gcgcuauaguuuuagccca

SEQ ID NO: 54791 - RNA, 19 nt, Artificial Sequence
  Description of Artificial Sequence: Synthetic oligonucleotide
acaccuguacagugaguua

SEQ ID NO: 54792 - RNA, 19 nt, Artificial Sequence
  Description of Artificial Sequence: Synthetic oligonucleotide
cauaugccauuagcgaaca

SEQ ID NO: 54793 - RNA, 19 nt, Artificial Sequence
  Description of Artificial Sequence: Synthetic oligonucleotide
guuuuagcccagguuguaa

SEQ ID NO: 54794 - RNA, 19 nt, Artificial Sequence
  Description of Artificial Sequence: Synthetic oligonucleotide
agguugaacgugaguuuug

SEQ ID NO: 54795 - RNA, 19 nt, Artificial Sequence
  Description of Artificial Sequence: Synthetic oligonucleotide
ggugaauugcguggugaug

SEQ ID NO: 54796 - RNA, 19 nt, Artificial Sequence
  Description of Artificial Sequence: Synthetic oligonucleotide
auccgauguuacaugguau

SEQ ID NO: 54797 - RNA, 19 nt, Artificial Sequence
  Description of Artificial Sequence: Synthetic oligonucleotide
cuauaguuuuagcccaggu

SEQ ID NO: 54798 - RNA, 19 nt, Artificial Sequence
  Description of Artificial Sequence: Synthetic oligonucleotide
gaaagugccccgccucgua

SEQ ID NO: 54799 - RNA, 19 nt, Artificial Sequence
  Description of Artificial Sequence: Synthetic oligonucleotide
aacuugcguguuugauguu

SEQ ID NO: 54800 - RNA, 19 nt, Artificial Sequence
  Description of Artificial Sequence: Synthetic oligonucleotide
ggagaucucgagcgaggug

SEQ ID NO: 54801 - RNA, 19 nt, Artificial Sequence
  Description of Artificial Sequence: Synthetic oligonucleotide
acaugguauuaaagugcug

SEQ ID NO: 54802 - RNA, 19 nt, Artificial Sequence
  Description of Artificial Sequence: Synthetic oligonucleotide
gagauggucggggugaauu

SEQ ID NO: 54803 - RNA, 19 nt, Artificial Sequence
  Description of Artificial Sequence: Synthetic oligonucleotide
gcgagguugcugcaaacga

SEQ ID NO: 54804 - RNA, 19 nt, Artificial Sequence
  Description of Artificial Sequence: Synthetic oligonucleotide
gcaggagaucucgagcgag

SEQ ID NO: 54805 - RNA, 19 nt, Artificial Sequence
  Description of Artificial Sequence: Synthetic oligonucleotide
aucggccugucaaauaaua

SEQ ID NO: 54806 - RNA, 19 nt, Artificial Sequence
  Description of Artificial Sequence: Synthetic oligonucleotide
aguuuuagcccagguugua

SEQ ID NO: 54807 - RNA, 19 nt, Artificial Sequence
  Description of Artificial Sequence: Synthetic oligonucleotide
gcuauugauauugcuggaa

SEQ ID NO: 54808 - RNA, 19 nt, Artificial Sequence
  Description of Artificial Sequence: Synthetic oligonucleotide
agugccccgccucguagaa

SEQ ID NO: 54809 - RNA, 19 nt, Artificial Sequence
  Description of Artificial Sequence: Synthetic oligonucleotide
caaauuagaguuggauggu

SEQ ID NO: 54810 - RNA, 19 nt, Artificial Sequence
  Description of Artificial Sequence: Synthetic oligonucleotide
cauuagguauuugcccaga

SEQ ID NO: 54811 - RNA, 19 nt, Artificial Sequence
  Description of Artificial Sequence: Synthetic oligonucleotide
guuacaucauuuagcuuau

SEQ ID NO: 54812 - RNA, 19 nt, Artificial Sequence
  Description of Artificial Sequence: Synthetic oligonucleotide
auagaccguuaugucacuu

SEQ ID NO: 54813 - RNA, 19 nt, Artificial Sequence
  Description of Artificial Sequence: Synthetic oligonucleotide
gcuugcuucgaggcacugg

SEQ ID NO: 54814 - RNA, 19 nt, Artificial Sequence
  Description of Artificial Sequence: Synthetic oligonucleotide
gccaauauuuuagaucugu

SEQ ID NO: 54815 - RNA, 19 nt, Artificial Sequence
  Description of Artificial Sequence: Synthetic oligonucleotide
ccaguuaguuugcuaauaa

SEQ ID NO: 54816 - RNA, 19 nt, Artificial Sequence
  Description of Artificial Sequence: Synthetic oligonucleotide
ccaaacuaacggacuaaca

SEQ ID NO: 54817 - RNA, 19 nt, Artificial Sequence
  Description of Artificial Sequence: Synthetic oligonucleotide
auaugccauuagcgaacaa

SEQ ID NO: 54818 - RNA, 19 nt, Artificial Sequence
  Description of Artificial Sequence: Synthetic oligonucleotide
cuaucacauaauagaccgu

SEQ ID NO: 54819 - RNA, 19 nt, Artificial Sequence
  Description of Artificial Sequence: Synthetic oligonucleotide
cggcuauagaaauguuugc

SEQ ID NO: 54820 - RNA, 19 nt, Artificial Sequence
  Description of Artificial Sequence: Synthetic oligonucleotide
gguugcugcaaacgacuaa

SEQ ID NO: 54821 - RNA, 19 nt, Artificial Sequence
  Description of Artificial Sequence: Synthetic oligonucleotide
acuaacggacuaacagauu

SEQ ID NO: 54822 - RNA, 19 nt, Artificial Sequence
  Description of Artificial Sequence: Synthetic oligonucleotide
gcugcauauucuugccgga

SEQ ID NO: 54823 - RNA, 19 nt, Artificial Sequence
  Description of Artificial Sequence: Synthetic oligonucleotide
gucugguuagaguggcgcu

SEQ ID NO: 54824 - RNA, 19 nt, Artificial Sequence
  Description of Artificial Sequence: Synthetic oligonucleotide
gcgggaacuugccuggaga

SEQ ID NO: 54825 - RNA, 19 nt, Artificial Sequence
  Description of Artificial Sequence: Synthetic oligonucleotide
cugcgccgagaagugguag

SEQ ID NO: 54826 - RNA, 19 nt, Artificial Sequence
  Description of Artificial Sequence: Synthetic oligonucleotide
cagccugacagucgcucca

SEQ ID NO: 54827 - RNA, 19 nt, Artificial Sequence
  Description of Artificial Sequence: Synthetic oligonucleotide
ugguugccgaagagccaau

SEQ ID NO: 54828 - RNA, 19 nt, Artificial Sequence
  Description of Artificial Sequence: Synthetic oligonucleotide
acggagacaguggcuacuu

SEQ ID NO: 54829 - RNA, 19 nt, Artificial Sequence
  Description of Artificial Sequence: Synthetic oligonucleotide
cucuuuacaaaugggcauu

SEQ ID NO: 54830 - RNA, 19 nt, Artificial Sequence
  Description of Artificial Sequence: Synthetic oligonucleotide
uuacaucauuuagcuuaua

SEQ ID NO: 54831 - RNA, 19 nt, Artificial Sequence
  Description of Artificial Sequence: Synthetic oligonucleotide
acacgccggcccgagccgg

SEQ ID NO: 54832 - RNA, 19 nt, Artificial Sequence
  Description of Artificial Sequence: Synthetic oligonucleotide
caccaaacuaacggacuaa

SEQ ID NO: 54833 - RNA, 19 nt, Artificial Sequence
  Description of Artificial Sequence: Synthetic oligonucleotide
cuugccggagacuuuucuu

SEQ ID NO: 54834 - RNA, 19 nt, Artificial Sequence
  Description of Artificial Sequence: Synthetic oligonucleotide
cauaaccccuuacuacuau

SEQ ID NO: 54835 - RNA, 19 nt, Artificial Sequence
  Description of Artificial Sequence: Synthetic oligonucleotide
uugcguggugauggagaaa

SEQ ID NO: 54836 - RNA, 19 nt, Artificial Sequence
  Description of Artificial Sequence: Synthetic oligonucleotide
uggcauccauuagguauuu

SEQ ID NO: 54837 - RNA, 19 nt, Artificial Sequence
  Description of Artificial Sequence: Synthetic oligonucleotide
cuccaguuaguuugcuaau

SEQ ID NO: 54838 - RNA, 19 nt, Artificial Sequence
  Description of Artificial Sequence: Synthetic oligonucleotide
cugugcaagcuugcuucga

SEQ ID NO: 54839 - RNA, 19 nt, Artificial Sequence
  Description of Artificial Sequence: Synthetic oligonucleotide
cucggccggggcaggccac

SEQ ID NO: 54840 - RNA, 19 nt, Artificial Sequence
  Description of Artificial Sequence: Synthetic oligonucleotide
cgagcaagggguggacacg

SEQ ID NO: 54841 - RNA, 19 nt, Artificial Sequence
  Description of Artificial Sequence: Synthetic oligonucleotide
gggguuuuacaaaccccaa

SEQ ID NO: 54842 - RNA, 19 nt, Artificial Sequence
  Description of Artificial Sequence: Synthetic oligonucleotide
acugcgccgagaaguggua

SEQ ID NO: 54843 - RNA, 19 nt, Artificial Sequence
  Description of Artificial Sequence: Synthetic oligonucleotide
agaccauccuagaguuaua

SEQ ID NO: 54844 - RNA, 19 nt, Artificial Sequence
  Description of Artificial Sequence: Synthetic oligonucleotide
cgggauagguuuggaagac

SEQ ID NO: 54845 - RNA, 19 nt, Artificial Sequence
  Description of Artificial Sequence: Synthetic oligonucleotide
ggugaauuucgaggugacu

SEQ ID NO: 54846 - RNA, 19 nt, Artificial Sequence
  Description of Artificial Sequence: Synthetic oligonucleotide
ggcacauguucaaguccuc

SEQ ID NO: 54847 - RNA, 19 nt, Artificial Sequence
  Description of Artificial Sequence: Synthetic oligonucleotide
cgagcgaggugaauuucga

SEQ ID NO: 54848 - RNA, 19 nt, Artificial Sequence
  Description of Artificial Sequence: Synthetic oligonucleotide
ggggacacucuacuguauu

SEQ ID NO: 54849 - RNA, 19 nt, Artificial Sequence
  Description of Artificial Sequence: Synthetic oligonucleotide
cacggagacaguggcuacu

SEQ ID NO: 54850 - RNA, 19 nt, Artificial Sequence
  Description of Artificial Sequence: Synthetic oligonucleotide
gcgcccgagcaaggggugg

SEQ ID NO: 54851 - RNA, 19 nt, Artificial Sequence
  Description of Artificial Sequence: Synthetic oligonucleotide
cgggcuagaaucugcacau

SEQ ID NO: 54852 - RNA, 19 nt, Artificial Sequence
  Description of Artificial Sequence: Synthetic oligonucleotide
gccggagacuuuucuuccu

SEQ ID NO: 54853 - RNA, 19 nt, Artificial Sequence
  Description of Artificial Sequence: Synthetic oligonucleotide
acgccgcgcccgagcaagg

SEQ ID NO: 54854 - RNA, 19 nt, Artificial Sequence
  Description of Artificial Sequence: Synthetic oligonucleotide
guucggcuauagaaauguu

SEQ ID NO: 54855 - RNA, 19 nt, Artificial Sequence
  Description of Artificial Sequence: Synthetic oligonucleotide
guccgccgcgggccugagc

SEQ ID NO: 54856 - RNA, 19 nt, Artificial Sequence
  Description of Artificial Sequence: Synthetic oligonucleotide
cucuacuaacagggcacau

SEQ ID NO: 54857 - RNA, 19 nt, Artificial Sequence
  Description of Artificial Sequence: Synthetic oligonucleotide
gcguggugauggagaaaac

SEQ ID NO: 54858 - RNA, 19 nt, Artificial Sequence
  Description of Artificial Sequence: Synthetic oligonucleotide
cacgccgcucaccuugguu

SEQ ID NO: 54859 - RNA, 19 nt, Artificial Sequence
  Description of Artificial Sequence: Synthetic oligonucleotide
gaguggcgcuauugauauu

SEQ ID NO: 54860 - RNA, 19 nt, Artificial Sequence
  Description of Artificial Sequence: Synthetic oligonucleotide
gcgccgagaagugguagcu

SEQ ID NO: 54861 - RNA, 19 nt, Artificial Sequence
  Description of Artificial Sequence: Synthetic oligonucleotide
cgcucaccuugguucccag

SEQ ID NO: 54862 - RNA, 19 nt, Artificial Sequence
  Description of Artificial Sequence: Synthetic oligonucleotide
agguugcauucgagguauu

SEQ ID NO: 54863 - RNA, 19 nt, Artificial Sequence
  Description of Artificial Sequence: Synthetic oligonucleotide
cccgccacgccgcucaccu

SEQ ID NO: 54864 - RNA, 19 nt, Artificial Sequence
  Description of Artificial Sequence: Synthetic oligonucleotide
cgcgcccgagcaaggggug

SEQ ID NO: 54865 - RNA, 19 nt, Artificial Sequence
  Description of Artificial Sequence: Synthetic oligonucleotide
ccgcucaccuugguuccca

SEQ ID NO: 54866 - RNA, 19 nt, Artificial Sequence
  Description of Artificial Sequence: Synthetic oligonucleotide
gguccgccgcgggccugag

SEQ ID NO: 54867 - RNA, 19 nt, Artificial Sequence
  Description of Artificial Sequence: Synthetic oligonucleotide
gugccccgccucguagaau

SEQ ID NO: 54868 - RNA, 19 nt, Artificial Sequence
  Description of Artificial Sequence: Synthetic oligonucleotide
cgagucaacuugcguguuu

SEQ ID NO: 54869 - RNA, 19 nt, Artificial Sequence
  Description of Artificial Sequence: Synthetic oligonucleotide
cgcccgagcaaggggugga

SEQ ID NO: 54870 - RNA, 19 nt, Artificial Sequence
  Description of Artificial Sequence: Synthetic oligonucleotide
cgcagcggcucuaccucgu

SEQ ID NO: 54871 - RNA, 19 nt, Artificial Sequence
  Description of Artificial Sequence: Synthetic oligonucleotide
ccgagucaacuugcguguu

SEQ ID NO: 54872 - RNA, 19 nt, Artificial Sequence
  Description of Artificial Sequence: Synthetic oligonucleotide
ccgccacgccgcucaccuu

SEQ ID NO: 54873 - RNA, 19 nt, Artificial Sequence
  Description of Artificial Sequence: Synthetic oligonucleotide
agccuaaucacauauaugc

SEQ ID NO: 54874 - RNA, 19 nt, Artificial Sequence
  Description of Artificial Sequence: Synthetic oligonucleotide
uuugagguuaauaugaggc

SEQ ID NO: 54875 - RNA, 19 nt, Artificial Sequence
  Description of Artificial Sequence: Synthetic oligonucleotide
aaugcuaguaugaaaaucg

SEQ ID NO: 54876 - RNA, 19 nt, Artificial Sequence
  Description of Artificial Sequence: Synthetic oligonucleotide
aagaauauauguguuaugg

SEQ ID NO: 54877 - RNA, 19 nt, Artificial Sequence
  Description of Artificial Sequence: Synthetic oligonucleotide
aagguuaucaguuaaauuu

SEQ ID NO: 54878 - RNA, 19 nt, Artificial Sequence
  Description of Artificial Sequence: Synthetic oligonucleotide
agaacccuaaaucuggucc

SEQ ID NO: 54879 - RNA, 19 nt, Artificial Sequence
  Description of Artificial Sequence: Synthetic oligonucleotide
ugauauuugaucuuuguac

SEQ ID NO: 54880 - RNA, 19 nt, Artificial Sequence
  Description of Artificial Sequence: Synthetic oligonucleotide
aaugagacuaugcagagaa

SEQ ID NO: 54881 - RNA, 19 nt, Artificial Sequence
  Description of Artificial Sequence: Synthetic oligonucleotide
uuuauuaaauaguggagcc

SEQ ID NO: 54882 - RNA, 19 nt, Artificial Sequence
  Description of Artificial Sequence: Synthetic oligonucleotide
cuuguauucagcuaauuag

SEQ ID NO: 54883 - RNA, 19 nt, Artificial Sequence
  Description of Artificial Sequence: Synthetic oligonucleotide
uucuauaauacauugggga

SEQ ID NO: 54884 - RNA, 19 nt, Artificial Sequence
  Description of Artificial Sequence: Synthetic oligonucleotide
cuuaaaacaagcuguacag

SEQ ID NO: 54885 - RNA, 19 nt, Artificial Sequence
  Description of Artificial Sequence: Synthetic oligonucleotide
uuacaguuagcuuuuagcc

SEQ ID NO: 54886 - RNA, 19 nt, Artificial Sequence
  Description of Artificial Sequence: Synthetic oligonucleotide
agcuaauuagguugaaucc

SEQ ID NO: 54887 - RNA, 19 nt, Artificial Sequence
  Description of Artificial Sequence: Synthetic oligonucleotide
auuaguguuacagaauagc

SEQ ID NO: 54888 - RNA, 19 nt, Artificial Sequence
  Description of Artificial Sequence: Synthetic oligonucleotide
guaauauaaagguaaccgg

SEQ ID NO: 54889 - RNA, 19 nt, Artificial Sequence
  Description of Artificial Sequence: Synthetic oligonucleotide
aaacauaucauaucauggu

SEQ ID NO: 54890 - RNA, 19 nt, Artificial Sequence
  Description of Artificial Sequence: Synthetic oligonucleotide
aaacucauaagguuaucag

SEQ ID NO: 54891 - RNA, 19 nt, Artificial Sequence
  Description of Artificial Sequence: Synthetic oligonucleotide
aaaucggugaaacuagucu

SEQ ID NO: 54892 - RNA, 19 nt, Artificial Sequence
  Description of Artificial Sequence: Synthetic oligonucleotide
ugaaaaucggugaaacuag

SEQ ID NO: 54893 - RNA, 19 nt, Artificial Sequence
  Description of Artificial Sequence: Synthetic oligonucleotide
aaugaccugaccuggacug

SEQ ID NO: 54894 - RNA, 19 nt, Artificial Sequence
  Description of Artificial Sequence: Synthetic oligonucleotide
ugguaaaucauauauuuuc

SEQ ID NO: 54895 - RNA, 19 nt, Artificial Sequence
  Description of Artificial Sequence: Synthetic oligonucleotide
augccauuaaguuucaaag

SEQ ID NO: 54896 - RNA, 19 nt, Artificial Sequence
  Description of Artificial Sequence: Synthetic oligonucleotide
gaccuuaucaauuacguga

SEQ ID NO: 54897 - RNA, 19 nt, Artificial Sequence
  Description of Artificial Sequence: Synthetic oligonucleotide
uuaguguuacagaauagca

SEQ ID NO: 54898 - RNA, 19 nt, Artificial Sequence
  Description of Artificial Sequence: Synthetic oligonucleotide
uauugaaguguccucuacg

SEQ ID NO: 54899 - RNA, 19 nt, Artificial Sequence
  Description of Artificial Sequence: Synthetic oligonucleotide
aacucuauuguacuucaug

SEQ ID NO: 54900 - RNA, 19 nt, Artificial Sequence
  Description of Artificial Sequence: Synthetic oligonucleotide
gauauuugaucuuuguaca

SEQ ID NO: 54901 - RNA, 19 nt, Artificial Sequence
  Description of Artificial Sequence: Synthetic oligonucleotide
ucucguguguccaaguggg

SEQ ID NO: 54902 - RNA, 19 nt, Artificial Sequence
  Description of Artificial Sequence: Synthetic oligonucleotide
ucaauuaagaagaacccua

SEQ ID NO: 54903 - RNA, 19 nt, Artificial Sequence
  Description of Artificial Sequence: Synthetic oligonucleotide
aaaacucuauuguacuuca

SEQ ID NO: 54904 - RNA, 19 nt, Artificial Sequence
  Description of Artificial Sequence: Synthetic oligonucleotide
uacagaauagcacaucccu

SEQ ID NO: 54905 - RNA, 19 nt, Artificial Sequence
  Description of Artificial Sequence: Synthetic oligonucleotide
aauuacgugagugacauua

SEQ ID NO: 54906 - RNA, 19 nt, Artificial Sequence
  Description of Artificial Sequence: Synthetic oligonucleotide
guuacagaauagcacaucc

SEQ ID NO: 54907 - RNA, 19 nt, Artificial Sequence
  Description of Artificial Sequence: Synthetic oligonucleotide
aacucauaagguuaucagu

SEQ ID NO: 54908 - RNA, 19 nt, Artificial Sequence
  Description of Artificial Sequence: Synthetic oligonucleotide
aaauaguggagccuuaauu

SEQ ID NO: 54909 - RNA, 19 nt, Artificial Sequence
  Description of Artificial Sequence: Synthetic oligonucleotide
uuuacucauagaagucucg

SEQ ID NO: 54910 - RNA, 19 nt, Artificial Sequence
  Description of Artificial Sequence: Synthetic oligonucleotide
ugacauuagacuguggcag

SEQ ID NO: 54911 - RNA, 19 nt, Artificial Sequence
  Description of Artificial Sequence: Synthetic oligonucleotide
ucuccuuaugaauuuauac

SEQ ID NO: 54912 - RNA, 19 nt, Artificial Sequence
  Description of Artificial Sequence: Synthetic oligonucleotide
auauuugaucuuuguacac

SEQ ID NO: 54913 - RNA, 19 nt, Artificial Sequence
  Description of Artificial Sequence: Synthetic oligonucleotide
uuugaaaacucauaagguu

SEQ ID NO: 54914 - RNA, 19 nt, Artificial Sequence
  Description of Artificial Sequence: Synthetic oligonucleotide
uuuaagcugacaaggguac

SEQ ID NO: 54915 - RNA, 19 nt, Artificial Sequence
  Description of Artificial Sequence: Synthetic oligonucleotide
uguguacacaccagguugg

SEQ ID NO: 54916 - RNA, 19 nt, Artificial Sequence
  Description of Artificial Sequence: Synthetic oligonucleotide
uuuuaagcugacaagggua

SEQ ID NO: 54917 - RNA, 19 nt, Artificial Sequence
  Description of Artificial Sequence: Synthetic oligonucleotide
ugccuauuaacacugugca

SEQ ID NO: 54918 - RNA, 19 nt, Artificial Sequence
  Description of Artificial Sequence: Synthetic oligonucleotide
ucuauuguacuucauggua

SEQ ID NO: 54919 - RNA, 19 nt, Artificial Sequence
  Description of Artificial Sequence: Synthetic oligonucleotide
ugagacuaugcagagaagc

SEQ ID NO: 54920 - RNA, 19 nt, Artificial Sequence
  Description of Artificial Sequence: Synthetic oligonucleotide
aaaggaauuuacaguuagc

SEQ ID NO: 54921 - RNA, 19 nt, Artificial Sequence
  Description of Artificial Sequence: Synthetic oligonucleotide
auaguggagccuuaauuuc

SEQ ID NO: 54922 - RNA, 19 nt, Artificial Sequence
  Description of Artificial Sequence: Synthetic oligonucleotide
uuugguaauaguuguaaua

SEQ ID NO: 54923 - RNA, 19 nt, Artificial Sequence
  Description of Artificial Sequence: Synthetic oligonucleotide
uguuagaucugcuccacca

SEQ ID NO: 54924 - RNA, 19 nt, Artificial Sequence
  Description of Artificial Sequence: Synthetic oligonucleotide
uacaguuagcuuuuagccc

SEQ ID NO: 54925 - RNA, 19 nt, Artificial Sequence
  Description of Artificial Sequence: Synthetic oligonucleotide
uuuaaacccaccuuuucaa

SEQ ID NO: 54926 - RNA, 19 nt, Artificial Sequence
  Description of Artificial Sequence: Synthetic oligonucleotide
agauauagcaaacaagcuu

SEQ ID NO: 54927 - RNA, 19 nt, Artificial Sequence
  Description of Artificial Sequence: Synthetic oligonucleotide
uguauucagcuaauuaggu

SEQ ID NO: 54928 - RNA, 19 nt, Artificial Sequence
  Description of Artificial Sequence: Synthetic oligonucleotide
uauaccaaucaaacacuag

SEQ ID NO: 54929 - RNA, 19 nt, Artificial Sequence
  Description of Artificial Sequence: Synthetic oligonucleotide
agaaacaauuauaacuagg

SEQ ID NO: 54930 - RNA, 19 nt, Artificial Sequence
  Description of Artificial Sequence: Synthetic oligonucleotide
cacaauuuuagagugugcc

SEQ ID NO: 54931 - RNA, 19 nt, Artificial Sequence
  Description of Artificial Sequence: Synthetic oligonucleotide
agaagaacccuaaaucugg

SEQ ID NO: 54932 - RNA, 19 nt, Artificial Sequence
  Description of Artificial Sequence: Synthetic oligonucleotide
aguguuauuuauaccaauc

SEQ ID NO: 54933 - RNA, 19 nt, Artificial Sequence
  Description of Artificial Sequence: Synthetic oligonucleotide
aguauuugccucaaaugac

SEQ ID NO: 54934 - RNA, 19 nt, Artificial Sequence
  Description of Artificial Sequence: Synthetic oligonucleotide
aaucggugaaacuagucua

SEQ ID NO: 54935 - RNA, 19 nt, Artificial Sequence
  Description of Artificial Sequence: Synthetic oligonucleotide
auuuugagcuccaagccac

SEQ ID NO: 54936 - RNA, 19 nt, Artificial Sequence
  Description of Artificial Sequence: Synthetic oligonucleotide
acgcuuuuaaguauuugcc

SEQ ID NO: 54937 - RNA, 19 nt, Artificial Sequence
  Description of Artificial Sequence: Synthetic oligonucleotide
uccuaaacuucaaauaaua

SEQ ID NO: 54938 - RNA, 19 nt, Artificial Sequence
  Description of Artificial Sequence: Synthetic oligonucleotide
uuacucauagaagucucgg

SEQ ID NO: 54939 - RNA, 19 nt, Artificial Sequence
  Description of Artificial Sequence: Synthetic oligonucleotide
auuagacuguggcagagca

SEQ ID NO: 54940 - RNA, 19 nt, Artificial Sequence
  Description of Artificial Sequence: Synthetic oligonucleotide
cacacuaucaggugacucc

SEQ ID NO: 54941 - RNA, 19 nt, Artificial Sequence
  Description of Artificial Sequence: Synthetic oligonucleotide
aagaacccuaaaucugguc

SEQ ID NO: 54942 - RNA, 19 nt, Artificial Sequence
  Description of Artificial Sequence: Synthetic oligonucleotide
uucgcauuucccuucgaag

SEQ ID NO: 54943 - RNA, 19 nt, Artificial Sequence
  Description of Artificial Sequence: Synthetic oligonucleotide
aaaaucggugaaacuaguc

SEQ ID NO: 54944 - RNA, 19 nt, Artificial Sequence
  Description of Artificial Sequence: Synthetic oligonucleotide
cagcuaauuagguugaauc

SEQ ID NO: 54945 - RNA, 19 nt, Artificial Sequence
  Description of Artificial Sequence: Synthetic oligonucleotide
ugaccgaagguuccagugg

SEQ ID NO: 54946 - RNA, 19 nt, Artificial Sequence
  Description of Artificial Sequence: Synthetic oligonucleotide
uacgugagugacauuagac

SEQ ID NO: 54947 - RNA, 19 nt, Artificial Sequence
  Description of Artificial Sequence: Synthetic oligonucleotide
aagcaucuuacacucccag

SEQ ID NO: 54948 - RNA, 19 nt, Artificial Sequence
  Description of Artificial Sequence: Synthetic oligonucleotide
ugaugacaagcuauggacu

SEQ ID NO: 54949 - RNA, 19 nt, Artificial Sequence
  Description of Artificial Sequence: Synthetic oligonucleotide
uggacaaacuucuugggau

SEQ ID NO: 54950 - RNA, 19 nt, Artificial Sequence
  Description of Artificial Sequence: Synthetic oligonucleotide
uugagguuaauaugaggca

SEQ ID NO: 54951 - RNA, 19 nt, Artificial Sequence
  Description of Artificial Sequence: Synthetic oligonucleotide
ggaucuuuagcuaaaauca

SEQ ID NO: 54952 - RNA, 19 nt, Artificial Sequence
  Description of Artificial Sequence: Synthetic oligonucleotide
uaccauaggacagauuuug

SEQ ID NO: 54953 - RNA, 19 nt, Artificial Sequence
  Description of Artificial Sequence: Synthetic oligonucleotide
auuauaacuaggguaacaa

SEQ ID NO: 54954 - RNA, 19 nt, Artificial Sequence
  Description of Artificial Sequence: Synthetic oligonucleotide
uuauaacuaggguaacaac

SEQ ID NO: 54955 - RNA, 19 nt, Artificial Sequence
  Description of Artificial Sequence: Synthetic oligonucleotide
augaaaaucggugaaacua

SEQ ID NO: 54956 - RNA, 19 nt, Artificial Sequence
  Description of Artificial Sequence: Synthetic oligonucleotide
auuugcaagacacauucuu

SEQ ID NO: 54957 - RNA, 19 nt, Artificial Sequence
  Description of Artificial Sequence: Synthetic oligonucleotide
ugacucauuacuugacuga

SEQ ID NO: 54958 - RNA, 19 nt, Artificial Sequence
  Description of Artificial Sequence: Synthetic oligonucleotide
auucuauaauacauugggg

SEQ ID NO: 54959 - RNA, 19 nt, Artificial Sequence
  Description of Artificial Sequence: Synthetic oligonucleotide
cuuuugagguuaauaugag

SEQ ID NO: 54960 - RNA, 19 nt, Artificial Sequence
  Description of Artificial Sequence: Synthetic oligonucleotide
ucuaaugagauaggaacaa

SEQ ID NO: 54961 - RNA, 19 nt, Artificial Sequence
  Description of Artificial Sequence: Synthetic oligonucleotide
cuguguacacaccagguug

SEQ ID NO: 54962 - RNA, 19 nt, Artificial Sequence
  Description of Artificial Sequence: Synthetic oligonucleotide
uuuggugaccgaagguucc

SEQ ID NO: 54963 - RNA, 19 nt, Artificial Sequence
  Description of Artificial Sequence: Synthetic oligonucleotide
ucacauauuauguggugaa

SEQ ID NO: 54964 - RNA, 19 nt, Artificial Sequence
  Description of Artificial Sequence: Synthetic oligonucleotide
aauucaggagaugaacagu

SEQ ID NO: 54965 - RNA, 19 nt, Artificial Sequence
  Description of Artificial Sequence: Synthetic oligonucleotide
ugugugaagucaaugccau

SEQ ID NO: 54966 - RNA, 19 nt, Artificial Sequence
  Description of Artificial Sequence: Synthetic oligonucleotide
aaguuacauucugaacccc

SEQ ID NO: 54967 - RNA, 19 nt, Artificial Sequence
  Description of Artificial Sequence: Synthetic oligonucleotide
auaccgggaaugaaaagac

SEQ ID NO: 54968 - RNA, 19 nt, Artificial Sequence
  Description of Artificial Sequence: Synthetic oligonucleotide
cuagaacccaaucuuauga

SEQ ID NO: 54969 - RNA, 19 nt, Artificial Sequence
  Description of Artificial Sequence: Synthetic oligonucleotide
acgugagugacauuagacu

SEQ ID NO: 54970 - RNA, 19 nt, Artificial Sequence
  Description of Artificial Sequence: Synthetic oligonucleotide
uaggaucuagccuaaucac

SEQ ID NO: 54971 - RNA, 19 nt, Artificial Sequence
  Description of Artificial Sequence: Synthetic oligonucleotide
cacuuugugggcuaaugac

SEQ ID NO: 54972 - RNA, 19 nt, Artificial Sequence
  Description of Artificial Sequence: Synthetic oligonucleotide
aaguucuaaugagauagga

SEQ ID NO: 54973 - RNA, 19 nt, Artificial Sequence
  Description of Artificial Sequence: Synthetic oligonucleotide
aagauauagcaaacaagcu

SEQ ID NO: 54974 - RNA, 19 nt, Artificial Sequence
  Description of Artificial Sequence: Synthetic oligonucleotide
ucauuacuugacugaaaca

SEQ ID NO: 54975 - RNA, 19 nt, Artificial Sequence
  Description of Artificial Sequence: Synthetic oligonucleotide
uuauggacucauucauugc

SEQ ID NO: 54976 - RNA, 19 nt, Artificial Sequence
  Description of Artificial Sequence: Synthetic oligonucleotide
uauuagugugucaauucua

SEQ ID NO: 54977 - RNA, 19 nt, Artificial Sequence
  Description of Artificial Sequence: Synthetic oligonucleotide
aaccuuucuacugcaaaca

SEQ ID NO: 54978 - RNA, 19 nt, Artificial Sequence
  Description of Artificial Sequence: Synthetic oligonucleotide
guaauucacuaguuugcag

SEQ ID NO: 54979 - RNA, 19 nt, Artificial Sequence
  Description of Artificial Sequence: Synthetic oligonucleotide
guaugaaaaucggugaaac

SEQ ID NO: 54980 - RNA, 19 nt, Artificial Sequence
  Description of Artificial Sequence: Synthetic oligonucleotide
ugcuaguaugaaaaucggu

SEQ ID NO: 54981 - RNA, 19 nt, Artificial Sequence
  Description of Artificial Sequence: Synthetic oligonucleotide
uuguaauacuaggaaauaa

SEQ ID NO: 54982 - RNA, 19 nt, Artificial Sequence
  Description of Artificial Sequence: Synthetic oligonucleotide
uaaugaccugaccuggacu

SEQ ID NO: 54983 - RNA, 19 nt, Artificial Sequence
  Description of Artificial Sequence: Synthetic oligonucleotide
caaccuuucuacugcaaac

SEQ ID NO: 54984 - RNA, 19 nt, Artificial Sequence
  Description of Artificial Sequence: Synthetic oligonucleotide
uuacgugagugacauuaga

SEQ ID NO: 54985 - RNA, 19 nt, Artificial Sequence
  Description of Artificial Sequence: Synthetic oligonucleotide
uagccuaaucacauauaug

SEQ ID NO: 54986 - RNA, 19 nt, Artificial Sequence
  Description of Artificial Sequence: Synthetic oligonucleotide
aguccuuugguaauaguug

SEQ ID NO: 54987 - RNA, 19 nt, Artificial Sequence
  Description of Artificial Sequence: Synthetic oligonucleotide
ugaccuuaucaauuacgug

SEQ ID NO: 54988 - RNA, 19 nt, Artificial Sequence
  Description of Artificial Sequence: Synthetic oligonucleotide
uucgaagauggcauuuuaa

SEQ ID NO: 54989 - RNA, 19 nt, Artificial Sequence
  Description of Artificial Sequence: Synthetic oligonucleotide
aucuagccuaaucacauau

SEQ ID NO: 54990 - RNA, 19 nt, Artificial Sequence
  Description of Artificial Sequence: Synthetic oligonucleotide
gcuuauugauacaaaagcc

SEQ ID NO: 54991 - RNA, 19 nt, Artificial Sequence
  Description of Artificial Sequence: Synthetic oligonucleotide
uggcaauacugauauuuga

SEQ ID NO: 54992 - RNA, 19 nt, Artificial Sequence
  Description of Artificial Sequence: Synthetic oligonucleotide
auauaaagguaaccgggaa

SEQ ID NO: 54993 - RNA, 19 nt, Artificial Sequence
  Description of Artificial Sequence: Synthetic oligonucleotide
ugguaauaguuguaauacu

SEQ ID NO: 54994 - RNA, 19 nt, Artificial Sequence
  Description of Artificial Sequence: Synthetic oligonucleotide
auaauccaccuguuauuag

SEQ ID NO: 54995 - RNA, 19 nt, Artificial Sequence
  Description of Artificial Sequence: Synthetic oligonucleotide
uaugcaugacauuugccuu

SEQ ID NO: 54996 - RNA, 19 nt, Artificial Sequence
  Description of Artificial Sequence: Synthetic oligonucleotide
ugagguuaauaugaggcau

SEQ ID NO: 54997 - RNA, 19 nt, Artificial Sequence
  Description of Artificial Sequence: Synthetic oligonucleotide
gggacauuuagauaaaucu

SEQ ID NO: 54998 - RNA, 19 nt, Artificial Sequence
  Description of Artificial Sequence: Synthetic oligonucleotide
acucaaucaacuaccacca

SEQ ID NO: 54999 - RNA, 19 nt, Artificial Sequence
  Description of Artificial Sequence: Synthetic oligonucleotide
caauacugauauuugaucu

SEQ ID NO: 55000 - RNA, 19 nt, Artificial Sequence
  Description of Artificial Sequence: Synthetic oligonucleotide
gaucuguaaacacguguuc

SEQ ID NO: 55001 - RNA, 19 nt, Artificial Sequence
  Description of Artificial Sequence: Synthetic oligonucleotide
uggucagcuccgaagaaaa

SEQ ID NO: 55002 - RNA, 19 nt, Artificial Sequence
  Description of Artificial Sequence: Synthetic oligonucleotide
uuaggacauacaguuaaaa

SEQ ID NO: 55003 - RNA, 19 nt, Artificial Sequence
  Description of Artificial Sequence: Synthetic oligonucleotide
acaaggaguacaaaacaca

SEQ ID NO: 55004 - RNA, 19 nt, Artificial Sequence
  Description of Artificial Sequence: Synthetic oligonucleotide
accuuaucaauuacgugag

SEQ ID NO: 55005 - RNA, 19 nt, Artificial Sequence
  Description of Artificial Sequence: Synthetic oligonucleotide
uuaaguggucucuucucaa

SEQ ID NO: 55006 - RNA, 19 nt, Artificial Sequence
  Description of Artificial Sequence: Synthetic oligonucleotide
cauaccgggaaugaaaaga

SEQ ID NO: 55007 - RNA, 19 nt, Artificial Sequence
  Description of Artificial Sequence: Synthetic oligonucleotide
uaaacacguguucugugua

SEQ ID NO: 55008 - RNA, 19 nt, Artificial Sequence
  Description of Artificial Sequence: Synthetic oligonucleotide
agaaaugguaaaucauaua

SEQ ID NO: 55009 - RNA, 19 nt, Artificial Sequence
  Description of Artificial Sequence: Synthetic oligonucleotide
uuuuagcccucuugggaca

SEQ ID NO: 55010 - RNA, 19 nt, Artificial Sequence
  Description of Artificial Sequence: Synthetic oligonucleotide
auuagugugucaauucuau

SEQ ID NO: 55011 - RNA, 19 nt, Artificial Sequence
  Description of Artificial Sequence: Synthetic oligonucleotide
uggugucuccuuaugaauu

SEQ ID NO: 55012 - RNA, 19 nt, Artificial Sequence
  Description of Artificial Sequence: Synthetic oligonucleotide
cuaaugagauaggaacaag

SEQ ID NO: 55013 - RNA, 19 nt, Artificial Sequence
  Description of Artificial Sequence: Synthetic oligonucleotide
uuuauacccuuuacaguuu

SEQ ID NO: 55014 - RNA, 19 nt, Artificial Sequence
  Description of Artificial Sequence: Synthetic oligonucleotide
ugugcucaagcaucuuaca

SEQ ID NO: 55015 - RNA, 19 nt, Artificial Sequence
  Description of Artificial Sequence: Synthetic oligonucleotide
cuaaugaccugaccuggac

SEQ ID NO: 55016 - RNA, 19 nt, Artificial Sequence
  Description of Artificial Sequence: Synthetic oligonucleotide
uguccucuacgcuucccag

SEQ ID NO: 55017 - RNA, 19 nt, Artificial Sequence
  Description of Artificial Sequence: Synthetic oligonucleotide
acaggggccacaauuuuag

SEQ ID NO: 55018 - RNA, 19 nt, Artificial Sequence
  Description of Artificial Sequence: Synthetic oligonucleotide
uugcacguuucuucuuuag

SEQ ID NO: 55019 - RNA, 19 nt, Artificial Sequence
  Description of Artificial Sequence: Synthetic oligonucleotide
ucuagccuaaucacauaua

SEQ ID NO: 55020 - RNA, 19 nt, Artificial Sequence
  Description of Artificial Sequence: Synthetic oligonucleotide
augcuaguaugaaaaucgg

SEQ ID NO: 55021 - RNA, 19 nt, Artificial Sequence
  Description of Artificial Sequence: Synthetic oligonucleotide
aucugacucauuacuugac

SEQ ID NO: 55022 - RNA, 19 nt, Artificial Sequence
  Description of Artificial Sequence: Synthetic oligonucleotide
gacuuaugcaugacauuug

SEQ ID NO: 55023 - RNA, 19 nt, Artificial Sequence
  Description of Artificial Sequence: Synthetic oligonucleotide
guauugaaguguccucuac

SEQ ID NO: 55024 - RNA, 19 nt, Artificial Sequence
  Description of Artificial Sequence: Synthetic oligonucleotide
aacccuaaaucugguccag

SEQ ID NO: 55025 - RNA, 19 nt, Artificial Sequence
  Description of Artificial Sequence: Synthetic oligonucleotide
ucuacgcuucccagaauau

SEQ ID NO: 55026 - RNA, 19 nt, Artificial Sequence
  Description of Artificial Sequence: Synthetic oligonucleotide
uuaccauaggacagauuuu

SEQ ID NO: 55027 - RNA, 19 nt, Artificial Sequence
  Description of Artificial Sequence: Synthetic oligonucleotide
gcauuuaugauuucaacau

SEQ ID NO: 55028 - RNA, 19 nt, Artificial Sequence
  Description of Artificial Sequence: Synthetic oligonucleotide
uuccaguauugaagugucc

SEQ ID NO: 55029 - RNA, 19 nt, Artificial Sequence
  Description of Artificial Sequence: Synthetic oligonucleotide
gguaauaguuguaauacua

SEQ ID NO: 55030 - RNA, 19 nt, Artificial Sequence
  Description of Artificial Sequence: Synthetic oligonucleotide
ggacaaggaguacaaaaca

SEQ ID NO: 55031 - RNA, 19 nt, Artificial Sequence
  Description of Artificial Sequence: Synthetic oligonucleotide
aguauugaaguguccucua

SEQ ID NO: 55032 - RNA, 19 nt, Artificial Sequence
  Description of Artificial Sequence: Synthetic oligonucleotide
gaccgaagguuccagugga

SEQ ID NO: 55033 - RNA, 19 nt, Artificial Sequence
  Description of Artificial Sequence: Synthetic oligonucleotide
cauaagguuaucaguuaaa

SEQ ID NO: 55034 - RNA, 19 nt, Artificial Sequence
  Description of Artificial Sequence: Synthetic oligonucleotide
auuacgugagugacauuag

SEQ ID NO: 55035 - RNA, 19 nt, Artificial Sequence
  Description of Artificial Sequence: Synthetic oligonucleotide
agcaucuuacacucccaga

SEQ ID NO: 55036 - RNA, 19 nt, Artificial Sequence
  Description of Artificial Sequence: Synthetic oligonucleotide
gguuaucaguuaaauuuag

SEQ ID NO: 55037 - RNA, 19 nt, Artificial Sequence
  Description of Artificial Sequence: Synthetic oligonucleotide
uaccgggaaugaaaagacu

SEQ ID NO: 55038 - RNA, 19 nt, Artificial Sequence
  Description of Artificial Sequence: Synthetic oligonucleotide
aauuuaggacauacaguua

SEQ ID NO: 55039 - RNA, 19 nt, Artificial Sequence
  Description of Artificial Sequence: Synthetic oligonucleotide
acauguggauugcuuucug

SEQ ID NO: 55040 - RNA, 19 nt, Artificial Sequence
  Description of Artificial Sequence: Synthetic oligonucleotide
guaaacacguguucugugu

SEQ ID NO: 55041 - RNA, 19 nt, Artificial Sequence
  Description of Artificial Sequence: Synthetic oligonucleotide
ucagcuaauuagguugaau

SEQ ID NO: 55042 - RNA, 19 nt, Artificial Sequence
  Description of Artificial Sequence: Synthetic oligonucleotide
ugacccugcuuugucagcu

SEQ ID NO: 55043 - RNA, 19 nt, Artificial Sequence
  Description of Artificial Sequence: Synthetic oligonucleotide
cagaauagcacaucccugu

SEQ ID NO: 55044 - RNA, 19 nt, Artificial Sequence
  Description of Artificial Sequence: Synthetic oligonucleotide
auucagcuaauuagguuga

SEQ ID NO: 55045 - RNA, 19 nt, Artificial Sequence
  Description of Artificial Sequence: Synthetic oligonucleotide
ugguaaaagacugcucauu

SEQ ID NO: 55046 - RNA, 19 nt, Artificial Sequence
  Description of Artificial Sequence: Synthetic oligonucleotide
cugcauguuaaguggucuc

SEQ ID NO: 55047 - RNA, 19 nt, Artificial Sequence
  Description of Artificial Sequence: Synthetic oligonucleotide
gggccacaauuuuagagug

SEQ ID NO: 55048 - RNA, 19 nt, Artificial Sequence
  Description of Artificial Sequence: Synthetic oligonucleotide
ucauugccgcacaucacuu

SEQ ID NO: 55049 - RNA, 19 nt, Artificial Sequence
  Description of Artificial Sequence: Synthetic oligonucleotide
augaccugaccuggacugc

SEQ ID NO: 55050 - RNA, 19 nt, Artificial Sequence
  Description of Artificial Sequence: Synthetic oligonucleotide
ugcaguaaacuagcuugcu

SEQ ID NO: 55051 - RNA, 19 nt, Artificial Sequence
  Description of Artificial Sequence: Synthetic oligonucleotide
aggcaaaguaaaguucuga

SEQ ID NO: 55052 - RNA, 19 nt, Artificial Sequence
  Description of Artificial Sequence: Synthetic oligonucleotide
cucggccucuaagagacag

SEQ ID NO: 55053 - RNA, 19 nt, Artificial Sequence
  Description of Artificial Sequence: Synthetic oligonucleotide
uuugcacguuucuucuuua

SEQ ID NO: 55054 - RNA, 19 nt, Artificial Sequence
  Description of Artificial Sequence: Synthetic oligonucleotide
cuagccuaaucacauauau

SEQ ID NO: 55055 - RNA, 19 nt, Artificial Sequence
  Description of Artificial Sequence: Synthetic oligonucleotide
cauuagacuguggcagagc

SEQ ID NO: 55056 - RNA, 19 nt, Artificial Sequence
  Description of Artificial Sequence: Synthetic oligonucleotide
ccuaaucacauauaugcaa

SEQ ID NO: 55057 - RNA, 19 nt, Artificial Sequence
  Description of Artificial Sequence: Synthetic oligonucleotide
gagagguaugcaagccucc

SEQ ID NO: 55058 - RNA, 19 nt, Artificial Sequence
  Description of Artificial Sequence: Synthetic oligonucleotide
aauugccuauuaacacugu

SEQ ID NO: 55059 - RNA, 19 nt, Artificial Sequence
  Description of Artificial Sequence: Synthetic oligonucleotide
aaaucaccauacaccuaca

SEQ ID NO: 55060 - RNA, 19 nt, Artificial Sequence
  Description of Artificial Sequence: Synthetic oligonucleotide
uccuguccuugaaauuagu

SEQ ID NO: 55061 - RNA, 19 nt, Artificial Sequence
  Description of Artificial Sequence: Synthetic oligonucleotide
aguguccagaccagcaaca

SEQ ID NO: 55062 - RNA, 19 nt, Artificial Sequence
  Description of Artificial Sequence: Synthetic oligonucleotide
gugaccuuaucaauuacgu

SEQ ID NO: 55063 - RNA, 19 nt, Artificial Sequence
  Description of Artificial Sequence: Synthetic oligonucleotide
ugcuuguagcaguggguaa

SEQ ID NO: 55064 - RNA, 19 nt, Artificial Sequence
  Description of Artificial Sequence: Synthetic oligonucleotide
accuguuauuaguguguca

SEQ ID NO: 55065 - RNA, 19 nt, Artificial Sequence
  Description of Artificial Sequence: Synthetic oligonucleotide
cucauaagguuaucaguua

SEQ ID NO: 55066 - RNA, 19 nt, Artificial Sequence
  Description of Artificial Sequence: Synthetic oligonucleotide
aguggugcucaguauccuu

SEQ ID NO: 55067 - RNA, 19 nt, Artificial Sequence
  Description of Artificial Sequence: Synthetic oligonucleotide
uccccuccuuaacagguua

SEQ ID NO: 55068 - RNA, 19 nt, Artificial Sequence
  Description of Artificial Sequence: Synthetic oligonucleotide
gccuauuaacacugugcag

SEQ ID NO: 55069 - RNA, 19 nt, Artificial Sequence
  Description of Artificial Sequence: Synthetic oligonucleotide
agguuaauaugaggcauuu

SEQ ID NO: 55070 - RNA, 19 nt, Artificial Sequence
  Description of Artificial Sequence: Synthetic oligonucleotide
auacaccuacagucugugu

SEQ ID NO: 55071 - RNA, 19 nt, Artificial Sequence
  Description of Artificial Sequence: Synthetic oligonucleotide
gcccucuugggacauuuag

SEQ ID NO: 55072 - RNA, 19 nt, Artificial Sequence
  Description of Artificial Sequence: Synthetic oligonucleotide
aucggugaaacuagucuaa

SEQ ID NO: 55073 - RNA, 19 nt, Artificial Sequence
  Description of Artificial Sequence: Synthetic oligonucleotide
cucuuauggacucauucau

SEQ ID NO: 55074 - RNA, 19 nt, Artificial Sequence
  Description of Artificial Sequence: Synthetic oligonucleotide
gaaaaucggugaaacuagu

SEQ ID NO: 55075 - RNA, 19 nt, Artificial Sequence
  Description of Artificial Sequence: Synthetic oligonucleotide
ucggugaaacuagucuaaa

SEQ ID NO: 55076 - RNA, 19 nt, Artificial Sequence
  Description of Artificial Sequence: Synthetic oligonucleotide
cuggcuaauagguacuuuu

SEQ ID NO: 55077 - RNA, 19 nt, Artificial Sequence
  Description of Artificial Sequence: Synthetic oligonucleotide
cauacaggggccacaauuu

SEQ ID NO: 55078 - RNA, 19 nt, Artificial Sequence
  Description of Artificial Sequence: Synthetic oligonucleotide
cuucgcauuucccuucgaa

SEQ ID NO: 55079 - RNA, 19 nt, Artificial Sequence
  Description of Artificial Sequence: Synthetic oligonucleotide
ucacuggacccugcauugc

SEQ ID NO: 55080 - RNA, 19 nt, Artificial Sequence
  Description of Artificial Sequence: Synthetic oligonucleotide
ggggccacaauuuuagagu

SEQ ID NO: 55081 - RNA, 19 nt, Artificial Sequence
  Description of Artificial Sequence: Synthetic oligonucleotide
auuaaauaguggagccuua

SEQ ID NO: 55082 - RNA, 19 nt, Artificial Sequence
  Description of Artificial Sequence: Synthetic oligonucleotide
caccuguuauuaguguguc

SEQ ID NO: 55083 - RNA, 19 nt, Artificial Sequence
  Description of Artificial Sequence: Synthetic oligonucleotide
uuuagcccucuugggacau

SEQ ID NO: 55084 - RNA, 19 nt, Artificial Sequence
  Description of Artificial Sequence: Synthetic oligonucleotide
gcauaccgggaaugaaaag

SEQ ID NO: 55085 - RNA, 19 nt, Artificial Sequence
  Description of Artificial Sequence: Synthetic oligonucleotide
ccaguauugaaguguccuc

SEQ ID NO: 55086 - RNA, 19 nt, Artificial Sequence
  Description of Artificial Sequence: Synthetic oligonucleotide
accggggagaggucuucug

SEQ ID NO: 55087 - RNA, 19 nt, Artificial Sequence
  Description of Artificial Sequence: Synthetic oligonucleotide
cucuagaacccaaucuuau

SEQ ID NO: 55088 - RNA, 19 nt, Artificial Sequence
  Description of Artificial Sequence: Synthetic oligonucleotide
ucuggcuaauagguacuuu

SEQ ID NO: 55089 - RNA, 19 nt, Artificial Sequence
  Description of Artificial Sequence: Synthetic oligonucleotide
ccacaauuuuagagugugc

SEQ ID NO: 55090 - RNA, 19 nt, Artificial Sequence
  Description of Artificial Sequence: Synthetic oligonucleotide
ccaaucuuaugaggcaaag

SEQ ID NO: 55091 - RNA, 19 nt, Artificial Sequence
  Description of Artificial Sequence: Synthetic oligonucleotide
agcaaaccacauguggauu

SEQ ID NO: 55092 - RNA, 19 nt, Artificial Sequence
  Description of Artificial Sequence: Synthetic oligonucleotide
caguauugaaguguccucu

SEQ ID NO: 55093 - RNA, 19 nt, Artificial Sequence
  Description of Artificial Sequence: Synthetic oligonucleotide
caccauacaccuacagucu

SEQ ID NO: 55094 - RNA, 19 nt, Artificial Sequence
  Description of Artificial Sequence: Synthetic oligonucleotide
gaagaacccuaaaucuggu

SEQ ID NO: 55095 - RNA, 19 nt, Artificial Sequence
  Description of Artificial Sequence: Synthetic oligonucleotide
ccuuucuacugcaaacaca

SEQ ID NO: 55096 - RNA, 19 nt, Artificial Sequence
  Description of Artificial Sequence: Synthetic oligonucleotide
gcucuaacugagaguauac

SEQ ID NO: 55097 - RNA, 19 nt, Artificial Sequence
  Description of Artificial Sequence: Synthetic oligonucleotide
aguggagccuuaauuucuu

SEQ ID NO: 55098 - RNA, 19 nt, Artificial Sequence
  Description of Artificial Sequence: Synthetic oligonucleotide
guuuuaggaucuagccuaa

SEQ ID NO: 55099 - RNA, 19 nt, Artificial Sequence
  Description of Artificial Sequence: Synthetic oligonucleotide
augacaagcuauggacuua

SEQ ID NO: 55100 - RNA, 19 nt, Artificial Sequence
  Description of Artificial Sequence: Synthetic oligonucleotide
aucacccauccggaaguca

SEQ ID NO: 55101 - RNA, 19 nt, Artificial Sequence
  Description of Artificial Sequence: Synthetic oligonucleotide
ggcaauacugauauuugau

SEQ ID NO: 55102 - RNA, 19 nt, Artificial Sequence
  Description of Artificial Sequence: Synthetic oligonucleotide
ggaucuagccuaaucacau

SEQ ID NO: 55103 - RNA, 19 nt, Artificial Sequence
  Description of Artificial Sequence: Synthetic oligonucleotide
ucccuucgaagauggcauu

SEQ ID NO: 55104 - RNA, 19 nt, Artificial Sequence
  Description of Artificial Sequence: Synthetic oligonucleotide
cacauauuauguggugaaa

SEQ ID NO: 55105 - RNA, 19 nt, Artificial Sequence
  Description of Artificial Sequence: Synthetic oligonucleotide
gagguuaauaugaggcauu

SEQ ID NO: 55106 - RNA, 19 nt, Artificial Sequence
  Description of Artificial Sequence: Synthetic oligonucleotide
gccuaaucacauauaugca

SEQ ID NO: 55107 - RNA, 19 nt, Artificial Sequence
  Description of Artificial Sequence: Synthetic oligonucleotide
gucuccuuaugaauuuaua

SEQ ID NO: 55108 - RNA, 19 nt, Artificial Sequence
  Description of Artificial Sequence: Synthetic oligonucleotide
guagaugacccugcuuugu

SEQ ID NO: 55109 - RNA, 19 nt, Artificial Sequence
  Description of Artificial Sequence: Synthetic oligonucleotide
cauuugcaagacacauucu

SEQ ID NO: 55110 - RNA, 19 nt, Artificial Sequence
  Description of Artificial Sequence: Synthetic oligonucleotide
caaucuuaugaggcaaagu

SEQ ID NO: 55111 - RNA, 19 nt, Artificial Sequence
  Description of Artificial Sequence: Synthetic oligonucleotide
cccuccuuaacagguuagg

SEQ ID NO: 55112 - RNA, 19 nt, Artificial Sequence
  Description of Artificial Sequence: Synthetic oligonucleotide
gcuuacuuccugguauuuc

SEQ ID NO: 55113 - RNA, 19 nt, Artificial Sequence
  Description of Artificial Sequence: Synthetic oligonucleotide
ggaucuguaaacacguguu

SEQ ID NO: 55114 - RNA, 19 nt, Artificial Sequence
  Description of Artificial Sequence: Synthetic oligonucleotide
ccacuuugugggcuaauga

SEQ ID NO: 55115 - RNA, 19 nt, Artificial Sequence
  Description of Artificial Sequence: Synthetic oligonucleotide
aggaagcuugagagaagaa

SEQ ID NO: 55116 - RNA, 19 nt, Artificial Sequence
  Description of Artificial Sequence: Synthetic oligonucleotide
agcuuacuuccugguauuu

SEQ ID NO: 55117 - RNA, 19 nt, Artificial Sequence
  Description of Artificial Sequence: Synthetic oligonucleotide
ccgggaaugaaaagacuaa

SEQ ID NO: 55118 - RNA, 19 nt, Artificial Sequence
  Description of Artificial Sequence: Synthetic oligonucleotide
cucguguguccaaguggga

SEQ ID NO: 55119 - RNA, 19 nt, Artificial Sequence
  Description of Artificial Sequence: Synthetic oligonucleotide
augugccauugaacaguag

SEQ ID NO: 55120 - RNA, 19 nt, Artificial Sequence
  Description of Artificial Sequence: Synthetic oligonucleotide
cugacuuaugcaugacauu

SEQ ID NO: 55121 - RNA, 19 nt, Artificial Sequence
  Description of Artificial Sequence: Synthetic oligonucleotide
gcuaaugaccugaccugga

SEQ ID NO: 55122 - RNA, 19 nt, Artificial Sequence
  Description of Artificial Sequence: Synthetic oligonucleotide
cugaauaguggugcucagu

SEQ ID NO: 55123 - RNA, 19 nt, Artificial Sequence
  Description of Artificial Sequence: Synthetic oligonucleotide
caggggccacaauuuuaga

SEQ ID NO: 55124 - RNA, 19 nt, Artificial Sequence
  Description of Artificial Sequence: Synthetic oligonucleotide
uaccacuuugugggcuaau

SEQ ID NO: 55125 - RNA, 19 nt, Artificial Sequence
  Description of Artificial Sequence: Synthetic oligonucleotide
ccacacuaucaggugacuc

SEQ ID NO: 55126 - RNA, 19 nt, Artificial Sequence
  Description of Artificial Sequence: Synthetic oligonucleotide
ccuuuccuaacaugaucaa

SEQ ID NO: 55127 - RNA, 19 nt, Artificial Sequence
  Description of Artificial Sequence: Synthetic oligonucleotide
ggugaccgaagguuccagu

SEQ ID NO: 55128 - RNA, 19 nt, Artificial Sequence
  Description of Artificial Sequence: Synthetic oligonucleotide
cccuguuagaaaagcauuu

SEQ ID NO: 55129 - RNA, 19 nt, Artificial Sequence
  Description of Artificial Sequence: Synthetic oligonucleotide
caccuacagucugugugaa

SEQ ID NO: 55130 - RNA, 19 nt, Artificial Sequence
  Description of Artificial Sequence: Synthetic oligonucleotide
cagcuuacuuccugguauu

SEQ ID NO: 55131 - RNA, 19 nt, Artificial Sequence
  Description of Artificial Sequence: Synthetic oligonucleotide
cucaaucaacuaccaccau

SEQ ID NO: 55132 - RNA, 19 nt, Artificial Sequence
  Description of Artificial Sequence: Synthetic oligonucleotide
cuacgcuucccagaauauu

SEQ ID NO: 55133 - RNA, 19 nt, Artificial Sequence
  Description of Artificial Sequence: Synthetic oligonucleotide
gguuaauaugaggcauuuu

SEQ ID NO: 55134 - RNA, 19 nt, Artificial Sequence
  Description of Artificial Sequence: Synthetic oligonucleotide
ggggcacucuagaacccaa

SEQ ID NO: 55135 - RNA, 19 nt, Artificial Sequence
  Description of Artificial Sequence: Synthetic oligonucleotide
cacuaucaggugacuccuu

SEQ ID NO: 55136 - RNA, 19 nt, Artificial Sequence
  Description of Artificial Sequence: Synthetic oligonucleotide
ggccucuaagagacagcaa

SEQ ID NO: 55137 - RNA, 19 nt, Artificial Sequence
  Description of Artificial Sequence: Synthetic oligonucleotide
ccuucgcauuucccuucga

SEQ ID NO: 55138 - RNA, 19 nt, Artificial Sequence
  Description of Artificial Sequence: Synthetic oligonucleotide
gccacacuaucaggugacu

SEQ ID NO: 55139 - RNA, 19 nt, Artificial Sequence
  Description of Artificial Sequence: Synthetic oligonucleotide
cccuucgaagauggcauuu

SEQ ID NO: 55140 - RNA, 19 nt, Artificial Sequence
  Description of Artificial Sequence: Synthetic oligonucleotide
aacgguaaaguucaguccc

SEQ ID NO: 55141 - RNA, 19 nt, Artificial Sequence
  Description of Artificial Sequence: Synthetic oligonucleotide
ucuuaaaagagucauucag

SEQ ID NO: 55142 - RNA, 19 nt, Artificial Sequence
  Description of Artificial Sequence: Synthetic oligonucleotide
uaugcuagcuugaugaucc

SEQ ID NO: 55143 - RNA, 19 nt, Artificial Sequence
  Description of Artificial Sequence: Synthetic oligonucleotide
aaaucggaauauucaauac

SEQ ID NO: 55144 - RNA, 19 nt, Artificial Sequence
  Description of Artificial Sequence: Synthetic oligonucleotide
uguucugacagccaaguag

SEQ ID NO: 55145 - RNA, 19 nt, Artificial Sequence
  Description of Artificial Sequence: Synthetic oligonucleotide
aaccuaaucacuuugggaa

SEQ ID NO: 55146 - RNA, 19 nt, Artificial Sequence
  Description of Artificial Sequence: Synthetic oligonucleotide
cuuacaaaagacaugggug

SEQ ID NO: 55147 - RNA, 19 nt, Artificial Sequence
  Description of Artificial Sequence: Synthetic oligonucleotide
aagugcgacauuuaaacug

SEQ ID NO: 55148 - RNA, 19 nt, Artificial Sequence
  Description of Artificial Sequence: Synthetic oligonucleotide
uucacaacgguaaaguuca

SEQ ID NO: 55149 - RNA, 19 nt, Artificial Sequence
  Description of Artificial Sequence: Synthetic oligonucleotide
uguccaaaccucaugaugc

SEQ ID NO: 55150 - RNA, 19 nt, Artificial Sequence
  Description of Artificial Sequence: Synthetic oligonucleotide
cuauuaaucaacaaguaga

SEQ ID NO: 55151 - RNA, 19 nt, Artificial Sequence
  Description of Artificial Sequence: Synthetic oligonucleotide
aaacggaaccacaaaaggc

SEQ ID NO: 55152 - RNA, 19 nt, Artificial Sequence
  Description of Artificial Sequence: Synthetic oligonucleotide
ugugaaugcaaaacgcagg

SEQ ID NO: 55153 - RNA, 19 nt, Artificial Sequence
  Description of Artificial Sequence: Synthetic oligonucleotide
aaauuaucuaauaaaagau

SEQ ID NO: 55154 - RNA, 19 nt, Artificial Sequence
  Description of Artificial Sequence: Synthetic oligonucleotide
uuugaaagaucuucacucg

SEQ ID NO: 55155 - RNA, 19 nt, Artificial Sequence
  Description of Artificial Sequence: Synthetic oligonucleotide
uaaaggacguucaacauaa

SEQ ID NO: 55156 - RNA, 19 nt, Artificial Sequence
  Description of Artificial Sequence: Synthetic oligonucleotide
ugacuuuaauaaaagcugc

SEQ ID NO: 55157 - RNA, 19 nt, Artificial Sequence
  Description of Artificial Sequence: Synthetic oligonucleotide
aaucggaauauucaauacu

SEQ ID NO: 55158 - RNA, 19 nt, Artificial Sequence
  Description of Artificial Sequence: Synthetic oligonucleotide
ucuaggcucacaacguugg

SEQ ID NO: 55159 - RNA, 19 nt, Artificial Sequence
  Description of Artificial Sequence: Synthetic oligonucleotide
gaaaagagcaaugagggca

SEQ ID NO: 55160 - RNA, 19 nt, Artificial Sequence
  Description of Artificial Sequence: Synthetic oligonucleotide
ugaucagcagaauagcccc

SEQ ID NO: 55161 - RNA, 19 nt, Artificial Sequence
  Description of Artificial Sequence: Synthetic oligonucleotide
acguucaacauaaauauuc

SEQ ID NO: 55162 - RNA, 19 nt, Artificial Sequence
  Description of Artificial Sequence: Synthetic oligonucleotide
uucgacuagaaucuuacaa

SEQ ID NO: 55163 - RNA, 19 nt, Artificial Sequence
  Description of Artificial Sequence: Synthetic oligonucleotide
uacaauuaggcuuguaaac

SEQ ID NO: 55164 - RNA, 19 nt, Artificial Sequence
  Description of Artificial Sequence: Synthetic oligonucleotide
aaaccuaaucacuuuggga

SEQ ID NO: 55165 - RNA, 19 nt, Artificial Sequence
  Description of Artificial Sequence: Synthetic oligonucleotide
aagugccuaagugagaauc

SEQ ID NO: 55166 - RNA, 19 nt, Artificial Sequence
  Description of Artificial Sequence: Synthetic oligonucleotide
acaccacauagcuagaauc

SEQ ID NO: 55167 - RNA, 19 nt, Artificial Sequence
  Description of Artificial Sequence: Synthetic oligonucleotide
agagucauucaguuuuccc

SEQ ID NO: 55168 - RNA, 19 nt, Artificial Sequence
  Description of Artificial Sequence: Synthetic oligonucleotide
uguauucucagaugaaaac

SEQ ID NO: 55169 - RNA, 19 nt, Artificial Sequence
  Description of Artificial Sequence: Synthetic oligonucleotide
uucuggauaugcuagcuug

SEQ ID NO: 55170 - RNA, 19 nt, Artificial Sequence
  Description of Artificial Sequence: Synthetic oligonucleotide
uuacaauuaggcuuguaaa

SEQ ID NO: 55171 - RNA, 19 nt, Artificial Sequence
  Description of Artificial Sequence: Synthetic oligonucleotide
uaucaagacuacaaauagc

SEQ ID NO: 55172 - RNA, 19 nt, Artificial Sequence
  Description of Artificial Sequence: Synthetic oligonucleotide
uuugcuauaggaacucgac

SEQ ID NO: 55173 - RNA, 19 nt, Artificial Sequence
  Description of Artificial Sequence: Synthetic oligonucleotide
gugaaugcaaaacgcaggg

SEQ ID NO: 55174 - RNA, 19 nt, Artificial Sequence
  Description of Artificial Sequence: Synthetic oligonucleotide
uauauugcuaauucugguc

SEQ ID NO: 55175 - RNA, 19 nt, Artificial Sequence
  Description of Artificial Sequence: Synthetic oligonucleotide
aauacucugaaaugcccgu

SEQ ID NO: 55176 - RNA, 19 nt, Artificial Sequence
  Description of Artificial Sequence: Synthetic oligonucleotide
aaauaauacuagcguuauc

SEQ ID NO: 55177 - RNA, 19 nt, Artificial Sequence
  Description of Artificial Sequence: Synthetic oligonucleotide
ucgacaacaaaucggaaua

SEQ ID NO: 55178 - RNA, 19 nt, Artificial Sequence
  Description of Artificial Sequence: Synthetic oligonucleotide
cugacggaaagcuaggcag

SEQ ID NO: 55179 - RNA, 19 nt, Artificial Sequence
  Description of Artificial Sequence: Synthetic oligonucleotide
uuaaacugucaucacugca

SEQ ID NO: 55180 - RNA, 19 nt, Artificial Sequence
  Description of Artificial Sequence: Synthetic oligonucleotide
ggaugauucgacuagaauc

SEQ ID NO: 55181 - RNA, 19 nt, Artificial Sequence
  Description of Artificial Sequence: Synthetic oligonucleotide
uaacccaauagcacaaaga

SEQ ID NO: 55182 - RNA, 19 nt, Artificial Sequence
  Description of Artificial Sequence: Synthetic oligonucleotide
caaugguuaaguuauguga

SEQ ID NO: 55183 - RNA, 19 nt, Artificial Sequence
  Description of Artificial Sequence: Synthetic oligonucleotide
ucgacuagaaucuuacaaa

SEQ ID NO: 55184 - RNA, 19 nt, Artificial Sequence
  Description of Artificial Sequence: Synthetic oligonucleotide
auucggagccacucuaggc

SEQ ID NO: 55185 - RNA, 19 nt, Artificial Sequence
  Description of Artificial Sequence: Synthetic oligonucleotide
ggaagugcgacauuuaaac

SEQ ID NO: 55186 - RNA, 19 nt, Artificial Sequence
  Description of Artificial Sequence: Synthetic oligonucleotide
acaaugguuaaguuaugug

SEQ ID NO: 55187 - RNA, 19 nt, Artificial Sequence
  Description of Artificial Sequence: Synthetic oligonucleotide
ggauaugcuagcuugauga

SEQ ID NO: 55188 - RNA, 19 nt, Artificial Sequence
  Description of Artificial Sequence: Synthetic oligonucleotide
cacaacguuggccaaaccc

SEQ ID NO: 55189 - RNA, 19 nt, Artificial Sequence
  Description of Artificial Sequence: Synthetic oligonucleotide
aagcauucgcauuggaagu

SEQ ID NO: 55190 - RNA, 19 nt, Artificial Sequence
  Description of Artificial Sequence: Synthetic oligonucleotide
acaagcgggacccugauaa

SEQ ID NO: 55191 - RNA, 19 nt, Artificial Sequence
  Description of Artificial Sequence: Synthetic oligonucleotide
acuuacgggaacuugugca

SEQ ID NO: 55192 - RNA, 19 nt, Artificial Sequence
  Description of Artificial Sequence: Synthetic oligonucleotide
uguugguccuugcauacug

SEQ ID NO: 55193 - RNA, 19 nt, Artificial Sequence
  Description of Artificial Sequence: Synthetic oligonucleotide
gcuauuaaucaacaaguag

SEQ ID NO: 55194 - RNA, 19 nt, Artificial Sequence
  Description of Artificial Sequence: Synthetic oligonucleotide
caaaccuaaucacuuuggg

SEQ ID NO: 55195 - RNA, 19 nt, Artificial Sequence
  Description of Artificial Sequence: Synthetic oligonucleotide
aaggacguucaacauaaau

SEQ ID NO: 55196 - RNA, 19 nt, Artificial Sequence
  Description of Artificial Sequence: Synthetic oligonucleotide
uauggaaaucagagaauga

SEQ ID NO: 55197 - RNA, 19 nt, Artificial Sequence
  Description of Artificial Sequence: Synthetic oligonucleotide
agaaucuuacaaaagacau

SEQ ID NO: 55198 - RNA, 19 nt, Artificial Sequence
  Description of Artificial Sequence: Synthetic oligonucleotide
aagcaugcgagucccaccu

SEQ ID NO: 55199 - RNA, 19 nt, Artificial Sequence
  Description of Artificial Sequence: Synthetic oligonucleotide
uggaugauugucucugacc

SEQ ID NO: 55200 - RNA, 19 nt, Artificial Sequence
  Description of Artificial Sequence: Synthetic oligonucleotide
uucacucgcuccucaaacg

SEQ ID NO: 55201 - RNA, 19 nt, Artificial Sequence
  Description of Artificial Sequence: Synthetic oligonucleotide
aacaaguagagagaucuau

SEQ ID NO: 55202 - RNA, 19 nt, Artificial Sequence
  Description of Artificial Sequence: Synthetic oligonucleotide
gauucgacuagaaucuuac

SEQ ID NO: 55203 - RNA, 19 nt, Artificial Sequence
  Description of Artificial Sequence: Synthetic oligonucleotide
acaauuaggcuuguaaaca

SEQ ID NO: 55204 - RNA, 19 nt, Artificial Sequence
  Description of Artificial Sequence: Synthetic oligonucleotide
uguaucagccccagauucc

SEQ ID NO: 55205 - RNA, 19 nt, Artificial Sequence
  Description of Artificial Sequence: Synthetic oligonucleotide
auaauacuagcguuaucca

SEQ ID NO: 55206 - RNA, 19 nt, Artificial Sequence
  Description of Artificial Sequence: Synthetic oligonucleotide
ggaacucgacaacaaaucg

SEQ ID NO: 55207 - RNA, 19 nt, Artificial Sequence
  Description of Artificial Sequence: Synthetic oligonucleotide
ugaugaucccuaagcaggc

SEQ ID NO: 55208 - RNA, 19 nt, Artificial Sequence
  Description of Artificial Sequence: Synthetic oligonucleotide
ucaagcauucgcauuggaa

SEQ ID NO: 55209 - RNA, 19 nt, Artificial Sequence
  Description of Artificial Sequence: Synthetic oligonucleotide
gaugauucgacuagaaucu

SEQ ID NO: 55210 - RNA, 19 nt, Artificial Sequence
  Description of Artificial Sequence: Synthetic oligonucleotide
aggcaauacgguuggcccc

SEQ ID NO: 55211 - RNA, 19 nt, Artificial Sequence
  Description of Artificial Sequence: Synthetic oligonucleotide
acauuuugucugauaaugg

SEQ ID NO: 55212 - RNA, 19 nt, Artificial Sequence
  Description of Artificial Sequence: Synthetic oligonucleotide
uagacuucgggguccaaug

SEQ ID NO: 55213 - RNA, 19 nt, Artificial Sequence
  Description of Artificial Sequence: Synthetic oligonucleotide
accuacaacuucuauggga

SEQ ID NO: 55214 - RNA, 19 nt, Artificial Sequence
  Description of Artificial Sequence: Synthetic oligonucleotide
aacaccucaagcauucgca

SEQ ID NO: 55215 - RNA, 19 nt, Artificial Sequence
  Description of Artificial Sequence: Synthetic oligonucleotide
guaaguauguauucucaga

SEQ ID NO: 55216 - RNA, 19 nt, Artificial Sequence
  Description of Artificial Sequence: Synthetic oligonucleotide
agacaagcaugcgaguccc

SEQ ID NO: 55217 - RNA, 19 nt, Artificial Sequence
  Description of Artificial Sequence: Synthetic oligonucleotide
uggaagcuugcuauuaauc

SEQ ID NO: 55218 - RNA, 19 nt, Artificial Sequence
  Description of Artificial Sequence: Synthetic oligonucleotide
caacgguaaaguucagucc

SEQ ID NO: 55219 - RNA, 19 nt, Artificial Sequence
  Description of Artificial Sequence: Synthetic oligonucleotide
uacgguuggccccaguuac

SEQ ID NO: 55220 - RNA, 19 nt, Artificial Sequence
  Description of Artificial Sequence: Synthetic oligonucleotide
ugcuggucaaacauucgga

SEQ ID NO: 55221 - RNA, 19 nt, Artificial Sequence
  Description of Artificial Sequence: Synthetic oligonucleotide
ugaaccauguagugcaaaa

SEQ ID NO: 55222 - RNA, 19 nt, Artificial Sequence
  Description of Artificial Sequence: Synthetic oligonucleotide
agcaacuuguuacaaacuu

SEQ ID NO: 55223 - RNA, 19 nt, Artificial Sequence
  Description of Artificial Sequence: Synthetic oligonucleotide
uggucaccuaacccaauag

SEQ ID NO: 55224 - RNA, 19 nt, Artificial Sequence
  Description of Artificial Sequence: Synthetic oligonucleotide
auaacaggaugaucagcag

SEQ ID NO: 55225 - RNA, 19 nt, Artificial Sequence
  Description of Artificial Sequence: Synthetic oligonucleotide
aguucugucagaauggcaa

SEQ ID NO: 55226 - RNA, 19 nt, Artificial Sequence
  Description of Artificial Sequence: Synthetic oligonucleotide
uuaagcaagugcacgcgaa

SEQ ID NO: 55227 - RNA, 19 nt, Artificial Sequence
  Description of Artificial Sequence: Synthetic oligonucleotide
uuaguucaaccaccugugc

SEQ ID NO: 55228 - RNA, 19 nt, Artificial Sequence
  Description of Artificial Sequence: Synthetic oligonucleotide
ugcauaaaucaaccuuuga

SEQ ID NO: 55229 - RNA, 19 nt, Artificial Sequence
  Description of Artificial Sequence: Synthetic oligonucleotide
cuuacgggaacuugugcac

SEQ ID NO: 55230 - RNA, 19 nt, Artificial Sequence
  Description of Artificial Sequence: Synthetic oligonucleotide
ucuggauaugcuagcuuga

SEQ ID NO: 55231 - RNA, 19 nt, Artificial Sequence
  Description of Artificial Sequence: Synthetic oligonucleotide
agcguuauccauuuuccaa

SEQ ID NO: 55232 - RNA, 19 nt, Artificial Sequence
  Description of Artificial Sequence: Synthetic oligonucleotide
acacucgauggcauaaagc

SEQ ID NO: 55233 - RNA, 19 nt, Artificial Sequence
  Description of Artificial Sequence: Synthetic oligonucleotide
cauagcuagaaucuuguaa

SEQ ID NO: 55234 - RNA, 19 nt, Artificial Sequence
  Description of Artificial Sequence: Synthetic oligonucleotide
cauuaagcaagugcacgcg

SEQ ID NO: 55235 - RNA, 19 nt, Artificial Sequence
  Description of Artificial Sequence: Synthetic oligonucleotide
auaugcuagcuugaugauc

SEQ ID NO: 55236 - RNA, 19 nt, Artificial Sequence
  Description of Artificial Sequence: Synthetic oligonucleotide
ccauugugaaugcaaaacg

SEQ ID NO: 55237 - RNA, 19 nt, Artificial Sequence
  Description of Artificial Sequence: Synthetic oligonucleotide
caaaucggaauauucaaua

SEQ ID NO: 55238 - RNA, 19 nt, Artificial Sequence
  Description of Artificial Sequence: Synthetic oligonucleotide
uuauugugacauugauccc

SEQ ID NO: 55239 - RNA, 19 nt, Artificial Sequence
  Description of Artificial Sequence: Synthetic oligonucleotide
auuaagcaagugcacgcga

SEQ ID NO: 55240 - RNA, 19 nt, Artificial Sequence
  Description of Artificial Sequence: Synthetic oligonucleotide
uucgcauuggaagugcgac

SEQ ID NO: 55241 - RNA, 19 nt, Artificial Sequence
  Description of Artificial Sequence: Synthetic oligonucleotide
cuggcaacaagcgggaccc

SEQ ID NO: 55242 - RNA, 19 nt, Artificial Sequence
  Description of Artificial Sequence: Synthetic oligonucleotide
gaagacaagcaugcgaguc

SEQ ID NO: 55243 - RNA, 19 nt, Artificial Sequence
  Description of Artificial Sequence: Synthetic oligonucleotide
uuacuaaaccagucacaug

SEQ ID NO: 55244 - RNA, 19 nt, Artificial Sequence
  Description of Artificial Sequence: Synthetic oligonucleotide
aagguccgagccuccauug

SEQ ID NO: 55245 - RNA, 19 nt, Artificial Sequence
  Description of Artificial Sequence: Synthetic oligonucleotide
uggaagugcgacauuuaaa

SEQ ID NO: 55246 - RNA, 19 nt, Artificial Sequence
  Description of Artificial Sequence: Synthetic oligonucleotide
uggacuuggcagagauucg

SEQ ID NO: 55247 - RNA, 19 nt, Artificial Sequence
  Description of Artificial Sequence: Synthetic oligonucleotide
cauacuggccuccuagaug

SEQ ID NO: 55248 - RNA, 19 nt, Artificial Sequence
  Description of Artificial Sequence: Synthetic oligonucleotide
agggcucuuuguaucagcc

SEQ ID NO: 55249 - RNA, 19 nt, Artificial Sequence
  Description of Artificial Sequence: Synthetic oligonucleotide
aaaacaccucaagcauucg

SEQ ID NO: 55250 - RNA, 19 nt, Artificial Sequence
  Description of Artificial Sequence: Synthetic oligonucleotide
cuucgggguccaaugaggc

SEQ ID NO: 55251 - RNA, 19 nt, Artificial Sequence
  Description of Artificial Sequence: Synthetic oligonucleotide
ggcgagagcaacuuguuac

SEQ ID NO: 55252 - RNA, 19 nt, Artificial Sequence
  Description of Artificial Sequence: Synthetic oligonucleotide
acaacguuggccaaacccu

SEQ ID NO: 55253 - RNA, 19 nt, Artificial Sequence
  Description of Artificial Sequence: Synthetic oligonucleotide
aagcgggacccugauaaag

SEQ ID NO: 55254 - RNA, 19 nt, Artificial Sequence
  Description of Artificial Sequence: Synthetic oligonucleotide
aggacguucaacauaaaua

SEQ ID NO: 55255 - RNA, 19 nt, Artificial Sequence
  Description of Artificial Sequence: Synthetic oligonucleotide
ugcaguuuugcagcaaccu

SEQ ID NO: 55256 - RNA, 19 nt, Artificial Sequence
  Description of Artificial Sequence: Synthetic oligonucleotide
ucgggguccaaugaggcca

SEQ ID NO: 55257 - RNA, 19 nt, Artificial Sequence
  Description of Artificial Sequence: Synthetic oligonucleotide
acuugaguaacuugcgcuu

SEQ ID NO: 55258 - RNA, 19 nt, Artificial Sequence
  Description of Artificial Sequence: Synthetic oligonucleotide
uuauacauuuugucugaua

SEQ ID NO: 55259 - RNA, 19 nt, Artificial Sequence
  Description of Artificial Sequence: Synthetic oligonucleotide
acugccaauuuaucuccag

SEQ ID NO: 55260 - RNA, 19 nt, Artificial Sequence
  Description of Artificial Sequence: Synthetic oligonucleotide
uaacaaugguuaaguuaug

SEQ ID NO: 55261 - RNA, 19 nt, Artificial Sequence
  Description of Artificial Sequence: Synthetic oligonucleotide
gacuuacgggaacuugugc

SEQ ID NO: 55262 - RNA, 19 nt, Artificial Sequence
  Description of Artificial Sequence: Synthetic oligonucleotide
gcauuaagcaagugcacgc

SEQ ID NO: 55263 - RNA, 19 nt, Artificial Sequence
  Description of Artificial Sequence: Synthetic oligonucleotide
ugauucgacuagaaucuua

SEQ ID NO: 55264 - RNA, 19 nt, Artificial Sequence
  Description of Artificial Sequence: Synthetic oligonucleotide
uaggcucacaacguuggcc

SEQ ID NO: 55265 - RNA, 19 nt, Artificial Sequence
  Description of Artificial Sequence: Synthetic oligonucleotide
ggaaguaauaaugccuugc

SEQ ID NO: 55266 - RNA, 19 nt, Artificial Sequence
  Description of Artificial Sequence: Synthetic oligonucleotide
cauucgcauuggaagugcg

SEQ ID NO: 55267 - RNA, 19 nt, Artificial Sequence
  Description of Artificial Sequence: Synthetic oligonucleotide
guaggcaauacgguuggcc

SEQ ID NO: 55268 - RNA, 19 nt, Artificial Sequence
  Description of Artificial Sequence: Synthetic oligonucleotide
uacaacuucuaugggaaua

SEQ ID NO: 55269 - RNA, 19 nt, Artificial Sequence
  Description of Artificial Sequence: Synthetic oligonucleotide
ugcaaaacgcaggguacag

SEQ ID NO: 55270 - RNA, 19 nt, Artificial Sequence
  Description of Artificial Sequence: Synthetic oligonucleotide
ccacucuaggcucacaacg

SEQ ID NO: 55271 - RNA, 19 nt, Artificial Sequence
  Description of Artificial Sequence: Synthetic oligonucleotide
uccggaaccgccacacgug

SEQ ID NO: 55272 - RNA, 19 nt, Artificial Sequence
  Description of Artificial Sequence: Synthetic oligonucleotide
uagcuugaugaucccuaag

SEQ ID NO: 55273 - RNA, 19 nt, Artificial Sequence
  Description of Artificial Sequence: Synthetic oligonucleotide
ugacacacuccagggaugc

SEQ ID NO: 55274 - RNA, 19 nt, Artificial Sequence
  Description of Artificial Sequence: Synthetic oligonucleotide
gaccuacaacuucuauggg

SEQ ID NO: 55275 - RNA, 19 nt, Artificial Sequence
  Description of Artificial Sequence: Synthetic oligonucleotide
gcuggucaaacauucggag

SEQ ID NO: 55276 - RNA, 19 nt, Artificial Sequence
  Description of Artificial Sequence: Synthetic oligonucleotide
cacugcaggugacaguacc

SEQ ID NO: 55277 - RNA, 19 nt, Artificial Sequence
  Description of Artificial Sequence: Synthetic oligonucleotide
cucuaggcucacaacguug

SEQ ID NO: 55278 - RNA, 19 nt, Artificial Sequence
  Description of Artificial Sequence: Synthetic oligonucleotide
agaaucaccuggccugaug

SEQ ID NO: 55279 - RNA, 19 nt, Artificial Sequence
  Description of Artificial Sequence: Synthetic oligonucleotide
cuaagcaggcaucccgaag

SEQ ID NO: 55280 - RNA, 19 nt, Artificial Sequence
  Description of Artificial Sequence: Synthetic oligonucleotide
cuuuguaucagccccagau

SEQ ID NO: 55281 - RNA, 19 nt, Artificial Sequence
  Description of Artificial Sequence: Synthetic oligonucleotide
aucauggaugauugucucu

SEQ ID NO: 55282 - RNA, 19 nt, Artificial Sequence
  Description of Artificial Sequence: Synthetic oligonucleotide
ccaaaccuaaucacuuugg

SEQ ID NO: 55283 - RNA, 19 nt, Artificial Sequence
  Description of Artificial Sequence: Synthetic oligonucleotide
gugacuguucacaauaaaa

SEQ ID NO: 55284 - RNA, 19 nt, Artificial Sequence
  Description of Artificial Sequence: Synthetic oligonucleotide
acacgugucuagaugcagg

SEQ ID NO: 55285 - RNA, 19 nt, Artificial Sequence
  Description of Artificial Sequence: Synthetic oligonucleotide
ggucaccuaacccaauagc

SEQ ID NO: 55286 - RNA, 19 nt, Artificial Sequence
  Description of Artificial Sequence: Synthetic oligonucleotide
caagcaugcgagucccacc

SEQ ID NO: 55287 - RNA, 19 nt, Artificial Sequence
  Description of Artificial Sequence: Synthetic oligonucleotide
agugcggucggauuugcuu

SEQ ID NO: 55288 - RNA, 19 nt, Artificial Sequence
  Description of Artificial Sequence: Synthetic oligonucleotide
auacuagcguuauccauuu

SEQ ID NO: 55289 - RNA, 19 nt, Artificial Sequence
  Description of Artificial Sequence: Synthetic oligonucleotide
auaaagcagcuugcuucgc

SEQ ID NO: 55290 - RNA, 19 nt, Artificial Sequence
  Description of Artificial Sequence: Synthetic oligonucleotide
ccaaacuuuaguucaacca

SEQ ID NO: 55291 - RNA, 19 nt, Artificial Sequence
  Description of Artificial Sequence: Synthetic oligonucleotide
uuacgggaacuugugcacc

SEQ ID NO: 55292 - RNA, 19 nt, Artificial Sequence
  Description of Artificial Sequence: Synthetic oligonucleotide
gugcggucggauuugcuug

SEQ ID NO: 55293 - RNA, 19 nt, Artificial Sequence
  Description of Artificial Sequence: Synthetic oligonucleotide
uguuagucucucugaccca

SEQ ID NO: 55294 - RNA, 19 nt, Artificial Sequence
  Description of Artificial Sequence: Synthetic oligonucleotide
uggaucacggagagacgca

SEQ ID NO: 55295 - RNA, 19 nt, Artificial Sequence
  Description of Artificial Sequence: Synthetic oligonucleotide
agguaaguauguauucuca

SEQ ID NO: 55296 - RNA, 19 nt, Artificial Sequence
  Description of Artificial Sequence: Synthetic oligonucleotide
acaaaucggaauauucaau

SEQ ID NO: 55297 - RNA, 19 nt, Artificial Sequence
  Description of Artificial Sequence: Synthetic oligonucleotide
auucgacuagaaucuuaca

SEQ ID NO: 55298 - RNA, 19 nt, Artificial Sequence
  Description of Artificial Sequence: Synthetic oligonucleotide
accuaaucacuuugggaaa

SEQ ID NO: 55299 - RNA, 19 nt, Artificial Sequence
  Description of Artificial Sequence: Synthetic oligonucleotide
augccuugcaaaagaaucu

SEQ ID NO: 55300 - RNA, 19 nt, Artificial Sequence
  Description of Artificial Sequence: Synthetic oligonucleotide
acggaaagcuaggcagugc

SEQ ID NO: 55301 - RNA, 19 nt, Artificial Sequence
  Description of Artificial Sequence: Synthetic oligonucleotide
ucgcauuggaagugcgaca

SEQ ID NO: 55302 - RNA, 19 nt, Artificial Sequence
  Description of Artificial Sequence: Synthetic oligonucleotide
augcgagucccaccugggg

SEQ ID NO: 55303 - RNA, 19 nt, Artificial Sequence
  Description of Artificial Sequence: Synthetic oligonucleotide
gguccuccagacuuacggg

SEQ ID NO: 55304 - RNA, 19 nt, Artificial Sequence
  Description of Artificial Sequence: Synthetic oligonucleotide
agcauucgcauuggaagug

SEQ ID NO: 55305 - RNA, 19 nt, Artificial Sequence
  Description of Artificial Sequence: Synthetic oligonucleotide
aaccgccacacgugucuag

SEQ ID NO: 55306 - RNA, 19 nt, Artificial Sequence
  Description of Artificial Sequence: Synthetic oligonucleotide
aucaaggauaaaugcuauu

SEQ ID NO: 55307 - RNA, 19 nt, Artificial Sequence
  Description of Artificial Sequence: Synthetic oligonucleotide
cacauaacaaugguuaagu

SEQ ID NO: 55308 - RNA, 19 nt, Artificial Sequence
  Description of Artificial Sequence: Synthetic oligonucleotide
gacggaaagcuaggcagug

SEQ ID NO: 55309 - RNA, 19 nt, Artificial Sequence
  Description of Artificial Sequence: Synthetic oligonucleotide
agacuucgggguccaauga

SEQ ID NO: 55310 - RNA, 19 nt, Artificial Sequence
  Description of Artificial Sequence: Synthetic oligonucleotide
agcuaggcagugcggucgg

SEQ ID NO: 55311 - RNA, 19 nt, Artificial Sequence
  Description of Artificial Sequence: Synthetic oligonucleotide
ucuuuguaucagccccaga

SEQ ID NO: 55312 - RNA, 19 nt, Artificial Sequence
  Description of Artificial Sequence: Synthetic oligonucleotide
auaaugccuugcaaaagaa

SEQ ID NO: 55313 - RNA, 19 nt, Artificial Sequence
  Description of Artificial Sequence: Synthetic oligonucleotide
ggucggauuugcuuguuca

SEQ ID NO: 55314 - RNA, 19 nt, Artificial Sequence
  Description of Artificial Sequence: Synthetic oligonucleotide
cucacaacguuggccaaac

SEQ ID NO: 55315 - RNA, 19 nt, Artificial Sequence
  Description of Artificial Sequence: Synthetic oligonucleotide
gcaugcgagucccaccugg

SEQ ID NO: 55316 - RNA, 19 nt, Artificial Sequence
  Description of Artificial Sequence: Synthetic oligonucleotide
cgugucuagaugcagguac

SEQ ID NO: 55317 - RNA, 19 nt, Artificial Sequence
  Description of Artificial Sequence: Synthetic oligonucleotide
gccaaguagguuuggagga

SEQ ID NO: 55318 - RNA, 19 nt, Artificial Sequence
  Description of Artificial Sequence: Synthetic oligonucleotide
gagggcgcguggaucacgg

SEQ ID NO: 55319 - RNA, 19 nt, Artificial Sequence
  Description of Artificial Sequence: Synthetic oligonucleotide
caagcugucguuccucaga

SEQ ID NO: 55320 - RNA, 19 nt, Artificial Sequence
  Description of Artificial Sequence: Synthetic oligonucleotide
aguugccacuagucuaaca

SEQ ID NO: 55321 - RNA, 19 nt, Artificial Sequence
  Description of Artificial Sequence: Synthetic oligonucleotide
acaaguagagagaucuaua

SEQ ID NO: 55322 - RNA, 19 nt, Artificial Sequence
  Description of Artificial Sequence: Synthetic oligonucleotide
caccacauagcuagaaucu

SEQ ID NO: 55323 - RNA, 19 nt, Artificial Sequence
  Description of Artificial Sequence: Synthetic oligonucleotide
guucagccgguagucagcc

SEQ ID NO: 55324 - RNA, 19 nt, Artificial Sequence
  Description of Artificial Sequence: Synthetic oligonucleotide
ucacaacguuggccaaacc

SEQ ID NO: 55325 - RNA, 19 nt, Artificial Sequence
  Description of Artificial Sequence: Synthetic oligonucleotide
cucgacaacaaaucggaau

SEQ ID NO: 55326 - RNA, 19 nt, Artificial Sequence
  Description of Artificial Sequence: Synthetic oligonucleotide
cuaggcucacaacguuggc

SEQ ID NO: 55327 - RNA, 19 nt, Artificial Sequence
  Description of Artificial Sequence: Synthetic oligonucleotide
gaucacggagagacgcagc

SEQ ID NO: 55328 - RNA, 19 nt, Artificial Sequence
  Description of Artificial Sequence: Synthetic oligonucleotide
ugcuagcuugaugaucccu

SEQ ID NO: 55329 - RNA, 19 nt, Artificial Sequence
  Description of Artificial Sequence: Synthetic oligonucleotide
ugcggucggauuugcuugu

SEQ ID NO: 55330 - RNA, 19 nt, Artificial Sequence
  Description of Artificial Sequence: Synthetic oligonucleotide
acucuaggcucacaacguu

SEQ ID NO: 55331 - RNA, 19 nt, Artificial Sequence
  Description of Artificial Sequence: Synthetic oligonucleotide
gcccgugacauacucuucc

SEQ ID NO: 55332 - RNA, 19 nt, Artificial Sequence
  Description of Artificial Sequence: Synthetic oligonucleotide
aacaagcgggacccugaua

SEQ ID NO: 55333 - RNA, 19 nt, Artificial Sequence
  Description of Artificial Sequence: Synthetic oligonucleotide
cuagucuaacaccugugcu

SEQ ID NO: 55334 - RNA, 19 nt, Artificial Sequence
  Description of Artificial Sequence: Synthetic oligonucleotide
cacacgugucuagaugcag

SEQ ID NO: 55335 - RNA, 19 nt, Artificial Sequence
  Description of Artificial Sequence: Synthetic oligonucleotide
gguugggguauagaagccc

SEQ ID NO: 55336 - RNA, 19 nt, Artificial Sequence
  Description of Artificial Sequence: Synthetic oligonucleotide
gauaugcuagcuugaugau

SEQ ID NO: 55337 - RNA, 19 nt, Artificial Sequence
  Description of Artificial Sequence: Synthetic oligonucleotide
gcguuauccauuuuccaaa

SEQ ID NO: 55338 - RNA, 19 nt, Artificial Sequence
  Description of Artificial Sequence: Synthetic oligonucleotide
cuagcuugaugaucccuaa

SEQ ID NO: 55339 - RNA, 19 nt, Artificial Sequence
  Description of Artificial Sequence: Synthetic oligonucleotide
agcgggacccugauaaagu

SEQ ID NO: 55340 - RNA, 19 nt, Artificial Sequence
  Description of Artificial Sequence: Synthetic oligonucleotide
ccuaagugagaaucaccug

SEQ ID NO: 55341 - RNA, 19 nt, Artificial Sequence
  Description of Artificial Sequence: Synthetic oligonucleotide
gaugaucccuaagcaggca

SEQ ID NO: 55342 - RNA, 19 nt, Artificial Sequence
  Description of Artificial Sequence: Synthetic oligonucleotide
aggcagugcggucggauuu

SEQ ID NO: 55343 - RNA, 19 nt, Artificial Sequence
  Description of Artificial Sequence: Synthetic oligonucleotide
gccauguccaaaccucaug

SEQ ID NO: 55344 - RNA, 19 nt, Artificial Sequence
  Description of Artificial Sequence: Synthetic oligonucleotide
ggaucacggagagacgcag

SEQ ID NO: 55345 - RNA, 19 nt, Artificial Sequence
  Description of Artificial Sequence: Synthetic oligonucleotide
agugcacgcgaauccguuu

SEQ ID NO: 55346 - RNA, 19 nt, Artificial Sequence
  Description of Artificial Sequence: Synthetic oligonucleotide
cucgcuccucaaacggaac

SEQ ID NO: 55347 - RNA, 19 nt, Artificial Sequence
  Description of Artificial Sequence: Synthetic oligonucleotide
auucgcauuggaagugcga

SEQ ID NO: 55348 - RNA, 19 nt, Artificial Sequence
  Description of Artificial Sequence: Synthetic oligonucleotide
cucaugaugcaggucagua

SEQ ID NO: 55349 - RNA, 19 nt, Artificial Sequence
  Description of Artificial Sequence: Synthetic oligonucleotide
accuaacccaauagcacaa

SEQ ID NO: 55350 - RNA, 19 nt, Artificial Sequence
  Description of Artificial Sequence: Synthetic oligonucleotide
aagugcacgcgaauccguu

SEQ ID NO: 55351 - RNA, 19 nt, Artificial Sequence
  Description of Artificial Sequence: Synthetic oligonucleotide
agguccgagccuccauugu

SEQ ID NO: 55352 - RNA, 19 nt, Artificial Sequence
  Description of Artificial Sequence: Synthetic oligonucleotide
gaaccauguagugcaaaau

SEQ ID NO: 55353 - RNA, 19 nt, Artificial Sequence
  Description of Artificial Sequence: Synthetic oligonucleotide
cagagauucgggguuugga

SEQ ID NO: 55354 - RNA, 19 nt, Artificial Sequence
  Description of Artificial Sequence: Synthetic oligonucleotide
gagggaauaugaacugggu

SEQ ID NO: 55355 - RNA, 19 nt, Artificial Sequence
  Description of Artificial Sequence: Synthetic oligonucleotide
gcgggacccugauaaagug

SEQ ID NO: 55356 - RNA, 19 nt, Artificial Sequence
  Description of Artificial Sequence: Synthetic oligonucleotide
gaauugguggugaccccaa

SEQ ID NO: 55357 - RNA, 19 nt, Artificial Sequence
  Description of Artificial Sequence: Synthetic oligonucleotide
ccgugacauacucuucccg

SEQ ID NO: 55358 - RNA, 19 nt, Artificial Sequence
  Description of Artificial Sequence: Synthetic oligonucleotide
agcaugcgagucccaccug

SEQ ID NO: 55359 - RNA, 19 nt, Artificial Sequence
  Description of Artificial Sequence: Synthetic oligonucleotide
agggccaauccugcccauc

SEQ ID NO: 55360 - RNA, 19 nt, Artificial Sequence
  Description of Artificial Sequence: Synthetic oligonucleotide
cugucguuccucagacaca

SEQ ID NO: 55361 - RNA, 19 nt, Artificial Sequence
  Description of Artificial Sequence: Synthetic oligonucleotide
gcauucgcauuggaagugc

SEQ ID NO: 55362 - RNA, 19 nt, Artificial Sequence
  Description of Artificial Sequence: Synthetic oligonucleotide
cacgugucuagaugcaggu

SEQ ID NO: 55363 - RNA, 19 nt, Artificial Sequence
  Description of Artificial Sequence: Synthetic oligonucleotide
ccauugugaaccauguagu

SEQ ID NO: 55364 - RNA, 19 nt, Artificial Sequence
  Description of Artificial Sequence: Synthetic oligonucleotide
cucaagcauucgcauugga

SEQ ID NO: 55365 - RNA, 19 nt, Artificial Sequence
  Description of Artificial Sequence: Synthetic oligonucleotide
gcaaaacgcaggguacagc

SEQ ID NO: 55366 - RNA, 19 nt, Artificial Sequence
  Description of Artificial Sequence: Synthetic oligonucleotide
cccgugacauacucuuccc

SEQ ID NO: 55367 - RNA, 19 nt, Artificial Sequence
  Description of Artificial Sequence: Synthetic oligonucleotide
aaaggacguucaacauaaa

SEQ ID NO: 55368 - RNA, 19 nt, Artificial Sequence
  Description of Artificial Sequence: Synthetic oligonucleotide
auucgggguuuggaguccu

SEQ ID NO: 55369 - RNA, 19 nt, Artificial Sequence
  Description of Artificial Sequence: Synthetic oligonucleotide
gagaucuauaauacccauu

SEQ ID NO: 55370 - RNA, 19 nt, Artificial Sequence
  Description of Artificial Sequence: Synthetic oligonucleotide
cacacuccagggaugcugu

SEQ ID NO: 55371 - RNA, 19 nt, Artificial Sequence
  Description of Artificial Sequence: Synthetic oligonucleotide
cuaacaccugugcucuucu

SEQ ID NO: 55372 - RNA, 19 nt, Artificial Sequence
  Description of Artificial Sequence: Synthetic oligonucleotide
augauucgacuagaaucuu

SEQ ID NO: 55373 - RNA, 19 nt, Artificial Sequence
  Description of Artificial Sequence: Synthetic oligonucleotide
gccacucuaggcucacaac

SEQ ID NO: 55374 - RNA, 19 nt, Artificial Sequence
  Description of Artificial Sequence: Synthetic oligonucleotide
ggcaauacgguuggcccca

SEQ ID NO: 55375 - RNA, 19 nt, Artificial Sequence
  Description of Artificial Sequence: Synthetic oligonucleotide
gcuagcuugaugaucccua

SEQ ID NO: 55376 - RNA, 19 nt, Artificial Sequence
  Description of Artificial Sequence: Synthetic oligonucleotide
uacuagcguuauccauuuu

SEQ ID NO: 55377 - RNA, 19 nt, Artificial Sequence
  Description of Artificial Sequence: Synthetic oligonucleotide
ccugacggaaagcuaggca

SEQ ID NO: 55378 - RNA, 19 nt, Artificial Sequence
  Description of Artificial Sequence: Synthetic oligonucleotide
cuccggaaccgccacacgu

SEQ ID NO: 55379 - RNA, 19 nt, Artificial Sequence
  Description of Artificial Sequence: Synthetic oligonucleotide
acucgacaacaaaucggaa

SEQ ID NO: 55380 - RNA, 19 nt, Artificial Sequence
  Description of Artificial Sequence: Synthetic oligonucleotide
cugaaaugcccgugacaua

SEQ ID NO: 55381 - RNA, 19 nt, Artificial Sequence
  Description of Artificial Sequence: Synthetic oligonucleotide
cuugcauacuggccuccua

SEQ ID NO: 55382 - RNA, 19 nt, Artificial Sequence
  Description of Artificial Sequence: Synthetic oligonucleotide
cacugacaccacauagcua

SEQ ID NO: 55383 - RNA, 19 nt, Artificial Sequence
  Description of Artificial Sequence: Synthetic oligonucleotide
gggaugauucgacuagaau

SEQ ID NO: 55384 - RNA, 19 nt, Artificial Sequence
  Description of Artificial Sequence: Synthetic oligonucleotide
ggcagugcggucggauuug

SEQ ID NO: 55385 - RNA, 19 nt, Artificial Sequence
  Description of Artificial Sequence: Synthetic oligonucleotide
gcaacaagcgggacccuga

SEQ ID NO: 55386 - RNA, 19 nt, Artificial Sequence
  Description of Artificial Sequence: Synthetic oligonucleotide
guagacuucgggguccaau

SEQ ID NO: 55387 - RNA, 19 nt, Artificial Sequence
  Description of Artificial Sequence: Synthetic oligonucleotide
gaaaugcccgugacauacu

SEQ ID NO: 55388 - RNA, 19 nt, Artificial Sequence
  Description of Artificial Sequence: Synthetic oligonucleotide
cacaacgguaaaguucagu

SEQ ID NO: 55389 - RNA, 19 nt, Artificial Sequence
  Description of Artificial Sequence: Synthetic oligonucleotide
gcuccauuuguaugcauuu

SEQ ID NO: 55390 - RNA, 19 nt, Artificial Sequence
  Description of Artificial Sequence: Synthetic oligonucleotide
gccacuagucuaacaccug

SEQ ID NO: 55391 - RNA, 19 nt, Artificial Sequence
  Description of Artificial Sequence: Synthetic oligonucleotide
ccucauagcucuugaggaa

SEQ ID NO: 55392 - RNA, 19 nt, Artificial Sequence
  Description of Artificial Sequence: Synthetic oligonucleotide
ggagggcgcguggaucacg

SEQ ID NO: 55393 - RNA, 19 nt, Artificial Sequence
  Description of Artificial Sequence: Synthetic oligonucleotide
gugcacgcgaauccguuuu

SEQ ID NO: 55394 - RNA, 19 nt, Artificial Sequence
  Description of Artificial Sequence: Synthetic oligonucleotide
uguagacuucgggguccaa

SEQ ID NO: 55395 - RNA, 19 nt, Artificial Sequence
  Description of Artificial Sequence: Synthetic oligonucleotide
acgugucuagaugcaggua

SEQ ID NO: 55396 - RNA, 19 nt, Artificial Sequence
  Description of Artificial Sequence: Synthetic oligonucleotide
cuacaacuucuaugggaau

SEQ ID NO: 55397 - RNA, 19 nt, Artificial Sequence
  Description of Artificial Sequence: Synthetic oligonucleotide
gugcgacauuuaaacuguc

SEQ ID NO: 55398 - RNA, 19 nt, Artificial Sequence
  Description of Artificial Sequence: Synthetic oligonucleotide
gaaccgccacacgugucua

SEQ ID NO: 55399 - RNA, 19 nt, Artificial Sequence
  Description of Artificial Sequence: Synthetic oligonucleotide
caagguccgagccuccauu

SEQ ID NO: 55400 - RNA, 19 nt, Artificial Sequence
  Description of Artificial Sequence: Synthetic oligonucleotide
ggggaugauucgacuagaa

SEQ ID NO: 55401 - RNA, 19 nt, Artificial Sequence
  Description of Artificial Sequence: Synthetic oligonucleotide
ccucaaacggaaccacaaa

SEQ ID NO: 55402 - RNA, 19 nt, Artificial Sequence
  Description of Artificial Sequence: Synthetic oligonucleotide
agggcgcguggaucacgga

SEQ ID NO: 55403 - RNA, 19 nt, Artificial Sequence
  Description of Artificial Sequence: Synthetic oligonucleotide
ggcucagggcucuuuguau

SEQ ID NO: 55404 - RNA, 19 nt, Artificial Sequence
  Description of Artificial Sequence: Synthetic oligonucleotide
gcaucgagacagcaggauu

SEQ ID NO: 55405 - RNA, 19 nt, Artificial Sequence
  Description of Artificial Sequence: Synthetic oligonucleotide
gccuccuagaugcuucccu

SEQ ID NO: 55406 - RNA, 19 nt, Artificial Sequence
  Description of Artificial Sequence: Synthetic oligonucleotide
ccacuagucuaacaccugu

SEQ ID NO: 55407 - RNA, 19 nt, Artificial Sequence
  Description of Artificial Sequence: Synthetic oligonucleotide
gcagugcggucggauuugc

SEQ ID NO: 55408 - RNA, 19 nt, Artificial Sequence
  Description of Artificial Sequence: Synthetic oligonucleotide
caacaagcgggacccugau

SEQ ID NO: 55409 - RNA, 19 nt, Artificial Sequence
  Description of Artificial Sequence: Synthetic oligonucleotide
ggccuccuagaugcuuccc

SEQ ID NO: 55410 - RNA, 19 nt, Artificial Sequence
  Description of Artificial Sequence: Synthetic oligonucleotide
caguuacugggaugucuuu

SEQ ID NO: 55411 - RNA, 19 nt, Artificial Sequence
  Description of Artificial Sequence: Synthetic oligonucleotide
gcaauacgguuggccccag

SEQ ID NO: 55412 - RNA, 19 nt, Artificial Sequence
  Description of Artificial Sequence: Synthetic oligonucleotide
gagaaucaccuggccugau

SEQ ID NO: 55413 - RNA, 19 nt, Artificial Sequence
  Description of Artificial Sequence: Synthetic oligonucleotide
cagugcggucggauuugcu

SEQ ID NO: 55414 - RNA, 19 nt, Artificial Sequence
  Description of Artificial Sequence: Synthetic oligonucleotide
ggcaucccgaaggcaucga

SEQ ID NO: 55415 - RNA, 19 nt, Artificial Sequence
  Description of Artificial Sequence: Synthetic oligonucleotide
cgcauuggaagugcgacau

SEQ ID NO: 55416 - RNA, 19 nt, Artificial Sequence
  Description of Artificial Sequence: Synthetic oligonucleotide
ccggaaccgccacacgugu

SEQ ID NO: 55417 - RNA, 19 nt, Artificial Sequence
  Description of Artificial Sequence: Synthetic oligonucleotide
gcagcccgccacuuugguu

SEQ ID NO: 55418 - RNA, 19 nt, Artificial Sequence
  Description of Artificial Sequence: Synthetic oligonucleotide
gccgcgggucccgccugag

SEQ ID NO: 55419 - RNA, 19 nt, Artificial Sequence
  Description of Artificial Sequence: Synthetic oligonucleotide
ccgccacuuugguucaaau

SEQ ID NO: 55420 - RNA, 19 nt, Artificial Sequence
  Description of Artificial Sequence: Synthetic oligonucleotide
cgcagcccgccacuuuggu

SEQ ID NO: 55421 - RNA, 19 nt, Artificial Sequence
  Description of Artificial Sequence: Synthetic oligonucleotide
gcggucggauuugcuuguu

SEQ ID NO: 55422 - RNA, 19 nt, Artificial Sequence
  Description of Artificial Sequence: Synthetic oligonucleotide
acaucgaucauccacgggc

SEQ ID NO: 55423 - RNA, 19 nt, Artificial Sequence
  Description of Artificial Sequence: Synthetic oligonucleotide
gguguugagaguuucaucg

SEQ ID NO: 55424 - RNA, 19 nt, Artificial Sequence
  Description of Artificial Sequence: Synthetic oligonucleotide
aaagcugccagaaagucuc

SEQ ID NO: 55425 - RNA, 19 nt, Artificial Sequence
  Description of Artificial Sequence: Synthetic oligonucleotide
ucuuucaccccacacagca

SEQ ID NO: 55426 - RNA, 19 nt, Artificial Sequence
  Description of Artificial Sequence: Synthetic oligonucleotide
acacuagccgcucuguugc

SEQ ID NO: 55427 - RNA, 19 nt, Artificial Sequence
  Description of Artificial Sequence: Synthetic oligonucleotide
ucugcgaagguauaaaguc

SEQ ID NO: 55428 - RNA, 19 nt, Artificial Sequence
  Description of Artificial Sequence: Synthetic oligonucleotide
ugagauucaucucacgacu

SEQ ID NO: 55429 - RNA, 19 nt, Artificial Sequence
  Description of Artificial Sequence: Synthetic oligonucleotide
ugugauagccucauucuug

SEQ ID NO: 55430 - RNA, 19 nt, Artificial Sequence
  Description of Artificial Sequence: Synthetic oligonucleotide
aaguguucuagacggcugg

SEQ ID NO: 55431 - RNA, 19 nt, Artificial Sequence
  Description of Artificial Sequence: Synthetic oligonucleotide
cugacaucgaucauccacg

SEQ ID NO: 55432 - RNA, 19 nt, Artificial Sequence
  Description of Artificial Sequence: Synthetic oligonucleotide
agagcuauuucccaacuug

SEQ ID NO: 55433 - RNA, 19 nt, Artificial Sequence
  Description of Artificial Sequence: Synthetic oligonucleotide
agcauguuaguguggacac

SEQ ID NO: 55434 - RNA, 19 nt, Artificial Sequence
  Description of Artificial Sequence: Synthetic oligonucleotide
uccgccuugacuuccaugc

SEQ ID NO: 55435 - RNA, 19 nt, Artificial Sequence
  Description of Artificial Sequence: Synthetic oligonucleotide
ugcuaucaaucucuaggcg

SEQ ID NO: 55436 - RNA, 19 nt, Artificial Sequence
  Description of Artificial Sequence: Synthetic oligonucleotide
uuucugcgaagguauaaag

SEQ ID NO: 55437 - RNA, 19 nt, Artificial Sequence
  Description of Artificial Sequence: Synthetic oligonucleotide
uuccugacaucgaucaucc

SEQ ID NO: 55438 - RNA, 19 nt, Artificial Sequence
  Description of Artificial Sequence: Synthetic oligonucleotide
uccuccuucauucggauau

SEQ ID NO: 55439 - RNA, 19 nt, Artificial Sequence
  Description of Artificial Sequence: Synthetic oligonucleotide
uccccuagagcgcugauga

SEQ ID NO: 55440 - RNA, 19 nt, Artificial Sequence
  Description of Artificial Sequence: Synthetic oligonucleotide
gaucccauuucugcgaagg

SEQ ID NO: 55441 - RNA, 19 nt, Artificial Sequence
  Description of Artificial Sequence: Synthetic oligonucleotide
gaugaccucccguuugugg

SEQ ID NO: 55442 - RNA, 19 nt, Artificial Sequence
  Description of Artificial Sequence: Synthetic oligonucleotide
ugggcggcuggacagacgg

SEQ ID NO: 55443 - RNA, 19 nt, Artificial Sequence
  Description of Artificial Sequence: Synthetic oligonucleotide
aagccgaaguuccaccauc

SEQ ID NO: 55444 - RNA, 19 nt, Artificial Sequence
  Description of Artificial Sequence: Synthetic oligonucleotide
uugagaguuucaucgaagu

SEQ ID NO: 55445 - RNA, 19 nt, Artificial Sequence
  Description of Artificial Sequence: Synthetic oligonucleotide
uucugcgaagguauaaagu

SEQ ID NO: 55446 - RNA, 19 nt, Artificial Sequence
  Description of Artificial Sequence: Synthetic oligonucleotide
cucauuuagggccuggcug

SEQ ID NO: 55447 - RNA, 19 nt, Artificial Sequence
  Description of Artificial Sequence: Synthetic oligonucleotide
agcguuuccaugucagggg

SEQ ID NO: 55448 - RNA, 19 nt, Artificial Sequence
  Description of Artificial Sequence: Synthetic oligonucleotide
cacgauguccucauuuagg

SEQ ID NO: 55449 - RNA, 19 nt, Artificial Sequence
  Description of Artificial Sequence: Synthetic oligonucleotide
auagccucauucuuguacu

SEQ ID NO: 55450 - RNA, 19 nt, Artificial Sequence
  Description of Artificial Sequence: Synthetic oligonucleotide
ucuaucuccccgcggaucu

SEQ ID NO: 55451 - RNA, 19 nt, Artificial Sequence
  Description of Artificial Sequence: Synthetic oligonucleotide
uccugcuaagcccucacca

SEQ ID NO: 55452 - RNA, 19 nt, Artificial Sequence
  Description of Artificial Sequence: Synthetic oligonucleotide
ucgagcguuuccaugucag

SEQ ID NO: 55453 - RNA, 19 nt, Artificial Sequence
  Description of Artificial Sequence: Synthetic oligonucleotide
cauucggauauugauggcc

SEQ ID NO: 55454 - RNA, 19 nt, Artificial Sequence
  Description of Artificial Sequence: Synthetic oligonucleotide
cugcgaagguauaaagucc

SEQ ID NO: 55455 - RNA, 19 nt, Artificial Sequence
  Description of Artificial Sequence: Synthetic oligonucleotide
uagccgaagccgaaguucc

SEQ ID NO: 55456 - RNA, 19 nt, Artificial Sequence
  Description of Artificial Sequence: Synthetic oligonucleotide
gacacuagccgcucuguug

SEQ ID NO: 55457 - RNA, 19 nt, Artificial Sequence
  Description of Artificial Sequence: Synthetic oligonucleotide
aacauuuccccgaucgucu

SEQ ID NO: 55458 - RNA, 19 nt, Artificial Sequence
  Description of Artificial Sequence: Synthetic oligonucleotide
ugacaucgaucauccacgg

SEQ ID NO: 55459 - RNA, 19 nt, Artificial Sequence
  Description of Artificial Sequence: Synthetic oligonucleotide
aguggaaauuuuggagacc

SEQ ID NO: 55460 - RNA, 19 nt, Artificial Sequence
  Description of Artificial Sequence: Synthetic oligonucleotide
gacgcaggcgaucaucacc

SEQ ID NO: 55461 - RNA, 19 nt, Artificial Sequence
  Description of Artificial Sequence: Synthetic oligonucleotide
ugaagaccgugugugggcg

SEQ ID NO: 55462 - RNA, 19 nt, Artificial Sequence
  Description of Artificial Sequence: Synthetic oligonucleotide
caucucacgacugggacag

SEQ ID NO: 55463 - RNA, 19 nt, Artificial Sequence
  Description of Artificial Sequence: Synthetic oligonucleotide
aagaccgugugugggcggc

SEQ ID NO: 55464 - RNA, 19 nt, Artificial Sequence
  Description of Artificial Sequence: Synthetic oligonucleotide
acggugggagcccacugcc

SEQ ID NO: 55465 - RNA, 19 nt, Artificial Sequence
  Description of Artificial Sequence: Synthetic oligonucleotide
caacucugcccucacacgc

SEQ ID NO: 55466 - RNA, 19 nt, Artificial Sequence
  Description of Artificial Sequence: Synthetic oligonucleotide
uagacggcuggacacgcgc

SEQ ID NO: 55467 - RNA, 19 nt, Artificial Sequence
  Description of Artificial Sequence: Synthetic oligonucleotide
uuguccuaacuccuccagc

SEQ ID NO: 55468 - RNA, 19 nt, Artificial Sequence
  Description of Artificial Sequence: Synthetic oligonucleotide
ucaucucacgacugggaca

SEQ ID NO: 55469 - RNA, 19 nt, Artificial Sequence
  Description of Artificial Sequence: Synthetic oligonucleotide
agcucgagcguuuccaugu

SEQ ID NO: 55470 - RNA, 19 nt, Artificial Sequence
  Description of Artificial Sequence: Synthetic oligonucleotide
ugcccuucguacaacucug

SEQ ID NO: 55471 - RNA, 19 nt, Artificial Sequence
  Description of Artificial Sequence: Synthetic oligonucleotide
cugacuccaauuaauguaa

SEQ ID NO: 55472 - RNA, 19 nt, Artificial Sequence
  Description of Artificial Sequence: Synthetic oligonucleotide
uuggagucgcgguagggga

SEQ ID NO: 55473 - RNA, 19 nt, Artificial Sequence
  Description of Artificial Sequence: Synthetic oligonucleotide
agauagcuccuucuccaag

SEQ ID NO: 55474 - RNA, 19 nt, Artificial Sequence
  Description of Artificial Sequence: Synthetic oligonucleotide
uccuugagccguucgccgg

SEQ ID NO: 55475 - RNA, 19 nt, Artificial Sequence
  Description of Artificial Sequence: Synthetic oligonucleotide
cucuaaccgggccacuugg

SEQ ID NO: 55476 - RNA, 19 nt, Artificial Sequence
  Description of Artificial Sequence: Synthetic oligonucleotide
ucgguuguuucccgggccc

SEQ ID NO: 55477 - RNA, 19 nt, Artificial Sequence
  Description of Artificial Sequence: Synthetic oligonucleotide
acgguugaaguguguggcg

SEQ ID NO: 55478 - RNA, 19 nt, Artificial Sequence
  Description of Artificial Sequence: Synthetic oligonucleotide
gacaucgaucauccacggg

SEQ ID NO: 55479 - RNA, 19 nt, Artificial Sequence
  Description of Artificial Sequence: Synthetic oligonucleotide
uccucucggagugucaacc

SEQ ID NO: 55480 - RNA, 19 nt, Artificial Sequence
  Description of Artificial Sequence: Synthetic oligonucleotide
acgcaggcgaucaucaccg

SEQ ID NO: 55481 - RNA, 19 nt, Artificial Sequence
  Description of Artificial Sequence: Synthetic oligonucleotide
cuuccugucaggugggcuc

SEQ ID NO: 55482 - RNA, 19 nt, Artificial Sequence
  Description of Artificial Sequence: Synthetic oligonucleotide
uucggauauugauggccag

SEQ ID NO: 55483 - RNA, 19 nt, Artificial Sequence
  Description of Artificial Sequence: Synthetic oligonucleotide
ggggcuuaggcaaaggucc

SEQ ID NO: 55484 - RNA, 19 nt, Artificial Sequence
  Description of Artificial Sequence: Synthetic oligonucleotide
aagcucgagcguuuccaug

SEQ ID NO: 55485 - RNA, 19 nt, Artificial Sequence
  Description of Artificial Sequence: Synthetic oligonucleotide
agucucaucccaggcacgg

SEQ ID NO: 55486 - RNA, 19 nt, Artificial Sequence
  Description of Artificial Sequence: Synthetic oligonucleotide
aagagcuauuucccaacuu

SEQ ID NO: 55487 - RNA, 19 nt, Artificial Sequence
  Description of Artificial Sequence: Synthetic oligonucleotide
ucuaaccgggccacuuggc

SEQ ID NO: 55488 - RNA, 19 nt, Artificial Sequence
  Description of Artificial Sequence: Synthetic oligonucleotide
cuucguacaacucugcccu

SEQ ID NO: 55489 - RNA, 19 nt, Artificial Sequence
  Description of Artificial Sequence: Synthetic oligonucleotide
ccgacagugacacuagccg

SEQ ID NO: 55490 - RNA, 19 nt, Artificial Sequence
  Description of Artificial Sequence: Synthetic oligonucleotide
acgaugcugccguuuguuc

SEQ ID NO: 55491 - RNA, 19 nt, Artificial Sequence
  Description of Artificial Sequence: Synthetic oligonucleotide
agccgugucucacuuugag

SEQ ID NO: 55492 - RNA, 19 nt, Artificial Sequence
  Description of Artificial Sequence: Synthetic oligonucleotide
ugcgcugugugguccuccg

SEQ ID NO: 55493 - RNA, 19 nt, Artificial Sequence
  Description of Artificial Sequence: Synthetic oligonucleotide
agagcgcugaugacauugc

SEQ ID NO: 55494 - RNA, 19 nt, Artificial Sequence
  Description of Artificial Sequence: Synthetic oligonucleotide
ugaccucccguuuguggag

SEQ ID NO: 55495 - RNA, 19 nt, Artificial Sequence
  Description of Artificial Sequence: Synthetic oligonucleotide
auuucugcgaagguauaaa

SEQ ID NO: 55496 - RNA, 19 nt, Artificial Sequence
  Description of Artificial Sequence: Synthetic oligonucleotide
cuagccgaagccgaaguuc

SEQ ID NO: 55497 - RNA, 19 nt, Artificial Sequence
  Description of Artificial Sequence: Synthetic oligonucleotide
gaagaccgugugugggcgg

SEQ ID NO: 55498 - RNA, 19 nt, Artificial Sequence
  Description of Artificial Sequence: Synthetic oligonucleotide
gugucuaucuccccgcgga

SEQ ID NO: 55499 - RNA, 19 nt, Artificial Sequence
  Description of Artificial Sequence: Synthetic oligonucleotide
uucccaccggggcuuaggc

SEQ ID NO: 55500 - RNA, 19 nt, Artificial Sequence
  Description of Artificial Sequence: Synthetic oligonucleotide
ccuucguacaacucugccc

SEQ ID NO: 55501 - RNA, 19 nt, Artificial Sequence
  Description of Artificial Sequence: Synthetic oligonucleotide
agccgcuacggugggagcc

SEQ ID NO: 55502 - RNA, 19 nt, Artificial Sequence
  Description of Artificial Sequence: Synthetic oligonucleotide
ucuagacggcuggacacgc

SEQ ID NO: 55503 - RNA, 19 nt, Artificial Sequence
  Description of Artificial Sequence: Synthetic oligonucleotide
cuggcggcaugugauagcc

SEQ ID NO: 55504 - RNA, 19 nt, Artificial Sequence
  Description of Artificial Sequence: Synthetic oligonucleotide
ugacuccaauuaauguaaa

SEQ ID NO: 55505 - RNA, 19 nt, Artificial Sequence
  Description of Artificial Sequence: Synthetic oligonucleotide
ugagguaagggcuguccuu

SEQ ID NO: 55506 - RNA, 19 nt, Artificial Sequence
  Description of Artificial Sequence: Synthetic oligonucleotide
  modified_base (3)..(3): a, c, u, g, unknown or other
  modified_base (5)..(5): a, c, u, g, unknown or other
gcncncggcucccaggccg

SEQ ID NO: 55507 - RNA, 19 nt, Artificial Sequence
  Description of Artificial Sequence: Synthetic oligonucleotide
ugcugcucggagcuaacuu

SEQ ID NO: 55508 - RNA, 19 nt, Artificial Sequence
  Description of Artificial Sequence: Synthetic oligonucleotide
acggcuggcguaguugagg

SEQ ID NO: 55509 - RNA, 19 nt, Artificial Sequence
  Description of Artificial Sequence: Synthetic oligonucleotide
cucgguuguuucccgggcc

SEQ ID NO: 55510 - RNA, 19 nt, Artificial Sequence
  Description of Artificial Sequence: Synthetic oligonucleotide
aaggccuacaaaggguuuu

SEQ ID NO: 55511 - RNA, 19 nt, Artificial Sequence
  Description of Artificial Sequence: Synthetic oligonucleotide
ucuagccgaagccgaaguu

SEQ ID NO: 55512 - RNA, 19 nt, Artificial Sequence
  Description of Artificial Sequence: Synthetic oligonucleotide
ucgacccugcugaggagca

SEQ ID NO: 55513 - RNA, 19 nt, Artificial Sequence
  Description of Artificial Sequence: Synthetic oligonucleotide
guguguggcgccugugugc

SEQ ID NO: 55514 - RNA, 19 nt, Artificial Sequence
  Description of Artificial Sequence: Synthetic oligonucleotide
caccuugcgcgcagcaccg

SEQ ID NO: 55515 - RNA, 19 nt, Artificial Sequence
  Description of Artificial Sequence: Synthetic oligonucleotide
  modified_base (2)..(2): a, c, u, g, unknown or other
  modified_base (4)..(4): a, c, u, g, unknown or other
cncncggcucccaggccgg

SEQ ID NO: 55516 - RNA, 19 nt, Artificial Sequence
  Description of Artificial Sequence: Synthetic oligonucleotide
cuugccgcagcuugcuauc

SEQ ID NO: 55517 - RNA, 19 nt, Artificial Sequence
  Description of Artificial Sequence: Synthetic oligonucleotide
cugcacguuucucuccagc

SEQ ID NO: 55518 - RNA, 19 nt, Artificial Sequence
  Description of Artificial Sequence: Synthetic oligonucleotide
cuagacggcuggacacgcg

SEQ ID NO: 55519 - RNA, 19 nt, Artificial Sequence
  Description of Artificial Sequence: Synthetic oligonucleotide
ugagccguucgccggugcu

SEQ ID NO: 55520 - RNA, 19 nt, Artificial Sequence
  Description of Artificial Sequence: Synthetic oligonucleotide
uguuucccgggcccucagc

SEQ ID NO: 55521 - RNA, 19 nt, Artificial Sequence
  Description of Artificial Sequence: Synthetic oligonucleotide
gcuaucaaucucuaggcgu

SEQ ID NO: 55522 - RNA, 19 nt, Artificial Sequence
  Description of Artificial Sequence: Synthetic oligonucleotide
cucucggagugucaaccac

SEQ ID NO: 55523 - RNA, 19 nt, Artificial Sequence
  Description of Artificial Sequence: Synthetic oligonucleotide
gguugaaguguguggcgcc

SEQ ID NO: 55524 - RNA, 19 nt, Artificial Sequence
  Description of Artificial Sequence: Synthetic oligonucleotide
acugcacaagcucgagcgu

SEQ ID NO: 55525 - RNA, 19 nt, Artificial Sequence
  Description of Artificial Sequence: Synthetic oligonucleotide
cucgacccugcugaggagc

SEQ ID NO: 55526 - RNA, 19 nt, Artificial Sequence
  Description of Artificial Sequence: Synthetic oligonucleotide
uguggagcucuuguccuaa

SEQ ID NO: 55527 - RNA, 19 nt, Artificial Sequence
  Description of Artificial Sequence: Synthetic oligonucleotide
guuccccugcgcugugugg

SEQ ID NO: 55528 - RNA, 19 nt, Artificial Sequence
  Description of Artificial Sequence: Synthetic oligonucleotide
uccggccgccaguugacug

SEQ ID NO: 55529 - RNA, 19 nt, Artificial Sequence
  Description of Artificial Sequence: Synthetic oligonucleotide
ggugucuaucuccccgcgg

SEQ ID NO: 55530 - RNA, 19 nt, Artificial Sequence
  Description of Artificial Sequence: Synthetic oligonucleotide
gacggcuggacacgcgcac

SEQ ID NO: 55531 - RNA, 19 nt, Artificial Sequence
  Description of Artificial Sequence: Synthetic oligonucleotide
uggacgaaccccugcccuc

SEQ ID NO: 55532 - RNA, 19 nt, Artificial Sequence
  Description of Artificial Sequence: Synthetic oligonucleotide
cugccggucuugagaaccc

SEQ ID NO: 55533 - RNA, 19 nt, Artificial Sequence
  Description of Artificial Sequence: Synthetic oligonucleotide
ugucucacuuugagccgac

SEQ ID NO: 55534 - RNA, 19 nt, Artificial Sequence
  Description of Artificial Sequence: Synthetic oligonucleotide
cucuggauuuacaguguga

SEQ ID NO: 55535 - RNA, 19 nt, Artificial Sequence
  Description of Artificial Sequence: Synthetic oligonucleotide
ggcggcaugugauagccuc

SEQ ID NO: 55536 - RNA, 19 nt, Artificial Sequence
  Description of Artificial Sequence: Synthetic oligonucleotide
caggcgaucaucaccgucu

SEQ ID NO: 55537 - RNA, 19 nt, Artificial Sequence
  Description of Artificial Sequence: Synthetic oligonucleotide
ugacacuagccgcucuguu

SEQ ID NO: 55538 - RNA, 19 nt, Artificial Sequence
  Description of Artificial Sequence: Synthetic oligonucleotide
acgaaccccugcccucugg

SEQ ID NO: 55539 - RNA, 19 nt, Artificial Sequence
  Description of Artificial Sequence: Synthetic oligonucleotide
gcugcucggagcuaacuuc

SEQ ID NO: 55540 - RNA, 19 nt, Artificial Sequence
  Description of Artificial Sequence: Synthetic oligonucleotide
gagccgacagugacacuag

SEQ ID NO: 55541 - RNA, 19 nt, Artificial Sequence
  Description of Artificial Sequence: Synthetic oligonucleotide
uggagcgcucucgaugcca

SEQ ID NO: 55542 - RNA, 19 nt, Artificial Sequence
  Description of Artificial Sequence: Synthetic oligonucleotide
cuccaccgcgcacagccag

SEQ ID NO: 55543 - RNA, 19 nt, Artificial Sequence
  Description of Artificial Sequence: Synthetic oligonucleotide
gagcuauuucccaacuugu

SEQ ID NO: 55544 - RNA, 19 nt, Artificial Sequence
  Description of Artificial Sequence: Synthetic oligonucleotide
gaugcgcgucuccgagcgg

SEQ ID NO: 55545 - RNA, 19 nt, Artificial Sequence
  Description of Artificial Sequence: Synthetic oligonucleotide
ucaucaccgucuuggcauu

SEQ ID NO: 55546 - RNA, 19 nt, Artificial Sequence
  Description of Artificial Sequence: Synthetic oligonucleotide
ugacgcaggcgaucaucac

SEQ ID NO: 55547 - RNA, 19 nt, Artificial Sequence
  Description of Artificial Sequence: Synthetic oligonucleotide
  modified_base (5)..(5): a, c, u, g, unknown or other
  modified_base (7)..(7): a, c, u, g, unknown or other
gcgcncncggcucccaggc

SEQ ID NO: 55548 - RNA, 19 nt, Artificial Sequence
  Description of Artificial Sequence: Synthetic oligonucleotide
ggcccaauucacccacagg

SEQ ID NO: 55549 - RNA, 19 nt, Artificial Sequence
  Description of Artificial Sequence: Synthetic oligonucleotide
gcgggucugaacugggacc

SEQ ID NO: 55550 - RNA, 19 nt, Artificial Sequence
  Description of Artificial Sequence: Synthetic oligonucleotide
cuccgagcggugucgcggc

SEQ ID NO: 55551 - RNA, 19 nt, Artificial Sequence
  Description of Artificial Sequence: Synthetic oligonucleotide
aguguucuagacggcugga

SEQ ID NO: 55552 - RNA, 19 nt, Artificial Sequence
  Description of Artificial Sequence: Synthetic oligonucleotide
cuacggugggagcccacug

SEQ ID NO: 55553 - RNA, 19 nt, Artificial Sequence
  Description of Artificial Sequence: Synthetic oligonucleotide
ggucgaggcaagcggcuag

SEQ ID NO: 55554 - RNA, 19 nt, Artificial Sequence
  Description of Artificial Sequence: Synthetic oligonucleotide
uccgagcggugucgcggcg

SEQ ID NO: 55555 - RNA, 19 nt, Artificial Sequence
  Description of Artificial Sequence: Synthetic oligonucleotide
caggccggcagccgcuacg

SEQ ID NO: 55556 - RNA, 19 nt, Artificial Sequence
  Description of Artificial Sequence: Synthetic oligonucleotide
uggcgggucugaacuggga

SEQ ID NO: 55557 - RNA, 19 nt, Artificial Sequence
  Description of Artificial Sequence: Synthetic oligonucleotide
uccaccgcgcacagccagu

SEQ ID NO: 55558 - RNA, 19 nt, Artificial Sequence
  Description of Artificial Sequence: Synthetic oligonucleotide
guaggcggcgcuggugcgg

SEQ ID NO: 55559 - RNA, 19 nt, Artificial Sequence
  Description of Artificial Sequence: Synthetic oligonucleotide
gccgugucucacuuugagc

SEQ ID NO: 55560 - RNA, 19 nt, Artificial Sequence
  Description of Artificial Sequence: Synthetic oligonucleotide
augcgcgucuccgagcggu

SEQ ID NO: 55561 - RNA, 19 nt, Artificial Sequence
  Description of Artificial Sequence: Synthetic oligonucleotide
gucuccgagcggugucgcg

SEQ ID NO: 55562 - RNA, 19 nt, Artificial Sequence
  Description of Artificial Sequence: Synthetic oligonucleotide
gggugucuaucuccccgcg

SEQ ID NO: 55563 - RNA, 19 nt, Artificial Sequence
  Description of Artificial Sequence: Synthetic oligonucleotide
cauuuccugcuaagcccuc

SEQ ID NO: 55564 - RNA, 19 nt, Artificial Sequence
  Description of Artificial Sequence: Synthetic oligonucleotide
gcagccgcuacggugggag

SEQ ID NO: 55565 - RNA, 19 nt, Artificial Sequence
  Description of Artificial Sequence: Synthetic oligonucleotide
ugucgccgcaugagcugca

SEQ ID NO: 55566 - RNA, 19 nt, Artificial Sequence
  Description of Artificial Sequence: Synthetic oligonucleotide
cacuagccgcucuguugcc

SEQ ID NO: 55567 - RNA, 19 nt, Artificial Sequence
  Description of Artificial Sequence: Synthetic oligonucleotide
uccucuaaccgggccacuu

SEQ ID NO: 55568 - RNA, 19 nt, Artificial Sequence
  Description of Artificial Sequence: Synthetic oligonucleotide
uccugacaucgaucaucca

SEQ ID NO: 55569 - RNA, 19 nt, Artificial Sequence
  Description of Artificial Sequence: Synthetic oligonucleotide
cgugucucacuuugagccg

SEQ ID NO: 55570 - RNA, 19 nt, Artificial Sequence
  Description of Artificial Sequence: Synthetic oligonucleotide
cugaucccauuucugcgaa

SEQ ID NO: 55571 - RNA, 19 nt, Artificial Sequence
  Description of Artificial Sequence: Synthetic oligonucleotide
cgcagcguugcccaucucc

SEQ ID NO: 55572 - RNA, 19 nt, Artificial Sequence
  Description of Artificial Sequence: Synthetic oligonucleotide
cccuucguacaacucugcc

SEQ ID NO: 55573 - RNA, 19 nt, Artificial Sequence
  Description of Artificial Sequence: Synthetic oligonucleotide
cacggcuggcguaguugag

SEQ ID NO: 55574 - RNA, 19 nt, Artificial Sequence
  Description of Artificial Sequence: Synthetic oligonucleotide
cuaaccgggccacuuggcu

SEQ ID NO: 55575 - RNA, 19 nt, Artificial Sequence
  Description of Artificial Sequence: Synthetic oligonucleotide
aagcggcuaggagcccguc

SEQ ID NO: 55576 - RNA, 19 nt, Artificial Sequence
  Description of Artificial Sequence: Synthetic oligonucleotide
cucgagcguuuccauguca

SEQ ID NO: 55577 - RNA, 19 nt, Artificial Sequence
  Description of Artificial Sequence: Synthetic oligonucleotide
ggcgcgauugcggauguuc

SEQ ID NO: 55578 - RNA, 19 nt, Artificial Sequence
  Description of Artificial Sequence: Synthetic oligonucleotide
gccgccaguugacuguggc

SEQ ID NO: 55579 - RNA, 19 nt, Artificial Sequence
  Description of Artificial Sequence: Synthetic oligonucleotide
uggcggcaugugauagccu

SEQ ID NO: 55580 - RNA, 19 nt, Artificial Sequence
  Description of Artificial Sequence: Synthetic oligonucleotide
agggugcugcgcucgcccu

SEQ ID NO: 55581 - RNA, 19 nt, Artificial Sequence
  Description of Artificial Sequence: Synthetic oligonucleotide
gacacgcgcacgauguccu

SEQ ID NO: 55582 - RNA, 19 nt, Artificial Sequence
  Description of Artificial Sequence: Synthetic oligonucleotide
ccgccaguugacuguggcg

SEQ ID NO: 55583 - RNA, 19 nt, Artificial Sequence
  Description of Artificial Sequence: Synthetic oligonucleotide
accuugcgcgcagcaccgc

SEQ ID NO: 55584 - RNA, 19 nt, Artificial Sequence
  Description of Artificial Sequence: Synthetic oligonucleotide
ccuggacgaaccccugccc

SEQ ID NO: 55585 - RNA, 19 nt, Artificial Sequence
  Description of Artificial Sequence: Synthetic oligonucleotide
cucccuggacgaaccccug

SEQ ID NO: 55586 - RNA, 19 nt, Artificial Sequence
  Description of Artificial Sequence: Synthetic oligonucleotide
cuggagcgcucucgaugcc

SEQ ID NO: 55587 - RNA, 19 nt, Artificial Sequence
  Description of Artificial Sequence: Synthetic oligonucleotide
gucaggcccggaggcagag

SEQ ID NO: 55588 - RNA, 19 nt, Artificial Sequence
  Description of Artificial Sequence: Synthetic oligonucleotide
gguggcacccgcccuccug

SEQ ID NO: 55589 - RNA, 19 nt, Artificial Sequence
  Description of Artificial Sequence: Synthetic oligonucleotide
cggcuggcguaguugaggg

SEQ ID NO: 55590 - RNA, 19 nt, Artificial Sequence
  Description of Artificial Sequence: Synthetic oligonucleotide
uccuugccgcagcuugcua

SEQ ID NO: 55591 - RNA, 19 nt, Artificial Sequence
  Description of Artificial Sequence: Synthetic oligonucleotide
cucugggcccuuccuguca

SEQ ID NO: 55592 - RNA, 19 nt, Artificial Sequence
  Description of Artificial Sequence: Synthetic oligonucleotide
cgagcguuuccaugucagg

SEQ ID NO: 55593 - RNA, 19 nt, Artificial Sequence
  Description of Artificial Sequence: Synthetic oligonucleotide
  modified_base (11)..(11): a, c, u, g, unknown or other
  modified_base (13)..(13): a, c, u, g, unknown or other
cagcgcgcgcncncggcuc

SEQ ID NO: 55594 - RNA, 19 nt, Artificial Sequence
  Description of Artificial Sequence: Synthetic oligonucleotide
cuggacgaaccccugcccu

SEQ ID NO: 55595 - RNA, 19 nt, Artificial Sequence
  Description of Artificial Sequence: Synthetic oligonucleotide
gcaggcgaucaucaccguc

SEQ ID NO: 55596 - RNA, 19 nt, Artificial Sequence
  Description of Artificial Sequence: Synthetic oligonucleotide
aguugacuguggcgcgauu

SEQ ID NO: 55597 - RNA, 19 nt, Artificial Sequence
  Description of Artificial Sequence: Synthetic oligonucleotide
agacggcuggacacgcgca

SEQ ID NO: 55598 - RNA, 19 nt, Artificial Sequence
  Description of Artificial Sequence: Synthetic oligonucleotide
caagcuccgagaaggcaau

SEQ ID NO: 55599 - RNA, 19 nt, Artificial Sequence
  Description of Artificial Sequence: Synthetic oligonucleotide
uucgccggugcugccgguc

SEQ ID NO: 55600 - RNA, 19 nt, Artificial Sequence
  Description of Artificial Sequence: Synthetic oligonucleotide
guagcacccgcuggcggca

SEQ ID NO: 55601 - RNA, 19 nt, Artificial Sequence
  Description of Artificial Sequence: Synthetic oligonucleotide
gggccgccuucccugugcg

SEQ ID NO: 55602 - RNA, 19 nt, Artificial Sequence
  Description of Artificial Sequence: Synthetic oligonucleotide
gcgucuccgagcggugucg

SEQ ID NO: 55603 - RNA, 19 nt, Artificial Sequence
  Description of Artificial Sequence: Synthetic oligonucleotide
ggagcgcucucgaugccac

SEQ ID NO: 55604 - RNA, 19 nt, Artificial Sequence
  Description of Artificial Sequence: Synthetic oligonucleotide
ggcguaguugaggguguug

SEQ ID NO: 55605 - RNA, 19 nt, Artificial Sequence
  Description of Artificial Sequence: Synthetic oligonucleotide
ggcgaucaucaccgucuug

SEQ ID NO: 55606 - RNA, 19 nt, Artificial Sequence
  Description of Artificial Sequence: Synthetic oligonucleotide
ccagucccgcaccuugcgc

SEQ ID NO: 55607 - RNA, 19 nt, Artificial Sequence
  Description of Artificial Sequence: Synthetic oligonucleotide
agcacccgcuggcggcaug

SEQ ID NO: 55608 - RNA, 19 nt, Artificial Sequence
  Description of Artificial Sequence: Synthetic oligonucleotide
caucaccgucuuggcauuc

SEQ ID NO: 55609 - RNA, 19 nt, Artificial Sequence
  Description of Artificial Sequence: Synthetic oligonucleotide
caagcucgagcguuuccau

SEQ ID NO: 55610 - RNA, 19 nt, Artificial Sequence
  Description of Artificial Sequence: Synthetic oligonucleotide
cacgcgcacgauguccuca

SEQ ID NO: 55611 - RNA, 19 nt, Artificial Sequence
  Description of Artificial Sequence: Synthetic oligonucleotide
gcguuuccaugucaggggu

SEQ ID NO: 55612 - RNA, 19 nt, Artificial Sequence
  Description of Artificial Sequence: Synthetic oligonucleotide
gccgccuucccugugcgga

SEQ ID NO: 55613 - RNA, 19 nt, Artificial Sequence
  Description of Artificial Sequence: Synthetic oligonucleotide
gugggugccucggcgcuga

SEQ ID NO: 55614 - RNA, 19 nt, Artificial Sequence
  Description of Artificial Sequence: Synthetic oligonucleotide
  modified_base (7)..(7): a, c, u, g, unknown or other
  modified_base (9)..(9): a, c, u, g, unknown or other
gcgcgcncncggcucccag

SEQ ID NO: 55615 - RNA, 19 nt, Artificial Sequence
  Description of Artificial Sequence: Synthetic oligonucleotide
gcucgagcguuuccauguc

SEQ ID NO: 55616 - RNA, 19 nt, Artificial Sequence
  Description of Artificial Sequence: Synthetic oligonucleotide
ccgccuugacuuccaugcc

SEQ ID NO: 55617 - RNA, 19 nt, Artificial Sequence
  Description of Artificial Sequence: Synthetic oligonucleotide
gccgcuacggugggagccc

SEQ ID NO: 55618 - RNA, 19 nt, Artificial Sequence
  Description of Artificial Sequence: Synthetic oligonucleotide
agaccgugugugggcggcu

SEQ ID NO: 55619 - RNA, 19 nt, Artificial Sequence
  Description of Artificial Sequence: Synthetic oligonucleotide
cccguagcacccgcuggcg

SEQ ID NO: 55620 - RNA, 19 nt, Artificial Sequence
  Description of Artificial Sequence: Synthetic oligonucleotide
ccaaggccuacaaaggguu

SEQ ID NO: 55621 - RNA, 19 nt, Artificial Sequence
  Description of Artificial Sequence: Synthetic oligonucleotide
  modified_base (6)..(6): a, c, u, g, unknown or other
  modified_base (8)..(8): a, c, u, g, unknown or other
cgcgcncncggcucccagg

SEQ ID NO: 55622 - RNA, 19 nt, Artificial Sequence
  Description of Artificial Sequence: Synthetic oligonucleotide
gcccuucguacaacucugc

SEQ ID NO: 55623 - RNA, 19 nt, Artificial Sequence
  Description of Artificial Sequence: Synthetic oligonucleotide
caaggccuacaaaggguuu

SEQ ID NO: 55624 - RNA, 19 nt, Artificial Sequence
  Description of Artificial Sequence: Synthetic oligonucleotide
gcggugucgcggcggcccg

SEQ ID NO: 55625 - RNA, 19 nt, Artificial Sequence
  Description of Artificial Sequence: Synthetic oligonucleotide
  modified_base (12)..(12): a, c, u, g, unknown or other
  modified_base (14)..(14): a, c, u, g, unknown or other
gcagcgcgcgcncncggcu

SEQ ID NO: 55626 - RNA, 19 nt, Artificial Sequence
  Description of Artificial Sequence: Synthetic oligonucleotide
gcacaacauuuccccgauc

SEQ ID NO: 55627 - RNA, 19 nt, Artificial Sequence
  Description of Artificial Sequence: Synthetic oligonucleotide
ccucaccaagguggucucg

SEQ ID NO: 55628 - RNA, 19 nt, Artificial Sequence
  Description of Artificial Sequence: Synthetic oligonucleotide
gagcggugucgcggcggcc

SEQ ID NO: 55629 - RNA, 19 nt, Artificial Sequence
  Description of Artificial Sequence: Synthetic oligonucleotide
cgccuugacuuccaugcca

SEQ ID NO: 55630 - RNA, 19 nt, Artificial Sequence
  Description of Artificial Sequence: Synthetic oligonucleotide
cacgaugcugccguuuguu

SEQ ID NO: 55631 - RNA, 19 nt, Artificial Sequence
  Description of Artificial Sequence: Synthetic oligonucleotide
ccucauuuagggccuggcu

SEQ ID NO: 55632 - RNA, 19 nt, Artificial Sequence
  Description of Artificial Sequence: Synthetic oligonucleotide
ccguuuguggagcucuugu

SEQ ID NO: 55633 - RNA, 19 nt, Artificial Sequence
  Description of Artificial Sequence: Synthetic oligonucleotide
gcggcaugugauagccuca

SEQ ID NO: 55634 - RNA, 19 nt, Artificial Sequence
  Description of Artificial Sequence: Synthetic oligonucleotide
ccgagcggugucgcggcgg

SEQ ID NO: 55635 - RNA, 19 nt, Artificial Sequence
  Description of Artificial Sequence: Synthetic oligonucleotide
gcgcugugugguccuccgc

SEQ ID NO: 55636 - RNA, 19 nt, Artificial Sequence
  Description of Artificial Sequence: Synthetic oligonucleotide
gcgcacgauguccucauuu

SEQ ID NO: 55637 - RNA, 19 nt, Artificial Sequence
  Description of Artificial Sequence: Synthetic oligonucleotide
  modified_base (4)..(4): a, c, u, g, unknown or other
  modified_base (6)..(6): a, c, u, g, unknown or other
cgcncncggcucccaggcc

SEQ ID NO: 55638 - RNA, 19 nt, Artificial Sequence
  Description of Artificial Sequence: Synthetic oligonucleotide
ccgcucuucucagauagcu

SEQ ID NO: 55639 - RNA, 19 nt, Artificial Sequence
  Description of Artificial Sequence: Synthetic oligonucleotide
gugucgcggcggcccgcgc

SEQ ID NO: 55640 - RNA, 19 nt, Artificial Sequence
  Description of Artificial Sequence: Synthetic oligonucleotide
  modified_base (2)..(2): a, c, u, g, unknown or other
cncggcucccaggccggca

SEQ ID NO: 55641 - RNA, 19 nt, Artificial Sequence
  Description of Artificial Sequence: Synthetic oligonucleotide
gcuacggugggagcccacu

SEQ ID NO: 55642 - RNA, 19 nt, Artificial Sequence
  Description of Artificial Sequence: Synthetic oligonucleotide
ggcaagcggcuaggagccc

SEQ ID NO: 55643 - RNA, 19 nt, Artificial Sequence
  Description of Artificial Sequence: Synthetic oligonucleotide
ccaguugacuguggcgcga

SEQ ID NO: 55644 - RNA, 19 nt, Artificial Sequence
  Description of Artificial Sequence: Synthetic oligonucleotide
gcgcgauugcggauguucu

SEQ ID NO: 55645 - RNA, 19 nt, Artificial Sequence
  Description of Artificial Sequence: Synthetic oligonucleotide
ggcggcuggacagacgguu

SEQ ID NO: 55646 - RNA, 19 nt, Artificial Sequence
  Description of Artificial Sequence: Synthetic oligonucleotide
gucccgcaccuugcgcgca

SEQ ID NO: 55647 - RNA, 19 nt, Artificial Sequence
  Description of Artificial Sequence: Synthetic oligonucleotide
cuggaccgcucgcuggcau

SEQ ID NO: 55648 - RNA, 19 nt, Artificial Sequence
  Description of Artificial Sequence: Synthetic oligonucleotide
cuagagcgcugaugacauu

SEQ ID NO: 55649 - RNA, 19 nt, Artificial Sequence
  Description of Artificial Sequence: Synthetic oligonucleotide
cgucuccgagcggugucgc

SEQ ID NO: 55650 - RNA, 19 nt, Artificial Sequence
  Description of Artificial Sequence: Synthetic oligonucleotide
ccuccaccgcgcacagcca

SEQ ID NO: 55651 - RNA, 19 nt, Artificial Sequence
  Description of Artificial Sequence: Synthetic oligonucleotide
ccggccgccaguugacugu

SEQ ID NO: 55652 - RNA, 19 nt, Artificial Sequence
  Description of Artificial Sequence: Synthetic oligonucleotide
guucgccggugcugccggu

SEQ ID NO: 55653 - RNA, 19 nt, Artificial Sequence
  Description of Artificial Sequence: Synthetic oligonucleotide
ggcaugugauagccucauu

SEQ ID NO: 55654 - RNA, 19 nt, Artificial Sequence
  Description of Artificial Sequence: Synthetic oligonucleotide
gaccgcucgcuggcauccu

SEQ ID NO: 55655 - RNA, 19 nt, Artificial Sequence
  Description of Artificial Sequence: Synthetic oligonucleotide
  modified_base (9)..(9): a, c, u, g, unknown or other
  modified_base (11)..(11): a, c, u, g, unknown or other
gcgcgcgcncncggcuccc

SEQ ID NO: 55656 - RNA, 19 nt, Artificial Sequence
  Description of Artificial Sequence: Synthetic oligonucleotide
cgcccuccaccgcgcacag

SEQ ID NO: 55657 - RNA, 19 nt, Artificial Sequence
  Description of Artificial Sequence: Synthetic oligonucleotide
cgacccugcugaggagcag

SEQ ID NO: 55658 - RNA, 19 nt, Artificial Sequence
  Description of Artificial Sequence: Synthetic oligonucleotide
cgcuacggugggagcccac

SEQ ID NO: 55659 - RNA, 19 nt, Artificial Sequence
  Description of Artificial Sequence: Synthetic oligonucleotide
cuccucuaaccgggccacu

SEQ ID NO: 55660 - RNA, 19 nt, Artificial Sequence
  Description of Artificial Sequence: Synthetic oligonucleotide
ggcugacgcaggcgaucau

SEQ ID NO: 55661 - RNA, 19 nt, Artificial Sequence
  Description of Artificial Sequence: Synthetic oligonucleotide
cgcgcagcguugcccaucu

SEQ ID NO: 55662 - RNA, 19 nt, Artificial Sequence
  Description of Artificial Sequence: Synthetic oligonucleotide
cgggucgaggcaagcggcu

SEQ ID NO: 55663 - RNA, 19 nt, Artificial Sequence
  Description of Artificial Sequence: Synthetic oligonucleotide
ccucaggcgcuugcucucu

SEQ ID NO: 55664 - RNA, 19 nt, Artificial Sequence
  Description of Artificial Sequence: Synthetic oligonucleotide
ccgcuacggugggagccca

SEQ ID NO: 55665 - RNA, 19 nt, Artificial Sequence
  Description of Artificial Sequence: Synthetic oligonucleotide
  modified_base (8)..(8): a, c, u, g, unknown or other
  modified_base (10)..(10): a, c, u, g, unknown or other
cgcgcgcncncggcuccca

SEQ ID NO: 55666 - RNA, 19 nt, Artificial Sequence
  Description of Artificial Sequence: Synthetic oligonucleotide
cgcgcacgauguccucauu

SEQ ID NO: 55667 - RNA, 19 nt, Artificial Sequence
  Description of Artificial Sequence: Synthetic oligonucleotide
  modified_base (1)..(1): a, c, u, g, unknown or other
  modified_base (3)..(3): a, c, u, g, unknown or other
ncncggcucccaggccggc

SEQ ID NO: 55668 - RNA, 19 nt, Artificial Sequence
  Description of Artificial Sequence: Synthetic oligonucleotide
gaaacuaugagcuaccagc

SEQ ID NO: 55669 - RNA, 19 nt, Artificial Sequence
  Description of Artificial Sequence: Synthetic oligonucleotide
uaaacgauauccaauaaug

SEQ ID NO: 55670 - RNA, 19 nt, Artificial Sequence
  Description of Artificial Sequence: Synthetic oligonucleotide
aauuauaguaucgccaaac

SEQ ID NO: 55671 - RNA, 19 nt, Artificial Sequence
  Description of Artificial Sequence: Synthetic oligonucleotide
uuugcgaaugacaugaccc

SEQ ID NO: 55672 - RNA, 19 nt, Artificial Sequence
  Description of Artificial Sequence: Synthetic oligonucleotide
aggacuaucucucagcugg

SEQ ID NO: 55673 - RNA, 19 nt, Artificial Sequence
  Description of Artificial Sequence: Synthetic oligonucleotide
ucgccaaacacaaucaacg

SEQ ID NO: 55674 - RNA, 19 nt, Artificial Sequence
  Description of Artificial Sequence: Synthetic oligonucleotide
uuagcauaccacucgaugg

SEQ ID NO: 55675 - RNA, 19 nt, Artificial Sequence
  Description of Artificial Sequence: Synthetic oligonucleotide
aaacguaauacagcaaagc

SEQ ID NO: 55676 - RNA, 19 nt, Artificial Sequence
  Description of Artificial Sequence: Synthetic oligonucleotide
ugaauuugugguaauacca

SEQ ID NO: 55677 - RNA, 19 nt, Artificial Sequence
  Description of Artificial Sequence: Synthetic oligonucleotide
uuuacacacacacacacac

SEQ ID NO: 55678 - RNA, 19 nt, Artificial Sequence
  Description of Artificial Sequence: Synthetic oligonucleotide
uaucaguagagccagguug

SEQ ID NO: 55679 - RNA, 19 nt, Artificial Sequence
  Description of Artificial Sequence: Synthetic oligonucleotide
aacguaauacagcaaagcu

SEQ ID NO: 55680 - RNA, 19 nt, Artificial Sequence
  Description of Artificial Sequence: Synthetic oligonucleotide
uugaauaacacgauggcau

SEQ ID NO: 55681 - RNA, 19 nt, Artificial Sequence
  Description of Artificial Sequence: Synthetic oligonucleotide
uuugaaaggccguucaaag

SEQ ID NO: 55682 - RNA, 19 nt, Artificial Sequence
  Description of Artificial Sequence: Synthetic oligonucleotide
aauauaguccauguuccac

SEQ ID NO: 55683 - RNA, 19 nt, Artificial Sequence
  Description of Artificial Sequence: Synthetic oligonucleotide
aauuugugguaauaccauc

SEQ ID NO: 55684 - RNA, 19 nt, Artificial Sequence
  Description of Artificial Sequence: Synthetic oligonucleotide
accgauuucuaauacagag

SEQ ID NO: 55685 - RNA, 19 nt, Artificial Sequence
  Description of Artificial Sequence: Synthetic oligonucleotide
cuaauggugauucaugaag

SEQ ID NO: 55686 - RNA, 19 nt, Artificial Sequence
  Description of Artificial Sequence: Synthetic oligonucleotide
uguuugauaacuacauucu

SEQ ID NO: 55687 - RNA, 19 nt, Artificial Sequence
  Description of Artificial Sequence: Synthetic oligonucleotide
uuaaccaguacuucgcugc

SEQ ID NO: 55688 - RNA, 19 nt, Artificial Sequence
  Description of Artificial Sequence: Synthetic oligonucleotide
uaccuauacagacacaggc

SEQ ID NO: 55689 - RNA, 19 nt, Artificial Sequence
  Description of Artificial Sequence: Synthetic oligonucleotide
aagauuguaggaugcaucu

SEQ ID NO: 55690 - RNA, 19 nt, Artificial Sequence
  Description of Artificial Sequence: Synthetic oligonucleotide
ugccagucuauucuaaugg

SEQ ID NO: 55691 - RNA, 19 nt, Artificial Sequence
  Description of Artificial Sequence: Synthetic oligonucleotide
acaaucaacgcccaaauau

SEQ ID NO: 55692 - RNA, 19 nt, Artificial Sequence
  Description of Artificial Sequence: Synthetic oligonucleotide
auuugugguaauaccaucc

SEQ ID NO: 55693 - RNA, 19 nt, Artificial Sequence
  Description of Artificial Sequence: Synthetic oligonucleotide
ucuagauguuauugcaugg

SEQ ID NO: 55694 - RNA, 19 nt, Artificial Sequence
  Description of Artificial Sequence: Synthetic oligonucleotide
uucacaagacauuuaaggu

SEQ ID NO: 55695 - RNA, 19 nt, Artificial Sequence
  Description of Artificial Sequence: Synthetic oligonucleotide
uuuguucacuccaaggcgc

SEQ ID NO: 55696 - RNA, 19 nt, Artificial Sequence
  Description of Artificial Sequence: Synthetic oligonucleotide
aaugacagucugauggccc

SEQ ID NO: 55697 - RNA, 19 nt, Artificial Sequence
  Description of Artificial Sequence: Synthetic oligonucleotide
cuuuuaaccaguacuucgc

SEQ ID NO: 55698 - RNA, 19 nt, Artificial Sequence
  Description of Artificial Sequence: Synthetic oligonucleotide
aaaggacuaucucucagcu

SEQ ID NO: 55699 - RNA, 19 nt, Artificial Sequence
  Description of Artificial Sequence: Synthetic oligonucleotide
ugcuaaaacguaauacagc

SEQ ID NO: 55700 - RNA, 19 nt, Artificial Sequence
  Description of Artificial Sequence: Synthetic oligonucleotide
uacacacacacacacacac

SEQ ID NO: 55701 - RNA, 19 nt, Artificial Sequence
  Description of Artificial Sequence: Synthetic oligonucleotide
caauguacaaugcuauugc

SEQ ID NO: 55702 - RNA, 19 nt, Artificial Sequence
  Description of Artificial Sequence: Synthetic oligonucleotide
cuuuuacacacacacacac

SEQ ID NO: 55703 - RNA, 19 nt, Artificial Sequence
  Description of Artificial Sequence: Synthetic oligonucleotide
augcccucgcaucugaucc

SEQ ID NO: 55704 - RNA, 19 nt, Artificial Sequence
  Description of Artificial Sequence: Synthetic oligonucleotide
ugaugcaaucccuuggaag

SEQ ID NO: 55705 - RNA, 19 nt, Artificial Sequence
  Description of Artificial Sequence: Synthetic oligonucleotide
uuugugguaauaccauccc

SEQ ID NO: 55706 - RNA, 19 nt, Artificial Sequence
  Description of Artificial Sequence: Synthetic oligonucleotide
gagucuaaugguuucaaca

SEQ ID NO: 55707 - RNA, 19 nt, Artificial Sequence
  Description of Artificial Sequence: Synthetic oligonucleotide
aauuuguuugauaacuaca

SEQ ID NO: 55708 - RNA, 19 nt, Artificial Sequence
  Description of Artificial Sequence: Synthetic oligonucleotide
ucaacgcccaaauaucucc

SEQ ID NO: 55709 - RNA, 19 nt, Artificial Sequence
  Description of Artificial Sequence: Synthetic oligonucleotide
acggagaaauuauaguauc

SEQ ID NO: 55710 - RNA, 19 nt, Artificial Sequence
  Description of Artificial Sequence: Synthetic oligonucleotide
gaucacuacggacagcaag

SEQ ID NO: 55711 - RNA, 19 nt, Artificial Sequence
  Description of Artificial Sequence: Synthetic oligonucleotide
gauauaguaaagagaacac

SEQ ID NO: 55712 - RNA, 19 nt, Artificial Sequence
  Description of Artificial Sequence: Synthetic oligonucleotide
agaauguggugugagacgg

SEQ ID NO: 55713 - RNA, 19 nt, Artificial Sequence
  Description of Artificial Sequence: Synthetic oligonucleotide
uccguaagaaacacagaag

SEQ ID NO: 55714 - RNA, 19 nt, Artificial Sequence
  Description of Artificial Sequence: Synthetic oligonucleotide
uauuuacuacuguagcagc

SEQ ID NO: 55715 - RNA, 19 nt, Artificial Sequence
  Description of Artificial Sequence: Synthetic oligonucleotide
aauaaugucaucagaugau

SEQ ID NO: 55716 - RNA, 19 nt, Artificial Sequence
  Description of Artificial Sequence: Synthetic oligonucleotide
acauaaacgauauccaaua

SEQ ID NO: 55717 - RNA, 19 nt, Artificial Sequence
  Description of Artificial Sequence: Synthetic oligonucleotide
ucacaagacauuuaaggua

SEQ ID NO: 55718 - RNA, 19 nt, Artificial Sequence
  Description of Artificial Sequence: Synthetic oligonucleotide
uggacgugcaaguucaccc

SEQ ID NO: 55719 - RNA, 19 nt, Artificial Sequence
  Description of Artificial Sequence: Synthetic oligonucleotide
agcacuacgacucuagaaa

SEQ ID NO: 55720 - RNA, 19 nt, Artificial Sequence
  Description of Artificial Sequence: Synthetic oligonucleotide
ucauauaucagugcagggu

SEQ ID NO: 55721 - RNA, 19 nt, Artificial Sequence
  Description of Artificial Sequence: Synthetic oligonucleotide
agaaauuauaguaucgcca

SEQ ID NO: 55722 - RNA, 19 nt, Artificial Sequence
  Description of Artificial Sequence: Synthetic oligonucleotide
uuauagacgucacauguuu

SEQ ID NO: 55723 - RNA, 19 nt, Artificial Sequence
  Description of Artificial Sequence: Synthetic oligonucleotide
gguaauaccaucccaggcc

SEQ ID NO: 55724 - RNA, 19 nt, Artificial Sequence
  Description of Artificial Sequence: Synthetic oligonucleotide
auaaacgauauccaauaau

SEQ ID NO: 55725 - RNA, 19 nt, Artificial Sequence
  Description of Artificial Sequence: Synthetic oligonucleotide
uugacccuugaauaacacg

SEQ ID NO: 55726 - RNA, 19 nt, Artificial Sequence
  Description of Artificial Sequence: Synthetic oligonucleotide
aaggcaagccgucuguucu

SEQ ID NO: 55727 - RNA, 19 nt, Artificial Sequence
  Description of Artificial Sequence: Synthetic oligonucleotide
aaguucacccucgaggcuc

SEQ ID NO: 55728 - RNA, 19 nt, Artificial Sequence
  Description of Artificial Sequence: Synthetic oligonucleotide
auacgggaaacugaggagg

SEQ ID NO: 55729 - RNA, 19 nt, Artificial Sequence
  Description of Artificial Sequence: Synthetic oligonucleotide
guauucaccagccagcguc

SEQ ID NO: 55730 - RNA, 19 nt, Artificial Sequence
  Description of Artificial Sequence: Synthetic oligonucleotide
auaacacgauggcauaguc

SEQ ID NO: 55731 - RNA, 19 nt, Artificial Sequence
  Description of Artificial Sequence: Synthetic oligonucleotide
auaacuacauucugcucug

SEQ ID NO: 55732 - RNA, 19 nt, Artificial Sequence
  Description of Artificial Sequence: Synthetic oligonucleotide
auagacgucacauguuucu

SEQ ID NO: 55733 - RNA, 19 nt, Artificial Sequence
  Description of Artificial Sequence: Synthetic oligonucleotide
cauagucauauaucagugc

SEQ ID NO: 55734 - RNA, 19 nt, Artificial Sequence
  Description of Artificial Sequence: Synthetic oligonucleotide
cuuagcauaccacucgaug

SEQ ID NO: 55735 - RNA, 19 nt, Artificial Sequence
  Description of Artificial Sequence: Synthetic oligonucleotide
aacauaaacgauauccaau

SEQ ID NO: 55736 - RNA, 19 nt, Artificial Sequence
  Description of Artificial Sequence: Synthetic oligonucleotide
aguaguaaaggucucccau

SEQ ID NO: 55737 - RNA, 19 nt, Artificial Sequence
  Description of Artificial Sequence: Synthetic oligonucleotide
uuuuacacacacacacaca

SEQ ID NO: 55738 - RNA, 19 nt, Artificial Sequence
  Description of Artificial Sequence: Synthetic oligonucleotide
ugugggucccagaacaaug

SEQ ID NO: 55739 - RNA, 19 nt, Artificial Sequence
  Description of Artificial Sequence: Synthetic oligonucleotide
uuuaaccaguacuucgcug

SEQ ID NO: 55740 - RNA, 19 nt, Artificial Sequence
  Description of Artificial Sequence: Synthetic oligonucleotide
cucgguuugggacucagag

SEQ ID NO: 55741 - RNA, 19 nt, Artificial Sequence
  Description of Artificial Sequence: Synthetic oligonucleotide
ucaaggggugucuucguag

SEQ ID NO: 55742 - RNA, 19 nt, Artificial Sequence
  Description of Artificial Sequence: Synthetic oligonucleotide
uuuuaaccaguacuucgcu

SEQ ID NO: 55743 - RNA, 19 nt, Artificial Sequence
  Description of Artificial Sequence: Synthetic oligonucleotide
ucuaaauacaggaccccaa

SEQ ID NO: 55744 - RNA, 19 nt, Artificial Sequence
  Description of Artificial Sequence: Synthetic oligonucleotide
aacuguaaccaugggguag

SEQ ID NO: 55745 - RNA, 19 nt, Artificial Sequence
  Description of Artificial Sequence: Synthetic oligonucleotide
agcugugucguuguaauag

SEQ ID NO: 55746 - RNA, 19 nt, Artificial Sequence
  Description of Artificial Sequence: Synthetic oligonucleotide
cacacacacacacacacac

SEQ ID NO: 55747 - RNA, 19 nt, Artificial Sequence
  Description of Artificial Sequence: Synthetic oligonucleotide
agacgucacauguuucucg

SEQ ID NO: 55748 - RNA, 19 nt, Artificial Sequence
  Description of Artificial Sequence: Synthetic oligonucleotide
ugugcugccgcguugccgc

SEQ ID NO: 55749 - RNA, 19 nt, Artificial Sequence
  Description of Artificial Sequence: Synthetic oligonucleotide
acaguauugcauuacugau

SEQ ID NO: 55750 - RNA, 19 nt, Artificial Sequence
  Description of Artificial Sequence: Synthetic oligonucleotide
ucucgguuccggaacuugg

SEQ ID NO: 55751 - RNA, 19 nt, Artificial Sequence
  Description of Artificial Sequence: Synthetic oligonucleotide
uauagcaugcccucgcauc

SEQ ID NO: 55752 - RNA, 19 nt, Artificial Sequence
  Description of Artificial Sequence: Synthetic oligonucleotide
acauucaaggccccaccac

SEQ ID NO: 55753 - RNA, 19 nt, Artificial Sequence
  Description of Artificial Sequence: Synthetic oligonucleotide
uaacacgauggcauaguca

SEQ ID NO: 55754 - RNA, 19 nt, Artificial Sequence
  Description of Artificial Sequence: Synthetic oligonucleotide
ugauggaaacauaaacgau

SEQ ID NO: 55755 - RNA, 19 nt, Artificial Sequence
  Description of Artificial Sequence: Synthetic oligonucleotide
caaucaacgcccaaauauc

SEQ ID NO: 55756 - RNA, 19 nt, Artificial Sequence
  Description of Artificial Sequence: Synthetic oligonucleotide
auuuguuugauaacuacau

SEQ ID NO: 55757 - RNA, 19 nt, Artificial Sequence
  Description of Artificial Sequence: Synthetic oligonucleotide
acaccgauuucuaauacag

SEQ ID NO: 55758 - RNA, 19 nt, Artificial Sequence
  Description of Artificial Sequence: Synthetic oligonucleotide
caagauuguaggaugcauc

SEQ ID NO: 55759 - RNA, 19 nt, Artificial Sequence
  Description of Artificial Sequence: Synthetic oligonucleotide
uguuagccaucaugggugg

SEQ ID NO: 55760 - RNA, 19 nt, Artificial Sequence
  Description of Artificial Sequence: Synthetic oligonucleotide
aacacaaucaacgcccaaa

SEQ ID NO: 55761 - RNA, 19 nt, Artificial Sequence
  Description of Artificial Sequence: Synthetic oligonucleotide
gccaucuaaauacaggacc

SEQ ID NO: 55762 - RNA, 19 nt, Artificial Sequence
  Description of Artificial Sequence: Synthetic oligonucleotide
uugcccgugauauaguaaa

SEQ ID NO: 55763 - RNA, 19 nt, Artificial Sequence
  Description of Artificial Sequence: Synthetic oligonucleotide
aaucaacgcccaaauaucu

SEQ ID NO: 55764 - RNA, 19 nt, Artificial Sequence
  Description of Artificial Sequence: Synthetic oligonucleotide
ucaacauaggccuggucuc

SEQ ID NO: 55765 - RNA, 19 nt, Artificial Sequence
  Description of Artificial Sequence: Synthetic oligonucleotide
cucccucggacauucaagg

SEQ ID NO: 55766 - RNA, 19 nt, Artificial Sequence
  Description of Artificial Sequence: Synthetic oligonucleotide
uggccucgcaauaauggag

SEQ ID NO: 55767 - RNA, 19 nt, Artificial Sequence
  Description of Artificial Sequence: Synthetic oligonucleotide
gucauauaucagugcaggg

SEQ ID NO: 55768 - RNA, 19 nt, Artificial Sequence
  Description of Artificial Sequence: Synthetic oligonucleotide
augacaugacccaaguauc

SEQ ID NO: 55769 - RNA, 19 nt, Artificial Sequence
  Description of Artificial Sequence: Synthetic oligonucleotide
gaggcgauaguauuucaca

SEQ ID NO: 55770 - RNA, 19 nt, Artificial Sequence
  Description of Artificial Sequence: Synthetic oligonucleotide
aacugcucgguuugggacu

SEQ ID NO: 55771 - RNA, 19 nt, Artificial Sequence
  Description of Artificial Sequence: Synthetic oligonucleotide
uccccaaccagcuauugaa

SEQ ID NO: 55772 - RNA, 19 nt, Artificial Sequence
  Description of Artificial Sequence: Synthetic oligonucleotide
gaguuauagacgucacaug

SEQ ID NO: 55773 - RNA, 19 nt, Artificial Sequence
  Description of Artificial Sequence: Synthetic oligonucleotide
aagcacuacgacucuagaa

SEQ ID NO: 55774 - RNA, 19 nt, Artificial Sequence
  Description of Artificial Sequence: Synthetic oligonucleotide
aguuugaacccacaguauu

SEQ ID NO: 55775 - RNA, 19 nt, Artificial Sequence
  Description of Artificial Sequence: Synthetic oligonucleotide
agacuggacgugcaaguuc

SEQ ID NO: 55776 - RNA, 19 nt, Artificial Sequence
  Description of Artificial Sequence: Synthetic oligonucleotide
cuaccuauacagacacagg

SEQ ID NO: 55777 - RNA, 19 nt, Artificial Sequence
  Description of Artificial Sequence: Synthetic oligonucleotide
ugaacccacaguauugcau

SEQ ID NO: 55778 - RNA, 19 nt, Artificial Sequence
  Description of Artificial Sequence: Synthetic oligonucleotide
acuggccucgcaauaaugg

SEQ ID NO: 55779 - RNA, 19 nt, Artificial Sequence
  Description of Artificial Sequence: Synthetic oligonucleotide
auagcaugcccucgcaucu

SEQ ID NO: 55780 - RNA, 19 nt, Artificial Sequence
  Description of Artificial Sequence: Synthetic oligonucleotide
acuccuugacccuugaaua

SEQ ID NO: 55781 - RNA, 19 nt, Artificial Sequence
  Description of Artificial Sequence: Synthetic oligonucleotide
uguuuguacccaagauuca

SEQ ID NO: 55782 - RNA, 19 nt, Artificial Sequence
  Description of Artificial Sequence: Synthetic oligonucleotide
uguauagcaugcccucgca

SEQ ID NO: 55783 - RNA, 19 nt, Artificial Sequence
  Description of Artificial Sequence: Synthetic oligonucleotide
uguauacgcuguuuuguuc

SEQ ID NO: 55784 - RNA, 19 nt, Artificial Sequence
  Description of Artificial Sequence: Synthetic oligonucleotide
ccaucuaaauacaggaccc

SEQ ID NO: 55785 - RNA, 19 nt, Artificial Sequence
  Description of Artificial Sequence: Synthetic oligonucleotide
cuucguagcaauguugcug

SEQ ID NO: 55786 - RNA, 19 nt, Artificial Sequence
  Description of Artificial Sequence: Synthetic oligonucleotide
uaggcuucggaggcgauag

SEQ ID NO: 55787 - RNA, 19 nt, Artificial Sequence
  Description of Artificial Sequence: Synthetic oligonucleotide
uauagacgucacauguuuc

SEQ ID NO: 55788 - RNA, 19 nt, Artificial Sequence
  Description of Artificial Sequence: Synthetic oligonucleotide
uuacacacacacacacaca

SEQ ID NO: 55789 - RNA, 19 nt, Artificial Sequence
  Description of Artificial Sequence: Synthetic oligonucleotide
cacacacacacacaccuac

SEQ ID NO: 55790 - RNA, 19 nt, Artificial Sequence
  Description of Artificial Sequence: Synthetic oligonucleotide
ggcgauaguauuucacagg

SEQ ID NO: 55791 - RNA, 19 nt, Artificial Sequence
  Description of Artificial Sequence: Synthetic oligonucleotide
gucuucguagcaauguugc

SEQ ID NO: 55792 - RNA, 19 nt, Artificial Sequence
  Description of Artificial Sequence: Synthetic oligonucleotide
uacaguacacagacacucu

SEQ ID NO: 55793 - RNA, 19 nt, Artificial Sequence
  Description of Artificial Sequence: Synthetic oligonucleotide
ugggguaguccacucguug

SEQ ID NO: 55794 - RNA, 19 nt, Artificial Sequence
  Description of Artificial Sequence: Synthetic oligonucleotide
cccuuuuacacacacacac

SEQ ID NO: 55795 - RNA, 19 nt, Artificial Sequence
  Description of Artificial Sequence: Synthetic oligonucleotide
uugaaaggacuaucucuca

SEQ ID NO: 55796 - RNA, 19 nt, Artificial Sequence
  Description of Artificial Sequence: Synthetic oligonucleotide
gucguuguaauagaaaucu

SEQ ID NO: 55797 - RNA, 19 nt, Artificial Sequence
  Description of Artificial Sequence: Synthetic oligonucleotide
caccuaccuauacagacac

SEQ ID NO: 55798 - RNA, 19 nt, Artificial Sequence
  Description of Artificial Sequence: Synthetic oligonucleotide
uccaaggcgccuucuaacu

SEQ ID NO: 55799 - RNA, 19 nt, Artificial Sequence
  Description of Artificial Sequence: Synthetic oligonucleotide
acgcuguuuuguucacucc

SEQ ID NO: 55800 - RNA, 19 nt, Artificial Sequence
  Description of Artificial Sequence: Synthetic oligonucleotide
cuaauggucugauuaugga

SEQ ID NO: 55801 - RNA, 19 nt, Artificial Sequence
  Description of Artificial Sequence: Synthetic oligonucleotide
gccauugaccgccugaugc

SEQ ID NO: 55802 - RNA, 19 nt, Artificial Sequence
  Description of Artificial Sequence: Synthetic oligonucleotide
cuguauagcaugcccucgc

SEQ ID NO: 55803 - RNA, 19 nt, Artificial Sequence
  Description of Artificial Sequence: Synthetic oligonucleotide
gacaccgauuucuaauaca

SEQ ID NO: 55804 - RNA, 19 nt, Artificial Sequence
  Description of Artificial Sequence: Synthetic oligonucleotide
ugagucuaaugguuucaac

SEQ ID NO: 55805 - RNA, 19 nt, Artificial Sequence
  Description of Artificial Sequence: Synthetic oligonucleotide
cuuggaccucagcacaccg

SEQ ID NO: 55806 - RNA, 19 nt, Artificial Sequence
  Description of Artificial Sequence: Synthetic oligonucleotide
gcuaauggucugauuaugg

SEQ ID NO: 55807 - RNA, 19 nt, Artificial Sequence
  Description of Artificial Sequence: Synthetic oligonucleotide
ugcaaaugaaggggcaucu

SEQ ID NO: 55808 - RNA, 19 nt, Artificial Sequence
  Description of Artificial Sequence: Synthetic oligonucleotide
ugacgacagccucucacca

SEQ ID NO: 55809 - RNA, 19 nt, Artificial Sequence
  Description of Artificial Sequence: Synthetic oligonucleotide
cuugacccuugaauaacac

SEQ ID NO: 55810 - RNA, 19 nt, Artificial Sequence
  Description of Artificial Sequence: Synthetic oligonucleotide
augcaaaugaaggggcauc

SEQ ID NO: 55811 - RNA, 19 nt, Artificial Sequence
  Description of Artificial Sequence: Synthetic oligonucleotide
uuagccaucaugggugggu

SEQ ID NO: 55812 - RNA, 19 nt, Artificial Sequence
  Description of Artificial Sequence: Synthetic oligonucleotide
ggaggcguuacugggaugg

SEQ ID NO: 55813 - RNA, 19 nt, Artificial Sequence
  Description of Artificial Sequence: Synthetic oligonucleotide
gaauaagccggggugccug

SEQ ID NO: 55814 - RNA, 19 nt, Artificial Sequence
  Description of Artificial Sequence: Synthetic oligonucleotide
aacgcccaaauaucuccca

SEQ ID NO: 55815 - RNA, 19 nt, Artificial Sequence
  Description of Artificial Sequence: Synthetic oligonucleotide
ugauaacuacauucugcuc

SEQ ID NO: 55816 - RNA, 19 nt, Artificial Sequence
  Description of Artificial Sequence: Synthetic oligonucleotide
ggguguaauucuuugcuac

SEQ ID NO: 55817 - RNA, 19 nt, Artificial Sequence
  Description of Artificial Sequence: Synthetic oligonucleotide
uucacgaugccaguguuuu

SEQ ID NO: 55818 - RNA, 19 nt, Artificial Sequence
  Description of Artificial Sequence: Synthetic oligonucleotide
auuuacuacuguagcagca

SEQ ID NO: 55819 - RNA, 19 nt, Artificial Sequence
  Description of Artificial Sequence: Synthetic oligonucleotide
aucuaaauacaggacccca

SEQ ID NO: 55820 - RNA, 19 nt, Artificial Sequence
  Description of Artificial Sequence: Synthetic oligonucleotide
aguucacaagacauuuaag

SEQ ID NO: 55821 - RNA, 19 nt, Artificial Sequence
  Description of Artificial Sequence: Synthetic oligonucleotide
aauaagccggggugccugu

SEQ ID NO: 55822 - RNA, 19 nt, Artificial Sequence
  Description of Artificial Sequence: Synthetic oligonucleotide
ucgguuugggacucagaga

SEQ ID NO: 55823 - RNA, 19 nt, Artificial Sequence
  Description of Artificial Sequence: Synthetic oligonucleotide
caacgcccaaauaucuccc

SEQ ID NO: 55824 - RNA, 19 nt, Artificial Sequence
  Description of Artificial Sequence: Synthetic oligonucleotide
caucuaaauacaggacccc

SEQ ID NO: 55825 - RNA, 19 nt, Artificial Sequence
  Description of Artificial Sequence: Synthetic oligonucleotide
cccgugauauaguaaagag

SEQ ID NO: 55826 - RNA, 19 nt, Artificial Sequence
  Description of Artificial Sequence: Synthetic oligonucleotide
ugcccgugauauaguaaag

SEQ ID NO: 55827 - RNA, 19 nt, Artificial Sequence
  Description of Artificial Sequence: Synthetic oligonucleotide
aagccggggugccugucuc

SEQ ID NO: 55828 - RNA, 19 nt, Artificial Sequence
  Description of Artificial Sequence: Synthetic oligonucleotide
gcauacgggaaacugagga

SEQ ID NO: 55829 - RNA, 19 nt, Artificial Sequence
  Description of Artificial Sequence: Synthetic oligonucleotide
gacuggacgugcaaguuca

SEQ ID NO: 55830 - RNA, 19 nt, Artificial Sequence
  Description of Artificial Sequence: Synthetic oligonucleotide
uuggccaccccuuguugcc

SEQ ID NO: 55831 - RNA, 19 nt, Artificial Sequence
  Description of Artificial Sequence: Synthetic oligonucleotide
uaaccaguacuucgcugcu

SEQ ID NO: 55832 - RNA, 19 nt, Artificial Sequence
  Description of Artificial Sequence: Synthetic oligonucleotide
uuccccaaccagcuauuga

SEQ ID NO: 55833 - RNA, 19 nt, Artificial Sequence
  Description of Artificial Sequence: Synthetic oligonucleotide
acacacacacacacacacc

SEQ ID NO: 55834 - RNA, 19 nt, Artificial Sequence
  Description of Artificial Sequence: Synthetic oligonucleotide
acacacacacacaccuacc

SEQ ID NO: 55835 - RNA, 19 nt, Artificial Sequence
  Description of Artificial Sequence: Synthetic oligonucleotide
gugucguuguaauagaaau

SEQ ID NO: 55836 - RNA, 19 nt, Artificial Sequence
  Description of Artificial Sequence: Synthetic oligonucleotide
cauaccugugcuugagguc

SEQ ID NO: 55837 - RNA, 19 nt, Artificial Sequence
  Description of Artificial Sequence: Synthetic oligonucleotide
cucgcaauaauggaguaaa

SEQ ID NO: 55838 - RNA, 19 nt, Artificial Sequence
  Description of Artificial Sequence: Synthetic oligonucleotide
uucggaggcgauaguauuu

SEQ ID NO: 55839 - RNA, 19 nt, Artificial Sequence
  Description of Artificial Sequence: Synthetic oligonucleotide
ucuucguagcaauguugcu

SEQ ID NO: 55840 - RNA, 19 nt, Artificial Sequence
  Description of Artificial Sequence: Synthetic oligonucleotide
aucaacgcccaaauaucuc

SEQ ID NO: 55841 - RNA, 19 nt, Artificial Sequence
  Description of Artificial Sequence: Synthetic oligonucleotide
cuucgauguguccuccuug

SEQ ID NO: 55842 - RNA, 19 nt, Artificial Sequence
  Description of Artificial Sequence: Synthetic oligonucleotide
uggucggaggcaucugcag

SEQ ID NO: 55843 - RNA, 19 nt, Artificial Sequence
  Description of Artificial Sequence: Synthetic oligonucleotide
ccugguaguguuuguaccc

SEQ ID NO: 55844 - RNA, 19 nt, Artificial Sequence
  Description of Artificial Sequence: Synthetic oligonucleotide
gggguaguccacucguugg

SEQ ID NO: 55845 - RNA, 19 nt, Artificial Sequence
  Description of Artificial Sequence: Synthetic oligonucleotide
ggggcuaagcgacuccucg

SEQ ID NO: 55846 - RNA, 19 nt, Artificial Sequence
  Description of Artificial Sequence: Synthetic oligonucleotide
gaugugugcuaaauuuguc

SEQ ID NO: 55847 - RNA, 19 nt, Artificial Sequence
  Description of Artificial Sequence: Synthetic oligonucleotide
agacuguauagcaugcccu

SEQ ID NO: 55848 - RNA, 19 nt, Artificial Sequence
  Description of Artificial Sequence: Synthetic oligonucleotide
gauucauugacgacagccu

SEQ ID NO: 55849 - RNA, 19 nt, Artificial Sequence
  Description of Artificial Sequence: Synthetic oligonucleotide
acgcccaaauaucucccag

SEQ ID NO: 55850 - RNA, 19 nt, Artificial Sequence
  Description of Artificial Sequence: Synthetic oligonucleotide
uccuugacccuugaauaac

SEQ ID NO: 55851 - RNA, 19 nt, Artificial Sequence
  Description of Artificial Sequence: Synthetic oligonucleotide
uaaccaugggguaguccac

SEQ ID NO: 55852 - RNA, 19 nt, Artificial Sequence
  Description of Artificial Sequence: Synthetic oligonucleotide
gguuuugauggccauagua

SEQ ID NO: 55853 - RNA, 19 nt, Artificial Sequence
  Description of Artificial Sequence: Synthetic oligonucleotide
accuauacagacacaggca

SEQ ID NO: 55854 - RNA, 19 nt, Artificial Sequence
  Description of Artificial Sequence: Synthetic oligonucleotide
aaaccggcauccaguucac

SEQ ID NO: 55855 - RNA, 19 nt, Artificial Sequence
  Description of Artificial Sequence: Synthetic oligonucleotide
ucccuguauacgcuguuuu

SEQ ID NO: 55856 - RNA, 19 nt, Artificial Sequence
  Description of Artificial Sequence: Synthetic oligonucleotide
gguauguccuuguuuaaaa

SEQ ID NO: 55857 - RNA, 19 nt, Artificial Sequence
  Description of Artificial Sequence: Synthetic oligonucleotide
acgaugccaguguuuucuc

SEQ ID NO: 55858 - RNA, 19 nt, Artificial Sequence
  Description of Artificial Sequence: Synthetic oligonucleotide
gaagcacuacgacucuaga

SEQ ID NO: 55859 - RNA, 19 nt, Artificial Sequence
  Description of Artificial Sequence: Synthetic oligonucleotide
guacuucgcugcuuuagca

SEQ ID NO: 55860 - RNA, 19 nt, Artificial Sequence
  Description of Artificial Sequence: Synthetic oligonucleotide
ggguuuugggagcaggaug

SEQ ID NO: 55861 - RNA, 19 nt, Artificial Sequence
  Description of Artificial Sequence: Synthetic oligonucleotide
uugagucuaaugguuucaa

SEQ ID NO: 55862 - RNA, 19 nt, Artificial Sequence
  Description of Artificial Sequence: Synthetic oligonucleotide
ccacaaucccuccagguag

SEQ ID NO: 55863 - RNA, 19 nt, Artificial Sequence
  Description of Artificial Sequence: Synthetic oligonucleotide
agggcgcaggggcuaagcg

SEQ ID NO: 55864 - RNA, 19 nt, Artificial Sequence
  Description of Artificial Sequence: Synthetic oligonucleotide
cuaacugcucgguuuggga

SEQ ID NO: 55865 - RNA, 19 nt, Artificial Sequence
  Description of Artificial Sequence: Synthetic oligonucleotide
acccacaguauugcauuac

SEQ ID NO: 55866 - RNA, 19 nt, Artificial Sequence
  Description of Artificial Sequence: Synthetic oligonucleotide
uccacucguuggcuucggg

SEQ ID NO: 55867 - RNA, 19 nt, Artificial Sequence
  Description of Artificial Sequence: Synthetic oligonucleotide
ccucggacauucaaggccc

SEQ ID NO: 55868 - RNA, 19 nt, Artificial Sequence
  Description of Artificial Sequence: Synthetic oligonucleotide
uugaccgccugaugcaauc

SEQ ID NO: 55869 - RNA, 19 nt, Artificial Sequence
  Description of Artificial Sequence: Synthetic oligonucleotide
gaccgccugaugcaauccc

SEQ ID NO: 55870 - RNA, 19 nt, Artificial Sequence
  Description of Artificial Sequence: Synthetic oligonucleotide
ucccucggacauucaaggc

SEQ ID NO: 55871 - RNA, 19 nt, Artificial Sequence
  Description of Artificial Sequence: Synthetic oligonucleotide
cacacacacacacacaccu

SEQ ID NO: 55872 - RNA, 19 nt, Artificial Sequence
  Description of Artificial Sequence: Synthetic oligonucleotide
ggugugagacggcagcacc

SEQ ID NO: 55873 - RNA, 19 nt, Artificial Sequence
  Description of Artificial Sequence: Synthetic oligonucleotide
ucgauguguccuccuugug

SEQ ID NO: 55874 - RNA, 19 nt, Artificial Sequence
  Description of Artificial Sequence: Synthetic oligonucleotide
uaagccggggugccugucu

SEQ ID NO: 55875 - RNA, 19 nt, Artificial Sequence
  Description of Artificial Sequence: Synthetic oligonucleotide
ucugaucccgacaccgauu

SEQ ID NO: 55876 - RNA, 19 nt, Artificial Sequence
  Description of Artificial Sequence: Synthetic oligonucleotide
aacccacaguauugcauua

SEQ ID NO: 55877 - RNA, 19 nt, Artificial Sequence
  Description of Artificial Sequence: Synthetic oligonucleotide
cauaaacgauauccaauaa

SEQ ID NO: 55878 - RNA, 19 nt, Artificial Sequence
  Description of Artificial Sequence: Synthetic oligonucleotide
aggccguucaaaggguggg

SEQ ID NO: 55879 - RNA, 19 nt, Artificial Sequence
  Description of Artificial Sequence: Synthetic oligonucleotide
caccuuucauacagcuccc

SEQ ID NO: 55880 - RNA, 19 nt, Artificial Sequence
  Description of Artificial Sequence: Synthetic oligonucleotide
ugacccaaguauccauuuu

SEQ ID NO: 55881 - RNA, 19 nt, Artificial Sequence
  Description of Artificial Sequence: Synthetic oligonucleotide
caacauaggccuggucucc

SEQ ID NO: 55882 - RNA, 19 nt, Artificial Sequence
  Description of Artificial Sequence: Synthetic oligonucleotide
ucggaggcgauaguauuuc

SEQ ID NO: 55883 - RNA, 19 nt, Artificial Sequence
  Description of Artificial Sequence: Synthetic oligonucleotide
caaaaugcccuggccuuag

SEQ ID NO: 55884 - RNA, 19 nt, Artificial Sequence
  Description of Artificial Sequence: Synthetic oligonucleotide
ucuugggacugguuuugau

SEQ ID NO: 55885 - RNA, 19 nt, Artificial Sequence
  Description of Artificial Sequence: Synthetic oligonucleotide
gaucccgacaccgauuucu

SEQ ID NO: 55886 - RNA, 19 nt, Artificial Sequence
  Description of Artificial Sequence: Synthetic oligonucleotide
aucauuagccuuggagaga

SEQ ID NO: 55887 - RNA, 19 nt, Artificial Sequence
  Description of Artificial Sequence: Synthetic oligonucleotide
ggugauucaugaagaagac

SEQ ID NO: 55888 - RNA, 19 nt, Artificial Sequence
  Description of Artificial Sequence: Synthetic oligonucleotide
aguaaaggucucccauuuu

SEQ ID NO: 55889 - RNA, 19 nt, Artificial Sequence
  Description of Artificial Sequence: Synthetic oligonucleotide
ucccggagaauggaggcgu

SEQ ID NO: 55890 - RNA, 19 nt, Artificial Sequence
  Description of Artificial Sequence: Synthetic oligonucleotide
gacgugcaaguucacccuc

SEQ ID NO: 55891 - RNA, 19 nt, Artificial Sequence
  Description of Artificial Sequence: Synthetic oligonucleotide
ucgcaauaauggaguaaau

SEQ ID NO: 55892 - RNA, 19 nt, Artificial Sequence
  Description of Artificial Sequence: Synthetic oligonucleotide
gugggucauggucggaggc

SEQ ID NO: 55893 - RNA, 19 nt, Artificial Sequence
  Description of Artificial Sequence: Synthetic oligonucleotide
ggugggucauggucggagg

SEQ ID NO: 55894 - RNA, 19 nt, Artificial Sequence
  Description of Artificial Sequence: Synthetic oligonucleotide
acacacacacaccuaccua

SEQ ID NO: 55895 - RNA, 19 nt, Artificial Sequence
  Description of Artificial Sequence: Synthetic oligonucleotide
cuggacgugcaaguucacc

SEQ ID NO: 55896 - RNA, 19 nt, Artificial Sequence
  Description of Artificial Sequence: Synthetic oligonucleotide
ccucacaugucccuguuuc

SEQ ID NO: 55897 - RNA, 19 nt, Artificial Sequence
  Description of Artificial Sequence: Synthetic oligonucleotide
ggaguuauagacgucacau

SEQ ID NO: 55898 - RNA, 19 nt, Artificial Sequence
  Description of Artificial Sequence: Synthetic oligonucleotide
gcgauaguauuucacaggu

SEQ ID NO: 55899 - RNA, 19 nt, Artificial Sequence
  Description of Artificial Sequence: Synthetic oligonucleotide
uggguauguccuuguuuaa

SEQ ID NO: 55900 - RNA, 19 nt, Artificial Sequence
  Description of Artificial Sequence: Synthetic oligonucleotide
gacuggccucgcaauaaug

SEQ ID NO: 55901 - RNA, 19 nt, Artificial Sequence
  Description of Artificial Sequence: Synthetic oligonucleotide
cuggccucgcaauaaugga

SEQ ID NO: 55902 - RNA, 19 nt, Artificial Sequence
  Description of Artificial Sequence: Synthetic oligonucleotide
gccagcgucagauuccuuc

SEQ ID NO: 55903 - RNA, 19 nt, Artificial Sequence
  Description of Artificial Sequence: Synthetic oligonucleotide
gaauguggugugagacggc

SEQ ID NO: 55904 - RNA, 19 nt, Artificial Sequence
  Description of Artificial Sequence: Synthetic oligonucleotide
ugaccgccugaugcaaucc

SEQ ID NO: 55905 - RNA, 19 nt, Artificial Sequence
  Description of Artificial Sequence: Synthetic oligonucleotide
cuccuugacccuugaauaa

SEQ ID NO: 55906 - RNA, 19 nt, Artificial Sequence
  Description of Artificial Sequence: Synthetic oligonucleotide
agcauaccacucgauggcu

SEQ ID NO: 55907 - RNA, 19 nt, Artificial Sequence
  Description of Artificial Sequence: Synthetic oligonucleotide
guugccgcggguggcuucg

SEQ ID NO: 55908 - RNA, 19 nt, Artificial Sequence
  Description of Artificial Sequence: Synthetic oligonucleotide
cuguagcagcauacaguac

SEQ ID NO: 55909 - RNA, 19 nt, Artificial Sequence
  Description of Artificial Sequence: Synthetic oligonucleotide
gcgaucacuacggacagca

SEQ ID NO: 55910 - RNA, 19 nt, Artificial Sequence
  Description of Artificial Sequence: Synthetic oligonucleotide
ugcauggguugugauggaa

SEQ ID NO: 55911 - RNA, 19 nt, Artificial Sequence
  Description of Artificial Sequence: Synthetic oligonucleotide
agacuggccucgcaauaau

SEQ ID NO: 55912 - RNA, 19 nt, Artificial Sequence
  Description of Artificial Sequence: Synthetic oligonucleotide
gagacuggccucgcaauaa

SEQ ID NO: 55913 - RNA, 19 nt, Artificial Sequence
  Description of Artificial Sequence: Synthetic oligonucleotide
guaguaaaggucucccauu

SEQ ID NO: 55914 - RNA, 19 nt, Artificial Sequence
  Description of Artificial Sequence: Synthetic oligonucleotide
caaaaccggcauccaguuc

SEQ ID NO: 55915 - RNA, 19 nt, Artificial Sequence
  Description of Artificial Sequence: Synthetic oligonucleotide
cucguuacugaggcuccag

SEQ ID NO: 55916 - RNA, 19 nt, Artificial Sequence
  Description of Artificial Sequence: Synthetic oligonucleotide
gguuuugggagcaggaugu

SEQ ID NO: 55917 - RNA, 19 nt, Artificial Sequence
  Description of Artificial Sequence: Synthetic oligonucleotide
cugugucguuguaauagaa

SEQ ID NO: 55918 - RNA, 19 nt, Artificial Sequence
  Description of Artificial Sequence: Synthetic oligonucleotide
gggucccagaacaaugacc

SEQ ID NO: 55919 - RNA, 19 nt, Artificial Sequence
  Description of Artificial Sequence: Synthetic oligonucleotide
ucuggccgcuccucgcaga

SEQ ID NO: 55920 - RNA, 19 nt, Artificial Sequence
  Description of Artificial Sequence: Synthetic oligonucleotide
caccgauuucuaauacaga

SEQ ID NO: 55921 - RNA, 19 nt, Artificial Sequence
  Description of Artificial Sequence: Synthetic oligonucleotide
ggaggcgauaguauuucac

SEQ ID NO: 55922 - RNA, 19 nt, Artificial Sequence
  Description of Artificial Sequence: Synthetic oligonucleotide
caccgcucauaauauaacu

SEQ ID NO: 55923 - RNA, 19 nt, Artificial Sequence
  Description of Artificial Sequence: Synthetic oligonucleotide
uaguaucgccaaacacaau

SEQ ID NO: 55924 - RNA, 19 nt, Artificial Sequence
  Description of Artificial Sequence: Synthetic oligonucleotide
cuacggacagcaagaaggu

SEQ ID NO: 55925 - RNA, 19 nt, Artificial Sequence
  Description of Artificial Sequence: Synthetic oligonucleotide
ucauggucggaggcaucug

SEQ ID NO: 55926 - RNA, 19 nt, Artificial Sequence
  Description of Artificial Sequence: Synthetic oligonucleotide
uaccacucgauggcugccu

SEQ ID NO: 55927 - RNA, 19 nt, Artificial Sequence
  Description of Artificial Sequence: Synthetic oligonucleotide
cacacacacacaccuaccu

SEQ ID NO: 55928 - RNA, 19 nt, Artificial Sequence
  Description of Artificial Sequence: Synthetic oligonucleotide
guuuugggagcaggaugug

SEQ ID NO: 55929 - RNA, 19 nt, Artificial Sequence
  Description of Artificial Sequence: Synthetic oligonucleotide
gcugugucguuguaauaga

SEQ ID NO: 55930 - RNA, 19 nt, Artificial Sequence
  Description of Artificial Sequence: Synthetic oligonucleotide
cacgauggcauagucauau

SEQ ID NO: 55931 - RNA, 19 nt, Artificial Sequence
  Description of Artificial Sequence: Synthetic oligonucleotide
acagucugauggcccaguu

SEQ ID NO: 55932 - RNA, 19 nt, Artificial Sequence
  Description of Artificial Sequence: Synthetic oligonucleotide
acacacacacacacacaca

SEQ ID NO: 55933 - RNA, 19 nt, Artificial Sequence
  Description of Artificial Sequence: Synthetic oligonucleotide
gcgacuccucguuacugag

SEQ ID NO: 55934 - RNA, 19 nt, Artificial Sequence
  Description of Artificial Sequence: Synthetic oligonucleotide
uccucacaugucccuguuu

SEQ ID NO: 55935 - RNA, 19 nt, Artificial Sequence
  Description of Artificial Sequence: Synthetic oligonucleotide
cucguuggcuucggguggc

SEQ ID NO: 55936 - RNA, 19 nt, Artificial Sequence
  Description of Artificial Sequence: Synthetic oligonucleotide
ucggacauucaaggcccca

SEQ ID NO: 55937 - RNA, 19 nt, Artificial Sequence
  Description of Artificial Sequence: Synthetic oligonucleotide
cacgaugccaguguuuucu

SEQ ID NO: 55938 - RNA, 19 nt, Artificial Sequence
  Description of Artificial Sequence: Synthetic oligonucleotide
uucccuguauacgcuguuu

SEQ ID NO: 55939 - RNA, 19 nt, Artificial Sequence
  Description of Artificial Sequence: Synthetic oligonucleotide
ccuuuuacacacacacaca

SEQ ID NO: 55940 - RNA, 19 nt, Artificial Sequence
  Description of Artificial Sequence: Synthetic oligonucleotide
ccguucaaagggugggacc

SEQ ID NO: 55941 - RNA, 19 nt, Artificial Sequence
  Description of Artificial Sequence: Synthetic oligonucleotide
auaagccggggugccuguc

SEQ ID NO: 55942 - RNA, 19 nt, Artificial Sequence
  Description of Artificial Sequence: Synthetic oligonucleotide
cugccacgacccaggcugg

SEQ ID NO: 55943 - RNA, 19 nt, Artificial Sequence
  Description of Artificial Sequence: Synthetic oligonucleotide
ggcgcaggggcuaagcgac

SEQ ID NO: 55944 - RNA, 19 nt, Artificial Sequence
  Description of Artificial Sequence: Synthetic oligonucleotide
cccuguauacgcuguuuug

SEQ ID NO: 55945 - RNA, 19 nt, Artificial Sequence
  Description of Artificial Sequence: Synthetic oligonucleotide
ucccgacaccgauuucuaa

SEQ ID NO: 55946 - RNA, 19 nt, Artificial Sequence
  Description of Artificial Sequence: Synthetic oligonucleotide
ugaucccgacaccgauuuc

SEQ ID NO: 55947 - RNA, 19 nt, Artificial Sequence
  Description of Artificial Sequence: Synthetic oligonucleotide
ccaggcgaucacuacggac

SEQ ID NO: 55948 - RNA, 19 nt, Artificial Sequence
  Description of Artificial Sequence: Synthetic oligonucleotide
ggcauacgggaaacugagg

SEQ ID NO: 55949 - RNA, 19 nt, Artificial Sequence
  Description of Artificial Sequence: Synthetic oligonucleotide
aaccaguacuucgcugcuu

SEQ ID NO: 55950 - RNA, 19 nt, Artificial Sequence
  Description of Artificial Sequence: Synthetic oligonucleotide
guugcccgugauauaguaa

SEQ ID NO: 55951 - RNA, 19 nt, Artificial Sequence
  Description of Artificial Sequence: Synthetic oligonucleotide
accgccugaugcaaucccu

SEQ ID NO: 55952 - RNA, 19 nt, Artificial Sequence
  Description of Artificial Sequence: Synthetic oligonucleotide
guuauagacgucacauguu

SEQ ID NO: 55953 - RNA, 19 nt, Artificial Sequence
  Description of Artificial Sequence: Synthetic oligonucleotide
gucaaggggugucuucgua

SEQ ID NO: 55954 - RNA, 19 nt, Artificial Sequence
  Description of Artificial Sequence: Synthetic oligonucleotide
cacaaucaacgcccaaaua

SEQ ID NO: 55955 - RNA, 19 nt, Artificial Sequence
  Description of Artificial Sequence: Synthetic oligonucleotide
aggggcuaagcgacuccuc

SEQ ID NO: 55956 - RNA, 19 nt, Artificial Sequence
  Description of Artificial Sequence: Synthetic oligonucleotide
uacggacagcaagaagguu

SEQ ID NO: 55957 - RNA, 19 nt, Artificial Sequence
  Description of Artificial Sequence: Synthetic oligonucleotide
aguucacccucgaggcuca

SEQ ID NO: 55958 - RNA, 19 nt, Artificial Sequence
  Description of Artificial Sequence: Synthetic oligonucleotide
gccgcguugccgcgggugg

SEQ ID NO: 55959 - RNA, 19 nt, Artificial Sequence
  Description of Artificial Sequence: Synthetic oligonucleotide
cugaucccgacaccgauuu

SEQ ID NO: 55960 - RNA, 19 nt, Artificial Sequence
  Description of Artificial Sequence: Synthetic oligonucleotide
gcccgugauauaguaaaga

SEQ ID NO: 55961 - RNA, 19 nt, Artificial Sequence
  Description of Artificial Sequence: Synthetic oligonucleotide
guauagcaugcccucgcau

SEQ ID NO: 55962 - RNA, 19 nt, Artificial Sequence
  Description of Artificial Sequence: Synthetic oligonucleotide
ccauugaccgccugaugca

SEQ ID NO: 55963 - RNA, 19 nt, Artificial Sequence
  Description of Artificial Sequence: Synthetic oligonucleotide
cuucggaggcgauaguauu

SEQ ID NO: 55964 - RNA, 19 nt, Artificial Sequence
  Description of Artificial Sequence: Synthetic oligonucleotide
gauggagugaugggucaau

SEQ ID NO: 55965 - RNA, 19 nt, Artificial Sequence
  Description of Artificial Sequence: Synthetic oligonucleotide
gccgcggguggcuucgugc

SEQ ID NO: 55966 - RNA, 19 nt, Artificial Sequence
  Description of Artificial Sequence: Synthetic oligonucleotide
cauugaccgccugaugcaa

SEQ ID NO: 55967 - RNA, 19 nt, Artificial Sequence
  Description of Artificial Sequence: Synthetic oligonucleotide
cgucagauuccuuccagga

SEQ ID NO: 55968 - RNA, 19 nt, Artificial Sequence
  Description of Artificial Sequence: Synthetic oligonucleotide
ggguauguccuuguuuaaa

SEQ ID NO: 55969 - RNA, 19 nt, Artificial Sequence
  Description of Artificial Sequence: Synthetic oligonucleotide
gggcgcaggggcuaagcga

SEQ ID NO: 55970 - RNA, 19 nt, Artificial Sequence
  Description of Artificial Sequence: Synthetic oligonucleotide
cuaugagcuaccagcuguu

SEQ ID NO: 55971 - RNA, 19 nt, Artificial Sequence
  Description of Artificial Sequence: Synthetic oligonucleotide
ccucgcaucugaucccgac

SEQ ID NO: 55972 - RNA, 19 nt, Artificial Sequence
  Description of Artificial Sequence: Synthetic oligonucleotide
gccacauaccugcucccuc

SEQ ID NO: 55973 - RNA, 19 nt, Artificial Sequence
  Description of Artificial Sequence: Synthetic oligonucleotide
guccacucguuggcuucgg

SEQ ID NO: 55974 - RNA, 19 nt, Artificial Sequence
  Description of Artificial Sequence: Synthetic oligonucleotide
ggacgugcaaguucacccu

SEQ ID NO: 55975 - RNA, 19 nt, Artificial Sequence
  Description of Artificial Sequence: Synthetic oligonucleotide
gccguucaaagggugggac

SEQ ID NO: 55976 - RNA, 19 nt, Artificial Sequence
  Description of Artificial Sequence: Synthetic oligonucleotide
gucuauucuaauggugauu

SEQ ID NO: 55977 - RNA, 19 nt, Artificial Sequence
  Description of Artificial Sequence: Synthetic oligonucleotide
acacacacacacacaccua

SEQ ID NO: 55978 - RNA, 19 nt, Artificial Sequence
  Description of Artificial Sequence: Synthetic oligonucleotide
ggcguuacugggauggagu

SEQ ID NO: 55979 - RNA, 19 nt, Artificial Sequence
  Description of Artificial Sequence: Synthetic oligonucleotide
cucgcagaugugugcuaaa

SEQ ID NO: 55980 - RNA, 19 nt, Artificial Sequence
  Description of Artificial Sequence: Synthetic oligonucleotide
gugugagacggcagcaccu

SEQ ID NO: 55981 - RNA, 19 nt, Artificial Sequence
  Description of Artificial Sequence: Synthetic oligonucleotide
ccuuugcgaaugacaugac

SEQ ID NO: 55982 - RNA, 19 nt, Artificial Sequence
  Description of Artificial Sequence: Synthetic oligonucleotide
accuaccuauacagacaca

SEQ ID NO: 55983 - RNA, 19 nt, Artificial Sequence
  Description of Artificial Sequence: Synthetic oligonucleotide
cgacaccgauuucuaauac

SEQ ID NO: 55984 - RNA, 19 nt, Artificial Sequence
  Description of Artificial Sequence: Synthetic oligonucleotide
ggccgcuccucgcagaugu

SEQ ID NO: 55985 - RNA, 19 nt, Artificial Sequence
  Description of Artificial Sequence: Synthetic oligonucleotide
aggcuucggaggcgauagu

SEQ ID NO: 55986 - RNA, 19 nt, Artificial Sequence
  Description of Artificial Sequence: Synthetic oligonucleotide
gaggcguuacugggaugga

SEQ ID NO: 55987 - RNA, 19 nt, Artificial Sequence
  Description of Artificial Sequence: Synthetic oligonucleotide
ccuucuaacugcucgguuu

SEQ ID NO: 55988 - RNA, 19 nt, Artificial Sequence
  Description of Artificial Sequence: Synthetic oligonucleotide
ccgacaccgauuucuaaua

SEQ ID NO: 55989 - RNA, 19 nt, Artificial Sequence
  Description of Artificial Sequence: Synthetic oligonucleotide
aucccgacaccgauuucua

SEQ ID NO: 55990 - RNA, 19 nt, Artificial Sequence
  Description of Artificial Sequence: Synthetic oligonucleotide
ggccucgcaauaauggagu

SEQ ID NO: 55991 - RNA, 19 nt, Artificial Sequence
  Description of Artificial Sequence: Synthetic oligonucleotide
cccuuagcauaccacucga

SEQ ID NO: 55992 - RNA, 19 nt, Artificial Sequence
  Description of Artificial Sequence: Synthetic oligonucleotide
gcuaagcgacuccucguua

SEQ ID NO: 55993 - RNA, 19 nt, Artificial Sequence
  Description of Artificial Sequence: Synthetic oligonucleotide
ggcuucggaggcgauagua

SEQ ID NO: 55994 - RNA, 19 nt, Artificial Sequence
  Description of Artificial Sequence: Synthetic oligonucleotide
ccguacaucucauuagaau

SEQ ID NO: 55995 - RNA, 19 nt, Artificial Sequence
  Description of Artificial Sequence: Synthetic oligonucleotide
cgcuccucgcagaugugug

SEQ ID NO: 55996 - RNA, 19 nt, Artificial Sequence
  Description of Artificial Sequence: Synthetic oligonucleotide
ggcuaagcgacuccucguu

SEQ ID NO: 55997 - RNA, 19 nt, Artificial Sequence
  Description of Artificial Sequence: Synthetic oligonucleotide
gcgucccuucgaugugucc

SEQ ID NO: 55998 - RNA, 19 nt, Artificial Sequence
  Description of Artificial Sequence: Synthetic oligonucleotide
ggggugucuucguagcaau

SEQ ID NO: 55999 - RNA, 19 nt, Artificial Sequence
  Description of Artificial Sequence: Synthetic oligonucleotide
gccguacaucucauuagaa

SEQ ID NO: 56000 - RNA, 19 nt, Artificial Sequence
  Description of Artificial Sequence: Synthetic oligonucleotide
gggcuaagcgacuccucgu

SEQ ID NO: 56001 - RNA, 19 nt, Artificial Sequence
  Description of Artificial Sequence: Synthetic oligonucleotide
ggcgaucacuacggacagc

SEQ ID NO: 56002 - RNA, 19 nt, Artificial Sequence
  Description of Artificial Sequence: Synthetic oligonucleotide
caggggcuaagcgacuccu

SEQ ID NO: 56003 - RNA, 19 nt, Artificial Sequence
  Description of Artificial Sequence: Synthetic oligonucleotide
gccucgcaauaauggagua

SEQ ID NO: 56004 - RNA, 19 nt, Artificial Sequence
  Description of Artificial Sequence: Synthetic oligonucleotide
gccacgacccaggcuggug

SEQ ID NO: 56005 - RNA, 19 nt, Artificial Sequence
  Description of Artificial Sequence: Synthetic oligonucleotide
cgacagccucucaccaccc

SEQ ID NO: 56006 - RNA, 19 nt, Artificial Sequence
  Description of Artificial Sequence: Synthetic oligonucleotide
ggccguucaaaggguggga

SEQ ID NO: 56007 - RNA, 19 nt, Artificial Sequence
  Description of Artificial Sequence: Synthetic oligonucleotide
gcuucggaggcgauaguau

SEQ ID NO: 56008 - RNA, 19 nt, Artificial Sequence
  Description of Artificial Sequence: Synthetic oligonucleotide
cuaaggcaagccgucuguu

SEQ ID NO: 56009 - RNA, 19 nt, Artificial Sequence
  Description of Artificial Sequence: Synthetic oligonucleotide
ccucgcaauaauggaguaa

SEQ ID NO: 56010 - RNA, 19 nt, Artificial Sequence
  Description of Artificial Sequence: Synthetic oligonucleotide
gugagugauccaggcucgu

SEQ ID NO: 56011 - RNA, 19 nt, Artificial Sequence
  Description of Artificial Sequence: Synthetic oligonucleotide
cacccucgaggcucagggu

SEQ ID NO: 56012 - RNA, 19 nt, Artificial Sequence
  Description of Artificial Sequence: Synthetic oligonucleotide
gcucgguuugggacucaga

SEQ ID NO: 56013 - RNA, 19 nt, Artificial Sequence
  Description of Artificial Sequence: Synthetic oligonucleotide
cgucccuucgauguguccu

SEQ ID NO: 56014 - RNA, 19 nt, Artificial Sequence
  Description of Artificial Sequence: Synthetic oligonucleotide
gccuucuaacugcucgguu

SEQ ID NO: 56015 - RNA, 19 nt, Artificial Sequence
  Description of Artificial Sequence: Synthetic oligonucleotide
cggaggcgauaguauuuca

SEQ ID NO: 56016 - RNA, 19 nt, Artificial Sequence
  Description of Artificial Sequence: Synthetic oligonucleotide
ccucguuacugaggcucca

SEQ ID NO: 56017 - RNA, 19 nt, Artificial Sequence
  Description of Artificial Sequence: Synthetic oligonucleotide
cguugccgcggguggcuuc

SEQ ID NO: 56018 - RNA, 19 nt, Artificial Sequence
  Description of Artificial Sequence: Synthetic oligonucleotide
ccgcguugccgcggguggc

SEQ ID NO: 56019 - RNA, 19 nt, Artificial Sequence
  Description of Artificial Sequence: Synthetic oligonucleotide
ccgcggguggcuucgugcu

SEQ ID NO: 56020 - RNA, 19 nt, Artificial Sequence
  Description of Artificial Sequence: Synthetic oligonucleotide
ccggagaauggaggcguua

SEQ ID NO: 56021 - RNA, 19 nt, Artificial Sequence
  Description of Artificial Sequence: Synthetic oligonucleotide
ccgccugaugcaaucccuu

SEQ ID NO: 56022 - RNA, 19 nt, Artificial Sequence
  Description of Artificial Sequence: Synthetic oligonucleotide
cgccuucuaacugcucggu

SEQ ID NO: 56023 - RNA, 19 nt, Artificial Sequence
  Description of Artificial Sequence: Synthetic oligonucleotide
cucgaggcucaggguuguu

SEQ ID NO: 56024 - RNA, 19 nt, Artificial Sequence
  Description of Artificial Sequence: Synthetic oligonucleotide
cugccgcguugccgcgggu

SEQ ID NO: 56025 - RNA, 19 nt, Artificial Sequence
  Description of Artificial Sequence: Synthetic oligonucleotide
cgcguugccgcggguggcu

SEQ ID NO: 56026 - RNA, 19 nt, Artificial Sequence
  Description of Artificial Sequence: Synthetic oligonucleotide
gcguugccgcggguggcuu

SEQ ID NO: 56027 - RNA, 19 nt, Artificial Sequence
  Description of Artificial Sequence: Synthetic oligonucleotide
aauccuagcagcuaugugc

SEQ ID NO: 56028 - RNA, 19 nt, Artificial Sequence
  Description of Artificial Sequence: Synthetic oligonucleotide
aaccaauugagauaaucac

SEQ ID NO: 56029 - RNA, 19 nt, Artificial Sequence
  Description of Artificial Sequence: Synthetic oligonucleotide
uuacuaaucaguuuaaaac

SEQ ID NO: 56030 - RNA, 19 nt, Artificial Sequence
  Description of Artificial Sequence: Synthetic oligonucleotide
uguaucaugugcaaaagcu

SEQ ID NO: 56031 - RNA, 19 nt, Artificial Sequence
  Description of Artificial Sequence: Synthetic oligonucleotide
uuaauauaauuuaucuugc

SEQ ID NO: 56032 - RNA, 19 nt, Artificial Sequence
  Description of Artificial Sequence: Synthetic oligonucleotide
agggauaggcuccugaucc

SEQ ID NO: 56033 - RNA, 19 nt, Artificial Sequence
  Description of Artificial Sequence: Synthetic oligonucleotide
augacaguaauggaaaugc

SEQ ID NO: 56034 - RNA, 19 nt, Artificial Sequence
  Description of Artificial Sequence: Synthetic oligonucleotide
aauacgccggaagaaaucc

SEQ ID NO: 56035 - RNA, 19 nt, Artificial Sequence
  Description of Artificial Sequence: Synthetic oligonucleotide
aucuguaauucacagugcc

SEQ ID NO: 56036 - RNA, 19 nt, Artificial Sequence
  Description of Artificial Sequence: Synthetic oligonucleotide
uguugauggaauaaccuug

SEQ ID NO: 56037 - RNA, 19 nt, Artificial Sequence
  Description of Artificial Sequence: Synthetic oligonucleotide
ugauaagagcuuuaacacg

SEQ ID NO: 56038 - RNA, 19 nt, Artificial Sequence
  Description of Artificial Sequence: Synthetic oligonucleotide
caugaaacccuauuuagag

SEQ ID NO: 56039 - RNA, 19 nt, Artificial Sequence
  Description of Artificial Sequence: Synthetic oligonucleotide
aaugcaaucuuaagugccc

SEQ ID NO: 56040 - RNA, 19 nt, Artificial Sequence
  Description of Artificial Sequence: Synthetic oligonucleotide
aguagaugcauuuaggaau

SEQ ID NO: 56041 - RNA, 19 nt, Artificial Sequence
  Description of Artificial Sequence: Synthetic oligonucleotide
ucugauugugguaucauac

SEQ ID NO: 56042 - RNA, 19 nt, Artificial Sequence
  Description of Artificial Sequence: Synthetic oligonucleotide
acggucuauauucugaggg

SEQ ID NO: 56043 - RNA, 19 nt, Artificial Sequence
  Description of Artificial Sequence: Synthetic oligonucleotide
gaaacagagaguuugcaca

SEQ ID NO: 56044 - RNA, 19 nt, Artificial Sequence
  Description of Artificial Sequence: Synthetic oligonucleotide
ugugcaaaagcuaucuaga

SEQ ID NO: 56045 - RNA, 19 nt, Artificial Sequence
  Description of Artificial Sequence: Synthetic oligonucleotide
uauauucugagggauaggc

SEQ ID NO: 56046 - RNA, 19 nt, Artificial Sequence
  Description of Artificial Sequence: Synthetic oligonucleotide
aguucuauguuaguucugc

SEQ ID NO: 56047 - RNA, 19 nt, Artificial Sequence
  Description of Artificial Sequence: Synthetic oligonucleotide
uagcacuugagcuggaacg

SEQ ID NO: 56048 - RNA, 19 nt, Artificial Sequence
  Description of Artificial Sequence: Synthetic oligonucleotide
ucagcuaaaauuacaugac

SEQ ID NO: 56049 - RNA, 19 nt, Artificial Sequence
  Description of Artificial Sequence: Synthetic oligonucleotide
ucuauauucugagggauag

SEQ ID NO: 56050 - RNA, 19 nt, Artificial Sequence
  Description of Artificial Sequence: Synthetic oligonucleotide
ucauccaacgcauauauuu

SEQ ID NO: 56051 - RNA, 19 nt, Artificial Sequence
  Description of Artificial Sequence: Synthetic oligonucleotide
uggugaacucccuuaaagg

SEQ ID NO: 56052 - RNA, 19 nt, Artificial Sequence
  Description of Artificial Sequence: Synthetic oligonucleotide
cuccauaaaugacugaugc

SEQ ID NO: 56053 - RNA, 19 nt, Artificial Sequence
  Description of Artificial Sequence: Synthetic oligonucleotide
uuuaucuugcugauauagc

SEQ ID NO: 56054 - RNA, 19 nt, Artificial Sequence
  Description of Artificial Sequence: Synthetic oligonucleotide
uuuacaacccugcaccaca

SEQ ID NO: 56055 - RNA, 19 nt, Artificial Sequence
  Description of Artificial Sequence: Synthetic oligonucleotide
augguugugaugcaaucgg

SEQ ID NO: 56056 - RNA, 19 nt, Artificial Sequence
  Description of Artificial Sequence: Synthetic oligonucleotide
ugaugcucagugauaagag

SEQ ID NO: 56057 - RNA, 19 nt, Artificial Sequence
  Description of Artificial Sequence: Synthetic oligonucleotide
uguucggcuagaaugaaaa

SEQ ID NO: 56058 - RNA, 19 nt, Artificial Sequence
  Description of Artificial Sequence: Synthetic oligonucleotide
gaugcauuuaggaauaauc

SEQ ID NO: 56059 - RNA, 19 nt, Artificial Sequence
  Description of Artificial Sequence: Synthetic oligonucleotide
aacuaaggccuguaaagca

SEQ ID NO: 56060 - RNA, 19 nt, Artificial Sequence
  Description of Artificial Sequence: Synthetic oligonucleotide
auggguagguucuauguuc

SEQ ID NO: 56061 - RNA, 19 nt, Artificial Sequence
  Description of Artificial Sequence: Synthetic oligonucleotide
aauacggaccagccguaac

SEQ ID NO: 56062 - RNA, 19 nt, Artificial Sequence
  Description of Artificial Sequence: Synthetic oligonucleotide
uauaacuucucccguucag

SEQ ID NO: 56063 - RNA, 19 nt, Artificial Sequence
  Description of Artificial Sequence: Synthetic oligonucleotide
accgguauuuauucucucc

SEQ ID NO: 56064 - RNA, 19 nt, Artificial Sequence
  Description of Artificial Sequence: Synthetic oligonucleotide
uguuggucguuucagcuug

SEQ ID NO: 56065 - RNA, 19 nt, Artificial Sequence
  Description of Artificial Sequence: Synthetic oligonucleotide
uugucuuagguccacauuu

SEQ ID NO: 56066 - RNA, 19 nt, Artificial Sequence
  Description of Artificial Sequence: Synthetic oligonucleotide
acguguuauuuucccaucc

SEQ ID NO: 56067 - RNA, 19 nt, Artificial Sequence
  Description of Artificial Sequence: Synthetic oligonucleotide
ugaccuuuuguuuuccuca

SEQ ID NO: 56068 - RNA, 19 nt, Artificial Sequence
  Description of Artificial Sequence: Synthetic oligonucleotide
agcauuagccaccaguucu

SEQ ID NO: 56069 - RNA, 19 nt, Artificial Sequence
  Description of Artificial Sequence: Synthetic oligonucleotide
aguaauggaaaugcaaucu

SEQ ID NO: 56070 - RNA, 19 nt, Artificial Sequence
  Description of Artificial Sequence: Synthetic oligonucleotide
aucggaauggagucauccc

SEQ ID NO: 56071 - RNA, 19 nt, Artificial Sequence
  Description of Artificial Sequence: Synthetic oligonucleotide
ugauauagcaagucaaguu

SEQ ID NO: 56072 - RNA, 19 nt, Artificial Sequence
  Description of Artificial Sequence: Synthetic oligonucleotide
ugugauuacucugacuagc

SEQ ID NO: 56073 - RNA, 19 nt, Artificial Sequence
  Description of Artificial Sequence: Synthetic oligonucleotide
aaccagucaacuaaggccu

SEQ ID NO: 56074 - RNA, 19 nt, Artificial Sequence
  Description of Artificial Sequence: Synthetic oligonucleotide
cucaagucggcuuugcuug

SEQ ID NO: 56075 - RNA, 19 nt, Artificial Sequence
  Description of Artificial Sequence: Synthetic oligonucleotide
ucggcuagaaugaaaaguu

SEQ ID NO: 56076 - RNA, 19 nt, Artificial Sequence
  Description of Artificial Sequence: Synthetic oligonucleotide
ucaguuguuggucgauagg

SEQ ID NO: 56077 - RNA, 19 nt, Artificial Sequence
  Description of Artificial Sequence: Synthetic oligonucleotide
augaaaggagcauggguag

SEQ ID NO: 56078 - RNA, 19 nt, Artificial Sequence
  Description of Artificial Sequence: Synthetic oligonucleotide
gggauguucggcuagaaug

SEQ ID NO: 56079 - RNA, 19 nt, Artificial Sequence
  Description of Artificial Sequence: Synthetic oligonucleotide
ucuagucuguccaaggcau

SEQ ID NO: 56080 - RNA, 19 nt, Artificial Sequence
  Description of Artificial Sequence: Synthetic oligonucleotide
ugcugauauagcaagucaa

SEQ ID NO: 56081 - RNA, 19 nt, Artificial Sequence
  Description of Artificial Sequence: Synthetic oligonucleotide
uucaagaccugaacagugc

SEQ ID NO: 56082 - RNA, 19 nt, Artificial Sequence
  Description of Artificial Sequence: Synthetic oligonucleotide
aagacugaagcaaacggga

SEQ ID NO: 56083 - RNA, 19 nt, Artificial Sequence
  Description of Artificial Sequence: Synthetic oligonucleotide
ucuccuagcaaguugucaa

SEQ ID NO: 56084 - RNA, 19 nt, Artificial Sequence
  Description of Artificial Sequence: Synthetic oligonucleotide
uggucgauaggcauccuug

SEQ ID NO: 56085 - RNA, 19 nt, Artificial Sequence
  Description of Artificial Sequence: Synthetic oligonucleotide
cuugccacaaacgguaucc

SEQ ID NO: 56086 - RNA, 19 nt, Artificial Sequence
  Description of Artificial Sequence: Synthetic oligonucleotide
gaugcucagugauaagagc

SEQ ID NO: 56087 - RNA, 19 nt, Artificial Sequence
  Description of Artificial Sequence: Synthetic oligonucleotide
acuuucugcuaccaccgcg

SEQ ID NO: 56088 - RNA, 19 nt, Artificial Sequence
  Description of Artificial Sequence: Synthetic oligonucleotide
agcuaucuagaugagguuc

SEQ ID NO: 56089 - RNA, 19 nt, Artificial Sequence
  Description of Artificial Sequence: Synthetic oligonucleotide
ugguuuggaucuucgaccc

SEQ ID NO: 56090 - RNA, 19 nt, Artificial Sequence
  Description of Artificial Sequence: Synthetic oligonucleotide
uucggcuagaaugaaaagu

SEQ ID NO: 56091 - RNA, 19 nt, Artificial Sequence
  Description of Artificial Sequence: Synthetic oligonucleotide
uugugaugcaaucgggaug

SEQ ID NO: 56092 - RNA, 19 nt, Artificial Sequence
  Description of Artificial Sequence: Synthetic oligonucleotide
ugagggauucaaauaaaua

SEQ ID NO: 56093 - RNA, 19 nt, Artificial Sequence
  Description of Artificial Sequence: Synthetic oligonucleotide
guugauggaauaaccuugg

SEQ ID NO: 56094 - RNA, 19 nt, Artificial Sequence
  Description of Artificial Sequence: Synthetic oligonucleotide
cuauguuaguucugccucg

SEQ ID NO: 56095 - RNA, 19 nt, Artificial Sequence
  Description of Artificial Sequence: Synthetic oligonucleotide
acgguaucccauuugucuc

SEQ ID NO: 56096 - RNA, 19 nt, Artificial Sequence
  Description of Artificial Sequence: Synthetic oligonucleotide
uuaacacggucuauauucu

SEQ ID NO: 56097 - RNA, 19 nt, Artificial Sequence
  Description of Artificial Sequence: Synthetic oligonucleotide
ucccguucagaauaaauau

SEQ ID NO: 56098 - RNA, 19 nt, Artificial Sequence
  Description of Artificial Sequence: Synthetic oligonucleotide
uuaagacaguauugcaaug

SEQ ID NO: 56099 - RNA, 19 nt, Artificial Sequence
  Description of Artificial Sequence: Synthetic oligonucleotide
ucccuuaaaggugagcaag

SEQ ID NO: 56100 - RNA, 19 nt, Artificial Sequence
  Description of Artificial Sequence: Synthetic oligonucleotide
uccaaaccgguauuuauuc

SEQ ID NO: 56101 - RNA, 19 nt, Artificial Sequence
  Description of Artificial Sequence: Synthetic oligonucleotide
aucuucgaccccgugaucg

SEQ ID NO: 56102 - RNA, 19 nt, Artificial Sequence
  Description of Artificial Sequence: Synthetic oligonucleotide
aacaagcugacugcgucuc

SEQ ID NO: 56103 - RNA, 19 nt, Artificial Sequence
  Description of Artificial Sequence: Synthetic oligonucleotide
ucauacacaggcuguuuug

SEQ ID NO: 56104 - RNA, 19 nt, Artificial Sequence
  Description of Artificial Sequence: Synthetic oligonucleotide
ugacugcgucucuagaagg

SEQ ID NO: 56105 - RNA, 19 nt, Artificial Sequence
  Description of Artificial Sequence: Synthetic oligonucleotide
gauauagcaagucaaguuu

SEQ ID NO: 56106 - RNA, 19 nt, Artificial Sequence
  Description of Artificial Sequence: Synthetic oligonucleotide
gaagaaauccaugacucga

SEQ ID NO: 56107 - RNA, 19 nt, Artificial Sequence
  Description of Artificial Sequence: Synthetic oligonucleotide
ugguugugaugcaaucggg

SEQ ID NO: 56108 - RNA, 19 nt, Artificial Sequence
  Description of Artificial Sequence: Synthetic oligonucleotide
cuagaaugaaaaguuggug

SEQ ID NO: 56109 - RNA, 19 nt, Artificial Sequence
  Description of Artificial Sequence: Synthetic oligonucleotide
guuuggaucuucgaccccg

SEQ ID NO: 56110 - RNA, 19 nt, Artificial Sequence
  Description of Artificial Sequence: Synthetic oligonucleotide
gauuacucugacuagcacu

SEQ ID NO: 56111 - RNA, 19 nt, Artificial Sequence
  Description of Artificial Sequence: Synthetic oligonucleotide
uucgucuugaccuuuuguu

SEQ ID NO: 56112 - RNA, 19 nt, Artificial Sequence
  Description of Artificial Sequence: Synthetic oligonucleotide
augaacucuuugcuguauc

SEQ ID NO: 56113 - RNA, 19 nt, Artificial Sequence
  Description of Artificial Sequence: Synthetic oligonucleotide
uguuggucgauaggcaucc

SEQ ID NO: 56114 - RNA, 19 nt, Artificial Sequence
  Description of Artificial Sequence: Synthetic oligonucleotide
agggauucaaauaaauaga

SEQ ID NO: 56115 - RNA, 19 nt, Artificial Sequence
  Description of Artificial Sequence: Synthetic oligonucleotide
uuuagcuuccgcuggcgcu

SEQ ID NO: 56116 - RNA, 19 nt, Artificial Sequence
  Description of Artificial Sequence: Synthetic oligonucleotide
ucaauacgccggaagaaau

SEQ ID NO: 56117 - RNA, 19 nt, Artificial Sequence
  Description of Artificial Sequence: Synthetic oligonucleotide
ucaauuggucagcugacuu

SEQ ID NO: 56118 - RNA, 19 nt, Artificial Sequence
  Description of Artificial Sequence: Synthetic oligonucleotide
ucccgcuggauuagggugg

SEQ ID NO: 56119 - RNA, 19 nt, Artificial Sequence
  Description of Artificial Sequence: Synthetic oligonucleotide
cuuuacccaagucgugucg

SEQ ID NO: 56120 - RNA, 19 nt, Artificial Sequence
  Description of Artificial Sequence: Synthetic oligonucleotide
aggaguuacugauggcuag

SEQ ID NO: 56121 - RNA, 19 nt, Artificial Sequence
  Description of Artificial Sequence: Synthetic oligonucleotide
ugguggucuucuuagacau

SEQ ID NO: 56122 - RNA, 19 nt, Artificial Sequence
  Description of Artificial Sequence: Synthetic oligonucleotide
acacggaccaucacagugc

SEQ ID NO: 56123 - RNA, 19 nt, Artificial Sequence
  Description of Artificial Sequence: Synthetic oligonucleotide
auuagccaccaguucugac

SEQ ID NO: 56124 - RNA, 19 nt, Artificial Sequence
  Description of Artificial Sequence: Synthetic oligonucleotide
caguaauggaaaugcaauc

SEQ ID NO: 56125 - RNA, 19 nt, Artificial Sequence
  Description of Artificial Sequence: Synthetic oligonucleotide
aaauuacaugacaguaaug

SEQ ID NO: 56126 - RNA, 19 nt, Artificial Sequence
  Description of Artificial Sequence: Synthetic oligonucleotide
aaagcgagcucggaugaug

SEQ ID NO: 56127 - RNA, 19 nt, Artificial Sequence
  Description of Artificial Sequence: Synthetic oligonucleotide
ugcuaacagccauacuugc

SEQ ID NO: 56128 - RNA, 19 nt, Artificial Sequence
  Description of Artificial Sequence: Synthetic oligonucleotide
ugaucccgcuggauuaggg

SEQ ID NO: 56129 - RNA, 19 nt, Artificial Sequence
  Description of Artificial Sequence: Synthetic oligonucleotide
caacuaaggccuguaaagc

SEQ ID NO: 56130 - RNA, 19 nt, Artificial Sequence
  Description of Artificial Sequence: Synthetic oligonucleotide
gauugugagaggauuggca

SEQ ID NO: 56131 - RNA, 19 nt, Artificial Sequence
  Description of Artificial Sequence: Synthetic oligonucleotide
acaaacgguaucccauuug

SEQ ID NO: 56132 - RNA, 19 nt, Artificial Sequence
  Description of Artificial Sequence: Synthetic oligonucleotide
ccguucagaauaaauauac

SEQ ID NO: 56133 - RNA, 19 nt, Artificial Sequence
  Description of Artificial Sequence: Synthetic oligonucleotide
ucucuucagcuaaaauuac

SEQ ID NO: 56134 - RNA, 19 nt, Artificial Sequence
  Description of Artificial Sequence: Synthetic oligonucleotide
uggguagguucuauguucu

SEQ ID NO: 56135 - RNA, 19 nt, Artificial Sequence
  Description of Artificial Sequence: Synthetic oligonucleotide
ucucgaugaaaggagcaug

SEQ ID NO: 56136 - RNA, 19 nt, Artificial Sequence
  Description of Artificial Sequence: Synthetic oligonucleotide
guuacugcaagcaauuuua

SEQ ID NO: 56137 - RNA, 19 nt, Artificial Sequence
  Description of Artificial Sequence: Synthetic oligonucleotide
uaucgcuugggacccggag

SEQ ID NO: 56138 - RNA, 19 nt, Artificial Sequence
  Description of Artificial Sequence: Synthetic oligonucleotide
uggaaaaccuuaugggcau

SEQ ID NO: 56139 - RNA, 19 nt, Artificial Sequence
  Description of Artificial Sequence: Synthetic oligonucleotide
caaucgggauggcagacag

SEQ ID NO: 56140 - RNA, 19 nt, Artificial Sequence
  Description of Artificial Sequence: Synthetic oligonucleotide
acucccagcgaguacucag

SEQ ID NO: 56141 - RNA, 19 nt, Artificial Sequence
  Description of Artificial Sequence: Synthetic oligonucleotide
ugcccgguuaguuuuggca

SEQ ID NO: 56142 - RNA, 19 nt, Artificial Sequence
  Description of Artificial Sequence: Synthetic oligonucleotide
gcacaggaguuacugaugg

SEQ ID NO: 56143 - RNA, 19 nt, Artificial Sequence
  Description of Artificial Sequence: Synthetic oligonucleotide
ucagugauaagagcuuuaa

SEQ ID NO: 56144 - RNA, 19 nt, Artificial Sequence
  Description of Artificial Sequence: Synthetic oligonucleotide
ccagcgaguacucaguucc

SEQ ID NO: 56145 - RNA, 19 nt, Artificial Sequence
  Description of Artificial Sequence: Synthetic oligonucleotide
ugccugaccgcuucaagac

SEQ ID NO: 56146 - RNA, 19 nt, Artificial Sequence
  Description of Artificial Sequence: Synthetic oligonucleotide
aaacgguaucccauuuguc

SEQ ID NO: 56147 - RNA, 19 nt, Artificial Sequence
  Description of Artificial Sequence: Synthetic oligonucleotide
agacaguauugcaaugaac

SEQ ID NO: 56148 - RNA, 19 nt, Artificial Sequence
  Description of Artificial Sequence: Synthetic oligonucleotide
cagcuaugugccuuuacac

SEQ ID NO: 56149 - RNA, 19 nt, Artificial Sequence
  Description of Artificial Sequence: Synthetic oligonucleotide
cugcaucaguuguuggucg

SEQ ID NO: 56150 - RNA, 19 nt, Artificial Sequence
  Description of Artificial Sequence: Synthetic oligonucleotide
ugucuuagguccacauuuc

SEQ ID NO: 56151 - RNA, 19 nt, Artificial Sequence
  Description of Artificial Sequence: Synthetic oligonucleotide
gaagcaaacgggaguggag

SEQ ID NO: 56152 - RNA, 19 nt, Artificial Sequence
  Description of Artificial Sequence: Synthetic oligonucleotide
uugcgugucaucuccucca

SEQ ID NO: 56153 - RNA, 19 nt, Artificial Sequence
  Description of Artificial Sequence: Synthetic oligonucleotide
uuugucuuagguccacauu

SEQ ID NO: 56154 - RNA, 19 nt, Artificial Sequence
  Description of Artificial Sequence: Synthetic oligonucleotide
gaccccgugaucggaaugg

SEQ ID NO: 56155 - RNA, 19 nt, Artificial Sequence
  Description of Artificial Sequence: Synthetic oligonucleotide
cagguuuacaacccugcac

SEQ ID NO: 56156 - RNA, 19 nt, Artificial Sequence
  Description of Artificial Sequence: Synthetic oligonucleotide
uggauuaggguggucucag

SEQ ID NO: 56157 - RNA, 19 nt, Artificial Sequence
  Description of Artificial Sequence: Synthetic oligonucleotide
ucgugcucggcagggaucg

SEQ ID NO: 56158 - RNA, 19 nt, Artificial Sequence
  Description of Artificial Sequence: Synthetic oligonucleotide
agcaaguauuugucuuagg

SEQ ID NO: 56159 - RNA, 19 nt, Artificial Sequence
  Description of Artificial Sequence: Synthetic oligonucleotide
ucgaugaaaggagcauggg

SEQ ID NO: 56160 - RNA, 19 nt, Artificial Sequence
  Description of Artificial Sequence: Synthetic oligonucleotide
ucucccguucagaauaaau

SEQ ID NO: 56161 - RNA, 19 nt, Artificial Sequence
  Description of Artificial Sequence: Synthetic oligonucleotide
guuaguuuuggcaccugug

SEQ ID NO: 56162 - RNA, 19 nt, Artificial Sequence
  Description of Artificial Sequence: Synthetic oligonucleotide
ggaaacagagaguuugcac

SEQ ID NO: 56163 - RNA, 19 nt, Artificial Sequence
  Description of Artificial Sequence: Synthetic oligonucleotide
ucgaaguucuauguuaguu

SEQ ID NO: 56164 - RNA, 19 nt, Artificial Sequence
  Description of Artificial Sequence: Synthetic oligonucleotide
uuucucgaaguucuauguu

SEQ ID NO: 56165 - RNA, 19 nt, Artificial Sequence
  Description of Artificial Sequence: Synthetic oligonucleotide
ugcugcgcagaauacggac

SEQ ID NO: 56166 - RNA, 19 nt, Artificial Sequence
  Description of Artificial Sequence: Synthetic oligonucleotide
gugaacucccuuaaaggug

SEQ ID NO: 56167 - RNA, 19 nt, Artificial Sequence
  Description of Artificial Sequence: Synthetic oligonucleotide
acuugccacaaacgguauc

SEQ ID NO: 56168 - RNA, 19 nt, Artificial Sequence
  Description of Artificial Sequence: Synthetic oligonucleotide
aacgggaguggagaacaag

SEQ ID NO: 56169 - RNA, 19 nt, Artificial Sequence
  Description of Artificial Sequence: Synthetic oligonucleotide
uuuaccccugaauccuagc

SEQ ID NO: 56170 - RNA, 19 nt, Artificial Sequence
  Description of Artificial Sequence: Synthetic oligonucleotide
uggaccgugucccgaaacu

SEQ ID NO: 56171 - RNA, 19 nt, Artificial Sequence
  Description of Artificial Sequence: Synthetic oligonucleotide
cugugauuacucugacuag

SEQ ID NO: 56172 - RNA, 19 nt, Artificial Sequence
  Description of Artificial Sequence: Synthetic oligonucleotide
aagcgaaguguuugcucug

SEQ ID NO: 56173 - RNA, 19 nt, Artificial Sequence
  Description of Artificial Sequence: Synthetic oligonucleotide
auggaccgugucccgaaac

SEQ ID NO: 56174 - RNA, 19 nt, Artificial Sequence
  Description of Artificial Sequence: Synthetic oligonucleotide
caguuuaaaaccccaaugu

SEQ ID NO: 56175 - RNA, 19 nt, Artificial Sequence
  Description of Artificial Sequence: Synthetic oligonucleotide
ggcuuauggaauucauucc

SEQ ID NO: 56176 - RNA, 19 nt, Artificial Sequence
  Description of Artificial Sequence: Synthetic oligonucleotide
ugcuaaucgaggugucugu

SEQ ID NO: 56177 - RNA, 19 nt, Artificial Sequence
  Description of Artificial Sequence: Synthetic oligonucleotide
acaugaaacccuauuuaga

SEQ ID NO: 56178 - RNA, 19 nt, Artificial Sequence
  Description of Artificial Sequence: Synthetic oligonucleotide
uacgccggaagaaauccau

SEQ ID NO: 56179 - RNA, 19 nt, Artificial Sequence
  Description of Artificial Sequence: Synthetic oligonucleotide
agcagcuaugugccuuuac

SEQ ID NO: 56180 - RNA, 19 nt, Artificial Sequence
  Description of Artificial Sequence: Synthetic oligonucleotide
caauacgccggaagaaauc

SEQ ID NO: 56181 - RNA, 19 nt, Artificial Sequence
  Description of Artificial Sequence: Synthetic oligonucleotide
aguuacugauggcuaggcu

SEQ ID NO: 56182 - RNA, 19 nt, Artificial Sequence
  Description of Artificial Sequence: Synthetic oligonucleotide
ugucaauacgccggaagaa

SEQ ID NO: 56183 - RNA, 19 nt, Artificial Sequence
  Description of Artificial Sequence: Synthetic oligonucleotide
aagucgugucgucucuacu

SEQ ID NO: 56184 - RNA, 19 nt, Artificial Sequence
  Description of Artificial Sequence: Synthetic oligonucleotide
guucggcuagaaugaaaag

SEQ ID NO: 56185 - RNA, 19 nt, Artificial Sequence
  Description of Artificial Sequence: Synthetic oligonucleotide
cacggucuauauucugagg

SEQ ID NO: 56186 - RNA, 19 nt, Artificial Sequence
  Description of Artificial Sequence: Synthetic oligonucleotide
uuuaagugcucugccaguu

SEQ ID NO: 56187 - RNA, 19 nt, Artificial Sequence
  Description of Artificial Sequence: Synthetic oligonucleotide
uggguugacucaaggacuu

SEQ ID NO: 56188 - RNA, 19 nt, Artificial Sequence
  Description of Artificial Sequence: Synthetic oligonucleotide
auccauugcaggguuacca

SEQ ID NO: 56189 - RNA, 19 nt, Artificial Sequence
  Description of Artificial Sequence: Synthetic oligonucleotide
agcugguugauucgugggu

SEQ ID NO: 56190 - RNA, 19 nt, Artificial Sequence
  Description of Artificial Sequence: Synthetic oligonucleotide
uucuccuagcaaguuguca

SEQ ID NO: 56191 - RNA, 19 nt, Artificial Sequence
  Description of Artificial Sequence: Synthetic oligonucleotide
guacaaccagucaacuaag

SEQ ID NO: 56192 - RNA, 19 nt, Artificial Sequence
  Description of Artificial Sequence: Synthetic oligonucleotide
gcugauauagcaagucaag

SEQ ID NO: 56193 - RNA, 19 nt, Artificial Sequence
  Description of Artificial Sequence: Synthetic oligonucleotide
acacccaauguauggagua

SEQ ID NO: 56194 - RNA, 19 nt, Artificial Sequence
  Description of Artificial Sequence: Synthetic oligonucleotide
gcagaauacggaccagccg

SEQ ID NO: 56195 - RNA, 19 nt, Artificial Sequence
  Description of Artificial Sequence: Synthetic oligonucleotide
cagaauacggaccagccgu

SEQ ID NO: 56196 - RNA, 19 nt, Artificial Sequence
  Description of Artificial Sequence: Synthetic oligonucleotide
cuauauucugagggauagg

SEQ ID NO: 56197 - RNA, 19 nt, Artificial Sequence
  Description of Artificial Sequence: Synthetic oligonucleotide
gacguguuauuuucccauc

SEQ ID NO: 56198 - RNA, 19 nt, Artificial Sequence
  Description of Artificial Sequence: Synthetic oligonucleotide
agguuguuugcgugucauc

SEQ ID NO: 56199 - RNA, 19 nt, Artificial Sequence
  Description of Artificial Sequence: Synthetic oligonucleotide
cucccguucagaauaaaua

SEQ ID NO: 56200 - RNA, 19 nt, Artificial Sequence
  Description of Artificial Sequence: Synthetic oligonucleotide
uguuugcgugucaucuccu

SEQ ID NO: 56201 - RNA, 19 nt, Artificial Sequence
  Description of Artificial Sequence: Synthetic oligonucleotide
cagugauaagagcuuuaac

SEQ ID NO: 56202 - RNA, 19 nt, Artificial Sequence
  Description of Artificial Sequence: Synthetic oligonucleotide
caaacgggaguggagaaca

SEQ ID NO: 56203 - RNA, 19 nt, Artificial Sequence
  Description of Artificial Sequence: Synthetic oligonucleotide
ucuugcuaaucgagguguc

SEQ ID NO: 56204 - RNA, 19 nt, Artificial Sequence
  Description of Artificial Sequence: Synthetic oligonucleotide
acaugacaguaauggaaau

SEQ ID NO: 56205 - RNA, 19 nt, Artificial Sequence
  Description of Artificial Sequence: Synthetic oligonucleotide
ugcgucucuagaaggucaa

SEQ ID NO: 56206 - RNA, 19 nt, Artificial Sequence
  Description of Artificial Sequence: Synthetic oligonucleotide
cuaaucgaggugucuguga

SEQ ID NO: 56207 - RNA, 19 nt, Artificial Sequence
  Description of Artificial Sequence: Synthetic oligonucleotide
auauagcaagucaaguuua

SEQ ID NO: 56208 - RNA, 19 nt, Artificial Sequence
  Description of Artificial Sequence: Synthetic oligonucleotide
guguuaucgcuugggaccc

SEQ ID NO: 56209 - RNA, 19 nt, Artificial Sequence
  Description of Artificial Sequence: Synthetic oligonucleotide
agacugaagcaaacgggag

SEQ ID NO: 56210 - RNA, 19 nt, Artificial Sequence
  Description of Artificial Sequence: Synthetic oligonucleotide
acuaaggccuguaaagcau

SEQ ID NO: 56211 - RNA, 19 nt, Artificial Sequence
  Description of Artificial Sequence: Synthetic oligonucleotide
uccuagcaaguugucaagu

SEQ ID NO: 56212 - RNA, 19 nt, Artificial Sequence
  Description of Artificial Sequence: Synthetic oligonucleotide
uguagggauucugugucau

SEQ ID NO: 56213 - RNA, 19 nt, Artificial Sequence
  Description of Artificial Sequence: Synthetic oligonucleotide
gacugaagcaaacgggagu

SEQ ID NO: 56214 - RNA, 19 nt, Artificial Sequence
  Description of Artificial Sequence: Synthetic oligonucleotide
caagucgugucgucucuac

SEQ ID NO: 56215 - RNA, 19 nt, Artificial Sequence
  Description of Artificial Sequence: Synthetic oligonucleotide
caucaggaagcgccccucg

SEQ ID NO: 56216 - RNA, 19 nt, Artificial Sequence
  Description of Artificial Sequence: Synthetic oligonucleotide
auauucugagggauaggcu

SEQ ID NO: 56217 - RNA, 19 nt, Artificial Sequence
  Description of Artificial Sequence: Synthetic oligonucleotide
ggugaacucccuuaaaggu

SEQ ID NO: 56218 - RNA, 19 nt, Artificial Sequence
  Description of Artificial Sequence: Synthetic oligonucleotide
guuaucgcuugggacccgg

SEQ ID NO: 56219 - RNA, 19 nt, Artificial Sequence
  Description of Artificial Sequence: Synthetic oligonucleotide
caaucuuaagugcccucuc

SEQ ID NO: 56220 - RNA, 19 nt, Artificial Sequence
  Description of Artificial Sequence: Synthetic oligonucleotide
agcuuuaacacggucuaua

SEQ ID NO: 56221 - RNA, 19 nt, Artificial Sequence
  Description of Artificial Sequence: Synthetic oligonucleotide
uuggucgauaggcauccuu

SEQ ID NO: 56222 - RNA, 19 nt, Artificial Sequence
  Description of Artificial Sequence: Synthetic oligonucleotide
auauggaccgugucccgaa

SEQ ID NO: 56223 - RNA, 19 nt, Artificial Sequence
  Description of Artificial Sequence: Synthetic oligonucleotide
ucugcccgguuaguuuugg

SEQ ID NO: 56224 - RNA, 19 nt, Artificial Sequence
  Description of Artificial Sequence: Synthetic oligonucleotide
uaggcuggacaguuaguua

SEQ ID NO: 56225 - RNA, 19 nt, Artificial Sequence
  Description of Artificial Sequence: Synthetic oligonucleotide
caaacgguaucccauuugu

SEQ ID NO: 56226 - RNA, 19 nt, Artificial Sequence
  Description of Artificial Sequence: Synthetic oligonucleotide
gcagcuaugugccuuuaca

SEQ ID NO: 56227 - RNA, 19 nt, Artificial Sequence
  Description of Artificial Sequence: Synthetic oligonucleotide
gucuuagguccacauuuca

SEQ ID NO: 56228 - RNA, 19 nt, Artificial Sequence
  Description of Artificial Sequence: Synthetic oligonucleotide
gccguaacugcugagaauc

SEQ ID NO: 56229 - RNA, 19 nt, Artificial Sequence
  Description of Artificial Sequence: Synthetic oligonucleotide
aagucggcuuugcuuggaa

SEQ ID NO: 56230 - RNA, 19 nt, Artificial Sequence
  Description of Artificial Sequence: Synthetic oligonucleotide
ggaguuacugauggcuagg

SEQ ID NO: 56231 - RNA, 19 nt, Artificial Sequence
  Description of Artificial Sequence: Synthetic oligonucleotide
acccugcaccacaugaaac

SEQ ID NO: 56232 - RNA, 19 nt, Artificial Sequence
  Description of Artificial Sequence: Synthetic oligonucleotide
aguucgcuucccgaguucu

SEQ ID NO: 56233 - RNA, 19 nt, Artificial Sequence
  Description of Artificial Sequence: Synthetic oligonucleotide
uccuuaguucuugcuaauc

SEQ ID NO: 56234 - RNA, 19 nt, Artificial Sequence
  Description of Artificial Sequence: Synthetic oligonucleotide
guuuacaacccugcaccac

SEQ ID NO: 56235 - RNA, 19 nt, Artificial Sequence
  Description of Artificial Sequence: Synthetic oligonucleotide
guaucaugugcaaaagcua

SEQ ID NO: 56236 - RNA, 19 nt, Artificial Sequence
  Description of Artificial Sequence: Synthetic oligonucleotide
gucaauacgccggaagaaa

SEQ ID NO: 56237 - RNA, 19 nt, Artificial Sequence
  Description of Artificial Sequence: Synthetic oligonucleotide
cugccugaccgcuucaaga

SEQ ID NO: 56238 - RNA, 19 nt, Artificial Sequence
  Description of Artificial Sequence: Synthetic oligonucleotide
ggaauaaccuuggucccgc

SEQ ID NO: 56239 - RNA, 19 nt, Artificial Sequence
  Description of Artificial Sequence: Synthetic oligonucleotide
ggauguucggcuagaauga

SEQ ID NO: 56240 - RNA, 19 nt, Artificial Sequence
  Description of Artificial Sequence: Synthetic oligonucleotide
gacgaggucaaggucccca

SEQ ID NO: 56241 - RNA, 19 nt, Artificial Sequence
  Description of Artificial Sequence: Synthetic oligonucleotide
guaauggaaaugcaaucuu

SEQ ID NO: 56242 - RNA, 19 nt, Artificial Sequence
  Description of Artificial Sequence: Synthetic oligonucleotide
aagguuuggugagcccucu

SEQ ID NO: 56243 - RNA, 19 nt, Artificial Sequence
  Description of Artificial Sequence: Synthetic oligonucleotide
ugcaaucgggauggcagac

SEQ ID NO: 56244 - RNA, 19 nt, Artificial Sequence
  Description of Artificial Sequence: Synthetic oligonucleotide
cacccaauguauggaguag

SEQ ID NO: 56245 - RNA, 19 nt, Artificial Sequence
  Description of Artificial Sequence: Synthetic oligonucleotide
gaagguuuggugagcccuc

SEQ ID NO: 56246 - RNA, 19 nt, Artificial Sequence
  Description of Artificial Sequence: Synthetic oligonucleotide
gucggagcugacgaggaac

SEQ ID NO: 56247 - RNA, 19 nt, Artificial Sequence
  Description of Artificial Sequence: Synthetic oligonucleotide
uuaucgcuugggacccgga

SEQ ID NO: 56248 - RNA, 19 nt, Artificial Sequence
  Description of Artificial Sequence: Synthetic oligonucleotide
caguauugcaaugaacucu

SEQ ID NO: 56249 - RNA, 19 nt, Artificial Sequence
  Description of Artificial Sequence: Synthetic oligonucleotide
guuguuggucgauaggcau

SEQ ID NO: 56250 - RNA, 19 nt, Artificial Sequence
  Description of Artificial Sequence: Synthetic oligonucleotide
gaacaagcugacugcgucu

SEQ ID NO: 56251 - RNA, 19 nt, Artificial Sequence
  Description of Artificial Sequence: Synthetic oligonucleotide
ggauaggcuccugaucccg

SEQ ID NO: 56252 - RNA, 19 nt, Artificial Sequence
  Description of Artificial Sequence: Synthetic oligonucleotide
uauggaccgugucccgaaa

SEQ ID NO: 56253 - RNA, 19 nt, Artificial Sequence
  Description of Artificial Sequence: Synthetic oligonucleotide
uuacucugacuagcacuug

SEQ ID NO: 56254 - RNA, 19 nt, Artificial Sequence
  Description of Artificial Sequence: Synthetic oligonucleotide
ucgccagcaagggauguuc

SEQ ID NO: 56255 - RNA, 19 nt, Artificial Sequence
  Description of Artificial Sequence: Synthetic oligonucleotide
auaagagcuuuaacacggu

SEQ ID NO: 56256 - RNA, 19 nt, Artificial Sequence
  Description of Artificial Sequence: Synthetic oligonucleotide
aacccuauuuagaggcuuu

SEQ ID NO: 56257 - RNA, 19 nt, Artificial Sequence
  Description of Artificial Sequence: Synthetic oligonucleotide
guugagggauucaaauaaa

SEQ ID NO: 56258 - RNA, 19 nt, Artificial Sequence
  Description of Artificial Sequence: Synthetic oligonucleotide
gcccgguuaguuuuggcac

SEQ ID NO: 56259 - RNA, 19 nt, Artificial Sequence
  Description of Artificial Sequence: Synthetic oligonucleotide
guggucaauuggucagcug

SEQ ID NO: 56260 - RNA, 19 nt, Artificial Sequence
  Description of Artificial Sequence: Synthetic oligonucleotide
ugcgugucaucuccuccau

SEQ ID NO: 56261 - RNA, 19 nt, Artificial Sequence
  Description of Artificial Sequence: Synthetic oligonucleotide
gaucccgcuggauuagggu

SEQ ID NO: 56262 - RNA, 19 nt, Artificial Sequence
  Description of Artificial Sequence: Synthetic oligonucleotide
uugcuguaucaugugcaaa

SEQ ID NO: 56263 - RNA, 19 nt, Artificial Sequence
  Description of Artificial Sequence: Synthetic oligonucleotide
ccccuuuguggucaauugg

SEQ ID NO: 56264 - RNA, 19 nt, Artificial Sequence
  Description of Artificial Sequence: Synthetic oligonucleotide
gguugugaugcaaucggga

SEQ ID NO: 56265 - RNA, 19 nt, Artificial Sequence
  Description of Artificial Sequence: Synthetic oligonucleotide
gcauauggaccgugucccg

SEQ ID NO: 56266 - RNA, 19 nt, Artificial Sequence
  Description of Artificial Sequence: Synthetic oligonucleotide
aggguuaccaggaggcaaa

SEQ ID NO: 56267 - RNA, 19 nt, Artificial Sequence
  Description of Artificial Sequence: Synthetic oligonucleotide
ggaccaucacagugcugcg

SEQ ID NO: 56268 - RNA, 19 nt, Artificial Sequence
  Description of Artificial Sequence: Synthetic oligonucleotide
ugcgcagaauacggaccag

SEQ ID NO: 56269 - RNA, 19 nt, Artificial Sequence
  Description of Artificial Sequence: Synthetic oligonucleotide
caauauaacuucucccguu

SEQ ID NO: 56270 - RNA, 19 nt, Artificial Sequence
  Description of Artificial Sequence: Synthetic oligonucleotide
cauccauugcaggguuacc

SEQ ID NO: 56271 - RNA, 19 nt, Artificial Sequence
  Description of Artificial Sequence: Synthetic oligonucleotide
gccggaagaaauccaugac

SEQ ID NO: 56272 - RNA, 19 nt, Artificial Sequence
  Description of Artificial Sequence: Synthetic oligonucleotide
gauguucggcuagaaugaa

SEQ ID NO: 56273 - RNA, 19 nt, Artificial Sequence
  Description of Artificial Sequence: Synthetic oligonucleotide
acggcuggcggacuucuua

SEQ ID NO: 56274 - RNA, 19 nt, Artificial Sequence
  Description of Artificial Sequence: Synthetic oligonucleotide
guggauagugguguggggu

SEQ ID NO: 56275 - RNA, 19 nt, Artificial Sequence
  Description of Artificial Sequence: Synthetic oligonucleotide
cucagugauaagagcuuua

SEQ ID NO: 56276 - RNA, 19 nt, Artificial Sequence
  Description of Artificial Sequence: Synthetic oligonucleotide
uacuugcugccagcgggca

SEQ ID NO: 56277 - RNA, 19 nt, Artificial Sequence
  Description of Artificial Sequence: Synthetic oligonucleotide
guggguugacucaaggacu

SEQ ID NO: 56278 - RNA, 19 nt, Artificial Sequence
  Description of Artificial Sequence: Synthetic oligonucleotide
cauccaacgcauauauuuu

SEQ ID NO: 56279 - RNA, 19 nt, Artificial Sequence
  Description of Artificial Sequence: Synthetic oligonucleotide
cugaccgcuucaagaccug

SEQ ID NO: 56280 - RNA, 19 nt, Artificial Sequence
  Description of Artificial Sequence: Synthetic oligonucleotide
gaucuucgaccccgugauc

SEQ ID NO: 56281 - RNA, 19 nt, Artificial Sequence
  Description of Artificial Sequence: Synthetic oligonucleotide
gcugcgcagaauacggacc

SEQ ID NO: 56282 - RNA, 19 nt, Artificial Sequence
  Description of Artificial Sequence: Synthetic oligonucleotide
ccgguauuuauucucucca

SEQ ID NO: 56283 - RNA, 19 nt, Artificial Sequence
  Description of Artificial Sequence: Synthetic oligonucleotide
gcuaaucgaggugucugug

SEQ ID NO: 56284 - RNA, 19 nt, Artificial Sequence
  Description of Artificial Sequence: Synthetic oligonucleotide
gucuauauucugagggaua

SEQ ID NO: 56285 - RNA, 19 nt, Artificial Sequence
  Description of Artificial Sequence: Synthetic oligonucleotide
cugcccgguuaguuuuggc

SEQ ID NO: 56286 - RNA, 19 nt, Artificial Sequence
  Description of Artificial Sequence: Synthetic oligonucleotide
ggcuggcggacuucuuagg

SEQ ID NO: 56287 - RNA, 19 nt, Artificial Sequence
  Description of Artificial Sequence: Synthetic oligonucleotide
gggaacuuggaugcuaaaa

SEQ ID NO: 56288 - RNA, 19 nt, Artificial Sequence
  Description of Artificial Sequence: Synthetic oligonucleotide
cuuuuaccccugaauccua

SEQ ID NO: 56289 - RNA, 19 nt, Artificial Sequence
  Description of Artificial Sequence: Synthetic oligonucleotide
cuggauuaggguggucuca

SEQ ID NO: 56290 - RNA, 19 nt, Artificial Sequence
  Description of Artificial Sequence: Synthetic oligonucleotide
gguuuggaucuucgacccc

SEQ ID NO: 56291 - RNA, 19 nt, Artificial Sequence
  Description of Artificial Sequence: Synthetic oligonucleotide
ggauuaggguggucucagc

SEQ ID NO: 56292 - RNA, 19 nt, Artificial Sequence
  Description of Artificial Sequence: Synthetic oligonucleotide
gaauacggaccagccguaa

SEQ ID NO: 56293 - RNA, 19 nt, Artificial Sequence
  Description of Artificial Sequence: Synthetic oligonucleotide
agaguuccuuaaacauugu

SEQ ID NO: 56294 - RNA, 19 nt, Artificial Sequence
  Description of Artificial Sequence: Synthetic oligonucleotide
uacucccagcgaguacuca

SEQ ID NO: 56295 - RNA, 19 nt, Artificial Sequence
  Description of Artificial Sequence: Synthetic oligonucleotide
agggaacuuggaugcuaaa

SEQ ID NO: 56296 - RNA, 19 nt, Artificial Sequence
  Description of Artificial Sequence: Synthetic oligonucleotide
ccuguugauggaauaaccu

SEQ ID NO: 56297 - RNA, 19 nt, Artificial Sequence
  Description of Artificial Sequence: Synthetic oligonucleotide
auacgccggaagaaaucca

SEQ ID NO: 56298 - RNA, 19 nt, Artificial Sequence
  Description of Artificial Sequence: Synthetic oligonucleotide
uugccagggagugcccaac

SEQ ID NO: 56299 - RNA, 19 nt, Artificial Sequence
  Description of Artificial Sequence: Synthetic oligonucleotide
caugugcaaaagcuaucua

SEQ ID NO: 56300 - RNA, 19 nt, Artificial Sequence
  Description of Artificial Sequence: Synthetic oligonucleotide
gacugcgucucuagaaggu

SEQ ID NO: 56301 - RNA, 19 nt, Artificial Sequence
  Description of Artificial Sequence: Synthetic oligonucleotide
gcgagcucggaugauggug

SEQ ID NO: 56302 - RNA, 19 nt, Artificial Sequence
  Description of Artificial Sequence: Synthetic oligonucleotide
caauuggucagcugacuuu

SEQ ID NO: 56303 - RNA, 19 nt, Artificial Sequence
  Description of Artificial Sequence: Synthetic oligonucleotide
ggaagguuuggugagcccu

SEQ ID NO: 56304 - RNA, 19 nt, Artificial Sequence
  Description of Artificial Sequence: Synthetic oligonucleotide
auguucggcuagaaugaaa

SEQ ID NO: 56305 - RNA, 19 nt, Artificial Sequence
  Description of Artificial Sequence: Synthetic oligonucleotide
ggcccgacucccaggacgg

SEQ ID NO: 56306 - RNA, 19 nt, Artificial Sequence
  Description of Artificial Sequence: Synthetic oligonucleotide
acgccggaagaaauccaug

SEQ ID NO: 56307 - RNA, 19 nt, Artificial Sequence
  Description of Artificial Sequence: Synthetic oligonucleotide
guuggucguuucagcuugc

SEQ ID NO: 56308 - RNA, 19 nt, Artificial Sequence
  Description of Artificial Sequence: Synthetic oligonucleotide
aggacggcuggcggacuuc

SEQ ID NO: 56309 - RNA, 19 nt, Artificial Sequence
  Description of Artificial Sequence: Synthetic oligonucleotide
cuucucccguucagaauaa

SEQ ID NO: 56310 - RNA, 19 nt, Artificial Sequence
  Description of Artificial Sequence: Synthetic oligonucleotide
agaauacggaccagccgua

SEQ ID NO: 56311 - RNA, 19 nt, Artificial Sequence
  Description of Artificial Sequence: Synthetic oligonucleotide
gaccugaacagugccaguu

SEQ ID NO: 56312 - RNA, 19 nt, Artificial Sequence
  Description of Artificial Sequence: Synthetic oligonucleotide
gaccgcuucaagaccugaa

SEQ ID NO: 56313 - RNA, 19 nt, Artificial Sequence
  Description of Artificial Sequence: Synthetic oligonucleotide
caguucgcuucccgaguuc

SEQ ID NO: 56314 - RNA, 19 nt, Artificial Sequence
  Description of Artificial Sequence: Synthetic oligonucleotide
caggguuaccaggaggcaa

SEQ ID NO: 56315 - RNA, 19 nt, Artificial Sequence
  Description of Artificial Sequence: Synthetic oligonucleotide
gcgcagaauacggaccagc

SEQ ID NO: 56316 - RNA, 19 nt, Artificial Sequence
  Description of Artificial Sequence: Synthetic oligonucleotide
guaucccauuugucucuga

SEQ ID NO: 56317 - RNA, 19 nt, Artificial Sequence
  Description of Artificial Sequence: Synthetic oligonucleotide
gcuaucuagaugagguucu

SEQ ID NO: 56318 - RNA, 19 nt, Artificial Sequence
  Description of Artificial Sequence: Synthetic oligonucleotide
uucucccguucagaauaaa

SEQ ID NO: 56319 - RNA, 19 nt, Artificial Sequence
  Description of Artificial Sequence: Synthetic oligonucleotide
cuggcggacuucuuagggu

SEQ ID NO: 56320 - RNA, 19 nt, Artificial Sequence
  Description of Artificial Sequence: Synthetic oligonucleotide
cauggguagguucuauguu

SEQ ID NO: 56321 - RNA, 19 nt, Artificial Sequence
  Description of Artificial Sequence: Synthetic oligonucleotide
cgugucgucucuacuguuc

SEQ ID NO: 56322 - RNA, 19 nt, Artificial Sequence
  Description of Artificial Sequence: Synthetic oligonucleotide
ucgaggugucugugauuua

SEQ ID NO: 56323 - RNA, 19 nt, Artificial Sequence
  Description of Artificial Sequence: Synthetic oligonucleotide
ggucgauaggcauccuugu

SEQ ID NO: 56324 - RNA, 19 nt, Artificial Sequence
  Description of Artificial Sequence: Synthetic oligonucleotide
caggcuguuuugccaggga

SEQ ID NO: 56325 - RNA, 19 nt, Artificial Sequence
  Description of Artificial Sequence: Synthetic oligonucleotide
cucgaaguucuauguuagu

SEQ ID NO: 56326 - RNA, 19 nt, Artificial Sequence
  Description of Artificial Sequence: Synthetic oligonucleotide
ccgcuucaagaccugaaca

SEQ ID NO: 56327 - RNA, 19 nt, Artificial Sequence
  Description of Artificial Sequence: Synthetic oligonucleotide
gcucgggaagaugguuugg

SEQ ID NO: 56328 - RNA, 19 nt, Artificial Sequence
  Description of Artificial Sequence: Synthetic oligonucleotide
ggaccgugucccgaaacuc

SEQ ID NO: 56329 - RNA, 19 nt, Artificial Sequence
  Description of Artificial Sequence: Synthetic oligonucleotide
cccguucagaauaaauaua

SEQ ID NO: 56330 - RNA, 19 nt, Artificial Sequence
  Description of Artificial Sequence: Synthetic oligonucleotide
caucaguuguuggucgaua

SEQ ID NO: 56331 - RNA, 19 nt, Artificial Sequence
  Description of Artificial Sequence: Synthetic oligonucleotide
gauuggcaugggaggaggu

SEQ ID NO: 56332 - RNA, 19 nt, Artificial Sequence
  Description of Artificial Sequence: Synthetic oligonucleotide
cgagcucggaugaugguga

SEQ ID NO: 56333 - RNA, 19 nt, Artificial Sequence
  Description of Artificial Sequence: Synthetic oligonucleotide
cggcccgacucccaggacg

SEQ ID NO: 56334 - RNA, 19 nt, Artificial Sequence
  Description of Artificial Sequence: Synthetic oligonucleotide
guacucccagcgaguacuc

SEQ ID NO: 56335 - RNA, 19 nt, Artificial Sequence
  Description of Artificial Sequence: Synthetic oligonucleotide
cccuauuuagaggcuuuuc

SEQ ID NO: 56336 - RNA, 19 nt, Artificial Sequence
  Description of Artificial Sequence: Synthetic oligonucleotide
ccugaucccgcuggauuag

SEQ ID NO: 56337 - RNA, 19 nt, Artificial Sequence
  Description of Artificial Sequence: Synthetic oligonucleotide
ccccgugaucggaauggag

SEQ ID NO: 56338 - RNA, 19 nt, Artificial Sequence
  Description of Artificial Sequence: Synthetic oligonucleotide
caguucauugguagagcuu

SEQ ID NO: 56339 - RNA, 19 nt, Artificial Sequence
  Description of Artificial Sequence: Synthetic oligonucleotide
cggucuauauucugaggga

SEQ ID NO: 56340 - RNA, 19 nt, Artificial Sequence
  Description of Artificial Sequence: Synthetic oligonucleotide
gugcugcgcagaauacgga

SEQ ID NO: 56341 - RNA, 19 nt, Artificial Sequence
  Description of Artificial Sequence: Synthetic oligonucleotide
gcaaucgggauggcagaca

SEQ ID NO: 56342 - RNA, 19 nt, Artificial Sequence
  Description of Artificial Sequence: Synthetic oligonucleotide
cggcuggcggacuucuuag

SEQ ID NO: 56343 - RNA, 19 nt, Artificial Sequence
  Description of Artificial Sequence: Synthetic oligonucleotide
gcggacuucuuagggucug

SEQ ID NO: 56344 - RNA, 19 nt, Artificial Sequence
  Description of Artificial Sequence: Synthetic oligonucleotide
cacaaacgguaucccauuu

SEQ ID NO: 56345 - RNA, 19 nt, Artificial Sequence
  Description of Artificial Sequence: Synthetic oligonucleotide
caacacggaccaucacagu

SEQ ID NO: 56346 - RNA, 19 nt, Artificial Sequence
  Description of Artificial Sequence: Synthetic oligonucleotide
ggcauccuuguugggaugu

SEQ ID NO: 56347 - RNA, 19 nt, Artificial Sequence
  Description of Artificial Sequence: Synthetic oligonucleotide
gcuggacaguuaguuacua

SEQ ID NO: 56348 - RNA, 19 nt, Artificial Sequence
  Description of Artificial Sequence: Synthetic oligonucleotide
cagcgaguacucaguuccu

SEQ ID NO: 56349 - RNA, 19 nt, Artificial Sequence
  Description of Artificial Sequence: Synthetic oligonucleotide
cagugcuaacagccauacu

SEQ ID NO: 56350 - RNA, 19 nt, Artificial Sequence
  Description of Artificial Sequence: Synthetic oligonucleotide
ccgcggggcuucucgauga

SEQ ID NO: 56351 - RNA, 19 nt, Artificial Sequence
  Description of Artificial Sequence: Synthetic oligonucleotide
ccaauguauggaguaggau

SEQ ID NO: 56352 - RNA, 19 nt, Artificial Sequence
  Description of Artificial Sequence: Synthetic oligonucleotide
ccacaaacgguaucccauu

SEQ ID NO: 56353 - RNA, 19 nt, Artificial Sequence
  Description of Artificial Sequence: Synthetic oligonucleotide
guuggucgauaggcauccu

SEQ ID NO: 56354 - RNA, 19 nt, Artificial Sequence
  Description of Artificial Sequence: Synthetic oligonucleotide
caaagcgagcucggaugau

SEQ ID NO: 56355 - RNA, 19 nt, Artificial Sequence
  Description of Artificial Sequence: Synthetic oligonucleotide
gcuaggcuggacaguuagu

SEQ ID NO: 56356 - RNA, 19 nt, Artificial Sequence
  Description of Artificial Sequence: Synthetic oligonucleotide
gucgccagcaagggauguu

SEQ ID NO: 56357 - RNA, 19 nt, Artificial Sequence
  Description of Artificial Sequence: Synthetic oligonucleotide
cgguaucccauuugucucu

SEQ ID NO: 56358 - RNA, 19 nt, Artificial Sequence
  Description of Artificial Sequence: Synthetic oligonucleotide
ccccucgaaagcgaagugu

SEQ ID NO: 56359 - RNA, 19 nt, Artificial Sequence
  Description of Artificial Sequence: Synthetic oligonucleotide
gcugcucgggaagaugguu

SEQ ID NO: 56360 - RNA, 19 nt, Artificial Sequence
  Description of Artificial Sequence: Synthetic oligonucleotide
ggacggcuggcggacuucu

SEQ ID NO: 56361 - RNA, 19 nt, Artificial Sequence
  Description of Artificial Sequence: Synthetic oligonucleotide
caggacggcuggcggacuu

SEQ ID NO: 56362 - RNA, 19 nt, Artificial Sequence
  Description of Artificial Sequence: Synthetic oligonucleotide
caccgcggggcuucucgau

SEQ ID NO: 56363 - RNA, 19 nt, Artificial Sequence
  Description of Artificial Sequence: Synthetic oligonucleotide
gcgucucuagaaggucaaa

SEQ ID NO: 56364 - RNA, 19 nt, Artificial Sequence
  Description of Artificial Sequence: Synthetic oligonucleotide
cgaaagcgaaguguuugcu

SEQ ID NO: 56365 - RNA, 19 nt, Artificial Sequence
  Description of Artificial Sequence: Synthetic oligonucleotide
ccaguucgcuucccgaguu

SEQ ID NO: 56366 - RNA, 19 nt, Artificial Sequence
  Description of Artificial Sequence: Synthetic oligonucleotide
ccgguuaguuuuggcaccu

SEQ ID NO: 56367 - RNA, 19 nt, Artificial Sequence
  Description of Artificial Sequence: Synthetic oligonucleotide
gcggggcuucucgaugaaa

SEQ ID NO: 56368 - RNA, 19 nt, Artificial Sequence
  Description of Artificial Sequence: Synthetic oligonucleotide
cgguuaguuuuggcaccug

SEQ ID NO: 56369 - RNA, 19 nt, Artificial Sequence
  Description of Artificial Sequence: Synthetic oligonucleotide
ccggcccgacucccaggac

SEQ ID NO: 56370 - RNA, 19 nt, Artificial Sequence
  Description of Artificial Sequence: Synthetic oligonucleotide
cccgcuggauuaggguggu

SEQ ID NO: 56371 - RNA, 19 nt, Artificial Sequence
  Description of Artificial Sequence: Synthetic oligonucleotide
ccgcuggauuagggugguc

SEQ ID NO: 56372 - RNA, 19 nt, Artificial Sequence
  Description of Artificial Sequence: Synthetic oligonucleotide
cgcggggcuucucgaugaa

SEQ ID NO: 56373 - RNA, 19 nt, Artificial Sequence
  Description of Artificial Sequence: Synthetic oligonucleotide
aaugugauuagauaaaauu

SEQ ID NO: 56374 - RNA, 19 nt, Artificial Sequence
  Description of Artificial Sequence: Synthetic oligonucleotide
uuuauguacucgauggugg

SEQ ID NO: 56375 - RNA, 19 nt, Artificial Sequence
  Description of Artificial Sequence: Synthetic oligonucleotide
uuuuacgacgacaucauca

SEQ ID NO: 56376 - RNA, 19 nt, Artificial Sequence
  Description of Artificial Sequence: Synthetic oligonucleotide
caauacgacacuuauugcg

SEQ ID NO: 56377 - RNA, 19 nt, Artificial Sequence
  Description of Artificial Sequence: Synthetic oligonucleotide
ugugguagcaauacgacac

SEQ ID NO: 56378 - RNA, 19 nt, Artificial Sequence
  Description of Artificial Sequence: Synthetic oligonucleotide
ugaacuuuccagaagcggc

SEQ ID NO: 56379 - RNA, 19 nt, Artificial Sequence
  Description of Artificial Sequence: Synthetic oligonucleotide
auagagauauucuuaaggu

SEQ ID NO: 56380 - RNA, 19 nt, Artificial Sequence
  Description of Artificial Sequence: Synthetic oligonucleotide
aauacgacacuuauugcgg

SEQ ID NO: 56381 - RNA, 19 nt, Artificial Sequence
  Description of Artificial Sequence: Synthetic oligonucleotide
gcuaacaacagcuugcugg

SEQ ID NO: 56382 - RNA, 19 nt, Artificial Sequence
  Description of Artificial Sequence: Synthetic oligonucleotide
auucuuauugauucuucgg

SEQ ID NO: 56383 - RNA, 19 nt, Artificial Sequence
  Description of Artificial Sequence: Synthetic oligonucleotide
gucaacauaucugagacag

SEQ ID NO: 56384 - RNA, 19 nt, Artificial Sequence
  Description of Artificial Sequence: Synthetic oligonucleotide
ggagcuuacacacugaggc

SEQ ID NO: 56385 - RNA, 19 nt, Artificial Sequence
  Description of Artificial Sequence: Synthetic oligonucleotide
caauacgacaacaugauga

SEQ ID NO: 56386 - RNA, 19 nt, Artificial Sequence
  Description of Artificial Sequence: Synthetic oligonucleotide
uggcaauacgacaacauga

SEQ ID NO: 56387 - RNA, 19 nt, Artificial Sequence
  Description of Artificial Sequence: Synthetic oligonucleotide
agucaaaacagucugucga

SEQ ID NO: 56388 - RNA, 19 nt, Artificial Sequence
  Description of Artificial Sequence: Synthetic oligonucleotide
uguagauuguacagggagc

SEQ ID NO: 56389 - RNA, 19 nt, Artificial Sequence
  Description of Artificial Sequence: Synthetic oligonucleotide
uuaugaaaugaggagagac

SEQ ID NO: 56390 - RNA, 19 nt, Artificial Sequence
  Description of Artificial Sequence: Synthetic oligonucleotide
cauucuuauugauucuucg

SEQ ID NO: 56391 - RNA, 19 nt, Artificial Sequence
  Description of Artificial Sequence: Synthetic oligonucleotide
aagagaucguagugauugc

SEQ ID NO: 56392 - RNA, 19 nt, Artificial Sequence
  Description of Artificial Sequence: Synthetic oligonucleotide
guguagauuguacagggag

SEQ ID NO: 56393 - RNA, 19 nt, Artificial Sequence
  Description of Artificial Sequence: Synthetic oligonucleotide
uaacaguccaugaaaugug

SEQ ID NO: 56394 - RNA, 19 nt, Artificial Sequence
  Description of Artificial Sequence: Synthetic oligonucleotide
uggaaugcugacaaacuca

SEQ ID NO: 56395 - RNA, 19 nt, Artificial Sequence
  Description of Artificial Sequence: Synthetic oligonucleotide
uuugacuggaacaccguga

SEQ ID NO: 56396 - RNA, 19 nt, Artificial Sequence
  Description of Artificial Sequence: Synthetic oligonucleotide
ugagaacgacauaauacug

SEQ ID NO: 56397 - RNA, 19 nt, Artificial Sequence
  Description of Artificial Sequence: Synthetic oligonucleotide
aacaccgugaguucuugcu

SEQ ID NO: 56398 - RNA, 19 nt, Artificial Sequence
  Description of Artificial Sequence: Synthetic oligonucleotide
uuggcggcuaacaacagcu

SEQ ID NO: 56399 - RNA, 19 nt, Artificial Sequence
  Description of Artificial Sequence: Synthetic oligonucleotide
gaucguagugauugcacag

SEQ ID NO: 56400 - RNA, 19 nt, Artificial Sequence
  Description of Artificial Sequence: Synthetic oligonucleotide
augucuuuugacuggaaca

SEQ ID NO: 56401 - RNA, 19 nt, Artificial Sequence
  Description of Artificial Sequence: Synthetic oligonucleotide
aaagcgugcaaacgggacu

SEQ ID NO: 56402 - RNA, 19 nt, Artificial Sequence
  Description of Artificial Sequence: Synthetic oligonucleotide
gauuuagcggcuucuaaga

SEQ ID NO: 56403 - RNA, 19 nt, Artificial Sequence
  Description of Artificial Sequence: Synthetic oligonucleotide
gaaucgcucaucugucucg

SEQ ID NO: 56404 - RNA, 19 nt, Artificial Sequence
  Description of Artificial Sequence: Synthetic oligonucleotide
  modified_base (4)..(4): a, c, u, g, unknown or other
uucngggccacaagaauac

SEQ ID NO: 56405 - RNA, 19 nt, Artificial Sequence
  Description of Artificial Sequence: Synthetic oligonucleotide
agacuuggcggcuaacaac

SEQ ID NO: 56406 - RNA, 19 nt, Artificial Sequence
  Description of Artificial Sequence: Synthetic oligonucleotide
aagacuaaggugugucuga

SEQ ID NO: 56407 - RNA, 19 nt, Artificial Sequence
  Description of Artificial Sequence: Synthetic oligonucleotide
uuuacgacgacaucaucau

SEQ ID NO: 56408 - RNA, 19 nt, Artificial Sequence
  Description of Artificial Sequence: Synthetic oligonucleotide
uuacuaacagcguccaacu

SEQ ID NO: 56409 - RNA, 19 nt, Artificial Sequence
  Description of Artificial Sequence: Synthetic oligonucleotide
acaucaucguccaugagag

SEQ ID NO: 56410 - RNA, 19 nt, Artificial Sequence
  Description of Artificial Sequence: Synthetic oligonucleotide
ggacauuucggucagguug

SEQ ID NO: 56411 - RNA, 19 nt, Artificial Sequence
  Description of Artificial Sequence: Synthetic oligonucleotide
aaugugcgccccucucucc

SEQ ID NO: 56412 - RNA, 19 nt, Artificial Sequence
  Description of Artificial Sequence: Synthetic oligonucleotide
acacgagcaguuuuguguc

SEQ ID NO: 56413 - RNA, 19 nt, Artificial Sequence
  Description of Artificial Sequence: Synthetic oligonucleotide
agacucuuaauggagucgg

SEQ ID NO: 56414 - RNA, 19 nt, Artificial Sequence
  Description of Artificial Sequence: Synthetic oligonucleotide
uuuugucugcgcuuggcca

SEQ ID NO: 56415 - RNA, 19 nt, Artificial Sequence
  Description of Artificial Sequence: Synthetic oligonucleotide
ggcaguugcgaucacaucc

SEQ ID NO: 56416 - RNA, 19 nt, Artificial Sequence
  Description of Artificial Sequence: Synthetic oligonucleotide
acaaggaccucugugacug

SEQ ID NO: 56417 - RNA, 19 nt, Artificial Sequence
  Description of Artificial Sequence: Synthetic oligonucleotide
ugugagguugacuacugaa

SEQ ID NO: 56418 - RNA, 19 nt, Artificial Sequence
  Description of Artificial Sequence: Synthetic oligonucleotide
ugaugauuccugugagccg

SEQ ID NO: 56419 - RNA, 19 nt, Artificial Sequence
  Description of Artificial Sequence: Synthetic oligonucleotide
uuggauugcggagagaaaa

SEQ ID NO: 56420 - RNA, 19 nt, Artificial Sequence
  Description of Artificial Sequence: Synthetic oligonucleotide
agaaaagcgugcaaacggg

SEQ ID NO: 56421 - RNA, 19 nt, Artificial Sequence
  Description of Artificial Sequence: Synthetic oligonucleotide
ucguagugauugcacagcc

SEQ ID NO: 56422 - RNA, 19 nt, Artificial Sequence
  Description of Artificial Sequence: Synthetic oligonucleotide
uacauggaggggucgauca

SEQ ID NO: 56423 - RNA, 19 nt, Artificial Sequence
  Description of Artificial Sequence: Synthetic oligonucleotide
agaauaucuguguccacga

SEQ ID NO: 56424 - RNA, 19 nt, Artificial Sequence
  Description of Artificial Sequence: Synthetic oligonucleotide
uuucggucagguuggaaga

SEQ ID NO: 56425 - RNA, 19 nt, Artificial Sequence
  Description of Artificial Sequence: Synthetic oligonucleotide
aucguagugauugcacagc

SEQ ID NO: 56426 - RNA, 19 nt, Artificial Sequence
  Description of Artificial Sequence: Synthetic oligonucleotide
gaauacaagauggguguag

SEQ ID NO: 56427 - RNA, 19 nt, Artificial Sequence
  Description of Artificial Sequence: Synthetic oligonucleotide
  modified_base (6)..(6): a, c, u, g, unknown or other
uuuucngggccacaagaau

SEQ ID NO: 56428 - RNA, 19 nt, Artificial Sequence
  Description of Artificial Sequence: Synthetic oligonucleotide
acucuuaauggagucggac

SEQ ID NO: 56429 - RNA, 19 nt, Artificial Sequence
  Description of Artificial Sequence: Synthetic oligonucleotide
aaacucaggguuugaugca

SEQ ID NO: 56430 - RNA, 19 nt, Artificial Sequence
  Description of Artificial Sequence: Synthetic oligonucleotide
cacgcuuuaaucccagcgc

SEQ ID NO: 56431 - RNA, 19 nt, Artificial Sequence
  Description of Artificial Sequence: Synthetic oligonucleotide
ucgugggcggguauuagcc

SEQ ID NO: 56432 - RNA, 19 nt, Artificial Sequence
  Description of Artificial Sequence: Synthetic oligonucleotide
ggauuuagcggcuucuaag

SEQ ID NO: 56433 - RNA, 19 nt, Artificial Sequence
  Description of Artificial Sequence: Synthetic oligonucleotide
aucgugggcggguauuagc

SEQ ID NO: 56434 - RNA, 19 nt, Artificial Sequence
  Description of Artificial Sequence: Synthetic oligonucleotide
ugucguugggagcuccagg

SEQ ID NO: 56435 - RNA, 19 nt, Artificial Sequence
  Description of Artificial Sequence: Synthetic oligonucleotide
uggguuucagggucauugg

SEQ ID NO: 56436 - RNA, 19 nt, Artificial Sequence
  Description of Artificial Sequence: Synthetic oligonucleotide
cuauaacagagaaaccuga

SEQ ID NO: 56437 - RNA, 19 nt, Artificial Sequence
  Description of Artificial Sequence: Synthetic oligonucleotide
acgacauaauacugacuuc

SEQ ID NO: 56438 - RNA, 19 nt, Artificial Sequence
  Description of Artificial Sequence: Synthetic oligonucleotide
cuuuugucugcgcuuggcc

SEQ ID NO: 56439 - RNA, 19 nt, Artificial Sequence
  Description of Artificial Sequence: Synthetic oligonucleotide
cagcuuuacacccuuggac

SEQ ID NO: 56440 - RNA, 19 nt, Artificial Sequence
  Description of Artificial Sequence: Synthetic oligonucleotide
ucagacacggccccagcga

SEQ ID NO: 56441 - RNA, 19 nt, Artificial Sequence
  Description of Artificial Sequence: Synthetic oligonucleotide
gguauuagcccucaucuuc

SEQ ID NO: 56442 - RNA, 19 nt, Artificial Sequence
  Description of Artificial Sequence: Synthetic oligonucleotide
cuugugggcgaaucagugc

SEQ ID NO: 56443 - RNA, 19 nt, Artificial Sequence
  Description of Artificial Sequence: Synthetic oligonucleotide
aagcgugcaaacgggacug

SEQ ID NO: 56444 - RNA, 19 nt, Artificial Sequence
  Description of Artificial Sequence: Synthetic oligonucleotide
gaugcaaaugcugucaggu

SEQ ID NO: 56445 - RNA, 19 nt, Artificial Sequence
  Description of Artificial Sequence: Synthetic oligonucleotide
uuggaaucgcucaucuguc

SEQ ID NO: 56446 - RNA, 19 nt, Artificial Sequence
  Description of Artificial Sequence: Synthetic oligonucleotide
cugagaacgacauaauacu

SEQ ID NO: 56447 - RNA, 19 nt, Artificial Sequence
  Description of Artificial Sequence: Synthetic oligonucleotide
auacgacaacaugaugagc

SEQ ID NO: 56448 - RNA, 19 nt, Artificial Sequence
  Description of Artificial Sequence: Synthetic oligonucleotide
uugccuagugugaugucac

SEQ ID NO: 56449 - RNA, 19 nt, Artificial Sequence
  Description of Artificial Sequence: Synthetic oligonucleotide
aguugcgaucacauccucc

SEQ ID NO: 56450 - RNA, 19 nt, Artificial Sequence
  Description of Artificial Sequence: Synthetic oligonucleotide
acgcuuuaaucccagcgcu

SEQ ID NO: 56451 - RNA, 19 nt, Artificial Sequence
  Description of Artificial Sequence: Synthetic oligonucleotide
guauuagcccucaucuucc

SEQ ID NO: 56452 - RNA, 19 nt, Artificial Sequence
  Description of Artificial Sequence: Synthetic oligonucleotide
acuguaccgugugagauca

SEQ ID NO: 56453 - RNA, 19 nt, Artificial Sequence
  Description of Artificial Sequence: Synthetic oligonucleotide
agcggcuucaauggaugcc

SEQ ID NO: 56454 - RNA, 19 nt, Artificial Sequence
  Description of Artificial Sequence: Synthetic oligonucleotide
uggauuuagcggcuucuaa

SEQ ID NO: 56455 - RNA, 19 nt, Artificial Sequence
  Description of Artificial Sequence: Synthetic oligonucleotide
uuggacauuucggucaggu

SEQ ID NO: 56456 - RNA, 19 nt, Artificial Sequence
  Description of Artificial Sequence: Synthetic oligonucleotide
gauuugaccagggcacuug

SEQ ID NO: 56457 - RNA, 19 nt, Artificial Sequence
  Description of Artificial Sequence: Synthetic oligonucleotide
acacuuauugcgguugucu

SEQ ID NO: 56458 - RNA, 19 nt, Artificial Sequence
  Description of Artificial Sequence: Synthetic oligonucleotide
guaggaauuuauacugcug

SEQ ID NO: 56459 - RNA, 19 nt, Artificial Sequence
  Description of Artificial Sequence: Synthetic oligonucleotide
uccugugagccguuguugu

SEQ ID NO: 56460 - RNA, 19 nt, Artificial Sequence
  Description of Artificial Sequence: Synthetic oligonucleotide
ucuuuugucugcgcuuggc

SEQ ID NO: 56461 - RNA, 19 nt, Artificial Sequence
  Description of Artificial Sequence: Synthetic oligonucleotide
gcuauaacagagaaaccug

SEQ ID NO: 56462 - RNA, 19 nt, Artificial Sequence
  Description of Artificial Sequence: Synthetic oligonucleotide
auuuagcggcuucuaagau

SEQ ID NO: 56463 - RNA, 19 nt, Artificial Sequence
  Description of Artificial Sequence: Synthetic oligonucleotide
uuuggauugcggagagaaa

SEQ ID NO: 56464 - RNA, 19 nt, Artificial Sequence
  Description of Artificial Sequence: Synthetic oligonucleotide
ucgucagcuuugccgaaug

SEQ ID NO: 56465 - RNA, 19 nt, Artificial Sequence
  Description of Artificial Sequence: Synthetic oligonucleotide
cuuggcggcuaacaacagc

SEQ ID NO: 56466 - RNA, 19 nt, Artificial Sequence
  Description of Artificial Sequence: Synthetic oligonucleotide
aggucucgccauucucugc

SEQ ID NO: 56467 - RNA, 19 nt, Artificial Sequence
  Description of Artificial Sequence: Synthetic oligonucleotide
gauuuuauucuggccccug

SEQ ID NO: 56468 - RNA, 19 nt, Artificial Sequence
  Description of Artificial Sequence: Synthetic oligonucleotide
ugugagccguuguuguugu

SEQ ID NO: 56469 - RNA, 19 nt, Artificial Sequence
  Description of Artificial Sequence: Synthetic oligonucleotide
auacgacacuuauugcggu

SEQ ID NO: 56470 - RNA, 19 nt, Artificial Sequence
  Description of Artificial Sequence: Synthetic oligonucleotide
uuugucguugggagcucca

SEQ ID NO: 56471 - RNA, 19 nt, Artificial Sequence
  Description of Artificial Sequence: Synthetic oligonucleotide
cagugcuccaaacugacaa

SEQ ID NO: 56472 - RNA, 19 nt, Artificial Sequence
  Description of Artificial Sequence: Synthetic oligonucleotide
ugccuuucgucauucuuau

SEQ ID NO: 56473 - RNA, 19 nt, Artificial Sequence
  Description of Artificial Sequence: Synthetic oligonucleotide
uugcuugcaagcugucaac

SEQ ID NO: 56474 - RNA, 19 nt, Artificial Sequence
  Description of Artificial Sequence: Synthetic oligonucleotide
gguaggacacuguaccgug

SEQ ID NO: 56475 - RNA, 19 nt, Artificial Sequence
  Description of Artificial Sequence: Synthetic oligonucleotide
gcacggacaagauugucug

SEQ ID NO: 56476 - RNA, 19 nt, Artificial Sequence
  Description of Artificial Sequence: Synthetic oligonucleotide
agagacuuggcggcuaaca

SEQ ID NO: 56477 - RNA, 19 nt, Artificial Sequence
  Description of Artificial Sequence: Synthetic oligonucleotide
ugcuugcaagcugucaaca

SEQ ID NO: 56478 - RNA, 19 nt, Artificial Sequence
  Description of Artificial Sequence: Synthetic oligonucleotide
agagaucguagugauugca

SEQ ID NO: 56479 - RNA, 19 nt, Artificial Sequence
  Description of Artificial Sequence: Synthetic oligonucleotide
agacuaaggugugucugag

SEQ ID NO: 56480 - RNA, 19 nt, Artificial Sequence
  Description of Artificial Sequence: Synthetic oligonucleotide
gagacccagacuagccacg

SEQ ID NO: 56481 - RNA, 19 nt, Artificial Sequence
  Description of Artificial Sequence: Synthetic oligonucleotide
acgccauagagauauucuu

SEQ ID NO: 56482 - RNA, 19 nt, Artificial Sequence
  Description of Artificial Sequence: Synthetic oligonucleotide
uuuugucguugggagcucc

SEQ ID NO: 56483 - RNA, 19 nt, Artificial Sequence
  Description of Artificial Sequence: Synthetic oligonucleotide
ugcuuggcaauacgacaac

SEQ ID NO: 56484 - RNA, 19 nt, Artificial Sequence
  Description of Artificial Sequence: Synthetic oligonucleotide
uagugauugcacagcccac

SEQ ID NO: 56485 - RNA, 19 nt, Artificial Sequence
  Description of Artificial Sequence: Synthetic oligonucleotide
cauggaggggucgaucagc

SEQ ID NO: 56486 - RNA, 19 nt, Artificial Sequence
  Description of Artificial Sequence: Synthetic oligonucleotide
gaaaagcgugcaaacggga

SEQ ID NO: 56487 - RNA, 19 nt, Artificial Sequence
  Description of Artificial Sequence: Synthetic oligonucleotide
gaucugcaaaggucucgcc

SEQ ID NO: 56488 - RNA, 19 nt, Artificial Sequence
  Description of Artificial Sequence: Synthetic oligonucleotide
acgacacuuauugcgguug

SEQ ID NO: 56489 - RNA, 19 nt, Artificial Sequence
  Description of Artificial Sequence: Synthetic oligonucleotide
cugaggcugauuugaccag

SEQ ID NO: 56490 - RNA, 19 nt, Artificial Sequence
  Description of Artificial Sequence: Synthetic oligonucleotide
gagcuuacacacugaggca

SEQ ID NO: 56491 - RNA, 19 nt, Artificial Sequence
  Description of Artificial Sequence: Synthetic oligonucleotide
uacuaacagcguccaacuc

SEQ ID NO: 56492 - RNA, 19 nt, Artificial Sequence
  Description of Artificial Sequence: Synthetic oligonucleotide
ggcuuuacuaacagcgucc

SEQ ID NO: 56493 - RNA, 19 nt, Artificial Sequence
  Description of Artificial Sequence: Synthetic oligonucleotide
ggcuauaacagagaaaccu

SEQ ID NO: 56494 - RNA, 19 nt, Artificial Sequence
  Description of Artificial Sequence: Synthetic oligonucleotide
uggcauggacgacuucccc

SEQ ID NO: 56495 - RNA, 19 nt, Artificial Sequence
  Description of Artificial Sequence: Synthetic oligonucleotide
gaugccgcagcucccaaua

SEQ ID NO: 56496 - RNA, 19 nt, Artificial Sequence
  Description of Artificial Sequence: Synthetic oligonucleotide
guagauuguacagggagcu

SEQ ID NO: 56497 - RNA, 19 nt, Artificial Sequence
  Description of Artificial Sequence: Synthetic oligonucleotide
gugugguagcaauacgaca

SEQ ID NO: 56498 - RNA, 19 nt, Artificial Sequence
  Description of Artificial Sequence: Synthetic oligonucleotide
uacggcaggcguugcauaa

SEQ ID NO: 56499 - RNA, 19 nt, Artificial Sequence
  Description of Artificial Sequence: Synthetic oligonucleotide
cccagacuagccacgaggg

SEQ ID NO: 56500 - RNA, 19 nt, Artificial Sequence
  Description of Artificial Sequence: Synthetic oligonucleotide
auuagcccucaucuucccu

SEQ ID NO: 56501 - RNA, 19 nt, Artificial Sequence
  Description of Artificial Sequence: Synthetic oligonucleotide
aaugacgguugggucuucu

SEQ ID NO: 56502 - RNA, 19 nt, Artificial Sequence
  Description of Artificial Sequence: Synthetic oligonucleotide
agcugugagguugacuacu

SEQ ID NO: 56503 - RNA, 19 nt, Artificial Sequence
  Description of Artificial Sequence: Synthetic oligonucleotide
gaaaugugcgccccucucu

SEQ ID NO: 56504 - RNA, 19 nt, Artificial Sequence
  Description of Artificial Sequence: Synthetic oligonucleotide
accucggcaagcuggguaa

SEQ ID NO: 56505 - RNA, 19 nt, Artificial Sequence
  Description of Artificial Sequence: Synthetic oligonucleotide
ucggagguagcgagucuac

SEQ ID NO: 56506 - RNA, 19 nt, Artificial Sequence
  Description of Artificial Sequence: Synthetic oligonucleotide
gggucgaucagccggcuug

SEQ ID NO: 56507 - RNA, 19 nt, Artificial Sequence
  Description of Artificial Sequence: Synthetic oligonucleotide
acgauacugaugauuccug

SEQ ID NO: 56508 - RNA, 19 nt, Artificial Sequence
  Description of Artificial Sequence: Synthetic oligonucleotide
gcuccaaacugacaaggac

SEQ ID NO: 56509 - RNA, 19 nt, Artificial Sequence
  Description of Artificial Sequence: Synthetic oligonucleotide
gcaauacgacacuuauugc

SEQ ID NO: 56510 - RNA, 19 nt, Artificial Sequence
  Description of Artificial Sequence: Synthetic oligonucleotide
cacuguaccgugugagauc

SEQ ID NO: 56511 - RNA, 19 nt, Artificial Sequence
  Description of Artificial Sequence: Synthetic oligonucleotide
gaucagccggcuugcuggc

SEQ ID NO: 56512 - RNA, 19 nt, Artificial Sequence
  Description of Artificial Sequence: Synthetic oligonucleotide
cuacaugaauugccagcug

SEQ ID NO: 56513 - RNA, 19 nt, Artificial Sequence
  Description of Artificial Sequence: Synthetic oligonucleotide
gcggcuucaauggaugccg

SEQ ID NO: 56514 - RNA, 19 nt, Artificial Sequence
  Description of Artificial Sequence: Synthetic oligonucleotide
gaguaaggagcccaggauu

SEQ ID NO: 56515 - RNA, 19 nt, Artificial Sequence
  Description of Artificial Sequence: Synthetic oligonucleotide
gagacgaggcacgagggaa

SEQ ID NO: 56516 - RNA, 19 nt, Artificial Sequence
  Description of Artificial Sequence: Synthetic oligonucleotide
uuauugcgguugucuucag

SEQ ID NO: 56517 - RNA, 19 nt, Artificial Sequence
  Description of Artificial Sequence: Synthetic oligonucleotide
ugaggugugcuuggcaaua

SEQ ID NO: 56518 - RNA, 19 nt, Artificial Sequence
  Description of Artificial Sequence: Synthetic oligonucleotide
gugagaucaugaucaugca

SEQ ID NO: 56519 - RNA, 19 nt, Artificial Sequence
  Description of Artificial Sequence: Synthetic oligonucleotide
gacuaaggugugucugaga

SEQ ID NO: 56520 - RNA, 19 nt, Artificial Sequence
  Description of Artificial Sequence: Synthetic oligonucleotide
uacgacacuuauugcgguu

SEQ ID NO: 56521 - RNA, 19 nt, Artificial Sequence
  Description of Artificial Sequence: Synthetic oligonucleotide
ugcgcuuggccagccaucu

SEQ ID NO: 56522 - RNA, 19 nt, Artificial Sequence
  Description of Artificial Sequence: Synthetic oligonucleotide
gucucguucucuccaaucu

SEQ ID NO: 56523 - RNA, 19 nt, Artificial Sequence
  Description of Artificial Sequence: Synthetic oligonucleotide
ggugugguagcaauacgac

SEQ ID NO: 56524 - RNA, 19 nt, Artificial Sequence
  Description of Artificial Sequence: Synthetic oligonucleotide
gaggcgauacggcaggcgu

SEQ ID NO: 56525 - RNA, 19 nt, Artificial Sequence
  Description of Artificial Sequence: Synthetic oligonucleotide
uggaacaccgugaguucuu

SEQ ID NO: 56526 - RNA, 19 nt, Artificial Sequence
  Description of Artificial Sequence: Synthetic oligonucleotide
ccauagagauauucuuaag

SEQ ID NO: 56527 - RNA, 19 nt, Artificial Sequence
  Description of Artificial Sequence: Synthetic oligonucleotide
acggugugggaauguccag

SEQ ID NO: 56528 - RNA, 19 nt, Artificial Sequence
  Description of Artificial Sequence: Synthetic oligonucleotide
aagugccucuuggcaacag

SEQ ID NO: 56529 - RNA, 19 nt, Artificial Sequence
  Description of Artificial Sequence: Synthetic oligonucleotide
ggaaucgcucaucugucuc

SEQ ID NO: 56530 - RNA, 19 nt, Artificial Sequence
  Description of Artificial Sequence: Synthetic oligonucleotide
cuuggcaauacgacaacau

SEQ ID NO: 56531 - RNA, 19 nt, Artificial Sequence
  Description of Artificial Sequence: Synthetic oligonucleotide
augugcgccccucucuccu

SEQ ID NO: 56532 - RNA, 19 nt, Artificial Sequence
  Description of Artificial Sequence: Synthetic oligonucleotide
ugcucggagguagcgaguc

SEQ ID NO: 56533 - RNA, 19 nt, Artificial Sequence
  Description of Artificial Sequence: Synthetic oligonucleotide
caucaucguccaugagagc

SEQ ID NO: 56534 - RNA, 19 nt, Artificial Sequence
  Description of Artificial Sequence: Synthetic oligonucleotide
gucgaggcucuccagaagu

SEQ ID NO: 56535 - RNA, 19 nt, Artificial Sequence
  Description of Artificial Sequence: Synthetic oligonucleotide
agagagacuuggcggcuaa

SEQ ID NO: 56536 - RNA, 19 nt, Artificial Sequence
  Description of Artificial Sequence: Synthetic oligonucleotide
gaggggucgaucagccggc

SEQ ID NO: 56537 - RNA, 19 nt, Artificial Sequence
  Description of Artificial Sequence: Synthetic oligonucleotide
augaggcgauacggcaggc

SEQ ID NO: 56538 - RNA, 19 nt, Artificial Sequence
  Description of Artificial Sequence: Synthetic oligonucleotide
ucgaggcucuccagaagua

SEQ ID NO: 56539 - RNA, 19 nt, Artificial Sequence
  Description of Artificial Sequence: Synthetic oligonucleotide
cuggacgccauagagauau

SEQ ID NO: 56540 - RNA, 19 nt, Artificial Sequence
  Description of Artificial Sequence: Synthetic oligonucleotide
  modified_base (2)..(2): a, c, u, g, unknown or other
cngggccacaagaauacaa

SEQ ID NO: 56541 - RNA, 19 nt, Artificial Sequence
  Description of Artificial Sequence: Synthetic oligonucleotide
cagcggcuucaauggaugc

SEQ ID NO: 56542 - RNA, 19 nt, Artificial Sequence
  Description of Artificial Sequence: Synthetic oligonucleotide
ggggugugguagcaauacg

SEQ ID NO: 56543 - RNA, 19 nt, Artificial Sequence
  Description of Artificial Sequence: Synthetic oligonucleotide
  modified_base (3)..(3): a, c, u, g, unknown or other
ucngggccacaagaauaca

SEQ ID NO: 56544 - RNA, 19 nt, Artificial Sequence
  Description of Artificial Sequence: Synthetic oligonucleotide
gggugugguagcaauacga

SEQ ID NO: 56545 - RNA, 19 nt, Artificial Sequence
  Description of Artificial Sequence: Synthetic oligonucleotide
gggagcuuacacacugagg

SEQ ID NO: 56546 - RNA, 19 nt, Artificial Sequence
  Description of Artificial Sequence: Synthetic oligonucleotide
uugccgaaugcugccuucu

SEQ ID NO: 56547 - RNA, 19 nt, Artificial Sequence
  Description of Artificial Sequence: Synthetic oligonucleotide
cacgagggaacuggaggag

SEQ ID NO: 56548 - RNA, 19 nt, Artificial Sequence
  Description of Artificial Sequence: Synthetic oligonucleotide
gacaaggaccucugugacu

SEQ ID NO: 56549 - RNA, 19 nt, Artificial Sequence
  Description of Artificial Sequence: Synthetic oligonucleotide
gcaccgguugaugccaucg

SEQ ID NO: 56550 - RNA, 19 nt, Artificial Sequence
  Description of Artificial Sequence: Synthetic oligonucleotide
gcacgagggaacuggagga

SEQ ID NO: 56551 - RNA, 19 nt, Artificial Sequence
  Description of Artificial Sequence: Synthetic oligonucleotide
ugauuugaccagggcacuu

SEQ ID NO: 56552 - RNA, 19 nt, Artificial Sequence
  Description of Artificial Sequence: Synthetic oligonucleotide
agaauacaagaugggugua

SEQ ID NO: 56553 - RNA, 19 nt, Artificial Sequence
  Description of Artificial Sequence: Synthetic oligonucleotide
uaacaacagcuugcuggac

SEQ ID NO: 56554 - RNA, 19 nt, Artificial Sequence
  Description of Artificial Sequence: Synthetic oligonucleotide
gaggugugcuuggcaauac

SEQ ID NO: 56555 - RNA, 19 nt, Artificial Sequence
  Description of Artificial Sequence: Synthetic oligonucleotide
gacacuuauugcgguuguc

SEQ ID NO: 56556 - RNA, 19 nt, Artificial Sequence
  Description of Artificial Sequence: Synthetic oligonucleotide
ugggcggguauuagcccuc

SEQ ID NO: 56557 - RNA, 19 nt, Artificial Sequence
  Description of Artificial Sequence: Synthetic oligonucleotide
auacggcaggcguugcaua

SEQ ID NO: 56558 - RNA, 19 nt, Artificial Sequence
  Description of Artificial Sequence: Synthetic oligonucleotide
agacccagacuagccacga

SEQ ID NO: 56559 - RNA, 19 nt, Artificial Sequence
  Description of Artificial Sequence: Synthetic oligonucleotide
gauacggcaggcguugcau

SEQ ID NO: 56560 - RNA, 19 nt, Artificial Sequence
  Description of Artificial Sequence: Synthetic oligonucleotide
cuuggccgaugcucccagc

SEQ ID NO: 56561 - RNA, 19 nt, Artificial Sequence
  Description of Artificial Sequence: Synthetic oligonucleotide
caaggaccucugugacugc

SEQ ID NO: 56562 - RNA, 19 nt, Artificial Sequence
  Description of Artificial Sequence: Synthetic oligonucleotide
cccgacacgagcaguuuug

SEQ ID NO: 56563 - RNA, 19 nt, Artificial Sequence
  Description of Artificial Sequence: Synthetic oligonucleotide
ggcgauacggcaggcguug

SEQ ID NO: 56564 - RNA, 19 nt, Artificial Sequence
  Description of Artificial Sequence: Synthetic oligonucleotide
cucggcuucaguugcucua

SEQ ID NO: 56565 - RNA, 19 nt, Artificial Sequence
  Description of Artificial Sequence: Synthetic oligonucleotide
agcgugcaaacgggacugg

SEQ ID NO: 56566 - RNA, 19 nt, Artificial Sequence
  Description of Artificial Sequence: Synthetic oligonucleotide
cguagugauugcacagccc

SEQ ID NO: 56567 - RNA, 19 nt, Artificial Sequence
  Description of Artificial Sequence: Synthetic oligonucleotide
gcggguauuagcccucauc

SEQ ID NO: 56568 - RNA, 19 nt, Artificial Sequence
  Description of Artificial Sequence: Synthetic oligonucleotide
caucgugggcggguauuag

SEQ ID NO: 56569 - RNA, 19 nt, Artificial Sequence
  Description of Artificial Sequence: Synthetic oligonucleotide
acuuggcggcuaacaacag

SEQ ID NO: 56570 - RNA, 19 nt, Artificial Sequence
  Description of Artificial Sequence: Synthetic oligonucleotide
ccguccucucuagagagag

SEQ ID NO: 56571 - RNA, 19 nt, Artificial Sequence
  Description of Artificial Sequence: Synthetic oligonucleotide
caugaauugccagcugcua

SEQ ID NO: 56572 - RNA, 19 nt, Artificial Sequence
  Description of Artificial Sequence: Synthetic oligonucleotide
gccucucguggcauggacg

SEQ ID NO: 56573 - RNA, 19 nt, Artificial Sequence
  Description of Artificial Sequence: Synthetic oligonucleotide
cgaggcacgagggaacugg

SEQ ID NO: 56574 - RNA, 19 nt, Artificial Sequence
  Description of Artificial Sequence: Synthetic oligonucleotide
cucggcaagcuggguaaug

SEQ ID NO: 56575 - RNA, 19 nt, Artificial Sequence
  Description of Artificial Sequence: Synthetic oligonucleotide
ggaacaccgugaguucuug

SEQ ID NO: 56576 - RNA, 19 nt, Artificial Sequence
  Description of Artificial Sequence: Synthetic oligonucleotide
acgagcaguuuugugucuu

SEQ ID NO: 56577 - RNA, 19 nt, Artificial Sequence
  Description of Artificial Sequence: Synthetic oligonucleotide
gaauccuggucggccuuca

SEQ ID NO: 56578 - RNA, 19 nt, Artificial Sequence
  Description of Artificial Sequence: Synthetic oligonucleotide
caguugcgaucacauccuc

SEQ ID NO: 56579 - RNA, 19 nt, Artificial Sequence
  Description of Artificial Sequence: Synthetic oligonucleotide
gagcagucuuggaggacca

SEQ ID NO: 56580 - RNA, 19 nt, Artificial Sequence
  Description of Artificial Sequence: Synthetic oligonucleotide
gugugucugagaacgacau

SEQ ID NO: 56581 - RNA, 19 nt, Artificial Sequence
  Description of Artificial Sequence: Synthetic oligonucleotide
gguagcaauacgacacuua

SEQ ID NO: 56582 - RNA, 19 nt, Artificial Sequence
  Description of Artificial Sequence: Synthetic oligonucleotide
aucgucagcuuugccgaau

SEQ ID NO: 56583 - RNA, 19 nt, Artificial Sequence
  Description of Artificial Sequence: Synthetic oligonucleotide
ugggcggaucuggaaugcu

SEQ ID NO: 56584 - RNA, 19 nt, Artificial Sequence
  Description of Artificial Sequence: Synthetic oligonucleotide
gaccaggugggcggaucug

SEQ ID NO: 56585 - RNA, 19 nt, Artificial Sequence
  Description of Artificial Sequence: Synthetic oligonucleotide
ugcaccgguugaugccauc

SEQ ID NO: 56586 - RNA, 19 nt, Artificial Sequence
  Description of Artificial Sequence: Synthetic oligonucleotide
gagagacuuggcggcuaac

SEQ ID NO: 56587 - RNA, 19 nt, Artificial Sequence
  Description of Artificial Sequence: Synthetic oligonucleotide
acgagggcauucacauaug

SEQ ID NO: 56588 - RNA, 19 nt, Artificial Sequence
  Description of Artificial Sequence: Synthetic oligonucleotide
cucggagguagcgagucua

SEQ ID NO: 56589 - RNA, 19 nt, Artificial Sequence
  Description of Artificial Sequence: Synthetic oligonucleotide
gcuuggcaauacgacaaca

SEQ ID NO: 56590 - RNA, 19 nt, Artificial Sequence
  Description of Artificial Sequence: Synthetic oligonucleotide
gaaagggccuuggccacgu

SEQ ID NO: 56591 - RNA, 19 nt, Artificial Sequence
  Description of Artificial Sequence: Synthetic oligonucleotide
gucggacacggugugggaa

SEQ ID NO: 56592 - RNA, 19 nt, Artificial Sequence
  Description of Artificial Sequence: Synthetic oligonucleotide
uggccccugcccaccuaac

SEQ ID NO: 56593 - RNA, 19 nt, Artificial Sequence
  Description of Artificial Sequence: Synthetic oligonucleotide
caccgguugaugccaucga

SEQ ID NO: 56594 - RNA, 19 nt, Artificial Sequence
  Description of Artificial Sequence: Synthetic oligonucleotide
gacgaggcacgagggaacu

SEQ ID NO: 56595 - RNA, 19 nt, Artificial Sequence
  Description of Artificial Sequence: Synthetic oligonucleotide
gagagagacuuggcggcua

SEQ ID NO: 56596 - RNA, 19 nt, Artificial Sequence
  Description of Artificial Sequence: Synthetic oligonucleotide
gccaaggcuauaacagaga

SEQ ID NO: 56597 - RNA, 19 nt, Artificial Sequence
  Description of Artificial Sequence: Synthetic oligonucleotide
ucguggcauggacgacuuc

SEQ ID NO: 56598 - RNA, 19 nt, Artificial Sequence
  Description of Artificial Sequence: Synthetic oligonucleotide
ggccucucguggcauggac

SEQ ID NO: 56599 - RNA, 19 nt, Artificial Sequence
  Description of Artificial Sequence: Synthetic oligonucleotide
ucccuaucaccugcaucuu

SEQ ID NO: 56600 - RNA, 19 nt, Artificial Sequence
  Description of Artificial Sequence: Synthetic oligonucleotide
ccuggggcucaccaucgug

SEQ ID NO: 56601 - RNA, 19 nt, Artificial Sequence
  Description of Artificial Sequence: Synthetic oligonucleotide
cccaccuaacccugaccac

SEQ ID NO: 56602 - RNA, 19 nt, Artificial Sequence
  Description of Artificial Sequence: Synthetic oligonucleotide
gcguugcauaaagcugagg

SEQ ID NO: 56603 - RNA, 19 nt, Artificial Sequence
  Description of Artificial Sequence: Synthetic oligonucleotide
cucucguggcauggacgac

SEQ ID NO: 56604 - RNA, 19 nt, Artificial Sequence
  Description of Artificial Sequence: Synthetic oligonucleotide
cgugggcggguauuagccc

SEQ ID NO: 56605 - RNA, 19 nt, Artificial Sequence
  Description of Artificial Sequence: Synthetic oligonucleotide
acggcaggcguugcauaaa

SEQ ID NO: 56606 - RNA, 19 nt, Artificial Sequence
  Description of Artificial Sequence: Synthetic oligonucleotide
ggcaacaggguuggcuguc

SEQ ID NO: 56607 - RNA, 19 nt, Artificial Sequence
  Description of Artificial Sequence: Synthetic oligonucleotide
cauuucggucagguuggaa

SEQ ID NO: 56608 - RNA, 19 nt, Artificial Sequence
  Description of Artificial Sequence: Synthetic oligonucleotide
cccucagcucgguggguag

SEQ ID NO: 56609 - RNA, 19 nt, Artificial Sequence
  Description of Artificial Sequence: Synthetic oligonucleotide
ggguaggacacuguaccgu

SEQ ID NO: 56610 - RNA, 19 nt, Artificial Sequence
  Description of Artificial Sequence: Synthetic oligonucleotide
cggcaggcguugcauaaag

SEQ ID NO: 56611 - RNA, 19 nt, Artificial Sequence
  Description of Artificial Sequence: Synthetic oligonucleotide
aucagccggcuugcuggca

SEQ ID NO: 56612 - RNA, 19 nt, Artificial Sequence
  Description of Artificial Sequence: Synthetic oligonucleotide
cgccauagagauauucuua

SEQ ID NO: 56613 - RNA, 19 nt, Artificial Sequence
  Description of Artificial Sequence: Synthetic oligonucleotide
gggcgaaucagugcuccaa

SEQ ID NO: 56614 - RNA, 19 nt, Artificial Sequence
  Description of Artificial Sequence: Synthetic oligonucleotide
aggcgauacggcaggcguu

SEQ ID NO: 56615 - RNA, 19 nt, Artificial Sequence
  Description of Artificial Sequence: Synthetic oligonucleotide
cucgguggguaggaauuua

SEQ ID NO: 56616 - RNA, 19 nt, Artificial Sequence
  Description of Artificial Sequence: Synthetic oligonucleotide
cgagcaguuuugugucuuc

SEQ ID NO: 56617 - RNA, 19 nt, Artificial Sequence
  Description of Artificial Sequence: Synthetic oligonucleotide
ggauuuuauucuggccccu

SEQ ID NO: 56618 - RNA, 19 nt, Artificial Sequence
  Description of Artificial Sequence: Synthetic oligonucleotide
aggggucgaucagccggcu

SEQ ID NO: 56619 - RNA, 19 nt, Artificial Sequence
  Description of Artificial Sequence: Synthetic oligonucleotide
ccccucucuccugagacga

SEQ ID NO: 56620 - RNA, 19 nt, Artificial Sequence
  Description of Artificial Sequence: Synthetic oligonucleotide
caaugacgguugggucuuc

SEQ ID NO: 56621 - RNA, 19 nt, Artificial Sequence
  Description of Artificial Sequence: Synthetic oligonucleotide
cuggucggccuucaccuuu

SEQ ID NO: 56622 - RNA, 19 nt, Artificial Sequence
  Description of Artificial Sequence: Synthetic oligonucleotide
gcgguugucuucagagaaa

SEQ ID NO: 56623 - RNA, 19 nt, Artificial Sequence
  Description of Artificial Sequence: Synthetic oligonucleotide
augcaccgguugaugccau

SEQ ID NO: 56624 - RNA, 19 nt, Artificial Sequence
  Description of Artificial Sequence: Synthetic oligonucleotide
gcgauacggcaggcguugc

SEQ ID NO: 56625 - RNA, 19 nt, Artificial Sequence
  Description of Artificial Sequence: Synthetic oligonucleotide
gcugcacggacaagauugu

SEQ ID NO: 56626 - RNA, 19 nt, Artificial Sequence
  Description of Artificial Sequence: Synthetic oligonucleotide
gcuuugccgaaugcugccu

SEQ ID NO: 56627 - RNA, 19 nt, Artificial Sequence
  Description of Artificial Sequence: Synthetic oligonucleotide
caaacgggacugggguccu

SEQ ID NO: 56628 - RNA, 19 nt, Artificial Sequence
  Description of Artificial Sequence: Synthetic oligonucleotide
ggaugccgcagcucccaau

SEQ ID NO: 56629 - RNA, 19 nt, Artificial Sequence
  Description of Artificial Sequence: Synthetic oligonucleotide
cgauacggcaggcguugca

SEQ ID NO: 56630 - RNA, 19 nt, Artificial Sequence
  Description of Artificial Sequence: Synthetic oligonucleotide
cggacacggugugggaaug

SEQ ID NO: 56631 - RNA, 19 nt, Artificial Sequence
  Description of Artificial Sequence: Synthetic oligonucleotide
gggcggguauuagcccuca

SEQ ID NO: 56632 - RNA, 19 nt, Artificial Sequence
  Description of Artificial Sequence: Synthetic oligonucleotide
gccuggcucuugggaacac

SEQ ID NO: 56633 - RNA, 19 nt, Artificial Sequence
  Description of Artificial Sequence: Synthetic oligonucleotide
caccaucgugggcggguau

SEQ ID NO: 56634 - RNA, 19 nt, Artificial Sequence
  Description of Artificial Sequence: Synthetic oligonucleotide
cggagguagcgagucuaca

SEQ ID NO: 56635 - RNA, 19 nt, Artificial Sequence
  Description of Artificial Sequence: Synthetic oligonucleotide
ccgacacgagcaguuuugu

SEQ ID NO: 56636 - RNA, 19 nt, Artificial Sequence
  Description of Artificial Sequence: Synthetic oligonucleotide
ggcggguauuagcccucau

SEQ ID NO: 56637 - RNA, 19 nt, Artificial Sequence
  Description of Artificial Sequence: Synthetic oligonucleotide
ggggucgaucagccggcuu

SEQ ID NO: 56638 - RNA, 19 nt, Artificial Sequence
  Description of Artificial Sequence: Synthetic oligonucleotide
ccccgacacgagcaguuuu

SEQ ID NO: 56639 - RNA, 19 nt, Artificial Sequence
  Description of Artificial Sequence: Synthetic oligonucleotide
ccucggcaagcuggguaau

SEQ ID NO: 56640 - RNA, 19 nt, Artificial Sequence
  Description of Artificial Sequence: Synthetic oligonucleotide
acaaguauaauguggaucc

SEQ ID NO: 56641 - RNA, 19 nt, Artificial Sequence
  Description of Artificial Sequence: Synthetic oligonucleotide
ucacauaagaauaaggggc

SEQ ID NO: 56642 - RNA, 19 nt, Artificial Sequence
  Description of Artificial Sequence: Synthetic oligonucleotide
uguuggcaaacuaugaugg

SEQ ID NO: 56643 - RNA, 19 nt, Artificial Sequence
  Description of Artificial Sequence: Synthetic oligonucleotide
ucacuuguuacuaagggag

SEQ ID NO: 56644 - RNA, 19 nt, Artificial Sequence
  Description of Artificial Sequence: Synthetic oligonucleotide
uucacauaagaauaagggg

SEQ ID NO: 56645 - RNA, 19 nt, Artificial Sequence
  Description of Artificial Sequence: Synthetic oligonucleotide
aguuaagaaacucugaggu

SEQ ID NO: 56646 - RNA, 19 nt, Artificial Sequence
  Description of Artificial Sequence: Synthetic oligonucleotide
agaguagagaacccuaucc

SEQ ID NO: 56647 - RNA, 19 nt, Artificial Sequence
  Description of Artificial Sequence: Synthetic oligonucleotide
auuuuaaucggucucuggg

SEQ ID NO: 56648 - RNA, 19 nt, Artificial Sequence
  Description of Artificial Sequence: Synthetic oligonucleotide
uaaacuuucguagaucugg

SEQ ID NO: 56649 - RNA, 19 nt, Artificial Sequence
  Description of Artificial Sequence: Synthetic oligonucleotide
aacgauaccaggauaacac

SEQ ID NO: 56650 - RNA, 19 nt, Artificial Sequence
  Description of Artificial Sequence: Synthetic oligonucleotide
aauccgagcaucuguauuc

SEQ ID NO: 56651 - RNA, 19 nt, Artificial Sequence
  Description of Artificial Sequence: Synthetic oligonucleotide
aauggcacagaguugcuuc

SEQ ID NO: 56652 - RNA, 19 nt, Artificial Sequence
  Description of Artificial Sequence: Synthetic oligonucleotide
gauacucacaaguauaaug

SEQ ID NO: 56653 - RNA, 19 nt, Artificial Sequence
  Description of Artificial Sequence: Synthetic oligonucleotide
aacucugagguguaauccc

SEQ ID NO: 56654 - RNA, 19 nt, Artificial Sequence
  Description of Artificial Sequence: Synthetic oligonucleotide
uauaagacuauggaaacag

SEQ ID NO: 56655 - RNA, 19 nt, Artificial Sequence
  Description of Artificial Sequence: Synthetic oligonucleotide
ucaacaaucaauggcagag

SEQ ID NO: 56656 - RNA, 19 nt, Artificial Sequence
  Description of Artificial Sequence: Synthetic oligonucleotide
gaugaaucguuccaggugc

SEQ ID NO: 56657 - RNA, 19 nt, Artificial Sequence
  Description of Artificial Sequence: Synthetic oligonucleotide
uacuucaacaaucaauggc

SEQ ID NO: 56658 - RNA, 19 nt, Artificial Sequence
  Description of Artificial Sequence: Synthetic oligonucleotide
uguuagauuagccaccugu

SEQ ID NO: 56659 - RNA, 19 nt, Artificial Sequence
  Description of Artificial Sequence: Synthetic oligonucleotide
ugucucauacuucacagug

SEQ ID NO: 56660 - RNA, 19 nt, Artificial Sequence
  Description of Artificial Sequence: Synthetic oligonucleotide
uuaacaacuuuaauugugu

SEQ ID NO: 56661 - RNA, 19 nt, Artificial Sequence
  Description of Artificial Sequence: Synthetic oligonucleotide
gacauguuagauuagccac

SEQ ID NO: 56662 - RNA, 19 nt, Artificial Sequence
  Description of Artificial Sequence: Synthetic oligonucleotide
ucuugucuauucuagaaac

SEQ ID NO: 56663 - RNA, 19 nt, Artificial Sequence
  Description of Artificial Sequence: Synthetic oligonucleotide
uccuguauuacccaaugcu

SEQ ID NO: 56664 - RNA, 19 nt, Artificial Sequence
  Description of Artificial Sequence: Synthetic oligonucleotide
ugcuguguaagaaaauagc

SEQ ID NO: 56665 - RNA, 19 nt, Artificial Sequence
  Description of Artificial Sequence: Synthetic oligonucleotide
cagauuaccgaagacaccg

SEQ ID NO: 56666 - RNA, 19 nt, Artificial Sequence
  Description of Artificial Sequence: Synthetic oligonucleotide
agguuauguguacuggggc

SEQ ID NO: 56667 - RNA, 19 nt, Artificial Sequence
  Description of Artificial Sequence: Synthetic oligonucleotide
aauaaggcggaggaacuuc

SEQ ID NO: 56668 - RNA, 19 nt, Artificial Sequence
  Description of Artificial Sequence: Synthetic oligonucleotide
ucugcuauacucagugcag

SEQ ID NO: 56669 - RNA, 19 nt, Artificial Sequence
  Description of Artificial Sequence: Synthetic oligonucleotide
cuugugaaaagauucccac

SEQ ID NO: 56670 - RNA, 19 nt, Artificial Sequence
  Description of Artificial Sequence: Synthetic oligonucleotide
ucgaauaucuggcuguaga

SEQ ID NO: 56671 - RNA, 19 nt, Artificial Sequence
  Description of Artificial Sequence: Synthetic oligonucleotide
aaauggggcgcguuauuuc

SEQ ID NO: 56672 - RNA, 19 nt, Artificial Sequence
  Description of Artificial Sequence: Synthetic oligonucleotide
uguacuucuagccaccuuu

SEQ ID NO: 56673 - RNA, 19 nt, Artificial Sequence
  Description of Artificial Sequence: Synthetic oligonucleotide
caucacuuguuacuaaggg

SEQ ID NO: 56674 - RNA, 19 nt, Artificial Sequence
  Description of Artificial Sequence: Synthetic oligonucleotide
auaauguggauccagucau

SEQ ID NO: 56675 - RNA, 19 nt, Artificial Sequence
  Description of Artificial Sequence: Synthetic oligonucleotide
aacaaucaauggcagagau

SEQ ID NO: 56676 - RNA, 19 nt, Artificial Sequence
  Description of Artificial Sequence: Synthetic oligonucleotide
gauaaacuuucguagaucu

SEQ ID NO: 56677 - RNA, 19 nt, Artificial Sequence
  Description of Artificial Sequence: Synthetic oligonucleotide
augcaauugggcuauauau

SEQ ID NO: 56678 - RNA, 19 nt, Artificial Sequence
  Description of Artificial Sequence: Synthetic oligonucleotide
agguguaaucccuugcagg

SEQ ID NO: 56679 - RNA, 19 nt, Artificial Sequence
  Description of Artificial Sequence: Synthetic oligonucleotide
aaguuuaacagugugcuuu

SEQ ID NO: 56680 - RNA, 19 nt, Artificial Sequence
  Description of Artificial Sequence: Synthetic oligonucleotide
uuuuaaucggucucugggu

SEQ ID NO: 56681 - RNA, 19 nt, Artificial Sequence
  Description of Artificial Sequence: Synthetic oligonucleotide
auagauucccgaagaagcc

SEQ ID NO: 56682 - RNA, 19 nt, Artificial Sequence
  Description of Artificial Sequence: Synthetic oligonucleotide
auaagaauaaggggccucg

SEQ ID NO: 56683 - RNA, 19 nt, Artificial Sequence
  Description of Artificial Sequence: Synthetic oligonucleotide
ucacugaacgauaccagga

SEQ ID NO: 56684 - RNA, 19 nt, Artificial Sequence
  Description of Artificial Sequence: Synthetic oligonucleotide
ucugcauuuguggauuagg

SEQ ID NO: 56685 - RNA, 19 nt, Artificial Sequence
  Description of Artificial Sequence: Synthetic oligonucleotide
agucgauuuuacuuggaug

SEQ ID NO: 56686 - RNA, 19 nt, Artificial Sequence
  Description of Artificial Sequence: Synthetic oligonucleotide
caugcuauaagacuaugga

SEQ ID NO: 56687 - RNA, 19 nt, Artificial Sequence
  Description of Artificial Sequence: Synthetic oligonucleotide
aacagauacgcaugcaauu

SEQ ID NO: 56688 - RNA, 19 nt, Artificial Sequence
  Description of Artificial Sequence: Synthetic oligonucleotide
caaaugucuguugaugagg

SEQ ID NO: 56689 - RNA, 19 nt, Artificial Sequence
  Description of Artificial Sequence: Synthetic oligonucleotide
auacgcaugcaauugggcu

SEQ ID NO: 56690 - RNA, 19 nt, Artificial Sequence
  Description of Artificial Sequence: Synthetic oligonucleotide
cuaacuugucaugugauuc

SEQ ID NO: 56691 - RNA, 19 nt, Artificial Sequence
  Description of Artificial Sequence: Synthetic oligonucleotide
aggcauuuuaaucggucuc

SEQ ID NO: 56692 - RNA, 19 nt, Artificial Sequence
  Description of Artificial Sequence: Synthetic oligonucleotide
ggugcaauugacccgaagc

SEQ ID NO: 56693 - RNA, 19 nt, Artificial Sequence
  Description of Artificial Sequence: Synthetic oligonucleotide
aucacuuguuacuaaggga

SEQ ID NO: 56694 - RNA, 19 nt, Artificial Sequence
  Description of Artificial Sequence: Synthetic oligonucleotide
auucaagaacucccgguag

SEQ ID NO: 56695 - RNA, 19 nt, Artificial Sequence
  Description of Artificial Sequence: Synthetic oligonucleotide
aggauaacacaaaagguca

SEQ ID NO: 56696 - RNA, 19 nt, Artificial Sequence
  Description of Artificial Sequence: Synthetic oligonucleotide
cuguauuacccaaugcuuc

SEQ ID NO: 56697 - RNA, 19 nt, Artificial Sequence
  Description of Artificial Sequence: Synthetic oligonucleotide
uuguuacuaagggagaccu

SEQ ID NO: 56698 - RNA, 19 nt, Artificial Sequence
  Description of Artificial Sequence: Synthetic oligonucleotide
acuuucguagaucugguuu

SEQ ID NO: 56699 - RNA, 19 nt, Artificial Sequence
  Description of Artificial Sequence: Synthetic oligonucleotide
uucuagccaccuuugaacu

SEQ ID NO: 56700 - RNA, 19 nt, Artificial Sequence
  Description of Artificial Sequence: Synthetic oligonucleotide
uuuccacgugggaaaagag

SEQ ID NO: 56701 - RNA, 19 nt, Artificial Sequence
  Description of Artificial Sequence: Synthetic oligonucleotide
acaaguagcgagccuagca

SEQ ID NO: 56702 - RNA, 19 nt, Artificial Sequence
  Description of Artificial Sequence: Synthetic oligonucleotide
uccauguuuccaaauggaa

SEQ ID NO: 56703 - RNA, 19 nt, Artificial Sequence
  Description of Artificial Sequence: Synthetic oligonucleotide
aaaaggucacgggauuauc

SEQ ID NO: 56704 - RNA, 19 nt, Artificial Sequence
  Description of Artificial Sequence: Synthetic oligonucleotide
aggagucgauuuuacuugg

SEQ ID NO: 56705 - RNA, 19 nt, Artificial Sequence
  Description of Artificial Sequence: Synthetic oligonucleotide
guuauguguacuggggccg

SEQ ID NO: 56706 - RNA, 19 nt, Artificial Sequence
  Description of Artificial Sequence: Synthetic oligonucleotide
aauguucaguuuccacgug

SEQ ID NO: 56707 - RNA, 19 nt, Artificial Sequence
  Description of Artificial Sequence: Synthetic oligonucleotide
aagaauaaggggccucgaa

SEQ ID NO: 56708 - RNA, 19 nt, Artificial Sequence
  Description of Artificial Sequence: Synthetic oligonucleotide
ucaugugauucuguuaaga

SEQ ID NO: 56709 - RNA, 19 nt, Artificial Sequence
  Description of Artificial Sequence: Synthetic oligonucleotide
auacuuaggcaacacucca

SEQ ID NO: 56710 - RNA, 19 nt, Artificial Sequence
  Description of Artificial Sequence: Synthetic oligonucleotide
aaaggucacgggauuauca

SEQ ID NO: 56711 - RNA, 19 nt, Artificial Sequence
  Description of Artificial Sequence: Synthetic oligonucleotide
acagauacgcaugcaauug

SEQ ID NO: 56712 - RNA, 19 nt, Artificial Sequence
  Description of Artificial Sequence: Synthetic oligonucleotide
gaauaaggggccucgaaua

SEQ ID NO: 56713 - RNA, 19 nt, Artificial Sequence
  Description of Artificial Sequence: Synthetic oligonucleotide
agauuagccaccuguacuu

SEQ ID NO: 56714 - RNA, 19 nt, Artificial Sequence
  Description of Artificial Sequence: Synthetic oligonucleotide
ugacaaguagcgagccuag

SEQ ID NO: 56715 - RNA, 19 nt, Artificial Sequence
  Description of Artificial Sequence: Synthetic oligonucleotide
aggccauguaucuaacuug

SEQ ID NO: 56716 - RNA, 19 nt, Artificial Sequence
  Description of Artificial Sequence: Synthetic oligonucleotide
cuagaaaccaugaacggcu

SEQ ID NO: 56717 - RNA, 19 nt, Artificial Sequence
  Description of Artificial Sequence: Synthetic oligonucleotide
aaacagauacgcaugcaau

SEQ ID NO: 56718 - RNA, 19 nt, Artificial Sequence
  Description of Artificial Sequence: Synthetic oligonucleotide
augcuauaagacuauggaa

SEQ ID NO: 56719 - RNA, 19 nt, Artificial Sequence
  Description of Artificial Sequence: Synthetic oligonucleotide
ggagguacugcacccagcg

SEQ ID NO: 56720 - RNA, 19 nt, Artificial Sequence
  Description of Artificial Sequence: Synthetic oligonucleotide
accaacgaugcacacagaa

SEQ ID NO: 56721 - RNA, 19 nt, Artificial Sequence
  Description of Artificial Sequence: Synthetic oligonucleotide
cacaaguauaauguggauc

SEQ ID NO: 56722 - RNA, 19 nt, Artificial Sequence
  Description of Artificial Sequence: Synthetic oligonucleotide
aucuugucuauucuagaaa

SEQ ID NO: 56723 - RNA, 19 nt, Artificial Sequence
  Description of Artificial Sequence: Synthetic oligonucleotide
uuccauaccuucagacccc

SEQ ID NO: 56724 - RNA, 19 nt, Artificial Sequence
  Description of Artificial Sequence: Synthetic oligonucleotide
uguauggguggaauccagu

SEQ ID NO: 56725 - RNA, 19 nt, Artificial Sequence
  Description of Artificial Sequence: Synthetic oligonucleotide
agacucucuacuucaacaa

SEQ ID NO: 56726 - RNA, 19 nt, Artificial Sequence
  Description of Artificial Sequence: Synthetic oligonucleotide
uacuuaggcaacacuccac

SEQ ID NO: 56727 - RNA, 19 nt, Artificial Sequence
  Description of Artificial Sequence: Synthetic oligonucleotide
uagaaaauggggcgcguua

SEQ ID NO: 56728 - RNA, 19 nt, Artificial Sequence
  Description of Artificial Sequence: Synthetic oligonucleotide
gauacgcaugcaauugggc

SEQ ID NO: 56729 - RNA, 19 nt, Artificial Sequence
  Description of Artificial Sequence: Synthetic oligonucleotide
aacccuauccugugccucu

SEQ ID NO: 56730 - RNA, 19 nt, Artificial Sequence
  Description of Artificial Sequence: Synthetic oligonucleotide
uaagggcugucucauacuu

SEQ ID NO: 56731 - RNA, 19 nt, Artificial Sequence
  Description of Artificial Sequence: Synthetic oligonucleotide
agcguguauggguggaauc

SEQ ID NO: 56732 - RNA, 19 nt, Artificial Sequence
  Description of Artificial Sequence: Synthetic oligonucleotide
uuggcagacucucuacuuc

SEQ ID NO: 56733 - RNA, 19 nt, Artificial Sequence
  Description of Artificial Sequence: Synthetic oligonucleotide
ucagcauuaagggcugucu

SEQ ID NO: 56734 - RNA, 19 nt, Artificial Sequence
  Description of Artificial Sequence: Synthetic oligonucleotide
  modified_base (14)..(14): a, c, u, g, unknown or other
cucgaaugcuggcnccugg

SEQ ID NO: 56735 - RNA, 19 nt, Artificial Sequence
  Description of Artificial Sequence: Synthetic oligonucleotide
  modified_base (3)..(3): a, c, u, g, unknown or other
gcnccuggcucacugaacg

SEQ ID NO: 56736 - RNA, 19 nt, Artificial Sequence
  Description of Artificial Sequence: Synthetic oligonucleotide
cugaacgauaccaggauaa

SEQ ID NO: 56737 - RNA, 19 nt, Artificial Sequence
  Description of Artificial Sequence: Synthetic oligonucleotide
uccgaauugccuuccugga

SEQ ID NO: 56738 - RNA, 19 nt, Artificial Sequence
  Description of Artificial Sequence: Synthetic oligonucleotide
uccacagauuaccgaagac

SEQ ID NO: 56739 - RNA, 19 nt, Artificial Sequence
  Description of Artificial Sequence: Synthetic oligonucleotide
uacgcaugcaauugggcua

SEQ ID NO: 56740 - RNA, 19 nt, Artificial Sequence
  Description of Artificial Sequence: Synthetic oligonucleotide
uaagaggggugacuuguuc

SEQ ID NO: 56741 - RNA, 19 nt, Artificial Sequence
  Description of Artificial Sequence: Synthetic oligonucleotide
aggucacgggauuaucauc

SEQ ID NO: 56742 - RNA, 19 nt, Artificial Sequence
  Description of Artificial Sequence: Synthetic oligonucleotide
aaaauggggcgcguuauuu

SEQ ID NO: 56743 - RNA, 19 nt, Artificial Sequence
  Description of Artificial Sequence: Synthetic oligonucleotide
agauucccgaagaagccgg

SEQ ID NO: 56744 - RNA, 19 nt, Artificial Sequence
  Description of Artificial Sequence: Synthetic oligonucleotide
uuaagggcugucucauacu

SEQ ID NO: 56745 - RNA, 19 nt, Artificial Sequence
  Description of Artificial Sequence: Synthetic oligonucleotide
gguguaaucccuugcagga

SEQ ID NO: 56746 - RNA, 19 nt, Artificial Sequence
  Description of Artificial Sequence: Synthetic oligonucleotide
caucucagucaaaucuccc

SEQ ID NO: 56747 - RNA, 19 nt, Artificial Sequence
  Description of Artificial Sequence: Synthetic oligonucleotide
gaauugcuguggaacuagg

SEQ ID NO: 56748 - RNA, 19 nt, Artificial Sequence
  Description of Artificial Sequence: Synthetic oligonucleotide
ggauacuuaggcaacacuc

SEQ ID NO: 56749 - RNA, 19 nt, Artificial Sequence
  Description of Artificial Sequence: Synthetic oligonucleotide
acgauuccaucccaaacau

SEQ ID NO: 56750 - RNA, 19 nt, Artificial Sequence
  Description of Artificial Sequence: Synthetic oligonucleotide
agguacugcacccagcguu

SEQ ID NO: 56751 - RNA, 19 nt, Artificial Sequence
  Description of Artificial Sequence: Synthetic oligonucleotide
ggacauguuagauuagcca

SEQ ID NO: 56752 - RNA, 19 nt, Artificial Sequence
  Description of Artificial Sequence: Synthetic oligonucleotide
uguggauuaggugcaugca

SEQ ID NO: 56753 - RNA, 19 nt, Artificial Sequence
  Description of Artificial Sequence: Synthetic oligonucleotide
cauuuguggauuaggugca

SEQ ID NO: 56754 - RNA, 19 nt, Artificial Sequence
  Description of Artificial Sequence: Synthetic oligonucleotide
gaguccgggaauccucuag

SEQ ID NO: 56755 - RNA, 19 nt, Artificial Sequence
  Description of Artificial Sequence: Synthetic oligonucleotide
cugucacuauccauguuuc

SEQ ID NO: 56756 - RNA, 19 nt, Artificial Sequence
  Description of Artificial Sequence: Synthetic oligonucleotide
acgauaccaggauaacaca

SEQ ID NO: 56757 - RNA, 19 nt, Artificial Sequence
  Description of Artificial Sequence: Synthetic oligonucleotide
gagaguagagaacccuauc

SEQ ID NO: 56758 - RNA, 19 nt, Artificial Sequence
  Description of Artificial Sequence: Synthetic oligonucleotide
caccuuugaacuagaguuc

SEQ ID NO: 56759 - RNA, 19 nt, Artificial Sequence
  Description of Artificial Sequence: Synthetic oligonucleotide
uacuucuagccaccuuuga

SEQ ID NO: 56760 - RNA, 19 nt, Artificial Sequence
  Description of Artificial Sequence: Synthetic oligonucleotide
gcaauuucaggaauggcac

SEQ ID NO: 56761 - RNA, 19 nt, Artificial Sequence
  Description of Artificial Sequence: Synthetic oligonucleotide
cuaugauggcgagaagaag

SEQ ID NO: 56762 - RNA, 19 nt, Artificial Sequence
  Description of Artificial Sequence: Synthetic oligonucleotide
augacaaguagcgagccua

SEQ ID NO: 56763 - RNA, 19 nt, Artificial Sequence
  Description of Artificial Sequence: Synthetic oligonucleotide
agauuaccgaagacaccgc

SEQ ID NO: 56764 - RNA, 19 nt, Artificial Sequence
  Description of Artificial Sequence: Synthetic oligonucleotide
ugaacgauaccaggauaac

SEQ ID NO: 56765 - RNA, 19 nt, Artificial Sequence
  Description of Artificial Sequence: Synthetic oligonucleotide
aaggcaauccgagcaucug

SEQ ID NO: 56766 - RNA, 19 nt, Artificial Sequence
  Description of Artificial Sequence: Synthetic oligonucleotide
auuaccgaagacaccgcug

SEQ ID NO: 56767 - RNA, 19 nt, Artificial Sequence
  Description of Artificial Sequence: Synthetic oligonucleotide
aaauaaggcggaggaacuu

SEQ ID NO: 56768 - RNA, 19 nt, Artificial Sequence
  Description of Artificial Sequence: Synthetic oligonucleotide
cauaagaauaaggggccuc

SEQ ID NO: 56769 - RNA, 19 nt, Artificial Sequence
  Description of Artificial Sequence: Synthetic oligonucleotide
aagacaccgcuggacucgg

SEQ ID NO: 56770 - RNA, 19 nt, Artificial Sequence
  Description of Artificial Sequence: Synthetic oligonucleotide
acugaacgauaccaggaua

SEQ ID NO: 56771 - RNA, 19 nt, Artificial Sequence
  Description of Artificial Sequence: Synthetic oligonucleotide
uacugcacccagcguuggg

SEQ ID NO: 56772 - RNA, 19 nt, Artificial Sequence
  Description of Artificial Sequence: Synthetic oligonucleotide
cuccuguauuacccaaugc

SEQ ID NO: 56773 - RNA, 19 nt, Artificial Sequence
  Description of Artificial Sequence: Synthetic oligonucleotide
aacuuucguagaucugguu

SEQ ID NO: 56774 - RNA, 19 nt, Artificial Sequence
  Description of Artificial Sequence: Synthetic oligonucleotide
ugaggccauguaucuaacu

SEQ ID NO: 56775 - RNA, 19 nt, Artificial Sequence
  Description of Artificial Sequence: Synthetic oligonucleotide
gugggguggauuuaccaga

SEQ ID NO: 56776 - RNA, 19 nt, Artificial Sequence
  Description of Artificial Sequence: Synthetic oligonucleotide
gucaugugauucuguuaag

SEQ ID NO: 56777 - RNA, 19 nt, Artificial Sequence
  Description of Artificial Sequence: Synthetic oligonucleotide
auuccaagacuagacucca

SEQ ID NO: 56778 - RNA, 19 nt, Artificial Sequence
  Description of Artificial Sequence: Synthetic oligonucleotide
cugcagguuauguguacug

SEQ ID NO: 56779 - RNA, 19 nt, Artificial Sequence
  Description of Artificial Sequence: Synthetic oligonucleotide
acaaucaauggcagagaug

SEQ ID NO: 56780 - RNA, 19 nt, Artificial Sequence
  Description of Artificial Sequence: Synthetic oligonucleotide
gguggagacagccauucuc

SEQ ID NO: 56781 - RNA, 19 nt, Artificial Sequence
  Description of Artificial Sequence: Synthetic oligonucleotide
uaagaauaaggggccucga

SEQ ID NO: 56782 - RNA, 19 nt, Artificial Sequence
  Description of Artificial Sequence: Synthetic oligonucleotide
ggugugaaggguggggugg

SEQ ID NO: 56783 - RNA, 19 nt, Artificial Sequence
  Description of Artificial Sequence: Synthetic oligonucleotide
caaguagcgagccuagcaa

SEQ ID NO: 56784 - RNA, 19 nt, Artificial Sequence
  Description of Artificial Sequence: Synthetic oligonucleotide
ugagcaugaugguuucuuu

SEQ ID NO: 56785 - RNA, 19 nt, Artificial Sequence
  Description of Artificial Sequence: Synthetic oligonucleotide
uuuuagcuagguggagaca

SEQ ID NO: 56786 - RNA, 19 nt, Artificial Sequence
  Description of Artificial Sequence: Synthetic oligonucleotide
ucccuacuucuauucuuug

SEQ ID NO: 56787 - RNA, 19 nt, Artificial Sequence
  Description of Artificial Sequence: Synthetic oligonucleotide
aggacaggcguugacugug

SEQ ID NO: 56788 - RNA, 19 nt, Artificial Sequence
  Description of Artificial Sequence: Synthetic oligonucleotide
gcaauugacccgaagcccc

SEQ ID NO: 56789 - RNA, 19 nt, Artificial Sequence
  Description of Artificial Sequence: Synthetic oligonucleotide
gauuaccgaagacaccgcu

SEQ ID NO: 56790 - RNA, 19 nt, Artificial Sequence
  Description of Artificial Sequence: Synthetic oligonucleotide
guaaucccuugcaggaaag

SEQ ID NO: 56791 - RNA, 19 nt, Artificial Sequence
  Description of Artificial Sequence: Synthetic oligonucleotide
uggggacauguuagauuag

SEQ ID NO: 56792 - RNA, 19 nt, Artificial Sequence
  Description of Artificial Sequence: Synthetic oligonucleotide
guauggguggaauccagua

SEQ ID NO: 56793 - RNA, 19 nt, Artificial Sequence
  Description of Artificial Sequence: Synthetic oligonucleotide
gaggccauguaucuaacuu

SEQ ID NO: 56794 - RNA, 19 nt, Artificial Sequence
  Description of Artificial Sequence: Synthetic oligonucleotide
guaccacugugcucucggg

SEQ ID NO: 56795 - RNA, 19 nt, Artificial Sequence
  Description of Artificial Sequence: Synthetic oligonucleotide
  modified_base (5)..(5): a, c, u, g, unknown or other
uggcnccuggcucacugaa

SEQ ID NO: 56796 - RNA, 19 nt, Artificial Sequence
  Description of Artificial Sequence: Synthetic oligonucleotide
ucgauuuuacuuggaugaa

SEQ ID NO: 56797 - RNA, 19 nt, Artificial Sequence
  Description of Artificial Sequence: Synthetic oligonucleotide
guuagauuagccaccugua

SEQ ID NO: 56798 - RNA, 19 nt, Artificial Sequence
  Description of Artificial Sequence: Synthetic oligonucleotide
aauugacccgaagccccug

SEQ ID NO: 56799 - RNA, 19 nt, Artificial Sequence
  Description of Artificial Sequence: Synthetic oligonucleotide
cagauccaaggccgugucg

SEQ ID NO: 56800 - RNA, 19 nt, Artificial Sequence
  Description of Artificial Sequence: Synthetic oligonucleotide
cauccucccagcaccacca

SEQ ID NO: 56801 - RNA, 19 nt, Artificial Sequence
  Description of Artificial Sequence: Synthetic oligonucleotide
cuuaggcuccagaguccgg

SEQ ID NO: 56802 - RNA, 19 nt, Artificial Sequence
  Description of Artificial Sequence: Synthetic oligonucleotide
auauccccaucacuuguua

SEQ ID NO: 56803 - RNA, 19 nt, Artificial Sequence
  Description of Artificial Sequence: Synthetic oligonucleotide
auaaggcggaggaacuucu

SEQ ID NO: 56804 - RNA, 19 nt, Artificial Sequence
  Description of Artificial Sequence: Synthetic oligonucleotide
guacuucuagccaccuuug

SEQ ID NO: 56805 - RNA, 19 nt, Artificial Sequence
  Description of Artificial Sequence: Synthetic oligonucleotide
caugcaauugggcuauaua

SEQ ID NO: 56806 - RNA, 19 nt, Artificial Sequence
  Description of Artificial Sequence: Synthetic oligonucleotide
ugacccgaagccccugcaa

SEQ ID NO: 56807 - RNA, 19 nt, Artificial Sequence
  Description of Artificial Sequence: Synthetic oligonucleotide
gggacauguuagauuagcc

SEQ ID NO: 56808 - RNA, 19 nt, Artificial Sequence
  Description of Artificial Sequence: Synthetic oligonucleotide
uggaauugcuguggaacua

SEQ ID NO: 56809 - RNA, 19 nt, Artificial Sequence
  Description of Artificial Sequence: Synthetic oligonucleotide
uccaaggccgugucggcua

SEQ ID NO: 56810 - RNA, 19 nt, Artificial Sequence
  Description of Artificial Sequence: Synthetic oligonucleotide
cacuuguuacuaagggaga

SEQ ID NO: 56811 - RNA, 19 nt, Artificial Sequence
  Description of Artificial Sequence: Synthetic oligonucleotide
acaaaaggucacgggauua

SEQ ID NO: 56812 - RNA, 19 nt, Artificial Sequence
  Description of Artificial Sequence: Synthetic oligonucleotide
cucuuuuagcuagguggag

SEQ ID NO: 56813 - RNA, 19 nt, Artificial Sequence
  Description of Artificial Sequence: Synthetic oligonucleotide
ggggacauguuagauuagc

SEQ ID NO: 56814 - RNA, 19 nt, Artificial Sequence
  Description of Artificial Sequence: Synthetic oligonucleotide
gacaaguagcgagccuagc

SEQ ID NO: 56815 - RNA, 19 nt, Artificial Sequence
  Description of Artificial Sequence: Synthetic oligonucleotide
gcguguauggguggaaucc

SEQ ID NO: 56816 - RNA, 19 nt, Artificial Sequence
  Description of Artificial Sequence: Synthetic oligonucleotide
  modified_base (7)..(7): a, c, u, g, unknown or other
gcuggcnccuggcucacug

SEQ ID NO: 56817 - RNA, 19 nt, Artificial Sequence
  Description of Artificial Sequence: Synthetic oligonucleotide
gagucgauuuuacuuggau

SEQ ID NO: 56818 - RNA, 19 nt, Artificial Sequence
  Description of Artificial Sequence: Synthetic oligonucleotide
ggguggauuuaccagaagu

SEQ ID NO: 56819 - RNA, 19 nt, Artificial Sequence
  Description of Artificial Sequence: Synthetic oligonucleotide
cugcauuuguggauuaggu

SEQ ID NO: 56820 - RNA, 19 nt, Artificial Sequence
  Description of Artificial Sequence: Synthetic oligonucleotide
auguuagauuagccaccug

SEQ ID NO: 56821 - RNA, 19 nt, Artificial Sequence
  Description of Artificial Sequence: Synthetic oligonucleotide
cacaugcuauaagacuaug

SEQ ID NO: 56822 - RNA, 19 nt, Artificial Sequence
  Description of Artificial Sequence: Synthetic oligonucleotide
aguuuccacgugggaaaag

SEQ ID NO: 56823 - RNA, 19 nt, Artificial Sequence
  Description of Artificial Sequence: Synthetic oligonucleotide
ggaugacaaguagcgagcc

SEQ ID NO: 56824 - RNA, 19 nt, Artificial Sequence
  Description of Artificial Sequence: Synthetic oligonucleotide
gaacucccgguagcggcgg

SEQ ID NO: 56825 - RNA, 19 nt, Artificial Sequence
  Description of Artificial Sequence: Synthetic oligonucleotide
ggggccucgaauaucuggc

SEQ ID NO: 56826 - RNA, 19 nt, Artificial Sequence
  Description of Artificial Sequence: Synthetic oligonucleotide
ugaaucguuccaggugcaa

SEQ ID NO: 56827 - RNA, 19 nt, Artificial Sequence
  Description of Artificial Sequence: Synthetic oligonucleotide
ggaacuaggcagggugagg

SEQ ID NO: 56828 - RNA, 19 nt, Artificial Sequence
  Description of Artificial Sequence: Synthetic oligonucleotide
gggaucuuuaucugggacu

SEQ ID NO: 56829 - RNA, 19 nt, Artificial Sequence
  Description of Artificial Sequence: Synthetic oligonucleotide
guggauuaggugcaugcau

SEQ ID NO: 56830 - RNA, 19 nt, Artificial Sequence
  Description of Artificial Sequence: Synthetic oligonucleotide
gcacagaguugcuucagga

SEQ ID NO: 56831 - RNA, 19 nt, Artificial Sequence
  Description of Artificial Sequence: Synthetic oligonucleotide
gcuauauauccccaucacu

SEQ ID NO: 56832 - RNA, 19 nt, Artificial Sequence
  Description of Artificial Sequence: Synthetic oligonucleotide
agacuagacuccagcucag

SEQ ID NO: 56833 - RNA, 19 nt, Artificial Sequence
  Description of Artificial Sequence: Synthetic oligonucleotide
ggccucgaauaucuggcug

SEQ ID NO: 56834 - RNA, 19 nt, Artificial Sequence
  Description of Artificial Sequence: Synthetic oligonucleotide
cagauagauucccgaagaa

SEQ ID NO: 56835 - RNA, 19 nt, Artificial Sequence
  Description of Artificial Sequence: Synthetic oligonucleotide
ugccaguaauucgaagguu

SEQ ID NO: 56836 - RNA, 19 nt, Artificial Sequence
  Description of Artificial Sequence: Synthetic oligonucleotide
caacaaucaauggcagaga

SEQ ID NO: 56837 - RNA, 19 nt, Artificial Sequence
  Description of Artificial Sequence: Synthetic oligonucleotide
ggaucucugacuccgaauu

SEQ ID NO: 56838 - RNA, 19 nt, Artificial Sequence
  Description of Artificial Sequence: Synthetic oligonucleotide
ccuuaggcuccagaguccg

SEQ ID NO: 56839 - RNA, 19 nt, Artificial Sequence
  Description of Artificial Sequence: Synthetic oligonucleotide
augaacgauuccaucccaa

SEQ ID NO: 56840 - RNA, 19 nt, Artificial Sequence
  Description of Artificial Sequence: Synthetic oligonucleotide
ccacagauuaccgaagaca

SEQ ID NO: 56841 - RNA, 19 nt, Artificial Sequence
  Description of Artificial Sequence: Synthetic oligonucleotide
acgcaugcaauugggcuau

SEQ ID NO: 56842 - RNA, 19 nt, Artificial Sequence
  Description of Artificial Sequence: Synthetic oligonucleotide
cauguuagauuagccaccu

SEQ ID NO: 56843 - RNA, 19 nt, Artificial Sequence
  Description of Artificial Sequence: Synthetic oligonucleotide
guacugcacccagcguugg

SEQ ID NO: 56844 - RNA, 19 nt, Artificial Sequence
  Description of Artificial Sequence: Synthetic oligonucleotide
cacuauccauguuuccaaa

SEQ ID NO: 56845 - RNA, 19 nt, Artificial Sequence
  Description of Artificial Sequence: Synthetic oligonucleotide
uggggcgcguuauuuccua

SEQ ID NO: 56846 - RNA, 19 nt, Artificial Sequence
  Description of Artificial Sequence: Synthetic oligonucleotide
agaccccucaccauccuua

SEQ ID NO: 56847 - RNA, 19 nt, Artificial Sequence
  Description of Artificial Sequence: Synthetic oligonucleotide
caaguauaauguggaucca

SEQ ID NO: 56848 - RNA, 19 nt, Artificial Sequence
  Description of Artificial Sequence: Synthetic oligonucleotide
gaaaauggggcgcguuauu

SEQ ID NO: 56849 - RNA, 19 nt, Artificial Sequence
  Description of Artificial Sequence: Synthetic oligonucleotide
ggcauuuuaaucggucucu

SEQ ID NO: 56850 - RNA, 19 nt, Artificial Sequence
  Description of Artificial Sequence: Synthetic oligonucleotide
cugcacccagcguugggga

SEQ ID NO: 56851 - RNA, 19 nt, Artificial Sequence
  Description of Artificial Sequence: Synthetic oligonucleotide
cagcguuggggacauguua

SEQ ID NO: 56852 - RNA, 19 nt, Artificial Sequence
  Description of Artificial Sequence: Synthetic oligonucleotide
  modified_base (9)..(9): a, c, u, g, unknown or other
augcuggcnccuggcucac

SEQ ID NO: 56853 - RNA, 19 nt, Artificial Sequence
  Description of Artificial Sequence: Synthetic oligonucleotide
gagccgagccauccuccca

SEQ ID NO: 56854 - RNA, 19 nt, Artificial Sequence
  Description of Artificial Sequence: Synthetic oligonucleotide
ccucugcuauacucagugc

SEQ ID NO: 56855 - RNA, 19 nt, Artificial Sequence
  Description of Artificial Sequence: Synthetic oligonucleotide
ccguggauacuuaggcaac

SEQ ID NO: 56856 - RNA, 19 nt, Artificial Sequence
  Description of Artificial Sequence: Synthetic oligonucleotide
uuccgacagcggugacucc

SEQ ID NO: 56857 - RNA, 19 nt, Artificial Sequence
  Description of Artificial Sequence: Synthetic oligonucleotide
ccaucuugucuauucuaga

SEQ ID NO: 56858 - RNA, 19 nt, Artificial Sequence
  Description of Artificial Sequence: Synthetic oligonucleotide
ggccguggauacuuaggca

SEQ ID NO: 56859 - RNA, 19 nt, Artificial Sequence
  Description of Artificial Sequence: Synthetic oligonucleotide
caucccuacuucuauucuu

SEQ ID NO: 56860 - RNA, 19 nt, Artificial Sequence
  Description of Artificial Sequence: Synthetic oligonucleotide
gaguaggaucaagggagcu

SEQ ID NO: 56861 - RNA, 19 nt, Artificial Sequence
  Description of Artificial Sequence: Synthetic oligonucleotide
guguaaucccuugcaggaa

SEQ ID NO: 56862 - RNA, 19 nt, Artificial Sequence
  Description of Artificial Sequence: Synthetic oligonucleotide
gggguggauuuaccagaag

SEQ ID NO: 56863 - RNA, 19 nt, Artificial Sequence
  Description of Artificial Sequence: Synthetic oligonucleotide
cgaauaucuggcuguagaa

SEQ ID NO: 56864 - RNA, 19 nt, Artificial Sequence
  Description of Artificial Sequence: Synthetic oligonucleotide
gccucgaauaucuggcugu

SEQ ID NO: 56865 - RNA, 19 nt, Artificial Sequence
  Description of Artificial Sequence: Synthetic oligonucleotide
caauccgagcaucuguauu

SEQ ID NO: 56866 - RNA, 19 nt, Artificial Sequence
  Description of Artificial Sequence: Synthetic oligonucleotide
cucagccauggaacaagua

SEQ ID NO: 56867 - RNA, 19 nt, Artificial Sequence
  Description of Artificial Sequence: Synthetic oligonucleotide
caauugacccgaagccccu

SEQ ID NO: 56868 - RNA, 19 nt, Artificial Sequence
  Description of Artificial Sequence: Synthetic oligonucleotide
ccuguauuacccaaugcuu

SEQ ID NO: 56869 - RNA, 19 nt, Artificial Sequence
  Description of Artificial Sequence: Synthetic oligonucleotide
  modified_base (6)..(6): a, c, u, g, unknown or other
cuggcnccuggcucacuga

SEQ ID NO: 56870 - RNA, 19 nt, Artificial Sequence
  Description of Artificial Sequence: Synthetic oligonucleotide
auggggcgcguuauuuccu

SEQ ID NO: 56871 - RNA, 19 nt, Artificial Sequence
  Description of Artificial Sequence: Synthetic oligonucleotide
acagcguguauggguggaa

SEQ ID NO: 56872 - RNA, 19 nt, Artificial Sequence
  Description of Artificial Sequence: Synthetic oligonucleotide
ggugguugaaaagcucucu

SEQ ID NO: 56873 - RNA, 19 nt, Artificial Sequence
  Description of Artificial Sequence: Synthetic oligonucleotide
gaauccugucagagaggaa

SEQ ID NO: 56874 - RNA, 19 nt, Artificial Sequence
  Description of Artificial Sequence: Synthetic oligonucleotide
ggcaauccgagcaucugua

SEQ ID NO: 56875 - RNA, 19 nt, Artificial Sequence
  Description of Artificial Sequence: Synthetic oligonucleotide
gaagggugggguggauuua

SEQ ID NO: 56876 - RNA, 19 nt, Artificial Sequence
  Description of Artificial Sequence: Synthetic oligonucleotide
cgggcaguaauggugccag

SEQ ID NO: 56877 - RNA, 19 nt, Artificial Sequence
  Description of Artificial Sequence: Synthetic oligonucleotide
cgaagacaccgcuggacuc

SEQ ID NO: 56878 - RNA, 19 nt, Artificial Sequence
  Description of Artificial Sequence: Synthetic oligonucleotide
guagaaaauggggcgcguu

SEQ ID NO: 56879 - RNA, 19 nt, Artificial Sequence
  Description of Artificial Sequence: Synthetic oligonucleotide
ggagucgauuuuacuugga

SEQ ID NO: 56880 - RNA, 19 nt, Artificial Sequence
  Description of Artificial Sequence: Synthetic oligonucleotide
ggggcgcguuauuuccuac

SEQ ID NO: 56881 - RNA, 19 nt, Artificial Sequence
  Description of Artificial Sequence: Synthetic oligonucleotide
agacaccgcuggacucggg

SEQ ID NO: 56882 - RNA, 19 nt, Artificial Sequence
  Description of Artificial Sequence: Synthetic oligonucleotide
ccgagcaucuguauucagu

SEQ ID NO: 56883 - RNA, 19 nt, Artificial Sequence
  Description of Artificial Sequence: Synthetic oligonucleotide
ggcgcguuauuuccuacuu

SEQ ID NO: 56884 - RNA, 19 nt, Artificial Sequence
  Description of Artificial Sequence: Synthetic oligonucleotide
caccaacgaugcacacaga

SEQ ID NO: 56885 - RNA, 19 nt, Artificial Sequence
  Description of Artificial Sequence: Synthetic oligonucleotide
ccgaagacaccgcuggacu

SEQ ID NO: 56886 - RNA, 19 nt, Artificial Sequence
  Description of Artificial Sequence: Synthetic oligonucleotide
cgauuuuacuuggaugaaa

SEQ ID NO: 56887 - RNA, 19 nt, Artificial Sequence
  Description of Artificial Sequence: Synthetic oligonucleotide
gggcgcguuauuuccuacu

SEQ ID NO: 56888 - RNA, 19 nt, Artificial Sequence
  Description of Artificial Sequence: Synthetic oligonucleotide
ccacucaucccuacuucua

SEQ ID NO: 56889 - RNA, 19 nt, Artificial Sequence
  Description of Artificial Sequence: Synthetic oligonucleotide
guaagaggggugacuuguu

SEQ ID NO: 56890 - RNA, 19 nt, Artificial Sequence
  Description of Artificial Sequence: Synthetic oligonucleotide
gcgagccuagcaagacccc

SEQ ID NO: 56891 - RNA, 19 nt, Artificial Sequence
  Description of Artificial Sequence: Synthetic oligonucleotide
  modified_base (8)..(8): a, c, u, g, unknown or other
ugcuggcnccuggcucacu

SEQ ID NO: 56892 - RNA, 19 nt, Artificial Sequence
  Description of Artificial Sequence: Synthetic oligonucleotide
gggccucgaauaucuggcu

SEQ ID NO: 56893 - RNA, 19 nt, Artificial Sequence
  Description of Artificial Sequence: Synthetic oligonucleotide
ggaucagauccaaggccgu

SEQ ID NO: 56894 - RNA, 19 nt, Artificial Sequence
  Description of Artificial Sequence: Synthetic oligonucleotide
ccacaugcuauaagacuau

SEQ ID NO: 56895 - RNA, 19 nt, Artificial Sequence
  Description of Artificial Sequence: Synthetic oligonucleotide
cuguacuucuagccaccuu

SEQ ID NO: 56896 - RNA, 19 nt, Artificial Sequence
  Description of Artificial Sequence: Synthetic oligonucleotide
ccauaccuucagaccccuc

SEQ ID NO: 56897 - RNA, 19 nt, Artificial Sequence
  Description of Artificial Sequence: Synthetic oligonucleotide
caggugcaauugacccgaa

SEQ ID NO: 56898 - RNA, 19 nt, Artificial Sequence
  Description of Artificial Sequence: Synthetic oligonucleotide
cucugucacuauccauguu

SEQ ID NO: 56899 - RNA, 19 nt, Artificial Sequence
  Description of Artificial Sequence: Synthetic oligonucleotide
gcaugcaauugggcuauau

SEQ ID NO: 56900 - RNA, 19 nt, Artificial Sequence
  Description of Artificial Sequence: Synthetic oligonucleotide
ccacuggugagauccuuuu

SEQ ID NO: 56901 - RNA, 19 nt, Artificial Sequence
  Description of Artificial Sequence: Synthetic oligonucleotide
gcgcguuauuuccuacuuu

SEQ ID NO: 56902 - RNA, 19 nt, Artificial Sequence
  Description of Artificial Sequence: Synthetic oligonucleotide
ggcauggaggacaggcguu

SEQ ID NO: 56903 - RNA, 19 nt, Artificial Sequence
  Description of Artificial Sequence: Synthetic oligonucleotide
gcggugacuccagcucaga

SEQ ID NO: 56904 - RNA, 19 nt, Artificial Sequence
  Description of Artificial Sequence: Synthetic oligonucleotide
ccagcguuggggacauguu

SEQ ID NO: 56905 - RNA, 19 nt, Artificial Sequence
  Description of Artificial Sequence: Synthetic oligonucleotide
cgugucggcuaacucuguu

SEQ ID NO: 56906 - RNA, 19 nt, Artificial Sequence
  Description of Artificial Sequence: Synthetic oligonucleotide
aauagcaagucauaaaagu

SEQ ID NO: 56907 - RNA, 19 nt, Artificial Sequence
  Description of Artificial Sequence: Synthetic oligonucleotide
aaacagaucccauuuagug

SEQ ID NO: 56908 - RNA, 19 nt, Artificial Sequence
  Description of Artificial Sequence: Synthetic oligonucleotide
aaugcacuguauucgaguc

SEQ ID NO: 56909 - RNA, 19 nt, Artificial Sequence
  Description of Artificial Sequence: Synthetic oligonucleotide
gacuaaugaauuucuauag

SEQ ID NO: 56910 - RNA, 19 nt, Artificial Sequence
  Description of Artificial Sequence: Synthetic oligonucleotide
ugaguuaguagguaaaaca

SEQ ID NO: 56911 - RNA, 19 nt, Artificial Sequence
  Description of Artificial Sequence: Synthetic oligonucleotide
aaaacgacgugccaguucu

SEQ ID NO: 56912 - RNA, 19 nt, Artificial Sequence
  Description of Artificial Sequence: Synthetic oligonucleotide
aacaugauccaucacaaaa

SEQ ID NO: 56913 - RNA, 19 nt, Artificial Sequence
  Description of Artificial Sequence: Synthetic oligonucleotide
uuucuauaggagaugagug

SEQ ID NO: 56914 - RNA, 19 nt, Artificial Sequence
  Description of Artificial Sequence: Synthetic oligonucleotide
ucuagauacgaauggacag

SEQ ID NO: 56915 - RNA, 19 nt, Artificial Sequence
  Description of Artificial Sequence: Synthetic oligonucleotide
acuaaugaauuucuauagg

SEQ ID NO: 56916 - RNA, 19 nt, Artificial Sequence
  Description of Artificial Sequence: Synthetic oligonucleotide
ucugauccaauccaaaagu

SEQ ID NO: 56917 - RNA, 19 nt, Artificial Sequence
  Description of Artificial Sequence: Synthetic oligonucleotide
ucaagguaagcuuaggaac

SEQ ID NO: 56918 - RNA, 19 nt, Artificial Sequence
  Description of Artificial Sequence: Synthetic oligonucleotide
aaagaaucgaguaauggga

SEQ ID NO: 56919 - RNA, 19 nt, Artificial Sequence
  Description of Artificial Sequence: Synthetic oligonucleotide
aagucuucuaacuucggcu

SEQ ID NO: 56920 - RNA, 19 nt, Artificial Sequence
  Description of Artificial Sequence: Synthetic oligonucleotide
cauuagaccccgaacagcg

SEQ ID NO: 56921 - RNA, 19 nt, Artificial Sequence
  Description of Artificial Sequence: Synthetic oligonucleotide
uaucacaguauauaggccu

SEQ ID NO: 56922 - RNA, 19 nt, Artificial Sequence
  Description of Artificial Sequence: Synthetic oligonucleotide
agagauuaagccuucuuug

SEQ ID NO: 56923 - RNA, 19 nt, Artificial Sequence
  Description of Artificial Sequence: Synthetic oligonucleotide
auuggaguagagauuaagc

SEQ ID NO: 56924 - RNA, 19 nt, Artificial Sequence
  Description of Artificial Sequence: Synthetic oligonucleotide
caagguaagcuuaggaacg

SEQ ID NO: 56925 - RNA, 19 nt, Artificial Sequence
  Description of Artificial Sequence: Synthetic oligonucleotide
uaugauagcugcagaauca

SEQ ID NO: 56926 - RNA, 19 nt, Artificial Sequence
  Description of Artificial Sequence: Synthetic oligonucleotide
aacccauuggaguagagau

SEQ ID NO: 56927 - RNA, 19 nt, Artificial Sequence
  Description of Artificial Sequence: Synthetic oligonucleotide
aguauauaggccucuagcu

SEQ ID NO: 56928 - RNA, 19 nt, Artificial Sequence
  Description of Artificial Sequence: Synthetic oligonucleotide
gaaacagcaagaccgauga

SEQ ID NO: 56929 - RNA, 19 nt, Artificial Sequence
  Description of Artificial Sequence: Synthetic oligonucleotide
cuuaacuggaguauuaaca

SEQ ID NO: 56930 - RNA, 19 nt, Artificial Sequence
  Description of Artificial Sequence: Synthetic oligonucleotide
cauuagaagaucacagagc

SEQ ID NO: 56931 - RNA, 19 nt, Artificial Sequence
  Description of Artificial Sequence: Synthetic oligonucleotide
aagaccgaugacuugagaa

SEQ ID NO: 56932 - RNA, 19 nt, Artificial Sequence
  Description of Artificial Sequence: Synthetic oligonucleotide
uccaauccaaaaguaaggg

SEQ ID NO: 56933 - RNA, 19 nt, Artificial Sequence
  Description of Artificial Sequence: Synthetic oligonucleotide
agaccgaugacuugagaac

SEQ ID NO: 56934 - RNA, 19 nt, Artificial Sequence
  Description of Artificial Sequence: Synthetic oligonucleotide
augagaacgagcugcuuac

SEQ ID NO: 56935 - RNA, 19 nt, Artificial Sequence
  Description of Artificial Sequence: Synthetic oligonucleotide
uguacuaaguccgacauua

SEQ ID NO: 56936 - RNA, 19 nt, Artificial Sequence
  Description of Artificial Sequence: Synthetic oligonucleotide
gcuaucacaguauauaggc

SEQ ID NO: 56937 - RNA, 19 nt, Artificial Sequence
  Description of Artificial Sequence: Synthetic oligonucleotide
caaguaguuagaaacagca

SEQ ID NO: 56938 - RNA, 19 nt, Artificial Sequence
  Description of Artificial Sequence: Synthetic oligonucleotide
aucugauccaauccaaaag

SEQ ID NO: 56939 - RNA, 19 nt, Artificial Sequence
  Description of Artificial Sequence: Synthetic oligonucleotide
ugacuaaugaauuucuaua

SEQ ID NO: 56940 - RNA, 19 nt, Artificial Sequence
  Description of Artificial Sequence: Synthetic oligonucleotide
gagauuaagccuucuuugc

SEQ ID NO: 56941 - RNA, 19 nt, Artificial Sequence
  Description of Artificial Sequence: Synthetic oligonucleotide
agauguaacucuaaaccac

SEQ ID NO: 56942 - RNA, 19 nt, Artificial Sequence
  Description of Artificial Sequence: Synthetic oligonucleotide
acuaaguccgacauuagag

SEQ ID NO: 56943 - RNA, 19 nt, Artificial Sequence
  Description of Artificial Sequence: Synthetic oligonucleotide
aaaggauuaaucugugcuu

SEQ ID NO: 56944 - RNA, 19 nt, Artificial Sequence
  Description of Artificial Sequence: Synthetic oligonucleotide
aaucgaguaaugggaacac

SEQ ID NO: 56945 - RNA, 19 nt, Artificial Sequence
  Description of Artificial Sequence: Synthetic oligonucleotide
auagcaauuaccaaacaga

SEQ ID NO: 56946 - RNA, 19 nt, Artificial Sequence
  Description of Artificial Sequence: Synthetic oligonucleotide
ucggcgaugagaacgagcu

SEQ ID NO: 56947 - RNA, 19 nt, Artificial Sequence
  Description of Artificial Sequence: Synthetic oligonucleotide
aagggcaaaacgacgugcc

SEQ ID NO: 56948 - RNA, 19 nt, Artificial Sequence
  Description of Artificial Sequence: Synthetic oligonucleotide
agacgcacgauguuagaac

SEQ ID NO: 56949 - RNA, 19 nt, Artificial Sequence
  Description of Artificial Sequence: Synthetic oligonucleotide
cagggcaugaaacaaguag

SEQ ID NO: 56950 - RNA, 19 nt, Artificial Sequence
  Description of Artificial Sequence: Synthetic oligonucleotide
acauccuaucaucuucacc

SEQ ID NO: 56951 - RNA, 19 nt, Artificial Sequence
  Description of Artificial Sequence: Synthetic oligonucleotide
uccauuagaccccgaacag

SEQ ID NO: 56952 - RNA, 19 nt, Artificial Sequence
  Description of Artificial Sequence: Synthetic oligonucleotide
uuucucgucgauuucuuga

SEQ ID NO: 56953 - RNA, 19 nt, Artificial Sequence
  Description of Artificial Sequence: Synthetic oligonucleotide
cagucuauagcaauuacca

SEQ ID NO: 56954 - RNA, 19 nt, Artificial Sequence
  Description of Artificial Sequence: Synthetic oligonucleotide
agaaucgaguaaugggaac

SEQ ID NO: 56955 - RNA, 19 nt, Artificial Sequence
  Description of Artificial Sequence: Synthetic oligonucleotide
guaacuugacuuuggcagg

SEQ ID NO: 56956 - RNA, 19 nt, Artificial Sequence
  Description of Artificial Sequence: Synthetic oligonucleotide
cauuagauaggcacuguug

SEQ ID NO: 56957 - RNA, 19 nt, Artificial Sequence
  Description of Artificial Sequence: Synthetic oligonucleotide
caguauauaggccucuagc

SEQ ID NO: 56958 - RNA, 19 nt, Artificial Sequence
  Description of Artificial Sequence: Synthetic oligonucleotide
uuagccauguguuauccaa

SEQ ID NO: 56959 - RNA, 19 nt, Artificial Sequence
  Description of Artificial Sequence: Synthetic oligonucleotide
uagagauuaagccuucuuu

SEQ ID NO: 56960 - RNA, 19 nt, Artificial Sequence
  Description of Artificial Sequence: Synthetic oligonucleotide
ugaaacaaguaguuagaaa

SEQ ID NO: 56961 - RNA, 19 nt, Artificial Sequence
  Description of Artificial Sequence: Synthetic oligonucleotide
aaaacggaagucuguguaa

SEQ ID NO: 56962 - RNA, 19 nt, Artificial Sequence
  Description of Artificial Sequence: Synthetic oligonucleotide
ugaacgacuaucuguucug

SEQ ID NO: 56963 - RNA, 19 nt, Artificial Sequence
  Description of Artificial Sequence: Synthetic oligonucleotide
ugugcuuauuccagggccc

SEQ ID NO: 56964 - RNA, 19 nt, Artificial Sequence
  Description of Artificial Sequence: Synthetic oligonucleotide
uucacagacauccuaucau

SEQ ID NO: 56965 - RNA, 19 nt, Artificial Sequence
  Description of Artificial Sequence: Synthetic oligonucleotide
auuuccguggguaacugac

SEQ ID NO: 56966 - RNA, 19 nt, Artificial Sequence
  Description of Artificial Sequence: Synthetic oligonucleotide
agccauguguuauccaaac

SEQ ID NO: 56967 - RNA, 19 nt, Artificial Sequence
  Description of Artificial Sequence: Synthetic oligonucleotide
auaaucaguucacauacuu

SEQ ID NO: 56968 - RNA, 19 nt, Artificial Sequence
  Description of Artificial Sequence: Synthetic oligonucleotide
agauguccuauccagauua

SEQ ID NO: 56969 - RNA, 19 nt, Artificial Sequence
  Description of Artificial Sequence: Synthetic oligonucleotide
aacuucggcuggccuaacc

SEQ ID NO: 56970 - RNA, 19 nt, Artificial Sequence
  Description of Artificial Sequence: Synthetic oligonucleotide
uuagauaggcacuguuggc

SEQ ID NO: 56971 - RNA, 19 nt, Artificial Sequence
  Description of Artificial Sequence: Synthetic oligonucleotide
acaaguaguuagaaacagc

SEQ ID NO: 56972 - RNA, 19 nt, Artificial Sequence
  Description of Artificial Sequence: Synthetic oligonucleotide
ggcaaaucaauaaccaugg

SEQ ID NO: 56973 - RNA, 19 nt, Artificial Sequence
  Description of Artificial Sequence: Synthetic oligonucleotide
gaacuguacaaauguugag

SEQ ID NO: 56974 - RNA, 19 nt, Artificial Sequence
  Description of Artificial Sequence: Synthetic oligonucleotide
augaacgguguacagcauc

SEQ ID NO: 56975 - RNA, 19 nt, Artificial Sequence
  Description of Artificial Sequence: Synthetic oligonucleotide
uacuaaguccgacauuaga

SEQ ID NO: 56976 - RNA, 19 nt, Artificial Sequence
  Description of Artificial Sequence: Synthetic oligonucleotide
cuaugauagcugcagaauc

SEQ ID NO: 56977 - RNA, 19 nt, Artificial Sequence
  Description of Artificial Sequence: Synthetic oligonucleotide
aaguccgacauuagaguac

SEQ ID NO: 56978 - RNA, 19 nt, Artificial Sequence
  Description of Artificial Sequence: Synthetic oligonucleotide
agaugaguggaagccauac

SEQ ID NO: 56979 - RNA, 19 nt, Artificial Sequence
  Description of Artificial Sequence: Synthetic oligonucleotide
uccucaauaccaacaaauc

SEQ ID NO: 56980 - RNA, 19 nt, Artificial Sequence
  Description of Artificial Sequence: Synthetic oligonucleotide
uucuaugauagcugcagaa

SEQ ID NO: 56981 - RNA, 19 nt, Artificial Sequence
  Description of Artificial Sequence: Synthetic oligonucleotide
ucuaaauaauagaguucca

SEQ ID NO: 56982 - RNA, 19 nt, Artificial Sequence
  Description of Artificial Sequence: Synthetic oligonucleotide
ucuaauuggcuccgagaug

SEQ ID NO: 56983 - RNA, 19 nt, Artificial Sequence
  Description of Artificial Sequence: Synthetic oligonucleotide
aacgguguacagcaucugu

SEQ ID NO: 56984 - RNA, 19 nt, Artificial Sequence
  Description of Artificial Sequence: Synthetic oligonucleotide
cugugcuuauuccagggcc

SEQ ID NO: 56985 - RNA, 19 nt, Artificial Sequence
  Description of Artificial Sequence: Synthetic oligonucleotide
cuaauuggcuccgagauga

SEQ ID NO: 56986 - RNA, 19 nt, Artificial Sequence
  Description of Artificial Sequence: Synthetic oligonucleotide
uaauagaguuccagauuug

SEQ ID NO: 56987 - RNA, 19 nt, Artificial Sequence
  Description of Artificial Sequence: Synthetic oligonucleotide
cacacuuaacacugaaaug

SEQ ID NO: 56988 - RNA, 19 nt, Artificial Sequence
  Description of Artificial Sequence: Synthetic oligonucleotide
gauuaggagguggauauuc

SEQ ID NO: 56989 - RNA, 19 nt, Artificial Sequence
  Description of Artificial Sequence: Synthetic oligonucleotide
aaauccucuuuggaaggag

SEQ ID NO: 56990 - RNA, 19 nt, Artificial Sequence
  Description of Artificial Sequence: Synthetic oligonucleotide
aguagguuccuucuuuuau

SEQ ID NO: 56991 - RNA, 19 nt, Artificial Sequence
  Description of Artificial Sequence: Synthetic oligonucleotide
aggagaaccaucuguaauu

SEQ ID NO: 56992 - RNA, 19 nt, Artificial Sequence
  Description of Artificial Sequence: Synthetic oligonucleotide
acaguauauaggccucuag

SEQ ID NO: 56993 - RNA, 19 nt, Artificial Sequence
  Description of Artificial Sequence: Synthetic oligonucleotide
ucgucgauuucuugauggg

SEQ ID NO: 56994 - RNA, 19 nt, Artificial Sequence
  Description of Artificial Sequence: Synthetic oligonucleotide
ucuucggcgaugagaacga

SEQ ID NO: 56995 - RNA, 19 nt, Artificial Sequence
  Description of Artificial Sequence: Synthetic oligonucleotide
gaaucgaguaaugggaaca

SEQ ID NO: 56996 - RNA, 19 nt, Artificial Sequence
  Description of Artificial Sequence: Synthetic oligonucleotide
caauaucauaaaugauaag

SEQ ID NO: 56997 - RNA, 19 nt, Artificial Sequence
  Description of Artificial Sequence: Synthetic oligonucleotide
augaaaacggaagucugug

SEQ ID NO: 56998 - RNA, 19 nt, Artificial Sequence
  Description of Artificial Sequence: Synthetic oligonucleotide
uacgaauggacagucuucu

SEQ ID NO: 56999 - RNA, 19 nt, Artificial Sequence
  Description of Artificial Sequence: Synthetic oligonucleotide
cuuuaauaccacugacgug

SEQ ID NO: 57000 - RNA, 19 nt, Artificial Sequence
  Description of Artificial Sequence: Synthetic oligonucleotide
cucuagauacgaauggaca

SEQ ID NO: 57001 - RNA, 19 nt, Artificial Sequence
  Description of Artificial Sequence: Synthetic oligonucleotide
gaccgaugacuugagaacc

SEQ ID NO: 57002 - RNA, 19 nt, Artificial Sequence
  Description of Artificial Sequence: Synthetic oligonucleotide
ucuaugauagcugcagaau

SEQ ID NO: 57003 - RNA, 19 nt, Artificial Sequence
  Description of Artificial Sequence: Synthetic oligonucleotide
caaaggauuaaucugugcu

SEQ ID NO: 57004 - RNA, 19 nt, Artificial Sequence
  Description of Artificial Sequence: Synthetic oligonucleotide
aucuguacuaaguccgaca

SEQ ID NO: 57005 - RNA, 19 nt, Artificial Sequence
  Description of Artificial Sequence: Synthetic oligonucleotide
uucggcuggccuaaccaag

SEQ ID NO: 57006 - RNA, 19 nt, Artificial Sequence
  Description of Artificial Sequence: Synthetic oligonucleotide
uucucuagauacgaaugga

SEQ ID NO: 57007 - RNA, 19 nt, Artificial Sequence
  Description of Artificial Sequence: Synthetic oligonucleotide
uacaagcuaucacaguaua

SEQ ID NO: 57008 - RNA, 19 nt, Artificial Sequence
  Description of Artificial Sequence: Synthetic oligonucleotide
uuuaucaaucugccugguc

SEQ ID NO: 57009 - RNA, 19 nt, Artificial Sequence
  Description of Artificial Sequence: Synthetic oligonucleotide
guggguaacugacaugcug

SEQ ID NO: 57010 - RNA, 19 nt, Artificial Sequence
  Description of Artificial Sequence: Synthetic oligonucleotide
acuguauucgagucucccu

SEQ ID NO: 57011 - RNA, 19 nt, Artificial Sequence
  Description of Artificial Sequence: Synthetic oligonucleotide
ugccaaagaaucgaguaau

SEQ ID NO: 57012 - RNA, 19 nt, Artificial Sequence
  Description of Artificial Sequence: Synthetic oligonucleotide
ugcacuguauucgagucuc

SEQ ID NO: 57013 - RNA, 19 nt, Artificial Sequence
  Description of Artificial Sequence: Synthetic oligonucleotide
cagagacgcacgauguuag

SEQ ID NO: 57014 - RNA, 19 nt, Artificial Sequence
  Description of Artificial Sequence: Synthetic oligonucleotide
aagaaucgaguaaugggaa

SEQ ID NO: 57015 - RNA, 19 nt, Artificial Sequence
  Description of Artificial Sequence: Synthetic oligonucleotide
uucggcgaugagaacgagc

SEQ ID NO: 57016 - RNA, 19 nt, Artificial Sequence
  Description of Artificial Sequence: Synthetic oligonucleotide
uguuccuuaacuggaguau

SEQ ID NO: 57017 - RNA, 19 nt, Artificial Sequence
  Description of Artificial Sequence: Synthetic oligonucleotide
uucugguauuugaaggcaa

SEQ ID NO: 57018 - RNA, 19 nt, Artificial Sequence
  Description of Artificial Sequence: Synthetic oligonucleotide
agggcaugaaacaaguagu

SEQ ID NO: 57019 - RNA, 19 nt, Artificial Sequence
  Description of Artificial Sequence: Synthetic oligonucleotide
agcaauuaccaaacagauc

SEQ ID NO: 57020 - RNA, 19 nt, Artificial Sequence
  Description of Artificial Sequence: Synthetic oligonucleotide
gaacgacuaucuguucugg

SEQ ID NO: 57021 - RNA, 19 nt, Artificial Sequence
  Description of Artificial Sequence: Synthetic oligonucleotide
uaacaguguuuauuuugac

SEQ ID NO: 57022 - RNA, 19 nt, Artificial Sequence
  Description of Artificial Sequence: Synthetic oligonucleotide
uuuccguggguaacugaca

SEQ ID NO: 57023 - RNA, 19 nt, Artificial Sequence
  Description of Artificial Sequence: Synthetic oligonucleotide
aucacaguauauaggccuc

SEQ ID NO: 57024 - RNA, 19 nt, Artificial Sequence
  Description of Artificial Sequence: Synthetic oligonucleotide
ucuucuaacuucggcuggc

SEQ ID NO: 57025 - RNA, 19 nt, Artificial Sequence
  Description of Artificial Sequence: Synthetic oligonucleotide
gaacgucacccucuaagca

SEQ ID NO: 57026 - RNA, 19 nt, Artificial Sequence
  Description of Artificial Sequence: Synthetic oligonucleotide
uucauaaaacagguguaua

SEQ ID NO: 57027 - RNA, 19 nt, Artificial Sequence
  Description of Artificial Sequence: Synthetic oligonucleotide
ggaacgucacccucuaagc

SEQ ID NO: 57028 - RNA, 19 nt, Artificial Sequence
  Description of Artificial Sequence: Synthetic oligonucleotide
ugcagugccugaacgacua

SEQ ID NO: 57029 - RNA, 19 nt, Artificial Sequence
  Description of Artificial Sequence: Synthetic oligonucleotide
cugacgugggcagaugucc

SEQ ID NO: 57030 - RNA, 19 nt, Artificial Sequence
  Description of Artificial Sequence: Synthetic oligonucleotide
uucucgucgauuucuugau

SEQ ID NO: 57031 - RNA, 19 nt, Artificial Sequence
  Description of Artificial Sequence: Synthetic oligonucleotide
gagaacgagcugcuuacuc

SEQ ID NO: 57032 - RNA, 19 nt, Artificial Sequence
  Description of Artificial Sequence: Synthetic oligonucleotide
uggaaacccauuggaguag

SEQ ID NO: 57033 - RNA, 19 nt, Artificial Sequence
  Description of Artificial Sequence: Synthetic oligonucleotide
agucuauagcaauuaccaa

SEQ ID NO: 57034 - RNA, 19 nt, Artificial Sequence
  Description of Artificial Sequence: Synthetic oligonucleotide
aaggucaaccaaauccagu

SEQ ID NO: 57035 - RNA, 19 nt, Artificial Sequence
  Description of Artificial Sequence: Synthetic oligonucleotide
aagguaagcuuaggaacgu

SEQ ID NO: 57036 - RNA, 19 nt, Artificial Sequence
  Description of Artificial Sequence: Synthetic oligonucleotide
acauuagauaggcacuguu

SEQ ID NO: 57037 - RNA, 19 nt, Artificial Sequence
  Description of Artificial Sequence: Synthetic oligonucleotide
uccgacauuagaguacaaa

SEQ ID NO: 57038 - RNA, 19 nt, Artificial Sequence
  Description of Artificial Sequence: Synthetic oligonucleotide
gaugaguggaagccauaca

SEQ ID NO: 57039 - RNA, 19 nt, Artificial Sequence
  Description of Artificial Sequence: Synthetic oligonucleotide
guaaugggaacacugcagu

SEQ ID NO: 57040 - RNA, 19 nt, Artificial Sequence
  Description of Artificial Sequence: Synthetic oligonucleotide
cugggaauucacauccguc

SEQ ID NO: 57041 - RNA, 19 nt, Artificial Sequence
  Description of Artificial Sequence: Synthetic oligonucleotide
uguauucgagucucccuau

SEQ ID NO: 57042 - RNA, 19 nt, Artificial Sequence
  Description of Artificial Sequence: Synthetic oligonucleotide
aaguaguuagaaacagcaa

SEQ ID NO: 57043 - RNA, 19 nt, Artificial Sequence
  Description of Artificial Sequence: Synthetic oligonucleotide
uuaggaacgucacccucua

SEQ ID NO: 57044 - RNA, 19 nt, Artificial Sequence
  Description of Artificial Sequence: Synthetic oligonucleotide
gaguuaguagguaaaacau

SEQ ID NO: 57045 - RNA, 19 nt, Artificial Sequence
  Description of Artificial Sequence: Synthetic oligonucleotide
acgauguuagaacucuauu

SEQ ID NO: 57046 - RNA, 19 nt, Artificial Sequence
  Description of Artificial Sequence: Synthetic oligonucleotide
gaaggagaaccaucuguaa

SEQ ID NO: 57047 - RNA, 19 nt, Artificial Sequence
  Description of Artificial Sequence: Synthetic oligonucleotide
aggccuacauuaaaaucag

SEQ ID NO: 57048 - RNA, 19 nt, Artificial Sequence
  Description of Artificial Sequence: Synthetic oligonucleotide
cauugaauaacugcugcaa

SEQ ID NO: 57049 - RNA, 19 nt, Artificial Sequence
  Description of Artificial Sequence: Synthetic oligonucleotide
acagaauuacuagcaaaau

SEQ ID NO: 57050 - RNA, 19 nt, Artificial Sequence
  Description of Artificial Sequence: Synthetic oligonucleotide
gaacauaggcauuccaaau

SEQ ID NO: 57051 - RNA, 19 nt, Artificial Sequence
  Description of Artificial Sequence: Synthetic oligonucleotide
ucggcuggccuaaccaaga

SEQ ID NO: 57052 - RNA, 19 nt, Artificial Sequence
  Description of Artificial Sequence: Synthetic oligonucleotide
ggagccuaggacuugcuga

SEQ ID NO: 57053 - RNA, 19 nt, Artificial Sequence
  Description of Artificial Sequence: Synthetic oligonucleotide
cccauacaagcuaucacag

SEQ ID NO: 57054 - RNA, 19 nt, Artificial Sequence
  Description of Artificial Sequence: Synthetic oligonucleotide
uauccagauuaggaccuug

SEQ ID NO: 57055 - RNA, 19 nt, Artificial Sequence
  Description of Artificial Sequence: Synthetic oligonucleotide
gacgcacgauguuagaacu

SEQ ID NO: 57056 - RNA, 19 nt, Artificial Sequence
  Description of Artificial Sequence: Synthetic oligonucleotide
caaaacgacgugccaguuc

SEQ ID NO: 57057 - RNA, 19 nt, Artificial Sequence
  Description of Artificial Sequence: Synthetic oligonucleotide
agacugucaagcaaaggau

SEQ ID NO: 57058 - RNA, 19 nt, Artificial Sequence
  Description of Artificial Sequence: Synthetic oligonucleotide
ugucauuaacugguggcua

SEQ ID NO: 57059 - RNA, 19 nt, Artificial Sequence
  Description of Artificial Sequence: Synthetic oligonucleotide
gucauuaacugguggcuaa

SEQ ID NO: 57060 - RNA, 19 nt, Artificial Sequence
  Description of Artificial Sequence: Synthetic oligonucleotide
augcacuguauucgagucu

SEQ ID NO: 57061 - RNA, 19 nt, Artificial Sequence
  Description of Artificial Sequence: Synthetic oligonucleotide
aggccucuagcucuaaaua

SEQ ID NO: 57062 - RNA, 19 nt, Artificial Sequence
  Description of Artificial Sequence: Synthetic oligonucleotide
accaacauuuccgugggua

SEQ ID NO: 57063 - RNA, 19 nt, Artificial Sequence
  Description of Artificial Sequence: Synthetic oligonucleotide
ggaggccuacauuaaaauc

SEQ ID NO: 57064 - RNA, 19 nt, Artificial Sequence
  Description of Artificial Sequence: Synthetic oligonucleotide
ccguggguaacugacaugc

SEQ ID NO: 57065 - RNA, 19 nt, Artificial Sequence
  Description of Artificial Sequence: Synthetic oligonucleotide
gcauguguucacuggagac

SEQ ID NO: 57066 - RNA, 19 nt, Artificial Sequence
  Description of Artificial Sequence: Synthetic oligonucleotide
acugacgugggcagauguc

SEQ ID NO: 57067 - RNA, 19 nt, Artificial Sequence
  Description of Artificial Sequence: Synthetic oligonucleotide
uccguggguaacugacaug

SEQ ID NO: 57068 - RNA, 19 nt, Artificial Sequence
  Description of Artificial Sequence: Synthetic oligonucleotide
cuguauucgagucucccua

SEQ ID NO: 57069 - RNA, 19 nt, Artificial Sequence
  Description of Artificial Sequence: Synthetic oligonucleotide
cugauccaauccaaaagua

SEQ ID NO: 57070 - RNA, 19 nt, Artificial Sequence
  Description of Artificial Sequence: Synthetic oligonucleotide
caugaaaacggaagucugu

SEQ ID NO: 57071 - RNA, 19 nt, Artificial Sequence
  Description of Artificial Sequence: Synthetic oligonucleotide
ccuuaacuggaguauuaac

SEQ ID NO: 57072 - RNA, 19 nt, Artificial Sequence
  Description of Artificial Sequence: Synthetic oligonucleotide
aacgacgugccaguucuuu

SEQ ID NO: 57073 - RNA, 19 nt, Artificial Sequence
  Description of Artificial Sequence: Synthetic oligonucleotide
cuucuaugauagcugcaga

SEQ ID NO: 57074 - RNA, 19 nt, Artificial Sequence
  Description of Artificial Sequence: Synthetic oligonucleotide
gguaagcuuaggaacguca

SEQ ID NO: 57075 - RNA, 19 nt, Artificial Sequence
  Description of Artificial Sequence: Synthetic oligonucleotide
agggcaaaacgacgugcca

SEQ ID NO: 57076 - RNA, 19 nt, Artificial Sequence
  Description of Artificial Sequence: Synthetic oligonucleotide
uggcuccgagaugacauca

SEQ ID NO: 57077 - RNA, 19 nt, Artificial Sequence
  Description of Artificial Sequence: Synthetic oligonucleotide
aguagagauuaagccuucu

SEQ ID NO: 57078 - RNA, 19 nt, Artificial Sequence
  Description of Artificial Sequence: Synthetic oligonucleotide
acauuuccguggguaacug

SEQ ID NO: 57079 - RNA, 19 nt, Artificial Sequence
  Description of Artificial Sequence: Synthetic oligonucleotide
gggcaaaacgacgugccag

SEQ ID NO: 57080 - RNA, 19 nt, Artificial Sequence
  Description of Artificial Sequence: Synthetic oligonucleotide
agagacgcacgauguuaga

SEQ ID NO: 57081 - RNA, 19 nt, Artificial Sequence
  Description of Artificial Sequence: Synthetic oligonucleotide
uuccgaggugauguucacc

SEQ ID NO: 57082 - RNA, 19 nt, Artificial Sequence
  Description of Artificial Sequence: Synthetic oligonucleotide
gagacgcacgauguuagaa

SEQ ID NO: 57083 - RNA, 19 nt, Artificial Sequence
  Description of Artificial Sequence: Synthetic oligonucleotide
guacuaaguccgacauuag

SEQ ID NO: 57084 - RNA, 19 nt, Artificial Sequence
  Description of Artificial Sequence: Synthetic oligonucleotide
cagacuucuaugucuuaaa

SEQ ID NO: 57085 - RNA, 19 nt, Artificial Sequence
  Description of Artificial Sequence: Synthetic oligonucleotide
acaagcuaucacaguauau

SEQ ID NO: 57086 - RNA, 19 nt, Artificial Sequence
  Description of Artificial Sequence: Synthetic oligonucleotide
caucuguacuaaguccgac

SEQ ID NO: 57087 - RNA, 19 nt, Artificial Sequence
  Description of Artificial Sequence: Synthetic oligonucleotide
uuggcuccgagaugacauc

SEQ ID NO: 57088 - RNA, 19 nt, Artificial Sequence
  Description of Artificial Sequence: Synthetic oligonucleotide
aaugaacgguguacagcau

SEQ ID NO: 57089 - RNA, 19 nt, Artificial Sequence
  Description of Artificial Sequence: Synthetic oligonucleotide
agugacuaaugaauuucua

SEQ ID NO: 57090 - RNA, 19 nt, Artificial Sequence
  Description of Artificial Sequence: Synthetic oligonucleotide
aucgaguaaugggaacacu

SEQ ID NO: 57091 - RNA, 19 nt, Artificial Sequence
  Description of Artificial Sequence: Synthetic oligonucleotide
gaacgguguacagcaucug

SEQ ID NO: 57092 - RNA, 19 nt, Artificial Sequence
  Description of Artificial Sequence: Synthetic oligonucleotide
cuagauacgaauggacagu

SEQ ID NO: 57093 - RNA, 19 nt, Artificial Sequence
  Description of Artificial Sequence: Synthetic oligonucleotide
cagugacuaaugaauuucu

SEQ ID NO: 57094 - RNA, 19 nt, Artificial Sequence
  Description of Artificial Sequence: Synthetic oligonucleotide
augggacggcuguucucuc

SEQ ID NO: 57095 - RNA, 19 nt, Artificial Sequence
  Description of Artificial Sequence: Synthetic oligonucleotide
acgcacgauguuagaacuc

SEQ ID NO: 57096 - RNA, 19 nt, Artificial Sequence
  Description of Artificial Sequence: Synthetic oligonucleotide
gugcuuauuccagggcccc

SEQ ID NO: 57097 - RNA, 19 nt, Artificial Sequence
  Description of Artificial Sequence: Synthetic oligonucleotide
uuguccugucgaagaaguu

SEQ ID NO: 57098 - RNA, 19 nt, Artificial Sequence
  Description of Artificial Sequence: Synthetic oligonucleotide
auaggccucuagcucuaaa

SEQ ID NO: 57099 - RNA, 19 nt, Artificial Sequence
  Description of Artificial Sequence: Synthetic oligonucleotide
aaucauggugucaguccua

SEQ ID NO: 57100 - RNA, 19 nt, Artificial Sequence
  Description of Artificial Sequence: Synthetic oligonucleotide
guccugucgaagaaguuua

SEQ ID NO: 57101 - RNA, 19 nt, Artificial Sequence
  Description of Artificial Sequence: Synthetic oligonucleotide
cauuuccguggguaacuga

SEQ ID NO: 57102 - RNA, 19 nt, Artificial Sequence
  Description of Artificial Sequence: Synthetic oligonucleotide
cuugacuuuggcagggcau

SEQ ID NO: 57103 - RNA, 19 nt, Artificial Sequence
  Description of Artificial Sequence: Synthetic oligonucleotide
cuucggcuggccuaaccaa

SEQ ID NO: 57104 - RNA, 19 nt, Artificial Sequence
  Description of Artificial Sequence: Synthetic oligonucleotide
ccauuagaccccgaacagc

SEQ ID NO: 57105 - RNA, 19 nt, Artificial Sequence
  Description of Artificial Sequence: Synthetic oligonucleotide
ggucagucuuccgagguga

SEQ ID NO: 57106 - RNA, 19 nt, Artificial Sequence
  Description of Artificial Sequence: Synthetic oligonucleotide
cacgauguuagaacucuau

SEQ ID NO: 57107 - RNA, 19 nt, Artificial Sequence
  Description of Artificial Sequence: Synthetic oligonucleotide
gucuacuaaaaggaugaau

SEQ ID NO: 57108 - RNA, 19 nt, Artificial Sequence
  Description of Artificial Sequence: Synthetic oligonucleotide
cucgggucuugaucugauc

SEQ ID NO: 57109 - RNA, 19 nt, Artificial Sequence
  Description of Artificial Sequence: Synthetic oligonucleotide
accacugacgugggcagau

SEQ ID NO: 57110 - RNA, 19 nt, Artificial Sequence
  Description of Artificial Sequence: Synthetic oligonucleotide
auuagaccccgaacagcgu

SEQ ID NO: 57111 - RNA, 19 nt, Artificial Sequence
  Description of Artificial Sequence: Synthetic oligonucleotide
acauccguccacagagggu

SEQ ID NO: 57112 - RNA, 19 nt, Artificial Sequence
  Description of Artificial Sequence: Synthetic oligonucleotide
cugucauuaacugguggcu

SEQ ID NO: 57113 - RNA, 19 nt, Artificial Sequence
  Description of Artificial Sequence: Synthetic oligonucleotide
cugucaagcaaaggauuaa

SEQ ID NO: 57114 - RNA, 19 nt, Artificial Sequence
  Description of Artificial Sequence: Synthetic oligonucleotide
caugggacggcuguucucu

SEQ ID NO: 57115 - RNA, 19 nt, Artificial Sequence
  Description of Artificial Sequence: Synthetic oligonucleotide
cgucgauuucuugaugggg

SEQ ID NO: 57116 - RNA, 19 nt, Artificial Sequence
  Description of Artificial Sequence: Synthetic oligonucleotide
ccgacauuagaguacaaau

SEQ ID NO: 57117 - RNA, 19 nt, Artificial Sequence
  Description of Artificial Sequence: Synthetic oligonucleotide
ggccuacauuaaaaucagg

SEQ ID NO: 57118 - RNA, 19 nt, Artificial Sequence
  Description of Artificial Sequence: Synthetic oligonucleotide
ccuauuuagccauguguua

SEQ ID NO: 57119 - RNA, 19 nt, Artificial Sequence
  Description of Artificial Sequence: Synthetic oligonucleotide
gacuuuggcagggcaugaa

SEQ ID NO: 57120 - RNA, 19 nt, Artificial Sequence
  Description of Artificial Sequence: Synthetic oligonucleotide
gcaagaccgaugacuugag

SEQ ID NO: 57121 - RNA, 19 nt, Artificial Sequence
  Description of Artificial Sequence: Synthetic oligonucleotide
uaccacugacgugggcaga

SEQ ID NO: 57122 - RNA, 19 nt, Artificial Sequence
  Description of Artificial Sequence: Synthetic oligonucleotide
ccaacauuuccguggguaa

SEQ ID NO: 57123 - RNA, 19 nt, Artificial Sequence
  Description of Artificial Sequence: Synthetic oligonucleotide
ggccuaaccaagagaucug

SEQ ID NO: 57124 - RNA, 19 nt, Artificial Sequence
  Description of Artificial Sequence: Synthetic oligonucleotide
acgugggcagauguccuau

SEQ ID NO: 57125 - RNA, 19 nt, Artificial Sequence
  Description of Artificial Sequence: Synthetic oligonucleotide
cccucuaagcacagacuuc

SEQ ID NO: 57126 - RNA, 19 nt, Artificial Sequence
  Description of Artificial Sequence: Synthetic oligonucleotide
cuucggcgaugagaacgag

SEQ ID NO: 57127 - RNA, 19 nt, Artificial Sequence
  Description of Artificial Sequence: Synthetic oligonucleotide
gacgugccaguucuuuaau

SEQ ID NO: 57128 - RNA, 19 nt, Artificial Sequence
  Description of Artificial Sequence: Synthetic oligonucleotide
ggaaacccauuggaguaga

SEQ ID NO: 57129 - RNA, 19 nt, Artificial Sequence
  Description of Artificial Sequence: Synthetic oligonucleotide
ccucuagcucuaaauaaua

SEQ ID NO: 57130 - RNA, 19 nt, Artificial Sequence
  Description of Artificial Sequence: Synthetic oligonucleotide
gcagagacgcacgauguua

SEQ ID NO: 57131 - RNA, 19 nt, Artificial Sequence
  Description of Artificial Sequence: Synthetic oligonucleotide
cacugacgugggcagaugu

SEQ ID NO: 57132 - RNA, 19 nt, Artificial Sequence
  Description of Artificial Sequence: Synthetic oligonucleotide
ccugaacgacuaucuguuc

SEQ ID NO: 57133 - RNA, 19 nt, Artificial Sequence
  Description of Artificial Sequence: Synthetic oligonucleotide
cagguguauaacaguguuu

SEQ ID NO: 57134 - RNA, 19 nt, Artificial Sequence
  Description of Artificial Sequence: Synthetic oligonucleotide
cacaguauauaggccucua

SEQ ID NO: 57135 - RNA, 19 nt, Artificial Sequence
  Description of Artificial Sequence: Synthetic oligonucleotide
guauucgagucucccuauu

SEQ ID NO: 57136 - RNA, 19 nt, Artificial Sequence
  Description of Artificial Sequence: Synthetic oligonucleotide
ccuuacuccagcucucacu

SEQ ID NO: 57137 - RNA, 19 nt, Artificial Sequence
  Description of Artificial Sequence: Synthetic oligonucleotide
aaacgacgugccaguucuu

SEQ ID NO: 57138 - RNA, 19 nt, Artificial Sequence
  Description of Artificial Sequence: Synthetic oligonucleotide
gccucuagcucuaaauaau

SEQ ID NO: 57139 - RNA, 19 nt, Artificial Sequence
  Description of Artificial Sequence: Synthetic oligonucleotide
cagauguccuauccagauu

SEQ ID NO: 57140 - RNA, 19 nt, Artificial Sequence
  Description of Artificial Sequence: Synthetic oligonucleotide
gggcaugaaacaaguaguu

SEQ ID NO: 57141 - RNA, 19 nt, Artificial Sequence
  Description of Artificial Sequence: Synthetic oligonucleotide
cgcacgauguuagaacucu

SEQ ID NO: 57142 - RNA, 19 nt, Artificial Sequence
  Description of Artificial Sequence: Synthetic oligonucleotide
gucagucuuccgaggugau

SEQ ID NO: 57143 - RNA, 19 nt, Artificial Sequence
  Description of Artificial Sequence: Synthetic oligonucleotide
gcacgauguuagaacucua

SEQ ID NO: 57144 - RNA, 19 nt, Artificial Sequence
  Description of Artificial Sequence: Synthetic oligonucleotide
ccacugacgugggcagaug

SEQ ID NO: 57145 - RNA, 19 nt, Artificial Sequence
  Description of Artificial Sequence: Synthetic oligonucleotide
cccauuuagugaagaucau

SEQ ID NO: 57146 - RNA, 19 nt, Artificial Sequence
  Description of Artificial Sequence: Synthetic oligonucleotide
gcagugccugaacgacuau

SEQ ID NO: 57147 - RNA, 19 nt, Artificial Sequence
  Description of Artificial Sequence: Synthetic oligonucleotide
aaugaaugucacuagaauc

SEQ ID NO: 57148 - RNA, 19 nt, Artificial Sequence
  Description of Artificial Sequence: Synthetic oligonucleotide
aauuacgugaacuggcacc

SEQ ID NO: 57149 - RNA, 19 nt, Artificial Sequence
  Description of Artificial Sequence: Synthetic oligonucleotide
auagaauuaacauagcuca

SEQ ID NO: 57150 - RNA, 19 nt, Artificial Sequence
  Description of Artificial Sequence: Synthetic oligonucleotide
aacugauugauuuuaaaca

SEQ ID NO: 57151 - RNA, 19 nt, Artificial Sequence
  Description of Artificial Sequence: Synthetic oligonucleotide
uaguuuaugucucagacca

SEQ ID NO: 57152 - RNA, 19 nt, Artificial Sequence
  Description of Artificial Sequence: Synthetic oligonucleotide
aaauuaaacugauugauuu

SEQ ID NO: 57153 - RNA, 19 nt, Artificial Sequence
  Description of Artificial Sequence: Synthetic oligonucleotide
uaaacaaccacucuuuugu

SEQ ID NO: 57154 - RNA, 19 nt, Artificial Sequence
  Description of Artificial Sequence: Synthetic oligonucleotide
uugccauuaaauuaaacug

SEQ ID NO: 57155 - RNA, 19 nt, Artificial Sequence
  Description of Artificial Sequence: Synthetic oligonucleotide
uacuauaacaaauuguacu

SEQ ID NO: 57156 - RNA, 19 nt, Artificial Sequence
  Description of Artificial Sequence: Synthetic oligonucleotide
uuuggaaacguccaaacaa

SEQ ID NO: 57157 - RNA, 19 nt, Artificial Sequence
  Description of Artificial Sequence: Synthetic oligonucleotide
uuaagaauguggcagaaau

SEQ ID NO: 57158 - RNA, 19 nt, Artificial Sequence
  Description of Artificial Sequence: Synthetic oligonucleotide
uuucacauaacucucuaga

SEQ ID NO: 57159 - RNA, 19 nt, Artificial Sequence
  Description of Artificial Sequence: Synthetic oligonucleotide
ucaacccuaaucuaaaugu

SEQ ID NO: 57160 - RNA, 19 nt, Artificial Sequence
  Description of Artificial Sequence: Synthetic oligonucleotide
acaccuuuguuuuacuacc

SEQ ID NO: 57161 - RNA, 19 nt, Artificial Sequence
  Description of Artificial Sequence: Synthetic oligonucleotide
uauauggacucauagcugc

SEQ ID NO: 57162 - RNA, 19 nt, Artificial Sequence
  Description of Artificial Sequence: Synthetic oligonucleotide
uaacauagcucacagagaa

SEQ ID NO: 57163 - RNA, 19 nt, Artificial Sequence
  Description of Artificial Sequence: Synthetic oligonucleotide
ugcauuguaguuuaugucu

SEQ ID NO: 57164 - RNA, 19 nt, Artificial Sequence
  Description of Artificial Sequence: Synthetic oligonucleotide
uacaauaaggaauaagauc

SEQ ID NO: 57165 - RNA, 19 nt, Artificial Sequence
  Description of Artificial Sequence: Synthetic oligonucleotide
ggagauagaauuaacauag

SEQ ID NO: 57166 - RNA, 19 nt, Artificial Sequence
  Description of Artificial Sequence: Synthetic oligonucleotide
uuccauucgaauuacguga

SEQ ID NO: 57167 - RNA, 19 nt, Artificial Sequence
  Description of Artificial Sequence: Synthetic oligonucleotide
ucuuugauagucaaagcaa

SEQ ID NO: 57168 - RNA, 19 nt, Artificial Sequence
  Description of Artificial Sequence: Synthetic oligonucleotide
acaaugugcauccaagaag

SEQ ID NO: 57169 - RNA, 19 nt, Artificial Sequence
  Description of Artificial Sequence: Synthetic oligonucleotide
agugcaaucaucucacuug

SEQ ID NO: 57170 - RNA, 19 nt, Artificial Sequence
  Description of Artificial Sequence: Synthetic oligonucleotide
ugauaaucuguccuguccc

SEQ ID NO: 57171 - RNA, 19 nt, Artificial Sequence
  Description of Artificial Sequence: Synthetic oligonucleotide
ucaucagaaaucacgguca

SEQ ID NO: 57172 - RNA, 19 nt, Artificial Sequence
  Description of Artificial Sequence: Synthetic oligonucleotide
aacccuaaucuaaaugugc

SEQ ID NO: 57173 - RNA, 19 nt, Artificial Sequence
  Description of Artificial Sequence: Synthetic oligonucleotide
gagucuuugauagucaaag

SEQ ID NO: 57174 - RNA, 19 nt, Artificial Sequence
  Description of Artificial Sequence: Synthetic oligonucleotide
augagaaauagugacgugg

SEQ ID NO: 57175 - RNA, 19 nt, Artificial Sequence
  Description of Artificial Sequence: Synthetic oligonucleotide
ucuuaauggcugauaaacc

SEQ ID NO: 57176 - RNA, 19 nt, Artificial Sequence
  Description of Artificial Sequence: Synthetic oligonucleotide
aaucaguuaacaaaaugga

SEQ ID NO: 57177 - RNA, 19 nt, Artificial Sequence
  Description of Artificial Sequence: Synthetic oligonucleotide
aaucaggagaucucuucuc

SEQ ID NO: 57178 - RNA, 19 nt, Artificial Sequence
  Description of Artificial Sequence: Synthetic oligonucleotide
ugacacuauggacuguucg

SEQ ID NO: 57179 - RNA, 19 nt, Artificial Sequence
  Description of Artificial Sequence: Synthetic oligonucleotide
uguaagguguagcuuuccg

SEQ ID NO: 57180 - RNA, 19 nt, Artificial Sequence
  Description of Artificial Sequence: Synthetic oligonucleotide
augauaugucuccauaauc

SEQ ID NO: 57181 - RNA, 19 nt, Artificial Sequence
  Description of Artificial Sequence: Synthetic oligonucleotide
aagucuugaugauaugucu

SEQ ID NO: 57182 - RNA, 19 nt, Artificial Sequence
  Description of Artificial Sequence: Synthetic oligonucleotide
aaccuuacaucccacagaa

SEQ ID NO: 57183 - RNA, 19 nt, Artificial Sequence
  Description of Artificial Sequence: Synthetic oligonucleotide
gaacauauccaagaguacc

SEQ ID NO: 57184 - RNA, 19 nt, Artificial Sequence
  Description of Artificial Sequence: Synthetic oligonucleotide
aaacguguaagguguagcu

SEQ ID NO: 57185 - RNA, 19 nt, Artificial Sequence
  Description of Artificial Sequence: Synthetic oligonucleotide
uguaauucugagcaugaaa

SEQ ID NO: 57186 - RNA, 19 nt, Artificial Sequence
  Description of Artificial Sequence: Synthetic oligonucleotide
ugagaaauagugacgugga

SEQ ID NO: 57187 - RNA, 19 nt, Artificial Sequence
  Description of Artificial Sequence: Synthetic oligonucleotide
cuacuuaagaauguggcag

SEQ ID NO: 57188 - RNA, 19 nt, Artificial Sequence
  Description of Artificial Sequence: Synthetic oligonucleotide
guacucgaaaguaucaucg

SEQ ID NO: 57189 - RNA, 19 nt, Artificial Sequence
  Description of Artificial Sequence: Synthetic oligonucleotide
aaacauugggcccacugga

SEQ ID NO: 57190 - RNA, 19 nt, Artificial Sequence
  Description of Artificial Sequence: Synthetic oligonucleotide
ucagaccaagucuugauga

SEQ ID NO: 57191 - RNA, 19 nt, Artificial Sequence
  Description of Artificial Sequence: Synthetic oligonucleotide
aaucuagcucugaucaacc

SEQ ID NO: 57192 - RNA, 19 nt, Artificial Sequence
  Description of Artificial Sequence: Synthetic oligonucleotide
uguuccauucgaauuacgu

SEQ ID NO: 57193 - RNA, 19 nt, Artificial Sequence
  Description of Artificial Sequence: Synthetic oligonucleotide
uugcuacuuaagaaugugg

SEQ ID NO: 57194 - RNA, 19 nt, Artificial Sequence
  Description of Artificial Sequence: Synthetic oligonucleotide
caugaguuaagucacucac

SEQ ID NO: 57195 - RNA, 19 nt, Artificial Sequence
  Description of Artificial Sequence: Synthetic oligonucleotide
agcuagaggagucuuaaug

SEQ ID NO: 57196 - RNA, 19 nt, Artificial Sequence
  Description of Artificial Sequence: Synthetic oligonucleotide
uuagggacgaaaugcagga

SEQ ID NO: 57197 - RNA, 19 nt, Artificial Sequence
  Description of Artificial Sequence: Synthetic oligonucleotide
uucgaauuacgugaacugg

SEQ ID NO: 57198 - RNA, 19 nt, Artificial Sequence
  Description of Artificial Sequence: Synthetic oligonucleotide
gaucacuuggccuuuggac

SEQ ID NO: 57199 - RNA, 19 nt, Artificial Sequence
  Description of Artificial Sequence: Synthetic oligonucleotide
cuauguucagaacucgacc

SEQ ID NO: 57200 - RNA, 19 nt, Artificial Sequence
  Description of Artificial Sequence: Synthetic oligonucleotide
cuuacaucccacagaagag

SEQ ID NO: 57201 - RNA, 19 nt, Artificial Sequence
  Description of Artificial Sequence: Synthetic oligonucleotide
caacccagaacguuguucc

SEQ ID NO: 57202 - RNA, 19 nt, Artificial Sequence
  Description of Artificial Sequence: Synthetic oligonucleotide
uacaccuuuguuuuacuac

SEQ ID NO: 57203 - RNA, 19 nt, Artificial Sequence
  Description of Artificial Sequence: Synthetic oligonucleotide
uaaucaggagaucucuucu

SEQ ID NO: 57204 - RNA, 19 nt, Artificial Sequence
  Description of Artificial Sequence: Synthetic oligonucleotide
uuuucacauaacucucuag

SEQ ID NO: 57205 - RNA, 19 nt, Artificial Sequence
  Description of Artificial Sequence: Synthetic oligonucleotide
uuaucuagacauugauuug

SEQ ID NO: 57206 - RNA, 19 nt, Artificial Sequence
  Description of Artificial Sequence: Synthetic oligonucleotide
ucuagcucugaucaaccca

SEQ ID NO: 57207 - RNA, 19 nt, Artificial Sequence
  Description of Artificial Sequence: Synthetic oligonucleotide
ugagcgauuaaugacacua

SEQ ID NO: 57208 - RNA, 19 nt, Artificial Sequence
  Description of Artificial Sequence: Synthetic oligonucleotide
uuuagaugguggcauuuga

SEQ ID NO: 57209 - RNA, 19 nt, Artificial Sequence
  Description of Artificial Sequence: Synthetic oligonucleotide
ggucauauccccaaagucg

SEQ ID NO: 57210 - RNA, 19 nt, Artificial Sequence
  Description of Artificial Sequence: Synthetic oligonucleotide
agaucuguugagugcaauc

SEQ ID NO: 57211 - RNA, 19 nt, Artificial Sequence
  Description of Artificial Sequence: Synthetic oligonucleotide
augggaacaagucacaauu

SEQ ID NO: 57212 - RNA, 19 nt, Artificial Sequence
  Description of Artificial Sequence: Synthetic oligonucleotide
aguaucaucgcugaucaca

SEQ ID NO: 57213 - RNA, 19 nt, Artificial Sequence
  Description of Artificial Sequence: Synthetic oligonucleotide
acgaaaauugagcuuccag

SEQ ID NO: 57214 - RNA, 19 nt, Artificial Sequence
  Description of Artificial Sequence: Synthetic oligonucleotide
cuagccauguuaucuagac

SEQ ID NO: 57215 - RNA, 19 nt, Artificial Sequence
  Description of Artificial Sequence: Synthetic oligonucleotide
cugauacuauaacaaauug

SEQ ID NO: 57216 - RNA, 19 nt, Artificial Sequence
  Description of Artificial Sequence: Synthetic oligonucleotide
uuaugucucagaccaaguc

SEQ ID NO: 57217 - RNA, 19 nt, Artificial Sequence
  Description of Artificial Sequence: Synthetic oligonucleotide
uuuugcuacuuaagaaugu

SEQ ID NO: 57218 - RNA, 19 nt, Artificial Sequence
  Description of Artificial Sequence: Synthetic oligonucleotide
aaacggcugaugugcacgg

SEQ ID NO: 57219 - RNA, 19 nt, Artificial Sequence
  Description of Artificial Sequence: Synthetic oligonucleotide
uuugcuacuuaagaaugug

SEQ ID NO: 57220 - RNA, 19 nt, Artificial Sequence
  Description of Artificial Sequence: Synthetic oligonucleotide
aauuugagaaucaggguaa

SEQ ID NO: 57221 - RNA, 19 nt, Artificial Sequence
  Description of Artificial Sequence: Synthetic oligonucleotide
acccaaaccaaggaggugg

SEQ ID NO: 57222 - RNA, 19 nt, Artificial Sequence
  Description of Artificial Sequence: Synthetic oligonucleotide
cucgaaaguaucaucgcug

SEQ ID NO: 57223 - RNA, 19 nt, Artificial Sequence
  Description of Artificial Sequence: Synthetic oligonucleotide
agugacguggaauuugaga

SEQ ID NO: 57224 - RNA, 19 nt, Artificial Sequence
  Description of Artificial Sequence: Synthetic oligonucleotide
cugauuaccucccauacca

SEQ ID NO: 57225 - RNA, 19 nt, Artificial Sequence
  Description of Artificial Sequence: Synthetic oligonucleotide
gaaacggcugaugugcacg

SEQ ID NO: 57226 - RNA, 19 nt, Artificial Sequence
  Description of Artificial Sequence: Synthetic oligonucleotide
acuauguucagaacucgac

SEQ ID NO: 57227 - RNA, 19 nt, Artificial Sequence
  Description of Artificial Sequence: Synthetic oligonucleotide
gaucugaaggcuauuugcc

SEQ ID NO: 57228 - RNA, 19 nt, Artificial Sequence
  Description of Artificial Sequence: Synthetic oligonucleotide
ugaugauaugucuccauaa

SEQ ID NO: 57229 - RNA, 19 nt, Artificial Sequence
  Description of Artificial Sequence: Synthetic oligonucleotide
aucuagcucugaucaaccc

SEQ ID NO: 57230 - RNA, 19 nt, Artificial Sequence
  Description of Artificial Sequence: Synthetic oligonucleotide
guuagggacgaaaugcagg

SEQ ID NO: 57231 - RNA, 19 nt, Artificial Sequence
  Description of Artificial Sequence: Synthetic oligonucleotide
uuggugagcgauuaaugac

SEQ ID NO: 57232 - RNA, 19 nt, Artificial Sequence
  Description of Artificial Sequence: Synthetic oligonucleotide
ucgaaaguaucaucgcuga

SEQ ID NO: 57233 - RNA, 19 nt, Artificial Sequence
  Description of Artificial Sequence: Synthetic oligonucleotide
aacguccaaacaaagguca

SEQ ID NO: 57234 - RNA, 19 nt, Artificial Sequence
  Description of Artificial Sequence: Synthetic oligonucleotide
guaccaacgaaaauugagc

SEQ ID NO: 57235 - RNA, 19 nt, Artificial Sequence
  Description of Artificial Sequence: Synthetic oligonucleotide
ucguaucucucccaaugag

SEQ ID NO: 57236 - RNA, 19 nt, Artificial Sequence
  Description of Artificial Sequence: Synthetic oligonucleotide
agaacguuguuccauucga

SEQ ID NO: 57237 - RNA, 19 nt, Artificial Sequence
  Description of Artificial Sequence: Synthetic oligonucleotide
uguuaucuagacauugauu

SEQ ID NO: 57238 - RNA, 19 nt, Artificial Sequence
  Description of Artificial Sequence: Synthetic oligonucleotide
cugauaaaccuuacauccc

SEQ ID NO: 57239 - RNA, 19 nt, Artificial Sequence
  Description of Artificial Sequence: Synthetic oligonucleotide
gauuaccucccauaccaug

SEQ ID NO: 57240 - RNA, 19 nt, Artificial Sequence
  Description of Artificial Sequence: Synthetic oligonucleotide
uaaucuagcucugaucaac

SEQ ID NO: 57241 - RNA, 19 nt, Artificial Sequence
  Description of Artificial Sequence: Synthetic oligonucleotide
uggaguuagggacgaaaug

SEQ ID NO: 57242 - RNA, 19 nt, Artificial Sequence
  Description of Artificial Sequence: Synthetic oligonucleotide
cuaaucaggagaucucuuc

SEQ ID NO: 57243 - RNA, 19 nt, Artificial Sequence
  Description of Artificial Sequence: Synthetic oligonucleotide
agaaccaccuugcaauaug

SEQ ID NO: 57244 - RNA, 19 nt, Artificial Sequence
  Description of Artificial Sequence: Synthetic oligonucleotide
ugucacaaugagauuucug

SEQ ID NO: 57245 - RNA, 19 nt, Artificial Sequence
  Description of Artificial Sequence: Synthetic oligonucleotide
guucgaagaagugugcucc

SEQ ID NO: 57246 - RNA, 19 nt, Artificial Sequence
  Description of Artificial Sequence: Synthetic oligonucleotide
uuuaugucucagaccaagu

SEQ ID NO: 57247 - RNA, 19 nt, Artificial Sequence
  Description of Artificial Sequence: Synthetic oligonucleotide
aggaacauauccaagagua

SEQ ID NO: 57248 - RNA, 19 nt, Artificial Sequence
  Description of Artificial Sequence: Synthetic oligonucleotide
ucccaaugagaaauaguga

SEQ ID NO: 57249 - RNA, 19 nt, Artificial Sequence
  Description of Artificial Sequence: Synthetic oligonucleotide
ucucgaugaggacucuucc

SEQ ID NO: 57250 - RNA, 19 nt, Artificial Sequence
  Description of Artificial Sequence: Synthetic oligonucleotide
ggaucugaaggcuauuugc

SEQ ID NO: 57251 - RNA, 19 nt, Artificial Sequence
  Description of Artificial Sequence: Synthetic oligonucleotide
cuaucaugugucuugguga

SEQ ID NO: 57252 - RNA, 19 nt, Artificial Sequence
  Description of Artificial Sequence: Synthetic oligonucleotide
ugaugugcacggaagcugu

SEQ ID NO: 57253 - RNA, 19 nt, Artificial Sequence
  Description of Artificial Sequence: Synthetic oligonucleotide
uccaaucugguuucaucag

SEQ ID NO: 57254 - RNA, 19 nt, Artificial Sequence
  Description of Artificial Sequence: Synthetic oligonucleotide
agcgauuaaugacacuaug

SEQ ID NO: 57255 - RNA, 19 nt, Artificial Sequence
  Description of Artificial Sequence: Synthetic oligonucleotide
aucaaugauaggacacacc

SEQ ID NO: 57256 - RNA, 19 nt, Artificial Sequence
  Description of Artificial Sequence: Synthetic oligonucleotide
gaaacguguaagguguagc

SEQ ID NO: 57257 - RNA, 19 nt, Artificial Sequence
  Description of Artificial Sequence: Synthetic oligonucleotide
ggcacuuuaagucaaaugu

SEQ ID NO: 57258 - RNA, 19 nt, Artificial Sequence
  Description of Artificial Sequence: Synthetic oligonucleotide
uugaugauaugucuccaua

SEQ ID NO: 57259 - RNA, 19 nt, Artificial Sequence
  Description of Artificial Sequence: Synthetic oligonucleotide
agaaauagugacguggaau

SEQ ID NO: 57260 - RNA, 19 nt, Artificial Sequence
  Description of Artificial Sequence: Synthetic oligonucleotide
uuauuagacaucugacuuu

SEQ ID NO: 57261 - RNA, 19 nt, Artificial Sequence
  Description of Artificial Sequence: Synthetic oligonucleotide
cacaugaccaacaugggaa

SEQ ID NO: 57262 - RNA, 19 nt, Artificial Sequence
  Description of Artificial Sequence: Synthetic oligonucleotide
acucgaaaguaucaucgcu

SEQ ID NO: 57263 - RNA, 19 nt, Artificial Sequence
  Description of Artificial Sequence: Synthetic oligonucleotide
auaaaccuuacaucccaca

SEQ ID NO: 57264 - RNA, 19 nt, Artificial Sequence
  Description of Artificial Sequence: Synthetic oligonucleotide
ucuauguguggagugaaaa

SEQ ID NO: 57265 - RNA, 19 nt, Artificial Sequence
  Description of Artificial Sequence: Synthetic oligonucleotide
gguaccaacgaaaauugag

SEQ ID NO: 57266 - RNA, 19 nt, Artificial Sequence
  Description of Artificial Sequence: Synthetic oligonucleotide
agggacgaaaugcaggacu

SEQ ID NO: 57267 - RNA, 19 nt, Artificial Sequence
  Description of Artificial Sequence: Synthetic oligonucleotide
uauugauaaucuguccugu

SEQ ID NO: 57268 - RNA, 19 nt, Artificial Sequence
  Description of Artificial Sequence: Synthetic oligonucleotide
cuuggugagcgauuaauga

SEQ ID NO: 57269 - RNA, 19 nt, Artificial Sequence
  Description of Artificial Sequence: Synthetic oligonucleotide
gagucuuaauggcugauaa

SEQ ID NO: 57270 - RNA, 19 nt, Artificial Sequence
  Description of Artificial Sequence: Synthetic oligonucleotide
uggcacuuuaagucaaaug

SEQ ID NO: 57271 - RNA, 19 nt, Artificial Sequence
  Description of Artificial Sequence: Synthetic oligonucleotide
uacucgaaaguaucaucgc

SEQ ID NO: 57272 - RNA, 19 nt, Artificial Sequence
  Description of Artificial Sequence: Synthetic oligonucleotide
ugcacggaagcuguggaag

SEQ ID NO: 57273 - RNA, 19 nt, Artificial Sequence
  Description of Artificial Sequence: Synthetic oligonucleotide
auguuaucuagacauugau

SEQ ID NO: 57274 - RNA, 19 nt, Artificial Sequence
  Description of Artificial Sequence: Synthetic oligonucleotide
agaucaugcuaugcuaggg

SEQ ID NO: 57275 - RNA, 19 nt, Artificial Sequence
  Description of Artificial Sequence: Synthetic oligonucleotide
ucucccaaugagaaauagu

SEQ ID NO: 57276 - RNA, 19 nt, Artificial Sequence
  Description of Artificial Sequence: Synthetic oligonucleotide
aagugagacaaaauuuuaa

SEQ ID NO: 57277 - RNA, 19 nt, Artificial Sequence
  Description of Artificial Sequence: Synthetic oligonucleotide
aguauaggagaaaaccuga

SEQ ID NO: 57278 - RNA, 19 nt, Artificial Sequence
  Description of Artificial Sequence: Synthetic oligonucleotide
auuacgugaacuggcaccu

SEQ ID NO: 57279 - RNA, 19 nt, Artificial Sequence
  Description of Artificial Sequence: Synthetic oligonucleotide
aauauccaugccagcauca

SEQ ID NO: 57280 - RNA, 19 nt, Artificial Sequence
  Description of Artificial Sequence: Synthetic oligonucleotide
aaguaucaucgcugaucac

SEQ ID NO: 57281 - RNA, 19 nt, Artificial Sequence
  Description of Artificial Sequence: Synthetic oligonucleotide
ugugcacggaagcugugga

SEQ ID NO: 57282 - RNA, 19 nt, Artificial Sequence
  Description of Artificial Sequence: Synthetic oligonucleotide
gaauuacgugaacuggcac

SEQ ID NO: 57283 - RNA, 19 nt, Artificial Sequence
  Description of Artificial Sequence: Synthetic oligonucleotide
gacaaccuuaccccaagca

SEQ ID NO: 57284 - RNA, 19 nt, Artificial Sequence
  Description of Artificial Sequence: Synthetic oligonucleotide
gugcaaucaucucacuugc

SEQ ID NO: 57285 - RNA, 19 nt, Artificial Sequence
  Description of Artificial Sequence: Synthetic oligonucleotide
gaagguuaucuggauacac

SEQ ID NO: 57286 - RNA, 19 nt, Artificial Sequence
  Description of Artificial Sequence: Synthetic oligonucleotide
uacuaccccucuaaucuca

SEQ ID NO: 57287 - RNA, 19 nt, Artificial Sequence
  Description of Artificial Sequence: Synthetic oligonucleotide
gcgauuaaugacacuaugg

SEQ ID NO: 57288 - RNA, 19 nt, Artificial Sequence
  Description of Artificial Sequence: Synthetic oligonucleotide
uccauucgaauuacgugaa

SEQ ID NO: 57289 - RNA, 19 nt, Artificial Sequence
  Description of Artificial Sequence: Synthetic oligonucleotide
ccucuaaucucacaucugg

SEQ ID NO: 57290 - RNA, 19 nt, Artificial Sequence
  Description of Artificial Sequence: Synthetic oligonucleotide
cacguuucguaucucuccc

SEQ ID NO: 57291 - RNA, 19 nt, Artificial Sequence
  Description of Artificial Sequence: Synthetic oligonucleotide
agaacucgaccccaucuca

SEQ ID NO: 57292 - RNA, 19 nt, Artificial Sequence
  Description of Artificial Sequence: Synthetic oligonucleotide
aguggguugcuauggaaaa

SEQ ID NO: 57293 - RNA, 19 nt, Artificial Sequence
  Description of Artificial Sequence: Synthetic oligonucleotide
ccuaaucuaaaugugcacc

SEQ ID NO: 57294 - RNA, 19 nt, Artificial Sequence
  Description of Artificial Sequence: Synthetic oligonucleotide
ugagguagcccagucaauc

SEQ ID NO: 57295 - RNA, 19 nt, Artificial Sequence
  Description of Artificial Sequence: Synthetic oligonucleotide
auuaccucccauaccauga

SEQ ID NO: 57296 - RNA, 19 nt, Artificial Sequence
  Description of Artificial Sequence: Synthetic oligonucleotide
gaaccaccuugcaauaugc

SEQ ID NO: 57297 - RNA, 19 nt, Artificial Sequence
  Description of Artificial Sequence: Synthetic oligonucleotide
aacuauguucagaacucga

SEQ ID NO: 57298 - RNA, 19 nt, Artificial Sequence
  Description of Artificial Sequence: Synthetic oligonucleotide
acaaaggucaucuguucua

SEQ ID NO: 57299 - RNA, 19 nt, Artificial Sequence
  Description of Artificial Sequence: Synthetic oligonucleotide
acggucauauccccaaagu

SEQ ID NO: 57300 - RNA, 19 nt, Artificial Sequence
  Description of Artificial Sequence: Synthetic oligonucleotide
ugagucuuugauagucaaa

SEQ ID NO: 57301 - RNA, 19 nt, Artificial Sequence
  Description of Artificial Sequence: Synthetic oligonucleotide
caaagucgcuuuucaacug

SEQ ID NO: 57302 - RNA, 19 nt, Artificial Sequence
  Description of Artificial Sequence: Synthetic oligonucleotide
ucuaaucaggagaucucuu

SEQ ID NO: 57303 - RNA, 19 nt, Artificial Sequence
  Description of Artificial Sequence: Synthetic oligonucleotide
aggguaccaacgaaaauug

SEQ ID NO: 57304 - RNA, 19 nt, Artificial Sequence
  Description of Artificial Sequence: Synthetic oligonucleotide
gaauccaccauaggucaug

SEQ ID NO: 57305 - RNA, 19 nt, Artificial Sequence
  Description of Artificial Sequence: Synthetic oligonucleotide
aaaguacccaugaguuaag

SEQ ID NO: 57306 - RNA, 19 nt, Artificial Sequence
  Description of Artificial Sequence: Synthetic oligonucleotide
gguucuaaaaguacccaug

SEQ ID NO: 57307 - RNA, 19 nt, Artificial Sequence
  Description of Artificial Sequence: Synthetic oligonucleotide
uuaccucccauaccaugac

SEQ ID NO: 57308 - RNA, 19 nt, Artificial Sequence
  Description of Artificial Sequence: Synthetic oligonucleotide
aacucaacccuaaucuaaa

SEQ ID NO: 57309 - RNA, 19 nt, Artificial Sequence
  Description of Artificial Sequence: Synthetic oligonucleotide
aucaugcuaugcuagggua

SEQ ID NO: 57310 - RNA, 19 nt, Artificial Sequence
  Description of Artificial Sequence: Synthetic oligonucleotide
gagauagaauuaacauagc

SEQ ID NO: 57311 - RNA, 19 nt, Artificial Sequence
  Description of Artificial Sequence: Synthetic oligonucleotide
ucaacccagaacguuguuc

SEQ ID NO: 57312 - RNA, 19 nt, Artificial Sequence
  Description of Artificial Sequence: Synthetic oligonucleotide
gauaaaccuuacaucccac

SEQ ID NO: 57313 - RNA, 19 nt, Artificial Sequence
  Description of Artificial Sequence: Synthetic oligonucleotide
aagugugcuccaugcuuca

SEQ ID NO: 57314 - RNA, 19 nt, Artificial Sequence
  Description of Artificial Sequence: Synthetic oligonucleotide
accccucuaaucucacauc

SEQ ID NO: 57315 - RNA, 19 nt, Artificial Sequence
  Description of Artificial Sequence: Synthetic oligonucleotide
uguuggcaguauaggagaa

SEQ ID NO: 57316 - RNA, 19 nt, Artificial Sequence
  Description of Artificial Sequence: Synthetic oligonucleotide
uguccugucccuccuggaa

SEQ ID NO: 57317 - RNA, 19 nt, Artificial Sequence
  Description of Artificial Sequence: Synthetic oligonucleotide
aauccaccauaggucaugu

SEQ ID NO: 57318 - RNA, 19 nt, Artificial Sequence
  Description of Artificial Sequence: Synthetic oligonucleotide
uccuggaaacguguaaggu

SEQ ID NO: 57319 - RNA, 19 nt, Artificial Sequence
  Description of Artificial Sequence: Synthetic oligonucleotide
aguuagggacgaaaugcag

SEQ ID NO: 57320 - RNA, 19 nt, Artificial Sequence
  Description of Artificial Sequence: Synthetic oligonucleotide
uguuuccacguuucguauc

SEQ ID NO: 57321 - RNA, 19 nt, Artificial Sequence
  Description of Artificial Sequence: Synthetic oligonucleotide
caaauuuucucauggcacu

SEQ ID NO: 57322 - RNA, 19 nt, Artificial Sequence
  Description of Artificial Sequence: Synthetic oligonucleotide
ugccauguacucgaaagua

SEQ ID NO: 57323 - RNA, 19 nt, Artificial Sequence
  Description of Artificial Sequence: Synthetic oligonucleotide
gccauuaaguuuggaaacg

SEQ ID NO: 57324 - RNA, 19 nt, Artificial Sequence
  Description of Artificial Sequence: Synthetic oligonucleotide
agucuuaauggcugauaaa

SEQ ID NO: 57325 - RNA, 19 nt, Artificial Sequence
  Description of Artificial Sequence: Synthetic oligonucleotide
uucuagguaccaagagaaa

SEQ ID NO: 57326 - RNA, 19 nt, Artificial Sequence
  Description of Artificial Sequence: Synthetic oligonucleotide
uucgaagaagugugcucca

SEQ ID NO: 57327 - RNA, 19 nt, Artificial Sequence
  Description of Artificial Sequence: Synthetic oligonucleotide
uuacuaccccucuaaucuc

SEQ ID NO: 57328 - RNA, 19 nt, Artificial Sequence
  Description of Artificial Sequence: Synthetic oligonucleotide
aaauagugacguggaauuu

SEQ ID NO: 57329 - RNA, 19 nt, Artificial Sequence
  Description of Artificial Sequence: Synthetic oligonucleotide
auagugacguggaauuuga

SEQ ID NO: 57330 - RNA, 19 nt, Artificial Sequence
  Description of Artificial Sequence: Synthetic oligonucleotide
uuggggaucugaaggcuau

SEQ ID NO: 57331 - RNA, 19 nt, Artificial Sequence
  Description of Artificial Sequence: Synthetic oligonucleotide
cuacuuugcagucucauau

SEQ ID NO: 57332 - RNA, 19 nt, Artificial Sequence
  Description of Artificial Sequence: Synthetic oligonucleotide
cacggucauauccccaaag

SEQ ID NO: 57333 - RNA, 19 nt, Artificial Sequence
  Description of Artificial Sequence: Synthetic oligonucleotide
cauuucgaagaagccacug

SEQ ID NO: 57334 - RNA, 19 nt, Artificial Sequence
  Description of Artificial Sequence: Synthetic oligonucleotide
aacccagaacguuguucca

SEQ ID NO: 57335 - RNA, 19 nt, Artificial Sequence
  Description of Artificial Sequence: Synthetic oligonucleotide
aaguacccaugaguuaagu

SEQ ID NO: 57336 - RNA, 19 nt, Artificial Sequence
  Description of Artificial Sequence: Synthetic oligonucleotide
caucuacaagaacaaucuc

SEQ ID NO: 57337 - RNA, 19 nt, Artificial Sequence
  Description of Artificial Sequence: Synthetic oligonucleotide
gcuacuuaagaauguggca

SEQ ID NO: 57338 - RNA, 19 nt, Artificial Sequence
  Description of Artificial Sequence: Synthetic oligonucleotide
cagugaagcacaucuaugu

SEQ ID NO: 57339 - RNA, 19 nt, Artificial Sequence
  Description of Artificial Sequence: Synthetic oligonucleotide
aacguguaagguguagcuu

SEQ ID NO: 57340 - RNA, 19 nt, Artificial Sequence
  Description of Artificial Sequence: Synthetic oligonucleotide
gauaugccuuccaggaaca

SEQ ID NO: 57341 - RNA, 19 nt, Artificial Sequence
  Description of Artificial Sequence: Synthetic oligonucleotide
gauaaucuguccugucccu

SEQ ID NO: 57342 - RNA, 19 nt, Artificial Sequence
  Description of Artificial Sequence: Synthetic oligonucleotide
ugauuaccucccauaccau

SEQ ID NO: 57343 - RNA, 19 nt, Artificial Sequence
  Description of Artificial Sequence: Synthetic oligonucleotide
ggcauuugagcaugguaac

SEQ ID NO: 57344 - RNA, 19 nt, Artificial Sequence
  Description of Artificial Sequence: Synthetic oligonucleotide
aagcuagaggagucuuaau

SEQ ID NO: 57345 - RNA, 19 nt, Artificial Sequence
  Description of Artificial Sequence: Synthetic oligonucleotide
agugagucuuugauaguca

SEQ ID NO: 57346 - RNA, 19 nt, Artificial Sequence
  Description of Artificial Sequence: Synthetic oligonucleotide
auacuugauucugucacua

SEQ ID NO: 57347 - RNA, 19 nt, Artificial Sequence
  Description of Artificial Sequence: Synthetic oligonucleotide
guggcgagaaccaccuugc

SEQ ID NO: 57348 - RNA, 19 nt, Artificial Sequence
  Description of Artificial Sequence: Synthetic oligonucleotide
uuaaacccuguuugauaua

SEQ ID NO: 57349 - RNA, 19 nt, Artificial Sequence
  Description of Artificial Sequence: Synthetic oligonucleotide
aaugugcauccaagaaggu

SEQ ID NO: 57350 - RNA, 19 nt, Artificial Sequence
  Description of Artificial Sequence: Synthetic oligonucleotide
gaagaguccggucaccuuu

SEQ ID NO: 57351 - RNA, 19 nt, Artificial Sequence
  Description of Artificial Sequence: Synthetic oligonucleotide
acacuauggacuguucgaa

SEQ ID NO: 57352 - RNA, 19 nt, Artificial Sequence
  Description of Artificial Sequence: Synthetic oligonucleotide
acucaacccuaaucuaaau

SEQ ID NO: 57353 - RNA, 19 nt, Artificial Sequence
  Description of Artificial Sequence: Synthetic oligonucleotide
ccauguacucgaaaguauc

SEQ ID NO: 57354 - RNA, 19 nt, Artificial Sequence
  Description of Artificial Sequence: Synthetic oligonucleotide
ugacuacuuugcagucuca

SEQ ID NO: 57355 - RNA, 19 nt, Artificial Sequence
  Description of Artificial Sequence: Synthetic oligonucleotide
uucuaucaugugucuuggu

SEQ ID NO: 57356 - RNA, 19 nt, Artificial Sequence
  Description of Artificial Sequence: Synthetic oligonucleotide
uccuggcuaagagaggcuc

SEQ ID NO: 57357 - RNA, 19 nt, Artificial Sequence
  Description of Artificial Sequence: Synthetic oligonucleotide
gguucuaaucaggagaucu

SEQ ID NO: 57358 - RNA, 19 nt, Artificial Sequence
  Description of Artificial Sequence: Synthetic oligonucleotide
ugcagcuacugguucuaau

SEQ ID NO: 57359 - RNA, 19 nt, Artificial Sequence
  Description of Artificial Sequence: Synthetic oligonucleotide
aaccaccuugcaauaugca

SEQ ID NO: 57360 - RNA, 19 nt, Artificial Sequence
  Description of Artificial Sequence: Synthetic oligonucleotide
acuaccccucuaaucucac

SEQ ID NO: 57361 - RNA, 19 nt, Artificial Sequence
  Description of Artificial Sequence: Synthetic oligonucleotide
caugcuaugcuaggguaca

SEQ ID NO: 57362 - RNA, 19 nt, Artificial Sequence
  Description of Artificial Sequence: Synthetic oligonucleotide
cauaacucucuagaggucu

SEQ ID NO: 57363 - RNA, 19 nt, Artificial Sequence
  Description of Artificial Sequence: Synthetic oligonucleotide
cauauccaagaguacccaa

SEQ ID NO: 57364 - RNA, 19 nt, Artificial Sequence
  Description of Artificial Sequence: Synthetic oligonucleotide
aggaagaguccggucaccu

SEQ ID NO: 57365 - RNA, 19 nt, Artificial Sequence
  Description of Artificial Sequence: Synthetic oligonucleotide
gcuaugcuaggguacaaaa

SEQ ID NO: 57366 - RNA, 19 nt, Artificial Sequence
  Description of Artificial Sequence: Synthetic oligonucleotide
ggaagcagaguguauacau

SEQ ID NO: 57367 - RNA, 19 nt, Artificial Sequence
  Description of Artificial Sequence: Synthetic oligonucleotide
augguaacugggccauuaa

SEQ ID NO: 57368 - RNA, 19 nt, Artificial Sequence
  Description of Artificial Sequence: Synthetic oligonucleotide
ggaaacguguaagguguag

SEQ ID NO: 57369 - RNA, 19 nt, Artificial Sequence
  Description of Artificial Sequence: Synthetic oligonucleotide
ggucaugucagagccugcc

SEQ ID NO: 57370 - RNA, 19 nt, Artificial Sequence
  Description of Artificial Sequence: Synthetic oligonucleotide
acguuucguaucucuccca

SEQ ID NO: 57371 - RNA, 19 nt, Artificial Sequence
  Description of Artificial Sequence: Synthetic oligonucleotide
caucacaacucaacccuaa

SEQ ID NO: 57372 - RNA, 19 nt, Artificial Sequence
  Description of Artificial Sequence: Synthetic oligonucleotide
ggaacauauccaagaguac

SEQ ID NO: 57373 - RNA, 19 nt, Artificial Sequence
  Description of Artificial Sequence: Synthetic oligonucleotide
gaacguuguuccauucgaa

SEQ ID NO: 57374 - RNA, 19 nt, Artificial Sequence
  Description of Artificial Sequence: Synthetic oligonucleotide
auguuugauccuggcuaag

SEQ ID NO: 57375 - RNA, 19 nt, Artificial Sequence
  Description of Artificial Sequence: Synthetic oligonucleotide
gagugcaaucaucucacuu

SEQ ID NO: 57376 - RNA, 19 nt, Artificial Sequence
  Description of Artificial Sequence: Synthetic oligonucleotide
uaaugacacuauggacugu

SEQ ID NO: 57377 - RNA, 19 nt, Artificial Sequence
  Description of Artificial Sequence: Synthetic oligonucleotide
auauggacucauagcugca

SEQ ID NO: 57378 - RNA, 19 nt, Artificial Sequence
  Description of Artificial Sequence: Synthetic oligonucleotide
acuguuauauggacucaua

SEQ ID NO: 57379 - RNA, 19 nt, Artificial Sequence
  Description of Artificial Sequence: Synthetic oligonucleotide
gaugugcacggaagcugug

SEQ ID NO: 57380 - RNA, 19 nt, Artificial Sequence
  Description of Artificial Sequence: Synthetic oligonucleotide
ccuggcuaagagaggcucc

SEQ ID NO: 57381 - RNA, 19 nt, Artificial Sequence
  Description of Artificial Sequence: Synthetic oligonucleotide
uagggacgaaaugcaggac

SEQ ID NO: 57382 - RNA, 19 nt, Artificial Sequence
  Description of Artificial Sequence: Synthetic oligonucleotide
acgaaaugcaggacuguua

SEQ ID NO: 57383 - RNA, 19 nt, Artificial Sequence
  Description of Artificial Sequence: Synthetic oligonucleotide
cucuaaucucacaucuggu

SEQ ID NO: 57384 - RNA, 19 nt, Artificial Sequence
  Description of Artificial Sequence: Synthetic oligonucleotide
ccaaagucgcuuuucaacu

SEQ ID NO: 57385 - RNA, 19 nt, Artificial Sequence
  Description of Artificial Sequence: Synthetic oligonucleotide
acauuucgaagaagccacu

SEQ ID NO: 57386 - RNA, 19 nt, Artificial Sequence
  Description of Artificial Sequence: Synthetic oligonucleotide
gacuguuauauggacucau

SEQ ID NO: 57387 - RNA, 19 nt, Artificial Sequence
  Description of Artificial Sequence: Synthetic oligonucleotide
guacccaaaccaaggaggu

SEQ ID NO: 57388 - RNA, 19 nt, Artificial Sequence
  Description of Artificial Sequence: Synthetic oligonucleotide
guaucaucgcugaucacau

SEQ ID NO: 57389 - RNA, 19 nt, Artificial Sequence
  Description of Artificial Sequence: Synthetic oligonucleotide
ggucauacucccagagcug

SEQ ID NO: 57390 - RNA, 19 nt, Artificial Sequence
  Description of Artificial Sequence: Synthetic oligonucleotide
gagguggcgagaaccaccu

SEQ ID NO: 57391 - RNA, 19 nt, Artificial Sequence
  Description of Artificial Sequence: Synthetic oligonucleotide
gaaucaggguaaauauuuu

SEQ ID NO: 57392 - RNA, 19 nt, Artificial Sequence
  Description of Artificial Sequence: Synthetic oligonucleotide
agcacauucugugccuguu

SEQ ID NO: 57393 - RNA, 19 nt, Artificial Sequence
  Description of Artificial Sequence: Synthetic oligonucleotide
acaucacaacucaacccua

SEQ ID NO: 57394 - RNA, 19 nt, Artificial Sequence
  Description of Artificial Sequence: Synthetic oligonucleotide
cgaauuacgugaacuggca

SEQ ID NO: 57395 - RNA, 19 nt, Artificial Sequence
  Description of Artificial Sequence: Synthetic oligonucleotide
gguugccuuuuagauggug

SEQ ID NO: 57396 - RNA, 19 nt, Artificial Sequence
  Description of Artificial Sequence: Synthetic oligonucleotide
cggucauauccccaaaguc

SEQ ID NO: 57397 - RNA, 19 nt, Artificial Sequence
  Description of Artificial Sequence: Synthetic oligonucleotide
accuuacaucccacagaag

SEQ ID NO: 57398 - RNA, 19 nt, Artificial Sequence
  Description of Artificial Sequence: Synthetic oligonucleotide
aguuuaugucucagaccaa

SEQ ID NO: 57399 - RNA, 19 nt, Artificial Sequence
  Description of Artificial Sequence: Synthetic oligonucleotide
agucgcuuuucaacugaau

SEQ ID NO: 57400 - RNA, 19 nt, Artificial Sequence
  Description of Artificial Sequence: Synthetic oligonucleotide
cugccauguacucgaaagu

SEQ ID NO: 57401 - RNA, 19 nt, Artificial Sequence
  Description of Artificial Sequence: Synthetic oligonucleotide
cccucuaaucucacaucug

SEQ ID NO: 57402 - RNA, 19 nt, Artificial Sequence
  Description of Artificial Sequence: Synthetic oligonucleotide
ggcacugguuacuguucac

SEQ ID NO: 57403 - RNA, 19 nt, Artificial Sequence
  Description of Artificial Sequence: Synthetic oligonucleotide
gagcgauuaaugacacuau

SEQ ID NO: 57404 - RNA, 19 nt, Artificial Sequence
  Description of Artificial Sequence: Synthetic oligonucleotide
acguccaaacaaaggucau

SEQ ID NO: 57405 - RNA, 19 nt, Artificial Sequence
  Description of Artificial Sequence: Synthetic oligonucleotide
cuguaauucugagcaugaa

SEQ ID NO: 57406 - RNA, 19 nt, Artificial Sequence
  Description of Artificial Sequence: Synthetic oligonucleotide
caucagaaaucacggucau

SEQ ID NO: 57407 - RNA, 19 nt, Artificial Sequence
  Description of Artificial Sequence: Synthetic oligonucleotide
ccauucgaauuacgugaac

SEQ ID NO: 57408 - RNA, 19 nt, Artificial Sequence
  Description of Artificial Sequence: Synthetic oligonucleotide
gaacucgaccccaucucau

SEQ ID NO: 57409 - RNA, 19 nt, Artificial Sequence
  Description of Artificial Sequence: Synthetic oligonucleotide
augcuaugcuaggguacaa

SEQ ID NO: 57410 - RNA, 19 nt, Artificial Sequence
  Description of Artificial Sequence: Synthetic oligonucleotide
uuacgugaacuggcaccuu

SEQ ID NO: 57411 - RNA, 19 nt, Artificial Sequence
  Description of Artificial Sequence: Synthetic oligonucleotide
ggguaccaacgaaaauuga

SEQ ID NO: 57412 - RNA, 19 nt, Artificial Sequence
  Description of Artificial Sequence: Synthetic oligonucleotide
ccccucuaaucucacaucu

SEQ ID NO: 57413 - RNA, 19 nt, Artificial Sequence
  Description of Artificial Sequence: Synthetic oligonucleotide
ccggucaccuuuccuucug

SEQ ID NO: 57414 - RNA, 19 nt, Artificial Sequence
  Description of Artificial Sequence: Synthetic oligonucleotide
cagguucaaugcugagugu

SEQ ID NO: 57415 - RNA, 19 nt, Artificial Sequence
  Description of Artificial Sequence: Synthetic oligonucleotide
guucagaacucgaccccau

SEQ ID NO: 57416 - RNA, 19 nt, Artificial Sequence
  Description of Artificial Sequence: Synthetic oligonucleotide
cugagguagcccagucaau

SEQ ID NO: 57417 - RNA, 19 nt, Artificial Sequence
  Description of Artificial Sequence: Synthetic oligonucleotide
ccgccggccauuguaggug

SEQ ID NO: 57418 - RNA, 19 nt, Artificial Sequence
  Description of Artificial Sequence: Synthetic oligonucleotide
ggaagaguccggucaccuu

SEQ ID NO: 57419 - RNA, 19 nt, Artificial Sequence
  Description of Artificial Sequence: Synthetic oligonucleotide
guucucgaugaggacucuu

SEQ ID NO: 57420 - RNA, 19 nt, Artificial Sequence
  Description of Artificial Sequence: Synthetic oligonucleotide
ccaaauccuaaaggaaauu

SEQ ID NO: 57421 - RNA, 19 nt, Artificial Sequence
  Description of Artificial Sequence: Synthetic oligonucleotide
cgaaaguaucaucgcugau

SEQ ID NO: 57422 - RNA, 19 nt, Artificial Sequence
  Description of Artificial Sequence: Synthetic oligonucleotide
cggccauuguagguguucu

SEQ ID NO: 57423 - RNA, 19 nt, Artificial Sequence
  Description of Artificial Sequence: Synthetic oligonucleotide
aauuuuaaguaauuccacc

SEQ ID NO: 57424 - RNA, 19 nt, Artificial Sequence
  Description of Artificial Sequence: Synthetic oligonucleotide
aaaacaaugucagaaggcc

SEQ ID NO: 57425 - RNA, 19 nt, Artificial Sequence
  Description of Artificial Sequence: Synthetic oligonucleotide
aaaccuuacaucuuugcac

SEQ ID NO: 57426 - RNA, 19 nt, Artificial Sequence
  Description of Artificial Sequence: Synthetic oligonucleotide
aacgaaaaggauuuguaag

SEQ ID NO: 57427 - RNA, 19 nt, Artificial Sequence
  Description of Artificial Sequence: Synthetic oligonucleotide
ucaacuaugaacugugagg

SEQ ID NO: 57428 - RNA, 19 nt, Artificial Sequence
  Description of Artificial Sequence: Synthetic oligonucleotide
uuuaaguaauuccaccugg

SEQ ID NO: 57429 - RNA, 19 nt, Artificial Sequence
  Description of Artificial Sequence: Synthetic oligonucleotide
auauucuaagacuuugugc

SEQ ID NO: 57430 - RNA, 19 nt, Artificial Sequence
  Description of Artificial Sequence: Synthetic oligonucleotide
acaggauaacauuacaagc

SEQ ID NO: 57431 - RNA, 19 nt, Artificial Sequence
  Description of Artificial Sequence: Synthetic oligonucleotide
aaaagauacuguauaaaac

SEQ ID NO: 57432 - RNA, 19 nt, Artificial Sequence
  Description of Artificial Sequence: Synthetic oligonucleotide
aagucuaccacacucaaga

SEQ ID NO: 57433 - RNA, 19 nt, Artificial Sequence
  Description of Artificial Sequence: Synthetic oligonucleotide
gauaaaaguucaucgagag

SEQ ID NO: 57434 - RNA, 19 nt, Artificial Sequence
  Description of Artificial Sequence: Synthetic oligonucleotide
aguucuuagacucuccugg

SEQ ID NO: 57435 - RNA, 19 nt, Artificial Sequence
  Description of Artificial Sequence: Synthetic oligonucleotide
uuugauaacucucccgggg

SEQ ID NO: 57436 - RNA, 19 nt, Artificial Sequence
  Description of Artificial Sequence: Synthetic oligonucleotide
uauggaagaaccaacucca

SEQ ID NO: 57437 - RNA, 19 nt, Artificial Sequence
  Description of Artificial Sequence: Synthetic oligonucleotide
aagucuauuuauuaaugca

SEQ ID NO: 57438 - RNA, 19 nt, Artificial Sequence
  Description of Artificial Sequence: Synthetic oligonucleotide
acgaaaaggauuuguaagg

SEQ ID NO: 57439 - RNA, 19 nt, Artificial Sequence
  Description of Artificial Sequence: Synthetic oligonucleotide
uugacuugaaugcacacug

SEQ ID NO: 57440 - RNA, 19 nt, Artificial Sequence
  Description of Artificial Sequence: Synthetic oligonucleotide
agagccauaguucugaaca

SEQ ID NO: 57441 - RNA, 19 nt, Artificial Sequence
  Description of Artificial Sequence: Synthetic oligonucleotide
aacaugaucagggcaauuc

SEQ ID NO: 57442 - RNA, 19 nt, Artificial Sequence
  Description of Artificial Sequence: Synthetic oligonucleotide
ugugauaaaaguucaucga

SEQ ID NO: 57443 - RNA, 19 nt, Artificial Sequence
  Description of Artificial Sequence: Synthetic oligonucleotide
auaaaaguucaucgagagc

SEQ ID NO: 57444 - RNA, 19 nt, Artificial Sequence
  Description of Artificial Sequence: Synthetic oligonucleotide
ugugaagcauuacagaauc

SEQ ID NO: 57445 - RNA, 19 nt, Artificial Sequence
  Description of Artificial Sequence: Synthetic oligonucleotide
ucuucaugcagcaaacaug

SEQ ID NO: 57446 - RNA, 19 nt, Artificial Sequence
  Description of Artificial Sequence: Synthetic oligonucleotide
aguaauaaugccaguauuc

SEQ ID NO: 57447 - RNA, 19 nt, Artificial Sequence
  Description of Artificial Sequence: Synthetic oligonucleotide
ugauaaaaguucaucgaga

SEQ ID NO: 57448 - RNA, 19 nt, Artificial Sequence
  Description of Artificial Sequence: Synthetic oligonucleotide
ucacgucacauuaugagug

SEQ ID NO: 57449 - RNA, 19 nt, Artificial Sequence
  Description of Artificial Sequence: Synthetic oligonucleotide
uucaacuaugaacugugag

SEQ ID NO: 57450 - RNA, 19 nt, Artificial Sequence
  Description of Artificial Sequence: Synthetic oligonucleotide
aaccuuacaucuuugcaca

SEQ ID NO: 57451 - RNA, 19 nt, Artificial Sequence
  Description of Artificial Sequence: Synthetic oligonucleotide
uuaccaaugaucagugaug

SEQ ID NO: 57452 - RNA, 19 nt, Artificial Sequence
  Description of Artificial Sequence: Synthetic oligonucleotide
gugauaaaaguucaucgag

SEQ ID NO: 57453 - RNA, 19 nt, Artificial Sequence
  Description of Artificial Sequence: Synthetic oligonucleotide
auuucaacuaccugcggag

SEQ ID NO: 57454 - RNA, 19 nt, Artificial Sequence
  Description of Artificial Sequence: Synthetic oligonucleotide
caacuaugaacugugaggg

SEQ ID NO: 57455 - RNA, 19 nt, Artificial Sequence
  Description of Artificial Sequence: Synthetic oligonucleotide
ugugugaagcauuacagaa

SEQ ID NO: 57456 - RNA, 19 nt, Artificial Sequence
  Description of Artificial Sequence: Synthetic oligonucleotide
cacaggauaacauuacaag

SEQ ID NO: 57457 - RNA, 19 nt, Artificial Sequence
  Description of Artificial Sequence: Synthetic oligonucleotide
auagcgauaagccuguuaa

SEQ ID NO: 57458 - RNA, 19 nt, Artificial Sequence
  Description of Artificial Sequence: Synthetic oligonucleotide
aguauuagaucucacuggu

SEQ ID NO: 57459 - RNA, 19 nt, Artificial Sequence
  Description of Artificial Sequence: Synthetic oligonucleotide
auaagcaggcuacaaauca

SEQ ID NO: 57460 - RNA, 19 nt, Artificial Sequence
  Description of Artificial Sequence: Synthetic oligonucleotide
aguaguauuagaucucacu

SEQ ID NO: 57461 - RNA, 19 nt, Artificial Sequence
  Description of Artificial Sequence: Synthetic oligonucleotide
caaaaguaauaugagagac

SEQ ID NO: 57462 - RNA, 19 nt, Artificial Sequence
  Description of Artificial Sequence: Synthetic oligonucleotide
cuaucuaccuucauuguug

SEQ ID NO: 57463 - RNA, 19 nt, Artificial Sequence
  Description of Artificial Sequence: Synthetic oligonucleotide
uauauuucaauuugugaua

SEQ ID NO: 57464 - RNA, 19 nt, Artificial Sequence
  Description of Artificial Sequence: Synthetic oligonucleotide
uauaacaagguauguacau

SEQ ID NO: 57465 - RNA, 19 nt, Artificial Sequence
  Description of Artificial Sequence: Synthetic oligonucleotide
uuucagccuagcuagagga

SEQ ID NO: 57466 - RNA, 19 nt, Artificial Sequence
  Description of Artificial Sequence: Synthetic oligonucleotide
cacucaagaaguuacuaag

SEQ ID NO: 57467 - RNA, 19 nt, Artificial Sequence
  Description of Artificial Sequence: Synthetic oligonucleotide
ucuuaugcguuucaccaug

SEQ ID NO: 57468 - RNA, 19 nt, Artificial Sequence
  Description of Artificial Sequence: Synthetic oligonucleotide
agugugaacacugcaaauc

SEQ ID NO: 57469 - RNA, 19 nt, Artificial Sequence
  Description of Artificial Sequence: Synthetic oligonucleotide
ucccacuuuccacauauag

SEQ ID NO: 57470 - RNA, 19 nt, Artificial Sequence
  Description of Artificial Sequence: Synthetic oligonucleotide
acugcgaagacccuguacu

SEQ ID NO: 57471 - RNA, 19 nt, Artificial Sequence
  Description of Artificial Sequence: Synthetic oligonucleotide
acuuuggauuacuacuugg

SEQ ID NO: 57472 - RNA, 19 nt, Artificial Sequence
  Description of Artificial Sequence: Synthetic oligonucleotide
aaccuuagacucuuaagaa

SEQ ID NO: 57473 - RNA, 19 nt, Artificial Sequence
  Description of Artificial Sequence: Synthetic oligonucleotide
agcagcacucaucuuacac

SEQ ID NO: 57474 - RNA, 19 nt, Artificial Sequence
  Description of Artificial Sequence: Synthetic oligonucleotide
uaccaaugaucagugaugg

SEQ ID NO: 57475 - RNA, 19 nt, Artificial Sequence
  Description of Artificial Sequence: Synthetic oligonucleotide
cacauuaugagugauugug

SEQ ID NO: 57476 - RNA, 19 nt, Artificial Sequence
  Description of Artificial Sequence: Synthetic oligonucleotide
ugucaauuaaacaguaauu

SEQ ID NO: 57477 - RNA, 19 nt, Artificial Sequence
  Description of Artificial Sequence: Synthetic oligonucleotide
aauucccauaagcaguacu

SEQ ID NO: 57478 - RNA, 19 nt, Artificial Sequence
  Description of Artificial Sequence: Synthetic oligonucleotide
ugcugaauagguugcggcg

SEQ ID NO: 57479 - RNA, 19 nt, Artificial Sequence
  Description of Artificial Sequence: Synthetic oligonucleotide
aucauguggagauccaaag

SEQ ID NO: 57480 - RNA, 19 nt, Artificial Sequence
  Description of Artificial Sequence: Synthetic oligonucleotide
uuaacagguuucucuuugg

SEQ ID NO: 57481 - RNA, 19 nt, Artificial Sequence
  Description of Artificial Sequence: Synthetic oligonucleotide
uaagcauauggaauacaca

SEQ ID NO: 57482 - RNA, 19 nt, Artificial Sequence
  Description of Artificial Sequence: Synthetic oligonucleotide
uucauuaagagcgggaaaa

SEQ ID NO: 57483 - RNA, 19 nt, Artificial Sequence
  Description of Artificial Sequence: Synthetic oligonucleotide
ugggaaacgaaaaggauuu

SEQ ID NO: 57484 - RNA, 19 nt, Artificial Sequence
  Description of Artificial Sequence: Synthetic oligonucleotide
uccacauauaggcuggcca

SEQ ID NO: 57485 - RNA, 19 nt, Artificial Sequence
  Description of Artificial Sequence: Synthetic oligonucleotide
ugccaauuauuuauaucag

SEQ ID NO: 57486 - RNA, 19 nt, Artificial Sequence
  Description of Artificial Sequence: Synthetic oligonucleotide
aucugcaccgcaugaaaac

SEQ ID NO: 57487 - RNA, 19 nt, Artificial Sequence
  Description of Artificial Sequence: Synthetic oligonucleotide
caucuacuaaucugcaccg

SEQ ID NO: 57488 - RNA, 19 nt, Artificial Sequence
  Description of Artificial Sequence: Synthetic oligonucleotide
uugggaaacgaaaaggauu

SEQ ID NO: 57489 - RNA, 19 nt, Artificial Sequence
  Description of Artificial Sequence: Synthetic oligonucleotide
acucaucuuacacugguca

SEQ ID NO: 57490 - RNA, 19 nt, Artificial Sequence
  Description of Artificial Sequence: Synthetic oligonucleotide
agaaguuuguaaugggaca

SEQ ID NO: 57491 - RNA, 19 nt, Artificial Sequence
  Description of Artificial Sequence: Synthetic oligonucleotide
uggguuagaauuaauuauu

SEQ ID NO: 57492 - RNA, 19 nt, Artificial Sequence
  Description of Artificial Sequence: Synthetic oligonucleotide
uguuggguuagaauuaauu

SEQ ID NO: 57493 - RNA, 19 nt, Artificial Sequence
  Description of Artificial Sequence: Synthetic oligonucleotide
uugauaacucucccggggc

SEQ ID NO: 57494 - RNA, 19 nt, Artificial Sequence
  Description of Artificial Sequence: Synthetic oligonucleotide
aauagguugcggcggucuc

SEQ ID NO: 57495 - RNA, 19 nt, Artificial Sequence
  Description of Artificial Sequence: Synthetic oligonucleotide
acaccaauauuugggaaac

SEQ ID NO: 57496 - RNA, 19 nt, Artificial Sequence
  Description of Artificial Sequence: Synthetic oligonucleotide
agagugauaguccgaccac

SEQ ID NO: 57497 - RNA, 19 nt, Artificial Sequence
  Description of Artificial Sequence: Synthetic oligonucleotide
uuuucauuaagagcgggaa

SEQ ID NO: 57498 - RNA, 19 nt, Artificial Sequence
  Description of Artificial Sequence: Synthetic oligonucleotide
uguuauccugaguauguca

SEQ ID NO: 57499 - RNA, 19 nt, Artificial Sequence
  Description of Artificial Sequence: Synthetic oligonucleotide
aaaacccuaccacaggaua

SEQ ID NO: 57500 - RNA, 19 nt, Artificial Sequence
  Description of Artificial Sequence: Synthetic oligonucleotide
cacaguggacauuaaacug

SEQ ID NO: 57501 - RNA, 19 nt, Artificial Sequence
  Description of Artificial Sequence: Synthetic oligonucleotide
auuaacaugaucagggcaa

SEQ ID NO: 57502 - RNA, 19 nt, Artificial Sequence
  Description of Artificial Sequence: Synthetic oligonucleotide
cauaauuccuaccaaggga

SEQ ID NO: 57503 - RNA, 19 nt, Artificial Sequence
  Description of Artificial Sequence: Synthetic oligonucleotide
uaguccgaccaccaaacug

SEQ ID NO: 57504 - RNA, 19 nt, Artificial Sequence
  Description of Artificial Sequence: Synthetic oligonucleotide
aacccuaccacaggauaac

SEQ ID NO: 57505 - RNA, 19 nt, Artificial Sequence
  Description of Artificial Sequence: Synthetic oligonucleotide
ugauaguccgaccaccaaa

SEQ ID NO: 57506 - RNA, 19 nt, Artificial Sequence
  Description of Artificial Sequence: Synthetic oligonucleotide
aaaauggcuuaaggguugg

SEQ ID NO: 57507 - RNA, 19 nt, Artificial Sequence
  Description of Artificial Sequence: Synthetic oligonucleotide
aaguacaguguacguaaga

SEQ ID NO: 57508 - RNA, 19 nt, Artificial Sequence
  Description of Artificial Sequence: Synthetic oligonucleotide
auuaaacugacaguaguau

SEQ ID NO: 57509 - RNA, 19 nt, Artificial Sequence
  Description of Artificial Sequence: Synthetic oligonucleotide
auaaagaacugacucugaa

SEQ ID NO: 57510 - RNA, 19 nt, Artificial Sequence
  Description of Artificial Sequence: Synthetic oligonucleotide
uucaacuaccugcggagca

SEQ ID NO: 57511 - RNA, 19 nt, Artificial Sequence
  Description of Artificial Sequence: Synthetic oligonucleotide
guuagcgucgcaugugucc

SEQ ID NO: 57512 - RNA, 19 nt, Artificial Sequence
  Description of Artificial Sequence: Synthetic oligonucleotide
ugaggguuucgucuggaga

SEQ ID NO: 57513 - RNA, 19 nt, Artificial Sequence
  Description of Artificial Sequence: Synthetic oligonucleotide
aaacagggcaaaacccuac

SEQ ID NO: 57514 - RNA, 19 nt, Artificial Sequence
  Description of Artificial Sequence: Synthetic oligonucleotide
ugaucagugaugguguacu

SEQ ID NO: 57515 - RNA, 19 nt, Artificial Sequence
  Description of Artificial Sequence: Synthetic oligonucleotide
uuaaacugacaguaguauu

SEQ ID NO: 57516 - RNA, 19 nt, Artificial Sequence
  Description of Artificial Sequence: Synthetic oligonucleotide
cauuacauggagagcccgg

SEQ ID NO: 57517 - RNA, 19 nt, Artificial Sequence
  Description of Artificial Sequence: Synthetic oligonucleotide
ucccauaagcaguacugcc

SEQ ID NO: 57518 - RNA, 19 nt, Artificial Sequence
  Description of Artificial Sequence: Synthetic oligonucleotide
accaccaaacugcuuguuc

SEQ ID NO: 57519 - RNA, 19 nt, Artificial Sequence
  Description of Artificial Sequence: Synthetic oligonucleotide
ugauaacucucccggggcc

SEQ ID NO: 57520 - RNA, 19 nt, Artificial Sequence
  Description of Artificial Sequence: Synthetic oligonucleotide
gauaguccgaccaccaaac

SEQ ID NO: 57521 - RNA, 19 nt, Artificial Sequence
  Description of Artificial Sequence: Synthetic oligonucleotide
uggagugaaguuuucccac

SEQ ID NO: 57522 - RNA, 19 nt, Artificial Sequence
  Description of Artificial Sequence: Synthetic oligonucleotide
uuucauuaagagcgggaaa

SEQ ID NO: 57523 - RNA, 19 nt, Artificial Sequence
  Description of Artificial Sequence: Synthetic oligonucleotide
ucgcaugugucccauuuga

SEQ ID NO: 57524 - RNA, 19 nt, Artificial Sequence
  Description of Artificial Sequence: Synthetic oligonucleotide
agagcuagcacaggugcac

SEQ ID NO: 57525 - RNA, 19 nt, Artificial Sequence
  Description of Artificial Sequence: Synthetic oligonucleotide
uggcuuaaggguuggaaaa

SEQ ID NO: 57526 - RNA, 19 nt, Artificial Sequence
  Description of Artificial Sequence: Synthetic oligonucleotide
guaauaugagagacuuugg

SEQ ID NO: 57527 - RNA, 19 nt, Artificial Sequence
  Description of Artificial Sequence: Synthetic oligonucleotide
accgcaugaaaacaucaca

SEQ ID NO: 57528 - RNA, 19 nt, Artificial Sequence
  Description of Artificial Sequence: Synthetic oligonucleotide
uugacuuggacugcacugc

SEQ ID NO: 57529 - RNA, 19 nt, Artificial Sequence
  Description of Artificial Sequence: Synthetic oligonucleotide
acuaaucugcaccgcauga

SEQ ID NO: 57530 - RNA, 19 nt, Artificial Sequence
  Description of Artificial Sequence: Synthetic oligonucleotide
cauggcauaacuccuuauc

SEQ ID NO: 57531 - RNA, 19 nt, Artificial Sequence
  Description of Artificial Sequence: Synthetic oligonucleotide
caguguacguaagaaauac

SEQ ID NO: 57532 - RNA, 19 nt, Artificial Sequence
  Description of Artificial Sequence: Synthetic oligonucleotide
uauccaauguugagguggu

SEQ ID NO: 57533 - RNA, 19 nt, Artificial Sequence
  Description of Artificial Sequence: Synthetic oligonucleotide
ucagccuagcuagaggacc

SEQ ID NO: 57534 - RNA, 19 nt, Artificial Sequence
  Description of Artificial Sequence: Synthetic oligonucleotide
acugacaguaguauuagau

SEQ ID NO: 57535 - RNA, 19 nt, Artificial Sequence
  Description of Artificial Sequence: Synthetic oligonucleotide
cuuuggauuacuacuugga

SEQ ID NO: 57536 - RNA, 19 nt, Artificial Sequence
  Description of Artificial Sequence: Synthetic oligonucleotide
ugcaguuagcgucgcaugu

SEQ ID NO: 57537 - RNA, 19 nt, Artificial Sequence
  Description of Artificial Sequence: Synthetic oligonucleotide
cagcacucaucuuacacug

SEQ ID NO: 57538 - RNA, 19 nt, Artificial Sequence
  Description of Artificial Sequence: Synthetic oligonucleotide
ugcggagcaaauuacucau

SEQ ID NO: 57539 - RNA, 19 nt, Artificial Sequence
  Description of Artificial Sequence: Synthetic oligonucleotide
aucucuagugguuaccaau

SEQ ID NO: 57540 - RNA, 19 nt, Artificial Sequence
  Description of Artificial Sequence: Synthetic oligonucleotide
acacucaagaaguuacuaa

SEQ ID NO: 57541 - RNA, 19 nt, Artificial Sequence
  Description of Artificial Sequence: Synthetic oligonucleotide
acucaucucuagugguuac

SEQ ID NO: 57542 - RNA, 19 nt, Artificial Sequence
  Description of Artificial Sequence: Synthetic oligonucleotide
augauuuaaagcaguguca

SEQ ID NO: 57543 - RNA, 19 nt, Artificial Sequence
  Description of Artificial Sequence: Synthetic oligonucleotide
uuucaccuagcaauuuaaa

SEQ ID NO: 57544 - RNA, 19 nt, Artificial Sequence
  Description of Artificial Sequence: Synthetic oligonucleotide
uuagcgucgcauguguccc

SEQ ID NO: 57545 - RNA, 19 nt, Artificial Sequence
  Description of Artificial Sequence: Synthetic oligonucleotide
ugcccguuaaugcacacuu

SEQ ID NO: 57546 - RNA, 19 nt, Artificial Sequence
  Description of Artificial Sequence: Synthetic oligonucleotide
ccaguuugcaccccaaacg

SEQ ID NO: 57547 - RNA, 19 nt, Artificial Sequence
  Description of Artificial Sequence: Synthetic oligonucleotide
uccgacccaugccagacca

SEQ ID NO: 57548 - RNA, 19 nt, Artificial Sequence
  Description of Artificial Sequence: Synthetic oligonucleotide
cuagcuagaggaccaucag

SEQ ID NO: 57549 - RNA, 19 nt, Artificial Sequence
  Description of Artificial Sequence: Synthetic oligonucleotide
agccauuaacaugaucagg

SEQ ID NO: 57550 - RNA, 19 nt, Artificial Sequence
  Description of Artificial Sequence: Synthetic oligonucleotide
gacacggguuuucuuuucc

SEQ ID NO: 57551 - RNA, 19 nt, Artificial Sequence
  Description of Artificial Sequence: Synthetic oligonucleotide
gcucacgucacauuaugag

SEQ ID NO: 57552 - RNA, 19 nt, Artificial Sequence
  Description of Artificial Sequence: Synthetic oligonucleotide
agaccuguccaaauauuuc

SEQ ID NO: 57553 - RNA, 19 nt, Artificial Sequence
  Description of Artificial Sequence: Synthetic oligonucleotide
ugcacacuuguguaugccu

SEQ ID NO: 57554 - RNA, 19 nt, Artificial Sequence
  Description of Artificial Sequence: Synthetic oligonucleotide
aguucaucgagagccaagu

SEQ ID NO: 57555 - RNA, 19 nt, Artificial Sequence
  Description of Artificial Sequence: Synthetic oligonucleotide
aguuuguaaugggacacug

SEQ ID NO: 57556 - RNA, 19 nt, Artificial Sequence
  Description of Artificial Sequence: Synthetic oligonucleotide
guuaccaaugaucagugau

SEQ ID NO: 57557 - RNA, 19 nt, Artificial Sequence
  Description of Artificial Sequence: Synthetic oligonucleotide
aacauggggcacauaauaa

SEQ ID NO: 57558 - RNA, 19 nt, Artificial Sequence
  Description of Artificial Sequence: Synthetic oligonucleotide
uggcucacgucacauuaug

SEQ ID NO: 57559 - RNA, 19 nt, Artificial Sequence
  Description of Artificial Sequence: Synthetic oligonucleotide
auagguugcggcggucucc

SEQ ID NO: 57560 - RNA, 19 nt, Artificial Sequence
  Description of Artificial Sequence: Synthetic oligonucleotide
aagauguauggaagaacca

SEQ ID NO: 57561 - RNA, 19 nt, Artificial Sequence
  Description of Artificial Sequence: Synthetic oligonucleotide
uccacugcgaagacccugu

SEQ ID NO: 57562 - RNA, 19 nt, Artificial Sequence
  Description of Artificial Sequence: Synthetic oligonucleotide
uucccauaagcaguacugc

SEQ ID NO: 57563 - RNA, 19 nt, Artificial Sequence
  Description of Artificial Sequence: Synthetic oligonucleotide
cuugaaugcacacugcgcu

SEQ ID NO: 57564 - RNA, 19 nt, Artificial Sequence
  Description of Artificial Sequence: Synthetic oligonucleotide
cauuaaacugacaguagua

SEQ ID NO: 57565 - RNA, 19 nt, Artificial Sequence
  Description of Artificial Sequence: Synthetic oligonucleotide
cagagugauaguccgacca

SEQ ID NO: 57566 - RNA, 19 nt, Artificial Sequence
  Description of Artificial Sequence: Synthetic oligonucleotide
uacuacuuggagugugaac

SEQ ID NO: 57567 - RNA, 19 nt, Artificial Sequence
  Description of Artificial Sequence: Synthetic oligonucleotide
gaaaaggauuuguaagggu

SEQ ID NO: 57568 - RNA, 19 nt, Artificial Sequence
  Description of Artificial Sequence: Synthetic oligonucleotide
agggugcuccgacccaugc

SEQ ID NO: 57569 - RNA, 19 nt, Artificial Sequence
  Description of Artificial Sequence: Synthetic oligonucleotide
cacugcgcuguacagcagg

SEQ ID NO: 57570 - RNA, 19 nt, Artificial Sequence
  Description of Artificial Sequence: Synthetic oligonucleotide
cacacugcgcuguacagca

SEQ ID NO: 57571 - RNA, 19 nt, Artificial Sequence
  Description of Artificial Sequence: Synthetic oligonucleotide
gagugauaguccgaccacc

SEQ ID NO: 57572 - RNA, 19 nt, Artificial Sequence
  Description of Artificial Sequence: Synthetic oligonucleotide
uuguuaaguuuguccccag

SEQ ID NO: 57573 - RNA, 19 nt, Artificial Sequence
  Description of Artificial Sequence: Synthetic oligonucleotide
uuacaaggagagaucccau

SEQ ID NO: 57574 - RNA, 19 nt, Artificial Sequence
  Description of Artificial Sequence: Synthetic oligonucleotide
uuucaacuaccugcggagc

SEQ ID NO: 57575 - RNA, 19 nt, Artificial Sequence
  Description of Artificial Sequence: Synthetic oligonucleotide
cauuaugagugauugugua

SEQ ID NO: 57576 - RNA, 19 nt, Artificial Sequence
  Description of Artificial Sequence: Synthetic oligonucleotide
agacacggguuuucuuuuc

SEQ ID NO: 57577 - RNA, 19 nt, Artificial Sequence
  Description of Artificial Sequence: Synthetic oligonucleotide
guuauccugaguaugucaa

SEQ ID NO: 57578 - RNA, 19 nt, Artificial Sequence
  Description of Artificial Sequence: Synthetic oligonucleotide
aaggaauaagcaggcuaca

SEQ ID NO: 57579 - RNA, 19 nt, Artificial Sequence
  Description of Artificial Sequence: Synthetic oligonucleotide
cacaccaauauuugggaaa

SEQ ID NO: 57580 - RNA, 19 nt, Artificial Sequence
  Description of Artificial Sequence: Synthetic oligonucleotide
gacaguaguauuagaucuc

SEQ ID NO: 57581 - RNA, 19 nt, Artificial Sequence
  Description of Artificial Sequence: Synthetic oligonucleotide
agcgauaagccuguuaaua

SEQ ID NO: 57582 - RNA, 19 nt, Artificial Sequence
  Description of Artificial Sequence: Synthetic oligonucleotide
ucucuguuauccugaguau

SEQ ID NO: 57583 - RNA, 19 nt, Artificial Sequence
  Description of Artificial Sequence: Synthetic oligonucleotide
auugucaaccuucccuaaa

SEQ ID NO: 57584 - RNA, 19 nt, Artificial Sequence
  Description of Artificial Sequence: Synthetic oligonucleotide
ucgucuggagaugaugacu

SEQ ID NO: 57585 - RNA, 19 nt, Artificial Sequence
  Description of Artificial Sequence: Synthetic oligonucleotide
uucagccuagcuagaggac

SEQ ID NO: 57586 - RNA, 19 nt, Artificial Sequence
  Description of Artificial Sequence: Synthetic oligonucleotide
uucuuaugcguuucaccau

SEQ ID NO: 57587 - RNA, 19 nt, Artificial Sequence
  Description of Artificial Sequence: Synthetic oligonucleotide
ggacauuaaacugacagua

SEQ ID NO: 57588 - RNA, 19 nt, Artificial Sequence
  Description of Artificial Sequence: Synthetic oligonucleotide
uucuaagacuuugugccau

SEQ ID NO: 57589 - RNA, 19 nt, Artificial Sequence
  Description of Artificial Sequence: Synthetic oligonucleotide
uucgucuggagaugaugac

SEQ ID NO: 57590 - RNA, 19 nt, Artificial Sequence
  Description of Artificial Sequence: Synthetic oligonucleotide
uaccugcggagcaaauuac

SEQ ID NO: 57591 - RNA, 19 nt, Artificial Sequence
  Description of Artificial Sequence: Synthetic oligonucleotide
gccauugcaaaucccuucc

SEQ ID NO: 57592 - RNA, 19 nt, Artificial Sequence
  Description of Artificial Sequence: Synthetic oligonucleotide
acuucuaauuuaagugaug

SEQ ID NO: 57593 - RNA, 19 nt, Artificial Sequence
  Description of Artificial Sequence: Synthetic oligonucleotide
ccaauuauuuauaucagcu

SEQ ID NO: 57594 - RNA, 19 nt, Artificial Sequence
  Description of Artificial Sequence: Synthetic oligonucleotide
uuaugcguuucaccaugaa

SEQ ID NO: 57595 - RNA, 19 nt, Artificial Sequence
  Description of Artificial Sequence: Synthetic oligonucleotide
gacuuuaagcauauggaau

SEQ ID NO: 57596 - RNA, 19 nt, Artificial Sequence
  Description of Artificial Sequence: Synthetic oligonucleotide
gaaugauuuaaagcagugu

SEQ ID NO: 57597 - RNA, 19 nt, Artificial Sequence
  Description of Artificial Sequence: Synthetic oligonucleotide
uucaugcagcaaacauggc

SEQ ID NO: 57598 - RNA, 19 nt, Artificial Sequence
  Description of Artificial Sequence: Synthetic oligonucleotide
uuaacaugaucagggcaau

SEQ ID NO: 57599 - RNA, 19 nt, Artificial Sequence
  Description of Artificial Sequence: Synthetic oligonucleotide
gauaagccuguuaauacau

SEQ ID NO: 57600 - RNA, 19 nt, Artificial Sequence
  Description of Artificial Sequence: Synthetic oligonucleotide
ccuuagacucuuaagaaaa

SEQ ID NO: 57601 - RNA, 19 nt, Artificial Sequence
  Description of Artificial Sequence: Synthetic oligonucleotide
auauuucaaugaagacacg

SEQ ID NO: 57602 - RNA, 19 nt, Artificial Sequence
  Description of Artificial Sequence: Synthetic oligonucleotide
gagaaguacaguguacgua

SEQ ID NO: 57603 - RNA, 19 nt, Artificial Sequence
  Description of Artificial Sequence: Synthetic oligonucleotide
ucaccacguacuguacaag

SEQ ID NO: 57604 - RNA, 19 nt, Artificial Sequence
  Description of Artificial Sequence: Synthetic oligonucleotide
cucacagauagaaccugca

SEQ ID NO: 57605 - RNA, 19 nt, Artificial Sequence
  Description of Artificial Sequence: Synthetic oligonucleotide
gucauuacauggagagccc

SEQ ID NO: 57606 - RNA, 19 nt, Artificial Sequence
  Description of Artificial Sequence: Synthetic oligonucleotide
cauguggagauccaaaguu

SEQ ID NO: 57607 - RNA, 19 nt, Artificial Sequence
  Description of Artificial Sequence: Synthetic oligonucleotide
uagucuaucugggguuuca

SEQ ID NO: 57608 - RNA, 19 nt, Artificial Sequence
  Description of Artificial Sequence: Synthetic oligonucleotide
agguuguauugauucuuau

SEQ ID NO: 57609 - RNA, 19 nt, Artificial Sequence
  Description of Artificial Sequence: Synthetic oligonucleotide
cugcgaagacccuguacug

SEQ ID NO: 57610 - RNA, 19 nt, Artificial Sequence
  Description of Artificial Sequence: Synthetic oligonucleotide
caguaguauuagaucucac

SEQ ID NO: 57611 - RNA, 19 nt, Artificial Sequence
  Description of Artificial Sequence: Synthetic oligonucleotide
gucaccacguacuguacaa

SEQ ID NO: 57612 - RNA, 19 nt, Artificial Sequence
  Description of Artificial Sequence: Synthetic oligonucleotide
cagugaugguguacugaag

SEQ ID NO: 57613 - RNA, 19 nt, Artificial Sequence
  Description of Artificial Sequence: Synthetic oligonucleotide
auaguccgaccaccaaacu

SEQ ID NO: 57614 - RNA, 19 nt, Artificial Sequence
  Description of Artificial Sequence: Synthetic oligonucleotide
ggugcuccgacccaugcca

SEQ ID NO: 57615 - RNA, 19 nt, Artificial Sequence
  Description of Artificial Sequence: Synthetic oligonucleotide
uuccacugcgaagacccug

SEQ ID NO: 57616 - RNA, 19 nt, Artificial Sequence
  Description of Artificial Sequence: Synthetic oligonucleotide
ggagugugaacacugcaaa

SEQ ID NO: 57617 - RNA, 19 nt, Artificial Sequence
  Description of Artificial Sequence: Synthetic oligonucleotide
aguguacguaagaaauaca

SEQ ID NO: 57618 - RNA, 19 nt, Artificial Sequence
  Description of Artificial Sequence: Synthetic oligonucleotide
gcacauaauaauauucuaa

SEQ ID NO: 57619 - RNA, 19 nt, Artificial Sequence
  Description of Artificial Sequence: Synthetic oligonucleotide
auagucuaucugggguuuc

SEQ ID NO: 57620 - RNA, 19 nt, Artificial Sequence
  Description of Artificial Sequence: Synthetic oligonucleotide
auuugugauaaaaguucau

SEQ ID NO: 57621 - RNA, 19 nt, Artificial Sequence
  Description of Artificial Sequence: Synthetic oligonucleotide
auaacucucccggggccuc

SEQ ID NO: 57622 - RNA, 19 nt, Artificial Sequence
  Description of Artificial Sequence: Synthetic oligonucleotide
gugaggguuucgucuggag

SEQ ID NO: 57623 - RNA, 19 nt, Artificial Sequence
  Description of Artificial Sequence: Synthetic oligonucleotide
uuguuggguuagaauuaau

SEQ ID NO: 57624 - RNA, 19 nt, Artificial Sequence
  Description of Artificial Sequence: Synthetic oligonucleotide
cuuaugcguuucaccauga

SEQ ID NO: 57625 - RNA, 19 nt, Artificial Sequence
  Description of Artificial Sequence: Synthetic oligonucleotide
uaccuacuuguuggguuag

SEQ ID NO: 57626 - RNA, 19 nt, Artificial Sequence
  Description of Artificial Sequence: Synthetic oligonucleotide
gacuucuaauuuaagugau

SEQ ID NO: 57627 - RNA, 19 nt, Artificial Sequence
  Description of Artificial Sequence: Synthetic oligonucleotide
uggugugcacucuguucca

SEQ ID NO: 57628 - RNA, 19 nt, Artificial Sequence
  Description of Artificial Sequence: Synthetic oligonucleotide
cagacguugcucuugcaua

SEQ ID NO: 57629 - RNA, 19 nt, Artificial Sequence
  Description of Artificial Sequence: Synthetic oligonucleotide
uagcgauaagccuguuaau

SEQ ID NO: 57630 - RNA, 19 nt, Artificial Sequence
  Description of Artificial Sequence: Synthetic oligonucleotide
acguugcucuugcauacau

SEQ ID NO: 57631 - RNA, 19 nt, Artificial Sequence
  Description of Artificial Sequence: Synthetic oligonucleotide
guugaaggggccauuuucu

SEQ ID NO: 57632 - RNA, 19 nt, Artificial Sequence
  Description of Artificial Sequence: Synthetic oligonucleotide
gcuguugacuucuaauuua

SEQ ID NO: 57633 - RNA, 19 nt, Artificial Sequence
  Description of Artificial Sequence: Synthetic oligonucleotide
cucuagugguuaccaauga

SEQ ID NO: 57634 - RNA, 19 nt, Artificial Sequence
  Description of Artificial Sequence: Synthetic oligonucleotide
aguuagcgucgcauguguc

SEQ ID NO: 57635 - RNA, 19 nt, Artificial Sequence
  Description of Artificial Sequence: Synthetic oligonucleotide
guagccucugaagucauua

SEQ ID NO: 57636 - RNA, 19 nt, Artificial Sequence
  Description of Artificial Sequence: Synthetic oligonucleotide
cacugcgaagacccuguac

SEQ ID NO: 57637 - RNA, 19 nt, Artificial Sequence
  Description of Artificial Sequence: Synthetic oligonucleotide
gguugcggcggucuccucc

SEQ ID NO: 57638 - RNA, 19 nt, Artificial Sequence
  Description of Artificial Sequence: Synthetic oligonucleotide
gcaggcuacaaaucauuuc

SEQ ID NO: 57639 - RNA, 19 nt, Artificial Sequence
  Description of Artificial Sequence: Synthetic oligonucleotide
gccugugugaagcauuaca

SEQ ID NO: 57640 - RNA, 19 nt, Artificial Sequence
  Description of Artificial Sequence: Synthetic oligonucleotide
guucaucgagagccaaguc

SEQ ID NO: 57641 - RNA, 19 nt, Artificial Sequence
  Description of Artificial Sequence: Synthetic oligonucleotide
cauagaguugcggacuaaa

SEQ ID NO: 57642 - RNA, 19 nt, Artificial Sequence
  Description of Artificial Sequence: Synthetic oligonucleotide
aacugccugugugaagcau

SEQ ID NO: 57643 - RNA, 19 nt, Artificial Sequence
  Description of Artificial Sequence: Synthetic oligonucleotide
cuguuauccugaguauguc

SEQ ID NO: 57644 - RNA, 19 nt, Artificial Sequence
  Description of Artificial Sequence: Synthetic oligonucleotide
cauugcccguuaaugcaca

SEQ ID NO: 57645 - RNA, 19 nt, Artificial Sequence
  Description of Artificial Sequence: Synthetic oligonucleotide
cuaucugggguuucaugua

SEQ ID NO: 57646 - RNA, 19 nt, Artificial Sequence
  Description of Artificial Sequence: Synthetic oligonucleotide
cguuucaccaugaaacuga

SEQ ID NO: 57647 - RNA, 19 nt, Artificial Sequence
  Description of Artificial Sequence: Synthetic oligonucleotide
cagccuagcuagaggacca

SEQ ID NO: 57648 - RNA, 19 nt, Artificial Sequence
  Description of Artificial Sequence: Synthetic oligonucleotide
ccuaccaagggaugaauaa

SEQ ID NO: 57649 - RNA, 19 nt, Artificial Sequence
  Description of Artificial Sequence: Synthetic oligonucleotide
guauugauucuuaugcguu

SEQ ID NO: 57650 - RNA, 19 nt, Artificial Sequence
  Description of Artificial Sequence: Synthetic oligonucleotide
ccugcggagcaaauuacuc

SEQ ID NO: 57651 - RNA, 19 nt, Artificial Sequence
  Description of Artificial Sequence: Synthetic oligonucleotide
gaauagguugcggcggucu

SEQ ID NO: 57652 - RNA, 19 nt, Artificial Sequence
  Description of Artificial Sequence: Synthetic oligonucleotide
uccccagacguugcucuug

SEQ ID NO: 57653 - RNA, 19 nt, Artificial Sequence
  Description of Artificial Sequence: Synthetic oligonucleotide
gagugugaacacugcaaau

SEQ ID NO: 57654 - RNA, 19 nt, Artificial Sequence
  Description of Artificial Sequence: Synthetic oligonucleotide
ugcuccgacccaugccaga

SEQ ID NO: 57655 - RNA, 19 nt, Artificial Sequence
  Description of Artificial Sequence: Synthetic oligonucleotide
cagcaucuacuaaucugca

SEQ ID NO: 57656 - RNA, 19 nt, Artificial Sequence
  Description of Artificial Sequence: Synthetic oligonucleotide
ggaaacgaaaaggauuugu

SEQ ID NO: 57657 - RNA, 19 nt, Artificial Sequence
  Description of Artificial Sequence: Synthetic oligonucleotide
ucauagaguugcggacuaa

SEQ ID NO: 57658 - RNA, 19 nt, Artificial Sequence
  Description of Artificial Sequence: Synthetic oligonucleotide
gcaugugucccauuugaua

SEQ ID NO: 57659 - RNA, 19 nt, Artificial Sequence
  Description of Artificial Sequence: Synthetic oligonucleotide
acugugcuaucuaccuuca

SEQ ID NO: 57660 - RNA, 19 nt, Artificial Sequence
  Description of Artificial Sequence: Synthetic oligonucleotide
cagagcuagcacaggugca

SEQ ID NO: 57661 - RNA, 19 nt, Artificial Sequence
  Description of Artificial Sequence: Synthetic oligonucleotide
ccguuaaugcacacuugug

SEQ ID NO: 57662 - RNA, 19 nt, Artificial Sequence
  Description of Artificial Sequence: Synthetic oligonucleotide
ugaauagguugcggcgguc

SEQ ID NO: 57663 - RNA, 19 nt, Artificial Sequence
  Description of Artificial Sequence: Synthetic oligonucleotide
guacugcccaccaguuagc

SEQ ID NO: 57664 - RNA, 19 nt, Artificial Sequence
  Description of Artificial Sequence: Synthetic oligonucleotide
acugccugugugaagcauu

SEQ ID NO: 57665 - RNA, 19 nt, Artificial Sequence
  Description of Artificial Sequence: Synthetic oligonucleotide
gcagagugauaguccgacc

SEQ ID NO: 57666 - RNA, 19 nt, Artificial Sequence
  Description of Artificial Sequence: Synthetic oligonucleotide
caguaauaaugccaguauu

SEQ ID NO: 57667 - RNA, 19 nt, Artificial Sequence
  Description of Artificial Sequence: Synthetic oligonucleotide
uaacaugaucagggcaauu

SEQ ID NO: 57668 - RNA, 19 nt, Artificial Sequence
  Description of Artificial Sequence: Synthetic oligonucleotide
ucccuaaauuugccuccua

SEQ ID NO: 57669 - RNA, 19 nt, Artificial Sequence
  Description of Artificial Sequence: Synthetic oligonucleotide
caucucuagugguuaccaa

SEQ ID NO: 57670 - RNA, 19 nt, Artificial Sequence
  Description of Artificial Sequence: Synthetic oligonucleotide
guuuguaaugggacacugu

SEQ ID NO: 57671 - RNA, 19 nt, Artificial Sequence
  Description of Artificial Sequence: Synthetic oligonucleotide
gcaguuagcgucgcaugug

SEQ ID NO: 57672 - RNA, 19 nt, Artificial Sequence
  Description of Artificial Sequence: Synthetic oligonucleotide
uagcgucgcauguguccca

SEQ ID NO: 57673 - RNA, 19 nt, Artificial Sequence
  Description of Artificial Sequence: Synthetic oligonucleotide
cgauaagccuguuaauaca

SEQ ID NO: 57674 - RNA, 19 nt, Artificial Sequence
  Description of Artificial Sequence: Synthetic oligonucleotide
gguuaccaaugaucaguga

SEQ ID NO: 57675 - RNA, 19 nt, Artificial Sequence
  Description of Artificial Sequence: Synthetic oligonucleotide
gacguugcucuugcauaca

SEQ ID NO: 57676 - RNA, 19 nt, Artificial Sequence
  Description of Artificial Sequence: Synthetic oligonucleotide
aacuaccugcggagcaaau

SEQ ID NO: 57677 - RNA, 19 nt, Artificial Sequence
  Description of Artificial Sequence: Synthetic oligonucleotide
caaaacccuaccacaggau

SEQ ID NO: 57678 - RNA, 19 nt, Artificial Sequence
  Description of Artificial Sequence: Synthetic oligonucleotide
caguuagcgucgcaugugu

SEQ ID NO: 57679 - RNA, 19 nt, Artificial Sequence
  Description of Artificial Sequence: Synthetic oligonucleotide
cugcagagugauaguccga

SEQ ID NO: 57680 - RNA, 19 nt, Artificial Sequence
  Description of Artificial Sequence: Synthetic oligonucleotide
gggugcuccgacccaugcc

SEQ ID NO: 57681 - RNA, 19 nt, Artificial Sequence
  Description of Artificial Sequence: Synthetic oligonucleotide
guugcggcggucuccuccu

SEQ ID NO: 57682 - RNA, 19 nt, Artificial Sequence
  Description of Artificial Sequence: Synthetic oligonucleotide
ugccugugugaagcauuac

SEQ ID NO: 57683 - RNA, 19 nt, Artificial Sequence
  Description of Artificial Sequence: Synthetic oligonucleotide
cugaauagguugcggcggu

SEQ ID NO: 57684 - RNA, 19 nt, Artificial Sequence
  Description of Artificial Sequence: Synthetic oligonucleotide
gccauaguucugaacagua

SEQ ID NO: 57685 - RNA, 19 nt, Artificial Sequence
  Description of Artificial Sequence: Synthetic oligonucleotide
ccauaguucugaacaguaa

SEQ ID NO: 57686 - RNA, 19 nt, Artificial Sequence
  Description of Artificial Sequence: Synthetic oligonucleotide
accuacuuguuggguuaga

SEQ ID NO: 57687 - RNA, 19 nt, Artificial Sequence
  Description of Artificial Sequence: Synthetic oligonucleotide
gugcuccgacccaugccag

SEQ ID NO: 57688 - RNA, 19 nt, Artificial Sequence
  Description of Artificial Sequence: Synthetic oligonucleotide
cacggguuuucuuuuccau

SEQ ID NO: 57689 - RNA, 19 nt, Artificial Sequence
  Description of Artificial Sequence: Synthetic oligonucleotide
cccguuaaugcacacuugu

SEQ ID NO: 57690 - RNA, 19 nt, Artificial Sequence
  Description of Artificial Sequence: Synthetic oligonucleotide
ggcucacgucacauuauga

SEQ ID NO: 57691 - RNA, 19 nt, Artificial Sequence
  Description of Artificial Sequence: Synthetic oligonucleotide
agcgucgcaugugucccau

SEQ ID NO: 57692 - RNA, 19 nt, Artificial Sequence
  Description of Artificial Sequence: Synthetic oligonucleotide
agguugcggcggucuccuc

SEQ ID NO: 57693 - RNA, 19 nt, Artificial Sequence
  Description of Artificial Sequence: Synthetic oligonucleotide
gcacaaguugaaggggcca

SEQ ID NO: 57694 - RNA, 19 nt, Artificial Sequence
  Description of Artificial Sequence: Synthetic oligonucleotide
acacugcgcuguacagcag

SEQ ID NO: 57695 - RNA, 19 nt, Artificial Sequence
  Description of Artificial Sequence: Synthetic oligonucleotide
caacuaccugcggagcaaa

SEQ ID NO: 57696 - RNA, 19 nt, Artificial Sequence
  Description of Artificial Sequence: Synthetic oligonucleotide
cacaaguugaaggggccau

SEQ ID NO: 57697 - RNA, 19 nt, Artificial Sequence
  Description of Artificial Sequence: Synthetic oligonucleotide
caggugcacuccuccaagu

SEQ ID NO: 57698 - RNA, 19 nt, Artificial Sequence
  Description of Artificial Sequence: Synthetic oligonucleotide
ccaaaguuauguccaacuu

SEQ ID NO: 57699 - RNA, 19 nt, Artificial Sequence
  Description of Artificial Sequence: Synthetic oligonucleotide
gugcacucuguuccagaau

SEQ ID NO: 57700 - RNA, 19 nt, Artificial Sequence
  Description of Artificial Sequence: Synthetic oligonucleotide
ccagacguugcucuugcau

SEQ ID NO: 57701 - RNA, 19 nt, Artificial Sequence
  Description of Artificial Sequence: Synthetic oligonucleotide
ccacacucaagaaguuacu

SEQ ID NO: 57702 - RNA, 19 nt, Artificial Sequence
  Description of Artificial Sequence: Synthetic oligonucleotide
gccuagcuagaggaccauc

SEQ ID NO: 57703 - RNA, 19 nt, Artificial Sequence
  Description of Artificial Sequence: Synthetic oligonucleotide
guccgaccaccaaacugcu

SEQ ID NO: 57704 - RNA, 19 nt, Artificial Sequence
  Description of Artificial Sequence: Synthetic oligonucleotide
cccuguacuggcacaaguu

SEQ ID NO: 57705 - RNA, 19 nt, Artificial Sequence
  Description of Artificial Sequence: Synthetic oligonucleotide
cagauagaaccugcacauu

SEQ ID NO: 57706 - RNA, 19 nt, Artificial Sequence
  Description of Artificial Sequence: Synthetic oligonucleotide
cccgccaaaauuggaauuu

SEQ ID NO: 57707 - RNA, 19 nt, Artificial Sequence
  Description of Artificial Sequence: Synthetic oligonucleotide
gguuucgucuggagaugau

SEQ ID NO: 57708 - RNA, 19 nt, Artificial Sequence
  Description of Artificial Sequence: Synthetic oligonucleotide
cgucgcaugugucccauuu

SEQ ID NO: 57709 - RNA, 19 nt, Artificial Sequence
  Description of Artificial Sequence: Synthetic oligonucleotide
ccccgccaaaauuggaauu

SEQ ID NO: 57710 - RNA, 19 nt, Artificial Sequence
  Description of Artificial Sequence: Synthetic oligonucleotide
ccgacccaugccagaccaa

SEQ ID NO: 57711 - RNA, 19 nt, Artificial Sequence
  Description of Artificial Sequence: Synthetic oligonucleotide
ccacugcgaagacccugua

SEQ ID NO: 57712 - RNA, 19 nt, Artificial Sequence
  Description of Artificial Sequence: Synthetic oligonucleotide
ccgccaaaauuggaauuuu

SEQ ID NO: 57713 - RNA, 19 nt, Artificial Sequence
  Description of Artificial Sequence: Synthetic oligonucleotide
gcgucgcaugugucccauu

SEQ ID NO: 57714 - RNA, 19 nt, Artificial Sequence
  Description of Artificial Sequence: Synthetic oligonucleotide
auagaaagcaccuagcuug

SEQ ID NO: 57715 - RNA, 19 nt, Artificial Sequence
  Description of Artificial Sequence: Synthetic oligonucleotide
aguagaucuccucacaccc

SEQ ID NO: 57716 - RNA, 19 nt, Artificial Sequence
  Description of Artificial Sequence: Synthetic oligonucleotide
agcauuacagccuaaggac

SEQ ID NO: 57717 - RNA, 19 nt, Artificial Sequence
  Description of Artificial Sequence: Synthetic oligonucleotide
aaucaaaugcuauugcacu

SEQ ID NO: 57718 - RNA, 19 nt, Artificial Sequence
  Description of Artificial Sequence: Synthetic oligonucleotide
ucuagaacuagguuccucg

SEQ ID NO: 57719 - RNA, 19 nt, Artificial Sequence
  Description of Artificial Sequence: Synthetic oligonucleotide
aacaaagggccuaucaugc

SEQ ID NO: 57720 - RNA, 19 nt, Artificial Sequence
  Description of Artificial Sequence: Synthetic oligonucleotide
aaucuaugaacuaacacug

SEQ ID NO: 57721 - RNA, 19 nt, Artificial Sequence
  Description of Artificial Sequence: Synthetic oligonucleotide
uuuaugaauagagagcuca

SEQ ID NO: 57722 - RNA, 19 nt, Artificial Sequence
  Description of Artificial Sequence: Synthetic oligonucleotide
ucuaugaacuaacacugcc

SEQ ID NO: 57723 - RNA, 19 nt, Artificial Sequence
  Description of Artificial Sequence: Synthetic oligonucleotide
uaaaucuaugaacuaacac

SEQ ID NO: 57724 - RNA, 19 nt, Artificial Sequence
  Description of Artificial Sequence: Synthetic oligonucleotide
uucaacuacacacaugcac

SEQ ID NO: 57725 - RNA, 19 nt, Artificial Sequence
  Description of Artificial Sequence: Synthetic oligonucleotide
uaugaacuaacacugccca

SEQ ID NO: 57726 - RNA, 19 nt, Artificial Sequence
  Description of Artificial Sequence: Synthetic oligonucleotide
uagucuagcaauuuucccc

SEQ ID NO: 57727 - RNA, 19 nt, Artificial Sequence
  Description of Artificial Sequence: Synthetic oligonucleotide
uccaguacaaccucagucc

SEQ ID NO: 57728 - RNA, 19 nt, Artificial Sequence
  Description of Artificial Sequence: Synthetic oligonucleotide
ugaacuaacacugcccagg

SEQ ID NO: 57729 - RNA, 19 nt, Artificial Sequence
  Description of Artificial Sequence: Synthetic oligonucleotide
uguguguaggcauuaguag

SEQ ID NO: 57730 - RNA, 19 nt, Artificial Sequence
  Description of Artificial Sequence: Synthetic oligonucleotide
agugacuaaaggaauacac

SEQ ID NO: 57731 - RNA, 19 nt, Artificial Sequence
  Description of Artificial Sequence: Synthetic oligonucleotide
uuacugacccacuaaaucu

SEQ ID NO: 57732 - RNA, 19 nt, Artificial Sequence
  Description of Artificial Sequence: Synthetic oligonucleotide
auucaauacauguucugag

SEQ ID NO: 57733 - RNA, 19 nt, Artificial Sequence
  Description of Artificial Sequence: Synthetic oligonucleotide
uuaguagauuccaugugcc

SEQ ID NO: 57734 - RNA, 19 nt, Artificial Sequence
  Description of Artificial Sequence: Synthetic oligonucleotide
cuuagucuagcaauuuucc

SEQ ID NO: 57735 - RNA, 19 nt, Artificial Sequence
  Description of Artificial Sequence: Synthetic oligonucleotide
ucuagccugauuaacuggc

SEQ ID NO: 57736 - RNA, 19 nt, Artificial Sequence
  Description of Artificial Sequence: Synthetic oligonucleotide
ugcguaaguugauuuaagg

SEQ ID NO: 57737 - RNA, 19 nt, Artificial Sequence
  Description of Artificial Sequence: Synthetic oligonucleotide
uucaacuuaaggguggucc

SEQ ID NO: 57738 - RNA, 19 nt, Artificial Sequence
  Description of Artificial Sequence: Synthetic oligonucleotide
gaaucuaucagacuugugu

SEQ ID NO: 57739 - RNA, 19 nt, Artificial Sequence
  Description of Artificial Sequence: Synthetic oligonucleotide
uggcauuuagccaacuagc

SEQ ID NO: 57740 - RNA, 19 nt, Artificial Sequence
  Description of Artificial Sequence: Synthetic oligonucleotide
gucagcaugguaaagugcg

SEQ ID NO: 57741 - RNA, 19 nt, Artificial Sequence
  Description of Artificial Sequence: Synthetic oligonucleotide
uccuauacucuucagugga

SEQ ID NO: 57742 - RNA, 19 nt, Artificial Sequence
  Description of Artificial Sequence: Synthetic oligonucleotide
cuaugaacuaacacugccc

SEQ ID NO: 57743 - RNA, 19 nt, Artificial Sequence
  Description of Artificial Sequence: Synthetic oligonucleotide
aacugguuagccaaaagcu

SEQ ID NO: 57744 - RNA, 19 nt, Artificial Sequence
  Description of Artificial Sequence: Synthetic oligonucleotide
auaauuacuuaggggagac

SEQ ID NO: 57745 - RNA, 19 nt, Artificial Sequence
  Description of Artificial Sequence: Synthetic oligonucleotide
acaaccucagucccagacc

SEQ ID NO: 57746 - RNA, 19 nt, Artificial Sequence
  Description of Artificial Sequence: Synthetic oligonucleotide
auaauauccugaaauaacu

SEQ ID NO: 57747 - RNA, 19 nt, Artificial Sequence
  Description of Artificial Sequence: Synthetic oligonucleotide
agcaccuagcuugaaagcc

SEQ ID NO: 57748 - RNA, 19 nt, Artificial Sequence
  Description of Artificial Sequence: Synthetic oligonucleotide
ugagagggaagacuggugu

SEQ ID NO: 57749 - RNA, 19 nt, Artificial Sequence
  Description of Artificial Sequence: Synthetic oligonucleotide
uuagccagcuaauuuaaaa

SEQ ID NO: 57750 - RNA, 19 nt, Artificial Sequence
  Description of Artificial Sequence: Synthetic oligonucleotide
acuuaggggagacauagga

SEQ ID NO: 57751 - RNA, 19 nt, Artificial Sequence
  Description of Artificial Sequence: Synthetic oligonucleotide
agagcauuacagccuaagg

SEQ ID NO: 57752 - RNA, 19 nt, Artificial Sequence
  Description of Artificial Sequence: Synthetic oligonucleotide
ugacccacuaaaucuauga

SEQ ID NO: 57753 - RNA, 19 nt, Artificial Sequence
  Description of Artificial Sequence: Synthetic oligonucleotide
uucgaauagcagcaggugu

SEQ ID NO: 57754 - RNA, 19 nt, Artificial Sequence
  Description of Artificial Sequence: Synthetic oligonucleotide
gagcauuacagccuaagga

SEQ ID NO: 57755 - RNA, 19 nt, Artificial Sequence
  Description of Artificial Sequence: Synthetic oligonucleotide
aaggacuacucaugcauca

SEQ ID NO: 57756 - RNA, 19 nt, Artificial Sequence
  Description of Artificial Sequence: Synthetic oligonucleotide
uuccuauacucuucagugg

SEQ ID NO: 57757 - RNA, 19 nt, Artificial Sequence
  Description of Artificial Sequence: Synthetic oligonucleotide
ugucgguacugcuaaaaug

SEQ ID NO: 57758 - RNA, 19 nt, Artificial Sequence
  Description of Artificial Sequence: Synthetic oligonucleotide
ucuggucuauucuuuggag

SEQ ID NO: 57759 - RNA, 19 nt, Artificial Sequence
  Description of Artificial Sequence: Synthetic oligonucleotide
acacaugcacccaaggagc

SEQ ID NO: 57760 - RNA, 19 nt, Artificial Sequence
  Description of Artificial Sequence: Synthetic oligonucleotide
agaacuagguuccucgacu

SEQ ID NO: 57761 - RNA, 19 nt, Artificial Sequence
  Description of Artificial Sequence: Synthetic oligonucleotide
ucaacuuaagggugguccc

SEQ ID NO: 57762 - RNA, 19 nt, Artificial Sequence
  Description of Artificial Sequence: Synthetic oligonucleotide
gacuacucaugcaucaggg

SEQ ID NO: 57763 - RNA, 19 nt, Artificial Sequence
  Description of Artificial Sequence: Synthetic oligonucleotide
aggguggucccauaauuac

SEQ ID NO: 57764 - RNA, 19 nt, Artificial Sequence
  Description of Artificial Sequence: Synthetic oligonucleotide
ugucuagccugauuaacug

SEQ ID NO: 57765 - RNA, 19 nt, Artificial Sequence
  Description of Artificial Sequence: Synthetic oligonucleotide
uguguaggcauuaguagau

SEQ ID NO: 57766 - RNA, 19 nt, Artificial Sequence
  Description of Artificial Sequence: Synthetic oligonucleotide
uuauuggcgagaucuuuug

SEQ ID NO: 57767 - RNA, 19 nt, Artificial Sequence
  Description of Artificial Sequence: Synthetic oligonucleotide
agucuagcaauuuucccca

SEQ ID NO: 57768 - RNA, 19 nt, Artificial Sequence
  Description of Artificial Sequence: Synthetic oligonucleotide
accuauuccuacuccacag

SEQ ID NO: 57769 - RNA, 19 nt, Artificial Sequence
  Description of Artificial Sequence: Synthetic oligonucleotide
cucgcuuacucuuccaggc

SEQ ID NO: 57770 - RNA, 19 nt, Artificial Sequence
  Description of Artificial Sequence: Synthetic oligonucleotide
aaacacuacccuaguuacc

SEQ ID NO: 57771 - RNA, 19 nt, Artificial Sequence
  Description of Artificial Sequence: Synthetic oligonucleotide
ugcugagugguuccaagug

SEQ ID NO: 57772 - RNA, 19 nt, Artificial Sequence
  Description of Artificial Sequence: Synthetic oligonucleotide
ugauuagaaugcugcuccg

SEQ ID NO: 57773 - RNA, 19 nt, Artificial Sequence
  Description of Artificial Sequence: Synthetic oligonucleotide
aucuccuaccuuucgagug

SEQ ID NO: 57774 - RNA, 19 nt, Artificial Sequence
  Description of Artificial Sequence: Synthetic oligonucleotide
uggucccauaauuacuuag

SEQ ID NO: 57775 - RNA, 19 nt, Artificial Sequence
  Description of Artificial Sequence: Synthetic oligonucleotide
agagcuaccugccuaggca

SEQ ID NO: 57776 - RNA, 19 nt, Artificial Sequence
  Description of Artificial Sequence: Synthetic oligonucleotide
cauuuagccaacuagcucu

SEQ ID NO: 57777 - RNA, 19 nt, Artificial Sequence
  Description of Artificial Sequence: Synthetic oligonucleotide
uuguagucucugaucauac

SEQ ID NO: 57778 - RNA, 19 nt, Artificial Sequence
  Description of Artificial Sequence: Synthetic oligonucleotide
agguuccucgacuuagaac

SEQ ID NO: 57779 - RNA, 19 nt, Artificial Sequence
  Description of Artificial Sequence: Synthetic oligonucleotide
guuauagaaagcaccuagc

SEQ ID NO: 57780 - RNA, 19 nt, Artificial Sequence
  Description of Artificial Sequence: Synthetic oligonucleotide
auaggagaaggacuacuca

SEQ ID NO: 57781 - RNA, 19 nt, Artificial Sequence
  Description of Artificial Sequence: Synthetic oligonucleotide
agaacccuguuccccauuc

SEQ ID NO: 57782 - RNA, 19 nt, Artificial Sequence
  Description of Artificial Sequence: Synthetic oligonucleotide
ugccaacuaguacaggaga

SEQ ID NO: 57783 - RNA, 19 nt, Artificial Sequence
  Description of Artificial Sequence: Synthetic oligonucleotide
aagaguaucuagccagcaa

SEQ ID NO: 57784 - RNA, 19 nt, Artificial Sequence
  Description of Artificial Sequence: Synthetic oligonucleotide
cccauaauuacuuagggga

SEQ ID NO: 57785 - RNA, 19 nt, Artificial Sequence
  Description of Artificial Sequence: Synthetic oligonucleotide
gguuccucgacuuagaacu

SEQ ID NO: 57786 - RNA, 19 nt, Artificial Sequence
  Description of Artificial Sequence: Synthetic oligonucleotide
cuugguugagguguugagg

SEQ ID NO: 57787 - RNA, 19 nt, Artificial Sequence
  Description of Artificial Sequence: Synthetic oligonucleotide
gaugguaucauuccguuuu

SEQ ID NO: 57788 - RNA, 19 nt, Artificial Sequence
  Description of Artificial Sequence: Synthetic oligonucleotide
caccuagacuccaaggggc

SEQ ID NO: 57789 - RNA, 19 nt, Artificial Sequence
  Description of Artificial Sequence: Synthetic oligonucleotide
ucgacuuagaacucagaua

SEQ ID NO: 57790 - RNA, 19 nt, Artificial Sequence
  Description of Artificial Sequence: Synthetic oligonucleotide
gcugguaacagaugugccg

SEQ ID NO: 57791 - RNA, 19 nt, Artificial Sequence
  Description of Artificial Sequence: Synthetic oligonucleotide
uaaggguggucccauaauu

SEQ ID NO: 57792 - RNA, 19 nt, Artificial Sequence
  Description of Artificial Sequence: Synthetic oligonucleotide
acaaagggccuaucaugcg

SEQ ID NO: 57793 - RNA, 19 nt, Artificial Sequence
  Description of Artificial Sequence: Synthetic oligonucleotide
gucuagccugauuaacugg

SEQ ID NO: 57794 - RNA, 19 nt, Artificial Sequence
  Description of Artificial Sequence: Synthetic oligonucleotide
augaccuauuccuacucca

SEQ ID NO: 57795 - RNA, 19 nt, Artificial Sequence
  Description of Artificial Sequence: Synthetic oligonucleotide
agaccuaauuuccuauacu

SEQ ID NO: 57796 - RNA, 19 nt, Artificial Sequence
  Description of Artificial Sequence: Synthetic oligonucleotide
ugugccuaccuacucgagu

SEQ ID NO: 57797 - RNA, 19 nt, Artificial Sequence
  Description of Artificial Sequence: Synthetic oligonucleotide
ggugaaggauaccagcucc

SEQ ID NO: 57798 - RNA, 19 nt, Artificial Sequence
  Description of Artificial Sequence: Synthetic oligonucleotide
uaaagugcgaggccuccac

SEQ ID NO: 57799 - RNA, 19 nt, Artificial Sequence
  Description of Artificial Sequence: Synthetic oligonucleotide
ugucccuaggggauuaaaa

SEQ ID NO: 57800 - RNA, 19 nt, Artificial Sequence
  Description of Artificial Sequence: Synthetic oligonucleotide
ugaccuauuccuacuccac

SEQ ID NO: 57801 - RNA, 19 nt, Artificial Sequence
  Description of Artificial Sequence: Synthetic oligonucleotide
ggcauuaguagauuccaug

SEQ ID NO: 57802 - RNA, 19 nt, Artificial Sequence
  Description of Artificial Sequence: Synthetic oligonucleotide
uccucgacuuagaacucag

SEQ ID NO: 57803 - RNA, 19 nt, Artificial Sequence
  Description of Artificial Sequence: Synthetic oligonucleotide
ugaugaagucggcuggagu

SEQ ID NO: 57804 - RNA, 19 nt, Artificial Sequence
  Description of Artificial Sequence: Synthetic oligonucleotide
aguuguucuagaacuaggu

SEQ ID NO: 57805 - RNA, 19 nt, Artificial Sequence
  Description of Artificial Sequence: Synthetic oligonucleotide
cagaccuaauuuccuauac

SEQ ID NO: 57806 - RNA, 19 nt, Artificial Sequence
  Description of Artificial Sequence: Synthetic oligonucleotide
uagaccugagaccacccaa

SEQ ID NO: 57807 - RNA, 19 nt, Artificial Sequence
  Description of Artificial Sequence: Synthetic oligonucleotide
uaccugccuaggcaagugg

SEQ ID NO: 57808 - RNA, 19 nt, Artificial Sequence
  Description of Artificial Sequence: Synthetic oligonucleotide
uacugacccacuaaaucua

SEQ ID NO: 57809 - RNA, 19 nt, Artificial Sequence
  Description of Artificial Sequence: Synthetic oligonucleotide
ggaggaugguaucauuccg

SEQ ID NO: 57810 - RNA, 19 nt, Artificial Sequence
  Description of Artificial Sequence: Synthetic oligonucleotide
uuaaggguggucccauaau

SEQ ID NO: 57811 - RNA, 19 nt, Artificial Sequence
  Description of Artificial Sequence: Synthetic oligonucleotide
aucaugcguaaguugauuu

SEQ ID NO: 57812 - RNA, 19 nt, Artificial Sequence
  Description of Artificial Sequence: Synthetic oligonucleotide
uuagaggguggaucucugc

SEQ ID NO: 57813 - RNA, 19 nt, Artificial Sequence
  Description of Artificial Sequence: Synthetic oligonucleotide
ugccuaggcaaguggaugu

SEQ ID NO: 57814 - RNA, 19 nt, Artificial Sequence
  Description of Artificial Sequence: Synthetic oligonucleotide
acugguuagccaaaagcug

SEQ ID NO: 57815 - RNA, 19 nt, Artificial Sequence
  Description of Artificial Sequence: Synthetic oligonucleotide
ggcuugauuagaaugcugc

SEQ ID NO: 57816 - RNA, 19 nt, Artificial Sequence
  Description of Artificial Sequence: Synthetic oligonucleotide
augaacuaacacugcccag

SEQ ID NO: 57817 - RNA, 19 nt, Artificial Sequence
  Description of Artificial Sequence: Synthetic oligonucleotide
ucaugcguaaguugauuua

SEQ ID NO: 57818 - RNA, 19 nt, Artificial Sequence
  Description of Artificial Sequence: Synthetic oligonucleotide
guaucauuccguuuuggua

SEQ ID NO: 57819 - RNA, 19 nt, Artificial Sequence
  Description of Artificial Sequence: Synthetic oligonucleotide
aggaauguagaagcggcug

SEQ ID NO: 57820 - RNA, 19 nt, Artificial Sequence
  Description of Artificial Sequence: Synthetic oligonucleotide
uguagucucugaucauacu

SEQ ID NO: 57821 - RNA, 19 nt, Artificial Sequence
  Description of Artificial Sequence: Synthetic oligonucleotide
agugcgaggccuccacagg

SEQ ID NO: 57822 - RNA, 19 nt, Artificial Sequence
  Description of Artificial Sequence: Synthetic oligonucleotide
cuagccugauuaacuggcc

SEQ ID NO: 57823 - RNA, 19 nt, Artificial Sequence
  Description of Artificial Sequence: Synthetic oligonucleotide
ccagcaacccaaaagcagc

SEQ ID NO: 57824 - RNA, 19 nt, Artificial Sequence
  Description of Artificial Sequence: Synthetic oligonucleotide
gaugaagucggcuggaguu

SEQ ID NO: 57825 - RNA, 19 nt, Artificial Sequence
  Description of Artificial Sequence: Synthetic oligonucleotide
gaagcggcugcaccuagac

SEQ ID NO: 57826 - RNA, 19 nt, Artificial Sequence
  Description of Artificial Sequence: Synthetic oligonucleotide
uuccuacuccacagaauca

SEQ ID NO: 57827 - RNA, 19 nt, Artificial Sequence
  Description of Artificial Sequence: Synthetic oligonucleotide
uacagccuaaggacgcaug

SEQ ID NO: 57828 - RNA, 19 nt, Artificial Sequence
  Description of Artificial Sequence: Synthetic oligonucleotide
uuccacggaacauuucgaa

SEQ ID NO: 57829 - RNA, 19 nt, Artificial Sequence
  Description of Artificial Sequence: Synthetic oligonucleotide
uaccuacucgaguugggac

SEQ ID NO: 57830 - RNA, 19 nt, Artificial Sequence
  Description of Artificial Sequence: Synthetic oligonucleotide
cagauacacaccugcuggc

SEQ ID NO: 57831 - RNA, 19 nt, Artificial Sequence
  Description of Artificial Sequence: Synthetic oligonucleotide
ucaauuuagccagcuaauu

SEQ ID NO: 57832 - RNA, 19 nt, Artificial Sequence
  Description of Artificial Sequence: Synthetic oligonucleotide
uggcuugauuagaaugcug

SEQ ID NO: 57833 - RNA, 19 nt, Artificial Sequence
  Description of Artificial Sequence: Synthetic oligonucleotide
agagaaugaugaagucggc

SEQ ID NO: 57834 - RNA, 19 nt, Artificial Sequence
  Description of Artificial Sequence: Synthetic oligonucleotide
gacuucaccuagcuggcuc

SEQ ID NO: 57835 - RNA, 19 nt, Artificial Sequence
  Description of Artificial Sequence: Synthetic oligonucleotide
ucagcaugguaaagugcga

SEQ ID NO: 57836 - RNA, 19 nt, Artificial Sequence
  Description of Artificial Sequence: Synthetic oligonucleotide
guugauuuaagggcuaucu

SEQ ID NO: 57837 - RNA, 19 nt, Artificial Sequence
  Description of Artificial Sequence: Synthetic oligonucleotide
gguacugcuaaaaugugga

SEQ ID NO: 57838 - RNA, 19 nt, Artificial Sequence
  Description of Artificial Sequence: Synthetic oligonucleotide
ugguaucauuccguuuugg

SEQ ID NO: 57839 - RNA, 19 nt, Artificial Sequence
  Description of Artificial Sequence: Synthetic oligonucleotide
guugggacgucuucugaac

SEQ ID NO: 57840 - RNA, 19 nt, Artificial Sequence
  Description of Artificial Sequence: Synthetic oligonucleotide
ccuaucaugcguaaguuga

SEQ ID NO: 57841 - RNA, 19 nt, Artificial Sequence
  Description of Artificial Sequence: Synthetic oligonucleotide
uccauccgauuccuccggg

SEQ ID NO: 57842 - RNA, 19 nt, Artificial Sequence
  Description of Artificial Sequence: Synthetic oligonucleotide
ccauaauuacuuaggggag

SEQ ID NO: 57843 - RNA, 19 nt, Artificial Sequence
  Description of Artificial Sequence: Synthetic oligonucleotide
acuucaccuagcuggcuca

SEQ ID NO: 57844 - RNA, 19 nt, Artificial Sequence
  Description of Artificial Sequence: Synthetic oligonucleotide
cacaugcacccaaggagcc

SEQ ID NO: 57845 - RNA, 19 nt, Artificial Sequence
  Description of Artificial Sequence: Synthetic oligonucleotide
agcucuuacaaagcagucu

SEQ ID NO: 57846 - RNA, 19 nt, Artificial Sequence
  Description of Artificial Sequence: Synthetic oligonucleotide
ggagaauagaggugauacc

SEQ ID NO: 57847 - RNA, 19 nt, Artificial Sequence
  Description of Artificial Sequence: Synthetic oligonucleotide
uccacggaacauuucgaau

SEQ ID NO: 57848 - RNA, 19 nt, Artificial Sequence
  Description of Artificial Sequence: Synthetic oligonucleotide
aaauuaccugagccauagu

SEQ ID NO: 57849 - RNA, 19 nt, Artificial Sequence
  Description of Artificial Sequence: Synthetic oligonucleotide
gcucaauuuagccagcuaa

SEQ ID NO: 57850 - RNA, 19 nt, Artificial Sequence
  Description of Artificial Sequence: Synthetic oligonucleotide
uggucccguacuuggagca

SEQ ID NO: 57851 - RNA, 19 nt, Artificial Sequence
  Description of Artificial Sequence: Synthetic oligonucleotide
uaucuuccuagcccuccca

SEQ ID NO: 57852 - RNA, 19 nt, Artificial Sequence
  Description of Artificial Sequence: Synthetic oligonucleotide
gguguugugcauucgccug

SEQ ID NO: 57853 - RNA, 19 nt, Artificial Sequence
  Description of Artificial Sequence: Synthetic oligonucleotide
augguaucauuccguuuug

SEQ ID NO: 57854 - RNA, 19 nt, Artificial Sequence
  Description of Artificial Sequence: Synthetic oligonucleotide
gcauuacagccuaaggacg

SEQ ID NO: 57855 - RNA, 19 nt, Artificial Sequence
  Description of Artificial Sequence: Synthetic oligonucleotide
uccaagugguggcagugau

SEQ ID NO: 57856 - RNA, 19 nt, Artificial Sequence
  Description of Artificial Sequence: Synthetic oligonucleotide
ccucagguuagcaaaacuc

SEQ ID NO: 57857 - RNA, 19 nt, Artificial Sequence
  Description of Artificial Sequence: Synthetic oligonucleotide
cauccgauuccuccgggug

SEQ ID NO: 57858 - RNA, 19 nt, Artificial Sequence
  Description of Artificial Sequence: Synthetic oligonucleotide
ccuccaagaaacugguuag

SEQ ID NO: 57859 - RNA, 19 nt, Artificial Sequence
  Description of Artificial Sequence: Synthetic oligonucleotide
gaauguagaagcggcugca

SEQ ID NO: 57860 - RNA, 19 nt, Artificial Sequence
  Description of Artificial Sequence: Synthetic oligonucleotide
aggcaucggccccuucugc

SEQ ID NO: 57861 - RNA, 19 nt, Artificial Sequence
  Description of Artificial Sequence: Synthetic oligonucleotide
uagguuccucgacuuagaa

SEQ ID NO: 57862 - RNA, 19 nt, Artificial Sequence
  Description of Artificial Sequence: Synthetic oligonucleotide
uccaugugccuaccuacuc

SEQ ID NO: 57863 - RNA, 19 nt, Artificial Sequence
  Description of Artificial Sequence: Synthetic oligonucleotide
aggaaucuaucagacuugu

SEQ ID NO: 57864 - RNA, 19 nt, Artificial Sequence
  Description of Artificial Sequence: Synthetic oligonucleotide
acaugcacccaaggagccc

SEQ ID NO: 57865 - RNA, 19 nt, Artificial Sequence
  Description of Artificial Sequence: Synthetic oligonucleotide
acgugucugguaucugaag

SEQ ID NO: 57866 - RNA, 19 nt, Artificial Sequence
  Description of Artificial Sequence: Synthetic oligonucleotide
cuaccuuucgagugcccug

SEQ ID NO: 57867 - RNA, 19 nt, Artificial Sequence
  Description of Artificial Sequence: Synthetic oligonucleotide
cauaauuacuuaggggaga

SEQ ID NO: 57868 - RNA, 19 nt, Artificial Sequence
  Description of Artificial Sequence: Synthetic oligonucleotide
gauuagaaugcugcuccga

SEQ ID NO: 57869 - RNA, 19 nt, Artificial Sequence
  Description of Artificial Sequence: Synthetic oligonucleotide
gcugccaacuaguacagga

SEQ ID NO: 57870 - RNA, 19 nt, Artificial Sequence
  Description of Artificial Sequence: Synthetic oligonucleotide
agcuuagucuagcaauuuu

SEQ ID NO: 57871 - RNA, 19 nt, Artificial Sequence
  Description of Artificial Sequence: Synthetic oligonucleotide
ugcuccgagagaccacugu

SEQ ID NO: 57872 - RNA, 19 nt, Artificial Sequence
  Description of Artificial Sequence: Synthetic oligonucleotide
acuacccuaguuaccaagu

SEQ ID NO: 57873 - RNA, 19 nt, Artificial Sequence
  Description of Artificial Sequence: Synthetic oligonucleotide
cuaggcaaguggaugugga

SEQ ID NO: 57874 - RNA, 19 nt, Artificial Sequence
  Description of Artificial Sequence: Synthetic oligonucleotide
cuauuccuacuccacagaa

SEQ ID NO: 57875 - RNA, 19 nt, Artificial Sequence
  Description of Artificial Sequence: Synthetic oligonucleotide
caugugccuaccuacucga

SEQ ID NO: 57876 - RNA, 19 nt, Artificial Sequence
  Description of Artificial Sequence: Synthetic oligonucleotide
aagugagagguugcagccu

SEQ ID NO: 57877 - RNA, 19 nt, Artificial Sequence
  Description of Artificial Sequence: Synthetic oligonucleotide
aaggguggucccauaauua

SEQ ID NO: 57878 - RNA, 19 nt, Artificial Sequence
  Description of Artificial Sequence: Synthetic oligonucleotide
auccgauuccuccggguga

SEQ ID NO: 57879 - RNA, 19 nt, Artificial Sequence
  Description of Artificial Sequence: Synthetic oligonucleotide
ugccuaccuacucgaguug

SEQ ID NO: 57880 - RNA, 19 nt, Artificial Sequence
  Description of Artificial Sequence: Synthetic oligonucleotide
ggcgagaucuuuugaaaca

SEQ ID NO: 57881 - RNA, 19 nt, Artificial Sequence
  Description of Artificial Sequence: Synthetic oligonucleotide
ccuaaggacgcaugcagac

SEQ ID NO: 57882 - RNA, 19 nt, Artificial Sequence
  Description of Artificial Sequence: Synthetic oligonucleotide
ugcuaacugaugugagcuc

SEQ ID NO: 57883 - RNA, 19 nt, Artificial Sequence
  Description of Artificial Sequence: Synthetic oligonucleotide
cuuaaggguggucccauaa

SEQ ID NO: 57884 - RNA, 19 nt, Artificial Sequence
  Description of Artificial Sequence: Synthetic oligonucleotide
cuccauccgauuccuccgg

SEQ ID NO: 57885 - RNA, 19 nt, Artificial Sequence
  Description of Artificial Sequence: Synthetic oligonucleotide
cagagcuaccugccuaggc

SEQ ID NO: 57886 - RNA, 19 nt, Artificial Sequence
  Description of Artificial Sequence: Synthetic oligonucleotide
ggagugacuaaaggaauac

SEQ ID NO: 57887 - RNA, 19 nt, Artificial Sequence
  Description of Artificial Sequence: Synthetic oligonucleotide
uuaacuggccuuggauccu

SEQ ID NO: 57888 - RNA, 19 nt, Artificial Sequence
  Description of Artificial Sequence: Synthetic oligonucleotide
aaagggccuaucaugcgua

SEQ ID NO: 57889 - RNA, 19 nt, Artificial Sequence
  Description of Artificial Sequence: Synthetic oligonucleotide
agccugauuaacuggccuu

SEQ ID NO: 57890 - RNA, 19 nt, Artificial Sequence
  Description of Artificial Sequence: Synthetic oligonucleotide
uaccuuucgagugcccugu

SEQ ID NO: 57891 - RNA, 19 nt, Artificial Sequence
  Description of Artificial Sequence: Synthetic oligonucleotide
uuuggaaggugagccgagu

SEQ ID NO: 57892 - RNA, 19 nt, Artificial Sequence
  Description of Artificial Sequence: Synthetic oligonucleotide
cuagaacuagguuccucga

SEQ ID NO: 57893 - RNA, 19 nt, Artificial Sequence
  Description of Artificial Sequence: Synthetic oligonucleotide
augcguaaguugauuuaag

SEQ ID NO: 57894 - RNA, 19 nt, Artificial Sequence
  Description of Artificial Sequence: Synthetic oligonucleotide
agagaccacugucucuggu

SEQ ID NO: 57895 - RNA, 19 nt, Artificial Sequence
  Description of Artificial Sequence: Synthetic oligonucleotide
ccaugugccuaccuacucg

SEQ ID NO: 57896 - RNA, 19 nt, Artificial Sequence
  Description of Artificial Sequence: Synthetic oligonucleotide
gcauuaguagauuccaugu

SEQ ID NO: 57897 - RNA, 19 nt, Artificial Sequence
  Description of Artificial Sequence: Synthetic oligonucleotide
gugacuaaaggaauacacu

SEQ ID NO: 57898 - RNA, 19 nt, Artificial Sequence
  Description of Artificial Sequence: Synthetic oligonucleotide
aagcggcugcaccuagacu

SEQ ID NO: 57899 - RNA, 19 nt, Artificial Sequence
  Description of Artificial Sequence: Synthetic oligonucleotide
caugcguaaguugauuuaa

SEQ ID NO: 57900 - RNA, 19 nt, Artificial Sequence
  Description of Artificial Sequence: Synthetic oligonucleotide
uguugaggagaacccuguu

SEQ ID NO: 57901 - RNA, 19 nt, Artificial Sequence
  Description of Artificial Sequence: Synthetic oligonucleotide
caguuucaguacccaagug

SEQ ID NO: 57902 - RNA, 19 nt, Artificial Sequence
  Description of Artificial Sequence: Synthetic oligonucleotide
guauguugggucagccagc

SEQ ID NO: 57903 - RNA, 19 nt, Artificial Sequence
  Description of Artificial Sequence: Synthetic oligonucleotide
uaagugcuagcaaguuguu

SEQ ID NO: 57904 - RNA, 19 nt, Artificial Sequence
  Description of Artificial Sequence: Synthetic oligonucleotide
gagcuaccugccuaggcaa

SEQ ID NO: 57905 - RNA, 19 nt, Artificial Sequence
  Description of Artificial Sequence: Synthetic oligonucleotide
auaggaccucuuuccuaug

SEQ ID NO: 57906 - RNA, 19 nt, Artificial Sequence
  Description of Artificial Sequence: Synthetic oligonucleotide
auuacagccuaaggacgca

SEQ ID NO: 57907 - RNA, 19 nt, Artificial Sequence
  Description of Artificial Sequence: Synthetic oligonucleotide
aagggccuaucaugcguaa

SEQ ID NO: 57908 - RNA, 19 nt, Artificial Sequence
  Description of Artificial Sequence: Synthetic oligonucleotide
cucgacuuagaacucagau

SEQ ID NO: 57909 - RNA, 19 nt, Artificial Sequence
  Description of Artificial Sequence: Synthetic oligonucleotide
guuagaggguggaucucug

SEQ ID NO: 57910 - RNA, 19 nt, Artificial Sequence
  Description of Artificial Sequence: Synthetic oligonucleotide
ggagacuacucaguccucc

SEQ ID NO: 57911 - RNA, 19 nt, Artificial Sequence
  Description of Artificial Sequence: Synthetic oligonucleotide
uguugugcauucgccugcu

SEQ ID NO: 57912 - RNA, 19 nt, Artificial Sequence
  Description of Artificial Sequence: Synthetic oligonucleotide
ugaagucggcuggaguuuc

SEQ ID NO: 57913 - RNA, 19 nt, Artificial Sequence
  Description of Artificial Sequence: Synthetic oligonucleotide
aucuuccuagcccucccaa

SEQ ID NO: 57914 - RNA, 19 nt, Artificial Sequence
  Description of Artificial Sequence: Synthetic oligonucleotide
uucagaagggagggaccug

SEQ ID NO: 57915 - RNA, 19 nt, Artificial Sequence
  Description of Artificial Sequence: Synthetic oligonucleotide
gccuaucaugcguaaguug

SEQ ID NO: 57916 - RNA, 19 nt, Artificial Sequence
  Description of Artificial Sequence: Synthetic oligonucleotide
guuaccaaguugggaugug

SEQ ID NO: 57917 - RNA, 19 nt, Artificial Sequence
  Description of Artificial Sequence: Synthetic oligonucleotide
cucaauuuagccagcuaau

SEQ ID NO: 57918 - RNA, 19 nt, Artificial Sequence
  Description of Artificial Sequence: Synthetic oligonucleotide
cuagguuccucgacuuaga

SEQ ID NO: 57919 - RNA, 19 nt, Artificial Sequence
  Description of Artificial Sequence: Synthetic oligonucleotide
gguaucauuccguuuuggu

SEQ ID NO: 57920 - RNA, 19 nt, Artificial Sequence
  Description of Artificial Sequence: Synthetic oligonucleotide
gaggaugguaucauuccgu

SEQ ID NO: 57921 - RNA, 19 nt, Artificial Sequence
  Description of Artificial Sequence: Synthetic oligonucleotide
ucauuccguuuugguauca

SEQ ID NO: 57922 - RNA, 19 nt, Artificial Sequence
  Description of Artificial Sequence: Synthetic oligonucleotide
ugguaacagaugugccguc

SEQ ID NO: 57923 - RNA, 19 nt, Artificial Sequence
  Description of Artificial Sequence: Synthetic oligonucleotide
aacagaguugaggccccaa

SEQ ID NO: 57924 - RNA, 19 nt, Artificial Sequence
  Description of Artificial Sequence: Synthetic oligonucleotide
gacuuagaacucagauaca

SEQ ID NO: 57925 - RNA, 19 nt, Artificial Sequence
  Description of Artificial Sequence: Synthetic oligonucleotide
uuacagccuaaggacgcau

SEQ ID NO: 57926 - RNA, 19 nt, Artificial Sequence
  Description of Artificial Sequence: Synthetic oligonucleotide
gacgugucugguaucugaa

SEQ ID NO: 57927 - RNA, 19 nt, Artificial Sequence
  Description of Artificial Sequence: Synthetic oligonucleotide
cuccuaccuuucgagugcc

SEQ ID NO: 57928 - RNA, 19 nt, Artificial Sequence
  Description of Artificial Sequence: Synthetic oligonucleotide
gaacuagguuccucgacuu

SEQ ID NO: 57929 - RNA, 19 nt, Artificial Sequence
  Description of Artificial Sequence: Synthetic oligonucleotide
ccuaccuacucgaguuggg

SEQ ID NO: 57930 - RNA, 19 nt, Artificial Sequence
  Description of Artificial Sequence: Synthetic oligonucleotide
uccgauuccuccgggugau

SEQ ID NO: 57931 - RNA, 19 nt, Artificial Sequence
  Description of Artificial Sequence: Synthetic oligonucleotide
gccuaccuacucgaguugg

SEQ ID NO: 57932 - RNA, 19 nt, Artificial Sequence
  Description of Artificial Sequence: Synthetic oligonucleotide
cuaccuacucgaguuggga

SEQ ID NO: 57933 - RNA, 19 nt, Artificial Sequence
  Description of Artificial Sequence: Synthetic oligonucleotide
ggugccccuguuucuauca

SEQ ID NO: 57934 - RNA, 19 nt, Artificial Sequence
  Description of Artificial Sequence: Synthetic oligonucleotide
ccuauacucuucaguggac

SEQ ID NO: 57935 - RNA, 19 nt, Artificial Sequence
  Description of Artificial Sequence: Synthetic oligonucleotide
augaagucggcuggaguuu

SEQ ID NO: 57936 - RNA, 19 nt, Artificial Sequence
  Description of Artificial Sequence: Synthetic oligonucleotide
agggccuaucaugcguaag

SEQ ID NO: 57937 - RNA, 19 nt, Artificial Sequence
  Description of Artificial Sequence: Synthetic oligonucleotide
aggccuuaaucagcaguca

SEQ ID NO: 57938 - RNA, 19 nt, Artificial Sequence
  Description of Artificial Sequence: Synthetic oligonucleotide
gcaugaccuauuccuacuc

SEQ ID NO: 57939 - RNA, 19 nt, Artificial Sequence
  Description of Artificial Sequence: Synthetic oligonucleotide
gcuccgagagaccacuguc

SEQ ID NO: 57940 - RNA, 19 nt, Artificial Sequence
  Description of Artificial Sequence: Synthetic oligonucleotide
gccugauuaacuggccuug

SEQ ID NO: 57941 - RNA, 19 nt, Artificial Sequence
  Description of Artificial Sequence: Synthetic oligonucleotide
uuggugccccuguuucuau

SEQ ID NO: 57942 - RNA, 19 nt, Artificial Sequence
  Description of Artificial Sequence: Synthetic oligonucleotide
acuuaaggguggucccaua

SEQ ID NO: 57943 - RNA, 19 nt, Artificial Sequence
  Description of Artificial Sequence: Synthetic oligonucleotide
ccguuuugguaucaugcuc

SEQ ID NO: 57944 - RNA, 19 nt, Artificial Sequence
  Description of Artificial Sequence: Synthetic oligonucleotide
uggugccccuguuucuauc

SEQ ID NO: 57945 - RNA, 19 nt, Artificial Sequence
  Description of Artificial Sequence: Synthetic oligonucleotide
uucaccuagcuggcucagu

SEQ ID NO: 57946 - RNA, 19 nt, Artificial Sequence
  Description of Artificial Sequence: Synthetic oligonucleotide
agcuaccugccuaggcaag

SEQ ID NO: 57947 - RNA, 19 nt, Artificial Sequence
  Description of Artificial Sequence: Synthetic oligonucleotide
aggagacuacucaguccuc

SEQ ID NO: 57948 - RNA, 19 nt, Artificial Sequence
  Description of Artificial Sequence: Synthetic oligonucleotide
ugggcuguucaagcucuaa

SEQ ID NO: 57949 - RNA, 19 nt, Artificial Sequence
  Description of Artificial Sequence: Synthetic oligonucleotide
ccugauuaacuggccuugg

SEQ ID NO: 57950 - RNA, 19 nt, Artificial Sequence
  Description of Artificial Sequence: Synthetic oligonucleotide
gggccuaucaugcguaagu

SEQ ID NO: 57951 - RNA, 19 nt, Artificial Sequence
  Description of Artificial Sequence: Synthetic oligonucleotide
gcuaacugaugugagcucu

SEQ ID NO: 57952 - RNA, 19 nt, Artificial Sequence
  Description of Artificial Sequence: Synthetic oligonucleotide
cuaucagacuuguguuaua

SEQ ID NO: 57953 - RNA, 19 nt, Artificial Sequence
  Description of Artificial Sequence: Synthetic oligonucleotide
ggcauuccgcacagugacg

SEQ ID NO: 57954 - RNA, 19 nt, Artificial Sequence
  Description of Artificial Sequence: Synthetic oligonucleotide
aggcauuaguagauuccau

SEQ ID NO: 57955 - RNA, 19 nt, Artificial Sequence
  Description of Artificial Sequence: Synthetic oligonucleotide
caucuccuaccuuucgagu

SEQ ID NO: 57956 - RNA, 19 nt, Artificial Sequence
  Description of Artificial Sequence: Synthetic oligonucleotide
cuaucaugcguaaguugau

SEQ ID NO: 57957 - RNA, 19 nt, Artificial Sequence
  Description of Artificial Sequence: Synthetic oligonucleotide
augugccuaccuacucgag

SEQ ID NO: 57958 - RNA, 19 nt, Artificial Sequence
  Description of Artificial Sequence: Synthetic oligonucleotide
gcauucgccugcugguaac

SEQ ID NO: 57959 - RNA, 19 nt, Artificial Sequence
  Description of Artificial Sequence: Synthetic oligonucleotide
ucuaggcaucggccccuuc

SEQ ID NO: 57960 - RNA, 19 nt, Artificial Sequence
  Description of Artificial Sequence: Synthetic oligonucleotide
gcaccuagcuugaaagcca

SEQ ID NO: 57961 - RNA, 19 nt, Artificial Sequence
  Description of Artificial Sequence: Synthetic oligonucleotide
cuucccugucucgaggaaa

SEQ ID NO: 57962 - RNA, 19 nt, Artificial Sequence
  Description of Artificial Sequence: Synthetic oligonucleotide
agacuucaccuagcuggcu

SEQ ID NO: 57963 - RNA, 19 nt, Artificial Sequence
  Description of Artificial Sequence: Synthetic oligonucleotide
cugcuccgagagaccacug

SEQ ID NO: 57964 - RNA, 19 nt, Artificial Sequence
  Description of Artificial Sequence: Synthetic oligonucleotide
agaagcggcugcaccuaga

SEQ ID NO: 57965 - RNA, 19 nt, Artificial Sequence
  Description of Artificial Sequence: Synthetic oligonucleotide
guagaagcggcugcaccua

SEQ ID NO: 57966 - RNA, 19 nt, Artificial Sequence
  Description of Artificial Sequence: Synthetic oligonucleotide
gguugcagccuugaaugaa

SEQ ID NO: 57967 - RNA, 19 nt, Artificial Sequence
  Description of Artificial Sequence: Synthetic oligonucleotide
gguuagaggguggaucucu

SEQ ID NO: 57968 - RNA, 19 nt, Artificial Sequence
  Description of Artificial Sequence: Synthetic oligonucleotide
gggcuaucuuccuagcccu

SEQ ID NO: 57969 - RNA, 19 nt, Artificial Sequence
  Description of Artificial Sequence: Synthetic oligonucleotide
uccugucccuaggggauua

SEQ ID NO: 57970 - RNA, 19 nt, Artificial Sequence
  Description of Artificial Sequence: Synthetic oligonucleotide
ggguguugugcauucgccu

SEQ ID NO: 57971 - RNA, 19 nt, Artificial Sequence
  Description of Artificial Sequence: Synthetic oligonucleotide
gccuugaccccacacaaau

SEQ ID NO: 57972 - RNA, 19 nt, Artificial Sequence
  Description of Artificial Sequence: Synthetic oligonucleotide
ggcacggaaacaggaaucu

SEQ ID NO: 57973 - RNA, 19 nt, Artificial Sequence
  Description of Artificial Sequence: Synthetic oligonucleotide
aggugucgguacugcuaaa

SEQ ID NO: 57974 - RNA, 19 nt, Artificial Sequence
  Description of Artificial Sequence: Synthetic oligonucleotide
ccuuucgagugcccuguuc

SEQ ID NO: 57975 - RNA, 19 nt, Artificial Sequence
  Description of Artificial Sequence: Synthetic oligonucleotide
caaugcccucagguuagca

SEQ ID NO: 57976 - RNA, 19 nt, Artificial Sequence
  Description of Artificial Sequence: Synthetic oligonucleotide
gcauuccgcacagugacgu

SEQ ID NO: 57977 - RNA, 19 nt, Artificial Sequence
  Description of Artificial Sequence: Synthetic oligonucleotide
gccuaaggacgcaugcaga

SEQ ID NO: 57978 - RNA, 19 nt, Artificial Sequence
  Description of Artificial Sequence: Synthetic oligonucleotide
ccaggucuuagggagaaua

SEQ ID NO: 57979 - RNA, 19 nt, Artificial Sequence
  Description of Artificial Sequence: Synthetic oligonucleotide
ggcucaauuuagccagcua

SEQ ID NO: 57980 - RNA, 19 nt, Artificial Sequence
  Description of Artificial Sequence: Synthetic oligonucleotide
accuuucgagugcccuguu

SEQ ID NO: 57981 - RNA, 19 nt, Artificial Sequence
  Description of Artificial Sequence: Synthetic oligonucleotide
gccuaggcaaguggaugug

SEQ ID NO: 57982 - RNA, 19 nt, Artificial Sequence
  Description of Artificial Sequence: Synthetic oligonucleotide
agagagcauuacagccuaa

SEQ ID NO: 57983 - RNA, 19 nt, Artificial Sequence
  Description of Artificial Sequence: Synthetic oligonucleotide
ggacgcaugcagacaggca

SEQ ID NO: 57984 - RNA, 19 nt, Artificial Sequence
  Description of Artificial Sequence: Synthetic oligonucleotide
agcuugccuguagccuuga

SEQ ID NO: 57985 - RNA, 19 nt, Artificial Sequence
  Description of Artificial Sequence: Synthetic oligonucleotide
ggugugcaagcuugccugu

SEQ ID NO: 57986 - RNA, 19 nt, Artificial Sequence
  Description of Artificial Sequence: Synthetic oligonucleotide
gugcauucgccugcuggua

SEQ ID NO: 57987 - RNA, 19 nt, Artificial Sequence
  Description of Artificial Sequence: Synthetic oligonucleotide
cugucccuaggggauuaaa

SEQ ID NO: 57988 - RNA, 19 nt, Artificial Sequence
  Description of Artificial Sequence: Synthetic oligonucleotide
ggaugguaucauuccguuu

SEQ ID NO: 57989 - RNA, 19 nt, Artificial Sequence
  Description of Artificial Sequence: Synthetic oligonucleotide
ccaacuaguacaggagagu

SEQ ID NO: 57990 - RNA, 19 nt, Artificial Sequence
  Description of Artificial Sequence: Synthetic oligonucleotide
ccucgacuuagaacucaga

SEQ ID NO: 57991 - RNA, 19 nt, Artificial Sequence
  Description of Artificial Sequence: Synthetic oligonucleotide
ccguacuuggagcaggaau

SEQ ID NO: 57992 - RNA, 19 nt, Artificial Sequence
  Description of Artificial Sequence: Synthetic oligonucleotide
cagcuuagucuagcaauuu

SEQ ID NO: 57993 - RNA, 19 nt, Artificial Sequence
  Description of Artificial Sequence: Synthetic oligonucleotide
ggccuaucaugcguaaguu

SEQ ID NO: 57994 - RNA, 19 nt, Artificial Sequence
  Description of Artificial Sequence: Synthetic oligonucleotide
gggacgucuucugaacauu

SEQ ID NO: 57995 - RNA, 19 nt, Artificial Sequence
  Description of Artificial Sequence: Synthetic oligonucleotide
ccuccgggugaucaccucu

SEQ ID NO: 57996 - RNA, 19 nt, Artificial Sequence
  Description of Artificial Sequence: Synthetic oligonucleotide
ccugucccuaggggauuaa

SEQ ID NO: 57997 - RNA, 19 nt, Artificial Sequence
  Description of Artificial Sequence: Synthetic oligonucleotide
ccgcuccucagcccagauu

SEQ ID NO: 57998 - RNA, 19 nt, Artificial Sequence
  Description of Artificial Sequence: Synthetic oligonucleotide
acauguaucccauucaugc

SEQ ID NO: 57999 - RNA, 19 nt, Artificial Sequence
  Description of Artificial Sequence: Synthetic oligonucleotide
uguaagauaauuucuagug

SEQ ID NO: 58000 - RNA, 19 nt, Artificial Sequence
  Description of Artificial Sequence: Synthetic oligonucleotide
auaaucuaacccuugaagg

SEQ ID NO: 58001 - RNA, 19 nt, Artificial Sequence
  Description of Artificial Sequence: Synthetic oligonucleotide
ucuacacacaucaagaugu

SEQ ID NO: 58002 - RNA, 19 nt, Artificial Sequence
  Description of Artificial Sequence: Synthetic oligonucleotide
aucuaauuauugcaaaggc

SEQ ID NO: 58003 - RNA, 19 nt, Artificial Sequence
  Description of Artificial Sequence: Synthetic oligonucleotide
uccuguuaaagaaugagag

SEQ ID NO: 58004 - RNA, 19 nt, Artificial Sequence
  Description of Artificial Sequence: Synthetic oligonucleotide
aaguuaacgauuuucaaau

SEQ ID NO: 58005 - RNA, 19 nt, Artificial Sequence
  Description of Artificial Sequence: Synthetic oligonucleotide
uguuauauucuaaaguugu

SEQ ID NO: 58006 - RNA, 19 nt, Artificial Sequence
  Description of Artificial Sequence: Synthetic oligonucleotide
uuucauuugguguauagca

SEQ ID NO: 58007 - RNA, 19 nt, Artificial Sequence
  Description of Artificial Sequence: Synthetic oligonucleotide
aaucuaacaucauacagaa

SEQ ID NO: 58008 - RNA, 19 nt, Artificial Sequence
  Description of Artificial Sequence: Synthetic oligonucleotide
uauaauugcuuccagcucu

SEQ ID NO: 58009 - RNA, 19 nt, Artificial Sequence
  Description of Artificial Sequence: Synthetic oligonucleotide
uuaauuugcacacuuuaga

SEQ ID NO: 58010 - RNA, 19 nt, Artificial Sequence
  Description of Artificial Sequence: Synthetic oligonucleotide
agaaugauuucccuuugcc

SEQ ID NO: 58011 - RNA, 19 nt, Artificial Sequence
  Description of Artificial Sequence: Synthetic oligonucleotide
aacuaaaacuguaugcggc

SEQ ID NO: 58012 - RNA, 19 nt, Artificial Sequence
  Description of Artificial Sequence: Synthetic oligonucleotide
uaaacuacuuagcugaaga

SEQ ID NO: 58013 - RNA, 19 nt, Artificial Sequence
  Description of Artificial Sequence: Synthetic oligonucleotide
uucuaagaggcuaauauac

SEQ ID NO: 58014 - RNA, 19 nt, Artificial Sequence
  Description of Artificial Sequence: Synthetic oligonucleotide
aguaaguacagaccuuucc

SEQ ID NO: 58015 - RNA, 19 nt, Artificial Sequence
  Description of Artificial Sequence: Synthetic oligonucleotide
uguuuaugcacccaacaag

SEQ ID NO: 58016 - RNA, 19 nt, Artificial Sequence
  Description of Artificial Sequence: Synthetic oligonucleotide
uuaucgauaacaaucuaac

SEQ ID NO: 58017 - RNA, 19 nt, Artificial Sequence
  Description of Artificial Sequence: Synthetic oligonucleotide
ucuaacaucgggaucagga

SEQ ID NO: 58018 - RNA, 19 nt, Artificial Sequence
  Description of Artificial Sequence: Synthetic oligonucleotide
uuaagauuguaaauuauau

SEQ ID NO: 58019 - RNA, 19 nt, Artificial Sequence
  Description of Artificial Sequence: Synthetic oligonucleotide
acuaaaacuguaugcggcc

SEQ ID NO: 58020 - RNA, 19 nt, Artificial Sequence
  Description of Artificial Sequence: Synthetic oligonucleotide
cacaaguacaucaaagagg

SEQ ID NO: 58021 - RNA, 19 nt, Artificial Sequence
  Description of Artificial Sequence: Synthetic oligonucleotide
uucucgaacacuauuugag

SEQ ID NO: 58022 - RNA, 19 nt, Artificial Sequence
  Description of Artificial Sequence: Synthetic oligonucleotide
uaacuuauagugcuguggc

SEQ ID NO: 58023 - RNA, 19 nt, Artificial Sequence
  Description of Artificial Sequence: Synthetic oligonucleotide
aucgauaacaaucuaacau

SEQ ID NO: 58024 - RNA, 19 nt, Artificial Sequence
  Description of Artificial Sequence: Synthetic oligonucleotide
uuaacuuauagugcugugg

SEQ ID NO: 58025 - RNA, 19 nt, Artificial Sequence
  Description of Artificial Sequence: Synthetic oligonucleotide
ugcgauugaagaauucccg

SEQ ID NO: 58026 - RNA, 19 nt, Artificial Sequence
  Description of Artificial Sequence: Synthetic oligonucleotide
aauguaugcuaagaagcac

SEQ ID NO: 58027 - RNA, 19 nt, Artificial Sequence
  Description of Artificial Sequence: Synthetic oligonucleotide
augugacuuauacuuaucg

SEQ ID NO: 58028 - RNA, 19 nt, Artificial Sequence
  Description of Artificial Sequence: Synthetic oligonucleotide
agugcaagcacccaaacaa

SEQ ID NO: 58029 - RNA, 19 nt, Artificial Sequence
  Description of Artificial Sequence: Synthetic oligonucleotide
cuucacacaacguacuggg

SEQ ID NO: 58030 - RNA, 19 nt, Artificial Sequence
  Description of Artificial Sequence: Synthetic oligonucleotide
ucacacaacguacugggag

SEQ ID NO: 58031 - RNA, 19 nt, Artificial Sequence
  Description of Artificial Sequence: Synthetic oligonucleotide
uuagacaaacaccaucaug

SEQ ID NO: 58032 - RNA, 19 nt, Artificial Sequence
  Description of Artificial Sequence: Synthetic oligonucleotide
ucgauaacaaucuaacauc

SEQ ID NO: 58033 - RNA, 19 nt, Artificial Sequence
  Description of Artificial Sequence: Synthetic oligonucleotide
auauuguauauuuccucac

SEQ ID NO: 58034 - RNA, 19 nt, Artificial Sequence
  Description of Artificial Sequence: Synthetic oligonucleotide
uucuagugaccccugacag

SEQ ID NO: 58035 - RNA, 19 nt, Artificial Sequence
  Description of Artificial Sequence: Synthetic oligonucleotide
acuuauagugcuguggcac

SEQ ID NO: 58036 - RNA, 19 nt, Artificial Sequence
  Description of Artificial Sequence: Synthetic oligonucleotide
ucgaaugauacucuucaca

SEQ ID NO: 58037 - RNA, 19 nt, Artificial Sequence
  Description of Artificial Sequence: Synthetic oligonucleotide
  modified_base (7)..(7): a, c, u, g, unknown or other
uucaccnuuauccuuuguc

SEQ ID NO: 58038 - RNA, 19 nt, Artificial Sequence
  Description of Artificial Sequence: Synthetic oligonucleotide
accucucuauguuauauuc

SEQ ID NO: 58039 - RNA, 19 nt, Artificial Sequence
  Description of Artificial Sequence: Synthetic oligonucleotide
auaguuacaaaaccugcca

SEQ ID NO: 58040 - RNA, 19 nt, Artificial Sequence
  Description of Artificial Sequence: Synthetic oligonucleotide
uuuugcaagcaaaauguaa

SEQ ID NO: 58041 - RNA, 19 nt, Artificial Sequence
  Description of Artificial Sequence: Synthetic oligonucleotide
uuacauacugcaguuuacg

SEQ ID NO: 58042 - RNA, 19 nt, Artificial Sequence
  Description of Artificial Sequence: Synthetic oligonucleotide
gauaauuucuagugacccc

SEQ ID NO: 58043 - RNA, 19 nt, Artificial Sequence
  Description of Artificial Sequence: Synthetic oligonucleotide
uauugcaaaggcauaugga

SEQ ID NO: 58044 - RNA, 19 nt, Artificial Sequence
  Description of Artificial Sequence: Synthetic oligonucleotide
cauuugcuagcucagaaug

SEQ ID NO: 58045 - RNA, 19 nt, Artificial Sequence
  Description of Artificial Sequence: Synthetic oligonucleotide
uauaauuuguaaggaaaga

SEQ ID NO: 58046 - RNA, 19 nt, Artificial Sequence
  Description of Artificial Sequence: Synthetic oligonucleotide
aaccucuauggaccuauac

SEQ ID NO: 58047 - RNA, 19 nt, Artificial Sequence
  Description of Artificial Sequence: Synthetic oligonucleotide
ucuauggaccuauacugcc

SEQ ID NO: 58048 - RNA, 19 nt, Artificial Sequence
  Description of Artificial Sequence: Synthetic oligonucleotide
uuucuagugaccccugaca

SEQ ID NO: 58049 - RNA, 19 nt, Artificial Sequence
  Description of Artificial Sequence: Synthetic oligonucleotide
uuaguaacuacuaccucaa

SEQ ID NO: 58050 - RNA, 19 nt, Artificial Sequence
  Description of Artificial Sequence: Synthetic oligonucleotide
aaguaaagcugcuuaugga

SEQ ID NO: 58051 - RNA, 19 nt, Artificial Sequence
  Description of Artificial Sequence: Synthetic oligonucleotide
  modified_base (6)..(6): a, c, u, g, unknown or other
ucaccnuuauccuuugucu

SEQ ID NO: 58052 - RNA, 19 nt, Artificial Sequence
  Description of Artificial Sequence: Synthetic oligonucleotide
augcgguucgaacaaauag

SEQ ID NO: 58053 - RNA, 19 nt, Artificial Sequence
  Description of Artificial Sequence: Synthetic oligonucleotide
uaauuucuuaagauuguaa

SEQ ID NO: 58054 - RNA, 19 nt, Artificial Sequence
  Description of Artificial Sequence: Synthetic oligonucleotide
ucuuaggucugaaaaugca

SEQ ID NO: 58055 - RNA, 19 nt, Artificial Sequence
  Description of Artificial Sequence: Synthetic oligonucleotide
ugugacuuauacuuaucga

SEQ ID NO: 58056 - RNA, 19 nt, Artificial Sequence
  Description of Artificial Sequence: Synthetic oligonucleotide
aacauuugcuagcucagaa

SEQ ID NO: 58057 - RNA, 19 nt, Artificial Sequence
  Description of Artificial Sequence: Synthetic oligonucleotide
ugugaaaguaguucaguaa

SEQ ID NO: 58058 - RNA, 19 nt, Artificial Sequence
  Description of Artificial Sequence: Synthetic oligonucleotide
ucaauugcuaggcaggcua

SEQ ID NO: 58059 - RNA, 19 nt, Artificial Sequence
  Description of Artificial Sequence: Synthetic oligonucleotide
auuaauccagaucauuuau

SEQ ID NO: 58060 - RNA, 19 nt, Artificial Sequence
  Description of Artificial Sequence: Synthetic oligonucleotide
uucuuaagauuguaaauua

SEQ ID NO: 58061 - RNA, 19 nt, Artificial Sequence
  Description of Artificial Sequence: Synthetic oligonucleotide
ugcgguucgaacaaauagu

SEQ ID NO: 58062 - RNA, 19 nt, Artificial Sequence
  Description of Artificial Sequence: Synthetic oligonucleotide
ugaaaguaguucaguaagu

SEQ ID NO: 58063 - RNA, 19 nt, Artificial Sequence
  Description of Artificial Sequence: Synthetic oligonucleotide
uaacuacuaccucaauugc

SEQ ID NO: 58064 - RNA, 19 nt, Artificial Sequence
  Description of Artificial Sequence: Synthetic oligonucleotide
aauauaccucucuauguua

SEQ ID NO: 58065 - RNA, 19 nt, Artificial Sequence
  Description of Artificial Sequence: Synthetic oligonucleotide
aucaauuagcuggacuacc

SEQ ID NO: 58066 - RNA, 19 nt, Artificial Sequence
  Description of Artificial Sequence: Synthetic oligonucleotide
uuuauaauuugguguggac

SEQ ID NO: 58067 - RNA, 19 nt, Artificial Sequence
  Description of Artificial Sequence: Synthetic oligonucleotide
auaauuucuagugaccccu

SEQ ID NO: 58068 - RNA, 19 nt, Artificial Sequence
  Description of Artificial Sequence: Synthetic oligonucleotide
acguaugcaucaucuacac

SEQ ID NO: 58069 - RNA, 19 nt, Artificial Sequence
  Description of Artificial Sequence: Synthetic oligonucleotide
auagccaagccuaugugac

SEQ ID NO: 58070 - RNA, 19 nt, Artificial Sequence
  Description of Artificial Sequence: Synthetic oligonucleotide
ugacuuauacuuaucgaua

SEQ ID NO: 58071 - RNA, 19 nt, Artificial Sequence
  Description of Artificial Sequence: Synthetic oligonucleotide
aucucuaacaucgggauca

SEQ ID NO: 58072 - RNA, 19 nt, Artificial Sequence
  Description of Artificial Sequence: Synthetic oligonucleotide
aucuacacacaucaagaug

SEQ ID NO: 58073 - RNA, 19 nt, Artificial Sequence
  Description of Artificial Sequence: Synthetic oligonucleotide
uguagauaaucuaacccuu

SEQ ID NO: 58074 - RNA, 19 nt, Artificial Sequence
  Description of Artificial Sequence: Synthetic oligonucleotide
ugcauaaacuaaaacugua

SEQ ID NO: 58075 - RNA, 19 nt, Artificial Sequence
  Description of Artificial Sequence: Synthetic oligonucleotide
agugagucugggugguucc

SEQ ID NO: 58076 - RNA, 19 nt, Artificial Sequence
  Description of Artificial Sequence: Synthetic oligonucleotide
uaccucaauugcuaggcag

SEQ ID NO: 58077 - RNA, 19 nt, Artificial Sequence
  Description of Artificial Sequence: Synthetic oligonucleotide
cuacaaucuaauuauugca

SEQ ID NO: 58078 - RNA, 19 nt, Artificial Sequence
  Description of Artificial Sequence: Synthetic oligonucleotide
uguauaagccacaccuugu

SEQ ID NO: 58079 - RNA, 19 nt, Artificial Sequence
  Description of Artificial Sequence: Synthetic oligonucleotide
gaaugauuucccuuugcca

SEQ ID NO: 58080 - RNA, 19 nt, Artificial Sequence
  Description of Artificial Sequence: Synthetic oligonucleotide
uaucgauaacaaucuaaca

SEQ ID NO: 58081 - RNA, 19 nt, Artificial Sequence
  Description of Artificial Sequence: Synthetic oligonucleotide
gguucgaacaaauagucuc

SEQ ID NO: 58082 - RNA, 19 nt, Artificial Sequence
  Description of Artificial Sequence: Synthetic oligonucleotide
guaagauaauuucuaguga

SEQ ID NO: 58083 - RNA, 19 nt, Artificial Sequence
  Description of Artificial Sequence: Synthetic oligonucleotide
cuuugcugaaugugaaccc

SEQ ID NO: 58084 - RNA, 19 nt, Artificial Sequence
  Description of Artificial Sequence: Synthetic oligonucleotide
uuuagcuuuggugacacua

SEQ ID NO: 58085 - RNA, 19 nt, Artificial Sequence
  Description of Artificial Sequence: Synthetic oligonucleotide
ugguuuguauccuggauuc

SEQ ID NO: 58086 - RNA, 19 nt, Artificial Sequence
  Description of Artificial Sequence: Synthetic oligonucleotide
accucuauggaccuauacu

SEQ ID NO: 58087 - RNA, 19 nt, Artificial Sequence
  Description of Artificial Sequence: Synthetic oligonucleotide
auguaucccauucaugccu

SEQ ID NO: 58088 - RNA, 19 nt, Artificial Sequence
  Description of Artificial Sequence: Synthetic oligonucleotide
caguacuagaggcugaaac

SEQ ID NO: 58089 - RNA, 19 nt, Artificial Sequence
  Description of Artificial Sequence: Synthetic oligonucleotide
uuacuaaauuguucuguac

SEQ ID NO: 58090 - RNA, 19 nt, Artificial Sequence
  Description of Artificial Sequence: Synthetic oligonucleotide
cagguaauuaaauagccaa

SEQ ID NO: 58091 - RNA, 19 nt, Artificial Sequence
  Description of Artificial Sequence: Synthetic oligonucleotide
cuauggaccuauacugccg

SEQ ID NO: 58092 - RNA, 19 nt, Artificial Sequence
  Description of Artificial Sequence: Synthetic oligonucleotide
acaaucuaauuauugcaaa

SEQ ID NO: 58093 - RNA, 19 nt, Artificial Sequence
  Description of Artificial Sequence: Synthetic oligonucleotide
gacuuauacuuaucgauaa

SEQ ID NO: 58094 - RNA, 19 nt, Artificial Sequence
  Description of Artificial Sequence: Synthetic oligonucleotide
cuuaucgauaacaaucuaa

SEQ ID NO: 58095 - RNA, 19 nt, Artificial Sequence
  Description of Artificial Sequence: Synthetic oligonucleotide
aguuuacgaguuugaaaag

SEQ ID NO: 58096 - RNA, 19 nt, Artificial Sequence
  Description of Artificial Sequence: Synthetic oligonucleotide
agcaccugcuuucugccac

SEQ ID NO: 58097 - RNA, 19 nt, Artificial Sequence
  Description of Artificial Sequence: Synthetic oligonucleotide
ugugccgaaguucuccucu

SEQ ID NO: 58098 - RNA, 19 nt, Artificial Sequence
  Description of Artificial Sequence: Synthetic oligonucleotide
acugguuggacauuuuaau

SEQ ID NO: 58099 - RNA, 19 nt, Artificial Sequence
  Description of Artificial Sequence: Synthetic oligonucleotide
ugggcuacuuuccucuugc

SEQ ID NO: 58100 - RNA, 19 nt, Artificial Sequence
  Description of Artificial Sequence: Synthetic oligonucleotide
caucuuaggucugaaaaug

SEQ ID NO: 58101 - RNA, 19 nt, Artificial Sequence
  Description of Artificial Sequence: Synthetic oligonucleotide
cucuauggaccuauacugc

SEQ ID NO: 58102 - RNA, 19 nt, Artificial Sequence
  Description of Artificial Sequence: Synthetic oligonucleotide
aacuuauagugcuguggca

SEQ ID NO: 58103 - RNA, 19 nt, Artificial Sequence
  Description of Artificial Sequence: Synthetic oligonucleotide
aauuucuagugaccccuga

SEQ ID NO: 58104 - RNA, 19 nt, Artificial Sequence
  Description of Artificial Sequence: Synthetic oligonucleotide
uaacaucgggaucaggaaa

SEQ ID NO: 58105 - RNA, 19 nt, Artificial Sequence
  Description of Artificial Sequence: Synthetic oligonucleotide
cauguaucccauucaugcc

SEQ ID NO: 58106 - RNA, 19 nt, Artificial Sequence
  Description of Artificial Sequence: Synthetic oligonucleotide
uacauacuaagcaguuaca

SEQ ID NO: 58107 - RNA, 19 nt, Artificial Sequence
  Description of Artificial Sequence: Synthetic oligonucleotide
uccgaucagaaccucuaug

SEQ ID NO: 58108 - RNA, 19 nt, Artificial Sequence
  Description of Artificial Sequence: Synthetic oligonucleotide
uagcaaguaaagcugcuua

SEQ ID NO: 58109 - RNA, 19 nt, Artificial Sequence
  Description of Artificial Sequence: Synthetic oligonucleotide
auugccuacuaaugguuug

SEQ ID NO: 58110 - RNA, 19 nt, Artificial Sequence
  Description of Artificial Sequence: Synthetic oligonucleotide
guauaagccacaccuugug

SEQ ID NO: 58111 - RNA, 19 nt, Artificial Sequence
  Description of Artificial Sequence: Synthetic oligonucleotide
cuuucucgaacacuauuug

SEQ ID NO: 58112 - RNA, 19 nt, Artificial Sequence
  Description of Artificial Sequence: Synthetic oligonucleotide
ugaagcaguggaacucugc

SEQ ID NO: 58113 - RNA, 19 nt, Artificial Sequence
  Description of Artificial Sequence: Synthetic oligonucleotide
aaauguauguugacucugu

SEQ ID NO: 58114 - RNA, 19 nt, Artificial Sequence
  Description of Artificial Sequence: Synthetic oligonucleotide
ucgcacguaugcaucaucu

SEQ ID NO: 58115 - RNA, 19 nt, Artificial Sequence
  Description of Artificial Sequence: Synthetic oligonucleotide
ucgggaucaggaaaucugu

SEQ ID NO: 58116 - RNA, 19 nt, Artificial Sequence
  Description of Artificial Sequence: Synthetic oligonucleotide
guguagauaaucuaacccu

SEQ ID NO: 58117 - RNA, 19 nt, Artificial Sequence
  Description of Artificial Sequence: Synthetic oligonucleotide
cauucaauccacugacuuc

SEQ ID NO: 58118 - RNA, 19 nt, Artificial Sequence
  Description of Artificial Sequence: Synthetic oligonucleotide
aagaauuaauuugcacacu

SEQ ID NO: 58119 - RNA, 19 nt, Artificial Sequence
  Description of Artificial Sequence: Synthetic oligonucleotide
ugaugugccgaaguucucc

SEQ ID NO: 58120 - RNA, 19 nt, Artificial Sequence
  Description of Artificial Sequence: Synthetic oligonucleotide
uuguucccuauuuauguaa

SEQ ID NO: 58121 - RNA, 19 nt, Artificial Sequence
  Description of Artificial Sequence: Synthetic oligonucleotide
uguucccuauuuauguaaa

SEQ ID NO: 58122 - RNA, 19 nt, Artificial Sequence
  Description of Artificial Sequence: Synthetic oligonucleotide
uacuggggaaacauuugcu

SEQ ID NO: 58123 - RNA, 19 nt, Artificial Sequence
  Description of Artificial Sequence: Synthetic oligonucleotide
caaaagugugaucucugug

SEQ ID NO: 58124 - RNA, 19 nt, Artificial Sequence
  Description of Artificial Sequence: Synthetic oligonucleotide
gaugucgaaggcauucgcc

SEQ ID NO: 58125 - RNA, 19 nt, Artificial Sequence
  Description of Artificial Sequence: Synthetic oligonucleotide
ccgaucagaaccucuaugg

SEQ ID NO: 58126 - RNA, 19 nt, Artificial Sequence
  Description of Artificial Sequence: Synthetic oligonucleotide
aacuacuaccucaauugcu

SEQ ID NO: 58127 - RNA, 19 nt, Artificial Sequence
  Description of Artificial Sequence: Synthetic oligonucleotide
  modified_base (4)..(4): a, c, u, g, unknown or other
accnuuauccuuugucuau

SEQ ID NO: 58128 - RNA, 19 nt, Artificial Sequence
  Description of Artificial Sequence: Synthetic oligonucleotide
uuugcacacuuuagaauau

SEQ ID NO: 58129 - RNA, 19 nt, Artificial Sequence
  Description of Artificial Sequence: Synthetic oligonucleotide
uacuagaggcugaaacugu

SEQ ID NO: 58130 - RNA, 19 nt, Artificial Sequence
  Description of Artificial Sequence: Synthetic oligonucleotide
ccucuauggaccuauacug

SEQ ID NO: 58131 - RNA, 19 nt, Artificial Sequence
  Description of Artificial Sequence: Synthetic oligonucleotide
uaauuucuagugaccccug

SEQ ID NO: 58132 - RNA, 19 nt, Artificial Sequence
  Description of Artificial Sequence: Synthetic oligonucleotide
ucucuauguuauauucuaa

SEQ ID NO: 58133 - RNA, 19 nt, Artificial Sequence
  Description of Artificial Sequence: Synthetic oligonucleotide
ucaguaaguacagaccuuu

SEQ ID NO: 58134 - RNA, 19 nt, Artificial Sequence
  Description of Artificial Sequence: Synthetic oligonucleotide
aacacuauuugagcuaguu

SEQ ID NO: 58135 - RNA, 19 nt, Artificial Sequence
  Description of Artificial Sequence: Synthetic oligonucleotide
ccuacuaaugguuuguauc

SEQ ID NO: 58136 - RNA, 19 nt, Artificial Sequence
  Description of Artificial Sequence: Synthetic oligonucleotide
ucugucaugggaugggcua

SEQ ID NO: 58137 - RNA, 19 nt, Artificial Sequence
  Description of Artificial Sequence: Synthetic oligonucleotide
ugugaucucugugaaagua

SEQ ID NO: 58138 - RNA, 19 nt, Artificial Sequence
  Description of Artificial Sequence: Synthetic oligonucleotide
uugauaggcaugagucaca

SEQ ID NO: 58139 - RNA, 19 nt, Artificial Sequence
  Description of Artificial Sequence: Synthetic oligonucleotide
acauuacauacuaagcagu

SEQ ID NO: 58140 - RNA, 19 nt, Artificial Sequence
  Description of Artificial Sequence: Synthetic oligonucleotide
cacacaucaagauguuuuc

SEQ ID NO: 58141 - RNA, 19 nt, Artificial Sequence
  Description of Artificial Sequence: Synthetic oligonucleotide
ucuucgcacguaugcauca

SEQ ID NO: 58142 - RNA, 19 nt, Artificial Sequence
  Description of Artificial Sequence: Synthetic oligonucleotide
acaugcaauguaugcuaag

SEQ ID NO: 58143 - RNA, 19 nt, Artificial Sequence
  Description of Artificial Sequence: Synthetic oligonucleotide
uauugccuacuaaugguuu

SEQ ID NO: 58144 - RNA, 19 nt, Artificial Sequence
  Description of Artificial Sequence: Synthetic oligonucleotide
ucuagugaccccugacaga

SEQ ID NO: 58145 - RNA, 19 nt, Artificial Sequence
  Description of Artificial Sequence: Synthetic oligonucleotide
aggaaagaaccuuccauuu

SEQ ID NO: 58146 - RNA, 19 nt, Artificial Sequence
  Description of Artificial Sequence: Synthetic oligonucleotide
auguaugcuaagaagcacu

SEQ ID NO: 58147 - RNA, 19 nt, Artificial Sequence
  Description of Artificial Sequence: Synthetic oligonucleotide
gaccugucgaaugauacuc

SEQ ID NO: 58148 - RNA, 19 nt, Artificial Sequence
  Description of Artificial Sequence: Synthetic oligonucleotide
acuguaugcggccugcaaa

SEQ ID NO: 58149 - RNA, 19 nt, Artificial Sequence
  Description of Artificial Sequence: Synthetic oligonucleotide
acuacugagagcaaaugua

SEQ ID NO: 58150 - RNA, 19 nt, Artificial Sequence
  Description of Artificial Sequence: Synthetic oligonucleotide
ucgaacacuauuugagcua

SEQ ID NO: 58151 - RNA, 19 nt, Artificial Sequence
  Description of Artificial Sequence: Synthetic oligonucleotide
guuuacgaguuugaaaaga

SEQ ID NO: 58152 - RNA, 19 nt, Artificial Sequence
  Description of Artificial Sequence: Synthetic oligonucleotide
acauuugcuagcucagaau

SEQ ID NO: 58153 - RNA, 19 nt, Artificial Sequence
  Description of Artificial Sequence: Synthetic oligonucleotide
auucaugccugaaaucuug

SEQ ID NO: 58154 - RNA, 19 nt, Artificial Sequence
  Description of Artificial Sequence: Synthetic oligonucleotide
ucccgagaauauuuuccag

SEQ ID NO: 58155 - RNA, 19 nt, Artificial Sequence
  Description of Artificial Sequence: Synthetic oligonucleotide
gugacuuauacuuaucgau

SEQ ID NO: 58156 - RNA, 19 nt, Artificial Sequence
  Description of Artificial Sequence: Synthetic oligonucleotide
caguucaauucauuucgug

SEQ ID NO: 58157 - RNA, 19 nt, Artificial Sequence
  Description of Artificial Sequence: Synthetic oligonucleotide
ccacaaguacaucaaagag

SEQ ID NO: 58158 - RNA, 19 nt, Artificial Sequence
  Description of Artificial Sequence: Synthetic oligonucleotide
cugcaaacuguauaagcca

SEQ ID NO: 58159 - RNA, 19 nt, Artificial Sequence
  Description of Artificial Sequence: Synthetic oligonucleotide
cuacuaccucaauugcuag

SEQ ID NO: 58160 - RNA, 19 nt, Artificial Sequence
  Description of Artificial Sequence: Synthetic oligonucleotide
aagcaguggaacucugcaa

SEQ ID NO: 58161 - RNA, 19 nt, Artificial Sequence
  Description of Artificial Sequence: Synthetic oligonucleotide
uucccuauuuauguaaauu

SEQ ID NO: 58162 - RNA, 19 nt, Artificial Sequence
  Description of Artificial Sequence: Synthetic oligonucleotide
aucgggaucaggaaaucug

SEQ ID NO: 58163 - RNA, 19 nt, Artificial Sequence
  Description of Artificial Sequence: Synthetic oligonucleotide
uauauaugacaagucuuuu

SEQ ID NO: 58164 - RNA, 19 nt, Artificial Sequence
  Description of Artificial Sequence: Synthetic oligonucleotide
cacguaugcaucaucuaca

SEQ ID NO: 58165 - RNA, 19 nt, Artificial Sequence
  Description of Artificial Sequence: Synthetic oligonucleotide
guaaacuacuuagcugaag

SEQ ID NO: 58166 - RNA, 19 nt, Artificial Sequence
  Description of Artificial Sequence: Synthetic oligonucleotide
acagguaauuaaauagcca

SEQ ID NO: 58167 - RNA, 19 nt, Artificial Sequence
  Description of Artificial Sequence: Synthetic oligonucleotide
acuacuaccucaauugcua

SEQ ID NO: 58168 - RNA, 19 nt, Artificial Sequence
  Description of Artificial Sequence: Synthetic oligonucleotide
ccugacagacuguaaauac

SEQ ID NO: 58169 - RNA, 19 nt, Artificial Sequence
  Description of Artificial Sequence: Synthetic oligonucleotide
aacuguaugcggccugcaa

SEQ ID NO: 58170 - RNA, 19 nt, Artificial Sequence
  Description of Artificial Sequence: Synthetic oligonucleotide
auccuguuaaagaaugaga

SEQ ID NO: 58171 - RNA, 19 nt, Artificial Sequence
  Description of Artificial Sequence: Synthetic oligonucleotide
agccauacuuuuccacaag

SEQ ID NO: 58172 - RNA, 19 nt, Artificial Sequence
  Description of Artificial Sequence: Synthetic oligonucleotide
uucacacaacguacuggga

SEQ ID NO: 58173 - RNA, 19 nt, Artificial Sequence
  Description of Artificial Sequence: Synthetic oligonucleotide
acacuauuugagcuaguuu

SEQ ID NO: 58174 - RNA, 19 nt, Artificial Sequence
  Description of Artificial Sequence: Synthetic oligonucleotide
  modified_base (14)..(14): a, c, u, g, unknown or other
uucuagcuucaccnuuauc

SEQ ID NO: 58175 - RNA, 19 nt, Artificial Sequence
  Description of Artificial Sequence: Synthetic oligonucleotide
agccuaugugacuuauacu

SEQ ID NO: 58176 - RNA, 19 nt, Artificial Sequence
  Description of Artificial Sequence: Synthetic oligonucleotide
auggccaguaaacuacuua

SEQ ID NO: 58177 - RNA, 19 nt, Artificial Sequence
  Description of Artificial Sequence: Synthetic oligonucleotide
auauaccucucuauguuau

SEQ ID NO: 58178 - RNA, 19 nt, Artificial Sequence
  Description of Artificial Sequence: Synthetic oligonucleotide
acgaguuugaaaagaagua

SEQ ID NO: 58179 - RNA, 19 nt, Artificial Sequence
  Description of Artificial Sequence: Synthetic oligonucleotide
caauugcuaggcaggcuac

SEQ ID NO: 58180 - RNA, 19 nt, Artificial Sequence
  Description of Artificial Sequence: Synthetic oligonucleotide
aguuaacgauuuucaaaua

SEQ ID NO: 58181 - RNA, 19 nt, Artificial Sequence
  Description of Artificial Sequence: Synthetic oligonucleotide
cuaacaucgggaucaggaa

SEQ ID NO: 58182 - RNA, 19 nt, Artificial Sequence
  Description of Artificial Sequence: Synthetic oligonucleotide
gcacguaugcaucaucuac

SEQ ID NO: 58183 - RNA, 19 nt, Artificial Sequence
  Description of Artificial Sequence: Synthetic oligonucleotide
ugcaguuuacgaguuugaa

SEQ ID NO: 58184 - RNA, 19 nt, Artificial Sequence
  Description of Artificial Sequence: Synthetic oligonucleotide
cacacaacguacugggaga

SEQ ID NO: 58185 - RNA, 19 nt, Artificial Sequence
  Description of Artificial Sequence: Synthetic oligonucleotide
agaaccucuauggaccuau

SEQ ID NO: 58186 - RNA, 19 nt, Artificial Sequence
  Description of Artificial Sequence: Synthetic oligonucleotide
cuuagggacauguuauugu

SEQ ID NO: 58187 - RNA, 19 nt, Artificial Sequence
  Description of Artificial Sequence: Synthetic oligonucleotide
uugccuacuaaugguuugu

SEQ ID NO: 58188 - RNA, 19 nt, Artificial Sequence
  Description of Artificial Sequence: Synthetic oligonucleotide
auugcuaggcaggcuacca

SEQ ID NO: 58189 - RNA, 19 nt, Artificial Sequence
  Description of Artificial Sequence: Synthetic oligonucleotide
auguacuggggaaacauuu

SEQ ID NO: 58190 - RNA, 19 nt, Artificial Sequence
  Description of Artificial Sequence: Synthetic oligonucleotide
cucgaacacuauuugagcu

SEQ ID NO: 58191 - RNA, 19 nt, Artificial Sequence
  Description of Artificial Sequence: Synthetic oligonucleotide
uggaccuauacugccgagu

SEQ ID NO: 58192 - RNA, 19 nt, Artificial Sequence
  Description of Artificial Sequence: Synthetic oligonucleotide
uucgcacguaugcaucauc

SEQ ID NO: 58193 - RNA, 19 nt, Artificial Sequence
  Description of Artificial Sequence: Synthetic oligonucleotide
gccuaugugacuuauacuu

SEQ ID NO: 58194 - RNA, 19 nt, Artificial Sequence
  Description of Artificial Sequence: Synthetic oligonucleotide
uaauucauccaaggcuguc

SEQ ID NO: 58195 - RNA, 19 nt, Artificial Sequence
  Description of Artificial Sequence: Synthetic oligonucleotide
aaugcgguucgaacaaaua

SEQ ID NO: 58196 - RNA, 19 nt, Artificial Sequence
  Description of Artificial Sequence: Synthetic oligonucleotide
uccuuuagcuuuggugaca

SEQ ID NO: 58197 - RNA, 19 nt, Artificial Sequence
  Description of Artificial Sequence: Synthetic oligonucleotide
gucgaaugauacucuucac

SEQ ID NO: 58198 - RNA, 19 nt, Artificial Sequence
  Description of Artificial Sequence: Synthetic oligonucleotide
augugccgaaguucuccuc

SEQ ID NO: 58199 - RNA, 19 nt, Artificial Sequence
  Description of Artificial Sequence: Synthetic oligonucleotide
uuacaacacuuguuagcuu

SEQ ID NO: 58200 - RNA, 19 nt, Artificial Sequence
  Description of Artificial Sequence: Synthetic oligonucleotide
agcacccaaacaaaggauu

SEQ ID NO: 58201 - RNA, 19 nt, Artificial Sequence
  Description of Artificial Sequence: Synthetic oligonucleotide
cagugguaacacuuuccuc

SEQ ID NO: 58202 - RNA, 19 nt, Artificial Sequence
  Description of Artificial Sequence: Synthetic oligonucleotide
gcaaguaaagcugcuuaug

SEQ ID NO: 58203 - RNA, 19 nt, Artificial Sequence
  Description of Artificial Sequence: Synthetic oligonucleotide
acaucgggaucaggaaauc

SEQ ID NO: 58204 - RNA, 19 nt, Artificial Sequence
  Description of Artificial Sequence: Synthetic oligonucleotide
cuacugagagcaaauguau

SEQ ID NO: 58205 - RNA, 19 nt, Artificial Sequence
  Description of Artificial Sequence: Synthetic oligonucleotide
guuauauucuaaaguugua

SEQ ID NO: 58206 - RNA, 19 nt, Artificial Sequence
  Description of Artificial Sequence: Synthetic oligonucleotide
auggaccuauacugccgag

SEQ ID NO: 58207 - RNA, 19 nt, Artificial Sequence
  Description of Artificial Sequence: Synthetic oligonucleotide
cagaaugcgguucgaacaa

SEQ ID NO: 58208 - RNA, 19 nt, Artificial Sequence
  Description of Artificial Sequence: Synthetic oligonucleotide
gaauucaaccaaggauguc

SEQ ID NO: 58209 - RNA, 19 nt, Artificial Sequence
  Description of Artificial Sequence: Synthetic oligonucleotide
uaguaacuacuaccucaau

SEQ ID NO: 58210 - RNA, 19 nt, Artificial Sequence
  Description of Artificial Sequence: Synthetic oligonucleotide
gaugugccgaaguucuccu

SEQ ID NO: 58211 - RNA, 19 nt, Artificial Sequence
  Description of Artificial Sequence: Synthetic oligonucleotide
  modified_base (5)..(5): a, c, u, g, unknown or other
caccnuuauccuuugucua

SEQ ID NO: 58212 - RNA, 19 nt, Artificial Sequence
  Description of Artificial Sequence: Synthetic oligonucleotide
auggcucggcagugguaac

SEQ ID NO: 58213 - RNA, 19 nt, Artificial Sequence
  Description of Artificial Sequence: Synthetic oligonucleotide
aaacuguaugcggccugca

SEQ ID NO: 58214 - RNA, 19 nt, Artificial Sequence
  Description of Artificial Sequence: Synthetic oligonucleotide
cucugcgauugaagaauuc

SEQ ID NO: 58215 - RNA, 19 nt, Artificial Sequence
  Description of Artificial Sequence: Synthetic oligonucleotide
cgauaacaaucuaacauca

SEQ ID NO: 58216 - RNA, 19 nt, Artificial Sequence
  Description of Artificial Sequence: Synthetic oligonucleotide
cuugguuccaacugauaau

SEQ ID NO: 58217 - RNA, 19 nt, Artificial Sequence
  Description of Artificial Sequence: Synthetic oligonucleotide
agccaagccuaugugacuu

SEQ ID NO: 58218 - RNA, 19 nt, Artificial Sequence
  Description of Artificial Sequence: Synthetic oligonucleotide
cccagaaugcgguucgaac

SEQ ID NO: 58219 - RNA, 19 nt, Artificial Sequence
  Description of Artificial Sequence: Synthetic oligonucleotide
acuguauaagccacaccuu

SEQ ID NO: 58220 - RNA, 19 nt, Artificial Sequence
  Description of Artificial Sequence: Synthetic oligonucleotide
guaugcuaagaagcacuca

SEQ ID NO: 58221 - RNA, 19 nt, Artificial Sequence
  Description of Artificial Sequence: Synthetic oligonucleotide
cuuggugaugugccgaagu

SEQ ID NO: 58222 - RNA, 19 nt, Artificial Sequence
  Description of Artificial Sequence: Synthetic oligonucleotide
uggcucggcagugguaaca

SEQ ID NO: 58223 - RNA, 19 nt, Artificial Sequence
  Description of Artificial Sequence: Synthetic oligonucleotide
  modified_base (2)..(2): a, c, u, g, unknown or other
cnuuauccuuugucuaucu

SEQ ID NO: 58224 - RNA, 19 nt, Artificial Sequence
  Description of Artificial Sequence: Synthetic oligonucleotide
gcgguucgaacaaauaguc

SEQ ID NO: 58225 - RNA, 19 nt, Artificial Sequence
  Description of Artificial Sequence: Synthetic oligonucleotide
uauagugcuguggcaccua

SEQ ID NO: 58226 - RNA, 19 nt, Artificial Sequence
  Description of Artificial Sequence: Synthetic oligonucleotide
accugucgaaugauacucu

SEQ ID NO: 58227 - RNA, 19 nt, Artificial Sequence
  Description of Artificial Sequence: Synthetic oligonucleotide
cuaccucaauugcuaggca

SEQ ID NO: 58228 - RNA, 19 nt, Artificial Sequence
  Description of Artificial Sequence: Synthetic oligonucleotide
guauguugacucugucacu

SEQ ID NO: 58229 - RNA, 19 nt, Artificial Sequence
  Description of Artificial Sequence: Synthetic oligonucleotide
ugccuacuaaugguuugua

SEQ ID NO: 58230 - RNA, 19 nt, Artificial Sequence
  Description of Artificial Sequence: Synthetic oligonucleotide
gcaacaugcaauguaugcu

SEQ ID NO: 58231 - RNA, 19 nt, Artificial Sequence
  Description of Artificial Sequence: Synthetic oligonucleotide
cuauacugccgagucugga

SEQ ID NO: 58232 - RNA, 19 nt, Artificial Sequence
  Description of Artificial Sequence: Synthetic oligonucleotide
ccucaauugcuaggcaggc

SEQ ID NO: 58233 - RNA, 19 nt, Artificial Sequence
  Description of Artificial Sequence: Synthetic oligonucleotide
agaaugcgguucgaacaaa

SEQ ID NO: 58234 - RNA, 19 nt, Artificial Sequence
  Description of Artificial Sequence: Synthetic oligonucleotide
uggggccagccauacuuuu

SEQ ID NO: 58235 - RNA, 19 nt, Artificial Sequence
  Description of Artificial Sequence: Synthetic oligonucleotide
gaaugcgguucgaacaaau

SEQ ID NO: 58236 - RNA, 19 nt, Artificial Sequence
  Description of Artificial Sequence: Synthetic oligonucleotide
cccauucaugccugaaauc

SEQ ID NO: 58237 - RNA, 19 nt, Artificial Sequence
  Description of Artificial Sequence: Synthetic oligonucleotide
  modified_base (3)..(3): a, c, u, g, unknown or other
ccnuuauccuuugucuauc

SEQ ID NO: 58238 - RNA, 19 nt, Artificial Sequence
  Description of Artificial Sequence: Synthetic oligonucleotide
guucccuauuuauguaaau

SEQ ID NO: 58239 - RNA, 19 nt, Artificial Sequence
  Description of Artificial Sequence: Synthetic oligonucleotide
ccaugcagacauguauccc

SEQ ID NO: 58240 - RNA, 19 nt, Artificial Sequence
  Description of Artificial Sequence: Synthetic oligonucleotide
cauuugccuuuucuugaua

SEQ ID NO: 58241 - RNA, 19 nt, Artificial Sequence
  Description of Artificial Sequence: Synthetic oligonucleotide
ccuaugugacuuauacuua

SEQ ID NO: 58242 - RNA, 19 nt, Artificial Sequence
  Description of Artificial Sequence: Synthetic oligonucleotide
aucuaacaucauacagaau

SEQ ID NO: 58243 - RNA, 19 nt, Artificial Sequence
  Description of Artificial Sequence: Synthetic oligonucleotide
gggaaacauuugcuagcuc

SEQ ID NO: 58244 - RNA, 19 nt, Artificial Sequence
  Description of Artificial Sequence: Synthetic oligonucleotide
ccuugggauacugccuagc

SEQ ID NO: 58245 - RNA, 19 nt, Artificial Sequence
  Description of Artificial Sequence: Synthetic oligonucleotide
caucgggaucaggaaaucu

SEQ ID NO: 58246 - RNA, 19 nt, Artificial Sequence
  Description of Artificial Sequence: Synthetic oligonucleotide
gaaccucuauggaccuaua

SEQ ID NO: 58247 - RNA, 19 nt, Artificial Sequence
  Description of Artificial Sequence: Synthetic oligonucleotide
gcuccgaucagaaccucua

SEQ ID NO: 58248 - RNA, 19 nt, Artificial Sequence
  Description of Artificial Sequence: Synthetic oligonucleotide
gccuacuaaugguuuguau

SEQ ID NO: 58249 - RNA, 19 nt, Artificial Sequence
  Description of Artificial Sequence: Synthetic oligonucleotide
  modified_base (8)..(8): a, c, u, g, unknown or other
cuucaccnuuauccuuugu

SEQ ID NO: 58250 - RNA, 19 nt, Artificial Sequence
  Description of Artificial Sequence: Synthetic oligonucleotide
caguggaacucugcaacau

SEQ ID NO: 58251 - RNA, 19 nt, Artificial Sequence
  Description of Artificial Sequence: Synthetic oligonucleotide
cuccgaucagaaccucuau

SEQ ID NO: 58252 - RNA, 19 nt, Artificial Sequence
  Description of Artificial Sequence: Synthetic oligonucleotide
auacugccuagcagcucua

SEQ ID NO: 58253 - RNA, 19 nt, Artificial Sequence
  Description of Artificial Sequence: Synthetic oligonucleotide
cagcuccgaucagaaccuc

SEQ ID NO: 58254 - RNA, 19 nt, Artificial Sequence
  Description of Artificial Sequence: Synthetic oligonucleotide
ccugucgaaugauacucuu

SEQ ID NO: 58255 - RNA, 19 nt, Artificial Sequence
  Description of Artificial Sequence: Synthetic oligonucleotide
gccaagccuaugugacuua

SEQ ID NO: 58256 - RNA, 19 nt, Artificial Sequence
  Description of Artificial Sequence: Synthetic oligonucleotide
cagcgucuucuuggggcca

SEQ ID NO: 58257 - RNA, 19 nt, Artificial Sequence
  Description of Artificial Sequence: Synthetic oligonucleotide
cuucgcacguaugcaucau

SEQ ID NO: 58258 - RNA, 19 nt, Artificial Sequence
  Description of Artificial Sequence: Synthetic oligonucleotide
cgguucgaacaaauagucu

SEQ ID NO: 58259 - RNA, 19 nt, Artificial Sequence
  Description of Artificial Sequence: Synthetic oligonucleotide
gucaugggaugggcuacuu

SEQ ID NO: 58260 - RNA, 19 nt, Artificial Sequence
  Description of Artificial Sequence: Synthetic oligonucleotide
cgcacguaugcaucaucua

SEQ ID NO: 58261 - RNA, 19 nt, Artificial Sequence
  Description of Artificial Sequence: Synthetic oligonucleotide
gggcaaugacaaaggcaau

SEQ ID NO: 58262 - RNA, 19 nt, Artificial Sequence
  Description of Artificial Sequence: Synthetic oligonucleotide
ccccagaaugcgguucgaa

SEQ ID NO: 58263 - RNA, 19 nt, Artificial Sequence
  Description of Artificial Sequence: Synthetic oligonucleotide
aacaguuauauccuuagac

SEQ ID NO: 58264 - RNA, 19 nt, Artificial Sequence
  Description of Artificial Sequence: Synthetic oligonucleotide
auaaaauaagccuacuagc

SEQ ID NO: 58265 - RNA, 19 nt, Artificial Sequence
  Description of Artificial Sequence: Synthetic oligonucleotide
uaaugcaacaguuauaucc

SEQ ID NO: 58266 - RNA, 19 nt, Artificial Sequence
  Description of Artificial Sequence: Synthetic oligonucleotide
aauauguuagcauaacuca

SEQ ID NO: 58267 - RNA, 19 nt, Artificial Sequence
  Description of Artificial Sequence: Synthetic oligonucleotide
aguguuuuagucuuaaauc

SEQ ID NO: 58268 - RNA, 19 nt, Artificial Sequence
  Description of Artificial Sequence: Synthetic oligonucleotide
aguccuaaaguguaaaccc

SEQ ID NO: 58269 - RNA, 19 nt, Artificial Sequence
  Description of Artificial Sequence: Synthetic oligonucleotide
aaauauguuagcauaacuc

SEQ ID NO: 58270 - RNA, 19 nt, Artificial Sequence
  Description of Artificial Sequence: Synthetic oligonucleotide
aauguuaacaguguuuuag

SEQ ID NO: 58271 - RNA, 19 nt, Artificial Sequence
  Description of Artificial Sequence: Synthetic oligonucleotide
aaauaagccuacuagcuug

SEQ ID NO: 58272 - RNA, 19 nt, Artificial Sequence
  Description of Artificial Sequence: Synthetic oligonucleotide
aauggaauauggcuguuuc

SEQ ID NO: 58273 - RNA, 19 nt, Artificial Sequence
  Description of Artificial Sequence: Synthetic oligonucleotide
uuauaugaguuccaggucc

SEQ ID NO: 58274 - RNA, 19 nt, Artificial Sequence
  Description of Artificial Sequence: Synthetic oligonucleotide
ucuaauaccagguacaaau

SEQ ID NO: 58275 - RNA, 19 nt, Artificial Sequence
  Description of Artificial Sequence: Synthetic oligonucleotide
uauuaagucuaauaccagg

SEQ ID NO: 58276 - RNA, 19 nt, Artificial Sequence
  Description of Artificial Sequence: Synthetic oligonucleotide
uauccuuagaccuauaggu

SEQ ID NO: 58277 - RNA, 19 nt, Artificial Sequence
  Description of Artificial Sequence: Synthetic oligonucleotide
gaaccuaauacauucacug

SEQ ID NO: 58278 - RNA, 19 nt, Artificial Sequence
  Description of Artificial Sequence: Synthetic oligonucleotide
  modified_base (8)..(8): a, c, u, g, unknown or other
gaaaacgngugacaaaggg

SEQ ID NO: 58279 - RNA, 19 nt, Artificial Sequence
  Description of Artificial Sequence: Synthetic oligonucleotide
aaggcuaucaaguucgaug

SEQ ID NO: 58280 - RNA, 19 nt, Artificial Sequence
  Description of Artificial Sequence: Synthetic oligonucleotide
ugcaaggucaugaugaacc

SEQ ID NO: 58281 - RNA, 19 nt, Artificial Sequence
  Description of Artificial Sequence: Synthetic oligonucleotide
agaaugacacuauuaaauc

SEQ ID NO: 58282 - RNA, 19 nt, Artificial Sequence
  Description of Artificial Sequence: Synthetic oligonucleotide
uaaaccauaauuugggacu

SEQ ID NO: 58283 - RNA, 19 nt, Artificial Sequence
  Description of Artificial Sequence: Synthetic oligonucleotide
  modified_base (6)..(6): a, c, u, g, unknown or other
aaacgngugacaaagggag

SEQ ID NO: 58284 - RNA, 19 nt, Artificial Sequence
  Description of Artificial Sequence: Synthetic oligonucleotide
uggguuacauaaaauaagc

SEQ ID NO: 58285 - RNA, 19 nt, Artificial Sequence
  Description of Artificial Sequence: Synthetic oligonucleotide
cauguuuuaaacugaagac

SEQ ID NO: 58286 - RNA, 19 nt, Artificial Sequence
  Description of Artificial Sequence: Synthetic oligonucleotide
uguuuuacugugcaccagg

SEQ ID NO: 58287 - RNA, 19 nt, Artificial Sequence
  Description of Artificial Sequence: Synthetic oligonucleotide
uacuauuaagucuaauacc

SEQ ID NO: 58288 - RNA, 19 nt, Artificial Sequence
  Description of Artificial Sequence: Synthetic oligonucleotide
auaacuaagugucugauuu

SEQ ID NO: 58289 - RNA, 19 nt, Artificial Sequence
  Description of Artificial Sequence: Synthetic oligonucleotide
guacuauuaagucuaauac

SEQ ID NO: 58290 - RNA, 19 nt, Artificial Sequence
  Description of Artificial Sequence: Synthetic oligonucleotide
  modified_base (17)..(17): a, c, u, g, unknown or other
auugucaacuuuuaggngu

SEQ ID NO: 58291 - RNA, 19 nt, Artificial Sequence
  Description of Artificial Sequence: Synthetic oligonucleotide
  modified_base (18)..(18): a, c, u, g, unknown or other
cuuguguucagaaaacgng

SEQ ID NO: 58292 - RNA, 19 nt, Artificial Sequence
  Description of Artificial Sequence: Synthetic oligonucleotide
auuuagaaguuccccaaac

SEQ ID NO: 58293 - RNA, 19 nt, Artificial Sequence
  Description of Artificial Sequence: Synthetic oligonucleotide
uuucgaaucacuaccuuca

SEQ ID NO: 58294 - RNA, 19 nt, Artificial Sequence
  Description of Artificial Sequence: Synthetic oligonucleotide
  modified_base (7)..(7): a, c, u, g, unknown or other
uuuaggnguuuccaugugc

SEQ ID NO: 58295 - RNA, 19 nt, Artificial Sequence
  Description of Artificial Sequence: Synthetic oligonucleotide
aucagaauggaauauggcu

SEQ ID NO: 58296 - RNA, 19 nt, Artificial Sequence
  Description of Artificial Sequence: Synthetic oligonucleotide
uauauccuuagaccuauag

SEQ ID NO: 58297 - RNA, 19 nt, Artificial Sequence
  Description of Artificial Sequence: Synthetic oligonucleotide
cuaaccuaauucuagcacc

SEQ ID NO: 58298 - RNA, 19 nt, Artificial Sequence
  Description of Artificial Sequence: Synthetic oligonucleotide
aagacagggaaaauaguac

SEQ ID NO: 58299 - RNA, 19 nt, Artificial Sequence
  Description of Artificial Sequence: Synthetic oligonucleotide
agacagggaaaauaguacg

SEQ ID NO: 58300 - RNA, 19 nt, Artificial Sequence
  Description of Artificial Sequence: Synthetic oligonucleotide
uauauuauaugaguuccag

SEQ ID NO: 58301 - RNA, 19 nt, Artificial Sequence
  Description of Artificial Sequence: Synthetic oligonucleotide
auauccuuagaccuauagg

SEQ ID NO: 58302 - RNA, 19 nt, Artificial Sequence
  Description of Artificial Sequence: Synthetic oligonucleotide
acuauuaagucuaauacca

SEQ ID NO: 58303 - RNA, 19 nt, Artificial Sequence
  Description of Artificial Sequence: Synthetic oligonucleotide
auuucgaaucacuaccuuc

SEQ ID NO: 58304 - RNA, 19 nt, Artificial Sequence
  Description of Artificial Sequence: Synthetic oligonucleotide
uaagacagggaaaauagua

SEQ ID NO: 58305 - RNA, 19 nt, Artificial Sequence
  Description of Artificial Sequence: Synthetic oligonucleotide
augaaccuaauacauucac

SEQ ID NO: 58306 - RNA, 19 nt, Artificial Sequence
  Description of Artificial Sequence: Synthetic oligonucleotide
auauuauaugaguuccagg

SEQ ID NO: 58307 - RNA, 19 nt, Artificial Sequence
  Description of Artificial Sequence: Synthetic oligonucleotide
uuuuagaaguccuuagagu

SEQ ID NO: 58308 - RNA, 19 nt, Artificial Sequence
  Description of Artificial Sequence: Synthetic oligonucleotide
ucaaaaguugugcaacuga

SEQ ID NO: 58309 - RNA, 19 nt, Artificial Sequence
  Description of Artificial Sequence: Synthetic oligonucleotide
uaauaauuguuaguucagg

SEQ ID NO: 58310 - RNA, 19 nt, Artificial Sequence
  Description of Artificial Sequence: Synthetic oligonucleotide
uagugguuguuuuagaagu

SEQ ID NO: 58311 - RNA, 19 nt, Artificial Sequence
  Description of Artificial Sequence: Synthetic oligonucleotide
agcugggaggauuaaauuc

SEQ ID NO: 58312 - RNA, 19 nt, Artificial Sequence
  Description of Artificial Sequence: Synthetic oligonucleotide
ucuuguuugagcaggguaa

SEQ ID NO: 58313 - RNA, 19 nt, Artificial Sequence
  Description of Artificial Sequence: Synthetic oligonucleotide
uaauaccagguacaaaugu

SEQ ID NO: 58314 - RNA, 19 nt, Artificial Sequence
  Description of Artificial Sequence: Synthetic oligonucleotide
aaauucuggacuacaaaug

SEQ ID NO: 58315 - RNA, 19 nt, Artificial Sequence
  Description of Artificial Sequence: Synthetic oligonucleotide
caaaaguugugcaacugag

SEQ ID NO: 58316 - RNA, 19 nt, Artificial Sequence
  Description of Artificial Sequence: Synthetic oligonucleotide
ugguauaaugaauauaauu

SEQ ID NO: 58317 - RNA, 19 nt, Artificial Sequence
  Description of Artificial Sequence: Synthetic oligonucleotide
auauggguuacauaaaaua

SEQ ID NO: 58318 - RNA, 19 nt, Artificial Sequence
  Description of Artificial Sequence: Synthetic oligonucleotide
aggauauugcuuuuaauaa

SEQ ID NO: 58319 - RNA, 19 nt, Artificial Sequence
  Description of Artificial Sequence: Synthetic oligonucleotide
aaaauaagccuacuagcuu

SEQ ID NO: 58320 - RNA, 19 nt, Artificial Sequence
  Description of Artificial Sequence: Synthetic oligonucleotide
  modified_base (6)..(6): a, c, u, g, unknown or other
uuaggnguuuccaugugcu

SEQ ID NO: 58321 - RNA, 19 nt, Artificial Sequence
  Description of Artificial Sequence: Synthetic oligonucleotide
auaguccuaaaguguaaac

SEQ ID NO: 58322 - RNA, 19 nt, Artificial Sequence
  Description of Artificial Sequence: Synthetic oligonucleotide
caagcuaaccuaauucuag

SEQ ID NO: 58323 - RNA, 19 nt, Artificial Sequence
  Description of Artificial Sequence: Synthetic oligonucleotide
acuacugcuagaacggacc

SEQ ID NO: 58324 - RNA, 19 nt, Artificial Sequence
  Description of Artificial Sequence: Synthetic oligonucleotide
ugugguugcacuaaaccau

SEQ ID NO: 58325 - RNA, 19 nt, Artificial Sequence
  Description of Artificial Sequence: Synthetic oligonucleotide
ugaaugguugguccaaaug

SEQ ID NO: 58326 - RNA, 19 nt, Artificial Sequence
  Description of Artificial Sequence: Synthetic oligonucleotide
  modified_base (7)..(7): a, c, u, g, unknown or other
aaaacgngugacaaaggga

SEQ ID NO: 58327 - RNA, 19 nt, Artificial Sequence
  Description of Artificial Sequence: Synthetic oligonucleotide
aaugaacaauagauggcac

SEQ ID NO: 58328 - RNA, 19 nt, Artificial Sequence
  Description of Artificial Sequence: Synthetic oligonucleotide
uccuuagaccuauagguug

SEQ ID NO: 58329 - RNA, 19 nt, Artificial Sequence
  Description of Artificial Sequence: Synthetic oligonucleotide
uuuuacugugcaccagggg

SEQ ID NO: 58330 - RNA, 19 nt, Artificial Sequence
  Description of Artificial Sequence: Synthetic oligonucleotide
uggaccuauaaacuuguga

SEQ ID NO: 58331 - RNA, 19 nt, Artificial Sequence
  Description of Artificial Sequence: Synthetic oligonucleotide
uucuuuguauccuuaggcu

SEQ ID NO: 58332 - RNA, 19 nt, Artificial Sequence
  Description of Artificial Sequence: Synthetic oligonucleotide
aauguuaaggauauugcuu

SEQ ID NO: 58333 - RNA, 19 nt, Artificial Sequence
  Description of Artificial Sequence: Synthetic oligonucleotide
uccuauauuauaugaguuc

SEQ ID NO: 58334 - RNA, 19 nt, Artificial Sequence
  Description of Artificial Sequence: Synthetic oligonucleotide
uuauggaguugaaaucugc

SEQ ID NO: 58335 - RNA, 19 nt, Artificial Sequence
  Description of Artificial Sequence: Synthetic oligonucleotide
uaacuaaagauaacacuuc

SEQ ID NO: 58336 - RNA, 19 nt, Artificial Sequence
  Description of Artificial Sequence: Synthetic oligonucleotide
accagaaauaaauauguua

SEQ ID NO: 58337 - RNA, 19 nt, Artificial Sequence
  Description of Artificial Sequence: Synthetic oligonucleotide
auuccgauugugaugauag

SEQ ID NO: 58338 - RNA, 19 nt, Artificial Sequence
  Description of Artificial Sequence: Synthetic oligonucleotide
uauaaguuuugccauucau

SEQ ID NO: 58339 - RNA, 19 nt, Artificial Sequence
  Description of Artificial Sequence: Synthetic oligonucleotide
aaccuaaauguuuuccuau

SEQ ID NO: 58340 - RNA, 19 nt, Artificial Sequence
  Description of Artificial Sequence: Synthetic oligonucleotide
uguaccuacacagaguuua

SEQ ID NO: 58341 - RNA, 19 nt, Artificial Sequence
  Description of Artificial Sequence: Synthetic oligonucleotide
ugaaccuaauacauucacu

SEQ ID NO: 58342 - RNA, 19 nt, Artificial Sequence
  Description of Artificial Sequence: Synthetic oligonucleotide
aguguaaacccaucuauaa

SEQ ID NO: 58343 - RNA, 19 nt, Artificial Sequence
  Description of Artificial Sequence: Synthetic oligonucleotide
gccaacuuaagauagaauc

SEQ ID NO: 58344 - RNA, 19 nt, Artificial Sequence
  Description of Artificial Sequence: Synthetic oligonucleotide
aaccuaauacauucacugu

SEQ ID NO: 58345 - RNA, 19 nt, Artificial Sequence
  Description of Artificial Sequence: Synthetic oligonucleotide
auauuagauaaacauggua

SEQ ID NO: 58346 - RNA, 19 nt, Artificial Sequence
  Description of Artificial Sequence: Synthetic oligonucleotide
uaacaucuguccuauggca

SEQ ID NO: 58347 - RNA, 19 nt, Artificial Sequence
  Description of Artificial Sequence: Synthetic oligonucleotide
agauagaaucuauaaugca

SEQ ID NO: 58348 - RNA, 19 nt, Artificial Sequence
  Description of Artificial Sequence: Synthetic oligonucleotide
uuaaugaucugaguuagua

SEQ ID NO: 58349 - RNA, 19 nt, Artificial Sequence
  Description of Artificial Sequence: Synthetic oligonucleotide
gaaucacuaccuucaagug

SEQ ID NO: 58350 - RNA, 19 nt, Artificial Sequence
  Description of Artificial Sequence: Synthetic oligonucleotide
aauaacuaagugucugauu

SEQ ID NO: 58351 - RNA, 19 nt, Artificial Sequence
  Description of Artificial Sequence: Synthetic oligonucleotide
ugaauaauuuugagacuga

SEQ ID NO: 58352 - RNA, 19 nt, Artificial Sequence
  Description of Artificial Sequence: Synthetic oligonucleotide
ugauuuagaaguuccccaa

SEQ ID NO: 58353 - RNA, 19 nt, Artificial Sequence
  Description of Artificial Sequence: Synthetic oligonucleotide
cagauagagcuucugaaac

SEQ ID NO: 58354 - RNA, 19 nt, Artificial Sequence
  Description of Artificial Sequence: Synthetic oligonucleotide
cuugguacuauuaagucua

SEQ ID NO: 58355 - RNA, 19 nt, Artificial Sequence
  Description of Artificial Sequence: Synthetic oligonucleotide
auguuaggaacauuucugu

SEQ ID NO: 58356 - RNA, 19 nt, Artificial Sequence
  Description of Artificial Sequence: Synthetic oligonucleotide
ugcgaagggguuaaaggca

SEQ ID NO: 58357 - RNA, 19 nt, Artificial Sequence
  Description of Artificial Sequence: Synthetic oligonucleotide
uauaugaguuccaggucca

SEQ ID NO: 58358 - RNA, 19 nt, Artificial Sequence
  Description of Artificial Sequence: Synthetic oligonucleotide
cuauuaagucuaauaccag

SEQ ID NO: 58359 - RNA, 19 nt, Artificial Sequence
  Description of Artificial Sequence: Synthetic oligonucleotide
gaacuaggaaagcugugug

SEQ ID NO: 58360 - RNA, 19 nt, Artificial Sequence
  Description of Artificial Sequence: Synthetic oligonucleotide
ucgaguaauaauuguuagu

SEQ ID NO: 58361 - RNA, 19 nt, Artificial Sequence
  Description of Artificial Sequence: Synthetic oligonucleotide
uucuaucuuuaccacaaau

SEQ ID NO: 58362 - RNA, 19 nt, Artificial Sequence
  Description of Artificial Sequence: Synthetic oligonucleotide
aagucuuuuccgguuauca

SEQ ID NO: 58363 - RNA, 19 nt, Artificial Sequence
  Description of Artificial Sequence: Synthetic oligonucleotide
caccaaaugaauauucuga

SEQ ID NO: 58364 - RNA, 19 nt, Artificial Sequence
  Description of Artificial Sequence: Synthetic oligonucleotide
gagugaaugguauaaugaa

SEQ ID NO: 58365 - RNA, 19 nt, Artificial Sequence
  Description of Artificial Sequence: Synthetic oligonucleotide
uuccuauauuauaugaguu

SEQ ID NO: 58366 - RNA, 19 nt, Artificial Sequence
  Description of Artificial Sequence: Synthetic oligonucleotide
ugccugacaucuaaugaug

SEQ ID NO: 58367 - RNA, 19 nt, Artificial Sequence
  Description of Artificial Sequence: Synthetic oligonucleotide
ugcauacuaguuugguaag

SEQ ID NO: 58368 - RNA, 19 nt, Artificial Sequence
  Description of Artificial Sequence: Synthetic oligonucleotide
gugcgaagggguuaaaggc

SEQ ID NO: 58369 - RNA, 19 nt, Artificial Sequence
  Description of Artificial Sequence: Synthetic oligonucleotide
agggaaaauaguacgucac

SEQ ID NO: 58370 - RNA, 19 nt, Artificial Sequence
  Description of Artificial Sequence: Synthetic oligonucleotide
uguuugagcaggguaauuc

SEQ ID NO: 58371 - RNA, 19 nt, Artificial Sequence
  Description of Artificial Sequence: Synthetic oligonucleotide
  modified_base (8)..(8): a, c, u, g, unknown or other
uuuuaggnguuuccaugug

SEQ ID NO: 58372 - RNA, 19 nt, Artificial Sequence
  Description of Artificial Sequence: Synthetic oligonucleotide
cuaacaagcaacuccaugu

SEQ ID NO: 58373 - RNA, 19 nt, Artificial Sequence
  Description of Artificial Sequence: Synthetic oligonucleotide
acacuauuaaauccucaca

SEQ ID NO: 58374 - RNA, 19 nt, Artificial Sequence
  Description of Artificial Sequence: Synthetic oligonucleotide
agcccaaacuuucuuaaca

SEQ ID NO: 58375 - RNA, 19 nt, Artificial Sequence
  Description of Artificial Sequence: Synthetic oligonucleotide
ucuauagguaggagagccc

SEQ ID NO: 58376 - RNA, 19 nt, Artificial Sequence
  Description of Artificial Sequence: Synthetic oligonucleotide
gcaaaugacauguaccuac

SEQ ID NO: 58377 - RNA, 19 nt, Artificial Sequence
  Description of Artificial Sequence: Synthetic oligonucleotide
  modified_base (5)..(5): a, c, u, g, unknown or other
aacgngugacaaagggagc

SEQ ID NO: 58378 - RNA, 19 nt, Artificial Sequence
  Description of Artificial Sequence: Synthetic oligonucleotide
ucaagcuaaccuaauucua

SEQ ID NO: 58379 - RNA, 19 nt, Artificial Sequence
  Description of Artificial Sequence: Synthetic oligonucleotide
  modified_base (18)..(18): a, c, u, g, unknown or other
cauugucaacuuuuaggng

SEQ ID NO: 58380 - RNA, 19 nt, Artificial Sequence
  Description of Artificial Sequence: Synthetic oligonucleotide
uuauauaaggauggcaauu

SEQ ID NO: 58381 - RNA, 19 nt, Artificial Sequence
  Description of Artificial Sequence: Synthetic oligonucleotide
ggaccuauaaacuugugaa

SEQ ID NO: 58382 - RNA, 19 nt, Artificial Sequence
  Description of Artificial Sequence: Synthetic oligonucleotide
uguauccuuaggcuuaguu

SEQ ID NO: 58383 - RNA, 19 nt, Artificial Sequence
  Description of Artificial Sequence: Synthetic oligonucleotide
uuagugcaguguuucacac

SEQ ID NO: 58384 - RNA, 19 nt, Artificial Sequence
  Description of Artificial Sequence: Synthetic oligonucleotide
guaauucucauuuguaacu

SEQ ID NO: 58385 - RNA, 19 nt, Artificial Sequence
  Description of Artificial Sequence: Synthetic oligonucleotide
uuaugugguugcacuaaac

SEQ ID NO: 58386 - RNA, 19 nt, Artificial Sequence
  Description of Artificial Sequence: Synthetic oligonucleotide
uuagcauaacucagaugcu

SEQ ID NO: 58387 - RNA, 19 nt, Artificial Sequence
  Description of Artificial Sequence: Synthetic oligonucleotide
uggcacauuaugugguugc

SEQ ID NO: 58388 - RNA, 19 nt, Artificial Sequence
  Description of Artificial Sequence: Synthetic oligonucleotide
uguuagcauaacucagaug

SEQ ID NO: 58389 - RNA, 19 nt, Artificial Sequence
  Description of Artificial Sequence: Synthetic oligonucleotide
ugacauguaccuacacaga

SEQ ID NO: 58390 - RNA, 19 nt, Artificial Sequence
  Description of Artificial Sequence: Synthetic oligonucleotide
uccuauaguuaaagccucc

SEQ ID NO: 58391 - RNA, 19 nt, Artificial Sequence
  Description of Artificial Sequence: Synthetic oligonucleotide
uuuaaugaucugaguuagu

SEQ ID NO: 58392 - RNA, 19 nt, Artificial Sequence
  Description of Artificial Sequence: Synthetic oligonucleotide
cuauagguuggaauuuauc

SEQ ID NO: 58393 - RNA, 19 nt, Artificial Sequence
  Description of Artificial Sequence: Synthetic oligonucleotide
acagacgauaucucauucu

SEQ ID NO: 58394 - RNA, 19 nt, Artificial Sequence
  Description of Artificial Sequence: Synthetic oligonucleotide
  modified_base (2)..(2): a, c, u, g, unknown or other
gngugacaaagggagcugg

SEQ ID NO: 58395 - RNA, 19 nt, Artificial Sequence
  Description of Artificial Sequence: Synthetic oligonucleotide
uuuggcuaacuggugauaa

SEQ ID NO: 58396 - RNA, 19 nt, Artificial Sequence
  Description of Artificial Sequence: Synthetic oligonucleotide
aauaaguccuccacccacu

SEQ ID NO: 58397 - RNA, 19 nt, Artificial Sequence
  Description of Artificial Sequence: Synthetic oligonucleotide
cugaguaacacuagggcaa

SEQ ID NO: 58398 - RNA, 19 nt, Artificial Sequence
  Description of Artificial Sequence: Synthetic oligonucleotide
guagcuguuauggaguuga

SEQ ID NO: 58399 - RNA, 19 nt, Artificial Sequence
  Description of Artificial Sequence: Synthetic oligonucleotide
uugcaucgugucaggaucc

SEQ ID NO: 58400 - RNA, 19 nt, Artificial Sequence
  Description of Artificial Sequence: Synthetic oligonucleotide
agucucgaguaauaauugu

SEQ ID NO: 58401 - RNA, 19 nt, Artificial Sequence
  Description of Artificial Sequence: Synthetic oligonucleotide
cuugugaaugaacaauaga

SEQ ID NO: 58402 - RNA, 19 nt, Artificial Sequence
  Description of Artificial Sequence: Synthetic oligonucleotide
aggcuuaguuguuuuauaa

SEQ ID NO: 58403 - RNA, 19 nt, Artificial Sequence
  Description of Artificial Sequence: Synthetic oligonucleotide
gagucucgaguaauaauug

SEQ ID NO: 58404 - RNA, 19 nt, Artificial Sequence
  Description of Artificial Sequence: Synthetic oligonucleotide
guuuuacugugcaccaggg

SEQ ID NO: 58405 - RNA, 19 nt, Artificial Sequence
  Description of Artificial Sequence: Synthetic oligonucleotide
uuuguauccuuaggcuuag

SEQ ID NO: 58406 - RNA, 19 nt, Artificial Sequence
  Description of Artificial Sequence: Synthetic oligonucleotide
gagcucuauagguaggaga

SEQ ID NO: 58407 - RNA, 19 nt, Artificial Sequence
  Description of Artificial Sequence: Synthetic oligonucleotide
aauaagccuacuagcuugu

SEQ ID NO: 58408 - RNA, 19 nt, Artificial Sequence
  Description of Artificial Sequence: Synthetic oligonucleotide
  modified_base (9)..(9): a, c, u, g, unknown or other
agaaaacgngugacaaagg

SEQ ID NO: 58409 - RNA, 19 nt, Artificial Sequence
  Description of Artificial Sequence: Synthetic oligonucleotide
  modified_base (4)..(4): a, c, u, g, unknown or other
aggnguuuccaugugcugu

SEQ ID NO: 58410 - RNA, 19 nt, Artificial Sequence
  Description of Artificial Sequence: Synthetic oligonucleotide
auaaacccuguaguuagug

SEQ ID NO: 58411 - RNA, 19 nt, Artificial Sequence
  Description of Artificial Sequence: Synthetic oligonucleotide
gcuagaacggaccucagga

SEQ ID NO: 58412 - RNA, 19 nt, Artificial Sequence
  Description of Artificial Sequence: Synthetic oligonucleotide
cugaccaaucugcagcuac

SEQ ID NO: 58413 - RNA, 19 nt, Artificial Sequence
  Description of Artificial Sequence: Synthetic oligonucleotide
  modified_base (4)..(4): a, c, u, g, unknown or other
acgngugacaaagggagcu

SEQ ID NO: 58414 - RNA, 19 nt, Artificial Sequence
  Description of Artificial Sequence: Synthetic oligonucleotide
uguuaggaacauuucuguu

SEQ ID NO: 58415 - RNA, 19 nt, Artificial Sequence
  Description of Artificial Sequence: Synthetic oligonucleotide
cuauauuauaugaguucca

SEQ ID NO: 58416 - RNA, 19 nt, Artificial Sequence
  Description of Artificial Sequence: Synthetic oligonucleotide
caugaugaaccuaauacau

SEQ ID NO: 58417 - RNA, 19 nt, Artificial Sequence
  Description of Artificial Sequence: Synthetic oligonucleotide
acuguagcuguuauggagu

SEQ ID NO: 58418 - RNA, 19 nt, Artificial Sequence
  Description of Artificial Sequence: Synthetic oligonucleotide
auuaugugguugcacuaaa

SEQ ID NO: 58419 - RNA, 19 nt, Artificial Sequence
  Description of Artificial Sequence: Synthetic oligonucleotide
caguuauauccuuagaccu

SEQ ID NO: 58420 - RNA, 19 nt, Artificial Sequence
  Description of Artificial Sequence: Synthetic oligonucleotide
ggcugaaaaggagauuucg

SEQ ID NO: 58421 - RNA, 19 nt, Artificial Sequence
  Description of Artificial Sequence: Synthetic oligonucleotide
ggaauuuaucugcuucaag

SEQ ID NO: 58422 - RNA, 19 nt, Artificial Sequence
  Description of Artificial Sequence: Synthetic oligonucleotide
caugccugacaucuaauga

SEQ ID NO: 58423 - RNA, 19 nt, Artificial Sequence
  Description of Artificial Sequence: Synthetic oligonucleotide
agugaaugguauaaugaau

SEQ ID NO: 58424 - RNA, 19 nt, Artificial Sequence
  Description of Artificial Sequence: Synthetic oligonucleotide
  modified_base (5)..(5): a, c, u, g, unknown or other
uaggnguuuccaugugcug

SEQ ID NO: 58425 - RNA, 19 nt, Artificial Sequence
  Description of Artificial Sequence: Synthetic oligonucleotide
acgaugcaaggucaugaug

SEQ ID NO: 58426 - RNA, 19 nt, Artificial Sequence
  Description of Artificial Sequence: Synthetic oligonucleotide
caacagcaaauuccugugc

SEQ ID NO: 58427 - RNA, 19 nt, Artificial Sequence
  Description of Artificial Sequence: Synthetic oligonucleotide
acuuagugguuguuuuaga

SEQ ID NO: 58428 - RNA, 19 nt, Artificial Sequence
  Description of Artificial Sequence: Synthetic oligonucleotide
uggacuacaaaugcagguu

SEQ ID NO: 58429 - RNA, 19 nt, Artificial Sequence
  Description of Artificial Sequence: Synthetic oligonucleotide
agcuacaccccaacccucc

SEQ ID NO: 58430 - RNA, 19 nt, Artificial Sequence
  Description of Artificial Sequence: Synthetic oligonucleotide
aaauaguccuaaaguguaa

SEQ ID NO: 58431 - RNA, 19 nt, Artificial Sequence
  Description of Artificial Sequence: Synthetic oligonucleotide
agucuuuuccgguuaucau

SEQ ID NO: 58432 - RNA, 19 nt, Artificial Sequence
  Description of Artificial Sequence: Synthetic oligonucleotide
uucugugaacuaggaaagc

SEQ ID NO: 58433 - RNA, 19 nt, Artificial Sequence
  Description of Artificial Sequence: Synthetic oligonucleotide
acauuaugugguugcacua

SEQ ID NO: 58434 - RNA, 19 nt, Artificial Sequence
  Description of Artificial Sequence: Synthetic oligonucleotide
uucgaaucacuaccuucaa

SEQ ID NO: 58435 - RNA, 19 nt, Artificial Sequence
  Description of Artificial Sequence: Synthetic oligonucleotide
cacuacugcuagaacggac

SEQ ID NO: 58436 - RNA, 19 nt, Artificial Sequence
  Description of Artificial Sequence: Synthetic oligonucleotide
cauuuucacccaauguuaa

SEQ ID NO: 58437 - RNA, 19 nt, Artificial Sequence
  Description of Artificial Sequence: Synthetic oligonucleotide
ugagcaggguaauucucau

SEQ ID NO: 58438 - RNA, 19 nt, Artificial Sequence
  Description of Artificial Sequence: Synthetic oligonucleotide
gaugcaaggucaugaugaa

SEQ ID NO: 58439 - RNA, 19 nt, Artificial Sequence
  Description of Artificial Sequence: Synthetic oligonucleotide
uguuaaggauauugcuuuu

SEQ ID NO: 58440 - RNA, 19 nt, Artificial Sequence
  Description of Artificial Sequence: Synthetic oligonucleotide
gggguuaaaggcaccaaag

SEQ ID NO: 58441 - RNA, 19 nt, Artificial Sequence
  Description of Artificial Sequence: Synthetic oligonucleotide
cacagacgauaucucauuc

SEQ ID NO: 58442 - RNA, 19 nt, Artificial Sequence
  Description of Artificial Sequence: Synthetic oligonucleotide
uucuauuacuugguacuau

SEQ ID NO: 58443 - RNA, 19 nt, Artificial Sequence
  Description of Artificial Sequence: Synthetic oligonucleotide
caucuguccuauggcaacg

SEQ ID NO: 58444 - RNA, 19 nt, Artificial Sequence
  Description of Artificial Sequence: Synthetic oligonucleotide
agcuacacuagugugcgaa

SEQ ID NO: 58445 - RNA, 19 nt, Artificial Sequence
  Description of Artificial Sequence: Synthetic oligonucleotide
agucuuaaaucaaguggca

SEQ ID NO: 58446 - RNA, 19 nt, Artificial Sequence
  Description of Artificial Sequence: Synthetic oligonucleotide
guuugagcaggguaauucu

SEQ ID NO: 58447 - RNA, 19 nt, Artificial Sequence
  Description of Artificial Sequence: Synthetic oligonucleotide
ugacugaaggcuggguacu

SEQ ID NO: 58448 - RNA, 19 nt, Artificial Sequence
  Description of Artificial Sequence: Synthetic oligonucleotide
uguagcuguuauggaguug

SEQ ID NO: 58449 - RNA, 19 nt, Artificial Sequence
  Description of Artificial Sequence: Synthetic oligonucleotide
uuggcuaacuggugauaaa

SEQ ID NO: 58450 - RNA, 19 nt, Artificial Sequence
  Description of Artificial Sequence: Synthetic oligonucleotide
aguuauauccuuagaccua

SEQ ID NO: 58451 - RNA, 19 nt, Artificial Sequence
  Description of Artificial Sequence: Synthetic oligonucleotide
agacuuagugguuguuuua

SEQ ID NO: 58452 - RNA, 19 nt, Artificial Sequence
  Description of Artificial Sequence: Synthetic oligonucleotide
acaccccaacccuccagag

SEQ ID NO: 58453 - RNA, 19 nt, Artificial Sequence
  Description of Artificial Sequence: Synthetic oligonucleotide
guguaacacugcauacuag

SEQ ID NO: 58454 - RNA, 19 nt, Artificial Sequence
  Description of Artificial Sequence: Synthetic oligonucleotide
gaccuauaaacuugugaau

SEQ ID NO: 58455 - RNA, 19 nt, Artificial Sequence
  Description of Artificial Sequence: Synthetic oligonucleotide
gacagggaaaauaguacgu

SEQ ID NO: 58456 - RNA, 19 nt, Artificial Sequence
  Description of Artificial Sequence: Synthetic oligonucleotide
gugugcgaagggguuaaag

SEQ ID NO: 58457 - RNA, 19 nt, Artificial Sequence
  Description of Artificial Sequence: Synthetic oligonucleotide
aggagauuucgaaucacua

SEQ ID NO: 58458 - RNA, 19 nt, Artificial Sequence
  Description of Artificial Sequence: Synthetic oligonucleotide
aguucauugucaacuuuua

SEQ ID NO: 58459 - RNA, 19 nt, Artificial Sequence
  Description of Artificial Sequence: Synthetic oligonucleotide
auaugaguuccagguccag

SEQ ID NO: 58460 - RNA, 19 nt, Artificial Sequence
  Description of Artificial Sequence: Synthetic oligonucleotide
cauuaugugguugcacuaa

SEQ ID NO: 58461 - RNA, 19 nt, Artificial Sequence
  Description of Artificial Sequence: Synthetic oligonucleotide
cuacaccccaacccuccag

SEQ ID NO: 58462 - RNA, 19 nt, Artificial Sequence
  Description of Artificial Sequence: Synthetic oligonucleotide
gucuuuuccgguuaucauu

SEQ ID NO: 58463 - RNA, 19 nt, Artificial Sequence
  Description of Artificial Sequence: Synthetic oligonucleotide
cauauggguuacauaaaau

SEQ ID NO: 58464 - RNA, 19 nt, Artificial Sequence
  Description of Artificial Sequence: Synthetic oligonucleotide
gccugacaucuaaugaugg

SEQ ID NO: 58465 - RNA, 19 nt, Artificial Sequence
  Description of Artificial Sequence: Synthetic oligonucleotide
aaccuaauucuagcaccaa

SEQ ID NO: 58466 - RNA, 19 nt, Artificial Sequence
  Description of Artificial Sequence: Synthetic oligonucleotide
cuacuguagcuguuaugga

SEQ ID NO: 58467 - RNA, 19 nt, Artificial Sequence
  Description of Artificial Sequence: Synthetic oligonucleotide
agaaacgaugcaaggucau

SEQ ID NO: 58468 - RNA, 19 nt, Artificial Sequence
  Description of Artificial Sequence: Synthetic oligonucleotide
gauuccgauugugaugaua

SEQ ID NO: 58469 - RNA, 19 nt, Artificial Sequence
  Description of Artificial Sequence: Synthetic oligonucleotide
caucuaaugauggcugaaa

SEQ ID NO: 58470 - RNA, 19 nt, Artificial Sequence
  Description of Artificial Sequence: Synthetic oligonucleotide
  modified_base (2)..(2): a, c, u, g, unknown or other
gnguuuccaugugcuguug

SEQ ID NO: 58471 - RNA, 19 nt, Artificial Sequence
  Description of Artificial Sequence: Synthetic oligonucleotide
auccuuagaccuauagguu

SEQ ID NO: 58472 - RNA, 19 nt, Artificial Sequence
  Description of Artificial Sequence: Synthetic oligonucleotide
cuggaccuauaaacuugug

SEQ ID NO: 58473 - RNA, 19 nt, Artificial Sequence
  Description of Artificial Sequence: Synthetic oligonucleotide
aacccuccagagcucuaua

SEQ ID NO: 58474 - RNA, 19 nt, Artificial Sequence
  Description of Artificial Sequence: Synthetic oligonucleotide
uggcaacgugugcuucacc

SEQ ID NO: 58475 - RNA, 19 nt, Artificial Sequence
  Description of Artificial Sequence: Synthetic oligonucleotide
cacacaugccaggaucuuc

SEQ ID NO: 58476 - RNA, 19 nt, Artificial Sequence
  Description of Artificial Sequence: Synthetic oligonucleotide
gauuucgaaucacuaccuu

SEQ ID NO: 58477 - RNA, 19 nt, Artificial Sequence
  Description of Artificial Sequence: Synthetic oligonucleotide
auggagugaaugguauaau

SEQ ID NO: 58478 - RNA, 19 nt, Artificial Sequence
  Description of Artificial Sequence: Synthetic oligonucleotide
gucucgguagaugcaccag

SEQ ID NO: 58479 - RNA, 19 nt, Artificial Sequence
  Description of Artificial Sequence: Synthetic oligonucleotide
caaauuccugugcagacuu

SEQ ID NO: 58480 - RNA, 19 nt, Artificial Sequence
  Description of Artificial Sequence: Synthetic oligonucleotide
uacugcuagaacggaccuc

SEQ ID NO: 58481 - RNA, 19 nt, Artificial Sequence
  Description of Artificial Sequence: Synthetic oligonucleotide
ccauauggguuacauaaaa

SEQ ID NO: 58482 - RNA, 19 nt, Artificial Sequence
  Description of Artificial Sequence: Synthetic oligonucleotide
gggaaaauaguacgucacu

SEQ ID NO: 58483 - RNA, 19 nt, Artificial Sequence
  Description of Artificial Sequence: Synthetic oligonucleotide
cacuagugugcgaaggggu

SEQ ID NO: 58484 - RNA, 19 nt, Artificial Sequence
  Description of Artificial Sequence: Synthetic oligonucleotide
cuucuauuacuugguacua

SEQ ID NO: 58485 - RNA, 19 nt, Artificial Sequence
  Description of Artificial Sequence: Synthetic oligonucleotide
cagacgauaucucauucuu

SEQ ID NO: 58486 - RNA, 19 nt, Artificial Sequence
  Description of Artificial Sequence: Synthetic oligonucleotide
ccaugugcuguugaucaag

SEQ ID NO: 58487 - RNA, 19 nt, Artificial Sequence
  Description of Artificial Sequence: Synthetic oligonucleotide
ggcuaucaaguucgauggc

SEQ ID NO: 58488 - RNA, 19 nt, Artificial Sequence
  Description of Artificial Sequence: Synthetic oligonucleotide
aucuguccuauggcaacgu

SEQ ID NO: 58489 - RNA, 19 nt, Artificial Sequence
  Description of Artificial Sequence: Synthetic oligonucleotide
uuguuugagcaggguaauu

SEQ ID NO: 58490 - RNA, 19 nt, Artificial Sequence
  Description of Artificial Sequence: Synthetic oligonucleotide
gugaccagaugaauaauuu

SEQ ID NO: 58491 - RNA, 19 nt, Artificial Sequence
  Description of Artificial Sequence: Synthetic oligonucleotide
auggccaacuuaagauaga

SEQ ID NO: 58492 - RNA, 19 nt, Artificial Sequence
  Description of Artificial Sequence: Synthetic oligonucleotide
ggaaaauaguacgucacuu

SEQ ID NO: 58493 - RNA, 19 nt, Artificial Sequence
  Description of Artificial Sequence: Synthetic oligonucleotide
gcuaucaaguucgauggcu

SEQ ID NO: 58494 - RNA, 19 nt, Artificial Sequence
  Description of Artificial Sequence: Synthetic oligonucleotide
gucucgaguaauaauuguu

SEQ ID NO: 58495 - RNA, 19 nt, Artificial Sequence
  Description of Artificial Sequence: Synthetic oligonucleotide
  modified_base (19)..(19): a, c, u, g, unknown or other
gucaguuuacuugguggun

SEQ ID NO: 58496 - RNA, 19 nt, Artificial Sequence
  Description of Artificial Sequence: Synthetic oligonucleotide
ccgguuaucauucagcauu

SEQ ID NO: 58497 - RNA, 19 nt, Artificial Sequence
  Description of Artificial Sequence: Synthetic oligonucleotide
agccuacuagcuuguucuu

SEQ ID NO: 58498 - RNA, 19 nt, Artificial Sequence
  Description of Artificial Sequence: Synthetic oligonucleotide
gaauggaauauggcuguuu

SEQ ID NO: 58499 - RNA, 19 nt, Artificial Sequence
  Description of Artificial Sequence: Synthetic oligonucleotide
cuacugcuagaacggaccu

SEQ ID NO: 58500 - RNA, 19 nt, Artificial Sequence
  Description of Artificial Sequence: Synthetic oligonucleotide
guaacacugcauacuaguu

SEQ ID NO: 58501 - RNA, 19 nt, Artificial Sequence
  Description of Artificial Sequence: Synthetic oligonucleotide
guaggagagcccaaacuuu

SEQ ID NO: 58502 - RNA, 19 nt, Artificial Sequence
  Description of Artificial Sequence: Synthetic oligonucleotide
guuuggcuaacuggugaua

SEQ ID NO: 58503 - RNA, 19 nt, Artificial Sequence
  Description of Artificial Sequence: Synthetic oligonucleotide
auguucuuauaggcaucau

SEQ ID NO: 58504 - RNA, 19 nt, Artificial Sequence
  Description of Artificial Sequence: Synthetic oligonucleotide
accagcagucucgguagau

SEQ ID NO: 58505 - RNA, 19 nt, Artificial Sequence
  Description of Artificial Sequence: Synthetic oligonucleotide
cgauaucucauucuuacau

SEQ ID NO: 58506 - RNA, 19 nt, Artificial Sequence
  Description of Artificial Sequence: Synthetic oligonucleotide
gaaggcuaucaaguucgau

SEQ ID NO: 58507 - RNA, 19 nt, Artificial Sequence
  Description of Artificial Sequence: Synthetic oligonucleotide
auaagccuacuagcuuguu

SEQ ID NO: 58508 - RNA, 19 nt, Artificial Sequence
  Description of Artificial Sequence: Synthetic oligonucleotide
gaguaacacuagggcaaaa

SEQ ID NO: 58509 - RNA, 19 nt, Artificial Sequence
  Description of Artificial Sequence: Synthetic oligonucleotide
  modified_base (3)..(3): a, c, u, g, unknown or other
ggnguuuccaugugcuguu

SEQ ID NO: 58510 - RNA, 19 nt, Artificial Sequence
  Description of Artificial Sequence: Synthetic oligonucleotide
auccuuaggcuuaguuguu

SEQ ID NO: 58511 - RNA, 19 nt, Artificial Sequence
  Description of Artificial Sequence: Synthetic oligonucleotide
gcaucgugucaggauccag

SEQ ID NO: 58512 - RNA, 19 nt, Artificial Sequence
  Description of Artificial Sequence: Synthetic oligonucleotide
auguaccuacacagaguuu

SEQ ID NO: 58513 - RNA, 19 nt, Artificial Sequence
  Description of Artificial Sequence: Synthetic oligonucleotide
gcuggaccuauaaacuugu

SEQ ID NO: 58514 - RNA, 19 nt, Artificial Sequence
  Description of Artificial Sequence: Synthetic oligonucleotide
gcauaacucagaugcucau

SEQ ID NO: 58515 - RNA, 19 nt, Artificial Sequence
  Description of Artificial Sequence: Synthetic oligonucleotide
  modified_base (3)..(3): a, c, u, g, unknown or other
cgngugacaaagggagcug

SEQ ID NO: 58516 - RNA, 19 nt, Artificial Sequence
  Description of Artificial Sequence: Synthetic oligonucleotide
agugugcgaagggguuaaa

SEQ ID NO: 58517 - RNA, 19 nt, Artificial Sequence
  Description of Artificial Sequence: Synthetic oligonucleotide
ccuauagguuggaauuuau

SEQ ID NO: 58518 - RNA, 19 nt, Artificial Sequence
  Description of Artificial Sequence: Synthetic oligonucleotide
ggcuagagugcagggucaa

SEQ ID NO: 58519 - RNA, 19 nt, Artificial Sequence
  Description of Artificial Sequence: Synthetic oligonucleotide
caacccuccagagcucuau

SEQ ID NO: 58520 - RNA, 19 nt, Artificial Sequence
  Description of Artificial Sequence: Synthetic oligonucleotide
cccaacccuccagagcucu

SEQ ID NO: 58521 - RNA, 19 nt, Artificial Sequence
  Description of Artificial Sequence: Synthetic oligonucleotide
aauaagaugguucuggugg

SEQ ID NO: 58522 - RNA, 19 nt, Artificial Sequence
  Description of Artificial Sequence: Synthetic oligonucleotide
aaggaguuaguucaauugc

SEQ ID NO: 58523 - RNA, 19 nt, Artificial Sequence
  Description of Artificial Sequence: Synthetic oligonucleotide
agaaucauugcccacaaac

SEQ ID NO: 58524 - RNA, 19 nt, Artificial Sequence
  Description of Artificial Sequence: Synthetic oligonucleotide
uauauauauauauugaaau

SEQ ID NO: 58525 - RNA, 19 nt, Artificial Sequence
  Description of Artificial Sequence: Synthetic oligonucleotide
uuuggguuaaauaucaugu

SEQ ID NO: 58526 - RNA, 19 nt, Artificial Sequence
  Description of Artificial Sequence: Synthetic oligonucleotide
aaauuaaacagggugcuac

SEQ ID NO: 58527 - RNA, 19 nt, Artificial Sequence
  Description of Artificial Sequence: Synthetic oligonucleotide
auauauauauauugaaauc

SEQ ID NO: 58528 - RNA, 19 nt, Artificial Sequence
  Description of Artificial Sequence: Synthetic oligonucleotide
aaugcaagaaggcagguca

SEQ ID NO: 58529 - RNA, 19 nt, Artificial Sequence
  Description of Artificial Sequence: Synthetic oligonucleotide
uguagaguaagccacuuag

SEQ ID NO: 58530 - RNA, 19 nt, Artificial Sequence
  Description of Artificial Sequence: Synthetic oligonucleotide
uacuuauuaaaacacgaag

SEQ ID NO: 58531 - RNA, 19 nt, Artificial Sequence
  Description of Artificial Sequence: Synthetic oligonucleotide
uuuguuauguacuucaccu

SEQ ID NO: 58532 - RNA, 19 nt, Artificial Sequence
  Description of Artificial Sequence: Synthetic oligonucleotide
agauuaaugauggaagugc

SEQ ID NO: 58533 - RNA, 19 nt, Artificial Sequence
  Description of Artificial Sequence: Synthetic oligonucleotide
gaaucauacacacacacac

SEQ ID NO: 58534 - RNA, 19 nt, Artificial Sequence
  Description of Artificial Sequence: Synthetic oligonucleotide
guuuucgugauuuacgagg

SEQ ID NO: 58535 - RNA, 19 nt, Artificial Sequence
  Description of Artificial Sequence: Synthetic oligonucleotide
augaguuccaaggagaacc

SEQ ID NO: 58536 - RNA, 19 nt, Artificial Sequence
  Description of Artificial Sequence: Synthetic oligonucleotide
acccauauuaugcauaaac

SEQ ID NO: 58537 - RNA, 19 nt, Artificial Sequence
  Description of Artificial Sequence: Synthetic oligonucleotide
gucggcaucaaauauaucc

SEQ ID NO: 58538 - RNA, 19 nt, Artificial Sequence
  Description of Artificial Sequence: Synthetic oligonucleotide
aucauacacacacacacac

SEQ ID NO: 58539 - RNA, 19 nt, Artificial Sequence
  Description of Artificial Sequence: Synthetic oligonucleotide
uguguuaccgguuaacugc

SEQ ID NO: 58540 - RNA, 19 nt, Artificial Sequence
  Description of Artificial Sequence: Synthetic oligonucleotide
aacucagucaaguugccag

SEQ ID NO: 58541 - RNA, 19 nt, Artificial Sequence
  Description of Artificial Sequence: Synthetic oligonucleotide
agcuaaaucacuugagaac

SEQ ID NO: 58542 - RNA, 19 nt, Artificial Sequence
  Description of Artificial Sequence: Synthetic oligonucleotide
aaaaggauauaaggaaugg

SEQ ID NO: 58543 - RNA, 19 nt, Artificial Sequence
  Description of Artificial Sequence: Synthetic oligonucleotide
ugauuuacgagguaccuca

SEQ ID NO: 58544 - RNA, 19 nt, Artificial Sequence
  Description of Artificial Sequence: Synthetic oligonucleotide
aauccuuaccagcuaagag

SEQ ID NO: 58545 - RNA, 19 nt, Artificial Sequence
  Description of Artificial Sequence: Synthetic oligonucleotide
uuuacgagguaccucagug

SEQ ID NO: 58546 - RNA, 19 nt, Artificial Sequence
  Description of Artificial Sequence: Synthetic oligonucleotide
uucguuuucgugauuuacg

SEQ ID NO: 58547 - RNA, 19 nt, Artificial Sequence
  Description of Artificial Sequence: Synthetic oligonucleotide
ugaucacagauuaugaggu

SEQ ID NO: 58548 - RNA, 19 nt, Artificial Sequence
  Description of Artificial Sequence: Synthetic oligonucleotide
aguuauauguuggucaugg

SEQ ID NO: 58549 - RNA, 19 nt, Artificial Sequence
  Description of Artificial Sequence: Synthetic oligonucleotide
uaaaguaagaggcaaugaa

SEQ ID NO: 58550 - RNA, 19 nt, Artificial Sequence
  Description of Artificial Sequence: Synthetic oligonucleotide
aaugaguggaaucgugauc

SEQ ID NO: 58551 - RNA, 19 nt, Artificial Sequence
  Description of Artificial Sequence: Synthetic oligonucleotide
uguuauguacuucaccuga

SEQ ID NO: 58552 - RNA, 19 nt, Artificial Sequence
  Description of Artificial Sequence: Synthetic oligonucleotide
acucuuacaucauugcagg

SEQ ID NO: 58553 - RNA, 19 nt, Artificial Sequence
  Description of Artificial Sequence: Synthetic oligonucleotide
aauccgugugguuucacuc

SEQ ID NO: 58554 - RNA, 19 nt, Artificial Sequence
  Description of Artificial Sequence: Synthetic oligonucleotide
agggaguuguauuucgucc

SEQ ID NO: 58555 - RNA, 19 nt, Artificial Sequence
  Description of Artificial Sequence: Synthetic oligonucleotide
uaaaugaauuaucauuaac

SEQ ID NO: 58556 - RNA, 19 nt, Artificial Sequence
  Description of Artificial Sequence: Synthetic oligonucleotide
uacaacuaucuucagcucc

SEQ ID NO: 58557 - RNA, 19 nt, Artificial Sequence
  Description of Artificial Sequence: Synthetic oligonucleotide
aaaaugccaaacuaaguua

SEQ ID NO: 58558 - RNA, 19 nt, Artificial Sequence
  Description of Artificial Sequence: Synthetic oligonucleotide
acaaucucgucguuugacc

SEQ ID NO: 58559 - RNA, 19 nt, Artificial Sequence
  Description of Artificial Sequence: Synthetic oligonucleotide
cauagauaaagaaggaauc

SEQ ID NO: 58560 - RNA, 19 nt, Artificial Sequence
  Description of Artificial Sequence: Synthetic oligonucleotide
ugcaccuauauauauauau

SEQ ID NO: 58561 - RNA, 19 nt, Artificial Sequence
  Description of Artificial Sequence: Synthetic oligonucleotide
agaacaucccaacaguuug

SEQ ID NO: 58562 - RNA, 19 nt, Artificial Sequence
  Description of Artificial Sequence: Synthetic oligonucleotide
uacacacacacacacacac

SEQ ID NO: 58563 - RNA, 19 nt, Artificial Sequence
  Description of Artificial Sequence: Synthetic oligonucleotide
caccuauauauauauauug

SEQ ID NO: 58564 - RNA, 19 nt, Artificial Sequence
  Description of Artificial Sequence: Synthetic oligonucleotide
auauaaggaaugguaauuc

SEQ ID NO: 58565 - RNA, 19 nt, Artificial Sequence
  Description of Artificial Sequence: Synthetic oligonucleotide
aauugcacugcagaagguc

SEQ ID NO: 58566 - RNA, 19 nt, Artificial Sequence
  Description of Artificial Sequence: Synthetic oligonucleotide
ucuagaacaucccaacagu

SEQ ID NO: 58567 - RNA, 19 nt, Artificial Sequence
  Description of Artificial Sequence: Synthetic oligonucleotide
acagauuaugagguaaggc

SEQ ID NO: 58568 - RNA, 19 nt, Artificial Sequence
  Description of Artificial Sequence: Synthetic oligonucleotide
ucgaccagaaucauugccc

SEQ ID NO: 58569 - RNA, 19 nt, Artificial Sequence
  Description of Artificial Sequence: Synthetic oligonucleotide
uuuuagcuaaguaaauguc

SEQ ID NO: 58570 - RNA, 19 nt, Artificial Sequence
  Description of Artificial Sequence: Synthetic oligonucleotide
aguucaauugcacugcaga

SEQ ID NO: 58571 - RNA, 19 nt, Artificial Sequence
  Description of Artificial Sequence: Synthetic oligonucleotide
ugccaaacuaaguuaaaug

SEQ ID NO: 58572 - RNA, 19 nt, Artificial Sequence
  Description of Artificial Sequence: Synthetic oligonucleotide
cucuuuguuaccuuacccc

SEQ ID NO: 58573 - RNA, 19 nt, Artificial Sequence
  Description of Artificial Sequence: Synthetic oligonucleotide
aauaugaauaaaccugcuu

SEQ ID NO: 58574 - RNA, 19 nt, Artificial Sequence
  Description of Artificial Sequence: Synthetic oligonucleotide
uugcucuugguucauuggg

SEQ ID NO: 58575 - RNA, 19 nt, Artificial Sequence
  Description of Artificial Sequence: Synthetic oligonucleotide
ugaguuaacucaucaguug

SEQ ID NO: 58576 - RNA, 19 nt, Artificial Sequence
  Description of Artificial Sequence: Synthetic oligonucleotide
uuuaaccggauacugucca

SEQ ID NO: 58577 - RNA, 19 nt, Artificial Sequence
  Description of Artificial Sequence: Synthetic oligonucleotide
gguagaauaaaugguaggg

SEQ ID NO: 58578 - RNA, 19 nt, Artificial Sequence
  Description of Artificial Sequence: Synthetic oligonucleotide
caaaguuauauguugguca

SEQ ID NO: 58579 - RNA, 19 nt, Artificial Sequence
  Description of Artificial Sequence: Synthetic oligonucleotide
uacacacacacacacguac

SEQ ID NO: 58580 - RNA, 19 nt, Artificial Sequence
  Description of Artificial Sequence: Synthetic oligonucleotide
agucauuagacagaaggag

SEQ ID NO: 58581 - RNA, 19 nt, Artificial Sequence
  Description of Artificial Sequence: Synthetic oligonucleotide
cacacguacacacacacac

SEQ ID NO: 58582 - RNA, 19 nt, Artificial Sequence
  Description of Artificial Sequence: Synthetic oligonucleotide
cucaaaauggcagaauggc

SEQ ID NO: 58583 - RNA, 19 nt, Artificial Sequence
  Description of Artificial Sequence: Synthetic oligonucleotide
ucauacacacacacacacg

SEQ ID NO: 58584 - RNA, 19 nt, Artificial Sequence
  Description of Artificial Sequence: Synthetic oligonucleotide
agccauagcauucugauua

SEQ ID NO: 58585 - RNA, 19 nt, Artificial Sequence
  Description of Artificial Sequence: Synthetic oligonucleotide
uuccccucacuuuuaaccg

SEQ ID NO: 58586 - RNA, 19 nt, Artificial Sequence
  Description of Artificial Sequence: Synthetic oligonucleotide
uuuucgugauuuacgaggu

SEQ ID NO: 58587 - RNA, 19 nt, Artificial Sequence
  Description of Artificial Sequence: Synthetic oligonucleotide
uaugaauaaaccugcuuau

SEQ ID NO: 58588 - RNA, 19 nt, Artificial Sequence
  Description of Artificial Sequence: Synthetic oligonucleotide
uguauuucguccaguuacc

SEQ ID NO: 58589 - RNA, 19 nt, Artificial Sequence
  Description of Artificial Sequence: Synthetic oligonucleotide
uauuuguuaggaugcacac

SEQ ID NO: 58590 - RNA, 19 nt, Artificial Sequence
  Description of Artificial Sequence: Synthetic oligonucleotide
uuuuaaccggauacugucc

SEQ ID NO: 58591 - RNA, 19 nt, Artificial Sequence
  Description of Artificial Sequence: Synthetic oligonucleotide
ugaagagaaagcuuguauu

SEQ ID NO: 58592 - RNA, 19 nt, Artificial Sequence
  Description of Artificial Sequence: Synthetic oligonucleotide
cuacuuacuuuccagcacc

SEQ ID NO: 58593 - RNA, 19 nt, Artificial Sequence
  Description of Artificial Sequence: Synthetic oligonucleotide
uucgcauacgccuugcugu

SEQ ID NO: 58594 - RNA, 19 nt, Artificial Sequence
  Description of Artificial Sequence: Synthetic oligonucleotide
cuauauauauauauugaaa

SEQ ID NO: 58595 - RNA, 19 nt, Artificial Sequence
  Description of Artificial Sequence: Synthetic oligonucleotide
aguguuaucauuguaggaa

SEQ ID NO: 58596 - RNA, 19 nt, Artificial Sequence
  Description of Artificial Sequence: Synthetic oligonucleotide
acuaaguuaaaugaauuau

SEQ ID NO: 58597 - RNA, 19 nt, Artificial Sequence
  Description of Artificial Sequence: Synthetic oligonucleotide
uaucuuuuacugagccucg

SEQ ID NO: 58598 - RNA, 19 nt, Artificial Sequence
  Description of Artificial Sequence: Synthetic oligonucleotide
ucacagauuaugagguaag

SEQ ID NO: 58599 - RNA, 19 nt, Artificial Sequence
  Description of Artificial Sequence: Synthetic oligonucleotide
auuccuacgcaguccaccg

SEQ ID NO: 58600 - RNA, 19 nt, Artificial Sequence
  Description of Artificial Sequence: Synthetic oligonucleotide
cauagcauucugauuacug

SEQ ID NO: 58601 - RNA, 19 nt, Artificial Sequence
  Description of Artificial Sequence: Synthetic oligonucleotide
aaucuuucaugaguuaacu

SEQ ID NO: 58602 - RNA, 19 nt, Artificial Sequence
  Description of Artificial Sequence: Synthetic oligonucleotide
aauaucauguuugguggug

SEQ ID NO: 58603 - RNA, 19 nt, Artificial Sequence
  Description of Artificial Sequence: Synthetic oligonucleotide
cuggcauuugcugagaaag

SEQ ID NO: 58604 - RNA, 19 nt, Artificial Sequence
  Description of Artificial Sequence: Synthetic oligonucleotide
guuucacucgaccagaauc

SEQ ID NO: 58605 - RNA, 19 nt, Artificial Sequence
  Description of Artificial Sequence: Synthetic oligonucleotide
gguuaaauaucauguuugg

SEQ ID NO: 58606 - RNA, 19 nt, Artificial Sequence
  Description of Artificial Sequence: Synthetic oligonucleotide
aaugguaauucuguucuga

SEQ ID NO: 58607 - RNA, 19 nt, Artificial Sequence
  Description of Artificial Sequence: Synthetic oligonucleotide
aaggauauaaggaauggua

SEQ ID NO: 58608 - RNA, 19 nt, Artificial Sequence
  Description of Artificial Sequence: Synthetic oligonucleotide
cacacacacacacacacag

SEQ ID NO: 58609 - RNA, 19 nt, Artificial Sequence
  Description of Artificial Sequence: Synthetic oligonucleotide
cauauuagauucuucacaa

SEQ ID NO: 58610 - RNA, 19 nt, Artificial Sequence
  Description of Artificial Sequence: Synthetic oligonucleotide
ugcguucuaucuuuuacug

SEQ ID NO: 58611 - RNA, 19 nt, Artificial Sequence
  Description of Artificial Sequence: Synthetic oligonucleotide
ccauauuaugcauaaacag

SEQ ID NO: 58612 - RNA, 19 nt, Artificial Sequence
  Description of Artificial Sequence: Synthetic oligonucleotide
ugagaugccauuguagcca

SEQ ID NO: 58613 - RNA, 19 nt, Artificial Sequence
  Description of Artificial Sequence: Synthetic oligonucleotide
ucagguaccgagcucggug

SEQ ID NO: 58614 - RNA, 19 nt, Artificial Sequence
  Description of Artificial Sequence: Synthetic oligonucleotide
ugauuuacuaucucagaua

SEQ ID NO: 58615 - RNA, 19 nt, Artificial Sequence
  Description of Artificial Sequence: Synthetic oligonucleotide
uaccaauguugauaaauga

SEQ ID NO: 58616 - RNA, 19 nt, Artificial Sequence
  Description of Artificial Sequence: Synthetic oligonucleotide
ucguuuucgugauuuacga

SEQ ID NO: 58617 - RNA, 19 nt, Artificial Sequence
  Description of Artificial Sequence: Synthetic oligonucleotide
aaaggauauaaggaauggu

SEQ ID NO: 58618 - RNA, 19 nt, Artificial Sequence
  Description of Artificial Sequence: Synthetic oligonucleotide
ucuagguggagguaacugu

SEQ ID NO: 58619 - RNA, 19 nt, Artificial Sequence
  Description of Artificial Sequence: Synthetic oligonucleotide
uggguuaaauaucauguuu

SEQ ID NO: 58620 - RNA, 19 nt, Artificial Sequence
  Description of Artificial Sequence: Synthetic oligonucleotide
auuagaaggagccgguuaa

SEQ ID NO: 58621 - RNA, 19 nt, Artificial Sequence
  Description of Artificial Sequence: Synthetic oligonucleotide
gaguuaacucaucaguuga

SEQ ID NO: 58622 - RNA, 19 nt, Artificial Sequence
  Description of Artificial Sequence: Synthetic oligonucleotide
gaagggagaaauacccacg

SEQ ID NO: 58623 - RNA, 19 nt, Artificial Sequence
  Description of Artificial Sequence: Synthetic oligonucleotide
cacacacacacguacacac

SEQ ID NO: 58624 - RNA, 19 nt, Artificial Sequence
  Description of Artificial Sequence: Synthetic oligonucleotide
cacacacacacacacacac

SEQ ID NO: 58625 - RNA, 19 nt, Artificial Sequence
  Description of Artificial Sequence: Synthetic oligonucleotide
aaggucucuaaugagugga

SEQ ID NO: 58626 - RNA, 19 nt, Artificial Sequence
  Description of Artificial Sequence: Synthetic oligonucleotide
ugguucauuaugaccuucc

SEQ ID NO: 58627 - RNA, 19 nt, Artificial Sequence
  Description of Artificial Sequence: Synthetic oligonucleotide
aaauccgugugguuucacu

SEQ ID NO: 58628 - RNA, 19 nt, Artificial Sequence
  Description of Artificial Sequence: Synthetic oligonucleotide
agauuaugagguaaggcug

SEQ ID NO: 58629 - RNA, 19 nt, Artificial Sequence
  Description of Artificial Sequence: Synthetic oligonucleotide
gaagagggcguuuguaaug

SEQ ID NO: 58630 - RNA, 19 nt, Artificial Sequence
  Description of Artificial Sequence: Synthetic oligonucleotide
uguuaucauuguaggaacu

SEQ ID NO: 58631 - RNA, 19 nt, Artificial Sequence
  Description of Artificial Sequence: Synthetic oligonucleotide
agaguggauccaucuuucc

SEQ ID NO: 58632 - RNA, 19 nt, Artificial Sequence
  Description of Artificial Sequence: Synthetic oligonucleotide
ucuuuuacugagccucggc

SEQ ID NO: 58633 - RNA, 19 nt, Artificial Sequence
  Description of Artificial Sequence: Synthetic oligonucleotide
augguaauucuguucugag

SEQ ID NO: 58634 - RNA, 19 nt, Artificial Sequence
  Description of Artificial Sequence: Synthetic oligonucleotide
agguugaucaaugugcuca

SEQ ID NO: 58635 - RNA, 19 nt, Artificial Sequence
  Description of Artificial Sequence: Synthetic oligonucleotide
ggagcuuauccuuggaagg

SEQ ID NO: 58636 - RNA, 19 nt, Artificial Sequence
  Description of Artificial Sequence: Synthetic oligonucleotide
augaagagaaagcuuguau

SEQ ID NO: 58637 - RNA, 19 nt, Artificial Sequence
  Description of Artificial Sequence: Synthetic oligonucleotide
aauacccacguuauaaaau

SEQ ID NO: 58638 - RNA, 19 nt, Artificial Sequence
  Description of Artificial Sequence: Synthetic oligonucleotide
uucgugauuuacgagguac

SEQ ID NO: 58639 - RNA, 19 nt, Artificial Sequence
  Description of Artificial Sequence: Synthetic oligonucleotide
auuucguccaguuacccua

SEQ ID NO: 58640 - RNA, 19 nt, Artificial Sequence
  Description of Artificial Sequence: Synthetic oligonucleotide
uuguuauguacuucaccug

SEQ ID NO: 58641 - RNA, 19 nt, Artificial Sequence
  Description of Artificial Sequence: Synthetic oligonucleotide
ucgugauuuacgagguacc

SEQ ID NO: 58642 - RNA, 19 nt, Artificial Sequence
  Description of Artificial Sequence: Synthetic oligonucleotide
cucauugaugcuacagaag

SEQ ID NO: 58643 - RNA, 19 nt, Artificial Sequence
  Description of Artificial Sequence: Synthetic oligonucleotide
auccgugugguuucacucg

SEQ ID NO: 58644 - RNA, 19 nt, Artificial Sequence
  Description of Artificial Sequence: Synthetic oligonucleotide
cuuacaucauugcaggaca

SEQ ID NO: 58645 - RNA, 19 nt, Artificial Sequence
  Description of Artificial Sequence: Synthetic oligonucleotide
uuaagaucucaggaacucc

SEQ ID NO: 58646 - RNA, 19 nt, Artificial Sequence
  Description of Artificial Sequence: Synthetic oligonucleotide
acaauaagaugguucuggu

SEQ ID NO: 58647 - RNA, 19 nt, Artificial Sequence
  Description of Artificial Sequence: Synthetic oligonucleotide
auacccacguuauaaaaua

SEQ ID NO: 58648 - RNA, 19 nt, Artificial Sequence
  Description of Artificial Sequence: Synthetic oligonucleotide
aaaccguaggcugauucug

SEQ ID NO: 58649 - RNA, 19 nt, Artificial Sequence
  Description of Artificial Sequence: Synthetic oligonucleotide
cacguacacacacacacac

SEQ ID NO: 58650 - RNA, 19 nt, Artificial Sequence
  Description of Artificial Sequence: Synthetic oligonucleotide
agcuaaguaaaugucacaa

SEQ ID NO: 58651 - RNA, 19 nt, Artificial Sequence
  Description of Artificial Sequence: Synthetic oligonucleotide
uaaugaguggaaucgugau

SEQ ID NO: 58652 - RNA, 19 nt, Artificial Sequence
  Description of Artificial Sequence: Synthetic oligonucleotide
uaugcauaaacaggagacu

SEQ ID NO: 58653 - RNA, 19 nt, Artificial Sequence
  Description of Artificial Sequence: Synthetic oligonucleotide
gaaucuuucaugaguuaac

SEQ ID NO: 58654 - RNA, 19 nt, Artificial Sequence
  Description of Artificial Sequence: Synthetic oligonucleotide
accuauauauauauauuga

SEQ ID NO: 58655 - RNA, 19 nt, Artificial Sequence
  Description of Artificial Sequence: Synthetic oligonucleotide
ugucagaguggauccaucu

SEQ ID NO: 58656 - RNA, 19 nt, Artificial Sequence
  Description of Artificial Sequence: Synthetic oligonucleotide
cugucagguaccgagcucg

SEQ ID NO: 58657 - RNA, 19 nt, Artificial Sequence
  Description of Artificial Sequence: Synthetic oligonucleotide
ugguaauucuguucugaga

SEQ ID NO: 58658 - RNA, 19 nt, Artificial Sequence
  Description of Artificial Sequence: Synthetic oligonucleotide
agaauaaaugguagggcug

SEQ ID NO: 58659 - RNA, 19 nt, Artificial Sequence
  Description of Artificial Sequence: Synthetic oligonucleotide
uucaccgucggaaagccuu

SEQ ID NO: 58660 - RNA, 19 nt, Artificial Sequence
  Description of Artificial Sequence: Synthetic oligonucleotide
ccaauguugauaaaugauc

SEQ ID NO: 58661 - RNA, 19 nt, Artificial Sequence
  Description of Artificial Sequence: Synthetic oligonucleotide
agucaaguugccaggaaag

SEQ ID NO: 58662 - RNA, 19 nt, Artificial Sequence
  Description of Artificial Sequence: Synthetic oligonucleotide
aggacauccgacuguuauc

SEQ ID NO: 58663 - RNA, 19 nt, Artificial Sequence
  Description of Artificial Sequence: Synthetic oligonucleotide
uguauugcacugcccacaa

SEQ ID NO: 58664 - RNA, 19 nt, Artificial Sequence
  Description of Artificial Sequence: Synthetic oligonucleotide
cauccgacuguuauccagc

SEQ ID NO: 58665 - RNA, 19 nt, Artificial Sequence
  Description of Artificial Sequence: Synthetic oligonucleotide
cuaaugaguggaaucguga

SEQ ID NO: 58666 - RNA, 19 nt, Artificial Sequence
  Description of Artificial Sequence: Synthetic oligonucleotide
caaaaccguggucugcugg

SEQ ID NO: 58667 - RNA, 19 nt, Artificial Sequence
  Description of Artificial Sequence: Synthetic oligonucleotide
ugauggaagugcugaauuc

SEQ ID NO: 58668 - RNA, 19 nt, Artificial Sequence
  Description of Artificial Sequence: Synthetic oligonucleotide
aagagggcguuuguaaugu

SEQ ID NO: 58669 - RNA, 19 nt, Artificial Sequence
  Description of Artificial Sequence: Synthetic oligonucleotide
ugucauguuguugcuagga

SEQ ID NO: 58670 - RNA, 19 nt, Artificial Sequence
  Description of Artificial Sequence: Synthetic oligonucleotide
agcaaguauucauuuaguu

SEQ ID NO: 58671 - RNA, 19 nt, Artificial Sequence
  Description of Artificial Sequence: Synthetic oligonucleotide
caauaagaugguucuggug

SEQ ID NO: 58672 - RNA, 19 nt, Artificial Sequence
  Description of Artificial Sequence: Synthetic oligonucleotide
aaucauacacacacacaca

SEQ ID NO: 58673 - RNA, 19 nt, Artificial Sequence
  Description of Artificial Sequence: Synthetic oligonucleotide
uucaccuuacccucuuugu

SEQ ID NO: 58674 - RNA, 19 nt, Artificial Sequence
  Description of Artificial Sequence: Synthetic oligonucleotide
auggcugaacaucaugaga

SEQ ID NO: 58675 - RNA, 19 nt, Artificial Sequence
  Description of Artificial Sequence: Synthetic oligonucleotide
uccaguuacccuacaggcu

SEQ ID NO: 58676 - RNA, 19 nt, Artificial Sequence
  Description of Artificial Sequence: Synthetic oligonucleotide
uuucguuuucgugauuuac

SEQ ID NO: 58677 - RNA, 19 nt, Artificial Sequence
  Description of Artificial Sequence: Synthetic oligonucleotide
uaguucaauugcacugcag

SEQ ID NO: 58678 - RNA, 19 nt, Artificial Sequence
  Description of Artificial Sequence: Synthetic oligonucleotide
guaauucuguucugagagc

SEQ ID NO: 58679 - RNA, 19 nt, Artificial Sequence
  Description of Artificial Sequence: Synthetic oligonucleotide
cacacacacguacacacac

SEQ ID NO: 58680 - RNA, 19 nt, Artificial Sequence
  Description of Artificial Sequence: Synthetic oligonucleotide
cacacacguacacacacac

SEQ ID NO: 58681 - RNA, 19 nt, Artificial Sequence
  Description of Artificial Sequence: Synthetic oligonucleotide
uggucacaacauauauucc

SEQ ID NO: 58682 - RNA, 19 nt, Artificial Sequence
  Description of Artificial Sequence: Synthetic oligonucleotide
ggguuaaauaucauguuug

SEQ ID NO: 58683 - RNA, 19 nt, Artificial Sequence
  Description of Artificial Sequence: Synthetic oligonucleotide
gauaaaauccgugugguuu

SEQ ID NO: 58684 - RNA, 19 nt, Artificial Sequence
  Description of Artificial Sequence: Synthetic oligonucleotide
uacgagguaccucaguguu

SEQ ID NO: 58685 - RNA, 19 nt, Artificial Sequence
  Description of Artificial Sequence: Synthetic oligonucleotide
cuguguuaccgguuaacug

SEQ ID NO: 58686 - RNA, 19 nt, Artificial Sequence
  Description of Artificial Sequence: Synthetic oligonucleotide
uuacgagguaccucagugu

SEQ ID NO: 58687 - RNA, 19 nt, Artificial Sequence
  Description of Artificial Sequence: Synthetic oligonucleotide
aauggcagcuaaaucacuu

SEQ ID NO: 58688 - RNA, 19 nt, Artificial Sequence
  Description of Artificial Sequence: Synthetic oligonucleotide
gguaaaguaagaggcaaug

SEQ ID NO: 58689 - RNA, 19 nt, Artificial Sequence
  Description of Artificial Sequence: Synthetic oligonucleotide
cagauauagucauuagaca

SEQ ID NO: 58690 - RNA, 19 nt, Artificial Sequence
  Description of Artificial Sequence: Synthetic oligonucleotide
uccccucacuuuuaaccgg

SEQ ID NO: 58691 - RNA, 19 nt, Artificial Sequence
  Description of Artificial Sequence: Synthetic oligonucleotide
uguuguugcuaggaucaag

SEQ ID NO: 58692 - RNA, 19 nt, Artificial Sequence
  Description of Artificial Sequence: Synthetic oligonucleotide
acuacuguucacagaggcg

SEQ ID NO: 58693 - RNA, 19 nt, Artificial Sequence
  Description of Artificial Sequence: Synthetic oligonucleotide
caugaguuaacucaucagu

SEQ ID NO: 58694 - RNA, 19 nt, Artificial Sequence
  Description of Artificial Sequence: Synthetic oligonucleotide
guuguugcuaggaucaaga

SEQ ID NO: 58695 - RNA, 19 nt, Artificial Sequence
  Description of Artificial Sequence: Synthetic oligonucleotide
aucucauuagaaggagccg

SEQ ID NO: 58696 - RNA, 19 nt, Artificial Sequence
  Description of Artificial Sequence: Synthetic oligonucleotide
agugaaucuuucaugaguu

SEQ ID NO: 58697 - RNA, 19 nt, Artificial Sequence
  Description of Artificial Sequence: Synthetic oligonucleotide
uuacccuacaggcuugaua

SEQ ID NO: 58698 - RNA, 19 nt, Artificial Sequence
  Description of Artificial Sequence: Synthetic oligonucleotide
aggauauaaggaaugguaa

SEQ ID NO: 58699 - RNA, 19 nt, Artificial Sequence
  Description of Artificial Sequence: Synthetic oligonucleotide
gaaugguaauucuguucug

SEQ ID NO: 58700 - RNA, 19 nt, Artificial Sequence
  Description of Artificial Sequence: Synthetic oligonucleotide
uuccaagaguuuucaucag

SEQ ID NO: 58701 - RNA, 19 nt, Artificial Sequence
  Description of Artificial Sequence: Synthetic oligonucleotide
ggaaugguaauucuguucu

SEQ ID NO: 58702 - RNA, 19 nt, Artificial Sequence
  Description of Artificial Sequence: Synthetic oligonucleotide
cacagauuaugagguaagg

SEQ ID NO: 58703 - RNA, 19 nt, Artificial Sequence
  Description of Artificial Sequence: Synthetic oligonucleotide
caguagguugaucaaugug

SEQ ID NO: 58704 - RNA, 19 nt, Artificial Sequence
  Description of Artificial Sequence: Synthetic oligonucleotide
uuauccuuggaaggaacaa

SEQ ID NO: 58705 - RNA, 19 nt, Artificial Sequence
  Description of Artificial Sequence: Synthetic oligonucleotide
guuccaaggagaaccauca

SEQ ID NO: 58706 - RNA, 19 nt, Artificial Sequence
  Description of Artificial Sequence: Synthetic oligonucleotide
agaaggaguuaguucaauu

SEQ ID NO: 58707 - RNA, 19 nt, Artificial Sequence
  Description of Artificial Sequence: Synthetic oligonucleotide
cauacacacacacacacgu

SEQ ID NO: 58708 - RNA, 19 nt, Artificial Sequence
  Description of Artificial Sequence: Synthetic oligonucleotide
aagcaaguauucauuuagu

SEQ ID NO: 58709 - RNA, 19 nt, Artificial Sequence
  Description of Artificial Sequence: Synthetic oligonucleotide
aguggaaucgugaucacuu

SEQ ID NO: 58710 - RNA, 19 nt, Artificial Sequence
  Description of Artificial Sequence: Synthetic oligonucleotide
ccgacuguuauccagcaag

SEQ ID NO: 58711 - RNA, 19 nt, Artificial Sequence
  Description of Artificial Sequence: Synthetic oligonucleotide
auuuacgagguaccucagu

SEQ ID NO: 58712 - RNA, 19 nt, Artificial Sequence
  Description of Artificial Sequence: Synthetic oligonucleotide
cuuauccuuggaaggaaca

SEQ ID NO: 58713 - RNA, 19 nt, Artificial Sequence
  Description of Artificial Sequence: Synthetic oligonucleotide
ggcguuuguaaugucagag

SEQ ID NO: 58714 - RNA, 19 nt, Artificial Sequence
  Description of Artificial Sequence: Synthetic oligonucleotide
uuacuaucucagauacaaa

SEQ ID NO: 58715 - RNA, 19 nt, Artificial Sequence
  Description of Artificial Sequence: Synthetic oligonucleotide
cacacacacacacacagaa

SEQ ID NO: 58716 - RNA, 19 nt, Artificial Sequence
  Description of Artificial Sequence: Synthetic oligonucleotide
cuucgcauacgccuugcug

SEQ ID NO: 58717 - RNA, 19 nt, Artificial Sequence
  Description of Artificial Sequence: Synthetic oligonucleotide
cacuacugguucauuauga

SEQ ID NO: 58718 - RNA, 19 nt, Artificial Sequence
  Description of Artificial Sequence: Synthetic oligonucleotide
ggacauccgacuguuaucc

SEQ ID NO: 58719 - RNA, 19 nt, Artificial Sequence
  Description of Artificial Sequence: Synthetic oligonucleotide
cacacacacacacguacac

SEQ ID NO: 58720 - RNA, 19 nt, Artificial Sequence
  Description of Artificial Sequence: Synthetic oligonucleotide
gaacaaggugagcagauau

SEQ ID NO: 58721 - RNA, 19 nt, Artificial Sequence
  Description of Artificial Sequence: Synthetic oligonucleotide
accagcuaagagaagaaau

SEQ ID NO: 58722 - RNA, 19 nt, Artificial Sequence
  Description of Artificial Sequence: Synthetic oligonucleotide
cacacacacacacagaagu

SEQ ID NO: 58723 - RNA, 19 nt, Artificial Sequence
  Description of Artificial Sequence: Synthetic oligonucleotide
aauaaaugguagggcugga

SEQ ID NO: 58724 - RNA, 19 nt, Artificial Sequence
  Description of Artificial Sequence: Synthetic oligonucleotide
uuucguccaguuacccuac

SEQ ID NO: 58725 - RNA, 19 nt, Artificial Sequence
  Description of Artificial Sequence: Synthetic oligonucleotide
aggaguuaguucaauugca

SEQ ID NO: 58726 - RNA, 19 nt, Artificial Sequence
  Description of Artificial Sequence: Synthetic oligonucleotide
ucgugaucacuuuggugca

SEQ ID NO: 58727 - RNA, 19 nt, Artificial Sequence
  Description of Artificial Sequence: Synthetic oligonucleotide
ucgggguugauggaugcug

SEQ ID NO: 58728 - RNA, 19 nt, Artificial Sequence
  Description of Artificial Sequence: Synthetic oligonucleotide
cacacacacacagaaguuc

SEQ ID NO: 58729 - RNA, 19 nt, Artificial Sequence
  Description of Artificial Sequence: Synthetic oligonucleotide
aagggcaucucuagaacau

SEQ ID NO: 58730 - RNA, 19 nt, Artificial Sequence
  Description of Artificial Sequence: Synthetic oligonucleotide
uuaaccggauacuguccac

SEQ ID NO: 58731 - RNA, 19 nt, Artificial Sequence
  Description of Artificial Sequence: Synthetic oligonucleotide
ccuauauauauauauugaa

SEQ ID NO: 58732 - RNA, 19 nt, Artificial Sequence
  Description of Artificial Sequence: Synthetic oligonucleotide
agcuaagagaagaaauuaa

SEQ ID NO: 58733 - RNA, 19 nt, Artificial Sequence
  Description of Artificial Sequence: Synthetic oligonucleotide
gaguuaguucaauugcacu

SEQ ID NO: 58734 - RNA, 19 nt, Artificial Sequence
  Description of Artificial Sequence: Synthetic oligonucleotide
aaccaaucuggcacgugug

SEQ ID NO: 58735 - RNA, 19 nt, Artificial Sequence
  Description of Artificial Sequence: Synthetic oligonucleotide
ucacaaucucgucguuuga

SEQ ID NO: 58736 - RNA, 19 nt, Artificial Sequence
  Description of Artificial Sequence: Synthetic oligonucleotide
uggaaccacaaguucucaa

SEQ ID NO: 58737 - RNA, 19 nt, Artificial Sequence
  Description of Artificial Sequence: Synthetic oligonucleotide
cugagguagaauaaauggu

SEQ ID NO: 58738 - RNA, 19 nt, Artificial Sequence
  Description of Artificial Sequence: Synthetic oligonucleotide
ugauaaaauccgugugguu

SEQ ID NO: 58739 - RNA, 19 nt, Artificial Sequence
  Description of Artificial Sequence: Synthetic oligonucleotide
gaaaccguaggcugauucu

SEQ ID NO: 58740 - RNA, 19 nt, Artificial Sequence
  Description of Artificial Sequence: Synthetic oligonucleotide
gggagaaauacccacguua

SEQ ID NO: 58741 - RNA, 19 nt, Artificial Sequence
  Description of Artificial Sequence: Synthetic oligonucleotide
ucaccgucggaaagccuug

SEQ ID NO: 58742 - RNA, 19 nt, Artificial Sequence
  Description of Artificial Sequence: Synthetic oligonucleotide
cagggaguuguauuucguc

SEQ ID NO: 58743 - RNA, 19 nt, Artificial Sequence
  Description of Artificial Sequence: Synthetic oligonucleotide
gcuaaguaaaugucacaac

SEQ ID NO: 58744 - RNA, 19 nt, Artificial Sequence
  Description of Artificial Sequence: Synthetic oligonucleotide
uuaugaccuuccagcuuca

SEQ ID NO: 58745 - RNA, 19 nt, Artificial Sequence
  Description of Artificial Sequence: Synthetic oligonucleotide
uuaccgguuaacugcuuuu

SEQ ID NO: 58746 - RNA, 19 nt, Artificial Sequence
  Description of Artificial Sequence: Synthetic oligonucleotide
aucuuuuacugagccucgg

SEQ ID NO: 58747 - RNA, 19 nt, Artificial Sequence
  Description of Artificial Sequence: Synthetic oligonucleotide
cacaaucucgucguuugac

SEQ ID NO: 58748 - RNA, 19 nt, Artificial Sequence
  Description of Artificial Sequence: Synthetic oligonucleotide
guauuucguccaguuaccc

SEQ ID NO: 58749 - RNA, 19 nt, Artificial Sequence
  Description of Artificial Sequence: Synthetic oligonucleotide
aacaaggugagcagauaua

SEQ ID NO: 58750 - RNA, 19 nt, Artificial Sequence
  Description of Artificial Sequence: Synthetic oligonucleotide
cguacacacacacacacac

SEQ ID NO: 58751 - RNA, 19 nt, Artificial Sequence
  Description of Artificial Sequence: Synthetic oligonucleotide
ccauauuagauucuucaca

SEQ ID NO: 58752 - RNA, 19 nt, Artificial Sequence
  Description of Artificial Sequence: Synthetic oligonucleotide
gauuuacgagguaccucag

SEQ ID NO: 58753 - RNA, 19 nt, Artificial Sequence
  Description of Artificial Sequence: Synthetic oligonucleotide
agaauccuuaccagcuaag

SEQ ID NO: 58754 - RNA, 19 nt, Artificial Sequence
  Description of Artificial Sequence: Synthetic oligonucleotide
ucugcugcugcugcugcug

SEQ ID NO: 58755 - RNA, 19 nt, Artificial Sequence
  Description of Artificial Sequence: Synthetic oligonucleotide
ggaaaccguaggcugauuc

SEQ ID NO: 58756 - RNA, 19 nt, Artificial Sequence
  Description of Artificial Sequence: Synthetic oligonucleotide
augccaaacuaaguuaaau

SEQ ID NO: 58757 - RNA, 19 nt, Artificial Sequence
  Description of Artificial Sequence: Synthetic oligonucleotide
guaccgagcucggugcugg

SEQ ID NO: 58758 - RNA, 19 nt, Artificial Sequence
  Description of Artificial Sequence: Synthetic oligonucleotide
aaccguggucugcugguaa

SEQ ID NO: 58759 - RNA, 19 nt, Artificial Sequence
  Description of Artificial Sequence: Synthetic oligonucleotide
caagaccaacuucuauaac

SEQ ID NO: 58760 - RNA, 19 nt, Artificial Sequence
  Description of Artificial Sequence: Synthetic oligonucleotide
gcugcguucuaucuuuuac

SEQ ID NO: 58761 - RNA, 19 nt, Artificial Sequence
  Description of Artificial Sequence: Synthetic oligonucleotide
uuaugagguaaggcugaac

SEQ ID NO: 58762 - RNA, 19 nt, Artificial Sequence
  Description of Artificial Sequence: Synthetic oligonucleotide
cugcuagugugggacagag

SEQ ID NO: 58763 - RNA, 19 nt, Artificial Sequence
  Description of Artificial Sequence: Synthetic oligonucleotide
acauauauucccacugaua

SEQ ID NO: 58764 - RNA, 19 nt, Artificial Sequence
  Description of Artificial Sequence: Synthetic oligonucleotide
ggaacuggugcucauguua

SEQ ID NO: 58765 - RNA, 19 nt, Artificial Sequence
  Description of Artificial Sequence: Synthetic oligonucleotide
gggaauaaauuaccaaugu

SEQ ID NO: 58766 - RNA, 19 nt, Artificial Sequence
  Description of Artificial Sequence: Synthetic oligonucleotide
ggaguuaguucaauugcac

SEQ ID NO: 58767 - RNA, 19 nt, Artificial Sequence
  Description of Artificial Sequence: Synthetic oligonucleotide
gggaguuguauuucgucca

SEQ ID NO: 58768 - RNA, 19 nt, Artificial Sequence
  Description of Artificial Sequence: Synthetic oligonucleotide
aaccguaggcugauucuga

SEQ ID NO: 58769 - RNA, 19 nt, Artificial Sequence
  Description of Artificial Sequence: Synthetic oligonucleotide
uuccuacgcaguccaccgc

SEQ ID NO: 58770 - RNA, 19 nt, Artificial Sequence
  Description of Artificial Sequence: Synthetic oligonucleotide
ugguuucacucgaccagaa

SEQ ID NO: 58771 - RNA, 19 nt, Artificial Sequence
  Description of Artificial Sequence: Synthetic oligonucleotide
gcauacgccuugcugucgg

SEQ ID NO: 58772 - RNA, 19 nt, Artificial Sequence
  Description of Artificial Sequence: Synthetic oligonucleotide
acacacacacacacagaag

SEQ ID NO: 58773 - RNA, 19 nt, Artificial Sequence
  Description of Artificial Sequence: Synthetic oligonucleotide
auccgacuguuauccagca

SEQ ID NO: 58774 - RNA, 19 nt, Artificial Sequence
  Description of Artificial Sequence: Synthetic oligonucleotide
uaccgguuaacugcuuuuc

SEQ ID NO: 58775 - RNA, 19 nt, Artificial Sequence
  Description of Artificial Sequence: Synthetic oligonucleotide
ugacuagccauuggguuuu

SEQ ID NO: 58776 - RNA, 19 nt, Artificial Sequence
  Description of Artificial Sequence: Synthetic oligonucleotide
cgucggaaagccuugcugc

SEQ ID NO: 58777 - RNA, 19 nt, Artificial Sequence
  Description of Artificial Sequence: Synthetic oligonucleotide
uuucgugauuuacgaggua

SEQ ID NO: 58778 - RNA, 19 nt, Artificial Sequence
  Description of Artificial Sequence: Synthetic oligonucleotide
acugucggcaucaaauaua

SEQ ID NO: 58779 - RNA, 19 nt, Artificial Sequence
  Description of Artificial Sequence: Synthetic oligonucleotide
uugcaccuauauauauaua

SEQ ID NO: 58780 - RNA, 19 nt, Artificial Sequence
  Description of Artificial Sequence: Synthetic oligonucleotide
aggucaguagguugaucaa

SEQ ID NO: 58781 - RNA, 19 nt, Artificial Sequence
  Description of Artificial Sequence: Synthetic oligonucleotide
ugaguggaaucgugaucac

SEQ ID NO: 58782 - RNA, 19 nt, Artificial Sequence
  Description of Artificial Sequence: Synthetic oligonucleotide
ucgcauacgccuugcuguc

SEQ ID NO: 58783 - RNA, 19 nt, Artificial Sequence
  Description of Artificial Sequence: Synthetic oligonucleotide
gugauuuacgagguaccuc

SEQ ID NO: 58784 - RNA, 19 nt, Artificial Sequence
  Description of Artificial Sequence: Synthetic oligonucleotide
ccaaggagaaccaucacua

SEQ ID NO: 58785 - RNA, 19 nt, Artificial Sequence
  Description of Artificial Sequence: Synthetic oligonucleotide
ugcuagugugggacagaga

SEQ ID NO: 58786 - RNA, 19 nt, Artificial Sequence
  Description of Artificial Sequence: Synthetic oligonucleotide
auacagaacauugcaccua

SEQ ID NO: 58787 - RNA, 19 nt, Artificial Sequence
  Description of Artificial Sequence: Synthetic oligonucleotide
gcaaaguuauauguugguc

SEQ ID NO: 58788 - RNA, 19 nt, Artificial Sequence
  Description of Artificial Sequence: Synthetic oligonucleotide
cagggugcuacauuggccu

SEQ ID NO: 58789 - RNA, 19 nt, Artificial Sequence
  Description of Artificial Sequence: Synthetic oligonucleotide
caccuuacccucuuuguua

SEQ ID NO: 58790 - RNA, 19 nt, Artificial Sequence
  Description of Artificial Sequence: Synthetic oligonucleotide
acacacacacacguacaca

SEQ ID NO: 58791 - RNA, 19 nt, Artificial Sequence
  Description of Artificial Sequence: Synthetic oligonucleotide
cugaagugaggaaaccgua

SEQ ID NO: 58792 - RNA, 19 nt, Artificial Sequence
  Description of Artificial Sequence: Synthetic oligonucleotide
cuucauggaaccacaaguu

SEQ ID NO: 58793 - RNA, 19 nt, Artificial Sequence
  Description of Artificial Sequence: Synthetic oligonucleotide
uuguaaugucagaguggau

SEQ ID NO: 58794 - RNA, 19 nt, Artificial Sequence
  Description of Artificial Sequence: Synthetic oligonucleotide
gacuccaauccacaccccu

SEQ ID NO: 58795 - RNA, 19 nt, Artificial Sequence
  Description of Artificial Sequence: Synthetic oligonucleotide
ggauauaaggaaugguaau

SEQ ID NO: 58796 - RNA, 19 nt, Artificial Sequence
  Description of Artificial Sequence: Synthetic oligonucleotide
acacacacacacacguaca

SEQ ID NO: 58797 - RNA, 19 nt, Artificial Sequence
  Description of Artificial Sequence: Synthetic oligonucleotide
gccuacuuacuuuccagca

SEQ ID NO: 58798 - RNA, 19 nt, Artificial Sequence
  Description of Artificial Sequence: Synthetic oligonucleotide
uugcuggacuagauaccuc

SEQ ID NO: 58799 - RNA, 19 nt, Artificial Sequence
  Description of Artificial Sequence: Synthetic oligonucleotide
guuauguacuucaccugaa

SEQ ID NO: 58800 - RNA, 19 nt, Artificial Sequence
  Description of Artificial Sequence: Synthetic oligonucleotide
gggaagagggcguuuguaa

SEQ ID NO: 58801 - RNA, 19 nt, Artificial Sequence
  Description of Artificial Sequence: Synthetic oligonucleotide
acuucgcauacgccuugcu

SEQ ID NO: 58802 - RNA, 19 nt, Artificial Sequence
  Description of Artificial Sequence: Synthetic oligonucleotide
gcauucugauuacugaaua

SEQ ID NO: 58803 - RNA, 19 nt, Artificial Sequence
  Description of Artificial Sequence: Synthetic oligonucleotide
auuaugagguaaggcugaa

SEQ ID NO: 58804 - RNA, 19 nt, Artificial Sequence
  Description of Artificial Sequence: Synthetic oligonucleotide
uucguccaguuacccuaca

SEQ ID NO: 58805 - RNA, 19 nt, Artificial Sequence
  Description of Artificial Sequence: Synthetic oligonucleotide
uugcagggaguuguauuuc

SEQ ID NO: 58806 - RNA, 19 nt, Artificial Sequence
  Description of Artificial Sequence: Synthetic oligonucleotide
cugcguucuaucuuuuacu

SEQ ID NO: 58807 - RNA, 19 nt, Artificial Sequence
  Description of Artificial Sequence: Synthetic oligonucleotide
auacgccuugcugucggug

SEQ ID NO: 58808 - RNA, 19 nt, Artificial Sequence
  Description of Artificial Sequence: Synthetic oligonucleotide
agggagaaauacccacguu

SEQ ID NO: 58809 - RNA, 19 nt, Artificial Sequence
  Description of Artificial Sequence: Synthetic oligonucleotide
cucuuacaucauugcagga

SEQ ID NO: 58810 - RNA, 19 nt, Artificial Sequence
  Description of Artificial Sequence: Synthetic oligonucleotide
acacguacacacacacaca

SEQ ID NO: 58811 - RNA, 19 nt, Artificial Sequence
  Description of Artificial Sequence: Synthetic oligonucleotide
accgucggaaagccuugcu

SEQ ID NO: 58812 - RNA, 19 nt, Artificial Sequence
  Description of Artificial Sequence: Synthetic oligonucleotide
uccuuucacugaacagcua

SEQ ID NO: 58813 - RNA, 19 nt, Artificial Sequence
  Description of Artificial Sequence: Synthetic oligonucleotide
auggaaccacaaguucuca

SEQ ID NO: 58814 - RNA, 19 nt, Artificial Sequence
  Description of Artificial Sequence: Synthetic oligonucleotide
cagucaguugauguaaacu

SEQ ID NO: 58815 - RNA, 19 nt, Artificial Sequence
  Description of Artificial Sequence: Synthetic oligonucleotide
ugcugcguucuaucuuuua

SEQ ID NO: 58816 - RNA, 19 nt, Artificial Sequence
  Description of Artificial Sequence: Synthetic oligonucleotide
guacacacacacacacaca

SEQ ID NO: 58817 - RNA, 19 nt, Artificial Sequence
  Description of Artificial Sequence: Synthetic oligonucleotide
cuucaccugaagcaugagu

SEQ ID NO: 58818 - RNA, 19 nt, Artificial Sequence
  Description of Artificial Sequence: Synthetic oligonucleotide
uguuaccgguuaacugcuu

SEQ ID NO: 58819 - RNA, 19 nt, Artificial Sequence
  Description of Artificial Sequence: Synthetic oligonucleotide
acacacacacacacacaca

SEQ ID NO: 58820 - RNA, 19 nt, Artificial Sequence
  Description of Artificial Sequence: Synthetic oligonucleotide
acacacacguacacacaca

SEQ ID NO: 58821 - RNA, 19 nt, Artificial Sequence
  Description of Artificial Sequence: Synthetic oligonucleotide
cugcugcugcugcugcugc

SEQ ID NO: 58822 - RNA, 19 nt, Artificial Sequence
  Description of Artificial Sequence: Synthetic oligonucleotide
guuauauguuggucauggu

SEQ ID NO: 58823 - RNA, 19 nt, Artificial Sequence
  Description of Artificial Sequence: Synthetic oligonucleotide
aguuacccuacaggcuuga

SEQ ID NO: 58824 - RNA, 19 nt, Artificial Sequence
  Description of Artificial Sequence: Synthetic oligonucleotide
acacacacacguacacaca

SEQ ID NO: 58825 - RNA, 19 nt, Artificial Sequence
  Description of Artificial Sequence: Synthetic oligonucleotide
caggcuugauaaaauccgu

SEQ ID NO: 58826 - RNA, 19 nt, Artificial Sequence
  Description of Artificial Sequence: Synthetic oligonucleotide
agguaccgagcucggugcu

SEQ ID NO: 58827 - RNA, 19 nt, Artificial Sequence
  Description of Artificial Sequence: Synthetic oligonucleotide
acacacacacacagaaguu

SEQ ID NO: 58828 - RNA, 19 nt, Artificial Sequence
  Description of Artificial Sequence: Synthetic oligonucleotide
acacacacacacacacaga

SEQ ID NO: 58829 - RNA, 19 nt, Artificial Sequence
  Description of Artificial Sequence: Synthetic oligonucleotide
gucauguuguugcuaggau

SEQ ID NO: 58830 - RNA, 19 nt, Artificial Sequence
  Description of Artificial Sequence: Synthetic oligonucleotide
gcuucaccgucggaaagcc

SEQ ID NO: 58831 - RNA, 19 nt, Artificial Sequence
  Description of Artificial Sequence: Synthetic oligonucleotide
acguacacacacacacaca

SEQ ID NO: 58832 - RNA, 19 nt, Artificial Sequence
  Description of Artificial Sequence: Synthetic oligonucleotide
aaaccguggucugcuggua

SEQ ID NO: 58833 - RNA, 19 nt, Artificial Sequence
  Description of Artificial Sequence: Synthetic oligonucleotide
cguuuucgugauuuacgag

SEQ ID NO: 58834 - RNA, 19 nt, Artificial Sequence
  Description of Artificial Sequence: Synthetic oligonucleotide
ugcugcugcugcugcugcu

SEQ ID NO: 58835 - RNA, 19 nt, Artificial Sequence
  Description of Artificial Sequence: Synthetic oligonucleotide
guuaccgguuaacugcuuu

SEQ ID NO: 58836 - RNA, 19 nt, Artificial Sequence
  Description of Artificial Sequence: Synthetic oligonucleotide
cacuucgcauacgccuugc

SEQ ID NO: 58837 - RNA, 19 nt, Artificial Sequence
  Description of Artificial Sequence: Synthetic oligonucleotide
ugugugccucuucgggguu

SEQ ID NO: 58838 - RNA, 19 nt, Artificial Sequence
  Description of Artificial Sequence: Synthetic oligonucleotide
acacacguacacacacaca

SEQ ID NO: 58839 - RNA, 19 nt, Artificial Sequence
  Description of Artificial Sequence: Synthetic oligonucleotide
uacccauauuaugcauaaa

SEQ ID NO: 58840 - RNA, 19 nt, Artificial Sequence
  Description of Artificial Sequence: Synthetic oligonucleotide
accggauacuguccacaua

SEQ ID NO: 58841 - RNA, 19 nt, Artificial Sequence
  Description of Artificial Sequence: Synthetic oligonucleotide
auacacacacacacacgua

SEQ ID NO: 58842 - RNA, 19 nt, Artificial Sequence
  Description of Artificial Sequence: Synthetic oligonucleotide
guagcacccaucaauuauu

SEQ ID NO: 58843 - RNA, 19 nt, Artificial Sequence
  Description of Artificial Sequence: Synthetic oligonucleotide
cuguagcacccaucaauua

SEQ ID NO: 58844 - RNA, 19 nt, Artificial Sequence
  Description of Artificial Sequence: Synthetic oligonucleotide
cuggucuagccagagcaaa

SEQ ID NO: 58845 - RNA, 19 nt, Artificial Sequence
  Description of Artificial Sequence: Synthetic oligonucleotide
gaguggaaucgugaucacu

SEQ ID NO: 58846 - RNA, 19 nt, Artificial Sequence
  Description of Artificial Sequence: Synthetic oligonucleotide
caaucacuuggagcuuauc

SEQ ID NO: 58847 - RNA, 19 nt, Artificial Sequence
  Description of Artificial Sequence: Synthetic oligonucleotide
uugcugcguucuaucuuuu

SEQ ID NO: 58848 - RNA, 19 nt, Artificial Sequence
  Description of Artificial Sequence: Synthetic oligonucleotide
ugcaugggcuguugcucuu

SEQ ID NO: 58849 - RNA, 19 nt, Artificial Sequence
  Description of Artificial Sequence: Synthetic oligonucleotide
ggaagagggcguuuguaau

SEQ ID NO: 58850 - RNA, 19 nt, Artificial Sequence
  Description of Artificial Sequence: Synthetic oligonucleotide
gcaaaaccguggucugcug

SEQ ID NO: 58851 - RNA, 19 nt, Artificial Sequence
  Description of Artificial Sequence: Synthetic oligonucleotide
gcguuuguaaugucagagu

SEQ ID NO: 58852 - RNA, 19 nt, Artificial Sequence
  Description of Artificial Sequence: Synthetic oligonucleotide
guauuccuacgcaguccac

SEQ ID NO: 58853 - RNA, 19 nt, Artificial Sequence
  Description of Artificial Sequence: Synthetic oligonucleotide
cacugucggcaucaaauau

SEQ ID NO: 58854 - RNA, 19 nt, Artificial Sequence
  Description of Artificial Sequence: Synthetic oligonucleotide
caccgucggaaagccuugc

SEQ ID NO: 58855 - RNA, 19 nt, Artificial Sequence
  Description of Artificial Sequence: Synthetic oligonucleotide
guaccucaguguuaucauu

SEQ ID NO: 58856 - RNA, 19 nt, Artificial Sequence
  Description of Artificial Sequence: Synthetic oligonucleotide
ggguuucaggcuguacaac

SEQ ID NO: 58857 - RNA, 19 nt, Artificial Sequence
  Description of Artificial Sequence: Synthetic oligonucleotide
ccuuucacugaacagcuau

SEQ ID NO: 58858 - RNA, 19 nt, Artificial Sequence
  Description of Artificial Sequence: Synthetic oligonucleotide
gcugcugcugcugcugcug

SEQ ID NO: 58859 - RNA, 19 nt, Artificial Sequence
  Description of Artificial Sequence: Synthetic oligonucleotide
accgcccauggaggaagag

SEQ ID NO: 58860 - RNA, 19 nt, Artificial Sequence
  Description of Artificial Sequence: Synthetic oligonucleotide
ugcugcugcugcugcuguu

SEQ ID NO: 58861 - RNA, 19 nt, Artificial Sequence
  Description of Artificial Sequence: Synthetic oligonucleotide
gacuagccauuggguuuug

SEQ ID NO: 58862 - RNA, 19 nt, Artificial Sequence
  Description of Artificial Sequence: Synthetic oligonucleotide
gguaccgagcucggugcug

SEQ ID NO: 58863 - RNA, 19 nt, Artificial Sequence
  Description of Artificial Sequence: Synthetic oligonucleotide
gccgguuaaauuguucccu

SEQ ID NO: 58864 - RNA, 19 nt, Artificial Sequence
  Description of Artificial Sequence: Synthetic oligonucleotide
acgagguaccucaguguua

SEQ ID NO: 58865 - RNA, 19 nt, Artificial Sequence
  Description of Artificial Sequence: Synthetic oligonucleotide
ccaguuacccuacaggcuu

SEQ ID NO: 58866 - RNA, 19 nt, Artificial Sequence
  Description of Artificial Sequence: Synthetic oligonucleotide
gcaccuauauauauauauu

SEQ ID NO: 58867 - RNA, 19 nt, Artificial Sequence
  Description of Artificial Sequence: Synthetic oligonucleotide
cuggacuagauaccuccuu

SEQ ID NO: 58868 - RNA, 19 nt, Artificial Sequence
  Description of Artificial Sequence: Synthetic oligonucleotide
ggucaguagguugaucaau

SEQ ID NO: 58869 - RNA, 19 nt, Artificial Sequence
  Description of Artificial Sequence: Synthetic oligonucleotide
ccguggucugcugguaaag

SEQ ID NO: 58870 - RNA, 19 nt, Artificial Sequence
  Description of Artificial Sequence: Synthetic oligonucleotide
gccacuuagcacugcuagu

SEQ ID NO: 58871 - RNA, 19 nt, Artificial Sequence
  Description of Artificial Sequence: Synthetic oligonucleotide
gguucauuggggccauauu

SEQ ID NO: 58872 - RNA, 19 nt, Artificial Sequence
  Description of Artificial Sequence: Synthetic oligonucleotide
cuucaccgucggaaagccu

SEQ ID NO: 58873 - RNA, 19 nt, Artificial Sequence
  Description of Artificial Sequence: Synthetic oligonucleotide
aggaaaccguaggcugauu

SEQ ID NO: 58874 - RNA, 19 nt, Artificial Sequence
  Description of Artificial Sequence: Synthetic oligonucleotide
cagaaggaguuaguucaau

SEQ ID NO: 58875 - RNA, 19 nt, Artificial Sequence
  Description of Artificial Sequence: Synthetic oligonucleotide
cauacgccuugcugucggu

SEQ ID NO: 58876 - RNA, 19 nt, Artificial Sequence
  Description of Artificial Sequence: Synthetic oligonucleotide
cucugcugcugcugcugcu

SEQ ID NO: 58877 - RNA, 19 nt, Artificial Sequence
  Description of Artificial Sequence: Synthetic oligonucleotide
gcacauagugaggugcuuu

SEQ ID NO: 58878 - RNA, 19 nt, Artificial Sequence
  Description of Artificial Sequence: Synthetic oligonucleotide
gucagguaccgagcucggu

SEQ ID NO: 58879 - RNA, 19 nt, Artificial Sequence
  Description of Artificial Sequence: Synthetic oligonucleotide
cugcugcugcugcugcugu

SEQ ID NO: 58880 - RNA, 19 nt, Artificial Sequence
  Description of Artificial Sequence: Synthetic oligonucleotide
cgacuguuauccagcaagu

SEQ ID NO: 58881 - RNA, 19 nt, Artificial Sequence
  Description of Artificial Sequence: Synthetic oligonucleotide
guuacccuacaggcuugau

SEQ ID NO: 58882 - RNA, 19 nt, Artificial Sequence
  Description of Artificial Sequence: Synthetic oligonucleotide
cgugauuuacgagguaccu

SEQ ID NO: 58883 - RNA, 19 nt, Artificial Sequence
  Description of Artificial Sequence: Synthetic oligonucleotide
ccgguuaaauuguucccuu

SEQ ID NO: 58884 - RNA, 19 nt, Artificial Sequence
  Description of Artificial Sequence: Synthetic oligonucleotide
gcaaucacuuggagcuuau

SEQ ID NO: 58885 - RNA, 19 nt, Artificial Sequence
  Description of Artificial Sequence: Synthetic oligonucleotide
cuggcacgugugcucuuuu

SEQ ID NO: 58886 - RNA, 19 nt, Artificial Sequence
  Description of Artificial Sequence: Synthetic oligonucleotide
ccauagcauucugauuacu

SEQ ID NO: 58887 - RNA, 19 nt, Artificial Sequence
  Description of Artificial Sequence: Synthetic oligonucleotide
cgccuugcugucggugacu

SEQ ID NO: 58888 - RNA, 19 nt, Artificial Sequence
  Description of Artificial Sequence: Synthetic oligonucleotide
aaugccuacauuuuggagc

SEQ ID NO: 58889 - RNA, 19 nt, Artificial Sequence
  Description of Artificial Sequence: Synthetic oligonucleotide
aaaguuacgaacccgaauc

SEQ ID NO: 58890 - RNA, 19 nt, Artificial Sequence
  Description of Artificial Sequence: Synthetic oligonucleotide
aaaacaaaacaaaacaaac

SEQ ID NO: 58891 - RNA, 19 nt, Artificial Sequence
  Description of Artificial Sequence: Synthetic oligonucleotide
uuaauuuccagccauuugc

SEQ ID NO: 58892 - RNA, 19 nt, Artificial Sequence
  Description of Artificial Sequence: Synthetic oligonucleotide
aauauugcaauagccaggc

SEQ ID NO: 58893 - RNA, 19 nt, Artificial Sequence
  Description of Artificial Sequence: Synthetic oligonucleotide
aaagcuacuauacaauaug

SEQ ID NO: 58894 - RNA, 19 nt, Artificial Sequence
  Description of Artificial Sequence: Synthetic oligonucleotide
agaucuaacuacuccaacc

SEQ ID NO: 58895 - RNA, 19 nt, Artificial Sequence
  Description of Artificial Sequence: Synthetic oligonucleotide
auauaaugcagccaaaaug

SEQ ID NO: 58896 - RNA, 19 nt, Artificial Sequence
  Description of Artificial Sequence: Synthetic oligonucleotide
auauuagagacauggaguc

SEQ ID NO: 58897 - RNA, 19 nt, Artificial Sequence
  Description of Artificial Sequence: Synthetic oligonucleotide
aguaaauauugcaauagcc

SEQ ID NO: 58898 - RNA, 19 nt, Artificial Sequence
  Description of Artificial Sequence: Synthetic oligonucleotide
auuagagcaugucaguccc

SEQ ID NO: 58899 - RNA, 19 nt, Artificial Sequence
  Description of Artificial Sequence: Synthetic oligonucleotide
uauacaauaugguucuuag

SEQ ID NO: 58900 - RNA, 19 nt, Artificial Sequence
  Description of Artificial Sequence: Synthetic oligonucleotide
uccuuaggggaaaagaggg

SEQ ID NO: 58901 - RNA, 19 nt, Artificial Sequence
  Description of Artificial Sequence: Synthetic oligonucleotide
aaguuacgaacccgaaucc

SEQ ID NO: 58902 - RNA, 19 nt, Artificial Sequence
  Description of Artificial Sequence: Synthetic oligonucleotide
auucucgaaaguuacgaac

SEQ ID NO: 58903 - RNA, 19 nt, Artificial Sequence
  Description of Artificial Sequence: Synthetic oligonucleotide
aauaauuagaggaauguaa

SEQ ID NO: 58904 - RNA, 19 nt, Artificial Sequence
  Description of Artificial Sequence: Synthetic oligonucleotide
aacccgaaucccuuggagc

SEQ ID NO: 58905 - RNA, 19 nt, Artificial Sequence
  Description of Artificial Sequence: Synthetic oligonucleotide
guaacuuaugccuuaaaac

SEQ ID NO: 58906 - RNA, 19 nt, Artificial Sequence
  Description of Artificial Sequence: Synthetic oligonucleotide
gauuuuacggcccucuacc

SEQ ID NO: 58907 - RNA, 19 nt, Artificial Sequence
  Description of Artificial Sequence: Synthetic oligonucleotide
uucucgaaaguuacgaacc

SEQ ID NO: 58908 - RNA, 19 nt, Artificial Sequence
  Description of Artificial Sequence: Synthetic oligonucleotide
ugcugcauauaacucaggg

SEQ ID NO: 58909 - RNA, 19 nt, Artificial Sequence
  Description of Artificial Sequence: Synthetic oligonucleotide
aaauccguccugguaaacc

SEQ ID NO: 58910 - RNA, 19 nt, Artificial Sequence
  Description of Artificial Sequence: Synthetic oligonucleotide
ugacauaaggggaaaauuc

SEQ ID NO: 58911 - RNA, 19 nt, Artificial Sequence
  Description of Artificial Sequence: Synthetic oligonucleotide
aagaucuaacuacuccaac

SEQ ID NO: 58912 - RNA, 19 nt, Artificial Sequence
  Description of Artificial Sequence: Synthetic oligonucleotide
uucugcgggacuuugagcc

SEQ ID NO: 58913 - RNA, 19 nt, Artificial Sequence
  Description of Artificial Sequence: Synthetic oligonucleotide
uuuacggcccucuaccacg

SEQ ID NO: 58914 - RNA, 19 nt, Artificial Sequence
  Description of Artificial Sequence: Synthetic oligonucleotide
cuugaaaagauugaggcuc

SEQ ID NO: 58915 - RNA, 19 nt, Artificial Sequence
  Description of Artificial Sequence: Synthetic oligonucleotide
uagaguuucgaguagugga

SEQ ID NO: 58916 - RNA, 19 nt, Artificial Sequence
  Description of Artificial Sequence: Synthetic oligonucleotide
aguguuuuaugcaacagag

SEQ ID NO: 58917 - RNA, 19 nt, Artificial Sequence
  Description of Artificial Sequence: Synthetic oligonucleotide
auuagauguucaccgugcc

SEQ ID NO: 58918 - RNA, 19 nt, Artificial Sequence
  Description of Artificial Sequence: Synthetic oligonucleotide
auacuguauggucugaaag

SEQ ID NO: 58919 - RNA, 19 nt, Artificial Sequence
  Description of Artificial Sequence: Synthetic oligonucleotide
acuauuguuuccuaucuga

SEQ ID NO: 58920 - RNA, 19 nt, Artificial Sequence
  Description of Artificial Sequence: Synthetic oligonucleotide
cucgauauauaaugcagcc

SEQ ID NO: 58921 - RNA, 19 nt, Artificial Sequence
  Description of Artificial Sequence: Synthetic oligonucleotide
uguguaccuccguagagcg

SEQ ID NO: 58922 - RNA, 19 nt, Artificial Sequence
  Description of Artificial Sequence: Synthetic oligonucleotide
uucaccucgauuuuacggc

SEQ ID NO: 58923 - RNA, 19 nt, Artificial Sequence
  Description of Artificial Sequence: Synthetic oligonucleotide
uaagcuaggaguccugaug

SEQ ID NO: 58924 - RNA, 19 nt, Artificial Sequence
  Description of Artificial Sequence: Synthetic oligonucleotide
uucgguaacuugcauaaga

SEQ ID NO: 58925 - RNA, 19 nt, Artificial Sequence
  Description of Artificial Sequence: Synthetic oligonucleotide
acccgaaucccuuggagcc

SEQ ID NO: 58926 - RNA, 19 nt, Artificial Sequence
  Description of Artificial Sequence: Synthetic oligonucleotide
uucucaguuaccaaucccu

SEQ ID NO: 58927 - RNA, 19 nt, Artificial Sequence
  Description of Artificial Sequence: Synthetic oligonucleotide
uuugcauauggugugacca

SEQ ID NO: 58928 - RNA, 19 nt, Artificial Sequence
  Description of Artificial Sequence: Synthetic oligonucleotide
aguucucaguuaccaaucc

SEQ ID NO: 58929 - RNA, 19 nt, Artificial Sequence
  Description of Artificial Sequence: Synthetic oligonucleotide
ucuaacuacuccaaccuuc

SEQ ID NO: 58930 - RNA, 19 nt, Artificial Sequence
  Description of Artificial Sequence: Synthetic oligonucleotide
uuucgaguaguggagaacc

SEQ ID NO: 58931 - RNA, 19 nt, Artificial Sequence
  Description of Artificial Sequence: Synthetic oligonucleotide
aagcuacuauacaauaugg

SEQ ID NO: 58932 - RNA, 19 nt, Artificial Sequence
  Description of Artificial Sequence: Synthetic oligonucleotide
acuuaugccuuaaaacacc

SEQ ID NO: 58933 - RNA, 19 nt, Artificial Sequence
  Description of Artificial Sequence: Synthetic oligonucleotide
caaaacaaaacaaaacaaa

SEQ ID NO: 58934 - RNA, 19 nt, Artificial Sequence
  Description of Artificial Sequence: Synthetic oligonucleotide
aauccguccugguaaacca

SEQ ID NO: 58935 - RNA, 19 nt, Artificial Sequence
  Description of Artificial Sequence: Synthetic oligonucleotide
acucgauauauaaugcagc

SEQ ID NO: 58936 - RNA, 19 nt, Artificial Sequence
  Description of Artificial Sequence: Synthetic oligonucleotide
cauuagagcaugucagucc

SEQ ID NO: 58937 - RNA, 19 nt, Artificial Sequence
  Description of Artificial Sequence: Synthetic oligonucleotide
uacuaguaaauauugcaau

SEQ ID NO: 58938 - RNA, 19 nt, Artificial Sequence
  Description of Artificial Sequence: Synthetic oligonucleotide
aauggucagacauucucaa

SEQ ID NO: 58939 - RNA, 19 nt, Artificial Sequence
  Description of Artificial Sequence: Synthetic oligonucleotide
cacucgauauauaaugcag

SEQ ID NO: 58940 - RNA, 19 nt, Artificial Sequence
  Description of Artificial Sequence: Synthetic oligonucleotide
ugaaccauugcgucaggag

SEQ ID NO: 58941 - RNA, 19 nt, Artificial Sequence
  Description of Artificial Sequence: Synthetic oligonucleotide
aucacucgauauauaaugc

SEQ ID NO: 58942 - RNA, 19 nt, Artificial Sequence
  Description of Artificial Sequence: Synthetic oligonucleotide
aagccaggaauaauuagag

SEQ ID NO: 58943 - RNA, 19 nt, Artificial Sequence
  Description of Artificial Sequence: Synthetic oligonucleotide
auacaauaugguucuuagg

SEQ ID NO: 58944 - RNA, 19 nt, Artificial Sequence
  Description of Artificial Sequence: Synthetic oligonucleotide
cuaggauuuugccaaacug

SEQ ID NO: 58945 - RNA, 19 nt, Artificial Sequence
  Description of Artificial Sequence: Synthetic oligonucleotide
uauuggucaugacucgugc

SEQ ID NO: 58946 - RNA, 19 nt, Artificial Sequence
  Description of Artificial Sequence: Synthetic oligonucleotide
ugagccuugaaaagauuga

SEQ ID NO: 58947 - RNA, 19 nt, Artificial Sequence
  Description of Artificial Sequence: Synthetic oligonucleotide
guagccgucgcuguaagcg

SEQ ID NO: 58948 - RNA, 19 nt, Artificial Sequence
  Description of Artificial Sequence: Synthetic oligonucleotide
auaucuguaggcugcauau

SEQ ID NO: 58949 - RNA, 19 nt, Artificial Sequence
  Description of Artificial Sequence: Synthetic oligonucleotide
cucacgucacuucaguagg

SEQ ID NO: 58950 - RNA, 19 nt, Artificial Sequence
  Description of Artificial Sequence: Synthetic oligonucleotide
agaguuuauaaaagccagc

SEQ ID NO: 58951 - RNA, 19 nt, Artificial Sequence
  Description of Artificial Sequence: Synthetic oligonucleotide
augguucuuagggagaggg

SEQ ID NO: 58952 - RNA, 19 nt, Artificial Sequence
  Description of Artificial Sequence: Synthetic oligonucleotide
ugaaagcuacuauacaaua

SEQ ID NO: 58953 - RNA, 19 nt, Artificial Sequence
  Description of Artificial Sequence: Synthetic oligonucleotide
gaaucuggcauugguaacc

SEQ ID NO: 58954 - RNA, 19 nt, Artificial Sequence
  Description of Artificial Sequence: Synthetic oligonucleotide
ucuaggauuuugccaaacu

SEQ ID NO: 58955 - RNA, 19 nt, Artificial Sequence
  Description of Artificial Sequence: Synthetic oligonucleotide
ucucgaaaguuacgaaccc

SEQ ID NO: 58956 - RNA, 19 nt, Artificial Sequence
  Description of Artificial Sequence: Synthetic oligonucleotide
aguuacgaacccgaauccc

SEQ ID NO: 58957 - RNA, 19 nt, Artificial Sequence
  Description of Artificial Sequence: Synthetic oligonucleotide
uaaugccuacauuuuggag

SEQ ID NO: 58958 - RNA, 19 nt, Artificial Sequence
  Description of Artificial Sequence: Synthetic oligonucleotide
acgggaugguaguaaaagg

SEQ ID NO: 58959 - RNA, 19 nt, Artificial Sequence
  Description of Artificial Sequence: Synthetic oligonucleotide
uguuccuuaggggaaaaga

SEQ ID NO: 58960 - RNA, 19 nt, Artificial Sequence
  Description of Artificial Sequence: Synthetic oligonucleotide
aagugucacugguguauac

SEQ ID NO: 58961 - RNA, 19 nt, Artificial Sequence
  Description of Artificial Sequence: Synthetic oligonucleotide
uauuagagacauggagucg

SEQ ID NO: 58962 - RNA, 19 nt, Artificial Sequence
  Description of Artificial Sequence: Synthetic oligonucleotide
ugcgguugcaguagcaggc

SEQ ID NO: 58963 - RNA, 19 nt, Artificial Sequence
  Description of Artificial Sequence: Synthetic oligonucleotide
gguaacuugcauaagaaca

SEQ ID NO: 58964 - RNA, 19 nt, Artificial Sequence
  Description of Artificial Sequence: Synthetic oligonucleotide
cacuauucucgaaaguuac

SEQ ID NO: 58965 - RNA, 19 nt, Artificial Sequence
  Description of Artificial Sequence: Synthetic oligonucleotide
uauucaccucgauuuuacg

SEQ ID NO: 58966 - RNA, 19 nt, Artificial Sequence
  Description of Artificial Sequence: Synthetic oligonucleotide
ucucaguuaccaaucccug

SEQ ID NO: 58967 - RNA, 19 nt, Artificial Sequence
  Description of Artificial Sequence: Synthetic oligonucleotide
agugguaccugucuugcca

SEQ ID NO: 58968 - RNA, 19 nt, Artificial Sequence
  Description of Artificial Sequence: Synthetic oligonucleotide
ucgguaacuugcauaagaa

SEQ ID NO: 58969 - RNA, 19 nt, Artificial Sequence
  Description of Artificial Sequence: Synthetic oligonucleotide
guuucgguaacuugcauaa

SEQ ID NO: 58970 - RNA, 19 nt, Artificial Sequence
  Description of Artificial Sequence: Synthetic oligonucleotide
uuggcucuagcuauucaca

SEQ ID NO: 58971 - RNA, 19 nt, Artificial Sequence
  Description of Artificial Sequence: Synthetic oligonucleotide
uucgaguaguggagaaccg

SEQ ID NO: 58972 - RNA, 19 nt, Artificial Sequence
  Description of Artificial Sequence: Synthetic oligonucleotide
uuaugcaacagagaaucaa

SEQ ID NO: 58973 - RNA, 19 nt, Artificial Sequence
  Description of Artificial Sequence: Synthetic oligonucleotide
aguaacccaaugaauacug

SEQ ID NO: 58974 - RNA, 19 nt, Artificial Sequence
  Description of Artificial Sequence: Synthetic oligonucleotide
acccaaugaauacuguaug

SEQ ID NO: 58975 - RNA, 19 nt, Artificial Sequence
  Description of Artificial Sequence: Synthetic oligonucleotide
ucuggaguuagcagggaaa

SEQ ID NO: 58976 - RNA, 19 nt, Artificial Sequence
  Description of Artificial Sequence: Synthetic oligonucleotide
uauuuaggguacaccucag

SEQ ID NO: 58977 - RNA, 19 nt, Artificial Sequence
  Description of Artificial Sequence: Synthetic oligonucleotide
gaaaagauugaggcucuag

SEQ ID NO: 58978 - RNA, 19 nt, Artificial Sequence
  Description of Artificial Sequence: Synthetic oligonucleotide
ucuagcuauucacaagcau

SEQ ID NO: 58979 - RNA, 19 nt, Artificial Sequence
  Description of Artificial Sequence: Synthetic oligonucleotide
uguccugcacucaguaacc

SEQ ID NO: 58980 - RNA, 19 nt, Artificial Sequence
  Description of Artificial Sequence: Synthetic oligonucleotide
gaucuaacuacuccaaccu

SEQ ID NO: 58981 - RNA, 19 nt, Artificial Sequence
  Description of Artificial Sequence: Synthetic oligonucleotide
ucgggcauggcaauugccu

SEQ ID NO: 58982 - RNA, 19 nt, Artificial Sequence
  Description of Artificial Sequence: Synthetic oligonucleotide
ugucaaggcaagcucgagu

SEQ ID NO: 58983 - RNA, 19 nt, Artificial Sequence
  Description of Artificial Sequence: Synthetic oligonucleotide
uuuuacggcccucuaccac

SEQ ID NO: 58984 - RNA, 19 nt, Artificial Sequence
  Description of Artificial Sequence: Synthetic oligonucleotide
uaacuggcuacaguuucgg

SEQ ID NO: 58985 - RNA, 19 nt, Artificial Sequence
  Description of Artificial Sequence: Synthetic oligonucleotide
gcucuagcuauucacaagc

SEQ ID NO: 58986 - RNA, 19 nt, Artificial Sequence
  Description of Artificial Sequence: Synthetic oligonucleotide
uuacugggugaauugcuac

SEQ ID NO: 58987 - RNA, 19 nt, Artificial Sequence
  Description of Artificial Sequence: Synthetic oligonucleotide
aguucaucacucgauauau

SEQ ID NO: 58988 - RNA, 19 nt, Artificial Sequence
  Description of Artificial Sequence: Synthetic oligonucleotide
aaagaucuaacuacuccaa

SEQ ID NO: 58989 - RNA, 19 nt, Artificial Sequence
  Description of Artificial Sequence: Synthetic oligonucleotide
uaggaguaacccaaugaau

SEQ ID NO: 58990 - RNA, 19 nt, Artificial Sequence
  Description of Artificial Sequence: Synthetic oligonucleotide
gccuuaaaacaccacaacc

SEQ ID NO: 58991 - RNA, 19 nt, Artificial Sequence
  Description of Artificial Sequence: Synthetic oligonucleotide
agccauuagagcaugucag

SEQ ID NO: 58992 - RNA, 19 nt, Artificial Sequence
  Description of Artificial Sequence: Synthetic oligonucleotide
uguacacccugccguagcc

SEQ ID NO: 58993 - RNA, 19 nt, Artificial Sequence
  Description of Artificial Sequence: Synthetic oligonucleotide
cuagcuauucacaagcaua

SEQ ID NO: 58994 - RNA, 19 nt, Artificial Sequence
  Description of Artificial Sequence: Synthetic oligonucleotide
auaugguucuuagggagag

SEQ ID NO: 58995 - RNA, 19 nt, Artificial Sequence
  Description of Artificial Sequence: Synthetic oligonucleotide
cuagaguuucgaguagugg

SEQ ID NO: 58996 - RNA, 19 nt, Artificial Sequence
  Description of Artificial Sequence: Synthetic oligonucleotide
caagcucgaguuuuggcug

SEQ ID NO: 58997 - RNA, 19 nt, Artificial Sequence
  Description of Artificial Sequence: Synthetic oligonucleotide
agcggaagggaauauuaga

SEQ ID NO: 58998 - RNA, 19 nt, Artificial Sequence
  Description of Artificial Sequence: Synthetic oligonucleotide
uauucucgaaaguuacgaa

SEQ ID NO: 58999 - RNA, 19 nt, Artificial Sequence
  Description of Artificial Sequence: Synthetic oligonucleotide
ccaacaagcacgcacacac

SEQ ID NO: 59000 - RNA, 19 nt, Artificial Sequence
  Description of Artificial Sequence: Synthetic oligonucleotide
uuguguaccuccguagagc

SEQ ID NO: 59001 - RNA, 19 nt, Artificial Sequence
  Description of Artificial Sequence: Synthetic oligonucleotide
agaguuucgaguaguggag

SEQ ID NO: 59002 - RNA, 19 nt, Artificial Sequence
  Description of Artificial Sequence: Synthetic oligonucleotide
aaagagcgucgcuguuccc

SEQ ID NO: 59003 - RNA, 19 nt, Artificial Sequence
  Description of Artificial Sequence: Synthetic oligonucleotide
ucaccucgauuuuacggcc

SEQ ID NO: 59004 - RNA, 19 nt, Artificial Sequence
  Description of Artificial Sequence: Synthetic oligonucleotide
cauuaccauuugcaaaggc

SEQ ID NO: 59005 - RNA, 19 nt, Artificial Sequence
  Description of Artificial Sequence: Synthetic oligonucleotide
ucgauauauaaugcagcca

SEQ ID NO: 59006 - RNA, 19 nt, Artificial Sequence
  Description of Artificial Sequence: Synthetic oligonucleotide
auauugcaauagccaggcc

SEQ ID NO: 59007 - RNA, 19 nt, Artificial Sequence
  Description of Artificial Sequence: Synthetic oligonucleotide
uuaggggaaaagagggguc

SEQ ID NO: 59008 - RNA, 19 nt, Artificial Sequence
  Description of Artificial Sequence: Synthetic oligonucleotide
aguuucgguaacuugcaua

SEQ ID NO: 59009 - RNA, 19 nt, Artificial Sequence
  Description of Artificial Sequence: Synthetic oligonucleotide
uccguagagcgucagguua

SEQ ID NO: 59010 - RNA, 19 nt, Artificial Sequence
  Description of Artificial Sequence: Synthetic oligonucleotide
acuauucucgaaaguuacg

SEQ ID NO: 59011 - RNA, 19 nt, Artificial Sequence
  Description of Artificial Sequence: Synthetic oligonucleotide
ugcaccauacacuguccgc

SEQ ID NO: 59012 - RNA, 19 nt, Artificial Sequence
  Description of Artificial Sequence: Synthetic oligonucleotide
ugagucucaguuugcucug

SEQ ID NO: 59013 - RNA, 19 nt, Artificial Sequence
  Description of Artificial Sequence: Synthetic oligonucleotide
ucaguucaucacucgauau

SEQ ID NO: 59014 - RNA, 19 nt, Artificial Sequence
  Description of Artificial Sequence: Synthetic oligonucleotide
aagcggaagggaauauuag

SEQ ID NO: 59015 - RNA, 19 nt, Artificial Sequence
  Description of Artificial Sequence: Synthetic oligonucleotide
agcacuauucucgaaaguu

SEQ ID NO: 59016 - RNA, 19 nt, Artificial Sequence
  Description of Artificial Sequence: Synthetic oligonucleotide
guucucaguuaccaauccc

SEQ ID NO: 59017 - RNA, 19 nt, Artificial Sequence
  Description of Artificial Sequence: Synthetic oligonucleotide
uccugaguacacuguaacu

SEQ ID NO: 59018 - RNA, 19 nt, Artificial Sequence
  Description of Artificial Sequence: Synthetic oligonucleotide
uuacggcccucuaccacgg

SEQ ID NO: 59019 - RNA, 19 nt, Artificial Sequence
  Description of Artificial Sequence: Synthetic oligonucleotide
gguaacuuaugccuuaaaa

SEQ ID NO: 59020 - RNA, 19 nt, Artificial Sequence
  Description of Artificial Sequence: Synthetic oligonucleotide
aggaguaacccaaugaaua

SEQ ID NO: 59021 - RNA, 19 nt, Artificial Sequence
  Description of Artificial Sequence: Synthetic oligonucleotide
cuuaugccuuaaaacacca

SEQ ID NO: 59022 - RNA, 19 nt, Artificial Sequence
  Description of Artificial Sequence: Synthetic oligonucleotide
ggaguaacccaaugaauac

SEQ ID NO: 59023 - RNA, 19 nt, Artificial Sequence
  Description of Artificial Sequence: Synthetic oligonucleotide
cucgaaaguuacgaacccg

SEQ ID NO: 59024 - RNA, 19 nt, Artificial Sequence
  Description of Artificial Sequence: Synthetic oligonucleotide
acgaacccgaaucccuugg

SEQ ID NO: 59025 - RNA, 19 nt, Artificial Sequence
  Description of Artificial Sequence: Synthetic oligonucleotide
uguaugugucagccccggg

SEQ ID NO: 59026 - RNA, 19 nt, Artificial Sequence
  Description of Artificial Sequence: Synthetic oligonucleotide
cauagcuggcggcaggggc

SEQ ID NO: 59027 - RNA, 19 nt, Artificial Sequence
  Description of Artificial Sequence: Synthetic oligonucleotide
auugcgucaggaguuguug

SEQ ID NO: 59028 - RNA, 19 nt, Artificial Sequence
  Description of Artificial Sequence: Synthetic oligonucleotide
gaauaauuagaggaaugua

SEQ ID NO: 59029 - RNA, 19 nt, Artificial Sequence
  Description of Artificial Sequence: Synthetic oligonucleotide
cccaaugaauacuguaugg

SEQ ID NO: 59030 - RNA, 19 nt, Artificial Sequence
  Description of Artificial Sequence: Synthetic oligonucleotide
uuguaugugucagccccgg

SEQ ID NO: 59031 - RNA, 19 nt, Artificial Sequence
  Description of Artificial Sequence: Synthetic oligonucleotide
agcucuuaggugacugacc

SEQ ID NO: 59032 - RNA, 19 nt, Artificial Sequence
  Description of Artificial Sequence: Synthetic oligonucleotide
auuuuacggcccucuacca

SEQ ID NO: 59033 - RNA, 19 nt, Artificial Sequence
  Description of Artificial Sequence: Synthetic oligonucleotide
ugcgugagagauccauucu

SEQ ID NO: 59034 - RNA, 19 nt, Artificial Sequence
  Description of Artificial Sequence: Synthetic oligonucleotide
uuagagacauggagucgcu

SEQ ID NO: 59035 - RNA, 19 nt, Artificial Sequence
  Description of Artificial Sequence: Synthetic oligonucleotide
gaauuccguucuguggagg

SEQ ID NO: 59036 - RNA, 19 nt, Artificial Sequence
  Description of Artificial Sequence: Synthetic oligonucleotide
guacacuguaacuggcuac

SEQ ID NO: 59037 - RNA, 19 nt, Artificial Sequence
  Description of Artificial Sequence: Synthetic oligonucleotide
gaaacgggaugguaguaaa

SEQ ID NO: 59038 - RNA, 19 nt, Artificial Sequence
  Description of Artificial Sequence: Synthetic oligonucleotide
cuguuggagguaccgcucg

SEQ ID NO: 59039 - RNA, 19 nt, Artificial Sequence
  Description of Artificial Sequence: Synthetic oligonucleotide
cugcgugagagauccauuc

SEQ ID NO: 59040 - RNA, 19 nt, Artificial Sequence
  Description of Artificial Sequence: Synthetic oligonucleotide
uucucaagagcaugacaaa

SEQ ID NO: 59041 - RNA, 19 nt, Artificial Sequence
  Description of Artificial Sequence: Synthetic oligonucleotide
gaacgcagcccucccagug

SEQ ID NO: 59042 - RNA, 19 nt, Artificial Sequence
  Description of Artificial Sequence: Synthetic oligonucleotide
cuggcuacaguuucgguaa

SEQ ID NO: 59043 - RNA, 19 nt, Artificial Sequence
  Description of Artificial Sequence: Synthetic oligonucleotide
cauugguaaccggaagggg

SEQ ID NO: 59044 - RNA, 19 nt, Artificial Sequence
  Description of Artificial Sequence: Synthetic oligonucleotide
gggaaguagagacugucac

SEQ ID NO: 59045 - RNA, 19 nt, Artificial Sequence
  Description of Artificial Sequence: Synthetic oligonucleotide
gggaauuccguucugugga

SEQ ID NO: 59046 - RNA, 19 nt, Artificial Sequence
  Description of Artificial Sequence: Synthetic oligonucleotide
auggcuguuggagguaccg

SEQ ID NO: 59047 - RNA, 19 nt, Artificial Sequence
  Description of Artificial Sequence: Synthetic oligonucleotide
uugccaugcuagaguuucg

SEQ ID NO: 59048 - RNA, 19 nt, Artificial Sequence
  Description of Artificial Sequence: Synthetic oligonucleotide
aguuucgaguaguggagaa

SEQ ID NO: 59049 - RNA, 19 nt, Artificial Sequence
  Description of Artificial Sequence: Synthetic oligonucleotide
cugcccaacaagcacgcac

SEQ ID NO: 59050 - RNA, 19 nt, Artificial Sequence
  Description of Artificial Sequence: Synthetic oligonucleotide
aguaaccuagaggacacau

SEQ ID NO: 59051 - RNA, 19 nt, Artificial Sequence
  Description of Artificial Sequence: Synthetic oligonucleotide
uuagagcaugucagucccc

SEQ ID NO: 59052 - RNA, 19 nt, Artificial Sequence
  Description of Artificial Sequence: Synthetic oligonucleotide
gaaccggcugggccaaagg

SEQ ID NO: 59053 - RNA, 19 nt, Artificial Sequence
  Description of Artificial Sequence: Synthetic oligonucleotide
caccucgguacaaacucgc

SEQ ID NO: 59054 - RNA, 19 nt, Artificial Sequence
  Description of Artificial Sequence: Synthetic oligonucleotide
gcggaagggaauauuagag

SEQ ID NO: 59055 - RNA, 19 nt, Artificial Sequence
  Description of Artificial Sequence: Synthetic oligonucleotide
agcuacuauacaauauggu

SEQ ID NO: 59056 - RNA, 19 nt, Artificial Sequence
  Description of Artificial Sequence: Synthetic oligonucleotide
gaagcggaagggaauauua

SEQ ID NO: 59057 - RNA, 19 nt, Artificial Sequence
  Description of Artificial Sequence: Synthetic oligonucleotide
uuacgaacccgaaucccuu

SEQ ID NO: 59058 - RNA, 19 nt, Artificial Sequence
  Description of Artificial Sequence: Synthetic oligonucleotide
ugggacggggcccuguuuc

SEQ ID NO: 59059 - RNA, 19 nt, Artificial Sequence
  Description of Artificial Sequence: Synthetic oligonucleotide
guaccgcucgaacugcacc

SEQ ID NO: 59060 - RNA, 19 nt, Artificial Sequence
  Description of Artificial Sequence: Synthetic oligonucleotide
uacgaacccgaaucccuug

SEQ ID NO: 59061 - RNA, 19 nt, Artificial Sequence
  Description of Artificial Sequence: Synthetic oligonucleotide
ugcuagaguuucgaguagu

SEQ ID NO: 59062 - RNA, 19 nt, Artificial Sequence
  Description of Artificial Sequence: Synthetic oligonucleotide
acuguccgcccucugccuc

SEQ ID NO: 59063 - RNA, 19 nt, Artificial Sequence
  Description of Artificial Sequence: Synthetic oligonucleotide
gcgccaacuccauagcugg

SEQ ID NO: 59064 - RNA, 19 nt, Artificial Sequence
  Description of Artificial Sequence: Synthetic oligonucleotide
caaaucggcuguagccacc

SEQ ID NO: 59065 - RNA, 19 nt, Artificial Sequence
  Description of Artificial Sequence: Synthetic oligonucleotide
guaaccuagaggacacaug

SEQ ID NO: 59066 - RNA, 19 nt, Artificial Sequence
  Description of Artificial Sequence: Synthetic oligonucleotide
ccuaucugaaaacagugca

SEQ ID NO: 59067 - RNA, 19 nt, Artificial Sequence
  Description of Artificial Sequence: Synthetic oligonucleotide
uugcauauggugugaccau

SEQ ID NO: 59068 - RNA, 19 nt, Artificial Sequence
  Description of Artificial Sequence: Synthetic oligonucleotide
gacggggcccuguuucccg

SEQ ID NO: 59069 - RNA, 19 nt, Artificial Sequence
  Description of Artificial Sequence: Synthetic oligonucleotide
caccauacacuguccgccc

SEQ ID NO: 59070 - RNA, 19 nt, Artificial Sequence
  Description of Artificial Sequence: Synthetic oligonucleotide
ggaggaaagagcgucgcug

SEQ ID NO: 59071 - RNA, 19 nt, Artificial Sequence
  Description of Artificial Sequence: Synthetic oligonucleotide
gagggaaguagagacuguc

SEQ ID NO: 59072 - RNA, 19 nt, Artificial Sequence
  Description of Artificial Sequence: Synthetic oligonucleotide
cacgucacuucaguagggg

SEQ ID NO: 59073 - RNA, 19 nt, Artificial Sequence
  Description of Artificial Sequence: Synthetic oligonucleotide
uguguacacccugccguag

SEQ ID NO: 59074 - RNA, 19 nt, Artificial Sequence
  Description of Artificial Sequence: Synthetic oligonucleotide
gagcucuuaggugacugac

SEQ ID NO: 59075 - RNA, 19 nt, Artificial Sequence
  Description of Artificial Sequence: Synthetic oligonucleotide
caccguaaaauccguccug

SEQ ID NO: 59076 - RNA, 19 nt, Artificial Sequence
  Description of Artificial Sequence: Synthetic oligonucleotide
cauaagaacauggcuucca

SEQ ID NO: 59077 - RNA, 19 nt, Artificial Sequence
  Description of Artificial Sequence: Synthetic oligonucleotide
uaacuacuccaaccuucac

SEQ ID NO: 59078 - RNA, 19 nt, Artificial Sequence
  Description of Artificial Sequence: Synthetic oligonucleotide
ucugcgugagagauccauu

SEQ ID NO: 59079 - RNA, 19 nt, Artificial Sequence
  Description of Artificial Sequence: Synthetic oligonucleotide
ggaaguagagacugucaca

SEQ ID NO: 59080 - RNA, 19 nt, Artificial Sequence
  Description of Artificial Sequence: Synthetic oligonucleotide
acaccucagaucuggggaa

SEQ ID NO: 59081 - RNA, 19 nt, Artificial Sequence
  Description of Artificial Sequence: Synthetic oligonucleotide
ugccaugcuagaguuucga

SEQ ID NO: 59082 - RNA, 19 nt, Artificial Sequence
  Description of Artificial Sequence: Synthetic oligonucleotide
ggcuuguguaccuccguag

SEQ ID NO: 59083 - RNA, 19 nt, Artificial Sequence
  Description of Artificial Sequence: Synthetic oligonucleotide
uugucaaggcaagcucgag

SEQ ID NO: 59084 - RNA, 19 nt, Artificial Sequence
  Description of Artificial Sequence: Synthetic oligonucleotide
auagaguccucuacuagua

SEQ ID NO: 59085 - RNA, 19 nt, Artificial Sequence
  Description of Artificial Sequence: Synthetic oligonucleotide
ugguaaccggaaggggagg

SEQ ID NO: 59086 - RNA, 19 nt, Artificial Sequence
  Description of Artificial Sequence: Synthetic oligonucleotide
uccguauucugugggaauu

SEQ ID NO: 59087 - RNA, 19 nt, Artificial Sequence
  Description of Artificial Sequence: Synthetic oligonucleotide
cucgggcauggcaauugcc

SEQ ID NO: 59088 - RNA, 19 nt, Artificial Sequence
  Description of Artificial Sequence: Synthetic oligonucleotide
cacggugccgugcaauuuc

SEQ ID NO: 59089 - RNA, 19 nt, Artificial Sequence
  Description of Artificial Sequence: Synthetic oligonucleotide
accucgauuuuacggcccu

SEQ ID NO: 59090 - RNA, 19 nt, Artificial Sequence
  Description of Artificial Sequence: Synthetic oligonucleotide
ucgauuuuacggcccucua

SEQ ID NO: 59091 - RNA, 19 nt, Artificial Sequence
  Description of Artificial Sequence: Synthetic oligonucleotide
guuucgaguaguggagaac

SEQ ID NO: 59092 - RNA, 19 nt, Artificial Sequence
  Description of Artificial Sequence: Synthetic oligonucleotide
ggaauuccguucuguggag

SEQ ID NO: 59093 - RNA, 19 nt, Artificial Sequence
  Description of Artificial Sequence: Synthetic oligonucleotide
caccucgauuuuacggccc

SEQ ID NO: 59094 - RNA, 19 nt, Artificial Sequence
  Description of Artificial Sequence: Synthetic oligonucleotide
uagcauuauucaccucgau

SEQ ID NO: 59095 - RNA, 19 nt, Artificial Sequence
  Description of Artificial Sequence: Synthetic oligonucleotide
ccugccuuauuuaggguac

SEQ ID NO: 59096 - RNA, 19 nt, Artificial Sequence
  Description of Artificial Sequence: Synthetic oligonucleotide
guagcauuauucaccucga

SEQ ID NO: 59097 - RNA, 19 nt, Artificial Sequence
  Description of Artificial Sequence: Synthetic oligonucleotide
gguaaccggaaggggaggg

SEQ ID NO: 59098 - RNA, 19 nt, Artificial Sequence
  Description of Artificial Sequence: Synthetic oligonucleotide
ugccuuauuuaggguacac

SEQ ID NO: 59099 - RNA, 19 nt, Artificial Sequence
  Description of Artificial Sequence: Synthetic oligonucleotide
auaauaggaguaacccaau

SEQ ID NO: 59100 - RNA, 19 nt, Artificial Sequence
  Description of Artificial Sequence: Synthetic oligonucleotide
aaacgggaugguaguaaaa

SEQ ID NO: 59101 - RNA, 19 nt, Artificial Sequence
  Description of Artificial Sequence: Synthetic oligonucleotide
cacuacuuugagucuguga

SEQ ID NO: 59102 - RNA, 19 nt, Artificial Sequence
  Description of Artificial Sequence: Synthetic oligonucleotide
gcauauccaccauagaggu

SEQ ID NO: 59103 - RNA, 19 nt, Artificial Sequence
  Description of Artificial Sequence: Synthetic oligonucleotide
gcaccauacacuguccgcc

SEQ ID NO: 59104 - RNA, 19 nt, Artificial Sequence
  Description of Artificial Sequence: Synthetic oligonucleotide
gacuguccugcacucagua

SEQ ID NO: 59105 - RNA, 19 nt, Artificial Sequence
  Description of Artificial Sequence: Synthetic oligonucleotide
gaguaacccaaugaauacu

SEQ ID NO: 59106 - RNA, 19 nt, Artificial Sequence
  Description of Artificial Sequence: Synthetic oligonucleotide
caaaggggaugguuuggca

SEQ ID NO: 59107 - RNA, 19 nt, Artificial Sequence
  Description of Artificial Sequence: Synthetic oligonucleotide
cgucagguuauguucacug

SEQ ID NO: 59108 - RNA, 19 nt, Artificial Sequence
  Description of Artificial Sequence: Synthetic oligonucleotide
ugguaguuggugagccuuu

SEQ ID NO: 59109 - RNA, 19 nt, Artificial Sequence
  Description of Artificial Sequence: Synthetic oligonucleotide
uccugcacucaguaaccua

SEQ ID NO: 59110 - RNA, 19 nt, Artificial Sequence
  Description of Artificial Sequence: Synthetic oligonucleotide
aggcaagcucgaguuuugg

SEQ ID NO: 59111 - RNA, 19 nt, Artificial Sequence
  Description of Artificial Sequence: Synthetic oligonucleotide
ucacuacuuugagucugug

SEQ ID NO: 59112 - RNA, 19 nt, Artificial Sequence
  Description of Artificial Sequence: Synthetic oligonucleotide
caccacaaccccuucccca

SEQ ID NO: 59113 - RNA, 19 nt, Artificial Sequence
  Description of Artificial Sequence: Synthetic oligonucleotide
guuacugggugaauugcua

SEQ ID NO: 59114 - RNA, 19 nt, Artificial Sequence
  Description of Artificial Sequence: Synthetic oligonucleotide
uguucaccgugcccacuau

SEQ ID NO: 59115 - RNA, 19 nt, Artificial Sequence
  Description of Artificial Sequence: Synthetic oligonucleotide
ucgugucucugaacucccu

SEQ ID NO: 59116 - RNA, 19 nt, Artificial Sequence
  Description of Artificial Sequence: Synthetic oligonucleotide
agaaccggcugggccaaag

SEQ ID NO: 59117 - RNA, 19 nt, Artificial Sequence
  Description of Artificial Sequence: Synthetic oligonucleotide
aguccucuacuaguaaaua

SEQ ID NO: 59118 - RNA, 19 nt, Artificial Sequence
  Description of Artificial Sequence: Synthetic oligonucleotide
guggaaacgggaugguagu

SEQ ID NO: 59119 - RNA, 19 nt, Artificial Sequence
  Description of Artificial Sequence: Synthetic oligonucleotide
agguaacuuaugccuuaaa

SEQ ID NO: 59120 - RNA, 19 nt, Artificial Sequence
  Description of Artificial Sequence: Synthetic oligonucleotide
gauggcuguuggagguacc

SEQ ID NO: 59121 - RNA, 19 nt, Artificial Sequence
  Description of Artificial Sequence: Synthetic oligonucleotide
gccaugcuagaguuucgag

SEQ ID NO: 59122 - RNA, 19 nt, Artificial Sequence
  Description of Artificial Sequence: Synthetic oligonucleotide
cacccugccguagccgucg

SEQ ID NO: 59123 - RNA, 19 nt, Artificial Sequence
  Description of Artificial Sequence: Synthetic oligonucleotide
ccaccucgguacaaacucg

SEQ ID NO: 59124 - RNA, 19 nt, Artificial Sequence
  Description of Artificial Sequence: Synthetic oligonucleotide
ggaaagagcgucgcuguuc

SEQ ID NO: 59125 - RNA, 19 nt, Artificial Sequence
  Description of Artificial Sequence: Synthetic oligonucleotide
ugaaaagauugaggcucua

SEQ ID NO: 59126 - RNA, 19 nt, Artificial Sequence
  Description of Artificial Sequence: Synthetic oligonucleotide
gguguauacuacaaauggu

SEQ ID NO: 59127 - RNA, 19 nt, Artificial Sequence
  Description of Artificial Sequence: Synthetic oligonucleotide
cauuugcagggucucacgu

SEQ ID NO: 59128 - RNA, 19 nt, Artificial Sequence
  Description of Artificial Sequence: Synthetic oligonucleotide
cacgugcuaggcaggccac

SEQ ID NO: 59129 - RNA, 19 nt, Artificial Sequence
  Description of Artificial Sequence: Synthetic oligonucleotide
ugcacgugcuaggcaggcc

SEQ ID NO: 59130 - RNA, 19 nt, Artificial Sequence
  Description of Artificial Sequence: Synthetic oligonucleotide
caccucagaucuggggaag

SEQ ID NO: 59131 - RNA, 19 nt, Artificial Sequence
  Description of Artificial Sequence: Synthetic oligonucleotide
uuggagccacgcucauuaa

SEQ ID NO: 59132 - RNA, 19 nt, Artificial Sequence
  Description of Artificial Sequence: Synthetic oligonucleotide
augacucgugcuguagcau

SEQ ID NO: 59133 - RNA, 19 nt, Artificial Sequence
  Description of Artificial Sequence: Synthetic oligonucleotide
ggaaacgggaugguaguaa

SEQ ID NO: 59134 - RNA, 19 nt, Artificial Sequence
  Description of Artificial Sequence: Synthetic oligonucleotide
gauaggcggggauggcugu

SEQ ID NO: 59135 - RNA, 19 nt, Artificial Sequence
  Description of Artificial Sequence: Synthetic oligonucleotide
gggaugguaguaaaaggcu

SEQ ID NO: 59136 - RNA, 19 nt, Artificial Sequence
  Description of Artificial Sequence: Synthetic oligonucleotide
ugcccacuauuguuuccua

SEQ ID NO: 59137 - RNA, 19 nt, Artificial Sequence
  Description of Artificial Sequence: Synthetic oligonucleotide
cgauuuuacggcccucuac

SEQ ID NO: 59138 - RNA, 19 nt, Artificial Sequence
  Description of Artificial Sequence: Synthetic oligonucleotide
ccccauaccccagugguac

SEQ ID NO: 59139 - RNA, 19 nt, Artificial Sequence
  Description of Artificial Sequence: Synthetic oligonucleotide
uaccuccguagagcgucag

SEQ ID NO: 59140 - RNA, 19 nt, Artificial Sequence
  Description of Artificial Sequence: Synthetic oligonucleotide
caucuaggauuuugccaaa

SEQ ID NO: 59141 - RNA, 19 nt, Artificial Sequence
  Description of Artificial Sequence: Synthetic oligonucleotide
cugaaccauugcgucagga

SEQ ID NO: 59142 - RNA, 19 nt, Artificial Sequence
  Description of Artificial Sequence: Synthetic oligonucleotide
cguauucugugggaauucc

SEQ ID NO: 59143 - RNA, 19 nt, Artificial Sequence
  Description of Artificial Sequence: Synthetic oligonucleotide
ugucugcgugagagaucca

SEQ ID NO: 59144 - RNA, 19 nt, Artificial Sequence
  Description of Artificial Sequence: Synthetic oligonucleotide
ugccguagccgucgcugua

SEQ ID NO: 59145 - RNA, 19 nt, Artificial Sequence
  Description of Artificial Sequence: Synthetic oligonucleotide
caagcauaauggugacaua

SEQ ID NO: 59146 - RNA, 19 nt, Artificial Sequence
  Description of Artificial Sequence: Synthetic oligonucleotide
gcacuauucucgaaaguua

SEQ ID NO: 59147 - RNA, 19 nt, Artificial Sequence
  Description of Artificial Sequence: Synthetic oligonucleotide
uugggacggggcccuguuu

SEQ ID NO: 59148 - RNA, 19 nt, Artificial Sequence
  Description of Artificial Sequence: Synthetic oligonucleotide
cucgauuuuacggcccucu

SEQ ID NO: 59149 - RNA, 19 nt, Artificial Sequence
  Description of Artificial Sequence: Synthetic oligonucleotide
cagggugaacgcagcccuc

SEQ ID NO: 59150 - RNA, 19 nt, Artificial Sequence
  Description of Artificial Sequence: Synthetic oligonucleotide
acuauacaauaugguucuu

SEQ ID NO: 59151 - RNA, 19 nt, Artificial Sequence
  Description of Artificial Sequence: Synthetic oligonucleotide
gacaugccaguuuccuaau

SEQ ID NO: 59152 - RNA, 19 nt, Artificial Sequence
  Description of Artificial Sequence: Synthetic oligonucleotide
gcucgaacugcaccauaca

SEQ ID NO: 59153 - RNA, 19 nt, Artificial Sequence
  Description of Artificial Sequence: Synthetic oligonucleotide
gcucgggcauggcaauugc

SEQ ID NO: 59154 - RNA, 19 nt, Artificial Sequence
  Description of Artificial Sequence: Synthetic oligonucleotide
cacaagcauaauggugaca

SEQ ID NO: 59155 - RNA, 19 nt, Artificial Sequence
  Description of Artificial Sequence: Synthetic oligonucleotide
acucgugcuguagcauuau

SEQ ID NO: 59156 - RNA, 19 nt, Artificial Sequence
  Description of Artificial Sequence: Synthetic oligonucleotide
gggacggggcccuguuucc

SEQ ID NO: 59157 - RNA, 19 nt, Artificial Sequence
  Description of Artificial Sequence: Synthetic oligonucleotide
cuugcgugcuccugggaau

SEQ ID NO: 59158 - RNA, 19 nt, Artificial Sequence
  Description of Artificial Sequence: Synthetic oligonucleotide
gccuacauuuuggagccuc

SEQ ID NO: 59159 - RNA, 19 nt, Artificial Sequence
  Description of Artificial Sequence: Synthetic oligonucleotide
gccauuagagcaugucagu

SEQ ID NO: 59160 - RNA, 19 nt, Artificial Sequence
  Description of Artificial Sequence: Synthetic oligonucleotide
acggugccgugcaauuucu

SEQ ID NO: 59161 - RNA, 19 nt, Artificial Sequence
  Description of Artificial Sequence: Synthetic oligonucleotide
guucaucacucgauauaua

SEQ ID NO: 59162 - RNA, 19 nt, Artificial Sequence
  Description of Artificial Sequence: Synthetic oligonucleotide
accuucugucugcgugaga

SEQ ID NO: 59163 - RNA, 19 nt, Artificial Sequence
  Description of Artificial Sequence: Synthetic oligonucleotide
gcaccguaaaauccguccu

SEQ ID NO: 59164 - RNA, 19 nt, Artificial Sequence
  Description of Artificial Sequence: Synthetic oligonucleotide
ugucagccccggguuggcu

SEQ ID NO: 59165 - RNA, 19 nt, Artificial Sequence
  Description of Artificial Sequence: Synthetic oligonucleotide
cagguaacuuaugccuuaa

SEQ ID NO: 59166 - RNA, 19 nt, Artificial Sequence
  Description of Artificial Sequence: Synthetic oligonucleotide
gucugcgugagagauccau

SEQ ID NO: 59167 - RNA, 19 nt, Artificial Sequence
  Description of Artificial Sequence: Synthetic oligonucleotide
ucccuuuagcagggagcuc

SEQ ID NO: 59168 - RNA, 19 nt, Artificial Sequence
  Description of Artificial Sequence: Synthetic oligonucleotide
ccuugcgugcuccugggaa

SEQ ID NO: 59169 - RNA, 19 nt, Artificial Sequence
  Description of Artificial Sequence: Synthetic oligonucleotide
gcccaacaagcacgcacac

SEQ ID NO: 59170 - RNA, 19 nt, Artificial Sequence
  Description of Artificial Sequence: Synthetic oligonucleotide
ggucaguucaucacucgau

SEQ ID NO: 59171 - RNA, 19 nt, Artificial Sequence
  Description of Artificial Sequence: Synthetic oligonucleotide
cauugcgucaggaguuguu

SEQ ID NO: 59172 - RNA, 19 nt, Artificial Sequence
  Description of Artificial Sequence: Synthetic oligonucleotide
cuccguauucugugggaau

SEQ ID NO: 59173 - RNA, 19 nt, Artificial Sequence
  Description of Artificial Sequence: Synthetic oligonucleotide
ugccuacauuuuggagccu

SEQ ID NO: 59174 - RNA, 19 nt, Artificial Sequence
  Description of Artificial Sequence: Synthetic oligonucleotide
gggcuuguguaccuccgua

SEQ ID NO: 59175 - RNA, 19 nt, Artificial Sequence
  Description of Artificial Sequence: Synthetic oligonucleotide
gggagcuagcugacaugcc

SEQ ID NO: 59176 - RNA, 19 nt, Artificial Sequence
  Description of Artificial Sequence: Synthetic oligonucleotide
ccguauucugugggaauuc

SEQ ID NO: 59177 - RNA, 19 nt, Artificial Sequence
  Description of Artificial Sequence: Synthetic oligonucleotide
auaggcggggauggcuguu

SEQ ID NO: 59178 - RNA, 19 nt, Artificial Sequence
  Description of Artificial Sequence: Synthetic oligonucleotide
ggacggggcccuguuuccc

SEQ ID NO: 59179 - RNA, 19 nt, Artificial Sequence
  Description of Artificial Sequence: Synthetic oligonucleotide
ccgaaucccuuggagccac

SEQ ID NO: 59180 - RNA, 19 nt, Artificial Sequence
  Description of Artificial Sequence: Synthetic oligonucleotide
cagcaacaugaucaauaau

SEQ ID NO: 59181 - RNA, 19 nt, Artificial Sequence
  Description of Artificial Sequence: Synthetic oligonucleotide
gacagccauuagagcaugu

SEQ ID NO: 59182 - RNA, 19 nt, Artificial Sequence
  Description of Artificial Sequence: Synthetic oligonucleotide
caccgugcccacuauuguu

SEQ ID NO: 59183 - RNA, 19 nt, Artificial Sequence
  Description of Artificial Sequence: Synthetic oligonucleotide
ccauggggaaacugcacgu

SEQ ID NO: 59184 - RNA, 19 nt, Artificial Sequence
  Description of Artificial Sequence: Synthetic oligonucleotide
ccguagccgucgcuguaag

SEQ ID NO: 59185 - RNA, 19 nt, Artificial Sequence
  Description of Artificial Sequence: Synthetic oligonucleotide
cguagccgucgcuguaagc

SEQ ID NO: 59186 - RNA, 19 nt, Artificial Sequence
  Description of Artificial Sequence: Synthetic oligonucleotide
guccugcacucaguaaccu

SEQ ID NO: 59187 - RNA, 19 nt, Artificial Sequence
  Description of Artificial Sequence: Synthetic oligonucleotide
cuccguagagcgucagguu

SEQ ID NO: 59188 - RNA, 19 nt, Artificial Sequence
  Description of Artificial Sequence: Synthetic oligonucleotide
cauggccuguccuguuaau

SEQ ID NO: 59189 - RNA, 19 nt, Artificial Sequence
  Description of Artificial Sequence: Synthetic oligonucleotide
ccauggcugaacucaucua

SEQ ID NO: 59190 - RNA, 19 nt, Artificial Sequence
  Description of Artificial Sequence: Synthetic oligonucleotide
ccggguuggcucuagcuau

SEQ ID NO: 59191 - RNA, 19 nt, Artificial Sequence
  Description of Artificial Sequence: Synthetic oligonucleotide
cuugggacggggcccuguu

SEQ ID NO: 59192 - RNA, 19 nt, Artificial Sequence
  Description of Artificial Sequence: Synthetic oligonucleotide
cacgcucauuaaagauuau

SEQ ID NO: 59193 - RNA, 19 nt, Artificial Sequence
  Description of Artificial Sequence: Synthetic oligonucleotide
gccguagccgucgcuguaa

SEQ ID NO: 59194 - RNA, 19 nt, Artificial Sequence
  Description of Artificial Sequence: Synthetic oligonucleotide
guguaccuccguagagcgu

SEQ ID NO: 59195 - RNA, 19 nt, Artificial Sequence
  Description of Artificial Sequence: Synthetic oligonucleotide
caggggcgagggcauggua

SEQ ID NO: 59196 - RNA, 19 nt, Artificial Sequence
  Description of Artificial Sequence: Synthetic oligonucleotide
ccucgauuuuacggcccuc

SEQ ID NO: 59197 - RNA, 19 nt, Artificial Sequence
  Description of Artificial Sequence: Synthetic oligonucleotide
caccuggauaggcggggau

SEQ ID NO: 59198 - RNA, 19 nt, Artificial Sequence
  Description of Artificial Sequence: Synthetic oligonucleotide
gccccggguuggcucuagc

SEQ ID NO: 59199 - RNA, 19 nt, Artificial Sequence
  Description of Artificial Sequence: Synthetic oligonucleotide
gagaaccggcugggccaaa

SEQ ID NO: 59200 - RNA, 19 nt, Artificial Sequence
  Description of Artificial Sequence: Synthetic oligonucleotide
ccauaccccagugguaccu

SEQ ID NO: 59201 - RNA, 19 nt, Artificial Sequence
  Description of Artificial Sequence: Synthetic oligonucleotide
cggugccgugcaauuucuc

SEQ ID NO: 59202 - RNA, 19 nt, Artificial Sequence
  Description of Artificial Sequence: Synthetic oligonucleotide
gcauaucuguaggcugcau

SEQ ID NO: 59203 - RNA, 19 nt, Artificial Sequence
  Description of Artificial Sequence: Synthetic oligonucleotide
ccgcucgaacugcaccaua

SEQ ID NO: 59204 - RNA, 19 nt, Artificial Sequence
  Description of Artificial Sequence: Synthetic oligonucleotide
gcuaggcaggccacuccuu

SEQ ID NO: 59205 - RNA, 19 nt, Artificial Sequence
  Description of Artificial Sequence: Synthetic oligonucleotide
ccauugcgucaggaguugu

SEQ ID NO: 59206 - RNA, 19 nt, Artificial Sequence
  Description of Artificial Sequence: Synthetic oligonucleotide
cggguuggcucuagcuauu

SEQ ID NO: 59207 - RNA, 19 nt, Artificial Sequence
  Description of Artificial Sequence: Synthetic oligonucleotide
aacauaucucauuauaucc

SEQ ID NO: 59208 - RNA, 19 nt, Artificial Sequence
  Description of Artificial Sequence: Synthetic oligonucleotide
guaaguguaacacauaucg

SEQ ID NO: 59209 - RNA, 19 nt, Artificial Sequence
  Description of Artificial Sequence: Synthetic oligonucleotide
ugaaacaacaagcauaucc

SEQ ID NO: 59210 - RNA, 19 nt, Artificial Sequence
  Description of Artificial Sequence: Synthetic oligonucleotide
acuuaguucaguuuuaaag

SEQ ID NO: 59211 - RNA, 19 nt, Artificial Sequence
  Description of Artificial Sequence: Synthetic oligonucleotide
ucuuaaacgggcaaaacgc

SEQ ID NO: 59212 - RNA, 19 nt, Artificial Sequence
  Description of Artificial Sequence: Synthetic oligonucleotide
acaguaaacaaccagacca

SEQ ID NO: 59213 - RNA, 19 nt, Artificial Sequence
  Description of Artificial Sequence: Synthetic oligonucleotide
uguuaaauuaguccgaagu

SEQ ID NO: 59214 - RNA, 19 nt, Artificial Sequence
  Description of Artificial Sequence: Synthetic oligonucleotide
auaguuaugucgcuuuucc

SEQ ID NO: 59215 - RNA, 19 nt, Artificial Sequence
  Description of Artificial Sequence: Synthetic oligonucleotide
uuuuccauucuuaaacggg

SEQ ID NO: 59216 - RNA, 19 nt, Artificial Sequence
  Description of Artificial Sequence: Synthetic oligonucleotide
ucuaacaugguuuaaucca

SEQ ID NO: 59217 - RNA, 19 nt, Artificial Sequence
  Description of Artificial Sequence: Synthetic oligonucleotide
aaaugcucggcucaaaugu

SEQ ID NO: 59218 - RNA, 19 nt, Artificial Sequence
  Description of Artificial Sequence: Synthetic oligonucleotide
gauuauuggaacgauaggc

SEQ ID NO: 59219 - RNA, 19 nt, Artificial Sequence
  Description of Artificial Sequence: Synthetic oligonucleotide
gugacuuaauguuagaugc

SEQ ID NO: 59220 - RNA, 19 nt, Artificial Sequence
  Description of Artificial Sequence: Synthetic oligonucleotide
aaguacccaauuugaaacc

SEQ ID NO: 59221 - RNA, 19 nt, Artificial Sequence
  Description of Artificial Sequence: Synthetic oligonucleotide
uucaaauagauggaagucg

SEQ ID NO: 59222 - RNA, 19 nt, Artificial Sequence
  Description of Artificial Sequence: Synthetic oligonucleotide
aaugcaauauauaucacca

SEQ ID NO: 59223 - RNA, 19 nt, Artificial Sequence
  Description of Artificial Sequence: Synthetic oligonucleotide
uauccugugaaacaacaag

SEQ ID NO: 59224 - RNA, 19 nt, Artificial Sequence
  Description of Artificial Sequence: Synthetic oligonucleotide
aacaugguuuaauccaugg

SEQ ID NO: 59225 - RNA, 19 nt, Artificial Sequence
  Description of Artificial Sequence: Synthetic oligonucleotide
gucauaucacauuagaccc

SEQ ID NO: 59226 - RNA, 19 nt, Artificial Sequence
  Description of Artificial Sequence: Synthetic oligonucleotide
uauuagaaucucuacagcu

SEQ ID NO: 59227 - RNA, 19 nt, Artificial Sequence
  Description of Artificial Sequence: Synthetic oligonucleotide
uaccuaguagucaucaagg

SEQ ID NO: 59228 - RNA, 19 nt, Artificial Sequence
  Description of Artificial Sequence: Synthetic oligonucleotide
uuagaaucucuacagcucc

SEQ ID NO: 59229 - RNA, 19 nt, Artificial Sequence
  Description of Artificial Sequence: Synthetic oligonucleotide
aaacaggauuauuggaacg

SEQ ID NO: 59230 - RNA, 19 nt, Artificial Sequence
  Description of Artificial Sequence: Synthetic oligonucleotide
uuuauaguuguuagcaaac

SEQ ID NO: 59231 - RNA, 19 nt, Artificial Sequence
  Description of Artificial Sequence: Synthetic oligonucleotide
cacauaucgguauauauug

SEQ ID NO: 59232 - RNA, 19 nt, Artificial Sequence
  Description of Artificial Sequence: Synthetic oligonucleotide
uguucugcgaaccaacagc

SEQ ID NO: 59233 - RNA, 19 nt, Artificial Sequence
  Description of Artificial Sequence: Synthetic oligonucleotide
uguaugaaacuuguugucg

SEQ ID NO: 59234 - RNA, 19 nt, Artificial Sequence
  Description of Artificial Sequence: Synthetic oligonucleotide
uuaggaacuuaguuguagg

SEQ ID NO: 59235 - RNA, 19 nt, Artificial Sequence
  Description of Artificial Sequence: Synthetic oligonucleotide
uguacaucacaacaccgag

SEQ ID NO: 59236 - RNA, 19 nt, Artificial Sequence
  Description of Artificial Sequence: Synthetic oligonucleotide
uugcuucuauguaugaagg

SEQ ID NO: 59237 - RNA, 19 nt, Artificial Sequence
  Description of Artificial Sequence: Synthetic oligonucleotide
ucuuugggaggaaugauca

SEQ ID NO: 59238 - RNA, 19 nt, Artificial Sequence
  Description of Artificial Sequence: Synthetic oligonucleotide
uccgaacauaguuaugucg

SEQ ID NO: 59239 - RNA, 19 nt, Artificial Sequence
  Description of Artificial Sequence: Synthetic oligonucleotide
caguagauaauucaauggc

SEQ ID NO: 59240 - RNA, 19 nt, Artificial Sequence
  Description of Artificial Sequence: Synthetic oligonucleotide
aaaucuggucuuugggagg

SEQ ID NO: 59241 - RNA, 19 nt, Artificial Sequence
  Description of Artificial Sequence: Synthetic oligonucleotide
ugucgcacaaauacaauga

SEQ ID NO: 59242 - RNA, 19 nt, Artificial Sequence
  Description of Artificial Sequence: Synthetic oligonucleotide
ugcuacuuuccgaacauag

SEQ ID NO: 59243 - RNA, 19 nt, Artificial Sequence
  Description of Artificial Sequence: Synthetic oligonucleotide
uuuacucgugacuuaaugu

SEQ ID NO: 59244 - RNA, 19 nt, Artificial Sequence
  Description of Artificial Sequence: Synthetic oligonucleotide
agauuuauccuucucuugu

SEQ ID NO: 59245 - RNA, 19 nt, Artificial Sequence
  Description of Artificial Sequence: Synthetic oligonucleotide
aaaguaucgcccuauuaau

SEQ ID NO: 59246 - RNA, 19 nt, Artificial Sequence
  Description of Artificial Sequence: Synthetic oligonucleotide
uugugauuuaucaguaaca

SEQ ID NO: 59247 - RNA, 19 nt, Artificial Sequence
  Description of Artificial Sequence: Synthetic oligonucleotide
agaccaauaaagcuacaag

SEQ ID NO: 59248 - RNA, 19 nt, Artificial Sequence
  Description of Artificial Sequence: Synthetic oligonucleotide
uccgaaguggcauuuagga

SEQ ID NO: 59249 - RNA, 19 nt, Artificial Sequence
  Description of Artificial Sequence: Synthetic oligonucleotide
agacuauuagaaucucuac

SEQ ID NO: 59250 - RNA, 19 nt, Artificial Sequence
  Description of Artificial Sequence: Synthetic oligonucleotide
gucaaguccgugaagaacg

SEQ ID NO: 59251 - RNA, 19 nt, Artificial Sequence
  Description of Artificial Sequence: Synthetic oligonucleotide
auuuacuuauucuccgauc

SEQ ID NO: 59252 - RNA, 19 nt, Artificial Sequence
  Description of Artificial Sequence: Synthetic oligonucleotide
aaaucuacucgguaccgca

SEQ ID NO: 59253 - RNA, 19 nt, Artificial Sequence
  Description of Artificial Sequence: Synthetic oligonucleotide
uguucuggaguuaaauaga

SEQ ID NO: 59254 - RNA, 19 nt, Artificial Sequence
  Description of Artificial Sequence: Synthetic oligonucleotide
uuagacccauuuacaaugg

SEQ ID NO: 59255 - RNA, 19 nt, Artificial Sequence
  Description of Artificial Sequence: Synthetic oligonucleotide
aaauagauggaagucgaga

SEQ ID NO: 59256 - RNA, 19 nt, Artificial Sequence
  Description of Artificial Sequence: Synthetic oligonucleotide
uccaccacggguaugcucc

SEQ ID NO: 59257 - RNA, 19 nt, Artificial Sequence
  Description of Artificial Sequence: Synthetic oligonucleotide
ucauuuggaccucagagua

SEQ ID NO: 59258 - RNA, 19 nt, Artificial Sequence
  Description of Artificial Sequence: Synthetic oligonucleotide
uagacuauuagaaucucua

SEQ ID NO: 59259 - RNA, 19 nt, Artificial Sequence
  Description of Artificial Sequence: Synthetic oligonucleotide
uucaagugaaacaggauua

SEQ ID NO: 59260 - RNA, 19 nt, Artificial Sequence
  Description of Artificial Sequence: Synthetic oligonucleotide
guuguuagcaaaccauucc

SEQ ID NO: 59261 - RNA, 19 nt, Artificial Sequence
  Description of Artificial Sequence: Synthetic oligonucleotide
uguugucgcacaaauacaa

SEQ ID NO: 59262 - RNA, 19 nt, Artificial Sequence
  Description of Artificial Sequence: Synthetic oligonucleotide
augcucacggauuaaguuc

SEQ ID NO: 59263 - RNA, 19 nt, Artificial Sequence
  Description of Artificial Sequence: Synthetic oligonucleotide
gaaacaacaagcauaucca

SEQ ID NO: 59264 - RNA, 19 nt, Artificial Sequence
  Description of Artificial Sequence: Synthetic oligonucleotide
agcugcauacccuaaaugu

SEQ ID NO: 59265 - RNA, 19 nt, Artificial Sequence
  Description of Artificial Sequence: Synthetic oligonucleotide
aggauuauuggaacgauag

SEQ ID NO: 59266 - RNA, 19 nt, Artificial Sequence
  Description of Artificial Sequence: Synthetic oligonucleotide
uguacuucaacuggguuca

SEQ ID NO: 59267 - RNA, 19 nt, Artificial Sequence
  Description of Artificial Sequence: Synthetic oligonucleotide
aauaugguuuaauacucuu

SEQ ID NO: 59268 - RNA, 19 nt, Artificial Sequence
  Description of Artificial Sequence: Synthetic oligonucleotide
uaucaguaacaauuucuag

SEQ ID NO: 59269 - RNA, 19 nt, Artificial Sequence
  Description of Artificial Sequence: Synthetic oligonucleotide
caaugaagaacauaucuca

SEQ ID NO: 59270 - RNA, 19 nt, Artificial Sequence
  Description of Artificial Sequence: Synthetic oligonucleotide
ccagcaauagcacagaagc

SEQ ID NO: 59271 - RNA, 19 nt, Artificial Sequence
  Description of Artificial Sequence: Synthetic oligonucleotide
uugucgcacaaauacaaug

SEQ ID NO: 59272 - RNA, 19 nt, Artificial Sequence
  Description of Artificial Sequence: Synthetic oligonucleotide
augucgacuaccuaguagu

SEQ ID NO: 59273 - RNA, 19 nt, Artificial Sequence
  Description of Artificial Sequence: Synthetic oligonucleotide
cugaaaggcgguuuacucg

SEQ ID NO: 59274 - RNA, 19 nt, Artificial Sequence
  Description of Artificial Sequence: Synthetic oligonucleotide
uagauggaagucgagagug

SEQ ID NO: 59275 - RNA, 19 nt, Artificial Sequence
  Description of Artificial Sequence: Synthetic oligonucleotide
ucugcgaaccaacagcaga

SEQ ID NO: 59276 - RNA, 19 nt, Artificial Sequence
  Description of Artificial Sequence: Synthetic oligonucleotide
ucugacguaggacaccggc

SEQ ID NO: 59277 - RNA, 19 nt, Artificial Sequence
  Description of Artificial Sequence: Synthetic oligonucleotide
aguuaugucgcuuuuccau

SEQ ID NO: 59278 - RNA, 19 nt, Artificial Sequence
  Description of Artificial Sequence: Synthetic oligonucleotide
auaccaacugacuuuaaaa

SEQ ID NO: 59279 - RNA, 19 nt, Artificial Sequence
  Description of Artificial Sequence: Synthetic oligonucleotide
acugacuuaguucaguuuu

SEQ ID NO: 59280 - RNA, 19 nt, Artificial Sequence
  Description of Artificial Sequence: Synthetic oligonucleotide
acgaaaguguuaaaaguac

SEQ ID NO: 59281 - RNA, 19 nt, Artificial Sequence
  Description of Artificial Sequence: Synthetic oligonucleotide
uacgguuucaccccucuca

SEQ ID NO: 59282 - RNA, 19 nt, Artificial Sequence
  Description of Artificial Sequence: Synthetic oligonucleotide
gacuuaauguuagaugcag

SEQ ID NO: 59283 - RNA, 19 nt, Artificial Sequence
  Description of Artificial Sequence: Synthetic oligonucleotide
guaugaaacuuguugucgc

SEQ ID NO: 59284 - RNA, 19 nt, Artificial Sequence
  Description of Artificial Sequence: Synthetic oligonucleotide
aacauaguuaugucgcuuu

SEQ ID NO: 59285 - RNA, 19 nt, Artificial Sequence
  Description of Artificial Sequence: Synthetic oligonucleotide
caaccagaccauuuggagg

SEQ ID NO: 59286 - RNA, 19 nt, Artificial Sequence
  Description of Artificial Sequence: Synthetic oligonucleotide
cuggaaaucuacucgguac

SEQ ID NO: 59287 - RNA, 19 nt, Artificial Sequence
  Description of Artificial Sequence: Synthetic oligonucleotide
agguuuacagcaguuaaag

SEQ ID NO: 59288 - RNA, 19 nt, Artificial Sequence
  Description of Artificial Sequence: Synthetic oligonucleotide
aaggcgguuuacucgugac

SEQ ID NO: 59289 - RNA, 19 nt, Artificial Sequence
  Description of Artificial Sequence: Synthetic oligonucleotide
uuacacgacagacagucau

SEQ ID NO: 59290 - RNA, 19 nt, Artificial Sequence
  Description of Artificial Sequence: Synthetic oligonucleotide
guuucuaguaggccgagac

SEQ ID NO: 59291 - RNA, 19 nt, Artificial Sequence
  Description of Artificial Sequence: Synthetic oligonucleotide
aaacugugauccuucuugu

SEQ ID NO: 59292 - RNA, 19 nt, Artificial Sequence
  Description of Artificial Sequence: Synthetic oligonucleotide
guuuacucgugacuuaaug

SEQ ID NO: 59293 - RNA, 19 nt, Artificial Sequence
  Description of Artificial Sequence: Synthetic oligonucleotide
ucuugucauaucacauuag

SEQ ID NO: 59294 - RNA, 19 nt, Artificial Sequence
  Description of Artificial Sequence: Synthetic oligonucleotide
uuacucgugacuuaauguu

SEQ ID NO: 59295 - RNA, 19 nt, Artificial Sequence
  Description of Artificial Sequence: Synthetic oligonucleotide
uugauugcaaccucugauc

SEQ ID NO: 59296 - RNA, 19 nt, Artificial Sequence
  Description of Artificial Sequence: Synthetic oligonucleotide
ugcucacggauuaaguucu

SEQ ID NO: 59297 - RNA, 19 nt, Artificial Sequence
  Description of Artificial Sequence: Synthetic oligonucleotide
guaggccgagacuauaggg

SEQ ID NO: 59298 - RNA, 19 nt, Artificial Sequence
  Description of Artificial Sequence: Synthetic oligonucleotide
uccaagcuaaaaucuaccu

SEQ ID NO: 59299 - RNA, 19 nt, Artificial Sequence
  Description of Artificial Sequence: Synthetic oligonucleotide
uuauaaaguuuugagucuc

SEQ ID NO: 59300 - RNA, 19 nt, Artificial Sequence
  Description of Artificial Sequence: Synthetic oligonucleotide
uuaaacgggcaaaacgcaa

SEQ ID NO: 59301 - RNA, 19 nt, Artificial Sequence
  Description of Artificial Sequence: Synthetic oligonucleotide
acucgguaccgcaagauac

SEQ ID NO: 59302 - RNA, 19 nt, Artificial Sequence
  Description of Artificial Sequence: Synthetic oligonucleotide
agucuaagcugagaaugcc

SEQ ID NO: 59303 - RNA, 19 nt, Artificial Sequence
  Description of Artificial Sequence: Synthetic oligonucleotide
ugguauuccauucccugga

SEQ ID NO: 59304 - RNA, 19 nt, Artificial Sequence
  Description of Artificial Sequence: Synthetic oligonucleotide
auagggagcgucuucauua

SEQ ID NO: 59305 - RNA, 19 nt, Artificial Sequence
  Description of Artificial Sequence: Synthetic oligonucleotide
ucaaguccgugaagaacgg

SEQ ID NO: 59306 - RNA, 19 nt, Artificial Sequence
  Description of Artificial Sequence: Synthetic oligonucleotide
uauaaaguuuugagucucu

SEQ ID NO: 59307 - RNA, 19 nt, Artificial Sequence
  Description of Artificial Sequence: Synthetic oligonucleotide
gguaccgcaagauaccucc

SEQ ID NO: 59308 - RNA, 19 nt, Artificial Sequence
  Description of Artificial Sequence: Synthetic oligonucleotide
augcucgugccauugccgc

SEQ ID NO: 59309 - RNA, 19 nt, Artificial Sequence
  Description of Artificial Sequence: Synthetic oligonucleotide
ugucagacugacuuaguuc

SEQ ID NO: 59310 - RNA, 19 nt, Artificial Sequence
  Description of Artificial Sequence: Synthetic oligonucleotide
acuucaacuggguucaaau

SEQ ID NO: 59311 - RNA, 19 nt, Artificial Sequence
  Description of Artificial Sequence: Synthetic oligonucleotide
uaguaggccgagacuauag

SEQ ID NO: 59312 - RNA, 19 nt, Artificial Sequence
  Description of Artificial Sequence: Synthetic oligonucleotide
caaaguaucgcccuauuaa

SEQ ID NO: 59313 - RNA, 19 nt, Artificial Sequence
  Description of Artificial Sequence: Synthetic oligonucleotide
aguaggccgagacuauagg

SEQ ID NO: 59314 - RNA, 19 nt, Artificial Sequence
  Description of Artificial Sequence: Synthetic oligonucleotide
aguaucgcccuauuaauuu

SEQ ID NO: 59315 - RNA, 19 nt, Artificial Sequence
  Description of Artificial Sequence: Synthetic oligonucleotide
gauaggcaggucuguaacc

SEQ ID NO: 59316 - RNA, 19 nt, Artificial Sequence
  Description of Artificial Sequence: Synthetic oligonucleotide
auccaagcuaaaaucuacc

SEQ ID NO: 59317 - RNA, 19 nt, Artificial Sequence
  Description of Artificial Sequence: Synthetic oligonucleotide
aguagauaauucaauggcu

SEQ ID NO: 59318 - RNA, 19 nt, Artificial Sequence
  Description of Artificial Sequence: Synthetic oligonucleotide
agcuaaaaccagaccagcc

SEQ ID NO: 59319 - RNA, 19 nt, Artificial Sequence
  Description of Artificial Sequence: Synthetic oligonucleotide
uugagucucuguuguacag

SEQ ID NO: 59320 - RNA, 19 nt, Artificial Sequence
  Description of Artificial Sequence: Synthetic oligonucleotide
ucgacuaccuaguagucau

SEQ ID NO: 59321 - RNA, 19 nt, Artificial Sequence
  Description of Artificial Sequence: Synthetic oligonucleotide
ccgucuauuacaauaaaac

SEQ ID NO: 59322 - RNA, 19 nt, Artificial Sequence
  Description of Artificial Sequence: Synthetic oligonucleotide
uuugggagauccacaguga

SEQ ID NO: 59323 - RNA, 19 nt, Artificial Sequence
  Description of Artificial Sequence: Synthetic oligonucleotide
aagacauacucccuucauu

SEQ ID NO: 59324 - RNA, 19 nt, Artificial Sequence
  Description of Artificial Sequence: Synthetic oligonucleotide
uguaacacauaucgguaua

SEQ ID NO: 59325 - RNA, 19 nt, Artificial Sequence
  Description of Artificial Sequence: Synthetic oligonucleotide
uguuagaugcaguuccaaa

SEQ ID NO: 59326 - RNA, 19 nt, Artificial Sequence
  Description of Artificial Sequence: Synthetic oligonucleotide
aaugggucacugcgaaaug

SEQ ID NO: 59327 - RNA, 19 nt, Artificial Sequence
  Description of Artificial Sequence: Synthetic oligonucleotide
uucuaguaggccgagacua

SEQ ID NO: 59328 - RNA, 19 nt, Artificial Sequence
  Description of Artificial Sequence: Synthetic oligonucleotide
guaugcguaaguguaacac

SEQ ID NO: 59329 - RNA, 19 nt, Artificial Sequence
  Description of Artificial Sequence: Synthetic oligonucleotide
uuaauugguuugaaagguu

SEQ ID NO: 59330 - RNA, 19 nt, Artificial Sequence
  Description of Artificial Sequence: Synthetic oligonucleotide
cugcgaaccaacagcagag

SEQ ID NO: 59331 - RNA, 19 nt, Artificial Sequence
  Description of Artificial Sequence: Synthetic oligonucleotide
ucccuaagggcccaguccu

SEQ ID NO: 59332 - RNA, 19 nt, Artificial Sequence
  Description of Artificial Sequence: Synthetic oligonucleotide
acgguuucaccccucucac

SEQ ID NO: 59333 - RNA, 19 nt, Artificial Sequence
  Description of Artificial Sequence: Synthetic oligonucleotide
ugcgaaaugcagcaauuua

SEQ ID NO: 59334 - RNA, 19 nt, Artificial Sequence
  Description of Artificial Sequence: Synthetic oligonucleotide
caugucgacuaccuaguag

SEQ ID NO: 59335 - RNA, 19 nt, Artificial Sequence
  Description of Artificial Sequence: Synthetic oligonucleotide
caauguacccaccacccug

SEQ ID NO: 59336 - RNA, 19 nt, Artificial Sequence
  Description of Artificial Sequence: Synthetic oligonucleotide
uugccuauuagcucacccu

SEQ ID NO: 59337 - RNA, 19 nt, Artificial Sequence
  Description of Artificial Sequence: Synthetic oligonucleotide
uaguguagcuccaaauuuu

SEQ ID NO: 59338 - RNA, 19 nt, Artificial Sequence
  Description of Artificial Sequence: Synthetic oligonucleotide
aaaacgcaaggcugauuga

SEQ ID NO: 59339 - RNA, 19 nt, Artificial Sequence
  Description of Artificial Sequence: Synthetic oligonucleotide
uaccaucaaguaaaaguaa

SEQ ID NO: 59340 - RNA, 19 nt, Artificial Sequence
  Description of Artificial Sequence: Synthetic oligonucleotide
uuucuaguaggccgagacu

SEQ ID NO: 59341 - RNA, 19 nt, Artificial Sequence
  Description of Artificial Sequence: Synthetic oligonucleotide
ucugcuacuuuccgaacau

SEQ ID NO: 59342 - RNA, 19 nt, Artificial Sequence
  Description of Artificial Sequence: Synthetic oligonucleotide
ucaaaguaucgcccuauua

SEQ ID NO: 59343 - RNA, 19 nt, Artificial Sequence
  Description of Artificial Sequence: Synthetic oligonucleotide
auuggaacgauaggcaggu

SEQ ID NO: 59344 - RNA, 19 nt, Artificial Sequence
  Description of Artificial Sequence: Synthetic oligonucleotide
aucgguauauauugauaca

SEQ ID NO: 59345 - RNA, 19 nt, Artificial Sequence
  Description of Artificial Sequence: Synthetic oligonucleotide
aauugccuauuagcucacc

SEQ ID NO: 59346 - RNA, 19 nt, Artificial Sequence
  Description of Artificial Sequence: Synthetic oligonucleotide
uauccaaugcucacggauu

SEQ ID NO: 59347 - RNA, 19 nt, Artificial Sequence
  Description of Artificial Sequence: Synthetic oligonucleotide
ggauauaucaacuaauuuu

SEQ ID NO: 59348 - RNA, 19 nt, Artificial Sequence
  Description of Artificial Sequence: Synthetic oligonucleotide
ccgaacauaguuaugucgc

SEQ ID NO: 59349 - RNA, 19 nt, Artificial Sequence
  Description of Artificial Sequence: Synthetic oligonucleotide
auaguuguuagcaaaccau

SEQ ID NO: 59350 - RNA, 19 nt, Artificial Sequence
  Description of Artificial Sequence: Synthetic oligonucleotide
aaaggcgguuuacucguga

SEQ ID NO: 59351 - RNA, 19 nt, Artificial Sequence
  Description of Artificial Sequence: Synthetic oligonucleotide
augauguauuaauugguuu

SEQ ID NO: 59352 - RNA, 19 nt, Artificial Sequence
  Description of Artificial Sequence: Synthetic oligonucleotide
aguccgaaguggcauuuag

SEQ ID NO: 59353 - RNA, 19 nt, Artificial Sequence
  Description of Artificial Sequence: Synthetic oligonucleotide
uuggaucuaacaugguuua

SEQ ID NO: 59354 - RNA, 19 nt, Artificial Sequence
  Description of Artificial Sequence: Synthetic oligonucleotide
auuuggaccucagaguaca

SEQ ID NO: 59355 - RNA, 19 nt, Artificial Sequence
  Description of Artificial Sequence: Synthetic oligonucleotide
uggaaauguuccaauugua

SEQ ID NO: 59356 - RNA, 19 nt, Artificial Sequence
  Description of Artificial Sequence: Synthetic oligonucleotide
guuuggauuccaccacggg

SEQ ID NO: 59357 - RNA, 19 nt, Artificial Sequence
  Description of Artificial Sequence: Synthetic oligonucleotide
aaauugccuauuagcucac

SEQ ID NO: 59358 - RNA, 19 nt, Artificial Sequence
  Description of Artificial Sequence: Synthetic oligonucleotide
aggccgagacuauagggag

SEQ ID NO: 59359 - RNA, 19 nt, Artificial Sequence
  Description of Artificial Sequence: Synthetic oligonucleotide
cuacgcuuuguuuacuguc

SEQ ID NO: 59360 - RNA, 19 nt, Artificial Sequence
  Description of Artificial Sequence: Synthetic oligonucleotide
gucgagagugcacuggccc

SEQ ID NO: 59361 - RNA, 19 nt, Artificial Sequence
  Description of Artificial Sequence: Synthetic oligonucleotide
uggucuugucauaucacau

SEQ ID NO: 59362 - RNA, 19 nt, Artificial Sequence
  Description of Artificial Sequence: Synthetic oligonucleotide
uguaugcguaaguguaaca

SEQ ID NO: 59363 - RNA, 19 nt, Artificial Sequence
  Description of Artificial Sequence: Synthetic oligonucleotide
uggaagucgagagugcacu

SEQ ID NO: 59364 - RNA, 19 nt, Artificial Sequence
  Description of Artificial Sequence: Synthetic oligonucleotide
ucagacugacuuaguucag

SEQ ID NO: 59365 - RNA, 19 nt, Artificial Sequence
  Description of Artificial Sequence: Synthetic oligonucleotide
caggcuacgguuucacccc

SEQ ID NO: 59366 - RNA, 19 nt, Artificial Sequence
  Description of Artificial Sequence: Synthetic oligonucleotide
gcaagauaccuccaauucc

SEQ ID NO: 59367 - RNA, 19 nt, Artificial Sequence
  Description of Artificial Sequence: Synthetic oligonucleotide
cacgaaaguguuaaaagua

SEQ ID NO: 59368 - RNA, 19 nt, Artificial Sequence
  Description of Artificial Sequence: Synthetic oligonucleotide
cucgguaccgcaagauacc

SEQ ID NO: 59369 - RNA, 19 nt, Artificial Sequence
  Description of Artificial Sequence: Synthetic oligonucleotide
cuuaaacgggcaaaacgca

SEQ ID NO: 59370 - RNA, 19 nt, Artificial Sequence
  Description of Artificial Sequence: Synthetic oligonucleotide
uuaugucgcuuuuccauuc

SEQ ID NO: 59371 - RNA, 19 nt, Artificial Sequence
  Description of Artificial Sequence: Synthetic oligonucleotide
uacucgugacuuaauguua

SEQ ID NO: 59372 - RNA, 19 nt, Artificial Sequence
  Description of Artificial Sequence: Synthetic oligonucleotide
aaauuaguccgaaguggca

SEQ ID NO: 59373 - RNA, 19 nt, Artificial Sequence
  Description of Artificial Sequence: Synthetic oligonucleotide
accaaacuugcugucaucu

SEQ ID NO: 59374 - RNA, 19 nt, Artificial Sequence
  Description of Artificial Sequence: Synthetic oligonucleotide
ugcuucuauguaugaaggu

SEQ ID NO: 59375 - RNA, 19 nt, Artificial Sequence
  Description of Artificial Sequence: Synthetic oligonucleotide
cagggaucuguuuggauuc

SEQ ID NO: 59376 - RNA, 19 nt, Artificial Sequence
  Description of Artificial Sequence: Synthetic oligonucleotide
ugccuauuagcucacccuu

SEQ ID NO: 59377 - RNA, 19 nt, Artificial Sequence
  Description of Artificial Sequence: Synthetic oligonucleotide
uugggagauccacagugaa

SEQ ID NO: 59378 - RNA, 19 nt, Artificial Sequence
  Description of Artificial Sequence: Synthetic oligonucleotide
ugaucucacuucuacuaau

SEQ ID NO: 59379 - RNA, 19 nt, Artificial Sequence
  Description of Artificial Sequence: Synthetic oligonucleotide
ucagcgauaucaugcucgu

SEQ ID NO: 59380 - RNA, 19 nt, Artificial Sequence
  Description of Artificial Sequence: Synthetic oligonucleotide
ugcauacccuaaauguauc

SEQ ID NO: 59381 - RNA, 19 nt, Artificial Sequence
  Description of Artificial Sequence: Synthetic oligonucleotide
aaugcucggcucaaaugug

SEQ ID NO: 59382 - RNA, 19 nt, Artificial Sequence
  Description of Artificial Sequence: Synthetic oligonucleotide
caauuguaaggcagggauc

SEQ ID NO: 59383 - RNA, 19 nt, Artificial Sequence
  Description of Artificial Sequence: Synthetic oligonucleotide
cauccuacgcuuuguuuac

SEQ ID NO: 59384 - RNA, 19 nt, Artificial Sequence
  Description of Artificial Sequence: Synthetic oligonucleotide
uaguuaugucgcuuuucca

SEQ ID NO: 59385 - RNA, 19 nt, Artificial Sequence
  Description of Artificial Sequence: Synthetic oligonucleotide
uggagguacuuuguuauaa

SEQ ID NO: 59386 - RNA, 19 nt, Artificial Sequence
  Description of Artificial Sequence: Synthetic oligonucleotide
acucgugacuuaauguuag

SEQ ID NO: 59387 - RNA, 19 nt, Artificial Sequence
  Description of Artificial Sequence: Synthetic oligonucleotide
uuguaugcguaaguguaac

SEQ ID NO: 59388 - RNA, 19 nt, Artificial Sequence
  Description of Artificial Sequence: Synthetic oligonucleotide
ucaagugaaacaggauuau

SEQ ID NO: 59389 - RNA, 19 nt, Artificial Sequence
  Description of Artificial Sequence: Synthetic oligonucleotide
agauggaagucgagagugc

SEQ ID NO: 59390 - RNA, 19 nt, Artificial Sequence
  Description of Artificial Sequence: Synthetic oligonucleotide
uaucaugcucgugccauug

SEQ ID NO: 59391 - RNA, 19 nt, Artificial Sequence
  Description of Artificial Sequence: Synthetic oligonucleotide
accauaggauauaucaacu

SEQ ID NO: 59392 - RNA, 19 nt, Artificial Sequence
  Description of Artificial Sequence: Synthetic oligonucleotide
uccuaucggcagcacuggg

SEQ ID NO: 59393 - RNA, 19 nt, Artificial Sequence
  Description of Artificial Sequence: Synthetic oligonucleotide
cucccuaagggcccagucc

SEQ ID NO: 59394 - RNA, 19 nt, Artificial Sequence
  Description of Artificial Sequence: Synthetic oligonucleotide
uuuggaccucagaguacag

SEQ ID NO: 59395 - RNA, 19 nt, Artificial Sequence
  Description of Artificial Sequence: Synthetic oligonucleotide
aagguuuacagcaguuaaa

SEQ ID NO: 59396 - RNA, 19 nt, Artificial Sequence
  Description of Artificial Sequence: Synthetic oligonucleotide
gauggaagucgagagugca

SEQ ID NO: 59397 - RNA, 19 nt, Artificial Sequence
  Description of Artificial Sequence: Synthetic oligonucleotide
ucacguuggagagaacuuc

SEQ ID NO: 59398 - RNA, 19 nt, Artificial Sequence
  Description of Artificial Sequence: Synthetic oligonucleotide
uuucaccccucucacuuau

SEQ ID NO: 59399 - RNA, 19 nt, Artificial Sequence
  Description of Artificial Sequence: Synthetic oligonucleotide
ucgcuuuucuuuucaguau

SEQ ID NO: 59400 - RNA, 19 nt, Artificial Sequence
  Description of Artificial Sequence: Synthetic oligonucleotide
uacucccuucauucaagug

SEQ ID NO: 59401 - RNA, 19 nt, Artificial Sequence
  Description of Artificial Sequence: Synthetic oligonucleotide
auagacuauuagaaucucu

SEQ ID NO: 59402 - RNA, 19 nt, Artificial Sequence
  Description of Artificial Sequence: Synthetic oligonucleotide
cuggucuugucauaucaca

SEQ ID NO: 59403 - RNA, 19 nt, Artificial Sequence
  Description of Artificial Sequence: Synthetic oligonucleotide
gugagaaccaaagcuuuac

SEQ ID NO: 59404 - RNA, 19 nt, Artificial Sequence
  Description of Artificial Sequence: Synthetic oligonucleotide
acggcagucaggcacgaaa

SEQ ID NO: 59405 - RNA, 19 nt, Artificial Sequence
  Description of Artificial Sequence: Synthetic oligonucleotide
ugcagucuaagcugagaau

SEQ ID NO: 59406 - RNA, 19 nt, Artificial Sequence
  Description of Artificial Sequence: Synthetic oligonucleotide
ggcacauuuugccggaccc

SEQ ID NO: 59407 - RNA, 19 nt, Artificial Sequence
  Description of Artificial Sequence: Synthetic oligonucleotide
uuccgaacauaguuauguc

SEQ ID NO: 59408 - RNA, 19 nt, Artificial Sequence
  Description of Artificial Sequence: Synthetic oligonucleotide
aguguaacacauaucggua

SEQ ID NO: 59409 - RNA, 19 nt, Artificial Sequence
  Description of Artificial Sequence: Synthetic oligonucleotide
uccaauuguaaggcaggga

SEQ ID NO: 59410 - RNA, 19 nt, Artificial Sequence
  Description of Artificial Sequence: Synthetic oligonucleotide
ucuuggguguucugcgaac

SEQ ID NO: 59411 - RNA, 19 nt, Artificial Sequence
  Description of Artificial Sequence: Synthetic oligonucleotide
ugucgacuaccuaguaguc

SEQ ID NO: 59412 - RNA, 19 nt, Artificial Sequence
  Description of Artificial Sequence: Synthetic oligonucleotide
guaucgcccuauuaauuuc

SEQ ID NO: 59413 - RNA, 19 nt, Artificial Sequence
  Description of Artificial Sequence: Synthetic oligonucleotide
uccgugaagaacggcaguc

SEQ ID NO: 59414 - RNA, 19 nt, Artificial Sequence
  Description of Artificial Sequence: Synthetic oligonucleotide
ugacuuaguucaguuuuaa

SEQ ID NO: 59415 - RNA, 19 nt, Artificial Sequence
  Description of Artificial Sequence: Synthetic oligonucleotide
acuggggucguccgccauc

SEQ ID NO: 59416 - RNA, 19 nt, Artificial Sequence
  Description of Artificial Sequence: Synthetic oligonucleotide
uccacuuaaauugcauguu

SEQ ID NO: 59417 - RNA, 19 nt, Artificial Sequence
  Description of Artificial Sequence: Synthetic oligonucleotide
acucgugaaaucuggucuu

SEQ ID NO: 59418 - RNA, 19 nt, Artificial Sequence
  Description of Artificial Sequence: Synthetic oligonucleotide
uacucgguaccgcaagaua

SEQ ID NO: 59419 - RNA, 19 nt, Artificial Sequence
  Description of Artificial Sequence: Synthetic oligonucleotide
auuaguccgaaguggcauu

SEQ ID NO: 59420 - RNA, 19 nt, Artificial Sequence
  Description of Artificial Sequence: Synthetic oligonucleotide
ccucugaucaaacauguca

SEQ ID NO: 59421 - RNA, 19 nt, Artificial Sequence
  Description of Artificial Sequence: Synthetic oligonucleotide
agaugcaguuccaaacuca

SEQ ID NO: 59422 - RNA, 19 nt, Artificial Sequence
  Description of Artificial Sequence: Synthetic oligonucleotide
aaguaucgcccuauuaauu

SEQ ID NO: 59423 - RNA, 19 nt, Artificial Sequence
  Description of Artificial Sequence: Synthetic oligonucleotide
ugcucgugccauugccgcg

SEQ ID NO: 59424 - RNA, 19 nt, Artificial Sequence
  Description of Artificial Sequence: Synthetic oligonucleotide
gcauacccuaaauguaucc

SEQ ID NO: 59425 - RNA, 19 nt, Artificial Sequence
  Description of Artificial Sequence: Synthetic oligonucleotide
gauaucaugcucgugccau

SEQ ID NO: 59426 - RNA, 19 nt, Artificial Sequence
  Description of Artificial Sequence: Synthetic oligonucleotide
cccuuucaacauuaaacag

SEQ ID NO: 59427 - RNA, 19 nt, Artificial Sequence
  Description of Artificial Sequence: Synthetic oligonucleotide
uaguuguaggcugcugcgc

SEQ ID NO: 59428 - RNA, 19 nt, Artificial Sequence
  Description of Artificial Sequence: Synthetic oligonucleotide
cauagacuauuagaaucuc

SEQ ID NO: 59429 - RNA, 19 nt, Artificial Sequence
  Description of Artificial Sequence: Synthetic oligonucleotide
acuuaauguuagaugcagu

SEQ ID NO: 59430 - RNA, 19 nt, Artificial Sequence
  Description of Artificial Sequence: Synthetic oligonucleotide
gacuuaguucaguuuuaaa

SEQ ID NO: 59431 - RNA, 19 nt, Artificial Sequence
  Description of Artificial Sequence: Synthetic oligonucleotide
auccaaugcucacggauua

SEQ ID NO: 59432 - RNA, 19 nt, Artificial Sequence
  Description of Artificial Sequence: Synthetic oligonucleotide
uacagcacucagucugacu

SEQ ID NO: 59433 - RNA, 19 nt, Artificial Sequence
  Description of Artificial Sequence: Synthetic oligonucleotide
acgauaggcaggucuguaa

SEQ ID NO: 59434 - RNA, 19 nt, Artificial Sequence
  Description of Artificial Sequence: Synthetic oligonucleotide
guccgaaguggcauuuagg

SEQ ID NO: 59435 - RNA, 19 nt, Artificial Sequence
  Description of Artificial Sequence: Synthetic oligonucleotide
uaacacauaucgguauaua

SEQ ID NO: 59436 - RNA, 19 nt, Artificial Sequence
  Description of Artificial Sequence: Synthetic oligonucleotide
cacguuggagagaacuuca

SEQ ID NO: 59437 - RNA, 19 nt, Artificial Sequence
  Description of Artificial Sequence: Synthetic oligonucleotide
agcacucagucugacuuug

SEQ ID NO: 59438 - RNA, 19 nt, Artificial Sequence
  Description of Artificial Sequence: Synthetic oligonucleotide
gccgagacuauagggagcg

SEQ ID NO: 59439 - RNA, 19 nt, Artificial Sequence
  Description of Artificial Sequence: Synthetic oligonucleotide
uuaauccauggugccagaa

SEQ ID NO: 59440 - RNA, 19 nt, Artificial Sequence
  Description of Artificial Sequence: Synthetic oligonucleotide
ucagaccaauaaagcuaca

SEQ ID NO: 59441 - RNA, 19 nt, Artificial Sequence
  Description of Artificial Sequence: Synthetic oligonucleotide
ccuaucggcagcacugggg

SEQ ID NO: 59442 - RNA, 19 nt, Artificial Sequence
  Description of Artificial Sequence: Synthetic oligonucleotide
cauaucgguauauauugau

SEQ ID NO: 59443 - RNA, 19 nt, Artificial Sequence
  Description of Artificial Sequence: Synthetic oligonucleotide
ugccgucuauuacaauaaa

SEQ ID NO: 59444 - RNA, 19 nt, Artificial Sequence
  Description of Artificial Sequence: Synthetic oligonucleotide
ugcgaaccaacagcagagc

SEQ ID NO: 59445 - RNA, 19 nt, Artificial Sequence
  Description of Artificial Sequence: Synthetic oligonucleotide
ugcaggcuacgguuucacc

SEQ ID NO: 59446 - RNA, 19 nt, Artificial Sequence
  Description of Artificial Sequence: Synthetic oligonucleotide
acuaccuaguagucaucaa

SEQ ID NO: 59447 - RNA, 19 nt, Artificial Sequence
  Description of Artificial Sequence: Synthetic oligonucleotide
aggcacgaaaguguuaaaa

SEQ ID NO: 59448 - RNA, 19 nt, Artificial Sequence
  Description of Artificial Sequence: Synthetic oligonucleotide
ucgugaaaucuggucuuug

SEQ ID NO: 59449 - RNA, 19 nt, Artificial Sequence
  Description of Artificial Sequence: Synthetic oligonucleotide
cacucgugaaaucuggucu

SEQ ID NO: 59450 - RNA, 19 nt, Artificial Sequence
  Description of Artificial Sequence: Synthetic oligonucleotide
cuaacaugguuuaauccau

SEQ ID NO: 59451 - RNA, 19 nt, Artificial Sequence
  Description of Artificial Sequence: Synthetic oligonucleotide
cacggguaugcuccuuggg

SEQ ID NO: 59452 - RNA, 19 nt, Artificial Sequence
  Description of Artificial Sequence: Synthetic oligonucleotide
uacagaugugauggcuccc

SEQ ID NO: 59453 - RNA, 19 nt, Artificial Sequence
  Description of Artificial Sequence: Synthetic oligonucleotide
uccuggcuaauuucaucaa

SEQ ID NO: 59454 - RNA, 19 nt, Artificial Sequence
  Description of Artificial Sequence: Synthetic oligonucleotide
acauaucgguauauauuga

SEQ ID NO: 59455 - RNA, 19 nt, Artificial Sequence
  Description of Artificial Sequence: Synthetic oligonucleotide
gggagcgucuucauuaaug

SEQ ID NO: 59456 - RNA, 19 nt, Artificial Sequence
  Description of Artificial Sequence: Synthetic oligonucleotide
aaucuacucgguaccgcaa

SEQ ID NO: 59457 - RNA, 19 nt, Artificial Sequence
  Description of Artificial Sequence: Synthetic oligonucleotide
aggcgguuuacucgugacu

SEQ ID NO: 59458 - RNA, 19 nt, Artificial Sequence
  Description of Artificial Sequence: Synthetic oligonucleotide
gcucugacguaggacaccg

SEQ ID NO: 59459 - RNA, 19 nt, Artificial Sequence
  Description of Artificial Sequence: Synthetic oligonucleotide
aacgauaggcaggucugua

SEQ ID NO: 59460 - RNA, 19 nt, Artificial Sequence
  Description of Artificial Sequence: Synthetic oligonucleotide
ccuaaauguauccugugaa

SEQ ID NO: 59461 - RNA, 19 nt, Artificial Sequence
  Description of Artificial Sequence: Synthetic oligonucleotide
uguaggguugggucugguu

SEQ ID NO: 59462 - RNA, 19 nt, Artificial Sequence
  Description of Artificial Sequence: Synthetic oligonucleotide
ucgguaccgcaagauaccu

SEQ ID NO: 59463 - RNA, 19 nt, Artificial Sequence
  Description of Artificial Sequence: Synthetic oligonucleotide
agauccaagcuaaaaucua

SEQ ID NO: 59464 - RNA, 19 nt, Artificial Sequence
  Description of Artificial Sequence: Synthetic oligonucleotide
agccuuuaguguaucuuca

SEQ ID NO: 59465 - RNA, 19 nt, Artificial Sequence
  Description of Artificial Sequence: Synthetic oligonucleotide
acaggauuauuggaacgau

SEQ ID NO: 59466 - RNA, 19 nt, Artificial Sequence
  Description of Artificial Sequence: Synthetic oligonucleotide
ucgcccuauuaauuucuuc

SEQ ID NO: 59467 - RNA, 19 nt, Artificial Sequence
  Description of Artificial Sequence: Synthetic oligonucleotide
ccaccuugaacacaccaug

SEQ ID NO: 59468 - RNA, 19 nt, Artificial Sequence
  Description of Artificial Sequence: Synthetic oligonucleotide
uguuuacugucaccaccuu

SEQ ID NO: 59469 - RNA, 19 nt, Artificial Sequence
  Description of Artificial Sequence: Synthetic oligonucleotide
cugccgucuauuacaauaa

SEQ ID NO: 59470 - RNA, 19 nt, Artificial Sequence
  Description of Artificial Sequence: Synthetic oligonucleotide
gagacuauagggagcgucu

SEQ ID NO: 59471 - RNA, 19 nt, Artificial Sequence
  Description of Artificial Sequence: Synthetic oligonucleotide
cacgacagacagucauuug

SEQ ID NO: 59472 - RNA, 19 nt, Artificial Sequence
  Description of Artificial Sequence: Synthetic oligonucleotide
cauuagacccauuuacaau

SEQ ID NO: 59473 - RNA, 19 nt, Artificial Sequence
  Description of Artificial Sequence: Synthetic oligonucleotide
gacaccggcucccucucuc

SEQ ID NO: 59474 - RNA, 19 nt, Artificial Sequence
  Description of Artificial Sequence: Synthetic oligonucleotide
gcagucaggcacgaaagug

SEQ ID NO: 59475 - RNA, 19 nt, Artificial Sequence
  Description of Artificial Sequence: Synthetic oligonucleotide
ggguaugcuccuuggguug

SEQ ID NO: 59476 - RNA, 19 nt, Artificial Sequence
  Description of Artificial Sequence: Synthetic oligonucleotide
gcacgaaaguguuaaaagu

SEQ ID NO: 59477 - RNA, 19 nt, Artificial Sequence
  Description of Artificial Sequence: Synthetic oligonucleotide
ugauaccaacugacuuuaa

SEQ ID NO: 59478 - RNA, 19 nt, Artificial Sequence
  Description of Artificial Sequence: Synthetic oligonucleotide
cuauuagcucacccuuuca

SEQ ID NO: 59479 - RNA, 19 nt, Artificial Sequence
  Description of Artificial Sequence: Synthetic oligonucleotide
ugguuucuaguaggccgag

SEQ ID NO: 59480 - RNA, 19 nt, Artificial Sequence
  Description of Artificial Sequence: Synthetic oligonucleotide
gugauaccaacugacuuua

SEQ ID NO: 59481 - RNA, 19 nt, Artificial Sequence
  Description of Artificial Sequence: Synthetic oligonucleotide
agcaaugcuguaagagccu

SEQ ID NO: 59482 - RNA, 19 nt, Artificial Sequence
  Description of Artificial Sequence: Synthetic oligonucleotide
aguggcauuuaggaacuua

SEQ ID NO: 59483 - RNA, 19 nt, Artificial Sequence
  Description of Artificial Sequence: Synthetic oligonucleotide
ccgagauucugcucuuagg

SEQ ID NO: 59484 - RNA, 19 nt, Artificial Sequence
  Description of Artificial Sequence: Synthetic oligonucleotide
cagucaggcacgaaagugu

SEQ ID NO: 59485 - RNA, 19 nt, Artificial Sequence
  Description of Artificial Sequence: Synthetic oligonucleotide
uuccaccacggguaugcuc

SEQ ID NO: 59486 - RNA, 19 nt, Artificial Sequence
  Description of Artificial Sequence: Synthetic oligonucleotide
guugaaugcuggaggguga

SEQ ID NO: 59487 - RNA, 19 nt, Artificial Sequence
  Description of Artificial Sequence: Synthetic oligonucleotide
guuaugucgcuuuuccauu

SEQ ID NO: 59488 - RNA, 19 nt, Artificial Sequence
  Description of Artificial Sequence: Synthetic oligonucleotide
gucgacuaccuaguaguca

SEQ ID NO: 59489 - RNA, 19 nt, Artificial Sequence
  Description of Artificial Sequence: Synthetic oligonucleotide
caccccucucacuuaugug

SEQ ID NO: 59490 - RNA, 19 nt, Artificial Sequence
  Description of Artificial Sequence: Synthetic oligonucleotide
agacagucauuuggaccuc

SEQ ID NO: 59491 - RNA, 19 nt, Artificial Sequence
  Description of Artificial Sequence: Synthetic oligonucleotide
uggaucuaacaugguuuaa

SEQ ID NO: 59492 - RNA, 19 nt, Artificial Sequence
  Description of Artificial Sequence: Synthetic oligonucleotide
cugacuuaguucaguuuua

SEQ ID NO: 59493 - RNA, 19 nt, Artificial Sequence
  Description of Artificial Sequence: Synthetic oligonucleotide
ccaguguuacagcacucag

SEQ ID NO: 59494 - RNA, 19 nt, Artificial Sequence
  Description of Artificial Sequence: Synthetic oligonucleotide
gguuuaauccauggugcca

SEQ ID NO: 59495 - RNA, 19 nt, Artificial Sequence
  Description of Artificial Sequence: Synthetic oligonucleotide
guacccaauuugaaaccca

SEQ ID NO: 59496 - RNA, 19 nt, Artificial Sequence
  Description of Artificial Sequence: Synthetic oligonucleotide
caggauuauuggaacgaua

SEQ ID NO: 59497 - RNA, 19 nt, Artificial Sequence
  Description of Artificial Sequence: Synthetic oligonucleotide
gagcaaccaauuuuaccau

SEQ ID NO: 59498 - RNA, 19 nt, Artificial Sequence
  Description of Artificial Sequence: Synthetic oligonucleotide
ggguugagacaucagguua

SEQ ID NO: 59499 - RNA, 19 nt, Artificial Sequence
  Description of Artificial Sequence: Synthetic oligonucleotide
cgcaagauaccuccaauuc

SEQ ID NO: 59500 - RNA, 19 nt, Artificial Sequence
  Description of Artificial Sequence: Synthetic oligonucleotide
ccaaugcucacggauuaag

SEQ ID NO: 59501 - RNA, 19 nt, Artificial Sequence
  Description of Artificial Sequence: Synthetic oligonucleotide
gaaaggcgguuuacucgug

SEQ ID NO: 59502 - RNA, 19 nt, Artificial Sequence
  Description of Artificial Sequence: Synthetic oligonucleotide
uccaaugcucacggauuaa

SEQ ID NO: 59503 - RNA, 19 nt, Artificial Sequence
  Description of Artificial Sequence: Synthetic oligonucleotide
gacugaaaggcgguuuacu

SEQ ID NO: 59504 - RNA, 19 nt, Artificial Sequence
  Description of Artificial Sequence: Synthetic oligonucleotide
ccaauuguaaggcagggau

SEQ ID NO: 59505 - RNA, 19 nt, Artificial Sequence
  Description of Artificial Sequence: Synthetic oligonucleotide
cgggcaaaacgcaaggcug

SEQ ID NO: 59506 - RNA, 19 nt, Artificial Sequence
  Description of Artificial Sequence: Synthetic oligonucleotide
guaaacaaccagaccauuu

SEQ ID NO: 59507 - RNA, 19 nt, Artificial Sequence
  Description of Artificial Sequence: Synthetic oligonucleotide
ugccggacccaugucgacu

SEQ ID NO: 59508 - RNA, 19 nt, Artificial Sequence
  Description of Artificial Sequence: Synthetic oligonucleotide
agaauagauccaagcuaaa

SEQ ID NO: 59509 - RNA, 19 nt, Artificial Sequence
  Description of Artificial Sequence: Synthetic oligonucleotide
gucgcacaaauacaaugau

SEQ ID NO: 59510 - RNA, 19 nt, Artificial Sequence
  Description of Artificial Sequence: Synthetic oligonucleotide
gaacuucacguuggagaga

SEQ ID NO: 59511 - RNA, 19 nt, Artificial Sequence
  Description of Artificial Sequence: Synthetic oligonucleotide
ccacucgugaaaucugguc

SEQ ID NO: 59512 - RNA, 19 nt, Artificial Sequence
  Description of Artificial Sequence: Synthetic oligonucleotide
gguuucaccccucucacuu

SEQ ID NO: 59513 - RNA, 19 nt, Artificial Sequence
  Description of Artificial Sequence: Synthetic oligonucleotide
gacugacuuaguucaguuu

SEQ ID NO: 59514 - RNA, 19 nt, Artificial Sequence
  Description of Artificial Sequence: Synthetic oligonucleotide
guaacacauaucgguauau

SEQ ID NO: 59515 - RNA, 19 nt, Artificial Sequence
  Description of Artificial Sequence: Synthetic oligonucleotide
aggcuacgguuucaccccu

SEQ ID NO: 59516 - RNA, 19 nt, Artificial Sequence
  Description of Artificial Sequence: Synthetic oligonucleotide
cgauaggcaggucuguaac

SEQ ID NO: 59517 - RNA, 19 nt, Artificial Sequence
  Description of Artificial Sequence: Synthetic oligonucleotide
cuacgguuucaccccucuc

SEQ ID NO: 59518 - RNA, 19 nt, Artificial Sequence
  Description of Artificial Sequence: Synthetic oligonucleotide
cccuaaauguauccuguga

SEQ ID NO: 59519 - RNA, 19 nt, Artificial Sequence
  Description of Artificial Sequence: Synthetic oligonucleotide
agacuauagggagcgucuu

SEQ ID NO: 59520 - RNA, 19 nt, Artificial Sequence
  Description of Artificial Sequence: Synthetic oligonucleotide
guuacacgacagacaguca

SEQ ID NO: 59521 - RNA, 19 nt, Artificial Sequence
  Description of Artificial Sequence: Synthetic oligonucleotide
ggaucuaacaugguuuaau

SEQ ID NO: 59522 - RNA, 19 nt, Artificial Sequence
  Description of Artificial Sequence: Synthetic oligonucleotide
cugacguaggacaccggcu

SEQ ID NO: 59523 - RNA, 19 nt, Artificial Sequence
  Description of Artificial Sequence: Synthetic oligonucleotide
cacuuauguguguuuguau

SEQ ID NO: 59524 - RNA, 19 nt, Artificial Sequence
  Description of Artificial Sequence: Synthetic oligonucleotide
cucgugccauugccgcggg

SEQ ID NO: 59525 - RNA, 19 nt, Artificial Sequence
  Description of Artificial Sequence: Synthetic oligonucleotide
ccauaggauauaucaacua

SEQ ID NO: 59526 - RNA, 19 nt, Artificial Sequence
  Description of Artificial Sequence: Synthetic oligonucleotide
guuucaccccucucacuua

SEQ ID NO: 59527 - RNA, 19 nt, Artificial Sequence
  Description of Artificial Sequence: Synthetic oligonucleotide
gcugcauacccuaaaugua

SEQ ID NO: 59528 - RNA, 19 nt, Artificial Sequence
  Description of Artificial Sequence: Synthetic oligonucleotide
gguauuccauucccuggaa

SEQ ID NO: 59529 - RNA, 19 nt, Artificial Sequence
  Description of Artificial Sequence: Synthetic oligonucleotide
gggcacauccuacgcuuug

SEQ ID NO: 59530 - RNA, 19 nt, Artificial Sequence
  Description of Artificial Sequence: Synthetic oligonucleotide
gggcaaaacgcaaggcuga

SEQ ID NO: 59531 - RNA, 19 nt, Artificial Sequence
  Description of Artificial Sequence: Synthetic oligonucleotide
gcugcgcugacaccaugac

SEQ ID NO: 59532 - RNA, 19 nt, Artificial Sequence
  Description of Artificial Sequence: Synthetic oligonucleotide
cgguauauauugauacaca

SEQ ID NO: 59533 - RNA, 19 nt, Artificial Sequence
  Description of Artificial Sequence: Synthetic oligonucleotide
ccacggguaugcuccuugg

SEQ ID NO: 59534 - RNA, 19 nt, Artificial Sequence
  Description of Artificial Sequence: Synthetic oligonucleotide
ggucuugucauaucacauu

SEQ ID NO: 59535 - RNA, 19 nt, Artificial Sequence
  Description of Artificial Sequence: Synthetic oligonucleotide
gaacgauaggcaggucugu

SEQ ID NO: 59536 - RNA, 19 nt, Artificial Sequence
  Description of Artificial Sequence: Synthetic oligonucleotide
auccuacgcuuuguuuacu

SEQ ID NO: 59537 - RNA, 19 nt, Artificial Sequence
  Description of Artificial Sequence: Synthetic oligonucleotide
cgugccauugccgcgggcc

SEQ ID NO: 59538 - RNA, 19 nt, Artificial Sequence
  Description of Artificial Sequence: Synthetic oligonucleotide
gccguguuucuuugggaga

SEQ ID NO: 59539 - RNA, 19 nt, Artificial Sequence
  Description of Artificial Sequence: Synthetic oligonucleotide
caguaugaucucacuucua

SEQ ID NO: 59540 - RNA, 19 nt, Artificial Sequence
  Description of Artificial Sequence: Synthetic oligonucleotide
uaguccgaaguggcauuua

SEQ ID NO: 59541 - RNA, 19 nt, Artificial Sequence
  Description of Artificial Sequence: Synthetic oligonucleotide
ucgugccauugccgcgggc

SEQ ID NO: 59542 - RNA, 19 nt, Artificial Sequence
  Description of Artificial Sequence: Synthetic oligonucleotide
cuaguaggccgagacuaua

SEQ ID NO: 59543 - RNA, 19 nt, Artificial Sequence
  Description of Artificial Sequence: Synthetic oligonucleotide
guugucgcacaaauacaau

SEQ ID NO: 59544 - RNA, 19 nt, Artificial Sequence
  Description of Artificial Sequence: Synthetic oligonucleotide
agguuacacgacagacagu

SEQ ID NO: 59545 - RNA, 19 nt, Artificial Sequence
  Description of Artificial Sequence: Synthetic oligonucleotide
ccaguaugaucucacuucu

SEQ ID NO: 59546 - RNA, 19 nt, Artificial Sequence
  Description of Artificial Sequence: Synthetic oligonucleotide
cgagacuauagggagcguc

SEQ ID NO: 59547 - RNA, 19 nt, Artificial Sequence
  Description of Artificial Sequence: Synthetic oligonucleotide
ggccgagacuauagggagc

SEQ ID NO: 59548 - RNA, 19 nt, Artificial Sequence
  Description of Artificial Sequence: Synthetic oligonucleotide
cccuauuaauuucuucucu

SEQ ID NO: 59549 - RNA, 19 nt, Artificial Sequence
  Description of Artificial Sequence: Synthetic oligonucleotide
ccguguccuggcuaauuuc

SEQ ID NO: 59550 - RNA, 19 nt, Artificial Sequence
  Description of Artificial Sequence: Synthetic oligonucleotide
aucgcccuauuaauuucuu

SEQ ID NO: 59551 - RNA, 19 nt, Artificial Sequence
  Description of Artificial Sequence: Synthetic oligonucleotide
aacggcagucaggcacgaa

SEQ ID NO: 59552 - RNA, 19 nt, Artificial Sequence
  Description of Artificial Sequence: Synthetic oligonucleotide
gcuacuuuccgaacauagu

SEQ ID NO: 59553 - RNA, 19 nt, Artificial Sequence
  Description of Artificial Sequence: Synthetic oligonucleotide
cuauagggagcgucuucau

SEQ ID NO: 59554 - RNA, 19 nt, Artificial Sequence
  Description of Artificial Sequence: Synthetic oligonucleotide
gcacauuuugccggaccca

SEQ ID NO: 59555 - RNA, 19 nt, Artificial Sequence
  Description of Artificial Sequence: Synthetic oligonucleotide
ccaagcuaaaaucuaccuu

SEQ ID NO: 59556 - RNA, 19 nt, Artificial Sequence
  Description of Artificial Sequence: Synthetic oligonucleotide
caggcacgaaaguguuaaa

SEQ ID NO: 59557 - RNA, 19 nt, Artificial Sequence
  Description of Artificial Sequence: Synthetic oligonucleotide
gcuacgguuucaccccucu

SEQ ID NO: 59558 - RNA, 19 nt, Artificial Sequence
  Description of Artificial Sequence: Synthetic oligonucleotide
gguuucuaguaggccgaga

SEQ ID NO: 59559 - RNA, 19 nt, Artificial Sequence
  Description of Artificial Sequence: Synthetic oligonucleotide
gccggacccaugucgacua

SEQ ID NO: 59560 - RNA, 19 nt, Artificial Sequence
  Description of Artificial Sequence: Synthetic oligonucleotide
cuacucgguaccgcaagau

SEQ ID NO: 59561 - RNA, 19 nt, Artificial Sequence
  Description of Artificial Sequence: Synthetic oligonucleotide
gucaggcacgaaaguguua

SEQ ID NO: 59562 - RNA, 19 nt, Artificial Sequence
  Description of Artificial Sequence: Synthetic oligonucleotide
guaugcuccuuggguugaa

SEQ ID NO: 59563 - RNA, 19 nt, Artificial Sequence
  Description of Artificial Sequence: Synthetic oligonucleotide
cugauugagugugggugau

SEQ ID NO: 59564 - RNA, 19 nt, Artificial Sequence
  Description of Artificial Sequence: Synthetic oligonucleotide
ccuacgcuuuguuuacugu

SEQ ID NO: 59565 - RNA, 19 nt, Artificial Sequence
  Description of Artificial Sequence: Synthetic oligonucleotide
gcucacggauuaaguucug

SEQ ID NO: 59566 - RNA, 19 nt, Artificial Sequence
  Description of Artificial Sequence: Synthetic oligonucleotide
cugcuacuuuccgaacaua

SEQ ID NO: 59567 - RNA, 19 nt, Artificial Sequence
  Description of Artificial Sequence: Synthetic oligonucleotide
augcagcaauuuacuuauu

SEQ ID NO: 59568 - RNA, 19 nt, Artificial Sequence
  Description of Artificial Sequence: Synthetic oligonucleotide
gcggcggcucugacguagg

SEQ ID NO: 59569 - RNA, 19 nt, Artificial Sequence
  Description of Artificial Sequence: Synthetic oligonucleotide
ugcccguguccuggcuaau

SEQ ID NO: 59570 - RNA, 19 nt, Artificial Sequence
  Description of Artificial Sequence: Synthetic oligonucleotide
cucgugaaaucuggucuuu

SEQ ID NO: 59571 - RNA, 19 nt, Artificial Sequence
  Description of Artificial Sequence: Synthetic oligonucleotide
cgguaccgcaagauaccuc

SEQ ID NO: 59572 - RNA, 19 nt, Artificial Sequence
  Description of Artificial Sequence: Synthetic oligonucleotide
gguuuacucgugacuuaau

SEQ ID NO: 59573 - RNA, 19 nt, Artificial Sequence
  Description of Artificial Sequence: Synthetic oligonucleotide
ccgcaagauaccuccaauu

SEQ ID NO: 59574 - RNA, 19 nt, Artificial Sequence
  Description of Artificial Sequence: Synthetic oligonucleotide
guacuucaacuggguucaa

SEQ ID NO: 59575 - RNA, 19 nt, Artificial Sequence
  Description of Artificial Sequence: Synthetic oligonucleotide
ggcaaaacgcaaggcugau

SEQ ID NO: 59576 - RNA, 19 nt, Artificial Sequence
  Description of Artificial Sequence: Synthetic oligonucleotide
ccaugucgacuaccuagua

SEQ ID NO: 59577 - RNA, 19 nt, Artificial Sequence
  Description of Artificial Sequence: Synthetic oligonucleotide
gccacucgugaaaucuggu

SEQ ID NO: 59578 - RNA, 19 nt, Artificial Sequence
  Description of Artificial Sequence: Synthetic oligonucleotide
guguaggguugggucuggu

SEQ ID NO: 59579 - RNA, 19 nt, Artificial Sequence
  Description of Artificial Sequence: Synthetic oligonucleotide
gccuauuagcucacccuuu

SEQ ID NO: 59580 - RNA, 19 nt, Artificial Sequence
  Description of Artificial Sequence: Synthetic oligonucleotide
cccguguccuggcuaauuu

SEQ ID NO: 59581 - RNA, 19 nt, Artificial Sequence
  Description of Artificial Sequence: Synthetic oligonucleotide
ggacaccggcucccucucu

SEQ ID NO: 59582 - RNA, 19 nt, Artificial Sequence
  Description of Artificial Sequence: Synthetic oligonucleotide
cgguuucaccccucucacu

SEQ ID NO: 59583 - RNA, 19 nt, Artificial Sequence
  Description of Artificial Sequence: Synthetic oligonucleotide
ccaccacggguaugcuccu

SEQ ID NO: 59584 - RNA, 19 nt, Artificial Sequence
  Description of Artificial Sequence: Synthetic oligonucleotide
gcccguguccuggcuaauu

SEQ ID NO: 59585 - RNA, 19 nt, Artificial Sequence
  Description of Artificial Sequence: Synthetic oligonucleotide
cguaggacaccggcucccu

SEQ ID NO: 59586 - RNA, 19 nt, Artificial Sequence
  Description of Artificial Sequence: Synthetic oligonucleotide
cggcggcucugacguagga

SEQ ID NO: 59587 - RNA, 19 nt, Artificial Sequence
  Description of Artificial Sequence: Synthetic oligonucleotide
ccgagacuauagggagcgu

SEQ ID NO: 59588 - RNA, 19 nt, Artificial Sequence
  Description of Artificial Sequence: Synthetic oligonucleotide
aaaaucuaagaguuguccc

SEQ ID NO: 59589 - RNA, 19 nt, Artificial Sequence
  Description of Artificial Sequence: Synthetic oligonucleotide
aguaauauccucucaaggc

SEQ ID NO: 59590 - RNA, 19 nt, Artificial Sequence
  Description of Artificial Sequence: Synthetic oligonucleotide
aaguauauuacagagcugg

SEQ ID NO: 59591 - RNA, 19 nt, Artificial Sequence
  Description of Artificial Sequence: Synthetic oligonucleotide
aagucuaccacguaggguc

SEQ ID NO: 59592 - RNA, 19 nt, Artificial Sequence
  Description of Artificial Sequence: Synthetic oligonucleotide
aagaucguaauguucaggg

SEQ ID NO: 59593 - RNA, 19 nt, Artificial Sequence
  Description of Artificial Sequence: Synthetic oligonucleotide
uauuuauuacccuauaucu

SEQ ID NO: 59594 - RNA, 19 nt, Artificial Sequence
  Description of Artificial Sequence: Synthetic oligonucleotide
auucuuguaucacagggcc

SEQ ID NO: 59595 - RNA, 19 nt, Artificial Sequence
  Description of Artificial Sequence: Synthetic oligonucleotide
uguuauacaaguauauuac

SEQ ID NO: 59596 - RNA, 19 nt, Artificial Sequence
  Description of Artificial Sequence: Synthetic oligonucleotide
ugaugcaguaguauuaacg

SEQ ID NO: 59597 - RNA, 19 nt, Artificial Sequence
  Description of Artificial Sequence: Synthetic oligonucleotide
ucuagaaguagaaaagaag

SEQ ID NO: 59598 - RNA, 19 nt, Artificial Sequence
  Description of Artificial Sequence: Synthetic oligonucleotide
uaaccaaccaggcagaccc

SEQ ID NO: 59599 - RNA, 19 nt, Artificial Sequence
  Description of Artificial Sequence: Synthetic oligonucleotide
uuauuaaucacaaguccag

SEQ ID NO: 59600 - RNA, 19 nt, Artificial Sequence
  Description of Artificial Sequence: Synthetic oligonucleotide
acucgaacaaugcaaaugg

SEQ ID NO: 59601 - RNA, 19 nt, Artificial Sequence
  Description of Artificial Sequence: Synthetic oligonucleotide
agauucuuguaucacaggg

SEQ ID NO: 59602 - RNA, 19 nt, Artificial Sequence
  Description of Artificial Sequence: Synthetic oligonucleotide
aaauuuaauucgauugccc

SEQ ID NO: 59603 - RNA, 19 nt, Artificial Sequence
  Description of Artificial Sequence: Synthetic oligonucleotide
aauucgauugcccacuuga

SEQ ID NO: 59604 - RNA, 19 nt, Artificial Sequence
  Description of Artificial Sequence: Synthetic oligonucleotide
gaucuuauugcucccacgg

SEQ ID NO: 59605 - RNA, 19 nt, Artificial Sequence
  Description of Artificial Sequence: Synthetic oligonucleotide
agacuaaccaaccaggcag

SEQ ID NO: 59606 - RNA, 19 nt, Artificial Sequence
  Description of Artificial Sequence: Synthetic oligonucleotide
guaauauccucucaaggcg

SEQ ID NO: 59607 - RNA, 19 nt, Artificial Sequence
  Description of Artificial Sequence: Synthetic oligonucleotide
aaaucuaagaguugucccu

SEQ ID NO: 59608 - RNA, 19 nt, Artificial Sequence
  Description of Artificial Sequence: Synthetic oligonucleotide
ugcaguaguauuaacgcug

SEQ ID NO: 59609 - RNA, 19 nt, Artificial Sequence
  Description of Artificial Sequence: Synthetic oligonucleotide
ugcuaaagcaugcacacca

SEQ ID NO: 59610 - RNA, 19 nt, Artificial Sequence
  Description of Artificial Sequence: Synthetic oligonucleotide
aauagccucaccaaacuuc

SEQ ID NO: 59611 - RNA, 19 nt, Artificial Sequence
  Description of Artificial Sequence: Synthetic oligonucleotide
gaucguaauguucagggug

SEQ ID NO: 59612 - RNA, 19 nt, Artificial Sequence
  Description of Artificial Sequence: Synthetic oligonucleotide
uggcuuaucaagcuguaag

SEQ ID NO: 59613 - RNA, 19 nt, Artificial Sequence
  Description of Artificial Sequence: Synthetic oligonucleotide
aaggcguggaaucccaaac

SEQ ID NO: 59614 - RNA, 19 nt, Artificial Sequence
  Description of Artificial Sequence: Synthetic oligonucleotide
ugcgaaauccuucuagugc

SEQ ID NO: 59615 - RNA, 19 nt, Artificial Sequence
  Description of Artificial Sequence: Synthetic oligonucleotide
uuugguaugguacagccuu

SEQ ID NO: 59616 - RNA, 19 nt, Artificial Sequence
  Description of Artificial Sequence: Synthetic oligonucleotide
uccacuucaagguugcaag

SEQ ID NO: 59617 - RNA, 19 nt, Artificial Sequence
  Description of Artificial Sequence: Synthetic oligonucleotide
ucuuaugcaucucugccgc

SEQ ID NO: 59618 - RNA, 19 nt, Artificial Sequence
  Description of Artificial Sequence: Synthetic oligonucleotide
ucgauugcccacuugaaug

SEQ ID NO: 59619 - RNA, 19 nt, Artificial Sequence
  Description of Artificial Sequence: Synthetic oligonucleotide
uucaacgcaauauuuuaca

SEQ ID NO: 59620 - RNA, 19 nt, Artificial Sequence
  Description of Artificial Sequence: Synthetic oligonucleotide
auuugccuaaagcuuuccc

SEQ ID NO: 59621 - RNA, 19 nt, Artificial Sequence
  Description of Artificial Sequence: Synthetic oligonucleotide
aaagaagguuuguauagaa

SEQ ID NO: 59622 - RNA, 19 nt, Artificial Sequence
  Description of Artificial Sequence: Synthetic oligonucleotide
gaaccauuggucuggguag

SEQ ID NO: 59623 - RNA, 19 nt, Artificial Sequence
  Description of Artificial Sequence: Synthetic oligonucleotide
ucuuauugcucccacggac

SEQ ID NO: 59624 - RNA, 19 nt, Artificial Sequence
  Description of Artificial Sequence: Synthetic oligonucleotide
uaucugaugccaucacucg

SEQ ID NO: 59625 - RNA, 19 nt, Artificial Sequence
  Description of Artificial Sequence: Synthetic oligonucleotide
accaagguguuucuuuggc

SEQ ID NO: 59626 - RNA, 19 nt, Artificial Sequence
  Description of Artificial Sequence: Synthetic oligonucleotide
caucacucgaccaccaagg

SEQ ID NO: 59627 - RNA, 19 nt, Artificial Sequence
  Description of Artificial Sequence: Synthetic oligonucleotide
uguggguucagucuucacu

SEQ ID NO: 59628 - RNA, 19 nt, Artificial Sequence
  Description of Artificial Sequence: Synthetic oligonucleotide
gguuauuaaucacaagucc

SEQ ID NO: 59629 - RNA, 19 nt, Artificial Sequence
  Description of Artificial Sequence: Synthetic oligonucleotide
uccuuuacugucacagcgg

SEQ ID NO: 59630 - RNA, 19 nt, Artificial Sequence
  Description of Artificial Sequence: Synthetic oligonucleotide
aguaggacacuacuagcuc

SEQ ID NO: 59631 - RNA, 19 nt, Artificial Sequence
  Description of Artificial Sequence: Synthetic oligonucleotide
aacaucguggugccacuac

SEQ ID NO: 59632 - RNA, 19 nt, Artificial Sequence
  Description of Artificial Sequence: Synthetic oligonucleotide
gauuccauaccacgagggg

SEQ ID NO: 59633 - RNA, 19 nt, Artificial Sequence
  Description of Artificial Sequence: Synthetic oligonucleotide
aaucacaaagcggauccuc

SEQ ID NO: 59634 - RNA, 19 nt, Artificial Sequence
  Description of Artificial Sequence: Synthetic oligonucleotide
agaaaugauuuucaauaga

SEQ ID NO: 59635 - RNA, 19 nt, Artificial Sequence
  Description of Artificial Sequence: Synthetic oligonucleotide
uggagcuuagucaaaggcu

SEQ ID NO: 59636 - RNA, 19 nt, Artificial Sequence
  Description of Artificial Sequence: Synthetic oligonucleotide
agcguacuuucuuucaaac

SEQ ID NO: 59637 - RNA, 19 nt, Artificial Sequence
  Description of Artificial Sequence: Synthetic oligonucleotide
caaauuuaauucgauugcc

SEQ ID NO: 59638 - RNA, 19 nt, Artificial Sequence
  Description of Artificial Sequence: Synthetic oligonucleotide
cuguacgggacuuucacag

SEQ ID NO: 59639 - RNA, 19 nt, Artificial Sequence
  Description of Artificial Sequence: Synthetic oligonucleotide
caguaauauccucucaagg

SEQ ID NO: 59640 - RNA, 19 nt, Artificial Sequence
  Description of Artificial Sequence: Synthetic oligonucleotide
uucacggccuguuuaaggc

SEQ ID NO: 59641 - RNA, 19 nt, Artificial Sequence
  Description of Artificial Sequence: Synthetic oligonucleotide
uucguggucguuuugggga

SEQ ID NO: 59642 - RNA, 19 nt, Artificial Sequence
  Description of Artificial Sequence: Synthetic oligonucleotide
aaucuaagauccuucucau

SEQ ID NO: 59643 - RNA, 19 nt, Artificial Sequence
  Description of Artificial Sequence: Synthetic oligonucleotide
uaauauccucucaaggcga

SEQ ID NO: 59644 - RNA, 19 nt, Artificial Sequence
  Description of Artificial Sequence: Synthetic oligonucleotide
gauuuugcuagccauccca

SEQ ID NO: 59645 - RNA, 19 nt, Artificial Sequence
  Description of Artificial Sequence: Synthetic oligonucleotide
aucguaauguucagggugc

SEQ ID NO: 59646 - RNA, 19 nt, Artificial Sequence
  Description of Artificial Sequence: Synthetic oligonucleotide
uccgcucaguaucugaugc

SEQ ID NO: 59647 - RNA, 19 nt, Artificial Sequence
  Description of Artificial Sequence: Synthetic oligonucleotide
auagccucaccaaacuucc

SEQ ID NO: 59648 - RNA, 19 nt, Artificial Sequence
  Description of Artificial Sequence: Synthetic oligonucleotide
guuauuaaucacaagucca

SEQ ID NO: 59649 - RNA, 19 nt, Artificial Sequence
  Description of Artificial Sequence: Synthetic oligonucleotide
aguguugauuuugcuagcc

SEQ ID NO: 59650 - RNA, 19 nt, Artificial Sequence
  Description of Artificial Sequence: Synthetic oligonucleotide
ucugaugccaucacucgac

SEQ ID NO: 59651 - RNA, 19 nt, Artificial Sequence
  Description of Artificial Sequence: Synthetic oligonucleotide
ggaauugucaccugaauga

SEQ ID NO: 59652 - RNA, 19 nt, Artificial Sequence
  Description of Artificial Sequence: Synthetic oligonucleotide
ucuucaacgcaauauuuua

SEQ ID NO: 59653 - RNA, 19 nt, Artificial Sequence
  Description of Artificial Sequence: Synthetic oligonucleotide
gaacauuugaaccauuggu

SEQ ID NO: 59654 - RNA, 19 nt, Artificial Sequence
  Description of Artificial Sequence: Synthetic oligonucleotide
ugugauuuuggcguuccag

SEQ ID NO: 59655 - RNA, 19 nt, Artificial Sequence
  Description of Artificial Sequence: Synthetic oligonucleotide
uuuuauagcuugagcguac

SEQ ID NO: 59656 - RNA, 19 nt, Artificial Sequence
  Description of Artificial Sequence: Synthetic oligonucleotide
ugggauuccauaccacgag

SEQ ID NO: 59657 - RNA, 19 nt, Artificial Sequence
  Description of Artificial Sequence: Synthetic oligonucleotide
ugaucuuauugcucccacg

SEQ ID NO: 59658 - RNA, 19 nt, Artificial Sequence
  Description of Artificial Sequence: Synthetic oligonucleotide
aacgguggagguuugcgga

SEQ ID NO: 59659 - RNA, 19 nt, Artificial Sequence
  Description of Artificial Sequence: Synthetic oligonucleotide
aagguugcaagaucguaau

SEQ ID NO: 59660 - RNA, 19 nt, Artificial Sequence
  Description of Artificial Sequence: Synthetic oligonucleotide
gauuuuggcguuccaggcc

SEQ ID NO: 59661 - RNA, 19 nt, Artificial Sequence
  Description of Artificial Sequence: Synthetic oligonucleotide
uugcuuucgaagcuuggug

SEQ ID NO: 59662 - RNA, 19 nt, Artificial Sequence
  Description of Artificial Sequence: Synthetic oligonucleotide
aggcguggaaucccaaacc

SEQ ID NO: 59663 - RNA, 19 nt, Artificial Sequence
  Description of Artificial Sequence: Synthetic oligonucleotide
acauacagaaacucugggu

SEQ ID NO: 59664 - RNA, 19 nt, Artificial Sequence
  Description of Artificial Sequence: Synthetic oligonucleotide
acaccccguauuuacuugc

SEQ ID NO: 59665 - RNA, 19 nt, Artificial Sequence
  Description of Artificial Sequence: Synthetic oligonucleotide
ucaacuugcuuccguaggu

SEQ ID NO: 59666 - RNA, 19 nt, Artificial Sequence
  Description of Artificial Sequence: Synthetic oligonucleotide
gaaggggaucccuucaggc

SEQ ID NO: 59667 - RNA, 19 nt, Artificial Sequence
  Description of Artificial Sequence: Synthetic oligonucleotide
aagaagguuuguauagaag

SEQ ID NO: 59668 - RNA, 19 nt, Artificial Sequence
  Description of Artificial Sequence: Synthetic oligonucleotide
auuuuggcguuccaggccu

SEQ ID NO: 59669 - RNA, 19 nt, Artificial Sequence
  Description of Artificial Sequence: Synthetic oligonucleotide
ugaguguuucaauuucuac

SEQ ID NO: 59670 - RNA, 19 nt, Artificial Sequence
  Description of Artificial Sequence: Synthetic oligonucleotide
ugcuagccaucccaggagg

SEQ ID NO: 59671 - RNA, 19 nt, Artificial Sequence
  Description of Artificial Sequence: Synthetic oligonucleotide
aguaguauuaacgcugggu

SEQ ID NO: 59672 - RNA, 19 nt, Artificial Sequence
  Description of Artificial Sequence: Synthetic oligonucleotide
uacccuauaucuacaauuu

SEQ ID NO: 59673 - RNA, 19 nt, Artificial Sequence
  Description of Artificial Sequence: Synthetic oligonucleotide
gaacgguggagguuugcgg

SEQ ID NO: 59674 - RNA, 19 nt, Artificial Sequence
  Description of Artificial Sequence: Synthetic oligonucleotide
auauaauuucccauuguga

SEQ ID NO: 59675 - RNA, 19 nt, Artificial Sequence
  Description of Artificial Sequence: Synthetic oligonucleotide
cuucaacgcaauauuuuac

SEQ ID NO: 59676 - RNA, 19 nt, Artificial Sequence
  Description of Artificial Sequence: Synthetic oligonucleotide
cucuuaaugaugaacgaaa

SEQ ID NO: 59677 - RNA, 19 nt, Artificial Sequence
  Description of Artificial Sequence: Synthetic oligonucleotide
agaacugcugagaaaguag

SEQ ID NO: 59678 - RNA, 19 nt, Artificial Sequence
  Description of Artificial Sequence: Synthetic oligonucleotide
ugcguacuucaauucacag

SEQ ID NO: 59679 - RNA, 19 nt, Artificial Sequence
  Description of Artificial Sequence: Synthetic oligonucleotide
aguauauuacagagcuggc

SEQ ID NO: 59680 - RNA, 19 nt, Artificial Sequence
  Description of Artificial Sequence: Synthetic oligonucleotide
caaagucuaccacguaggg

SEQ ID NO: 59681 - RNA, 19 nt, Artificial Sequence
  Description of Artificial Sequence: Synthetic oligonucleotide
gaggguaugggaucgucac

SEQ ID NO: 59682 - RNA, 19 nt, Artificial Sequence
  Description of Artificial Sequence: Synthetic oligonucleotide
uauuacccuauaucuacaa

SEQ ID NO: 59683 - RNA, 19 nt, Artificial Sequence
  Description of Artificial Sequence: Synthetic oligonucleotide
cagucuugggauuccauac

SEQ ID NO: 59684 - RNA, 19 nt, Artificial Sequence
  Description of Artificial Sequence: Synthetic oligonucleotide
cugauaguaaucaggaucu

SEQ ID NO: 59685 - RNA, 19 nt, Artificial Sequence
  Description of Artificial Sequence: Synthetic oligonucleotide
uuuugguaugguacagccu

SEQ ID NO: 59686 - RNA, 19 nt, Artificial Sequence
  Description of Artificial Sequence: Synthetic oligonucleotide
uacuugcugccaaguaagg

SEQ ID NO: 59687 - RNA, 19 nt, Artificial Sequence
  Description of Artificial Sequence: Synthetic oligonucleotide
uauagcuugagcguacuuu

SEQ ID NO: 59688 - RNA, 19 nt, Artificial Sequence
  Description of Artificial Sequence: Synthetic oligonucleotide
cuaucuuugcuaccgugug

SEQ ID NO: 59689 - RNA, 19 nt, Artificial Sequence
  Description of Artificial Sequence: Synthetic oligonucleotide
aaagucuaccacguagggu

SEQ ID NO: 59690 - RNA, 19 nt, Artificial Sequence
  Description of Artificial Sequence: Synthetic oligonucleotide
aucgucaccggaccuuugg

SEQ ID NO: 59691 - RNA, 19 nt, Artificial Sequence
  Description of Artificial Sequence: Synthetic oligonucleotide
uccuguacgggacuuucac

SEQ ID NO: 59692 - RNA, 19 nt, Artificial Sequence
  Description of Artificial Sequence: Synthetic oligonucleotide
aauauccucucaaggcgag

SEQ ID NO: 59693 - RNA, 19 nt, Artificial Sequence
  Description of Artificial Sequence: Synthetic oligonucleotide
acguagcaucuucucauac

SEQ ID NO: 59694 - RNA, 19 nt, Artificial Sequence
  Description of Artificial Sequence: Synthetic oligonucleotide
ggaguaaucaucaucuuga

SEQ ID NO: 59695 - RNA, 19 nt, Artificial Sequence
  Description of Artificial Sequence: Synthetic oligonucleotide
aauggucuaaugacaguga

SEQ ID NO: 59696 - RNA, 19 nt, Artificial Sequence
  Description of Artificial Sequence: Synthetic oligonucleotide
uaggaguucgaacggugga

SEQ ID NO: 59697 - RNA, 19 nt, Artificial Sequence
  Description of Artificial Sequence: Synthetic oligonucleotide
uuuagucaucagcugcuaa

SEQ ID NO: 59698 - RNA, 19 nt, Artificial Sequence
  Description of Artificial Sequence: Synthetic oligonucleotide
uggucuaaugacagugaac

SEQ ID NO: 59699 - RNA, 19 nt, Artificial Sequence
  Description of Artificial Sequence: Synthetic oligonucleotide
gaugcgugcauuccauuuc

SEQ ID NO: 59700 - RNA, 19 nt, Artificial Sequence
  Description of Artificial Sequence: Synthetic oligonucleotide
augccguauguugauggcc

SEQ ID NO: 59701 - RNA, 19 nt, Artificial Sequence
  Description of Artificial Sequence: Synthetic oligonucleotide
caccugaaugauguuaagg

SEQ ID NO: 59702 - RNA, 19 nt, Artificial Sequence
  Description of Artificial Sequence: Synthetic oligonucleotide
ugugaugcgugcauuccau

SEQ ID NO: 59703 - RNA, 19 nt, Artificial Sequence
  Description of Artificial Sequence: Synthetic oligonucleotide
aggugguuagagacuaacc

SEQ ID NO: 59704 - RNA, 19 nt, Artificial Sequence
  Description of Artificial Sequence: Synthetic oligonucleotide
uguuaaggucuuccacacc

SEQ ID NO: 59705 - RNA, 19 nt, Artificial Sequence
  Description of Artificial Sequence: Synthetic oligonucleotide
cuucguggucguuuugggg

SEQ ID NO: 59706 - RNA, 19 nt, Artificial Sequence
  Description of Artificial Sequence: Synthetic oligonucleotide
acuugcugccaaguaaggg

SEQ ID NO: 59707 - RNA, 19 nt, Artificial Sequence
  Description of Artificial Sequence: Synthetic oligonucleotide
aacgaaauccccgccuugu

SEQ ID NO: 59708 - RNA, 19 nt, Artificial Sequence
  Description of Artificial Sequence: Synthetic oligonucleotide
uauuaacgcugggugauga

SEQ ID NO: 59709 - RNA, 19 nt, Artificial Sequence
  Description of Artificial Sequence: Synthetic oligonucleotide
ucuuguaucacagggccuu

SEQ ID NO: 59710 - RNA, 19 nt, Artificial Sequence
  Description of Artificial Sequence: Synthetic oligonucleotide
ugaaaggcauggauggauu

SEQ ID NO: 59711 - RNA, 19 nt, Artificial Sequence
  Description of Artificial Sequence: Synthetic oligonucleotide
uuaacgcugggugaugagu

SEQ ID NO: 59712 - RNA, 19 nt, Artificial Sequence
  Description of Artificial Sequence: Synthetic oligonucleotide
caaauggcacuuucacggc

SEQ ID NO: 59713 - RNA, 19 nt, Artificial Sequence
  Description of Artificial Sequence: Synthetic oligonucleotide
caagaucguaauguucagg

SEQ ID NO: 59714 - RNA, 19 nt, Artificial Sequence
  Description of Artificial Sequence: Synthetic oligonucleotide
cucgaacaaugcaaauggc

SEQ ID NO: 59715 - RNA, 19 nt, Artificial Sequence
  Description of Artificial Sequence: Synthetic oligonucleotide
auuaacgcugggugaugag

SEQ ID NO: 59716 - RNA, 19 nt, Artificial Sequence
  Description of Artificial Sequence: Synthetic oligonucleotide
auaacaaauuuaauucgau

SEQ ID NO: 59717 - RNA, 19 nt, Artificial Sequence
  Description of Artificial Sequence: Synthetic oligonucleotide
uuugcuaccgugugauaua

SEQ ID NO: 59718 - RNA, 19 nt, Artificial Sequence
  Description of Artificial Sequence: Synthetic oligonucleotide
uuugaucgggccacaacuu

SEQ ID NO: 59719 - RNA, 19 nt, Artificial Sequence
  Description of Artificial Sequence: Synthetic oligonucleotide
ucugugaugcgugcauucc

SEQ ID NO: 59720 - RNA, 19 nt, Artificial Sequence
  Description of Artificial Sequence: Synthetic oligonucleotide
cuuauugcucccacggaca

SEQ ID NO: 59721 - RNA, 19 nt, Artificial Sequence
  Description of Artificial Sequence: Synthetic oligonucleotide
ucgaccaccaagguguuuc

SEQ ID NO: 59722 - RNA, 19 nt, Artificial Sequence
  Description of Artificial Sequence: Synthetic oligonucleotide
ggguuuagucaucagcugc

SEQ ID NO: 59723 - RNA, 19 nt, Artificial Sequence
  Description of Artificial Sequence: Synthetic oligonucleotide
uuugcgcuugccagcguug

SEQ ID NO: 59724 - RNA, 19 nt, Artificial Sequence
  Description of Artificial Sequence: Synthetic oligonucleotide
guaggaguucgaacggugg

SEQ ID NO: 59725 - RNA, 19 nt, Artificial Sequence
  Description of Artificial Sequence: Synthetic oligonucleotide
uaauucgauugcccacuug

SEQ ID NO: 59726 - RNA, 19 nt, Artificial Sequence
  Description of Artificial Sequence: Synthetic oligonucleotide
uaacgcugggugaugaguu

SEQ ID NO: 59727 - RNA, 19 nt, Artificial Sequence
  Description of Artificial Sequence: Synthetic oligonucleotide
ggguaugggaucgucaccg

SEQ ID NO: 59728 - RNA, 19 nt, Artificial Sequence
  Description of Artificial Sequence: Synthetic oligonucleotide
aucucgucacgcugcguac

SEQ ID NO: 59729 - RNA, 19 nt, Artificial Sequence
  Description of Artificial Sequence: Synthetic oligonucleotide
gaaauccccgccuuguucu

SEQ ID NO: 59730 - RNA, 19 nt, Artificial Sequence
  Description of Artificial Sequence: Synthetic oligonucleotide
uacaccccguauuuacuug

SEQ ID NO: 59731 - RNA, 19 nt, Artificial Sequence
  Description of Artificial Sequence: Synthetic oligonucleotide
guauauuacagagcuggca

SEQ ID NO: 59732 - RNA, 19 nt, Artificial Sequence
  Description of Artificial Sequence: Synthetic oligonucleotide
aggcaaguaggacacuacu

SEQ ID NO: 59733 - RNA, 19 nt, Artificial Sequence
  Description of Artificial Sequence: Synthetic oligonucleotide
aggguuuagucaucagcug

SEQ ID NO: 59734 - RNA, 19 nt, Artificial Sequence
  Description of Artificial Sequence: Synthetic oligonucleotide
ucguggugccacuacugag

SEQ ID NO: 59735 - RNA, 19 nt, Artificial Sequence
  Description of Artificial Sequence: Synthetic oligonucleotide
uugaucgggccacaacuuc

SEQ ID NO: 59736 - RNA, 19 nt, Artificial Sequence
  Description of Artificial Sequence: Synthetic oligonucleotide
agaucguaauguucagggu

SEQ ID NO: 59737 - RNA, 19 nt, Artificial Sequence
  Description of Artificial Sequence: Synthetic oligonucleotide
acuuucacggccuguuuaa

SEQ ID NO: 59738 - RNA, 19 nt, Artificial Sequence
  Description of Artificial Sequence: Synthetic oligonucleotide
caagguugcaagaucguaa

SEQ ID NO: 59739 - RNA, 19 nt, Artificial Sequence
  Description of Artificial Sequence: Synthetic oligonucleotide
caauuugagguaaaauaua

SEQ ID NO: 59740 - RNA, 19 nt, Artificial Sequence
  Description of Artificial Sequence: Synthetic oligonucleotide
ucuaccacguagggucugg

SEQ ID NO: 59741 - RNA, 19 nt, Artificial Sequence
  Description of Artificial Sequence: Synthetic oligonucleotide
ggucuaaugacagugaacu

SEQ ID NO: 59742 - RNA, 19 nt, Artificial Sequence
  Description of Artificial Sequence: Synthetic oligonucleotide
cugcgaaauccuucuagug

SEQ ID NO: 59743 - RNA, 19 nt, Artificial Sequence
  Description of Artificial Sequence: Synthetic oligonucleotide
uugguaugguacagccuug

SEQ ID NO: 59744 - RNA, 19 nt, Artificial Sequence
  Description of Artificial Sequence: Synthetic oligonucleotide
gcucauccgauuugcaggg

SEQ ID NO: 59745 - RNA, 19 nt, Artificial Sequence
  Description of Artificial Sequence: Synthetic oligonucleotide
ggucuuccacaccugaugc

SEQ ID NO: 59746 - RNA, 19 nt, Artificial Sequence
  Description of Artificial Sequence: Synthetic oligonucleotide
uaucaagcuguaagucuuc

SEQ ID NO: 59747 - RNA, 19 nt, Artificial Sequence
  Description of Artificial Sequence: Synthetic oligonucleotide
cauacagaaacucuggguu

SEQ ID NO: 59748 - RNA, 19 nt, Artificial Sequence
  Description of Artificial Sequence: Synthetic oligonucleotide
ggauuccauaccacgaggg

SEQ ID NO: 59749 - RNA, 19 nt, Artificial Sequence
  Description of Artificial Sequence: Synthetic oligonucleotide
cuuugaucgggccacaacu

SEQ ID NO: 59750 - RNA, 19 nt, Artificial Sequence
  Description of Artificial Sequence: Synthetic oligonucleotide
gagaaaguagacauuucua

SEQ ID NO: 59751 - RNA, 19 nt, Artificial Sequence
  Description of Artificial Sequence: Synthetic oligonucleotide
aaggcauggauggauuuua

SEQ ID NO: 59752 - RNA, 19 nt, Artificial Sequence
  Description of Artificial Sequence: Synthetic oligonucleotide
augcgugcauuccauuucu

SEQ ID NO: 59753 - RNA, 19 nt, Artificial Sequence
  Description of Artificial Sequence: Synthetic oligonucleotide
ugcccaguaggaauaucuc

SEQ ID NO: 59754 - RNA, 19 nt, Artificial Sequence
  Description of Artificial Sequence: Synthetic oligonucleotide
cguggaaucccaaaccagg

SEQ ID NO: 59755 - RNA, 19 nt, Artificial Sequence
  Description of Artificial Sequence: Synthetic oligonucleotide
aggaguucgaacgguggag

SEQ ID NO: 59756 - RNA, 19 nt, Artificial Sequence
  Description of Artificial Sequence: Synthetic oligonucleotide
acuaaccaaccaggcagac

SEQ ID NO: 59757 - RNA, 19 nt, Artificial Sequence
  Description of Artificial Sequence: Synthetic oligonucleotide
aucccaauagccucaccaa

SEQ ID NO: 59758 - RNA, 19 nt, Artificial Sequence
  Description of Artificial Sequence: Synthetic oligonucleotide
aucguggugccacuacuga

SEQ ID NO: 59759 - RNA, 19 nt, Artificial Sequence
  Description of Artificial Sequence: Synthetic oligonucleotide
gaacgaaauccccgccuug

SEQ ID NO: 59760 - RNA, 19 nt, Artificial Sequence
  Description of Artificial Sequence: Synthetic oligonucleotide
gaacugauuuccagguaac

SEQ ID NO: 59761 - RNA, 19 nt, Artificial Sequence
  Description of Artificial Sequence: Synthetic oligonucleotide
acgcugcguacuucaauuc

SEQ ID NO: 59762 - RNA, 19 nt, Artificial Sequence
  Description of Artificial Sequence: Synthetic oligonucleotide
ucgucaccggaccuuuggc

SEQ ID NO: 59763 - RNA, 19 nt, Artificial Sequence
  Description of Artificial Sequence: Synthetic oligonucleotide
uuuacuccugaugcuggcu

SEQ ID NO: 59764 - RNA, 19 nt, Artificial Sequence
  Description of Artificial Sequence: Synthetic oligonucleotide
uacugauaguaaucaggau

SEQ ID NO: 59765 - RNA, 19 nt, Artificial Sequence
  Description of Artificial Sequence: Synthetic oligonucleotide
agcauccacgcucauccga

SEQ ID NO: 59766 - RNA, 19 nt, Artificial Sequence
  Description of Artificial Sequence: Synthetic oligonucleotide
aaggcgaggaaugccguau

SEQ ID NO: 59767 - RNA, 19 nt, Artificial Sequence
  Description of Artificial Sequence: Synthetic oligonucleotide
uacgggacuuucacaggga

SEQ ID NO: 59768 - RNA, 19 nt, Artificial Sequence
  Description of Artificial Sequence: Synthetic oligonucleotide
cacuuugcgcuugccagcg

SEQ ID NO: 59769 - RNA, 19 nt, Artificial Sequence
  Description of Artificial Sequence: Synthetic oligonucleotide
cucucaaggcguggaaucc

SEQ ID NO: 59770 - RNA, 19 nt, Artificial Sequence
  Description of Artificial Sequence: Synthetic oligonucleotide
gcaguaguauuaacgcugg

SEQ ID NO: 59771 - RNA, 19 nt, Artificial Sequence
  Description of Artificial Sequence: Synthetic oligonucleotide
agccggggaggguuuaguc

SEQ ID NO: 59772 - RNA, 19 nt, Artificial Sequence
  Description of Artificial Sequence: Synthetic oligonucleotide
cccuauaucuacaauuuga

SEQ ID NO: 59773 - RNA, 19 nt, Artificial Sequence
  Description of Artificial Sequence: Synthetic oligonucleotide
guaggucugugaugcgugc

SEQ ID NO: 59774 - RNA, 19 nt, Artificial Sequence
  Description of Artificial Sequence: Synthetic oligonucleotide
uuaaggccaagagcuuccc

SEQ ID NO: 59775 - RNA, 19 nt, Artificial Sequence
  Description of Artificial Sequence: Synthetic oligonucleotide
uccgauuugcagggguugc

SEQ ID NO: 59776 - RNA, 19 nt, Artificial Sequence
  Description of Artificial Sequence: Synthetic oligonucleotide
uuccuguacgggacuuuca

SEQ ID NO: 59777 - RNA, 19 nt, Artificial Sequence
  Description of Artificial Sequence: Synthetic oligonucleotide
aucacucgaccaccaaggu

SEQ ID NO: 59778 - RNA, 19 nt, Artificial Sequence
  Description of Artificial Sequence: Synthetic oligonucleotide
agguugcaagaucguaaug

SEQ ID NO: 59779 - RNA, 19 nt, Artificial Sequence
  Description of Artificial Sequence: Synthetic oligonucleotide
agucuuccgggaaggacuc

SEQ ID NO: 59780 - RNA, 19 nt, Artificial Sequence
  Description of Artificial Sequence: Synthetic oligonucleotide
cugugagucaggaguucug

SEQ ID NO: 59781 - RNA, 19 nt, Artificial Sequence
  Description of Artificial Sequence: Synthetic oligonucleotide
cucucaaggcgaggaaugc

SEQ ID NO: 59782 - RNA, 19 nt, Artificial Sequence
  Description of Artificial Sequence: Synthetic oligonucleotide
caggugguuagagacuaac

SEQ ID NO: 59783 - RNA, 19 nt, Artificial Sequence
  Description of Artificial Sequence: Synthetic oligonucleotide
cgcucauccgauuugcagg

SEQ ID NO: 59784 - RNA, 19 nt, Artificial Sequence
  Description of Artificial Sequence: Synthetic oligonucleotide
gguugcaagaucguaaugu

SEQ ID NO: 59785 - RNA, 19 nt, Artificial Sequence
  Description of Artificial Sequence: Synthetic oligonucleotide
ggaaggacucgaacaaugc

SEQ ID NO: 59786 - RNA, 19 nt, Artificial Sequence
  Description of Artificial Sequence: Synthetic oligonucleotide
gggguugcagauuucaucu

SEQ ID NO: 59787 - RNA, 19 nt, Artificial Sequence
  Description of Artificial Sequence: Synthetic oligonucleotide
aaccugcagacaaagucua

SEQ ID NO: 59788 - RNA, 19 nt, Artificial Sequence
  Description of Artificial Sequence: Synthetic oligonucleotide
accuccgaccaucagggua

SEQ ID NO: 59789 - RNA, 19 nt, Artificial Sequence
  Description of Artificial Sequence: Synthetic oligonucleotide
gguuugauucgaacacggg

SEQ ID NO: 59790 - RNA, 19 nt, Artificial Sequence
  Description of Artificial Sequence: Synthetic oligonucleotide
caguaguauuaacgcuggg

SEQ ID NO: 59791 - RNA, 19 nt, Artificial Sequence
  Description of Artificial Sequence: Synthetic oligonucleotide
auauccucucaaggcgagg

SEQ ID NO: 59792 - RNA, 19 nt, Artificial Sequence
  Description of Artificial Sequence: Synthetic oligonucleotide
gcuaugguggggcccagcc

SEQ ID NO: 59793 - RNA, 19 nt, Artificial Sequence
  Description of Artificial Sequence: Synthetic oligonucleotide
uaccacgaggggcuucgga

SEQ ID NO: 59794 - RNA, 19 nt, Artificial Sequence
  Description of Artificial Sequence: Synthetic oligonucleotide
uaccacguagggucuggcu

SEQ ID NO: 59795 - RNA, 19 nt, Artificial Sequence
  Description of Artificial Sequence: Synthetic oligonucleotide
uugcuaccgugugauauaa

SEQ ID NO: 59796 - RNA, 19 nt, Artificial Sequence
  Description of Artificial Sequence: Synthetic oligonucleotide
aucaggguacaccccguau

SEQ ID NO: 59797 - RNA, 19 nt, Artificial Sequence
  Description of Artificial Sequence: Synthetic oligonucleotide
gcaagaucguaauguucag

SEQ ID NO: 59798 - RNA, 19 nt, Artificial Sequence
  Description of Artificial Sequence: Synthetic oligonucleotide
uccucucaaggcgaggaau

SEQ ID NO: 59799 - RNA, 19 nt, Artificial Sequence
  Description of Artificial Sequence: Synthetic oligonucleotide
aggggcuucggaaaggaau

SEQ ID NO: 59800 - RNA, 19 nt, Artificial Sequence
  Description of Artificial Sequence: Synthetic oligonucleotide
gcuggaacuuccaacuggc

SEQ ID NO: 59801 - RNA, 19 nt, Artificial Sequence
  Description of Artificial Sequence: Synthetic oligonucleotide
ugggaucgucaccggaccu

SEQ ID NO: 59802 - RNA, 19 nt, Artificial Sequence
  Description of Artificial Sequence: Synthetic oligonucleotide
aggacucgaacaaugcaaa

SEQ ID NO: 59803 - RNA, 19 nt, Artificial Sequence
  Description of Artificial Sequence: Synthetic oligonucleotide
ccuccgaccaucaggguac

SEQ ID NO: 59804 - RNA, 19 nt, Artificial Sequence
  Description of Artificial Sequence: Synthetic oligonucleotide
cugcguacuucaauucaca

SEQ ID NO: 59805 - RNA, 19 nt, Artificial Sequence
  Description of Artificial Sequence: Synthetic oligonucleotide
cuuccuguacgggacuuuc

SEQ ID NO: 59806 - RNA, 19 nt, Artificial Sequence
  Description of Artificial Sequence: Synthetic oligonucleotide
gguaugggaucgucaccgg

SEQ ID NO: 59807 - RNA, 19 nt, Artificial Sequence
  Description of Artificial Sequence: Synthetic oligonucleotide
uucgaacgguggagguuug

SEQ ID NO: 59808 - RNA, 19 nt, Artificial Sequence
  Description of Artificial Sequence: Synthetic oligonucleotide
uguguucguccguggcuga

SEQ ID NO: 59809 - RNA, 19 nt, Artificial Sequence
  Description of Artificial Sequence: Synthetic oligonucleotide
caaaccagccaggcacgcg

SEQ ID NO: 59810 - RNA, 19 nt, Artificial Sequence
  Description of Artificial Sequence: Synthetic oligonucleotide
cuugaucuuauugcuccca

SEQ ID NO: 59811 - RNA, 19 nt, Artificial Sequence
  Description of Artificial Sequence: Synthetic oligonucleotide
guaugggaucgucaccgga

SEQ ID NO: 59812 - RNA, 19 nt, Artificial Sequence
  Description of Artificial Sequence: Synthetic oligonucleotide
guauuaacgcugggugaug

SEQ ID NO: 59813 - RNA, 19 nt, Artificial Sequence
  Description of Artificial Sequence: Synthetic oligonucleotide
agaggguaugggaucguca

SEQ ID NO: 59814 - RNA, 19 nt, Artificial Sequence
  Description of Artificial Sequence: Synthetic oligonucleotide
ggggcuucggaaaggaaug

SEQ ID NO: 59815 - RNA, 19 nt, Artificial Sequence
  Description of Artificial Sequence: Synthetic oligonucleotide
gguaggaguucgaacggug

SEQ ID NO: 59816 - RNA, 19 nt, Artificial Sequence
  Description of Artificial Sequence: Synthetic oligonucleotide
caucucgucacgcugcgua

SEQ ID NO: 59817 - RNA, 19 nt, Artificial Sequence
  Description of Artificial Sequence: Synthetic oligonucleotide
gguaugguacagccuuggc

SEQ ID NO: 59818 - RNA, 19 nt, Artificial Sequence
  Description of Artificial Sequence: Synthetic oligonucleotide
gcguacuucaauucacaga

SEQ ID NO: 59819 - RNA, 19 nt, Artificial Sequence
  Description of Artificial Sequence: Synthetic oligonucleotide
ccaucacucgaccaccaag

SEQ ID NO: 59820 - RNA, 19 nt, Artificial Sequence
  Description of Artificial Sequence: Synthetic oligonucleotide
cugcuaaagcaugcacacc

SEQ ID NO: 59821 - RNA, 19 nt, Artificial Sequence
  Description of Artificial Sequence: Synthetic oligonucleotide
ccucucaaggcgaggaaug

SEQ ID NO: 59822 - RNA, 19 nt, Artificial Sequence
  Description of Artificial Sequence: Synthetic oligonucleotide
aggcgaggaaugccguaug

SEQ ID NO: 59823 - RNA, 19 nt, Artificial Sequence
  Description of Artificial Sequence: Synthetic oligonucleotide
gguuugcggacuguuguug

SEQ ID NO: 59824 - RNA, 19 nt, Artificial Sequence
  Description of Artificial Sequence: Synthetic oligonucleotide
cugugaugcgugcauucca

SEQ ID NO: 59825 - RNA, 19 nt, Artificial Sequence
  Description of Artificial Sequence: Synthetic oligonucleotide
acuacuagcucaggcuuuu

SEQ ID NO: 59826 - RNA, 19 nt, Artificial Sequence
  Description of Artificial Sequence: Synthetic oligonucleotide
cccguguagaguucagaag

SEQ ID NO: 59827 - RNA, 19 nt, Artificial Sequence
  Description of Artificial Sequence: Synthetic oligonucleotide
ggccuucuaaaaggaaucc

SEQ ID NO: 59828 - RNA, 19 nt, Artificial Sequence
  Description of Artificial Sequence: Synthetic oligonucleotide
ucucgucacgcugcguacu

SEQ ID NO: 59829 - RNA, 19 nt, Artificial Sequence
  Description of Artificial Sequence: Synthetic oligonucleotide
ccgugcauaccacucuucc

SEQ ID NO: 59830 - RNA, 19 nt, Artificial Sequence
  Description of Artificial Sequence: Synthetic oligonucleotide
ugcgugcauuccauuucuc

SEQ ID NO: 59831 - RNA, 19 nt, Artificial Sequence
  Description of Artificial Sequence: Synthetic oligonucleotide
ucccucacuuugcgcuugc

SEQ ID NO: 59832 - RNA, 19 nt, Artificial Sequence
  Description of Artificial Sequence: Synthetic oligonucleotide
ugcuuccguaggucuguga

SEQ ID NO: 59833 - RNA, 19 nt, Artificial Sequence
  Description of Artificial Sequence: Synthetic oligonucleotide
ucguaauguucagggugcu

SEQ ID NO: 59834 - RNA, 19 nt, Artificial Sequence
  Description of Artificial Sequence: Synthetic oligonucleotide
cuuugcuaccgugugauau

SEQ ID NO: 59835 - RNA, 19 nt, Artificial Sequence
  Description of Artificial Sequence: Synthetic oligonucleotide
aauccacuucaagguugca

SEQ ID NO: 59836 - RNA, 19 nt, Artificial Sequence
  Description of Artificial Sequence: Synthetic oligonucleotide
ccucucaaggcguggaauc

SEQ ID NO: 59837 - RNA, 19 nt, Artificial Sequence
  Description of Artificial Sequence: Synthetic oligonucleotide
auucgauugcccacuugaa

SEQ ID NO: 59838 - RNA, 19 nt, Artificial Sequence
  Description of Artificial Sequence: Synthetic oligonucleotide
ggaaaacucucucccucga

SEQ ID NO: 59839 - RNA, 19 nt, Artificial Sequence
  Description of Artificial Sequence: Synthetic oligonucleotide
gucucgaacaucucagguu

SEQ ID NO: 59840 - RNA, 19 nt, Artificial Sequence
  Description of Artificial Sequence: Synthetic oligonucleotide
gcugcguacuucaauucac

SEQ ID NO: 59841 - RNA, 19 nt, Artificial Sequence
  Description of Artificial Sequence: Synthetic oligonucleotide
gacagucgcucauugucau

SEQ ID NO: 59842 - RNA, 19 nt, Artificial Sequence
  Description of Artificial Sequence: Synthetic oligonucleotide
ucgaacgguggagguuugc

SEQ ID NO: 59843 - RNA, 19 nt, Artificial Sequence
  Description of Artificial Sequence: Synthetic oligonucleotide
auccucucaaggcguggaa

SEQ ID NO: 59844 - RNA, 19 nt, Artificial Sequence
  Description of Artificial Sequence: Synthetic oligonucleotide
gccaggcacgcgcaucucg

SEQ ID NO: 59845 - RNA, 19 nt, Artificial Sequence
  Description of Artificial Sequence: Synthetic oligonucleotide
gaguucgaacgguggaggu

SEQ ID NO: 59846 - RNA, 19 nt, Artificial Sequence
  Description of Artificial Sequence: Synthetic oligonucleotide
auguggauggucgccggaa

SEQ ID NO: 59847 - RNA, 19 nt, Artificial Sequence
  Description of Artificial Sequence: Synthetic oligonucleotide
caaggcguggaaucccaaa

SEQ ID NO: 59848 - RNA, 19 nt, Artificial Sequence
  Description of Artificial Sequence: Synthetic oligonucleotide
cuagccaucccaggaggca

SEQ ID NO: 59849 - RNA, 19 nt, Artificial Sequence
  Description of Artificial Sequence: Synthetic oligonucleotide
acgaaauccccgccuuguu

SEQ ID NO: 59850 - RNA, 19 nt, Artificial Sequence
  Description of Artificial Sequence: Synthetic oligonucleotide
ugcuaccgugugauauaau

SEQ ID NO: 59851 - RNA, 19 nt, Artificial Sequence
  Description of Artificial Sequence: Synthetic oligonucleotide
cucauccgauuugcagggg

SEQ ID NO: 59852 - RNA, 19 nt, Artificial Sequence
  Description of Artificial Sequence: Synthetic oligonucleotide
acgcgcaucucgucacgcu

SEQ ID NO: 59853 - RNA, 19 nt, Artificial Sequence
  Description of Artificial Sequence: Synthetic oligonucleotide
guggucguuuuggggacug

SEQ ID NO: 59854 - RNA, 19 nt, Artificial Sequence
  Description of Artificial Sequence: Synthetic oligonucleotide
agucgcucauugucaucau

SEQ ID NO: 59855 - RNA, 19 nt, Artificial Sequence
  Description of Artificial Sequence: Synthetic oligonucleotide
agucuaccacguagggucu

SEQ ID NO: 59856 - RNA, 19 nt, Artificial Sequence
  Description of Artificial Sequence: Synthetic oligonucleotide
ccgucucgaacaucucagg

SEQ ID NO: 59857 - RNA, 19 nt, Artificial Sequence
  Description of Artificial Sequence: Synthetic oligonucleotide
agggcggguccgaaagauc

SEQ ID NO: 59858 - RNA, 19 nt, Artificial Sequence
  Description of Artificial Sequence: Synthetic oligonucleotide
guucgaacgguggagguuu

SEQ ID NO: 59859 - RNA, 19 nt, Artificial Sequence
  Description of Artificial Sequence: Synthetic oligonucleotide
guacaccccguauuuacuu

SEQ ID NO: 59860 - RNA, 19 nt, Artificial Sequence
  Description of Artificial Sequence: Synthetic oligonucleotide
cacgcgcaucucgucacgc

SEQ ID NO: 59861 - RNA, 19 nt, Artificial Sequence
  Description of Artificial Sequence: Synthetic oligonucleotide
gggcaugccgucgaccacc

SEQ ID NO: 59862 - RNA, 19 nt, Artificial Sequence
  Description of Artificial Sequence: Synthetic oligonucleotide
gcguggaaucccaaaccag

SEQ ID NO: 59863 - RNA, 19 nt, Artificial Sequence
  Description of Artificial Sequence: Synthetic oligonucleotide
gaucgucaccggaccuuug

SEQ ID NO: 59864 - RNA, 19 nt, Artificial Sequence
  Description of Artificial Sequence: Synthetic oligonucleotide
ggagcuuagucaaaggcuu

SEQ ID NO: 59865 - RNA, 19 nt, Artificial Sequence
  Description of Artificial Sequence: Synthetic oligonucleotide
uggucguuuuggggacugc

SEQ ID NO: 59866 - RNA, 19 nt, Artificial Sequence
  Description of Artificial Sequence: Synthetic oligonucleotide
acugccuagcacagggguu

SEQ ID NO: 59867 - RNA, 19 nt, Artificial Sequence
  Description of Artificial Sequence: Synthetic oligonucleotide
cacguagcaucuucucaua

SEQ ID NO: 59868 - RNA, 19 nt, Artificial Sequence
  Description of Artificial Sequence: Synthetic oligonucleotide
cgaacgguggagguuugcg

SEQ ID NO: 59869 - RNA, 19 nt, Artificial Sequence
  Description of Artificial Sequence: Synthetic oligonucleotide
ccuaucuuugcuaccgugu

SEQ ID NO: 59870 - RNA, 19 nt, Artificial Sequence
  Description of Artificial Sequence: Synthetic oligonucleotide
acuuugcgcuugccagcgu

SEQ ID NO: 59871 - RNA, 19 nt, Artificial Sequence
  Description of Artificial Sequence: Synthetic oligonucleotide
uugccagcguuggcgggcu

SEQ ID NO: 59872 - RNA, 19 nt, Artificial Sequence
  Description of Artificial Sequence: Synthetic oligonucleotide
ccgcucaguaucugaugcc

SEQ ID NO: 59873 - RNA, 19 nt, Artificial Sequence
  Description of Artificial Sequence: Synthetic oligonucleotide
auaccacgaggggcuucgg

SEQ ID NO: 59874 - RNA, 19 nt, Artificial Sequence
  Description of Artificial Sequence: Synthetic oligonucleotide
guauguugauggccuucua

SEQ ID NO: 59875 - RNA, 19 nt, Artificial Sequence
  Description of Artificial Sequence: Synthetic oligonucleotide
ugccgucgaccaccacaca

SEQ ID NO: 59876 - RNA, 19 nt, Artificial Sequence
  Description of Artificial Sequence: Synthetic oligonucleotide
cguggugccacuacugaga

SEQ ID NO: 59877 - RNA, 19 nt, Artificial Sequence
  Description of Artificial Sequence: Synthetic oligonucleotide
gucuaccacguagggucug

SEQ ID NO: 59878 - RNA, 19 nt, Artificial Sequence
  Description of Artificial Sequence: Synthetic oligonucleotide
caccugaugcaguaguauu

SEQ ID NO: 59879 - RNA, 19 nt, Artificial Sequence
  Description of Artificial Sequence: Synthetic oligonucleotide
gccaaguaagggugaggga

SEQ ID NO: 59880 - RNA, 19 nt, Artificial Sequence
  Description of Artificial Sequence: Synthetic oligonucleotide
agcugaaccugcagacaaa

SEQ ID NO: 59881 - RNA, 19 nt, Artificial Sequence
  Description of Artificial Sequence: Synthetic oligonucleotide
gaacaucguggugccacua

SEQ ID NO: 59882 - RNA, 19 nt, Artificial Sequence
  Description of Artificial Sequence: Synthetic oligonucleotide
cgaaauccccgccuuguuc

SEQ ID NO: 59883 - RNA, 19 nt, Artificial Sequence
  Description of Artificial Sequence: Synthetic oligonucleotide
cgauugcccacuugaauga

SEQ ID NO: 59884 - RNA, 19 nt, Artificial Sequence
  Description of Artificial Sequence: Synthetic oligonucleotide
ucgucacgcugcguacuuc

SEQ ID NO: 59885 - RNA, 19 nt, Artificial Sequence
  Description of Artificial Sequence: Synthetic oligonucleotide
ccuguacgggacuuucaca

SEQ ID NO: 59886 - RNA, 19 nt, Artificial Sequence
  Description of Artificial Sequence: Synthetic oligonucleotide
ccucacuuugcgcuugcca

SEQ ID NO: 59887 - RNA, 19 nt, Artificial Sequence
  Description of Artificial Sequence: Synthetic oligonucleotide
cccacggacaauccucuca

SEQ ID NO: 59888 - RNA, 19 nt, Artificial Sequence
  Description of Artificial Sequence: Synthetic oligonucleotide
cuggcuuaucaagcuguaa

SEQ ID NO: 59889 - RNA, 19 nt, Artificial Sequence
  Description of Artificial Sequence: Synthetic oligonucleotide
gauugcccacuugaaugau

SEQ ID NO: 59890 - RNA, 19 nt, Artificial Sequence
  Description of Artificial Sequence: Synthetic oligonucleotide
aggguacaccccguauuua

SEQ ID NO: 59891 - RNA, 19 nt, Artificial Sequence
  Description of Artificial Sequence: Synthetic oligonucleotide
caucaggguacaccccgua

SEQ ID NO: 59892 - RNA, 19 nt, Artificial Sequence
  Description of Artificial Sequence: Synthetic oligonucleotide
cuuugcgcuugccagcguu

SEQ ID NO: 59893 - RNA, 19 nt, Artificial Sequence
  Description of Artificial Sequence: Synthetic oligonucleotide
cuggaacuuccaacuggcu

SEQ ID NO: 59894 - RNA, 19 nt, Artificial Sequence
  Description of Artificial Sequence: Synthetic oligonucleotide
gggcggguccgaaagaucu

SEQ ID NO: 59895 - RNA, 19 nt, Artificial Sequence
  Description of Artificial Sequence: Synthetic oligonucleotide
uccgaccaucaggguacac

SEQ ID NO: 59896 - RNA, 19 nt, Artificial Sequence
  Description of Artificial Sequence: Synthetic oligonucleotide
gguacaccccguauuuacu

SEQ ID NO: 59897 - RNA, 19 nt, Artificial Sequence
  Description of Artificial Sequence: Synthetic oligonucleotide
cgggauagggcaccuucac

SEQ ID NO: 59898 - RNA, 19 nt, Artificial Sequence
  Description of Artificial Sequence: Synthetic oligonucleotide
cgcaucucgucacgcugcg

SEQ ID NO: 59899 - RNA, 19 nt, Artificial Sequence
  Description of Artificial Sequence: Synthetic oligonucleotide
ggaaguccuuccacauaga

SEQ ID NO: 59900 - RNA, 19 nt, Artificial Sequence
  Description of Artificial Sequence: Synthetic oligonucleotide
ggcgaggaaugccguaugu

SEQ ID NO: 59901 - RNA, 19 nt, Artificial Sequence
  Description of Artificial Sequence: Synthetic oligonucleotide
gguuuguauagaagguauu

SEQ ID NO: 59902 - RNA, 19 nt, Artificial Sequence
  Description of Artificial Sequence: Synthetic oligonucleotide
cgucacgcugcguacuuca

SEQ ID NO: 59903 - RNA, 19 nt, Artificial Sequence
  Description of Artificial Sequence: Synthetic oligonucleotide
aggaaccaugauggagcuu

SEQ ID NO: 59904 - RNA, 19 nt, Artificial Sequence
  Description of Artificial Sequence: Synthetic oligonucleotide
cacuuugaucgggccacaa

SEQ ID NO: 59905 - RNA, 19 nt, Artificial Sequence
  Description of Artificial Sequence: Synthetic oligonucleotide
ccguauguugauggccuuc

SEQ ID NO: 59906 - RNA, 19 nt, Artificial Sequence
  Description of Artificial Sequence: Synthetic oligonucleotide
cacgaagcugucuggccuu

SEQ ID NO: 59907 - RNA, 19 nt, Artificial Sequence
  Description of Artificial Sequence: Synthetic oligonucleotide
cacagggccuucggacuca

SEQ ID NO: 59908 - RNA, 19 nt, Artificial Sequence
  Description of Artificial Sequence: Synthetic oligonucleotide
gucacgcugcguacuucaa

SEQ ID NO: 59909 - RNA, 19 nt, Artificial Sequence
  Description of Artificial Sequence: Synthetic oligonucleotide
uggcucgccucagcagauu

SEQ ID NO: 59910 - RNA, 19 nt, Artificial Sequence
  Description of Artificial Sequence: Synthetic oligonucleotide
gcccaucccaauagccuca

SEQ ID NO: 59911 - RNA, 19 nt, Artificial Sequence
  Description of Artificial Sequence: Synthetic oligonucleotide
acggccuguuuaaggccaa

SEQ ID NO: 59912 - RNA, 19 nt, Artificial Sequence
  Description of Artificial Sequence: Synthetic oligonucleotide
cggacucauucugaucaac

SEQ ID NO: 59913 - RNA, 19 nt, Artificial Sequence
  Description of Artificial Sequence: Synthetic oligonucleotide
cucgaacaucucagguuuu

SEQ ID NO: 59914 - RNA, 19 nt, Artificial Sequence
  Description of Artificial Sequence: Synthetic oligonucleotide
cucgucacgcugcguacuu

SEQ ID NO: 59915 - RNA, 19 nt, Artificial Sequence
  Description of Artificial Sequence: Synthetic oligonucleotide
cagggcggguccgaaagau

SEQ ID NO: 59916 - RNA, 19 nt, Artificial Sequence
  Description of Artificial Sequence: Synthetic oligonucleotide
ggguaggaguucgaacggu

SEQ ID NO: 59917 - RNA, 19 nt, Artificial Sequence
  Description of Artificial Sequence: Synthetic oligonucleotide
ggcaugccgucgaccacca

SEQ ID NO: 59918 - RNA, 19 nt, Artificial Sequence
  Description of Artificial Sequence: Synthetic oligonucleotide
acacgggauagggcaccuu

SEQ ID NO: 59919 - RNA, 19 nt, Artificial Sequence
  Description of Artificial Sequence: Synthetic oligonucleotide
cuccgaccaucaggguaca

SEQ ID NO: 59920 - RNA, 19 nt, Artificial Sequence
  Description of Artificial Sequence: Synthetic oligonucleotide
cccauccgagucuuuaauu

SEQ ID NO: 59921 - RNA, 19 nt, Artificial Sequence
  Description of Artificial Sequence: Synthetic oligonucleotide
cauccacgcucauccgauu

SEQ ID NO: 59922 - RNA, 19 nt, Artificial Sequence
  Description of Artificial Sequence: Synthetic oligonucleotide
cguuggcgggcucggggac

SEQ ID NO: 59923 - RNA, 19 nt, Artificial Sequence
  Description of Artificial Sequence: Synthetic oligonucleotide
ggaucgucaccggaccuuu

SEQ ID NO: 59924 - RNA, 19 nt, Artificial Sequence
  Description of Artificial Sequence: Synthetic oligonucleotide
cccucacuuugcgcuugcc

SEQ ID NO: 59925 - RNA, 19 nt, Artificial Sequence
  Description of Artificial Sequence: Synthetic oligonucleotide
gcucugcccaaugcauaaa

SEQ ID NO: 59926 - RNA, 19 nt, Artificial Sequence
  Description of Artificial Sequence: Synthetic oligonucleotide
cgucaccggaccuuuggcu

SEQ ID NO: 59927 - RNA, 19 nt, Artificial Sequence
  Description of Artificial Sequence: Synthetic oligonucleotide
gggaucgucaccggaccuu

SEQ ID NO: 59928 - RNA, 19 nt, Artificial Sequence
  Description of Artificial Sequence: Synthetic oligonucleotide
cagccggggaggguuuagu

SEQ ID NO: 59929 - RNA, 19 nt, Artificial Sequence
  Description of Artificial Sequence: Synthetic oligonucleotide
gccguauguugauggccuu

SEQ ID NO: 59930 - RNA, 19 nt, Artificial Sequence
  Description of Artificial Sequence: Synthetic oligonucleotide
cggccuguuuaaggccaag

SEQ ID NO: 59931 - RNA, 19 nt, Artificial Sequence
  Description of Artificial Sequence: Synthetic oligonucleotide
ccccgccuuguucuccaaa

SEQ ID NO: 59932 - RNA, 19 nt, Artificial Sequence
  Description of Artificial Sequence: Synthetic oligonucleotide
ggcggguccgaaagaucuu

SEQ ID NO: 59933 - RNA, 19 nt, Artificial Sequence
  Description of Artificial Sequence: Synthetic oligonucleotide
ccgacuggucacguagcau

SEQ ID NO: 59934 - RNA, 19 nt, Artificial Sequence
  Description of Artificial Sequence: Synthetic oligonucleotide
ccggaccuuuggcuuuuau

SEQ ID NO: 59935 - RNA, 19 nt, Artificial Sequence
  Description of Artificial Sequence: Synthetic oligonucleotide
cgggaaggacucgaacaau

SEQ ID NO: 59936 - RNA, 19 nt, Artificial Sequence
  Description of Artificial Sequence: Synthetic oligonucleotide
cguggucguuuuggggacu

SEQ ID NO: 59937 - RNA, 19 nt, Artificial Sequence
  Description of Artificial Sequence: Synthetic oligonucleotide
aauaagacagauuaacccc

SEQ ID NO: 59938 - RNA, 19 nt, Artificial Sequence
  Description of Artificial Sequence: Synthetic oligonucleotide
aaaugcaagauuuuacacc

SEQ ID NO: 59939 - RNA, 19 nt, Artificial Sequence
  Description of Artificial Sequence: Synthetic oligonucleotide
aauauauauauauauauaa

SEQ ID NO: 59940 - RNA, 19 nt, Artificial Sequence
  Description of Artificial Sequence: Synthetic oligonucleotide
aaaucauuaagguagucug

SEQ ID NO: 59941 - RNA, 19 nt, Artificial Sequence
  Description of Artificial Sequence: Synthetic oligonucleotide
uauauauauauauauaaaa

SEQ ID NO: 59942 - RNA, 19 nt, Artificial Sequence
  Description of Artificial Sequence: Synthetic oligonucleotide
uaaaugaagagauaucucc

SEQ ID NO: 59943 - RNA, 19 nt, Artificial Sequence
  Description of Artificial Sequence: Synthetic oligonucleotide
uaauaagacagauuaaccc

SEQ ID NO: 59944 - RNA, 19 nt, Artificial Sequence
  Description of Artificial Sequence: Synthetic oligonucleotide
ugaucaaaacuaaagacca

SEQ ID NO: 59945 - RNA, 19 nt, Artificial Sequence
  Description of Artificial Sequence: Synthetic oligonucleotide
uaaugcauaaauaacccug

SEQ ID NO: 59946 - RNA, 19 nt, Artificial Sequence
  Description of Artificial Sequence: Synthetic oligonucleotide
uuaagcaaaauccuaaauc

SEQ ID NO: 59947 - RNA, 19 nt, Artificial Sequence
  Description of Artificial Sequence: Synthetic oligonucleotide
uuaauaagacagauuaacc

SEQ ID NO: 59948 - RNA, 19 nt, Artificial Sequence
  Description of Artificial Sequence: Synthetic oligonucleotide
aaauagugcauguuaaacu

SEQ ID NO: 59949 - RNA, 19 nt, Artificial Sequence
  Description of Artificial Sequence: Synthetic oligonucleotide
aaaauauuaguggagauaa

SEQ ID NO: 59950 - RNA, 19 nt, Artificial Sequence
  Description of Artificial Sequence: Synthetic oligonucleotide
aaaauaacagcuuccuaug

SEQ ID NO: 59951 - RNA, 19 nt, Artificial Sequence
  Description of Artificial Sequence: Synthetic oligonucleotide
uagaaauauauauauauau

SEQ ID NO: 59952 - RNA, 19 nt, Artificial Sequence
  Description of Artificial Sequence: Synthetic oligonucleotide
aaguacuauaaauagugca

SEQ ID NO: 59953 - RNA, 19 nt, Artificial Sequence
  Description of Artificial Sequence: Synthetic oligonucleotide
uuagggaugaucaaaacua

SEQ ID NO: 59954 - RNA, 19 nt, Artificial Sequence
  Description of Artificial Sequence: Synthetic oligonucleotide
aaugcaucuaacuaucuaa

SEQ ID NO: 59955 - RNA, 19 nt, Artificial Sequence
  Description of Artificial Sequence: Synthetic oligonucleotide
gaaauuaugggcaggaggc

SEQ ID NO: 59956 - RNA, 19 nt, Artificial Sequence
  Description of Artificial Sequence: Synthetic oligonucleotide
aauagcugaaugcagaauu

SEQ ID NO: 59957 - RNA, 19 nt, Artificial Sequence
  Description of Artificial Sequence: Synthetic oligonucleotide
agaaagugguacuuuauuc

SEQ ID NO: 59958 - RNA, 19 nt, Artificial Sequence
  Description of Artificial Sequence: Synthetic oligonucleotide
uaagaagccaauuaggaau

SEQ ID NO: 59959 - RNA, 19 nt, Artificial Sequence
  Description of Artificial Sequence: Synthetic oligonucleotide
ucccuaaacaauauaaugu

SEQ ID NO: 59960 - RNA, 19 nt, Artificial Sequence
  Description of Artificial Sequence: Synthetic oligonucleotide
aauagugcauguuaaacuu

SEQ ID NO: 59961 - RNA, 19 nt, Artificial Sequence
  Description of Artificial Sequence: Synthetic oligonucleotide
uuuaguugaaucaaacuua

SEQ ID NO: 59962 - RNA, 19 nt, Artificial Sequence
  Description of Artificial Sequence: Synthetic oligonucleotide
uaagcuaccuauuacacaa

SEQ ID NO: 59963 - RNA, 19 nt, Artificial Sequence
  Description of Artificial Sequence: Synthetic oligonucleotide
gauaucuccaauaucaaac

SEQ ID NO: 59964 - RNA, 19 nt, Artificial Sequence
  Description of Artificial Sequence: Synthetic oligonucleotide
uguuaaacuuuucucaacu

SEQ ID NO: 59965 - RNA, 19 nt, Artificial Sequence
  Description of Artificial Sequence: Synthetic oligonucleotide
cuuaauaagacagauuaac

SEQ ID NO: 59966 - RNA, 19 nt, Artificial Sequence
  Description of Artificial Sequence: Synthetic oligonucleotide
auauuugggauuucguggg

SEQ ID NO: 59967 - RNA, 19 nt, Artificial Sequence
  Description of Artificial Sequence: Synthetic oligonucleotide
uuagcagggaauuuaaagu

SEQ ID NO: 59968 - RNA, 19 nt, Artificial Sequence
  Description of Artificial Sequence: Synthetic oligonucleotide
uauuaguggagauaaauua

SEQ ID NO: 59969 - RNA, 19 nt, Artificial Sequence
  Description of Artificial Sequence: Synthetic oligonucleotide
gaaauauauauauauauau

SEQ ID NO: 59970 - RNA, 19 nt, Artificial Sequence
  Description of Artificial Sequence: Synthetic oligonucleotide
aaucuaaacuuauguucac

SEQ ID NO: 59971 - RNA, 19 nt, Artificial Sequence
  Description of Artificial Sequence: Synthetic oligonucleotide
uuaugcaucaacaccuuug

SEQ ID NO: 59972 - RNA, 19 nt, Artificial Sequence
  Description of Artificial Sequence: Synthetic oligonucleotide
gauuuuacaccuuguguag

SEQ ID NO: 59973 - RNA, 19 nt, Artificial Sequence
  Description of Artificial Sequence: Synthetic oligonucleotide
aacuaucuaaugcauaaau

SEQ ID NO: 59974 - RNA, 19 nt, Artificial Sequence
  Description of Artificial Sequence: Synthetic oligonucleotide
uauuccguuaaucucuuca

SEQ ID NO: 59975 - RNA, 19 nt, Artificial Sequence
  Description of Artificial Sequence: Synthetic oligonucleotide
ugaucccuaaacaauauaa

SEQ ID NO: 59976 - RNA, 19 nt, Artificial Sequence
  Description of Artificial Sequence: Synthetic oligonucleotide
uguaccuuacaacugaaau

SEQ ID NO: 59977 - RNA, 19 nt, Artificial Sequence
  Description of Artificial Sequence: Synthetic oligonucleotide
guggacuuaaguuaauuag

SEQ ID NO: 59978 - RNA, 19 nt, Artificial Sequence
  Description of Artificial Sequence: Synthetic oligonucleotide
aagagauaucuccaauauc

SEQ ID NO: 59979 - RNA, 19 nt, Artificial Sequence
  Description of Artificial Sequence: Synthetic oligonucleotide
uuagaaauauauauauaua

SEQ ID NO: 59980 - RNA, 19 nt, Artificial Sequence
  Description of Artificial Sequence: Synthetic oligonucleotide
agaguaagcuaccuauuac

SEQ ID NO: 59981 - RNA, 19 nt, Artificial Sequence
  Description of Artificial Sequence: Synthetic oligonucleotide
ugguuaugcaagcacaggc

SEQ ID NO: 59982 - RNA, 19 nt, Artificial Sequence
  Description of Artificial Sequence: Synthetic oligonucleotide
uuauuagggaugaucaaaa

SEQ ID NO: 59983 - RNA, 19 nt, Artificial Sequence
  Description of Artificial Sequence: Synthetic oligonucleotide
uaguauuuaaggaaagaau

SEQ ID NO: 59984 - RNA, 19 nt, Artificial Sequence
  Description of Artificial Sequence: Synthetic oligonucleotide
aaacuuauguucacugaac

SEQ ID NO: 59985 - RNA, 19 nt, Artificial Sequence
  Description of Artificial Sequence: Synthetic oligonucleotide
ugugcuuuguauuaacuuc

SEQ ID NO: 59986 - RNA, 19 nt, Artificial Sequence
  Description of Artificial Sequence: Synthetic oligonucleotide
uuccuauguaaaauggacc

SEQ ID NO: 59987 - RNA, 19 nt, Artificial Sequence
  Description of Artificial Sequence: Synthetic oligonucleotide
auuccuacuguacuucaac

SEQ ID NO: 59988 - RNA, 19 nt, Artificial Sequence
  Description of Artificial Sequence: Synthetic oligonucleotide
auagcuauuuccuaauuau

SEQ ID NO: 59989 - RNA, 19 nt, Artificial Sequence
  Description of Artificial Sequence: Synthetic oligonucleotide
ugaaaagucucuuccauau

SEQ ID NO: 59990 - RNA, 19 nt, Artificial Sequence
  Description of Artificial Sequence: Synthetic oligonucleotide
ugaauaguguaaaggauau

SEQ ID NO: 59991 - RNA, 19 nt, Artificial Sequence
  Description of Artificial Sequence: Synthetic oligonucleotide
cacuguuuggcccagaaug

SEQ ID NO: 59992 - RNA, 19 nt, Artificial Sequence
  Description of Artificial Sequence: Synthetic oligonucleotide
aaaguaggaucuguguggg

SEQ ID NO: 59993 - RNA, 19 nt, Artificial Sequence
  Description of Artificial Sequence: Synthetic oligonucleotide
auuccguuaaucucuucac

SEQ ID NO: 59994 - RNA, 19 nt, Artificial Sequence
  Description of Artificial Sequence: Synthetic oligonucleotide
ggcaaaguacuauaaauag

SEQ ID NO: 59995 - RNA, 19 nt, Artificial Sequence
  Description of Artificial Sequence: Synthetic oligonucleotide
aaacuaaccagugaguaau

SEQ ID NO: 59996 - RNA, 19 nt, Artificial Sequence
  Description of Artificial Sequence: Synthetic oligonucleotide
aaaggcaucuagcacucug

SEQ ID NO: 59997 - RNA, 19 nt, Artificial Sequence
  Description of Artificial Sequence: Synthetic oligonucleotide
uaaauagugcauguuaaac

SEQ ID NO: 59998 - RNA, 19 nt, Artificial Sequence
  Description of Artificial Sequence: Synthetic oligonucleotide
uguaguuuucgccauaguu

SEQ ID NO: 59999 - RNA, 19 nt, Artificial Sequence
  Description of Artificial Sequence: Synthetic oligonucleotide
cuuaaguuaauuagugcuc

SEQ ID NO: 60000 - RNA, 19 nt, Artificial Sequence
  Description of Artificial Sequence: Synthetic oligonucleotide
cuuagaaauauauauauau

SEQ ID NO: 60001 - RNA, 19 nt, Artificial Sequence
  Description of Artificial Sequence: Synthetic oligonucleotide
uucgccauaguuucauagg

SEQ ID NO: 60002 - RNA, 19 nt, Artificial Sequence
  Description of Artificial Sequence: Synthetic oligonucleotide
ugagauuaggaagaauaag

SEQ ID NO: 60003 - RNA, 19 nt, Artificial Sequence
  Description of Artificial Sequence: Synthetic oligonucleotide
uccuaauacagaauuuaac

SEQ ID NO: 60004 - RNA, 19 nt, Artificial Sequence
  Description of Artificial Sequence: Synthetic oligonucleotide
aaagugguacuuuauucau

SEQ ID NO: 60005 - RNA, 19 nt, Artificial Sequence
  Description of Artificial Sequence: Synthetic oligonucleotide
auaucaaugcaucuaacua

SEQ ID NO: 60006 - RNA, 19 nt, Artificial Sequence
  Description of Artificial Sequence: Synthetic oligonucleotide
aaauauauauauauauaua

SEQ ID NO: 60007 - RNA, 19 nt, Artificial Sequence
  Description of Artificial Sequence: Synthetic oligonucleotide
uuuaaacgaaagauucaga

SEQ ID NO: 60008 - RNA, 19 nt, Artificial Sequence
  Description of Artificial Sequence: Synthetic oligonucleotide
uuucgccauaguuucauag

SEQ ID NO: 60009 - RNA, 19 nt, Artificial Sequence
  Description of Artificial Sequence: Synthetic oligonucleotide
uaaguaauauucccuuugu

SEQ ID NO: 60010 - RNA, 19 nt, Artificial Sequence
  Description of Artificial Sequence: Synthetic oligonucleotide
aaucauuaagguagucugg

SEQ ID NO: 60011 - RNA, 19 nt, Artificial Sequence
  Description of Artificial Sequence: Synthetic oligonucleotide
ucugguauauuuaccugug

SEQ ID NO: 60012 - RNA, 19 nt, Artificial Sequence
  Description of Artificial Sequence: Synthetic oligonucleotide
ugaguaauuuaagcaauag

SEQ ID NO: 60013 - RNA, 19 nt, Artificial Sequence
  Description of Artificial Sequence: Synthetic oligonucleotide
aaagaaguuagaaagcaua

SEQ ID NO: 60014 - RNA, 19 nt, Artificial Sequence
  Description of Artificial Sequence: Synthetic oligonucleotide
auguuaaacuuuucucaac

SEQ ID NO: 60015 - RNA, 19 nt, Artificial Sequence
  Description of Artificial Sequence: Synthetic oligonucleotide
aaauaacagcuuccuaugu

SEQ ID NO: 60016 - RNA, 19 nt, Artificial Sequence
  Description of Artificial Sequence: Synthetic oligonucleotide
uggaccaccauggaagugg

SEQ ID NO: 60017 - RNA, 19 nt, Artificial Sequence
  Description of Artificial Sequence: Synthetic oligonucleotide
agaacauugccuguuaaug

SEQ ID NO: 60018 - RNA, 19 nt, Artificial Sequence
  Description of Artificial Sequence: Synthetic oligonucleotide
acuuguaugaaaaguuaac

SEQ ID NO: 60019 - RNA, 19 nt, Artificial Sequence
  Description of Artificial Sequence: Synthetic oligonucleotide
aguaagcuaccuauuacac

SEQ ID NO: 60020 - RNA, 19 nt, Artificial Sequence
  Description of Artificial Sequence: Synthetic oligonucleotide
aauuuaaacgaaagauuca

SEQ ID NO: 60021 - RNA, 19 nt, Artificial Sequence
  Description of Artificial Sequence: Synthetic oligonucleotide
uggguagacaccauuaaua

SEQ ID NO: 60022 - RNA, 19 nt, Artificial Sequence
  Description of Artificial Sequence: Synthetic oligonucleotide
ucuugaucccuaaacaaua

SEQ ID NO: 60023 - RNA, 19 nt, Artificial Sequence
  Description of Artificial Sequence: Synthetic oligonucleotide
gaccgcucuaauuauaaac

SEQ ID NO: 60024 - RNA, 19 nt, Artificial Sequence
  Description of Artificial Sequence: Synthetic oligonucleotide
uaauuagugcucuucugcu

SEQ ID NO: 60025 - RNA, 19 nt, Artificial Sequence
  Description of Artificial Sequence: Synthetic oligonucleotide
ucucaacucauuucuauaa

SEQ ID NO: 60026 - RNA, 19 nt, Artificial Sequence
  Description of Artificial Sequence: Synthetic oligonucleotide
aacuuuucucaacucauuu

SEQ ID NO: 60027 - RNA, 19 nt, Artificial Sequence
  Description of Artificial Sequence: Synthetic oligonucleotide
gcaucuaacuaucuaaugc

SEQ ID NO: 60028 - RNA, 19 nt, Artificial Sequence
  Description of Artificial Sequence: Synthetic oligonucleotide
aaugcauaaauaacccuga

SEQ ID NO: 60029 - RNA, 19 nt, Artificial Sequence
  Description of Artificial Sequence: Synthetic oligonucleotide
uuaccugacaccacuaaua

SEQ ID NO: 60030 - RNA, 19 nt, Artificial Sequence
  Description of Artificial Sequence: Synthetic oligonucleotide
gaguaagcuaccuauuaca

SEQ ID NO: 60031 - RNA, 19 nt, Artificial Sequence
  Description of Artificial Sequence: Synthetic oligonucleotide
uaguguaaaggauauuguc

SEQ ID NO: 60032 - RNA, 19 nt, Artificial Sequence
  Description of Artificial Sequence: Synthetic oligonucleotide
agaauaagauuaucagugu

SEQ ID NO: 60033 - RNA, 19 nt, Artificial Sequence
  Description of Artificial Sequence: Synthetic oligonucleotide
ucagucuuaccugacacca

SEQ ID NO: 60034 - RNA, 19 nt, Artificial Sequence
  Description of Artificial Sequence: Synthetic oligonucleotide
agcagauaccuuauuaggg

SEQ ID NO: 60035 - RNA, 19 nt, Artificial Sequence
  Description of Artificial Sequence: Synthetic oligonucleotide
uacaccuacccgcuaaggc

SEQ ID NO: 60036 - RNA, 19 nt, Artificial Sequence
  Description of Artificial Sequence: Synthetic oligonucleotide
cuaacuaucuaaugcauaa

SEQ ID NO: 60037 - RNA, 19 nt, Artificial Sequence
  Description of Artificial Sequence: Synthetic oligonucleotide
aagaaguuguagcuacaca

SEQ ID NO: 60038 - RNA, 19 nt, Artificial Sequence
  Description of Artificial Sequence: Synthetic oligonucleotide
uaguggagauaaauuacca

SEQ ID NO: 60039 - RNA, 19 nt, Artificial Sequence
  Description of Artificial Sequence: Synthetic oligonucleotide
ucuuaauaagacagauuaa

SEQ ID NO: 60040 - RNA, 19 nt, Artificial Sequence
  Description of Artificial Sequence: Synthetic oligonucleotide
caucuaacuaucuaaugca

SEQ ID NO: 60041 - RNA, 19 nt, Artificial Sequence
  Description of Artificial Sequence: Synthetic oligonucleotide
ugugcgauggccgagguuc

SEQ ID NO: 60042 - RNA, 19 nt, Artificial Sequence
  Description of Artificial Sequence: Synthetic oligonucleotide
gauaucaaugcaucuaacu

SEQ ID NO: 60043 - RNA, 19 nt, Artificial Sequence
  Description of Artificial Sequence: Synthetic oligonucleotide
uuaugcaagcacaggcacc

SEQ ID NO: 60044 - RNA, 19 nt, Artificial Sequence
  Description of Artificial Sequence: Synthetic oligonucleotide
auauauauauauauauaaa

SEQ ID NO: 60045 - RNA, 19 nt, Artificial Sequence
  Description of Artificial Sequence: Synthetic oligonucleotide
aaaauggaccgcucuaauu

SEQ ID NO: 60046 - RNA, 19 nt, Artificial Sequence
  Description of Artificial Sequence: Synthetic oligonucleotide
uuaaauuagcagauaccuu

SEQ ID NO: 60047 - RNA, 19 nt, Artificial Sequence
  Description of Artificial Sequence: Synthetic oligonucleotide
ucuaacuaucuaaugcaua

SEQ ID NO: 60048 - RNA, 19 nt, Artificial Sequence
  Description of Artificial Sequence: Synthetic oligonucleotide
cuacacauuacauuaguaa

SEQ ID NO: 60049 - RNA, 19 nt, Artificial Sequence
  Description of Artificial Sequence: Synthetic oligonucleotide
uaauggguagacaccauua

SEQ ID NO: 60050 - RNA, 19 nt, Artificial Sequence
  Description of Artificial Sequence: Synthetic oligonucleotide
cauaguuucauaggagcag

SEQ ID NO: 60051 - RNA, 19 nt, Artificial Sequence
  Description of Artificial Sequence: Synthetic oligonucleotide
acuguacuucaacucuuac

SEQ ID NO: 60052 - RNA, 19 nt, Artificial Sequence
  Description of Artificial Sequence: Synthetic oligonucleotide
uauaccuaccuuucuugga

SEQ ID NO: 60053 - RNA, 19 nt, Artificial Sequence
  Description of Artificial Sequence: Synthetic oligonucleotide
aaguaggaucugugugggc

SEQ ID NO: 60054 - RNA, 19 nt, Artificial Sequence
  Description of Artificial Sequence: Synthetic oligonucleotide
ggaacuacauacuagauau

SEQ ID NO: 60055 - RNA, 19 nt, Artificial Sequence
  Description of Artificial Sequence: Synthetic oligonucleotide
agaaauauauauauauaua

SEQ ID NO: 60056 - RNA, 19 nt, Artificial Sequence
  Description of Artificial Sequence: Synthetic oligonucleotide
cauaggagcagucugaaua

SEQ ID NO: 60057 - RNA, 19 nt, Artificial Sequence
  Description of Artificial Sequence: Synthetic oligonucleotide
ucugaaaauuauuccguua

SEQ ID NO: 60058 - RNA, 19 nt, Artificial Sequence
  Description of Artificial Sequence: Synthetic oligonucleotide
gauaccuuauuagggauga

SEQ ID NO: 60059 - RNA, 19 nt, Artificial Sequence
  Description of Artificial Sequence: Synthetic oligonucleotide
gauuuucguagccauggca

SEQ ID NO: 60060 - RNA, 19 nt, Artificial Sequence
  Description of Artificial Sequence: Synthetic oligonucleotide
ugguuaauagauacuugau

SEQ ID NO: 60061 - RNA, 19 nt, Artificial Sequence
  Description of Artificial Sequence: Synthetic oligonucleotide
ugauaggauauuucuuuaa

SEQ ID NO: 60062 - RNA, 19 nt, Artificial Sequence
  Description of Artificial Sequence: Synthetic oligonucleotide
aauggaccgcucuaauuau

SEQ ID NO: 60063 - RNA, 19 nt, Artificial Sequence
  Description of Artificial Sequence: Synthetic oligonucleotide
aaggcuaacaaaacaucgu

SEQ ID NO: 60064 - RNA, 19 nt, Artificial Sequence
  Description of Artificial Sequence: Synthetic oligonucleotide
acaccuacccgcuaaggcu

SEQ ID NO: 60065 - RNA, 19 nt, Artificial Sequence
  Description of Artificial Sequence: Synthetic oligonucleotide
agcacuacagucaaguuau

SEQ ID NO: 60066 - RNA, 19 nt, Artificial Sequence
  Description of Artificial Sequence: Synthetic oligonucleotide
agucuuaccugacaccacu

SEQ ID NO: 60067 - RNA, 19 nt, Artificial Sequence
  Description of Artificial Sequence: Synthetic oligonucleotide
uugcccucuugcaaaauga

SEQ ID NO: 60068 - RNA, 19 nt, Artificial Sequence
  Description of Artificial Sequence: Synthetic oligonucleotide
accugacaccacuaauagc

SEQ ID NO: 60069 - RNA, 19 nt, Artificial Sequence
  Description of Artificial Sequence: Synthetic oligonucleotide
aaugugcuuuguauuaacu

SEQ ID NO: 60070 - RNA, 19 nt, Artificial Sequence
  Description of Artificial Sequence: Synthetic oligonucleotide
uuaauggguagacaccauu

SEQ ID NO: 60071 - RNA, 19 nt, Artificial Sequence
  Description of Artificial Sequence: Synthetic oligonucleotide
cacuaauagcugaaugcag

SEQ ID NO: 60072 - RNA, 19 nt, Artificial Sequence
  Description of Artificial Sequence: Synthetic oligonucleotide
uucuauaccuaccuuucuu

SEQ ID NO: 60073 - RNA, 19 nt, Artificial Sequence
  Description of Artificial Sequence: Synthetic oligonucleotide
aguggacuuaaguuaauua

SEQ ID NO: 60074 - RNA, 19 nt, Artificial Sequence
  Description of Artificial Sequence: Synthetic oligonucleotide
ugaguuuugcagugaugcc

SEQ ID NO: 60075 - RNA, 19 nt, Artificial Sequence
  Description of Artificial Sequence: Synthetic oligonucleotide
aguugggaugagccaagac

SEQ ID NO: 60076 - RNA, 19 nt, Artificial Sequence
  Description of Artificial Sequence: Synthetic oligonucleotide
ugaaacagcacuggaacua

SEQ ID NO: 60077 - RNA, 19 nt, Artificial Sequence
  Description of Artificial Sequence: Synthetic oligonucleotide
uagcuuuaugcaucaacac

SEQ ID NO: 60078 - RNA, 19 nt, Artificial Sequence
  Description of Artificial Sequence: Synthetic oligonucleotide
caucuuuccuaauacagaa

SEQ ID NO: 60079 - RNA, 19 nt, Artificial Sequence
  Description of Artificial Sequence: Synthetic oligonucleotide
aucaaauuacuaguuuaug

SEQ ID NO: 60080 - RNA, 19 nt, Artificial Sequence
  Description of Artificial Sequence: Synthetic oligonucleotide
uuccuacuguacuucaacu

SEQ ID NO: 60081 - RNA, 19 nt, Artificial Sequence
  Description of Artificial Sequence: Synthetic oligonucleotide
agacagauuaaccccacuu

SEQ ID NO: 60082 - RNA, 19 nt, Artificial Sequence
  Description of Artificial Sequence: Synthetic oligonucleotide
gaagagauaucuccaauau

SEQ ID NO: 60083 - RNA, 19 nt, Artificial Sequence
  Description of Artificial Sequence: Synthetic oligonucleotide
ggaauacuugcugauacag

SEQ ID NO: 60084 - RNA, 19 nt, Artificial Sequence
  Description of Artificial Sequence: Synthetic oligonucleotide
ucaaugcaucuaacuaucu

SEQ ID NO: 60085 - RNA, 19 nt, Artificial Sequence
  Description of Artificial Sequence: Synthetic oligonucleotide
aguaccuuacauggccuac

SEQ ID NO: 60086 - RNA, 19 nt, Artificial Sequence
  Description of Artificial Sequence: Synthetic oligonucleotide
guugauuguguucagugcu

SEQ ID NO: 60087 - RNA, 19 nt, Artificial Sequence
  Description of Artificial Sequence: Synthetic oligonucleotide
ucuuaccugacaccacuaa

SEQ ID NO: 60088 - RNA, 19 nt, Artificial Sequence
  Description of Artificial Sequence: Synthetic oligonucleotide
auaguguaaaggauauugu

SEQ ID NO: 60089 - RNA, 19 nt, Artificial Sequence
  Description of Artificial Sequence: Synthetic oligonucleotide
aaccagugaguaauuuaag

SEQ ID NO: 60090 - RNA, 19 nt, Artificial Sequence
  Description of Artificial Sequence: Synthetic oligonucleotide
ccaagugaggacaauguug

SEQ ID NO: 60091 - RNA, 19 nt, Artificial Sequence
  Description of Artificial Sequence: Synthetic oligonucleotide
aaacaucguuagcagggaa

SEQ ID NO: 60092 - RNA, 19 nt, Artificial Sequence
  Description of Artificial Sequence: Synthetic oligonucleotide
aggcuaacaaaacaucguu

SEQ ID NO: 60093 - RNA, 19 nt, Artificial Sequence
  Description of Artificial Sequence: Synthetic oligonucleotide
guuauguugcccucuugca

SEQ ID NO: 60094 - RNA, 19 nt, Artificial Sequence
  Description of Artificial Sequence: Synthetic oligonucleotide
ucguuagcagggaauuuaa

SEQ ID NO: 60095 - RNA, 19 nt, Artificial Sequence
  Description of Artificial Sequence: Synthetic oligonucleotide
auauuaguggagauaaauu

SEQ ID NO: 60096 - RNA, 19 nt, Artificial Sequence
  Description of Artificial Sequence: Synthetic oligonucleotide
ugcaguuaccucuguugug

SEQ ID NO: 60097 - RNA, 19 nt, Artificial Sequence
  Description of Artificial Sequence: Synthetic oligonucleotide
cacuacagucaaguuaugc

SEQ ID NO: 60098 - RNA, 19 nt, Artificial Sequence
  Description of Artificial Sequence: Synthetic oligonucleotide
gggguauugcuuuuaguug

SEQ ID NO: 60099 - RNA, 19 nt, Artificial Sequence
  Description of Artificial Sequence: Synthetic oligonucleotide
gggcuuaauggguagacac

SEQ ID NO: 60100 - RNA, 19 nt, Artificial Sequence
  Description of Artificial Sequence: Synthetic oligonucleotide
uugaucccuaaacaauaua

SEQ ID NO: 60101 - RNA, 19 nt, Artificial Sequence
  Description of Artificial Sequence: Synthetic oligonucleotide
ccauuaacagggcacuugg

SEQ ID NO: 60102 - RNA, 19 nt, Artificial Sequence
  Description of Artificial Sequence: Synthetic oligonucleotide
uuuaugcaucaacaccuuu

SEQ ID NO: 60103 - RNA, 19 nt, Artificial Sequence
  Description of Artificial Sequence: Synthetic oligonucleotide
ggguauugcuuuuaguuga

SEQ ID NO: 60104 - RNA, 19 nt, Artificial Sequence
  Description of Artificial Sequence: Synthetic oligonucleotide
aacgaaagauucagauuga

SEQ ID NO: 60105 - RNA, 19 nt, Artificial Sequence
  Description of Artificial Sequence: Synthetic oligonucleotide
cuaaacuaaccagugagua

SEQ ID NO: 60106 - RNA, 19 nt, Artificial Sequence
  Description of Artificial Sequence: Synthetic oligonucleotide
aaguaccuuacauggccua

SEQ ID NO: 60107 - RNA, 19 nt, Artificial Sequence
  Description of Artificial Sequence: Synthetic oligonucleotide
aucuaaacuuauguucacu

SEQ ID NO: 60108 - RNA, 19 nt, Artificial Sequence
  Description of Artificial Sequence: Synthetic oligonucleotide
uggcuuuauggcgagcucu

SEQ ID NO: 60109 - RNA, 19 nt, Artificial Sequence
  Description of Artificial Sequence: Synthetic oligonucleotide
guauauuuaccugugacuu

SEQ ID NO: 60110 - RNA, 19 nt, Artificial Sequence
  Description of Artificial Sequence: Synthetic oligonucleotide
uaccuuacauggccuacuc

SEQ ID NO: 60111 - RNA, 19 nt, Artificial Sequence
  Description of Artificial Sequence: Synthetic oligonucleotide
cauacaccuacccgcuaag

SEQ ID NO: 60112 - RNA, 19 nt, Artificial Sequence
  Description of Artificial Sequence: Synthetic oligonucleotide
guguagacaacauguccca

SEQ ID NO: 60113 - RNA, 19 nt, Artificial Sequence
  Description of Artificial Sequence: Synthetic oligonucleotide
uacuguacuucaacucuua

SEQ ID NO: 60114 - RNA, 19 nt, Artificial Sequence
  Description of Artificial Sequence: Synthetic oligonucleotide
gguauauuuaccugugacu

SEQ ID NO: 60115 - RNA, 19 nt, Artificial Sequence
  Description of Artificial Sequence: Synthetic oligonucleotide
aauguaccuuacaacugaa

SEQ ID NO: 60116 - RNA, 19 nt, Artificial Sequence
  Description of Artificial Sequence: Synthetic oligonucleotide
cuagauauaguuacuucau

SEQ ID NO: 60117 - RNA, 19 nt, Artificial Sequence
  Description of Artificial Sequence: Synthetic oligonucleotide
uacccgcuaaggcuaacaa

SEQ ID NO: 60118 - RNA, 19 nt, Artificial Sequence
  Description of Artificial Sequence: Synthetic oligonucleotide
aaguggacuuaaguuaauu

SEQ ID NO: 60119 - RNA, 19 nt, Artificial Sequence
  Description of Artificial Sequence: Synthetic oligonucleotide
uaacuaucuaaugcauaaa

SEQ ID NO: 60120 - RNA, 19 nt, Artificial Sequence
  Description of Artificial Sequence: Synthetic oligonucleotide
gagauaaauuaccaacuuu

SEQ ID NO: 60121 - RNA, 19 nt, Artificial Sequence
  Description of Artificial Sequence: Synthetic oligonucleotide
caacucuuacaugucuaag

SEQ ID NO: 60122 - RNA, 19 nt, Artificial Sequence
  Description of Artificial Sequence: Synthetic oligonucleotide
auacaccuacccgcuaagg

SEQ ID NO: 60123 - RNA, 19 nt, Artificial Sequence
  Description of Artificial Sequence: Synthetic oligonucleotide
agugcauguuaaacuuuuc

SEQ ID NO: 60124 - RNA, 19 nt, Artificial Sequence
  Description of Artificial Sequence: Synthetic oligonucleotide
gucaaguuaugcauuugga

SEQ ID NO: 60125 - RNA, 19 nt, Artificial Sequence
  Description of Artificial Sequence: Synthetic oligonucleotide
cuaaugcauaaauaacccu

SEQ ID NO: 60126 - RNA, 19 nt, Artificial Sequence
  Description of Artificial Sequence: Synthetic oligonucleotide
uugguucgcugcucggccc

SEQ ID NO: 60127 - RNA, 19 nt, Artificial Sequence
  Description of Artificial Sequence: Synthetic oligonucleotide
accaugaguucuugugggu

SEQ ID NO: 60128 - RNA, 19 nt, Artificial Sequence
  Description of Artificial Sequence: Synthetic oligonucleotide
uucguagccauggcauccc

SEQ ID NO: 60129 - RNA, 19 nt, Artificial Sequence
  Description of Artificial Sequence: Synthetic oligonucleotide
guaguuuucgccauaguuu

SEQ ID NO: 60130 - RNA, 19 nt, Artificial Sequence
  Description of Artificial Sequence: Synthetic oligonucleotide
ucacuguuuggcccagaau

SEQ ID NO: 60131 - RNA, 19 nt, Artificial Sequence
  Description of Artificial Sequence: Synthetic oligonucleotide
aucuaacuaucuaaugcau

SEQ ID NO: 60132 - RNA, 19 nt, Artificial Sequence
  Description of Artificial Sequence: Synthetic oligonucleotide
ggcagggaacuacaucagg

SEQ ID NO: 60133 - RNA, 19 nt, Artificial Sequence
  Description of Artificial Sequence: Synthetic oligonucleotide
gcuuuaugcaucaacaccu

SEQ ID NO: 60134 - RNA, 19 nt, Artificial Sequence
  Description of Artificial Sequence: Synthetic oligonucleotide
agaccaacugugcucuuua

SEQ ID NO: 60135 - RNA, 19 nt, Artificial Sequence
  Description of Artificial Sequence: Synthetic oligonucleotide
gauccauuaacagggcacu

SEQ ID NO: 60136 - RNA, 19 nt, Artificial Sequence
  Description of Artificial Sequence: Synthetic oligonucleotide
cauggaaguggacuuaagu

SEQ ID NO: 60137 - RNA, 19 nt, Artificial Sequence
  Description of Artificial Sequence: Synthetic oligonucleotide
augcaucuaacuaucuaau

SEQ ID NO: 60138 - RNA, 19 nt, Artificial Sequence
  Description of Artificial Sequence: Synthetic oligonucleotide
gcucuaauuauaaacaaau

SEQ ID NO: 60139 - RNA, 19 nt, Artificial Sequence
  Description of Artificial Sequence: Synthetic oligonucleotide
guuuaugaauagaauguau

SEQ ID NO: 60140 - RNA, 19 nt, Artificial Sequence
  Description of Artificial Sequence: Synthetic oligonucleotide
gguuaugcaagcacaggca

SEQ ID NO: 60141 - RNA, 19 nt, Artificial Sequence
  Description of Artificial Sequence: Synthetic oligonucleotide
ggauuucguggguaaaauc

SEQ ID NO: 60142 - RNA, 19 nt, Artificial Sequence
  Description of Artificial Sequence: Synthetic oligonucleotide
gaucccuaaacaauauaau

SEQ ID NO: 60143 - RNA, 19 nt, Artificial Sequence
  Description of Artificial Sequence: Synthetic oligonucleotide
ugugcucuuuaugguauua

SEQ ID NO: 60144 - RNA, 19 nt, Artificial Sequence
  Description of Artificial Sequence: Synthetic oligonucleotide
cuggaacuacccaauggaa

SEQ ID NO: 60145 - RNA, 19 nt, Artificial Sequence
  Description of Artificial Sequence: Synthetic oligonucleotide
ggaaguggacuuaaguuaa

SEQ ID NO: 60146 - RNA, 19 nt, Artificial Sequence
  Description of Artificial Sequence: Synthetic oligonucleotide
caucccaugugaauagugu

SEQ ID NO: 60147 - RNA, 19 nt, Artificial Sequence
  Description of Artificial Sequence: Synthetic oligonucleotide
aacaccuuuggaagaccaa

SEQ ID NO: 60148 - RNA, 19 nt, Artificial Sequence
  Description of Artificial Sequence: Synthetic oligonucleotide
aguuaccucuguuguguuu

SEQ ID NO: 60149 - RNA, 19 nt, Artificial Sequence
  Description of Artificial Sequence: Synthetic oligonucleotide
uuaaccccacuuccucuuu

SEQ ID NO: 60150 - RNA, 19 nt, Artificial Sequence
  Description of Artificial Sequence: Synthetic oligonucleotide
acccgcuaaggcuaacaaa

SEQ ID NO: 60151 - RNA, 19 nt, Artificial Sequence
  Description of Artificial Sequence: Synthetic oligonucleotide
cugcuaaaguugagagcug

SEQ ID NO: 60152 - RNA, 19 nt, Artificial Sequence
  Description of Artificial Sequence: Synthetic oligonucleotide
ccaugugaauaguguaaag

SEQ ID NO: 60153 - RNA, 19 nt, Artificial Sequence
  Description of Artificial Sequence: Synthetic oligonucleotide
cagucuuaccugacaccac

SEQ ID NO: 60154 - RNA, 19 nt, Artificial Sequence
  Description of Artificial Sequence: Synthetic oligonucleotide
uuauuccguuaaucucuuc

SEQ ID NO: 60155 - RNA, 19 nt, Artificial Sequence
  Description of Artificial Sequence: Synthetic oligonucleotide
agguuguuuugaagcaucu

SEQ ID NO: 60156 - RNA, 19 nt, Artificial Sequence
  Description of Artificial Sequence: Synthetic oligonucleotide
auuuacuguaagaggccau

SEQ ID NO: 60157 - RNA, 19 nt, Artificial Sequence
  Description of Artificial Sequence: Synthetic oligonucleotide
uuagugcucuucugcugua

SEQ ID NO: 60158 - RNA, 19 nt, Artificial Sequence
  Description of Artificial Sequence: Synthetic oligonucleotide
ggccaaaccaagugaggac

SEQ ID NO: 60159 - RNA, 19 nt, Artificial Sequence
  Description of Artificial Sequence: Synthetic oligonucleotide
acuaucccacugucacugu

SEQ ID NO: 60160 - RNA, 19 nt, Artificial Sequence
  Description of Artificial Sequence: Synthetic oligonucleotide
auuugggauuucgugggua

SEQ ID NO: 60161 - RNA, 19 nt, Artificial Sequence
  Description of Artificial Sequence: Synthetic oligonucleotide
ugcugguuauguugcccuc

SEQ ID NO: 60162 - RNA, 19 nt, Artificial Sequence
  Description of Artificial Sequence: Synthetic oligonucleotide
gaaguaccuuacauggccu

SEQ ID NO: 60163 - RNA, 19 nt, Artificial Sequence
  Description of Artificial Sequence: Synthetic oligonucleotide
gaaguuguagcuacacauu

SEQ ID NO: 60164 - RNA, 19 nt, Artificial Sequence
  Description of Artificial Sequence: Synthetic oligonucleotide
aacuaaccagugaguaauu

SEQ ID NO: 60165 - RNA, 19 nt, Artificial Sequence
  Description of Artificial Sequence: Synthetic oligonucleotide
gccaaaccaagugaggaca

SEQ ID NO: 60166 - RNA, 19 nt, Artificial Sequence
  Description of Artificial Sequence: Synthetic oligonucleotide
ucuagcacucugguauauu

SEQ ID NO: 60167 - RNA, 19 nt, Artificial Sequence
  Description of Artificial Sequence: Synthetic oligonucleotide
cuugaucccuaaacaauau

SEQ ID NO: 60168 - RNA, 19 nt, Artificial Sequence
  Description of Artificial Sequence: Synthetic oligonucleotide
cacuaucaaauuacuaguu

SEQ ID NO: 60169 - RNA, 19 nt, Artificial Sequence
  Description of Artificial Sequence: Synthetic oligonucleotide
cuggcuuuauggcgagcuc

SEQ ID NO: 60170 - RNA, 19 nt, Artificial Sequence
  Description of Artificial Sequence: Synthetic oligonucleotide
agcaauagacaaacaucuu

SEQ ID NO: 60171 - RNA, 19 nt, Artificial Sequence
  Description of Artificial Sequence: Synthetic oligonucleotide
agucuagucuucacuugaa

SEQ ID NO: 60172 - RNA, 19 nt, Artificial Sequence
  Description of Artificial Sequence: Synthetic oligonucleotide
guaguuccucugacugugc

SEQ ID NO: 60173 - RNA, 19 nt, Artificial Sequence
  Description of Artificial Sequence: Synthetic oligonucleotide
cagauaccuuauuagggau

SEQ ID NO: 60174 - RNA, 19 nt, Artificial Sequence
  Description of Artificial Sequence: Synthetic oligonucleotide
aagcuaccuauuacacaau

SEQ ID NO: 60175 - RNA, 19 nt, Artificial Sequence
  Description of Artificial Sequence: Synthetic oligonucleotide
caccuacccgcuaaggcua

SEQ ID NO: 60176 - RNA, 19 nt, Artificial Sequence
  Description of Artificial Sequence: Synthetic oligonucleotide
gcauacaccuacccgcuaa

SEQ ID NO: 60177 - RNA, 19 nt, Artificial Sequence
  Description of Artificial Sequence: Synthetic oligonucleotide
guuuucgccauaguuucau

SEQ ID NO: 60178 - RNA, 19 nt, Artificial Sequence
  Description of Artificial Sequence: Synthetic oligonucleotide
aucuagcacucugguauau

SEQ ID NO: 60179 - RNA, 19 nt, Artificial Sequence
  Description of Artificial Sequence: Synthetic oligonucleotide
caucuagcacucugguaua

SEQ ID NO: 60180 - RNA, 19 nt, Artificial Sequence
  Description of Artificial Sequence: Synthetic oligonucleotide
ggcuaacaaaacaucguua

SEQ ID NO: 60181 - RNA, 19 nt, Artificial Sequence
  Description of Artificial Sequence: Synthetic oligonucleotide
gccuguuaauggcaaagua

SEQ ID NO: 60182 - RNA, 19 nt, Artificial Sequence
  Description of Artificial Sequence: Synthetic oligonucleotide
cuacccgcuaaggcuaaca

SEQ ID NO: 60183 - RNA, 19 nt, Artificial Sequence
  Description of Artificial Sequence: Synthetic oligonucleotide
agcauacaccuacccgcua

SEQ ID NO: 60184 - RNA, 19 nt, Artificial Sequence
  Description of Artificial Sequence: Synthetic oligonucleotide
ccaugaguucuuguggguc

SEQ ID NO: 60185 - RNA, 19 nt, Artificial Sequence
  Description of Artificial Sequence: Synthetic oligonucleotide
uguugcccucuugcaaaau

SEQ ID NO: 60186 - RNA, 19 nt, Artificial Sequence
  Description of Artificial Sequence: Synthetic oligonucleotide
ccgcuaaggcuaacaaaac

SEQ ID NO: 60187 - RNA, 19 nt, Artificial Sequence
  Description of Artificial Sequence: Synthetic oligonucleotide
cacuuggggcuuaaugggu

SEQ ID NO: 60188 - RNA, 19 nt, Artificial Sequence
  Description of Artificial Sequence: Synthetic oligonucleotide
gcuacacauuacauuagua

SEQ ID NO: 60189 - RNA, 19 nt, Artificial Sequence
  Description of Artificial Sequence: Synthetic oligonucleotide
cucggcccugccacuggac

SEQ ID NO: 60190 - RNA, 19 nt, Artificial Sequence
  Description of Artificial Sequence: Synthetic oligonucleotide
guaccuuacauggccuacu

SEQ ID NO: 60191 - RNA, 19 nt, Artificial Sequence
  Description of Artificial Sequence: Synthetic oligonucleotide
auggaccgcucuaauuaua

SEQ ID NO: 60192 - RNA, 19 nt, Artificial Sequence
  Description of Artificial Sequence: Synthetic oligonucleotide
gucuuaccugacaccacua

SEQ ID NO: 60193 - RNA, 19 nt, Artificial Sequence
  Description of Artificial Sequence: Synthetic oligonucleotide
ggggcuuaauggguagaca

SEQ ID NO: 60194 - RNA, 19 nt, Artificial Sequence
  Description of Artificial Sequence: Synthetic oligonucleotide
gggauuucguggguaaaau

SEQ ID NO: 60195 - RNA, 19 nt, Artificial Sequence
  Description of Artificial Sequence: Synthetic oligonucleotide
ccguuaaucucuucacagu

SEQ ID NO: 60196 - RNA, 19 nt, Artificial Sequence
  Description of Artificial Sequence: Synthetic oligonucleotide
cguuaaucucuucacaguu

SEQ ID NO: 60197 - RNA, 19 nt, Artificial Sequence
  Description of Artificial Sequence: Synthetic oligonucleotide
accuacccgcuaaggcuaa

SEQ ID NO: 60198 - RNA, 19 nt, Artificial Sequence
  Description of Artificial Sequence: Synthetic oligonucleotide
gcacuacagucaaguuaug

SEQ ID NO: 60199 - RNA, 19 nt, Artificial Sequence
  Description of Artificial Sequence: Synthetic oligonucleotide
cguuagcagggaauuuaaa

SEQ ID NO: 60200 - RNA, 19 nt, Artificial Sequence
  Description of Artificial Sequence: Synthetic oligonucleotide
caguuaccucuguuguguu

SEQ ID NO: 60201 - RNA, 19 nt, Artificial Sequence
  Description of Artificial Sequence: Synthetic oligonucleotide
gcuuuauggcgagcucuua

SEQ ID NO: 60202 - RNA, 19 nt, Artificial Sequence
  Description of Artificial Sequence: Synthetic oligonucleotide
ggcuuuauggcgagcucuu

SEQ ID NO: 60203 - RNA, 19 nt, Artificial Sequence
  Description of Artificial Sequence: Synthetic oligonucleotide
cccugccacuggacuguag

SEQ ID NO: 60204 - RNA, 19 nt, Artificial Sequence
  Description of Artificial Sequence: Synthetic oligonucleotide
ggcaucccaugugaauagu

SEQ ID NO: 60205 - RNA, 19 nt, Artificial Sequence
  Description of Artificial Sequence: Synthetic oligonucleotide
gguacuggugugggcacuu

SEQ ID NO: 60206 - RNA, 19 nt, Artificial Sequence
  Description of Artificial Sequence: Synthetic oligonucleotide
ccuacccgcuaaggcuaac

SEQ ID NO: 60207 - RNA, 19 nt, Artificial Sequence
  Description of Artificial Sequence: Synthetic oligonucleotide
ggguacuggugugggcacu

SEQ ID NO: 60208 - RNA, 19 nt, Artificial Sequence
  Description of Artificial Sequence: Synthetic oligonucleotide
aaacaguuuaacuacaggg

SEQ ID NO: 60209 - RNA, 19 nt, Artificial Sequence
  Description of Artificial Sequence: Synthetic oligonucleotide
uucuuauucacuauggaag

SEQ ID NO: 60210 - RNA, 19 nt, Artificial Sequence
  Description of Artificial Sequence: Synthetic oligonucleotide
aacuaauaucgacauauac

SEQ ID NO: 60211 - RNA, 19 nt, Artificial Sequence
  Description of Artificial Sequence: Synthetic oligonucleotide
uacaauacuauuuugcuug

SEQ ID NO: 60212 - RNA, 19 nt, Artificial Sequence
  Description of Artificial Sequence: Synthetic oligonucleotide
ucaacggugauucagaaac

SEQ ID NO: 60213 - RNA, 19 nt, Artificial Sequence
  Description of Artificial Sequence: Synthetic oligonucleotide
aaaaguuugacgaagcuug

SEQ ID NO: 60214 - RNA, 19 nt, Artificial Sequence
  Description of Artificial Sequence: Synthetic oligonucleotide
uauaguuagaaacacauuu

SEQ ID NO: 60215 - RNA, 19 nt, Artificial Sequence
  Description of Artificial Sequence: Synthetic oligonucleotide
aagucaaacuaauaucgac

SEQ ID NO: 60216 - RNA, 19 nt, Artificial Sequence
  Description of Artificial Sequence: Synthetic oligonucleotide
aauuugaccgggcugacag

SEQ ID NO: 60217 - RNA, 19 nt, Artificial Sequence
  Description of Artificial Sequence: Synthetic oligonucleotide
uuggaaacagauaucagag

SEQ ID NO: 60218 - RNA, 19 nt, Artificial Sequence
  Description of Artificial Sequence: Synthetic oligonucleotide
augggcuugacccaaauac

SEQ ID NO: 60219 - RNA, 19 nt, Artificial Sequence
  Description of Artificial Sequence: Synthetic oligonucleotide
ucgucauagauucauacgc

SEQ ID NO: 60220 - RNA, 19 nt, Artificial Sequence
  Description of Artificial Sequence: Synthetic oligonucleotide
uggaauuuuggccaggcag

SEQ ID NO: 60221 - RNA, 19 nt, Artificial Sequence
  Description of Artificial Sequence: Synthetic oligonucleotide
acuaauacgaaacaguuua

SEQ ID NO: 60222 - RNA, 19 nt, Artificial Sequence
  Description of Artificial Sequence: Synthetic oligonucleotide
cuagauaggaaccagucag

SEQ ID NO: 60223 - RNA, 19 nt, Artificial Sequence
  Description of Artificial Sequence: Synthetic oligonucleotide
acuaaccauuuucaaagcc

SEQ ID NO: 60224 - RNA, 19 nt, Artificial Sequence
  Description of Artificial Sequence: Synthetic oligonucleotide
uuuuaagcagaucucgagc

SEQ ID NO: 60225 - RNA, 19 nt, Artificial Sequence
  Description of Artificial Sequence: Synthetic oligonucleotide
uaguauuacagacagguau

SEQ ID NO: 60226 - RNA, 19 nt, Artificial Sequence
  Description of Artificial Sequence: Synthetic oligonucleotide
ugugguuaacuaaugauuc

SEQ ID NO: 60227 - RNA, 19 nt, Artificial Sequence
  Description of Artificial Sequence: Synthetic oligonucleotide
uuacuaacaacuagggcug

SEQ ID NO: 60228 - RNA, 19 nt, Artificial Sequence
  Description of Artificial Sequence: Synthetic oligonucleotide
uacauuaacgcucccaaac

SEQ ID NO: 60229 - RNA, 19 nt, Artificial Sequence
  Description of Artificial Sequence: Synthetic oligonucleotide
uuuaagcagaucucgagcu

SEQ ID NO: 60230 - RNA, 19 nt, Artificial Sequence
  Description of Artificial Sequence: Synthetic oligonucleotide
uacgaaacaguuuaacuac

SEQ ID NO: 60231 - RNA, 19 nt, Artificial Sequence
  Description of Artificial Sequence: Synthetic oligonucleotide
ucgucugugacacucaugu

SEQ ID NO: 60232 - RNA, 19 nt, Artificial Sequence
  Description of Artificial Sequence: Synthetic oligonucleotide
auaaccucuaccugucccc

SEQ ID NO: 60233 - RNA, 19 nt, Artificial Sequence
  Description of Artificial Sequence: Synthetic oligonucleotide
ugcguauugaaucuuuuga

SEQ ID NO: 60234 - RNA, 19 nt, Artificial Sequence
  Description of Artificial Sequence: Synthetic oligonucleotide
uuugaaucaaacugacuca

SEQ ID NO: 60235 - RNA, 19 nt, Artificial Sequence
  Description of Artificial Sequence: Synthetic oligonucleotide
augcacuuuagccugacuc

SEQ ID NO: 60236 - RNA, 19 nt, Artificial Sequence
  Description of Artificial Sequence: Synthetic oligonucleotide
uuugacgaagcuugcaugc

SEQ ID NO: 60237 - RNA, 19 nt, Artificial Sequence
  Description of Artificial Sequence: Synthetic oligonucleotide
uucgucauagauucauacg

SEQ ID NO: 60238 - RNA, 19 nt, Artificial Sequence
  Description of Artificial Sequence: Synthetic oligonucleotide
uauuacuaacaacuagggc

SEQ ID NO: 60239 - RNA, 19 nt, Artificial Sequence
  Description of Artificial Sequence: Synthetic oligonucleotide
uuuaagacugccacuuuga

SEQ ID NO: 60240 - RNA, 19 nt, Artificial Sequence
  Description of Artificial Sequence: Synthetic oligonucleotide
cauccuacccuuaauacug

SEQ ID NO: 60241 - RNA, 19 nt, Artificial Sequence
  Description of Artificial Sequence: Synthetic oligonucleotide
ugggugacaaauaucauua

SEQ ID NO: 60242 - RNA, 19 nt, Artificial Sequence
  Description of Artificial Sequence: Synthetic oligonucleotide
gauaggaaccagucagucg

SEQ ID NO: 60243 - RNA, 19 nt, Artificial Sequence
  Description of Artificial Sequence: Synthetic oligonucleotide
aacuaguaucuguuccuac

SEQ ID NO: 60244 - RNA, 19 nt, Artificial Sequence
  Description of Artificial Sequence: Synthetic oligonucleotide
aacaucucauacuuugccu

SEQ ID NO: 60245 - RNA, 19 nt, Artificial Sequence
  Description of Artificial Sequence: Synthetic oligonucleotide
auacgaaacaguuuaacua

SEQ ID NO: 60246 - RNA, 19 nt, Artificial Sequence
  Description of Artificial Sequence: Synthetic oligonucleotide
agccacauauguaaaaccc

SEQ ID NO: 60247 - RNA, 19 nt, Artificial Sequence
  Description of Artificial Sequence: Synthetic oligonucleotide
ucgacauauacuuuaaauu

SEQ ID NO: 60248 - RNA, 19 nt, Artificial Sequence
  Description of Artificial Sequence: Synthetic oligonucleotide
auauuacuaacaacuaggg

SEQ ID NO: 60249 - RNA, 19 nt, Artificial Sequence
  Description of Artificial Sequence: Synthetic oligonucleotide
uuuuauucuuuguaccugu

SEQ ID NO: 60250 - RNA, 19 nt, Artificial Sequence
  Description of Artificial Sequence: Synthetic oligonucleotide
aacgcuauaguuagaaaca

SEQ ID NO: 60251 - RNA, 19 nt, Artificial Sequence
  Description of Artificial Sequence: Synthetic oligonucleotide
aauaaauagaguaggccau

SEQ ID NO: 60252 - RNA, 19 nt, Artificial Sequence
  Description of Artificial Sequence: Synthetic oligonucleotide
uuaaucagcaacagaccac

SEQ ID NO: 60253 - RNA, 19 nt, Artificial Sequence
  Description of Artificial Sequence: Synthetic oligonucleotide
uuuugagauacuaaccauu

SEQ ID NO: 60254 - RNA, 19 nt, Artificial Sequence
  Description of Artificial Sequence: Synthetic oligonucleotide
uguggguuauacaauacua

SEQ ID NO: 60255 - RNA, 19 nt, Artificial Sequence
  Description of Artificial Sequence: Synthetic oligonucleotide
ucggcugucggauuggaag

SEQ ID NO: 60256 - RNA, 19 nt, Artificial Sequence
  Description of Artificial Sequence: Synthetic oligonucleotide
aguauuacaacaucucaua

SEQ ID NO: 60257 - RNA, 19 nt, Artificial Sequence
  Description of Artificial Sequence: Synthetic oligonucleotide
cuacccuuaauacugucag

SEQ ID NO: 60258 - RNA, 19 nt, Artificial Sequence
  Description of Artificial Sequence: Synthetic oligonucleotide
aguuaagccuagcacacug

SEQ ID NO: 60259 - RNA, 19 nt, Artificial Sequence
  Description of Artificial Sequence: Synthetic oligonucleotide
accuguaaaucacuuaugu

SEQ ID NO: 60260 - RNA, 19 nt, Artificial Sequence
  Description of Artificial Sequence: Synthetic oligonucleotide
uaacaacuagggcugagga

SEQ ID NO: 60261 - RNA, 19 nt, Artificial Sequence
  Description of Artificial Sequence: Synthetic oligonucleotide
uauucacuauggaagacau

SEQ ID NO: 60262 - RNA, 19 nt, Artificial Sequence
  Description of Artificial Sequence: Synthetic oligonucleotide
aguuagcaguauuugccac

SEQ ID NO: 60263 - RNA, 19 nt, Artificial Sequence
  Description of Artificial Sequence: Synthetic oligonucleotide
uaccaauaugcugagaaga

SEQ ID NO: 60264 - RNA, 19 nt, Artificial Sequence
  Description of Artificial Sequence: Synthetic oligonucleotide
uuaagccuagcacacugca

SEQ ID NO: 60265 - RNA, 19 nt, Artificial Sequence
  Description of Artificial Sequence: Synthetic oligonucleotide
uuaguuucacaugaccuug

SEQ ID NO: 60266 - RNA, 19 nt, Artificial Sequence
  Description of Artificial Sequence: Synthetic oligonucleotide
uuguauggcccagaguucg

SEQ ID NO: 60267 - RNA, 19 nt, Artificial Sequence
  Description of Artificial Sequence: Synthetic oligonucleotide
aaaguuugacgaagcuugc

SEQ ID NO: 60268 - RNA, 19 nt, Artificial Sequence
  Description of Artificial Sequence: Synthetic oligonucleotide
ucgaucuagcccuuguaag

SEQ ID NO: 60269 - RNA, 19 nt, Artificial Sequence
  Description of Artificial Sequence: Synthetic oligonucleotide
ucaaucaauaaguuucuuu

SEQ ID NO: 60270 - RNA, 19 nt, Artificial Sequence
  Description of Artificial Sequence: Synthetic oligonucleotide
acuaguaucuguuccuaca

SEQ ID NO: 60271 - RNA, 19 nt, Artificial Sequence
  Description of Artificial Sequence: Synthetic oligonucleotide
augaauagauucuuugcau

SEQ ID NO: 60272 - RNA, 19 nt, Artificial Sequence
  Description of Artificial Sequence: Synthetic oligonucleotide
uccauuggguauuccacag

SEQ ID NO: 60273 - RNA, 19 nt, Artificial Sequence
  Description of Artificial Sequence: Synthetic oligonucleotide
caauaaaucuucgagguga

SEQ ID NO: 60274 - RNA, 19 nt, Artificial Sequence
  Description of Artificial Sequence: Synthetic oligonucleotide
auaguaggaauauccauuu

SEQ ID NO: 60275 - RNA, 19 nt, Artificial Sequence
  Description of Artificial Sequence: Synthetic oligonucleotide
uaugagcuguaucuuuagc

SEQ ID NO: 60276 - RNA, 19 nt, Artificial Sequence
  Description of Artificial Sequence: Synthetic oligonucleotide
aacaacauccuacccuuaa

SEQ ID NO: 60277 - RNA, 19 nt, Artificial Sequence
  Description of Artificial Sequence: Synthetic oligonucleotide
uacuuugccuaugaaagga

SEQ ID NO: 60278 - RNA, 19 nt, Artificial Sequence
  Description of Artificial Sequence: Synthetic oligonucleotide
acugagaguugagucaucg

SEQ ID NO: 60279 - RNA, 19 nt, Artificial Sequence
  Description of Artificial Sequence: Synthetic oligonucleotide
aguauuagcuccuguuacu

SEQ ID NO: 60280 - RNA, 19 nt, Artificial Sequence
  Description of Artificial Sequence: Synthetic oligonucleotide
uaauacgaaacaguuuaac

SEQ ID NO: 60281 - RNA, 19 nt, Artificial Sequence
  Description of Artificial Sequence: Synthetic oligonucleotide
uuuccaccggucugaaagg

SEQ ID NO: 60282 - RNA, 19 nt, Artificial Sequence
  Description of Artificial Sequence: Synthetic oligonucleotide
acuagauaggaaccaguca

SEQ ID NO: 60283 - RNA, 19 nt, Artificial Sequence
  Description of Artificial Sequence: Synthetic oligonucleotide
aggugucugacguguaaac

SEQ ID NO: 60284 - RNA, 19 nt, Artificial Sequence
  Description of Artificial Sequence: Synthetic oligonucleotide
auaggcgugugcuuucguc

SEQ ID NO: 60285 - RNA, 19 nt, Artificial Sequence
  Description of Artificial Sequence: Synthetic oligonucleotide
ugauguaaaaugccccaaa

SEQ ID NO: 60286 - RNA, 19 nt, Artificial Sequence
  Description of Artificial Sequence: Synthetic oligonucleotide
gcuagccucuuuuagaaag

SEQ ID NO: 60287 - RNA, 19 nt, Artificial Sequence
  Description of Artificial Sequence: Synthetic oligonucleotide
acguguaaacuuugaauca

SEQ ID NO: 60288 - RNA, 19 nt, Artificial Sequence
  Description of Artificial Sequence: Synthetic oligonucleotide
aguuugacgaagcuugcau

SEQ ID NO: 60289 - RNA, 19 nt, Artificial Sequence
  Description of Artificial Sequence: Synthetic oligonucleotide
ucgugggcuaccaauaaau

SEQ ID NO: 60290 - RNA, 19 nt, Artificial Sequence
  Description of Artificial Sequence: Synthetic oligonucleotide
uacuaaccauuuucaaagc

SEQ ID NO: 60291 - RNA, 19 nt, Artificial Sequence
  Description of Artificial Sequence: Synthetic oligonucleotide
agauaggaaccagucaguc

SEQ ID NO: 60292 - RNA, 19 nt, Artificial Sequence
  Description of Artificial Sequence: Synthetic oligonucleotide
uucuaguauuacagacagg

SEQ ID NO: 60293 - RNA, 19 nt, Artificial Sequence
  Description of Artificial Sequence: Synthetic oligonucleotide
ugaaucaaacugacucaca

SEQ ID NO: 60294 - RNA, 19 nt, Artificial Sequence
  Description of Artificial Sequence: Synthetic oligonucleotide
guuugacgaagcuugcaug

SEQ ID NO: 60295 - RNA, 19 nt, Artificial Sequence
  Description of Artificial Sequence: Synthetic oligonucleotide
uaccaaguacccgaaguag

SEQ ID NO: 60296 - RNA, 19 nt, Artificial Sequence
  Description of Artificial Sequence: Synthetic oligonucleotide
aaacccuugcuaauguuga

SEQ ID NO: 60297 - RNA, 19 nt, Artificial Sequence
  Description of Artificial Sequence: Synthetic oligonucleotide
ucugacguguaaacuuuga

SEQ ID NO: 60298 - RNA, 19 nt, Artificial Sequence
  Description of Artificial Sequence: Synthetic oligonucleotide
aacaacuagggcugaggaa

SEQ ID NO: 60299 - RNA, 19 nt, Artificial Sequence
  Description of Artificial Sequence: Synthetic oligonucleotide
uaauguugagaugucacua

SEQ ID NO: 60300 - RNA, 19 nt, Artificial Sequence
  Description of Artificial Sequence: Synthetic oligonucleotide
cacuagauaggaaccaguc

SEQ ID NO: 60301 - RNA, 19 nt, Artificial Sequence
  Description of Artificial Sequence: Synthetic oligonucleotide
ucacuagauaggaaccagu

SEQ ID NO: 60302 - RNA, 19 nt, Artificial Sequence
  Description of Artificial Sequence: Synthetic oligonucleotide
auauugcauaggcgugugc

SEQ ID NO: 60303 - RNA, 19 nt, Artificial Sequence
  Description of Artificial Sequence: Synthetic oligonucleotide
uuugaccgggcugacaggc

SEQ ID NO: 60304 - RNA, 19 nt, Artificial Sequence
  Description of Artificial Sequence: Synthetic oligonucleotide
agaaagguacuguauuaau

SEQ ID NO: 60305 - RNA, 19 nt, Artificial Sequence
  Description of Artificial Sequence: Synthetic oligonucleotide
uguuucgucauagauucau

SEQ ID NO: 60306 - RNA, 19 nt, Artificial Sequence
  Description of Artificial Sequence: Synthetic oligonucleotide
ucacuauggaagacauuca

SEQ ID NO: 60307 - RNA, 19 nt, Artificial Sequence
  Description of Artificial Sequence: Synthetic oligonucleotide
gagaguagaccauggcuac

SEQ ID NO: 60308 - RNA, 19 nt, Artificial Sequence
  Description of Artificial Sequence: Synthetic oligonucleotide
uguccuuaguugcaaguau

SEQ ID NO: 60309 - RNA, 19 nt, Artificial Sequence
  Description of Artificial Sequence: Synthetic oligonucleotide
agggaggcaaauuaaguuu

SEQ ID NO: 60310 - RNA, 19 nt, Artificial Sequence
  Description of Artificial Sequence: Synthetic oligonucleotide
ugacucuuuaagacugcca

SEQ ID NO: 60311 - RNA, 19 nt, Artificial Sequence
  Description of Artificial Sequence: Synthetic oligonucleotide
guaaacuuugaaucaaacu

SEQ ID NO: 60312 - RNA, 19 nt, Artificial Sequence
  Description of Artificial Sequence: Synthetic oligonucleotide
acgcuauaguuagaaacac

SEQ ID NO: 60313 - RNA, 19 nt, Artificial Sequence
  Description of Artificial Sequence: Synthetic oligonucleotide
agcuagguuacuaaaacaa

SEQ ID NO: 60314 - RNA, 19 nt, Artificial Sequence
  Description of Artificial Sequence: Synthetic oligonucleotide
uacuaauacgaaacaguuu

SEQ ID NO: 60315 - RNA, 19 nt, Artificial Sequence
  Description of Artificial Sequence: Synthetic oligonucleotide
gccaucaacaugaaaaccc

SEQ ID NO: 60316 - RNA, 19 nt, Artificial Sequence
  Description of Artificial Sequence: Synthetic oligonucleotide
uuguaagcuagccucuuuu

SEQ ID NO: 60317 - RNA, 19 nt, Artificial Sequence
  Description of Artificial Sequence: Synthetic oligonucleotide
aacccuugcuaauguugag

SEQ ID NO: 60318 - RNA, 19 nt, Artificial Sequence
  Description of Artificial Sequence: Synthetic oligonucleotide
uccuccauccaaagcauuc

SEQ ID NO: 60319 - RNA, 19 nt, Artificial Sequence
  Description of Artificial Sequence: Synthetic oligonucleotide
uuuguauggcccagaguuc

SEQ ID NO: 60320 - RNA, 19 nt, Artificial Sequence
  Description of Artificial Sequence: Synthetic oligonucleotide
uccuuaguugcaaguauua

SEQ ID NO: 60321 - RNA, 19 nt, Artificial Sequence
  Description of Artificial Sequence: Synthetic oligonucleotide
ugguuaacuaaugauucau

SEQ ID NO: 60322 - RNA, 19 nt, Artificial Sequence
  Description of Artificial Sequence: Synthetic oligonucleotide
guaugagcuguaucuuuag

SEQ ID NO: 60323 - RNA, 19 nt, Artificial Sequence
  Description of Artificial Sequence: Synthetic oligonucleotide
uguaccuguaaaucacuua

SEQ ID NO: 60324 - RNA, 19 nt, Artificial Sequence
  Description of Artificial Sequence: Synthetic oligonucleotide
ugucacuagauaggaacca

SEQ ID NO: 60325 - RNA, 19 nt, Artificial Sequence
  Description of Artificial Sequence: Synthetic oligonucleotide
auauugugauagaaaagcu

SEQ ID NO: 60326 - RNA, 19 nt, Artificial Sequence
  Description of Artificial Sequence: Synthetic oligonucleotide
cauuaacgcucccaaacuc

SEQ ID NO: 60327 - RNA, 19 nt, Artificial Sequence
  Description of Artificial Sequence: Synthetic oligonucleotide
ggcaguacuaauacgaaac

SEQ ID NO: 60328 - RNA, 19 nt, Artificial Sequence
  Description of Artificial Sequence: Synthetic oligonucleotide
auuaagucacuaaguuuuc

SEQ ID NO: 60329 - RNA, 19 nt, Artificial Sequence
  Description of Artificial Sequence: Synthetic oligonucleotide
uaggugcuucuccagagaa

SEQ ID NO: 60330 - RNA, 19 nt, Artificial Sequence
  Description of Artificial Sequence: Synthetic oligonucleotide
ucuucgaucuagcccuugu

SEQ ID NO: 60331 - RNA, 19 nt, Artificial Sequence
  Description of Artificial Sequence: Synthetic oligonucleotide
ucggauuggaaguggggcu

SEQ ID NO: 60332 - RNA, 19 nt, Artificial Sequence
  Description of Artificial Sequence: Synthetic oligonucleotide
ugucugacguguaaacuuu

SEQ ID NO: 60333 - RNA, 19 nt, Artificial Sequence
  Description of Artificial Sequence: Synthetic oligonucleotide
aacggugauucagaaacaa

SEQ ID NO: 60334 - RNA, 19 nt, Artificial Sequence
  Description of Artificial Sequence: Synthetic oligonucleotide
agguguauuauaaugcuuu

SEQ ID NO: 60335 - RNA, 19 nt, Artificial Sequence
  Description of Artificial Sequence: Synthetic oligonucleotide
agauauuugcguauugaau

SEQ ID NO: 60336 - RNA, 19 nt, Artificial Sequence
  Description of Artificial Sequence: Synthetic oligonucleotide
acaauacuauuuugcuuga

SEQ ID NO: 60337 - RNA, 19 nt, Artificial Sequence
  Description of Artificial Sequence: Synthetic oligonucleotide
aacggcacugacucuuuaa

SEQ ID NO: 60338 - RNA, 19 nt, Artificial Sequence
  Description of Artificial Sequence: Synthetic oligonucleotide
aauaaaucuucgaggugau

SEQ ID NO: 60339 - RNA, 19 nt, Artificial Sequence
  Description of Artificial Sequence: Synthetic oligonucleotide
auguugagaugucacuaga

SEQ ID NO: 60340 - RNA, 19 nt, Artificial Sequence
  Description of Artificial Sequence: Synthetic oligonucleotide
gaguaggccauauugcaua

SEQ ID NO: 60341 - RNA, 19 nt, Artificial Sequence
  Description of Artificial Sequence: Synthetic oligonucleotide
gauaacccuucuuugacau

SEQ ID NO: 60342 - RNA, 19 nt, Artificial Sequence
  Description of Artificial Sequence: Synthetic oligonucleotide
gucggauuggaaguggggc

SEQ ID NO: 60343 - RNA, 19 nt, Artificial Sequence
  Description of Artificial Sequence: Synthetic oligonucleotide
ucaaacuaauaucgacaua

SEQ ID NO: 60344 - RNA, 19 nt, Artificial Sequence
  Description of Artificial Sequence: Synthetic oligonucleotide
gcacauauuacuaacaacu

SEQ ID NO: 60345 - RNA, 19 nt, Artificial Sequence
  Description of Artificial Sequence: Synthetic oligonucleotide
cucguccccagaaaucccc

SEQ ID NO: 60346 - RNA, 19 nt, Artificial Sequence
  Description of Artificial Sequence: Synthetic oligonucleotide
uacccgaaguagcucaaaa

SEQ ID NO: 60347 - RNA, 19 nt, Artificial Sequence
  Description of Artificial Sequence: Synthetic oligonucleotide
auuugaccgggcugacagg

SEQ ID NO: 60348 - RNA, 19 nt, Artificial Sequence
  Description of Artificial Sequence: Synthetic oligonucleotide
ugucuguggguuauacaau

SEQ ID NO: 60349 - RNA, 19 nt, Artificial Sequence
  Description of Artificial Sequence: Synthetic oligonucleotide
uaaauagaguaggccauau

SEQ ID NO: 60350 - RNA, 19 nt, Artificial Sequence
  Description of Artificial Sequence: Synthetic oligonucleotide
aguauuacagacagguauu

SEQ ID NO: 60351 - RNA, 19 nt, Artificial Sequence
  Description of Artificial Sequence: Synthetic oligonucleotide
gaguucggcugucggauug

SEQ ID NO: 60352 - RNA, 19 nt, Artificial Sequence
  Description of Artificial Sequence: Synthetic oligonucleotide
gcaugucguacauuaacgc

SEQ ID NO: 60353 - RNA, 19 nt, Artificial Sequence
  Description of Artificial Sequence: Synthetic oligonucleotide
gcagcuagguuacuaaaac

SEQ ID NO: 60354 - RNA, 19 nt, Artificial Sequence
  Description of Artificial Sequence: Synthetic oligonucleotide
agacagacugagaguagac

SEQ ID NO: 60355 - RNA, 19 nt, Artificial Sequence
  Description of Artificial Sequence: Synthetic oligonucleotide
uggcaguacuaauacgaaa

SEQ ID NO: 60356 - RNA, 19 nt, Artificial Sequence
  Description of Artificial Sequence: Synthetic oligonucleotide
uuaagcagaucucgagcuu

SEQ ID NO: 60357 - RNA, 19 nt, Artificial Sequence
  Description of Artificial Sequence: Synthetic oligonucleotide
aaguuugacgaagcuugca

SEQ ID NO: 60358 - RNA, 19 nt, Artificial Sequence
  Description of Artificial Sequence: Synthetic oligonucleotide
ccuaguuaugcacuuuagc

SEQ ID NO: 60359 - RNA, 19 nt, Artificial Sequence
  Description of Artificial Sequence: Synthetic oligonucleotide
gagaaagguacuguauuaa

SEQ ID NO: 60360 - RNA, 19 nt, Artificial Sequence
  Description of Artificial Sequence: Synthetic oligonucleotide
ugcucacacaucccucccc

SEQ ID NO: 60361 - RNA, 19 nt, Artificial Sequence
  Description of Artificial Sequence: Synthetic oligonucleotide
uucaacggugauucagaaa

SEQ ID NO: 60362 - RNA, 19 nt, Artificial Sequence
  Description of Artificial Sequence: Synthetic oligonucleotide
uugaccgggcugacaggcg

SEQ ID NO: 60363 - RNA, 19 nt, Artificial Sequence
  Description of Artificial Sequence: Synthetic oligonucleotide
gcaguauuugccacuauug

SEQ ID NO: 60364 - RNA, 19 nt, Artificial Sequence
  Description of Artificial Sequence: Synthetic oligonucleotide
uucgucugugacacucaug

SEQ ID NO: 60365 - RNA, 19 nt, Artificial Sequence
  Description of Artificial Sequence: Synthetic oligonucleotide
acggugauucagaaacaac

SEQ ID NO: 60366 - RNA, 19 nt, Artificial Sequence
  Description of Artificial Sequence: Synthetic oligonucleotide
uuucgucugugacacucau

SEQ ID NO: 60367 - RNA, 19 nt, Artificial Sequence
  Description of Artificial Sequence: Synthetic oligonucleotide
acaacauccuacccuuaau

SEQ ID NO: 60368 - RNA, 19 nt, Artificial Sequence
  Description of Artificial Sequence: Synthetic oligonucleotide
uucgugggcuaccaauaaa

SEQ ID NO: 60369 - RNA, 19 nt, Artificial Sequence
  Description of Artificial Sequence: Synthetic oligonucleotide
ugcuccggccguuuggaga

SEQ ID NO: 60370 - RNA, 19 nt, Artificial Sequence
  Description of Artificial Sequence: Synthetic oligonucleotide
accaaccaauaauuuugca

SEQ ID NO: 60371 - RNA, 19 nt, Artificial Sequence
  Description of Artificial Sequence: Synthetic oligonucleotide
agcauuguuucgucauaga

SEQ ID NO: 60372 - RNA, 19 nt, Artificial Sequence
  Description of Artificial Sequence: Synthetic oligonucleotide
cuaguaucuguuccuacaa

SEQ ID NO: 60373 - RNA, 19 nt, Artificial Sequence
  Description of Artificial Sequence: Synthetic oligonucleotide
agaauuugaccgggcugac

SEQ ID NO: 60374 - RNA, 19 nt, Artificial Sequence
  Description of Artificial Sequence: Synthetic oligonucleotide
uccaccggucugaaaggca

SEQ ID NO: 60375 - RNA, 19 nt, Artificial Sequence
  Description of Artificial Sequence: Synthetic oligonucleotide
ucucgagcuucuuguguga

SEQ ID NO: 60376 - RNA, 19 nt, Artificial Sequence
  Description of Artificial Sequence: Synthetic oligonucleotide
aagguguauuauaaugcuu

SEQ ID NO: 60377 - RNA, 19 nt, Artificial Sequence
  Description of Artificial Sequence: Synthetic oligonucleotide
gaauuuuggccaggcaguc

SEQ ID NO: 60378 - RNA, 19 nt, Artificial Sequence
  Description of Artificial Sequence: Synthetic oligonucleotide
agacugagaguagaccaug

SEQ ID NO: 60379 - RNA, 19 nt, Artificial Sequence
  Description of Artificial Sequence: Synthetic oligonucleotide
aaacuaauaucgacauaua

SEQ ID NO: 60380 - RNA, 19 nt, Artificial Sequence
  Description of Artificial Sequence: Synthetic oligonucleotide
ucuucgaggugaucggauu

SEQ ID NO: 60381 - RNA, 19 nt, Artificial Sequence
  Description of Artificial Sequence: Synthetic oligonucleotide
gucaacgcuauaguuagaa

SEQ ID NO: 60382 - RNA, 19 nt, Artificial Sequence
  Description of Artificial Sequence: Synthetic oligonucleotide
guuaagccuagcacacugc

SEQ ID NO: 60383 - RNA, 19 nt, Artificial Sequence
  Description of Artificial Sequence: Synthetic oligonucleotide
caucggggcugucaacagg

SEQ ID NO: 60384 - RNA, 19 nt, Artificial Sequence
  Description of Artificial Sequence: Synthetic oligonucleotide
gguguauuauaaugcuuuc

SEQ ID NO: 60385 - RNA, 19 nt, Artificial Sequence
  Description of Artificial Sequence: Synthetic oligonucleotide
gcuaccaauaaaucuucga

SEQ ID NO: 60386 - RNA, 19 nt, Artificial Sequence
  Description of Artificial Sequence: Synthetic oligonucleotide
gccguuuggagaucauagg

SEQ ID NO: 60387 - RNA, 19 nt, Artificial Sequence
  Description of Artificial Sequence: Synthetic oligonucleotide
uagcccuuguaagcuagcc

SEQ ID NO: 60388 - RNA, 19 nt, Artificial Sequence
  Description of Artificial Sequence: Synthetic oligonucleotide
auaaauagaguaggccaua

SEQ ID NO: 60389 - RNA, 19 nt, Artificial Sequence
  Description of Artificial Sequence: Synthetic oligonucleotide
gcccuuguaagcuagccuc

SEQ ID NO: 60390 - RNA, 19 nt, Artificial Sequence
  Description of Artificial Sequence: Synthetic oligonucleotide
uccagcuaacuaguaucug

SEQ ID NO: 60391 - RNA, 19 nt, Artificial Sequence
  Description of Artificial Sequence: Synthetic oligonucleotide
auuccguguugcuggaaaa

SEQ ID NO: 60392 - RNA, 19 nt, Artificial Sequence
  Description of Artificial Sequence: Synthetic oligonucleotide
cagcuagguuacuaaaaca

SEQ ID NO: 60393 - RNA, 19 nt, Artificial Sequence
  Description of Artificial Sequence: Synthetic oligonucleotide
cuaauacgaaacaguuuaa

SEQ ID NO: 60394 - RNA, 19 nt, Artificial Sequence
  Description of Artificial Sequence: Synthetic oligonucleotide
cucuaucuccccugcuuac

SEQ ID NO: 60395 - RNA, 19 nt, Artificial Sequence
  Description of Artificial Sequence: Synthetic oligonucleotide
aggccauauugcauaggcg

SEQ ID NO: 60396 - RNA, 19 nt, Artificial Sequence
  Description of Artificial Sequence: Synthetic oligonucleotide
ggcuugacccaaauacugg

SEQ ID NO: 60397 - RNA, 19 nt, Artificial Sequence
  Description of Artificial Sequence: Synthetic oligonucleotide
gacgagaagcagcauuucu

SEQ ID NO: 60398 - RNA, 19 nt, Artificial Sequence
  Description of Artificial Sequence: Synthetic oligonucleotide
uuacugcccuaguuaugca

SEQ ID NO: 60399 - RNA, 19 nt, Artificial Sequence
  Description of Artificial Sequence: Synthetic oligonucleotide
agacgagaagcagcauuuc

SEQ ID NO: 60400 - RNA, 19 nt, Artificial Sequence
  Description of Artificial Sequence: Synthetic oligonucleotide
ugacaggcguucgugggcu

SEQ ID NO: 60401 - RNA, 19 nt, Artificial Sequence
  Description of Artificial Sequence: Synthetic oligonucleotide
cccgaaguagcucaaaaca

SEQ ID NO: 60402 - RNA, 19 nt, Artificial Sequence
  Description of Artificial Sequence: Synthetic oligonucleotide
caacauccuacccuuaaua

SEQ ID NO: 60403 - RNA, 19 nt, Artificial Sequence
  Description of Artificial Sequence: Synthetic oligonucleotide
cgagcuagaaguucuuccc

SEQ ID NO: 60404 - RNA, 19 nt, Artificial Sequence
  Description of Artificial Sequence: Synthetic oligonucleotide
aaaggccaucaguuauuuu

SEQ ID NO: 60405 - RNA, 19 nt, Artificial Sequence
  Description of Artificial Sequence: Synthetic oligonucleotide
guacuaauacgaaacaguu

SEQ ID NO: 60406 - RNA, 19 nt, Artificial Sequence
  Description of Artificial Sequence: Synthetic oligonucleotide
cgacauauacuuuaaauua

SEQ ID NO: 60407 - RNA, 19 nt, Artificial Sequence
  Description of Artificial Sequence: Synthetic oligonucleotide
uaacgcucccaaacuccac

SEQ ID NO: 60408 - RNA, 19 nt, Artificial Sequence
  Description of Artificial Sequence: Synthetic oligonucleotide
cuagguaacggcacugacu

SEQ ID NO: 60409 - RNA, 19 nt, Artificial Sequence
  Description of Artificial Sequence: Synthetic oligonucleotide
cagaucucgagcuucuugu

SEQ ID NO: 60410 - RNA, 19 nt, Artificial Sequence
  Description of Artificial Sequence: Synthetic oligonucleotide
gaucuagcccuuguaagcu

SEQ ID NO: 60411 - RNA, 19 nt, Artificial Sequence
  Description of Artificial Sequence: Synthetic oligonucleotide
acuuugaaucaaacugacu

SEQ ID NO: 60412 - RNA, 19 nt, Artificial Sequence
  Description of Artificial Sequence: Synthetic oligonucleotide
cgaucuagcccuuguaagc

SEQ ID NO: 60413 - RNA, 19 nt, Artificial Sequence
  Description of Artificial Sequence: Synthetic oligonucleotide
cuguaguguuaagagucac

SEQ ID NO: 60414 - RNA, 19 nt, Artificial Sequence
  Description of Artificial Sequence: Synthetic oligonucleotide
aguucggcugucggauugg

SEQ ID NO: 60415 - RNA, 19 nt, Artificial Sequence
  Description of Artificial Sequence: Synthetic oligonucleotide
acgaaacaguuuaacuaca

SEQ ID NO: 60416 - RNA, 19 nt, Artificial Sequence
  Description of Artificial Sequence: Synthetic oligonucleotide
uauuugcguauugaaucuu

SEQ ID NO: 60417 - RNA, 19 nt, Artificial Sequence
  Description of Artificial Sequence: Synthetic oligonucleotide
cuuuugagauacuaaccau

SEQ ID NO: 60418 - RNA, 19 nt, Artificial Sequence
  Description of Artificial Sequence: Synthetic oligonucleotide
cugaggauuugccgugcug

SEQ ID NO: 60419 - RNA, 19 nt, Artificial Sequence
  Description of Artificial Sequence: Synthetic oligonucleotide
ggauaacccuucuuugaca

SEQ ID NO: 60420 - RNA, 19 nt, Artificial Sequence
  Description of Artificial Sequence: Synthetic oligonucleotide
cugacguguaaacuuugaa

SEQ ID NO: 60421 - RNA, 19 nt, Artificial Sequence
  Description of Artificial Sequence: Synthetic oligonucleotide
guaggccauauugcauagg

SEQ ID NO: 60422 - RNA, 19 nt, Artificial Sequence
  Description of Artificial Sequence: Synthetic oligonucleotide
cuucaggcuucaacgguga

SEQ ID NO: 60423 - RNA, 19 nt, Artificial Sequence
  Description of Artificial Sequence: Synthetic oligonucleotide
cuaguauuacagacaggua

SEQ ID NO: 60424 - RNA, 19 nt, Artificial Sequence
  Description of Artificial Sequence: Synthetic oligonucleotide
agaguaggccauauugcau

SEQ ID NO: 60425 - RNA, 19 nt, Artificial Sequence
  Description of Artificial Sequence: Synthetic oligonucleotide
cuucaacggugauucagaa

SEQ ID NO: 60426 - RNA, 19 nt, Artificial Sequence
  Description of Artificial Sequence: Synthetic oligonucleotide
gugucugacguguaaacuu

SEQ ID NO: 60427 - RNA, 19 nt, Artificial Sequence
  Description of Artificial Sequence: Synthetic oligonucleotide
ugauccccuuuugauguaa

SEQ ID NO: 60428 - RNA, 19 nt, Artificial Sequence
  Description of Artificial Sequence: Synthetic oligonucleotide
cuuccgagcuagaaguucu

SEQ ID NO: 60429 - RNA, 19 nt, Artificial Sequence
  Description of Artificial Sequence: Synthetic oligonucleotide
ccaauaaaucuucgaggug

SEQ ID NO: 60430 - RNA, 19 nt, Artificial Sequence
  Description of Artificial Sequence: Synthetic oligonucleotide
ugccuccccgcucauuguc

SEQ ID NO: 60431 - RNA, 19 nt, Artificial Sequence
  Description of Artificial Sequence: Synthetic oligonucleotide
caaguacccgaaguagcuc

SEQ ID NO: 60432 - RNA, 19 nt, Artificial Sequence
  Description of Artificial Sequence: Synthetic oligonucleotide
uacuaacaacuagggcuga

SEQ ID NO: 60433 - RNA, 19 nt, Artificial Sequence
  Description of Artificial Sequence: Synthetic oligonucleotide
guagggaggcaaauuaagu

SEQ ID NO: 60434 - RNA, 19 nt, Artificial Sequence
  Description of Artificial Sequence: Synthetic oligonucleotide
uucggcugucggauuggaa

SEQ ID NO: 60435 - RNA, 19 nt, Artificial Sequence
  Description of Artificial Sequence: Synthetic oligonucleotide
gaauuugaccgggcugaca

SEQ ID NO: 60436 - RNA, 19 nt, Artificial Sequence
  Description of Artificial Sequence: Synthetic oligonucleotide
ugccacuauugcuggcagu

SEQ ID NO: 60437 - RNA, 19 nt, Artificial Sequence
  Description of Artificial Sequence: Synthetic oligonucleotide
aaccucuaccuguccccaa

SEQ ID NO: 60438 - RNA, 19 nt, Artificial Sequence
  Description of Artificial Sequence: Synthetic oligonucleotide
uggcuacccucuucccugc

SEQ ID NO: 60439 - RNA, 19 nt, Artificial Sequence
  Description of Artificial Sequence: Synthetic oligonucleotide
guucgugggcuaccaauaa

SEQ ID NO: 60440 - RNA, 19 nt, Artificial Sequence
  Description of Artificial Sequence: Synthetic oligonucleotide
caacggugauucagaaaca

SEQ ID NO: 60441 - RNA, 19 nt, Artificial Sequence
  Description of Artificial Sequence: Synthetic oligonucleotide
cuguggguuauacaauacu

SEQ ID NO: 60442 - RNA, 19 nt, Artificial Sequence
  Description of Artificial Sequence: Synthetic oligonucleotide
acgcagaugcuccggccgu

SEQ ID NO: 60443 - RNA, 19 nt, Artificial Sequence
  Description of Artificial Sequence: Synthetic oligonucleotide
ccguuuggagaucauagga

SEQ ID NO: 60444 - RNA, 19 nt, Artificial Sequence
  Description of Artificial Sequence: Synthetic oligonucleotide
accggucugaaaggcauaa

SEQ ID NO: 60445 - RNA, 19 nt, Artificial Sequence
  Description of Artificial Sequence: Synthetic oligonucleotide
ggaauuuuggccaggcagu

SEQ ID NO: 60446 - RNA, 19 nt, Artificial Sequence
  Description of Artificial Sequence: Synthetic oligonucleotide
gcugucggauuggaagugg

SEQ ID NO: 60447 - RNA, 19 nt, Artificial Sequence
  Description of Artificial Sequence: Synthetic oligonucleotide
gacacucaugugacaccug

SEQ ID NO: 60448 - RNA, 19 nt, Artificial Sequence
  Description of Artificial Sequence: Synthetic oligonucleotide
guggguuauacaauacuau

SEQ ID NO: 60449 - RNA, 19 nt, Artificial Sequence
  Description of Artificial Sequence: Synthetic oligonucleotide
cacaaguccugggugacaa

SEQ ID NO: 60450 - RNA, 19 nt, Artificial Sequence
  Description of Artificial Sequence: Synthetic oligonucleotide
ccaaccaauaauuuugcau

SEQ ID NO: 60451 - RNA, 19 nt, Artificial Sequence
  Description of Artificial Sequence: Synthetic oligonucleotide
gcuugcaugcuaauuuguc

SEQ ID NO: 60452 - RNA, 19 nt, Artificial Sequence
  Description of Artificial Sequence: Synthetic oligonucleotide
agauggagccacauaugua

SEQ ID NO: 60453 - RNA, 19 nt, Artificial Sequence
  Description of Artificial Sequence: Synthetic oligonucleotide
agcacgauuguggccacuu

SEQ ID NO: 60454 - RNA, 19 nt, Artificial Sequence
  Description of Artificial Sequence: Synthetic oligonucleotide
ccuacccuuaauacuguca

SEQ ID NO: 60455 - RNA, 19 nt, Artificial Sequence
  Description of Artificial Sequence: Synthetic oligonucleotide
gcuucaacggugauucaga

SEQ ID NO: 60456 - RNA, 19 nt, Artificial Sequence
  Description of Artificial Sequence: Synthetic oligonucleotide
gcauuguuucgucauagau

SEQ ID NO: 60457 - RNA, 19 nt, Artificial Sequence
  Description of Artificial Sequence: Synthetic oligonucleotide
acgaagcuugcaugcuaau

SEQ ID NO: 60458 - RNA, 19 nt, Artificial Sequence
  Description of Artificial Sequence: Synthetic oligonucleotide
cucauacuuugccuaugaa

SEQ ID NO: 60459 - RNA, 19 nt, Artificial Sequence
  Description of Artificial Sequence: Synthetic oligonucleotide
aucuucgaggugaucggau

SEQ ID NO: 60460 - RNA, 19 nt, Artificial Sequence
  Description of Artificial Sequence: Synthetic oligonucleotide
agguaacggcacugacucu

SEQ ID NO: 60461 - RNA, 19 nt, Artificial Sequence
  Description of Artificial Sequence: Synthetic oligonucleotide
uagcaguauuugccacuau

SEQ ID NO: 60462 - RNA, 19 nt, Artificial Sequence
  Description of Artificial Sequence: Synthetic oligonucleotide
uacugucaguuuggagcca

SEQ ID NO: 60463 - RNA, 19 nt, Artificial Sequence
  Description of Artificial Sequence: Synthetic oligonucleotide
guuucgucauagauucaua

SEQ ID NO: 60464 - RNA, 19 nt, Artificial Sequence
  Description of Artificial Sequence: Synthetic oligonucleotide
cguacauuaacgcucccaa

SEQ ID NO: 60465 - RNA, 19 nt, Artificial Sequence
  Description of Artificial Sequence: Synthetic oligonucleotide
cuucgaucuagcccuugua

SEQ ID NO: 60466 - RNA, 19 nt, Artificial Sequence
  Description of Artificial Sequence: Synthetic oligonucleotide
gcauaggcgugugcuuucg

SEQ ID NO: 60467 - RNA, 19 nt, Artificial Sequence
  Description of Artificial Sequence: Synthetic oligonucleotide
acauguuuucacagucaua

SEQ ID NO: 60468 - RNA, 19 nt, Artificial Sequence
  Description of Artificial Sequence: Synthetic oligonucleotide
caucucauacuuugccuau

SEQ ID NO: 60469 - RNA, 19 nt, Artificial Sequence
  Description of Artificial Sequence: Synthetic oligonucleotide
aucuucgaucuagcccuug

SEQ ID NO: 60470 - RNA, 19 nt, Artificial Sequence
  Description of Artificial Sequence: Synthetic oligonucleotide
augauccccuuuugaugua

SEQ ID NO: 60471 - RNA, 19 nt, Artificial Sequence
  Description of Artificial Sequence: Synthetic oligonucleotide
augccuccccgcucauugu

SEQ ID NO: 60472 - RNA, 19 nt, Artificial Sequence
  Description of Artificial Sequence: Synthetic oligonucleotide
cgucauagauucauacgca

SEQ ID NO: 60473 - RNA, 19 nt, Artificial Sequence
  Description of Artificial Sequence: Synthetic oligonucleotide
aaucuucgaucuagcccuu

SEQ ID NO: 60474 - RNA, 19 nt, Artificial Sequence
  Description of Artificial Sequence: Synthetic oligonucleotide
aguacccgaaguagcucaa

SEQ ID NO: 60475 - RNA, 19 nt, Artificial Sequence
  Description of Artificial Sequence: Synthetic oligonucleotide
cgugggcuaccaauaaauc

SEQ ID NO: 60476 - RNA, 19 nt, Artificial Sequence
  Description of Artificial Sequence: Synthetic oligonucleotide
ccgugcuggcugaagcacc

SEQ ID NO: 60477 - RNA, 19 nt, Artificial Sequence
  Description of Artificial Sequence: Synthetic oligonucleotide
ccuccagaauauuccgcuc

SEQ ID NO: 60478 - RNA, 19 nt, Artificial Sequence
  Description of Artificial Sequence: Synthetic oligonucleotide
ccaaguacccgaaguagcu

SEQ ID NO: 60479 - RNA, 19 nt, Artificial Sequence
  Description of Artificial Sequence: Synthetic oligonucleotide
ggcugucggauuggaagug

SEQ ID NO: 60480 - RNA, 19 nt, Artificial Sequence
  Description of Artificial Sequence: Synthetic oligonucleotide
ggugucugacguguaaacu

SEQ ID NO: 60481 - RNA, 19 nt, Artificial Sequence
  Description of Artificial Sequence: Synthetic oligonucleotide
gguaacggcacugacucuu

SEQ ID NO: 60482 - RNA, 19 nt, Artificial Sequence
  Description of Artificial Sequence: Synthetic oligonucleotide
ggcagucaacgcuauaguu

SEQ ID NO: 60483 - RNA, 19 nt, Artificial Sequence
  Description of Artificial Sequence: Synthetic oligonucleotide
agucaacgcuauaguuaga

SEQ ID NO: 60484 - RNA, 19 nt, Artificial Sequence
  Description of Artificial Sequence: Synthetic oligonucleotide
aggcguucgugggcuacca

SEQ ID NO: 60485 - RNA, 19 nt, Artificial Sequence
  Description of Artificial Sequence: Synthetic oligonucleotide
ccgaaguagcucaaaacau

SEQ ID NO: 60486 - RNA, 19 nt, Artificial Sequence
  Description of Artificial Sequence: Synthetic oligonucleotide
gaaauccccaggagagaau

SEQ ID NO: 60487 - RNA, 19 nt, Artificial Sequence
  Description of Artificial Sequence: Synthetic oligonucleotide
gguuaacuaaugauucauu

SEQ ID NO: 60488 - RNA, 19 nt, Artificial Sequence
  Description of Artificial Sequence: Synthetic oligonucleotide
cuuguaagcuagccucuuu

SEQ ID NO: 60489 - RNA, 19 nt, Artificial Sequence
  Description of Artificial Sequence: Synthetic oligonucleotide
cccaaggcuugcaguuaag

SEQ ID NO: 60490 - RNA, 19 nt, Artificial Sequence
  Description of Artificial Sequence: Synthetic oligonucleotide
ccuccccgcucauugucac

SEQ ID NO: 60491 - RNA, 19 nt, Artificial Sequence
  Description of Artificial Sequence: Synthetic oligonucleotide
guacccgaaguagcucaaa

SEQ ID NO: 60492 - RNA, 19 nt, Artificial Sequence
  Description of Artificial Sequence: Synthetic oligonucleotide
gcuccggccguuuggagau

SEQ ID NO: 60493 - RNA, 19 nt, Artificial Sequence
  Description of Artificial Sequence: Synthetic oligonucleotide
gcguucgugggcuaccaau

SEQ ID NO: 60494 - RNA, 19 nt, Artificial Sequence
  Description of Artificial Sequence: Synthetic oligonucleotide
auuugccgugcuggcugaa

SEQ ID NO: 60495 - RNA, 19 nt, Artificial Sequence
  Description of Artificial Sequence: Synthetic oligonucleotide
caccggucugaaaggcaua

SEQ ID NO: 60496 - RNA, 19 nt, Artificial Sequence
  Description of Artificial Sequence: Synthetic oligonucleotide
cguucgugggcuaccaaua

SEQ ID NO: 60497 - RNA, 19 nt, Artificial Sequence
  Description of Artificial Sequence: Synthetic oligonucleotide
cauaggcgugugcuuucgu

SEQ ID NO: 60498 - RNA, 19 nt, Artificial Sequence
  Description of Artificial Sequence: Synthetic oligonucleotide
ccauauugcauaggcgugu

SEQ ID NO: 60499 - RNA, 19 nt, Artificial Sequence
  Description of Artificial Sequence: Synthetic oligonucleotide
gaggugcuccagucagcau

SEQ ID NO: 60500 - RNA, 19 nt, Artificial Sequence
  Description of Artificial Sequence: Synthetic oligonucleotide
guaacggcacugacucuuu

SEQ ID NO: 60501 - RNA, 19 nt, Artificial Sequence
  Description of Artificial Sequence: Synthetic oligonucleotide
ccaccggucugaaaggcau

SEQ ID NO: 60502 - RNA, 19 nt, Artificial Sequence
  Description of Artificial Sequence: Synthetic oligonucleotide
ggucucuaucuccccugcu

SEQ ID NO: 60503 - RNA, 19 nt, Artificial Sequence
  Description of Artificial Sequence: Synthetic oligonucleotide
ccugcuuacugcccuaguu

SEQ ID NO: 60504 - RNA, 19 nt, Artificial Sequence
  Description of Artificial Sequence: Synthetic oligonucleotide
gggcugaugccuccccgcu

SEQ ID NO: 60505 - RNA, 19 nt, Artificial Sequence
  Description of Artificial Sequence: Synthetic oligonucleotide
ccgggcugacaggcguucg

SEQ ID NO: 60506 - RNA, 19 nt, Artificial Sequence
  Description of Artificial Sequence: Synthetic oligonucleotide
ggcguucgugggcuaccaa

SEQ ID NO: 60507 - RNA, 19 nt, Artificial Sequence
  Description of Artificial Sequence: Synthetic oligonucleotide
cgugugcuuucgucuguga

SEQ ID NO: 60508 - RNA, 19 nt, Artificial Sequence
  Description of Artificial Sequence: Synthetic oligonucleotide
gaccgggcugacaggcguu

SEQ ID NO: 60509 - RNA, 19 nt, Artificial Sequence
  Description of Artificial Sequence: Synthetic oligonucleotide
cagcacgauuguggccacu

SEQ ID NO: 60510 - RNA, 19 nt, Artificial Sequence
  Description of Artificial Sequence: Synthetic oligonucleotide
ccggccguuuggagaucau

SEQ ID NO: 60511 - RNA, 19 nt, Artificial Sequence
  Description of Artificial Sequence: Synthetic oligonucleotide
aucaguaucacacaaauga

SEQ ID NO: 60512 - RNA, 19 nt, Artificial Sequence
  Description of Artificial Sequence: Synthetic oligonucleotide
aauacaaaguggcaguauc

SEQ ID NO: 60513 - RNA, 19 nt, Artificial Sequence
  Description of Artificial Sequence: Synthetic oligonucleotide
agccaagugacuuagaagg

SEQ ID NO: 60514 - RNA, 19 nt, Artificial Sequence
  Description of Artificial Sequence: Synthetic oligonucleotide
  modified_base (8)..(8): a, c, u, g, unknown or other
acaguagnaaacuauacag

SEQ ID NO: 60515 - RNA, 19 nt, Artificial Sequence
  Description of Artificial Sequence: Synthetic oligonucleotide
uuuuaugcaaagcucggcg

SEQ ID NO: 60516 - RNA, 19 nt, Artificial Sequence
  Description of Artificial Sequence: Synthetic oligonucleotide
gagcauauuacuuccaugg

SEQ ID NO: 60517 - RNA, 19 nt, Artificial Sequence
  Description of Artificial Sequence: Synthetic oligonucleotide
cuauuuuaugcaaagcucg

SEQ ID NO: 60518 - RNA, 19 nt, Artificial Sequence
  Description of Artificial Sequence: Synthetic oligonucleotide
uucuguuacagacuuauag

SEQ ID NO: 60519 - RNA, 19 nt, Artificial Sequence
  Description of Artificial Sequence: Synthetic oligonucleotide
ucuuacuuugcucauaggc

SEQ ID NO: 60520 - RNA, 19 nt, Artificial Sequence
  Description of Artificial Sequence: Synthetic oligonucleotide
aaagcacucaaauagcaug

SEQ ID NO: 60521 - RNA, 19 nt, Artificial Sequence
  Description of Artificial Sequence: Synthetic oligonucleotide
aggcuuacuacuuagaaag

SEQ ID NO: 60522 - RNA, 19 nt, Artificial Sequence
  Description of Artificial Sequence: Synthetic oligonucleotide
aagccgugaaauaagagcc

SEQ ID NO: 60523 - RNA, 19 nt, Artificial Sequence
  Description of Artificial Sequence: Synthetic oligonucleotide
agaauaggcauuuuggaag

SEQ ID NO: 60524 - RNA, 19 nt, Artificial Sequence
  Description of Artificial Sequence: Synthetic oligonucleotide
uuagcuaggaggaagugcc

SEQ ID NO: 60525 - RNA, 19 nt, Artificial Sequence
  Description of Artificial Sequence: Synthetic oligonucleotide
gaaaacucagccuuccugg

SEQ ID NO: 60526 - RNA, 19 nt, Artificial Sequence
  Description of Artificial Sequence: Synthetic oligonucleotide
ucuaaguuagccuaagaca

SEQ ID NO: 60527 - RNA, 19 nt, Artificial Sequence
  Description of Artificial Sequence: Synthetic oligonucleotide
auagagccuauauuuagcc

SEQ ID NO: 60528 - RNA, 19 nt, Artificial Sequence
  Description of Artificial Sequence: Synthetic oligonucleotide
agauacaccaagcacagag

SEQ ID NO: 60529 - RNA, 19 nt, Artificial Sequence
  Description of Artificial Sequence: Synthetic oligonucleotide
uacaguaucuguauguacc

SEQ ID NO: 60530 - RNA, 19 nt, Artificial Sequence
  Description of Artificial Sequence: Synthetic oligonucleotide
aaggaaacgacuuggcaag

SEQ ID NO: 60531 - RNA, 19 nt, Artificial Sequence
  Description of Artificial Sequence: Synthetic oligonucleotide
aaaucaaauguuguaguag

SEQ ID NO: 60532 - RNA, 19 nt, Artificial Sequence
  Description of Artificial Sequence: Synthetic oligonucleotide
ugugcuuacaccuuggaaa

SEQ ID NO: 60533 - RNA, 19 nt, Artificial Sequence
  Description of Artificial Sequence: Synthetic oligonucleotide
ugugguugugauuagcuag

SEQ ID NO: 60534 - RNA, 19 nt, Artificial Sequence
  Description of Artificial Sequence: Synthetic oligonucleotide
agcucugcccguuaaaacc

SEQ ID NO: 60535 - RNA, 19 nt, Artificial Sequence
  Description of Artificial Sequence: Synthetic oligonucleotide
uuugaaauguucucugcag

SEQ ID NO: 60536 - RNA, 19 nt, Artificial Sequence
  Description of Artificial Sequence: Synthetic oligonucleotide
cuaaguugaaaaugguacg

SEQ ID NO: 60537 - RNA, 19 nt, Artificial Sequence
  Description of Artificial Sequence: Synthetic oligonucleotide
acuauagaaauagagagga

SEQ ID NO: 60538 - RNA, 19 nt, Artificial Sequence
  Description of Artificial Sequence: Synthetic oligonucleotide
  modified_base (9)..(9): a, c, u, g, unknown or other
uacaguagnaaacuauaca

SEQ ID NO: 60539 - RNA, 19 nt, Artificial Sequence
  Description of Artificial Sequence: Synthetic oligonucleotide
acuuauuagaccuugugaa

SEQ ID NO: 60540 - RNA, 19 nt, Artificial Sequence
  Description of Artificial Sequence: Synthetic oligonucleotide
uuggaaauaccauggcucg

SEQ ID NO: 60541 - RNA, 19 nt, Artificial Sequence
  Description of Artificial Sequence: Synthetic oligonucleotide
aauagcaugcgcuaguauu

SEQ ID NO: 60542 - RNA, 19 nt, Artificial Sequence
  Description of Artificial Sequence: Synthetic oligonucleotide
aauaagagccugugcacag

SEQ ID NO: 60543 - RNA, 19 nt, Artificial Sequence
  Description of Artificial Sequence: Synthetic oligonucleotide
uuaaaucaaauguuguagu

SEQ ID NO: 60544 - RNA, 19 nt, Artificial Sequence
  Description of Artificial Sequence: Synthetic oligonucleotide
uuuauaaggcagugaaucc

SEQ ID NO: 60545 - RNA, 19 nt, Artificial Sequence
  Description of Artificial Sequence: Synthetic oligonucleotide
uucccuauagccaagacuu

SEQ ID NO: 60546 - RNA, 19 nt, Artificial Sequence
  Description of Artificial Sequence: Synthetic oligonucleotide
uacauauguagggauaacg

SEQ ID NO: 60547 - RNA, 19 nt, Artificial Sequence
  Description of Artificial Sequence: Synthetic oligonucleotide
ugaccuaggacauauauuu

SEQ ID NO: 60548 - RNA, 19 nt, Artificial Sequence
  Description of Artificial Sequence: Synthetic oligonucleotide
uacuuauuagaccuuguga

SEQ ID NO: 60549 - RNA, 19 nt, Artificial Sequence
  Description of Artificial Sequence: Synthetic oligonucleotide
cuuggaaauaccauggcuc

SEQ ID NO: 60550 - RNA, 19 nt, Artificial Sequence
  Description of Artificial Sequence: Synthetic oligonucleotide
aucaagcuaucucucaugg

SEQ ID NO: 60551 - RNA, 19 nt, Artificial Sequence
  Description of Artificial Sequence: Synthetic oligonucleotide
ucuguuacagacuuauagu

SEQ ID NO: 60552 - RNA, 19 nt, Artificial Sequence
  Description of Artificial Sequence: Synthetic oligonucleotide
uuagcuaugguagagcacu

SEQ ID NO: 60553 - RNA, 19 nt, Artificial Sequence
  Description of Artificial Sequence: Synthetic oligonucleotide
  modified_base (7)..(7): a, c, u, g, unknown or other
caguagnaaacuauacagc

SEQ ID NO: 60554 - RNA, 19 nt, Artificial Sequence
  Description of Artificial Sequence: Synthetic oligonucleotide
acaugcuaaacuuagcagu

SEQ ID NO: 60555 - RNA, 19 nt, Artificial Sequence
  Description of Artificial Sequence: Synthetic oligonucleotide
uugugauuagcuaggagga

SEQ ID NO: 60556 - RNA, 19 nt, Artificial Sequence
  Description of Artificial Sequence: Synthetic oligonucleotide
uaaagaauagaguggcgug

SEQ ID NO: 60557 - RNA, 19 nt, Artificial Sequence
  Description of Artificial Sequence: Synthetic oligonucleotide
aaguuaauagagccuauau

SEQ ID NO: 60558 - RNA, 19 nt, Artificial Sequence
  Description of Artificial Sequence: Synthetic oligonucleotide
gaguaaagaauagaguggc

SEQ ID NO: 60559 - RNA, 19 nt, Artificial Sequence
  Description of Artificial Sequence: Synthetic oligonucleotide
  modified_base (11)..(11): a, c, u, g, unknown or other
ucuacaguagnaaacuaua

SEQ ID NO: 60560 - RNA, 19 nt, Artificial Sequence
  Description of Artificial Sequence: Synthetic oligonucleotide
augaugcuauuaaagaagc

SEQ ID NO: 60561 - RNA, 19 nt, Artificial Sequence
  Description of Artificial Sequence: Synthetic oligonucleotide
acaaaguggcaguaucagc

SEQ ID NO: 60562 - RNA, 19 nt, Artificial Sequence
  Description of Artificial Sequence: Synthetic oligonucleotide
aaauaccauggcucgauca

SEQ ID NO: 60563 - RNA, 19 nt, Artificial Sequence
  Description of Artificial Sequence: Synthetic oligonucleotide
cuuacuacuuagaaaguuc

SEQ ID NO: 60564 - RNA, 19 nt, Artificial Sequence
  Description of Artificial Sequence: Synthetic oligonucleotide
gagauuguaaacgagccac

SEQ ID NO: 60565 - RNA, 19 nt, Artificial Sequence
  Description of Artificial Sequence: Synthetic oligonucleotide
ugagguuacuugaugagaa

SEQ ID NO: 60566 - RNA, 19 nt, Artificial Sequence
  Description of Artificial Sequence: Synthetic oligonucleotide
guggcuauaguccuggagc

SEQ ID NO: 60567 - RNA, 19 nt, Artificial Sequence
  Description of Artificial Sequence: Synthetic oligonucleotide
cucuaaguuagccuaagac

SEQ ID NO: 60568 - RNA, 19 nt, Artificial Sequence
  Description of Artificial Sequence: Synthetic oligonucleotide
aaagauacucugagguuac

SEQ ID NO: 60569 - RNA, 19 nt, Artificial Sequence
  Description of Artificial Sequence: Synthetic oligonucleotide
acagcuaaaagaguaaaga

SEQ ID NO: 60570 - RNA, 19 nt, Artificial Sequence
  Description of Artificial Sequence: Synthetic oligonucleotide
ugacuuagaaggaaaggaa

SEQ ID NO: 60571 - RNA, 19 nt, Artificial Sequence
  Description of Artificial Sequence: Synthetic oligonucleotide
aacccuucuccaaucauac

SEQ ID NO: 60572 - RNA, 19 nt, Artificial Sequence
  Description of Artificial Sequence: Synthetic oligonucleotide
uuucccuaaguugaaaaug

SEQ ID NO: 60573 - RNA, 19 nt, Artificial Sequence
  Description of Artificial Sequence: Synthetic oligonucleotide
agucuugccaacucaacug

SEQ ID NO: 60574 - RNA, 19 nt, Artificial Sequence
  Description of Artificial Sequence: Synthetic oligonucleotide
uguuauugcucuauauuau

SEQ ID NO: 60575 - RNA, 19 nt, Artificial Sequence
  Description of Artificial Sequence: Synthetic oligonucleotide
uaauguggaggccuugacc

SEQ ID NO: 60576 - RNA, 19 nt, Artificial Sequence
  Description of Artificial Sequence: Synthetic oligonucleotide
aguaucuguauguaccuca

SEQ ID NO: 60577 - RNA, 19 nt, Artificial Sequence
  Description of Artificial Sequence: Synthetic oligonucleotide
caccacuauagaaauagag

SEQ ID NO: 60578 - RNA, 19 nt, Artificial Sequence
  Description of Artificial Sequence: Synthetic oligonucleotide
uauuaaagaagcguggcua

SEQ ID NO: 60579 - RNA, 19 nt, Artificial Sequence
  Description of Artificial Sequence: Synthetic oligonucleotide
uaaacgagccacuugcuuc

SEQ ID NO: 60580 - RNA, 19 nt, Artificial Sequence
  Description of Artificial Sequence: Synthetic oligonucleotide
auacuuauuagaccuugug

SEQ ID NO: 60581 - RNA, 19 nt, Artificial Sequence
  Description of Artificial Sequence: Synthetic oligonucleotide
aacuuagcaguacuuaguu

SEQ ID NO: 60582 - RNA, 19 nt, Artificial Sequence
  Description of Artificial Sequence: Synthetic oligonucleotide
ugagaaguuuauuggauau

SEQ ID NO: 60583 - RNA, 19 nt, Artificial Sequence
  Description of Artificial Sequence: Synthetic oligonucleotide
uaaagaagcguggcuauag

SEQ ID NO: 60584 - RNA, 19 nt, Artificial Sequence
  Description of Artificial Sequence: Synthetic oligonucleotide
uuacaccuuggaaauacca

SEQ ID NO: 60585 - RNA, 19 nt, Artificial Sequence
  Description of Artificial Sequence: Synthetic oligonucleotide
uguuguaguaggagaaaac

SEQ ID NO: 60586 - RNA, 19 nt, Artificial Sequence
  Description of Artificial Sequence: Synthetic oligonucleotide
ucaaaagacaauguguaua

SEQ ID NO: 60587 - RNA, 19 nt, Artificial Sequence
  Description of Artificial Sequence: Synthetic oligonucleotide
aggacaucacuaugcgucc

SEQ ID NO: 60588 - RNA, 19 nt, Artificial Sequence
  Description of Artificial Sequence: Synthetic oligonucleotide
uuuaugcaaagcucggcga

SEQ ID NO: 60589 - RNA, 19 nt, Artificial Sequence
  Description of Artificial Sequence: Synthetic oligonucleotide
uccauccccaccacuauag

SEQ ID NO: 60590 - RNA, 19 nt, Artificial Sequence
  Description of Artificial Sequence: Synthetic oligonucleotide
ucugguuacauaaguaguu

SEQ ID NO: 60591 - RNA, 19 nt, Artificial Sequence
  Description of Artificial Sequence: Synthetic oligonucleotide
uuugaauaccaucuacuuu

SEQ ID NO: 60592 - RNA, 19 nt, Artificial Sequence
  Description of Artificial Sequence: Synthetic oligonucleotide
uauuagaccuugugaaaga

SEQ ID NO: 60593 - RNA, 19 nt, Artificial Sequence
  Description of Artificial Sequence: Synthetic oligonucleotide
ucaguaucacacaaaugaa

SEQ ID NO: 60594 - RNA, 19 nt, Artificial Sequence
  Description of Artificial Sequence: Synthetic oligonucleotide
ggagguuuagcuaugguag

SEQ ID NO: 60595 - RNA, 19 nt, Artificial Sequence
  Description of Artificial Sequence: Synthetic oligonucleotide
agugacuuagaaggaaagg

SEQ ID NO: 60596 - RNA, 19 nt, Artificial Sequence
  Description of Artificial Sequence: Synthetic oligonucleotide
cucuauucagagcugggag

SEQ ID NO: 60597 - RNA, 19 nt, Artificial Sequence
  Description of Artificial Sequence: Synthetic oligonucleotide
ugcuaaacuuagcaguacu

SEQ ID NO: 60598 - RNA, 19 nt, Artificial Sequence
  Description of Artificial Sequence: Synthetic oligonucleotide
augauaguaagacaauaua

SEQ ID NO: 60599 - RNA, 19 nt, Artificial Sequence
  Description of Artificial Sequence: Synthetic oligonucleotide
gaaucacggucuuauaaca

SEQ ID NO: 60600 - RNA, 19 nt, Artificial Sequence
  Description of Artificial Sequence: Synthetic oligonucleotide
auuguaaacgagccacuug

SEQ ID NO: 60601 - RNA, 19 nt, Artificial Sequence
  Description of Artificial Sequence: Synthetic oligonucleotide
aguuaauagagccuauauu

SEQ ID NO: 60602 - RNA, 19 nt, Artificial Sequence
  Description of Artificial Sequence: Synthetic oligonucleotide
aauagaguggcgugguauu

SEQ ID NO: 60603 - RNA, 19 nt, Artificial Sequence
  Description of Artificial Sequence: Synthetic oligonucleotide
accggacugaaacucagag

SEQ ID NO: 60604 - RNA, 19 nt, Artificial Sequence
  Description of Artificial Sequence: Synthetic oligonucleotide
guguauaaucauuaagauc

SEQ ID NO: 60605 - RNA, 19 nt, Artificial Sequence
  Description of Artificial Sequence: Synthetic oligonucleotide
uguauguaccucagcauau

SEQ ID NO: 60606 - RNA, 19 nt, Artificial Sequence
  Description of Artificial Sequence: Synthetic oligonucleotide
ugcgguagcauuuuccuau

SEQ ID NO: 60607 - RNA, 19 nt, Artificial Sequence
  Description of Artificial Sequence: Synthetic oligonucleotide
aaggcuauauugugucugu

SEQ ID NO: 60608 - RNA, 19 nt, Artificial Sequence
  Description of Artificial Sequence: Synthetic oligonucleotide
auagcaugcgcuaguauuc

SEQ ID NO: 60609 - RNA, 19 nt, Artificial Sequence
  Description of Artificial Sequence: Synthetic oligonucleotide
cuauacagcuaaaagagua

SEQ ID NO: 60610 - RNA, 19 nt, Artificial Sequence
  Description of Artificial Sequence: Synthetic oligonucleotide
uaucaagcuaucucucaug

SEQ ID NO: 60611 - RNA, 19 nt, Artificial Sequence
  Description of Artificial Sequence: Synthetic oligonucleotide
cuuacagccccauuucaug

SEQ ID NO: 60612 - RNA, 19 nt, Artificial Sequence
  Description of Artificial Sequence: Synthetic oligonucleotide
accuuggaaauaccauggc

SEQ ID NO: 60613 - RNA, 19 nt, Artificial Sequence
  Description of Artificial Sequence: Synthetic oligonucleotide
uaaguggacacaucuuacu

SEQ ID NO: 60614 - RNA, 19 nt, Artificial Sequence
  Description of Artificial Sequence: Synthetic oligonucleotide
agcaguacuuaguuuauaa

SEQ ID NO: 60615 - RNA, 19 nt, Artificial Sequence
  Description of Artificial Sequence: Synthetic oligonucleotide
gacaaagccgugaaauaag

SEQ ID NO: 60616 - RNA, 19 nt, Artificial Sequence
  Description of Artificial Sequence: Synthetic oligonucleotide
cuaaguggacacaucuuac

SEQ ID NO: 60617 - RNA, 19 nt, Artificial Sequence
  Description of Artificial Sequence: Synthetic oligonucleotide
aaagaagcguggcuauagu

SEQ ID NO: 60618 - RNA, 19 nt, Artificial Sequence
  Description of Artificial Sequence: Synthetic oligonucleotide
aaauagagaggaaaucuua

SEQ ID NO: 60619 - RNA, 19 nt, Artificial Sequence
  Description of Artificial Sequence: Synthetic oligonucleotide
caccuacuccuucugaugg

SEQ ID NO: 60620 - RNA, 19 nt, Artificial Sequence
  Description of Artificial Sequence: Synthetic oligonucleotide
cauaguagcuuugugacca

SEQ ID NO: 60621 - RNA, 19 nt, Artificial Sequence
  Description of Artificial Sequence: Synthetic oligonucleotide
accacuauagaaauagaga

SEQ ID NO: 60622 - RNA, 19 nt, Artificial Sequence
  Description of Artificial Sequence: Synthetic oligonucleotide
guuuagcuaugguagagca

SEQ ID NO: 60623 - RNA, 19 nt, Artificial Sequence
  Description of Artificial Sequence: Synthetic oligonucleotide
uuuagcuaugguagagcac

SEQ ID NO: 60624 - RNA, 19 nt, Artificial Sequence
  Description of Artificial Sequence: Synthetic oligonucleotide
cuaaguuagccuaagacau

SEQ ID NO: 60625 - RNA, 19 nt, Artificial Sequence
  Description of Artificial Sequence: Synthetic oligonucleotide
ugacaaagccgugaaauaa

SEQ ID NO: 60626 - RNA, 19 nt, Artificial Sequence
  Description of Artificial Sequence: Synthetic oligonucleotide
agugguaggauccuuuaua

SEQ ID NO: 60627 - RNA, 19 nt, Artificial Sequence
  Description of Artificial Sequence: Synthetic oligonucleotide
uccuuaagugaugaucaag

SEQ ID NO: 60628 - RNA, 19 nt, Artificial Sequence
  Description of Artificial Sequence: Synthetic oligonucleotide
  modified_base (2)..(2): a, c, u, g, unknown or other
gnaaacuauacagcuaaaa

SEQ ID NO: 60629 - RNA, 19 nt, Artificial Sequence
  Description of Artificial Sequence: Synthetic oligonucleotide
accaucuacuuuguggcac

SEQ ID NO: 60630 - RNA, 19 nt, Artificial Sequence
  Description of Artificial Sequence: Synthetic oligonucleotide
uuaaaggaaaguggagcca

SEQ ID NO: 60631 - RNA, 19 nt, Artificial Sequence
  Description of Artificial Sequence: Synthetic oligonucleotide
uuaugcaaagcucggcgau

SEQ ID NO: 60632 - RNA, 19 nt, Artificial Sequence
  Description of Artificial Sequence: Synthetic oligonucleotide
ucucacuuugcugaugugu

SEQ ID NO: 60633 - RNA, 19 nt, Artificial Sequence
  Description of Artificial Sequence: Synthetic oligonucleotide
acacauauuaauugccuuu

SEQ ID NO: 60634 - RNA, 19 nt, Artificial Sequence
  Description of Artificial Sequence: Synthetic oligonucleotide
aagauugccgacaggagaa

SEQ ID NO: 60635 - RNA, 19 nt, Artificial Sequence
  Description of Artificial Sequence: Synthetic oligonucleotide
uuaauguggaggccuugac

SEQ ID NO: 60636 - RNA, 19 nt, Artificial Sequence
  Description of Artificial Sequence: Synthetic oligonucleotide
caugcgcuaguauucuuag

SEQ ID NO: 60637 - RNA, 19 nt, Artificial Sequence
  Description of Artificial Sequence: Synthetic oligonucleotide
ucuuacagccccauuucau

SEQ ID NO: 60638 - RNA, 19 nt, Artificial Sequence
  Description of Artificial Sequence: Synthetic oligonucleotide
aagcggcucuauucagagc

SEQ ID NO: 60639 - RNA, 19 nt, Artificial Sequence
  Description of Artificial Sequence: Synthetic oligonucleotide
gguacggagacuugcagug

SEQ ID NO: 60640 - RNA, 19 nt, Artificial Sequence
  Description of Artificial Sequence: Synthetic oligonucleotide
agcuaucucucauggucac

SEQ ID NO: 60641 - RNA, 19 nt, Artificial Sequence
  Description of Artificial Sequence: Synthetic oligonucleotide
caaagccgugaaauaagag

SEQ ID NO: 60642 - RNA, 19 nt, Artificial Sequence
  Description of Artificial Sequence: Synthetic oligonucleotide
aagaauagaguggcguggu

SEQ ID NO: 60643 - RNA, 19 nt, Artificial Sequence
  Description of Artificial Sequence: Synthetic oligonucleotide
aagucaccggacugaaacu

SEQ ID NO: 60644 - RNA, 19 nt, Artificial Sequence
  Description of Artificial Sequence: Synthetic oligonucleotide
uuagcaguacuuaguuuau

SEQ ID NO: 60645 - RNA, 19 nt, Artificial Sequence
  Description of Artificial Sequence: Synthetic oligonucleotide
uggcggaugacugcaaugc

SEQ ID NO: 60646 - RNA, 19 nt, Artificial Sequence
  Description of Artificial Sequence: Synthetic oligonucleotide
cauucguuauuauaaaagu

SEQ ID NO: 60647 - RNA, 19 nt, Artificial Sequence
  Description of Artificial Sequence: Synthetic oligonucleotide
agucaccggacugaaacuc

SEQ ID NO: 60648 - RNA, 19 nt, Artificial Sequence
  Description of Artificial Sequence: Synthetic oligonucleotide
aguaaagaauagaguggcg

SEQ ID NO: 60649 - RNA, 19 nt, Artificial Sequence
  Description of Artificial Sequence: Synthetic oligonucleotide
ucucuaaguuagccuaaga

SEQ ID NO: 60650 - RNA, 19 nt, Artificial Sequence
  Description of Artificial Sequence: Synthetic oligonucleotide
acaguacgacucuggguac

SEQ ID NO: 60651 - RNA, 19 nt, Artificial Sequence
  Description of Artificial Sequence: Synthetic oligonucleotide
uggcuauaguccuggagcu

SEQ ID NO: 60652 - RNA, 19 nt, Artificial Sequence
  Description of Artificial Sequence: Synthetic oligonucleotide
ucggcaagcggcucuauuc

SEQ ID NO: 60653 - RNA, 19 nt, Artificial Sequence
  Description of Artificial Sequence: Synthetic oligonucleotide
agcauauuacuuccaugga

SEQ ID NO: 60654 - RNA, 19 nt, Artificial Sequence
  Description of Artificial Sequence: Synthetic oligonucleotide
aguuugucaccuuuacuuu

SEQ ID NO: 60655 - RNA, 19 nt, Artificial Sequence
  Description of Artificial Sequence: Synthetic oligonucleotide
gauaacguuucuguuucuc

SEQ ID NO: 60656 - RNA, 19 nt, Artificial Sequence
  Description of Artificial Sequence: Synthetic oligonucleotide
uggaaggcagugcaucuaa

SEQ ID NO: 60657 - RNA, 19 nt, Artificial Sequence
  Description of Artificial Sequence: Synthetic oligonucleotide
uacuuagaaaguucaucua

SEQ ID NO: 60658 - RNA, 19 nt, Artificial Sequence
  Description of Artificial Sequence: Synthetic oligonucleotide
ugguacggagacuugcagu

SEQ ID NO: 60659 - RNA, 19 nt, Artificial Sequence
  Description of Artificial Sequence: Synthetic oligonucleotide
acaguuugucaccuuuacu

SEQ ID NO: 60660 - RNA, 19 nt, Artificial Sequence
  Description of Artificial Sequence: Synthetic oligonucleotide
ucacuaucucagcaccuac

SEQ ID NO: 60661 - RNA, 19 nt, Artificial Sequence
  Description of Artificial Sequence: Synthetic oligonucleotide
acucaaauagcaugcgcua

SEQ ID NO: 60662 - RNA, 19 nt, Artificial Sequence
  Description of Artificial Sequence: Synthetic oligonucleotide
augguacggagacuugcag

SEQ ID NO: 60663 - RNA, 19 nt, Artificial Sequence
  Description of Artificial Sequence: Synthetic oligonucleotide
uucucuaaguuagccuaag

SEQ ID NO: 60664 - RNA, 19 nt, Artificial Sequence
  Description of Artificial Sequence: Synthetic oligonucleotide
ggcucgaucaguaucacac

SEQ ID NO: 60665 - RNA, 19 nt, Artificial Sequence
  Description of Artificial Sequence: Synthetic oligonucleotide
gguuacuugaugagaaagc

SEQ ID NO: 60666 - RNA, 19 nt, Artificial Sequence
  Description of Artificial Sequence: Synthetic oligonucleotide
cuaugguagagcacuuguc

SEQ ID NO: 60667 - RNA, 19 nt, Artificial Sequence
  Description of Artificial Sequence: Synthetic oligonucleotide
ucccauuaaacaugacuua

SEQ ID NO: 60668 - RNA, 19 nt, Artificial Sequence
  Description of Artificial Sequence: Synthetic oligonucleotide
uacuacuuagaaaguucau

SEQ ID NO: 60669 - RNA, 19 nt, Artificial Sequence
  Description of Artificial Sequence: Synthetic oligonucleotide
uaaguuagccuaagacaua

SEQ ID NO: 60670 - RNA, 19 nt, Artificial Sequence
  Description of Artificial Sequence: Synthetic oligonucleotide
caaaacugauagaauguaa

SEQ ID NO: 60671 - RNA, 19 nt, Artificial Sequence
  Description of Artificial Sequence: Synthetic oligonucleotide
cacugggugaaaacucagc

SEQ ID NO: 60672 - RNA, 19 nt, Artificial Sequence
  Description of Artificial Sequence: Synthetic oligonucleotide
agguuuagcuaugguagag

SEQ ID NO: 60673 - RNA, 19 nt, Artificial Sequence
  Description of Artificial Sequence: Synthetic oligonucleotide
gcuauuaaagaagcguggc

SEQ ID NO: 60674 - RNA, 19 nt, Artificial Sequence
  Description of Artificial Sequence: Synthetic oligonucleotide
auacaaaguggcaguauca

SEQ ID NO: 60675 - RNA, 19 nt, Artificial Sequence
  Description of Artificial Sequence: Synthetic oligonucleotide
uugacccgucccauuaaac

SEQ ID NO: 60676 - RNA, 19 nt, Artificial Sequence
  Description of Artificial Sequence: Synthetic oligonucleotide
aguacgacucuggguaccg

SEQ ID NO: 60677 - RNA, 19 nt, Artificial Sequence
  Description of Artificial Sequence: Synthetic oligonucleotide
caagguauagauucagacu

SEQ ID NO: 60678 - RNA, 19 nt, Artificial Sequence
  Description of Artificial Sequence: Synthetic oligonucleotide
acucaacuguaacuguuaa

SEQ ID NO: 60679 - RNA, 19 nt, Artificial Sequence
  Description of Artificial Sequence: Synthetic oligonucleotide
caugcuaaacuuagcagua

SEQ ID NO: 60680 - RNA, 19 nt, Artificial Sequence
  Description of Artificial Sequence: Synthetic oligonucleotide
agacuuaagcucaggguug

SEQ ID NO: 60681 - RNA, 19 nt, Artificial Sequence
  Description of Artificial Sequence: Synthetic oligonucleotide
gccaacucaacuguaacug

SEQ ID NO: 60682 - RNA, 19 nt, Artificial Sequence
  Description of Artificial Sequence: Synthetic oligonucleotide
agagucuugccaacucaac

SEQ ID NO: 60683 - RNA, 19 nt, Artificial Sequence
  Description of Artificial Sequence: Synthetic oligonucleotide
ugguugagucagacgacac

SEQ ID NO: 60684 - RNA, 19 nt, Artificial Sequence
  Description of Artificial Sequence: Synthetic oligonucleotide
gagguuuagcuaugguaga

SEQ ID NO: 60685 - RNA, 19 nt, Artificial Sequence
  Description of Artificial Sequence: Synthetic oligonucleotide
auacagcuaaaagaguaaa

SEQ ID NO: 60686 - RNA, 19 nt, Artificial Sequence
  Description of Artificial Sequence: Synthetic oligonucleotide
uucuggaugggagguuuag

SEQ ID NO: 60687 - RNA, 19 nt, Artificial Sequence
  Description of Artificial Sequence: Synthetic oligonucleotide
aacgacuuggcaaguguaa

SEQ ID NO: 60688 - RNA, 19 nt, Artificial Sequence
  Description of Artificial Sequence: Synthetic oligonucleotide
ugaaaaugguacggagacu

SEQ ID NO: 60689 - RNA, 19 nt, Artificial Sequence
  Description of Artificial Sequence: Synthetic oligonucleotide
cacucaaauagcaugcgcu

SEQ ID NO: 60690 - RNA, 19 nt, Artificial Sequence
  Description of Artificial Sequence: Synthetic oligonucleotide
agcguggcuauaguccugg

SEQ ID NO: 60691 - RNA, 19 nt, Artificial Sequence
  Description of Artificial Sequence: Synthetic oligonucleotide
augcgcuaguauucuuagg

SEQ ID NO: 60692 - RNA, 19 nt, Artificial Sequence
  Description of Artificial Sequence: Synthetic oligonucleotide
agccuuccuggcuauguug

SEQ ID NO: 60693 - RNA, 19 nt, Artificial Sequence
  Description of Artificial Sequence: Synthetic oligonucleotide
acuauacagcuaaaagagu

SEQ ID NO: 60694 - RNA, 19 nt, Artificial Sequence
  Description of Artificial Sequence: Synthetic oligonucleotide
gagaaguuuauuggauauc

SEQ ID NO: 60695 - RNA, 19 nt, Artificial Sequence
  Description of Artificial Sequence: Synthetic oligonucleotide
gaagcguggcuauaguccu

SEQ ID NO: 60696 - RNA, 19 nt, Artificial Sequence
  Description of Artificial Sequence: Synthetic oligonucleotide
acaaagccgugaaauaaga

SEQ ID NO: 60697 - RNA, 19 nt, Artificial Sequence
  Description of Artificial Sequence: Synthetic oligonucleotide
gagucuugccaacucaacu

SEQ ID NO: 60698 - RNA, 19 nt, Artificial Sequence
  Description of Artificial Sequence: Synthetic oligonucleotide
cuguauguaccucagcaua

SEQ ID NO: 60699 - RNA, 19 nt, Artificial Sequence
  Description of Artificial Sequence: Synthetic oligonucleotide
cuaaacuuagcaguacuua

SEQ ID NO: 60700 - RNA, 19 nt, Artificial Sequence
  Description of Artificial Sequence: Synthetic oligonucleotide
ggggagauuguaaacgagc

SEQ ID NO: 60701 - RNA, 19 nt, Artificial Sequence
  Description of Artificial Sequence: Synthetic oligonucleotide
auacuuagcaguagagaaa

SEQ ID NO: 60702 - RNA, 19 nt, Artificial Sequence
  Description of Artificial Sequence: Synthetic oligonucleotide
uagggauaacguuucuguu

SEQ ID NO: 60703 - RNA, 19 nt, Artificial Sequence
  Description of Artificial Sequence: Synthetic oligonucleotide
auagaguggcgugguauug

SEQ ID NO: 60704 - RNA, 19 nt, Artificial Sequence
  Description of Artificial Sequence: Synthetic oligonucleotide
aucaaauguuguaguagga

SEQ ID NO: 60705 - RNA, 19 nt, Artificial Sequence
  Description of Artificial Sequence: Synthetic oligonucleotide
cccauuaaacaugacuuag

SEQ ID NO: 60706 - RNA, 19 nt, Artificial Sequence
  Description of Artificial Sequence: Synthetic oligonucleotide
cacuaugcguccuuucaga

SEQ ID NO: 60707 - RNA, 19 nt, Artificial Sequence
  Description of Artificial Sequence: Synthetic oligonucleotide
agaguggcggaugacugca

SEQ ID NO: 60708 - RNA, 19 nt, Artificial Sequence
  Description of Artificial Sequence: Synthetic oligonucleotide
cuuaagugaugaucaaggu

SEQ ID NO: 60709 - RNA, 19 nt, Artificial Sequence
  Description of Artificial Sequence: Synthetic oligonucleotide
ugggagguuuagcuauggu

SEQ ID NO: 60710 - RNA, 19 nt, Artificial Sequence
  Description of Artificial Sequence: Synthetic oligonucleotide
ugugcacauucguuauuau

SEQ ID NO: 60711 - RNA, 19 nt, Artificial Sequence
  Description of Artificial Sequence: Synthetic oligonucleotide
gcuaaguggacacaucuua

SEQ ID NO: 60712 - RNA, 19 nt, Artificial Sequence
  Description of Artificial Sequence: Synthetic oligonucleotide
caggcuuacuacuuagaaa

SEQ ID NO: 60713 - RNA, 19 nt, Artificial Sequence
  Description of Artificial Sequence: Synthetic oligonucleotide
gcagaacugagugggagag

SEQ ID NO: 60714 - RNA, 19 nt, Artificial Sequence
  Description of Artificial Sequence: Synthetic oligonucleotide
uccaaucaugaugcuauua

SEQ ID NO: 60715 - RNA, 19 nt, Artificial Sequence
  Description of Artificial Sequence: Synthetic oligonucleotide
gguuuagcuaugguagagc

SEQ ID NO: 60716 - RNA, 19 nt, Artificial Sequence
  Description of Artificial Sequence: Synthetic oligonucleotide
cuguuacagacuuauaguu

SEQ ID NO: 60717 - RNA, 19 nt, Artificial Sequence
  Description of Artificial Sequence: Synthetic oligonucleotide
uagaguggcgugguauugu

SEQ ID NO: 60718 - RNA, 19 nt, Artificial Sequence
  Description of Artificial Sequence: Synthetic oligonucleotide
  modified_base (5)..(5): a, c, u, g, unknown or other
guagnaaacuauacagcua

SEQ ID NO: 60719 - RNA, 19 nt, Artificial Sequence
  Description of Artificial Sequence: Synthetic oligonucleotide
cuauuaaagaagcguggcu

SEQ ID NO: 60720 - RNA, 19 nt, Artificial Sequence
  Description of Artificial Sequence: Synthetic oligonucleotide
cauucccuauagccaagac

SEQ ID NO: 60721 - RNA, 19 nt, Artificial Sequence
  Description of Artificial Sequence: Synthetic oligonucleotide
augugcacauucguuauua

SEQ ID NO: 60722 - RNA, 19 nt, Artificial Sequence
  Description of Artificial Sequence: Synthetic oligonucleotide
cgaaucacggucuuauaac

SEQ ID NO: 60723 - RNA, 19 nt, Artificial Sequence
  Description of Artificial Sequence: Synthetic oligonucleotide
cguuaaaaccucagggaag

SEQ ID NO: 60724 - RNA, 19 nt, Artificial Sequence
  Description of Artificial Sequence: Synthetic oligonucleotide
gaacaguacgacucugggu

SEQ ID NO: 60725 - RNA, 19 nt, Artificial Sequence
  Description of Artificial Sequence: Synthetic oligonucleotide
cuugaccuaggacauauau

SEQ ID NO: 60726 - RNA, 19 nt, Artificial Sequence
  Description of Artificial Sequence: Synthetic oligonucleotide
gagguuacuugaugagaaa

SEQ ID NO: 60727 - RNA, 19 nt, Artificial Sequence
  Description of Artificial Sequence: Synthetic oligonucleotide
cagagcaaggcuauauugu

SEQ ID NO: 60728 - RNA, 19 nt, Artificial Sequence
  Description of Artificial Sequence: Synthetic oligonucleotide
uggaaauaccauggcucga

SEQ ID NO: 60729 - RNA, 19 nt, Artificial Sequence
  Description of Artificial Sequence: Synthetic oligonucleotide
aaauucaaccuggcuccaa

SEQ ID NO: 60730 - RNA, 19 nt, Artificial Sequence
  Description of Artificial Sequence: Synthetic oligonucleotide
aggagacauuucauaguag

SEQ ID NO: 60731 - RNA, 19 nt, Artificial Sequence
  Description of Artificial Sequence: Synthetic oligonucleotide
cgcuaguauucuuaggagc

SEQ ID NO: 60732 - RNA, 19 nt, Artificial Sequence
  Description of Artificial Sequence: Synthetic oligonucleotide
gaauagaguggcgugguau

SEQ ID NO: 60733 - RNA, 19 nt, Artificial Sequence
  Description of Artificial Sequence: Synthetic oligonucleotide
gcgcuaguauucuuaggag

SEQ ID NO: 60734 - RNA, 19 nt, Artificial Sequence
  Description of Artificial Sequence: Synthetic oligonucleotide
uagcaugcgcuaguauucu

SEQ ID NO: 60735 - RNA, 19 nt, Artificial Sequence
  Description of Artificial Sequence: Synthetic oligonucleotide
gggagguuuagcuauggua

SEQ ID NO: 60736 - RNA, 19 nt, Artificial Sequence
  Description of Artificial Sequence: Synthetic oligonucleotide
auccuuaagugaugaucaa

SEQ ID NO: 60737 - RNA, 19 nt, Artificial Sequence
  Description of Artificial Sequence: Synthetic oligonucleotide
aagauacucugagguuacu

SEQ ID NO: 60738 - RNA, 19 nt, Artificial Sequence
  Description of Artificial Sequence: Synthetic oligonucleotide
gacccgucccauuaaacau

SEQ ID NO: 60739 - RNA, 19 nt, Artificial Sequence
  Description of Artificial Sequence: Synthetic oligonucleotide
uagcuaggaggaagugccu

SEQ ID NO: 60740 - RNA, 19 nt, Artificial Sequence
  Description of Artificial Sequence: Synthetic oligonucleotide
cauauuuaccuggcucauc

SEQ ID NO: 60741 - RNA, 19 nt, Artificial Sequence
  Description of Artificial Sequence: Synthetic oligonucleotide
gugaauccaugcacugugc

SEQ ID NO: 60742 - RNA, 19 nt, Artificial Sequence
  Description of Artificial Sequence: Synthetic oligonucleotide
caacccuucuccaaucaua

SEQ ID NO: 60743 - RNA, 19 nt, Artificial Sequence
  Description of Artificial Sequence: Synthetic oligonucleotide
cagccccauuucaugguag

SEQ ID NO: 60744 - RNA, 19 nt, Artificial Sequence
  Description of Artificial Sequence: Synthetic oligonucleotide
gugaccaagaggacaucac

SEQ ID NO: 60745 - RNA, 19 nt, Artificial Sequence
  Description of Artificial Sequence: Synthetic oligonucleotide
gaccugauggcaucacaua

SEQ ID NO: 60746 - RNA, 19 nt, Artificial Sequence
  Description of Artificial Sequence: Synthetic oligonucleotide
cauuaauguggaggccuug

SEQ ID NO: 60747 - RNA, 19 nt, Artificial Sequence
  Description of Artificial Sequence: Synthetic oligonucleotide
gguugagucagacgacaca

SEQ ID NO: 60748 - RNA, 19 nt, Artificial Sequence
  Description of Artificial Sequence: Synthetic oligonucleotide
gugcuuacaccuuggaaau

SEQ ID NO: 60749 - RNA, 19 nt, Artificial Sequence
  Description of Artificial Sequence: Synthetic oligonucleotide
acccgucccauuaaacaug

SEQ ID NO: 60750 - RNA, 19 nt, Artificial Sequence
  Description of Artificial Sequence: Synthetic oligonucleotide
agaauagaguggcguggua

SEQ ID NO: 60751 - RNA, 19 nt, Artificial Sequence
  Description of Artificial Sequence: Synthetic oligonucleotide
acgacuuggcaaguguaau

SEQ ID NO: 60752 - RNA, 19 nt, Artificial Sequence
  Description of Artificial Sequence: Synthetic oligonucleotide
gucuugccaacucaacugu

SEQ ID NO: 60753 - RNA, 19 nt, Artificial Sequence
  Description of Artificial Sequence: Synthetic oligonucleotide
uauucagagcugggagagu

SEQ ID NO: 60754 - RNA, 19 nt, Artificial Sequence
  Description of Artificial Sequence: Synthetic oligonucleotide
gugcaucuaaaaguaaagu

SEQ ID NO: 60755 - RNA, 19 nt, Artificial Sequence
  Description of Artificial Sequence: Synthetic oligonucleotide
cugguugagucagacgaca

SEQ ID NO: 60756 - RNA, 19 nt, Artificial Sequence
  Description of Artificial Sequence: Synthetic oligonucleotide
ggcuccuauauggaaagca

SEQ ID NO: 60757 - RNA, 19 nt, Artificial Sequence
  Description of Artificial Sequence: Synthetic oligonucleotide
  modified_base (3)..(3): a, c, u, g, unknown or other
agnaaacuauacagcuaaa

SEQ ID NO: 60758 - RNA, 19 nt, Artificial Sequence
  Description of Artificial Sequence: Synthetic oligonucleotide
caguacgacucuggguacc

SEQ ID NO: 60759 - RNA, 19 nt, Artificial Sequence
  Description of Artificial Sequence: Synthetic oligonucleotide
ccggacugaaacucagagc

SEQ ID NO: 60760 - RNA, 19 nt, Artificial Sequence
  Description of Artificial Sequence: Synthetic oligonucleotide
gacgacacauugagaacaa

SEQ ID NO: 60761 - RNA, 19 nt, Artificial Sequence
  Description of Artificial Sequence: Synthetic oligonucleotide
gauuaguguugaaauugau

SEQ ID NO: 60762 - RNA, 19 nt, Artificial Sequence
  Description of Artificial Sequence: Synthetic oligonucleotide
guaccguguguacauacau

SEQ ID NO: 60763 - RNA, 19 nt, Artificial Sequence
  Description of Artificial Sequence: Synthetic oligonucleotide
gauuguaaacgagccacuu

SEQ ID NO: 60764 - RNA, 19 nt, Artificial Sequence
  Description of Artificial Sequence: Synthetic oligonucleotide
ggaugggagguuuagcuau

SEQ ID NO: 60765 - RNA, 19 nt, Artificial Sequence
  Description of Artificial Sequence: Synthetic oligonucleotide
guacggagacuugcagugc

SEQ ID NO: 60766 - RNA, 19 nt, Artificial Sequence
  Description of Artificial Sequence: Synthetic oligonucleotide
ucccuauagccaagacuuu

SEQ ID NO: 60767 - RNA, 19 nt, Artificial Sequence
  Description of Artificial Sequence: Synthetic oligonucleotide
uagcuaugguagagcacuu

SEQ ID NO: 60768 - RNA, 19 nt, Artificial Sequence
  Description of Artificial Sequence: Synthetic oligonucleotide
cacucuuacagccccauuu

SEQ ID NO: 60769 - RNA, 19 nt, Artificial Sequence
  Description of Artificial Sequence: Synthetic oligonucleotide
gccggagucggcaagcggc

SEQ ID NO: 60770 - RNA, 19 nt, Artificial Sequence
  Description of Artificial Sequence: Synthetic oligonucleotide
gcacauucguuauuauaaa

SEQ ID NO: 60771 - RNA, 19 nt, Artificial Sequence
  Description of Artificial Sequence: Synthetic oligonucleotide
guaaacgagccacuugcuu

SEQ ID NO: 60772 - RNA, 19 nt, Artificial Sequence
  Description of Artificial Sequence: Synthetic oligonucleotide
agccgugaaauaagagccu

SEQ ID NO: 60773 - RNA, 19 nt, Artificial Sequence
  Description of Artificial Sequence: Synthetic oligonucleotide
gccgugaaauaagagccug

SEQ ID NO: 60774 - RNA, 19 nt, Artificial Sequence
  Description of Artificial Sequence: Synthetic oligonucleotide
cuugacccgucccauuaaa

SEQ ID NO: 60775 - RNA, 19 nt, Artificial Sequence
  Description of Artificial Sequence: Synthetic oligonucleotide
ggcggaugacugcaaugcc

SEQ ID NO: 60776 - RNA, 19 nt, Artificial Sequence
  Description of Artificial Sequence: Synthetic oligonucleotide
ccguuaaaaccucagggaa

SEQ ID NO: 60777 - RNA, 19 nt, Artificial Sequence
  Description of Artificial Sequence: Synthetic oligonucleotide
aagcguggcuauaguccug

SEQ ID NO: 60778 - RNA, 19 nt, Artificial Sequence
  Description of Artificial Sequence: Synthetic oligonucleotide
gucaccggacugaaacuca

SEQ ID NO: 60779 - RNA, 19 nt, Artificial Sequence
  Description of Artificial Sequence: Synthetic oligonucleotide
gagcacuugucuauuuuau

SEQ ID NO: 60780 - RNA, 19 nt, Artificial Sequence
  Description of Artificial Sequence: Synthetic oligonucleotide
gcuccaaucaugaugcuau

SEQ ID NO: 60781 - RNA, 19 nt, Artificial Sequence
  Description of Artificial Sequence: Synthetic oligonucleotide
agguauagauucagacuua

SEQ ID NO: 60782 - RNA, 19 nt, Artificial Sequence
  Description of Artificial Sequence: Synthetic oligonucleotide
augggaaacuaaacagcua

SEQ ID NO: 60783 - RNA, 19 nt, Artificial Sequence
  Description of Artificial Sequence: Synthetic oligonucleotide
agcaugcgcuaguauucuu

SEQ ID NO: 60784 - RNA, 19 nt, Artificial Sequence
  Description of Artificial Sequence: Synthetic oligonucleotide
ccgaaucacggucuuauaa

SEQ ID NO: 60785 - RNA, 19 nt, Artificial Sequence
  Description of Artificial Sequence: Synthetic oligonucleotide
gcucgaucaguaucacaca

SEQ ID NO: 60786 - RNA, 19 nt, Artificial Sequence
  Description of Artificial Sequence: Synthetic oligonucleotide
cccgucuuucucacuuugc

SEQ ID NO: 60787 - RNA, 19 nt, Artificial Sequence
  Description of Artificial Sequence: Synthetic oligonucleotide
uucucagaauaggcauuuu

SEQ ID NO: 60788 - RNA, 19 nt, Artificial Sequence
  Description of Artificial Sequence: Synthetic oligonucleotide
agauugccgacaggagaaa

SEQ ID NO: 60789 - RNA, 19 nt, Artificial Sequence
  Description of Artificial Sequence: Synthetic oligonucleotide
cguggcuauaguccuggag

SEQ ID NO: 60790 - RNA, 19 nt, Artificial Sequence
  Description of Artificial Sequence: Synthetic oligonucleotide
gauugccgacaggagaaau

SEQ ID NO: 60791 - RNA, 19 nt, Artificial Sequence
  Description of Artificial Sequence: Synthetic oligonucleotide
acgacacauugagaacaau

SEQ ID NO: 60792 - RNA, 19 nt, Artificial Sequence
  Description of Artificial Sequence: Synthetic oligonucleotide
ccuuggaaauaccauggcu

SEQ ID NO: 60793 - RNA, 19 nt, Artificial Sequence
  Description of Artificial Sequence: Synthetic oligonucleotide
gcugguugagucagacgac

SEQ ID NO: 60794 - RNA, 19 nt, Artificial Sequence
  Description of Artificial Sequence: Synthetic oligonucleotide
cuuccauuuggcgaugcuu

SEQ ID NO: 60795 - RNA, 19 nt, Artificial Sequence
  Description of Artificial Sequence: Synthetic oligonucleotide
aggcuauauugugucuguu

SEQ ID NO: 60796 - RNA, 19 nt, Artificial Sequence
  Description of Artificial Sequence: Synthetic oligonucleotide
cugcgguagcauuuuccua

SEQ ID NO: 60797 - RNA, 19 nt, Artificial Sequence
  Description of Artificial Sequence: Synthetic oligonucleotide
cgucccauuaaacaugacu

SEQ ID NO: 60798 - RNA, 19 nt, Artificial Sequence
  Description of Artificial Sequence: Synthetic oligonucleotide
gcaugcgcuaguauucuua

SEQ ID NO: 60799 - RNA, 19 nt, Artificial Sequence
  Description of Artificial Sequence: Synthetic oligonucleotide
gaccuaggacauauauuuu

SEQ ID NO: 60800 - RNA, 19 nt, Artificial Sequence
  Description of Artificial Sequence: Synthetic oligonucleotide
guauguaccucagcauauu

SEQ ID NO: 60801 - RNA, 19 nt, Artificial Sequence
  Description of Artificial Sequence: Synthetic oligonucleotide
cuccaccccuguccuugac

SEQ ID NO: 60802 - RNA, 19 nt, Artificial Sequence
  Description of Artificial Sequence: Synthetic oligonucleotide
ggcuauaguccuggagcuc

SEQ ID NO: 60803 - RNA, 19 nt, Artificial Sequence
  Description of Artificial Sequence: Synthetic oligonucleotide
ggagucggcaagcggcucu

SEQ ID NO: 60804 - RNA, 19 nt, Artificial Sequence
  Description of Artificial Sequence: Synthetic oligonucleotide
ccaccacuauagaaauaga

SEQ ID NO: 60805 - RNA, 19 nt, Artificial Sequence
  Description of Artificial Sequence: Synthetic oligonucleotide
cccgagucuacauucccua

SEQ ID NO: 60806 - RNA, 19 nt, Artificial Sequence
  Description of Artificial Sequence: Synthetic oligonucleotide
ccaacucaacuguaacugu

SEQ ID NO: 60807 - RNA, 19 nt, Artificial Sequence
  Description of Artificial Sequence: Synthetic oligonucleotide
agccugugacaaagccgug

SEQ ID NO: 60808 - RNA, 19 nt, Artificial Sequence
  Description of Artificial Sequence: Synthetic oligonucleotide
cagaggccggagucggcaa

SEQ ID NO: 60809 - RNA, 19 nt, Artificial Sequence
  Description of Artificial Sequence: Synthetic oligonucleotide
cagauacaccaagcacaga

SEQ ID NO: 60810 - RNA, 19 nt, Artificial Sequence
  Description of Artificial Sequence: Synthetic oligonucleotide
gaguggcggaugacugcaa

SEQ ID NO: 60811 - RNA, 19 nt, Artificial Sequence
  Description of Artificial Sequence: Synthetic oligonucleotide
ggcuuacuacuuagaaagu

SEQ ID NO: 60812 - RNA, 19 nt, Artificial Sequence
  Description of Artificial Sequence: Synthetic oligonucleotide
gcggcucuauucagagcug

SEQ ID NO: 60813 - RNA, 19 nt, Artificial Sequence
  Description of Artificial Sequence: Synthetic oligonucleotide
gcgguagcauuuuccuaua

SEQ ID NO: 60814 - RNA, 19 nt, Artificial Sequence
  Description of Artificial Sequence: Synthetic oligonucleotide
cggcaagcggcucuauuca

SEQ ID NO: 60815 - RNA, 19 nt, Artificial Sequence
  Description of Artificial Sequence: Synthetic oligonucleotide
gucggcaagcggcucuauu

SEQ ID NO: 60816 - RNA, 19 nt, Artificial Sequence
  Description of Artificial Sequence: Synthetic oligonucleotide
cuccaaucaugaugcuauu

SEQ ID NO: 60817 - RNA, 19 nt, Artificial Sequence
  Description of Artificial Sequence: Synthetic oligonucleotide
cggucuuauaacacaaguu

SEQ ID NO: 60818 - RNA, 19 nt, Artificial Sequence
  Description of Artificial Sequence: Synthetic oligonucleotide
ccgugaaauaagagccugu

SEQ ID NO: 60819 - RNA, 19 nt, Artificial Sequence
  Description of Artificial Sequence: Synthetic oligonucleotide
ggcuaaguggacacaucuu

SEQ ID NO: 60820 - RNA, 19 nt, Artificial Sequence
  Description of Artificial Sequence: Synthetic oligonucleotide
ggacaucacuaugcguccu

SEQ ID NO: 60821 - RNA, 19 nt, Artificial Sequence
  Description of Artificial Sequence: Synthetic oligonucleotide
ccgucccauuaaacaugac

SEQ ID NO: 60822 - RNA, 19 nt, Artificial Sequence
  Description of Artificial Sequence: Synthetic oligonucleotide
ccccgagucuacauucccu

SEQ ID NO: 60823 - RNA, 19 nt, Artificial Sequence
  Description of Artificial Sequence: Synthetic oligonucleotide
cccuauagccaagacuuuu

SEQ ID NO: 60824 - RNA, 19 nt, Artificial Sequence
  Description of Artificial Sequence: Synthetic oligonucleotide
gcucggcgauccaucccca

SEQ ID NO: 60825 - RNA, 19 nt, Artificial Sequence
  Description of Artificial Sequence: Synthetic oligonucleotide
uguacaauucauuuaagag

SEQ ID NO: 60826 - RNA, 19 nt, Artificial Sequence
  Description of Artificial Sequence: Synthetic oligonucleotide
aaggguuacagauacuugg

SEQ ID NO: 60827 - RNA, 19 nt, Artificial Sequence
  Description of Artificial Sequence: Synthetic oligonucleotide
cuaucuaucaguucaaacc

SEQ ID NO: 60828 - RNA, 19 nt, Artificial Sequence
  Description of Artificial Sequence: Synthetic oligonucleotide
aauauugugagugcaagag

SEQ ID NO: 60829 - RNA, 19 nt, Artificial Sequence
  Description of Artificial Sequence: Synthetic oligonucleotide
uuuccuaucuaucaguuca

SEQ ID NO: 60830 - RNA, 19 nt, Artificial Sequence
  Description of Artificial Sequence: Synthetic oligonucleotide
uacaauucauuuaagagaa

SEQ ID NO: 60831 - RNA, 19 nt, Artificial Sequence
  Description of Artificial Sequence: Synthetic oligonucleotide
uaucuaucaguucaaaccc

SEQ ID NO: 60832 - RNA, 19 nt, Artificial Sequence
  Description of Artificial Sequence: Synthetic oligonucleotide
uauccuauugccauugucc

SEQ ID NO: 60833 - RNA, 19 nt, Artificial Sequence
  Description of Artificial Sequence: Synthetic oligonucleotide
aaauccuaucguuaguauc

SEQ ID NO: 60834 - RNA, 19 nt, Artificial Sequence
  Description of Artificial Sequence: Synthetic oligonucleotide
uauaacuaggucuuugcag

SEQ ID NO: 60835 - RNA, 19 nt, Artificial Sequence
  Description of Artificial Sequence: Synthetic oligonucleotide
agcaagugaacucaucagc

SEQ ID NO: 60836 - RNA, 19 nt, Artificial Sequence
  Description of Artificial Sequence: Synthetic oligonucleotide
ucucauauggcacuguucu

SEQ ID NO: 60837 - RNA, 19 nt, Artificial Sequence
  Description of Artificial Sequence: Synthetic oligonucleotide
ucuaccaaugucuauugag

SEQ ID NO: 60838 - RNA, 19 nt, Artificial Sequence
  Description of Artificial Sequence: Synthetic oligonucleotide
ugacaacugauauugcugg

SEQ ID NO: 60839 - RNA, 19 nt, Artificial Sequence
  Description of Artificial Sequence: Synthetic oligonucleotide
auagccuauaacuaggucu

SEQ ID NO: 60840 - RNA, 19 nt, Artificial Sequence
  Description of Artificial Sequence: Synthetic oligonucleotide
ucaagugugauguuuagaa

SEQ ID NO: 60841 - RNA, 19 nt, Artificial Sequence
  Description of Artificial Sequence: Synthetic oligonucleotide
gaaccaguccacuaguacg

SEQ ID NO: 60842 - RNA, 19 nt, Artificial Sequence
  Description of Artificial Sequence: Synthetic oligonucleotide
uuuggcuuagaucagccca

SEQ ID NO: 60843 - RNA, 19 nt, Artificial Sequence
  Description of Artificial Sequence: Synthetic oligonucleotide
ugugaaugcacuuucgcca

SEQ ID NO: 60844 - RNA, 19 nt, Artificial Sequence
  Description of Artificial Sequence: Synthetic oligonucleotide
aggauuauagacauugucg

SEQ ID NO: 60845 - RNA, 19 nt, Artificial Sequence
  Description of Artificial Sequence: Synthetic oligonucleotide
uagcuuaugguuaagcugu

SEQ ID NO: 60846 - RNA, 19 nt, Artificial Sequence
  Description of Artificial Sequence: Synthetic oligonucleotide
aagaauagugauuguucuc

SEQ ID NO: 60847 - RNA, 19 nt, Artificial Sequence
  Description of Artificial Sequence: Synthetic oligonucleotide
auuauagacauugucgauc

SEQ ID NO: 60848 - RNA, 19 nt, Artificial Sequence
  Description of Artificial Sequence: Synthetic oligonucleotide
augcacuuucgccagagcc

SEQ ID NO: 60849 - RNA, 19 nt, Artificial Sequence
  Description of Artificial Sequence: Synthetic oligonucleotide
auccuauugccauuguccc

SEQ ID NO: 60850 - RNA, 19 nt, Artificial Sequence
  Description of Artificial Sequence: Synthetic oligonucleotide
uuauagacauugucgauca

SEQ ID NO: 60851 - RNA, 19 nt, Artificial Sequence
  Description of Artificial Sequence: Synthetic oligonucleotide
ucuuuaaguacacaggauu

SEQ ID NO: 60852 - RNA, 19 nt, Artificial Sequence
  Description of Artificial Sequence: Synthetic oligonucleotide
aaauagucuuagaagccgc

SEQ ID NO: 60853 - RNA, 19 nt, Artificial Sequence
  Description of Artificial Sequence: Synthetic oligonucleotide
agcacuacauguuauguug

SEQ ID NO: 60854 - RNA, 19 nt, Artificial Sequence
  Description of Artificial Sequence: Synthetic oligonucleotide
cuaaaggucagcaggacug

SEQ ID NO: 60855 - RNA, 19 nt, Artificial Sequence
  Description of Artificial Sequence: Synthetic oligonucleotide
ucgguuaucguucuggagu

SEQ ID NO: 60856 - RNA, 19 nt, Artificial Sequence
  Description of Artificial Sequence: Synthetic oligonucleotide
agguuuuguaugcaugagc

SEQ ID NO: 60857 - RNA, 19 nt, Artificial Sequence
  Description of Artificial Sequence: Synthetic oligonucleotide
aauccuaucguuaguauca

SEQ ID NO: 60858 - RNA, 19 nt, Artificial Sequence
  Description of Artificial Sequence: Synthetic oligonucleotide
uauucuccgaucuuggcca

SEQ ID NO: 60859 - RNA, 19 nt, Artificial Sequence
  Description of Artificial Sequence: Synthetic oligonucleotide
uuugugaaugcacuuucgc

SEQ ID NO: 60860 - RNA, 19 nt, Artificial Sequence
  Description of Artificial Sequence: Synthetic oligonucleotide
uuuugugaaugcacuuucg

SEQ ID NO: 60861 - RNA, 19 nt, Artificial Sequence
  Description of Artificial Sequence: Synthetic oligonucleotide
ucgaguguaauuccauuag

SEQ ID NO: 60862 - RNA, 19 nt, Artificial Sequence
  Description of Artificial Sequence: Synthetic oligonucleotide
ucuguuaggaacacacuga

SEQ ID NO: 60863 - RNA, 19 nt, Artificial Sequence
  Description of Artificial Sequence: Synthetic oligonucleotide
acuaguucaagagacuccg

SEQ ID NO: 60864 - RNA, 19 nt, Artificial Sequence
  Description of Artificial Sequence: Synthetic oligonucleotide
agauuucauuuauacguac

SEQ ID NO: 60865 - RNA, 19 nt, Artificial Sequence
  Description of Artificial Sequence: Synthetic oligonucleotide
gaauuuauuggcaccauac

SEQ ID NO: 60866 - RNA, 19 nt, Artificial Sequence
  Description of Artificial Sequence: Synthetic oligonucleotide
aaauauugugagugcaaga

SEQ ID NO: 60867 - RNA, 19 nt, Artificial Sequence
  Description of Artificial Sequence: Synthetic oligonucleotide
uaucguuaguaucaagugu

SEQ ID NO: 60868 - RNA, 19 nt, Artificial Sequence
  Description of Artificial Sequence: Synthetic oligonucleotide
aauuccgccacaucaagua

SEQ ID NO: 60869 - RNA, 19 nt, Artificial Sequence
  Description of Artificial Sequence: Synthetic oligonucleotide
uuugacugcagauccccgg

SEQ ID NO: 60870 - RNA, 19 nt, Artificial Sequence
  Description of Artificial Sequence: Synthetic oligonucleotide
agguccauuugauagccac

SEQ ID NO: 60871 - RNA, 19 nt, Artificial Sequence
  Description of Artificial Sequence: Synthetic oligonucleotide
ucuacaacagugaccaauc

SEQ ID NO: 60872 - RNA, 19 nt, Artificial Sequence
  Description of Artificial Sequence: Synthetic oligonucleotide
uugugaaugcacuuucgcc

SEQ ID NO: 60873 - RNA, 19 nt, Artificial Sequence
  Description of Artificial Sequence: Synthetic oligonucleotide
uguugacuagaguagccag

SEQ ID NO: 60874 - RNA, 19 nt, Artificial Sequence
  Description of Artificial Sequence: Synthetic oligonucleotide
ucacuauagcacaagguuc

SEQ ID NO: 60875 - RNA, 19 nt, Artificial Sequence
  Description of Artificial Sequence: Synthetic oligonucleotide
cuaucguuaguaucaagug

SEQ ID NO: 60876 - RNA, 19 nt, Artificial Sequence
  Description of Artificial Sequence: Synthetic oligonucleotide
aguagcuacugaaauaguc

SEQ ID NO: 60877 - RNA, 19 nt, Artificial Sequence
  Description of Artificial Sequence: Synthetic oligonucleotide
uuuuguaugcaugagccuc

SEQ ID NO: 60878 - RNA, 19 nt, Artificial Sequence
  Description of Artificial Sequence: Synthetic oligonucleotide
agaauagugauuguucucu

SEQ ID NO: 60879 - RNA, 19 nt, Artificial Sequence
  Description of Artificial Sequence: Synthetic oligonucleotide
agucaagacuuguucagag

SEQ ID NO: 60880 - RNA, 19 nt, Artificial Sequence
  Description of Artificial Sequence: Synthetic oligonucleotide
guaaccgccuuuuaaguug

SEQ ID NO: 60881 - RNA, 19 nt, Artificial Sequence
  Description of Artificial Sequence: Synthetic oligonucleotide
uacacugaguagaacgggc

SEQ ID NO: 60882 - RNA, 19 nt, Artificial Sequence
  Description of Artificial Sequence: Synthetic oligonucleotide
auuuaugcggcauguucuc

SEQ ID NO: 60883 - RNA, 19 nt, Artificial Sequence
  Description of Artificial Sequence: Synthetic oligonucleotide
uccaaugugucucuacaac

SEQ ID NO: 60884 - RNA, 19 nt, Artificial Sequence
  Description of Artificial Sequence: Synthetic oligonucleotide
ucuaaaggucagcaggacu

SEQ ID NO: 60885 - RNA, 19 nt, Artificial Sequence
  Description of Artificial Sequence: Synthetic oligonucleotide
auagccuuagcuuaugguu

SEQ ID NO: 60886 - RNA, 19 nt, Artificial Sequence
  Description of Artificial Sequence: Synthetic oligonucleotide
uguauuuaguuuggaaucu

SEQ ID NO: 60887 - RNA, 19 nt, Artificial Sequence
  Description of Artificial Sequence: Synthetic oligonucleotide
agguauauuucggagagug

SEQ ID NO: 60888 - RNA, 19 nt, Artificial Sequence
  Description of Artificial Sequence: Synthetic oligonucleotide
uagacauugucgaucauuu

SEQ ID NO: 60889 - RNA, 19 nt, Artificial Sequence
  Description of Artificial Sequence: Synthetic oligonucleotide
cuggaauugggaauuauca

SEQ ID NO: 60890 - RNA, 19 nt, Artificial Sequence
  Description of Artificial Sequence: Synthetic oligonucleotide
aucguuaguaucaagugug

SEQ ID NO: 60891 - RNA, 19 nt, Artificial Sequence
  Description of Artificial Sequence: Synthetic oligonucleotide
cuuaguaacccguuuuauc

SEQ ID NO: 60892 - RNA, 19 nt, Artificial Sequence
  Description of Artificial Sequence: Synthetic oligonucleotide
aagugcuuaagaauaguga

SEQ ID NO: 60893 - RNA, 19 nt, Artificial Sequence
  Description of Artificial Sequence: Synthetic oligonucleotide
uguaucacuggcuggcggc

SEQ ID NO: 60894 - RNA, 19 nt, Artificial Sequence
  Description of Artificial Sequence: Synthetic oligonucleotide
ugucucuccgauuagugaa

SEQ ID NO: 60895 - RNA, 19 nt, Artificial Sequence
  Description of Artificial Sequence: Synthetic oligonucleotide
ucgaucauuuuaaaauguc

SEQ ID NO: 60896 - RNA, 19 nt, Artificial Sequence
  Description of Artificial Sequence: Synthetic oligonucleotide
aacccguuuuauccuauug

SEQ ID NO: 60897 - RNA, 19 nt, Artificial Sequence
  Description of Artificial Sequence: Synthetic oligonucleotide
agaguuaaacaggaacuuc

SEQ ID NO: 60898 - RNA, 19 nt, Artificial Sequence
  Description of Artificial Sequence: Synthetic oligonucleotide
uguugauaucuuuugucuc

SEQ ID NO: 60899 - RNA, 19 nt, Artificial Sequence
  Description of Artificial Sequence: Synthetic oligonucleotide
acgauccucaaauauugug

SEQ ID NO: 60900 - RNA, 19 nt, Artificial Sequence
  Description of Artificial Sequence: Synthetic oligonucleotide
uauauuucggagagugguc

SEQ ID NO: 60901 - RNA, 19 nt, Artificial Sequence
  Description of Artificial Sequence: Synthetic oligonucleotide
acacuaguucaagagacuc

SEQ ID NO: 60902 - RNA, 19 nt, Artificial Sequence
  Description of Artificial Sequence: Synthetic oligonucleotide
uuugacaaggucgagugua

SEQ ID NO: 60903 - RNA, 19 nt, Artificial Sequence
  Description of Artificial Sequence: Synthetic oligonucleotide
uaucaagugugauguuuag

SEQ ID NO: 60904 - RNA, 19 nt, Artificial Sequence
  Description of Artificial Sequence: Synthetic oligonucleotide
aggugagagucacuauagc

SEQ ID NO: 60905 - RNA, 19 nt, Artificial Sequence
  Description of Artificial Sequence: Synthetic oligonucleotide
uuugccuacugccuugcac

SEQ ID NO: 60906 - RNA, 19 nt, Artificial Sequence
  Description of Artificial Sequence: Synthetic oligonucleotide
acugggauacacugaguag

SEQ ID NO: 60907 - RNA, 19 nt, Artificial Sequence
  Description of Artificial Sequence: Synthetic oligonucleotide
acguuuugcaguugacuuc

SEQ ID NO: 60908 - RNA, 19 nt, Artificial Sequence
  Description of Artificial Sequence: Synthetic oligonucleotide
uugagcacuauucuccgau

SEQ ID NO: 60909 - RNA, 19 nt, Artificial Sequence
  Description of Artificial Sequence: Synthetic oligonucleotide
uguuaggaacacacugacc

SEQ ID NO: 60910 - RNA, 19 nt, Artificial Sequence
  Description of Artificial Sequence: Synthetic oligonucleotide
uggaaucgagccaguagag

SEQ ID NO: 60911 - RNA, 19 nt, Artificial Sequence
  Description of Artificial Sequence: Synthetic oligonucleotide
ugucuaccaaugucuauug

SEQ ID NO: 60912 - RNA, 19 nt, Artificial Sequence
  Description of Artificial Sequence: Synthetic oligonucleotide
accguuauugaccaagcau

SEQ ID NO: 60913 - RNA, 19 nt, Artificial Sequence
  Description of Artificial Sequence: Synthetic oligonucleotide
acagauacuugguaaccca

SEQ ID NO: 60914 - RNA, 19 nt, Artificial Sequence
  Description of Artificial Sequence: Synthetic oligonucleotide
agugugauguuuagaagag

SEQ ID NO: 60915 - RNA, 19 nt, Artificial Sequence
  Description of Artificial Sequence: Synthetic oligonucleotide
cuaaugucuaugcauucuc

SEQ ID NO: 60916 - RNA, 19 nt, Artificial Sequence
  Description of Artificial Sequence: Synthetic oligonucleotide
uacccguugggacaggaac

SEQ ID NO: 60917 - RNA, 19 nt, Artificial Sequence
  Description of Artificial Sequence: Synthetic oligonucleotide
gccuauacaauguauguac

SEQ ID NO: 60918 - RNA, 19 nt, Artificial Sequence
  Description of Artificial Sequence: Synthetic oligonucleotide
cuauccaguagacacgauc

SEQ ID NO: 60919 - RNA, 19 nt, Artificial Sequence
  Description of Artificial Sequence: Synthetic oligonucleotide
auuccgccacaucaaguac

SEQ ID NO: 60920 - RNA, 19 nt, Artificial Sequence
  Description of Artificial Sequence: Synthetic oligonucleotide
acuaguacguagaaugucu

SEQ ID NO: 60921 - RNA, 19 nt, Artificial Sequence
  Description of Artificial Sequence: Synthetic oligonucleotide
cacuagauagcaugugcag

SEQ ID NO: 60922 - RNA, 19 nt, Artificial Sequence
  Description of Artificial Sequence: Synthetic oligonucleotide
acggaaagauaucuugaug

SEQ ID NO: 60923 - RNA, 19 nt, Artificial Sequence
  Description of Artificial Sequence: Synthetic oligonucleotide
uagaacgggcgccacagcu

SEQ ID NO: 60924 - RNA, 19 nt, Artificial Sequence
  Description of Artificial Sequence: Synthetic oligonucleotide
uggccuauacaauguaugu

SEQ ID NO: 60925 - RNA, 19 nt, Artificial Sequence
  Description of Artificial Sequence: Synthetic oligonucleotide
uuauccuauugccauuguc

SEQ ID NO: 60926 - RNA, 19 nt, Artificial Sequence
  Description of Artificial Sequence: Synthetic oligonucleotide
uaccugauggcugaacgag

SEQ ID NO: 60927 - RNA, 19 nt, Artificial Sequence
  Description of Artificial Sequence: Synthetic oligonucleotide
cauuugauagccacgacua

SEQ ID NO: 60928 - RNA, 19 nt, Artificial Sequence
  Description of Artificial Sequence: Synthetic oligonucleotide
cuaccaaugucuauugaga

SEQ ID NO: 60929 - RNA, 19 nt, Artificial Sequence
  Description of Artificial Sequence: Synthetic oligonucleotide
uugacuagaguagccagcu

SEQ ID NO: 60930 - RNA, 19 nt, Artificial Sequence
  Description of Artificial Sequence: Synthetic oligonucleotide
uccgacagaagcacugugu

SEQ ID NO: 60931 - RNA, 19 nt, Artificial Sequence
  Description of Artificial Sequence: Synthetic oligonucleotide
cacuaguucaagagacucc

SEQ ID NO: 60932 - RNA, 19 nt, Artificial Sequence
  Description of Artificial Sequence: Synthetic oligonucleotide
cuguuaggaacacacugac

SEQ ID NO: 60933 - RNA, 19 nt, Artificial Sequence
  Description of Artificial Sequence: Synthetic oligonucleotide
cacuauagcacaagguuca

SEQ ID NO: 60934 - RNA, 19 nt, Artificial Sequence
  Description of Artificial Sequence: Synthetic oligonucleotide
uggucuuguacacccaauc

SEQ ID NO: 60935 - RNA, 19 nt, Artificial Sequence
  Description of Artificial Sequence: Synthetic oligonucleotide
agugaccaauccuaaggca

SEQ ID NO: 60936 - RNA, 19 nt, Artificial Sequence
  Description of Artificial Sequence: Synthetic oligonucleotide
ggucuuuaaguacacagga

SEQ ID NO: 60937 - RNA, 19 nt, Artificial Sequence
  Description of Artificial Sequence: Synthetic oligonucleotide
uagucuuagaagccgcauc

SEQ ID NO: 60938 - RNA, 19 nt, Artificial Sequence
  Description of Artificial Sequence: Synthetic oligonucleotide
uacauguuauguugccuac

SEQ ID NO: 60939 - RNA, 19 nt, Artificial Sequence
  Description of Artificial Sequence: Synthetic oligonucleotide
gcggcuuuugacaaggucg

SEQ ID NO: 60940 - RNA, 19 nt, Artificial Sequence
  Description of Artificial Sequence: Synthetic oligonucleotide
uuguugacuagaguagcca

SEQ ID NO: 60941 - RNA, 19 nt, Artificial Sequence
  Description of Artificial Sequence: Synthetic oligonucleotide
ucguuaguaucaaguguga

SEQ ID NO: 60942 - RNA, 19 nt, Artificial Sequence
  Description of Artificial Sequence: Synthetic oligonucleotide
aacuugauccacggaaaga

SEQ ID NO: 60943 - RNA, 19 nt, Artificial Sequence
  Description of Artificial Sequence: Synthetic oligonucleotide
guagacacgauccucaaau

SEQ ID NO: 60944 - RNA, 19 nt, Artificial Sequence
  Description of Artificial Sequence: Synthetic oligonucleotide
gguguuacugguucagacc

SEQ ID NO: 60945 - RNA, 19 nt, Artificial Sequence
  Description of Artificial Sequence: Synthetic oligonucleotide
agggcccaagcacugauug

SEQ ID NO: 60946 - RNA, 19 nt, Artificial Sequence
  Description of Artificial Sequence: Synthetic oligonucleotide
acaacagugaccaauccua

SEQ ID NO: 60947 - RNA, 19 nt, Artificial Sequence
  Description of Artificial Sequence: Synthetic oligonucleotide
aauagucuuagaagccgca

SEQ ID NO: 60948 - RNA, 19 nt, Artificial Sequence
  Description of Artificial Sequence: Synthetic oligonucleotide
uucucauauggcacuguuc

SEQ ID NO: 60949 - RNA, 19 nt, Artificial Sequence
  Description of Artificial Sequence: Synthetic oligonucleotide
uaguaacccguuuuauccu

SEQ ID NO: 60950 - RNA, 19 nt, Artificial Sequence
  Description of Artificial Sequence: Synthetic oligonucleotide
uuggcuuagaucagcccaa

SEQ ID NO: 60951 - RNA, 19 nt, Artificial Sequence
  Description of Artificial Sequence: Synthetic oligonucleotide
agauagcaugugcagcuug

SEQ ID NO: 60952 - RNA, 19 nt, Artificial Sequence
  Description of Artificial Sequence: Synthetic oligonucleotide
ugauugacguuuugcaguu

SEQ ID NO: 60953 - RNA, 19 nt, Artificial Sequence
  Description of Artificial Sequence: Synthetic oligonucleotide
gaggcggcuuuugacaagg

SEQ ID NO: 60954 - RNA, 19 nt, Artificial Sequence
  Description of Artificial Sequence: Synthetic oligonucleotide
gacgugcccaugcugcccg

SEQ ID NO: 60955 - RNA, 19 nt, Artificial Sequence
  Description of Artificial Sequence: Synthetic oligonucleotide
uugucccaaccauugaaaa

SEQ ID NO: 60956 - RNA, 19 nt, Artificial Sequence
  Description of Artificial Sequence: Synthetic oligonucleotide
agacucggcacaugucuuc

SEQ ID NO: 60957 - RNA, 19 nt, Artificial Sequence
  Description of Artificial Sequence: Synthetic oligonucleotide
ucuccgucacauuuccaca

SEQ ID NO: 60958 - RNA, 19 nt, Artificial Sequence
  Description of Artificial Sequence: Synthetic oligonucleotide
gugggcgccugucaaaucc

SEQ ID NO: 60959 - RNA, 19 nt, Artificial Sequence
  Description of Artificial Sequence: Synthetic oligonucleotide
ggagcaagugaacucauca

SEQ ID NO: 60960 - RNA, 19 nt, Artificial Sequence
  Description of Artificial Sequence: Synthetic oligonucleotide
gaaugcacuuucgccagag

SEQ ID NO: 60961 - RNA, 19 nt, Artificial Sequence
  Description of Artificial Sequence: Synthetic oligonucleotide
aagagacuccggccacugg

SEQ ID NO: 60962 - RNA, 19 nt, Artificial Sequence
  Description of Artificial Sequence: Synthetic oligonucleotide
ugacguuuugcaguugacu

SEQ ID NO: 60963 - RNA, 19 nt, Artificial Sequence
  Description of Artificial Sequence: Synthetic oligonucleotide
ucuauugagagguccucuu

SEQ ID NO: 60964 - RNA, 19 nt, Artificial Sequence
  Description of Artificial Sequence: Synthetic oligonucleotide
aguaucaagugugauguuu

SEQ ID NO: 60965 - RNA, 19 nt, Artificial Sequence
  Description of Artificial Sequence: Synthetic oligonucleotide
gaauuaucacauuuggcuu

SEQ ID NO: 60966 - RNA, 19 nt, Artificial Sequence
  Description of Artificial Sequence: Synthetic oligonucleotide
uugaccucgucacugccau

SEQ ID NO: 60967 - RNA, 19 nt, Artificial Sequence
  Description of Artificial Sequence: Synthetic oligonucleotide
gagccguccacacagucuc

SEQ ID NO: 60968 - RNA, 19 nt, Artificial Sequence
  Description of Artificial Sequence: Synthetic oligonucleotide
ugaccaauccuaaggcaau

SEQ ID NO: 60969 - RNA, 19 nt, Artificial Sequence
  Description of Artificial Sequence: Synthetic oligonucleotide
uucuagggaaagugcauau

SEQ ID NO: 60970 - RNA, 19 nt, Artificial Sequence
  Description of Artificial Sequence: Synthetic oligonucleotide
uuuuagcuggcucgcccca

SEQ ID NO: 60971 - RNA, 19 nt, Artificial Sequence
  Description of Artificial Sequence: Synthetic oligonucleotide
ccuauaacuaggucuuugc

SEQ ID NO: 60972 - RNA, 19 nt, Artificial Sequence
  Description of Artificial Sequence: Synthetic oligonucleotide
ccgccuuuuaaguugauac

SEQ ID NO: 60973 - RNA, 19 nt, Artificial Sequence
  Description of Artificial Sequence: Synthetic oligonucleotide
ugauccacggaaagauauc

SEQ ID NO: 60974 - RNA, 19 nt, Artificial Sequence
  Description of Artificial Sequence: Synthetic oligonucleotide
uuuauccuauugccauugu

SEQ ID NO: 60975 - RNA, 19 nt, Artificial Sequence
  Description of Artificial Sequence: Synthetic oligonucleotide
ucagcccaaaauagcuucu

SEQ ID NO: 60976 - RNA, 19 nt, Artificial Sequence
  Description of Artificial Sequence: Synthetic oligonucleotide
guuguugacuagaguagcc

SEQ ID NO: 60977 - RNA, 19 nt, Artificial Sequence
  Description of Artificial Sequence: Synthetic oligonucleotide
acaacugauauugcugggu

SEQ ID NO: 60978 - RNA, 19 nt, Artificial Sequence
  Description of Artificial Sequence: Synthetic oligonucleotide
uucacacuuguaaccgccu

SEQ ID NO: 60979 - RNA, 19 nt, Artificial Sequence
  Description of Artificial Sequence: Synthetic oligonucleotide
cuaguucaagagacuccgg

SEQ ID NO: 60980 - RNA, 19 nt, Artificial Sequence
  Description of Artificial Sequence: Synthetic oligonucleotide
uuaugcggcauguucucau

SEQ ID NO: 60981 - RNA, 19 nt, Artificial Sequence
  Description of Artificial Sequence: Synthetic oligonucleotide
ucuccgaucuuggccaucc

SEQ ID NO: 60982 - RNA, 19 nt, Artificial Sequence
  Description of Artificial Sequence: Synthetic oligonucleotide
cuacaacagugaccaaucc

SEQ ID NO: 60983 - RNA, 19 nt, Artificial Sequence
  Description of Artificial Sequence: Synthetic oligonucleotide
gguuuauagccuuagcuua

SEQ ID NO: 60984 - RNA, 19 nt, Artificial Sequence
  Description of Artificial Sequence: Synthetic oligonucleotide
uuucuagggaaagugcaua

SEQ ID NO: 60985 - RNA, 19 nt, Artificial Sequence
  Description of Artificial Sequence: Synthetic oligonucleotide
agauccccggauuuuggca

SEQ ID NO: 60986 - RNA, 19 nt, Artificial Sequence
  Description of Artificial Sequence: Synthetic oligonucleotide
gcagucaagacuuguucag

SEQ ID NO: 60987 - RNA, 19 nt, Artificial Sequence
  Description of Artificial Sequence: Synthetic oligonucleotide
cuauaacuaggucuuugca

SEQ ID NO: 60988 - RNA, 19 nt, Artificial Sequence
  Description of Artificial Sequence: Synthetic oligonucleotide
uucagcgugggcucgguua

SEQ ID NO: 60989 - RNA, 19 nt, Artificial Sequence
  Description of Artificial Sequence: Synthetic oligonucleotide
ucggagaguggucauuaau

SEQ ID NO: 60990 - RNA, 19 nt, Artificial Sequence
  Description of Artificial Sequence: Synthetic oligonucleotide
acacuagauagcaugugca

SEQ ID NO: 60991 - RNA, 19 nt, Artificial Sequence
  Description of Artificial Sequence: Synthetic oligonucleotide
cauuuaugcggcauguucu

SEQ ID NO: 60992 - RNA, 19 nt, Artificial Sequence
  Description of Artificial Sequence: Synthetic oligonucleotide
acuacauguuauguugccu

SEQ ID NO: 60993 - RNA, 19 nt, Artificial Sequence
  Description of Artificial Sequence: Synthetic oligonucleotide
gacuuguucagaggucaag

SEQ ID NO: 60994 - RNA, 19 nt, Artificial Sequence
  Description of Artificial Sequence: Synthetic oligonucleotide
guguaagucacaggaguug

SEQ ID NO: 60995 - RNA, 19 nt, Artificial Sequence
  Description of Artificial Sequence: Synthetic oligonucleotide
gacguuuugcaguugacuu

SEQ ID NO: 60996 - RNA, 19 nt, Artificial Sequence
  Description of Artificial Sequence: Synthetic oligonucleotide
uccuaucguuaguaucaag

SEQ ID NO: 60997 - RNA, 19 nt, Artificial Sequence
  Description of Artificial Sequence: Synthetic oligonucleotide
uugacguuuugcaguugac

SEQ ID NO: 60998 - RNA, 19 nt, Artificial Sequence
  Description of Artificial Sequence: Synthetic oligonucleotide
cuauugagagguccucuuc

SEQ ID NO: 60999 - RNA, 19 nt, Artificial Sequence
  Description of Artificial Sequence: Synthetic oligonucleotide
acuuucgccagagccgcac

SEQ ID NO: 61000 - RNA, 19 nt, Artificial Sequence
  Description of Artificial Sequence: Synthetic oligonucleotide
ucggaggggcaguugaccu

SEQ ID NO: 61001 - RNA, 19 nt, Artificial Sequence
  Description of Artificial Sequence: Synthetic oligonucleotide
acguagaaugucuguugug

SEQ ID NO: 61002 - RNA, 19 nt, Artificial Sequence
  Description of Artificial Sequence: Synthetic oligonucleotide
ugcagauccccggauuuug

SEQ ID NO: 61003 - RNA, 19 nt, Artificial Sequence
  Description of Artificial Sequence: Synthetic oligonucleotide
uccuauugccauuguccca

SEQ ID NO: 61004 - RNA, 19 nt, Artificial Sequence
  Description of Artificial Sequence: Synthetic oligonucleotide
ccuacugccuugcacacgc

SEQ ID NO: 61005 - RNA, 19 nt, Artificial Sequence
  Description of Artificial Sequence: Synthetic oligonucleotide
ugaugucucuccgauuagu

SEQ ID NO: 61006 - RNA, 19 nt, Artificial Sequence
  Description of Artificial Sequence: Synthetic oligonucleotide
aguaacccguuuuauccua

SEQ ID NO: 61007 - RNA, 19 nt, Artificial Sequence
  Description of Artificial Sequence: Synthetic oligonucleotide
uguguccgacagaagcacu

SEQ ID NO: 61008 - RNA, 19 nt, Artificial Sequence
  Description of Artificial Sequence: Synthetic oligonucleotide
cauagccuauaacuagguc

SEQ ID NO: 61009 - RNA, 19 nt, Artificial Sequence
  Description of Artificial Sequence: Synthetic oligonucleotide
ccuugucaucaauugaggc

SEQ ID NO: 61010 - RNA, 19 nt, Artificial Sequence
  Description of Artificial Sequence: Synthetic oligonucleotide
gauacuugguaacccacau

SEQ ID NO: 61011 - RNA, 19 nt, Artificial Sequence
  Description of Artificial Sequence: Synthetic oligonucleotide
aucguucuggagugggugu

SEQ ID NO: 61012 - RNA, 19 nt, Artificial Sequence
  Description of Artificial Sequence: Synthetic oligonucleotide
uccauuugauagccacgac

SEQ ID NO: 61013 - RNA, 19 nt, Artificial Sequence
  Description of Artificial Sequence: Synthetic oligonucleotide
ucagcgugggcucgguuau

SEQ ID NO: 61014 - RNA, 19 nt, Artificial Sequence
  Description of Artificial Sequence: Synthetic oligonucleotide
uuuaugcggcauguucuca

SEQ ID NO: 61015 - RNA, 19 nt, Artificial Sequence
  Description of Artificial Sequence: Synthetic oligonucleotide
uuucggagaguggucauua

SEQ ID NO: 61016 - RNA, 19 nt, Artificial Sequence
  Description of Artificial Sequence: Synthetic oligonucleotide
uucggaggggcaguugacc

SEQ ID NO: 61017 - RNA, 19 nt, Artificial Sequence
  Description of Artificial Sequence: Synthetic oligonucleotide
auguuauguugccuacagu

SEQ ID NO: 61018 - RNA, 19 nt, Artificial Sequence
  Description of Artificial Sequence: Synthetic oligonucleotide
gguauauuucggagagugg

SEQ ID NO: 61019 - RNA, 19 nt, Artificial Sequence
  Description of Artificial Sequence: Synthetic oligonucleotide
agagccgcacuggaucucg

SEQ ID NO: 61020 - RNA, 19 nt, Artificial Sequence
  Description of Artificial Sequence: Synthetic oligonucleotide
ugagcacuauucuccgauc

SEQ ID NO: 61021 - RNA, 19 nt, Artificial Sequence
  Description of Artificial Sequence: Synthetic oligonucleotide
acgacuacauucacacuug

SEQ ID NO: 61022 - RNA, 19 nt, Artificial Sequence
  Description of Artificial Sequence: Synthetic oligonucleotide
gaacgggcgccacagcuga

SEQ ID NO: 61023 - RNA, 19 nt, Artificial Sequence
  Description of Artificial Sequence: Synthetic oligonucleotide
gguuguugacuagaguagc

SEQ ID NO: 61024 - RNA, 19 nt, Artificial Sequence
  Description of Artificial Sequence: Synthetic oligonucleotide
agcgugggcucgguuaucg

SEQ ID NO: 61025 - RNA, 19 nt, Artificial Sequence
  Description of Artificial Sequence: Synthetic oligonucleotide
gauccacggaaagauaucu

SEQ ID NO: 61026 - RNA, 19 nt, Artificial Sequence
  Description of Artificial Sequence: Synthetic oligonucleotide
auugucccaaccauugaaa

SEQ ID NO: 61027 - RNA, 19 nt, Artificial Sequence
  Description of Artificial Sequence: Synthetic oligonucleotide
ggaaucgagccaguagagg

SEQ ID NO: 61028 - RNA, 19 nt, Artificial Sequence
  Description of Artificial Sequence: Synthetic oligonucleotide
aguccacuaguacguagaa

SEQ ID NO: 61029 - RNA, 19 nt, Artificial Sequence
  Description of Artificial Sequence: Synthetic oligonucleotide
caguccacuaguacguaga

SEQ ID NO: 61030 - RNA, 19 nt, Artificial Sequence
  Description of Artificial Sequence: Synthetic oligonucleotide
agauggcaauacugucuag

SEQ ID NO: 61031 - RNA, 19 nt, Artificial Sequence
  Description of Artificial Sequence: Synthetic oligonucleotide
cucaaggcuguacccguug

SEQ ID NO: 61032 - RNA, 19 nt, Artificial Sequence
  Description of Artificial Sequence: Synthetic oligonucleotide
cacuaguacguagaauguc

SEQ ID NO: 61033 - RNA, 19 nt, Artificial Sequence
  Description of Artificial Sequence: Synthetic oligonucleotide
aggguuacagauacuuggu

SEQ ID NO: 61034 - RNA, 19 nt, Artificial Sequence
  Description of Artificial Sequence: Synthetic oligonucleotide
ggguguuacugguucagac

SEQ ID NO: 61035 - RNA, 19 nt, Artificial Sequence
  Description of Artificial Sequence: Synthetic oligonucleotide
gaccaauccuaaggcaaug

SEQ ID NO: 61036 - RNA, 19 nt, Artificial Sequence
  Description of Artificial Sequence: Synthetic oligonucleotide
uggguauguguguccgaca

SEQ ID NO: 61037 - RNA, 19 nt, Artificial Sequence
  Description of Artificial Sequence: Synthetic oligonucleotide
guaucaagugugauguuua

SEQ ID NO: 61038 - RNA, 19 nt, Artificial Sequence
  Description of Artificial Sequence: Synthetic oligonucleotide
ggcucgguuaucguucugg

SEQ ID NO: 61039 - RNA, 19 nt, Artificial Sequence
  Description of Artificial Sequence: Synthetic oligonucleotide
aguguaagucacaggaguu

SEQ ID NO: 61040 - RNA, 19 nt, Artificial Sequence
  Description of Artificial Sequence: Synthetic oligonucleotide
ugggcgccugucaaaucca

SEQ ID NO: 61041 - RNA, 19 nt, Artificial Sequence
  Description of Artificial Sequence: Synthetic oligonucleotide
gagcacuauucuccgaucu

SEQ ID NO: 61042 - RNA, 19 nt, Artificial Sequence
  Description of Artificial Sequence: Synthetic oligonucleotide
auagucuuagaagccgcau

SEQ ID NO: 61043 - RNA, 19 nt, Artificial Sequence
  Description of Artificial Sequence: Synthetic oligonucleotide
gucucuccgauuagugaag

SEQ ID NO: 61044 - RNA, 19 nt, Artificial Sequence
  Description of Artificial Sequence: Synthetic oligonucleotide
cacgacuacauucacacuu

SEQ ID NO: 61045 - RNA, 19 nt, Artificial Sequence
  Description of Artificial Sequence: Synthetic oligonucleotide
gguccauuugauagccacg

SEQ ID NO: 61046 - RNA, 19 nt, Artificial Sequence
  Description of Artificial Sequence: Synthetic oligonucleotide
agcacuauucuccgaucuu

SEQ ID NO: 61047 - RNA, 19 nt, Artificial Sequence
  Description of Artificial Sequence: Synthetic oligonucleotide
agugggcgccugucaaauc

SEQ ID NO: 61048 - RNA, 19 nt, Artificial Sequence
  Description of Artificial Sequence: Synthetic oligonucleotide
cucgcuggcaggacauuuc

SEQ ID NO: 61049 - RNA, 19 nt, Artificial Sequence
  Description of Artificial Sequence: Synthetic oligonucleotide
uccuaucuaucaguucaaa

SEQ ID NO: 61050 - RNA, 19 nt, Artificial Sequence
  Description of Artificial Sequence: Synthetic oligonucleotide
gccaccguuauugaccaag

SEQ ID NO: 61051 - RNA, 19 nt, Artificial Sequence
  Description of Artificial Sequence: Synthetic oligonucleotide
gcuuucuagggaaagugca

SEQ ID NO: 61052 - RNA, 19 nt, Artificial Sequence
  Description of Artificial Sequence: Synthetic oligonucleotide
ucggcacaugucuucuuua

SEQ ID NO: 61053 - RNA, 19 nt, Artificial Sequence
  Description of Artificial Sequence: Synthetic oligonucleotide
uggucacauugaucccucc

SEQ ID NO: 61054 - RNA, 19 nt, Artificial Sequence
  Description of Artificial Sequence: Synthetic oligonucleotide
gccuuuuaaguugauacaa

SEQ ID NO: 61055 - RNA, 19 nt, Artificial Sequence
  Description of Artificial Sequence: Synthetic oligonucleotide
auagcaugugcagcuugga

SEQ ID NO: 61056 - RNA, 19 nt, Artificial Sequence
  Description of Artificial Sequence: Synthetic oligonucleotide
gacaaggucgaguguaauu

SEQ ID NO: 61057 - RNA, 19 nt, Artificial Sequence
  Description of Artificial Sequence: Synthetic oligonucleotide
ccuuagcuuaugguuaagc

SEQ ID NO: 61058 - RNA, 19 nt, Artificial Sequence
  Description of Artificial Sequence: Synthetic oligonucleotide
cggagaguggucauuaauc

SEQ ID NO: 61059 - RNA, 19 nt, Artificial Sequence
  Description of Artificial Sequence: Synthetic oligonucleotide
gacuucagcgugggcucgg

SEQ ID NO: 61060 - RNA, 19 nt, Artificial Sequence
  Description of Artificial Sequence: Synthetic oligonucleotide
uucggagaguggucauuaa

SEQ ID NO: 61061 - RNA, 19 nt, Artificial Sequence
  Description of Artificial Sequence: Synthetic oligonucleotide
cgauccucaaauauuguga

SEQ ID NO: 61062 - RNA, 19 nt, Artificial Sequence
  Description of Artificial Sequence: Synthetic oligonucleotide
acacgccaguggcaagguc

SEQ ID NO: 61063 - RNA, 19 nt, Artificial Sequence
  Description of Artificial Sequence: Synthetic oligonucleotide
aucuagagccaccguguuu

SEQ ID NO: 61064 - RNA, 19 nt, Artificial Sequence
  Description of Artificial Sequence: Synthetic oligonucleotide
gucacauucauagccuaua

SEQ ID NO: 61065 - RNA, 19 nt, Artificial Sequence
  Description of Artificial Sequence: Synthetic oligonucleotide
gauugacguuuugcaguug

SEQ ID NO: 61066 - RNA, 19 nt, Artificial Sequence
  Description of Artificial Sequence: Synthetic oligonucleotide
gugggcucgguuaucguuc

SEQ ID NO: 61067 - RNA, 19 nt, Artificial Sequence
  Description of Artificial Sequence: Synthetic oligonucleotide
cagucucggaugccauugc

SEQ ID NO: 61068 - RNA, 19 nt, Artificial Sequence
  Description of Artificial Sequence: Synthetic oligonucleotide
gcucgccccagucagacca

SEQ ID NO: 61069 - RNA, 19 nt, Artificial Sequence
  Description of Artificial Sequence: Synthetic oligonucleotide
cuuucuagggaaagugcau

SEQ ID NO: 61070 - RNA, 19 nt, Artificial Sequence
  Description of Artificial Sequence: Synthetic oligonucleotide
uaacccguuuuauccuauu

SEQ ID NO: 61071 - RNA, 19 nt, Artificial Sequence
  Description of Artificial Sequence: Synthetic oligonucleotide
cguuauugaccaagcauuc

SEQ ID NO: 61072 - RNA, 19 nt, Artificial Sequence
  Description of Artificial Sequence: Synthetic oligonucleotide
aggggcaguugaccucguc

SEQ ID NO: 61073 - RNA, 19 nt, Artificial Sequence
  Description of Artificial Sequence: Synthetic oligonucleotide
guagaacgggcgccacagc

SEQ ID NO: 61074 - RNA, 19 nt, Artificial Sequence
  Description of Artificial Sequence: Synthetic oligonucleotide
gcacuacauguuauguugc

SEQ ID NO: 61075 - RNA, 19 nt, Artificial Sequence
  Description of Artificial Sequence: Synthetic oligonucleotide
ugacaaggucgaguguaau

SEQ ID NO: 61076 - RNA, 19 nt, Artificial Sequence
  Description of Artificial Sequence: Synthetic oligonucleotide
gggauauguacagguggcc

SEQ ID NO: 61077 - RNA, 19 nt, Artificial Sequence
  Description of Artificial Sequence: Synthetic oligonucleotide
aucgcacugccaucuguua

SEQ ID NO: 61078 - RNA, 19 nt, Artificial Sequence
  Description of Artificial Sequence: Synthetic oligonucleotide
ccgcacuggaucucgcugg

SEQ ID NO: 61079 - RNA, 19 nt, Artificial Sequence
  Description of Artificial Sequence: Synthetic oligonucleotide
ccaccguuauugaccaagc

SEQ ID NO: 61080 - RNA, 19 nt, Artificial Sequence
  Description of Artificial Sequence: Synthetic oligonucleotide
gcacuuucgccagagccgc

SEQ ID NO: 61081 - RNA, 19 nt, Artificial Sequence
  Description of Artificial Sequence: Synthetic oligonucleotide
gcagcggccauuugugcac

SEQ ID NO: 61082 - RNA, 19 nt, Artificial Sequence
  Description of Artificial Sequence: Synthetic oligonucleotide
ggcgccacagcugauuuca

SEQ ID NO: 61083 - RNA, 19 nt, Artificial Sequence
  Description of Artificial Sequence: Synthetic oligonucleotide
cacggaaagauaucuugau

SEQ ID NO: 61084 - RNA, 19 nt, Artificial Sequence
  Description of Artificial Sequence: Synthetic oligonucleotide
ccaguccacuaguacguag

SEQ ID NO: 61085 - RNA, 19 nt, Artificial Sequence
  Description of Artificial Sequence: Synthetic oligonucleotide
gacaauggguccacagcua

SEQ ID NO: 61086 - RNA, 19 nt, Artificial Sequence
  Description of Artificial Sequence: Synthetic oligonucleotide
uagauagcaugugcagcuu

SEQ ID NO: 61087 - RNA, 19 nt, Artificial Sequence
  Description of Artificial Sequence: Synthetic oligonucleotide
acuauagcacaagguucau

SEQ ID NO: 61088 - RNA, 19 nt, Artificial Sequence
  Description of Artificial Sequence: Synthetic oligonucleotide
guuuuccuaucuaucaguu

SEQ ID NO: 61089 - RNA, 19 nt, Artificial Sequence
  Description of Artificial Sequence: Synthetic oligonucleotide
gguuaucguucuggagugg

SEQ ID NO: 61090 - RNA, 19 nt, Artificial Sequence
  Description of Artificial Sequence: Synthetic oligonucleotide
guuuauagccuuagcuuau

SEQ ID NO: 61091 - RNA, 19 nt, Artificial Sequence
  Description of Artificial Sequence: Synthetic oligonucleotide
gcucucgcaagucagaguu

SEQ ID NO: 61092 - RNA, 19 nt, Artificial Sequence
  Description of Artificial Sequence: Synthetic oligonucleotide
caccguuauugaccaagca

SEQ ID NO: 61093 - RNA, 19 nt, Artificial Sequence
  Description of Artificial Sequence: Synthetic oligonucleotide
auucuccgaucuuggccau

SEQ ID NO: 61094 - RNA, 19 nt, Artificial Sequence
  Description of Artificial Sequence: Synthetic oligonucleotide
agcuuaugguuaagcugug

SEQ ID NO: 61095 - RNA, 19 nt, Artificial Sequence
  Description of Artificial Sequence: Synthetic oligonucleotide
cacacuaguucaagagacu

SEQ ID NO: 61096 - RNA, 19 nt, Artificial Sequence
  Description of Artificial Sequence: Synthetic oligonucleotide
agccacgacuacauucaca

SEQ ID NO: 61097 - RNA, 19 nt, Artificial Sequence
  Description of Artificial Sequence: Synthetic oligonucleotide
ggcggcuuuugacaagguc

SEQ ID NO: 61098 - RNA, 19 nt, Artificial Sequence
  Description of Artificial Sequence: Synthetic oligonucleotide
ggaucucgcuggcaggaca

SEQ ID NO: 61099 - RNA, 19 nt, Artificial Sequence
  Description of Artificial Sequence: Synthetic oligonucleotide
aggucgaguguaauuccau

SEQ ID NO: 61100 - RNA, 19 nt, Artificial Sequence
  Description of Artificial Sequence: Synthetic oligonucleotide
ccguuuuauccuauugcca

SEQ ID NO: 61101 - RNA, 19 nt, Artificial Sequence
  Description of Artificial Sequence: Synthetic oligonucleotide
uggcuuagaucagcccaaa

SEQ ID NO: 61102 - RNA, 19 nt, Artificial Sequence
  Description of Artificial Sequence: Synthetic oligonucleotide
ggauauguacagguggccu

SEQ ID NO: 61103 - RNA, 19 nt, Artificial Sequence
  Description of Artificial Sequence: Synthetic oligonucleotide
cuuggccauccaaguccac

SEQ ID NO: 61104 - RNA, 19 nt, Artificial Sequence
  Description of Artificial Sequence: Synthetic oligonucleotide
gucuuuaaguacacaggau

SEQ ID NO: 61105 - RNA, 19 nt, Artificial Sequence
  Description of Artificial Sequence: Synthetic oligonucleotide
ccguuauugaccaagcauu

SEQ ID NO: 61106 - RNA, 19 nt, Artificial Sequence
  Description of Artificial Sequence: Synthetic oligonucleotide
gcccaagcacugauugacg

SEQ ID NO: 61107 - RNA, 19 nt, Artificial Sequence
  Description of Artificial Sequence: Synthetic oligonucleotide
guucggaggggcaguugac

SEQ ID NO: 61108 - RNA, 19 nt, Artificial Sequence
  Description of Artificial Sequence: Synthetic oligonucleotide
gucuaccaaccuugucauc

SEQ ID NO: 61109 - RNA, 19 nt, Artificial Sequence
  Description of Artificial Sequence: Synthetic oligonucleotide
gcucgguuaucguucugga

SEQ ID NO: 61110 - RNA, 19 nt, Artificial Sequence
  Description of Artificial Sequence: Synthetic oligonucleotide
gcuaaugucuaugcauucu

SEQ ID NO: 61111 - RNA, 19 nt, Artificial Sequence
  Description of Artificial Sequence: Synthetic oligonucleotide
uccggccacuggagcaagu

SEQ ID NO: 61112 - RNA, 19 nt, Artificial Sequence
  Description of Artificial Sequence: Synthetic oligonucleotide
caucagcacuacauguuau

SEQ ID NO: 61113 - RNA, 19 nt, Artificial Sequence
  Description of Artificial Sequence: Synthetic oligonucleotide
caugagccucccaaggcau

SEQ ID NO: 61114 - RNA, 19 nt, Artificial Sequence
  Description of Artificial Sequence: Synthetic oligonucleotide
gaucucgcuggcaggacau

SEQ ID NO: 61115 - RNA, 19 nt, Artificial Sequence
  Description of Artificial Sequence: Synthetic oligonucleotide
auccacggaaagauaucuu

SEQ ID NO: 61116 - RNA, 19 nt, Artificial Sequence
  Description of Artificial Sequence: Synthetic oligonucleotide
ggccuauacaauguaugua

SEQ ID NO: 61117 - RNA, 19 nt, Artificial Sequence
  Description of Artificial Sequence: Synthetic oligonucleotide
auccccggauuuuggcauu

SEQ ID NO: 61118 - RNA, 19 nt, Artificial Sequence
  Description of Artificial Sequence: Synthetic oligonucleotide
gcaucuagagccaccgugu

SEQ ID NO: 61119 - RNA, 19 nt, Artificial Sequence
  Description of Artificial Sequence: Synthetic oligonucleotide
cuuugccuacugccuugca

SEQ ID NO: 61120 - RNA, 19 nt, Artificial Sequence
  Description of Artificial Sequence: Synthetic oligonucleotide
cggcacaugucuucuuuac

SEQ ID NO: 61121 - RNA, 19 nt, Artificial Sequence
  Description of Artificial Sequence: Synthetic oligonucleotide
ccggauggugccgccaccg

SEQ ID NO: 61122 - RNA, 19 nt, Artificial Sequence
  Description of Artificial Sequence: Synthetic oligonucleotide
cgccuuuuaaguugauaca

SEQ ID NO: 61123 - RNA, 19 nt, Artificial Sequence
  Description of Artificial Sequence: Synthetic oligonucleotide
cuaagccaaucuuccugau

SEQ ID NO: 61124 - RNA, 19 nt, Artificial Sequence
  Description of Artificial Sequence: Synthetic oligonucleotide
ggcuuagaucagcccaaaa

SEQ ID NO: 61125 - RNA, 19 nt, Artificial Sequence
  Description of Artificial Sequence: Synthetic oligonucleotide
cggcuuuugacaaggucga

SEQ ID NO: 61126 - RNA, 19 nt, Artificial Sequence
  Description of Artificial Sequence: Synthetic oligonucleotide
gucucggaugccauugcau

SEQ ID NO: 61127 - RNA, 19 nt, Artificial Sequence
  Description of Artificial Sequence: Synthetic oligonucleotide
ggucgaguguaauuccauu

SEQ ID NO: 61128 - RNA, 19 nt, Artificial Sequence
  Description of Artificial Sequence: Synthetic oligonucleotide
gaguaaugcagcggccauu

SEQ ID NO: 61129 - RNA, 19 nt, Artificial Sequence
  Description of Artificial Sequence: Synthetic oligonucleotide
accguguuucuuaguuguu

SEQ ID NO: 61130 - RNA, 19 nt, Artificial Sequence
  Description of Artificial Sequence: Synthetic oligonucleotide
cuccggccacuggagcaag

SEQ ID NO: 61131 - RNA, 19 nt, Artificial Sequence
  Description of Artificial Sequence: Synthetic oligonucleotide
ccacuaguacguagaaugu

SEQ ID NO: 61132 - RNA, 19 nt, Artificial Sequence
  Description of Artificial Sequence: Synthetic oligonucleotide
ccaauccuaaggcaauggu

SEQ ID NO: 61133 - RNA, 19 nt, Artificial Sequence
  Description of Artificial Sequence: Synthetic oligonucleotide
cacucucguccauuuuccu

SEQ ID NO: 61134 - RNA, 19 nt, Artificial Sequence
  Description of Artificial Sequence: Synthetic oligonucleotide
guacccguugggacaggaa

SEQ ID NO: 61135 - RNA, 19 nt, Artificial Sequence
  Description of Artificial Sequence: Synthetic oligonucleotide
guaacccguuuuauccuau

SEQ ID NO: 61136 - RNA, 19 nt, Artificial Sequence
  Description of Artificial Sequence: Synthetic oligonucleotide
cccaagcacugauugacgu

SEQ ID NO: 61137 - RNA, 19 nt, Artificial Sequence
  Description of Artificial Sequence: Synthetic oligonucleotide
agucaccagugggcgccug

SEQ ID NO: 61138 - RNA, 19 nt, Artificial Sequence
  Description of Artificial Sequence: Synthetic oligonucleotide
cucuccgauuagugaagau

SEQ ID NO: 61139 - RNA, 19 nt, Artificial Sequence
  Description of Artificial Sequence: Synthetic oligonucleotide
agcgcgcggacgugcccau

SEQ ID NO: 61140 - RNA, 19 nt, Artificial Sequence
  Description of Artificial Sequence: Synthetic oligonucleotide
cucccgagaccauggcagu

SEQ ID NO: 61141 - RNA, 19 nt, Artificial Sequence
  Description of Artificial Sequence: Synthetic oligonucleotide
cacuuucgccagagccgca

SEQ ID NO: 61142 - RNA, 19 nt, Artificial Sequence
  Description of Artificial Sequence: Synthetic oligonucleotide
cagcgcgcggacgugccca

SEQ ID NO: 61143 - RNA, 19 nt, Artificial Sequence
  Description of Artificial Sequence: Synthetic oligonucleotide
ccggccacuggagcaagug

SEQ ID NO: 61144 - RNA, 19 nt, Artificial Sequence
  Description of Artificial Sequence: Synthetic oligonucleotide
agccaccguuauugaccaa

SEQ ID NO: 61145 - RNA, 19 nt, Artificial Sequence
  Description of Artificial Sequence: Synthetic oligonucleotide
ggcucucgcaagucagagu

SEQ ID NO: 61146 - RNA, 19 nt, Artificial Sequence
  Description of Artificial Sequence: Synthetic oligonucleotide
aacgggcgccacagcugau

SEQ ID NO: 61147 - RNA, 19 nt, Artificial Sequence
  Description of Artificial Sequence: Synthetic oligonucleotide
gcuuaugguuaagcugugu

SEQ ID NO: 61148 - RNA, 19 nt, Artificial Sequence
  Description of Artificial Sequence: Synthetic oligonucleotide
cagguauauuucggagagu

SEQ ID NO: 61149 - RNA, 19 nt, Artificial Sequence
  Description of Artificial Sequence: Synthetic oligonucleotide
gccgucguugucgccguuc

SEQ ID NO: 61150 - RNA, 19 nt, Artificial Sequence
  Description of Artificial Sequence: Synthetic oligonucleotide
cccaucgcacugccaucug

SEQ ID NO: 61151 - RNA, 19 nt, Artificial Sequence
  Description of Artificial Sequence: Synthetic oligonucleotide
cagcgugggcucgguuauc

SEQ ID NO: 61152 - RNA, 19 nt, Artificial Sequence
  Description of Artificial Sequence: Synthetic oligonucleotide
cugcaggauuauagacauu

SEQ ID NO: 61153 - RNA, 19 nt, Artificial Sequence
  Description of Artificial Sequence: Synthetic oligonucleotide
ccaucgcacugccaucugu

SEQ ID NO: 61154 - RNA, 19 nt, Artificial Sequence
  Description of Artificial Sequence: Synthetic oligonucleotide
ccgagaccauggcagugua

SEQ ID NO: 61155 - RNA, 19 nt, Artificial Sequence
  Description of Artificial Sequence: Synthetic oligonucleotide
cuucagcgugggcucgguu

SEQ ID NO: 61156 - RNA, 19 nt, Artificial Sequence
  Description of Artificial Sequence: Synthetic oligonucleotide
ccacgacuacauucacacu

SEQ ID NO: 61157 - RNA, 19 nt, Artificial Sequence
  Description of Artificial Sequence: Synthetic oligonucleotide
ggcuggcggccacacuagu

SEQ ID NO: 61158 - RNA, 19 nt, Artificial Sequence
  Description of Artificial Sequence: Synthetic oligonucleotide
cgacuacauucacacuugu

SEQ ID NO: 61159 - RNA, 19 nt, Artificial Sequence
  Description of Artificial Sequence: Synthetic oligonucleotide
cgugggcucgguuaucguu

SEQ ID NO: 61160 - RNA, 19 nt, Artificial Sequence
  Description of Artificial Sequence: Synthetic oligonucleotide
ccgcccggauggugccgcc

SEQ ID NO: 61161 - RNA, 19 nt, Artificial Sequence
  Description of Artificial Sequence: Synthetic oligonucleotide
ccgcaucaguccaguagau

SEQ ID NO: 61162 - RNA, 19 nt, Artificial Sequence
  Description of Artificial Sequence: Synthetic oligonucleotide
ggcgccugucaaauccauu

SEQ ID NO: 61163 - RNA, 19 nt, Artificial Sequence
  Description of Artificial Sequence: Synthetic oligonucleotide
gcgcgcggacgugcccaug

SEQ ID NO: 61164 - RNA, 19 nt, Artificial Sequence
  Description of Artificial Sequence: Synthetic oligonucleotide
ccgccaccgccgucguugu

SEQ ID NO: 61165 - RNA, 19 nt, Artificial Sequence
  Description of Artificial Sequence: Synthetic oligonucleotide
aacaauuaucacuaaaugc

SEQ ID NO: 61166 - RNA, 19 nt, Artificial Sequence
  Description of Artificial Sequence: Synthetic oligonucleotide
agaaauccaaauuacaugc

SEQ ID NO: 61167 - RNA, 19 nt, Artificial Sequence
  Description of Artificial Sequence: Synthetic oligonucleotide
acugaauucaucuauuacc

SEQ ID NO: 61168 - RNA, 19 nt, Artificial Sequence
  Description of Artificial Sequence: Synthetic oligonucleotide
aacuauuugagcccuuugc

SEQ ID NO: 61169 - RNA, 19 nt, Artificial Sequence
  Description of Artificial Sequence: Synthetic oligonucleotide
aucaaaaugacuuuuauaa

SEQ ID NO: 61170 - RNA, 19 nt, Artificial Sequence
  Description of Artificial Sequence: Synthetic oligonucleotide
aauauuuuguugguuagcg

SEQ ID NO: 61171 - RNA, 19 nt, Artificial Sequence
  Description of Artificial Sequence: Synthetic oligonucleotide
uguagcuuuagaaagcuag

SEQ ID NO: 61172 - RNA, 19 nt, Artificial Sequence
  Description of Artificial Sequence: Synthetic oligonucleotide
aauuaagcccuaaagggcc

SEQ ID NO: 61173 - RNA, 19 nt, Artificial Sequence
  Description of Artificial Sequence: Synthetic oligonucleotide
aaauaguuaacgaagaggu

SEQ ID NO: 61174 - RNA, 19 nt, Artificial Sequence
  Description of Artificial Sequence: Synthetic oligonucleotide
aaucgagaaagccacauug

SEQ ID NO: 61175 - RNA, 19 nt, Artificial Sequence
  Description of Artificial Sequence: Synthetic oligonucleotide
uuagguauaacauuauaga

SEQ ID NO: 61176 - RNA, 19 nt, Artificial Sequence
  Description of Artificial Sequence: Synthetic oligonucleotide
auagauuaggagcuuaaac

SEQ ID NO: 61177 - RNA, 19 nt, Artificial Sequence
  Description of Artificial Sequence: Synthetic oligonucleotide
auaaguugaagugaggucg

SEQ ID NO: 61178 - RNA, 19 nt, Artificial Sequence
  Description of Artificial Sequence: Synthetic oligonucleotide
uagauuaggagcuuaaaca

SEQ ID NO: 61179 - RNA, 19 nt, Artificial Sequence
  Description of Artificial Sequence: Synthetic oligonucleotide
gagguaaacuauuugagcc

SEQ ID NO: 61180 - RNA, 19 nt, Artificial Sequence
  Description of Artificial Sequence: Synthetic oligonucleotide
uacauaaccacaaacaaua

SEQ ID NO: 61181 - RNA, 19 nt, Artificial Sequence
  Description of Artificial Sequence: Synthetic oligonucleotide
ucaacuuacagaugcaugc

SEQ ID NO: 61182 - RNA, 19 nt, Artificial Sequence
  Description of Artificial Sequence: Synthetic oligonucleotide
aauaauguacgguaaaauu

SEQ ID NO: 61183 - RNA, 19 nt, Artificial Sequence
  Description of Artificial Sequence: Synthetic oligonucleotide
gaauugacgaaaaugagug

SEQ ID NO: 61184 - RNA, 19 nt, Artificial Sequence
  Description of Artificial Sequence: Synthetic oligonucleotide
agagguaaacuauuugagc

SEQ ID NO: 61185 - RNA, 19 nt, Artificial Sequence
  Description of Artificial Sequence: Synthetic oligonucleotide
uauuuugaaccucuuauga

SEQ ID NO: 61186 - RNA, 19 nt, Artificial Sequence
  Description of Artificial Sequence: Synthetic oligonucleotide
ugcauuauacauccaaucc

SEQ ID NO: 61187 - RNA, 19 nt, Artificial Sequence
  Description of Artificial Sequence: Synthetic oligonucleotide
aggcuaaacacauguaucc

SEQ ID NO: 61188 - RNA, 19 nt, Artificial Sequence
  Description of Artificial Sequence: Synthetic oligonucleotide
ucaugaauugcacagcgcc

SEQ ID NO: 61189 - RNA, 19 nt, Artificial Sequence
  Description of Artificial Sequence: Synthetic oligonucleotide
uugguuaaagcuaagcugu

SEQ ID NO: 61190 - RNA, 19 nt, Artificial Sequence
  Description of Artificial Sequence: Synthetic oligonucleotide
ucuaggacauuucaagcgg

SEQ ID NO: 61191 - RNA, 19 nt, Artificial Sequence
  Description of Artificial Sequence: Synthetic oligonucleotide
gaaagagugaaugaggccc

SEQ ID NO: 61192 - RNA, 19 nt, Artificial Sequence
  Description of Artificial Sequence: Synthetic oligonucleotide
ucacuaaaugcaaacauac

SEQ ID NO: 61193 - RNA, 19 nt, Artificial Sequence
  Description of Artificial Sequence: Synthetic oligonucleotide
uguuacaagucacuaauga

SEQ ID NO: 61194 - RNA, 19 nt, Artificial Sequence
  Description of Artificial Sequence: Synthetic oligonucleotide
auaaccacaaacaauaaug

SEQ ID NO: 61195 - RNA, 19 nt, Artificial Sequence
  Description of Artificial Sequence: Synthetic oligonucleotide
agaacaaacaaagcggagc

SEQ ID NO: 61196 - RNA, 19 nt, Artificial Sequence
  Description of Artificial Sequence: Synthetic oligonucleotide
aacacauguauccuagcag

SEQ ID NO: 61197 - RNA, 19 nt, Artificial Sequence
  Description of Artificial Sequence: Synthetic oligonucleotide
uauauauaacuccccaacc

SEQ ID NO: 61198 - RNA, 19 nt, Artificial Sequence
  Description of Artificial Sequence: Synthetic oligonucleotide
uacgguaaaauuuucucag

SEQ ID NO: 61199 - RNA, 19 nt, Artificial Sequence
  Description of Artificial Sequence: Synthetic oligonucleotide
uaaauauuagacauaugaa

SEQ ID NO: 61200 - RNA, 19 nt, Artificial Sequence
  Description of Artificial Sequence: Synthetic oligonucleotide
ucuaaaaugguccaugauu

SEQ ID NO: 61201 - RNA, 19 nt, Artificial Sequence
  Description of Artificial Sequence: Synthetic oligonucleotide
auuguacagcguuuuaagc

SEQ ID NO: 61202 - RNA, 19 nt, Artificial Sequence
  Description of Artificial Sequence: Synthetic oligonucleotide
auuagauagugauaaggag

SEQ ID NO: 61203 - RNA, 19 nt, Artificial Sequence
  Description of Artificial Sequence: Synthetic oligonucleotide
aacucaauugaagacuugg

SEQ ID NO: 61204 - RNA, 19 nt, Artificial Sequence
  Description of Artificial Sequence: Synthetic oligonucleotide
uuaauuaccuuaccuauaa

SEQ ID NO: 61205 - RNA, 19 nt, Artificial Sequence
  Description of Artificial Sequence: Synthetic oligonucleotide
aaagcggagcaauaaacug

SEQ ID NO: 61206 - RNA, 19 nt, Artificial Sequence
  Description of Artificial Sequence: Synthetic oligonucleotide
uuaugaaucuaaaaugguc

SEQ ID NO: 61207 - RNA, 19 nt, Artificial Sequence
  Description of Artificial Sequence: Synthetic oligonucleotide
aagguuauuaucuuacuuu

SEQ ID NO: 61208 - RNA, 19 nt, Artificial Sequence
  Description of Artificial Sequence: Synthetic oligonucleotide
ugagaaauccaaauuacau

SEQ ID NO: 61209 - RNA, 19 nt, Artificial Sequence
  Description of Artificial Sequence: Synthetic oligonucleotide
uauuuaauuaccuuaccua

SEQ ID NO: 61210 - RNA, 19 nt, Artificial Sequence
  Description of Artificial Sequence: Synthetic oligonucleotide
gagaaauccaaauuacaug

SEQ ID NO: 61211 - RNA, 19 nt, Artificial Sequence
  Description of Artificial Sequence: Synthetic oligonucleotide
auuaugagguugcuucucc

SEQ ID NO: 61212 - RNA, 19 nt, Artificial Sequence
  Description of Artificial Sequence: Synthetic oligonucleotide
agaccugucauuugagacc

SEQ ID NO: 61213 - RNA, 19 nt, Artificial Sequence
  Description of Artificial Sequence: Synthetic oligonucleotide
agguaaacuauuugagccc

SEQ ID NO: 61214 - RNA, 19 nt, Artificial Sequence
  Description of Artificial Sequence: Synthetic oligonucleotide
guuagguauaacauuauag

SEQ ID NO: 61215 - RNA, 19 nt, Artificial Sequence
  Description of Artificial Sequence: Synthetic oligonucleotide
guugguuaaagcuaagcug

SEQ ID NO: 61216 - RNA, 19 nt, Artificial Sequence
  Description of Artificial Sequence: Synthetic oligonucleotide
aaaccgauaguauaugaaa

SEQ ID NO: 61217 - RNA, 19 nt, Artificial Sequence
  Description of Artificial Sequence: Synthetic oligonucleotide
aacaggauaggaauugacg

SEQ ID NO: 61218 - RNA, 19 nt, Artificial Sequence
  Description of Artificial Sequence: Synthetic oligonucleotide
cucuauacuaaaauuguac

SEQ ID NO: 61219 - RNA, 19 nt, Artificial Sequence
  Description of Artificial Sequence: Synthetic oligonucleotide
aaucuagagaacauucuuc

SEQ ID NO: 61220 - RNA, 19 nt, Artificial Sequence
  Description of Artificial Sequence: Synthetic oligonucleotide
aagaccauauuacauuacu

SEQ ID NO: 61221 - RNA, 19 nt, Artificial Sequence
  Description of Artificial Sequence: Synthetic oligonucleotide
aauugcacagcgcccgccc

SEQ ID NO: 61222 - RNA, 19 nt, Artificial Sequence
  Description of Artificial Sequence: Synthetic oligonucleotide
ugcacuaccaagcuggaac

SEQ ID NO: 61223 - RNA, 19 nt, Artificial Sequence
  Description of Artificial Sequence: Synthetic oligonucleotide
aaugugcucgacaacaauc

SEQ ID NO: 61224 - RNA, 19 nt, Artificial Sequence
  Description of Artificial Sequence: Synthetic oligonucleotide
aauggauauuaugagguug

SEQ ID NO: 61225 - RNA, 19 nt, Artificial Sequence
  Description of Artificial Sequence: Synthetic oligonucleotide
uuaccuuaccuauaaaccu

SEQ ID NO: 61226 - RNA, 19 nt, Artificial Sequence
  Description of Artificial Sequence: Synthetic oligonucleotide
ucauuaaacaaguuccgac

SEQ ID NO: 61227 - RNA, 19 nt, Artificial Sequence
  Description of Artificial Sequence: Synthetic oligonucleotide
accgauaguauaugaaagg

SEQ ID NO: 61228 - RNA, 19 nt, Artificial Sequence
  Description of Artificial Sequence: Synthetic oligonucleotide
ccaauuaagcccuaaaggg

SEQ ID NO: 61229 - RNA, 19 nt, Artificial Sequence
  Description of Artificial Sequence: Synthetic oligonucleotide
aauguuagguauaacauua

SEQ ID NO: 61230 - RNA, 19 nt, Artificial Sequence
  Description of Artificial Sequence: Synthetic oligonucleotide
cugugaacaaucgagaaag

SEQ ID NO: 61231 - RNA, 19 nt, Artificial Sequence
  Description of Artificial Sequence: Synthetic oligonucleotide
guauauauaacuccccaac

SEQ ID NO: 61232 - RNA, 19 nt, Artificial Sequence
  Description of Artificial Sequence: Synthetic oligonucleotide
gauguuaaacuacgcaagc

SEQ ID NO: 61233 - RNA, 19 nt, Artificial Sequence
  Description of Artificial Sequence: Synthetic oligonucleotide
acaggauaggaauugacga

SEQ ID NO: 61234 - RNA, 19 nt, Artificial Sequence
  Description of Artificial Sequence: Synthetic oligonucleotide
uccaugauuagauagugau

SEQ ID NO: 61235 - RNA, 19 nt, Artificial Sequence
  Description of Artificial Sequence: Synthetic oligonucleotide
aguugguuaaagcuaagcu

SEQ ID NO: 61236 - RNA, 19 nt, Artificial Sequence
  Description of Artificial Sequence: Synthetic oligonucleotide
uuauagaugaaggaagaac

SEQ ID NO: 61237 - RNA, 19 nt, Artificial Sequence
  Description of Artificial Sequence: Synthetic oligonucleotide
augcauuauacauccaauc

SEQ ID NO: 61238 - RNA, 19 nt, Artificial Sequence
  Description of Artificial Sequence: Synthetic oligonucleotide
uaauuuauccaagacagau

SEQ ID NO: 61239 - RNA, 19 nt, Artificial Sequence
  Description of Artificial Sequence: Synthetic oligonucleotide
ucgacaacaauccucaguu

SEQ ID NO: 61240 - RNA, 19 nt, Artificial Sequence
  Description of Artificial Sequence: Synthetic oligonucleotide
uuauacauccaaucccucc

SEQ ID NO: 61241 - RNA, 19 nt, Artificial Sequence
  Description of Artificial Sequence: Synthetic oligonucleotide
cauuccagacauaacuugg

SEQ ID NO: 61242 - RNA, 19 nt, Artificial Sequence
  Description of Artificial Sequence: Synthetic oligonucleotide
auaaggaucaaaaugacuu

SEQ ID NO: 61243 - RNA, 19 nt, Artificial Sequence
  Description of Artificial Sequence: Synthetic oligonucleotide
aauagcgaagaguaagaaa

SEQ ID NO: 61244 - RNA, 19 nt, Artificial Sequence
  Description of Artificial Sequence: Synthetic oligonucleotide
ugucccaauauauacacau

SEQ ID NO: 61245 - RNA, 19 nt, Artificial Sequence
  Description of Artificial Sequence: Synthetic oligonucleotide
aauauggauuucuucuaga

SEQ ID NO: 61246 - RNA, 19 nt, Artificial Sequence
  Description of Artificial Sequence: Synthetic oligonucleotide
uuaaugguuagggugaaac

SEQ ID NO: 61247 - RNA, 19 nt, Artificial Sequence
  Description of Artificial Sequence: Synthetic oligonucleotide
cauuucaagcgguacaggc

SEQ ID NO: 61248 - RNA, 19 nt, Artificial Sequence
  Description of Artificial Sequence: Synthetic oligonucleotide
uuugcauaaauguccuacc

SEQ ID NO: 61249 - RNA, 19 nt, Artificial Sequence
  Description of Artificial Sequence: Synthetic oligonucleotide
uaauguacgguaaaauuuu

SEQ ID NO: 61250 - RNA, 19 nt, Artificial Sequence
  Description of Artificial Sequence: Synthetic oligonucleotide
aaugguuagggugaaacaa

SEQ ID NO: 61251 - RNA, 19 nt, Artificial Sequence
  Description of Artificial Sequence: Synthetic oligonucleotide
auggauauuaugagguugc

SEQ ID NO: 61252 - RNA, 19 nt, Artificial Sequence
  Description of Artificial Sequence: Synthetic oligonucleotide
uugagaaauccaaauuaca

SEQ ID NO: 61253 - RNA, 19 nt, Artificial Sequence
  Description of Artificial Sequence: Synthetic oligonucleotide
auuacucuauacuaaaauu

SEQ ID NO: 61254 - RNA, 19 nt, Artificial Sequence
  Description of Artificial Sequence: Synthetic oligonucleotide
uuagacauaugaagcacac

SEQ ID NO: 61255 - RNA, 19 nt, Artificial Sequence
  Description of Artificial Sequence: Synthetic oligonucleotide
gauuagauagugauaagga

SEQ ID NO: 61256 - RNA, 19 nt, Artificial Sequence
  Description of Artificial Sequence: Synthetic oligonucleotide
agauuaggagcuuaaacaa

SEQ ID NO: 61257 - RNA, 19 nt, Artificial Sequence
  Description of Artificial Sequence: Synthetic oligonucleotide
ucaguaugaaaggaaacug

SEQ ID NO: 61258 - RNA, 19 nt, Artificial Sequence
  Description of Artificial Sequence: Synthetic oligonucleotide
guuagcgcuuaauuuaucc

SEQ ID NO: 61259 - RNA, 19 nt, Artificial Sequence
  Description of Artificial Sequence: Synthetic oligonucleotide
gauccuagggcuuacuuuc

SEQ ID NO: 61260 - RNA, 19 nt, Artificial Sequence
  Description of Artificial Sequence: Synthetic oligonucleotide
aaccgauaguauaugaaag

SEQ ID NO: 61261 - RNA, 19 nt, Artificial Sequence
  Description of Artificial Sequence: Synthetic oligonucleotide
auuaccagcuacuacugcu

SEQ ID NO: 61262 - RNA, 19 nt, Artificial Sequence
  Description of Artificial Sequence: Synthetic oligonucleotide
ugcucgacaacaauccuca

SEQ ID NO: 61263 - RNA, 19 nt, Artificial Sequence
  Description of Artificial Sequence: Synthetic oligonucleotide
guuaguaagaaaugcugac

SEQ ID NO: 61264 - RNA, 19 nt, Artificial Sequence
  Description of Artificial Sequence: Synthetic oligonucleotide
uucuagaggaauagcgaag

SEQ ID NO: 61265 - RNA, 19 nt, Artificial Sequence
  Description of Artificial Sequence: Synthetic oligonucleotide
auaaauguuaccugccuau

SEQ ID NO: 61266 - RNA, 19 nt, Artificial Sequence
  Description of Artificial Sequence: Synthetic oligonucleotide
uggaacacccauuaucccc

SEQ ID NO: 61267 - RNA, 19 nt, Artificial Sequence
  Description of Artificial Sequence: Synthetic oligonucleotide
ugauagguguauauggaaa

SEQ ID NO: 61268 - RNA, 19 nt, Artificial Sequence
  Description of Artificial Sequence: Synthetic oligonucleotide
uuugaaccucuuaugaauc

SEQ ID NO: 61269 - RNA, 19 nt, Artificial Sequence
  Description of Artificial Sequence: Synthetic oligonucleotide
uauaaguugaagugagguc

SEQ ID NO: 61270 - RNA, 19 nt, Artificial Sequence
  Description of Artificial Sequence: Synthetic oligonucleotide
agcauggauaauucacuac

SEQ ID NO: 61271 - RNA, 19 nt, Artificial Sequence
  Description of Artificial Sequence: Synthetic oligonucleotide
agguauaacauuauagaug

SEQ ID NO: 61272 - RNA, 19 nt, Artificial Sequence
  Description of Artificial Sequence: Synthetic oligonucleotide
aagucacuaaugaauguag

SEQ ID NO: 61273 - RNA, 19 nt, Artificial Sequence
  Description of Artificial Sequence: Synthetic oligonucleotide
cuacccacagccuaacuag

SEQ ID NO: 61274 - RNA, 19 nt, Artificial Sequence
  Description of Artificial Sequence: Synthetic oligonucleotide
acaaagcggagcaauaaac

SEQ ID NO: 61275 - RNA, 19 nt, Artificial Sequence
  Description of Artificial Sequence: Synthetic oligonucleotide
aaacuaaugucaaaaggaa

SEQ ID NO: 61276 - RNA, 19 nt, Artificial Sequence
  Description of Artificial Sequence: Synthetic oligonucleotide
acgaaaaugagugaauaca

SEQ ID NO: 61277 - RNA, 19 nt, Artificial Sequence
  Description of Artificial Sequence: Synthetic oligonucleotide
uuugagaccccuaucugaa

SEQ ID NO: 61278 - RNA, 19 nt, Artificial Sequence
  Description of Artificial Sequence: Synthetic oligonucleotide
uaaagggccgaucaacgcu

SEQ ID NO: 61279 - RNA, 19 nt, Artificial Sequence
  Description of Artificial Sequence: Synthetic oligonucleotide
agaugcauuuauguaaauc

SEQ ID NO: 61280 - RNA, 19 nt, Artificial Sequence
  Description of Artificial Sequence: Synthetic oligonucleotide
augugcucgacaacaaucc

SEQ ID NO: 61281 - RNA, 19 nt, Artificial Sequence
  Description of Artificial Sequence: Synthetic oligonucleotide
aggcuagacacauacauaa

SEQ ID NO: 61282 - RNA, 19 nt, Artificial Sequence
  Description of Artificial Sequence: Synthetic oligonucleotide
uugcauaaauguccuacca

SEQ ID NO: 61283 - RNA, 19 nt, Artificial Sequence
  Description of Artificial Sequence: Synthetic oligonucleotide
auuugagaccccuaucuga

SEQ ID NO: 61284 - RNA, 19 nt, Artificial Sequence
  Description of Artificial Sequence: Synthetic oligonucleotide
ccuaccaauuaaaagacgc

SEQ ID NO: 61285 - RNA, 19 nt, Artificial Sequence
  Description of Artificial Sequence: Synthetic oligonucleotide
uuuaauuaccuuaccuaua

SEQ ID NO: 61286 - RNA, 19 nt, Artificial Sequence
  Description of Artificial Sequence: Synthetic oligonucleotide
uguacagcguuuuaagcau

SEQ ID NO: 61287 - RNA, 19 nt, Artificial Sequence
  Description of Artificial Sequence: Synthetic oligonucleotide
agggcuuacuuucauaggu

SEQ ID NO: 61288 - RNA, 19 nt, Artificial Sequence
  Description of Artificial Sequence: Synthetic oligonucleotide
cauuaaacaaguuccgaca

SEQ ID NO: 61289 - RNA, 19 nt, Artificial Sequence
  Description of Artificial Sequence: Synthetic oligonucleotide
aauugacgaaaaugaguga

SEQ ID NO: 61290 - RNA, 19 nt, Artificial Sequence
  Description of Artificial Sequence: Synthetic oligonucleotide
uuagcauuaugugcuuugg

SEQ ID NO: 61291 - RNA, 19 nt, Artificial Sequence
  Description of Artificial Sequence: Synthetic oligonucleotide
ucgguccagaucaaaacug

SEQ ID NO: 61292 - RNA, 19 nt, Artificial Sequence
  Description of Artificial Sequence: Synthetic oligonucleotide
uggacauauuuauccagcc

SEQ ID NO: 61293 - RNA, 19 nt, Artificial Sequence
  Description of Artificial Sequence: Synthetic oligonucleotide
aucgcugcauaaaagaaag

SEQ ID NO: 61294 - RNA, 19 nt, Artificial Sequence
  Description of Artificial Sequence: Synthetic oligonucleotide
aacaaagcggagcaauaaa

SEQ ID NO: 61295 - RNA, 19 nt, Artificial Sequence
  Description of Artificial Sequence: Synthetic oligonucleotide
uccuaccaauuaaaagacg

SEQ ID NO: 61296 - RNA, 19 nt, Artificial Sequence
  Description of Artificial Sequence: Synthetic oligonucleotide
agaugcauuauacauccaa

SEQ ID NO: 61297 - RNA, 19 nt, Artificial Sequence
  Description of Artificial Sequence: Synthetic oligonucleotide
aaauaugcaggagaacuau

SEQ ID NO: 61298 - RNA, 19 nt, Artificial Sequence
  Description of Artificial Sequence: Synthetic oligonucleotide
gaguauauauaacucccca

SEQ ID NO: 61299 - RNA, 19 nt, Artificial Sequence
  Description of Artificial Sequence: Synthetic oligonucleotide
uuaguuaauccaagguuau

SEQ ID NO: 61300 - RNA, 19 nt, Artificial Sequence
  Description of Artificial Sequence: Synthetic oligonucleotide
auaauguacgguaaaauuu

SEQ ID NO: 61301 - RNA, 19 nt, Artificial Sequence
  Description of Artificial Sequence: Synthetic oligonucleotide
aauguacgguaaaauuuuc

SEQ ID NO: 61302 - RNA, 19 nt, Artificial Sequence
  Description of Artificial Sequence: Synthetic oligonucleotide
gaauuuuaucccaagacua

SEQ ID NO: 61303 - RNA, 19 nt, Artificial Sequence
  Description of Artificial Sequence: Synthetic oligonucleotide
ugcauaaauguccuaccaa

SEQ ID NO: 61304 - RNA, 19 nt, Artificial Sequence
  Description of Artificial Sequence: Synthetic oligonucleotide
auuaccauaaugaacucau

SEQ ID NO: 61305 - RNA, 19 nt, Artificial Sequence
  Description of Artificial Sequence: Synthetic oligonucleotide
auauuuccccucugagccc

SEQ ID NO: 61306 - RNA, 19 nt, Artificial Sequence
  Description of Artificial Sequence: Synthetic oligonucleotide
uaaugguuagggugaaaca

SEQ ID NO: 61307 - RNA, 19 nt, Artificial Sequence
  Description of Artificial Sequence: Synthetic oligonucleotide
gcuuuagaaagcuagaaaa

SEQ ID NO: 61308 - RNA, 19 nt, Artificial Sequence
  Description of Artificial Sequence: Synthetic oligonucleotide
uguauccuagcagagcagc

SEQ ID NO: 61309 - RNA, 19 nt, Artificial Sequence
  Description of Artificial Sequence: Synthetic oligonucleotide
aaauguuaccugccuauuu

SEQ ID NO: 61310 - RNA, 19 nt, Artificial Sequence
  Description of Artificial Sequence: Synthetic oligonucleotide
auaacuccccaaccuguac

SEQ ID NO: 61311 - RNA, 19 nt, Artificial Sequence
  Description of Artificial Sequence: Synthetic oligonucleotide
ugaggucgguguuagaccu

SEQ ID NO: 61312 - RNA, 19 nt, Artificial Sequence
  Description of Artificial Sequence: Synthetic oligonucleotide
uguugguuagcgcuuaauu

SEQ ID NO: 61313 - RNA, 19 nt, Artificial Sequence
  Description of Artificial Sequence: Synthetic oligonucleotide
ucuacccacagccuaacua

SEQ ID NO: 61314 - RNA, 19 nt, Artificial Sequence
  Description of Artificial Sequence: Synthetic oligonucleotide
agugaaucgcugcauaaaa

SEQ ID NO: 61315 - RNA, 19 nt, Artificial Sequence
  Description of Artificial Sequence: Synthetic oligonucleotide
uaaacuacgcaagcuguug

SEQ ID NO: 61316 - RNA, 19 nt, Artificial Sequence
  Description of Artificial Sequence: Synthetic oligonucleotide
ugggaacucaauugaagac

SEQ ID NO: 61317 - RNA, 19 nt, Artificial Sequence
  Description of Artificial Sequence: Synthetic oligonucleotide
uuccaaucaugcaacagua

SEQ ID NO: 61318 - RNA, 19 nt, Artificial Sequence
  Description of Artificial Sequence: Synthetic oligonucleotide
auugacgaaaaugagugaa

SEQ ID NO: 61319 - RNA, 19 nt, Artificial Sequence
  Description of Artificial Sequence: Synthetic oligonucleotide
aaauuacagguggagacaa

SEQ ID NO: 61320 - RNA, 19 nt, Artificial Sequence
  Description of Artificial Sequence: Synthetic oligonucleotide
cacuaaugaauguaguuga

SEQ ID NO: 61321 - RNA, 19 nt, Artificial Sequence
  Description of Artificial Sequence: Synthetic oligonucleotide
uguuagguauaacauuaua

SEQ ID NO: 61322 - RNA, 19 nt, Artificial Sequence
  Description of Artificial Sequence: Synthetic oligonucleotide
agaaaccgauaguauauga

SEQ ID NO: 61323 - RNA, 19 nt, Artificial Sequence
  Description of Artificial Sequence: Synthetic oligonucleotide
ugauguuacaagucacuaa

SEQ ID NO: 61324 - RNA, 19 nt, Artificial Sequence
  Description of Artificial Sequence: Synthetic oligonucleotide
aguaaaauguuagguauaa

SEQ ID NO: 61325 - RNA, 19 nt, Artificial Sequence
  Description of Artificial Sequence: Synthetic oligonucleotide
agcaaacuuccuuggccgc

SEQ ID NO: 61326 - RNA, 19 nt, Artificial Sequence
  Description of Artificial Sequence: Synthetic oligonucleotide
ggauaauucacuacaauga

SEQ ID NO: 61327 - RNA, 19 nt, Artificial Sequence
  Description of Artificial Sequence: Synthetic oligonucleotide
aagaaaccgauaguauaug

SEQ ID NO: 61328 - RNA, 19 nt, Artificial Sequence
  Description of Artificial Sequence: Synthetic oligonucleotide
aagugugguaaucucugau

SEQ ID NO: 61329 - RNA, 19 nt, Artificial Sequence
  Description of Artificial Sequence: Synthetic oligonucleotide
cucaacuuacagaugcaug

SEQ ID NO: 61330 - RNA, 19 nt, Artificial Sequence
  Description of Artificial Sequence: Synthetic oligonucleotide
cucauuguaacaggauagg

SEQ ID NO: 61331 - RNA, 19 nt, Artificial Sequence
  Description of Artificial Sequence: Synthetic oligonucleotide
guacgguaaaauuuucuca

SEQ ID NO: 61332 - RNA, 19 nt, Artificial Sequence
  Description of Artificial Sequence: Synthetic oligonucleotide
aacuacgcaagcuguuggu

SEQ ID NO: 61333 - RNA, 19 nt, Artificial Sequence
  Description of Artificial Sequence: Synthetic oligonucleotide
uaacuuggguuaaugguua

SEQ ID NO: 61334 - RNA, 19 nt, Artificial Sequence
  Description of Artificial Sequence: Synthetic oligonucleotide
cuaaagggccgaucaacgc

SEQ ID NO: 61335 - RNA, 19 nt, Artificial Sequence
  Description of Artificial Sequence: Synthetic oligonucleotide
auagguaccagcauggaua

SEQ ID NO: 61336 - RNA, 19 nt, Artificial Sequence
  Description of Artificial Sequence: Synthetic oligonucleotide
aaacaaagcggagcaauaa

SEQ ID NO: 61337 - RNA, 19 nt, Artificial Sequence
  Description of Artificial Sequence: Synthetic oligonucleotide
aagcccuugauacuuccaa

SEQ ID NO: 61338 - RNA, 19 nt, Artificial Sequence
  Description of Artificial Sequence: Synthetic oligonucleotide
uguagccucagagcgcugg

SEQ ID NO: 61339 - RNA, 19 nt, Artificial Sequence
  Description of Artificial Sequence: Synthetic oligonucleotide
ugcaauccuuguauauuug

SEQ ID NO: 61340 - RNA, 19 nt, Artificial Sequence
  Description of Artificial Sequence: Synthetic oligonucleotide
ugugaacaaucgagaaagc

SEQ ID NO: 61341 - RNA, 19 nt, Artificial Sequence
  Description of Artificial Sequence: Synthetic oligonucleotide
gucguauccgccaugggag

SEQ ID NO: 61342 - RNA, 19 nt, Artificial Sequence
  Description of Artificial Sequence: Synthetic oligonucleotide
gauaauucacuacaaugau

SEQ ID NO: 61343 - RNA, 19 nt, Artificial Sequence
  Description of Artificial Sequence: Synthetic oligonucleotide
gguuugacuaacaugccag

SEQ ID NO: 61344 - RNA, 19 nt, Artificial Sequence
  Description of Artificial Sequence: Synthetic oligonucleotide
uaguugguuaaagcuaagc

SEQ ID NO: 61345 - RNA, 19 nt, Artificial Sequence
  Description of Artificial Sequence: Synthetic oligonucleotide
ucucacaaacagugggcag

SEQ ID NO: 61346 - RNA, 19 nt, Artificial Sequence
  Description of Artificial Sequence: Synthetic oligonucleotide
uagguguauauggaaacac

SEQ ID NO: 61347 - RNA, 19 nt, Artificial Sequence
  Description of Artificial Sequence: Synthetic oligonucleotide
aaacaauaauguacgguaa

SEQ ID NO: 61348 - RNA, 19 nt, Artificial Sequence
  Description of Artificial Sequence: Synthetic oligonucleotide
aagcggagcaauaaacugu

SEQ ID NO: 61349 - RNA, 19 nt, Artificial Sequence
  Description of Artificial Sequence: Synthetic oligonucleotide
uugaaccucuuaugaaucu

SEQ ID NO: 61350 - RNA, 19 nt, Artificial Sequence
  Description of Artificial Sequence: Synthetic oligonucleotide
uugacgaaaaugagugaau

SEQ ID NO: 61351 - RNA, 19 nt, Artificial Sequence
  Description of Artificial Sequence: Synthetic oligonucleotide
uaccaauuaaaagacgcua

SEQ ID NO: 61352 - RNA, 19 nt, Artificial Sequence
  Description of Artificial Sequence: Synthetic oligonucleotide
auguuaccugccuauuuug

SEQ ID NO: 61353 - RNA, 19 nt, Artificial Sequence
  Description of Artificial Sequence: Synthetic oligonucleotide
aguguaaguagcagcauga

SEQ ID NO: 61354 - RNA, 19 nt, Artificial Sequence
  Description of Artificial Sequence: Synthetic oligonucleotide
agcguuuuaagcauuucca

SEQ ID NO: 61355 - RNA, 19 nt, Artificial Sequence
  Description of Artificial Sequence: Synthetic oligonucleotide
uacgcaagcuguuggugcc

SEQ ID NO: 61356 - RNA, 19 nt, Artificial Sequence
  Description of Artificial Sequence: Synthetic oligonucleotide
ucgguguuagaccugucau

SEQ ID NO: 61357 - RNA, 19 nt, Artificial Sequence
  Description of Artificial Sequence: Synthetic oligonucleotide
auaacuuggguuaaugguu

SEQ ID NO: 61358 - RNA, 19 nt, Artificial Sequence
  Description of Artificial Sequence: Synthetic oligonucleotide
aguuaacgaagagguacac

SEQ ID NO: 61359 - RNA, 19 nt, Artificial Sequence
  Description of Artificial Sequence: Synthetic oligonucleotide
uaccuuaccuauaaaccuu

SEQ ID NO: 61360 - RNA, 19 nt, Artificial Sequence
  Description of Artificial Sequence: Synthetic oligonucleotide
cauauuugcuggauaagaa

SEQ ID NO: 61361 - RNA, 19 nt, Artificial Sequence
  Description of Artificial Sequence: Synthetic oligonucleotide
uccaugacucuuucuaauc

SEQ ID NO: 61362 - RNA, 19 nt, Artificial Sequence
  Description of Artificial Sequence: Synthetic oligonucleotide
ucugcuuaacuggaagugu

SEQ ID NO: 61363 - RNA, 19 nt, Artificial Sequence
  Description of Artificial Sequence: Synthetic oligonucleotide
gauagugauaaggaggcua

SEQ ID NO: 61364 - RNA, 19 nt, Artificial Sequence
  Description of Artificial Sequence: Synthetic oligonucleotide
ugguuagggugaaacaaau

SEQ ID NO: 61365 - RNA, 19 nt, Artificial Sequence
  Description of Artificial Sequence: Synthetic oligonucleotide
cauuauacauccaaucccu

SEQ ID NO: 61366 - RNA, 19 nt, Artificial Sequence
  Description of Artificial Sequence: Synthetic oligonucleotide
accuauaaaccuuuccauu

SEQ ID NO: 61367 - RNA, 19 nt, Artificial Sequence
  Description of Artificial Sequence: Synthetic oligonucleotide
uccgacaauauggauuucu

SEQ ID NO: 61368 - RNA, 19 nt, Artificial Sequence
  Description of Artificial Sequence: Synthetic oligonucleotide
ugguuagcgcuuaauuuau

SEQ ID NO: 61369 - RNA, 19 nt, Artificial Sequence
  Description of Artificial Sequence: Synthetic oligonucleotide
gguacacagaaacuuccag

SEQ ID NO: 61370 - RNA, 19 nt, Artificial Sequence
  Description of Artificial Sequence: Synthetic oligonucleotide
agcagcacaagaucaguau

SEQ ID NO: 61371 - RNA, 19 nt, Artificial Sequence
  Description of Artificial Sequence: Synthetic oligonucleotide
aagcacgcugguaaaagcu

SEQ ID NO: 61372 - RNA, 19 nt, Artificial Sequence
  Description of Artificial Sequence: Synthetic oligonucleotide
aguauuggcuugaagagua

SEQ ID NO: 61373 - RNA, 19 nt, Artificial Sequence
  Description of Artificial Sequence: Synthetic oligonucleotide
ugacgaaaaugagugaaua

SEQ ID NO: 61374 - RNA, 19 nt, Artificial Sequence
  Description of Artificial Sequence: Synthetic oligonucleotide
augugauauuucuaacuau

SEQ ID NO: 61375 - RNA, 19 nt, Artificial Sequence
  Description of Artificial Sequence: Synthetic oligonucleotide
uuggguuaaugguuagggu

SEQ ID NO: 61376 - RNA, 19 nt, Artificial Sequence
  Description of Artificial Sequence: Synthetic oligonucleotide
uauagauuaggagcuuaaa

SEQ ID NO: 61377 - RNA, 19 nt, Artificial Sequence
  Description of Artificial Sequence: Synthetic oligonucleotide
uguuaaggguuugacuaac

SEQ ID NO: 61378 - RNA, 19 nt, Artificial Sequence
  Description of Artificial Sequence: Synthetic oligonucleotide
agaucaguaugaaaggaaa

SEQ ID NO: 61379 - RNA, 19 nt, Artificial Sequence
  Description of Artificial Sequence: Synthetic oligonucleotide
ugaaucauauuugcuggau

SEQ ID NO: 61380 - RNA, 19 nt, Artificial Sequence
  Description of Artificial Sequence: Synthetic oligonucleotide
aucaugcaacaguaauaag

SEQ ID NO: 61381 - RNA, 19 nt, Artificial Sequence
  Description of Artificial Sequence: Synthetic oligonucleotide
acuaaugaauguaguugag

SEQ ID NO: 61382 - RNA, 19 nt, Artificial Sequence
  Description of Artificial Sequence: Synthetic oligonucleotide
caaaucucuaggacauuuc

SEQ ID NO: 61383 - RNA, 19 nt, Artificial Sequence
  Description of Artificial Sequence: Synthetic oligonucleotide
ggauaagaaugcaaucuag

SEQ ID NO: 61384 - RNA, 19 nt, Artificial Sequence
  Description of Artificial Sequence: Synthetic oligonucleotide
ggaauuuuaucccaagacu

SEQ ID NO: 61385 - RNA, 19 nt, Artificial Sequence
  Description of Artificial Sequence: Synthetic oligonucleotide
ugugcucgacaacaauccu

SEQ ID NO: 61386 - RNA, 19 nt, Artificial Sequence
  Description of Artificial Sequence: Synthetic oligonucleotide
gcugauuuaagcagaacac

SEQ ID NO: 61387 - RNA, 19 nt, Artificial Sequence
  Description of Artificial Sequence: Synthetic oligonucleotide
auuauacauccaaucccuc

SEQ ID NO: 61388 - RNA, 19 nt, Artificial Sequence
  Description of Artificial Sequence: Synthetic oligonucleotide
caaauuacaugcagauaga

SEQ ID NO: 61389 - RNA, 19 nt, Artificial Sequence
  Description of Artificial Sequence: Synthetic oligonucleotide
uccccaaccuguacaauau

SEQ ID NO: 61390 - RNA, 19 nt, Artificial Sequence
  Description of Artificial Sequence: Synthetic oligonucleotide
caaguuccgacaauaugga

SEQ ID NO: 61391 - RNA, 19 nt, Artificial Sequence
  Description of Artificial Sequence: Synthetic oligonucleotide
gugaaucgcugcauaaaag

SEQ ID NO: 61392 - RNA, 19 nt, Artificial Sequence
  Description of Artificial Sequence: Synthetic oligonucleotide
gaaucauauuugcuggaua

SEQ ID NO: 61393 - RNA, 19 nt, Artificial Sequence
  Description of Artificial Sequence: Synthetic oligonucleotide
uugacacauaaaagguaau

SEQ ID NO: 61394 - RNA, 19 nt, Artificial Sequence
  Description of Artificial Sequence: Synthetic oligonucleotide
caaugugauauuucuaacu

SEQ ID NO: 61395 - RNA, 19 nt, Artificial Sequence
  Description of Artificial Sequence: Synthetic oligonucleotide
acgguaaaauuuucucaga

SEQ ID NO: 61396 - RNA, 19 nt, Artificial Sequence
  Description of Artificial Sequence: Synthetic oligonucleotide
auuucaagcgguacaggcu

SEQ ID NO: 61397 - RNA, 19 nt, Artificial Sequence
  Description of Artificial Sequence: Synthetic oligonucleotide
uauuaugagguugcuucuc

SEQ ID NO: 61398 - RNA, 19 nt, Artificial Sequence
  Description of Artificial Sequence: Synthetic oligonucleotide
auuauagaugaaggaagaa

SEQ ID NO: 61399 - RNA, 19 nt, Artificial Sequence
  Description of Artificial Sequence: Synthetic oligonucleotide
aucuaaaaugguccaugau

SEQ ID NO: 61400 - RNA, 19 nt, Artificial Sequence
  Description of Artificial Sequence: Synthetic oligonucleotide
acuaacaugccaggaaaau

SEQ ID NO: 61401 - RNA, 19 nt, Artificial Sequence
  Description of Artificial Sequence: Synthetic oligonucleotide
aauuacagguggagacaag

SEQ ID NO: 61402 - RNA, 19 nt, Artificial Sequence
  Description of Artificial Sequence: Synthetic oligonucleotide
cucugagcccuacauuagc

SEQ ID NO: 61403 - RNA, 19 nt, Artificial Sequence
  Description of Artificial Sequence: Synthetic oligonucleotide
ugaaucuaaaaugguccau

SEQ ID NO: 61404 - RNA, 19 nt, Artificial Sequence
  Description of Artificial Sequence: Synthetic oligonucleotide
cuaaugaauguaguugaga

SEQ ID NO: 61405 - RNA, 19 nt, Artificial Sequence
  Description of Artificial Sequence: Synthetic oligonucleotide
uaugcacuaccaagcugga

SEQ ID NO: 61406 - RNA, 19 nt, Artificial Sequence
  Description of Artificial Sequence: Synthetic oligonucleotide
aaguuccgacaauauggau

SEQ ID NO: 61407 - RNA, 19 nt, Artificial Sequence
  Description of Artificial Sequence: Synthetic oligonucleotide
aacgcucugcuuaacugga

SEQ ID NO: 61408 - RNA, 19 nt, Artificial Sequence
  Description of Artificial Sequence: Synthetic oligonucleotide
acuuacagaugcaugcaga

SEQ ID NO: 61409 - RNA, 19 nt, Artificial Sequence
  Description of Artificial Sequence: Synthetic oligonucleotide
ucacaaacagugggcagga

SEQ ID NO: 61410 - RNA, 19 nt, Artificial Sequence
  Description of Artificial Sequence: Synthetic oligonucleotide
uucuaacuaugauuuccau

SEQ ID NO: 61411 - RNA, 19 nt, Artificial Sequence
  Description of Artificial Sequence: Synthetic oligonucleotide
agcggagcaauaaacugug

SEQ ID NO: 61412 - RNA, 19 nt, Artificial Sequence
  Description of Artificial Sequence: Synthetic oligonucleotide
cacgcugguaaaagcuugc

SEQ ID NO: 61413 - RNA, 19 nt, Artificial Sequence
  Description of Artificial Sequence: Synthetic oligonucleotide
agaccccuaucugaauuac

SEQ ID NO: 61414 - RNA, 19 nt, Artificial Sequence
  Description of Artificial Sequence: Synthetic oligonucleotide
gauuaggagcuuaaacaaa

SEQ ID NO: 61415 - RNA, 19 nt, Artificial Sequence
  Description of Artificial Sequence: Synthetic oligonucleotide
aggaacgcucugcuuaacu

SEQ ID NO: 61416 - RNA, 19 nt, Artificial Sequence
  Description of Artificial Sequence: Synthetic oligonucleotide
acaaucgagaaagccacau

SEQ ID NO: 61417 - RNA, 19 nt, Artificial Sequence
  Description of Artificial Sequence: Synthetic oligonucleotide
uucggggucguauccgcca

SEQ ID NO: 61418 - RNA, 19 nt, Artificial Sequence
  Description of Artificial Sequence: Synthetic oligonucleotide
uacagcguuuuaagcauuu

SEQ ID NO: 61419 - RNA, 19 nt, Artificial Sequence
  Description of Artificial Sequence: Synthetic oligonucleotide
ccgauaguauaugaaaggc

SEQ ID NO: 61420 - RNA, 19 nt, Artificial Sequence
  Description of Artificial Sequence: Synthetic oligonucleotide
cuauagauuaggagcuuaa

SEQ ID NO: 61421 - RNA, 19 nt, Artificial Sequence
  Description of Artificial Sequence: Synthetic oligonucleotide
ggagggcuucauuauaaug

SEQ ID NO: 61422 - RNA, 19 nt, Artificial Sequence
  Description of Artificial Sequence: Synthetic oligonucleotide
caagaucaguaugaaagga

SEQ ID NO: 61423 - RNA, 19 nt, Artificial Sequence
  Description of Artificial Sequence: Synthetic oligonucleotide
guugguuagcgcuuaauuu

SEQ ID NO: 61424 - RNA, 19 nt, Artificial Sequence
  Description of Artificial Sequence: Synthetic oligonucleotide
gaauagcgaagaguaagaa

SEQ ID NO: 61425 - RNA, 19 nt, Artificial Sequence
  Description of Artificial Sequence: Synthetic oligonucleotide
auguaggcacagaagcauc

SEQ ID NO: 61426 - RNA, 19 nt, Artificial Sequence
  Description of Artificial Sequence: Synthetic oligonucleotide
uaggacauuucaagcggua

SEQ ID NO: 61427 - RNA, 19 nt, Artificial Sequence
  Description of Artificial Sequence: Synthetic oligonucleotide
aauaugcaggagaacuaua

SEQ ID NO: 61428 - RNA, 19 nt, Artificial Sequence
  Description of Artificial Sequence: Synthetic oligonucleotide
caaagcggagcaauaaacu

SEQ ID NO: 61429 - RNA, 19 nt, Artificial Sequence
  Description of Artificial Sequence: Synthetic oligonucleotide
auguacgguaaaauuuucu

SEQ ID NO: 61430 - RNA, 19 nt, Artificial Sequence
  Description of Artificial Sequence: Synthetic oligonucleotide
acucaauugaagacuugga

SEQ ID NO: 61431 - RNA, 19 nt, Artificial Sequence
  Description of Artificial Sequence: Synthetic oligonucleotide
agguguauauggaaacacu

SEQ ID NO: 61432 - RNA, 19 nt, Artificial Sequence
  Description of Artificial Sequence: Synthetic oligonucleotide
agucacuaaugaauguagu

SEQ ID NO: 61433 - RNA, 19 nt, Artificial Sequence
  Description of Artificial Sequence: Synthetic oligonucleotide
acccaggccuauuuaauua

SEQ ID NO: 61434 - RNA, 19 nt, Artificial Sequence
  Description of Artificial Sequence: Synthetic oligonucleotide
aagcccuaaagggccgauc

SEQ ID NO: 61435 - RNA, 19 nt, Artificial Sequence
  Description of Artificial Sequence: Synthetic oligonucleotide
gaaccucuuaugaaucuaa

SEQ ID NO: 61436 - RNA, 19 nt, Artificial Sequence
  Description of Artificial Sequence: Synthetic oligonucleotide
ggccgaucaacgcugccgg

SEQ ID NO: 61437 - RNA, 19 nt, Artificial Sequence
  Description of Artificial Sequence: Synthetic oligonucleotide
aggccuauuuaauuaccuu

SEQ ID NO: 61438 - RNA, 19 nt, Artificial Sequence
  Description of Artificial Sequence: Synthetic oligonucleotide
gccuauuuaauuaccuuac

SEQ ID NO: 61439 - RNA, 19 nt, Artificial Sequence
  Description of Artificial Sequence: Synthetic oligonucleotide
uuuguugguuagcgcuuaa

SEQ ID NO: 61440 - RNA, 19 nt, Artificial Sequence
  Description of Artificial Sequence: Synthetic oligonucleotide
aagggccgaucaacgcugc

SEQ ID NO: 61441 - RNA, 19 nt, Artificial Sequence
  Description of Artificial Sequence: Synthetic oligonucleotide
ggucguauccgccauggga

SEQ ID NO: 61442 - RNA, 19 nt, Artificial Sequence
  Description of Artificial Sequence: Synthetic oligonucleotide
uuaguguaaguagcagcau

SEQ ID NO: 61443 - RNA, 19 nt, Artificial Sequence
  Description of Artificial Sequence: Synthetic oligonucleotide
caggauaggaauugacgaa

SEQ ID NO: 61444 - RNA, 19 nt, Artificial Sequence
  Description of Artificial Sequence: Synthetic oligonucleotide
caccuuccuauagauuagg

SEQ ID NO: 61445 - RNA, 19 nt, Artificial Sequence
  Description of Artificial Sequence: Synthetic oligonucleotide
gauguagccucagagcgcu

SEQ ID NO: 61446 - RNA, 19 nt, Artificial Sequence
  Description of Artificial Sequence: Synthetic oligonucleotide
cuugcugauuuaagcagaa

SEQ ID NO: 61447 - RNA, 19 nt, Artificial Sequence
  Description of Artificial Sequence: Synthetic oligonucleotide
gaugcauuauacauccaau

SEQ ID NO: 61448 - RNA, 19 nt, Artificial Sequence
  Description of Artificial Sequence: Synthetic oligonucleotide
uaccaagcuggaacaccca

SEQ ID NO: 61449 - RNA, 19 nt, Artificial Sequence
  Description of Artificial Sequence: Synthetic oligonucleotide
uuggccgcuaaagagcaua

SEQ ID NO: 61450 - RNA, 19 nt, Artificial Sequence
  Description of Artificial Sequence: Synthetic oligonucleotide
accaagcuggaacacccau

SEQ ID NO: 61451 - RNA, 19 nt, Artificial Sequence
  Description of Artificial Sequence: Synthetic oligonucleotide
gaacucaauugaagacuug

SEQ ID NO: 61452 - RNA, 19 nt, Artificial Sequence
  Description of Artificial Sequence: Synthetic oligonucleotide
guuaccugccuauuuugcu

SEQ ID NO: 61453 - RNA, 19 nt, Artificial Sequence
  Description of Artificial Sequence: Synthetic oligonucleotide
cauuaugugcuuugguccu

SEQ ID NO: 61454 - RNA, 19 nt, Artificial Sequence
  Description of Artificial Sequence: Synthetic oligonucleotide
ccuaacuagauguuaaacu

SEQ ID NO: 61455 - RNA, 19 nt, Artificial Sequence
  Description of Artificial Sequence: Synthetic oligonucleotide
cuaccaauuaaaagacgcu

SEQ ID NO: 61456 - RNA, 19 nt, Artificial Sequence
  Description of Artificial Sequence: Synthetic oligonucleotide
gccgcuaaagagcauaaaa

SEQ ID NO: 61457 - RNA, 19 nt, Artificial Sequence
  Description of Artificial Sequence: Synthetic oligonucleotide
ucguauccgccaugggaga

SEQ ID NO: 61458 - RNA, 19 nt, Artificial Sequence
  Description of Artificial Sequence: Synthetic oligonucleotide
uucuacccacagccuaacu

SEQ ID NO: 61459 - RNA, 19 nt, Artificial Sequence
  Description of Artificial Sequence: Synthetic oligonucleotide
gagaccccuaucugaauua

SEQ ID NO: 61460 - RNA, 19 nt, Artificial Sequence
  Description of Artificial Sequence: Synthetic oligonucleotide
ccagacauaacuuggguua

SEQ ID NO: 61461 - RNA, 19 nt, Artificial Sequence
  Description of Artificial Sequence: Synthetic oligonucleotide
ggaauagcgaagaguaaga

SEQ ID NO: 61462 - RNA, 19 nt, Artificial Sequence
  Description of Artificial Sequence: Synthetic oligonucleotide
agcacaagaucaguaugaa

SEQ ID NO: 61463 - RNA, 19 nt, Artificial Sequence
  Description of Artificial Sequence: Synthetic oligonucleotide
gaauugcacagcgcccgcc

SEQ ID NO: 61464 - RNA, 19 nt, Artificial Sequence
  Description of Artificial Sequence: Synthetic oligonucleotide
auaucucauugcaagcaau

SEQ ID NO: 61465 - RNA, 19 nt, Artificial Sequence
  Description of Artificial Sequence: Synthetic oligonucleotide
uuaagcccuaaagggccga

SEQ ID NO: 61466 - RNA, 19 nt, Artificial Sequence
  Description of Artificial Sequence: Synthetic oligonucleotide
uauccgccaugggagacac

SEQ ID NO: 61467 - RNA, 19 nt, Artificial Sequence
  Description of Artificial Sequence: Synthetic oligonucleotide
uggccgcuaaagagcauaa

SEQ ID NO: 61468 - RNA, 19 nt, Artificial Sequence
  Description of Artificial Sequence: Synthetic oligonucleotide
aaacuuccuuggccgcuaa

SEQ ID NO: 61469 - RNA, 19 nt, Artificial Sequence
  Description of Artificial Sequence: Synthetic oligonucleotide
ccaagacagaucucagcag

SEQ ID NO: 61470 - RNA, 19 nt, Artificial Sequence
  Description of Artificial Sequence: Synthetic oligonucleotide
gaccccuaucugaauuacc

SEQ ID NO: 61471 - RNA, 19 nt, Artificial Sequence
  Description of Artificial Sequence: Synthetic oligonucleotide
guaguugguuaaagcuaag

SEQ ID NO: 61472 - RNA, 19 nt, Artificial Sequence
  Description of Artificial Sequence: Synthetic oligonucleotide
uacuacugcuuaucuucua

SEQ ID NO: 61473 - RNA, 19 nt, Artificial Sequence
  Description of Artificial Sequence: Synthetic oligonucleotide
gcuaaacacauguauccua

SEQ ID NO: 61474 - RNA, 19 nt, Artificial Sequence
  Description of Artificial Sequence: Synthetic oligonucleotide
agguacacagaaacuucca

SEQ ID NO: 61475 - RNA, 19 nt, Artificial Sequence
  Description of Artificial Sequence: Synthetic oligonucleotide
accagcuacuacugcuuau

SEQ ID NO: 61476 - RNA, 19 nt, Artificial Sequence
  Description of Artificial Sequence: Synthetic oligonucleotide
ccaggccuauuuaauuacc

SEQ ID NO: 61477 - RNA, 19 nt, Artificial Sequence
  Description of Artificial Sequence: Synthetic oligonucleotide
gugcucgacaacaauccuc

SEQ ID NO: 61478 - RNA, 19 nt, Artificial Sequence
  Description of Artificial Sequence: Synthetic oligonucleotide
uagugauaaggaggcuaga

SEQ ID NO: 61479 - RNA, 19 nt, Artificial Sequence
  Description of Artificial Sequence: Synthetic oligonucleotide
gcuuacuuucauagguacc

SEQ ID NO: 61480 - RNA, 19 nt, Artificial Sequence
  Description of Artificial Sequence: Synthetic oligonucleotide
auauggauccuagggcuua

SEQ ID NO: 61481 - RNA, 19 nt, Artificial Sequence
  Description of Artificial Sequence: Synthetic oligonucleotide
uaaggaggcuagacacaua

SEQ ID NO: 61482 - RNA, 19 nt, Artificial Sequence
  Description of Artificial Sequence: Synthetic oligonucleotide
gaggcuagacacauacaua

SEQ ID NO: 61483 - RNA, 19 nt, Artificial Sequence
  Description of Artificial Sequence: Synthetic oligonucleotide
cucgguccagaucaaaacu

SEQ ID NO: 61484 - RNA, 19 nt, Artificial Sequence
  Description of Artificial Sequence: Synthetic oligonucleotide
gccuaacuagauguuaaac

SEQ ID NO: 61485 - RNA, 19 nt, Artificial Sequence
  Description of Artificial Sequence: Synthetic oligonucleotide
aggucgguguuagaccugu

SEQ ID NO: 61486 - RNA, 19 nt, Artificial Sequence
  Description of Artificial Sequence: Synthetic oligonucleotide
agauagugauaaggaggcu

SEQ ID NO: 61487 - RNA, 19 nt, Artificial Sequence
  Description of Artificial Sequence: Synthetic oligonucleotide
ggggucguauccgccaugg

SEQ ID NO: 61488 - RNA, 19 nt, Artificial Sequence
  Description of Artificial Sequence: Synthetic oligonucleotide
ccccucaacuauuacccag

SEQ ID NO: 61489 - RNA, 19 nt, Artificial Sequence
  Description of Artificial Sequence: Synthetic oligonucleotide
gcguuuuaagcauuuccaa

SEQ ID NO: 61490 - RNA, 19 nt, Artificial Sequence
  Description of Artificial Sequence: Synthetic oligonucleotide
gggccgaucaacgcugccg

SEQ ID NO: 61491 - RNA, 19 nt, Artificial Sequence
  Description of Artificial Sequence: Synthetic oligonucleotide
cucgacaacaauccucagu

SEQ ID NO: 61492 - RNA, 19 nt, Artificial Sequence
  Description of Artificial Sequence: Synthetic oligonucleotide
auguuagguauaacauuau

SEQ ID NO: 61493 - RNA, 19 nt, Artificial Sequence
  Description of Artificial Sequence: Synthetic oligonucleotide
cccaggccuauuuaauuac

SEQ ID NO: 61494 - RNA, 19 nt, Artificial Sequence
  Description of Artificial Sequence: Synthetic oligonucleotide
acacaaugugauauuucua

SEQ ID NO: 61495 - RNA, 19 nt, Artificial Sequence
  Description of Artificial Sequence: Synthetic oligonucleotide
cuucuacccacagccuaac

SEQ ID NO: 61496 - RNA, 19 nt, Artificial Sequence
  Description of Artificial Sequence: Synthetic oligonucleotide
caggccuauuuaauuaccu

SEQ ID NO: 61497 - RNA, 19 nt, Artificial Sequence
  Description of Artificial Sequence: Synthetic oligonucleotide
ggaucaaaaugacuuuuau

SEQ ID NO: 61498 - RNA, 19 nt, Artificial Sequence
  Description of Artificial Sequence: Synthetic oligonucleotide
gguaaacuauuugagcccu

SEQ ID NO: 61499 - RNA, 19 nt, Artificial Sequence
  Description of Artificial Sequence: Synthetic oligonucleotide
cuaggacauuucaagcggu

SEQ ID NO: 61500 - RNA, 19 nt, Artificial Sequence
  Description of Artificial Sequence: Synthetic oligonucleotide
cuacuacugcuuaucuucu

SEQ ID NO: 61501 - RNA, 19 nt, Artificial Sequence
  Description of Artificial Sequence: Synthetic oligonucleotide
guccaugauuagauaguga

SEQ ID NO: 61502 - RNA, 19 nt, Artificial Sequence
  Description of Artificial Sequence: Synthetic oligonucleotide
uccuauagauuaggagcuu

SEQ ID NO: 61503 - RNA, 19 nt, Artificial Sequence
  Description of Artificial Sequence: Synthetic oligonucleotide
ggagaacuauauuuccccu

SEQ ID NO: 61504 - RNA, 19 nt, Artificial Sequence
  Description of Artificial Sequence: Synthetic oligonucleotide
gcgcuuaauuuauccaaga

SEQ ID NO: 61505 - RNA, 19 nt, Artificial Sequence
  Description of Artificial Sequence: Synthetic oligonucleotide
gcaauccuuguauauuugu

SEQ ID NO: 61506 - RNA, 19 nt, Artificial Sequence
  Description of Artificial Sequence: Synthetic oligonucleotide
gagcagcacaagaucagua

SEQ ID NO: 61507 - RNA, 19 nt, Artificial Sequence
  Description of Artificial Sequence: Synthetic oligonucleotide
gucucaacuuacagaugca

SEQ ID NO: 61508 - RNA, 19 nt, Artificial Sequence
  Description of Artificial Sequence: Synthetic oligonucleotide
agcacgcugguaaaagcuu

SEQ ID NO: 61509 - RNA, 19 nt, Artificial Sequence
  Description of Artificial Sequence: Synthetic oligonucleotide
acgcugguaaaagcuugcu

SEQ ID NO: 61510 - RNA, 19 nt, Artificial Sequence
  Description of Artificial Sequence: Synthetic oligonucleotide
cauagguaccagcauggau

SEQ ID NO: 61511 - RNA, 19 nt, Artificial Sequence
  Description of Artificial Sequence: Synthetic oligonucleotide
guguaaguagcagcaugaa

SEQ ID NO: 61512 - RNA, 19 nt, Artificial Sequence
  Description of Artificial Sequence: Synthetic oligonucleotide
gcgaagaguaagaaaccga

SEQ ID NO: 61513 - RNA, 19 nt, Artificial Sequence
  Description of Artificial Sequence: Synthetic oligonucleotide
gguguuagaccugucauuu

SEQ ID NO: 61514 - RNA, 19 nt, Artificial Sequence
  Description of Artificial Sequence: Synthetic oligonucleotide
cccuaaagggccgaucaac

SEQ ID NO: 61515 - RNA, 19 nt, Artificial Sequence
  Description of Artificial Sequence: Synthetic oligonucleotide
ggcaucaagaauaucucau

SEQ ID NO: 61516 - RNA, 19 nt, Artificial Sequence
  Description of Artificial Sequence: Synthetic oligonucleotide
ccagcuacuacugcuuauc

SEQ ID NO: 61517 - RNA, 19 nt, Artificial Sequence
  Description of Artificial Sequence: Synthetic oligonucleotide
gcacgcugguaaaagcuug

SEQ ID NO: 61518 - RNA, 19 nt, Artificial Sequence
  Description of Artificial Sequence: Synthetic oligonucleotide
uaagcccuaaagggccgau

SEQ ID NO: 61519 - RNA, 19 nt, Artificial Sequence
  Description of Artificial Sequence: Synthetic oligonucleotide
guucggggucguauccgcc

SEQ ID NO: 61520 - RNA, 19 nt, Artificial Sequence
  Description of Artificial Sequence: Synthetic oligonucleotide
agcccuacauuagcauuau

SEQ ID NO: 61521 - RNA, 19 nt, Artificial Sequence
  Description of Artificial Sequence: Synthetic oligonucleotide
ugcaaaucucuaggacauu

SEQ ID NO: 61522 - RNA, 19 nt, Artificial Sequence
  Description of Artificial Sequence: Synthetic oligonucleotide
agagugaaugaggcccuuu

SEQ ID NO: 61523 - RNA, 19 nt, Artificial Sequence
  Description of Artificial Sequence: Synthetic oligonucleotide
auccuagggcuuacuuuca

SEQ ID NO: 61524 - RNA, 19 nt, Artificial Sequence
  Description of Artificial Sequence: Synthetic oligonucleotide
gcaaucuagagaacauucu

SEQ ID NO: 61525 - RNA, 19 nt, Artificial Sequence
  Description of Artificial Sequence: Synthetic oligonucleotide
ccuuaccuauaaaccuuuc

SEQ ID NO: 61526 - RNA, 19 nt, Artificial Sequence
  Description of Artificial Sequence: Synthetic oligonucleotide
ggauucaagagaaguuagu

SEQ ID NO: 61527 - RNA, 19 nt, Artificial Sequence
  Description of Artificial Sequence: Synthetic oligonucleotide
gggucguauccgccauggg

SEQ ID NO: 61528 - RNA, 19 nt, Artificial Sequence
  Description of Artificial Sequence: Synthetic oligonucleotide
ccaauuaaaagacgcuaau

SEQ ID NO: 61529 - RNA, 19 nt, Artificial Sequence
  Description of Artificial Sequence: Synthetic oligonucleotide
ccagugaaucgcugcauaa

SEQ ID NO: 61530 - RNA, 19 nt, Artificial Sequence
  Description of Artificial Sequence: Synthetic oligonucleotide
gcggagcuucccaauuaag

SEQ ID NO: 61531 - RNA, 19 nt, Artificial Sequence
  Description of Artificial Sequence: Synthetic oligonucleotide
augcacuaccaagcuggaa

SEQ ID NO: 61532 - RNA, 19 nt, Artificial Sequence
  Description of Artificial Sequence: Synthetic oligonucleotide
gguuagcgcuuaauuuauc

SEQ ID NO: 61533 - RNA, 19 nt, Artificial Sequence
  Description of Artificial Sequence: Synthetic oligonucleotide
caaucgagaaagccacauu

SEQ ID NO: 61534 - RNA, 19 nt, Artificial Sequence
  Description of Artificial Sequence: Synthetic oligonucleotide
cccaaccuguacaauauau

SEQ ID NO: 61535 - RNA, 19 nt, Artificial Sequence
  Description of Artificial Sequence: Synthetic oligonucleotide
caggaacgcucugcuuaac

SEQ ID NO: 61536 - RNA, 19 nt, Artificial Sequence
  Description of Artificial Sequence: Synthetic oligonucleotide
gggcuuacuuucauaggua

SEQ ID NO: 61537 - RNA, 19 nt, Artificial Sequence
  Description of Artificial Sequence: Synthetic oligonucleotide
gcccuugauacuuccaauu

SEQ ID NO: 61538 - RNA, 19 nt, Artificial Sequence
  Description of Artificial Sequence: Synthetic oligonucleotide
ccuauagauuaggagcuua

SEQ ID NO: 61539 - RNA, 19 nt, Artificial Sequence
  Description of Artificial Sequence: Synthetic oligonucleotide
cgaucaacgcugccggcuc

SEQ ID NO: 61540 - RNA, 19 nt, Artificial Sequence
  Description of Artificial Sequence: Synthetic oligonucleotide
gcccuacauuagcauuaug

SEQ ID NO: 61541 - RNA, 19 nt, Artificial Sequence
  Description of Artificial Sequence: Synthetic oligonucleotide
cuaagcugucaaguaguuu

SEQ ID NO: 61542 - RNA, 19 nt, Artificial Sequence
  Description of Artificial Sequence: Synthetic oligonucleotide
ccagcacuauuuugaaccu

SEQ ID NO: 61543 - RNA, 19 nt, Artificial Sequence
  Description of Artificial Sequence: Synthetic oligonucleotide
gguuagggugaaacaaauu

SEQ ID NO: 61544 - RNA, 19 nt, Artificial Sequence
  Description of Artificial Sequence: Synthetic oligonucleotide
guaaacuauuugagcccuu

SEQ ID NO: 61545 - RNA, 19 nt, Artificial Sequence
  Description of Artificial Sequence: Synthetic oligonucleotide
guacagcguuuuaagcauu

SEQ ID NO: 61546 - RNA, 19 nt, Artificial Sequence
  Description of Artificial Sequence: Synthetic oligonucleotide
cguauccgccaugggagac

SEQ ID NO: 61547 - RNA, 19 nt, Artificial Sequence
  Description of Artificial Sequence: Synthetic oligonucleotide
ccgacaauauggauuucuu

SEQ ID NO: 61548 - RNA, 19 nt, Artificial Sequence
  Description of Artificial Sequence: Synthetic oligonucleotide
gcuaagcugucaaguaguu

SEQ ID NO: 61549 - RNA, 19 nt, Artificial Sequence
  Description of Artificial Sequence: Synthetic oligonucleotide
ggccgcuaaagagcauaaa

SEQ ID NO: 61550 - RNA, 19 nt, Artificial Sequence
  Description of Artificial Sequence: Synthetic oligonucleotide
ccaagcuggaacacccauu

SEQ ID NO: 61551 - RNA, 19 nt, Artificial Sequence
  Description of Artificial Sequence: Synthetic oligonucleotide
ggucgguguuagaccuguc

SEQ ID NO: 61552 - RNA, 19 nt, Artificial Sequence
  Description of Artificial Sequence: Synthetic oligonucleotide
auccgccaugggagacaca

SEQ ID NO: 61553 - RNA, 19 nt, Artificial Sequence
  Description of Artificial Sequence: Synthetic oligonucleotide
ccccaaccuguacaauaua

SEQ ID NO: 61554 - RNA, 19 nt, Artificial Sequence
  Description of Artificial Sequence: Synthetic oligonucleotide
cacaggagcccgggacgcu

SEQ ID NO: 61555 - RNA, 19 nt, Artificial Sequence
  Description of Artificial Sequence: Synthetic oligonucleotide
gggccguucggggucguau

SEQ ID NO: 61556 - RNA, 19 nt, Artificial Sequence
  Description of Artificial Sequence: Synthetic oligonucleotide
cgguguuagaccugucauu

SEQ ID NO: 61557 - RNA, 19 nt, Artificial Sequence
  Description of Artificial Sequence: Synthetic oligonucleotide
cggggucguauccgccaug

SEQ ID NO: 61558 - RNA, 19 nt, Artificial Sequence
  Description of Artificial Sequence: Synthetic oligonucleotide
ggggccguucggggucgua

SEQ ID NO: 61559 - RNA, 19 nt, Artificial Sequence
  Description of Artificial Sequence: Synthetic oligonucleotide
aauauuauuacacuguagu

SEQ ID NO: 61560 - RNA, 19 nt, Artificial Sequence
  Description of Artificial Sequence: Synthetic oligonucleotide
aaaccaauagcacugaaag

SEQ ID NO: 61561 - RNA, 19 nt, Artificial Sequence
  Description of Artificial Sequence: Synthetic oligonucleotide
aaaggcgucaucuuaaaag

SEQ ID NO: 61562 - RNA, 19 nt, Artificial Sequence
  Description of Artificial Sequence: Synthetic oligonucleotide
aaaugacugcacuugaacg

SEQ ID NO: 61563 - RNA, 19 nt, Artificial Sequence
  Description of Artificial Sequence: Synthetic oligonucleotide
agagcuuauaauuuucagc

SEQ ID NO: 61564 - RNA, 19 nt, Artificial Sequence
  Description of Artificial Sequence: Synthetic oligonucleotide
cuuuagauaaaauccaccc

SEQ ID NO: 61565 - RNA, 19 nt, Artificial Sequence
  Description of Artificial Sequence: Synthetic oligonucleotide
ucuucuagcacccaucugc

SEQ ID NO: 61566 - RNA, 19 nt, Artificial Sequence
  Description of Artificial Sequence: Synthetic oligonucleotide
aagauuauaaccacaaaug

SEQ ID NO: 61567 - RNA, 19 nt, Artificial Sequence
  Description of Artificial Sequence: Synthetic oligonucleotide
acaaaagucaaauaacuca

SEQ ID NO: 61568 - RNA, 19 nt, Artificial Sequence
  Description of Artificial Sequence: Synthetic oligonucleotide
cuugucguggaauugaucc

SEQ ID NO: 61569 - RNA, 19 nt, Artificial Sequence
  Description of Artificial Sequence: Synthetic oligonucleotide
aauugauccaaguugaguu

SEQ ID NO: 61570 - RNA, 19 nt, Artificial Sequence
  Description of Artificial Sequence: Synthetic oligonucleotide
aauccacccugauagagac

SEQ ID NO: 61571 - RNA, 19 nt, Artificial Sequence
  Description of Artificial Sequence: Synthetic oligonucleotide
aauaaaccuccccuguugg

SEQ ID NO: 61572 - RNA, 19 nt, Artificial Sequence
  Description of Artificial Sequence: Synthetic oligonucleotide
auuaaccucauacugaaca

SEQ ID NO: 61573 - RNA, 19 nt, Artificial Sequence
  Description of Artificial Sequence: Synthetic oligonucleotide
cucaauuucacgugaaggg

SEQ ID NO: 61574 - RNA, 19 nt, Artificial Sequence
  Description of Artificial Sequence: Synthetic oligonucleotide
uauuauuacacuguaguga

SEQ ID NO: 61575 - RNA, 19 nt, Artificial Sequence
  Description of Artificial Sequence: Synthetic oligonucleotide
aaugacugcacuugaacgu

SEQ ID NO: 61576 - RNA, 19 nt, Artificial Sequence
  Description of Artificial Sequence: Synthetic oligonucleotide
guuuauauauauucagugc

SEQ ID NO: 61577 - RNA, 19 nt, Artificial Sequence
  Description of Artificial Sequence: Synthetic oligonucleotide
agucaauacaacucaaaag

SEQ ID NO: 61578 - RNA, 19 nt, Artificial Sequence
  Description of Artificial Sequence: Synthetic oligonucleotide
aaauaaaccuccccuguug

SEQ ID NO: 61579 - RNA, 19 nt, Artificial Sequence
  Description of Artificial Sequence: Synthetic oligonucleotide
uucuuaagucuacacagag

SEQ ID NO: 61580 - RNA, 19 nt, Artificial Sequence
  Description of Artificial Sequence: Synthetic oligonucleotide
uugggauugucaaucaaag

SEQ ID NO: 61581 - RNA, 19 nt, Artificial Sequence
  Description of Artificial Sequence: Synthetic oligonucleotide
agugucaacacaguggaac

SEQ ID NO: 61582 - RNA, 19 nt, Artificial Sequence
  Description of Artificial Sequence: Synthetic oligonucleotide
agauuauaaccacaaauga

SEQ ID NO: 61583 - RNA, 19 nt, Artificial Sequence
  Description of Artificial Sequence: Synthetic oligonucleotide
ucuccuauguccuuaggag

SEQ ID NO: 61584 - RNA, 19 nt, Artificial Sequence
  Description of Artificial Sequence: Synthetic oligonucleotide
ucuucggucaccacuaaug

SEQ ID NO: 61585 - RNA, 19 nt, Artificial Sequence
  Description of Artificial Sequence: Synthetic oligonucleotide
ucuaccucgagccucccgg

SEQ ID NO: 61586 - RNA, 19 nt, Artificial Sequence
  Description of Artificial Sequence: Synthetic oligonucleotide
agguucuagaucuucaaag

SEQ ID NO: 61587 - RNA, 19 nt, Artificial Sequence
  Description of Artificial Sequence: Synthetic oligonucleotide
gagacaucaguacaagucc

SEQ ID NO: 61588 - RNA, 19 nt, Artificial Sequence
  Description of Artificial Sequence: Synthetic oligonucleotide
ucgauuucgaaucuucuac

SEQ ID NO: 61589 - RNA, 19 nt, Artificial Sequence
  Description of Artificial Sequence: Synthetic oligonucleotide
guaucaucgguacaauugg

SEQ ID NO: 61590 - RNA, 19 nt, Artificial Sequence
  Description of Artificial Sequence: Synthetic oligonucleotide
uuaucuggaccaaacauaa

SEQ ID NO: 61591 - RNA, 19 nt, Artificial Sequence
  Description of Artificial Sequence: Synthetic oligonucleotide
uccuuaggaggaauuaagg

SEQ ID NO: 61592 - RNA, 19 nt, Artificial Sequence
  Description of Artificial Sequence: Synthetic oligonucleotide
ugaaguugucuacuuaggc

SEQ ID NO: 61593 - RNA, 19 nt, Artificial Sequence
  Description of Artificial Sequence: Synthetic oligonucleotide
guggaauugauccaaguug

SEQ ID NO: 61594 - RNA, 19 nt, Artificial Sequence
  Description of Artificial Sequence: Synthetic oligonucleotide
aaccaauagcacugaaagg

SEQ ID NO: 61595 - RNA, 19 nt, Artificial Sequence
  Description of Artificial Sequence: Synthetic oligonucleotide
agucaaauaacucaugcua

SEQ ID NO: 61596 - RNA, 19 nt, Artificial Sequence
  Description of Artificial Sequence: Synthetic oligonucleotide
gauuauaaccacaaaugac

SEQ ID NO: 61597 - RNA, 19 nt, Artificial Sequence
  Description of Artificial Sequence: Synthetic oligonucleotide
uuugggucuagucaauaca

SEQ ID NO: 61598 - RNA, 19 nt, Artificial Sequence
  Description of Artificial Sequence: Synthetic oligonucleotide
uagucaauacaacucaaaa

SEQ ID NO: 61599 - RNA, 19 nt, Artificial Sequence
  Description of Artificial Sequence: Synthetic oligonucleotide
ucaaauaacucaugcuaug

SEQ ID NO: 61600 - RNA, 19 nt, Artificial Sequence
  Description of Artificial Sequence: Synthetic oligonucleotide
aucgguacaauuggaacgc

SEQ ID NO: 61601 - RNA, 19 nt, Artificial Sequence
  Description of Artificial Sequence: Synthetic oligonucleotide
uugaacgugauuacaauuu

SEQ ID NO: 61602 - RNA, 19 nt, Artificial Sequence
  Description of Artificial Sequence: Synthetic oligonucleotide
aaucgucaacuacucuucg

SEQ ID NO: 61603 - RNA, 19 nt, Artificial Sequence
  Description of Artificial Sequence: Synthetic oligonucleotide
uggcuuguccgcaucaggg

SEQ ID NO: 61604 - RNA, 19 nt, Artificial Sequence
  Description of Artificial Sequence: Synthetic oligonucleotide
uaugugggaaguacagugc

SEQ ID NO: 61605 - RNA, 19 nt, Artificial Sequence
  Description of Artificial Sequence: Synthetic oligonucleotide
auguaaucacaguaaagcu

SEQ ID NO: 61606 - RNA, 19 nt, Artificial Sequence
  Description of Artificial Sequence: Synthetic oligonucleotide
gcugcauuaagccagcucc

SEQ ID NO: 61607 - RNA, 19 nt, Artificial Sequence
  Description of Artificial Sequence: Synthetic oligonucleotide
auuucgaaucuucuaccuc

SEQ ID NO: 61608 - RNA, 19 nt, Artificial Sequence
  Description of Artificial Sequence: Synthetic oligonucleotide
ucaucaucuaaccagccuu

SEQ ID NO: 61609 - RNA, 19 nt, Artificial Sequence
  Description of Artificial Sequence: Synthetic oligonucleotide
agauuaauguguaaagaug

SEQ ID NO: 61610 - RNA, 19 nt, Artificial Sequence
  Description of Artificial Sequence: Synthetic oligonucleotide
agacgcaacuguuacauga

SEQ ID NO: 61611 - RNA, 19 nt, Artificial Sequence
  Description of Artificial Sequence: Synthetic oligonucleotide
ucacgugaaggguuuacag

SEQ ID NO: 61612 - RNA, 19 nt, Artificial Sequence
  Description of Artificial Sequence: Synthetic oligonucleotide
guuacaugaacugcaaaug

SEQ ID NO: 61613 - RNA, 19 nt, Artificial Sequence
  Description of Artificial Sequence: Synthetic oligonucleotide
ucacauuuaggguuggcaa

SEQ ID NO: 61614 - RNA, 19 nt, Artificial Sequence
  Description of Artificial Sequence: Synthetic oligonucleotide
ucgucaacuacucuucggu

SEQ ID NO: 61615 - RNA, 19 nt, Artificial Sequence
  Description of Artificial Sequence: Synthetic oligonucleotide
gauugucaaucaugggagg

SEQ ID NO: 61616 - RNA, 19 nt, Artificial Sequence
  Description of Artificial Sequence: Synthetic oligonucleotide
acauuuaucuggaccaaac

SEQ ID NO: 61617 - RNA, 19 nt, Artificial Sequence
  Description of Artificial Sequence: Synthetic oligonucleotide
uugggucuagucaauacaa

SEQ ID NO: 61618 - RNA, 19 nt, Artificial Sequence
  Description of Artificial Sequence: Synthetic oligonucleotide
uguagugauggggaagagg

SEQ ID NO: 61619 - RNA, 19 nt, Artificial Sequence
  Description of Artificial Sequence: Synthetic oligonucleotide
uguggcgaaagaugaagug

SEQ ID NO: 61620 - RNA, 19 nt, Artificial Sequence
  Description of Artificial Sequence: Synthetic oligonucleotide
aaagcugucugugaaugga

SEQ ID NO: 61621 - RNA, 19 nt, Artificial Sequence
  Description of Artificial Sequence: Synthetic oligonucleotide
gaggagauccaugagaaca

SEQ ID NO: 61622 - RNA, 19 nt, Artificial Sequence
  Description of Artificial Sequence: Synthetic oligonucleotide
aacgugauuacaauuuuaa

SEQ ID NO: 61623 - RNA, 19 nt, Artificial Sequence
  Description of Artificial Sequence: Synthetic oligonucleotide
uggauuagacuuucuuaag

SEQ ID NO: 61624 - RNA, 19 nt, Artificial Sequence
  Description of Artificial Sequence: Synthetic oligonucleotide
uucacuggaaccuguagau

SEQ ID NO: 61625 - RNA, 19 nt, Artificial Sequence
  Description of Artificial Sequence: Synthetic oligonucleotide
auuggaacgccucuagaga

SEQ ID NO: 61626 - RNA, 19 nt, Artificial Sequence
  Description of Artificial Sequence: Synthetic oligonucleotide
guaguuggacccuggaaag

SEQ ID NO: 61627 - RNA, 19 nt, Artificial Sequence
  Description of Artificial Sequence: Synthetic oligonucleotide
uaagacgcaacuguuacau

SEQ ID NO: 61628 - RNA, 19 nt, Artificial Sequence
  Description of Artificial Sequence: Synthetic oligonucleotide
uuuagcagagauggcauga

SEQ ID NO: 61629 - RNA, 19 nt, Artificial Sequence
  Description of Artificial Sequence: Synthetic oligonucleotide
uccgaauacauuucaguau

SEQ ID NO: 61630 - RNA, 19 nt, Artificial Sequence
  Description of Artificial Sequence: Synthetic oligonucleotide
gacgucuugagguuuucug

SEQ ID NO: 61631 - RNA, 19 nt, Artificial Sequence
  Description of Artificial Sequence: Synthetic oligonucleotide
aggguuuacagcaggaguc

SEQ ID NO: 61632 - RNA, 19 nt, Artificial Sequence
  Description of Artificial Sequence: Synthetic oligonucleotide
aaagccgugugcucccaag

SEQ ID NO: 61633 - RNA, 19 nt, Artificial Sequence
  Description of Artificial Sequence: Synthetic oligonucleotide
gauaaaauccacccugaua

SEQ ID NO: 61634 - RNA, 19 nt, Artificial Sequence
  Description of Artificial Sequence: Synthetic oligonucleotide
acgugauuacaauuuuaag

SEQ ID NO: 61635 - RNA, 19 nt, Artificial Sequence
  Description of Artificial Sequence: Synthetic oligonucleotide
guaaccuuuggagauggag

SEQ ID NO: 61636 - RNA, 19 nt, Artificial Sequence
  Description of Artificial Sequence: Synthetic oligonucleotide
ugaucuaccucgagccucc

SEQ ID NO: 61637 - RNA, 19 nt, Artificial Sequence
  Description of Artificial Sequence: Synthetic oligonucleotide
ucaugcuaugugucaagcc

SEQ ID NO: 61638 - RNA, 19 nt, Artificial Sequence
  Description of Artificial Sequence: Synthetic oligonucleotide
ugguaguuaggauugucaa

SEQ ID NO: 61639 - RNA, 19 nt, Artificial Sequence
  Description of Artificial Sequence: Synthetic oligonucleotide
ccuacaaaagucaaauaac

SEQ ID NO: 61640 - RNA, 19 nt, Artificial Sequence
  Description of Artificial Sequence: Synthetic oligonucleotide
ucuagucaauacaacucaa

SEQ ID NO: 61641 - RNA, 19 nt, Artificial Sequence
  Description of Artificial Sequence: Synthetic oligonucleotide
aauuccucuccuauguccu

SEQ ID NO: 61642 - RNA, 19 nt, Artificial Sequence
  Description of Artificial Sequence: Synthetic oligonucleotide
aucgucaacuacucuucgg

SEQ ID NO: 61643 - RNA, 19 nt, Artificial Sequence
  Description of Artificial Sequence: Synthetic oligonucleotide
cacgugaaggguuuacagc

SEQ ID NO: 61644 - RNA, 19 nt, Artificial Sequence
  Description of Artificial Sequence: Synthetic oligonucleotide
uguaaucuauccuguaguu

SEQ ID NO: 61645 - RNA, 19 nt, Artificial Sequence
  Description of Artificial Sequence: Synthetic oligonucleotide
gucuagucaauacaacuca

SEQ ID NO: 61646 - RNA, 19 nt, Artificial Sequence
  Description of Artificial Sequence: Synthetic oligonucleotide
gacuaguauucacuggaac

SEQ ID NO: 61647 - RNA, 19 nt, Artificial Sequence
  Description of Artificial Sequence: Synthetic oligonucleotide
ggauugucaaucaugggag

SEQ ID NO: 61648 - RNA, 19 nt, Artificial Sequence
  Description of Artificial Sequence: Synthetic oligonucleotide
ggagucaugucauuuagca

SEQ ID NO: 61649 - RNA, 19 nt, Artificial Sequence
  Description of Artificial Sequence: Synthetic oligonucleotide
aacgccucuagagaaagaa

SEQ ID NO: 61650 - RNA, 19 nt, Artificial Sequence
  Description of Artificial Sequence: Synthetic oligonucleotide
uuggaacgccucuagagaa

SEQ ID NO: 61651 - RNA, 19 nt, Artificial Sequence
  Description of Artificial Sequence: Synthetic oligonucleotide
gaaccuguagauggugacg

SEQ ID NO: 61652 - RNA, 19 nt, Artificial Sequence
  Description of Artificial Sequence: Synthetic oligonucleotide
cugauagagacccucuguc

SEQ ID NO: 61653 - RNA, 19 nt, Artificial Sequence
  Description of Artificial Sequence: Synthetic oligonucleotide
uuaagacgcaacuguuaca

SEQ ID NO: 61654 - RNA, 19 nt, Artificial Sequence
  Description of Artificial Sequence: Synthetic oligonucleotide
uaucaucgguacaauugga

SEQ ID NO: 61655 - RNA, 19 nt, Artificial Sequence
  Description of Artificial Sequence: Synthetic oligonucleotide
uuguggcgaaagaugaagu

SEQ ID NO: 61656 - RNA, 19 nt, Artificial Sequence
  Description of Artificial Sequence: Synthetic oligonucleotide
gucaaucaaaggucgcugc

SEQ ID NO: 61657 - RNA, 19 nt, Artificial Sequence
  Description of Artificial Sequence: Synthetic oligonucleotide
ugauuucgauuucgaaucu

SEQ ID NO: 61658 - RNA, 19 nt, Artificial Sequence
  Description of Artificial Sequence: Synthetic oligonucleotide
uaaaagguucuagaucuuc

SEQ ID NO: 61659 - RNA, 19 nt, Artificial Sequence
  Description of Artificial Sequence: Synthetic oligonucleotide
augaucuaccucgagccuc

SEQ ID NO: 61660 - RNA, 19 nt, Artificial Sequence
  Description of Artificial Sequence: Synthetic oligonucleotide
ccuaagguauaccaggccc

SEQ ID NO: 61661 - RNA, 19 nt, Artificial Sequence
  Description of Artificial Sequence: Synthetic oligonucleotide
aauuggcccaccucuggau

SEQ ID NO: 61662 - RNA, 19 nt, Artificial Sequence
  Description of Artificial Sequence: Synthetic oligonucleotide
cauuaagccagcuccucuc

SEQ ID NO: 61663 - RNA, 19 nt, Artificial Sequence
  Description of Artificial Sequence: Synthetic oligonucleotide
aaauccacccugauagaga

SEQ ID NO: 61664 - RNA, 19 nt, Artificial Sequence
  Description of Artificial Sequence: Synthetic oligonucleotide
ggaucugguauuuuggguc

SEQ ID NO: 61665 - RNA, 19 nt, Artificial Sequence
  Description of Artificial Sequence: Synthetic oligonucleotide
cuaucauuacuaauacuaa

SEQ ID NO: 61666 - RNA, 19 nt, Artificial Sequence
  Description of Artificial Sequence: Synthetic oligonucleotide
acuugaacgugauuacaau

SEQ ID NO: 61667 - RNA, 19 nt, Artificial Sequence
  Description of Artificial Sequence: Synthetic oligonucleotide
uugauccaaguugaguucu

SEQ ID NO: 61668 - RNA, 19 nt, Artificial Sequence
  Description of Artificial Sequence: Synthetic oligonucleotide
aguugucuacuuaggcacc

SEQ ID NO: 61669 - RNA, 19 nt, Artificial Sequence
  Description of Artificial Sequence: Synthetic oligonucleotide
cuaggaccacacuugcaag

SEQ ID NO: 61670 - RNA, 19 nt, Artificial Sequence
  Description of Artificial Sequence: Synthetic oligonucleotide
auccggaucugguauuuug

SEQ ID NO: 61671 - RNA, 19 nt, Artificial Sequence
  Description of Artificial Sequence: Synthetic oligonucleotide
agguaaccuuuggagaugg

SEQ ID NO: 61672 - RNA, 19 nt, Artificial Sequence
  Description of Artificial Sequence: Synthetic oligonucleotide
gauuucgaaucuucuaccu

SEQ ID NO: 61673 - RNA, 19 nt, Artificial Sequence
  Description of Artificial Sequence: Synthetic oligonucleotide
guccuuaggaggaauuaag

SEQ ID NO: 61674 - RNA, 19 nt, Artificial Sequence
  Description of Artificial Sequence: Synthetic oligonucleotide
ugccagacuccacacccag

SEQ ID NO: 61675 - RNA, 19 nt, Artificial Sequence
  Description of Artificial Sequence: Synthetic oligonucleotide
uuugggucuuucaucccaa

SEQ ID NO: 61676 - RNA, 19 nt, Artificial Sequence
  Description of Artificial Sequence: Synthetic oligonucleotide
uggaggaguacuggaaucu

SEQ ID NO: 61677 - RNA, 19 nt, Artificial Sequence
  Description of Artificial Sequence: Synthetic oligonucleotide
ugggucuagucaauacaac

SEQ ID NO: 61678 - RNA, 19 nt, Artificial Sequence
  Description of Artificial Sequence: Synthetic oligonucleotide
cuguaucuggccucuuagc

SEQ ID NO: 61679 - RNA, 19 nt, Artificial Sequence
  Description of Artificial Sequence: Synthetic oligonucleotide
uuacaacugcaauuauuua

SEQ ID NO: 61680 - RNA, 19 nt, Artificial Sequence
  Description of Artificial Sequence: Synthetic oligonucleotide
caaguuaguugcuucaugu

SEQ ID NO: 61681 - RNA, 19 nt, Artificial Sequence
  Description of Artificial Sequence: Synthetic oligonucleotide
uucugaauuggcccaccuc

SEQ ID NO: 61682 - RNA, 19 nt, Artificial Sequence
  Description of Artificial Sequence: Synthetic oligonucleotide
agcauccgucuucuuguac

SEQ ID NO: 61683 - RNA, 19 nt, Artificial Sequence
  Description of Artificial Sequence: Synthetic oligonucleotide
aacucaugcuaugugucaa

SEQ ID NO: 61684 - RNA, 19 nt, Artificial Sequence
  Description of Artificial Sequence: Synthetic oligonucleotide
aauuucacgugaaggguuu

SEQ ID NO: 61685 - RNA, 19 nt, Artificial Sequence
  Description of Artificial Sequence: Synthetic oligonucleotide
caugcuaugugucaagccu

SEQ ID NO: 61686 - RNA, 19 nt, Artificial Sequence
  Description of Artificial Sequence: Synthetic oligonucleotide
agauuuccacuguucacaa

SEQ ID NO: 61687 - RNA, 19 nt, Artificial Sequence
  Description of Artificial Sequence: Synthetic oligonucleotide
ugaaaggcgucaucuuaaa

SEQ ID NO: 61688 - RNA, 19 nt, Artificial Sequence
  Description of Artificial Sequence: Synthetic oligonucleotide
uaguauucacuggaaccug

SEQ ID NO: 61689 - RNA, 19 nt, Artificial Sequence
  Description of Artificial Sequence: Synthetic oligonucleotide
ugucguggaauugauccaa

SEQ ID NO: 61690 - RNA, 19 nt, Artificial Sequence
  Description of Artificial Sequence: Synthetic oligonucleotide
uguccuuaggaggaauuaa

SEQ ID NO: 61691 - RNA, 19 nt, Artificial Sequence
  Description of Artificial Sequence: Synthetic oligonucleotide
uucacgugaaggguuuaca

SEQ ID NO: 61692 - RNA, 19 nt, Artificial Sequence
  Description of Artificial Sequence: Synthetic oligonucleotide
augacugcacuugaacgug

SEQ ID NO: 61693 - RNA, 19 nt, Artificial Sequence
  Description of Artificial Sequence: Synthetic oligonucleotide
aguuggacccuggaaaggu

SEQ ID NO: 61694 - RNA, 19 nt, Artificial Sequence
  Description of Artificial Sequence: Synthetic oligonucleotide
acggacugcaagcugcgcu

SEQ ID NO: 61695 - RNA, 19 nt, Artificial Sequence
  Description of Artificial Sequence: Synthetic oligonucleotide
acauaauaguauagggagu

SEQ ID NO: 61696 - RNA, 19 nt, Artificial Sequence
  Description of Artificial Sequence: Synthetic oligonucleotide
ugcccuuauaauugggauu

SEQ ID NO: 61697 - RNA, 19 nt, Artificial Sequence
  Description of Artificial Sequence: Synthetic oligonucleotide
ccucaauuucacgugaagg

SEQ ID NO: 61698 - RNA, 19 nt, Artificial Sequence
  Description of Artificial Sequence: Synthetic oligonucleotide
aacggacugcaagcugcgc

SEQ ID NO: 61699 - RNA, 19 nt, Artificial Sequence
  Description of Artificial Sequence: Synthetic oligonucleotide
cuaugcagagcuuauaauu

SEQ ID NO: 61700 - RNA, 19 nt, Artificial Sequence
  Description of Artificial Sequence: Synthetic oligonucleotide
auaaaccuccccuguugga

SEQ ID NO: 61701 - RNA, 19 nt, Artificial Sequence
  Description of Artificial Sequence: Synthetic oligonucleotide
ucuugucguggaauugauc

SEQ ID NO: 61702 - RNA, 19 nt, Artificial Sequence
  Description of Artificial Sequence: Synthetic oligonucleotide
auuugcccuuauaauuggg

SEQ ID NO: 61703 - RNA, 19 nt, Artificial Sequence
  Description of Artificial Sequence: Synthetic oligonucleotide
uggcccaaucgucaacuac

SEQ ID NO: 61704 - RNA, 19 nt, Artificial Sequence
  Description of Artificial Sequence: Synthetic oligonucleotide
gaauuggcccaccucugga

SEQ ID NO: 61705 - RNA, 19 nt, Artificial Sequence
  Description of Artificial Sequence: Synthetic oligonucleotide
caacggacugcaagcugcg

SEQ ID NO: 61706 - RNA, 19 nt, Artificial Sequence
  Description of Artificial Sequence: Synthetic oligonucleotide
cugaauuggcccaccucug

SEQ ID NO: 61707 - RNA, 19 nt, Artificial Sequence
  Description of Artificial Sequence: Synthetic oligonucleotide
ggguccuuuacauuacaac

SEQ ID NO: 61708 - RNA, 19 nt, Artificial Sequence
  Description of Artificial Sequence: Synthetic oligonucleotide
aaucuauccuguaguugga

SEQ ID NO: 61709 - RNA, 19 nt, Artificial Sequence
  Description of Artificial Sequence: Synthetic oligonucleotide
agcaacggacugcaagcug

SEQ ID NO: 61710 - RNA, 19 nt, Artificial Sequence
  Description of Artificial Sequence: Synthetic oligonucleotide
caagggcaacagaacacug

SEQ ID NO: 61711 - RNA, 19 nt, Artificial Sequence
  Description of Artificial Sequence: Synthetic oligonucleotide
uaccucgagccucccgggg

SEQ ID NO: 61712 - RNA, 19 nt, Artificial Sequence
  Description of Artificial Sequence: Synthetic oligonucleotide
ggggcugacucacauuuag

SEQ ID NO: 61713 - RNA, 19 nt, Artificial Sequence
  Description of Artificial Sequence: Synthetic oligonucleotide
gaucugguauuuugggucu

SEQ ID NO: 61714 - RNA, 19 nt, Artificial Sequence
  Description of Artificial Sequence: Synthetic oligonucleotide
cagaucuguaucuggccuc

SEQ ID NO: 61715 - RNA, 19 nt, Artificial Sequence
  Description of Artificial Sequence: Synthetic oligonucleotide
ggucuagucaauacaacuc

SEQ ID NO: 61716 - RNA, 19 nt, Artificial Sequence
  Description of Artificial Sequence: Synthetic oligonucleotide
uacaauuggaacgccucua

SEQ ID NO: 61717 - RNA, 19 nt, Artificial Sequence
  Description of Artificial Sequence: Synthetic oligonucleotide
gaugcuuggcccgagacau

SEQ ID NO: 61718 - RNA, 19 nt, Artificial Sequence
  Description of Artificial Sequence: Synthetic oligonucleotide
cuaguauucacuggaaccu

SEQ ID NO: 61719 - RNA, 19 nt, Artificial Sequence
  Description of Artificial Sequence: Synthetic oligonucleotide
cuaugugucaagccuccca

SEQ ID NO: 61720 - RNA, 19 nt, Artificial Sequence
  Description of Artificial Sequence: Synthetic oligonucleotide
uggaacgccucuagagaaa

SEQ ID NO: 61721 - RNA, 19 nt, Artificial Sequence
  Description of Artificial Sequence: Synthetic oligonucleotide
cuucuagcacccaucugca

SEQ ID NO: 61722 - RNA, 19 nt, Artificial Sequence
  Description of Artificial Sequence: Synthetic oligonucleotide
agcaacaguaucaucggua

SEQ ID NO: 61723 - RNA, 19 nt, Artificial Sequence
  Description of Artificial Sequence: Synthetic oligonucleotide
aucuaccucgagccucccg

SEQ ID NO: 61724 - RNA, 19 nt, Artificial Sequence
  Description of Artificial Sequence: Synthetic oligonucleotide
gucuacuuaggcaccacca

SEQ ID NO: 61725 - RNA, 19 nt, Artificial Sequence
  Description of Artificial Sequence: Synthetic oligonucleotide
agacaucaguacaaguccu

SEQ ID NO: 61726 - RNA, 19 nt, Artificial Sequence
  Description of Artificial Sequence: Synthetic oligonucleotide
agaucuguaucuggccucu

SEQ ID NO: 61727 - RNA, 19 nt, Artificial Sequence
  Description of Artificial Sequence: Synthetic oligonucleotide
aucaucgguacaauuggaa

SEQ ID NO: 61728 - RNA, 19 nt, Artificial Sequence
  Description of Artificial Sequence: Synthetic oligonucleotide
cuaccucgagccucccggg

SEQ ID NO: 61729 - RNA, 19 nt, Artificial Sequence
  Description of Artificial Sequence: Synthetic oligonucleotide
gagucuugucguggaauug

SEQ ID NO: 61730 - RNA, 19 nt, Artificial Sequence
  Description of Artificial Sequence: Synthetic oligonucleotide
cugcaauucauucucccua

SEQ ID NO: 61731 - RNA, 19 nt, Artificial Sequence
  Description of Artificial Sequence: Synthetic oligonucleotide
gcaacggacugcaagcugc

SEQ ID NO: 61732 - RNA, 19 nt, Artificial Sequence
  Description of Artificial Sequence: Synthetic oligonucleotide
cgccucuagagaaagaaug

SEQ ID NO: 61733 - RNA, 19 nt, Artificial Sequence
  Description of Artificial Sequence: Synthetic oligonucleotide
cuaagguauaccaggcccu

SEQ ID NO: 61734 - RNA, 19 nt, Artificial Sequence
  Description of Artificial Sequence: Synthetic oligonucleotide
ggaacgccucuagagaaag

SEQ ID NO: 61735 - RNA, 19 nt, Artificial Sequence
  Description of Artificial Sequence: Synthetic oligonucleotide
ggcuuuagauaaaauccac

SEQ ID NO: 61736 - RNA, 19 nt, Artificial Sequence
  Description of Artificial Sequence: Synthetic oligonucleotide
aucuguaucuggccucuua

SEQ ID NO: 61737 - RNA, 19 nt, Artificial Sequence
  Description of Artificial Sequence: Synthetic oligonucleotide
ggguccucaauuucacgug

SEQ ID NO: 61738 - RNA, 19 nt, Artificial Sequence
  Description of Artificial Sequence: Synthetic oligonucleotide
gucaaauaacucaugcuau

SEQ ID NO: 61739 - RNA, 19 nt, Artificial Sequence
  Description of Artificial Sequence: Synthetic oligonucleotide
ucucccuagcauuccuaau

SEQ ID NO: 61740 - RNA, 19 nt, Artificial Sequence
  Description of Artificial Sequence: Synthetic oligonucleotide
gaaucuuaccaggggcauc

SEQ ID NO: 61741 - RNA, 19 nt, Artificial Sequence
  Description of Artificial Sequence: Synthetic oligonucleotide
acacuguagugauggggaa

SEQ ID NO: 61742 - RNA, 19 nt, Artificial Sequence
  Description of Artificial Sequence: Synthetic oligonucleotide
cuugaacgugauuacaauu

SEQ ID NO: 61743 - RNA, 19 nt, Artificial Sequence
  Description of Artificial Sequence: Synthetic oligonucleotide
gggucuagucaauacaacu

SEQ ID NO: 61744 - RNA, 19 nt, Artificial Sequence
  Description of Artificial Sequence: Synthetic oligonucleotide
guacaauuggaacgccucu

SEQ ID NO: 61745 - RNA, 19 nt, Artificial Sequence
  Description of Artificial Sequence: Synthetic oligonucleotide
gccuacauccuuuacaaau

SEQ ID NO: 61746 - RNA, 19 nt, Artificial Sequence
  Description of Artificial Sequence: Synthetic oligonucleotide
auuuugggucuagucaaua

SEQ ID NO: 61747 - RNA, 19 nt, Artificial Sequence
  Description of Artificial Sequence: Synthetic oligonucleotide
ucgguacaauuggaacgcc

SEQ ID NO: 61748 - RNA, 19 nt, Artificial Sequence
  Description of Artificial Sequence: Synthetic oligonucleotide
cccaagggcaacagaacac

SEQ ID NO: 61749 - RNA, 19 nt, Artificial Sequence
  Description of Artificial Sequence: Synthetic oligonucleotide
cuggaccaaacauaauagu

SEQ ID NO: 61750 - RNA, 19 nt, Artificial Sequence
  Description of Artificial Sequence: Synthetic oligonucleotide
auguccuuaggaggaauua

SEQ ID NO: 61751 - RNA, 19 nt, Artificial Sequence
  Description of Artificial Sequence: Synthetic oligonucleotide
caggcucaucaucuaacca

SEQ ID NO: 61752 - RNA, 19 nt, Artificial Sequence
  Description of Artificial Sequence: Synthetic oligonucleotide
uccauagcauuggacuguu

SEQ ID NO: 61753 - RNA, 19 nt, Artificial Sequence
  Description of Artificial Sequence: Synthetic oligonucleotide
acauacuggucaacuaaua

SEQ ID NO: 61754 - RNA, 19 nt, Artificial Sequence
  Description of Artificial Sequence: Synthetic oligonucleotide
cacagccuacauccuuuac

SEQ ID NO: 61755 - RNA, 19 nt, Artificial Sequence
  Description of Artificial Sequence: Synthetic oligonucleotide
acgggccugcuuaaaauaa

SEQ ID NO: 61756 - RNA, 19 nt, Artificial Sequence
  Description of Artificial Sequence: Synthetic oligonucleotide
ccgugugcucccaaggaug

SEQ ID NO: 61757 - RNA, 19 nt, Artificial Sequence
  Description of Artificial Sequence: Synthetic oligonucleotide
cuguuacaugaacugcaaa

SEQ ID NO: 61758 - RNA, 19 nt, Artificial Sequence
  Description of Artificial Sequence: Synthetic oligonucleotide
acacagccuacauccuuua

SEQ ID NO: 61759 - RNA, 19 nt, Artificial Sequence
  Description of Artificial Sequence: Synthetic oligonucleotide
cuagcacccaucugcauuu

SEQ ID NO: 61760 - RNA, 19 nt, Artificial Sequence
  Description of Artificial Sequence: Synthetic oligonucleotide
caugaugcuuggcccgaga

SEQ ID NO: 61761 - RNA, 19 nt, Artificial Sequence
  Description of Artificial Sequence: Synthetic oligonucleotide
cacggacgcucuucagcug

SEQ ID NO: 61762 - RNA, 19 nt, Artificial Sequence
  Description of Artificial Sequence: Synthetic oligonucleotide
ucgagccucccggggacca

SEQ ID NO: 61763 - RNA, 19 nt, Artificial Sequence
  Description of Artificial Sequence: Synthetic oligonucleotide
uccuaauguugguguuauu

SEQ ID NO: 61764 - RNA, 19 nt, Artificial Sequence
  Description of Artificial Sequence: Synthetic oligonucleotide
ggcccaaucgucaacuacu

SEQ ID NO: 61765 - RNA, 19 nt, Artificial Sequence
  Description of Artificial Sequence: Synthetic oligonucleotide
acgccucuagagaaagaau

SEQ ID NO: 61766 - RNA, 19 nt, Artificial Sequence
  Description of Artificial Sequence: Synthetic oligonucleotide
gagcagucccaagggcaac

SEQ ID NO: 61767 - RNA, 19 nt, Artificial Sequence
  Description of Artificial Sequence: Synthetic oligonucleotide
gaucuaccucgagccuccc

SEQ ID NO: 61768 - RNA, 19 nt, Artificial Sequence
  Description of Artificial Sequence: Synthetic oligonucleotide
cauuccuaauguugguguu

SEQ ID NO: 61769 - RNA, 19 nt, Artificial Sequence
  Description of Artificial Sequence: Synthetic oligonucleotide
cagcauccggaucugguau

SEQ ID NO: 61770 - RNA, 19 nt, Artificial Sequence
  Description of Artificial Sequence: Synthetic oligonucleotide
gcuaugugucaagccuccc

SEQ ID NO: 61771 - RNA, 19 nt, Artificial Sequence
  Description of Artificial Sequence: Synthetic oligonucleotide
gugacgucuugagguuuuc

SEQ ID NO: 61772 - RNA, 19 nt, Artificial Sequence
  Description of Artificial Sequence: Synthetic oligonucleotide
gcccaaucgucaacuacuc

SEQ ID NO: 61773 - RNA, 19 nt, Artificial Sequence
  Description of Artificial Sequence: Synthetic oligonucleotide
cacaaguuaguugcuucau

SEQ ID NO: 61774 - RNA, 19 nt, Artificial Sequence
  Description of Artificial Sequence: Synthetic oligonucleotide
ccggggaccacugacggca

SEQ ID NO: 61775 - RNA, 19 nt, Artificial Sequence
  Description of Artificial Sequence: Synthetic oligonucleotide
ccuccccuguuggaacugg

SEQ ID NO: 61776 - RNA, 19 nt, Artificial Sequence
  Description of Artificial Sequence: Synthetic oligonucleotide
ccaagggcaacagaacacu

SEQ ID NO: 61777 - RNA, 19 nt, Artificial Sequence
  Description of Artificial Sequence: Synthetic oligonucleotide
gcccgagacaucaguacaa

SEQ ID NO: 61778 - RNA, 19 nt, Artificial Sequence
  Description of Artificial Sequence: Synthetic oligonucleotide
cucuucggucaccacuaau

SEQ ID NO: 61779 - RNA, 19 nt, Artificial Sequence
  Description of Artificial Sequence: Synthetic oligonucleotide
gggagucuugucguggaau

SEQ ID NO: 61780 - RNA, 19 nt, Artificial Sequence
  Description of Artificial Sequence: Synthetic oligonucleotide
ggugacgucuugagguuuu

SEQ ID NO: 61781 - RNA, 19 nt, Artificial Sequence
  Description of Artificial Sequence: Synthetic oligonucleotide
cgguacaauuggaacgccu

SEQ ID NO: 61782 - RNA, 19 nt, Artificial Sequence
  Description of Artificial Sequence: Synthetic oligonucleotide
cccaaucgucaacuacucu

SEQ ID NO: 61783 - RNA, 19 nt, Artificial Sequence
  Description of Artificial Sequence: Synthetic oligonucleotide
ccacuacaccuggcucagc

SEQ ID NO: 61784 - RNA, 19 nt, Artificial Sequence
  Description of Artificial Sequence: Synthetic oligonucleotide
cccuagcauuccuaauguu

SEQ ID NO: 61785 - RNA, 19 nt, Artificial Sequence
  Description of Artificial Sequence: Synthetic oligonucleotide
cccugguaguuaggauugu

SEQ ID NO: 61786 - RNA, 19 nt, Artificial Sequence
  Description of Artificial Sequence: Synthetic oligonucleotide
aauauuucggauuucacuc

SEQ ID NO: 61787 - RNA, 19 nt, Artificial Sequence
  Description of Artificial Sequence: Synthetic oligonucleotide
auaaauguaaguuugagug

SEQ ID NO: 61788 - RNA, 19 nt, Artificial Sequence
  Description of Artificial Sequence: Synthetic oligonucleotide
aauggaacauagcugaacc

SEQ ID NO: 61789 - RNA, 19 nt, Artificial Sequence
  Description of Artificial Sequence: Synthetic oligonucleotide
uaugacaccagaauuaugg

SEQ ID NO: 61790 - RNA, 19 nt, Artificial Sequence
  Description of Artificial Sequence: Synthetic oligonucleotide
aauauauuaagcaaggccu

SEQ ID NO: 61791 - RNA, 19 nt, Artificial Sequence
  Description of Artificial Sequence: Synthetic oligonucleotide
auacauaaggccaaaaucc

SEQ ID NO: 61792 - RNA, 19 nt, Artificial Sequence
  Description of Artificial Sequence: Synthetic oligonucleotide
aauccuaaucuacaaauag

SEQ ID NO: 61793 - RNA, 19 nt, Artificial Sequence
  Description of Artificial Sequence: Synthetic oligonucleotide
acauuuaucagacaugguc

SEQ ID NO: 61794 - RNA, 19 nt, Artificial Sequence
  Description of Artificial Sequence: Synthetic oligonucleotide
aauaagacguaauugaaau

SEQ ID NO: 61795 - RNA, 19 nt, Artificial Sequence
  Description of Artificial Sequence: Synthetic oligonucleotide
aauuuuagguguuaacuug

SEQ ID NO: 61796 - RNA, 19 nt, Artificial Sequence
  Description of Artificial Sequence: Synthetic oligonucleotide
uucuaauugccucagacgc

SEQ ID NO: 61797 - RNA, 19 nt, Artificial Sequence
  Description of Artificial Sequence: Synthetic oligonucleotide
auaagaguaucuuucuagc

SEQ ID NO: 61798 - RNA, 19 nt, Artificial Sequence
  Description of Artificial Sequence: Synthetic oligonucleotide
ugcuauaugaacaugugcu

SEQ ID NO: 61799 - RNA, 19 nt, Artificial Sequence
  Description of Artificial Sequence: Synthetic oligonucleotide
aaacguuagaauuaguuua

SEQ ID NO: 61800 - RNA, 19 nt, Artificial Sequence
  Description of Artificial Sequence: Synthetic oligonucleotide
acaugcauuguacacacac

SEQ ID NO: 61801 - RNA, 19 nt, Artificial Sequence
  Description of Artificial Sequence: Synthetic oligonucleotide
agcaaauauaacugguagc

SEQ ID NO: 61802 - RNA, 19 nt, Artificial Sequence
  Description of Artificial Sequence: Synthetic oligonucleotide
uaagacguaauugaaauga

SEQ ID NO: 61803 - RNA, 19 nt, Artificial Sequence
  Description of Artificial Sequence: Synthetic oligonucleotide
uccuaaucuacaaauagac

SEQ ID NO: 61804 - RNA, 19 nt, Artificial Sequence
  Description of Artificial Sequence: Synthetic oligonucleotide
cauaauaccaaauggaaca

SEQ ID NO: 61805 - RNA, 19 nt, Artificial Sequence
  Description of Artificial Sequence: Synthetic oligonucleotide
ucagugaaaauccauggga

SEQ ID NO: 61806 - RNA, 19 nt, Artificial Sequence
  Description of Artificial Sequence: Synthetic oligonucleotide
uaagcaugcauugagaugu

SEQ ID NO: 61807 - RNA, 19 nt, Artificial Sequence
  Description of Artificial Sequence: Synthetic oligonucleotide
uucaagguuaaccaguugu

SEQ ID NO: 61808 - RNA, 19 nt, Artificial Sequence
  Description of Artificial Sequence: Synthetic oligonucleotide
aaccaaauacgcuaagaug

SEQ ID NO: 61809 - RNA, 19 nt, Artificial Sequence
  Description of Artificial Sequence: Synthetic oligonucleotide
auuauccuaagauguacac

SEQ ID NO: 61810 - RNA, 19 nt, Artificial Sequence
  Description of Artificial Sequence: Synthetic oligonucleotide
uuagguguuaacuugucgu

SEQ ID NO: 61811 - RNA, 19 nt, Artificial Sequence
  Description of Artificial Sequence: Synthetic oligonucleotide
uagaauuaguuuaaucucu

SEQ ID NO: 61812 - RNA, 19 nt, Artificial Sequence
  Description of Artificial Sequence: Synthetic oligonucleotide
uuagagacugcaaacaaau

SEQ ID NO: 61813 - RNA, 19 nt, Artificial Sequence
  Description of Artificial Sequence: Synthetic oligonucleotide
uacuuguacaacaugaaau

SEQ ID NO: 61814 - RNA, 19 nt, Artificial Sequence
  Description of Artificial Sequence: Synthetic oligonucleotide
aaagcacacacacacauuu

SEQ ID NO: 61815 - RNA, 19 nt, Artificial Sequence
  Description of Artificial Sequence: Synthetic oligonucleotide
auauuucggauuucacucc

SEQ ID NO: 61816 - RNA, 19 nt, Artificial Sequence
  Description of Artificial Sequence: Synthetic oligonucleotide
aaauguaaguuugagugca

SEQ ID NO: 61817 - RNA, 19 nt, Artificial Sequence
  Description of Artificial Sequence: Synthetic oligonucleotide
uuuaaucucuaugaaaacu

SEQ ID NO: 61818 - RNA, 19 nt, Artificial Sequence
  Description of Artificial Sequence: Synthetic oligonucleotide
aguacacucaaugaaggac

SEQ ID NO: 61819 - RNA, 19 nt, Artificial Sequence
  Description of Artificial Sequence: Synthetic oligonucleotide
agacaugcauuguacacac

SEQ ID NO: 61820 - RNA, 19 nt, Artificial Sequence
  Description of Artificial Sequence: Synthetic oligonucleotide
gauacuugcaucugcugcc

SEQ ID NO: 61821 - RNA, 19 nt, Artificial Sequence
  Description of Artificial Sequence: Synthetic oligonucleotide
auaaugucugcccagauua

SEQ ID NO: 61822 - RNA, 19 nt, Artificial Sequence
  Description of Artificial Sequence: Synthetic oligonucleotide
uaaauguaaguuugagugc

SEQ ID NO: 61823 - RNA, 19 nt, Artificial Sequence
  Description of Artificial Sequence: Synthetic oligonucleotide
aauacgcuaagauggugug

SEQ ID NO: 61824 - RNA, 19 nt, Artificial Sequence
  Description of Artificial Sequence: Synthetic oligonucleotide
aaaucuacugugcaugaaa

SEQ ID NO: 61825 - RNA, 19 nt, Artificial Sequence
  Description of Artificial Sequence: Synthetic oligonucleotide
aauuauggcucugucauga

SEQ ID NO: 61826 - RNA, 19 nt, Artificial Sequence
  Description of Artificial Sequence: Synthetic oligonucleotide
aacugcuaaugauaaacgu

SEQ ID NO: 61827 - RNA, 19 nt, Artificial Sequence
  Description of Artificial Sequence: Synthetic oligonucleotide
uguguauaaccacuguaca

SEQ ID NO: 61828 - RNA, 19 nt, Artificial Sequence
  Description of Artificial Sequence: Synthetic oligonucleotide
aauucggcaaguucugcug

SEQ ID NO: 61829 - RNA, 19 nt, Artificial Sequence
  Description of Artificial Sequence: Synthetic oligonucleotide
uguuaaccaaugaauauua

SEQ ID NO: 61830 - RNA, 19 nt, Artificial Sequence
  Description of Artificial Sequence: Synthetic oligonucleotide
uacaugacauuacacugcc

SEQ ID NO: 61831 - RNA, 19 nt, Artificial Sequence
  Description of Artificial Sequence: Synthetic oligonucleotide
uuagagauguaauuguaau

SEQ ID NO: 61832 - RNA, 19 nt, Artificial Sequence
  Description of Artificial Sequence: Synthetic oligonucleotide
ugauaaacguuagaauuag

SEQ ID NO: 61833 - RNA, 19 nt, Artificial Sequence
  Description of Artificial Sequence: Synthetic oligonucleotide
ucaaagcacacacacacau

SEQ ID NO: 61834 - RNA, 19 nt, Artificial Sequence
  Description of Artificial Sequence: Synthetic oligonucleotide
uaauuccgaacuuaaugcc

SEQ ID NO: 61835 - RNA, 19 nt, Artificial Sequence
  Description of Artificial Sequence: Synthetic oligonucleotide
aauuaugcuaaugggaaaa

SEQ ID NO: 61836 - RNA, 19 nt, Artificial Sequence
  Description of Artificial Sequence: Synthetic oligonucleotide
gagugcauaauaccaaaug

SEQ ID NO: 61837 - RNA, 19 nt, Artificial Sequence
  Description of Artificial Sequence: Synthetic oligonucleotide
ucauuaacuaagcaugcau

SEQ ID NO: 61838 - RNA, 19 nt, Artificial Sequence
  Description of Artificial Sequence: Synthetic oligonucleotide
uuucggauuucacuccagg

SEQ ID NO: 61839 - RNA, 19 nt, Artificial Sequence
  Description of Artificial Sequence: Synthetic oligonucleotide
ugugcaugaaaacugcuua

SEQ ID NO: 61840 - RNA, 19 nt, Artificial Sequence
  Description of Artificial Sequence: Synthetic oligonucleotide
augacaccagaauuauggc

SEQ ID NO: 61841 - RNA, 19 nt, Artificial Sequence
  Description of Artificial Sequence: Synthetic oligonucleotide
uauaaucuccauacuuggc

SEQ ID NO: 61842 - RNA, 19 nt, Artificial Sequence
  Description of Artificial Sequence: Synthetic oligonucleotide
uucggauuucacuccaggg

SEQ ID NO: 61843 - RNA, 19 nt, Artificial Sequence
  Description of Artificial Sequence: Synthetic oligonucleotide
uuugagugcauaauaccaa

SEQ ID NO: 61844 - RNA, 19 nt, Artificial Sequence
  Description of Artificial Sequence: Synthetic oligonucleotide
uggugugcuauucaucaag

SEQ ID NO: 61845 - RNA, 19 nt, Artificial Sequence
  Description of Artificial Sequence: Synthetic oligonucleotide
cuuuguauugccuugucga

SEQ ID NO: 61846 - RNA, 19 nt, Artificial Sequence
  Description of Artificial Sequence: Synthetic oligonucleotide
aauacucaucucauuagug

SEQ ID NO: 61847 - RNA, 19 nt, Artificial Sequence
  Description of Artificial Sequence: Synthetic oligonucleotide
ugucgaaucugucgcagag

SEQ ID NO: 61848 - RNA, 19 nt, Artificial Sequence
  Description of Artificial Sequence: Synthetic oligonucleotide
aaauacgcuaagauggugu

SEQ ID NO: 61849 - RNA, 19 nt, Artificial Sequence
  Description of Artificial Sequence: Synthetic oligonucleotide
cagucaacuggcaugagug

SEQ ID NO: 61850 - RNA, 19 nt, Artificial Sequence
  Description of Artificial Sequence: Synthetic oligonucleotide
cagaauucuacuagugagc

SEQ ID NO: 61851 - RNA, 19 nt, Artificial Sequence
  Description of Artificial Sequence: Synthetic oligonucleotide
uuacuuguacaacaugaaa

SEQ ID NO: 61852 - RNA, 19 nt, Artificial Sequence
  Description of Artificial Sequence: Synthetic oligonucleotide
aacagacaugcauuguaca

SEQ ID NO: 61853 - RNA, 19 nt, Artificial Sequence
  Description of Artificial Sequence: Synthetic oligonucleotide
uguuaacuugucgucaugc

SEQ ID NO: 61854 - RNA, 19 nt, Artificial Sequence
  Description of Artificial Sequence: Synthetic oligonucleotide
uuauugauucucagacgag

SEQ ID NO: 61855 - RNA, 19 nt, Artificial Sequence
  Description of Artificial Sequence: Synthetic oligonucleotide
gguaguauuacuuucuuaa

SEQ ID NO: 61856 - RNA, 19 nt, Artificial Sequence
  Description of Artificial Sequence: Synthetic oligonucleotide
auucggcaaguucugcugc

SEQ ID NO: 61857 - RNA, 19 nt, Artificial Sequence
  Description of Artificial Sequence: Synthetic oligonucleotide
aauggcaauuguaauagau

SEQ ID NO: 61858 - RNA, 19 nt, Artificial Sequence
  Description of Artificial Sequence: Synthetic oligonucleotide
uguacaacagucacuucaa

SEQ ID NO: 61859 - RNA, 19 nt, Artificial Sequence
  Description of Artificial Sequence: Synthetic oligonucleotide
agucaacuggcaugagugc

SEQ ID NO: 61860 - RNA, 19 nt, Artificial Sequence
  Description of Artificial Sequence: Synthetic oligonucleotide
ugcaaacgggaaaucagug

SEQ ID NO: 61861 - RNA, 19 nt, Artificial Sequence
  Description of Artificial Sequence: Synthetic oligonucleotide
uaagaguaucuuucuagcu

SEQ ID NO: 61862 - RNA, 19 nt, Artificial Sequence
  Description of Artificial Sequence: Synthetic oligonucleotide
auaagacguaauugaaaug

SEQ ID NO: 61863 - RNA, 19 nt, Artificial Sequence
  Description of Artificial Sequence: Synthetic oligonucleotide
uuccuuuugugaauucggc

SEQ ID NO: 61864 - RNA, 19 nt, Artificial Sequence
  Description of Artificial Sequence: Synthetic oligonucleotide
gucuguuuaccucaauacc

SEQ ID NO: 61865 - RNA, 19 nt, Artificial Sequence
  Description of Artificial Sequence: Synthetic oligonucleotide
ucaagguuaaccaguuguc

SEQ ID NO: 61866 - RNA, 19 nt, Artificial Sequence
  Description of Artificial Sequence: Synthetic oligonucleotide
uauuucggauuucacucca

SEQ ID NO: 61867 - RNA, 19 nt, Artificial Sequence
  Description of Artificial Sequence: Synthetic oligonucleotide
uauaugaacaugugcucuc

SEQ ID NO: 61868 - RNA, 19 nt, Artificial Sequence
  Description of Artificial Sequence: Synthetic oligonucleotide
uccaucauugaaucuuccc

SEQ ID NO: 61869 - RNA, 19 nt, Artificial Sequence
  Description of Artificial Sequence: Synthetic oligonucleotide
agguacuucaugaucaaag

SEQ ID NO: 61870 - RNA, 19 nt, Artificial Sequence
  Description of Artificial Sequence: Synthetic oligonucleotide
aagguuaaccaguugucuu

SEQ ID NO: 61871 - RNA, 19 nt, Artificial Sequence
  Description of Artificial Sequence: Synthetic oligonucleotide
cauauaaucugaacacauc

SEQ ID NO: 61872 - RNA, 19 nt, Artificial Sequence
  Description of Artificial Sequence: Synthetic oligonucleotide
agacgaggagcauagaaaa

SEQ ID NO: 61873 - RNA, 19 nt, Artificial Sequence
  Description of Artificial Sequence: Synthetic oligonucleotide
cacacacacacauuuauca

SEQ ID NO: 61874 - RNA, 19 nt, Artificial Sequence
  Description of Artificial Sequence: Synthetic oligonucleotide
uggaacauagcugaaccac

SEQ ID NO: 61875 - RNA, 19 nt, Artificial Sequence
  Description of Artificial Sequence: Synthetic oligonucleotide
aauuccgaacuuaaugccu

SEQ ID NO: 61876 - RNA, 19 nt, Artificial Sequence
  Description of Artificial Sequence: Synthetic oligonucleotide
cuuaucacggccugcuuug

SEQ ID NO: 61877 - RNA, 19 nt, Artificial Sequence
  Description of Artificial Sequence: Synthetic oligonucleotide
agaauucuacuagugagca

SEQ ID NO: 61878 - RNA, 19 nt, Artificial Sequence
  Description of Artificial Sequence: Synthetic oligonucleotide
auaaacguuagaauuaguu

SEQ ID NO: 61879 - RNA, 19 nt, Artificial Sequence
  Description of Artificial Sequence: Synthetic oligonucleotide
acaugauugagacugucua

SEQ ID NO: 61880 - RNA, 19 nt, Artificial Sequence
  Description of Artificial Sequence: Synthetic oligonucleotide
uacuagugagcacagucaa

SEQ ID NO: 61881 - RNA, 19 nt, Artificial Sequence
  Description of Artificial Sequence: Synthetic oligonucleotide
uauugcucuagugcuuugg

SEQ ID NO: 61882 - RNA, 19 nt, Artificial Sequence
  Description of Artificial Sequence: Synthetic oligonucleotide
uguguuuccgucacccgcu

SEQ ID NO: 61883 - RNA, 19 nt, Artificial Sequence
  Description of Artificial Sequence: Synthetic oligonucleotide
aagacguaauugaaaugag

SEQ ID NO: 61884 - RNA, 19 nt, Artificial Sequence
  Description of Artificial Sequence: Synthetic oligonucleotide
ugucgcagagucuuguacu

SEQ ID NO: 61885 - RNA, 19 nt, Artificial Sequence
  Description of Artificial Sequence: Synthetic oligonucleotide
gaacuuaaugccuggagcu

SEQ ID NO: 61886 - RNA, 19 nt, Artificial Sequence
  Description of Artificial Sequence: Synthetic oligonucleotide
agacauggucauuagugcu

SEQ ID NO: 61887 - RNA, 19 nt, Artificial Sequence
  Description of Artificial Sequence: Synthetic oligonucleotide
uuuguauugccuugucgaa

SEQ ID NO: 61888 - RNA, 19 nt, Artificial Sequence
  Description of Artificial Sequence: Synthetic oligonucleotide
ugggaugcauuccaucgca

SEQ ID NO: 61889 - RNA, 19 nt, Artificial Sequence
  Description of Artificial Sequence: Synthetic oligonucleotide
aacauagcugaaccacaca

SEQ ID NO: 61890 - RNA, 19 nt, Artificial Sequence
  Description of Artificial Sequence: Synthetic oligonucleotide
acugucuauggauaacaga

SEQ ID NO: 61891 - RNA, 19 nt, Artificial Sequence
  Description of Artificial Sequence: Synthetic oligonucleotide
ugucauuagccagguaucc

SEQ ID NO: 61892 - RNA, 19 nt, Artificial Sequence
  Description of Artificial Sequence: Synthetic oligonucleotide
uguaacaacugguguagua

SEQ ID NO: 61893 - RNA, 19 nt, Artificial Sequence
  Description of Artificial Sequence: Synthetic oligonucleotide
acugcuuaauaaaauggca

SEQ ID NO: 61894 - RNA, 19 nt, Artificial Sequence
  Description of Artificial Sequence: Synthetic oligonucleotide
uuuuagguguuaacuuguc

SEQ ID NO: 61895 - RNA, 19 nt, Artificial Sequence
  Description of Artificial Sequence: Synthetic oligonucleotide
acaacugguguaguaauga

SEQ ID NO: 61896 - RNA, 19 nt, Artificial Sequence
  Description of Artificial Sequence: Synthetic oligonucleotide
uggacaacucggcacuggc

SEQ ID NO: 61897 - RNA, 19 nt, Artificial Sequence
  Description of Artificial Sequence: Synthetic oligonucleotide
gaccauacaugacauuaca

SEQ ID NO: 61898 - RNA, 19 nt, Artificial Sequence
  Description of Artificial Sequence: Synthetic oligonucleotide
auaccucauuuuaaacacc

SEQ ID NO: 61899 - RNA, 19 nt, Artificial Sequence
  Description of Artificial Sequence: Synthetic oligonucleotide
agcacacacacacauuuau

SEQ ID NO: 61900 - RNA, 19 nt, Artificial Sequence
  Description of Artificial Sequence: Synthetic oligonucleotide
uagguguuaacuugucguc

SEQ ID NO: 61901 - RNA, 19 nt, Artificial Sequence
  Description of Artificial Sequence: Synthetic oligonucleotide
gacguaauugaaaugagau

SEQ ID NO: 61902 - RNA, 19 nt, Artificial Sequence
  Description of Artificial Sequence: Synthetic oligonucleotide
guaagugaucuguaugaca

SEQ ID NO: 61903 - RNA, 19 nt, Artificial Sequence
  Description of Artificial Sequence: Synthetic oligonucleotide
auugcuauaugaacaugug

SEQ ID NO: 61904 - RNA, 19 nt, Artificial Sequence
  Description of Artificial Sequence: Synthetic oligonucleotide
acauauaaucugaacacau

SEQ ID NO: 61905 - RNA, 19 nt, Artificial Sequence
  Description of Artificial Sequence: Synthetic oligonucleotide
uggcuuggacagcauauga

SEQ ID NO: 61906 - RNA, 19 nt, Artificial Sequence
  Description of Artificial Sequence: Synthetic oligonucleotide
aacaacugguguaguaaug

SEQ ID NO: 61907 - RNA, 19 nt, Artificial Sequence
  Description of Artificial Sequence: Synthetic oligonucleotide
acagucaacuggcaugagu

SEQ ID NO: 61908 - RNA, 19 nt, Artificial Sequence
  Description of Artificial Sequence: Synthetic oligonucleotide
augucugcccagauuauuc

SEQ ID NO: 61909 - RNA, 19 nt, Artificial Sequence
  Description of Artificial Sequence: Synthetic oligonucleotide
aaauccuaaucuacaaaua

SEQ ID NO: 61910 - RNA, 19 nt, Artificial Sequence
  Description of Artificial Sequence: Synthetic oligonucleotide
cauuauccuaagauguaca

SEQ ID NO: 61911 - RNA, 19 nt, Artificial Sequence
  Description of Artificial Sequence: Synthetic oligonucleotide
caucaagaauaaaggauga

SEQ ID NO: 61912 - RNA, 19 nt, Artificial Sequence
  Description of Artificial Sequence: Synthetic oligonucleotide
auacgcuaagauggugugc

SEQ ID NO: 61913 - RNA, 19 nt, Artificial Sequence
  Description of Artificial Sequence: Synthetic oligonucleotide
gaacauagcugaaccacac

SEQ ID NO: 61914 - RNA, 19 nt, Artificial Sequence
  Description of Artificial Sequence: Synthetic oligonucleotide
ugacauuacacugccuuaa

SEQ ID NO: 61915 - RNA, 19 nt, Artificial Sequence
  Description of Artificial Sequence: Synthetic oligonucleotide
uccaguaagugaucuguau

SEQ ID NO: 61916 - RNA, 19 nt, Artificial Sequence
  Description of Artificial Sequence: Synthetic oligonucleotide
auuagagauguaauuguaa

SEQ ID NO: 61917 - RNA, 19 nt, Artificial Sequence
  Description of Artificial Sequence: Synthetic oligonucleotide
cugucauuagccagguauc

SEQ ID NO: 61918 - RNA, 19 nt, Artificial Sequence
  Description of Artificial Sequence: Synthetic oligonucleotide
uaacugguagccucucaac

SEQ ID NO: 61919 - RNA, 19 nt, Artificial Sequence
  Description of Artificial Sequence: Synthetic oligonucleotide
acguaauugaaaugagauu

SEQ ID NO: 61920 - RNA, 19 nt, Artificial Sequence
  Description of Artificial Sequence: Synthetic oligonucleotide
aucgcaucugcaaaggccu

SEQ ID NO: 61921 - RNA, 19 nt, Artificial Sequence
  Description of Artificial Sequence: Synthetic oligonucleotide
gguacuucaugaucaaaga

SEQ ID NO: 61922 - RNA, 19 nt, Artificial Sequence
  Description of Artificial Sequence: Synthetic oligonucleotide
auccuaaucuacaaauaga

SEQ ID NO: 61923 - RNA, 19 nt, Artificial Sequence
  Description of Artificial Sequence: Synthetic oligonucleotide
acugcuaaugauaaacguu

SEQ ID NO: 61924 - RNA, 19 nt, Artificial Sequence
  Description of Artificial Sequence: Synthetic oligonucleotide
gaauucuacuagugagcac

SEQ ID NO: 61925 - RNA, 19 nt, Artificial Sequence
  Description of Artificial Sequence: Synthetic oligonucleotide
agcaugcauugagaugucc

SEQ ID NO: 61926 - RNA, 19 nt, Artificial Sequence
  Description of Artificial Sequence: Synthetic oligonucleotide
guaacaacugguguaguaa

SEQ ID NO: 61927 - RNA, 19 nt, Artificial Sequence
  Description of Artificial Sequence: Synthetic oligonucleotide
acggccugcuuugacauuc

SEQ ID NO: 61928 - RNA, 19 nt, Artificial Sequence
  Description of Artificial Sequence: Synthetic oligonucleotide
uucuggugggcaauauauc

SEQ ID NO: 61929 - RNA, 19 nt, Artificial Sequence
  Description of Artificial Sequence: Synthetic oligonucleotide
uagaguaguaaggccuacc

SEQ ID NO: 61930 - RNA, 19 nt, Artificial Sequence
  Description of Artificial Sequence: Synthetic oligonucleotide
aucagacauggucauuagu

SEQ ID NO: 61931 - RNA, 19 nt, Artificial Sequence
  Description of Artificial Sequence: Synthetic oligonucleotide
cuugucgaaucugucgcag

SEQ ID NO: 61932 - RNA, 19 nt, Artificial Sequence
  Description of Artificial Sequence: Synthetic oligonucleotide
cucucaacugcuaaugaua

SEQ ID NO: 61933 - RNA, 19 nt, Artificial Sequence
  Description of Artificial Sequence: Synthetic oligonucleotide
cucacgcucuauucuuucc

SEQ ID NO: 61934 - RNA, 19 nt, Artificial Sequence
  Description of Artificial Sequence: Synthetic oligonucleotide
cuaagauggugugcuauuc

SEQ ID NO: 61935 - RNA, 19 nt, Artificial Sequence
  Description of Artificial Sequence: Synthetic oligonucleotide
agacguaauugaaaugaga

SEQ ID NO: 61936 - RNA, 19 nt, Artificial Sequence
  Description of Artificial Sequence: Synthetic oligonucleotide
caugcauuguacacacaca

SEQ ID NO: 61937 - RNA, 19 nt, Artificial Sequence
  Description of Artificial Sequence: Synthetic oligonucleotide
gaauucggcaaguucugcu

SEQ ID NO: 61938 - RNA, 19 nt, Artificial Sequence
  Description of Artificial Sequence: Synthetic oligonucleotide
augacauuacacugccuua

SEQ ID NO: 61939 - RNA, 19 nt, Artificial Sequence
  Description of Artificial Sequence: Synthetic oligonucleotide
auauauuaagcaaggccuu

SEQ ID NO: 61940 - RNA, 19 nt, Artificial Sequence
  Description of Artificial Sequence: Synthetic oligonucleotide
cgaacuuaaugccuggagc

SEQ ID NO: 61941 - RNA, 19 nt, Artificial Sequence
  Description of Artificial Sequence: Synthetic oligonucleotide
augcaaacgggaaaucagu

SEQ ID NO: 61942 - RNA, 19 nt, Artificial Sequence
  Description of Artificial Sequence: Synthetic oligonucleotide
gugaauucggcaaguucug

SEQ ID NO: 61943 - RNA, 19 nt, Artificial Sequence
  Description of Artificial Sequence: Synthetic oligonucleotide
aguaucaggcuuucuccuu

SEQ ID NO: 61944 - RNA, 19 nt, Artificial Sequence
  Description of Artificial Sequence: Synthetic oligonucleotide
caaauacgcuaagauggug

SEQ ID NO: 61945 - RNA, 19 nt, Artificial Sequence
  Description of Artificial Sequence: Synthetic oligonucleotide
agguguuaacuugucguca

SEQ ID NO: 61946 - RNA, 19 nt, Artificial Sequence
  Description of Artificial Sequence: Synthetic oligonucleotide
auuaugcuaaugggaaaau

SEQ ID NO: 61947 - RNA, 19 nt, Artificial Sequence
  Description of Artificial Sequence: Synthetic oligonucleotide
auggcaauuguaauagaua

SEQ ID NO: 61948 - RNA, 19 nt, Artificial Sequence
  Description of Artificial Sequence: Synthetic oligonucleotide
uaucacggccugcuuugac

SEQ ID NO: 61949 - RNA, 19 nt, Artificial Sequence
  Description of Artificial Sequence: Synthetic oligonucleotide
agguaguauuacuuucuua

SEQ ID NO: 61950 - RNA, 19 nt, Artificial Sequence
  Description of Artificial Sequence: Synthetic oligonucleotide
auaaggccaaaauccgcuu

SEQ ID NO: 61951 - RNA, 19 nt, Artificial Sequence
  Description of Artificial Sequence: Synthetic oligonucleotide
gccuuugcaagaauuuucc

SEQ ID NO: 61952 - RNA, 19 nt, Artificial Sequence
  Description of Artificial Sequence: Synthetic oligonucleotide
uuuguccuacaaaguucaa

SEQ ID NO: 61953 - RNA, 19 nt, Artificial Sequence
  Description of Artificial Sequence: Synthetic oligonucleotide
aauguaaguuugagugcau

SEQ ID NO: 61954 - RNA, 19 nt, Artificial Sequence
  Description of Artificial Sequence: Synthetic oligonucleotide
cagacaugcauuguacaca

SEQ ID NO: 61955 - RNA, 19 nt, Artificial Sequence
  Description of Artificial Sequence: Synthetic oligonucleotide
gugggcaauauaucucauc

SEQ ID NO: 61956 - RNA, 19 nt, Artificial Sequence
  Description of Artificial Sequence: Synthetic oligonucleotide
cauuaacuaagcaugcauu

SEQ ID NO: 61957 - RNA, 19 nt, Artificial Sequence
  Description of Artificial Sequence: Synthetic oligonucleotide
gacgaggagcauagaaaac

SEQ ID NO: 61958 - RNA, 19 nt, Artificial Sequence
  Description of Artificial Sequence: Synthetic oligonucleotide
uccuucgcauguacaguuc

SEQ ID NO: 61959 - RNA, 19 nt, Artificial Sequence
  Description of Artificial Sequence: Synthetic oligonucleotide
gucgucaugcucauaaaua

SEQ ID NO: 61960 - RNA, 19 nt, Artificial Sequence
  Description of Artificial Sequence: Synthetic oligonucleotide
cuugggcuaauuccgaacu

SEQ ID NO: 61961 - RNA, 19 nt, Artificial Sequence
  Description of Artificial Sequence: Synthetic oligonucleotide
uucucacgcucuauucuuu

SEQ ID NO: 61962 - RNA, 19 nt, Artificial Sequence
  Description of Artificial Sequence: Synthetic oligonucleotide
aagcaugcauugagauguc

SEQ ID NO: 61963 - RNA, 19 nt, Artificial Sequence
  Description of Artificial Sequence: Synthetic oligonucleotide
gcaaacgggaaaucaguga

SEQ ID NO: 61964 - RNA, 19 nt, Artificial Sequence
  Description of Artificial Sequence: Synthetic oligonucleotide
acgcuccaucaguucuucc

SEQ ID NO: 61965 - RNA, 19 nt, Artificial Sequence
  Description of Artificial Sequence: Synthetic oligonucleotide
cacuucaagguuaaccagu

SEQ ID NO: 61966 - RNA, 19 nt, Artificial Sequence
  Description of Artificial Sequence: Synthetic oligonucleotide
cucaaagcacacacacaca

SEQ ID NO: 61967 - RNA, 19 nt, Artificial Sequence
  Description of Artificial Sequence: Synthetic oligonucleotide
ggaaagugaaggcucauau

SEQ ID NO: 61968 - RNA, 19 nt, Artificial Sequence
  Description of Artificial Sequence: Synthetic oligonucleotide
gaaagugaaggcucauauu

SEQ ID NO: 61969 - RNA, 19 nt, Artificial Sequence
  Description of Artificial Sequence: Synthetic oligonucleotide
uccgaacuuaaugccugga

SEQ ID NO: 61970 - RNA, 19 nt, Artificial Sequence
  Description of Artificial Sequence: Synthetic oligonucleotide
cucccucucauguauggaa

SEQ ID NO: 61971 - RNA, 19 nt, Artificial Sequence
  Description of Artificial Sequence: Synthetic oligonucleotide
caucacgcccucacuggac

SEQ ID NO: 61972 - RNA, 19 nt, Artificial Sequence
  Description of Artificial Sequence: Synthetic oligonucleotide
ccauacaugacauuacacu

SEQ ID NO: 61973 - RNA, 19 nt, Artificial Sequence
  Description of Artificial Sequence: Synthetic oligonucleotide
auacuugcaucugcugccu

SEQ ID NO: 61974 - RNA, 19 nt, Artificial Sequence
  Description of Artificial Sequence: Synthetic oligonucleotide
ccauuauccuaagauguac

SEQ ID NO: 61975 - RNA, 19 nt, Artificial Sequence
  Description of Artificial Sequence: Synthetic oligonucleotide
ccgaacuuaaugccuggag

SEQ ID NO: 61976 - RNA, 19 nt, Artificial Sequence
  Description of Artificial Sequence: Synthetic oligonucleotide
cauuguacacacacaguau

SEQ ID NO: 61977 - RNA, 19 nt, Artificial Sequence
  Description of Artificial Sequence: Synthetic oligonucleotide
auaccagugagaacauaua

SEQ ID NO: 61978 - RNA, 19 nt, Artificial Sequence
  Description of Artificial Sequence: Synthetic oligonucleotide
uuaucacggccugcuuuga

SEQ ID NO: 61979 - RNA, 19 nt, Artificial Sequence
  Description of Artificial Sequence: Synthetic oligonucleotide
accauuauccuaagaugua

SEQ ID NO: 61980 - RNA, 19 nt, Artificial Sequence
  Description of Artificial Sequence: Synthetic oligonucleotide
uacuuaucacggccugcuu

SEQ ID NO: 61981 - RNA, 19 nt, Artificial Sequence
  Description of Artificial Sequence: Synthetic oligonucleotide
uucuacuagugagcacagu

SEQ ID NO: 61982 - RNA, 19 nt, Artificial Sequence
  Description of Artificial Sequence: Synthetic oligonucleotide
gauaaacguuagaauuagu

SEQ ID NO: 61983 - RNA, 19 nt, Artificial Sequence
  Description of Artificial Sequence: Synthetic oligonucleotide
agguguagugagguaguau

SEQ ID NO: 61984 - RNA, 19 nt, Artificial Sequence
  Description of Artificial Sequence: Synthetic oligonucleotide
guacuuaucacggccugcu

SEQ ID NO: 61985 - RNA, 19 nt, Artificial Sequence
  Description of Artificial Sequence: Synthetic oligonucleotide
aagcacacacacacauuua

SEQ ID NO: 61986 - RNA, 19 nt, Artificial Sequence
  Description of Artificial Sequence: Synthetic oligonucleotide
cauuagacaucguguuucu

SEQ ID NO: 61987 - RNA, 19 nt, Artificial Sequence
  Description of Artificial Sequence: Synthetic oligonucleotide
cguaauugaaaugagauuu

SEQ ID NO: 61988 - RNA, 19 nt, Artificial Sequence
  Description of Artificial Sequence: Synthetic oligonucleotide
gacagcauaugaagccaaa

SEQ ID NO: 61989 - RNA, 19 nt, Artificial Sequence
  Description of Artificial Sequence: Synthetic oligonucleotide
caagguuaaccaguugucu

SEQ ID NO: 61990 - RNA, 19 nt, Artificial Sequence
  Description of Artificial Sequence: Synthetic oligonucleotide
caaaauccgcuuauugauu

SEQ ID NO: 61991 - RNA, 19 nt, Artificial Sequence
  Description of Artificial Sequence: Synthetic oligonucleotide
cuucgcucguuggcgcucc

SEQ ID NO: 61992 - RNA, 19 nt, Artificial Sequence
  Description of Artificial Sequence: Synthetic oligonucleotide
uuuuagcaguaaggacuau

SEQ ID NO: 61993 - RNA, 19 nt, Artificial Sequence
  Description of Artificial Sequence: Synthetic oligonucleotide
cugguagccucucaacacu

SEQ ID NO: 61994 - RNA, 19 nt, Artificial Sequence
  Description of Artificial Sequence: Synthetic oligonucleotide
cacuggacaacucggcacu

SEQ ID NO: 61995 - RNA, 19 nt, Artificial Sequence
  Description of Artificial Sequence: Synthetic oligonucleotide
ucuucgcucguuggcgcuc

SEQ ID NO: 61996 - RNA, 19 nt, Artificial Sequence
  Description of Artificial Sequence: Synthetic oligonucleotide
ggucauuagugcuaauauu

SEQ ID NO: 61997 - RNA, 19 nt, Artificial Sequence
  Description of Artificial Sequence: Synthetic oligonucleotide
guuaaccaaugaauauuau

SEQ ID NO: 61998 - RNA, 19 nt, Artificial Sequence
  Description of Artificial Sequence: Synthetic oligonucleotide
aguuuucauuagacaucgu

SEQ ID NO: 61999 - RNA, 19 nt, Artificial Sequence
  Description of Artificial Sequence: Synthetic oligonucleotide
gcacacacacacauuuauc

SEQ ID NO: 62000 - RNA, 19 nt, Artificial Sequence
  Description of Artificial Sequence: Synthetic oligonucleotide
gacaugcauuguacacaca

SEQ ID NO: 62001 - RNA, 19 nt, Artificial Sequence
  Description of Artificial Sequence: Synthetic oligonucleotide
caacugguguaguaaugau

SEQ ID NO: 62002 - RNA, 19 nt, Artificial Sequence
  Description of Artificial Sequence: Synthetic oligonucleotide
cuagaucuugugcaaucuu

SEQ ID NO: 62003 - RNA, 19 nt, Artificial Sequence
  Description of Artificial Sequence: Synthetic oligonucleotide
ccuucgcauguacaguuca

SEQ ID NO: 62004 - RNA, 19 nt, Artificial Sequence
  Description of Artificial Sequence: Synthetic oligonucleotide
caaagcacacacacacauu

SEQ ID NO: 62005 - RNA, 19 nt, Artificial Sequence
  Description of Artificial Sequence: Synthetic oligonucleotide
gcucucaacugcuaaugau

SEQ ID NO: 62006 - RNA, 19 nt, Artificial Sequence
  Description of Artificial Sequence: Synthetic oligonucleotide
agacgcuccaucaguucuu

SEQ ID NO: 62007 - RNA, 19 nt, Artificial Sequence
  Description of Artificial Sequence: Synthetic oligonucleotide
gggcuaauuccgaacuuaa

SEQ ID NO: 62008 - RNA, 19 nt, Artificial Sequence
  Description of Artificial Sequence: Synthetic oligonucleotide
acgcuaagauggugugcua

SEQ ID NO: 62009 - RNA, 19 nt, Artificial Sequence
  Description of Artificial Sequence: Synthetic oligonucleotide
ucgcucguuggcgcuccug

SEQ ID NO: 62010 - RNA, 19 nt, Artificial Sequence
  Description of Artificial Sequence: Synthetic oligonucleotide
cuucgcauguacaguucau

SEQ ID NO: 62011 - RNA, 19 nt, Artificial Sequence
  Description of Artificial Sequence: Synthetic oligonucleotide
uucgcucguuggcgcuccu

SEQ ID NO: 62012 - RNA, 19 nt, Artificial Sequence
  Description of Artificial Sequence: Synthetic oligonucleotide
cgaaggcagcgcuucauca

SEQ ID NO: 62013 - RNA, 19 nt, Artificial Sequence
  Description of Artificial Sequence: Synthetic oligonucleotide
ccuugucgaaucugucgca

SEQ ID NO: 62014 - RNA, 19 nt, Artificial Sequence
  Description of Artificial Sequence: Synthetic oligonucleotide
caucucuggcuugggcuaa

SEQ ID NO: 62015 - RNA, 19 nt, Artificial Sequence
  Description of Artificial Sequence: Synthetic oligonucleotide
cugguguaguaaugauaau

SEQ ID NO: 62016 - RNA, 19 nt, Artificial Sequence
  Description of Artificial Sequence: Synthetic oligonucleotide
cucuucgcucguuggcgcu

SEQ ID NO: 62017 - RNA, 19 nt, Artificial Sequence
  Description of Artificial Sequence: Synthetic oligonucleotide
caauaguaucaggcuuucu

SEQ ID NO: 62018 - RNA, 19 nt, Artificial Sequence
  Description of Artificial Sequence: Synthetic oligonucleotide
gguuaaccaguugucuuuu

SEQ ID NO: 62019 - RNA, 19 nt, Artificial Sequence
  Description of Artificial Sequence: Synthetic oligonucleotide
gcauugagauguccaccau

SEQ ID NO: 62020 - RNA, 19 nt, Artificial Sequence
  Description of Artificial Sequence: Synthetic oligonucleotide
gggaugcauuccaucgcau

SEQ ID NO: 62021 - RNA, 19 nt, Artificial Sequence
  Description of Artificial Sequence: Synthetic oligonucleotide
gaaccuacaacauugaagg

SEQ ID NO: 62022 - RNA, 19 nt, Artificial Sequence
  Description of Artificial Sequence: Synthetic oligonucleotide
auauaaucagcucuaaccc

SEQ ID NO: 62023 - RNA, 19 nt, Artificial Sequence
  Description of Artificial Sequence: Synthetic oligonucleotide
aaauagaaauaaugcaacc

SEQ ID NO: 62024 - RNA, 19 nt, Artificial Sequence
  Description of Artificial Sequence: Synthetic oligonucleotide
gaaacuauagaacaguacc

SEQ ID NO: 62025 - RNA, 19 nt, Artificial Sequence
  Description of Artificial Sequence: Synthetic oligonucleotide
auucuuaucgaagagaccc

SEQ ID NO: 62026 - RNA, 19 nt, Artificial Sequence
  Description of Artificial Sequence: Synthetic oligonucleotide
acaacuauagcucagggag

SEQ ID NO: 62027 - RNA, 19 nt, Artificial Sequence
  Description of Artificial Sequence: Synthetic oligonucleotide
auagcauagucacagauac

SEQ ID NO: 62028 - RNA, 19 nt, Artificial Sequence
  Description of Artificial Sequence: Synthetic oligonucleotide
aagaauucuacccauauaa

SEQ ID NO: 62029 - RNA, 19 nt, Artificial Sequence
  Description of Artificial Sequence: Synthetic oligonucleotide
aacuucaacagauggugcc

SEQ ID NO: 62030 - RNA, 19 nt, Artificial Sequence
  Description of Artificial Sequence: Synthetic oligonucleotide
uuguaaauugauaugauuc

SEQ ID NO: 62031 - RNA, 19 nt, Artificial Sequence
  Description of Artificial Sequence: Synthetic oligonucleotide
uuuggauuaaguaaucucu

SEQ ID NO: 62032 - RNA, 19 nt, Artificial Sequence
  Description of Artificial Sequence: Synthetic oligonucleotide
cucuuuagagcuaagaagc

SEQ ID NO: 62033 - RNA, 19 nt, Artificial Sequence
  Description of Artificial Sequence: Synthetic oligonucleotide
agucuacuuauucagaagg

SEQ ID NO: 62034 - RNA, 19 nt, Artificial Sequence
  Description of Artificial Sequence: Synthetic oligonucleotide
ugcuauaauauaaucagcu

SEQ ID NO: 62035 - RNA, 19 nt, Artificial Sequence
  Description of Artificial Sequence: Synthetic oligonucleotide
uuacucuugacaacuauag

SEQ ID NO: 62036 - RNA, 19 nt, Artificial Sequence
  Description of Artificial Sequence: Synthetic oligonucleotide
acagauacgacgugagucc

SEQ ID NO: 62037 - RNA, 19 nt, Artificial Sequence
  Description of Artificial Sequence: Synthetic oligonucleotide
uguuucuacaugcucaaag

SEQ ID NO: 62038 - RNA, 19 nt, Artificial Sequence
  Description of Artificial Sequence: Synthetic oligonucleotide
uguacaagaaaugauuugc

SEQ ID NO: 62039 - RNA, 19 nt, Artificial Sequence
  Description of Artificial Sequence: Synthetic oligonucleotide
gaaaagagugucucgagcc

SEQ ID NO: 62040 - RNA, 19 nt, Artificial Sequence
  Description of Artificial Sequence: Synthetic oligonucleotide
uguucuuuaguguuggggc

SEQ ID NO: 62041 - RNA, 19 nt, Artificial Sequence
  Description of Artificial Sequence: Synthetic oligonucleotide
caaguuuuacccuauuucc

SEQ ID NO: 62042 - RNA, 19 nt, Artificial Sequence
  Description of Artificial Sequence: Synthetic oligonucleotide
ucuacuauuuauugaguag

SEQ ID NO: 62043 - RNA, 19 nt, Artificial Sequence
  Description of Artificial Sequence: Synthetic oligonucleotide
ucuacuagugggaagcaag

SEQ ID NO: 62044 - RNA, 19 nt, Artificial Sequence
  Description of Artificial Sequence: Synthetic oligonucleotide
uauaauauaaucagcucua

SEQ ID NO: 62045 - RNA, 19 nt, Artificial Sequence
  Description of Artificial Sequence: Synthetic oligonucleotide
acuagcaagacacagugcu

SEQ ID NO: 62046 - RNA, 19 nt, Artificial Sequence
  Description of Artificial Sequence: Synthetic oligonucleotide
ucauaaggaaauauauucu

SEQ ID NO: 62047 - RNA, 19 nt, Artificial Sequence
  Description of Artificial Sequence: Synthetic oligonucleotide
cuauauucuuaauaauugc

SEQ ID NO: 62048 - RNA, 19 nt, Artificial Sequence
  Description of Artificial Sequence: Synthetic oligonucleotide
uagagugugguuaaugcug

SEQ ID NO: 62049 - RNA, 19 nt, Artificial Sequence
  Description of Artificial Sequence: Synthetic oligonucleotide
uccauaguuacucuugaca

SEQ ID NO: 62050 - RNA, 19 nt, Artificial Sequence
  Description of Artificial Sequence: Synthetic oligonucleotide
aaaacccagaauuguuagg

SEQ ID NO: 62051 - RNA, 19 nt, Artificial Sequence
  Description of Artificial Sequence: Synthetic oligonucleotide
aaccguaauguauacuuug

SEQ ID NO: 62052 - RNA, 19 nt, Artificial Sequence
  Description of Artificial Sequence: Synthetic oligonucleotide
aaccuuaaucuaccaaggg

SEQ ID NO: 62053 - RNA, 19 nt, Artificial Sequence
  Description of Artificial Sequence: Synthetic oligonucleotide
uccaacaaagugcugccgg

SEQ ID NO: 62054 - RNA, 19 nt, Artificial Sequence
  Description of Artificial Sequence: Synthetic oligonucleotide
uuaaaguacaaaacccaga

SEQ ID NO: 62055 - RNA, 19 nt, Artificial Sequence
  Description of Artificial Sequence: Synthetic oligonucleotide
uaauguauacuuuguuucc

SEQ ID NO: 62056 - RNA, 19 nt, Artificial Sequence
  Description of Artificial Sequence: Synthetic oligonucleotide
uggauaggcaucaaguaga

SEQ ID NO: 62057 - RNA, 19 nt, Artificial Sequence
  Description of Artificial Sequence: Synthetic oligonucleotide
uuugauuguccuccguagg

SEQ ID NO: 62058 - RNA, 19 nt, Artificial Sequence
  Description of Artificial Sequence: Synthetic oligonucleotide
aauucuacccauauaagaa

SEQ ID NO: 62059 - RNA, 19 nt, Artificial Sequence
  Description of Artificial Sequence: Synthetic oligonucleotide
uguuccuuaaaacauccuc

SEQ ID NO: 62060 - RNA, 19 nt, Artificial Sequence
  Description of Artificial Sequence: Synthetic oligonucleotide
uaguguuugagagacagug

SEQ ID NO: 62061 - RNA, 19 nt, Artificial Sequence
  Description of Artificial Sequence: Synthetic oligonucleotide
gaauucuacccauauaaga

SEQ ID NO: 62062 - RNA, 19 nt, Artificial Sequence
  Description of Artificial Sequence: Synthetic oligonucleotide
ugccauuucucacaagucc

SEQ ID NO: 62063 - RNA, 19 nt, Artificial Sequence
  Description of Artificial Sequence: Synthetic oligonucleotide
cacaagaugagacucaauc

SEQ ID NO: 62064 - RNA, 19 nt, Artificial Sequence
  Description of Artificial Sequence: Synthetic oligonucleotide
uccgguuucaaacagucaa

SEQ ID NO: 62065 - RNA, 19 nt, Artificial Sequence
  Description of Artificial Sequence: Synthetic oligonucleotide
cuuggauugggaugcaagg

SEQ ID NO: 62066 - RNA, 19 nt, Artificial Sequence
  Description of Artificial Sequence: Synthetic oligonucleotide
agcaguaauagagauuugg

SEQ ID NO: 62067 - RNA, 19 nt, Artificial Sequence
  Description of Artificial Sequence: Synthetic oligonucleotide
gacuaaucacaauccauag

SEQ ID NO: 62068 - RNA, 19 nt, Artificial Sequence
  Description of Artificial Sequence: Synthetic oligonucleotide
auagaaauaaugcaaccuu

SEQ ID NO: 62069 - RNA, 19 nt, Artificial Sequence
  Description of Artificial Sequence: Synthetic oligonucleotide
ugaguuacguccaugccgu

SEQ ID NO: 62070 - RNA, 19 nt, Artificial Sequence
  Description of Artificial Sequence: Synthetic oligonucleotide
ugaccgauucuucuuggcg

SEQ ID NO: 62071 - RNA, 19 nt, Artificial Sequence
  Description of Artificial Sequence: Synthetic oligonucleotide
auucuacccauauaagaag

SEQ ID NO: 62072 - RNA, 19 nt, Artificial Sequence
  Description of Artificial Sequence: Synthetic oligonucleotide
auaggaguagcuuacacuu

SEQ ID NO: 62073 - RNA, 19 nt, Artificial Sequence
  Description of Artificial Sequence: Synthetic oligonucleotide
ucuaaauuguuaccacuga

SEQ ID NO: 62074 - RNA, 19 nt, Artificial Sequence
  Description of Artificial Sequence: Synthetic oligonucleotide
cugaguuacguccaugccg

SEQ ID NO: 62075 - RNA, 19 nt, Artificial Sequence
  Description of Artificial Sequence: Synthetic oligonucleotide
uacuuauucagaagggaac

SEQ ID NO: 62076 - RNA, 19 nt, Artificial Sequence
  Description of Artificial Sequence: Synthetic oligonucleotide
aaugucuacuagugggaag

SEQ ID NO: 62077 - RNA, 19 nt, Artificial Sequence
  Description of Artificial Sequence: Synthetic oligonucleotide
auuugauuguccuccguag

SEQ ID NO: 62078 - RNA, 19 nt, Artificial Sequence
  Description of Artificial Sequence: Synthetic oligonucleotide
augacaguaacacuuggga

SEQ ID NO: 62079 - RNA, 19 nt, Artificial Sequence
  Description of Artificial Sequence: Synthetic oligonucleotide
agaggacuaaucacaaucc

SEQ ID NO: 62080 - RNA, 19 nt, Artificial Sequence
  Description of Artificial Sequence: Synthetic oligonucleotide
uagcaauaaaacuuuggcu

SEQ ID NO: 62081 - RNA, 19 nt, Artificial Sequence
  Description of Artificial Sequence: Synthetic oligonucleotide
uuagggauaguguuugaga

SEQ ID NO: 62082 - RNA, 19 nt, Artificial Sequence
  Description of Artificial Sequence: Synthetic oligonucleotide
agaagugcagguaagaacu

SEQ ID NO: 62083 - RNA, 19 nt, Artificial Sequence
  Description of Artificial Sequence: Synthetic oligonucleotide
caucugaccaacacguacg

SEQ ID NO: 62084 - RNA, 19 nt, Artificial Sequence
  Description of Artificial Sequence: Synthetic oligonucleotide
uccauaagauauuagguuu

SEQ ID NO: 62085 - RNA, 19 nt, Artificial Sequence
  Description of Artificial Sequence: Synthetic oligonucleotide
uauaaucagcucuaaccca

SEQ ID NO: 62086 - RNA, 19 nt, Artificial Sequence
  Description of Artificial Sequence: Synthetic oligonucleotide
agaguuuuguaaccaauca

SEQ ID NO: 62087 - RNA, 19 nt, Artificial Sequence
  Description of Artificial Sequence: Synthetic oligonucleotide
uguguguguaacacaguag

SEQ ID NO: 62088 - RNA, 19 nt, Artificial Sequence
  Description of Artificial Sequence: Synthetic oligonucleotide
ugacaacuauagcucaggg

SEQ ID NO: 62089 - RNA, 19 nt, Artificial Sequence
  Description of Artificial Sequence: Synthetic oligonucleotide
acaagaugagacucaauca

SEQ ID NO: 62090 - RNA, 19 nt, Artificial Sequence
  Description of Artificial Sequence: Synthetic oligonucleotide
auaaucagcucuaacccac

SEQ ID NO: 62091 - RNA, 19 nt, Artificial Sequence
  Description of Artificial Sequence: Synthetic oligonucleotide
uugaaugccucauacugga

SEQ ID NO: 62092 - RNA, 19 nt, Artificial Sequence
  Description of Artificial Sequence: Synthetic oligonucleotide
gaugagacucaaucaauac

SEQ ID NO: 62093 - RNA, 19 nt, Artificial Sequence
  Description of Artificial Sequence: Synthetic oligonucleotide
gauaguccaagcaaagcgc

SEQ ID NO: 62094 - RNA, 19 nt, Artificial Sequence
  Description of Artificial Sequence: Synthetic oligonucleotide
uaucgguuuugaaaguuca

SEQ ID NO: 62095 - RNA, 19 nt, Artificial Sequence
  Description of Artificial Sequence: Synthetic oligonucleotide
auuuaaaaccaguguccgg

SEQ ID NO: 62096 - RNA, 19 nt, Artificial Sequence
  Description of Artificial Sequence: Synthetic oligonucleotide
cucuaugcuggcuaggaag

SEQ ID NO: 62097 - RNA, 19 nt, Artificial Sequence
  Description of Artificial Sequence: Synthetic oligonucleotide
aaaagagugucucgagccu

SEQ ID NO: 62098 - RNA, 19 nt, Artificial Sequence
  Description of Artificial Sequence: Synthetic oligonucleotide
uaguaguaggccuuuugag

SEQ ID NO: 62099 - RNA, 19 nt, Artificial Sequence
  Description of Artificial Sequence: Synthetic oligonucleotide
uacaaaucgucggaaaacc

SEQ ID NO: 62100 - RNA, 19 nt, Artificial Sequence
  Description of Artificial Sequence: Synthetic oligonucleotide
agaugcucauucuccagac

SEQ ID NO: 62101 - RNA, 19 nt, Artificial Sequence
  Description of Artificial Sequence: Synthetic oligonucleotide
agggagaggguuuaaagga

SEQ ID NO: 62102 - RNA, 19 nt, Artificial Sequence
  Description of Artificial Sequence: Synthetic oligonucleotide
aguuccuaaggaugauggc

SEQ ID NO: 62103 - RNA, 19 nt, Artificial Sequence
  Description of Artificial Sequence: Synthetic oligonucleotide
agaaacuauagaacaguac

SEQ ID NO: 62104 - RNA, 19 nt, Artificial Sequence
  Description of Artificial Sequence: Synthetic oligonucleotide
gcuaauagcauagucacag

SEQ ID NO: 62105 - RNA, 19 nt, Artificial Sequence
  Description of Artificial Sequence: Synthetic oligonucleotide
uuuagggauaguguuugag

SEQ ID NO: 62106 - RNA, 19 nt, Artificial Sequence
  Description of Artificial Sequence: Synthetic oligonucleotide
ugugguuaaugcuggcuag

SEQ ID NO: 62107 - RNA, 19 nt, Artificial Sequence
  Description of Artificial Sequence: Synthetic oligonucleotide
uccaagcaagcauugauuc

SEQ ID NO: 62108 - RNA, 19 nt, Artificial Sequence
  Description of Artificial Sequence: Synthetic oligonucleotide
cucuugacaacuauagcuc

SEQ ID NO: 62109 - RNA, 19 nt, Artificial Sequence
  Description of Artificial Sequence: Synthetic oligonucleotide
accuuaaucuaccaagggu

SEQ ID NO: 62110 - RNA, 19 nt, Artificial Sequence
  Description of Artificial Sequence: Synthetic oligonucleotide
ucuacuuauucagaaggga

SEQ ID NO: 62111 - RNA, 19 nt, Artificial Sequence
  Description of Artificial Sequence: Synthetic oligonucleotide
agcgcaguaucacaucuuc

SEQ ID NO: 62112 - RNA, 19 nt, Artificial Sequence
  Description of Artificial Sequence: Synthetic oligonucleotide
aaaucgucggaaaaccuca

SEQ ID NO: 62113 - RNA, 19 nt, Artificial Sequence
  Description of Artificial Sequence: Synthetic oligonucleotide
ucuugacaacuauagcuca

SEQ ID NO: 62114 - RNA, 19 nt, Artificial Sequence
  Description of Artificial Sequence: Synthetic oligonucleotide
uagucuacuuauucagaag

SEQ ID NO: 62115 - RNA, 19 nt, Artificial Sequence
  Description of Artificial Sequence: Synthetic oligonucleotide
uccgucaguaaaacuuagg

SEQ ID NO: 62116 - RNA, 19 nt, Artificial Sequence
  Description of Artificial Sequence: Synthetic oligonucleotide
uuaucgaagagaccccagu

SEQ ID NO: 62117 - RNA, 19 nt, Artificial Sequence
  Description of Artificial Sequence: Synthetic oligonucleotide
ucuuugugauuguaaacaa

SEQ ID NO: 62118 - RNA, 19 nt, Artificial Sequence
  Description of Artificial Sequence: Synthetic oligonucleotide
ucacaauccauaguuacuc

SEQ ID NO: 62119 - RNA, 19 nt, Artificial Sequence
  Description of Artificial Sequence: Synthetic oligonucleotide
aggauuacccaagugaaca

SEQ ID NO: 62120 - RNA, 19 nt, Artificial Sequence
  Description of Artificial Sequence: Synthetic oligonucleotide
ucuuuagagcuaagaagcu

SEQ ID NO: 62121 - RNA, 19 nt, Artificial Sequence
  Description of Artificial Sequence: Synthetic oligonucleotide
ucuacccauauaagaagga

SEQ ID NO: 62122 - RNA, 19 nt, Artificial Sequence
  Description of Artificial Sequence: Synthetic oligonucleotide
aagaaaugauuugccacug

SEQ ID NO: 62123 - RNA, 19 nt, Artificial Sequence
  Description of Artificial Sequence: Synthetic oligonucleotide
caagcauugauuccuugac

SEQ ID NO: 62124 - RNA, 19 nt, Artificial Sequence
  Description of Artificial Sequence: Synthetic oligonucleotide
uuauugaguagaguguggu

SEQ ID NO: 62125 - RNA, 19 nt, Artificial Sequence
  Description of Artificial Sequence: Synthetic oligonucleotide
caagugaacacuagcaaga

SEQ ID NO: 62126 - RNA, 19 nt, Artificial Sequence
  Description of Artificial Sequence: Synthetic oligonucleotide
aguaguaguaggccuuuug

SEQ ID NO: 62127 - RNA, 19 nt, Artificial Sequence
  Description of Artificial Sequence: Synthetic oligonucleotide
caaaucgucggaaaaccuc

SEQ ID NO: 62128 - RNA, 19 nt, Artificial Sequence
  Description of Artificial Sequence: Synthetic oligonucleotide
uguaaccaaucacuuauuu

SEQ ID NO: 62129 - RNA, 19 nt, Artificial Sequence
  Description of Artificial Sequence: Synthetic oligonucleotide
uacccuauuuccuuccuac

SEQ ID NO: 62130 - RNA, 19 nt, Artificial Sequence
  Description of Artificial Sequence: Synthetic oligonucleotide
guugugaagagucugagau

SEQ ID NO: 62131 - RNA, 19 nt, Artificial Sequence
  Description of Artificial Sequence: Synthetic oligonucleotide
ucgaagagaccccaguaaa

SEQ ID NO: 62132 - RNA, 19 nt, Artificial Sequence
  Description of Artificial Sequence: Synthetic oligonucleotide
acuaaucacaauccauagu

SEQ ID NO: 62133 - RNA, 19 nt, Artificial Sequence
  Description of Artificial Sequence: Synthetic oligonucleotide
uguccgguuucaaacaguc

SEQ ID NO: 62134 - RNA, 19 nt, Artificial Sequence
  Description of Artificial Sequence: Synthetic oligonucleotide
caggucaugacaguaacac

SEQ ID NO: 62135 - RNA, 19 nt, Artificial Sequence
  Description of Artificial Sequence: Synthetic oligonucleotide
uccucugauuggcaaaaug

SEQ ID NO: 62136 - RNA, 19 nt, Artificial Sequence
  Description of Artificial Sequence: Synthetic oligonucleotide
cacaggauuacccaaguga

SEQ ID NO: 62137 - RNA, 19 nt, Artificial Sequence
  Description of Artificial Sequence: Synthetic oligonucleotide
augaccgauucuucuuggc

SEQ ID NO: 62138 - RNA, 19 nt, Artificial Sequence
  Description of Artificial Sequence: Synthetic oligonucleotide
gaagguuugcuacaaggaa

SEQ ID NO: 62139 - RNA, 19 nt, Artificial Sequence
  Description of Artificial Sequence: Synthetic oligonucleotide
uucuuaucgaagagacccc

SEQ ID NO: 62140 - RNA, 19 nt, Artificial Sequence
  Description of Artificial Sequence: Synthetic oligonucleotide
ugucucgagccuuggauug

SEQ ID NO: 62141 - RNA, 19 nt, Artificial Sequence
  Description of Artificial Sequence: Synthetic oligonucleotide
cagaagugcagguaagaac

SEQ ID NO: 62142 - RNA, 19 nt, Artificial Sequence
  Description of Artificial Sequence: Synthetic oligonucleotide
uacccaagugaacacuagc

SEQ ID NO: 62143 - RNA, 19 nt, Artificial Sequence
  Description of Artificial Sequence: Synthetic oligonucleotide
aacauccucugauuggcaa

SEQ ID NO: 62144 - RNA, 19 nt, Artificial Sequence
  Description of Artificial Sequence: Synthetic oligonucleotide
aaguuuuacccuauuuccu

SEQ ID NO: 62145 - RNA, 19 nt, Artificial Sequence
  Description of Artificial Sequence: Synthetic oligonucleotide
uuacccaagugaacacuag

SEQ ID NO: 62146 - RNA, 19 nt, Artificial Sequence
  Description of Artificial Sequence: Synthetic oligonucleotide
ccuuaaucuaccaaggguc

SEQ ID NO: 62147 - RNA, 19 nt, Artificial Sequence
  Description of Artificial Sequence: Synthetic oligonucleotide
aacacguacgugugugugu

SEQ ID NO: 62148 - RNA, 19 nt, Artificial Sequence
  Description of Artificial Sequence: Synthetic oligonucleotide
uccuaaagacacaacucuc

SEQ ID NO: 62149 - RNA, 19 nt, Artificial Sequence
  Description of Artificial Sequence: Synthetic oligonucleotide
ugcauucuuaucgaagaga

SEQ ID NO: 62150 - RNA, 19 nt, Artificial Sequence
  Description of Artificial Sequence: Synthetic oligonucleotide
cuugacaacuauagcucag

SEQ ID NO: 62151 - RNA, 19 nt, Artificial Sequence
  Description of Artificial Sequence: Synthetic oligonucleotide
cuaacuuuagcucucaaau

SEQ ID NO: 62152 - RNA, 19 nt, Artificial Sequence
  Description of Artificial Sequence: Synthetic oligonucleotide
guguguguguguaacacag

SEQ ID NO: 62153 - RNA, 19 nt, Artificial Sequence
  Description of Artificial Sequence: Synthetic oligonucleotide
aguguccgguuucaaacag

SEQ ID NO: 62154 - RNA, 19 nt, Artificial Sequence
  Description of Artificial Sequence: Synthetic oligonucleotide
cuagaguuccuaaggauga

SEQ ID NO: 62155 - RNA, 19 nt, Artificial Sequence
  Description of Artificial Sequence: Synthetic oligonucleotide
auugaguagagugugguua

SEQ ID NO: 62156 - RNA, 19 nt, Artificial Sequence
  Description of Artificial Sequence: Synthetic oligonucleotide
aguuuuacccuauuuccuu

SEQ ID NO: 62157 - RNA, 19 nt, Artificial Sequence
  Description of Artificial Sequence: Synthetic oligonucleotide
cuaaucacaauccauaguu

SEQ ID NO: 62158 - RNA, 19 nt, Artificial Sequence
  Description of Artificial Sequence: Synthetic oligonucleotide
cagagcuuuguaauaauga

SEQ ID NO: 62159 - RNA, 19 nt, Artificial Sequence
  Description of Artificial Sequence: Synthetic oligonucleotide
gacaacuauagcucaggga

SEQ ID NO: 62160 - RNA, 19 nt, Artificial Sequence
  Description of Artificial Sequence: Synthetic oligonucleotide
guaguaguaggccuuuuga

SEQ ID NO: 62161 - RNA, 19 nt, Artificial Sequence
  Description of Artificial Sequence: Synthetic oligonucleotide
cuuaggcuacacuucuccc

SEQ ID NO: 62162 - RNA, 19 nt, Artificial Sequence
  Description of Artificial Sequence: Synthetic oligonucleotide
gauacgacgugaguccaag

SEQ ID NO: 62163 - RNA, 19 nt, Artificial Sequence
  Description of Artificial Sequence: Synthetic oligonucleotide
uuggauugggaugcaaggc

SEQ ID NO: 62164 - RNA, 19 nt, Artificial Sequence
  Description of Artificial Sequence: Synthetic oligonucleotide
uguguguguguguaacaca

SEQ ID NO: 62165 - RNA, 19 nt, Artificial Sequence
  Description of Artificial Sequence: Synthetic oligonucleotide
auaauucacauggcucugg

SEQ ID NO: 62166 - RNA, 19 nt, Artificial Sequence
  Description of Artificial Sequence: Synthetic oligonucleotide
ggucauuugauuguccucc

SEQ ID NO: 62167 - RNA, 19 nt, Artificial Sequence
  Description of Artificial Sequence: Synthetic oligonucleotide
cuacuauuuauugaguaga

SEQ ID NO: 62168 - RNA, 19 nt, Artificial Sequence
  Description of Artificial Sequence: Synthetic oligonucleotide
gucuacuuauucagaaggg

SEQ ID NO: 62169 - RNA, 19 nt, Artificial Sequence
  Description of Artificial Sequence: Synthetic oligonucleotide
agcgucuccgacuccuccc

SEQ ID NO: 62170 - RNA, 19 nt, Artificial Sequence
  Description of Artificial Sequence: Synthetic oligonucleotide
cucaaggagugucugauca

SEQ ID NO: 62171 - RNA, 19 nt, Artificial Sequence
  Description of Artificial Sequence: Synthetic oligonucleotide
uaucgaagagaccccagua

SEQ ID NO: 62172 - RNA, 19 nt, Artificial Sequence
  Description of Artificial Sequence: Synthetic oligonucleotide
agaauucuacccauauaag

SEQ ID NO: 62173 - RNA, 19 nt, Artificial Sequence
  Description of Artificial Sequence: Synthetic oligonucleotide
uggggcuacagagaugucc

SEQ ID NO: 62174 - RNA, 19 nt, Artificial Sequence
  Description of Artificial Sequence: Synthetic oligonucleotide
uugaguagagugugguuaa

SEQ ID NO: 62175 - RNA, 19 nt, Artificial Sequence
  Description of Artificial Sequence: Synthetic oligonucleotide
uguauacuuuguuucccaa

SEQ ID NO: 62176 - RNA, 19 nt, Artificial Sequence
  Description of Artificial Sequence: Synthetic oligonucleotide
aggaaaguguuuucuccug

SEQ ID NO: 62177 - RNA, 19 nt, Artificial Sequence
  Description of Artificial Sequence: Synthetic oligonucleotide
cuacuuauucagaagggaa

SEQ ID NO: 62178 - RNA, 19 nt, Artificial Sequence
  Description of Artificial Sequence: Synthetic oligonucleotide
gauaauucacauggcucug

SEQ ID NO: 62179 - RNA, 19 nt, Artificial Sequence
  Description of Artificial Sequence: Synthetic oligonucleotide
caaacugaugcuauaauau

SEQ ID NO: 62180 - RNA, 19 nt, Artificial Sequence
  Description of Artificial Sequence: Synthetic oligonucleotide
ucgggagugaugugcgcgg

SEQ ID NO: 62181 - RNA, 19 nt, Artificial Sequence
  Description of Artificial Sequence: Synthetic oligonucleotide
ucuuaucgaagagacccca

SEQ ID NO: 62182 - RNA, 19 nt, Artificial Sequence
  Description of Artificial Sequence: Synthetic oligonucleotide
gaccagugaaaucuaccac

SEQ ID NO: 62183 - RNA, 19 nt, Artificial Sequence
  Description of Artificial Sequence: Synthetic oligonucleotide
guagcaguaauagagauuu

SEQ ID NO: 62184 - RNA, 19 nt, Artificial Sequence
  Description of Artificial Sequence: Synthetic oligonucleotide
ucuucccggaggaaagugu

SEQ ID NO: 62185 - RNA, 19 nt, Artificial Sequence
  Description of Artificial Sequence: Synthetic oligonucleotide
aucgaagagaccccaguaa

SEQ ID NO: 62186 - RNA, 19 nt, Artificial Sequence
  Description of Artificial Sequence: Synthetic oligonucleotide
gucucuaaauuguuaccac

SEQ ID NO: 62187 - RNA, 19 nt, Artificial Sequence
  Description of Artificial Sequence: Synthetic oligonucleotide
ccgucaguaaaacuuaggc

SEQ ID NO: 62188 - RNA, 19 nt, Artificial Sequence
  Description of Artificial Sequence: Synthetic oligonucleotide
ccaagugaacacuagcaag

SEQ ID NO: 62189 - RNA, 19 nt, Artificial Sequence
  Description of Artificial Sequence: Synthetic oligonucleotide
uguguguguguguguaaca

SEQ ID NO: 62190 - RNA, 19 nt, Artificial Sequence
  Description of Artificial Sequence: Synthetic oligonucleotide
cuuaucgaagagaccccag

SEQ ID NO: 62191 - RNA, 19 nt, Artificial Sequence
  Description of Artificial Sequence: Synthetic oligonucleotide
gaaaaccucaaggggagca

SEQ ID NO: 62192 - RNA, 19 nt, Artificial Sequence
  Description of Artificial Sequence: Synthetic oligonucleotide
aguuacucuugacaacuau

SEQ ID NO: 62193 - RNA, 19 nt, Artificial Sequence
  Description of Artificial Sequence: Synthetic oligonucleotide
gaagcaaguggggugccag

SEQ ID NO: 62194 - RNA, 19 nt, Artificial Sequence
  Description of Artificial Sequence: Synthetic oligonucleotide
aggggaaauacugaauaga

SEQ ID NO: 62195 - RNA, 19 nt, Artificial Sequence
  Description of Artificial Sequence: Synthetic oligonucleotide
aaccuacaacauugaagga

SEQ ID NO: 62196 - RNA, 19 nt, Artificial Sequence
  Description of Artificial Sequence: Synthetic oligonucleotide
cauacaaaucgucggaaaa

SEQ ID NO: 62197 - RNA, 19 nt, Artificial Sequence
  Description of Artificial Sequence: Synthetic oligonucleotide
auucagaagggaacuccac

SEQ ID NO: 62198 - RNA, 19 nt, Artificial Sequence
  Description of Artificial Sequence: Synthetic oligonucleotide
ccgaagguuugcuacaagg

SEQ ID NO: 62199 - RNA, 19 nt, Artificial Sequence
  Description of Artificial Sequence: Synthetic oligonucleotide
agcuaagaagcugauaauu

SEQ ID NO: 62200 - RNA, 19 nt, Artificial Sequence
  Description of Artificial Sequence: Synthetic oligonucleotide
acccagaauuguuaggaaa

SEQ ID NO: 62201 - RNA, 19 nt, Artificial Sequence
  Description of Artificial Sequence: Synthetic oligonucleotide
guauauggguggauguacc

SEQ ID NO: 62202 - RNA, 19 nt, Artificial Sequence
  Description of Artificial Sequence: Synthetic oligonucleotide
cugaccaacacguacgugu

SEQ ID NO: 62203 - RNA, 19 nt, Artificial Sequence
  Description of Artificial Sequence: Synthetic oligonucleotide
aggaaaaccguaauguaua

SEQ ID NO: 62204 - RNA, 19 nt, Artificial Sequence
  Description of Artificial Sequence: Synthetic oligonucleotide
aucgucggaaaaccucaag

SEQ ID NO: 62205 - RNA, 19 nt, Artificial Sequence
  Description of Artificial Sequence: Synthetic oligonucleotide
accaacacguacgugugug

SEQ ID NO: 62206 - RNA, 19 nt, Artificial Sequence
  Description of Artificial Sequence: Synthetic oligonucleotide
gcauuuagucuacuuauuc

SEQ ID NO: 62207 - RNA, 19 nt, Artificial Sequence
  Description of Artificial Sequence: Synthetic oligonucleotide
ugagaucggauugucuuuc

SEQ ID NO: 62208 - RNA, 19 nt, Artificial Sequence
  Description of Artificial Sequence: Synthetic oligonucleotide
gucacagauacgacgugag

SEQ ID NO: 62209 - RNA, 19 nt, Artificial Sequence
  Description of Artificial Sequence: Synthetic oligonucleotide
uauugaguagagugugguu

SEQ ID NO: 62210 - RNA, 19 nt, Artificial Sequence
  Description of Artificial Sequence: Synthetic oligonucleotide
uccauuccgucaguaaaac

SEQ ID NO: 62211 - RNA, 19 nt, Artificial Sequence
  Description of Artificial Sequence: Synthetic oligonucleotide
uguuaccacugauuauuau

SEQ ID NO: 62212 - RNA, 19 nt, Artificial Sequence
  Description of Artificial Sequence: Synthetic oligonucleotide
gauugggaugcaaggcgag

SEQ ID NO: 62213 - RNA, 19 nt, Artificial Sequence
  Description of Artificial Sequence: Synthetic oligonucleotide
auaguccaagcaaagcgca

SEQ ID NO: 62214 - RNA, 19 nt, Artificial Sequence
  Description of Artificial Sequence: Synthetic oligonucleotide
aaaaccucaaggggagcaa

SEQ ID NO: 62215 - RNA, 19 nt, Artificial Sequence
  Description of Artificial Sequence: Synthetic oligonucleotide
cuagcaagacacagugcuc

SEQ ID NO: 62216 - RNA, 19 nt, Artificial Sequence
  Description of Artificial Sequence: Synthetic oligonucleotide
caggauuacccaagugaac

SEQ ID NO: 62217 - RNA, 19 nt, Artificial Sequence
  Description of Artificial Sequence: Synthetic oligonucleotide
gagaucggauugucuuucc

SEQ ID NO: 62218 - RNA, 19 nt, Artificial Sequence
  Description of Artificial Sequence: Synthetic oligonucleotide
agugugguuaaugcuggcu

SEQ ID NO: 62219 - RNA, 19 nt, Artificial Sequence
  Description of Artificial Sequence: Synthetic oligonucleotide
uccccaucuguccaacaaa

SEQ ID NO: 62220 - RNA, 19 nt, Artificial Sequence
  Description of Artificial Sequence: Synthetic oligonucleotide
ccaguguccgguuucaaac

SEQ ID NO: 62221 - RNA, 19 nt, Artificial Sequence
  Description of Artificial Sequence: Synthetic oligonucleotide
aaagagugucucgagccuu

SEQ ID NO: 62222 - RNA, 19 nt, Artificial Sequence
  Description of Artificial Sequence: Synthetic oligonucleotide
aggccuuuugaggguauac

SEQ ID NO: 62223 - RNA, 19 nt, Artificial Sequence
  Description of Artificial Sequence: Synthetic oligonucleotide
auauggguggauguacccu

SEQ ID NO: 62224 - RNA, 19 nt, Artificial Sequence
  Description of Artificial Sequence: Synthetic oligonucleotide
cucgggagugaugugcgcg

SEQ ID NO: 62225 - RNA, 19 nt, Artificial Sequence
  Description of Artificial Sequence: Synthetic oligonucleotide
agucugagaucggauuguc

SEQ ID NO: 62226 - RNA, 19 nt, Artificial Sequence
  Description of Artificial Sequence: Synthetic oligonucleotide
ggucucuaaauuguuacca

SEQ ID NO: 62227 - RNA, 19 nt, Artificial Sequence
  Description of Artificial Sequence: Synthetic oligonucleotide
cacuagcaagacacagugc

SEQ ID NO: 62228 - RNA, 19 nt, Artificial Sequence
  Description of Artificial Sequence: Synthetic oligonucleotide
guguguguguguguaacac

SEQ ID NO: 62229 - RNA, 19 nt, Artificial Sequence
  Description of Artificial Sequence: Synthetic oligonucleotide
uuguaaccaaucacuuauu

SEQ ID NO: 62230 - RNA, 19 nt, Artificial Sequence
  Description of Artificial Sequence: Synthetic oligonucleotide
caaggagugucugaucauc

SEQ ID NO: 62231 - RNA, 19 nt, Artificial Sequence
  Description of Artificial Sequence: Synthetic oligonucleotide
guacgugugugugugugug

SEQ ID NO: 62232 - RNA, 19 nt, Artificial Sequence
  Description of Artificial Sequence: Synthetic oligonucleotide
ugugugugugugugugugu

SEQ ID NO: 62233 - RNA, 19 nt, Artificial Sequence
  Description of Artificial Sequence: Synthetic oligonucleotide
ucaaggagugucugaucau

SEQ ID NO: 62234 - RNA, 19 nt, Artificial Sequence
  Description of Artificial Sequence: Synthetic oligonucleotide
uuacccuauuuccuuccua

SEQ ID NO: 62235 - RNA, 19 nt, Artificial Sequence
  Description of Artificial Sequence: Synthetic oligonucleotide
gguauauggguggauguac

SEQ ID NO: 62236 - RNA, 19 nt, Artificial Sequence
  Description of Artificial Sequence: Synthetic oligonucleotide
agaugagacucaaucaaua

SEQ ID NO: 62237 - RNA, 19 nt, Artificial Sequence
  Description of Artificial Sequence: Synthetic oligonucleotide
cugguuguacuuccaugac

SEQ ID NO: 62238 - RNA, 19 nt, Artificial Sequence
  Description of Artificial Sequence: Synthetic oligonucleotide
uccguagguggauggcacc

SEQ ID NO: 62239 - RNA, 19 nt, Artificial Sequence
  Description of Artificial Sequence: Synthetic oligonucleotide
cucagagaccagugaaauc

SEQ ID NO: 62240 - RNA, 19 nt, Artificial Sequence
  Description of Artificial Sequence: Synthetic oligonucleotide
cuccguagguggauggcac

SEQ ID NO: 62241 - RNA, 19 nt, Artificial Sequence
  Description of Artificial Sequence: Synthetic oligonucleotide
ugguuaaugcuggcuagaa

SEQ ID NO: 62242 - RNA, 19 nt, Artificial Sequence
  Description of Artificial Sequence: Synthetic oligonucleotide
ucgagccuuggauugggau

SEQ ID NO: 62243 - RNA, 19 nt, Artificial Sequence
  Description of Artificial Sequence: Synthetic oligonucleotide
gugugugugugugugugug

SEQ ID NO: 62244 - RNA, 19 nt, Artificial Sequence
  Description of Artificial Sequence: Synthetic oligonucleotide
ccuuggauugggaugcaag

SEQ ID NO: 62245 - RNA, 19 nt, Artificial Sequence
  Description of Artificial Sequence: Synthetic oligonucleotide
gacgugaguccaagcaagc

SEQ ID NO: 62246 - RNA, 19 nt, Artificial Sequence
  Description of Artificial Sequence: Synthetic oligonucleotide
guaucgguuuugaaaguuc

SEQ ID NO: 62247 - RNA, 19 nt, Artificial Sequence
  Description of Artificial Sequence: Synthetic oligonucleotide
cugagcugaauacagcaua

SEQ ID NO: 62248 - RNA, 19 nt, Artificial Sequence
  Description of Artificial Sequence: Synthetic oligonucleotide
acaaaucgucggaaaaccu

SEQ ID NO: 62249 - RNA, 19 nt, Artificial Sequence
  Description of Artificial Sequence: Synthetic oligonucleotide
agcacggaauucaccacag

SEQ ID NO: 62250 - RNA, 19 nt, Artificial Sequence
  Description of Artificial Sequence: Synthetic oligonucleotide
auuacccaagugaacacua

SEQ ID NO: 62251 - RNA, 19 nt, Artificial Sequence
  Description of Artificial Sequence: Synthetic oligonucleotide
gggucucuaaauuguuacc

SEQ ID NO: 62252 - RNA, 19 nt, Artificial Sequence
  Description of Artificial Sequence: Synthetic oligonucleotide
acggaauucaccacaguua

SEQ ID NO: 62253 - RNA, 19 nt, Artificial Sequence
  Description of Artificial Sequence: Synthetic oligonucleotide
uguguguguguguguguaa

SEQ ID NO: 62254 - RNA, 19 nt, Artificial Sequence
  Description of Artificial Sequence: Synthetic oligonucleotide
guuacucuugacaacuaua

SEQ ID NO: 62255 - RNA, 19 nt, Artificial Sequence
  Description of Artificial Sequence: Synthetic oligonucleotide
acgugugugugugugugug

SEQ ID NO: 62256 - RNA, 19 nt, Artificial Sequence
  Description of Artificial Sequence: Synthetic oligonucleotide
cacugauuauuauaaaguu

SEQ ID NO: 62257 - RNA, 19 nt, Artificial Sequence
  Description of Artificial Sequence: Synthetic oligonucleotide
caacacguacgugugugug

SEQ ID NO: 62258 - RNA, 19 nt, Artificial Sequence
  Description of Artificial Sequence: Synthetic oligonucleotide
guuacguccaugccgucua

SEQ ID NO: 62259 - RNA, 19 nt, Artificial Sequence
  Description of Artificial Sequence: Synthetic oligonucleotide
ggauuacccaagugaacac

SEQ ID NO: 62260 - RNA, 19 nt, Artificial Sequence
  Description of Artificial Sequence: Synthetic oligonucleotide
guguguguguguguguaac

SEQ ID NO: 62261 - RNA, 19 nt, Artificial Sequence
  Description of Artificial Sequence: Synthetic oligonucleotide
acacuuuagggaaacccau

SEQ ID NO: 62262 - RNA, 19 nt, Artificial Sequence
  Description of Artificial Sequence: Synthetic oligonucleotide
acguacgugugugugugug

SEQ ID NO: 62263 - RNA, 19 nt, Artificial Sequence
  Description of Artificial Sequence: Synthetic oligonucleotide
auuccgucaguaaaacuua

SEQ ID NO: 62264 - RNA, 19 nt, Artificial Sequence
  Description of Artificial Sequence: Synthetic oligonucleotide
ucugaccaacacguacgug

SEQ ID NO: 62265 - RNA, 19 nt, Artificial Sequence
  Description of Artificial Sequence: Synthetic oligonucleotide
gauuacccaagugaacacu

SEQ ID NO: 62266 - RNA, 19 nt, Artificial Sequence
  Description of Artificial Sequence: Synthetic oligonucleotide
ccuagggcagaugaaagug

SEQ ID NO: 62267 - RNA, 19 nt, Artificial Sequence
  Description of Artificial Sequence: Synthetic oligonucleotide
agugcagguaagaacuuua

SEQ ID NO: 62268 - RNA, 19 nt, Artificial Sequence
  Description of Artificial Sequence: Synthetic oligonucleotide
ggacuaaucacaauccaua

SEQ ID NO: 62269 - RNA, 19 nt, Artificial Sequence
  Description of Artificial Sequence: Synthetic oligonucleotide
augagaugcuuuugcuuuu

SEQ ID NO: 62270 - RNA, 19 nt, Artificial Sequence
  Description of Artificial Sequence: Synthetic oligonucleotide
gcaguaauagagauuugga

SEQ ID NO: 62271 - RNA, 19 nt, Artificial Sequence
  Description of Artificial Sequence: Synthetic oligonucleotide
augcaaccuuaaucuacca

SEQ ID NO: 62272 - RNA, 19 nt, Artificial Sequence
  Description of Artificial Sequence: Synthetic oligonucleotide
uggguggauguacccugca

SEQ ID NO: 62273 - RNA, 19 nt, Artificial Sequence
  Description of Artificial Sequence: Synthetic oligonucleotide
ugacugguauaugggugga

SEQ ID NO: 62274 - RNA, 19 nt, Artificial Sequence
  Description of Artificial Sequence: Synthetic oligonucleotide
ccaacaaagugcugccggc

SEQ ID NO: 62275 - RNA, 19 nt, Artificial Sequence
  Description of Artificial Sequence: Synthetic oligonucleotide
uacgugugugugugugugu

SEQ ID NO: 62276 - RNA, 19 nt, Artificial Sequence
  Description of Artificial Sequence: Synthetic oligonucleotide
ugccgucuaucagaggccu

SEQ ID NO: 62277 - RNA, 19 nt, Artificial Sequence
  Description of Artificial Sequence: Synthetic oligonucleotide
ggcggcaacagcgucuccg

SEQ ID NO: 62278 - RNA, 19 nt, Artificial Sequence
  Description of Artificial Sequence: Synthetic oligonucleotide
ggcgaaaugggacaagagu

SEQ ID NO: 62279 - RNA, 19 nt, Artificial Sequence
  Description of Artificial Sequence: Synthetic oligonucleotide
cuacccauauaagaaggaa

SEQ ID NO: 62280 - RNA, 19 nt, Artificial Sequence
  Description of Artificial Sequence: Synthetic oligonucleotide
acagaaccuacaacauuga

SEQ ID NO: 62281 - RNA, 19 nt, Artificial Sequence
  Description of Artificial Sequence: Synthetic oligonucleotide
ucuuuccauuccgucagua

SEQ ID NO: 62282 - RNA, 19 nt, Artificial Sequence
  Description of Artificial Sequence: Synthetic oligonucleotide
gcugaguuacguccaugcc

SEQ ID NO: 62283 - RNA, 19 nt, Artificial Sequence
  Description of Artificial Sequence: Synthetic oligonucleotide
ccgacuccuccccacaugg

SEQ ID NO: 62284 - RNA, 19 nt, Artificial Sequence
  Description of Artificial Sequence: Synthetic oligonucleotide
gaaaaccguaauguauacu

SEQ ID NO: 62285 - RNA, 19 nt, Artificial Sequence
  Description of Artificial Sequence: Synthetic oligonucleotide
ucuuggcgguuugaacccc

SEQ ID NO: 62286 - RNA, 19 nt, Artificial Sequence
  Description of Artificial Sequence: Synthetic oligonucleotide
aaucuaccaagggucucua

SEQ ID NO: 62287 - RNA, 19 nt, Artificial Sequence
  Description of Artificial Sequence: Synthetic oligonucleotide
caguguccgguuucaaaca

SEQ ID NO: 62288 - RNA, 19 nt, Artificial Sequence
  Description of Artificial Sequence: Synthetic oligonucleotide
ccuauccacagcacacuag

SEQ ID NO: 62289 - RNA, 19 nt, Artificial Sequence
  Description of Artificial Sequence: Synthetic oligonucleotide
cuaugauggcacaguagua

SEQ ID NO: 62290 - RNA, 19 nt, Artificial Sequence
  Description of Artificial Sequence: Synthetic oligonucleotide
cuccacacuuuagggaaac

SEQ ID NO: 62291 - RNA, 19 nt, Artificial Sequence
  Description of Artificial Sequence: Synthetic oligonucleotide
cuuugugauuguaaacaau

SEQ ID NO: 62292 - RNA, 19 nt, Artificial Sequence
  Description of Artificial Sequence: Synthetic oligonucleotide
gaccccaguaaaauugugu

SEQ ID NO: 62293 - RNA, 19 nt, Artificial Sequence
  Description of Artificial Sequence: Synthetic oligonucleotide
gcucucaaaucuaaugaga

SEQ ID NO: 62294 - RNA, 19 nt, Artificial Sequence
  Description of Artificial Sequence: Synthetic oligonucleotide
aaucgucggaaaaccucaa

SEQ ID NO: 62295 - RNA, 19 nt, Artificial Sequence
  Description of Artificial Sequence: Synthetic oligonucleotide
aaucuaccaccugcuuuaa

SEQ ID NO: 62296 - RNA, 19 nt, Artificial Sequence
  Description of Artificial Sequence: Synthetic oligonucleotide
acgugaguccaagcaagca

SEQ ID NO: 62297 - RNA, 19 nt, Artificial Sequence
  Description of Artificial Sequence: Synthetic oligonucleotide
ggaugcaaggcgaggccgg

SEQ ID NO: 62298 - RNA, 19 nt, Artificial Sequence
  Description of Artificial Sequence: Synthetic oligonucleotide
ccaugaccgauucuucuug

SEQ ID NO: 62299 - RNA, 19 nt, Artificial Sequence
  Description of Artificial Sequence: Synthetic oligonucleotide
guuguacuuccaugaccga

SEQ ID NO: 62300 - RNA, 19 nt, Artificial Sequence
  Description of Artificial Sequence: Synthetic oligonucleotide
cgacgugaguccaagcaag

SEQ ID NO: 62301 - RNA, 19 nt, Artificial Sequence
  Description of Artificial Sequence: Synthetic oligonucleotide
gagcuaagaagcugauaau

SEQ ID NO: 62302 - RNA, 19 nt, Artificial Sequence
  Description of Artificial Sequence: Synthetic oligonucleotide
gaggccggcgcagagauau

SEQ ID NO: 62303 - RNA, 19 nt, Artificial Sequence
  Description of Artificial Sequence: Synthetic oligonucleotide
gcauugauuccuugacguc

SEQ ID NO: 62304 - RNA, 19 nt, Artificial Sequence
  Description of Artificial Sequence: Synthetic oligonucleotide
uuggcgguuugaaccccau

SEQ ID NO: 62305 - RNA, 19 nt, Artificial Sequence
  Description of Artificial Sequence: Synthetic oligonucleotide
aucgguuuugaaaguucau

SEQ ID NO: 62306 - RNA, 19 nt, Artificial Sequence
  Description of Artificial Sequence: Synthetic oligonucleotide
cuuggcgguuugaacccca

SEQ ID NO: 62307 - RNA, 19 nt, Artificial Sequence
  Description of Artificial Sequence: Synthetic oligonucleotide
ggauugggaugcaaggcga

SEQ ID NO: 62308 - RNA, 19 nt, Artificial Sequence
  Description of Artificial Sequence: Synthetic oligonucleotide
uggcgguuugaaccccauc

SEQ ID NO: 62309 - RNA, 19 nt, Artificial Sequence
  Description of Artificial Sequence: Synthetic oligonucleotide
augcaaggcgaggccggcg

SEQ ID NO: 62310 - RNA, 19 nt, Artificial Sequence
  Description of Artificial Sequence: Synthetic oligonucleotide
gauaggcaucaaguagaaa

SEQ ID NO: 62311 - RNA, 19 nt, Artificial Sequence
  Description of Artificial Sequence: Synthetic oligonucleotide
ggcaucaaguagaaauuaa

SEQ ID NO: 62312 - RNA, 19 nt, Artificial Sequence
  Description of Artificial Sequence: Synthetic oligonucleotide
gugcgcggagaggugcucg

SEQ ID NO: 62313 - RNA, 19 nt, Artificial Sequence
  Description of Artificial Sequence: Synthetic oligonucleotide
gugugugugugugugugua

SEQ ID NO: 62314 - RNA, 19 nt, Artificial Sequence
  Description of Artificial Sequence: Synthetic oligonucleotide
cagauacgacgugagucca

SEQ ID NO: 62315 - RNA, 19 nt, Artificial Sequence
  Description of Artificial Sequence: Synthetic oligonucleotide
gcauucaguggggcuacag

SEQ ID NO: 62316 - RNA, 19 nt, Artificial Sequence
  Description of Artificial Sequence: Synthetic oligonucleotide
aaguggggugccaggucau

SEQ ID NO: 62317 - RNA, 19 nt, Artificial Sequence
  Description of Artificial Sequence: Synthetic oligonucleotide
ggcagaagugcagguaaga

SEQ ID NO: 62318 - RNA, 19 nt, Artificial Sequence
  Description of Artificial Sequence: Synthetic oligonucleotide
gucuacuagugggaagcaa

SEQ ID NO: 62319 - RNA, 19 nt, Artificial Sequence
  Description of Artificial Sequence: Synthetic oligonucleotide
uaggccuuuugaggguaua

SEQ ID NO: 62320 - RNA, 19 nt, Artificial Sequence
  Description of Artificial Sequence: Synthetic oligonucleotide
ucauccggaugggcaucug

SEQ ID NO: 62321 - RNA, 19 nt, Artificial Sequence
  Description of Artificial Sequence: Synthetic oligonucleotide
cuucccggaggaaaguguu

SEQ ID NO: 62322 - RNA, 19 nt, Artificial Sequence
  Description of Artificial Sequence: Synthetic oligonucleotide
gaguuacguccaugccguc

SEQ ID NO: 62323 - RNA, 19 nt, Artificial Sequence
  Description of Artificial Sequence: Synthetic oligonucleotide
ccagugaaaucuaccaccu

SEQ ID NO: 62324 - RNA, 19 nt, Artificial Sequence
  Description of Artificial Sequence: Synthetic oligonucleotide
ggccagaguuuuguaacca

SEQ ID NO: 62325 - RNA, 19 nt, Artificial Sequence
  Description of Artificial Sequence: Synthetic oligonucleotide
cuccugcauucuuaucgaa

SEQ ID NO: 62326 - RNA, 19 nt, Artificial Sequence
  Description of Artificial Sequence: Synthetic oligonucleotide
acacaagaugagacucaau

SEQ ID NO: 62327 - RNA, 19 nt, Artificial Sequence
  Description of Artificial Sequence: Synthetic oligonucleotide
caguaucgguuuugaaagu

SEQ ID NO: 62328 - RNA, 19 nt, Artificial Sequence
  Description of Artificial Sequence: Synthetic oligonucleotide
ccggaugggcaucuguguc

SEQ ID NO: 62329 - RNA, 19 nt, Artificial Sequence
  Description of Artificial Sequence: Synthetic oligonucleotide
cggaggaaaguguuuucuc

SEQ ID NO: 62330 - RNA, 19 nt, Artificial Sequence
  Description of Artificial Sequence: Synthetic oligonucleotide
guccgguuucaaacaguca

SEQ ID NO: 62331 - RNA, 19 nt, Artificial Sequence
  Description of Artificial Sequence: Synthetic oligonucleotide
ggccggcgcagagauauug

SEQ ID NO: 62332 - RNA, 19 nt, Artificial Sequence
  Description of Artificial Sequence: Synthetic oligonucleotide
cucgagccuuggauuggga

SEQ ID NO: 62333 - RNA, 19 nt, Artificial Sequence
  Description of Artificial Sequence: Synthetic oligonucleotide
caacaaagugcugccggcu

SEQ ID NO: 62334 - RNA, 19 nt, Artificial Sequence
  Description of Artificial Sequence: Synthetic oligonucleotide
augucccgcacagcacgga

SEQ ID NO: 62335 - RNA, 19 nt, Artificial Sequence
  Description of Artificial Sequence: Synthetic oligonucleotide
gcggcaacagcgucuccga

SEQ ID NO: 62336 - RNA, 19 nt, Artificial Sequence
  Description of Artificial Sequence: Synthetic oligonucleotide
gccggcgcagagauauugc

SEQ ID NO: 62337 - RNA, 19 nt, Artificial Sequence
  Description of Artificial Sequence: Synthetic oligonucleotide
ggagaggugcucggcgaac

SEQ ID NO: 62338 - RNA, 19 nt, Artificial Sequence
  Description of Artificial Sequence: Synthetic oligonucleotide
cgaagagaccccaguaaaa

SEQ ID NO: 62339 - RNA, 19 nt, Artificial Sequence
  Description of Artificial Sequence: Synthetic oligonucleotide
gucacccacagaggacuaa

SEQ ID NO: 62340 - RNA, 19 nt, Artificial Sequence
  Description of Artificial Sequence: Synthetic oligonucleotide
ccuaaggaugauggcagaa

SEQ ID NO: 62341 - RNA, 19 nt, Artificial Sequence
  Description of Artificial Sequence: Synthetic oligonucleotide
ggauaguguuugagagaca

SEQ ID NO: 62342 - RNA, 19 nt, Artificial Sequence
  Description of Artificial Sequence: Synthetic oligonucleotide
guguccgguuucaaacagu

SEQ ID NO: 62343 - RNA, 19 nt, Artificial Sequence
  Description of Artificial Sequence: Synthetic oligonucleotide
gacugguauauggguggau

SEQ ID NO: 62344 - RNA, 19 nt, Artificial Sequence
  Description of Artificial Sequence: Synthetic oligonucleotide
ccgcacagcacggaauuca

SEQ ID NO: 62345 - RNA, 19 nt, Artificial Sequence
  Description of Artificial Sequence: Synthetic oligonucleotide
caguaccacuaauuuuauu

SEQ ID NO: 62346 - RNA, 19 nt, Artificial Sequence
  Description of Artificial Sequence: Synthetic oligonucleotide
ggcuacacuucucccgcau

SEQ ID NO: 62347 - RNA, 19 nt, Artificial Sequence
  Description of Artificial Sequence: Synthetic oligonucleotide
ccguagguggauggcacca

SEQ ID NO: 62348 - RNA, 19 nt, Artificial Sequence
  Description of Artificial Sequence: Synthetic oligonucleotide
gcaaggcgaggccggcgca

SEQ ID NO: 62349 - RNA, 19 nt, Artificial Sequence
  Description of Artificial Sequence: Synthetic oligonucleotide
cccuauccacagcacacua

SEQ ID NO: 62350 - RNA, 19 nt, Artificial Sequence
  Description of Artificial Sequence: Synthetic oligonucleotide
gcgguuugaaccccaucuu

SEQ ID NO: 62351 - RNA, 19 nt, Artificial Sequence
  Description of Artificial Sequence: Synthetic oligonucleotide
gggcaacucaguaucgguu

SEQ ID NO: 62352 - RNA, 19 nt, Artificial Sequence
  Description of Artificial Sequence: Synthetic oligonucleotide
cacguacgugugugugugu

SEQ ID NO: 62353 - RNA, 19 nt, Artificial Sequence
  Description of Artificial Sequence: Synthetic oligonucleotide
ccaacacguacgugugugu

SEQ ID NO: 62354 - RNA, 19 nt, Artificial Sequence
  Description of Artificial Sequence: Synthetic oligonucleotide
gcgcaguaucacaucuucu

SEQ ID NO: 62355 - RNA, 19 nt, Artificial Sequence
  Description of Artificial Sequence: Synthetic oligonucleotide
gccuuggauugggaugcaa

SEQ ID NO: 62356 - RNA, 19 nt, Artificial Sequence
  Description of Artificial Sequence: Synthetic oligonucleotide
cguacgugugugugugugu

SEQ ID NO: 62357 - RNA, 19 nt, Artificial Sequence
  Description of Artificial Sequence: Synthetic oligonucleotide
gccccggcgcugcgcggag

SEQ ID NO: 62358 - RNA, 19 nt, Artificial Sequence
  Description of Artificial Sequence: Synthetic oligonucleotide
caguaguaguaggccuuuu

SEQ ID NO: 62359 - RNA, 19 nt, Artificial Sequence
  Description of Artificial Sequence: Synthetic oligonucleotide
cgugugugugugugugugu

SEQ ID NO: 62360 - RNA, 19 nt, Artificial Sequence
  Description of Artificial Sequence: Synthetic oligonucleotide
aggccggcgcagagauauu

SEQ ID NO: 62361 - RNA, 19 nt, Artificial Sequence
  Description of Artificial Sequence: Synthetic oligonucleotide
cgggagugaugugcgcgga

SEQ ID NO: 62362 - RNA, 19 nt, Artificial Sequence
  Description of Artificial Sequence: Synthetic oligonucleotide
cgccgccgaggucuccuca

SEQ ID NO: 62363 - RNA, 19 nt, Artificial Sequence
  Description of Artificial Sequence: Synthetic oligonucleotide
aagacacacacacacaacc

SEQ ID NO: 62364 - RNA, 19 nt, Artificial Sequence
  Description of Artificial Sequence: Synthetic oligonucleotide
aauacucacagguauguac

SEQ ID NO: 62365 - RNA, 19 nt, Artificial Sequence
  Description of Artificial Sequence: Synthetic oligonucleotide
ucaaauaccaguacugugg

SEQ ID NO: 62366 - RNA, 19 nt, Artificial Sequence
  Description of Artificial Sequence: Synthetic oligonucleotide
agcaaagacacacacacac

SEQ ID NO: 62367 - RNA, 19 nt, Artificial Sequence
  Description of Artificial Sequence: Synthetic oligonucleotide
uauaaaccaagaauagggg

SEQ ID NO: 62368 - RNA, 19 nt, Artificial Sequence
  Description of Artificial Sequence: Synthetic oligonucleotide
aauaggggaaguauggggc

SEQ ID NO: 62369 - RNA, 19 nt, Artificial Sequence
  Description of Artificial Sequence: Synthetic oligonucleotide
aaaucuuuggcugaccaac

SEQ ID NO: 62370 - RNA, 19 nt, Artificial Sequence
  Description of Artificial Sequence: Synthetic oligonucleotide
ucuacaauggacaaucccu

SEQ ID NO: 62371 - RNA, 19 nt, Artificial Sequence
  Description of Artificial Sequence: Synthetic oligonucleotide
auacgcacuaccuuggagg

SEQ ID NO: 62372 - RNA, 19 nt, Artificial Sequence
  Description of Artificial Sequence: Synthetic oligonucleotide
uauacccugacacaagagc

SEQ ID NO: 62373 - RNA, 19 nt, Artificial Sequence
  Description of Artificial Sequence: Synthetic oligonucleotide
uuaauaguguauuccaugu

SEQ ID NO: 62374 - RNA, 19 nt, Artificial Sequence
  Description of Artificial Sequence: Synthetic oligonucleotide
aacccuauacuccccuucc

SEQ ID NO: 62375 - RNA, 19 nt, Artificial Sequence
  Description of Artificial Sequence: Synthetic oligonucleotide
uguauacgcacuaccuugg

SEQ ID NO: 62376 - RNA, 19 nt, Artificial Sequence
  Description of Artificial Sequence: Synthetic oligonucleotide
aaucagaggaaugugccag

SEQ ID NO: 62377 - RNA, 19 nt, Artificial Sequence
  Description of Artificial Sequence: Synthetic oligonucleotide
aguugcuacccacaggacg

SEQ ID NO: 62378 - RNA, 19 nt, Artificial Sequence
  Description of Artificial Sequence: Synthetic oligonucleotide
agcuugaucacucuggccu

SEQ ID NO: 62379 - RNA, 19 nt, Artificial Sequence
  Description of Artificial Sequence: Synthetic oligonucleotide
uuggguuuaguccuguucu

SEQ ID NO: 62380 - RNA, 19 nt, Artificial Sequence
  Description of Artificial Sequence: Synthetic oligonucleotide
aagauuacacauggaugcc

SEQ ID NO: 62381 - RNA, 19 nt, Artificial Sequence
  Description of Artificial Sequence: Synthetic oligonucleotide
auccuuacgggaucguugc

SEQ ID NO: 62382 - RNA, 19 nt, Artificial Sequence
  Description of Artificial Sequence: Synthetic oligonucleotide
auaaaccaagaauagggga

SEQ ID NO: 62383 - RNA, 19 nt, Artificial Sequence
  Description of Artificial Sequence: Synthetic oligonucleotide
uaaccaggcucucauaggc

SEQ ID NO: 62384 - RNA, 19 nt, Artificial Sequence
  Description of Artificial Sequence: Synthetic oligonucleotide
aaagucacgagcaaacaca

SEQ ID NO: 62385 - RNA, 19 nt, Artificial Sequence
  Description of Artificial Sequence: Synthetic oligonucleotide
gguaagugaagucuggcgg

SEQ ID NO: 62386 - RNA, 19 nt, Artificial Sequence
  Description of Artificial Sequence: Synthetic oligonucleotide
cugccuuuacccuauaccc

SEQ ID NO: 62387 - RNA, 19 nt, Artificial Sequence
  Description of Artificial Sequence: Synthetic oligonucleotide
uuaauuaccuucuguguuc

SEQ ID NO: 62388 - RNA, 19 nt, Artificial Sequence
  Description of Artificial Sequence: Synthetic oligonucleotide
aguacuguggcuaagccug

SEQ ID NO: 62389 - RNA, 19 nt, Artificial Sequence
  Description of Artificial Sequence: Synthetic oligonucleotide
caaccacacacacacaagg

SEQ ID NO: 62390 - RNA, 19 nt, Artificial Sequence
  Description of Artificial Sequence: Synthetic oligonucleotide
gaugugaacaauuugggau

SEQ ID NO: 62391 - RNA, 19 nt, Artificial Sequence
  Description of Artificial Sequence: Synthetic oligonucleotide
uuaaccaggcucucauagg

SEQ ID NO: 62392 - RNA, 19 nt, Artificial Sequence
  Description of Artificial Sequence: Synthetic oligonucleotide
gagucuaggauuucuuagc

SEQ ID NO: 62393 - RNA, 19 nt, Artificial Sequence
  Description of Artificial Sequence: Synthetic oligonucleotide
ucuccagucggucucggag

SEQ ID NO: 62394 - RNA, 19 nt, Artificial Sequence
  Description of Artificial Sequence: Synthetic oligonucleotide
uguguguguguguagguca

SEQ ID NO: 62395 - RNA, 19 nt, Artificial Sequence
  Description of Artificial Sequence: Synthetic oligonucleotide
aaccacacacacacaaggc

SEQ ID NO: 62396 - RNA, 19 nt, Artificial Sequence
  Description of Artificial Sequence: Synthetic oligonucleotide
cucgagugguugaugaugg

SEQ ID NO: 62397 - RNA, 19 nt, Artificial Sequence
  Description of Artificial Sequence: Synthetic oligonucleotide
cuguauacgcacuaccuug

SEQ ID NO: 62398 - RNA, 19 nt, Artificial Sequence
  Description of Artificial Sequence: Synthetic oligonucleotide
uacgcacuaccuuggaggg

SEQ ID NO: 62399 - RNA, 19 nt, Artificial Sequence
  Description of Artificial Sequence: Synthetic oligonucleotide
aaagacacacacacacaac

SEQ ID NO: 62400 - RNA, 19 nt, Artificial Sequence
  Description of Artificial Sequence: Synthetic oligonucleotide
ucaauagacaaggaccucu

SEQ ID NO: 62401 - RNA, 19 nt, Artificial Sequence
  Description of Artificial Sequence: Synthetic oligonucleotide
uauacgcacuaccuuggag

SEQ ID NO: 62402 - RNA, 19 nt, Artificial Sequence
  Description of Artificial Sequence: Synthetic oligonucleotide
auacucacagguauguacg

SEQ ID NO: 62403 - RNA, 19 nt, Artificial Sequence
  Description of Artificial Sequence: Synthetic oligonucleotide
ucccguacgaguuccauga

SEQ ID NO: 62404 - RNA, 19 nt, Artificial Sequence
  Description of Artificial Sequence: Synthetic oligonucleotide
uuuggguuuaguccuguuc

SEQ ID NO: 62405 - RNA, 19 nt, Artificial Sequence
  Description of Artificial Sequence: Synthetic oligonucleotide
caaauaccaguacuguggc

SEQ ID NO: 62406 - RNA, 19 nt, Artificial Sequence
  Description of Artificial Sequence: Synthetic oligonucleotide
ugucuagagacucacgcuu

SEQ ID NO: 62407 - RNA, 19 nt, Artificial Sequence
  Description of Artificial Sequence: Synthetic oligonucleotide
ugaagacuagaccucugcu

SEQ ID NO: 62408 - RNA, 19 nt, Artificial Sequence
  Description of Artificial Sequence: Synthetic oligonucleotide
acaggacgaggcuagauga

SEQ ID NO: 62409 - RNA, 19 nt, Artificial Sequence
  Description of Artificial Sequence: Synthetic oligonucleotide
aagucgugaagucuccgga

SEQ ID NO: 62410 - RNA, 19 nt, Artificial Sequence
  Description of Artificial Sequence: Synthetic oligonucleotide
aaguauggggccuccccag

SEQ ID NO: 62411 - RNA, 19 nt, Artificial Sequence
  Description of Artificial Sequence: Synthetic oligonucleotide
ucgcaaaggcgucuggucc

SEQ ID NO: 62412 - RNA, 19 nt, Artificial Sequence
  Description of Artificial Sequence: Synthetic oligonucleotide
acgggaucguugcugaagg

SEQ ID NO: 62413 - RNA, 19 nt, Artificial Sequence
  Description of Artificial Sequence: Synthetic oligonucleotide
caacaagcugcucacgcgg

SEQ ID NO: 62414 - RNA, 19 nt, Artificial Sequence
  Description of Artificial Sequence: Synthetic oligonucleotide
gacacacacacacaaccac

SEQ ID NO: 62415 - RNA, 19 nt, Artificial Sequence
  Description of Artificial Sequence: Synthetic oligonucleotide
caaagucacgagcaaacac

SEQ ID NO: 62416 - RNA, 19 nt, Artificial Sequence
  Description of Artificial Sequence: Synthetic oligonucleotide
agucuaggauuucuuagca

SEQ ID NO: 62417 - RNA, 19 nt, Artificial Sequence
  Description of Artificial Sequence: Synthetic oligonucleotide
aguaucacaaauggggcca

SEQ ID NO: 62418 - RNA, 19 nt, Artificial Sequence
  Description of Artificial Sequence: Synthetic oligonucleotide
agguccguaaccugcguuc

SEQ ID NO: 62419 - RNA, 19 nt, Artificial Sequence
  Description of Artificial Sequence: Synthetic oligonucleotide
aucgcaaaggcgucugguc

SEQ ID NO: 62420 - RNA, 19 nt, Artificial Sequence
  Description of Artificial Sequence: Synthetic oligonucleotide
cuacaauggacaaucccuc

SEQ ID NO: 62421 - RNA, 19 nt, Artificial Sequence
  Description of Artificial Sequence: Synthetic oligonucleotide
accacacacacacaaggca

SEQ ID NO: 62422 - RNA, 19 nt, Artificial Sequence
  Description of Artificial Sequence: Synthetic oligonucleotide
uuccuguuagccuguacca

SEQ ID NO: 62423 - RNA, 19 nt, Artificial Sequence
  Description of Artificial Sequence: Synthetic oligonucleotide
gguaacauuaugaagcguc

SEQ ID NO: 62424 - RNA, 19 nt, Artificial Sequence
  Description of Artificial Sequence: Synthetic oligonucleotide
gaauuugacagagucuguc

SEQ ID NO: 62425 - RNA, 19 nt, Artificial Sequence
  Description of Artificial Sequence: Synthetic oligonucleotide
guaacauuaugaagcgucc

SEQ ID NO: 62426 - RNA, 19 nt, Artificial Sequence
  Description of Artificial Sequence: Synthetic oligonucleotide
cuugucggcguugucauag

SEQ ID NO: 62427 - RNA, 19 nt, Artificial Sequence
  Description of Artificial Sequence: Synthetic oligonucleotide
agaguguguguguguuugc

SEQ ID NO: 62428 - RNA, 19 nt, Artificial Sequence
  Description of Artificial Sequence: Synthetic oligonucleotide
uugucuagagacucacgcu

SEQ ID NO: 62429 - RNA, 19 nt, Artificial Sequence
  Description of Artificial Sequence: Synthetic oligonucleotide
cauccuuacgggaucguug

SEQ ID NO: 62430 - RNA, 19 nt, Artificial Sequence
  Description of Artificial Sequence: Synthetic oligonucleotide
guguguguguguuugcaug

SEQ ID NO: 62431 - RNA, 19 nt, Artificial Sequence
  Description of Artificial Sequence: Synthetic oligonucleotide
uccugacacuuccuguuag

SEQ ID NO: 62432 - RNA, 19 nt, Artificial Sequence
  Description of Artificial Sequence: Synthetic oligonucleotide
aggacgaggcuagaugagc

SEQ ID NO: 62433 - RNA, 19 nt, Artificial Sequence
  Description of Artificial Sequence: Synthetic oligonucleotide
caaagacacacacacacaa

SEQ ID NO: 62434 - RNA, 19 nt, Artificial Sequence
  Description of Artificial Sequence: Synthetic oligonucleotide
uguugaagucgugaagucu

SEQ ID NO: 62435 - RNA, 19 nt, Artificial Sequence
  Description of Artificial Sequence: Synthetic oligonucleotide
gacaaucccuccuauucuc

SEQ ID NO: 62436 - RNA, 19 nt, Artificial Sequence
  Description of Artificial Sequence: Synthetic oligonucleotide
uaguugugccuuuaacaga

SEQ ID NO: 62437 - RNA, 19 nt, Artificial Sequence
  Description of Artificial Sequence: Synthetic oligonucleotide
gggcguuauauucugguag

SEQ ID NO: 62438 - RNA, 19 nt, Artificial Sequence
  Description of Artificial Sequence: Synthetic oligonucleotide
aguccugugagccggcugu

SEQ ID NO: 62439 - RNA, 19 nt, Artificial Sequence
  Description of Artificial Sequence: Synthetic oligonucleotide
guuugcaugugugugugug

SEQ ID NO: 62440 - RNA, 19 nt, Artificial Sequence
  Description of Artificial Sequence: Synthetic oligonucleotide
cuugcauuccgcacugcug

SEQ ID NO: 62441 - RNA, 19 nt, Artificial Sequence
  Description of Artificial Sequence: Synthetic oligonucleotide
ugccuuuacccuauacccu

SEQ ID NO: 62442 - RNA, 19 nt, Artificial Sequence
  Description of Artificial Sequence: Synthetic oligonucleotide
ucgugaagucuccggaucu

SEQ ID NO: 62443 - RNA, 19 nt, Artificial Sequence
  Description of Artificial Sequence: Synthetic oligonucleotide
gaaucagaggaaugugcca

SEQ ID NO: 62444 - RNA, 19 nt, Artificial Sequence
  Description of Artificial Sequence: Synthetic oligonucleotide
cagacaucacugcacggcc

SEQ ID NO: 62445 - RNA, 19 nt, Artificial Sequence
  Description of Artificial Sequence: Synthetic oligonucleotide
aguugugccuuuaacagaa

SEQ ID NO: 62446 - RNA, 19 nt, Artificial Sequence
  Description of Artificial Sequence: Synthetic oligonucleotide
aucuucuaccuggaggcac

SEQ ID NO: 62447 - RNA, 19 nt, Artificial Sequence
  Description of Artificial Sequence: Synthetic oligonucleotide
cguacgaguuccaugaggg

SEQ ID NO: 62448 - RNA, 19 nt, Artificial Sequence
  Description of Artificial Sequence: Synthetic oligonucleotide
uacgugagagcagacuccc

SEQ ID NO: 62449 - RNA, 19 nt, Artificial Sequence
  Description of Artificial Sequence: Synthetic oligonucleotide
uaacauuaugaagcgucca

SEQ ID NO: 62450 - RNA, 19 nt, Artificial Sequence
  Description of Artificial Sequence: Synthetic oligonucleotide
cauggaugccagagcaugc

SEQ ID NO: 62451 - RNA, 19 nt, Artificial Sequence
  Description of Artificial Sequence: Synthetic oligonucleotide
ggaaucagaggaaugugcc

SEQ ID NO: 62452 - RNA, 19 nt, Artificial Sequence
  Description of Artificial Sequence: Synthetic oligonucleotide
uguguguguguguguguag

SEQ ID NO: 62453 - RNA, 19 nt, Artificial Sequence
  Description of Artificial Sequence: Synthetic oligonucleotide
cacacacacacaaggcaag

SEQ ID NO: 62454 - RNA, 19 nt, Artificial Sequence
  Description of Artificial Sequence: Synthetic oligonucleotide
uuugcaugugugugugugu

SEQ ID NO: 62455 - RNA, 19 nt, Artificial Sequence
  Description of Artificial Sequence: Synthetic oligonucleotide
cuccuauucucaacucugc

SEQ ID NO: 62456 - RNA, 19 nt, Artificial Sequence
  Description of Artificial Sequence: Synthetic oligonucleotide
gaagcguccacaccugcuc

SEQ ID NO: 62457 - RNA, 19 nt, Artificial Sequence
  Description of Artificial Sequence: Synthetic oligonucleotide
cucuguugaagucgugaag

SEQ ID NO: 62458 - RNA, 19 nt, Artificial Sequence
  Description of Artificial Sequence: Synthetic oligonucleotide
caauagacaaggaccucuc

SEQ ID NO: 62459 - RNA, 19 nt, Artificial Sequence
  Description of Artificial Sequence: Synthetic oligonucleotide
guguguguguguguguagg

SEQ ID NO: 62460 - RNA, 19 nt, Artificial Sequence
  Description of Artificial Sequence: Synthetic oligonucleotide
uacgggaucguugcugaag

SEQ ID NO: 62461 - RNA, 19 nt, Artificial Sequence
  Description of Artificial Sequence: Synthetic oligonucleotide
uuguccgucugugugcugc

SEQ ID NO: 62462 - RNA, 19 nt, Artificial Sequence
  Description of Artificial Sequence: Synthetic oligonucleotide
cacaggacgaggcuagaug

SEQ ID NO: 62463 - RNA, 19 nt, Artificial Sequence
  Description of Artificial Sequence: Synthetic oligonucleotide
guugcuacccacaggacga

SEQ ID NO: 62464 - RNA, 19 nt, Artificial Sequence
  Description of Artificial Sequence: Synthetic oligonucleotide
uuccccaacuuaaauccau

SEQ ID NO: 62465 - RNA, 19 nt, Artificial Sequence
  Description of Artificial Sequence: Synthetic oligonucleotide
aggggcguuauauucuggu

SEQ ID NO: 62466 - RNA, 19 nt, Artificial Sequence
  Description of Artificial Sequence: Synthetic oligonucleotide
aaauggggccauagagcac

SEQ ID NO: 62467 - RNA, 19 nt, Artificial Sequence
  Description of Artificial Sequence: Synthetic oligonucleotide
uguguguguguguguaggu

SEQ ID NO: 62468 - RNA, 19 nt, Artificial Sequence
  Description of Artificial Sequence: Synthetic oligonucleotide
gaacccuauacuccccuuc

SEQ ID NO: 62469 - RNA, 19 nt, Artificial Sequence
  Description of Artificial Sequence: Synthetic oligonucleotide
guaaccugcguuccaucug

SEQ ID NO: 62470 - RNA, 19 nt, Artificial Sequence
  Description of Artificial Sequence: Synthetic oligonucleotide
uggccaacgugguggaagc

SEQ ID NO: 62471 - RNA, 19 nt, Artificial Sequence
  Description of Artificial Sequence: Synthetic oligonucleotide
cagaguguguguguguuug

SEQ ID NO: 62472 - RNA, 19 nt, Artificial Sequence
  Description of Artificial Sequence: Synthetic oligonucleotide
uuuuagcuggggaccucug

SEQ ID NO: 62473 - RNA, 19 nt, Artificial Sequence
  Description of Artificial Sequence: Synthetic oligonucleotide
ugggauuauuccccaacuu

SEQ ID NO: 62474 - RNA, 19 nt, Artificial Sequence
  Description of Artificial Sequence: Synthetic oligonucleotide
gcacucauggcaaagugcc

SEQ ID NO: 62475 - RNA, 19 nt, Artificial Sequence
  Description of Artificial Sequence: Synthetic oligonucleotide
agauuacacauggaugcca

SEQ ID NO: 62476 - RNA, 19 nt, Artificial Sequence
  Description of Artificial Sequence: Synthetic oligonucleotide
uacucacagguauguacgu

SEQ ID NO: 62477 - RNA, 19 nt, Artificial Sequence
  Description of Artificial Sequence: Synthetic oligonucleotide
cuuacgggaucguugcuga

SEQ ID NO: 62478 - RNA, 19 nt, Artificial Sequence
  Description of Artificial Sequence: Synthetic oligonucleotide
ucggucucggagaucucug

SEQ ID NO: 62479 - RNA, 19 nt, Artificial Sequence
  Description of Artificial Sequence: Synthetic oligonucleotide
uguguguguguguuugcau

SEQ ID NO: 62480 - RNA, 19 nt, Artificial Sequence
  Description of Artificial Sequence: Synthetic oligonucleotide
cacaaccacacacacacaa

SEQ ID NO: 62481 - RNA, 19 nt, Artificial Sequence
  Description of Artificial Sequence: Synthetic oligonucleotide
gguggacuuaaccaggcuc

SEQ ID NO: 62482 - RNA, 19 nt, Artificial Sequence
  Description of Artificial Sequence: Synthetic oligonucleotide
cugccgacuucccaugacc

SEQ ID NO: 62483 - RNA, 19 nt, Artificial Sequence
  Description of Artificial Sequence: Synthetic oligonucleotide
uccccgcacacucaucugu

SEQ ID NO: 62484 - RNA, 19 nt, Artificial Sequence
  Description of Artificial Sequence: Synthetic oligonucleotide
agacaucacugcacggccc

SEQ ID NO: 62485 - RNA, 19 nt, Artificial Sequence
  Description of Artificial Sequence: Synthetic oligonucleotide
cagugagcucucaccauag

SEQ ID NO: 62486 - RNA, 19 nt, Artificial Sequence
  Description of Artificial Sequence: Synthetic oligonucleotide
ugucggcguugucauagca

SEQ ID NO: 62487 - RNA, 19 nt, Artificial Sequence
  Description of Artificial Sequence: Synthetic oligonucleotide
acguaggcuugcuucucuc

SEQ ID NO: 62488 - RNA, 19 nt, Artificial Sequence
  Description of Artificial Sequence: Synthetic oligonucleotide
cauguguguguguguuugc

SEQ ID NO: 62489 - RNA, 19 nt, Artificial Sequence
  Description of Artificial Sequence: Synthetic oligonucleotide
uccgaugcuccucgcuugc

SEQ ID NO: 62490 - RNA, 19 nt, Artificial Sequence
  Description of Artificial Sequence: Synthetic oligonucleotide
cuguugaagucgugaaguc

SEQ ID NO: 62491 - RNA, 19 nt, Artificial Sequence
  Description of Artificial Sequence: Synthetic oligonucleotide
ugugaacaauuugggauua

SEQ ID NO: 62492 - RNA, 19 nt, Artificial Sequence
  Description of Artificial Sequence: Synthetic oligonucleotide
aguguguguguguuugcau

SEQ ID NO: 62493 - RNA, 19 nt, Artificial Sequence
  Description of Artificial Sequence: Synthetic oligonucleotide
acaaccacacacacacaag

SEQ ID NO: 62494 - RNA, 19 nt, Artificial Sequence
  Description of Artificial Sequence: Synthetic oligonucleotide
uccccaacuuaaauccauc

SEQ ID NO: 62495 - RNA, 19 nt, Artificial Sequence
  Description of Artificial Sequence: Synthetic oligonucleotide
auuacacauggaugccaga

SEQ ID NO: 62496 - RNA, 19 nt, Artificial Sequence
  Description of Artificial Sequence: Synthetic oligonucleotide
gacgaggcuagaugagcac

SEQ ID NO: 62497 - RNA, 19 nt, Artificial Sequence
  Description of Artificial Sequence: Synthetic oligonucleotide
ugugugugugugugugugu

SEQ ID NO: 62498 - RNA, 19 nt, Artificial Sequence
  Description of Artificial Sequence: Synthetic oligonucleotide
ucugccgacuucccaugac

SEQ ID NO: 62499 - RNA, 19 nt, Artificial Sequence
  Description of Artificial Sequence: Synthetic oligonucleotide
guaguagugguuugguagu

SEQ ID NO: 62500 - RNA, 19 nt, Artificial Sequence
  Description of Artificial Sequence: Synthetic oligonucleotide
guacgugagagcagacucc

SEQ ID NO: 62501 - RNA, 19 nt, Artificial Sequence
  Description of Artificial Sequence: Synthetic oligonucleotide
uaguagugguuugguagug

SEQ ID NO: 62502 - RNA, 19 nt, Artificial Sequence
  Description of Artificial Sequence: Synthetic oligonucleotide
auuugcugggcucgcucca

SEQ ID NO: 62503 - RNA, 19 nt, Artificial Sequence
  Description of Artificial Sequence: Synthetic oligonucleotide
uccucgcuugcauuccgca

SEQ ID NO: 62504 - RNA, 19 nt, Artificial Sequence
  Description of Artificial Sequence: Synthetic oligonucleotide
gugugugugugugugugug

SEQ ID NO: 62505 - RNA, 19 nt, Artificial Sequence
  Description of Artificial Sequence: Synthetic oligonucleotide
acacacacacacaaccaca

SEQ ID NO: 62506 - RNA, 19 nt, Artificial Sequence
  Description of Artificial Sequence: Synthetic oligonucleotide
agacacacacacacaacca

SEQ ID NO: 62507 - RNA, 19 nt, Artificial Sequence
  Description of Artificial Sequence: Synthetic oligonucleotide
guacgaguuccaugagggc

SEQ ID NO: 62508 - RNA, 19 nt, Artificial Sequence
  Description of Artificial Sequence: Synthetic oligonucleotide
gucgugaagucuccggauc

SEQ ID NO: 62509 - RNA, 19 nt, Artificial Sequence
  Description of Artificial Sequence: Synthetic oligonucleotide
cuaccuuggagggagggca

SEQ ID NO: 62510 - RNA, 19 nt, Artificial Sequence
  Description of Artificial Sequence: Synthetic oligonucleotide
cacacacacacaaccacaa

SEQ ID NO: 62511 - RNA, 19 nt, Artificial Sequence
  Description of Artificial Sequence: Synthetic oligonucleotide
ucgcuccacgaucgcaaag

SEQ ID NO: 62512 - RNA, 19 nt, Artificial Sequence
  Description of Artificial Sequence: Synthetic oligonucleotide
ugugugcugcuguccuugc

SEQ ID NO: 62513 - RNA, 19 nt, Artificial Sequence
  Description of Artificial Sequence: Synthetic oligonucleotide
gucggcguugucauagcag

SEQ ID NO: 62514 - RNA, 19 nt, Artificial Sequence
  Description of Artificial Sequence: Synthetic oligonucleotide
ggauuauuccccaacuuaa

SEQ ID NO: 62515 - RNA, 19 nt, Artificial Sequence
  Description of Artificial Sequence: Synthetic oligonucleotide
ugguggacuuaaccaggcu

SEQ ID NO: 62516 - RNA, 19 nt, Artificial Sequence
  Description of Artificial Sequence: Synthetic oligonucleotide
gguagugacagguuugggu

SEQ ID NO: 62517 - RNA, 19 nt, Artificial Sequence
  Description of Artificial Sequence: Synthetic oligonucleotide
aguagugguuugguaguga

SEQ ID NO: 62518 - RNA, 19 nt, Artificial Sequence
  Description of Artificial Sequence: Synthetic oligonucleotide
auguguguguguguuugca

SEQ ID NO: 62519 - RNA, 19 nt, Artificial Sequence
  Description of Artificial Sequence: Synthetic oligonucleotide
gaguguguguguguuugca

SEQ ID NO: 62520 - RNA, 19 nt, Artificial Sequence
  Description of Artificial Sequence: Synthetic oligonucleotide
guacagaucuguacaccac

SEQ ID NO: 62521 - RNA, 19 nt, Artificial Sequence
  Description of Artificial Sequence: Synthetic oligonucleotide
uugcauguguguguguguu

SEQ ID NO: 62522 - RNA, 19 nt, Artificial Sequence
  Description of Artificial Sequence: Synthetic oligonucleotide
ugguaacauuaugaagcgu

SEQ ID NO: 62523 - RNA, 19 nt, Artificial Sequence
  Description of Artificial Sequence: Synthetic oligonucleotide
cucccguacgaguuccaug

SEQ ID NO: 62524 - RNA, 19 nt, Artificial Sequence
  Description of Artificial Sequence: Synthetic oligonucleotide
gcauguguguguguguuug

SEQ ID NO: 62525 - RNA, 19 nt, Artificial Sequence
  Description of Artificial Sequence: Synthetic oligonucleotide
uugucggcguugucauagc

SEQ ID NO: 62526 - RNA, 19 nt, Artificial Sequence
  Description of Artificial Sequence: Synthetic oligonucleotide
caaaccugcuaagaggcaa

SEQ ID NO: 62527 - RNA, 19 nt, Artificial Sequence
  Description of Artificial Sequence: Synthetic oligonucleotide
cugagucuaggauuucuua

SEQ ID NO: 62528 - RNA, 19 nt, Artificial Sequence
  Description of Artificial Sequence: Synthetic oligonucleotide
guauggggccuccccagac

SEQ ID NO: 62529 - RNA, 19 nt, Artificial Sequence
  Description of Artificial Sequence: Synthetic oligonucleotide
ugccauuucucgagugguu

SEQ ID NO: 62530 - RNA, 19 nt, Artificial Sequence
  Description of Artificial Sequence: Synthetic oligonucleotide
agcguccacaccugcucug

SEQ ID NO: 62531 - RNA, 19 nt, Artificial Sequence
  Description of Artificial Sequence: Synthetic oligonucleotide
uccguaaccugcguuccau

SEQ ID NO: 62532 - RNA, 19 nt, Artificial Sequence
  Description of Artificial Sequence: Synthetic oligonucleotide
gagacucacgcuugguggu

SEQ ID NO: 62533 - RNA, 19 nt, Artificial Sequence
  Description of Artificial Sequence: Synthetic oligonucleotide
ggcguugucauagcagccc

SEQ ID NO: 62534 - RNA, 19 nt, Artificial Sequence
  Description of Artificial Sequence: Synthetic oligonucleotide
caggggcguuauauucugg

SEQ ID NO: 62535 - RNA, 19 nt, Artificial Sequence
  Description of Artificial Sequence: Synthetic oligonucleotide
agcagacucccaggcaaag

SEQ ID NO: 62536 - RNA, 19 nt, Artificial Sequence
  Description of Artificial Sequence: Synthetic oligonucleotide
cuccucgcuugcauuccgc

SEQ ID NO: 62537 - RNA, 19 nt, Artificial Sequence
  Description of Artificial Sequence: Synthetic oligonucleotide
guauacgcacuaccuugga

SEQ ID NO: 62538 - RNA, 19 nt, Artificial Sequence
  Description of Artificial Sequence: Synthetic oligonucleotide
ugcuccucgcuugcauucc

SEQ ID NO: 62539 - RNA, 19 nt, Artificial Sequence
  Description of Artificial Sequence: Synthetic oligonucleotide
cugggcucgcuccacgauc

SEQ ID NO: 62540 - RNA, 19 nt, Artificial Sequence
  Description of Artificial Sequence: Synthetic oligonucleotide
uccuuacgggaucguugcu

SEQ ID NO: 62541 - RNA, 19 nt, Artificial Sequence
  Description of Artificial Sequence: Synthetic oligonucleotide
acgaucgcaaaggcgucug

SEQ ID NO: 62542 - RNA, 19 nt, Artificial Sequence
  Description of Artificial Sequence: Synthetic oligonucleotide
ccguacgaguuccaugagg

SEQ ID NO: 62543 - RNA, 19 nt, Artificial Sequence
  Description of Artificial Sequence: Synthetic oligonucleotide
guguguguguguguagguc

SEQ ID NO: 62544 - RNA, 19 nt, Artificial Sequence
  Description of Artificial Sequence: Synthetic oligonucleotide
cuaggauuucuuagcagau

SEQ ID NO: 62545 - RNA, 19 nt, Artificial Sequence
  Description of Artificial Sequence: Synthetic oligonucleotide
caaggaccucucaccuccc

SEQ ID NO: 62546 - RNA, 19 nt, Artificial Sequence
  Description of Artificial Sequence: Synthetic oligonucleotide
cucgggcuugugcaacaag

SEQ ID NO: 62547 - RNA, 19 nt, Artificial Sequence
  Description of Artificial Sequence: Synthetic oligonucleotide
auuccccaacuuaaaucca

SEQ ID NO: 62548 - RNA, 19 nt, Artificial Sequence
  Description of Artificial Sequence: Synthetic oligonucleotide
guaggcuugcuucucucgu

SEQ ID NO: 62549 - RNA, 19 nt, Artificial Sequence
  Description of Artificial Sequence: Synthetic oligonucleotide
gcaggggcguuauauucug

SEQ ID NO: 62550 - RNA, 19 nt, Artificial Sequence
  Description of Artificial Sequence: Synthetic oligonucleotide
ugcauguguguguguguuu

SEQ ID NO: 62551 - RNA, 19 nt, Artificial Sequence
  Description of Artificial Sequence: Synthetic oligonucleotide
auauucugguagacuggcu

SEQ ID NO: 62552 - RNA, 19 nt, Artificial Sequence
  Description of Artificial Sequence: Synthetic oligonucleotide
ugggugcgugcgugcaugc

SEQ ID NO: 62553 - RNA, 19 nt, Artificial Sequence
  Description of Artificial Sequence: Synthetic oligonucleotide
gaucuucuaccuggaggca

SEQ ID NO: 62554 - RNA, 19 nt, Artificial Sequence
  Description of Artificial Sequence: Synthetic oligonucleotide
ugcgcgugugugugugugu

SEQ ID NO: 62555 - RNA, 19 nt, Artificial Sequence
  Description of Artificial Sequence: Synthetic oligonucleotide
ucugggugcgugcgugcau

SEQ ID NO: 62556 - RNA, 19 nt, Artificial Sequence
  Description of Artificial Sequence: Synthetic oligonucleotide
augcgcgugugugugugug

SEQ ID NO: 62557 - RNA, 19 nt, Artificial Sequence
  Description of Artificial Sequence: Synthetic oligonucleotide
caaucccuccuauucucaa

SEQ ID NO: 62558 - RNA, 19 nt, Artificial Sequence
  Description of Artificial Sequence: Synthetic oligonucleotide
guccucccaagcagaaagc

SEQ ID NO: 62559 - RNA, 19 nt, Artificial Sequence
  Description of Artificial Sequence: Synthetic oligonucleotide
gaucgcaaaggcgucuggu

SEQ ID NO: 62560 - RNA, 19 nt, Artificial Sequence
  Description of Artificial Sequence: Synthetic oligonucleotide
ugugaguccugaggaucaa

SEQ ID NO: 62561 - RNA, 19 nt, Artificial Sequence
  Description of Artificial Sequence: Synthetic oligonucleotide
uuacgggaucguugcugaa

SEQ ID NO: 62562 - RNA, 19 nt, Artificial Sequence
  Description of Artificial Sequence: Synthetic oligonucleotide
cccuauacuccccuuccac

SEQ ID NO: 62563 - RNA, 19 nt, Artificial Sequence
  Description of Artificial Sequence: Synthetic oligonucleotide
cauccacuuucgaugugaa

SEQ ID NO: 62564 - RNA, 19 nt, Artificial Sequence
  Description of Artificial Sequence: Synthetic oligonucleotide
aagugccggauggugcuuu

SEQ ID NO: 62565 - RNA, 19 nt, Artificial Sequence
  Description of Artificial Sequence: Synthetic oligonucleotide
ccacacacacacaaggcaa

SEQ ID NO: 62566 - RNA, 19 nt, Artificial Sequence
  Description of Artificial Sequence: Synthetic oligonucleotide
gguccguaaccugcguucc

SEQ ID NO: 62567 - RNA, 19 nt, Artificial Sequence
  Description of Artificial Sequence: Synthetic oligonucleotide
ccuuacgggaucguugcug

SEQ ID NO: 62568 - RNA, 19 nt, Artificial Sequence
  Description of Artificial Sequence: Synthetic oligonucleotide
uggcaaagugccggauggu

SEQ ID NO: 62569 - RNA, 19 nt, Artificial Sequence
  Description of Artificial Sequence: Synthetic oligonucleotide
caguccugugagccggcug

SEQ ID NO: 62570 - RNA, 19 nt, Artificial Sequence
  Description of Artificial Sequence: Synthetic oligonucleotide
gcuccucgcuugcauuccg

SEQ ID NO: 62571 - RNA, 19 nt, Artificial Sequence
  Description of Artificial Sequence: Synthetic oligonucleotide
cagucggucucggagaucu

SEQ ID NO: 62572 - RNA, 19 nt, Artificial Sequence
  Description of Artificial Sequence: Synthetic oligonucleotide
aaagugccggauggugcuu

SEQ ID NO: 62573 - RNA, 19 nt, Artificial Sequence
  Description of Artificial Sequence: Synthetic oligonucleotide
gugugugugugugugugua

SEQ ID NO: 62574 - RNA, 19 nt, Artificial Sequence
  Description of Artificial Sequence: Synthetic oligonucleotide
ggacgaggcuagaugagca

SEQ ID NO: 62575 - RNA, 19 nt, Artificial Sequence
  Description of Artificial Sequence: Synthetic oligonucleotide
gcuuuguaguugcuaccca

SEQ ID NO: 62576 - RNA, 19 nt, Artificial Sequence
  Description of Artificial Sequence: Synthetic oligonucleotide
gcugaccaacuguauucac

SEQ ID NO: 62577 - RNA, 19 nt, Artificial Sequence
  Description of Artificial Sequence: Synthetic oligonucleotide
gcaaagacacacacacaca

SEQ ID NO: 62578 - RNA, 19 nt, Artificial Sequence
  Description of Artificial Sequence: Synthetic oligonucleotide
gguagacuggcuggcuggc

SEQ ID NO: 62579 - RNA, 19 nt, Artificial Sequence
  Description of Artificial Sequence: Synthetic oligonucleotide
gcgugugugugugugugug

SEQ ID NO: 62580 - RNA, 19 nt, Artificial Sequence
  Description of Artificial Sequence: Synthetic oligonucleotide
cuaggaucucaaugugccu

SEQ ID NO: 62581 - RNA, 19 nt, Artificial Sequence
  Description of Artificial Sequence: Synthetic oligonucleotide
aaccugcguuccaucugcu

SEQ ID NO: 62582 - RNA, 19 nt, Artificial Sequence
  Description of Artificial Sequence: Synthetic oligonucleotide
ccacuuucgaugugaacaa

SEQ ID NO: 62583 - RNA, 19 nt, Artificial Sequence
  Description of Artificial Sequence: Synthetic oligonucleotide
ggcugaccaacuguauuca

SEQ ID NO: 62584 - RNA, 19 nt, Artificial Sequence
  Description of Artificial Sequence: Synthetic oligonucleotide
guguguguguguaggucaa

SEQ ID NO: 62585 - RNA, 19 nt, Artificial Sequence
  Description of Artificial Sequence: Synthetic oligonucleotide
gcguuauauucugguagac

SEQ ID NO: 62586 - RNA, 19 nt, Artificial Sequence
  Description of Artificial Sequence: Synthetic oligonucleotide
guccguaaccugcguucca

SEQ ID NO: 62587 - RNA, 19 nt, Artificial Sequence
  Description of Artificial Sequence: Synthetic oligonucleotide
ccauuugcugggcucgcuc

SEQ ID NO: 62588 - RNA, 19 nt, Artificial Sequence
  Description of Artificial Sequence: Synthetic oligonucleotide
ccucgcuugcauuccgcac

SEQ ID NO: 62589 - RNA, 19 nt, Artificial Sequence
  Description of Artificial Sequence: Synthetic oligonucleotide
ugcgugcgugcaugcgcgu

SEQ ID NO: 62590 - RNA, 19 nt, Artificial Sequence
  Description of Artificial Sequence: Synthetic oligonucleotide
gcguccacaccugcucugg

SEQ ID NO: 62591 - RNA, 19 nt, Artificial Sequence
  Description of Artificial Sequence: Synthetic oligonucleotide
gcaugcgcgugugugugug

SEQ ID NO: 62592 - RNA, 19 nt, Artificial Sequence
  Description of Artificial Sequence: Synthetic oligonucleotide
gggcagugcagcacauacc

SEQ ID NO: 62593 - RNA, 19 nt, Artificial Sequence
  Description of Artificial Sequence: Synthetic oligonucleotide
ggcuugcuucucucguaac

SEQ ID NO: 62594 - RNA, 19 nt, Artificial Sequence
  Description of Artificial Sequence: Synthetic oligonucleotide
ggggcguuauauucuggua

SEQ ID NO: 62595 - RNA, 19 nt, Artificial Sequence
  Description of Artificial Sequence: Synthetic oligonucleotide
ccggggaaucagaggaaug

SEQ ID NO: 62596 - RNA, 19 nt, Artificial Sequence
  Description of Artificial Sequence: Synthetic oligonucleotide
cucgcuccacgaucgcaaa

SEQ ID NO: 62597 - RNA, 19 nt, Artificial Sequence
  Description of Artificial Sequence: Synthetic oligonucleotide
gcgcgugugugugugugug

SEQ ID NO: 62598 - RNA, 19 nt, Artificial Sequence
  Description of Artificial Sequence: Synthetic oligonucleotide
acgcacuaccuuggaggga

SEQ ID NO: 62599 - RNA, 19 nt, Artificial Sequence
  Description of Artificial Sequence: Synthetic oligonucleotide
cacguaggcuugcuucucu

SEQ ID NO: 62600 - RNA, 19 nt, Artificial Sequence
  Description of Artificial Sequence: Synthetic oligonucleotide
gggugcgugcgugcaugcg

SEQ ID NO: 62601 - RNA, 19 nt, Artificial Sequence
  Description of Artificial Sequence: Synthetic oligonucleotide
ccacgaucgcaaaggcguc

SEQ ID NO: 62602 - RNA, 19 nt, Artificial Sequence
  Description of Artificial Sequence: Synthetic oligonucleotide
ccuuuacccuauacccuga

SEQ ID NO: 62603 - RNA, 19 nt, Artificial Sequence
  Description of Artificial Sequence: Synthetic oligonucleotide
gcucgcuccacgaucgcaa

SEQ ID NO: 62604 - RNA, 19 nt, Artificial Sequence
  Description of Artificial Sequence: Synthetic oligonucleotide
acgugagagcagacuccca

SEQ ID NO: 62605 - RNA, 19 nt, Artificial Sequence
  Description of Artificial Sequence: Synthetic oligonucleotide
cacgcuuggugguggacuu

SEQ ID NO: 62606 - RNA, 19 nt, Artificial Sequence
  Description of Artificial Sequence: Synthetic oligonucleotide
cauccgggaacucgggcuu

SEQ ID NO: 62607 - RNA, 19 nt, Artificial Sequence
  Description of Artificial Sequence: Synthetic oligonucleotide
gucccuuuggcagcuggau

SEQ ID NO: 62608 - RNA, 19 nt, Artificial Sequence
  Description of Artificial Sequence: Synthetic oligonucleotide
guaucacaaauggggccau

SEQ ID NO: 62609 - RNA, 19 nt, Artificial Sequence
  Description of Artificial Sequence: Synthetic oligonucleotide
ccguaaccugcguuccauc

SEQ ID NO: 62610 - RNA, 19 nt, Artificial Sequence
  Description of Artificial Sequence: Synthetic oligonucleotide
cccguacgaguuccaugag

SEQ ID NO: 62611 - RNA, 19 nt, Artificial Sequence
  Description of Artificial Sequence: Synthetic oligonucleotide
cguaaccugcguuccaucu

SEQ ID NO: 62612 - RNA, 19 nt, Artificial Sequence
  Description of Artificial Sequence: Synthetic oligonucleotide
cuccuaccaugugaguccu

SEQ ID NO: 62613 - RNA, 19 nt, Artificial Sequence
  Description of Artificial Sequence: Synthetic oligonucleotide
cacgaucgcaaaggcgucu

SEQ ID NO: 62614 - RNA, 19 nt, Artificial Sequence
  Description of Artificial Sequence: Synthetic oligonucleotide
ggcagaguguguguguguu

SEQ ID NO: 62615 - RNA, 19 nt, Artificial Sequence
  Description of Artificial Sequence: Synthetic oligonucleotide
gugagccggcuguuuuggu

SEQ ID NO: 62616 - RNA, 19 nt, Artificial Sequence
  Description of Artificial Sequence: Synthetic oligonucleotide
gcgugcgugcaugcgcgug

SEQ ID NO: 62617 - RNA, 19 nt, Artificial Sequence
  Description of Artificial Sequence: Synthetic oligonucleotide
cgugaagucuccggaucuc

SEQ ID NO: 62618 - RNA, 19 nt, Artificial Sequence
  Description of Artificial Sequence: Synthetic oligonucleotide
ccgucccuccuagaaaaca

SEQ ID NO: 62619 - RNA, 19 nt, Artificial Sequence
  Description of Artificial Sequence: Synthetic oligonucleotide
caugcgcgugugugugugu

SEQ ID NO: 62620 - RNA, 19 nt, Artificial Sequence
  Description of Artificial Sequence: Synthetic oligonucleotide
ccccaacugaggauguagu

SEQ ID NO: 62621 - RNA, 19 nt, Artificial Sequence
  Description of Artificial Sequence: Synthetic oligonucleotide
cacuuucgaugugaacaau

SEQ ID NO: 62622 - RNA, 19 nt, Artificial Sequence
  Description of Artificial Sequence: Synthetic oligonucleotide
ccacaaccacacacacaca

SEQ ID NO: 62623 - RNA, 19 nt, Artificial Sequence
  Description of Artificial Sequence: Synthetic oligonucleotide
gggcagagugugugugugu

SEQ ID NO: 62624 - RNA, 19 nt, Artificial Sequence
  Description of Artificial Sequence: Synthetic oligonucleotide
cgucccuccuagaaaacau

SEQ ID NO: 62625 - RNA, 19 nt, Artificial Sequence
  Description of Artificial Sequence: Synthetic oligonucleotide
gcagaguguguguguguuu

SEQ ID NO: 62626 - RNA, 19 nt, Artificial Sequence
  Description of Artificial Sequence: Synthetic oligonucleotide
ggccaacgugguggaagca

SEQ ID NO: 62627 - RNA, 19 nt, Artificial Sequence
  Description of Artificial Sequence: Synthetic oligonucleotide
ccuccgaugcuccucgcuu

SEQ ID NO: 62628 - RNA, 19 nt, Artificial Sequence
  Description of Artificial Sequence: Synthetic oligonucleotide
cgggaucguugcugaagga

SEQ ID NO: 62629 - RNA, 19 nt, Artificial Sequence
  Description of Artificial Sequence: Synthetic oligonucleotide
cgugugugugugugugugu

SEQ ID NO: 62630 - RNA, 19 nt, Artificial Sequence
  Description of Artificial Sequence: Synthetic oligonucleotide
ccgaugcuccucgcuugca

SEQ ID NO: 62631 - RNA, 19 nt, Artificial Sequence
  Description of Artificial Sequence: Synthetic oligonucleotide
ccagguccguaaccugcgu

SEQ ID NO: 62632 - RNA, 19 nt, Artificial Sequence
  Description of Artificial Sequence: Synthetic oligonucleotide
ccacaggacgaggcuagau

SEQ ID NO: 62633 - RNA, 19 nt, Artificial Sequence
  Description of Artificial Sequence: Synthetic oligonucleotide
cgcgugugugugugugugu

SEQ ID NO: 62634 - RNA, 19 nt, Artificial Sequence
  Description of Artificial Sequence: Synthetic oligonucleotide
aauaauacggaacuaaucu

SEQ ID NO: 62635 - RNA, 19 nt, Artificial Sequence
  Description of Artificial Sequence: Synthetic oligonucleotide
uguaggauaguaaauauca

SEQ ID NO: 62636 - RNA, 19 nt, Artificial Sequence
  Description of Artificial Sequence: Synthetic oligonucleotide
auacaauccacguucaugc

SEQ ID NO: 62637 - RNA, 19 nt, Artificial Sequence
  Description of Artificial Sequence: Synthetic oligonucleotide
uugguuuaaauauugauca

SEQ ID NO: 62638 - RNA, 19 nt, Artificial Sequence
  Description of Artificial Sequence: Synthetic oligonucleotide
aaaacacuaaauuaucuca

SEQ ID NO: 62639 - RNA, 19 nt, Artificial Sequence
  Description of Artificial Sequence: Synthetic oligonucleotide
aagacagcgaauuaccuuc

SEQ ID NO: 62640 - RNA, 19 nt, Artificial Sequence
  Description of Artificial Sequence: Synthetic oligonucleotide
uauaucgucugccucaucg

SEQ ID NO: 62641 - RNA, 19 nt, Artificial Sequence
  Description of Artificial Sequence: Synthetic oligonucleotide
uaaauuauguaccaguuaa

SEQ ID NO: 62642 - RNA, 19 nt, Artificial Sequence
  Description of Artificial Sequence: Synthetic oligonucleotide
uaauaugucacagagcagg

SEQ ID NO: 62643 - RNA, 19 nt, Artificial Sequence
  Description of Artificial Sequence: Synthetic oligonucleotide
uguucauggcuuauuaugg

SEQ ID NO: 62644 - RNA, 19 nt, Artificial Sequence
  Description of Artificial Sequence: Synthetic oligonucleotide
acaguuuauucuuugaguc

SEQ ID NO: 62645 - RNA, 19 nt, Artificial Sequence
  Description of Artificial Sequence: Synthetic oligonucleotide
aaagauuauucccaaccuc

SEQ ID NO: 62646 - RNA, 19 nt, Artificial Sequence
  Description of Artificial Sequence: Synthetic oligonucleotide
uuuuacuugagauaauucu

SEQ ID NO: 62647 - RNA, 19 nt, Artificial Sequence
  Description of Artificial Sequence: Synthetic oligonucleotide
uaugguuuuagacagucca

SEQ ID NO: 62648 - RNA, 19 nt, Artificial Sequence
  Description of Artificial Sequence: Synthetic oligonucleotide
cauaauaugucacagagca

SEQ ID NO: 62649 - RNA, 19 nt, Artificial Sequence
  Description of Artificial Sequence: Synthetic oligonucleotide
aacagaauggcuuagccau

SEQ ID NO: 62650 - RNA, 19 nt, Artificial Sequence
  Description of Artificial Sequence: Synthetic oligonucleotide
ugaccuauuaucauggcug

SEQ ID NO: 62651 - RNA, 19 nt, Artificial Sequence
  Description of Artificial Sequence: Synthetic oligonucleotide
uccaguuaaaguuauacac

SEQ ID NO: 62652 - RNA, 19 nt, Artificial Sequence
  Description of Artificial Sequence: Synthetic oligonucleotide
uuaauaaugaccacuguua

SEQ ID NO: 62653 - RNA, 19 nt, Artificial Sequence
  Description of Artificial Sequence: Synthetic oligonucleotide
uacggaacuaaucucauug

SEQ ID NO: 62654 - RNA, 19 nt, Artificial Sequence
  Description of Artificial Sequence: Synthetic oligonucleotide
acccaaaggauuuaacacc

SEQ ID NO: 62655 - RNA, 19 nt, Artificial Sequence
  Description of Artificial Sequence: Synthetic oligonucleotide
auaccuggaaaucuaauag

SEQ ID NO: 62656 - RNA, 19 nt, Artificial Sequence
  Description of Artificial Sequence: Synthetic oligonucleotide
uauauucuauauucugugg

SEQ ID NO: 62657 - RNA, 19 nt, Artificial Sequence
  Description of Artificial Sequence: Synthetic oligonucleotide
uaauacggaacuaaucuca

SEQ ID NO: 62658 - RNA, 19 nt, Artificial Sequence
  Description of Artificial Sequence: Synthetic oligonucleotide
uucaauaucuguagcguag

SEQ ID NO: 62659 - RNA, 19 nt, Artificial Sequence
  Description of Artificial Sequence: Synthetic oligonucleotide
uuuacuugagauaauucuc

SEQ ID NO: 62660 - RNA, 19 nt, Artificial Sequence
  Description of Artificial Sequence: Synthetic oligonucleotide
gauauugugcacgacacag

SEQ ID NO: 62661 - RNA, 19 nt, Artificial Sequence
  Description of Artificial Sequence: Synthetic oligonucleotide
aauagacgacaccagccac

SEQ ID NO: 62662 - RNA, 19 nt, Artificial Sequence
  Description of Artificial Sequence: Synthetic oligonucleotide
uccuauaauuacauauagg

SEQ ID NO: 62663 - RNA, 19 nt, Artificial Sequence
  Description of Artificial Sequence: Synthetic oligonucleotide
auaauacggaacuaaucuc

SEQ ID NO: 62664 - RNA, 19 nt, Artificial Sequence
  Description of Artificial Sequence: Synthetic oligonucleotide
uauaauaccugccauugau

SEQ ID NO: 62665 - RNA, 19 nt, Artificial Sequence
  Description of Artificial Sequence: Synthetic oligonucleotide
uuuuacuauaauaccugcc

SEQ ID NO: 62666 - RNA, 19 nt, Artificial Sequence
  Description of Artificial Sequence: Synthetic oligonucleotide
ugguaaguaaaacaugaac

SEQ ID NO: 62667 - RNA, 19 nt, Artificial Sequence
  Description of Artificial Sequence: Synthetic oligonucleotide
uauugugcacgacacaggc

SEQ ID NO: 62668 - RNA, 19 nt, Artificial Sequence
  Description of Artificial Sequence: Synthetic oligonucleotide
uguuuacguguuuugaugc

SEQ ID NO: 62669 - RNA, 19 nt, Artificial Sequence
  Description of Artificial Sequence: Synthetic oligonucleotide
uacauauagggagugaacc

SEQ ID NO: 62670 - RNA, 19 nt, Artificial Sequence
  Description of Artificial Sequence: Synthetic oligonucleotide
aaccuuugaccucccauac

SEQ ID NO: 62671 - RNA, 19 nt, Artificial Sequence
  Description of Artificial Sequence: Synthetic oligonucleotide
caauaaguaaaugggaccc

SEQ ID NO: 62672 - RNA, 19 nt, Artificial Sequence
  Description of Artificial Sequence: Synthetic oligonucleotide
agcgaauuaccuuccuucc

SEQ ID NO: 62673 - RNA, 19 nt, Artificial Sequence
  Description of Artificial Sequence: Synthetic oligonucleotide
uucuggaauacuuaucgca

SEQ ID NO: 62674 - RNA, 19 nt, Artificial Sequence
  Description of Artificial Sequence: Synthetic oligonucleotide
auauucuauauucugugga

SEQ ID NO: 62675 - RNA, 19 nt, Artificial Sequence
  Description of Artificial Sequence: Synthetic oligonucleotide
ucagagauuaaucuuugau

SEQ ID NO: 62676 - RNA, 19 nt, Artificial Sequence
  Description of Artificial Sequence: Synthetic oligonucleotide
ugaaggcuagaaaaggaug

SEQ ID NO: 62677 - RNA, 19 nt, Artificial Sequence
  Description of Artificial Sequence: Synthetic oligonucleotide
ucuaccugaaagagcaaag

SEQ ID NO: 62678 - RNA, 19 nt, Artificial Sequence
  Description of Artificial Sequence: Synthetic oligonucleotide
aaaaccuguugccaacgag

SEQ ID NO: 62679 - RNA, 19 nt, Artificial Sequence
  Description of Artificial Sequence: Synthetic oligonucleotide
uggaauacuuaucgcagag

SEQ ID NO: 62680 - RNA, 19 nt, Artificial Sequence
  Description of Artificial Sequence: Synthetic oligonucleotide
uauagcugguuucggaaag

SEQ ID NO: 62681 - RNA, 19 nt, Artificial Sequence
  Description of Artificial Sequence: Synthetic oligonucleotide
accaaauacaacauaugac

SEQ ID NO: 62682 - RNA, 19 nt, Artificial Sequence
  Description of Artificial Sequence: Synthetic oligonucleotide
agacacaucucucaguaug

SEQ ID NO: 62683 - RNA, 19 nt, Artificial Sequence
  Description of Artificial Sequence: Synthetic oligonucleotide
uuguuuacguguuuugaug

SEQ ID NO: 62684 - RNA, 19 nt, Artificial Sequence
  Description of Artificial Sequence: Synthetic oligonucleotide
auacuuaucgcagagacau

SEQ ID NO: 62685 - RNA, 19 nt, Artificial Sequence
  Description of Artificial Sequence: Synthetic oligonucleotide
guuuuagacaguccacugg

SEQ ID NO: 62686 - RNA, 19 nt, Artificial Sequence
  Description of Artificial Sequence: Synthetic oligonucleotide
auagcaaucagaaucagaa

SEQ ID NO: 62687 - RNA, 19 nt, Artificial Sequence
  Description of Artificial Sequence: Synthetic oligonucleotide
auguacagccaauagacga

SEQ ID NO: 62688 - RNA, 19 nt, Artificial Sequence
  Description of Artificial Sequence: Synthetic oligonucleotide
ugauucguuucucauugcc

SEQ ID NO: 62689 - RNA, 19 nt, Artificial Sequence
  Description of Artificial Sequence: Synthetic oligonucleotide
caaauagugaacugugaug

SEQ ID NO: 62690 - RNA, 19 nt, Artificial Sequence
  Description of Artificial Sequence: Synthetic oligonucleotide
uuaggcuucuguuuuguga

SEQ ID NO: 62691 - RNA, 19 nt, Artificial Sequence
  Description of Artificial Sequence: Synthetic oligonucleotide
uuuucaucacuuauaucgu

SEQ ID NO: 62692 - RNA, 19 nt, Artificial Sequence
  Description of Artificial Sequence: Synthetic oligonucleotide
gucuuaaauacaauccacg

SEQ ID NO: 62693 - RNA, 19 nt, Artificial Sequence
  Description of Artificial Sequence: Synthetic oligonucleotide
acuauaauaccugccauug

SEQ ID NO: 62694 - RNA, 19 nt, Artificial Sequence
  Description of Artificial Sequence: Synthetic oligonucleotide
cuacuagcagauauugugc

SEQ ID NO: 62695 - RNA, 19 nt, Artificial Sequence
  Description of Artificial Sequence: Synthetic oligonucleotide
uuaaugacgcuuccacugc

SEQ ID NO: 62696 - RNA, 19 nt, Artificial Sequence
  Description of Artificial Sequence: Synthetic oligonucleotide
ugacugauaucuuuuauuu

SEQ ID NO: 62697 - RNA, 19 nt, Artificial Sequence
  Description of Artificial Sequence: Synthetic oligonucleotide
ucaaggugcauucaauauc

SEQ ID NO: 62698 - RNA, 19 nt, Artificial Sequence
  Description of Artificial Sequence: Synthetic oligonucleotide
uuaucgcagagacauucag

SEQ ID NO: 62699 - RNA, 19 nt, Artificial Sequence
  Description of Artificial Sequence: Synthetic oligonucleotide
guuguugaagcaaucauac

SEQ ID NO: 62700 - RNA, 19 nt, Artificial Sequence
  Description of Artificial Sequence: Synthetic oligonucleotide
gaaucagaacuguaccugc

SEQ ID NO: 62701 - RNA, 19 nt, Artificial Sequence
  Description of Artificial Sequence: Synthetic oligonucleotide
cuaugaaggauaugugaag

SEQ ID NO: 62702 - RNA, 19 nt, Artificial Sequence
  Description of Artificial Sequence: Synthetic oligonucleotide
auguuaauccauuuccaca

SEQ ID NO: 62703 - RNA, 19 nt, Artificial Sequence
  Description of Artificial Sequence: Synthetic oligonucleotide
uguacagccaauagacgac

SEQ ID NO: 62704 - RNA, 19 nt, Artificial Sequence
  Description of Artificial Sequence: Synthetic oligonucleotide
uacuauaggaagcuuuuau

SEQ ID NO: 62705 - RNA, 19 nt, Artificial Sequence
  Description of Artificial Sequence: Synthetic oligonucleotide
uagggagugaaccuugaac

SEQ ID NO: 62706 - RNA, 19 nt, Artificial Sequence
  Description of Artificial Sequence: Synthetic oligonucleotide
cuagaaaaggaugggcucg

SEQ ID NO: 62707 - RNA, 19 nt, Artificial Sequence
  Description of Artificial Sequence: Synthetic oligonucleotide
acuaaucucauuguagugu

SEQ ID NO: 62708 - RNA, 19 nt, Artificial Sequence
  Description of Artificial Sequence: Synthetic oligonucleotide
uguacuauaggaagcuuuu

SEQ ID NO: 62709 - RNA, 19 nt, Artificial Sequence
  Description of Artificial Sequence: Synthetic oligonucleotide
uuacauauagggagugaac

SEQ ID NO: 62710 - RNA, 19 nt, Artificial Sequence
  Description of Artificial Sequence: Synthetic oligonucleotide
cagauauugugcacgacac

SEQ ID NO: 62711 - RNA, 19 nt, Artificial Sequence
  Description of Artificial Sequence: Synthetic oligonucleotide
aaggcuagaaaaggauggg

SEQ ID NO: 62712 - RNA, 19 nt, Artificial Sequence
  Description of Artificial Sequence: Synthetic oligonucleotide
aggauaaauccaaauagug

SEQ ID NO: 62713 - RNA, 19 nt, Artificial Sequence
  Description of Artificial Sequence: Synthetic oligonucleotide
ucuuuugacugaauguaau

SEQ ID NO: 62714 - RNA, 19 nt, Artificial Sequence
  Description of Artificial Sequence: Synthetic oligonucleotide
cagggcaucgccaaucugc

SEQ ID NO: 62715 - RNA, 19 nt, Artificial Sequence
  Description of Artificial Sequence: Synthetic oligonucleotide
uaaugguccacuguauagc

SEQ ID NO: 62716 - RNA, 19 nt, Artificial Sequence
  Description of Artificial Sequence: Synthetic oligonucleotide
uuuugccuggucauucacc

SEQ ID NO: 62717 - RNA, 19 nt, Artificial Sequence
  Description of Artificial Sequence: Synthetic oligonucleotide
cacaaaccgauacuggccc

SEQ ID NO: 62718 - RNA, 19 nt, Artificial Sequence
  Description of Artificial Sequence: Synthetic oligonucleotide
augaauugucuucuggccu

SEQ ID NO: 62719 - RNA, 19 nt, Artificial Sequence
  Description of Artificial Sequence: Synthetic oligonucleotide
uaggguguaccauucuaag

SEQ ID NO: 62720 - RNA, 19 nt, Artificial Sequence
  Description of Artificial Sequence: Synthetic oligonucleotide
aauuucuuagcagguguca

SEQ ID NO: 62721 - RNA, 19 nt, Artificial Sequence
  Description of Artificial Sequence: Synthetic oligonucleotide
auaccugccauugauauaa

SEQ ID NO: 62722 - RNA, 19 nt, Artificial Sequence
  Description of Artificial Sequence: Synthetic oligonucleotide
acauauagggagugaaccu

SEQ ID NO: 62723 - RNA, 19 nt, Artificial Sequence
  Description of Artificial Sequence: Synthetic oligonucleotide
uauuauggaaaagcaggug

SEQ ID NO: 62724 - RNA, 19 nt, Artificial Sequence
  Description of Artificial Sequence: Synthetic oligonucleotide
accuggaaaucuaauaguc

SEQ ID NO: 62725 - RNA, 19 nt, Artificial Sequence
  Description of Artificial Sequence: Synthetic oligonucleotide
ggaagcuuuuauuaggcug

SEQ ID NO: 62726 - RNA, 19 nt, Artificial Sequence
  Description of Artificial Sequence: Synthetic oligonucleotide
ugaagacagcgaauuaccu

SEQ ID NO: 62727 - RNA, 19 nt, Artificial Sequence
  Description of Artificial Sequence: Synthetic oligonucleotide
agauuaaucuuugauucgu

SEQ ID NO: 62728 - RNA, 19 nt, Artificial Sequence
  Description of Artificial Sequence: Synthetic oligonucleotide
gauaaacagaauggcuuag

SEQ ID NO: 62729 - RNA, 19 nt, Artificial Sequence
  Description of Artificial Sequence: Synthetic oligonucleotide
uuuauuaggcugagacacu

SEQ ID NO: 62730 - RNA, 19 nt, Artificial Sequence
  Description of Artificial Sequence: Synthetic oligonucleotide
uaauuucuuagcagguguc

SEQ ID NO: 62731 - RNA, 19 nt, Artificial Sequence
  Description of Artificial Sequence: Synthetic oligonucleotide
ucuguagcguaguuaacaa

SEQ ID NO: 62732 - RNA, 19 nt, Artificial Sequence
  Description of Artificial Sequence: Synthetic oligonucleotide
auuacauauagggagugaa

SEQ ID NO: 62733 - RNA, 19 nt, Artificial Sequence
  Description of Artificial Sequence: Synthetic oligonucleotide
guugcguuccuacuagcag

SEQ ID NO: 62734 - RNA, 19 nt, Artificial Sequence
  Description of Artificial Sequence: Synthetic oligonucleotide
gaccuauuaucauggcugc

SEQ ID NO: 62735 - RNA, 19 nt, Artificial Sequence
  Description of Artificial Sequence: Synthetic oligonucleotide
gaucagcgagcauuuguag

SEQ ID NO: 62736 - RNA, 19 nt, Artificial Sequence
  Description of Artificial Sequence: Synthetic oligonucleotide
uuccuacuagcagauauug

SEQ ID NO: 62737 - RNA, 19 nt, Artificial Sequence
  Description of Artificial Sequence: Synthetic oligonucleotide
cauuuguagucucccgugg

SEQ ID NO: 62738 - RNA, 19 nt, Artificial Sequence
  Description of Artificial Sequence: Synthetic oligonucleotide
uugcguuccuacuagcaga

SEQ ID NO: 62739 - RNA, 19 nt, Artificial Sequence
  Description of Artificial Sequence: Synthetic oligonucleotide
ucgaucagcgagcauuugu

SEQ ID NO: 62740 - RNA, 19 nt, Artificial Sequence
  Description of Artificial Sequence: Synthetic oligonucleotide
ucugcugcgcaaguuaaug

SEQ ID NO: 62741 - RNA, 19 nt, Artificial Sequence
  Description of Artificial Sequence: Synthetic oligonucleotide
cacgauuaguuuugccugg

SEQ ID NO: 62742 - RNA, 19 nt, Artificial Sequence
  Description of Artificial Sequence: Synthetic oligonucleotide
aaugggaccccaauucugu

SEQ ID NO: 62743 - RNA, 19 nt, Artificial Sequence
  Description of Artificial Sequence: Synthetic oligonucleotide
accuuugaccucccauacc

SEQ ID NO: 62744 - RNA, 19 nt, Artificial Sequence
  Description of Artificial Sequence: Synthetic oligonucleotide
auuccccaagcacugaaga

SEQ ID NO: 62745 - RNA, 19 nt, Artificial Sequence
  Description of Artificial Sequence: Synthetic oligonucleotide
uaaugacgcuuccacugcc

SEQ ID NO: 62746 - RNA, 19 nt, Artificial Sequence
  Description of Artificial Sequence: Synthetic oligonucleotide
gccaaauuaaacuucaaua

SEQ ID NO: 62747 - RNA, 19 nt, Artificial Sequence
  Description of Artificial Sequence: Synthetic oligonucleotide
caugaacauccuauugcag

SEQ ID NO: 62748 - RNA, 19 nt, Artificial Sequence
  Description of Artificial Sequence: Synthetic oligonucleotide
aucuguagcguaguuaaca

SEQ ID NO: 62749 - RNA, 19 nt, Artificial Sequence
  Description of Artificial Sequence: Synthetic oligonucleotide
auaauaauacggaacuaau

SEQ ID NO: 62750 - RNA, 19 nt, Artificial Sequence
  Description of Artificial Sequence: Synthetic oligonucleotide
ucaguuaggguguaccauu

SEQ ID NO: 62751 - RNA, 19 nt, Artificial Sequence
  Description of Artificial Sequence: Synthetic oligonucleotide
ugguuuuagacaguccacu

SEQ ID NO: 62752 - RNA, 19 nt, Artificial Sequence
  Description of Artificial Sequence: Synthetic oligonucleotide
gaggccaacuacaauuccc

SEQ ID NO: 62753 - RNA, 19 nt, Artificial Sequence
  Description of Artificial Sequence: Synthetic oligonucleotide
aucagcgagcauuuguagu

SEQ ID NO: 62754 - RNA, 19 nt, Artificial Sequence
  Description of Artificial Sequence: Synthetic oligonucleotide
auagacgacaccagccacg

SEQ ID NO: 62755 - RNA, 19 nt, Artificial Sequence
  Description of Artificial Sequence: Synthetic oligonucleotide
uguuugguuaaugacgcuu

SEQ ID NO: 62756 - RNA, 19 nt, Artificial Sequence
  Description of Artificial Sequence: Synthetic oligonucleotide
aaccaugaauugcugucau

SEQ ID NO: 62757 - RNA, 19 nt, Artificial Sequence
  Description of Artificial Sequence: Synthetic oligonucleotide
ugcgcaaguuaauguaaca

SEQ ID NO: 62758 - RNA, 19 nt, Artificial Sequence
  Description of Artificial Sequence: Synthetic oligonucleotide
ggggaaaugauaauuuuac

SEQ ID NO: 62759 - RNA, 19 nt, Artificial Sequence
  Description of Artificial Sequence: Synthetic oligonucleotide
augguuuuagacaguccac

SEQ ID NO: 62760 - RNA, 19 nt, Artificial Sequence
  Description of Artificial Sequence: Synthetic oligonucleotide
acaauuccuauaauuacau

SEQ ID NO: 62761 - RNA, 19 nt, Artificial Sequence
  Description of Artificial Sequence: Synthetic oligonucleotide
agcuugguaggaugaacug

SEQ ID NO: 62762 - RNA, 19 nt, Artificial Sequence
  Description of Artificial Sequence: Synthetic oligonucleotide
ccaauagacgacaccagcc

SEQ ID NO: 62763 - RNA, 19 nt, Artificial Sequence
  Description of Artificial Sequence: Synthetic oligonucleotide
uccccaagcacugaagagu

SEQ ID NO: 62764 - RNA, 19 nt, Artificial Sequence
  Description of Artificial Sequence: Synthetic oligonucleotide
cauccauaccacaguugcg

SEQ ID NO: 62765 - RNA, 19 nt, Artificial Sequence
  Description of Artificial Sequence: Synthetic oligonucleotide
gcuuauuauggaaaagcag

SEQ ID NO: 62766 - RNA, 19 nt, Artificial Sequence
  Description of Artificial Sequence: Synthetic oligonucleotide
ggaaauaagugucauuuua

SEQ ID NO: 62767 - RNA, 19 nt, Artificial Sequence
  Description of Artificial Sequence: Synthetic oligonucleotide
ucaauaucuguagcguagu

SEQ ID NO: 62768 - RNA, 19 nt, Artificial Sequence
  Description of Artificial Sequence: Synthetic oligonucleotide
cucucaguaugcagaagug

SEQ ID NO: 62769 - RNA, 19 nt, Artificial Sequence
  Description of Artificial Sequence: Synthetic oligonucleotide
uuauuaggcugagacacua

SEQ ID NO: 62770 - RNA, 19 nt, Artificial Sequence
  Description of Artificial Sequence: Synthetic oligonucleotide
aauacggaacuaaucucau

SEQ ID NO: 62771 - RNA, 19 nt, Artificial Sequence
  Description of Artificial Sequence: Synthetic oligonucleotide
ggguguaccauucuaagaa

SEQ ID NO: 62772 - RNA, 19 nt, Artificial Sequence
  Description of Artificial Sequence: Synthetic oligonucleotide
ggauaaauccaaauaguga

SEQ ID NO: 62773 - RNA, 19 nt, Artificial Sequence
  Description of Artificial Sequence: Synthetic oligonucleotide
auauugugcacgacacagg

SEQ ID NO: 62774 - RNA, 19 nt, Artificial Sequence
  Description of Artificial Sequence: Synthetic oligonucleotide
ugugcacgacacaggcagg

SEQ ID NO: 62775 - RNA, 19 nt, Artificial Sequence
  Description of Artificial Sequence: Synthetic oligonucleotide
uccuacuagcagauauugu

SEQ ID NO: 62776 - RNA, 19 nt, Artificial Sequence
  Description of Artificial Sequence: Synthetic oligonucleotide
aauucuaauuacagagauu

SEQ ID NO: 62777 - RNA, 19 nt, Artificial Sequence
  Description of Artificial Sequence: Synthetic oligonucleotide
caauagacgacaccagcca

SEQ ID NO: 62778 - RNA, 19 nt, Artificial Sequence
  Description of Artificial Sequence: Synthetic oligonucleotide
uguucgucuuucucagaga

SEQ ID NO: 62779 - RNA, 19 nt, Artificial Sequence
  Description of Artificial Sequence: Synthetic oligonucleotide
acggaacuaaucucauugu

SEQ ID NO: 62780 - RNA, 19 nt, Artificial Sequence
  Description of Artificial Sequence: Synthetic oligonucleotide
ugcugcgcaaguuaaugua

SEQ ID NO: 62781 - RNA, 19 nt, Artificial Sequence
  Description of Artificial Sequence: Synthetic oligonucleotide
guguguagguguuugagcu

SEQ ID NO: 62782 - RNA, 19 nt, Artificial Sequence
  Description of Artificial Sequence: Synthetic oligonucleotide
agauauugugcacgacaca

SEQ ID NO: 62783 - RNA, 19 nt, Artificial Sequence
  Description of Artificial Sequence: Synthetic oligonucleotide
caguuaaaguuauacacgu

SEQ ID NO: 62784 - RNA, 19 nt, Artificial Sequence
  Description of Artificial Sequence: Synthetic oligonucleotide
uuuugucgaucagcgagca

SEQ ID NO: 62785 - RNA, 19 nt, Artificial Sequence
  Description of Artificial Sequence: Synthetic oligonucleotide
aggguguaccauucuaaga

SEQ ID NO: 62786 - RNA, 19 nt, Artificial Sequence
  Description of Artificial Sequence: Synthetic oligonucleotide
ugguaggaugaacugcuua

SEQ ID NO: 62787 - RNA, 19 nt, Artificial Sequence
  Description of Artificial Sequence: Synthetic oligonucleotide
auuguaguguucauggcuu

SEQ ID NO: 62788 - RNA, 19 nt, Artificial Sequence
  Description of Artificial Sequence: Synthetic oligonucleotide
gcagauauugugcacgaca

SEQ ID NO: 62789 - RNA, 19 nt, Artificial Sequence
  Description of Artificial Sequence: Synthetic oligonucleotide
uuuaggcauagagggauau

SEQ ID NO: 62790 - RNA, 19 nt, Artificial Sequence
  Description of Artificial Sequence: Synthetic oligonucleotide
ggcuuagccaugcaaaaca

SEQ ID NO: 62791 - RNA, 19 nt, Artificial Sequence
  Description of Artificial Sequence: Synthetic oligonucleotide
acguaaaucugggacaaaa

SEQ ID NO: 62792 - RNA, 19 nt, Artificial Sequence
  Description of Artificial Sequence: Synthetic oligonucleotide
cauggcuuauuauggaaaa

SEQ ID NO: 62793 - RNA, 19 nt, Artificial Sequence
  Description of Artificial Sequence: Synthetic oligonucleotide
uuaucauggcugccaaauu

SEQ ID NO: 62794 - RNA, 19 nt, Artificial Sequence
  Description of Artificial Sequence: Synthetic oligonucleotide
cugcgcaaguuaauguaac

SEQ ID NO: 62795 - RNA, 19 nt, Artificial Sequence
  Description of Artificial Sequence: Synthetic oligonucleotide
accuauuaucauggcugcc

SEQ ID NO: 62796 - RNA, 19 nt, Artificial Sequence
  Description of Artificial Sequence: Synthetic oligonucleotide
auggcuuagccaugcaaaa

SEQ ID NO: 62797 - RNA, 19 nt, Artificial Sequence
  Description of Artificial Sequence: Synthetic oligonucleotide
guucauggcuuauuaugga

SEQ ID NO: 62798 - RNA, 19 nt, Artificial Sequence
  Description of Artificial Sequence: Synthetic oligonucleotide
auaauaugucacagagcag

SEQ ID NO: 62799 - RNA, 19 nt, Artificial Sequence
  Description of Artificial Sequence: Synthetic oligonucleotide
agacagcgaauuaccuucc

SEQ ID NO: 62800 - RNA, 19 nt, Artificial Sequence
  Description of Artificial Sequence: Synthetic oligonucleotide
cuggaaaucuaauagucau

SEQ ID NO: 62801 - RNA, 19 nt, Artificial Sequence
  Description of Artificial Sequence: Synthetic oligonucleotide
gguaggaugaacugcuuaa

SEQ ID NO: 62802 - RNA, 19 nt, Artificial Sequence
  Description of Artificial Sequence: Synthetic oligonucleotide
agcgagcauuuguagucuc

SEQ ID NO: 62803 - RNA, 19 nt, Artificial Sequence
  Description of Artificial Sequence: Synthetic oligonucleotide
auagugaacugugaugguu

SEQ ID NO: 62804 - RNA, 19 nt, Artificial Sequence
  Description of Artificial Sequence: Synthetic oligonucleotide
augaaggcuagaaaaggau

SEQ ID NO: 62805 - RNA, 19 nt, Artificial Sequence
  Description of Artificial Sequence: Synthetic oligonucleotide
aaccuugaacugguuaaaa

SEQ ID NO: 62806 - RNA, 19 nt, Artificial Sequence
  Description of Artificial Sequence: Synthetic oligonucleotide
ccaacgaguacaacuggag

SEQ ID NO: 62807 - RNA, 19 nt, Artificial Sequence
  Description of Artificial Sequence: Synthetic oligonucleotide
gcauuuguagucucccgug

SEQ ID NO: 62808 - RNA, 19 nt, Artificial Sequence
  Description of Artificial Sequence: Synthetic oligonucleotide
aauccacguucaugcuuca

SEQ ID NO: 62809 - RNA, 19 nt, Artificial Sequence
  Description of Artificial Sequence: Synthetic oligonucleotide
aaauuaucucaaggugcau

SEQ ID NO: 62810 - RNA, 19 nt, Artificial Sequence
  Description of Artificial Sequence: Synthetic oligonucleotide
auguacuauaggaagcuuu

SEQ ID NO: 62811 - RNA, 19 nt, Artificial Sequence
  Description of Artificial Sequence: Synthetic oligonucleotide
ucaucguguucuggaauac

SEQ ID NO: 62812 - RNA, 19 nt, Artificial Sequence
  Description of Artificial Sequence: Synthetic oligonucleotide
gacugggcaagguaugugu

SEQ ID NO: 62813 - RNA, 19 nt, Artificial Sequence
  Description of Artificial Sequence: Synthetic oligonucleotide
gaagacagcgaauuaccuu

SEQ ID NO: 62814 - RNA, 19 nt, Artificial Sequence
  Description of Artificial Sequence: Synthetic oligonucleotide
gggagugaaccuugaacug

SEQ ID NO: 62815 - RNA, 19 nt, Artificial Sequence
  Description of Artificial Sequence: Synthetic oligonucleotide
guguagguguuugagcuuc

SEQ ID NO: 62816 - RNA, 19 nt, Artificial Sequence
  Description of Artificial Sequence: Synthetic oligonucleotide
gaugaacugcuuaauacuu

SEQ ID NO: 62817 - RNA, 19 nt, Artificial Sequence
  Description of Artificial Sequence: Synthetic oligonucleotide
agcagauauugugcacgac

SEQ ID NO: 62818 - RNA, 19 nt, Artificial Sequence
  Description of Artificial Sequence: Synthetic oligonucleotide
uguguagguguuugagcuu

SEQ ID NO: 62819 - RNA, 19 nt, Artificial Sequence
  Description of Artificial Sequence: Synthetic oligonucleotide
cucaucguguucuggaaua

SEQ ID NO: 62820 - RNA, 19 nt, Artificial Sequence
  Description of Artificial Sequence: Synthetic oligonucleotide
agggauauguuaauccauu

SEQ ID NO: 62821 - RNA, 19 nt, Artificial Sequence
  Description of Artificial Sequence: Synthetic oligonucleotide
auagggagugaaccuugaa

SEQ ID NO: 62822 - RNA, 19 nt, Artificial Sequence
  Description of Artificial Sequence: Synthetic oligonucleotide
acugucaguuaggguguac

SEQ ID NO: 62823 - RNA, 19 nt, Artificial Sequence
  Description of Artificial Sequence: Synthetic oligonucleotide
uggcccuuauccagucuac

SEQ ID NO: 62824 - RNA, 19 nt, Artificial Sequence
  Description of Artificial Sequence: Synthetic oligonucleotide
guaggauaguaaauaucaa

SEQ ID NO: 62825 - RNA, 19 nt, Artificial Sequence
  Description of Artificial Sequence: Synthetic oligonucleotide
caguugcguuccuacuagc

SEQ ID NO: 62826 - RNA, 19 nt, Artificial Sequence
  Description of Artificial Sequence: Synthetic oligonucleotide
uaccaagguccuuguuuac

SEQ ID NO: 62827 - RNA, 19 nt, Artificial Sequence
  Description of Artificial Sequence: Synthetic oligonucleotide
uguuaccaagguccuuguu

SEQ ID NO: 62828 - RNA, 19 nt, Artificial Sequence
  Description of Artificial Sequence: Synthetic oligonucleotide
auacggaacuaaucucauu

SEQ ID NO: 62829 - RNA, 19 nt, Artificial Sequence
  Description of Artificial Sequence: Synthetic oligonucleotide
ucugacacauuagguguuu

SEQ ID NO: 62830 - RNA, 19 nt, Artificial Sequence
  Description of Artificial Sequence: Synthetic oligonucleotide
cucaaggugcauucaauau

SEQ ID NO: 62831 - RNA, 19 nt, Artificial Sequence
  Description of Artificial Sequence: Synthetic oligonucleotide
gggaguuuacuguucucuc

SEQ ID NO: 62832 - RNA, 19 nt, Artificial Sequence
  Description of Artificial Sequence: Synthetic oligonucleotide
ccuuauccagucuacuuca

SEQ ID NO: 62833 - RNA, 19 nt, Artificial Sequence
  Description of Artificial Sequence: Synthetic oligonucleotide
guccugguaaguaaaacau

SEQ ID NO: 62834 - RNA, 19 nt, Artificial Sequence
  Description of Artificial Sequence: Synthetic oligonucleotide
uuugucgaucagcgagcau

SEQ ID NO: 62835 - RNA, 19 nt, Artificial Sequence
  Description of Artificial Sequence: Synthetic oligonucleotide
auugcgccucacaucuguc

SEQ ID NO: 62836 - RNA, 19 nt, Artificial Sequence
  Description of Artificial Sequence: Synthetic oligonucleotide
uuauaucgucugccucauc

SEQ ID NO: 62837 - RNA, 19 nt, Artificial Sequence
  Description of Artificial Sequence: Synthetic oligonucleotide
cacuccucucuuaggcuuc

SEQ ID NO: 62838 - RNA, 19 nt, Artificial Sequence
  Description of Artificial Sequence: Synthetic oligonucleotide
ccccaagcacugaagagug

SEQ ID NO: 62839 - RNA, 19 nt, Artificial Sequence
  Description of Artificial Sequence: Synthetic oligonucleotide
uacuuaucgcagagacauu

SEQ ID NO: 62840 - RNA, 19 nt, Artificial Sequence
  Description of Artificial Sequence: Synthetic oligonucleotide
auacuggcccuuauccagu

SEQ ID NO: 62841 - RNA, 19 nt, Artificial Sequence
  Description of Artificial Sequence: Synthetic oligonucleotide
agggcaucgccaaucugcu

SEQ ID NO: 62842 - RNA, 19 nt, Artificial Sequence
  Description of Artificial Sequence: Synthetic oligonucleotide
gagugaaccuugaacuggu

SEQ ID NO: 62843 - RNA, 19 nt, Artificial Sequence
  Description of Artificial Sequence: Synthetic oligonucleotide
aucaaaguuuagaggcaaa

SEQ ID NO: 62844 - RNA, 19 nt, Artificial Sequence
  Description of Artificial Sequence: Synthetic oligonucleotide
ucgaucggagccugauguu

SEQ ID NO: 62845 - RNA, 19 nt, Artificial Sequence
  Description of Artificial Sequence: Synthetic oligonucleotide
ggaauacuuaucgcagaga

SEQ ID NO: 62846 - RNA, 19 nt, Artificial Sequence
  Description of Artificial Sequence: Synthetic oligonucleotide
cuauaccuggaaaucuaau

SEQ ID NO: 62847 - RNA, 19 nt, Artificial Sequence
  Description of Artificial Sequence: Synthetic oligonucleotide
cuuauucccucaggcuguc

SEQ ID NO: 62848 - RNA, 19 nt, Artificial Sequence
  Description of Artificial Sequence: Synthetic oligonucleotide
cagcacacggaguugcucu

SEQ ID NO: 62849 - RNA, 19 nt, Artificial Sequence
  Description of Artificial Sequence: Synthetic oligonucleotide
cccacgauuaguuuugccu

SEQ ID NO: 62850 - RNA, 19 nt, Artificial Sequence
  Description of Artificial Sequence: Synthetic oligonucleotide
cauugcgccucacaucugu

SEQ ID NO: 62851 - RNA, 19 nt, Artificial Sequence
  Description of Artificial Sequence: Synthetic oligonucleotide
augggcucgaucggagccu

SEQ ID NO: 62852 - RNA, 19 nt, Artificial Sequence
  Description of Artificial Sequence: Synthetic oligonucleotide
cauauagggagugaaccuu

SEQ ID NO: 62853 - RNA, 19 nt, Artificial Sequence
  Description of Artificial Sequence: Synthetic oligonucleotide
ucccguggcauugcgccuc

SEQ ID NO: 62854 - RNA, 19 nt, Artificial Sequence
  Description of Artificial Sequence: Synthetic oligonucleotide
gacagcgaauuaccuuccu

SEQ ID NO: 62855 - RNA, 19 nt, Artificial Sequence
  Description of Artificial Sequence: Synthetic oligonucleotide
guacuauaggaagcuuuua

SEQ ID NO: 62856 - RNA, 19 nt, Artificial Sequence
  Description of Artificial Sequence: Synthetic oligonucleotide
ccaaauagugaacugugau

SEQ ID NO: 62857 - RNA, 19 nt, Artificial Sequence
  Description of Artificial Sequence: Synthetic oligonucleotide
agaaaaggaugggcucgau

SEQ ID NO: 62858 - RNA, 19 nt, Artificial Sequence
  Description of Artificial Sequence: Synthetic oligonucleotide
cugcugcgcaaguuaaugu

SEQ ID NO: 62859 - RNA, 19 nt, Artificial Sequence
  Description of Artificial Sequence: Synthetic oligonucleotide
gcgagcauuuguagucucc

SEQ ID NO: 62860 - RNA, 19 nt, Artificial Sequence
  Description of Artificial Sequence: Synthetic oligonucleotide
gucaguuaggguguaccau

SEQ ID NO: 62861 - RNA, 19 nt, Artificial Sequence
  Description of Artificial Sequence: Synthetic oligonucleotide
uaccacaguugcguuccua

SEQ ID NO: 62862 - RNA, 19 nt, Artificial Sequence
  Description of Artificial Sequence: Synthetic oligonucleotide
gucgaucagcgagcauuug

SEQ ID NO: 62863 - RNA, 19 nt, Artificial Sequence
  Description of Artificial Sequence: Synthetic oligonucleotide
aguucccggcauccugaua

SEQ ID NO: 62864 - RNA, 19 nt, Artificial Sequence
  Description of Artificial Sequence: Synthetic oligonucleotide
cuuauaucgucugccucau

SEQ ID NO: 62865 - RNA, 19 nt, Artificial Sequence
  Description of Artificial Sequence: Synthetic oligonucleotide
guuccuacuagcagauauu

SEQ ID NO: 62866 - RNA, 19 nt, Artificial Sequence
  Description of Artificial Sequence: Synthetic oligonucleotide
cacauacaauuccuauaau

SEQ ID NO: 62867 - RNA, 19 nt, Artificial Sequence
  Description of Artificial Sequence: Synthetic oligonucleotide
agugaaccuugaacugguu

SEQ ID NO: 62868 - RNA, 19 nt, Artificial Sequence
  Description of Artificial Sequence: Synthetic oligonucleotide
cacugccaguaauggucca

SEQ ID NO: 62869 - RNA, 19 nt, Artificial Sequence
  Description of Artificial Sequence: Synthetic oligonucleotide
gggcggguugccauucccc

SEQ ID NO: 62870 - RNA, 19 nt, Artificial Sequence
  Description of Artificial Sequence: Synthetic oligonucleotide
cucugacacauuagguguu

SEQ ID NO: 62871 - RNA, 19 nt, Artificial Sequence
  Description of Artificial Sequence: Synthetic oligonucleotide
gcgcaaguuaauguaacau

SEQ ID NO: 62872 - RNA, 19 nt, Artificial Sequence
  Description of Artificial Sequence: Synthetic oligonucleotide
cgaucagcgagcauuugua

SEQ ID NO: 62873 - RNA, 19 nt, Artificial Sequence
  Description of Artificial Sequence: Synthetic oligonucleotide
ggagacuccucuguuuggu
